(19) United States
(12) Patent Application Publication
(10) Pub. No.: US 2025/0179441 A1
(43) Pub. Date: Jun. 5, 2025

(54) ADENO-ASSOCIATED VIRUS COMPOSITIONS FOR TARGETED GENE THERAPY

(71) Applicant: California Institute of Technology, Pasadena, CA (US)

(72) Inventors: Viviana Gradinaru, Pasadena, CA (US); Nicholas C. Flytzanis, Thousand Oaks, CA (US); Nicholas S. Goeden, Thousand Oaks, CA (US)

(21) Appl. No.: 18/763,051

(22) Filed: Jul. 3, 2024

Related U.S. Application Data
(63) Continuation of application No. 17/503,972, filed on Oct. 18, 2021, now Pat. No. 12,049,648.
Application No. 17/503,972 is a continuation of application No. 16/582,635, filed on Sep. 25, 2019, now Pat. No. 11,149,256.
(60) Provisional application No. 62/736,904, filed on Sep. 26, 2018.
(60) Provisional application No. 62/832,812, filed on Apr. 11, 2019.

(51) Int. Cl. C12N 7/00

(52) U.S. Cl. CPC C12N 7/00; C12N 2750/14071; C12N 2750/14121; C12N 2750/14122

(57) ABSTRACT

Described herein are compositions and kits comprising recombinant adeno-associated viruses (rAAVs) with tropisms showing increased specificity and efficiency of viral transduction in targeted cell-types, for e.g., the brain, and lung. The rAAV compositions described herein also have tropisms showing decreased specificity and decreased efficiency of viral transduction in an off-target cell type, for e.g., the liver. The rAAV compositions described herein encapsidate a transgene, such a therapeutic nucleic acid. Upon systemic delivery to a subject, the rAAV is capable of increased specificity and increased transduction of the transgene in a target cell-type, as compared to a parental or reference AAV.

### CROSS-REFERENCE

[0001] This application claims the benefit of U.S. Provisional Application Ser. No. 62/736,904, filed Sep. 26, 2018, and U.S. Provisional Application Ser. No. 62/832,812, filed Apr. 11, 2019, both of which are incorporate herein by reference in their entirety.

### STATEMENT REGARDING FEDERALLY SPONSORED RESEARCH OR DEVELOPMENT

[0002] This invention was made with government support under Grant No. NS087949 awarded by the National Institutes of Health and under grant No. W911NF-17-2-0036 awarded by DARPA. The government has certain rights in the invention.

### SEQUENCE LISTING

[0003] The instant application contains a Sequence Listing which has been submitted electronically in ASCII format and is hereby incorporated by reference in its entirety. Said ASCII copy, created on Sep. 20, 2019, is named 38075-733_201_SL.txt and is 10,656,833 bytes in size.

### BACKGROUND

[0004] Recombinant adeno-associated viruses (rAAVs) are increasingly used for gene delivery in basic scientific research and therapeutic applications because of their ability to transduce both dividing and non-dividing cells, their long-term persistence as episomal DNA in infected cells, and their low immunogenicity. These characteristics make them appealing for applications in both basic science and in clinics, such as gene therapy. Current gene therapy approaches for many disorders have focused on direct delivery to increase transduction efficiency and restrict expression only to the cell types affected. However, this administrative route has led to limited success across many clinical trials and diseases due to the limited coverage of localized delivery.

[0005] Intravenous administration addresses these limitations and allows for broad and efficient access to tissues and organs throughout the body in a non-invasive manner. Unfortunately, the naturally occurring serotypes have limited transduction of certain cell types and organs, and non-specific, overlapping tropisms in others. This leads to several complications in gene therapy applications, including but not limited to off-target effects due to transduction of unimpacted organs and cell types (in particular, the liver), and the necessity for a larger viral load to achieve sufficient therapeutic levels in the tissue or organ of interest. In addition, even with systemic delivery, current rAAV-mediated gene therapies lack the specificity to cross the blood brain barrier (BBB) or the epithelium, limiting their reach as therapeutic interventions for disease and conditions of the brain or organs (e.g., the lung).

[0006] Thus, there is a need for rAAVs capable of achieving high specificity to target specific cell types or organs and low specificity for unimpacted (off-target) organs and cell types in a subject when delivered to the subject systemically (e.g., intravenously, intranasally).

### SUMMARY

[0007] Disclosed herein are recombinant AAVs (rAAVs) comprising capsids with specificity engineered into the capsid structure through iterative rounds of positive and negative selection. This engineering yields rAAV variants with altered specificity for certain tissues or organs relative to the unmodified parental capsid from which they were derived. In some embodiments, the rAAV variant comprises an AAV capsid protein having a 7-mer peptide substitution at the residues corresponding to amino acids 452-458 of the AAV9 capsid protein VP1. In certain embodiments, the substitution is of amino acids 452-458 of AAV9 VP1. In certain other embodiments, the substitution is of amino acids 452-458 of AAV-PHP.B VP1. In yet other embodiments, the substitution is of amino acids 452-458 of AAV-PHP.eB VP1. In some embodiments, the substitution reduces the tropism of the rAAV capsid for a cell or tissue, enabling the rAAV variant to reduce the off-target effects of therapeutic viral transduction, thereby obviating a need for larger viral dosage amounts. In some embodiments, the substitution increases the tropism of the rAAV capsid for a cell or tissue, enabling the rAAV variant to achieve widespread transduction to a target environment (e.g., target cell types or tissues) in a subject upon systemic delivery (e.g., intravenous injection). Typically, the 7-mer peptide substitution is not ILGTGTS (SEQ ID NO: 45479), QSSQTPR (SEQ ID NO: 45479), or TLAVPFK (SEQ ID NO: 45477). The rAAVs described herein are identified using a modified version of the Cre recombination-based AAV targeted evolution (CREATE) method. The Multiplexed-CREATE (M-CREATE) method generates enhanced transduction efficiency and/or specificity by introducing variations in the capsid protein sequence, unbiased in vivo selection and recovery of only those variants that travel to defined cell populations, cross the cell membrane, travel to the nucleus, and unpackage and express their genetic payload. Variant capsids exhibiting the most desirable tropism (e.g., enhanced efficiency and specificity for a particular in vivo environment) are recovered and identified by deep sequencing. Strategies for unbiased selection and analysis include determining variants' enrichment score (by normalizing the target tissue library to starting virus library) and unbiased propagation between rounds of selections through a synthetic library construction (where each variant is represented equally). The detailed characterizations of the resultant libraries from sequencing data is also described herein, which provide useful insights on the selection of variants towards a target.

[0008] Also disclosed herein are AAV capsid libraries comprising AAV capsid proteins having 7-mer peptide substitutions at the residues corresponding to amino acids 452-458 of AAV9 VP1. In some embodiments, the library is a library of capsids comprising 7-mer peptide substitutions at amino acids 452-458 of the AAV9 variant AAV-PHP.eB or AAV-PHP.B. Such libraries find particular use in in vivo positive selections across different brain cell types (e.g., endothelial cells, neurons, and astrocytes) and negative selections across the liver, such libraries having been shown herein to yield a large pool of AAV9 variants with enhanced ability to cross the BBB, broadly transduce the central nervous system (CNS), and de-target off-target in vivo environments, e.g., the liver. In other embodiments, the library is an AAV capsid library comprising AAV capsid proteins having 7-mer peptide substitutions at amino acids 452-458 of AAV9. Such libraries find particular use in in vivo selections across different organs, such as the spinal cord, brain, a liver, a stomach, an intestine, a lung, a heart, teste, spleen, adipose (fat), and muscle.

[0009] Also disclosed herein are methods and kits for producing therapeutic recombinant AAV (rAAV) particles, as well as methods and pharmaceutical compositions or formulations comprising the rAAV particles for the treatment of a disease or condition affecting, for e.g., the CNS, PNS, or target in vivo environment in a subject in need thereof (e.g., lung).

[0010] Aspects disclosed herein provide recombinant AAV (rAAVs), the rAAV comprising: (a) a variant AAV capsid comprising a variant AAV capsid protein comprising an amino acid substitution of three or more amino acids within a 7-mer peptide sequence at a 3-fold axis of symmetry of a corresponding parental AAV capsid protein, wherein the 7-mer peptide sequence is at an amino acid position that corresponds to amino acid residues 452-458 of AAV9 VP1 (SEQ ID NO:1), and wherein the amino acid substitution is not ILGTGTS (SEQ ID NO: 45479), QSSQTPR (SEQ ID NO: 45479), or TLAVPFK (SEQ ID NO: 45477); and (b) a heterologous polynucleotide comprising a nucleotide sequence encoding a gene product. In some embodiments, the variant AAV capsid has an increased tropism for a target tissue or a target cell, when measured in a subject, relative to a tropism of the corresponding parental AAV capsid. In some embodiments, the target tissue or the target cell comprises a tissue or a cell of a central nervous system (CNS) or a peripheral nervous system (PNS), or a combination thereof. In some embodiments, the variant AAV capsid has a decreased tropism for an off-target tissue comprising liver tissue or an off-target cell comprising a liver cell, when measured in a subject, relative to the tropism of the corresponding parental AAV capsid. In some embodiments, the three or more amino acids comprise three contiguous amino acids, each amino acid independently selected from the group consisting of A, D, E, G, K, H, M, N, P, L, Q, S, T, and V at amino acid positions in the parental AAV capsid protein corresponding to amino acid residues 452-454, 453-455, 454-456, 455-457, or 456-458 of AAV9 VP1 (SEQ ID NO: 1). In some embodiments, the three or more amino acids comprise four contiguous amino acids, each amino acid independently selected from the group consisting of A, D, E, G, K, H, M, N, P, L, Q, S, T, and V at amino acid positions in the parental AAV capsid protein corresponding to amino acid residues 452-455, 453-456, 454-457, or 455-458 of AAV9 VP1 (SEQ ID NO: 1). In some embodiments, three or more amino acids comprise at least five contiguous amino acids, each amino acid independently selected from the group consisting of A, D, E, G, K, H, M, N, P, L, Q, S, T, and V at amino acid positions in the parental AAV capsid protein corresponding to amino acid residues 452-456, 453-457, or 454-458 of AAV9 VP1 (SEQ ID NO: 1). In some embodiments, the three or more amino acids comprise three or more of: (a) A, D, E, G, H, M, N, Q, S, T, or V substituted at an amino acid position corresponding to amino acid residue 452 of AAV9 VP1 (SEQ ID NO: 1); (b) A, D, E, G, K, N, Q, S, T, or V substituted at an amino acid position corresponding to amino acid residue 453 of AAV9 VP1 (SEQ ID NO: 1); (c) A, D, E, G, K, N, Q, S, T, or V substituted at amino acid position corresponding to amino acid residue 454 of AAV9 VP1(SEQ ID NO: 1); (d) A, D, E, G, K, N, P, Q, S, or T substituted at an amino acid position corresponding to amino acid residue 455 of AAV9 VP1(SEQ ID NO: 1); (e) A, D, E, G, H, K, N, P, Q, S, or T substituted at an amino acid position corresponding to amino acid residue 456 of AAV9 VP1(SEQ ID NO: 1); (f) A, D, E, G, K, N, P, S, T, or V substituted at an amino acid position corresponding to amino acid residue 457 of AAV9 VP1 (SEQ ID NO: 1); and (g) A, E, G, H, K, L, N, Q, S, T, or V substituted at amino acid position corresponding to amino acid residue 458 of AAV9 VP1(SEQ ID NO: 1). In some embodiments, the three or more amino acids comprise three or more of: (a) A, D, E, G, H, K, L, M, N, Q, S, T, or V substituted at an amino acid position corresponding to amino acid residue 452 of AAV9 VP1 (SEQ ID NO: 1); (b) A, D, G, H, M, N, P, Q, S, T, or V substituted at an amino acid position corresponding to amino acid residue 453 of AAV9 VP1 (SEQ ID NO: 1); (c) A, D, E, G, K, N, Q, S, T, or V substituted at amino acid position corresponding to amino acid residue 454 of AAV9 VP1(SEQ ID NO: 1); (d) A, D, E, G, K, N, P, Q, S, or T substituted at an amino acid position corresponding to amino acid residue 455 of AAV9 VP1 (SEQ ID NO: 1); (e) A, D, G, K, N, P, Q, S, or T substituted at an amino acid position corresponding to amino acid residue 456 of AAV9 VP1 (SEQ ID NO: 1); (f) A, G, H, L, M, N, P, Q, S, T, or V substituted at an amino acid position corresponding to amino acid residue 457 of AAV9 VP1(SEQ ID NO: 1); and (g) A, D, E, G, H, 1, K, L, N, Q, R, S, T, or V substituted at amino acid position corresponding to amino acid residue 458 of AAV9 VP1 (SEQ ID NO: 1). In some embodiments, the amino acid substitution comprises an amino acid sequence selected from DGAATKN (SEQ ID NO: 3943), and DGQSSKS (SEQ ID NO: 2764). In some embodiments, the three or more amino acids comprises three or more of: (a) A, D, G, L, N, Q, S, or T substituted at an amino acid at a position corresponding to amino acid residue 452 of AAV9 VP1 (SEQ ID NO: 1); (b) A, G, N, P, Q, R, S, or substituted at an amino acid at a position corresponding to amino acid residue 453 of AAV9 VP1 (SEQ ID NO: 1); (c) A, D, G, N, S, or T substituted at an amino acid at a position corresponding to amino acid residue 454 of AAV9 VP1 (SEQ ID NO: 1); (d) A, D, G, K, N, P, Q, S, or T substituted at an amino acid at a position corresponding to amino acid residue 455 of AAV9 VP1 (SEQ ID NO: 1); (e) A, G, K, N, P, R, S, or T substituted at an amino acid at a position corresponding to amino acid residue 456 of AAV9 VP (SEQ ID NO: 1); (f) A, G, K, N, P, R, S, T, or V substituted at an amino acid at a position corresponding to amino acid residue 457 of AAV9 VP1 (SEQ ID NO: 1); and (g) A, G, K, L, R, S, T, or V substituted at an amino acid at a position corresponding to amino acid residue 458 of AAV9 VP1 (SEQ ID NO: 1). In some embodiments, the amino acid substitution comprises an amino acid sequence selected from the group consisting of LQTSSPG (SEQ ID NO: 2933), QQGKQSV (SEQ ID NO: 79), SINTKTN (SEQ ID NO: 45475), SNGTKQT (SEQ ID NO: 442), GSGKTAA (SEQ ID NO: 88), MGDKPTR (SEQ ID NO: 2466), QPSGGNT (SEQ ID NO: 2672), ERGANTK (SEQ ID NO: 5192), TTGGHSS (SEQ ID NO: 2743), GTTKTSE (SEQ ID NO: 3064), GTGTSVL (SEQ ID NO: 11958), NQSGTKG (SEQ ID NO: 780), KGPGQMG (SEQ ID NO: 45476), and GTPSKAG (SEQ ID NO: 2741). In some embodiments, the target tissue or the target cell in the tissue is selected from the group consisting of lung, intestine, kidney, heart, and stomach. In some embodiments, the three or more amino acids comprise three contiguous amino acids at an amino acid position corresponding to amino acid residues 452-454, 453-455, 454-456, 455-457, or 456-458 of AAV9 VP1, wherein: (a) 452 is selected from the group consisting of N, K, R, and T; (b) 453 is selected from the group consisting of L, N, P, and S; (c) 454 is selected from the group consisting of A, D, G, N, S, and T; (d) 455 is selected from the group consisting of L, P, S, and T; (e) 456 is selected from the group consisting of P, R, and S; (f) 457 is selected from the group consisting of G, N, S, and T; and (g) 458 is selected from the group consisting of I, L, and R. In some embodiments, the three or more amino acids comprise: (a) four contiguous amino acids at an amino acid position corresponding to amino acid residues 452-455, 453-456, 454-457, or 455-458 of AAV9 VP1 (SEQ ID NO: 1); (b) five contiguous amino acids at an amino acid position corresponding to amino acid residues 452-456, 453-457, or 453-458 of AAV9 VP1 (SEQ ID NO: 1); (c) six contiguous amino acids at an amino acid position corresponding to amino acid residues 452-457 or 453-458 of AAV9 VP1 (SEQ ID NO: 1); and (d) seven contiguous amino acids at an amino acid position corresponding to amino acid residues 452-458 of AAV9 VP1 (SEQ ID NO: 1). In some embodiments, the target tissue is lung, and the three or more amino acids are provided in an amino acid sequence comprising KDNTPGR (SEQ ID NO: 32538), NNLPRNL (SEQ ID NO: 32867), or any amino acid sequence provided in FIG. 13. In some embodiments, the target tissue is intestine, and the three or more amino acids are provided in an amino acid sequence comprising RESSPSL (SEQ ID NO: 26474), KDNTPGR (SEQ ID NO: 26584), or any amino acid sequence provided in FIG. 5. In some embodiments, the tissue is kidney, and the three or more amino acids are provided in an amino acid sequence comprising RVPLSTI (SEQ ID NO: 26933), NNLPRNL (SEQ ID NO: 27530), KDNTPGR (SEQ ID NO: 28509), or any amino acid sequence provided in FIG. 6. In some embodiments, the tissue is heart, and the three or more amino acids are provided in an amino acid sequence comprising KDNTPGR (SEQ ID NO: 25633), or any amino acid sequence provided in FIG. 4. In some embodiments, the tissue is stomach, and the three or more amino acids are provided in an amino acid sequence comprising RESSPSL (SEQ ID NO: 31904) or any amino acid sequence of FIG. 12. In some embodiments, the corresponding parental AAV capsid protein is AAV9 VP1 or a variant thereof. In some embodiments, the AAV9 VP1 variant has a sequences identity of 90% or more to SEQ ID NO:1. In some embodiments, the AAV9 VP1 variant has a sequences identity of 95% or more to SEQ ID NO:1. In some embodiments, the corresponding parental AAV capsid protein further comprises an insertion of an amino acid sequence selected from the group consisting of TLAXPFK (SEQ ID NO: 46424), TLAX (SEQ ID NO: 46425), LAVX (SEQ ID NO: 46426), AVPX (SEQ ID NO: 46427), and VPFX (SEQ ID NO: 46428), at an amino acid position corresponding to 588_589 of the AAV9 VP1 (SEQ ID NO: 1), wherein X is any amino acid other than V. In some embodiments, the parental AAV capsid protein is from AAV-PHP.B or AAV-PHP.eB. In some embodiments, the rAAV is isolated and purified.

[0011] Aspects disclosed herein provide pharmaceutical formulations comprising the rAAV of the present disclosure and a pharmaceutical excipient. In some embodiments, the pharmaceutical formulation is formulated for intravenous, intraarterial, intranasal, intrathecal, intracisternae magna, or subcutaneous injection.

[0012] Aspects disclosed herein provide methods of treating a disease or condition in a subject, the method comprising administering to the subject a therapeutically effective amount the rAAV of the present disclosure, or the pharmaceutical formulation of the present disclosure, wherein the gene product is a therapeutic gene product. In some embodiments, the administering is by intravenous, intraarterial, intranasal, intrathecal, intracisternae magna, or subcutaneous injection. In some embodiments, the disease or the condition is selected from the group consisting of pulmonary fibrosis, surfactant protein disorders, peroxisome biogenesis disorders, or COPD. In some embodiments, the disease of the condition is a central nervous system (CNS) peripheral nervous system (PNS) disorder.

[0013] A method of manufacturing an rAAV of the present disclosure, the method comprising: (a) introducing into a cell a nucleic acid comprising: (i) a first nucleic acid sequence encoding a therapeutic gene expression product enclosed by a 5′ and a 3′ inverted terminal repeat (ITR) sequence; (ii) a second nucleic acid sequence encoding a viral genome comprising a 5′ ITR sequence, a Replication (Rep) gene, Capsid (Cap) gene, and a 3′ ITR, wherein the Cap gene encodes a rAAV capsid protein; and (iii) a third nucleic acid sequence encoding a first helper virus protein selected from the group consisting of E4orf6, E2a, and VA RNA, and optionally, a second helper virus protein comprising E1a or E1b55k; (b) expressing in the cell the AAV capsid protein; (c) assembling the rAAV of the present disclosure; and (d) packaging the first nucleic acid sequence in the rAAV. Aspects disclosed herein provide variant adeno-associated virus (AAV) capsids comprising: (a) at least one of a decreased specificity and a decreased transduction efficiency, as measured in a liver of a primate subject when delivered to the primate subject intravenously, relative to a corresponding parental AAV capsid with an AAV capsid protein of SEQ ID NO: 1; and (b) at least one of an increased specificity and an increased transduction efficiency, as measured in a central nervous system (CNS) of the primate subject when delivered to the primate subject intravenously, relative to the corresponding parental AAV capsid. In some embodiments, the variant AAV capsids further comprising a variant AAV capsid protein comprising an amino acid substitution of three or more amino acids within a 7-mer peptide sequence at an amino acid position that corresponds to amino acid residues 452-458 of AAV9 VP1 (SEQ ID NO:1). In some embodiments, the three or more amino acids comprise three contiguous amino acids, each amino acid independently selected from the group consisting of A, D, E, G, K, H, M, N, P, L, Q, S, T, and V at amino acid positions in the parental AAV capsid protein corresponding to amino acid residues 452-454, 453-455, 454-456, 455-457, or 456-458 of AAV9 VP1 (SEQ ID NO: 1). In some embodiments, the 7-mer peptide sequence is DGAATKN (SEQ ID NO: 3943). In some embodiments, the variant AAV capsid protein further comprises an amino acid sequence that is at least 96% identical to an amino acid sequence between amino acid 217 to amino acid 736 of SEQ ID NO: 1. In some embodiments, the amino acid substitution is not ILGTGTS (SEQ ID NO: 45479), QSSQTPR (SEQ ID NO: 45479), or TLAVPFK (SEQ ID NO: 45477). In some embodiments, the variant AAV capsid protein further comprises an insertion of an amino acid sequence selected from the group consisting of TLAXPFK (SEQ ID NO: 46424), TLAX (SEQ ID NO: 46425), LAVX (SEQ ID NO: 46426), AVPX (SEQ ID NO: 46427), and VPFX (SEQ ID NO: 46428), at an amino acid position corresponding to 588_589 of the AAV9 VP1 (SEQ ID NO: 1), wherein X is any amino acid other than V. Aspects disclosed herein provide variant adeno-associated virus (AAV) capsids comprising: (a) a variant AAV capsid protein comprising an amino acid sequence with an amino acid substitution of three or more amino acids within a 7-mer peptide sequence at an amino acid position that corresponds to amino acid residues 452-458 of AAV9 VP1 (SEQ ID NO: 1); and (b) at least one of an increased specificity and increased transduction efficiency in a target tissue as measured in the target tissue of a subject when delivered to the subject intranasally or intravenously, relative to a corresponding parental AAV capsid protein of SEQ ID NO: 1 or SEQ ID NO: 2, wherein the target tissue is selected from the group consisting of lung, intestine, kidney, heart, and stomach. In some embodiments, the three or more amino acids comprise three contiguous amino acids at an amino acid position corresponding to amino acid residues 452-454, 453-455, 454-456, 455-457, or 456-458 of AAV9 VP1, wherein: (a) 452 is selected from the group consisting of N, K, R, and T; (b) 453 is selected from the group consisting of L, N, P, and S; (c) 454 is selected from the group consisting of A. D, G, N, S, and T; (d) 455 is selected from the group consisting of L, P, S, and T; (e) 456 is selected from the group consisting of P, R, and S; (f) 457 is selected from the group consisting of G, N, S, and T; and (g) 458 is selected from the group consisting of I, L, and R. In some embodiments, the target tissue is the lung, and the three or more amino acids are provided in an amino acid sequence comprising KDNTPGR (SEQ ID NO: 32538), NNLPRNL (SEQ ID NO: 32867), or any amino acid sequence provided in FIG. 13. In some embodiments, the target tissue is the intestine, and the three or more amino acids are provided in an amino acid sequence comprising RESSPSL (SEQ ID NO: 26474), KDNTPGR (SEQ ID NO: 26584), or any amino acid sequence provided in FIG. 5. In some embodiments, the tissue is the kidney, and the three or more amino acids are provided in an amino acid sequence comprising RVPLSTI (SEQ ID NO: 26933), NNLPRNL (SEQ ID NO: 27530), KDNTPGR (SEQ ID NO: 28509), or any amino acid sequence provided in FIG. 6. In some embodiments, the tissue is the heart, and the three or more amino acids are provided in an amino acid sequence comprising KDNTPGR (SEQ ID NO: 25633), or any amino acid sequence provided in FIG. 4. In some embodiments, the tissue is the stomach, and the three or more amino acids are provided in an amino acid sequence comprising RESSPSL (SEQ ID NO: 31904) or any amino acid sequence of FIG. 12. In some embodiments, the variant AAV capsid protein further comprises an amino acid sequence that is at least 96% identical to an amino acid sequence between amino acid 217 to amino acid 736 of SEQ ID NO: 1. In some embodiments, the variant AAV capsid of the present disclosure is isolated and purified. In some embodiments, the variant AAV capsid of the present disclosure is formulated as a pharmaceutical formulation further comprising a pharmaceutically acceptable carrier. In some embodiments, the pharmaceutical formulation is formulated for intranasal or intravenous administration.

[0014] Aspects disclosed provide methods of treating a disease or condition in a subject, the method comprising administering to the subject a therapeutically effective amount the rAAV of the present disclosure or the pharmaceutical formulation of the present disclosure. In some embodiments, the disease or the condition is selected from the group consisting of pulmonary fibrosis, surfactant protein disorders, peroxisome biogenesis disorders, chronic obstructive pulmonary disease (COPD), a CNS disease or condition, and a PNS disease or condition.

[0015] Aspects disclosed herein provide recombinant adeno-associated virus (rAAV) capsids comprising variant AAV capsid proteins, the rAAV capsids having at least one of an increased specificity and an increased transduction efficiency when measured in a target tissue in a primate subject relative to the corresponding parental AAV capsid, and at least one of a decreased specificity and a decreased transduction efficiency when measured in an off-target tissue in the primate subject relative to the corresponding parental AAV capsid. In some instances, the specificity or the transduction efficiency is measured following administration of the rAAV capsid to the subject intravenously, intraarterially, intrathecally, or subcutaneously. In some instances, the rAAV capsid is chimeric. In some instances, the rAAV, or variant AAV protein comprises therein, confer an increase in a localization of the rAAV within the target tissue, as compared to the parental AAV capsid or capsid protein.

[0016] In some instances, the variant AAV capsid protein (and rAAV capsid) comprises an amino acid substitution to an amino acid selected from the group consisting of A, D, E, G, K, H, M, N, P, L, Q, S, T, and V at one or more amino acid positions corresponding to one or more of residues 452-458 in an amino acid sequence of the AAV9 VP1 capsid protein provided in SEQ ID NO: 1. In some instances, the amino acid sequence of the AAV9 capsid protein is provided in amino acid 217-736 within SEQ ID NO: 1. In some instances, the target tissue is the central nervous system (CNS). In some instances, the CNS comprises a region selected from the neocortex, the basal ganglia, the hippocampus, the thalamus, the cerebellum, the brain stem, and the spinal cord. In some embodiments, the target tissue is the peripheral nervous system (PNS). In some instances, the PNS comprises a ganglion. In some instances, the ganglion comprises a trigeminal or dorsal root ganglion. In some instances, the target tissue is a non-dividing cell. In some instances, the non-dividing cell is selected from the group consisting of a neuron, an astrocyte, a microglial cell, an oligodendrocyte, and a Schwann cell. In some instances, the off-target tissue is a liver. In some instances. VP1, VP2, and VP3 of the AAV capsid comprise the amino acid substitution. In some instances, the amino acid substitution is at a three (3)-fold axis of symmetry of a corresponding parental AAV capsid protein. In some instances, the amino acid substitution comprises at least three contiguous amino acids, each amino acid independently selected from the group consisting of A, D, E, G, K, H, M, N, P, L, Q, S, T, and V at amino acid positions corresponding to residues 452-454, 453-455, 454-456, 455-457, or 456-458 of the amino acid sequence of the AAV9 VP1 capsid protein. In some instances, the amino acid substitution comprises at least four contiguous amino acids, each amino acid independently selected from the group consisting of A, D, E, G, K, H, M, N, P, L, Q, S, T, and V at amino acid positions corresponding to residues 452-455, 453-456, 454-457, or 455-458 of the amino acid sequence of the AAV9 VP1 capsid protein. In some instances, the amino acid substitution comprises at least five contiguous amino acids, each amino acid independently selected from the group consisting of A, D, E, G, K, H, M, N, P, L, Q, S, T, and V at amino acid positions corresponding to residues 452-456, 453-457, or 454-458 of the amino acid sequence the AAV9 VP1 capsid protein. In some instances, the corresponding parental AAV capsid (or AAV capsid protein) is a native AAV9 capsid. In some instances, the corresponding parental AAV capsid is a variant of AAV9 comprising an amino acid sequence provided in any one of SEQ ID NOS: 3-6.

[0017] In some instances, the amino acid substitution at the amino acid position corresponding to residue 452 in AAV9 VP1 is selected from the group consisting of N452A, N452D, N452E, N452G, N452H, N452M, N452N, N452Q, N452S, N452T, and N452V. In some instances, the amino acid substitution at the amino acid position corresponding to residue 453 in AAV9 VP1 is selected from the group consisting of G453A, G453D, G453E, G453G, G453K, G453N, G453Q, G453S, G453T, and G453V. In some instances, the amino acid substitution at the amino acid position corresponding to residue 454 in AAV9 VP1 is selected from the group consisting of S454A, S454D, S454E, S454G, S454K, S454N, S454Q, S454S, S454T, and S454V. In some instances, the amino acid substitution at the amino acid position corresponding to residue 455 in AAV9 VP1 is selected from the group consisting of G455A, G455D, G455E, G455G, G455K, G455N, G455P, G455Q, G455S, and G455T. In some instances, the amino acid substitution at the amino acid position corresponding to residue 456 in AAV9 VP1 is selected from the group consisting Q456A, Q456D, Q456E, Q456G, Q456H. Q456K, Q456N, Q456P, Q456Q, Q456S, and Q456T. In some instances, the amino acid substitution at the amino acid position corresponding to residue 457 in AAV9 VP1 is selected from the group consisting N457A, N457D, N457E, N457G, N457K, N457N, N457P, N457S, N457T, and N457V. In some instances, the amino acid substitution at the amino acid position corresponding to residue 458 in AAV9 VP1 is selected from the group consisting Q458A, Q458E, Q458G, Q458H, Q458K, Q458L, Q458N, Q458Q, Q458S, Q458T, and Q458V. In some instances, the amino acid substitution at amino acid positions corresponding to residues 452-458 in AAV9 VP1 is DGAATKN (SEQ ID NO: 3943). In some instances, the amino acid substitution comprises an amino acid sequence selected from FIG. 3 or Table 1, or a combination thereof.

[0018] In some instances, the variant AAV capsid protein further comprises an insertion of an amino acid sequence selected from the group consisting of TLAXPFK (SEQ ID NO: 46424), TLAX (SEQ ID NO: 46425). LAVX (SEQ ID NO: 46426), AVPX (SEQ ID NO: 46427), and VPFX (SEQ ID NO: 46428), following the amino acid at the position corresponding to residue 588 in the amino acid sequence of the AAV9 VP1, wherein X is any amino acid other than V. In some instances, the substitution comprises an amino acid sequence provided in FIG. 3.

[0019] In some instances, the target tissue is a brain, and the rAAV capsids, or variant AAV capsid proteins comprised therein, have the increased specificity for the brain, as compared to the parental AAV capsid or capsid protein (e.g., AAV9). In some instances, the off-target tissue is a liver, and the rAAV capsids, or variant AVV capsid proteins, have a decreased specificity for the liver, as compared to the parental AAV capsid or capsid protein (e.g., AAV9). In some instances, the target tissue is a central nervous system (CNS), and the rAAV capsid s, or variant AVV capsid proteins, have an increased efficiency of viral transduction of at least 12-fold in the central nervous system (CNS), as compared to the corresponding parental AAV capsid or capsid protein(e.g., AAV9). In some instances, the target tissue is a spinal cord, and the rAAV capsid s, or variant AVV capsid proteins, have an increased efficiency of viral transduction of at least 20-fold in the spinal cord, as compared to the corresponding parental AAV capsid or capsid protein. In some instances, the target tissue is a neuron, and the rAAV capsid s, or variant AVV capsid proteins, have an increased specificity for the neuron, as compared to the corresponding parental AAV capsid or capsid protein. In some instances, the off-target tissue is a liver, and the rAAV capsid s, or variant AVV capsid proteins, have a decreased efficiency of viral transduction of at least 50-fold in the liver, as compared to the corresponding parental AAV capsid or capsid protein. In some instances, the off-target tissue is a Purkinje cell, and the rAAV capsid s, or variant AVV capsid proteins, have a decreased efficiency of viral transduction of at least 4-fold in the Purkinje cell, as compared to the corresponding parental AAV capsid or capsid protein. In some instances, the off-target tissue is a liver, and the rAAV capsid s, or variant AVV capsid proteins, have a decreased efficiency of viral transduction of at least 100-fold in the liver, as compared to the corresponding parental AAV capsid or capsid protein. In some instances, the AAV further comprises a heterologous nucleic acid encoding a therapeutic gene expression product. In some instances, the AAV capsid is isolated and purified. In some instances, the AAV capsids described herein are formulated as a pharmaceutical formulation further comprising a pharmaceutically acceptable carrier. In some instances, the pharmaceutical formulation further comprises a heterologous nucleic acid encoding a therapeutic gene expression product. In some instances, the pharmaceutical formulation further comprises a pharmaceutical excipient. In some instances, the pharmaceutical formulation is formulated for intravenous, intraarterial, intrathecal, or subcutaneous administration to treat a disease or a condition of the CNS or PNS.

[0020] Aspects disclosed herein provide rAAV capsids comprising variant AAV capsid proteins with an amino acid substitution to an amino acid selected from the group consisting of A, D, E, G, K, H, M, N, P, L, Q, S, T, and V, at an amino acid position corresponding to residues selected from 452-458 within an amino acid sequence of the AAV9 VP1, the rAAV capsids, and variant AAV capsids proteins, having at least one of a decreased specificity and a decreased transduction efficiency for an off-target tissue in a subject, relative to a corresponding parental AAV capsid or capsid protein, and at least one of an increased specificity and an increased transduction efficiency for a target tissue in a subject, relative to the corresponding parental AAV capsid or capsid protein. In some instances, the rAAV capsid is chimeric. In some instances, the amino acid substitution is at a three (3)-fold axis of symmetry of the rAAV capsid. In some instances, the rAAV, or variant AAV protein comprises therein, confer an increase in a localization of the rAAV within the target tissue, as compared to the corresponding parental AAV capsid or capsid protein.

[0021] In some instances, the target tissue is the central nervous system (CNS) or the peripheral nervous system (PNS). In some instances, the CNS comprises a region selected from the neocortex, the basal ganglia, the hippocampus, the thalamus, the cerebellum, the brain stem, and the spinal cord. In some instances, the PNS comprises a ganglion. In some instances, the ganglion comprises a trigeminal or dorsal root ganglion. In some instances, the target tissue is a non-dividing cell. In some instances, the CNS comprises a cell selected from the group consisting of a neuron, a spinal cord, an astrocyte, an oligodendrocyte, and Schwann cell. In some instances, the off-target tissue is a liver.

[0022] In some instances, the amino acid substitution comprises at least three contiguous amino acids, each amino acid independently selected from the group consisting of A, D, E, G, K, H, M, N, P, L, Q, S, T, and V at amino acid positions corresponding to residues 452-454, 453-455, 454-456, 455-457, or 456-458, in the amino acid sequence of the AAV9 capsid protein. In some instances, the amino acid substitution comprises at least four contiguous amino acids, each amino acid independently selected from the group consisting of A, D, E, G, K, H, M, N, P, L, Q, S, T, and V at amino acid positions corresponding to residues 452-455, 453-456, 454-457, or 455-458, in the amino acid sequence of the AAV9 capsid protein. In some instances, the amino acid substitution comprises at least five contiguous amino acids, each amino acid independently selected from the group consisting of A, D, E, G, K, H, M, N, P, L, Q, S, T, and V at amino acid positions corresponding to residues 452-456, 453-457, or 454-458, in the amino acid sequence of the AAV9 capsid protein. In some instances, the AAV capsid protein is an AAV9 capsid protein.

[0023] In some instances, the amino acid substitution at the amino acid position corresponding to residue 452 in AAV9 VP1 is selected from the group consisting of N452A, N452D, N452E, N452G, N452H, N452M, N452N, N452Q, N452S, N452T, and N452V. In some instances, the amino acid substitution at the amino acid position corresponding to residue 453 in AAV9 VP1 is selected from the group consisting of G453A, G453D, G453E, G453G, G453K, G453N, G453Q, G453S, G453T, and G453V. In some instances, the amino acid substitution at the amino acid position corresponding to residue 454 in AAV9 VP1 is selected from the group consisting of S454A, S454D, S454E, S454G, S454K, S454N, S454Q, S454S, S454T, and S454V. In some instances, the amino acid substitution at the amino acid position corresponding to residue 455 in AAV9 VP1 is selected from the group consisting of G455A, G455D, G455E, G455G, G455K, G455N, G455P, G455Q, G455S, and G455T. In some instances, the amino acid substitution at the amino acid position corresponding to residue 456 in AAV9 VP1 is selected from the group consisting Q456A, Q456D, Q456E, Q456H, Q456H, Q456K, Q456N, Q456P, Q456Q, Q456S, and Q456T. In some instances, the amino acid substitution at the amino acid position corresponding to residue 457 in AAV9 VP1 is selected from the group consisting N457A, N457D, N457E, N457G, N457K, N457N, N457P, N457S, N457T, and N457V. In some instances, the amino acid substitution at the amino acid position corresponding to residue 458 in AAV9 VP1 is selected from the group consisting Q458A, Q458E, Q458G, Q458H, Q458K, Q458L, Q458N, Q458Q, Q458S, Q458T, and Q458V. In some instances, the amino acid substitution comprises at least three contiguous amino acids in an amino acid sequence selected from the group consisting of DGAATKN (SEQ ID NO: 3943), DGQSSKS (SEQ ID NO: 2764), and an amino acid sequence provided in Table 1. In some instances, an amino acid sequence of the AAV9 VP1 is provided in SEQ ID NO: 1. In some instances, the amino acid sequence of the AAV9 VP1 is provided in amino acid 217-736 within SEQ ID NO: 1. In some instances, VP1, VP2, and VP3 of the AAV capsid protein comprise the amino acid substitution. In some instances, the corresponding parental AAV capsid or capsid protein is a native AAV9 VP1 capsid. In some instances, the native AAV capsid protein comprises an amino acid sequence provided in SEQ ID NO: 1. In some instances, the corresponding parental AAV capsid or capsid protein is a variant of AAV9 comprising an amino acid sequence provided in any one of SEQ ID NOS: 3-6.

[0024] In some instances, the rAAV capsids, or variant AAV capsid proteins, further comprise an insertion of an amino acid sequence selected from the group consisting of TLAXPFK (SEQ ID NO: 46424). TLAX (SEQ ID NO: 46425). LAVX (SEQ ID NO: 46426), AVPX (SEQ ID NO: 46427), and VPFX (SEQ ID NO: 46428), at an amino acid position 588589 within an amino acid sequence of the AAV capsid protein, wherein X is any amino acid other than V.

[0025] In some instances, the target tissue is a brain, and the rAAV capsids, or variant AVV capsid proteins, have the increased specificity for the brain, as compared to the corresponding parental AAV capsid or capsid protein. In some instances, the off-target tissue is a liver, and the rAAV capsid s, or variant AVV capsid proteins, have a decreased specificity for the liver, as compared to the corresponding parental AAV capsid or capsid protein. In some instances, the target tissue is a central nervous system (CNS), and the rAAV capsid s, or variant AVV capsid proteins, have an increased efficiency of viral transduction of at least 12-fold in the CNS, as compared to the corresponding parental AAV capsid or capsid protein. In some instances, the target tissue is a spinal cord, and the rAAV capsid s, or variant AVV capsid proteins, have an increased efficiency of viral transduction of at least 20-fold in the spinal cord, as compared to the corresponding parental AAV capsid or capsid protein. In some instances, the target tissue is a neuron, and the rAAV capsid s, or variant AVV capsid proteins, have an increased specificity for the neuron, as compared to the corresponding parental AAV capsid or capsid protein. In some instances, the off-target tissue is a liver, and the rAAV capsid s, or variant AVV capsid proteins, have a decreased efficiency of viral transduction of at least 50-fold in the liver, as compared to the corresponding parental AAV capsid or capsid protein. In some instances, the off-target tissue is a Purkinje cell, and the rAAV capsid s, or variant AVV capsid proteins, have a decreased efficiency of viral transduction of at least 4-fold in the Purkinje cell, as compared to the r corresponding parental AAV capsid or capsid protein. In some instances, the off-target tissue is a liver, and the rAAV capsid s, or variant AVV capsid proteins, have a decreased efficiency of viral transduction of at least 100-fold in the liver, as compared to the corresponding parental AAV capsid or capsid protein. In some instances, the rAAV capsids, or variant AVV capsid proteins, have described herein are isolated and purified. In some instances, the rAAV capsids or variant capsid proteins described herein are formulated as a pharmaceutical formulation further comprising a pharmaceutically acceptable carrier. In some instances, the pharmaceutical formulation further comprises a heterologous nucleic acid encoding a therapeutic gene expression product. In some instances, the pharmaceutical formulation further comprises a pharmaceutical excipient. In some instances, the pharmaceutical formulation is formulated for intravenous, intraarterial, intrathecal, or subcutaneous administration to treat a disease or a condition of the CNS or PNS.

[0026] Aspects disclosed herein provide recombinant AAV (rAAV) capsids comprising an variant AAV capsid proteins comprising at least four contiguous amino acids at amino acid positions corresponding to residues selected from the group consisting of 452-455, 453-456, 454-457, and 455-458 of an amino acid sequence of the AAV9 capsid protein according to VP1 numbering, conferring at least one of an increased specificity and an increased transduction efficiency for a target tissue in a subject, wherein: (a) an amino acid at amino acid position corresponding to residue 452 is selected from the group consisting of A, D, G, L, N, Q, S, and T; (b) an amino acid at amino acid position corresponding to residue 453 is selected from the group consisting of A, G, N, P, Q, R, S, and T; (c) an amino acid at amino acid position corresponding to residue 454 is selected from the group consisting of A, D, G, N, S, and T; (d) an amino acid at amino acid position corresponding to residue 455 is selected from the group consisting of A, D, G, K, N, P, Q, S, and T; (e) an amino acid at amino acid position corresponding to residue 456 is selected from the group consisting of A, G, K, N, P, R, S, and T; (f) an amino acid at amino acid position corresponding to residue 457 is selected from the group consisting of A, G, K, N, P, R, S, T, and V; and (g) an amino acid at amino acid position corresponding to residue 458 is selected from the group consisting of A, G, K, L, R, S, T, and V. In some instances, the AAV capsid protein does not contain at amino acid positions corresponding to residues selected from the group consisting of 452-455, 453-456, 454-457, and 455458 of AAV9 VP1 an amino acid sequence ILGTGTS (SEQ ID NO: 45479), QSSQTPR (SEQ ID NO: 45479), or TLAVPFK (SEQ ID NO: 45477). In some instances, the amino acid substitution is at a three (3)-fold axis of symmetry of the rAAV capsid. In some instances, the specificity or the transduction efficiency is measured following systemically administration of the rAAV capsid to the subject. In some instances, systemic administration comprises intraarterial, intravenous, or subcutaneous, administration. In some instances, the rAAV capsid, or variant AAV capsid protein therein, is from AAV9. In some instances, the rAAV, or variant AAV protein comprises therein, confer an increase in a localization of the rAAV within the target tissue, as compared to the corresponding parental AAV capsid or capsid protein.

[0027] In some instances, the substitution comprises an amino acid sequence provided in FIG. 3. In some such instances, the at least four contiguous amino acids are provided in an amino acid sequence selected from the group consisting of LQTSSPG (SEQ ID NO: 2933), SINTKTN (SEQ ID NO: 45475), ERGANTK (SEQ ID NO: 5192), TTGGHSS (SEQ ID NO: 2743), GTTKTSE (SEQ ID NO: 3064), GTGTSVL (SEQ ID NO: 11958), and GTPSKAG (SEQ ID NO: 2741). In some instances, the substitution comprises an amino acid sequence provided in FIG. 2. In some such instances the at least four contiguous amino acids are provided in an amino acid sequence selected from the group consisting of QQGKQSV (SEQ ID NO: 79), SNGTKQT (SEQ ID NO: 442). GSGKTAA (SEQ ID NO: 88), MGDKPTR (SEQ ID NO: 2466). QPSGGNT (SEQ ID NO: 2672), and NQSGTKG (SEQ ID NO: 780). In some instances, the at least four contiguous amino acids are provided in an amino acid sequence selected from the group consisting of LQTSSPG (SEQ ID NO: 2933), QQGKQSV (SEQ ID NO: 79), SINTKTN (SEQ ID NO: 45475), SNGTKQT (SEQ ID NO: 442), GSGKTAA (SEQ ID NO: 88), MGDKPTR (SEQ ID NO: 2466). QPSGGNT (SEQ ID NO: 2672), ERGANTK (SEQ ID NO: 5192), TTGGHSS (SEQ ID NO: 2743), GTTKTSE (SEQ ID NO: 3064). GTGTSVL (SEQ ID NO: 11958), NQSGTKG (SEQ ID NO: 780), and GTPSKAG (SEQ ID NO: 2741). In some instances, the at least four contiguous amino acids are provided in an amino acid sequence provided in Table 2. In some instances, the target tissue is a central nervous system (CNS). In some instances, the CNS comprises a region selected from the neocortex, the basal ganglia, the hippocampus, the thalamus, the cerebellum, the brain stem, and the spinal cord. In some embodiments, the target tissue is the peripheral nervous system (PNS). In some instances, the PNS comprises a ganglion. In some instances, the ganglion is a trigeminal or dorsal root ganglion. In some instances, the target tissue is a non-dividing cell. In some instances, the CNS comprises a cell selected from the group consisting of a neuron, an astrocyte, a microglial cell, an oligodendrocyte, and a Schwann cell. In some instances, the target tissue is a CNS, and the AAV capsid has an increased efficiency of viral transduction of at least 12-fold in the CNS, as compared to the parental AAV capsid or AAV capsid protein. In some instances, the target tissue is a brain, and the AAV capsid has the increased specificity for the brain, as compared to the parental AAV capsid or AAV capsid protein. In some instances, the target tissue is a spinal cord, and the AAV capsid has an increased efficiency of viral transduction of at least 20-fold in the spinal cord, as compared to the parental AAV capsid or AAV capsid protein. In some instances, the target tissue is a neuron, and the AAV capsid has an increased specificity for the neuron, as compared to the parental AAV capsid or AAV capsid protein. In some instances, the rAAV capsids, or variant AAV capsid proteins, described herein are isolated and purified. In some instances, the rAAV capsids, or variant AAV proteins, described herein are formulated as a pharmaceutical formulation further comprising a pharmaceutically acceptable carrier. In some instances, the pharmaceutical formulation further comprises a heterologous nucleic acid encoding a therapeutic gene expression product. In some instances, the pharmaceutical formulation further comprises a pharmaceutical excipient. In some instances, the pharmaceutical formulation is formulated for intravenous, intraarterial, intrathecal, or subcutaneous administration to treat a disease or a condition of the CNS or PNS.

[0028] Aspects disclosed herein provide rAAV capsids comprising AAV capsid proteins comprising at least four contiguous amino acids from an amino acid sequence provided in FIG. 2 or Table 2 at an amino acid position corresponding to residues selected from the group consisting of 452-455, 453-456, 454-457, and 455-458 of AAV9 VP1 conferring at least one of an increased specificity and an increased transduction efficiency when measured in a target tissue in a subject, as compared to a parental AAV capsid or capsid protein. In some instances, the at least four contiguous amino acids are at a three (3)-fold axis of symmetry of the rAAV capsid. In some instances, the AAV capsid protein does not contain at amino acid positions corresponding to residues selected from the group consisting of 452-455, 453-456, 454-457, and 455-458 of AAV9 VP1 an amino acid sequence ILGTGTS (SEQ ID NO: 45479), QSSQTPR (SEQ ID NO: 45479), or TLAVPFK (SEQ ID NO: 45477). In some instances, the specificity or the transduction efficiency is measured following systemically administration of the AAV capsid to the subject. In some instances, the rAAV capsid is chimeric. In some instances, the rAAV, or variant AAV protein comprises therein, confer an increase in a localization of the rAAV within the target tissue, as compared to the parental AAV capsid or capsid protein.

[0029] In some instances, the at least four contiguous amino acids comprise at least four, five, six, or seven contiguous amino acids in an amino acid sequence selected from the group consisting of LQTSSPG (SEQ ID NO: 2933), QQGKQSV (SEQ ID NO: 79), SINTKTN (SEQ ID NO: 45475), SNGTKQT (SEQ ID NO: 442), GSGKTAA (SEQ ID NO: 88), MGDKPTR (SEQ ID NO: 2466), QPSGGNT (SEQ ID NO: 2672), ERGANTK (SEQ ID NO: 5192), TTGGHSS (SEQ ID NO: 2743), GTTKTSE (SEQ ID NO: 3064), GTGTSVL (SEQ ID NO: 11958), NQSGTKG (SEQ ID NO: 780), and GTPSKAG (SEQ ID NO: 2741)

[0030] In some instances, the target tissue is a central nervous system (CNS). In some instances, the CNS comprises a region selected from the neocortex, the basal ganglia, the hippocampus, the thalamus, the cerebellum, the brain stem, and the spinal cord. In some embodiments, the target tissue is the peripheral nervous system (PNS). In some instances, the PNS comprises a ganglion. In some instances, the ganglion is a trigeminal or dorsal root ganglion. In some instances, the target tissue is a non-dividing cell. In some instances, the CNS comprises a cell selected from the group consisting of a neuron, an astrocyte, a microglial cell, an oligodendrocyte, and a Schwann cell.

[0031] In some instances, the rAAV capsid, or variant AAV capsid protein comprised therein, further comprises an insertion of an amino acid sequence selected from the group consisting of TLAXPFK (SEQ ID NO: 46424), TLAX (SEQ ID NO: 46425), LAVX (SEQ ID NO: 46426), AVPX (SEQ ID NO: 46427), and VPFX (SEQ ID NO: 46428), at an amino acid position corresponding to residues 588_589 in the amino acid sequence of AAV9 VP1, wherein X is any amino acid other than V. In some instances, the parental AAV capsid or capsid protein is AAV9. In some instances, the amino acid sequence of a AAV9 capsid protein is provided in SEQ ID NO: 1. In some instances, the amino acid sequence of the AAV9 capsid protein is provided in amino acid 217-736 within SEQ ID NO: 1

[0032] In some instances, the target tissue is a brain, and the rAAV capsid, or variant AAV capsid protein, has the increased specificity for the brain, as compared to the parental AAV capsid or capsid protein. In some instances, the target tissue is the CNS, and the rAAV capsid, or variant AAV capsid protein, has an increased efficiency of viral transduction of at least 12-fold in the CNS, as compared to the parental AAV capsid or capsid protein. In some instances, the target tissue is a spinal cord, and the rAAV capsid, or variant AAV capsid protein, has an increased efficiency of viral transduction of at least 20-fold in the spinal cord, as compared to the parental AAV capsid or capsid protein. In some instances, the target tissue is a neuron, and the rAAV capsid, or variant AAV capsid protein, has an increased specificity for the neuron, as compared to the parental AAV capsid or capsid protein. In some instances, the rAAV capsids, or variant AAV capsid proteins, described herein are isolated and purified. In some instances, the rAAV capsids, or variant AAV capsid proteins, described herein are formulated as a pharmaceutical formulation further comprising a pharmaceutically acceptable carrier. In some instances, the pharmaceutical formulation further comprises a heterologous nucleic acid encoding a therapeutic gene expression product. In some instances, the pharmaceutical formulation further comprises a pharmaceutical excipient.

[0033] Aspects provided herein provide rAAV capsids comprising variant AAV capsid proteins, the rAAV capsids having at least one of an increased specificity and increased transduction efficiency when measured in a target tissue of a subject relative to a corresponding parental AAV capsid or capsid protein, the AAV capsid protein comprising three amino acids (X1-X2-X3) at an amino acid position corresponding to residues selected from the group consisting of 452-454, 453-455, 454-456, 455-457, and 456-458 in AAV9 VP1, wherein: (a) X1 is selected from the group consisting of N, K, R, L, and T; (b) X2 is selected from the group consisting of N, S, L, E, D, and P; and (c) X3 is selected from the group consisting of N, S, A, D, G, L, and T. In some instances, the target tissue is selected from the group consisting of a lung, a heart, an intestine, a kidney, and a stomach. In some instances, the target tissue is a non-dividing cell. In some instances, the tissue is the lung and the amino acid sequence is KDNTPGR (SEQ ID NO: 32538), or any amino acid sequence provided in FIG. 13. In some instances, the tissue is the lung and the amino acid sequence is NNLPRNL (SEQ ID NO: 32867), or any amino acid sequence provided in FIG. 13. In some instances, the tissue is an intestine and the amino acid sequence is RESSPSL (SEQ ID NO: 29065), or any amino acid sequence provided in FIG. 5. In some instances, the tissue is the kidney and the amino acid sequence is RVPLSTI (SEQ ID NO: 26933), or any amino acid sequence provided in FIG. 6. In some instances, the AAV capsid protein is an AAV9 capsid protein. In some instances, the AAV9 capsid protein is provided in SEQ ID NO: 1. In some instances, the AAV capsid protein further comprises four amino acids at an amino acid position selected from the group consisting of 452-455, 453-456, 454-457, and 455-458, wherein X4 is selected from the group consisting of T, S, P, and L. In some instances, the AAV capsid protein further comprises five amino acids at an amino acid position selected from the group consisting of 452-456, 453-457, and 453-458, wherein X5 is selected from the group consisting of P, R, and S. In some instances, the AAV capsid protein further comprises six amino acids at an amino acid position 452-457 or 453458, wherein X6 is selected from the group consisting of N, G, S, and T. In some instances, the AAV capsid protein further comprises seven amino acids at an amino acid position 452-458, wherein X7 is selected from the group consisting of R, L, and I. In some instances, VP1, VP2, and VP3 of the AAV capsid protein comprise the amino acid sequence. In some instances, the corresponding parental AAV capsid is a native AAV9 capsid. In some instances, an amino acid sequence of the VP1 protein of the native AAV9 capsid is provided in SEQ ID NO: 1. In some instances, the corresponding parental AAV is a native AAV5 capsid. In some instances, an amino acid sequence of the VP1 protein of the native AAV5 capsid is provided in SEQ ID NO: 2.

[0034] In some instances, the rAAV, or variant AAV capsid proteins described herein, have at least one of the increased specificity and increased transduction efficiency for a target tissue when measured in a subject as compared to the corresponding parental AAV capsid or capsid protein. In some instances, the target tissue is a lung cell-type that is an alveolar type II epithelial (ATII) cell, and the rAAV capsid, or variant AAV capsid, has an increased efficiency of viral transduction of at least 60-fold in the ATII cell, as compared to a parental AAV capsid or capsid protein. In some instances, the target tissue is a lung cell-type that is an ATII cell, and the rAAV capsid, or variant AAV capsid, has an increased efficiency of viral transduction of at least 60-fold in the ATII cell, as compared to the parental AAV capsid or capsid protein. In some instances, the rAAV capsid, or variant AAV capsid, has an increased efficiency of viral transduction of at least 15-fold in the lung, as compared to the parental AAV capsid or capsid protein. In some instances, the rAAV capsid, or variant AAV capsid, has an increased efficiency of viral transduction of at least 30-fold in the lung, as compared to the parental AAV capsid or capsid protein. Also envisioned are AAV capsids comprising these AAV capsid proteins. In some instances, the rAAV capsids, or variant AAV capsids, described herein are isolated and purified. In some instances, the rAAV capsids, or variant AAV capsids, described herein are formulated as a pharmaceutical formulation further comprising a pharmaceutically acceptable carrier. In some instances, the pharmaceutical formulation further comprises a heterologous nucleic acid encoding a therapeutic gene expression product. In some instances, the pharmaceutical formulation further comprises a pharmaceutical excipient. In some instances, the pharmaceutical formulation is formulated for intravenous, intraarterial, subcutaneous, or intranasal administration to treat a disease or a condition of the target tissue.

[0035] Aspects disclosed herein provide rAAV capsids comprising variant AAV capsid proteins comprising three amino acids at an amino acid position corresponding to residues selected from the group consisting of 452-454, 453-455, 454-456, 455-457, and 456-458 in AAV9 VP1, wherein the three amino acids are provided in an amino acid sequence is provided in one or more of FIG. 4-FIG. 14. In some instances, the rAAV capsid or variant AAV capsid proteins, have at least one of an increased specificity and increased transduction efficiency when measured in a target tissue in a subject. In some instances, the target tissue is selected from the group consisting of a lung, an intestine, a liver, a stomach, a heart, a muscle, an adipose tissue, a spleen, a kidney, or reproductive organs (e.g., testis, ovaries). In some instances, the target tissue is a non-dividing cell. In some instances, the amino acid sequence is provided in FIG. 4. In some instances, the amino acid sequence is provided in FIG. 5. In some instances, the amino acid sequence is provided in FIG. 6. In some instances, the amino acid sequence is provided in FIG. 7. In some instances, the amino acid sequence is provided in FIG. 8. In some instances, the amino acid sequence is provided in FIG. 9. In some instances, the amino acid sequence is provided in FIG. 10. In some instances, the amino acid sequence is provided in FIG. 11. In some instances, the amino acid sequence is provided in FIG. 12. In some instances, the amino acid sequence is provided in FIG. 13. In some instances, the amino acid sequence is provided in FIG. 14. In some instances, the rAAV, or variant AAV protein comprises therein, confer an increase in a localization of the rAAV within the target tissue, as compared to the parental AAV capsid or capsid protein.

[0036] In some instances, the parental AAV capsid a native AAV9. In some instances, an amino acid sequence of a VP1 protein of the native AAV9 capsid protein is provided in SEQ ID NO: 1.

[0037] In some instances, the three amino acids further comprises four amino acids at an amino acid position corresponding to residues selected from the group consisting of 452-455, 453-456, 454-457, and 455-458 of AAV9 VP1, wherein the amino acid sequence is provided in one or more of FIG. 4-FIG. 14. In some instances, the three amino acids comprises five amino acids at an amino acid position corresponding to residues selected from the group consisting of 452-456, 453-457, and 453-458 of AAV9 VP1, wherein the amino acid sequence is provided in one or more of FIG. 4-FIG. 14. In some instances, the three amino acids further comprises six amino acids at an amino acid position corresponding to residues 452-457 or 453-458, wherein the amino acid sequence is provided in one or more of FIG. 4-FIG. 14. In some instances, the three amino acids further comprises seven amino acids at an amino acid position corresponding to residues 452-458, wherein the amino acid sequence is provided in one or more of FIG. 4-FIG. 14. In some instances, VP1, VP2, and VP3 of the rAAV capsid comprise the amino acid sequence. In some instances, the rAAV capsid, or variant AAV capsid proteins, described herein are isolated and purified. In some instances, the AAV capsids, or variant AAV capsid proteins described herein, are formulated as a pharmaceutical formulation further comprising a pharmaceutically acceptable carrier. In some instances, the pharmaceutical formulation further comprises a heterologous nucleic acid encoding a therapeutic gene expression product. In some instances, the pharmaceutical formulation further comprises a pharmaceutical excipient. In some instances, the pharmaceutical formulation is formulated for intravenous, intraarterial, subcutaneous, or intranasal administration to treat a disease or a condition of the target tissue.

[0038] Aspects disclosed herein provide methods of treating a disease or condition in a subject comprising administering to the subject a therapeutically effective amount of a composition comprising the rAAV capsids disclosed herein, the rAAV capsid encapsidating a nucleic acid sequence encoding a therapeutic gene expression product. In some instances, the mammalian subject is a primate. In some instances, the mammalian subject is a non-human primate. In some instances, the mammalian subject is a human. In some instances, the therapeutic gene expression product is a protein. In other instances, the therapeutic gene expression product is an RNA, e.g. a small interfering RNA (siRNA), a short hairpin RNA (shRNA), or a microRNA (miRNA). In some instances, the administering comprises intravenous or intranasal administration. In some instances, the disease or condition is a disease or condition of the central nervous system or peripheral nervous system. In some instances, the disease or condition is a disease or condition of the CNS or PNS. In some instances, the disease or condition is selected from the group consisting of Adrenoleukodystrophy, Alzheimer's disease, Amyotrophic lateral sclerosis, Angelman syndrome, Ataxia telangiectasia, Charcot-Marie-Tooth syndrome, classical rhizomelic chondrodysplasia punctata (RCDP), Cockayne syndrome, Deafness, Dravet Syndrome, Duchenne muscular dystrophy, Epilepsy, Essential tremor, Fragile X syndrome, Friedreich's ataxia, Frontotemporal dementia (FTD), Gaucher disease, glioblastoma, Huntington disease, infantile Refsum disease (IRD), Lesch-Nyhan syndrome, Maple syrup urine disease, Menkes syndrome, Myotonic dystrophy. Narcolepsy, Neurofibromatosis, Niemann-Pick disease, Parkinson disease, Phenylketonuria. Prader-Willi syndrome, Refsum disease, Rett syndrome, Spinal muscular atrophy, Spinocerebellar ataxia, Tangier disease, Tay-Sachs disease, Tuberous sclerosis, Von Hippel-Lindau syndrome, Williams syndrome, Wilson's disease, and Zellweger syndrome. In some instances, the therapeutic gene expression product is effective to modulate an activity or an expression of a target gene or gene expression product selected from the group consisting of Sarcoglycan Alpha (SGCA), glutamic acid decarboxylase 65 (GAD65), glutamic acid decarboxylase 67 (GAD67), CLN2, Nerve Growth Factor (NGF), Survival Of Motor Neuron 1, Telomeric (SMN1), Factor X (FIX), Retinoid Isomerohydrolase (RPE65), sarco/endoplasmic reticulum Ca2+-ATPase (SERCA2a), β-Glucocerebrosidase (GCase), Frataxin (FXN), Huntingtin (HTN), methyl-CpG binding protein 2 (MECP2), a peroxisomal biogenesis factor (PEX), progranulin (GRN), an antitubulin agent, copper-zinc superoxide dismutase (SOD1), Glucosylceramidase Beta (GBA), NPC Intracellular Cholesterol Transporter 1 (NPC1), and a NLRP3 inflammasome. In some instances, the therapeutic gene expression product comprises gene editing components. In some instances, the gene editing components are selected from the group consisting of, an artificial site-specific RNA endonuclease (ASRE), a zinc finger endonuclease (ZFN), a transcription factor like effector nuclease (TALEN), a clustered regularly interspaced short palindromic repeats (CRISPR)/Cas enzyme, and a CRISPR)/Cas guide RNA.

[0039] Aspects disclosed herein comprise plasmid vectors comprising a nucleic acid sequence encoding the AAV capsids described herein. In some instances, the plasmid vector is bacterial. In some instances, the plasmid vector is derived from Escherichia coli. In some instances, the nucleic acid sequence comprises, in a 5′ to 3′ direction: (1) a 5′ inverted terminal repeat (ITR) sequence, (2) a Replication (Rep) gene, (3) a Capsid (Cap) gene, and (4) a 3′ ITR, wherein the Cap gene encodes the AAV capsid protein described herein. In some instances, the plasmid vector encodes a pseudotyped AAV capsid protein. In some instances, the Cap gene is derived from the deoxyribose nucleic acid (DNA) provided in any one of SEQ ID NOs: 6-10. In some instances, the nucleic acid sequence comprising the Cap gene is at least 90%, 91%, 92%, 93%, 94%, 95%, 96%, 97%, 98%, 99%, or 100% identical to any one of the DNA sequences provided in SEQ ID NOS: 46364-46383. In some instances, the 5′ ITR and the 3′ ITR are derived from an AAV2 serotype. In some instances, the 5′ ITR and the 3′ ITR are derived from an AAV5 serotype. In some instances, the 5′ ITR and the 3′ ITR are derived from an AAV9 serotype.

[0040] Aspects disclosed herein provide methods of manufacturing comprising: (a) introducing into a cell a nucleic acid comprising: (i) a first nucleic acid sequence encoding a therapeutic gene expression product, flanked by at its 5′ and 3′ ends by inverted terminal repeat (ITR) sequences; (ii) a second nucleic acid sequence encoding a viral genome comprising a 5′ ITR sequence, a Replication (Rep) gene, Capsid (Cap) gene, and a 3′ ITR, wherein the Cap gene encodes the AAV capsid protein described herein; and (iii) a third nucleic acid sequence encoding a first helper virus protein selected from the group consisting of E4orf6, E2a and VA RNA, and optionally, a second helper virus protein comprising E1a or E1b55k; (b) expressing in the cell the AAV capsid protein described herein; (c) assembling an AAV particle comprising the AAV capsid proteins disclosed herein; and (d) packaging the first nucleic acid sequence in the AAV particle. In some instances, the nucleic acid is comprised by a plasmid and the cell is mammalian. In some instances, the cell is immortalized. In some instances, the immortalized cell is an embryonic stem cell. In some instances, the embryonic stem cell is a human embryonic stem cell. In certain instances, the human embryonic stem cell is a human embryonic kidney 293 (HEK-293) cell. In other instances, the nucleic acid is comprised by a virus, e.g. a baculovirus. In some such instances, the cell is an insect cell. In certain such instances, the cell is an SF9 cell. In some instances, the Cap gene is derived from the deoxyribose nucleic acid (DNA) provided in any one of SEQ ID NOs: 6-10. In some instances, the nucleic acid sequence comprising the Cap gene is at least 90%, 91%, 92%, 93%, 94%, 95%, 96%, 97%, 98%, 99%, or 100% identical to any one of the DNA sequences provided in SEQ ID NOS: 46364-46383. In some instances, the 5′ ITR and the 3′ ITR are derived from an AAV2 serotype. In some instances, the 5′ ITR and the 3′ ITR are derived from an AAV5 serotype. In some instances, the 5′ ITR and the 3′ ITR are derived from an AAV9 serotype. In some instances, the first nucleic acid sequence (encoding a therapeutic gene expression product) and the second nucleic acid sequence (encoding the cap gene) are in trans. In some instances, the first nucleic acid sequence and the second nucleic acid sequence are in cis. In some instances, the first nucleic acid sequence, the second nucleic acid sequence and the third nucleic acid sequence (encoding the helper virus), are in trans.

[0041] Aspects disclosed herein provide kits comprising: (a) a first vector comprising a first nucleic acid sequence encoding a viral genome comprising in a 5′ to 3′ direction: (i) a 5′ inverted terminal repeat (ITR) sequence; (ii) a Replication (Rep) gene; (iii) a Capsid (Cap) gene encoding the AAV capsid proteins described herein, and (iv) a 3′ ITR; and (b) optionally, a second vector comprising a second nucleic acid sequence encoding a helper virus protein comprising at least one of E4orf6, E2a, VA RNA, E1a and E1b55k. In some instances, the kit further comprises a cell. In some instances, the cell is mammalian. In some instances, the cell is immortalized. In some instances, the immortalized cell is an embryonic stem cell. In some instances, the embryonic stem cell is a human embryonic stem cell. In some instances, the human embryonic stem cell is a human embryonic kidney 293 (HEK-293) cell. In some instances, the kit further comprises a vector comprising a heterologous nucleic acid encoding a therapeutic gene expression product. In some instances, the vector is an episome.

### INCORPORATE BY REFERENCE

[0042] All publications, patents, and patent applications mentioned in this specification are herein incorporated by reference to the same extent as if each individual publication, patent, or patent application was specifically and individually indicated to be incorporated by reference.

### BRIEF DESCRIPTION OF THE FIGURES

[0043] The embodiments are set forth with particularity in the appended claims. A better understanding of the features and advantages of the present invention will be obtained by reference to the following detailed description that sets forth illustrative embodiments, in which the principles of the invention are utilized, and the accompanying drawings. The patent or application file contains at least one drawing executed in color. Copies of this patent or patent application publication with color drawing(s) will be provided by the Office upon request and payment of the necessary fee. It is emphasized that, according to common practice, the various features of the drawings are not to-scale. On the contrary, the dimensions of the various features are arbitrarily expanded or reduced for clarity. Included in the drawings are the following figures:

[0044] FIG. 1A-1D show a viral engineering overview according to the present embodiments. FIG. 1A shows a surface model of three monomers comprising the 3-fold symmetry of AAV9 (circled), illustrating the location of the 7 amino acid substitution introduced in this library (red) at amino acids 452-458, and the 2 amino acid substitution and 7 amino acid insertion introduced by AAV-PHP.eB previously (green) at amino acids 588-589.

[0045] FIG. 1B shows the position of the two loops within a single AAV9 monomer, indicating the proximity of the loops and their relation to the capsid surface (AAV interior is down, exterior is up). FIG. 1C shows the spike created by the 588 (left) and 455 (right) loops of one AAV9 monomer interacting with the 495 (middle) loop of a second monomer. FIG. 1D shows a schematic of the engineering process (“TATT NNKNNK . . . NNKNNK CAAC” disclosed as SEQ ID NOS 45492-45493 and “TATT AACGGT . . . AATCAA CAAC” disclosed as SEQ ID NOS 45494-45495). Using PCR, diversity is introduced in the form of a 9-amino acid substitution/insertion (AAV-PHP.eB: green band) and/or substitution (AA 452-458; red band) in the rAAV9 genome, which harbors a Cre inducible switch surrounding the polyadenylation sequence. The DNA capsid library is transfected into HEK-293T cells, and diverse viral capsid libraries are harvested 60 hours later. The viral library is systemically injected into a panel of Cre-transgenic animals. Following three weeks of expression, tissue is harvested, and DNA extracted from all organs. Using PCR, sequences are selectively recovered from only those capsids which transduced Cre+ cells, flipping their polyadenylation sequence. The recovered sequences are subsequently prepared for next generation sequencing (NGS) by PCR, adding dual-index barcodes unique to each specific Cre-tissue combination. Following NGS, the data is mined using positive and negative selection for enrichment (increased prevalence within a specific tissue compared to other sequences, normalized to their presence in the injected viral library) and specificity (increased prevalence within a specific tissue or cell type compared to other tissues or cell types). After one to two rounds of selection, individual variants are tested based on their enrichment and specificity scores. Sequence in italics represents AAV9, which is highly enriched in liver (right) but not in brain (left).

[0046] FIG. 2 shows 7-mer variant AAV capsid amino acid sequences and DNA sequences encoding the 7-mer variant AAV capsid amino acid sequences positively enriched in the central nervous system (CNS) after two rounds of in vivo selection.

[0047] FIG. 3 shows 7-mer variant AAV capsid amino acid sequences and DNA sequences encoding the 7-mer variant AAV capsid amino acid sequences with a tropism specific to the CNS, and that detarget the liver, after two rounds of in vivo selection. “Enrichment” is the prevalence of a given variant in the tissue compared to its prevalence in the viral library that was administered to the transgenic animal. An enrichment score of above 1 indicates a positive enrichment; and an enrichment score below 0 indicates negative enrichment. An enrichment score of 0 indicates that the variant could not be detected in the tissue.

[0048] FIG. 4 shows 7-mer variant AAV capsid amino acid sequences and DNA sequences encoding the 7-mer variant AAV capsid amino acid sequences with a tropism specific to the heart after two rounds of in vivo selection.

[0049] FIG. 5 shows 7-mer variant AAV capsid amino acid sequences and DNA sequences encoding the 7-mer variant AAV capsid amino acid sequences with a tropism specific to the intestine after two rounds of in vivo selection.

[0050] FIG. 6 shows 7-mer variant AAV capsid amino acid sequences and DNA sequences encoding the 7-mer variant AAV capsid amino acid sequences with a tropism specific to the kidney after two rounds of in vivo selection.

[0051] FIG. 7 shows 7-mer variant AAV capsid amino acid sequences and DNA sequences encoding the 7-mer variant AAV capsid amino acid sequences with a tropism specific to the liver after two rounds of in vivo selection.

[0052] FIG. 8 shows 7-mer variant AAV capsid amino acid sequences and DNA sequences encoding the 7-mer variant AAV capsid amino acid sequences with a tropism specific to muscle after two rounds of in vivo selection.

[0053] FIG. 9 shows 7-mer variant AAV capsid amino acid sequences and DNA sequences encoding the 7-mer variant AAV capsid amino acid sequences with a tropism specific to the pancreas after two rounds of in vivo selection.

[0054] FIG. 10 shows 7-mer variant AAV capsid amino acid sequences and DNA sequences encoding the 7-mer variant AAV capsid amino acid sequences with a tropism specific to the spleen after two rounds of in vivo selection.

[0055] FIG. 11 shows 7-mer variant AAV capsid amino acid sequences and DNA sequences encoding the 7-mer variant AAV capsid amino acid sequences with a tropism specific to the stomach after two rounds of in vivo selection.

[0056] FIG. 12 shows 7-mer variant AAV capsid amino acid sequences and DNA sequences encoding the 7-mer variant AAV capsid amino acid sequences with a tropism specific to the testicle after two rounds of in vivo selection.

[0057] FIG. 13 shows 7-mer variant AAV capsid amino acid sequences and DNA sequences encoding the 7-mer variant AAV capsid amino acid sequences with a tropism specific to lung after two rounds of in vivo) selection.

[0058] FIG. 14 shows 7-mer variant AAV capsid amino acid sequences and DNA sequences encoding the 7-mer variant AAV capsid amino acid sequences with a tropism specific to adipose tissue after two rounds of in vivo selection.

[0059] FIG. 15A-15B shows next generation sequencing data and in vivo transduction efficiency of candidate variants. FIG. 15A shows the relative abundance in log enrichment of two candidate variants, AAV.CAP-A4 and AAV.CAP-A14, and a randomly chosen variant. The NGS data shows significant enrichment of AAV.CAP-A4 in the lung, with negative enrichment in several peripheral organs. Conversely, AAV.CAP-A14 is enriched in neurons within the stomach and intestine, and negatively enriched in other organs like the lung. FIG. 15B shows In vivo transduction 2 weeks after systemic administration of 5×10¹¹ vg of rAAV:CAG-mNeonGreen confirms the NGS data from in 2A, with AAV.CAP-A4 strongly transducing the lung when compared to AAV9, and AAV.CAP-A14 more strongly transducing neurons in the stomach and intestine. For the avoidance of doubt, AAV.CAP-A4 is KDNTPGR, which is provided in SEQ ID NO: 32538 (enrichment in the lung). SEQ ID NO: 25633 (enrichment in the heart), SEQ ID NO: 26584 (enrichment in the intestine), and SEQ ID NO: 28509 (enrichment in the kidney). AAV.CAP-A14 is RESSPSL, which is provided in SEQ ID NO: 26474 (enrichment in the intestine), SEQ ID NO: 29065 (enrichment in the kidney), and SEQ ID NO: 31904 (enrichment in the stomach).

[0060] FIG. 16A-16D shows the tropism of AAV.CAP-A4 is strongly enriched in submucosal cells within the lung, ssAAV9:CAG-NLSx2-EGFP, ssAAV5:CAG-NLSx2-EGFP or ssAAV.CAP-A4:CAG-NLSx2-EGFP was intravenously injected into male adult mice at 1×10¹¹ vg/mouse. GFP fluorescence was assessed after three weeks of expression. FIG. 16A provides a comparison of the total number of cells transduced by AAV.CAP-A4, compared to its parents capsid AAV9. FIG. 16B shows overall transduction, as assessed by EGFP expression, is increased 15-30 fold compared to AAV5 and AAV9. FIG. 16C provides a cell-type specific quantification, as assessed by colocalization of EGFP signal with antibody staining and shows that AAV.CAP-A4 transduction of ATII cells is increased 30-60 fold compared to AAV5 and AAV9 (respectively). A significant number of the cells transduced by AAV.CAP-A4 are alveolar type II pneumocytes. FIG. 16D shows quantification of cell-type specificity with 60% of cells transduced in the lung identified as ATII cells. For quantification: n=3 mice per group for AAV9, AAV5 and AAV.CAP-A4, mean±SE, one-way ANOVA (*P≤0.05; n.s., P≥0.05). Scale bars are 50 μm.

[0061] FIG. 17A-17E show the characterization of the 7 amino acid (AA) substitution library in AAV-PHP.eB. FIG. 17A shows the distribution across the 7 amino acid substitution in AAV-PHP.eB, showing a relatively uniform distribution (with a few notable exceptions) a low prevalence of stop codons, and no bias towards the wildtype (WT) AAV9 sequence (NGSGQNQ (SEQ ID NO: 545)) following PCR generation of the DNA library and packaging of the viral capsid library. FIG. 17B shows a subset of the top performing variants (SEQ ID NOS: 45496-45513), respectively, in order of appearance) obtained from two rounds of positive and negative selection, showing a strong divergence from the WT AAV9 sequence. TI: threonine and isoleucine residues present at positions 450-451; QT: glutamine and threonine residues present at positions 459460. FIG. 17C shows a heat map plotting the log-enrichment scores of a subset of the top performers, demonstrating specificity for, and enrichment in, neuronal populations, a target for which AAV-PHP.eB is already biased towards. FIG. 17D shows ssAAV9:CAG-mNeonGreen, ssAAV-PHP.eB:CAG-mNeonGreen, ssAAV.CAP-B1:CAG-mNeonGreen (LQTSSPG; SEQ ID NO: 2933), ssAAV.CAP-B2:CAG-mNeonGreen (QQGKQSV; SEQ ID NO: 79), ssAAV.CAP-B4:CAG-mNeonGreen (SINTKTN; SEQ ID NO: 45475), and ssAAV.CAP-B7:CAG-mNeonGreen (SNGTKQT; SEQ ID NO: 442) was intravenously injected into male adult mice at 5×10¹¹ vg/mouse and mNeonGreen fluorescence assessed after two weeks. FIG. 17E shows ssAAV.CAP-B8:CAG-mNeonGreen (GSGKTAA; SEQ ID NO: 88), ssAAV.CAP-B9:CAG-mNeonGreen (MGDKPTR; SEQ ID NO: 2466), ssAAV.CAP-B10:CAG-mNeonGreen (DGAATKN; SEQ ID NO: 3943), ssAAV.CAP-B1:CAG-mNeonGreen (QPSGGNT; SEQ ID NO: 2672), ssAAV.CAP-B14:CAG-mNeonGreen (ERGANTK; SEQ ID NO: 5192), ssAAV.CAP-B16:CAG-mNeonGreen (TTGGHSS; SEQ ID NO: 2743), ssAAV.CAP-B17:CAG-mNeonGreen (GTTKTSE; SEQ ID NO: 3064). ssAAV.CAP-B18:CAG-mNeonGreen (GTGTSVL; SEQ ID NO: 11958), ssAAV.CAP-B19:CAG-mNeonGreen (NQSGTKG; SEQ ID NO: 780), ssAAV.CAP-B22:CAG-mNeonGreen (DGQSSKS; SEQ ID NO: 2764), ssAAV.CAP-B23:CAG-mNeonGreen (KGPGQMG; SEQ ID NO: 45476), or ssAAV.CAP-B25:CAG-mNeonGreen (GTPSKAG; SEQ ID NO: 2741) was intravenously injected into male adult mice at 5×10¹¹ vg/mouse and mNeonGreen fluorescence assessed after two weeks. In FIG. 17D and FIG. 17E, direct comparison of the transduction profiles of the top performing variants shows a strong correlation between validated tropisms, and those predicted by the NGS data. Scale bars are 2 mm.

[0062] FIG. 18A-18D shows the tropism of AAV.CAP-B10 is strongly biased towards the brain, with significant liver detargeting. ssAAV9:CAG-NLSx2-EGFP. ssAAV-PHP.eB:CAG-NLSx2-EGFP or ssAAV.CAP-B10:CAG-NLSx2-EGFP was intravenously injected into male adult mice at 1×10¹¹ vg/mouse. GFP fluorescence was assessed after three weeks of expression. FIG. 18A shows a comparison of BBB crossing and brain transduction in AAV9, AAV-PHP.eB, and AAV.CAP-B10, showing a progressive increase in transduction efficiency in the brain following iterative engineering of the WT capsid. FIG. 18B shows the same comparison in the livers, showing a progressive decrease in transduction efficiency. FIG. 18C provides quantification of the total number of cells transduced in the brain, and shows a non-significant increase in total transduction for AAV.CAP-B10 compared to AAV-PHP.eB, both of which are significantly increased compared to AAV9. Comparison of the average brightness per cell shows a significant increase of AAV.CAP-B10 over AAV9 but not over AAV-PHP.eB. FIG. 18D provides quantification of the total number of cells transduced in the liver, and shows a significant decrease comparing AAV.CAP-B10 to both AAV9 and AAV-PHP.eB. Brightness per cell is also significant decreased when comparing AAV.CAP-B10 and AAV9, with no significant difference observed with AAV-PHP.eB. For quantification: n=6 mice per group, mean f SE, Brown-Forsythe and Welch ANOVA tests for transduction and Kruskal-Wallis test for brightness (*P≤0.05; n.s., P≥0.05). Scale bars are 1 mm.

[0063] FIG. 19A-F shows that within the brain, AAV.CAP-B10 is strongly biased towards neurons. ssAAV-PHP.eB:CAG-NLSx2-EGFP or ssAAV.CAP-BB10:CAG-NLSx2-EGFP was intravenously injected into male adult mice at 1×10¹¹ vg/mouse. GFP fluorescence was assessed after three weeks of expression. FIG. 19A-19B shows that across multiple brain regions, AAV.CAP-B10 showed non-significant increases in the total number of neurons transduced compared to AAV-PHP.eB. FIG. 19C-19D shows that AAV.CAP-B10 shows significantly reduced transduction of astrocytes across all brain regions quantified compared to AAV-PHP.eB. FIG. 19E-19F shows that AAV.CAP-B10 shows significantly reduced transduction of oligodendrocytes across all brain regions quantified compared to AAV-PHP.eB. For quantification: n=6 mice per group, mean±SE, Mann-Whitney test (*P≤0.05; n.s., P≥0.05). Scale bars are 200 μm.

[0064] FIG. 20A-20C shows the amino-acid contribution across the 7-mer substitution to variants enriched in the brain and detargeted from the liver. FIG. 20A shows the amino acid contribution across the 7-mer substitution to variants enriched in the brain. FIG. 20B shows the amino acid contribution across the 7-mer substitution to variants negatively enriched (de-targeted) from the liver. FIG. 20C shows the amino acid contribution across the 7-mer substitution to variants enriched in the brain and negatively enriched (de-targeted) from the liver. The 1000 variants with highest enrichment in the brain of hSyn-Cre animals, the 1000 variants with lowest enrichment in the liver of Tek-Cre animals, and all variants with positive enrichment in the brain and negative enrichment in the liver were analyzed. Plotted is the z-score of all amino acids at each position.

[0065] FIG. 21 shows that AAV.CAP-B10 is detargeted from peripheral organs. ssAAV9:CAG-NLSx2-EGFP, ssAAV-PHP.eB:CAG-NLSx2-EGFP or ssAAV.CAP-B10:CAG-NLSx2-EGFP was intravenously injected into male adult mice at 1×10¹¹ vg/mouse. GFP fluorescence was assessed after three weeks of expression. Transduction efficiencies in peripheral tissues show a significant increase and decrease in spinal cord transduction for AAV.CAP-B10 when compared to AAV9 or AAV-PHP.eB, respectively. In the DRGs, AAV.CAP-B10 is significantly decreased when compared to AAV9 and non-significantly decreased when compared to AAV-PHP.eB. In the myenteric and submucosal plexi of the intestines, AAV.CAP-B10 is significantly decreased compared to AAV9 and non-significantly decreased compared to AAV-PHP.eB. In the lungs, AAV.CAP-B10 is significantly decreased when compared to AAV-PHP.eB and non-significantly decreased compared to AAV9. In the kidneys, spleen, pancreas and testes, AAV.CAP-B10 is significantly decreased when compared to AAV9 and non-significantly decreased compared to AAV-PHP.eB. For quantification: n=6 mice per group except for spinal cord and DRGs where n=3 mice for AAV9 and AAV-PHP.eB and n=5 mice for AAV.CAP-B10, mean±SE, ANOVA for spinal cord. Brown-Forsythe and Welch ANOVA tests for myenteric plexus and pancreas, Kruskal-Wallis test for DRGs, submucosal plexus, lungs, kidneys, spleen and testes (*P≤0.05; n.s., P≥0.05).

[0066] FIG. 22A-22B shows that AAV.CAP-B10 is significantly detargeted from purkinje cells in the cerebellum. ssAAV-PHP.eB:CAG-NLSx2-EGFP or ssAAVCAP-B10:CAG-NLSx2-EGFP was intravenously injected into male adult mice at 1×10¹¹ vg/mouse. GFP fluorescence was assessed after three weeks of expression. FIG. 22A shows immunofluorescence in cerebellum sections. FIG. 22B shows quantification of purkinje cell transduction in the cerebellum, and shows significantly fewer purkinje cells transduced by AAV.CAP-B10 when compared to AAV-PHP.eB. For quantification: n=6 mice per group, mean±SE, Mann-Whitney test (*P≤0.05; n.s., P≥0.05). Scale bar is 200 μm.

[0067] FIG. 23A-23F shows the characterization of pooled expression in non-human primates. FIG. 23A shows the experimental paradigm for pooled injection of the novel variants AAV.CAP-B1, AAV.CAP-B2, AAV.CAP-B8, AAV.CAP-B10, AAV.CAP-B18 and AAV.CAP-B22 and controls AAV9 and AAV-PHP.eB. Human FXN fused to an HA tag is packaged in each variant under control of the ubiquitous CAG promoter, with a unique 12 bp RNA barcode in the 5′ UTR differentiating each variant. Two marmosets were injected at a dose of 1.2×10\hat{ }14 vg/kg, of which ⅛ was contributed by each variant in the pool. FIG. 23B shows six sections distributed through the anterior-posterior axis and cerebellum of the marmoset brain. Counter-staining for the HA tag on the FXN transgene show robust expression distributed throughout the brain following IV administration of the pool of variants. FIG. 23C shows NGS quantification of RNA barcode expression from two marmosets for each of the 8 variants in the pool, showing a dramatic increase for several variants, including >12-fold increase in RNA levels of AAV.CAP-B22 and >5-fold increase for AAV.CAP-B10 compared to AAV9. FIG. 23D shows zoomed-in frames from a variety of cortical and sub-cortical regions shows significant and broad transduction across most brain regions, including cortex, hippocampus, and cerebellum. FIG. 23E shows counter-staining for the HA tag in the liver, revealing low overall transduction from the viral pool. NGS quantification shows relative detargeting from the liver, with AAV.CAP-B22 contributing similar RNA levels to AAV9, and AAV.CAP-B10 contributing >5-fold less. FIG. 23F shows that transduction of the heart is increased from AAV9 for several of the variants with AAV.CAP-B22 contributing almost 5-fold more RNA in comparison. Transduction of the adrenal cortex by the variants was varied in comparison with AAV9. RNA was collected from two animals for analysis of liver transduction, and one animal for heart and adrenal transduction.

### DETAILED DESCRIPTION OF THE DISCLOSURE

[0068] Provided herein are modified adeno-associated (AAV) virus capsid protein compositions useful for integrating a transgene into a target cell or environment (e.g., a cell-type or tissue) in a subject when they are administered to the subject. The modified AAV capsid proteins of the present disclosure comprise at least one insertion or substitution of an amino acid in a corresponding parental AAV capsid protein that confers a desired tropism such as an increased or decreased specificity as compared to a reference AAV capsid protein, e.g. the corresponding unmodified parental capsid protein, or increased or decreased transgene transduction efficiency as compared to a reference AAV capsid protein, e.g. the corresponding unmodified parental capsid protein.

[0069] The most commonly manipulated loop in AAVs is the 588 loop, due to it being the site of heparan sulfate binding of AAV2 and amenable to peptide display. The only known receptor for AAV9 is N-linked terminal galactose, but many indications point toward there being others. Although modifications to AAV9 588 loop have been shown to confer an increased specificity and transgene transduction efficiency in target in vivo environments as compared to a correspond parental AAV capsid protein in rodent models, these desired tropisms do not translate in non-human primate models, rendering them of limited value to treat human disease. Non-limiting examples of modified AAV capsid proteins include AAV-PHP.B, AAV-PHP.eB, AAV-PHP.S, and AAV-PHP.

[0070] Disclosed herein are modified AAV capsid proteins with desired tropisms observed in both rodent and non-human primate models of human disease that comprise an insertion or a substitution of at least one amino acid relative to the corresponding parental AAV capsid protein, that insertion or substitution residing in the loop corresponding to the amino acid 455 loop (AA455 loop) of AAV9. The AA455 loop is the furthest protruding from the surface of the capsid and has been implicated in neutralizing antibody binding. The AA455 loop is believed to play a significant role in cell-surface receptor binding, either on its own or by interaction with the 588 loop. In some cases, the parental AAV capsid protein is AAV5, AAV9, or a previously modified AAV5 or AAV9 (e.g., AAV-PHP.eB, AAV-PHP.B, and the like).

[0071] The most common method of AAV-mediated transgene delivery is by direct injection to the target in vivo environment, which is disadvantageous for many reasons, including risk of injury or death, pain, and higher cost, as compared to less invasive methods. Previous AAV-mediated delivery by intravenous administration avoids a need for a direct injection, but suffers from reduced specificity and transduction efficiency for the target in vivo environment resulting in off-target transduction events and necessitating a larger viral load to achieve sufficient therapeutic levels in the target in vivo environment. This is especially evident when the AAV must cross the blood brain barrier (BBB) or the epithelial lining to reach the target in vivo environment, such as to treat a disease or condition of the central nervous system (CNS) and the lung.

[0072] Disclosed herein are methods comprising systemically administering a modified AAV capsid of the present disclosure encapsidating a viral vector comprising a transgene (e.g., therapeutic nucleic acid) with an increased specificity and an increased transduction efficiency, as compared to a reference AAV capsid protein, e.g. the corresponding parental capsid protein. The modified AAV capsid proteins of the present disclosure are capable of crossing the BBB, and transducing a transgene in a particular target cell-type (e.g., neuron) in both rodent and non-human primate models. In addition, the modified AAV capsid proteins of the present disclosure are capable of targeting a cell-type of the lung (e.g., a type II epithelial (ATII) cell) with in some cases a 60-fold increase in transgene transduction efficiency as compared to a reference AAV capsid protein, e.g. the corresponding parental capsid protein. The modified AAV capsid proteins of the present disclosure are capable of detargeting off-target in vivo environments, such as the liver by, in some cases, a 100-fold decrease in transgene transduction efficiency relative to a reference AAV capsid protein, e.g. the corresponding parental capsid protein. Accordingly, the modified AAV capsid proteins of the present disclosure are suitable for transgene therapy to treat human disease.

[0073] Disclosed herein are transgenes contained in a recombinant AAV (rAAV) vector and encapsidated by the modified AAV capsid proteins of the present disclosure. The transgenes disclosed herein are delivered to a subject for a variety of purposes, e.g., to treat a disease or condition in the subject. The transgene can be gene editing components that modulate the activity or expression of a target gene or gene expression product. Alternatively, the transgene is a gene encoding a therapeutic gene expression product that is effective to modulate the activity or expression of itself, of another target gene or gene expression product.

[0074] Methods of producing recombinant AAV (rAAV) virions, or rAAV particles, comprising AAV capsids comprising the modified AAV capsid proteins and heterologous polynucleotide encoding a therapeutic nucleic acid are also provided. The modified capsid proteins are produced by introducing to a cell (e.g., immortalized stem cell) a heterologous polynucleotide encoding the transgene (e.g., containing the therapeutic nucleic acid), a first plasmid vector encoding the AAV genome with a modified AAV capsid protein, and a second plasmid vector encoding helper virus proteins, required for assembly of the modified capsid structure and packaging of the transgene in the modified capsid. The assembled rAAV particle can be isolated and purified from the cell using suitable methods known in the art.

[0075] The vectors comprising a nucleic acid sequence encoding the modified AAV capsid proteins of the present disclosure are also provided herein. For example, the vectors of the present disclosure comprise a nucleic acid sequence encoding the two AAV viral genes, Rep (Replication), Cap (Capsid), wherein the Cap gene, encoding viral capsid proteins VP1, VP2, and VP3 is modified to produce the modified AAV capsid proteins of the present disclosure. The vector can comprise the viral genome from one or more AAV serotype (e.g., AAV5, AAV9), or a variant AAV serotype (e.g., AAV-PHP.eB, AAV-PHP.B, and the like).

### Overview

[0076] Recombinant AAV (rAAV) mediated gene delivery leverages the AAV mechanism of viral transduction for nuclear expression of an episomal heterologous nucleic acid (e.g., a transgene, therapeutic nucleic acid). Upon delivery to a host in vivo environment, a rAAV will (1) bind or attach to cellular surface receptors on the target cell, (2) endocytose, (3) traffic to the nucleus, (4) uncoat the virus to release the encapsidated heterologous nucleic acid, (5) convert of the heterologous nucleic acid from single-stranded to double-stranded DNA as a template for transcription in the nucleus, and (6) transcribe of the episomal heterologous nucleic acid in the nucleus of the host cell (“transduction”). rAAVs engineered to have an increased specificity (binding to cellular surface receptors on the target cell) and transduction efficiency (transcription of the episomal heterologous nucleic acid in the host cell) are desirable for gene therapy applications.

[0077] The AAV capsid is made up of three capsid protein monomers, VP1, VP2, and VP3. Sixty copies of these three VP proteins interact in a 1:1:10 ratio to form the viral capsid. VP1 covers the whole of VP2 protein in addition to a ˜137 amino acid N-terminal region (VPlu), VP2 covers the whole of VP3 in addition to ˜65 amino acid N-terminal region (VP1/2 common region). The three capsid proteins share a conserved amino acid sequence of VP3, which in some cases is the region beginning at amino acid position 217 (e.g., AA 217-736).

[0078] The AAV VP3 structure contains highly conserved regions that are common to all serotypes, a core eight-stranded β-barrel motif (βB-βI) and a small α-helix (αA). The loop regions inserted between the β-strands consist of the distinctive HI loop between β-strands H and I, the DE loop between β-strands D and E, and nine variable regions (VRs), which form the top of the loops. These VRs are found on the capsid surface and can be associated with specific functional roles in the AAV life cycle including receptor binding, transduction and antigenic specificity. For example, the AA455 loop is the furthest protruding from the surface of the capsid, has been implicated in neutralizing antibody binding, and is believed to play a significant role in cell-surface receptor binding, either on its own or by interaction with the 588 loop.

[0079] Disclosed herein are recombinant adeno-associated viruses (rAAVs) with AAV capsids comprising modified AAV capsid proteins at the AA455 loop that confer a desired tropism characterized by a higher efficiency and specificity for transduction in specific cell-types, e.g., brain cell types. In particular, the modified AAV capsids disclosed herein enable rAAV-mediated transduction of a heterologous gene (e.g., transgene), while de-targeting others, thereby preventing off-target transduction events in peripheral organs, such as the liver. Also Disclosed herein are rAAVs with AAV capsids comprising modified AAV capsid proteins that confer a tropism characterized by a higher efficiency and specificity for transduction in particular organs or environments, e.g., the lungs, intestine, stomach, heart, muscle, adipose tissue, spleen, kidney, or reproductive organs (e.g., testis, ovaries). The rAAVs described herein are useful for a wide range of applications, including but not limited to the treatment of disease.

### Compositions

rAAV Capsids and Variant AAV Capsid Proteins

[0080] Disclosed herein are recombinant AAV (rAAV) with variant capsid proteins (e.g., rAAV capsid proteins) that are engineered with a modified capsid protein (e.g., VP1, VP2, VP3). In some embodiments, the rAAV capsid proteins of the present disclosure are generated using the methods disclosed herein (e.g., M-CREATE). In some embodiments, the AAV capsid proteins are used in the methods of delivering a therapeutic nucleic acid (e.g., a transgene) to a subject. In some instances, the rAAV capsid proteins have desired AAV tropisms rendering them particularly suitable for certain therapeutic applications, e.g., the treatment of a disease or disorder in a subject such as those disclosed herein.

[0081] The rAAV capsid proteins are engineered for optimized entry into and through the blood brain barrier (BBB) of a subject upon systemic administration of the rAAV to the subject, such as those provided in Tables 3-4. Prior methods of AAV-mediated delivery of a therapeutic transgene to the brain required intracranial injection. Intracranial injection is an invasive procedure that causes a subject discomfort, and in some cases, pain. For example, intracranial injection can cause hemorrhaging of the brain. Additionally, intracranial delivery has limited spread and is highly heterogeneous. The rAAV capsid proteins provided in Tables 3-4 are engineered to have tropisms that eliminate the need for intracranial injection, while also achieving widespread and efficient transduction of an encapsidated transgene. In particular, the tropisms comprise at least one of an increased specificity and efficiency (e.g., of viral transduction) in the central nervous system (CNS) of a subject, and/or peripheral nervous system (PNS) of a subject, as compared to a corresponding parental AAV or a reference AAV. The rAAVs disclosed herein may also de-target certain peripheral organs (e.g., the liver), thereby avoiding off-target viral transduction, such as those provided in Table 1.

[0082] Also disclosed herein are rAAVs with engineered capsid proteins that are optimized for targeting specific organ or tissue within a subject. In some embodiments, the organ is the heart. In some embodiments, the organ is the lung. In some embodiments, the organ is the liver. In some embodiments, the organ is the intestine. In some embodiments, the organ is the stomach. In some embodiments, the organ is the spleen. In some embodiments, the organ is the kidney. In some embodiments, the tissue is the fat (adipose). In some embodiments, the tissue is the muscle. The muscle may be cardiac muscle. The muscle may be skeletal muscle. In some embodiments, the organ is the pancreas. In some embodiments, the organ is the reproductive organ, such as a testicle or ovary. In further embodiments, the rAAVs disclosed herein may also de-target certain peripheral organs, thereby reducing or avoiding off-target viral transduction. In a non-limiting example, the rAAVs of the present embodiment. Table 1 have increased specificity and transduction in the brain (e.g., target environment), and very low transduction efficiency and no specificity in the liver (e.g., off-target environment), as compared to a reference AAV (e.g., AAV9).

[0083] The engineered AAV capsid proteins described herein have, in some cases, an insertion or substitution of an amino acid that is heterologous to the parental AAV capsid protein at the amino acid position of the insertion or substitution. In some embodiments, the amino acid is not endogenous to the parental AAV capsid protein at the amino acid position of the insertion or substitution. The amino acid may be a naturally occurring amino acid in the same or equivalent amino acid position as the insertion of the substitution in a different AAV capsid protein.

[0084] Generally, the insertion or substitution comprises a five-, six-, or seven-amino acid polymer (5-mer, 6-mer, or 7-mer, respectively) that is inserted or substituted at the 455 loop in a parental AAV capsid protein. The 7-mers described herein were advantageously generated using polymerase chain reaction (PCR) with degenerate primers, where each of the seven amino acids is encoded by a deoxyribose nucleic acid (DNA) sequence N-N-K. “N” is any of the four DNA nucleotides and K is guanine (G) or thymine (T). This method of generating random 7-mer amino acid sequences enables 1.28 billion possible combinations at the protein level. Since the 7-mers developed are random, some amino acids in the 7-mer may be naturally occurring in the AAC capsid protein at that amino acid position, while other amino acids may differ.

[0085] Recombinant AAVs (rAAVs) were generated, each with a unique 7-mer at the 455 loop and each encapsidating a reporter gene that, when administered systemically in multiple transgenic animals, enabled the selective amplification and recovery of sequences that effectively transduced the reporter gene in a target in vivo environment of the transgenic animal. 7-mers that were found to be positively enriched in the target in vivo environment (e.g., central nervous system, lung), and negatively enriched in off-target in vivo environments (e.g., the liver), are provided herein. “Enrichment” is the prevalence of a given 7-mer in the tissue of the in vivo environment compared to its prevalence in the viral library that was administered to the transgenic animal. An enrichment score above 0 indicates a positive enrichment. An enrichment score below 0 indicates a negative enrichment. An enrichment score of 0 indicates that the variant is not present in the tissue. A subset of the rAAVs with desired enrichment profiles were tested individually in vivo to determine exact systemic expression (e.g., specificity and transduction efficiency). rAAVs from this subset exhibiting a desired tropism comprising increased specificity, and in some cases, transduction efficiency are considered to be uniquely suited for targeted rAAV-mediated transgene delivery useful for a wide variety of purposes (e.g., therapeutic, diagnostic, scientific discovery).

[0086] The rAAV particles with the 7-mer insertion or substitutions described herein have an increased transduction efficiency in a target in vivo environment (e.g., tissue or cell type). In some instances, the increased transduction efficiency comprises a 1-fold, 2-fold, 3-fold, 4-fold, 5-fold, 6-fold, 7-fold, 8-fold, 9-fold, 10-fold, li-fold, 12-fold, 13-fold, 14-fold, 15-fold, 16-fold, 17-fold, 18-fold, 19-fold, 20-fold, 21-fold, 22-fold, 23-fold, 24-fold, 25-fold, 26-fold, 27-fold, 28-fold, 29-fold, 30-fold, 31-fold, 32-fold, 33-fold, 34-fold, 35-fold, 36-fold, 37-fold, 38-fold, 39-fold, 40-fold, 41-fold, 42-fold, 43-fold, 44-fold, 45-fold, 46-fold, 47-fold, 48-fold, 49-fold, 50-fold, 75-fold, or 100-fold increase, or more, relative to a reference AAV, e.g. the corresponding parental capsid protein. In some instances, the increased transduction efficiency is at least 30-fold. In some instances, the increased transduction efficiency is at least 40-fold. In some instances, the increased transduction efficiency is at least 50-fold. In some instances, the increased transduction efficiency is at least 60-fold. In some instances, the increased transduction efficiency is at least 80-fold. In some instances, the increased transduction efficiency is at least 90-fold. In some instances, the increased transduction efficiency is at least 100-fold.

[0087] The rAAV particles with the 7-mer insertion or substitutions described herein have decreased transduction efficiency in an off-target in vivo environment (e.g., tissue or cell type). In some instances, the off-target gene transfer is reduced by 1-fold, 2-fold, 3-fold, 4-fold, 5-fold, 6-fold, 7-fold, 8-fold, 9-fold, 10-fold, 11-fold, 12-fold, 13-fold, 14-fold, 15-fold, 16-fold, 17-fold, 18-fold, 19-fold, 20-fold, 21-fold, 22-fold, 23-fold, 24-fold, 25-fold, 26-fold, 27-fold, 28-fold, 29-fold, 30-fold, 31-fold, 32-fold, 33-fold, 34-fold, 35-fold, 36-fold, 37-fold, 38-fold, 39-fold, 40-fold, 41-fold, 42-fold, 43-fold, 44-fold, 45-fold, 46-fold, 47-fold, 48-fold, 49-fold, 50-fold, 75-fold, or 100-fold, or more, relative to a reference AAV, e.g. the corresponding parental capsid protein. In some instances, the off-target gene transfer is reduced by at least 20-fold. In some instances, the off-target gene transfer is reduced by at least 30-fold. In some instances, the off-target gene transfer is reduced by at least 40-fold. In some instances, the off-target gene transfer is reduced by at least 50-fold. In some instances, the off-target gene transfer is reduced by at least 60-fold. In some instances, the off-target gene transfer is reduced by at least 80-fold. In some instances, the off-target gene transfer is reduced by at least 90-fold. In some instances, the off-target gene transfer is reduced by at least 100-fold.

[0088] The rAAV particles with the 7-mer insertion or substitutions described herein have an increased or decreased specificity in a target in vivo environment (e.g., tissue or cell type), as compared to a reference AAV, e.g. the corresponding parental capsid protein. Detecting whether a rAAV possesses more or less specificity for a target in vivo environment than a reference AAV, includes measuring a level of gene expression product (e.g., RNA or protein) expressed from the heterologous nucleic acid encapsidated by the rAAV in a tissue sample obtained from the target in vivo environment in a subject; and comparing the measured level to a control level (e.g., the gene expression product expressed from a heterologous nucleic acid encapsidated by a reference AAV (e.g., AAV9). Suitable methods for measuring expression of a gene expression product luciferase reporter assay and quantitative polymerase chain reaction (qPCR).

[0089] The increased specificity is correlated with an increased enrichment in the target in vivo environment, which in some cases is represented with an enrichment score provided herein in FIGS. 2-14. As a non-limiting example, AAV.CAP-B10 (SEQ ID NO: 3943; DGAATKN), which is shown herein to be positively enriched in the brain (enrichment score of approximately 0.950) and not enriched in the liver (enrichment score of ˜0), as compared to a reference AAV9, also exhibited an increase in reporter gene expression (e.g., measured by luciferase reporter assay) in the brain and not in the liver as compared to a reference AAV9. Without being bound by a particular theory, the inventors of the present disclosure would expect to see this correlation for all rAAVs disclosed herein, and further, would expect that a more significant the enrichment score (whether negative or positive) would correlate with a more significant specificity to the in vivo environment(s) as indicated by a measured level of the gene expression product in the in vivo environment(s).

[0090] Transduction efficiency, as disclosed herein, may be measured by at least one of (1) a number of cells in a target in vivo or off-target in vivo environment expressing the heterologous nucleic acid encapsidated by the modified AAV capsid proteins disclosed herein, and (2) a quantity of expression of the heterologous nucleic acid in a single cell. Specificity for a target in vivo environment may be inferred when a presence, or an increase in a level, of rAAV-mediated transduction in a target in vivo environment is observed, as compared to a reference AAV. A lack of, or reduced, specificity to an off-target in vivo environment may be inferred when an absence, or a decrease in a level, of rAAV-mediated transduction in the off-target in vivo environment is observed, as compared to a reference AAV.

[0091] Native AAV serotypes have been shown to exhibit distinct tropism for various tissues and organs. The rAAV particles of the present disclosure include modified (e.g., chimeric) AAV9 capsids. AAV9 has been shown to exhibit a strong tropism for the central nervous system (CNS), lung, heart, liver, muscle, and testes as compared to AAV serotypes 1-8. In a direct comparison of AAV serotypes 1-9 administered intravenously via a tail vein injection in mice, AAV9 exhibits an increased specificity for viral transduction for the liver, lung, muscle, brain, testes, and heart as compared to AAV serotypes 1-8. In addition, AAV9 exhibits a high level of transduction efficiency in the liver, muscle, brain, and heart, as compared to AAV serotypes 1-8. However, the 7-mers disclosed herein may be engineered into a capsid protein from an AAV serotype other than AAV9, such as AAV2 or AAV8.

[0092] AAV capsid proteins from native AAV serotypes, such as AAV9, with tropisms specific to the liver activate the innate immune response, which is come cases causes a severe inflammatory response in a subject, which can lead to multi-organ failure. By improving transduction efficiency of a native AAV serotype for a target in vivo tissue (e.g., brain) and decreasing the specificity of the AAV capsid protein to the liver, the rAAV particles of the present disclosure reduce the immunogenic properties of AAV-mediated transgene delivery and prevent activation of the innate immune response.

[0093] The rAAV may comprise a chimeric AAV capsid. A “chimeric” AAV capsid refers to a capsid that has an exogenous amino acid or amino acid sequence (e.g., 7-mer substitution). The rAAV may comprise a mosaic AAV capsid. A “mosaic” AAV capsid refers to a capsid that made up of two or more capsid proteins or polypeptides, each derived from a different AAV serotype. The rAAV may be a result of transcapsidation, which, in some cases, refers to the packaging of an inverted terminal repeat (ITR) from a first serotype into a capsid of a second serotype, wherein the first and second serotypes are not the same. In some cases, the capsid genes of the parental AAV serotype is pseudotyped, which means that the †ITRs from a first AAV serotype (e.g., AAV2) are used in a capsid from a second AAV serotype (e.g., AAV9), wherein the first and second AAV serotypes are not the same. As a non-limiting example, a pseudotyped AAV serotype comprising the AAV2 ITRs and AAV9 capsid protein may be indicated AAV2/9. The rAAV may additionally, or alternatively, comprise a capsid that has been engineered to express an exogenous ligand binding moiety (e.g., receptor), or a native receptor that is modified. For example, the 7-mer substitutions described herein may alter the ligand-binding function of the parental AAV to provide an increased specificity for a particular cell-surface antigen.

[0094] The reference AAV disclosed herein, in some cases, is AAV9, because it provides the best comparison of a native AAV with strong tropisms for the CNS, lung, heart, liver, muscle, and testes. However, the reference AAV may be any serotype, e.g. a serotype selected from the group consisting of AAV1, AAV2, AAV3, AAV4, AAV5, AAV6, AAV7, AAV8, AAV9, AAV10, AAV11, AAV12, or variant thereof. For example, the reference AAV can have a serotype selected from the group consisting of AAV-PHP.B, AAV-PHP.eB, and AAV-PHP.S. In many instances, the reference AAV is the parental AAV, e.g., the corresponding unmodified AAV from which the variant AAV was engineered.

[0095] The rAAV capsid proteins of the present disclosure comprise a substitution of one or more amino acids in an amino acid sequence of an AAV capsid protein. The AAV capsid protein from which the engineered AAV capsid protein of the present disclosure is produced is referred to as a “parental” AAV capsid protein, or a “corresponding unmodified capsid protein”. In some cases, the parental AAV capsid protein has a serotype selected from the group consisting of AAV1, AAV2, rAAV3, AAV4, AAV5, AAV6, AAV7, AAV8, AAV9, AAV10, AAV11, and AAV12. The complete genome of AAV-1 is provided in GenBank Accession No. NC_002077; the complete genome of AAV-2 is provided in GenBank Accession No. NC_001401 and Srivastava et al., J. Virol., 45: 555-564 (1983); the complete genome of AAV-3 is provided in GenBank Accession No. NC_1829; the complete genome of AAV-4 is provided in GenBank Accession No. NC_001829; the AAV-5 genome is provided in GenBank Accession No. AF085716; the complete genome of AAV-6 is provided in GenBank Accession No. NC_00 1862; at least portions of AAV-7 and AAV-8 genomes are provided in GenBank Accession Nos. AX753246 and AX753249, respectively; the AAV-9 genome is provided in Gao et al., J. Virol., 78: 6381-6388 (2004); the AAV-10 genome is provided in Mol. Ther., 13(1): 67-76 (2006); the AAV-11 genome is provided in Virology. 330(2): 375-383 (2004); portions of the AAV-12 genome are provided in Genbank Accession No. DQ813647; portions of the AAV-13 genome are provided in Genbank Accession No. EU285562.

[0096] In some cases, the parental AAV is derived from an AAV with a serotype selected from the group consisting of AAV1, AAV2, AAV3, AAV4, AAV5, AAV6, AAV7, AAV8, AAV9, AAV10, AAV11, and AAV12. Put another way, the parental AAV is a variant of AAV1, AAV2, AAV3, AAV4, AAV5, AAV6, AAV7, AAV8, AAV9, AAV10, AAV11, or AAV12. By an AAV variant, it is meant an AAV having a sequence identity of 70% or more to AAV1, AAV2, AAV3, AAV4, AAV5, AAV6, AAV7, AAV8, AAV9, AAV10, AAV11, or AAV12, for example, a sequence identity of 80%, 850, or 90% or more; of 91%, 92%, 93%, 94%, 95% or more, in some instances of 96%, 97%, 98%, or 99% to AAV1, AAV2, AAV3, AAV4, AAV5, AAV6, AAV7, AAV8, AAV9, AAV10, AAV11, and AAV12. A variant may include, for example, an AAV comprising a heterologous amino acid or heterologous amino acid sequence within an amino acid sequence of the AAV capsid protein. The heterologous amino acid may be naturally occurring in a different AAV capsid protein. In some instances, the parental AAV capsid is described in US2019/0055578, US2018/0230489, US2017/0067908, US2019/0048041, U.S. Pat. No. 9,585,971, or US2017/0166926, all of which are incorporated herein in their entirety.

[0097] In some instances, the parental AAV is AAV9. In some instances, the amino acid sequence of the AAV9 capsid protein comprises SEQ ID NO: 1. In some instances, the parental AAV capsid protein sequence is 70%, 75%, 80%, 85%, 90%, 91%, 92%, 93%, 94%, 95%, 96%, 97%, 98%, 99%, or 100% homologous to SEQ ID NO: 1, or part of SEQ ID NO: 1. In some instances, the parental AAV capsid protein comprises the entire VP1 region provided in SEQ ID NO: 1 (e.g., amino acids 1-736). In some instances, the parental AAV capsid protein comprises amino acids 217-736 in SEQ ID NO: 1, which is the common region found in VP1. VP2 and VP3 AAV9 capsid proteins. In some instances, the AAV capsid protein comprises amino acids 64-736 in SEQ ID NO: 1, which is the common region found in VP1 and VP2. The parental AAV capsid protein sequence may comprise amino acids selected from the group consisting of 1-736, 10-736, 20-736, 30-736, 40-736, 50-736, 60-736, 70-736, 80-736, 90-736, 100-736, 110-736, 120-736, 130-736, 140-736, 150-736, 160-736, 170-736, 180-736, 190-736, 200-736, 210-736, 220-736, 230-736, 240-736, 250-736, 260-736, 270-736, 280-736, 290-736, 300-736, 310-736, 320-736, 330-736, 340-736, 350-736, 360-736, 370-736, 380-736, 390-736, 400-736, 410-736, 420-736, 430-736, 440-736, and 450-736, from SEQ ID NO: 1.

[0098] In some instances, the parental AAV is AAV5. In some instances, the amino acid sequence of the AAV5 capsid protein comprises SEQ ID NO: 2. In some instances, the parental AAV capsid protein sequence is 70%, 75%, 80%, 85%, 90%, 91%, 92%, 93%, 94%, 95%, 96%, 97%, 98%, 99%, or 100% homologous to SEQ ID NO: 2, or part of SEQ ID NO: 2. The parental AAV capsid protein sequence may comprise amino acids selected from the group consisting of 1-724, 10-724, 20-724, 30-724, 40-724, 50-724, 60-724, 70-724, 80-724, 90-724, 100-724, 110-724, 120-724, 130-724, 140-724, 150-724, 160-724, 170-724, 180-724, 190-724, 200-724, 210-724, 220-724, 230-724, 240-724, 250-724, 260-724, 270-724, 280-724, 290-724, 300-724, 310-724, 320-724, 330-724, 340-724, 350-724, 360-724, 370-724, 380-724, 390-724, 400-724, 410-724, 420-724, 430-724, 440-724, and 450-724, of SEQ ID NO: 2.

[0099] In some instances, the parental AAV is AAV-PHP.B. In some instances, the amino acid sequence of the AAV-PHP.B capsid protein comprises SEQ ID NO: 3. In some instances, the parental AAV capsid protein is 70%, 75%, 80%, 85%, 90%, 91%, 92%, 93%, 94%, 95%, 96%, 97%, 98%, 99%, or 100% homologous to SEQ ID NO: 3, or part of SEQ ID NO: 3. The parental AAV capsid protein sequence may comprise amino acids selected from the group consisting of 1-743, 10-743, 20-743, 30-743, 40-743, 50-743, 60-743, 70-743, 80-743, 90-743, 100-743, 110-743, 120-743, 130-743, 140-743, 150-743, 160-743, 170-743, 180-743, 190-743, 200-743, 210-743, 220-743, 230-743, 240-743, 250-743, 260-743, 270-743, 280-743, 290-743, 300-743, 310-743, 320-743, 330-743, 340-743, 350-743, 360-743, 370-743, 380-743, 390-743, 400-743, 410-743, 420-743, 430-743, 440-743, and 450-743, of SEQ ID NO: 3.

[0100] In some instances, the parental AAV is AAV.PHP.S. In some instances, the amino acid sequence of the AAV-PHP.S capsid protein comprises SEQ ID NO: 4. In some instances, the parental capsid protein is 70%, 75%, 80%, 85%, 90%, 91%, 92%, 93%, 94%, 95%, 96%, 97%, 98%, 99%, or 100% homologous to SEQ ID NO: 4, or part of SEQ ID NO: 4. The parental AAV capsid protein sequence may comprise amino acids selected from the group consisting of 1-743, 10-743, 20-743, 30-743, 40-743, 50-743, 60-743, 70-743, 80-743, 90-743, 100-743, 110-743, 120-743, 130-743, 140-743, 150-743, 160-743, 170-743, 180-743, 190-743, 200-743, 210-743, 220-743, 230-743, 240-743, 250-743, 260-743, 270-743, 280-743, 290-743, 300-743, 310-743, 320-743, 330-743, 340-743, 350-743, 360-743, 370-743, 380-743, 390-743, 400-743, 410-743, 420-743, 430-743, 440-743, and 450-743, of SEQ ID NO: 4.

[0101] In some instances, the parental AAV is AAV-PHP.eB. In some instances, the amino acid sequence of the AAV-PHP.eB capsid protein comprises SEQ ID NO: 5. In some instances, the AAV parental capsid protein is 70%, 75%, 80%, 85%, 90%, 91%, 92%, 93%, 94%, 95%, 96%, 97%, 98%, 99%, or 100% homologous to SEQ ID NO: 5, or part of SEQ ID NO: 5. The parental AAV capsid protein sequence may comprise amino acids selected from the group consisting of 1-743, 10-743, 20-743, 30-743, 40-743, 50-743, 60-743, 70-743, 80-743, 90-743, 100-743, 110-743, 120-743, 130-743, 140-743, 150-743, 160-743, 170-743, 180-743, 190-743, 200-743, 210-743, 220-743, 230-743, 240-743, 250-743, 260-743, 270-743, 280-743, 290-743, 300-743, 310-743, 320-743, 330-743, 340-743, 350-743, 360-743, 370-743, 380-743, 390-743, 400-743, 410-743, 420-743, 430-743, 440-743, and 450-743, of SEQ ID NO: 5.

[0102] In some instances, the insertion is introduced after any one amino acid position selected from 452-458 within an AAV9 (VP1 numbering), or equivalent amino acid position in a variant thereof. The amino acid sequence of AAV9 (VP1) is provided in SEQ ID NO: 1. In some instances, the substitution is a substitution of an amino acid at any one amino acid position selected from 452-458 within an AAV9 (VP1 numbering), or equivalent amino acid position in a variant thereof. In the some instances, the substitution is a substitution of the amino acid at amino acid position 452. In the some instances, the substitution is a substitution of the amino acid at amino acid position 453. In the some instances, the substitution is a substitution of the amino acid at amino acid position 454. In the some instances, the substitution is a substitution of the amino acid at amino acid position 455. In the some instances, the substitution is a substitution of the amino acid at amino acid position 456. In the some instances, the substitution is a substitution of the amino acid at amino acid position 457. In the some instances, the substitution is a substitution of the amino acid at amino acid position 458. In some instances, the substitution comprises a substitution of one amino acid. In some instances, the substitution comprises a substitution of two amino acids. In some instances, the substitution comprises a substitution of three amino acids. In some instances, the substitution comprises a substitution of four amino acids. In some instances, the substitution comprises a substitution of five amino acids. In some instances, the substitution comprises a substitution of six amino acids. In some instances, the substitution comprises a substitution of seven amino acids. The substitution or the insertion of two or more amino acids may be contiguous. The substitution or the insertion of two or more amino acids may not be contiguous.

[0103] Amino acids at position 452-458 according to VP1 numbering within SEQ ID NO: 1 (AAV9), SEQ ID NO: 3 (AAV-PHP.B), SEQ ID NO: 4 (AAV-PHP.S), and SEQ ID NO: 5 (AAV-PHP.eB) are indicated as “NGSGQNQ” (SEQ ID NO: 545). In some instances, amino acids at positions 452-458 within SEQ ID NO: 2 (AAV5) is indicated by a “NLAGRYA” (SEQ ID NO: 45478). In some instances, the substitution is at an amino acid position N452, G453. S454, G455, Q456, N457, or Q458, or a combination thereof, of an AAV9 capsid protein or variant thereof. In some instances, the substitution is an amino acid position N452, L453, A454, G455, G455, R456, Y457, or A458, or a combination thereof, of an AAV5 capsid protein or variant thereof. In some instances, the amino acid(s) substituted are located at amino acids 452453, which may include a substituted amino acid at position 452 and 453. In some instances, two amino acids are substituted at an amino acid position selected from the group consisting of 452-453, 453-455, 455-456, 456-457, and 457-458. In some instances, three amino acids are substituted at an amino acid position selected from the group consisting of 452-454, 453-455, 454-456, 455-457, and 456-458. In some instances, four amino acids are substituted at an amino acid position selected from the group consisting of 452-455, 452-456, 453-457, 454-458. In some instances, five amino acids are substituted at an amino acid position selected from the group consisting of 452-456, 453-457, and 454-458. In some instances, six amino acids are substituted at an amino acid position 452-457 or 453-458. In some instances, seven amino acids are substituted at an amino acid position 452-458.

[0104] The rAAV capsid proteins described herein may be isolated and purified. The AAV may be isolated and purified by methods standard in the art such as by column chromatography or cesium chloride gradients. Methods for purifying AAV from helper virus are known in the art and may include methods disclosed in, for example, Clark et al., Hum. Gene Ther., 10(6): 1031-1039 (1999); Schenpp and Clark, Methods Mol. Med., 69: 427-443 (2002); U.S. Pat. No. 6,566,118 and WO 98/09657.

[0105] The rAAV capsid protein can be conjugated to a nanoparticle, a second molecule, or a viral capsid protein. In some cases, the nanoparticle or viral capsid protein would encapsidate the therapeutic nucleic acid described herein. In some instances, the second molecule is a therapeutic agent, e.g., a small molecule, antibody, antigen-binding fragment, peptide, or protein, such as those described herein. In some instances, the second molecule is a detectable moiety. For example, the modified AAV capsid protein conjugated to a detectable moiety may be used for in vitro, ex vivo, or in vivo biomedical research applications, the detectable moiety used to visualize the modified capsid protein. The modified AAV capsid protein conjugated to a detectable moiety may also be used for diagnostic purposes.

rAAV Capsid Proteins Targeting the Central Nervous System

[0106] Disclosed herein are recombinant AAVs (rAAV) with variant capsid proteins comprising a desired tropism characterized by a substitution or an insertion of at least one amino acid at an amino acid position described above in a corresponding parental AAV capsid protein. In some instances, the rAAV capsid protein has a desired a tropism comprising increased specificity for a target in vivo environment in a subject. In some instances, the target in vivo environment comprises the central nervous system (CNS), or peripheral nervous system (PNS). One of the many advantages of the tropism of the rAAV capsid proteins described herein is their ability to target the CNS and penetrate the blood brain barrier (BBB). In some instances, the desired tropism further comprises a decreased specificity for an off-target in vivo environment, relative to a tropism of a corresponding parental AAV capsid protein. In some instances, the off-target in vivo environment comprises a peripheral organ, such as a liver. Another advantage of the rAAV capsid proteins described herein, is their ability to avoid expression of the heterologous nucleic acid in the liver, thereby reducing liver toxicity and the viral dosage amount required for therapeutic effectiveness.

[0107] The in vivo environment can be a cell. The cell can be a cell-type selected from the group consisting of a central nervous system (CNS) cell and a peripheral nervous system (PNS) cell. Non-limiting examples of CNS cells include a neuron and a glial cell. Glial cells can be selected from the group consisting of an oligodendrocyte, an ependymal cell, and an astrocytes. Non-limiting examples of a PNS cell includes a neuron or a glial cell. The glial cell can be selected from the group consisting of a Schwann cell a satellite cell, and an enteric glial cell.

[0108] The in vivo environment can be a tissue, such as from an organ or organ system. The organ can be the brain, or the spinal cord. The tissue can be a region of an organ, such as for example, the cerebrum, the cerebellum, the brainstem, the cortex, the striatum, the thalamus, the lateral ventricles, the putamen, the hypothalamus, the medulla, the pons, the hippocampus, the amygdala, the motor cortex, or a combination thereof.

[0109] Disclosed herein are rAAV capsid proteins comprising an amino acid sequence that confers an increased specificity and/or increased transduction efficiency for the CNS or PNS of a subject, as compared to a reference AAV. In some cases, the amino acid sequence also confers a decreased specificity or decreased transduction efficiency for a peripheral organ (e.g., liver), as compared to the reference AAV. The amino acid sequence, in some cases, comprises a substitution of at least one amino acid at an amino acid position selected from the group consisting of 452, 453, 454, 455, 456, 457, and 458 in an amino acid sequence of the AAV capsid protein (e.g., parental AAV). In some embodiments, the parental AAV is AAV9 or variant thereof.

[0110] Provided herein are rAAV capsid proteins with an increased specificity and/or increased transduction efficiency for the CNS or PNS as compared to a reference AAV, the rAAV capsid proteins comprising an amino acid (X1), wherein X1 is A, D, G, L, N, Q, S, or T. The rAAV capsid protein can comprise at least two amino acids, wherein X1 is A, D, G, L, N, Q, S, or T; and X2 is A, G, N, P, Q, R, S, or T. The rAAV can comprise at least three amino, wherein X1 is A, D, G, L, N, Q, S, or T; and X2 is A, G, N, P, Q, R, S, or T; and X3 is A, D, G, N, S, or T. The rAAV can comprise at least four amino acids, wherein X1 is A, D, G, L, N, Q, S, or T; X2 is A, G, N, P, Q, R, S, or T; X3 is A, D, G, N, S, or T; and X4 is A, D, G, K, N, P Q, S, or T. The rAAV can comprise at least five amino acids, wherein X1 is A, D, G, L, N, Q, S, or T; X2 is A, G, N, P, Q, R, S, or T; X3 is A, D, G, N, S, or T; X4 is A, D, G, K, N, P Q, S, or T; and X5 is A, G, K, N, P, R, S, or T. The rAAV can comprise at least six amino acids, wherein X1 is A, D, G, L, N, Q, S, or T; X2 is A, G, N, P, Q, R, S, or T; X3 is A, D, G, N, S, or T; X4 is A, D, G, K, N, P Q, S, or T; X5 is A, G, K, N, P, R, S, or T; and X6 is A, G, K, N, P, R, S, T, or V. The rAAV can comprise at least seven amino acids, wherein X1 is A, D, G, L, N, Q, S, or T; X2 is A, G, N, P, Q, R, S, or T; X3 is A, D, G, N, S, or T; X4 is A, D, G, K, N, P, Q, S, or T; X5 is A, G, K, N, P, R, S, or T; X6 is A, G, K, N, P, R, S, T, or V; and X7 is A, G, K, L, R, S, T, or V.

[0111] Provided herein are rAAV capsid proteins with an increased specificity and/or increased transduction efficiency for the CNS or PNS as compared to a reference AAV and a decreased specificity and/or a decreased transduction efficiency for a peripheral organ (e.g., liver) as compared to a reference AAV. The rAAV, in some cases, comprises an amino acid (X1), wherein X1 is G, A, V, N, S, H, L, E or Q. The rAAV capsid protein can comprise at least two amino acids, wherein X1 is G, A, V, N, S, H, L. E or Q; and X2 is A. I, T, P, N, R, T, G, S, K, H, or Q. The rAAV can comprise at least three amino, wherein X1 is G, A, V, N, S, H, L, E or Q; and X2 is A, I, T, P, N, R, T, G, S, K, H, or Q, and X3 is S, N, D, A, T, H, K, Q. The rAAV can comprise at least four amino acids. In some embodiments X1 is G, A, V, N, S, H, L, E or Q; X2 is A, 1, T, P, N, R, T, G, S, K, H, or Q; X3 is, N, D, A, T, H, K, Q; and X4 is N, G, T, S, D, P, R, T, or Q. The rAAV can comprise at least five amino acids, wherein X1 is G, A, V, N, S, H, L, E or Q; X2 is A, I, T, P, N, R, T, G, S, K, H or Q; X3 is, N, D, A, T, H, K, Q; X4 is N, G, T, S, D, P, R, T, or Q; and X5 is S, K, P, T, G, D, P, N, or V. The rAAV can comprise at least six amino acids, wherein X1 is G, A, V, N, S, H, L, E or Q; X2 is A, I, T, P, N, R, T, G, S, K, H, or Q; X3 is, N, D, A, T, H, K, Q; X4 is N, G, T, S, D, P, R, T, or Q; X5 is S, K, P, T, G, D, P, N, or V; and X6 is T, A, R S, N, G, D, P, or V. The rAAV can comprise at least seven amino acids, wherein X1 is G, A, V, N, S, H, L, E or Q; X2 is A, I, T, P, N, R, T, G, S, K, H, or Q; X3 is, N, D, A, T, H, K, Q; X4 is N, G, T, S, D, P, R, T, or Q; X5 is S, K, P, T, G, D, P, N, or V; X6 is T, A, R, S, N, G, D, P, or V; and X7 is G, N, S, L, A, E, K, or Q.

[0112] In some cases, the rAAV, in some cases, comprises an amino acid (X1), wherein X1 is A, D, E, G, H, M, N, Q, S, T, or V. The rAAV can comprise at least two amino acids, wherein X1 is A, D, E, G, H, M, N, Q, S, T, or V; and X2 is A, D, E, G, K, N, Q, S, T, or V. The rAAV can comprise at least three amino acids, wherein X1 is A, D, E, G, H, M, N, Q, S, T, or V; X2 is A, D, E, G, K, N, Q, S, T, or V; and X3 is A, D, E, G, K, N, Q, S, T, or V. The rAAV can comprise at least four amino acids, wherein X1 is A, D, E, G, H, M, N, Q, S, T, or V; X2 is A, D, E, G, K, N, Q, S, T, or V; X3 is A, D, E, G, K, N, Q, S, T, or V; and X4 is A, D, E, G, K, N, P, Q, S, or T. The rAAV can comprise at least five amino acids, wherein X1 is A, D, E, G, H, M, N, Q, S, T, or V; X2 is A, D, E, G, K, N, Q, S, T, or V; X3 is A, D, E, G, K, N, Q, S, T, or V; X4 is A, D, E, G, K, N, P, Q, S, or T; and X5 is A, D, E, G, H, K, N, P, Q, S, or T. The rAAV can comprise at least six amino acids, wherein X1 is A, D, E, G, H, M, N, Q, S, T, or V; X2 is A, D, E, G, K, N, Q, S, T, or V; X3 is A, D, E, G, K, N, Q, S, T, or V; X4 is A, D, E, G, K, N, P, Q, S, or T; X5 is A, D, E, G, H, K, N, P, Q, S, or T; and X6 is A, D, E, G, K, N, P, S, T, or V. The rAAV can comprise at least seven amino acids, wherein X1 is A, D, E, G, H, M, N, Q, S, T, or V; X2 is A, D, E, G, K, N, Q, S, T, or V; X3 is A, D, E, G, K, N, Q, S, T, or V; X4 is A, D, E, G, K, N, P, Q, S, or T; X5 is A, D, E, G, H, K, N, P, Q, S, or T; X6 is A, D, E, G, K, N, P, S, T, or V; and X7 is A, E, G, H, K, L, N, Q, S, T, or V.

[0113] In some cases, X1, X2, X3, X4, X5, X6, and X7 are contiguous (X1-X2-X3-X4-X5-X6-X7). Alternatively, X1, X2, X3, X4, X5, X6, and X7 are not contiguous. In some embodiments, any two of X1, X2, X3, X4, X5, X6, and X7 are contiguous. In some embodiments, any three of X1, X2, X3, X4, X5, X6, and X7 are contiguous. In some embodiments, any four of X1, X2, X3, X4, X5, X6, and X7 are contiguous. In some embodiments, any five of X1, X2, X3, X4, X5, X6, and X7 are contiguous. In some embodiments, any six of X1, X2, X3, X4, X5, X6, and X7 are contiguous. In some embodiments, any seven of X1, X2, X3, X4, X5, X6, and X7 are contiguous. In some embodiments, X1 is at an amino acid position 452 within an AAV9 capsid protein, or variant thereof. In some embodiments X2 is at an amino acid position 453 within an AAV9 capsid protein, or variant thereof. In some embodiments X3 is at an amino acid position 454 within an AAV9 capsid protein, or variant thereof. In some embodiments X4 is at an amino acid position 455 within an AAV9 capsid protein, or variant thereof. In some embodiments X5 is at an amino acid position 456 within an AAV9 capsid protein, or variant thereof. In some embodiments X6 is at an amino acid position 457 within an AAV9 capsid protein, or variant thereof. In some embodiments X7 is at an amino acid position 458 within an AAV9 capsid protein, or variant thereof. In some embodiments, the amino acid sequence of the rAAV does not comprise of an amino acid sequence ILGTGTS (SEQ ID NO: 45479) or QSSQTPR (SEQ ID NO: 45479) at amino acids 452-458 in a parental AAV9 capsid protein, or variant thereof.

[0114] Disclosed herein are rAAV capsid proteins comprising a substitution of one, two, three, four, five, six, or seven amino acids in an amino acid sequence provided any one of SEQ ID NOS: 11-12739. In some embodiments, the rAAV capsid proteins comprise a substitution of two amino acids in an amino acid sequence provided in any one of SEQ ID NOS: 11-12739. In some embodiments, the rAAV capsid proteins comprise a substitution of three amino acids in an amino acid sequence provided in any one of SEQ ID NOS: 11-12739. In some embodiments, the rAAV capsid proteins comprise a substitution of four amino acids in an amino acid sequence provided in any one of SEQ ID NOS: 11-12739. In some embodiments, the rAAV capsid proteins comprise a substitution of five amino acids in an amino acid sequence provided in any one of SEQ ID NOS: 11-12739. In some embodiments, the rAAV capsid proteins comprise a substitution of six amino acids in an amino acid sequence provided in any one of SEQ ID NOS: 11-12739.

[0115] Disclosed herein are rAAV capsid proteins that have an increased specificity and/or increased transduction efficiency for the central nervous system (CNS) or the peripheral nervous system (PNS). Exemplary substitutions include N452D, N452A, N452G, N452L, N452Q, N452S, N452T, G453I, G453N, G453S, G453P, G453R, G453T, S454A, S454Q, S454D, S454G. S454N, S454T, G455A, G455S, G455D, G455K, G455N, G455P, G455Q, G455T, Q456T, Q456S, Q456A, Q456G, Q456K, Q456N, Q456R, Q456P, N457K, N457A, N457G, N457P, N457R, N457S, N457T, N457V, Q458N, Q458A, Q458G, Q458K, Q458L, Q458R, Q458S, Q458T, or Q458V, in an amino acid sequence of the AAV9 capsid protein, or a variant thereof. In some embodiments, the substitution is of at least or about one two, three, four, five, six, or seven amino acids of an amino acid sequence LQTSSPG (SEQ ID NO: 2933). In some embodiments, the amino acid sequence is QQGKQSV (SEQ ID NO: 79). In some embodiments, the amino acid sequence is SINTKTN (SEQ ID NO: 45475). In some embodiments, the amino acid sequence is SNGTKQT (SEQ ID NO: 442). In some embodiments, the amino acid sequence is GSGKTAA (SEQ ID NO: 88). In some embodiments, the amino acid sequence is MGDKPTR (SEQ ID NO: 2466). In some embodiments, the amino acid sequence is DGAATKN (SEQ ID NO: 3943). In some embodiments, the amino acid sequence is QPSGGNT (SEQ ID NO: 2672). In some embodiments, the amino acid sequence is ERGANTK (SEQ ID NO: 5192). In some embodiments, the amino acid sequence is TTGGHSS (SEQ ID NO: 2743). In some embodiments, the amino acid sequence is GTTKTSE (SEQ ID NO: 3064). In some embodiments, the amino acid sequence is GTGTSVL (SEQ ID NO: 11958). In some embodiments, the amino acid sequence is NQSGTKG (SEQ ID NO: 780). In some embodiments, the amino acid sequence is DGQSSKS (SEQ ID NO: 2764). In some embodiments, the amino acid sequence is KGPGQMG (SEQ ID NO: 45476). In some embodiments, the amino acid sequence is GTPSKAG (SEQ ID NO: 2741).

[0116] Also provided herein are rAAV capsid proteins that have an increased specificity and/or increased transduction efficiency for the CNS and PNS, and a decrease in specificity and/or a decrease in transduction efficiency for an off-target in vivo environment, such as the liver. Exemplary substitutions include N452D, N452G. N452A, N452V, N452S, N452H, N452L, N452E, N452Q, G452A, G4521, G452T, G452P, G452R, G452T, G452S, G452K, G452H, S454A, S454N, S454D, S454G, S454T, S454H, S454K, S454Q, G455A, G455N, G455T, G455S, G455D, G455P, G455R, G455Q, Q456T, Q456S, Q456K, Q456P, Q456G, Q456D, Q456V, Q456A, Q456N, N457K, N457T, N457A, N457R, N457S, N457G, N457D, N457P, N457V, Q458N, Q458G, Q458S, Q458L, Q458A, Q458E, and Q458K, in an amino acid sequence of the AAV9 capsid protein, or a variant thereof. Additional exemplary substitutions include N452A, N452D, N452E, N452G, N452H, N452M, N452N, N452Q, N452S, N452T, N452V, G453A, G453D, G453E, G453G, G453K, G453N, G453Q, G453S, G453T, G453V, S454A, S454D, S454E, S454G, S454K, S454N, S454Q, S454S, S454T, S454V, G455A, G455D, G455E, G455G, G455K, G455N, G455P, G455Q, G455S, G455T, Q456A, Q456D, Q456E, Q456H, Q456H, Q456K, Q456N, Q456P, Q456Q, Q456S, Q456T, N457A, N457D, N457E, N457G, N457K, N457N, N457P, N457S, N457T, N457V, Q458A, Q458E, Q458G, Q458H, Q458K, Q458L, Q458N, Q458Q, Q458S, Q458T, and Q458V. Additional exemplary substitutions include N452A, N452D, N452E, N452G, N452H, N452K, N452L, N452M, N452N, N452Q, N452S. N452T, N452V, G453A, G453D, G453G, G453H, G453M, G453N, G453P, G453Q, G453S. G453T, G453V, S454A, S454D, S454E, S454G, S454K, S454N, S454Q, S454S, S454T, S454V, G455A, G455D, G455E, G455G, G455K, G455N, G455P, G455Q, G455S, G455T, Q456A, Q456D, Q456G, Q456K, Q456N, Q456P, Q456Q, Q456S, Q456T, N457A, N457G. N457H, N457L, N457M, N457N, N457P, N457Q, N457S, N457T, N457V, Q458A, Q458D, Q458E, Q458G, Q458H, Q458I, Q458K, Q458L, Q458N, Q458Q, Q458R, Q458S, Q458T, and Q458V. In some embodiments, the substitution is of at least or about one two, three, four, five, six, or seven amino acids of an amino acid sequence DGAATKN (SEQ ID NO: 3943). In some embodiments, the substitution is of at least or about one two, three, four, five, six, or seven amino acids of an amino acid sequence DGQSSKS (SEQ ID NO: 2764).

[0117] In some instances, the substitution of an amino acid is at an amino acid position selected from 452-458 in a capsid amino acid sequence of AAV9 or a variant thereof. In some instances, the substitution of the amino acid is at amino acid position selected from 452-458 in a capsid amino acid sequence provided in SEQ ID NO: 1. In some instances, the substitution of the amino acid is at amino acid position selected from 452-458 in a capsid amino acid sequence of AAV5 or variant thereof. In some instances, the substitution of the amino acid is at amino acid position selected from 452-458 in a capsid amino acid sequence of provided in SEQ ID NO: 2. In some instances, the substitution of the amino acid is at amino acid position selected from 452-458 in the AAVV-PHP.B capsid protein sequence (SEQ ID NO: 3). In some instances, the substitution of the amino acid is at amino acid position selected from 452-458 in the AAV-PHP.S capsid protein sequence (SEQ ID NO: 4). In some instances, the substitution of the amino acid is at amino acid position selected from 452-458 in the AAV-PHP.eB capsid protein sequence (SEQ ID NO: 5). In some embodiments, the rAAV of the present disclosure comprises the substitution of the amino acid at an amino acid position selected from 452-458 in a parental AAV capsid protein, and an insertion of an amino acid or amino acid sequence at an amino acid position 588-589 in the parental AAV capsid protein.

[0118] One rAAV capsid proteins of the present disclosure may also have an insertion of an amino acid sequence at amino acid position 588-589 in a parental AAV9 capsid protein, or variant thereof. In some embodiments, the insertion of the amino acid sequence comprises X1LAVPFK (SEQ ID NO: 45481) at amino acid position 588-589 in the parental AAV9 capsid protein, wherein X1 is any amino acid other than T. S, or N. In some embodiments, the insertion of the amino acid sequence comprises X1X2AVPFK (SEQ ID NO: 45482) at amino acid position 588-589 in the parental AAV9 capsid protein, wherein X2 is any amino acid other than L or V. In some embodiments, the insertion of the amino acid sequence comprises X1X2X3VPFK (SEQ ID NO: 45483) at amino acid position 588-589 in the parental AAV9 capsid protein, wherein X3 is any amino acid other than A, S, Q, P, and T. In some embodiments, the insertion of the amino acid sequence comprises X1X2X3X4PFK (SEQ ID NO: 45484) at amino acid position 588-589 in the parental AAV9 capsid protein, wherein X4 is any amino acid other than V, T, Q, N, L, and M. In some embodiments, the insertion of the amino acid sequence comprises TLAX4PFK (SEQ ID NO: 45485) at amino acid position 588-589 in the parental AAV9 capsid protein, wherein X is any amino acid other than V, T, Q, N, L, and M. In some embodiments, the rAAV further comprises a substitution of an amino acid at an amino acid position 587 in the parental AAV9 capsid protein, or variant thereof. In some embodiments, the substitution is A587D. In some embodiments, the substitution is a substitution with amino acid other than D. In some embodiments, the rAAV further comprises a substitution of an amino acid at an amino acid position 588 in the parental AAV9 capsid protein or variant thereof. In, some embodiments, the substitution is Q588G. In some embodiments, the substitution is a substitution with amino acid other than G.

[0119] In some embodiments, the rAAV capsid has a variant AAV capsid protein (e.g., an rAAV capsid protein) comprises a substitution of at least or about three, four, five, six, or seven amino acids of an amino acid sequence LQTSSPG (SEQ ID NO: 2933) at an amino acid position 452-458 in a parental AAV9 capsid protein (SEQ ID NO: 1). In some embodiments, the rAAV capsid protein comprises a substitution of at least or about three, four, five, six, or seven amino acids of an amino acid sequence LQTSSPG (SEQ ID NO: 2933) at an amino acid position 452-458 in a parental AAV9 variant capsid protein (SEQ ID NO: 3). In some embodiments, the rAAV capsid protein comprises a substitution of at least or about three, four, five, six, or seven amino acids of an amino acid sequence LQTSSPG (SEQ ID NO: 2933) at an amino acid position 452-458 in a parental AAV9 variant capsid protein (SEQ ID NO: 5). In some embodiments, the rAAV capsid protein comprises an insertion of at least or about three, four, five, six, seven, eight, nine, ten, or eleven amino acids at an amino acid position 588-589 in the parental AAV9 capsid protein, or variant thereof. In some embodiments, the insertion of the amino acid sequence comprises TLAVPFK (SEQ ID NO: 45477) at amino acid position 588-589 in the parental AAV9 capsid protein. In some embodiments, the rAAV capsid protein comprises an amino acid sequence provided in SEQ ID NO: 46386.

[0120] In some embodiments, the rAAV capsid protein comprises a substitution of at least or about three, four, five, six, or seven amino acids of an amino acid sequence QQGKQSV (SEQ ID NO: 79) at an amino acid position 452-458 in a parental AAV9 capsid protein (SEQ ID NO: 1). In some embodiments, the rAAV capsid protein comprises a substitution of at least or about three, four, five, six, or seven amino acids of an amino acid sequence QQGKQSV (SEQ ID NO: 79) at an amino acid position 452-458 in a parental AAV9 variant capsid protein (SEQ ID NO: 3). In some embodiments, the rAAV capsid protein comprises a substitution of at least or about three, four, five, six, or seven amino acids of an amino acid sequence QQGKQSV (SEQ ID NO: 79) at an amino acid position 452-458 in a parental AAV9 variant capsid protein (SEQ ID NO: 5). In some embodiments, the rAAV capsid protein comprises an insertion of at least or about three, four, five, six, seven, eight, nine, ten, or eleven amino acids at an amino acid position 588-589 in the parental AAV9 capsid protein, or variant thereof. In some embodiments, the insertion of the amino acid sequence comprises TLAVPFK (SEQ ID NO: 45477) at amino acid position 588-589 in the parental AAV9 capsid protein. In some embodiments, the rAAV capsid protein comprises an amino acid sequence provided in SEQ ID NO: 46387.

[0121] In some embodiments, the rAAV capsid protein comprises a substitution of at least or about three, four, five, six, or seven amino acids of an amino acid sequence SINTKTN (SEQ ID NO: 45475) at an amino acid position 452-458 in a parental AAV9 capsid protein (SEQ ID NO: 1). In some embodiments, the rAAV capsid protein comprises a substitution of at least or about three, four, five, six, or seven amino acids of an amino acid sequence SINTKTN (SEQ ID NO: 45475) at an amino acid position 452-458 in a parental AAV9 variant capsid protein (SEQ ID NO: 3). In some embodiments, the rAAV capsid protein comprises a substitution of at least or about three, four, five, six, or seven amino acids of an amino acid sequence SINTKTN (SEQ ID NO: 45475) at an amino acid position 452-458 in a parental AAV9 variant capsid protein (SEQ ID NO: 5). In some embodiments, the rAAV capsid protein comprises an insertion of at least or about three, four, five, six, seven, eight, nine, ten, or eleven amino acids at an amino acid position 588-589 in the parental AAV9 capsid protein, or variant thereof. In some embodiments, the insertion of the amino acid sequence comprises TLAVPFK (SEQ ID NO: 45477) at amino acid position 588-589 in the parental AAV9 capsid protein. In some embodiments, the rAAV capsid protein comprises an amino acid sequence provided in SEQ ID NO: 46368.

[0122] In some embodiments, the rAAV capsid protein comprises a substitution of at least or about three, four, five, six, or seven amino acids of an amino acid sequence SNGTKQT (SEQ ID NO: 442) at an amino acid position 452-458 in a parental AAV9 capsid protein represented by SEQ ID NO: 1. In some embodiments, the rAAV capsid protein comprises a substitution of at least or about three, four, five, six, or seven amino acids of an amino acid sequence SNGTKQT (SEQ ID NO: 442) at an amino acid position 452-458 in a parental AAV9 variant capsid protein represented by SEQ ID NO: 3 or SEQ ID NO: 5. In some embodiments, the rAAV capsid protein comprises an insertion of at least or about three, four, five, six, seven, eight, nine, ten, or eleven amino acids at an amino acid position 588-589 in the parental AAV9 capsid protein, or variant thereof. In some embodiments, the insertion of the amino acid sequence comprises TLAVPFK (SEQ ID NO: 45477) at amino acid position 588-589 in the parental AAV9 capsid protein. In some embodiments, the rAAV capsid protein comprises an amino acid sequence provided in SEQ ID NO: 46389.

[0123] In some embodiments, the rAAV capsid protein comprises a substitution of at least or about three, four, five, six, or seven amino acids of an amino acid sequence GSGKTAA (SEQ ID NO: 88) at an amino acid position 452-458 in a parental AAV9 capsid protein represented by SEQ ID NO: 1. In some embodiments, the rAAV capsid protein comprises a substitution of at least or about three, four, five, six, or seven amino acids of an amino acid sequence GSGKTAA (SEQ ID NO: 88) at an amino acid position 452-458 in a parental AAV9 variant capsid protein represented by SEQ ID NO: 3 or SEQ ID NO:5. In some embodiments, the rAAV capsid protein comprises an insertion of at least or about three, four, five, six, seven, eight, nine, ten, or eleven amino acids at an amino acid position 588-589 in the parental AAV9 capsid protein, or variant thereof. In some embodiments, the insertion of the amino acid sequence comprises TLAVPFK (SEQ ID NO: 45477) at amino acid position 588-589 in the parental AAV9 capsid protein. In some embodiments, the rAAV capsid protein comprises an amino acid sequence provided in SEQ ID NO: 46390.

[0124] In some embodiments, the rAAV capsid protein comprises a substitution of at least or about three, four, five, six, or seven amino acids of an amino acid sequence MGDKPTR (SEQ ID NO: 2466) at an amino acid position 452-458 in a parental AAV9 capsid protein represented by SEQ ID NO: 1. In some embodiments, the rAAV capsid protein comprises a substitution of at least or about three, four, five, six, or seven amino acids of an amino acid sequence MGDKPTR (SEQ ID NO: 2466) at an amino acid position 452-458 in a parental AAV9 variant capsid protein represented by SEQ ID NO: 3 or SEQ ID NO: 5. In some embodiments, the rAAV capsid protein comprises an insertion of at least or about three, four, five, six, seven, eight, nine, ten, or eleven amino acids at an amino acid position 588-589 in the parental AAV9 capsid protein, or variant thereof. In some embodiments, the insertion of the amino acid sequence comprises TLAVPFK (SEQ ID NO: 45477) at amino acid position 588-589 in the parental AAV9 capsid protein. In some embodiments, the rAAV capsid protein comprises an amino acid sequence provided in SEQ ID NO: 46391.

[0125] In some embodiments, the rAAV capsid protein comprises a substitution of at least or about three, four, five, six, or seven amino acids of an amino acid sequence DGAATKN (SEQ ID NO: 3943) at an amino acid position 452-458 in a parental AAV9 capsid protein represented by SEQ ID NO: 1. In some embodiments, the rAAV capsid protein comprises a substitution of at least or about three, four, five, six, or seven amino acids of an amino acid sequence DGAATKN (SEQ ID NO: 3943) at an amino acid position 452-458 in a parental AAV9 variant capsid protein represented by SEQ ID NO: 3 or SEQ ID NO:5. In some embodiments, the rAAV capsid protein comprises an insertion of at least or about three, four, five, six, seven, eight, nine, ten, or eleven amino acids at an amino acid position 588-589 in the parental AAV9 capsid protein, or variant thereof. In some embodiments, the insertion of the amino acid sequence comprises TLAVPFK (SEQ ID NO: 45477) at amino acid position 588-589 in the parental AAV9 capsid protein. In some embodiments, the rAAV capsid protein comprises an amino acid sequence provided in SEQ ID NO: 46384.

[0126] In some embodiments, the rAAV capsid protein comprises a substitution of at least or about three, four, five, six, or seven amino acids of an amino acid sequence QPSGGNT (SEQ ID NO: 2672) at an amino acid position 452-458 in a parental AAV9 capsid protein (SEQ ID NO: 1). In some embodiments, the rAAV capsid protein comprises a substitution of at least or about three, four, five, six, or seven amino acids of an amino acid sequence QPSGGNT (SEQ ID NO: 2672) at an amino acid position 452-458 in a parental AAV9 variant capsid protein (SEQ ID NO: 3). In some embodiments, the rAAV capsid protein comprises a substitution of at least or about three, four, five, six, or seven amino acids of an amino acid sequence QPSGGNT (SEQ ID NO: 2672) at an amino acid position 452-458 in a parental AAV9 variant capsid protein (SEQ ID NO: 5). In some embodiments, the rAAV capsid protein comprises an insertion of at least or about three, four, five, six, seven, eight, nine, ten, or eleven amino acids at an amino acid position 588-589 in the parental AAV9 capsid protein, or variant thereof. In some embodiments, the insertion of the amino acid sequence comprises TLAVPFK (SEQ ID NO: 45477) at amino acid position 588-589 in the parental AAV9 capsid protein. In some embodiments, the rAAV capsid protein comprises an amino acid sequence provided in SEQ ID NO: 46392.

[0127] In some embodiments, the rAAV capsid protein comprises a substitution of at least or about three, four, five, six, or seven amino acids of an amino acid sequence ERGANTK (SEQ ID NO: 5192) at an amino acid position 452-458 in a parental AAV9 capsid protein (SEQ ID NO: 1). In some embodiments, the rAAV capsid protein comprises a substitution of at least or about three, four, five, six, or seven amino acids of an amino acid sequence ERGANTK (SEQ ID NO: 5192) at an amino acid position 452-458 in a parental AAV9 variant capsid protein (SEQ ID NO: 3). In some embodiments, the rAAV capsid protein comprises a substitution of at least or about three, four, five, six, or seven amino acids of an amino acid sequence ERGANTK (SEQ ID NO: 5192) at an amino acid position 452-458 in a parental AAV9 variant capsid protein (SEQ ID NO: 5). In some embodiments, the rAAV capsid protein comprises an insertion of at least or about three, four, five, six, seven, eight, nine, ten, or eleven amino acids at an amino acid position 588-589 in the parental AAV9 capsid protein, or variant thereof. In some embodiments, the insertion of the amino acid sequence comprises TLAVPFK (SEQ ID NO: 45477) at amino acid position 588-589 in the parental AAV9 capsid protein. In some embodiments, the rAAV capsid protein comprises an amino acid sequence provided in SEQ ID NO: 46393.

[0128] In some embodiments, the rAAV capsid protein comprises a substitution of at least or about three, four, five, six, or seven amino acids of an amino acid sequence TTGGHSS (SEQ ID NO: 2743) at an amino acid position 452-458 in a parental AAV9 capsid protein (SEQ ID NO: 1). In some embodiments, the rAAV capsid protein comprises a substitution of at least or about three, four, five, six, or seven amino acids of an amino acid sequence TTGGHSS (SEQ ID NO: 2743) at an amino acid position 452-458 in a parental AAV9 variant capsid protein (SEQ ID NO: 3). In some embodiments, the rAAV capsid protein comprises a substitution of at least or about three, four, five, six, or seven amino acids of an amino acid sequence TTGGHSS (SEQ ID NO: 2743) at an amino acid position 452-458 in a parental AAV9 variant capsid protein (SEQ ID NO: 5). In some embodiments, the rAAV capsid protein comprises an insertion of at least or about three, four, five, six, seven, eight, nine, ten, or eleven amino acids at an amino acid position 588-589 in the parental AAV9 capsid protein, or variant thereof. In some embodiments, the insertion of the amino acid sequence comprises TLAVPFK (SEQ ID NO: 45477) at amino acid position 588-589 in the parental AAV9 capsid protein. In some embodiments, the rAAV capsid protein comprises an amino acid sequence provided in SEQ ID NO: 46394.

[0129] In some embodiments, the rAAV capsid protein comprises a substitution of at least or about three, four, five, six, or seven amino acids of an amino acid sequence GTTKTSE (SEQ ID NO: 3064) at an amino acid position 452-458 in a parental AAV9 capsid protein (SEQ ID NO: 1). In some embodiments, the rAAV capsid protein comprises a substitution of at least or about three, four, five, six, or seven amino acids of an amino acid sequence GTTKTSE (SEQ ID NO: 3064) at an amino acid position 452-458 in a parental AAV9 variant capsid protein (SEQ ID NO: 3). In some embodiments, the rAAV capsid protein comprises a substitution of at least or about three, four, five, six, or seven amino acids of an amino acid sequence GTTKTSE (SEQ ID NO: 3064) at an amino acid position 452-458 in a parental AAV9 variant capsid protein (SEQ ID NO: 5). In some embodiments, the rAAV capsid protein comprises an insertion of at least or about three, four, five, six, seven, eight, nine, ten, or eleven amino acids at an amino acid position 588-589 in the parental AAV9 capsid protein, or variant thereof. In some embodiments, the insertion of the amino acid sequence comprises TLAVPFK (SEQ ID NO: 45477) at amino acid position 588-589 in the parental AAV9 capsid protein. In some embodiments, the rAAV capsid protein comprises an amino acid sequence provided in SEQ ID NO: 46395.

[0130] In some embodiments, the rAAV capsid protein comprises a substitution of at least or about three, four, five, six, or seven amino acids of an amino acid sequence GTGTSVL (SEQ ID NO: 11958) at an amino acid position 452-458 in a parental AAV9 capsid protein (SEQ ID NO: 1). In some embodiments, the rAAV capsid protein comprises a substitution of at least or about three, four, five, six, or seven amino acids of an amino acid sequence GTGTSVL (SEQ ID NO: 11958) at an amino acid position 452-458 in a parental AAV9 variant capsid protein (SEQ ID NO: 3). In some embodiments, the rAAV capsid protein comprises a substitution of at least or about three, four, five, six, or seven amino acids of an amino acid sequence GTGTSVL (SEQ ID NO: 11958) at an amino acid position 452-458 in a parental AAV9 variant capsid protein (SEQ ID NO: 5). In some embodiments, the rAAV capsid protein comprises an insertion of at least or about three, four, five, six, seven, eight, nine, ten, or eleven amino acids at an amino acid position 588-589 in the parental AAV9 capsid protein, or variant thereof. In some embodiments, the insertion of the amino acid sequence comprises TLAVPFK (SEQ ID NO: 45477) at amino acid position 588-589 in the parental AAV9 capsid protein. In some embodiments, the rAAV capsid protein comprises an amino acid sequence provided in SEQ ID NO: 46396.

[0131] In some embodiments, the rAAV capsid protein comprises a substitution of at least or about three, four, five, six, or seven amino acids of an amino acid sequence NQSGTKG (SEQ ID NO: 780) at an amino acid position 452-458 in a parental AAV9 capsid protein (SEQ ID NO: 1). In some embodiments, the rAAV capsid protein comprises a substitution of at least or about three, four, five, six, or seven amino acids of an amino acid sequence NQSGTKG (SEQ ID NO: 780) at an amino acid position 452-458 in a parental AAV9 variant capsid protein (SEQ ID NO: 3). In some embodiments, the rAAV capsid protein comprises a substitution of at least or about three, four, five, six, or seven amino acids of an amino acid sequence NQSGTKG (SEQ ID NO: 780) at an amino acid position 452-458 in a parental AAV9 variant capsid protein (SEQ ID NO: 5). In some embodiments, the rAAV capsid protein comprises an insertion of at least or about three, four, five, six, seven, eight, nine, ten, or eleven amino acids at an amino acid position 588-589 in the parental AAV9 capsid protein, or variant thereof. In some embodiments, the insertion of an amino acid sequence comprising at least or about three, four, five, six, seven, eight, nine, ten, or eleven amino acids. In some embodiments, the insertion of the amino acid sequence comprises TLAVPFK (SEQ ID NO: 45477) at amino acid position 588-589 in the parental AAV9 capsid protein. In some embodiments, the rAAV capsid protein comprises an amino acid sequence provided in SEQ ID NO: 46397.

[0132] In some embodiments, the rAAV capsid protein comprises a substitution of at least or about three, four, five, six, or seven amino acids of an amino acid sequence DGQSSKS (SEQ ID NO: 2764) at an amino acid position 452-458 in a parental AAV9 capsid protein (SEQ ID NO: 1). In some embodiments, the rAAV capsid protein comprises a substitution of at least or about three, four, five, six, or seven amino acids of an amino acid sequence DGQSSKS (SEQ ID NO: 2764) at an amino acid position 452-458 in a parental AAV9 variant capsid protein (SEQ ID NO: 5). In some embodiments, the rAAV capsid protein comprises a substitution of at least or about three, four, five, six, or seven amino acids of an amino acid sequence DGQSSKS (SEQ ID NO: 2764) at an amino acid position 452-458 in a parental AAV9 variant capsid protein (SEQ ID NO: 5). In some embodiments, the rAAV capsid protein comprises an insertion of at least or about three, four, five, six, seven, eight, nine, ten, or eleven amino acids at an amino acid position 588-589 in the parental AAV9 capsid protein, or variant thereof. In some embodiments, the insertion of the amino acid sequence comprises TLAVPFK (SEQ ID NO: 45477) at amino acid position 588-589 in the parental AAV9 capsid protein. In some embodiments, the rAAV capsid protein comprises an amino acid sequence provided in SEQ ID NO: 46385.

[0133] In some embodiments, the rAAV capsid protein comprises a substitution of at least or about three, four, five, six, or seven amino acids of an amino acid sequence KGPGQMG (SEQ ID NO: 45476) at an amino acid position 452-458 in a parental AAV9 capsid protein (SEQ ID NO: 1). In some embodiments, the rAAV capsid protein comprises a substitution of at least or about three, four, five, six, or seven amino acids of an amino acid sequence KGPGQMG (SEQ ID NO: 45476) at an amino acid position 452-458 in a parental AAV9 variant capsid protein (SEQ ID NO: 3). In some embodiments, the rAAV capsid protein comprises a substitution of at least or about three, four, five, six, or seven amino acids of an amino acid sequence KGPGQMG (SEQ ID NO: 45476) at an amino acid position 452-458 in a parental AAV9 variant capsid protein (SEQ ID NO: 5). In some embodiments, the rAAV capsid protein comprises an insertion of at least or about three, four, five, six, seven, eight, nine, ten, or eleven amino acids at an amino acid position 588-589 in the parental AAV9 capsid protein, or variant thereof. In some embodiments, the insertion of the amino acid sequence comprises TLAVPFK (SEQ ID NO: 45477) at amino acid position 588-589 in the parental AAV9 capsid protein. In some embodiments, the rAAV capsid protein comprises an amino acid sequence provided in SEQ ID NO: 46398.

[0134] In some embodiments, the rAAV capsid protein comprises a substitution of at least or about three, four, five, six, or seven amino acids of an amino acid sequence GTPSKAG (SEQ ID NO: 2741) at an amino acid position 452-458 in a parental AAV9 capsid protein (SEQ ID NO: 1). In some embodiments, the rAAV capsid protein comprises a substitution of at least or about three, four, five, six, or seven amino acids of an amino acid sequence GTPSKAG (SEQ ID NO: 2741) at an amino acid position 452-458 in a parental AAV9 capsid protein (SEQ ID NO: 5). In some embodiments, the rAAV capsid protein comprises a substitution of at least or about three, four, five, six, or seven amino acids of an amino acid sequence GTPSKAG (SEQ ID NO: 2741) at an amino acid position 452-458 in a parental AAV9 variant capsid protein (SEQ ID NO: 5). In some embodiments, the rAAV capsid protein comprises an insertion of at least or about three, four, five, six, seven, eight, nine, ten, or eleven amino acids at an amino acid position 588-589 in the parental AAV9 capsid protein, or variant thereof. In some embodiments, the insertion of an amino acid sequence comprising at least or about three, four, five, six, seven, eight, nine, ten, or eleven amino acids. In some embodiments, the insertion of the amino acid sequence comprises TLAVPFK (SEQ ID NO: 45477) at amino acid position 588-589 in the parental AAV9 capsid protein. In some embodiments, the rAAV capsid protein comprises an amino acid sequence provided in SEQ ID NO: 46399.

[0135] Table 1 provides amino acid sequences of top performing rAAV capsid proteins, ranked based on a positive enrichment in the brain and negative enriched in the liver after two rounds of in vivo selection, as well as the DNA sequences encoding them. Table 2 provides amino acid sequences of top performing rAAV capsid proteins ranked based on an enrichment in the brain alone after two rounds of in vivo selection, and corresponding DNA sequences. Example 3 provides details on how the enrichment score was calculated. An AAV variant was determined to de-target a tissue if its enrichment score in that tissue was less than or equal to 0.

TABLE 1
List of 7 amino acid targeting
peptides of rAAVs that target
the CNS and detarget the liver

| | | | Amino | Log 10 | |
|---|---|---|---|---|---|
| SEQ | DNA | SEQ | Acid | enrichment | Log 10 |
| ID | Se- | ID | Se- | in the | enrichment |
| NO | quence | NO | quence | brain | in the liver |
| 15469 | AGCA | 2740 | SSTS | 1.805607713 | 0 |
| | GCAC | | GAG | | |
| | CAGC | | | | |
| | GGCG | | | | |
| | CCGG | | | | |
| | C | | | | |
| 15470 | GGCA | 2741 | GTPS | 1.782483914 | 0 |
| | CCCC | | KAG | | |
| | CAGC | | | | |
| | AAAG | | | | |
| | CCGG | | | | |
| | C | | | | |
| 15471 | GACA | 2742 | DKTT | 1.756796407 | 0 |
| | AAAC | | AGQ | | |
| | CACC | | | | |
| | GCCG | | | | |
| | GCCA | | | | |
| | A | | | | |
| 15472 | ACCA | 2743 | TTGG | 1.7086977 | 0 |
| | CCGG | | HSS | | |
| | CGGC | | | | |
| | CACA | | | | |
| | GCAG | | | | |
| | C | | | | |
| 15473 | GGCG | 2744 | GASN | 1.6215475 | 0 |
| | CCAG | | STG | | |
| | CAAC | | | | |
| | AGCA | | | | |
| | CCGG | | | | |
| | C | | | | |
| 15474 | GCCA | 2745 | AING | 1.611787687 | 0 |
| | TCAA | | KAG | | |
| | CGGC | | | | |
| | AAAG | | | | |
| | CCGG | | | | |
| | C | | | | |
| 15475 | GTCA | 2746 | VIDT | 1.611787687 | 0 |
| | TCGA | | KAG | | |
| | CACC | | | | |
| | AAAG | | | | |
| | CCGG | | | | |
| | C | | | | |
| 15476 | AACG | 2747 | NASS | 1.599553231 | 0 |
| | CCAG | | STG | | |
| | CAGC | | | | |
| | AGCA | | | | |
| | CCGG | | | | |
| | C | | | | |
| 15477 | GGTA | 2748 | GTSS | 1.593175811 | 0 |
| | CGAG | | PAN | | |
| | TAGT | | | | |
| | CCGG | | | | |
| | CTAA | | | | |
| | T | | | | |
| 15478 | GGCC | 2749 | GPGD | 1.559758687 | 0 |
| | CCGG | | TRS | | |
| | CGAC | | | | |
| | ACCA | | | | |
| | GAAG | | | | |
| | C | | | | |
| 15479 | GGGA | 2750 | GNGS | 1.534699431 | −1.140781313 |
| | ATGG | | SAL | | |
| | GTCG | | | | |
| | TCGG | | | | |
| | CGCT | | | | |
| | G | | | | |
| 15480 | GGCA | 2751 | GRSG | 1.532606441 | 0 |
| | GAAG | | GTG | | |
| | CGGC | | | | |
| | GGCA | | | | |
| | CCGG | | | | |
| | C | | | | |
| 15481 | AGCA | 2752 | STGP | 1.532606441 | 0 |
| | CCGG | | TPA | | |
| | CCCC | | | | |
| | ACCC | | | | |
| | CCGC | | | | |
| | C | | | | |
| 15482 | CATG | 2753 | HGGR | 1.514877674 | 0 |
| | GGGG | | DSS | | |
| | GAGG | | | | |
| | GATT | | | | |
| | CTAG | | | | |
| | T | | | | |
| 15483 | GGTT | 2754 | GSGT | 1.511287094 | 0 |
| | CTGG | | PNG | | |
| | TACG | | | | |
| | CCTA | | | | |
| | ATGG | | | | |
| | G | | | | |
| 15484 | GGCA | 2755 | GKAG | 1.497844335 | 0 |
| | AAGC | | STG | | |
| | CGGC | | | | |
| | AGCA | | | | |
| | CCGG | | | | |
| | C | | | | |
| 15485 | CTTA | 2756 | LSAG | 1.496394268 | −1.222750977 |
| | GTGC | | KGE | | |
| | GGGT | | | | |
| | AAGG | | | | |
| | GTGA | | | | |
| | G | | | | |
| 15486 | GTCG | 2757 | VGIP | 1.486848951 | 0 |
| | GCAT | | SAG | | |
| | CCCC | | | | |
| | AGCG | | | | |
| | CCGG | | | | |
| | C | | | | |
| 15487 | AGTG | 2758 | SGGQ | 1.480843526 | 0 |
| | GTGG | | KDN | | |
| | GCAG | | | | |
| | AAGG | | | | |
| | ATAA | | | | |
| | T | | | | |
| 15488 | GAAA | 2759 | ETGG | 1.45728072 | −1.321740616 |
| | CCGG | | SPK | | |
| | CGGC | | | | |
| | AGCC | | | | |
| | CCAA | | | | |
| | A | | | | |
| 15489 | CAAG | 2760 | QGHT | 1.455309339 | 0 |
| | GCCA | | NVA | | |
| | CACC | | | | |
| | AACG | | | | |
| | TCGC | | | | |
| | C | | | | |
| 15490 | TCGC | 2761 | SHGS | 1.445456265 | 0 |
| | ATGG | | PAS | | |
| | GAGT | | | | |
| | CCGG | | | | |
| | CTAG | | | | |
| | T | | | | |
| 15491 | AGCC | 2762 | SQKS | 1.445456265 | 0 |
| | AAAA | | VAG | | |
| | AAGC | | | | |
| | GTCG | | | | |
| | CCGG | | | | |
| | C | | | | |
| 15492 | GTTG | 2763 | VGQS | 1.444470352 | 0 |
| | GTCA | | AAQ | | |
| | GTCT | | | | |
| | GCTG | | | | |
| | CTCA | | | | |
| | G | | | | |
| 15493 | GACG | 2764 | DGQS | 1.444085169 | 0 |
| | GCCA | | SKS | | |
| | AAGC | | | | |
| | AGCA | | | | |
| | AAAG | | | | |
| | C | | | | |
| 15494 | GCCC | 2765 | AQAK | 1.442429811 | 0 |
| | AAGC | | PAG | | |
| | CAAA | | | | |
| | CCCG | | | | |
| | CCGG | | | | |
| | C | | | | |
| 15495 | ACCG | 2766 | TGHN | 1.435696428 | 0 |
| | GCCA | | SSM | | |
| | CAAC | | | | |
| | AGCA | | | | |
| | GCAT | | | | |
| | G | | | | |
| 15496 | GGCC | 2767 | GQST | 1.432491288 | 0 |
| | AAAG | | SSG | | |
| | CACC | | | | |
| | AGCA | | | | |
| | GCGG | | | | |
| | C | | | | |
| 15497 | ACCG | 2768 | TGIS | 1.429944099 | 0 |
| | GCAT | | GAG | | |
| | CAGC | | | | |
| | GGCG | | | | |
| | CCGG | | | | |
| | C | | | | |
| 15498 | GTCA | 2769 | VRDT | 1.417512639 | −0.925181513 |
| | GAGA | | SSS | | |
| | CACC | | | | |
| | AGCA | | | | |
| | GCAG | | | | |
| | C | | | | |
| 15499 | GTCA | 2770 | VSSK | 1.4131306 | −1.199559314 |
| | GCAG | | GLA | | |
| | CAAA | | | | |
| | GGCC | | | | |
| | TCGC | | | | |
| | C | | | | |
| 15500 | GATG | 2771 | DGRS | 1.411817991 | 0 |
| | GTCG | | TSA | | |
| | GTCG | | | | |
| | ACTA | | | | |
| | GTGC | | | | |
| | T | | | | |
| 15501 | AGCA | 2772 | SSNT | 1.407667705 | 0 |
| | GCAA | | GHT | | |
| | CACC | | | | |
| | GGCC | | | | |
| | ACAC | | | | |
| | C | | | | |
| 15502 | CAGA | 2773 | QNNS | 1.404438734 | 0 |
| | ATAA | | KTE | | |
| | TTCT | | | | |
| | AAGA | | | | |
| | CGGA | | | | |
| | G | | | | |
| 15503 | CAGG | 2774 | QEGS | 1.403779635 | −1.39768257 |
| | AGGG | | SSK | | |
| | GTCT | | | | |
| | TCGT | | | | |
| | CTAA | | | | |
| | G | | | | |
| 15504 | AACA | 2775 | NTKT | 1.397907867 | 0 |
| | CCAA | | TTG | | |
| | AACC | | | | |
| | ACCA | | | | |
| | CCGG | | | | |
| | C | | | | |
| 15505 | GCCA | 2776 | ASNS | 1.397404629 | 0 |
| | GCAA | | GST | | |
| | CAGC | | | | |
| | GGCA | | | | |
| | GCAC | | | | |
| | C | | | | |
| 15506 | CTGG | 2777 | LGGG | 1.39473782 | 0 |
| | GTGG | | KES | | |
| | TGGG | | | | |
| | AAGG | | | | |
| | AGTC | | | | |
| | G | | | | |
| 15507 | GGGA | 2778 | GNGK | 1.39394168 | 0 |
| | ATGG | | SDG | | |
| | GAAG | | | | |
| | AGTG | | | | |
| | ATGG | | | | |
| | T | | | | |
| 15508 | TCGG | 2779 | SEAN | 1.386478405 | 0 |
| | AGGC | | QKL | | |
| | TAAT | | | | |
| | CAGA | | | | |
| | AGCT | | | | |
| | T | | | | |
| 15509 | GCCA | 2780 | ASSP | 1.3821136 | −1.271968999 |
| | GCAG | | SGG | | |
| | CCCC | | | | |
| | AGCG | | | | |
| | GCGG | | | | |
| | C | | | | |
| 15510 | GATA | 2781 | DTGK | 1.379456849 | 0 |
| | CGGG | | ASM | | |
| | TAAG | | | | |
| | GCGT | | | | |
| | CGAT | | | | |
| | G | | | | |
| 15511 | GAGA | 2782 | ETSK | 1.379378065 | 0 |
| | CTTC | | ERA | | |
| | GAAG | | | | |
| | GAGA | | | | |
| | GGGC | | | | |
| | T | | | | |
| 15512 | GGCG | 2783 | GGGH | 1.374998588 | −0.4875688 |
| | GCGG | | KES | | |
| | CCAC | | | | |
| | AAAG | | | | |
| | AAAG | | | | |
| | C | | | | |
| 15513 | GACA | 2784 | DNGT | 1.3740768 | 0 |
| | ACGG | | KVI | | |
| | CACC | | | | |
| | AAAG | | | | |
| | TCAT | | | | |
| | C | | | | |
| 15514 | CAGG | 2785 | QVGK | 1.3706897 | 0 |
| | TGGG | | DSH | | |
| | GAAG | | | | |
| | GATA | | | | |
| | GTCA | | | | |
| | T | | | | |
| 15515 | ACCA | 2786 | TTSA | 1.365741816 | 0 |
| | CCAG | | TSV | | |
| | CGCC | | | | |
| | ACCA | | | | |
| | GCGT | | | | |
| | C | | | | |
| 15516 | CAGG | 2787 | QATG | 1.358399326 | −1.4875688 |
| | CTAC | | GTQ | | |
| | TGGT | | | | |
| | GGGA | | | | |
| | CGCA | | | | |
| | G | | | | |
| 15517 | GAGT | 2788 | ESGK | 1.345977191 | 0 |
| | CTGG | | GSL | | |
| | GAAG | | | | |
| | GGTA | | | | |
| | GTTT | | | | |
| | G | | | | |
| 15518 | GAAA | 2789 | ENSS | 1.3451798 | 0 |
| | ACAG | | GHA | | |
| | CAGC | | | | |
| | GGCC | | | | |
| | ACGC | | | | |
| | C | | | | |

TABLE 2
List of 7 amino acid
targeting peptides of
rAAVs that target the CNS

| SEQ | DNA | SEQ | Amino | Log 10 |
|---|---|---|---|---|
| ID | Se- | ID | Acid | enrichment in |
| NO | quence | NO | Sequence | the brain |
| 12740 | AGCG | 11 | SGLK | 1.912817683 |
| | GCCT | | GTG | |
| | CAAA | | | |
| | GGCA | | | |
| | CCGG | | | |
| | C | | | |
| 15469 | AGCA | 2740 | SSTS | 1.805607713 |
| | GCAC | | GAG | |
| | CAGC | | | |
| | GGCG | | | |
| | CCGG | | | |
| | C | | | |
| 15470 | GGCA | 2741 | GTPS | 1.782483914 |
| | CCCC | | KAG | |
| | CAGC | | | |
| | AAAG | | | |
| | CCGG | | | |
| | C | | | |
| 15471 | GACA | 2742 | DKTT | 1.756796407 |
| | AAAC | | AGQ | |
| | CACC | | | |
| | GCCG | | | |
| | GCCA | | | |
| | A | | | |
| 15472 | ACCA | 2743 | TTGG | 1.7086977 |
| | CCGG | | HSS | |
| | CGGC | | | |
| | CACA | | | |
| | GCAG | | | |
| | C | | | |
| 12741 | GTGG | 12 | VGGT | 1.683542214 |
| | GTGG | | QGK | |
| | GACT | | | |
| | CAGG | | | |
| | GTAA | | | |
| | G | | | |
| 12742 | AGCA | 13 | SMDS | 1.646549793 |
| | TGGA | | RPG | |
| | CAGC | | | |
| | AGAC | | | |
| | CCGG | | | |
| | C | | | |
| 12743 | GGTA | 14 | GSSP | 1.624376814 |
| | GTAG | | SKA | |
| | TCCT | | | |
| | AGTA | | | |
| | AGGC | | | |
| | T | | | |
| 15473 | GGCG | 2744 | GASN | 1.6215475 |
| | CCAG | | STG | |
| | CAAC | | | |
| | AGCA | | | |
| | CCGG | | | |
| | C | | | |
| 15474 | GCCA | 2745 | AING | 1.611787687 |
| | TCAA | | KAG | |
| | CGGC | | | |
| | AAAG | | | |
| | CCGG | | | |
| | C | | | |
| 15475 | GTCA | 2746 | VIDT | 1.611787687 |
| | TCGA | | KAG | |
| | CACC | | | |
| | AAAG | | | |
| | CCGG | | | |
| | C | | | |
| 12744 | ACTG | 15 | TGTA | 1.609487799 |
| | GTAC | | NPL | |
| | GGCG | | | |
| | AATC | | | |
| | CGTT | | | |
| | G | | | |
| 15476 | AACG | 2747 | NASS | 1.599553231 |
| | CCAG | | STG | |
| | CAGC | | | |
| | AGCA | | | |
| | CCGG | | | |
| | C | | | |
| 15477 | GGTA | 2748 | GTSS | 1.593175811 |
| | CGAG | | PAN | |
| | TAGT | | | |
| | CCGG | | | |
| | CTAA | | | |
| | T | | | |
| 12745 | AGCC | 16 | SQGA | 1.581298365 |
| | AAGG | | KPV | |
| | CGCC | | | |
| | AAAC | | | |
| | CCGT | | | |
| | C | | | |
| 12746 | CAGG | 17 | QGEK | 1.560127515 |
| | GGGA | | NTM | |
| | GAAG | | | |
| | AATA | | | |
| | CTAT | | | |
| | G | | | |
| 15478 | GGCC | 2749 | GPGD | 1.559758687 |
| | CCGG | | TRS | |
| | CGAC | | | |
| | ACCA | | | |
| | GAAG | | | |
| | C | | | |
| 15479 | GGGA | 2750 | GNGS | 1.534699431 |
| | ATGG | | SAL | |
| | GTCG | | | |
| | TCGG | | | |
| | CGCT | | | |
| | G | | | |
| 15480 | GGCA | 2751 | GRSG | 1.532606441 |
| | GAAG | | GTG | |
| | CGGC | | | |
| | GGCA | | | |
| | CCGG | | | |
| | C | | | |
| 15481 | AGCA | 2752 | STGP | 1.532606441 |
| | CCGG | | TPA | |
| | CCCC | | | |
| | ACCC | | | |
| | CCGC | | | |
| | C | | | |
| 12747 | ACCA | 18 | TSGN | 1.532606441 |
| | GCGG | | SSK | |
| | CAAC | | | |
| | AGCA | | | |
| | GCAA | | | |
| | A | | | |
| 15482 | CATG | 2753 | HGGR | 1.514877674 |
| | GGGG | | DSS | |
| | GAGG | | | |
| | GATT | | | |
| | CTAG | | | |
| | T | | | |
| 15483 | GGTT | 2754 | GSGT | 1.511287094 |
| | CTGG | | PNG | |
| | TACG | | | |
| | CCTA | | | |
| | ATGG | | | |
| | G | | | |
| 12748 | ACGA | 19 | TTSK | 1.510809312 |
| | CGTC | | PGT | |
| | TAAG | | | |
| | CCTG | | | |
| | GTAC | | | |
| | T | | | |
| 15484 | GGCA | 2755 | GKAG | 1.497844335 |
| | AAGC | | STG | |
| | CGGC | | | |
| | AGCA | | | |
| | CCGG | | | |
| | C | | | |
| 12749 | AGCC | 20 | SQGK | 1.497374065 |
| | AAGG | | GGS | |
| | CAAA | | | |
| | GGCG | | | |
| | GCAG | | | |
| | C | | | |
| 15485 | CTTA | 2756 | LSAG | 1.496394268 |
| | GTGC | | KGE | |
| | GGGT | | | |
| | AAGG | | | |
| | GTGA | | | |
| | G | | | |
| 12750 | GGGT | 21 | GSIK | 1.495179943 |
| | CGAT | | GEA | |
| | TAAG | | | |
| | GGGG | | | |
| | AGGC | | | |
| | T | | | |
| 12751 | AACA | 22 | NSGT | 1.492959081 |
| | GCGG | | TGN | |
| | CACC | | | |
| | ACCG | | | |
| | GCAA | | | |
| | C | | | |
| 15486 | GTCG | 2757 | VGIP | 1.486848951 |
| | GCAT | | SAG | |
| | CCCC | | | |
| | AGCG | | | |
| | CCGG | | | |
| | C | | | |
| 15487 | AGTG | 2758 | SGGQ | 1.480843526 |
| | GTGG | | KDN | |
| | GCAG | | | |
| | AAGG | | | |
| | ATAA | | | |
| | T | | | |
| 12752 | GAAA | 23 | ERTK | 1.465659651 |
| | GAAC | | ETL | |
| | CAAA | | | |
| | GAAA | | | |
| | CCCT | | | |
| | C | | | |
| 12753 | GATC | 24 | DHGK | 1.464822053 |
| | ATGG | | GNQ | |
| | TAAG | | | |
| | GGGA | | | |
| | ATCA | | | |
| | G | | | |
| 12754 | GATG | 25 | DGQQ | 1.464030027 |
| | GGCA | | RSS | |
| | GCAG | | | |
| | CGGA | | | |
| | GTAG | | | |
| | T | | | |
| 12755 | TCGG | 26 | SGNS | 1.458626389 |
| | GTAA | | TNK | |
| | TAGT | | | |
| | ACTA | | | |
| | ATAA | | | |
| | G | | | |
| 15488 | GAAA | 2759 | ETGG | 1.45728072 |
| | CCGG | | SPK | |
| | CGGC | | | |
| | AGCC | | | |
| | CCAA | | | |
| | A | | | |
| 12756 | GGTG | 27 | GVEQ | 1.456753138 |
| | TTGA | | RSG | |
| | GCAG | | | |
| | CGTT | | | |
| | CGGG | | | |
| | G | | | |
| 15489 | CAAG | 2760 | QGHT | 1.455309339 |
| | GCCA | | NVA | |
| | CACC | | | |
| | AACG | | | |
| | TCGC | | | |
| | C | | | |
| 12757 | AATG | 28 | NGGK | 1.451684533 |
| | GTGG | | SSS | |
| | TAAG | | | |
| | TCGA | | | |
| | GTTC | | | |
| | G | | | |
| 12758 | TCGA | 29 | STNK | 1.44624661 |
| | CTAA | | SNL | |
| | TAAG | | | |
| | AGTA | | | |
| | ATCT | | | |
| | G | | | |
| 15490 | TCGC | 2761 | SHGS | 1.445456265 |
| | ATGG | | PAS | |
| | GAGT | | | |
| | CCGG | | | |
| | CTAG | | | |
| | T | | | |
| 15491 | AGCC | 2762 | SQKS | 1.445456265 |
| | AAAA | | VAG | |
| | AAGC | | | |
| | GTCG | | | |
| | CCGG | | | |
| | C | | | |
| 15492 | GTTG | 2763 | VGQS | 1.444470352 |
| | GTCA | | AAQ | |
| | GTCT | | | |
| | GCTG | | | |
| | CTCA | | | |
| | G | | | |
| 15493 | GACG | 2764 | DGQS | 1.444085169 |
| | GCCA | | SKS | |
| | AAGC | | | |
| | AGCA | | | |
| | AAAG | | | |
| | C | | | |
| 15494 | GCCC | 2765 | AQAK | 1.442429811 |
| | AAGC | | PAG | |
| | CAAA | | | |
| | CCCG | | | |
| | CCGG | | | |
| | C | | | |
| 15495 | ACCG | 2766 | TGHN | 1.435696428 |
| | GCCA | | SSM | |
| | CAAC | | | |
| | AGCA | | | |
| | GCAT | | | |
| | G | | | |
| 15496 | GGCC | 2767 | GQST | 1.432491288 |
| | AAAG | | SSG | |
| | CACC | | | |
| | AGCA | | | |
| | GCGG | | | |
| | C | | | |
| 15497 | ACCG | 2768 | TGIS | 1.429944099 |
| | GCAT | | GAG | |
| | CAGC | | | |
| | GGCG | | | |
| | CCGG | | | |
| | C | | | |
| 12759 | GACG | 30 | DGQG | 1.424823398 |
| | GCCA | | NGK | |
| | AGGC | | | |
| | AACG | | | |
| | GCAA | | | |
| | A | | | |
| 15498 | GTCA | 2769 | VRDT | 1.417512639 |
| | GAGA | | SSS | |
| | CACC | | | |
| | AGCA | | | |
| | GCAG | | | |
| | C | | | |

### Modified AAV Capsid Proteins Targeting Organs or Tissues

[0136] Disclosed herein are recombinant AAV (rAAV) capsid proteins comprising a desired tropism characterized by a substitution or an insertion of at least one amino acid at an amino acid position described above in a parental AAV capsid protein (e.g., AAV5 or AAV9). The AAV capsid protein of the present disclosure is engineered to have a desired tropism comprising increased specificity for a target in vivo environment in a subject, such as an organ or organ system. One of the many advantages of the tropism of the rAAV capsid proteins described herein is their ability to express the heterologous nucleic acid in the organ, or organ system selectively and efficiently, while avoiding expression of the heterologous nucleic acid in an off-target organ, thereby reducing toxicity and the viral dosage amount required for therapeutic effectiveness.

[0137] The in vivo environment can be a tissue or a cell. The in vivo environment can be a tissue, such as from an organ or organ system. Non-limiting examples of an organ or organ system include a liver, intestine, heart, lung, reproductive organ, muscle, adipose, pancreas, a brain, and spleen. Non-limiting examples of a reproductive organ include an ovary and a testicle. The in vivo environment can be a cell. The cell can be a cell-type selected from the group consisting of a central nervous system (CNS) cell, a peripheral nervous system (PNS) cell, a liver cell, an intestine cell, a lung cell, a heart cell, an adipose cell, a muscle cell, a kidney cell, a muscle cell, a pancreas cell, a spleen cell, a reproductive organ cell, and a stomach cell. The CNS cell can be a neuron or a glial cell. The glial cell can be selected from the group consisting of an oligodendrocyte, an ependymal cell, and an astrocyte. The PNS cell can be a neuron or a glial cell. The glial cell can be selected from the group consisting of a Schwann cell a satellite cell, and an enteric glial cell. The liver cell can be a hepatocyte. The intestine cell can be selected from the group consisting of an enterocyte, a goblet cell, an enteroendocrine cell, a cup cell, a tuft cell, and a Paneth cell. The lung cell can be selected from the group consisting of an alveolar type I epithelial cell, an alveolar type II epithelial cell, an alveolar type I pneumocyte, an alveolar type II pneumocyte, a capillary endothelial cell, and an alveolar macrophage. The heart cell can be a cardiomyocyte. The stomach cell can be selected from the group consisting a mucous cell, a parietal cell, a chief cell, and a G cell. The muscle cell can be a myocyte.

[0138] rAAVs of the present disclosure that are optimized for targeting specific organ or tissue within a subject have amino acid sequences comprising an amino acid sequence provided in SEQ ID NOS: 25469-35471. In some embodiments, rAAVs optimized for targeting the heart have amino acid sequence comprising an amino acid sequence provided in SEQ ID NOS: 25469-26205. In some embodiments, rAAVs optimized for targeting the lung have amino acid sequences comprising an amino acid sequence provided in SEQ ID NOS: 32537-34198. In some embodiments, rAAVs optimized for targeting the liver have amino acid sequences that comprise an amino acid sequence provided in SEQ ID NOS: 30720-30923. In some embodiments. rAAVs optimized for targeting the intestine have amino acid sequences comprising an amino acid sequence provided in SEQ ID NOS: 26206-26873. In some embodiments, rAAVs optimized for targeting the stomach have amino acid sequences comprising amino acid sequence provided in SEQ ID NOS: 31873-32060. In some embodiments, rAAVs optimized for targeting the spleen have amino acid sequences comprising an amino acid sequence provided in SEQ ID NOS: 31468-31872. In some embodiments, rAAVs optimized for targeting the kidney have amino acid sequences comprising an amino acid sequence provided in SEQ ID NOS: 26874-30719. In some embodiments, rAAVs optimized for targeting the fat (adipose) have amino acid sequences comprising an amino acid sequence provided in SEQ ID NOS: 34199-35471. In some embodiments, rAAVs optimized for targeting the muscle have amino acid sequences comprising an amino acid sequence provided in SEQ ID NO: 30924-31451. The muscle may be cardiac muscle. The muscle may be skeletal muscle. In some embodiments, rAAVs optimized for targeting the pancreas have amino acid sequences comprising an amino acid sequence provided in SEQ ID NOS: 31452-31467. In some embodiments, rAAVs optimized for targeting a reproductive organ, such as a testicle, comprise amino acid sequences comprising an amino acid sequence provided in SEQ ID NOS: 32061-32536. In some instances, the reproductive organ is an ovary.

[0139] Disclosed herein are rAAV capsid proteins comprising a desired tropism characterized by a substitution of at least one amino acid at an amino acid position selected from 452-458 in an amino acid sequence of a parental AAV9 capsid protein, or a variant thereof. The rAAV capsid protein can comprise a substitution of at least one amino acid in a parental AAV capsid protein. In some instances, X1 is K, R, N, or T. The rAAV capsid protein can comprise a substitution or an insertion of at least two amino acids in a parental AAV capsid protein, wherein X1 is K, R, N, or T; and X2 is D, E, N, or V. The rAAV capsid protein can comprise a substitution or an insertion of at least three amino acids in a parental AAV capsid protein, wherein X1 is K, R, N, or T; X2 is D, E, N, or V; and X3 is N, S, L, or P. The rAAV capsid protein can comprise a substitution or an insertion of at least four amino acids in a parental AAV capsid protein, wherein X1 is K, R, N, or T; X2 is D, E, N, or V; X3 is N, S, L, or P; and X4 is T, S, P, or L. The rAAV capsid protein can comprise a substitution or an insertion of at least five amino acids in a parental AAV capsid protein, wherein X1 is K, R, N, or T; X2 is D, E, N, or V; X3 is N, S, L, or P; X4 is T, S, P, or L; and X5 is P, R, or S. The rAAV capsid protein can comprise a substitution or an insertion of at least six amino acids in a parental AAV capsid protein, wherein X1 is K, R, N, or T; X2 is D, E, N, or V; X3 is N, S, L, or P; X4 is T, S, P, or L; X5 is P, R, or S; and X6 is G, S, N, or T. The rAAV capsid protein can comprise a substitution or an insertion of at least seven amino acids in a parental AAV capsid protein, wherein, X1 is K, R, N, or T; X2 is D, E, N, or V; X3 is N, S, L, or P; IX4 is T, S, P, or L; X5 is P, R, or S; X6 is G, S, N, or T; and X7 is R, L or I.

[0140] In some embodiments, X1, X2, X3, X4, X5, X6, and X7 are contiguous (X1-X2-X3-X4-X5-X6-X7). In some embodiments, any two of X1, X2, X3, X4, X5, X6, and X7 are contiguous. In some embodiments, any three of X1, X2, X3, X4, X5, X6, and X7 are contiguous. In some embodiments, any four of X1, X2, X3, X4, X5, X6, and X7 are contiguous. In some embodiments, any five of X1, X2, X3, X4, X5, X6, and X7 are contiguous. In some embodiments, any six of X1, X2, X3, X4, X5, X6, and X7 are contiguous. In some embodiments, any seven of X1, X2, X3, X4, X5, X6, and X7 are contiguous. In some embodiments, X1, X2, X3, X4, X5, X6, and X7 are not contiguous. In some embodiments, X1 is at an amino acid position 452 within an AAV9 capsid protein, or variant thereof. In some embodiments X2 is at an amino acid position 453 within an AAV9 capsid protein, or variant thereof. In some embodiments X3 is at an amino acid position 454 within an AAV9 capsid protein, or variant thereof. In some embodiments X4 is at an amino acid position 455 within an AAV9 capsid protein, or variant thereof. In some embodiments X5 is at an amino acid position 456 within an AAV9 capsid protein, or variant thereof. In some embodiments X6 is at an amino acid position 457 within an AAV9 capsid protein, or variant thereof. In some embodiments X7 is at an amino acid position 458 within an AAV9 capsid protein, or variant thereof.

[0141] Disclosed herein are rAAV capsid proteins that comprise a substitution of at least one, two, three, four, five, six, or seven amino acids provided any one of SEQ ID NOS: 25469-35471. In some embodiments, the at least one, two, three, four, five, six, or seven amino acids are provided in an amino acid sequence selected from SEQ ID NOS: 25469-26205. In some embodiments, the at least one, two, three, four, five, six, or seven amino acids are provided in an amino acid sequence selected from SEQ ID NOS: 26206-26873. In some embodiments, the at least one, two, three, four, five, six, or seven amino acids are provided in an amino acid sequence selected from SEQ ID NOS: 26874-30719. In some embodiments, the at least one, two, three, four, five, six, or seven amino acids are provided in an amino acid sequence selected from SEQ ID NOS: 30720-30923. In some embodiments, the at least one, two, three, four, five, six, or seven amino acids are provided in an amino acid sequence selected from SEQ ID NO: 30924-31451. In some embodiments, the at least one, two, three, four, five, six, or seven amino acids are provided in an amino acid sequence selected from SEQ ID NOS: 31452-31467. In some embodiments, the at least one, two, three, four, five, six, or seven amino acids are provided in an amino acid sequence selected from SEQ ID NOS: 31468-31872. In some embodiments, the at least one, two, three, four, five, six, or seven amino acids are provided in an amino acid sequence selected from SEQ ID NOS: 31873-32060. In some embodiments, the at least one, two, three, four, five, six, or seven amino acids are provided in an amino acid sequence selected from SEQ ID NOS: 32061-32536. In some embodiments, the at least one, two, three, four, five, six, or seven amino acids are provided in an amino acid sequence selected from SEQ ID NOS: 32537-34198. In some embodiments, the at least one, two, three, four, five, six, or seven amino acids are provided in an amino acid sequence selected from SEQ ID NOS: 34199-35471. In some embodiments, the substitution comprises N452K, N452R, N452T, G453D, G453L, G453E, G453V, G453N, G453S, G453L, G453P, S454L, S454P, S454A, S454D, S454G, S454T, G455T, G455S, G455P, G455L, Q456P, Q456R, Q456S, N457G, N457S, N457T, Q458R, Q458L or Q458I, or a combination thereof.

[0142] Disclosed herein are rAAV capsid proteins that comprise a substitution of at least or about one, two, three, four, five, six, or seven amino acids of an amino acid sequence provided herein. In some embodiments, the amino acid sequence is KDNTPGR (SEQ ID NO: 32538). In some embodiments, the amino acid sequence is NNLPRNL (SEQ ID NO: 32867). In some embodiments, the amino acid sequence is RESSPSL (SEQ ID NO: 29065). In some embodiments, the amino acid sequence is RVPLSTI (SEQ ID NO: 26933).

[0143] In some instances, the substitution of an amino acid is at an amino acid position selected from 452-458 in a capsid amino acid sequence of AAV9 or a variant thereof. In some instances, the substitution of the amino acid is at amino acid position selected from 452-458 in a capsid amino acid sequence provided in SEQ ID NO: 1. In some instances, the substitution of the amino acid is at amino acid position selected from 452-458 in a capsid amino acid sequence of AAV5 or variant thereof. In some instances, the substitution of the amino acid is at amino acid position selected from 452-458 in a capsid amino acid sequence of provided in SEQ ID NO: 2. In some instances, the substitution of the amino acid is at amino acid position selected from 452-458 in the AAVV-PHP.B capsid protein sequence (SEQ ID NO: 3). In some instances, the substitution of the amino acid is at amino acid position selected from 452-458 in the AAV-PHP.S capsid protein sequence (SEQ ID NO: 4). In some instances, the substitution of the amino acid is at amino acid position selected from 452-458 in the AAV-PHP.eB capsid protein sequence (SEQ ID NO: 5). In some embodiments, the rAAV of the present disclosure comprises the substitution of the amino acid at an amino acid position selected from 452-458 in a parental AAV capsid protein, and an insertion of an amino acid or amino acid sequence at an amino acid position 588-589 in the parental AAV capsid protein.

[0144] The rAAV capsid proteins of the present disclosure may also have an insertion of an amino acid sequence at amino acid position 588 in a parental AAV9 or AAV5 capsid protein, or variant thereof. In some embodiments, the insertion of the amino acid sequence comprises X1LAVPFK (SEQ ID NO: 45481) at amino acid position 588-589 in the parental AAV9 AAV5 capsid protein, wherein X1 is any amino acid other than T, S, or N. In some embodiments, the insertion of the amino acid sequence comprises X1X2AVPFK (SEQ ID NO: 45482) at amino acid position 588-589 in the parental AAV9 or AAV5 capsid protein, wherein X2 is any amino acid other than L or V. In some embodiments, the insertion of the amino acid sequence comprises X1X2X3VPFK (SEQ ID NO: 45483) at amino acid position 588-589 in the parental AAV9 or AAV5 capsid protein, wherein X3 is any amino acid other than A, S, Q, P, and T. In some embodiments, the insertion of the amino acid sequence comprises X1X2X3X4PFK (SEQ ID NO: 45484) at amino acid position 588-589 in the parental AAV9 or AAV5 capsid protein, wherein X4 is any amino acid other than V, T, Q, N, L, and M. In some embodiments, the insertion of the amino acid sequence comprises TLAX4PFK (SEQ ID NO: 45485) at amino acid position 588-589 in the parental AAV9 or AAV5 capsid protein, wherein X is any amino acid other than V, T, Q, N, L, and M. In some embodiments, the rAAV further comprises a substitution of an amino acid at an amino acid position 587 in the parental AAV9 or AAV5 capsid protein, or variant thereof. In some embodiments, the substitution is A587D. In some embodiments, the substitution is a substitution with amino acid other than D. In some embodiments, the rAAV further comprises a substitution of an amino acid at an amino acid position 588 in the parental AAV9 or AAV5 capsid protein or variant thereof. In, some embodiments, the substitution is Q588G. In some embodiments, the substitution is a substitution with amino acid other than G.

[0145] In some embodiments, the rAAV capsid protein comprises a substitution of at least or about three, four, five, six, or seven amino acids of an amino acid sequence KDNTPGR (SEQ ID NO:32538) at an amino acid position 452-458 in a parental AAV9 capsid protein (SEQ ID NO: 1). In some embodiments, the rAAV capsid protein comprises a substitution of at least or about three, four, five, six, or seven amino acids of an amino acid sequence KDNTPGR (SEQ ID NO:32538) at an amino acid position 452-458 in a parental AAV9 variant capsid protein (SEQ ID NO: 3). In some embodiments, the rAAV capsid protein comprises a substitution of at least or about three, four, five, six, or seven amino acids of an amino acid sequence KDNTPGR (SEQ ID NO:32538) at an amino acid position 452-458 in a parental AAV9 variant capsid protein (SEQ ID NO: 5). In some embodiments, the rAAV capsid protein comprises a substitution of at least or about three, four, five, six, or seven amino acids of an amino acid sequence KDNTPGR (SEQ ID NO:32538) at an amino acid position 452-458 in a parental AAV5 capsid protein (SEQ ID NO: 2). In some embodiments, the rAAV capsid protein comprises a substitution of at least or about three, four, five, six, or seven amino acids of an amino acid sequence KDNTPGR (SEQ ID NO:32538) at an amino acid position 452-458 in a parental AAV5 variant capsid protein. In some embodiments, the rAAV capsid protein comprises an insertion of at least or about three, four, five, six, seven, eight, nine, ten, or eleven amino acids at an amino acid position 588-589 in the parental AAV9 capsid protein, or variant thereof. In some embodiments, the rAAV capsid protein comprises an amino acid sequence provided in SEQ ID NO: 46400.

[0146] In some embodiments, the rAAV capsid protein comprises a substitution of at least or about three, four, five, six, or seven amino acids of an amino acid sequence NNLPRNL (SEQ ID NO: 32867) at an amino acid position 452-458 in a parental AAV9 capsid protein (SEQ ID NO: 1). In some embodiments, the rAAV capsid protein comprises a substitution of at least or about three, four, five, six, or seven amino acids of an amino acid sequence NNLPRNL (SEQ ID NO: 32867) at an amino acid position 452-458 in a parental AAV9 variant capsid protein (SEQ ID NO: 3). In some embodiments, the rAAV capsid protein comprises a substitution of at least or about three, four, five, six, or seven amino acids of an amino acid sequence NNLPRNL (SEQ ID NO: 32867) at an amino acid position 452-458 in a parental AAV9 variant capsid protein (SEQ ID NO: 5). In some embodiments, the rAAV capsid protein comprises a substitution of at least or about three, four, five, six, or seven amino acids of an amino acid sequence NNLPRNL (SEQ ID NO: 32867) at an amino acid position 452-458 in a parental AAV5 capsid protein (SEQ ID NO: 2). In some embodiments, the rAAV capsid protein comprises a substitution of at least or about three, four, five, six, or seven amino acids of an amino acid sequence NNLPRNL (SEQ ID NO: 32867) at an amino acid position 452-458 in a parental AAV5 variant capsid protein. In some embodiments, the rAAV capsid protein comprises an insertion of at least or about three, four, five, six, seven, eight, nine, ten, or eleven amino acids at an amino acid position 588-589 in the parental AAV9 capsid protein, or variant thereof. In some embodiments, the rAAV capsid protein comprises an amino acid sequence provided in SEQ ID NO: 46401.

[0147] In some embodiments, the rAAV capsid protein comprises a substitution of at least or about three, four, five, six, or seven amino acids of an amino acid sequence RESSPSL (SEQ ID NO: 29065) at an amino acid position 452-458 in a parental AAV9 capsid protein (SEQ ID NO: 1). In some embodiments, the rAAV capsid protein comprises a substitution of at least or about three, four, five, six, or seven amino acids of an amino acid sequence RESSPSL (SEQ ID NO: 29065) at an amino acid position 452-458 in a parental AAV9 variant capsid protein (SEQ ID NO: 3). In some embodiments, the rAAV capsid protein comprises a substitution of at least or about three, four, five, six, or seven amino acids of an amino acid sequence RESSPSL (SEQ ID NO: 29065) at an amino acid position 452-458 in a parental AAV9 variant capsid protein (SEQ ID NO: 5). In some embodiments, the rAAV capsid protein comprises a substitution of at least or about three, four, five, six, or seven amino acids of an amino acid sequence RESSPSL (SEQ ID NO: 29065) at an amino acid position 452-458 in a parental AAV5 capsid protein (SEQ ID NO: 2). In some embodiments, the rAAV capsid protein comprises a substitution of at least or about three, four, five, six, or seven amino acids of an amino acid sequence RESSPSL (SEQ ID NO: 29065) at an amino acid position 452-458 in a parental AAV5 variant capsid protein. In some embodiments, the rAAV capsid protein comprises an insertion of at least or about three, four, five, six, seven, eight, nine, ten, or eleven amino acids at an amino acid position 588-589 in the parental AAV9 capsid protein, or variant thereof. In some embodiments, the rAAV capsid protein comprises an amino acid sequence provided in SEQ ID NO: 46402.

[0148] In some embodiments, the rAAV capsid protein comprises a substitution of at least or about three, four, five, six, or seven amino acids of an amino acid sequence RVPLSTI (SEQ ID NO: 26933) at an amino acid position 452-458 in a parental AAV9 capsid protein (SEQ ID NO: 1). In some embodiments, the rAAV capsid protein comprises a substitution of at least or about three, four, five, six, or seven amino acids of an amino acid sequence RVPLSTI (SEQ ID NO: 26933) at an amino acid position 452-458 in a parental AAV9 variant capsid protein (SEQ ID NO: 3). In some embodiments, the rAAV capsid protein comprises a substitution of at least or about three, four, five, six, or seven amino acids of an amino acid sequence RVPLSTI (SEQ ID NO: 26933) at an amino acid position 452-458 in a parental AAV9 variant capsid protein (SEQ ID NO: 5). In some embodiments, the rAAV capsid protein comprises a substitution of at least or about three, four, five, six, or seven amino acids of an amino acid sequence RVPLSTI (SEQ ID NO: 26933) at an amino acid position 452-458 in a parental AAV5 capsid protein (SEQ ID NO: 2). In some embodiments, the rAAV capsid protein comprises a substitution of at least or about three, four, five, six, or seven amino acids of an amino acid sequence RVPLSTI (SEQ ID NO: 26933) at an amino acid position 452-458 in a parental AAV5 variant capsid protein. In some embodiments, the rAAV capsid protein comprises an insertion of at least or about three, four, five, six, seven, eight, nine, ten, or eleven amino acids at an amino acid position 588-589 in the parental AAV9 capsid protein, or variant thereof. In some embodiments, the rAAV capsid protein comprises an amino acid sequence provided in SEQ ID NO: 46403.

### Heterologous Nucleic Acids

[0149] Disclosed herein are heterologous nucleic acids comprising therapeutic nucleic acids useful for the treatment or prevention of a disease or condition, or symptom of the disease or condition, disclosed herein. In some embodiments, the therapeutic nucleic acids encode a therapeutic gene expression product. Non-limiting examples of gene expression products include proteins, polypeptides, peptides, enzymes, antibodies, antigen binding fragments, nucleic acid (RNA, DNA, antisense oligonucleotide, siRNA, and the like), and gene editing components, for use in the treatment, prophylaxis, and/or amelioration of the disease or disorder, or symptoms of the disease or disorder. In some instances, the therapeutic nucleic acids are placed in an organism, cell, tissue or organ of a subject by way of a rAAV, such as those disclosed herein.

[0150] Disclosed herein are rAAVs, each comprising a viral genome (e.g., a single stranded DNA molecule (ssDNA)). In some instances, the viral vector comprises two inverted terminal repeat (ITR) sequences that are about 145 bases each, flanking the heterologous nucleic acid or transgene. In some embodiments, the transgene comprises a therapeutic nucleic acid, and in some cases, a promoter in cis with the therapeutic nucleic acid in an open reading frame (ORF). The promoter is capable of initiating transcription of therapeutic nucleic acid in the nucleus of the target cell. The ITR sequences can be from any AAV serotype. Non-limiting examples of AAV serotypes include AAV1, AAV2, AAV3, AAV4, AAV5, AAV6, AAV7, AAV8, AAV9, AAV10, AAV11, and AAV12. In some cases, an ITR is from AAV2. In some cases, an ITR is from AAV9.

[0151] Disclosed herein are transgenes that can comprise any number of nucleotides. In some cases, a transgene can comprise less than about 100 nucleotides. In some cases, a transgene can comprise at least about 100 nucleotides. In some cases, a transgene can comprise at least about 200 nucleotides. In some cases, a transgene can comprise at least about 300 nucleotides. In some cases, a transgene can comprise at least about 400 nucleotides. In some cases, a transgene can comprise at least about 500 nucleotides. In some cases, a transgene can comprise at least about 1000 nucleotides. In some cases, a transgene can comprise at least about 5000 nucleotides. In some cases, a transgene can comprise at least about 10,000 nucleotides. In some cases, a transgene can comprise at least about 20,000 nucleotides. In some cases, a transgene can comprise at least about 30,000 nucleotides. In some cases, a transgene can comprise at least about 40,000 nucleotides. In some cases, a transgene can comprise at least about 50,000 nucleotides. In some cases, a transgene can comprise between about 500 and about 5000 nucleotides. In some cases, a transgene can comprise between about 5000 and about 10,000 nucleotides. In any of the cases disclosed herein, the transgene can comprise DNA, RNA, or a hybrid of DNA and RNA. In some cases, the transgene can be single stranded. In some cases, the transgene can be double stranded.

[0152] Disclosed herein are transgenes useful for modulating the expression or activity of a target gene or gene expression product thereof. In some instances, the transgene is encapsidated by an rAAV capsid protein of an rAAV particle described herein. In some instances, the rAAV particle is delivered to a subject to treat a disease or condition disclosed herein in the subject. In some instances, the delivery is systemic (e.g., intravenous, intranasal).

[0153] The transgenes disclosed herein are useful for expressing an endogenous gene at a level similar to that of a healthy or normal individual. This is particularly useful in the treatment of a disease or condition related to the underexpression, or lack of expression, of a gene expression product. In some embodiments, the transgenes disclosed herein are useful for overexpressing an endogenous gene, such that an expression level of the endogenous gene is above the expression level of a healthy or normal individual. Additionally, transgenes can be used to express exogenous genes (e.g., active agent such as an antibody, peptide, nucleic acid, or gene editing components). In some embodiments, the therapeutic gene expression product is capable of altering, enhancing, increasing, or inducing the activity of one or more endogenous biological processes in the cell. In some embodiments, the transgenes disclosed herein are useful for reducing expressing an endogenous gene, such as for example, a dominant negative gene. In some embodiments, the therapeutic gene expression product is capable of altering, inhibiting, reducing, preventing, eliminating, or impairing the activity of one or more endogenous biological processes in the cell. In some aspects, the increase of gene expression refers to an increase by at least about 20%, 30%, 40%, 50%, 60%, 70%, 80%, 85%, 90%, 95% and 100%. In one aspect, the protein product of the targeted gene may be increased by at least about 20%, 30%, 40%, 50%, 60%, 70%, 80%, 85%, 90%, 95% and 100%. In some aspects, the decrease of gene expression refers to an increase by at least about 20%, 30%, 40%, 50%, 60%, 70%, 80%, 85%, 90%, 95% and 100%. In one aspect, the protein product of the targeted gene may be decreased by at least about 20%, 30%, 40%, 50%, 60%, 70%, 80%, 85%, 90%, 95% and 100%.

[0154] When endogenous sequences (endogenous or part of a transgene) are expressed with a transgene, the endogenous sequences can be full-length sequences (wild-type or mutant) or partial sequences. The endogenous sequences can be functional. Non-limiting examples of the function of these full length or partial sequences include increasing the serum half-life of the polypeptide expressed by a transgene (e.g., therapeutic gene) and/or acting as a carer.

[0155] A transgene can be inserted into an endogenous gene such that all, some or none of the endogenous gene is expressed. For example, a transgene as described herein can be inserted into an endogenous locus such that some (N-terminal and/or C-terminal to a transgene) or none of the endogenous sequences are expressed, for example as a fusion with a transgene. In other cases, a transgene (e.g., with or without additional coding sequences such as for the endogenous gene) is integrated into any endogenous locus, for example a safe-harbor locus. For example, a Frataxin (FXN) transgene can be inserted into an endogenous FXN gene. A transgene can be inserted into any gene, e.g., the genes as described herein.

[0156] At least one advantage of the present disclosure is that virtually any therapeutic nucleic acid may be used to express any therapeutic gene expression product. In some instances, the therapeutic gene expression product is a therapeutic protein or a peptide (e.g., antibody, antigen-binding fragment, peptide, or protein). In one embodiment the protein encoded by the therapeutic nucleic acid is between 50-5000 amino acids in length. In some embodiments the protein encoded is between 50-2000 amino acids in length. In some embodiments the protein encoded is between 50-1000 amino acids in length. In some embodiments the protein encoded is between 50-1500 amino acids in length. In some embodiments the protein encoded is between 50-800 amino acids in length. In some embodiments the protein encoded is between 50-600 amino acids in length. In some embodiments the protein encoded is between 50-400 amino acids in length. In some embodiments the protein encoded is between 50-200 amino acids in length. In some embodiments the protein encoded is between 50-100 amino acids in length. In some embodiments the peptide encoded is between 4-50 amino acids in length. In some embodiments, the protein encoded is a tetrapeptide, a pentapeptide, a hexapeptide, a heptapeptide, an octapeptide, a nonapeptide, or a decapeptide. In some embodiments, the protein encoded comprises a peptide of 2-30 amino acids, such as 5-30, 10-30, 2-25, 5-25, 10-25, or 10-20 amino acids. In some embodiments, the protein encoded comprises a peptide of at least 11, 12, 13, 14, 15, 17, 20, 25 or 30 amino acids, or a peptide that is no longer than 50 amino acids, e.g. no longer than 35, 30, 25, 20, 17, 15, 14, 13, 12, 11 or 10 amino acids.

[0157] Non-limiting examples of therapeutic protein or peptides include an adrenergic agonist, an anti-apoptosis factor, an apoptosis inhibitor, a cytokine receptor, a cytokine, a cytotoxin, an erythropoietic agent, a glutamic acid decarboxylase, a glycoprotein, a growth factor, a growth factor receptor, a hormone, a hormone receptor, an interferon, an interleukin, an interleukin receptor, a kinase, a kinase inhibitor, a nerve growth factor, a netrin, a neuroactive peptide, a neuroactive peptide receptor, a neurogenic factor, a neurogenic factor receptor, a neuropilin, a neurotrophic factor, a neurotrophin, a neurotrophin receptor, an N-methyl-D-aspartate antagonist, a plexin, a protease, a protease inhibitor, a protein decarboxylase, a protein kinase, a protein kinsase inhibitor, a proteolytic protein, a proteolytic protein inhibitor, a semaphoring, a semaphorin receptor, a serotonin transport protein, a serotonin uptake inhibitor, a serotonin receptor, a serpin, a serpin receptor, and a tumor suppressor. In certain embodiments, the therapeutic protein or peptide is selected from the group consisting of brain-derived neurotrophic factor (BDNF), ciliary neurotrophic factor (CNTF), macrophage colony-stimulating factor (CSF), epidermal growth factor (EGF), fibroblast growth factor (FGF), gonadotropin, interferon-gamma (IFN), insulin-like growth factor 1 (IFG-1), nerve growth factor (NGF), platelet-derived growth factor (PDGF), pigment epithelium-derived factor (PEDF), transforming growth factor (TGF), transforming growth factor-beta (TGF-B), tumor necrosis factor (TNF), vascular endothelial growth factor (VEGF), prolactin, somatotropin. X-linked inhibitor of apoptosis protein 1 (XIAP1), interleukin 1 (IL-1), IL-2, IL-3, IL-4, IL-5, IL-6, IL-7, IL-8, IL-9, IL-10, IL-10, viral IL-10, IL-11, IL-12, IL-13, IL-14, IL-15, IL-16, IL-17, and IL-18.

[0158] A therapeutic gene expression product can comprise gene editing components. Non-limiting examples of gene editing components include those required for CRISPR/Cas, artificial site-specific RNA endonuclease (ASRE), zinc finger endonuclease (ZFN), and transcription factor like effector nuclease (TALEN). In a non-limiting example, a subject having Huntington's disease is identified. The subject is then systemically administered a first amount of a rAAV encapsidating a viral vector encoding ZFN engineered to represses the transcription of the Huntingtin (HTT) gene. In some instances, the route of administration is intravenous. The rAAV will include a modified AAV capsid protein that includes an amino acid sequence provided in any one of Tables 1-2, or SEQ ID NOS: 11-12739, so as to allow proper targeting of the ZFN to the nervous system, while retargeting off-target organs, such as the liver. If needed, the subject is administered a second or third dose of the rAAV, until a therapeutically effective amount of the ZFN is expressed the subject in the nervous system. In another non-limiting example, a subject with cystic fibrosis is identified. The subject is then systemically administered a first amount of a rAAV encapsidating a transgene encoding ZFN engineered to represses the transcription of the cystic fibrosis transmembrane conductance regulator (CFTR) gene. In some instances the route of administration is intranasal (e.g., intranasal spray). The rAAV will include a modified AAV capsid protein that includes an amino acid sequence provided in any one of SEQ ID NOS: 32537-34198, so as to allow proper targeting of the ZFN to the lung. If needed, the subject is administered a second or third dose of the rAAV, until a therapeutically effective amount of the ZFN is expressed the subject in the lung.

[0159] A therapeutic nucleic acid can comprise a non-protein coding gene e.g., sequences encoding antisense RNAs, RNAi, shRNAs and micro RNAs (miRNAs), miRNA sponges or decoys, recombinase delivery for conditional gene deletion, conditional (recombinase-dependent) expression, includes those required for the gene editing components described herein. The a non-protein coding gene may also encode a tRNA, rRNA, tmRNA, piRNA, double stranded RNA, snRNA, snoRNA, and/or long non-coding RNA (lncRNA). In some cases, the non-protein coding gene can modulate the expression or the activity of a target gene or gene expression product, a non-protein coding gene. For example, the RNAs described herein may be used to inhibit gene expression in a target cell, for example, a cell in the central nervous system (CNS) or peripheral organ (e.g., lung). In some cases, inhibition of gene expression refers to an inhibition by at least about 20%, 30%, 40%, 50%, 60%, 70%, 80%, 85%, 90%, 95% and 100%. In some cases, the protein product of the targeted gene may be inhibited by at least about 20%, 30%, 40%, 50%, 60%, 70%, 80%, 85%, 90%, 95% and 100%. The gene can be either a wild type gene or a gene with at least one mutation. The targeted protein may be either a wild type protein or a protein with at least one mutation.

[0160] A therapeutic nucleic acid can modulates the expression or activity of a gene or gene expression product expressed from the gene that is implicated in disease or disorder of the brain. For example, the therapeutic nucleic acid, in some cases is a gene or a modified version of the gene described herein. In another example, the therapeutic nucleic acid comprises an effector gene expression product such as a gene editing components specific to target a gene therein. Non-limited examples of genes include Sarcoglycan Alpha (SGCA), glutamic acid decarboxylase 65 (GAD65), glutamic acid decarboxylase 67 (GAD67), CLN2 gene, Nerve Growth Factor (NGF), glial cell derived neurotrophic factor(GDNF), Neurturin, Survival Of Motor Neuron 1, Telomeric (SMN1), β-Glucocerebrosidase (GCase), Frataxin (FXN), Huntingtin (HTN), methyl-CpG binding protein 2 (MECP2), peroxisomal biogenesis factor (PEX), progranulin (GRN), an antitubulin agent, copper-zinc superoxide dismutase (SOD1), Glucosylceramidase Beta (GBA), NPC Intracellular Cholesterol Transporter 1 (NPC1), and NPS3. In some embodiments, the peroxisomal biogenesis factor (PEX) is selected from the group consisting of PEX1, PEX2, PEX3, PEX4, PEX5, PEX6, PEX7, PEX10, PEX11β, PEX12, PEX13, PEX14, PEX16, PEX19, and PEX26. In some instances, the gene or gene expression product is inhibited. In some instances, the gene or gene expression product is enhanced.

[0161] A therapeutic nucleic acid modulates expression or activity of a gene or gene expression product expressed from the gene that is implicated in disease or disorder of a particular organ (e.g., lung, heart, liver, muscle, eye). Non-limited examples of genes include Cystic Fibrosis Transmembrane Conductance Regulator (CFTR), Factor X (FIX), RPE65, Retinoid Isomerohydrolase (RPE65), Sarcoglycan Alpha (SGCA), and sarco/endoplasmic reticulum Ca2+-ATPase (SERCA2a). In some embodiments, the therapeutic gene expression product is of human, murine, avian, porcine, bovine, ovine, feline, canine, equine, epine, caprine, lupine or primate origin. In some instances, the gene or gene expression product is inhibited. In some instances, the gene or gene expression product is enhanced.

[0162] Disclosed herein are modified viral genomes comprising genetic information (e.g., heterologous nucleic acid) that are assembled into a rAAV via viral packaging. In some instances, the viral genome is from an AAV serotypes selected from the group consisting of AAV1, AAV2, AAV3, AAV4, AAV5, AAV6, AAV7, AAV8, AAV9, AAV10, AAV11, and AAV12. In some instances, the viral genome is from a modified AAV serotype selected from the group consisting of AAV-PHP.B, AAV-PHP.eB, and AAV-PHP.S.

[0163] A viral genome, such as those described herein, can comprise a transgene, which in some cases encodes a heterologous gene expression product (e.g., therapeutic gene expression product, recombinant capsid protein, and the like). The transgene is in cis with two inverted terminal repeats (ITRs) flanking the transgene. The transgene may comprise a therapeutic nucleic acid encoding a therapeutic gene expression product. Due to the limited packaging capacity of the rAAV (˜2.5 kB), in some cases, a longer transgene may be split between two AAV vectors, the first with 3′ splice donor and the second with a 5′ splice acceptor. Upon co-infection of a cell, concatemers form, which are spliced together to express a full-length transgene.

[0164] The viral genome, in some cases, is a single stranded viral DNA comprising the transgene. The AAV vector can be episomal. In some instances, the viral genome is a concatemer. An episomal viral genome can develop chromatin-like organization in the target cell that does not integrate into the genome of the target cell. When infected into non-dividing cells, the stability of the episomal viral genome in the target cell enable the long-term transgene expression. Alternatively, the AAV vector integrates the transgene into the genome of the target cell predominantly at a specific site (e.g., AAVS1 on human chromosome 19).

[0165] A transgene is generally inserted so that its expression is driven by the endogenous promoter at the integration site, namely the promoter that drives expression of the endogenous gene into which a transgene is inserted. In some instances, a transgene comprises a promoter and/or enhancer, for example a constitutive promoter or an inducible or tissue/cell specific promoter. As a non-limiting example, the promoter may be CMV promoter, a CMV-β-Actin-intron-β-Globin hybrid promoter (CAG), CBA promoter, FRDA or FXN promoter, UBC promoter, GUSB promoter, NSE promoter, Synapsin promoter, MeCP2 promoter, GFAP promoter, H1 promoter, U6 promoter, NFL promoter, NFH promoter, SCN8A promoter, or PGK promoter. As a non-limiting example, promoters can be tissue-specific expression elements include, but are not limited to, human elongation factor 1α-subunit (EF1α), immediate-early cytomegalovirus (CMV), chicken β-actin (CBA) and its derivative CAG, the β glucuronidase (GUSB), and ubiquitin C (UBC). The transgene may include a tissue-specific expression elements for neurons such as, but not limited to, neuron-specific enolase (NSE), platelet-derived growth factor (PDGF), platelet-derived growth factor B-chain (PDGF-β), the synapsin (Syn), the methyl-CpG binding protein 2 (MeCP2), Ca2+/calmodulin-dependent protein kinase II (CaMKII), metabotropic glutamate receptor 2 (mGluR2), NFL, NFH, np32, PPE, Enk and EAAT2 promoters. The transgene may comprise a tissue-specific expression elements for astrocytes such as, but not limited to, the glial fibrillary acidic protein (GFAP) and EAAT2 promoters. The transgene may comprise tissue-specific expression elements for oligodendrocytes such as, but not limited to, the myelin basic protein (MBP) promoter. In one embodiment, the transgene comprises a region located approximately ^{˜}5 kb upstream of the first exon of the encoded therapeutic nucleic acid, more specifically, there is a 17 bp region located approximately 4.9 kb upstream of the first exon of the encoded frataxin gene in order to allow for expression with the FRDA promoter (See e.g., Puspasari et al. Long Range Regulation of Human FXN Gene Expression, PLOS ONE, 2011, the contents of which is herein incorporated by reference in its entirety).

[0166] In some embodiments, the promoter is less than 1 kb. The promoter may have a length of 200, 210, 220, 230, 240, 250, 260, 270, 280, 290, 300, 310, 320, 330, 340, 350, 360, 370, 380, 390, 400, 410, 420, 430, 440, 450, 460, 470, 480, 490, 500, 510, 520, 530, 540, 550, 560, 570, 580, 590, 600, 610, 620, 630, 640, 650, 660, 670, 680, 690, 700, 710, 720, 730, 740, 750, 760, 770, 780, 790, 800 or more than 800. The promoter may have a length between 200-300, 200-400, 200-500, 200-600, 200-700, 200-800, 300400, 300-500, 300-600, 300-700, 300-800, 400-500, 400-600, 400-700, 400-800, 500-600, 500-700, 500-800, 600-700, 600-800 or 700-800. The promoter may provide expression of the therapeutic gene expression product for a period of time in targeted tissues such as, but not limited to, the central nervous system and peripheral organs (e.g., lung). Expression of the therapeutic gene expression product may be for a period of 1 hour, 2, hours, 3 hours, 4 hours, 5 hours, 6 hours, 7 hours, 8 hours, 9 hours, 10 hours, 11 hours, 12 hours, 13 hours, 14 hours, 15 hours, 16 hours, 17 hours, 18 hours, 19 hours, 20 hours, 21 hours, 22 hours, 23 hours, 1 day, 2 days, 3 days, 4 days, 5 days, 6 days, 1 week, 8 days, 9 days, 10 days, 11 days, 12 days, 13 days, 2 weeks, 15 days, 16 days, 17 days, 18 days, 19 days, 20 days, 3 weeks, 22 days, 23 days, 24 days, 25 days, 26 days, 27 days, 28 days, 29 days, 30 days, 31 days, 1 month, 2 months, 3 months, 4 months, 5 months, 6 months, 7 months, 8 months, 9 months, 10 months, 11 months, 1 year, 13 months, 14 months, 15 months, 16 months, 17 months, 18 months, 19 months, 20 months, 21 months, 22 months, 23 months, 2 years, 3 years, 4 years, 5 years, 6 years, 7 years, 8 years, 9 years, 10 years, 11 years, 12 years, 13 years, 14 years, 15 years, 16 years, 17 years, 18 years, 19 years, 20 years, 21 years, 22 years, 23 years, 24 years, 25 years, 26 years, 27 years, 28 years, 29 years, 30 years, 31 years, 32 years, 33 years, 34 years, 35 years, 36 years, 37 years, 38 years, 39 years, 40 years, 41 years, 42 years, 43 years, 44 years, 45 years, 46 years, 47 years, 48 years, 49 years, 50 years, 55 years, 60 years, 65 years, or more than 65 years. Expression of the payload may be for 1-5 hours, 1-12 hours, 1-2 days, 1-5 days, 1-2 weeks, 1-3 weeks, 1-4 weeks, 1-2 months, 1-4 months, 1-6 months, 2-6 months, 3-6 months, 3-9 months, 4-8 months, 6-12 months, 1-2 years, 1-5 years, 2-5 years, 3-6 years, 3-8 years, 4-8 years or 5-10 years or 10-15 years, or 15-20 years, or 20-25 years, or 25-30 years, or 30-35 years, or 35-40 years, or 40-45 years, or 45-50 years, or 50-55 years, or 55-60 years, or 60-65 years.

[0167] Heterologous nucleic acids and transgenes of the present embodiment may also include plasmid vectors. Plasmid vectors are useful for the generation of the recombinant AAV (rAAV) particles described herein. An AAV vector can comprise a genome of a helper virus. Helper virus proteins are required for the assembly of a recombinant rAAV, and packaging of a transgene containing a heterologous nucleic acid into the rAAV. The helper virus genes are adenovirus genes E4, E2a and VA that when expressed in the cell, assist with AAV replication. In some embodiments, an AAV vector comprises E2. In some embodiments, an AAV vector comprises E4. In some embodiments, an AAV vector comprises VA. In some instances, the AAV vector comprises one of helper virus proteins, or any combination thereof.

[0168] An plasmid vector can comprise a viral genome comprising a nucleic acid encoding the recombinant AAV (rAAV) capsid protein described herein. The viral genome can comprise a Replication (Rep) gene encoding a Rep protein, and Capsid (Cap) gene encoding an Aap protein in the first open reading frame (ORF1) or a Cap protein in the second open reading frame (ORF2). The Rep protein is selected from the group consisting of Rep78, Rep68, Rep52, and Rep40. In some instances, the Cap gene is modified encoding a modified AAV capsid protein described herein. A wild-type Cap gene encodes three proteins, VP1, VP2, and VP3. In some cases. VP1 is modified. In some cases, VP2 is modified. In some cases, VP3 is modified. In some cases, all three VP1-VP3 are modified. The AAV vector can comprise nucleic acids encoding wild-type Rep78, Rep68, Rep52, Rep40 and Aap proteins.

[0169] In some instances, the plasmid vector is bacterial. In some instances, the plasmid vector is derived from Escherichia col. In some instances, the nucleic acid sequence comprises, in a 5′ to 3′ direction: (1) a 5′ inverted terminal repeat (ITR) sequence, (2) a Replication (Rep) gene, (3) a Capsid (Cap) gene, and (4) a 3′ ITR, wherein the Cap gene encodes the AAV capsid protein described herein. In some instances, the plasmid vector encodes a pseudotyped AAV capsid protein. In some instances, the Cap gene is derived from the deoxyribose nucleic acid (DNA) provided in any one of SEQ ID NOs: 6-10.

[0170] In some instances, the 5′ ITR and the 3 ITR are derived from an AAV2 serotype. In some instances, the 5′ ITR and the 3′ ITR are derived from an AAV5 serotype. In some instances, the 5′ ITR and the 3′ ITR are derived from an AAV9 serotype.

[0171] Disclosed herein are plasmid vectors comprising any one of SEQ ID NOS: 12740-25468 and 35472-45474, which are the DNA sequences encoding the rAAV capsid proteins of the present disclosure. In some instances, plasmid vector comprises a Cap gene that is at least 90%, 91%, 92%, 93%, 94%, 95%, 96%, 97%, 98%, 99%, or 100% identical to any one of the DNA sequences provided in SEQ ID NOS: 46404-46423. The plasmid vector of the present disclosure can comprise the VP1 Cap gene comprises any one of SEQ ID NOS: 6-10. An AAV vector can comprise 70%, 75%, 80%, 85%, 90%, 91%, 92%, 93%, 94%, 95%, 96%, 97%, 98%, 99%, or 100% of any one of SEQ ID NOS: 6-10.

[0172] Also disclosed are nucleic acids encoding the rAAV capsids comprising variant AAV capsid proteins (e.g., rAAV capsid proteins) of the present disclosure. In some instances, the rAAV capsid proteins comprise a DNA sequence provided in any one of SEQ ID NOS: 46404-46423, which encode the full-length VP1 protein with the 7-mer substituted at amino acid position 452-458. In some cases, the 7-mer is encoded by DNA sequence provided in any one of SEQ ID NOS: 46364-46383.

[0173] Provided here are plasmid vectors encoding the rAAV capsid proteins of the present disclosure comprising: (a) a nucleic acid sequence encoding 7-mer amino acid sequence provided in any one of FIGS. 2-14; and (b) a nucleic acid sequence that is 70%, 75%, 80%, 85%, 90%, 91%, 92%, 93%, 94%, 95%, 96%, 97%, 98%, 99%, or 100% of any one of SEQ ID NOS: 6-10. In some instances, AAV9 (SEQ ID NO: 6) is modified to include any one of SEQ ID NOS: 12740-25468 and 35472-45474. In some instances, the AAV-PHP.eB (SEQ ID NO: 10) is modified to include any one of SEQ ID NOS: 12740-25468 and 3547245474. In some instances, AAV5 (SEQ ID NO: 7) is modified to include any one of SEQ ID NOS: 3547245474. In some instances, AAV-PHP.B (SEQ ID NO: 8) is modified to include any one of SEQ ID NOS; SEQ ID NOS: 12740-25468 and 35472-45474. In some instances, AAV-PHP.S VP1 (SEQ ID NO: 9) is modified to include any one of SEQ ID NOS: 12740-25468 and 3547245474. The AAV vector described herein may be used to produce a variant AAV capsid by the methods described herein.

### Methods

Methods of Producing rAAVs

[0174] Disclosed herein are methods of producing a recombinant AAV (rAAV). In some instances all elements that are required for AAV production in target cell (e.g., HEK293 cells) are transiently transfected into the target cell using suitable methods known in the art. For example, the rAAV of the present disclosure can be product by co-transfecting three plasmid vectors, a first vector with ITR-containing plasmid carrying the transgene (e.g., therapeutic nucleic acid), a second vector that carries the AAV Rep and Cap genes; and (3), a third vector that provides the helper genes isolated from adenovirus. The methods described herein generate high-titer AAV vectors that are free of adenovirus. The Cap gene disclosed here comprises any one of SEQ ID NOS: 12740-25468 and 3547245474, which are the DNA sequences encoding the modified AAV capsid proteins of the present disclosure. In some cases, rAAVs of the present disclosure are generated using the methods described in Challis, R. C. et al. Systemic AAV vectors for widespread and targeted gene delivery in rodents. Nat. Protoc. 14, 379 (2019), which is hereby incorporated by reference in its entirety. Briefly, triple transfection of HEK293T cells (ATCC) using polyethylenimine (PEI) is performed, viruses are collected after 120 hours from both cell lysates and media and purified over iodixanol.

[0175] Disclosed herein, are methods of manufacturing comprising: (a) introducing into a cell a nucleic acid comprising: (i) a first nucleic acid sequence encoding a therapeutic gene expression product enclosed by a 5′ and a 3′ inverted terminal repeat (ITR) sequence; (ii) a second nucleic acid sequence encoding a viral genome comprising a 5′ ITR sequence, a Replication (Rep) gene, Capsid (Cap) gene, and a 3′ ITR, wherein the Cap gene encodes the AAV capsid protein described herein; and (iii) a third nucleic acid sequence encoding a first helper virus protein selected from the group consisting of E4orf6, E2a, and VA RNA, and optionally, a second helper virus protein comprising E1a or E1b55k; (b) expressing in the cell the AAV capsid protein described herein; (c) assembling an AAV particle comprising the AAV capsid proteins disclosed herein; and (d) packaging the first nucleic acid sequence in the AAV particle. In some instances, the AAV particle is a rAAV capsid with an increased specificity when measured in a target tissue (e.g., CNS, PNS, lung) in a subject and a decreased specificity when measured in an off-target tissue (e.g., liver), relative to a reference AAV capsid. In some instances, the methods further comprise packing the first nucleic acid sequence encoding the therapeutic gene expression product such that it becomes encapsidated by the rAAV capsid protein. In some embodiments, the rAAV particles are isolated, concentrated, and purified using suitable viral purification methods, such as those described herein.

[0176] In a non-limiting example, the rAAVs are generated by triple transfection of precursor cells (e.g., HEK293T) cells using a standard transfection protocol (e.g., with PEI). Viral particles are harvested from the media after a period of time (e.g., 72 h post transfection) and from the cells and media at a later point in time (e.g., 120 h post transfection). Virus present in the media is concentrated by precipitation with 8% poly(ethylene glycol) and 500 mM sodium chloride and the precipitated virus is added to the lysates prepared from the collected cells. The viruses are purified over iodixanol (Optiprep. Sigma) step gradients (15%, 25%, 40% and 60%). Viruses are concentrated and formulated in PBS. Virus titers are determined by measuring the number of DNaseI-resistant vector genome copies (VGs) using qPCR and the linearized genome plasmid as a control.

[0177] The Rep protein can be selected from the group consisting of Rep78, Rep68, Rep52, and Rep40. The genome of the AAV helper virus comprises an AAV helper gene selected from the group consisting of E2, E4, and VA. In some instances, the first nucleic acid sequence and the second nucleic acid sequence are in trans. In some instances, the first nucleic acid sequence and the second nucleic acid sequence are in cis. In some instances, the first nucleic acid sequence, the second nucleic acid sequence and the third nucleic acid sequence, are in trans.

[0178] The cell can be selected from a group consisting of a human, a primate, a murine, a feline, a canine, a porcine, an ovine, a bovine, an equine, an epine, a caprine and a lupine host cell. In some instances, the cell is a progenitor or precursor cell, such as a stem cell. In some instances, the stem cell is a mesenchymal cell, embryonic stem cell, induced pluripotent stem cell (iPSC), fibroblast or other tissue specific stem cell. The cell can be immortalized. In some instances, the embryonic stem cell is a human embryonic stem cell. In some instances, the human embryonic stem cell is a human embryonic kidney 293 (HEK-293) cell. In some instances, the cell is a differentiated cell. Base on the disclosure provided, it is expected that this system can be used in conjunction with any transgenic line expressing a recombinase in the target cell type of interest to develop AAV capsids that more efficiently transduce that target cell population.

Methods of rAAV-Mediated Delivering a Heterologous Nucleic Acid

[0179] Disclosed herein are methods of delivering a heterologous nucleic acid (e.g., therapeutic nucleic acid or transgene disclosed herein) to subject in need thereof. The transgene may be encapsidated by a recombinant AAV (rAAV) capsid protein or rAAV particle such as those described herein.

[0180] Methods may be ex vivo, e.g., scientific research purposes or for producing adoptive cellular therapies. The subject may be a human primary cell or a mature cell, or cell line. The subject may be a cell from a monkey, hamster, or mouse. In either case, delivery may include contacting the composition with the cell or cell line.

[0181] Methods may be in vivo, e.g., treating a disease or a condition in a subject in need thereof. In some instances, the subject may be mammal, such as a human or non-human primate, in which case delivery of the composition may comprise administering the composition to the subject. In some embodiments, delivery of the heterologous nucleic acid comprises administering to the subject the composition using any one of the routes of administration described herein. In a non-limiting example, the rAAV encapsidating an aromatic L-amino acid decarboxylase deficiency (AADC) gene may be administered to a subject intravenously to treat AADC deficiency.

[0182] In some embodiments, methods of increasing transduction of a heterologous nucleic acid in a target in vivo or ex vivo tissue comprise delivering a rAAV particle described herein, the rAAV engineered to have an increased transduction efficiency in a target in vivo environment (e.g., tissue or cell type). In some instances, the increased transduction efficiency comprises a 1-fold, 2-fold, 3-fold, 4-fold, 5-fold, 6-fold, 7-fold, 8-fold, 9-fold, 10-fold, 11-fold, 12-fold, 13-fold, 14-fold, 15-fold, 16-fold, 17-fold, 18-fold, 19-fold, 20-fold, 21-fold, 22-fold, 23-fold, 24-fold, 25-fold, 26-fold, 27-fold, 28-fold, 29-fold, 30-fold, 31-fold, 32-fold, 33-fold, 34-fold, 35-fold, 36-fold, 37-fold, 38-fold, 39-fold, 40-fold, 41-fold, 42-fold, 43-fold, 44-fold, 45-fold, 46-fold, 47-fold, 48-fold, 49-fold, 50-fold, 75-fold, or 100-fold increase, or more, relative to a reference AAV. In some instances, the increased transduction efficiency is at least 30-fold. In some instances, the increased transduction efficiency is at least 40-fold. In some instances, the increased transduction efficiency is at least 50-fold. In some instances, the increased transduction efficiency is at least 60-fold. In some instances, the increased transduction efficiency is at least 80-fold. In some instances, the increased transduction efficiency is at least 90-fold. In some instances, the increased transduction efficiency is at least 100-fold.

[0183] In some embodiments, methods of decreasing transduction of a heterologous nucleic acid in an off-target in vivo or ex vivo tissue comprise delivering a rAAV particle described herein, the rAAV engineered to have a reduced transduction efficiency by 1-fold, 2-fold, 3-fold, 4-fold, 5-fold, 6-fold, 7-fold, 8-fold, 9-fold, 10-fold, 11-fold, 12-fold, 13-fold, 14-fold, 15-fold, 16-fold, 17-fold, 18-fold, 19-fold, 20-fold, 21-fold, 22-fold, 23-fold, 24-fold, 25-fold, 26-fold, 27-fold, 28-fold, 29-fold, 30-fold, 31-fold, 32-fold, 33-fold, 34-fold, 35-fold, 36-fold, 37-fold, 38-fold, 39-fold, 40-fold, 41-fold, 42-fold, 43-fold, 44-fold, 45-fold, 46-fold, 47-fold, 48-fold, 49-fold, 50-fold, 75-fold, or 100-fold, or more, relative to a reference AAV. In some instances, the off-target gene transfer is reduced by at least 20-fold. In some instances, the off-target gene transfer is reduced by at least 30-fold. In some instances, the off-target gene transfer is reduced by at least 40-fold. In some instances, the off-target gene transfer is reduced by at least 50-fold. In some instances, the off-target gene transfer is reduced by at least 60-fold. In some instances, the off-target gene transfer is reduced by at least 80-fold. In some instances, the off-target gene transfer is reduced by at least 90-fold. In some instances, the off-target gene transfer is reduced by at least 100-fold.

[0184] Methods of delivering a heterologous nucleic acid to a target in vivo environment are also provided comprising delivering the a rAAV particle described herein that has been engineered to have an increased specificity in a target in vivo or ex vivo tissue (e.g., organ or cell type), as compared to a reference AAV. In some embodiment, the rAAV particle has been engineered to have a decreased specificity for an off-target in vivo or ex vivo tissue. Methods, in some cases, comprise detecting whether a rAAV possesses more specificity for a target in vivo or ex vivo tissue than a reference AAV, includes measuring a level of gene expression product (e.g., RNA or protein) expressed from the heterologous nucleic acid encapsidated by the rAAV in a tissue sample obtained from the target in vivo environment in a subject; and comparing the measured level to a control level (such as, for e.g., the gene expression product expressed from a heterologous nucleic acid encapsidated by a reference AAV (e.g., AAV9)). Suitable methods for measuring expression of a gene expression product luciferase reporter assay and quantitative polymerase chain reaction (qPCR).

[0185] In some instances, the reference AAV has a serotype selected from the group consisting of AAV1, AAV2, AAV3, AAV4, AAV5, AAV6, AAV7, AAV8, AAV9, AAV10, AAV11, AAV12, or variant thereof. For example, the reference AAV can have a serotype selected from the group consisting of AAV-PHP.B, AAV-PHP.eB, and AAV-PHP.S.

### Delivery to the Central or Peripheral Nervous System

[0186] Provided herein are methods of delivering a heterologous nucleic acid to a target in vivo environment comprising delivering a composition to the target in vivo environment selected from the group consisting of a central nervous system (CNS) and the peripheral nervous system (PNS) in a subject, the composition comprising a rAAV particle with a rAAV capsid protein, the rAAV capsid protein encapsidating a viral vector encoding a heterologous nucleic acid (e.g., therapeutic nucleic acid). In some embodiments, the rAAV particle encapsidating the heterologous nucleic acid comprises a rAAV capsid protein engineered with an increased specificity and, in some cases, transduction efficiency for the CNS or the PNS of the subject, even when administered to the subject systemically, as compared to a reference AAV.

[0187] Methods comprise delivering a rAAV particle comprising an rAAV capsid protein with increased specificity and/or transduction efficiency for the CNS or the PNS in the subject, as compared to a reference AAV (e.g., AAV9, AAV5). The rAAV capsid protein, in some cases, has a decreased specificity and/or transduction efficiency for a peripheral organ (e.g., liver). In some instances, the delivery is systemic. Alternatively, delivery is direct (e.g., into the affected area of the CNS or PNS). The rAAV capsid protein may comprise a substitution of at least one amino acid in an amino acid sequence in an amino acid sequence of a parental AAV, wherein X1 is A, D, G, L, N, Q, S, or T. The rAAV capsid protein can comprise a substitution of at least two amino acids in an amino acid sequence of a parental AAV, wherein X1 is A, D, G, L, N, Q, S, or T; and X2 is A, G, N, P, Q, R, S, or T. The rAAV can comprise a substitution of at least three amino in an amino acid sequence of a parental AAV, wherein X1 is A, D, G, L, N, Q, S, or T; and X2 is A, G, N, P, Q, R, S, or T; and X3 is A, D, G, N, S, or T. The rAAV can comprise a substitution of at least four amino acids in an amino acid sequence of a parental AAV, wherein X1 is A, D, G, L, N, Q, S, or T; X2 is A, G, N, P, Q, R S, or T; X3 is A, D, G, N, S, or T; and X4 is A, D, G, K, N, P Q, S, or T. The rAAV can comprise a substitution of at least five amino acids in an amino acid sequence of a parental AAV, wherein X1 is A, D, G, L, N, Q, S, or T; X2 is A, G, N, P, Q, R, S, or T; X3 is A, D, G, N, S, or T; X4 is A, D, G, K, N, P, Q, S, or T; and X5 is A, G, K, N, P, R, S, or T. The rAAV can comprise a substitution of at least six amino acids in an amino acid sequence of a parental AAV, wherein X1 is A, D, G, L, N, Q, S, or T; X2 is A, G, N, P, Q, R, S, or T; X3 is A, D, G, N, S, or T; X4 is A, D, G, K, N, P Q, S, or T; X5 is A, G, K, N, P, R, S, or T; and X6 is A, G, K, N, P, R, S, T, or V. The rAAV can comprise a substitution of at least seven amino acids in an amino acid sequence of a parental AAV, wherein X1 is A, D, G, L, N, Q, S, or T; X2 is A, G, N, P, Q, R, S, or T; X3 is A, D, G, N, S, or T; X4 is A, D, G, K, N, P Q, S, or T; X5 is A, G, K, N, P, R, S, or T; X6 is A, G, K, N, P, R, S, T, or V; and X7 is A, G, K, L, R, S, T, or V.

[0188] X1, X2, X3, X4, X5, X6, and X7 are, in some cases, contiguous (X1-X2-X3-X4-X5-X6-X7). Any two, three, four, five, six or seven of X1, X2, X3, X4, X5, X6, and X7 may be contiguous. In some embodiments, X1 is at an amino acid position 452 within an AAV9 capsid protein, or variant thereof. In some embodiments X2 is at an amino acid position 453 within an AAV9 capsid protein, or variant thereof. In some embodiments X3 is at an amino acid position 454 within an AAV9 capsid protein, or variant thereof. In some embodiments X4 is at an amino acid position 455 within an AAV9 capsid protein, or variant thereof. In some embodiments X5 is at an amino acid position 456 within an AAV9 capsid protein, or variant thereof. In some embodiments X6 is at an amino acid position 457 within an AAV9 capsid protein, or variant thereof. In some embodiments X7 is at an amino acid position 458 within an AAV9 capsid protein, or variant thereof.

[0189] Methods disclosed herein provide delivering a rAAV particle comprising an rAAV capsid protein with increased specificity and/or transduction efficiency for the CNS or the PNS in the subject, as compared to a reference AAV, wherein the substitution comprises N452D, N452A, N452G. N452L, N452Q, N452S, N452T, G453I, G453N, G453S, G453P, G453R, G453T, S454A, S454Q, S454D, S454G, S454N, S454T, G455A. G455S, G455D. G455K, G455N, G455P, G455Q. G455T, Q456T, Q456S, Q456A. Q456G, Q456K, Q456N, Q456R, Q456P, N457K, N457A, N457G, N457P, N457R, N457S, N457T, N457V, Q458N, Q458A, Q458G, Q458K, Q458L, Q458R, Q458S, Q458T, or Q458V in an amino acid sequence of the AAV9 capsid protein (VP1 numbering), variant thereof, or equivalent amino acid position in a different AAV serotype. In some embodiments, methods comprising delivering a rAAV particle comprising a rAAV capsid protein comprising a substitution of one, two, three, four, five, six, or seven amino acids in an amino acid sequence provided any one of SEQ ID NOS: 11-12739. The substitution can comprise at least one, two, three, four, five, six, or seven, amino acids from an amino acid sequence selected from the group consisting of LQTSSPG (SEQ ID NO: 2933). QQGKQSV (SEQ ID NO: 79), SINTKTN (SEQ ID NO: 45475). SNGTKQT (SEQ ID NO: 442), GSGKTAA (SEQ ID NO: 88), MGDKPTR (SEQ ID NO: 2466), QPSGGNT (SEQ ID NO: 2672), ERGANTK (SEQ ID NO: 5192), TTGGHSS (SEQ ID NO: 2743), GTTKTSE (SEQ ID NO: 3064), GTGTSVL (SEQ ID NO: 11958), NQSGTKG (SEQ ID NO: 780), KGPGQMG (SEQ ID NO: 45476), GTPSKAG (SEQ ID NO: 2741), and any amino acid sequence provided in Table 1 or Table 2. In some embodiments, the rAAV capsid proteins suitable for delivery of a heterologous nucleic acid to the CNS or PNS of a subject may also have an insertion of an amino acid sequence at amino acid position 588 (AAV9 VP1 numbering). In some cases, the rAAV capsid protein has a decreased specificity and/or transduction efficiency for the liver. In some embodiments, the substitution does not consist of an amino acid sequence ILGTGTS (SEQ ID NO: 45479) or QSSQTPR (SEQ ID NO: 45480) at amino acids 452-458 in a parental AAV9 capsid protein, or variant thereof. In some embodiments, the rAAV capsid proteins suitable for delivery of a heterologous nucleic acid to the CNS or PNS of a subject may also have an insertion of an amino acid sequence at amino acid position 588 (AAV9 VP1 numbering).

[0190] Disclosed herein are methods comprising delivering a rAAV particle encapsidating a heterologous nucleic acid to a CNS or PNS in a subject, the rAAV particle comprising (i) an increased specificity and/or transduction efficiency of the heterologous nucleic acid for the CNS or PNS, and (ii) a decreased specificity and/or transduction efficiency for the heterologous nucleic acid for the liver, wherein the rAAV particle has an rAAV capsid protein comprising a substitution selected from the group consisting of N452D, N452G, N452A, N452V, N452S, N452H, N452L, N452E, N452Q, G452A, G4521, G452T, G452P, G452R, G452T, G452S, G452K, G452H, S454A, S454N, S454D, S454G, S454T, S454H, S454K, S454Q, G455A, G455N, G455T, G455S, G455D, G455P, G455R, G455Q, Q456T, Q456S, Q456K, Q456P, Q456G, Q456D, Q456V, Q456A, Q456N, N457K, N457T, N457A, N457R, N457S, N457G, N457D, N457P, N457V, Q458N, Q458G, Q458S, Q458L, Q458A, Q458E, and Q458K, in an amino acid sequence of the AAV9 capsid protein, or a variant thereof, or equivalent amino acid position in a different AAV serotype. In some cases, the substitution is of at least or about one two, three, four, five, six, or seven amino acids of an amino acid sequence DGAATKN (SEQ ID NO: 3943). In some cases, the substitution is of at least or about one two, three, four, five, six, or seven amino acids of an amino acid sequence DGQSSKS (SEQ ID NO: 2764). In some cases, the substitution is any amino acid sequence provided in Table 1 or Table 2. In some embodiments, the delivering is systemic. In some embodiments, the delivery is direct (e.g., injected into the in vivo environment). In some embodiments, the parental AAV capsid protein is AAV9 capsid protein (for e.g., provided in SEQ ID NO: 1). In some embodiments, the parental AAV capsid protein is an AAV9 variant capsid protein AAV-PHP.B (SEQ ID NO: 3). In some embodiments, the parental AAV capsid protein is AAV9 variant capsid protein AAV-PHP.eB (SEQ ID NO: 5). In some embodiments, the parental AAV capsid protein further comprises an insertion of at least or about three, four, five, six, seven, eight, nine, ten, or eleven amino acids of an amino acid in an amino acid position 588-589 of the amino acid sequence of the parental AAV (AAV9 VP1 numbering). In some embodiments, delivery is more specific than a delivery of the heterologous nucleic acid by a reference AAV, e.g., AAV9. In some embodiments, methods further comprise reducing or ablating delivery of the heterologous nucleic acid in an off-target in vivo environment, such as the liver. In some embodiments, delivery is characterized by an increase in efficiency of transduction (e.g., of the heterologous nucleic acid) in the CNS or PNS than a transduction efficiency in the CNS or PNS of the reference AAV. In some embodiments, the delivery is systemic (e.g., intravenous). In some embodiments, the subject is a human or a non-human primate.

### Delivery to a Target Organs or Tissues

[0191] In some cases, the methods of delivering a heterologous nucleic acid comprise delivering to a target in vivo environment in a subject a composition, the composition comprising a rAAV particle with a rAAV capsid protein, the rAAV capsid protein encapsidating a viral vector encoding a heterologous nucleic acid (e.g., therapeutic nucleic acid). In some cases, the target in vivo environment is the liver, intestine, heart, lung, reproductive organ, muscle, adipose, pancreas, a brain, or spleen. In some embodiments, the rAAV particle encapsidating the heterologous nucleic acid comprises a rAAV capsid protein engineered with an increased specificity and, in some cases, transduction efficiency for the target in vivo environment of the subject, even when administered to the subject systemically.

[0192] Disclosed herein are methods that comprise delivering to a subject a rAAV particle encapsidating a heterologous nucleic acid, the rAAV comprising an rAAV capsid protein with increased specificity and/or transduction efficiency of the heterologous nucleic acid when measured in the heart of the subject, as compared to a reference AAV (e.g., AAV9, AAV5). In some embodiments, rAAVs optimized for targeting the heart have amino acid sequence comprising an amino acid sequence provided in SEQ ID NOS: 25469-26205. In some embodiments, methods comprise delivering a rAAV particle comprising an rAAV capsid protein with increased specificity and/or transduction efficiency of the heterologous nucleic acid when measured in the lung in the subject, as compared to a reference AAV (e.g., AAV9, AAV5). In some embodiments, rAAVs optimized for targeting the lung have amino acid sequences comprising an amino acid sequence provided in SEQ ID NOS: 32537-34198. In some embodiments, methods comprise delivering a rAAV particle comprising an rAAV capsid protein with increased specificity and/or transduction efficiency of the heterologous nucleic acid when measured in the liver in the subject, as compared to a reference AAV (e.g., AAV9, AAV5). In some embodiments, rAAVs optimized for targeting the liver have amino acid sequences that comprise an amino acid sequence provided in SEQ ID NOS: 30720-30923. In some embodiments, methods comprise delivering a rAAV particle comprising an rAAV capsid protein with increased specificity and/or transduction efficiency of the heterologous nucleic acid when measured in the intestine in the subject, as compared to a reference AAV (e.g., AAV9, AAV5). In some embodiments, rAAVs optimized for targeting the intestine have amino acid sequences comprising an amino acid sequence provided in SEQ ID NOS: 26206-26873. In some embodiments, methods comprise delivering a rAAV particle comprising a rAAV capsid protein with increased specificity and/or transduction efficiency of the heterologous nucleic acid when measured in the stomach in the subject, as compared to a reference AAV (e.g., AAV9, AAV5). In some embodiments, rAAVs optimized for targeting the stomach have amino acid sequences comprising amino acid sequence provided in SEQ ID NOS: 31873-32060. In some embodiments, methods comprise delivering a rAAV particle comprising an rAAV capsid protein with increased specificity and/or transduction efficiency of the heterologous nucleic acid when measured in the spleen in the subject, as compared to a reference AAV (e.g., AAV9, AAV5). In some embodiments, rAAVs optimized for targeting the spleen have amino acid sequences comprising an amino acid sequence provided in SEQ ID NOS: 31468-31872. In some embodiments, methods comprise delivering a rAAV particle comprising a rAAV capsid protein with increased specificity and/or transduction efficiency of the heterologous nucleic acid when measured in the kidney in the subject, as compared to a reference AAV (e.g., AAV9, AAV5). In some embodiments. rAAVs optimized for targeting the kidney have amino acid sequences comprising an amino acid sequence provided in SEQ ID NOS: 26874-30719. In some embodiments, methods comprise delivering a rAAV particle comprising an rAAV capsid protein with increased specificity and/or transduction efficiency of the heterologous nucleic acid when measured in the fat of the subject, as compared to a reference AAV (e.g., AAV9, AAV5). In some embodiments. rAAVs optimized for targeting the fat (adipose) have amino acid sequences comprising an amino acid sequence provided in SEQ ID NOS: 34199-35471.

[0193] Provided herein are methods that comprise delivering a rAAV particle to a subject, the rAAV comprising an rAAV capsid protein with increased specificity and/or transduction efficiency of the heterologous nucleic acid for the muscle in the subject, as compared to a reference AAV (e.g., AAV9, AAV5). In some embodiments, rAAVs optimized for targeting the muscle have amino acid sequences comprising an amino acid sequence provided in SEQ ID NO: 30924-31451. The muscle may be cardiac muscle. The muscle may be skeletal muscle. In some embodiments, methods comprise delivering a rAAV particle comprising an rAAV capsid protein with increased specificity and/or transduction efficiency of the heterologous nucleic acid for the pancreas in the subject, as compared to a reference AAV (e.g., AAV9, AAV5). In some embodiments, rAAVs optimized for targeting the pancreas have amino acid sequences comprising an amino acid sequence provided in SEQ ID NOS: 31452-31467. In some embodiments, methods comprise delivering a rAAV particle comprising an rAAV capsid protein with increased specificity and/or transduction efficiency of the heterologous nucleic acid for the reproductive organ(s) in the subject, as compared to a reference AAV (e.g., AAV9, AAV5). In some embodiments, rAAVs optimized for targeting a reproductive organ, such as a testicle, comprise amino acid sequences comprising an amino acid sequence provided in SEQ ID NOS: 32061-32536. In some instances, the reproductive organ is an ovary.

[0194] The rAAV capsid protein suitable for delivery of the heterologous nucleic acid to the liver, intestine, heart, lung, reproductive organ, muscle, adipose, pancreas, a brain, or spleen can comprise a substitution of at least one amino acid in a parental AAV capsid protein. In some embodiments, X1 is K, R, N, or T. The rAAV capsid protein can comprise a substitution or an insertion of at least two amino acids in a parental AAV capsid protein. In some embodiments, X1 is K, R, N, or T; and X2 is D, E, N, or V. The rAAV capsid protein can comprise a substitution or an insertion of at least three amino acids in a parental AAV capsid protein. In some embodiments, X1 is K, R, N, or T; X2 is D, E, N, or V; and X3 is N, S, L, or P. The rAAV capsid protein can comprise a substitution or an insertion of at least four amino acids in a parental AAV capsid protein. In some embodiments, X1 is K, R, N, or T; X2 is D, E, N, or V; X3 is N, S, L, or P; and X4 is T, S, P, or L. The rAAV capsid protein can comprise a substitution or an insertion of at least five amino acids in a parental AAV capsid protein. In some embodiments, X1 is K, R, N, or T; X2 is D, E, N, or V; X3 is N, S, L, or P; X4 is T, S, P, or L; and X5 is P, R, or S. The rAAV capsid protein can comprise a substitution or an insertion of at least six amino acids in a parental AAV capsid protein. In some embodiments, X1 is K, R, N, or T; X2 is D, E, N, or V; X3 is N, S, L, or P; X4 is T, S, P, or L; X5 is P, R, or S; and X6 is G, S, N, or T. The rAAV capsid protein can comprise a substitution or an insertion of at least seven amino acids in a parental AAV capsid protein. In some embodiments, X1 is K, R, N, or T; X2 is D, E, N, or V; X3 is N, S, L, or P; IX4 is T, S, P, or L; X5 is P. R, or S; X6 is G, S, N, or T; and X7 is R, L or I. In some embodiments, X1, X2, X3, X4, X5, X6, and X7 are contiguous (X1-X2-X3-X4-X5-X6-X7). In some embodiments, any two, three, four, five, six, or seven, of X1, X2, X3, X4, X5, X6, and X7 are contiguous. In some embodiments, X1, X2, X3, X4, X5, X6, and X7 are not contiguous. In some embodiments, X1 is at an amino acid position 452 within an AAV9 capsid protein, or variant thereof. In some embodiments X2 is at an amino acid position 453 within an AAV9 capsid protein, or variant thereof. In some embodiments X3 is at an amino acid position 454 within an AAV9 capsid protein, or variant thereof. In some embodiments X4 is at an amino acid position 455 within an AAV9 capsid protein, or variant thereof. In some embodiments X5 is at an amino acid position 456 within an AAV9 capsid protein, or variant thereof. In some embodiments X6 is at an amino acid position 457 within an AAV9 capsid protein, or variant thereof. In some embodiments X7 is at an amino acid position 458 within an AAV9 capsid protein, or variant thereof. In some embodiments, the substitution does not consist of an amino acid sequence ILGTGTS (SEQ ID NO: 45479) or QSSQTPR (SEQ ID NO: 45480) at amino acids 452-458 in a parental AAV9 capsid protein, or variant thereof. In some embodiments, the rAAV capsid proteins suitable for delivery of a heterologous nucleic acid to the target in vivo environment of a subject may also have an insertion of an amino acid sequence at amino acid position 588 (AAV9 VP1 numbering).

[0195] Disclosed herein are methods comprising delivering a rAAV particle encapsidating a heterologous nucleic acid to the target in vivo environment selected from the group consisting of the liver, intestine, heart, lung, reproductive organ, muscle, adipose, pancreas, a brain, and spleen, in a subject, the rAAV particle comprising an increased specificity and/or transduction efficiency of the heterologous nucleic acid for the target in vivo environment, wherein the rAAV particle has an rAAV capsid protein comprising a substitution of at least or about three, four, five, six, or seven amino acids of an amino acid sequence KDNTPGR (SEQ ID NO: 32538), NNLPRNL (SEQ ID NO: 32867), RESSPSL (SEQ ID NO: 29065), or RVPLSTI (SEQ ID NO: 26933) at an amino acid position 452-458 in a parental AAV capsid protein. In some embodiments, the parental AAV capsid protein is AAV9 capsid protein (for e.g., provided in SEQ ID NO: 1). In some embodiments, the parental AAV capsid protein is AAV5 capsid protein (for e.g., provided in SEQ ID NO: 2). In some embodiments, the parental AAV capsid protein is an AAV9 variant capsid protein AAV-PHP.B (SEQ ID NO: 3). In some embodiments, the parental AAV capsid protein is AAV9 variant capsid protein AAV-PHP.eB (SEQ ID NO: 5). In some embodiments, the parental AAV capsid protein further comprises an insertion of at least or about three, four, five, six, seven, eight, nine, ten, or eleven amino acids of an amino acid in an amino acid position 588-589 of the amino acid sequence of the parental AAV (AAV9 VP1 numbering). In some embodiments, delivery is more specific than a delivery of the heterologous nucleic acid by a reference AAV, e.g., AAV9. In some embodiments, methods further comprise reducing or ablating delivery of the heterologous nucleic acid in an off-target in vivo environment, such as the liver, compared to a reference AAV. In some embodiments, delivery is characterized by an increase in efficiency of transduction (e.g., of the heterologous nucleic acid) in the target in vivo environment than a transduction efficiency in the target in vivo environment of the reference AAV. In some embodiments, the delivery is systemic (e.g., intravenous). In some embodiments, the subject is a human or a non-human primate.

### Methods of Treatment

[0196] Disclosed herein are methods of treating a disease or condition, or a symptom of the disease or condition, in a subject, comprising administrating of therapeutically effective amount of one or more compositions (e.g., rAAV particle, AAV vector, pharmaceutical formulations and composition) disclosed herein to the subject. In some embodiments, the composition is a rAAV capsid protein described herein. In some embodiments, the composition is an isolated and purified rAAV capsid protein described herein. In some embodiments, the rAAV particle encapsidates a heterologous nucleic acid comprising a transgene (e.g., therapeutic nucleic acid). In some embodiments, the composition is a rAAV capsid protein described herein conjugated with a therapeutic agent disclosed herein In some embodiments, the composition is a pharmaceutical composition comprising the rAAV particle and a pharmaceutically acceptable carrier. In some embodiments, the one or more compositions are administered to the subject alone (e.g., standalone therapy). In some embodiments, the one or more compositions are administered in combination with an additional agent. In some embodiments, the composition is a first-line therapy for the disease or condition. In some embodiments, the composition is a second-line, third-line, or fourth-line therapy, for the disease or condition.

[0197] Provided herein are methods of treating a disease or a condition, or a symptom of the disease or condition, in a subject, comprising: (a) diagnosing a subject with a disease or a condition affecting a target in vivo environment; and (b) treating the disease or the condition by administering to the subject a therapeutically effective amount of a composition disclosed herein (e.g., rAAV particle, AAV vector, pharmaceutical composition), wherein the composition is engineered with an increased specificity for the target in vivo environment. In some cases, the composition is engineered with a decreased specificity for an off-target in vivo environment, e.g., the liver.

[0198] Disclosed herein are methods of treating a disease or a condition, or a symptom of the disease or the condition, afflicting a target in vivo environment in a subject comprising: (a) administering to the subject a composition (e.g., rAAV particle, AAV vector, pharmaceutical composition) and (b) expressing the therapeutic nucleic acid into a target in vivo environment in the subject with an increased specificity and/or transduction efficiency, as compared to a reference AAV. In some cases, the reference AAV is AAV9 or AAV5, or a variant thereof.

[0199] Methods of treating a disease or condition affecting the central nervous system (CNS) or peripheral nervous system (PNS) comprise administering a rAAV particle to a subject, the rAAV particle comprising an rAAV capsid protein comprising a substitution of at least or about three, four, five, six, or seven amino acids of an amino acid sequence DGAATKN (SEQ ID NO: 3943) or DGQSSKS (SEQ ID NO: 2764), LQTSSPG (SEQ ID NO: 2933), QQGKQSV (SEQ ID NO: 79), SINTKTN (SEQ ID NO: 45475), SNGTKQT (SEQ ID NO: 442), GSGKTAA (SEQ ID NO: 88), MGDKPTR (SEQ ID NO: 2466), QPSGGNT (SEQ ID NO: 2672), ERGANTK (SEQ ID NO: 5192), TTGGHSS (SEQ ID NO: 2743), GTTKTSE (SEQ ID NO: 3064), GTGTSVL (SEQ ID NO: 11958), NQSGTKG (SEQ ID NO: 780), KGPGQMG (SEQ ID NO: 45476), GTPSKAG (SEQ ID NO: 2741), and any amino acid sequence provided in Table 1, Table 2, FIG. 2, or FIG. 3, at an amino acid position 452-458 in a parental AAV capsid protein. In some embodiments, the rAAV capsid protein comprises an amino acid sequence provided in any one of SEQ ID NOS: 4638446399.

[0200] In some embodiments, the parental AAV capsid protein is AAV9 capsid protein (for e.g., provided in SEQ ID NO: 1). In some embodiments, the parental AAV capsid protein is an AAV9 variant capsid protein AAV-PHP.B (SEQ ID NO: 3). In some embodiments, the parental AAV capsid protein is AAV9 variant capsid protein AAV-PHP.eB (SEQ ID NO: 5). In some embodiments, the parental AAV capsid protein further comprises an insertion of at least or about three, four, five, six, seven, eight, nine, ten, or eleven amino acids of an amino acid in an amino acid position 588-589 of the amino acid sequence of the parental AAV (AAV9 VP1 numbering). In some embodiments, delivery is more specific than a delivery of the heterologous nucleic acid by a reference AAV, e.g., AAV9. In some embodiments, methods further comprise reducing or ablating delivery of the heterologous nucleic acid in an off-target in vivo environment, such as the liver. In some embodiments, delivery is characterized by an increase in efficiency of transduction (e.g., of the heterologous nucleic acid) in the CNS or PNS than a transduction efficiency in the CNS or PNS of the reference AAV. In some embodiments, the delivery is systemic (e.g., intravenous). In some embodiments, the subject is a human or a non-human primate.

[0201] Methods of treating a disease or a condition afflicting a target in vivo environment selected from the group consisting of the liver, intestine, heart, lung, reproductive organ, muscle, adipose, pancreas, a brain, or spleen, comprise administering to a subject a rAAV particle comprising an amino acid provided in any one of FIG. 4-14, the rAAV particle comprising an rAAV capsid protein comprising a substitution of at least or about three, four, five, six, or seven amino acids of an amino acid sequence provided in any one of SEQ ID NOS: 25469-26205. In some embodiments, methods comprise delivering a rAAV particle an amino acid sequence KDNTPGR (SEQ ID NO: 32538) or NNLPRNL (SEQ ID NO: 32867), at an amino acid position 452-458 in a parental AAV capsid protein, thereby targeting the lung. In some embodiments, methods comprise delivering a rAAV particle comprising an amino acid sequence RESSPSL (SEQ ID NO: 26474) at an amino acid position 452-458 in a parental AAV capsid protein, thereby targeting the intestine. In some embodiments, methods comprise delivering a rAAV particle an amino acid sequence RVPLSTI (SEQ ID NO: 26933) or RESSPSL (SEQ ID NO: 29065) at an amino acid position 452-458 in a parental AAV capsid protein, thereby targeting the kidney. In some embodiments, methods comprise delivering a rAAV particle comprising an amino acid sequence RESSPSL (SEQ ID NO: 31904) at an amino acid position 452-458 in a parental AAV capsid protein, thereby targeting the stomach. In some embodiments, the rAAV capsid protein comprises an amino acid sequence provided in any one of SEQ ID NOS: 46400-46403. In some embodiments, the parental AAV capsid protein is AAV9 capsid protein (for e.g., provided in SEQ ID NO: 1). In some embodiments, the parental AAV capsid protein is AAV5 capsid protein (for e.g., provided in SEQ ID NO: 2). In some embodiments, the parental AAV capsid protein is an AAV9 variant capsid protein AAV-PHP.B (SEQ ID NO: 3). In some embodiments, the parental AAV capsid protein is AAV9 variant capsid protein AAV-PHP.eB (SEQ ID NO: 5). In some embodiments, the parental AAV capsid protein further comprises an insertion of at least or about three, four, five, six, seven, eight, nine, ten, or eleven amino acids of an amino acid in an amino acid position 588-589 of the amino acid sequence of the parental AAV (AAV9 VP1 numbering). In some embodiments, delivery is more specific than a delivery of the heterologous nucleic acid by a reference AAV, e.g., AAV9. In some embodiments, methods further comprise reducing or ablating delivery of the heterologous nucleic acid in an off-target in vivo environment, such as the liver. In some embodiments, delivery is characterized by an increase in efficiency of transduction (e.g., of the heterologous nucleic acid) in the target in vivo environment than a transduction efficiency in the target in vivo environment of the reference AAV. In some embodiments, the delivery is systemic (e.g., intravenous or intranasal). In some embodiments, the subject is a human or a non-human primate.

[0202] Also provide are methods of modulating a target gene expression product, the methods comprising administering to a subject in need thereof a composition (e.g., rAAV particle, AAV vector, pharmaceutical composition) disclosed herein. For example, methods provided herein comprise administering to a subject a rAAV with a rAAV capsid protein encapsidating a viral vector comprising a heterologous nucleic acid that modulates the expression or the activity of the target gene expression product. In some embodiments, the disease or the condition is characterized by an increased or enhanced expression or activity of a gene or gene expression product thereof, as compared to a normal individual. In some cases, administering the therapeutically effective amount of the composition restores the expression or the activity of the gene or gene expression product thereof to a level that is typical in a normal individual. The term “normal individual” refers to an unaffected individual, i.e. an individual that is not afflicted with the disease or the condition characterized by the variation in expression or activity of the gene or gene expression product thereof.

[0203] Non-limiting examples of genes involved in central nervous system (CNS) diseases or disorders include Sarcoglycan Alpha (SGCA), glutamic acid decarboxylase 65 (GAD65), glutamic acid decarboxylase 67 (GAD67), CLN2 gene, Nerve Growth Factor (NGF), glial cell derived neurotrophic factor(GDNF), Neurturin, Survival Of Motor Neuron 1, Telomeric (SMN1), β-Glucocerebrosidase (GCase), Frataxin (FXN), Huntingtin (HTN), methyl-CpG binding protein 2 (MECP2), peroxisomal biogenesis factor (PEX), progranulin (GRN), an antitubulin agent, copper-zinc superoxide dismutase (SOD1), Glucosylceramidase Beta (GBA), NPC Intracellular Cholesterol Transporter 1 (NPC1), and NPS3. In some embodiments, the peroxisomal biogenesis factor (PEX) is selected from the group consisting of PEX1, PEX2, PEX3, PEX4, PEX5, PEX6, PEX7, PEX10, PEX11β, PEX12, PEX13, PEX14, PEX16, PEX19, and PEX26. Non-limiting examples of genes implicated in disease or disorder of a particular organ (e.g., lung, heart, liver, muscle, eye) include Cystic Fibrosis Transmembrane Conductance Regulator (CFTR), Factor X (FIX), RPE65, Retinoid Isomerohydrolase (RPE65), Sarcoglycan Alpha (SGCA), and sarco/endoplasmic reticulum Ca2+-ATPase (SERCA2a). In some instances, the expression of a gene or expression or activity of a gene expression product is inhibited by the administration of the composition to the subject. In some instances, the expression of a gene or the expression or the activity of a gene expression product is enhanced by the administration of the composition to the subject.

[0204] In some cases, the composition is administered at dosage levels sufficient to deliver from about 0.0001 mg/kg to about 100 mg/kg, from about 0.001 mg/kg to about 0.05 mg/kg, from about 0.005 mg/kg to about 0.05 mg/kg, from about 0.001 mg/kg to about 0.005 mg/kg, from about 0.05 mg/kg to about 0.5 mg/kg, from about 0.01 mg/kg to about 50 mg/kg, from about 0.1 mg/kg to about 40 mg/kg, from about 0.5 mg/kg to about 30 mg/kg, from about 0.01 mg/kg to about 10 mg/kg, from about 0.1 mg/kg to about 10 mg/kg, or from about 1 mg/kg to about 25 mg/kg, of subject body weight per day, one or more times a day, to obtain the desired therapeutic effect.

[0205] In some cases, the viral genome (vg) concentration of the composition that is administered is between 1.0×10¹¹ vg per kilogram (kg) and 1.0×10¹⁶ vg/kg. In some cases, the concentration of infectious particles of at least or about 10⁷, 10⁸, 10⁹, 10¹⁰, 10¹¹, 10¹², 10¹³, 10¹⁴, 10¹⁵, 10¹⁶, or 10¹⁷. In some cases the concentration of infectious particles is 2×10⁷, 2×10⁸, 2×10⁹, 2×10¹⁰, 2×10¹¹, 2×10¹², 2×10¹³, 2×10¹⁴, 2×10¹⁵, 2×10¹⁶, or 2×10¹⁷. In some cases the concentration of the infectious particles 3×10⁷, 3×10⁸, 3×10⁹, 3×10¹⁰, 3×10¹¹, 3×10¹², 3×10¹³, 3×10¹⁴, 3×10¹⁵, 3×10¹⁶, or 3×10¹⁷. In some cases the concentration of the infectious particles 4×10⁷, 4×10⁸, 4×10⁹, 4×10¹⁰, 4×10¹¹, 4×10¹², 4×10¹³, 4×10¹⁴, 4×10¹⁵, 4×10¹⁶, or 4×10¹⁷. In some cases the concentration of the infectious particles 5×10⁷, 5×10⁸, 5×10⁹, 5×10¹⁰, 5×10¹¹, 5×10¹², 5×10¹³, 5×10¹⁴, 5×10¹⁵, 5×10¹⁶, or 5×10¹⁷. In some cases the concentration of the infectious particles 6×10⁷, 6×10⁸, 6×10⁹, 6×10¹⁰, 6×10¹¹, 6×10¹², 6×10¹³, 6×10¹⁴, 6×10¹⁵, 6×10¹⁶, or 6×10¹⁷. In some cases the concentration of the infectious particles 7×10⁷, 7×10⁸, 7×10⁹, 7×10¹⁰, 7×10¹¹, 7×10¹², 7×10¹³, 7×10¹⁴, 7×10¹⁵, 7×10¹⁶, or 7×10¹⁷. In some cases the concentration of the infectious particles 8×10⁷, 8×10⁸, 8×10⁹. 8×10¹⁰, 8×10¹¹, 8×10¹², 8×10¹³, 8×10¹⁴, 8×10¹⁵, 8×10¹⁶, or 8×10¹⁷. In some cases the concentration of the infectious particles 9×10⁷, 9×10⁸, 9×10⁹, 9×10¹⁰, 9×10¹¹, 9×10¹², 9×10¹³, 9×10¹⁴, 9×10¹⁵, 9×10¹⁶, or 9×10¹⁷.

[0206] In some embodiments, the administering of step is performed once. Alternatively, the administering of step is repeated at least twice. The administering of step may be performed once daily. In some cases, the administering of step comprises intravenous administration. In some cases, the administering comprises pulmonary administration. In some cases, the administering comprises intranasal administration (such as a spray). In some cases, the administering of step comprises injecting the composition into a target in vivo environment. In some cases, the administering of step does not comprise injecting the composition into the target in vivo environment.

### Subject

[0207] Disclosed herein methods of delivering at least one of an AAV particle and viral vector to a subject, for example—to treat or prevent a disease or condition in a subject. The subject, in some cases, is a mammal. Non-limiting examples of a mammal include a mouse, rat, guinea pig, rabbit, chimpanzee, or farm animal. In some instances, the mammal is a non-human primate. In some instances, the subject is human. The subject of the present disclosure may not be diagnosed with a disease or condition. Alternatively, the subject may be a patient that is diagnosed with a disease or disorder, or suspected of having the disease or the disorder.

### Disease or Condition

[0208] Disclosed herein are methods of treating a disease or condition in a subject by administering a composition comprising a rAAV such as those disclosed herein. At least one advantage of the rAAVs disclosed herein, is that the rAAV may be used to treat virtually any disease or condition that would benefit from a transgene therapy, including but not limited to spinal muscular atrophy (SMA), amyotrophic lateral sclerosis (ALS), Parkinson's disease, Pompe disease, Huntington's disease. Alzheimer's disease, Battens disease, lysosomal storage disorders, glioblastoma multiforme, Rett syndrome, Leber's congenital amaurosis, Late infantile neuronal ceroid lipofuscinosis (LINCL), chronic pain, stroke, spinal cord injury, traumatic brain injury and lysosomal storage disorders.

[0209] The disease or the condition may, in some embodiments, be characterized by a reduced or ablated expression or activity of a gene or gene expression product thereof, as compared to a normal individual. In some embodiments, be characterized by an increased or enhanced expression or activity of a gene or gene expression product thereof, as compared to a normal individual.

[0210] In some cases, the disease or condition is localized to a particular in vivo environment in the subject, e.g., the brain or the lung. The compositions of the present disclosure are particularly useful for the treatment of the diseases or conditions described herein because they specifically target the in vivo environment and deliver a therapeutic nucleic acid engineered to modulate the activity or the expression of a target gene expression product involved with the pathogenesis or pathology of the disease or condition.

[0211] In some instances, the disease or condition comprises a disease or condition of the central nervous system (CNS). Non-limiting examples of disease of the CNS include Absence of the Septum Pellucidum, Acid Lipase Disease. Acid Maltase Deficiency, Acquired Epileptiform Aphasia, Acute Disseminated Encephalomyelitis, Attention Deficit-Hyperactivity Disorder (ADHD), Adie's Pupil, Adie's Syndrome, Adrenoleukodystrophy, Agenesis of the Corpus Callosum, Agnosia, Aicardi Syndrome, Aicardi-Goutieres Syndrome Disorder, AIDS—Neurological Complications, Alexander Disease, Alpers' Disease, Alternating Hemiplegia, Alzheimers Disease. Amyotrophic Lateral Sclerosis (ALS), Anencephaly, Aneurysm, Angelman Syndrome, Angiomatosis. Anoxia, Antiphospholipid Syndrome, Aphasia. Apraxia, Arachnoid Cysts, Arachnoiditis, Amold-Chiari Malformation, Arteriovenous Malformation, Asperger Syndrome, Ataxia, Ataxia Telangiectasia, Ataxias and Cerebellar or Spinocerebellar Degeneration, Atrial Fibrillation and Stroke, Attention Deficit-Hyperactivity Disorder, Autism Spectrum Disorder, Autonomic Dysfunction, Back Pain, Barth Syndrome, Batten Disease. Becker's Myotonia, Behcet's Disease, Bell's Palsy, Benign Essential Blepharospasm, Benign Focal Amyotrophy, Benign Intracranial Hypertension, Bernhardt-Roth Syndrome, Binswanger's Disease. Blepharospasm, Bloch-Sulzberger Syndrome, Brachial Plexus Birth Injuries, Brachial Plexus Injuries, Bradbury-Eggleston Syndrome. Brain and Spinal Tumors, Brain Aneurysm, Brain Injury, Brown-Sequard Syndrome, Bulbospinal Muscular Atrophy, Cerebral Autosomal Dominant Arteriopathy with Subcortical Infarcts and Leukoencephalopathy (CADASIL), Canavan Disease, Carpal Tunnel Syndrome, Causalgia, Cavernomas, Cavemous Angioma. Cavernous Malformation, Central Cervical Cord Syndrome, Central Cord Syndrome, Central Pain Syndrome, Central Pontine Myelinolysis, Cephalic Disorders, Ceramidase Deficiency, Cerebellar Degeneration, Cerebellar Hypoplasia, Cerebral Aneurysms, Cerebral Arteriosclerosis, Cerebral Atrophy, Cerebral Beriberi, Cerebral Cavernous Malformation, Cerebral Gigantism, Cerebral Hypoxia, Cerebral Palsy, Cerebro-Oculo-Facio-Skeletal Syndrome (COFS), Charcot-Marie-Tooth Disease. Charcot-Marie-Tooth syndrome, classical rhizomelic chondrodysplasia punctata (RCDP), Chiari Malformation, Cholesterol Ester Storage Disease, Chorea, Chorcoacanthocytosis, Chronic Inflammatory Demyelinating Polyneuropathy (CIDP), Chronic Orthostatic Intolerance, Chronic Pain, Cockayne Syndrome Type II, Coffin Lowry Syndrome, Colpocephaly, Coma, Complex Regional Pain Syndrome, Congenital Facial Diplegia. Congenital Myasthenia, Congenital Myopathy, Congenital Vascular Cavernous Malformations, Corticobasal Degeneration. Cranial Arteritis, Craniosynostosis, Cree encephalitis, Creutzfeldt-Jakob Disease, Cumulative Trauma Disorders, Cushing's Syndrome, Cytomegalic Inclusion Body Disease. Cytomegalovirus Infection, Dancing Eyes-Dancing Feet Syndrome, Dandy-Walker Syndrome, Dawson Disease, Deafness, De Morsier's Syndrome, Dejerine-Klumpke Palsy, Dementia, Dementia-Multi-Infarct, Dementia-Semantic, Dementia-Subcortical, Dementia With Lewy Bodies, Dentate Cerebellar Ataxia. Dentatorubral Atrophy. Dermatomyositis, Developmental Dyspraxia, Devic's Syndrome, Diabetic Neuropathy, Diffuse Sclerosis, Dravet Syndrome, Duchenne muscular dystrophy, Dysautonomia, Dysgraphia, Dyslexia, Dysphagia, Dyspraxia, Dyssynergia Cerebellaris Myoclonica, Dyssynergia Cerebellaris Progressiva, Dystonias, Early Infantile Epileptic Encephalopathy, Empty Sella Syndrome, Encephalitis, Encephalitis Lethargica, Encephaloceles, Encephalopathy, Encephalopathy (familial infantile), Encephalotrigeminal Angiomatosis, Epilepsy, Epileptic Hemiplegia, Erb's Palsy, Erb-Duchenne and Dejerine-Klumpke Palsies. Essential Tremor, Extrapontine Myelinolysis, Fabry Disease, Fahr's Syndrome, Fainting, Familial Dysautonomia, Familial Hemangioma. Familial Idiopathic Basal Ganglia Calcification, Familial Periodic Paralyses, Familial Spastic Paralysis, Farber's Disease. Febrile Seizures. Fibromuscular Dysplasia, Fisher Syndrome, Floppy Infant Syndrome, Foot Drop, Friedreich's Ataxia, Frontotemporal Dementia, Gaucher Disease. Generalized Gangliosidoses. Gerstmann's Syndrome, Gerstmann-Straussler-Scheinker Disease, Giant Axonal Neuropathy, Giant Cell Arteritis, Giant Cell Inclusion Disease, glioblastoma, Globoid Cell Leukodystrophy, Glossopharyngeal Neuralgia, Glycogen Storage Disease, Guillain-Barre Syndrome, Hallervorden-Spatz Disease. Head Injury, Headache. Hemicrania Continua, Hemifacial Spasm, Hemiplegia Alterans, Hereditary Neuropathies, Hereditary Spastic Paraplegia. Heredopathia Atactica Polyneuritiformis. Herpes Zoster, Herpes Zoster Oticus, Hirayama Syndrome, Holmes-Adie syndrome, Holoprosencephaly, HTLV-1 Associated Myclopathy, Hughes Syndrome, Huntington's Disease, Hydranencephaly, Hydrocephalus. Hydrocephalus-Normal Pressure, Hydromyelia, Hypercortisolism, Hypersomnia, Hypertonia, Hypotonia, Hypoxia, Immune-Mediated Encephalomyelitis, Inclusion Body Myositis, Incontinentia Pigmenti, Infantile Hypotonia, Infantile Neuroaxonal Dystrophy, Infantile Phytanic Acid Storage Disease, Infantile Refsum Disease, Infantile Spasms, Inflammatory Myopathies, Iniencephaly, Intestinal Lipodystrophy, Intracranial Cysts, Intracranial Hypertension, Isaacs' Syndrome, Joubert Syndrome, Kearns-Sayre Syndrome, Kennedy's Disease, Kinsboume syndrome, Kleine-Levin Syndrome, Klippel-Feil Syndrome, Klippel-Trenaunay Syndrome (KTS), Kliiver-Bucy Syndrome, Korsakoff s Amnesic Syndrome, Krabbe Disease, Kugelberg-Welander Disease, Kuru, Lambert-Eaton Myasthenic Syndrome, Landau-Kleffner Syndrome, Lateral Femoral Cutaneous Nerve Entrapment, Lateral Medullary Syndrome, Learning Disabilities, Leigh's Disease, Lennox-Gastaut Syndrome, Lesch-Nyhan Syndrome, Leukodystrophy, Levine-Critchley Syndrome, Lewy Body Dementia. Lipid Storage Diseases, Lipoid Proteinosis, Lissencephaly, Locked-In Syndrome, Lou Gehrig's Disease, Lupus-Neurological Sequelac. Lyme Disease-Neurological Complications, Machado-Joseph Disease, Macrencephaly, Megalencephaly, Melkersson-Rosenthal Syndrome. Meningitis, Meningitis and Encephalitis, Menkes Disease, Meralgia Paresthetica, Metachromatic Leukodystrophy, Microcephaly, Migraine. Miller Fisher Syndrome, Mini Stroke, Mitochondrial Myopathy, Moebius Syndrome, Monomelic Amyotrophy, Motor Neuron Diseases, Moyamoya Disease, Mucolipidoses, Mucopolysaccharidoses, Multi-Infarct Dementia, Multifocal Motor Neuropathy, Multiple Sclerosis, Multiple System Atrophy, Multiple System Atrophy with Orthostatic Hypotension, Muscular Dystrophy. Myasthenia-Congenital, Myasthenia Gravis, Myelinoclastic Diffuse Sclerosis, Myoclonic Encephalopathy of Infants, Myoclonus, Myopathy, Myopathy-Congenital, Myopathy-Thyrotoxic, Myotonia, Myotonia Congenita, Narcolepsy, Neuroacanthocytosis, Neurodegeneration with Brain Iron Accumulation, Neurofibromatosis, Neuroleptic Malignant Syndrome, Neurological Complications of AIDS, Neurological Complications of Lyme Disease, Neurological Consequences of Cytomegalovirus Infection, Neurological Manifestations of Pompe Disease, Neurological Sequelae Of Lupus, Neuromyelitis Optica, Neuromyotonia, Neuronal Ceroid Lipofuscinosis, Neuronal Migration Disorders. Neuropathy-Hereditary. Neurosarcoidosis, Neurosyphilis, Neurotoxicity, Nevus Cavernosus, Niemann-Pick Disease, O'Sullivan-McLeod Syndrome. Occipital Neuralgia, Ohtahara Syndrome, Olivopontocerebellar Atrophy, Opsoclonus Myoclonus, Orthostatic Hypotension, Overuse Syndrome, Pain-Chronic, Pantothenate Kinase-Associated Neurodegeneration, Paraneoplastic Syndromes, Paresthesia, Parkinson's Disease, Paroxysmal Choreoathetosis, Paroxysmal Hemicrania, Parry-Romberg, Pelizaeus-Merzbacher Disease, Pena Shokeir II Syndrome, Perineural Cysts, Periodic Paralyses, Peripheral Neuropathy, Periventricular Leukomalacia, Persistent Vegetative State, Pervasive Developmental Disorders, Phytanic Acid Storage Disease, Pick's Disease. Pinched Nerve, Piriformis Syndrome, Pituitary Tumors, Polymyositis, Pompe Disease, Porencephaly, Post-Polio Syndrome, Postherpetic Neuralgia, Postinfectious Encephalomyelitis, Postural Hypotension, Postural Orthostatic Tachycardia Syndrome, Postural Tachycardia Syndrome, Primary Dentatum Atrophy, Primary Lateral Sclerosis, Primary Progressive Aphasia, Prion Diseases, Progressive Hemifacial Atrophy, Progressive Locomotor Ataxia, Progressive Multifocal Leukoencephalopathy, Progressive Sclerosing Poliodystrophy, Progressive Supranuclear Palsy, Prosopagnosia, Pseudo-Torch syndrome, Pseudotoxoplasmosis syndrome, Pseudotumor Cerebri, Psychogenic Movement, Ramsay Hunt Syndrome I, Ramsay Hunt Syndrome II, Rasmussen's Encephalitis, Reflex Sympathetic Dystrophy Syndrome, Refsum Disease, Refsum Disease-Infantile, Repetitive Motion Disorders, Repetitive Stress Injuries, Restless Legs Syndrome, Retrovirus-Associated Myelopathy, Rett Syndrome, Reye's Syndrome, Rheumatic Encephalitis, Riley-Day Syndrome, Sacral Nerve Root Cysts, Saint Vitus Dance, Salivary Gland Disease, Sandhoff Disease, Schilder's Disease, Schizencephaly, Seitelberger Disease, Seizure Disorder, Semantic Dementia, Septo-Optic Dysplasia, Severe Myoclonic Epilepsy of Infancy (SMEI), Shaken Baby Syndrome, Shingles, Shy-Drager Syndrome, Sjogren's Syndrome, Sleep Apnea, Sleeping Sickness, Sotos Syndrome, Spasticity, Spina Bifida, Spinal Cord Infarction, Spinal Cord Injury, Spinal Cord Tumors, Spinal Muscular Atrophy, Spinocerebellar Atrophy, Spinocerebellar Degeneration, Steele-Richardson-Olszewski Syndrome, Stiff-Person Syndrome, Striatonigral Degeneration, Stroke, Sturge-Weber Syndrome, Subacute Sclerosing Panencephalitis, Subcortical Arteriosclerotic Encephalopathy, Short-lasting, Unilateral, Neuralgiform (SUNCT) Headache, Swallowing Disorders, Sydenham Chorea, Syncope. Syphilitic Spinal Sclerosis, Syringohydromyelia, Syringomyclia, Systemic Lupus Erythematosus, Tabes Dorsalis, Tardive Dyskinesia, Tarlov Cysts, Tay-Sachs Disease, Temporal Arteritis, Tethered Spinal Cord Syndrome, Thomsen's Myotonia, Thoracic Outlet Syndrome, Thyrotoxic Myopathy, Tic Douloureux, Todd's Paralysis, Tourette Syndrome. Transient Ischemic Attack, Transmissible Spongiform Encephalopathies, Transverse Myelitis, Traumatic Brain Injury. Tremor, Trigeminal Neuralgia, Tropical Spastic Paraparesis, Troyer Syndrome, Tuberous Sclerosis, Vascular Erectile Tumor, Vasculitis Syndromes of the Central and Peripheral Nervous Systems, Von Economo's Disease. Von Hippel-Lindau Disease (VHL), Von Recklinghausen's Disease, Wallenberg's Syndrome, Werdnig-Hoffman Disease, Wemicke-KorsakoffSyndrome, West Syndrome, Whiplash, Whipple's Disease, Williams Syndrome, Wilson Disease, Wolman's Disease, and X-Linked Spinal and Bulbar Muscular Atrophy.

[0212] In some instances, the disease or condition comprises a liver disease or disorder, or is associated with a liver disease or disorder. Non-limiting examples include disorders of bile acid synthesis (e.g., Wilson disease, Progressive familial intrahepatic cholestasis type 3), disorders of carbohydrate metabolism (e.g., Hereditary fructose intolerance, Glycogen storage disease type IV), disorders of amino acids metabolism (e.g., tyrosinemia type I), Urea cycle disorders (e.g., argininosuccinate lyase deficiency, citrin deficiency (CTLN2, NICCD)), disorders of lipid metabolism (e.g., cholesteryl ester storage disease), and others including but not limited to Alpha-1 antitrypsin deficiency, cystic fibrosis, hereditary hemochromatosis, Alström syndrome, and congenital hepatic fibrosis.

[0213] In some instances, the disease or condition is a disease or condition is a pulmonary disease or disorder (of the lung). In some instances, the pulmonary disease or disorder is selected form the group consisting of chronic obstructive pulmonary disease (COPD), pulmonary fibrosis (PF), and plasmalogen deficiency disorders.

[0214] Provided here, are methods of treating a disease or a condition associated with an aberrant expression or activity of a target gene or gene expression product thereof, the method comprising modulating the expression or the activity of a target gene or gene expression product in a subject by administering a rAAV encapsidating a heterologous nucleic acid of the present disclosure. In some instances, administration is systemic administration. In some instances, the expression or the activity of the target gene or gene expression product is decreased, relative to that in a normal (non-diseased) individual, and administering the rAAV to the subject is sufficient to increase the expression of the activity of the target gene or gene expression product to that of a normal individual. In some instances, the expression or the activity of the gene or gene expression product is increased, relative to that in a normal individual, and administering the rAAV to the subject is sufficient to decrease the expression or the activity of the target gene or gene expression product. In a non-limiting example, a subject diagnosed with Alzheimer's disease, which is caused, in some cases, by a gain-of-function of a Presenilin 1 and/or Presenilin 2 (encoded by the gene PSEN1 and PSEN2, respectively) is administered a rAAV disclosed herein encapsidating a therapeutic nucleic acid that is a silencing RNA (siRNA), or other RNAi with a loss-of-function effect on PSEN1 mRNA.

### Formulations, Dosages, and Routes of Administration

[0215] In general, methods disclosed herein comprise administering a therapeutic rAAV composition by systemic administration. In some instances, methods comprise administering a therapeutic rAAV composition by oral administration. In some instances, methods comprise administering a therapeutic rAAV composition by intraperitoneal injection. In some instances, methods comprise administering a therapeutic rAAV composition in the form of an anal suppository. In some instances, methods comprise administering a therapeutic rAAV composition by intravenous (“i.v.”) administration. It is conceivable that one may also administer therapeutic rAAV compositions disclosed herein by other routes, such as subcutaneous injection, intramuscular injection, intradermal injection, transdermal injection percutaneous administration, intranasal administration, intralymphatic injection, rectal administration intragastric administration, intraocular administration, intracerebro-ventricularl administration, intrathecally, or any other suitable parenteral administration. In some instances, methods comprise administering a therapeutic rAAV composition by topical administration, such as for example, by brushing or otherwise contacting the rAAV composition to a region of the subject (e.g., eardrum, bladder). In some embodiments, routes for local delivery closer to site of injury or inflammation are preferred over systemic routes. Routes, dosage, time points, and duration of administrating therapeutics may be adjusted. In some embodiments, administration of therapeutics is prior to, or after, onset of either, or both, acute and chronic symptoms of the disease or condition.

[0216] An effective dose and dosage of pharmaceutical compositions to prevent or treat the disease or condition disclosed herein is defined by an observed beneficial response related to the disease or condition, or symptom of the disease or condition. Beneficial response comprises preventing, alleviating, arresting, or curing the disease or condition, or symptom of the disease or condition. In some embodiments, the beneficial response may be measured by detecting a measurable improvement in the presence, level, or activity, of biomarkers, transcriptomic risk profile, or intestinal microbiome in the subject. An “improvement,” as used herein refers to shift in the presence, level, or activity towards a presence, level, or activity, observed in normal individuals (e.g. individuals who do not suffer from the disease or condition). In instances wherein the therapeutic rAAV composition is not therapeutically effective or is not providing a sufficient alleviation of the disease or condition, or symptom of the disease or condition, then the dosage amount and/or route of administration may be changed, or an additional agent may be administered to the subject, along with the therapeutic rAAV composition. In some embodiments, as a patient is started on a regimen of a therapeutic rAAV composition, the patient is also weaned off (e.g., step-wise decrease in dose) a second treatment regimen.

[0217] In some embodiments, pharmaceutical compositions in accordance with the present disclosure may be administered at dosage levels sufficient to deliver from about 0.0001 mg/kg to about 100 mg/kg, from about 0.001 mg/kg to about 0.05 mg/kg, from about 0.005 mg/kg to about 0.05 mg/kg, from about 0.001 mg/kg to about 0.005 mg/kg, from about 0.05 mg/kg to about 0.5 mg/kg, from about 0.01 mg/kg to about 50 mg/kg, from about 0.1 mg/kg to about 40 mg/kg, from about 0.5 mg/kg to about 30 mg/kg, from about 0.01 mg/kg to about 10 mg/kg, from about 0.1 mg/kg to about 10 mg/kg, or from about 1 mg/kg to about 25 mg/kg, of subject body weight per day, one or more times a day, to obtain the desired therapeutic, diagnostic, or prophylactic, effect. It will be understood that the above dosing concentrations may be converted to vg or viral genomes per kg or into total viral genomes administered by one of skill in the art.

[0218] In some cases, a dose of the pharmaceutical composition may comprise a concentration of infectious particles of at least or about 10⁷, 10⁸, 10⁹, 10¹⁰, 10¹¹, 10¹², 10¹³, 10¹⁴, 10¹⁵, 10¹⁶, or 10¹⁷. In some cases the concentration of infectious particles is 2×10⁷, 2×10⁸, 2×10⁹, 2×10¹⁰, 2×10¹¹, 2×10¹², 2×10¹³. 2×10¹⁴, 2×10¹⁵, 2×10¹⁶, or 2×10¹⁷. In some cases the concentration of the infectious particles is 3×10⁷, 3×10⁸, 3×10⁹, 3×10¹⁰, 3×10¹¹, 3×10¹², 3×10¹³, 3×10¹⁴, 3×10¹⁵, 3×10¹⁶, or 3×10¹⁷. In some cases the concentration of the infectious particles is 4×10⁷, 4×10⁸, 4×10⁹, 4×10¹⁰, 4×10¹¹, 4×10¹², 4×10¹³, 4×10¹⁴, 4×10¹⁵, 4×10¹⁶, or 4×10¹⁷. In some cases the concentration of the infectious particles is 5×10⁷, 5×10⁸, 5×10⁹, 5×10¹⁰, 5×10¹¹, 5×10¹², 5×10¹³, 5×10¹⁴, 5×10¹⁵, 5×10¹⁶, or 5×10¹⁷. In some cases the concentration of the infectious particles is 6×10⁷, 6×10⁸, 6×10⁹, 6×10¹⁰, 6×10¹¹, 6×10¹², 6×10¹³, 6×10¹⁴, 6×10¹⁵, 6×10¹⁶, or 6×10¹⁷. In some cases the concentration of the infectious particles is 7×10⁷, 7×10⁸, 7×10⁹, 7×10¹⁰, 7×10¹¹, 7×10¹², 7×10¹³, 7×10¹⁴, 7×10¹⁵, 7×10¹⁶, or 7×10¹⁷. In some cases the concentration of the infectious particles is 8×10⁷, 8×10⁸, 8×10⁹, 8×10¹⁰, 8×10¹¹, 8×10¹², 8×10¹³, 8×10¹⁴, 8×10¹⁵, 8×10¹⁶, or 8×10¹⁷. In some cases the concentration of the infectious particles is 9×10⁷, 9×10⁸, 9×10⁹, 9×10¹⁰, 9×10¹¹, 9×10¹², 9×10¹³, 9×10¹⁴, 9×10¹⁵, 9×10¹⁶, or 9×10¹⁷.

[0219] Disclosed herein, in some embodiments are formulations of pharmaceutically-acceptable excipients and carrier solutions suitable for delivery of the rAAV compositions described herein, as well as suitable dosing and treatment regimens for using the particular compositions described herein in a variety of treatment regimens. In some embodiments, the amount of therapeutic gene expression product in each therapeutically-useful composition may be prepared is such a way that a suitable dosage will be obtained in any given unit dose of the compound. Factors such as solubility, bioavailability, biological half-life, route of administration, product shelf life, as well as other pharmacological considerations will be contemplated by one skilled in the art of preparing such pharmaceutical formulations, and as such, a variety of dosages and treatment regimens may be desirable. In some instances, the rAAV compositions are suitably formulated pharmaceutical compositions disclosed herein, to be delivered either intraocularly, intravitreally, parenterally, subcutaneously, intravenously, intracerebro-ventricularly, intramuscularly, intrathecally, orally, intraperitoneally, by oral or nasal inhalation, or by direct injection to one or more cells, tissues, or organs by direct injection.

[0220] In some embodiments, the pharmaceutical forms of the AAV-based viral compositions suitable for injectable use include sterile aqueous solutions or dispersions and sterile powders for the extemporaneous preparation of sterile injectable solutions or dispersions. The carrier can be a solvent or dispersion medium containing, for example, water, ethanol, polyol (e.g., glycerol, propylene glycol, and liquid polyethylene glycol, and the like), suitable mixtures thereof, and/or vegetable oils. Proper fluidity may be maintained, for example, by the use of a coating, such as lecithin, by the maintenance of the required particle size in the case of dispersion and by the use of surfactants. The prevention of the action of microorganisms can be brought about by various antibacterial ad antifungal agents, for example, parabens, chlorobutanol, phenol, sorbic acid, thimerosal, and the like. In many cases, it will be preferable to include isotonic agents, for example, sugars or sodium chloride. Prolonged absorption of the injectable compositions can be brought about by the use in the compositions of agents delaying absorption, for example, aluminum monostearate and gelatin.

[0221] In some cases, for administration of an injectable aqueous solution, for example, the solution may be suitably buffered, if necessary, and the liquid diluent first rendered isotonic with sufficient saline or glucose. These particular aqueous solutions are especially suitable for intravenous, intramuscular, subcutaneous and intraperitoneal administration. Some variation in dosage will necessarily occur depending on the condition of the subject being treated. The person responsible for administration will, in any event, determine the appropriate dose for the individual subject. Moreover, for human administration, preparations should meet sterility, pyrogenicity, and the general safety and purity standards as required by FDA Office of Biologics standards.

[0222] Disclosed herein are sterile injectable solutions comprising the rAAV compositions disclosed herein, which are prepared by incorporating the rAAV compositions disclosed herein in the required amount in the appropriate solvent with several of the other ingredients enumerated above, as required, followed by filtered sterilization. Generally, dispersions are prepared by incorporating the various sterilized active ingredients into a sterile vehicle which contains the basic dispersion medium and the required other ingredients from those enumerated above. In the case of sterile powders for the preparation of sterile injectable solutions, the preferred methods of preparation are vacuum-drying and freeze-drying techniques which yield a powder of the active ingredient plus any additional desired ingredient from a previously sterile-filtered solution thereof. Injectable solutions may be advantageous for systemic administration, for example by intravenous administration.

[0223] Also provided herein are formulations in a neutral or salt form. Pharmaceutically-acceptable salts include the acid addition salts (formed with the free amino groups of the protein) and which are formed with inorganic acids such as, for example, hydrochloric or phosphoric acids, or such organic acids as acetic, oxalic, tartaric, mandelic, and the like. Salts formed with the free carboxyl groups can also be derived from inorganic bases such as, for example, sodium, potassium, ammonium, calcium, or ferric hydroxides, and such organic bases as isopropylamine, trimethylamine, histidine, procaine and the like. Upon formulation, solutions will be administered in a manner compatible with the dosage formulation and in such amount as is therapeutically effective. The formulations are easily administered in a variety of dosage forms such as injectable solutions, drug-release capsules, and the like.

[0224] Pulmonary administration may be advantageously achieved via the buccal administration. In some embodiments, formulations may comprise dry particles comprising active ingredients. In such embodiments, dry particles may have a diameter in the range from about 0.5 nm to about 7 nm or from about 1 nm to about 6 nm. In some embodiments, formulations may be in the form of dry powders for administration using devices comprising dry powder reservoirs to which streams of propellant may be directed to disperse such powder. In some embodiments, self-propelling solvent/powder dispensing containers may be used. In such embodiments, active ingredients may be dissolved and/or suspended in low-boiling propellant in sealed containers. Such powders may comprise particles wherein at least 98% of the particles by weight have diameters greater than 0.5 nm and at least 95% of the particles by number have diameters less than 7 num. Alternatively, at least 95% of the particles by weight have a diameter greater than 1 nm and at least 90% of the particles by number have a diameter less than 6 nm. Dry powder compositions may include a solid fine powder diluent such as sugar and are conveniently provided in a unit dose form. Low boiling propellants generally include liquid propellants having a boiling point of below 65° F. at atmospheric pressure. Generally, propellants may constitute 50% to 99.9% (w/w) of the composition, and active ingredient may constitute 0.1% to 20% (w/w) of the composition. Propellants may further comprise additional ingredients such as liquid non-ionic and/or solid anionic surfactant and/or solid diluent (which may have particle sizes of the same order as particles comprising active ingredients).

[0225] Pharmaceutical compositions formulated for pulmonary delivery may provide active ingredients in the form of droplets of solution and/or suspension. Such formulations may be prepared, packaged, and/or sold as aqueous and/or dilute alcoholic solutions and/or suspensions, optionally sterile, comprising active ingredients, and may conveniently be administered using any nebulization and/or atomization device. Such formulations may further comprise one or more additional ingredients including, but not limited to, a flavoring agent such as saccharin sodium, a volatile oil, a buffering agent, a surface active agent, and/or a preservative such as methylhydroxybenzoate. Droplets provided by this route of administration may have an average diameter in the range from about 0.1 nm to about 200 nm. Formulations described herein useful for pulmonary delivery may also be useful for intranasal delivery. In some embodiments, formulations for intranasal administration comprise a coarse powder comprising the active ingredient and having an average particle size from about 0.2 μm to 500 μm. Such formulations are administered in the manner in which snuff is taken, e.g. by rapid inhalation through the nasal passage from a container of the powder held close to the nose.

[0226] Formulations suitable for nasal administration may, for example, comprise from about as little as 0.1% (w/w) and as much as 100% (w/w) of active ingredient, and may comprise one or more of the additional ingredients described herein. A pharmaceutical composition may be prepared, packaged, and/or sold in a formulation suitable for buccal administration. Such formulations may, for example, be in the form of tablets and/or lozenges made using conventional methods, and may, for example, comprise 0.1% to 20% (w/w) active ingredient, the balance comprising an orally dissolvable and/or degradable composition and, optionally, one or more of the additional ingredients described herein. Alternately, formulations suitable for buccal administration may comprise powders and/or an aerosolized and/or atomized solutions and/or suspensions comprising active ingredients. Such powdered, aerosolized, and/or aerosolized formulations, when dispersed, may comprise average particle and/or droplet sizes in the range of from about 0.1 nm to about 200 nm, and may further comprise one or more of any additional ingredients described herein.

[0227] Suitable dose and dosage administrated to a subject is determined by factors including, but not limited to, the particular therapeutic rAAV composition, disease condition and its severity, the identity (e.g., weight, sex, age) of the subject in need of treatment, and can be determined according to the particular circumstances surrounding the case, including, e.g., the specific agent being administered, the route of administration, the condition being treated, and the subject or host being treated.

[0228] The amount of AAV compositions and time of administration of such compositions will be within the purview of the skilled artisan having benefit of the present teachings. It is likely, however, that the administration of therapeutically-effective amounts of the disclosed compositions may be achieved by a single administration, such as for example, a single injection of sufficient numbers of infectious particles to provide therapeutic benefit to the patient undergoing such treatment. This is made possible, at least in part, by the fact that certain target cells (e.g., neurons) do not divide, obviating the need for multiple or chronic dosing.

[0229] Alternatively, in some circumstances, it may be desirable to provide multiple, or successive administrations of the AAV vector compositions, either over a relatively short, or a relatively prolonged period of time, as may be determined by the medical practitioner overseeing the administration of such compositions. For example, the number of infectious particles administered to a mammal may be on the order of about 10⁷, 10⁸, 10⁹, 10¹⁰, 10¹¹, 10¹², 10¹³, or even higher, infectious particles/ml given either as a single dose, or divided into two or more administrations as may be required to achieve therapy of the particular disease or disorder being treated. In fact, in certain embodiments, it may be desirable to administer two or more different AAV vector compositions, either alone, or in combination with one or more other therapeutic drugs to achieve the desired effects of a particular therapy regimen. In various embodiments, the daily and unit dosages are altered depending on a number of variables including, but not limited to, the activity of the therapeutic rAAV composition used, the disease or condition to be treated, the mode of administration, the requirements of the individual subject, the severity of the disease or condition being treated, and the judgment of the practitioner.

[0230] In some embodiments, the administration of the therapeutic rAAV composition is hourly, once every 2 hours, 3 hours, 4 hours, 5 hours, 6 hours, 7 hours, 8 hours, 9 hours, 10 hours, 11 hours, 12 hours, 13 hours, 14 hours, 15 hours, 16 hours, 17 hours, 18 hours, 19 hours, 20 hours, 21 hours 22 hours, 23 hours, 1 day, 2 days, 3 days, 4 days, 5 days, 6 days, 7 days, 8 days, 9 days, 10 days, 11 days, 12 days, 13 days, 14 days, 15 days, 1 month, 2 months, 3 months, 4 months, 5 months, 6 months, 7 months, 8 months, 9 months, 10 months, 11 months, 1 year, 2 years, 3 years, 4 years, 5 years, or 10 years. The effective dosage ranges may be adjusted based on subject's response to the treatment. Some routes of administration will require higher concentrations of effective amount of therapeutics than other routes.

[0231] Although not anticipated given the advantages of the present disclosure, in certain embodiments wherein the patient's condition does not improve, upon the doctor's discretion the administration of therapeutic rAAV composition is administered chronically, that is, for an extended period of time, including throughout the duration of the patient's life in order to ameliorate or otherwise control or limit the symptoms of the patient's disease or condition. In certain embodiments wherein a patient's status does improve, the dose of therapeutic rAAV composition being administered may be temporarily reduced or temporarily suspended for a certain length of time (i.e., a “drug holiday”). In specific embodiments, the length of the drug holiday is between 2 days and 1 year, including by way of example only, 2 days, 3 days, 4 days, 5 days, 6 days, 7 days, 10 days, 12 days, 15 days, 20 days, 28 days, or more than 28 days. The dose reduction during a drug holiday is, by way of example only, by 10%-100%, including by way of example only 10%, 15%, 20%, 25%, 30%, 35%, 40%, 45%, 50%, 55%, 60%, 65%, 70%, 75%, 80%, 85%, 90%, 95%, and 100%. In certain embodiments, the dose of drug being administered may be temporarily reduced or temporarily suspended for a certain length of time (i.e., a “drug diversion”). In specific embodiments, the length of the drug diversion is between 2 days and 1 year, including by way of example only, 2 days, 3 days, 4 days, 5 days, 6 days, 7 days, 10 days, 12 days, 15 days, 20 days, 28 days, or more than 28 days. The dose reduction during a drug diversion is, by way of example only, by 10° %-100%, including by way of example only 10%, 15%, 20%, 25%, 30%, 35%, 40%, 45%, 50%, 55%, 60%, 65%, 70%, 75%, 80%, 85%, 90%, 95%, and 100%. After a suitable length of time, the normal dosing schedule is optionally reinstated.

[0232] In some embodiments, once improvement of the patient's conditions has occurred, a maintenance dose is administered if necessary. Subsequently, in specific embodiments, the dosage or the frequency of administration, or both, is reduced, as a function of the symptoms, to a level at which the improved disease, disorder or condition is retained. In certain embodiments, however, the patient requires intermittent treatment on a long-term basis upon any recurrence of symptoms.

[0233] Toxicity and therapeutic efficacy of such therapeutic regimens are determined by standard pharmaceutical procedures in cell cultures or experimental animals, including, but not limited to, the determination of the LD50 and the ED50. The dose ratio between the toxic and therapeutic effects is the therapeutic index and it is expressed as the ratio between LD50 and ED50. In certain embodiments, the data obtained from cell culture assays and animal studies are used in formulating the therapeutically effective daily dosage range and/or the therapeutically effective unit dosage amount for use in mammals, including humans. In some embodiments, the dosage amount of the therapeutic rAAV composition described herein lies within a range of circulating concentrations that include the ED50 with minimal toxicity. In certain embodiments, the daily dosage range and/or the unit dosage amount varies within this range depending upon the dosage form employed and the route of administration utilized.

### Kits

[0234] Disclosed herein are kits comprising compositions disclosed herein. Also disclosed herein are kits for the treatment or prevention of a disease or conditions of the central nervous system (CNS), peripheral nervous system (PNS), or target organ or environment (e.g., lung, heart, liver). In some instances, the disease or condition is cancer, a pathogen infection, pulmonary disease or condition, neurological disease, muscular disease, or an immune disorder, such as those described herein. In one embodiment, a kit can include a therapeutic or prophylactic composition containing an effective amount of a composition of a rAAV particle encapsidating a heterologous nucleic acid comprising a therapeutic nucleic acid (e.g., therapeutic nucleic acid) and a recombinant AAV (rAAV) capsid protein of the present disclosure. In another embodiment, a kit can include a therapeutic or prophylactic composition containing an effective amount of cells modified by the rAAV described herein (“modified cell”), in unit dosage form that express therapeutic nucleic acid. In some embodiments, a kit comprises a sterile container which can contain a therapeutic composition; such containers can be boxes, ampules, bottles, vials, tubes, bags, pouches, blister-packs, or other suitable container forms known in the art. Such containers can be made of plastic, glass, laminated paper, metal foil, or other materials suitable for holding medicaments.

[0235] In some cases, rAAV are provided together with instructions for administering the rAAV to a subject having or at risk of developing the disease or condition (e.g., disease of the CNS, PNS, liver, and the like). Instructions can generally include information about the use of the composition for the treatment or prevention of the disease or condition.

[0236] In some cases, a kit can include allogenic cells. In some cases, a kit can include cells that can comprise a genomic modification. In some cases, a kit can comprise “off-the-shelf” cells. In some cases, a kit can include cells that can be expanded for clinical use. In some cases, a kit can contain contents for a research purpose.

[0237] In some cases, the instructions include at least one of the following: description of the therapeutic rAAV composition; dosage schedule and administration for treatment or prevention of the disease or condition disclosed herein; precautions; warnings; indications; counter-indications; overdosage information; adverse reactions; animal pharmacology; clinical studies; and/or references. The instructions can be printed directly on the container (when present), or as a label applied to the container, or as a separate sheet, pamphlet, card, or folder supplied in or with the container. In some cases, instructions provide procedures for administering the rAAV to the subject alone. In some cases, instructions provide procedures for administering the rAAV to the subject at least about 1 hour (hr), 2 hr, 3 hr, 4 hr, 5 hr, 6 hr, 7 hr, 8 hr, 9 hr, 10 hr, 11 hr, 12 hr, 13 hr, 14 hr, 15 hr, 16 hr, 17 hr, 18 hr, 19 hr, 20 hr, 21 hr, 22 hr, 23 hr, 24 hr, 25 hr, 26 hr, 27 hr, 28 hr, 29 hr, 30 hr, or up to 2 days, 3 days, 4 days, 5 days, 6 days, or 7 days after or before administering an additional therapeutic agent disclosed herein. In some instances, the instructions provide that the rAAV is formulated for intravenous injection. In some instances, the instructions provide that the rAAV is formulated for intranasal administration.

### Definitions

[0238] The terminology used herein is for the purpose of describing particular cases only and is not intended to be limiting. As used herein, the singular forms “a”, “an” and “the” are intended to include the plural forms as well, unless the context clearly indicates otherwise. Furthermore, to the extent that the terms “including”, “includes”, “having”. “has”, “with”, or variants thereof are used in either the detailed description and/or the claims, such terms are intended to be inclusive in a manner similar to the term “comprising.”

[0239] The term “about” or “approximately” means within an acceptable error range for the particular value as determined by one of ordinary skill in the art, which will depend in part on how the value is measured or determined, e.g., the limitations of the measurement system. For example, “about” can mean within 1 or more than 1 standard deviation, per the practice in the given value. Where particular values are described in the application and claims, unless otherwise stated the term “about” should be assumed to mean an acceptable error range for the particular value.

[0240] As used herein “consisting essentially of” when used to define compositions and methods, shall mean excluding other elements of any essential significance to the combination for the stated purpose. Thus, a composition consisting essentially of the elements as defined herein would not exclude other materials or steps that do not materially affect the basic and novel characteristic(s) of the claimed disclosure, such as compositions for treating skin disorders like acne, eczema, psoriasis, and rosacea.

[0241] The terms “homologous,” “homology.” or “percent homology” are used herein to generally mean an amino acid sequence or a nucleic acid sequence having the same, or similar sequence to a reference sequence. Percent homology of sequences can be determined using the most recent version of BLAST, as of the filing date of this application.

[0242] The terms “increased,” or “increase” are used herein to generally mean an increase by a statically significant amount. In some embodiments, the terms “increased.” or “increase.” mean an increase of at least 10% as compared to a reference level, for example an increase of at least about 10%, at least about 20%, or at least about 30%, or at least about 40%, or at least about 50%, or at least about 60%, or at least about 70%, or at least about 80%, or at least about 90% or up to and including a 100% increase or any increase between 10-100% as compared to a reference level, standard, or control. Other examples of “increase” include an increase of at least 2-fold, at least 5-fold, at least 10-fold, at least 20-fold, at least 50-fold, at least 100-fold, at least 1000-fold or more as compared to a reference level.

[0243] The terms, “decreased” or “decrease” are used herein generally to mean a decrease by a statistically significant amount. In some embodiments, “decreased” or “decrease” means a reduction by at least 10% as compared to a reference level, for example a decrease by at least about 20%, or at least about 30%, or at least about 40%, or at least about 50%, or at least about 60%, or at least about 70%, or at least about 80%, or at least about 90% or up to and including a 100% decrease (e.g., absent level or non-detectable level as compared to a reference level), or any decrease between 10-100% as compared to a reference level. In the context of a marker or symptom, by these terms is meant a statistically significant decrease in such level. The decrease can be, for example, at least 10%, at least 20%, at least 30%, at least 40% or more, and is preferably down to a level accepted as within the range of normal for an individual without a given disease.

[0244] The terms “subject” is any organism. In some instances, the organism is a mammal. Non-limiting examples of mammal include, any member of the mammalian class: humans, non-human primates such as chimpanzees, and other apes and monkey species; farm animals such as cattle, horses, sheep, goats, swine; domestic animals such as rabbits, dogs, and cats; laboratory animals including rodents, such as rats, mice and guinea pigs, and the like. In one aspect, the mammal is a human. The term “animal” as used herein comprises human beings and non-human animals. In one embodiment, a “non-human animal” is a mammal, for example a rodent such as rat or a mouse. In some instances, the subject is a patient, which as used herein, may refer to a subject diagnosed with a particular disease or disorder.

[0245] The term “gene,” as used herein, refers to a segment of nucleic acid that encodes an individual protein or RNA (also referred to as a “coding sequence” or “coding region”), optionally together with associated regulatory region such as promoter, operator, terminator and the like, which may be located upstream or downstream of the coding sequence.

[0246] The term “adeno-associated virus,” or “AAV” as used herein refers to the adeno-associated virus or derivatives thereof. Non-limited examples of AAV's include AAV type 1 (AAV1), AAV type 2 (AAV2), AAV type 3 (AAV3), AAV type 4 (AAV4), AAV type 5 (AAV5), AAV type 6 (AAV6), AAV type 7 (AAV7), AAV type 8 (AAV8), AAV type 9 (AAV9), AAV type 10 (AAV10), AAV type 11 (AAV11), AAV type 12 (AAV12), avian AAV, bovine AAV, canine AAV, equine AAV, primate AAV, non-primate AAV, and ovine AAV. In some instances, the AAV is described as a “Primate AAV,” which refers to AAV that infect primates. Likewise an AAV may infect bovine animals (e.g., “bovine AAV”, and the like). In some instances, the AAV is wildtype, or naturally occurring. In some instances the AAV is recombinant.

[0247] The term “AAV capsid” as used herein refers to a capsid protein or peptide of an adeno-associated virus. In some instances, the AAV capsid protein is configured to encapsidate genetic information (e.g., a transgene, therapeutic nucleic acid, viral genome). In some instances, the AAV capsid of the instant disclosure is a variant AAV capsid, which means in some instances that it is a parental AAV capsid that has been modified in an amino acid sequence of the parental AAV capsid protein.

[0248] The term “tropism” as used herein refers to a quality or characteristic of the AAV capsid that may include specificity for, and/or an increase or a decrease in efficiency of, expressing the encapsidated genetic information into one in in vivo environment, relative to a second in vivo environment. An in vivo environment, in some instances, is a cell-type. An in vivo environment, in some instances, is a tissue, organ, or organ system.

[0249] The term “AAV genome” as used herein refers to nucleic acid polynucleotide encoding genetic information related to the virus. The genome, in some instances, comprises a nucleic acid sequence flanked by AAV inverted terminal repeat (ITR) sequences. The AAV genome may be a recombinant AAV genome generated using recombinatorial genetics methods, and which can include a heterologous nucleic acid (e.g., transgene) that is flanked by the ITR sequences.

[0250] The term “AAV particle” or an “AAV vector” as used interchangeably herein refers to an AAV virus or virion comprising an AAV capsid within which is packaged a heterologous DNA polynucleotide, or “genome”, comprising nucleic acid sequence flanked by AAV inverted terminal repeat (ITR) sequences. In some cases, the AAV particle is modified relative to a parental AAV particle.

[0251] The term “gene product” of “gene expression product” refers to an expression product of a polynucleotide sequence such as, for e.g., a polypeptide, peptide, protein or RNA, including but not limited to interfering RNA (e.g., siRNA, miRNA, shRNA) and messenger RNA (mRNA).

[0252] The terms “operatively linked” or “operably linked” refers to a location of two or more elements in cis with one another, and in some cases, next to one other (e.g., genetic elements such as a promoter, enhancer, termination signal sequence, polyadenylation sequence, and the like) that enables a functional relationship between the two or more elements. In one non-limiting example, a promoter that is operatively linked to a coding region enables the initiation of transcription of the coding sequence.

[0253] The term “heterologous” as used herein refers to a genetic element (e.g., coding region) or gene expression product (e.g., RNA, protein) that is derived from a genotypically distinct entity from that of the rest of the entity to which it is being compared.

[0254] The term “endogenous” as used herein refers to a genetic element (e.g., coding region) or gene expression product (e.g., RNA, protein) that is naturally occurring in or associated with an organism or a particular cell within the organism.

[0255] A “detectable moiety” as used herein refers to a moiety that can be covalently or noncovalently attached to a compound or biomolecule that can be detected for instance, using techniques known in the art. In embodiments, the detectable moiety is covalently attached. The detectable moiety may provide for imaging of the attached compound or biomolecule. The detectable moiety may indicate the contacting between two compounds. Exemplary detectable moieties are fluorophores, antibodies, reactive dies, radio-labeled moieties, magnetic contrast agents, and quantum dots. Exemplary fluorophores include fluorescein, rhodamine, GFP, coumarin, FITC, Alexa fluor, Cy3, Cy5, BODIPY, and cyanine dyes. Exemplary radionuclides include Fluorine-18, Gallium-68, and Copper-64. Exemplary magnetic contrast agents include gadolinium, iron oxide and iron platinum, and manganese.

[0256] The terms “treat,” “treating,” and “treatment” as used herein refers to alleviating or abrogating a disorder, disease, or condition; or one or more of the symptoms associated with the disorder, disease, or condition; or alleviating or eradicating a cause of the disorder, disease, or condition itself. Desirable effects of treatment can include, but are not limited to, preventing occurrence or recurrence of disease, alleviation of symptoms, diminishing any direct or indirect pathological consequences of the disease, preventing metastasis, decreasing the rate of disease progression, amelioration or palliation of the disease state and remission or improved prognosis.

[0257] The term “therapeutically effective amount” refers to the amount of a compound or therapy that, when administered, is sufficient to prevent development of, or alleviate to some extent, one or more of the symptoms of a disorder, disease, or condition of the disease; or the amount of a compound that is sufficient to elicit biological or medical response of a cell, tissue, system, animal, or human that is being sought by a researcher, veterinarian, medical doctor, or clinician.

[0258] The term “pharmaceutically acceptable carrier,” “pharmaceutically acceptable excipient,” “physiologically acceptable carrier,” or “physiologically acceptable excipient” refers to a pharmaceutically acceptable material, composition, or vehicle, such as a liquid or solid filler, diluent, excipient, solvent, or encapsulating material. A component can be “pharmaceutically acceptable” in the sense of being compatible with the other ingredients of a pharmaceutical formulation. It can also be suitable for use in contact with the tissue or organ of humans and animals without excessive toxicity, irritation, allergic response, immunogenicity, or other problems or complications, commensurate with a reasonable benefit/risk ratio. See, Remington: The Science and Practice of Pharmacy, 21st Edition; Lippincott Williams & Wilkins: Philadelphia, PA, 2005; Handbook of Pharmaceutical Excipients, 5th Edition; Rowe et al., Eds., The Pharmaceutical Press and the American Pharmaceutical Association: 2005; and Handbook of Pharmaceutical Additives, 3rd Edition; Ash and Ash Eds., Gower Publishing Company: 2007; Pharmaceutical Preformulation and Formulation, Gibson Ed., CRC Press LLC: Boca Raton, FL, 2004).

[0259] The term “pharmaceutical composition” refers to a mixture of a compound disclosed herein with other chemical components, such as diluents or carriers. The pharmaceutical composition can facilitate administration of the compound to an organism. Multiple techniques of administering a compound exist in the art including, but not limited to, oral, injection, aerosol, parenteral, and topical administration.

[0260] Non-limiting examples of “sample” include any material from which nucleic acids and/or proteins can be obtained. As non-limiting examples, this includes whole blood, peripheral blood, plasma, serum, saliva, mucus, urine, semen, lymph, fecal extract, cheek swab, cells or other bodily fluid or tissue, including but not limited to tissue obtained through surgical biopsy or surgical resection. In some embodiments, the sample is obtained directly from the patient. Alternatively, a sample can be obtained through primary patient derived cell lines, or archived patient samples in the form of preserved samples, or fresh frozen samples.

### EXAMPLES

### Example 1. Method of Producing an rAAV

[0261] A recombinant AAV (rAAV) is produced. Three plasmid vectors are triple-transfected into immortalized HEK293 cells using a standard transfection protocol (e.g., with PEI). The first vector contains a transgene cassette flanked by inverted terminal repeat (ITR) sequences from a parental AAV virus. The transgene cassette has a promoter sequence and that drives transcription of a heterologous nucleic acid in the nucleus of the target cell. The second vector contains nucleic acids encoding the AAV Rep gene, as well as a modified Cap gene e.g., AAV2/9 REP-AAP-ΔCap). The modified Cap gene comprises any one of SEQ ID NOS: 12740-25468,35472-45474, and 46364-46383, which are the DNA sequences encoding the modified AAV capsid proteins of the present disclosure. The modified Cap gene, in some cases, comprises any one of SEQ ID NOS: 46404-46423, which are the DNA sequences encoding the full-length VP1 protein with the 7-mer substitute at amino acid positions 452-458. The third vector contains nucleic acids encoding helper virus proteins needed for viral assembly, and packaging of the heterologous nucleic acid into the modified capsid structure.

[0262] Viral particles are harvested from the media after 72 h post transfection and from the cells and media at 120 h post transfection. Virus present in the media is concentrated by precipitation with 8% poly(ethylene glycol) and 500 mM sodium chloride and the precipitated virus is added to the lysates prepared from the collected cells. The viruses are purified over iodixanol (Optiprep, Sigma) step gradients (15%, 25%, 40% and 60%). Viruses are concentrated and formulated in PBS. Virus titers are determined by measuring the number of DNaseI-resistant vector genome copies (VGs) using qPCR and the linearized genome plasmid as a control.

### Example 2. Method of Identifying the Modified Capsid Proteins

### Plasmids.

[0263] First round viral DNA library was generated by amplification of a section of the AAV9-PHP.eB capsid genome between amino acids 450-599 using NNK degenerate primers (Integrated DNA Technologies, Inc., IDT) to substitute amino acids 452-458 with all possible variations. The resulting library inserts were then introduced into the rAAV-ΔCap-in-cis-Lox plasmid via Gibson assembly as previously described. The resulting capsid DNA library, rAAV-Cap-in-cis-Lox, contained a diversity of
[0264] 1.28 billion variants at the amino acid level. Second round viral DNA library was generated similarly to the first round, but instead of NNK degenerate primers at the 452-458 location, a synthesized oligo pool (Twist Bioscience) was used to only generate selected variants. This second round DNA library contained a diversity of ˜82,000 variants at the amino acid level.

[0265] The AAV2/9 REP-AAP-ΔCap plasmid transfected into HEK293T cells for library viral production was modified from the AAV2/9 REP-AAP plasmid previously used by deletion of the amino acids between 450-592. This modification prevents production of an AAV9 capsid during viral library production after a plausible recombination event between this plasmid co-transfected with rAAV-ΔCap-in-cis-Lox containing the library inserts.

[0266] Two rAAV genomes were used in this study. The first, pAAV-CAG-mNeonGreen, utilizes a single-stranded (ss) rAAV genome containing the fluorescent protein mNeonGreen under control of the ubiquitous CMV-β-Actin-intron-β-Globin hybrid promoter (CAG). The second, pAAV-CAG-NLS-GFP (Addgene #104061), utilizes a ssAAV genome containing the fluorescent protein EGFP flanked by two nuclear localization sites, PKKKRKV (SEQ ID NO: 45486), under control of the CAG promoter.

### Viral Production

[0267] Recombinant AAVs were described in Challis, R. C. et al. Systemic AAV vectors for widespread and targeted gene delivery in rodents. Nat. Protoc. 14, 379 (2019). Briefly, triple transfection of HEK293T cells (ATCC) using polyethylenimine (PEI) was performed, virus was collected after 120 hours from both cell lysates and media and purified over iodixanol (Optiprep. Sigma).

[0268] A modified protocol was used for transfection and purification of viral libraries. First, to prevent mosaic capsid formation, only 10 ng of rAAV-Cap-in-cis-Lox library DNA was transfected (per 150 mm plate) to decrease the likelihood of multiple library DNAs entering the same cell. Second, virus was collected after 60 hours, instead of 120, to limit secondary transduction of producer cells. Finally, instead of PEG precipitation of the viral particles from the media, as performed in the standard protocol, media was concentrated >60-fold for loading onto iodixanol. This step was performed to prevent aggregation and loss of viral diversity, something that was noticed during PEG precipitation.

### Animals

[0269] All rodent procedures were approved by the Institutional Animal Use and Care Committee (IACUC) of the California Institute of Technology. Transgenic animals, expressing Cre under control of various cell-type specific promoters, as well as C57Bl/6J WT mice (000664) were purchased from the Jackson Laboratory (JAX). Transgenic mice included Syn1-Cre (3966). GFAP-Cre (012886) and Tek-Cre (8863). For round 1 and round 2 selections of viral library, one male and one female mouse, 8-12 weeks of age, of each transgenic line were used, as well as a single male C57Bl/6J. For validation of individual viral variants, male C57Bl/6J mice were used, aged 6-8 weeks. Intravenous administration of rAAV vectors was performed via injection into the retro-orbital sinus.

### Viral Library Recovery and Sequencing

[0270] Round 1 and round 2 viral libraries were injected into C57Bl/6J and Cre-transgenic animals at a dose of 8×10¹¹ vg/animal and rAAV genomes were recovered two weeks post injection. Mice were euthanized, and most major organs were recovered, snap frozen on dry ice and placed into long-term storage at −80° C. Tissues included: brain, spinal cord, DRGs, liver, lungs, heart, stomach, intestines, kidneys, spleen, pancreas, skeletal muscle and adipose tissue. 100 mg of each tissue (˜250 mg for brain hemisphere, <100 mg for DRGs) was homogenized in Trizol (Life Technologies, 15596) using a BeadBug (Benchmark Scientific, D1036) and viral DNA isolated according to the manufacturer's recommended protocol. Recovered viral DNA was treated with RNase, underwent restriction digestion with SmaI (found within the ITRs) to improve later rAAV genome recovery by PCR, and purified with a Zymo DNA Clean and Concentrator kit (D4033). Viral genomes flipped by Cre-recombinase in select transgenic lines (or pre-flipped in WT animals) were selectively recovered using the following primers: 5-CTTCCAGTTCAGCTACGAGTITGAGAAC-3′(SEQ ID NO: 45487) and 5-CAAGTAAAACCTCTACAAATGTGGTAAAATCG-3′ (SEQ ID NO: 45488), after 25 cycles of 98° C. for 10 s, 60° C. for 15 s and 72° C. for 40 s, using Q5 DNA polymerase in five 25 μl reactions with 50% of the total extracted viral DNA as a template.

[0271] After Zymo DNA purification, samples from the WT C57Bl/6J animals were serially diluted between 1:10-1:10,000 and each dilution further amplified around the library variable region. This amplification was done using primers: 5′-ACGCTCTTCCGATCTAATACTTGTACTATCTCTCTAGAACTATT-3′ (SEQ ID NO: 45489) and 5′-TGTGCTCTTCCGATCTCACACTGAATITrAGCGTTTG-3′ (SEQ ID NO: 45490) and 10 cycles of 98° C. for 10 s, 61° C. for 15 s and 72° C. for 20 s, to recover 73 bp of viral genome around and including the 21 bp variable region and add adapters for Illumina next-generation sequencing. After PCR cleanup, these products were further amplified using NEBNext Dual Index Primers for Illumina sequencing (New England Biolabs, E7600), after 10 cycles of 98° C. for 10 s, 60° C. for 15 s and 72° C. for 20 s. The amplification products were run on a 2% low-melting-point agarose gel (ThermoFisher Scientific, 162050) for better separation and recovery of the 210 bp band. The dilution series was analyzed for each WT tissue and the highest concentration dilution which resulted in no product was chosen for further amplification of the viral DNA from the transgenic animal tissues. This process was performed to differentiate between viral genomes flipped prior to packaging or due to Cre in the animal. Pre-flipped viral genomes should be avoided to minimize false-positives in the NGS sequencing results.

[0272] Using the dilutions resulting in a product that doesn't contain pre-flipped viral genomes, all Cre-flipped viral genomes from transgenic animal tissues were similarly amplified to add Illumina sequencing adapters and subsequently for index labeling. The amplified products now containing unique indices for each tissue from each animal were run on a low-melting-point agarose gel and the correct bands extracted and purified with a Zymoclean Gel DNA Recovery kit.

[0273] Packaged viral library DNA was isolated from the injected viral library by digestion of the viral capsid and purification of the contained ssDNA. These viral genomes were amplified by two PCR amplification steps, like the viral DNA extracted from tissue, to add Illumina adapters and then indices and extracted and purified after gel electrophoresis. This viral library DNA, along with the viral DNA extracted from tissue was sent for deep sequencing using an Illumina HiSeq 2500 System (Millard and Muriel Jacobs Genetics and Genomics Laboratory, Caltech).

### NGS Data Alignment and Processing

[0274] Raw fastq files from NGS runs were processed with custom built that align the data to an AAV9 template DNA fragment containing the 21 bp diversified region between AA 452-458. The pipeline to process these datasets involved filtering to remove low-quality reads, utilizing a quality score for each sequence and eliminating bias from PCR-induced mutations or high GC-content. The filtered dataset was then aligned by perfect string match algorithm and trimmed to improve the alignment quality. Read counts for each sequence were then pulled out and displayed along with their enrichment score, defined as the relative abundance of the sequence found within the specific tissue over the relative abundance of that sequence within the injected viral library.

[0275] Enrichment quantification. Enrichment for a specific variant in a target tissue was calculated in reference to the entire library within that tissue and was defined as the prevalence of the variant within the target tissue normalized to the prevalence in the variant within the injected viral library.

$$Enrichment ( Var 1 ) = log \frac{probability of Var 1 in tissue}{probability of Var 1 in injected library}$$

A positive enrichment score is achieved if the AAV variant is found more prevalently in the tissue than in the injected viral library and a negative one is achieved if the AAV variant is found less prevalently. An enrichment score of 0 means that either the variant was found in exactly the same prevalence in tissue and injected viral library, or that there were no read counts of the specific variant in the target tissue, i.e. the variant could not be detected in the tissue. As the former is unlikely, an enrichment score of 0 is interpreted to meant that the variant is not present in the tissue. Thus, an AAV variant was determined to de-target a tissue if its enrichment score in that tissue was less than or equal to 0. In vivo characterization of liver transduction from a number of AAV variants having an enrichment score of 0 relative to their parental AAV vector AAV9 verified that this interpretation was accurate (see, e.g., FIG. 17D, E).

### Tissue Preparation and Immunohistochemistry

[0276] Mice were euthanized with Euthasol and transcardially perfused with ice-cold 1×PBS and then freshly prepared, ice-cold 4% paraformaldehyde (PFA) in 1×PBS. All organs were excised and post-fixed in 4% PFA at 4V for 48 hours and then sectioned by vibratome. IHC was performed on floating sections with primary and secondary antibodies in PBS containing 10° donkey serum and 0.1% Triton X-100. Primary antibodies used were rabbit anti-NeuN (1:200, Abcam, 177487), rabbit anti-S100 (1:200, Abcam, 868), rabbit anti-Olig2(1:200, Abcam, 109186) and rabbit anti-Calbindin (1:200. Abcam, 25085). Primary antibody incubations were performed for 16-20 hours at room temperature (RT). The sections were then washed and incubated with secondary Alexa-647 conjugated anti-rabbit FAB fragment antibody (1:200, Jackson ImmunoResearch Laboratories, Inc., 711-607-003) for 6-8 hours at RT. For nuclear staining, floating sections were incubated in PBS containing 0.2% Triton X-100 and DAPI (1:1000, Sigma Aldrich, 10236276001) for 6-8 hours and then washed. Stained sections were then mounted with ProLong Diamond Antifade Mountant (ThermoFisher Scientific, P36970).

### Imaging and Quantification

[0277] All CAG-mNeonGreen expressing tissues were imaged on a Zeiss LSM 880 confocal microscope using a Fluar 5×0.25 M27 objective, with matched laser powers, gains and gamma across all samples of the same tissue. The acquired images were processed in Zen Black 2.3 SP1 (Zeiss).

[0278] All CAG-NLS-GFP expressing tissues were imaged on a Keyence BZ-X all-in-one fluorescence microscope at 48-bit resolution with the following objectives: PlanApo-λ 20×/0/75 (1 mm working distance) or PlanApo-λ 10×/0.45 (4 mm working distance). For colocalization of GFP expression to antibody staining, in some cases the exposure time for the green (GFP) channel was adjusted to facilitate imaging of high and low expressing cells while avoiding oversaturation. In all cases in which fluorescent intensity was compared between samples, exposure settings and changes to gamma or contrast were maintained across images. To minimize bias, multiple fields of view per brain region and peripheral organ were acquired for each sample. For brain regions, the fields of view were matched between samples and chosen based upon the antibody staining rather than GFP signal. For peripheral tissues, fields of view were chosen based upon the DAPI or antibody staining to preclude observer bias.

[0279] All image processing was performed with the Keyence BZ-X Analyzer. Data analysis was performed with Microsoft Excel 2018 and GraphPad Prism 7. Colocalization between GFP signal and antibody or DAPI staining was performed using the Keyence BZ-X Analyzer with the hybrid cell count automated plugin. Automated counts were validated and routinely monitored by comparison to manual hand-counts and found to be below the margin of error for manual counts.

[0280] To compare total cell counts and fluorescent intensity throughout the brain between samples, an entire sagittal section located 1200 μM from midline was imaged using matched exposure conditions with the Keyence BZ-X automated XY stitching module. Stitched images were then deconstructed in the Keyence BZ-X Analyzer suite and run through the hybrid cell count automated plugin to count the total number of cells in the entire sagittal section. Average fluorescent intensity was calculated by creating a mask of all GFP positive cells throughout the sagittal section and measuring the integrated pixel intensity of that mask. The total integrated pixel intensity was divided by the total cell count to obtain the fluorescent intensity per cell measure. In all cases where direct comparisons were made of fluorescent intensity, exposure settings and postprocessing contrast adjustments were matched between samples.

### Statistics

[0281] Microsoft Excel 2018 and GraphPad Prism 7 were used for statistical analysis and data representation. Unless otherwise noted, all experimental groups were n=6 and determined using preliminary data and experimental power analysis. For the statistical analysis and their graphs, a single data point was defined as two tissue sections per animal with multiple technical replicates per section when possible. Technical replicates are defined as multiple fields of view per section, with the following numbers for each region or tissue of interest: cerebellum=3, cortex=4, hippocampus=3, midbrain=1, striatum=3, thalamus=4, liver=4, spleen=2, testi=2, kidney=2, lung=2, spine=1, DRG=1, whole sagittal=1.

### Example 2. Overview of Cre-Dependent Positive and Negative Selection of Viral Libraries

[0282] For the express purpose of engineering AAVs with high efficiency toward specific organs and away from others after systemic administration, an updated version of the CREATE screening method (M-CREATE) was used, which allowed for the selection of large libraries of viral variants in vivo. FIG. 1 shows a schematic of the M-CREATE methods used. With CREATE, a library of AAV capsids with mutations at a specific location was generated by PCR with degenerate primers, viruses packaging a replication-incompetent version of their own genome with a polyadenylation site flanked by Cre/Lox sites are produced in HEK293 cells, and the viral library is injected into transgenic animals expressing Cre in a specific population of cells. If variants of the library successfully transduce cells expressing Cre, their genome is flipped and the sequence of those variants can be recovered in a Cre-dependent manner.

[0283] Selection of variants in multiple transgenic mouse lines expressing Cre in different cell populations: Tek-Cre for endothelial cells throughout the body, hSyn1-Cre for neurons of the CNS and PNS, and GFAP-Cre for astrocytes, was performed. By performing selections in parallel in multiple transgenic lines, both positive and negative selection can be applied thereby recovering target sequences from a specific tissue of interest, that were not recovered from others. Next, the recovered viral DNA from the tissues of interest were sequenced and indexed. The sequences were then ranked based on prevalence in target environment or cell-type of interest. A second-round library was synthesized containing only the top-performing sequences from round 1.

[0284] The AA455 loop of AAV9 is the furthest protruding from the surface of the capsid and has previously been implicated in neutralizing antibody binding. The most commonly manipulated loop in AAVs is the AA588 loop, due to it being the site of heparan sulfate binding of AAV2 and amenable to peptide display. The only known receptor for AAV9 is N-linked terminal galactose, but many indications point toward there being others.

[0285] Without wishing to be bound by any particular theory, the AA455 loop may also play a role in cell-surface receptor binding, either on its own or by interaction with the AA588 loop. To determine whether variant amino acid sequences at the AA455 loop contribute to desired AAV tropisms, rAAVs were engineered and rounds of selection were performed using the M-CREATE method of a 7 amino acid substitution library of the 455 loop, between AA452-458 (FIGS. 1A-1B) in AAV-PHP.eB, a variant of AAV9 previously engineered at the AA588 loop for increased efficiency in crossing the BBB.

### Example 3, AAV Capsid Variants with Tropisms Bias Toward the Lung and Against the Liver in Rodents

### AA.CAP-A4 Exhibits Strong Lung-Specific Transduction

[0286] Highly enriched variants for a number of targets were discovered after two rounds of in vivo selection. The results from the second round of selection for lung enrichment yielded several candidate variants, one of which showed significant enrichment in the lung, with detargeting of several peripheral organs

[0287] A randomly chosen variant (FIG. 15A), as well as a second novel capsid that emerged from this screen that was found to be enriched specifically in gut neurons are provided as a comparison. To directly assess transduction efficiencies, the capsid sequences for the candidate variants were cloned into an AAV9 backbone, and virus was produced for each variant packaging mNeonGreen, a fluorescent reporter, driven by the ubiquitous synthetic promoter CAG. This construct will drive strong expression of the fluorescent promoter in all cell types transduced by the vector, thereby giving a visual readout of the transduction of each variant across cell and tissue types. Following purification, 5×10¹¹ vector genomes (vg) of each variant, including AAV9 as a control, were injected into 2 male c57bl/6 mice. Following two weeks of expression, animals were sacrificed, perfusion fixed, and a panel of organs were sectioned and imaged for fluorescence (FIG. 15B). The expression pattern confirms the next generation sequencing (NGS) results, with AAV.CAP-A4 (KDNTPGR (SEQ ID NO: 32538) encoded by AACAACCTCCCCAGAAACCTC (SEQ ID NO: 46429)) showing increased transduction throughout the lung. As a comparison, AAV.CAP-A14 shows increased expression in neurons within the intestine and stomach, which is in accordance with the NGS results.

[0288] Following confirmation that AAV.CAP-A4 showed increased transduction of the lung, transduction efficiencies of AAV.CAP-A4, along with AAV9 and AAV5 as controls, were quantified across time in clinically relevant cell types following low-dose systemic injection. For these experiments, AAV.CAP-A4, AAV5, and AAV9 were injected into age-matched male mice and allowed to express for 3 weeks (n=3) or 6 months (n=3). In addition, a nuclear localization sequence (NLS) was cloned into a CAG-GFP expression cassette to restrict expression of the fluorescent reporter to the nucleus, aiding in co-localization with specific antibody staining. Following tissue preparation, serialized sections of the lungs from each of the variants were stained with antibodies for ciliated airway epithelial cells, clara cells, and alveolar epithelial type II (ATII) cells (FIG. 16A). Quantification shows that systemically injected AAV.CAP-A4 transduces submucosal cells at ˜15 fold greater efficiency than AAV9, and ˜30 fold greater than AAV5 (FIG. 16B). Similarly, transduction of ATII cells is ˜30 fold greater than AAV9, and
[0289] 60 fold greater than AAV5 (FIG. 16C). Of the total number of cells transduced by AAV.CAP-A4, approximately 60% of them are ATII cells, with the other 40% being of an unknown, submucosal cell type (FIG. 3D). These results demonstrate that AAV.CAP-A4 provides unprecedented, non-invasive genetic access to submucosal cells in the lungs following systemic administration which, alone or in conjunction with delivery direct to the airways, may provide sufficient CFTR functionalization to reduce CF disease progression.

[0290] FIG. 4 shows 7-mer variant AAV capsid amino acid sequences and DNA sequences encoding the 7-mer variant AAV capsid amino acid sequences with a tropism specific to the heart. FIG. 5 shows 7-mer variant AAV capsid amino acid sequences and DNA sequences encoding the 7-mer variant AAV capsid amino acid sequences with a tropism specific to the intestine. FIG. 6 shows 7-mer variant AAV capsid amino acid sequences and DNA sequences encoding the 7-mer variant AAV capsid amino acid sequences with a tropism specific to the kidney. FIG. 7 shows 7-mer variant AAV capsid amino acid sequences and DNA sequences encoding the 7-mer variant AAV capsid amino acid sequences with a tropism specific to the liver. FIG. 8 shows 7-mer variant AAV capsid amino acid sequences and DNA sequences encoding the 7-mer variant AAV capsid amino acid sequences with a tropism specific to muscle. FIG. 9 shows 7-mer variant AAV capsid amino acid sequences and DNA sequences encoding the 7-mer variant AAV capsid amino acid sequences with a tropism specific to the pancreas. FIG. 10 shows 7-mer variant AAV capsid amino acid sequences and DNA sequences encoding the 7-mer variant AAV capsid amino acid sequences with a tropism specific to the spleen. FIG. 11 shows 7-mer variant AAV capsid amino acid sequences and DNA sequences encoding the 7-mer variant AAV capsid amino acid sequences with a tropism specific to the stomach. FIG. 12 shows 7-mer variant AAV capsid amino acid sequences and DNA sequences encoding the 7-mer variant AAV capsid amino acid sequences with a tropism specific to the testicle. FIG. 13 shows 7-mer variant AAV capsid amino acid sequences and DNA sequences encoding the 7-mer variant AAV capsid amino acid sequences with a tropism specific to lung. FIG. 14 shows 7-mer variant AAV capsid amino acid sequences and DNA sequences encoding the 7-mer variant AAV capsid amino acid sequences with a tropism specific to adipose tissue.

### Example 4, AAV Capsid Variants with Tropism Bias Toward Central and Peripheral Nervous System and Against the Liver in Rodents

Engineering AAV-PHP.eB Away from Peripheral Expression

[0291] After the first round of selection, the recovered sequences were analyzed. A second round was synthesized, which contained approximately 82,000 unique variants enriched in the brain compared to peripheral organs. After a second round of selection which narrowed down the top performing variants by a couple orders of magnitude, a small subset of sequences to test were selected (FIG. 4b) that exhibited high levels of enrichment for the brain, and negative enrichment for the liver and other peripheral organs (FIG. 17C). This subset was tested individually in wild-type mice, injecting 5×10¹¹ viral genomes packaging CAG-mNeonGreen and allowing for two weeks of expression. The resulting expression in the brains and livers (FIG. 17D) correlated very closely with the next generation sequencing (NGS) enrichments, with variant AAV.CAP-B10 standing out as exhibiting higher fluorescence in the brain than PHP.eB and negligible liver transduction.

[0292] The above results match NGS enrichment findings for both brain and periphery. In this case, the insertion/substitution at the AA588 loop to make PHP.eB seems to confer a brain phenotype, while the substitutions at AA455 de-target that phenotype from the liver and other peripheral organs. Of the 82.000 variants that comprised the second round of selection, roughly 39.000 exhibited positive enrichment in the brain and negative enrichment in the liver. These results serve as a validation that the NGS results can be used as an accurate proxy of in vivo performance.

[0293] For the ˜39,000 sequences that exhibited brain enrichment and liver de-targeting, the amino acid makeup was analyzed that resulted in this phenotype. The frequency at which amino acids were selected throughout the 7-mer substitution were analyzed and plotted their deviation from the mean as a heat map of enriched amino-acids at specific positions. These positively enriched amino acids de-target the capsid from the liver, while retaining CNS enrichment.

### AAV.CAP-B10 Exhibits CNS-Specific Transduction

[0294] To fully characterize the performance of AAV.CAP-B10 in comparison with AAV9 and PHP.eB, nuclear localized CAG-EGFP were packaged and injected 1×10¹¹ viral genomes into animals. Expression was measured after three weeks. This dose was chosen as an average dose for previous experiments utilizing systemic delivery to the brain. The results show an increase in the average number of cells transduced in the brain, as well as the average level of expression per cell, between AAV.CAP-B10 and PHP.eB, while both are very significantly higher than AAV9 (FIG. 18A-5C). In the spinal cord, AAV.CAP-B10 performs at roughly 60% of the efficiency of PHP.eB, yet still almost 20-fold higher than AAV9. Conversely, AAV.CAP-B10 is very significantly reduced in the liver compared to both PHP.eB (˜50-fold) and AAV9 (>100-fold), and slightly, yet insignificantly, dimmer in brightness/cell compared to PHP.eB, while both are significantly dimmer than AAV9 (˜10-fold) (FIG. 18B-18D). In the rest of the periphery, the results follow the same trend, with PHP.eB being lower than AAV9, and AAV.CAP-B10 being a fraction of PHP.eB (FIG. 18D).

### AAV.CAP-B10 Exhibits Strong Neuronal Bias

[0295] To further characterize what expression within the brain looked like for AAV.CAP-B10 compared to PHP.eB, neurons, astrocytes and oligodendrocytes, were stained and quantified for the efficiency of the viruses at targeting those cell-types in various regions of the brain. While AAV.CAP-B10 and PHP.eB transduced neurons at a similar efficiency across brain regions (FIG. 19A-19B), astrocytes and oligodendrocytes were targeted roughly 4-5-fold lower levels across the whole brain by AAV.CAP-B10 compared to PHP.eB (FIG. 19C, 19D, 19E, 19F). This result indicates a bias for neurons compared to other cell-types conferred by the AAV.CAP-B10 mutations, an interesting deviation from AAV9, which mostly targets astrocytes in the brain. An interesting indication from the NGS data for AAV.CAP-B10 (FIG. 15C) was the variant's negative enrichment in the cerebellum. When characterizing the expression of AAV.CAP-B10 compared to PHP.eB in the cerebellum, there was indeed a significant, roughly 4-fold, decrease in transduction of purkinje cells (FIG. 22).

[0296] FIG. 3 shows 7-mer variant AAV capsid amino acid sequences and DNA sequences encoding the 7-mer variant AAV capsid amino acid sequences with a tropism specific to the central nervous system (CNS), and detargeting the liver. FIG. 2 shows 7-mer variant AAV capsid amino acid sequences and DNA sequences encoding the 7-mer variant AAV capsid amino acid sequences with a tropism specific to the CNS.

### Example 5, AAV Capsid Variants with Tropisms Bias Toward Central and Peripheral Nervous System and Against the Liver in Non-Human Primates

[0297] Of primary concern for the therapeutic applicability of variants engineered in rodents is how well their transduction profiles translate to non-human primates (NHPs). As such, the NHP transduction profiles of a subset of the variants that had been validated in rodents were characterized, along with AAV9 and AAV-PHP.eB as controls. A pool of eight viruses, AAV9, AAV-PHP.eB, AAV.CAP-B1, AAV.CAP-B2, AAV.CAP-B8, AAV.CAP-B10, AAV.CAP-B18 and AAV.CAP-B22, were produced, each packaging an HA tagged frataxin under control of the ubiquitous CAG promoter. The use of frataxin was chosen as it is an endogenous protein expressed throughout the body and previous efforts to characterize NHP transduction of naturally occurring and engineered serotypes has found deleterious results potentially due to the packaging of an exogenous transgene like GFP. Each packaged FXN contained a separate 12-base RNA barcode to differentiate the contribution of one virus from the rest after sequencing. The eight viruses were pooled at equal ratios and injected into two adult marmosets at 1.2×10¹⁴ vg/kg total. Following six weeks of expression, brains and livers were recovered, and coronal sections taken for RNA sequencing and immunohistochemistry.

[0298] AAV.CAP-B10 showed a greater than 6-fold increase in RNA levels in the brain and greater than 5-fold decrease in liver RNA levels compared to AAV9. Another selected variant, AAV.CAP-B22, showed a greater than 12-fold increase in brain RNA levels with no significant difference in liver RNA levels. Without being bound by any particular theory, these results show that AAV.CAP-B22 and AAV.CAP-B10 are promising variant capsids for the treatment of human disease of the brain. Although a select number of variants were tested in the present example, these finds also suggest that other modified AAV capsid proteins described herein with equal to, or greater, enrichment scores as AAV.CAP-B22 and AAV.CAP-B10 in any target in vivo environment, would also provide a promising therapeutic solution for human disease.

### Example 6. Phase 1A Clinical Trial (Huntington's Disease)

[0299] A phase 1A clinical trial is performed to evaluate the safety, tolerability, pharmacokinetics, and pharmacodynamics of an one-time intravenous injection of test composition comprising viral vector including a modified AAV capsid protein with an amino acid sequence provided in any one of SEQ ID NOS: 2933, 88, 2466, 3943, 2672, 2743, 3064, 11958, 780, 2764, and 2741, or any of the amino acid sequences provided in Tables 3-4, or FIGS. 2-3, in subjects with late Huntington's Disease (HD). Eligible subjects are men and women between 21 and 65 years of age.

[0300] Inclusion Criteria: Eligible subjects are men and women between 21 and 65 years of age. Subjects that (1) sign and date International Classification of Functioning, Disability and Health (ICF); (2) male or female participant aged ≥21 and ≤65; (3) participants who submit medical report (PCR) attesting Huntington's disease with a number of CAG repeats on chromosome 4, greater than or equal to 40 and less than or equal to 50 (if the participant has not performed the examination and/or if he does not have the report available, a new exam should be done); (4) Score 5 points or more in motor assessment UHDRS scale (Unified Huntington's Disease Rating Scale) at the time of enrollment; (5) Score between 8 and 11 points in the functional capacity of the UHDRS scale at the time of enrollment.

[0301] Exclusion Criteria: (1) Any medical observation data (clinical and physical) that medical research judge as a risk for subject if enrollment at the study; (2) any laboratory exam data that medical research judge as a risk for subject if enrollment at the study; (3) history of epilepsy; (4) diagnostic of major cognitive impairment; (5) active decompensated psychiatric disease; (6) current or prior history of neoplasia; (7) current history of gastrointestinal, hepatic, renal, endocrine, pulmonary, hematologic, immune, metabolic pathology or severe and uncontrolled cardiovascular disease; (8) diagnostic of any active infection, be it viral, bacterial, fungal, or caused by another pathogen; (9) participants who have contraindication to undergo any of the tests performed in this study, for example, have pacemakers or surgical clip; (10) history of alcohol or illegal drugs abusers; (11) history of 1 or more episodes of suicide in the two years before Visit V-4; (12) active smoker or have stopped smoking less than six months prior to enrollment; (13) test positive in at least one of the serological tests: HIV 1 and 2 (Anti-HIV-1.2), HTLV 1 and 11, HBV (HBsAg, anti-HBc), HCV (anti-HCV-Ab) and VDRL (Treponema pallidum); (14) history of drug allergy, including contrasts for imaging, or bovine products; (15) in use or expected use of immunosuppressive drugs or prohibited medicines for the first three months after the first administration of the investigational product; (16) any clinical changes that is interpreted by the medical researcher as a risk to participant's enrollment.

### EXPERIMENTAL

[0302] Placebo. One-time injection of placebo at Week 0.

[0303] Test High Dose. One-time injection of test composition 2×10\hat{ }10 vg at Week 0.

[0304] Test Middle Dose. One-time injection of test composition 6×10\hat{ }9 vg at Week 0.

[0305] Test Low Dose. One-time injection of test composition 2×10\hat{ }9 vg at Week 0.

[0306] Test Lowest Dose. One-time injection of test composition 2×10\hat{ }8 vg at Week 0.

[0307] Primary Outcome Measures: Safety of the test composition by periodic monitoring changes at adverse events, vital signs, laboratory tests, ECG and incidence of benign and malignant neoplasms [Time Frame: five years]. The safety of the investigational product will be evaluated in detail from periodic evaluations contemplating monitoring changes of: (1) adverse events including type, frequency, intensity, seriousness, severity, and action taken related to the investigational product study; (2) vital signs (BP, HR, axillary temperature), physical and medical examination (BMI, weight, height, medical condition-cardiovascular, pulmonary, digestive, musculoskeletal and peripheral, with emphasis on the neurological assessment and others); (3) laboratory tests included hematologic, biochemical, urologic and serological analysis; (4) electrocardiogram (ECG) of 12 derivations; (5) and incidence and classification of benign and malignant neoplasms in the following organs/systems: CNS, lung, liver, spleen, pancreas, prostate, testicle, urinary, hematological and skeletal system through the laboratory tests, magnetic resonance imaging, computerized tomography and ultrasonography.

[0308] Secondary Outcome Measures: Preliminary efficacy of Cellavita HD by global clinical response (CIBIS) and UHDRS improvement [Time Frame: five years] will be evaluated by statistical comparison of the results of each UHDRS scale component: motor, cognitive and behavior. The global clinical response will be assessed by statistical comparison between baseline score observed by the Investigator before and after Cellavita HD treatment. Preliminary efficacy of Cellavita HD by comparison of the inflammatory markers [Time Frame: one year] will be evaluated by statistical comparison of the inflammatory markers included IL-4, IL-6, IL-10 (interleukin IL) and TNF-alpha (tumoral necrosis factor alpha). Immunological Response of Cellavita HD [Time Frame: one year]. The immunological response induced by Cellavita HD will be evaluated by statistical comparison between baseline results of CD4+ and CD8+ proliferation and the other evaluated times. Preliminary efficacy of Cellavita HD by comparison of the CNS assessment [Time Frame: one year]. Will be evaluated by statistical comparison of the CNS assessment through magnetic resonance image at cortical thickness measurements, volumes of different brain structures, especially the basal ganglia, with special attention to caudate and metabolic changes identified in proton spectroscopy. Risk of suicidal ideation by Hamilton Depression Rating Scale (HDRS) [Time Frame: five years] will be evaluated by suicidal domain. The classificatory punctuation may correspond to mild depression (score: 8 to 13), moderate depression (score: 19-22) and severe depression (score: >23).

[0309] While preferred embodiments of the present examples have been shown and described herein, it will be obvious to those skilled in the art that such embodiments are provided by way of example only. Numerous variations, changes, and substitutions will now occur to those skilled in the art without departing from the disclosure. It should be understood that various alternatives to the embodiments of the disclosure described herein may be employed in practicing the disclosure. It is intended that the following claims define the scope of the disclosure and that methods and structures within the scope of these claims and their equivalents be covered thereby.

1.-34. (canceled)

35. A recombinant AAV (rAAV), the rAAV comprising:
a) a variant AAV5 of AAV9 capsid comprising a variant AAV capsid protein comprising a substitution of three or more amino acids relative to the corresponding parental AAV capsid protein, that insertion or substitution residing in the loop corresponding to the amino acid 455 loop (AA455 loop), and wherein the amino acid substitution does not result in the consecutive peptide sequences ILGTGTS (SEQ ID NO: 45479), QSSQTPR (SEQ ID NO: 45480), or TLAVPFK (SEQ ID NO: 45477) in the AA455 loop; and
b) a heterologous polynucleotide comprising a nucleotide sequence encoding a gene product.

36. The rAAV of claim 35, wherein the variant AAV capsid has an increased tropism for a target tissue or a target cell, when measured in a subject, relative to a tropism of the parental AAV capsid.

37. The rAAV of claim 36, wherein the target tissue or the target cell comprises a tissue or a cell of a central nervous system (CNS) or a peripheral nervous system (PNS), or a combination thereof.

38. The rAAV of claim 37, wherein the variant AAV capsid has a decreased tropism for an off-target tissue comprising liver tissue or an off-target cell comprising a liver cell, when measured in a subject, relative to the tropism of the parental AAV capsid.

39. The rAAV of claim 38, wherein the three or more amino acids comprise three contiguous amino acids, each amino acid independently selected from the group consisting of A, D, E, G, K, H, M, N, P, L, Q, S, T, and V at amino acid positions in the parental AAV capsid protein corresponding to amino acid residues 452-454, 453-455, 454-456, 455-457, or 456-458 of AAV9 VP1 (SEQ ID NO: 1).

40. The rAAV of claim 38, wherein the three or more amino acids comprise four contiguous amino acids, each amino acid independently selected from the group consisting of A, D, E, G, K, H, M, N, P, L, Q, S, T, and V at amino acid positions in the parental AAV capsid protein corresponding to amino acid residues 452-455, 453-456, 454-457, or 455458 of AAV9 VP1 (SEQ ID NO: 1).

41. The rAAV of claim 38, wherein three or more amino acids comprise at least five contiguous amino acids, each amino acid independently selected from the group consisting of A, D, E, G, K, H, M, N, P, L, Q, S, T, and V at amino acid positions in the parental AAV capsid protein corresponding to amino acid residues 452456, 453457, or 454-458 of AAV9 VP1 (SEQ ID NO: 1).

42. The rAAV of claim 38, wherein the three or more amino acids comprise three or more of:
a) A, D, E, G, H, M, N, Q, S, T, or V substituted at an amino acid position corresponding to amino acid residue 452 of AAV9 VP1 (SEQ ID NO: 1);
b) A, D, E, G, K, N, Q, S, T, or V substituted at an amino acid position corresponding to amino acid residue 453 of AAV9 VP1 (SEQ ID NO: 1);
c) A, D, E, G, K, N, Q, S, T, or V substituted at amino acid position corresponding to amino acid residue 454 of AAV9 VP1 (SEQ ID NO: 1);
d) A, D, E, G, K, N, P, Q, S, or T substituted at an amino acid position corresponding to amino acid residue 455 of AAV9 VP1 (SEQ ID NO: 1);
e) A, D, E, G, H, K, N, P, Q, S, or T substituted at an amino acid position corresponding to amino acid residue 456 of AAV9 VP1 (SEQ ID NO: 1);
f) A, D, E, G, K, N, P, S, T, or V substituted at an amino acid position corresponding to amino acid residue 457 of AAV9 VP1 (SEQ ID NO: 1); and
g) A, E, G, H, K, L, N, Q, S, T, or V substituted at amino acid position corresponding to amino acid residue 458 of AAV9 VP1 (SEQ ID NO: 1).

9. The rAAV of claim 5, wherein the amino acid substitution comprises an amino acid sequence selected from DGAATKN (SEQ ID NO: 3943), and DGQSSKS (SEQ ID NO: 2764).

10. The rAAV of claim 4, wherein the three or more amino acids comprises three or more of:
a) A, D, G, L, N, Q, S, or T substituted at an amino acid at a position corresponding to amino acid residue 452 of AAV9 VP1 (SEQ ID NO: 1);
b) A, G, N, P, Q, R, S, or substituted at an amino acid at a position corresponding to amino acid residue 453 of AAV9 VP1 (SEQ ID NO: 1);
c) A, D, G, N, S, or T substituted at an amino acid at a position corresponding to amino acid residue 454 of AAV9 VP1 (SEQ ID NO: 1);
d) A, D, G, K, N, P, Q, S, or T substituted at an amino acid at a position corresponding to amino acid residue 455 of AAV9 VP1 (SEQ ID NO: 1);
e) A, G, K, N, P, R, S, or T substituted at an amino acid at a position corresponding to amino acid residue 456 of AAV9 VP (SEQ ID NO: 1);
f) A, G, K, N, P, R, S, T, or V substituted at an amino acid at a position corresponding to amino acid residue 457 of AAV9 VP1 (SEQ ID NO: 1); and
g) A, G, K, L, R, S, T, or V substituted at an amino acid at a position corresponding to amino acid residue 458 of AAV9 VP1 (SEQ ID NO: 1).

11. The rAAV of claim 10, wherein the amino acid substitution comprises an amino acid sequence selected from the group consisting of LQTSSPG (SEQ ID NO: 2933), QQGKQSV (SEQ ID NO: 79), SINTKTN (SEQ ID NO: 45475), SNGTKQT (SEQ ID NO: 442), GSGKTAA (SEQ ID NO: 88), MGDKPTR (SEQ ID NO: 2466), QPSGGNT (SEQ ID NO: 2672), ERGANTK (SEQ ID NO: 5192), TTGGHSS (SEQ ID NO: 2743), GTTKTSE (SEQ ID NO: 3064), GTGTSVL (SEQ ID NO: 11958), NQSGTKG (SEQ ID NO: 780), KGPGQMG (SEQ ID NO: 45476), and GTPSKAG (SEQ ID NO: 2741).

43. The rAAV of claim 36, wherein the target tissue or the target cell in the tissue is selected from the group consisting of lung, intestine, kidney, heart, and stomach.

44. The rAAV of claim 43, wherein the three or more amino acids comprise three contiguous amino acids at amino acid positions corresponding to amino acid residues 452-454, 453-455, 454-456, 455-457, or 456-458 of AAV9 VP1, wherein:
a) 452 is selected from the group consisting of N, K, R, and T;
b) 453 is selected from the group consisting of L, N, P, and S;
c) 454 is selected from the group consisting of A, D, G, N, S, and T;
d) 455 is selected from the group consisting of L, P, S, and T;
e) 456 is selected from the group consisting of P, R, and S;
f) 457 is selected from the group consisting of G, N, S, and T; and
g) 458 is selected from the group consisting of I, L, and R.

45. The rAAV of claim 44, wherein the three or more amino acids comprise:
a) four contiguous amino acids at amino acid positions corresponding to amino acid residues 452-455, 453-456, 454-457, or 455-458 of AAV9 VP1 (SEQ ID NO: 1);
b) five contiguous amino acids at amino acid positions corresponding to amino acid residues 452-456, 453-457, or 453-458 of AAV9 VP1 (SEQ ID NO: 1);
c) six contiguous amino acids at amino acid positions corresponding to amino acid residues 452-457 or 453-458 of AAV9 VP1 (SEQ ID NO: 1); and
d) seven contiguous amino acids at amino acid positions corresponding to amino acid residues 452-458 of AAV9 VP1 (SEQ ID NO: 1).

46. The rAAV of claim 44, wherein the target tissue is lung, and the three or more amino acids are provided in an amino acid sequence comprising KDNTPGR (SEQ ID NO: 32538), NNLPRNL (SEQ ID NO: 32867), or any amino acid sequence provided in FIG. 13.

47. The rAAV of claim 44, wherein the target tissue is intestine, and the three or more amino acids are provided in an amino acid sequence comprising RESSPSL (SEQ ID NO: 26474), KDNTPGR (SEQ ID NO: 26584), or any amino acid sequence provided in FIG. 5.

48. The rAAV of claim 44, wherein the tissue is kidney, and the three or more amino acids are provided in an amino acid sequence comprising RVPLSTI (SEQ ID NO: 26933), NNLPRNL (SEQ ID NO: 27530), KDNTPGR (SEQ ID NO: 28509), or any amino acid sequence provided in FIG. 6.

49. The rAAV of claim 44, wherein the tissue is heart, and the three or more amino acids are provided in an amino acid sequence comprising KDNTPGR (SEQ ID NO: 25633), or any amino acid sequence provided in FIG. 4.

50. The rAAV of claim 44, wherein the tissue is stomach, and the three or more amino acids are provided in an amino acid sequence comprising RESSPSL (SEQ ID NO: 31904) or any amino acid sequence of FIG. 12.

51. The rAAV of claim 35, wherein the parental AAV capsid protein is AAV9 VP1 or a variant thereof.

52. The rAAV of claim 51, wherein the AAV9 VP1 variant has a sequence identity of 90% or more to SEQ ID NO: 1.

53. The rAAV of claim 51, wherein the AAV9 VP1 variant has a sequence identity of 95% or more to SEQ ID NO: 1.

The application's sequence listing, which the Patent Office published only in electronic form, follows.

SEQUENCE LISTING (46429 sequences)

SEQ ID NO: 1 - protein, 736 aa, synthetic construct
  REGION 1..736: note = Description of Artificial Sequence: Synthetic polypeptide
MAADGYLPDWLEDNLSEGIREWWALKPGAPQPKANQQHQDNARGLVLPGYKYLGPGNGLDKGEPVNAADAAALEHDKAYDQQLKAGDNPYLKYNHADAEFQERLKEDTSFGGNLGRAVFQAKKRLLEPLGLVEEAAKTAPGKKRPVEQSPQEPDSSAGIGKSGAQPAKKRLNFGQTGDTESVPDPQPIGEPPAAPSGVGSLTMASGGGAPVADNNEGADGVGSSSGNWHCDSQWLGDRVITTSTRTWALPTYNNHLYKQISNSTSGGSSNDNAYFGYSTPWGYFDFNRFHCHFSPRDWQRLINNNWGFRPKRLNFKLFNIQVKEVTDNNGVKTIANNLTSTVQVFTDSDYQLPYVLGSAHEGCLPPFPADVFMIPQYGYLTLNDGSQAVGRSSFYCLEYFPSQMLRTGNNFQFSYEFENVPFHSSYAHSQSLDRLMNPLIDQYLYYLSKTINGSGQNQQTLKFSVAGPSNMAVQGRNYIPGPSYRQQRVSTTVTQNNNSEFAWPGASSWALNGRNSLMNPGPAMASHKEGEDRFFPLSGSLIFGKQGTGRDNVDADKVMITNEEEIKTTNPVATESYGQVATNHQSAQAQAQTGWVQNQGILPGMVWQDRDVYLQGPIWAKIPHTDGNFHPSPLMGGFGMKHPPPQILIKNTPVPADPPTAFNKDKLNSFITQYSTGQVSVEIEWELQKENSKRWNPEIQYTSNYYKSNNVEFAVNTEGVYSEPRPIGTRYLTRNL

SEQ ID NO: 2 - protein, 724 aa, synthetic construct
  REGION 1..724: note = Description of Artificial Sequence: Synthetic polypeptide
MSFVDHPPDWLEEVGEGLREFLGLEAGPPKPKPNQQHQDQARGLVLPGYNYLGPGNGLDRGEPVNRADEVAREHDISYNEQLEAGDNPYLKYNHADAEFQEKLADDTSFGGNLGKAVFQAKKRVLEPFGLVEEGAKTAPTGKRIDDHFPKRKKARTEEDSKPSTSSDAEAGPSGSQQLQIPAQPASSLGADTMSAGGGGPLGDNNQGADGVGNASGDWHCDSTWMGDRVVTKSTRTWVLPSYNNHQYREIKSGSVDGSNANAYFGYSTPWGYFDFNRFHSHWSPRDWQRLINNYWGFRPRSLRVKIFNIQVKEVTVQDSTTTIANNLTSTVQVFTDDDYQLPYVVGNGTEGCLPAFPPQVFTLPQYGYATLNRDNTENPTERSSFFCLEYFPSKMLRTGNNFEFTYNFEEVPFHSSFAPSQNLFKLANPLVDQYLYRFVSTNNTGGVQFNKNLAGRYANTYKNWFPGPMGRTQGWNLGSGVNRASVSAFATTNRMELEGASYQVPPQPNGMTNNLQGSNTYALENTMIFNSQPANPGTTATYLEGNMLITSESETQPVNRVAYNVGGQMATNNQSSTTAPATGTYNLQEIVPGSVWMERDVYLQGPIWAKIPETGAHFHPSPAMGGFGLKHPPPMMLIKNTPVPGNITSFSDVPVSSFITQYSTGQVTVEMEWELKKENSKRWNPEIQYTNNYNDPQFVDFAPDSTGEYRTTRPIGTRYLTRPL

SEQ ID NO: 3 - protein, 743 aa, synthetic construct
  REGION 1..743: note = Description of Artificial Sequence: Synthetic polypeptide
MAADGYLPDWLEDNLSEGIREWWALKPGAPQPKANQQHQDNARGLVLPGYKYLGPGNGLDKGEPVNAADAAALEHDKAYDQQLKAGDNPYLKYNHADAEFQERLKEDTSFGGNLGRAVFQAKKRLLEPLGLVEEAAKTAPGKKRPVEQSPQEPDSSAGIGKSGAQPAKKRLNFGQTGDTESVPDPQPIGEPPAAPSGVGSLTMASGGGAPVADNNEGADGVGSSSGNWHCDSQWLGDRVITTSTRTWALPTYNNHLYKQISNSTSGGSSNDNAYFGYSTPWGYFDFNRFHCHFSPRDWQRLINNNWGFRPKRLNFKLFNIQVKEVTDNNGVKTIANNLTSTVQVFTDSDYQLPYVLGSAHEGCLPPFPADVFMIPQYGYLTLNDGSQAVGRSSFYCLEYFPSQMLRTGNNFQFSYEFENVPFHSSYAHSQSLDRLMNPLIDQYLYYLSRTINGSGQNQQTLKFSVAGPSNMAVQGRNYIPGPSYRQQRVSTTVTQNNNSEFAWPGASSWALNGRNSLMNPGPAMASHKEGEDRFFPLSGSLIFGKQGTGRDNVDADKVMITNEEEIKTTNPVATESYGQVATNHQSAQTLAVPFKAQAQTGWVQNQGILPGMVWQDRDVYLQGPIWAKIPHTDGNFHPSPLMGGFGMKHPPPQILIKNTPVPADPPTAFNKDKLNSFITQYSTGQVSVEIEWELQKENSKRWNPEIQYTSNYYKSNNVEFAVNTEGVYSEPRPIGTRYLTRNL

SEQ ID NO: 4 - protein, 743 aa, synthetic construct
  REGION 1..743: note = Description of Artificial Sequence: Synthetic polypeptide
MAADGYLPDWLEDNLSEGIREWWALKPGAPQPKANQQHQDNARGLVLPGYKYLGPGNGLDKGEPVNAADAAALEHDKAYDQQLKAGDNPYLKYNHADAEFQERLKEDTSFGGNLGRAVFQAKKRLLEPLGLVEEAAKTAPGKKRPVEQSPQEPDSSAGIGKSGAQPAKKRLNFGQTGDTESVPDPQPIGEPPAAPSGVGSLTMASGGGAPVADNNEGADGVGSSSGNWHCDSQWLGDRVITTSTRTWALPTYNNHLYKQISNSTSGGSSNDNAYFGYSTPWGYFDFNRFHCHFSPRDWQRLINNNWGFRPKRLNFKLFNIQVKEVTDNNGVKTIANNLTSTVQVFTDSDYQLPYVLGSAHEGCLPPFPADVFMIPQYGYLTLNDGSQAVGRSSFYCLEYFPSQMLRTGNNFQFSYEFENVPFHSSYAHSQSLDRLMNPLIDQYLYYLSRTINGSGQNQQTLKFSVAGPSNMAVQGRNYIPGPSYRQQRVSTTVTQNNNSEFAWPGASSWALNGRNSLMNPGPAMASHKEGEDRFFPLSGSLIFGKQGTGRDNVDADKVMITNEEEIKTTNPVATESYGQVATNHQSAQQAVRTSLAQAQTGWVQNQGILPGMVWQDRDVYLQGPIWAKIPHTDGNFHPSPLMGGFGMKHPPPQILIKNTPVPADPPTAFNKDKLNSFITQYSTGQVSVEIEWELQKENSKRWNPEIQYTSNYYKSNNVEFAVNTEGVYSEPRPIGTRYLTRNL

SEQ ID NO: 5 - protein, 743 aa, synthetic construct
  REGION 1..743: note = Description of Artificial Sequence: Synthetic polypeptide
MAADGYLPDWLEDNLSEGIREWWALKPGAPQPKANQQHQDNARGLVLPGYKYLGPGNGLDKGEPVNAADAAALEHDKAYDQQLKAGDNPYLKYNHADAEFQERLKEDTSFGGNLGRAVFQAKKRLLEPLGLVEEAAKTAPGKKRPVEQSPQEPDSSAGIGKSGAQPAKKRLNFGQTGDTESVPDPQPIGEPPAAPSGVGSLTMASGGGAPVADNNEGADGVGSSSGNWHCDSQWLGDRVITTSTRTWALPTYNNHLYKQISNSTSGGSSNDNAYFGYSTPWGYFDFNRFHCHFSPRDWQRLINNNWGFRPKRLNFKLFNIQVKEVTDNNGVKTIANNLTSTVQVFTDSDYQLPYVLGSAHEGCLPPFPADVFMIPQYGYLTLNDGSQAVGRSSFYCLEYFPSQMLRTGNNFQFSYEFENVPFHSSYAHSQSLDRLMNPLIDQYLYYLSRTINGSGQNQQTLKFSVAGPSNMAVQGRNYIPGPSYRQQRVSTTVTQNNNSEFAWPGASSWALNGRNSLMNPGPAMASHKEGEDRFFPLSGSLIFGKQGTGRDNVDADKVMITNEEEIKTTNPVATESYGQVATNHQSDGTLAVPFKAQAQTGWVQNQGILPGMVWQDRDVYLQGPIWAKIPHTDGNFHPSPLMGGFGMKHPPPQILIKNTPVPADPPTAFNKDKLNSFITQYSTGQVSVEIEWELQKENSKRWNPEIQYTSNYYKSNNVEFAVNTEGVYSEPRPIGTRYLTRNL

SEQ ID NO: 6 - DNA, 2211 bp, synthetic construct
  source 1..2211: mol_type = other DNA
atggctgccgatggttatcttccagattggctcgaggacaaccttagtgaaggaattcgcgagtggtgggctttgaaacctggagcccctcaacccaaggcaaatcaacaacatcaagacaacgctcgaggtcttgtgcttccgggttacaaataccttggacccggcaacggactcgacaagggggagccggtcaacgcagcagacgcggcggccctcgagcacgacaaggcctacgaccagcagctcaaggccggagacaacccgtacctcaagtacaaccacgccgacgccgagttccaggagcggctcaaagaagatacgtcttttgggggcaacctcgggcgagcagtcttccaggccaaaaagaggcttcttgaacctcttggtctggttgaggaagcggctaagacggctcctggaaagaagaggcctgtagagcagtctcctcaggaaccggactcctccgcgggtattggcaaatcgggtgcacagcccgctaaaaagagactcaatttcggtcagactggcgacacagagtcagtcccagaccctcaaccaatcggagaacctcccgcagccccctcaggtgtgggatctcttacaatggcttcaggtggtggcgcaccagtggcagacaataacgaaggtgccgatggagtgggtagttcctcgggaaattggcattgcgattcccaatggctgggggacagagtcatcaccaccagcacccgaacctgggccctgcccacctacaacaatcacctctacaagcaaatctccaacagcacatctggaggatcttcaaatgacaacgcctacttcggctacagcaccccctgggggtattttgacttcaacagattccactgccacttctcaccacgtgactggcagcgactcatcaacaacaactggggattccggcctaagcgactcaacttcaagctcttcaacattcaggtcaaagaggttacggacaacaatggagtcaagaccatcgccaataaccttaccagcacggtccaggtcttcacggactcagactatcagctcccgtacgtgctcgggtcggctcacgagggctgcctcccgccgttcccagcggacgttttcatgattcctcagtacgggtatctgacgcttaatgatggaagccaggccgtgggtcgttcgtccttttactgcctggaatatttcccgtcgcaaatgctaagaacgggtaacaacttccagttcagctacgagtttgagaacgtacctttccatagcagctacgctcacagccaaagcctggaccgactaatgaatccactcatcgaccaatacttgtactatctctcaaagactattaacggttctggacagaatcaacaaacgctaaaattcagtgtggccggacccagcaacatggctgtccagggaagaaactacatacctggacccagctaccgacaacaacgtgtctcaaccactgtgactcaaaacaacaacagcgaatttgcttggcctggagcttcttcttgggctctcaatggacgtaatagcttgatgaatcctggacctgctatggccagccacaaagaaggagaggaccgtttctttcctttgtctggatctttaatttttggcaaacaaggaactggaagagacaacgtggatgcggacaaagtcatgataaccaacgaagaagaaattaaaactactaacccggtagcaacggagtcctatggacaagtggccacaaaccaccagagtgcccaagcacaggcgcagaccggctgggttcaaaaccaaggaatacttccgggtatggtttggcaggacagagatgtgtacctgcaaggacccatttgggccaaaattcctcacacggacggcaactttcacccttctccgctgatgggagggtttggaatgaagcacccgcctcctcagatcctcatcaaaaacacacctgtacctgcggatcctccaacggccttcaacaaggacaagctgaactctttcatcacccagtattctactggccaagtcagcgtggagatcgagtgggagctgcagaaggaaaacagcaagcgctggaacccggagatccagtacacttccaactattacaagtctaataatgttgaatttgctgttaatactgaaggtgtatatagtgaaccccgccccattggcaccagatacctgactcgtaatctgtaa

SEQ ID NO: 7 - DNA, 4404 bp, Synthetic construct
  source 1..4404: mol_type = other DNA
cgcgacaggggggagagtgccacactctcaagcaagggggttttgtaagcagtgatgtcataatgatgtaatgcttattgtcacgcgatagttaatgattaacagtcatgtgatgtgttttatccaataggaagaaagcgcgcgtatgagttctcgcgagacttccggggtataaaagaccgagtgaacgagcccgccgccattctttgctctggactgctagaggaccctcgctgccatggctaccttctatgaagtcattgttcgcgtcccatttgacgtggaggaacatctgcctggaatttctgacagctttgtggactgggtaactggtcaaatttgggagctgcctccagagtcagatttaaatttgactctggttgaacagcctcagttgacggtggctgatagaattcgccgcgtgttcctgtacgagtggaacaaattttccaagcaggagtccaaattctttgtgcagtttgaaaagggatctgaatattttcatctgcacacgcttgtggagacctccggcatctcttccatggtcctcggccgctacgtgagtcagattcgcgcccagctggtgaaagtggtcttccagggaattgaaccccagatcaacgactgggtcgccatcaccaaggtaaagaagggcggagccaataaggtggtggattctgggtatattcccgcctacctgctgccgaaggtccaaccggagcttcagtgggcgtggacaaacctggacgagtataaattggccgccctgaatctggaggagcgcaaacggctcgtcgcgcagtttctggcagaatcctcgcagcgctcgcaggaggcggcttcgcagcgtgagttctcggctgacccggtcatcaaaagcaagacttcccagaaatacatggcgctcgtcaactggctcgtggagcacggcatcacttccgagaagcagtggatccaggaaaatcaggagagctacctctccttcaactccaccggcaactctcggagccagatcaaggccgcgctcgacaacgcgaccaaaattatgagtctgacaaaaagcgcggtggactacctcgtggggagctccgttcccgaggacatttcaaaaaacagaatctggcaaatttttgagatgaatggctacgacccggcctacgcgggatccatcctctacggctggtgtcagcgctccttcaacaagaggaacaccgtctggctctacggacccgccacgaccggcaagaccaacatcgcggaggccatcgcccacactgtgcccttttacggctgcgtgaactggaccaatgaaaactttccctttaatgactgtgtggacaaaatgctcatttggtgggaggagggaaagatgaccaacaaggtggttgaatccgccaaggccatcctggggggctcaaaggtgcgggtcgatcagaaatgtaaatcctctgttcaaattgattctacccctgtcattgtaacttccaatacaaacatgtgtgtggtggtggatgggaattccacgacctttgaacaccagcagccgctggaggaccgcatgttcaaatttgaactgactaagcggctcccgccagattttggcaagattactaagcaggaagtcaaggacttttttgcttgggcaaaggtcaatcaggtgccggtgactcacgagtttaaagttcccagggaattggcgggaactaaaggggcggagaaatctctaaaacgcccactgggtgacgtcaccaatactagctataaaagtctggagaagcgggccaggctctcatttgttcccgagacgcctcgcagttcagacgtgactgttgatcccgctcctctgcgaccgctcaattggaattcaaggtatgattgcaaatgtgactatcatgctcaatttgacaacatttctaacaaatgtgatgaatgtgaatatttgaatcggggcaaaaatggatgtatctgtcacaatgtaactcactgtcaaatttgtcatgggattcccccctgggaaaaggaaaacttgtcagattttggggattttgacgatgccaataaagaacagtaaataaagcgagtagtcatgtcttttgttgatcaccctccagattggttggaagaagttggtgaaggtcttcgcgagtttttgggccttgaagcgggcccaccgaaaccaaaacccaatcagcagcatcaagatcaagcccgtggtcttgtgctgcctggttataactatctcggacccggaaacggtctcgatcgaggagagcctgtcaacagggcagacgaggtcgcgcgagagcacgacatctcgtacaacgagcagcttgaggcgggagacaacccctacctcaagtacaaccacgcggacgccgagtttcaggagaagctcgccgacgacacatccttcgggggaaacctcggaaaggcagtctttcaggccaagaaaagggttctcgaaccttttggcctggttgaagagggtgctaagacggcccctaccggaaagcggatagacgaccactttccaaaaagaaagaaggctcggaccgaagaggactccaagccttccacctcgtcagacgccgaagctggacccagcggatcccagcagctgcaaatcccagcccaaccagcctcaagtttgggagctgatacaatgtctgcgggaggtggcggcccattgggcgacaataaccaaggtgccgatggagtgggcaatgcctcgggagattggcattgcgattccacgtggatgggggacagagtcgtcaccaagtccacccgaacctgggtgctgcccagctacaacaaccaccagtaccgagagatcaaaagcggctccgtcgacggaagcaacgccaacgcctactttggatacagcaccccctgggggtactttgactttaaccgcttccacagccactggagcccccgagactggcaaagactcatcaacaactactggggcttcagaccccggtccctcagagtcaaaatcttcaacattcaagtcaaagaggtcacggtgcaggactccaccaccaccatcgccaacaacctcacctccaccgtccaagtgtttacggacgacgactaccagctgccctacgtcgtcggcaacgggaccgagggatgcctgccggccttccctccgcaggtctttacgctgccgcagtacggttacgcgacgctgaaccgcgacaacacagaaaatcccaccgagaggagcagcttcttctgcctagagtactttcccagcaagatgctgagaacgggcaacaactttgagtttacctacaactttgaggaggtgcccttccactccagcttcgctcccagtcagaacctcttcaagctggccaacccgctggtggaccagtacttgtaccgcttcgtgagcacaaataacactggcggagtccagttcaacaagaacctggccgggagatacgccaacacctacaaaaactggttcccggggcccatgggccgaacccagggctggaacctgggctccggggtcaaccgcgccagtgtcagcgccttcgccacgaccaataggatggagctcgagggcgcgagttaccaggtgcccccgcagccgaacggcatgaccaacaacctccagggcagcaacacctatgccctggagaacactatgatcttcaacagccagccggcgaacccgggcaccaccgccacgtacctcgagggcaacatgctcatcaccagcgagagcgagacgcagccggtgaaccgcgtggcgtacaacgtcggcgggcagatggccaccaacaaccagagctccaccactgcccccgcgaccggcacgtacaacctccaggaaatcgtgcccggcagcgtgtggatggagagggacgtgtacctccaaggacccatctgggccaagatcccagagacgggggcgcactttcacccctctccggccatgggcggattcggactcaaacacccaccgcccatgatgctcatcaagaacacgcctgtgcccggaaatatcaccagcttctcggacgtgcccgtcagcagcttcatcacccagtacagcaccgggcaggtcaccgtggagatggagtgggagctcaagaaggaaaactccaagaggtggaacccagagatccagtacacaaacaactacaacgacccccagtttgtggactttgccccggacagcaccggggaatacagaaccaccagacctatcggaacccgataccttacccgacccctttaacccattcatgtcgcataccctcaataaaccgtgtattcgtgtcagtaaaatactgcctcttgtggtcattcaatgaataacagcttacaacatctacaaaacctccttgcttgagagtgtggcactctcccccctgtcgcgcg

SEQ ID NO: 8 - DNA, 2232 bp, synthetic construct
  misc_feature 1..2232: note = Description of Artificial Sequence: Synthetic polynucleotide
  source 1..2232: mol_type = other DNA
atggctgccgatggttatcttccagattggctcgaggacaaccttagtgaaggaattcgcgagtggtgggctttgaaacctggagcccctcaacccaaggcaaatcaacaacatcaagacaacgctcgaggtcttgtgcttccgggttacaaataccttggacccggcaacggactcgacaagggggagccggtcaacgcagcagacgcggcggccctcgagcacgacaaggcctacgaccagcagctcaaggccggagacaacccgtacctcaagtacaaccacgccgacgccgagttccaggagcggctcaaagaagatacgtcttttgggggcaacctcgggcgagcagtcttccaggccaaaaagaggcttcttgaacctcttggtctggttgaggaagcggctaagacggctcctggaaagaagaggcctgtagagcagtctcctcaggaaccggactcctccgcgggtattggcaaatcgggtgcacagcccgctaaaaagagactcaatttcggtcagactggcgacacagagtcagtcccagaccctcaaccaatcggagaacctcccgcagccccctcaggtgtgggatctcttacaatggcttcaggtggtggcgcaccagtggcagacaataacgaaggtgccgatggagtgggtagttcctcgggaaattggcattgcgattcccaatggctgggggacagagtcatcaccaccagcacccgaacctgggccctgcccacctacaacaatcacctctacaagcaaatctccaacagcacatctggaggatcttcaaatgacaacgcctacttcggctacagcaccccctgggggtattttgacttcaacagattccactgccacttctcaccacgtgactggcagcgactcatcaacaacaactggggattccggcctaagcgactcaacttcaagctcttcaacattcaggtcaaagaggttacggacaacaatggagtcaagaccatcgccaataaccttaccagcacggtccaggtcttcacggactcagactatcagctcccgtacgtgctcgggtcggctcacgagggctgcctcccgccgttcccagcggacgttttcatgattcctcagtacgggtatctgacgcttaatgatggaagccaggccgtgggtcgttcgtccttttactgcctggaatatttcccgtcgcaaatgctaagaacgggtaacaacttccagttcagctacgagtttgagaacgtacctttccatagcagctacgctcacagccaaagcctggaccgactaatgaatccactcatcgaccaatacttgtactatctctctagaactattaacggttctggacagaatcaacaaacgctaaaattcagtgtggccggacccagcaacatggctgtccagggaagaaactacatacctggacccagctaccgacaacaacgtgtctcaaccactgtgactcaaaacaacaacagcgaatttgcttggcctggagcttcttcttgggctctcaatggacgtaatagcttgatgaatcctggacctgctatggccagccacaaagaaggagaggaccgtttctttcctttgtctggatctttaatttttggcaaacaaggtaccggcagagacaacgtggatgcggacaaagtcatgataaccaacgaagaagaaattaaaactactaacccggtagcaacggagtcctatggacaagtggccacaaaccaccagagtgcccaaactttggcggtgccttttaaggcacaggcgcagaccggttgggttcaaaaccaaggaatacttccgggtatggtttggcaggacagagatgtgtacctgcaaggacccatttgggccaaaattcctcacacggacggcaactttcacccttctccgctgatgggagggtttggaatgaagcacccgcctcctcagatcctcatcaaaaacacacctgtacctgcggatcctccaacggccttcaacaaggacaagctgaactctttcatcacccagtattctactggccaagtcagcgtggagatcgagtgggagctgcagaaggaaaacagcaagcgctggaacccggagatccagtacacttccaactattacaagtctaataatgttgaatttgctgttaatactgaaggtgtatatagtgaaccccgccccattggcaccagatacctgactcgtaatctgtaa

SEQ ID NO: 9 - DNA, 2232 bp, synthetic construct
  misc_feature 1..2232: note = Description of Artificial Sequence: Synthetic polynucleotide
  source 1..2232: mol_type = other DNA
atggctgccgatggttatcttccagattggctcgaggacaaccttagtgaaggaattcgcgagtggtgggctttgaaacctggagcccctcaacccaaggcaaatcaacaacatcaagacaacgctcgaggtcttgtgcttccgggttacaaataccttggacccggcaacggactcgacaagggggagccggtcaacgcagcagacgcggcggccctcgagcacgacaaggcctacgaccagcagctcaaggccggagacaacccgtacctcaagtacaaccacgccgacgccgagttccaggagcggctcaaagaagatacgtcttttgggggcaacctcgggcgagcagtcttccaggccaaaaagaggcttcttgaacctcttggtctggttgaggaagcggctaagacggctcctggaaagaagaggcctgtagagcagtctcctcaggaaccggactcctccgcgggtattggcaaatcgggtgcacagcccgctaaaaagagactcaatttcggtcagactggcgacacagagtcagtcccagaccctcaaccaatcggagaacctcccgcagccccctcaggtgtgggatctcttacaatggcttcaggtggtggcgcaccagtggcagacaataacgaaggtgccgatggagtgggtagttcctcgggaaattggcattgcgattcccaatggctgggggacagagtcatcaccaccagcacccgaacctgggccctgcccacctacaacaatcacctctacaagcaaatctccaacagcacatctggaggatcttcaaatgacaacgcctacttcggctacagcaccccctgggggtattttgacttcaacagattccactgccacttctcaccacgtgactggcagcgactcatcaacaacaactggggattccggcctaagcgactcaacttcaagctcttcaacattcaggtcaaagaggttacggacaacaatggagtcaagaccatcgccaataaccttaccagcacggtccaggtcttcacggactcagactatcagctcccgtacgtgctcgggtcggctcacgagggctgcctcccgccgttcccagcggacgttttcatgattcctcagtacgggtatctgacgcttaatgatggaagccaggccgtgggtcgttcgtccttttactgcctggaatatttcccgtcgcaaatgctaagaacgggtaacaacttccagttcagctacgagtttgagaacgtacctttccatagcagctacgctcacagccaaagcctggaccgactaatgaatccactcatcgaccaatacttgtactatctctcaaagactattaacggttctggacagaatcaacaaacgctaaaattcagtgtggccggacccagcaacatggctgtccagggaagaaactacatacctggacccagctaccgacaacaacgtgtctcaaccactgtgactcaaaacaacaacagcgaatttgcttggcctggagcttcttcttgggctctcaatggacgtaatagcttgatgaatcctggacctgctatggccagccacaaagaaggagaggaccgtttctttcctttgtctggatctttaatttttggcaaacaaggaactggaagagacaacgtggatgcggacaaagtcatgataaccaacgaagaagaaattaaaactactaacccggtagcaacggagtcctatggacaagtggccacaaaccaccagagtgcccaacaggcggttaggacgtctttggcacaggcgcagaccggctgggttcaaaaccaaggaatacttccgggtatggtttggcaggacagagatgtgtacctgcaaggacccatttgggccaaaattcctcacacggacggcaactttcacccttctccgctgatgggagggtttggaatgaagcacccgcctcctcagatcctcatcaaaaacacacctgtacctgcggatcctccaacggccttcaacaaggacaagctgaactctttcatcacccagtattctactggccaagtcagcgtggagatcgagtgggagctgcagaaggaaaacagcaagcgctggaacccggagatccagtacacttccaactattacaagtctaataatgttgaatttgctgttaatactgaaggtgtatatagtgaaccccgccccattggcaccagatacctgactcgtaatctgtaa

SEQ ID NO: 10 - DNA, 2232 bp, synthetic construct
  misc_feature 1..2232: note = Description of Artificial Sequence: Synthetic polynucleotide
  source 1..2232: mol_type = other DNA
atggctgccgatggttatcttccagattggctcgaggacaaccttagtgaaggaattcgcgagtggtgggctttgaaacctggagcccctcaacccaaggcaaatcaacaacatcaagacaacgctcgaggtcttgtgcttccgggttacaaataccttggacccggcaacggactcgacaagggggagccggtcaacgcagcagacgcggcggccctcgagcacgacaaggcctacgaccagcagctcaaggccggagacaacccgtacctcaagtacaaccacgccgacgccgagttccaggagcggctcaaagaagatacgtcttttgggggcaacctcgggcgagcagtcttccaggccaaaaagaggcttcttgaacctcttggtctggttgaggaagcggctaagacggctcctggaaagaagaggcctgtagagcagtctcctcaggaaccggactcctccgcgggtattggcaaatcgggtgcacagcccgctaaaaagagactcaatttcggtcagactggcgacacagagtcagtcccagaccctcaaccaatcggagaacctcccgcagccccctcaggtgtgggatctcttacaatggcttcaggtggtggcgcaccagtggcagacaataacgaaggtgccgatggagtgggtagttcctcgggaaattggcattgcgattcccaatggctgggggacagagtcatcaccaccagcacccgaacctgggccctgcccacctacaacaatcacctctacaagcaaatctccaacagcacatctggaggatcttcaaatgacaacgcctacttcggctacagcaccccctgggggtattttgacttcaacagattccactgccacttctcaccacgtgactggcagcgactcatcaacaacaactggggattccggcctaagcgactcaacttcaagctcttcaacattcaggtcaaagaggttacggacaacaatggagtcaagaccatcgccaataaccttaccagcacggtccaggtcttcacggactcagactatcagctcccgtacgtgctcgggtcggctcacgagggctgcctcccgccgttcccagcggacgttttcatgattcctcagtacgggtatctgacgcttaatgatggaagccaggccgtgggtcgttcgtccttttactgcctggaatatttcccgtcgcaaatgctaagaacgggtaacaacttccagttcagctacgagtttgagaacgtacctttccatagcagctacgctcacagccaaagcctggaccgactaatgaatccactcatcgaccaatacttgtactatctctctagaactattaacggttctggacagaatcaacaaacgctaaaattcagtgtggccggacccagcaacatggctgtccagggaagaaactacatacctggacccagctaccgacaacaacgtgtctcaaccactgtgactcaaaacaacaacagcgaatttgcttggcctggagcttcttcttgggctctcaatggacgtaatagcttgatgaatcctggacctgctatggccagccacaaagaaggagaggaccgtttctttcctttgtctggatctttaatttttggcaaacaaggtaccggcagagacaacgtggatgcggacaaagtcatgataaccaacgaagaagaaattaaaactactaacccggtagcaacggagtcctatggacaagtggccacaaaccaccagagtgatgggactttggcggtgccttttaaggcacaggcgcagaccggttgggttcaaaaccaaggaatacttccgggtatggtttggcaggacagagatgtgtacctgcaaggacccatttgggccaaaattcctcacacggacggcaactttcacccttctccgctgatgggagggtttggaatgaagcacccgcctcctcagatcctcatcaaaaacacacctgtacctgcggatcctccaacggccttcaacaaggacaagctgaactctttcatcacccagtattctactggccaagtcagcgtggagatcgagtgggagctgcagaaggaaaacagcaagcgctggaacccggagatccagtacacttccaactattacaagtctaataatgttgaatttgctgttaatactgaaggtgtatatagtgaaccccgccccattggcaccagatacctgactcgtaatctgtaa

SEQ ID NO: 11 - protein, 7 aa, synthetic construct
  REGION 1..7: note = Description of Artificial Sequence: Synthetic peptide
SGLKGTG

SEQ ID NO: 12 - protein, 7 aa, synthetic construct
  REGION 1..7: note = Description of Artificial Sequence: Synthetic peptide
VGGTQGK

SEQ ID NO: 13 - protein, 7 aa, synthetic construct
  REGION 1..7: note = Description of Artificial Sequence: Synthetic peptide
SMDSRPG

SEQ ID NO: 14 - protein, 7 aa, synthetic construct
  REGION 1..7: note = Description of Artificial Sequence: Synthetic peptide
GSSPSKA

SEQ ID NO: 15 - protein, 7 aa, synthetic construct
  REGION 1..7: note = Description of Artificial Sequence: Synthetic peptide
TGTANPL

SEQ ID NO: 16 - protein, 7 aa, synthetic construct
  REGION 1..7: note = Description of Artificial Sequence: Synthetic peptide
SQGAKPV

SEQ ID NO: 17 - protein, 7 aa, synthetic construct
  REGION 1..7: note = Description of Artificial Sequence: Synthetic peptide
QGEKNTM

SEQ ID NO: 18 - protein, 7 aa, synthetic construct
  REGION 1..7: note = Description of Artificial Sequence: Synthetic peptide
TSGNSSK

SEQ ID NO: 19 - protein, 7 aa, synthetic construct
  REGION 1..7: note = Description of Artificial Sequence: Synthetic peptide
TTSKPGT

SEQ ID NO: 20 - protein, 7 aa, synthetic construct
  REGION 1..7: note = Description of Artificial Sequence: Synthetic peptide
SQGKGGS

SEQ ID NO: 21 - protein, 7 aa, synthetic construct
  REGION 1..7: note = Description of Artificial Sequence: Synthetic peptide
GSIKGEA

SEQ ID NO: 22 - protein, 7 aa, synthetic construct
  REGION 1..7: note = Description of Artificial Sequence: Synthetic peptide
NSGTTGN

SEQ ID NO: 23 - protein, 7 aa, synthetic construct
  REGION 1..7: note = Description of Artificial Sequence: Synthetic peptide
ERTKETL

SEQ ID NO: 24 - protein, 7 aa, synthetic construct
  REGION 1..7: note = Description of Artificial Sequence: Synthetic peptide
DHGKGNQ

SEQ ID NO: 25 - protein, 7 aa, synthetic construct
  REGION 1..7: note = Description of Artificial Sequence: Synthetic peptide
DGQQRSS

SEQ ID NO: 26 - protein, 7 aa, synthetic construct
  REGION 1..7: note = Description of Artificial Sequence: Synthetic peptide
SGNSTNK

SEQ ID NO: 27 - protein, 7 aa, synthetic construct
  REGION 1..7: note = Description of Artificial Sequence: Synthetic peptide
GVEQRSG

SEQ ID NO: 28 - protein, 7 aa, synthetic construct
  REGION 1..7: note = Description of Artificial Sequence: Synthetic peptide
NGGKSSS

SEQ ID NO: 29 - protein, 7 aa, synthetic construct
  REGION 1..7: note = Description of Artificial Sequence: Synthetic peptide
STNKSNL

SEQ ID NO: 30 - protein, 7 aa, synthetic construct
  REGION 1..7: note = Description of Artificial Sequence: Synthetic peptide
DGQGNGK

SEQ ID NO: 31 - protein, 7 aa, synthetic construct
  REGION 1..7: note = Description of Artificial Sequence: Synthetic peptide
GEGKGQS

SEQ ID NO: 32 - protein, 7 aa, synthetic construct
  REGION 1..7: note = Description of Artificial Sequence: Synthetic peptide
GVNSSGR

SEQ ID NO: 33 - protein, 7 aa, synthetic construct
  REGION 1..7: note = Description of Artificial Sequence: Synthetic peptide
DTGTPIK

SEQ ID NO: 34 - protein, 7 aa, synthetic construct
  REGION 1..7: note = Description of Artificial Sequence: Synthetic peptide
GSSGSMK

SEQ ID NO: 35 - protein, 7 aa, synthetic construct
  REGION 1..7: note = Description of Artificial Sequence: Synthetic peptide
GNSSKQF

SEQ ID NO: 36 - protein, 7 aa, synthetic construct
  REGION 1..7: note = Description of Artificial Sequence: Synthetic peptide
ETGNKGG

SEQ ID NO: 37 - protein, 7 aa, synthetic construct
  REGION 1..7: note = Description of Artificial Sequence: Synthetic peptide
SGVEKQA

SEQ ID NO: 38 - protein, 7 aa, synthetic construct
  REGION 1..7: note = Description of Artificial Sequence: Synthetic peptide
DNLGQSK

SEQ ID NO: 39 - protein, 7 aa, synthetic construct
  REGION 1..7: note = Description of Artificial Sequence: Synthetic peptide
LGTQSAK

SEQ ID NO: 40 - protein, 7 aa, synthetic construct
  REGION 1..7: note = Description of Artificial Sequence: Synthetic peptide
NGDNSTR

SEQ ID NO: 41 - protein, 7 aa, synthetic construct
  REGION 1..7: note = Description of Artificial Sequence: Synthetic peptide
TTGSPSQ

SEQ ID NO: 42 - protein, 7 aa, synthetic construct
  REGION 1..7: note = Description of Artificial Sequence: Synthetic peptide
NSSGTPS

SEQ ID NO: 43 - protein, 7 aa, synthetic construct
  REGION 1..7: note = Description of Artificial Sequence: Synthetic peptide
SASSTPH

SEQ ID NO: 44 - protein, 7 aa, synthetic construct
  REGION 1..7: note = Description of Artificial Sequence: Synthetic peptide
GQGNGLS

SEQ ID NO: 45 - protein, 7 aa, synthetic construct
  REGION 1..7: note = Description of Artificial Sequence: Synthetic peptide
GTGKSQA

SEQ ID NO: 46 - protein, 7 aa, synthetic construct
  REGION 1..7: note = Description of Artificial Sequence: Synthetic peptide
SDNKSQH

SEQ ID NO: 47 - protein, 7 aa, synthetic construct
  REGION 1..7: note = Description of Artificial Sequence: Synthetic peptide
GVVQGAR

SEQ ID NO: 48 - protein, 7 aa, synthetic construct
  REGION 1..7: note = Description of Artificial Sequence: Synthetic peptide
DGGQARS

SEQ ID NO: 49 - protein, 7 aa, synthetic construct
  REGION 1..7: note = Description of Artificial Sequence: Synthetic peptide
NGAQKVN

SEQ ID NO: 50 - protein, 7 aa, synthetic construct
  REGION 1..7: note = Description of Artificial Sequence: Synthetic peptide
TSDSKTT

SEQ ID NO: 51 - protein, 7 aa, synthetic construct
  REGION 1..7: note = Description of Artificial Sequence: Synthetic peptide
GYNKDSG

SEQ ID NO: 52 - protein, 7 aa, synthetic construct
  REGION 1..7: note = Description of Artificial Sequence: Synthetic peptide
GGVGAAG

SEQ ID NO: 53 - protein, 7 aa, synthetic construct
  REGION 1..7: note = Description of Artificial Sequence: Synthetic peptide
NVSHNGG

SEQ ID NO: 54 - protein, 7 aa, synthetic construct
  REGION 1..7: note = Description of Artificial Sequence: Synthetic peptide
SSTGTNH

SEQ ID NO: 55 - protein, 7 aa, synthetic construct
  REGION 1..7: note = Description of Artificial Sequence: Synthetic peptide
GTGKDRV

SEQ ID NO: 56 - protein, 7 aa, synthetic construct
  REGION 1..7: note = Description of Artificial Sequence: Synthetic peptide
DGNMANK

SEQ ID NO: 57 - protein, 7 aa, synthetic construct
  REGION 1..7: note = Description of Artificial Sequence: Synthetic peptide
TLNNKGL

SEQ ID NO: 58 - protein, 7 aa, synthetic construct
  REGION 1..7: note = Description of Artificial Sequence: Synthetic peptide
TDASKVS

SEQ ID NO: 59 - protein, 7 aa, synthetic construct
  REGION 1..7: note = Description of Artificial Sequence: Synthetic peptide
NTGKNGL

SEQ ID NO: 60 - protein, 7 aa, synthetic construct
  REGION 1..7: note = Description of Artificial Sequence: Synthetic peptide
SGTSKNV

SEQ ID NO: 61 - protein, 7 aa, synthetic construct
  REGION 1..7: note = Description of Artificial Sequence: Synthetic peptide
DHASTNK

SEQ ID NO: 62 - protein, 7 aa, synthetic construct
  REGION 1..7: note = Description of Artificial Sequence: Synthetic peptide
GNSSTPK

SEQ ID NO: 63 - protein, 7 aa, synthetic construct
  REGION 1..7: note = Description of Artificial Sequence: Synthetic peptide
TESQKIV

SEQ ID NO: 64 - protein, 7 aa, synthetic construct
  REGION 1..7: note = Description of Artificial Sequence: Synthetic peptide
EGGKGPA

SEQ ID NO: 65 - protein, 7 aa, synthetic construct
  REGION 1..7: note = Description of Artificial Sequence: Synthetic peptide
GNGSKAV

SEQ ID NO: 66 - protein, 7 aa, synthetic construct
  REGION 1..7: note = Description of Artificial Sequence: Synthetic peptide
TGQSSTS

SEQ ID NO: 67 - protein, 7 aa, synthetic construct
  REGION 1..7: note = Description of Artificial Sequence: Synthetic peptide
AGSKTSA

SEQ ID NO: 68 - protein, 7 aa, synthetic construct
  REGION 1..7: note = Description of Artificial Sequence: Synthetic peptide
SNRDKAS

SEQ ID NO: 69 - protein, 7 aa, synthetic construct
  REGION 1..7: note = Description of Artificial Sequence: Synthetic peptide
GSGNQTG

SEQ ID NO: 70 - protein, 7 aa, synthetic construct
  REGION 1..7: note = Description of Artificial Sequence: Synthetic peptide
GTGSKPY

SEQ ID NO: 71 - protein, 7 aa, synthetic construct
  REGION 1..7: note = Description of Artificial Sequence: Synthetic peptide
SASGKNT

SEQ ID NO: 72 - protein, 7 aa, synthetic construct
  REGION 1..7: note = Description of Artificial Sequence: Synthetic peptide
LGDGKPV

SEQ ID NO: 73 - protein, 7 aa, synthetic construct
  REGION 1..7: note = Description of Artificial Sequence: Synthetic peptide
SGVTGVA

SEQ ID NO: 74 - protein, 7 aa, synthetic construct
  REGION 1..7: note = Description of Artificial Sequence: Synthetic peptide
ERSSPTS

SEQ ID NO: 75 - protein, 7 aa, synthetic construct
  REGION 1..7: note = Description of Artificial Sequence: Synthetic peptide
DGTTRST

SEQ ID NO: 76 - protein, 7 aa, synthetic construct
  REGION 1..7: note = Description of Artificial Sequence: Synthetic peptide
TTNKGAS

SEQ ID NO: 77 - protein, 7 aa, synthetic construct
  REGION 1..7: note = Description of Artificial Sequence: Synthetic peptide
AGSGNTS

SEQ ID NO: 78 - protein, 7 aa, synthetic construct
  REGION 1..7: note = Description of Artificial Sequence: Synthetic peptide
QAGNGSK

SEQ ID NO: 79 - protein, 7 aa, synthetic construct
  REGION 1..7: note = Description of Artificial Sequence: Synthetic peptide
QQGKQSV

SEQ ID NO: 80 - protein, 7 aa, synthetic construct
  REGION 1..7: note = Description of Artificial Sequence: Synthetic peptide
TNGSKPL

SEQ ID NO: 81 - protein, 7 aa, synthetic construct
  REGION 1..7: note = Description of Artificial Sequence: Synthetic peptide
TDRSKSP

SEQ ID NO: 82 - protein, 7 aa, synthetic construct
  REGION 1..7: note = Description of Artificial Sequence: Synthetic peptide
DRTEKSN

SEQ ID NO: 83 - protein, 7 aa, synthetic construct
  REGION 1..7: note = Description of Artificial Sequence: Synthetic peptide
GGGQKSS

SEQ ID NO: 84 - protein, 7 aa, synthetic construct
  REGION 1..7: note = Description of Artificial Sequence: Synthetic peptide
STNSKSA

SEQ ID NO: 85 - protein, 7 aa, synthetic construct
  REGION 1..7: note = Description of Artificial Sequence: Synthetic peptide
SNTKSAG

SEQ ID NO: 86 - protein, 7 aa, synthetic construct
  REGION 1..7: note = Description of Artificial Sequence: Synthetic peptide
QGTNATV

SEQ ID NO: 87 - protein, 7 aa, synthetic construct
  REGION 1..7: note = Description of Artificial Sequence: Synthetic peptide
NTTRESG

SEQ ID NO: 88 - protein, 7 aa, synthetic construct
  REGION 1..7: note = Description of Artificial Sequence: Synthetic peptide
GSGKTAA

SEQ ID NO: 89 - protein, 7 aa, synthetic construct
  REGION 1..7: note = Description of Artificial Sequence: Synthetic peptide
GSQSPSS

SEQ ID NO: 90 - protein, 7 aa, synthetic construct
  REGION 1..7: note = Description of Artificial Sequence: Synthetic peptide
DQHSARN

SEQ ID NO: 91 - protein, 7 aa, synthetic construct
  REGION 1..7: note = Description of Artificial Sequence: Synthetic peptide
QATTKPS

SEQ ID NO: 92 - protein, 7 aa, synthetic construct
  REGION 1..7: note = Description of Artificial Sequence: Synthetic peptide
TTGSAAV

SEQ ID NO: 93 - protein, 7 aa, synthetic construct
  REGION 1..7: note = Description of Artificial Sequence: Synthetic peptide
TTTKANA

SEQ ID NO: 94 - protein, 7 aa, synthetic construct
  REGION 1..7: note = Description of Artificial Sequence: Synthetic peptide
SQSQTNS

SEQ ID NO: 95 - protein, 7 aa, synthetic construct
  REGION 1..7: note = Description of Artificial Sequence: Synthetic peptide
QTSEAGR

SEQ ID NO: 96 - protein, 7 aa, synthetic construct
  REGION 1..7: note = Description of Artificial Sequence: Synthetic peptide
SSQQSAK

SEQ ID NO: 97 - protein, 7 aa, synthetic construct
  REGION 1..7: note = Description of Artificial Sequence: Synthetic peptide
GNGKTLQ

SEQ ID NO: 98 - protein, 7 aa, synthetic construct
  REGION 1..7: note = Description of Artificial Sequence: Synthetic peptide
GIPKGSQ

SEQ ID NO: 99 - protein, 7 aa, synthetic construct
  REGION 1..7: note = Description of Artificial Sequence: Synthetic peptide
GTGGSAQ

SEQ ID NO: 100 - protein, 7 aa, synthetic construct
  REGION 1..7: note = Description of Artificial Sequence: Synthetic peptide
SASQKVQ

SEQ ID NO: 101 - protein, 7 aa, synthetic construct
  REGION 1..7: note = Description of Artificial Sequence: Synthetic peptide
GSGHDRT

SEQ ID NO: 102 - protein, 7 aa, synthetic construct
  REGION 1..7: note = Description of Artificial Sequence: Synthetic peptide
ATDKSSK

SEQ ID NO: 103 - protein, 7 aa, synthetic construct
  REGION 1..7: note = Description of Artificial Sequence: Synthetic peptide
ERGESQK

SEQ ID NO: 104 - protein, 7 aa, synthetic construct
  REGION 1..7: note = Description of Artificial Sequence: Synthetic peptide
DNTASPR

SEQ ID NO: 105 - protein, 7 aa, synthetic construct
  REGION 1..7: note = Description of Artificial Sequence: Synthetic peptide
AAGAPGK

SEQ ID NO: 106 - protein, 7 aa, synthetic construct
  REGION 1..7: note = Description of Artificial Sequence: Synthetic peptide
MTSSSAK

SEQ ID NO: 107 - protein, 7 aa, synthetic construct
  REGION 1..7: note = Description of Artificial Sequence: Synthetic peptide
TQSSPPK

SEQ ID NO: 108 - protein, 7 aa, synthetic construct
  REGION 1..7: note = Description of Artificial Sequence: Synthetic peptide
DGSTANR

SEQ ID NO: 109 - protein, 7 aa, synthetic construct
  REGION 1..7: note = Description of Artificial Sequence: Synthetic peptide
QGSATTL

SEQ ID NO: 110 - protein, 7 aa, synthetic construct
  REGION 1..7: note = Description of Artificial Sequence: Synthetic peptide
QNGSDRT

SEQ ID NO: 111 - protein, 7 aa, synthetic construct
  REGION 1..7: note = Description of Artificial Sequence: Synthetic peptide
NSASNAK

SEQ ID NO: 112 - protein, 7 aa, synthetic construct
  REGION 1..7: note = Description of Artificial Sequence: Synthetic peptide
QTSKTAS

SEQ ID NO: 113 - protein, 7 aa, synthetic construct
  REGION 1..7: note = Description of Artificial Sequence: Synthetic peptide
QNGNGHR

SEQ ID NO: 114 - protein, 7 aa, synthetic construct
  REGION 1..7: note = Description of Artificial Sequence: Synthetic peptide
GSGTSAV

SEQ ID NO: 115 - protein, 7 aa, synthetic construct
  REGION 1..7: note = Description of Artificial Sequence: Synthetic peptide
GNTPSSV

SEQ ID NO: 116 - protein, 7 aa, synthetic construct
  REGION 1..7: note = Description of Artificial Sequence: Synthetic peptide
GTQKENT

SEQ ID NO: 117 - protein, 7 aa, synthetic construct
  REGION 1..7: note = Description of Artificial Sequence: Synthetic peptide
ARDSSVL

SEQ ID NO: 118 - protein, 7 aa, synthetic construct
  REGION 1..7: note = Description of Artificial Sequence: Synthetic peptide
EGNSNHT

SEQ ID NO: 119 - protein, 7 aa, synthetic construct
  REGION 1..7: note = Description of Artificial Sequence: Synthetic peptide
GTGSKPS

SEQ ID NO: 120 - protein, 7 aa, synthetic construct
  REGION 1..7: note = Description of Artificial Sequence: Synthetic peptide
ATGSTNN

SEQ ID NO: 121 - protein, 7 aa, synthetic construct
  REGION 1..7: note = Description of Artificial Sequence: Synthetic peptide
GGSRPSE

SEQ ID NO: 122 - protein, 7 aa, synthetic construct
  REGION 1..7: note = Description of Artificial Sequence: Synthetic peptide
LGSKTSA

SEQ ID NO: 123 - protein, 7 aa, synthetic construct
  REGION 1..7: note = Description of Artificial Sequence: Synthetic peptide
GQNSKPA

SEQ ID NO: 124 - protein, 7 aa, synthetic construct
  REGION 1..7: note = Description of Artificial Sequence: Synthetic peptide
STNTKST

SEQ ID NO: 125 - protein, 7 aa, synthetic construct
  REGION 1..7: note = Description of Artificial Sequence: Synthetic peptide
QGTSNGS

SEQ ID NO: 126 - protein, 7 aa, synthetic construct
  REGION 1..7: note = Description of Artificial Sequence: Synthetic peptide
QANDKMG

SEQ ID NO: 127 - protein, 7 aa, synthetic construct
  REGION 1..7: note = Description of Artificial Sequence: Synthetic peptide
RNGNEVK

SEQ ID NO: 128 - protein, 7 aa, synthetic construct
  REGION 1..7: note = Description of Artificial Sequence: Synthetic peptide
SAPGSSK

SEQ ID NO: 129 - protein, 7 aa, synthetic construct
  REGION 1..7: note = Description of Artificial Sequence: Synthetic peptide
TASSKHE

SEQ ID NO: 130 - protein, 7 aa, synthetic construct
  REGION 1..7: note = Description of Artificial Sequence: Synthetic peptide
GGGDKSK

SEQ ID NO: 131 - protein, 7 aa, synthetic construct
  REGION 1..7: note = Description of Artificial Sequence: Synthetic peptide
SGGAHPS

SEQ ID NO: 132 - protein, 7 aa, synthetic construct
  REGION 1..7: note = Description of Artificial Sequence: Synthetic peptide
TSGTNNV

SEQ ID NO: 133 - protein, 7 aa, synthetic construct
  REGION 1..7: note = Description of Artificial Sequence: Synthetic peptide
STASTPS

SEQ ID NO: 134 - protein, 7 aa, synthetic construct
  REGION 1..7: note = Description of Artificial Sequence: Synthetic peptide
QGTGSTT

SEQ ID NO: 135 - protein, 7 aa, synthetic construct
  REGION 1..7: note = Description of Artificial Sequence: Synthetic peptide
QGGGSPT

SEQ ID NO: 136 - protein, 7 aa, synthetic construct
  REGION 1..7: note = Description of Artificial Sequence: Synthetic peptide
EAGSKSQ

SEQ ID NO: 137 - protein, 7 aa, synthetic construct
  REGION 1..7: note = Description of Artificial Sequence: Synthetic peptide
GGNGKDR

SEQ ID NO: 138 - protein, 7 aa, synthetic construct
  REGION 1..7: note = Description of Artificial Sequence: Synthetic peptide
VSGNGNS

SEQ ID NO: 139 - protein, 7 aa, synthetic construct
  REGION 1..7: note = Description of Artificial Sequence: Synthetic peptide
GQGKDKS

SEQ ID NO: 140 - protein, 7 aa, synthetic construct
  REGION 1..7: note = Description of Artificial Sequence: Synthetic peptide
TSSSPHT

SEQ ID NO: 141 - protein, 7 aa, synthetic construct
  REGION 1..7: note = Description of Artificial Sequence: Synthetic peptide
DSSSSNR

SEQ ID NO: 142 - protein, 7 aa, synthetic construct
  REGION 1..7: note = Description of Artificial Sequence: Synthetic peptide
DGQKGAS

SEQ ID NO: 143 - protein, 7 aa, synthetic construct
  REGION 1..7: note = Description of Artificial Sequence: Synthetic peptide
SQTKSSN

SEQ ID NO: 144 - protein, 7 aa, synthetic construct
  REGION 1..7: note = Description of Artificial Sequence: Synthetic peptide
SSTGKSV

SEQ ID NO: 145 - protein, 7 aa, synthetic construct
  REGION 1..7: note = Description of Artificial Sequence: Synthetic peptide
TTKSQAQ

SEQ ID NO: 146 - protein, 7 aa, synthetic construct
  REGION 1..7: note = Description of Artificial Sequence: Synthetic peptide
SGNKSSQ

SEQ ID NO: 147 - protein, 7 aa, synthetic construct
  REGION 1..7: note = Description of Artificial Sequence: Synthetic peptide
SGRTGAG

SEQ ID NO: 148 - protein, 7 aa, synthetic construct
  REGION 1..7: note = Description of Artificial Sequence: Synthetic peptide
DSSTKPM

SEQ ID NO: 149 - protein, 7 aa, synthetic construct
  REGION 1..7: note = Description of Artificial Sequence: Synthetic peptide
TSSPQSK

SEQ ID NO: 150 - protein, 7 aa, synthetic construct
  REGION 1..7: note = Description of Artificial Sequence: Synthetic peptide
TTSTTPK

SEQ ID NO: 151 - protein, 7 aa, synthetic construct
  REGION 1..7: note = Description of Artificial Sequence: Synthetic peptide
NSSDKGK

SEQ ID NO: 152 - protein, 7 aa, synthetic construct
  REGION 1..7: note = Description of Artificial Sequence: Synthetic peptide
GTQGTGT

SEQ ID NO: 153 - protein, 7 aa, synthetic construct
  REGION 1..7: note = Description of Artificial Sequence: Synthetic peptide
EHEGKPI

SEQ ID NO: 154 - protein, 7 aa, synthetic construct
  REGION 1..7: note = Description of Artificial Sequence: Synthetic peptide
SAVSSNK

SEQ ID NO: 155 - protein, 7 aa, synthetic construct
  REGION 1..7: note = Description of Artificial Sequence: Synthetic peptide
ADANKQS

SEQ ID NO: 156 - protein, 7 aa, synthetic construct
  REGION 1..7: note = Description of Artificial Sequence: Synthetic peptide
DQVNKPV

SEQ ID NO: 157 - protein, 7 aa, synthetic construct
  REGION 1..7: note = Description of Artificial Sequence: Synthetic peptide
EGTTPSR

SEQ ID NO: 158 - protein, 7 aa, synthetic construct
  REGION 1..7: note = Description of Artificial Sequence: Synthetic peptide
GGAKSSE

SEQ ID NO: 159 - protein, 7 aa, synthetic construct
  REGION 1..7: note = Description of Artificial Sequence: Synthetic peptide
SGAGTAT

SEQ ID NO: 160 - protein, 7 aa, synthetic construct
  REGION 1..7: note = Description of Artificial Sequence: Synthetic peptide
EGHKGAG

SEQ ID NO: 161 - protein, 7 aa, synthetic construct
  REGION 1..7: note = Description of Artificial Sequence: Synthetic peptide
SSNTSTA

SEQ ID NO: 162 - protein, 7 aa, synthetic construct
  REGION 1..7: note = Description of Artificial Sequence: Synthetic peptide
STSSKSQ

SEQ ID NO: 163 - protein, 7 aa, synthetic construct
  REGION 1..7: note = Description of Artificial Sequence: Synthetic peptide
ASSKPGV

SEQ ID NO: 164 - protein, 7 aa, synthetic construct
  REGION 1..7: note = Description of Artificial Sequence: Synthetic peptide
EGSKTSS

SEQ ID NO: 165 - protein, 7 aa, synthetic construct
  REGION 1..7: note = Description of Artificial Sequence: Synthetic peptide
DGVSKTR

SEQ ID NO: 166 - protein, 7 aa, synthetic construct
  REGION 1..7: note = Description of Artificial Sequence: Synthetic peptide
GAGSSSK

SEQ ID NO: 167 - protein, 7 aa, synthetic construct
  REGION 1..7: note = Description of Artificial Sequence: Synthetic peptide
GGTSKSS

SEQ ID NO: 168 - protein, 7 aa, synthetic construct
  REGION 1..7: note = Description of Artificial Sequence: Synthetic peptide
LGSSKNV

SEQ ID NO: 169 - protein, 7 aa, synthetic construct
  REGION 1..7: note = Description of Artificial Sequence: Synthetic peptide
NSSGKSS

SEQ ID NO: 170 - protein, 7 aa, synthetic construct
  REGION 1..7: note = Description of Artificial Sequence: Synthetic peptide
TGMKDAK

SEQ ID NO: 171 - protein, 7 aa, synthetic construct
  REGION 1..7: note = Description of Artificial Sequence: Synthetic peptide
ADHGKVT

SEQ ID NO: 172 - protein, 7 aa, synthetic construct
  REGION 1..7: note = Description of Artificial Sequence: Synthetic peptide
GAEGSVK

SEQ ID NO: 173 - protein, 7 aa, synthetic construct
  REGION 1..7: note = Description of Artificial Sequence: Synthetic peptide
QGSSQVT

SEQ ID NO: 174 - protein, 7 aa, synthetic construct
  REGION 1..7: note = Description of Artificial Sequence: Synthetic peptide
NSKTGSA

SEQ ID NO: 175 - protein, 7 aa, synthetic construct
  REGION 1..7: note = Description of Artificial Sequence: Synthetic peptide
TSDRVST

SEQ ID NO: 176 - protein, 7 aa, synthetic construct
  REGION 1..7: note = Description of Artificial Sequence: Synthetic peptide
TGERKLE

SEQ ID NO: 177 - protein, 7 aa, synthetic construct
  REGION 1..7: note = Description of Artificial Sequence: Synthetic peptide
TPTQTPV

SEQ ID NO: 178 - protein, 7 aa, synthetic construct
  REGION 1..7: note = Description of Artificial Sequence: Synthetic peptide
SGNTSNH

SEQ ID NO: 179 - protein, 7 aa, synthetic construct
  REGION 1..7: note = Description of Artificial Sequence: Synthetic peptide
GGANERS

SEQ ID NO: 180 - protein, 7 aa, synthetic construct
  REGION 1..7: note = Description of Artificial Sequence: Synthetic peptide
TGSQSMQ

SEQ ID NO: 181 - protein, 7 aa, synthetic construct
  REGION 1..7: note = Description of Artificial Sequence: Synthetic peptide
HGTERAS

SEQ ID NO: 182 - protein, 7 aa, synthetic construct
  REGION 1..7: note = Description of Artificial Sequence: Synthetic peptide
QSDTGNK

SEQ ID NO: 183 - protein, 7 aa, synthetic construct
  REGION 1..7: note = Description of Artificial Sequence: Synthetic peptide
GAGERSK

SEQ ID NO: 184 - protein, 7 aa, synthetic construct
  REGION 1..7: note = Description of Artificial Sequence: Synthetic peptide
TGGQTST

SEQ ID NO: 185 - protein, 7 aa, synthetic construct
  REGION 1..7: note = Description of Artificial Sequence: Synthetic peptide
GETRTQS

SEQ ID NO: 186 - protein, 7 aa, synthetic construct
  REGION 1..7: note = Description of Artificial Sequence: Synthetic peptide
SGANHPS

SEQ ID NO: 187 - protein, 7 aa, synthetic construct
  REGION 1..7: note = Description of Artificial Sequence: Synthetic peptide
GASKGSD

SEQ ID NO: 188 - protein, 7 aa, synthetic construct
  REGION 1..7: note = Description of Artificial Sequence: Synthetic peptide
AQTSKTE

SEQ ID NO: 189 - protein, 7 aa, synthetic construct
  REGION 1..7: note = Description of Artificial Sequence: Synthetic peptide
GSGSPTR

SEQ ID NO: 190 - protein, 7 aa, synthetic construct
  REGION 1..7: note = Description of Artificial Sequence: Synthetic peptide
GLSKPSS

SEQ ID NO: 191 - protein, 7 aa, synthetic construct
  REGION 1..7: note = Description of Artificial Sequence: Synthetic peptide
GTTTRDG

SEQ ID NO: 192 - protein, 7 aa, synthetic construct
  REGION 1..7: note = Description of Artificial Sequence: Synthetic peptide
QGQTKPS

SEQ ID NO: 193 - protein, 7 aa, synthetic construct
  REGION 1..7: note = Description of Artificial Sequence: Synthetic peptide
GADKNVR

SEQ ID NO: 194 - protein, 7 aa, synthetic construct
  REGION 1..7: note = Description of Artificial Sequence: Synthetic peptide
SSSPQRV

SEQ ID NO: 195 - protein, 7 aa, synthetic construct
  REGION 1..7: note = Description of Artificial Sequence: Synthetic peptide
GNAGSVK

SEQ ID NO: 196 - protein, 7 aa, synthetic construct
  REGION 1..7: note = Description of Artificial Sequence: Synthetic peptide
NTGQHAT

SEQ ID NO: 197 - protein, 7 aa, synthetic construct
  REGION 1..7: note = Description of Artificial Sequence: Synthetic peptide
GQGSPKA

SEQ ID NO: 198 - protein, 7 aa, synthetic construct
  REGION 1..7: note = Description of Artificial Sequence: Synthetic peptide
QGDKHST

SEQ ID NO: 199 - protein, 7 aa, synthetic construct
  REGION 1..7: note = Description of Artificial Sequence: Synthetic peptide
GTGTKQV

SEQ ID NO: 200 - protein, 7 aa, synthetic construct
  REGION 1..7: note = Description of Artificial Sequence: Synthetic peptide
NCSGQNQ

SEQ ID NO: 201 - protein, 7 aa, synthetic construct
  REGION 1..7: note = Description of Artificial Sequence: Synthetic peptide
LTAKGTN

SEQ ID NO: 202 - protein, 7 aa, synthetic construct
  REGION 1..7: note = Description of Artificial Sequence: Synthetic peptide
RSSKEAG

SEQ ID NO: 203 - protein, 7 aa, synthetic construct
  REGION 1..7: note = Description of Artificial Sequence: Synthetic peptide
SGASPSS

SEQ ID NO: 204 - protein, 7 aa, synthetic construct
  REGION 1..7: note = Description of Artificial Sequence: Synthetic peptide
GKDSKPF

SEQ ID NO: 205 - protein, 7 aa, synthetic construct
  REGION 1..7: note = Description of Artificial Sequence: Synthetic peptide
GNAKSAL

SEQ ID NO: 206 - protein, 7 aa, synthetic construct
  REGION 1..7: note = Description of Artificial Sequence: Synthetic peptide
DGSQKFS

SEQ ID NO: 207 - protein, 7 aa, synthetic construct
  REGION 1..7: note = Description of Artificial Sequence: Synthetic peptide
DPSTQPK

SEQ ID NO: 208 - protein, 7 aa, synthetic construct
  REGION 1..7: note = Description of Artificial Sequence: Synthetic peptide
GGTPSLG

SEQ ID NO: 209 - protein, 7 aa, synthetic construct
  REGION 1..7: note = Description of Artificial Sequence: Synthetic peptide
MSRSPTE

SEQ ID NO: 210 - protein, 7 aa, synthetic construct
  REGION 1..7: note = Description of Artificial Sequence: Synthetic peptide
SNGNSPR

SEQ ID NO: 211 - protein, 7 aa, synthetic construct
  REGION 1..7: note = Description of Artificial Sequence: Synthetic peptide
STTAPPQ

SEQ ID NO: 212 - protein, 7 aa, synthetic construct
  REGION 1..7: note = Description of Artificial Sequence: Synthetic peptide
TVSANQK

SEQ ID NO: 213 - protein, 7 aa, synthetic construct
  REGION 1..7: note = Description of Artificial Sequence: Synthetic peptide
SQGKGSL

SEQ ID NO: 214 - protein, 7 aa, synthetic construct
  REGION 1..7: note = Description of Artificial Sequence: Synthetic peptide
VGTGKDG

SEQ ID NO: 215 - protein, 7 aa, synthetic construct
  REGION 1..7: note = Description of Artificial Sequence: Synthetic peptide
GSGNKTT

SEQ ID NO: 216 - protein, 7 aa, synthetic construct
  REGION 1..7: note = Description of Artificial Sequence: Synthetic peptide
NSGGGAK

SEQ ID NO: 217 - protein, 7 aa, synthetic construct
  REGION 1..7: note = Description of Artificial Sequence: Synthetic peptide
SGSKSLG

SEQ ID NO: 218 - protein, 7 aa, synthetic construct
  REGION 1..7: note = Description of Artificial Sequence: Synthetic peptide
SGGSKGS

SEQ ID NO: 219 - protein, 7 aa, synthetic construct
  REGION 1..7: note = Description of Artificial Sequence: Synthetic peptide
VGEQRGT

SEQ ID NO: 220 - protein, 7 aa, synthetic construct
  REGION 1..7: note = Description of Artificial Sequence: Synthetic peptide
RSDGKMA

SEQ ID NO: 221 - protein, 7 aa, synthetic construct
  REGION 1..7: note = Description of Artificial Sequence: Synthetic peptide
SKGSSNE

SEQ ID NO: 222 - protein, 7 aa, synthetic construct
  REGION 1..7: note = Description of Artificial Sequence: Synthetic peptide
GRDGKPT

SEQ ID NO: 223 - protein, 7 aa, synthetic construct
  REGION 1..7: note = Description of Artificial Sequence: Synthetic peptide
SGGTPSN

SEQ ID NO: 224 - protein, 7 aa, synthetic construct
  REGION 1..7: note = Description of Artificial Sequence: Synthetic peptide
SSSTKAV

SEQ ID NO: 225 - protein, 7 aa, synthetic construct
  REGION 1..7: note = Description of Artificial Sequence: Synthetic peptide
RSQKPSE

SEQ ID NO: 226 - protein, 7 aa, synthetic construct
  REGION 1..7: note = Description of Artificial Sequence: Synthetic peptide
SQPDPRT

SEQ ID NO: 227 - protein, 7 aa, synthetic construct
  REGION 1..7: note = Description of Artificial Sequence: Synthetic peptide
DRREAST

SEQ ID NO: 228 - protein, 7 aa, synthetic construct
  REGION 1..7: note = Description of Artificial Sequence: Synthetic peptide
DQSGTTR

SEQ ID NO: 229 - protein, 7 aa, synthetic construct
  REGION 1..7: note = Description of Artificial Sequence: Synthetic peptide
SSDKGRN

SEQ ID NO: 230 - protein, 7 aa, synthetic construct
  REGION 1..7: note = Description of Artificial Sequence: Synthetic peptide
KGASHNE

SEQ ID NO: 231 - protein, 7 aa, synthetic construct
  REGION 1..7: note = Description of Artificial Sequence: Synthetic peptide
SSSKQAQ

SEQ ID NO: 232 - protein, 7 aa, synthetic construct
  REGION 1..7: note = Description of Artificial Sequence: Synthetic peptide
QMEKSNS

SEQ ID NO: 233 - protein, 7 aa, synthetic construct
  REGION 1..7: note = Description of Artificial Sequence: Synthetic peptide
AAASQSS

SEQ ID NO: 234 - protein, 7 aa, synthetic construct
  REGION 1..7: note = Description of Artificial Sequence: Synthetic peptide
TRNQTSS

SEQ ID NO: 235 - protein, 7 aa, synthetic construct
  REGION 1..7: note = Description of Artificial Sequence: Synthetic peptide
DTSHKAS

SEQ ID NO: 236 - protein, 7 aa, synthetic construct
  REGION 1..7: note = Description of Artificial Sequence: Synthetic peptide
DSNTKMV

SEQ ID NO: 237 - protein, 7 aa, synthetic construct
  REGION 1..7: note = Description of Artificial Sequence: Synthetic peptide
SVSTGNK

SEQ ID NO: 238 - protein, 7 aa, synthetic construct
  REGION 1..7: note = Description of Artificial Sequence: Synthetic peptide
HAGNNNA

SEQ ID NO: 239 - protein, 7 aa, synthetic construct
  REGION 1..7: note = Description of Artificial Sequence: Synthetic peptide
STGSPGN

SEQ ID NO: 240 - protein, 7 aa, synthetic construct
  REGION 1..7: note = Description of Artificial Sequence: Synthetic peptide
DHPSGKH

SEQ ID NO: 241 - protein, 7 aa, synthetic construct
  REGION 1..7: note = Description of Artificial Sequence: Synthetic peptide
DNTKAGM

SEQ ID NO: 242 - protein, 7 aa, synthetic construct
  REGION 1..7: note = Description of Artificial Sequence: Synthetic peptide
QGSSKMT

SEQ ID NO: 243 - protein, 7 aa, synthetic construct
  REGION 1..7: note = Description of Artificial Sequence: Synthetic peptide
ENRSTSV

SEQ ID NO: 244 - protein, 7 aa, synthetic construct
  REGION 1..7: note = Description of Artificial Sequence: Synthetic peptide
SGDRGVQ

SEQ ID NO: 245 - protein, 7 aa, synthetic construct
  REGION 1..7: note = Description of Artificial Sequence: Synthetic peptide
NSEATPR

SEQ ID NO: 246 - protein, 7 aa, synthetic construct
  REGION 1..7: note = Description of Artificial Sequence: Synthetic peptide
MGTERNV

SEQ ID NO: 247 - protein, 7 aa, synthetic construct
  REGION 1..7: note = Description of Artificial Sequence: Synthetic peptide
GGTSSPT

SEQ ID NO: 248 - protein, 7 aa, synthetic construct
  REGION 1..7: note = Description of Artificial Sequence: Synthetic peptide
AVGSKSN

SEQ ID NO: 249 - protein, 7 aa, synthetic construct
  REGION 1..7: note = Description of Artificial Sequence: Synthetic peptide
AGTNKAS

SEQ ID NO: 250 - protein, 7 aa, synthetic construct
  REGION 1..7: note = Description of Artificial Sequence: Synthetic peptide
STGKTNT

SEQ ID NO: 251 - protein, 7 aa, synthetic construct
  REGION 1..7: note = Description of Artificial Sequence: Synthetic peptide
DPSKTAL

SEQ ID NO: 252 - protein, 7 aa, synthetic construct
  REGION 1..7: note = Description of Artificial Sequence: Synthetic peptide
GTSGKSI

SEQ ID NO: 253 - protein, 7 aa, synthetic construct
  REGION 1..7: note = Description of Artificial Sequence: Synthetic peptide
GSGSPIK

SEQ ID NO: 254 - protein, 7 aa, synthetic construct
  REGION 1..7: note = Description of Artificial Sequence: Synthetic peptide
GGSQTKI

SEQ ID NO: 255 - protein, 7 aa, synthetic construct
  REGION 1..7: note = Description of Artificial Sequence: Synthetic peptide
NTGTSAR

SEQ ID NO: 256 - protein, 7 aa, synthetic construct
  REGION 1..7: note = Description of Artificial Sequence: Synthetic peptide
TGNTSQS

SEQ ID NO: 257 - protein, 7 aa, synthetic construct
  REGION 1..7: note = Description of Artificial Sequence: Synthetic peptide
GRGSGSS

SEQ ID NO: 258 - protein, 7 aa, synthetic construct
  REGION 1..7: note = Description of Artificial Sequence: Synthetic peptide
SGERNPV

SEQ ID NO: 259 - protein, 7 aa, synthetic construct
  REGION 1..7: note = Description of Artificial Sequence: Synthetic peptide
ESKPSSV

SEQ ID NO: 260 - protein, 7 aa, synthetic construct
  REGION 1..7: note = Description of Artificial Sequence: Synthetic peptide
TTSGKPP

SEQ ID NO: 261 - protein, 7 aa, synthetic construct
  REGION 1..7: note = Description of Artificial Sequence: Synthetic peptide
GNGHAPT

SEQ ID NO: 262 - protein, 7 aa, synthetic construct
  REGION 1..7: note = Description of Artificial Sequence: Synthetic peptide
SQASKPI

SEQ ID NO: 263 - protein, 7 aa, synthetic construct
  REGION 1..7: note = Description of Artificial Sequence: Synthetic peptide
QGDSNAR

SEQ ID NO: 264 - protein, 7 aa, synthetic construct
  REGION 1..7: note = Description of Artificial Sequence: Synthetic peptide
FPATKQG

SEQ ID NO: 265 - protein, 7 aa, synthetic construct
  REGION 1..7: note = Description of Artificial Sequence: Synthetic peptide
GSAASVK

SEQ ID NO: 266 - protein, 7 aa, synthetic construct
  REGION 1..7: note = Description of Artificial Sequence: Synthetic peptide
TGAGGTA

SEQ ID NO: 267 - protein, 7 aa, synthetic construct
  REGION 1..7: note = Description of Artificial Sequence: Synthetic peptide
QQTGPTH

SEQ ID NO: 268 - protein, 7 aa, synthetic construct
  REGION 1..7: note = Description of Artificial Sequence: Synthetic peptide
TREGKGI

SEQ ID NO: 269 - protein, 7 aa, synthetic construct
  REGION 1..7: note = Description of Artificial Sequence: Synthetic peptide
SSTTTGG

SEQ ID NO: 270 - protein, 7 aa, synthetic construct
  REGION 1..7: note = Description of Artificial Sequence: Synthetic peptide
GQGNSTK

SEQ ID NO: 271 - protein, 7 aa, synthetic construct
  REGION 1..7: note = Description of Artificial Sequence: Synthetic peptide
GSMSPSR

SEQ ID NO: 272 - protein, 7 aa, synthetic construct
  REGION 1..7: note = Description of Artificial Sequence: Synthetic peptide
SSQTTAK

SEQ ID NO: 273 - protein, 7 aa, synthetic construct
  REGION 1..7: note = Description of Artificial Sequence: Synthetic peptide
GNGGSNR

SEQ ID NO: 274 - protein, 7 aa, synthetic construct
  REGION 1..7: note = Description of Artificial Sequence: Synthetic peptide
NSGKSPV

SEQ ID NO: 275 - protein, 7 aa, synthetic construct
  REGION 1..7: note = Description of Artificial Sequence: Synthetic peptide
GDNKSSY

SEQ ID NO: 276 - protein, 7 aa, synthetic construct
  REGION 1..7: note = Description of Artificial Sequence: Synthetic peptide
EGKSDHA

SEQ ID NO: 277 - protein, 7 aa, synthetic construct
  REGION 1..7: note = Description of Artificial Sequence: Synthetic peptide
NNGAKAG

SEQ ID NO: 278 - protein, 7 aa, synthetic construct
  REGION 1..7: note = Description of Artificial Sequence: Synthetic peptide
GSKPGTS

SEQ ID NO: 279 - protein, 7 aa, synthetic construct
  REGION 1..7: note = Description of Artificial Sequence: Synthetic peptide
AQTKSSV

SEQ ID NO: 280 - protein, 7 aa, synthetic construct
  REGION 1..7: note = Description of Artificial Sequence: Synthetic peptide
STGSHPA

SEQ ID NO: 281 - protein, 7 aa, synthetic construct
  REGION 1..7: note = Description of Artificial Sequence: Synthetic peptide
SMSSKSA

SEQ ID NO: 282 - protein, 7 aa, synthetic construct
  REGION 1..7: note = Description of Artificial Sequence: Synthetic peptide
VSTSKAG

SEQ ID NO: 283 - protein, 7 aa, synthetic construct
  REGION 1..7: note = Description of Artificial Sequence: Synthetic peptide
TSGTANS

SEQ ID NO: 284 - protein, 7 aa, synthetic construct
  REGION 1..7: note = Description of Artificial Sequence: Synthetic peptide
IGGSGSA

SEQ ID NO: 285 - protein, 7 aa, synthetic construct
  REGION 1..7: note = Description of Artificial Sequence: Synthetic peptide
GQNKGAS

SEQ ID NO: 286 - protein, 7 aa, synthetic construct
  REGION 1..7: note = Description of Artificial Sequence: Synthetic peptide
DRAGSSV

SEQ ID NO: 287 - protein, 7 aa, synthetic construct
  REGION 1..7: note = Description of Artificial Sequence: Synthetic peptide
EGRGTSS

SEQ ID NO: 288 - protein, 7 aa, synthetic construct
  REGION 1..7: note = Description of Artificial Sequence: Synthetic peptide
HSSSKSS

SEQ ID NO: 289 - protein, 7 aa, synthetic construct
  REGION 1..7: note = Description of Artificial Sequence: Synthetic peptide
TNSQTHG

SEQ ID NO: 290 - protein, 7 aa, synthetic construct
  REGION 1..7: note = Description of Artificial Sequence: Synthetic peptide
NGGKPNA

SEQ ID NO: 291 - protein, 7 aa, synthetic construct
  REGION 1..7: note = Description of Artificial Sequence: Synthetic peptide
NGASKSS

SEQ ID NO: 292 - protein, 7 aa, synthetic construct
  REGION 1..7: note = Description of Artificial Sequence: Synthetic peptide
QTGEKAR

SEQ ID NO: 293 - protein, 7 aa, synthetic construct
  REGION 1..7: note = Description of Artificial Sequence: Synthetic peptide
DDTKSNS

SEQ ID NO: 294 - protein, 7 aa, synthetic construct
  REGION 1..7: note = Description of Artificial Sequence: Synthetic peptide
VQGNPIS

SEQ ID NO: 295 - protein, 7 aa, synthetic construct
  REGION 1..7: note = Description of Artificial Sequence: Synthetic peptide
SKSTTPT

SEQ ID NO: 296 - protein, 7 aa, synthetic construct
  REGION 1..7: note = Description of Artificial Sequence: Synthetic peptide
SSNGVMK

SEQ ID NO: 297 - protein, 7 aa, synthetic construct
  REGION 1..7: note = Description of Artificial Sequence: Synthetic peptide
AGSKGKD

SEQ ID NO: 298 - protein, 7 aa, synthetic construct
  REGION 1..7: note = Description of Artificial Sequence: Synthetic peptide
DPDKSRS

SEQ ID NO: 299 - protein, 7 aa, synthetic construct
  REGION 1..7: note = Description of Artificial Sequence: Synthetic peptide
SPSGDHR

SEQ ID NO: 300 - protein, 7 aa, synthetic construct
  REGION 1..7: note = Description of Artificial Sequence: Synthetic peptide
LPTANSS

SEQ ID NO: 301 - protein, 7 aa, synthetic construct
  REGION 1..7: note = Description of Artificial Sequence: Synthetic peptide
SSDQARA

SEQ ID NO: 302 - protein, 7 aa, synthetic construct
  REGION 1..7: note = Description of Artificial Sequence: Synthetic peptide
SGVNTPT

SEQ ID NO: 303 - protein, 7 aa, synthetic construct
  REGION 1..7: note = Description of Artificial Sequence: Synthetic peptide
SSGREAS

SEQ ID NO: 304 - protein, 7 aa, synthetic construct
  REGION 1..7: note = Description of Artificial Sequence: Synthetic peptide
GSSKGPS

SEQ ID NO: 305 - protein, 7 aa, synthetic construct
  REGION 1..7: note = Description of Artificial Sequence: Synthetic peptide
GGSGSVK

SEQ ID NO: 306 - protein, 7 aa, synthetic construct
  REGION 1..7: note = Description of Artificial Sequence: Synthetic peptide
GEHKPSN

SEQ ID NO: 307 - protein, 7 aa, synthetic construct
  REGION 1..7: note = Description of Artificial Sequence: Synthetic peptide
LSAKEGS

SEQ ID NO: 308 - protein, 7 aa, synthetic construct
  REGION 1..7: note = Description of Artificial Sequence: Synthetic peptide
MSSGSQG

SEQ ID NO: 309 - protein, 7 aa, synthetic construct
  REGION 1..7: note = Description of Artificial Sequence: Synthetic peptide
HNNSKVE

SEQ ID NO: 310 - protein, 7 aa, synthetic construct
  REGION 1..7: note = Description of Artificial Sequence: Synthetic peptide
TSGPALK

SEQ ID NO: 311 - protein, 7 aa, synthetic construct
  REGION 1..7: note = Description of Artificial Sequence: Synthetic peptide
LDSKPVH

SEQ ID NO: 312 - protein, 7 aa, synthetic construct
  REGION 1..7: note = Description of Artificial Sequence: Synthetic peptide
SGLKDQA

SEQ ID NO: 313 - protein, 7 aa, synthetic construct
  REGION 1..7: note = Description of Artificial Sequence: Synthetic peptide
VNNTKNV

SEQ ID NO: 314 - protein, 7 aa, synthetic construct
  REGION 1..7: note = Description of Artificial Sequence: Synthetic peptide
GGATATR

SEQ ID NO: 315 - protein, 7 aa, synthetic construct
  REGION 1..7: note = Description of Artificial Sequence: Synthetic peptide
GSSGSPS

SEQ ID NO: 316 - protein, 7 aa, synthetic construct
  REGION 1..7: note = Description of Artificial Sequence: Synthetic peptide
TRGGSST

SEQ ID NO: 317 - protein, 7 aa, synthetic construct
  REGION 1..7: note = Description of Artificial Sequence: Synthetic peptide
VGTTHLS

SEQ ID NO: 318 - protein, 7 aa, synthetic construct
  REGION 1..7: note = Description of Artificial Sequence: Synthetic peptide
DGGASNK

SEQ ID NO: 319 - protein, 7 aa, synthetic construct
  REGION 1..7: note = Description of Artificial Sequence: Synthetic peptide
KSATPSN

SEQ ID NO: 320 - protein, 7 aa, synthetic construct
  REGION 1..7: note = Description of Artificial Sequence: Synthetic peptide
GTIDKGH

SEQ ID NO: 321 - protein, 7 aa, synthetic construct
  REGION 1..7: note = Description of Artificial Sequence: Synthetic peptide
KDQSPTH

SEQ ID NO: 322 - protein, 7 aa, synthetic construct
  REGION 1..7: note = Description of Artificial Sequence: Synthetic peptide
TRSQTSV

SEQ ID NO: 323 - protein, 7 aa, synthetic construct
  REGION 1..7: note = Description of Artificial Sequence: Synthetic peptide
TRENKSL

SEQ ID NO: 324 - protein, 7 aa, synthetic construct
  REGION 1..7: note = Description of Artificial Sequence: Synthetic peptide
EPGSHKN

SEQ ID NO: 325 - protein, 7 aa, synthetic construct
  REGION 1..7: note = Description of Artificial Sequence: Synthetic peptide
VGQSSSN

SEQ ID NO: 326 - protein, 7 aa, synthetic construct
  REGION 1..7: note = Description of Artificial Sequence: Synthetic peptide
DNKDKVL

SEQ ID NO: 327 - protein, 7 aa, synthetic construct
  REGION 1..7: note = Description of Artificial Sequence: Synthetic peptide
TNSKSAV

SEQ ID NO: 328 - protein, 7 aa, synthetic construct
  REGION 1..7: note = Description of Artificial Sequence: Synthetic peptide
STAKGSN

SEQ ID NO: 329 - protein, 7 aa, synthetic construct
  REGION 1..7: note = Description of Artificial Sequence: Synthetic peptide
AGSKVTT

SEQ ID NO: 330 - protein, 7 aa, synthetic construct
  REGION 1..7: note = Description of Artificial Sequence: Synthetic peptide
NRESSTV

SEQ ID NO: 331 - protein, 7 aa, synthetic construct
  REGION 1..7: note = Description of Artificial Sequence: Synthetic peptide
ELPAGKS

SEQ ID NO: 332 - protein, 7 aa, synthetic construct
  REGION 1..7: note = Description of Artificial Sequence: Synthetic peptide
TTGQSVG

SEQ ID NO: 333 - protein, 7 aa, synthetic construct
  REGION 1..7: note = Description of Artificial Sequence: Synthetic peptide
ASGSHNS

SEQ ID NO: 334 - protein, 7 aa, synthetic construct
  REGION 1..7: note = Description of Artificial Sequence: Synthetic peptide
NASTKSG

SEQ ID NO: 335 - protein, 7 aa, synthetic construct
  REGION 1..7: note = Description of Artificial Sequence: Synthetic peptide
GGSPTAQ

SEQ ID NO: 336 - protein, 7 aa, synthetic construct
  REGION 1..7: note = Description of Artificial Sequence: Synthetic peptide
NTPSKAS

SEQ ID NO: 337 - protein, 7 aa, synthetic construct
  REGION 1..7: note = Description of Artificial Sequence: Synthetic peptide
NGSASNR

SEQ ID NO: 338 - protein, 7 aa, synthetic construct
  REGION 1..7: note = Description of Artificial Sequence: Synthetic peptide
SVSGGQG

SEQ ID NO: 339 - protein, 7 aa, synthetic construct
  REGION 1..7: note = Description of Artificial Sequence: Synthetic peptide
MSKPTNV

SEQ ID NO: 340 - protein, 7 aa, synthetic construct
  REGION 1..7: note = Description of Artificial Sequence: Synthetic peptide
QPAATPN

SEQ ID NO: 341 - protein, 7 aa, synthetic construct
  REGION 1..7: note = Description of Artificial Sequence: Synthetic peptide
EPVKSTI

SEQ ID NO: 342 - protein, 7 aa, synthetic construct
  REGION 1..7: note = Description of Artificial Sequence: Synthetic peptide
EQSKQSK

SEQ ID NO: 343 - protein, 7 aa, synthetic construct
  REGION 1..7: note = Description of Artificial Sequence: Synthetic peptide
GTSQSSN

SEQ ID NO: 344 - protein, 7 aa, synthetic construct
  REGION 1..7: note = Description of Artificial Sequence: Synthetic peptide
GNSGSGV

SEQ ID NO: 345 - protein, 7 aa, synthetic construct
  REGION 1..7: note = Description of Artificial Sequence: Synthetic peptide
LGSGQVQ

SEQ ID NO: 346 - protein, 7 aa, synthetic construct
  REGION 1..7: note = Description of Artificial Sequence: Synthetic peptide
DAGHKST

SEQ ID NO: 347 - protein, 7 aa, synthetic construct
  REGION 1..7: note = Description of Artificial Sequence: Synthetic peptide
GDGGAQK

SEQ ID NO: 348 - protein, 7 aa, synthetic construct
  REGION 1..7: note = Description of Artificial Sequence: Synthetic peptide
SGNKPIS

SEQ ID NO: 349 - protein, 7 aa, synthetic construct
  REGION 1..7: note = Description of Artificial Sequence: Synthetic peptide
VSGAKPL

SEQ ID NO: 350 - protein, 7 aa, synthetic construct
  REGION 1..7: note = Description of Artificial Sequence: Synthetic peptide
NASKSSA

SEQ ID NO: 351 - protein, 7 aa, synthetic construct
  REGION 1..7: note = Description of Artificial Sequence: Synthetic peptide
GIGGHNS

SEQ ID NO: 352 - protein, 7 aa, synthetic construct
  REGION 1..7: note = Description of Artificial Sequence: Synthetic peptide
GGQSKPT

SEQ ID NO: 353 - protein, 7 aa, synthetic construct
  REGION 1..7: note = Description of Artificial Sequence: Synthetic peptide
QGDKSSY

SEQ ID NO: 354 - protein, 7 aa, synthetic construct
  REGION 1..7: note = Description of Artificial Sequence: Synthetic peptide
QGPKSDN

SEQ ID NO: 355 - protein, 7 aa, synthetic construct
  REGION 1..7: note = Description of Artificial Sequence: Synthetic peptide
EASSGGR

SEQ ID NO: 356 - protein, 7 aa, synthetic construct
  REGION 1..7: note = Description of Artificial Sequence: Synthetic peptide
ANTGTTQ

SEQ ID NO: 357 - protein, 7 aa, synthetic construct
  REGION 1..7: note = Description of Artificial Sequence: Synthetic peptide
DSNSTTR

SEQ ID NO: 358 - protein, 7 aa, synthetic construct
  REGION 1..7: note = Description of Artificial Sequence: Synthetic peptide
GEARPTN

SEQ ID NO: 359 - protein, 7 aa, synthetic construct
  REGION 1..7: note = Description of Artificial Sequence: Synthetic peptide
SLNKNNM

SEQ ID NO: 360 - protein, 7 aa, synthetic construct
  REGION 1..7: note = Description of Artificial Sequence: Synthetic peptide
GRANGST

SEQ ID NO: 361 - protein, 7 aa, synthetic construct
  REGION 1..7: note = Description of Artificial Sequence: Synthetic peptide
QSNTAHA

SEQ ID NO: 362 - protein, 7 aa, synthetic construct
  REGION 1..7: note = Description of Artificial Sequence: Synthetic peptide
QGTSKSS

SEQ ID NO: 363 - protein, 7 aa, synthetic construct
  REGION 1..7: note = Description of Artificial Sequence: Synthetic peptide
TGGSKSS

SEQ ID NO: 364 - protein, 7 aa, synthetic construct
  REGION 1..7: note = Description of Artificial Sequence: Synthetic peptide
QVAKPAS

SEQ ID NO: 365 - protein, 7 aa, synthetic construct
  REGION 1..7: note = Description of Artificial Sequence: Synthetic peptide
VANPPSQ

SEQ ID NO: 366 - protein, 7 aa, synthetic construct
  REGION 1..7: note = Description of Artificial Sequence: Synthetic peptide
ATTKATE

SEQ ID NO: 367 - protein, 7 aa, synthetic construct
  REGION 1..7: note = Description of Artificial Sequence: Synthetic peptide
QTASTNK

SEQ ID NO: 368 - protein, 7 aa, synthetic construct
  REGION 1..7: note = Description of Artificial Sequence: Synthetic peptide
SGSVPST

SEQ ID NO: 369 - protein, 7 aa, synthetic construct
  REGION 1..7: note = Description of Artificial Sequence: Synthetic peptide
SQPKAGS

SEQ ID NO: 370 - protein, 7 aa, synthetic construct
  REGION 1..7: note = Description of Artificial Sequence: Synthetic peptide
TVSTATK

SEQ ID NO: 371 - protein, 7 aa, synthetic construct
  REGION 1..7: note = Description of Artificial Sequence: Synthetic peptide
RDNTKTG

SEQ ID NO: 372 - protein, 7 aa, synthetic construct
  REGION 1..7: note = Description of Artificial Sequence: Synthetic peptide
MNNTNSK

SEQ ID NO: 373 - protein, 7 aa, synthetic construct
  REGION 1..7: note = Description of Artificial Sequence: Synthetic peptide
AGTSHAQ

SEQ ID NO: 374 - protein, 7 aa, synthetic construct
  REGION 1..7: note = Description of Artificial Sequence: Synthetic peptide
SGKNAVA

SEQ ID NO: 375 - protein, 7 aa, synthetic construct
  REGION 1..7: note = Description of Artificial Sequence: Synthetic peptide
TGSQHNS

SEQ ID NO: 376 - protein, 7 aa, synthetic construct
  REGION 1..7: note = Description of Artificial Sequence: Synthetic peptide
VGNGQGR

SEQ ID NO: 377 - protein, 7 aa, synthetic construct
  REGION 1..7: note = Description of Artificial Sequence: Synthetic peptide
EVGGHSK

SEQ ID NO: 378 - protein, 7 aa, synthetic construct
  REGION 1..7: note = Description of Artificial Sequence: Synthetic peptide
SPDKANV

SEQ ID NO: 379 - protein, 7 aa, synthetic construct
  REGION 1..7: note = Description of Artificial Sequence: Synthetic peptide
GVKNTTG

SEQ ID NO: 380 - protein, 7 aa, synthetic construct
  REGION 1..7: note = Description of Artificial Sequence: Synthetic peptide
TTGSKPS

SEQ ID NO: 381 - protein, 7 aa, synthetic construct
  REGION 1..7: note = Description of Artificial Sequence: Synthetic peptide
GSNTSSG

SEQ ID NO: 382 - protein, 7 aa, synthetic construct
  REGION 1..7: note = Description of Artificial Sequence: Synthetic peptide
KGSSTVG

SEQ ID NO: 383 - protein, 7 aa, synthetic construct
  REGION 1..7: note = Description of Artificial Sequence: Synthetic peptide
AAGTPSN

SEQ ID NO: 384 - protein, 7 aa, synthetic construct
  REGION 1..7: note = Description of Artificial Sequence: Synthetic peptide
SQVKGGS

SEQ ID NO: 385 - protein, 7 aa, synthetic construct
  REGION 1..7: note = Description of Artificial Sequence: Synthetic peptide
GNSHESK

SEQ ID NO: 386 - protein, 7 aa, synthetic construct
  REGION 1..7: note = Description of Artificial Sequence: Synthetic peptide
GNGATTL

SEQ ID NO: 387 - protein, 7 aa, synthetic construct
  REGION 1..7: note = Description of Artificial Sequence: Synthetic peptide
KNHPKNE

SEQ ID NO: 388 - protein, 7 aa, synthetic construct
  REGION 1..7: note = Description of Artificial Sequence: Synthetic peptide
QGSKGAN

SEQ ID NO: 389 - protein, 7 aa, synthetic construct
  REGION 1..7: note = Description of Artificial Sequence: Synthetic peptide
QGNSNQS

SEQ ID NO: 390 - protein, 7 aa, synthetic construct
  REGION 1..7: note = Description of Artificial Sequence: Synthetic peptide
SSGSHPS

SEQ ID NO: 391 - protein, 7 aa, synthetic construct
  REGION 1..7: note = Description of Artificial Sequence: Synthetic peptide
SSSKPGT

SEQ ID NO: 392 - protein, 7 aa, synthetic construct
  REGION 1..7: note = Description of Artificial Sequence: Synthetic peptide
GNQTKPL

SEQ ID NO: 393 - protein, 7 aa, synthetic construct
  REGION 1..7: note = Description of Artificial Sequence: Synthetic peptide
SGTNTTS

SEQ ID NO: 394 - protein, 7 aa, synthetic construct
  REGION 1..7: note = Description of Artificial Sequence: Synthetic peptide
GAHENSK

SEQ ID NO: 395 - protein, 7 aa, synthetic construct
  REGION 1..7: note = Description of Artificial Sequence: Synthetic peptide
EGESRKG

SEQ ID NO: 396 - protein, 7 aa, synthetic construct
  REGION 1..7: note = Description of Artificial Sequence: Synthetic peptide
GSEDKRI

SEQ ID NO: 397 - protein, 7 aa, synthetic construct
  REGION 1..7: note = Description of Artificial Sequence: Synthetic peptide
DSSSRST

SEQ ID NO: 398 - protein, 7 aa, synthetic construct
  REGION 1..7: note = Description of Artificial Sequence: Synthetic peptide
TGSQPQH

SEQ ID NO: 399 - protein, 7 aa, synthetic construct
  REGION 1..7: note = Description of Artificial Sequence: Synthetic peptide
MTDTKPA

SEQ ID NO: 400 - protein, 7 aa, synthetic construct
  REGION 1..7: note = Description of Artificial Sequence: Synthetic peptide
QVSKASL

SEQ ID NO: 401 - protein, 7 aa, synthetic construct
  REGION 1..7: note = Description of Artificial Sequence: Synthetic peptide
STGGTGK

SEQ ID NO: 402 - protein, 7 aa, synthetic construct
  REGION 1..7: note = Description of Artificial Sequence: Synthetic peptide
QSDKPIS

SEQ ID NO: 403 - protein, 7 aa, synthetic construct
  REGION 1..7: note = Description of Artificial Sequence: Synthetic peptide
AGGASQV

SEQ ID NO: 404 - protein, 7 aa, synthetic construct
  REGION 1..7: note = Description of Artificial Sequence: Synthetic peptide
SRGGSQA

SEQ ID NO: 405 - protein, 7 aa, synthetic construct
  REGION 1..7: note = Description of Artificial Sequence: Synthetic peptide
TMNGKPT

SEQ ID NO: 406 - protein, 7 aa, synthetic construct
  REGION 1..7: note = Description of Artificial Sequence: Synthetic peptide
GPTQGTG

SEQ ID NO: 407 - protein, 7 aa, synthetic construct
  REGION 1..7: note = Description of Artificial Sequence: Synthetic peptide
SGVTKGS

SEQ ID NO: 408 - protein, 7 aa, synthetic construct
  REGION 1..7: note = Description of Artificial Sequence: Synthetic peptide
ETGRPAT

SEQ ID NO: 409 - protein, 7 aa, synthetic construct
  REGION 1..7: note = Description of Artificial Sequence: Synthetic peptide
LGSKESS

SEQ ID NO: 410 - protein, 7 aa, synthetic construct
  REGION 1..7: note = Description of Artificial Sequence: Synthetic peptide
NTGEKQS

SEQ ID NO: 411 - protein, 7 aa, synthetic construct
  REGION 1..7: note = Description of Artificial Sequence: Synthetic peptide
ASAGSQS

SEQ ID NO: 412 - protein, 7 aa, synthetic construct
  REGION 1..7: note = Description of Artificial Sequence: Synthetic peptide
VTSEKNA

SEQ ID NO: 413 - protein, 7 aa, synthetic construct
  REGION 1..7: note = Description of Artificial Sequence: Synthetic peptide
TGSNSVS

SEQ ID NO: 414 - protein, 7 aa, synthetic construct
  REGION 1..7: note = Description of Artificial Sequence: Synthetic peptide
ERTSSVV

SEQ ID NO: 415 - protein, 7 aa, synthetic construct
  REGION 1..7: note = Description of Artificial Sequence: Synthetic peptide
GPSNPSS

SEQ ID NO: 416 - protein, 7 aa, synthetic construct
  REGION 1..7: note = Description of Artificial Sequence: Synthetic peptide
SSSSKPA

SEQ ID NO: 417 - protein, 7 aa, synthetic construct
  REGION 1..7: note = Description of Artificial Sequence: Synthetic peptide
QDRTPSV

SEQ ID NO: 418 - protein, 7 aa, synthetic construct
  REGION 1..7: note = Description of Artificial Sequence: Synthetic peptide
STTREAV

SEQ ID NO: 419 - protein, 7 aa, synthetic construct
  REGION 1..7: note = Description of Artificial Sequence: Synthetic peptide
TTNKSSV

SEQ ID NO: 420 - protein, 7 aa, synthetic construct
  REGION 1..7: note = Description of Artificial Sequence: Synthetic peptide
TISQNPA

SEQ ID NO: 421 - protein, 7 aa, synthetic construct
  REGION 1..7: note = Description of Artificial Sequence: Synthetic peptide
STERNNH

SEQ ID NO: 422 - protein, 7 aa, synthetic construct
  REGION 1..7: note = Description of Artificial Sequence: Synthetic peptide
TRTPAST

SEQ ID NO: 423 - protein, 7 aa, synthetic construct
  REGION 1..7: note = Description of Artificial Sequence: Synthetic peptide
AGVDRSH

SEQ ID NO: 424 - protein, 7 aa, synthetic construct
  REGION 1..7: note = Description of Artificial Sequence: Synthetic peptide
NTSGTGS

SEQ ID NO: 425 - protein, 7 aa, synthetic construct
  REGION 1..7: note = Description of Artificial Sequence: Synthetic peptide
GRGKDSV

SEQ ID NO: 426 - protein, 7 aa, synthetic construct
  REGION 1..7: note = Description of Artificial Sequence: Synthetic peptide
LTSTAPK

SEQ ID NO: 427 - protein, 7 aa, synthetic construct
  REGION 1..7: note = Description of Artificial Sequence: Synthetic peptide
QSVNTPK

SEQ ID NO: 428 - protein, 7 aa, synthetic construct
  REGION 1..7: note = Description of Artificial Sequence: Synthetic peptide
TKSQTPV

SEQ ID NO: 429 - protein, 7 aa, synthetic construct
  REGION 1..7: note = Description of Artificial Sequence: Synthetic peptide
SSQSATK

SEQ ID NO: 430 - protein, 7 aa, synthetic construct
  REGION 1..7: note = Description of Artificial Sequence: Synthetic peptide
KGGGSTN

SEQ ID NO: 431 - protein, 7 aa, synthetic construct
  REGION 1..7: note = Description of Artificial Sequence: Synthetic peptide
TNSGAGI

SEQ ID NO: 432 - protein, 7 aa, synthetic construct
  REGION 1..7: note = Description of Artificial Sequence: Synthetic peptide
DNSVKSV

SEQ ID NO: 433 - protein, 7 aa, synthetic construct
  REGION 1..7: note = Description of Artificial Sequence: Synthetic peptide
SINSGSK

SEQ ID NO: 434 - protein, 7 aa, synthetic construct
  REGION 1..7: note = Description of Artificial Sequence: Synthetic peptide
STTGASK

SEQ ID NO: 435 - protein, 7 aa, synthetic construct
  REGION 1..7: note = Description of Artificial Sequence: Synthetic peptide
GGGGSSV

SEQ ID NO: 436 - protein, 7 aa, synthetic construct
  REGION 1..7: note = Description of Artificial Sequence: Synthetic peptide
GMSNPSN

SEQ ID NO: 437 - protein, 7 aa, synthetic construct
  REGION 1..7: note = Description of Artificial Sequence: Synthetic peptide
QSNSSLS

SEQ ID NO: 438 - protein, 7 aa, synthetic construct
  REGION 1..7: note = Description of Artificial Sequence: Synthetic peptide
QSGKSAD

SEQ ID NO: 439 - protein, 7 aa, synthetic construct
  REGION 1..7: note = Description of Artificial Sequence: Synthetic peptide
QTGERHV

SEQ ID NO: 440 - protein, 7 aa, synthetic construct
  REGION 1..7: note = Description of Artificial Sequence: Synthetic peptide
NSATRPV

SEQ ID NO: 441 - protein, 7 aa, synthetic construct
  REGION 1..7: note = Description of Artificial Sequence: Synthetic peptide
VSTNKNV

SEQ ID NO: 442 - protein, 7 aa, synthetic construct
  REGION 1..7: note = Description of Artificial Sequence: Synthetic peptide
SNGTKQT

SEQ ID NO: 443 - protein, 7 aa, synthetic construct
  REGION 1..7: note = Description of Artificial Sequence: Synthetic peptide
NDSPTAR

SEQ ID NO: 444 - protein, 7 aa, synthetic construct
  REGION 1..7: note = Description of Artificial Sequence: Synthetic peptide
LRQQVSE

SEQ ID NO: 445 - protein, 7 aa, synthetic construct
  REGION 1..7: note = Description of Artificial Sequence: Synthetic peptide
NTGEGAK

SEQ ID NO: 446 - protein, 7 aa, synthetic construct
  REGION 1..7: note = Description of Artificial Sequence: Synthetic peptide
TGTAHPS

SEQ ID NO: 447 - protein, 7 aa, synthetic construct
  REGION 1..7: note = Description of Artificial Sequence: Synthetic peptide
TGSPSSA

SEQ ID NO: 448 - protein, 7 aa, synthetic construct
  REGION 1..7: note = Description of Artificial Sequence: Synthetic peptide
GKDNSKN

SEQ ID NO: 449 - protein, 7 aa, synthetic construct
  REGION 1..7: note = Description of Artificial Sequence: Synthetic peptide
NSGQQNG

SEQ ID NO: 450 - protein, 7 aa, synthetic construct
  REGION 1..7: note = Description of Artificial Sequence: Synthetic peptide
SSSNASH

SEQ ID NO: 451 - protein, 7 aa, synthetic construct
  REGION 1..7: note = Description of Artificial Sequence: Synthetic peptide
NNAATQS

SEQ ID NO: 452 - protein, 7 aa, synthetic construct
  REGION 1..7: note = Description of Artificial Sequence: Synthetic peptide
TPERAGS

SEQ ID NO: 453 - protein, 7 aa, synthetic construct
  REGION 1..7: note = Description of Artificial Sequence: Synthetic peptide
QSGKSTT

SEQ ID NO: 454 - protein, 7 aa, synthetic construct
  REGION 1..7: note = Description of Artificial Sequence: Synthetic peptide
TIGKPGA

SEQ ID NO: 455 - protein, 7 aa, synthetic construct
  REGION 1..7: note = Description of Artificial Sequence: Synthetic peptide
ISGKAST

SEQ ID NO: 456 - protein, 7 aa, synthetic construct
  REGION 1..7: note = Description of Artificial Sequence: Synthetic peptide
ENSNKFT

SEQ ID NO: 457 - protein, 7 aa, synthetic construct
  REGION 1..7: note = Description of Artificial Sequence: Synthetic peptide
GHTNNPL

SEQ ID NO: 458 - protein, 7 aa, synthetic construct
  REGION 1..7: note = Description of Artificial Sequence: Synthetic peptide
SSDGRGT

SEQ ID NO: 459 - protein, 7 aa, synthetic construct
  REGION 1..7: note = Description of Artificial Sequence: Synthetic peptide
APVQQGG

SEQ ID NO: 460 - protein, 7 aa, synthetic construct
  REGION 1..7: note = Description of Artificial Sequence: Synthetic peptide
TIGGKPD

SEQ ID NO: 461 - protein, 7 aa, synthetic construct
  REGION 1..7: note = Description of Artificial Sequence: Synthetic peptide
GTASSQS

SEQ ID NO: 462 - protein, 7 aa, synthetic construct
  REGION 1..7: note = Description of Artificial Sequence: Synthetic peptide
DMAKERS

SEQ ID NO: 463 - protein, 7 aa, synthetic construct
  REGION 1..7: note = Description of Artificial Sequence: Synthetic peptide
DANSKGK

SEQ ID NO: 464 - protein, 7 aa, synthetic construct
  REGION 1..7: note = Description of Artificial Sequence: Synthetic peptide
SGERSTT

SEQ ID NO: 465 - protein, 7 aa, synthetic construct
  REGION 1..7: note = Description of Artificial Sequence: Synthetic peptide
EHSSSVK

SEQ ID NO: 466 - protein, 7 aa, synthetic construct
  REGION 1..7: note = Description of Artificial Sequence: Synthetic peptide
SSGSPGK

SEQ ID NO: 467 - protein, 7 aa, synthetic construct
  REGION 1..7: note = Description of Artificial Sequence: Synthetic peptide
GKSTSGG

SEQ ID NO: 468 - protein, 7 aa, synthetic construct
  REGION 1..7: note = Description of Artificial Sequence: Synthetic peptide
TGVNSPH

SEQ ID NO: 469 - protein, 7 aa, synthetic construct
  REGION 1..7: note = Description of Artificial Sequence: Synthetic peptide
GSSAHPK

SEQ ID NO: 470 - protein, 7 aa, synthetic construct
  REGION 1..7: note = Description of Artificial Sequence: Synthetic peptide
SGTEKAR

SEQ ID NO: 471 - protein, 7 aa, synthetic construct
  REGION 1..7: note = Description of Artificial Sequence: Synthetic peptide
SPSSNPQ

SEQ ID NO: 472 - protein, 7 aa, synthetic construct
  REGION 1..7: note = Description of Artificial Sequence: Synthetic peptide
TANKTTL

SEQ ID NO: 473 - protein, 7 aa, synthetic construct
  REGION 1..7: note = Description of Artificial Sequence: Synthetic peptide
TGTKPLG

SEQ ID NO: 474 - protein, 7 aa, synthetic construct
  REGION 1..7: note = Description of Artificial Sequence: Synthetic peptide
SNQKTSI

SEQ ID NO: 475 - protein, 7 aa, synthetic construct
  REGION 1..7: note = Description of Artificial Sequence: Synthetic peptide
SLNDHSK

SEQ ID NO: 476 - protein, 7 aa, synthetic construct
  REGION 1..7: note = Description of Artificial Sequence: Synthetic peptide
HSSEQGK

SEQ ID NO: 477 - protein, 7 aa, synthetic construct
  REGION 1..7: note = Description of Artificial Sequence: Synthetic peptide
NQGKTAE

SEQ ID NO: 478 - protein, 7 aa, synthetic construct
  REGION 1..7: note = Description of Artificial Sequence: Synthetic peptide
RAEGKNV

SEQ ID NO: 479 - protein, 7 aa, synthetic construct
  REGION 1..7: note = Description of Artificial Sequence: Synthetic peptide
TGASSGS

SEQ ID NO: 480 - protein, 7 aa, synthetic construct
  REGION 1..7: note = Description of Artificial Sequence: Synthetic peptide
RENKPDS

SEQ ID NO: 481 - protein, 7 aa, synthetic construct
  REGION 1..7: note = Description of Artificial Sequence: Synthetic peptide
ESRSPSH

SEQ ID NO: 482 - protein, 7 aa, synthetic construct
  REGION 1..7: note = Description of Artificial Sequence: Synthetic peptide
VSGKQIS

SEQ ID NO: 483 - protein, 7 aa, synthetic construct
  REGION 1..7: note = Description of Artificial Sequence: Synthetic peptide
LSGKAPN

SEQ ID NO: 484 - protein, 7 aa, synthetic construct
  REGION 1..7: note = Description of Artificial Sequence: Synthetic peptide
GTTGERA

SEQ ID NO: 485 - protein, 7 aa, synthetic construct
  REGION 1..7: note = Description of Artificial Sequence: Synthetic peptide
VASSKTT

SEQ ID NO: 486 - protein, 7 aa, synthetic construct
  REGION 1..7: note = Description of Artificial Sequence: Synthetic peptide
TDRTPSM

SEQ ID NO: 487 - protein, 7 aa, synthetic construct
  REGION 1..7: note = Description of Artificial Sequence: Synthetic peptide
SAESVNK

SEQ ID NO: 488 - protein, 7 aa, synthetic construct
  REGION 1..7: note = Description of Artificial Sequence: Synthetic peptide
VRGQTTS

SEQ ID NO: 489 - protein, 7 aa, synthetic construct
  REGION 1..7: note = Description of Artificial Sequence: Synthetic peptide
GQGTKVT

SEQ ID NO: 490 - protein, 7 aa, synthetic construct
  REGION 1..7: note = Description of Artificial Sequence: Synthetic peptide
TRSQPTT

SEQ ID NO: 491 - protein, 7 aa, synthetic construct
  REGION 1..7: note = Description of Artificial Sequence: Synthetic peptide
QRVTESH

SEQ ID NO: 492 - protein, 7 aa, synthetic construct
  REGION 1..7: note = Description of Artificial Sequence: Synthetic peptide
QGDKPRL

SEQ ID NO: 493 - protein, 7 aa, synthetic construct
  REGION 1..7: note = Description of Artificial Sequence: Synthetic peptide
ASKPSNI

SEQ ID NO: 494 - protein, 7 aa, synthetic construct
  REGION 1..7: note = Description of Artificial Sequence: Synthetic peptide
ETARPNQ

SEQ ID NO: 495 - protein, 7 aa, synthetic construct
  REGION 1..7: note = Description of Artificial Sequence: Synthetic peptide
QSTSKTS

SEQ ID NO: 496 - protein, 7 aa, synthetic construct
  REGION 1..7: note = Description of Artificial Sequence: Synthetic peptide
SSDTKIS

SEQ ID NO: 497 - protein, 7 aa, synthetic construct
  REGION 1..7: note = Description of Artificial Sequence: Synthetic peptide
NGTDRTT

SEQ ID NO: 498 - protein, 7 aa, synthetic construct
  REGION 1..7: note = Description of Artificial Sequence: Synthetic peptide
TQKPTNG

SEQ ID NO: 499 - protein, 7 aa, synthetic construct
  REGION 1..7: note = Description of Artificial Sequence: Synthetic peptide
QQGEAFK

SEQ ID NO: 500 - protein, 7 aa, synthetic construct
  REGION 1..7: note = Description of Artificial Sequence: Synthetic peptide
DGQPPTK

SEQ ID NO: 501 - protein, 7 aa, synthetic construct
  REGION 1..7: note = Description of Artificial Sequence: Synthetic peptide
SNGQKQD

SEQ ID NO: 502 - protein, 7 aa, synthetic construct
  REGION 1..7: note = Description of Artificial Sequence: Synthetic peptide
STSTKSG

SEQ ID NO: 503 - protein, 7 aa, synthetic construct
  REGION 1..7: note = Description of Artificial Sequence: Synthetic peptide
SGGGSPV

SEQ ID NO: 504 - protein, 7 aa, synthetic construct
  REGION 1..7: note = Description of Artificial Sequence: Synthetic peptide
SVSKSSI

SEQ ID NO: 505 - protein, 7 aa, synthetic construct
  REGION 1..7: note = Description of Artificial Sequence: Synthetic peptide
QVGSDHR

SEQ ID NO: 506 - protein, 7 aa, synthetic construct
  REGION 1..7: note = Description of Artificial Sequence: Synthetic peptide
GSNGSRG

SEQ ID NO: 507 - protein, 7 aa, synthetic construct
  REGION 1..7: note = Description of Artificial Sequence: Synthetic peptide
ASSQKVV

SEQ ID NO: 508 - protein, 7 aa, synthetic construct
  REGION 1..7: note = Description of Artificial Sequence: Synthetic peptide
SPHQAGT

SEQ ID NO: 509 - protein, 7 aa, synthetic construct
  REGION 1..7: note = Description of Artificial Sequence: Synthetic peptide
GGSERAK

SEQ ID NO: 510 - protein, 7 aa, synthetic construct
  REGION 1..7: note = Description of Artificial Sequence: Synthetic peptide
AGGGKAT

SEQ ID NO: 511 - protein, 7 aa, synthetic construct
  REGION 1..7: note = Description of Artificial Sequence: Synthetic peptide
GMSAGTG

SEQ ID NO: 512 - protein, 7 aa, synthetic construct
  REGION 1..7: note = Description of Artificial Sequence: Synthetic peptide
SQSKSAL

SEQ ID NO: 513 - protein, 7 aa, synthetic construct
  REGION 1..7: note = Description of Artificial Sequence: Synthetic peptide
SHQTGSG

SEQ ID NO: 514 - protein, 7 aa, synthetic construct
  REGION 1..7: note = Description of Artificial Sequence: Synthetic peptide
GGKSPAH

SEQ ID NO: 515 - protein, 7 aa, synthetic construct
  REGION 1..7: note = Description of Artificial Sequence: Synthetic peptide
RMNKTSE

SEQ ID NO: 516 - protein, 7 aa, synthetic construct
  REGION 1..7: note = Description of Artificial Sequence: Synthetic peptide
ARDTKAS

SEQ ID NO: 517 - protein, 7 aa, synthetic construct
  REGION 1..7: note = Description of Artificial Sequence: Synthetic peptide
NGNKHAS

SEQ ID NO: 518 - protein, 7 aa, synthetic construct
  REGION 1..7: note = Description of Artificial Sequence: Synthetic peptide
LTQKSPS

SEQ ID NO: 519 - protein, 7 aa, synthetic construct
  REGION 1..7: note = Description of Artificial Sequence: Synthetic peptide
DATSKFA

SEQ ID NO: 520 - protein, 7 aa, synthetic construct
  REGION 1..7: note = Description of Artificial Sequence: Synthetic peptide
SLGKTAS

SEQ ID NO: 521 - protein, 7 aa, synthetic construct
  REGION 1..7: note = Description of Artificial Sequence: Synthetic peptide
SSASSNQ

SEQ ID NO: 522 - protein, 7 aa, synthetic construct
  REGION 1..7: note = Description of Artificial Sequence: Synthetic peptide
GNHSPPK

SEQ ID NO: 523 - protein, 7 aa, synthetic construct
  REGION 1..7: note = Description of Artificial Sequence: Synthetic peptide
QTAKPGV

SEQ ID NO: 524 - protein, 7 aa, synthetic construct
  REGION 1..7: note = Description of Artificial Sequence: Synthetic peptide
NSTTKVS

SEQ ID NO: 525 - protein, 7 aa, synthetic construct
  REGION 1..7: note = Description of Artificial Sequence: Synthetic peptide
GTGGTLS

SEQ ID NO: 526 - protein, 7 aa, synthetic construct
  REGION 1..7: note = Description of Artificial Sequence: Synthetic peptide
HSASPTV

SEQ ID NO: 527 - protein, 7 aa, synthetic construct
  REGION 1..7: note = Description of Artificial Sequence: Synthetic peptide
TPQKDAK

SEQ ID NO: 528 - protein, 7 aa, synthetic construct
  REGION 1..7: note = Description of Artificial Sequence: Synthetic peptide
QTATVPK

SEQ ID NO: 529 - protein, 7 aa, synthetic construct
  REGION 1..7: note = Description of Artificial Sequence: Synthetic peptide
DGGTSRV

SEQ ID NO: 530 - protein, 7 aa, synthetic construct
  REGION 1..7: note = Description of Artificial Sequence: Synthetic peptide
SESKANA

SEQ ID NO: 531 - protein, 7 aa, synthetic construct
  REGION 1..7: note = Description of Artificial Sequence: Synthetic peptide
ATHQPAT

SEQ ID NO: 532 - protein, 7 aa, synthetic construct
  REGION 1..7: note = Description of Artificial Sequence: Synthetic peptide
LQAKASG

SEQ ID NO: 533 - protein, 7 aa, synthetic construct
  REGION 1..7: note = Description of Artificial Sequence: Synthetic peptide
KGNSSTT

SEQ ID NO: 534 - protein, 7 aa, synthetic construct
  REGION 1..7: note = Description of Artificial Sequence: Synthetic peptide
AADRSST

SEQ ID NO: 535 - protein, 7 aa, synthetic construct
  REGION 1..7: note = Description of Artificial Sequence: Synthetic peptide
SPSPTPK

SEQ ID NO: 536 - protein, 7 aa, synthetic construct
  REGION 1..7: note = Description of Artificial Sequence: Synthetic peptide
SGNGKVT

SEQ ID NO: 537 - protein, 7 aa, synthetic construct
  REGION 1..7: note = Description of Artificial Sequence: Synthetic peptide
EQGNNKH

SEQ ID NO: 538 - protein, 7 aa, synthetic construct
  REGION 1..7: note = Description of Artificial Sequence: Synthetic peptide
GGSKQAS

SEQ ID NO: 539 - protein, 7 aa, synthetic construct
  REGION 1..7: note = Description of Artificial Sequence: Synthetic peptide
QRGATNG

SEQ ID NO: 540 - protein, 7 aa, synthetic construct
  REGION 1..7: note = Description of Artificial Sequence: Synthetic peptide
GKTNQQS

SEQ ID NO: 541 - protein, 7 aa, synthetic construct
  REGION 1..7: note = Description of Artificial Sequence: Synthetic peptide
TNGKSSS

SEQ ID NO: 542 - protein, 7 aa, synthetic construct
  REGION 1..7: note = Description of Artificial Sequence: Synthetic peptide
QDGKGQQ

SEQ ID NO: 543 - protein, 7 aa, synthetic construct
  REGION 1..7: note = Description of Artificial Sequence: Synthetic peptide
SRQNANS

SEQ ID NO: 544 - protein, 7 aa, synthetic construct
  REGION 1..7: note = Description of Artificial Sequence: Synthetic peptide
HGSSSKT

SEQ ID NO: 545 - protein, 7 aa, synthetic construct
  REGION 1..7: note = Description of Artificial Sequence: Synthetic peptide
NGSGQNQ

SEQ ID NO: 546 - protein, 7 aa, synthetic construct
  REGION 1..7: note = Description of Artificial Sequence: Synthetic peptide
GNVNGTG

SEQ ID NO: 547 - protein, 7 aa, synthetic construct
  REGION 1..7: note = Description of Artificial Sequence: Synthetic peptide
ATGKSSL

SEQ ID NO: 548 - protein, 7 aa, synthetic construct
  REGION 1..7: note = Description of Artificial Sequence: Synthetic peptide
NQGTKVQ

SEQ ID NO: 549 - protein, 7 aa, synthetic construct
  REGION 1..7: note = Description of Artificial Sequence: Synthetic peptide
TATDKTY

SEQ ID NO: 550 - protein, 7 aa, synthetic construct
  REGION 1..7: note = Description of Artificial Sequence: Synthetic peptide
VTGKSQM

SEQ ID NO: 551 - protein, 7 aa, synthetic construct
  REGION 1..7: note = Description of Artificial Sequence: Synthetic peptide
SQVQKVG

SEQ ID NO: 552 - protein, 7 aa, synthetic construct
  REGION 1..7: note = Description of Artificial Sequence: Synthetic peptide
DPISAKN

SEQ ID NO: 553 - protein, 7 aa, synthetic construct
  REGION 1..7: note = Description of Artificial Sequence: Synthetic peptide
SRNNTTT

SEQ ID NO: 554 - protein, 7 aa, synthetic construct
  REGION 1..7: note = Description of Artificial Sequence: Synthetic peptide
EGSNKTL

SEQ ID NO: 555 - protein, 7 aa, synthetic construct
  REGION 1..7: note = Description of Artificial Sequence: Synthetic peptide
VAKSTTL

SEQ ID NO: 556 - protein, 7 aa, synthetic construct
  REGION 1..7: note = Description of Artificial Sequence: Synthetic peptide
SNGAPTR

SEQ ID NO: 557 - protein, 7 aa, synthetic construct
  REGION 1..7: note = Description of Artificial Sequence: Synthetic peptide
QGTNSQV

SEQ ID NO: 558 - protein, 7 aa, synthetic construct
  REGION 1..7: note = Description of Artificial Sequence: Synthetic peptide
YPPSKGS

SEQ ID NO: 559 - protein, 7 aa, synthetic construct
  REGION 1..7: note = Description of Artificial Sequence: Synthetic peptide
SGSGGSQ

SEQ ID NO: 560 - protein, 7 aa, synthetic construct
  REGION 1..7: note = Description of Artificial Sequence: Synthetic peptide
STTQGPT

SEQ ID NO: 561 - protein, 7 aa, synthetic construct
  REGION 1..7: note = Description of Artificial Sequence: Synthetic peptide
AVANVNT

SEQ ID NO: 562 - protein, 7 aa, synthetic construct
  REGION 1..7: note = Description of Artificial Sequence: Synthetic peptide
LGSQQSK

SEQ ID NO: 563 - protein, 7 aa, synthetic construct
  REGION 1..7: note = Description of Artificial Sequence: Synthetic peptide
TSDTRGM

SEQ ID NO: 564 - protein, 7 aa, synthetic construct
  REGION 1..7: note = Description of Artificial Sequence: Synthetic peptide
SNASPGS

SEQ ID NO: 565 - protein, 7 aa, synthetic construct
  REGION 1..7: note = Description of Artificial Sequence: Synthetic peptide
GSTGQSK

SEQ ID NO: 566 - protein, 7 aa, synthetic construct
  REGION 1..7: note = Description of Artificial Sequence: Synthetic peptide
KAQSSAG

SEQ ID NO: 567 - protein, 7 aa, synthetic construct
  REGION 1..7: note = Description of Artificial Sequence: Synthetic peptide
GVGSKGV

SEQ ID NO: 568 - protein, 7 aa, synthetic construct
  REGION 1..7: note = Description of Artificial Sequence: Synthetic peptide
SSGTANL

SEQ ID NO: 569 - protein, 7 aa, synthetic construct
  REGION 1..7: note = Description of Artificial Sequence: Synthetic peptide
VINGKSD

SEQ ID NO: 570 - protein, 7 aa, synthetic construct
  REGION 1..7: note = Description of Artificial Sequence: Synthetic peptide
QGRDPQS

SEQ ID NO: 571 - protein, 7 aa, synthetic construct
  REGION 1..7: note = Description of Artificial Sequence: Synthetic peptide
ALENPSK

SEQ ID NO: 572 - protein, 7 aa, synthetic construct
  REGION 1..7: note = Description of Artificial Sequence: Synthetic peptide
AGSGPQL

SEQ ID NO: 573 - protein, 7 aa, synthetic construct
  REGION 1..7: note = Description of Artificial Sequence: Synthetic peptide
EGTSSHT

SEQ ID NO: 574 - protein, 7 aa, synthetic construct
  REGION 1..7: note = Description of Artificial Sequence: Synthetic peptide
DTPSPIK

SEQ ID NO: 575 - protein, 7 aa, synthetic construct
  REGION 1..7: note = Description of Artificial Sequence: Synthetic peptide
LSTNKSV

SEQ ID NO: 576 - protein, 7 aa, synthetic construct
  REGION 1..7: note = Description of Artificial Sequence: Synthetic peptide
SIGSPSR

SEQ ID NO: 577 - protein, 7 aa, synthetic construct
  REGION 1..7: note = Description of Artificial Sequence: Synthetic peptide
TGNKTAS

SEQ ID NO: 578 - protein, 7 aa, synthetic construct
  REGION 1..7: note = Description of Artificial Sequence: Synthetic peptide
SHNSSTS

SEQ ID NO: 579 - protein, 7 aa, synthetic construct
  REGION 1..7: note = Description of Artificial Sequence: Synthetic peptide
SNSTHPA

SEQ ID NO: 580 - protein, 7 aa, synthetic construct
  REGION 1..7: note = Description of Artificial Sequence: Synthetic peptide
SQAVPSK

SEQ ID NO: 581 - protein, 7 aa, synthetic construct
  REGION 1..7: note = Description of Artificial Sequence: Synthetic peptide
QINNKTA

SEQ ID NO: 582 - protein, 7 aa, synthetic construct
  REGION 1..7: note = Description of Artificial Sequence: Synthetic peptide
TSGSGMK

SEQ ID NO: 583 - protein, 7 aa, synthetic construct
  REGION 1..7: note = Description of Artificial Sequence: Synthetic peptide
TGTKQLS

SEQ ID NO: 584 - protein, 7 aa, synthetic construct
  REGION 1..7: note = Description of Artificial Sequence: Synthetic peptide
TQGSNPP

SEQ ID NO: 585 - protein, 7 aa, synthetic construct
  REGION 1..7: note = Description of Artificial Sequence: Synthetic peptide
TQPSTHV

SEQ ID NO: 586 - protein, 7 aa, synthetic construct
  REGION 1..7: note = Description of Artificial Sequence: Synthetic peptide
ADSKPTS

SEQ ID NO: 587 - protein, 7 aa, synthetic construct
  REGION 1..7: note = Description of Artificial Sequence: Synthetic peptide
GNGREAS

SEQ ID NO: 588 - protein, 7 aa, synthetic construct
  REGION 1..7: note = Description of Artificial Sequence: Synthetic peptide
STSQKSV

SEQ ID NO: 589 - protein, 7 aa, synthetic construct
  REGION 1..7: note = Description of Artificial Sequence: Synthetic peptide
GTSPQVK

SEQ ID NO: 590 - protein, 7 aa, synthetic construct
  REGION 1..7: note = Description of Artificial Sequence: Synthetic peptide
TTGSHSA

SEQ ID NO: 591 - protein, 7 aa, synthetic construct
  REGION 1..7: note = Description of Artificial Sequence: Synthetic peptide
GTASGTR

SEQ ID NO: 592 - protein, 7 aa, synthetic construct
  REGION 1..7: note = Description of Artificial Sequence: Synthetic peptide
HNTSKQG

SEQ ID NO: 593 - protein, 7 aa, synthetic construct
  REGION 1..7: note = Description of Artificial Sequence: Synthetic peptide
DITQKSK

SEQ ID NO: 594 - protein, 7 aa, synthetic construct
  REGION 1..7: note = Description of Artificial Sequence: Synthetic peptide
VTRSNSV

SEQ ID NO: 595 - protein, 7 aa, synthetic construct
  REGION 1..7: note = Description of Artificial Sequence: Synthetic peptide
EGAKPAF

SEQ ID NO: 596 - protein, 7 aa, synthetic construct
  REGION 1..7: note = Description of Artificial Sequence: Synthetic peptide
AMSSGNK

SEQ ID NO: 597 - protein, 7 aa, synthetic construct
  REGION 1..7: note = Description of Artificial Sequence: Synthetic peptide
VANNGNA

SEQ ID NO: 598 - protein, 7 aa, synthetic construct
  REGION 1..7: note = Description of Artificial Sequence: Synthetic peptide
NSTSGTK

SEQ ID NO: 599 - protein, 7 aa, synthetic construct
  REGION 1..7: note = Description of Artificial Sequence: Synthetic peptide
GSGGGQS

SEQ ID NO: 600 - protein, 7 aa, synthetic construct
  REGION 1..7: note = Description of Artificial Sequence: Synthetic peptide
ATSGTSH

SEQ ID NO: 601 - protein, 7 aa, synthetic construct
  REGION 1..7: note = Description of Artificial Sequence: Synthetic peptide
GPSPQGK

SEQ ID NO: 602 - protein, 7 aa, synthetic construct
  REGION 1..7: note = Description of Artificial Sequence: Synthetic peptide
AGDSSGR

SEQ ID NO: 603 - protein, 7 aa, synthetic construct
  REGION 1..7: note = Description of Artificial Sequence: Synthetic peptide
TVSDTNK

SEQ ID NO: 604 - protein, 7 aa, synthetic construct
  REGION 1..7: note = Description of Artificial Sequence: Synthetic peptide
DNGKAQN

SEQ ID NO: 605 - protein, 7 aa, synthetic construct
  REGION 1..7: note = Description of Artificial Sequence: Synthetic peptide
QGERSLA

SEQ ID NO: 606 - protein, 7 aa, synthetic construct
  REGION 1..7: note = Description of Artificial Sequence: Synthetic peptide
SGENNRV

SEQ ID NO: 607 - protein, 7 aa, synthetic construct
  REGION 1..7: note = Description of Artificial Sequence: Synthetic peptide
LQNQKDG

SEQ ID NO: 608 - protein, 7 aa, synthetic construct
  REGION 1..7: note = Description of Artificial Sequence: Synthetic peptide
ASTGASK

SEQ ID NO: 609 - protein, 7 aa, synthetic construct
  REGION 1..7: note = Description of Artificial Sequence: Synthetic peptide
GSGKDRN

SEQ ID NO: 610 - protein, 7 aa, synthetic construct
  REGION 1..7: note = Description of Artificial Sequence: Synthetic peptide
GTGVSNK

SEQ ID NO: 611 - protein, 7 aa, synthetic construct
  REGION 1..7: note = Description of Artificial Sequence: Synthetic peptide
GNAAKPQ

SEQ ID NO: 612 - protein, 7 aa, synthetic construct
  REGION 1..7: note = Description of Artificial Sequence: Synthetic peptide
SGDSKRH

SEQ ID NO: 613 - protein, 7 aa, synthetic construct
  REGION 1..7: note = Description of Artificial Sequence: Synthetic peptide
TSTSKNT

SEQ ID NO: 614 - protein, 7 aa, synthetic construct
  REGION 1..7: note = Description of Artificial Sequence: Synthetic peptide
GSTGNNS

SEQ ID NO: 615 - protein, 7 aa, synthetic construct
  REGION 1..7: note = Description of Artificial Sequence: Synthetic peptide
SGSSGGR

SEQ ID NO: 616 - protein, 7 aa, synthetic construct
  REGION 1..7: note = Description of Artificial Sequence: Synthetic peptide
FGTKGGE

SEQ ID NO: 617 - protein, 7 aa, synthetic construct
  REGION 1..7: note = Description of Artificial Sequence: Synthetic peptide
STGVKPM

SEQ ID NO: 618 - protein, 7 aa, synthetic construct
  REGION 1..7: note = Description of Artificial Sequence: Synthetic peptide
NSVGKSG

SEQ ID NO: 619 - protein, 7 aa, synthetic construct
  REGION 1..7: note = Description of Artificial Sequence: Synthetic peptide
GIAGPKS

SEQ ID NO: 620 - protein, 7 aa, synthetic construct
  REGION 1..7: note = Description of Artificial Sequence: Synthetic peptide
SKPTSGG

SEQ ID NO: 621 - protein, 7 aa, synthetic construct
  REGION 1..7: note = Description of Artificial Sequence: Synthetic peptide
SASTKSV

SEQ ID NO: 622 - protein, 7 aa, synthetic construct
  REGION 1..7: note = Description of Artificial Sequence: Synthetic peptide
GTSQKPH

SEQ ID NO: 623 - protein, 7 aa, synthetic construct
  REGION 1..7: note = Description of Artificial Sequence: Synthetic peptide
GNGSPTS

SEQ ID NO: 624 - protein, 7 aa, synthetic construct
  REGION 1..7: note = Description of Artificial Sequence: Synthetic peptide
NSGATKN

SEQ ID NO: 625 - protein, 7 aa, synthetic construct
  REGION 1..7: note = Description of Artificial Sequence: Synthetic peptide
DTAQHNR

SEQ ID NO: 626 - protein, 7 aa, synthetic construct
  REGION 1..7: note = Description of Artificial Sequence: Synthetic peptide
QRTGSNS

SEQ ID NO: 627 - protein, 7 aa, synthetic construct
  REGION 1..7: note = Description of Artificial Sequence: Synthetic peptide
LKDSKPL

SEQ ID NO: 628 - protein, 7 aa, synthetic construct
  REGION 1..7: note = Description of Artificial Sequence: Synthetic peptide
SPTNSPH

SEQ ID NO: 629 - protein, 7 aa, synthetic construct
  REGION 1..7: note = Description of Artificial Sequence: Synthetic peptide
NGTQKSH

SEQ ID NO: 630 - protein, 7 aa, synthetic construct
  REGION 1..7: note = Description of Artificial Sequence: Synthetic peptide
TVGKPSS

SEQ ID NO: 631 - protein, 7 aa, synthetic construct
  REGION 1..7: note = Description of Artificial Sequence: Synthetic peptide
GRGESSK

SEQ ID NO: 632 - protein, 7 aa, synthetic construct
  REGION 1..7: note = Description of Artificial Sequence: Synthetic peptide
VTQSASK

SEQ ID NO: 633 - protein, 7 aa, synthetic construct
  REGION 1..7: note = Description of Artificial Sequence: Synthetic peptide
GNGTKTI

SEQ ID NO: 634 - protein, 7 aa, synthetic construct
  REGION 1..7: note = Description of Artificial Sequence: Synthetic peptide
VQQDPVR

SEQ ID NO: 635 - protein, 7 aa, synthetic construct
  REGION 1..7: note = Description of Artificial Sequence: Synthetic peptide
RRETTNT

SEQ ID NO: 636 - protein, 7 aa, synthetic construct
  REGION 1..7: note = Description of Artificial Sequence: Synthetic peptide
AGNNTHT

SEQ ID NO: 637 - protein, 7 aa, synthetic construct
  REGION 1..7: note = Description of Artificial Sequence: Synthetic peptide
SQNAPHN

SEQ ID NO: 638 - protein, 7 aa, synthetic construct
  REGION 1..7: note = Description of Artificial Sequence: Synthetic peptide
SLQPPSK

SEQ ID NO: 639 - protein, 7 aa, synthetic construct
  REGION 1..7: note = Description of Artificial Sequence: Synthetic peptide
RGDSRRE

SEQ ID NO: 640 - protein, 7 aa, synthetic construct
  REGION 1..7: note = Description of Artificial Sequence: Synthetic peptide
FGKGSNT

SEQ ID NO: 641 - protein, 7 aa, synthetic construct
  REGION 1..7: note = Description of Artificial Sequence: Synthetic peptide
APATKPS

SEQ ID NO: 642 - protein, 7 aa, synthetic construct
  REGION 1..7: note = Description of Artificial Sequence: Synthetic peptide
EPTGRNN

SEQ ID NO: 643 - protein, 7 aa, synthetic construct
  REGION 1..7: note = Description of Artificial Sequence: Synthetic peptide
LRSKEST

SEQ ID NO: 644 - protein, 7 aa, synthetic construct
  REGION 1..7: note = Description of Artificial Sequence: Synthetic peptide
DGAGKPT

SEQ ID NO: 645 - protein, 7 aa, synthetic construct
  REGION 1..7: note = Description of Artificial Sequence: Synthetic peptide
VQTGASK

SEQ ID NO: 646 - protein, 7 aa, synthetic construct
  REGION 1..7: note = Description of Artificial Sequence: Synthetic peptide
GASNGHG

SEQ ID NO: 647 - protein, 7 aa, synthetic construct
  REGION 1..7: note = Description of Artificial Sequence: Synthetic peptide
MDKPTVV

SEQ ID NO: 648 - protein, 7 aa, synthetic construct
  REGION 1..7: note = Description of Artificial Sequence: Synthetic peptide
DPQPTAK

SEQ ID NO: 649 - protein, 7 aa, synthetic construct
  REGION 1..7: note = Description of Artificial Sequence: Synthetic peptide
DSSPTLK

SEQ ID NO: 650 - protein, 7 aa, synthetic construct
  REGION 1..7: note = Description of Artificial Sequence: Synthetic peptide
GLRGQNT

SEQ ID NO: 651 - protein, 7 aa, synthetic construct
  REGION 1..7: note = Description of Artificial Sequence: Synthetic peptide
SASDRAS

SEQ ID NO: 652 - protein, 7 aa, synthetic construct
  REGION 1..7: note = Description of Artificial Sequence: Synthetic peptide
GTTGART

SEQ ID NO: 653 - protein, 7 aa, synthetic construct
  REGION 1..7: note = Description of Artificial Sequence: Synthetic peptide
DGTSSLR

SEQ ID NO: 654 - protein, 7 aa, synthetic construct
  REGION 1..7: note = Description of Artificial Sequence: Synthetic peptide
RDGASQA

SEQ ID NO: 655 - protein, 7 aa, synthetic construct
  REGION 1..7: note = Description of Artificial Sequence: Synthetic peptide
TGGSKAT

SEQ ID NO: 656 - protein, 7 aa, synthetic construct
  REGION 1..7: note = Description of Artificial Sequence: Synthetic peptide
MHDKATA

SEQ ID NO: 657 - protein, 7 aa, synthetic construct
  REGION 1..7: note = Description of Artificial Sequence: Synthetic peptide
GASSPRN

SEQ ID NO: 658 - protein, 7 aa, synthetic construct
  REGION 1..7: note = Description of Artificial Sequence: Synthetic peptide
SGNNNSK

SEQ ID NO: 659 - protein, 7 aa, synthetic construct
  REGION 1..7: note = Description of Artificial Sequence: Synthetic peptide
NGGRAPV

SEQ ID NO: 660 - protein, 7 aa, synthetic construct
  REGION 1..7: note = Description of Artificial Sequence: Synthetic peptide
STVASPK

SEQ ID NO: 661 - protein, 7 aa, synthetic construct
  REGION 1..7: note = Description of Artificial Sequence: Synthetic peptide
VNNGKPS

SEQ ID NO: 662 - protein, 7 aa, synthetic construct
  REGION 1..7: note = Description of Artificial Sequence: Synthetic peptide
GGVKHSD

SEQ ID NO: 663 - protein, 7 aa, synthetic construct
  REGION 1..7: note = Description of Artificial Sequence: Synthetic peptide
RNSQASG

SEQ ID NO: 664 - protein, 7 aa, synthetic construct
  REGION 1..7: note = Description of Artificial Sequence: Synthetic peptide
SNQSGSK

SEQ ID NO: 665 - protein, 7 aa, synthetic construct
  REGION 1..7: note = Description of Artificial Sequence: Synthetic peptide
AMNNKAE

SEQ ID NO: 666 - protein, 7 aa, synthetic construct
  REGION 1..7: note = Description of Artificial Sequence: Synthetic peptide
ASNNPRT

SEQ ID NO: 667 - protein, 7 aa, synthetic construct
  REGION 1..7: note = Description of Artificial Sequence: Synthetic peptide
EGQSPQS

SEQ ID NO: 668 - protein, 7 aa, synthetic construct
  REGION 1..7: note = Description of Artificial Sequence: Synthetic peptide
TGSGNSS

SEQ ID NO: 669 - protein, 7 aa, synthetic construct
  REGION 1..7: note = Description of Artificial Sequence: Synthetic peptide
SGSANLT

SEQ ID NO: 670 - protein, 7 aa, synthetic construct
  REGION 1..7: note = Description of Artificial Sequence: Synthetic peptide
MGQASNI

SEQ ID NO: 671 - protein, 7 aa, synthetic construct
  REGION 1..7: note = Description of Artificial Sequence: Synthetic peptide
LGNQSPK

SEQ ID NO: 672 - protein, 7 aa, synthetic construct
  REGION 1..7: note = Description of Artificial Sequence: Synthetic peptide
GSDRSSG

SEQ ID NO: 673 - protein, 7 aa, synthetic construct
  REGION 1..7: note = Description of Artificial Sequence: Synthetic peptide
VVNKASS

SEQ ID NO: 674 - protein, 7 aa, synthetic construct
  REGION 1..7: note = Description of Artificial Sequence: Synthetic peptide
TGRPSPT

SEQ ID NO: 675 - protein, 7 aa, synthetic construct
  REGION 1..7: note = Description of Artificial Sequence: Synthetic peptide
SSGDKRH

SEQ ID NO: 676 - protein, 7 aa, synthetic construct
  REGION 1..7: note = Description of Artificial Sequence: Synthetic peptide
DSAAKMS

SEQ ID NO: 677 - protein, 7 aa, synthetic construct
  REGION 1..7: note = Description of Artificial Sequence: Synthetic peptide
GTSTPVT

SEQ ID NO: 678 - protein, 7 aa, synthetic construct
  REGION 1..7: note = Description of Artificial Sequence: Synthetic peptide
TVGKVNS

SEQ ID NO: 679 - protein, 7 aa, synthetic construct
  REGION 1..7: note = Description of Artificial Sequence: Synthetic peptide
VGNSQPP

SEQ ID NO: 680 - protein, 7 aa, synthetic construct
  REGION 1..7: note = Description of Artificial Sequence: Synthetic peptide
TGVSKPV

SEQ ID NO: 681 - protein, 7 aa, synthetic construct
  REGION 1..7: note = Description of Artificial Sequence: Synthetic peptide
SEKTANS

SEQ ID NO: 682 - protein, 7 aa, synthetic construct
  REGION 1..7: note = Description of Artificial Sequence: Synthetic peptide
SSGTSAG

SEQ ID NO: 683 - protein, 7 aa, synthetic construct
  REGION 1..7: note = Description of Artificial Sequence: Synthetic peptide
GRSGTNA

SEQ ID NO: 684 - protein, 7 aa, synthetic construct
  REGION 1..7: note = Description of Artificial Sequence: Synthetic peptide
VAQSPTS

SEQ ID NO: 685 - protein, 7 aa, synthetic construct
  REGION 1..7: note = Description of Artificial Sequence: Synthetic peptide
HGSSSGK

SEQ ID NO: 686 - protein, 7 aa, synthetic construct
  REGION 1..7: note = Description of Artificial Sequence: Synthetic peptide
NPSGSTG

SEQ ID NO: 687 - protein, 7 aa, synthetic construct
  REGION 1..7: note = Description of Artificial Sequence: Synthetic peptide
QAENSRN

SEQ ID NO: 688 - protein, 7 aa, synthetic construct
  REGION 1..7: note = Description of Artificial Sequence: Synthetic peptide
TSSTNFS

SEQ ID NO: 689 - protein, 7 aa, synthetic construct
  REGION 1..7: note = Description of Artificial Sequence: Synthetic peptide
TGSQSSG

SEQ ID NO: 690 - protein, 7 aa, synthetic construct
  REGION 1..7: note = Description of Artificial Sequence: Synthetic peptide
SGVTKSS

SEQ ID NO: 691 - protein, 7 aa, synthetic construct
  REGION 1..7: note = Description of Artificial Sequence: Synthetic peptide
QGSKSVL

SEQ ID NO: 692 - protein, 7 aa, synthetic construct
  REGION 1..7: note = Description of Artificial Sequence: Synthetic peptide
AGASVNA

SEQ ID NO: 693 - protein, 7 aa, synthetic construct
  REGION 1..7: note = Description of Artificial Sequence: Synthetic peptide
SRDSPPK

SEQ ID NO: 694 - protein, 7 aa, synthetic construct
  REGION 1..7: note = Description of Artificial Sequence: Synthetic peptide
RSDNKAS

SEQ ID NO: 695 - protein, 7 aa, synthetic construct
  REGION 1..7: note = Description of Artificial Sequence: Synthetic peptide
QVQKSSS

SEQ ID NO: 696 - protein, 7 aa, synthetic construct
  REGION 1..7: note = Description of Artificial Sequence: Synthetic peptide
GSVTNSG

SEQ ID NO: 697 - protein, 7 aa, synthetic construct
  REGION 1..7: note = Description of Artificial Sequence: Synthetic peptide
GGASPSR

SEQ ID NO: 698 - protein, 7 aa, synthetic construct
  REGION 1..7: note = Description of Artificial Sequence: Synthetic peptide
LQANKSQ

SEQ ID NO: 699 - protein, 7 aa, synthetic construct
  REGION 1..7: note = Description of Artificial Sequence: Synthetic peptide
GRSGENS

SEQ ID NO: 700 - protein, 7 aa, synthetic construct
  REGION 1..7: note = Description of Artificial Sequence: Synthetic peptide
NESNRQS

SEQ ID NO: 701 - protein, 7 aa, synthetic construct
  REGION 1..7: note = Description of Artificial Sequence: Synthetic peptide
TIGKGGS

SEQ ID NO: 702 - protein, 7 aa, synthetic construct
  REGION 1..7: note = Description of Artificial Sequence: Synthetic peptide
GTGSGSR

SEQ ID NO: 703 - protein, 7 aa, synthetic construct
  REGION 1..7: note = Description of Artificial Sequence: Synthetic peptide
ISGSNSK

SEQ ID NO: 704 - protein, 7 aa, synthetic construct
  REGION 1..7: note = Description of Artificial Sequence: Synthetic peptide
ENSTAPK

SEQ ID NO: 705 - protein, 7 aa, synthetic construct
  REGION 1..7: note = Description of Artificial Sequence: Synthetic peptide
GGSGTMK

SEQ ID NO: 706 - protein, 7 aa, synthetic construct
  REGION 1..7: note = Description of Artificial Sequence: Synthetic peptide
AGASPNH

SEQ ID NO: 707 - protein, 7 aa, synthetic construct
  REGION 1..7: note = Description of Artificial Sequence: Synthetic peptide
DQSTKGS

SEQ ID NO: 708 - protein, 7 aa, synthetic construct
  REGION 1..7: note = Description of Artificial Sequence: Synthetic peptide
GDLTSTK

SEQ ID NO: 709 - protein, 7 aa, synthetic construct
  REGION 1..7: note = Description of Artificial Sequence: Synthetic peptide
AGKSTVN

SEQ ID NO: 710 - protein, 7 aa, synthetic construct
  REGION 1..7: note = Description of Artificial Sequence: Synthetic peptide
ATHAPQS

SEQ ID NO: 711 - protein, 7 aa, synthetic construct
  REGION 1..7: note = Description of Artificial Sequence: Synthetic peptide
ATKPSQG

SEQ ID NO: 712 - protein, 7 aa, synthetic construct
  REGION 1..7: note = Description of Artificial Sequence: Synthetic peptide
TDSGASK

SEQ ID NO: 713 - protein, 7 aa, synthetic construct
  REGION 1..7: note = Description of Artificial Sequence: Synthetic peptide
TTGSKGM

SEQ ID NO: 714 - protein, 7 aa, synthetic construct
  REGION 1..7: note = Description of Artificial Sequence: Synthetic peptide
TGANNLK

SEQ ID NO: 715 - protein, 7 aa, synthetic construct
  REGION 1..7: note = Description of Artificial Sequence: Synthetic peptide
SRSTKPE

SEQ ID NO: 716 - protein, 7 aa, synthetic construct
  REGION 1..7: note = Description of Artificial Sequence: Synthetic peptide
GSGGSKS

SEQ ID NO: 717 - protein, 7 aa, synthetic construct
  REGION 1..7: note = Description of Artificial Sequence: Synthetic peptide
TSGSPNS

SEQ ID NO: 718 - protein, 7 aa, synthetic construct
  REGION 1..7: note = Description of Artificial Sequence: Synthetic peptide
SMGKSAV

SEQ ID NO: 719 - protein, 7 aa, synthetic construct
  REGION 1..7: note = Description of Artificial Sequence: Synthetic peptide
SAAGSPT

SEQ ID NO: 720 - protein, 7 aa, synthetic construct
  REGION 1..7: note = Description of Artificial Sequence: Synthetic peptide
TQNSPNG

SEQ ID NO: 721 - protein, 7 aa, synthetic construct
  REGION 1..7: note = Description of Artificial Sequence: Synthetic peptide
SSSQKPS

SEQ ID NO: 722 - protein, 7 aa, synthetic construct
  REGION 1..7: note = Description of Artificial Sequence: Synthetic peptide
KGAPNNS

SEQ ID NO: 723 - protein, 7 aa, synthetic construct
  REGION 1..7: note = Description of Artificial Sequence: Synthetic peptide
TRDVKAG

SEQ ID NO: 724 - protein, 7 aa, synthetic construct
  REGION 1..7: note = Description of Artificial Sequence: Synthetic peptide
HRESKST

SEQ ID NO: 725 - protein, 7 aa, synthetic construct
  REGION 1..7: note = Description of Artificial Sequence: Synthetic peptide
GSDKNRG

SEQ ID NO: 726 - protein, 7 aa, synthetic construct
  REGION 1..7: note = Description of Artificial Sequence: Synthetic peptide
ISNKSSN

SEQ ID NO: 727 - protein, 7 aa, synthetic construct
  REGION 1..7: note = Description of Artificial Sequence: Synthetic peptide
GNSGPSK

SEQ ID NO: 728 - protein, 7 aa, synthetic construct
  REGION 1..7: note = Description of Artificial Sequence: Synthetic peptide
QGNDRKV

SEQ ID NO: 729 - protein, 7 aa, synthetic construct
  REGION 1..7: note = Description of Artificial Sequence: Synthetic peptide
APDTKPT

SEQ ID NO: 730 - protein, 7 aa, synthetic construct
  REGION 1..7: note = Description of Artificial Sequence: Synthetic peptide
QGKTGSV

SEQ ID NO: 731 - protein, 7 aa, synthetic construct
  REGION 1..7: note = Description of Artificial Sequence: Synthetic peptide
ANTTASV

SEQ ID NO: 732 - protein, 7 aa, synthetic construct
  REGION 1..7: note = Description of Artificial Sequence: Synthetic peptide
TNSSSHM

SEQ ID NO: 733 - protein, 7 aa, synthetic construct
  REGION 1..7: note = Description of Artificial Sequence: Synthetic peptide
GAGREGA

SEQ ID NO: 734 - protein, 7 aa, synthetic construct
  REGION 1..7: note = Description of Artificial Sequence: Synthetic peptide
DSSTRPL

SEQ ID NO: 735 - protein, 7 aa, synthetic construct
  REGION 1..7: note = Description of Artificial Sequence: Synthetic peptide
TPGSKTM

SEQ ID NO: 736 - protein, 7 aa, synthetic construct
  REGION 1..7: note = Description of Artificial Sequence: Synthetic peptide
ESATKSS

SEQ ID NO: 737 - protein, 7 aa, synthetic construct
  REGION 1..7: note = Description of Artificial Sequence: Synthetic peptide
NQDAKQY

SEQ ID NO: 738 - protein, 7 aa, synthetic construct
  REGION 1..7: note = Description of Artificial Sequence: Synthetic peptide
SVGNSNK

SEQ ID NO: 739 - protein, 7 aa, synthetic construct
  REGION 1..7: note = Description of Artificial Sequence: Synthetic peptide
SQGDKTT

SEQ ID NO: 740 - protein, 7 aa, synthetic construct
  REGION 1..7: note = Description of Artificial Sequence: Synthetic peptide
NRNGTSG

SEQ ID NO: 741 - protein, 7 aa, synthetic construct
  REGION 1..7: note = Description of Artificial Sequence: Synthetic peptide
QSSGKGG

SEQ ID NO: 742 - protein, 7 aa, synthetic construct
  REGION 1..7: note = Description of Artificial Sequence: Synthetic peptide
GASQKTV

SEQ ID NO: 743 - protein, 7 aa, synthetic construct
  REGION 1..7: note = Description of Artificial Sequence: Synthetic peptide
NGTTTGG

SEQ ID NO: 744 - protein, 7 aa, synthetic construct
  REGION 1..7: note = Description of Artificial Sequence: Synthetic peptide
VPSKTST

SEQ ID NO: 745 - protein, 7 aa, synthetic construct
  REGION 1..7: note = Description of Artificial Sequence: Synthetic peptide
TPSNRTE

SEQ ID NO: 746 - protein, 7 aa, synthetic construct
  REGION 1..7: note = Description of Artificial Sequence: Synthetic peptide
GRDKGTG

SEQ ID NO: 747 - protein, 7 aa, synthetic construct
  REGION 1..7: note = Description of Artificial Sequence: Synthetic peptide
TSPGKPV

SEQ ID NO: 748 - protein, 7 aa, synthetic construct
  REGION 1..7: note = Description of Artificial Sequence: Synthetic peptide
GRTNEPK

SEQ ID NO: 749 - protein, 7 aa, synthetic construct
  REGION 1..7: note = Description of Artificial Sequence: Synthetic peptide
GSSSPIK

SEQ ID NO: 750 - protein, 7 aa, synthetic construct
  REGION 1..7: note = Description of Artificial Sequence: Synthetic peptide
TQAVKSI

SEQ ID NO: 751 - protein, 7 aa, synthetic construct
  REGION 1..7: note = Description of Artificial Sequence: Synthetic peptide
SSGSGAG

SEQ ID NO: 752 - protein, 7 aa, synthetic construct
  REGION 1..7: note = Description of Artificial Sequence: Synthetic peptide
QTTPASG

SEQ ID NO: 753 - protein, 7 aa, synthetic construct
  REGION 1..7: note = Description of Artificial Sequence: Synthetic peptide
QAQTDKS

SEQ ID NO: 754 - protein, 7 aa, synthetic construct
  REGION 1..7: note = Description of Artificial Sequence: Synthetic peptide
HNNSKER

SEQ ID NO: 755 - protein, 7 aa, synthetic construct
  REGION 1..7: note = Description of Artificial Sequence: Synthetic peptide
AHGSNPQ

SEQ ID NO: 756 - protein, 7 aa, synthetic construct
  REGION 1..7: note = Description of Artificial Sequence: Synthetic peptide
GTENAGR

SEQ ID NO: 757 - protein, 7 aa, synthetic construct
  REGION 1..7: note = Description of Artificial Sequence: Synthetic peptide
GPSTSGA

SEQ ID NO: 758 - protein, 7 aa, synthetic construct
  REGION 1..7: note = Description of Artificial Sequence: Synthetic peptide
QNKSVAS

SEQ ID NO: 759 - protein, 7 aa, synthetic construct
  REGION 1..7: note = Description of Artificial Sequence: Synthetic peptide
GNQKPPT

SEQ ID NO: 760 - protein, 7 aa, synthetic construct
  REGION 1..7: note = Description of Artificial Sequence: Synthetic peptide
SAHVKGS

SEQ ID NO: 761 - protein, 7 aa, synthetic construct
  REGION 1..7: note = Description of Artificial Sequence: Synthetic peptide
GVATSAS

SEQ ID NO: 762 - protein, 7 aa, synthetic construct
  REGION 1..7: note = Description of Artificial Sequence: Synthetic peptide
SGHSPVN

SEQ ID NO: 763 - protein, 7 aa, synthetic construct
  REGION 1..7: note = Description of Artificial Sequence: Synthetic peptide
SNDSARK

SEQ ID NO: 764 - protein, 7 aa, synthetic construct
  REGION 1..7: note = Description of Artificial Sequence: Synthetic peptide
NASTKAL

SEQ ID NO: 765 - protein, 7 aa, synthetic construct
  REGION 1..7: note = Description of Artificial Sequence: Synthetic peptide
TNMKPSS

SEQ ID NO: 766 - protein, 7 aa, synthetic construct
  REGION 1..7: note = Description of Artificial Sequence: Synthetic peptide
ASAQVSK

SEQ ID NO: 767 - protein, 7 aa, synthetic construct
  REGION 1..7: note = Description of Artificial Sequence: Synthetic peptide
GTSKSAA

SEQ ID NO: 768 - protein, 7 aa, synthetic construct
  REGION 1..7: note = Description of Artificial Sequence: Synthetic peptide
TPDSKGK

SEQ ID NO: 769 - protein, 7 aa, synthetic construct
  REGION 1..7: note = Description of Artificial Sequence: Synthetic peptide
QQNSDTK

SEQ ID NO: 770 - protein, 7 aa, synthetic construct
  REGION 1..7: note = Description of Artificial Sequence: Synthetic peptide
DRSPGTA

SEQ ID NO: 771 - protein, 7 aa, synthetic construct
  REGION 1..7: note = Description of Artificial Sequence: Synthetic peptide
AGGGGVN

SEQ ID NO: 772 - protein, 7 aa, synthetic construct
  REGION 1..7: note = Description of Artificial Sequence: Synthetic peptide
LTQKQSG

SEQ ID NO: 773 - protein, 7 aa, synthetic construct
  REGION 1..7: note = Description of Artificial Sequence: Synthetic peptide
ERSTSSA

SEQ ID NO: 774 - protein, 7 aa, synthetic construct
  REGION 1..7: note = Description of Artificial Sequence: Synthetic peptide
HRGDSQA

SEQ ID NO: 775 - protein, 7 aa, synthetic construct
  REGION 1..7: note = Description of Artificial Sequence: Synthetic peptide
NSHTTPQ

SEQ ID NO: 776 - protein, 7 aa, synthetic construct
  REGION 1..7: note = Description of Artificial Sequence: Synthetic peptide
GTNTPRA

SEQ ID NO: 777 - protein, 7 aa, synthetic construct
  REGION 1..7: note = Description of Artificial Sequence: Synthetic peptide
GGVQSSK

SEQ ID NO: 778 - protein, 7 aa, synthetic construct
  REGION 1..7: note = Description of Artificial Sequence: Synthetic peptide
GSNRSSE

SEQ ID NO: 779 - protein, 7 aa, synthetic construct
  REGION 1..7: note = Description of Artificial Sequence: Synthetic peptide
DRATSAQ

SEQ ID NO: 780 - protein, 7 aa, synthetic construct
  REGION 1..7: note = Description of Artificial Sequence: Synthetic peptide
NQSGTKG

SEQ ID NO: 781 - protein, 7 aa, synthetic construct
  REGION 1..7: note = Description of Artificial Sequence: Synthetic peptide
SGSGPTR

SEQ ID NO: 782 - protein, 7 aa, synthetic construct
  REGION 1..7: note = Description of Artificial Sequence: Synthetic peptide
SQTKSLT

SEQ ID NO: 783 - protein, 7 aa, synthetic construct
  REGION 1..7: note = Description of Artificial Sequence: Synthetic peptide
QSKPGGS

SEQ ID NO: 784 - protein, 7 aa, synthetic construct
  REGION 1..7: note = Description of Artificial Sequence: Synthetic peptide
QAVPTAG

SEQ ID NO: 785 - protein, 7 aa, synthetic construct
  REGION 1..7: note = Description of Artificial Sequence: Synthetic peptide
SGTEVIK

SEQ ID NO: 786 - protein, 7 aa, synthetic construct
  REGION 1..7: note = Description of Artificial Sequence: Synthetic peptide
SLTKPQT

SEQ ID NO: 787 - protein, 7 aa, synthetic construct
  REGION 1..7: note = Description of Artificial Sequence: Synthetic peptide
HGERTNN

SEQ ID NO: 788 - protein, 7 aa, synthetic construct
  REGION 1..7: note = Description of Artificial Sequence: Synthetic peptide
GNNKTLM

SEQ ID NO: 789 - protein, 7 aa, synthetic construct
  REGION 1..7: note = Description of Artificial Sequence: Synthetic peptide
TTGEKRP

SEQ ID NO: 790 - protein, 7 aa, synthetic construct
  REGION 1..7: note = Description of Artificial Sequence: Synthetic peptide
EMISKSK

SEQ ID NO: 791 - protein, 7 aa, synthetic construct
  REGION 1..7: note = Description of Artificial Sequence: Synthetic peptide
EHRSPSI

SEQ ID NO: 792 - protein, 7 aa, synthetic construct
  REGION 1..7: note = Description of Artificial Sequence: Synthetic peptide
GLETRAQ

SEQ ID NO: 793 - protein, 7 aa, synthetic construct
  REGION 1..7: note = Description of Artificial Sequence: Synthetic peptide
TGVSPVA

SEQ ID NO: 794 - protein, 7 aa, synthetic construct
  REGION 1..7: note = Description of Artificial Sequence: Synthetic peptide
SSTSSAS

SEQ ID NO: 795 - protein, 7 aa, synthetic construct
  REGION 1..7: note = Description of Artificial Sequence: Synthetic peptide
SGNAKSN

SEQ ID NO: 796 - protein, 7 aa, synthetic construct
  REGION 1..7: note = Description of Artificial Sequence: Synthetic peptide
GVASPRS

SEQ ID NO: 797 - protein, 7 aa, synthetic construct
  REGION 1..7: note = Description of Artificial Sequence: Synthetic peptide
GPLATVK

SEQ ID NO: 798 - protein, 7 aa, synthetic construct
  REGION 1..7: note = Description of Artificial Sequence: Synthetic peptide
SPTSQNN

SEQ ID NO: 799 - protein, 7 aa, synthetic construct
  REGION 1..7: note = Description of Artificial Sequence: Synthetic peptide
QGKAQQA

SEQ ID NO: 800 - protein, 7 aa, synthetic construct
  REGION 1..7: note = Description of Artificial Sequence: Synthetic peptide
GTASQNS

SEQ ID NO: 801 - protein, 7 aa, synthetic construct
  REGION 1..7: note = Description of Artificial Sequence: Synthetic peptide
NSASSSS

SEQ ID NO: 802 - protein, 7 aa, synthetic construct
  REGION 1..7: note = Description of Artificial Sequence: Synthetic peptide
LATKGSA

SEQ ID NO: 803 - protein, 7 aa, synthetic construct
  REGION 1..7: note = Description of Artificial Sequence: Synthetic peptide
GRDHKTS

SEQ ID NO: 804 - protein, 7 aa, synthetic construct
  REGION 1..7: note = Description of Artificial Sequence: Synthetic peptide
GSPGTSN

SEQ ID NO: 805 - protein, 7 aa, synthetic construct
  REGION 1..7: note = Description of Artificial Sequence: Synthetic peptide
RSDGNKG

SEQ ID NO: 806 - protein, 7 aa, synthetic construct
  REGION 1..7: note = Description of Artificial Sequence: Synthetic peptide
TSQRDHA

SEQ ID NO: 807 - protein, 7 aa, synthetic construct
  REGION 1..7: note = Description of Artificial Sequence: Synthetic peptide
GVPKDKG

SEQ ID NO: 808 - protein, 7 aa, synthetic construct
  REGION 1..7: note = Description of Artificial Sequence: Synthetic peptide
VGTKSQG

SEQ ID NO: 809 - protein, 7 aa, synthetic construct
  REGION 1..7: note = Description of Artificial Sequence: Synthetic peptide
EANSRST

SEQ ID NO: 810 - protein, 7 aa, synthetic construct
  REGION 1..7: note = Description of Artificial Sequence: Synthetic peptide
TVSTPSS

SEQ ID NO: 811 - protein, 7 aa, synthetic construct
  REGION 1..7: note = Description of Artificial Sequence: Synthetic peptide
GTNSPPR

SEQ ID NO: 812 - protein, 7 aa, synthetic construct
  REGION 1..7: note = Description of Artificial Sequence: Synthetic peptide
GPQGENR

SEQ ID NO: 813 - protein, 7 aa, synthetic construct
  REGION 1..7: note = Description of Artificial Sequence: Synthetic peptide
DQAKGGR

SEQ ID NO: 814 - protein, 7 aa, synthetic construct
  REGION 1..7: note = Description of Artificial Sequence: Synthetic peptide
SQRSPGT

SEQ ID NO: 815 - protein, 7 aa, synthetic construct
  REGION 1..7: note = Description of Artificial Sequence: Synthetic peptide
TTNTKAT

SEQ ID NO: 816 - protein, 7 aa, synthetic construct
  REGION 1..7: note = Description of Artificial Sequence: Synthetic peptide
DGVGGRG

SEQ ID NO: 817 - protein, 7 aa, synthetic construct
  REGION 1..7: note = Description of Artificial Sequence: Synthetic peptide
GPTNSVK

SEQ ID NO: 818 - protein, 7 aa, synthetic construct
  REGION 1..7: note = Description of Artificial Sequence: Synthetic peptide
TPVNSPH

SEQ ID NO: 819 - protein, 7 aa, synthetic construct
  REGION 1..7: note = Description of Artificial Sequence: Synthetic peptide
RGSGSSS

SEQ ID NO: 820 - protein, 7 aa, synthetic construct
  REGION 1..7: note = Description of Artificial Sequence: Synthetic peptide
LHSDKTT

SEQ ID NO: 821 - protein, 7 aa, synthetic construct
  REGION 1..7: note = Description of Artificial Sequence: Synthetic peptide
TSHDKIR

SEQ ID NO: 822 - protein, 7 aa, synthetic construct
  REGION 1..7: note = Description of Artificial Sequence: Synthetic peptide
SVEGKNR

SEQ ID NO: 823 - protein, 7 aa, synthetic construct
  REGION 1..7: note = Description of Artificial Sequence: Synthetic peptide
GTSVKAT

SEQ ID NO: 824 - protein, 7 aa, synthetic construct
  REGION 1..7: note = Description of Artificial Sequence: Synthetic peptide
SNTNASV

SEQ ID NO: 825 - protein, 7 aa, synthetic construct
  REGION 1..7: note = Description of Artificial Sequence: Synthetic peptide
ANSSKVV

SEQ ID NO: 826 - protein, 7 aa, synthetic construct
  REGION 1..7: note = Description of Artificial Sequence: Synthetic peptide
HNSSTSS

SEQ ID NO: 827 - protein, 7 aa, synthetic construct
  REGION 1..7: note = Description of Artificial Sequence: Synthetic peptide
NDGKNSL

SEQ ID NO: 828 - protein, 7 aa, synthetic construct
  REGION 1..7: note = Description of Artificial Sequence: Synthetic peptide
TGQNGSA

SEQ ID NO: 829 - protein, 7 aa, synthetic construct
  REGION 1..7: note = Description of Artificial Sequence: Synthetic peptide
GHAESSK

SEQ ID NO: 830 - protein, 7 aa, synthetic construct
  REGION 1..7: note = Description of Artificial Sequence: Synthetic peptide
SAGGKPA

SEQ ID NO: 831 - protein, 7 aa, synthetic construct
  REGION 1..7: note = Description of Artificial Sequence: Synthetic peptide
TQSKSAM

SEQ ID NO: 832 - protein, 7 aa, synthetic construct
  REGION 1..7: note = Description of Artificial Sequence: Synthetic peptide
HTHSPTQ

SEQ ID NO: 833 - protein, 7 aa, synthetic construct
  REGION 1..7: note = Description of Artificial Sequence: Synthetic peptide
TNNKQAL

SEQ ID NO: 834 - protein, 7 aa, synthetic construct
  REGION 1..7: note = Description of Artificial Sequence: Synthetic peptide
SSTSKTV

SEQ ID NO: 835 - protein, 7 aa, synthetic construct
  REGION 1..7: note = Description of Artificial Sequence: Synthetic peptide
TQESKYG

SEQ ID NO: 836 - protein, 7 aa, synthetic construct
  REGION 1..7: note = Description of Artificial Sequence: Synthetic peptide
GLTGKSS

SEQ ID NO: 837 - protein, 7 aa, synthetic construct
  REGION 1..7: note = Description of Artificial Sequence: Synthetic peptide
NGVPPNQ

SEQ ID NO: 838 - protein, 7 aa, synthetic construct
  REGION 1..7: note = Description of Artificial Sequence: Synthetic peptide
RDGNNAT

SEQ ID NO: 839 - protein, 7 aa, synthetic construct
  REGION 1..7: note = Description of Artificial Sequence: Synthetic peptide
STATASS

SEQ ID NO: 840 - protein, 7 aa, synthetic construct
  REGION 1..7: note = Description of Artificial Sequence: Synthetic peptide
SMTKTNV

SEQ ID NO: 841 - protein, 7 aa, synthetic construct
  REGION 1..7: note = Description of Artificial Sequence: Synthetic peptide
SGKSVNN

SEQ ID NO: 842 - protein, 7 aa, synthetic construct
  REGION 1..7: note = Description of Artificial Sequence: Synthetic peptide
HINGKSQ

SEQ ID NO: 843 - protein, 7 aa, synthetic construct
  REGION 1..7: note = Description of Artificial Sequence: Synthetic peptide
GASSKEK

SEQ ID NO: 844 - protein, 7 aa, synthetic construct
  REGION 1..7: note = Description of Artificial Sequence: Synthetic peptide
SSPQSTG

SEQ ID NO: 845 - protein, 7 aa, synthetic construct
  REGION 1..7: note = Description of Artificial Sequence: Synthetic peptide
ASAKSST

SEQ ID NO: 846 - protein, 7 aa, synthetic construct
  REGION 1..7: note = Description of Artificial Sequence: Synthetic peptide
NQATALS

SEQ ID NO: 847 - protein, 7 aa, synthetic construct
  REGION 1..7: note = Description of Artificial Sequence: Synthetic peptide
QVTKTNN

SEQ ID NO: 848 - protein, 7 aa, synthetic construct
  REGION 1..7: note = Description of Artificial Sequence: Synthetic peptide
QQNSKLV

SEQ ID NO: 849 - protein, 7 aa, synthetic construct
  REGION 1..7: note = Description of Artificial Sequence: Synthetic peptide
AAGAKSG

SEQ ID NO: 850 - protein, 7 aa, synthetic construct
  REGION 1..7: note = Description of Artificial Sequence: Synthetic peptide
NPSNKNN

SEQ ID NO: 851 - protein, 7 aa, synthetic construct
  REGION 1..7: note = Description of Artificial Sequence: Synthetic peptide
SASRDKA

SEQ ID NO: 852 - protein, 7 aa, synthetic construct
  REGION 1..7: note = Description of Artificial Sequence: Synthetic peptide
TASNTPS

SEQ ID NO: 853 - protein, 7 aa, synthetic construct
  REGION 1..7: note = Description of Artificial Sequence: Synthetic peptide
TPSQKGT

SEQ ID NO: 854 - protein, 7 aa, synthetic construct
  REGION 1..7: note = Description of Artificial Sequence: Synthetic peptide
VTNTKSH

SEQ ID NO: 855 - protein, 7 aa, synthetic construct
  REGION 1..7: note = Description of Artificial Sequence: Synthetic peptide
NTSSKPT

SEQ ID NO: 856 - protein, 7 aa, synthetic construct
  REGION 1..7: note = Description of Artificial Sequence: Synthetic peptide
SMSQKSG

SEQ ID NO: 857 - protein, 7 aa, synthetic construct
  REGION 1..7: note = Description of Artificial Sequence: Synthetic peptide
NSGKTLI

SEQ ID NO: 858 - protein, 7 aa, synthetic construct
  REGION 1..7: note = Description of Artificial Sequence: Synthetic peptide
GASTKTV

SEQ ID NO: 859 - protein, 7 aa, synthetic construct
  REGION 1..7: note = Description of Artificial Sequence: Synthetic peptide
SIASKPT

SEQ ID NO: 860 - protein, 7 aa, synthetic construct
  REGION 1..7: note = Description of Artificial Sequence: Synthetic peptide
QTASSSK

SEQ ID NO: 861 - protein, 7 aa, synthetic construct
  REGION 1..7: note = Description of Artificial Sequence: Synthetic peptide
SSDAKPI

SEQ ID NO: 862 - protein, 7 aa, synthetic construct
  REGION 1..7: note = Description of Artificial Sequence: Synthetic peptide
NGSGQNK

SEQ ID NO: 863 - protein, 7 aa, synthetic construct
  REGION 1..7: note = Description of Artificial Sequence: Synthetic peptide
STAKATG

SEQ ID NO: 864 - protein, 7 aa, synthetic construct
  REGION 1..7: note = Description of Artificial Sequence: Synthetic peptide
MPDQKAS

SEQ ID NO: 865 - protein, 7 aa, synthetic construct
  REGION 1..7: note = Description of Artificial Sequence: Synthetic peptide
DGTLSSK

SEQ ID NO: 866 - protein, 7 aa, synthetic construct
  REGION 1..7: note = Description of Artificial Sequence: Synthetic peptide
SDSSKSQ

SEQ ID NO: 867 - protein, 7 aa, synthetic construct
  REGION 1..7: note = Description of Artificial Sequence: Synthetic peptide
HQKSGGS

SEQ ID NO: 868 - protein, 7 aa, synthetic construct
  REGION 1..7: note = Description of Artificial Sequence: Synthetic peptide
DGSPRSV

SEQ ID NO: 869 - protein, 7 aa, synthetic construct
  REGION 1..7: note = Description of Artificial Sequence: Synthetic peptide
SPVTHGK

SEQ ID NO: 870 - protein, 7 aa, synthetic construct
  REGION 1..7: note = Description of Artificial Sequence: Synthetic peptide
QIADKNH

SEQ ID NO: 871 - protein, 7 aa, synthetic construct
  REGION 1..7: note = Description of Artificial Sequence: Synthetic peptide
TAGKANS

SEQ ID NO: 872 - protein, 7 aa, synthetic construct
  REGION 1..7: note = Description of Artificial Sequence: Synthetic peptide
NLRDAPK

SEQ ID NO: 873 - protein, 7 aa, synthetic construct
  REGION 1..7: note = Description of Artificial Sequence: Synthetic peptide
AHESKAS

SEQ ID NO: 874 - protein, 7 aa, synthetic construct
  REGION 1..7: note = Description of Artificial Sequence: Synthetic peptide
TGGHSTN

SEQ ID NO: 875 - protein, 7 aa, synthetic construct
  REGION 1..7: note = Description of Artificial Sequence: Synthetic peptide
SVGKDRN

SEQ ID NO: 876 - protein, 7 aa, synthetic construct
  REGION 1..7: note = Description of Artificial Sequence: Synthetic peptide
NANKSLT

SEQ ID NO: 877 - protein, 7 aa, synthetic construct
  REGION 1..7: note = Description of Artificial Sequence: Synthetic peptide
SQNGAHR

SEQ ID NO: 878 - protein, 7 aa, synthetic construct
  REGION 1..7: note = Description of Artificial Sequence: Synthetic peptide
HSGKSTT

SEQ ID NO: 879 - protein, 7 aa, synthetic construct
  REGION 1..7: note = Description of Artificial Sequence: Synthetic peptide
NLSKTDQ

SEQ ID NO: 880 - protein, 7 aa, synthetic construct
  REGION 1..7: note = Description of Artificial Sequence: Synthetic peptide
DVSASPK

SEQ ID NO: 881 - protein, 7 aa, synthetic construct
  REGION 1..7: note = Description of Artificial Sequence: Synthetic peptide
TSLKGTN

SEQ ID NO: 882 - protein, 7 aa, synthetic construct
  REGION 1..7: note = Description of Artificial Sequence: Synthetic peptide
QADSKPV

SEQ ID NO: 883 - protein, 7 aa, synthetic construct
  REGION 1..7: note = Description of Artificial Sequence: Synthetic peptide
AKSNTNS

SEQ ID NO: 884 - protein, 7 aa, synthetic construct
  REGION 1..7: note = Description of Artificial Sequence: Synthetic peptide
GGSKANS

SEQ ID NO: 885 - protein, 7 aa, synthetic construct
  REGION 1..7: note = Description of Artificial Sequence: Synthetic peptide
GGAKGQA

SEQ ID NO: 886 - protein, 7 aa, synthetic construct
  REGION 1..7: note = Description of Artificial Sequence: Synthetic peptide
SNEKPLV

SEQ ID NO: 887 - protein, 7 aa, synthetic construct
  REGION 1..7: note = Description of Artificial Sequence: Synthetic peptide
QNHSKQD

SEQ ID NO: 888 - protein, 7 aa, synthetic construct
  REGION 1..7: note = Description of Artificial Sequence: Synthetic peptide
SGGSGIH

SEQ ID NO: 889 - protein, 7 aa, synthetic construct
  REGION 1..7: note = Description of Artificial Sequence: Synthetic peptide
AGTKQPN

SEQ ID NO: 890 - protein, 7 aa, synthetic construct
  REGION 1..7: note = Description of Artificial Sequence: Synthetic peptide
SNATGTS

SEQ ID NO: 891 - protein, 7 aa, synthetic construct
  REGION 1..7: note = Description of Artificial Sequence: Synthetic peptide
TRDQSHS

SEQ ID NO: 892 - protein, 7 aa, synthetic construct
  REGION 1..7: note = Description of Artificial Sequence: Synthetic peptide
SNSPANT

SEQ ID NO: 893 - protein, 7 aa, synthetic construct
  REGION 1..7: note = Description of Artificial Sequence: Synthetic peptide
KNETKTI

SEQ ID NO: 894 - protein, 7 aa, synthetic construct
  REGION 1..7: note = Description of Artificial Sequence: Synthetic peptide
GPTSKQS

SEQ ID NO: 895 - protein, 7 aa, synthetic construct
  REGION 1..7: note = Description of Artificial Sequence: Synthetic peptide
STSTSSR

SEQ ID NO: 896 - protein, 7 aa, synthetic construct
  REGION 1..7: note = Description of Artificial Sequence: Synthetic peptide
QDSPQPR

SEQ ID NO: 897 - protein, 7 aa, synthetic construct
  REGION 1..7: note = Description of Artificial Sequence: Synthetic peptide
GNSGKMF

SEQ ID NO: 898 - protein, 7 aa, synthetic construct
  REGION 1..7: note = Description of Artificial Sequence: Synthetic peptide
GIRSPSE

SEQ ID NO: 899 - protein, 7 aa, synthetic construct
  REGION 1..7: note = Description of Artificial Sequence: Synthetic peptide
NSSSKSS

SEQ ID NO: 900 - protein, 7 aa, synthetic construct
  REGION 1..7: note = Description of Artificial Sequence: Synthetic peptide
SPSGKGL

SEQ ID NO: 901 - protein, 7 aa, synthetic construct
  REGION 1..7: note = Description of Artificial Sequence: Synthetic peptide
STDKARV

SEQ ID NO: 902 - protein, 7 aa, synthetic construct
  REGION 1..7: note = Description of Artificial Sequence: Synthetic peptide
RSEASVK

SEQ ID NO: 903 - protein, 7 aa, synthetic construct
  REGION 1..7: note = Description of Artificial Sequence: Synthetic peptide
DNSSVNK

SEQ ID NO: 904 - protein, 7 aa, synthetic construct
  REGION 1..7: note = Description of Artificial Sequence: Synthetic peptide
SSTVKPV

SEQ ID NO: 905 - protein, 7 aa, synthetic construct
  REGION 1..7: note = Description of Artificial Sequence: Synthetic peptide
MGVKPDL

SEQ ID NO: 906 - protein, 7 aa, synthetic construct
  REGION 1..7: note = Description of Artificial Sequence: Synthetic peptide
TNQKTAA

SEQ ID NO: 907 - protein, 7 aa, synthetic construct
  REGION 1..7: note = Description of Artificial Sequence: Synthetic peptide
GTGNKHA

SEQ ID NO: 908 - protein, 7 aa, synthetic construct
  REGION 1..7: note = Description of Artificial Sequence: Synthetic peptide
GLNNSSG

SEQ ID NO: 909 - protein, 7 aa, synthetic construct
  REGION 1..7: note = Description of Artificial Sequence: Synthetic peptide
GREAPTR

SEQ ID NO: 910 - protein, 7 aa, synthetic construct
  REGION 1..7: note = Description of Artificial Sequence: Synthetic peptide
STLKPIQ

SEQ ID NO: 911 - protein, 7 aa, synthetic construct
  REGION 1..7: note = Description of Artificial Sequence: Synthetic peptide
SSAQAVS

SEQ ID NO: 912 - protein, 7 aa, synthetic construct
  REGION 1..7: note = Description of Artificial Sequence: Synthetic peptide
DGLKGQS

SEQ ID NO: 913 - protein, 7 aa, synthetic construct
  REGION 1..7: note = Description of Artificial Sequence: Synthetic peptide
VAGTSQS

SEQ ID NO: 914 - protein, 7 aa, synthetic construct
  REGION 1..7: note = Description of Artificial Sequence: Synthetic peptide
HATQAST

SEQ ID NO: 915 - protein, 7 aa, synthetic construct
  REGION 1..7: note = Description of Artificial Sequence: Synthetic peptide
TQGSRNS

SEQ ID NO: 916 - protein, 7 aa, synthetic construct
  REGION 1..7: note = Description of Artificial Sequence: Synthetic peptide
TTSGQSK

SEQ ID NO: 917 - protein, 7 aa, synthetic construct
  REGION 1..7: note = Description of Artificial Sequence: Synthetic peptide
AAAGSTK

SEQ ID NO: 918 - protein, 7 aa, synthetic construct
  REGION 1..7: note = Description of Artificial Sequence: Synthetic peptide
LSTQTSS

SEQ ID NO: 919 - protein, 7 aa, synthetic construct
  REGION 1..7: note = Description of Artificial Sequence: Synthetic peptide
NAQGTPV

SEQ ID NO: 920 - protein, 7 aa, synthetic construct
  REGION 1..7: note = Description of Artificial Sequence: Synthetic peptide
SSGSKQS

SEQ ID NO: 921 - protein, 7 aa, synthetic construct
  REGION 1..7: note = Description of Artificial Sequence: Synthetic peptide
TGGAPTT

SEQ ID NO: 922 - protein, 7 aa, synthetic construct
  REGION 1..7: note = Description of Artificial Sequence: Synthetic peptide
RGTSQQA

SEQ ID NO: 923 - protein, 7 aa, synthetic construct
  REGION 1..7: note = Description of Artificial Sequence: Synthetic peptide
IGTGKAQ

SEQ ID NO: 924 - protein, 7 aa, synthetic construct
  REGION 1..7: note = Description of Artificial Sequence: Synthetic peptide
AGSKETR

SEQ ID NO: 925 - protein, 7 aa, synthetic construct
  REGION 1..7: note = Description of Artificial Sequence: Synthetic peptide
GQASPQK

SEQ ID NO: 926 - protein, 7 aa, synthetic construct
  REGION 1..7: note = Description of Artificial Sequence: Synthetic peptide
SSDSHPT

SEQ ID NO: 927 - protein, 7 aa, synthetic construct
  REGION 1..7: note = Description of Artificial Sequence: Synthetic peptide
TNTGKPL

SEQ ID NO: 928 - protein, 7 aa, synthetic construct
  REGION 1..7: note = Description of Artificial Sequence: Synthetic peptide
VVQKPAE

SEQ ID NO: 929 - protein, 7 aa, synthetic construct
  REGION 1..7: note = Description of Artificial Sequence: Synthetic peptide
SPGSGSQ

SEQ ID NO: 930 - protein, 7 aa, synthetic construct
  REGION 1..7: note = Description of Artificial Sequence: Synthetic peptide
LGTQKTV

SEQ ID NO: 931 - protein, 7 aa, synthetic construct
  REGION 1..7: note = Description of Artificial Sequence: Synthetic peptide
SGQSGVK

SEQ ID NO: 932 - protein, 7 aa, synthetic construct
  REGION 1..7: note = Description of Artificial Sequence: Synthetic peptide
ASTSTQA

SEQ ID NO: 933 - protein, 7 aa, synthetic construct
  REGION 1..7: note = Description of Artificial Sequence: Synthetic peptide
GMAGSSQ

SEQ ID NO: 934 - protein, 7 aa, synthetic construct
  REGION 1..7: note = Description of Artificial Sequence: Synthetic peptide
TKSTTPI

SEQ ID NO: 935 - protein, 7 aa, synthetic construct
  REGION 1..7: note = Description of Artificial Sequence: Synthetic peptide
TSGNNPM

SEQ ID NO: 936 - protein, 7 aa, synthetic construct
  REGION 1..7: note = Description of Artificial Sequence: Synthetic peptide
DNIQKAN

SEQ ID NO: 937 - protein, 7 aa, synthetic construct
  REGION 1..7: note = Description of Artificial Sequence: Synthetic peptide
TSDRVQG

SEQ ID NO: 938 - protein, 7 aa, synthetic construct
  REGION 1..7: note = Description of Artificial Sequence: Synthetic peptide
DGLSKPT

SEQ ID NO: 939 - protein, 7 aa, synthetic construct
  REGION 1..7: note = Description of Artificial Sequence: Synthetic peptide
GHNSPTL

SEQ ID NO: 940 - protein, 7 aa, synthetic construct
  REGION 1..7: note = Description of Artificial Sequence: Synthetic peptide
TSSQRSS

SEQ ID NO: 941 - protein, 7 aa, synthetic construct
  REGION 1..7: note = Description of Artificial Sequence: Synthetic peptide
AQATPHV

SEQ ID NO: 942 - protein, 7 aa, synthetic construct
  REGION 1..7: note = Description of Artificial Sequence: Synthetic peptide
AKSTVNT

SEQ ID NO: 943 - protein, 7 aa, synthetic construct
  REGION 1..7: note = Description of Artificial Sequence: Synthetic peptide
MNGSGAH

SEQ ID NO: 944 - protein, 7 aa, synthetic construct
  REGION 1..7: note = Description of Artificial Sequence: Synthetic peptide
QNAAKNP

SEQ ID NO: 945 - protein, 7 aa, synthetic construct
  REGION 1..7: note = Description of Artificial Sequence: Synthetic peptide
MASNPRE

SEQ ID NO: 946 - protein, 7 aa, synthetic construct
  REGION 1..7: note = Description of Artificial Sequence: Synthetic peptide
QSNTVSS

SEQ ID NO: 947 - protein, 7 aa, synthetic construct
  REGION 1..7: note = Description of Artificial Sequence: Synthetic peptide
DSSPTHR

SEQ ID NO: 948 - protein, 7 aa, synthetic construct
  REGION 1..7: note = Description of Artificial Sequence: Synthetic peptide
NGTSERR

SEQ ID NO: 949 - protein, 7 aa, synthetic construct
  REGION 1..7: note = Description of Artificial Sequence: Synthetic peptide
AASDGRN

SEQ ID NO: 950 - protein, 7 aa, synthetic construct
  REGION 1..7: note = Description of Artificial Sequence: Synthetic peptide
EISSPGR

SEQ ID NO: 951 - protein, 7 aa, synthetic construct
  REGION 1..7: note = Description of Artificial Sequence: Synthetic peptide
SGQERAT

SEQ ID NO: 952 - protein, 7 aa, synthetic construct
  REGION 1..7: note = Description of Artificial Sequence: Synthetic peptide
TQNGGGN

SEQ ID NO: 953 - protein, 7 aa, synthetic construct
  REGION 1..7: note = Description of Artificial Sequence: Synthetic peptide
SRSGSSS

SEQ ID NO: 954 - protein, 7 aa, synthetic construct
  REGION 1..7: note = Description of Artificial Sequence: Synthetic peptide
QTKPTTT

SEQ ID NO: 955 - protein, 7 aa, synthetic construct
  REGION 1..7: note = Description of Artificial Sequence: Synthetic peptide
DTVPPSK

SEQ ID NO: 956 - protein, 7 aa, synthetic construct
  REGION 1..7: note = Description of Artificial Sequence: Synthetic peptide
DGRQAGV

SEQ ID NO: 957 - protein, 7 aa, synthetic construct
  REGION 1..7: note = Description of Artificial Sequence: Synthetic peptide
VGPNNQS

SEQ ID NO: 958 - protein, 7 aa, synthetic construct
  REGION 1..7: note = Description of Artificial Sequence: Synthetic peptide
RNSGNQG

SEQ ID NO: 959 - protein, 7 aa, synthetic construct
  REGION 1..7: note = Description of Artificial Sequence: Synthetic peptide
GVNNKAG

SEQ ID NO: 960 - protein, 7 aa, synthetic construct
  REGION 1..7: note = Description of Artificial Sequence: Synthetic peptide
QPNGQIK

SEQ ID NO: 961 - protein, 7 aa, synthetic construct
  REGION 1..7: note = Description of Artificial Sequence: Synthetic peptide
NLSTSGG

SEQ ID NO: 962 - protein, 7 aa, synthetic construct
  REGION 1..7: note = Description of Artificial Sequence: Synthetic peptide
QHTKTPS

SEQ ID NO: 963 - protein, 7 aa, synthetic construct
  REGION 1..7: note = Description of Artificial Sequence: Synthetic peptide
DAGNKAR

SEQ ID NO: 964 - protein, 7 aa, synthetic construct
  REGION 1..7: note = Description of Artificial Sequence: Synthetic peptide
TTSAKVQ

SEQ ID NO: 965 - protein, 7 aa, synthetic construct
  REGION 1..7: note = Description of Artificial Sequence: Synthetic peptide
SHSTKST

SEQ ID NO: 966 - protein, 7 aa, synthetic construct
  REGION 1..7: note = Description of Artificial Sequence: Synthetic peptide
ANAGKLS

SEQ ID NO: 967 - protein, 7 aa, synthetic construct
  REGION 1..7: note = Description of Artificial Sequence: Synthetic peptide
YGSKDLS

SEQ ID NO: 968 - protein, 7 aa, synthetic construct
  REGION 1..7: note = Description of Artificial Sequence: Synthetic peptide
SNKSSGG

SEQ ID NO: 969 - protein, 7 aa, synthetic construct
  REGION 1..7: note = Description of Artificial Sequence: Synthetic peptide
NNANKSV

SEQ ID NO: 970 - protein, 7 aa, synthetic construct
  REGION 1..7: note = Description of Artificial Sequence: Synthetic peptide
TSSKSAV

SEQ ID NO: 971 - protein, 7 aa, synthetic construct
  REGION 1..7: note = Description of Artificial Sequence: Synthetic peptide
SNAGSMQ

SEQ ID NO: 972 - protein, 7 aa, synthetic construct
  REGION 1..7: note = Description of Artificial Sequence: Synthetic peptide
GVAKSSS

SEQ ID NO: 973 - protein, 7 aa, synthetic construct
  REGION 1..7: note = Description of Artificial Sequence: Synthetic peptide
TKVGTPV

SEQ ID NO: 974 - protein, 7 aa, synthetic construct
  REGION 1..7: note = Description of Artificial Sequence: Synthetic peptide
GTSSKPL

SEQ ID NO: 975 - protein, 7 aa, synthetic construct
  REGION 1..7: note = Description of Artificial Sequence: Synthetic peptide
STSSSNL

SEQ ID NO: 976 - protein, 7 aa, synthetic construct
  REGION 1..7: note = Description of Artificial Sequence: Synthetic peptide
SPSKSGT

SEQ ID NO: 977 - protein, 7 aa, synthetic construct
  REGION 1..7: note = Description of Artificial Sequence: Synthetic peptide
NNNTSNV

SEQ ID NO: 978 - protein, 7 aa, synthetic construct
  REGION 1..7: note = Description of Artificial Sequence: Synthetic peptide
DNGSSRQ

SEQ ID NO: 979 - protein, 7 aa, synthetic construct
  REGION 1..7: note = Description of Artificial Sequence: Synthetic peptide
SNDPPSK

SEQ ID NO: 980 - protein, 7 aa, synthetic construct
  REGION 1..7: note = Description of Artificial Sequence: Synthetic peptide
QGSQSAM

SEQ ID NO: 981 - protein, 7 aa, synthetic construct
  REGION 1..7: note = Description of Artificial Sequence: Synthetic peptide
NTDKPAV

SEQ ID NO: 982 - protein, 7 aa, synthetic construct
  REGION 1..7: note = Description of Artificial Sequence: Synthetic peptide
RSDGSPR

SEQ ID NO: 983 - protein, 7 aa, synthetic construct
  REGION 1..7: note = Description of Artificial Sequence: Synthetic peptide
MGNSSSV

SEQ ID NO: 984 - protein, 7 aa, synthetic construct
  REGION 1..7: note = Description of Artificial Sequence: Synthetic peptide
KIGASSA

SEQ ID NO: 985 - protein, 7 aa, synthetic construct
  REGION 1..7: note = Description of Artificial Sequence: Synthetic peptide
TTSNSTK

SEQ ID NO: 986 - protein, 7 aa, synthetic construct
  REGION 1..7: note = Description of Artificial Sequence: Synthetic peptide
SRNTSNT

SEQ ID NO: 987 - protein, 7 aa, synthetic construct
  REGION 1..7: note = Description of Artificial Sequence: Synthetic peptide
HSTEKQR

SEQ ID NO: 988 - protein, 7 aa, synthetic construct
  REGION 1..7: note = Description of Artificial Sequence: Synthetic peptide
DRPGNGG

SEQ ID NO: 989 - protein, 7 aa, synthetic construct
  REGION 1..7: note = Description of Artificial Sequence: Synthetic peptide
SGLKPTV

SEQ ID NO: 990 - protein, 7 aa, synthetic construct
  REGION 1..7: note = Description of Artificial Sequence: Synthetic peptide
KGQGSTV

SEQ ID NO: 991 - protein, 7 aa, synthetic construct
  REGION 1..7: note = Description of Artificial Sequence: Synthetic peptide
QTTPSSQ

SEQ ID NO: 992 - protein, 7 aa, synthetic construct
  REGION 1..7: note = Description of Artificial Sequence: Synthetic peptide
AHGQVPQ

SEQ ID NO: 993 - protein, 7 aa, synthetic construct
  REGION 1..7: note = Description of Artificial Sequence: Synthetic peptide
ETGHKAA

SEQ ID NO: 994 - protein, 7 aa, synthetic construct
  REGION 1..7: note = Description of Artificial Sequence: Synthetic peptide
TKAQSPL

SEQ ID NO: 995 - protein, 7 aa, synthetic construct
  REGION 1..7: note = Description of Artificial Sequence: Synthetic peptide
NSSTKTP

SEQ ID NO: 996 - protein, 7 aa, synthetic construct
  REGION 1..7: note = Description of Artificial Sequence: Synthetic peptide
ATTGDSK

SEQ ID NO: 997 - protein, 7 aa, synthetic construct
  REGION 1..7: note = Description of Artificial Sequence: Synthetic peptide
AGTTNAH

SEQ ID NO: 998 - protein, 7 aa, synthetic construct
  REGION 1..7: note = Description of Artificial Sequence: Synthetic peptide
VNGKPNA

SEQ ID NO: 999 - protein, 7 aa, synthetic construct
  REGION 1..7: note = Description of Artificial Sequence: Synthetic peptide
HSATPNK

SEQ ID NO: 1000 - protein, 7 aa, synthetic construct
  REGION 1..7: note = Description of Artificial Sequence: Synthetic peptide
SNGQKPP

SEQ ID NO: 1001 - protein, 7 aa, synthetic construct
  REGION 1..7: note = Description of Artificial Sequence: Synthetic peptide
LGNKDQA

SEQ ID NO: 1002 - protein, 7 aa, synthetic construct
  REGION 1..7: note = Description of Artificial Sequence: Synthetic peptide
VQGTHTQ

SEQ ID NO: 1003 - protein, 7 aa, synthetic construct
  REGION 1..7: note = Description of Artificial Sequence: Synthetic peptide
DVHVKNQ

SEQ ID NO: 1004 - protein, 7 aa, synthetic construct
  REGION 1..7: note = Description of Artificial Sequence: Synthetic peptide
ATTKSST

SEQ ID NO: 1005 - protein, 7 aa, synthetic construct
  REGION 1..7: note = Description of Artificial Sequence: Synthetic peptide
STATSSH

SEQ ID NO: 1006 - protein, 7 aa, synthetic construct
  REGION 1..7: note = Description of Artificial Sequence: Synthetic peptide
VSQPSVA

SEQ ID NO: 1007 - protein, 7 aa, synthetic construct
  REGION 1..7: note = Description of Artificial Sequence: Synthetic peptide
SSNGHGS

SEQ ID NO: 1008 - protein, 7 aa, synthetic construct
  REGION 1..7: note = Description of Artificial Sequence: Synthetic peptide
ASNTGST

SEQ ID NO: 1009 - protein, 7 aa, synthetic construct
  REGION 1..7: note = Description of Artificial Sequence: Synthetic peptide
TGASNQK

SEQ ID NO: 1010 - protein, 7 aa, synthetic construct
  REGION 1..7: note = Description of Artificial Sequence: Synthetic peptide
SSDTNHA

SEQ ID NO: 1011 - protein, 7 aa, synthetic construct
  REGION 1..7: note = Description of Artificial Sequence: Synthetic peptide
SMGKSSV

SEQ ID NO: 1012 - protein, 7 aa, synthetic construct
  REGION 1..7: note = Description of Artificial Sequence: Synthetic peptide
LNNGKAT

SEQ ID NO: 1013 - protein, 7 aa, synthetic construct
  REGION 1..7: note = Description of Artificial Sequence: Synthetic peptide
QAGRDSQ

SEQ ID NO: 1014 - protein, 7 aa, synthetic construct
  REGION 1..7: note = Description of Artificial Sequence: Synthetic peptide
TPAQKSQ

SEQ ID NO: 1015 - protein, 7 aa, synthetic construct
  REGION 1..7: note = Description of Artificial Sequence: Synthetic peptide
QNVKPSV

SEQ ID NO: 1016 - protein, 7 aa, synthetic construct
  REGION 1..7: note = Description of Artificial Sequence: Synthetic peptide
LGNSGTN

SEQ ID NO: 1017 - protein, 7 aa, synthetic construct
  REGION 1..7: note = Description of Artificial Sequence: Synthetic peptide
EGMKPSL

SEQ ID NO: 1018 - protein, 7 aa, synthetic construct
  REGION 1..7: note = Description of Artificial Sequence: Synthetic peptide
GGGHSPK

SEQ ID NO: 1019 - protein, 7 aa, synthetic construct
  REGION 1..7: note = Description of Artificial Sequence: Synthetic peptide
THQTTSA

SEQ ID NO: 1020 - protein, 7 aa, synthetic construct
  REGION 1..7: note = Description of Artificial Sequence: Synthetic peptide
VTTSSPK

SEQ ID NO: 1021 - protein, 7 aa, synthetic construct
  REGION 1..7: note = Description of Artificial Sequence: Synthetic peptide
GADSPGR

SEQ ID NO: 1022 - protein, 7 aa, synthetic construct
  REGION 1..7: note = Description of Artificial Sequence: Synthetic peptide
QHDAKMA

SEQ ID NO: 1023 - protein, 7 aa, synthetic construct
  REGION 1..7: note = Description of Artificial Sequence: Synthetic peptide
RTGAESR

SEQ ID NO: 1024 - protein, 7 aa, synthetic construct
  REGION 1..7: note = Description of Artificial Sequence: Synthetic peptide
RNGASSG

SEQ ID NO: 1025 - protein, 7 aa, synthetic construct
  REGION 1..7: note = Description of Artificial Sequence: Synthetic peptide
GAETKPS

SEQ ID NO: 1026 - protein, 7 aa, synthetic construct
  REGION 1..7: note = Description of Artificial Sequence: Synthetic peptide
SQGNKTL

SEQ ID NO: 1027 - protein, 7 aa, synthetic construct
  REGION 1..7: note = Description of Artificial Sequence: Synthetic peptide
HSATKSS

SEQ ID NO: 1028 - protein, 7 aa, synthetic construct
  REGION 1..7: note = Description of Artificial Sequence: Synthetic peptide
SSASVAK

SEQ ID NO: 1029 - protein, 7 aa, synthetic construct
  REGION 1..7: note = Description of Artificial Sequence: Synthetic peptide
TSQSGHH

SEQ ID NO: 1030 - protein, 7 aa, synthetic construct
  REGION 1..7: note = Description of Artificial Sequence: Synthetic peptide
GTTSHAS

SEQ ID NO: 1031 - protein, 7 aa, synthetic construct
  REGION 1..7: note = Description of Artificial Sequence: Synthetic peptide
QTTSPSK

SEQ ID NO: 1032 - protein, 7 aa, synthetic construct
  REGION 1..7: note = Description of Artificial Sequence: Synthetic peptide
SANRPGV

SEQ ID NO: 1033 - protein, 7 aa, synthetic construct
  REGION 1..7: note = Description of Artificial Sequence: Synthetic peptide
SASTKSL

SEQ ID NO: 1034 - protein, 7 aa, synthetic construct
  REGION 1..7: note = Description of Artificial Sequence: Synthetic peptide
ANGVKLQ

SEQ ID NO: 1035 - protein, 7 aa, synthetic construct
  REGION 1..7: note = Description of Artificial Sequence: Synthetic peptide
LQSSKPT

SEQ ID NO: 1036 - protein, 7 aa, synthetic construct
  REGION 1..7: note = Description of Artificial Sequence: Synthetic peptide
GTATPVK

SEQ ID NO: 1037 - protein, 7 aa, synthetic construct
  REGION 1..7: note = Description of Artificial Sequence: Synthetic peptide
GNSGQSR

SEQ ID NO: 1038 - protein, 7 aa, synthetic construct
  REGION 1..7: note = Description of Artificial Sequence: Synthetic peptide
LNGEKIS

SEQ ID NO: 1039 - protein, 7 aa, synthetic construct
  REGION 1..7: note = Description of Artificial Sequence: Synthetic peptide
NRDGSTT

SEQ ID NO: 1040 - protein, 7 aa, synthetic construct
  REGION 1..7: note = Description of Artificial Sequence: Synthetic peptide
MGKSSAQ

SEQ ID NO: 1041 - protein, 7 aa, synthetic construct
  REGION 1..7: note = Description of Artificial Sequence: Synthetic peptide
VSQSPVK

SEQ ID NO: 1042 - protein, 7 aa, synthetic construct
  REGION 1..7: note = Description of Artificial Sequence: Synthetic peptide
SVGEAQK

SEQ ID NO: 1043 - protein, 7 aa, synthetic construct
  REGION 1..7: note = Description of Artificial Sequence: Synthetic peptide
DKTQPHK

SEQ ID NO: 1044 - protein, 7 aa, synthetic construct
  REGION 1..7: note = Description of Artificial Sequence: Synthetic peptide
GAGSKPI

SEQ ID NO: 1045 - protein, 7 aa, synthetic construct
  REGION 1..7: note = Description of Artificial Sequence: Synthetic peptide
NQQGNGG

SEQ ID NO: 1046 - protein, 7 aa, synthetic construct
  REGION 1..7: note = Description of Artificial Sequence: Synthetic peptide
TINNKHS

SEQ ID NO: 1047 - protein, 7 aa, synthetic construct
  REGION 1..7: note = Description of Artificial Sequence: Synthetic peptide
SGGSPSV

SEQ ID NO: 1048 - protein, 7 aa, synthetic construct
  REGION 1..7: note = Description of Artificial Sequence: Synthetic peptide
GTSAPAR

SEQ ID NO: 1049 - protein, 7 aa, synthetic construct
  REGION 1..7: note = Description of Artificial Sequence: Synthetic peptide
SASHSPV

SEQ ID NO: 1050 - protein, 7 aa, synthetic construct
  REGION 1..7: note = Description of Artificial Sequence: Synthetic peptide
QNSPSMS

SEQ ID NO: 1051 - protein, 7 aa, synthetic construct
  REGION 1..7: note = Description of Artificial Sequence: Synthetic peptide
LPQNPTS

SEQ ID NO: 1052 - protein, 7 aa, synthetic construct
  REGION 1..7: note = Description of Artificial Sequence: Synthetic peptide
QRTETNV

SEQ ID NO: 1053 - protein, 7 aa, synthetic construct
  REGION 1..7: note = Description of Artificial Sequence: Synthetic peptide
GLGKAAA

SEQ ID NO: 1054 - protein, 7 aa, synthetic construct
  REGION 1..7: note = Description of Artificial Sequence: Synthetic peptide
SSASKPL

SEQ ID NO: 1055 - protein, 7 aa, synthetic construct
  REGION 1..7: note = Description of Artificial Sequence: Synthetic peptide
QSSGKAS

SEQ ID NO: 1056 - protein, 7 aa, synthetic construct
  REGION 1..7: note = Description of Artificial Sequence: Synthetic peptide
WGSKNDN

SEQ ID NO: 1057 - protein, 7 aa, synthetic construct
  REGION 1..7: note = Description of Artificial Sequence: Synthetic peptide
DGHTKQS

SEQ ID NO: 1058 - protein, 7 aa, synthetic construct
  REGION 1..7: note = Description of Artificial Sequence: Synthetic peptide
VPNSRTT

SEQ ID NO: 1059 - protein, 7 aa, synthetic construct
  REGION 1..7: note = Description of Artificial Sequence: Synthetic peptide
NTSQKAS

SEQ ID NO: 1060 - protein, 7 aa, synthetic construct
  REGION 1..7: note = Description of Artificial Sequence: Synthetic peptide
SGQSSHS

SEQ ID NO: 1061 - protein, 7 aa, synthetic construct
  REGION 1..7: note = Description of Artificial Sequence: Synthetic peptide
AGLKSTQ

SEQ ID NO: 1062 - protein, 7 aa, synthetic construct
  REGION 1..7: note = Description of Artificial Sequence: Synthetic peptide
GGVKPFT

SEQ ID NO: 1063 - protein, 7 aa, synthetic construct
  REGION 1..7: note = Description of Artificial Sequence: Synthetic peptide
GVEARST

SEQ ID NO: 1064 - protein, 7 aa, synthetic construct
  REGION 1..7: note = Description of Artificial Sequence: Synthetic peptide
ERNKVTT

SEQ ID NO: 1065 - protein, 7 aa, synthetic construct
  REGION 1..7: note = Description of Artificial Sequence: Synthetic peptide
TAAQSGG

SEQ ID NO: 1066 - protein, 7 aa, synthetic construct
  REGION 1..7: note = Description of Artificial Sequence: Synthetic peptide
SLESKPA

SEQ ID NO: 1067 - protein, 7 aa, synthetic construct
  REGION 1..7: note = Description of Artificial Sequence: Synthetic peptide
SGDRQQA

SEQ ID NO: 1068 - protein, 7 aa, synthetic construct
  REGION 1..7: note = Description of Artificial Sequence: Synthetic peptide
HKTTSAN

SEQ ID NO: 1069 - protein, 7 aa, synthetic construct
  REGION 1..7: note = Description of Artificial Sequence: Synthetic peptide
LEGQSNR

SEQ ID NO: 1070 - protein, 7 aa, synthetic construct
  REGION 1..7: note = Description of Artificial Sequence: Synthetic peptide
LAGNQKE

SEQ ID NO: 1071 - protein, 7 aa, synthetic construct
  REGION 1..7: note = Description of Artificial Sequence: Synthetic peptide
DPKGSSS

SEQ ID NO: 1072 - protein, 7 aa, synthetic construct
  REGION 1..7: note = Description of Artificial Sequence: Synthetic peptide
ALHQKAG

SEQ ID NO: 1073 - protein, 7 aa, synthetic construct
  REGION 1..7: note = Description of Artificial Sequence: Synthetic peptide
SLNKPIQ

SEQ ID NO: 1074 - protein, 7 aa, synthetic construct
  REGION 1..7: note = Description of Artificial Sequence: Synthetic peptide
AASPPNK

SEQ ID NO: 1075 - protein, 7 aa, synthetic construct
  REGION 1..7: note = Description of Artificial Sequence: Synthetic peptide
LGVSNSG

SEQ ID NO: 1076 - protein, 7 aa, synthetic construct
  REGION 1..7: note = Description of Artificial Sequence: Synthetic peptide
MNSKAQA

SEQ ID NO: 1077 - protein, 7 aa, synthetic construct
  REGION 1..7: note = Description of Artificial Sequence: Synthetic peptide
NSSSKVS

SEQ ID NO: 1078 - protein, 7 aa, synthetic construct
  REGION 1..7: note = Description of Artificial Sequence: Synthetic peptide
TQTKVNL

SEQ ID NO: 1079 - protein, 7 aa, synthetic construct
  REGION 1..7: note = Description of Artificial Sequence: Synthetic peptide
RMGDQSG

SEQ ID NO: 1080 - protein, 7 aa, synthetic construct
  REGION 1..7: note = Description of Artificial Sequence: Synthetic peptide
LPNSNQA

SEQ ID NO: 1081 - protein, 7 aa, synthetic construct
  REGION 1..7: note = Description of Artificial Sequence: Synthetic peptide
TQGKTVG

SEQ ID NO: 1082 - protein, 7 aa, synthetic construct
  REGION 1..7: note = Description of Artificial Sequence: Synthetic peptide
TQSKELR

SEQ ID NO: 1083 - protein, 7 aa, synthetic construct
  REGION 1..7: note = Description of Artificial Sequence: Synthetic peptide
SSGKSAT

SEQ ID NO: 1084 - protein, 7 aa, synthetic construct
  REGION 1..7: note = Description of Artificial Sequence: Synthetic peptide
VGSSPQV

SEQ ID NO: 1085 - protein, 7 aa, synthetic construct
  REGION 1..7: note = Description of Artificial Sequence: Synthetic peptide
SKSNSVN

SEQ ID NO: 1086 - protein, 7 aa, synthetic construct
  REGION 1..7: note = Description of Artificial Sequence: Synthetic peptide
NDRKDQQ

SEQ ID NO: 1087 - protein, 7 aa, synthetic construct
  REGION 1..7: note = Description of Artificial Sequence: Synthetic peptide
TPSAKVS

SEQ ID NO: 1088 - protein, 7 aa, synthetic construct
  REGION 1..7: note = Description of Artificial Sequence: Synthetic peptide
SRAKQGE

SEQ ID NO: 1089 - protein, 7 aa, synthetic construct
  REGION 1..7: note = Description of Artificial Sequence: Synthetic peptide
HSAPNNG

SEQ ID NO: 1090 - protein, 7 aa, synthetic construct
  REGION 1..7: note = Description of Artificial Sequence: Synthetic peptide
SGVTSPA

SEQ ID NO: 1091 - protein, 7 aa, synthetic construct
  REGION 1..7: note = Description of Artificial Sequence: Synthetic peptide
MGSNGQK

SEQ ID NO: 1092 - protein, 7 aa, synthetic construct
  REGION 1..7: note = Description of Artificial Sequence: Synthetic peptide
ATQSPSL

SEQ ID NO: 1093 - protein, 7 aa, synthetic construct
  REGION 1..7: note = Description of Artificial Sequence: Synthetic peptide
GSETRAA

SEQ ID NO: 1094 - protein, 7 aa, synthetic construct
  REGION 1..7: note = Description of Artificial Sequence: Synthetic peptide
NTSTTSR

SEQ ID NO: 1095 - protein, 7 aa, synthetic construct
  REGION 1..7: note = Description of Artificial Sequence: Synthetic peptide
SVHSKSV

SEQ ID NO: 1096 - protein, 7 aa, synthetic construct
  REGION 1..7: note = Description of Artificial Sequence: Synthetic peptide
TLGNPSR

SEQ ID NO: 1097 - protein, 7 aa, synthetic construct
  REGION 1..7: note = Description of Artificial Sequence: Synthetic peptide
SRSGTPV

SEQ ID NO: 1098 - protein, 7 aa, synthetic construct
  REGION 1..7: note = Description of Artificial Sequence: Synthetic peptide
TSSSPSV

SEQ ID NO: 1099 - protein, 7 aa, synthetic construct
  REGION 1..7: note = Description of Artificial Sequence: Synthetic peptide
SNATKPT

SEQ ID NO: 1100 - protein, 7 aa, synthetic construct
  REGION 1..7: note = Description of Artificial Sequence: Synthetic peptide
AGKSSQT

SEQ ID NO: 1101 - protein, 7 aa, synthetic construct
  REGION 1..7: note = Description of Artificial Sequence: Synthetic peptide
NSTSGGG

SEQ ID NO: 1102 - protein, 7 aa, synthetic construct
  REGION 1..7: note = Description of Artificial Sequence: Synthetic peptide
SSRSTQA

SEQ ID NO: 1103 - protein, 7 aa, synthetic construct
  REGION 1..7: note = Description of Artificial Sequence: Synthetic peptide
KSNERTT

SEQ ID NO: 1104 - protein, 7 aa, synthetic construct
  REGION 1..7: note = Description of Artificial Sequence: Synthetic peptide
SRGPTTV

SEQ ID NO: 1105 - protein, 7 aa, synthetic construct
  REGION 1..7: note = Description of Artificial Sequence: Synthetic peptide
SGVSKQG

SEQ ID NO: 1106 - protein, 7 aa, synthetic construct
  REGION 1..7: note = Description of Artificial Sequence: Synthetic peptide
QSQNAGS

SEQ ID NO: 1107 - protein, 7 aa, synthetic construct
  REGION 1..7: note = Description of Artificial Sequence: Synthetic peptide
VATSKSS

SEQ ID NO: 1108 - protein, 7 aa, synthetic construct
  REGION 1..7: note = Description of Artificial Sequence: Synthetic peptide
RGSTSST

SEQ ID NO: 1109 - protein, 7 aa, synthetic construct
  REGION 1..7: note = Description of Artificial Sequence: Synthetic peptide
APAGDRV

SEQ ID NO: 1110 - protein, 7 aa, synthetic construct
  REGION 1..7: note = Description of Artificial Sequence: Synthetic peptide
GGLDSHK

SEQ ID NO: 1111 - protein, 7 aa, synthetic construct
  REGION 1..7: note = Description of Artificial Sequence: Synthetic peptide
VHDGKGK

SEQ ID NO: 1112 - protein, 7 aa, synthetic construct
  REGION 1..7: note = Description of Artificial Sequence: Synthetic peptide
GNTNPAK

SEQ ID NO: 1113 - protein, 7 aa, synthetic construct
  REGION 1..7: note = Description of Artificial Sequence: Synthetic peptide
SRSTGNQ

SEQ ID NO: 1114 - protein, 7 aa, synthetic construct
  REGION 1..7: note = Description of Artificial Sequence: Synthetic peptide
GSANSPK

SEQ ID NO: 1115 - protein, 7 aa, synthetic construct
  REGION 1..7: note = Description of Artificial Sequence: Synthetic peptide
NNNNKAS

SEQ ID NO: 1116 - protein, 7 aa, synthetic construct
  REGION 1..7: note = Description of Artificial Sequence: Synthetic peptide
RSASPTV

SEQ ID NO: 1117 - protein, 7 aa, synthetic construct
  REGION 1..7: note = Description of Artificial Sequence: Synthetic peptide
ASTGPRD

SEQ ID NO: 1118 - protein, 7 aa, synthetic construct
  REGION 1..7: note = Description of Artificial Sequence: Synthetic peptide
FGNSSSA

SEQ ID NO: 1119 - protein, 7 aa, synthetic construct
  REGION 1..7: note = Description of Artificial Sequence: Synthetic peptide
VQQAAPS

SEQ ID NO: 1120 - protein, 7 aa, synthetic construct
  REGION 1..7: note = Description of Artificial Sequence: Synthetic peptide
DSSSRGH

SEQ ID NO: 1121 - protein, 7 aa, synthetic construct
  REGION 1..7: note = Description of Artificial Sequence: Synthetic peptide
GLDSKMT

SEQ ID NO: 1122 - protein, 7 aa, synthetic construct
  REGION 1..7: note = Description of Artificial Sequence: Synthetic peptide
NPAGGSA

SEQ ID NO: 1123 - protein, 7 aa, synthetic construct
  REGION 1..7: note = Description of Artificial Sequence: Synthetic peptide
GSNSTKA

SEQ ID NO: 1124 - protein, 7 aa, synthetic construct
  REGION 1..7: note = Description of Artificial Sequence: Synthetic peptide
STTKPLS

SEQ ID NO: 1125 - protein, 7 aa, synthetic construct
  REGION 1..7: note = Description of Artificial Sequence: Synthetic peptide
ASSSGMV

SEQ ID NO: 1126 - protein, 7 aa, synthetic construct
  REGION 1..7: note = Description of Artificial Sequence: Synthetic peptide
SSQKTSQ

SEQ ID NO: 1127 - protein, 7 aa, synthetic construct
  REGION 1..7: note = Description of Artificial Sequence: Synthetic peptide
GSTSPAQ

SEQ ID NO: 1128 - protein, 7 aa, synthetic construct
  REGION 1..7: note = Description of Artificial Sequence: Synthetic peptide
VAGQSAV

SEQ ID NO: 1129 - protein, 7 aa, synthetic construct
  REGION 1..7: note = Description of Artificial Sequence: Synthetic peptide
STTKGPE

SEQ ID NO: 1130 - protein, 7 aa, synthetic construct
  REGION 1..7: note = Description of Artificial Sequence: Synthetic peptide
RSDNGNR

SEQ ID NO: 1131 - protein, 7 aa, synthetic construct
  REGION 1..7: note = Description of Artificial Sequence: Synthetic peptide
SVGTPTS

SEQ ID NO: 1132 - protein, 7 aa, synthetic construct
  REGION 1..7: note = Description of Artificial Sequence: Synthetic peptide
TAHGKPV

SEQ ID NO: 1133 - protein, 7 aa, synthetic construct
  REGION 1..7: note = Description of Artificial Sequence: Synthetic peptide
TSTSKVA

SEQ ID NO: 1134 - protein, 7 aa, synthetic construct
  REGION 1..7: note = Description of Artificial Sequence: Synthetic peptide
NISKSNS

SEQ ID NO: 1135 - protein, 7 aa, synthetic construct
  REGION 1..7: note = Description of Artificial Sequence: Synthetic peptide
SVGKAAA

SEQ ID NO: 1136 - protein, 7 aa, synthetic construct
  REGION 1..7: note = Description of Artificial Sequence: Synthetic peptide
DPSDVKR

SEQ ID NO: 1137 - protein, 7 aa, synthetic construct
  REGION 1..7: note = Description of Artificial Sequence: Synthetic peptide
VVTKPST

SEQ ID NO: 1138 - protein, 7 aa, synthetic construct
  REGION 1..7: note = Description of Artificial Sequence: Synthetic peptide
SNTASPV

SEQ ID NO: 1139 - protein, 7 aa, synthetic construct
  REGION 1..7: note = Description of Artificial Sequence: Synthetic peptide
MPAKSSV

SEQ ID NO: 1140 - protein, 7 aa, synthetic construct
  REGION 1..7: note = Description of Artificial Sequence: Synthetic peptide
DNGKGQL

SEQ ID NO: 1141 - protein, 7 aa, synthetic construct
  REGION 1..7: note = Description of Artificial Sequence: Synthetic peptide
GHTDKTT

SEQ ID NO: 1142 - protein, 7 aa, synthetic construct
  REGION 1..7: note = Description of Artificial Sequence: Synthetic peptide
DLREKPA

SEQ ID NO: 1143 - protein, 7 aa, synthetic construct
  REGION 1..7: note = Description of Artificial Sequence: Synthetic peptide
SGGSGHT

SEQ ID NO: 1144 - protein, 7 aa, synthetic construct
  REGION 1..7: note = Description of Artificial Sequence: Synthetic peptide
NVTSKAM

SEQ ID NO: 1145 - protein, 7 aa, synthetic construct
  REGION 1..7: note = Description of Artificial Sequence: Synthetic peptide
NVSPTQA

SEQ ID NO: 1146 - protein, 7 aa, synthetic construct
  REGION 1..7: note = Description of Artificial Sequence: Synthetic peptide
ERSSATS

SEQ ID NO: 1147 - protein, 7 aa, synthetic construct
  REGION 1..7: note = Description of Artificial Sequence: Synthetic peptide
GTSENKG

SEQ ID NO: 1148 - protein, 7 aa, synthetic construct
  REGION 1..7: note = Description of Artificial Sequence: Synthetic peptide
SRGGSSG

SEQ ID NO: 1149 - protein, 7 aa, synthetic construct
  REGION 1..7: note = Description of Artificial Sequence: Synthetic peptide
QNSKSAV

SEQ ID NO: 1150 - protein, 7 aa, synthetic construct
  REGION 1..7: note = Description of Artificial Sequence: Synthetic peptide
TTSPNHQ

SEQ ID NO: 1151 - protein, 7 aa, synthetic construct
  REGION 1..7: note = Description of Artificial Sequence: Synthetic peptide
NPGGRNG

SEQ ID NO: 1152 - protein, 7 aa, synthetic construct
  REGION 1..7: note = Description of Artificial Sequence: Synthetic peptide
TNSSNPA

SEQ ID NO: 1153 - protein, 7 aa, synthetic construct
  REGION 1..7: note = Description of Artificial Sequence: Synthetic peptide
LDSVKSR

SEQ ID NO: 1154 - protein, 7 aa, synthetic construct
  REGION 1..7: note = Description of Artificial Sequence: Synthetic peptide
GRTEPHT

SEQ ID NO: 1155 - protein, 7 aa, synthetic construct
  REGION 1..7: note = Description of Artificial Sequence: Synthetic peptide
DSAVRGN

SEQ ID NO: 1156 - protein, 7 aa, synthetic construct
  REGION 1..7: note = Description of Artificial Sequence: Synthetic peptide
IATKVGS

SEQ ID NO: 1157 - protein, 7 aa, synthetic construct
  REGION 1..7: note = Description of Artificial Sequence: Synthetic peptide
LGASKNG

SEQ ID NO: 1158 - protein, 7 aa, synthetic construct
  REGION 1..7: note = Description of Artificial Sequence: Synthetic peptide
DRQVGTT

SEQ ID NO: 1159 - protein, 7 aa, synthetic construct
  REGION 1..7: note = Description of Artificial Sequence: Synthetic peptide
DTGTARG

SEQ ID NO: 1160 - protein, 7 aa, synthetic construct
  REGION 1..7: note = Description of Artificial Sequence: Synthetic peptide
RQSDKSV

SEQ ID NO: 1161 - protein, 7 aa, synthetic construct
  REGION 1..7: note = Description of Artificial Sequence: Synthetic peptide
TGVASNV

SEQ ID NO: 1162 - protein, 7 aa, synthetic construct
  REGION 1..7: note = Description of Artificial Sequence: Synthetic peptide
LADTPRT

SEQ ID NO: 1163 - protein, 7 aa, synthetic construct
  REGION 1..7: note = Description of Artificial Sequence: Synthetic peptide
MSSKVST

SEQ ID NO: 1164 - protein, 7 aa, synthetic construct
  REGION 1..7: note = Description of Artificial Sequence: Synthetic peptide
SNNSKPQ

SEQ ID NO: 1165 - protein, 7 aa, synthetic construct
  REGION 1..7: note = Description of Artificial Sequence: Synthetic peptide
GTENARG

SEQ ID NO: 1166 - protein, 7 aa, synthetic construct
  REGION 1..7: note = Description of Artificial Sequence: Synthetic peptide
LGNSSPA

SEQ ID NO: 1167 - protein, 7 aa, synthetic construct
  REGION 1..7: note = Description of Artificial Sequence: Synthetic peptide
RSESKIT

SEQ ID NO: 1168 - protein, 7 aa, synthetic construct
  REGION 1..7: note = Description of Artificial Sequence: Synthetic peptide
ASESRNV

SEQ ID NO: 1169 - protein, 7 aa, synthetic construct
  REGION 1..7: note = Description of Artificial Sequence: Synthetic peptide
GSTEGLR

SEQ ID NO: 1170 - protein, 7 aa, synthetic construct
  REGION 1..7: note = Description of Artificial Sequence: Synthetic peptide
SSLPSKG

SEQ ID NO: 1171 - protein, 7 aa, synthetic construct
  REGION 1..7: note = Description of Artificial Sequence: Synthetic peptide
TDRKDDR

SEQ ID NO: 1172 - protein, 7 aa, synthetic construct
  REGION 1..7: note = Description of Artificial Sequence: Synthetic peptide
GTATNNH

SEQ ID NO: 1173 - protein, 7 aa, synthetic construct
  REGION 1..7: note = Description of Artificial Sequence: Synthetic peptide
TSSTKTV

SEQ ID NO: 1174 - protein, 7 aa, synthetic construct
  REGION 1..7: note = Description of Artificial Sequence: Synthetic peptide
SGTGNSG

SEQ ID NO: 1175 - protein, 7 aa, synthetic construct
  REGION 1..7: note = Description of Artificial Sequence: Synthetic peptide
GGDGKAR

SEQ ID NO: 1176 - protein, 7 aa, synthetic construct
  REGION 1..7: note = Description of Artificial Sequence: Synthetic peptide
TRSEGSV

SEQ ID NO: 1177 - protein, 7 aa, synthetic construct
  REGION 1..7: note = Description of Artificial Sequence: Synthetic peptide
SGLGKPV

SEQ ID NO: 1178 - protein, 7 aa, synthetic construct
  REGION 1..7: note = Description of Artificial Sequence: Synthetic peptide
APIQSGS

SEQ ID NO: 1179 - protein, 7 aa, synthetic construct
  REGION 1..7: note = Description of Artificial Sequence: Synthetic peptide
FGSPTPS

SEQ ID NO: 1180 - protein, 7 aa, synthetic construct
  REGION 1..7: note = Description of Artificial Sequence: Synthetic peptide
SRSTTST

SEQ ID NO: 1181 - protein, 7 aa, synthetic construct
  REGION 1..7: note = Description of Artificial Sequence: Synthetic peptide
NSGGTHS

SEQ ID NO: 1182 - protein, 7 aa, synthetic construct
  REGION 1..7: note = Description of Artificial Sequence: Synthetic peptide
STQSGNR

SEQ ID NO: 1183 - protein, 7 aa, synthetic construct
  REGION 1..7: note = Description of Artificial Sequence: Synthetic peptide
MEGTHGG

SEQ ID NO: 1184 - protein, 7 aa, synthetic construct
  REGION 1..7: note = Description of Artificial Sequence: Synthetic peptide
QSGGSNV

SEQ ID NO: 1185 - protein, 7 aa, synthetic construct
  REGION 1..7: note = Description of Artificial Sequence: Synthetic peptide
HGTAKTS

SEQ ID NO: 1186 - protein, 7 aa, synthetic construct
  REGION 1..7: note = Description of Artificial Sequence: Synthetic peptide
LGNGKTV

SEQ ID NO: 1187 - protein, 7 aa, synthetic construct
  REGION 1..7: note = Description of Artificial Sequence: Synthetic peptide
LNNQKTV

SEQ ID NO: 1188 - protein, 7 aa, synthetic construct
  REGION 1..7: note = Description of Artificial Sequence: Synthetic peptide
DQTARST

SEQ ID NO: 1189 - protein, 7 aa, synthetic construct
  REGION 1..7: note = Description of Artificial Sequence: Synthetic peptide
AGKGAAS

SEQ ID NO: 1190 - protein, 7 aa, synthetic construct
  REGION 1..7: note = Description of Artificial Sequence: Synthetic peptide
ASGRSVS

SEQ ID NO: 1191 - protein, 7 aa, synthetic construct
  REGION 1..7: note = Description of Artificial Sequence: Synthetic peptide
GLSGDIK

SEQ ID NO: 1192 - protein, 7 aa, synthetic construct
  REGION 1..7: note = Description of Artificial Sequence: Synthetic peptide
GPNRDSG

SEQ ID NO: 1193 - protein, 7 aa, synthetic construct
  REGION 1..7: note = Description of Artificial Sequence: Synthetic peptide
SQGQANT

SEQ ID NO: 1194 - protein, 7 aa, synthetic construct
  REGION 1..7: note = Description of Artificial Sequence: Synthetic peptide
HHDAQVK

SEQ ID NO: 1195 - protein, 7 aa, synthetic construct
  REGION 1..7: note = Description of Artificial Sequence: Synthetic peptide
GSGTPGA

SEQ ID NO: 1196 - protein, 7 aa, synthetic construct
  REGION 1..7: note = Description of Artificial Sequence: Synthetic peptide
DTGSRSR

SEQ ID NO: 1197 - protein, 7 aa, synthetic construct
  REGION 1..7: note = Description of Artificial Sequence: Synthetic peptide
SSVPSQA

SEQ ID NO: 1198 - protein, 7 aa, synthetic construct
  REGION 1..7: note = Description of Artificial Sequence: Synthetic peptide
SGTPTHN

SEQ ID NO: 1199 - protein, 7 aa, synthetic construct
  REGION 1..7: note = Description of Artificial Sequence: Synthetic peptide
SGGSSSK

SEQ ID NO: 1200 - protein, 7 aa, synthetic construct
  REGION 1..7: note = Description of Artificial Sequence: Synthetic peptide
GTGKPAQ

SEQ ID NO: 1201 - protein, 7 aa, synthetic construct
  REGION 1..7: note = Description of Artificial Sequence: Synthetic peptide
NANKTAG

SEQ ID NO: 1202 - protein, 7 aa, synthetic construct
  REGION 1..7: note = Description of Artificial Sequence: Synthetic peptide
NTERPTA

SEQ ID NO: 1203 - protein, 7 aa, synthetic construct
  REGION 1..7: note = Description of Artificial Sequence: Synthetic peptide
ASSPTQA

SEQ ID NO: 1204 - protein, 7 aa, synthetic construct
  REGION 1..7: note = Description of Artificial Sequence: Synthetic peptide
GHAGGNS

SEQ ID NO: 1205 - protein, 7 aa, synthetic construct
  REGION 1..7: note = Description of Artificial Sequence: Synthetic peptide
SPEGKNR

SEQ ID NO: 1206 - protein, 7 aa, synthetic construct
  REGION 1..7: note = Description of Artificial Sequence: Synthetic peptide
SMVASQG

SEQ ID NO: 1207 - protein, 7 aa, synthetic construct
  REGION 1..7: note = Description of Artificial Sequence: Synthetic peptide
GREVSPK

SEQ ID NO: 1208 - protein, 7 aa, synthetic construct
  REGION 1..7: note = Description of Artificial Sequence: Synthetic peptide
ATTASPK

SEQ ID NO: 1209 - protein, 7 aa, synthetic construct
  REGION 1..7: note = Description of Artificial Sequence: Synthetic peptide
MGVTGSA

SEQ ID NO: 1210 - protein, 7 aa, synthetic construct
  REGION 1..7: note = Description of Artificial Sequence: Synthetic peptide
APSSQSA

SEQ ID NO: 1211 - protein, 7 aa, synthetic construct
  REGION 1..7: note = Description of Artificial Sequence: Synthetic peptide
GSTAQPR

SEQ ID NO: 1212 - protein, 7 aa, synthetic construct
  REGION 1..7: note = Description of Artificial Sequence: Synthetic peptide
KNGNSTY

SEQ ID NO: 1213 - protein, 7 aa, synthetic construct
  REGION 1..7: note = Description of Artificial Sequence: Synthetic peptide
SNQGGIT

SEQ ID NO: 1214 - protein, 7 aa, synthetic construct
  REGION 1..7: note = Description of Artificial Sequence: Synthetic peptide
SVNKSDN

SEQ ID NO: 1215 - protein, 7 aa, synthetic construct
  REGION 1..7: note = Description of Artificial Sequence: Synthetic peptide
TSGGLKS

SEQ ID NO: 1216 - protein, 7 aa, synthetic construct
  REGION 1..7: note = Description of Artificial Sequence: Synthetic peptide
GVVSPAK

SEQ ID NO: 1217 - protein, 7 aa, synthetic construct
  REGION 1..7: note = Description of Artificial Sequence: Synthetic peptide
GQVQGTT

SEQ ID NO: 1218 - protein, 7 aa, synthetic construct
  REGION 1..7: note = Description of Artificial Sequence: Synthetic peptide
SMAKSTQ

SEQ ID NO: 1219 - protein, 7 aa, synthetic construct
  REGION 1..7: note = Description of Artificial Sequence: Synthetic peptide
TAAKIGS

SEQ ID NO: 1220 - protein, 7 aa, synthetic construct
  REGION 1..7: note = Description of Artificial Sequence: Synthetic peptide
GSTKSTS

SEQ ID NO: 1221 - protein, 7 aa, synthetic construct
  REGION 1..7: note = Description of Artificial Sequence: Synthetic peptide
SSHKSVA

SEQ ID NO: 1222 - protein, 7 aa, synthetic construct
  REGION 1..7: note = Description of Artificial Sequence: Synthetic peptide
SQGASLG

SEQ ID NO: 1223 - protein, 7 aa, synthetic construct
  REGION 1..7: note = Description of Artificial Sequence: Synthetic peptide
TNSSSAS

SEQ ID NO: 1224 - protein, 7 aa, synthetic construct
  REGION 1..7: note = Description of Artificial Sequence: Synthetic peptide
GSSRDSP

SEQ ID NO: 1225 - protein, 7 aa, synthetic construct
  REGION 1..7: note = Description of Artificial Sequence: Synthetic peptide
KSAKSIE

SEQ ID NO: 1226 - protein, 7 aa, synthetic construct
  REGION 1..7: note = Description of Artificial Sequence: Synthetic peptide
SSQTPQA

SEQ ID NO: 1227 - protein, 7 aa, synthetic construct
  REGION 1..7: note = Description of Artificial Sequence: Synthetic peptide
GGDKPSV

SEQ ID NO: 1228 - protein, 7 aa, synthetic construct
  REGION 1..7: note = Description of Artificial Sequence: Synthetic peptide
KSGSASS

SEQ ID NO: 1229 - protein, 7 aa, synthetic construct
  REGION 1..7: note = Description of Artificial Sequence: Synthetic peptide
YGSSKNQ

SEQ ID NO: 1230 - protein, 7 aa, synthetic construct
  REGION 1..7: note = Description of Artificial Sequence: Synthetic peptide
SHSKEQL

SEQ ID NO: 1231 - protein, 7 aa, synthetic construct
  REGION 1..7: note = Description of Artificial Sequence: Synthetic peptide
TRSTSTT

SEQ ID NO: 1232 - protein, 7 aa, synthetic construct
  REGION 1..7: note = Description of Artificial Sequence: Synthetic peptide
SKPGEHG

SEQ ID NO: 1233 - protein, 7 aa, synthetic construct
  REGION 1..7: note = Description of Artificial Sequence: Synthetic peptide
SKGSPSA

SEQ ID NO: 1234 - protein, 7 aa, synthetic construct
  REGION 1..7: note = Description of Artificial Sequence: Synthetic peptide
GSRPNSG

SEQ ID NO: 1235 - protein, 7 aa, synthetic construct
  REGION 1..7: note = Description of Artificial Sequence: Synthetic peptide
GAQTAHV

SEQ ID NO: 1236 - protein, 7 aa, synthetic construct
  REGION 1..7: note = Description of Artificial Sequence: Synthetic peptide
ANGAPTR

SEQ ID NO: 1237 - protein, 7 aa, synthetic construct
  REGION 1..7: note = Description of Artificial Sequence: Synthetic peptide
SGAAKES

SEQ ID NO: 1238 - protein, 7 aa, synthetic construct
  REGION 1..7: note = Description of Artificial Sequence: Synthetic peptide
MQTSSSI

SEQ ID NO: 1239 - protein, 7 aa, synthetic construct
  REGION 1..7: note = Description of Artificial Sequence: Synthetic peptide
GSSTPKL

SEQ ID NO: 1240 - protein, 7 aa, synthetic construct
  REGION 1..7: note = Description of Artificial Sequence: Synthetic peptide
GSTKPNY

SEQ ID NO: 1241 - protein, 7 aa, synthetic construct
  REGION 1..7: note = Description of Artificial Sequence: Synthetic peptide
AAGAHTV

SEQ ID NO: 1242 - protein, 7 aa, synthetic construct
  REGION 1..7: note = Description of Artificial Sequence: Synthetic peptide
GLEASKE

SEQ ID NO: 1243 - protein, 7 aa, synthetic construct
  REGION 1..7: note = Description of Artificial Sequence: Synthetic peptide
TTNAPVG

SEQ ID NO: 1244 - protein, 7 aa, synthetic construct
  REGION 1..7: note = Description of Artificial Sequence: Synthetic peptide
STSTKSM

SEQ ID NO: 1245 - protein, 7 aa, synthetic construct
  REGION 1..7: note = Description of Artificial Sequence: Synthetic peptide
DVGKQSK

SEQ ID NO: 1246 - protein, 7 aa, synthetic construct
  REGION 1..7: note = Description of Artificial Sequence: Synthetic peptide
QSNTTSS

SEQ ID NO: 1247 - protein, 7 aa, synthetic construct
  REGION 1..7: note = Description of Artificial Sequence: Synthetic peptide
SSHSPSL

SEQ ID NO: 1248 - protein, 7 aa, synthetic construct
  REGION 1..7: note = Description of Artificial Sequence: Synthetic peptide
GVGSKTA

SEQ ID NO: 1249 - protein, 7 aa, synthetic construct
  REGION 1..7: note = Description of Artificial Sequence: Synthetic peptide
SLNGKPG

SEQ ID NO: 1250 - protein, 7 aa, synthetic construct
  REGION 1..7: note = Description of Artificial Sequence: Synthetic peptide
TSEKPFN

SEQ ID NO: 1251 - protein, 7 aa, synthetic construct
  REGION 1..7: note = Description of Artificial Sequence: Synthetic peptide
SITKGNP

SEQ ID NO: 1252 - protein, 7 aa, synthetic construct
  REGION 1..7: note = Description of Artificial Sequence: Synthetic peptide
GTANPSR

SEQ ID NO: 1253 - protein, 7 aa, synthetic construct
  REGION 1..7: note = Description of Artificial Sequence: Synthetic peptide
SPNKPAS

SEQ ID NO: 1254 - protein, 7 aa, synthetic construct
  REGION 1..7: note = Description of Artificial Sequence: Synthetic peptide
TNSKPVS

SEQ ID NO: 1255 - protein, 7 aa, synthetic construct
  REGION 1..7: note = Description of Artificial Sequence: Synthetic peptide
SRDKNSG

SEQ ID NO: 1256 - protein, 7 aa, synthetic construct
  REGION 1..7: note = Description of Artificial Sequence: Synthetic peptide
NSTNHPS

SEQ ID NO: 1257 - protein, 7 aa, synthetic construct
  REGION 1..7: note = Description of Artificial Sequence: Synthetic peptide
TEKSKAI

SEQ ID NO: 1258 - protein, 7 aa, synthetic construct
  REGION 1..7: note = Description of Artificial Sequence: Synthetic peptide
SGPDLKS

SEQ ID NO: 1259 - protein, 7 aa, synthetic construct
  REGION 1..7: note = Description of Artificial Sequence: Synthetic peptide
DQTARNV

SEQ ID NO: 1260 - protein, 7 aa, synthetic construct
  REGION 1..7: note = Description of Artificial Sequence: Synthetic peptide
SDSQKTR

SEQ ID NO: 1261 - protein, 7 aa, synthetic construct
  REGION 1..7: note = Description of Artificial Sequence: Synthetic peptide
MSDNKVL

SEQ ID NO: 1262 - protein, 7 aa, synthetic construct
  REGION 1..7: note = Description of Artificial Sequence: Synthetic peptide
MTSTKAS

SEQ ID NO: 1263 - protein, 7 aa, synthetic construct
  REGION 1..7: note = Description of Artificial Sequence: Synthetic peptide
AVSSKHS

SEQ ID NO: 1264 - protein, 7 aa, synthetic construct
  REGION 1..7: note = Description of Artificial Sequence: Synthetic peptide
SHQSSAN

SEQ ID NO: 1265 - protein, 7 aa, synthetic construct
  REGION 1..7: note = Description of Artificial Sequence: Synthetic peptide
HGVKDSK

SEQ ID NO: 1266 - protein, 7 aa, synthetic construct
  REGION 1..7: note = Description of Artificial Sequence: Synthetic peptide
LGGTQNK

SEQ ID NO: 1267 - protein, 7 aa, synthetic construct
  REGION 1..7: note = Description of Artificial Sequence: Synthetic peptide
SGATPIK

SEQ ID NO: 1268 - protein, 7 aa, synthetic construct
  REGION 1..7: note = Description of Artificial Sequence: Synthetic peptide
TGGNTAH

SEQ ID NO: 1269 - protein, 7 aa, synthetic construct
  REGION 1..7: note = Description of Artificial Sequence: Synthetic peptide
LGDQRVT

SEQ ID NO: 1270 - protein, 7 aa, synthetic construct
  REGION 1..7: note = Description of Artificial Sequence: Synthetic peptide
SGSVQPA

SEQ ID NO: 1271 - protein, 7 aa, synthetic construct
  REGION 1..7: note = Description of Artificial Sequence: Synthetic peptide
NADTRSS

SEQ ID NO: 1272 - protein, 7 aa, synthetic construct
  REGION 1..7: note = Description of Artificial Sequence: Synthetic peptide
SSASKSN

SEQ ID NO: 1273 - protein, 7 aa, synthetic construct
  REGION 1..7: note = Description of Artificial Sequence: Synthetic peptide
NGSASSS

SEQ ID NO: 1274 - protein, 7 aa, synthetic construct
  REGION 1..7: note = Description of Artificial Sequence: Synthetic peptide
NANGRQQ

SEQ ID NO: 1275 - protein, 7 aa, synthetic construct
  REGION 1..7: note = Description of Artificial Sequence: Synthetic peptide
GMGHSAA

SEQ ID NO: 1276 - protein, 7 aa, synthetic construct
  REGION 1..7: note = Description of Artificial Sequence: Synthetic peptide
AGSGHST

SEQ ID NO: 1277 - protein, 7 aa, synthetic construct
  REGION 1..7: note = Description of Artificial Sequence: Synthetic peptide
DFGKANA

SEQ ID NO: 1278 - protein, 7 aa, synthetic construct
  REGION 1..7: note = Description of Artificial Sequence: Synthetic peptide
LAGNGNA

SEQ ID NO: 1279 - protein, 7 aa, synthetic construct
  REGION 1..7: note = Description of Artificial Sequence: Synthetic peptide
VPAGKGS

SEQ ID NO: 1280 - protein, 7 aa, synthetic construct
  REGION 1..7: note = Description of Artificial Sequence: Synthetic peptide
TSAPTSG

SEQ ID NO: 1281 - protein, 7 aa, synthetic construct
  REGION 1..7: note = Description of Artificial Sequence: Synthetic peptide
ISSKQSS

SEQ ID NO: 1282 - protein, 7 aa, synthetic construct
  REGION 1..7: note = Description of Artificial Sequence: Synthetic peptide
ANNGTGG

SEQ ID NO: 1283 - protein, 7 aa, synthetic construct
  REGION 1..7: note = Description of Artificial Sequence: Synthetic peptide
SSSGRNE

SEQ ID NO: 1284 - protein, 7 aa, synthetic construct
  REGION 1..7: note = Description of Artificial Sequence: Synthetic peptide
AGTTHGG

SEQ ID NO: 1285 - protein, 7 aa, synthetic construct
  REGION 1..7: note = Description of Artificial Sequence: Synthetic peptide
MPTSSQV

SEQ ID NO: 1286 - protein, 7 aa, synthetic construct
  REGION 1..7: note = Description of Artificial Sequence: Synthetic peptide
RSGDPIK

SEQ ID NO: 1287 - protein, 7 aa, synthetic construct
  REGION 1..7: note = Description of Artificial Sequence: Synthetic peptide
QAGSSNG

SEQ ID NO: 1288 - protein, 7 aa, synthetic construct
  REGION 1..7: note = Description of Artificial Sequence: Synthetic peptide
FGSGSAN

SEQ ID NO: 1289 - protein, 7 aa, synthetic construct
  REGION 1..7: note = Description of Artificial Sequence: Synthetic peptide
TSTGTQA

SEQ ID NO: 1290 - protein, 7 aa, synthetic construct
  REGION 1..7: note = Description of Artificial Sequence: Synthetic peptide
NKDHANV

SEQ ID NO: 1291 - protein, 7 aa, synthetic construct
  REGION 1..7: note = Description of Artificial Sequence: Synthetic peptide
DNSSMSK

SEQ ID NO: 1292 - protein, 7 aa, synthetic construct
  REGION 1..7: note = Description of Artificial Sequence: Synthetic peptide
SPSGGGN

SEQ ID NO: 1293 - protein, 7 aa, synthetic construct
  REGION 1..7: note = Description of Artificial Sequence: Synthetic peptide
NLGGKAV

SEQ ID NO: 1294 - protein, 7 aa, synthetic construct
  REGION 1..7: note = Description of Artificial Sequence: Synthetic peptide
SSTNKAM

SEQ ID NO: 1295 - protein, 7 aa, synthetic construct
  REGION 1..7: note = Description of Artificial Sequence: Synthetic peptide
STDIKAQ

SEQ ID NO: 1296 - protein, 7 aa, synthetic construct
  REGION 1..7: note = Description of Artificial Sequence: Synthetic peptide
SGSSNHV

SEQ ID NO: 1297 - protein, 7 aa, synthetic construct
  REGION 1..7: note = Description of Artificial Sequence: Synthetic peptide
TTVGSNS

SEQ ID NO: 1298 - protein, 7 aa, synthetic construct
  REGION 1..7: note = Description of Artificial Sequence: Synthetic peptide
SANHSPT

SEQ ID NO: 1299 - protein, 7 aa, synthetic construct
  REGION 1..7: note = Description of Artificial Sequence: Synthetic peptide
VTANASS

SEQ ID NO: 1300 - protein, 7 aa, synthetic construct
  REGION 1..7: note = Description of Artificial Sequence: Synthetic peptide
TPSKSSL

SEQ ID NO: 1301 - protein, 7 aa, synthetic construct
  REGION 1..7: note = Description of Artificial Sequence: Synthetic peptide
TGGRPSE

SEQ ID NO: 1302 - protein, 7 aa, synthetic construct
  REGION 1..7: note = Description of Artificial Sequence: Synthetic peptide
LVSSEQK

SEQ ID NO: 1303 - protein, 7 aa, synthetic construct
  REGION 1..7: note = Description of Artificial Sequence: Synthetic peptide
MGGAQGS

SEQ ID NO: 1304 - protein, 7 aa, synthetic construct
  REGION 1..7: note = Description of Artificial Sequence: Synthetic peptide
NGSRQNQ

SEQ ID NO: 1305 - protein, 7 aa, synthetic construct
  REGION 1..7: note = Description of Artificial Sequence: Synthetic peptide
HGTGKGA

SEQ ID NO: 1306 - protein, 7 aa, synthetic construct
  REGION 1..7: note = Description of Artificial Sequence: Synthetic peptide
GNSAGLS

SEQ ID NO: 1307 - protein, 7 aa, synthetic construct
  REGION 1..7: note = Description of Artificial Sequence: Synthetic peptide
SGIQKPA

SEQ ID NO: 1308 - protein, 7 aa, synthetic construct
  REGION 1..7: note = Description of Artificial Sequence: Synthetic peptide
GSKGSQN

SEQ ID NO: 1309 - protein, 7 aa, synthetic construct
  REGION 1..7: note = Description of Artificial Sequence: Synthetic peptide
ATGDPRR

SEQ ID NO: 1310 - protein, 7 aa, synthetic construct
  REGION 1..7: note = Description of Artificial Sequence: Synthetic peptide
DAARPQA

SEQ ID NO: 1311 - protein, 7 aa, synthetic construct
  REGION 1..7: note = Description of Artificial Sequence: Synthetic peptide
ENTSPSL

SEQ ID NO: 1312 - protein, 7 aa, synthetic construct
  REGION 1..7: note = Description of Artificial Sequence: Synthetic peptide
DGDKSRA

SEQ ID NO: 1313 - protein, 7 aa, synthetic construct
  REGION 1..7: note = Description of Artificial Sequence: Synthetic peptide
SASGATG

SEQ ID NO: 1314 - protein, 7 aa, synthetic construct
  REGION 1..7: note = Description of Artificial Sequence: Synthetic peptide
LPGKTNS

SEQ ID NO: 1315 - protein, 7 aa, synthetic construct
  REGION 1..7: note = Description of Artificial Sequence: Synthetic peptide
EVGHSKG

SEQ ID NO: 1316 - protein, 7 aa, synthetic construct
  REGION 1..7: note = Description of Artificial Sequence: Synthetic peptide
AGATPMR

SEQ ID NO: 1317 - protein, 7 aa, synthetic construct
  REGION 1..7: note = Description of Artificial Sequence: Synthetic peptide
MRSQDTT

SEQ ID NO: 1318 - protein, 7 aa, synthetic construct
  REGION 1..7: note = Description of Artificial Sequence: Synthetic peptide
QSGQPGR

SEQ ID NO: 1319 - protein, 7 aa, synthetic construct
  REGION 1..7: note = Description of Artificial Sequence: Synthetic peptide
DGVRSSN

SEQ ID NO: 1320 - protein, 7 aa, synthetic construct
  REGION 1..7: note = Description of Artificial Sequence: Synthetic peptide
TTTHNPV

SEQ ID NO: 1321 - protein, 7 aa, synthetic construct
  REGION 1..7: note = Description of Artificial Sequence: Synthetic peptide
LPSSPAT

SEQ ID NO: 1322 - protein, 7 aa, synthetic construct
  REGION 1..7: note = Description of Artificial Sequence: Synthetic peptide
DGSSPQI

SEQ ID NO: 1323 - protein, 7 aa, synthetic construct
  REGION 1..7: note = Description of Artificial Sequence: Synthetic peptide
SAGSKTA

SEQ ID NO: 1324 - protein, 7 aa, synthetic construct
  REGION 1..7: note = Description of Artificial Sequence: Synthetic peptide
GSKTHSS

SEQ ID NO: 1325 - protein, 7 aa, synthetic construct
  REGION 1..7: note = Description of Artificial Sequence: Synthetic peptide
SGNSAKT

SEQ ID NO: 1326 - protein, 7 aa, synthetic construct
  REGION 1..7: note = Description of Artificial Sequence: Synthetic peptide
HGGSKTT

SEQ ID NO: 1327 - protein, 7 aa, synthetic construct
  REGION 1..7: note = Description of Artificial Sequence: Synthetic peptide
VPSDRSS

SEQ ID NO: 1328 - protein, 7 aa, synthetic construct
  REGION 1..7: note = Description of Artificial Sequence: Synthetic peptide
QQGKSAL

SEQ ID NO: 1329 - protein, 7 aa, synthetic construct
  REGION 1..7: note = Description of Artificial Sequence: Synthetic peptide
MHDGKSV

SEQ ID NO: 1330 - protein, 7 aa, synthetic construct
  REGION 1..7: note = Description of Artificial Sequence: Synthetic peptide
DSAGNRL

SEQ ID NO: 1331 - protein, 7 aa, synthetic construct
  REGION 1..7: note = Description of Artificial Sequence: Synthetic peptide
VSGSSHA

SEQ ID NO: 1332 - protein, 7 aa, synthetic construct
  REGION 1..7: note = Description of Artificial Sequence: Synthetic peptide
SSDRSPV

SEQ ID NO: 1333 - protein, 7 aa, synthetic construct
  REGION 1..7: note = Description of Artificial Sequence: Synthetic peptide
GNAKAPS

SEQ ID NO: 1334 - protein, 7 aa, synthetic construct
  REGION 1..7: note = Description of Artificial Sequence: Synthetic peptide
GTAGSRN

SEQ ID NO: 1335 - protein, 7 aa, synthetic construct
  REGION 1..7: note = Description of Artificial Sequence: Synthetic peptide
VSDKPAI

SEQ ID NO: 1336 - protein, 7 aa, synthetic construct
  REGION 1..7: note = Description of Artificial Sequence: Synthetic peptide
LRGASSE

SEQ ID NO: 1337 - protein, 7 aa, synthetic construct
  REGION 1..7: note = Description of Artificial Sequence: Synthetic peptide
ESSGSMR

SEQ ID NO: 1338 - protein, 7 aa, synthetic construct
  REGION 1..7: note = Description of Artificial Sequence: Synthetic peptide
GSTKVTQ

SEQ ID NO: 1339 - protein, 7 aa, synthetic construct
  REGION 1..7: note = Description of Artificial Sequence: Synthetic peptide
SGAKASG

SEQ ID NO: 1340 - protein, 7 aa, synthetic construct
  REGION 1..7: note = Description of Artificial Sequence: Synthetic peptide
GRDTHNK

SEQ ID NO: 1341 - protein, 7 aa, synthetic construct
  REGION 1..7: note = Description of Artificial Sequence: Synthetic peptide
SGTPNGH

SEQ ID NO: 1342 - protein, 7 aa, synthetic construct
  REGION 1..7: note = Description of Artificial Sequence: Synthetic peptide
GSHSQKG

SEQ ID NO: 1343 - protein, 7 aa, synthetic construct
  REGION 1..7: note = Description of Artificial Sequence: Synthetic peptide
SNGVRSS

SEQ ID NO: 1344 - protein, 7 aa, synthetic construct
  REGION 1..7: note = Description of Artificial Sequence: Synthetic peptide
GRGSGDK

SEQ ID NO: 1345 - protein, 7 aa, synthetic construct
  REGION 1..7: note = Description of Artificial Sequence: Synthetic peptide
SSGNSRS

SEQ ID NO: 1346 - protein, 7 aa, synthetic construct
  REGION 1..7: note = Description of Artificial Sequence: Synthetic peptide
VPDKSSK

SEQ ID NO: 1347 - protein, 7 aa, synthetic construct
  REGION 1..7: note = Description of Artificial Sequence: Synthetic peptide
IPSTKSQ

SEQ ID NO: 1348 - protein, 7 aa, synthetic construct
  REGION 1..7: note = Description of Artificial Sequence: Synthetic peptide
RNGKENS

SEQ ID NO: 1349 - protein, 7 aa, synthetic construct
  REGION 1..7: note = Description of Artificial Sequence: Synthetic peptide
QIQAPAS

SEQ ID NO: 1350 - protein, 7 aa, synthetic construct
  REGION 1..7: note = Description of Artificial Sequence: Synthetic peptide
GSVKVES

SEQ ID NO: 1351 - protein, 7 aa, synthetic construct
  REGION 1..7: note = Description of Artificial Sequence: Synthetic peptide
TPTGARN

SEQ ID NO: 1352 - protein, 7 aa, synthetic construct
  REGION 1..7: note = Description of Artificial Sequence: Synthetic peptide
DNQGGRG

SEQ ID NO: 1353 - protein, 7 aa, synthetic construct
  REGION 1..7: note = Description of Artificial Sequence: Synthetic peptide
GTSPSDR

SEQ ID NO: 1354 - protein, 7 aa, synthetic construct
  REGION 1..7: note = Description of Artificial Sequence: Synthetic peptide
ASDQTGK

SEQ ID NO: 1355 - protein, 7 aa, synthetic construct
  REGION 1..7: note = Description of Artificial Sequence: Synthetic peptide
VTQSHST

SEQ ID NO: 1356 - protein, 7 aa, synthetic construct
  REGION 1..7: note = Description of Artificial Sequence: Synthetic peptide
SPDTRPV

SEQ ID NO: 1357 - protein, 7 aa, synthetic construct
  REGION 1..7: note = Description of Artificial Sequence: Synthetic peptide
GSGNSTL

SEQ ID NO: 1358 - protein, 7 aa, synthetic construct
  REGION 1..7: note = Description of Artificial Sequence: Synthetic peptide
NGGSKPP

SEQ ID NO: 1359 - protein, 7 aa, synthetic construct
  REGION 1..7: note = Description of Artificial Sequence: Synthetic peptide
MGSNEQR

SEQ ID NO: 1360 - protein, 7 aa, synthetic construct
  REGION 1..7: note = Description of Artificial Sequence: Synthetic peptide
SSTTTNV

SEQ ID NO: 1361 - protein, 7 aa, synthetic construct
  REGION 1..7: note = Description of Artificial Sequence: Synthetic peptide
GSNAPIK

SEQ ID NO: 1362 - protein, 7 aa, synthetic construct
  REGION 1..7: note = Description of Artificial Sequence: Synthetic peptide
TPSKTST

SEQ ID NO: 1363 - protein, 7 aa, synthetic construct
  REGION 1..7: note = Description of Artificial Sequence: Synthetic peptide
STSRTNT

SEQ ID NO: 1364 - protein, 7 aa, synthetic construct
  REGION 1..7: note = Description of Artificial Sequence: Synthetic peptide
QVSAPRE

SEQ ID NO: 1365 - protein, 7 aa, synthetic construct
  REGION 1..7: note = Description of Artificial Sequence: Synthetic peptide
DMASKPA

SEQ ID NO: 1366 - protein, 7 aa, synthetic construct
  REGION 1..7: note = Description of Artificial Sequence: Synthetic peptide
LNQKSVA

SEQ ID NO: 1367 - protein, 7 aa, synthetic construct
  REGION 1..7: note = Description of Artificial Sequence: Synthetic peptide
NAGAHAG

SEQ ID NO: 1368 - protein, 7 aa, synthetic construct
  REGION 1..7: note = Description of Artificial Sequence: Synthetic peptide
TSGDSNR

SEQ ID NO: 1369 - protein, 7 aa, synthetic construct
  REGION 1..7: note = Description of Artificial Sequence: Synthetic peptide
STTGSRS

SEQ ID NO: 1370 - protein, 7 aa, synthetic construct
  REGION 1..7: note = Description of Artificial Sequence: Synthetic peptide
SIGNPST

SEQ ID NO: 1371 - protein, 7 aa, synthetic construct
  REGION 1..7: note = Description of Artificial Sequence: Synthetic peptide
IGTTPAR

SEQ ID NO: 1372 - protein, 7 aa, synthetic construct
  REGION 1..7: note = Description of Artificial Sequence: Synthetic peptide
GTNKTVS

SEQ ID NO: 1373 - protein, 7 aa, synthetic construct
  REGION 1..7: note = Description of Artificial Sequence: Synthetic peptide
VTGSPSR

SEQ ID NO: 1374 - protein, 7 aa, synthetic construct
  REGION 1..7: note = Description of Artificial Sequence: Synthetic peptide
VRDSKST

SEQ ID NO: 1375 - protein, 7 aa, synthetic construct
  REGION 1..7: note = Description of Artificial Sequence: Synthetic peptide
SQKASVQ

SEQ ID NO: 1376 - protein, 7 aa, synthetic construct
  REGION 1..7: note = Description of Artificial Sequence: Synthetic peptide
TRAQPSS

SEQ ID NO: 1377 - protein, 7 aa, synthetic construct
  REGION 1..7: note = Description of Artificial Sequence: Synthetic peptide
TTKPNSA

SEQ ID NO: 1378 - protein, 7 aa, synthetic construct
  REGION 1..7: note = Description of Artificial Sequence: Synthetic peptide
DNPIPVK

SEQ ID NO: 1379 - protein, 7 aa, synthetic construct
  REGION 1..7: note = Description of Artificial Sequence: Synthetic peptide
GKTDRNS

SEQ ID NO: 1380 - protein, 7 aa, synthetic construct
  REGION 1..7: note = Description of Artificial Sequence: Synthetic peptide
NSTGKLG

SEQ ID NO: 1381 - protein, 7 aa, synthetic construct
  REGION 1..7: note = Description of Artificial Sequence: Synthetic peptide
TVSSTNH

SEQ ID NO: 1382 - protein, 7 aa, synthetic construct
  REGION 1..7: note = Description of Artificial Sequence: Synthetic peptide
SSSTGMQ

SEQ ID NO: 1383 - protein, 7 aa, synthetic construct
  REGION 1..7: note = Description of Artificial Sequence: Synthetic peptide
ASNVPNK

SEQ ID NO: 1384 - protein, 7 aa, synthetic construct
  REGION 1..7: note = Description of Artificial Sequence: Synthetic peptide
ASASPTL

SEQ ID NO: 1385 - protein, 7 aa, synthetic construct
  REGION 1..7: note = Description of Artificial Sequence: Synthetic peptide
HTSDKTV

SEQ ID NO: 1386 - protein, 7 aa, synthetic construct
  REGION 1..7: note = Description of Artificial Sequence: Synthetic peptide
SSTKPTS

SEQ ID NO: 1387 - protein, 7 aa, synthetic construct
  REGION 1..7: note = Description of Artificial Sequence: Synthetic peptide
NRKNDTQ

SEQ ID NO: 1388 - protein, 7 aa, synthetic construct
  REGION 1..7: note = Description of Artificial Sequence: Synthetic peptide
SVPTGKG

SEQ ID NO: 1389 - protein, 7 aa, synthetic construct
  REGION 1..7: note = Description of Artificial Sequence: Synthetic peptide
EPSKSMI

SEQ ID NO: 1390 - protein, 7 aa, synthetic construct
  REGION 1..7: note = Description of Artificial Sequence: Synthetic peptide
AQATKPS

SEQ ID NO: 1391 - protein, 7 aa, synthetic construct
  REGION 1..7: note = Description of Artificial Sequence: Synthetic peptide
NTGKSQT

SEQ ID NO: 1392 - protein, 7 aa, synthetic construct
  REGION 1..7: note = Description of Artificial Sequence: Synthetic peptide
RGTKPQE

SEQ ID NO: 1393 - protein, 7 aa, synthetic construct
  REGION 1..7: note = Description of Artificial Sequence: Synthetic peptide
SKENKAS

SEQ ID NO: 1394 - protein, 7 aa, synthetic construct
  REGION 1..7: note = Description of Artificial Sequence: Synthetic peptide
QQAKGNA

SEQ ID NO: 1395 - protein, 7 aa, synthetic construct
  REGION 1..7: note = Description of Artificial Sequence: Synthetic peptide
KGNSTVN

SEQ ID NO: 1396 - protein, 7 aa, synthetic construct
  REGION 1..7: note = Description of Artificial Sequence: Synthetic peptide
QGSSGLG

SEQ ID NO: 1397 - protein, 7 aa, synthetic construct
  REGION 1..7: note = Description of Artificial Sequence: Synthetic peptide
DRSPSNV

SEQ ID NO: 1398 - protein, 7 aa, synthetic construct
  REGION 1..7: note = Description of Artificial Sequence: Synthetic peptide
AGDSKAR

SEQ ID NO: 1399 - protein, 7 aa, synthetic construct
  REGION 1..7: note = Description of Artificial Sequence: Synthetic peptide
TPSKDKA

SEQ ID NO: 1400 - protein, 7 aa, synthetic construct
  REGION 1..7: note = Description of Artificial Sequence: Synthetic peptide
KQGPSAE

SEQ ID NO: 1401 - protein, 7 aa, synthetic construct
  REGION 1..7: note = Description of Artificial Sequence: Synthetic peptide
SRGAPGT

SEQ ID NO: 1402 - protein, 7 aa, synthetic construct
  REGION 1..7: note = Description of Artificial Sequence: Synthetic peptide
GSAQSPR

SEQ ID NO: 1403 - protein, 7 aa, synthetic construct
  REGION 1..7: note = Description of Artificial Sequence: Synthetic peptide
TNRNPNL

SEQ ID NO: 1404 - protein, 7 aa, synthetic construct
  REGION 1..7: note = Description of Artificial Sequence: Synthetic peptide
IDSKPTN

SEQ ID NO: 1405 - protein, 7 aa, synthetic construct
  REGION 1..7: note = Description of Artificial Sequence: Synthetic peptide
VTGGTKG

SEQ ID NO: 1406 - protein, 7 aa, synthetic construct
  REGION 1..7: note = Description of Artificial Sequence: Synthetic peptide
TTNTPLK

SEQ ID NO: 1407 - protein, 7 aa, synthetic construct
  REGION 1..7: note = Description of Artificial Sequence: Synthetic peptide
SHEGKST

SEQ ID NO: 1408 - protein, 7 aa, synthetic construct
  REGION 1..7: note = Description of Artificial Sequence: Synthetic peptide
MDKPSQG

SEQ ID NO: 1409 - protein, 7 aa, synthetic construct
  REGION 1..7: note = Description of Artificial Sequence: Synthetic peptide
TQQAKTE

SEQ ID NO: 1410 - protein, 7 aa, synthetic construct
  REGION 1..7: note = Description of Artificial Sequence: Synthetic peptide
GDNKVLK

SEQ ID NO: 1411 - protein, 7 aa, synthetic construct
  REGION 1..7: note = Description of Artificial Sequence: Synthetic peptide
TRSNPQA

SEQ ID NO: 1412 - protein, 7 aa, synthetic construct
  REGION 1..7: note = Description of Artificial Sequence: Synthetic peptide
SLSSGTK

SEQ ID NO: 1413 - protein, 7 aa, synthetic construct
  REGION 1..7: note = Description of Artificial Sequence: Synthetic peptide
MSGGPKN

SEQ ID NO: 1414 - protein, 7 aa, synthetic construct
  REGION 1..7: note = Description of Artificial Sequence: Synthetic peptide
VGTGQQG

SEQ ID NO: 1415 - protein, 7 aa, synthetic construct
  REGION 1..7: note = Description of Artificial Sequence: Synthetic peptide
AESGRNT

SEQ ID NO: 1416 - protein, 7 aa, synthetic construct
  REGION 1..7: note = Description of Artificial Sequence: Synthetic peptide
TINKQAT

SEQ ID NO: 1417 - protein, 7 aa, synthetic construct
  REGION 1..7: note = Description of Artificial Sequence: Synthetic peptide
AKSSGSG

SEQ ID NO: 1418 - protein, 7 aa, synthetic construct
  REGION 1..7: note = Description of Artificial Sequence: Synthetic peptide
NTSKASA

SEQ ID NO: 1419 - protein, 7 aa, synthetic construct
  REGION 1..7: note = Description of Artificial Sequence: Synthetic peptide
SGKPASA

SEQ ID NO: 1420 - protein, 7 aa, synthetic construct
  REGION 1..7: note = Description of Artificial Sequence: Synthetic peptide
SMTKSNV

SEQ ID NO: 1421 - protein, 7 aa, synthetic construct
  REGION 1..7: note = Description of Artificial Sequence: Synthetic peptide
STRTSSE

SEQ ID NO: 1422 - protein, 7 aa, synthetic construct
  REGION 1..7: note = Description of Artificial Sequence: Synthetic peptide
RQGSDAR

SEQ ID NO: 1423 - protein, 7 aa, synthetic construct
  REGION 1..7: note = Description of Artificial Sequence: Synthetic peptide
QKAPSAS

SEQ ID NO: 1424 - protein, 7 aa, synthetic construct
  REGION 1..7: note = Description of Artificial Sequence: Synthetic peptide
GGSPAAS

SEQ ID NO: 1425 - protein, 7 aa, synthetic construct
  REGION 1..7: note = Description of Artificial Sequence: Synthetic peptide
VGSSSSM

SEQ ID NO: 1426 - protein, 7 aa, synthetic construct
  REGION 1..7: note = Description of Artificial Sequence: Synthetic peptide
SLSVPKD

SEQ ID NO: 1427 - protein, 7 aa, synthetic construct
  REGION 1..7: note = Description of Artificial Sequence: Synthetic peptide
MSSKPAT

SEQ ID NO: 1428 - protein, 7 aa, synthetic construct
  REGION 1..7: note = Description of Artificial Sequence: Synthetic peptide
SVMQKAS

SEQ ID NO: 1429 - protein, 7 aa, synthetic construct
  REGION 1..7: note = Description of Artificial Sequence: Synthetic peptide
TGSTATL

SEQ ID NO: 1430 - protein, 7 aa, synthetic construct
  REGION 1..7: note = Description of Artificial Sequence: Synthetic peptide
SPQKNNG

SEQ ID NO: 1431 - protein, 7 aa, synthetic construct
  REGION 1..7: note = Description of Artificial Sequence: Synthetic peptide
GPERPAG

SEQ ID NO: 1432 - protein, 7 aa, synthetic construct
  REGION 1..7: note = Description of Artificial Sequence: Synthetic peptide
KPRESSG

SEQ ID NO: 1433 - protein, 7 aa, synthetic construct
  REGION 1..7: note = Description of Artificial Sequence: Synthetic peptide
HADRQAS

SEQ ID NO: 1434 - protein, 7 aa, synthetic construct
  REGION 1..7: note = Description of Artificial Sequence: Synthetic peptide
ASGSGQS

SEQ ID NO: 1435 - protein, 7 aa, synthetic construct
  REGION 1..7: note = Description of Artificial Sequence: Synthetic peptide
SSTNNPK

SEQ ID NO: 1436 - protein, 7 aa, synthetic construct
  REGION 1..7: note = Description of Artificial Sequence: Synthetic peptide
AGTPSPR

SEQ ID NO: 1437 - protein, 7 aa, synthetic construct
  REGION 1..7: note = Description of Artificial Sequence: Synthetic peptide
SGRPDVS

SEQ ID NO: 1438 - protein, 7 aa, synthetic construct
  REGION 1..7: note = Description of Artificial Sequence: Synthetic peptide
HTSPGKN

SEQ ID NO: 1439 - protein, 7 aa, synthetic construct
  REGION 1..7: note = Description of Artificial Sequence: Synthetic peptide
GSAKNSA

SEQ ID NO: 1440 - protein, 7 aa, synthetic construct
  REGION 1..7: note = Description of Artificial Sequence: Synthetic peptide
AQASQTK

SEQ ID NO: 1441 - protein, 7 aa, synthetic construct
  REGION 1..7: note = Description of Artificial Sequence: Synthetic peptide
GSQKPYS

SEQ ID NO: 1442 - protein, 7 aa, synthetic construct
  REGION 1..7: note = Description of Artificial Sequence: Synthetic peptide
VSSTTQT

SEQ ID NO: 1443 - protein, 7 aa, synthetic construct
  REGION 1..7: note = Description of Artificial Sequence: Synthetic peptide
SVTSQGK

SEQ ID NO: 1444 - protein, 7 aa, synthetic construct
  REGION 1..7: note = Description of Artificial Sequence: Synthetic peptide
SVASGNK

SEQ ID NO: 1445 - protein, 7 aa, synthetic construct
  REGION 1..7: note = Description of Artificial Sequence: Synthetic peptide
SGAQQPR

SEQ ID NO: 1446 - protein, 7 aa, synthetic construct
  REGION 1..7: note = Description of Artificial Sequence: Synthetic peptide
HSKPSTM

SEQ ID NO: 1447 - protein, 7 aa, synthetic construct
  REGION 1..7: note = Description of Artificial Sequence: Synthetic peptide
NGRGGTQ

SEQ ID NO: 1448 - protein, 7 aa, synthetic construct
  REGION 1..7: note = Description of Artificial Sequence: Synthetic peptide
LPGKAMT

SEQ ID NO: 1449 - protein, 7 aa, synthetic construct
  REGION 1..7: note = Description of Artificial Sequence: Synthetic peptide
QTGEIGK

SEQ ID NO: 1450 - protein, 7 aa, synthetic construct
  REGION 1..7: note = Description of Artificial Sequence: Synthetic peptide
SSNHTSS

SEQ ID NO: 1451 - protein, 7 aa, synthetic construct
  REGION 1..7: note = Description of Artificial Sequence: Synthetic peptide
RQESKSM

SEQ ID NO: 1452 - protein, 7 aa, synthetic construct
  REGION 1..7: note = Description of Artificial Sequence: Synthetic peptide
VGQGKNA

SEQ ID NO: 1453 - protein, 7 aa, synthetic construct
  REGION 1..7: note = Description of Artificial Sequence: Synthetic peptide
TPGSNGR

SEQ ID NO: 1454 - protein, 7 aa, synthetic construct
  REGION 1..7: note = Description of Artificial Sequence: Synthetic peptide
TTGTDKL

SEQ ID NO: 1455 - protein, 7 aa, synthetic construct
  REGION 1..7: note = Description of Artificial Sequence: Synthetic peptide
EPSATQR

SEQ ID NO: 1456 - protein, 7 aa, synthetic construct
  REGION 1..7: note = Description of Artificial Sequence: Synthetic peptide
NVGTASK

SEQ ID NO: 1457 - protein, 7 aa, synthetic construct
  REGION 1..7: note = Description of Artificial Sequence: Synthetic peptide
GGGTAHM

SEQ ID NO: 1458 - protein, 7 aa, synthetic construct
  REGION 1..7: note = Description of Artificial Sequence: Synthetic peptide
GQSTHHQ

SEQ ID NO: 1459 - protein, 7 aa, synthetic construct
  REGION 1..7: note = Description of Artificial Sequence: Synthetic peptide
KANQGSG

SEQ ID NO: 1460 - protein, 7 aa, synthetic construct
  REGION 1..7: note = Description of Artificial Sequence: Synthetic peptide
GRTNITQ

SEQ ID NO: 1461 - protein, 7 aa, synthetic construct
  REGION 1..7: note = Description of Artificial Sequence: Synthetic peptide
STSSKMG

SEQ ID NO: 1462 - protein, 7 aa, synthetic construct
  REGION 1..7: note = Description of Artificial Sequence: Synthetic peptide
VQTGSHS

SEQ ID NO: 1463 - protein, 7 aa, synthetic construct
  REGION 1..7: note = Description of Artificial Sequence: Synthetic peptide
SASPTSG

SEQ ID NO: 1464 - protein, 7 aa, synthetic construct
  REGION 1..7: note = Description of Artificial Sequence: Synthetic peptide
VRDKSTA

SEQ ID NO: 1465 - protein, 7 aa, synthetic construct
  REGION 1..7: note = Description of Artificial Sequence: Synthetic peptide
QSSGSRS

SEQ ID NO: 1466 - protein, 7 aa, synthetic construct
  REGION 1..7: note = Description of Artificial Sequence: Synthetic peptide
NAQSPIR

SEQ ID NO: 1467 - protein, 7 aa, synthetic construct
  REGION 1..7: note = Description of Artificial Sequence: Synthetic peptide
GASVGSH

SEQ ID NO: 1468 - protein, 7 aa, synthetic construct
  REGION 1..7: note = Description of Artificial Sequence: Synthetic peptide
KGDKVFL

SEQ ID NO: 1469 - protein, 7 aa, synthetic construct
  REGION 1..7: note = Description of Artificial Sequence: Synthetic peptide
TGHAPNV

SEQ ID NO: 1470 - protein, 7 aa, synthetic construct
  REGION 1..7: note = Description of Artificial Sequence: Synthetic peptide
NALGAGG

SEQ ID NO: 1471 - protein, 7 aa, synthetic construct
  REGION 1..7: note = Description of Artificial Sequence: Synthetic peptide
SVSKPIS

SEQ ID NO: 1472 - protein, 7 aa, synthetic construct
  REGION 1..7: note = Description of Artificial Sequence: Synthetic peptide
YNGSKLQ

SEQ ID NO: 1473 - protein, 7 aa, synthetic construct
  REGION 1..7: note = Description of Artificial Sequence: Synthetic peptide
EANTKPH

SEQ ID NO: 1474 - protein, 7 aa, synthetic construct
  REGION 1..7: note = Description of Artificial Sequence: Synthetic peptide
NTNGAGR

SEQ ID NO: 1475 - protein, 7 aa, synthetic construct
  REGION 1..7: note = Description of Artificial Sequence: Synthetic peptide
VSANPPQ

SEQ ID NO: 1476 - protein, 7 aa, synthetic construct
  REGION 1..7: note = Description of Artificial Sequence: Synthetic peptide
NTSGKGV

SEQ ID NO: 1477 - protein, 7 aa, synthetic construct
  REGION 1..7: note = Description of Artificial Sequence: Synthetic peptide
SSTSVMK

SEQ ID NO: 1478 - protein, 7 aa, synthetic construct
  REGION 1..7: note = Description of Artificial Sequence: Synthetic peptide
DRSKAST

SEQ ID NO: 1479 - protein, 7 aa, synthetic construct
  REGION 1..7: note = Description of Artificial Sequence: Synthetic peptide
RSKESQV

SEQ ID NO: 1480 - protein, 7 aa, synthetic construct
  REGION 1..7: note = Description of Artificial Sequence: Synthetic peptide
SSGQSIS

SEQ ID NO: 1481 - protein, 7 aa, synthetic construct
  REGION 1..7: note = Description of Artificial Sequence: Synthetic peptide
TPSTSGR

SEQ ID NO: 1482 - protein, 7 aa, synthetic construct
  REGION 1..7: note = Description of Artificial Sequence: Synthetic peptide
DPTSGKG

SEQ ID NO: 1483 - protein, 7 aa, synthetic construct
  REGION 1..7: note = Description of Artificial Sequence: Synthetic peptide
GTASPAN

SEQ ID NO: 1484 - protein, 7 aa, synthetic construct
  REGION 1..7: note = Description of Artificial Sequence: Synthetic peptide
QPTSKSH

SEQ ID NO: 1485 - protein, 7 aa, synthetic construct
  REGION 1..7: note = Description of Artificial Sequence: Synthetic peptide
TGSANHV

SEQ ID NO: 1486 - protein, 7 aa, synthetic construct
  REGION 1..7: note = Description of Artificial Sequence: Synthetic peptide
QARSSQE

SEQ ID NO: 1487 - protein, 7 aa, synthetic construct
  REGION 1..7: note = Description of Artificial Sequence: Synthetic peptide
DARQKSV

SEQ ID NO: 1488 - protein, 7 aa, synthetic construct
  REGION 1..7: note = Description of Artificial Sequence: Synthetic peptide
AGASSVN

SEQ ID NO: 1489 - protein, 7 aa, synthetic construct
  REGION 1..7: note = Description of Artificial Sequence: Synthetic peptide
HELKGTT

SEQ ID NO: 1490 - protein, 7 aa, synthetic construct
  REGION 1..7: note = Description of Artificial Sequence: Synthetic peptide
VSNPETK

SEQ ID NO: 1491 - protein, 7 aa, synthetic construct
  REGION 1..7: note = Description of Artificial Sequence: Synthetic peptide
QQQSPSL

SEQ ID NO: 1492 - protein, 7 aa, synthetic construct
  REGION 1..7: note = Description of Artificial Sequence: Synthetic peptide
ADTTPTK

SEQ ID NO: 1493 - protein, 7 aa, synthetic construct
  REGION 1..7: note = Description of Artificial Sequence: Synthetic peptide
DNSKGSR

SEQ ID NO: 1494 - protein, 7 aa, synthetic construct
  REGION 1..7: note = Description of Artificial Sequence: Synthetic peptide
ANAKPSQ

SEQ ID NO: 1495 - protein, 7 aa, synthetic construct
  REGION 1..7: note = Description of Artificial Sequence: Synthetic peptide
AGGASGT

SEQ ID NO: 1496 - protein, 7 aa, synthetic construct
  REGION 1..7: note = Description of Artificial Sequence: Synthetic peptide
GNGAPGL

SEQ ID NO: 1497 - protein, 7 aa, synthetic construct
  REGION 1..7: note = Description of Artificial Sequence: Synthetic peptide
NRTGKLE

SEQ ID NO: 1498 - protein, 7 aa, synthetic construct
  REGION 1..7: note = Description of Artificial Sequence: Synthetic peptide
GNDKQHS

SEQ ID NO: 1499 - protein, 7 aa, synthetic construct
  REGION 1..7: note = Description of Artificial Sequence: Synthetic peptide
QSGPPNR

SEQ ID NO: 1500 - protein, 7 aa, synthetic construct
  REGION 1..7: note = Description of Artificial Sequence: Synthetic peptide
GSASNNK

SEQ ID NO: 1501 - protein, 7 aa, synthetic construct
  REGION 1..7: note = Description of Artificial Sequence: Synthetic peptide
STVSKTA

SEQ ID NO: 1502 - protein, 7 aa, synthetic construct
  REGION 1..7: note = Description of Artificial Sequence: Synthetic peptide
MSTQKLG

SEQ ID NO: 1503 - protein, 7 aa, synthetic construct
  REGION 1..7: note = Description of Artificial Sequence: Synthetic peptide
ISRSSQQ

SEQ ID NO: 1504 - protein, 7 aa, synthetic construct
  REGION 1..7: note = Description of Artificial Sequence: Synthetic peptide
ESNTPPK

SEQ ID NO: 1505 - protein, 7 aa, synthetic construct
  REGION 1..7: note = Description of Artificial Sequence: Synthetic peptide
TRAQANS

SEQ ID NO: 1506 - protein, 7 aa, synthetic construct
  REGION 1..7: note = Description of Artificial Sequence: Synthetic peptide
TNAAKSS

SEQ ID NO: 1507 - protein, 7 aa, synthetic construct
  REGION 1..7: note = Description of Artificial Sequence: Synthetic peptide
HPLQSGT

SEQ ID NO: 1508 - protein, 7 aa, synthetic construct
  REGION 1..7: note = Description of Artificial Sequence: Synthetic peptide
DPSKKNA

SEQ ID NO: 1509 - protein, 7 aa, synthetic construct
  REGION 1..7: note = Description of Artificial Sequence: Synthetic peptide
NGRETPK

SEQ ID NO: 1510 - protein, 7 aa, synthetic construct
  REGION 1..7: note = Description of Artificial Sequence: Synthetic peptide
STHKSSV

SEQ ID NO: 1511 - protein, 7 aa, synthetic construct
  REGION 1..7: note = Description of Artificial Sequence: Synthetic peptide
DTGRTPT

SEQ ID NO: 1512 - protein, 7 aa, synthetic construct
  REGION 1..7: note = Description of Artificial Sequence: Synthetic peptide
DAGTRSL

SEQ ID NO: 1513 - protein, 7 aa, synthetic construct
  REGION 1..7: note = Description of Artificial Sequence: Synthetic peptide
VSGQHQK

SEQ ID NO: 1514 - protein, 7 aa, synthetic construct
  REGION 1..7: note = Description of Artificial Sequence: Synthetic peptide
RNGQSAA

SEQ ID NO: 1515 - protein, 7 aa, synthetic construct
  REGION 1..7: note = Description of Artificial Sequence: Synthetic peptide
GTSGDRV

SEQ ID NO: 1516 - protein, 7 aa, synthetic construct
  REGION 1..7: note = Description of Artificial Sequence: Synthetic peptide
NHSGSPS

SEQ ID NO: 1517 - protein, 7 aa, synthetic construct
  REGION 1..7: note = Description of Artificial Sequence: Synthetic peptide
GSGQKQL

SEQ ID NO: 1518 - protein, 7 aa, synthetic construct
  REGION 1..7: note = Description of Artificial Sequence: Synthetic peptide
GYADAHK

SEQ ID NO: 1519 - protein, 7 aa, synthetic construct
  REGION 1..7: note = Description of Artificial Sequence: Synthetic peptide
NGNSNHQ

SEQ ID NO: 1520 - protein, 7 aa, synthetic construct
  REGION 1..7: note = Description of Artificial Sequence: Synthetic peptide
AGEKGRN

SEQ ID NO: 1521 - protein, 7 aa, synthetic construct
  REGION 1..7: note = Description of Artificial Sequence: Synthetic peptide
QRSTTST

SEQ ID NO: 1522 - protein, 7 aa, synthetic construct
  REGION 1..7: note = Description of Artificial Sequence: Synthetic peptide
LPQGTRS

SEQ ID NO: 1523 - protein, 7 aa, synthetic construct
  REGION 1..7: note = Description of Artificial Sequence: Synthetic peptide
NTNPPSK

SEQ ID NO: 1524 - protein, 7 aa, synthetic construct
  REGION 1..7: note = Description of Artificial Sequence: Synthetic peptide
QTSKSSV

SEQ ID NO: 1525 - protein, 7 aa, synthetic construct
  REGION 1..7: note = Description of Artificial Sequence: Synthetic peptide
SQHKPYT

SEQ ID NO: 1526 - protein, 7 aa, synthetic construct
  REGION 1..7: note = Description of Artificial Sequence: Synthetic peptide
ESTPRTA

SEQ ID NO: 1527 - protein, 7 aa, synthetic construct
  REGION 1..7: note = Description of Artificial Sequence: Synthetic peptide
MNDKSRN

SEQ ID NO: 1528 - protein, 7 aa, synthetic construct
  REGION 1..7: note = Description of Artificial Sequence: Synthetic peptide
SPGVTNT

SEQ ID NO: 1529 - protein, 7 aa, synthetic construct
  REGION 1..7: note = Description of Artificial Sequence: Synthetic peptide
DQLKSSA

SEQ ID NO: 1530 - protein, 7 aa, synthetic construct
  REGION 1..7: note = Description of Artificial Sequence: Synthetic peptide
AESDRKH

SEQ ID NO: 1531 - protein, 7 aa, synthetic construct
  REGION 1..7: note = Description of Artificial Sequence: Synthetic peptide
TSVTKPV

SEQ ID NO: 1532 - protein, 7 aa, synthetic construct
  REGION 1..7: note = Description of Artificial Sequence: Synthetic peptide
SGSPSAH

SEQ ID NO: 1533 - protein, 7 aa, synthetic construct
  REGION 1..7: note = Description of Artificial Sequence: Synthetic peptide
APGGNHT

SEQ ID NO: 1534 - protein, 7 aa, synthetic construct
  REGION 1..7: note = Description of Artificial Sequence: Synthetic peptide
AGNSEAK

SEQ ID NO: 1535 - protein, 7 aa, synthetic construct
  REGION 1..7: note = Description of Artificial Sequence: Synthetic peptide
GTTTSVR

SEQ ID NO: 1536 - protein, 7 aa, synthetic construct
  REGION 1..7: note = Description of Artificial Sequence: Synthetic peptide
SQTPPSA

SEQ ID NO: 1537 - protein, 7 aa, synthetic construct
  REGION 1..7: note = Description of Artificial Sequence: Synthetic peptide
GASQSLS

SEQ ID NO: 1538 - protein, 7 aa, synthetic construct
  REGION 1..7: note = Description of Artificial Sequence: Synthetic peptide
AGSTHAV

SEQ ID NO: 1539 - protein, 7 aa, synthetic construct
  REGION 1..7: note = Description of Artificial Sequence: Synthetic peptide
STNPTRG

SEQ ID NO: 1540 - protein, 7 aa, synthetic construct
  REGION 1..7: note = Description of Artificial Sequence: Synthetic peptide
GRDTPSR

SEQ ID NO: 1541 - protein, 7 aa, synthetic construct
  REGION 1..7: note = Description of Artificial Sequence: Synthetic peptide
ESSRDMK

SEQ ID NO: 1542 - protein, 7 aa, synthetic construct
  REGION 1..7: note = Description of Artificial Sequence: Synthetic peptide
AANSKNL

SEQ ID NO: 1543 - protein, 7 aa, synthetic construct
  REGION 1..7: note = Description of Artificial Sequence: Synthetic peptide
QTGAHTA

SEQ ID NO: 1544 - protein, 7 aa, synthetic construct
  REGION 1..7: note = Description of Artificial Sequence: Synthetic peptide
SNASSNS

SEQ ID NO: 1545 - protein, 7 aa, synthetic construct
  REGION 1..7: note = Description of Artificial Sequence: Synthetic peptide
VSSSKAT

SEQ ID NO: 1546 - protein, 7 aa, synthetic construct
  REGION 1..7: note = Description of Artificial Sequence: Synthetic peptide
EKTNAMV

SEQ ID NO: 1547 - protein, 7 aa, synthetic construct
  REGION 1..7: note = Description of Artificial Sequence: Synthetic peptide
EGMSTTR

SEQ ID NO: 1548 - protein, 7 aa, synthetic construct
  REGION 1..7: note = Description of Artificial Sequence: Synthetic peptide
DTRGTHS

SEQ ID NO: 1549 - protein, 7 aa, synthetic construct
  REGION 1..7: note = Description of Artificial Sequence: Synthetic peptide
NEQAAAR

SEQ ID NO: 1550 - protein, 7 aa, synthetic construct
  REGION 1..7: note = Description of Artificial Sequence: Synthetic peptide
TKSGVNQ

SEQ ID NO: 1551 - protein, 7 aa, synthetic construct
  REGION 1..7: note = Description of Artificial Sequence: Synthetic peptide
TENARPG

SEQ ID NO: 1552 - protein, 7 aa, synthetic construct
  REGION 1..7: note = Description of Artificial Sequence: Synthetic peptide
TTGAKPH

SEQ ID NO: 1553 - protein, 7 aa, synthetic construct
  REGION 1..7: note = Description of Artificial Sequence: Synthetic peptide
SNSKGEG

SEQ ID NO: 1554 - protein, 7 aa, synthetic construct
  REGION 1..7: note = Description of Artificial Sequence: Synthetic peptide
STARGNS

SEQ ID NO: 1555 - protein, 7 aa, synthetic construct
  REGION 1..7: note = Description of Artificial Sequence: Synthetic peptide
SPVTASQ

SEQ ID NO: 1556 - protein, 7 aa, synthetic construct
  REGION 1..7: note = Description of Artificial Sequence: Synthetic peptide
SGNSPMV

SEQ ID NO: 1557 - protein, 7 aa, synthetic construct
  REGION 1..7: note = Description of Artificial Sequence: Synthetic peptide
SRNDAKV

SEQ ID NO: 1558 - protein, 7 aa, synthetic construct
  REGION 1..7: note = Description of Artificial Sequence: Synthetic peptide
SGGNHGS

SEQ ID NO: 1559 - protein, 7 aa, synthetic construct
  REGION 1..7: note = Description of Artificial Sequence: Synthetic peptide
QGTGSLG

SEQ ID NO: 1560 - protein, 7 aa, synthetic construct
  REGION 1..7: note = Description of Artificial Sequence: Synthetic peptide
HSTAQQK

SEQ ID NO: 1561 - protein, 7 aa, synthetic construct
  REGION 1..7: note = Description of Artificial Sequence: Synthetic peptide
EFKSNNV

SEQ ID NO: 1562 - protein, 7 aa, synthetic construct
  REGION 1..7: note = Description of Artificial Sequence: Synthetic peptide
DGERPSV

SEQ ID NO: 1563 - protein, 7 aa, synthetic construct
  REGION 1..7: note = Description of Artificial Sequence: Synthetic peptide
DGAKVNK

SEQ ID NO: 1564 - protein, 7 aa, synthetic construct
  REGION 1..7: note = Description of Artificial Sequence: Synthetic peptide
AGTNKPQ

SEQ ID NO: 1565 - protein, 7 aa, synthetic construct
  REGION 1..7: note = Description of Artificial Sequence: Synthetic peptide
GTVKPQS

SEQ ID NO: 1566 - protein, 7 aa, synthetic construct
  REGION 1..7: note = Description of Artificial Sequence: Synthetic peptide
GMAHNSG

SEQ ID NO: 1567 - protein, 7 aa, synthetic construct
  REGION 1..7: note = Description of Artificial Sequence: Synthetic peptide
GGNHEMK

SEQ ID NO: 1568 - protein, 7 aa, synthetic construct
  REGION 1..7: note = Description of Artificial Sequence: Synthetic peptide
VTNKPSM

SEQ ID NO: 1569 - protein, 7 aa, synthetic construct
  REGION 1..7: note = Description of Artificial Sequence: Synthetic peptide
NSGNTVK

SEQ ID NO: 1570 - protein, 7 aa, synthetic construct
  REGION 1..7: note = Description of Artificial Sequence: Synthetic peptide
DNNPRTS

SEQ ID NO: 1571 - protein, 7 aa, synthetic construct
  REGION 1..7: note = Description of Artificial Sequence: Synthetic peptide
EPTTRNS

SEQ ID NO: 1572 - protein, 7 aa, synthetic construct
  REGION 1..7: note = Description of Artificial Sequence: Synthetic peptide
GSASGTA

SEQ ID NO: 1573 - protein, 7 aa, synthetic construct
  REGION 1..7: note = Description of Artificial Sequence: Synthetic peptide
NTSQTGR

SEQ ID NO: 1574 - protein, 7 aa, synthetic construct
  REGION 1..7: note = Description of Artificial Sequence: Synthetic peptide
SSTTSTK

SEQ ID NO: 1575 - protein, 7 aa, synthetic construct
  REGION 1..7: note = Description of Artificial Sequence: Synthetic peptide
TGQDKPG

SEQ ID NO: 1576 - protein, 7 aa, synthetic construct
  REGION 1..7: note = Description of Artificial Sequence: Synthetic peptide
TAARSGS

SEQ ID NO: 1577 - protein, 7 aa, synthetic construct
  REGION 1..7: note = Description of Artificial Sequence: Synthetic peptide
GVPSTGG

SEQ ID NO: 1578 - protein, 7 aa, synthetic construct
  REGION 1..7: note = Description of Artificial Sequence: Synthetic peptide
APSSTKG

SEQ ID NO: 1579 - protein, 7 aa, synthetic construct
  REGION 1..7: note = Description of Artificial Sequence: Synthetic peptide
TKNSPTQ

SEQ ID NO: 1580 - protein, 7 aa, synthetic construct
  REGION 1..7: note = Description of Artificial Sequence: Synthetic peptide
LATTKPS

SEQ ID NO: 1581 - protein, 7 aa, synthetic construct
  REGION 1..7: note = Description of Artificial Sequence: Synthetic peptide
VRESSNT

SEQ ID NO: 1582 - protein, 7 aa, synthetic construct
  REGION 1..7: note = Description of Artificial Sequence: Synthetic peptide
DVSNKSS

SEQ ID NO: 1583 - protein, 7 aa, synthetic construct
  REGION 1..7: note = Description of Artificial Sequence: Synthetic peptide
GKSSPVK

SEQ ID NO: 1584 - protein, 7 aa, synthetic construct
  REGION 1..7: note = Description of Artificial Sequence: Synthetic peptide
LPGKTHS

SEQ ID NO: 1585 - protein, 7 aa, synthetic construct
  REGION 1..7: note = Description of Artificial Sequence: Synthetic peptide
AGVKPAT

SEQ ID NO: 1586 - protein, 7 aa, synthetic construct
  REGION 1..7: note = Description of Artificial Sequence: Synthetic peptide
LGNGQGQ

SEQ ID NO: 1587 - protein, 7 aa, synthetic construct
  REGION 1..7: note = Description of Artificial Sequence: Synthetic peptide
LPTNKSL

SEQ ID NO: 1588 - protein, 7 aa, synthetic construct
  REGION 1..7: note = Description of Artificial Sequence: Synthetic peptide
GSDGKFS

SEQ ID NO: 1589 - protein, 7 aa, synthetic construct
  REGION 1..7: note = Description of Artificial Sequence: Synthetic peptide
QSGAQHS

SEQ ID NO: 1590 - protein, 7 aa, synthetic construct
  REGION 1..7: note = Description of Artificial Sequence: Synthetic peptide
LTSTSST

SEQ ID NO: 1591 - protein, 7 aa, synthetic construct
  REGION 1..7: note = Description of Artificial Sequence: Synthetic peptide
QATNSGG

SEQ ID NO: 1592 - protein, 7 aa, synthetic construct
  REGION 1..7: note = Description of Artificial Sequence: Synthetic peptide
GASVKPL

SEQ ID NO: 1593 - protein, 7 aa, synthetic construct
  REGION 1..7: note = Description of Artificial Sequence: Synthetic peptide
DVKAKTQ

SEQ ID NO: 1594 - protein, 7 aa, synthetic construct
  REGION 1..7: note = Description of Artificial Sequence: Synthetic peptide
TDGAAPK

SEQ ID NO: 1595 - protein, 7 aa, synthetic construct
  REGION 1..7: note = Description of Artificial Sequence: Synthetic peptide
DHTKKSS

SEQ ID NO: 1596 - protein, 7 aa, synthetic construct
  REGION 1..7: note = Description of Artificial Sequence: Synthetic peptide
RSGQQMV

SEQ ID NO: 1597 - protein, 7 aa, synthetic construct
  REGION 1..7: note = Description of Artificial Sequence: Synthetic peptide
DESTRNS

SEQ ID NO: 1598 - protein, 7 aa, synthetic construct
  REGION 1..7: note = Description of Artificial Sequence: Synthetic peptide
DSSERIR

SEQ ID NO: 1599 - protein, 7 aa, synthetic construct
  REGION 1..7: note = Description of Artificial Sequence: Synthetic peptide
MRNSATS

SEQ ID NO: 1600 - protein, 7 aa, synthetic construct
  REGION 1..7: note = Description of Artificial Sequence: Synthetic peptide
GDAAVSR

SEQ ID NO: 1601 - protein, 7 aa, synthetic construct
  REGION 1..7: note = Description of Artificial Sequence: Synthetic peptide
DSTKPGR

SEQ ID NO: 1602 - protein, 7 aa, synthetic construct
  REGION 1..7: note = Description of Artificial Sequence: Synthetic peptide
FGDNTVR

SEQ ID NO: 1603 - protein, 7 aa, synthetic construct
  REGION 1..7: note = Description of Artificial Sequence: Synthetic peptide
MDKSGSH

SEQ ID NO: 1604 - protein, 7 aa, synthetic construct
  REGION 1..7: note = Description of Artificial Sequence: Synthetic peptide
DRRDSSS

SEQ ID NO: 1605 - protein, 7 aa, synthetic construct
  REGION 1..7: note = Description of Artificial Sequence: Synthetic peptide
GRSDKSY

SEQ ID NO: 1606 - protein, 7 aa, synthetic construct
  REGION 1..7: note = Description of Artificial Sequence: Synthetic peptide
ATGSKTA

SEQ ID NO: 1607 - protein, 7 aa, synthetic construct
  REGION 1..7: note = Description of Artificial Sequence: Synthetic peptide
GSSAKPT

SEQ ID NO: 1608 - protein, 7 aa, synthetic construct
  REGION 1..7: note = Description of Artificial Sequence: Synthetic peptide
TRGGSAT

SEQ ID NO: 1609 - protein, 7 aa, synthetic construct
  REGION 1..7: note = Description of Artificial Sequence: Synthetic peptide
STTSKST

SEQ ID NO: 1610 - protein, 7 aa, synthetic construct
  REGION 1..7: note = Description of Artificial Sequence: Synthetic peptide
STDTRPS

SEQ ID NO: 1611 - protein, 7 aa, synthetic construct
  REGION 1..7: note = Description of Artificial Sequence: Synthetic peptide
TGTVSTR

SEQ ID NO: 1612 - protein, 7 aa, synthetic construct
  REGION 1..7: note = Description of Artificial Sequence: Synthetic peptide
GTLKGGE

SEQ ID NO: 1613 - protein, 7 aa, synthetic construct
  REGION 1..7: note = Description of Artificial Sequence: Synthetic peptide
GQGKTSQ

SEQ ID NO: 1614 - protein, 7 aa, synthetic construct
  REGION 1..7: note = Description of Artificial Sequence: Synthetic peptide
GGGNVGK

SEQ ID NO: 1615 - protein, 7 aa, synthetic construct
  REGION 1..7: note = Description of Artificial Sequence: Synthetic peptide
HGGSSVN

SEQ ID NO: 1616 - protein, 7 aa, synthetic construct
  REGION 1..7: note = Description of Artificial Sequence: Synthetic peptide
TKADGSR

SEQ ID NO: 1617 - protein, 7 aa, synthetic construct
  REGION 1..7: note = Description of Artificial Sequence: Synthetic peptide
HPSNAPH

SEQ ID NO: 1618 - protein, 7 aa, synthetic construct
  REGION 1..7: note = Description of Artificial Sequence: Synthetic peptide
VTAPSTK

SEQ ID NO: 1619 - protein, 7 aa, synthetic construct
  REGION 1..7: note = Description of Artificial Sequence: Synthetic peptide
TSGKGAL

SEQ ID NO: 1620 - protein, 7 aa, synthetic construct
  REGION 1..7: note = Description of Artificial Sequence: Synthetic peptide
SVSDRNH

SEQ ID NO: 1621 - protein, 7 aa, synthetic construct
  REGION 1..7: note = Description of Artificial Sequence: Synthetic peptide
VAANATK

SEQ ID NO: 1622 - protein, 7 aa, synthetic construct
  REGION 1..7: note = Description of Artificial Sequence: Synthetic peptide
SVHQKSS

SEQ ID NO: 1623 - protein, 7 aa, synthetic construct
  REGION 1..7: note = Description of Artificial Sequence: Synthetic peptide
EGAHSKV

SEQ ID NO: 1624 - protein, 7 aa, synthetic construct
  REGION 1..7: note = Description of Artificial Sequence: Synthetic peptide
ETTALSK

SEQ ID NO: 1625 - protein, 7 aa, synthetic construct
  REGION 1..7: note = Description of Artificial Sequence: Synthetic peptide
RSEAQPK

SEQ ID NO: 1626 - protein, 7 aa, synthetic construct
  REGION 1..7: note = Description of Artificial Sequence: Synthetic peptide
TNSAAAK

SEQ ID NO: 1627 - protein, 7 aa, synthetic construct
  REGION 1..7: note = Description of Artificial Sequence: Synthetic peptide
TAAKSAQ

SEQ ID NO: 1628 - protein, 7 aa, synthetic construct
  REGION 1..7: note = Description of Artificial Sequence: Synthetic peptide
TGAGASL

SEQ ID NO: 1629 - protein, 7 aa, synthetic construct
  REGION 1..7: note = Description of Artificial Sequence: Synthetic peptide
AGTDKTA

SEQ ID NO: 1630 - protein, 7 aa, synthetic construct
  REGION 1..7: note = Description of Artificial Sequence: Synthetic peptide
LGSQTST

SEQ ID NO: 1631 - protein, 7 aa, synthetic construct
  REGION 1..7: note = Description of Artificial Sequence: Synthetic peptide
QGSKPQN

SEQ ID NO: 1632 - protein, 7 aa, synthetic construct
  REGION 1..7: note = Description of Artificial Sequence: Synthetic peptide
ERESSAT

SEQ ID NO: 1633 - protein, 7 aa, synthetic construct
  REGION 1..7: note = Description of Artificial Sequence: Synthetic peptide
GTNTRAS

SEQ ID NO: 1634 - protein, 7 aa, synthetic construct
  REGION 1..7: note = Description of Artificial Sequence: Synthetic peptide
TNAQKIN

SEQ ID NO: 1635 - protein, 7 aa, synthetic construct
  REGION 1..7: note = Description of Artificial Sequence: Synthetic peptide
NQHQSSS

SEQ ID NO: 1636 - protein, 7 aa, synthetic construct
  REGION 1..7: note = Description of Artificial Sequence: Synthetic peptide
STTNAKV

SEQ ID NO: 1637 - protein, 7 aa, synthetic construct
  REGION 1..7: note = Description of Artificial Sequence: Synthetic peptide
GLGKAAN

SEQ ID NO: 1638 - protein, 7 aa, synthetic construct
  REGION 1..7: note = Description of Artificial Sequence: Synthetic peptide
NNKPQMV

SEQ ID NO: 1639 - protein, 7 aa, synthetic construct
  REGION 1..7: note = Description of Artificial Sequence: Synthetic peptide
THPKPTE

SEQ ID NO: 1640 - protein, 7 aa, synthetic construct
  REGION 1..7: note = Description of Artificial Sequence: Synthetic peptide
THGTPLS

SEQ ID NO: 1641 - protein, 7 aa, synthetic construct
  REGION 1..7: note = Description of Artificial Sequence: Synthetic peptide
SSGNGTP

SEQ ID NO: 1642 - protein, 7 aa, synthetic construct
  REGION 1..7: note = Description of Artificial Sequence: Synthetic peptide
TTSNKQD

SEQ ID NO: 1643 - protein, 7 aa, synthetic construct
  REGION 1..7: note = Description of Artificial Sequence: Synthetic peptide
MGLDKSL

SEQ ID NO: 1644 - protein, 7 aa, synthetic construct
  REGION 1..7: note = Description of Artificial Sequence: Synthetic peptide
NIGASNS

SEQ ID NO: 1645 - protein, 7 aa, synthetic construct
  REGION 1..7: note = Description of Artificial Sequence: Synthetic peptide
GSQKSAS

SEQ ID NO: 1646 - protein, 7 aa, synthetic construct
  REGION 1..7: note = Description of Artificial Sequence: Synthetic peptide
DGLSGTH

SEQ ID NO: 1647 - protein, 7 aa, synthetic construct
  REGION 1..7: note = Description of Artificial Sequence: Synthetic peptide
QRVKDTS

SEQ ID NO: 1648 - protein, 7 aa, synthetic construct
  REGION 1..7: note = Description of Artificial Sequence: Synthetic peptide
TLSDRNS

SEQ ID NO: 1649 - protein, 7 aa, synthetic construct
  REGION 1..7: note = Description of Artificial Sequence: Synthetic peptide
TTNAPQG

SEQ ID NO: 1650 - protein, 7 aa, synthetic construct
  REGION 1..7: note = Description of Artificial Sequence: Synthetic peptide
VRSDKTQ

SEQ ID NO: 1651 - protein, 7 aa, synthetic construct
  REGION 1..7: note = Description of Artificial Sequence: Synthetic peptide
TNIASSK

SEQ ID NO: 1652 - protein, 7 aa, synthetic construct
  REGION 1..7: note = Description of Artificial Sequence: Synthetic peptide
SSTSRPS

SEQ ID NO: 1653 - protein, 7 aa, synthetic construct
  REGION 1..7: note = Description of Artificial Sequence: Synthetic peptide
SGVDSRT

SEQ ID NO: 1654 - protein, 7 aa, synthetic construct
  REGION 1..7: note = Description of Artificial Sequence: Synthetic peptide
LHQSSPT

SEQ ID NO: 1655 - protein, 7 aa, synthetic construct
  REGION 1..7: note = Description of Artificial Sequence: Synthetic peptide
LGGGKSG

SEQ ID NO: 1656 - protein, 7 aa, synthetic construct
  REGION 1..7: note = Description of Artificial Sequence: Synthetic peptide
LTSASPS

SEQ ID NO: 1657 - protein, 7 aa, synthetic construct
  REGION 1..7: note = Description of Artificial Sequence: Synthetic peptide
DPSSPGV

SEQ ID NO: 1658 - protein, 7 aa, synthetic construct
  REGION 1..7: note = Description of Artificial Sequence: Synthetic peptide
EVTTPHT

SEQ ID NO: 1659 - protein, 7 aa, synthetic construct
  REGION 1..7: note = Description of Artificial Sequence: Synthetic peptide
SGGTGNR

SEQ ID NO: 1660 - protein, 7 aa, synthetic construct
  REGION 1..7: note = Description of Artificial Sequence: Synthetic peptide
GRIADVK

SEQ ID NO: 1661 - protein, 7 aa, synthetic construct
  REGION 1..7: note = Description of Artificial Sequence: Synthetic peptide
HNNDTPR

SEQ ID NO: 1662 - protein, 7 aa, synthetic construct
  REGION 1..7: note = Description of Artificial Sequence: Synthetic peptide
AQKSTIS

SEQ ID NO: 1663 - protein, 7 aa, synthetic construct
  REGION 1..7: note = Description of Artificial Sequence: Synthetic peptide
RDGNSSS

SEQ ID NO: 1664 - protein, 7 aa, synthetic construct
  REGION 1..7: note = Description of Artificial Sequence: Synthetic peptide
HGGTSVK

SEQ ID NO: 1665 - protein, 7 aa, synthetic construct
  REGION 1..7: note = Description of Artificial Sequence: Synthetic peptide
NPVANNK

SEQ ID NO: 1666 - protein, 7 aa, synthetic construct
  REGION 1..7: note = Description of Artificial Sequence: Synthetic peptide
GTTLKPG

SEQ ID NO: 1667 - protein, 7 aa, synthetic construct
  REGION 1..7: note = Description of Artificial Sequence: Synthetic peptide
TSQPPNA

SEQ ID NO: 1668 - protein, 7 aa, synthetic construct
  REGION 1..7: note = Description of Artificial Sequence: Synthetic peptide
SIGNVAK

SEQ ID NO: 1669 - protein, 7 aa, synthetic construct
  REGION 1..7: note = Description of Artificial Sequence: Synthetic peptide
VGGVTSS

SEQ ID NO: 1670 - protein, 7 aa, synthetic construct
  REGION 1..7: note = Description of Artificial Sequence: Synthetic peptide
RGTTSTS

SEQ ID NO: 1671 - protein, 7 aa, synthetic construct
  REGION 1..7: note = Description of Artificial Sequence: Synthetic peptide
NLGKSPT

SEQ ID NO: 1672 - protein, 7 aa, synthetic construct
  REGION 1..7: note = Description of Artificial Sequence: Synthetic peptide
QPGGKNV

SEQ ID NO: 1673 - protein, 7 aa, synthetic construct
  REGION 1..7: note = Description of Artificial Sequence: Synthetic peptide
KTTGAQS

SEQ ID NO: 1674 - protein, 7 aa, synthetic construct
  REGION 1..7: note = Description of Artificial Sequence: Synthetic peptide
AGVPSGN

SEQ ID NO: 1675 - protein, 7 aa, synthetic construct
  REGION 1..7: note = Description of Artificial Sequence: Synthetic peptide
GSTQRAN

SEQ ID NO: 1676 - protein, 7 aa, synthetic construct
  REGION 1..7: note = Description of Artificial Sequence: Synthetic peptide
NSAQPPN

SEQ ID NO: 1677 - protein, 7 aa, synthetic construct
  REGION 1..7: note = Description of Artificial Sequence: Synthetic peptide
STGMSGK

SEQ ID NO: 1678 - protein, 7 aa, synthetic construct
  REGION 1..7: note = Description of Artificial Sequence: Synthetic peptide
EGSTSKR

SEQ ID NO: 1679 - protein, 7 aa, synthetic construct
  REGION 1..7: note = Description of Artificial Sequence: Synthetic peptide
GTAHNSG

SEQ ID NO: 1680 - protein, 7 aa, synthetic construct
  REGION 1..7: note = Description of Artificial Sequence: Synthetic peptide
SVQRSSG

SEQ ID NO: 1681 - protein, 7 aa, synthetic construct
  REGION 1..7: note = Description of Artificial Sequence: Synthetic peptide
SGAPANK

SEQ ID NO: 1682 - protein, 7 aa, synthetic construct
  REGION 1..7: note = Description of Artificial Sequence: Synthetic peptide
QNSSRVE

SEQ ID NO: 1683 - protein, 7 aa, synthetic construct
  REGION 1..7: note = Description of Artificial Sequence: Synthetic peptide
GRDTKMM

SEQ ID NO: 1684 - protein, 7 aa, synthetic construct
  REGION 1..7: note = Description of Artificial Sequence: Synthetic peptide
SGISAHT

SEQ ID NO: 1685 - protein, 7 aa, synthetic construct
  REGION 1..7: note = Description of Artificial Sequence: Synthetic peptide
NLSHKSG

SEQ ID NO: 1686 - protein, 7 aa, synthetic construct
  REGION 1..7: note = Description of Artificial Sequence: Synthetic peptide
SETRSST

SEQ ID NO: 1687 - protein, 7 aa, synthetic construct
  REGION 1..7: note = Description of Artificial Sequence: Synthetic peptide
GRADSQK

SEQ ID NO: 1688 - protein, 7 aa, synthetic construct
  REGION 1..7: note = Description of Artificial Sequence: Synthetic peptide
TRSSPAN

SEQ ID NO: 1689 - protein, 7 aa, synthetic construct
  REGION 1..7: note = Description of Artificial Sequence: Synthetic peptide
DPQLSMK

SEQ ID NO: 1690 - protein, 7 aa, synthetic construct
  REGION 1..7: note = Description of Artificial Sequence: Synthetic peptide
RGSSQQG

SEQ ID NO: 1691 - protein, 7 aa, synthetic construct
  REGION 1..7: note = Description of Artificial Sequence: Synthetic peptide
SNANKSY

SEQ ID NO: 1692 - protein, 7 aa, synthetic construct
  REGION 1..7: note = Description of Artificial Sequence: Synthetic peptide
QGTRPSE

SEQ ID NO: 1693 - protein, 7 aa, synthetic construct
  REGION 1..7: note = Description of Artificial Sequence: Synthetic peptide
SGGSSVK

SEQ ID NO: 1694 - protein, 7 aa, synthetic construct
  REGION 1..7: note = Description of Artificial Sequence: Synthetic peptide
LTSKGSQ

SEQ ID NO: 1695 - protein, 7 aa, synthetic construct
  REGION 1..7: note = Description of Artificial Sequence: Synthetic peptide
SGERSNE

SEQ ID NO: 1696 - protein, 7 aa, synthetic construct
  REGION 1..7: note = Description of Artificial Sequence: Synthetic peptide
MPGSTSG

SEQ ID NO: 1697 - protein, 7 aa, synthetic construct
  REGION 1..7: note = Description of Artificial Sequence: Synthetic peptide
EARNKQV

SEQ ID NO: 1698 - protein, 7 aa, synthetic construct
  REGION 1..7: note = Description of Artificial Sequence: Synthetic peptide
LSSKTSN

SEQ ID NO: 1699 - protein, 7 aa, synthetic construct
  REGION 1..7: note = Description of Artificial Sequence: Synthetic peptide
SGTTKPS

SEQ ID NO: 1700 - protein, 7 aa, synthetic construct
  REGION 1..7: note = Description of Artificial Sequence: Synthetic peptide
IANKSPV

SEQ ID NO: 1701 - protein, 7 aa, synthetic construct
  REGION 1..7: note = Description of Artificial Sequence: Synthetic peptide
MANSPNR

SEQ ID NO: 1702 - protein, 7 aa, synthetic construct
  REGION 1..7: note = Description of Artificial Sequence: Synthetic peptide
DSTRGSG

SEQ ID NO: 1703 - protein, 7 aa, synthetic construct
  REGION 1..7: note = Description of Artificial Sequence: Synthetic peptide
GQSQTSH

SEQ ID NO: 1704 - protein, 7 aa, synthetic construct
  REGION 1..7: note = Description of Artificial Sequence: Synthetic peptide
NNSTVGH

SEQ ID NO: 1705 - protein, 7 aa, synthetic construct
  REGION 1..7: note = Description of Artificial Sequence: Synthetic peptide
TGNRPTE

SEQ ID NO: 1706 - protein, 7 aa, synthetic construct
  REGION 1..7: note = Description of Artificial Sequence: Synthetic peptide
ATNKVAT

SEQ ID NO: 1707 - protein, 7 aa, synthetic construct
  REGION 1..7: note = Description of Artificial Sequence: Synthetic peptide
ATGKAQA

SEQ ID NO: 1708 - protein, 7 aa, synthetic construct
  REGION 1..7: note = Description of Artificial Sequence: Synthetic peptide
EVSGKQL

SEQ ID NO: 1709 - protein, 7 aa, synthetic construct
  REGION 1..7: note = Description of Artificial Sequence: Synthetic peptide
DQAANRQ

SEQ ID NO: 1710 - protein, 7 aa, synthetic construct
  REGION 1..7: note = Description of Artificial Sequence: Synthetic peptide
ANTGAAK

SEQ ID NO: 1711 - protein, 7 aa, synthetic construct
  REGION 1..7: note = Description of Artificial Sequence: Synthetic peptide
SSDSNNR

SEQ ID NO: 1712 - protein, 7 aa, synthetic construct
  REGION 1..7: note = Description of Artificial Sequence: Synthetic peptide
GTKSVGS

SEQ ID NO: 1713 - protein, 7 aa, synthetic construct
  REGION 1..7: note = Description of Artificial Sequence: Synthetic peptide
SPLNSSK

SEQ ID NO: 1714 - protein, 7 aa, synthetic construct
  REGION 1..7: note = Description of Artificial Sequence: Synthetic peptide
TKGGSNT

SEQ ID NO: 1715 - protein, 7 aa, synthetic construct
  REGION 1..7: note = Description of Artificial Sequence: Synthetic peptide
VNGTRNT

SEQ ID NO: 1716 - protein, 7 aa, synthetic construct
  REGION 1..7: note = Description of Artificial Sequence: Synthetic peptide
VPNKSSS

SEQ ID NO: 1717 - protein, 7 aa, synthetic construct
  REGION 1..7: note = Description of Artificial Sequence: Synthetic peptide
KSDAKGN

SEQ ID NO: 1718 - protein, 7 aa, synthetic construct
  REGION 1..7: note = Description of Artificial Sequence: Synthetic peptide
GEGRPSV

SEQ ID NO: 1719 - protein, 7 aa, synthetic construct
  REGION 1..7: note = Description of Artificial Sequence: Synthetic peptide
ATERPST

SEQ ID NO: 1720 - protein, 7 aa, synthetic construct
  REGION 1..7: note = Description of Artificial Sequence: Synthetic peptide
AGTTTNK

SEQ ID NO: 1721 - protein, 7 aa, synthetic construct
  REGION 1..7: note = Description of Artificial Sequence: Synthetic peptide
DTVRAGS

SEQ ID NO: 1722 - protein, 7 aa, synthetic construct
  REGION 1..7: note = Description of Artificial Sequence: Synthetic peptide
SQQKTGM

SEQ ID NO: 1723 - protein, 7 aa, synthetic construct
  REGION 1..7: note = Description of Artificial Sequence: Synthetic peptide
QSDNKTH

SEQ ID NO: 1724 - protein, 7 aa, synthetic construct
  REGION 1..7: note = Description of Artificial Sequence: Synthetic peptide
KSGERPT

SEQ ID NO: 1725 - protein, 7 aa, synthetic construct
  REGION 1..7: note = Description of Artificial Sequence: Synthetic peptide
SQSGTLA

SEQ ID NO: 1726 - protein, 7 aa, synthetic construct
  REGION 1..7: note = Description of Artificial Sequence: Synthetic peptide
SGSDRNS

SEQ ID NO: 1727 - protein, 7 aa, synthetic construct
  REGION 1..7: note = Description of Artificial Sequence: Synthetic peptide
REDRAKE

SEQ ID NO: 1728 - protein, 7 aa, synthetic construct
  REGION 1..7: note = Description of Artificial Sequence: Synthetic peptide
MPNSNAS

SEQ ID NO: 1729 - protein, 7 aa, synthetic construct
  REGION 1..7: note = Description of Artificial Sequence: Synthetic peptide
QGTQTKS

SEQ ID NO: 1730 - protein, 7 aa, synthetic construct
  REGION 1..7: note = Description of Artificial Sequence: Synthetic peptide
QGVGNTA

SEQ ID NO: 1731 - protein, 7 aa, synthetic construct
  REGION 1..7: note = Description of Artificial Sequence: Synthetic peptide
AGRQGSN

SEQ ID NO: 1732 - protein, 7 aa, synthetic construct
  REGION 1..7: note = Description of Artificial Sequence: Synthetic peptide
SPGERAK

SEQ ID NO: 1733 - protein, 7 aa, synthetic construct
  REGION 1..7: note = Description of Artificial Sequence: Synthetic peptide
SGPSKPA

SEQ ID NO: 1734 - protein, 7 aa, synthetic construct
  REGION 1..7: note = Description of Artificial Sequence: Synthetic peptide
CTNTKPG

SEQ ID NO: 1735 - protein, 7 aa, synthetic construct
  REGION 1..7: note = Description of Artificial Sequence: Synthetic peptide
SPPNTGS

SEQ ID NO: 1736 - protein, 7 aa, synthetic construct
  REGION 1..7: note = Description of Artificial Sequence: Synthetic peptide
DGQRVSL

SEQ ID NO: 1737 - protein, 7 aa, synthetic construct
  REGION 1..7: note = Description of Artificial Sequence: Synthetic peptide
NDTKSPS

SEQ ID NO: 1738 - protein, 7 aa, synthetic construct
  REGION 1..7: note = Description of Artificial Sequence: Synthetic peptide
STESPTR

SEQ ID NO: 1739 - protein, 7 aa, synthetic construct
  REGION 1..7: note = Description of Artificial Sequence: Synthetic peptide
KTSPSTS

SEQ ID NO: 1740 - protein, 7 aa, synthetic construct
  REGION 1..7: note = Description of Artificial Sequence: Synthetic peptide
LNGSEKS

SEQ ID NO: 1741 - protein, 7 aa, synthetic construct
  REGION 1..7: note = Description of Artificial Sequence: Synthetic peptide
STQGSVK

SEQ ID NO: 1742 - protein, 7 aa, synthetic construct
  REGION 1..7: note = Description of Artificial Sequence: Synthetic peptide
ASGSGMH

SEQ ID NO: 1743 - protein, 7 aa, synthetic construct
  REGION 1..7: note = Description of Artificial Sequence: Synthetic peptide
GGASSKA

SEQ ID NO: 1744 - protein, 7 aa, synthetic construct
  REGION 1..7: note = Description of Artificial Sequence: Synthetic peptide
IPSDKGT

SEQ ID NO: 1745 - protein, 7 aa, synthetic construct
  REGION 1..7: note = Description of Artificial Sequence: Synthetic peptide
GEKSKPQ

SEQ ID NO: 1746 - protein, 7 aa, synthetic construct
  REGION 1..7: note = Description of Artificial Sequence: Synthetic peptide
TQDRSST

SEQ ID NO: 1747 - protein, 7 aa, synthetic construct
  REGION 1..7: note = Description of Artificial Sequence: Synthetic peptide
AIGKQGT

SEQ ID NO: 1748 - protein, 7 aa, synthetic construct
  REGION 1..7: note = Description of Artificial Sequence: Synthetic peptide
STGSGMS

SEQ ID NO: 1749 - protein, 7 aa, synthetic construct
  REGION 1..7: note = Description of Artificial Sequence: Synthetic peptide
ADVRPNT

SEQ ID NO: 1750 - protein, 7 aa, synthetic construct
  REGION 1..7: note = Description of Artificial Sequence: Synthetic peptide
AGKGTSS

SEQ ID NO: 1751 - protein, 7 aa, synthetic construct
  REGION 1..7: note = Description of Artificial Sequence: Synthetic peptide
AMGKTSA

SEQ ID NO: 1752 - protein, 7 aa, synthetic construct
  REGION 1..7: note = Description of Artificial Sequence: Synthetic peptide
KGNSALT

SEQ ID NO: 1753 - protein, 7 aa, synthetic construct
  REGION 1..7: note = Description of Artificial Sequence: Synthetic peptide
EGQSQKM

SEQ ID NO: 1754 - protein, 7 aa, synthetic construct
  REGION 1..7: note = Description of Artificial Sequence: Synthetic peptide
HTVKASQ

SEQ ID NO: 1755 - protein, 7 aa, synthetic construct
  REGION 1..7: note = Description of Artificial Sequence: Synthetic peptide
NGPRSTS

SEQ ID NO: 1756 - protein, 7 aa, synthetic construct
  REGION 1..7: note = Description of Artificial Sequence: Synthetic peptide
VNSKPAQ

SEQ ID NO: 1757 - protein, 7 aa, synthetic construct
  REGION 1..7: note = Description of Artificial Sequence: Synthetic peptide
HGESRTS

SEQ ID NO: 1758 - protein, 7 aa, synthetic construct
  REGION 1..7: note = Description of Artificial Sequence: Synthetic peptide
GRNNTNS

SEQ ID NO: 1759 - protein, 7 aa, synthetic construct
  REGION 1..7: note = Description of Artificial Sequence: Synthetic peptide
TTNTKVQ

SEQ ID NO: 1760 - protein, 7 aa, synthetic construct
  REGION 1..7: note = Description of Artificial Sequence: Synthetic peptide
SGTATRD

SEQ ID NO: 1761 - protein, 7 aa, synthetic construct
  REGION 1..7: note = Description of Artificial Sequence: Synthetic peptide
EPTQSRS

SEQ ID NO: 1762 - protein, 7 aa, synthetic construct
  REGION 1..7: note = Description of Artificial Sequence: Synthetic peptide
GLASKNS

SEQ ID NO: 1763 - protein, 7 aa, synthetic construct
  REGION 1..7: note = Description of Artificial Sequence: Synthetic peptide
WGTDKMR

SEQ ID NO: 1764 - protein, 7 aa, synthetic construct
  REGION 1..7: note = Description of Artificial Sequence: Synthetic peptide
RGGQNSV

SEQ ID NO: 1765 - protein, 7 aa, synthetic construct
  REGION 1..7: note = Description of Artificial Sequence: Synthetic peptide
GTTNSSR

SEQ ID NO: 1766 - protein, 7 aa, synthetic construct
  REGION 1..7: note = Description of Artificial Sequence: Synthetic peptide
TANTHPT

SEQ ID NO: 1767 - protein, 7 aa, synthetic construct
  REGION 1..7: note = Description of Artificial Sequence: Synthetic peptide
QTANSSQ

SEQ ID NO: 1768 - protein, 7 aa, synthetic construct
  REGION 1..7: note = Description of Artificial Sequence: Synthetic peptide
TTSSHSL

SEQ ID NO: 1769 - protein, 7 aa, synthetic construct
  REGION 1..7: note = Description of Artificial Sequence: Synthetic peptide
TADNRTA

SEQ ID NO: 1770 - protein, 7 aa, synthetic construct
  REGION 1..7: note = Description of Artificial Sequence: Synthetic peptide
ETRTGTV

SEQ ID NO: 1771 - protein, 7 aa, synthetic construct
  REGION 1..7: note = Description of Artificial Sequence: Synthetic peptide
TQGQKAT

SEQ ID NO: 1772 - protein, 7 aa, synthetic construct
  REGION 1..7: note = Description of Artificial Sequence: Synthetic peptide
ERKTGNG

SEQ ID NO: 1773 - protein, 7 aa, synthetic construct
  REGION 1..7: note = Description of Artificial Sequence: Synthetic peptide
GDKSSRE

SEQ ID NO: 1774 - protein, 7 aa, synthetic construct
  REGION 1..7: note = Description of Artificial Sequence: Synthetic peptide
NNSDRRD

SEQ ID NO: 1775 - protein, 7 aa, synthetic construct
  REGION 1..7: note = Description of Artificial Sequence: Synthetic peptide
APGAHQS

SEQ ID NO: 1776 - protein, 7 aa, synthetic construct
  REGION 1..7: note = Description of Artificial Sequence: Synthetic peptide
HSQGKNV

SEQ ID NO: 1777 - protein, 7 aa, synthetic construct
  REGION 1..7: note = Description of Artificial Sequence: Synthetic peptide
SQTSNHI

SEQ ID NO: 1778 - protein, 7 aa, synthetic construct
  REGION 1..7: note = Description of Artificial Sequence: Synthetic peptide
LGEKSHS

SEQ ID NO: 1779 - protein, 7 aa, synthetic construct
  REGION 1..7: note = Description of Artificial Sequence: Synthetic peptide
VGDRPAI

SEQ ID NO: 1780 - protein, 7 aa, synthetic construct
  REGION 1..7: note = Description of Artificial Sequence: Synthetic peptide
SNSQVAS

SEQ ID NO: 1781 - protein, 7 aa, synthetic construct
  REGION 1..7: note = Description of Artificial Sequence: Synthetic peptide
ASVPSSG

SEQ ID NO: 1782 - protein, 7 aa, synthetic construct
  REGION 1..7: note = Description of Artificial Sequence: Synthetic peptide
SRDGKVV

SEQ ID NO: 1783 - protein, 7 aa, synthetic construct
  REGION 1..7: note = Description of Artificial Sequence: Synthetic peptide
GTGKHAA

SEQ ID NO: 1784 - protein, 7 aa, synthetic construct
  REGION 1..7: note = Description of Artificial Sequence: Synthetic peptide
RGAGNSN

SEQ ID NO: 1785 - protein, 7 aa, synthetic construct
  REGION 1..7: note = Description of Artificial Sequence: Synthetic peptide
TNVTKSS

SEQ ID NO: 1786 - protein, 7 aa, synthetic construct
  REGION 1..7: note = Description of Artificial Sequence: Synthetic peptide
SSADRNS

SEQ ID NO: 1787 - protein, 7 aa, synthetic construct
  REGION 1..7: note = Description of Artificial Sequence: Synthetic peptide
NSGTGSR

SEQ ID NO: 1788 - protein, 7 aa, synthetic construct
  REGION 1..7: note = Description of Artificial Sequence: Synthetic peptide
SGSRPSV

SEQ ID NO: 1789 - protein, 7 aa, synthetic construct
  REGION 1..7: note = Description of Artificial Sequence: Synthetic peptide
MGDRSQG

SEQ ID NO: 1790 - protein, 7 aa, synthetic construct
  REGION 1..7: note = Description of Artificial Sequence: Synthetic peptide
GHNKAVG

SEQ ID NO: 1791 - protein, 7 aa, synthetic construct
  REGION 1..7: note = Description of Artificial Sequence: Synthetic peptide
SSQKPGG

SEQ ID NO: 1792 - protein, 7 aa, synthetic construct
  REGION 1..7: note = Description of Artificial Sequence: Synthetic peptide
SGSPANR

SEQ ID NO: 1793 - protein, 7 aa, synthetic construct
  REGION 1..7: note = Description of Artificial Sequence: Synthetic peptide
MGSGTAT

SEQ ID NO: 1794 - protein, 7 aa, synthetic construct
  REGION 1..7: note = Description of Artificial Sequence: Synthetic peptide
IGGGPSS

SEQ ID NO: 1795 - protein, 7 aa, synthetic construct
  REGION 1..7: note = Description of Artificial Sequence: Synthetic peptide
NVRTPTS

SEQ ID NO: 1796 - protein, 7 aa, synthetic construct
  REGION 1..7: note = Description of Artificial Sequence: Synthetic peptide
SGESQHK

SEQ ID NO: 1797 - protein, 7 aa, synthetic construct
  REGION 1..7: note = Description of Artificial Sequence: Synthetic peptide
QVSPSTQ

SEQ ID NO: 1798 - protein, 7 aa, synthetic construct
  REGION 1..7: note = Description of Artificial Sequence: Synthetic peptide
ASHKPIT

SEQ ID NO: 1799 - protein, 7 aa, synthetic construct
  REGION 1..7: note = Description of Artificial Sequence: Synthetic peptide
ASVPSKA

SEQ ID NO: 1800 - protein, 7 aa, synthetic construct
  REGION 1..7: note = Description of Artificial Sequence: Synthetic peptide
NTQSNSR

SEQ ID NO: 1801 - protein, 7 aa, synthetic construct
  REGION 1..7: note = Description of Artificial Sequence: Synthetic peptide
VTGTTQG

SEQ ID NO: 1802 - protein, 7 aa, synthetic construct
  REGION 1..7: note = Description of Artificial Sequence: Synthetic peptide
TGTTGHS

SEQ ID NO: 1803 - protein, 7 aa, synthetic construct
  REGION 1..7: note = Description of Artificial Sequence: Synthetic peptide
SRSPSQS

SEQ ID NO: 1804 - protein, 7 aa, synthetic construct
  REGION 1..7: note = Description of Artificial Sequence: Synthetic peptide
GDMQGGK

SEQ ID NO: 1805 - protein, 7 aa, synthetic construct
  REGION 1..7: note = Description of Artificial Sequence: Synthetic peptide
TKDTRPI

SEQ ID NO: 1806 - protein, 7 aa, synthetic construct
  REGION 1..7: note = Description of Artificial Sequence: Synthetic peptide
QNTRSIA

SEQ ID NO: 1807 - protein, 7 aa, synthetic construct
  REGION 1..7: note = Description of Artificial Sequence: Synthetic peptide
QSAASTK

SEQ ID NO: 1808 - protein, 7 aa, synthetic construct
  REGION 1..7: note = Description of Artificial Sequence: Synthetic peptide
RNDSKSH

SEQ ID NO: 1809 - protein, 7 aa, synthetic construct
  REGION 1..7: note = Description of Artificial Sequence: Synthetic peptide
STPQGSG

SEQ ID NO: 1810 - protein, 7 aa, synthetic construct
  REGION 1..7: note = Description of Artificial Sequence: Synthetic peptide
ATASKVT

SEQ ID NO: 1811 - protein, 7 aa, synthetic construct
  REGION 1..7: note = Description of Artificial Sequence: Synthetic peptide
EAVAPNK

SEQ ID NO: 1812 - protein, 7 aa, synthetic construct
  REGION 1..7: note = Description of Artificial Sequence: Synthetic peptide
VDSSRTS

SEQ ID NO: 1813 - protein, 7 aa, synthetic construct
  REGION 1..7: note = Description of Artificial Sequence: Synthetic peptide
GNSAGSK

SEQ ID NO: 1814 - protein, 7 aa, synthetic construct
  REGION 1..7: note = Description of Artificial Sequence: Synthetic peptide
NRGEKPG

SEQ ID NO: 1815 - protein, 7 aa, synthetic construct
  REGION 1..7: note = Description of Artificial Sequence: Synthetic peptide
SVLNKGG

SEQ ID NO: 1816 - protein, 7 aa, synthetic construct
  REGION 1..7: note = Description of Artificial Sequence: Synthetic peptide
QNNTATQ

SEQ ID NO: 1817 - protein, 7 aa, synthetic construct
  REGION 1..7: note = Description of Artificial Sequence: Synthetic peptide
QENAANK

SEQ ID NO: 1818 - protein, 7 aa, synthetic construct
  REGION 1..7: note = Description of Artificial Sequence: Synthetic peptide
ASVSRSS

SEQ ID NO: 1819 - protein, 7 aa, synthetic construct
  REGION 1..7: note = Description of Artificial Sequence: Synthetic peptide
GAGVKNL

SEQ ID NO: 1820 - protein, 7 aa, synthetic construct
  REGION 1..7: note = Description of Artificial Sequence: Synthetic peptide
RGDSNKL

SEQ ID NO: 1821 - protein, 7 aa, synthetic construct
  REGION 1..7: note = Description of Artificial Sequence: Synthetic peptide
SSNSAVR

SEQ ID NO: 1822 - protein, 7 aa, synthetic construct
  REGION 1..7: note = Description of Artificial Sequence: Synthetic peptide
SQSGQGT

SEQ ID NO: 1823 - protein, 7 aa, synthetic construct
  REGION 1..7: note = Description of Artificial Sequence: Synthetic peptide
SVDRTQG

SEQ ID NO: 1824 - protein, 7 aa, synthetic construct
  REGION 1..7: note = Description of Artificial Sequence: Synthetic peptide
IGSSTNA

SEQ ID NO: 1825 - protein, 7 aa, synthetic construct
  REGION 1..7: note = Description of Artificial Sequence: Synthetic peptide
ENNKSQM

SEQ ID NO: 1826 - protein, 7 aa, synthetic construct
  REGION 1..7: note = Description of Artificial Sequence: Synthetic peptide
GGSKSAS

SEQ ID NO: 1827 - protein, 7 aa, synthetic construct
  REGION 1..7: note = Description of Artificial Sequence: Synthetic peptide
LGTQPPV

SEQ ID NO: 1828 - protein, 7 aa, synthetic construct
  REGION 1..7: note = Description of Artificial Sequence: Synthetic peptide
SLHKPTS

SEQ ID NO: 1829 - protein, 7 aa, synthetic construct
  REGION 1..7: note = Description of Artificial Sequence: Synthetic peptide
GKQTSVG

SEQ ID NO: 1830 - protein, 7 aa, synthetic construct
  REGION 1..7: note = Description of Artificial Sequence: Synthetic peptide
RGQTTPG

SEQ ID NO: 1831 - protein, 7 aa, synthetic construct
  REGION 1..7: note = Description of Artificial Sequence: Synthetic peptide
STGENRG

SEQ ID NO: 1832 - protein, 7 aa, synthetic construct
  REGION 1..7: note = Description of Artificial Sequence: Synthetic peptide
SAGKSTT

SEQ ID NO: 1833 - protein, 7 aa, synthetic construct
  REGION 1..7: note = Description of Artificial Sequence: Synthetic peptide
SGGTAMV

SEQ ID NO: 1834 - protein, 7 aa, synthetic construct
  REGION 1..7: note = Description of Artificial Sequence: Synthetic peptide
HHNAPAQ

SEQ ID NO: 1835 - protein, 7 aa, synthetic construct
  REGION 1..7: note = Description of Artificial Sequence: Synthetic peptide
TSGSDRL

SEQ ID NO: 1836 - protein, 7 aa, synthetic construct
  REGION 1..7: note = Description of Artificial Sequence: Synthetic peptide
RPDKQSI

SEQ ID NO: 1837 - protein, 7 aa, synthetic construct
  REGION 1..7: note = Description of Artificial Sequence: Synthetic peptide
NTTQKGG

SEQ ID NO: 1838 - protein, 7 aa, synthetic construct
  REGION 1..7: note = Description of Artificial Sequence: Synthetic peptide
TQISTTG

SEQ ID NO: 1839 - protein, 7 aa, synthetic construct
  REGION 1..7: note = Description of Artificial Sequence: Synthetic peptide
IPSKPAN

SEQ ID NO: 1840 - protein, 7 aa, synthetic construct
  REGION 1..7: note = Description of Artificial Sequence: Synthetic peptide
DGNKVLG

SEQ ID NO: 1841 - protein, 7 aa, synthetic construct
  REGION 1..7: note = Description of Artificial Sequence: Synthetic peptide
APGQKPL

SEQ ID NO: 1842 - protein, 7 aa, synthetic construct
  REGION 1..7: note = Description of Artificial Sequence: Synthetic peptide
YQAADTK

SEQ ID NO: 1843 - protein, 7 aa, synthetic construct
  REGION 1..7: note = Description of Artificial Sequence: Synthetic peptide
GEGSKSR

SEQ ID NO: 1844 - protein, 7 aa, synthetic construct
  REGION 1..7: note = Description of Artificial Sequence: Synthetic peptide
DAKVNGR

SEQ ID NO: 1845 - protein, 7 aa, synthetic construct
  REGION 1..7: note = Description of Artificial Sequence: Synthetic peptide
DGANRSS

SEQ ID NO: 1846 - protein, 7 aa, synthetic construct
  REGION 1..7: note = Description of Artificial Sequence: Synthetic peptide
SSQQGPA

SEQ ID NO: 1847 - protein, 7 aa, synthetic construct
  REGION 1..7: note = Description of Artificial Sequence: Synthetic peptide
QRSKDSA

SEQ ID NO: 1848 - protein, 7 aa, synthetic construct
  REGION 1..7: note = Description of Artificial Sequence: Synthetic peptide
NRVTKSE

SEQ ID NO: 1849 - protein, 7 aa, synthetic construct
  REGION 1..7: note = Description of Artificial Sequence: Synthetic peptide
DQRGSVS

SEQ ID NO: 1850 - protein, 7 aa, synthetic construct
  REGION 1..7: note = Description of Artificial Sequence: Synthetic peptide
GQVPKTG

SEQ ID NO: 1851 - protein, 7 aa, synthetic construct
  REGION 1..7: note = Description of Artificial Sequence: Synthetic peptide
SGSSKGH

SEQ ID NO: 1852 - protein, 7 aa, synthetic construct
  REGION 1..7: note = Description of Artificial Sequence: Synthetic peptide
LQQKSHG

SEQ ID NO: 1853 - protein, 7 aa, synthetic construct
  REGION 1..7: note = Description of Artificial Sequence: Synthetic peptide
DSGANRV

SEQ ID NO: 1854 - protein, 7 aa, synthetic construct
  REGION 1..7: note = Description of Artificial Sequence: Synthetic peptide
AQGNKAH

SEQ ID NO: 1855 - protein, 7 aa, synthetic construct
  REGION 1..7: note = Description of Artificial Sequence: Synthetic peptide
ASDNKPS

SEQ ID NO: 1856 - protein, 7 aa, synthetic construct
  REGION 1..7: note = Description of Artificial Sequence: Synthetic peptide
SQAHSSA

SEQ ID NO: 1857 - protein, 7 aa, synthetic construct
  REGION 1..7: note = Description of Artificial Sequence: Synthetic peptide
NSSKTSS

SEQ ID NO: 1858 - protein, 7 aa, synthetic construct
  REGION 1..7: note = Description of Artificial Sequence: Synthetic peptide
TSEGTHR

SEQ ID NO: 1859 - protein, 7 aa, synthetic construct
  REGION 1..7: note = Description of Artificial Sequence: Synthetic peptide
DGPKPGS

SEQ ID NO: 1860 - protein, 7 aa, synthetic construct
  REGION 1..7: note = Description of Artificial Sequence: Synthetic peptide
GRSQTSV

SEQ ID NO: 1861 - protein, 7 aa, synthetic construct
  REGION 1..7: note = Description of Artificial Sequence: Synthetic peptide
TQEGKQS

SEQ ID NO: 1862 - protein, 7 aa, synthetic construct
  REGION 1..7: note = Description of Artificial Sequence: Synthetic peptide
ELSSPRN

SEQ ID NO: 1863 - protein, 7 aa, synthetic construct
  REGION 1..7: note = Description of Artificial Sequence: Synthetic peptide
ASSSKTS

SEQ ID NO: 1864 - protein, 7 aa, synthetic construct
  REGION 1..7: note = Description of Artificial Sequence: Synthetic peptide
AGTTKNS

SEQ ID NO: 1865 - protein, 7 aa, synthetic construct
  REGION 1..7: note = Description of Artificial Sequence: Synthetic peptide
GVAKVGG

SEQ ID NO: 1866 - protein, 7 aa, synthetic construct
  REGION 1..7: note = Description of Artificial Sequence: Synthetic peptide
STNTKAL

SEQ ID NO: 1867 - protein, 7 aa, synthetic construct
  REGION 1..7: note = Description of Artificial Sequence: Synthetic peptide
EHTGKQM

SEQ ID NO: 1868 - protein, 7 aa, synthetic construct
  REGION 1..7: note = Description of Artificial Sequence: Synthetic peptide
QTGSNNK

SEQ ID NO: 1869 - protein, 7 aa, synthetic construct
  REGION 1..7: note = Description of Artificial Sequence: Synthetic peptide
LQNKSSL

SEQ ID NO: 1870 - protein, 7 aa, synthetic construct
  REGION 1..7: note = Description of Artificial Sequence: Synthetic peptide
SPSTNGR

SEQ ID NO: 1871 - protein, 7 aa, synthetic construct
  REGION 1..7: note = Description of Artificial Sequence: Synthetic peptide
NSVPGST

SEQ ID NO: 1872 - protein, 7 aa, synthetic construct
  REGION 1..7: note = Description of Artificial Sequence: Synthetic peptide
TTVKPNL

SEQ ID NO: 1873 - protein, 7 aa, synthetic construct
  REGION 1..7: note = Description of Artificial Sequence: Synthetic peptide
GDTPSRK

SEQ ID NO: 1874 - protein, 7 aa, synthetic construct
  REGION 1..7: note = Description of Artificial Sequence: Synthetic peptide
TTTKASA

SEQ ID NO: 1875 - protein, 7 aa, synthetic construct
  REGION 1..7: note = Description of Artificial Sequence: Synthetic peptide
AGMGKAS

SEQ ID NO: 1876 - protein, 7 aa, synthetic construct
  REGION 1..7: note = Description of Artificial Sequence: Synthetic peptide
LSGQSST

SEQ ID NO: 1877 - protein, 7 aa, synthetic construct
  REGION 1..7: note = Description of Artificial Sequence: Synthetic peptide
RGSSSST

SEQ ID NO: 1878 - protein, 7 aa, synthetic construct
  REGION 1..7: note = Description of Artificial Sequence: Synthetic peptide
SGSKALE

SEQ ID NO: 1879 - protein, 7 aa, synthetic construct
  REGION 1..7: note = Description of Artificial Sequence: Synthetic peptide
GPSTKSL

SEQ ID NO: 1880 - protein, 7 aa, synthetic construct
  REGION 1..7: note = Description of Artificial Sequence: Synthetic peptide
GTSTALK

SEQ ID NO: 1881 - protein, 7 aa, synthetic construct
  REGION 1..7: note = Description of Artificial Sequence: Synthetic peptide
LPSTNGS

SEQ ID NO: 1882 - protein, 7 aa, synthetic construct
  REGION 1..7: note = Description of Artificial Sequence: Synthetic peptide
NRQDKPS

SEQ ID NO: 1883 - protein, 7 aa, synthetic construct
  REGION 1..7: note = Description of Artificial Sequence: Synthetic peptide
RSGERPS

SEQ ID NO: 1884 - protein, 7 aa, synthetic construct
  REGION 1..7: note = Description of Artificial Sequence: Synthetic peptide
AQHPKQQ

SEQ ID NO: 1885 - protein, 7 aa, synthetic construct
  REGION 1..7: note = Description of Artificial Sequence: Synthetic peptide
GSDRNSG

SEQ ID NO: 1886 - protein, 7 aa, synthetic construct
  REGION 1..7: note = Description of Artificial Sequence: Synthetic peptide
SQTAAPT

SEQ ID NO: 1887 - protein, 7 aa, synthetic construct
  REGION 1..7: note = Description of Artificial Sequence: Synthetic peptide
SVSDRNK

SEQ ID NO: 1888 - protein, 7 aa, synthetic construct
  REGION 1..7: note = Description of Artificial Sequence: Synthetic peptide
GPTQKAN

SEQ ID NO: 1889 - protein, 7 aa, synthetic construct
  REGION 1..7: note = Description of Artificial Sequence: Synthetic peptide
GGASSNT

SEQ ID NO: 1890 - protein, 7 aa, synthetic construct
  REGION 1..7: note = Description of Artificial Sequence: Synthetic peptide
SSKAKSD

SEQ ID NO: 1891 - protein, 7 aa, synthetic construct
  REGION 1..7: note = Description of Artificial Sequence: Synthetic peptide
STNRATG

SEQ ID NO: 1892 - protein, 7 aa, synthetic construct
  REGION 1..7: note = Description of Artificial Sequence: Synthetic peptide
RTGTGAT

SEQ ID NO: 1893 - protein, 7 aa, synthetic construct
  REGION 1..7: note = Description of Artificial Sequence: Synthetic peptide
RSSTPTQ

SEQ ID NO: 1894 - protein, 7 aa, synthetic construct
  REGION 1..7: note = Description of Artificial Sequence: Synthetic peptide
STASKQA

SEQ ID NO: 1895 - protein, 7 aa, synthetic construct
  REGION 1..7: note = Description of Artificial Sequence: Synthetic peptide
TGAGPNL

SEQ ID NO: 1896 - protein, 7 aa, synthetic construct
  REGION 1..7: note = Description of Artificial Sequence: Synthetic peptide
ASTSPAT

SEQ ID NO: 1897 - protein, 7 aa, synthetic construct
  REGION 1..7: note = Description of Artificial Sequence: Synthetic peptide
VPSSSPK

SEQ ID NO: 1898 - protein, 7 aa, synthetic construct
  REGION 1..7: note = Description of Artificial Sequence: Synthetic peptide
VPTSKAV

SEQ ID NO: 1899 - protein, 7 aa, synthetic construct
  REGION 1..7: note = Description of Artificial Sequence: Synthetic peptide
KGASNVS

SEQ ID NO: 1900 - protein, 7 aa, synthetic construct
  REGION 1..7: note = Description of Artificial Sequence: Synthetic peptide
NGADKQR

SEQ ID NO: 1901 - protein, 7 aa, synthetic construct
  REGION 1..7: note = Description of Artificial Sequence: Synthetic peptide
TQSQRAS

SEQ ID NO: 1902 - protein, 7 aa, synthetic construct
  REGION 1..7: note = Description of Artificial Sequence: Synthetic peptide
THGAPNA

SEQ ID NO: 1903 - protein, 7 aa, synthetic construct
  REGION 1..7: note = Description of Artificial Sequence: Synthetic peptide
RTGDSGG

SEQ ID NO: 1904 - protein, 7 aa, synthetic construct
  REGION 1..7: note = Description of Artificial Sequence: Synthetic peptide
RGESKFT

SEQ ID NO: 1905 - protein, 7 aa, synthetic construct
  REGION 1..7: note = Description of Artificial Sequence: Synthetic peptide
SQNSKQV

SEQ ID NO: 1906 - protein, 7 aa, synthetic construct
  REGION 1..7: note = Description of Artificial Sequence: Synthetic peptide
MPGKTSS

SEQ ID NO: 1907 - protein, 7 aa, synthetic construct
  REGION 1..7: note = Description of Artificial Sequence: Synthetic peptide
MASKDNR

SEQ ID NO: 1908 - protein, 7 aa, synthetic construct
  REGION 1..7: note = Description of Artificial Sequence: Synthetic peptide
LTEKSSK

SEQ ID NO: 1909 - protein, 7 aa, synthetic construct
  REGION 1..7: note = Description of Artificial Sequence: Synthetic peptide
DSGKSSR

SEQ ID NO: 1910 - protein, 7 aa, synthetic construct
  REGION 1..7: note = Description of Artificial Sequence: Synthetic peptide
DGSNGHR

SEQ ID NO: 1911 - protein, 7 aa, synthetic construct
  REGION 1..7: note = Description of Artificial Sequence: Synthetic peptide
AGVRDMT

SEQ ID NO: 1912 - protein, 7 aa, synthetic construct
  REGION 1..7: note = Description of Artificial Sequence: Synthetic peptide
GLPNGQK

SEQ ID NO: 1913 - protein, 7 aa, synthetic construct
  REGION 1..7: note = Description of Artificial Sequence: Synthetic peptide
VGSRDQV

SEQ ID NO: 1914 - protein, 7 aa, synthetic construct
  REGION 1..7: note = Description of Artificial Sequence: Synthetic peptide
VSKPAMV

SEQ ID NO: 1915 - protein, 7 aa, synthetic construct
  REGION 1..7: note = Description of Artificial Sequence: Synthetic peptide
VSTAKAQ

SEQ ID NO: 1916 - protein, 7 aa, synthetic construct
  REGION 1..7: note = Description of Artificial Sequence: Synthetic peptide
SRATQTV

SEQ ID NO: 1917 - protein, 7 aa, synthetic construct
  REGION 1..7: note = Description of Artificial Sequence: Synthetic peptide
QPNSKPV

SEQ ID NO: 1918 - protein, 7 aa, synthetic construct
  REGION 1..7: note = Description of Artificial Sequence: Synthetic peptide
SGKGQLN

SEQ ID NO: 1919 - protein, 7 aa, synthetic construct
  REGION 1..7: note = Description of Artificial Sequence: Synthetic peptide
GAASGQV

SEQ ID NO: 1920 - protein, 7 aa, synthetic construct
  REGION 1..7: note = Description of Artificial Sequence: Synthetic peptide
SQMANSK

SEQ ID NO: 1921 - protein, 7 aa, synthetic construct
  REGION 1..7: note = Description of Artificial Sequence: Synthetic peptide
QTRTANQ

SEQ ID NO: 1922 - protein, 7 aa, synthetic construct
  REGION 1..7: note = Description of Artificial Sequence: Synthetic peptide
EGADRHR

SEQ ID NO: 1923 - protein, 7 aa, synthetic construct
  REGION 1..7: note = Description of Artificial Sequence: Synthetic peptide
VQNERSR

SEQ ID NO: 1924 - protein, 7 aa, synthetic construct
  REGION 1..7: note = Description of Artificial Sequence: Synthetic peptide
SSNSTRS

SEQ ID NO: 1925 - protein, 7 aa, synthetic construct
  REGION 1..7: note = Description of Artificial Sequence: Synthetic peptide
SNGNSRA

SEQ ID NO: 1926 - protein, 7 aa, synthetic construct
  REGION 1..7: note = Description of Artificial Sequence: Synthetic peptide
SVSKSTN

SEQ ID NO: 1927 - protein, 7 aa, synthetic construct
  REGION 1..7: note = Description of Artificial Sequence: Synthetic peptide
GIGKNGA

SEQ ID NO: 1928 - protein, 7 aa, synthetic construct
  REGION 1..7: note = Description of Artificial Sequence: Synthetic peptide
AESRPPL

SEQ ID NO: 1929 - protein, 7 aa, synthetic construct
  REGION 1..7: note = Description of Artificial Sequence: Synthetic peptide
TNNTRPE

SEQ ID NO: 1930 - protein, 7 aa, synthetic construct
  REGION 1..7: note = Description of Artificial Sequence: Synthetic peptide
VVAKSSS

SEQ ID NO: 1931 - protein, 7 aa, synthetic construct
  REGION 1..7: note = Description of Artificial Sequence: Synthetic peptide
QGAGSMA

SEQ ID NO: 1932 - protein, 7 aa, synthetic construct
  REGION 1..7: note = Description of Artificial Sequence: Synthetic peptide
TGVEKLH

SEQ ID NO: 1933 - protein, 7 aa, synthetic construct
  REGION 1..7: note = Description of Artificial Sequence: Synthetic peptide
LSDKPAR

SEQ ID NO: 1934 - protein, 7 aa, synthetic construct
  REGION 1..7: note = Description of Artificial Sequence: Synthetic peptide
ERSPSAT

SEQ ID NO: 1935 - protein, 7 aa, synthetic construct
  REGION 1..7: note = Description of Artificial Sequence: Synthetic peptide
ITASPTI

SEQ ID NO: 1936 - protein, 7 aa, synthetic construct
  REGION 1..7: note = Description of Artificial Sequence: Synthetic peptide
GLNKEVR

SEQ ID NO: 1937 - protein, 7 aa, synthetic construct
  REGION 1..7: note = Description of Artificial Sequence: Synthetic peptide
HGDRTNS

SEQ ID NO: 1938 - protein, 7 aa, synthetic construct
  REGION 1..7: note = Description of Artificial Sequence: Synthetic peptide
LGDRQMH

SEQ ID NO: 1939 - protein, 7 aa, synthetic construct
  REGION 1..7: note = Description of Artificial Sequence: Synthetic peptide
QSIHKSE

SEQ ID NO: 1940 - protein, 7 aa, synthetic construct
  REGION 1..7: note = Description of Artificial Sequence: Synthetic peptide
STSSQKT

SEQ ID NO: 1941 - protein, 7 aa, synthetic construct
  REGION 1..7: note = Description of Artificial Sequence: Synthetic peptide
DRAVQNL

SEQ ID NO: 1942 - protein, 7 aa, synthetic construct
  REGION 1..7: note = Description of Artificial Sequence: Synthetic peptide
TSGTSIL

SEQ ID NO: 1943 - protein, 7 aa, synthetic construct
  REGION 1..7: note = Description of Artificial Sequence: Synthetic peptide
QQGASQA

SEQ ID NO: 1944 - protein, 7 aa, synthetic construct
  REGION 1..7: note = Description of Artificial Sequence: Synthetic peptide
LGGASVK

SEQ ID NO: 1945 - protein, 7 aa, synthetic construct
  REGION 1..7: note = Description of Artificial Sequence: Synthetic peptide
TKSTPSV

SEQ ID NO: 1946 - protein, 7 aa, synthetic construct
  REGION 1..7: note = Description of Artificial Sequence: Synthetic peptide
ALTSKSQ

SEQ ID NO: 1947 - protein, 7 aa, synthetic construct
  REGION 1..7: note = Description of Artificial Sequence: Synthetic peptide
KSSGDQT

SEQ ID NO: 1948 - protein, 7 aa, synthetic construct
  REGION 1..7: note = Description of Artificial Sequence: Synthetic peptide
HSTPTNT

SEQ ID NO: 1949 - protein, 7 aa, synthetic construct
  REGION 1..7: note = Description of Artificial Sequence: Synthetic peptide
LQTSKPQ

SEQ ID NO: 1950 - protein, 7 aa, synthetic construct
  REGION 1..7: note = Description of Artificial Sequence: Synthetic peptide
RASPPSS

SEQ ID NO: 1951 - protein, 7 aa, synthetic construct
  REGION 1..7: note = Description of Artificial Sequence: Synthetic peptide
TPAKAQL

SEQ ID NO: 1952 - protein, 7 aa, synthetic construct
  REGION 1..7: note = Description of Artificial Sequence: Synthetic peptide
SSDRSNV

SEQ ID NO: 1953 - protein, 7 aa, synthetic construct
  REGION 1..7: note = Description of Artificial Sequence: Synthetic peptide
TGNSSVI

SEQ ID NO: 1954 - protein, 7 aa, synthetic construct
  REGION 1..7: note = Description of Artificial Sequence: Synthetic peptide
LSGNKAI

SEQ ID NO: 1955 - protein, 7 aa, synthetic construct
  REGION 1..7: note = Description of Artificial Sequence: Synthetic peptide
NGASRTT

SEQ ID NO: 1956 - protein, 7 aa, synthetic construct
  REGION 1..7: note = Description of Artificial Sequence: Synthetic peptide
ESTATPR

SEQ ID NO: 1957 - protein, 7 aa, synthetic construct
  REGION 1..7: note = Description of Artificial Sequence: Synthetic peptide
KSSGSPL

SEQ ID NO: 1958 - protein, 7 aa, synthetic construct
  REGION 1..7: note = Description of Artificial Sequence: Synthetic peptide
QGGASNR

SEQ ID NO: 1959 - protein, 7 aa, synthetic construct
  REGION 1..7: note = Description of Artificial Sequence: Synthetic peptide
HVKPTSV

SEQ ID NO: 1960 - protein, 7 aa, synthetic construct
  REGION 1..7: note = Description of Artificial Sequence: Synthetic peptide
GVNSGGH

SEQ ID NO: 1961 - protein, 7 aa, synthetic construct
  REGION 1..7: note = Description of Artificial Sequence: Synthetic peptide
TPSAKGN

SEQ ID NO: 1962 - protein, 7 aa, synthetic construct
  REGION 1..7: note = Description of Artificial Sequence: Synthetic peptide
KQGSSSV

SEQ ID NO: 1963 - protein, 7 aa, synthetic construct
  REGION 1..7: note = Description of Artificial Sequence: Synthetic peptide
TKQSSIA

SEQ ID NO: 1964 - protein, 7 aa, synthetic construct
  REGION 1..7: note = Description of Artificial Sequence: Synthetic peptide
SRAQGTA

SEQ ID NO: 1965 - protein, 7 aa, synthetic construct
  REGION 1..7: note = Description of Artificial Sequence: Synthetic peptide
TGRNGNQ

SEQ ID NO: 1966 - protein, 7 aa, synthetic construct
  REGION 1..7: note = Description of Artificial Sequence: Synthetic peptide
GSPQKNQ

SEQ ID NO: 1967 - protein, 7 aa, synthetic construct
  REGION 1..7: note = Description of Artificial Sequence: Synthetic peptide
TPSKERS

SEQ ID NO: 1968 - protein, 7 aa, synthetic construct
  REGION 1..7: note = Description of Artificial Sequence: Synthetic peptide
ITSQKSV

SEQ ID NO: 1969 - protein, 7 aa, synthetic construct
  REGION 1..7: note = Description of Artificial Sequence: Synthetic peptide
IQTKDQL

SEQ ID NO: 1970 - protein, 7 aa, synthetic construct
  REGION 1..7: note = Description of Artificial Sequence: Synthetic peptide
YGSDSNR

SEQ ID NO: 1971 - protein, 7 aa, synthetic construct
  REGION 1..7: note = Description of Artificial Sequence: Synthetic peptide
GGSPRGT

SEQ ID NO: 1972 - protein, 7 aa, synthetic construct
  REGION 1..7: note = Description of Artificial Sequence: Synthetic peptide
LTKASSV

SEQ ID NO: 1973 - protein, 7 aa, synthetic construct
  REGION 1..7: note = Description of Artificial Sequence: Synthetic peptide
SSSQKPM

SEQ ID NO: 1974 - protein, 7 aa, synthetic construct
  REGION 1..7: note = Description of Artificial Sequence: Synthetic peptide
DSQQRGS

SEQ ID NO: 1975 - protein, 7 aa, synthetic construct
  REGION 1..7: note = Description of Artificial Sequence: Synthetic peptide
STVKAHS

SEQ ID NO: 1976 - protein, 7 aa, synthetic construct
  REGION 1..7: note = Description of Artificial Sequence: Synthetic peptide
KSQSPST

SEQ ID NO: 1977 - protein, 7 aa, synthetic construct
  REGION 1..7: note = Description of Artificial Sequence: Synthetic peptide
ISTSPGK

SEQ ID NO: 1978 - protein, 7 aa, synthetic construct
  REGION 1..7: note = Description of Artificial Sequence: Synthetic peptide
GSGQRPD

SEQ ID NO: 1979 - protein, 7 aa, synthetic construct
  REGION 1..7: note = Description of Artificial Sequence: Synthetic peptide
TVSKSNS

SEQ ID NO: 1980 - protein, 7 aa, synthetic construct
  REGION 1..7: note = Description of Artificial Sequence: Synthetic peptide
HSGGSSV

SEQ ID NO: 1981 - protein, 7 aa, synthetic construct
  REGION 1..7: note = Description of Artificial Sequence: Synthetic peptide
GSTKPLL

SEQ ID NO: 1982 - protein, 7 aa, synthetic construct
  REGION 1..7: note = Description of Artificial Sequence: Synthetic peptide
HTTKSAT

SEQ ID NO: 1983 - protein, 7 aa, synthetic construct
  REGION 1..7: note = Description of Artificial Sequence: Synthetic peptide
SSSKGNS

SEQ ID NO: 1984 - protein, 7 aa, synthetic construct
  REGION 1..7: note = Description of Artificial Sequence: Synthetic peptide
SLAKGNN

SEQ ID NO: 1985 - protein, 7 aa, synthetic construct
  REGION 1..7: note = Description of Artificial Sequence: Synthetic peptide
AQGKPGP

SEQ ID NO: 1986 - protein, 7 aa, synthetic construct
  REGION 1..7: note = Description of Artificial Sequence: Synthetic peptide
TGGNKST

SEQ ID NO: 1987 - protein, 7 aa, synthetic construct
  REGION 1..7: note = Description of Artificial Sequence: Synthetic peptide
MGDNRAS

SEQ ID NO: 1988 - protein, 7 aa, synthetic construct
  REGION 1..7: note = Description of Artificial Sequence: Synthetic peptide
ERTVSPT

SEQ ID NO: 1989 - protein, 7 aa, synthetic construct
  REGION 1..7: note = Description of Artificial Sequence: Synthetic peptide
SPIQASK

SEQ ID NO: 1990 - protein, 7 aa, synthetic construct
  REGION 1..7: note = Description of Artificial Sequence: Synthetic peptide
TGTNAVM

SEQ ID NO: 1991 - protein, 7 aa, synthetic construct
  REGION 1..7: note = Description of Artificial Sequence: Synthetic peptide
HTNTKVG

SEQ ID NO: 1992 - protein, 7 aa, synthetic construct
  REGION 1..7: note = Description of Artificial Sequence: Synthetic peptide
KGQGPAV

SEQ ID NO: 1993 - protein, 7 aa, synthetic construct
  REGION 1..7: note = Description of Artificial Sequence: Synthetic peptide
NSDRSHV

SEQ ID NO: 1994 - protein, 7 aa, synthetic construct
  REGION 1..7: note = Description of Artificial Sequence: Synthetic peptide
TTSSKQE

SEQ ID NO: 1995 - protein, 7 aa, synthetic construct
  REGION 1..7: note = Description of Artificial Sequence: Synthetic peptide
LQTKSQT

SEQ ID NO: 1996 - protein, 7 aa, synthetic construct
  REGION 1..7: note = Description of Artificial Sequence: Synthetic peptide
DAGGNSA

SEQ ID NO: 1997 - protein, 7 aa, synthetic construct
  REGION 1..7: note = Description of Artificial Sequence: Synthetic peptide
KGSNNGQ

SEQ ID NO: 1998 - protein, 7 aa, synthetic construct
  REGION 1..7: note = Description of Artificial Sequence: Synthetic peptide
GLGKSAL

SEQ ID NO: 1999 - protein, 7 aa, synthetic construct
  REGION 1..7: note = Description of Artificial Sequence: Synthetic peptide
SQGAPTK

SEQ ID NO: 2000 - protein, 7 aa, synthetic construct
  REGION 1..7: note = Description of Artificial Sequence: Synthetic peptide
TTSDKIV

SEQ ID NO: 2001 - protein, 7 aa, synthetic construct
  REGION 1..7: note = Description of Artificial Sequence: Synthetic peptide
HSSQSQS

SEQ ID NO: 2002 - protein, 7 aa, synthetic construct
  REGION 1..7: note = Description of Artificial Sequence: Synthetic peptide
EAGRPNL

SEQ ID NO: 2003 - protein, 7 aa, synthetic construct
  REGION 1..7: note = Description of Artificial Sequence: Synthetic peptide
GADRKAQ

SEQ ID NO: 2004 - protein, 7 aa, synthetic construct
  REGION 1..7: note = Description of Artificial Sequence: Synthetic peptide
YGKSNQI

SEQ ID NO: 2005 - protein, 7 aa, synthetic construct
  REGION 1..7: note = Description of Artificial Sequence: Synthetic peptide
CTNGANK

SEQ ID NO: 2006 - protein, 7 aa, synthetic construct
  REGION 1..7: note = Description of Artificial Sequence: Synthetic peptide
QSSQAMT

SEQ ID NO: 2007 - protein, 7 aa, synthetic construct
  REGION 1..7: note = Description of Artificial Sequence: Synthetic peptide
HTTSPNN

SEQ ID NO: 2008 - protein, 7 aa, synthetic construct
  REGION 1..7: note = Description of Artificial Sequence: Synthetic peptide
SGTSSHS

SEQ ID NO: 2009 - protein, 7 aa, synthetic construct
  REGION 1..7: note = Description of Artificial Sequence: Synthetic peptide
SRNNGSG

SEQ ID NO: 2010 - protein, 7 aa, synthetic construct
  REGION 1..7: note = Description of Artificial Sequence: Synthetic peptide
TLNTAAG

SEQ ID NO: 2011 - protein, 7 aa, synthetic construct
  REGION 1..7: note = Description of Artificial Sequence: Synthetic peptide
ERQSTSS

SEQ ID NO: 2012 - protein, 7 aa, synthetic construct
  REGION 1..7: note = Description of Artificial Sequence: Synthetic peptide
GSGAPQT

SEQ ID NO: 2013 - protein, 7 aa, synthetic construct
  REGION 1..7: note = Description of Artificial Sequence: Synthetic peptide
EQNTVNR

SEQ ID NO: 2014 - protein, 7 aa, synthetic construct
  REGION 1..7: note = Description of Artificial Sequence: Synthetic peptide
KTATPSL

SEQ ID NO: 2015 - protein, 7 aa, synthetic construct
  REGION 1..7: note = Description of Artificial Sequence: Synthetic peptide
SEKAQPH

SEQ ID NO: 2016 - protein, 7 aa, synthetic construct
  REGION 1..7: note = Description of Artificial Sequence: Synthetic peptide
NGHTSTL

SEQ ID NO: 2017 - protein, 7 aa, synthetic construct
  REGION 1..7: note = Description of Artificial Sequence: Synthetic peptide
STTSEPR

SEQ ID NO: 2018 - protein, 7 aa, synthetic construct
  REGION 1..7: note = Description of Artificial Sequence: Synthetic peptide
SGTSPHL

SEQ ID NO: 2019 - protein, 7 aa, synthetic construct
  REGION 1..7: note = Description of Artificial Sequence: Synthetic peptide
TPSKGAT

SEQ ID NO: 2020 - protein, 7 aa, synthetic construct
  REGION 1..7: note = Description of Artificial Sequence: Synthetic peptide
GQENKVT

SEQ ID NO: 2021 - protein, 7 aa, synthetic construct
  REGION 1..7: note = Description of Artificial Sequence: Synthetic peptide
GTSQLSK

SEQ ID NO: 2022 - protein, 7 aa, synthetic construct
  REGION 1..7: note = Description of Artificial Sequence: Synthetic peptide
QSVKPPV

SEQ ID NO: 2023 - protein, 7 aa, synthetic construct
  REGION 1..7: note = Description of Artificial Sequence: Synthetic peptide
DNGRPSQ

SEQ ID NO: 2024 - protein, 7 aa, synthetic construct
  REGION 1..7: note = Description of Artificial Sequence: Synthetic peptide
ASGKPTS

SEQ ID NO: 2025 - protein, 7 aa, synthetic construct
  REGION 1..7: note = Description of Artificial Sequence: Synthetic peptide
CNNSGKG

SEQ ID NO: 2026 - protein, 7 aa, synthetic construct
  REGION 1..7: note = Description of Artificial Sequence: Synthetic peptide
FTEPGQK

SEQ ID NO: 2027 - protein, 7 aa, synthetic construct
  REGION 1..7: note = Description of Artificial Sequence: Synthetic peptide
SGASTGS

SEQ ID NO: 2028 - protein, 7 aa, synthetic construct
  REGION 1..7: note = Description of Artificial Sequence: Synthetic peptide
ASQTSNK

SEQ ID NO: 2029 - protein, 7 aa, synthetic construct
  REGION 1..7: note = Description of Artificial Sequence: Synthetic peptide
SSASKGN

SEQ ID NO: 2030 - protein, 7 aa, synthetic construct
  REGION 1..7: note = Description of Artificial Sequence: Synthetic peptide
STSGRHE

SEQ ID NO: 2031 - protein, 7 aa, synthetic construct
  REGION 1..7: note = Description of Artificial Sequence: Synthetic peptide
LGDSRTM

SEQ ID NO: 2032 - protein, 7 aa, synthetic construct
  REGION 1..7: note = Description of Artificial Sequence: Synthetic peptide
AATPGTH

SEQ ID NO: 2033 - protein, 7 aa, synthetic construct
  REGION 1..7: note = Description of Artificial Sequence: Synthetic peptide
SGNSRQS

SEQ ID NO: 2034 - protein, 7 aa, synthetic construct
  REGION 1..7: note = Description of Artificial Sequence: Synthetic peptide
RQGNAPS

SEQ ID NO: 2035 - protein, 7 aa, synthetic construct
  REGION 1..7: note = Description of Artificial Sequence: Synthetic peptide
STQSPTH

SEQ ID NO: 2036 - protein, 7 aa, synthetic construct
  REGION 1..7: note = Description of Artificial Sequence: Synthetic peptide
QGGSHQL

SEQ ID NO: 2037 - protein, 7 aa, synthetic construct
  REGION 1..7: note = Description of Artificial Sequence: Synthetic peptide
TPSTAGG

SEQ ID NO: 2038 - protein, 7 aa, synthetic construct
  REGION 1..7: note = Description of Artificial Sequence: Synthetic peptide
TLEQKSV

SEQ ID NO: 2039 - protein, 7 aa, synthetic construct
  REGION 1..7: note = Description of Artificial Sequence: Synthetic peptide
NVGNSSV

SEQ ID NO: 2040 - protein, 7 aa, synthetic construct
  REGION 1..7: note = Description of Artificial Sequence: Synthetic peptide
ITSKVAT

SEQ ID NO: 2041 - protein, 7 aa, synthetic construct
  REGION 1..7: note = Description of Artificial Sequence: Synthetic peptide
TTNRPGD

SEQ ID NO: 2042 - protein, 7 aa, synthetic construct
  REGION 1..7: note = Description of Artificial Sequence: Synthetic peptide
SASNTPR

SEQ ID NO: 2043 - protein, 7 aa, synthetic construct
  REGION 1..7: note = Description of Artificial Sequence: Synthetic peptide
DGARTAV

SEQ ID NO: 2044 - protein, 7 aa, synthetic construct
  REGION 1..7: note = Description of Artificial Sequence: Synthetic peptide
GSRAPAL

SEQ ID NO: 2045 - protein, 7 aa, synthetic construct
  REGION 1..7: note = Description of Artificial Sequence: Synthetic peptide
DSNSPQR

SEQ ID NO: 2046 - protein, 7 aa, synthetic construct
  REGION 1..7: note = Description of Artificial Sequence: Synthetic peptide
GSKSTIS

SEQ ID NO: 2047 - protein, 7 aa, synthetic construct
  REGION 1..7: note = Description of Artificial Sequence: Synthetic peptide
SGPSPSS

SEQ ID NO: 2048 - protein, 7 aa, synthetic construct
  REGION 1..7: note = Description of Artificial Sequence: Synthetic peptide
SKGNSAV

SEQ ID NO: 2049 - protein, 7 aa, synthetic construct
  REGION 1..7: note = Description of Artificial Sequence: Synthetic peptide
NVSKSSS

SEQ ID NO: 2050 - protein, 7 aa, synthetic construct
  REGION 1..7: note = Description of Artificial Sequence: Synthetic peptide
TGQGKAS

SEQ ID NO: 2051 - protein, 7 aa, synthetic construct
  REGION 1..7: note = Description of Artificial Sequence: Synthetic peptide
GRAESPR

SEQ ID NO: 2052 - protein, 7 aa, synthetic construct
  REGION 1..7: note = Description of Artificial Sequence: Synthetic peptide
QAAKSTS

SEQ ID NO: 2053 - protein, 7 aa, synthetic construct
  REGION 1..7: note = Description of Artificial Sequence: Synthetic peptide
SPIKSSA

SEQ ID NO: 2054 - protein, 7 aa, synthetic construct
  REGION 1..7: note = Description of Artificial Sequence: Synthetic peptide
NQAASHK

SEQ ID NO: 2055 - protein, 7 aa, synthetic construct
  REGION 1..7: note = Description of Artificial Sequence: Synthetic peptide
TATNSPR

SEQ ID NO: 2056 - protein, 7 aa, synthetic construct
  REGION 1..7: note = Description of Artificial Sequence: Synthetic peptide
RGTSTLA

SEQ ID NO: 2057 - protein, 7 aa, synthetic construct
  REGION 1..7: note = Description of Artificial Sequence: Synthetic peptide
QPTEKSV

SEQ ID NO: 2058 - protein, 7 aa, synthetic construct
  REGION 1..7: note = Description of Artificial Sequence: Synthetic peptide
AGMGTNT

SEQ ID NO: 2059 - protein, 7 aa, synthetic construct
  REGION 1..7: note = Description of Artificial Sequence: Synthetic peptide
GLERNLG

SEQ ID NO: 2060 - protein, 7 aa, synthetic construct
  REGION 1..7: note = Description of Artificial Sequence: Synthetic peptide
SLTAPAK

SEQ ID NO: 2061 - protein, 7 aa, synthetic construct
  REGION 1..7: note = Description of Artificial Sequence: Synthetic peptide
TSEPSAK

SEQ ID NO: 2062 - protein, 7 aa, synthetic construct
  REGION 1..7: note = Description of Artificial Sequence: Synthetic peptide
QRESPTR

SEQ ID NO: 2063 - protein, 7 aa, synthetic construct
  REGION 1..7: note = Description of Artificial Sequence: Synthetic peptide
LSPGAGS

SEQ ID NO: 2064 - protein, 7 aa, synthetic construct
  REGION 1..7: note = Description of Artificial Sequence: Synthetic peptide
LAGGSTS

SEQ ID NO: 2065 - protein, 7 aa, synthetic construct
  REGION 1..7: note = Description of Artificial Sequence: Synthetic peptide
NTGAGQL

SEQ ID NO: 2066 - protein, 7 aa, synthetic construct
  REGION 1..7: note = Description of Artificial Sequence: Synthetic peptide
TCTKEGC

SEQ ID NO: 2067 - protein, 7 aa, synthetic construct
  REGION 1..7: note = Description of Artificial Sequence: Synthetic peptide
VTTNKTE

SEQ ID NO: 2068 - protein, 7 aa, synthetic construct
  REGION 1..7: note = Description of Artificial Sequence: Synthetic peptide
TLSKSAA

SEQ ID NO: 2069 - protein, 7 aa, synthetic construct
  REGION 1..7: note = Description of Artificial Sequence: Synthetic peptide
RGEQSTF

SEQ ID NO: 2070 - protein, 7 aa, synthetic construct
  REGION 1..7: note = Description of Artificial Sequence: Synthetic peptide
ATTPGHT

SEQ ID NO: 2071 - protein, 7 aa, synthetic construct
  REGION 1..7: note = Description of Artificial Sequence: Synthetic peptide
HASSQSK

SEQ ID NO: 2072 - protein, 7 aa, synthetic construct
  REGION 1..7: note = Description of Artificial Sequence: Synthetic peptide
RSHDKAA

SEQ ID NO: 2073 - protein, 7 aa, synthetic construct
  REGION 1..7: note = Description of Artificial Sequence: Synthetic peptide
QKEDRIA

SEQ ID NO: 2074 - protein, 7 aa, synthetic construct
  REGION 1..7: note = Description of Artificial Sequence: Synthetic peptide
VTNTKPQ

SEQ ID NO: 2075 - protein, 7 aa, synthetic construct
  REGION 1..7: note = Description of Artificial Sequence: Synthetic peptide
SGSNKFS

SEQ ID NO: 2076 - protein, 7 aa, synthetic construct
  REGION 1..7: note = Description of Artificial Sequence: Synthetic peptide
VAKSPMT

SEQ ID NO: 2077 - protein, 7 aa, synthetic construct
  REGION 1..7: note = Description of Artificial Sequence: Synthetic peptide
NSSSPTH

SEQ ID NO: 2078 - protein, 7 aa, synthetic construct
  REGION 1..7: note = Description of Artificial Sequence: Synthetic peptide
DSTAKPR

SEQ ID NO: 2079 - protein, 7 aa, synthetic construct
  REGION 1..7: note = Description of Artificial Sequence: Synthetic peptide
NISGSSK

SEQ ID NO: 2080 - protein, 7 aa, synthetic construct
  REGION 1..7: note = Description of Artificial Sequence: Synthetic peptide
TGGGQSL

SEQ ID NO: 2081 - protein, 7 aa, synthetic construct
  REGION 1..7: note = Description of Artificial Sequence: Synthetic peptide
RDGGSSR

SEQ ID NO: 2082 - protein, 7 aa, synthetic construct
  REGION 1..7: note = Description of Artificial Sequence: Synthetic peptide
AGTGKLI

SEQ ID NO: 2083 - protein, 7 aa, synthetic construct
  REGION 1..7: note = Description of Artificial Sequence: Synthetic peptide
ISTDKMK

SEQ ID NO: 2084 - protein, 7 aa, synthetic construct
  REGION 1..7: note = Description of Artificial Sequence: Synthetic peptide
MSSGKNL

SEQ ID NO: 2085 - protein, 7 aa, synthetic construct
  REGION 1..7: note = Description of Artificial Sequence: Synthetic peptide
GSGLGGV

SEQ ID NO: 2086 - protein, 7 aa, synthetic construct
  REGION 1..7: note = Description of Artificial Sequence: Synthetic peptide
FGSTKHE

SEQ ID NO: 2087 - protein, 7 aa, synthetic construct
  REGION 1..7: note = Description of Artificial Sequence: Synthetic peptide
SENSKPG

SEQ ID NO: 2088 - protein, 7 aa, synthetic construct
  REGION 1..7: note = Description of Artificial Sequence: Synthetic peptide
ERSTAGV

SEQ ID NO: 2089 - protein, 7 aa, synthetic construct
  REGION 1..7: note = Description of Artificial Sequence: Synthetic peptide
TISGNRE

SEQ ID NO: 2090 - protein, 7 aa, synthetic construct
  REGION 1..7: note = Description of Artificial Sequence: Synthetic peptide
TGNSSTM

SEQ ID NO: 2091 - protein, 7 aa, synthetic construct
  REGION 1..7: note = Description of Artificial Sequence: Synthetic peptide
MGGQVPA

SEQ ID NO: 2092 - protein, 7 aa, synthetic construct
  REGION 1..7: note = Description of Artificial Sequence: Synthetic peptide
QSLKPVS

SEQ ID NO: 2093 - protein, 7 aa, synthetic construct
  REGION 1..7: note = Description of Artificial Sequence: Synthetic peptide
QNDSRTS

SEQ ID NO: 2094 - protein, 7 aa, synthetic construct
  REGION 1..7: note = Description of Artificial Sequence: Synthetic peptide
HVKTSPG

SEQ ID NO: 2095 - protein, 7 aa, synthetic construct
  REGION 1..7: note = Description of Artificial Sequence: Synthetic peptide
LTNKPVS

SEQ ID NO: 2096 - protein, 7 aa, synthetic construct
  REGION 1..7: note = Description of Artificial Sequence: Synthetic peptide
DSGKQSS

SEQ ID NO: 2097 - protein, 7 aa, synthetic construct
  REGION 1..7: note = Description of Artificial Sequence: Synthetic peptide
ERGDGGR

SEQ ID NO: 2098 - protein, 7 aa, synthetic construct
  REGION 1..7: note = Description of Artificial Sequence: Synthetic peptide
GNASKGG

SEQ ID NO: 2099 - protein, 7 aa, synthetic construct
  REGION 1..7: note = Description of Artificial Sequence: Synthetic peptide
VASGSSG

SEQ ID NO: 2100 - protein, 7 aa, synthetic construct
  REGION 1..7: note = Description of Artificial Sequence: Synthetic peptide
TGIGTPK

SEQ ID NO: 2101 - protein, 7 aa, synthetic construct
  REGION 1..7: note = Description of Artificial Sequence: Synthetic peptide
SRAPSSA

SEQ ID NO: 2102 - protein, 7 aa, synthetic construct
  REGION 1..7: note = Description of Artificial Sequence: Synthetic peptide
TSRGTQA

SEQ ID NO: 2103 - protein, 7 aa, synthetic construct
  REGION 1..7: note = Description of Artificial Sequence: Synthetic peptide
KRENTAV

SEQ ID NO: 2104 - protein, 7 aa, synthetic construct
  REGION 1..7: note = Description of Artificial Sequence: Synthetic peptide
AGTSSIS

SEQ ID NO: 2105 - protein, 7 aa, synthetic construct
  REGION 1..7: note = Description of Artificial Sequence: Synthetic peptide
STSRSNT

SEQ ID NO: 2106 - protein, 7 aa, synthetic construct
  REGION 1..7: note = Description of Artificial Sequence: Synthetic peptide
TSAVKTN

SEQ ID NO: 2107 - protein, 7 aa, synthetic construct
  REGION 1..7: note = Description of Artificial Sequence: Synthetic peptide
QRSPDQK

SEQ ID NO: 2108 - protein, 7 aa, synthetic construct
  REGION 1..7: note = Description of Artificial Sequence: Synthetic peptide
QIGGTGS

SEQ ID NO: 2109 - protein, 7 aa, synthetic construct
  REGION 1..7: note = Description of Artificial Sequence: Synthetic peptide
REGTHNS

SEQ ID NO: 2110 - protein, 7 aa, synthetic construct
  REGION 1..7: note = Description of Artificial Sequence: Synthetic peptide
QSSPKVS

SEQ ID NO: 2111 - protein, 7 aa, synthetic construct
  REGION 1..7: note = Description of Artificial Sequence: Synthetic peptide
VQGKPSQ

SEQ ID NO: 2112 - protein, 7 aa, synthetic construct
  REGION 1..7: note = Description of Artificial Sequence: Synthetic peptide
NSSNNGS

SEQ ID NO: 2113 - protein, 7 aa, synthetic construct
  REGION 1..7: note = Description of Artificial Sequence: Synthetic peptide
VQSKGSM

SEQ ID NO: 2114 - protein, 7 aa, synthetic construct
  REGION 1..7: note = Description of Artificial Sequence: Synthetic peptide
TNDSRSH

SEQ ID NO: 2115 - protein, 7 aa, synthetic construct
  REGION 1..7: note = Description of Artificial Sequence: Synthetic peptide
LSTKSNV

SEQ ID NO: 2116 - protein, 7 aa, synthetic construct
  REGION 1..7: note = Description of Artificial Sequence: Synthetic peptide
AQNTVGR

SEQ ID NO: 2117 - protein, 7 aa, synthetic construct
  REGION 1..7: note = Description of Artificial Sequence: Synthetic peptide
GMNSSSK

SEQ ID NO: 2118 - protein, 7 aa, synthetic construct
  REGION 1..7: note = Description of Artificial Sequence: Synthetic peptide
SSVTKSA

SEQ ID NO: 2119 - protein, 7 aa, synthetic construct
  REGION 1..7: note = Description of Artificial Sequence: Synthetic peptide
SHTSKAS

SEQ ID NO: 2120 - protein, 7 aa, synthetic construct
  REGION 1..7: note = Description of Artificial Sequence: Synthetic peptide
GTTSPTT

SEQ ID NO: 2121 - protein, 7 aa, synthetic construct
  REGION 1..7: note = Description of Artificial Sequence: Synthetic peptide
SMVSDSK

SEQ ID NO: 2122 - protein, 7 aa, synthetic construct
  REGION 1..7: note = Description of Artificial Sequence: Synthetic peptide
GTKSALG

SEQ ID NO: 2123 - protein, 7 aa, synthetic construct
  REGION 1..7: note = Description of Artificial Sequence: Synthetic peptide
KMGSASS

SEQ ID NO: 2124 - protein, 7 aa, synthetic construct
  REGION 1..7: note = Description of Artificial Sequence: Synthetic peptide
ITSGKQE

SEQ ID NO: 2125 - protein, 7 aa, synthetic construct
  REGION 1..7: note = Description of Artificial Sequence: Synthetic peptide
DASRAPS

SEQ ID NO: 2126 - protein, 7 aa, synthetic construct
  REGION 1..7: note = Description of Artificial Sequence: Synthetic peptide
GINTGNG

SEQ ID NO: 2127 - protein, 7 aa, synthetic construct
  REGION 1..7: note = Description of Artificial Sequence: Synthetic peptide
VRTGTPN

SEQ ID NO: 2128 - protein, 7 aa, synthetic construct
  REGION 1..7: note = Description of Artificial Sequence: Synthetic peptide
SVGQKPL

SEQ ID NO: 2129 - protein, 7 aa, synthetic construct
  REGION 1..7: note = Description of Artificial Sequence: Synthetic peptide
SPARAAV

SEQ ID NO: 2130 - protein, 7 aa, synthetic construct
  REGION 1..7: note = Description of Artificial Sequence: Synthetic peptide
AVGSPTQ

SEQ ID NO: 2131 - protein, 7 aa, synthetic construct
  REGION 1..7: note = Description of Artificial Sequence: Synthetic peptide
EAKVKPD

SEQ ID NO: 2132 - protein, 7 aa, synthetic construct
  REGION 1..7: note = Description of Artificial Sequence: Synthetic peptide
HTGSGQA

SEQ ID NO: 2133 - protein, 7 aa, synthetic construct
  REGION 1..7: note = Description of Artificial Sequence: Synthetic peptide
APSKSHE

SEQ ID NO: 2134 - protein, 7 aa, synthetic construct
  REGION 1..7: note = Description of Artificial Sequence: Synthetic peptide
GSNGAGP

SEQ ID NO: 2135 - protein, 7 aa, synthetic construct
  REGION 1..7: note = Description of Artificial Sequence: Synthetic peptide
GQTLGGK

SEQ ID NO: 2136 - protein, 7 aa, synthetic construct
  REGION 1..7: note = Description of Artificial Sequence: Synthetic peptide
LRTEHTQ

SEQ ID NO: 2137 - protein, 7 aa, synthetic construct
  REGION 1..7: note = Description of Artificial Sequence: Synthetic peptide
TKNASAV

SEQ ID NO: 2138 - protein, 7 aa, synthetic construct
  REGION 1..7: note = Description of Artificial Sequence: Synthetic peptide
TSGGSFI

SEQ ID NO: 2139 - protein, 7 aa, synthetic construct
  REGION 1..7: note = Description of Artificial Sequence: Synthetic peptide
MRSDSQL

SEQ ID NO: 2140 - protein, 7 aa, synthetic construct
  REGION 1..7: note = Description of Artificial Sequence: Synthetic peptide
NGERQTH

SEQ ID NO: 2141 - protein, 7 aa, synthetic construct
  REGION 1..7: note = Description of Artificial Sequence: Synthetic peptide
STGKITT

SEQ ID NO: 2142 - protein, 7 aa, synthetic construct
  REGION 1..7: note = Description of Artificial Sequence: Synthetic peptide
SSQAVGQ

SEQ ID NO: 2143 - protein, 7 aa, synthetic construct
  REGION 1..7: note = Description of Artificial Sequence: Synthetic peptide
QQVSKPV

SEQ ID NO: 2144 - protein, 7 aa, synthetic construct
  REGION 1..7: note = Description of Artificial Sequence: Synthetic peptide
HSSNATR

SEQ ID NO: 2145 - protein, 7 aa, synthetic construct
  REGION 1..7: note = Description of Artificial Sequence: Synthetic peptide
SSPGTVV

SEQ ID NO: 2146 - protein, 7 aa, synthetic construct
  REGION 1..7: note = Description of Artificial Sequence: Synthetic peptide
NDSADRR

SEQ ID NO: 2147 - protein, 7 aa, synthetic construct
  REGION 1..7: note = Description of Artificial Sequence: Synthetic peptide
GRDTSSS

SEQ ID NO: 2148 - protein, 7 aa, synthetic construct
  REGION 1..7: note = Description of Artificial Sequence: Synthetic peptide
QQAGKVA

SEQ ID NO: 2149 - protein, 7 aa, synthetic construct
  REGION 1..7: note = Description of Artificial Sequence: Synthetic peptide
SSEAKQS

SEQ ID NO: 2150 - protein, 7 aa, synthetic construct
  REGION 1..7: note = Description of Artificial Sequence: Synthetic peptide
QTGKSSY

SEQ ID NO: 2151 - protein, 7 aa, synthetic construct
  REGION 1..7: note = Description of Artificial Sequence: Synthetic peptide
QATSTRL

SEQ ID NO: 2152 - protein, 7 aa, synthetic construct
  REGION 1..7: note = Description of Artificial Sequence: Synthetic peptide
EKNNALS

SEQ ID NO: 2153 - protein, 7 aa, synthetic construct
  REGION 1..7: note = Description of Artificial Sequence: Synthetic peptide
GNARDNT

SEQ ID NO: 2154 - protein, 7 aa, synthetic construct
  REGION 1..7: note = Description of Artificial Sequence: Synthetic peptide
GTGARTS

SEQ ID NO: 2155 - protein, 7 aa, synthetic construct
  REGION 1..7: note = Description of Artificial Sequence: Synthetic peptide
QTSTPLV

SEQ ID NO: 2156 - protein, 7 aa, synthetic construct
  REGION 1..7: note = Description of Artificial Sequence: Synthetic peptide
MGGKLNG

SEQ ID NO: 2157 - protein, 7 aa, synthetic construct
  REGION 1..7: note = Description of Artificial Sequence: Synthetic peptide
GSGDMRS

SEQ ID NO: 2158 - protein, 7 aa, synthetic construct
  REGION 1..7: note = Description of Artificial Sequence: Synthetic peptide
REESRSL

SEQ ID NO: 2159 - protein, 7 aa, synthetic construct
  REGION 1..7: note = Description of Artificial Sequence: Synthetic peptide
LSDKKVL

SEQ ID NO: 2160 - protein, 7 aa, synthetic construct
  REGION 1..7: note = Description of Artificial Sequence: Synthetic peptide
ATKTSPE

SEQ ID NO: 2161 - protein, 7 aa, synthetic construct
  REGION 1..7: note = Description of Artificial Sequence: Synthetic peptide
TRSTGTA

SEQ ID NO: 2162 - protein, 7 aa, synthetic construct
  REGION 1..7: note = Description of Artificial Sequence: Synthetic peptide
STARDVN

SEQ ID NO: 2163 - protein, 7 aa, synthetic construct
  REGION 1..7: note = Description of Artificial Sequence: Synthetic peptide
MGSGKAN

SEQ ID NO: 2164 - protein, 7 aa, synthetic construct
  REGION 1..7: note = Description of Artificial Sequence: Synthetic peptide
GGSGDRV

SEQ ID NO: 2165 - protein, 7 aa, synthetic construct
  REGION 1..7: note = Description of Artificial Sequence: Synthetic peptide
SNERSHA

SEQ ID NO: 2166 - protein, 7 aa, synthetic construct
  REGION 1..7: note = Description of Artificial Sequence: Synthetic peptide
TSSRSTQ

SEQ ID NO: 2167 - protein, 7 aa, synthetic construct
  REGION 1..7: note = Description of Artificial Sequence: Synthetic peptide
NGNTVSG

SEQ ID NO: 2168 - protein, 7 aa, synthetic construct
  REGION 1..7: note = Description of Artificial Sequence: Synthetic peptide
NAGKSAY

SEQ ID NO: 2169 - protein, 7 aa, synthetic construct
  REGION 1..7: note = Description of Artificial Sequence: Synthetic peptide
EDNSKSA

SEQ ID NO: 2170 - protein, 7 aa, synthetic construct
  REGION 1..7: note = Description of Artificial Sequence: Synthetic peptide
DVISNPK

SEQ ID NO: 2171 - protein, 7 aa, synthetic construct
  REGION 1..7: note = Description of Artificial Sequence: Synthetic peptide
DGMSKHV

SEQ ID NO: 2172 - protein, 7 aa, synthetic construct
  REGION 1..7: note = Description of Artificial Sequence: Synthetic peptide
NLSSSNK

SEQ ID NO: 2173 - protein, 7 aa, synthetic construct
  REGION 1..7: note = Description of Artificial Sequence: Synthetic peptide
AGGSAFK

SEQ ID NO: 2174 - protein, 7 aa, synthetic construct
  REGION 1..7: note = Description of Artificial Sequence: Synthetic peptide
SDNAKPR

SEQ ID NO: 2175 - protein, 7 aa, synthetic construct
  REGION 1..7: note = Description of Artificial Sequence: Synthetic peptide
SRTSQGV

SEQ ID NO: 2176 - protein, 7 aa, synthetic construct
  REGION 1..7: note = Description of Artificial Sequence: Synthetic peptide
SAATSAS

SEQ ID NO: 2177 - protein, 7 aa, synthetic construct
  REGION 1..7: note = Description of Artificial Sequence: Synthetic peptide
LSDKSAR

SEQ ID NO: 2178 - protein, 7 aa, synthetic construct
  REGION 1..7: note = Description of Artificial Sequence: Synthetic peptide
GRTDSSR

SEQ ID NO: 2179 - protein, 7 aa, synthetic construct
  REGION 1..7: note = Description of Artificial Sequence: Synthetic peptide
YNDAASR

SEQ ID NO: 2180 - protein, 7 aa, synthetic construct
  REGION 1..7: note = Description of Artificial Sequence: Synthetic peptide
AGATSIA

SEQ ID NO: 2181 - protein, 7 aa, synthetic construct
  REGION 1..7: note = Description of Artificial Sequence: Synthetic peptide
SHSSSSL

SEQ ID NO: 2182 - protein, 7 aa, synthetic construct
  REGION 1..7: note = Description of Artificial Sequence: Synthetic peptide
SGRETGK

SEQ ID NO: 2183 - protein, 7 aa, synthetic construct
  REGION 1..7: note = Description of Artificial Sequence: Synthetic peptide
QGAHTTH

SEQ ID NO: 2184 - protein, 7 aa, synthetic construct
  REGION 1..7: note = Description of Artificial Sequence: Synthetic peptide
SGRSQSN

SEQ ID NO: 2185 - protein, 7 aa, synthetic construct
  REGION 1..7: note = Description of Artificial Sequence: Synthetic peptide
QGSNKVE

SEQ ID NO: 2186 - protein, 7 aa, synthetic construct
  REGION 1..7: note = Description of Artificial Sequence: Synthetic peptide
ESAGPGK

SEQ ID NO: 2187 - protein, 7 aa, synthetic construct
  REGION 1..7: note = Description of Artificial Sequence: Synthetic peptide
GDRQTPK

SEQ ID NO: 2188 - protein, 7 aa, synthetic construct
  REGION 1..7: note = Description of Artificial Sequence: Synthetic peptide
TSSTSHS

SEQ ID NO: 2189 - protein, 7 aa, synthetic construct
  REGION 1..7: note = Description of Artificial Sequence: Synthetic peptide
TQPGKAM

SEQ ID NO: 2190 - protein, 7 aa, synthetic construct
  REGION 1..7: note = Description of Artificial Sequence: Synthetic peptide
AQSGTHT

SEQ ID NO: 2191 - protein, 7 aa, synthetic construct
  REGION 1..7: note = Description of Artificial Sequence: Synthetic peptide
SASDRKS

SEQ ID NO: 2192 - protein, 7 aa, synthetic construct
  REGION 1..7: note = Description of Artificial Sequence: Synthetic peptide
FAGKVQA

SEQ ID NO: 2193 - protein, 7 aa, synthetic construct
  REGION 1..7: note = Description of Artificial Sequence: Synthetic peptide
NHESKER

SEQ ID NO: 2194 - protein, 7 aa, synthetic construct
  REGION 1..7: note = Description of Artificial Sequence: Synthetic peptide
SAGRTAA

SEQ ID NO: 2195 - protein, 7 aa, synthetic construct
  REGION 1..7: note = Description of Artificial Sequence: Synthetic peptide
GIKGQQS

SEQ ID NO: 2196 - protein, 7 aa, synthetic construct
  REGION 1..7: note = Description of Artificial Sequence: Synthetic peptide
VAHDKVL

SEQ ID NO: 2197 - protein, 7 aa, synthetic construct
  REGION 1..7: note = Description of Artificial Sequence: Synthetic peptide
ASSGTRS

SEQ ID NO: 2198 - protein, 7 aa, synthetic construct
  REGION 1..7: note = Description of Artificial Sequence: Synthetic peptide
SGRDKLM

SEQ ID NO: 2199 - protein, 7 aa, synthetic construct
  REGION 1..7: note = Description of Artificial Sequence: Synthetic peptide
AGVKSNI

SEQ ID NO: 2200 - protein, 7 aa, synthetic construct
  REGION 1..7: note = Description of Artificial Sequence: Synthetic peptide
HTSKVSV

SEQ ID NO: 2201 - protein, 7 aa, synthetic construct
  REGION 1..7: note = Description of Artificial Sequence: Synthetic peptide
QGNKPIV

SEQ ID NO: 2202 - protein, 7 aa, synthetic construct
  REGION 1..7: note = Description of Artificial Sequence: Synthetic peptide
LVTKTQA

SEQ ID NO: 2203 - protein, 7 aa, synthetic construct
  REGION 1..7: note = Description of Artificial Sequence: Synthetic peptide
NRTSSTN

SEQ ID NO: 2204 - protein, 7 aa, synthetic construct
  REGION 1..7: note = Description of Artificial Sequence: Synthetic peptide
TRNTAVS

SEQ ID NO: 2205 - protein, 7 aa, synthetic construct
  REGION 1..7: note = Description of Artificial Sequence: Synthetic peptide
SQEGRGS

SEQ ID NO: 2206 - protein, 7 aa, synthetic construct
  REGION 1..7: note = Description of Artificial Sequence: Synthetic peptide
QSAGSTS

SEQ ID NO: 2207 - protein, 7 aa, synthetic construct
  REGION 1..7: note = Description of Artificial Sequence: Synthetic peptide
EGSRSIT

SEQ ID NO: 2208 - protein, 7 aa, synthetic construct
  REGION 1..7: note = Description of Artificial Sequence: Synthetic peptide
DRSTKPV

SEQ ID NO: 2209 - protein, 7 aa, synthetic construct
  REGION 1..7: note = Description of Artificial Sequence: Synthetic peptide
SGKGNVA

SEQ ID NO: 2210 - protein, 7 aa, synthetic construct
  REGION 1..7: note = Description of Artificial Sequence: Synthetic peptide
NSAPNGK

SEQ ID NO: 2211 - protein, 7 aa, synthetic construct
  REGION 1..7: note = Description of Artificial Sequence: Synthetic peptide
KADSSTK

SEQ ID NO: 2212 - protein, 7 aa, synthetic construct
  REGION 1..7: note = Description of Artificial Sequence: Synthetic peptide
TSVGKTT

SEQ ID NO: 2213 - protein, 7 aa, synthetic construct
  REGION 1..7: note = Description of Artificial Sequence: Synthetic peptide
SPSKPQE

SEQ ID NO: 2214 - protein, 7 aa, synthetic construct
  REGION 1..7: note = Description of Artificial Sequence: Synthetic peptide
MTSKSAE

SEQ ID NO: 2215 - protein, 7 aa, synthetic construct
  REGION 1..7: note = Description of Artificial Sequence: Synthetic peptide
HDKPTQG

SEQ ID NO: 2216 - protein, 7 aa, synthetic construct
  REGION 1..7: note = Description of Artificial Sequence: Synthetic peptide
ENSKGNL

SEQ ID NO: 2217 - protein, 7 aa, synthetic construct
  REGION 1..7: note = Description of Artificial Sequence: Synthetic peptide
DVRDVNR

SEQ ID NO: 2218 - protein, 7 aa, synthetic construct
  REGION 1..7: note = Description of Artificial Sequence: Synthetic peptide
ERGQHQT

SEQ ID NO: 2219 - protein, 7 aa, synthetic construct
  REGION 1..7: note = Description of Artificial Sequence: Synthetic peptide
ANKQPTL

SEQ ID NO: 2220 - protein, 7 aa, synthetic construct
  REGION 1..7: note = Description of Artificial Sequence: Synthetic peptide
GASKTLV

SEQ ID NO: 2221 - protein, 7 aa, synthetic construct
  REGION 1..7: note = Description of Artificial Sequence: Synthetic peptide
GDGKSPK

SEQ ID NO: 2222 - protein, 7 aa, synthetic construct
  REGION 1..7: note = Description of Artificial Sequence: Synthetic peptide
VGQKSSS

SEQ ID NO: 2223 - protein, 7 aa, synthetic construct
  REGION 1..7: note = Description of Artificial Sequence: Synthetic peptide
TSSTNMT

SEQ ID NO: 2224 - protein, 7 aa, synthetic construct
  REGION 1..7: note = Description of Artificial Sequence: Synthetic peptide
LTNKATT

SEQ ID NO: 2225 - protein, 7 aa, synthetic construct
  REGION 1..7: note = Description of Artificial Sequence: Synthetic peptide
VPDSKSM

SEQ ID NO: 2226 - protein, 7 aa, synthetic construct
  REGION 1..7: note = Description of Artificial Sequence: Synthetic peptide
QNSAAVT

SEQ ID NO: 2227 - protein, 7 aa, synthetic construct
  REGION 1..7: note = Description of Artificial Sequence: Synthetic peptide
TQVGPSK

SEQ ID NO: 2228 - protein, 7 aa, synthetic construct
  REGION 1..7: note = Description of Artificial Sequence: Synthetic peptide
VGLKPSA

SEQ ID NO: 2229 - protein, 7 aa, synthetic construct
  REGION 1..7: note = Description of Artificial Sequence: Synthetic peptide
VGSGAQK

SEQ ID NO: 2230 - protein, 7 aa, synthetic construct
  REGION 1..7: note = Description of Artificial Sequence: Synthetic peptide
HGNPNPR

SEQ ID NO: 2231 - protein, 7 aa, synthetic construct
  REGION 1..7: note = Description of Artificial Sequence: Synthetic peptide
LNGGAAM

SEQ ID NO: 2232 - protein, 7 aa, synthetic construct
  REGION 1..7: note = Description of Artificial Sequence: Synthetic peptide
VSGSTNS

SEQ ID NO: 2233 - protein, 7 aa, synthetic construct
  REGION 1..7: note = Description of Artificial Sequence: Synthetic peptide
ASDRSPQ

SEQ ID NO: 2234 - protein, 7 aa, synthetic construct
  REGION 1..7: note = Description of Artificial Sequence: Synthetic peptide
SNPSREA

SEQ ID NO: 2235 - protein, 7 aa, synthetic construct
  REGION 1..7: note = Description of Artificial Sequence: Synthetic peptide
TLTQKSG

SEQ ID NO: 2236 - protein, 7 aa, synthetic construct
  REGION 1..7: note = Description of Artificial Sequence: Synthetic peptide
VSEKNTR

SEQ ID NO: 2237 - protein, 7 aa, synthetic construct
  REGION 1..7: note = Description of Artificial Sequence: Synthetic peptide
SRGNGNV

SEQ ID NO: 2238 - protein, 7 aa, synthetic construct
  REGION 1..7: note = Description of Artificial Sequence: Synthetic peptide
ASGDSHR

SEQ ID NO: 2239 - protein, 7 aa, synthetic construct
  REGION 1..7: note = Description of Artificial Sequence: Synthetic peptide
MGGKPGK

SEQ ID NO: 2240 - protein, 7 aa, synthetic construct
  REGION 1..7: note = Description of Artificial Sequence: Synthetic peptide
GTSNSAH

SEQ ID NO: 2241 - protein, 7 aa, synthetic construct
  REGION 1..7: note = Description of Artificial Sequence: Synthetic peptide
GKNTVSL

SEQ ID NO: 2242 - protein, 7 aa, synthetic construct
  REGION 1..7: note = Description of Artificial Sequence: Synthetic peptide
SGNGRSS

SEQ ID NO: 2243 - protein, 7 aa, synthetic construct
  REGION 1..7: note = Description of Artificial Sequence: Synthetic peptide
NGSTSTR

SEQ ID NO: 2244 - protein, 7 aa, synthetic construct
  REGION 1..7: note = Description of Artificial Sequence: Synthetic peptide
KSDKSAS

SEQ ID NO: 2245 - protein, 7 aa, synthetic construct
  REGION 1..7: note = Description of Artificial Sequence: Synthetic peptide
ATSKTIS

SEQ ID NO: 2246 - protein, 7 aa, synthetic construct
  REGION 1..7: note = Description of Artificial Sequence: Synthetic peptide
RQSGTAG

SEQ ID NO: 2247 - protein, 7 aa, synthetic construct
  REGION 1..7: note = Description of Artificial Sequence: Synthetic peptide
TRSVGNT

SEQ ID NO: 2248 - protein, 7 aa, synthetic construct
  REGION 1..7: note = Description of Artificial Sequence: Synthetic peptide
QSTQPSH

SEQ ID NO: 2249 - protein, 7 aa, synthetic construct
  REGION 1..7: note = Description of Artificial Sequence: Synthetic peptide
HGGSGAG

SEQ ID NO: 2250 - protein, 7 aa, synthetic construct
  REGION 1..7: note = Description of Artificial Sequence: Synthetic peptide
AKATSSV

SEQ ID NO: 2251 - protein, 7 aa, synthetic construct
  REGION 1..7: note = Description of Artificial Sequence: Synthetic peptide
TTSNVNL

SEQ ID NO: 2252 - protein, 7 aa, synthetic construct
  REGION 1..7: note = Description of Artificial Sequence: Synthetic peptide
SDAKPVT

SEQ ID NO: 2253 - protein, 7 aa, synthetic construct
  REGION 1..7: note = Description of Artificial Sequence: Synthetic peptide
LNSGTIR

SEQ ID NO: 2254 - protein, 7 aa, synthetic construct
  REGION 1..7: note = Description of Artificial Sequence: Synthetic peptide
SGAAAPA

SEQ ID NO: 2255 - protein, 7 aa, synthetic construct
  REGION 1..7: note = Description of Artificial Sequence: Synthetic peptide
SSSSKQL

SEQ ID NO: 2256 - protein, 7 aa, synthetic construct
  REGION 1..7: note = Description of Artificial Sequence: Synthetic peptide
SRNQSNV

SEQ ID NO: 2257 - protein, 7 aa, synthetic construct
  REGION 1..7: note = Description of Artificial Sequence: Synthetic peptide
ATSSSVK

SEQ ID NO: 2258 - protein, 7 aa, synthetic construct
  REGION 1..7: note = Description of Artificial Sequence: Synthetic peptide
TRSGTSG

SEQ ID NO: 2259 - protein, 7 aa, synthetic construct
  REGION 1..7: note = Description of Artificial Sequence: Synthetic peptide
TSLGKPS

SEQ ID NO: 2260 - protein, 7 aa, synthetic construct
  REGION 1..7: note = Description of Artificial Sequence: Synthetic peptide
SSPGKPV

SEQ ID NO: 2261 - protein, 7 aa, synthetic construct
  REGION 1..7: note = Description of Artificial Sequence: Synthetic peptide
SSSGVRS

SEQ ID NO: 2262 - protein, 7 aa, synthetic construct
  REGION 1..7: note = Description of Artificial Sequence: Synthetic peptide
VSSKSAH

SEQ ID NO: 2263 - protein, 7 aa, synthetic construct
  REGION 1..7: note = Description of Artificial Sequence: Synthetic peptide
TGGKDKG

SEQ ID NO: 2264 - protein, 7 aa, synthetic construct
  REGION 1..7: note = Description of Artificial Sequence: Synthetic peptide
GISAKPS

SEQ ID NO: 2265 - protein, 7 aa, synthetic construct
  REGION 1..7: note = Description of Artificial Sequence: Synthetic peptide
NSNTATT

SEQ ID NO: 2266 - protein, 7 aa, synthetic construct
  REGION 1..7: note = Description of Artificial Sequence: Synthetic peptide
TSGAGAP

SEQ ID NO: 2267 - protein, 7 aa, synthetic construct
  REGION 1..7: note = Description of Artificial Sequence: Synthetic peptide
SVSNSQA

SEQ ID NO: 2268 - protein, 7 aa, synthetic construct
  REGION 1..7: note = Description of Artificial Sequence: Synthetic peptide
NMSDKNG

SEQ ID NO: 2269 - protein, 7 aa, synthetic construct
  REGION 1..7: note = Description of Artificial Sequence: Synthetic peptide
RTSGQTG

SEQ ID NO: 2270 - protein, 7 aa, synthetic construct
  REGION 1..7: note = Description of Artificial Sequence: Synthetic peptide
DGRGQSG

SEQ ID NO: 2271 - protein, 7 aa, synthetic construct
  REGION 1..7: note = Description of Artificial Sequence: Synthetic peptide
AQHSGTS

SEQ ID NO: 2272 - protein, 7 aa, synthetic construct
  REGION 1..7: note = Description of Artificial Sequence: Synthetic peptide
STGHNKE

SEQ ID NO: 2273 - protein, 7 aa, synthetic construct
  REGION 1..7: note = Description of Artificial Sequence: Synthetic peptide
GVGVTPK

SEQ ID NO: 2274 - protein, 7 aa, synthetic construct
  REGION 1..7: note = Description of Artificial Sequence: Synthetic peptide
TSDRSSM

SEQ ID NO: 2275 - protein, 7 aa, synthetic construct
  REGION 1..7: note = Description of Artificial Sequence: Synthetic peptide
RGNGQSA

SEQ ID NO: 2276 - protein, 7 aa, synthetic construct
  REGION 1..7: note = Description of Artificial Sequence: Synthetic peptide
ALGSTSK

SEQ ID NO: 2277 - protein, 7 aa, synthetic construct
  REGION 1..7: note = Description of Artificial Sequence: Synthetic peptide
FSGGKGP

SEQ ID NO: 2278 - protein, 7 aa, synthetic construct
  REGION 1..7: note = Description of Artificial Sequence: Synthetic peptide
SVSERPS

SEQ ID NO: 2279 - protein, 7 aa, synthetic construct
  REGION 1..7: note = Description of Artificial Sequence: Synthetic peptide
GSREHQA

SEQ ID NO: 2280 - protein, 7 aa, synthetic construct
  REGION 1..7: note = Description of Artificial Sequence: Synthetic peptide
GTNSKHN

SEQ ID NO: 2281 - protein, 7 aa, synthetic construct
  REGION 1..7: note = Description of Artificial Sequence: Synthetic peptide
LTASPSK

SEQ ID NO: 2282 - protein, 7 aa, synthetic construct
  REGION 1..7: note = Description of Artificial Sequence: Synthetic peptide
DGKNKPM

SEQ ID NO: 2283 - protein, 7 aa, synthetic construct
  REGION 1..7: note = Description of Artificial Sequence: Synthetic peptide
AATQPTS

SEQ ID NO: 2284 - protein, 7 aa, synthetic construct
  REGION 1..7: note = Description of Artificial Sequence: Synthetic peptide
GGNSKMV

SEQ ID NO: 2285 - protein, 7 aa, synthetic construct
  REGION 1..7: note = Description of Artificial Sequence: Synthetic peptide
AVNKNIG

SEQ ID NO: 2286 - protein, 7 aa, synthetic construct
  REGION 1..7: note = Description of Artificial Sequence: Synthetic peptide
THAVKPA

SEQ ID NO: 2287 - protein, 7 aa, synthetic construct
  REGION 1..7: note = Description of Artificial Sequence: Synthetic peptide
HTSDRSS

SEQ ID NO: 2288 - protein, 7 aa, synthetic construct
  REGION 1..7: note = Description of Artificial Sequence: Synthetic peptide
GSSPTLR

SEQ ID NO: 2289 - protein, 7 aa, synthetic construct
  REGION 1..7: note = Description of Artificial Sequence: Synthetic peptide
LQPGKPQ

SEQ ID NO: 2290 - protein, 7 aa, synthetic construct
  REGION 1..7: note = Description of Artificial Sequence: Synthetic peptide
STSRPVT

SEQ ID NO: 2291 - protein, 7 aa, synthetic construct
  REGION 1..7: note = Description of Artificial Sequence: Synthetic peptide
AMRSPTS

SEQ ID NO: 2292 - protein, 7 aa, synthetic construct
  REGION 1..7: note = Description of Artificial Sequence: Synthetic peptide
NGSRDSR

SEQ ID NO: 2293 - protein, 7 aa, synthetic construct
  REGION 1..7: note = Description of Artificial Sequence: Synthetic peptide
SSAQGSK

SEQ ID NO: 2294 - protein, 7 aa, synthetic construct
  REGION 1..7: note = Description of Artificial Sequence: Synthetic peptide
SANSATR

SEQ ID NO: 2295 - protein, 7 aa, synthetic construct
  REGION 1..7: note = Description of Artificial Sequence: Synthetic peptide
SNGGQRA

SEQ ID NO: 2296 - protein, 7 aa, synthetic construct
  REGION 1..7: note = Description of Artificial Sequence: Synthetic peptide
GSSSKGV

SEQ ID NO: 2297 - protein, 7 aa, synthetic construct
  REGION 1..7: note = Description of Artificial Sequence: Synthetic peptide
VVSKGNM

SEQ ID NO: 2298 - protein, 7 aa, synthetic construct
  REGION 1..7: note = Description of Artificial Sequence: Synthetic peptide
DNGNKLY

SEQ ID NO: 2299 - protein, 7 aa, synthetic construct
  REGION 1..7: note = Description of Artificial Sequence: Synthetic peptide
DRAQTVR

SEQ ID NO: 2300 - protein, 7 aa, synthetic construct
  REGION 1..7: note = Description of Artificial Sequence: Synthetic peptide
SHNSSHT

SEQ ID NO: 2301 - protein, 7 aa, synthetic construct
  REGION 1..7: note = Description of Artificial Sequence: Synthetic peptide
HKNSQQL

SEQ ID NO: 2302 - protein, 7 aa, synthetic construct
  REGION 1..7: note = Description of Artificial Sequence: Synthetic peptide
STSNKAS

SEQ ID NO: 2303 - protein, 7 aa, synthetic construct
  REGION 1..7: note = Description of Artificial Sequence: Synthetic peptide
SASNKPH

SEQ ID NO: 2304 - protein, 7 aa, synthetic construct
  REGION 1..7: note = Description of Artificial Sequence: Synthetic peptide
AAKGSPP

SEQ ID NO: 2305 - protein, 7 aa, synthetic construct
  REGION 1..7: note = Description of Artificial Sequence: Synthetic peptide
DTGSGRG

SEQ ID NO: 2306 - protein, 7 aa, synthetic construct
  REGION 1..7: note = Description of Artificial Sequence: Synthetic peptide
QAGTGIT

SEQ ID NO: 2307 - protein, 7 aa, synthetic construct
  REGION 1..7: note = Description of Artificial Sequence: Synthetic peptide
LGVSSPG

SEQ ID NO: 2308 - protein, 7 aa, synthetic construct
  REGION 1..7: note = Description of Artificial Sequence: Synthetic peptide
EPVRSPT

SEQ ID NO: 2309 - protein, 7 aa, synthetic construct
  REGION 1..7: note = Description of Artificial Sequence: Synthetic peptide
TQTQKTF

SEQ ID NO: 2310 - protein, 7 aa, synthetic construct
  REGION 1..7: note = Description of Artificial Sequence: Synthetic peptide
STKSTAS

SEQ ID NO: 2311 - protein, 7 aa, synthetic construct
  REGION 1..7: note = Description of Artificial Sequence: Synthetic peptide
LVNSKNS

SEQ ID NO: 2312 - protein, 7 aa, synthetic construct
  REGION 1..7: note = Description of Artificial Sequence: Synthetic peptide
SRSTKAE

SEQ ID NO: 2313 - protein, 7 aa, synthetic construct
  REGION 1..7: note = Description of Artificial Sequence: Synthetic peptide
NNSVKPI

SEQ ID NO: 2314 - protein, 7 aa, synthetic construct
  REGION 1..7: note = Description of Artificial Sequence: Synthetic peptide
NSNKSPS

SEQ ID NO: 2315 - protein, 7 aa, synthetic construct
  REGION 1..7: note = Description of Artificial Sequence: Synthetic peptide
TGASKPA

SEQ ID NO: 2316 - protein, 7 aa, synthetic construct
  REGION 1..7: note = Description of Artificial Sequence: Synthetic peptide
SPMTPHV

SEQ ID NO: 2317 - protein, 7 aa, synthetic construct
  REGION 1..7: note = Description of Artificial Sequence: Synthetic peptide
TPVPSGG

SEQ ID NO: 2318 - protein, 7 aa, synthetic construct
  REGION 1..7: note = Description of Artificial Sequence: Synthetic peptide
TAQSPVG

SEQ ID NO: 2319 - protein, 7 aa, synthetic construct
  REGION 1..7: note = Description of Artificial Sequence: Synthetic peptide
TGLKGEK

SEQ ID NO: 2320 - protein, 7 aa, synthetic construct
  REGION 1..7: note = Description of Artificial Sequence: Synthetic peptide
RSKTDTN

SEQ ID NO: 2321 - protein, 7 aa, synthetic construct
  REGION 1..7: note = Description of Artificial Sequence: Synthetic peptide
QATSKVD

SEQ ID NO: 2322 - protein, 7 aa, synthetic construct
  REGION 1..7: note = Description of Artificial Sequence: Synthetic peptide
RSEGKAQ

SEQ ID NO: 2323 - protein, 7 aa, synthetic construct
  REGION 1..7: note = Description of Artificial Sequence: Synthetic peptide
EASKGIS

SEQ ID NO: 2324 - protein, 7 aa, synthetic construct
  REGION 1..7: note = Description of Artificial Sequence: Synthetic peptide
DRADRTV

SEQ ID NO: 2325 - protein, 7 aa, synthetic construct
  REGION 1..7: note = Description of Artificial Sequence: Synthetic peptide
ATSPNNH

SEQ ID NO: 2326 - protein, 7 aa, synthetic construct
  REGION 1..7: note = Description of Artificial Sequence: Synthetic peptide
TTNNDRH

SEQ ID NO: 2327 - protein, 7 aa, synthetic construct
  REGION 1..7: note = Description of Artificial Sequence: Synthetic peptide
STTVKPN

SEQ ID NO: 2328 - protein, 7 aa, synthetic construct
  REGION 1..7: note = Description of Artificial Sequence: Synthetic peptide
RNSSPTT

SEQ ID NO: 2329 - protein, 7 aa, synthetic construct
  REGION 1..7: note = Description of Artificial Sequence: Synthetic peptide
SPSPTLV

SEQ ID NO: 2330 - protein, 7 aa, synthetic construct
  REGION 1..7: note = Description of Artificial Sequence: Synthetic peptide
NMASNAK

SEQ ID NO: 2331 - protein, 7 aa, synthetic construct
  REGION 1..7: note = Description of Artificial Sequence: Synthetic peptide
TKNSKTS

SEQ ID NO: 2332 - protein, 7 aa, synthetic construct
  REGION 1..7: note = Description of Artificial Sequence: Synthetic peptide
HSGQKTP

SEQ ID NO: 2333 - protein, 7 aa, synthetic construct
  REGION 1..7: note = Description of Artificial Sequence: Synthetic peptide
GSQAPVR

SEQ ID NO: 2334 - protein, 7 aa, synthetic construct
  REGION 1..7: note = Description of Artificial Sequence: Synthetic peptide
GDSRPIS

SEQ ID NO: 2335 - protein, 7 aa, synthetic construct
  REGION 1..7: note = Description of Artificial Sequence: Synthetic peptide
LTNKAVI

SEQ ID NO: 2336 - protein, 7 aa, synthetic construct
  REGION 1..7: note = Description of Artificial Sequence: Synthetic peptide
GVNKVTS

SEQ ID NO: 2337 - protein, 7 aa, synthetic construct
  REGION 1..7: note = Description of Artificial Sequence: Synthetic peptide
VGSGTPL

SEQ ID NO: 2338 - protein, 7 aa, synthetic construct
  REGION 1..7: note = Description of Artificial Sequence: Synthetic peptide
SGGTTVL

SEQ ID NO: 2339 - protein, 7 aa, synthetic construct
  REGION 1..7: note = Description of Artificial Sequence: Synthetic peptide
ERPSSAS

SEQ ID NO: 2340 - protein, 7 aa, synthetic construct
  REGION 1..7: note = Description of Artificial Sequence: Synthetic peptide
DGREAIR

SEQ ID NO: 2341 - protein, 7 aa, synthetic construct
  REGION 1..7: note = Description of Artificial Sequence: Synthetic peptide
STQGAAT

SEQ ID NO: 2342 - protein, 7 aa, synthetic construct
  REGION 1..7: note = Description of Artificial Sequence: Synthetic peptide
SSHGSSG

SEQ ID NO: 2343 - protein, 7 aa, synthetic construct
  REGION 1..7: note = Description of Artificial Sequence: Synthetic peptide
VGTSKFQ

SEQ ID NO: 2344 - protein, 7 aa, synthetic construct
  REGION 1..7: note = Description of Artificial Sequence: Synthetic peptide
HGSPKPS

SEQ ID NO: 2345 - protein, 7 aa, synthetic construct
  REGION 1..7: note = Description of Artificial Sequence: Synthetic peptide
KSGAGNS

SEQ ID NO: 2346 - protein, 7 aa, synthetic construct
  REGION 1..7: note = Description of Artificial Sequence: Synthetic peptide
TNDNPKH

SEQ ID NO: 2347 - protein, 7 aa, synthetic construct
  REGION 1..7: note = Description of Artificial Sequence: Synthetic peptide
LGSGNQH

SEQ ID NO: 2348 - protein, 7 aa, synthetic construct
  REGION 1..7: note = Description of Artificial Sequence: Synthetic peptide
DGSHSTS

SEQ ID NO: 2349 - protein, 7 aa, synthetic construct
  REGION 1..7: note = Description of Artificial Sequence: Synthetic peptide
GQAGKVK

SEQ ID NO: 2350 - protein, 7 aa, synthetic construct
  REGION 1..7: note = Description of Artificial Sequence: Synthetic peptide
SLTKSTE

SEQ ID NO: 2351 - protein, 7 aa, synthetic construct
  REGION 1..7: note = Description of Artificial Sequence: Synthetic peptide
TTHSKQN

SEQ ID NO: 2352 - protein, 7 aa, synthetic construct
  REGION 1..7: note = Description of Artificial Sequence: Synthetic peptide
GTKAPSS

SEQ ID NO: 2353 - protein, 7 aa, synthetic construct
  REGION 1..7: note = Description of Artificial Sequence: Synthetic peptide
NPVGQKS

SEQ ID NO: 2354 - protein, 7 aa, synthetic construct
  REGION 1..7: note = Description of Artificial Sequence: Synthetic peptide
SASNSTA

SEQ ID NO: 2355 - protein, 7 aa, synthetic construct
  REGION 1..7: note = Description of Artificial Sequence: Synthetic peptide
LGSKANE

SEQ ID NO: 2356 - protein, 7 aa, synthetic construct
  REGION 1..7: note = Description of Artificial Sequence: Synthetic peptide
AATGSQG

SEQ ID NO: 2357 - protein, 7 aa, synthetic construct
  REGION 1..7: note = Description of Artificial Sequence: Synthetic peptide
GPDKSNR

SEQ ID NO: 2358 - protein, 7 aa, synthetic construct
  REGION 1..7: note = Description of Artificial Sequence: Synthetic peptide
SSGSQNS

SEQ ID NO: 2359 - protein, 7 aa, synthetic construct
  REGION 1..7: note = Description of Artificial Sequence: Synthetic peptide
HGGSSNS

SEQ ID NO: 2360 - protein, 7 aa, synthetic construct
  REGION 1..7: note = Description of Artificial Sequence: Synthetic peptide
NGPGQNQ

SEQ ID NO: 2361 - protein, 7 aa, synthetic construct
  REGION 1..7: note = Description of Artificial Sequence: Synthetic peptide
GTVTKNA

SEQ ID NO: 2362 - protein, 7 aa, synthetic construct
  REGION 1..7: note = Description of Artificial Sequence: Synthetic peptide
GSTSANT

SEQ ID NO: 2363 - protein, 7 aa, synthetic construct
  REGION 1..7: note = Description of Artificial Sequence: Synthetic peptide
SGSSKVI

SEQ ID NO: 2364 - protein, 7 aa, synthetic construct
  REGION 1..7: note = Description of Artificial Sequence: Synthetic peptide
IRTGKTD

SEQ ID NO: 2365 - protein, 7 aa, synthetic construct
  REGION 1..7: note = Description of Artificial Sequence: Synthetic peptide
HGVEKRT

SEQ ID NO: 2366 - protein, 7 aa, synthetic construct
  REGION 1..7: note = Description of Artificial Sequence: Synthetic peptide
TETDKAH

SEQ ID NO: 2367 - protein, 7 aa, synthetic construct
  REGION 1..7: note = Description of Artificial Sequence: Synthetic peptide
DRANSAT

SEQ ID NO: 2368 - protein, 7 aa, synthetic construct
  REGION 1..7: note = Description of Artificial Sequence: Synthetic peptide
NQGDRNF

SEQ ID NO: 2369 - protein, 7 aa, synthetic construct
  REGION 1..7: note = Description of Artificial Sequence: Synthetic peptide
RQDAKTD

SEQ ID NO: 2370 - protein, 7 aa, synthetic construct
  REGION 1..7: note = Description of Artificial Sequence: Synthetic peptide
SRSTSNS

SEQ ID NO: 2371 - protein, 7 aa, synthetic construct
  REGION 1..7: note = Description of Artificial Sequence: Synthetic peptide
QGVNKVG

SEQ ID NO: 2372 - protein, 7 aa, synthetic construct
  REGION 1..7: note = Description of Artificial Sequence: Synthetic peptide
QGTTNHQ

SEQ ID NO: 2373 - protein, 7 aa, synthetic construct
  REGION 1..7: note = Description of Artificial Sequence: Synthetic peptide
RQQTSIS

SEQ ID NO: 2374 - protein, 7 aa, synthetic construct
  REGION 1..7: note = Description of Artificial Sequence: Synthetic peptide
DGQGTKM

SEQ ID NO: 2375 - protein, 7 aa, synthetic construct
  REGION 1..7: note = Description of Artificial Sequence: Synthetic peptide
GTNSKNL

SEQ ID NO: 2376 - protein, 7 aa, synthetic construct
  REGION 1..7: note = Description of Artificial Sequence: Synthetic peptide
VAVAPTK

SEQ ID NO: 2377 - protein, 7 aa, synthetic construct
  REGION 1..7: note = Description of Artificial Sequence: Synthetic peptide
YSGKSVV

SEQ ID NO: 2378 - protein, 7 aa, synthetic construct
  REGION 1..7: note = Description of Artificial Sequence: Synthetic peptide
LPSQSPQ

SEQ ID NO: 2379 - protein, 7 aa, synthetic construct
  REGION 1..7: note = Description of Artificial Sequence: Synthetic peptide
GDASMRS

SEQ ID NO: 2380 - protein, 7 aa, synthetic construct
  REGION 1..7: note = Description of Artificial Sequence: Synthetic peptide
VGNSQKL

SEQ ID NO: 2381 - protein, 7 aa, synthetic construct
  REGION 1..7: note = Description of Artificial Sequence: Synthetic peptide
WGTAKPA

SEQ ID NO: 2382 - protein, 7 aa, synthetic construct
  REGION 1..7: note = Description of Artificial Sequence: Synthetic peptide
TQSDRAR

SEQ ID NO: 2383 - protein, 7 aa, synthetic construct
  REGION 1..7: note = Description of Artificial Sequence: Synthetic peptide
APVSKTA

SEQ ID NO: 2384 - protein, 7 aa, synthetic construct
  REGION 1..7: note = Description of Artificial Sequence: Synthetic peptide
VGNQNNI

SEQ ID NO: 2385 - protein, 7 aa, synthetic construct
  REGION 1..7: note = Description of Artificial Sequence: Synthetic peptide
RGGSGSS

SEQ ID NO: 2386 - protein, 7 aa, synthetic construct
  REGION 1..7: note = Description of Artificial Sequence: Synthetic peptide
DLSGKRS

SEQ ID NO: 2387 - protein, 7 aa, synthetic construct
  REGION 1..7: note = Description of Artificial Sequence: Synthetic peptide
VAVGAAK

SEQ ID NO: 2388 - protein, 7 aa, synthetic construct
  REGION 1..7: note = Description of Artificial Sequence: Synthetic peptide
VGQSTSR

SEQ ID NO: 2389 - protein, 7 aa, synthetic construct
  REGION 1..7: note = Description of Artificial Sequence: Synthetic peptide
LAAGAGH

SEQ ID NO: 2390 - protein, 7 aa, synthetic construct
  REGION 1..7: note = Description of Artificial Sequence: Synthetic peptide
TQAKSIG

SEQ ID NO: 2391 - protein, 7 aa, synthetic construct
  REGION 1..7: note = Description of Artificial Sequence: Synthetic peptide
RTDTKIL

SEQ ID NO: 2392 - protein, 7 aa, synthetic construct
  REGION 1..7: note = Description of Artificial Sequence: Synthetic peptide
LNHNSQG

SEQ ID NO: 2393 - protein, 7 aa, synthetic construct
  REGION 1..7: note = Description of Artificial Sequence: Synthetic peptide
GTGSTMR

SEQ ID NO: 2394 - protein, 7 aa, synthetic construct
  REGION 1..7: note = Description of Artificial Sequence: Synthetic peptide
SASSGHS

SEQ ID NO: 2395 - protein, 7 aa, synthetic construct
  REGION 1..7: note = Description of Artificial Sequence: Synthetic peptide
TTSSTLT

SEQ ID NO: 2396 - protein, 7 aa, synthetic construct
  REGION 1..7: note = Description of Artificial Sequence: Synthetic peptide
GNHSGSH

SEQ ID NO: 2397 - protein, 7 aa, synthetic construct
  REGION 1..7: note = Description of Artificial Sequence: Synthetic peptide
GSSSKPA

SEQ ID NO: 2398 - protein, 7 aa, synthetic construct
  REGION 1..7: note = Description of Artificial Sequence: Synthetic peptide
GATPPSK

SEQ ID NO: 2399 - protein, 7 aa, synthetic construct
  REGION 1..7: note = Description of Artificial Sequence: Synthetic peptide
VPQSKPV

SEQ ID NO: 2400 - protein, 7 aa, synthetic construct
  REGION 1..7: note = Description of Artificial Sequence: Synthetic peptide
VQGKSQL

SEQ ID NO: 2401 - protein, 7 aa, synthetic construct
  REGION 1..7: note = Description of Artificial Sequence: Synthetic peptide
TGERTAL

SEQ ID NO: 2402 - protein, 7 aa, synthetic construct
  REGION 1..7: note = Description of Artificial Sequence: Synthetic peptide
TGSGKVV

SEQ ID NO: 2403 - protein, 7 aa, synthetic construct
  REGION 1..7: note = Description of Artificial Sequence: Synthetic peptide
SGTTPIR

SEQ ID NO: 2404 - protein, 7 aa, synthetic construct
  REGION 1..7: note = Description of Artificial Sequence: Synthetic peptide
SQDSHRS

SEQ ID NO: 2405 - protein, 7 aa, synthetic construct
  REGION 1..7: note = Description of Artificial Sequence: Synthetic peptide
TNTQSTL

SEQ ID NO: 2406 - protein, 7 aa, synthetic construct
  REGION 1..7: note = Description of Artificial Sequence: Synthetic peptide
TMGTKPS

SEQ ID NO: 2407 - protein, 7 aa, synthetic construct
  REGION 1..7: note = Description of Artificial Sequence: Synthetic peptide
RQSEKTQ

SEQ ID NO: 2408 - protein, 7 aa, synthetic construct
  REGION 1..7: note = Description of Artificial Sequence: Synthetic peptide
GTQARQG

SEQ ID NO: 2409 - protein, 7 aa, synthetic construct
  REGION 1..7: note = Description of Artificial Sequence: Synthetic peptide
VGTDASR

SEQ ID NO: 2410 - protein, 7 aa, synthetic construct
  REGION 1..7: note = Description of Artificial Sequence: Synthetic peptide
LDDKKAG

SEQ ID NO: 2411 - protein, 7 aa, synthetic construct
  REGION 1..7: note = Description of Artificial Sequence: Synthetic peptide
SLPTANN

SEQ ID NO: 2412 - protein, 7 aa, synthetic construct
  REGION 1..7: note = Description of Artificial Sequence: Synthetic peptide
TSGKAGT

SEQ ID NO: 2413 - protein, 7 aa, synthetic construct
  REGION 1..7: note = Description of Artificial Sequence: Synthetic peptide
IQETRSN

SEQ ID NO: 2414 - protein, 7 aa, synthetic construct
  REGION 1..7: note = Description of Artificial Sequence: Synthetic peptide
ARSDKLH

SEQ ID NO: 2415 - protein, 7 aa, synthetic construct
  REGION 1..7: note = Description of Artificial Sequence: Synthetic peptide
QGSQTQV

SEQ ID NO: 2416 - protein, 7 aa, synthetic construct
  REGION 1..7: note = Description of Artificial Sequence: Synthetic peptide
STDGTQR

SEQ ID NO: 2417 - protein, 7 aa, synthetic construct
  REGION 1..7: note = Description of Artificial Sequence: Synthetic peptide
QTVKGSS

SEQ ID NO: 2418 - protein, 7 aa, synthetic construct
  REGION 1..7: note = Description of Artificial Sequence: Synthetic peptide
QKTDHPA

SEQ ID NO: 2419 - protein, 7 aa, synthetic construct
  REGION 1..7: note = Description of Artificial Sequence: Synthetic peptide
DTRPNKD

SEQ ID NO: 2420 - protein, 7 aa, synthetic construct
  REGION 1..7: note = Description of Artificial Sequence: Synthetic peptide
VRNDKTE

SEQ ID NO: 2421 - protein, 7 aa, synthetic construct
  REGION 1..7: note = Description of Artificial Sequence: Synthetic peptide
GTGDMRR

SEQ ID NO: 2422 - protein, 7 aa, synthetic construct
  REGION 1..7: note = Description of Artificial Sequence: Synthetic peptide
LGDKKVV

SEQ ID NO: 2423 - protein, 7 aa, synthetic construct
  REGION 1..7: note = Description of Artificial Sequence: Synthetic peptide
SPTGKTV

SEQ ID NO: 2424 - protein, 7 aa, synthetic construct
  REGION 1..7: note = Description of Artificial Sequence: Synthetic peptide
LPGNSTK

SEQ ID NO: 2425 - protein, 7 aa, synthetic construct
  REGION 1..7: note = Description of Artificial Sequence: Synthetic peptide
HGNKPMV

SEQ ID NO: 2426 - protein, 7 aa, synthetic construct
  REGION 1..7: note = Description of Artificial Sequence: Synthetic peptide
GKSTNMH

SEQ ID NO: 2427 - protein, 7 aa, synthetic construct
  REGION 1..7: note = Description of Artificial Sequence: Synthetic peptide
EGGSVGR

SEQ ID NO: 2428 - protein, 7 aa, synthetic construct
  REGION 1..7: note = Description of Artificial Sequence: Synthetic peptide
NISTPRN

SEQ ID NO: 2429 - protein, 7 aa, synthetic construct
  REGION 1..7: note = Description of Artificial Sequence: Synthetic peptide
SANNSTV

SEQ ID NO: 2430 - protein, 7 aa, synthetic construct
  REGION 1..7: note = Description of Artificial Sequence: Synthetic peptide
SAGQGLK

SEQ ID NO: 2431 - protein, 7 aa, synthetic construct
  REGION 1..7: note = Description of Artificial Sequence: Synthetic peptide
HGTAKSG

SEQ ID NO: 2432 - protein, 7 aa, synthetic construct
  REGION 1..7: note = Description of Artificial Sequence: Synthetic peptide
VANKSSG

SEQ ID NO: 2433 - protein, 7 aa, synthetic construct
  REGION 1..7: note = Description of Artificial Sequence: Synthetic peptide
TSVPQHG

SEQ ID NO: 2434 - protein, 7 aa, synthetic construct
  REGION 1..7: note = Description of Artificial Sequence: Synthetic peptide
LTAKTPS

SEQ ID NO: 2435 - protein, 7 aa, synthetic construct
  REGION 1..7: note = Description of Artificial Sequence: Synthetic peptide
EDHRPTV

SEQ ID NO: 2436 - protein, 7 aa, synthetic construct
  REGION 1..7: note = Description of Artificial Sequence: Synthetic peptide
GTAARTE

SEQ ID NO: 2437 - protein, 7 aa, synthetic construct
  REGION 1..7: note = Description of Artificial Sequence: Synthetic peptide
GMNPRDS

SEQ ID NO: 2438 - protein, 7 aa, synthetic construct
  REGION 1..7: note = Description of Artificial Sequence: Synthetic peptide
VSAPGNT

SEQ ID NO: 2439 - protein, 7 aa, synthetic construct
  REGION 1..7: note = Description of Artificial Sequence: Synthetic peptide
SADKTQN

SEQ ID NO: 2440 - protein, 7 aa, synthetic construct
  REGION 1..7: note = Description of Artificial Sequence: Synthetic peptide
TSANVSS

SEQ ID NO: 2441 - protein, 7 aa, synthetic construct
  REGION 1..7: note = Description of Artificial Sequence: Synthetic peptide
CTGKPDS

SEQ ID NO: 2442 - protein, 7 aa, synthetic construct
  REGION 1..7: note = Description of Artificial Sequence: Synthetic peptide
TSHTTSN

SEQ ID NO: 2443 - protein, 7 aa, synthetic construct
  REGION 1..7: note = Description of Artificial Sequence: Synthetic peptide
SGMGGTS

SEQ ID NO: 2444 - protein, 7 aa, synthetic construct
  REGION 1..7: note = Description of Artificial Sequence: Synthetic peptide
TREKSSL

SEQ ID NO: 2445 - protein, 7 aa, synthetic construct
  REGION 1..7: note = Description of Artificial Sequence: Synthetic peptide
SLTSPAS

SEQ ID NO: 2446 - protein, 7 aa, synthetic construct
  REGION 1..7: note = Description of Artificial Sequence: Synthetic peptide
SGTHKGQ

SEQ ID NO: 2447 - protein, 7 aa, synthetic construct
  REGION 1..7: note = Description of Artificial Sequence: Synthetic peptide
ISGSTPT

SEQ ID NO: 2448 - protein, 7 aa, synthetic construct
  REGION 1..7: note = Description of Artificial Sequence: Synthetic peptide
LRSKETI

SEQ ID NO: 2449 - protein, 7 aa, synthetic construct
  REGION 1..7: note = Description of Artificial Sequence: Synthetic peptide
DVPNKHS

SEQ ID NO: 2450 - protein, 7 aa, synthetic construct
  REGION 1..7: note = Description of Artificial Sequence: Synthetic peptide
VKTDRAS

SEQ ID NO: 2451 - protein, 7 aa, synthetic construct
  REGION 1..7: note = Description of Artificial Sequence: Synthetic peptide
DGTKGKS

SEQ ID NO: 2452 - protein, 7 aa, synthetic construct
  REGION 1..7: note = Description of Artificial Sequence: Synthetic peptide
ASNGSKQ

SEQ ID NO: 2453 - protein, 7 aa, synthetic construct
  REGION 1..7: note = Description of Artificial Sequence: Synthetic peptide
AGSSKLS

SEQ ID NO: 2454 - protein, 7 aa, synthetic construct
  REGION 1..7: note = Description of Artificial Sequence: Synthetic peptide
TKGDKHD

SEQ ID NO: 2455 - protein, 7 aa, synthetic construct
  REGION 1..7: note = Description of Artificial Sequence: Synthetic peptide
DGNKNKL

SEQ ID NO: 2456 - protein, 7 aa, synthetic construct
  REGION 1..7: note = Description of Artificial Sequence: Synthetic peptide
ARGGDQP

SEQ ID NO: 2457 - protein, 7 aa, synthetic construct
  REGION 1..7: note = Description of Artificial Sequence: Synthetic peptide
TTAANYQ

SEQ ID NO: 2458 - protein, 7 aa, synthetic construct
  REGION 1..7: note = Description of Artificial Sequence: Synthetic peptide
SGVGSGL

SEQ ID NO: 2459 - protein, 7 aa, synthetic construct
  REGION 1..7: note = Description of Artificial Sequence: Synthetic peptide
NCSKSNC

SEQ ID NO: 2460 - protein, 7 aa, synthetic construct
  REGION 1..7: note = Description of Artificial Sequence: Synthetic peptide
SRNGSPV

SEQ ID NO: 2461 - protein, 7 aa, synthetic construct
  REGION 1..7: note = Description of Artificial Sequence: Synthetic peptide
SEKKNSL

SEQ ID NO: 2462 - protein, 7 aa, synthetic construct
  REGION 1..7: note = Description of Artificial Sequence: Synthetic peptide
GATSERR

SEQ ID NO: 2463 - protein, 7 aa, synthetic construct
  REGION 1..7: note = Description of Artificial Sequence: Synthetic peptide
TTGKHSQ

SEQ ID NO: 2464 - protein, 7 aa, synthetic construct
  REGION 1..7: note = Description of Artificial Sequence: Synthetic peptide
RHGESTT

SEQ ID NO: 2465 - protein, 7 aa, synthetic construct
  REGION 1..7: note = Description of Artificial Sequence: Synthetic peptide
NTNKPMS

SEQ ID NO: 2466 - protein, 7 aa, synthetic construct
  REGION 1..7: note = Description of Artificial Sequence: Synthetic peptide
MGDKPTR

SEQ ID NO: 2467 - protein, 7 aa, synthetic construct
  REGION 1..7: note = Description of Artificial Sequence: Synthetic peptide
SNQTPTR

SEQ ID NO: 2468 - protein, 7 aa, synthetic construct
  REGION 1..7: note = Description of Artificial Sequence: Synthetic peptide
MSGHSQA

SEQ ID NO: 2469 - protein, 7 aa, synthetic construct
  REGION 1..7: note = Description of Artificial Sequence: Synthetic peptide
QGVDSRS

SEQ ID NO: 2470 - protein, 7 aa, synthetic construct
  REGION 1..7: note = Description of Artificial Sequence: Synthetic peptide
SGGSSRV

SEQ ID NO: 2471 - protein, 7 aa, synthetic construct
  REGION 1..7: note = Description of Artificial Sequence: Synthetic peptide
TPGGHQA

SEQ ID NO: 2472 - protein, 7 aa, synthetic construct
  REGION 1..7: note = Description of Artificial Sequence: Synthetic peptide
TGRDSIQ

SEQ ID NO: 2473 - protein, 7 aa, synthetic construct
  REGION 1..7: note = Description of Artificial Sequence: Synthetic peptide
RDGTPRD

SEQ ID NO: 2474 - protein, 7 aa, synthetic construct
  REGION 1..7: note = Description of Artificial Sequence: Synthetic peptide
TAPAAGS

SEQ ID NO: 2475 - protein, 7 aa, synthetic construct
  REGION 1..7: note = Description of Artificial Sequence: Synthetic peptide
TLGEHSR

SEQ ID NO: 2476 - protein, 7 aa, synthetic construct
  REGION 1..7: note = Description of Artificial Sequence: Synthetic peptide
QNNAPAH

SEQ ID NO: 2477 - protein, 7 aa, synthetic construct
  REGION 1..7: note = Description of Artificial Sequence: Synthetic peptide
EGSSSLT

SEQ ID NO: 2478 - protein, 7 aa, synthetic construct
  REGION 1..7: note = Description of Artificial Sequence: Synthetic peptide
SGKPNER

SEQ ID NO: 2479 - protein, 7 aa, synthetic construct
  REGION 1..7: note = Description of Artificial Sequence: Synthetic peptide
NQSTSAK

SEQ ID NO: 2480 - protein, 7 aa, synthetic construct
  REGION 1..7: note = Description of Artificial Sequence: Synthetic peptide
TGKNENL

SEQ ID NO: 2481 - protein, 7 aa, synthetic construct
  REGION 1..7: note = Description of Artificial Sequence: Synthetic peptide
DSASSSR

SEQ ID NO: 2482 - protein, 7 aa, synthetic construct
  REGION 1..7: note = Description of Artificial Sequence: Synthetic peptide
NSTREAA

SEQ ID NO: 2483 - protein, 7 aa, synthetic construct
  REGION 1..7: note = Description of Artificial Sequence: Synthetic peptide
SATSRPV

SEQ ID NO: 2484 - protein, 7 aa, synthetic construct
  REGION 1..7: note = Description of Artificial Sequence: Synthetic peptide
AGQTAST

SEQ ID NO: 2485 - protein, 7 aa, synthetic construct
  REGION 1..7: note = Description of Artificial Sequence: Synthetic peptide
SPDRSSS

SEQ ID NO: 2486 - protein, 7 aa, synthetic construct
  REGION 1..7: note = Description of Artificial Sequence: Synthetic peptide
NEARATQ

SEQ ID NO: 2487 - protein, 7 aa, synthetic construct
  REGION 1..7: note = Description of Artificial Sequence: Synthetic peptide
TVGGRGS

SEQ ID NO: 2488 - protein, 7 aa, synthetic construct
  REGION 1..7: note = Description of Artificial Sequence: Synthetic peptide
STLPPQK

SEQ ID NO: 2489 - protein, 7 aa, synthetic construct
  REGION 1..7: note = Description of Artificial Sequence: Synthetic peptide
ENNSGPR

SEQ ID NO: 2490 - protein, 7 aa, synthetic construct
  REGION 1..7: note = Description of Artificial Sequence: Synthetic peptide
APPSSGK

SEQ ID NO: 2491 - protein, 7 aa, synthetic construct
  REGION 1..7: note = Description of Artificial Sequence: Synthetic peptide
SSNSASS

SEQ ID NO: 2492 - protein, 7 aa, synthetic construct
  REGION 1..7: note = Description of Artificial Sequence: Synthetic peptide
SIATAQK

SEQ ID NO: 2493 - protein, 7 aa, synthetic construct
  REGION 1..7: note = Description of Artificial Sequence: Synthetic peptide
DKCSGCA

SEQ ID NO: 2494 - protein, 7 aa, synthetic construct
  REGION 1..7: note = Description of Artificial Sequence: Synthetic peptide
NNNVPVQ

SEQ ID NO: 2495 - protein, 7 aa, synthetic construct
  REGION 1..7: note = Description of Artificial Sequence: Synthetic peptide
RQDVSNG

SEQ ID NO: 2496 - protein, 7 aa, synthetic construct
  REGION 1..7: note = Description of Artificial Sequence: Synthetic peptide
SREKGSN

SEQ ID NO: 2497 - protein, 7 aa, synthetic construct
  REGION 1..7: note = Description of Artificial Sequence: Synthetic peptide
SGVNSSG

SEQ ID NO: 2498 - protein, 7 aa, synthetic construct
  REGION 1..7: note = Description of Artificial Sequence: Synthetic peptide
VSSPPNR

SEQ ID NO: 2499 - protein, 7 aa, synthetic construct
  REGION 1..7: note = Description of Artificial Sequence: Synthetic peptide
FTGSNST

SEQ ID NO: 2500 - protein, 7 aa, synthetic construct
  REGION 1..7: note = Description of Artificial Sequence: Synthetic peptide
ASTSGMH

SEQ ID NO: 2501 - protein, 7 aa, synthetic construct
  REGION 1..7: note = Description of Artificial Sequence: Synthetic peptide
SRTSSNV

SEQ ID NO: 2502 - protein, 7 aa, synthetic construct
  REGION 1..7: note = Description of Artificial Sequence: Synthetic peptide
QTGSATA

SEQ ID NO: 2503 - protein, 7 aa, synthetic construct
  REGION 1..7: note = Description of Artificial Sequence: Synthetic peptide
ESVGKSA

SEQ ID NO: 2504 - protein, 7 aa, synthetic construct
  REGION 1..7: note = Description of Artificial Sequence: Synthetic peptide
DGSQRPK

SEQ ID NO: 2505 - protein, 7 aa, synthetic construct
  REGION 1..7: note = Description of Artificial Sequence: Synthetic peptide
QGNEGHI

SEQ ID NO: 2506 - protein, 7 aa, synthetic construct
  REGION 1..7: note = Description of Artificial Sequence: Synthetic peptide
LALGGKG

SEQ ID NO: 2507 - protein, 7 aa, synthetic construct
  REGION 1..7: note = Description of Artificial Sequence: Synthetic peptide
SNSSKLN

SEQ ID NO: 2508 - protein, 7 aa, synthetic construct
  REGION 1..7: note = Description of Artificial Sequence: Synthetic peptide
LSNQPKD

SEQ ID NO: 2509 - protein, 7 aa, synthetic construct
  REGION 1..7: note = Description of Artificial Sequence: Synthetic peptide
SGGGQAH

SEQ ID NO: 2510 - protein, 7 aa, synthetic construct
  REGION 1..7: note = Description of Artificial Sequence: Synthetic peptide
SANSGHS

SEQ ID NO: 2511 - protein, 7 aa, synthetic construct
  REGION 1..7: note = Description of Artificial Sequence: Synthetic peptide
GSAKTSN

SEQ ID NO: 2512 - protein, 7 aa, synthetic construct
  REGION 1..7: note = Description of Artificial Sequence: Synthetic peptide
QSSKPNI

SEQ ID NO: 2513 - protein, 7 aa, synthetic construct
  REGION 1..7: note = Description of Artificial Sequence: Synthetic peptide
SGANTLH

SEQ ID NO: 2514 - protein, 7 aa, synthetic construct
  REGION 1..7: note = Description of Artificial Sequence: Synthetic peptide
GRQNSAQ

SEQ ID NO: 2515 - protein, 7 aa, synthetic construct
  REGION 1..7: note = Description of Artificial Sequence: Synthetic peptide
KGADRQS

SEQ ID NO: 2516 - protein, 7 aa, synthetic construct
  REGION 1..7: note = Description of Artificial Sequence: Synthetic peptide
TDGSGNK

SEQ ID NO: 2517 - protein, 7 aa, synthetic construct
  REGION 1..7: note = Description of Artificial Sequence: Synthetic peptide
TKDNHSS

SEQ ID NO: 2518 - protein, 7 aa, synthetic construct
  REGION 1..7: note = Description of Artificial Sequence: Synthetic peptide
TVSKSTM

SEQ ID NO: 2519 - protein, 7 aa, synthetic construct
  REGION 1..7: note = Description of Artificial Sequence: Synthetic peptide
SGTPRNA

SEQ ID NO: 2520 - protein, 7 aa, synthetic construct
  REGION 1..7: note = Description of Artificial Sequence: Synthetic peptide
QSTSPSL

SEQ ID NO: 2521 - protein, 7 aa, synthetic construct
  REGION 1..7: note = Description of Artificial Sequence: Synthetic peptide
HGNSTLQ

SEQ ID NO: 2522 - protein, 7 aa, synthetic construct
  REGION 1..7: note = Description of Artificial Sequence: Synthetic peptide
GTAKQFA

SEQ ID NO: 2523 - protein, 7 aa, synthetic construct
  REGION 1..7: note = Description of Artificial Sequence: Synthetic peptide
NQTPALG

SEQ ID NO: 2524 - protein, 7 aa, synthetic construct
  REGION 1..7: note = Description of Artificial Sequence: Synthetic peptide
TRTDSSS

SEQ ID NO: 2525 - protein, 7 aa, synthetic construct
  REGION 1..7: note = Description of Artificial Sequence: Synthetic peptide
TSSNVPG

SEQ ID NO: 2526 - protein, 7 aa, synthetic construct
  REGION 1..7: note = Description of Artificial Sequence: Synthetic peptide
SIDSAHR

SEQ ID NO: 2527 - protein, 7 aa, synthetic construct
  REGION 1..7: note = Description of Artificial Sequence: Synthetic peptide
SGSTKGT

SEQ ID NO: 2528 - protein, 7 aa, synthetic construct
  REGION 1..7: note = Description of Artificial Sequence: Synthetic peptide
HSNTTSN

SEQ ID NO: 2529 - protein, 7 aa, synthetic construct
  REGION 1..7: note = Description of Artificial Sequence: Synthetic peptide
QINSKST

SEQ ID NO: 2530 - protein, 7 aa, synthetic construct
  REGION 1..7: note = Description of Artificial Sequence: Synthetic peptide
ETVKKSS

SEQ ID NO: 2531 - protein, 7 aa, synthetic construct
  REGION 1..7: note = Description of Artificial Sequence: Synthetic peptide
DGVNKMR

SEQ ID NO: 2532 - protein, 7 aa, synthetic construct
  REGION 1..7: note = Description of Artificial Sequence: Synthetic peptide
ANSVPNT

SEQ ID NO: 2533 - protein, 7 aa, synthetic construct
  REGION 1..7: note = Description of Artificial Sequence: Synthetic peptide
GSQSGKV

SEQ ID NO: 2534 - protein, 7 aa, synthetic construct
  REGION 1..7: note = Description of Artificial Sequence: Synthetic peptide
STSQAGN

SEQ ID NO: 2535 - protein, 7 aa, synthetic construct
  REGION 1..7: note = Description of Artificial Sequence: Synthetic peptide
SPGKGLV

SEQ ID NO: 2536 - protein, 7 aa, synthetic construct
  REGION 1..7: note = Description of Artificial Sequence: Synthetic peptide
FRTESVA

SEQ ID NO: 2537 - protein, 7 aa, synthetic construct
  REGION 1..7: note = Description of Artificial Sequence: Synthetic peptide
DRQHTNI

SEQ ID NO: 2538 - protein, 7 aa, synthetic construct
  REGION 1..7: note = Description of Artificial Sequence: Synthetic peptide
TQAKVSG

SEQ ID NO: 2539 - protein, 7 aa, synthetic construct
  REGION 1..7: note = Description of Artificial Sequence: Synthetic peptide
SSGHGAS

SEQ ID NO: 2540 - protein, 7 aa, synthetic construct
  REGION 1..7: note = Description of Artificial Sequence: Synthetic peptide
NGSTKIT

SEQ ID NO: 2541 - protein, 7 aa, synthetic construct
  REGION 1..7: note = Description of Artificial Sequence: Synthetic peptide
EGHPRTS

SEQ ID NO: 2542 - protein, 7 aa, synthetic construct
  REGION 1..7: note = Description of Artificial Sequence: Synthetic peptide
SPSTNRE

SEQ ID NO: 2543 - protein, 7 aa, synthetic construct
  REGION 1..7: note = Description of Artificial Sequence: Synthetic peptide
NTGRDPR

SEQ ID NO: 2544 - protein, 7 aa, synthetic construct
  REGION 1..7: note = Description of Artificial Sequence: Synthetic peptide
SSSAGSL

SEQ ID NO: 2545 - protein, 7 aa, synthetic construct
  REGION 1..7: note = Description of Artificial Sequence: Synthetic peptide
HTSKVAH

SEQ ID NO: 2546 - protein, 7 aa, synthetic construct
  REGION 1..7: note = Description of Artificial Sequence: Synthetic peptide
LNPHGSG

SEQ ID NO: 2547 - protein, 7 aa, synthetic construct
  REGION 1..7: note = Description of Artificial Sequence: Synthetic peptide
VPNNGQK

SEQ ID NO: 2548 - protein, 7 aa, synthetic construct
  REGION 1..7: note = Description of Artificial Sequence: Synthetic peptide
AQPAGKI

SEQ ID NO: 2549 - protein, 7 aa, synthetic construct
  REGION 1..7: note = Description of Artificial Sequence: Synthetic peptide
GTKGSNT

SEQ ID NO: 2550 - protein, 7 aa, synthetic construct
  REGION 1..7: note = Description of Artificial Sequence: Synthetic peptide
TNGPQTK

SEQ ID NO: 2551 - protein, 7 aa, synthetic construct
  REGION 1..7: note = Description of Artificial Sequence: Synthetic peptide
TISDKSL

SEQ ID NO: 2552 - protein, 7 aa, synthetic construct
  REGION 1..7: note = Description of Artificial Sequence: Synthetic peptide
STGAGGQ

SEQ ID NO: 2553 - protein, 7 aa, synthetic construct
  REGION 1..7: note = Description of Artificial Sequence: Synthetic peptide
SAGNNNR

SEQ ID NO: 2554 - protein, 7 aa, synthetic construct
  REGION 1..7: note = Description of Artificial Sequence: Synthetic peptide
AQGNPAK

SEQ ID NO: 2555 - protein, 7 aa, synthetic construct
  REGION 1..7: note = Description of Artificial Sequence: Synthetic peptide
AINEKAV

SEQ ID NO: 2556 - protein, 7 aa, synthetic construct
  REGION 1..7: note = Description of Artificial Sequence: Synthetic peptide
IGSTTQS

SEQ ID NO: 2557 - protein, 7 aa, synthetic construct
  REGION 1..7: note = Description of Artificial Sequence: Synthetic peptide
DGRVSQG

SEQ ID NO: 2558 - protein, 7 aa, synthetic construct
  REGION 1..7: note = Description of Artificial Sequence: Synthetic peptide
ATGATPR

SEQ ID NO: 2559 - protein, 7 aa, synthetic construct
  REGION 1..7: note = Description of Artificial Sequence: Synthetic peptide
VSSKKTE

SEQ ID NO: 2560 - protein, 7 aa, synthetic construct
  REGION 1..7: note = Description of Artificial Sequence: Synthetic peptide
MASKTSQ

SEQ ID NO: 2561 - protein, 7 aa, synthetic construct
  REGION 1..7: note = Description of Artificial Sequence: Synthetic peptide
GRQQQSG

SEQ ID NO: 2562 - protein, 7 aa, synthetic construct
  REGION 1..7: note = Description of Artificial Sequence: Synthetic peptide
TANASHS

SEQ ID NO: 2563 - protein, 7 aa, synthetic construct
  REGION 1..7: note = Description of Artificial Sequence: Synthetic peptide
GGVSSNT

SEQ ID NO: 2564 - protein, 7 aa, synthetic construct
  REGION 1..7: note = Description of Artificial Sequence: Synthetic peptide
NSQGSTL

SEQ ID NO: 2565 - protein, 7 aa, synthetic construct
  REGION 1..7: note = Description of Artificial Sequence: Synthetic peptide
NTGSGLK

SEQ ID NO: 2566 - protein, 7 aa, synthetic construct
  REGION 1..7: note = Description of Artificial Sequence: Synthetic peptide
RSASPPV

SEQ ID NO: 2567 - protein, 7 aa, synthetic construct
  REGION 1..7: note = Description of Artificial Sequence: Synthetic peptide
ESGDRVK

SEQ ID NO: 2568 - protein, 7 aa, synthetic construct
  REGION 1..7: note = Description of Artificial Sequence: Synthetic peptide
AGNQSTG

SEQ ID NO: 2569 - protein, 7 aa, synthetic construct
  REGION 1..7: note = Description of Artificial Sequence: Synthetic peptide
SLTKNGA

SEQ ID NO: 2570 - protein, 7 aa, synthetic construct
  REGION 1..7: note = Description of Artificial Sequence: Synthetic peptide
SPGKGAS

SEQ ID NO: 2571 - protein, 7 aa, synthetic construct
  REGION 1..7: note = Description of Artificial Sequence: Synthetic peptide
SNVNSMK

SEQ ID NO: 2572 - protein, 7 aa, synthetic construct
  REGION 1..7: note = Description of Artificial Sequence: Synthetic peptide
KQAGAME

SEQ ID NO: 2573 - protein, 7 aa, synthetic construct
  REGION 1..7: note = Description of Artificial Sequence: Synthetic peptide
LSSGSMG

SEQ ID NO: 2574 - protein, 7 aa, synthetic construct
  REGION 1..7: note = Description of Artificial Sequence: Synthetic peptide
ALNSKTN

SEQ ID NO: 2575 - protein, 7 aa, synthetic construct
  REGION 1..7: note = Description of Artificial Sequence: Synthetic peptide
GVESRQK

SEQ ID NO: 2576 - protein, 7 aa, synthetic construct
  REGION 1..7: note = Description of Artificial Sequence: Synthetic peptide
TGRTPAV

SEQ ID NO: 2577 - protein, 7 aa, synthetic construct
  REGION 1..7: note = Description of Artificial Sequence: Synthetic peptide
DSNNANR

SEQ ID NO: 2578 - protein, 7 aa, synthetic construct
  REGION 1..7: note = Description of Artificial Sequence: Synthetic peptide
KSNSAIT

SEQ ID NO: 2579 - protein, 7 aa, synthetic construct
  REGION 1..7: note = Description of Artificial Sequence: Synthetic peptide
MTGGAGS

SEQ ID NO: 2580 - protein, 7 aa, synthetic construct
  REGION 1..7: note = Description of Artificial Sequence: Synthetic peptide
SVEHKGG

SEQ ID NO: 2581 - protein, 7 aa, synthetic construct
  REGION 1..7: note = Description of Artificial Sequence: Synthetic peptide
SNGRANA

SEQ ID NO: 2582 - protein, 7 aa, synthetic construct
  REGION 1..7: note = Description of Artificial Sequence: Synthetic peptide
GNSSSKS

SEQ ID NO: 2583 - protein, 7 aa, synthetic construct
  REGION 1..7: note = Description of Artificial Sequence: Synthetic peptide
SQTTKTS

SEQ ID NO: 2584 - protein, 7 aa, synthetic construct
  REGION 1..7: note = Description of Artificial Sequence: Synthetic peptide
LTSQKPA

SEQ ID NO: 2585 - protein, 7 aa, synthetic construct
  REGION 1..7: note = Description of Artificial Sequence: Synthetic peptide
ETESRAA

SEQ ID NO: 2586 - protein, 7 aa, synthetic construct
  REGION 1..7: note = Description of Artificial Sequence: Synthetic peptide
GVPSSTK

SEQ ID NO: 2587 - protein, 7 aa, synthetic construct
  REGION 1..7: note = Description of Artificial Sequence: Synthetic peptide
QGPSKGS

SEQ ID NO: 2588 - protein, 7 aa, synthetic construct
  REGION 1..7: note = Description of Artificial Sequence: Synthetic peptide
LSGSSNL

SEQ ID NO: 2589 - protein, 7 aa, synthetic construct
  REGION 1..7: note = Description of Artificial Sequence: Synthetic peptide
VTDTPHQ

SEQ ID NO: 2590 - protein, 7 aa, synthetic construct
  REGION 1..7: note = Description of Artificial Sequence: Synthetic peptide
LTGSNSK

SEQ ID NO: 2591 - protein, 7 aa, synthetic construct
  REGION 1..7: note = Description of Artificial Sequence: Synthetic peptide
TISSTPS

SEQ ID NO: 2592 - protein, 7 aa, synthetic construct
  REGION 1..7: note = Description of Artificial Sequence: Synthetic peptide
NPGGSKL

SEQ ID NO: 2593 - protein, 7 aa, synthetic construct
  REGION 1..7: note = Description of Artificial Sequence: Synthetic peptide
TQEHKST

SEQ ID NO: 2594 - protein, 7 aa, synthetic construct
  REGION 1..7: note = Description of Artificial Sequence: Synthetic peptide
DKVPHGV

SEQ ID NO: 2595 - protein, 7 aa, synthetic construct
  REGION 1..7: note = Description of Artificial Sequence: Synthetic peptide
VGSRPDK

SEQ ID NO: 2596 - protein, 7 aa, synthetic construct
  REGION 1..7: note = Description of Artificial Sequence: Synthetic peptide
GTAGGQS

SEQ ID NO: 2597 - protein, 7 aa, synthetic construct
  REGION 1..7: note = Description of Artificial Sequence: Synthetic peptide
QSERTPT

SEQ ID NO: 2598 - protein, 7 aa, synthetic construct
  REGION 1..7: note = Description of Artificial Sequence: Synthetic peptide
ANAAPLK

SEQ ID NO: 2599 - protein, 7 aa, synthetic construct
  REGION 1..7: note = Description of Artificial Sequence: Synthetic peptide
NHSTSAP

SEQ ID NO: 2600 - protein, 7 aa, synthetic construct
  REGION 1..7: note = Description of Artificial Sequence: Synthetic peptide
TVSGSTK

SEQ ID NO: 2601 - protein, 7 aa, synthetic construct
  REGION 1..7: note = Description of Artificial Sequence: Synthetic peptide
ASSPINK

SEQ ID NO: 2602 - protein, 7 aa, synthetic construct
  REGION 1..7: note = Description of Artificial Sequence: Synthetic peptide
GTSGKSM

SEQ ID NO: 2603 - protein, 7 aa, synthetic construct
  REGION 1..7: note = Description of Artificial Sequence: Synthetic peptide
LANVPTQ

SEQ ID NO: 2604 - protein, 7 aa, synthetic construct
  REGION 1..7: note = Description of Artificial Sequence: Synthetic peptide
SQAASPR

SEQ ID NO: 2605 - protein, 7 aa, synthetic construct
  REGION 1..7: note = Description of Artificial Sequence: Synthetic peptide
SVDKNNR

SEQ ID NO: 2606 - protein, 7 aa, synthetic construct
  REGION 1..7: note = Description of Artificial Sequence: Synthetic peptide
GSDRKSE

SEQ ID NO: 2607 - protein, 7 aa, synthetic construct
  REGION 1..7: note = Description of Artificial Sequence: Synthetic peptide
TSTSRPN

SEQ ID NO: 2608 - protein, 7 aa, synthetic construct
  REGION 1..7: note = Description of Artificial Sequence: Synthetic peptide
QGSGKMS

SEQ ID NO: 2609 - protein, 7 aa, synthetic construct
  REGION 1..7: note = Description of Artificial Sequence: Synthetic peptide
DTRSANQ

SEQ ID NO: 2610 - protein, 7 aa, synthetic construct
  REGION 1..7: note = Description of Artificial Sequence: Synthetic peptide
KTGQSSS

SEQ ID NO: 2611 - protein, 7 aa, synthetic construct
  REGION 1..7: note = Description of Artificial Sequence: Synthetic peptide
GRDKTVS

SEQ ID NO: 2612 - protein, 7 aa, synthetic construct
  REGION 1..7: note = Description of Artificial Sequence: Synthetic peptide
GLSEHKV

SEQ ID NO: 2613 - protein, 7 aa, synthetic construct
  REGION 1..7: note = Description of Artificial Sequence: Synthetic peptide
TTNTKDR

SEQ ID NO: 2614 - protein, 7 aa, synthetic construct
  REGION 1..7: note = Description of Artificial Sequence: Synthetic peptide
ERPGPAK

SEQ ID NO: 2615 - protein, 7 aa, synthetic construct
  REGION 1..7: note = Description of Artificial Sequence: Synthetic peptide
GAGPSPT

SEQ ID NO: 2616 - protein, 7 aa, synthetic construct
  REGION 1..7: note = Description of Artificial Sequence: Synthetic peptide
ERDGKNF

SEQ ID NO: 2617 - protein, 7 aa, synthetic construct
  REGION 1..7: note = Description of Artificial Sequence: Synthetic peptide
SADRENR

SEQ ID NO: 2618 - protein, 7 aa, synthetic construct
  REGION 1..7: note = Description of Artificial Sequence: Synthetic peptide
DSNRGSA

SEQ ID NO: 2619 - protein, 7 aa, synthetic construct
  REGION 1..7: note = Description of Artificial Sequence: Synthetic peptide
ALKNSNQ

SEQ ID NO: 2620 - protein, 7 aa, synthetic construct
  REGION 1..7: note = Description of Artificial Sequence: Synthetic peptide
LNSGKLS

SEQ ID NO: 2621 - protein, 7 aa, synthetic construct
  REGION 1..7: note = Description of Artificial Sequence: Synthetic peptide
GQHNATT

SEQ ID NO: 2622 - protein, 7 aa, synthetic construct
  REGION 1..7: note = Description of Artificial Sequence: Synthetic peptide
LVGSKSE

SEQ ID NO: 2623 - protein, 7 aa, synthetic construct
  REGION 1..7: note = Description of Artificial Sequence: Synthetic peptide
ATVSKTA

SEQ ID NO: 2624 - protein, 7 aa, synthetic construct
  REGION 1..7: note = Description of Artificial Sequence: Synthetic peptide
ARTGSST

SEQ ID NO: 2625 - protein, 7 aa, synthetic construct
  REGION 1..7: note = Description of Artificial Sequence: Synthetic peptide
TQHKDKP

SEQ ID NO: 2626 - protein, 7 aa, synthetic construct
  REGION 1..7: note = Description of Artificial Sequence: Synthetic peptide
TPHTANK

SEQ ID NO: 2627 - protein, 7 aa, synthetic construct
  REGION 1..7: note = Description of Artificial Sequence: Synthetic peptide
SGTKAHD

SEQ ID NO: 2628 - protein, 7 aa, synthetic construct
  REGION 1..7: note = Description of Artificial Sequence: Synthetic peptide
SGSNSRD

SEQ ID NO: 2629 - protein, 7 aa, synthetic construct
  REGION 1..7: note = Description of Artificial Sequence: Synthetic peptide
MRVDKQI

SEQ ID NO: 2630 - protein, 7 aa, synthetic construct
  REGION 1..7: note = Description of Artificial Sequence: Synthetic peptide
IPRQQPG

SEQ ID NO: 2631 - protein, 7 aa, synthetic construct
  REGION 1..7: note = Description of Artificial Sequence: Synthetic peptide
SPSSQGG

SEQ ID NO: 2632 - protein, 7 aa, synthetic construct
  REGION 1..7: note = Description of Artificial Sequence: Synthetic peptide
SPGGRDS

SEQ ID NO: 2633 - protein, 7 aa, synthetic construct
  REGION 1..7: note = Description of Artificial Sequence: Synthetic peptide
ATGSGSR

SEQ ID NO: 2634 - protein, 7 aa, synthetic construct
  REGION 1..7: note = Description of Artificial Sequence: Synthetic peptide
GRSDTPS

SEQ ID NO: 2635 - protein, 7 aa, synthetic construct
  REGION 1..7: note = Description of Artificial Sequence: Synthetic peptide
RGSSTST

SEQ ID NO: 2636 - protein, 7 aa, synthetic construct
  REGION 1..7: note = Description of Artificial Sequence: Synthetic peptide
GRLSSEK

SEQ ID NO: 2637 - protein, 7 aa, synthetic construct
  REGION 1..7: note = Description of Artificial Sequence: Synthetic peptide
AVGTTPS

SEQ ID NO: 2638 - protein, 7 aa, synthetic construct
  REGION 1..7: note = Description of Artificial Sequence: Synthetic peptide
APSMSGK

SEQ ID NO: 2639 - protein, 7 aa, synthetic construct
  REGION 1..7: note = Description of Artificial Sequence: Synthetic peptide
NGNGPGK

SEQ ID NO: 2640 - protein, 7 aa, synthetic construct
  REGION 1..7: note = Description of Artificial Sequence: Synthetic peptide
TSDARPS

SEQ ID NO: 2641 - protein, 7 aa, synthetic construct
  REGION 1..7: note = Description of Artificial Sequence: Synthetic peptide
TPERVGG

SEQ ID NO: 2642 - protein, 7 aa, synthetic construct
  REGION 1..7: note = Description of Artificial Sequence: Synthetic peptide
SSATKSI

SEQ ID NO: 2643 - protein, 7 aa, synthetic construct
  REGION 1..7: note = Description of Artificial Sequence: Synthetic peptide
AGNSDKR

SEQ ID NO: 2644 - protein, 7 aa, synthetic construct
  REGION 1..7: note = Description of Artificial Sequence: Synthetic peptide
NPVARSE

SEQ ID NO: 2645 - protein, 7 aa, synthetic construct
  REGION 1..7: note = Description of Artificial Sequence: Synthetic peptide
TRDASVH

SEQ ID NO: 2646 - protein, 7 aa, synthetic construct
  REGION 1..7: note = Description of Artificial Sequence: Synthetic peptide
NPSTPKG

SEQ ID NO: 2647 - protein, 7 aa, synthetic construct
  REGION 1..7: note = Description of Artificial Sequence: Synthetic peptide
TGKGSSG

SEQ ID NO: 2648 - protein, 7 aa, synthetic construct
  REGION 1..7: note = Description of Artificial Sequence: Synthetic peptide
QGATGNR

SEQ ID NO: 2649 - protein, 7 aa, synthetic construct
  REGION 1..7: note = Description of Artificial Sequence: Synthetic peptide
SVREKPA

SEQ ID NO: 2650 - protein, 7 aa, synthetic construct
  REGION 1..7: note = Description of Artificial Sequence: Synthetic peptide
TTKTTAS

SEQ ID NO: 2651 - protein, 7 aa, synthetic construct
  REGION 1..7: note = Description of Artificial Sequence: Synthetic peptide
TGDRSNT

SEQ ID NO: 2652 - protein, 7 aa, synthetic construct
  REGION 1..7: note = Description of Artificial Sequence: Synthetic peptide
HVGSKSG

SEQ ID NO: 2653 - protein, 7 aa, synthetic construct
  REGION 1..7: note = Description of Artificial Sequence: Synthetic peptide
ATSKPTT

SEQ ID NO: 2654 - protein, 7 aa, synthetic construct
  REGION 1..7: note = Description of Artificial Sequence: Synthetic peptide
YANGKVG

SEQ ID NO: 2655 - protein, 7 aa, synthetic construct
  REGION 1..7: note = Description of Artificial Sequence: Synthetic peptide
LASSHST

SEQ ID NO: 2656 - protein, 7 aa, synthetic construct
  REGION 1..7: note = Description of Artificial Sequence: Synthetic peptide
AGSDHTR

SEQ ID NO: 2657 - protein, 7 aa, synthetic construct
  REGION 1..7: note = Description of Artificial Sequence: Synthetic peptide
VPEKGTL

SEQ ID NO: 2658 - protein, 7 aa, synthetic construct
  REGION 1..7: note = Description of Artificial Sequence: Synthetic peptide
SAGGGAS

SEQ ID NO: 2659 - protein, 7 aa, synthetic construct
  REGION 1..7: note = Description of Artificial Sequence: Synthetic peptide
GTAARDV

SEQ ID NO: 2660 - protein, 7 aa, synthetic construct
  REGION 1..7: note = Description of Artificial Sequence: Synthetic peptide
QGSERSR

SEQ ID NO: 2661 - protein, 7 aa, synthetic construct
  REGION 1..7: note = Description of Artificial Sequence: Synthetic peptide
QSKASQV

SEQ ID NO: 2662 - protein, 7 aa, synthetic construct
  REGION 1..7: note = Description of Artificial Sequence: Synthetic peptide
RQGEVQS

SEQ ID NO: 2663 - protein, 7 aa, synthetic construct
  REGION 1..7: note = Description of Artificial Sequence: Synthetic peptide
DRSPGAQ

SEQ ID NO: 2664 - protein, 7 aa, synthetic construct
  REGION 1..7: note = Description of Artificial Sequence: Synthetic peptide
LSATKTP

SEQ ID NO: 2665 - protein, 7 aa, synthetic construct
  REGION 1..7: note = Description of Artificial Sequence: Synthetic peptide
KQGSGLS

SEQ ID NO: 2666 - protein, 7 aa, synthetic construct
  REGION 1..7: note = Description of Artificial Sequence: Synthetic peptide
NSTPTVR

SEQ ID NO: 2667 - protein, 7 aa, synthetic construct
  REGION 1..7: note = Description of Artificial Sequence: Synthetic peptide
TTGKEKN

SEQ ID NO: 2668 - protein, 7 aa, synthetic construct
  REGION 1..7: note = Description of Artificial Sequence: Synthetic peptide
TSSKSPT

SEQ ID NO: 2669 - protein, 7 aa, synthetic construct
  REGION 1..7: note = Description of Artificial Sequence: Synthetic peptide
RQGQATA

SEQ ID NO: 2670 - protein, 7 aa, synthetic construct
  REGION 1..7: note = Description of Artificial Sequence: Synthetic peptide
SLGQPGS

SEQ ID NO: 2671 - protein, 7 aa, synthetic construct
  REGION 1..7: note = Description of Artificial Sequence: Synthetic peptide
SAGDSRN

SEQ ID NO: 2672 - protein, 7 aa, synthetic construct
  REGION 1..7: note = Description of Artificial Sequence: Synthetic peptide
QPSGGNT

SEQ ID NO: 2673 - protein, 7 aa, synthetic construct
  REGION 1..7: note = Description of Artificial Sequence: Synthetic peptide
DPGPSSS

SEQ ID NO: 2674 - protein, 7 aa, synthetic construct
  REGION 1..7: note = Description of Artificial Sequence: Synthetic peptide
AATEKGR

SEQ ID NO: 2675 - protein, 7 aa, synthetic construct
  REGION 1..7: note = Description of Artificial Sequence: Synthetic peptide
SSGTLGS

SEQ ID NO: 2676 - protein, 7 aa, synthetic construct
  REGION 1..7: note = Description of Artificial Sequence: Synthetic peptide
SSSPSLK

SEQ ID NO: 2677 - protein, 7 aa, synthetic construct
  REGION 1..7: note = Description of Artificial Sequence: Synthetic peptide
FEGSGAK

SEQ ID NO: 2678 - protein, 7 aa, synthetic construct
  REGION 1..7: note = Description of Artificial Sequence: Synthetic peptide
DSGRPTT

SEQ ID NO: 2679 - protein, 7 aa, synthetic construct
  REGION 1..7: note = Description of Artificial Sequence: Synthetic peptide
HASASPT

SEQ ID NO: 2680 - protein, 7 aa, synthetic construct
  REGION 1..7: note = Description of Artificial Sequence: Synthetic peptide
DTRKASA

SEQ ID NO: 2681 - protein, 7 aa, synthetic construct
  REGION 1..7: note = Description of Artificial Sequence: Synthetic peptide
SQGVNPP

SEQ ID NO: 2682 - protein, 7 aa, synthetic construct
  REGION 1..7: note = Description of Artificial Sequence: Synthetic peptide
VQNSGGN

SEQ ID NO: 2683 - protein, 7 aa, synthetic construct
  REGION 1..7: note = Description of Artificial Sequence: Synthetic peptide
SLPDHKT

SEQ ID NO: 2684 - protein, 7 aa, synthetic construct
  REGION 1..7: note = Description of Artificial Sequence: Synthetic peptide
DTTNGNV

SEQ ID NO: 2685 - protein, 7 aa, synthetic construct
  REGION 1..7: note = Description of Artificial Sequence: Synthetic peptide
GKNQSSM

SEQ ID NO: 2686 - protein, 7 aa, synthetic construct
  REGION 1..7: note = Description of Artificial Sequence: Synthetic peptide
SRSTSPS

SEQ ID NO: 2687 - protein, 7 aa, synthetic construct
  REGION 1..7: note = Description of Artificial Sequence: Synthetic peptide
SNSGGSK

SEQ ID NO: 2688 - protein, 7 aa, synthetic construct
  REGION 1..7: note = Description of Artificial Sequence: Synthetic peptide
EGHTKML

SEQ ID NO: 2689 - protein, 7 aa, synthetic construct
  REGION 1..7: note = Description of Artificial Sequence: Synthetic peptide
AAGSTVH

SEQ ID NO: 2690 - protein, 7 aa, synthetic construct
  REGION 1..7: note = Description of Artificial Sequence: Synthetic peptide
VQAANSQ

SEQ ID NO: 2691 - protein, 7 aa, synthetic construct
  REGION 1..7: note = Description of Artificial Sequence: Synthetic peptide
TVGKGLQ

SEQ ID NO: 2692 - protein, 7 aa, synthetic construct
  REGION 1..7: note = Description of Artificial Sequence: Synthetic peptide
SGAVKPN

SEQ ID NO: 2693 - protein, 7 aa, synthetic construct
  REGION 1..7: note = Description of Artificial Sequence: Synthetic peptide
DRTPTHT

SEQ ID NO: 2694 - protein, 7 aa, synthetic construct
  REGION 1..7: note = Description of Artificial Sequence: Synthetic peptide
GGSREQS

SEQ ID NO: 2695 - protein, 7 aa, synthetic construct
  REGION 1..7: note = Description of Artificial Sequence: Synthetic peptide
GKTGTHM

SEQ ID NO: 2696 - protein, 7 aa, synthetic construct
  REGION 1..7: note = Description of Artificial Sequence: Synthetic peptide
TTSSSSM

SEQ ID NO: 2697 - protein, 7 aa, synthetic construct
  REGION 1..7: note = Description of Artificial Sequence: Synthetic peptide
SRSTQAE

SEQ ID NO: 2698 - protein, 7 aa, synthetic construct
  REGION 1..7: note = Description of Artificial Sequence: Synthetic peptide
QTSGKPM

SEQ ID NO: 2699 - protein, 7 aa, synthetic construct
  REGION 1..7: note = Description of Artificial Sequence: Synthetic peptide
SGSGNGS

SEQ ID NO: 2700 - protein, 7 aa, synthetic construct
  REGION 1..7: note = Description of Artificial Sequence: Synthetic peptide
NAVKPYS

SEQ ID NO: 2701 - protein, 7 aa, synthetic construct
  REGION 1..7: note = Description of Artificial Sequence: Synthetic peptide
SSGQRTS

SEQ ID NO: 2702 - protein, 7 aa, synthetic construct
  REGION 1..7: note = Description of Artificial Sequence: Synthetic peptide
AGNHPAT

SEQ ID NO: 2703 - protein, 7 aa, synthetic construct
  REGION 1..7: note = Description of Artificial Sequence: Synthetic peptide
HSRESQQ

SEQ ID NO: 2704 - protein, 7 aa, synthetic construct
  REGION 1..7: note = Description of Artificial Sequence: Synthetic peptide
SRTDRPI

SEQ ID NO: 2705 - protein, 7 aa, synthetic construct
  REGION 1..7: note = Description of Artificial Sequence: Synthetic peptide
MGSSKTT

SEQ ID NO: 2706 - protein, 7 aa, synthetic construct
  REGION 1..7: note = Description of Artificial Sequence: Synthetic peptide
LQTNSTA

SEQ ID NO: 2707 - protein, 7 aa, synthetic construct
  REGION 1..7: note = Description of Artificial Sequence: Synthetic peptide
DSPPSKH

SEQ ID NO: 2708 - protein, 7 aa, synthetic construct
  REGION 1..7: note = Description of Artificial Sequence: Synthetic peptide
TGVTKPS

SEQ ID NO: 2709 - protein, 7 aa, synthetic construct
  REGION 1..7: note = Description of Artificial Sequence: Synthetic peptide
SLTNSRS

SEQ ID NO: 2710 - protein, 7 aa, synthetic construct
  REGION 1..7: note = Description of Artificial Sequence: Synthetic peptide
GPSPPTT

SEQ ID NO: 2711 - protein, 7 aa, synthetic construct
  REGION 1..7: note = Description of Artificial Sequence: Synthetic peptide
KSGANTV

SEQ ID NO: 2712 - protein, 7 aa, synthetic construct
  REGION 1..7: note = Description of Artificial Sequence: Synthetic peptide
RNSEGPK

SEQ ID NO: 2713 - protein, 7 aa, synthetic construct
  REGION 1..7: note = Description of Artificial Sequence: Synthetic peptide
STKSVST

SEQ ID NO: 2714 - protein, 7 aa, synthetic construct
  REGION 1..7: note = Description of Artificial Sequence: Synthetic peptide
SNHSPNV

SEQ ID NO: 2715 - protein, 7 aa, synthetic construct
  REGION 1..7: note = Description of Artificial Sequence: Synthetic peptide
SSVQKQQ

SEQ ID NO: 2716 - protein, 7 aa, synthetic construct
  REGION 1..7: note = Description of Artificial Sequence: Synthetic peptide
SGRGSNS

SEQ ID NO: 2717 - protein, 7 aa, synthetic construct
  REGION 1..7: note = Description of Artificial Sequence: Synthetic peptide
MDNQKAR

SEQ ID NO: 2718 - protein, 7 aa, synthetic construct
  REGION 1..7: note = Description of Artificial Sequence: Synthetic peptide
LASGSRS

SEQ ID NO: 2719 - protein, 7 aa, synthetic construct
  REGION 1..7: note = Description of Artificial Sequence: Synthetic peptide
DQNGSRL

SEQ ID NO: 2720 - protein, 7 aa, synthetic construct
  REGION 1..7: note = Description of Artificial Sequence: Synthetic peptide
ETTRPTT

SEQ ID NO: 2721 - protein, 7 aa, synthetic construct
  REGION 1..7: note = Description of Artificial Sequence: Synthetic peptide
GSLGTGN

SEQ ID NO: 2722 - protein, 7 aa, synthetic construct
  REGION 1..7: note = Description of Artificial Sequence: Synthetic peptide
TGTSTAT

SEQ ID NO: 2723 - protein, 7 aa, synthetic construct
  REGION 1..7: note = Description of Artificial Sequence: Synthetic peptide
NSGRPST

SEQ ID NO: 2724 - protein, 7 aa, synthetic construct
  REGION 1..7: note = Description of Artificial Sequence: Synthetic peptide
TQLGAPK

SEQ ID NO: 2725 - protein, 7 aa, synthetic construct
  REGION 1..7: note = Description of Artificial Sequence: Synthetic peptide
QQRQSTG

SEQ ID NO: 2726 - protein, 7 aa, synthetic construct
  REGION 1..7: note = Description of Artificial Sequence: Synthetic peptide
ATGIPST

SEQ ID NO: 2727 - protein, 7 aa, synthetic construct
  REGION 1..7: note = Description of Artificial Sequence: Synthetic peptide
GQSQPFK

SEQ ID NO: 2728 - protein, 7 aa, synthetic construct
  REGION 1..7: note = Description of Artificial Sequence: Synthetic peptide
VAAKGSS

SEQ ID NO: 2729 - protein, 7 aa, synthetic construct
  REGION 1..7: note = Description of Artificial Sequence: Synthetic peptide
AVSKSTI

SEQ ID NO: 2730 - protein, 7 aa, synthetic construct
  REGION 1..7: note = Description of Artificial Sequence: Synthetic peptide
MSSQGGS

SEQ ID NO: 2731 - protein, 7 aa, synthetic construct
  REGION 1..7: note = Description of Artificial Sequence: Synthetic peptide
QHSGSST

SEQ ID NO: 2732 - protein, 7 aa, synthetic construct
  REGION 1..7: note = Description of Artificial Sequence: Synthetic peptide
HTDLKTT

SEQ ID NO: 2733 - protein, 7 aa, synthetic construct
  REGION 1..7: note = Description of Artificial Sequence: Synthetic peptide
AVEGSKN

SEQ ID NO: 2734 - protein, 7 aa, synthetic construct
  REGION 1..7: note = Description of Artificial Sequence: Synthetic peptide
ARSGNNI

SEQ ID NO: 2735 - protein, 7 aa, synthetic construct
  REGION 1..7: note = Description of Artificial Sequence: Synthetic peptide
GPGAPSK

SEQ ID NO: 2736 - protein, 7 aa, synthetic construct
  REGION 1..7: note = Description of Artificial Sequence: Synthetic peptide
SAADPKV

SEQ ID NO: 2737 - protein, 7 aa, synthetic construct
  REGION 1..7: note = Description of Artificial Sequence: Synthetic peptide
SHGTENK

SEQ ID NO: 2738 - protein, 7 aa, synthetic construct
  REGION 1..7: note = Description of Artificial Sequence: Synthetic peptide
SPVSGTT

SEQ ID NO: 2739 - protein, 7 aa, synthetic construct
  REGION 1..7: note = Description of Artificial Sequence: Synthetic peptide
VNTSNTT

SEQ ID NO: 2740 - protein, 7 aa, synthetic construct
  REGION 1..7: note = Description of Artificial Sequence: Synthetic peptide
SSTSGAG

SEQ ID NO: 2741 - protein, 7 aa, synthetic construct
  REGION 1..7: note = Description of Artificial Sequence: Synthetic peptide
GTPSKAG

SEQ ID NO: 2742 - protein, 7 aa, synthetic construct
  REGION 1..7: note = Description of Artificial Sequence: Synthetic peptide
DKTTAGQ

SEQ ID NO: 2743 - protein, 7 aa, synthetic construct
  REGION 1..7: note = Description of Artificial Sequence: Synthetic peptide
TTGGHSS

SEQ ID NO: 2744 - protein, 7 aa, synthetic construct
  REGION 1..7: note = Description of Artificial Sequence: Synthetic peptide
GASNSTG

SEQ ID NO: 2745 - protein, 7 aa, synthetic construct
  REGION 1..7: note = Description of Artificial Sequence: Synthetic peptide
AINGKAG

SEQ ID NO: 2746 - protein, 7 aa, synthetic construct
  REGION 1..7: note = Description of Artificial Sequence: Synthetic peptide
VIDTKAG

SEQ ID NO: 2747 - protein, 7 aa, synthetic construct
  REGION 1..7: note = Description of Artificial Sequence: Synthetic peptide
NASSSTG

SEQ ID NO: 2748 - protein, 7 aa, synthetic construct
  REGION 1..7: note = Description of Artificial Sequence: Synthetic peptide
GTSSPAN

SEQ ID NO: 2749 - protein, 7 aa, synthetic construct
  REGION 1..7: note = Description of Artificial Sequence: Synthetic peptide
GPGDTRS

SEQ ID NO: 2750 - protein, 7 aa, synthetic construct
  REGION 1..7: note = Description of Artificial Sequence: Synthetic peptide
GNGSSAL

SEQ ID NO: 2751 - protein, 7 aa, synthetic construct
  REGION 1..7: note = Description of Artificial Sequence: Synthetic peptide
GRSGGTG

SEQ ID NO: 2752 - protein, 7 aa, synthetic construct
  REGION 1..7: note = Description of Artificial Sequence: Synthetic peptide
STGPTPA

SEQ ID NO: 2753 - protein, 7 aa, synthetic construct
  REGION 1..7: note = Description of Artificial Sequence: Synthetic peptide
HGGRDSS

SEQ ID NO: 2754 - protein, 7 aa, synthetic construct
  REGION 1..7: note = Description of Artificial Sequence: Synthetic peptide
GSGTPNG

SEQ ID NO: 2755 - protein, 7 aa, synthetic construct
  REGION 1..7: note = Description of Artificial Sequence: Synthetic peptide
GKAGSTG

SEQ ID NO: 2756 - protein, 7 aa, synthetic construct
  REGION 1..7: note = Description of Artificial Sequence: Synthetic peptide
LSAGKGE

SEQ ID NO: 2757 - protein, 7 aa, synthetic construct
  REGION 1..7: note = Description of Artificial Sequence: Synthetic peptide
VGIPSAG

SEQ ID NO: 2758 - protein, 7 aa, synthetic construct
  REGION 1..7: note = Description of Artificial Sequence: Synthetic peptide
SGGQKDN

SEQ ID NO: 2759 - protein, 7 aa, synthetic construct
  REGION 1..7: note = Description of Artificial Sequence: Synthetic peptide
ETGGSPK

SEQ ID NO: 2760 - protein, 7 aa, synthetic construct
  REGION 1..7: note = Description of Artificial Sequence: Synthetic peptide
QGHTNVA

SEQ ID NO: 2761 - protein, 7 aa, synthetic construct
  REGION 1..7: note = Description of Artificial Sequence: Synthetic peptide
SHGSPAS

SEQ ID NO: 2762 - protein, 7 aa, synthetic construct
  REGION 1..7: note = Description of Artificial Sequence: Synthetic peptide
SQKSVAG

SEQ ID NO: 2763 - protein, 7 aa, synthetic construct
  REGION 1..7: note = Description of Artificial Sequence: Synthetic peptide
VGQSAAQ

SEQ ID NO: 2764 - protein, 7 aa, synthetic construct
  REGION 1..7: note = Description of Artificial Sequence: Synthetic peptide
DGQSSKS

SEQ ID NO: 2765 - protein, 7 aa, synthetic construct
  REGION 1..7: note = Description of Artificial Sequence: Synthetic peptide
AQAKPAG

SEQ ID NO: 2766 - protein, 7 aa, synthetic construct
  REGION 1..7: note = Description of Artificial Sequence: Synthetic peptide
TGHNSSM

SEQ ID NO: 2767 - protein, 7 aa, synthetic construct
  REGION 1..7: note = Description of Artificial Sequence: Synthetic peptide
GQSTSSG

SEQ ID NO: 2768 - protein, 7 aa, synthetic construct
  REGION 1..7: note = Description of Artificial Sequence: Synthetic peptide
TGISGAG

SEQ ID NO: 2769 - protein, 7 aa, synthetic construct
  REGION 1..7: note = Description of Artificial Sequence: Synthetic peptide
VRDTSSS

SEQ ID NO: 2770 - protein, 7 aa, synthetic construct
  REGION 1..7: note = Description of Artificial Sequence: Synthetic peptide
VSSKGLA

SEQ ID NO: 2771 - protein, 7 aa, synthetic construct
  REGION 1..7: note = Description of Artificial Sequence: Synthetic peptide
DGRSTSA

SEQ ID NO: 2772 - protein, 7 aa, synthetic construct
  REGION 1..7: note = Description of Artificial Sequence: Synthetic peptide
SSNTGHT

SEQ ID NO: 2773 - protein, 7 aa, synthetic construct
  REGION 1..7: note = Description of Artificial Sequence: Synthetic peptide
QNNSKTE

SEQ ID NO: 2774 - protein, 7 aa, synthetic construct
  REGION 1..7: note = Description of Artificial Sequence: Synthetic peptide
QEGSSSK

SEQ ID NO: 2775 - protein, 7 aa, synthetic construct
  REGION 1..7: note = Description of Artificial Sequence: Synthetic peptide
NTKTTTG

SEQ ID NO: 2776 - protein, 7 aa, synthetic construct
  REGION 1..7: note = Description of Artificial Sequence: Synthetic peptide
ASNSGST

SEQ ID NO: 2777 - protein, 7 aa, synthetic construct
  REGION 1..7: note = Description of Artificial Sequence: Synthetic peptide
LGGGKES

SEQ ID NO: 2778 - protein, 7 aa, synthetic construct
  REGION 1..7: note = Description of Artificial Sequence: Synthetic peptide
GNGKSDG

SEQ ID NO: 2779 - protein, 7 aa, synthetic construct
  REGION 1..7: note = Description of Artificial Sequence: Synthetic peptide
SEANQKL

SEQ ID NO: 2780 - protein, 7 aa, synthetic construct
  REGION 1..7: note = Description of Artificial Sequence: Synthetic peptide
ASSPSGG

SEQ ID NO: 2781 - protein, 7 aa, synthetic construct
  REGION 1..7: note = Description of Artificial Sequence: Synthetic peptide
DTGKASM

SEQ ID NO: 2782 - protein, 7 aa, synthetic construct
  REGION 1..7: note = Description of Artificial Sequence: Synthetic peptide
ETSKERA

SEQ ID NO: 2783 - protein, 7 aa, synthetic construct
  REGION 1..7: note = Description of Artificial Sequence: Synthetic peptide
GGGHKES

SEQ ID NO: 2784 - protein, 7 aa, synthetic construct
  REGION 1..7: note = Description of Artificial Sequence: Synthetic peptide
DNGTKVI

SEQ ID NO: 2785 - protein, 7 aa, synthetic construct
  REGION 1..7: note = Description of Artificial Sequence: Synthetic peptide
QVGKDSH

SEQ ID NO: 2786 - protein, 7 aa, synthetic construct
  REGION 1..7: note = Description of Artificial Sequence: Synthetic peptide
TTSATSV

SEQ ID NO: 2787 - protein, 7 aa, synthetic construct
  REGION 1..7: note = Description of Artificial Sequence: Synthetic peptide
QATGGTQ

SEQ ID NO: 2788 - protein, 7 aa, synthetic construct
  REGION 1..7: note = Description of Artificial Sequence: Synthetic peptide
ESGKGSL

SEQ ID NO: 2789 - protein, 7 aa, synthetic construct
  REGION 1..7: note = Description of Artificial Sequence: Synthetic peptide
ENSSGHA

SEQ ID NO: 2790 - protein, 7 aa, synthetic construct
  REGION 1..7: note = Description of Artificial Sequence: Synthetic peptide
DTKTSPG

SEQ ID NO: 2791 - protein, 7 aa, synthetic construct
  REGION 1..7: note = Description of Artificial Sequence: Synthetic peptide
HGNTTSG

SEQ ID NO: 2792 - protein, 7 aa, synthetic construct
  REGION 1..7: note = Description of Artificial Sequence: Synthetic peptide
NVGATST

SEQ ID NO: 2793 - protein, 7 aa, synthetic construct
  REGION 1..7: note = Description of Artificial Sequence: Synthetic peptide
NGNGQSK

SEQ ID NO: 2794 - protein, 7 aa, synthetic construct
  REGION 1..7: note = Description of Artificial Sequence: Synthetic peptide
GLSGSAG

SEQ ID NO: 2795 - protein, 7 aa, synthetic construct
  REGION 1..7: note = Description of Artificial Sequence: Synthetic peptide
TNGSKPD

SEQ ID NO: 2796 - protein, 7 aa, synthetic construct
  REGION 1..7: note = Description of Artificial Sequence: Synthetic peptide
YPEAKGA

SEQ ID NO: 2797 - protein, 7 aa, synthetic construct
  REGION 1..7: note = Description of Artificial Sequence: Synthetic peptide
GQSSGGG

SEQ ID NO: 2798 - protein, 7 aa, synthetic construct
  REGION 1..7: note = Description of Artificial Sequence: Synthetic peptide
DMNGAGK

SEQ ID NO: 2799 - protein, 7 aa, synthetic construct
  REGION 1..7: note = Description of Artificial Sequence: Synthetic peptide
GNGNKVI

SEQ ID NO: 2800 - protein, 7 aa, synthetic construct
  REGION 1..7: note = Description of Artificial Sequence: Synthetic peptide
TSDSKNT

SEQ ID NO: 2801 - protein, 7 aa, synthetic construct
  REGION 1..7: note = Description of Artificial Sequence: Synthetic peptide
AGKGTSE

SEQ ID NO: 2802 - protein, 7 aa, synthetic construct
  REGION 1..7: note = Description of Artificial Sequence: Synthetic peptide
TSEDRSK

SEQ ID NO: 2803 - protein, 7 aa, synthetic construct
  REGION 1..7: note = Description of Artificial Sequence: Synthetic peptide
VQSSSTT

SEQ ID NO: 2804 - protein, 7 aa, synthetic construct
  REGION 1..7: note = Description of Artificial Sequence: Synthetic peptide
SGVSERG

SEQ ID NO: 2805 - protein, 7 aa, synthetic construct
  REGION 1..7: note = Description of Artificial Sequence: Synthetic peptide
KEGSNGV

SEQ ID NO: 2806 - protein, 7 aa, synthetic construct
  REGION 1..7: note = Description of Artificial Sequence: Synthetic peptide
DRGQESR

SEQ ID NO: 2807 - protein, 7 aa, synthetic construct
  REGION 1..7: note = Description of Artificial Sequence: Synthetic peptide
DGVSDRK

SEQ ID NO: 2808 - protein, 7 aa, synthetic construct
  REGION 1..7: note = Description of Artificial Sequence: Synthetic peptide
TGQGTNV

SEQ ID NO: 2809 - protein, 7 aa, synthetic construct
  REGION 1..7: note = Description of Artificial Sequence: Synthetic peptide
ENGTKPG

SEQ ID NO: 2810 - protein, 7 aa, synthetic construct
  REGION 1..7: note = Description of Artificial Sequence: Synthetic peptide
EAGHGNG

SEQ ID NO: 2811 - protein, 7 aa, synthetic construct
  REGION 1..7: note = Description of Artificial Sequence: Synthetic peptide
DGSGKIN

SEQ ID NO: 2812 - protein, 7 aa, synthetic construct
  REGION 1..7: note = Description of Artificial Sequence: Synthetic peptide
QNGSSQS

SEQ ID NO: 2813 - protein, 7 aa, synthetic construct
  REGION 1..7: note = Description of Artificial Sequence: Synthetic peptide
SNGKTSV

SEQ ID NO: 2814 - protein, 7 aa, synthetic construct
  REGION 1..7: note = Description of Artificial Sequence: Synthetic peptide
SSAGKGD

SEQ ID NO: 2815 - protein, 7 aa, synthetic construct
  REGION 1..7: note = Description of Artificial Sequence: Synthetic peptide
QSKSSQG

SEQ ID NO: 2816 - protein, 7 aa, synthetic construct
  REGION 1..7: note = Description of Artificial Sequence: Synthetic peptide
DPSDKPR

SEQ ID NO: 2817 - protein, 7 aa, synthetic construct
  REGION 1..7: note = Description of Artificial Sequence: Synthetic peptide
GSSEARG

SEQ ID NO: 2818 - protein, 7 aa, synthetic construct
  REGION 1..7: note = Description of Artificial Sequence: Synthetic peptide
NGTKQGT

SEQ ID NO: 2819 - protein, 7 aa, synthetic construct
  REGION 1..7: note = Description of Artificial Sequence: Synthetic peptide
EGGSSVN

SEQ ID NO: 2820 - protein, 7 aa, synthetic construct
  REGION 1..7: note = Description of Artificial Sequence: Synthetic peptide
GSGKGSG

SEQ ID NO: 2821 - protein, 7 aa, synthetic construct
  REGION 1..7: note = Description of Artificial Sequence: Synthetic peptide
DATKAGL

SEQ ID NO: 2822 - protein, 7 aa, synthetic construct
  REGION 1..7: note = Description of Artificial Sequence: Synthetic peptide
QKTSNTE

SEQ ID NO: 2823 - protein, 7 aa, synthetic construct
  REGION 1..7: note = Description of Artificial Sequence: Synthetic peptide
HNSKDTV

SEQ ID NO: 2824 - protein, 7 aa, synthetic construct
  REGION 1..7: note = Description of Artificial Sequence: Synthetic peptide
NGTDKKQ

SEQ ID NO: 2825 - protein, 7 aa, synthetic construct
  REGION 1..7: note = Description of Artificial Sequence: Synthetic peptide
SSGGGSS

SEQ ID NO: 2826 - protein, 7 aa, synthetic construct
  REGION 1..7: note = Description of Artificial Sequence: Synthetic peptide
GNQTTAG

SEQ ID NO: 2827 - protein, 7 aa, synthetic construct
  REGION 1..7: note = Description of Artificial Sequence: Synthetic peptide
QGSTSLS

SEQ ID NO: 2828 - protein, 7 aa, synthetic construct
  REGION 1..7: note = Description of Artificial Sequence: Synthetic peptide
GHSNPSS

SEQ ID NO: 2829 - protein, 7 aa, synthetic construct
  REGION 1..7: note = Description of Artificial Sequence: Synthetic peptide
NGTGNAS

SEQ ID NO: 2830 - protein, 7 aa, synthetic construct
  REGION 1..7: note = Description of Artificial Sequence: Synthetic peptide
GSQDSKS

SEQ ID NO: 2831 - protein, 7 aa, synthetic construct
  REGION 1..7: note = Description of Artificial Sequence: Synthetic peptide
AGDTHKT

SEQ ID NO: 2832 - protein, 7 aa, synthetic construct
  REGION 1..7: note = Description of Artificial Sequence: Synthetic peptide
SNVGKQD

SEQ ID NO: 2833 - protein, 7 aa, synthetic construct
  REGION 1..7: note = Description of Artificial Sequence: Synthetic peptide
SRGEHSQ

SEQ ID NO: 2834 - protein, 7 aa, synthetic construct
  REGION 1..7: note = Description of Artificial Sequence: Synthetic peptide
ASGSGNS

SEQ ID NO: 2835 - protein, 7 aa, synthetic construct
  REGION 1..7: note = Description of Artificial Sequence: Synthetic peptide
LGSQSPS

SEQ ID NO: 2836 - protein, 7 aa, synthetic construct
  REGION 1..7: note = Description of Artificial Sequence: Synthetic peptide
TGLTSSA

SEQ ID NO: 2837 - protein, 7 aa, synthetic construct
  REGION 1..7: note = Description of Artificial Sequence: Synthetic peptide
TSSGKGD

SEQ ID NO: 2838 - protein, 7 aa, synthetic construct
  REGION 1..7: note = Description of Artificial Sequence: Synthetic peptide
ADGKPSS

SEQ ID NO: 2839 - protein, 7 aa, synthetic construct
  REGION 1..7: note = Description of Artificial Sequence: Synthetic peptide
MTGSSSS

SEQ ID NO: 2840 - protein, 7 aa, synthetic construct
  REGION 1..7: note = Description of Artificial Sequence: Synthetic peptide
SNGSKTD

SEQ ID NO: 2841 - protein, 7 aa, synthetic construct
  REGION 1..7: note = Description of Artificial Sequence: Synthetic peptide
DSSSKAL

SEQ ID NO: 2842 - protein, 7 aa, synthetic construct
  REGION 1..7: note = Description of Artificial Sequence: Synthetic peptide
RSEKVAG

SEQ ID NO: 2843 - protein, 7 aa, synthetic construct
  REGION 1..7: note = Description of Artificial Sequence: Synthetic peptide
QMERKAG

SEQ ID NO: 2844 - protein, 7 aa, synthetic construct
  REGION 1..7: note = Description of Artificial Sequence: Synthetic peptide
ESSTRPG

SEQ ID NO: 2845 - protein, 7 aa, synthetic construct
  REGION 1..7: note = Description of Artificial Sequence: Synthetic peptide
GNSPSNT

SEQ ID NO: 2846 - protein, 7 aa, synthetic construct
  REGION 1..7: note = Description of Artificial Sequence: Synthetic peptide
SLSNKSE

SEQ ID NO: 2847 - protein, 7 aa, synthetic construct
  REGION 1..7: note = Description of Artificial Sequence: Synthetic peptide
SGSTSPT

SEQ ID NO: 2848 - protein, 7 aa, synthetic construct
  REGION 1..7: note = Description of Artificial Sequence: Synthetic peptide
GMGTSGT

SEQ ID NO: 2849 - protein, 7 aa, synthetic construct
  REGION 1..7: note = Description of Artificial Sequence: Synthetic peptide
DVNSNSR

SEQ ID NO: 2850 - protein, 7 aa, synthetic construct
  REGION 1..7: note = Description of Artificial Sequence: Synthetic peptide
ATSDKAA

SEQ ID NO: 2851 - protein, 7 aa, synthetic construct
  REGION 1..7: note = Description of Artificial Sequence: Synthetic peptide
NSGSDRN

SEQ ID NO: 2852 - protein, 7 aa, synthetic construct
  REGION 1..7: note = Description of Artificial Sequence: Synthetic peptide
QGESKFT

SEQ ID NO: 2853 - protein, 7 aa, synthetic construct
  REGION 1..7: note = Description of Artificial Sequence: Synthetic peptide
SMSKEST

SEQ ID NO: 2854 - protein, 7 aa, synthetic construct
  REGION 1..7: note = Description of Artificial Sequence: Synthetic peptide
GTSSDTK

SEQ ID NO: 2855 - protein, 7 aa, synthetic construct
  REGION 1..7: note = Description of Artificial Sequence: Synthetic peptide
NPGNSSG

SEQ ID NO: 2856 - protein, 7 aa, synthetic construct
  REGION 1..7: note = Description of Artificial Sequence: Synthetic peptide
SHSSGSS

SEQ ID NO: 2857 - protein, 7 aa, synthetic construct
  REGION 1..7: note = Description of Artificial Sequence: Synthetic peptide
ESGTNSR

SEQ ID NO: 2858 - protein, 7 aa, synthetic construct
  REGION 1..7: note = Description of Artificial Sequence: Synthetic peptide
DTSHKSE

SEQ ID NO: 2859 - protein, 7 aa, synthetic construct
  REGION 1..7: note = Description of Artificial Sequence: Synthetic peptide
SGAQPGN

SEQ ID NO: 2860 - protein, 7 aa, synthetic construct
  REGION 1..7: note = Description of Artificial Sequence: Synthetic peptide
TDGQTSR

SEQ ID NO: 2861 - protein, 7 aa, synthetic construct
  REGION 1..7: note = Description of Artificial Sequence: Synthetic peptide
GHSDAPR

SEQ ID NO: 2862 - protein, 7 aa, synthetic construct
  REGION 1..7: note = Description of Artificial Sequence: Synthetic peptide
DSAGTPR

SEQ ID NO: 2863 - protein, 7 aa, synthetic construct
  REGION 1..7: note = Description of Artificial Sequence: Synthetic peptide
VGTSTSK

SEQ ID NO: 2864 - protein, 7 aa, synthetic construct
  REGION 1..7: note = Description of Artificial Sequence: Synthetic peptide
VGQGAQS

SEQ ID NO: 2865 - protein, 7 aa, synthetic construct
  REGION 1..7: note = Description of Artificial Sequence: Synthetic peptide
EGTKQGT

SEQ ID NO: 2866 - protein, 7 aa, synthetic construct
  REGION 1..7: note = Description of Artificial Sequence: Synthetic peptide
NIPSGTG

SEQ ID NO: 2867 - protein, 7 aa, synthetic construct
  REGION 1..7: note = Description of Artificial Sequence: Synthetic peptide
NPGQTIS

SEQ ID NO: 2868 - protein, 7 aa, synthetic construct
  REGION 1..7: note = Description of Artificial Sequence: Synthetic peptide
TSGTGQP

SEQ ID NO: 2869 - protein, 7 aa, synthetic construct
  REGION 1..7: note = Description of Artificial Sequence: Synthetic peptide
STNVSPG

SEQ ID NO: 2870 - protein, 7 aa, synthetic construct
  REGION 1..7: note = Description of Artificial Sequence: Synthetic peptide
SGIGHTD

SEQ ID NO: 2871 - protein, 7 aa, synthetic construct
  REGION 1..7: note = Description of Artificial Sequence: Synthetic peptide
QVGNKPG

SEQ ID NO: 2872 - protein, 7 aa, synthetic construct
  REGION 1..7: note = Description of Artificial Sequence: Synthetic peptide
EGTRTPG

SEQ ID NO: 2873 - protein, 7 aa, synthetic construct
  REGION 1..7: note = Description of Artificial Sequence: Synthetic peptide
STSSQPL

SEQ ID NO: 2874 - protein, 7 aa, synthetic construct
  REGION 1..7: note = Description of Artificial Sequence: Synthetic peptide
DSSTKSI

SEQ ID NO: 2875 - protein, 7 aa, synthetic construct
  REGION 1..7: note = Description of Artificial Sequence: Synthetic peptide
AQSSTSV

SEQ ID NO: 2876 - protein, 7 aa, synthetic construct
  REGION 1..7: note = Description of Artificial Sequence: Synthetic peptide
TGGGKDG

SEQ ID NO: 2877 - protein, 7 aa, synthetic construct
  REGION 1..7: note = Description of Artificial Sequence: Synthetic peptide
GISEKAS

SEQ ID NO: 2878 - protein, 7 aa, synthetic construct
  REGION 1..7: note = Description of Artificial Sequence: Synthetic peptide
SGNTGSS

SEQ ID NO: 2879 - protein, 7 aa, synthetic construct
  REGION 1..7: note = Description of Artificial Sequence: Synthetic peptide
EPVSAGK

SEQ ID NO: 2880 - protein, 7 aa, synthetic construct
  REGION 1..7: note = Description of Artificial Sequence: Synthetic peptide
GSSEAQK

SEQ ID NO: 2881 - protein, 7 aa, synthetic construct
  REGION 1..7: note = Description of Artificial Sequence: Synthetic peptide
GLNGGKS

SEQ ID NO: 2882 - protein, 7 aa, synthetic construct
  REGION 1..7: note = Description of Artificial Sequence: Synthetic peptide
NSSSSVA

SEQ ID NO: 2883 - protein, 7 aa, synthetic construct
  REGION 1..7: note = Description of Artificial Sequence: Synthetic peptide
NGAGQNQ

SEQ ID NO: 2884 - protein, 7 aa, synthetic construct
  REGION 1..7: note = Description of Artificial Sequence: Synthetic peptide
DGNNQKT

SEQ ID NO: 2885 - protein, 7 aa, synthetic construct
  REGION 1..7: note = Description of Artificial Sequence: Synthetic peptide
ESRPSSA

SEQ ID NO: 2886 - protein, 7 aa, synthetic construct
  REGION 1..7: note = Description of Artificial Sequence: Synthetic peptide
VQGTSST

SEQ ID NO: 2887 - protein, 7 aa, synthetic construct
  REGION 1..7: note = Description of Artificial Sequence: Synthetic peptide
GSSSPSQ

SEQ ID NO: 2888 - protein, 7 aa, synthetic construct
  REGION 1..7: note = Description of Artificial Sequence: Synthetic peptide
SNSTPSV

SEQ ID NO: 2889 - protein, 7 aa, synthetic construct
  REGION 1..7: note = Description of Artificial Sequence: Synthetic peptide
GSSDKAR

SEQ ID NO: 2890 - protein, 7 aa, synthetic construct
  REGION 1..7: note = Description of Artificial Sequence: Synthetic peptide
GKVEGNK

SEQ ID NO: 2891 - protein, 7 aa, synthetic construct
  REGION 1..7: note = Description of Artificial Sequence: Synthetic peptide
TMSTKSE

SEQ ID NO: 2892 - protein, 7 aa, synthetic construct
  REGION 1..7: note = Description of Artificial Sequence: Synthetic peptide
GVGQNPQ

SEQ ID NO: 2893 - protein, 7 aa, synthetic construct
  REGION 1..7: note = Description of Artificial Sequence: Synthetic peptide
GTVGKPM

SEQ ID NO: 2894 - protein, 7 aa, synthetic construct
  REGION 1..7: note = Description of Artificial Sequence: Synthetic peptide
QVSDKNQ

SEQ ID NO: 2895 - protein, 7 aa, synthetic construct
  REGION 1..7: note = Description of Artificial Sequence: Synthetic peptide
QGAQSSV

SEQ ID NO: 2896 - protein, 7 aa, synthetic construct
  REGION 1..7: note = Description of Artificial Sequence: Synthetic peptide
EANKVAV

SEQ ID NO: 2897 - protein, 7 aa, synthetic construct
  REGION 1..7: note = Description of Artificial Sequence: Synthetic peptide
NTKESSG

SEQ ID NO: 2898 - protein, 7 aa, synthetic construct
  REGION 1..7: note = Description of Artificial Sequence: Synthetic peptide
SGGQSVS

SEQ ID NO: 2899 - protein, 7 aa, synthetic construct
  REGION 1..7: note = Description of Artificial Sequence: Synthetic peptide
HQESRPG

SEQ ID NO: 2900 - protein, 7 aa, synthetic construct
  REGION 1..7: note = Description of Artificial Sequence: Synthetic peptide
TTSDKSI

SEQ ID NO: 2901 - protein, 7 aa, synthetic construct
  REGION 1..7: note = Description of Artificial Sequence: Synthetic peptide
TTDSKSQ

SEQ ID NO: 2902 - protein, 7 aa, synthetic construct
  REGION 1..7: note = Description of Artificial Sequence: Synthetic peptide
NAGGHAS

SEQ ID NO: 2903 - protein, 7 aa, synthetic construct
  REGION 1..7: note = Description of Artificial Sequence: Synthetic peptide
GPATNNG

SEQ ID NO: 2904 - protein, 7 aa, synthetic construct
  REGION 1..7: note = Description of Artificial Sequence: Synthetic peptide
VGKTSNV

SEQ ID NO: 2905 - protein, 7 aa, synthetic construct
  REGION 1..7: note = Description of Artificial Sequence: Synthetic peptide
SESRSVS

SEQ ID NO: 2906 - protein, 7 aa, synthetic construct
  REGION 1..7: note = Description of Artificial Sequence: Synthetic peptide
TSASKSD

SEQ ID NO: 2907 - protein, 7 aa, synthetic construct
  REGION 1..7: note = Description of Artificial Sequence: Synthetic peptide
TSSSGNM

SEQ ID NO: 2908 - protein, 7 aa, synthetic construct
  REGION 1..7: note = Description of Artificial Sequence: Synthetic peptide
MNSGSTT

SEQ ID NO: 2909 - protein, 7 aa, synthetic construct
  REGION 1..7: note = Description of Artificial Sequence: Synthetic peptide
GPTQPNN

SEQ ID NO: 2910 - protein, 7 aa, synthetic construct
  REGION 1..7: note = Description of Artificial Sequence: Synthetic peptide
TKAQGAG

SEQ ID NO: 2911 - protein, 7 aa, synthetic construct
  REGION 1..7: note = Description of Artificial Sequence: Synthetic peptide
SVNHEAG

SEQ ID NO: 2912 - protein, 7 aa, synthetic construct
  REGION 1..7: note = Description of Artificial Sequence: Synthetic peptide
TGTASIT

SEQ ID NO: 2913 - protein, 7 aa, synthetic construct
  REGION 1..7: note = Description of Artificial Sequence: Synthetic peptide
TGGTHNS

SEQ ID NO: 2914 - protein, 7 aa, synthetic construct
  REGION 1..7: note = Description of Artificial Sequence: Synthetic peptide
NQGSSSS

SEQ ID NO: 2915 - protein, 7 aa, synthetic construct
  REGION 1..7: note = Description of Artificial Sequence: Synthetic peptide
DGVSSNR

SEQ ID NO: 2916 - protein, 7 aa, synthetic construct
  REGION 1..7: note = Description of Artificial Sequence: Synthetic peptide
MTSTGST

SEQ ID NO: 2917 - protein, 7 aa, synthetic construct
  REGION 1..7: note = Description of Artificial Sequence: Synthetic peptide
GTATGNQ

SEQ ID NO: 2918 - protein, 7 aa, synthetic construct
  REGION 1..7: note = Description of Artificial Sequence: Synthetic peptide
EKSTKPN

SEQ ID NO: 2919 - protein, 7 aa, synthetic construct
  REGION 1..7: note = Description of Artificial Sequence: Synthetic peptide
GGSGEKT

SEQ ID NO: 2920 - protein, 7 aa, synthetic construct
  REGION 1..7: note = Description of Artificial Sequence: Synthetic peptide
NVQSSNV

SEQ ID NO: 2921 - protein, 7 aa, synthetic construct
  REGION 1..7: note = Description of Artificial Sequence: Synthetic peptide
GSGSHSG

SEQ ID NO: 2922 - protein, 7 aa, synthetic construct
  REGION 1..7: note = Description of Artificial Sequence: Synthetic peptide
NSGNSGK

SEQ ID NO: 2923 - protein, 7 aa, synthetic construct
  REGION 1..7: note = Description of Artificial Sequence: Synthetic peptide
SSSNGSK

SEQ ID NO: 2924 - protein, 7 aa, synthetic construct
  REGION 1..7: note = Description of Artificial Sequence: Synthetic peptide
QGASSGS

SEQ ID NO: 2925 - protein, 7 aa, synthetic construct
  REGION 1..7: note = Description of Artificial Sequence: Synthetic peptide
SGTENVR

SEQ ID NO: 2926 - protein, 7 aa, synthetic construct
  REGION 1..7: note = Description of Artificial Sequence: Synthetic peptide
GTSNGPS

SEQ ID NO: 2927 - protein, 7 aa, synthetic construct
  REGION 1..7: note = Description of Artificial Sequence: Synthetic peptide
NASPSPG

SEQ ID NO: 2928 - protein, 7 aa, synthetic construct
  REGION 1..7: note = Description of Artificial Sequence: Synthetic peptide
QGNGNQG

SEQ ID NO: 2929 - protein, 7 aa, synthetic construct
  REGION 1..7: note = Description of Artificial Sequence: Synthetic peptide
HGTNSAG

SEQ ID NO: 2930 - protein, 7 aa, synthetic construct
  REGION 1..7: note = Description of Artificial Sequence: Synthetic peptide
ATSSTSI

SEQ ID NO: 2931 - protein, 7 aa, synthetic construct
  REGION 1..7: note = Description of Artificial Sequence: Synthetic peptide
SNGSTHS

SEQ ID NO: 2932 - protein, 7 aa, synthetic construct
  REGION 1..7: note = Description of Artificial Sequence: Synthetic peptide
GNKSTPS

SEQ ID NO: 2933 - protein, 7 aa, synthetic construct
  REGION 1..7: note = Description of Artificial Sequence: Synthetic peptide
LQTSSPG

SEQ ID NO: 2934 - protein, 7 aa, synthetic construct
  REGION 1..7: note = Description of Artificial Sequence: Synthetic peptide
GPNNSGS

SEQ ID NO: 2935 - protein, 7 aa, synthetic construct
  REGION 1..7: note = Description of Artificial Sequence: Synthetic peptide
RANGANS

SEQ ID NO: 2936 - protein, 7 aa, synthetic construct
  REGION 1..7: note = Description of Artificial Sequence: Synthetic peptide
TASGERA

SEQ ID NO: 2937 - protein, 7 aa, synthetic construct
  REGION 1..7: note = Description of Artificial Sequence: Synthetic peptide
NSTSSPG

SEQ ID NO: 2938 - protein, 7 aa, synthetic construct
  REGION 1..7: note = Description of Artificial Sequence: Synthetic peptide
QGDSHKG

SEQ ID NO: 2939 - protein, 7 aa, synthetic construct
  REGION 1..7: note = Description of Artificial Sequence: Synthetic peptide
DSTAVPK

SEQ ID NO: 2940 - protein, 7 aa, synthetic construct
  REGION 1..7: note = Description of Artificial Sequence: Synthetic peptide
TSNSKTL

SEQ ID NO: 2941 - protein, 7 aa, synthetic construct
  REGION 1..7: note = Description of Artificial Sequence: Synthetic peptide
ERTENSR

SEQ ID NO: 2942 - protein, 7 aa, synthetic construct
  REGION 1..7: note = Description of Artificial Sequence: Synthetic peptide
GSQQSTG

SEQ ID NO: 2943 - protein, 7 aa, synthetic construct
  REGION 1..7: note = Description of Artificial Sequence: Synthetic peptide
HGGQSTS

SEQ ID NO: 2944 - protein, 7 aa, synthetic construct
  REGION 1..7: note = Description of Artificial Sequence: Synthetic peptide
GGGNPAR

SEQ ID NO: 2945 - protein, 7 aa, synthetic construct
  REGION 1..7: note = Description of Artificial Sequence: Synthetic peptide
SATGTNS

SEQ ID NO: 2946 - protein, 7 aa, synthetic construct
  REGION 1..7: note = Description of Artificial Sequence: Synthetic peptide
SGGQAGM

SEQ ID NO: 2947 - protein, 7 aa, synthetic construct
  REGION 1..7: note = Description of Artificial Sequence: Synthetic peptide
GNASGQA

SEQ ID NO: 2948 - protein, 7 aa, synthetic construct
  REGION 1..7: note = Description of Artificial Sequence: Synthetic peptide
NVGNNAQ

SEQ ID NO: 2949 - protein, 7 aa, synthetic construct
  REGION 1..7: note = Description of Artificial Sequence: Synthetic peptide
GVGSSSQ

SEQ ID NO: 2950 - protein, 7 aa, synthetic construct
  REGION 1..7: note = Description of Artificial Sequence: Synthetic peptide
SSGSTPS

SEQ ID NO: 2951 - protein, 7 aa, synthetic construct
  REGION 1..7: note = Description of Artificial Sequence: Synthetic peptide
NTSQSSG

SEQ ID NO: 2952 - protein, 7 aa, synthetic construct
  REGION 1..7: note = Description of Artificial Sequence: Synthetic peptide
LSGKENV

SEQ ID NO: 2953 - protein, 7 aa, synthetic construct
  REGION 1..7: note = Description of Artificial Sequence: Synthetic peptide
GGKESHA

SEQ ID NO: 2954 - protein, 7 aa, synthetic construct
  REGION 1..7: note = Description of Artificial Sequence: Synthetic peptide
MGGGSST

SEQ ID NO: 2955 - protein, 7 aa, synthetic construct
  REGION 1..7: note = Description of Artificial Sequence: Synthetic peptide
TGVTTQG

SEQ ID NO: 2956 - protein, 7 aa, synthetic construct
  REGION 1..7: note = Description of Artificial Sequence: Synthetic peptide
SGGSGTM

SEQ ID NO: 2957 - protein, 7 aa, synthetic construct
  REGION 1..7: note = Description of Artificial Sequence: Synthetic peptide
VAEKASS

SEQ ID NO: 2958 - protein, 7 aa, synthetic construct
  REGION 1..7: note = Description of Artificial Sequence: Synthetic peptide
DSAGKSS

SEQ ID NO: 2959 - protein, 7 aa, synthetic construct
  REGION 1..7: note = Description of Artificial Sequence: Synthetic peptide
STAQPTG

SEQ ID NO: 2960 - protein, 7 aa, synthetic construct
  REGION 1..7: note = Description of Artificial Sequence: Synthetic peptide
STGHGNV

SEQ ID NO: 2961 - protein, 7 aa, synthetic construct
  REGION 1..7: note = Description of Artificial Sequence: Synthetic peptide
SASQSAG

SEQ ID NO: 2962 - protein, 7 aa, synthetic construct
  REGION 1..7: note = Description of Artificial Sequence: Synthetic peptide
LTEGKAN

SEQ ID NO: 2963 - protein, 7 aa, synthetic construct
  REGION 1..7: note = Description of Artificial Sequence: Synthetic peptide
LGADKIQ

SEQ ID NO: 2964 - protein, 7 aa, synthetic construct
  REGION 1..7: note = Description of Artificial Sequence: Synthetic peptide
GAGSSST

SEQ ID NO: 2965 - protein, 7 aa, synthetic construct
  REGION 1..7: note = Description of Artificial Sequence: Synthetic peptide
EGGNKVM

SEQ ID NO: 2966 - protein, 7 aa, synthetic construct
  REGION 1..7: note = Description of Artificial Sequence: Synthetic peptide
SSQKSEG

SEQ ID NO: 2967 - protein, 7 aa, synthetic construct
  REGION 1..7: note = Description of Artificial Sequence: Synthetic peptide
ASSNGNV

SEQ ID NO: 2968 - protein, 7 aa, synthetic construct
  REGION 1..7: note = Description of Artificial Sequence: Synthetic peptide
TSNSENR

SEQ ID NO: 2969 - protein, 7 aa, synthetic construct
  REGION 1..7: note = Description of Artificial Sequence: Synthetic peptide
SGSERST

SEQ ID NO: 2970 - protein, 7 aa, synthetic construct
  REGION 1..7: note = Description of Artificial Sequence: Synthetic peptide
AQAKETN

SEQ ID NO: 2971 - protein, 7 aa, synthetic construct
  REGION 1..7: note = Description of Artificial Sequence: Synthetic peptide
LEGKASS

SEQ ID NO: 2972 - protein, 7 aa, synthetic construct
  REGION 1..7: note = Description of Artificial Sequence: Synthetic peptide
NSAGSSS

SEQ ID NO: 2973 - protein, 7 aa, synthetic construct
  REGION 1..7: note = Description of Artificial Sequence: Synthetic peptide
STASPRE

SEQ ID NO: 2974 - protein, 7 aa, synthetic construct
  REGION 1..7: note = Description of Artificial Sequence: Synthetic peptide
DGTTSKV

SEQ ID NO: 2975 - protein, 7 aa, synthetic construct
  REGION 1..7: note = Description of Artificial Sequence: Synthetic peptide
SDNKTMQ

SEQ ID NO: 2976 - protein, 7 aa, synthetic construct
  REGION 1..7: note = Description of Artificial Sequence: Synthetic peptide
HSAPVAG

SEQ ID NO: 2977 - protein, 7 aa, synthetic construct
  REGION 1..7: note = Description of Artificial Sequence: Synthetic peptide
GTGGNNT

SEQ ID NO: 2978 - protein, 7 aa, synthetic construct
  REGION 1..7: note = Description of Artificial Sequence: Synthetic peptide
QGETTRT

SEQ ID NO: 2979 - protein, 7 aa, synthetic construct
  REGION 1..7: note = Description of Artificial Sequence: Synthetic peptide
GNAPSST

SEQ ID NO: 2980 - protein, 7 aa, synthetic construct
  REGION 1..7: note = Description of Artificial Sequence: Synthetic peptide
VQGSAPG

SEQ ID NO: 2981 - protein, 7 aa, synthetic construct
  REGION 1..7: note = Description of Artificial Sequence: Synthetic peptide
LGSSKDN

SEQ ID NO: 2982 - protein, 7 aa, synthetic construct
  REGION 1..7: note = Description of Artificial Sequence: Synthetic peptide
STVDKGT

SEQ ID NO: 2983 - protein, 7 aa, synthetic construct
  REGION 1..7: note = Description of Artificial Sequence: Synthetic peptide
SSKASTV

SEQ ID NO: 2984 - protein, 7 aa, synthetic construct
  REGION 1..7: note = Description of Artificial Sequence: Synthetic peptide
DNTNKAS

SEQ ID NO: 2985 - protein, 7 aa, synthetic construct
  REGION 1..7: note = Description of Artificial Sequence: Synthetic peptide
SIGDPRS

SEQ ID NO: 2986 - protein, 7 aa, synthetic construct
  REGION 1..7: note = Description of Artificial Sequence: Synthetic peptide
EKNSTVM

SEQ ID NO: 2987 - protein, 7 aa, synthetic construct
  REGION 1..7: note = Description of Artificial Sequence: Synthetic peptide
SESQKGS

SEQ ID NO: 2988 - protein, 7 aa, synthetic construct
  REGION 1..7: note = Description of Artificial Sequence: Synthetic peptide
TKNGAQA

SEQ ID NO: 2989 - protein, 7 aa, synthetic construct
  REGION 1..7: note = Description of Artificial Sequence: Synthetic peptide
DGSPVNK

SEQ ID NO: 2990 - protein, 7 aa, synthetic construct
  REGION 1..7: note = Description of Artificial Sequence: Synthetic peptide
STTGDSK

SEQ ID NO: 2991 - protein, 7 aa, synthetic construct
  REGION 1..7: note = Description of Artificial Sequence: Synthetic peptide
SPGQTSS

SEQ ID NO: 2992 - protein, 7 aa, synthetic construct
  REGION 1..7: note = Description of Artificial Sequence: Synthetic peptide
QAGGKPG

SEQ ID NO: 2993 - protein, 7 aa, synthetic construct
  REGION 1..7: note = Description of Artificial Sequence: Synthetic peptide
GSSNTAG

SEQ ID NO: 2994 - protein, 7 aa, synthetic construct
  REGION 1..7: note = Description of Artificial Sequence: Synthetic peptide
GDIKNGA

SEQ ID NO: 2995 - protein, 7 aa, synthetic construct
  REGION 1..7: note = Description of Artificial Sequence: Synthetic peptide
SGGNTLS

SEQ ID NO: 2996 - protein, 7 aa, synthetic construct
  REGION 1..7: note = Description of Artificial Sequence: Synthetic peptide
SNGNTRN

SEQ ID NO: 2997 - protein, 7 aa, synthetic construct
  REGION 1..7: note = Description of Artificial Sequence: Synthetic peptide
ENSTSTK

SEQ ID NO: 2998 - protein, 7 aa, synthetic construct
  REGION 1..7: note = Description of Artificial Sequence: Synthetic peptide
GGATPQG

SEQ ID NO: 2999 - protein, 7 aa, synthetic construct
  REGION 1..7: note = Description of Artificial Sequence: Synthetic peptide
SPSEPIK

SEQ ID NO: 3000 - protein, 7 aa, synthetic construct
  REGION 1..7: note = Description of Artificial Sequence: Synthetic peptide
TSGSSAA

SEQ ID NO: 3001 - protein, 7 aa, synthetic construct
  REGION 1..7: note = Description of Artificial Sequence: Synthetic peptide
ESKAASS

SEQ ID NO: 3002 - protein, 7 aa, synthetic construct
  REGION 1..7: note = Description of Artificial Sequence: Synthetic peptide
ASTDKLA

SEQ ID NO: 3003 - protein, 7 aa, synthetic construct
  REGION 1..7: note = Description of Artificial Sequence: Synthetic peptide
LQDHSKG

SEQ ID NO: 3004 - protein, 7 aa, synthetic construct
  REGION 1..7: note = Description of Artificial Sequence: Synthetic peptide
SGTPSTG

SEQ ID NO: 3005 - protein, 7 aa, synthetic construct
  REGION 1..7: note = Description of Artificial Sequence: Synthetic peptide
ESGKGIL

SEQ ID NO: 3006 - protein, 7 aa, synthetic construct
  REGION 1..7: note = Description of Artificial Sequence: Synthetic peptide
IGANSSA

SEQ ID NO: 3007 - protein, 7 aa, synthetic construct
  REGION 1..7: note = Description of Artificial Sequence: Synthetic peptide
GPGSPGK

SEQ ID NO: 3008 - protein, 7 aa, synthetic construct
  REGION 1..7: note = Description of Artificial Sequence: Synthetic peptide
TTGGNGQ

SEQ ID NO: 3009 - protein, 7 aa, synthetic construct
  REGION 1..7: note = Description of Artificial Sequence: Synthetic peptide
NNSGSNS

SEQ ID NO: 3010 - protein, 7 aa, synthetic construct
  REGION 1..7: note = Description of Artificial Sequence: Synthetic peptide
YGTGSSP

SEQ ID NO: 3011 - protein, 7 aa, synthetic construct
  REGION 1..7: note = Description of Artificial Sequence: Synthetic peptide
DSGSQRG

SEQ ID NO: 3012 - protein, 7 aa, synthetic construct
  REGION 1..7: note = Description of Artificial Sequence: Synthetic peptide
TSVPGAG

SEQ ID NO: 3013 - protein, 7 aa, synthetic construct
  REGION 1..7: note = Description of Artificial Sequence: Synthetic peptide
SPSDKPV

SEQ ID NO: 3014 - protein, 7 aa, synthetic construct
  REGION 1..7: note = Description of Artificial Sequence: Synthetic peptide
TNGSNSK

SEQ ID NO: 3015 - protein, 7 aa, synthetic construct
  REGION 1..7: note = Description of Artificial Sequence: Synthetic peptide
NASGARD

SEQ ID NO: 3016 - protein, 7 aa, synthetic construct
  REGION 1..7: note = Description of Artificial Sequence: Synthetic peptide
SVGSSGS

SEQ ID NO: 3017 - protein, 7 aa, synthetic construct
  REGION 1..7: note = Description of Artificial Sequence: Synthetic peptide
QGGNNGS

SEQ ID NO: 3018 - protein, 7 aa, synthetic construct
  REGION 1..7: note = Description of Artificial Sequence: Synthetic peptide
ETSKSPV

SEQ ID NO: 3019 - protein, 7 aa, synthetic construct
  REGION 1..7: note = Description of Artificial Sequence: Synthetic peptide
GGVGSSN

SEQ ID NO: 3020 - protein, 7 aa, synthetic construct
  REGION 1..7: note = Description of Artificial Sequence: Synthetic peptide
TSGSSTA

SEQ ID NO: 3021 - protein, 7 aa, synthetic construct
  REGION 1..7: note = Description of Artificial Sequence: Synthetic peptide
TTNSTPS

SEQ ID NO: 3022 - protein, 7 aa, synthetic construct
  REGION 1..7: note = Description of Artificial Sequence: Synthetic peptide
NTDKHAG

SEQ ID NO: 3023 - protein, 7 aa, synthetic construct
  REGION 1..7: note = Description of Artificial Sequence: Synthetic peptide
GTGAGSN

SEQ ID NO: 3024 - protein, 7 aa, synthetic construct
  REGION 1..7: note = Description of Artificial Sequence: Synthetic peptide
QGSPAAS

SEQ ID NO: 3025 - protein, 7 aa, synthetic construct
  REGION 1..7: note = Description of Artificial Sequence: Synthetic peptide
ESSNRGS

SEQ ID NO: 3026 - protein, 7 aa, synthetic construct
  REGION 1..7: note = Description of Artificial Sequence: Synthetic peptide
GGKATQG

SEQ ID NO: 3027 - protein, 7 aa, synthetic construct
  REGION 1..7: note = Description of Artificial Sequence: Synthetic peptide
NTIPKPG

SEQ ID NO: 3028 - protein, 7 aa, synthetic construct
  REGION 1..7: note = Description of Artificial Sequence: Synthetic peptide
SGSERAS

SEQ ID NO: 3029 - protein, 7 aa, synthetic construct
  REGION 1..7: note = Description of Artificial Sequence: Synthetic peptide
SNSKDSS

SEQ ID NO: 3030 - protein, 7 aa, synthetic construct
  REGION 1..7: note = Description of Artificial Sequence: Synthetic peptide
SGVSTHN

SEQ ID NO: 3031 - protein, 7 aa, synthetic construct
  REGION 1..7: note = Description of Artificial Sequence: Synthetic peptide
HSGTGST

SEQ ID NO: 3032 - protein, 7 aa, synthetic construct
  REGION 1..7: note = Description of Artificial Sequence: Synthetic peptide
ESGKATT

SEQ ID NO: 3033 - protein, 7 aa, synthetic construct
  REGION 1..7: note = Description of Artificial Sequence: Synthetic peptide
GHTEGKT

SEQ ID NO: 3034 - protein, 7 aa, synthetic construct
  REGION 1..7: note = Description of Artificial Sequence: Synthetic peptide
GSSSGGT

SEQ ID NO: 3035 - protein, 7 aa, synthetic construct
  REGION 1..7: note = Description of Artificial Sequence: Synthetic peptide
TSPNPST

SEQ ID NO: 3036 - protein, 7 aa, synthetic construct
  REGION 1..7: note = Description of Artificial Sequence: Synthetic peptide
TAGGSSQ

SEQ ID NO: 3037 - protein, 7 aa, synthetic construct
  REGION 1..7: note = Description of Artificial Sequence: Synthetic peptide
NGNASSG

SEQ ID NO: 3038 - protein, 7 aa, synthetic construct
  REGION 1..7: note = Description of Artificial Sequence: Synthetic peptide
GSGTPTH

SEQ ID NO: 3039 - protein, 7 aa, synthetic construct
  REGION 1..7: note = Description of Artificial Sequence: Synthetic peptide
SQGTDGK

SEQ ID NO: 3040 - protein, 7 aa, synthetic construct
  REGION 1..7: note = Description of Artificial Sequence: Synthetic peptide
SGQPGNT

SEQ ID NO: 3041 - protein, 7 aa, synthetic construct
  REGION 1..7: note = Description of Artificial Sequence: Synthetic peptide
GAVNNKS

SEQ ID NO: 3042 - protein, 7 aa, synthetic construct
  REGION 1..7: note = Description of Artificial Sequence: Synthetic peptide
SSSHSAS

SEQ ID NO: 3043 - protein, 7 aa, synthetic construct
  REGION 1..7: note = Description of Artificial Sequence: Synthetic peptide
NNATATS

SEQ ID NO: 3044 - protein, 7 aa, synthetic construct
  REGION 1..7: note = Description of Artificial Sequence: Synthetic peptide
SSNEKLA

SEQ ID NO: 3045 - protein, 7 aa, synthetic construct
  REGION 1..7: note = Description of Artificial Sequence: Synthetic peptide
GHSVKAE

SEQ ID NO: 3046 - protein, 7 aa, synthetic construct
  REGION 1..7: note = Description of Artificial Sequence: Synthetic peptide
STGANPI

SEQ ID NO: 3047 - protein, 7 aa, synthetic construct
  REGION 1..7: note = Description of Artificial Sequence: Synthetic peptide
SDQQKGA

SEQ ID NO: 3048 - protein, 7 aa, synthetic construct
  REGION 1..7: note = Description of Artificial Sequence: Synthetic peptide
TGTSQPT

SEQ ID NO: 3049 - protein, 7 aa, synthetic construct
  REGION 1..7: note = Description of Artificial Sequence: Synthetic peptide
GVSATPT

SEQ ID NO: 3050 - protein, 7 aa, synthetic construct
  REGION 1..7: note = Description of Artificial Sequence: Synthetic peptide
QGSNTAT

SEQ ID NO: 3051 - protein, 7 aa, synthetic construct
  REGION 1..7: note = Description of Artificial Sequence: Synthetic peptide
NSAGATT

SEQ ID NO: 3052 - protein, 7 aa, synthetic construct
  REGION 1..7: note = Description of Artificial Sequence: Synthetic peptide
SSGEGMR

SEQ ID NO: 3053 - protein, 7 aa, synthetic construct
  REGION 1..7: note = Description of Artificial Sequence: Synthetic peptide
RQTPAAG

SEQ ID NO: 3054 - protein, 7 aa, synthetic construct
  REGION 1..7: note = Description of Artificial Sequence: Synthetic peptide
SGGTAAI

SEQ ID NO: 3055 - protein, 7 aa, synthetic construct
  REGION 1..7: note = Description of Artificial Sequence: Synthetic peptide
LTGQNNQ

SEQ ID NO: 3056 - protein, 7 aa, synthetic construct
  REGION 1..7: note = Description of Artificial Sequence: Synthetic peptide
LQSVSPG

SEQ ID NO: 3057 - protein, 7 aa, synthetic construct
  REGION 1..7: note = Description of Artificial Sequence: Synthetic peptide
AGQQASQ

SEQ ID NO: 3058 - protein, 7 aa, synthetic construct
  REGION 1..7: note = Description of Artificial Sequence: Synthetic peptide
GRNTSNA

SEQ ID NO: 3059 - protein, 7 aa, synthetic construct
  REGION 1..7: note = Description of Artificial Sequence: Synthetic peptide
NDASKGN

SEQ ID NO: 3060 - protein, 7 aa, synthetic construct
  REGION 1..7: note = Description of Artificial Sequence: Synthetic peptide
TGTGSPA

SEQ ID NO: 3061 - protein, 7 aa, synthetic construct
  REGION 1..7: note = Description of Artificial Sequence: Synthetic peptide
GLNSSAK

SEQ ID NO: 3062 - protein, 7 aa, synthetic construct
  REGION 1..7: note = Description of Artificial Sequence: Synthetic peptide
GVTSSPH

SEQ ID NO: 3063 - protein, 7 aa, synthetic construct
  REGION 1..7: note = Description of Artificial Sequence: Synthetic peptide
GQGTGLS

SEQ ID NO: 3064 - protein, 7 aa, synthetic construct
  REGION 1..7: note = Description of Artificial Sequence: Synthetic peptide
GTTKTSE

SEQ ID NO: 3065 - protein, 7 aa, synthetic construct
  REGION 1..7: note = Description of Artificial Sequence: Synthetic peptide
DSLKGNG

SEQ ID NO: 3066 - protein, 7 aa, synthetic construct
  REGION 1..7: note = Description of Artificial Sequence: Synthetic peptide
GMTNSGG

SEQ ID NO: 3067 - protein, 7 aa, synthetic construct
  REGION 1..7: note = Description of Artificial Sequence: Synthetic peptide
SATKVNE

SEQ ID NO: 3068 - protein, 7 aa, synthetic construct
  REGION 1..7: note = Description of Artificial Sequence: Synthetic peptide
GSDKAAP

SEQ ID NO: 3069 - protein, 7 aa, synthetic construct
  REGION 1..7: note = Description of Artificial Sequence: Synthetic peptide
NGGPQST

SEQ ID NO: 3070 - protein, 7 aa, synthetic construct
  REGION 1..7: note = Description of Artificial Sequence: Synthetic peptide
GNGKDGN

SEQ ID NO: 3071 - protein, 7 aa, synthetic construct
  REGION 1..7: note = Description of Artificial Sequence: Synthetic peptide
GQATSAK

SEQ ID NO: 3072 - protein, 7 aa, synthetic construct
  REGION 1..7: note = Description of Artificial Sequence: Synthetic peptide
GNPTGGS

SEQ ID NO: 3073 - protein, 7 aa, synthetic construct
  REGION 1..7: note = Description of Artificial Sequence: Synthetic peptide
DNTKSNQ

SEQ ID NO: 3074 - protein, 7 aa, synthetic construct
  REGION 1..7: note = Description of Artificial Sequence: Synthetic peptide
DAVSSPK

SEQ ID NO: 3075 - protein, 7 aa, synthetic construct
  REGION 1..7: note = Description of Artificial Sequence: Synthetic peptide
SKTERSV

SEQ ID NO: 3076 - protein, 7 aa, synthetic construct
  REGION 1..7: note = Description of Artificial Sequence: Synthetic peptide
NGSGASS

SEQ ID NO: 3077 - protein, 7 aa, synthetic construct
  REGION 1..7: note = Description of Artificial Sequence: Synthetic peptide
GTASGSG

SEQ ID NO: 3078 - protein, 7 aa, synthetic construct
  REGION 1..7: note = Description of Artificial Sequence: Synthetic peptide
SSGTSTV

SEQ ID NO: 3079 - protein, 7 aa, synthetic construct
  REGION 1..7: note = Description of Artificial Sequence: Synthetic peptide
NSSGPPG

SEQ ID NO: 3080 - protein, 7 aa, synthetic construct
  REGION 1..7: note = Description of Artificial Sequence: Synthetic peptide
LKSQSTG

SEQ ID NO: 3081 - protein, 7 aa, synthetic construct
  REGION 1..7: note = Description of Artificial Sequence: Synthetic peptide
LGQTGQL

SEQ ID NO: 3082 - protein, 7 aa, synthetic construct
  REGION 1..7: note = Description of Artificial Sequence: Synthetic peptide
ESNSRPG

SEQ ID NO: 3083 - protein, 7 aa, synthetic construct
  REGION 1..7: note = Description of Artificial Sequence: Synthetic peptide
TTSGQHG

SEQ ID NO: 3084 - protein, 7 aa, synthetic construct
  REGION 1..7: note = Description of Artificial Sequence: Synthetic peptide
QGSQKVS

SEQ ID NO: 3085 - protein, 7 aa, synthetic construct
  REGION 1..7: note = Description of Artificial Sequence: Synthetic peptide
SASDLKS

SEQ ID NO: 3086 - protein, 7 aa, synthetic construct
  REGION 1..7: note = Description of Artificial Sequence: Synthetic peptide
STGGSSQ

SEQ ID NO: 3087 - protein, 7 aa, synthetic construct
  REGION 1..7: note = Description of Artificial Sequence: Synthetic peptide
SAGPSSA

SEQ ID NO: 3088 - protein, 7 aa, synthetic construct
  REGION 1..7: note = Description of Artificial Sequence: Synthetic peptide
SGGTSSV

SEQ ID NO: 3089 - protein, 7 aa, synthetic construct
  REGION 1..7: note = Description of Artificial Sequence: Synthetic peptide
GSGHKGE

SEQ ID NO: 3090 - protein, 7 aa, synthetic construct
  REGION 1..7: note = Description of Artificial Sequence: Synthetic peptide
TGTTHTT

SEQ ID NO: 3091 - protein, 7 aa, synthetic construct
  REGION 1..7: note = Description of Artificial Sequence: Synthetic peptide
IATKGNV

SEQ ID NO: 3092 - protein, 7 aa, synthetic construct
  REGION 1..7: note = Description of Artificial Sequence: Synthetic peptide
LQSPRTG

SEQ ID NO: 3093 - protein, 7 aa, synthetic construct
  REGION 1..7: note = Description of Artificial Sequence: Synthetic peptide
AGQNSSV

SEQ ID NO: 3094 - protein, 7 aa, synthetic construct
  REGION 1..7: note = Description of Artificial Sequence: Synthetic peptide
VPSHAAG

SEQ ID NO: 3095 - protein, 7 aa, synthetic construct
  REGION 1..7: note = Description of Artificial Sequence: Synthetic peptide
QASSGAS

SEQ ID NO: 3096 - protein, 7 aa, synthetic construct
  REGION 1..7: note = Description of Artificial Sequence: Synthetic peptide
SSSNKDA

SEQ ID NO: 3097 - protein, 7 aa, synthetic construct
  REGION 1..7: note = Description of Artificial Sequence: Synthetic peptide
QGGSGSS

SEQ ID NO: 3098 - protein, 7 aa, synthetic construct
  REGION 1..7: note = Description of Artificial Sequence: Synthetic peptide
GPASQSG

SEQ ID NO: 3099 - protein, 7 aa, synthetic construct
  REGION 1..7: note = Description of Artificial Sequence: Synthetic peptide
NPGSTTA

SEQ ID NO: 3100 - protein, 7 aa, synthetic construct
  REGION 1..7: note = Description of Artificial Sequence: Synthetic peptide
MNSNSNS

SEQ ID NO: 3101 - protein, 7 aa, synthetic construct
  REGION 1..7: note = Description of Artificial Sequence: Synthetic peptide
GSDKAKQ

SEQ ID NO: 3102 - protein, 7 aa, synthetic construct
  REGION 1..7: note = Description of Artificial Sequence: Synthetic peptide
TGSSSVS

SEQ ID NO: 3103 - protein, 7 aa, synthetic construct
  REGION 1..7: note = Description of Artificial Sequence: Synthetic peptide
DRATPSV

SEQ ID NO: 3104 - protein, 7 aa, synthetic construct
  REGION 1..7: note = Description of Artificial Sequence: Synthetic peptide
SAGSPGN

SEQ ID NO: 3105 - protein, 7 aa, synthetic construct
  REGION 1..7: note = Description of Artificial Sequence: Synthetic peptide
SQTSSPQ

SEQ ID NO: 3106 - protein, 7 aa, synthetic construct
  REGION 1..7: note = Description of Artificial Sequence: Synthetic peptide
SAEGKMM

SEQ ID NO: 3107 - protein, 7 aa, synthetic construct
  REGION 1..7: note = Description of Artificial Sequence: Synthetic peptide
GPKSSPA

SEQ ID NO: 3108 - protein, 7 aa, synthetic construct
  REGION 1..7: note = Description of Artificial Sequence: Synthetic peptide
QSPGQTS

SEQ ID NO: 3109 - protein, 7 aa, synthetic construct
  REGION 1..7: note = Description of Artificial Sequence: Synthetic peptide
VQGAGSS

SEQ ID NO: 3110 - protein, 7 aa, synthetic construct
  REGION 1..7: note = Description of Artificial Sequence: Synthetic peptide
GQGTSDG

SEQ ID NO: 3111 - protein, 7 aa, synthetic construct
  REGION 1..7: note = Description of Artificial Sequence: Synthetic peptide
TREGSSG

SEQ ID NO: 3112 - protein, 7 aa, synthetic construct
  REGION 1..7: note = Description of Artificial Sequence: Synthetic peptide
QNSGTNN

SEQ ID NO: 3113 - protein, 7 aa, synthetic construct
  REGION 1..7: note = Description of Artificial Sequence: Synthetic peptide
NGGTGSR

SEQ ID NO: 3114 - protein, 7 aa, synthetic construct
  REGION 1..7: note = Description of Artificial Sequence: Synthetic peptide
NQGSSSV

SEQ ID NO: 3115 - protein, 7 aa, synthetic construct
  REGION 1..7: note = Description of Artificial Sequence: Synthetic peptide
NGAGQKQ

SEQ ID NO: 3116 - protein, 7 aa, synthetic construct
  REGION 1..7: note = Description of Artificial Sequence: Synthetic peptide
LSDKKPN

SEQ ID NO: 3117 - protein, 7 aa, synthetic construct
  REGION 1..7: note = Description of Artificial Sequence: Synthetic peptide
NGVKSQT

SEQ ID NO: 3118 - protein, 7 aa, synthetic construct
  REGION 1..7: note = Description of Artificial Sequence: Synthetic peptide
VQGGSST

SEQ ID NO: 3119 - protein, 7 aa, synthetic construct
  REGION 1..7: note = Description of Artificial Sequence: Synthetic peptide
SSGAGSL

SEQ ID NO: 3120 - protein, 7 aa, synthetic construct
  REGION 1..7: note = Description of Artificial Sequence: Synthetic peptide
SSEHKGS

SEQ ID NO: 3121 - protein, 7 aa, synthetic construct
  REGION 1..7: note = Description of Artificial Sequence: Synthetic peptide
SSTKQPG

SEQ ID NO: 3122 - protein, 7 aa, synthetic construct
  REGION 1..7: note = Description of Artificial Sequence: Synthetic peptide
SGQGSSV

SEQ ID NO: 3123 - protein, 7 aa, synthetic construct
  REGION 1..7: note = Description of Artificial Sequence: Synthetic peptide
MGETHAG

SEQ ID NO: 3124 - protein, 7 aa, synthetic construct
  REGION 1..7: note = Description of Artificial Sequence: Synthetic peptide
STASDKA

SEQ ID NO: 3125 - protein, 7 aa, synthetic construct
  REGION 1..7: note = Description of Artificial Sequence: Synthetic peptide
THANPAG

SEQ ID NO: 3126 - protein, 7 aa, synthetic construct
  REGION 1..7: note = Description of Artificial Sequence: Synthetic peptide
TSSQQSG

SEQ ID NO: 3127 - protein, 7 aa, synthetic construct
  REGION 1..7: note = Description of Artificial Sequence: Synthetic peptide
SDQQTTK

SEQ ID NO: 3128 - protein, 7 aa, synthetic construct
  REGION 1..7: note = Description of Artificial Sequence: Synthetic peptide
ESTTRPG

SEQ ID NO: 3129 - protein, 7 aa, synthetic construct
  REGION 1..7: note = Description of Artificial Sequence: Synthetic peptide
ASYKGAG

SEQ ID NO: 3130 - protein, 7 aa, synthetic construct
  REGION 1..7: note = Description of Artificial Sequence: Synthetic peptide
GQHAQAG

SEQ ID NO: 3131 - protein, 7 aa, synthetic construct
  REGION 1..7: note = Description of Artificial Sequence: Synthetic peptide
GSGAPSN

SEQ ID NO: 3132 - protein, 7 aa, synthetic construct
  REGION 1..7: note = Description of Artificial Sequence: Synthetic peptide
DPKPGST

SEQ ID NO: 3133 - protein, 7 aa, synthetic construct
  REGION 1..7: note = Description of Artificial Sequence: Synthetic peptide
GGDAKSV

SEQ ID NO: 3134 - protein, 7 aa, synthetic construct
  REGION 1..7: note = Description of Artificial Sequence: Synthetic peptide
GDQKASN

SEQ ID NO: 3135 - protein, 7 aa, synthetic construct
  REGION 1..7: note = Description of Artificial Sequence: Synthetic peptide
YRDSASH

SEQ ID NO: 3136 - protein, 7 aa, synthetic construct
  REGION 1..7: note = Description of Artificial Sequence: Synthetic peptide
GSGRDAV

SEQ ID NO: 3137 - protein, 7 aa, synthetic construct
  REGION 1..7: note = Description of Artificial Sequence: Synthetic peptide
SNGSQGS

SEQ ID NO: 3138 - protein, 7 aa, synthetic construct
  REGION 1..7: note = Description of Artificial Sequence: Synthetic peptide
SPGSSSG

SEQ ID NO: 3139 - protein, 7 aa, synthetic construct
  REGION 1..7: note = Description of Artificial Sequence: Synthetic peptide
DGHKTLV

SEQ ID NO: 3140 - protein, 7 aa, synthetic construct
  REGION 1..7: note = Description of Artificial Sequence: Synthetic peptide
VGTSQAT

SEQ ID NO: 3141 - protein, 7 aa, synthetic construct
  REGION 1..7: note = Description of Artificial Sequence: Synthetic peptide
ATGSGSN

SEQ ID NO: 3142 - protein, 7 aa, synthetic construct
  REGION 1..7: note = Description of Artificial Sequence: Synthetic peptide
NATPTNQ

SEQ ID NO: 3143 - protein, 7 aa, synthetic construct
  REGION 1..7: note = Description of Artificial Sequence: Synthetic peptide
NTTAPTV

SEQ ID NO: 3144 - protein, 7 aa, synthetic construct
  REGION 1..7: note = Description of Artificial Sequence: Synthetic peptide
AAPASAG

SEQ ID NO: 3145 - protein, 7 aa, synthetic construct
  REGION 1..7: note = Description of Artificial Sequence: Synthetic peptide
ASQPASA

SEQ ID NO: 3146 - protein, 7 aa, synthetic construct
  REGION 1..7: note = Description of Artificial Sequence: Synthetic peptide
QGSSSVV

SEQ ID NO: 3147 - protein, 7 aa, synthetic construct
  REGION 1..7: note = Description of Artificial Sequence: Synthetic peptide
SQHKEQP

SEQ ID NO: 3148 - protein, 7 aa, synthetic construct
  REGION 1..7: note = Description of Artificial Sequence: Synthetic peptide
TGTTEKH

SEQ ID NO: 3149 - protein, 7 aa, synthetic construct
  REGION 1..7: note = Description of Artificial Sequence: Synthetic peptide
VNKSPVT

SEQ ID NO: 3150 - protein, 7 aa, synthetic construct
  REGION 1..7: note = Description of Artificial Sequence: Synthetic peptide
KGGSNSV

SEQ ID NO: 3151 - protein, 7 aa, synthetic construct
  REGION 1..7: note = Description of Artificial Sequence: Synthetic peptide
SGTSTSH

SEQ ID NO: 3152 - protein, 7 aa, synthetic construct
  REGION 1..7: note = Description of Artificial Sequence: Synthetic peptide
SSVGEQK

SEQ ID NO: 3153 - protein, 7 aa, synthetic construct
  REGION 1..7: note = Description of Artificial Sequence: Synthetic peptide
DNSSKAV

SEQ ID NO: 3154 - protein, 7 aa, synthetic construct
  REGION 1..7: note = Description of Artificial Sequence: Synthetic peptide
SGGTSAG

SEQ ID NO: 3155 - protein, 7 aa, synthetic construct
  REGION 1..7: note = Description of Artificial Sequence: Synthetic peptide
ANSEKSP

SEQ ID NO: 3156 - protein, 7 aa, synthetic construct
  REGION 1..7: note = Description of Artificial Sequence: Synthetic peptide
TKNGSQA

SEQ ID NO: 3157 - protein, 7 aa, synthetic construct
  REGION 1..7: note = Description of Artificial Sequence: Synthetic peptide
DTTKTSG

SEQ ID NO: 3158 - protein, 7 aa, synthetic construct
  REGION 1..7: note = Description of Artificial Sequence: Synthetic peptide
SSGASSS

SEQ ID NO: 3159 - protein, 7 aa, synthetic construct
  REGION 1..7: note = Description of Artificial Sequence: Synthetic peptide
DKSPNSG

SEQ ID NO: 3160 - protein, 7 aa, synthetic construct
  REGION 1..7: note = Description of Artificial Sequence: Synthetic peptide
DGTKKNA

SEQ ID NO: 3161 - protein, 7 aa, synthetic construct
  REGION 1..7: note = Description of Artificial Sequence: Synthetic peptide
HGNSSQG

SEQ ID NO: 3162 - protein, 7 aa, synthetic construct
  REGION 1..7: note = Description of Artificial Sequence: Synthetic peptide
SSNSGTQ

SEQ ID NO: 3163 - protein, 7 aa, synthetic construct
  REGION 1..7: note = Description of Artificial Sequence: Synthetic peptide
GAGDRSG

SEQ ID NO: 3164 - protein, 7 aa, synthetic construct
  REGION 1..7: note = Description of Artificial Sequence: Synthetic peptide
KSNTSAA

SEQ ID NO: 3165 - protein, 7 aa, synthetic construct
  REGION 1..7: note = Description of Artificial Sequence: Synthetic peptide
ESDGKSH

SEQ ID NO: 3166 - protein, 7 aa, synthetic construct
  REGION 1..7: note = Description of Artificial Sequence: Synthetic peptide
DASSKGL

SEQ ID NO: 3167 - protein, 7 aa, synthetic construct
  REGION 1..7: note = Description of Artificial Sequence: Synthetic peptide
QSGDKSH

SEQ ID NO: 3168 - protein, 7 aa, synthetic construct
  REGION 1..7: note = Description of Artificial Sequence: Synthetic peptide
LTGASTS

SEQ ID NO: 3169 - protein, 7 aa, synthetic construct
  REGION 1..7: note = Description of Artificial Sequence: Synthetic peptide
DGSSSPG

SEQ ID NO: 3170 - protein, 7 aa, synthetic construct
  REGION 1..7: note = Description of Artificial Sequence: Synthetic peptide
TTTSTPV

SEQ ID NO: 3171 - protein, 7 aa, synthetic construct
  REGION 1..7: note = Description of Artificial Sequence: Synthetic peptide
DISKSNI

SEQ ID NO: 3172 - protein, 7 aa, synthetic construct
  REGION 1..7: note = Description of Artificial Sequence: Synthetic peptide
GGSPSNQ

SEQ ID NO: 3173 - protein, 7 aa, synthetic construct
  REGION 1..7: note = Description of Artificial Sequence: Synthetic peptide
SSGEGNK

SEQ ID NO: 3174 - protein, 7 aa, synthetic construct
  REGION 1..7: note = Description of Artificial Sequence: Synthetic peptide
GSTGSQG

SEQ ID NO: 3175 - protein, 7 aa, synthetic construct
  REGION 1..7: note = Description of Artificial Sequence: Synthetic peptide
SESSKSV

SEQ ID NO: 3176 - protein, 7 aa, synthetic construct
  REGION 1..7: note = Description of Artificial Sequence: Synthetic peptide
DNGTSSR

SEQ ID NO: 3177 - protein, 7 aa, synthetic construct
  REGION 1..7: note = Description of Artificial Sequence: Synthetic peptide
GLKESNR

SEQ ID NO: 3178 - protein, 7 aa, synthetic construct
  REGION 1..7: note = Description of Artificial Sequence: Synthetic peptide
TNGSSTS

SEQ ID NO: 3179 - protein, 7 aa, synthetic construct
  REGION 1..7: note = Description of Artificial Sequence: Synthetic peptide
VDQGGSK

SEQ ID NO: 3180 - protein, 7 aa, synthetic construct
  REGION 1..7: note = Description of Artificial Sequence: Synthetic peptide
QTEKGRE

SEQ ID NO: 3181 - protein, 7 aa, synthetic construct
  REGION 1..7: note = Description of Artificial Sequence: Synthetic peptide
GSNPNGT

SEQ ID NO: 3182 - protein, 7 aa, synthetic construct
  REGION 1..7: note = Description of Artificial Sequence: Synthetic peptide
DGASPSK

SEQ ID NO: 3183 - protein, 7 aa, synthetic construct
  REGION 1..7: note = Description of Artificial Sequence: Synthetic peptide
NGSTSSS

SEQ ID NO: 3184 - protein, 7 aa, synthetic construct
  REGION 1..7: note = Description of Artificial Sequence: Synthetic peptide
ENNKSTA

SEQ ID NO: 3185 - protein, 7 aa, synthetic construct
  REGION 1..7: note = Description of Artificial Sequence: Synthetic peptide
ASGSNPH

SEQ ID NO: 3186 - protein, 7 aa, synthetic construct
  REGION 1..7: note = Description of Artificial Sequence: Synthetic peptide
DPVAKGT

SEQ ID NO: 3187 - protein, 7 aa, synthetic construct
  REGION 1..7: note = Description of Artificial Sequence: Synthetic peptide
QGVPSGT

SEQ ID NO: 3188 - protein, 7 aa, synthetic construct
  REGION 1..7: note = Description of Artificial Sequence: Synthetic peptide
NTGNSGG

SEQ ID NO: 3189 - protein, 7 aa, synthetic construct
  REGION 1..7: note = Description of Artificial Sequence: Synthetic peptide
QGGGSST

SEQ ID NO: 3190 - protein, 7 aa, synthetic construct
  REGION 1..7: note = Description of Artificial Sequence: Synthetic peptide
HGVPSSG

SEQ ID NO: 3191 - protein, 7 aa, synthetic construct
  REGION 1..7: note = Description of Artificial Sequence: Synthetic peptide
EAHASVK

SEQ ID NO: 3192 - protein, 7 aa, synthetic construct
  REGION 1..7: note = Description of Artificial Sequence: Synthetic peptide
SGNGKDM

SEQ ID NO: 3193 - protein, 7 aa, synthetic construct
  REGION 1..7: note = Description of Artificial Sequence: Synthetic peptide
NGSNNPT

SEQ ID NO: 3194 - protein, 7 aa, synthetic construct
  REGION 1..7: note = Description of Artificial Sequence: Synthetic peptide
NVMPDSK

SEQ ID NO: 3195 - protein, 7 aa, synthetic construct
  REGION 1..7: note = Description of Artificial Sequence: Synthetic peptide
VGDSSSR

SEQ ID NO: 3196 - protein, 7 aa, synthetic construct
  REGION 1..7: note = Description of Artificial Sequence: Synthetic peptide
SSGSSSV

SEQ ID NO: 3197 - protein, 7 aa, synthetic construct
  REGION 1..7: note = Description of Artificial Sequence: Synthetic peptide
ATSNDTK

SEQ ID NO: 3198 - protein, 7 aa, synthetic construct
  REGION 1..7: note = Description of Artificial Sequence: Synthetic peptide
QNGKGNA

SEQ ID NO: 3199 - protein, 7 aa, synthetic construct
  REGION 1..7: note = Description of Artificial Sequence: Synthetic peptide
APSSENK

SEQ ID NO: 3200 - protein, 7 aa, synthetic construct
  REGION 1..7: note = Description of Artificial Sequence: Synthetic peptide
NSSQSPS

SEQ ID NO: 3201 - protein, 7 aa, synthetic construct
  REGION 1..7: note = Description of Artificial Sequence: Synthetic peptide
DNGSNNR

SEQ ID NO: 3202 - protein, 7 aa, synthetic construct
  REGION 1..7: note = Description of Artificial Sequence: Synthetic peptide
SGASGAG

SEQ ID NO: 3203 - protein, 7 aa, synthetic construct
  REGION 1..7: note = Description of Artificial Sequence: Synthetic peptide
DPLANKH

SEQ ID NO: 3204 - protein, 7 aa, synthetic construct
  REGION 1..7: note = Description of Artificial Sequence: Synthetic peptide
SGSSNNV

SEQ ID NO: 3205 - protein, 7 aa, synthetic construct
  REGION 1..7: note = Description of Artificial Sequence: Synthetic peptide
GHQTGSG

SEQ ID NO: 3206 - protein, 7 aa, synthetic construct
  REGION 1..7: note = Description of Artificial Sequence: Synthetic peptide
DGKSSVS

SEQ ID NO: 3207 - protein, 7 aa, synthetic construct
  REGION 1..7: note = Description of Artificial Sequence: Synthetic peptide
QGSDRPV

SEQ ID NO: 3208 - protein, 7 aa, synthetic construct
  REGION 1..7: note = Description of Artificial Sequence: Synthetic peptide
VSSQKAG

SEQ ID NO: 3209 - protein, 7 aa, synthetic construct
  REGION 1..7: note = Description of Artificial Sequence: Synthetic peptide
DSTTKTG

SEQ ID NO: 3210 - protein, 7 aa, synthetic construct
  REGION 1..7: note = Description of Artificial Sequence: Synthetic peptide
GQTGAPV

SEQ ID NO: 3211 - protein, 7 aa, synthetic construct
  REGION 1..7: note = Description of Artificial Sequence: Synthetic peptide
STAVTTG

SEQ ID NO: 3212 - protein, 7 aa, synthetic construct
  REGION 1..7: note = Description of Artificial Sequence: Synthetic peptide
QANNSPT

SEQ ID NO: 3213 - protein, 7 aa, synthetic construct
  REGION 1..7: note = Description of Artificial Sequence: Synthetic peptide
MGNGASN

SEQ ID NO: 3214 - protein, 7 aa, synthetic construct
  REGION 1..7: note = Description of Artificial Sequence: Synthetic peptide
MNNKENH

SEQ ID NO: 3215 - protein, 7 aa, synthetic construct
  REGION 1..7: note = Description of Artificial Sequence: Synthetic peptide
TGNKSNE

SEQ ID NO: 3216 - protein, 7 aa, synthetic construct
  REGION 1..7: note = Description of Artificial Sequence: Synthetic peptide
DLSTKSR

SEQ ID NO: 3217 - protein, 7 aa, synthetic construct
  REGION 1..7: note = Description of Artificial Sequence: Synthetic peptide
TPSQDRH

SEQ ID NO: 3218 - protein, 7 aa, synthetic construct
  REGION 1..7: note = Description of Artificial Sequence: Synthetic peptide
AQEKSSR

SEQ ID NO: 3219 - protein, 7 aa, synthetic construct
  REGION 1..7: note = Description of Artificial Sequence: Synthetic peptide
EPSKSNT

SEQ ID NO: 3220 - protein, 7 aa, synthetic construct
  REGION 1..7: note = Description of Artificial Sequence: Synthetic peptide
TDGTKSQ

SEQ ID NO: 3221 - protein, 7 aa, synthetic construct
  REGION 1..7: note = Description of Artificial Sequence: Synthetic peptide
GHEKGNN

SEQ ID NO: 3222 - protein, 7 aa, synthetic construct
  REGION 1..7: note = Description of Artificial Sequence: Synthetic peptide
TSGAGSL

SEQ ID NO: 3223 - protein, 7 aa, synthetic construct
  REGION 1..7: note = Description of Artificial Sequence: Synthetic peptide
EGSKQGA

SEQ ID NO: 3224 - protein, 7 aa, synthetic construct
  REGION 1..7: note = Description of Artificial Sequence: Synthetic peptide
QPDNKGG

SEQ ID NO: 3225 - protein, 7 aa, synthetic construct
  REGION 1..7: note = Description of Artificial Sequence: Synthetic peptide
ERQGSTL

SEQ ID NO: 3226 - protein, 7 aa, synthetic construct
  REGION 1..7: note = Description of Artificial Sequence: Synthetic peptide
EGSTGSR

SEQ ID NO: 3227 - protein, 7 aa, synthetic construct
  REGION 1..7: note = Description of Artificial Sequence: Synthetic peptide
EGGTSTS

SEQ ID NO: 3228 - protein, 7 aa, synthetic construct
  REGION 1..7: note = Description of Artificial Sequence: Synthetic peptide
GGESNRL

SEQ ID NO: 3229 - protein, 7 aa, synthetic construct
  REGION 1..7: note = Description of Artificial Sequence: Synthetic peptide
GLAGNAK

SEQ ID NO: 3230 - protein, 7 aa, synthetic construct
  REGION 1..7: note = Description of Artificial Sequence: Synthetic peptide
STGHVNG

SEQ ID NO: 3231 - protein, 7 aa, synthetic construct
  REGION 1..7: note = Description of Artificial Sequence: Synthetic peptide
SLNAGAG

SEQ ID NO: 3232 - protein, 7 aa, synthetic construct
  REGION 1..7: note = Description of Artificial Sequence: Synthetic peptide
ASNQSTQ

SEQ ID NO: 3233 - protein, 7 aa, synthetic construct
  REGION 1..7: note = Description of Artificial Sequence: Synthetic peptide
DSHSKTN

SEQ ID NO: 3234 - protein, 7 aa, synthetic construct
  REGION 1..7: note = Description of Artificial Sequence: Synthetic peptide
QDGTKTS

SEQ ID NO: 3235 - protein, 7 aa, synthetic construct
  REGION 1..7: note = Description of Artificial Sequence: Synthetic peptide
DQSKQGS

SEQ ID NO: 3236 - protein, 7 aa, synthetic construct
  REGION 1..7: note = Description of Artificial Sequence: Synthetic peptide
VGSTTPT

SEQ ID NO: 3237 - protein, 7 aa, synthetic construct
  REGION 1..7: note = Description of Artificial Sequence: Synthetic peptide
TPGGSQA

SEQ ID NO: 3238 - protein, 7 aa, synthetic construct
  REGION 1..7: note = Description of Artificial Sequence: Synthetic peptide
SGGTASA

SEQ ID NO: 3239 - protein, 7 aa, synthetic construct
  REGION 1..7: note = Description of Artificial Sequence: Synthetic peptide
NGLDKSQ

SEQ ID NO: 3240 - protein, 7 aa, synthetic construct
  REGION 1..7: note = Description of Artificial Sequence: Synthetic peptide
AGGGSNT

SEQ ID NO: 3241 - protein, 7 aa, synthetic construct
  REGION 1..7: note = Description of Artificial Sequence: Synthetic peptide
VKGAASS

SEQ ID NO: 3242 - protein, 7 aa, synthetic construct
  REGION 1..7: note = Description of Artificial Sequence: Synthetic peptide
DQTDRNQ

SEQ ID NO: 3243 - protein, 7 aa, synthetic construct
  REGION 1..7: note = Description of Artificial Sequence: Synthetic peptide
SLSQSSK

SEQ ID NO: 3244 - protein, 7 aa, synthetic construct
  REGION 1..7: note = Description of Artificial Sequence: Synthetic peptide
MGNERAN

SEQ ID NO: 3245 - protein, 7 aa, synthetic construct
  REGION 1..7: note = Description of Artificial Sequence: Synthetic peptide
QSGADKS

SEQ ID NO: 3246 - protein, 7 aa, synthetic construct
  REGION 1..7: note = Description of Artificial Sequence: Synthetic peptide
HGGPTSI

SEQ ID NO: 3247 - protein, 7 aa, synthetic construct
  REGION 1..7: note = Description of Artificial Sequence: Synthetic peptide
DGNSANH

SEQ ID NO: 3248 - protein, 7 aa, synthetic construct
  REGION 1..7: note = Description of Artificial Sequence: Synthetic peptide
DSNSKLT

SEQ ID NO: 3249 - protein, 7 aa, synthetic construct
  REGION 1..7: note = Description of Artificial Sequence: Synthetic peptide
DTPQSQK

SEQ ID NO: 3250 - protein, 7 aa, synthetic construct
  REGION 1..7: note = Description of Artificial Sequence: Synthetic peptide
GAETDKR

SEQ ID NO: 3251 - protein, 7 aa, synthetic construct
  REGION 1..7: note = Description of Artificial Sequence: Synthetic peptide
QSAASNH

SEQ ID NO: 3252 - protein, 7 aa, synthetic construct
  REGION 1..7: note = Description of Artificial Sequence: Synthetic peptide
STKATNE

SEQ ID NO: 3253 - protein, 7 aa, synthetic construct
  REGION 1..7: note = Description of Artificial Sequence: Synthetic peptide
GQSTAPN

SEQ ID NO: 3254 - protein, 7 aa, synthetic construct
  REGION 1..7: note = Description of Artificial Sequence: Synthetic peptide
RTGNVSS

SEQ ID NO: 3255 - protein, 7 aa, synthetic construct
  REGION 1..7: note = Description of Artificial Sequence: Synthetic peptide
DGKSGAG

SEQ ID NO: 3256 - protein, 7 aa, synthetic construct
  REGION 1..7: note = Description of Artificial Sequence: Synthetic peptide
EQAKVNV

SEQ ID NO: 3257 - protein, 7 aa, synthetic construct
  REGION 1..7: note = Description of Artificial Sequence: Synthetic peptide
DNRSSNS

SEQ ID NO: 3258 - protein, 7 aa, synthetic construct
  REGION 1..7: note = Description of Artificial Sequence: Synthetic peptide
NTGSGTS

SEQ ID NO: 3259 - protein, 7 aa, synthetic construct
  REGION 1..7: note = Description of Artificial Sequence: Synthetic peptide
QQESHKL

SEQ ID NO: 3260 - protein, 7 aa, synthetic construct
  REGION 1..7: note = Description of Artificial Sequence: Synthetic peptide
DSTKTTS

SEQ ID NO: 3261 - protein, 7 aa, synthetic construct
  REGION 1..7: note = Description of Artificial Sequence: Synthetic peptide
APVSPVK

SEQ ID NO: 3262 - protein, 7 aa, synthetic construct
  REGION 1..7: note = Description of Artificial Sequence: Synthetic peptide
TSGVSPA

SEQ ID NO: 3263 - protein, 7 aa, synthetic construct
  REGION 1..7: note = Description of Artificial Sequence: Synthetic peptide
GSDKLHS

SEQ ID NO: 3264 - protein, 7 aa, synthetic construct
  REGION 1..7: note = Description of Artificial Sequence: Synthetic peptide
DQLSKSQ

SEQ ID NO: 3265 - protein, 7 aa, synthetic construct
  REGION 1..7: note = Description of Artificial Sequence: Synthetic peptide
SHSDKTS

SEQ ID NO: 3266 - protein, 7 aa, synthetic construct
  REGION 1..7: note = Description of Artificial Sequence: Synthetic peptide
SVESKST

SEQ ID NO: 3267 - protein, 7 aa, synthetic construct
  REGION 1..7: note = Description of Artificial Sequence: Synthetic peptide
ATSGTQA

SEQ ID NO: 3268 - protein, 7 aa, synthetic construct
  REGION 1..7: note = Description of Artificial Sequence: Synthetic peptide
VNTSATQ

SEQ ID NO: 3269 - protein, 7 aa, synthetic construct
  REGION 1..7: note = Description of Artificial Sequence: Synthetic peptide
GNAGGQN

SEQ ID NO: 3270 - protein, 7 aa, synthetic construct
  REGION 1..7: note = Description of Artificial Sequence: Synthetic peptide
SDGKGSL

SEQ ID NO: 3271 - protein, 7 aa, synthetic construct
  REGION 1..7: note = Description of Artificial Sequence: Synthetic peptide
TGNENNR

SEQ ID NO: 3272 - protein, 7 aa, synthetic construct
  REGION 1..7: note = Description of Artificial Sequence: Synthetic peptide
AANERSS

SEQ ID NO: 3273 - protein, 7 aa, synthetic construct
  REGION 1..7: note = Description of Artificial Sequence: Synthetic peptide
MPSTKEG

SEQ ID NO: 3274 - protein, 7 aa, synthetic construct
  REGION 1..7: note = Description of Artificial Sequence: Synthetic peptide
QQGSSGS

SEQ ID NO: 3275 - protein, 7 aa, synthetic construct
  REGION 1..7: note = Description of Artificial Sequence: Synthetic peptide
SLNSPKN

SEQ ID NO: 3276 - protein, 7 aa, synthetic construct
  REGION 1..7: note = Description of Artificial Sequence: Synthetic peptide
QTGTGGA

SEQ ID NO: 3277 - protein, 7 aa, synthetic construct
  REGION 1..7: note = Description of Artificial Sequence: Synthetic peptide
SGGSSAS

SEQ ID NO: 3278 - protein, 7 aa, synthetic construct
  REGION 1..7: note = Description of Artificial Sequence: Synthetic peptide
GSDTKVL

SEQ ID NO: 3279 - protein, 7 aa, synthetic construct
  REGION 1..7: note = Description of Artificial Sequence: Synthetic peptide
GTAASNS

SEQ ID NO: 3280 - protein, 7 aa, synthetic construct
  REGION 1..7: note = Description of Artificial Sequence: Synthetic peptide
EGTSHTK

SEQ ID NO: 3281 - protein, 7 aa, synthetic construct
  REGION 1..7: note = Description of Artificial Sequence: Synthetic peptide
GTSSTPL

SEQ ID NO: 3282 - protein, 7 aa, synthetic construct
  REGION 1..7: note = Description of Artificial Sequence: Synthetic peptide
GTGRDQN

SEQ ID NO: 3283 - protein, 7 aa, synthetic construct
  REGION 1..7: note = Description of Artificial Sequence: Synthetic peptide
DVSASNR

SEQ ID NO: 3284 - protein, 7 aa, synthetic construct
  REGION 1..7: note = Description of Artificial Sequence: Synthetic peptide
NEARTPQ

SEQ ID NO: 3285 - protein, 7 aa, synthetic construct
  REGION 1..7: note = Description of Artificial Sequence: Synthetic peptide
AQVKAGA

SEQ ID NO: 3286 - protein, 7 aa, synthetic construct
  REGION 1..7: note = Description of Artificial Sequence: Synthetic peptide
TQGAAAS

SEQ ID NO: 3287 - protein, 7 aa, synthetic construct
  REGION 1..7: note = Description of Artificial Sequence: Synthetic peptide
DVTGGKG

SEQ ID NO: 3288 - protein, 7 aa, synthetic construct
  REGION 1..7: note = Description of Artificial Sequence: Synthetic peptide
GNIDGKK

SEQ ID NO: 3289 - protein, 7 aa, synthetic construct
  REGION 1..7: note = Description of Artificial Sequence: Synthetic peptide
HNGAPSS

SEQ ID NO: 3290 - protein, 7 aa, synthetic construct
  REGION 1..7: note = Description of Artificial Sequence: Synthetic peptide
MHDAKSG

SEQ ID NO: 3291 - protein, 7 aa, synthetic construct
  REGION 1..7: note = Description of Artificial Sequence: Synthetic peptide
DGAGASH

SEQ ID NO: 3292 - protein, 7 aa, synthetic construct
  REGION 1..7: note = Description of Artificial Sequence: Synthetic peptide
VTDAKSS

SEQ ID NO: 3293 - protein, 7 aa, synthetic construct
  REGION 1..7: note = Description of Artificial Sequence: Synthetic peptide
ESQRAGG

SEQ ID NO: 3294 - protein, 7 aa, synthetic construct
  REGION 1..7: note = Description of Artificial Sequence: Synthetic peptide
ESNNGGK

SEQ ID NO: 3295 - protein, 7 aa, synthetic construct
  REGION 1..7: note = Description of Artificial Sequence: Synthetic peptide
DAGTKAM

SEQ ID NO: 3296 - protein, 7 aa, synthetic construct
  REGION 1..7: note = Description of Artificial Sequence: Synthetic peptide
GEGQSNR

SEQ ID NO: 3297 - protein, 7 aa, synthetic construct
  REGION 1..7: note = Description of Artificial Sequence: Synthetic peptide
SPGTSQG

SEQ ID NO: 3298 - protein, 7 aa, synthetic construct
  REGION 1..7: note = Description of Artificial Sequence: Synthetic peptide
SGNSSLS

SEQ ID NO: 3299 - protein, 7 aa, synthetic construct
  REGION 1..7: note = Description of Artificial Sequence: Synthetic peptide
SRTTDTT

SEQ ID NO: 3300 - protein, 7 aa, synthetic construct
  REGION 1..7: note = Description of Artificial Sequence: Synthetic peptide
EGKSAAL

SEQ ID NO: 3301 - protein, 7 aa, synthetic construct
  REGION 1..7: note = Description of Artificial Sequence: Synthetic peptide
GGAANSG

SEQ ID NO: 3302 - protein, 7 aa, synthetic construct
  REGION 1..7: note = Description of Artificial Sequence: Synthetic peptide
SREGSNV

SEQ ID NO: 3303 - protein, 7 aa, synthetic construct
  REGION 1..7: note = Description of Artificial Sequence: Synthetic peptide
GSTSQPA

SEQ ID NO: 3304 - protein, 7 aa, synthetic construct
  REGION 1..7: note = Description of Artificial Sequence: Synthetic peptide
NSETKAS

SEQ ID NO: 3305 - protein, 7 aa, synthetic construct
  REGION 1..7: note = Description of Artificial Sequence: Synthetic peptide
SKTQTSI

SEQ ID NO: 3306 - protein, 7 aa, synthetic construct
  REGION 1..7: note = Description of Artificial Sequence: Synthetic peptide
LNGKTNS

SEQ ID NO: 3307 - protein, 7 aa, synthetic construct
  REGION 1..7: note = Description of Artificial Sequence: Synthetic peptide
NVGKDRA

SEQ ID NO: 3308 - protein, 7 aa, synthetic construct
  REGION 1..7: note = Description of Artificial Sequence: Synthetic peptide
NTVGQNT

SEQ ID NO: 3309 - protein, 7 aa, synthetic construct
  REGION 1..7: note = Description of Artificial Sequence: Synthetic peptide
QASQSAK

SEQ ID NO: 3310 - protein, 7 aa, synthetic construct
  REGION 1..7: note = Description of Artificial Sequence: Synthetic peptide
EHNSESK

SEQ ID NO: 3311 - protein, 7 aa, synthetic construct
  REGION 1..7: note = Description of Artificial Sequence: Synthetic peptide
NTNSPSA

SEQ ID NO: 3312 - protein, 7 aa, synthetic construct
  REGION 1..7: note = Description of Artificial Sequence: Synthetic peptide
NSGPPTG

SEQ ID NO: 3313 - protein, 7 aa, synthetic construct
  REGION 1..7: note = Description of Artificial Sequence: Synthetic peptide
NGKASPG

SEQ ID NO: 3314 - protein, 7 aa, synthetic construct
  REGION 1..7: note = Description of Artificial Sequence: Synthetic peptide
NGSAKPS

SEQ ID NO: 3315 - protein, 7 aa, synthetic construct
  REGION 1..7: note = Description of Artificial Sequence: Synthetic peptide
TGHGSVA

SEQ ID NO: 3316 - protein, 7 aa, synthetic construct
  REGION 1..7: note = Description of Artificial Sequence: Synthetic peptide
TRDSSTT

SEQ ID NO: 3317 - protein, 7 aa, synthetic construct
  REGION 1..7: note = Description of Artificial Sequence: Synthetic peptide
SRDAGHH

SEQ ID NO: 3318 - protein, 7 aa, synthetic construct
  REGION 1..7: note = Description of Artificial Sequence: Synthetic peptide
SGKNEAG

SEQ ID NO: 3319 - protein, 7 aa, synthetic construct
  REGION 1..7: note = Description of Artificial Sequence: Synthetic peptide
ISDKAPG

SEQ ID NO: 3320 - protein, 7 aa, synthetic construct
  REGION 1..7: note = Description of Artificial Sequence: Synthetic peptide
QTGGSGS

SEQ ID NO: 3321 - protein, 7 aa, synthetic construct
  REGION 1..7: note = Description of Artificial Sequence: Synthetic peptide
QGGSSSQ

SEQ ID NO: 3322 - protein, 7 aa, synthetic construct
  REGION 1..7: note = Description of Artificial Sequence: Synthetic peptide
ESSNKGG

SEQ ID NO: 3323 - protein, 7 aa, synthetic construct
  REGION 1..7: note = Description of Artificial Sequence: Synthetic peptide
EASERPG

SEQ ID NO: 3324 - protein, 7 aa, synthetic construct
  REGION 1..7: note = Description of Artificial Sequence: Synthetic peptide
DSKVSTQ

SEQ ID NO: 3325 - protein, 7 aa, synthetic construct
  REGION 1..7: note = Description of Artificial Sequence: Synthetic peptide
GTGNTPL

SEQ ID NO: 3326 - protein, 7 aa, synthetic construct
  REGION 1..7: note = Description of Artificial Sequence: Synthetic peptide
GSPATTG

SEQ ID NO: 3327 - protein, 7 aa, synthetic construct
  REGION 1..7: note = Description of Artificial Sequence: Synthetic peptide
GITPPGQ

SEQ ID NO: 3328 - protein, 7 aa, synthetic construct
  REGION 1..7: note = Description of Artificial Sequence: Synthetic peptide
VHGDKTG

SEQ ID NO: 3329 - protein, 7 aa, synthetic construct
  REGION 1..7: note = Description of Artificial Sequence: Synthetic peptide
VGTPTSV

SEQ ID NO: 3330 - protein, 7 aa, synthetic construct
  REGION 1..7: note = Description of Artificial Sequence: Synthetic peptide
SSTTTSS

SEQ ID NO: 3331 - protein, 7 aa, synthetic construct
  REGION 1..7: note = Description of Artificial Sequence: Synthetic peptide
QGTGNDR

SEQ ID NO: 3332 - protein, 7 aa, synthetic construct
  REGION 1..7: note = Description of Artificial Sequence: Synthetic peptide
GIKESKQ

SEQ ID NO: 3333 - protein, 7 aa, synthetic construct
  REGION 1..7: note = Description of Artificial Sequence: Synthetic peptide
SPTTKNV

SEQ ID NO: 3334 - protein, 7 aa, synthetic construct
  REGION 1..7: note = Description of Artificial Sequence: Synthetic peptide
TGSNAPA

SEQ ID NO: 3335 - protein, 7 aa, synthetic construct
  REGION 1..7: note = Description of Artificial Sequence: Synthetic peptide
NSSGTPT

SEQ ID NO: 3336 - protein, 7 aa, synthetic construct
  REGION 1..7: note = Description of Artificial Sequence: Synthetic peptide
VNNSGSH

SEQ ID NO: 3337 - protein, 7 aa, synthetic construct
  REGION 1..7: note = Description of Artificial Sequence: Synthetic peptide
SVHATPT

SEQ ID NO: 3338 - protein, 7 aa, synthetic construct
  REGION 1..7: note = Description of Artificial Sequence: Synthetic peptide
GGANPGT

SEQ ID NO: 3339 - protein, 7 aa, synthetic construct
  REGION 1..7: note = Description of Artificial Sequence: Synthetic peptide
QRADHSS

SEQ ID NO: 3340 - protein, 7 aa, synthetic construct
  REGION 1..7: note = Description of Artificial Sequence: Synthetic peptide
ENQSPNK

SEQ ID NO: 3341 - protein, 7 aa, synthetic construct
  REGION 1..7: note = Description of Artificial Sequence: Synthetic peptide
STGNSNA

SEQ ID NO: 3342 - protein, 7 aa, synthetic construct
  REGION 1..7: note = Description of Artificial Sequence: Synthetic peptide
NAGANSI

SEQ ID NO: 3343 - protein, 7 aa, synthetic construct
  REGION 1..7: note = Description of Artificial Sequence: Synthetic peptide
GALTDQK

SEQ ID NO: 3344 - protein, 7 aa, synthetic construct
  REGION 1..7: note = Description of Artificial Sequence: Synthetic peptide
SSASQPS

SEQ ID NO: 3345 - protein, 7 aa, synthetic construct
  REGION 1..7: note = Description of Artificial Sequence: Synthetic peptide
NGSTPSQ

SEQ ID NO: 3346 - protein, 7 aa, synthetic construct
  REGION 1..7: note = Description of Artificial Sequence: Synthetic peptide
STISAGK

SEQ ID NO: 3347 - protein, 7 aa, synthetic construct
  REGION 1..7: note = Description of Artificial Sequence: Synthetic peptide
LPNPGSG

SEQ ID NO: 3348 - protein, 7 aa, synthetic construct
  REGION 1..7: note = Description of Artificial Sequence: Synthetic peptide
HTGTSNS

SEQ ID NO: 3349 - protein, 7 aa, synthetic construct
  REGION 1..7: note = Description of Artificial Sequence: Synthetic peptide
GSGSKVV

SEQ ID NO: 3350 - protein, 7 aa, synthetic construct
  REGION 1..7: note = Description of Artificial Sequence: Synthetic peptide
TKDSSPQ

SEQ ID NO: 3351 - protein, 7 aa, synthetic construct
  REGION 1..7: note = Description of Artificial Sequence: Synthetic peptide
GNSDRSS

SEQ ID NO: 3352 - protein, 7 aa, synthetic construct
  REGION 1..7: note = Description of Artificial Sequence: Synthetic peptide
QSGDSIK

SEQ ID NO: 3353 - protein, 7 aa, synthetic construct
  REGION 1..7: note = Description of Artificial Sequence: Synthetic peptide
TSANAAT

SEQ ID NO: 3354 - protein, 7 aa, synthetic construct
  REGION 1..7: note = Description of Artificial Sequence: Synthetic peptide
QGDKTLV

SEQ ID NO: 3355 - protein, 7 aa, synthetic construct
  REGION 1..7: note = Description of Artificial Sequence: Synthetic peptide
GMSDKPI

SEQ ID NO: 3356 - protein, 7 aa, synthetic construct
  REGION 1..7: note = Description of Artificial Sequence: Synthetic peptide
GPNTDVK

SEQ ID NO: 3357 - protein, 7 aa, synthetic construct
  REGION 1..7: note = Description of Artificial Sequence: Synthetic peptide
TSDSSKG

SEQ ID NO: 3358 - protein, 7 aa, synthetic construct
  REGION 1..7: note = Description of Artificial Sequence: Synthetic peptide
LSGNKDA

SEQ ID NO: 3359 - protein, 7 aa, synthetic construct
  REGION 1..7: note = Description of Artificial Sequence: Synthetic peptide
LGAGQAL

SEQ ID NO: 3360 - protein, 7 aa, synthetic construct
  REGION 1..7: note = Description of Artificial Sequence: Synthetic peptide
SQLERSA

SEQ ID NO: 3361 - protein, 7 aa, synthetic construct
  REGION 1..7: note = Description of Artificial Sequence: Synthetic peptide
HNDTKAT

SEQ ID NO: 3362 - protein, 7 aa, synthetic construct
  REGION 1..7: note = Description of Artificial Sequence: Synthetic peptide
TGETHKA

SEQ ID NO: 3363 - protein, 7 aa, synthetic construct
  REGION 1..7: note = Description of Artificial Sequence: Synthetic peptide
GAEKNNG

SEQ ID NO: 3364 - protein, 7 aa, synthetic construct
  REGION 1..7: note = Description of Artificial Sequence: Synthetic peptide
GTGKDSL

SEQ ID NO: 3365 - protein, 7 aa, synthetic construct
  REGION 1..7: note = Description of Artificial Sequence: Synthetic peptide
KTGTGTE

SEQ ID NO: 3366 - protein, 7 aa, synthetic construct
  REGION 1..7: note = Description of Artificial Sequence: Synthetic peptide
GGANSPS

SEQ ID NO: 3367 - protein, 7 aa, synthetic construct
  REGION 1..7: note = Description of Artificial Sequence: Synthetic peptide
DSTDKRT

SEQ ID NO: 3368 - protein, 7 aa, synthetic construct
  REGION 1..7: note = Description of Artificial Sequence: Synthetic peptide
ISDKQSV

SEQ ID NO: 3369 - protein, 7 aa, synthetic construct
  REGION 1..7: note = Description of Artificial Sequence: Synthetic peptide
ELTGTKA

SEQ ID NO: 3370 - protein, 7 aa, synthetic construct
  REGION 1..7: note = Description of Artificial Sequence: Synthetic peptide
GAQDKRE

SEQ ID NO: 3371 - protein, 7 aa, synthetic construct
  REGION 1..7: note = Description of Artificial Sequence: Synthetic peptide
ETHKASN

SEQ ID NO: 3372 - protein, 7 aa, synthetic construct
  REGION 1..7: note = Description of Artificial Sequence: Synthetic peptide
QGTDQHA

SEQ ID NO: 3373 - protein, 7 aa, synthetic construct
  REGION 1..7: note = Description of Artificial Sequence: Synthetic peptide
SGTNNNV

SEQ ID NO: 3374 - protein, 7 aa, synthetic construct
  REGION 1..7: note = Description of Artificial Sequence: Synthetic peptide
NLGAQHS

SEQ ID NO: 3375 - protein, 7 aa, synthetic construct
  REGION 1..7: note = Description of Artificial Sequence: Synthetic peptide
DGKAPSL

SEQ ID NO: 3376 - protein, 7 aa, synthetic construct
  REGION 1..7: note = Description of Artificial Sequence: Synthetic peptide
VAGTKSE

SEQ ID NO: 3377 - protein, 7 aa, synthetic construct
  REGION 1..7: note = Description of Artificial Sequence: Synthetic peptide
SPSNVSK

SEQ ID NO: 3378 - protein, 7 aa, synthetic construct
  REGION 1..7: note = Description of Artificial Sequence: Synthetic peptide
SATGNGG

SEQ ID NO: 3379 - protein, 7 aa, synthetic construct
  REGION 1..7: note = Description of Artificial Sequence: Synthetic peptide
SGGAGPA

SEQ ID NO: 3380 - protein, 7 aa, synthetic construct
  REGION 1..7: note = Description of Artificial Sequence: Synthetic peptide
NGGQSKT

SEQ ID NO: 3381 - protein, 7 aa, synthetic construct
  REGION 1..7: note = Description of Artificial Sequence: Synthetic peptide
VQGSNPN

SEQ ID NO: 3382 - protein, 7 aa, synthetic construct
  REGION 1..7: note = Description of Artificial Sequence: Synthetic peptide
QGSQAQV

SEQ ID NO: 3383 - protein, 7 aa, synthetic construct
  REGION 1..7: note = Description of Artificial Sequence: Synthetic peptide
SGNSQMN

SEQ ID NO: 3384 - protein, 7 aa, synthetic construct
  REGION 1..7: note = Description of Artificial Sequence: Synthetic peptide
DQSSKAV

SEQ ID NO: 3385 - protein, 7 aa, synthetic construct
  REGION 1..7: note = Description of Artificial Sequence: Synthetic peptide
RTGNTSV

SEQ ID NO: 3386 - protein, 7 aa, synthetic construct
  REGION 1..7: note = Description of Artificial Sequence: Synthetic peptide
ARSESTG

SEQ ID NO: 3387 - protein, 7 aa, synthetic construct
  REGION 1..7: note = Description of Artificial Sequence: Synthetic peptide
ASSKENR

SEQ ID NO: 3388 - protein, 7 aa, synthetic construct
  REGION 1..7: note = Description of Artificial Sequence: Synthetic peptide
SNQNAKA

SEQ ID NO: 3389 - protein, 7 aa, synthetic construct
  REGION 1..7: note = Description of Artificial Sequence: Synthetic peptide
LSGSTSN

SEQ ID NO: 3390 - protein, 7 aa, synthetic construct
  REGION 1..7: note = Description of Artificial Sequence: Synthetic peptide
GTNTNSG

SEQ ID NO: 3391 - protein, 7 aa, synthetic construct
  REGION 1..7: note = Description of Artificial Sequence: Synthetic peptide
GTGGSSS

SEQ ID NO: 3392 - protein, 7 aa, synthetic construct
  REGION 1..7: note = Description of Artificial Sequence: Synthetic peptide
ESGGKPG

SEQ ID NO: 3393 - protein, 7 aa, synthetic construct
  REGION 1..7: note = Description of Artificial Sequence: Synthetic peptide
ATGASNN

SEQ ID NO: 3394 - protein, 7 aa, synthetic construct
  REGION 1..7: note = Description of Artificial Sequence: Synthetic peptide
SGVSGTN

SEQ ID NO: 3395 - protein, 7 aa, synthetic construct
  REGION 1..7: note = Description of Artificial Sequence: Synthetic peptide
GSNTPLA

SEQ ID NO: 3396 - protein, 7 aa, synthetic construct
  REGION 1..7: note = Description of Artificial Sequence: Synthetic peptide
SGSKSLL

SEQ ID NO: 3397 - protein, 7 aa, synthetic construct
  REGION 1..7: note = Description of Artificial Sequence: Synthetic peptide
QGSSSAV

SEQ ID NO: 3398 - protein, 7 aa, synthetic construct
  REGION 1..7: note = Description of Artificial Sequence: Synthetic peptide
NSKANNV

SEQ ID NO: 3399 - protein, 7 aa, synthetic construct
  REGION 1..7: note = Description of Artificial Sequence: Synthetic peptide
LSAKSNG

SEQ ID NO: 3400 - protein, 7 aa, synthetic construct
  REGION 1..7: note = Description of Artificial Sequence: Synthetic peptide
SGKDTSG

SEQ ID NO: 3401 - protein, 7 aa, synthetic construct
  REGION 1..7: note = Description of Artificial Sequence: Synthetic peptide
MTGSNHA

SEQ ID NO: 3402 - protein, 7 aa, synthetic construct
  REGION 1..7: note = Description of Artificial Sequence: Synthetic peptide
SNSQVNS

SEQ ID NO: 3403 - protein, 7 aa, synthetic construct
  REGION 1..7: note = Description of Artificial Sequence: Synthetic peptide
SGLASTG

SEQ ID NO: 3404 - protein, 7 aa, synthetic construct
  REGION 1..7: note = Description of Artificial Sequence: Synthetic peptide
TNSSNNV

SEQ ID NO: 3405 - protein, 7 aa, synthetic construct
  REGION 1..7: note = Description of Artificial Sequence: Synthetic peptide
GTTQDRS

SEQ ID NO: 3406 - protein, 7 aa, synthetic construct
  REGION 1..7: note = Description of Artificial Sequence: Synthetic peptide
GVSGNKD

SEQ ID NO: 3407 - protein, 7 aa, synthetic construct
  REGION 1..7: note = Description of Artificial Sequence: Synthetic peptide
TQASTPT

SEQ ID NO: 3408 - protein, 7 aa, synthetic construct
  REGION 1..7: note = Description of Artificial Sequence: Synthetic peptide
SGSGSTR

SEQ ID NO: 3409 - protein, 7 aa, synthetic construct
  REGION 1..7: note = Description of Artificial Sequence: Synthetic peptide
DAGQAPK

SEQ ID NO: 3410 - protein, 7 aa, synthetic construct
  REGION 1..7: note = Description of Artificial Sequence: Synthetic peptide
SDQQPTK

SEQ ID NO: 3411 - protein, 7 aa, synthetic construct
  REGION 1..7: note = Description of Artificial Sequence: Synthetic peptide
SSTTHPS

SEQ ID NO: 3412 - protein, 7 aa, synthetic construct
  REGION 1..7: note = Description of Artificial Sequence: Synthetic peptide
SGSGTSN

SEQ ID NO: 3413 - protein, 7 aa, synthetic construct
  REGION 1..7: note = Description of Artificial Sequence: Synthetic peptide
ATKTTNG

SEQ ID NO: 3414 - protein, 7 aa, synthetic construct
  REGION 1..7: note = Description of Artificial Sequence: Synthetic peptide
NGSAQGR

SEQ ID NO: 3415 - protein, 7 aa, synthetic construct
  REGION 1..7: note = Description of Artificial Sequence: Synthetic peptide
LTTSKAE

SEQ ID NO: 3416 - protein, 7 aa, synthetic construct
  REGION 1..7: note = Description of Artificial Sequence: Synthetic peptide
DGVTPNH

SEQ ID NO: 3417 - protein, 7 aa, synthetic construct
  REGION 1..7: note = Description of Artificial Sequence: Synthetic peptide
NGAKADS

SEQ ID NO: 3418 - protein, 7 aa, synthetic construct
  REGION 1..7: note = Description of Artificial Sequence: Synthetic peptide
TRTDSTG

SEQ ID NO: 3419 - protein, 7 aa, synthetic construct
  REGION 1..7: note = Description of Artificial Sequence: Synthetic peptide
STQQSPG

SEQ ID NO: 3420 - protein, 7 aa, synthetic construct
  REGION 1..7: note = Description of Artificial Sequence: Synthetic peptide
QGTATQS

SEQ ID NO: 3421 - protein, 7 aa, synthetic construct
  REGION 1..7: note = Description of Artificial Sequence: Synthetic peptide
SSQTSGK

SEQ ID NO: 3422 - protein, 7 aa, synthetic construct
  REGION 1..7: note = Description of Artificial Sequence: Synthetic peptide
TGVGKGL

SEQ ID NO: 3423 - protein, 7 aa, synthetic construct
  REGION 1..7: note = Description of Artificial Sequence: Synthetic peptide
NGGNAST

SEQ ID NO: 3424 - protein, 7 aa, synthetic construct
  REGION 1..7: note = Description of Artificial Sequence: Synthetic peptide
TDQSKVS

SEQ ID NO: 3425 - protein, 7 aa, synthetic construct
  REGION 1..7: note = Description of Artificial Sequence: Synthetic peptide
ASSKAVV

SEQ ID NO: 3426 - protein, 7 aa, synthetic construct
  REGION 1..7: note = Description of Artificial Sequence: Synthetic peptide
SSSSTPN

SEQ ID NO: 3427 - protein, 7 aa, synthetic construct
  REGION 1..7: note = Description of Artificial Sequence: Synthetic peptide
ANTKDTA

SEQ ID NO: 3428 - protein, 7 aa, synthetic construct
  REGION 1..7: note = Description of Artificial Sequence: Synthetic peptide
GNTGGTS

SEQ ID NO: 3429 - protein, 7 aa, synthetic construct
  REGION 1..7: note = Description of Artificial Sequence: Synthetic peptide
SGSGEAK

SEQ ID NO: 3430 - protein, 7 aa, synthetic construct
  REGION 1..7: note = Description of Artificial Sequence: Synthetic peptide
VSTKSAV

SEQ ID NO: 3431 - protein, 7 aa, synthetic construct
  REGION 1..7: note = Description of Artificial Sequence: Synthetic peptide
QPGNQTS

SEQ ID NO: 3432 - protein, 7 aa, synthetic construct
  REGION 1..7: note = Description of Artificial Sequence: Synthetic peptide
STTTSSG

SEQ ID NO: 3433 - protein, 7 aa, synthetic construct
  REGION 1..7: note = Description of Artificial Sequence: Synthetic peptide
STVTGGS

SEQ ID NO: 3434 - protein, 7 aa, synthetic construct
  REGION 1..7: note = Description of Artificial Sequence: Synthetic peptide
MPSNNST

SEQ ID NO: 3435 - protein, 7 aa, synthetic construct
  REGION 1..7: note = Description of Artificial Sequence: Synthetic peptide
TSGAPSA

SEQ ID NO: 3436 - protein, 7 aa, synthetic construct
  REGION 1..7: note = Description of Artificial Sequence: Synthetic peptide
GNQTSPI

SEQ ID NO: 3437 - protein, 7 aa, synthetic construct
  REGION 1..7: note = Description of Artificial Sequence: Synthetic peptide
ETKSTPN

SEQ ID NO: 3438 - protein, 7 aa, synthetic construct
  REGION 1..7: note = Description of Artificial Sequence: Synthetic peptide
NPGRNTG

SEQ ID NO: 3439 - protein, 7 aa, synthetic construct
  REGION 1..7: note = Description of Artificial Sequence: Synthetic peptide
QQTAQTG

SEQ ID NO: 3440 - protein, 7 aa, synthetic construct
  REGION 1..7: note = Description of Artificial Sequence: Synthetic peptide
AREINPG

SEQ ID NO: 3441 - protein, 7 aa, synthetic construct
  REGION 1..7: note = Description of Artificial Sequence: Synthetic peptide
AGQKDST

SEQ ID NO: 3442 - protein, 7 aa, synthetic construct
  REGION 1..7: note = Description of Artificial Sequence: Synthetic peptide
SSNKGSP

SEQ ID NO: 3443 - protein, 7 aa, synthetic construct
  REGION 1..7: note = Description of Artificial Sequence: Synthetic peptide
TSTNQPV

SEQ ID NO: 3444 - protein, 7 aa, synthetic construct
  REGION 1..7: note = Description of Artificial Sequence: Synthetic peptide
SVAGDRS

SEQ ID NO: 3445 - protein, 7 aa, synthetic construct
  REGION 1..7: note = Description of Artificial Sequence: Synthetic peptide
TDSTRST

SEQ ID NO: 3446 - protein, 7 aa, synthetic construct
  REGION 1..7: note = Description of Artificial Sequence: Synthetic peptide
SGSTSPN

SEQ ID NO: 3447 - protein, 7 aa, synthetic construct
  REGION 1..7: note = Description of Artificial Sequence: Synthetic peptide
GSGSSNT

SEQ ID NO: 3448 - protein, 7 aa, synthetic construct
  REGION 1..7: note = Description of Artificial Sequence: Synthetic peptide
GSTQSSA

SEQ ID NO: 3449 - protein, 7 aa, synthetic construct
  REGION 1..7: note = Description of Artificial Sequence: Synthetic peptide
NDQSKPL

SEQ ID NO: 3450 - protein, 7 aa, synthetic construct
  REGION 1..7: note = Description of Artificial Sequence: Synthetic peptide
ESRSRNE

SEQ ID NO: 3451 - protein, 7 aa, synthetic construct
  REGION 1..7: note = Description of Artificial Sequence: Synthetic peptide
DATTRPP

SEQ ID NO: 3452 - protein, 7 aa, synthetic construct
  REGION 1..7: note = Description of Artificial Sequence: Synthetic peptide
SSTNKTV

SEQ ID NO: 3453 - protein, 7 aa, synthetic construct
  REGION 1..7: note = Description of Artificial Sequence: Synthetic peptide
AGSAKDK

SEQ ID NO: 3454 - protein, 7 aa, synthetic construct
  REGION 1..7: note = Description of Artificial Sequence: Synthetic peptide
DIGKTHA

SEQ ID NO: 3455 - protein, 7 aa, synthetic construct
  REGION 1..7: note = Description of Artificial Sequence: Synthetic peptide
QVNSTPV

SEQ ID NO: 3456 - protein, 7 aa, synthetic construct
  REGION 1..7: note = Description of Artificial Sequence: Synthetic peptide
SGASSVT

SEQ ID NO: 3457 - protein, 7 aa, synthetic construct
  REGION 1..7: note = Description of Artificial Sequence: Synthetic peptide
DSGRSPN

SEQ ID NO: 3458 - protein, 7 aa, synthetic construct
  REGION 1..7: note = Description of Artificial Sequence: Synthetic peptide
SNDSKST

SEQ ID NO: 3459 - protein, 7 aa, synthetic construct
  REGION 1..7: note = Description of Artificial Sequence: Synthetic peptide
SNVKQMP

SEQ ID NO: 3460 - protein, 7 aa, synthetic construct
  REGION 1..7: note = Description of Artificial Sequence: Synthetic peptide
DGGTHVK

SEQ ID NO: 3461 - protein, 7 aa, synthetic construct
  REGION 1..7: note = Description of Artificial Sequence: Synthetic peptide
LSDGKPN

SEQ ID NO: 3462 - protein, 7 aa, synthetic construct
  REGION 1..7: note = Description of Artificial Sequence: Synthetic peptide
DAHKVNL

SEQ ID NO: 3463 - protein, 7 aa, synthetic construct
  REGION 1..7: note = Description of Artificial Sequence: Synthetic peptide
DSAAKAA

SEQ ID NO: 3464 - protein, 7 aa, synthetic construct
  REGION 1..7: note = Description of Artificial Sequence: Synthetic peptide
TGTQTNS

SEQ ID NO: 3465 - protein, 7 aa, synthetic construct
  REGION 1..7: note = Description of Artificial Sequence: Synthetic peptide
NGGGAQA

SEQ ID NO: 3466 - protein, 7 aa, synthetic construct
  REGION 1..7: note = Description of Artificial Sequence: Synthetic peptide
GATSKSV

SEQ ID NO: 3467 - protein, 7 aa, synthetic construct
  REGION 1..7: note = Description of Artificial Sequence: Synthetic peptide
QASDPKL

SEQ ID NO: 3468 - protein, 7 aa, synthetic construct
  REGION 1..7: note = Description of Artificial Sequence: Synthetic peptide
NGKSQVS

SEQ ID NO: 3469 - protein, 7 aa, synthetic construct
  REGION 1..7: note = Description of Artificial Sequence: Synthetic peptide
SASGTGQ

SEQ ID NO: 3470 - protein, 7 aa, synthetic construct
  REGION 1..7: note = Description of Artificial Sequence: Synthetic peptide
GASKSNG

SEQ ID NO: 3471 - protein, 7 aa, synthetic construct
  REGION 1..7: note = Description of Artificial Sequence: Synthetic peptide
VGEAKKA

SEQ ID NO: 3472 - protein, 7 aa, synthetic construct
  REGION 1..7: note = Description of Artificial Sequence: Synthetic peptide
ITGSTAA

SEQ ID NO: 3473 - protein, 7 aa, synthetic construct
  REGION 1..7: note = Description of Artificial Sequence: Synthetic peptide
TSSDRPT

SEQ ID NO: 3474 - protein, 7 aa, synthetic construct
  REGION 1..7: note = Description of Artificial Sequence: Synthetic peptide
AAGQGRS

SEQ ID NO: 3475 - protein, 7 aa, synthetic construct
  REGION 1..7: note = Description of Artificial Sequence: Synthetic peptide
HTQASPT

SEQ ID NO: 3476 - protein, 7 aa, synthetic construct
  REGION 1..7: note = Description of Artificial Sequence: Synthetic peptide
GSSTERV

SEQ ID NO: 3477 - protein, 7 aa, synthetic construct
  REGION 1..7: note = Description of Artificial Sequence: Synthetic peptide
TGDKAIA

SEQ ID NO: 3478 - protein, 7 aa, synthetic construct
  REGION 1..7: note = Description of Artificial Sequence: Synthetic peptide
GKTTGQY

SEQ ID NO: 3479 - protein, 7 aa, synthetic construct
  REGION 1..7: note = Description of Artificial Sequence: Synthetic peptide
SSTKTSL

SEQ ID NO: 3480 - protein, 7 aa, synthetic construct
  REGION 1..7: note = Description of Artificial Sequence: Synthetic peptide
EGASAGK

SEQ ID NO: 3481 - protein, 7 aa, synthetic construct
  REGION 1..7: note = Description of Artificial Sequence: Synthetic peptide
QTNTPHS

SEQ ID NO: 3482 - protein, 7 aa, synthetic construct
  REGION 1..7: note = Description of Artificial Sequence: Synthetic peptide
DSGSRSV

SEQ ID NO: 3483 - protein, 7 aa, synthetic construct
  REGION 1..7: note = Description of Artificial Sequence: Synthetic peptide
TPMDKKE

SEQ ID NO: 3484 - protein, 7 aa, synthetic construct
  REGION 1..7: note = Description of Artificial Sequence: Synthetic peptide
SRNNSSE

SEQ ID NO: 3485 - protein, 7 aa, synthetic construct
  REGION 1..7: note = Description of Artificial Sequence: Synthetic peptide
SGTNHTT

SEQ ID NO: 3486 - protein, 7 aa, synthetic construct
  REGION 1..7: note = Description of Artificial Sequence: Synthetic peptide
HGSNSSQ

SEQ ID NO: 3487 - protein, 7 aa, synthetic construct
  REGION 1..7: note = Description of Artificial Sequence: Synthetic peptide
GGEKVHS

SEQ ID NO: 3488 - protein, 7 aa, synthetic construct
  REGION 1..7: note = Description of Artificial Sequence: Synthetic peptide
LVNKSSL

SEQ ID NO: 3489 - protein, 7 aa, synthetic construct
  REGION 1..7: note = Description of Artificial Sequence: Synthetic peptide
DSPNSTK

SEQ ID NO: 3490 - protein, 7 aa, synthetic construct
  REGION 1..7: note = Description of Artificial Sequence: Synthetic peptide
TNSSSVQ

SEQ ID NO: 3491 - protein, 7 aa, synthetic construct
  REGION 1..7: note = Description of Artificial Sequence: Synthetic peptide
GADRGGS

SEQ ID NO: 3492 - protein, 7 aa, synthetic construct
  REGION 1..7: note = Description of Artificial Sequence: Synthetic peptide
RGNGSTY

SEQ ID NO: 3493 - protein, 7 aa, synthetic construct
  REGION 1..7: note = Description of Artificial Sequence: Synthetic peptide
NTGSQAQ

SEQ ID NO: 3494 - protein, 7 aa, synthetic construct
  REGION 1..7: note = Description of Artificial Sequence: Synthetic peptide
TIGGSPS

SEQ ID NO: 3495 - protein, 7 aa, synthetic construct
  REGION 1..7: note = Description of Artificial Sequence: Synthetic peptide
VQNKQMG

SEQ ID NO: 3496 - protein, 7 aa, synthetic construct
  REGION 1..7: note = Description of Artificial Sequence: Synthetic peptide
RGTSERS

SEQ ID NO: 3497 - protein, 7 aa, synthetic construct
  REGION 1..7: note = Description of Artificial Sequence: Synthetic peptide
QGAPSIQ

SEQ ID NO: 3498 - protein, 7 aa, synthetic construct
  REGION 1..7: note = Description of Artificial Sequence: Synthetic peptide
LGGSQSN

SEQ ID NO: 3499 - protein, 7 aa, synthetic construct
  REGION 1..7: note = Description of Artificial Sequence: Synthetic peptide
SGTPAAT

SEQ ID NO: 3500 - protein, 7 aa, synthetic construct
  REGION 1..7: note = Description of Artificial Sequence: Synthetic peptide
ATGSESR

SEQ ID NO: 3501 - protein, 7 aa, synthetic construct
  REGION 1..7: note = Description of Artificial Sequence: Synthetic peptide
LGSQNNS

SEQ ID NO: 3502 - protein, 7 aa, synthetic construct
  REGION 1..7: note = Description of Artificial Sequence: Synthetic peptide
NVGSTHT

SEQ ID NO: 3503 - protein, 7 aa, synthetic construct
  REGION 1..7: note = Description of Artificial Sequence: Synthetic peptide
GTAPGSV

SEQ ID NO: 3504 - protein, 7 aa, synthetic construct
  REGION 1..7: note = Description of Artificial Sequence: Synthetic peptide
SSHESKG

SEQ ID NO: 3505 - protein, 7 aa, synthetic construct
  REGION 1..7: note = Description of Artificial Sequence: Synthetic peptide
NTTKPND

SEQ ID NO: 3506 - protein, 7 aa, synthetic construct
  REGION 1..7: note = Description of Artificial Sequence: Synthetic peptide
SQASNKS

SEQ ID NO: 3507 - protein, 7 aa, synthetic construct
  REGION 1..7: note = Description of Artificial Sequence: Synthetic peptide
GSSSNRT

SEQ ID NO: 3508 - protein, 7 aa, synthetic construct
  REGION 1..7: note = Description of Artificial Sequence: Synthetic peptide
SSSDRSS

SEQ ID NO: 3509 - protein, 7 aa, synthetic construct
  REGION 1..7: note = Description of Artificial Sequence: Synthetic peptide
QGSTSGH

SEQ ID NO: 3510 - protein, 7 aa, synthetic construct
  REGION 1..7: note = Description of Artificial Sequence: Synthetic peptide
TPESKSQ

SEQ ID NO: 3511 - protein, 7 aa, synthetic construct
  REGION 1..7: note = Description of Artificial Sequence: Synthetic peptide
STNDKSS

SEQ ID NO: 3512 - protein, 7 aa, synthetic construct
  REGION 1..7: note = Description of Artificial Sequence: Synthetic peptide
SLSERKD

SEQ ID NO: 3513 - protein, 7 aa, synthetic construct
  REGION 1..7: note = Description of Artificial Sequence: Synthetic peptide
NVSNLKD

SEQ ID NO: 3514 - protein, 7 aa, synthetic construct
  REGION 1..7: note = Description of Artificial Sequence: Synthetic peptide
TGTGSQP

SEQ ID NO: 3515 - protein, 7 aa, synthetic construct
  REGION 1..7: note = Description of Artificial Sequence: Synthetic peptide
QGNNTAH

SEQ ID NO: 3516 - protein, 7 aa, synthetic construct
  REGION 1..7: note = Description of Artificial Sequence: Synthetic peptide
GEHKTTS

SEQ ID NO: 3517 - protein, 7 aa, synthetic construct
  REGION 1..7: note = Description of Artificial Sequence: Synthetic peptide
KSDAGST

SEQ ID NO: 3518 - protein, 7 aa, synthetic construct
  REGION 1..7: note = Description of Artificial Sequence: Synthetic peptide
NTSNPSN

SEQ ID NO: 3519 - protein, 7 aa, synthetic construct
  REGION 1..7: note = Description of Artificial Sequence: Synthetic peptide
SSTAPHN

SEQ ID NO: 3520 - protein, 7 aa, synthetic construct
  REGION 1..7: note = Description of Artificial Sequence: Synthetic peptide
RQGDKSA

SEQ ID NO: 3521 - protein, 7 aa, synthetic construct
  REGION 1..7: note = Description of Artificial Sequence: Synthetic peptide
AGEGSTS

SEQ ID NO: 3522 - protein, 7 aa, synthetic construct
  REGION 1..7: note = Description of Artificial Sequence: Synthetic peptide
SSNSTPS

SEQ ID NO: 3523 - protein, 7 aa, synthetic construct
  REGION 1..7: note = Description of Artificial Sequence: Synthetic peptide
EAGSPTR

SEQ ID NO: 3524 - protein, 7 aa, synthetic construct
  REGION 1..7: note = Description of Artificial Sequence: Synthetic peptide
YPNEKTH

SEQ ID NO: 3525 - protein, 7 aa, synthetic construct
  REGION 1..7: note = Description of Artificial Sequence: Synthetic peptide
GTPGTGT

SEQ ID NO: 3526 - protein, 7 aa, synthetic construct
  REGION 1..7: note = Description of Artificial Sequence: Synthetic peptide
NVGGDKR

SEQ ID NO: 3527 - protein, 7 aa, synthetic construct
  REGION 1..7: note = Description of Artificial Sequence: Synthetic peptide
SGNSANS

SEQ ID NO: 3528 - protein, 7 aa, synthetic construct
  REGION 1..7: note = Description of Artificial Sequence: Synthetic peptide
GELSQNK

SEQ ID NO: 3529 - protein, 7 aa, synthetic construct
  REGION 1..7: note = Description of Artificial Sequence: Synthetic peptide
AGDKSSS

SEQ ID NO: 3530 - protein, 7 aa, synthetic construct
  REGION 1..7: note = Description of Artificial Sequence: Synthetic peptide
AGNGASQ

SEQ ID NO: 3531 - protein, 7 aa, synthetic construct
  REGION 1..7: note = Description of Artificial Sequence: Synthetic peptide
TTSSTGG

SEQ ID NO: 3532 - protein, 7 aa, synthetic construct
  REGION 1..7: note = Description of Artificial Sequence: Synthetic peptide
EGVQGGR

SEQ ID NO: 3533 - protein, 7 aa, synthetic construct
  REGION 1..7: note = Description of Artificial Sequence: Synthetic peptide
KTGGNGS

SEQ ID NO: 3534 - protein, 7 aa, synthetic construct
  REGION 1..7: note = Description of Artificial Sequence: Synthetic peptide
GSGQSTA

SEQ ID NO: 3535 - protein, 7 aa, synthetic construct
  REGION 1..7: note = Description of Artificial Sequence: Synthetic peptide
AGSTSPR

SEQ ID NO: 3536 - protein, 7 aa, synthetic construct
  REGION 1..7: note = Description of Artificial Sequence: Synthetic peptide
QNAKSTS

SEQ ID NO: 3537 - protein, 7 aa, synthetic construct
  REGION 1..7: note = Description of Artificial Sequence: Synthetic peptide
DNTPTNR

SEQ ID NO: 3538 - protein, 7 aa, synthetic construct
  REGION 1..7: note = Description of Artificial Sequence: Synthetic peptide
TQGGSTA

SEQ ID NO: 3539 - protein, 7 aa, synthetic construct
  REGION 1..7: note = Description of Artificial Sequence: Synthetic peptide
GSGQTTS

SEQ ID NO: 3540 - protein, 7 aa, synthetic construct
  REGION 1..7: note = Description of Artificial Sequence: Synthetic peptide
ADGSSGR

SEQ ID NO: 3541 - protein, 7 aa, synthetic construct
  REGION 1..7: note = Description of Artificial Sequence: Synthetic peptide
NNGSASN

SEQ ID NO: 3542 - protein, 7 aa, synthetic construct
  REGION 1..7: note = Description of Artificial Sequence: Synthetic peptide
SGESTRH

SEQ ID NO: 3543 - protein, 7 aa, synthetic construct
  REGION 1..7: note = Description of Artificial Sequence: Synthetic peptide
DSISKAT

SEQ ID NO: 3544 - protein, 7 aa, synthetic construct
  REGION 1..7: note = Description of Artificial Sequence: Synthetic peptide
TGGSPLS

SEQ ID NO: 3545 - protein, 7 aa, synthetic construct
  REGION 1..7: note = Description of Artificial Sequence: Synthetic peptide
STSNTSH

SEQ ID NO: 3546 - protein, 7 aa, synthetic construct
  REGION 1..7: note = Description of Artificial Sequence: Synthetic peptide
LAGNPGH

SEQ ID NO: 3547 - protein, 7 aa, synthetic construct
  REGION 1..7: note = Description of Artificial Sequence: Synthetic peptide
GEAKHQP

SEQ ID NO: 3548 - protein, 7 aa, synthetic construct
  REGION 1..7: note = Description of Artificial Sequence: Synthetic peptide
ATNGKPI

SEQ ID NO: 3549 - protein, 7 aa, synthetic construct
  REGION 1..7: note = Description of Artificial Sequence: Synthetic peptide
GADSKNS

SEQ ID NO: 3550 - protein, 7 aa, synthetic construct
  REGION 1..7: note = Description of Artificial Sequence: Synthetic peptide
DSAGKMG

SEQ ID NO: 3551 - protein, 7 aa, synthetic construct
  REGION 1..7: note = Description of Artificial Sequence: Synthetic peptide
SQGASTA

SEQ ID NO: 3552 - protein, 7 aa, synthetic construct
  REGION 1..7: note = Description of Artificial Sequence: Synthetic peptide
GGGEHRA

SEQ ID NO: 3553 - protein, 7 aa, synthetic construct
  REGION 1..7: note = Description of Artificial Sequence: Synthetic peptide
STGHERV

SEQ ID NO: 3554 - protein, 7 aa, synthetic construct
  REGION 1..7: note = Description of Artificial Sequence: Synthetic peptide
AEGKTSS

SEQ ID NO: 3555 - protein, 7 aa, synthetic construct
  REGION 1..7: note = Description of Artificial Sequence: Synthetic peptide
DSGSSPK

SEQ ID NO: 3556 - protein, 7 aa, synthetic construct
  REGION 1..7: note = Description of Artificial Sequence: Synthetic peptide
EGHQTKS

SEQ ID NO: 3557 - protein, 7 aa, synthetic construct
  REGION 1..7: note = Description of Artificial Sequence: Synthetic peptide
DGNGGTR

SEQ ID NO: 3558 - protein, 7 aa, synthetic construct
  REGION 1..7: note = Description of Artificial Sequence: Synthetic peptide
QQSATSQ

SEQ ID NO: 3559 - protein, 7 aa, synthetic construct
  REGION 1..7: note = Description of Artificial Sequence: Synthetic peptide
QASSQNQ

SEQ ID NO: 3560 - protein, 7 aa, synthetic construct
  REGION 1..7: note = Description of Artificial Sequence: Synthetic peptide
HSTGGQG

SEQ ID NO: 3561 - protein, 7 aa, synthetic construct
  REGION 1..7: note = Description of Artificial Sequence: Synthetic peptide
DRTDKNT

SEQ ID NO: 3562 - protein, 7 aa, synthetic construct
  REGION 1..7: note = Description of Artificial Sequence: Synthetic peptide
GKTGQSA

SEQ ID NO: 3563 - protein, 7 aa, synthetic construct
  REGION 1..7: note = Description of Artificial Sequence: Synthetic peptide
AATTSTT

SEQ ID NO: 3564 - protein, 7 aa, synthetic construct
  REGION 1..7: note = Description of Artificial Sequence: Synthetic peptide
DIGSKRD

SEQ ID NO: 3565 - protein, 7 aa, synthetic construct
  REGION 1..7: note = Description of Artificial Sequence: Synthetic peptide
EQRANPT

SEQ ID NO: 3566 - protein, 7 aa, synthetic construct
  REGION 1..7: note = Description of Artificial Sequence: Synthetic peptide
HQTSGSN

SEQ ID NO: 3567 - protein, 7 aa, synthetic construct
  REGION 1..7: note = Description of Artificial Sequence: Synthetic peptide
DNASRAA

SEQ ID NO: 3568 - protein, 7 aa, synthetic construct
  REGION 1..7: note = Description of Artificial Sequence: Synthetic peptide
SSSQKSN

SEQ ID NO: 3569 - protein, 7 aa, synthetic construct
  REGION 1..7: note = Description of Artificial Sequence: Synthetic peptide
SKGDKTI

SEQ ID NO: 3570 - protein, 7 aa, synthetic construct
  REGION 1..7: note = Description of Artificial Sequence: Synthetic peptide
SSSTTPV

SEQ ID NO: 3571 - protein, 7 aa, synthetic construct
  REGION 1..7: note = Description of Artificial Sequence: Synthetic peptide
DARSGQA

SEQ ID NO: 3572 - protein, 7 aa, synthetic construct
  REGION 1..7: note = Description of Artificial Sequence: Synthetic peptide
SGNGTVQ

SEQ ID NO: 3573 - protein, 7 aa, synthetic construct
  REGION 1..7: note = Description of Artificial Sequence: Synthetic peptide
SGATSNS

SEQ ID NO: 3574 - protein, 7 aa, synthetic construct
  REGION 1..7: note = Description of Artificial Sequence: Synthetic peptide
VANGTAK

SEQ ID NO: 3575 - protein, 7 aa, synthetic construct
  REGION 1..7: note = Description of Artificial Sequence: Synthetic peptide
GSSGSNL

SEQ ID NO: 3576 - protein, 7 aa, synthetic construct
  REGION 1..7: note = Description of Artificial Sequence: Synthetic peptide
GREGSSS

SEQ ID NO: 3577 - protein, 7 aa, synthetic construct
  REGION 1..7: note = Description of Artificial Sequence: Synthetic peptide
GIGSSPS

SEQ ID NO: 3578 - protein, 7 aa, synthetic construct
  REGION 1..7: note = Description of Artificial Sequence: Synthetic peptide
GGGRDVA

SEQ ID NO: 3579 - protein, 7 aa, synthetic construct
  REGION 1..7: note = Description of Artificial Sequence: Synthetic peptide
TASTATV

SEQ ID NO: 3580 - protein, 7 aa, synthetic construct
  REGION 1..7: note = Description of Artificial Sequence: Synthetic peptide
NGSQKVQ

SEQ ID NO: 3581 - protein, 7 aa, synthetic construct
  REGION 1..7: note = Description of Artificial Sequence: Synthetic peptide
NGNTNGQ

SEQ ID NO: 3582 - protein, 7 aa, synthetic construct
  REGION 1..7: note = Description of Artificial Sequence: Synthetic peptide
LGSGSTT

SEQ ID NO: 3583 - protein, 7 aa, synthetic construct
  REGION 1..7: note = Description of Artificial Sequence: Synthetic peptide
NSGGSSS

SEQ ID NO: 3584 - protein, 7 aa, synthetic construct
  REGION 1..7: note = Description of Artificial Sequence: Synthetic peptide
NGNPTPS

SEQ ID NO: 3585 - protein, 7 aa, synthetic construct
  REGION 1..7: note = Description of Artificial Sequence: Synthetic peptide
SGTNHTG

SEQ ID NO: 3586 - protein, 7 aa, synthetic construct
  REGION 1..7: note = Description of Artificial Sequence: Synthetic peptide
GTGSDRT

SEQ ID NO: 3587 - protein, 7 aa, synthetic construct
  REGION 1..7: note = Description of Artificial Sequence: Synthetic peptide
VPSSNPN

SEQ ID NO: 3588 - protein, 7 aa, synthetic construct
  REGION 1..7: note = Description of Artificial Sequence: Synthetic peptide
QTPSKMS

SEQ ID NO: 3589 - protein, 7 aa, synthetic construct
  REGION 1..7: note = Description of Artificial Sequence: Synthetic peptide
EGKSSLA

SEQ ID NO: 3590 - protein, 7 aa, synthetic construct
  REGION 1..7: note = Description of Artificial Sequence: Synthetic peptide
ANGAGSH

SEQ ID NO: 3591 - protein, 7 aa, synthetic construct
  REGION 1..7: note = Description of Artificial Sequence: Synthetic peptide
RLDNTGG

SEQ ID NO: 3592 - protein, 7 aa, synthetic construct
  REGION 1..7: note = Description of Artificial Sequence: Synthetic peptide
NKVQSHE

SEQ ID NO: 3593 - protein, 7 aa, synthetic construct
  REGION 1..7: note = Description of Artificial Sequence: Synthetic peptide
STGATSS

SEQ ID NO: 3594 - protein, 7 aa, synthetic construct
  REGION 1..7: note = Description of Artificial Sequence: Synthetic peptide
HTDKSGA

SEQ ID NO: 3595 - protein, 7 aa, synthetic construct
  REGION 1..7: note = Description of Artificial Sequence: Synthetic peptide
TGSSTIT

SEQ ID NO: 3596 - protein, 7 aa, synthetic construct
  REGION 1..7: note = Description of Artificial Sequence: Synthetic peptide
LSSQKGN

SEQ ID NO: 3597 - protein, 7 aa, synthetic construct
  REGION 1..7: note = Description of Artificial Sequence: Synthetic peptide
MPSNSST

SEQ ID NO: 3598 - protein, 7 aa, synthetic construct
  REGION 1..7: note = Description of Artificial Sequence: Synthetic peptide
TRNTPTE

SEQ ID NO: 3599 - protein, 7 aa, synthetic construct
  REGION 1..7: note = Description of Artificial Sequence: Synthetic peptide
AVDNKSH

SEQ ID NO: 3600 - protein, 7 aa, synthetic construct
  REGION 1..7: note = Description of Artificial Sequence: Synthetic peptide
NSVSSTG

SEQ ID NO: 3601 - protein, 7 aa, synthetic construct
  REGION 1..7: note = Description of Artificial Sequence: Synthetic peptide
AASSTPQ

SEQ ID NO: 3602 - protein, 7 aa, synthetic construct
  REGION 1..7: note = Description of Artificial Sequence: Synthetic peptide
GSRDSTG

SEQ ID NO: 3603 - protein, 7 aa, synthetic construct
  REGION 1..7: note = Description of Artificial Sequence: Synthetic peptide
GELKNAG

SEQ ID NO: 3604 - protein, 7 aa, synthetic construct
  REGION 1..7: note = Description of Artificial Sequence: Synthetic peptide
SGRDGHN

SEQ ID NO: 3605 - protein, 7 aa, synthetic construct
  REGION 1..7: note = Description of Artificial Sequence: Synthetic peptide
SAGNGKS

SEQ ID NO: 3606 - protein, 7 aa, synthetic construct
  REGION 1..7: note = Description of Artificial Sequence: Synthetic peptide
DNKTASN

SEQ ID NO: 3607 - protein, 7 aa, synthetic construct
  REGION 1..7: note = Description of Artificial Sequence: Synthetic peptide
TATESRG

SEQ ID NO: 3608 - protein, 7 aa, synthetic construct
  REGION 1..7: note = Description of Artificial Sequence: Synthetic peptide
ATTPPTS

SEQ ID NO: 3609 - protein, 7 aa, synthetic construct
  REGION 1..7: note = Description of Artificial Sequence: Synthetic peptide
QSSNQMT

SEQ ID NO: 3610 - protein, 7 aa, synthetic construct
  REGION 1..7: note = Description of Artificial Sequence: Synthetic peptide
GNHQPSS

SEQ ID NO: 3611 - protein, 7 aa, synthetic construct
  REGION 1..7: note = Description of Artificial Sequence: Synthetic peptide
TSKPNPS

SEQ ID NO: 3612 - protein, 7 aa, synthetic construct
  REGION 1..7: note = Description of Artificial Sequence: Synthetic peptide
TGGTNSV

SEQ ID NO: 3613 - protein, 7 aa, synthetic construct
  REGION 1..7: note = Description of Artificial Sequence: Synthetic peptide
DTGVNRG

SEQ ID NO: 3614 - protein, 7 aa, synthetic construct
  REGION 1..7: note = Description of Artificial Sequence: Synthetic peptide
SGAGTPS

SEQ ID NO: 3615 - protein, 7 aa, synthetic construct
  REGION 1..7: note = Description of Artificial Sequence: Synthetic peptide
DNTVKTN

SEQ ID NO: 3616 - protein, 7 aa, synthetic construct
  REGION 1..7: note = Description of Artificial Sequence: Synthetic peptide
DQGSVSK

SEQ ID NO: 3617 - protein, 7 aa, synthetic construct
  REGION 1..7: note = Description of Artificial Sequence: Synthetic peptide
AMGDSKG

SEQ ID NO: 3618 - protein, 7 aa, synthetic construct
  REGION 1..7: note = Description of Artificial Sequence: Synthetic peptide
GNSAGGA

SEQ ID NO: 3619 - protein, 7 aa, synthetic construct
  REGION 1..7: note = Description of Artificial Sequence: Synthetic peptide
GTAKDVA

SEQ ID NO: 3620 - protein, 7 aa, synthetic construct
  REGION 1..7: note = Description of Artificial Sequence: Synthetic peptide
DRADKMG

SEQ ID NO: 3621 - protein, 7 aa, synthetic construct
  REGION 1..7: note = Description of Artificial Sequence: Synthetic peptide
DRGTPPT

SEQ ID NO: 3622 - protein, 7 aa, synthetic construct
  REGION 1..7: note = Description of Artificial Sequence: Synthetic peptide
GDGGSLK

SEQ ID NO: 3623 - protein, 7 aa, synthetic construct
  REGION 1..7: note = Description of Artificial Sequence: Synthetic peptide
TMSDKGM

SEQ ID NO: 3624 - protein, 7 aa, synthetic construct
  REGION 1..7: note = Description of Artificial Sequence: Synthetic peptide
NTIGDNK

SEQ ID NO: 3625 - protein, 7 aa, synthetic construct
  REGION 1..7: note = Description of Artificial Sequence: Synthetic peptide
TTSDGAK

SEQ ID NO: 3626 - protein, 7 aa, synthetic construct
  REGION 1..7: note = Description of Artificial Sequence: Synthetic peptide
SNSNGHS

SEQ ID NO: 3627 - protein, 7 aa, synthetic construct
  REGION 1..7: note = Description of Artificial Sequence: Synthetic peptide
SGSPPAA

SEQ ID NO: 3628 - protein, 7 aa, synthetic construct
  REGION 1..7: note = Description of Artificial Sequence: Synthetic peptide
SGSNQPR

SEQ ID NO: 3629 - protein, 7 aa, synthetic construct
  REGION 1..7: note = Description of Artificial Sequence: Synthetic peptide
RDGSGKV

SEQ ID NO: 3630 - protein, 7 aa, synthetic construct
  REGION 1..7: note = Description of Artificial Sequence: Synthetic peptide
NQAASPV

SEQ ID NO: 3631 - protein, 7 aa, synthetic construct
  REGION 1..7: note = Description of Artificial Sequence: Synthetic peptide
SGSASNV

SEQ ID NO: 3632 - protein, 7 aa, synthetic construct
  REGION 1..7: note = Description of Artificial Sequence: Synthetic peptide
SIAKDRA

SEQ ID NO: 3633 - protein, 7 aa, synthetic construct
  REGION 1..7: note = Description of Artificial Sequence: Synthetic peptide
DRTVKEV

SEQ ID NO: 3634 - protein, 7 aa, synthetic construct
  REGION 1..7: note = Description of Artificial Sequence: Synthetic peptide
TKNSQVV

SEQ ID NO: 3635 - protein, 7 aa, synthetic construct
  REGION 1..7: note = Description of Artificial Sequence: Synthetic peptide
ESANRNA

SEQ ID NO: 3636 - protein, 7 aa, synthetic construct
  REGION 1..7: note = Description of Artificial Sequence: Synthetic peptide
SHSESAK

SEQ ID NO: 3637 - protein, 7 aa, synthetic construct
  REGION 1..7: note = Description of Artificial Sequence: Synthetic peptide
SGVGGKE

SEQ ID NO: 3638 - protein, 7 aa, synthetic construct
  REGION 1..7: note = Description of Artificial Sequence: Synthetic peptide
APPEGAK

SEQ ID NO: 3639 - protein, 7 aa, synthetic construct
  REGION 1..7: note = Description of Artificial Sequence: Synthetic peptide
NAQGANA

SEQ ID NO: 3640 - protein, 7 aa, synthetic construct
  REGION 1..7: note = Description of Artificial Sequence: Synthetic peptide
QVGAQNS

SEQ ID NO: 3641 - protein, 7 aa, synthetic construct
  REGION 1..7: note = Description of Artificial Sequence: Synthetic peptide
HSNGHAQ

SEQ ID NO: 3642 - protein, 7 aa, synthetic construct
  REGION 1..7: note = Description of Artificial Sequence: Synthetic peptide
GNASPSV

SEQ ID NO: 3643 - protein, 7 aa, synthetic construct
  REGION 1..7: note = Description of Artificial Sequence: Synthetic peptide
GDSKSTL

SEQ ID NO: 3644 - protein, 7 aa, synthetic construct
  REGION 1..7: note = Description of Artificial Sequence: Synthetic peptide
TRASGST

SEQ ID NO: 3645 - protein, 7 aa, synthetic construct
  REGION 1..7: note = Description of Artificial Sequence: Synthetic peptide
SVTPSGG

SEQ ID NO: 3646 - protein, 7 aa, synthetic construct
  REGION 1..7: note = Description of Artificial Sequence: Synthetic peptide
TSQTSTT

SEQ ID NO: 3647 - protein, 7 aa, synthetic construct
  REGION 1..7: note = Description of Artificial Sequence: Synthetic peptide
EAKSDHR

SEQ ID NO: 3648 - protein, 7 aa, synthetic construct
  REGION 1..7: note = Description of Artificial Sequence: Synthetic peptide
AESHNVK

SEQ ID NO: 3649 - protein, 7 aa, synthetic construct
  REGION 1..7: note = Description of Artificial Sequence: Synthetic peptide
GIGSPTA

SEQ ID NO: 3650 - protein, 7 aa, synthetic construct
  REGION 1..7: note = Description of Artificial Sequence: Synthetic peptide
GQGAGAS

SEQ ID NO: 3651 - protein, 7 aa, synthetic construct
  REGION 1..7: note = Description of Artificial Sequence: Synthetic peptide
QQGSGSH

SEQ ID NO: 3652 - protein, 7 aa, synthetic construct
  REGION 1..7: note = Description of Artificial Sequence: Synthetic peptide
DNPTKTQ

SEQ ID NO: 3653 - protein, 7 aa, synthetic construct
  REGION 1..7: note = Description of Artificial Sequence: Synthetic peptide
TGTTAAT

SEQ ID NO: 3654 - protein, 7 aa, synthetic construct
  REGION 1..7: note = Description of Artificial Sequence: Synthetic peptide
TSGSAPT

SEQ ID NO: 3655 - protein, 7 aa, synthetic construct
  REGION 1..7: note = Description of Artificial Sequence: Synthetic peptide
GTGSTSN

SEQ ID NO: 3656 - protein, 7 aa, synthetic construct
  REGION 1..7: note = Description of Artificial Sequence: Synthetic peptide
NSGSNSM

SEQ ID NO: 3657 - protein, 7 aa, synthetic construct
  REGION 1..7: note = Description of Artificial Sequence: Synthetic peptide
QTGQHST

SEQ ID NO: 3658 - protein, 7 aa, synthetic construct
  REGION 1..7: note = Description of Artificial Sequence: Synthetic peptide
GDPKNSG

SEQ ID NO: 3659 - protein, 7 aa, synthetic construct
  REGION 1..7: note = Description of Artificial Sequence: Synthetic peptide
SSPPPSH

SEQ ID NO: 3660 - protein, 7 aa, synthetic construct
  REGION 1..7: note = Description of Artificial Sequence: Synthetic peptide
GQDRVAS

SEQ ID NO: 3661 - protein, 7 aa, synthetic construct
  REGION 1..7: note = Description of Artificial Sequence: Synthetic peptide
EVAQPSN

SEQ ID NO: 3662 - protein, 7 aa, synthetic construct
  REGION 1..7: note = Description of Artificial Sequence: Synthetic peptide
LNEHKVS

SEQ ID NO: 3663 - protein, 7 aa, synthetic construct
  REGION 1..7: note = Description of Artificial Sequence: Synthetic peptide
GETGQHK

SEQ ID NO: 3664 - protein, 7 aa, synthetic construct
  REGION 1..7: note = Description of Artificial Sequence: Synthetic peptide
STQEAKH

SEQ ID NO: 3665 - protein, 7 aa, synthetic construct
  REGION 1..7: note = Description of Artificial Sequence: Synthetic peptide
QSHDKTN

SEQ ID NO: 3666 - protein, 7 aa, synthetic construct
  REGION 1..7: note = Description of Artificial Sequence: Synthetic peptide
HSDTSKS

SEQ ID NO: 3667 - protein, 7 aa, synthetic construct
  REGION 1..7: note = Description of Artificial Sequence: Synthetic peptide
SGIGTST

SEQ ID NO: 3668 - protein, 7 aa, synthetic construct
  REGION 1..7: note = Description of Artificial Sequence: Synthetic peptide
NTGETPR

SEQ ID NO: 3669 - protein, 7 aa, synthetic construct
  REGION 1..7: note = Description of Artificial Sequence: Synthetic peptide
QGGDSTR

SEQ ID NO: 3670 - protein, 7 aa, synthetic construct
  REGION 1..7: note = Description of Artificial Sequence: Synthetic peptide
TTTEKSG

SEQ ID NO: 3671 - protein, 7 aa, synthetic construct
  REGION 1..7: note = Description of Artificial Sequence: Synthetic peptide
TTTATSQ

SEQ ID NO: 3672 - protein, 7 aa, synthetic construct
  REGION 1..7: note = Description of Artificial Sequence: Synthetic peptide
SGAKSDA

SEQ ID NO: 3673 - protein, 7 aa, synthetic construct
  REGION 1..7: note = Description of Artificial Sequence: Synthetic peptide
NSADKSI

SEQ ID NO: 3674 - protein, 7 aa, synthetic construct
  REGION 1..7: note = Description of Artificial Sequence: Synthetic peptide
ASSPSSM

SEQ ID NO: 3675 - protein, 7 aa, synthetic construct
  REGION 1..7: note = Description of Artificial Sequence: Synthetic peptide
APSSNPV

SEQ ID NO: 3676 - protein, 7 aa, synthetic construct
  REGION 1..7: note = Description of Artificial Sequence: Synthetic peptide
GIDAKMS

SEQ ID NO: 3677 - protein, 7 aa, synthetic construct
  REGION 1..7: note = Description of Artificial Sequence: Synthetic peptide
DTVSKTA

SEQ ID NO: 3678 - protein, 7 aa, synthetic construct
  REGION 1..7: note = Description of Artificial Sequence: Synthetic peptide
NSGSQAN

SEQ ID NO: 3679 - protein, 7 aa, synthetic construct
  REGION 1..7: note = Description of Artificial Sequence: Synthetic peptide
TSQAQTG

SEQ ID NO: 3680 - protein, 7 aa, synthetic construct
  REGION 1..7: note = Description of Artificial Sequence: Synthetic peptide
TGQPSSV

SEQ ID NO: 3681 - protein, 7 aa, synthetic construct
  REGION 1..7: note = Description of Artificial Sequence: Synthetic peptide
STGQAPS

SEQ ID NO: 3682 - protein, 7 aa, synthetic construct
  REGION 1..7: note = Description of Artificial Sequence: Synthetic peptide
SPGHKLM

SEQ ID NO: 3683 - protein, 7 aa, synthetic construct
  REGION 1..7: note = Description of Artificial Sequence: Synthetic peptide
GTETKTG

SEQ ID NO: 3684 - protein, 7 aa, synthetic construct
  REGION 1..7: note = Description of Artificial Sequence: Synthetic peptide
GGDQGVK

SEQ ID NO: 3685 - protein, 7 aa, synthetic construct
  REGION 1..7: note = Description of Artificial Sequence: Synthetic peptide
VVGRTPG

SEQ ID NO: 3686 - protein, 7 aa, synthetic construct
  REGION 1..7: note = Description of Artificial Sequence: Synthetic peptide
EGSKTPV

SEQ ID NO: 3687 - protein, 7 aa, synthetic construct
  REGION 1..7: note = Description of Artificial Sequence: Synthetic peptide
TSDRTST

SEQ ID NO: 3688 - protein, 7 aa, synthetic construct
  REGION 1..7: note = Description of Artificial Sequence: Synthetic peptide
MKQTSAV

SEQ ID NO: 3689 - protein, 7 aa, synthetic construct
  REGION 1..7: note = Description of Artificial Sequence: Synthetic peptide
DVPTSKA

SEQ ID NO: 3690 - protein, 7 aa, synthetic construct
  REGION 1..7: note = Description of Artificial Sequence: Synthetic peptide
TAATVAK

SEQ ID NO: 3691 - protein, 7 aa, synthetic construct
  REGION 1..7: note = Description of Artificial Sequence: Synthetic peptide
RQSDKVS

SEQ ID NO: 3692 - protein, 7 aa, synthetic construct
  REGION 1..7: note = Description of Artificial Sequence: Synthetic peptide
GLQTNGT

SEQ ID NO: 3693 - protein, 7 aa, synthetic construct
  REGION 1..7: note = Description of Artificial Sequence: Synthetic peptide
SGVQATN

SEQ ID NO: 3694 - protein, 7 aa, synthetic construct
  REGION 1..7: note = Description of Artificial Sequence: Synthetic peptide
ATNEKTF

SEQ ID NO: 3695 - protein, 7 aa, synthetic construct
  REGION 1..7: note = Description of Artificial Sequence: Synthetic peptide
SGEAKVA

SEQ ID NO: 3696 - protein, 7 aa, synthetic construct
  REGION 1..7: note = Description of Artificial Sequence: Synthetic peptide
DSAKPNS

SEQ ID NO: 3697 - protein, 7 aa, synthetic construct
  REGION 1..7: note = Description of Artificial Sequence: Synthetic peptide
TTGASPI

SEQ ID NO: 3698 - protein, 7 aa, synthetic construct
  REGION 1..7: note = Description of Artificial Sequence: Synthetic peptide
VTGNAGT

SEQ ID NO: 3699 - protein, 7 aa, synthetic construct
  REGION 1..7: note = Description of Artificial Sequence: Synthetic peptide
NTTSGNN

SEQ ID NO: 3700 - protein, 7 aa, synthetic construct
  REGION 1..7: note = Description of Artificial Sequence: Synthetic peptide
NDSQKVA

SEQ ID NO: 3701 - protein, 7 aa, synthetic construct
  REGION 1..7: note = Description of Artificial Sequence: Synthetic peptide
ASTGSSK

SEQ ID NO: 3702 - protein, 7 aa, synthetic construct
  REGION 1..7: note = Description of Artificial Sequence: Synthetic peptide
SSGGAST

SEQ ID NO: 3703 - protein, 7 aa, synthetic construct
  REGION 1..7: note = Description of Artificial Sequence: Synthetic peptide
DGRQTTS

SEQ ID NO: 3704 - protein, 7 aa, synthetic construct
  REGION 1..7: note = Description of Artificial Sequence: Synthetic peptide
AGETART

SEQ ID NO: 3705 - protein, 7 aa, synthetic construct
  REGION 1..7: note = Description of Artificial Sequence: Synthetic peptide
ASNSPVS

SEQ ID NO: 3706 - protein, 7 aa, synthetic construct
  REGION 1..7: note = Description of Artificial Sequence: Synthetic peptide
SGKGSSV

SEQ ID NO: 3707 - protein, 7 aa, synthetic construct
  REGION 1..7: note = Description of Artificial Sequence: Synthetic peptide
SGSESPK

SEQ ID NO: 3708 - protein, 7 aa, synthetic construct
  REGION 1..7: note = Description of Artificial Sequence: Synthetic peptide
TASGTPQ

SEQ ID NO: 3709 - protein, 7 aa, synthetic construct
  REGION 1..7: note = Description of Artificial Sequence: Synthetic peptide
NTGSASI

SEQ ID NO: 3710 - protein, 7 aa, synthetic construct
  REGION 1..7: note = Description of Artificial Sequence: Synthetic peptide
EATVKTG

SEQ ID NO: 3711 - protein, 7 aa, synthetic construct
  REGION 1..7: note = Description of Artificial Sequence: Synthetic peptide
IQKGNNE

SEQ ID NO: 3712 - protein, 7 aa, synthetic construct
  REGION 1..7: note = Description of Artificial Sequence: Synthetic peptide
DSNKQNL

SEQ ID NO: 3713 - protein, 7 aa, synthetic construct
  REGION 1..7: note = Description of Artificial Sequence: Synthetic peptide
TGGNPVT

SEQ ID NO: 3714 - protein, 7 aa, synthetic construct
  REGION 1..7: note = Description of Artificial Sequence: Synthetic peptide
QGSNNSR

SEQ ID NO: 3715 - protein, 7 aa, synthetic construct
  REGION 1..7: note = Description of Artificial Sequence: Synthetic peptide
KVATSSS

SEQ ID NO: 3716 - protein, 7 aa, synthetic construct
  REGION 1..7: note = Description of Artificial Sequence: Synthetic peptide
DSSREAR

SEQ ID NO: 3717 - protein, 7 aa, synthetic construct
  REGION 1..7: note = Description of Artificial Sequence: Synthetic peptide
EGSSSSM

SEQ ID NO: 3718 - protein, 7 aa, synthetic construct
  REGION 1..7: note = Description of Artificial Sequence: Synthetic peptide
NNGSSVA

SEQ ID NO: 3719 - protein, 7 aa, synthetic construct
  REGION 1..7: note = Description of Artificial Sequence: Synthetic peptide
ETSERNQ

SEQ ID NO: 3720 - protein, 7 aa, synthetic construct
  REGION 1..7: note = Description of Artificial Sequence: Synthetic peptide
DSGTGPT

SEQ ID NO: 3721 - protein, 7 aa, synthetic construct
  REGION 1..7: note = Description of Artificial Sequence: Synthetic peptide
DSAKSSV

SEQ ID NO: 3722 - protein, 7 aa, synthetic construct
  REGION 1..7: note = Description of Artificial Sequence: Synthetic peptide
SDTKTST

SEQ ID NO: 3723 - protein, 7 aa, synthetic construct
  REGION 1..7: note = Description of Artificial Sequence: Synthetic peptide
QGQGQAS

SEQ ID NO: 3724 - protein, 7 aa, synthetic construct
  REGION 1..7: note = Description of Artificial Sequence: Synthetic peptide
NNGVSST

SEQ ID NO: 3725 - protein, 7 aa, synthetic construct
  REGION 1..7: note = Description of Artificial Sequence: Synthetic peptide
RQASSTT

SEQ ID NO: 3726 - protein, 7 aa, synthetic construct
  REGION 1..7: note = Description of Artificial Sequence: Synthetic peptide
SNNASPS

SEQ ID NO: 3727 - protein, 7 aa, synthetic construct
  REGION 1..7: note = Description of Artificial Sequence: Synthetic peptide
SDGKSHP

SEQ ID NO: 3728 - protein, 7 aa, synthetic construct
  REGION 1..7: note = Description of Artificial Sequence: Synthetic peptide
SPSNSHS

SEQ ID NO: 3729 - protein, 7 aa, synthetic construct
  REGION 1..7: note = Description of Artificial Sequence: Synthetic peptide
AQSEKTL

SEQ ID NO: 3730 - protein, 7 aa, synthetic construct
  REGION 1..7: note = Description of Artificial Sequence: Synthetic peptide
STSKDYS

SEQ ID NO: 3731 - protein, 7 aa, synthetic construct
  REGION 1..7: note = Description of Artificial Sequence: Synthetic peptide
STGATSN

SEQ ID NO: 3732 - protein, 7 aa, synthetic construct
  REGION 1..7: note = Description of Artificial Sequence: Synthetic peptide
TGSGSSS

SEQ ID NO: 3733 - protein, 7 aa, synthetic construct
  REGION 1..7: note = Description of Artificial Sequence: Synthetic peptide
TGSNHPG

SEQ ID NO: 3734 - protein, 7 aa, synthetic construct
  REGION 1..7: note = Description of Artificial Sequence: Synthetic peptide
TRAPTTG

SEQ ID NO: 3735 - protein, 7 aa, synthetic construct
  REGION 1..7: note = Description of Artificial Sequence: Synthetic peptide
SGVNTPA

SEQ ID NO: 3736 - protein, 7 aa, synthetic construct
  REGION 1..7: note = Description of Artificial Sequence: Synthetic peptide
HGAGQSS

SEQ ID NO: 3737 - protein, 7 aa, synthetic construct
  REGION 1..7: note = Description of Artificial Sequence: Synthetic peptide
GGGNTAM

SEQ ID NO: 3738 - protein, 7 aa, synthetic construct
  REGION 1..7: note = Description of Artificial Sequence: Synthetic peptide
GSSAPAL

SEQ ID NO: 3739 - protein, 7 aa, synthetic construct
  REGION 1..7: note = Description of Artificial Sequence: Synthetic peptide
QNATTSS

SEQ ID NO: 3740 - protein, 7 aa, synthetic construct
  REGION 1..7: note = Description of Artificial Sequence: Synthetic peptide
GSQNGLS

SEQ ID NO: 3741 - protein, 7 aa, synthetic construct
  REGION 1..7: note = Description of Artificial Sequence: Synthetic peptide
QSTPGTQ

SEQ ID NO: 3742 - protein, 7 aa, synthetic construct
  REGION 1..7: note = Description of Artificial Sequence: Synthetic peptide
RKEQSSQ

SEQ ID NO: 3743 - protein, 7 aa, synthetic construct
  REGION 1..7: note = Description of Artificial Sequence: Synthetic peptide
GVGGASS

SEQ ID NO: 3744 - protein, 7 aa, synthetic construct
  REGION 1..7: note = Description of Artificial Sequence: Synthetic peptide
RQSGSKD

SEQ ID NO: 3745 - protein, 7 aa, synthetic construct
  REGION 1..7: note = Description of Artificial Sequence: Synthetic peptide
ATQSASS

SEQ ID NO: 3746 - protein, 7 aa, synthetic construct
  REGION 1..7: note = Description of Artificial Sequence: Synthetic peptide
RNGGSSM

SEQ ID NO: 3747 - protein, 7 aa, synthetic construct
  REGION 1..7: note = Description of Artificial Sequence: Synthetic peptide
SGGASSL

SEQ ID NO: 3748 - protein, 7 aa, synthetic construct
  REGION 1..7: note = Description of Artificial Sequence: Synthetic peptide
QTTAPHG

SEQ ID NO: 3749 - protein, 7 aa, synthetic construct
  REGION 1..7: note = Description of Artificial Sequence: Synthetic peptide
SNSTAPH

SEQ ID NO: 3750 - protein, 7 aa, synthetic construct
  REGION 1..7: note = Description of Artificial Sequence: Synthetic peptide
SGSNTPH

SEQ ID NO: 3751 - protein, 7 aa, synthetic construct
  REGION 1..7: note = Description of Artificial Sequence: Synthetic peptide
GSSAGGN

SEQ ID NO: 3752 - protein, 7 aa, synthetic construct
  REGION 1..7: note = Description of Artificial Sequence: Synthetic peptide
TGTNTVL

SEQ ID NO: 3753 - protein, 7 aa, synthetic construct
  REGION 1..7: note = Description of Artificial Sequence: Synthetic peptide
KDGGSQV

SEQ ID NO: 3754 - protein, 7 aa, synthetic construct
  REGION 1..7: note = Description of Artificial Sequence: Synthetic peptide
TTGGTNV

SEQ ID NO: 3755 - protein, 7 aa, synthetic construct
  REGION 1..7: note = Description of Artificial Sequence: Synthetic peptide
QNQDKPT

SEQ ID NO: 3756 - protein, 7 aa, synthetic construct
  REGION 1..7: note = Description of Artificial Sequence: Synthetic peptide
EQRSSGL

SEQ ID NO: 3757 - protein, 7 aa, synthetic construct
  REGION 1..7: note = Description of Artificial Sequence: Synthetic peptide
STTNSGG

SEQ ID NO: 3758 - protein, 7 aa, synthetic construct
  REGION 1..7: note = Description of Artificial Sequence: Synthetic peptide
TLVAKPE

SEQ ID NO: 3759 - protein, 7 aa, synthetic construct
  REGION 1..7: note = Description of Artificial Sequence: Synthetic peptide
ESPQKSG

SEQ ID NO: 3760 - protein, 7 aa, synthetic construct
  REGION 1..7: note = Description of Artificial Sequence: Synthetic peptide
DPSKSSG

SEQ ID NO: 3761 - protein, 7 aa, synthetic construct
  REGION 1..7: note = Description of Artificial Sequence: Synthetic peptide
NVGSGTL

SEQ ID NO: 3762 - protein, 7 aa, synthetic construct
  REGION 1..7: note = Description of Artificial Sequence: Synthetic peptide
SHGNKET

SEQ ID NO: 3763 - protein, 7 aa, synthetic construct
  REGION 1..7: note = Description of Artificial Sequence: Synthetic peptide
NSGHAPV

SEQ ID NO: 3764 - protein, 7 aa, synthetic construct
  REGION 1..7: note = Description of Artificial Sequence: Synthetic peptide
NEHNGVK

SEQ ID NO: 3765 - protein, 7 aa, synthetic construct
  REGION 1..7: note = Description of Artificial Sequence: Synthetic peptide
TGQPSSR

SEQ ID NO: 3766 - protein, 7 aa, synthetic construct
  REGION 1..7: note = Description of Artificial Sequence: Synthetic peptide
QGPSQPG

SEQ ID NO: 3767 - protein, 7 aa, synthetic construct
  REGION 1..7: note = Description of Artificial Sequence: Synthetic peptide
ATTSSNS

SEQ ID NO: 3768 - protein, 7 aa, synthetic construct
  REGION 1..7: note = Description of Artificial Sequence: Synthetic peptide
VTSNDKG

SEQ ID NO: 3769 - protein, 7 aa, synthetic construct
  REGION 1..7: note = Description of Artificial Sequence: Synthetic peptide
IGTGKPE

SEQ ID NO: 3770 - protein, 7 aa, synthetic construct
  REGION 1..7: note = Description of Artificial Sequence: Synthetic peptide
ATGASSN

SEQ ID NO: 3771 - protein, 7 aa, synthetic construct
  REGION 1..7: note = Description of Artificial Sequence: Synthetic peptide
LPSNAKG

SEQ ID NO: 3772 - protein, 7 aa, synthetic construct
  REGION 1..7: note = Description of Artificial Sequence: Synthetic peptide
SVGSAGG

SEQ ID NO: 3773 - protein, 7 aa, synthetic construct
  REGION 1..7: note = Description of Artificial Sequence: Synthetic peptide
NTGSGGT

SEQ ID NO: 3774 - protein, 7 aa, synthetic construct
  REGION 1..7: note = Description of Artificial Sequence: Synthetic peptide
GAGGNSS

SEQ ID NO: 3775 - protein, 7 aa, synthetic construct
  REGION 1..7: note = Description of Artificial Sequence: Synthetic peptide
SNNKPSL

SEQ ID NO: 3776 - protein, 7 aa, synthetic construct
  REGION 1..7: note = Description of Artificial Sequence: Synthetic peptide
EQGKNSH

SEQ ID NO: 3777 - protein, 7 aa, synthetic construct
  REGION 1..7: note = Description of Artificial Sequence: Synthetic peptide
DSSSIVK

SEQ ID NO: 3778 - protein, 7 aa, synthetic construct
  REGION 1..7: note = Description of Artificial Sequence: Synthetic peptide
ATGTSGR

SEQ ID NO: 3779 - protein, 7 aa, synthetic construct
  REGION 1..7: note = Description of Artificial Sequence: Synthetic peptide
TTNEPRI

SEQ ID NO: 3780 - protein, 7 aa, synthetic construct
  REGION 1..7: note = Description of Artificial Sequence: Synthetic peptide
HNTSGIA

SEQ ID NO: 3781 - protein, 7 aa, synthetic construct
  REGION 1..7: note = Description of Artificial Sequence: Synthetic peptide
SGTNSSS

SEQ ID NO: 3782 - protein, 7 aa, synthetic construct
  REGION 1..7: note = Description of Artificial Sequence: Synthetic peptide
MGGNTAG

SEQ ID NO: 3783 - protein, 7 aa, synthetic construct
  REGION 1..7: note = Description of Artificial Sequence: Synthetic peptide
GASPQKG

SEQ ID NO: 3784 - protein, 7 aa, synthetic construct
  REGION 1..7: note = Description of Artificial Sequence: Synthetic peptide
GIGKSDA

SEQ ID NO: 3785 - protein, 7 aa, synthetic construct
  REGION 1..7: note = Description of Artificial Sequence: Synthetic peptide
VSSGSST

SEQ ID NO: 3786 - protein, 7 aa, synthetic construct
  REGION 1..7: note = Description of Artificial Sequence: Synthetic peptide
SATNTSN

SEQ ID NO: 3787 - protein, 7 aa, synthetic construct
  REGION 1..7: note = Description of Artificial Sequence: Synthetic peptide
NSGVTHA

SEQ ID NO: 3788 - protein, 7 aa, synthetic construct
  REGION 1..7: note = Description of Artificial Sequence: Synthetic peptide
GSSSPAK

SEQ ID NO: 3789 - protein, 7 aa, synthetic construct
  REGION 1..7: note = Description of Artificial Sequence: Synthetic peptide
AGSSSSK

SEQ ID NO: 3790 - protein, 7 aa, synthetic construct
  REGION 1..7: note = Description of Artificial Sequence: Synthetic peptide
GGISDNK

SEQ ID NO: 3791 - protein, 7 aa, synthetic construct
  REGION 1..7: note = Description of Artificial Sequence: Synthetic peptide
NSKTNSQ

SEQ ID NO: 3792 - protein, 7 aa, synthetic construct
  REGION 1..7: note = Description of Artificial Sequence: Synthetic peptide
MNGSAAS

SEQ ID NO: 3793 - protein, 7 aa, synthetic construct
  REGION 1..7: note = Description of Artificial Sequence: Synthetic peptide
QGKDSGS

SEQ ID NO: 3794 - protein, 7 aa, synthetic construct
  REGION 1..7: note = Description of Artificial Sequence: Synthetic peptide
RTVGDRS

SEQ ID NO: 3795 - protein, 7 aa, synthetic construct
  REGION 1..7: note = Description of Artificial Sequence: Synthetic peptide
EAANKNI

SEQ ID NO: 3796 - protein, 7 aa, synthetic construct
  REGION 1..7: note = Description of Artificial Sequence: Synthetic peptide
STTTKAG

SEQ ID NO: 3797 - protein, 7 aa, synthetic construct
  REGION 1..7: note = Description of Artificial Sequence: Synthetic peptide
HKTENGG

SEQ ID NO: 3798 - protein, 7 aa, synthetic construct
  REGION 1..7: note = Description of Artificial Sequence: Synthetic peptide
DNNGRNT

SEQ ID NO: 3799 - protein, 7 aa, synthetic construct
  REGION 1..7: note = Description of Artificial Sequence: Synthetic peptide
TQSSSAN

SEQ ID NO: 3800 - protein, 7 aa, synthetic construct
  REGION 1..7: note = Description of Artificial Sequence: Synthetic peptide
SGNANTL

SEQ ID NO: 3801 - protein, 7 aa, synthetic construct
  REGION 1..7: note = Description of Artificial Sequence: Synthetic peptide
STSNGAK

SEQ ID NO: 3802 - protein, 7 aa, synthetic construct
  REGION 1..7: note = Description of Artificial Sequence: Synthetic peptide
ANGAHSS

SEQ ID NO: 3803 - protein, 7 aa, synthetic construct
  REGION 1..7: note = Description of Artificial Sequence: Synthetic peptide
GSGNAHS

SEQ ID NO: 3804 - protein, 7 aa, synthetic construct
  REGION 1..7: note = Description of Artificial Sequence: Synthetic peptide
TVNSKAQ

SEQ ID NO: 3805 - protein, 7 aa, synthetic construct
  REGION 1..7: note = Description of Artificial Sequence: Synthetic peptide
LGGSSPK

SEQ ID NO: 3806 - protein, 7 aa, synthetic construct
  REGION 1..7: note = Description of Artificial Sequence: Synthetic peptide
EKPNPGH

SEQ ID NO: 3807 - protein, 7 aa, synthetic construct
  REGION 1..7: note = Description of Artificial Sequence: Synthetic peptide
ERTPSSQ

SEQ ID NO: 3808 - protein, 7 aa, synthetic construct
  REGION 1..7: note = Description of Artificial Sequence: Synthetic peptide
AVNSSTG

SEQ ID NO: 3809 - protein, 7 aa, synthetic construct
  REGION 1..7: note = Description of Artificial Sequence: Synthetic peptide
SHSNDRA

SEQ ID NO: 3810 - protein, 7 aa, synthetic construct
  REGION 1..7: note = Description of Artificial Sequence: Synthetic peptide
STATASA

SEQ ID NO: 3811 - protein, 7 aa, synthetic construct
  REGION 1..7: note = Description of Artificial Sequence: Synthetic peptide
QSTTNGS

SEQ ID NO: 3812 - protein, 7 aa, synthetic construct
  REGION 1..7: note = Description of Artificial Sequence: Synthetic peptide
SGGNPIN

SEQ ID NO: 3813 - protein, 7 aa, synthetic construct
  REGION 1..7: note = Description of Artificial Sequence: Synthetic peptide
DSVNPKQ

SEQ ID NO: 3814 - protein, 7 aa, synthetic construct
  REGION 1..7: note = Description of Artificial Sequence: Synthetic peptide
NGTTSAR

SEQ ID NO: 3815 - protein, 7 aa, synthetic construct
  REGION 1..7: note = Description of Artificial Sequence: Synthetic peptide
NNDRASL

SEQ ID NO: 3816 - protein, 7 aa, synthetic construct
  REGION 1..7: note = Description of Artificial Sequence: Synthetic peptide
TNGSSPV

SEQ ID NO: 3817 - protein, 7 aa, synthetic construct
  REGION 1..7: note = Description of Artificial Sequence: Synthetic peptide
VSGSGNQ

SEQ ID NO: 3818 - protein, 7 aa, synthetic construct
  REGION 1..7: note = Description of Artificial Sequence: Synthetic peptide
GQISSPK

SEQ ID NO: 3819 - protein, 7 aa, synthetic construct
  REGION 1..7: note = Description of Artificial Sequence: Synthetic peptide
SVSPSNT

SEQ ID NO: 3820 - protein, 7 aa, synthetic construct
  REGION 1..7: note = Description of Artificial Sequence: Synthetic peptide
EVVSKTG

SEQ ID NO: 3821 - protein, 7 aa, synthetic construct
  REGION 1..7: note = Description of Artificial Sequence: Synthetic peptide
QGESRSA

SEQ ID NO: 3822 - protein, 7 aa, synthetic construct
  REGION 1..7: note = Description of Artificial Sequence: Synthetic peptide
HTTSSSG

SEQ ID NO: 3823 - protein, 7 aa, synthetic construct
  REGION 1..7: note = Description of Artificial Sequence: Synthetic peptide
VGKGSSV

SEQ ID NO: 3824 - protein, 7 aa, synthetic construct
  REGION 1..7: note = Description of Artificial Sequence: Synthetic peptide
DTRDGKS

SEQ ID NO: 3825 - protein, 7 aa, synthetic construct
  REGION 1..7: note = Description of Artificial Sequence: Synthetic peptide
SGNVTSG

SEQ ID NO: 3826 - protein, 7 aa, synthetic construct
  REGION 1..7: note = Description of Artificial Sequence: Synthetic peptide
TQGNTSG

SEQ ID NO: 3827 - protein, 7 aa, synthetic construct
  REGION 1..7: note = Description of Artificial Sequence: Synthetic peptide
QADKNMG

SEQ ID NO: 3828 - protein, 7 aa, synthetic construct
  REGION 1..7: note = Description of Artificial Sequence: Synthetic peptide
SQGSSAI

SEQ ID NO: 3829 - protein, 7 aa, synthetic construct
  REGION 1..7: note = Description of Artificial Sequence: Synthetic peptide
IRDSTSN

SEQ ID NO: 3830 - protein, 7 aa, synthetic construct
  REGION 1..7: note = Description of Artificial Sequence: Synthetic peptide
GGREVNS

SEQ ID NO: 3831 - protein, 7 aa, synthetic construct
  REGION 1..7: note = Description of Artificial Sequence: Synthetic peptide
EGGATMS

SEQ ID NO: 3832 - protein, 7 aa, synthetic construct
  REGION 1..7: note = Description of Artificial Sequence: Synthetic peptide
RNQGQSI

SEQ ID NO: 3833 - protein, 7 aa, synthetic construct
  REGION 1..7: note = Description of Artificial Sequence: Synthetic peptide
SVGAASS

SEQ ID NO: 3834 - protein, 7 aa, synthetic construct
  REGION 1..7: note = Description of Artificial Sequence: Synthetic peptide
MKQNNQE

SEQ ID NO: 3835 - protein, 7 aa, synthetic construct
  REGION 1..7: note = Description of Artificial Sequence: Synthetic peptide
IRSKDSV

SEQ ID NO: 3836 - protein, 7 aa, synthetic construct
  REGION 1..7: note = Description of Artificial Sequence: Synthetic peptide
STTERSG

SEQ ID NO: 3837 - protein, 7 aa, synthetic construct
  REGION 1..7: note = Description of Artificial Sequence: Synthetic peptide
SNGPSSG

SEQ ID NO: 3838 - protein, 7 aa, synthetic construct
  REGION 1..7: note = Description of Artificial Sequence: Synthetic peptide
TTNPSNS

SEQ ID NO: 3839 - protein, 7 aa, synthetic construct
  REGION 1..7: note = Description of Artificial Sequence: Synthetic peptide
ERQQQPV

SEQ ID NO: 3840 - protein, 7 aa, synthetic construct
  REGION 1..7: note = Description of Artificial Sequence: Synthetic peptide
GNGSPIT

SEQ ID NO: 3841 - protein, 7 aa, synthetic construct
  REGION 1..7: note = Description of Artificial Sequence: Synthetic peptide
NRGESVS

SEQ ID NO: 3842 - protein, 7 aa, synthetic construct
  REGION 1..7: note = Description of Artificial Sequence: Synthetic peptide
SSSAQHT

SEQ ID NO: 3843 - protein, 7 aa, synthetic construct
  REGION 1..7: note = Description of Artificial Sequence: Synthetic peptide
SATQAPS

SEQ ID NO: 3844 - protein, 7 aa, synthetic construct
  REGION 1..7: note = Description of Artificial Sequence: Synthetic peptide
NANAHAT

SEQ ID NO: 3845 - protein, 7 aa, synthetic construct
  REGION 1..7: note = Description of Artificial Sequence: Synthetic peptide
SSGSAPS

SEQ ID NO: 3846 - protein, 7 aa, synthetic construct
  REGION 1..7: note = Description of Artificial Sequence: Synthetic peptide
QPEGTNK

SEQ ID NO: 3847 - protein, 7 aa, synthetic construct
  REGION 1..7: note = Description of Artificial Sequence: Synthetic peptide
TLSDKPL

SEQ ID NO: 3848 - protein, 7 aa, synthetic construct
  REGION 1..7: note = Description of Artificial Sequence: Synthetic peptide
IGEKSNT

SEQ ID NO: 3849 - protein, 7 aa, synthetic construct
  REGION 1..7: note = Description of Artificial Sequence: Synthetic peptide
DPSKTNG

SEQ ID NO: 3850 - protein, 7 aa, synthetic construct
  REGION 1..7: note = Description of Artificial Sequence: Synthetic peptide
NGSSSGA

SEQ ID NO: 3851 - protein, 7 aa, synthetic construct
  REGION 1..7: note = Description of Artificial Sequence: Synthetic peptide
QAGNATA

SEQ ID NO: 3852 - protein, 7 aa, synthetic construct
  REGION 1..7: note = Description of Artificial Sequence: Synthetic peptide
DSSHTNK

SEQ ID NO: 3853 - protein, 7 aa, synthetic construct
  REGION 1..7: note = Description of Artificial Sequence: Synthetic peptide
AGGPTAT

SEQ ID NO: 3854 - protein, 7 aa, synthetic construct
  REGION 1..7: note = Description of Artificial Sequence: Synthetic peptide
QHGEMKG

SEQ ID NO: 3855 - protein, 7 aa, synthetic construct
  REGION 1..7: note = Description of Artificial Sequence: Synthetic peptide
QVDAGNR

SEQ ID NO: 3856 - protein, 7 aa, synthetic construct
  REGION 1..7: note = Description of Artificial Sequence: Synthetic peptide
VNNSATM

SEQ ID NO: 3857 - protein, 7 aa, synthetic construct
  REGION 1..7: note = Description of Artificial Sequence: Synthetic peptide
SNGAGTK

SEQ ID NO: 3858 - protein, 7 aa, synthetic construct
  REGION 1..7: note = Description of Artificial Sequence: Synthetic peptide
STSTKDS

SEQ ID NO: 3859 - protein, 7 aa, synthetic construct
  REGION 1..7: note = Description of Artificial Sequence: Synthetic peptide
GASDTNR

SEQ ID NO: 3860 - protein, 7 aa, synthetic construct
  REGION 1..7: note = Description of Artificial Sequence: Synthetic peptide
DGMGTTQ

SEQ ID NO: 3861 - protein, 7 aa, synthetic construct
  REGION 1..7: note = Description of Artificial Sequence: Synthetic peptide
SSANSPS

SEQ ID NO: 3862 - protein, 7 aa, synthetic construct
  REGION 1..7: note = Description of Artificial Sequence: Synthetic peptide
SAHKGES

SEQ ID NO: 3863 - protein, 7 aa, synthetic construct
  REGION 1..7: note = Description of Artificial Sequence: Synthetic peptide
HGSEKLS

SEQ ID NO: 3864 - protein, 7 aa, synthetic construct
  REGION 1..7: note = Description of Artificial Sequence: Synthetic peptide
TGGGSRE

SEQ ID NO: 3865 - protein, 7 aa, synthetic construct
  REGION 1..7: note = Description of Artificial Sequence: Synthetic peptide
SGIDKSL

SEQ ID NO: 3866 - protein, 7 aa, synthetic construct
  REGION 1..7: note = Description of Artificial Sequence: Synthetic peptide
DATKTTN

SEQ ID NO: 3867 - protein, 7 aa, synthetic construct
  REGION 1..7: note = Description of Artificial Sequence: Synthetic peptide
GTTGSPG

SEQ ID NO: 3868 - protein, 7 aa, synthetic construct
  REGION 1..7: note = Description of Artificial Sequence: Synthetic peptide
DVPGTKG

SEQ ID NO: 3869 - protein, 7 aa, synthetic construct
  REGION 1..7: note = Description of Artificial Sequence: Synthetic peptide
EVVKAGS

SEQ ID NO: 3870 - protein, 7 aa, synthetic construct
  REGION 1..7: note = Description of Artificial Sequence: Synthetic peptide
GQGSAAS

SEQ ID NO: 3871 - protein, 7 aa, synthetic construct
  REGION 1..7: note = Description of Artificial Sequence: Synthetic peptide
GDMKTSS

SEQ ID NO: 3872 - protein, 7 aa, synthetic construct
  REGION 1..7: note = Description of Artificial Sequence: Synthetic peptide
TSDSPGR

SEQ ID NO: 3873 - protein, 7 aa, synthetic construct
  REGION 1..7: note = Description of Artificial Sequence: Synthetic peptide
HASSSPT

SEQ ID NO: 3874 - protein, 7 aa, synthetic construct
  REGION 1..7: note = Description of Artificial Sequence: Synthetic peptide
ERATQSV

SEQ ID NO: 3875 - protein, 7 aa, synthetic construct
  REGION 1..7: note = Description of Artificial Sequence: Synthetic peptide
DPPEKTG

SEQ ID NO: 3876 - protein, 7 aa, synthetic construct
  REGION 1..7: note = Description of Artificial Sequence: Synthetic peptide
ETTGNKS

SEQ ID NO: 3877 - protein, 7 aa, synthetic construct
  REGION 1..7: note = Description of Artificial Sequence: Synthetic peptide
EGGSSRG

SEQ ID NO: 3878 - protein, 7 aa, synthetic construct
  REGION 1..7: note = Description of Artificial Sequence: Synthetic peptide
AMHATAG

SEQ ID NO: 3879 - protein, 7 aa, synthetic construct
  REGION 1..7: note = Description of Artificial Sequence: Synthetic peptide
GHTTKDA

SEQ ID NO: 3880 - protein, 7 aa, synthetic construct
  REGION 1..7: note = Description of Artificial Sequence: Synthetic peptide
SDVKGSN

SEQ ID NO: 3881 - protein, 7 aa, synthetic construct
  REGION 1..7: note = Description of Artificial Sequence: Synthetic peptide
GLATDTK

SEQ ID NO: 3882 - protein, 7 aa, synthetic construct
  REGION 1..7: note = Description of Artificial Sequence: Synthetic peptide
ETLSGAK

SEQ ID NO: 3883 - protein, 7 aa, synthetic construct
  REGION 1..7: note = Description of Artificial Sequence: Synthetic peptide
ISNGKLA

SEQ ID NO: 3884 - protein, 7 aa, synthetic construct
  REGION 1..7: note = Description of Artificial Sequence: Synthetic peptide
QTGQSAA

SEQ ID NO: 3885 - protein, 7 aa, synthetic construct
  REGION 1..7: note = Description of Artificial Sequence: Synthetic peptide
GSGKGNV

SEQ ID NO: 3886 - protein, 7 aa, synthetic construct
  REGION 1..7: note = Description of Artificial Sequence: Synthetic peptide
GNAGAST

SEQ ID NO: 3887 - protein, 7 aa, synthetic construct
  REGION 1..7: note = Description of Artificial Sequence: Synthetic peptide
STNTHGK

SEQ ID NO: 3888 - protein, 7 aa, synthetic construct
  REGION 1..7: note = Description of Artificial Sequence: Synthetic peptide
ETRKDAQ

SEQ ID NO: 3889 - protein, 7 aa, synthetic construct
  REGION 1..7: note = Description of Artificial Sequence: Synthetic peptide
GNKSESQ

SEQ ID NO: 3890 - protein, 7 aa, synthetic construct
  REGION 1..7: note = Description of Artificial Sequence: Synthetic peptide
LGDSSSK

SEQ ID NO: 3891 - protein, 7 aa, synthetic construct
  REGION 1..7: note = Description of Artificial Sequence: Synthetic peptide
GGNKADS

SEQ ID NO: 3892 - protein, 7 aa, synthetic construct
  REGION 1..7: note = Description of Artificial Sequence: Synthetic peptide
SSSGTTS

SEQ ID NO: 3893 - protein, 7 aa, synthetic construct
  REGION 1..7: note = Description of Artificial Sequence: Synthetic peptide
STGASAV

SEQ ID NO: 3894 - protein, 7 aa, synthetic construct
  REGION 1..7: note = Description of Artificial Sequence: Synthetic peptide
TGGTATS

SEQ ID NO: 3895 - protein, 7 aa, synthetic construct
  REGION 1..7: note = Description of Artificial Sequence: Synthetic peptide
LTGNSSP

SEQ ID NO: 3896 - protein, 7 aa, synthetic construct
  REGION 1..7: note = Description of Artificial Sequence: Synthetic peptide
FSENSVK

SEQ ID NO: 3897 - protein, 7 aa, synthetic construct
  REGION 1..7: note = Description of Artificial Sequence: Synthetic peptide
NAGATSN

SEQ ID NO: 3898 - protein, 7 aa, synthetic construct
  REGION 1..7: note = Description of Artificial Sequence: Synthetic peptide
MTNSNVK

SEQ ID NO: 3899 - protein, 7 aa, synthetic construct
  REGION 1..7: note = Description of Artificial Sequence: Synthetic peptide
SSDAHSK

SEQ ID NO: 3900 - protein, 7 aa, synthetic construct
  REGION 1..7: note = Description of Artificial Sequence: Synthetic peptide
GKGAGST

SEQ ID NO: 3901 - protein, 7 aa, synthetic construct
  REGION 1..7: note = Description of Artificial Sequence: Synthetic peptide
NTGSSDK

SEQ ID NO: 3902 - protein, 7 aa, synthetic construct
  REGION 1..7: note = Description of Artificial Sequence: Synthetic peptide
RNGGTSS

SEQ ID NO: 3903 - protein, 7 aa, synthetic construct
  REGION 1..7: note = Description of Artificial Sequence: Synthetic peptide
VSTGNNG

SEQ ID NO: 3904 - protein, 7 aa, synthetic construct
  REGION 1..7: note = Description of Artificial Sequence: Synthetic peptide
TDGPQRS

SEQ ID NO: 3905 - protein, 7 aa, synthetic construct
  REGION 1..7: note = Description of Artificial Sequence: Synthetic peptide
ANGTHTA

SEQ ID NO: 3906 - protein, 7 aa, synthetic construct
  REGION 1..7: note = Description of Artificial Sequence: Synthetic peptide
DRSRESV

SEQ ID NO: 3907 - protein, 7 aa, synthetic construct
  REGION 1..7: note = Description of Artificial Sequence: Synthetic peptide
NSVDKAS

SEQ ID NO: 3908 - protein, 7 aa, synthetic construct
  REGION 1..7: note = Description of Artificial Sequence: Synthetic peptide
VSGANSI

SEQ ID NO: 3909 - protein, 7 aa, synthetic construct
  REGION 1..7: note = Description of Artificial Sequence: Synthetic peptide
RSSPTSV

SEQ ID NO: 3910 - protein, 7 aa, synthetic construct
  REGION 1..7: note = Description of Artificial Sequence: Synthetic peptide
TRDTSSL

SEQ ID NO: 3911 - protein, 7 aa, synthetic construct
  REGION 1..7: note = Description of Artificial Sequence: Synthetic peptide
SLSSTNS

SEQ ID NO: 3912 - protein, 7 aa, synthetic construct
  REGION 1..7: note = Description of Artificial Sequence: Synthetic peptide
NADSSKL

SEQ ID NO: 3913 - protein, 7 aa, synthetic construct
  REGION 1..7: note = Description of Artificial Sequence: Synthetic peptide
RTGAQPG

SEQ ID NO: 3914 - protein, 7 aa, synthetic construct
  REGION 1..7: note = Description of Artificial Sequence: Synthetic peptide
SPGGDLK

SEQ ID NO: 3915 - protein, 7 aa, synthetic construct
  REGION 1..7: note = Description of Artificial Sequence: Synthetic peptide
HGATTPG

SEQ ID NO: 3916 - protein, 7 aa, synthetic construct
  REGION 1..7: note = Description of Artificial Sequence: Synthetic peptide
GPTMNDK

SEQ ID NO: 3917 - protein, 7 aa, synthetic construct
  REGION 1..7: note = Description of Artificial Sequence: Synthetic peptide
GSSQSGT

SEQ ID NO: 3918 - protein, 7 aa, synthetic construct
  REGION 1..7: note = Description of Artificial Sequence: Synthetic peptide
GDKKEMA

SEQ ID NO: 3919 - protein, 7 aa, synthetic construct
  REGION 1..7: note = Description of Artificial Sequence: Synthetic peptide
LQSKTGS

SEQ ID NO: 3920 - protein, 7 aa, synthetic construct
  REGION 1..7: note = Description of Artificial Sequence: Synthetic peptide
SPISKEG

SEQ ID NO: 3921 - protein, 7 aa, synthetic construct
  REGION 1..7: note = Description of Artificial Sequence: Synthetic peptide
RGTGSTT

SEQ ID NO: 3922 - protein, 7 aa, synthetic construct
  REGION 1..7: note = Description of Artificial Sequence: Synthetic peptide
ANSGTST

SEQ ID NO: 3923 - protein, 7 aa, synthetic construct
  REGION 1..7: note = Description of Artificial Sequence: Synthetic peptide
STGATAL

SEQ ID NO: 3924 - protein, 7 aa, synthetic construct
  REGION 1..7: note = Description of Artificial Sequence: Synthetic peptide
SGAPSVN

SEQ ID NO: 3925 - protein, 7 aa, synthetic construct
  REGION 1..7: note = Description of Artificial Sequence: Synthetic peptide
SVASQSQ

SEQ ID NO: 3926 - protein, 7 aa, synthetic construct
  REGION 1..7: note = Description of Artificial Sequence: Synthetic peptide
GHQGSSS

SEQ ID NO: 3927 - protein, 7 aa, synthetic construct
  REGION 1..7: note = Description of Artificial Sequence: Synthetic peptide
NSVDKAK

SEQ ID NO: 3928 - protein, 7 aa, synthetic construct
  REGION 1..7: note = Description of Artificial Sequence: Synthetic peptide
NTHANST

SEQ ID NO: 3929 - protein, 7 aa, synthetic construct
  REGION 1..7: note = Description of Artificial Sequence: Synthetic peptide
GQHQPLA

SEQ ID NO: 3930 - protein, 7 aa, synthetic construct
  REGION 1..7: note = Description of Artificial Sequence: Synthetic peptide
STKSSPS

SEQ ID NO: 3931 - protein, 7 aa, synthetic construct
  REGION 1..7: note = Description of Artificial Sequence: Synthetic peptide
DTSSTGK

SEQ ID NO: 3932 - protein, 7 aa, synthetic construct
  REGION 1..7: note = Description of Artificial Sequence: Synthetic peptide
VPSSNPK

SEQ ID NO: 3933 - protein, 7 aa, synthetic construct
  REGION 1..7: note = Description of Artificial Sequence: Synthetic peptide
TKNGHNS

SEQ ID NO: 3934 - protein, 7 aa, synthetic construct
  REGION 1..7: note = Description of Artificial Sequence: Synthetic peptide
ETGQKEG

SEQ ID NO: 3935 - protein, 7 aa, synthetic construct
  REGION 1..7: note = Description of Artificial Sequence: Synthetic peptide
GPNKDVH

SEQ ID NO: 3936 - protein, 7 aa, synthetic construct
  REGION 1..7: note = Description of Artificial Sequence: Synthetic peptide
GPGNGNG

SEQ ID NO: 3937 - protein, 7 aa, synthetic construct
  REGION 1..7: note = Description of Artificial Sequence: Synthetic peptide
SSQKTGS

SEQ ID NO: 3938 - protein, 7 aa, synthetic construct
  REGION 1..7: note = Description of Artificial Sequence: Synthetic peptide
NTDSSRS

SEQ ID NO: 3939 - protein, 7 aa, synthetic construct
  REGION 1..7: note = Description of Artificial Sequence: Synthetic peptide
HGESKNN

SEQ ID NO: 3940 - protein, 7 aa, synthetic construct
  REGION 1..7: note = Description of Artificial Sequence: Synthetic peptide
DGQSQNR

SEQ ID NO: 3941 - protein, 7 aa, synthetic construct
  REGION 1..7: note = Description of Artificial Sequence: Synthetic peptide
GEHKDSR

SEQ ID NO: 3942 - protein, 7 aa, synthetic construct
  REGION 1..7: note = Description of Artificial Sequence: Synthetic peptide
GEVTGRT

SEQ ID NO: 3943 - protein, 7 aa, synthetic construct
  REGION 1..7: note = Description of Artificial Sequence: Synthetic peptide
DGAATKN

SEQ ID NO: 3944 - protein, 7 aa, synthetic construct
  REGION 1..7: note = Description of Artificial Sequence: Synthetic peptide
HRDTESK

SEQ ID NO: 3945 - protein, 7 aa, synthetic construct
  REGION 1..7: note = Description of Artificial Sequence: Synthetic peptide
TSGDRTG

SEQ ID NO: 3946 - protein, 7 aa, synthetic construct
  REGION 1..7: note = Description of Artificial Sequence: Synthetic peptide
SVGEARS

SEQ ID NO: 3947 - protein, 7 aa, synthetic construct
  REGION 1..7: note = Description of Artificial Sequence: Synthetic peptide
QSNTSTG

SEQ ID NO: 3948 - protein, 7 aa, synthetic construct
  REGION 1..7: note = Description of Artificial Sequence: Synthetic peptide
EKQSTSV

SEQ ID NO: 3949 - protein, 7 aa, synthetic construct
  REGION 1..7: note = Description of Artificial Sequence: Synthetic peptide
EPTKSAS

SEQ ID NO: 3950 - protein, 7 aa, synthetic construct
  REGION 1..7: note = Description of Artificial Sequence: Synthetic peptide
SPIPNKG

SEQ ID NO: 3951 - protein, 7 aa, synthetic construct
  REGION 1..7: note = Description of Artificial Sequence: Synthetic peptide
ATTRNNS

SEQ ID NO: 3952 - protein, 7 aa, synthetic construct
  REGION 1..7: note = Description of Artificial Sequence: Synthetic peptide
ASSQSAK

SEQ ID NO: 3953 - protein, 7 aa, synthetic construct
  REGION 1..7: note = Description of Artificial Sequence: Synthetic peptide
QGVSSST

SEQ ID NO: 3954 - protein, 7 aa, synthetic construct
  REGION 1..7: note = Description of Artificial Sequence: Synthetic peptide
GNNKVNS

SEQ ID NO: 3955 - protein, 7 aa, synthetic construct
  REGION 1..7: note = Description of Artificial Sequence: Synthetic peptide
EGNSPIR

SEQ ID NO: 3956 - protein, 7 aa, synthetic construct
  REGION 1..7: note = Description of Artificial Sequence: Synthetic peptide
SGGKQGI

SEQ ID NO: 3957 - protein, 7 aa, synthetic construct
  REGION 1..7: note = Description of Artificial Sequence: Synthetic peptide
DKTKGGQ

SEQ ID NO: 3958 - protein, 7 aa, synthetic construct
  REGION 1..7: note = Description of Artificial Sequence: Synthetic peptide
TAATSTS

SEQ ID NO: 3959 - protein, 7 aa, synthetic construct
  REGION 1..7: note = Description of Artificial Sequence: Synthetic peptide
HQANSTH

SEQ ID NO: 3960 - protein, 7 aa, synthetic construct
  REGION 1..7: note = Description of Artificial Sequence: Synthetic peptide
TGSGNPV

SEQ ID NO: 3961 - protein, 7 aa, synthetic construct
  REGION 1..7: note = Description of Artificial Sequence: Synthetic peptide
VESKGTQ

SEQ ID NO: 3962 - protein, 7 aa, synthetic construct
  REGION 1..7: note = Description of Artificial Sequence: Synthetic peptide
GKQGSNA

SEQ ID NO: 3963 - protein, 7 aa, synthetic construct
  REGION 1..7: note = Description of Artificial Sequence: Synthetic peptide
QRNEKAS

SEQ ID NO: 3964 - protein, 7 aa, synthetic construct
  REGION 1..7: note = Description of Artificial Sequence: Synthetic peptide
QSKDSQQ

SEQ ID NO: 3965 - protein, 7 aa, synthetic construct
  REGION 1..7: note = Description of Artificial Sequence: Synthetic peptide
TTGSSPG

SEQ ID NO: 3966 - protein, 7 aa, synthetic construct
  REGION 1..7: note = Description of Artificial Sequence: Synthetic peptide
SGAGGTT

SEQ ID NO: 3967 - protein, 7 aa, synthetic construct
  REGION 1..7: note = Description of Artificial Sequence: Synthetic peptide
LTSGKES

SEQ ID NO: 3968 - protein, 7 aa, synthetic construct
  REGION 1..7: note = Description of Artificial Sequence: Synthetic peptide
ERSVSTQ

SEQ ID NO: 3969 - protein, 7 aa, synthetic construct
  REGION 1..7: note = Description of Artificial Sequence: Synthetic peptide
GGTTNGN

SEQ ID NO: 3970 - protein, 7 aa, synthetic construct
  REGION 1..7: note = Description of Artificial Sequence: Synthetic peptide
STSSTNS

SEQ ID NO: 3971 - protein, 7 aa, synthetic construct
  REGION 1..7: note = Description of Artificial Sequence: Synthetic peptide
DSQTPLR

SEQ ID NO: 3972 - protein, 7 aa, synthetic construct
  REGION 1..7: note = Description of Artificial Sequence: Synthetic peptide
VGGSSNK

SEQ ID NO: 3973 - protein, 7 aa, synthetic construct
  REGION 1..7: note = Description of Artificial Sequence: Synthetic peptide
SSKPSSV

SEQ ID NO: 3974 - protein, 7 aa, synthetic construct
  REGION 1..7: note = Description of Artificial Sequence: Synthetic peptide
QGVTSSS

SEQ ID NO: 3975 - protein, 7 aa, synthetic construct
  REGION 1..7: note = Description of Artificial Sequence: Synthetic peptide
DSSKSGV

SEQ ID NO: 3976 - protein, 7 aa, synthetic construct
  REGION 1..7: note = Description of Artificial Sequence: Synthetic peptide
MGSSGNK

SEQ ID NO: 3977 - protein, 7 aa, synthetic construct
  REGION 1..7: note = Description of Artificial Sequence: Synthetic peptide
NSKTGVA

SEQ ID NO: 3978 - protein, 7 aa, synthetic construct
  REGION 1..7: note = Description of Artificial Sequence: Synthetic peptide
AGSSTST

SEQ ID NO: 3979 - protein, 7 aa, synthetic construct
  REGION 1..7: note = Description of Artificial Sequence: Synthetic peptide
GSGSSAH

SEQ ID NO: 3980 - protein, 7 aa, synthetic construct
  REGION 1..7: note = Description of Artificial Sequence: Synthetic peptide
STSQSSS

SEQ ID NO: 3981 - protein, 7 aa, synthetic construct
  REGION 1..7: note = Description of Artificial Sequence: Synthetic peptide
DNAKSSA

SEQ ID NO: 3982 - protein, 7 aa, synthetic construct
  REGION 1..7: note = Description of Artificial Sequence: Synthetic peptide
GKQGQSS

SEQ ID NO: 3983 - protein, 7 aa, synthetic construct
  REGION 1..7: note = Description of Artificial Sequence: Synthetic peptide
ASTKANT

SEQ ID NO: 3984 - protein, 7 aa, synthetic construct
  REGION 1..7: note = Description of Artificial Sequence: Synthetic peptide
SRNGEAA

SEQ ID NO: 3985 - protein, 7 aa, synthetic construct
  REGION 1..7: note = Description of Artificial Sequence: Synthetic peptide
NVSSSPT

SEQ ID NO: 3986 - protein, 7 aa, synthetic construct
  REGION 1..7: note = Description of Artificial Sequence: Synthetic peptide
SSTSQPG

SEQ ID NO: 3987 - protein, 7 aa, synthetic construct
  REGION 1..7: note = Description of Artificial Sequence: Synthetic peptide
GFGVKPE

SEQ ID NO: 3988 - protein, 7 aa, synthetic construct
  REGION 1..7: note = Description of Artificial Sequence: Synthetic peptide
QSASTQV

SEQ ID NO: 3989 - protein, 7 aa, synthetic construct
  REGION 1..7: note = Description of Artificial Sequence: Synthetic peptide
AGSSPIV

SEQ ID NO: 3990 - protein, 7 aa, synthetic construct
  REGION 1..7: note = Description of Artificial Sequence: Synthetic peptide
GTGGKAA

SEQ ID NO: 3991 - protein, 7 aa, synthetic construct
  REGION 1..7: note = Description of Artificial Sequence: Synthetic peptide
TGQGGGS

SEQ ID NO: 3992 - protein, 7 aa, synthetic construct
  REGION 1..7: note = Description of Artificial Sequence: Synthetic peptide
LGSTEKH

SEQ ID NO: 3993 - protein, 7 aa, synthetic construct
  REGION 1..7: note = Description of Artificial Sequence: Synthetic peptide
GGNQASS

SEQ ID NO: 3994 - protein, 7 aa, synthetic construct
  REGION 1..7: note = Description of Artificial Sequence: Synthetic peptide
GSKQTSV

SEQ ID NO: 3995 - protein, 7 aa, synthetic construct
  REGION 1..7: note = Description of Artificial Sequence: Synthetic peptide
VNDGHPK

SEQ ID NO: 3996 - protein, 7 aa, synthetic construct
  REGION 1..7: note = Description of Artificial Sequence: Synthetic peptide
SNGTSTN

SEQ ID NO: 3997 - protein, 7 aa, synthetic construct
  REGION 1..7: note = Description of Artificial Sequence: Synthetic peptide
SPQGNGG

SEQ ID NO: 3998 - protein, 7 aa, synthetic construct
  REGION 1..7: note = Description of Artificial Sequence: Synthetic peptide
LSHKSSE

SEQ ID NO: 3999 - protein, 7 aa, synthetic construct
  REGION 1..7: note = Description of Artificial Sequence: Synthetic peptide
SPSTKSN

SEQ ID NO: 4000 - protein, 7 aa, synthetic construct
  REGION 1..7: note = Description of Artificial Sequence: Synthetic peptide
ERNSGTT

SEQ ID NO: 4001 - protein, 7 aa, synthetic construct
  REGION 1..7: note = Description of Artificial Sequence: Synthetic peptide
GNGQSQT

SEQ ID NO: 4002 - protein, 7 aa, synthetic construct
  REGION 1..7: note = Description of Artificial Sequence: Synthetic peptide
SSGSKME

SEQ ID NO: 4003 - protein, 7 aa, synthetic construct
  REGION 1..7: note = Description of Artificial Sequence: Synthetic peptide
TQGSDKV

SEQ ID NO: 4004 - protein, 7 aa, synthetic construct
  REGION 1..7: note = Description of Artificial Sequence: Synthetic peptide
DSIKAAS

SEQ ID NO: 4005 - protein, 7 aa, synthetic construct
  REGION 1..7: note = Description of Artificial Sequence: Synthetic peptide
ENKASTQ

SEQ ID NO: 4006 - protein, 7 aa, synthetic construct
  REGION 1..7: note = Description of Artificial Sequence: Synthetic peptide
EAVTPVR

SEQ ID NO: 4007 - protein, 7 aa, synthetic construct
  REGION 1..7: note = Description of Artificial Sequence: Synthetic peptide
SASSKGS

SEQ ID NO: 4008 - protein, 7 aa, synthetic construct
  REGION 1..7: note = Description of Artificial Sequence: Synthetic peptide
NQTASPT

SEQ ID NO: 4009 - protein, 7 aa, synthetic construct
  REGION 1..7: note = Description of Artificial Sequence: Synthetic peptide
EGKGQSN

SEQ ID NO: 4010 - protein, 7 aa, synthetic construct
  REGION 1..7: note = Description of Artificial Sequence: Synthetic peptide
GTNAGSG

SEQ ID NO: 4011 - protein, 7 aa, synthetic construct
  REGION 1..7: note = Description of Artificial Sequence: Synthetic peptide
TTTKSTE

SEQ ID NO: 4012 - protein, 7 aa, synthetic construct
  REGION 1..7: note = Description of Artificial Sequence: Synthetic peptide
ESKPSNL

SEQ ID NO: 4013 - protein, 7 aa, synthetic construct
  REGION 1..7: note = Description of Artificial Sequence: Synthetic peptide
STGGSSS

SEQ ID NO: 4014 - protein, 7 aa, synthetic construct
  REGION 1..7: note = Description of Artificial Sequence: Synthetic peptide
DQSQAVK

SEQ ID NO: 4015 - protein, 7 aa, synthetic construct
  REGION 1..7: note = Description of Artificial Sequence: Synthetic peptide
GSNPSSG

SEQ ID NO: 4016 - protein, 7 aa, synthetic construct
  REGION 1..7: note = Description of Artificial Sequence: Synthetic peptide
GVTDSSK

SEQ ID NO: 4017 - protein, 7 aa, synthetic construct
  REGION 1..7: note = Description of Artificial Sequence: Synthetic peptide
STTGDAK

SEQ ID NO: 4018 - protein, 7 aa, synthetic construct
  REGION 1..7: note = Description of Artificial Sequence: Synthetic peptide
DPSSKKE

SEQ ID NO: 4019 - protein, 7 aa, synthetic construct
  REGION 1..7: note = Description of Artificial Sequence: Synthetic peptide
GSTGEQR

SEQ ID NO: 4020 - protein, 7 aa, synthetic construct
  REGION 1..7: note = Description of Artificial Sequence: Synthetic peptide
VNSERSA

SEQ ID NO: 4021 - protein, 7 aa, synthetic construct
  REGION 1..7: note = Description of Artificial Sequence: Synthetic peptide
GNGSSMS

SEQ ID NO: 4022 - protein, 7 aa, synthetic construct
  REGION 1..7: note = Description of Artificial Sequence: Synthetic peptide
TGTNNAN

SEQ ID NO: 4023 - protein, 7 aa, synthetic construct
  REGION 1..7: note = Description of Artificial Sequence: Synthetic peptide
ISGQQPT

SEQ ID NO: 4024 - protein, 7 aa, synthetic construct
  REGION 1..7: note = Description of Artificial Sequence: Synthetic peptide
QGDSSLK

SEQ ID NO: 4025 - protein, 7 aa, synthetic construct
  REGION 1..7: note = Description of Artificial Sequence: Synthetic peptide
TQTATAN

SEQ ID NO: 4026 - protein, 7 aa, synthetic construct
  REGION 1..7: note = Description of Artificial Sequence: Synthetic peptide
SPHGDKS

SEQ ID NO: 4027 - protein, 7 aa, synthetic construct
  REGION 1..7: note = Description of Artificial Sequence: Synthetic peptide
SGATPAL

SEQ ID NO: 4028 - protein, 7 aa, synthetic construct
  REGION 1..7: note = Description of Artificial Sequence: Synthetic peptide
DSLSSSK

SEQ ID NO: 4029 - protein, 7 aa, synthetic construct
  REGION 1..7: note = Description of Artificial Sequence: Synthetic peptide
GTASDKQ

SEQ ID NO: 4030 - protein, 7 aa, synthetic construct
  REGION 1..7: note = Description of Artificial Sequence: Synthetic peptide
SVNKTGG

SEQ ID NO: 4031 - protein, 7 aa, synthetic construct
  REGION 1..7: note = Description of Artificial Sequence: Synthetic peptide
SRDAKVS

SEQ ID NO: 4032 - protein, 7 aa, synthetic construct
  REGION 1..7: note = Description of Artificial Sequence: Synthetic peptide
TGSTTTL

SEQ ID NO: 4033 - protein, 7 aa, synthetic construct
  REGION 1..7: note = Description of Artificial Sequence: Synthetic peptide
TSETKFG

SEQ ID NO: 4034 - protein, 7 aa, synthetic construct
  REGION 1..7: note = Description of Artificial Sequence: Synthetic peptide
QGGSSVS

SEQ ID NO: 4035 - protein, 7 aa, synthetic construct
  REGION 1..7: note = Description of Artificial Sequence: Synthetic peptide
TKEQTAQ

SEQ ID NO: 4036 - protein, 7 aa, synthetic construct
  REGION 1..7: note = Description of Artificial Sequence: Synthetic peptide
STGKSVT

SEQ ID NO: 4037 - protein, 7 aa, synthetic construct
  REGION 1..7: note = Description of Artificial Sequence: Synthetic peptide
LSSSTVP

SEQ ID NO: 4038 - protein, 7 aa, synthetic construct
  REGION 1..7: note = Description of Artificial Sequence: Synthetic peptide
VGTTAGK

SEQ ID NO: 4039 - protein, 7 aa, synthetic construct
  REGION 1..7: note = Description of Artificial Sequence: Synthetic peptide
GLSSSKE

SEQ ID NO: 4040 - protein, 7 aa, synthetic construct
  REGION 1..7: note = Description of Artificial Sequence: Synthetic peptide
TGVKEIV

SEQ ID NO: 4041 - protein, 7 aa, synthetic construct
  REGION 1..7: note = Description of Artificial Sequence: Synthetic peptide
QGATTGT

SEQ ID NO: 4042 - protein, 7 aa, synthetic construct
  REGION 1..7: note = Description of Artificial Sequence: Synthetic peptide
GSSATDR

SEQ ID NO: 4043 - protein, 7 aa, synthetic construct
  REGION 1..7: note = Description of Artificial Sequence: Synthetic peptide
NTGTPKN

SEQ ID NO: 4044 - protein, 7 aa, synthetic construct
  REGION 1..7: note = Description of Artificial Sequence: Synthetic peptide
HTSSNGG

SEQ ID NO: 4045 - protein, 7 aa, synthetic construct
  REGION 1..7: note = Description of Artificial Sequence: Synthetic peptide
STSTGST

SEQ ID NO: 4046 - protein, 7 aa, synthetic construct
  REGION 1..7: note = Description of Artificial Sequence: Synthetic peptide
FGEGSVK

SEQ ID NO: 4047 - protein, 7 aa, synthetic construct
  REGION 1..7: note = Description of Artificial Sequence: Synthetic peptide
DNSVKNQ

SEQ ID NO: 4048 - protein, 7 aa, synthetic construct
  REGION 1..7: note = Description of Artificial Sequence: Synthetic peptide
SSAKASL

SEQ ID NO: 4049 - protein, 7 aa, synthetic construct
  REGION 1..7: note = Description of Artificial Sequence: Synthetic peptide
AATSSNT

SEQ ID NO: 4050 - protein, 7 aa, synthetic construct
  REGION 1..7: note = Description of Artificial Sequence: Synthetic peptide
GTSTRSE

SEQ ID NO: 4051 - protein, 7 aa, synthetic construct
  REGION 1..7: note = Description of Artificial Sequence: Synthetic peptide
TTDAKTV

SEQ ID NO: 4052 - protein, 7 aa, synthetic construct
  REGION 1..7: note = Description of Artificial Sequence: Synthetic peptide
STTAPSR

SEQ ID NO: 4053 - protein, 7 aa, synthetic construct
  REGION 1..7: note = Description of Artificial Sequence: Synthetic peptide
ASDGAGR

SEQ ID NO: 4054 - protein, 7 aa, synthetic construct
  REGION 1..7: note = Description of Artificial Sequence: Synthetic peptide
DSNKTGP

SEQ ID NO: 4055 - protein, 7 aa, synthetic construct
  REGION 1..7: note = Description of Artificial Sequence: Synthetic peptide
GSLDNKG

SEQ ID NO: 4056 - protein, 7 aa, synthetic construct
  REGION 1..7: note = Description of Artificial Sequence: Synthetic peptide
SQASANT

SEQ ID NO: 4057 - protein, 7 aa, synthetic construct
  REGION 1..7: note = Description of Artificial Sequence: Synthetic peptide
DGKGSGN

SEQ ID NO: 4058 - protein, 7 aa, synthetic construct
  REGION 1..7: note = Description of Artificial Sequence: Synthetic peptide
SGTSSSG

SEQ ID NO: 4059 - protein, 7 aa, synthetic construct
  REGION 1..7: note = Description of Artificial Sequence: Synthetic peptide
VTGSNGG

SEQ ID NO: 4060 - protein, 7 aa, synthetic construct
  REGION 1..7: note = Description of Artificial Sequence: Synthetic peptide
SNSTSGS

SEQ ID NO: 4061 - protein, 7 aa, synthetic construct
  REGION 1..7: note = Description of Artificial Sequence: Synthetic peptide
SGSKTSS

SEQ ID NO: 4062 - protein, 7 aa, synthetic construct
  REGION 1..7: note = Description of Artificial Sequence: Synthetic peptide
SDAGKQV

SEQ ID NO: 4063 - protein, 7 aa, synthetic construct
  REGION 1..7: note = Description of Artificial Sequence: Synthetic peptide
SSNTPSS

SEQ ID NO: 4064 - protein, 7 aa, synthetic construct
  REGION 1..7: note = Description of Artificial Sequence: Synthetic peptide
LAESKTM

SEQ ID NO: 4065 - protein, 7 aa, synthetic construct
  REGION 1..7: note = Description of Artificial Sequence: Synthetic peptide
GTTGDIK

SEQ ID NO: 4066 - protein, 7 aa, synthetic construct
  REGION 1..7: note = Description of Artificial Sequence: Synthetic peptide
AGTERSM

SEQ ID NO: 4067 - protein, 7 aa, synthetic construct
  REGION 1..7: note = Description of Artificial Sequence: Synthetic peptide
VSGSTPT

SEQ ID NO: 4068 - protein, 7 aa, synthetic construct
  REGION 1..7: note = Description of Artificial Sequence: Synthetic peptide
MNNGKVS

SEQ ID NO: 4069 - protein, 7 aa, synthetic construct
  REGION 1..7: note = Description of Artificial Sequence: Synthetic peptide
TGKDTMV

SEQ ID NO: 4070 - protein, 7 aa, synthetic construct
  REGION 1..7: note = Description of Artificial Sequence: Synthetic peptide
MVAGNKG

SEQ ID NO: 4071 - protein, 7 aa, synthetic construct
  REGION 1..7: note = Description of Artificial Sequence: Synthetic peptide
GADSVTK

SEQ ID NO: 4072 - protein, 7 aa, synthetic construct
  REGION 1..7: note = Description of Artificial Sequence: Synthetic peptide
TQSASTA

SEQ ID NO: 4073 - protein, 7 aa, synthetic construct
  REGION 1..7: note = Description of Artificial Sequence: Synthetic peptide
DRTNAPS

SEQ ID NO: 4074 - protein, 7 aa, synthetic construct
  REGION 1..7: note = Description of Artificial Sequence: Synthetic peptide
TSSTTSG

SEQ ID NO: 4075 - protein, 7 aa, synthetic construct
  REGION 1..7: note = Description of Artificial Sequence: Synthetic peptide
VRGKEPM

SEQ ID NO: 4076 - protein, 7 aa, synthetic construct
  REGION 1..7: note = Description of Artificial Sequence: Synthetic peptide
DAARTNV

SEQ ID NO: 4077 - protein, 7 aa, synthetic construct
  REGION 1..7: note = Description of Artificial Sequence: Synthetic peptide
EKVTSSG

SEQ ID NO: 4078 - protein, 7 aa, synthetic construct
  REGION 1..7: note = Description of Artificial Sequence: Synthetic peptide
DGISSNH

SEQ ID NO: 4079 - protein, 7 aa, synthetic construct
  REGION 1..7: note = Description of Artificial Sequence: Synthetic peptide
SGNQQSN

SEQ ID NO: 4080 - protein, 7 aa, synthetic construct
  REGION 1..7: note = Description of Artificial Sequence: Synthetic peptide
GGVSNSI

SEQ ID NO: 4081 - protein, 7 aa, synthetic construct
  REGION 1..7: note = Description of Artificial Sequence: Synthetic peptide
GINGKDG

SEQ ID NO: 4082 - protein, 7 aa, synthetic construct
  REGION 1..7: note = Description of Artificial Sequence: Synthetic peptide
SSADPKS

SEQ ID NO: 4083 - protein, 7 aa, synthetic construct
  REGION 1..7: note = Description of Artificial Sequence: Synthetic peptide
NGQSVNS

SEQ ID NO: 4084 - protein, 7 aa, synthetic construct
  REGION 1..7: note = Description of Artificial Sequence: Synthetic peptide
AVSEKSG

SEQ ID NO: 4085 - protein, 7 aa, synthetic construct
  REGION 1..7: note = Description of Artificial Sequence: Synthetic peptide
SSQTSNV

SEQ ID NO: 4086 - protein, 7 aa, synthetic construct
  REGION 1..7: note = Description of Artificial Sequence: Synthetic peptide
LQSTKGS

SEQ ID NO: 4087 - protein, 7 aa, synthetic construct
  REGION 1..7: note = Description of Artificial Sequence: Synthetic peptide
SNDDKPR

SEQ ID NO: 4088 - protein, 7 aa, synthetic construct
  REGION 1..7: note = Description of Artificial Sequence: Synthetic peptide
QGNSAMT

SEQ ID NO: 4089 - protein, 7 aa, synthetic construct
  REGION 1..7: note = Description of Artificial Sequence: Synthetic peptide
HSDSTQK

SEQ ID NO: 4090 - protein, 7 aa, synthetic construct
  REGION 1..7: note = Description of Artificial Sequence: Synthetic peptide
SQKPSPQ

SEQ ID NO: 4091 - protein, 7 aa, synthetic construct
  REGION 1..7: note = Description of Artificial Sequence: Synthetic peptide
DGLQTTR

SEQ ID NO: 4092 - protein, 7 aa, synthetic construct
  REGION 1..7: note = Description of Artificial Sequence: Synthetic peptide
SAHDKTN

SEQ ID NO: 4093 - protein, 7 aa, synthetic construct
  REGION 1..7: note = Description of Artificial Sequence: Synthetic peptide
MGGSTQQ

SEQ ID NO: 4094 - protein, 7 aa, synthetic construct
  REGION 1..7: note = Description of Artificial Sequence: Synthetic peptide
GVTGSKA

SEQ ID NO: 4095 - protein, 7 aa, synthetic construct
  REGION 1..7: note = Description of Artificial Sequence: Synthetic peptide
REGQTSM

SEQ ID NO: 4096 - protein, 7 aa, synthetic construct
  REGION 1..7: note = Description of Artificial Sequence: Synthetic peptide
SKSTNLA

SEQ ID NO: 4097 - protein, 7 aa, synthetic construct
  REGION 1..7: note = Description of Artificial Sequence: Synthetic peptide
SSGSSVK

SEQ ID NO: 4098 - protein, 7 aa, synthetic construct
  REGION 1..7: note = Description of Artificial Sequence: Synthetic peptide
NAANPPG

SEQ ID NO: 4099 - protein, 7 aa, synthetic construct
  REGION 1..7: note = Description of Artificial Sequence: Synthetic peptide
NSTPGSG

SEQ ID NO: 4100 - protein, 7 aa, synthetic construct
  REGION 1..7: note = Description of Artificial Sequence: Synthetic peptide
TVAPKTG

SEQ ID NO: 4101 - protein, 7 aa, synthetic construct
  REGION 1..7: note = Description of Artificial Sequence: Synthetic peptide
TQNQSLG

SEQ ID NO: 4102 - protein, 7 aa, synthetic construct
  REGION 1..7: note = Description of Artificial Sequence: Synthetic peptide
SKEEKNS

SEQ ID NO: 4103 - protein, 7 aa, synthetic construct
  REGION 1..7: note = Description of Artificial Sequence: Synthetic peptide
SSESKSA

SEQ ID NO: 4104 - protein, 7 aa, synthetic construct
  REGION 1..7: note = Description of Artificial Sequence: Synthetic peptide
SVEPKVQ

SEQ ID NO: 4105 - protein, 7 aa, synthetic construct
  REGION 1..7: note = Description of Artificial Sequence: Synthetic peptide
SMEARNA

SEQ ID NO: 4106 - protein, 7 aa, synthetic construct
  REGION 1..7: note = Description of Artificial Sequence: Synthetic peptide
QGGNHSG

SEQ ID NO: 4107 - protein, 7 aa, synthetic construct
  REGION 1..7: note = Description of Artificial Sequence: Synthetic peptide
LASKDAG

SEQ ID NO: 4108 - protein, 7 aa, synthetic construct
  REGION 1..7: note = Description of Artificial Sequence: Synthetic peptide
DSTSGKR

SEQ ID NO: 4109 - protein, 7 aa, synthetic construct
  REGION 1..7: note = Description of Artificial Sequence: Synthetic peptide
AHTSSPG

SEQ ID NO: 4110 - protein, 7 aa, synthetic construct
  REGION 1..7: note = Description of Artificial Sequence: Synthetic peptide
ADHKTSG

SEQ ID NO: 4111 - protein, 7 aa, synthetic construct
  REGION 1..7: note = Description of Artificial Sequence: Synthetic peptide
GTGEPRS

SEQ ID NO: 4112 - protein, 7 aa, synthetic construct
  REGION 1..7: note = Description of Artificial Sequence: Synthetic peptide
GKGGVNP

SEQ ID NO: 4113 - protein, 7 aa, synthetic construct
  REGION 1..7: note = Description of Artificial Sequence: Synthetic peptide
GMDSKRL

SEQ ID NO: 4114 - protein, 7 aa, synthetic construct
  REGION 1..7: note = Description of Artificial Sequence: Synthetic peptide
GPAGNTV

SEQ ID NO: 4115 - protein, 7 aa, synthetic construct
  REGION 1..7: note = Description of Artificial Sequence: Synthetic peptide
TVGTPVS

SEQ ID NO: 4116 - protein, 7 aa, synthetic construct
  REGION 1..7: note = Description of Artificial Sequence: Synthetic peptide
LSEKSSS

SEQ ID NO: 4117 - protein, 7 aa, synthetic construct
  REGION 1..7: note = Description of Artificial Sequence: Synthetic peptide
DTNGKAT

SEQ ID NO: 4118 - protein, 7 aa, synthetic construct
  REGION 1..7: note = Description of Artificial Sequence: Synthetic peptide
GLTKSTG

SEQ ID NO: 4119 - protein, 7 aa, synthetic construct
  REGION 1..7: note = Description of Artificial Sequence: Synthetic peptide
TNSTHAA

SEQ ID NO: 4120 - protein, 7 aa, synthetic construct
  REGION 1..7: note = Description of Artificial Sequence: Synthetic peptide
TSERAPG

SEQ ID NO: 4121 - protein, 7 aa, synthetic construct
  REGION 1..7: note = Description of Artificial Sequence: Synthetic peptide
TSSNTPM

SEQ ID NO: 4122 - protein, 7 aa, synthetic construct
  REGION 1..7: note = Description of Artificial Sequence: Synthetic peptide
SKGSGAG

SEQ ID NO: 4123 - protein, 7 aa, synthetic construct
  REGION 1..7: note = Description of Artificial Sequence: Synthetic peptide
STTGATG

SEQ ID NO: 4124 - protein, 7 aa, synthetic construct
  REGION 1..7: note = Description of Artificial Sequence: Synthetic peptide
SPAAGHN

SEQ ID NO: 4125 - protein, 7 aa, synthetic construct
  REGION 1..7: note = Description of Artificial Sequence: Synthetic peptide
GASKPGH

SEQ ID NO: 4126 - protein, 7 aa, synthetic construct
  REGION 1..7: note = Description of Artificial Sequence: Synthetic peptide
SANKPAG

SEQ ID NO: 4127 - protein, 7 aa, synthetic construct
  REGION 1..7: note = Description of Artificial Sequence: Synthetic peptide
GPVGSAT

SEQ ID NO: 4128 - protein, 7 aa, synthetic construct
  REGION 1..7: note = Description of Artificial Sequence: Synthetic peptide
EGSSTVR

SEQ ID NO: 4129 - protein, 7 aa, synthetic construct
  REGION 1..7: note = Description of Artificial Sequence: Synthetic peptide
ANSSSAT

SEQ ID NO: 4130 - protein, 7 aa, synthetic construct
  REGION 1..7: note = Description of Artificial Sequence: Synthetic peptide
VSGASTA

SEQ ID NO: 4131 - protein, 7 aa, synthetic construct
  REGION 1..7: note = Description of Artificial Sequence: Synthetic peptide
GSSSPAH

SEQ ID NO: 4132 - protein, 7 aa, synthetic construct
  REGION 1..7: note = Description of Artificial Sequence: Synthetic peptide
MSGTGSS

SEQ ID NO: 4133 - protein, 7 aa, synthetic construct
  REGION 1..7: note = Description of Artificial Sequence: Synthetic peptide
HTGGSPS

SEQ ID NO: 4134 - protein, 7 aa, synthetic construct
  REGION 1..7: note = Description of Artificial Sequence: Synthetic peptide
SKQNGVT

SEQ ID NO: 4135 - protein, 7 aa, synthetic construct
  REGION 1..7: note = Description of Artificial Sequence: Synthetic peptide
ESMDKAR

SEQ ID NO: 4136 - protein, 7 aa, synthetic construct
  REGION 1..7: note = Description of Artificial Sequence: Synthetic peptide
LRETSSH

SEQ ID NO: 4137 - protein, 7 aa, synthetic construct
  REGION 1..7: note = Description of Artificial Sequence: Synthetic peptide
ERADRSI

SEQ ID NO: 4138 - protein, 7 aa, synthetic construct
  REGION 1..7: note = Description of Artificial Sequence: Synthetic peptide
RSESKGG

SEQ ID NO: 4139 - protein, 7 aa, synthetic construct
  REGION 1..7: note = Description of Artificial Sequence: Synthetic peptide
EHSSASG

SEQ ID NO: 4140 - protein, 7 aa, synthetic construct
  REGION 1..7: note = Description of Artificial Sequence: Synthetic peptide
AHSKENM

SEQ ID NO: 4141 - protein, 7 aa, synthetic construct
  REGION 1..7: note = Description of Artificial Sequence: Synthetic peptide
GINNKAG

SEQ ID NO: 4142 - protein, 7 aa, synthetic construct
  REGION 1..7: note = Description of Artificial Sequence: Synthetic peptide
GTASGAQ

SEQ ID NO: 4143 - protein, 7 aa, synthetic construct
  REGION 1..7: note = Description of Artificial Sequence: Synthetic peptide
STNSSSH

SEQ ID NO: 4144 - protein, 7 aa, synthetic construct
  REGION 1..7: note = Description of Artificial Sequence: Synthetic peptide
TQTNSSS

SEQ ID NO: 4145 - protein, 7 aa, synthetic construct
  REGION 1..7: note = Description of Artificial Sequence: Synthetic peptide
ESSQPPR

SEQ ID NO: 4146 - protein, 7 aa, synthetic construct
  REGION 1..7: note = Description of Artificial Sequence: Synthetic peptide
ERNSSPT

SEQ ID NO: 4147 - protein, 7 aa, synthetic construct
  REGION 1..7: note = Description of Artificial Sequence: Synthetic peptide
SLDNKSG

SEQ ID NO: 4148 - protein, 7 aa, synthetic construct
  REGION 1..7: note = Description of Artificial Sequence: Synthetic peptide
DNGHKML

SEQ ID NO: 4149 - protein, 7 aa, synthetic construct
  REGION 1..7: note = Description of Artificial Sequence: Synthetic peptide
EGKSNDG

SEQ ID NO: 4150 - protein, 7 aa, synthetic construct
  REGION 1..7: note = Description of Artificial Sequence: Synthetic peptide
QTSSGSG

SEQ ID NO: 4151 - protein, 7 aa, synthetic construct
  REGION 1..7: note = Description of Artificial Sequence: Synthetic peptide
GSGQTSS

SEQ ID NO: 4152 - protein, 7 aa, synthetic construct
  REGION 1..7: note = Description of Artificial Sequence: Synthetic peptide
SIPTGSG

SEQ ID NO: 4153 - protein, 7 aa, synthetic construct
  REGION 1..7: note = Description of Artificial Sequence: Synthetic peptide
SQGSKDS

SEQ ID NO: 4154 - protein, 7 aa, synthetic construct
  REGION 1..7: note = Description of Artificial Sequence: Synthetic peptide
ASDSPSR

SEQ ID NO: 4155 - protein, 7 aa, synthetic construct
  REGION 1..7: note = Description of Artificial Sequence: Synthetic peptide
EKVSSVG

SEQ ID NO: 4156 - protein, 7 aa, synthetic construct
  REGION 1..7: note = Description of Artificial Sequence: Synthetic peptide
GEGARLS

SEQ ID NO: 4157 - protein, 7 aa, synthetic construct
  REGION 1..7: note = Description of Artificial Sequence: Synthetic peptide
GAGTRTE

SEQ ID NO: 4158 - protein, 7 aa, synthetic construct
  REGION 1..7: note = Description of Artificial Sequence: Synthetic peptide
GKENGAQ

SEQ ID NO: 4159 - protein, 7 aa, synthetic construct
  REGION 1..7: note = Description of Artificial Sequence: Synthetic peptide
NRQPKQE

SEQ ID NO: 4160 - protein, 7 aa, synthetic construct
  REGION 1..7: note = Description of Artificial Sequence: Synthetic peptide
NTAASNT

SEQ ID NO: 4161 - protein, 7 aa, synthetic construct
  REGION 1..7: note = Description of Artificial Sequence: Synthetic peptide
TRQTKVE

SEQ ID NO: 4162 - protein, 7 aa, synthetic construct
  REGION 1..7: note = Description of Artificial Sequence: Synthetic peptide
SLSTAPT

SEQ ID NO: 4163 - protein, 7 aa, synthetic construct
  REGION 1..7: note = Description of Artificial Sequence: Synthetic peptide
DQSSKTN

SEQ ID NO: 4164 - protein, 7 aa, synthetic construct
  REGION 1..7: note = Description of Artificial Sequence: Synthetic peptide
TAASSTS

SEQ ID NO: 4165 - protein, 7 aa, synthetic construct
  REGION 1..7: note = Description of Artificial Sequence: Synthetic peptide
MGSPSAS

SEQ ID NO: 4166 - protein, 7 aa, synthetic construct
  REGION 1..7: note = Description of Artificial Sequence: Synthetic peptide
LQSTAPS

SEQ ID NO: 4167 - protein, 7 aa, synthetic construct
  REGION 1..7: note = Description of Artificial Sequence: Synthetic peptide
NHGSPGV

SEQ ID NO: 4168 - protein, 7 aa, synthetic construct
  REGION 1..7: note = Description of Artificial Sequence: Synthetic peptide
GSGTSMN

SEQ ID NO: 4169 - protein, 7 aa, synthetic construct
  REGION 1..7: note = Description of Artificial Sequence: Synthetic peptide
TGTSSVA

SEQ ID NO: 4170 - protein, 7 aa, synthetic construct
  REGION 1..7: note = Description of Artificial Sequence: Synthetic peptide
DAKGGAG

SEQ ID NO: 4171 - protein, 7 aa, synthetic construct
  REGION 1..7: note = Description of Artificial Sequence: Synthetic peptide
TGSSTAH

SEQ ID NO: 4172 - protein, 7 aa, synthetic construct
  REGION 1..7: note = Description of Artificial Sequence: Synthetic peptide
TTGSGNL

SEQ ID NO: 4173 - protein, 7 aa, synthetic construct
  REGION 1..7: note = Description of Artificial Sequence: Synthetic peptide
STAQTSV

SEQ ID NO: 4174 - protein, 7 aa, synthetic construct
  REGION 1..7: note = Description of Artificial Sequence: Synthetic peptide
SGNDNRN

SEQ ID NO: 4175 - protein, 7 aa, synthetic construct
  REGION 1..7: note = Description of Artificial Sequence: Synthetic peptide
TLNGKAV

SEQ ID NO: 4176 - protein, 7 aa, synthetic construct
  REGION 1..7: note = Description of Artificial Sequence: Synthetic peptide
AEPGNKM

SEQ ID NO: 4177 - protein, 7 aa, synthetic construct
  REGION 1..7: note = Description of Artificial Sequence: Synthetic peptide
NTSNGSQ

SEQ ID NO: 4178 - protein, 7 aa, synthetic construct
  REGION 1..7: note = Description of Artificial Sequence: Synthetic peptide
QSNTAHS

SEQ ID NO: 4179 - protein, 7 aa, synthetic construct
  REGION 1..7: note = Description of Artificial Sequence: Synthetic peptide
KTATSST

SEQ ID NO: 4180 - protein, 7 aa, synthetic construct
  REGION 1..7: note = Description of Artificial Sequence: Synthetic peptide
VSGTSNV

SEQ ID NO: 4181 - protein, 7 aa, synthetic construct
  REGION 1..7: note = Description of Artificial Sequence: Synthetic peptide
SGSKEAT

SEQ ID NO: 4182 - protein, 7 aa, synthetic construct
  REGION 1..7: note = Description of Artificial Sequence: Synthetic peptide
TGGSSSL

SEQ ID NO: 4183 - protein, 7 aa, synthetic construct
  REGION 1..7: note = Description of Artificial Sequence: Synthetic peptide
DVTKSSA

SEQ ID NO: 4184 - protein, 7 aa, synthetic construct
  REGION 1..7: note = Description of Artificial Sequence: Synthetic peptide
NTTGHSS

SEQ ID NO: 4185 - protein, 7 aa, synthetic construct
  REGION 1..7: note = Description of Artificial Sequence: Synthetic peptide
DNVQKVS

SEQ ID NO: 4186 - protein, 7 aa, synthetic construct
  REGION 1..7: note = Description of Artificial Sequence: Synthetic peptide
GNGVPNG

SEQ ID NO: 4187 - protein, 7 aa, synthetic construct
  REGION 1..7: note = Description of Artificial Sequence: Synthetic peptide
QQAAPSV

SEQ ID NO: 4188 - protein, 7 aa, synthetic construct
  REGION 1..7: note = Description of Artificial Sequence: Synthetic peptide
SQDNNRS

SEQ ID NO: 4189 - protein, 7 aa, synthetic construct
  REGION 1..7: note = Description of Artificial Sequence: Synthetic peptide
VEKGKNE

SEQ ID NO: 4190 - protein, 7 aa, synthetic construct
  REGION 1..7: note = Description of Artificial Sequence: Synthetic peptide
STQGTSS

SEQ ID NO: 4191 - protein, 7 aa, synthetic construct
  REGION 1..7: note = Description of Artificial Sequence: Synthetic peptide
RSGDNPS

SEQ ID NO: 4192 - protein, 7 aa, synthetic construct
  REGION 1..7: note = Description of Artificial Sequence: Synthetic peptide
TTASHNV

SEQ ID NO: 4193 - protein, 7 aa, synthetic construct
  REGION 1..7: note = Description of Artificial Sequence: Synthetic peptide
QSVDPKL

SEQ ID NO: 4194 - protein, 7 aa, synthetic construct
  REGION 1..7: note = Description of Artificial Sequence: Synthetic peptide
GVTNAKS

SEQ ID NO: 4195 - protein, 7 aa, synthetic construct
  REGION 1..7: note = Description of Artificial Sequence: Synthetic peptide
NESRGSS

SEQ ID NO: 4196 - protein, 7 aa, synthetic construct
  REGION 1..7: note = Description of Artificial Sequence: Synthetic peptide
QDSKQGA

SEQ ID NO: 4197 - protein, 7 aa, synthetic construct
  REGION 1..7: note = Description of Artificial Sequence: Synthetic peptide
SMSSEPK

SEQ ID NO: 4198 - protein, 7 aa, synthetic construct
  REGION 1..7: note = Description of Artificial Sequence: Synthetic peptide
SGAGASL

SEQ ID NO: 4199 - protein, 7 aa, synthetic construct
  REGION 1..7: note = Description of Artificial Sequence: Synthetic peptide
QTSGSHG

SEQ ID NO: 4200 - protein, 7 aa, synthetic construct
  REGION 1..7: note = Description of Artificial Sequence: Synthetic peptide
VGNSNTT

SEQ ID NO: 4201 - protein, 7 aa, synthetic construct
  REGION 1..7: note = Description of Artificial Sequence: Synthetic peptide
SKSAAPT

SEQ ID NO: 4202 - protein, 7 aa, synthetic construct
  REGION 1..7: note = Description of Artificial Sequence: Synthetic peptide
GTGQSPV

SEQ ID NO: 4203 - protein, 7 aa, synthetic construct
  REGION 1..7: note = Description of Artificial Sequence: Synthetic peptide
SSTSSHS

SEQ ID NO: 4204 - protein, 7 aa, synthetic construct
  REGION 1..7: note = Description of Artificial Sequence: Synthetic peptide
IKNSQTS

SEQ ID NO: 4205 - protein, 7 aa, synthetic construct
  REGION 1..7: note = Description of Artificial Sequence: Synthetic peptide
SHGDKTL

SEQ ID NO: 4206 - protein, 7 aa, synthetic construct
  REGION 1..7: note = Description of Artificial Sequence: Synthetic peptide
NASQQGQ

SEQ ID NO: 4207 - protein, 7 aa, synthetic construct
  REGION 1..7: note = Description of Artificial Sequence: Synthetic peptide
DGVGTGS

SEQ ID NO: 4208 - protein, 7 aa, synthetic construct
  REGION 1..7: note = Description of Artificial Sequence: Synthetic peptide
GSTGSSV

SEQ ID NO: 4209 - protein, 7 aa, synthetic construct
  REGION 1..7: note = Description of Artificial Sequence: Synthetic peptide
AVSNPSQ

SEQ ID NO: 4210 - protein, 7 aa, synthetic construct
  REGION 1..7: note = Description of Artificial Sequence: Synthetic peptide
TSGQTGS

SEQ ID NO: 4211 - protein, 7 aa, synthetic construct
  REGION 1..7: note = Description of Artificial Sequence: Synthetic peptide
SGTSTTS

SEQ ID NO: 4212 - protein, 7 aa, synthetic construct
  REGION 1..7: note = Description of Artificial Sequence: Synthetic peptide
RQDAKSE

SEQ ID NO: 4213 - protein, 7 aa, synthetic construct
  REGION 1..7: note = Description of Artificial Sequence: Synthetic peptide
MSTVKPQ

SEQ ID NO: 4214 - protein, 7 aa, synthetic construct
  REGION 1..7: note = Description of Artificial Sequence: Synthetic peptide
AFDPKGG

SEQ ID NO: 4215 - protein, 7 aa, synthetic construct
  REGION 1..7: note = Description of Artificial Sequence: Synthetic peptide
VAGASTG

SEQ ID NO: 4216 - protein, 7 aa, synthetic construct
  REGION 1..7: note = Description of Artificial Sequence: Synthetic peptide
SGAGTIS

SEQ ID NO: 4217 - protein, 7 aa, synthetic construct
  REGION 1..7: note = Description of Artificial Sequence: Synthetic peptide
SLSDKAR

SEQ ID NO: 4218 - protein, 7 aa, synthetic construct
  REGION 1..7: note = Description of Artificial Sequence: Synthetic peptide
STQSAPT

SEQ ID NO: 4219 - protein, 7 aa, synthetic construct
  REGION 1..7: note = Description of Artificial Sequence: Synthetic peptide
VTGKTDS

SEQ ID NO: 4220 - protein, 7 aa, synthetic construct
  REGION 1..7: note = Description of Artificial Sequence: Synthetic peptide
QDTKSTS

SEQ ID NO: 4221 - protein, 7 aa, synthetic construct
  REGION 1..7: note = Description of Artificial Sequence: Synthetic peptide
QVGSSSV

SEQ ID NO: 4222 - protein, 7 aa, synthetic construct
  REGION 1..7: note = Description of Artificial Sequence: Synthetic peptide
NSQAPPN

SEQ ID NO: 4223 - protein, 7 aa, synthetic construct
  REGION 1..7: note = Description of Artificial Sequence: Synthetic peptide
MTSKDMV

SEQ ID NO: 4224 - protein, 7 aa, synthetic construct
  REGION 1..7: note = Description of Artificial Sequence: Synthetic peptide
QSSSQPG

SEQ ID NO: 4225 - protein, 7 aa, synthetic construct
  REGION 1..7: note = Description of Artificial Sequence: Synthetic peptide
GTGSAPV

SEQ ID NO: 4226 - protein, 7 aa, synthetic construct
  REGION 1..7: note = Description of Artificial Sequence: Synthetic peptide
SGSSTAT

SEQ ID NO: 4227 - protein, 7 aa, synthetic construct
  REGION 1..7: note = Description of Artificial Sequence: Synthetic peptide
LNTQSPS

SEQ ID NO: 4228 - protein, 7 aa, synthetic construct
  REGION 1..7: note = Description of Artificial Sequence: Synthetic peptide
GDTNVKG

SEQ ID NO: 4229 - protein, 7 aa, synthetic construct
  REGION 1..7: note = Description of Artificial Sequence: Synthetic peptide
ASTGKDG

SEQ ID NO: 4230 - protein, 7 aa, synthetic construct
  REGION 1..7: note = Description of Artificial Sequence: Synthetic peptide
RTGSSNG

SEQ ID NO: 4231 - protein, 7 aa, synthetic construct
  REGION 1..7: note = Description of Artificial Sequence: Synthetic peptide
YNNGVSK

SEQ ID NO: 4232 - protein, 7 aa, synthetic construct
  REGION 1..7: note = Description of Artificial Sequence: Synthetic peptide
NVGSTNS

SEQ ID NO: 4233 - protein, 7 aa, synthetic construct
  REGION 1..7: note = Description of Artificial Sequence: Synthetic peptide
GMADRNK

SEQ ID NO: 4234 - protein, 7 aa, synthetic construct
  REGION 1..7: note = Description of Artificial Sequence: Synthetic peptide
GRQDGAK

SEQ ID NO: 4235 - protein, 7 aa, synthetic construct
  REGION 1..7: note = Description of Artificial Sequence: Synthetic peptide
TKSNPNS

SEQ ID NO: 4236 - protein, 7 aa, synthetic construct
  REGION 1..7: note = Description of Artificial Sequence: Synthetic peptide
GSNNSSG

SEQ ID NO: 4237 - protein, 7 aa, synthetic construct
  REGION 1..7: note = Description of Artificial Sequence: Synthetic peptide
VGTTSAS

SEQ ID NO: 4238 - protein, 7 aa, synthetic construct
  REGION 1..7: note = Description of Artificial Sequence: Synthetic peptide
VEGASVR

SEQ ID NO: 4239 - protein, 7 aa, synthetic construct
  REGION 1..7: note = Description of Artificial Sequence: Synthetic peptide
GSATKST

SEQ ID NO: 4240 - protein, 7 aa, synthetic construct
  REGION 1..7: note = Description of Artificial Sequence: Synthetic peptide
SAKAPSL

SEQ ID NO: 4241 - protein, 7 aa, synthetic construct
  REGION 1..7: note = Description of Artificial Sequence: Synthetic peptide
GTNTNKA

SEQ ID NO: 4242 - protein, 7 aa, synthetic construct
  REGION 1..7: note = Description of Artificial Sequence: Synthetic peptide
EGSSGVK

SEQ ID NO: 4243 - protein, 7 aa, synthetic construct
  REGION 1..7: note = Description of Artificial Sequence: Synthetic peptide
DSRSASS

SEQ ID NO: 4244 - protein, 7 aa, synthetic construct
  REGION 1..7: note = Description of Artificial Sequence: Synthetic peptide
EKGAGSK

SEQ ID NO: 4245 - protein, 7 aa, synthetic construct
  REGION 1..7: note = Description of Artificial Sequence: Synthetic peptide
NNAGNLG

SEQ ID NO: 4246 - protein, 7 aa, synthetic construct
  REGION 1..7: note = Description of Artificial Sequence: Synthetic peptide
RDASTTG

SEQ ID NO: 4247 - protein, 7 aa, synthetic construct
  REGION 1..7: note = Description of Artificial Sequence: Synthetic peptide
SSKPQSM

SEQ ID NO: 4248 - protein, 7 aa, synthetic construct
  REGION 1..7: note = Description of Artificial Sequence: Synthetic peptide
ATDKTAL

SEQ ID NO: 4249 - protein, 7 aa, synthetic construct
  REGION 1..7: note = Description of Artificial Sequence: Synthetic peptide
ESSSPAM

SEQ ID NO: 4250 - protein, 7 aa, synthetic construct
  REGION 1..7: note = Description of Artificial Sequence: Synthetic peptide
MLNDAGK

SEQ ID NO: 4251 - protein, 7 aa, synthetic construct
  REGION 1..7: note = Description of Artificial Sequence: Synthetic peptide
QAGNSPA

SEQ ID NO: 4252 - protein, 7 aa, synthetic construct
  REGION 1..7: note = Description of Artificial Sequence: Synthetic peptide
AGPSGGG

SEQ ID NO: 4253 - protein, 7 aa, synthetic construct
  REGION 1..7: note = Description of Artificial Sequence: Synthetic peptide
GNSKSSQ

SEQ ID NO: 4254 - protein, 7 aa, synthetic construct
  REGION 1..7: note = Description of Artificial Sequence: Synthetic peptide
GDKTSLT

SEQ ID NO: 4255 - protein, 7 aa, synthetic construct
  REGION 1..7: note = Description of Artificial Sequence: Synthetic peptide
TAGQGSS

SEQ ID NO: 4256 - protein, 7 aa, synthetic construct
  REGION 1..7: note = Description of Artificial Sequence: Synthetic peptide
NTTSASA

SEQ ID NO: 4257 - protein, 7 aa, synthetic construct
  REGION 1..7: note = Description of Artificial Sequence: Synthetic peptide
GVAAQNS

SEQ ID NO: 4258 - protein, 7 aa, synthetic construct
  REGION 1..7: note = Description of Artificial Sequence: Synthetic peptide
GQGQKSM

SEQ ID NO: 4259 - protein, 7 aa, synthetic construct
  REGION 1..7: note = Description of Artificial Sequence: Synthetic peptide
GQPSGKT

SEQ ID NO: 4260 - protein, 7 aa, synthetic construct
  REGION 1..7: note = Description of Artificial Sequence: Synthetic peptide
EPSTKGL

SEQ ID NO: 4261 - protein, 7 aa, synthetic construct
  REGION 1..7: note = Description of Artificial Sequence: Synthetic peptide
TATDSRT

SEQ ID NO: 4262 - protein, 7 aa, synthetic construct
  REGION 1..7: note = Description of Artificial Sequence: Synthetic peptide
QSDNVNR

SEQ ID NO: 4263 - protein, 7 aa, synthetic construct
  REGION 1..7: note = Description of Artificial Sequence: Synthetic peptide
AQVKSNG

SEQ ID NO: 4264 - protein, 7 aa, synthetic construct
  REGION 1..7: note = Description of Artificial Sequence: Synthetic peptide
QSSPTSS

SEQ ID NO: 4265 - protein, 7 aa, synthetic construct
  REGION 1..7: note = Description of Artificial Sequence: Synthetic peptide
DAARNSA

SEQ ID NO: 4266 - protein, 7 aa, synthetic construct
  REGION 1..7: note = Description of Artificial Sequence: Synthetic peptide
VDGGKTN

SEQ ID NO: 4267 - protein, 7 aa, synthetic construct
  REGION 1..7: note = Description of Artificial Sequence: Synthetic peptide
HGSGQNQ

SEQ ID NO: 4268 - protein, 7 aa, synthetic construct
  REGION 1..7: note = Description of Artificial Sequence: Synthetic peptide
LSGGSTG

SEQ ID NO: 4269 - protein, 7 aa, synthetic construct
  REGION 1..7: note = Description of Artificial Sequence: Synthetic peptide
QTKPQAA

SEQ ID NO: 4270 - protein, 7 aa, synthetic construct
  REGION 1..7: note = Description of Artificial Sequence: Synthetic peptide
DTTAKNI

SEQ ID NO: 4271 - protein, 7 aa, synthetic construct
  REGION 1..7: note = Description of Artificial Sequence: Synthetic peptide
SGAQTAL

SEQ ID NO: 4272 - protein, 7 aa, synthetic construct
  REGION 1..7: note = Description of Artificial Sequence: Synthetic peptide
GRNGEVK

SEQ ID NO: 4273 - protein, 7 aa, synthetic construct
  REGION 1..7: note = Description of Artificial Sequence: Synthetic peptide
QHKDGAG

SEQ ID NO: 4274 - protein, 7 aa, synthetic construct
  REGION 1..7: note = Description of Artificial Sequence: Synthetic peptide
TLDSVGK

SEQ ID NO: 4275 - protein, 7 aa, synthetic construct
  REGION 1..7: note = Description of Artificial Sequence: Synthetic peptide
KHNSEQS

SEQ ID NO: 4276 - protein, 7 aa, synthetic construct
  REGION 1..7: note = Description of Artificial Sequence: Synthetic peptide
QQASSTG

SEQ ID NO: 4277 - protein, 7 aa, synthetic construct
  REGION 1..7: note = Description of Artificial Sequence: Synthetic peptide
ATSPPSG

SEQ ID NO: 4278 - protein, 7 aa, synthetic construct
  REGION 1..7: note = Description of Artificial Sequence: Synthetic peptide
HTKAQAG

SEQ ID NO: 4279 - protein, 7 aa, synthetic construct
  REGION 1..7: note = Description of Artificial Sequence: Synthetic peptide
RSNGAAS

SEQ ID NO: 4280 - protein, 7 aa, synthetic construct
  REGION 1..7: note = Description of Artificial Sequence: Synthetic peptide
VATKSTS

SEQ ID NO: 4281 - protein, 7 aa, synthetic construct
  REGION 1..7: note = Description of Artificial Sequence: Synthetic peptide
TSGAGVN

SEQ ID NO: 4282 - protein, 7 aa, synthetic construct
  REGION 1..7: note = Description of Artificial Sequence: Synthetic peptide
THNSSSS

SEQ ID NO: 4283 - protein, 7 aa, synthetic construct
  REGION 1..7: note = Description of Artificial Sequence: Synthetic peptide
GEGNARN

SEQ ID NO: 4284 - protein, 7 aa, synthetic construct
  REGION 1..7: note = Description of Artificial Sequence: Synthetic peptide
GSVKTSS

SEQ ID NO: 4285 - protein, 7 aa, synthetic construct
  REGION 1..7: note = Description of Artificial Sequence: Synthetic peptide
AGEKGLH

SEQ ID NO: 4286 - protein, 7 aa, synthetic construct
  REGION 1..7: note = Description of Artificial Sequence: Synthetic peptide
GQTGSKT

SEQ ID NO: 4287 - protein, 7 aa, synthetic construct
  REGION 1..7: note = Description of Artificial Sequence: Synthetic peptide
GGSKGSQ

SEQ ID NO: 4288 - protein, 7 aa, synthetic construct
  REGION 1..7: note = Description of Artificial Sequence: Synthetic peptide
SQSAPNK

SEQ ID NO: 4289 - protein, 7 aa, synthetic construct
  REGION 1..7: note = Description of Artificial Sequence: Synthetic peptide
SVEGTRV

SEQ ID NO: 4290 - protein, 7 aa, synthetic construct
  REGION 1..7: note = Description of Artificial Sequence: Synthetic peptide
QSGSQGN

SEQ ID NO: 4291 - protein, 7 aa, synthetic construct
  REGION 1..7: note = Description of Artificial Sequence: Synthetic peptide
GTDRPSV

SEQ ID NO: 4292 - protein, 7 aa, synthetic construct
  REGION 1..7: note = Description of Artificial Sequence: Synthetic peptide
NASAGSG

SEQ ID NO: 4293 - protein, 7 aa, synthetic construct
  REGION 1..7: note = Description of Artificial Sequence: Synthetic peptide
GGSKALE

SEQ ID NO: 4294 - protein, 7 aa, synthetic construct
  REGION 1..7: note = Description of Artificial Sequence: Synthetic peptide
DGKQPGV

SEQ ID NO: 4295 - protein, 7 aa, synthetic construct
  REGION 1..7: note = Description of Artificial Sequence: Synthetic peptide
SGTTSNL

SEQ ID NO: 4296 - protein, 7 aa, synthetic construct
  REGION 1..7: note = Description of Artificial Sequence: Synthetic peptide
ESRATST

SEQ ID NO: 4297 - protein, 7 aa, synthetic construct
  REGION 1..7: note = Description of Artificial Sequence: Synthetic peptide
SAGATQA

SEQ ID NO: 4298 - protein, 7 aa, synthetic construct
  REGION 1..7: note = Description of Artificial Sequence: Synthetic peptide
HSAAATT

SEQ ID NO: 4299 - protein, 7 aa, synthetic construct
  REGION 1..7: note = Description of Artificial Sequence: Synthetic peptide
ATSQGAT

SEQ ID NO: 4300 - protein, 7 aa, synthetic construct
  REGION 1..7: note = Description of Artificial Sequence: Synthetic peptide
SHKSSNE

SEQ ID NO: 4301 - protein, 7 aa, synthetic construct
  REGION 1..7: note = Description of Artificial Sequence: Synthetic peptide
MQSASSG

SEQ ID NO: 4302 - protein, 7 aa, synthetic construct
  REGION 1..7: note = Description of Artificial Sequence: Synthetic peptide
LGGGNST

SEQ ID NO: 4303 - protein, 7 aa, synthetic construct
  REGION 1..7: note = Description of Artificial Sequence: Synthetic peptide
SGKDSLA

SEQ ID NO: 4304 - protein, 7 aa, synthetic construct
  REGION 1..7: note = Description of Artificial Sequence: Synthetic peptide
TQSTSSA

SEQ ID NO: 4305 - protein, 7 aa, synthetic construct
  REGION 1..7: note = Description of Artificial Sequence: Synthetic peptide
HTGSQSG

SEQ ID NO: 4306 - protein, 7 aa, synthetic construct
  REGION 1..7: note = Description of Artificial Sequence: Synthetic peptide
VTTNSNA

SEQ ID NO: 4307 - protein, 7 aa, synthetic construct
  REGION 1..7: note = Description of Artificial Sequence: Synthetic peptide
SHEASPH

SEQ ID NO: 4308 - protein, 7 aa, synthetic construct
  REGION 1..7: note = Description of Artificial Sequence: Synthetic peptide
NQKQSPS

SEQ ID NO: 4309 - protein, 7 aa, synthetic construct
  REGION 1..7: note = Description of Artificial Sequence: Synthetic peptide
TSGTSSR

SEQ ID NO: 4310 - protein, 7 aa, synthetic construct
  REGION 1..7: note = Description of Artificial Sequence: Synthetic peptide
QHTNQNS

SEQ ID NO: 4311 - protein, 7 aa, synthetic construct
  REGION 1..7: note = Description of Artificial Sequence: Synthetic peptide
GTASSAS

SEQ ID NO: 4312 - protein, 7 aa, synthetic construct
  REGION 1..7: note = Description of Artificial Sequence: Synthetic peptide
GTEPQPK

SEQ ID NO: 4313 - protein, 7 aa, synthetic construct
  REGION 1..7: note = Description of Artificial Sequence: Synthetic peptide
NGERSSG

SEQ ID NO: 4314 - protein, 7 aa, synthetic construct
  REGION 1..7: note = Description of Artificial Sequence: Synthetic peptide
MTTNSKE

SEQ ID NO: 4315 - protein, 7 aa, synthetic construct
  REGION 1..7: note = Description of Artificial Sequence: Synthetic peptide
QTGGHSR

SEQ ID NO: 4316 - protein, 7 aa, synthetic construct
  REGION 1..7: note = Description of Artificial Sequence: Synthetic peptide
ELSSKAG

SEQ ID NO: 4317 - protein, 7 aa, synthetic construct
  REGION 1..7: note = Description of Artificial Sequence: Synthetic peptide
ADSKSSH

SEQ ID NO: 4318 - protein, 7 aa, synthetic construct
  REGION 1..7: note = Description of Artificial Sequence: Synthetic peptide
GLSRNTG

SEQ ID NO: 4319 - protein, 7 aa, synthetic construct
  REGION 1..7: note = Description of Artificial Sequence: Synthetic peptide
LNNGSNT

SEQ ID NO: 4320 - protein, 7 aa, synthetic construct
  REGION 1..7: note = Description of Artificial Sequence: Synthetic peptide
VSGNSSH

SEQ ID NO: 4321 - protein, 7 aa, synthetic construct
  REGION 1..7: note = Description of Artificial Sequence: Synthetic peptide
SGVATST

SEQ ID NO: 4322 - protein, 7 aa, synthetic construct
  REGION 1..7: note = Description of Artificial Sequence: Synthetic peptide
SSSKEAS

SEQ ID NO: 4323 - protein, 7 aa, synthetic construct
  REGION 1..7: note = Description of Artificial Sequence: Synthetic peptide
SPQSDTK

SEQ ID NO: 4324 - protein, 7 aa, synthetic construct
  REGION 1..7: note = Description of Artificial Sequence: Synthetic peptide
SGGSERA

SEQ ID NO: 4325 - protein, 7 aa, synthetic construct
  REGION 1..7: note = Description of Artificial Sequence: Synthetic peptide
MGSDHVR

SEQ ID NO: 4326 - protein, 7 aa, synthetic construct
  REGION 1..7: note = Description of Artificial Sequence: Synthetic peptide
APSAERG

SEQ ID NO: 4327 - protein, 7 aa, synthetic construct
  REGION 1..7: note = Description of Artificial Sequence: Synthetic peptide
RNGGANM

SEQ ID NO: 4328 - protein, 7 aa, synthetic construct
  REGION 1..7: note = Description of Artificial Sequence: Synthetic peptide
RADGDAK

SEQ ID NO: 4329 - protein, 7 aa, synthetic construct
  REGION 1..7: note = Description of Artificial Sequence: Synthetic peptide
TNDSKMA

SEQ ID NO: 4330 - protein, 7 aa, synthetic construct
  REGION 1..7: note = Description of Artificial Sequence: Synthetic peptide
DRIEKSS

SEQ ID NO: 4331 - protein, 7 aa, synthetic construct
  REGION 1..7: note = Description of Artificial Sequence: Synthetic peptide
GVDSPNR

SEQ ID NO: 4332 - protein, 7 aa, synthetic construct
  REGION 1..7: note = Description of Artificial Sequence: Synthetic peptide
SVTSSPH

SEQ ID NO: 4333 - protein, 7 aa, synthetic construct
  REGION 1..7: note = Description of Artificial Sequence: Synthetic peptide
RQDSPAQ

SEQ ID NO: 4334 - protein, 7 aa, synthetic construct
  REGION 1..7: note = Description of Artificial Sequence: Synthetic peptide
SSNGKSA

SEQ ID NO: 4335 - protein, 7 aa, synthetic construct
  REGION 1..7: note = Description of Artificial Sequence: Synthetic peptide
NSAGQSH

SEQ ID NO: 4336 - protein, 7 aa, synthetic construct
  REGION 1..7: note = Description of Artificial Sequence: Synthetic peptide
GSHDKST

SEQ ID NO: 4337 - protein, 7 aa, synthetic construct
  REGION 1..7: note = Description of Artificial Sequence: Synthetic peptide
GEVGQSR

SEQ ID NO: 4338 - protein, 7 aa, synthetic construct
  REGION 1..7: note = Description of Artificial Sequence: Synthetic peptide
MGSKESG

SEQ ID NO: 4339 - protein, 7 aa, synthetic construct
  REGION 1..7: note = Description of Artificial Sequence: Synthetic peptide
SALKNQG

SEQ ID NO: 4340 - protein, 7 aa, synthetic construct
  REGION 1..7: note = Description of Artificial Sequence: Synthetic peptide
TTQSTSI

SEQ ID NO: 4341 - protein, 7 aa, synthetic construct
  REGION 1..7: note = Description of Artificial Sequence: Synthetic peptide
SSGGATT

SEQ ID NO: 4342 - protein, 7 aa, synthetic construct
  REGION 1..7: note = Description of Artificial Sequence: Synthetic peptide
SDDKSRM

SEQ ID NO: 4343 - protein, 7 aa, synthetic construct
  REGION 1..7: note = Description of Artificial Sequence: Synthetic peptide
GSTLGSG

SEQ ID NO: 4344 - protein, 7 aa, synthetic construct
  REGION 1..7: note = Description of Artificial Sequence: Synthetic peptide
TGGPGNG

SEQ ID NO: 4345 - protein, 7 aa, synthetic construct
  REGION 1..7: note = Description of Artificial Sequence: Synthetic peptide
NTNHKEG

SEQ ID NO: 4346 - protein, 7 aa, synthetic construct
  REGION 1..7: note = Description of Artificial Sequence: Synthetic peptide
SQNSGKV

SEQ ID NO: 4347 - protein, 7 aa, synthetic construct
  REGION 1..7: note = Description of Artificial Sequence: Synthetic peptide
EGRGTPG

SEQ ID NO: 4348 - protein, 7 aa, synthetic construct
  REGION 1..7: note = Description of Artificial Sequence: Synthetic peptide
STHKPLE

SEQ ID NO: 4349 - protein, 7 aa, synthetic construct
  REGION 1..7: note = Description of Artificial Sequence: Synthetic peptide
GPGSNLT

SEQ ID NO: 4350 - protein, 7 aa, synthetic construct
  REGION 1..7: note = Description of Artificial Sequence: Synthetic peptide
DLDSRKS

SEQ ID NO: 4351 - protein, 7 aa, synthetic construct
  REGION 1..7: note = Description of Artificial Sequence: Synthetic peptide
VTTTGSS

SEQ ID NO: 4352 - protein, 7 aa, synthetic construct
  REGION 1..7: note = Description of Artificial Sequence: Synthetic peptide
LGTTSGG

SEQ ID NO: 4353 - protein, 7 aa, synthetic construct
  REGION 1..7: note = Description of Artificial Sequence: Synthetic peptide
SNSSKSG

SEQ ID NO: 4354 - protein, 7 aa, synthetic construct
  REGION 1..7: note = Description of Artificial Sequence: Synthetic peptide
TGSGSHG

SEQ ID NO: 4355 - protein, 7 aa, synthetic construct
  REGION 1..7: note = Description of Artificial Sequence: Synthetic peptide
QLSKESS

SEQ ID NO: 4356 - protein, 7 aa, synthetic construct
  REGION 1..7: note = Description of Artificial Sequence: Synthetic peptide
SGGTPSS

SEQ ID NO: 4357 - protein, 7 aa, synthetic construct
  REGION 1..7: note = Description of Artificial Sequence: Synthetic peptide
DTGTPKH

SEQ ID NO: 4358 - protein, 7 aa, synthetic construct
  REGION 1..7: note = Description of Artificial Sequence: Synthetic peptide
TKTGSPM

SEQ ID NO: 4359 - protein, 7 aa, synthetic construct
  REGION 1..7: note = Description of Artificial Sequence: Synthetic peptide
GTTATDR

SEQ ID NO: 4360 - protein, 7 aa, synthetic construct
  REGION 1..7: note = Description of Artificial Sequence: Synthetic peptide
HNTAPTS

SEQ ID NO: 4361 - protein, 7 aa, synthetic construct
  REGION 1..7: note = Description of Artificial Sequence: Synthetic peptide
RGGSASD

SEQ ID NO: 4362 - protein, 7 aa, synthetic construct
  REGION 1..7: note = Description of Artificial Sequence: Synthetic peptide
EAANQGK

SEQ ID NO: 4363 - protein, 7 aa, synthetic construct
  REGION 1..7: note = Description of Artificial Sequence: Synthetic peptide
TRTATAA

SEQ ID NO: 4364 - protein, 7 aa, synthetic construct
  REGION 1..7: note = Description of Artificial Sequence: Synthetic peptide
HNNSATK

SEQ ID NO: 4365 - protein, 7 aa, synthetic construct
  REGION 1..7: note = Description of Artificial Sequence: Synthetic peptide
GSEDKHK

SEQ ID NO: 4366 - protein, 7 aa, synthetic construct
  REGION 1..7: note = Description of Artificial Sequence: Synthetic peptide
GQSKGNS

SEQ ID NO: 4367 - protein, 7 aa, synthetic construct
  REGION 1..7: note = Description of Artificial Sequence: Synthetic peptide
GHGDIKG

SEQ ID NO: 4368 - protein, 7 aa, synthetic construct
  REGION 1..7: note = Description of Artificial Sequence: Synthetic peptide
NASSATS

SEQ ID NO: 4369 - protein, 7 aa, synthetic construct
  REGION 1..7: note = Description of Artificial Sequence: Synthetic peptide
TTSDKST

SEQ ID NO: 4370 - protein, 7 aa, synthetic construct
  REGION 1..7: note = Description of Artificial Sequence: Synthetic peptide
SANAGGG

SEQ ID NO: 4371 - protein, 7 aa, synthetic construct
  REGION 1..7: note = Description of Artificial Sequence: Synthetic peptide
DGITTPK

SEQ ID NO: 4372 - protein, 7 aa, synthetic construct
  REGION 1..7: note = Description of Artificial Sequence: Synthetic peptide
NNSKASA

SEQ ID NO: 4373 - protein, 7 aa, synthetic construct
  REGION 1..7: note = Description of Artificial Sequence: Synthetic peptide
GHSGTTS

SEQ ID NO: 4374 - protein, 7 aa, synthetic construct
  REGION 1..7: note = Description of Artificial Sequence: Synthetic peptide
SGGSTAQ

SEQ ID NO: 4375 - protein, 7 aa, synthetic construct
  REGION 1..7: note = Description of Artificial Sequence: Synthetic peptide
SGAASSG

SEQ ID NO: 4376 - protein, 7 aa, synthetic construct
  REGION 1..7: note = Description of Artificial Sequence: Synthetic peptide
LVADGSK

SEQ ID NO: 4377 - protein, 7 aa, synthetic construct
  REGION 1..7: note = Description of Artificial Sequence: Synthetic peptide
NDGKTLA

SEQ ID NO: 4378 - protein, 7 aa, synthetic construct
  REGION 1..7: note = Description of Artificial Sequence: Synthetic peptide
MGTPNSK

SEQ ID NO: 4379 - protein, 7 aa, synthetic construct
  REGION 1..7: note = Description of Artificial Sequence: Synthetic peptide
NQASSNH

SEQ ID NO: 4380 - protein, 7 aa, synthetic construct
  REGION 1..7: note = Description of Artificial Sequence: Synthetic peptide
SQSGAGG

SEQ ID NO: 4381 - protein, 7 aa, synthetic construct
  REGION 1..7: note = Description of Artificial Sequence: Synthetic peptide
ITSSSPT

SEQ ID NO: 4382 - protein, 7 aa, synthetic construct
  REGION 1..7: note = Description of Artificial Sequence: Synthetic peptide
TNSPNGA

SEQ ID NO: 4383 - protein, 7 aa, synthetic construct
  REGION 1..7: note = Description of Artificial Sequence: Synthetic peptide
SGPTDKS

SEQ ID NO: 4384 - protein, 7 aa, synthetic construct
  REGION 1..7: note = Description of Artificial Sequence: Synthetic peptide
TSTTKTG

SEQ ID NO: 4385 - protein, 7 aa, synthetic construct
  REGION 1..7: note = Description of Artificial Sequence: Synthetic peptide
SSEQASR

SEQ ID NO: 4386 - protein, 7 aa, synthetic construct
  REGION 1..7: note = Description of Artificial Sequence: Synthetic peptide
MPNNNAG

SEQ ID NO: 4387 - protein, 7 aa, synthetic construct
  REGION 1..7: note = Description of Artificial Sequence: Synthetic peptide
HTGGHAT

SEQ ID NO: 4388 - protein, 7 aa, synthetic construct
  REGION 1..7: note = Description of Artificial Sequence: Synthetic peptide
ALPDSKA

SEQ ID NO: 4389 - protein, 7 aa, synthetic construct
  REGION 1..7: note = Description of Artificial Sequence: Synthetic peptide
ASGGKVI

SEQ ID NO: 4390 - protein, 7 aa, synthetic construct
  REGION 1..7: note = Description of Artificial Sequence: Synthetic peptide
GTSPHAG

SEQ ID NO: 4391 - protein, 7 aa, synthetic construct
  REGION 1..7: note = Description of Artificial Sequence: Synthetic peptide
GSQKTAG

SEQ ID NO: 4392 - protein, 7 aa, synthetic construct
  REGION 1..7: note = Description of Artificial Sequence: Synthetic peptide
GPTNSRA

SEQ ID NO: 4393 - protein, 7 aa, synthetic construct
  REGION 1..7: note = Description of Artificial Sequence: Synthetic peptide
GKDGVVK

SEQ ID NO: 4394 - protein, 7 aa, synthetic construct
  REGION 1..7: note = Description of Artificial Sequence: Synthetic peptide
VTNNPTV

SEQ ID NO: 4395 - protein, 7 aa, synthetic construct
  REGION 1..7: note = Description of Artificial Sequence: Synthetic peptide
SGQTSKQ

SEQ ID NO: 4396 - protein, 7 aa, synthetic construct
  REGION 1..7: note = Description of Artificial Sequence: Synthetic peptide
SSNNTTS

SEQ ID NO: 4397 - protein, 7 aa, synthetic construct
  REGION 1..7: note = Description of Artificial Sequence: Synthetic peptide
LASQGNS

SEQ ID NO: 4398 - protein, 7 aa, synthetic construct
  REGION 1..7: note = Description of Artificial Sequence: Synthetic peptide
RQEQNSV

SEQ ID NO: 4399 - protein, 7 aa, synthetic construct
  REGION 1..7: note = Description of Artificial Sequence: Synthetic peptide
DGSTAGR

SEQ ID NO: 4400 - protein, 7 aa, synthetic construct
  REGION 1..7: note = Description of Artificial Sequence: Synthetic peptide
TGGQGAN

SEQ ID NO: 4401 - protein, 7 aa, synthetic construct
  REGION 1..7: note = Description of Artificial Sequence: Synthetic peptide
HQATKSG

SEQ ID NO: 4402 - protein, 7 aa, synthetic construct
  REGION 1..7: note = Description of Artificial Sequence: Synthetic peptide
REGSSSA

SEQ ID NO: 4403 - protein, 7 aa, synthetic construct
  REGION 1..7: note = Description of Artificial Sequence: Synthetic peptide
ETGSNSR

SEQ ID NO: 4404 - protein, 7 aa, synthetic construct
  REGION 1..7: note = Description of Artificial Sequence: Synthetic peptide
GVTEPRK

SEQ ID NO: 4405 - protein, 7 aa, synthetic construct
  REGION 1..7: note = Description of Artificial Sequence: Synthetic peptide
GIGAKGT

SEQ ID NO: 4406 - protein, 7 aa, synthetic construct
  REGION 1..7: note = Description of Artificial Sequence: Synthetic peptide
TQQSSNT

SEQ ID NO: 4407 - protein, 7 aa, synthetic construct
  REGION 1..7: note = Description of Artificial Sequence: Synthetic peptide
NAENKAV

SEQ ID NO: 4408 - protein, 7 aa, synthetic construct
  REGION 1..7: note = Description of Artificial Sequence: Synthetic peptide
VTTSSSA

SEQ ID NO: 4409 - protein, 7 aa, synthetic construct
  REGION 1..7: note = Description of Artificial Sequence: Synthetic peptide
QSGNELK

SEQ ID NO: 4410 - protein, 7 aa, synthetic construct
  REGION 1..7: note = Description of Artificial Sequence: Synthetic peptide
ETGGKHV

SEQ ID NO: 4411 - protein, 7 aa, synthetic construct
  REGION 1..7: note = Description of Artificial Sequence: Synthetic peptide
ESSRSAP

SEQ ID NO: 4412 - protein, 7 aa, synthetic construct
  REGION 1..7: note = Description of Artificial Sequence: Synthetic peptide
MQKESPA

SEQ ID NO: 4413 - protein, 7 aa, synthetic construct
  REGION 1..7: note = Description of Artificial Sequence: Synthetic peptide
VMGTSSG

SEQ ID NO: 4414 - protein, 7 aa, synthetic construct
  REGION 1..7: note = Description of Artificial Sequence: Synthetic peptide
DGSPTTA

SEQ ID NO: 4415 - protein, 7 aa, synthetic construct
  REGION 1..7: note = Description of Artificial Sequence: Synthetic peptide
GGSGKDQ

SEQ ID NO: 4416 - protein, 7 aa, synthetic construct
  REGION 1..7: note = Description of Artificial Sequence: Synthetic peptide
ASGQKGD

SEQ ID NO: 4417 - protein, 7 aa, synthetic construct
  REGION 1..7: note = Description of Artificial Sequence: Synthetic peptide
SNAAGAS

SEQ ID NO: 4418 - protein, 7 aa, synthetic construct
  REGION 1..7: note = Description of Artificial Sequence: Synthetic peptide
GEIAAKG

SEQ ID NO: 4419 - protein, 7 aa, synthetic construct
  REGION 1..7: note = Description of Artificial Sequence: Synthetic peptide
TNTETTR

SEQ ID NO: 4420 - protein, 7 aa, synthetic construct
  REGION 1..7: note = Description of Artificial Sequence: Synthetic peptide
QSTSTVG

SEQ ID NO: 4421 - protein, 7 aa, synthetic construct
  REGION 1..7: note = Description of Artificial Sequence: Synthetic peptide
TTAGNGS

SEQ ID NO: 4422 - protein, 7 aa, synthetic construct
  REGION 1..7: note = Description of Artificial Sequence: Synthetic peptide
TRDSSSH

SEQ ID NO: 4423 - protein, 7 aa, synthetic construct
  REGION 1..7: note = Description of Artificial Sequence: Synthetic peptide
TGGEVPR

SEQ ID NO: 4424 - protein, 7 aa, synthetic construct
  REGION 1..7: note = Description of Artificial Sequence: Synthetic peptide
SATNKAS

SEQ ID NO: 4425 - protein, 7 aa, synthetic construct
  REGION 1..7: note = Description of Artificial Sequence: Synthetic peptide
GSSGTPG

SEQ ID NO: 4426 - protein, 7 aa, synthetic construct
  REGION 1..7: note = Description of Artificial Sequence: Synthetic peptide
TAGSQKN

SEQ ID NO: 4427 - protein, 7 aa, synthetic construct
  REGION 1..7: note = Description of Artificial Sequence: Synthetic peptide
DPGTSNR

SEQ ID NO: 4428 - protein, 7 aa, synthetic construct
  REGION 1..7: note = Description of Artificial Sequence: Synthetic peptide
QGAQSLG

SEQ ID NO: 4429 - protein, 7 aa, synthetic construct
  REGION 1..7: note = Description of Artificial Sequence: Synthetic peptide
QNRSPSE

SEQ ID NO: 4430 - protein, 7 aa, synthetic construct
  REGION 1..7: note = Description of Artificial Sequence: Synthetic peptide
DMSPPKQ

SEQ ID NO: 4431 - protein, 7 aa, synthetic construct
  REGION 1..7: note = Description of Artificial Sequence: Synthetic peptide
TGSTSSM

SEQ ID NO: 4432 - protein, 7 aa, synthetic construct
  REGION 1..7: note = Description of Artificial Sequence: Synthetic peptide
GEASPVR

SEQ ID NO: 4433 - protein, 7 aa, synthetic construct
  REGION 1..7: note = Description of Artificial Sequence: Synthetic peptide
DSVANNR

SEQ ID NO: 4434 - protein, 7 aa, synthetic construct
  REGION 1..7: note = Description of Artificial Sequence: Synthetic peptide
VPSSSNV

SEQ ID NO: 4435 - protein, 7 aa, synthetic construct
  REGION 1..7: note = Description of Artificial Sequence: Synthetic peptide
TGSKTVE

SEQ ID NO: 4436 - protein, 7 aa, synthetic construct
  REGION 1..7: note = Description of Artificial Sequence: Synthetic peptide
QIDSKKG

SEQ ID NO: 4437 - protein, 7 aa, synthetic construct
  REGION 1..7: note = Description of Artificial Sequence: Synthetic peptide
LNGAPGS

SEQ ID NO: 4438 - protein, 7 aa, synthetic construct
  REGION 1..7: note = Description of Artificial Sequence: Synthetic peptide
GTSRESG

SEQ ID NO: 4439 - protein, 7 aa, synthetic construct
  REGION 1..7: note = Description of Artificial Sequence: Synthetic peptide
VGASPER

SEQ ID NO: 4440 - protein, 7 aa, synthetic construct
  REGION 1..7: note = Description of Artificial Sequence: Synthetic peptide
ANGAPTT

SEQ ID NO: 4441 - protein, 7 aa, synthetic construct
  REGION 1..7: note = Description of Artificial Sequence: Synthetic peptide
TRNSGAT

SEQ ID NO: 4442 - protein, 7 aa, synthetic construct
  REGION 1..7: note = Description of Artificial Sequence: Synthetic peptide
STSTKSS

SEQ ID NO: 4443 - protein, 7 aa, synthetic construct
  REGION 1..7: note = Description of Artificial Sequence: Synthetic peptide
GAHSTEK

SEQ ID NO: 4444 - protein, 7 aa, synthetic construct
  REGION 1..7: note = Description of Artificial Sequence: Synthetic peptide
NGVSGKS

SEQ ID NO: 4445 - protein, 7 aa, synthetic construct
  REGION 1..7: note = Description of Artificial Sequence: Synthetic peptide
DSTTTGK

SEQ ID NO: 4446 - protein, 7 aa, synthetic construct
  REGION 1..7: note = Description of Artificial Sequence: Synthetic peptide
SNGANKL

SEQ ID NO: 4447 - protein, 7 aa, synthetic construct
  REGION 1..7: note = Description of Artificial Sequence: Synthetic peptide
ASDKASR

SEQ ID NO: 4448 - protein, 7 aa, synthetic construct
  REGION 1..7: note = Description of Artificial Sequence: Synthetic peptide
SVSQPTS

SEQ ID NO: 4449 - protein, 7 aa, synthetic construct
  REGION 1..7: note = Description of Artificial Sequence: Synthetic peptide
VGGNGQA

SEQ ID NO: 4450 - protein, 7 aa, synthetic construct
  REGION 1..7: note = Description of Artificial Sequence: Synthetic peptide
NSATAKA

SEQ ID NO: 4451 - protein, 7 aa, synthetic construct
  REGION 1..7: note = Description of Artificial Sequence: Synthetic peptide
DLSSKSI

SEQ ID NO: 4452 - protein, 7 aa, synthetic construct
  REGION 1..7: note = Description of Artificial Sequence: Synthetic peptide
ASASPNQ

SEQ ID NO: 4453 - protein, 7 aa, synthetic construct
  REGION 1..7: note = Description of Artificial Sequence: Synthetic peptide
ESGTTGR

SEQ ID NO: 4454 - protein, 7 aa, synthetic construct
  REGION 1..7: note = Description of Artificial Sequence: Synthetic peptide
TSTSAPV

SEQ ID NO: 4455 - protein, 7 aa, synthetic construct
  REGION 1..7: note = Description of Artificial Sequence: Synthetic peptide
NNGASSS

SEQ ID NO: 4456 - protein, 7 aa, synthetic construct
  REGION 1..7: note = Description of Artificial Sequence: Synthetic peptide
GGGQQPS

SEQ ID NO: 4457 - protein, 7 aa, synthetic construct
  REGION 1..7: note = Description of Artificial Sequence: Synthetic peptide
GKDNGVS

SEQ ID NO: 4458 - protein, 7 aa, synthetic construct
  REGION 1..7: note = Description of Artificial Sequence: Synthetic peptide
DRQTPTL

SEQ ID NO: 4459 - protein, 7 aa, synthetic construct
  REGION 1..7: note = Description of Artificial Sequence: Synthetic peptide
TRENKTE

SEQ ID NO: 4460 - protein, 7 aa, synthetic construct
  REGION 1..7: note = Description of Artificial Sequence: Synthetic peptide
TAGSTVH

SEQ ID NO: 4461 - protein, 7 aa, synthetic construct
  REGION 1..7: note = Description of Artificial Sequence: Synthetic peptide
SGSSTVA

SEQ ID NO: 4462 - protein, 7 aa, synthetic construct
  REGION 1..7: note = Description of Artificial Sequence: Synthetic peptide
SASQTSH

SEQ ID NO: 4463 - protein, 7 aa, synthetic construct
  REGION 1..7: note = Description of Artificial Sequence: Synthetic peptide
NSESSKG

SEQ ID NO: 4464 - protein, 7 aa, synthetic construct
  REGION 1..7: note = Description of Artificial Sequence: Synthetic peptide
GRTNAEA

SEQ ID NO: 4465 - protein, 7 aa, synthetic construct
  REGION 1..7: note = Description of Artificial Sequence: Synthetic peptide
QQSSNNV

SEQ ID NO: 4466 - protein, 7 aa, synthetic construct
  REGION 1..7: note = Description of Artificial Sequence: Synthetic peptide
QASGSPA

SEQ ID NO: 4467 - protein, 7 aa, synthetic construct
  REGION 1..7: note = Description of Artificial Sequence: Synthetic peptide
TSGGSSL

SEQ ID NO: 4468 - protein, 7 aa, synthetic construct
  REGION 1..7: note = Description of Artificial Sequence: Synthetic peptide
NNSTHPG

SEQ ID NO: 4469 - protein, 7 aa, synthetic construct
  REGION 1..7: note = Description of Artificial Sequence: Synthetic peptide
NGNSPAM

SEQ ID NO: 4470 - protein, 7 aa, synthetic construct
  REGION 1..7: note = Description of Artificial Sequence: Synthetic peptide
NGGVASS

SEQ ID NO: 4471 - protein, 7 aa, synthetic construct
  REGION 1..7: note = Description of Artificial Sequence: Synthetic peptide
TSSTSTG

SEQ ID NO: 4472 - protein, 7 aa, synthetic construct
  REGION 1..7: note = Description of Artificial Sequence: Synthetic peptide
SRTKESV

SEQ ID NO: 4473 - protein, 7 aa, synthetic construct
  REGION 1..7: note = Description of Artificial Sequence: Synthetic peptide
DSPGTLK

SEQ ID NO: 4474 - protein, 7 aa, synthetic construct
  REGION 1..7: note = Description of Artificial Sequence: Synthetic peptide
AGTGQVQ

SEQ ID NO: 4475 - protein, 7 aa, synthetic construct
  REGION 1..7: note = Description of Artificial Sequence: Synthetic peptide
AGHGSQA

SEQ ID NO: 4476 - protein, 7 aa, synthetic construct
  REGION 1..7: note = Description of Artificial Sequence: Synthetic peptide
GVESSPR

SEQ ID NO: 4477 - protein, 7 aa, synthetic construct
  REGION 1..7: note = Description of Artificial Sequence: Synthetic peptide
GVGTVTG

SEQ ID NO: 4478 - protein, 7 aa, synthetic construct
  REGION 1..7: note = Description of Artificial Sequence: Synthetic peptide
GAHKDDG

SEQ ID NO: 4479 - protein, 7 aa, synthetic construct
  REGION 1..7: note = Description of Artificial Sequence: Synthetic peptide
GSGQSHA

SEQ ID NO: 4480 - protein, 7 aa, synthetic construct
  REGION 1..7: note = Description of Artificial Sequence: Synthetic peptide
KSDGQQA

SEQ ID NO: 4481 - protein, 7 aa, synthetic construct
  REGION 1..7: note = Description of Artificial Sequence: Synthetic peptide
EATGSRL

SEQ ID NO: 4482 - protein, 7 aa, synthetic construct
  REGION 1..7: note = Description of Artificial Sequence: Synthetic peptide
ASDSKHG

SEQ ID NO: 4483 - protein, 7 aa, synthetic construct
  REGION 1..7: note = Description of Artificial Sequence: Synthetic peptide
SNSSSTS

SEQ ID NO: 4484 - protein, 7 aa, synthetic construct
  REGION 1..7: note = Description of Artificial Sequence: Synthetic peptide
AKNTTSS

SEQ ID NO: 4485 - protein, 7 aa, synthetic construct
  REGION 1..7: note = Description of Artificial Sequence: Synthetic peptide
MNSPSSL

SEQ ID NO: 4486 - protein, 7 aa, synthetic construct
  REGION 1..7: note = Description of Artificial Sequence: Synthetic peptide
TVANTPS

SEQ ID NO: 4487 - protein, 7 aa, synthetic construct
  REGION 1..7: note = Description of Artificial Sequence: Synthetic peptide
TGAQNKD

SEQ ID NO: 4488 - protein, 7 aa, synthetic construct
  REGION 1..7: note = Description of Artificial Sequence: Synthetic peptide
GPQPKDG

SEQ ID NO: 4489 - protein, 7 aa, synthetic construct
  REGION 1..7: note = Description of Artificial Sequence: Synthetic peptide
GETSGKN

SEQ ID NO: 4490 - protein, 7 aa, synthetic construct
  REGION 1..7: note = Description of Artificial Sequence: Synthetic peptide
MAESGKS

SEQ ID NO: 4491 - protein, 7 aa, synthetic construct
  REGION 1..7: note = Description of Artificial Sequence: Synthetic peptide
TGASSSV

SEQ ID NO: 4492 - protein, 7 aa, synthetic construct
  REGION 1..7: note = Description of Artificial Sequence: Synthetic peptide
RTNTTSV

SEQ ID NO: 4493 - protein, 7 aa, synthetic construct
  REGION 1..7: note = Description of Artificial Sequence: Synthetic peptide
AGSETGK

SEQ ID NO: 4494 - protein, 7 aa, synthetic construct
  REGION 1..7: note = Description of Artificial Sequence: Synthetic peptide
GNREVNK

SEQ ID NO: 4495 - protein, 7 aa, synthetic construct
  REGION 1..7: note = Description of Artificial Sequence: Synthetic peptide
SGSGSSG

SEQ ID NO: 4496 - protein, 7 aa, synthetic construct
  REGION 1..7: note = Description of Artificial Sequence: Synthetic peptide
REGQVAT

SEQ ID NO: 4497 - protein, 7 aa, synthetic construct
  REGION 1..7: note = Description of Artificial Sequence: Synthetic peptide
GMSNSPS

SEQ ID NO: 4498 - protein, 7 aa, synthetic construct
  REGION 1..7: note = Description of Artificial Sequence: Synthetic peptide
QEPKPLN

SEQ ID NO: 4499 - protein, 7 aa, synthetic construct
  REGION 1..7: note = Description of Artificial Sequence: Synthetic peptide
GADASKL

SEQ ID NO: 4500 - protein, 7 aa, synthetic construct
  REGION 1..7: note = Description of Artificial Sequence: Synthetic peptide
QSSDRSV

SEQ ID NO: 4501 - protein, 7 aa, synthetic construct
  REGION 1..7: note = Description of Artificial Sequence: Synthetic peptide
GSSPGVH

SEQ ID NO: 4502 - protein, 7 aa, synthetic construct
  REGION 1..7: note = Description of Artificial Sequence: Synthetic peptide
SGTPSSL

SEQ ID NO: 4503 - protein, 7 aa, synthetic construct
  REGION 1..7: note = Description of Artificial Sequence: Synthetic peptide
SSSKEVA

SEQ ID NO: 4504 - protein, 7 aa, synthetic construct
  REGION 1..7: note = Description of Artificial Sequence: Synthetic peptide
GRGSPKD

SEQ ID NO: 4505 - protein, 7 aa, synthetic construct
  REGION 1..7: note = Description of Artificial Sequence: Synthetic peptide
SNSSTPT

SEQ ID NO: 4506 - protein, 7 aa, synthetic construct
  REGION 1..7: note = Description of Artificial Sequence: Synthetic peptide
LSGTPST

SEQ ID NO: 4507 - protein, 7 aa, synthetic construct
  REGION 1..7: note = Description of Artificial Sequence: Synthetic peptide
TGNSNQQ

SEQ ID NO: 4508 - protein, 7 aa, synthetic construct
  REGION 1..7: note = Description of Artificial Sequence: Synthetic peptide
VSDGKNL

SEQ ID NO: 4509 - protein, 7 aa, synthetic construct
  REGION 1..7: note = Description of Artificial Sequence: Synthetic peptide
SQQSTPH

SEQ ID NO: 4510 - protein, 7 aa, synthetic construct
  REGION 1..7: note = Description of Artificial Sequence: Synthetic peptide
GSGPSAT

SEQ ID NO: 4511 - protein, 7 aa, synthetic construct
  REGION 1..7: note = Description of Artificial Sequence: Synthetic peptide
GTGPTPP

SEQ ID NO: 4512 - protein, 7 aa, synthetic construct
  REGION 1..7: note = Description of Artificial Sequence: Synthetic peptide
QTGNGGN

SEQ ID NO: 4513 - protein, 7 aa, synthetic construct
  REGION 1..7: note = Description of Artificial Sequence: Synthetic peptide
NAGGSNR

SEQ ID NO: 4514 - protein, 7 aa, synthetic construct
  REGION 1..7: note = Description of Artificial Sequence: Synthetic peptide
DTSKDSK

SEQ ID NO: 4515 - protein, 7 aa, synthetic construct
  REGION 1..7: note = Description of Artificial Sequence: Synthetic peptide
SGSPNGL

SEQ ID NO: 4516 - protein, 7 aa, synthetic construct
  REGION 1..7: note = Description of Artificial Sequence: Synthetic peptide
GTGANHA

SEQ ID NO: 4517 - protein, 7 aa, synthetic construct
  REGION 1..7: note = Description of Artificial Sequence: Synthetic peptide
LGTTKSA

SEQ ID NO: 4518 - protein, 7 aa, synthetic construct
  REGION 1..7: note = Description of Artificial Sequence: Synthetic peptide
STPSATK

SEQ ID NO: 4519 - protein, 7 aa, synthetic construct
  REGION 1..7: note = Description of Artificial Sequence: Synthetic peptide
ELRSSNV

SEQ ID NO: 4520 - protein, 7 aa, synthetic construct
  REGION 1..7: note = Description of Artificial Sequence: Synthetic peptide
KGSGSNG

SEQ ID NO: 4521 - protein, 7 aa, synthetic construct
  REGION 1..7: note = Description of Artificial Sequence: Synthetic peptide
TNSSKAL

SEQ ID NO: 4522 - protein, 7 aa, synthetic construct
  REGION 1..7: note = Description of Artificial Sequence: Synthetic peptide
QKGAGAT

SEQ ID NO: 4523 - protein, 7 aa, synthetic construct
  REGION 1..7: note = Description of Artificial Sequence: Synthetic peptide
SGNDSRT

SEQ ID NO: 4524 - protein, 7 aa, synthetic construct
  REGION 1..7: note = Description of Artificial Sequence: Synthetic peptide
TRNSSTT

SEQ ID NO: 4525 - protein, 7 aa, synthetic construct
  REGION 1..7: note = Description of Artificial Sequence: Synthetic peptide
GSSTSST

SEQ ID NO: 4526 - protein, 7 aa, synthetic construct
  REGION 1..7: note = Description of Artificial Sequence: Synthetic peptide
DSNAKSG

SEQ ID NO: 4527 - protein, 7 aa, synthetic construct
  REGION 1..7: note = Description of Artificial Sequence: Synthetic peptide
VNTGGSN

SEQ ID NO: 4528 - protein, 7 aa, synthetic construct
  REGION 1..7: note = Description of Artificial Sequence: Synthetic peptide
LNQGSVQ

SEQ ID NO: 4529 - protein, 7 aa, synthetic construct
  REGION 1..7: note = Description of Artificial Sequence: Synthetic peptide
ENVNKNN

SEQ ID NO: 4530 - protein, 7 aa, synthetic construct
  REGION 1..7: note = Description of Artificial Sequence: Synthetic peptide
NSNQTQG

SEQ ID NO: 4531 - protein, 7 aa, synthetic construct
  REGION 1..7: note = Description of Artificial Sequence: Synthetic peptide
NASQGHA

SEQ ID NO: 4532 - protein, 7 aa, synthetic construct
  REGION 1..7: note = Description of Artificial Sequence: Synthetic peptide
QTSVSSA

SEQ ID NO: 4533 - protein, 7 aa, synthetic construct
  REGION 1..7: note = Description of Artificial Sequence: Synthetic peptide
GQGATTS

SEQ ID NO: 4534 - protein, 7 aa, synthetic construct
  REGION 1..7: note = Description of Artificial Sequence: Synthetic peptide
THQSSTS

SEQ ID NO: 4535 - protein, 7 aa, synthetic construct
  REGION 1..7: note = Description of Artificial Sequence: Synthetic peptide
TGNGSAS

SEQ ID NO: 4536 - protein, 7 aa, synthetic construct
  REGION 1..7: note = Description of Artificial Sequence: Synthetic peptide
SGPDSKS

SEQ ID NO: 4537 - protein, 7 aa, synthetic construct
  REGION 1..7: note = Description of Artificial Sequence: Synthetic peptide
TGSSSVV

SEQ ID NO: 4538 - protein, 7 aa, synthetic construct
  REGION 1..7: note = Description of Artificial Sequence: Synthetic peptide
STSSKVS

SEQ ID NO: 4539 - protein, 7 aa, synthetic construct
  REGION 1..7: note = Description of Artificial Sequence: Synthetic peptide
NAQTAGG

SEQ ID NO: 4540 - protein, 7 aa, synthetic construct
  REGION 1..7: note = Description of Artificial Sequence: Synthetic peptide
NGSGQQQ

SEQ ID NO: 4541 - protein, 7 aa, synthetic construct
  REGION 1..7: note = Description of Artificial Sequence: Synthetic peptide
TRVPSAG

SEQ ID NO: 4542 - protein, 7 aa, synthetic construct
  REGION 1..7: note = Description of Artificial Sequence: Synthetic peptide
STTTGGG

SEQ ID NO: 4543 - protein, 7 aa, synthetic construct
  REGION 1..7: note = Description of Artificial Sequence: Synthetic peptide
SGEQKQA

SEQ ID NO: 4544 - protein, 7 aa, synthetic construct
  REGION 1..7: note = Description of Artificial Sequence: Synthetic peptide
MKGNTPG

SEQ ID NO: 4545 - protein, 7 aa, synthetic construct
  REGION 1..7: note = Description of Artificial Sequence: Synthetic peptide
HGSGQHQ

SEQ ID NO: 4546 - protein, 7 aa, synthetic construct
  REGION 1..7: note = Description of Artificial Sequence: Synthetic peptide
DRSDHPK

SEQ ID NO: 4547 - protein, 7 aa, synthetic construct
  REGION 1..7: note = Description of Artificial Sequence: Synthetic peptide
DRAGQTF

SEQ ID NO: 4548 - protein, 7 aa, synthetic construct
  REGION 1..7: note = Description of Artificial Sequence: Synthetic peptide
DSRNSSA

SEQ ID NO: 4549 - protein, 7 aa, synthetic construct
  REGION 1..7: note = Description of Artificial Sequence: Synthetic peptide
ESGSHSM

SEQ ID NO: 4550 - protein, 7 aa, synthetic construct
  REGION 1..7: note = Description of Artificial Sequence: Synthetic peptide
ASNSAVK

SEQ ID NO: 4551 - protein, 7 aa, synthetic construct
  REGION 1..7: note = Description of Artificial Sequence: Synthetic peptide
ASERSGT

SEQ ID NO: 4552 - protein, 7 aa, synthetic construct
  REGION 1..7: note = Description of Artificial Sequence: Synthetic peptide
ANGAGST

SEQ ID NO: 4553 - protein, 7 aa, synthetic construct
  REGION 1..7: note = Description of Artificial Sequence: Synthetic peptide
ANVEKPQ

SEQ ID NO: 4554 - protein, 7 aa, synthetic construct
  REGION 1..7: note = Description of Artificial Sequence: Synthetic peptide
GKEGGHG

SEQ ID NO: 4555 - protein, 7 aa, synthetic construct
  REGION 1..7: note = Description of Artificial Sequence: Synthetic peptide
GRTGQPG

SEQ ID NO: 4556 - protein, 7 aa, synthetic construct
  REGION 1..7: note = Description of Artificial Sequence: Synthetic peptide
HGTQQTA

SEQ ID NO: 4557 - protein, 7 aa, synthetic construct
  REGION 1..7: note = Description of Artificial Sequence: Synthetic peptide
TTSSSGS

SEQ ID NO: 4558 - protein, 7 aa, synthetic construct
  REGION 1..7: note = Description of Artificial Sequence: Synthetic peptide
LGVKDTN

SEQ ID NO: 4559 - protein, 7 aa, synthetic construct
  REGION 1..7: note = Description of Artificial Sequence: Synthetic peptide
LGVPDNR

SEQ ID NO: 4560 - protein, 7 aa, synthetic construct
  REGION 1..7: note = Description of Artificial Sequence: Synthetic peptide
TNQTSSH

SEQ ID NO: 4561 - protein, 7 aa, synthetic construct
  REGION 1..7: note = Description of Artificial Sequence: Synthetic peptide
LASDKAA

SEQ ID NO: 4562 - protein, 7 aa, synthetic construct
  REGION 1..7: note = Description of Artificial Sequence: Synthetic peptide
DGTKTTG

SEQ ID NO: 4563 - protein, 7 aa, synthetic construct
  REGION 1..7: note = Description of Artificial Sequence: Synthetic peptide
GPTGSGG

SEQ ID NO: 4564 - protein, 7 aa, synthetic construct
  REGION 1..7: note = Description of Artificial Sequence: Synthetic peptide
GDNAQLK

SEQ ID NO: 4565 - protein, 7 aa, synthetic construct
  REGION 1..7: note = Description of Artificial Sequence: Synthetic peptide
SRSATST

SEQ ID NO: 4566 - protein, 7 aa, synthetic construct
  REGION 1..7: note = Description of Artificial Sequence: Synthetic peptide
QATTSTS

SEQ ID NO: 4567 - protein, 7 aa, synthetic construct
  REGION 1..7: note = Description of Artificial Sequence: Synthetic peptide
STQATGK

SEQ ID NO: 4568 - protein, 7 aa, synthetic construct
  REGION 1..7: note = Description of Artificial Sequence: Synthetic peptide
NSGTKGG

SEQ ID NO: 4569 - protein, 7 aa, synthetic construct
  REGION 1..7: note = Description of Artificial Sequence: Synthetic peptide
NAIEKTK

SEQ ID NO: 4570 - protein, 7 aa, synthetic construct
  REGION 1..7: note = Description of Artificial Sequence: Synthetic peptide
DGKNSLA

SEQ ID NO: 4571 - protein, 7 aa, synthetic construct
  REGION 1..7: note = Description of Artificial Sequence: Synthetic peptide
STTKPND

SEQ ID NO: 4572 - protein, 7 aa, synthetic construct
  REGION 1..7: note = Description of Artificial Sequence: Synthetic peptide
GEKQGTT

SEQ ID NO: 4573 - protein, 7 aa, synthetic construct
  REGION 1..7: note = Description of Artificial Sequence: Synthetic peptide
GVANPSS

SEQ ID NO: 4574 - protein, 7 aa, synthetic construct
  REGION 1..7: note = Description of Artificial Sequence: Synthetic peptide
GTEAHRT

SEQ ID NO: 4575 - protein, 7 aa, synthetic construct
  REGION 1..7: note = Description of Artificial Sequence: Synthetic peptide
TAASTPS

SEQ ID NO: 4576 - protein, 7 aa, synthetic construct
  REGION 1..7: note = Description of Artificial Sequence: Synthetic peptide
QNGASPN

SEQ ID NO: 4577 - protein, 7 aa, synthetic construct
  REGION 1..7: note = Description of Artificial Sequence: Synthetic peptide
VSAASVS

SEQ ID NO: 4578 - protein, 7 aa, synthetic construct
  REGION 1..7: note = Description of Artificial Sequence: Synthetic peptide
GYGSKGE

SEQ ID NO: 4579 - protein, 7 aa, synthetic construct
  REGION 1..7: note = Description of Artificial Sequence: Synthetic peptide
SVSSPSA

SEQ ID NO: 4580 - protein, 7 aa, synthetic construct
  REGION 1..7: note = Description of Artificial Sequence: Synthetic peptide
QGNGHIQ

SEQ ID NO: 4581 - protein, 7 aa, synthetic construct
  REGION 1..7: note = Description of Artificial Sequence: Synthetic peptide
QSAPETK

SEQ ID NO: 4582 - protein, 7 aa, synthetic construct
  REGION 1..7: note = Description of Artificial Sequence: Synthetic peptide
ANTSHSS

SEQ ID NO: 4583 - protein, 7 aa, synthetic construct
  REGION 1..7: note = Description of Artificial Sequence: Synthetic peptide
GGKASSA

SEQ ID NO: 4584 - protein, 7 aa, synthetic construct
  REGION 1..7: note = Description of Artificial Sequence: Synthetic peptide
SRNEGPK

SEQ ID NO: 4585 - protein, 7 aa, synthetic construct
  REGION 1..7: note = Description of Artificial Sequence: Synthetic peptide
SSSQTHT

SEQ ID NO: 4586 - protein, 7 aa, synthetic construct
  REGION 1..7: note = Description of Artificial Sequence: Synthetic peptide
TVGKDPM

SEQ ID NO: 4587 - protein, 7 aa, synthetic construct
  REGION 1..7: note = Description of Artificial Sequence: Synthetic peptide
SRNTQSE

SEQ ID NO: 4588 - protein, 7 aa, synthetic construct
  REGION 1..7: note = Description of Artificial Sequence: Synthetic peptide
SKTQTPA

SEQ ID NO: 4589 - protein, 7 aa, synthetic construct
  REGION 1..7: note = Description of Artificial Sequence: Synthetic peptide
SKGQSTS

SEQ ID NO: 4590 - protein, 7 aa, synthetic construct
  REGION 1..7: note = Description of Artificial Sequence: Synthetic peptide
QGENNVK

SEQ ID NO: 4591 - protein, 7 aa, synthetic construct
  REGION 1..7: note = Description of Artificial Sequence: Synthetic peptide
TSGSTVA

SEQ ID NO: 4592 - protein, 7 aa, synthetic construct
  REGION 1..7: note = Description of Artificial Sequence: Synthetic peptide
SSAAGQG

SEQ ID NO: 4593 - protein, 7 aa, synthetic construct
  REGION 1..7: note = Description of Artificial Sequence: Synthetic peptide
VAGGNSV

SEQ ID NO: 4594 - protein, 7 aa, synthetic construct
  REGION 1..7: note = Description of Artificial Sequence: Synthetic peptide
TDNSGPK

SEQ ID NO: 4595 - protein, 7 aa, synthetic construct
  REGION 1..7: note = Description of Artificial Sequence: Synthetic peptide
VGGSSNA

SEQ ID NO: 4596 - protein, 7 aa, synthetic construct
  REGION 1..7: note = Description of Artificial Sequence: Synthetic peptide
GSQARPL

SEQ ID NO: 4597 - protein, 7 aa, synthetic construct
  REGION 1..7: note = Description of Artificial Sequence: Synthetic peptide
VSGGASP

SEQ ID NO: 4598 - protein, 7 aa, synthetic construct
  REGION 1..7: note = Description of Artificial Sequence: Synthetic peptide
QDGKPSA

SEQ ID NO: 4599 - protein, 7 aa, synthetic construct
  REGION 1..7: note = Description of Artificial Sequence: Synthetic peptide
SGTDTHR

SEQ ID NO: 4600 - protein, 7 aa, synthetic construct
  REGION 1..7: note = Description of Artificial Sequence: Synthetic peptide
AIESKPS

SEQ ID NO: 4601 - protein, 7 aa, synthetic construct
  REGION 1..7: note = Description of Artificial Sequence: Synthetic peptide
SSATAQS

SEQ ID NO: 4602 - protein, 7 aa, synthetic construct
  REGION 1..7: note = Description of Artificial Sequence: Synthetic peptide
AGTSNRV

SEQ ID NO: 4603 - protein, 7 aa, synthetic construct
  REGION 1..7: note = Description of Artificial Sequence: Synthetic peptide
GVNGASR

SEQ ID NO: 4604 - protein, 7 aa, synthetic construct
  REGION 1..7: note = Description of Artificial Sequence: Synthetic peptide
QQPPPGK

SEQ ID NO: 4605 - protein, 7 aa, synthetic construct
  REGION 1..7: note = Description of Artificial Sequence: Synthetic peptide
GTASENR

SEQ ID NO: 4606 - protein, 7 aa, synthetic construct
  REGION 1..7: note = Description of Artificial Sequence: Synthetic peptide
KSGNSNV

SEQ ID NO: 4607 - protein, 7 aa, synthetic construct
  REGION 1..7: note = Description of Artificial Sequence: Synthetic peptide
AGSPSNG

SEQ ID NO: 4608 - protein, 7 aa, synthetic construct
  REGION 1..7: note = Description of Artificial Sequence: Synthetic peptide
GLSKERP

SEQ ID NO: 4609 - protein, 7 aa, synthetic construct
  REGION 1..7: note = Description of Artificial Sequence: Synthetic peptide
GAHTGSQ

SEQ ID NO: 4610 - protein, 7 aa, synthetic construct
  REGION 1..7: note = Description of Artificial Sequence: Synthetic peptide
VGVSKES

SEQ ID NO: 4611 - protein, 7 aa, synthetic construct
  REGION 1..7: note = Description of Artificial Sequence: Synthetic peptide
DSQKANA

SEQ ID NO: 4612 - protein, 7 aa, synthetic construct
  REGION 1..7: note = Description of Artificial Sequence: Synthetic peptide
VPQNSTK

SEQ ID NO: 4613 - protein, 7 aa, synthetic construct
  REGION 1..7: note = Description of Artificial Sequence: Synthetic peptide
TDSTHTS

SEQ ID NO: 4614 - protein, 7 aa, synthetic construct
  REGION 1..7: note = Description of Artificial Sequence: Synthetic peptide
STEKSLG

SEQ ID NO: 4615 - protein, 7 aa, synthetic construct
  REGION 1..7: note = Description of Artificial Sequence: Synthetic peptide
HAGSNSS

SEQ ID NO: 4616 - protein, 7 aa, synthetic construct
  REGION 1..7: note = Description of Artificial Sequence: Synthetic peptide
ERTTPSN

SEQ ID NO: 4617 - protein, 7 aa, synthetic construct
  REGION 1..7: note = Description of Artificial Sequence: Synthetic peptide
GNGSSSG

SEQ ID NO: 4618 - protein, 7 aa, synthetic construct
  REGION 1..7: note = Description of Artificial Sequence: Synthetic peptide
SGQNSSV

SEQ ID NO: 4619 - protein, 7 aa, synthetic construct
  REGION 1..7: note = Description of Artificial Sequence: Synthetic peptide
ENPSGKG

SEQ ID NO: 4620 - protein, 7 aa, synthetic construct
  REGION 1..7: note = Description of Artificial Sequence: Synthetic peptide
NGSGQNG

SEQ ID NO: 4621 - protein, 7 aa, synthetic construct
  REGION 1..7: note = Description of Artificial Sequence: Synthetic peptide
GSNSTPS

SEQ ID NO: 4622 - protein, 7 aa, synthetic construct
  REGION 1..7: note = Description of Artificial Sequence: Synthetic peptide
DGKGEKS

SEQ ID NO: 4623 - protein, 7 aa, synthetic construct
  REGION 1..7: note = Description of Artificial Sequence: Synthetic peptide
GADPKNG

SEQ ID NO: 4624 - protein, 7 aa, synthetic construct
  REGION 1..7: note = Description of Artificial Sequence: Synthetic peptide
YSGKDVS

SEQ ID NO: 4625 - protein, 7 aa, synthetic construct
  REGION 1..7: note = Description of Artificial Sequence: Synthetic peptide
SVGASNS

SEQ ID NO: 4626 - protein, 7 aa, synthetic construct
  REGION 1..7: note = Description of Artificial Sequence: Synthetic peptide
TSNSPFT

SEQ ID NO: 4627 - protein, 7 aa, synthetic construct
  REGION 1..7: note = Description of Artificial Sequence: Synthetic peptide
EGSTQTK

SEQ ID NO: 4628 - protein, 7 aa, synthetic construct
  REGION 1..7: note = Description of Artificial Sequence: Synthetic peptide
TTEAGSK

SEQ ID NO: 4629 - protein, 7 aa, synthetic construct
  REGION 1..7: note = Description of Artificial Sequence: Synthetic peptide
ENKGSNS

SEQ ID NO: 4630 - protein, 7 aa, synthetic construct
  REGION 1..7: note = Description of Artificial Sequence: Synthetic peptide
TGISGTN

SEQ ID NO: 4631 - protein, 7 aa, synthetic construct
  REGION 1..7: note = Description of Artificial Sequence: Synthetic peptide
GDTKPIH

SEQ ID NO: 4632 - protein, 7 aa, synthetic construct
  REGION 1..7: note = Description of Artificial Sequence: Synthetic peptide
TPSDKTV

SEQ ID NO: 4633 - protein, 7 aa, synthetic construct
  REGION 1..7: note = Description of Artificial Sequence: Synthetic peptide
EPNSKQG

SEQ ID NO: 4634 - protein, 7 aa, synthetic construct
  REGION 1..7: note = Description of Artificial Sequence: Synthetic peptide
VTLDKSS

SEQ ID NO: 4635 - protein, 7 aa, synthetic construct
  REGION 1..7: note = Description of Artificial Sequence: Synthetic peptide
TTGGSST

SEQ ID NO: 4636 - protein, 7 aa, synthetic construct
  REGION 1..7: note = Description of Artificial Sequence: Synthetic peptide
TSAAGTA

SEQ ID NO: 4637 - protein, 7 aa, synthetic construct
  REGION 1..7: note = Description of Artificial Sequence: Synthetic peptide
TGESHPN

SEQ ID NO: 4638 - protein, 7 aa, synthetic construct
  REGION 1..7: note = Description of Artificial Sequence: Synthetic peptide
VSNSKST

SEQ ID NO: 4639 - protein, 7 aa, synthetic construct
  REGION 1..7: note = Description of Artificial Sequence: Synthetic peptide
SSQKPVN

SEQ ID NO: 4640 - protein, 7 aa, synthetic construct
  REGION 1..7: note = Description of Artificial Sequence: Synthetic peptide
SSEARNH

SEQ ID NO: 4641 - protein, 7 aa, synthetic construct
  REGION 1..7: note = Description of Artificial Sequence: Synthetic peptide
DQANPRQ

SEQ ID NO: 4642 - protein, 7 aa, synthetic construct
  REGION 1..7: note = Description of Artificial Sequence: Synthetic peptide
STNTPPQ

SEQ ID NO: 4643 - protein, 7 aa, synthetic construct
  REGION 1..7: note = Description of Artificial Sequence: Synthetic peptide
GNQQGAS

SEQ ID NO: 4644 - protein, 7 aa, synthetic construct
  REGION 1..7: note = Description of Artificial Sequence: Synthetic peptide
LGNSPTT

SEQ ID NO: 4645 - protein, 7 aa, synthetic construct
  REGION 1..7: note = Description of Artificial Sequence: Synthetic peptide
NQSSAGG

SEQ ID NO: 4646 - protein, 7 aa, synthetic construct
  REGION 1..7: note = Description of Artificial Sequence: Synthetic peptide
SQTSSSQ

SEQ ID NO: 4647 - protein, 7 aa, synthetic construct
  REGION 1..7: note = Description of Artificial Sequence: Synthetic peptide
KGTSNSQ

SEQ ID NO: 4648 - protein, 7 aa, synthetic construct
  REGION 1..7: note = Description of Artificial Sequence: Synthetic peptide
ERSDKPF

SEQ ID NO: 4649 - protein, 7 aa, synthetic construct
  REGION 1..7: note = Description of Artificial Sequence: Synthetic peptide
SNVSSHT

SEQ ID NO: 4650 - protein, 7 aa, synthetic construct
  REGION 1..7: note = Description of Artificial Sequence: Synthetic peptide
SNASGNN

SEQ ID NO: 4651 - protein, 7 aa, synthetic construct
  REGION 1..7: note = Description of Artificial Sequence: Synthetic peptide
QDREKTL

SEQ ID NO: 4652 - protein, 7 aa, synthetic construct
  REGION 1..7: note = Description of Artificial Sequence: Synthetic peptide
NNASTST

SEQ ID NO: 4653 - protein, 7 aa, synthetic construct
  REGION 1..7: note = Description of Artificial Sequence: Synthetic peptide
RSEGASV

SEQ ID NO: 4654 - protein, 7 aa, synthetic construct
  REGION 1..7: note = Description of Artificial Sequence: Synthetic peptide
STGSGPS

SEQ ID NO: 4655 - protein, 7 aa, synthetic construct
  REGION 1..7: note = Description of Artificial Sequence: Synthetic peptide
SSQTANK

SEQ ID NO: 4656 - protein, 7 aa, synthetic construct
  REGION 1..7: note = Description of Artificial Sequence: Synthetic peptide
MSTSANH

SEQ ID NO: 4657 - protein, 7 aa, synthetic construct
  REGION 1..7: note = Description of Artificial Sequence: Synthetic peptide
SGASTGN

SEQ ID NO: 4658 - protein, 7 aa, synthetic construct
  REGION 1..7: note = Description of Artificial Sequence: Synthetic peptide
DQLSNAK

SEQ ID NO: 4659 - protein, 7 aa, synthetic construct
  REGION 1..7: note = Description of Artificial Sequence: Synthetic peptide
DSSSHSK

SEQ ID NO: 4660 - protein, 7 aa, synthetic construct
  REGION 1..7: note = Description of Artificial Sequence: Synthetic peptide
QGTSSVP

SEQ ID NO: 4661 - protein, 7 aa, synthetic construct
  REGION 1..7: note = Description of Artificial Sequence: Synthetic peptide
GTVGSNS

SEQ ID NO: 4662 - protein, 7 aa, synthetic construct
  REGION 1..7: note = Description of Artificial Sequence: Synthetic peptide
SVSSTPS

SEQ ID NO: 4663 - protein, 7 aa, synthetic construct
  REGION 1..7: note = Description of Artificial Sequence: Synthetic peptide
NSIGQSK

SEQ ID NO: 4664 - protein, 7 aa, synthetic construct
  REGION 1..7: note = Description of Artificial Sequence: Synthetic peptide
AAGSNST

SEQ ID NO: 4665 - protein, 7 aa, synthetic construct
  REGION 1..7: note = Description of Artificial Sequence: Synthetic peptide
TSARDVQ

SEQ ID NO: 4666 - protein, 7 aa, synthetic construct
  REGION 1..7: note = Description of Artificial Sequence: Synthetic peptide
MNTSNPV

SEQ ID NO: 4667 - protein, 7 aa, synthetic construct
  REGION 1..7: note = Description of Artificial Sequence: Synthetic peptide
TGSTGNM

SEQ ID NO: 4668 - protein, 7 aa, synthetic construct
  REGION 1..7: note = Description of Artificial Sequence: Synthetic peptide
SNGTSGG

SEQ ID NO: 4669 - protein, 7 aa, synthetic construct
  REGION 1..7: note = Description of Artificial Sequence: Synthetic peptide
REGDRGG

SEQ ID NO: 4670 - protein, 7 aa, synthetic construct
  REGION 1..7: note = Description of Artificial Sequence: Synthetic peptide
MPPKPST

SEQ ID NO: 4671 - protein, 7 aa, synthetic construct
  REGION 1..7: note = Description of Artificial Sequence: Synthetic peptide
MDGTSSR

SEQ ID NO: 4672 - protein, 7 aa, synthetic construct
  REGION 1..7: note = Description of Artificial Sequence: Synthetic peptide
LTGSKSD

SEQ ID NO: 4673 - protein, 7 aa, synthetic construct
  REGION 1..7: note = Description of Artificial Sequence: Synthetic peptide
DSSNQRN

SEQ ID NO: 4674 - protein, 7 aa, synthetic construct
  REGION 1..7: note = Description of Artificial Sequence: Synthetic peptide
GTGPSKS

SEQ ID NO: 4675 - protein, 7 aa, synthetic construct
  REGION 1..7: note = Description of Artificial Sequence: Synthetic peptide
VTSSKTE

SEQ ID NO: 4676 - protein, 7 aa, synthetic construct
  REGION 1..7: note = Description of Artificial Sequence: Synthetic peptide
TDKANAV

SEQ ID NO: 4677 - protein, 7 aa, synthetic construct
  REGION 1..7: note = Description of Artificial Sequence: Synthetic peptide
TGSSGSG

SEQ ID NO: 4678 - protein, 7 aa, synthetic construct
  REGION 1..7: note = Description of Artificial Sequence: Synthetic peptide
LNGSSSR

SEQ ID NO: 4679 - protein, 7 aa, synthetic construct
  REGION 1..7: note = Description of Artificial Sequence: Synthetic peptide
ERTTGVG

SEQ ID NO: 4680 - protein, 7 aa, synthetic construct
  REGION 1..7: note = Description of Artificial Sequence: Synthetic peptide
TGSGSTS

SEQ ID NO: 4681 - protein, 7 aa, synthetic construct
  REGION 1..7: note = Description of Artificial Sequence: Synthetic peptide
ASGGKNE

SEQ ID NO: 4682 - protein, 7 aa, synthetic construct
  REGION 1..7: note = Description of Artificial Sequence: Synthetic peptide
VGENSPR

SEQ ID NO: 4683 - protein, 7 aa, synthetic construct
  REGION 1..7: note = Description of Artificial Sequence: Synthetic peptide
TANKSKD

SEQ ID NO: 4684 - protein, 7 aa, synthetic construct
  REGION 1..7: note = Description of Artificial Sequence: Synthetic peptide
SLGSKGS

SEQ ID NO: 4685 - protein, 7 aa, synthetic construct
  REGION 1..7: note = Description of Artificial Sequence: Synthetic peptide
NGSGTPS

SEQ ID NO: 4686 - protein, 7 aa, synthetic construct
  REGION 1..7: note = Description of Artificial Sequence: Synthetic peptide
KGNTSAA

SEQ ID NO: 4687 - protein, 7 aa, synthetic construct
  REGION 1..7: note = Description of Artificial Sequence: Synthetic peptide
RSDQGNI

SEQ ID NO: 4688 - protein, 7 aa, synthetic construct
  REGION 1..7: note = Description of Artificial Sequence: Synthetic peptide
LNGSNQT

SEQ ID NO: 4689 - protein, 7 aa, synthetic construct
  REGION 1..7: note = Description of Artificial Sequence: Synthetic peptide
SGSGSNL

SEQ ID NO: 4690 - protein, 7 aa, synthetic construct
  REGION 1..7: note = Description of Artificial Sequence: Synthetic peptide
ESVSKNL

SEQ ID NO: 4691 - protein, 7 aa, synthetic construct
  REGION 1..7: note = Description of Artificial Sequence: Synthetic peptide
GSLKDAT

SEQ ID NO: 4692 - protein, 7 aa, synthetic construct
  REGION 1..7: note = Description of Artificial Sequence: Synthetic peptide
MTVKSSE

SEQ ID NO: 4693 - protein, 7 aa, synthetic construct
  REGION 1..7: note = Description of Artificial Sequence: Synthetic peptide
GSVKGEP

SEQ ID NO: 4694 - protein, 7 aa, synthetic construct
  REGION 1..7: note = Description of Artificial Sequence: Synthetic peptide
AQGGSVK

SEQ ID NO: 4695 - protein, 7 aa, synthetic construct
  REGION 1..7: note = Description of Artificial Sequence: Synthetic peptide
SNSSGHV

SEQ ID NO: 4696 - protein, 7 aa, synthetic construct
  REGION 1..7: note = Description of Artificial Sequence: Synthetic peptide
GKSTSEG

SEQ ID NO: 4697 - protein, 7 aa, synthetic construct
  REGION 1..7: note = Description of Artificial Sequence: Synthetic peptide
GSSDKRN

SEQ ID NO: 4698 - protein, 7 aa, synthetic construct
  REGION 1..7: note = Description of Artificial Sequence: Synthetic peptide
SVSAPST

SEQ ID NO: 4699 - protein, 7 aa, synthetic construct
  REGION 1..7: note = Description of Artificial Sequence: Synthetic peptide
TRDSKSL

SEQ ID NO: 4700 - protein, 7 aa, synthetic construct
  REGION 1..7: note = Description of Artificial Sequence: Synthetic peptide
MRDASTT

SEQ ID NO: 4701 - protein, 7 aa, synthetic construct
  REGION 1..7: note = Description of Artificial Sequence: Synthetic peptide
QGSTSPI

SEQ ID NO: 4702 - protein, 7 aa, synthetic construct
  REGION 1..7: note = Description of Artificial Sequence: Synthetic peptide
DNRDPKL

SEQ ID NO: 4703 - protein, 7 aa, synthetic construct
  REGION 1..7: note = Description of Artificial Sequence: Synthetic peptide
TGSQSST

SEQ ID NO: 4704 - protein, 7 aa, synthetic construct
  REGION 1..7: note = Description of Artificial Sequence: Synthetic peptide
ETPTSNR

SEQ ID NO: 4705 - protein, 7 aa, synthetic construct
  REGION 1..7: note = Description of Artificial Sequence: Synthetic peptide
VRDSSNH

SEQ ID NO: 4706 - protein, 7 aa, synthetic construct
  REGION 1..7: note = Description of Artificial Sequence: Synthetic peptide
AAGSSNT

SEQ ID NO: 4707 - protein, 7 aa, synthetic construct
  REGION 1..7: note = Description of Artificial Sequence: Synthetic peptide
DGRASVS

SEQ ID NO: 4708 - protein, 7 aa, synthetic construct
  REGION 1..7: note = Description of Artificial Sequence: Synthetic peptide
GLGAQAA

SEQ ID NO: 4709 - protein, 7 aa, synthetic construct
  REGION 1..7: note = Description of Artificial Sequence: Synthetic peptide
SVSSSPS

SEQ ID NO: 4710 - protein, 7 aa, synthetic construct
  REGION 1..7: note = Description of Artificial Sequence: Synthetic peptide
QLNPKDG

SEQ ID NO: 4711 - protein, 7 aa, synthetic construct
  REGION 1..7: note = Description of Artificial Sequence: Synthetic peptide
AGTEKIS

SEQ ID NO: 4712 - protein, 7 aa, synthetic construct
  REGION 1..7: note = Description of Artificial Sequence: Synthetic peptide
TASDKTR

SEQ ID NO: 4713 - protein, 7 aa, synthetic construct
  REGION 1..7: note = Description of Artificial Sequence: Synthetic peptide
NSTTKAN

SEQ ID NO: 4714 - protein, 7 aa, synthetic construct
  REGION 1..7: note = Description of Artificial Sequence: Synthetic peptide
SKSNNRE

SEQ ID NO: 4715 - protein, 7 aa, synthetic construct
  REGION 1..7: note = Description of Artificial Sequence: Synthetic peptide
SLSQKSE

SEQ ID NO: 4716 - protein, 7 aa, synthetic construct
  REGION 1..7: note = Description of Artificial Sequence: Synthetic peptide
NVGHPNE

SEQ ID NO: 4717 - protein, 7 aa, synthetic construct
  REGION 1..7: note = Description of Artificial Sequence: Synthetic peptide
SSEHPKG

SEQ ID NO: 4718 - protein, 7 aa, synthetic construct
  REGION 1..7: note = Description of Artificial Sequence: Synthetic peptide
SAQPSGG

SEQ ID NO: 4719 - protein, 7 aa, synthetic construct
  REGION 1..7: note = Description of Artificial Sequence: Synthetic peptide
SGSSRTE

SEQ ID NO: 4720 - protein, 7 aa, synthetic construct
  REGION 1..7: note = Description of Artificial Sequence: Synthetic peptide
QDNQGKP

SEQ ID NO: 4721 - protein, 7 aa, synthetic construct
  REGION 1..7: note = Description of Artificial Sequence: Synthetic peptide
EGDKHPV

SEQ ID NO: 4722 - protein, 7 aa, synthetic construct
  REGION 1..7: note = Description of Artificial Sequence: Synthetic peptide
EGAHRPG

SEQ ID NO: 4723 - protein, 7 aa, synthetic construct
  REGION 1..7: note = Description of Artificial Sequence: Synthetic peptide
GPESRPQ

SEQ ID NO: 4724 - protein, 7 aa, synthetic construct
  REGION 1..7: note = Description of Artificial Sequence: Synthetic peptide
GTSEKTI

SEQ ID NO: 4725 - protein, 7 aa, synthetic construct
  REGION 1..7: note = Description of Artificial Sequence: Synthetic peptide
GNGSSRD

SEQ ID NO: 4726 - protein, 7 aa, synthetic construct
  REGION 1..7: note = Description of Artificial Sequence: Synthetic peptide
FPTESAG

SEQ ID NO: 4727 - protein, 7 aa, synthetic construct
  REGION 1..7: note = Description of Artificial Sequence: Synthetic peptide
NPGKDSR

SEQ ID NO: 4728 - protein, 7 aa, synthetic construct
  REGION 1..7: note = Description of Artificial Sequence: Synthetic peptide
MGGSGHG

SEQ ID NO: 4729 - protein, 7 aa, synthetic construct
  REGION 1..7: note = Description of Artificial Sequence: Synthetic peptide
TESKSSV

SEQ ID NO: 4730 - protein, 7 aa, synthetic construct
  REGION 1..7: note = Description of Artificial Sequence: Synthetic peptide
TTASPNK

SEQ ID NO: 4731 - protein, 7 aa, synthetic construct
  REGION 1..7: note = Description of Artificial Sequence: Synthetic peptide
TSKSTTS

SEQ ID NO: 4732 - protein, 7 aa, synthetic construct
  REGION 1..7: note = Description of Artificial Sequence: Synthetic peptide
DMTGTNK

SEQ ID NO: 4733 - protein, 7 aa, synthetic construct
  REGION 1..7: note = Description of Artificial Sequence: Synthetic peptide
SNTSGVT

SEQ ID NO: 4734 - protein, 7 aa, synthetic construct
  REGION 1..7: note = Description of Artificial Sequence: Synthetic peptide
EMDSKGT

SEQ ID NO: 4735 - protein, 7 aa, synthetic construct
  REGION 1..7: note = Description of Artificial Sequence: Synthetic peptide
GSGGSKE

SEQ ID NO: 4736 - protein, 7 aa, synthetic construct
  REGION 1..7: note = Description of Artificial Sequence: Synthetic peptide
EIPAGKS

SEQ ID NO: 4737 - protein, 7 aa, synthetic construct
  REGION 1..7: note = Description of Artificial Sequence: Synthetic peptide
VGDAKAM

SEQ ID NO: 4738 - protein, 7 aa, synthetic construct
  REGION 1..7: note = Description of Artificial Sequence: Synthetic peptide
EQRKSMV

SEQ ID NO: 4739 - protein, 7 aa, synthetic construct
  REGION 1..7: note = Description of Artificial Sequence: Synthetic peptide
GSGTAGN

SEQ ID NO: 4740 - protein, 7 aa, synthetic construct
  REGION 1..7: note = Description of Artificial Sequence: Synthetic peptide
SQTSANQ

SEQ ID NO: 4741 - protein, 7 aa, synthetic construct
  REGION 1..7: note = Description of Artificial Sequence: Synthetic peptide
SGGSQGQ

SEQ ID NO: 4742 - protein, 7 aa, synthetic construct
  REGION 1..7: note = Description of Artificial Sequence: Synthetic peptide
QNGKQPL

SEQ ID NO: 4743 - protein, 7 aa, synthetic construct
  REGION 1..7: note = Description of Artificial Sequence: Synthetic peptide
SRDQNGH

SEQ ID NO: 4744 - protein, 7 aa, synthetic construct
  REGION 1..7: note = Description of Artificial Sequence: Synthetic peptide
SEAGSGK

SEQ ID NO: 4745 - protein, 7 aa, synthetic construct
  REGION 1..7: note = Description of Artificial Sequence: Synthetic peptide
GDGSSRA

SEQ ID NO: 4746 - protein, 7 aa, synthetic construct
  REGION 1..7: note = Description of Artificial Sequence: Synthetic peptide
SGSKSIE

SEQ ID NO: 4747 - protein, 7 aa, synthetic construct
  REGION 1..7: note = Description of Artificial Sequence: Synthetic peptide
MTESASK

SEQ ID NO: 4748 - protein, 7 aa, synthetic construct
  REGION 1..7: note = Description of Artificial Sequence: Synthetic peptide
QSGSGTA

SEQ ID NO: 4749 - protein, 7 aa, synthetic construct
  REGION 1..7: note = Description of Artificial Sequence: Synthetic peptide
VNDSKTT

SEQ ID NO: 4750 - protein, 7 aa, synthetic construct
  REGION 1..7: note = Description of Artificial Sequence: Synthetic peptide
DGKAPLL

SEQ ID NO: 4751 - protein, 7 aa, synthetic construct
  REGION 1..7: note = Description of Artificial Sequence: Synthetic peptide
HANSAKE

SEQ ID NO: 4752 - protein, 7 aa, synthetic construct
  REGION 1..7: note = Description of Artificial Sequence: Synthetic peptide
SPQGEHK

SEQ ID NO: 4753 - protein, 7 aa, synthetic construct
  REGION 1..7: note = Description of Artificial Sequence: Synthetic peptide
SGETTKR

SEQ ID NO: 4754 - protein, 7 aa, synthetic construct
  REGION 1..7: note = Description of Artificial Sequence: Synthetic peptide
GQDSIKG

SEQ ID NO: 4755 - protein, 7 aa, synthetic construct
  REGION 1..7: note = Description of Artificial Sequence: Synthetic peptide
SGQSKPD

SEQ ID NO: 4756 - protein, 7 aa, synthetic construct
  REGION 1..7: note = Description of Artificial Sequence: Synthetic peptide
LVEKSSS

SEQ ID NO: 4757 - protein, 7 aa, synthetic construct
  REGION 1..7: note = Description of Artificial Sequence: Synthetic peptide
TPASSSI

SEQ ID NO: 4758 - protein, 7 aa, synthetic construct
  REGION 1..7: note = Description of Artificial Sequence: Synthetic peptide
NSGPSGQ

SEQ ID NO: 4759 - protein, 7 aa, synthetic construct
  REGION 1..7: note = Description of Artificial Sequence: Synthetic peptide
SSTPSSG

SEQ ID NO: 4760 - protein, 7 aa, synthetic construct
  REGION 1..7: note = Description of Artificial Sequence: Synthetic peptide
TVGSGSP

SEQ ID NO: 4761 - protein, 7 aa, synthetic construct
  REGION 1..7: note = Description of Artificial Sequence: Synthetic peptide
SGVSSTA

SEQ ID NO: 4762 - protein, 7 aa, synthetic construct
  REGION 1..7: note = Description of Artificial Sequence: Synthetic peptide
ERVQTSE

SEQ ID NO: 4763 - protein, 7 aa, synthetic construct
  REGION 1..7: note = Description of Artificial Sequence: Synthetic peptide
AAGAERG

SEQ ID NO: 4764 - protein, 7 aa, synthetic construct
  REGION 1..7: note = Description of Artificial Sequence: Synthetic peptide
GLDKSLT

SEQ ID NO: 4765 - protein, 7 aa, synthetic construct
  REGION 1..7: note = Description of Artificial Sequence: Synthetic peptide
HGNNSPS

SEQ ID NO: 4766 - protein, 7 aa, synthetic construct
  REGION 1..7: note = Description of Artificial Sequence: Synthetic peptide
NGTSKQD

SEQ ID NO: 4767 - protein, 7 aa, synthetic construct
  REGION 1..7: note = Description of Artificial Sequence: Synthetic peptide
EINKANQ

SEQ ID NO: 4768 - protein, 7 aa, synthetic construct
  REGION 1..7: note = Description of Artificial Sequence: Synthetic peptide
DGTSHKS

SEQ ID NO: 4769 - protein, 7 aa, synthetic construct
  REGION 1..7: note = Description of Artificial Sequence: Synthetic peptide
ATSQSNM

SEQ ID NO: 4770 - protein, 7 aa, synthetic construct
  REGION 1..7: note = Description of Artificial Sequence: Synthetic peptide
MNGGTGT

SEQ ID NO: 4771 - protein, 7 aa, synthetic construct
  REGION 1..7: note = Description of Artificial Sequence: Synthetic peptide
RQGDHPS

SEQ ID NO: 4772 - protein, 7 aa, synthetic construct
  REGION 1..7: note = Description of Artificial Sequence: Synthetic peptide
SSGKESG

SEQ ID NO: 4773 - protein, 7 aa, synthetic construct
  REGION 1..7: note = Description of Artificial Sequence: Synthetic peptide
SPSTTGQ

SEQ ID NO: 4774 - protein, 7 aa, synthetic construct
  REGION 1..7: note = Description of Artificial Sequence: Synthetic peptide
GGNDHKT

SEQ ID NO: 4775 - protein, 7 aa, synthetic construct
  REGION 1..7: note = Description of Artificial Sequence: Synthetic peptide
GDPKSTL

SEQ ID NO: 4776 - protein, 7 aa, synthetic construct
  REGION 1..7: note = Description of Artificial Sequence: Synthetic peptide
GASGKMM

SEQ ID NO: 4777 - protein, 7 aa, synthetic construct
  REGION 1..7: note = Description of Artificial Sequence: Synthetic peptide
GDGSHTR

SEQ ID NO: 4778 - protein, 7 aa, synthetic construct
  REGION 1..7: note = Description of Artificial Sequence: Synthetic peptide
SMSSSPT

SEQ ID NO: 4779 - protein, 7 aa, synthetic construct
  REGION 1..7: note = Description of Artificial Sequence: Synthetic peptide
QQTADTK

SEQ ID NO: 4780 - protein, 7 aa, synthetic construct
  REGION 1..7: note = Description of Artificial Sequence: Synthetic peptide
NSASTSG

SEQ ID NO: 4781 - protein, 7 aa, synthetic construct
  REGION 1..7: note = Description of Artificial Sequence: Synthetic peptide
SNTNHNS

SEQ ID NO: 4782 - protein, 7 aa, synthetic construct
  REGION 1..7: note = Description of Artificial Sequence: Synthetic peptide
NVSGQNQ

SEQ ID NO: 4783 - protein, 7 aa, synthetic construct
  REGION 1..7: note = Description of Artificial Sequence: Synthetic peptide
TSSNVPQ

SEQ ID NO: 4784 - protein, 7 aa, synthetic construct
  REGION 1..7: note = Description of Artificial Sequence: Synthetic peptide
SGASSSH

SEQ ID NO: 4785 - protein, 7 aa, synthetic construct
  REGION 1..7: note = Description of Artificial Sequence: Synthetic peptide
DGSRVAH

SEQ ID NO: 4786 - protein, 7 aa, synthetic construct
  REGION 1..7: note = Description of Artificial Sequence: Synthetic peptide
DTQSNRT

SEQ ID NO: 4787 - protein, 7 aa, synthetic construct
  REGION 1..7: note = Description of Artificial Sequence: Synthetic peptide
MTSKTVG

SEQ ID NO: 4788 - protein, 7 aa, synthetic construct
  REGION 1..7: note = Description of Artificial Sequence: Synthetic peptide
EGNQTGS

SEQ ID NO: 4789 - protein, 7 aa, synthetic construct
  REGION 1..7: note = Description of Artificial Sequence: Synthetic peptide
GSNGAST

SEQ ID NO: 4790 - protein, 7 aa, synthetic construct
  REGION 1..7: note = Description of Artificial Sequence: Synthetic peptide
FPSSTPK

SEQ ID NO: 4791 - protein, 7 aa, synthetic construct
  REGION 1..7: note = Description of Artificial Sequence: Synthetic peptide
SLTEVNK

SEQ ID NO: 4792 - protein, 7 aa, synthetic construct
  REGION 1..7: note = Description of Artificial Sequence: Synthetic peptide
GTASPSS

SEQ ID NO: 4793 - protein, 7 aa, synthetic construct
  REGION 1..7: note = Description of Artificial Sequence: Synthetic peptide
GQSDAIK

SEQ ID NO: 4794 - protein, 7 aa, synthetic construct
  REGION 1..7: note = Description of Artificial Sequence: Synthetic peptide
DNHEKTS

SEQ ID NO: 4795 - protein, 7 aa, synthetic construct
  REGION 1..7: note = Description of Artificial Sequence: Synthetic peptide
GKTDGTH

SEQ ID NO: 4796 - protein, 7 aa, synthetic construct
  REGION 1..7: note = Description of Artificial Sequence: Synthetic peptide
GSEVAPK

SEQ ID NO: 4797 - protein, 7 aa, synthetic construct
  REGION 1..7: note = Description of Artificial Sequence: Synthetic peptide
GNTGASS

SEQ ID NO: 4798 - protein, 7 aa, synthetic construct
  REGION 1..7: note = Description of Artificial Sequence: Synthetic peptide
SSGGTRN

SEQ ID NO: 4799 - protein, 7 aa, synthetic construct
  REGION 1..7: note = Description of Artificial Sequence: Synthetic peptide
DSNVTHK

SEQ ID NO: 4800 - protein, 7 aa, synthetic construct
  REGION 1..7: note = Description of Artificial Sequence: Synthetic peptide
GYEGNGK

SEQ ID NO: 4801 - protein, 7 aa, synthetic construct
  REGION 1..7: note = Description of Artificial Sequence: Synthetic peptide
GTGAAGT

SEQ ID NO: 4802 - protein, 7 aa, synthetic construct
  REGION 1..7: note = Description of Artificial Sequence: Synthetic peptide
NSSSPTT

SEQ ID NO: 4803 - protein, 7 aa, synthetic construct
  REGION 1..7: note = Description of Artificial Sequence: Synthetic peptide
TGSPSGQ

SEQ ID NO: 4804 - protein, 7 aa, synthetic construct
  REGION 1..7: note = Description of Artificial Sequence: Synthetic peptide
AGTSTSN

SEQ ID NO: 4805 - protein, 7 aa, synthetic construct
  REGION 1..7: note = Description of Artificial Sequence: Synthetic peptide
QATSAAA

SEQ ID NO: 4806 - protein, 7 aa, synthetic construct
  REGION 1..7: note = Description of Artificial Sequence: Synthetic peptide
TSAARAE

SEQ ID NO: 4807 - protein, 7 aa, synthetic construct
  REGION 1..7: note = Description of Artificial Sequence: Synthetic peptide
AGSPSTQ

SEQ ID NO: 4808 - protein, 7 aa, synthetic construct
  REGION 1..7: note = Description of Artificial Sequence: Synthetic peptide
VPDHSVK

SEQ ID NO: 4809 - protein, 7 aa, synthetic construct
  REGION 1..7: note = Description of Artificial Sequence: Synthetic peptide
SSGTVPG

SEQ ID NO: 4810 - protein, 7 aa, synthetic construct
  REGION 1..7: note = Description of Artificial Sequence: Synthetic peptide
NLGTSSG

SEQ ID NO: 4811 - protein, 7 aa, synthetic construct
  REGION 1..7: note = Description of Artificial Sequence: Synthetic peptide
THNTSNA

SEQ ID NO: 4812 - protein, 7 aa, synthetic construct
  REGION 1..7: note = Description of Artificial Sequence: Synthetic peptide
TNSGTGK

SEQ ID NO: 4813 - protein, 7 aa, synthetic construct
  REGION 1..7: note = Description of Artificial Sequence: Synthetic peptide
NTHKTAS

SEQ ID NO: 4814 - protein, 7 aa, synthetic construct
  REGION 1..7: note = Description of Artificial Sequence: Synthetic peptide
NPGASPG

SEQ ID NO: 4815 - protein, 7 aa, synthetic construct
  REGION 1..7: note = Description of Artificial Sequence: Synthetic peptide
TGGSPKN

SEQ ID NO: 4816 - protein, 7 aa, synthetic construct
  REGION 1..7: note = Description of Artificial Sequence: Synthetic peptide
HSGKDSS

SEQ ID NO: 4817 - protein, 7 aa, synthetic construct
  REGION 1..7: note = Description of Artificial Sequence: Synthetic peptide
QGAATVA

SEQ ID NO: 4818 - protein, 7 aa, synthetic construct
  REGION 1..7: note = Description of Artificial Sequence: Synthetic peptide
LVGEKAV

SEQ ID NO: 4819 - protein, 7 aa, synthetic construct
  REGION 1..7: note = Description of Artificial Sequence: Synthetic peptide
DKSSGTG

SEQ ID NO: 4820 - protein, 7 aa, synthetic construct
  REGION 1..7: note = Description of Artificial Sequence: Synthetic peptide
AVGSATG

SEQ ID NO: 4821 - protein, 7 aa, synthetic construct
  REGION 1..7: note = Description of Artificial Sequence: Synthetic peptide
GGVPPTG

SEQ ID NO: 4822 - protein, 7 aa, synthetic construct
  REGION 1..7: note = Description of Artificial Sequence: Synthetic peptide
RQDKVAA

SEQ ID NO: 4823 - protein, 7 aa, synthetic construct
  REGION 1..7: note = Description of Artificial Sequence: Synthetic peptide
GTQESSR

SEQ ID NO: 4824 - protein, 7 aa, synthetic construct
  REGION 1..7: note = Description of Artificial Sequence: Synthetic peptide
GTNKSVV

SEQ ID NO: 4825 - protein, 7 aa, synthetic construct
  REGION 1..7: note = Description of Artificial Sequence: Synthetic peptide
SAQTSSL

SEQ ID NO: 4826 - protein, 7 aa, synthetic construct
  REGION 1..7: note = Description of Artificial Sequence: Synthetic peptide
GHEGPKG

SEQ ID NO: 4827 - protein, 7 aa, synthetic construct
  REGION 1..7: note = Description of Artificial Sequence: Synthetic peptide
TGSSTTA

SEQ ID NO: 4828 - protein, 7 aa, synthetic construct
  REGION 1..7: note = Description of Artificial Sequence: Synthetic peptide
HEDAKAG

SEQ ID NO: 4829 - protein, 7 aa, synthetic construct
  REGION 1..7: note = Description of Artificial Sequence: Synthetic peptide
GGPATAT

SEQ ID NO: 4830 - protein, 7 aa, synthetic construct
  REGION 1..7: note = Description of Artificial Sequence: Synthetic peptide
DRTNEAH

SEQ ID NO: 4831 - protein, 7 aa, synthetic construct
  REGION 1..7: note = Description of Artificial Sequence: Synthetic peptide
GGGNHSV

SEQ ID NO: 4832 - protein, 7 aa, synthetic construct
  REGION 1..7: note = Description of Artificial Sequence: Synthetic peptide
VTNSTTK

SEQ ID NO: 4833 - protein, 7 aa, synthetic construct
  REGION 1..7: note = Description of Artificial Sequence: Synthetic peptide
QSAQGAA

SEQ ID NO: 4834 - protein, 7 aa, synthetic construct
  REGION 1..7: note = Description of Artificial Sequence: Synthetic peptide
DGRGATS

SEQ ID NO: 4835 - protein, 7 aa, synthetic construct
  REGION 1..7: note = Description of Artificial Sequence: Synthetic peptide
NGARSSE

SEQ ID NO: 4836 - protein, 7 aa, synthetic construct
  REGION 1..7: note = Description of Artificial Sequence: Synthetic peptide
SESQGHK

SEQ ID NO: 4837 - protein, 7 aa, synthetic construct
  REGION 1..7: note = Description of Artificial Sequence: Synthetic peptide
IASQKAE

SEQ ID NO: 4838 - protein, 7 aa, synthetic construct
  REGION 1..7: note = Description of Artificial Sequence: Synthetic peptide
QNSPGNV

SEQ ID NO: 4839 - protein, 7 aa, synthetic construct
  REGION 1..7: note = Description of Artificial Sequence: Synthetic peptide
MAAGNEK

SEQ ID NO: 4840 - protein, 7 aa, synthetic construct
  REGION 1..7: note = Description of Artificial Sequence: Synthetic peptide
DRGEHSR

SEQ ID NO: 4841 - protein, 7 aa, synthetic construct
  REGION 1..7: note = Description of Artificial Sequence: Synthetic peptide
HTTSQNS

SEQ ID NO: 4842 - protein, 7 aa, synthetic construct
  REGION 1..7: note = Description of Artificial Sequence: Synthetic peptide
IGSGSST

SEQ ID NO: 4843 - protein, 7 aa, synthetic construct
  REGION 1..7: note = Description of Artificial Sequence: Synthetic peptide
DATGQRV

SEQ ID NO: 4844 - protein, 7 aa, synthetic construct
  REGION 1..7: note = Description of Artificial Sequence: Synthetic peptide
NRNGASG

SEQ ID NO: 4845 - protein, 7 aa, synthetic construct
  REGION 1..7: note = Description of Artificial Sequence: Synthetic peptide
SNGSASS

SEQ ID NO: 4846 - protein, 7 aa, synthetic construct
  REGION 1..7: note = Description of Artificial Sequence: Synthetic peptide
ELTKANT

SEQ ID NO: 4847 - protein, 7 aa, synthetic construct
  REGION 1..7: note = Description of Artificial Sequence: Synthetic peptide
MPNGNQQ

SEQ ID NO: 4848 - protein, 7 aa, synthetic construct
  REGION 1..7: note = Description of Artificial Sequence: Synthetic peptide
GGESRSS

SEQ ID NO: 4849 - protein, 7 aa, synthetic construct
  REGION 1..7: note = Description of Artificial Sequence: Synthetic peptide
ASASKVS

SEQ ID NO: 4850 - protein, 7 aa, synthetic construct
  REGION 1..7: note = Description of Artificial Sequence: Synthetic peptide
SSTPSSA

SEQ ID NO: 4851 - protein, 7 aa, synthetic construct
  REGION 1..7: note = Description of Artificial Sequence: Synthetic peptide
SSVSGSN

SEQ ID NO: 4852 - protein, 7 aa, synthetic construct
  REGION 1..7: note = Description of Artificial Sequence: Synthetic peptide
STQSDRS

SEQ ID NO: 4853 - protein, 7 aa, synthetic construct
  REGION 1..7: note = Description of Artificial Sequence: Synthetic peptide
VSNGSGA

SEQ ID NO: 4854 - protein, 7 aa, synthetic construct
  REGION 1..7: note = Description of Artificial Sequence: Synthetic peptide
SNNSGPT

SEQ ID NO: 4855 - protein, 7 aa, synthetic construct
  REGION 1..7: note = Description of Artificial Sequence: Synthetic peptide
LTPGTAA

SEQ ID NO: 4856 - protein, 7 aa, synthetic construct
  REGION 1..7: note = Description of Artificial Sequence: Synthetic peptide
SNASPHA

SEQ ID NO: 4857 - protein, 7 aa, synthetic construct
  REGION 1..7: note = Description of Artificial Sequence: Synthetic peptide
TNASSTA

SEQ ID NO: 4858 - protein, 7 aa, synthetic construct
  REGION 1..7: note = Description of Artificial Sequence: Synthetic peptide
AGHKETT

SEQ ID NO: 4859 - protein, 7 aa, synthetic construct
  REGION 1..7: note = Description of Artificial Sequence: Synthetic peptide
GSEATAK

SEQ ID NO: 4860 - protein, 7 aa, synthetic construct
  REGION 1..7: note = Description of Artificial Sequence: Synthetic peptide
GATSPHQ

SEQ ID NO: 4861 - protein, 7 aa, synthetic construct
  REGION 1..7: note = Description of Artificial Sequence: Synthetic peptide
NSGSPGS

SEQ ID NO: 4862 - protein, 7 aa, synthetic construct
  REGION 1..7: note = Description of Artificial Sequence: Synthetic peptide
SVGNSSS

SEQ ID NO: 4863 - protein, 7 aa, synthetic construct
  REGION 1..7: note = Description of Artificial Sequence: Synthetic peptide
SRVKNES

SEQ ID NO: 4864 - protein, 7 aa, synthetic construct
  REGION 1..7: note = Description of Artificial Sequence: Synthetic peptide
TSAGSKD

SEQ ID NO: 4865 - protein, 7 aa, synthetic construct
  REGION 1..7: note = Description of Artificial Sequence: Synthetic peptide
SREKTEH

SEQ ID NO: 4866 - protein, 7 aa, synthetic construct
  REGION 1..7: note = Description of Artificial Sequence: Synthetic peptide
SNGTSSG

SEQ ID NO: 4867 - protein, 7 aa, synthetic construct
  REGION 1..7: note = Description of Artificial Sequence: Synthetic peptide
NGGKGSS

SEQ ID NO: 4868 - protein, 7 aa, synthetic construct
  REGION 1..7: note = Description of Artificial Sequence: Synthetic peptide
KTAQVSA

SEQ ID NO: 4869 - protein, 7 aa, synthetic construct
  REGION 1..7: note = Description of Artificial Sequence: Synthetic peptide
QSKSPSH

SEQ ID NO: 4870 - protein, 7 aa, synthetic construct
  REGION 1..7: note = Description of Artificial Sequence: Synthetic peptide
HNGEQSR

SEQ ID NO: 4871 - protein, 7 aa, synthetic construct
  REGION 1..7: note = Description of Artificial Sequence: Synthetic peptide
ESTTPGR

SEQ ID NO: 4872 - protein, 7 aa, synthetic construct
  REGION 1..7: note = Description of Artificial Sequence: Synthetic peptide
SSESKSV

SEQ ID NO: 4873 - protein, 7 aa, synthetic construct
  REGION 1..7: note = Description of Artificial Sequence: Synthetic peptide
QTGSSNG

SEQ ID NO: 4874 - protein, 7 aa, synthetic construct
  REGION 1..7: note = Description of Artificial Sequence: Synthetic peptide
ESASHSR

SEQ ID NO: 4875 - protein, 7 aa, synthetic construct
  REGION 1..7: note = Description of Artificial Sequence: Synthetic peptide
EAHSANK

SEQ ID NO: 4876 - protein, 7 aa, synthetic construct
  REGION 1..7: note = Description of Artificial Sequence: Synthetic peptide
GDKTSLK

SEQ ID NO: 4877 - protein, 7 aa, synthetic construct
  REGION 1..7: note = Description of Artificial Sequence: Synthetic peptide
AGVSKPS

SEQ ID NO: 4878 - protein, 7 aa, synthetic construct
  REGION 1..7: note = Description of Artificial Sequence: Synthetic peptide
THGASSS

SEQ ID NO: 4879 - protein, 7 aa, synthetic construct
  REGION 1..7: note = Description of Artificial Sequence: Synthetic peptide
STGSGSS

SEQ ID NO: 4880 - protein, 7 aa, synthetic construct
  REGION 1..7: note = Description of Artificial Sequence: Synthetic peptide
RKGASTE

SEQ ID NO: 4881 - protein, 7 aa, synthetic construct
  REGION 1..7: note = Description of Artificial Sequence: Synthetic peptide
SLTDKSS

SEQ ID NO: 4882 - protein, 7 aa, synthetic construct
  REGION 1..7: note = Description of Artificial Sequence: Synthetic peptide
LATKDNS

SEQ ID NO: 4883 - protein, 7 aa, synthetic construct
  REGION 1..7: note = Description of Artificial Sequence: Synthetic peptide
KNGSTPE

SEQ ID NO: 4884 - protein, 7 aa, synthetic construct
  REGION 1..7: note = Description of Artificial Sequence: Synthetic peptide
STATSAA

SEQ ID NO: 4885 - protein, 7 aa, synthetic construct
  REGION 1..7: note = Description of Artificial Sequence: Synthetic peptide
TTTTKSS

SEQ ID NO: 4886 - protein, 7 aa, synthetic construct
  REGION 1..7: note = Description of Artificial Sequence: Synthetic peptide
TQGNPSQ

SEQ ID NO: 4887 - protein, 7 aa, synthetic construct
  REGION 1..7: note = Description of Artificial Sequence: Synthetic peptide
VSGSGGK

SEQ ID NO: 4888 - protein, 7 aa, synthetic construct
  REGION 1..7: note = Description of Artificial Sequence: Synthetic peptide
MPKNTPS

SEQ ID NO: 4889 - protein, 7 aa, synthetic construct
  REGION 1..7: note = Description of Artificial Sequence: Synthetic peptide
SQKSPPI

SEQ ID NO: 4890 - protein, 7 aa, synthetic construct
  REGION 1..7: note = Description of Artificial Sequence: Synthetic peptide
DSIRESK

SEQ ID NO: 4891 - protein, 7 aa, synthetic construct
  REGION 1..7: note = Description of Artificial Sequence: Synthetic peptide
AGDQSKL

SEQ ID NO: 4892 - protein, 7 aa, synthetic construct
  REGION 1..7: note = Description of Artificial Sequence: Synthetic peptide
EHNGGNK

SEQ ID NO: 4893 - protein, 7 aa, synthetic construct
  REGION 1..7: note = Description of Artificial Sequence: Synthetic peptide
STMTTSS

SEQ ID NO: 4894 - protein, 7 aa, synthetic construct
  REGION 1..7: note = Description of Artificial Sequence: Synthetic peptide
SNASKNE

SEQ ID NO: 4895 - protein, 7 aa, synthetic construct
  REGION 1..7: note = Description of Artificial Sequence: Synthetic peptide
GNGSGPS

SEQ ID NO: 4896 - protein, 7 aa, synthetic construct
  REGION 1..7: note = Description of Artificial Sequence: Synthetic peptide
TTHTTSG

SEQ ID NO: 4897 - protein, 7 aa, synthetic construct
  REGION 1..7: note = Description of Artificial Sequence: Synthetic peptide
SQEPSRG

SEQ ID NO: 4898 - protein, 7 aa, synthetic construct
  REGION 1..7: note = Description of Artificial Sequence: Synthetic peptide
SKQQSSE

SEQ ID NO: 4899 - protein, 7 aa, synthetic construct
  REGION 1..7: note = Description of Artificial Sequence: Synthetic peptide
DSSGKAN

SEQ ID NO: 4900 - protein, 7 aa, synthetic construct
  REGION 1..7: note = Description of Artificial Sequence: Synthetic peptide
GANNSST

SEQ ID NO: 4901 - protein, 7 aa, synthetic construct
  REGION 1..7: note = Description of Artificial Sequence: Synthetic peptide
MDGSSPH

SEQ ID NO: 4902 - protein, 7 aa, synthetic construct
  REGION 1..7: note = Description of Artificial Sequence: Synthetic peptide
DPSSRPQ

SEQ ID NO: 4903 - protein, 7 aa, synthetic construct
  REGION 1..7: note = Description of Artificial Sequence: Synthetic peptide
AGETGIK

SEQ ID NO: 4904 - protein, 7 aa, synthetic construct
  REGION 1..7: note = Description of Artificial Sequence: Synthetic peptide
GNSQTQG

SEQ ID NO: 4905 - protein, 7 aa, synthetic construct
  REGION 1..7: note = Description of Artificial Sequence: Synthetic peptide
TGQTSTS

SEQ ID NO: 4906 - protein, 7 aa, synthetic construct
  REGION 1..7: note = Description of Artificial Sequence: Synthetic peptide
VASKSTV

SEQ ID NO: 4907 - protein, 7 aa, synthetic construct
  REGION 1..7: note = Description of Artificial Sequence: Synthetic peptide
EGANHAS

SEQ ID NO: 4908 - protein, 7 aa, synthetic construct
  REGION 1..7: note = Description of Artificial Sequence: Synthetic peptide
LNTPSAA

SEQ ID NO: 4909 - protein, 7 aa, synthetic construct
  REGION 1..7: note = Description of Artificial Sequence: Synthetic peptide
QASDKTY

SEQ ID NO: 4910 - protein, 7 aa, synthetic construct
  REGION 1..7: note = Description of Artificial Sequence: Synthetic peptide
SQGGSTS

SEQ ID NO: 4911 - protein, 7 aa, synthetic construct
  REGION 1..7: note = Description of Artificial Sequence: Synthetic peptide
LDGKNSM

SEQ ID NO: 4912 - protein, 7 aa, synthetic construct
  REGION 1..7: note = Description of Artificial Sequence: Synthetic peptide
MNTPNPH

SEQ ID NO: 4913 - protein, 7 aa, synthetic construct
  REGION 1..7: note = Description of Artificial Sequence: Synthetic peptide
DVPSKSA

SEQ ID NO: 4914 - protein, 7 aa, synthetic construct
  REGION 1..7: note = Description of Artificial Sequence: Synthetic peptide
GISNGNS

SEQ ID NO: 4915 - protein, 7 aa, synthetic construct
  REGION 1..7: note = Description of Artificial Sequence: Synthetic peptide
ALSSSNK

SEQ ID NO: 4916 - protein, 7 aa, synthetic construct
  REGION 1..7: note = Description of Artificial Sequence: Synthetic peptide
VSSKEAT

SEQ ID NO: 4917 - protein, 7 aa, synthetic construct
  REGION 1..7: note = Description of Artificial Sequence: Synthetic peptide
SGGAPST

SEQ ID NO: 4918 - protein, 7 aa, synthetic construct
  REGION 1..7: note = Description of Artificial Sequence: Synthetic peptide
NDTSGTR

SEQ ID NO: 4919 - protein, 7 aa, synthetic construct
  REGION 1..7: note = Description of Artificial Sequence: Synthetic peptide
TGSESVR

SEQ ID NO: 4920 - protein, 7 aa, synthetic construct
  REGION 1..7: note = Description of Artificial Sequence: Synthetic peptide
GDGKSTI

SEQ ID NO: 4921 - protein, 7 aa, synthetic construct
  REGION 1..7: note = Description of Artificial Sequence: Synthetic peptide
LSGDPRG

SEQ ID NO: 4922 - protein, 7 aa, synthetic construct
  REGION 1..7: note = Description of Artificial Sequence: Synthetic peptide
GSVPGNT

SEQ ID NO: 4923 - protein, 7 aa, synthetic construct
  REGION 1..7: note = Description of Artificial Sequence: Synthetic peptide
TTTSTTA

SEQ ID NO: 4924 - protein, 7 aa, synthetic construct
  REGION 1..7: note = Description of Artificial Sequence: Synthetic peptide
QNATAVS

SEQ ID NO: 4925 - protein, 7 aa, synthetic construct
  REGION 1..7: note = Description of Artificial Sequence: Synthetic peptide
QVPEGQK

SEQ ID NO: 4926 - protein, 7 aa, synthetic construct
  REGION 1..7: note = Description of Artificial Sequence: Synthetic peptide
STSKTES

SEQ ID NO: 4927 - protein, 7 aa, synthetic construct
  REGION 1..7: note = Description of Artificial Sequence: Synthetic peptide
ESGSHSA

SEQ ID NO: 4928 - protein, 7 aa, synthetic construct
  REGION 1..7: note = Description of Artificial Sequence: Synthetic peptide
GSTAAPH

SEQ ID NO: 4929 - protein, 7 aa, synthetic construct
  REGION 1..7: note = Description of Artificial Sequence: Synthetic peptide
NGAPTAS

SEQ ID NO: 4930 - protein, 7 aa, synthetic construct
  REGION 1..7: note = Description of Artificial Sequence: Synthetic peptide
TGSSPST

SEQ ID NO: 4931 - protein, 7 aa, synthetic construct
  REGION 1..7: note = Description of Artificial Sequence: Synthetic peptide
VTGNESK

SEQ ID NO: 4932 - protein, 7 aa, synthetic construct
  REGION 1..7: note = Description of Artificial Sequence: Synthetic peptide
SGATTSG

SEQ ID NO: 4933 - protein, 7 aa, synthetic construct
  REGION 1..7: note = Description of Artificial Sequence: Synthetic peptide
AGANSTL

SEQ ID NO: 4934 - protein, 7 aa, synthetic construct
  REGION 1..7: note = Description of Artificial Sequence: Synthetic peptide
QQDGSHH

SEQ ID NO: 4935 - protein, 7 aa, synthetic construct
  REGION 1..7: note = Description of Artificial Sequence: Synthetic peptide
GASTSPH

SEQ ID NO: 4936 - protein, 7 aa, synthetic construct
  REGION 1..7: note = Description of Artificial Sequence: Synthetic peptide
NRGSGTS

SEQ ID NO: 4937 - protein, 7 aa, synthetic construct
  REGION 1..7: note = Description of Artificial Sequence: Synthetic peptide
NSNSSAG

SEQ ID NO: 4938 - protein, 7 aa, synthetic construct
  REGION 1..7: note = Description of Artificial Sequence: Synthetic peptide
QSGGTSH

SEQ ID NO: 4939 - protein, 7 aa, synthetic construct
  REGION 1..7: note = Description of Artificial Sequence: Synthetic peptide
VSGKETS

SEQ ID NO: 4940 - protein, 7 aa, synthetic construct
  REGION 1..7: note = Description of Artificial Sequence: Synthetic peptide
GTNKDLR

SEQ ID NO: 4941 - protein, 7 aa, synthetic construct
  REGION 1..7: note = Description of Artificial Sequence: Synthetic peptide
QLSGGTK

SEQ ID NO: 4942 - protein, 7 aa, synthetic construct
  REGION 1..7: note = Description of Artificial Sequence: Synthetic peptide
DATLKGN

SEQ ID NO: 4943 - protein, 7 aa, synthetic construct
  REGION 1..7: note = Description of Artificial Sequence: Synthetic peptide
AGNQVAS

SEQ ID NO: 4944 - protein, 7 aa, synthetic construct
  REGION 1..7: note = Description of Artificial Sequence: Synthetic peptide
ASNEKGG

SEQ ID NO: 4945 - protein, 7 aa, synthetic construct
  REGION 1..7: note = Description of Artificial Sequence: Synthetic peptide
TSSSAAT

SEQ ID NO: 4946 - protein, 7 aa, synthetic construct
  REGION 1..7: note = Description of Artificial Sequence: Synthetic peptide
TRDTGSV

SEQ ID NO: 4947 - protein, 7 aa, synthetic construct
  REGION 1..7: note = Description of Artificial Sequence: Synthetic peptide
KLSKPSD

SEQ ID NO: 4948 - protein, 7 aa, synthetic construct
  REGION 1..7: note = Description of Artificial Sequence: Synthetic peptide
MGESKIM

SEQ ID NO: 4949 - protein, 7 aa, synthetic construct
  REGION 1..7: note = Description of Artificial Sequence: Synthetic peptide
GDAKNLA

SEQ ID NO: 4950 - protein, 7 aa, synthetic construct
  REGION 1..7: note = Description of Artificial Sequence: Synthetic peptide
SQGSSTE

SEQ ID NO: 4951 - protein, 7 aa, synthetic construct
  REGION 1..7: note = Description of Artificial Sequence: Synthetic peptide
NTGSSGQ

SEQ ID NO: 4952 - protein, 7 aa, synthetic construct
  REGION 1..7: note = Description of Artificial Sequence: Synthetic peptide
ERGASSI

SEQ ID NO: 4953 - protein, 7 aa, synthetic construct
  REGION 1..7: note = Description of Artificial Sequence: Synthetic peptide
ATTASKG

SEQ ID NO: 4954 - protein, 7 aa, synthetic construct
  REGION 1..7: note = Description of Artificial Sequence: Synthetic peptide
AADAKGS

SEQ ID NO: 4955 - protein, 7 aa, synthetic construct
  REGION 1..7: note = Description of Artificial Sequence: Synthetic peptide
GQGSESR

SEQ ID NO: 4956 - protein, 7 aa, synthetic construct
  REGION 1..7: note = Description of Artificial Sequence: Synthetic peptide
NASNHKE

SEQ ID NO: 4957 - protein, 7 aa, synthetic construct
  REGION 1..7: note = Description of Artificial Sequence: Synthetic peptide
GNADNRH

SEQ ID NO: 4958 - protein, 7 aa, synthetic construct
  REGION 1..7: note = Description of Artificial Sequence: Synthetic peptide
SSNSPNM

SEQ ID NO: 4959 - protein, 7 aa, synthetic construct
  REGION 1..7: note = Description of Artificial Sequence: Synthetic peptide
SGSQPVG

SEQ ID NO: 4960 - protein, 7 aa, synthetic construct
  REGION 1..7: note = Description of Artificial Sequence: Synthetic peptide
SNSERSA

SEQ ID NO: 4961 - protein, 7 aa, synthetic construct
  REGION 1..7: note = Description of Artificial Sequence: Synthetic peptide
SVDQVNR

SEQ ID NO: 4962 - protein, 7 aa, synthetic construct
  REGION 1..7: note = Description of Artificial Sequence: Synthetic peptide
GPAKSSI

SEQ ID NO: 4963 - protein, 7 aa, synthetic construct
  REGION 1..7: note = Description of Artificial Sequence: Synthetic peptide
GVGSSNL

SEQ ID NO: 4964 - protein, 7 aa, synthetic construct
  REGION 1..7: note = Description of Artificial Sequence: Synthetic peptide
NNNKSST

SEQ ID NO: 4965 - protein, 7 aa, synthetic construct
  REGION 1..7: note = Description of Artificial Sequence: Synthetic peptide
AGNSPSL

SEQ ID NO: 4966 - protein, 7 aa, synthetic construct
  REGION 1..7: note = Description of Artificial Sequence: Synthetic peptide
GRDAVIG

SEQ ID NO: 4967 - protein, 7 aa, synthetic construct
  REGION 1..7: note = Description of Artificial Sequence: Synthetic peptide
TSSTSTQ

SEQ ID NO: 4968 - protein, 7 aa, synthetic construct
  REGION 1..7: note = Description of Artificial Sequence: Synthetic peptide
EVAKTSQ

SEQ ID NO: 4969 - protein, 7 aa, synthetic construct
  REGION 1..7: note = Description of Artificial Sequence: Synthetic peptide
TDQSQVK

SEQ ID NO: 4970 - protein, 7 aa, synthetic construct
  REGION 1..7: note = Description of Artificial Sequence: Synthetic peptide
TQATATV

SEQ ID NO: 4971 - protein, 7 aa, synthetic construct
  REGION 1..7: note = Description of Artificial Sequence: Synthetic peptide
DGSGQNQ

SEQ ID NO: 4972 - protein, 7 aa, synthetic construct
  REGION 1..7: note = Description of Artificial Sequence: Synthetic peptide
AGVGSTP

SEQ ID NO: 4973 - protein, 7 aa, synthetic construct
  REGION 1..7: note = Description of Artificial Sequence: Synthetic peptide
NSSKPSE

SEQ ID NO: 4974 - protein, 7 aa, synthetic construct
  REGION 1..7: note = Description of Artificial Sequence: Synthetic peptide
SGGASGS

SEQ ID NO: 4975 - protein, 7 aa, synthetic construct
  REGION 1..7: note = Description of Artificial Sequence: Synthetic peptide
HSNQSSS

SEQ ID NO: 4976 - protein, 7 aa, synthetic construct
  REGION 1..7: note = Description of Artificial Sequence: Synthetic peptide
VTPSNPP

SEQ ID NO: 4977 - protein, 7 aa, synthetic construct
  REGION 1..7: note = Description of Artificial Sequence: Synthetic peptide
TGASVNE

SEQ ID NO: 4978 - protein, 7 aa, synthetic construct
  REGION 1..7: note = Description of Artificial Sequence: Synthetic peptide
AQGPTSG

SEQ ID NO: 4979 - protein, 7 aa, synthetic construct
  REGION 1..7: note = Description of Artificial Sequence: Synthetic peptide
AGPTNNQ

SEQ ID NO: 4980 - protein, 7 aa, synthetic construct
  REGION 1..7: note = Description of Artificial Sequence: Synthetic peptide
NSGADLK

SEQ ID NO: 4981 - protein, 7 aa, synthetic construct
  REGION 1..7: note = Description of Artificial Sequence: Synthetic peptide
DSAGKPS

SEQ ID NO: 4982 - protein, 7 aa, synthetic construct
  REGION 1..7: note = Description of Artificial Sequence: Synthetic peptide
SNGSSIA

SEQ ID NO: 4983 - protein, 7 aa, synthetic construct
  REGION 1..7: note = Description of Artificial Sequence: Synthetic peptide
RTNSEPK

SEQ ID NO: 4984 - protein, 7 aa, synthetic construct
  REGION 1..7: note = Description of Artificial Sequence: Synthetic peptide
QTDKPNS

SEQ ID NO: 4985 - protein, 7 aa, synthetic construct
  REGION 1..7: note = Description of Artificial Sequence: Synthetic peptide
EGQPAIR

SEQ ID NO: 4986 - protein, 7 aa, synthetic construct
  REGION 1..7: note = Description of Artificial Sequence: Synthetic peptide
GTVNGKG

SEQ ID NO: 4987 - protein, 7 aa, synthetic construct
  REGION 1..7: note = Description of Artificial Sequence: Synthetic peptide
AGTDKRT

SEQ ID NO: 4988 - protein, 7 aa, synthetic construct
  REGION 1..7: note = Description of Artificial Sequence: Synthetic peptide
TSPGKPL

SEQ ID NO: 4989 - protein, 7 aa, synthetic construct
  REGION 1..7: note = Description of Artificial Sequence: Synthetic peptide
HAGKSNT

SEQ ID NO: 4990 - protein, 7 aa, synthetic construct
  REGION 1..7: note = Description of Artificial Sequence: Synthetic peptide
NANPPNT

SEQ ID NO: 4991 - protein, 7 aa, synthetic construct
  REGION 1..7: note = Description of Artificial Sequence: Synthetic peptide
SDVSGAK

SEQ ID NO: 4992 - protein, 7 aa, synthetic construct
  REGION 1..7: note = Description of Artificial Sequence: Synthetic peptide
SGTNVTA

SEQ ID NO: 4993 - protein, 7 aa, synthetic construct
  REGION 1..7: note = Description of Artificial Sequence: Synthetic peptide
SNGSPTA

SEQ ID NO: 4994 - protein, 7 aa, synthetic construct
  REGION 1..7: note = Description of Artificial Sequence: Synthetic peptide
TGNGPTS

SEQ ID NO: 4995 - protein, 7 aa, synthetic construct
  REGION 1..7: note = Description of Artificial Sequence: Synthetic peptide
DAVHGKA

SEQ ID NO: 4996 - protein, 7 aa, synthetic construct
  REGION 1..7: note = Description of Artificial Sequence: Synthetic peptide
GTTSSPS

SEQ ID NO: 4997 - protein, 7 aa, synthetic construct
  REGION 1..7: note = Description of Artificial Sequence: Synthetic peptide
NGTTRSQ

SEQ ID NO: 4998 - protein, 7 aa, synthetic construct
  REGION 1..7: note = Description of Artificial Sequence: Synthetic peptide
RDGTSAT

SEQ ID NO: 4999 - protein, 7 aa, synthetic construct
  REGION 1..7: note = Description of Artificial Sequence: Synthetic peptide
SPSKEKV

SEQ ID NO: 5000 - protein, 7 aa, synthetic construct
  REGION 1..7: note = Description of Artificial Sequence: Synthetic peptide
HISPTKG

SEQ ID NO: 5001 - protein, 7 aa, synthetic construct
  REGION 1..7: note = Description of Artificial Sequence: Synthetic peptide
DTKPGTS

SEQ ID NO: 5002 - protein, 7 aa, synthetic construct
  REGION 1..7: note = Description of Artificial Sequence: Synthetic peptide
GRKSEGG

SEQ ID NO: 5003 - protein, 7 aa, synthetic construct
  REGION 1..7: note = Description of Artificial Sequence: Synthetic peptide
SSDTTSK

SEQ ID NO: 5004 - protein, 7 aa, synthetic construct
  REGION 1..7: note = Description of Artificial Sequence: Synthetic peptide
DNNRNPV

SEQ ID NO: 5005 - protein, 7 aa, synthetic construct
  REGION 1..7: note = Description of Artificial Sequence: Synthetic peptide
QTVGTQA

SEQ ID NO: 5006 - protein, 7 aa, synthetic construct
  REGION 1..7: note = Description of Artificial Sequence: Synthetic peptide
ASAPSGK

SEQ ID NO: 5007 - protein, 7 aa, synthetic construct
  REGION 1..7: note = Description of Artificial Sequence: Synthetic peptide
TLQTASS

SEQ ID NO: 5008 - protein, 7 aa, synthetic construct
  REGION 1..7: note = Description of Artificial Sequence: Synthetic peptide
DGSSHKT

SEQ ID NO: 5009 - protein, 7 aa, synthetic construct
  REGION 1..7: note = Description of Artificial Sequence: Synthetic peptide
MSQSPTL

SEQ ID NO: 5010 - protein, 7 aa, synthetic construct
  REGION 1..7: note = Description of Artificial Sequence: Synthetic peptide
NHASSAA

SEQ ID NO: 5011 - protein, 7 aa, synthetic construct
  REGION 1..7: note = Description of Artificial Sequence: Synthetic peptide
NTSSPTS

SEQ ID NO: 5012 - protein, 7 aa, synthetic construct
  REGION 1..7: note = Description of Artificial Sequence: Synthetic peptide
NMGTTAK

SEQ ID NO: 5013 - protein, 7 aa, synthetic construct
  REGION 1..7: note = Description of Artificial Sequence: Synthetic peptide
QGNGNQI

SEQ ID NO: 5014 - protein, 7 aa, synthetic construct
  REGION 1..7: note = Description of Artificial Sequence: Synthetic peptide
VGTNNSS

SEQ ID NO: 5015 - protein, 7 aa, synthetic construct
  REGION 1..7: note = Description of Artificial Sequence: Synthetic peptide
GSSSKTV

SEQ ID NO: 5016 - protein, 7 aa, synthetic construct
  REGION 1..7: note = Description of Artificial Sequence: Synthetic peptide
DNRAKDG

SEQ ID NO: 5017 - protein, 7 aa, synthetic construct
  REGION 1..7: note = Description of Artificial Sequence: Synthetic peptide
KTESSAQ

SEQ ID NO: 5018 - protein, 7 aa, synthetic construct
  REGION 1..7: note = Description of Artificial Sequence: Synthetic peptide
VKNSPST

SEQ ID NO: 5019 - protein, 7 aa, synthetic construct
  REGION 1..7: note = Description of Artificial Sequence: Synthetic peptide
TGTGSRE

SEQ ID NO: 5020 - protein, 7 aa, synthetic construct
  REGION 1..7: note = Description of Artificial Sequence: Synthetic peptide
VTGANSA

SEQ ID NO: 5021 - protein, 7 aa, synthetic construct
  REGION 1..7: note = Description of Artificial Sequence: Synthetic peptide
SSADRNT

SEQ ID NO: 5022 - protein, 7 aa, synthetic construct
  REGION 1..7: note = Description of Artificial Sequence: Synthetic peptide
SGSSTSV

SEQ ID NO: 5023 - protein, 7 aa, synthetic construct
  REGION 1..7: note = Description of Artificial Sequence: Synthetic peptide
TMSSKTL

SEQ ID NO: 5024 - protein, 7 aa, synthetic construct
  REGION 1..7: note = Description of Artificial Sequence: Synthetic peptide
GREATPS

SEQ ID NO: 5025 - protein, 7 aa, synthetic construct
  REGION 1..7: note = Description of Artificial Sequence: Synthetic peptide
GGSTGGS

SEQ ID NO: 5026 - protein, 7 aa, synthetic construct
  REGION 1..7: note = Description of Artificial Sequence: Synthetic peptide
NGSTENR

SEQ ID NO: 5027 - protein, 7 aa, synthetic construct
  REGION 1..7: note = Description of Artificial Sequence: Synthetic peptide
SASSSKV

SEQ ID NO: 5028 - protein, 7 aa, synthetic construct
  REGION 1..7: note = Description of Artificial Sequence: Synthetic peptide
QLTEKGS

SEQ ID NO: 5029 - protein, 7 aa, synthetic construct
  REGION 1..7: note = Description of Artificial Sequence: Synthetic peptide
EPVSGGS

SEQ ID NO: 5030 - protein, 7 aa, synthetic construct
  REGION 1..7: note = Description of Artificial Sequence: Synthetic peptide
STNSPKA

SEQ ID NO: 5031 - protein, 7 aa, synthetic construct
  REGION 1..7: note = Description of Artificial Sequence: Synthetic peptide
STTKGGD

SEQ ID NO: 5032 - protein, 7 aa, synthetic construct
  REGION 1..7: note = Description of Artificial Sequence: Synthetic peptide
LQTSKAT

SEQ ID NO: 5033 - protein, 7 aa, synthetic construct
  REGION 1..7: note = Description of Artificial Sequence: Synthetic peptide
LQSSKDG

SEQ ID NO: 5034 - protein, 7 aa, synthetic construct
  REGION 1..7: note = Description of Artificial Sequence: Synthetic peptide
STGSPAL

SEQ ID NO: 5035 - protein, 7 aa, synthetic construct
  REGION 1..7: note = Description of Artificial Sequence: Synthetic peptide
TSAGTNS

SEQ ID NO: 5036 - protein, 7 aa, synthetic construct
  REGION 1..7: note = Description of Artificial Sequence: Synthetic peptide
GPSTAQN

SEQ ID NO: 5037 - protein, 7 aa, synthetic construct
  REGION 1..7: note = Description of Artificial Sequence: Synthetic peptide
SGSGSGT

SEQ ID NO: 5038 - protein, 7 aa, synthetic construct
  REGION 1..7: note = Description of Artificial Sequence: Synthetic peptide
KADSARG

SEQ ID NO: 5039 - protein, 7 aa, synthetic construct
  REGION 1..7: note = Description of Artificial Sequence: Synthetic peptide
NNGGKAN

SEQ ID NO: 5040 - protein, 7 aa, synthetic construct
  REGION 1..7: note = Description of Artificial Sequence: Synthetic peptide
MENKSNV

SEQ ID NO: 5041 - protein, 7 aa, synthetic construct
  REGION 1..7: note = Description of Artificial Sequence: Synthetic peptide
ESPKLGS

SEQ ID NO: 5042 - protein, 7 aa, synthetic construct
  REGION 1..7: note = Description of Artificial Sequence: Synthetic peptide
VTAPSAA

SEQ ID NO: 5043 - protein, 7 aa, synthetic construct
  REGION 1..7: note = Description of Artificial Sequence: Synthetic peptide
GTTSNST

SEQ ID NO: 5044 - protein, 7 aa, synthetic construct
  REGION 1..7: note = Description of Artificial Sequence: Synthetic peptide
ASSKSIM

SEQ ID NO: 5045 - protein, 7 aa, synthetic construct
  REGION 1..7: note = Description of Artificial Sequence: Synthetic peptide
GNLKGAN

SEQ ID NO: 5046 - protein, 7 aa, synthetic construct
  REGION 1..7: note = Description of Artificial Sequence: Synthetic peptide
TGATPTN

SEQ ID NO: 5047 - protein, 7 aa, synthetic construct
  REGION 1..7: note = Description of Artificial Sequence: Synthetic peptide
GPGTGKA

SEQ ID NO: 5048 - protein, 7 aa, synthetic construct
  REGION 1..7: note = Description of Artificial Sequence: Synthetic peptide
MGVGSPK

SEQ ID NO: 5049 - protein, 7 aa, synthetic construct
  REGION 1..7: note = Description of Artificial Sequence: Synthetic peptide
STASGTN

SEQ ID NO: 5050 - protein, 7 aa, synthetic construct
  REGION 1..7: note = Description of Artificial Sequence: Synthetic peptide
NSNATGK

SEQ ID NO: 5051 - protein, 7 aa, synthetic construct
  REGION 1..7: note = Description of Artificial Sequence: Synthetic peptide
MTGSSTS

SEQ ID NO: 5052 - protein, 7 aa, synthetic construct
  REGION 1..7: note = Description of Artificial Sequence: Synthetic peptide
SDSTRNT

SEQ ID NO: 5053 - protein, 7 aa, synthetic construct
  REGION 1..7: note = Description of Artificial Sequence: Synthetic peptide
TSESRTS

SEQ ID NO: 5054 - protein, 7 aa, synthetic construct
  REGION 1..7: note = Description of Artificial Sequence: Synthetic peptide
APNDSKL

SEQ ID NO: 5055 - protein, 7 aa, synthetic construct
  REGION 1..7: note = Description of Artificial Sequence: Synthetic peptide
GTGDSRA

SEQ ID NO: 5056 - protein, 7 aa, synthetic construct
  REGION 1..7: note = Description of Artificial Sequence: Synthetic peptide
SGANNTR

SEQ ID NO: 5057 - protein, 7 aa, synthetic construct
  REGION 1..7: note = Description of Artificial Sequence: Synthetic peptide
LTGKDRL

SEQ ID NO: 5058 - protein, 7 aa, synthetic construct
  REGION 1..7: note = Description of Artificial Sequence: Synthetic peptide
ESSTKGV

SEQ ID NO: 5059 - protein, 7 aa, synthetic construct
  REGION 1..7: note = Description of Artificial Sequence: Synthetic peptide
DTRQSQK

SEQ ID NO: 5060 - protein, 7 aa, synthetic construct
  REGION 1..7: note = Description of Artificial Sequence: Synthetic peptide
SSKSTAT

SEQ ID NO: 5061 - protein, 7 aa, synthetic construct
  REGION 1..7: note = Description of Artificial Sequence: Synthetic peptide
RLGDKAE

SEQ ID NO: 5062 - protein, 7 aa, synthetic construct
  REGION 1..7: note = Description of Artificial Sequence: Synthetic peptide
TGDAKIH

SEQ ID NO: 5063 - protein, 7 aa, synthetic construct
  REGION 1..7: note = Description of Artificial Sequence: Synthetic peptide
SNDKQGL

SEQ ID NO: 5064 - protein, 7 aa, synthetic construct
  REGION 1..7: note = Description of Artificial Sequence: Synthetic peptide
ENTHKTV

SEQ ID NO: 5065 - protein, 7 aa, synthetic construct
  REGION 1..7: note = Description of Artificial Sequence: Synthetic peptide
AGSQEKT

SEQ ID NO: 5066 - protein, 7 aa, synthetic construct
  REGION 1..7: note = Description of Artificial Sequence: Synthetic peptide
NMNDARS

SEQ ID NO: 5067 - protein, 7 aa, synthetic construct
  REGION 1..7: note = Description of Artificial Sequence: Synthetic peptide
DSMASVK

SEQ ID NO: 5068 - protein, 7 aa, synthetic construct
  REGION 1..7: note = Description of Artificial Sequence: Synthetic peptide
QDSLKER

SEQ ID NO: 5069 - protein, 7 aa, synthetic construct
  REGION 1..7: note = Description of Artificial Sequence: Synthetic peptide
ENTTKSS

SEQ ID NO: 5070 - protein, 7 aa, synthetic construct
  REGION 1..7: note = Description of Artificial Sequence: Synthetic peptide
ASNASPS

SEQ ID NO: 5071 - protein, 7 aa, synthetic construct
  REGION 1..7: note = Description of Artificial Sequence: Synthetic peptide
STAPVNA

SEQ ID NO: 5072 - protein, 7 aa, synthetic construct
  REGION 1..7: note = Description of Artificial Sequence: Synthetic peptide
NAGAASH

SEQ ID NO: 5073 - protein, 7 aa, synthetic construct
  REGION 1..7: note = Description of Artificial Sequence: Synthetic peptide
TSGSDPR

SEQ ID NO: 5074 - protein, 7 aa, synthetic construct
  REGION 1..7: note = Description of Artificial Sequence: Synthetic peptide
SGQSVNS

SEQ ID NO: 5075 - protein, 7 aa, synthetic construct
  REGION 1..7: note = Description of Artificial Sequence: Synthetic peptide
SSNKISQ

SEQ ID NO: 5076 - protein, 7 aa, synthetic construct
  REGION 1..7: note = Description of Artificial Sequence: Synthetic peptide
QNAQKTS

SEQ ID NO: 5077 - protein, 7 aa, synthetic construct
  REGION 1..7: note = Description of Artificial Sequence: Synthetic peptide
EVRSNKG

SEQ ID NO: 5078 - protein, 7 aa, synthetic construct
  REGION 1..7: note = Description of Artificial Sequence: Synthetic peptide
VRDQTTG

SEQ ID NO: 5079 - protein, 7 aa, synthetic construct
  REGION 1..7: note = Description of Artificial Sequence: Synthetic peptide
FPAGSKD

SEQ ID NO: 5080 - protein, 7 aa, synthetic construct
  REGION 1..7: note = Description of Artificial Sequence: Synthetic peptide
NSKASAS

SEQ ID NO: 5081 - protein, 7 aa, synthetic construct
  REGION 1..7: note = Description of Artificial Sequence: Synthetic peptide
NAAQHNT

SEQ ID NO: 5082 - protein, 7 aa, synthetic construct
  REGION 1..7: note = Description of Artificial Sequence: Synthetic peptide
NSGNAST

SEQ ID NO: 5083 - protein, 7 aa, synthetic construct
  REGION 1..7: note = Description of Artificial Sequence: Synthetic peptide
THTQSTG

SEQ ID NO: 5084 - protein, 7 aa, synthetic construct
  REGION 1..7: note = Description of Artificial Sequence: Synthetic peptide
TGHNSLK

SEQ ID NO: 5085 - protein, 7 aa, synthetic construct
  REGION 1..7: note = Description of Artificial Sequence: Synthetic peptide
TVNAKAG

SEQ ID NO: 5086 - protein, 7 aa, synthetic construct
  REGION 1..7: note = Description of Artificial Sequence: Synthetic peptide
TNSPTTQ

SEQ ID NO: 5087 - protein, 7 aa, synthetic construct
  REGION 1..7: note = Description of Artificial Sequence: Synthetic peptide
TMGGSNS

SEQ ID NO: 5088 - protein, 7 aa, synthetic construct
  REGION 1..7: note = Description of Artificial Sequence: Synthetic peptide
TIGDHPR

SEQ ID NO: 5089 - protein, 7 aa, synthetic construct
  REGION 1..7: note = Description of Artificial Sequence: Synthetic peptide
TSSPPAN

SEQ ID NO: 5090 - protein, 7 aa, synthetic construct
  REGION 1..7: note = Description of Artificial Sequence: Synthetic peptide
SSSGTKS

SEQ ID NO: 5091 - protein, 7 aa, synthetic construct
  REGION 1..7: note = Description of Artificial Sequence: Synthetic peptide
SPESNSK

SEQ ID NO: 5092 - protein, 7 aa, synthetic construct
  REGION 1..7: note = Description of Artificial Sequence: Synthetic peptide
SGASSAV

SEQ ID NO: 5093 - protein, 7 aa, synthetic construct
  REGION 1..7: note = Description of Artificial Sequence: Synthetic peptide
SGAQGNM

SEQ ID NO: 5094 - protein, 7 aa, synthetic construct
  REGION 1..7: note = Description of Artificial Sequence: Synthetic peptide
MSAGKAG

SEQ ID NO: 5095 - protein, 7 aa, synthetic construct
  REGION 1..7: note = Description of Artificial Sequence: Synthetic peptide
MSSDKGS

SEQ ID NO: 5096 - protein, 7 aa, synthetic construct
  REGION 1..7: note = Description of Artificial Sequence: Synthetic peptide
HTGGEKA

SEQ ID NO: 5097 - protein, 7 aa, synthetic construct
  REGION 1..7: note = Description of Artificial Sequence: Synthetic peptide
QNTTGTT

SEQ ID NO: 5098 - protein, 7 aa, synthetic construct
  REGION 1..7: note = Description of Artificial Sequence: Synthetic peptide
LTSRDQV

SEQ ID NO: 5099 - protein, 7 aa, synthetic construct
  REGION 1..7: note = Description of Artificial Sequence: Synthetic peptide
LQSGVTG

SEQ ID NO: 5100 - protein, 7 aa, synthetic construct
  REGION 1..7: note = Description of Artificial Sequence: Synthetic peptide
ESTGASS

SEQ ID NO: 5101 - protein, 7 aa, synthetic construct
  REGION 1..7: note = Description of Artificial Sequence: Synthetic peptide
EGAGSAG

SEQ ID NO: 5102 - protein, 7 aa, synthetic construct
  REGION 1..7: note = Description of Artificial Sequence: Synthetic peptide
EVSRNPG

SEQ ID NO: 5103 - protein, 7 aa, synthetic construct
  REGION 1..7: note = Description of Artificial Sequence: Synthetic peptide
DRVGSST

SEQ ID NO: 5104 - protein, 7 aa, synthetic construct
  REGION 1..7: note = Description of Artificial Sequence: Synthetic peptide
ATKSNAG

SEQ ID NO: 5105 - protein, 7 aa, synthetic construct
  REGION 1..7: note = Description of Artificial Sequence: Synthetic peptide
APPTGGH

SEQ ID NO: 5106 - protein, 7 aa, synthetic construct
  REGION 1..7: note = Description of Artificial Sequence: Synthetic peptide
GHTARDG

SEQ ID NO: 5107 - protein, 7 aa, synthetic construct
  REGION 1..7: note = Description of Artificial Sequence: Synthetic peptide
GAAGAAS

SEQ ID NO: 5108 - protein, 7 aa, synthetic construct
  REGION 1..7: note = Description of Artificial Sequence: Synthetic peptide
GGSNAPV

SEQ ID NO: 5109 - protein, 7 aa, synthetic construct
  REGION 1..7: note = Description of Artificial Sequence: Synthetic peptide
VAGATAG

SEQ ID NO: 5110 - protein, 7 aa, synthetic construct
  REGION 1..7: note = Description of Artificial Sequence: Synthetic peptide
SMNDKST

SEQ ID NO: 5111 - protein, 7 aa, synthetic construct
  REGION 1..7: note = Description of Artificial Sequence: Synthetic peptide
SHITSEK

SEQ ID NO: 5112 - protein, 7 aa, synthetic construct
  REGION 1..7: note = Description of Artificial Sequence: Synthetic peptide
LTNSNAA

SEQ ID NO: 5113 - protein, 7 aa, synthetic construct
  REGION 1..7: note = Description of Artificial Sequence: Synthetic peptide
LQGTGAG

SEQ ID NO: 5114 - protein, 7 aa, synthetic construct
  REGION 1..7: note = Description of Artificial Sequence: Synthetic peptide
ANTTKSS

SEQ ID NO: 5115 - protein, 7 aa, synthetic construct
  REGION 1..7: note = Description of Artificial Sequence: Synthetic peptide
AANDRNL

SEQ ID NO: 5116 - protein, 7 aa, synthetic construct
  REGION 1..7: note = Description of Artificial Sequence: Synthetic peptide
HGNNTPT

SEQ ID NO: 5117 - protein, 7 aa, synthetic construct
  REGION 1..7: note = Description of Artificial Sequence: Synthetic peptide
TQNTATS

SEQ ID NO: 5118 - protein, 7 aa, synthetic construct
  REGION 1..7: note = Description of Artificial Sequence: Synthetic peptide
TSGQPSR

SEQ ID NO: 5119 - protein, 7 aa, synthetic construct
  REGION 1..7: note = Description of Artificial Sequence: Synthetic peptide
TMTQTSS

SEQ ID NO: 5120 - protein, 7 aa, synthetic construct
  REGION 1..7: note = Description of Artificial Sequence: Synthetic peptide
SDQKGAQ

SEQ ID NO: 5121 - protein, 7 aa, synthetic construct
  REGION 1..7: note = Description of Artificial Sequence: Synthetic peptide
GQRGQEG

SEQ ID NO: 5122 - protein, 7 aa, synthetic construct
  REGION 1..7: note = Description of Artificial Sequence: Synthetic peptide
ENSSSSR

SEQ ID NO: 5123 - protein, 7 aa, synthetic construct
  REGION 1..7: note = Description of Artificial Sequence: Synthetic peptide
TAATHPA

SEQ ID NO: 5124 - protein, 7 aa, synthetic construct
  REGION 1..7: note = Description of Artificial Sequence: Synthetic peptide
ASTGKMT

SEQ ID NO: 5125 - protein, 7 aa, synthetic construct
  REGION 1..7: note = Description of Artificial Sequence: Synthetic peptide
SSESNRS

SEQ ID NO: 5126 - protein, 7 aa, synthetic construct
  REGION 1..7: note = Description of Artificial Sequence: Synthetic peptide
SSGNGSS

SEQ ID NO: 5127 - protein, 7 aa, synthetic construct
  REGION 1..7: note = Description of Artificial Sequence: Synthetic peptide
SNGSSTA

SEQ ID NO: 5128 - protein, 7 aa, synthetic construct
  REGION 1..7: note = Description of Artificial Sequence: Synthetic peptide
GSSTRPE

SEQ ID NO: 5129 - protein, 7 aa, synthetic construct
  REGION 1..7: note = Description of Artificial Sequence: Synthetic peptide
HVEPKLG

SEQ ID NO: 5130 - protein, 7 aa, synthetic construct
  REGION 1..7: note = Description of Artificial Sequence: Synthetic peptide
GSSDSRS

SEQ ID NO: 5131 - protein, 7 aa, synthetic construct
  REGION 1..7: note = Description of Artificial Sequence: Synthetic peptide
GDSKVNN

SEQ ID NO: 5132 - protein, 7 aa, synthetic construct
  REGION 1..7: note = Description of Artificial Sequence: Synthetic peptide
VGKSSNS

SEQ ID NO: 5133 - protein, 7 aa, synthetic construct
  REGION 1..7: note = Description of Artificial Sequence: Synthetic peptide
SPGSSVS

SEQ ID NO: 5134 - protein, 7 aa, synthetic construct
  REGION 1..7: note = Description of Artificial Sequence: Synthetic peptide
LTGPSNT

SEQ ID NO: 5135 - protein, 7 aa, synthetic construct
  REGION 1..7: note = Description of Artificial Sequence: Synthetic peptide
GGIGTKE

SEQ ID NO: 5136 - protein, 7 aa, synthetic construct
  REGION 1..7: note = Description of Artificial Sequence: Synthetic peptide
QVAPSNS

SEQ ID NO: 5137 - protein, 7 aa, synthetic construct
  REGION 1..7: note = Description of Artificial Sequence: Synthetic peptide
GTSQTSS

SEQ ID NO: 5138 - protein, 7 aa, synthetic construct
  REGION 1..7: note = Description of Artificial Sequence: Synthetic peptide
SGNSSHA

SEQ ID NO: 5139 - protein, 7 aa, synthetic construct
  REGION 1..7: note = Description of Artificial Sequence: Synthetic peptide
MTTTKAE

SEQ ID NO: 5140 - protein, 7 aa, synthetic construct
  REGION 1..7: note = Description of Artificial Sequence: Synthetic peptide
EASTRSG

SEQ ID NO: 5141 - protein, 7 aa, synthetic construct
  REGION 1..7: note = Description of Artificial Sequence: Synthetic peptide
SNKPGTN

SEQ ID NO: 5142 - protein, 7 aa, synthetic construct
  REGION 1..7: note = Description of Artificial Sequence: Synthetic peptide
NSRPQNN

SEQ ID NO: 5143 - protein, 7 aa, synthetic construct
  REGION 1..7: note = Description of Artificial Sequence: Synthetic peptide
QGQSNGS

SEQ ID NO: 5144 - protein, 7 aa, synthetic construct
  REGION 1..7: note = Description of Artificial Sequence: Synthetic peptide
NPTAGGS

SEQ ID NO: 5145 - protein, 7 aa, synthetic construct
  REGION 1..7: note = Description of Artificial Sequence: Synthetic peptide
HGSGNKG

SEQ ID NO: 5146 - protein, 7 aa, synthetic construct
  REGION 1..7: note = Description of Artificial Sequence: Synthetic peptide
SGGSGAK

SEQ ID NO: 5147 - protein, 7 aa, synthetic construct
  REGION 1..7: note = Description of Artificial Sequence: Synthetic peptide
THTSKMS

SEQ ID NO: 5148 - protein, 7 aa, synthetic construct
  REGION 1..7: note = Description of Artificial Sequence: Synthetic peptide
RDVKPAS

SEQ ID NO: 5149 - protein, 7 aa, synthetic construct
  REGION 1..7: note = Description of Artificial Sequence: Synthetic peptide
DRSAETR

SEQ ID NO: 5150 - protein, 7 aa, synthetic construct
  REGION 1..7: note = Description of Artificial Sequence: Synthetic peptide
DAVTSTK

SEQ ID NO: 5151 - protein, 7 aa, synthetic construct
  REGION 1..7: note = Description of Artificial Sequence: Synthetic peptide
QSTGKLG

SEQ ID NO: 5152 - protein, 7 aa, synthetic construct
  REGION 1..7: note = Description of Artificial Sequence: Synthetic peptide
DSLSSPK

SEQ ID NO: 5153 - protein, 7 aa, synthetic construct
  REGION 1..7: note = Description of Artificial Sequence: Synthetic peptide
GDTRVSS

SEQ ID NO: 5154 - protein, 7 aa, synthetic construct
  REGION 1..7: note = Description of Artificial Sequence: Synthetic peptide
HSAQGSS

SEQ ID NO: 5155 - protein, 7 aa, synthetic construct
  REGION 1..7: note = Description of Artificial Sequence: Synthetic peptide
GMNTKAT

SEQ ID NO: 5156 - protein, 7 aa, synthetic construct
  REGION 1..7: note = Description of Artificial Sequence: Synthetic peptide
YGSDKSL

SEQ ID NO: 5157 - protein, 7 aa, synthetic construct
  REGION 1..7: note = Description of Artificial Sequence: Synthetic peptide
TEDGKQH

SEQ ID NO: 5158 - protein, 7 aa, synthetic construct
  REGION 1..7: note = Description of Artificial Sequence: Synthetic peptide
STDSQGK

SEQ ID NO: 5159 - protein, 7 aa, synthetic construct
  REGION 1..7: note = Description of Artificial Sequence: Synthetic peptide
VMADKSS

SEQ ID NO: 5160 - protein, 7 aa, synthetic construct
  REGION 1..7: note = Description of Artificial Sequence: Synthetic peptide
GASSARE

SEQ ID NO: 5161 - protein, 7 aa, synthetic construct
  REGION 1..7: note = Description of Artificial Sequence: Synthetic peptide
VNGSTVT

SEQ ID NO: 5162 - protein, 7 aa, synthetic construct
  REGION 1..7: note = Description of Artificial Sequence: Synthetic peptide
GKQGVSA

SEQ ID NO: 5163 - protein, 7 aa, synthetic construct
  REGION 1..7: note = Description of Artificial Sequence: Synthetic peptide
TVTDGNR

SEQ ID NO: 5164 - protein, 7 aa, synthetic construct
  REGION 1..7: note = Description of Artificial Sequence: Synthetic peptide
VSDHKSG

SEQ ID NO: 5165 - protein, 7 aa, synthetic construct
  REGION 1..7: note = Description of Artificial Sequence: Synthetic peptide
HSASHQA

SEQ ID NO: 5166 - protein, 7 aa, synthetic construct
  REGION 1..7: note = Description of Artificial Sequence: Synthetic peptide
VSTPSNL

SEQ ID NO: 5167 - protein, 7 aa, synthetic construct
  REGION 1..7: note = Description of Artificial Sequence: Synthetic peptide
SAGSSRT

SEQ ID NO: 5168 - protein, 7 aa, synthetic construct
  REGION 1..7: note = Description of Artificial Sequence: Synthetic peptide
TPGASNV

SEQ ID NO: 5169 - protein, 7 aa, synthetic construct
  REGION 1..7: note = Description of Artificial Sequence: Synthetic peptide
TTSAPPN

SEQ ID NO: 5170 - protein, 7 aa, synthetic construct
  REGION 1..7: note = Description of Artificial Sequence: Synthetic peptide
NSKQVPG

SEQ ID NO: 5171 - protein, 7 aa, synthetic construct
  REGION 1..7: note = Description of Artificial Sequence: Synthetic peptide
QSDSAPR

SEQ ID NO: 5172 - protein, 7 aa, synthetic construct
  REGION 1..7: note = Description of Artificial Sequence: Synthetic peptide
LSNKGSG

SEQ ID NO: 5173 - protein, 7 aa, synthetic construct
  REGION 1..7: note = Description of Artificial Sequence: Synthetic peptide
KNSGASQ

SEQ ID NO: 5174 - protein, 7 aa, synthetic construct
  REGION 1..7: note = Description of Artificial Sequence: Synthetic peptide
TIADSNR

SEQ ID NO: 5175 - protein, 7 aa, synthetic construct
  REGION 1..7: note = Description of Artificial Sequence: Synthetic peptide
SAGGQMS

SEQ ID NO: 5176 - protein, 7 aa, synthetic construct
  REGION 1..7: note = Description of Artificial Sequence: Synthetic peptide
NSDNRGI

SEQ ID NO: 5177 - protein, 7 aa, synthetic construct
  REGION 1..7: note = Description of Artificial Sequence: Synthetic peptide
NTGSDVK

SEQ ID NO: 5178 - protein, 7 aa, synthetic construct
  REGION 1..7: note = Description of Artificial Sequence: Synthetic peptide
NASTSSG

SEQ ID NO: 5179 - protein, 7 aa, synthetic construct
  REGION 1..7: note = Description of Artificial Sequence: Synthetic peptide
RRDKELS

SEQ ID NO: 5180 - protein, 7 aa, synthetic construct
  REGION 1..7: note = Description of Artificial Sequence: Synthetic peptide
ETVNKPS

SEQ ID NO: 5181 - protein, 7 aa, synthetic construct
  REGION 1..7: note = Description of Artificial Sequence: Synthetic peptide
NQGNGSS

SEQ ID NO: 5182 - protein, 7 aa, synthetic construct
  REGION 1..7: note = Description of Artificial Sequence: Synthetic peptide
EGSSRVG

SEQ ID NO: 5183 - protein, 7 aa, synthetic construct
  REGION 1..7: note = Description of Artificial Sequence: Synthetic peptide
GSIAGSN

SEQ ID NO: 5184 - protein, 7 aa, synthetic construct
  REGION 1..7: note = Description of Artificial Sequence: Synthetic peptide
NQTSNST

SEQ ID NO: 5185 - protein, 7 aa, synthetic construct
  REGION 1..7: note = Description of Artificial Sequence: Synthetic peptide
EGTDRFG

SEQ ID NO: 5186 - protein, 7 aa, synthetic construct
  REGION 1..7: note = Description of Artificial Sequence: Synthetic peptide
AGGNASQ

SEQ ID NO: 5187 - protein, 7 aa, synthetic construct
  REGION 1..7: note = Description of Artificial Sequence: Synthetic peptide
RNTSPGV

SEQ ID NO: 5188 - protein, 7 aa, synthetic construct
  REGION 1..7: note = Description of Artificial Sequence: Synthetic peptide
TGSNSTG

SEQ ID NO: 5189 - protein, 7 aa, synthetic construct
  REGION 1..7: note = Description of Artificial Sequence: Synthetic peptide
QPGSSLK

SEQ ID NO: 5190 - protein, 7 aa, synthetic construct
  REGION 1..7: note = Description of Artificial Sequence: Synthetic peptide
INEGNSK

SEQ ID NO: 5191 - protein, 7 aa, synthetic construct
  REGION 1..7: note = Description of Artificial Sequence: Synthetic peptide
NVPSGNS

SEQ ID NO: 5192 - protein, 7 aa, synthetic construct
  REGION 1..7: note = Description of Artificial Sequence: Synthetic peptide
ERGANTK

SEQ ID NO: 5193 - protein, 7 aa, synthetic construct
  REGION 1..7: note = Description of Artificial Sequence: Synthetic peptide
GSAQGSV

SEQ ID NO: 5194 - protein, 7 aa, synthetic construct
  REGION 1..7: note = Description of Artificial Sequence: Synthetic peptide
DPVTPRA

SEQ ID NO: 5195 - protein, 7 aa, synthetic construct
  REGION 1..7: note = Description of Artificial Sequence: Synthetic peptide
DSKSGTT

SEQ ID NO: 5196 - protein, 7 aa, synthetic construct
  REGION 1..7: note = Description of Artificial Sequence: Synthetic peptide
GTTTESR

SEQ ID NO: 5197 - protein, 7 aa, synthetic construct
  REGION 1..7: note = Description of Artificial Sequence: Synthetic peptide
AGNRDNV

SEQ ID NO: 5198 - protein, 7 aa, synthetic construct
  REGION 1..7: note = Description of Artificial Sequence: Synthetic peptide
AIQGDSK

SEQ ID NO: 5199 - protein, 7 aa, synthetic construct
  REGION 1..7: note = Description of Artificial Sequence: Synthetic peptide
GKSDPQG

SEQ ID NO: 5200 - protein, 7 aa, synthetic construct
  REGION 1..7: note = Description of Artificial Sequence: Synthetic peptide
ELSSPKT

SEQ ID NO: 5201 - protein, 7 aa, synthetic construct
  REGION 1..7: note = Description of Artificial Sequence: Synthetic peptide
GSSPSVH

SEQ ID NO: 5202 - protein, 7 aa, synthetic construct
  REGION 1..7: note = Description of Artificial Sequence: Synthetic peptide
QPQDAPK

SEQ ID NO: 5203 - protein, 7 aa, synthetic construct
  REGION 1..7: note = Description of Artificial Sequence: Synthetic peptide
NSGTNSS

SEQ ID NO: 5204 - protein, 7 aa, synthetic construct
  REGION 1..7: note = Description of Artificial Sequence: Synthetic peptide
ATGSHSV

SEQ ID NO: 5205 - protein, 7 aa, synthetic construct
  REGION 1..7: note = Description of Artificial Sequence: Synthetic peptide
DSSTSAK

SEQ ID NO: 5206 - protein, 7 aa, synthetic construct
  REGION 1..7: note = Description of Artificial Sequence: Synthetic peptide
QQPQAGS

SEQ ID NO: 5207 - protein, 7 aa, synthetic construct
  REGION 1..7: note = Description of Artificial Sequence: Synthetic peptide
GSSSVRE

SEQ ID NO: 5208 - protein, 7 aa, synthetic construct
  REGION 1..7: note = Description of Artificial Sequence: Synthetic peptide
SVGGDLK

SEQ ID NO: 5209 - protein, 7 aa, synthetic construct
  REGION 1..7: note = Description of Artificial Sequence: Synthetic peptide
VQTAQNG

SEQ ID NO: 5210 - protein, 7 aa, synthetic construct
  REGION 1..7: note = Description of Artificial Sequence: Synthetic peptide
DKTDKTY

SEQ ID NO: 5211 - protein, 7 aa, synthetic construct
  REGION 1..7: note = Description of Artificial Sequence: Synthetic peptide
SGGDSHR

SEQ ID NO: 5212 - protein, 7 aa, synthetic construct
  REGION 1..7: note = Description of Artificial Sequence: Synthetic peptide
SMGSEKA

SEQ ID NO: 5213 - protein, 7 aa, synthetic construct
  REGION 1..7: note = Description of Artificial Sequence: Synthetic peptide
QPPDSKT

SEQ ID NO: 5214 - protein, 7 aa, synthetic construct
  REGION 1..7: note = Description of Artificial Sequence: Synthetic peptide
ATGQPPR

SEQ ID NO: 5215 - protein, 7 aa, synthetic construct
  REGION 1..7: note = Description of Artificial Sequence: Synthetic peptide
VGSSSGG

SEQ ID NO: 5216 - protein, 7 aa, synthetic construct
  REGION 1..7: note = Description of Artificial Sequence: Synthetic peptide
SANSTPR

SEQ ID NO: 5217 - protein, 7 aa, synthetic construct
  REGION 1..7: note = Description of Artificial Sequence: Synthetic peptide
NSSRESV

SEQ ID NO: 5218 - protein, 7 aa, synthetic construct
  REGION 1..7: note = Description of Artificial Sequence: Synthetic peptide
NHGDRGG

SEQ ID NO: 5219 - protein, 7 aa, synthetic construct
  REGION 1..7: note = Description of Artificial Sequence: Synthetic peptide
GVGDTNR

SEQ ID NO: 5220 - protein, 7 aa, synthetic construct
  REGION 1..7: note = Description of Artificial Sequence: Synthetic peptide
SDSNHRN

SEQ ID NO: 5221 - protein, 7 aa, synthetic construct
  REGION 1..7: note = Description of Artificial Sequence: Synthetic peptide
STERSGN

SEQ ID NO: 5222 - protein, 7 aa, synthetic construct
  REGION 1..7: note = Description of Artificial Sequence: Synthetic peptide
HSSDSVK

SEQ ID NO: 5223 - protein, 7 aa, synthetic construct
  REGION 1..7: note = Description of Artificial Sequence: Synthetic peptide
HGQATIS

SEQ ID NO: 5224 - protein, 7 aa, synthetic construct
  REGION 1..7: note = Description of Artificial Sequence: Synthetic peptide
SPVPTSA

SEQ ID NO: 5225 - protein, 7 aa, synthetic construct
  REGION 1..7: note = Description of Artificial Sequence: Synthetic peptide
TKTTANG

SEQ ID NO: 5226 - protein, 7 aa, synthetic construct
  REGION 1..7: note = Description of Artificial Sequence: Synthetic peptide
EDHGSKG

SEQ ID NO: 5227 - protein, 7 aa, synthetic construct
  REGION 1..7: note = Description of Artificial Sequence: Synthetic peptide
EGRTPLM

SEQ ID NO: 5228 - protein, 7 aa, synthetic construct
  REGION 1..7: note = Description of Artificial Sequence: Synthetic peptide
VASERSV

SEQ ID NO: 5229 - protein, 7 aa, synthetic construct
  REGION 1..7: note = Description of Artificial Sequence: Synthetic peptide
QVSSGHA

SEQ ID NO: 5230 - protein, 7 aa, synthetic construct
  REGION 1..7: note = Description of Artificial Sequence: Synthetic peptide
LTGTDKG

SEQ ID NO: 5231 - protein, 7 aa, synthetic construct
  REGION 1..7: note = Description of Artificial Sequence: Synthetic peptide
SNGSAVS

SEQ ID NO: 5232 - protein, 7 aa, synthetic construct
  REGION 1..7: note = Description of Artificial Sequence: Synthetic peptide
TGAARPD

SEQ ID NO: 5233 - protein, 7 aa, synthetic construct
  REGION 1..7: note = Description of Artificial Sequence: Synthetic peptide
VSSSSAT

SEQ ID NO: 5234 - protein, 7 aa, synthetic construct
  REGION 1..7: note = Description of Artificial Sequence: Synthetic peptide
ASSSSQQ

SEQ ID NO: 5235 - protein, 7 aa, synthetic construct
  REGION 1..7: note = Description of Artificial Sequence: Synthetic peptide
SAPGDTK

SEQ ID NO: 5236 - protein, 7 aa, synthetic construct
  REGION 1..7: note = Description of Artificial Sequence: Synthetic peptide
GDSQKQG

SEQ ID NO: 5237 - protein, 7 aa, synthetic construct
  REGION 1..7: note = Description of Artificial Sequence: Synthetic peptide
TGSTGMS

SEQ ID NO: 5238 - protein, 7 aa, synthetic construct
  REGION 1..7: note = Description of Artificial Sequence: Synthetic peptide
GTSQPST

SEQ ID NO: 5239 - protein, 7 aa, synthetic construct
  REGION 1..7: note = Description of Artificial Sequence: Synthetic peptide
GTSPGHN

SEQ ID NO: 5240 - protein, 7 aa, synthetic construct
  REGION 1..7: note = Description of Artificial Sequence: Synthetic peptide
GAGEDRH

SEQ ID NO: 5241 - protein, 7 aa, synthetic construct
  REGION 1..7: note = Description of Artificial Sequence: Synthetic peptide
GSTKQNE

SEQ ID NO: 5242 - protein, 7 aa, synthetic construct
  REGION 1..7: note = Description of Artificial Sequence: Synthetic peptide
DASNPGR

SEQ ID NO: 5243 - protein, 7 aa, synthetic construct
  REGION 1..7: note = Description of Artificial Sequence: Synthetic peptide
SHASAQG

SEQ ID NO: 5244 - protein, 7 aa, synthetic construct
  REGION 1..7: note = Description of Artificial Sequence: Synthetic peptide
EGGSHVL

SEQ ID NO: 5245 - protein, 7 aa, synthetic construct
  REGION 1..7: note = Description of Artificial Sequence: Synthetic peptide
THGDKLM

SEQ ID NO: 5246 - protein, 7 aa, synthetic construct
  REGION 1..7: note = Description of Artificial Sequence: Synthetic peptide
GNVSGHS

SEQ ID NO: 5247 - protein, 7 aa, synthetic construct
  REGION 1..7: note = Description of Artificial Sequence: Synthetic peptide
STTTKGM

SEQ ID NO: 5248 - protein, 7 aa, synthetic construct
  REGION 1..7: note = Description of Artificial Sequence: Synthetic peptide
ESTSGGK

SEQ ID NO: 5249 - protein, 7 aa, synthetic construct
  REGION 1..7: note = Description of Artificial Sequence: Synthetic peptide
GDVGKSV

SEQ ID NO: 5250 - protein, 7 aa, synthetic construct
  REGION 1..7: note = Description of Artificial Sequence: Synthetic peptide
TSQTHPK

SEQ ID NO: 5251 - protein, 7 aa, synthetic construct
  REGION 1..7: note = Description of Artificial Sequence: Synthetic peptide
ESSASPR

SEQ ID NO: 5252 - protein, 7 aa, synthetic construct
  REGION 1..7: note = Description of Artificial Sequence: Synthetic peptide
TQSTSGT

SEQ ID NO: 5253 - protein, 7 aa, synthetic construct
  REGION 1..7: note = Description of Artificial Sequence: Synthetic peptide
AANSGST

SEQ ID NO: 5254 - protein, 7 aa, synthetic construct
  REGION 1..7: note = Description of Artificial Sequence: Synthetic peptide
ASGSHAT

SEQ ID NO: 5255 - protein, 7 aa, synthetic construct
  REGION 1..7: note = Description of Artificial Sequence: Synthetic peptide
EPTAKGN

SEQ ID NO: 5256 - protein, 7 aa, synthetic construct
  REGION 1..7: note = Description of Artificial Sequence: Synthetic peptide
SGSSSSV

SEQ ID NO: 5257 - protein, 7 aa, synthetic construct
  REGION 1..7: note = Description of Artificial Sequence: Synthetic peptide
NSGNSSG

SEQ ID NO: 5258 - protein, 7 aa, synthetic construct
  REGION 1..7: note = Description of Artificial Sequence: Synthetic peptide
TGMDKAL

SEQ ID NO: 5259 - protein, 7 aa, synthetic construct
  REGION 1..7: note = Description of Artificial Sequence: Synthetic peptide
EGTGKLL

SEQ ID NO: 5260 - protein, 7 aa, synthetic construct
  REGION 1..7: note = Description of Artificial Sequence: Synthetic peptide
ASSRTPE

SEQ ID NO: 5261 - protein, 7 aa, synthetic construct
  REGION 1..7: note = Description of Artificial Sequence: Synthetic peptide
NPKPSNT

SEQ ID NO: 5262 - protein, 7 aa, synthetic construct
  REGION 1..7: note = Description of Artificial Sequence: Synthetic peptide
TTERSGV

SEQ ID NO: 5263 - protein, 7 aa, synthetic construct
  REGION 1..7: note = Description of Artificial Sequence: Synthetic peptide
GQTDTMK

SEQ ID NO: 5264 - protein, 7 aa, synthetic construct
  REGION 1..7: note = Description of Artificial Sequence: Synthetic peptide
QGSDTVR

SEQ ID NO: 5265 - protein, 7 aa, synthetic construct
  REGION 1..7: note = Description of Artificial Sequence: Synthetic peptide
HQNAGVQ

SEQ ID NO: 5266 - protein, 7 aa, synthetic construct
  REGION 1..7: note = Description of Artificial Sequence: Synthetic peptide
NGDSVHK

SEQ ID NO: 5267 - protein, 7 aa, synthetic construct
  REGION 1..7: note = Description of Artificial Sequence: Synthetic peptide
SSGSAKE

SEQ ID NO: 5268 - protein, 7 aa, synthetic construct
  REGION 1..7: note = Description of Artificial Sequence: Synthetic peptide
NTSSSAN

SEQ ID NO: 5269 - protein, 7 aa, synthetic construct
  REGION 1..7: note = Description of Artificial Sequence: Synthetic peptide
IMQNKQS

SEQ ID NO: 5270 - protein, 7 aa, synthetic construct
  REGION 1..7: note = Description of Artificial Sequence: Synthetic peptide
SSASPKG

SEQ ID NO: 5271 - protein, 7 aa, synthetic construct
  REGION 1..7: note = Description of Artificial Sequence: Synthetic peptide
MTGPRAS

SEQ ID NO: 5272 - protein, 7 aa, synthetic construct
  REGION 1..7: note = Description of Artificial Sequence: Synthetic peptide
QGEGAGK

SEQ ID NO: 5273 - protein, 7 aa, synthetic construct
  REGION 1..7: note = Description of Artificial Sequence: Synthetic peptide
DQTGAPH

SEQ ID NO: 5274 - protein, 7 aa, synthetic construct
  REGION 1..7: note = Description of Artificial Sequence: Synthetic peptide
GTKVTNQ

SEQ ID NO: 5275 - protein, 7 aa, synthetic construct
  REGION 1..7: note = Description of Artificial Sequence: Synthetic peptide
EKLQHTS

SEQ ID NO: 5276 - protein, 7 aa, synthetic construct
  REGION 1..7: note = Description of Artificial Sequence: Synthetic peptide
EQASHNA

SEQ ID NO: 5277 - protein, 7 aa, synthetic construct
  REGION 1..7: note = Description of Artificial Sequence: Synthetic peptide
VQSSSTA

SEQ ID NO: 5278 - protein, 7 aa, synthetic construct
  REGION 1..7: note = Description of Artificial Sequence: Synthetic peptide
SSASQNV

SEQ ID NO: 5279 - protein, 7 aa, synthetic construct
  REGION 1..7: note = Description of Artificial Sequence: Synthetic peptide
SGASAAA

SEQ ID NO: 5280 - protein, 7 aa, synthetic construct
  REGION 1..7: note = Description of Artificial Sequence: Synthetic peptide
SVGGSAN

SEQ ID NO: 5281 - protein, 7 aa, synthetic construct
  REGION 1..7: note = Description of Artificial Sequence: Synthetic peptide
LQNSQAQ

SEQ ID NO: 5282 - protein, 7 aa, synthetic construct
  REGION 1..7: note = Description of Artificial Sequence: Synthetic peptide
DNAHTTS

SEQ ID NO: 5283 - protein, 7 aa, synthetic construct
  REGION 1..7: note = Description of Artificial Sequence: Synthetic peptide
AQNPTNM

SEQ ID NO: 5284 - protein, 7 aa, synthetic construct
  REGION 1..7: note = Description of Artificial Sequence: Synthetic peptide
GVSDKTS

SEQ ID NO: 5285 - protein, 7 aa, synthetic construct
  REGION 1..7: note = Description of Artificial Sequence: Synthetic peptide
NGSSSAT

SEQ ID NO: 5286 - protein, 7 aa, synthetic construct
  REGION 1..7: note = Description of Artificial Sequence: Synthetic peptide
SSNATMK

SEQ ID NO: 5287 - protein, 7 aa, synthetic construct
  REGION 1..7: note = Description of Artificial Sequence: Synthetic peptide
VTNKASV

SEQ ID NO: 5288 - protein, 7 aa, synthetic construct
  REGION 1..7: note = Description of Artificial Sequence: Synthetic peptide
SDERAST

SEQ ID NO: 5289 - protein, 7 aa, synthetic construct
  REGION 1..7: note = Description of Artificial Sequence: Synthetic peptide
VAGDKPN

SEQ ID NO: 5290 - protein, 7 aa, synthetic construct
  REGION 1..7: note = Description of Artificial Sequence: Synthetic peptide
SSTEKPL

SEQ ID NO: 5291 - protein, 7 aa, synthetic construct
  REGION 1..7: note = Description of Artificial Sequence: Synthetic peptide
VSTGNSN

SEQ ID NO: 5292 - protein, 7 aa, synthetic construct
  REGION 1..7: note = Description of Artificial Sequence: Synthetic peptide
VTGSNAT

SEQ ID NO: 5293 - protein, 7 aa, synthetic construct
  REGION 1..7: note = Description of Artificial Sequence: Synthetic peptide
SSTKGEG

SEQ ID NO: 5294 - protein, 7 aa, synthetic construct
  REGION 1..7: note = Description of Artificial Sequence: Synthetic peptide
SGGTSSI

SEQ ID NO: 5295 - protein, 7 aa, synthetic construct
  REGION 1..7: note = Description of Artificial Sequence: Synthetic peptide
MVSTGGK

SEQ ID NO: 5296 - protein, 7 aa, synthetic construct
  REGION 1..7: note = Description of Artificial Sequence: Synthetic peptide
ERANNNN

SEQ ID NO: 5297 - protein, 7 aa, synthetic construct
  REGION 1..7: note = Description of Artificial Sequence: Synthetic peptide
VAGTSSN

SEQ ID NO: 5298 - protein, 7 aa, synthetic construct
  REGION 1..7: note = Description of Artificial Sequence: Synthetic peptide
DSGPTSR

SEQ ID NO: 5299 - protein, 7 aa, synthetic construct
  REGION 1..7: note = Description of Artificial Sequence: Synthetic peptide
TNMAPST

SEQ ID NO: 5300 - protein, 7 aa, synthetic construct
  REGION 1..7: note = Description of Artificial Sequence: Synthetic peptide
ASQKASG

SEQ ID NO: 5301 - protein, 7 aa, synthetic construct
  REGION 1..7: note = Description of Artificial Sequence: Synthetic peptide
SSAANSK

SEQ ID NO: 5302 - protein, 7 aa, synthetic construct
  REGION 1..7: note = Description of Artificial Sequence: Synthetic peptide
TSQGGNA

SEQ ID NO: 5303 - protein, 7 aa, synthetic construct
  REGION 1..7: note = Description of Artificial Sequence: Synthetic peptide
TGSTHAA

SEQ ID NO: 5304 - protein, 7 aa, synthetic construct
  REGION 1..7: note = Description of Artificial Sequence: Synthetic peptide
STVDPKA

SEQ ID NO: 5305 - protein, 7 aa, synthetic construct
  REGION 1..7: note = Description of Artificial Sequence: Synthetic peptide
AAGNSSK

SEQ ID NO: 5306 - protein, 7 aa, synthetic construct
  REGION 1..7: note = Description of Artificial Sequence: Synthetic peptide
GVNGVKA

SEQ ID NO: 5307 - protein, 7 aa, synthetic construct
  REGION 1..7: note = Description of Artificial Sequence: Synthetic peptide
GTNAPPS

SEQ ID NO: 5308 - protein, 7 aa, synthetic construct
  REGION 1..7: note = Description of Artificial Sequence: Synthetic peptide
SGTQVSG

SEQ ID NO: 5309 - protein, 7 aa, synthetic construct
  REGION 1..7: note = Description of Artificial Sequence: Synthetic peptide
SHGSPTS

SEQ ID NO: 5310 - protein, 7 aa, synthetic construct
  REGION 1..7: note = Description of Artificial Sequence: Synthetic peptide
GMSKEAS

SEQ ID NO: 5311 - protein, 7 aa, synthetic construct
  REGION 1..7: note = Description of Artificial Sequence: Synthetic peptide
SSSGGSQ

SEQ ID NO: 5312 - protein, 7 aa, synthetic construct
  REGION 1..7: note = Description of Artificial Sequence: Synthetic peptide
QQATPHG

SEQ ID NO: 5313 - protein, 7 aa, synthetic construct
  REGION 1..7: note = Description of Artificial Sequence: Synthetic peptide
GVGNPVN

SEQ ID NO: 5314 - protein, 7 aa, synthetic construct
  REGION 1..7: note = Description of Artificial Sequence: Synthetic peptide
ASTGEPK

SEQ ID NO: 5315 - protein, 7 aa, synthetic construct
  REGION 1..7: note = Description of Artificial Sequence: Synthetic peptide
GSPNGNV

SEQ ID NO: 5316 - protein, 7 aa, synthetic construct
  REGION 1..7: note = Description of Artificial Sequence: Synthetic peptide
NQPTTAG

SEQ ID NO: 5317 - protein, 7 aa, synthetic construct
  REGION 1..7: note = Description of Artificial Sequence: Synthetic peptide
QKGDRSN

SEQ ID NO: 5318 - protein, 7 aa, synthetic construct
  REGION 1..7: note = Description of Artificial Sequence: Synthetic peptide
LATGKDG

SEQ ID NO: 5319 - protein, 7 aa, synthetic construct
  REGION 1..7: note = Description of Artificial Sequence: Synthetic peptide
EQSKIAV

SEQ ID NO: 5320 - protein, 7 aa, synthetic construct
  REGION 1..7: note = Description of Artificial Sequence: Synthetic peptide
ANTKQTQ

SEQ ID NO: 5321 - protein, 7 aa, synthetic construct
  REGION 1..7: note = Description of Artificial Sequence: Synthetic peptide
VSSGQPA

SEQ ID NO: 5322 - protein, 7 aa, synthetic construct
  REGION 1..7: note = Description of Artificial Sequence: Synthetic peptide
SSGTSTK

SEQ ID NO: 5323 - protein, 7 aa, synthetic construct
  REGION 1..7: note = Description of Artificial Sequence: Synthetic peptide
TDQKTSV

SEQ ID NO: 5324 - protein, 7 aa, synthetic construct
  REGION 1..7: note = Description of Artificial Sequence: Synthetic peptide
ASTQGNS

SEQ ID NO: 5325 - protein, 7 aa, synthetic construct
  REGION 1..7: note = Description of Artificial Sequence: Synthetic peptide
DSDKVRN

SEQ ID NO: 5326 - protein, 7 aa, synthetic construct
  REGION 1..7: note = Description of Artificial Sequence: Synthetic peptide
KEGTANR

SEQ ID NO: 5327 - protein, 7 aa, synthetic construct
  REGION 1..7: note = Description of Artificial Sequence: Synthetic peptide
STSSQSV

SEQ ID NO: 5328 - protein, 7 aa, synthetic construct
  REGION 1..7: note = Description of Artificial Sequence: Synthetic peptide
GVSSKSN

SEQ ID NO: 5329 - protein, 7 aa, synthetic construct
  REGION 1..7: note = Description of Artificial Sequence: Synthetic peptide
YPAGDKG

SEQ ID NO: 5330 - protein, 7 aa, synthetic construct
  REGION 1..7: note = Description of Artificial Sequence: Synthetic peptide
AHAKESG

SEQ ID NO: 5331 - protein, 7 aa, synthetic construct
  REGION 1..7: note = Description of Artificial Sequence: Synthetic peptide
QNSTSAS

SEQ ID NO: 5332 - protein, 7 aa, synthetic construct
  REGION 1..7: note = Description of Artificial Sequence: Synthetic peptide
GADPTSR

SEQ ID NO: 5333 - protein, 7 aa, synthetic construct
  REGION 1..7: note = Description of Artificial Sequence: Synthetic peptide
SQVNSSK

SEQ ID NO: 5334 - protein, 7 aa, synthetic construct
  REGION 1..7: note = Description of Artificial Sequence: Synthetic peptide
DSRNPNA

SEQ ID NO: 5335 - protein, 7 aa, synthetic construct
  REGION 1..7: note = Description of Artificial Sequence: Synthetic peptide
DSGSASV

SEQ ID NO: 5336 - protein, 7 aa, synthetic construct
  REGION 1..7: note = Description of Artificial Sequence: Synthetic peptide
ANPPTSG

SEQ ID NO: 5337 - protein, 7 aa, synthetic construct
  REGION 1..7: note = Description of Artificial Sequence: Synthetic peptide
GQGDRLT

SEQ ID NO: 5338 - protein, 7 aa, synthetic construct
  REGION 1..7: note = Description of Artificial Sequence: Synthetic peptide
SGRDSSG

SEQ ID NO: 5339 - protein, 7 aa, synthetic construct
  REGION 1..7: note = Description of Artificial Sequence: Synthetic peptide
GGNSTSN

SEQ ID NO: 5340 - protein, 7 aa, synthetic construct
  REGION 1..7: note = Description of Artificial Sequence: Synthetic peptide
GLGDGRQ

SEQ ID NO: 5341 - protein, 7 aa, synthetic construct
  REGION 1..7: note = Description of Artificial Sequence: Synthetic peptide
SASGSTQ

SEQ ID NO: 5342 - protein, 7 aa, synthetic construct
  REGION 1..7: note = Description of Artificial Sequence: Synthetic peptide
RAENSPT

SEQ ID NO: 5343 - protein, 7 aa, synthetic construct
  REGION 1..7: note = Description of Artificial Sequence: Synthetic peptide
VTDSKSL

SEQ ID NO: 5344 - protein, 7 aa, synthetic construct
  REGION 1..7: note = Description of Artificial Sequence: Synthetic peptide
KNGSSSG

SEQ ID NO: 5345 - protein, 7 aa, synthetic construct
  REGION 1..7: note = Description of Artificial Sequence: Synthetic peptide
DSKSNLN

SEQ ID NO: 5346 - protein, 7 aa, synthetic construct
  REGION 1..7: note = Description of Artificial Sequence: Synthetic peptide
SANDKRV

SEQ ID NO: 5347 - protein, 7 aa, synthetic construct
  REGION 1..7: note = Description of Artificial Sequence: Synthetic peptide
ATKEQSH

SEQ ID NO: 5348 - protein, 7 aa, synthetic construct
  REGION 1..7: note = Description of Artificial Sequence: Synthetic peptide
SNDPSVK

SEQ ID NO: 5349 - protein, 7 aa, synthetic construct
  REGION 1..7: note = Description of Artificial Sequence: Synthetic peptide
LTQDKPS

SEQ ID NO: 5350 - protein, 7 aa, synthetic construct
  REGION 1..7: note = Description of Artificial Sequence: Synthetic peptide
HGGTSSS

SEQ ID NO: 5351 - protein, 7 aa, synthetic construct
  REGION 1..7: note = Description of Artificial Sequence: Synthetic peptide
GVDKANL

SEQ ID NO: 5352 - protein, 7 aa, synthetic construct
  REGION 1..7: note = Description of Artificial Sequence: Synthetic peptide
NHVTKPT

SEQ ID NO: 5353 - protein, 7 aa, synthetic construct
  REGION 1..7: note = Description of Artificial Sequence: Synthetic peptide
SRDTKNN

SEQ ID NO: 5354 - protein, 7 aa, synthetic construct
  REGION 1..7: note = Description of Artificial Sequence: Synthetic peptide
EGASKLP

SEQ ID NO: 5355 - protein, 7 aa, synthetic construct
  REGION 1..7: note = Description of Artificial Sequence: Synthetic peptide
STSPQNA

SEQ ID NO: 5356 - protein, 7 aa, synthetic construct
  REGION 1..7: note = Description of Artificial Sequence: Synthetic peptide
YGDKTKS

SEQ ID NO: 5357 - protein, 7 aa, synthetic construct
  REGION 1..7: note = Description of Artificial Sequence: Synthetic peptide
TRNATSV

SEQ ID NO: 5358 - protein, 7 aa, synthetic construct
  REGION 1..7: note = Description of Artificial Sequence: Synthetic peptide
MSTERSG

SEQ ID NO: 5359 - protein, 7 aa, synthetic construct
  REGION 1..7: note = Description of Artificial Sequence: Synthetic peptide
IQASGAQ

SEQ ID NO: 5360 - protein, 7 aa, synthetic construct
  REGION 1..7: note = Description of Artificial Sequence: Synthetic peptide
QSQGASM

SEQ ID NO: 5361 - protein, 7 aa, synthetic construct
  REGION 1..7: note = Description of Artificial Sequence: Synthetic peptide
AEKGASS

SEQ ID NO: 5362 - protein, 7 aa, synthetic construct
  REGION 1..7: note = Description of Artificial Sequence: Synthetic peptide
SAGQGLG

SEQ ID NO: 5363 - protein, 7 aa, synthetic construct
  REGION 1..7: note = Description of Artificial Sequence: Synthetic peptide
NASSKGT

SEQ ID NO: 5364 - protein, 7 aa, synthetic construct
  REGION 1..7: note = Description of Artificial Sequence: Synthetic peptide
TAGSSRG

SEQ ID NO: 5365 - protein, 7 aa, synthetic construct
  REGION 1..7: note = Description of Artificial Sequence: Synthetic peptide
LTKTGSA

SEQ ID NO: 5366 - protein, 7 aa, synthetic construct
  REGION 1..7: note = Description of Artificial Sequence: Synthetic peptide
GSSRPSE

SEQ ID NO: 5367 - protein, 7 aa, synthetic construct
  REGION 1..7: note = Description of Artificial Sequence: Synthetic peptide
GTDQGRS

SEQ ID NO: 5368 - protein, 7 aa, synthetic construct
  REGION 1..7: note = Description of Artificial Sequence: Synthetic peptide
STGAATT

SEQ ID NO: 5369 - protein, 7 aa, synthetic construct
  REGION 1..7: note = Description of Artificial Sequence: Synthetic peptide
ASTGQSV

SEQ ID NO: 5370 - protein, 7 aa, synthetic construct
  REGION 1..7: note = Description of Artificial Sequence: Synthetic peptide
GIGNKPN

SEQ ID NO: 5371 - protein, 7 aa, synthetic construct
  REGION 1..7: note = Description of Artificial Sequence: Synthetic peptide
ATARPPG

SEQ ID NO: 5372 - protein, 7 aa, synthetic construct
  REGION 1..7: note = Description of Artificial Sequence: Synthetic peptide
NTAPAKG

SEQ ID NO: 5373 - protein, 7 aa, synthetic construct
  REGION 1..7: note = Description of Artificial Sequence: Synthetic peptide
LGGNGQG

SEQ ID NO: 5374 - protein, 7 aa, synthetic construct
  REGION 1..7: note = Description of Artificial Sequence: Synthetic peptide
NGVAPAG

SEQ ID NO: 5375 - protein, 7 aa, synthetic construct
  REGION 1..7: note = Description of Artificial Sequence: Synthetic peptide
TSGSSPK

SEQ ID NO: 5376 - protein, 7 aa, synthetic construct
  REGION 1..7: note = Description of Artificial Sequence: Synthetic peptide
LTGPSAG

SEQ ID NO: 5377 - protein, 7 aa, synthetic construct
  REGION 1..7: note = Description of Artificial Sequence: Synthetic peptide
DQREKGA

SEQ ID NO: 5378 - protein, 7 aa, synthetic construct
  REGION 1..7: note = Description of Artificial Sequence: Synthetic peptide
DQGRTPG

SEQ ID NO: 5379 - protein, 7 aa, synthetic construct
  REGION 1..7: note = Description of Artificial Sequence: Synthetic peptide
AGDKSPY

SEQ ID NO: 5380 - protein, 7 aa, synthetic construct
  REGION 1..7: note = Description of Artificial Sequence: Synthetic peptide
GAIKPTG

SEQ ID NO: 5381 - protein, 7 aa, synthetic construct
  REGION 1..7: note = Description of Artificial Sequence: Synthetic peptide
GHTDIKG

SEQ ID NO: 5382 - protein, 7 aa, synthetic construct
  REGION 1..7: note = Description of Artificial Sequence: Synthetic peptide
VAGMEKG

SEQ ID NO: 5383 - protein, 7 aa, synthetic construct
  REGION 1..7: note = Description of Artificial Sequence: Synthetic peptide
SPTTTNL

SEQ ID NO: 5384 - protein, 7 aa, synthetic construct
  REGION 1..7: note = Description of Artificial Sequence: Synthetic peptide
LQGSNSA

SEQ ID NO: 5385 - protein, 7 aa, synthetic construct
  REGION 1..7: note = Description of Artificial Sequence: Synthetic peptide
NQERPNA

SEQ ID NO: 5386 - protein, 7 aa, synthetic construct
  REGION 1..7: note = Description of Artificial Sequence: Synthetic peptide
NAAKTMG

SEQ ID NO: 5387 - protein, 7 aa, synthetic construct
  REGION 1..7: note = Description of Artificial Sequence: Synthetic peptide
TTGNAGL

SEQ ID NO: 5388 - protein, 7 aa, synthetic construct
  REGION 1..7: note = Description of Artificial Sequence: Synthetic peptide
TRDSTRA

SEQ ID NO: 5389 - protein, 7 aa, synthetic construct
  REGION 1..7: note = Description of Artificial Sequence: Synthetic peptide
SRTNANM

SEQ ID NO: 5390 - protein, 7 aa, synthetic construct
  REGION 1..7: note = Description of Artificial Sequence: Synthetic peptide
QIRPSDG

SEQ ID NO: 5391 - protein, 7 aa, synthetic construct
  REGION 1..7: note = Description of Artificial Sequence: Synthetic peptide
NRDSSAS

SEQ ID NO: 5392 - protein, 7 aa, synthetic construct
  REGION 1..7: note = Description of Artificial Sequence: Synthetic peptide
KGGGNSS

SEQ ID NO: 5393 - protein, 7 aa, synthetic construct
  REGION 1..7: note = Description of Artificial Sequence: Synthetic peptide
NNTPSTT

SEQ ID NO: 5394 - protein, 7 aa, synthetic construct
  REGION 1..7: note = Description of Artificial Sequence: Synthetic peptide
TSSSAHT

SEQ ID NO: 5395 - protein, 7 aa, synthetic construct
  REGION 1..7: note = Description of Artificial Sequence: Synthetic peptide
GASDQPR

SEQ ID NO: 5396 - protein, 7 aa, synthetic construct
  REGION 1..7: note = Description of Artificial Sequence: Synthetic peptide
QSSTTNT

SEQ ID NO: 5397 - protein, 7 aa, synthetic construct
  REGION 1..7: note = Description of Artificial Sequence: Synthetic peptide
SGEGSGR

SEQ ID NO: 5398 - protein, 7 aa, synthetic construct
  REGION 1..7: note = Description of Artificial Sequence: Synthetic peptide
IVGGAGA

SEQ ID NO: 5399 - protein, 7 aa, synthetic construct
  REGION 1..7: note = Description of Artificial Sequence: Synthetic peptide
GTVDTRT

SEQ ID NO: 5400 - protein, 7 aa, synthetic construct
  REGION 1..7: note = Description of Artificial Sequence: Synthetic peptide
SSDSNPR

SEQ ID NO: 5401 - protein, 7 aa, synthetic construct
  REGION 1..7: note = Description of Artificial Sequence: Synthetic peptide
GSATTIK

SEQ ID NO: 5402 - protein, 7 aa, synthetic construct
  REGION 1..7: note = Description of Artificial Sequence: Synthetic peptide
HTGTPTV

SEQ ID NO: 5403 - protein, 7 aa, synthetic construct
  REGION 1..7: note = Description of Artificial Sequence: Synthetic peptide
DGPRSDK

SEQ ID NO: 5404 - protein, 7 aa, synthetic construct
  REGION 1..7: note = Description of Artificial Sequence: Synthetic peptide
SSTAEVK

SEQ ID NO: 5405 - protein, 7 aa, synthetic construct
  REGION 1..7: note = Description of Artificial Sequence: Synthetic peptide
TGSGGSA

SEQ ID NO: 5406 - protein, 7 aa, synthetic construct
  REGION 1..7: note = Description of Artificial Sequence: Synthetic peptide
NGSSTTN

SEQ ID NO: 5407 - protein, 7 aa, synthetic construct
  REGION 1..7: note = Description of Artificial Sequence: Synthetic peptide
LGQASHG

SEQ ID NO: 5408 - protein, 7 aa, synthetic construct
  REGION 1..7: note = Description of Artificial Sequence: Synthetic peptide
LQDKPAG

SEQ ID NO: 5409 - protein, 7 aa, synthetic construct
  REGION 1..7: note = Description of Artificial Sequence: Synthetic peptide
SNNNSAS

SEQ ID NO: 5410 - protein, 7 aa, synthetic construct
  REGION 1..7: note = Description of Artificial Sequence: Synthetic peptide
NQSPAVQ

SEQ ID NO: 5411 - protein, 7 aa, synthetic construct
  REGION 1..7: note = Description of Artificial Sequence: Synthetic peptide
DSFKSGS

SEQ ID NO: 5412 - protein, 7 aa, synthetic construct
  REGION 1..7: note = Description of Artificial Sequence: Synthetic peptide
GTQDGTR

SEQ ID NO: 5413 - protein, 7 aa, synthetic construct
  REGION 1..7: note = Description of Artificial Sequence: Synthetic peptide
VTGANPN

SEQ ID NO: 5414 - protein, 7 aa, synthetic construct
  REGION 1..7: note = Description of Artificial Sequence: Synthetic peptide
STGASSH

SEQ ID NO: 5415 - protein, 7 aa, synthetic construct
  REGION 1..7: note = Description of Artificial Sequence: Synthetic peptide
AQSKENT

SEQ ID NO: 5416 - protein, 7 aa, synthetic construct
  REGION 1..7: note = Description of Artificial Sequence: Synthetic peptide
TKQATPL

SEQ ID NO: 5417 - protein, 7 aa, synthetic construct
  REGION 1..7: note = Description of Artificial Sequence: Synthetic peptide
TSEQVAR

SEQ ID NO: 5418 - protein, 7 aa, synthetic construct
  REGION 1..7: note = Description of Artificial Sequence: Synthetic peptide
SSGEKAL

SEQ ID NO: 5419 - protein, 7 aa, synthetic construct
  REGION 1..7: note = Description of Artificial Sequence: Synthetic peptide
IGGTAAG

SEQ ID NO: 5420 - protein, 7 aa, synthetic construct
  REGION 1..7: note = Description of Artificial Sequence: Synthetic peptide
LTTSTNA

SEQ ID NO: 5421 - protein, 7 aa, synthetic construct
  REGION 1..7: note = Description of Artificial Sequence: Synthetic peptide
YGSKGSA

SEQ ID NO: 5422 - protein, 7 aa, synthetic construct
  REGION 1..7: note = Description of Artificial Sequence: Synthetic peptide
TSGKNNN

SEQ ID NO: 5423 - protein, 7 aa, synthetic construct
  REGION 1..7: note = Description of Artificial Sequence: Synthetic peptide
GSKSGVA

SEQ ID NO: 5424 - protein, 7 aa, synthetic construct
  REGION 1..7: note = Description of Artificial Sequence: Synthetic peptide
SGSGDKS

SEQ ID NO: 5425 - protein, 7 aa, synthetic construct
  REGION 1..7: note = Description of Artificial Sequence: Synthetic peptide
MNNTSNK

SEQ ID NO: 5426 - protein, 7 aa, synthetic construct
  REGION 1..7: note = Description of Artificial Sequence: Synthetic peptide
DNGKAIA

SEQ ID NO: 5427 - protein, 7 aa, synthetic construct
  REGION 1..7: note = Description of Artificial Sequence: Synthetic peptide
TNVDKAS

SEQ ID NO: 5428 - protein, 7 aa, synthetic construct
  REGION 1..7: note = Description of Artificial Sequence: Synthetic peptide
MPGETKG

SEQ ID NO: 5429 - protein, 7 aa, synthetic construct
  REGION 1..7: note = Description of Artificial Sequence: Synthetic peptide
QANQGGN

SEQ ID NO: 5430 - protein, 7 aa, synthetic construct
  REGION 1..7: note = Description of Artificial Sequence: Synthetic peptide
ERSTSST

SEQ ID NO: 5431 - protein, 7 aa, synthetic construct
  REGION 1..7: note = Description of Artificial Sequence: Synthetic peptide
LARDKSV

SEQ ID NO: 5432 - protein, 7 aa, synthetic construct
  REGION 1..7: note = Description of Artificial Sequence: Synthetic peptide
TGSSSPV

SEQ ID NO: 5433 - protein, 7 aa, synthetic construct
  REGION 1..7: note = Description of Artificial Sequence: Synthetic peptide
ESSTPAR

SEQ ID NO: 5434 - protein, 7 aa, synthetic construct
  REGION 1..7: note = Description of Artificial Sequence: Synthetic peptide
SASPSTQ

SEQ ID NO: 5435 - protein, 7 aa, synthetic construct
  REGION 1..7: note = Description of Artificial Sequence: Synthetic peptide
NNAQGSS

SEQ ID NO: 5436 - protein, 7 aa, synthetic construct
  REGION 1..7: note = Description of Artificial Sequence: Synthetic peptide
DAQRPTA

SEQ ID NO: 5437 - protein, 7 aa, synthetic construct
  REGION 1..7: note = Description of Artificial Sequence: Synthetic peptide
DTTAKQG

SEQ ID NO: 5438 - protein, 7 aa, synthetic construct
  REGION 1..7: note = Description of Artificial Sequence: Synthetic peptide
AGGNNAH

SEQ ID NO: 5439 - protein, 7 aa, synthetic construct
  REGION 1..7: note = Description of Artificial Sequence: Synthetic peptide
ASKGNSL

SEQ ID NO: 5440 - protein, 7 aa, synthetic construct
  REGION 1..7: note = Description of Artificial Sequence: Synthetic peptide
GDKANAH

SEQ ID NO: 5441 - protein, 7 aa, synthetic construct
  REGION 1..7: note = Description of Artificial Sequence: Synthetic peptide
EPGAAIK

SEQ ID NO: 5442 - protein, 7 aa, synthetic construct
  REGION 1..7: note = Description of Artificial Sequence: Synthetic peptide
ISDKTPQ

SEQ ID NO: 5443 - protein, 7 aa, synthetic construct
  REGION 1..7: note = Description of Artificial Sequence: Synthetic peptide
FSNAKNG

SEQ ID NO: 5444 - protein, 7 aa, synthetic construct
  REGION 1..7: note = Description of Artificial Sequence: Synthetic peptide
TSEHKSQ

SEQ ID NO: 5445 - protein, 7 aa, synthetic construct
  REGION 1..7: note = Description of Artificial Sequence: Synthetic peptide
TGGNGFA

SEQ ID NO: 5446 - protein, 7 aa, synthetic construct
  REGION 1..7: note = Description of Artificial Sequence: Synthetic peptide
SSKPSAA

SEQ ID NO: 5447 - protein, 7 aa, synthetic construct
  REGION 1..7: note = Description of Artificial Sequence: Synthetic peptide
VGKSELT

SEQ ID NO: 5448 - protein, 7 aa, synthetic construct
  REGION 1..7: note = Description of Artificial Sequence: Synthetic peptide
NSRTPST

SEQ ID NO: 5449 - protein, 7 aa, synthetic construct
  REGION 1..7: note = Description of Artificial Sequence: Synthetic peptide
TGQERSS

SEQ ID NO: 5450 - protein, 7 aa, synthetic construct
  REGION 1..7: note = Description of Artificial Sequence: Synthetic peptide
NSAGSNS

SEQ ID NO: 5451 - protein, 7 aa, synthetic construct
  REGION 1..7: note = Description of Artificial Sequence: Synthetic peptide
SGSNTVQ

SEQ ID NO: 5452 - protein, 7 aa, synthetic construct
  REGION 1..7: note = Description of Artificial Sequence: Synthetic peptide
SSTKVAQ

SEQ ID NO: 5453 - protein, 7 aa, synthetic construct
  REGION 1..7: note = Description of Artificial Sequence: Synthetic peptide
ASGGSRT

SEQ ID NO: 5454 - protein, 7 aa, synthetic construct
  REGION 1..7: note = Description of Artificial Sequence: Synthetic peptide
QSSTSQV

SEQ ID NO: 5455 - protein, 7 aa, synthetic construct
  REGION 1..7: note = Description of Artificial Sequence: Synthetic peptide
NVGNPVS

SEQ ID NO: 5456 - protein, 7 aa, synthetic construct
  REGION 1..7: note = Description of Artificial Sequence: Synthetic peptide
SNTASAS

SEQ ID NO: 5457 - protein, 7 aa, synthetic construct
  REGION 1..7: note = Description of Artificial Sequence: Synthetic peptide
EGTHPIV

SEQ ID NO: 5458 - protein, 7 aa, synthetic construct
  REGION 1..7: note = Description of Artificial Sequence: Synthetic peptide
AVAGAKA

SEQ ID NO: 5459 - protein, 7 aa, synthetic construct
  REGION 1..7: note = Description of Artificial Sequence: Synthetic peptide
GESGPKS

SEQ ID NO: 5460 - protein, 7 aa, synthetic construct
  REGION 1..7: note = Description of Artificial Sequence: Synthetic peptide
THGKTPV

SEQ ID NO: 5461 - protein, 7 aa, synthetic construct
  REGION 1..7: note = Description of Artificial Sequence: Synthetic peptide
VASQTQA

SEQ ID NO: 5462 - protein, 7 aa, synthetic construct
  REGION 1..7: note = Description of Artificial Sequence: Synthetic peptide
SSTTSVH

SEQ ID NO: 5463 - protein, 7 aa, synthetic construct
  REGION 1..7: note = Description of Artificial Sequence: Synthetic peptide
SGTSSLQ

SEQ ID NO: 5464 - protein, 7 aa, synthetic construct
  REGION 1..7: note = Description of Artificial Sequence: Synthetic peptide
SSGASNS

SEQ ID NO: 5465 - protein, 7 aa, synthetic construct
  REGION 1..7: note = Description of Artificial Sequence: Synthetic peptide
QNKPGSV

SEQ ID NO: 5466 - protein, 7 aa, synthetic construct
  REGION 1..7: note = Description of Artificial Sequence: Synthetic peptide
TTGSAAL

SEQ ID NO: 5467 - protein, 7 aa, synthetic construct
  REGION 1..7: note = Description of Artificial Sequence: Synthetic peptide
NVRQTNE

SEQ ID NO: 5468 - protein, 7 aa, synthetic construct
  REGION 1..7: note = Description of Artificial Sequence: Synthetic peptide
DQGTSTL

SEQ ID NO: 5469 - protein, 7 aa, synthetic construct
  REGION 1..7: note = Description of Artificial Sequence: Synthetic peptide
VSGQVSS

SEQ ID NO: 5470 - protein, 7 aa, synthetic construct
  REGION 1..7: note = Description of Artificial Sequence: Synthetic peptide
NLKSSPS

SEQ ID NO: 5471 - protein, 7 aa, synthetic construct
  REGION 1..7: note = Description of Artificial Sequence: Synthetic peptide
NSGDAQH

SEQ ID NO: 5472 - protein, 7 aa, synthetic construct
  REGION 1..7: note = Description of Artificial Sequence: Synthetic peptide
GTAGAMS

SEQ ID NO: 5473 - protein, 7 aa, synthetic construct
  REGION 1..7: note = Description of Artificial Sequence: Synthetic peptide
TKDKGMT

SEQ ID NO: 5474 - protein, 7 aa, synthetic construct
  REGION 1..7: note = Description of Artificial Sequence: Synthetic peptide
ANTKDGR

SEQ ID NO: 5475 - protein, 7 aa, synthetic construct
  REGION 1..7: note = Description of Artificial Sequence: Synthetic peptide
NGNLSTG

SEQ ID NO: 5476 - protein, 7 aa, synthetic construct
  REGION 1..7: note = Description of Artificial Sequence: Synthetic peptide
TSKGNSG

SEQ ID NO: 5477 - protein, 7 aa, synthetic construct
  REGION 1..7: note = Description of Artificial Sequence: Synthetic peptide
STSPSGG

SEQ ID NO: 5478 - protein, 7 aa, synthetic construct
  REGION 1..7: note = Description of Artificial Sequence: Synthetic peptide
SGSPGAG

SEQ ID NO: 5479 - protein, 7 aa, synthetic construct
  REGION 1..7: note = Description of Artificial Sequence: Synthetic peptide
QQSSGTG

SEQ ID NO: 5480 - protein, 7 aa, synthetic construct
  REGION 1..7: note = Description of Artificial Sequence: Synthetic peptide
DVTAKNA

SEQ ID NO: 5481 - protein, 7 aa, synthetic construct
  REGION 1..7: note = Description of Artificial Sequence: Synthetic peptide
ASDKSAG

SEQ ID NO: 5482 - protein, 7 aa, synthetic construct
  REGION 1..7: note = Description of Artificial Sequence: Synthetic peptide
APTEGGR

SEQ ID NO: 5483 - protein, 7 aa, synthetic construct
  REGION 1..7: note = Description of Artificial Sequence: Synthetic peptide
GSPNGHA

SEQ ID NO: 5484 - protein, 7 aa, synthetic construct
  REGION 1..7: note = Description of Artificial Sequence: Synthetic peptide
GGTEKLS

SEQ ID NO: 5485 - protein, 7 aa, synthetic construct
  REGION 1..7: note = Description of Artificial Sequence: Synthetic peptide
VRNSATE

SEQ ID NO: 5486 - protein, 7 aa, synthetic construct
  REGION 1..7: note = Description of Artificial Sequence: Synthetic peptide
LDGKSVS

SEQ ID NO: 5487 - protein, 7 aa, synthetic construct
  REGION 1..7: note = Description of Artificial Sequence: Synthetic peptide
GAETNRV

SEQ ID NO: 5488 - protein, 7 aa, synthetic construct
  REGION 1..7: note = Description of Artificial Sequence: Synthetic peptide
MQTKQPG

SEQ ID NO: 5489 - protein, 7 aa, synthetic construct
  REGION 1..7: note = Description of Artificial Sequence: Synthetic peptide
LGTQNVT

SEQ ID NO: 5490 - protein, 7 aa, synthetic construct
  REGION 1..7: note = Description of Artificial Sequence: Synthetic peptide
DQQSNLK

SEQ ID NO: 5491 - protein, 7 aa, synthetic construct
  REGION 1..7: note = Description of Artificial Sequence: Synthetic peptide
GPGSGST

SEQ ID NO: 5492 - protein, 7 aa, synthetic construct
  REGION 1..7: note = Description of Artificial Sequence: Synthetic peptide
QGSNPPT

SEQ ID NO: 5493 - protein, 7 aa, synthetic construct
  REGION 1..7: note = Description of Artificial Sequence: Synthetic peptide
DDASQKL

SEQ ID NO: 5494 - protein, 7 aa, synthetic construct
  REGION 1..7: note = Description of Artificial Sequence: Synthetic peptide
GNVSKGG

SEQ ID NO: 5495 - protein, 7 aa, synthetic construct
  REGION 1..7: note = Description of Artificial Sequence: Synthetic peptide
GADTKAH

SEQ ID NO: 5496 - protein, 7 aa, synthetic construct
  REGION 1..7: note = Description of Artificial Sequence: Synthetic peptide
MGSNPPN

SEQ ID NO: 5497 - protein, 7 aa, synthetic construct
  REGION 1..7: note = Description of Artificial Sequence: Synthetic peptide
KSGTHPD

SEQ ID NO: 5498 - protein, 7 aa, synthetic construct
  REGION 1..7: note = Description of Artificial Sequence: Synthetic peptide
EVSPKTS

SEQ ID NO: 5499 - protein, 7 aa, synthetic construct
  REGION 1..7: note = Description of Artificial Sequence: Synthetic peptide
DSTALSK

SEQ ID NO: 5500 - protein, 7 aa, synthetic construct
  REGION 1..7: note = Description of Artificial Sequence: Synthetic peptide
RDGGKGS

SEQ ID NO: 5501 - protein, 7 aa, synthetic construct
  REGION 1..7: note = Description of Artificial Sequence: Synthetic peptide
SNLSTPK

SEQ ID NO: 5502 - protein, 7 aa, synthetic construct
  REGION 1..7: note = Description of Artificial Sequence: Synthetic peptide
KSTPSAV

SEQ ID NO: 5503 - protein, 7 aa, synthetic construct
  REGION 1..7: note = Description of Artificial Sequence: Synthetic peptide
GNAQSPV

SEQ ID NO: 5504 - protein, 7 aa, synthetic construct
  REGION 1..7: note = Description of Artificial Sequence: Synthetic peptide
GVTNSAA

SEQ ID NO: 5505 - protein, 7 aa, synthetic construct
  REGION 1..7: note = Description of Artificial Sequence: Synthetic peptide
FTDSKAS

SEQ ID NO: 5506 - protein, 7 aa, synthetic construct
  REGION 1..7: note = Description of Artificial Sequence: Synthetic peptide
SNNSTIK

SEQ ID NO: 5507 - protein, 7 aa, synthetic construct
  REGION 1..7: note = Description of Artificial Sequence: Synthetic peptide
MPLESSK

SEQ ID NO: 5508 - protein, 7 aa, synthetic construct
  REGION 1..7: note = Description of Artificial Sequence: Synthetic peptide
TGKQSGS

SEQ ID NO: 5509 - protein, 7 aa, synthetic construct
  REGION 1..7: note = Description of Artificial Sequence: Synthetic peptide
VPNGSPN

SEQ ID NO: 5510 - protein, 7 aa, synthetic construct
  REGION 1..7: note = Description of Artificial Sequence: Synthetic peptide
NGTAQNL

SEQ ID NO: 5511 - protein, 7 aa, synthetic construct
  REGION 1..7: note = Description of Artificial Sequence: Synthetic peptide
SMNKSGL

SEQ ID NO: 5512 - protein, 7 aa, synthetic construct
  REGION 1..7: note = Description of Artificial Sequence: Synthetic peptide
LADKGTA

SEQ ID NO: 5513 - protein, 7 aa, synthetic construct
  REGION 1..7: note = Description of Artificial Sequence: Synthetic peptide
NGPVPVK

SEQ ID NO: 5514 - protein, 7 aa, synthetic construct
  REGION 1..7: note = Description of Artificial Sequence: Synthetic peptide
SRATSNA

SEQ ID NO: 5515 - protein, 7 aa, synthetic construct
  REGION 1..7: note = Description of Artificial Sequence: Synthetic peptide
SGSDSHR

SEQ ID NO: 5516 - protein, 7 aa, synthetic construct
  REGION 1..7: note = Description of Artificial Sequence: Synthetic peptide
NGGDKFK

SEQ ID NO: 5517 - protein, 7 aa, synthetic construct
  REGION 1..7: note = Description of Artificial Sequence: Synthetic peptide
AQADQSK

SEQ ID NO: 5518 - protein, 7 aa, synthetic construct
  REGION 1..7: note = Description of Artificial Sequence: Synthetic peptide
STKSAEG

SEQ ID NO: 5519 - protein, 7 aa, synthetic construct
  REGION 1..7: note = Description of Artificial Sequence: Synthetic peptide
NSESKAS

SEQ ID NO: 5520 - protein, 7 aa, synthetic construct
  REGION 1..7: note = Description of Artificial Sequence: Synthetic peptide
HTANATS

SEQ ID NO: 5521 - protein, 7 aa, synthetic construct
  REGION 1..7: note = Description of Artificial Sequence: Synthetic peptide
STSQSSA

SEQ ID NO: 5522 - protein, 7 aa, synthetic construct
  REGION 1..7: note = Description of Artificial Sequence: Synthetic peptide
QNSTHPS

SEQ ID NO: 5523 - protein, 7 aa, synthetic construct
  REGION 1..7: note = Description of Artificial Sequence: Synthetic peptide
DTQKSLN

SEQ ID NO: 5524 - protein, 7 aa, synthetic construct
  REGION 1..7: note = Description of Artificial Sequence: Synthetic peptide
SGIGSAT

SEQ ID NO: 5525 - protein, 7 aa, synthetic construct
  REGION 1..7: note = Description of Artificial Sequence: Synthetic peptide
IGREKSQ

SEQ ID NO: 5526 - protein, 7 aa, synthetic construct
  REGION 1..7: note = Description of Artificial Sequence: Synthetic peptide
QKQHASE

SEQ ID NO: 5527 - protein, 7 aa, synthetic construct
  REGION 1..7: note = Description of Artificial Sequence: Synthetic peptide
DSTKQAF

SEQ ID NO: 5528 - protein, 7 aa, synthetic construct
  REGION 1..7: note = Description of Artificial Sequence: Synthetic peptide
LRDSGNG

SEQ ID NO: 5529 - protein, 7 aa, synthetic construct
  REGION 1..7: note = Description of Artificial Sequence: Synthetic peptide
SASTPKD

SEQ ID NO: 5530 - protein, 7 aa, synthetic construct
  REGION 1..7: note = Description of Artificial Sequence: Synthetic peptide
SGAPSSL

SEQ ID NO: 5531 - protein, 7 aa, synthetic construct
  REGION 1..7: note = Description of Artificial Sequence: Synthetic peptide
KTSSTNV

SEQ ID NO: 5532 - protein, 7 aa, synthetic construct
  REGION 1..7: note = Description of Artificial Sequence: Synthetic peptide
GGGPSAG

SEQ ID NO: 5533 - protein, 7 aa, synthetic construct
  REGION 1..7: note = Description of Artificial Sequence: Synthetic peptide
EGVNSAK

SEQ ID NO: 5534 - protein, 7 aa, synthetic construct
  REGION 1..7: note = Description of Artificial Sequence: Synthetic peptide
STGKPGN

SEQ ID NO: 5535 - protein, 7 aa, synthetic construct
  REGION 1..7: note = Description of Artificial Sequence: Synthetic peptide
EGGGQAH

SEQ ID NO: 5536 - protein, 7 aa, synthetic construct
  REGION 1..7: note = Description of Artificial Sequence: Synthetic peptide
SGKGTSI

SEQ ID NO: 5537 - protein, 7 aa, synthetic construct
  REGION 1..7: note = Description of Artificial Sequence: Synthetic peptide
SSTNGTS

SEQ ID NO: 5538 - protein, 7 aa, synthetic construct
  REGION 1..7: note = Description of Artificial Sequence: Synthetic peptide
ASDNSPR

SEQ ID NO: 5539 - protein, 7 aa, synthetic construct
  REGION 1..7: note = Description of Artificial Sequence: Synthetic peptide
TKNSGNS

SEQ ID NO: 5540 - protein, 7 aa, synthetic construct
  REGION 1..7: note = Description of Artificial Sequence: Synthetic peptide
SANGKPM

SEQ ID NO: 5541 - protein, 7 aa, synthetic construct
  REGION 1..7: note = Description of Artificial Sequence: Synthetic peptide
STGDQRQ

SEQ ID NO: 5542 - protein, 7 aa, synthetic construct
  REGION 1..7: note = Description of Artificial Sequence: Synthetic peptide
SGQNVNG

SEQ ID NO: 5543 - protein, 7 aa, synthetic construct
  REGION 1..7: note = Description of Artificial Sequence: Synthetic peptide
VRSTSNV

SEQ ID NO: 5544 - protein, 7 aa, synthetic construct
  REGION 1..7: note = Description of Artificial Sequence: Synthetic peptide
SSAQKGD

SEQ ID NO: 5545 - protein, 7 aa, synthetic construct
  REGION 1..7: note = Description of Artificial Sequence: Synthetic peptide
VGTPHSG

SEQ ID NO: 5546 - protein, 7 aa, synthetic construct
  REGION 1..7: note = Description of Artificial Sequence: Synthetic peptide
KGGDSSS

SEQ ID NO: 5547 - protein, 7 aa, synthetic construct
  REGION 1..7: note = Description of Artificial Sequence: Synthetic peptide
NQVQQSH

SEQ ID NO: 5548 - protein, 7 aa, synthetic construct
  REGION 1..7: note = Description of Artificial Sequence: Synthetic peptide
SPDKSTA

SEQ ID NO: 5549 - protein, 7 aa, synthetic construct
  REGION 1..7: note = Description of Artificial Sequence: Synthetic peptide
LTTSSSG

SEQ ID NO: 5550 - protein, 7 aa, synthetic construct
  REGION 1..7: note = Description of Artificial Sequence: Synthetic peptide
ENKSPSL

SEQ ID NO: 5551 - protein, 7 aa, synthetic construct
  REGION 1..7: note = Description of Artificial Sequence: Synthetic peptide
DMSSKAT

SEQ ID NO: 5552 - protein, 7 aa, synthetic construct
  REGION 1..7: note = Description of Artificial Sequence: Synthetic peptide
LGTQPGT

SEQ ID NO: 5553 - protein, 7 aa, synthetic construct
  REGION 1..7: note = Description of Artificial Sequence: Synthetic peptide
NGASKDS

SEQ ID NO: 5554 - protein, 7 aa, synthetic construct
  REGION 1..7: note = Description of Artificial Sequence: Synthetic peptide
SSTATHV

SEQ ID NO: 5555 - protein, 7 aa, synthetic construct
  REGION 1..7: note = Description of Artificial Sequence: Synthetic peptide
HQGAASS

SEQ ID NO: 5556 - protein, 7 aa, synthetic construct
  REGION 1..7: note = Description of Artificial Sequence: Synthetic peptide
GRNSTPH

SEQ ID NO: 5557 - protein, 7 aa, synthetic construct
  REGION 1..7: note = Description of Artificial Sequence: Synthetic peptide
QTSTSVA

SEQ ID NO: 5558 - protein, 7 aa, synthetic construct
  REGION 1..7: note = Description of Artificial Sequence: Synthetic peptide
VGTKQPV

SEQ ID NO: 5559 - protein, 7 aa, synthetic construct
  REGION 1..7: note = Description of Artificial Sequence: Synthetic peptide
GDNNAKT

SEQ ID NO: 5560 - protein, 7 aa, synthetic construct
  REGION 1..7: note = Description of Artificial Sequence: Synthetic peptide
VGGGAIK

SEQ ID NO: 5561 - protein, 7 aa, synthetic construct
  REGION 1..7: note = Description of Artificial Sequence: Synthetic peptide
GTGAEKA

SEQ ID NO: 5562 - protein, 7 aa, synthetic construct
  REGION 1..7: note = Description of Artificial Sequence: Synthetic peptide
NSPTQGS

SEQ ID NO: 5563 - protein, 7 aa, synthetic construct
  REGION 1..7: note = Description of Artificial Sequence: Synthetic peptide
DTGSKHS

SEQ ID NO: 5564 - protein, 7 aa, synthetic construct
  REGION 1..7: note = Description of Artificial Sequence: Synthetic peptide
GTTQVSK

SEQ ID NO: 5565 - protein, 7 aa, synthetic construct
  REGION 1..7: note = Description of Artificial Sequence: Synthetic peptide
YGGKTGT

SEQ ID NO: 5566 - protein, 7 aa, synthetic construct
  REGION 1..7: note = Description of Artificial Sequence: Synthetic peptide
DSSNKSV

SEQ ID NO: 5567 - protein, 7 aa, synthetic construct
  REGION 1..7: note = Description of Artificial Sequence: Synthetic peptide
NAGSSSH

SEQ ID NO: 5568 - protein, 7 aa, synthetic construct
  REGION 1..7: note = Description of Artificial Sequence: Synthetic peptide
NQGNGGM

SEQ ID NO: 5569 - protein, 7 aa, synthetic construct
  REGION 1..7: note = Description of Artificial Sequence: Synthetic peptide
AGSSQSG

SEQ ID NO: 5570 - protein, 7 aa, synthetic construct
  REGION 1..7: note = Description of Artificial Sequence: Synthetic peptide
ASTGDKV

SEQ ID NO: 5571 - protein, 7 aa, synthetic construct
  REGION 1..7: note = Description of Artificial Sequence: Synthetic peptide
GTTSAKE

SEQ ID NO: 5572 - protein, 7 aa, synthetic construct
  REGION 1..7: note = Description of Artificial Sequence: Synthetic peptide
GIGTGNL

SEQ ID NO: 5573 - protein, 7 aa, synthetic construct
  REGION 1..7: note = Description of Artificial Sequence: Synthetic peptide
SPVPNGL

SEQ ID NO: 5574 - protein, 7 aa, synthetic construct
  REGION 1..7: note = Description of Artificial Sequence: Synthetic peptide
DQSSKLQ

SEQ ID NO: 5575 - protein, 7 aa, synthetic construct
  REGION 1..7: note = Description of Artificial Sequence: Synthetic peptide
QSANPPI

SEQ ID NO: 5576 - protein, 7 aa, synthetic construct
  REGION 1..7: note = Description of Artificial Sequence: Synthetic peptide
GSESRPL

SEQ ID NO: 5577 - protein, 7 aa, synthetic construct
  REGION 1..7: note = Description of Artificial Sequence: Synthetic peptide
CTASKAE

SEQ ID NO: 5578 - protein, 7 aa, synthetic construct
  REGION 1..7: note = Description of Artificial Sequence: Synthetic peptide
QADAPSR

SEQ ID NO: 5579 - protein, 7 aa, synthetic construct
  REGION 1..7: note = Description of Artificial Sequence: Synthetic peptide
EAISAPK

SEQ ID NO: 5580 - protein, 7 aa, synthetic construct
  REGION 1..7: note = Description of Artificial Sequence: Synthetic peptide
DSGSANR

SEQ ID NO: 5581 - protein, 7 aa, synthetic construct
  REGION 1..7: note = Description of Artificial Sequence: Synthetic peptide
ATGPTSH

SEQ ID NO: 5582 - protein, 7 aa, synthetic construct
  REGION 1..7: note = Description of Artificial Sequence: Synthetic peptide
TAAASSK

SEQ ID NO: 5583 - protein, 7 aa, synthetic construct
  REGION 1..7: note = Description of Artificial Sequence: Synthetic peptide
SGAERSL

SEQ ID NO: 5584 - protein, 7 aa, synthetic construct
  REGION 1..7: note = Description of Artificial Sequence: Synthetic peptide
DSKSGTS

SEQ ID NO: 5585 - protein, 7 aa, synthetic construct
  REGION 1..7: note = Description of Artificial Sequence: Synthetic peptide
SVGQSPN

SEQ ID NO: 5586 - protein, 7 aa, synthetic construct
  REGION 1..7: note = Description of Artificial Sequence: Synthetic peptide
GVAQRDG

SEQ ID NO: 5587 - protein, 7 aa, synthetic construct
  REGION 1..7: note = Description of Artificial Sequence: Synthetic peptide
DSGQASK

SEQ ID NO: 5588 - protein, 7 aa, synthetic construct
  REGION 1..7: note = Description of Artificial Sequence: Synthetic peptide
AGDNATR

SEQ ID NO: 5589 - protein, 7 aa, synthetic construct
  REGION 1..7: note = Description of Artificial Sequence: Synthetic peptide
MAKPTST

SEQ ID NO: 5590 - protein, 7 aa, synthetic construct
  REGION 1..7: note = Description of Artificial Sequence: Synthetic peptide
DATSRNT

SEQ ID NO: 5591 - protein, 7 aa, synthetic construct
  REGION 1..7: note = Description of Artificial Sequence: Synthetic peptide
TNEGNHR

SEQ ID NO: 5592 - protein, 7 aa, synthetic construct
  REGION 1..7: note = Description of Artificial Sequence: Synthetic peptide
TGQSPGS

SEQ ID NO: 5593 - protein, 7 aa, synthetic construct
  REGION 1..7: note = Description of Artificial Sequence: Synthetic peptide
NSSPPTT

SEQ ID NO: 5594 - protein, 7 aa, synthetic construct
  REGION 1..7: note = Description of Artificial Sequence: Synthetic peptide
ITGQGGV

SEQ ID NO: 5595 - protein, 7 aa, synthetic construct
  REGION 1..7: note = Description of Artificial Sequence: Synthetic peptide
LSGSASS

SEQ ID NO: 5596 - protein, 7 aa, synthetic construct
  REGION 1..7: note = Description of Artificial Sequence: Synthetic peptide
AKGNGMN

SEQ ID NO: 5597 - protein, 7 aa, synthetic construct
  REGION 1..7: note = Description of Artificial Sequence: Synthetic peptide
SQGEVGR

SEQ ID NO: 5598 - protein, 7 aa, synthetic construct
  REGION 1..7: note = Description of Artificial Sequence: Synthetic peptide
DGSKSAL

SEQ ID NO: 5599 - protein, 7 aa, synthetic construct
  REGION 1..7: note = Description of Artificial Sequence: Synthetic peptide
GPDNAQK

SEQ ID NO: 5600 - protein, 7 aa, synthetic construct
  REGION 1..7: note = Description of Artificial Sequence: Synthetic peptide
GVDGKPS

SEQ ID NO: 5601 - protein, 7 aa, synthetic construct
  REGION 1..7: note = Description of Artificial Sequence: Synthetic peptide
NQGSNLS

SEQ ID NO: 5602 - protein, 7 aa, synthetic construct
  REGION 1..7: note = Description of Artificial Sequence: Synthetic peptide
RDSNANG

SEQ ID NO: 5603 - protein, 7 aa, synthetic construct
  REGION 1..7: note = Description of Artificial Sequence: Synthetic peptide
AGESSMK

SEQ ID NO: 5604 - protein, 7 aa, synthetic construct
  REGION 1..7: note = Description of Artificial Sequence: Synthetic peptide
DSSSKNS

SEQ ID NO: 5605 - protein, 7 aa, synthetic construct
  REGION 1..7: note = Description of Artificial Sequence: Synthetic peptide
TGTNTVQ

SEQ ID NO: 5606 - protein, 7 aa, synthetic construct
  REGION 1..7: note = Description of Artificial Sequence: Synthetic peptide
IGETTKG

SEQ ID NO: 5607 - protein, 7 aa, synthetic construct
  REGION 1..7: note = Description of Artificial Sequence: Synthetic peptide
MREDKLL

SEQ ID NO: 5608 - protein, 7 aa, synthetic construct
  REGION 1..7: note = Description of Artificial Sequence: Synthetic peptide
TSPQGQA

SEQ ID NO: 5609 - protein, 7 aa, synthetic construct
  REGION 1..7: note = Description of Artificial Sequence: Synthetic peptide
GMDQTRS

SEQ ID NO: 5610 - protein, 7 aa, synthetic construct
  REGION 1..7: note = Description of Artificial Sequence: Synthetic peptide
VNGGSIK

SEQ ID NO: 5611 - protein, 7 aa, synthetic construct
  REGION 1..7: note = Description of Artificial Sequence: Synthetic peptide
SSPGTER

SEQ ID NO: 5612 - protein, 7 aa, synthetic construct
  REGION 1..7: note = Description of Artificial Sequence: Synthetic peptide
VPDSRSQ

SEQ ID NO: 5613 - protein, 7 aa, synthetic construct
  REGION 1..7: note = Description of Artificial Sequence: Synthetic peptide
SSDQSRK

SEQ ID NO: 5614 - protein, 7 aa, synthetic construct
  REGION 1..7: note = Description of Artificial Sequence: Synthetic peptide
EGSSTIV

SEQ ID NO: 5615 - protein, 7 aa, synthetic construct
  REGION 1..7: note = Description of Artificial Sequence: Synthetic peptide
VTNAATG

SEQ ID NO: 5616 - protein, 7 aa, synthetic construct
  REGION 1..7: note = Description of Artificial Sequence: Synthetic peptide
YSGDKPT

SEQ ID NO: 5617 - protein, 7 aa, synthetic construct
  REGION 1..7: note = Description of Artificial Sequence: Synthetic peptide
SATTANT

SEQ ID NO: 5618 - protein, 7 aa, synthetic construct
  REGION 1..7: note = Description of Artificial Sequence: Synthetic peptide
SAVQAPS

SEQ ID NO: 5619 - protein, 7 aa, synthetic construct
  REGION 1..7: note = Description of Artificial Sequence: Synthetic peptide
SSSKTAN

SEQ ID NO: 5620 - protein, 7 aa, synthetic construct
  REGION 1..7: note = Description of Artificial Sequence: Synthetic peptide
NNSGTLS

SEQ ID NO: 5621 - protein, 7 aa, synthetic construct
  REGION 1..7: note = Description of Artificial Sequence: Synthetic peptide
GDPSPRQ

SEQ ID NO: 5622 - protein, 7 aa, synthetic construct
  REGION 1..7: note = Description of Artificial Sequence: Synthetic peptide
MVQSPAT

SEQ ID NO: 5623 - protein, 7 aa, synthetic construct
  REGION 1..7: note = Description of Artificial Sequence: Synthetic peptide
RGQDKPN

SEQ ID NO: 5624 - protein, 7 aa, synthetic construct
  REGION 1..7: note = Description of Artificial Sequence: Synthetic peptide
TSSSTHS

SEQ ID NO: 5625 - protein, 7 aa, synthetic construct
  REGION 1..7: note = Description of Artificial Sequence: Synthetic peptide
GAGSANS

SEQ ID NO: 5626 - protein, 7 aa, synthetic construct
  REGION 1..7: note = Description of Artificial Sequence: Synthetic peptide
MQSAKSG

SEQ ID NO: 5627 - protein, 7 aa, synthetic construct
  REGION 1..7: note = Description of Artificial Sequence: Synthetic peptide
SRDEKLR

SEQ ID NO: 5628 - protein, 7 aa, synthetic construct
  REGION 1..7: note = Description of Artificial Sequence: Synthetic peptide
LTQSPGT

SEQ ID NO: 5629 - protein, 7 aa, synthetic construct
  REGION 1..7: note = Description of Artificial Sequence: Synthetic peptide
DGSNVKS

SEQ ID NO: 5630 - protein, 7 aa, synthetic construct
  REGION 1..7: note = Description of Artificial Sequence: Synthetic peptide
GSLPANS

SEQ ID NO: 5631 - protein, 7 aa, synthetic construct
  REGION 1..7: note = Description of Artificial Sequence: Synthetic peptide
AAGGTHG

SEQ ID NO: 5632 - protein, 7 aa, synthetic construct
  REGION 1..7: note = Description of Artificial Sequence: Synthetic peptide
NNSKNGG

SEQ ID NO: 5633 - protein, 7 aa, synthetic construct
  REGION 1..7: note = Description of Artificial Sequence: Synthetic peptide
SVGMTPP

SEQ ID NO: 5634 - protein, 7 aa, synthetic construct
  REGION 1..7: note = Description of Artificial Sequence: Synthetic peptide
SNTATPQ

SEQ ID NO: 5635 - protein, 7 aa, synthetic construct
  REGION 1..7: note = Description of Artificial Sequence: Synthetic peptide
ALHKSST

SEQ ID NO: 5636 - protein, 7 aa, synthetic construct
  REGION 1..7: note = Description of Artificial Sequence: Synthetic peptide
GLVRETG

SEQ ID NO: 5637 - protein, 7 aa, synthetic construct
  REGION 1..7: note = Description of Artificial Sequence: Synthetic peptide
KNNSSSQ

SEQ ID NO: 5638 - protein, 7 aa, synthetic construct
  REGION 1..7: note = Description of Artificial Sequence: Synthetic peptide
ASPSKDS

SEQ ID NO: 5639 - protein, 7 aa, synthetic construct
  REGION 1..7: note = Description of Artificial Sequence: Synthetic peptide
HSSERAG

SEQ ID NO: 5640 - protein, 7 aa, synthetic construct
  REGION 1..7: note = Description of Artificial Sequence: Synthetic peptide
GPSTNNS

SEQ ID NO: 5641 - protein, 7 aa, synthetic construct
  REGION 1..7: note = Description of Artificial Sequence: Synthetic peptide
AGGDTAK

SEQ ID NO: 5642 - protein, 7 aa, synthetic construct
  REGION 1..7: note = Description of Artificial Sequence: Synthetic peptide
GTGHSSS

SEQ ID NO: 5643 - protein, 7 aa, synthetic construct
  REGION 1..7: note = Description of Artificial Sequence: Synthetic peptide
ASNDKMS

SEQ ID NO: 5644 - protein, 7 aa, synthetic construct
  REGION 1..7: note = Description of Artificial Sequence: Synthetic peptide
TPSTSNH

SEQ ID NO: 5645 - protein, 7 aa, synthetic construct
  REGION 1..7: note = Description of Artificial Sequence: Synthetic peptide
DTPAHTK

SEQ ID NO: 5646 - protein, 7 aa, synthetic construct
  REGION 1..7: note = Description of Artificial Sequence: Synthetic peptide
ISAGSSS

SEQ ID NO: 5647 - protein, 7 aa, synthetic construct
  REGION 1..7: note = Description of Artificial Sequence: Synthetic peptide
DQNRTHG

SEQ ID NO: 5648 - protein, 7 aa, synthetic construct
  REGION 1..7: note = Description of Artificial Sequence: Synthetic peptide
ANMGDVK

SEQ ID NO: 5649 - protein, 7 aa, synthetic construct
  REGION 1..7: note = Description of Artificial Sequence: Synthetic peptide
GTSPGSM

SEQ ID NO: 5650 - protein, 7 aa, synthetic construct
  REGION 1..7: note = Description of Artificial Sequence: Synthetic peptide
EGHEHSR

SEQ ID NO: 5651 - protein, 7 aa, synthetic construct
  REGION 1..7: note = Description of Artificial Sequence: Synthetic peptide
SNNTSPN

SEQ ID NO: 5652 - protein, 7 aa, synthetic construct
  REGION 1..7: note = Description of Artificial Sequence: Synthetic peptide
NTTAPSH

SEQ ID NO: 5653 - protein, 7 aa, synthetic construct
  REGION 1..7: note = Description of Artificial Sequence: Synthetic peptide
GSDSGTR

SEQ ID NO: 5654 - protein, 7 aa, synthetic construct
  REGION 1..7: note = Description of Artificial Sequence: Synthetic peptide
MGNPTAS

SEQ ID NO: 5655 - protein, 7 aa, synthetic construct
  REGION 1..7: note = Description of Artificial Sequence: Synthetic peptide
EARSPPK

SEQ ID NO: 5656 - protein, 7 aa, synthetic construct
  REGION 1..7: note = Description of Artificial Sequence: Synthetic peptide
DPLNVKV

SEQ ID NO: 5657 - protein, 7 aa, synthetic construct
  REGION 1..7: note = Description of Artificial Sequence: Synthetic peptide
DKPTPSI

SEQ ID NO: 5658 - protein, 7 aa, synthetic construct
  REGION 1..7: note = Description of Artificial Sequence: Synthetic peptide
NHSDKAA

SEQ ID NO: 5659 - protein, 7 aa, synthetic construct
  REGION 1..7: note = Description of Artificial Sequence: Synthetic peptide
ADQSPKL

SEQ ID NO: 5660 - protein, 7 aa, synthetic construct
  REGION 1..7: note = Description of Artificial Sequence: Synthetic peptide
GQKGNAV

SEQ ID NO: 5661 - protein, 7 aa, synthetic construct
  REGION 1..7: note = Description of Artificial Sequence: Synthetic peptide
SGTSHPA

SEQ ID NO: 5662 - protein, 7 aa, synthetic construct
  REGION 1..7: note = Description of Artificial Sequence: Synthetic peptide
ANTSSNS

SEQ ID NO: 5663 - protein, 7 aa, synthetic construct
  REGION 1..7: note = Description of Artificial Sequence: Synthetic peptide
QGKSGGA

SEQ ID NO: 5664 - protein, 7 aa, synthetic construct
  REGION 1..7: note = Description of Artificial Sequence: Synthetic peptide
NTNPSGA

SEQ ID NO: 5665 - protein, 7 aa, synthetic construct
  REGION 1..7: note = Description of Artificial Sequence: Synthetic peptide
KDNPERG

SEQ ID NO: 5666 - protein, 7 aa, synthetic construct
  REGION 1..7: note = Description of Artificial Sequence: Synthetic peptide
NGGSKVA

SEQ ID NO: 5667 - protein, 7 aa, synthetic construct
  REGION 1..7: note = Description of Artificial Sequence: Synthetic peptide
NVDQAKN

SEQ ID NO: 5668 - protein, 7 aa, synthetic construct
  REGION 1..7: note = Description of Artificial Sequence: Synthetic peptide
TSDSKVS

SEQ ID NO: 5669 - protein, 7 aa, synthetic construct
  REGION 1..7: note = Description of Artificial Sequence: Synthetic peptide
TGHNATT

SEQ ID NO: 5670 - protein, 7 aa, synthetic construct
  REGION 1..7: note = Description of Artificial Sequence: Synthetic peptide
TGEKVRV

SEQ ID NO: 5671 - protein, 7 aa, synthetic construct
  REGION 1..7: note = Description of Artificial Sequence: Synthetic peptide
TNGEQRT

SEQ ID NO: 5672 - protein, 7 aa, synthetic construct
  REGION 1..7: note = Description of Artificial Sequence: Synthetic peptide
TGKDSMS

SEQ ID NO: 5673 - protein, 7 aa, synthetic construct
  REGION 1..7: note = Description of Artificial Sequence: Synthetic peptide
STHSASN

SEQ ID NO: 5674 - protein, 7 aa, synthetic construct
  REGION 1..7: note = Description of Artificial Sequence: Synthetic peptide
SREEPRT

SEQ ID NO: 5675 - protein, 7 aa, synthetic construct
  REGION 1..7: note = Description of Artificial Sequence: Synthetic peptide
STSKSVA

SEQ ID NO: 5676 - protein, 7 aa, synthetic construct
  REGION 1..7: note = Description of Artificial Sequence: Synthetic peptide
SGNGKLL

SEQ ID NO: 5677 - protein, 7 aa, synthetic construct
  REGION 1..7: note = Description of Artificial Sequence: Synthetic peptide
IASSSAA

SEQ ID NO: 5678 - protein, 7 aa, synthetic construct
  REGION 1..7: note = Description of Artificial Sequence: Synthetic peptide
QGQERKS

SEQ ID NO: 5679 - protein, 7 aa, synthetic construct
  REGION 1..7: note = Description of Artificial Sequence: Synthetic peptide
LQGSNVA

SEQ ID NO: 5680 - protein, 7 aa, synthetic construct
  REGION 1..7: note = Description of Artificial Sequence: Synthetic peptide
DSVSPKK

SEQ ID NO: 5681 - protein, 7 aa, synthetic construct
  REGION 1..7: note = Description of Artificial Sequence: Synthetic peptide
DVPSSKG

SEQ ID NO: 5682 - protein, 7 aa, synthetic construct
  REGION 1..7: note = Description of Artificial Sequence: Synthetic peptide
ESDSRSH

SEQ ID NO: 5683 - protein, 7 aa, synthetic construct
  REGION 1..7: note = Description of Artificial Sequence: Synthetic peptide
DNTRNGG

SEQ ID NO: 5684 - protein, 7 aa, synthetic construct
  REGION 1..7: note = Description of Artificial Sequence: Synthetic peptide
ALSNNSK

SEQ ID NO: 5685 - protein, 7 aa, synthetic construct
  REGION 1..7: note = Description of Artificial Sequence: Synthetic peptide
ATSQHSN

SEQ ID NO: 5686 - protein, 7 aa, synthetic construct
  REGION 1..7: note = Description of Artificial Sequence: Synthetic peptide
AKQPNAN

SEQ ID NO: 5687 - protein, 7 aa, synthetic construct
  REGION 1..7: note = Description of Artificial Sequence: Synthetic peptide
GTEVKAG

SEQ ID NO: 5688 - protein, 7 aa, synthetic construct
  REGION 1..7: note = Description of Artificial Sequence: Synthetic peptide
GTGSSIS

SEQ ID NO: 5689 - protein, 7 aa, synthetic construct
  REGION 1..7: note = Description of Artificial Sequence: Synthetic peptide
VVSGNGG

SEQ ID NO: 5690 - protein, 7 aa, synthetic construct
  REGION 1..7: note = Description of Artificial Sequence: Synthetic peptide
SATSNGG

SEQ ID NO: 5691 - protein, 7 aa, synthetic construct
  REGION 1..7: note = Description of Artificial Sequence: Synthetic peptide
DRGEKHT

SEQ ID NO: 5692 - protein, 7 aa, synthetic construct
  REGION 1..7: note = Description of Artificial Sequence: Synthetic peptide
GTADSHY

SEQ ID NO: 5693 - protein, 7 aa, synthetic construct
  REGION 1..7: note = Description of Artificial Sequence: Synthetic peptide
SGAPTLL

SEQ ID NO: 5694 - protein, 7 aa, synthetic construct
  REGION 1..7: note = Description of Artificial Sequence: Synthetic peptide
AASDKSS

SEQ ID NO: 5695 - protein, 7 aa, synthetic construct
  REGION 1..7: note = Description of Artificial Sequence: Synthetic peptide
STSDRHT

SEQ ID NO: 5696 - protein, 7 aa, synthetic construct
  REGION 1..7: note = Description of Artificial Sequence: Synthetic peptide
IDKVSPS

SEQ ID NO: 5697 - protein, 7 aa, synthetic construct
  REGION 1..7: note = Description of Artificial Sequence: Synthetic peptide
EGKSVNA

SEQ ID NO: 5698 - protein, 7 aa, synthetic construct
  REGION 1..7: note = Description of Artificial Sequence: Synthetic peptide
LKDKANS

SEQ ID NO: 5699 - protein, 7 aa, synthetic construct
  REGION 1..7: note = Description of Artificial Sequence: Synthetic peptide
ATGADMR

SEQ ID NO: 5700 - protein, 7 aa, synthetic construct
  REGION 1..7: note = Description of Artificial Sequence: Synthetic peptide
ERNTAGS

SEQ ID NO: 5701 - protein, 7 aa, synthetic construct
  REGION 1..7: note = Description of Artificial Sequence: Synthetic peptide
DGMPQKV

SEQ ID NO: 5702 - protein, 7 aa, synthetic construct
  REGION 1..7: note = Description of Artificial Sequence: Synthetic peptide
AGQRSDG

SEQ ID NO: 5703 - protein, 7 aa, synthetic construct
  REGION 1..7: note = Description of Artificial Sequence: Synthetic peptide
AGKSSQP

SEQ ID NO: 5704 - protein, 7 aa, synthetic construct
  REGION 1..7: note = Description of Artificial Sequence: Synthetic peptide
VSKSSNS

SEQ ID NO: 5705 - protein, 7 aa, synthetic construct
  REGION 1..7: note = Description of Artificial Sequence: Synthetic peptide
TSSSTPT

SEQ ID NO: 5706 - protein, 7 aa, synthetic construct
  REGION 1..7: note = Description of Artificial Sequence: Synthetic peptide
SGGAGSQ

SEQ ID NO: 5707 - protein, 7 aa, synthetic construct
  REGION 1..7: note = Description of Artificial Sequence: Synthetic peptide
SPGNVAT

SEQ ID NO: 5708 - protein, 7 aa, synthetic construct
  REGION 1..7: note = Description of Artificial Sequence: Synthetic peptide
VQNSDAK

SEQ ID NO: 5709 - protein, 7 aa, synthetic construct
  REGION 1..7: note = Description of Artificial Sequence: Synthetic peptide
ANDKAPS

SEQ ID NO: 5710 - protein, 7 aa, synthetic construct
  REGION 1..7: note = Description of Artificial Sequence: Synthetic peptide
SDGTRGT

SEQ ID NO: 5711 - protein, 7 aa, synthetic construct
  REGION 1..7: note = Description of Artificial Sequence: Synthetic peptide
AISTSNS

SEQ ID NO: 5712 - protein, 7 aa, synthetic construct
  REGION 1..7: note = Description of Artificial Sequence: Synthetic peptide
GQKEGPS

SEQ ID NO: 5713 - protein, 7 aa, synthetic construct
  REGION 1..7: note = Description of Artificial Sequence: Synthetic peptide
AQGGSSG

SEQ ID NO: 5714 - protein, 7 aa, synthetic construct
  REGION 1..7: note = Description of Artificial Sequence: Synthetic peptide
STSNSRG

SEQ ID NO: 5715 - protein, 7 aa, synthetic construct
  REGION 1..7: note = Description of Artificial Sequence: Synthetic peptide
SSGGRDK

SEQ ID NO: 5716 - protein, 7 aa, synthetic construct
  REGION 1..7: note = Description of Artificial Sequence: Synthetic peptide
LPSQGGG

SEQ ID NO: 5717 - protein, 7 aa, synthetic construct
  REGION 1..7: note = Description of Artificial Sequence: Synthetic peptide
NTGTNAS

SEQ ID NO: 5718 - protein, 7 aa, synthetic construct
  REGION 1..7: note = Description of Artificial Sequence: Synthetic peptide
TTGQNSQ

SEQ ID NO: 5719 - protein, 7 aa, synthetic construct
  REGION 1..7: note = Description of Artificial Sequence: Synthetic peptide
AASSSTS

SEQ ID NO: 5720 - protein, 7 aa, synthetic construct
  REGION 1..7: note = Description of Artificial Sequence: Synthetic peptide
TLGSGGS

SEQ ID NO: 5721 - protein, 7 aa, synthetic construct
  REGION 1..7: note = Description of Artificial Sequence: Synthetic peptide
KGSSSGG

SEQ ID NO: 5722 - protein, 7 aa, synthetic construct
  REGION 1..7: note = Description of Artificial Sequence: Synthetic peptide
SSGDHRT

SEQ ID NO: 5723 - protein, 7 aa, synthetic construct
  REGION 1..7: note = Description of Artificial Sequence: Synthetic peptide
DTGGLGK

SEQ ID NO: 5724 - protein, 7 aa, synthetic construct
  REGION 1..7: note = Description of Artificial Sequence: Synthetic peptide
AGQSATG

SEQ ID NO: 5725 - protein, 7 aa, synthetic construct
  REGION 1..7: note = Description of Artificial Sequence: Synthetic peptide
NAGANST

SEQ ID NO: 5726 - protein, 7 aa, synthetic construct
  REGION 1..7: note = Description of Artificial Sequence: Synthetic peptide
ESVASVK

SEQ ID NO: 5727 - protein, 7 aa, synthetic construct
  REGION 1..7: note = Description of Artificial Sequence: Synthetic peptide
DSASSGK

SEQ ID NO: 5728 - protein, 7 aa, synthetic construct
  REGION 1..7: note = Description of Artificial Sequence: Synthetic peptide
STDNAGK

SEQ ID NO: 5729 - protein, 7 aa, synthetic construct
  REGION 1..7: note = Description of Artificial Sequence: Synthetic peptide
QSSNAAA

SEQ ID NO: 5730 - protein, 7 aa, synthetic construct
  REGION 1..7: note = Description of Artificial Sequence: Synthetic peptide
TTASPAT

SEQ ID NO: 5731 - protein, 7 aa, synthetic construct
  REGION 1..7: note = Description of Artificial Sequence: Synthetic peptide
TTTQSNI

SEQ ID NO: 5732 - protein, 7 aa, synthetic construct
  REGION 1..7: note = Description of Artificial Sequence: Synthetic peptide
SSGDRSG

SEQ ID NO: 5733 - protein, 7 aa, synthetic construct
  REGION 1..7: note = Description of Artificial Sequence: Synthetic peptide
ENSDKVR

SEQ ID NO: 5734 - protein, 7 aa, synthetic construct
  REGION 1..7: note = Description of Artificial Sequence: Synthetic peptide
ATTKTSQ

SEQ ID NO: 5735 - protein, 7 aa, synthetic construct
  REGION 1..7: note = Description of Artificial Sequence: Synthetic peptide
SNGATPA

SEQ ID NO: 5736 - protein, 7 aa, synthetic construct
  REGION 1..7: note = Description of Artificial Sequence: Synthetic peptide
SSRDQVK

SEQ ID NO: 5737 - protein, 7 aa, synthetic construct
  REGION 1..7: note = Description of Artificial Sequence: Synthetic peptide
VSSGTGK

SEQ ID NO: 5738 - protein, 7 aa, synthetic construct
  REGION 1..7: note = Description of Artificial Sequence: Synthetic peptide
SNEGPSK

SEQ ID NO: 5739 - protein, 7 aa, synthetic construct
  REGION 1..7: note = Description of Artificial Sequence: Synthetic peptide
DLGNKTH

SEQ ID NO: 5740 - protein, 7 aa, synthetic construct
  REGION 1..7: note = Description of Artificial Sequence: Synthetic peptide
DAGNLKT

SEQ ID NO: 5741 - protein, 7 aa, synthetic construct
  REGION 1..7: note = Description of Artificial Sequence: Synthetic peptide
IGDKSST

SEQ ID NO: 5742 - protein, 7 aa, synthetic construct
  REGION 1..7: note = Description of Artificial Sequence: Synthetic peptide
GTGPDQR

SEQ ID NO: 5743 - protein, 7 aa, synthetic construct
  REGION 1..7: note = Description of Artificial Sequence: Synthetic peptide
NTGEARA

SEQ ID NO: 5744 - protein, 7 aa, synthetic construct
  REGION 1..7: note = Description of Artificial Sequence: Synthetic peptide
ATKAGSA

SEQ ID NO: 5745 - protein, 7 aa, synthetic construct
  REGION 1..7: note = Description of Artificial Sequence: Synthetic peptide
TTGSHSS

SEQ ID NO: 5746 - protein, 7 aa, synthetic construct
  REGION 1..7: note = Description of Artificial Sequence: Synthetic peptide
EPNAPKN

SEQ ID NO: 5747 - protein, 7 aa, synthetic construct
  REGION 1..7: note = Description of Artificial Sequence: Synthetic peptide
GDSKERL

SEQ ID NO: 5748 - protein, 7 aa, synthetic construct
  REGION 1..7: note = Description of Artificial Sequence: Synthetic peptide
QSKGTEG

SEQ ID NO: 5749 - protein, 7 aa, synthetic construct
  REGION 1..7: note = Description of Artificial Sequence: Synthetic peptide
DGGANAR

SEQ ID NO: 5750 - protein, 7 aa, synthetic construct
  REGION 1..7: note = Description of Artificial Sequence: Synthetic peptide
KSSSQSV

SEQ ID NO: 5751 - protein, 7 aa, synthetic construct
  REGION 1..7: note = Description of Artificial Sequence: Synthetic peptide
LGGQGSA

SEQ ID NO: 5752 - protein, 7 aa, synthetic construct
  REGION 1..7: note = Description of Artificial Sequence: Synthetic peptide
GPLKDTG

SEQ ID NO: 5753 - protein, 7 aa, synthetic construct
  REGION 1..7: note = Description of Artificial Sequence: Synthetic peptide
NQGTSTG

SEQ ID NO: 5754 - protein, 7 aa, synthetic construct
  REGION 1..7: note = Description of Artificial Sequence: Synthetic peptide
TGQKDLG

SEQ ID NO: 5755 - protein, 7 aa, synthetic construct
  REGION 1..7: note = Description of Artificial Sequence: Synthetic peptide
LTAGSGG

SEQ ID NO: 5756 - protein, 7 aa, synthetic construct
  REGION 1..7: note = Description of Artificial Sequence: Synthetic peptide
SGNNGMH

SEQ ID NO: 5757 - protein, 7 aa, synthetic construct
  REGION 1..7: note = Description of Artificial Sequence: Synthetic peptide
TSGTAST

SEQ ID NO: 5758 - protein, 7 aa, synthetic construct
  REGION 1..7: note = Description of Artificial Sequence: Synthetic peptide
SNSPTTM

SEQ ID NO: 5759 - protein, 7 aa, synthetic construct
  REGION 1..7: note = Description of Artificial Sequence: Synthetic peptide
QNASSHA

SEQ ID NO: 5760 - protein, 7 aa, synthetic construct
  REGION 1..7: note = Description of Artificial Sequence: Synthetic peptide
STSTDNR

SEQ ID NO: 5761 - protein, 7 aa, synthetic construct
  REGION 1..7: note = Description of Artificial Sequence: Synthetic peptide
EGKSTPI

SEQ ID NO: 5762 - protein, 7 aa, synthetic construct
  REGION 1..7: note = Description of Artificial Sequence: Synthetic peptide
DSLEPRK

SEQ ID NO: 5763 - protein, 7 aa, synthetic construct
  REGION 1..7: note = Description of Artificial Sequence: Synthetic peptide
AMTESNR

SEQ ID NO: 5764 - protein, 7 aa, synthetic construct
  REGION 1..7: note = Description of Artificial Sequence: Synthetic peptide
GETNKGY

SEQ ID NO: 5765 - protein, 7 aa, synthetic construct
  REGION 1..7: note = Description of Artificial Sequence: Synthetic peptide
GAQSSGK

SEQ ID NO: 5766 - protein, 7 aa, synthetic construct
  REGION 1..7: note = Description of Artificial Sequence: Synthetic peptide
GGQDKKS

SEQ ID NO: 5767 - protein, 7 aa, synthetic construct
  REGION 1..7: note = Description of Artificial Sequence: Synthetic peptide
HGQSPGS

SEQ ID NO: 5768 - protein, 7 aa, synthetic construct
  REGION 1..7: note = Description of Artificial Sequence: Synthetic peptide
LGGAQPK

SEQ ID NO: 5769 - protein, 7 aa, synthetic construct
  REGION 1..7: note = Description of Artificial Sequence: Synthetic peptide
SGQSPSN

SEQ ID NO: 5770 - protein, 7 aa, synthetic construct
  REGION 1..7: note = Description of Artificial Sequence: Synthetic peptide
GTSSTKS

SEQ ID NO: 5771 - protein, 7 aa, synthetic construct
  REGION 1..7: note = Description of Artificial Sequence: Synthetic peptide
LTNTSAA

SEQ ID NO: 5772 - protein, 7 aa, synthetic construct
  REGION 1..7: note = Description of Artificial Sequence: Synthetic peptide
QNSPTPL

SEQ ID NO: 5773 - protein, 7 aa, synthetic construct
  REGION 1..7: note = Description of Artificial Sequence: Synthetic peptide
STTGAGT

SEQ ID NO: 5774 - protein, 7 aa, synthetic construct
  REGION 1..7: note = Description of Artificial Sequence: Synthetic peptide
VVDSSNR

SEQ ID NO: 5775 - protein, 7 aa, synthetic construct
  REGION 1..7: note = Description of Artificial Sequence: Synthetic peptide
GDTGSRS

SEQ ID NO: 5776 - protein, 7 aa, synthetic construct
  REGION 1..7: note = Description of Artificial Sequence: Synthetic peptide
TVGSSSS

SEQ ID NO: 5777 - protein, 7 aa, synthetic construct
  REGION 1..7: note = Description of Artificial Sequence: Synthetic peptide
NTSGTNS

SEQ ID NO: 5778 - protein, 7 aa, synthetic construct
  REGION 1..7: note = Description of Artificial Sequence: Synthetic peptide
TGSQNLV

SEQ ID NO: 5779 - protein, 7 aa, synthetic construct
  REGION 1..7: note = Description of Artificial Sequence: Synthetic peptide
SANGPNT

SEQ ID NO: 5780 - protein, 7 aa, synthetic construct
  REGION 1..7: note = Description of Artificial Sequence: Synthetic peptide
LAGDRTQ

SEQ ID NO: 5781 - protein, 7 aa, synthetic construct
  REGION 1..7: note = Description of Artificial Sequence: Synthetic peptide
DMANPKR

SEQ ID NO: 5782 - protein, 7 aa, synthetic construct
  REGION 1..7: note = Description of Artificial Sequence: Synthetic peptide
LGNGKVS

SEQ ID NO: 5783 - protein, 7 aa, synthetic construct
  REGION 1..7: note = Description of Artificial Sequence: Synthetic peptide
GADSKGL

SEQ ID NO: 5784 - protein, 7 aa, synthetic construct
  REGION 1..7: note = Description of Artificial Sequence: Synthetic peptide
LGSKDAH

SEQ ID NO: 5785 - protein, 7 aa, synthetic construct
  REGION 1..7: note = Description of Artificial Sequence: Synthetic peptide
TGSASSS

SEQ ID NO: 5786 - protein, 7 aa, synthetic construct
  REGION 1..7: note = Description of Artificial Sequence: Synthetic peptide
QSSPSAK

SEQ ID NO: 5787 - protein, 7 aa, synthetic construct
  REGION 1..7: note = Description of Artificial Sequence: Synthetic peptide
DTGKIGG

SEQ ID NO: 5788 - protein, 7 aa, synthetic construct
  REGION 1..7: note = Description of Artificial Sequence: Synthetic peptide
GTTGESR

SEQ ID NO: 5789 - protein, 7 aa, synthetic construct
  REGION 1..7: note = Description of Artificial Sequence: Synthetic peptide
VQGSTSN

SEQ ID NO: 5790 - protein, 7 aa, synthetic construct
  REGION 1..7: note = Description of Artificial Sequence: Synthetic peptide
SASKDHA

SEQ ID NO: 5791 - protein, 7 aa, synthetic construct
  REGION 1..7: note = Description of Artificial Sequence: Synthetic peptide
MKQESAV

SEQ ID NO: 5792 - protein, 7 aa, synthetic construct
  REGION 1..7: note = Description of Artificial Sequence: Synthetic peptide
LASTSST

SEQ ID NO: 5793 - protein, 7 aa, synthetic construct
  REGION 1..7: note = Description of Artificial Sequence: Synthetic peptide
GGVKTGD

SEQ ID NO: 5794 - protein, 7 aa, synthetic construct
  REGION 1..7: note = Description of Artificial Sequence: Synthetic peptide
QVHKSAV

SEQ ID NO: 5795 - protein, 7 aa, synthetic construct
  REGION 1..7: note = Description of Artificial Sequence: Synthetic peptide
GGSKNNT

SEQ ID NO: 5796 - protein, 7 aa, synthetic construct
  REGION 1..7: note = Description of Artificial Sequence: Synthetic peptide
DGANHTN

SEQ ID NO: 5797 - protein, 7 aa, synthetic construct
  REGION 1..7: note = Description of Artificial Sequence: Synthetic peptide
QSTSSSA

SEQ ID NO: 5798 - protein, 7 aa, synthetic construct
  REGION 1..7: note = Description of Artificial Sequence: Synthetic peptide
GTGVGGM

SEQ ID NO: 5799 - protein, 7 aa, synthetic construct
  REGION 1..7: note = Description of Artificial Sequence: Synthetic peptide
NQGASPV

SEQ ID NO: 5800 - protein, 7 aa, synthetic construct
  REGION 1..7: note = Description of Artificial Sequence: Synthetic peptide
NTSNKTD

SEQ ID NO: 5801 - protein, 7 aa, synthetic construct
  REGION 1..7: note = Description of Artificial Sequence: Synthetic peptide
DSKSSAT

SEQ ID NO: 5802 - protein, 7 aa, synthetic construct
  REGION 1..7: note = Description of Artificial Sequence: Synthetic peptide
GTTPSGP

SEQ ID NO: 5803 - protein, 7 aa, synthetic construct
  REGION 1..7: note = Description of Artificial Sequence: Synthetic peptide
TTESSMR

SEQ ID NO: 5804 - protein, 7 aa, synthetic construct
  REGION 1..7: note = Description of Artificial Sequence: Synthetic peptide
NRNSTSS

SEQ ID NO: 5805 - protein, 7 aa, synthetic construct
  REGION 1..7: note = Description of Artificial Sequence: Synthetic peptide
EPVNGHK

SEQ ID NO: 5806 - protein, 7 aa, synthetic construct
  REGION 1..7: note = Description of Artificial Sequence: Synthetic peptide
DPTANTK

SEQ ID NO: 5807 - protein, 7 aa, synthetic construct
  REGION 1..7: note = Description of Artificial Sequence: Synthetic peptide
GQDKSTV

SEQ ID NO: 5808 - protein, 7 aa, synthetic construct
  REGION 1..7: note = Description of Artificial Sequence: Synthetic peptide
SNAQLAK

SEQ ID NO: 5809 - protein, 7 aa, synthetic construct
  REGION 1..7: note = Description of Artificial Sequence: Synthetic peptide
ATGTTPG

SEQ ID NO: 5810 - protein, 7 aa, synthetic construct
  REGION 1..7: note = Description of Artificial Sequence: Synthetic peptide
TMSNSPV

SEQ ID NO: 5811 - protein, 7 aa, synthetic construct
  REGION 1..7: note = Description of Artificial Sequence: Synthetic peptide
HGHDKAQ

SEQ ID NO: 5812 - protein, 7 aa, synthetic construct
  REGION 1..7: note = Description of Artificial Sequence: Synthetic peptide
SSGSHSA

SEQ ID NO: 5813 - protein, 7 aa, synthetic construct
  REGION 1..7: note = Description of Artificial Sequence: Synthetic peptide
EQRSKPM

SEQ ID NO: 5814 - protein, 7 aa, synthetic construct
  REGION 1..7: note = Description of Artificial Sequence: Synthetic peptide
LTDANRG

SEQ ID NO: 5815 - protein, 7 aa, synthetic construct
  REGION 1..7: note = Description of Artificial Sequence: Synthetic peptide
VQSQGTP

SEQ ID NO: 5816 - protein, 7 aa, synthetic construct
  REGION 1..7: note = Description of Artificial Sequence: Synthetic peptide
ISTGGSS

SEQ ID NO: 5817 - protein, 7 aa, synthetic construct
  REGION 1..7: note = Description of Artificial Sequence: Synthetic peptide
NSNTSSS

SEQ ID NO: 5818 - protein, 7 aa, synthetic construct
  REGION 1..7: note = Description of Artificial Sequence: Synthetic peptide
TGTNHLA

SEQ ID NO: 5819 - protein, 7 aa, synthetic construct
  REGION 1..7: note = Description of Artificial Sequence: Synthetic peptide
THGGSTP

SEQ ID NO: 5820 - protein, 7 aa, synthetic construct
  REGION 1..7: note = Description of Artificial Sequence: Synthetic peptide
QGSSSVM

SEQ ID NO: 5821 - protein, 7 aa, synthetic construct
  REGION 1..7: note = Description of Artificial Sequence: Synthetic peptide
GEASQSR

SEQ ID NO: 5822 - protein, 7 aa, synthetic construct
  REGION 1..7: note = Description of Artificial Sequence: Synthetic peptide
GQSSPSS

SEQ ID NO: 5823 - protein, 7 aa, synthetic construct
  REGION 1..7: note = Description of Artificial Sequence: Synthetic peptide
ASQTPTS

SEQ ID NO: 5824 - protein, 7 aa, synthetic construct
  REGION 1..7: note = Description of Artificial Sequence: Synthetic peptide
DGTSKKL

SEQ ID NO: 5825 - protein, 7 aa, synthetic construct
  REGION 1..7: note = Description of Artificial Sequence: Synthetic peptide
EGVSPKT

SEQ ID NO: 5826 - protein, 7 aa, synthetic construct
  REGION 1..7: note = Description of Artificial Sequence: Synthetic peptide
QSQSSTM

SEQ ID NO: 5827 - protein, 7 aa, synthetic construct
  REGION 1..7: note = Description of Artificial Sequence: Synthetic peptide
ETSNTGK

SEQ ID NO: 5828 - protein, 7 aa, synthetic construct
  REGION 1..7: note = Description of Artificial Sequence: Synthetic peptide
SPNQSSG

SEQ ID NO: 5829 - protein, 7 aa, synthetic construct
  REGION 1..7: note = Description of Artificial Sequence: Synthetic peptide
TPTDNKG

SEQ ID NO: 5830 - protein, 7 aa, synthetic construct
  REGION 1..7: note = Description of Artificial Sequence: Synthetic peptide
RGDQTLA

SEQ ID NO: 5831 - protein, 7 aa, synthetic construct
  REGION 1..7: note = Description of Artificial Sequence: Synthetic peptide
ESGQSKG

SEQ ID NO: 5832 - protein, 7 aa, synthetic construct
  REGION 1..7: note = Description of Artificial Sequence: Synthetic peptide
GVATPSK

SEQ ID NO: 5833 - protein, 7 aa, synthetic construct
  REGION 1..7: note = Description of Artificial Sequence: Synthetic peptide
SSVSTAS

SEQ ID NO: 5834 - protein, 7 aa, synthetic construct
  REGION 1..7: note = Description of Artificial Sequence: Synthetic peptide
AQERDAK

SEQ ID NO: 5835 - protein, 7 aa, synthetic construct
  REGION 1..7: note = Description of Artificial Sequence: Synthetic peptide
GPSNQKM

SEQ ID NO: 5836 - protein, 7 aa, synthetic construct
  REGION 1..7: note = Description of Artificial Sequence: Synthetic peptide
NNGNATT

SEQ ID NO: 5837 - protein, 7 aa, synthetic construct
  REGION 1..7: note = Description of Artificial Sequence: Synthetic peptide
TSGGTMS

SEQ ID NO: 5838 - protein, 7 aa, synthetic construct
  REGION 1..7: note = Description of Artificial Sequence: Synthetic peptide
TGKTSTS

SEQ ID NO: 5839 - protein, 7 aa, synthetic construct
  REGION 1..7: note = Description of Artificial Sequence: Synthetic peptide
NGNDTAK

SEQ ID NO: 5840 - protein, 7 aa, synthetic construct
  REGION 1..7: note = Description of Artificial Sequence: Synthetic peptide
ADSKQNA

SEQ ID NO: 5841 - protein, 7 aa, synthetic construct
  REGION 1..7: note = Description of Artificial Sequence: Synthetic peptide
SPGPATK

SEQ ID NO: 5842 - protein, 7 aa, synthetic construct
  REGION 1..7: note = Description of Artificial Sequence: Synthetic peptide
SGQKVNS

SEQ ID NO: 5843 - protein, 7 aa, synthetic construct
  REGION 1..7: note = Description of Artificial Sequence: Synthetic peptide
GSNAQSR

SEQ ID NO: 5844 - protein, 7 aa, synthetic construct
  REGION 1..7: note = Description of Artificial Sequence: Synthetic peptide
QPSSTPT

SEQ ID NO: 5845 - protein, 7 aa, synthetic construct
  REGION 1..7: note = Description of Artificial Sequence: Synthetic peptide
GVTSKPD

SEQ ID NO: 5846 - protein, 7 aa, synthetic construct
  REGION 1..7: note = Description of Artificial Sequence: Synthetic peptide
TNLGSPS

SEQ ID NO: 5847 - protein, 7 aa, synthetic construct
  REGION 1..7: note = Description of Artificial Sequence: Synthetic peptide
QNSEKGQ

SEQ ID NO: 5848 - protein, 7 aa, synthetic construct
  REGION 1..7: note = Description of Artificial Sequence: Synthetic peptide
ERTGSSG

SEQ ID NO: 5849 - protein, 7 aa, synthetic construct
  REGION 1..7: note = Description of Artificial Sequence: Synthetic peptide
NGTQNAQ

SEQ ID NO: 5850 - protein, 7 aa, synthetic construct
  REGION 1..7: note = Description of Artificial Sequence: Synthetic peptide
LRDKSSG

SEQ ID NO: 5851 - protein, 7 aa, synthetic construct
  REGION 1..7: note = Description of Artificial Sequence: Synthetic peptide
TPSKTSA

SEQ ID NO: 5852 - protein, 7 aa, synthetic construct
  REGION 1..7: note = Description of Artificial Sequence: Synthetic peptide
SQVSQGA

SEQ ID NO: 5853 - protein, 7 aa, synthetic construct
  REGION 1..7: note = Description of Artificial Sequence: Synthetic peptide
STHKDQS

SEQ ID NO: 5854 - protein, 7 aa, synthetic construct
  REGION 1..7: note = Description of Artificial Sequence: Synthetic peptide
TSAQATS

SEQ ID NO: 5855 - protein, 7 aa, synthetic construct
  REGION 1..7: note = Description of Artificial Sequence: Synthetic peptide
TPTSSSM

SEQ ID NO: 5856 - protein, 7 aa, synthetic construct
  REGION 1..7: note = Description of Artificial Sequence: Synthetic peptide
SSTNAPT

SEQ ID NO: 5857 - protein, 7 aa, synthetic construct
  REGION 1..7: note = Description of Artificial Sequence: Synthetic peptide
ASPAGSG

SEQ ID NO: 5858 - protein, 7 aa, synthetic construct
  REGION 1..7: note = Description of Artificial Sequence: Synthetic peptide
NGAAPVS

SEQ ID NO: 5859 - protein, 7 aa, synthetic construct
  REGION 1..7: note = Description of Artificial Sequence: Synthetic peptide
DMGHKGQ

SEQ ID NO: 5860 - protein, 7 aa, synthetic construct
  REGION 1..7: note = Description of Artificial Sequence: Synthetic peptide
GGETRTS

SEQ ID NO: 5861 - protein, 7 aa, synthetic construct
  REGION 1..7: note = Description of Artificial Sequence: Synthetic peptide
HTQNTSA

SEQ ID NO: 5862 - protein, 7 aa, synthetic construct
  REGION 1..7: note = Description of Artificial Sequence: Synthetic peptide
QNAPTSG

SEQ ID NO: 5863 - protein, 7 aa, synthetic construct
  REGION 1..7: note = Description of Artificial Sequence: Synthetic peptide
TVSSNGA

SEQ ID NO: 5864 - protein, 7 aa, synthetic construct
  REGION 1..7: note = Description of Artificial Sequence: Synthetic peptide
SVSKSSV

SEQ ID NO: 5865 - protein, 7 aa, synthetic construct
  REGION 1..7: note = Description of Artificial Sequence: Synthetic peptide
CSDSKSQ

SEQ ID NO: 5866 - protein, 7 aa, synthetic construct
  REGION 1..7: note = Description of Artificial Sequence: Synthetic peptide
QVADANR

SEQ ID NO: 5867 - protein, 7 aa, synthetic construct
  REGION 1..7: note = Description of Artificial Sequence: Synthetic peptide
GEPRNNS

SEQ ID NO: 5868 - protein, 7 aa, synthetic construct
  REGION 1..7: note = Description of Artificial Sequence: Synthetic peptide
ESSGTSR

SEQ ID NO: 5869 - protein, 7 aa, synthetic construct
  REGION 1..7: note = Description of Artificial Sequence: Synthetic peptide
GRDGASG

SEQ ID NO: 5870 - protein, 7 aa, synthetic construct
  REGION 1..7: note = Description of Artificial Sequence: Synthetic peptide
NTSKGNS

SEQ ID NO: 5871 - protein, 7 aa, synthetic construct
  REGION 1..7: note = Description of Artificial Sequence: Synthetic peptide
IPSSSSS

SEQ ID NO: 5872 - protein, 7 aa, synthetic construct
  REGION 1..7: note = Description of Artificial Sequence: Synthetic peptide
MPGTAAP

SEQ ID NO: 5873 - protein, 7 aa, synthetic construct
  REGION 1..7: note = Description of Artificial Sequence: Synthetic peptide
NRATATA

SEQ ID NO: 5874 - protein, 7 aa, synthetic construct
  REGION 1..7: note = Description of Artificial Sequence: Synthetic peptide
GVAQPHG

SEQ ID NO: 5875 - protein, 7 aa, synthetic construct
  REGION 1..7: note = Description of Artificial Sequence: Synthetic peptide
SSTGKVS

SEQ ID NO: 5876 - protein, 7 aa, synthetic construct
  REGION 1..7: note = Description of Artificial Sequence: Synthetic peptide
RIDGRKD

SEQ ID NO: 5877 - protein, 7 aa, synthetic construct
  REGION 1..7: note = Description of Artificial Sequence: Synthetic peptide
STNAGGS

SEQ ID NO: 5878 - protein, 7 aa, synthetic construct
  REGION 1..7: note = Description of Artificial Sequence: Synthetic peptide
HSGERQG

SEQ ID NO: 5879 - protein, 7 aa, synthetic construct
  REGION 1..7: note = Description of Artificial Sequence: Synthetic peptide
GPNTSPS

SEQ ID NO: 5880 - protein, 7 aa, synthetic construct
  REGION 1..7: note = Description of Artificial Sequence: Synthetic peptide
SDDKIRG

SEQ ID NO: 5881 - protein, 7 aa, synthetic construct
  REGION 1..7: note = Description of Artificial Sequence: Synthetic peptide
NRSESPS

SEQ ID NO: 5882 - protein, 7 aa, synthetic construct
  REGION 1..7: note = Description of Artificial Sequence: Synthetic peptide
DGKPSSV

SEQ ID NO: 5883 - protein, 7 aa, synthetic construct
  REGION 1..7: note = Description of Artificial Sequence: Synthetic peptide
QGSSTNS

SEQ ID NO: 5884 - protein, 7 aa, synthetic construct
  REGION 1..7: note = Description of Artificial Sequence: Synthetic peptide
GKGTPDS

SEQ ID NO: 5885 - protein, 7 aa, synthetic construct
  REGION 1..7: note = Description of Artificial Sequence: Synthetic peptide
LGTKPNM

SEQ ID NO: 5886 - protein, 7 aa, synthetic construct
  REGION 1..7: note = Description of Artificial Sequence: Synthetic peptide
HSDPKGL

SEQ ID NO: 5887 - protein, 7 aa, synthetic construct
  REGION 1..7: note = Description of Artificial Sequence: Synthetic peptide
MEKPSLA

SEQ ID NO: 5888 - protein, 7 aa, synthetic construct
  REGION 1..7: note = Description of Artificial Sequence: Synthetic peptide
NSTNSSK

SEQ ID NO: 5889 - protein, 7 aa, synthetic construct
  REGION 1..7: note = Description of Artificial Sequence: Synthetic peptide
MGQGPKD

SEQ ID NO: 5890 - protein, 7 aa, synthetic construct
  REGION 1..7: note = Description of Artificial Sequence: Synthetic peptide
LSSKETT

SEQ ID NO: 5891 - protein, 7 aa, synthetic construct
  REGION 1..7: note = Description of Artificial Sequence: Synthetic peptide
ALGSNPG

SEQ ID NO: 5892 - protein, 7 aa, synthetic construct
  REGION 1..7: note = Description of Artificial Sequence: Synthetic peptide
AGTQSTM

SEQ ID NO: 5893 - protein, 7 aa, synthetic construct
  REGION 1..7: note = Description of Artificial Sequence: Synthetic peptide
AGTGSSK

SEQ ID NO: 5894 - protein, 7 aa, synthetic construct
  REGION 1..7: note = Description of Artificial Sequence: Synthetic peptide
GTGRDNL

SEQ ID NO: 5895 - protein, 7 aa, synthetic construct
  REGION 1..7: note = Description of Artificial Sequence: Synthetic peptide
GTSNSGS

SEQ ID NO: 5896 - protein, 7 aa, synthetic construct
  REGION 1..7: note = Description of Artificial Sequence: Synthetic peptide
GEKTNMS

SEQ ID NO: 5897 - protein, 7 aa, synthetic construct
  REGION 1..7: note = Description of Artificial Sequence: Synthetic peptide
VQNTAAG

SEQ ID NO: 5898 - protein, 7 aa, synthetic construct
  REGION 1..7: note = Description of Artificial Sequence: Synthetic peptide
TDSRDKV

SEQ ID NO: 5899 - protein, 7 aa, synthetic construct
  REGION 1..7: note = Description of Artificial Sequence: Synthetic peptide
DTHSTSR

SEQ ID NO: 5900 - protein, 7 aa, synthetic construct
  REGION 1..7: note = Description of Artificial Sequence: Synthetic peptide
SPSTKES

SEQ ID NO: 5901 - protein, 7 aa, synthetic construct
  REGION 1..7: note = Description of Artificial Sequence: Synthetic peptide
TAGNANS

SEQ ID NO: 5902 - protein, 7 aa, synthetic construct
  REGION 1..7: note = Description of Artificial Sequence: Synthetic peptide
STLSAKG

SEQ ID NO: 5903 - protein, 7 aa, synthetic construct
  REGION 1..7: note = Description of Artificial Sequence: Synthetic peptide
TGGQSNV

SEQ ID NO: 5904 - protein, 7 aa, synthetic construct
  REGION 1..7: note = Description of Artificial Sequence: Synthetic peptide
SQSSPTQ

SEQ ID NO: 5905 - protein, 7 aa, synthetic construct
  REGION 1..7: note = Description of Artificial Sequence: Synthetic peptide
NGESKPM

SEQ ID NO: 5906 - protein, 7 aa, synthetic construct
  REGION 1..7: note = Description of Artificial Sequence: Synthetic peptide
TNATNHV

SEQ ID NO: 5907 - protein, 7 aa, synthetic construct
  REGION 1..7: note = Description of Artificial Sequence: Synthetic peptide
SNGGPSS

SEQ ID NO: 5908 - protein, 7 aa, synthetic construct
  REGION 1..7: note = Description of Artificial Sequence: Synthetic peptide
DGVREKV

SEQ ID NO: 5909 - protein, 7 aa, synthetic construct
  REGION 1..7: note = Description of Artificial Sequence: Synthetic peptide
GNSPTLQ

SEQ ID NO: 5910 - protein, 7 aa, synthetic construct
  REGION 1..7: note = Description of Artificial Sequence: Synthetic peptide
VTGVPTT

SEQ ID NO: 5911 - protein, 7 aa, synthetic construct
  REGION 1..7: note = Description of Artificial Sequence: Synthetic peptide
SEINPKL

SEQ ID NO: 5912 - protein, 7 aa, synthetic construct
  REGION 1..7: note = Description of Artificial Sequence: Synthetic peptide
ATGSGSS

SEQ ID NO: 5913 - protein, 7 aa, synthetic construct
  REGION 1..7: note = Description of Artificial Sequence: Synthetic peptide
EHGKSSV

SEQ ID NO: 5914 - protein, 7 aa, synthetic construct
  REGION 1..7: note = Description of Artificial Sequence: Synthetic peptide
GVGQSNG

SEQ ID NO: 5915 - protein, 7 aa, synthetic construct
  REGION 1..7: note = Description of Artificial Sequence: Synthetic peptide
GSATANA

SEQ ID NO: 5916 - protein, 7 aa, synthetic construct
  REGION 1..7: note = Description of Artificial Sequence: Synthetic peptide
SAEIKGA

SEQ ID NO: 5917 - protein, 7 aa, synthetic construct
  REGION 1..7: note = Description of Artificial Sequence: Synthetic peptide
LNSPTTG

SEQ ID NO: 5918 - protein, 7 aa, synthetic construct
  REGION 1..7: note = Description of Artificial Sequence: Synthetic peptide
NHDGAGK

SEQ ID NO: 5919 - protein, 7 aa, synthetic construct
  REGION 1..7: note = Description of Artificial Sequence: Synthetic peptide
DRASPTT

SEQ ID NO: 5920 - protein, 7 aa, synthetic construct
  REGION 1..7: note = Description of Artificial Sequence: Synthetic peptide
IGTSSQG

SEQ ID NO: 5921 - protein, 7 aa, synthetic construct
  REGION 1..7: note = Description of Artificial Sequence: Synthetic peptide
TGADPLK

SEQ ID NO: 5922 - protein, 7 aa, synthetic construct
  REGION 1..7: note = Description of Artificial Sequence: Synthetic peptide
TLASTNQ

SEQ ID NO: 5923 - protein, 7 aa, synthetic construct
  REGION 1..7: note = Description of Artificial Sequence: Synthetic peptide
ALETPTR

SEQ ID NO: 5924 - protein, 7 aa, synthetic construct
  REGION 1..7: note = Description of Artificial Sequence: Synthetic peptide
EGRSSVV

SEQ ID NO: 5925 - protein, 7 aa, synthetic construct
  REGION 1..7: note = Description of Artificial Sequence: Synthetic peptide
QGTHKQD

SEQ ID NO: 5926 - protein, 7 aa, synthetic construct
  REGION 1..7: note = Description of Artificial Sequence: Synthetic peptide
TSGDHMK

SEQ ID NO: 5927 - protein, 7 aa, synthetic construct
  REGION 1..7: note = Description of Artificial Sequence: Synthetic peptide
DSNVTKP

SEQ ID NO: 5928 - protein, 7 aa, synthetic construct
  REGION 1..7: note = Description of Artificial Sequence: Synthetic peptide
NGGAHVT

SEQ ID NO: 5929 - protein, 7 aa, synthetic construct
  REGION 1..7: note = Description of Artificial Sequence: Synthetic peptide
NAGGNAI

SEQ ID NO: 5930 - protein, 7 aa, synthetic construct
  REGION 1..7: note = Description of Artificial Sequence: Synthetic peptide
TGAGSSV

SEQ ID NO: 5931 - protein, 7 aa, synthetic construct
  REGION 1..7: note = Description of Artificial Sequence: Synthetic peptide
SSPGASS

SEQ ID NO: 5932 - protein, 7 aa, synthetic construct
  REGION 1..7: note = Description of Artificial Sequence: Synthetic peptide
NTKGTTQ

SEQ ID NO: 5933 - protein, 7 aa, synthetic construct
  REGION 1..7: note = Description of Artificial Sequence: Synthetic peptide
GSATAST

SEQ ID NO: 5934 - protein, 7 aa, synthetic construct
  REGION 1..7: note = Description of Artificial Sequence: Synthetic peptide
SLGSQSK

SEQ ID NO: 5935 - protein, 7 aa, synthetic construct
  REGION 1..7: note = Description of Artificial Sequence: Synthetic peptide
SGKDTMQ

SEQ ID NO: 5936 - protein, 7 aa, synthetic construct
  REGION 1..7: note = Description of Artificial Sequence: Synthetic peptide
GNVDKVV

SEQ ID NO: 5937 - protein, 7 aa, synthetic construct
  REGION 1..7: note = Description of Artificial Sequence: Synthetic peptide
SVSKETM

SEQ ID NO: 5938 - protein, 7 aa, synthetic construct
  REGION 1..7: note = Description of Artificial Sequence: Synthetic peptide
ASDGKTA

SEQ ID NO: 5939 - protein, 7 aa, synthetic construct
  REGION 1..7: note = Description of Artificial Sequence: Synthetic peptide
GKNGHAG

SEQ ID NO: 5940 - protein, 7 aa, synthetic construct
  REGION 1..7: note = Description of Artificial Sequence: Synthetic peptide
GGSDNKN

SEQ ID NO: 5941 - protein, 7 aa, synthetic construct
  REGION 1..7: note = Description of Artificial Sequence: Synthetic peptide
SREGTPL

SEQ ID NO: 5942 - protein, 7 aa, synthetic construct
  REGION 1..7: note = Description of Artificial Sequence: Synthetic peptide
LVGKSTS

SEQ ID NO: 5943 - protein, 7 aa, synthetic construct
  REGION 1..7: note = Description of Artificial Sequence: Synthetic peptide
SNDSRKG

SEQ ID NO: 5944 - protein, 7 aa, synthetic construct
  REGION 1..7: note = Description of Artificial Sequence: Synthetic peptide
NADQPGK

SEQ ID NO: 5945 - protein, 7 aa, synthetic construct
  REGION 1..7: note = Description of Artificial Sequence: Synthetic peptide
MATNATA

SEQ ID NO: 5946 - protein, 7 aa, synthetic construct
  REGION 1..7: note = Description of Artificial Sequence: Synthetic peptide
EVSPTSK

SEQ ID NO: 5947 - protein, 7 aa, synthetic construct
  REGION 1..7: note = Description of Artificial Sequence: Synthetic peptide
GPNTPAV

SEQ ID NO: 5948 - protein, 7 aa, synthetic construct
  REGION 1..7: note = Description of Artificial Sequence: Synthetic peptide
QQGSNAN

SEQ ID NO: 5949 - protein, 7 aa, synthetic construct
  REGION 1..7: note = Description of Artificial Sequence: Synthetic peptide
VSGSAAA

SEQ ID NO: 5950 - protein, 7 aa, synthetic construct
  REGION 1..7: note = Description of Artificial Sequence: Synthetic peptide
AETSGSK

SEQ ID NO: 5951 - protein, 7 aa, synthetic construct
  REGION 1..7: note = Description of Artificial Sequence: Synthetic peptide
QGTPKPD

SEQ ID NO: 5952 - protein, 7 aa, synthetic construct
  REGION 1..7: note = Description of Artificial Sequence: Synthetic peptide
EQATKSP

SEQ ID NO: 5953 - protein, 7 aa, synthetic construct
  REGION 1..7: note = Description of Artificial Sequence: Synthetic peptide
SPVNTKV

SEQ ID NO: 5954 - protein, 7 aa, synthetic construct
  REGION 1..7: note = Description of Artificial Sequence: Synthetic peptide
TQRGASQ

SEQ ID NO: 5955 - protein, 7 aa, synthetic construct
  REGION 1..7: note = Description of Artificial Sequence: Synthetic peptide
IRSDSTA

SEQ ID NO: 5956 - protein, 7 aa, synthetic construct
  REGION 1..7: note = Description of Artificial Sequence: Synthetic peptide
REGSGSA

SEQ ID NO: 5957 - protein, 7 aa, synthetic construct
  REGION 1..7: note = Description of Artificial Sequence: Synthetic peptide
DRSSAQA

SEQ ID NO: 5958 - protein, 7 aa, synthetic construct
  REGION 1..7: note = Description of Artificial Sequence: Synthetic peptide
DQAGERS

SEQ ID NO: 5959 - protein, 7 aa, synthetic construct
  REGION 1..7: note = Description of Artificial Sequence: Synthetic peptide
ASSEKDR

SEQ ID NO: 5960 - protein, 7 aa, synthetic construct
  REGION 1..7: note = Description of Artificial Sequence: Synthetic peptide
GISASTG

SEQ ID NO: 5961 - protein, 7 aa, synthetic construct
  REGION 1..7: note = Description of Artificial Sequence: Synthetic peptide
VSQGTSV

SEQ ID NO: 5962 - protein, 7 aa, synthetic construct
  REGION 1..7: note = Description of Artificial Sequence: Synthetic peptide
SDVGNGK

SEQ ID NO: 5963 - protein, 7 aa, synthetic construct
  REGION 1..7: note = Description of Artificial Sequence: Synthetic peptide
GSPGTSS

SEQ ID NO: 5964 - protein, 7 aa, synthetic construct
  REGION 1..7: note = Description of Artificial Sequence: Synthetic peptide
ARGKTSE

SEQ ID NO: 5965 - protein, 7 aa, synthetic construct
  REGION 1..7: note = Description of Artificial Sequence: Synthetic peptide
QTVTSSQ

SEQ ID NO: 5966 - protein, 7 aa, synthetic construct
  REGION 1..7: note = Description of Artificial Sequence: Synthetic peptide
RSNSATS

SEQ ID NO: 5967 - protein, 7 aa, synthetic construct
  REGION 1..7: note = Description of Artificial Sequence: Synthetic peptide
SNNSAQG

SEQ ID NO: 5968 - protein, 7 aa, synthetic construct
  REGION 1..7: note = Description of Artificial Sequence: Synthetic peptide
NTTDKGS

SEQ ID NO: 5969 - protein, 7 aa, synthetic construct
  REGION 1..7: note = Description of Artificial Sequence: Synthetic peptide
SSDTQKN

SEQ ID NO: 5970 - protein, 7 aa, synthetic construct
  REGION 1..7: note = Description of Artificial Sequence: Synthetic peptide
LSSSGGG

SEQ ID NO: 5971 - protein, 7 aa, synthetic construct
  REGION 1..7: note = Description of Artificial Sequence: Synthetic peptide
LANSNTS

SEQ ID NO: 5972 - protein, 7 aa, synthetic construct
  REGION 1..7: note = Description of Artificial Sequence: Synthetic peptide
GSHSQSG

SEQ ID NO: 5973 - protein, 7 aa, synthetic construct
  REGION 1..7: note = Description of Artificial Sequence: Synthetic peptide
SAPDRGG

SEQ ID NO: 5974 - protein, 7 aa, synthetic construct
  REGION 1..7: note = Description of Artificial Sequence: Synthetic peptide
DTSKSAL

SEQ ID NO: 5975 - protein, 7 aa, synthetic construct
  REGION 1..7: note = Description of Artificial Sequence: Synthetic peptide
GENGKSV

SEQ ID NO: 5976 - protein, 7 aa, synthetic construct
  REGION 1..7: note = Description of Artificial Sequence: Synthetic peptide
LGETKAG

SEQ ID NO: 5977 - protein, 7 aa, synthetic construct
  REGION 1..7: note = Description of Artificial Sequence: Synthetic peptide
LGDNTQK

SEQ ID NO: 5978 - protein, 7 aa, synthetic construct
  REGION 1..7: note = Description of Artificial Sequence: Synthetic peptide
QSTGTLS

SEQ ID NO: 5979 - protein, 7 aa, synthetic construct
  REGION 1..7: note = Description of Artificial Sequence: Synthetic peptide
DSASKHG

SEQ ID NO: 5980 - protein, 7 aa, synthetic construct
  REGION 1..7: note = Description of Artificial Sequence: Synthetic peptide
SGVEARS

SEQ ID NO: 5981 - protein, 7 aa, synthetic construct
  REGION 1..7: note = Description of Artificial Sequence: Synthetic peptide
NNSDTNK

SEQ ID NO: 5982 - protein, 7 aa, synthetic construct
  REGION 1..7: note = Description of Artificial Sequence: Synthetic peptide
HVSGTPA

SEQ ID NO: 5983 - protein, 7 aa, synthetic construct
  REGION 1..7: note = Description of Artificial Sequence: Synthetic peptide
SNGGTKT

SEQ ID NO: 5984 - protein, 7 aa, synthetic construct
  REGION 1..7: note = Description of Artificial Sequence: Synthetic peptide
NGGKTNV

SEQ ID NO: 5985 - protein, 7 aa, synthetic construct
  REGION 1..7: note = Description of Artificial Sequence: Synthetic peptide
NGSTSLK

SEQ ID NO: 5986 - protein, 7 aa, synthetic construct
  REGION 1..7: note = Description of Artificial Sequence: Synthetic peptide
NSNEKSG

SEQ ID NO: 5987 - protein, 7 aa, synthetic construct
  REGION 1..7: note = Description of Artificial Sequence: Synthetic peptide
RTSGPNT

SEQ ID NO: 5988 - protein, 7 aa, synthetic construct
  REGION 1..7: note = Description of Artificial Sequence: Synthetic peptide
ESPSHNK

SEQ ID NO: 5989 - protein, 7 aa, synthetic construct
  REGION 1..7: note = Description of Artificial Sequence: Synthetic peptide
AGGELQK

SEQ ID NO: 5990 - protein, 7 aa, synthetic construct
  REGION 1..7: note = Description of Artificial Sequence: Synthetic peptide
LTSGKGS

SEQ ID NO: 5991 - protein, 7 aa, synthetic construct
  REGION 1..7: note = Description of Artificial Sequence: Synthetic peptide
KATSTSS

SEQ ID NO: 5992 - protein, 7 aa, synthetic construct
  REGION 1..7: note = Description of Artificial Sequence: Synthetic peptide
DGSNGKM

SEQ ID NO: 5993 - protein, 7 aa, synthetic construct
  REGION 1..7: note = Description of Artificial Sequence: Synthetic peptide
SVDKTAG

SEQ ID NO: 5994 - protein, 7 aa, synthetic construct
  REGION 1..7: note = Description of Artificial Sequence: Synthetic peptide
QGITNSN

SEQ ID NO: 5995 - protein, 7 aa, synthetic construct
  REGION 1..7: note = Description of Artificial Sequence: Synthetic peptide
HQSGSPT

SEQ ID NO: 5996 - protein, 7 aa, synthetic construct
  REGION 1..7: note = Description of Artificial Sequence: Synthetic peptide
ETVKSSQ

SEQ ID NO: 5997 - protein, 7 aa, synthetic construct
  REGION 1..7: note = Description of Artificial Sequence: Synthetic peptide
ESGDRGK

SEQ ID NO: 5998 - protein, 7 aa, synthetic construct
  REGION 1..7: note = Description of Artificial Sequence: Synthetic peptide
TSKPSSE

SEQ ID NO: 5999 - protein, 7 aa, synthetic construct
  REGION 1..7: note = Description of Artificial Sequence: Synthetic peptide
GATSPTQ

SEQ ID NO: 6000 - protein, 7 aa, synthetic construct
  REGION 1..7: note = Description of Artificial Sequence: Synthetic peptide
QANDRSA

SEQ ID NO: 6001 - protein, 7 aa, synthetic construct
  REGION 1..7: note = Description of Artificial Sequence: Synthetic peptide
NNNAHAS

SEQ ID NO: 6002 - protein, 7 aa, synthetic construct
  REGION 1..7: note = Description of Artificial Sequence: Synthetic peptide
QAQSASK

SEQ ID NO: 6003 - protein, 7 aa, synthetic construct
  REGION 1..7: note = Description of Artificial Sequence: Synthetic peptide
SSYEPNK

SEQ ID NO: 6004 - protein, 7 aa, synthetic construct
  REGION 1..7: note = Description of Artificial Sequence: Synthetic peptide
SKTGGTS

SEQ ID NO: 6005 - protein, 7 aa, synthetic construct
  REGION 1..7: note = Description of Artificial Sequence: Synthetic peptide
SSSDKHG

SEQ ID NO: 6006 - protein, 7 aa, synthetic construct
  REGION 1..7: note = Description of Artificial Sequence: Synthetic peptide
SMPGEKR

SEQ ID NO: 6007 - protein, 7 aa, synthetic construct
  REGION 1..7: note = Description of Artificial Sequence: Synthetic peptide
IEGSGHS

SEQ ID NO: 6008 - protein, 7 aa, synthetic construct
  REGION 1..7: note = Description of Artificial Sequence: Synthetic peptide
GSTAAPG

SEQ ID NO: 6009 - protein, 7 aa, synthetic construct
  REGION 1..7: note = Description of Artificial Sequence: Synthetic peptide
GTTATVG

SEQ ID NO: 6010 - protein, 7 aa, synthetic construct
  REGION 1..7: note = Description of Artificial Sequence: Synthetic peptide
GQTTGTH

SEQ ID NO: 6011 - protein, 7 aa, synthetic construct
  REGION 1..7: note = Description of Artificial Sequence: Synthetic peptide
TNSSPTL

SEQ ID NO: 6012 - protein, 7 aa, synthetic construct
  REGION 1..7: note = Description of Artificial Sequence: Synthetic peptide
STSRQEG

SEQ ID NO: 6013 - protein, 7 aa, synthetic construct
  REGION 1..7: note = Description of Artificial Sequence: Synthetic peptide
TTVGPNH

SEQ ID NO: 6014 - protein, 7 aa, synthetic construct
  REGION 1..7: note = Description of Artificial Sequence: Synthetic peptide
ENSSAIK

SEQ ID NO: 6015 - protein, 7 aa, synthetic construct
  REGION 1..7: note = Description of Artificial Sequence: Synthetic peptide
VATTSSS

SEQ ID NO: 6016 - protein, 7 aa, synthetic construct
  REGION 1..7: note = Description of Artificial Sequence: Synthetic peptide
RDHTPTT

SEQ ID NO: 6017 - protein, 7 aa, synthetic construct
  REGION 1..7: note = Description of Artificial Sequence: Synthetic peptide
ISSRGSE

SEQ ID NO: 6018 - protein, 7 aa, synthetic construct
  REGION 1..7: note = Description of Artificial Sequence: Synthetic peptide
GGGTPVT

SEQ ID NO: 6019 - protein, 7 aa, synthetic construct
  REGION 1..7: note = Description of Artificial Sequence: Synthetic peptide
TSTTQPH

SEQ ID NO: 6020 - protein, 7 aa, synthetic construct
  REGION 1..7: note = Description of Artificial Sequence: Synthetic peptide
ARTQSSS

SEQ ID NO: 6021 - protein, 7 aa, synthetic construct
  REGION 1..7: note = Description of Artificial Sequence: Synthetic peptide
GKVNTTT

SEQ ID NO: 6022 - protein, 7 aa, synthetic construct
  REGION 1..7: note = Description of Artificial Sequence: Synthetic peptide
TGGEKKS

SEQ ID NO: 6023 - protein, 7 aa, synthetic construct
  REGION 1..7: note = Description of Artificial Sequence: Synthetic peptide
GSGSSSV

SEQ ID NO: 6024 - protein, 7 aa, synthetic construct
  REGION 1..7: note = Description of Artificial Sequence: Synthetic peptide
QVTGNPP

SEQ ID NO: 6025 - protein, 7 aa, synthetic construct
  REGION 1..7: note = Description of Artificial Sequence: Synthetic peptide
VTGGASQ

SEQ ID NO: 6026 - protein, 7 aa, synthetic construct
  REGION 1..7: note = Description of Artificial Sequence: Synthetic peptide
NASPSAG

SEQ ID NO: 6027 - protein, 7 aa, synthetic construct
  REGION 1..7: note = Description of Artificial Sequence: Synthetic peptide
GHGDGPR

SEQ ID NO: 6028 - protein, 7 aa, synthetic construct
  REGION 1..7: note = Description of Artificial Sequence: Synthetic peptide
STTGDTK

SEQ ID NO: 6029 - protein, 7 aa, synthetic construct
  REGION 1..7: note = Description of Artificial Sequence: Synthetic peptide
TGTKSDN

SEQ ID NO: 6030 - protein, 7 aa, synthetic construct
  REGION 1..7: note = Description of Artificial Sequence: Synthetic peptide
SGINAPT

SEQ ID NO: 6031 - protein, 7 aa, synthetic construct
  REGION 1..7: note = Description of Artificial Sequence: Synthetic peptide
GLGSSST

SEQ ID NO: 6032 - protein, 7 aa, synthetic construct
  REGION 1..7: note = Description of Artificial Sequence: Synthetic peptide
SAGNTPL

SEQ ID NO: 6033 - protein, 7 aa, synthetic construct
  REGION 1..7: note = Description of Artificial Sequence: Synthetic peptide
TKDHTPS

SEQ ID NO: 6034 - protein, 7 aa, synthetic construct
  REGION 1..7: note = Description of Artificial Sequence: Synthetic peptide
RGSDTAN

SEQ ID NO: 6035 - protein, 7 aa, synthetic construct
  REGION 1..7: note = Description of Artificial Sequence: Synthetic peptide
DSTAKDS

SEQ ID NO: 6036 - protein, 7 aa, synthetic construct
  REGION 1..7: note = Description of Artificial Sequence: Synthetic peptide
GKSNATF

SEQ ID NO: 6037 - protein, 7 aa, synthetic construct
  REGION 1..7: note = Description of Artificial Sequence: Synthetic peptide
SVGRDPS

SEQ ID NO: 6038 - protein, 7 aa, synthetic construct
  REGION 1..7: note = Description of Artificial Sequence: Synthetic peptide
LTGHQGG

SEQ ID NO: 6039 - protein, 7 aa, synthetic construct
  REGION 1..7: note = Description of Artificial Sequence: Synthetic peptide
QRGNQNV

SEQ ID NO: 6040 - protein, 7 aa, synthetic construct
  REGION 1..7: note = Description of Artificial Sequence: Synthetic peptide
STNSGGS

SEQ ID NO: 6041 - protein, 7 aa, synthetic construct
  REGION 1..7: note = Description of Artificial Sequence: Synthetic peptide
HGGGSVT

SEQ ID NO: 6042 - protein, 7 aa, synthetic construct
  REGION 1..7: note = Description of Artificial Sequence: Synthetic peptide
MSGQTSV

SEQ ID NO: 6043 - protein, 7 aa, synthetic construct
  REGION 1..7: note = Description of Artificial Sequence: Synthetic peptide
DNVSPKS

SEQ ID NO: 6044 - protein, 7 aa, synthetic construct
  REGION 1..7: note = Description of Artificial Sequence: Synthetic peptide
SGNAGPS

SEQ ID NO: 6045 - protein, 7 aa, synthetic construct
  REGION 1..7: note = Description of Artificial Sequence: Synthetic peptide
ERGSGTN

SEQ ID NO: 6046 - protein, 7 aa, synthetic construct
  REGION 1..7: note = Description of Artificial Sequence: Synthetic peptide
GNDHQKT

SEQ ID NO: 6047 - protein, 7 aa, synthetic construct
  REGION 1..7: note = Description of Artificial Sequence: Synthetic peptide
KPLDKHE

SEQ ID NO: 6048 - protein, 7 aa, synthetic construct
  REGION 1..7: note = Description of Artificial Sequence: Synthetic peptide
HQTSSST

SEQ ID NO: 6049 - protein, 7 aa, synthetic construct
  REGION 1..7: note = Description of Artificial Sequence: Synthetic peptide
SQPTGQT

SEQ ID NO: 6050 - protein, 7 aa, synthetic construct
  REGION 1..7: note = Description of Artificial Sequence: Synthetic peptide
NAASDLK

SEQ ID NO: 6051 - protein, 7 aa, synthetic construct
  REGION 1..7: note = Description of Artificial Sequence: Synthetic peptide
LVGTTPA

SEQ ID NO: 6052 - protein, 7 aa, synthetic construct
  REGION 1..7: note = Description of Artificial Sequence: Synthetic peptide
VATGSTT

SEQ ID NO: 6053 - protein, 7 aa, synthetic construct
  REGION 1..7: note = Description of Artificial Sequence: Synthetic peptide
DVAKGKD

SEQ ID NO: 6054 - protein, 7 aa, synthetic construct
  REGION 1..7: note = Description of Artificial Sequence: Synthetic peptide
AEVQKSG

SEQ ID NO: 6055 - protein, 7 aa, synthetic construct
  REGION 1..7: note = Description of Artificial Sequence: Synthetic peptide
GLGVHAA

SEQ ID NO: 6056 - protein, 7 aa, synthetic construct
  REGION 1..7: note = Description of Artificial Sequence: Synthetic peptide
GPQTSSG

SEQ ID NO: 6057 - protein, 7 aa, synthetic construct
  REGION 1..7: note = Description of Artificial Sequence: Synthetic peptide
KNASGAT

SEQ ID NO: 6058 - protein, 7 aa, synthetic construct
  REGION 1..7: note = Description of Artificial Sequence: Synthetic peptide
TGNGAGQ

SEQ ID NO: 6059 - protein, 7 aa, synthetic construct
  REGION 1..7: note = Description of Artificial Sequence: Synthetic peptide
MNSGQSS

SEQ ID NO: 6060 - protein, 7 aa, synthetic construct
  REGION 1..7: note = Description of Artificial Sequence: Synthetic peptide
ISTDKAN

SEQ ID NO: 6061 - protein, 7 aa, synthetic construct
  REGION 1..7: note = Description of Artificial Sequence: Synthetic peptide
EPSNNRV

SEQ ID NO: 6062 - protein, 7 aa, synthetic construct
  REGION 1..7: note = Description of Artificial Sequence: Synthetic peptide
GQGTGPI

SEQ ID NO: 6063 - protein, 7 aa, synthetic construct
  REGION 1..7: note = Description of Artificial Sequence: Synthetic peptide
DSRPSSN

SEQ ID NO: 6064 - protein, 7 aa, synthetic construct
  REGION 1..7: note = Description of Artificial Sequence: Synthetic peptide
EQRTKDS

SEQ ID NO: 6065 - protein, 7 aa, synthetic construct
  REGION 1..7: note = Description of Artificial Sequence: Synthetic peptide
ELSSKAS

SEQ ID NO: 6066 - protein, 7 aa, synthetic construct
  REGION 1..7: note = Description of Artificial Sequence: Synthetic peptide
SADRNNA

SEQ ID NO: 6067 - protein, 7 aa, synthetic construct
  REGION 1..7: note = Description of Artificial Sequence: Synthetic peptide
QKPGNLG

SEQ ID NO: 6068 - protein, 7 aa, synthetic construct
  REGION 1..7: note = Description of Artificial Sequence: Synthetic peptide
HTTDKIQ

SEQ ID NO: 6069 - protein, 7 aa, synthetic construct
  REGION 1..7: note = Description of Artificial Sequence: Synthetic peptide
NSNSRNE

SEQ ID NO: 6070 - protein, 7 aa, synthetic construct
  REGION 1..7: note = Description of Artificial Sequence: Synthetic peptide
DSLAVTK

SEQ ID NO: 6071 - protein, 7 aa, synthetic construct
  REGION 1..7: note = Description of Artificial Sequence: Synthetic peptide
DGQNTAS

SEQ ID NO: 6072 - protein, 7 aa, synthetic construct
  REGION 1..7: note = Description of Artificial Sequence: Synthetic peptide
VQNTHSS

SEQ ID NO: 6073 - protein, 7 aa, synthetic construct
  REGION 1..7: note = Description of Artificial Sequence: Synthetic peptide
STVGSPS

SEQ ID NO: 6074 - protein, 7 aa, synthetic construct
  REGION 1..7: note = Description of Artificial Sequence: Synthetic peptide
NNTTSSA

SEQ ID NO: 6075 - protein, 7 aa, synthetic construct
  REGION 1..7: note = Description of Artificial Sequence: Synthetic peptide
TGSTPAL

SEQ ID NO: 6076 - protein, 7 aa, synthetic construct
  REGION 1..7: note = Description of Artificial Sequence: Synthetic peptide
VSSSSSG

SEQ ID NO: 6077 - protein, 7 aa, synthetic construct
  REGION 1..7: note = Description of Artificial Sequence: Synthetic peptide
HNTEKPS

SEQ ID NO: 6078 - protein, 7 aa, synthetic construct
  REGION 1..7: note = Description of Artificial Sequence: Synthetic peptide
QTGGTAG

SEQ ID NO: 6079 - protein, 7 aa, synthetic construct
  REGION 1..7: note = Description of Artificial Sequence: Synthetic peptide
STTQSQA

SEQ ID NO: 6080 - protein, 7 aa, synthetic construct
  REGION 1..7: note = Description of Artificial Sequence: Synthetic peptide
TTGSGNQ

SEQ ID NO: 6081 - protein, 7 aa, synthetic construct
  REGION 1..7: note = Description of Artificial Sequence: Synthetic peptide
HGVNSPS

SEQ ID NO: 6082 - protein, 7 aa, synthetic construct
  REGION 1..7: note = Description of Artificial Sequence: Synthetic peptide
ARSTSNS

SEQ ID NO: 6083 - protein, 7 aa, synthetic construct
  REGION 1..7: note = Description of Artificial Sequence: Synthetic peptide
ESTGSLK

SEQ ID NO: 6084 - protein, 7 aa, synthetic construct
  REGION 1..7: note = Description of Artificial Sequence: Synthetic peptide
TPDAKSV

SEQ ID NO: 6085 - protein, 7 aa, synthetic construct
  REGION 1..7: note = Description of Artificial Sequence: Synthetic peptide
GSSTSPV

SEQ ID NO: 6086 - protein, 7 aa, synthetic construct
  REGION 1..7: note = Description of Artificial Sequence: Synthetic peptide
SGQQVNV

SEQ ID NO: 6087 - protein, 7 aa, synthetic construct
  REGION 1..7: note = Description of Artificial Sequence: Synthetic peptide
DNTGKGS

SEQ ID NO: 6088 - protein, 7 aa, synthetic construct
  REGION 1..7: note = Description of Artificial Sequence: Synthetic peptide
TDDRSKS

SEQ ID NO: 6089 - protein, 7 aa, synthetic construct
  REGION 1..7: note = Description of Artificial Sequence: Synthetic peptide
GNDGRSA

SEQ ID NO: 6090 - protein, 7 aa, synthetic construct
  REGION 1..7: note = Description of Artificial Sequence: Synthetic peptide
TTQTPSL

SEQ ID NO: 6091 - protein, 7 aa, synthetic construct
  REGION 1..7: note = Description of Artificial Sequence: Synthetic peptide
RNGKEIV

SEQ ID NO: 6092 - protein, 7 aa, synthetic construct
  REGION 1..7: note = Description of Artificial Sequence: Synthetic peptide
GDSRQSV

SEQ ID NO: 6093 - protein, 7 aa, synthetic construct
  REGION 1..7: note = Description of Artificial Sequence: Synthetic peptide
QTQKGNG

SEQ ID NO: 6094 - protein, 7 aa, synthetic construct
  REGION 1..7: note = Description of Artificial Sequence: Synthetic peptide
GNISGSK

SEQ ID NO: 6095 - protein, 7 aa, synthetic construct
  REGION 1..7: note = Description of Artificial Sequence: Synthetic peptide
SKATSNG

SEQ ID NO: 6096 - protein, 7 aa, synthetic construct
  REGION 1..7: note = Description of Artificial Sequence: Synthetic peptide
HKGQHTE

SEQ ID NO: 6097 - protein, 7 aa, synthetic construct
  REGION 1..7: note = Description of Artificial Sequence: Synthetic peptide
HNSEIAK

SEQ ID NO: 6098 - protein, 7 aa, synthetic construct
  REGION 1..7: note = Description of Artificial Sequence: Synthetic peptide
QNPPPAK

SEQ ID NO: 6099 - protein, 7 aa, synthetic construct
  REGION 1..7: note = Description of Artificial Sequence: Synthetic peptide
RSGEDTK

SEQ ID NO: 6100 - protein, 7 aa, synthetic construct
  REGION 1..7: note = Description of Artificial Sequence: Synthetic peptide
AQGSSAT

SEQ ID NO: 6101 - protein, 7 aa, synthetic construct
  REGION 1..7: note = Description of Artificial Sequence: Synthetic peptide
GTMTDRS

SEQ ID NO: 6102 - protein, 7 aa, synthetic construct
  REGION 1..7: note = Description of Artificial Sequence: Synthetic peptide
GLAANSL

SEQ ID NO: 6103 - protein, 7 aa, synthetic construct
  REGION 1..7: note = Description of Artificial Sequence: Synthetic peptide
STTKGGS

SEQ ID NO: 6104 - protein, 7 aa, synthetic construct
  REGION 1..7: note = Description of Artificial Sequence: Synthetic peptide
LSSNAGK

SEQ ID NO: 6105 - protein, 7 aa, synthetic construct
  REGION 1..7: note = Description of Artificial Sequence: Synthetic peptide
DTGSRTS

SEQ ID NO: 6106 - protein, 7 aa, synthetic construct
  REGION 1..7: note = Description of Artificial Sequence: Synthetic peptide
GKSTNNM

SEQ ID NO: 6107 - protein, 7 aa, synthetic construct
  REGION 1..7: note = Description of Artificial Sequence: Synthetic peptide
RQDAAGS

SEQ ID NO: 6108 - protein, 7 aa, synthetic construct
  REGION 1..7: note = Description of Artificial Sequence: Synthetic peptide
SGQPVPS

SEQ ID NO: 6109 - protein, 7 aa, synthetic construct
  REGION 1..7: note = Description of Artificial Sequence: Synthetic peptide
IPEAKLG

SEQ ID NO: 6110 - protein, 7 aa, synthetic construct
  REGION 1..7: note = Description of Artificial Sequence: Synthetic peptide
STGGNLK

SEQ ID NO: 6111 - protein, 7 aa, synthetic construct
  REGION 1..7: note = Description of Artificial Sequence: Synthetic peptide
TSMDKTS

SEQ ID NO: 6112 - protein, 7 aa, synthetic construct
  REGION 1..7: note = Description of Artificial Sequence: Synthetic peptide
ITGTTSQ

SEQ ID NO: 6113 - protein, 7 aa, synthetic construct
  REGION 1..7: note = Description of Artificial Sequence: Synthetic peptide
AVGPSSQ

SEQ ID NO: 6114 - protein, 7 aa, synthetic construct
  REGION 1..7: note = Description of Artificial Sequence: Synthetic peptide
GNMPPNK

SEQ ID NO: 6115 - protein, 7 aa, synthetic construct
  REGION 1..7: note = Description of Artificial Sequence: Synthetic peptide
NASGTDR

SEQ ID NO: 6116 - protein, 7 aa, synthetic construct
  REGION 1..7: note = Description of Artificial Sequence: Synthetic peptide
DTTATPR

SEQ ID NO: 6117 - protein, 7 aa, synthetic construct
  REGION 1..7: note = Description of Artificial Sequence: Synthetic peptide
GLDMKST

SEQ ID NO: 6118 - protein, 7 aa, synthetic construct
  REGION 1..7: note = Description of Artificial Sequence: Synthetic peptide
VATAATK

SEQ ID NO: 6119 - protein, 7 aa, synthetic construct
  REGION 1..7: note = Description of Artificial Sequence: Synthetic peptide
GSIPSPK

SEQ ID NO: 6120 - protein, 7 aa, synthetic construct
  REGION 1..7: note = Description of Artificial Sequence: Synthetic peptide
NKVSADG

SEQ ID NO: 6121 - protein, 7 aa, synthetic construct
  REGION 1..7: note = Description of Artificial Sequence: Synthetic peptide
STSNVNR

SEQ ID NO: 6122 - protein, 7 aa, synthetic construct
  REGION 1..7: note = Description of Artificial Sequence: Synthetic peptide
SSTQSSN

SEQ ID NO: 6123 - protein, 7 aa, synthetic construct
  REGION 1..7: note = Description of Artificial Sequence: Synthetic peptide
STKSASS

SEQ ID NO: 6124 - protein, 7 aa, synthetic construct
  REGION 1..7: note = Description of Artificial Sequence: Synthetic peptide
ASTNHAT

SEQ ID NO: 6125 - protein, 7 aa, synthetic construct
  REGION 1..7: note = Description of Artificial Sequence: Synthetic peptide
ESANRNS

SEQ ID NO: 6126 - protein, 7 aa, synthetic construct
  REGION 1..7: note = Description of Artificial Sequence: Synthetic peptide
TIGKSSS

SEQ ID NO: 6127 - protein, 7 aa, synthetic construct
  REGION 1..7: note = Description of Artificial Sequence: Synthetic peptide
TPVEHKG

SEQ ID NO: 6128 - protein, 7 aa, synthetic construct
  REGION 1..7: note = Description of Artificial Sequence: Synthetic peptide
QDSSSVK

SEQ ID NO: 6129 - protein, 7 aa, synthetic construct
  REGION 1..7: note = Description of Artificial Sequence: Synthetic peptide
ESGSSRE

SEQ ID NO: 6130 - protein, 7 aa, synthetic construct
  REGION 1..7: note = Description of Artificial Sequence: Synthetic peptide
GTSKAVG

SEQ ID NO: 6131 - protein, 7 aa, synthetic construct
  REGION 1..7: note = Description of Artificial Sequence: Synthetic peptide
GQSNKVG

SEQ ID NO: 6132 - protein, 7 aa, synthetic construct
  REGION 1..7: note = Description of Artificial Sequence: Synthetic peptide
SAPTGNV

SEQ ID NO: 6133 - protein, 7 aa, synthetic construct
  REGION 1..7: note = Description of Artificial Sequence: Synthetic peptide
GHNSPSV

SEQ ID NO: 6134 - protein, 7 aa, synthetic construct
  REGION 1..7: note = Description of Artificial Sequence: Synthetic peptide
VGSPAST

SEQ ID NO: 6135 - protein, 7 aa, synthetic construct
  REGION 1..7: note = Description of Artificial Sequence: Synthetic peptide
QSKAAMV

SEQ ID NO: 6136 - protein, 7 aa, synthetic construct
  REGION 1..7: note = Description of Artificial Sequence: Synthetic peptide
AGSTAPR

SEQ ID NO: 6137 - protein, 7 aa, synthetic construct
  REGION 1..7: note = Description of Artificial Sequence: Synthetic peptide
NATKDQV

SEQ ID NO: 6138 - protein, 7 aa, synthetic construct
  REGION 1..7: note = Description of Artificial Sequence: Synthetic peptide
DAERTKS

SEQ ID NO: 6139 - protein, 7 aa, synthetic construct
  REGION 1..7: note = Description of Artificial Sequence: Synthetic peptide
HPSPTTA

SEQ ID NO: 6140 - protein, 7 aa, synthetic construct
  REGION 1..7: note = Description of Artificial Sequence: Synthetic peptide
GKQTVSQ

SEQ ID NO: 6141 - protein, 7 aa, synthetic construct
  REGION 1..7: note = Description of Artificial Sequence: Synthetic peptide
GGKDSVN

SEQ ID NO: 6142 - protein, 7 aa, synthetic construct
  REGION 1..7: note = Description of Artificial Sequence: Synthetic peptide
GKESHPV

SEQ ID NO: 6143 - protein, 7 aa, synthetic construct
  REGION 1..7: note = Description of Artificial Sequence: Synthetic peptide
SLHAPTS

SEQ ID NO: 6144 - protein, 7 aa, synthetic construct
  REGION 1..7: note = Description of Artificial Sequence: Synthetic peptide
NSDKNAK

SEQ ID NO: 6145 - protein, 7 aa, synthetic construct
  REGION 1..7: note = Description of Artificial Sequence: Synthetic peptide
TTNAQSK

SEQ ID NO: 6146 - protein, 7 aa, synthetic construct
  REGION 1..7: note = Description of Artificial Sequence: Synthetic peptide
ETKNSLG

SEQ ID NO: 6147 - protein, 7 aa, synthetic construct
  REGION 1..7: note = Description of Artificial Sequence: Synthetic peptide
RGSDTTS

SEQ ID NO: 6148 - protein, 7 aa, synthetic construct
  REGION 1..7: note = Description of Artificial Sequence: Synthetic peptide
GSQKIAT

SEQ ID NO: 6149 - protein, 7 aa, synthetic construct
  REGION 1..7: note = Description of Artificial Sequence: Synthetic peptide
VQDKTNT

SEQ ID NO: 6150 - protein, 7 aa, synthetic construct
  REGION 1..7: note = Description of Artificial Sequence: Synthetic peptide
MHDKPAS

SEQ ID NO: 6151 - protein, 7 aa, synthetic construct
  REGION 1..7: note = Description of Artificial Sequence: Synthetic peptide
DNPAGIR

SEQ ID NO: 6152 - protein, 7 aa, synthetic construct
  REGION 1..7: note = Description of Artificial Sequence: Synthetic peptide
TTVSAAS

SEQ ID NO: 6153 - protein, 7 aa, synthetic construct
  REGION 1..7: note = Description of Artificial Sequence: Synthetic peptide
RSNGQLS

SEQ ID NO: 6154 - protein, 7 aa, synthetic construct
  REGION 1..7: note = Description of Artificial Sequence: Synthetic peptide
HGTQEPR

SEQ ID NO: 6155 - protein, 7 aa, synthetic construct
  REGION 1..7: note = Description of Artificial Sequence: Synthetic peptide
DTSKETR

SEQ ID NO: 6156 - protein, 7 aa, synthetic construct
  REGION 1..7: note = Description of Artificial Sequence: Synthetic peptide
ADGAGRA

SEQ ID NO: 6157 - protein, 7 aa, synthetic construct
  REGION 1..7: note = Description of Artificial Sequence: Synthetic peptide
DGNNSHR

SEQ ID NO: 6158 - protein, 7 aa, synthetic construct
  REGION 1..7: note = Description of Artificial Sequence: Synthetic peptide
MAQSTNT

SEQ ID NO: 6159 - protein, 7 aa, synthetic construct
  REGION 1..7: note = Description of Artificial Sequence: Synthetic peptide
DSQASPH

SEQ ID NO: 6160 - protein, 7 aa, synthetic construct
  REGION 1..7: note = Description of Artificial Sequence: Synthetic peptide
TGGSKIS

SEQ ID NO: 6161 - protein, 7 aa, synthetic construct
  REGION 1..7: note = Description of Artificial Sequence: Synthetic peptide
NGLDKIR

SEQ ID NO: 6162 - protein, 7 aa, synthetic construct
  REGION 1..7: note = Description of Artificial Sequence: Synthetic peptide
SESTGTR

SEQ ID NO: 6163 - protein, 7 aa, synthetic construct
  REGION 1..7: note = Description of Artificial Sequence: Synthetic peptide
SKGSPSS

SEQ ID NO: 6164 - protein, 7 aa, synthetic construct
  REGION 1..7: note = Description of Artificial Sequence: Synthetic peptide
GLSGASG

SEQ ID NO: 6165 - protein, 7 aa, synthetic construct
  REGION 1..7: note = Description of Artificial Sequence: Synthetic peptide
SMGKDSH

SEQ ID NO: 6166 - protein, 7 aa, synthetic construct
  REGION 1..7: note = Description of Artificial Sequence: Synthetic peptide
QGSPSAH

SEQ ID NO: 6167 - protein, 7 aa, synthetic construct
  REGION 1..7: note = Description of Artificial Sequence: Synthetic peptide
SPSKSAE

SEQ ID NO: 6168 - protein, 7 aa, synthetic construct
  REGION 1..7: note = Description of Artificial Sequence: Synthetic peptide
SKGDGAS

SEQ ID NO: 6169 - protein, 7 aa, synthetic construct
  REGION 1..7: note = Description of Artificial Sequence: Synthetic peptide
MGNSSQG

SEQ ID NO: 6170 - protein, 7 aa, synthetic construct
  REGION 1..7: note = Description of Artificial Sequence: Synthetic peptide
GESNSAH

SEQ ID NO: 6171 - protein, 7 aa, synthetic construct
  REGION 1..7: note = Description of Artificial Sequence: Synthetic peptide
VTGTTVG

SEQ ID NO: 6172 - protein, 7 aa, synthetic construct
  REGION 1..7: note = Description of Artificial Sequence: Synthetic peptide
KMTASQG

SEQ ID NO: 6173 - protein, 7 aa, synthetic construct
  REGION 1..7: note = Description of Artificial Sequence: Synthetic peptide
MPSSPAS

SEQ ID NO: 6174 - protein, 7 aa, synthetic construct
  REGION 1..7: note = Description of Artificial Sequence: Synthetic peptide
ETSDPRT

SEQ ID NO: 6175 - protein, 7 aa, synthetic construct
  REGION 1..7: note = Description of Artificial Sequence: Synthetic peptide
NSTNSGA

SEQ ID NO: 6176 - protein, 7 aa, synthetic construct
  REGION 1..7: note = Description of Artificial Sequence: Synthetic peptide
SPKGNGN

SEQ ID NO: 6177 - protein, 7 aa, synthetic construct
  REGION 1..7: note = Description of Artificial Sequence: Synthetic peptide
SGASPSA

SEQ ID NO: 6178 - protein, 7 aa, synthetic construct
  REGION 1..7: note = Description of Artificial Sequence: Synthetic peptide
GTDKSKP

SEQ ID NO: 6179 - protein, 7 aa, synthetic construct
  REGION 1..7: note = Description of Artificial Sequence: Synthetic peptide
VNGGAAA

SEQ ID NO: 6180 - protein, 7 aa, synthetic construct
  REGION 1..7: note = Description of Artificial Sequence: Synthetic peptide
ARDVGSG

SEQ ID NO: 6181 - protein, 7 aa, synthetic construct
  REGION 1..7: note = Description of Artificial Sequence: Synthetic peptide
QMGATGT

SEQ ID NO: 6182 - protein, 7 aa, synthetic construct
  REGION 1..7: note = Description of Artificial Sequence: Synthetic peptide
AGQGKTL

SEQ ID NO: 6183 - protein, 7 aa, synthetic construct
  REGION 1..7: note = Description of Artificial Sequence: Synthetic peptide
TPSNTTL

SEQ ID NO: 6184 - protein, 7 aa, synthetic construct
  REGION 1..7: note = Description of Artificial Sequence: Synthetic peptide
GSEAPSR

SEQ ID NO: 6185 - protein, 7 aa, synthetic construct
  REGION 1..7: note = Description of Artificial Sequence: Synthetic peptide
RSGDSIS

SEQ ID NO: 6186 - protein, 7 aa, synthetic construct
  REGION 1..7: note = Description of Artificial Sequence: Synthetic peptide
LGTNSSH

SEQ ID NO: 6187 - protein, 7 aa, synthetic construct
  REGION 1..7: note = Description of Artificial Sequence: Synthetic peptide
ESKTGSG

SEQ ID NO: 6188 - protein, 7 aa, synthetic construct
  REGION 1..7: note = Description of Artificial Sequence: Synthetic peptide
ESAKQNF

SEQ ID NO: 6189 - protein, 7 aa, synthetic construct
  REGION 1..7: note = Description of Artificial Sequence: Synthetic peptide
GPESPRS

SEQ ID NO: 6190 - protein, 7 aa, synthetic construct
  REGION 1..7: note = Description of Artificial Sequence: Synthetic peptide
VNGQSTA

SEQ ID NO: 6191 - protein, 7 aa, synthetic construct
  REGION 1..7: note = Description of Artificial Sequence: Synthetic peptide
LPSSDQR

SEQ ID NO: 6192 - protein, 7 aa, synthetic construct
  REGION 1..7: note = Description of Artificial Sequence: Synthetic peptide
STGSATS

SEQ ID NO: 6193 - protein, 7 aa, synthetic construct
  REGION 1..7: note = Description of Artificial Sequence: Synthetic peptide
NRNTTAS

SEQ ID NO: 6194 - protein, 7 aa, synthetic construct
  REGION 1..7: note = Description of Artificial Sequence: Synthetic peptide
GSSSDHR

SEQ ID NO: 6195 - protein, 7 aa, synthetic construct
  REGION 1..7: note = Description of Artificial Sequence: Synthetic peptide
EQGASSR

SEQ ID NO: 6196 - protein, 7 aa, synthetic construct
  REGION 1..7: note = Description of Artificial Sequence: Synthetic peptide
KSTGSQG

SEQ ID NO: 6197 - protein, 7 aa, synthetic construct
  REGION 1..7: note = Description of Artificial Sequence: Synthetic peptide
SGSERSL

SEQ ID NO: 6198 - protein, 7 aa, synthetic construct
  REGION 1..7: note = Description of Artificial Sequence: Synthetic peptide
GGASTTH

SEQ ID NO: 6199 - protein, 7 aa, synthetic construct
  REGION 1..7: note = Description of Artificial Sequence: Synthetic peptide
KGSPASS

SEQ ID NO: 6200 - protein, 7 aa, synthetic construct
  REGION 1..7: note = Description of Artificial Sequence: Synthetic peptide
EVSGQRQ

SEQ ID NO: 6201 - protein, 7 aa, synthetic construct
  REGION 1..7: note = Description of Artificial Sequence: Synthetic peptide
AHVGDKS

SEQ ID NO: 6202 - protein, 7 aa, synthetic construct
  REGION 1..7: note = Description of Artificial Sequence: Synthetic peptide
TPSDKGA

SEQ ID NO: 6203 - protein, 7 aa, synthetic construct
  REGION 1..7: note = Description of Artificial Sequence: Synthetic peptide
TQSSNPS

SEQ ID NO: 6204 - protein, 7 aa, synthetic construct
  REGION 1..7: note = Description of Artificial Sequence: Synthetic peptide
GSTERHS

SEQ ID NO: 6205 - protein, 7 aa, synthetic construct
  REGION 1..7: note = Description of Artificial Sequence: Synthetic peptide
GTAAPAH

SEQ ID NO: 6206 - protein, 7 aa, synthetic construct
  REGION 1..7: note = Description of Artificial Sequence: Synthetic peptide
TMAGTNQ

SEQ ID NO: 6207 - protein, 7 aa, synthetic construct
  REGION 1..7: note = Description of Artificial Sequence: Synthetic peptide
STQNPKD

SEQ ID NO: 6208 - protein, 7 aa, synthetic construct
  REGION 1..7: note = Description of Artificial Sequence: Synthetic peptide
EGQTTSL

SEQ ID NO: 6209 - protein, 7 aa, synthetic construct
  REGION 1..7: note = Description of Artificial Sequence: Synthetic peptide
DRAKESS

SEQ ID NO: 6210 - protein, 7 aa, synthetic construct
  REGION 1..7: note = Description of Artificial Sequence: Synthetic peptide
VTTTNSK

SEQ ID NO: 6211 - protein, 7 aa, synthetic construct
  REGION 1..7: note = Description of Artificial Sequence: Synthetic peptide
SSQTNNV

SEQ ID NO: 6212 - protein, 7 aa, synthetic construct
  REGION 1..7: note = Description of Artificial Sequence: Synthetic peptide
SSTKSSP

SEQ ID NO: 6213 - protein, 7 aa, synthetic construct
  REGION 1..7: note = Description of Artificial Sequence: Synthetic peptide
SSGPQPS

SEQ ID NO: 6214 - protein, 7 aa, synthetic construct
  REGION 1..7: note = Description of Artificial Sequence: Synthetic peptide
QTDAKSL

SEQ ID NO: 6215 - protein, 7 aa, synthetic construct
  REGION 1..7: note = Description of Artificial Sequence: Synthetic peptide
VPAGSGG

SEQ ID NO: 6216 - protein, 7 aa, synthetic construct
  REGION 1..7: note = Description of Artificial Sequence: Synthetic peptide
MQAQKES

SEQ ID NO: 6217 - protein, 7 aa, synthetic construct
  REGION 1..7: note = Description of Artificial Sequence: Synthetic peptide
HVNMKEG

SEQ ID NO: 6218 - protein, 7 aa, synthetic construct
  REGION 1..7: note = Description of Artificial Sequence: Synthetic peptide
DTVSKSN

SEQ ID NO: 6219 - protein, 7 aa, synthetic construct
  REGION 1..7: note = Description of Artificial Sequence: Synthetic peptide
DSNKSPH

SEQ ID NO: 6220 - protein, 7 aa, synthetic construct
  REGION 1..7: note = Description of Artificial Sequence: Synthetic peptide
NGVPQPK

SEQ ID NO: 6221 - protein, 7 aa, synthetic construct
  REGION 1..7: note = Description of Artificial Sequence: Synthetic peptide
NSSGSGG

SEQ ID NO: 6222 - protein, 7 aa, synthetic construct
  REGION 1..7: note = Description of Artificial Sequence: Synthetic peptide
TSAQTPH

SEQ ID NO: 6223 - protein, 7 aa, synthetic construct
  REGION 1..7: note = Description of Artificial Sequence: Synthetic peptide
SSGDGYQ

SEQ ID NO: 6224 - protein, 7 aa, synthetic construct
  REGION 1..7: note = Description of Artificial Sequence: Synthetic peptide
DARGSVS

SEQ ID NO: 6225 - protein, 7 aa, synthetic construct
  REGION 1..7: note = Description of Artificial Sequence: Synthetic peptide
SAGDRNL

SEQ ID NO: 6226 - protein, 7 aa, synthetic construct
  REGION 1..7: note = Description of Artificial Sequence: Synthetic peptide
TDASQRS

SEQ ID NO: 6227 - protein, 7 aa, synthetic construct
  REGION 1..7: note = Description of Artificial Sequence: Synthetic peptide
SSGDKSL

SEQ ID NO: 6228 - protein, 7 aa, synthetic construct
  REGION 1..7: note = Description of Artificial Sequence: Synthetic peptide
SHAKSSE

SEQ ID NO: 6229 - protein, 7 aa, synthetic construct
  REGION 1..7: note = Description of Artificial Sequence: Synthetic peptide
VRSESTA

SEQ ID NO: 6230 - protein, 7 aa, synthetic construct
  REGION 1..7: note = Description of Artificial Sequence: Synthetic peptide
SAGSTPT

SEQ ID NO: 6231 - protein, 7 aa, synthetic construct
  REGION 1..7: note = Description of Artificial Sequence: Synthetic peptide
SKSTTPS

SEQ ID NO: 6232 - protein, 7 aa, synthetic construct
  REGION 1..7: note = Description of Artificial Sequence: Synthetic peptide
SSAGVGA

SEQ ID NO: 6233 - protein, 7 aa, synthetic construct
  REGION 1..7: note = Description of Artificial Sequence: Synthetic peptide
HPLKDGG

SEQ ID NO: 6234 - protein, 7 aa, synthetic construct
  REGION 1..7: note = Description of Artificial Sequence: Synthetic peptide
TDSSPSK

SEQ ID NO: 6235 - protein, 7 aa, synthetic construct
  REGION 1..7: note = Description of Artificial Sequence: Synthetic peptide
NGDVGRG

SEQ ID NO: 6236 - protein, 7 aa, synthetic construct
  REGION 1..7: note = Description of Artificial Sequence: Synthetic peptide
NGSGQKE

SEQ ID NO: 6237 - protein, 7 aa, synthetic construct
  REGION 1..7: note = Description of Artificial Sequence: Synthetic peptide
GEPSVNK

SEQ ID NO: 6238 - protein, 7 aa, synthetic construct
  REGION 1..7: note = Description of Artificial Sequence: Synthetic peptide
NTKEGSG

SEQ ID NO: 6239 - protein, 7 aa, synthetic construct
  REGION 1..7: note = Description of Artificial Sequence: Synthetic peptide
NPDASGK

SEQ ID NO: 6240 - protein, 7 aa, synthetic construct
  REGION 1..7: note = Description of Artificial Sequence: Synthetic peptide
SSMAKTQ

SEQ ID NO: 6241 - protein, 7 aa, synthetic construct
  REGION 1..7: note = Description of Artificial Sequence: Synthetic peptide
MPGTKVI

SEQ ID NO: 6242 - protein, 7 aa, synthetic construct
  REGION 1..7: note = Description of Artificial Sequence: Synthetic peptide
QASSSSV

SEQ ID NO: 6243 - protein, 7 aa, synthetic construct
  REGION 1..7: note = Description of Artificial Sequence: Synthetic peptide
EGRQGGS

SEQ ID NO: 6244 - protein, 7 aa, synthetic construct
  REGION 1..7: note = Description of Artificial Sequence: Synthetic peptide
STAGANA

SEQ ID NO: 6245 - protein, 7 aa, synthetic construct
  REGION 1..7: note = Description of Artificial Sequence: Synthetic peptide
SGNPGGA

SEQ ID NO: 6246 - protein, 7 aa, synthetic construct
  REGION 1..7: note = Description of Artificial Sequence: Synthetic peptide
TIETGKG

SEQ ID NO: 6247 - protein, 7 aa, synthetic construct
  REGION 1..7: note = Description of Artificial Sequence: Synthetic peptide
SQGDASR

SEQ ID NO: 6248 - protein, 7 aa, synthetic construct
  REGION 1..7: note = Description of Artificial Sequence: Synthetic peptide
GERGEKS

SEQ ID NO: 6249 - protein, 7 aa, synthetic construct
  REGION 1..7: note = Description of Artificial Sequence: Synthetic peptide
NGSSTAS

SEQ ID NO: 6250 - protein, 7 aa, synthetic construct
  REGION 1..7: note = Description of Artificial Sequence: Synthetic peptide
TGNSGST

SEQ ID NO: 6251 - protein, 7 aa, synthetic construct
  REGION 1..7: note = Description of Artificial Sequence: Synthetic peptide
SRGSDAS

SEQ ID NO: 6252 - protein, 7 aa, synthetic construct
  REGION 1..7: note = Description of Artificial Sequence: Synthetic peptide
HNSSGIH

SEQ ID NO: 6253 - protein, 7 aa, synthetic construct
  REGION 1..7: note = Description of Artificial Sequence: Synthetic peptide
TPDANRR

SEQ ID NO: 6254 - protein, 7 aa, synthetic construct
  REGION 1..7: note = Description of Artificial Sequence: Synthetic peptide
VNGASVS

SEQ ID NO: 6255 - protein, 7 aa, synthetic construct
  REGION 1..7: note = Description of Artificial Sequence: Synthetic peptide
LNSSKSG

SEQ ID NO: 6256 - protein, 7 aa, synthetic construct
  REGION 1..7: note = Description of Artificial Sequence: Synthetic peptide
LASGNGQ

SEQ ID NO: 6257 - protein, 7 aa, synthetic construct
  REGION 1..7: note = Description of Artificial Sequence: Synthetic peptide
ATSDKNP

SEQ ID NO: 6258 - protein, 7 aa, synthetic construct
  REGION 1..7: note = Description of Artificial Sequence: Synthetic peptide
EASRSSS

SEQ ID NO: 6259 - protein, 7 aa, synthetic construct
  REGION 1..7: note = Description of Artificial Sequence: Synthetic peptide
VGSGSPR

SEQ ID NO: 6260 - protein, 7 aa, synthetic construct
  REGION 1..7: note = Description of Artificial Sequence: Synthetic peptide
QGQGTAT

SEQ ID NO: 6261 - protein, 7 aa, synthetic construct
  REGION 1..7: note = Description of Artificial Sequence: Synthetic peptide
KANDPKA

SEQ ID NO: 6262 - protein, 7 aa, synthetic construct
  REGION 1..7: note = Description of Artificial Sequence: Synthetic peptide
DTSRKSE

SEQ ID NO: 6263 - protein, 7 aa, synthetic construct
  REGION 1..7: note = Description of Artificial Sequence: Synthetic peptide
GKVSSEK

SEQ ID NO: 6264 - protein, 7 aa, synthetic construct
  REGION 1..7: note = Description of Artificial Sequence: Synthetic peptide
TRERETV

SEQ ID NO: 6265 - protein, 7 aa, synthetic construct
  REGION 1..7: note = Description of Artificial Sequence: Synthetic peptide
SSSVPKV

SEQ ID NO: 6266 - protein, 7 aa, synthetic construct
  REGION 1..7: note = Description of Artificial Sequence: Synthetic peptide
QATGKLQ

SEQ ID NO: 6267 - protein, 7 aa, synthetic construct
  REGION 1..7: note = Description of Artificial Sequence: Synthetic peptide
ENTGSNS

SEQ ID NO: 6268 - protein, 7 aa, synthetic construct
  REGION 1..7: note = Description of Artificial Sequence: Synthetic peptide
ASSPAVA

SEQ ID NO: 6269 - protein, 7 aa, synthetic construct
  REGION 1..7: note = Description of Artificial Sequence: Synthetic peptide
ARQEATH

SEQ ID NO: 6270 - protein, 7 aa, synthetic construct
  REGION 1..7: note = Description of Artificial Sequence: Synthetic peptide
SGTVSKP

SEQ ID NO: 6271 - protein, 7 aa, synthetic construct
  REGION 1..7: note = Description of Artificial Sequence: Synthetic peptide
QISNPAH

SEQ ID NO: 6272 - protein, 7 aa, synthetic construct
  REGION 1..7: note = Description of Artificial Sequence: Synthetic peptide
DTAAVKS

SEQ ID NO: 6273 - protein, 7 aa, synthetic construct
  REGION 1..7: note = Description of Artificial Sequence: Synthetic peptide
DGSNSPN

SEQ ID NO: 6274 - protein, 7 aa, synthetic construct
  REGION 1..7: note = Description of Artificial Sequence: Synthetic peptide
GTGHNST

SEQ ID NO: 6275 - protein, 7 aa, synthetic construct
  REGION 1..7: note = Description of Artificial Sequence: Synthetic peptide
SAGNQGS

SEQ ID NO: 6276 - protein, 7 aa, synthetic construct
  REGION 1..7: note = Description of Artificial Sequence: Synthetic peptide
TKDGRNT

SEQ ID NO: 6277 - protein, 7 aa, synthetic construct
  REGION 1..7: note = Description of Artificial Sequence: Synthetic peptide
SGPTKPV

SEQ ID NO: 6278 - protein, 7 aa, synthetic construct
  REGION 1..7: note = Description of Artificial Sequence: Synthetic peptide
DKSGSIA

SEQ ID NO: 6279 - protein, 7 aa, synthetic construct
  REGION 1..7: note = Description of Artificial Sequence: Synthetic peptide
AQGQNNL

SEQ ID NO: 6280 - protein, 7 aa, synthetic construct
  REGION 1..7: note = Description of Artificial Sequence: Synthetic peptide
DSAPSLK

SEQ ID NO: 6281 - protein, 7 aa, synthetic construct
  REGION 1..7: note = Description of Artificial Sequence: Synthetic peptide
MAGAAST

SEQ ID NO: 6282 - protein, 7 aa, synthetic construct
  REGION 1..7: note = Description of Artificial Sequence: Synthetic peptide
DSSKTSA

SEQ ID NO: 6283 - protein, 7 aa, synthetic construct
  REGION 1..7: note = Description of Artificial Sequence: Synthetic peptide
TAQGSHS

SEQ ID NO: 6284 - protein, 7 aa, synthetic construct
  REGION 1..7: note = Description of Artificial Sequence: Synthetic peptide
SGVTSGG

SEQ ID NO: 6285 - protein, 7 aa, synthetic construct
  REGION 1..7: note = Description of Artificial Sequence: Synthetic peptide
TASPTPL

SEQ ID NO: 6286 - protein, 7 aa, synthetic construct
  REGION 1..7: note = Description of Artificial Sequence: Synthetic peptide
LTGKAPA

SEQ ID NO: 6287 - protein, 7 aa, synthetic construct
  REGION 1..7: note = Description of Artificial Sequence: Synthetic peptide
SDSHSAK

SEQ ID NO: 6288 - protein, 7 aa, synthetic construct
  REGION 1..7: note = Description of Artificial Sequence: Synthetic peptide
STGSNPA

SEQ ID NO: 6289 - protein, 7 aa, synthetic construct
  REGION 1..7: note = Description of Artificial Sequence: Synthetic peptide
ATHGAST

SEQ ID NO: 6290 - protein, 7 aa, synthetic construct
  REGION 1..7: note = Description of Artificial Sequence: Synthetic peptide
GSDTKPL

SEQ ID NO: 6291 - protein, 7 aa, synthetic construct
  REGION 1..7: note = Description of Artificial Sequence: Synthetic peptide
ANNKGNV

SEQ ID NO: 6292 - protein, 7 aa, synthetic construct
  REGION 1..7: note = Description of Artificial Sequence: Synthetic peptide
TGASAKT

SEQ ID NO: 6293 - protein, 7 aa, synthetic construct
  REGION 1..7: note = Description of Artificial Sequence: Synthetic peptide
LSNSKSL

SEQ ID NO: 6294 - protein, 7 aa, synthetic construct
  REGION 1..7: note = Description of Artificial Sequence: Synthetic peptide
LQASGSL

SEQ ID NO: 6295 - protein, 7 aa, synthetic construct
  REGION 1..7: note = Description of Artificial Sequence: Synthetic peptide
SSSSDKS

SEQ ID NO: 6296 - protein, 7 aa, synthetic construct
  REGION 1..7: note = Description of Artificial Sequence: Synthetic peptide
GGGDARS

SEQ ID NO: 6297 - protein, 7 aa, synthetic construct
  REGION 1..7: note = Description of Artificial Sequence: Synthetic peptide
VPSSTAK

SEQ ID NO: 6298 - protein, 7 aa, synthetic construct
  REGION 1..7: note = Description of Artificial Sequence: Synthetic peptide
TTSTGSA

SEQ ID NO: 6299 - protein, 7 aa, synthetic construct
  REGION 1..7: note = Description of Artificial Sequence: Synthetic peptide
QSSGNSV

SEQ ID NO: 6300 - protein, 7 aa, synthetic construct
  REGION 1..7: note = Description of Artificial Sequence: Synthetic peptide
DTTPKPG

SEQ ID NO: 6301 - protein, 7 aa, synthetic construct
  REGION 1..7: note = Description of Artificial Sequence: Synthetic peptide
TGESSKS

SEQ ID NO: 6302 - protein, 7 aa, synthetic construct
  REGION 1..7: note = Description of Artificial Sequence: Synthetic peptide
GSDQPVR

SEQ ID NO: 6303 - protein, 7 aa, synthetic construct
  REGION 1..7: note = Description of Artificial Sequence: Synthetic peptide
DGVKQTP

SEQ ID NO: 6304 - protein, 7 aa, synthetic construct
  REGION 1..7: note = Description of Artificial Sequence: Synthetic peptide
GSDKLKL

SEQ ID NO: 6305 - protein, 7 aa, synthetic construct
  REGION 1..7: note = Description of Artificial Sequence: Synthetic peptide
DSVSSIK

SEQ ID NO: 6306 - protein, 7 aa, synthetic construct
  REGION 1..7: note = Description of Artificial Sequence: Synthetic peptide
QTGPSPT

SEQ ID NO: 6307 - protein, 7 aa, synthetic construct
  REGION 1..7: note = Description of Artificial Sequence: Synthetic peptide
QGRDAQP

SEQ ID NO: 6308 - protein, 7 aa, synthetic construct
  REGION 1..7: note = Description of Artificial Sequence: Synthetic peptide
NSSTTSR

SEQ ID NO: 6309 - protein, 7 aa, synthetic construct
  REGION 1..7: note = Description of Artificial Sequence: Synthetic peptide
NQLVGAG

SEQ ID NO: 6310 - protein, 7 aa, synthetic construct
  REGION 1..7: note = Description of Artificial Sequence: Synthetic peptide
NEKTSSS

SEQ ID NO: 6311 - protein, 7 aa, synthetic construct
  REGION 1..7: note = Description of Artificial Sequence: Synthetic peptide
NPDSQAR

SEQ ID NO: 6312 - protein, 7 aa, synthetic construct
  REGION 1..7: note = Description of Artificial Sequence: Synthetic peptide
TTNSPNK

SEQ ID NO: 6313 - protein, 7 aa, synthetic construct
  REGION 1..7: note = Description of Artificial Sequence: Synthetic peptide
TSSQGPG

SEQ ID NO: 6314 - protein, 7 aa, synthetic construct
  REGION 1..7: note = Description of Artificial Sequence: Synthetic peptide
TADNKVR

SEQ ID NO: 6315 - protein, 7 aa, synthetic construct
  REGION 1..7: note = Description of Artificial Sequence: Synthetic peptide
TNSQGSS

SEQ ID NO: 6316 - protein, 7 aa, synthetic construct
  REGION 1..7: note = Description of Artificial Sequence: Synthetic peptide
TTDNNRI

SEQ ID NO: 6317 - protein, 7 aa, synthetic construct
  REGION 1..7: note = Description of Artificial Sequence: Synthetic peptide
TSGPSSG

SEQ ID NO: 6318 - protein, 7 aa, synthetic construct
  REGION 1..7: note = Description of Artificial Sequence: Synthetic peptide
RGGGSAA

SEQ ID NO: 6319 - protein, 7 aa, synthetic construct
  REGION 1..7: note = Description of Artificial Sequence: Synthetic peptide
SSNPSLG

SEQ ID NO: 6320 - protein, 7 aa, synthetic construct
  REGION 1..7: note = Description of Artificial Sequence: Synthetic peptide
SVGSDRI

SEQ ID NO: 6321 - protein, 7 aa, synthetic construct
  REGION 1..7: note = Description of Artificial Sequence: Synthetic peptide
MGSKKDS

SEQ ID NO: 6322 - protein, 7 aa, synthetic construct
  REGION 1..7: note = Description of Artificial Sequence: Synthetic peptide
MGGTGSS

SEQ ID NO: 6323 - protein, 7 aa, synthetic construct
  REGION 1..7: note = Description of Artificial Sequence: Synthetic peptide
QNNTGHN

SEQ ID NO: 6324 - protein, 7 aa, synthetic construct
  REGION 1..7: note = Description of Artificial Sequence: Synthetic peptide
QVASSNN

SEQ ID NO: 6325 - protein, 7 aa, synthetic construct
  REGION 1..7: note = Description of Artificial Sequence: Synthetic peptide
HGQSASS

SEQ ID NO: 6326 - protein, 7 aa, synthetic construct
  REGION 1..7: note = Description of Artificial Sequence: Synthetic peptide
HGSSKAG

SEQ ID NO: 6327 - protein, 7 aa, synthetic construct
  REGION 1..7: note = Description of Artificial Sequence: Synthetic peptide
LSAPTSA

SEQ ID NO: 6328 - protein, 7 aa, synthetic construct
  REGION 1..7: note = Description of Artificial Sequence: Synthetic peptide
LGANAAG

SEQ ID NO: 6329 - protein, 7 aa, synthetic construct
  REGION 1..7: note = Description of Artificial Sequence: Synthetic peptide
EQRSTTG

SEQ ID NO: 6330 - protein, 7 aa, synthetic construct
  REGION 1..7: note = Description of Artificial Sequence: Synthetic peptide
DNRTVNK

SEQ ID NO: 6331 - protein, 7 aa, synthetic construct
  REGION 1..7: note = Description of Artificial Sequence: Synthetic peptide
DQNIKPN

SEQ ID NO: 6332 - protein, 7 aa, synthetic construct
  REGION 1..7: note = Description of Artificial Sequence: Synthetic peptide
DSASKLS

SEQ ID NO: 6333 - protein, 7 aa, synthetic construct
  REGION 1..7: note = Description of Artificial Sequence: Synthetic peptide
ASDSKNV

SEQ ID NO: 6334 - protein, 7 aa, synthetic construct
  REGION 1..7: note = Description of Artificial Sequence: Synthetic peptide
AMNDSKL

SEQ ID NO: 6335 - protein, 7 aa, synthetic construct
  REGION 1..7: note = Description of Artificial Sequence: Synthetic peptide
ALTDQRG

SEQ ID NO: 6336 - protein, 7 aa, synthetic construct
  REGION 1..7: note = Description of Artificial Sequence: Synthetic peptide
AATLPAG

SEQ ID NO: 6337 - protein, 7 aa, synthetic construct
  REGION 1..7: note = Description of Artificial Sequence: Synthetic peptide
AASSNNK

SEQ ID NO: 6338 - protein, 7 aa, synthetic construct
  REGION 1..7: note = Description of Artificial Sequence: Synthetic peptide
AESREKG

SEQ ID NO: 6339 - protein, 7 aa, synthetic construct
  REGION 1..7: note = Description of Artificial Sequence: Synthetic peptide
GIAENHK

SEQ ID NO: 6340 - protein, 7 aa, synthetic construct
  REGION 1..7: note = Description of Artificial Sequence: Synthetic peptide
GGKSSVS

SEQ ID NO: 6341 - protein, 7 aa, synthetic construct
  REGION 1..7: note = Description of Artificial Sequence: Synthetic peptide
GVNGVSN

SEQ ID NO: 6342 - protein, 7 aa, synthetic construct
  REGION 1..7: note = Description of Artificial Sequence: Synthetic peptide
GNSTSNG

SEQ ID NO: 6343 - protein, 7 aa, synthetic construct
  REGION 1..7: note = Description of Artificial Sequence: Synthetic peptide
GSGGGIA

SEQ ID NO: 6344 - protein, 7 aa, synthetic construct
  REGION 1..7: note = Description of Artificial Sequence: Synthetic peptide
GKNSDVH

SEQ ID NO: 6345 - protein, 7 aa, synthetic construct
  REGION 1..7: note = Description of Artificial Sequence: Synthetic peptide
GSADSSK

SEQ ID NO: 6346 - protein, 7 aa, synthetic construct
  REGION 1..7: note = Description of Artificial Sequence: Synthetic peptide
VNSTGVH

SEQ ID NO: 6347 - protein, 7 aa, synthetic construct
  REGION 1..7: note = Description of Artificial Sequence: Synthetic peptide
VATSGPK

SEQ ID NO: 6348 - protein, 7 aa, synthetic construct
  REGION 1..7: note = Description of Artificial Sequence: Synthetic peptide
VSNGTSG

SEQ ID NO: 6349 - protein, 7 aa, synthetic construct
  REGION 1..7: note = Description of Artificial Sequence: Synthetic peptide
VGNSSLR

SEQ ID NO: 6350 - protein, 7 aa, synthetic construct
  REGION 1..7: note = Description of Artificial Sequence: Synthetic peptide
SQERSLA

SEQ ID NO: 6351 - protein, 7 aa, synthetic construct
  REGION 1..7: note = Description of Artificial Sequence: Synthetic peptide
SVSGERS

SEQ ID NO: 6352 - protein, 7 aa, synthetic construct
  REGION 1..7: note = Description of Artificial Sequence: Synthetic peptide
SNSSSAS

SEQ ID NO: 6353 - protein, 7 aa, synthetic construct
  REGION 1..7: note = Description of Artificial Sequence: Synthetic peptide
LPTGSKS

SEQ ID NO: 6354 - protein, 7 aa, synthetic construct
  REGION 1..7: note = Description of Artificial Sequence: Synthetic peptide
SNGKSPQ

SEQ ID NO: 6355 - protein, 7 aa, synthetic construct
  REGION 1..7: note = Description of Artificial Sequence: Synthetic peptide
AGEGSSR

SEQ ID NO: 6356 - protein, 7 aa, synthetic construct
  REGION 1..7: note = Description of Artificial Sequence: Synthetic peptide
KDAGTSS

SEQ ID NO: 6357 - protein, 7 aa, synthetic construct
  REGION 1..7: note = Description of Artificial Sequence: Synthetic peptide
SGDQKGA

SEQ ID NO: 6358 - protein, 7 aa, synthetic construct
  REGION 1..7: note = Description of Artificial Sequence: Synthetic peptide
MSGNTGN

SEQ ID NO: 6359 - protein, 7 aa, synthetic construct
  REGION 1..7: note = Description of Artificial Sequence: Synthetic peptide
LQEKPSA

SEQ ID NO: 6360 - protein, 7 aa, synthetic construct
  REGION 1..7: note = Description of Artificial Sequence: Synthetic peptide
AQNNNAG

SEQ ID NO: 6361 - protein, 7 aa, synthetic construct
  REGION 1..7: note = Description of Artificial Sequence: Synthetic peptide
GTGERHL

SEQ ID NO: 6362 - protein, 7 aa, synthetic construct
  REGION 1..7: note = Description of Artificial Sequence: Synthetic peptide
GSQSSTR

SEQ ID NO: 6363 - protein, 7 aa, synthetic construct
  REGION 1..7: note = Description of Artificial Sequence: Synthetic peptide
GLNTASG

SEQ ID NO: 6364 - protein, 7 aa, synthetic construct
  REGION 1..7: note = Description of Artificial Sequence: Synthetic peptide
SRESANH

SEQ ID NO: 6365 - protein, 7 aa, synthetic construct
  REGION 1..7: note = Description of Artificial Sequence: Synthetic peptide
RTTANSG

SEQ ID NO: 6366 - protein, 7 aa, synthetic construct
  REGION 1..7: note = Description of Artificial Sequence: Synthetic peptide
VTDKPNM

SEQ ID NO: 6367 - protein, 7 aa, synthetic construct
  REGION 1..7: note = Description of Artificial Sequence: Synthetic peptide
SLTNSNS

SEQ ID NO: 6368 - protein, 7 aa, synthetic construct
  REGION 1..7: note = Description of Artificial Sequence: Synthetic peptide
TGAGHTS

SEQ ID NO: 6369 - protein, 7 aa, synthetic construct
  REGION 1..7: note = Description of Artificial Sequence: Synthetic peptide
TLASTNA

SEQ ID NO: 6370 - protein, 7 aa, synthetic construct
  REGION 1..7: note = Description of Artificial Sequence: Synthetic peptide
GDVNVKQ

SEQ ID NO: 6371 - protein, 7 aa, synthetic construct
  REGION 1..7: note = Description of Artificial Sequence: Synthetic peptide
ASHDKSS

SEQ ID NO: 6372 - protein, 7 aa, synthetic construct
  REGION 1..7: note = Description of Artificial Sequence: Synthetic peptide
VGSSKDG

SEQ ID NO: 6373 - protein, 7 aa, synthetic construct
  REGION 1..7: note = Description of Artificial Sequence: Synthetic peptide
HDGSKSM

SEQ ID NO: 6374 - protein, 7 aa, synthetic construct
  REGION 1..7: note = Description of Artificial Sequence: Synthetic peptide
DSTHGNT

SEQ ID NO: 6375 - protein, 7 aa, synthetic construct
  REGION 1..7: note = Description of Artificial Sequence: Synthetic peptide
GLKQAPT

SEQ ID NO: 6376 - protein, 7 aa, synthetic construct
  REGION 1..7: note = Description of Artificial Sequence: Synthetic peptide
GDSKKPP

SEQ ID NO: 6377 - protein, 7 aa, synthetic construct
  REGION 1..7: note = Description of Artificial Sequence: Synthetic peptide
TPGGSAP

SEQ ID NO: 6378 - protein, 7 aa, synthetic construct
  REGION 1..7: note = Description of Artificial Sequence: Synthetic peptide
RGGSDSA

SEQ ID NO: 6379 - protein, 7 aa, synthetic construct
  REGION 1..7: note = Description of Artificial Sequence: Synthetic peptide
GTSGGGT

SEQ ID NO: 6380 - protein, 7 aa, synthetic construct
  REGION 1..7: note = Description of Artificial Sequence: Synthetic peptide
SVGTPSA

SEQ ID NO: 6381 - protein, 7 aa, synthetic construct
  REGION 1..7: note = Description of Artificial Sequence: Synthetic peptide
ETGASSL

SEQ ID NO: 6382 - protein, 7 aa, synthetic construct
  REGION 1..7: note = Description of Artificial Sequence: Synthetic peptide
TGPTEKS

SEQ ID NO: 6383 - protein, 7 aa, synthetic construct
  REGION 1..7: note = Description of Artificial Sequence: Synthetic peptide
SPKPGSI

SEQ ID NO: 6384 - protein, 7 aa, synthetic construct
  REGION 1..7: note = Description of Artificial Sequence: Synthetic peptide
SDSTRSQ

SEQ ID NO: 6385 - protein, 7 aa, synthetic construct
  REGION 1..7: note = Description of Artificial Sequence: Synthetic peptide
TGNSSAP

SEQ ID NO: 6386 - protein, 7 aa, synthetic construct
  REGION 1..7: note = Description of Artificial Sequence: Synthetic peptide
DARERNQ

SEQ ID NO: 6387 - protein, 7 aa, synthetic construct
  REGION 1..7: note = Description of Artificial Sequence: Synthetic peptide
TNTTSAT

SEQ ID NO: 6388 - protein, 7 aa, synthetic construct
  REGION 1..7: note = Description of Artificial Sequence: Synthetic peptide
LGTSSSV

SEQ ID NO: 6389 - protein, 7 aa, synthetic construct
  REGION 1..7: note = Description of Artificial Sequence: Synthetic peptide
QGQNHPN

SEQ ID NO: 6390 - protein, 7 aa, synthetic construct
  REGION 1..7: note = Description of Artificial Sequence: Synthetic peptide
GGTGTLG

SEQ ID NO: 6391 - protein, 7 aa, synthetic construct
  REGION 1..7: note = Description of Artificial Sequence: Synthetic peptide
LGTGTST

SEQ ID NO: 6392 - protein, 7 aa, synthetic construct
  REGION 1..7: note = Description of Artificial Sequence: Synthetic peptide
EGSQPLQ

SEQ ID NO: 6393 - protein, 7 aa, synthetic construct
  REGION 1..7: note = Description of Artificial Sequence: Synthetic peptide
ESGMQNS

SEQ ID NO: 6394 - protein, 7 aa, synthetic construct
  REGION 1..7: note = Description of Artificial Sequence: Synthetic peptide
GVDHAKT

SEQ ID NO: 6395 - protein, 7 aa, synthetic construct
  REGION 1..7: note = Description of Artificial Sequence: Synthetic peptide
SPITNGH

SEQ ID NO: 6396 - protein, 7 aa, synthetic construct
  REGION 1..7: note = Description of Artificial Sequence: Synthetic peptide
MSGSAKD

SEQ ID NO: 6397 - protein, 7 aa, synthetic construct
  REGION 1..7: note = Description of Artificial Sequence: Synthetic peptide
QSGEAPR

SEQ ID NO: 6398 - protein, 7 aa, synthetic construct
  REGION 1..7: note = Description of Artificial Sequence: Synthetic peptide
GETSRTS

SEQ ID NO: 6399 - protein, 7 aa, synthetic construct
  REGION 1..7: note = Description of Artificial Sequence: Synthetic peptide
GDSRPLN

SEQ ID NO: 6400 - protein, 7 aa, synthetic construct
  REGION 1..7: note = Description of Artificial Sequence: Synthetic peptide
NNGSQLK

SEQ ID NO: 6401 - protein, 7 aa, synthetic construct
  REGION 1..7: note = Description of Artificial Sequence: Synthetic peptide
STANASS

SEQ ID NO: 6402 - protein, 7 aa, synthetic construct
  REGION 1..7: note = Description of Artificial Sequence: Synthetic peptide
GPNSNKS

SEQ ID NO: 6403 - protein, 7 aa, synthetic construct
  REGION 1..7: note = Description of Artificial Sequence: Synthetic peptide
SGDNLRG

SEQ ID NO: 6404 - protein, 7 aa, synthetic construct
  REGION 1..7: note = Description of Artificial Sequence: Synthetic peptide
GGSKPNL

SEQ ID NO: 6405 - protein, 7 aa, synthetic construct
  REGION 1..7: note = Description of Artificial Sequence: Synthetic peptide
GSSGSHS

SEQ ID NO: 6406 - protein, 7 aa, synthetic construct
  REGION 1..7: note = Description of Artificial Sequence: Synthetic peptide
SGMNGQN

SEQ ID NO: 6407 - protein, 7 aa, synthetic construct
  REGION 1..7: note = Description of Artificial Sequence: Synthetic peptide
QTNSGST

SEQ ID NO: 6408 - protein, 7 aa, synthetic construct
  REGION 1..7: note = Description of Artificial Sequence: Synthetic peptide
ASGSHSS

SEQ ID NO: 6409 - protein, 7 aa, synthetic construct
  REGION 1..7: note = Description of Artificial Sequence: Synthetic peptide
ALSEKTL

SEQ ID NO: 6410 - protein, 7 aa, synthetic construct
  REGION 1..7: note = Description of Artificial Sequence: Synthetic peptide
ESSKPSL

SEQ ID NO: 6411 - protein, 7 aa, synthetic construct
  REGION 1..7: note = Description of Artificial Sequence: Synthetic peptide
GGGTTQA

SEQ ID NO: 6412 - protein, 7 aa, synthetic construct
  REGION 1..7: note = Description of Artificial Sequence: Synthetic peptide
SKANTPN

SEQ ID NO: 6413 - protein, 7 aa, synthetic construct
  REGION 1..7: note = Description of Artificial Sequence: Synthetic peptide
STQPSSG

SEQ ID NO: 6414 - protein, 7 aa, synthetic construct
  REGION 1..7: note = Description of Artificial Sequence: Synthetic peptide
VADQKQG

SEQ ID NO: 6415 - protein, 7 aa, synthetic construct
  REGION 1..7: note = Description of Artificial Sequence: Synthetic peptide
HGSNGSS

SEQ ID NO: 6416 - protein, 7 aa, synthetic construct
  REGION 1..7: note = Description of Artificial Sequence: Synthetic peptide
DTGKSPV

SEQ ID NO: 6417 - protein, 7 aa, synthetic construct
  REGION 1..7: note = Description of Artificial Sequence: Synthetic peptide
NMTSAKD

SEQ ID NO: 6418 - protein, 7 aa, synthetic construct
  REGION 1..7: note = Description of Artificial Sequence: Synthetic peptide
STTGEAK

SEQ ID NO: 6419 - protein, 7 aa, synthetic construct
  REGION 1..7: note = Description of Artificial Sequence: Synthetic peptide
ENSTSHS

SEQ ID NO: 6420 - protein, 7 aa, synthetic construct
  REGION 1..7: note = Description of Artificial Sequence: Synthetic peptide
VSNSPTK

SEQ ID NO: 6421 - protein, 7 aa, synthetic construct
  REGION 1..7: note = Description of Artificial Sequence: Synthetic peptide
NAGASTL

SEQ ID NO: 6422 - protein, 7 aa, synthetic construct
  REGION 1..7: note = Description of Artificial Sequence: Synthetic peptide
SSATNNT

SEQ ID NO: 6423 - protein, 7 aa, synthetic construct
  REGION 1..7: note = Description of Artificial Sequence: Synthetic peptide
TTGVGGT

SEQ ID NO: 6424 - protein, 7 aa, synthetic construct
  REGION 1..7: note = Description of Artificial Sequence: Synthetic peptide
ANTTGLS

SEQ ID NO: 6425 - protein, 7 aa, synthetic construct
  REGION 1..7: note = Description of Artificial Sequence: Synthetic peptide
SNGTAKS

SEQ ID NO: 6426 - protein, 7 aa, synthetic construct
  REGION 1..7: note = Description of Artificial Sequence: Synthetic peptide
AHKDKDG

SEQ ID NO: 6427 - protein, 7 aa, synthetic construct
  REGION 1..7: note = Description of Artificial Sequence: Synthetic peptide
SSGTSTA

SEQ ID NO: 6428 - protein, 7 aa, synthetic construct
  REGION 1..7: note = Description of Artificial Sequence: Synthetic peptide
TNENSNR

SEQ ID NO: 6429 - protein, 7 aa, synthetic construct
  REGION 1..7: note = Description of Artificial Sequence: Synthetic peptide
QIAKDSS

SEQ ID NO: 6430 - protein, 7 aa, synthetic construct
  REGION 1..7: note = Description of Artificial Sequence: Synthetic peptide
LSTSQVS

SEQ ID NO: 6431 - protein, 7 aa, synthetic construct
  REGION 1..7: note = Description of Artificial Sequence: Synthetic peptide
QSEAKGA

SEQ ID NO: 6432 - protein, 7 aa, synthetic construct
  REGION 1..7: note = Description of Artificial Sequence: Synthetic peptide
VGVKASQ

SEQ ID NO: 6433 - protein, 7 aa, synthetic construct
  REGION 1..7: note = Description of Artificial Sequence: Synthetic peptide
DPSKASV

SEQ ID NO: 6434 - protein, 7 aa, synthetic construct
  REGION 1..7: note = Description of Artificial Sequence: Synthetic peptide
NPSSGDK

SEQ ID NO: 6435 - protein, 7 aa, synthetic construct
  REGION 1..7: note = Description of Artificial Sequence: Synthetic peptide
MGSTANG

SEQ ID NO: 6436 - protein, 7 aa, synthetic construct
  REGION 1..7: note = Description of Artificial Sequence: Synthetic peptide
GASGDNH

SEQ ID NO: 6437 - protein, 7 aa, synthetic construct
  REGION 1..7: note = Description of Artificial Sequence: Synthetic peptide
WRESETK

SEQ ID NO: 6438 - protein, 7 aa, synthetic construct
  REGION 1..7: note = Description of Artificial Sequence: Synthetic peptide
NTGAPAS

SEQ ID NO: 6439 - protein, 7 aa, synthetic construct
  REGION 1..7: note = Description of Artificial Sequence: Synthetic peptide
DANSGKM

SEQ ID NO: 6440 - protein, 7 aa, synthetic construct
  REGION 1..7: note = Description of Artificial Sequence: Synthetic peptide
ASKSGAA

SEQ ID NO: 6441 - protein, 7 aa, synthetic construct
  REGION 1..7: note = Description of Artificial Sequence: Synthetic peptide
GLGSSTS

SEQ ID NO: 6442 - protein, 7 aa, synthetic construct
  REGION 1..7: note = Description of Artificial Sequence: Synthetic peptide
DSSKSAY

SEQ ID NO: 6443 - protein, 7 aa, synthetic construct
  REGION 1..7: note = Description of Artificial Sequence: Synthetic peptide
SGKQSPA

SEQ ID NO: 6444 - protein, 7 aa, synthetic construct
  REGION 1..7: note = Description of Artificial Sequence: Synthetic peptide
TVTNTSG

SEQ ID NO: 6445 - protein, 7 aa, synthetic construct
  REGION 1..7: note = Description of Artificial Sequence: Synthetic peptide
IAGPGTQ

SEQ ID NO: 6446 - protein, 7 aa, synthetic construct
  REGION 1..7: note = Description of Artificial Sequence: Synthetic peptide
GLDKAGK

SEQ ID NO: 6447 - protein, 7 aa, synthetic construct
  REGION 1..7: note = Description of Artificial Sequence: Synthetic peptide
VDGKTSN

SEQ ID NO: 6448 - protein, 7 aa, synthetic construct
  REGION 1..7: note = Description of Artificial Sequence: Synthetic peptide
TAGGSHL

SEQ ID NO: 6449 - protein, 7 aa, synthetic construct
  REGION 1..7: note = Description of Artificial Sequence: Synthetic peptide
ASQSPSL

SEQ ID NO: 6450 - protein, 7 aa, synthetic construct
  REGION 1..7: note = Description of Artificial Sequence: Synthetic peptide
SVGSSSN

SEQ ID NO: 6451 - protein, 7 aa, synthetic construct
  REGION 1..7: note = Description of Artificial Sequence: Synthetic peptide
NTAAPTA

SEQ ID NO: 6452 - protein, 7 aa, synthetic construct
  REGION 1..7: note = Description of Artificial Sequence: Synthetic peptide
NTHTKST

SEQ ID NO: 6453 - protein, 7 aa, synthetic construct
  REGION 1..7: note = Description of Artificial Sequence: Synthetic peptide
GNSQPNA

SEQ ID NO: 6454 - protein, 7 aa, synthetic construct
  REGION 1..7: note = Description of Artificial Sequence: Synthetic peptide
SLSDKQG

SEQ ID NO: 6455 - protein, 7 aa, synthetic construct
  REGION 1..7: note = Description of Artificial Sequence: Synthetic peptide
TTGSSMM

SEQ ID NO: 6456 - protein, 7 aa, synthetic construct
  REGION 1..7: note = Description of Artificial Sequence: Synthetic peptide
TTVSSPH

SEQ ID NO: 6457 - protein, 7 aa, synthetic construct
  REGION 1..7: note = Description of Artificial Sequence: Synthetic peptide
SQTGQNQ

SEQ ID NO: 6458 - protein, 7 aa, synthetic construct
  REGION 1..7: note = Description of Artificial Sequence: Synthetic peptide
MGSSKVG

SEQ ID NO: 6459 - protein, 7 aa, synthetic construct
  REGION 1..7: note = Description of Artificial Sequence: Synthetic peptide
VGAPTNR

SEQ ID NO: 6460 - protein, 7 aa, synthetic construct
  REGION 1..7: note = Description of Artificial Sequence: Synthetic peptide
SGMPAGT

SEQ ID NO: 6461 - protein, 7 aa, synthetic construct
  REGION 1..7: note = Description of Artificial Sequence: Synthetic peptide
GSTKEAN

SEQ ID NO: 6462 - protein, 7 aa, synthetic construct
  REGION 1..7: note = Description of Artificial Sequence: Synthetic peptide
QTNATLG

SEQ ID NO: 6463 - protein, 7 aa, synthetic construct
  REGION 1..7: note = Description of Artificial Sequence: Synthetic peptide
DSGGSPR

SEQ ID NO: 6464 - protein, 7 aa, synthetic construct
  REGION 1..7: note = Description of Artificial Sequence: Synthetic peptide
GSVKPGL

SEQ ID NO: 6465 - protein, 7 aa, synthetic construct
  REGION 1..7: note = Description of Artificial Sequence: Synthetic peptide
GSSSKST

SEQ ID NO: 6466 - protein, 7 aa, synthetic construct
  REGION 1..7: note = Description of Artificial Sequence: Synthetic peptide
VKSQANN

SEQ ID NO: 6467 - protein, 7 aa, synthetic construct
  REGION 1..7: note = Description of Artificial Sequence: Synthetic peptide
SQTTQSG

SEQ ID NO: 6468 - protein, 7 aa, synthetic construct
  REGION 1..7: note = Description of Artificial Sequence: Synthetic peptide
GTPSSST

SEQ ID NO: 6469 - protein, 7 aa, synthetic construct
  REGION 1..7: note = Description of Artificial Sequence: Synthetic peptide
RSSDKSG

SEQ ID NO: 6470 - protein, 7 aa, synthetic construct
  REGION 1..7: note = Description of Artificial Sequence: Synthetic peptide
NSSRSNE

SEQ ID NO: 6471 - protein, 7 aa, synthetic construct
  REGION 1..7: note = Description of Artificial Sequence: Synthetic peptide
TGPTPQV

SEQ ID NO: 6472 - protein, 7 aa, synthetic construct
  REGION 1..7: note = Description of Artificial Sequence: Synthetic peptide
TTGTTPS

SEQ ID NO: 6473 - protein, 7 aa, synthetic construct
  REGION 1..7: note = Description of Artificial Sequence: Synthetic peptide
SDGSAAA

SEQ ID NO: 6474 - protein, 7 aa, synthetic construct
  REGION 1..7: note = Description of Artificial Sequence: Synthetic peptide
IGTTSQS

SEQ ID NO: 6475 - protein, 7 aa, synthetic construct
  REGION 1..7: note = Description of Artificial Sequence: Synthetic peptide
STGAPNA

SEQ ID NO: 6476 - protein, 7 aa, synthetic construct
  REGION 1..7: note = Description of Artificial Sequence: Synthetic peptide
ESKKPAL

SEQ ID NO: 6477 - protein, 7 aa, synthetic construct
  REGION 1..7: note = Description of Artificial Sequence: Synthetic peptide
GHQTTPT

SEQ ID NO: 6478 - protein, 7 aa, synthetic construct
  REGION 1..7: note = Description of Artificial Sequence: Synthetic peptide
GNLAKAE

SEQ ID NO: 6479 - protein, 7 aa, synthetic construct
  REGION 1..7: note = Description of Artificial Sequence: Synthetic peptide
EPTSRNA

SEQ ID NO: 6480 - protein, 7 aa, synthetic construct
  REGION 1..7: note = Description of Artificial Sequence: Synthetic peptide
SATNAAT

SEQ ID NO: 6481 - protein, 7 aa, synthetic construct
  REGION 1..7: note = Description of Artificial Sequence: Synthetic peptide
GNSQSMT

SEQ ID NO: 6482 - protein, 7 aa, synthetic construct
  REGION 1..7: note = Description of Artificial Sequence: Synthetic peptide
VGGSGPQ

SEQ ID NO: 6483 - protein, 7 aa, synthetic construct
  REGION 1..7: note = Description of Artificial Sequence: Synthetic peptide
TPTKPNT

SEQ ID NO: 6484 - protein, 7 aa, synthetic construct
  REGION 1..7: note = Description of Artificial Sequence: Synthetic peptide
GTARNNG

SEQ ID NO: 6485 - protein, 7 aa, synthetic construct
  REGION 1..7: note = Description of Artificial Sequence: Synthetic peptide
NVSTNNG

SEQ ID NO: 6486 - protein, 7 aa, synthetic construct
  REGION 1..7: note = Description of Artificial Sequence: Synthetic peptide
NTTSGLA

SEQ ID NO: 6487 - protein, 7 aa, synthetic construct
  REGION 1..7: note = Description of Artificial Sequence: Synthetic peptide
NQAAQGV

SEQ ID NO: 6488 - protein, 7 aa, synthetic construct
  REGION 1..7: note = Description of Artificial Sequence: Synthetic peptide
TNASPSS

SEQ ID NO: 6489 - protein, 7 aa, synthetic construct
  REGION 1..7: note = Description of Artificial Sequence: Synthetic peptide
TGKDQSS

SEQ ID NO: 6490 - protein, 7 aa, synthetic construct
  REGION 1..7: note = Description of Artificial Sequence: Synthetic peptide
TSSPTGV

SEQ ID NO: 6491 - protein, 7 aa, synthetic construct
  REGION 1..7: note = Description of Artificial Sequence: Synthetic peptide
SGGKPSN

SEQ ID NO: 6492 - protein, 7 aa, synthetic construct
  REGION 1..7: note = Description of Artificial Sequence: Synthetic peptide
ESSSRSI

SEQ ID NO: 6493 - protein, 7 aa, synthetic construct
  REGION 1..7: note = Description of Artificial Sequence: Synthetic peptide
ASDKPAL

SEQ ID NO: 6494 - protein, 7 aa, synthetic construct
  REGION 1..7: note = Description of Artificial Sequence: Synthetic peptide
VKTQATI

SEQ ID NO: 6495 - protein, 7 aa, synthetic construct
  REGION 1..7: note = Description of Artificial Sequence: Synthetic peptide
THSPNGN

SEQ ID NO: 6496 - protein, 7 aa, synthetic construct
  REGION 1..7: note = Description of Artificial Sequence: Synthetic peptide
QTSQAPV

SEQ ID NO: 6497 - protein, 7 aa, synthetic construct
  REGION 1..7: note = Description of Artificial Sequence: Synthetic peptide
TDGTKVN

SEQ ID NO: 6498 - protein, 7 aa, synthetic construct
  REGION 1..7: note = Description of Artificial Sequence: Synthetic peptide
IMESKSM

SEQ ID NO: 6499 - protein, 7 aa, synthetic construct
  REGION 1..7: note = Description of Artificial Sequence: Synthetic peptide
SSERSSN

SEQ ID NO: 6500 - protein, 7 aa, synthetic construct
  REGION 1..7: note = Description of Artificial Sequence: Synthetic peptide
QTKSNPS

SEQ ID NO: 6501 - protein, 7 aa, synthetic construct
  REGION 1..7: note = Description of Artificial Sequence: Synthetic peptide
DGVDKRG

SEQ ID NO: 6502 - protein, 7 aa, synthetic construct
  REGION 1..7: note = Description of Artificial Sequence: Synthetic peptide
GAAVKST

SEQ ID NO: 6503 - protein, 7 aa, synthetic construct
  REGION 1..7: note = Description of Artificial Sequence: Synthetic peptide
GDGNSHV

SEQ ID NO: 6504 - protein, 7 aa, synthetic construct
  REGION 1..7: note = Description of Artificial Sequence: Synthetic peptide
SGSEQIK

SEQ ID NO: 6505 - protein, 7 aa, synthetic construct
  REGION 1..7: note = Description of Artificial Sequence: Synthetic peptide
NTTPASA

SEQ ID NO: 6506 - protein, 7 aa, synthetic construct
  REGION 1..7: note = Description of Artificial Sequence: Synthetic peptide
DNTGSTN

SEQ ID NO: 6507 - protein, 7 aa, synthetic construct
  REGION 1..7: note = Description of Artificial Sequence: Synthetic peptide
DGPSPAR

SEQ ID NO: 6508 - protein, 7 aa, synthetic construct
  REGION 1..7: note = Description of Artificial Sequence: Synthetic peptide
GGTATPL

SEQ ID NO: 6509 - protein, 7 aa, synthetic construct
  REGION 1..7: note = Description of Artificial Sequence: Synthetic peptide
TSGDRIS

SEQ ID NO: 6510 - protein, 7 aa, synthetic construct
  REGION 1..7: note = Description of Artificial Sequence: Synthetic peptide
GPSEGQR

SEQ ID NO: 6511 - protein, 7 aa, synthetic construct
  REGION 1..7: note = Description of Artificial Sequence: Synthetic peptide
TTDHKSV

SEQ ID NO: 6512 - protein, 7 aa, synthetic construct
  REGION 1..7: note = Description of Artificial Sequence: Synthetic peptide
NGEKIGN

SEQ ID NO: 6513 - protein, 7 aa, synthetic construct
  REGION 1..7: note = Description of Artificial Sequence: Synthetic peptide
SKSVQPS

SEQ ID NO: 6514 - protein, 7 aa, synthetic construct
  REGION 1..7: note = Description of Artificial Sequence: Synthetic peptide
RADQNRG

SEQ ID NO: 6515 - protein, 7 aa, synthetic construct
  REGION 1..7: note = Description of Artificial Sequence: Synthetic peptide
NQHKPSA

SEQ ID NO: 6516 - protein, 7 aa, synthetic construct
  REGION 1..7: note = Description of Artificial Sequence: Synthetic peptide
SKATSAA

SEQ ID NO: 6517 - protein, 7 aa, synthetic construct
  REGION 1..7: note = Description of Artificial Sequence: Synthetic peptide
SVSSAKD

SEQ ID NO: 6518 - protein, 7 aa, synthetic construct
  REGION 1..7: note = Description of Artificial Sequence: Synthetic peptide
STGISNV

SEQ ID NO: 6519 - protein, 7 aa, synthetic construct
  REGION 1..7: note = Description of Artificial Sequence: Synthetic peptide
DPPDNKV

SEQ ID NO: 6520 - protein, 7 aa, synthetic construct
  REGION 1..7: note = Description of Artificial Sequence: Synthetic peptide
NSASAQS

SEQ ID NO: 6521 - protein, 7 aa, synthetic construct
  REGION 1..7: note = Description of Artificial Sequence: Synthetic peptide
NPSGRNE

SEQ ID NO: 6522 - protein, 7 aa, synthetic construct
  REGION 1..7: note = Description of Artificial Sequence: Synthetic peptide
TAGDSRA

SEQ ID NO: 6523 - protein, 7 aa, synthetic construct
  REGION 1..7: note = Description of Artificial Sequence: Synthetic peptide
RVSADRG

SEQ ID NO: 6524 - protein, 7 aa, synthetic construct
  REGION 1..7: note = Description of Artificial Sequence: Synthetic peptide
SRDKEVA

SEQ ID NO: 6525 - protein, 7 aa, synthetic construct
  REGION 1..7: note = Description of Artificial Sequence: Synthetic peptide
NTPNQST

SEQ ID NO: 6526 - protein, 7 aa, synthetic construct
  REGION 1..7: note = Description of Artificial Sequence: Synthetic peptide
SNGGSNS

SEQ ID NO: 6527 - protein, 7 aa, synthetic construct
  REGION 1..7: note = Description of Artificial Sequence: Synthetic peptide
QTNHTNS

SEQ ID NO: 6528 - protein, 7 aa, synthetic construct
  REGION 1..7: note = Description of Artificial Sequence: Synthetic peptide
GAAANLA

SEQ ID NO: 6529 - protein, 7 aa, synthetic construct
  REGION 1..7: note = Description of Artificial Sequence: Synthetic peptide
TGSSSAT

SEQ ID NO: 6530 - protein, 7 aa, synthetic construct
  REGION 1..7: note = Description of Artificial Sequence: Synthetic peptide
NGHSGIS

SEQ ID NO: 6531 - protein, 7 aa, synthetic construct
  REGION 1..7: note = Description of Artificial Sequence: Synthetic peptide
TTTAGLT

SEQ ID NO: 6532 - protein, 7 aa, synthetic construct
  REGION 1..7: note = Description of Artificial Sequence: Synthetic peptide
SSGTVGK

SEQ ID NO: 6533 - protein, 7 aa, synthetic construct
  REGION 1..7: note = Description of Artificial Sequence: Synthetic peptide
SVGHDHR

SEQ ID NO: 6534 - protein, 7 aa, synthetic construct
  REGION 1..7: note = Description of Artificial Sequence: Synthetic peptide
SGKSEQT

SEQ ID NO: 6535 - protein, 7 aa, synthetic construct
  REGION 1..7: note = Description of Artificial Sequence: Synthetic peptide
GGNSAAT

SEQ ID NO: 6536 - protein, 7 aa, synthetic construct
  REGION 1..7: note = Description of Artificial Sequence: Synthetic peptide
LGSGARE

SEQ ID NO: 6537 - protein, 7 aa, synthetic construct
  REGION 1..7: note = Description of Artificial Sequence: Synthetic peptide
LVPEAKG

SEQ ID NO: 6538 - protein, 7 aa, synthetic construct
  REGION 1..7: note = Description of Artificial Sequence: Synthetic peptide
IQSPSSG

SEQ ID NO: 6539 - protein, 7 aa, synthetic construct
  REGION 1..7: note = Description of Artificial Sequence: Synthetic peptide
NLGSDSK

SEQ ID NO: 6540 - protein, 7 aa, synthetic construct
  REGION 1..7: note = Description of Artificial Sequence: Synthetic peptide
EPAPGTK

SEQ ID NO: 6541 - protein, 7 aa, synthetic construct
  REGION 1..7: note = Description of Artificial Sequence: Synthetic peptide
SPTAGGG

SEQ ID NO: 6542 - protein, 7 aa, synthetic construct
  REGION 1..7: note = Description of Artificial Sequence: Synthetic peptide
LASKVGQ

SEQ ID NO: 6543 - protein, 7 aa, synthetic construct
  REGION 1..7: note = Description of Artificial Sequence: Synthetic peptide
ESLGGNK

SEQ ID NO: 6544 - protein, 7 aa, synthetic construct
  REGION 1..7: note = Description of Artificial Sequence: Synthetic peptide
VTGASMN

SEQ ID NO: 6545 - protein, 7 aa, synthetic construct
  REGION 1..7: note = Description of Artificial Sequence: Synthetic peptide
TSSQATV

SEQ ID NO: 6546 - protein, 7 aa, synthetic construct
  REGION 1..7: note = Description of Artificial Sequence: Synthetic peptide
HHADKGS

SEQ ID NO: 6547 - protein, 7 aa, synthetic construct
  REGION 1..7: note = Description of Artificial Sequence: Synthetic peptide
RPDSKST

SEQ ID NO: 6548 - protein, 7 aa, synthetic construct
  REGION 1..7: note = Description of Artificial Sequence: Synthetic peptide
GVPESKQ

SEQ ID NO: 6549 - protein, 7 aa, synthetic construct
  REGION 1..7: note = Description of Artificial Sequence: Synthetic peptide
DSSSRAS

SEQ ID NO: 6550 - protein, 7 aa, synthetic construct
  REGION 1..7: note = Description of Artificial Sequence: Synthetic peptide
SKSPSQA

SEQ ID NO: 6551 - protein, 7 aa, synthetic construct
  REGION 1..7: note = Description of Artificial Sequence: Synthetic peptide
DPGKLTH

SEQ ID NO: 6552 - protein, 7 aa, synthetic construct
  REGION 1..7: note = Description of Artificial Sequence: Synthetic peptide
SLDNQRQ

SEQ ID NO: 6553 - protein, 7 aa, synthetic construct
  REGION 1..7: note = Description of Artificial Sequence: Synthetic peptide
GASNGSA

SEQ ID NO: 6554 - protein, 7 aa, synthetic construct
  REGION 1..7: note = Description of Artificial Sequence: Synthetic peptide
HRNSTSS

SEQ ID NO: 6555 - protein, 7 aa, synthetic construct
  REGION 1..7: note = Description of Artificial Sequence: Synthetic peptide
HTSTKDS

SEQ ID NO: 6556 - protein, 7 aa, synthetic construct
  REGION 1..7: note = Description of Artificial Sequence: Synthetic peptide
VQHGSST

SEQ ID NO: 6557 - protein, 7 aa, synthetic construct
  REGION 1..7: note = Description of Artificial Sequence: Synthetic peptide
DGAGANV

SEQ ID NO: 6558 - protein, 7 aa, synthetic construct
  REGION 1..7: note = Description of Artificial Sequence: Synthetic peptide
GGPPSNT

SEQ ID NO: 6559 - protein, 7 aa, synthetic construct
  REGION 1..7: note = Description of Artificial Sequence: Synthetic peptide
ASNSGAV

SEQ ID NO: 6560 - protein, 7 aa, synthetic construct
  REGION 1..7: note = Description of Artificial Sequence: Synthetic peptide
NRDSSLH

SEQ ID NO: 6561 - protein, 7 aa, synthetic construct
  REGION 1..7: note = Description of Artificial Sequence: Synthetic peptide
NDTRTTS

SEQ ID NO: 6562 - protein, 7 aa, synthetic construct
  REGION 1..7: note = Description of Artificial Sequence: Synthetic peptide
TGSATMV

SEQ ID NO: 6563 - protein, 7 aa, synthetic construct
  REGION 1..7: note = Description of Artificial Sequence: Synthetic peptide
TGMTSTS

SEQ ID NO: 6564 - protein, 7 aa, synthetic construct
  REGION 1..7: note = Description of Artificial Sequence: Synthetic peptide
RQAGQLA

SEQ ID NO: 6565 - protein, 7 aa, synthetic construct
  REGION 1..7: note = Description of Artificial Sequence: Synthetic peptide
QTVSSSG

SEQ ID NO: 6566 - protein, 7 aa, synthetic construct
  REGION 1..7: note = Description of Artificial Sequence: Synthetic peptide
GTTPGKN

SEQ ID NO: 6567 - protein, 7 aa, synthetic construct
  REGION 1..7: note = Description of Artificial Sequence: Synthetic peptide
SSTATGL

SEQ ID NO: 6568 - protein, 7 aa, synthetic construct
  REGION 1..7: note = Description of Artificial Sequence: Synthetic peptide
RNASSSQ

SEQ ID NO: 6569 - protein, 7 aa, synthetic construct
  REGION 1..7: note = Description of Artificial Sequence: Synthetic peptide
HVGKSST

SEQ ID NO: 6570 - protein, 7 aa, synthetic construct
  REGION 1..7: note = Description of Artificial Sequence: Synthetic peptide
SSERAGH

SEQ ID NO: 6571 - protein, 7 aa, synthetic construct
  REGION 1..7: note = Description of Artificial Sequence: Synthetic peptide
DRTGAKN

SEQ ID NO: 6572 - protein, 7 aa, synthetic construct
  REGION 1..7: note = Description of Artificial Sequence: Synthetic peptide
DHSHKNA

SEQ ID NO: 6573 - protein, 7 aa, synthetic construct
  REGION 1..7: note = Description of Artificial Sequence: Synthetic peptide
HVERSHG

SEQ ID NO: 6574 - protein, 7 aa, synthetic construct
  REGION 1..7: note = Description of Artificial Sequence: Synthetic peptide
SNPGRDG

SEQ ID NO: 6575 - protein, 7 aa, synthetic construct
  REGION 1..7: note = Description of Artificial Sequence: Synthetic peptide
GDSGRQA

SEQ ID NO: 6576 - protein, 7 aa, synthetic construct
  REGION 1..7: note = Description of Artificial Sequence: Synthetic peptide
MQDSRAQ

SEQ ID NO: 6577 - protein, 7 aa, synthetic construct
  REGION 1..7: note = Description of Artificial Sequence: Synthetic peptide
LGGPSNS

SEQ ID NO: 6578 - protein, 7 aa, synthetic construct
  REGION 1..7: note = Description of Artificial Sequence: Synthetic peptide
DSKAAPQ

SEQ ID NO: 6579 - protein, 7 aa, synthetic construct
  REGION 1..7: note = Description of Artificial Sequence: Synthetic peptide
VDAKERS

SEQ ID NO: 6580 - protein, 7 aa, synthetic construct
  REGION 1..7: note = Description of Artificial Sequence: Synthetic peptide
TTSSASA

SEQ ID NO: 6581 - protein, 7 aa, synthetic construct
  REGION 1..7: note = Description of Artificial Sequence: Synthetic peptide
SSDRDSK

SEQ ID NO: 6582 - protein, 7 aa, synthetic construct
  REGION 1..7: note = Description of Artificial Sequence: Synthetic peptide
SGTGRSD

SEQ ID NO: 6583 - protein, 7 aa, synthetic construct
  REGION 1..7: note = Description of Artificial Sequence: Synthetic peptide
GNGASAS

SEQ ID NO: 6584 - protein, 7 aa, synthetic construct
  REGION 1..7: note = Description of Artificial Sequence: Synthetic peptide
GTHGSSN

SEQ ID NO: 6585 - protein, 7 aa, synthetic construct
  REGION 1..7: note = Description of Artificial Sequence: Synthetic peptide
NRAEGSG

SEQ ID NO: 6586 - protein, 7 aa, synthetic construct
  REGION 1..7: note = Description of Artificial Sequence: Synthetic peptide
TGNPASH

SEQ ID NO: 6587 - protein, 7 aa, synthetic construct
  REGION 1..7: note = Description of Artificial Sequence: Synthetic peptide
SGVNSVG

SEQ ID NO: 6588 - protein, 7 aa, synthetic construct
  REGION 1..7: note = Description of Artificial Sequence: Synthetic peptide
RNTSSVQ

SEQ ID NO: 6589 - protein, 7 aa, synthetic construct
  REGION 1..7: note = Description of Artificial Sequence: Synthetic peptide
VKSNGAS

SEQ ID NO: 6590 - protein, 7 aa, synthetic construct
  REGION 1..7: note = Description of Artificial Sequence: Synthetic peptide
SNNKPTN

SEQ ID NO: 6591 - protein, 7 aa, synthetic construct
  REGION 1..7: note = Description of Artificial Sequence: Synthetic peptide
TGQDVMR

SEQ ID NO: 6592 - protein, 7 aa, synthetic construct
  REGION 1..7: note = Description of Artificial Sequence: Synthetic peptide
SVGKPTS

SEQ ID NO: 6593 - protein, 7 aa, synthetic construct
  REGION 1..7: note = Description of Artificial Sequence: Synthetic peptide
TTGNSVP

SEQ ID NO: 6594 - protein, 7 aa, synthetic construct
  REGION 1..7: note = Description of Artificial Sequence: Synthetic peptide
QAKQNSI

SEQ ID NO: 6595 - protein, 7 aa, synthetic construct
  REGION 1..7: note = Description of Artificial Sequence: Synthetic peptide
SREDKIH

SEQ ID NO: 6596 - protein, 7 aa, synthetic construct
  REGION 1..7: note = Description of Artificial Sequence: Synthetic peptide
GSTQPSS

SEQ ID NO: 6597 - protein, 7 aa, synthetic construct
  REGION 1..7: note = Description of Artificial Sequence: Synthetic peptide
TRDATVR

SEQ ID NO: 6598 - protein, 7 aa, synthetic construct
  REGION 1..7: note = Description of Artificial Sequence: Synthetic peptide
HSGTPTG

SEQ ID NO: 6599 - protein, 7 aa, synthetic construct
  REGION 1..7: note = Description of Artificial Sequence: Synthetic peptide
DKPGGMS

SEQ ID NO: 6600 - protein, 7 aa, synthetic construct
  REGION 1..7: note = Description of Artificial Sequence: Synthetic peptide
SHTSGSA

SEQ ID NO: 6601 - protein, 7 aa, synthetic construct
  REGION 1..7: note = Description of Artificial Sequence: Synthetic peptide
IGAGTSS

SEQ ID NO: 6602 - protein, 7 aa, synthetic construct
  REGION 1..7: note = Description of Artificial Sequence: Synthetic peptide
IGSNTTT

SEQ ID NO: 6603 - protein, 7 aa, synthetic construct
  REGION 1..7: note = Description of Artificial Sequence: Synthetic peptide
TQDHNRS

SEQ ID NO: 6604 - protein, 7 aa, synthetic construct
  REGION 1..7: note = Description of Artificial Sequence: Synthetic peptide
NPGAHAS

SEQ ID NO: 6605 - protein, 7 aa, synthetic construct
  REGION 1..7: note = Description of Artificial Sequence: Synthetic peptide
NAQTHAS

SEQ ID NO: 6606 - protein, 7 aa, synthetic construct
  REGION 1..7: note = Description of Artificial Sequence: Synthetic peptide
TSTSGLA

SEQ ID NO: 6607 - protein, 7 aa, synthetic construct
  REGION 1..7: note = Description of Artificial Sequence: Synthetic peptide
DLNSTSK

SEQ ID NO: 6608 - protein, 7 aa, synthetic construct
  REGION 1..7: note = Description of Artificial Sequence: Synthetic peptide
TNASSPM

SEQ ID NO: 6609 - protein, 7 aa, synthetic construct
  REGION 1..7: note = Description of Artificial Sequence: Synthetic peptide
NTNQAAG

SEQ ID NO: 6610 - protein, 7 aa, synthetic construct
  REGION 1..7: note = Description of Artificial Sequence: Synthetic peptide
SQSSPSM

SEQ ID NO: 6611 - protein, 7 aa, synthetic construct
  REGION 1..7: note = Description of Artificial Sequence: Synthetic peptide
EKGQHNQ

SEQ ID NO: 6612 - protein, 7 aa, synthetic construct
  REGION 1..7: note = Description of Artificial Sequence: Synthetic peptide
DSKPSTS

SEQ ID NO: 6613 - protein, 7 aa, synthetic construct
  REGION 1..7: note = Description of Artificial Sequence: Synthetic peptide
DPSSASK

SEQ ID NO: 6614 - protein, 7 aa, synthetic construct
  REGION 1..7: note = Description of Artificial Sequence: Synthetic peptide
GTEPTRG

SEQ ID NO: 6615 - protein, 7 aa, synthetic construct
  REGION 1..7: note = Description of Artificial Sequence: Synthetic peptide
GDTTRNN

SEQ ID NO: 6616 - protein, 7 aa, synthetic construct
  REGION 1..7: note = Description of Artificial Sequence: Synthetic peptide
VGVGSAA

SEQ ID NO: 6617 - protein, 7 aa, synthetic construct
  REGION 1..7: note = Description of Artificial Sequence: Synthetic peptide
SVTDKGK

SEQ ID NO: 6618 - protein, 7 aa, synthetic construct
  REGION 1..7: note = Description of Artificial Sequence: Synthetic peptide
SSTMKEG

SEQ ID NO: 6619 - protein, 7 aa, synthetic construct
  REGION 1..7: note = Description of Artificial Sequence: Synthetic peptide
LDQAKPN

SEQ ID NO: 6620 - protein, 7 aa, synthetic construct
  REGION 1..7: note = Description of Artificial Sequence: Synthetic peptide
ATANTGG

SEQ ID NO: 6621 - protein, 7 aa, synthetic construct
  REGION 1..7: note = Description of Artificial Sequence: Synthetic peptide
STGKSLG

SEQ ID NO: 6622 - protein, 7 aa, synthetic construct
  REGION 1..7: note = Description of Artificial Sequence: Synthetic peptide
HGVSTPT

SEQ ID NO: 6623 - protein, 7 aa, synthetic construct
  REGION 1..7: note = Description of Artificial Sequence: Synthetic peptide
SKGASPQ

SEQ ID NO: 6624 - protein, 7 aa, synthetic construct
  REGION 1..7: note = Description of Artificial Sequence: Synthetic peptide
DPTERAR

SEQ ID NO: 6625 - protein, 7 aa, synthetic construct
  REGION 1..7: note = Description of Artificial Sequence: Synthetic peptide
TPNSSGG

SEQ ID NO: 6626 - protein, 7 aa, synthetic construct
  REGION 1..7: note = Description of Artificial Sequence: Synthetic peptide
TSNSKVN

SEQ ID NO: 6627 - protein, 7 aa, synthetic construct
  REGION 1..7: note = Description of Artificial Sequence: Synthetic peptide
SPGASTA

SEQ ID NO: 6628 - protein, 7 aa, synthetic construct
  REGION 1..7: note = Description of Artificial Sequence: Synthetic peptide
DKAQGVN

SEQ ID NO: 6629 - protein, 7 aa, synthetic construct
  REGION 1..7: note = Description of Artificial Sequence: Synthetic peptide
SRTKEGM

SEQ ID NO: 6630 - protein, 7 aa, synthetic construct
  REGION 1..7: note = Description of Artificial Sequence: Synthetic peptide
SPSNGGQ

SEQ ID NO: 6631 - protein, 7 aa, synthetic construct
  REGION 1..7: note = Description of Artificial Sequence: Synthetic peptide
AVSGASG

SEQ ID NO: 6632 - protein, 7 aa, synthetic construct
  REGION 1..7: note = Description of Artificial Sequence: Synthetic peptide
GKESDKS

SEQ ID NO: 6633 - protein, 7 aa, synthetic construct
  REGION 1..7: note = Description of Artificial Sequence: Synthetic peptide
SSNKTSQ

SEQ ID NO: 6634 - protein, 7 aa, synthetic construct
  REGION 1..7: note = Description of Artificial Sequence: Synthetic peptide
GKQEARV

SEQ ID NO: 6635 - protein, 7 aa, synthetic construct
  REGION 1..7: note = Description of Artificial Sequence: Synthetic peptide
TGDPKLG

SEQ ID NO: 6636 - protein, 7 aa, synthetic construct
  REGION 1..7: note = Description of Artificial Sequence: Synthetic peptide
SRVSSDK

SEQ ID NO: 6637 - protein, 7 aa, synthetic construct
  REGION 1..7: note = Description of Artificial Sequence: Synthetic peptide
SLNTSSA

SEQ ID NO: 6638 - protein, 7 aa, synthetic construct
  REGION 1..7: note = Description of Artificial Sequence: Synthetic peptide
KTTSGSQ

SEQ ID NO: 6639 - protein, 7 aa, synthetic construct
  REGION 1..7: note = Description of Artificial Sequence: Synthetic peptide
SNGAPTG

SEQ ID NO: 6640 - protein, 7 aa, synthetic construct
  REGION 1..7: note = Description of Artificial Sequence: Synthetic peptide
GLDQQRS

SEQ ID NO: 6641 - protein, 7 aa, synthetic construct
  REGION 1..7: note = Description of Artificial Sequence: Synthetic peptide
SLTSVNK

SEQ ID NO: 6642 - protein, 7 aa, synthetic construct
  REGION 1..7: note = Description of Artificial Sequence: Synthetic peptide
STATNNN

SEQ ID NO: 6643 - protein, 7 aa, synthetic construct
  REGION 1..7: note = Description of Artificial Sequence: Synthetic peptide
SGQTATT

SEQ ID NO: 6644 - protein, 7 aa, synthetic construct
  REGION 1..7: note = Description of Artificial Sequence: Synthetic peptide
SAAQSRE

SEQ ID NO: 6645 - protein, 7 aa, synthetic construct
  REGION 1..7: note = Description of Artificial Sequence: Synthetic peptide
SSGPPVA

SEQ ID NO: 6646 - protein, 7 aa, synthetic construct
  REGION 1..7: note = Description of Artificial Sequence: Synthetic peptide
SEGNPSR

SEQ ID NO: 6647 - protein, 7 aa, synthetic construct
  REGION 1..7: note = Description of Artificial Sequence: Synthetic peptide
SGASGSM

SEQ ID NO: 6648 - protein, 7 aa, synthetic construct
  REGION 1..7: note = Description of Artificial Sequence: Synthetic peptide
ESAGKAL

SEQ ID NO: 6649 - protein, 7 aa, synthetic construct
  REGION 1..7: note = Description of Artificial Sequence: Synthetic peptide
AGDGHVK

SEQ ID NO: 6650 - protein, 7 aa, synthetic construct
  REGION 1..7: note = Description of Artificial Sequence: Synthetic peptide
GSKEGNG

SEQ ID NO: 6651 - protein, 7 aa, synthetic construct
  REGION 1..7: note = Description of Artificial Sequence: Synthetic peptide
VSESGTT

SEQ ID NO: 6652 - protein, 7 aa, synthetic construct
  REGION 1..7: note = Description of Artificial Sequence: Synthetic peptide
ASDKVSA

SEQ ID NO: 6653 - protein, 7 aa, synthetic construct
  REGION 1..7: note = Description of Artificial Sequence: Synthetic peptide
MSGTGGS

SEQ ID NO: 6654 - protein, 7 aa, synthetic construct
  REGION 1..7: note = Description of Artificial Sequence: Synthetic peptide
NSVPHTS

SEQ ID NO: 6655 - protein, 7 aa, synthetic construct
  REGION 1..7: note = Description of Artificial Sequence: Synthetic peptide
SISKPGT

SEQ ID NO: 6656 - protein, 7 aa, synthetic construct
  REGION 1..7: note = Description of Artificial Sequence: Synthetic peptide
DTLNSKN

SEQ ID NO: 6657 - protein, 7 aa, synthetic construct
  REGION 1..7: note = Description of Artificial Sequence: Synthetic peptide
AAAGPNG

SEQ ID NO: 6658 - protein, 7 aa, synthetic construct
  REGION 1..7: note = Description of Artificial Sequence: Synthetic peptide
TGSPAPS

SEQ ID NO: 6659 - protein, 7 aa, synthetic construct
  REGION 1..7: note = Description of Artificial Sequence: Synthetic peptide
TRNPTST

SEQ ID NO: 6660 - protein, 7 aa, synthetic construct
  REGION 1..7: note = Description of Artificial Sequence: Synthetic peptide
TSGTAAM

SEQ ID NO: 6661 - protein, 7 aa, synthetic construct
  REGION 1..7: note = Description of Artificial Sequence: Synthetic peptide
STSSSSK

SEQ ID NO: 6662 - protein, 7 aa, synthetic construct
  REGION 1..7: note = Description of Artificial Sequence: Synthetic peptide
SSGTPRT

SEQ ID NO: 6663 - protein, 7 aa, synthetic construct
  REGION 1..7: note = Description of Artificial Sequence: Synthetic peptide
EMQTSNK

SEQ ID NO: 6664 - protein, 7 aa, synthetic construct
  REGION 1..7: note = Description of Artificial Sequence: Synthetic peptide
SAGHASS

SEQ ID NO: 6665 - protein, 7 aa, synthetic construct
  REGION 1..7: note = Description of Artificial Sequence: Synthetic peptide
QAGVSNV

SEQ ID NO: 6666 - protein, 7 aa, synthetic construct
  REGION 1..7: note = Description of Artificial Sequence: Synthetic peptide
HGSGQAT

SEQ ID NO: 6667 - protein, 7 aa, synthetic construct
  REGION 1..7: note = Description of Artificial Sequence: Synthetic peptide
QQSNSGT

SEQ ID NO: 6668 - protein, 7 aa, synthetic construct
  REGION 1..7: note = Description of Artificial Sequence: Synthetic peptide
GVVSKSV

SEQ ID NO: 6669 - protein, 7 aa, synthetic construct
  REGION 1..7: note = Description of Artificial Sequence: Synthetic peptide
VPSGSPH

SEQ ID NO: 6670 - protein, 7 aa, synthetic construct
  REGION 1..7: note = Description of Artificial Sequence: Synthetic peptide
ETVNKGT

SEQ ID NO: 6671 - protein, 7 aa, synthetic construct
  REGION 1..7: note = Description of Artificial Sequence: Synthetic peptide
TPSGSGQ

SEQ ID NO: 6672 - protein, 7 aa, synthetic construct
  REGION 1..7: note = Description of Artificial Sequence: Synthetic peptide
SGGDSFK

SEQ ID NO: 6673 - protein, 7 aa, synthetic construct
  REGION 1..7: note = Description of Artificial Sequence: Synthetic peptide
NGVSKVV

SEQ ID NO: 6674 - protein, 7 aa, synthetic construct
  REGION 1..7: note = Description of Artificial Sequence: Synthetic peptide
HGDSQRT

SEQ ID NO: 6675 - protein, 7 aa, synthetic construct
  REGION 1..7: note = Description of Artificial Sequence: Synthetic peptide
SSSKSTL

SEQ ID NO: 6676 - protein, 7 aa, synthetic construct
  REGION 1..7: note = Description of Artificial Sequence: Synthetic peptide
TRNGSVG

SEQ ID NO: 6677 - protein, 7 aa, synthetic construct
  REGION 1..7: note = Description of Artificial Sequence: Synthetic peptide
GSAVPAA

SEQ ID NO: 6678 - protein, 7 aa, synthetic construct
  REGION 1..7: note = Description of Artificial Sequence: Synthetic peptide
SANSKST

SEQ ID NO: 6679 - protein, 7 aa, synthetic construct
  REGION 1..7: note = Description of Artificial Sequence: Synthetic peptide
EQNAGPK

SEQ ID NO: 6680 - protein, 7 aa, synthetic construct
  REGION 1..7: note = Description of Artificial Sequence: Synthetic peptide
TSTASTG

SEQ ID NO: 6681 - protein, 7 aa, synthetic construct
  REGION 1..7: note = Description of Artificial Sequence: Synthetic peptide
TSGSHGA

SEQ ID NO: 6682 - protein, 7 aa, synthetic construct
  REGION 1..7: note = Description of Artificial Sequence: Synthetic peptide
LAAGKAG

SEQ ID NO: 6683 - protein, 7 aa, synthetic construct
  REGION 1..7: note = Description of Artificial Sequence: Synthetic peptide
DGSGSVQ

SEQ ID NO: 6684 - protein, 7 aa, synthetic construct
  REGION 1..7: note = Description of Artificial Sequence: Synthetic peptide
AAKDGKA

SEQ ID NO: 6685 - protein, 7 aa, synthetic construct
  REGION 1..7: note = Description of Artificial Sequence: Synthetic peptide
AGTSNEK

SEQ ID NO: 6686 - protein, 7 aa, synthetic construct
  REGION 1..7: note = Description of Artificial Sequence: Synthetic peptide
AGNSGLS

SEQ ID NO: 6687 - protein, 7 aa, synthetic construct
  REGION 1..7: note = Description of Artificial Sequence: Synthetic peptide
GNAEKPS

SEQ ID NO: 6688 - protein, 7 aa, synthetic construct
  REGION 1..7: note = Description of Artificial Sequence: Synthetic peptide
GRQGSTN

SEQ ID NO: 6689 - protein, 7 aa, synthetic construct
  REGION 1..7: note = Description of Artificial Sequence: Synthetic peptide
FTSGTPT

SEQ ID NO: 6690 - protein, 7 aa, synthetic construct
  REGION 1..7: note = Description of Artificial Sequence: Synthetic peptide
MQPSQKG

SEQ ID NO: 6691 - protein, 7 aa, synthetic construct
  REGION 1..7: note = Description of Artificial Sequence: Synthetic peptide
SGTKTQN

SEQ ID NO: 6692 - protein, 7 aa, synthetic construct
  REGION 1..7: note = Description of Artificial Sequence: Synthetic peptide
EVHQGKG

SEQ ID NO: 6693 - protein, 7 aa, synthetic construct
  REGION 1..7: note = Description of Artificial Sequence: Synthetic peptide
ANASHST

SEQ ID NO: 6694 - protein, 7 aa, synthetic construct
  REGION 1..7: note = Description of Artificial Sequence: Synthetic peptide
GKSDTRS

SEQ ID NO: 6695 - protein, 7 aa, synthetic construct
  REGION 1..7: note = Description of Artificial Sequence: Synthetic peptide
LSASSTG

SEQ ID NO: 6696 - protein, 7 aa, synthetic construct
  REGION 1..7: note = Description of Artificial Sequence: Synthetic peptide
TGSSHLV

SEQ ID NO: 6697 - protein, 7 aa, synthetic construct
  REGION 1..7: note = Description of Artificial Sequence: Synthetic peptide
SPNGNHQ

SEQ ID NO: 6698 - protein, 7 aa, synthetic construct
  REGION 1..7: note = Description of Artificial Sequence: Synthetic peptide
EQINSKA

SEQ ID NO: 6699 - protein, 7 aa, synthetic construct
  REGION 1..7: note = Description of Artificial Sequence: Synthetic peptide
QGTPTNG

SEQ ID NO: 6700 - protein, 7 aa, synthetic construct
  REGION 1..7: note = Description of Artificial Sequence: Synthetic peptide
QGVSSHN

SEQ ID NO: 6701 - protein, 7 aa, synthetic construct
  REGION 1..7: note = Description of Artificial Sequence: Synthetic peptide
LSGERAA

SEQ ID NO: 6702 - protein, 7 aa, synthetic construct
  REGION 1..7: note = Description of Artificial Sequence: Synthetic peptide
GAVDRSG

SEQ ID NO: 6703 - protein, 7 aa, synthetic construct
  REGION 1..7: note = Description of Artificial Sequence: Synthetic peptide
SRDPAGG

SEQ ID NO: 6704 - protein, 7 aa, synthetic construct
  REGION 1..7: note = Description of Artificial Sequence: Synthetic peptide
SQSNTSV

SEQ ID NO: 6705 - protein, 7 aa, synthetic construct
  REGION 1..7: note = Description of Artificial Sequence: Synthetic peptide
SGRDKLN

SEQ ID NO: 6706 - protein, 7 aa, synthetic construct
  REGION 1..7: note = Description of Artificial Sequence: Synthetic peptide
HVDKSGM

SEQ ID NO: 6707 - protein, 7 aa, synthetic construct
  REGION 1..7: note = Description of Artificial Sequence: Synthetic peptide
EGSTSKH

SEQ ID NO: 6708 - protein, 7 aa, synthetic construct
  REGION 1..7: note = Description of Artificial Sequence: Synthetic peptide
NPSPSVK

SEQ ID NO: 6709 - protein, 7 aa, synthetic construct
  REGION 1..7: note = Description of Artificial Sequence: Synthetic peptide
QPSNAAS

SEQ ID NO: 6710 - protein, 7 aa, synthetic construct
  REGION 1..7: note = Description of Artificial Sequence: Synthetic peptide
MSNSPSS

SEQ ID NO: 6711 - protein, 7 aa, synthetic construct
  REGION 1..7: note = Description of Artificial Sequence: Synthetic peptide
LGGNEAR

SEQ ID NO: 6712 - protein, 7 aa, synthetic construct
  REGION 1..7: note = Description of Artificial Sequence: Synthetic peptide
EQSKHAS

SEQ ID NO: 6713 - protein, 7 aa, synthetic construct
  REGION 1..7: note = Description of Artificial Sequence: Synthetic peptide
TSSATSI

SEQ ID NO: 6714 - protein, 7 aa, synthetic construct
  REGION 1..7: note = Description of Artificial Sequence: Synthetic peptide
DEGRSHT

SEQ ID NO: 6715 - protein, 7 aa, synthetic construct
  REGION 1..7: note = Description of Artificial Sequence: Synthetic peptide
DGTRTSG

SEQ ID NO: 6716 - protein, 7 aa, synthetic construct
  REGION 1..7: note = Description of Artificial Sequence: Synthetic peptide
AADRSSS

SEQ ID NO: 6717 - protein, 7 aa, synthetic construct
  REGION 1..7: note = Description of Artificial Sequence: Synthetic peptide
SQPSGGG

SEQ ID NO: 6718 - protein, 7 aa, synthetic construct
  REGION 1..7: note = Description of Artificial Sequence: Synthetic peptide
LRSSEKG

SEQ ID NO: 6719 - protein, 7 aa, synthetic construct
  REGION 1..7: note = Description of Artificial Sequence: Synthetic peptide
EGGANSR

SEQ ID NO: 6720 - protein, 7 aa, synthetic construct
  REGION 1..7: note = Description of Artificial Sequence: Synthetic peptide
SSAQGSG

SEQ ID NO: 6721 - protein, 7 aa, synthetic construct
  REGION 1..7: note = Description of Artificial Sequence: Synthetic peptide
TEVSKVQ

SEQ ID NO: 6722 - protein, 7 aa, synthetic construct
  REGION 1..7: note = Description of Artificial Sequence: Synthetic peptide
NTGKDNP

SEQ ID NO: 6723 - protein, 7 aa, synthetic construct
  REGION 1..7: note = Description of Artificial Sequence: Synthetic peptide
KAQNAPQ

SEQ ID NO: 6724 - protein, 7 aa, synthetic construct
  REGION 1..7: note = Description of Artificial Sequence: Synthetic peptide
MGPERPQ

SEQ ID NO: 6725 - protein, 7 aa, synthetic construct
  REGION 1..7: note = Description of Artificial Sequence: Synthetic peptide
ESGKTSS

SEQ ID NO: 6726 - protein, 7 aa, synthetic construct
  REGION 1..7: note = Description of Artificial Sequence: Synthetic peptide
QPTKEHH

SEQ ID NO: 6727 - protein, 7 aa, synthetic construct
  REGION 1..7: note = Description of Artificial Sequence: Synthetic peptide
SPPNGGV

SEQ ID NO: 6728 - protein, 7 aa, synthetic construct
  REGION 1..7: note = Description of Artificial Sequence: Synthetic peptide
DSATRSG

SEQ ID NO: 6729 - protein, 7 aa, synthetic construct
  REGION 1..7: note = Description of Artificial Sequence: Synthetic peptide
TDGPRSN

SEQ ID NO: 6730 - protein, 7 aa, synthetic construct
  REGION 1..7: note = Description of Artificial Sequence: Synthetic peptide
NRLEKES

SEQ ID NO: 6731 - protein, 7 aa, synthetic construct
  REGION 1..7: note = Description of Artificial Sequence: Synthetic peptide
EATSSGT

SEQ ID NO: 6732 - protein, 7 aa, synthetic construct
  REGION 1..7: note = Description of Artificial Sequence: Synthetic peptide
GKDPNSA

SEQ ID NO: 6733 - protein, 7 aa, synthetic construct
  REGION 1..7: note = Description of Artificial Sequence: Synthetic peptide
NRDKSMA

SEQ ID NO: 6734 - protein, 7 aa, synthetic construct
  REGION 1..7: note = Description of Artificial Sequence: Synthetic peptide
TPSNSTS

SEQ ID NO: 6735 - protein, 7 aa, synthetic construct
  REGION 1..7: note = Description of Artificial Sequence: Synthetic peptide
GRVAEEK

SEQ ID NO: 6736 - protein, 7 aa, synthetic construct
  REGION 1..7: note = Description of Artificial Sequence: Synthetic peptide
GSTDAKV

SEQ ID NO: 6737 - protein, 7 aa, synthetic construct
  REGION 1..7: note = Description of Artificial Sequence: Synthetic peptide
CGSSSCS

SEQ ID NO: 6738 - protein, 7 aa, synthetic construct
  REGION 1..7: note = Description of Artificial Sequence: Synthetic peptide
FKQAQTA

SEQ ID NO: 6739 - protein, 7 aa, synthetic construct
  REGION 1..7: note = Description of Artificial Sequence: Synthetic peptide
DRPPSKD

SEQ ID NO: 6740 - protein, 7 aa, synthetic construct
  REGION 1..7: note = Description of Artificial Sequence: Synthetic peptide
VGGTTTA

SEQ ID NO: 6741 - protein, 7 aa, synthetic construct
  REGION 1..7: note = Description of Artificial Sequence: Synthetic peptide
SGESRPK

SEQ ID NO: 6742 - protein, 7 aa, synthetic construct
  REGION 1..7: note = Description of Artificial Sequence: Synthetic peptide
SSGPSSS

SEQ ID NO: 6743 - protein, 7 aa, synthetic construct
  REGION 1..7: note = Description of Artificial Sequence: Synthetic peptide
SHTNSPS

SEQ ID NO: 6744 - protein, 7 aa, synthetic construct
  REGION 1..7: note = Description of Artificial Sequence: Synthetic peptide
TVGHSNQ

SEQ ID NO: 6745 - protein, 7 aa, synthetic construct
  REGION 1..7: note = Description of Artificial Sequence: Synthetic peptide
KGTSTSL

SEQ ID NO: 6746 - protein, 7 aa, synthetic construct
  REGION 1..7: note = Description of Artificial Sequence: Synthetic peptide
THTSAPV

SEQ ID NO: 6747 - protein, 7 aa, synthetic construct
  REGION 1..7: note = Description of Artificial Sequence: Synthetic peptide
SKDNATL

SEQ ID NO: 6748 - protein, 7 aa, synthetic construct
  REGION 1..7: note = Description of Artificial Sequence: Synthetic peptide
ISESPNR

SEQ ID NO: 6749 - protein, 7 aa, synthetic construct
  REGION 1..7: note = Description of Artificial Sequence: Synthetic peptide
QRATNSI

SEQ ID NO: 6750 - protein, 7 aa, synthetic construct
  REGION 1..7: note = Description of Artificial Sequence: Synthetic peptide
LKSSPTV

SEQ ID NO: 6751 - protein, 7 aa, synthetic construct
  REGION 1..7: note = Description of Artificial Sequence: Synthetic peptide
DGHGAVS

SEQ ID NO: 6752 - protein, 7 aa, synthetic construct
  REGION 1..7: note = Description of Artificial Sequence: Synthetic peptide
GGTQSAK

SEQ ID NO: 6753 - protein, 7 aa, synthetic construct
  REGION 1..7: note = Description of Artificial Sequence: Synthetic peptide
VRTANNN

SEQ ID NO: 6754 - protein, 7 aa, synthetic construct
  REGION 1..7: note = Description of Artificial Sequence: Synthetic peptide
TPTVSPG

SEQ ID NO: 6755 - protein, 7 aa, synthetic construct
  REGION 1..7: note = Description of Artificial Sequence: Synthetic peptide
SIGTSSG

SEQ ID NO: 6756 - protein, 7 aa, synthetic construct
  REGION 1..7: note = Description of Artificial Sequence: Synthetic peptide
HGTTTTT

SEQ ID NO: 6757 - protein, 7 aa, synthetic construct
  REGION 1..7: note = Description of Artificial Sequence: Synthetic peptide
APTESSK

SEQ ID NO: 6758 - protein, 7 aa, synthetic construct
  REGION 1..7: note = Description of Artificial Sequence: Synthetic peptide
KLSDKSL

SEQ ID NO: 6759 - protein, 7 aa, synthetic construct
  REGION 1..7: note = Description of Artificial Sequence: Synthetic peptide
ANGEANR

SEQ ID NO: 6760 - protein, 7 aa, synthetic construct
  REGION 1..7: note = Description of Artificial Sequence: Synthetic peptide
DNVNPAR

SEQ ID NO: 6761 - protein, 7 aa, synthetic construct
  REGION 1..7: note = Description of Artificial Sequence: Synthetic peptide
GRERPSE

SEQ ID NO: 6762 - protein, 7 aa, synthetic construct
  REGION 1..7: note = Description of Artificial Sequence: Synthetic peptide
GNSDKSS

SEQ ID NO: 6763 - protein, 7 aa, synthetic construct
  REGION 1..7: note = Description of Artificial Sequence: Synthetic peptide
VTTGGTS

SEQ ID NO: 6764 - protein, 7 aa, synthetic construct
  REGION 1..7: note = Description of Artificial Sequence: Synthetic peptide
ESTGSRA

SEQ ID NO: 6765 - protein, 7 aa, synthetic construct
  REGION 1..7: note = Description of Artificial Sequence: Synthetic peptide
GPSTNEK

SEQ ID NO: 6766 - protein, 7 aa, synthetic construct
  REGION 1..7: note = Description of Artificial Sequence: Synthetic peptide
QDTKTAN

SEQ ID NO: 6767 - protein, 7 aa, synthetic construct
  REGION 1..7: note = Description of Artificial Sequence: Synthetic peptide
RENGKSI

SEQ ID NO: 6768 - protein, 7 aa, synthetic construct
  REGION 1..7: note = Description of Artificial Sequence: Synthetic peptide
DGNRPNG

SEQ ID NO: 6769 - protein, 7 aa, synthetic construct
  REGION 1..7: note = Description of Artificial Sequence: Synthetic peptide
AGDNTRA

SEQ ID NO: 6770 - protein, 7 aa, synthetic construct
  REGION 1..7: note = Description of Artificial Sequence: Synthetic peptide
STSATSS

SEQ ID NO: 6771 - protein, 7 aa, synthetic construct
  REGION 1..7: note = Description of Artificial Sequence: Synthetic peptide
QQASSTS

SEQ ID NO: 6772 - protein, 7 aa, synthetic construct
  REGION 1..7: note = Description of Artificial Sequence: Synthetic peptide
SGNQSLN

SEQ ID NO: 6773 - protein, 7 aa, synthetic construct
  REGION 1..7: note = Description of Artificial Sequence: Synthetic peptide
TVHDKGN

SEQ ID NO: 6774 - protein, 7 aa, synthetic construct
  REGION 1..7: note = Description of Artificial Sequence: Synthetic peptide
SDGRGSG

SEQ ID NO: 6775 - protein, 7 aa, synthetic construct
  REGION 1..7: note = Description of Artificial Sequence: Synthetic peptide
SGSTTPM

SEQ ID NO: 6776 - protein, 7 aa, synthetic construct
  REGION 1..7: note = Description of Artificial Sequence: Synthetic peptide
DTQGRKD

SEQ ID NO: 6777 - protein, 7 aa, synthetic construct
  REGION 1..7: note = Description of Artificial Sequence: Synthetic peptide
GSDKGRD

SEQ ID NO: 6778 - protein, 7 aa, synthetic construct
  REGION 1..7: note = Description of Artificial Sequence: Synthetic peptide
QGSTPQL

SEQ ID NO: 6779 - protein, 7 aa, synthetic construct
  REGION 1..7: note = Description of Artificial Sequence: Synthetic peptide
SSDKTGR

SEQ ID NO: 6780 - protein, 7 aa, synthetic construct
  REGION 1..7: note = Description of Artificial Sequence: Synthetic peptide
NTSSTSG

SEQ ID NO: 6781 - protein, 7 aa, synthetic construct
  REGION 1..7: note = Description of Artificial Sequence: Synthetic peptide
HAKGAGD

SEQ ID NO: 6782 - protein, 7 aa, synthetic construct
  REGION 1..7: note = Description of Artificial Sequence: Synthetic peptide
GRDDKVG

SEQ ID NO: 6783 - protein, 7 aa, synthetic construct
  REGION 1..7: note = Description of Artificial Sequence: Synthetic peptide
SLGAGSG

SEQ ID NO: 6784 - protein, 7 aa, synthetic construct
  REGION 1..7: note = Description of Artificial Sequence: Synthetic peptide
TRQGAPV

SEQ ID NO: 6785 - protein, 7 aa, synthetic construct
  REGION 1..7: note = Description of Artificial Sequence: Synthetic peptide
DRNPSSH

SEQ ID NO: 6786 - protein, 7 aa, synthetic construct
  REGION 1..7: note = Description of Artificial Sequence: Synthetic peptide
HTDKNAG

SEQ ID NO: 6787 - protein, 7 aa, synthetic construct
  REGION 1..7: note = Description of Artificial Sequence: Synthetic peptide
SGTNTMT

SEQ ID NO: 6788 - protein, 7 aa, synthetic construct
  REGION 1..7: note = Description of Artificial Sequence: Synthetic peptide
HQTGAGS

SEQ ID NO: 6789 - protein, 7 aa, synthetic construct
  REGION 1..7: note = Description of Artificial Sequence: Synthetic peptide
SGSANTR

SEQ ID NO: 6790 - protein, 7 aa, synthetic construct
  REGION 1..7: note = Description of Artificial Sequence: Synthetic peptide
GDRSKAN

SEQ ID NO: 6791 - protein, 7 aa, synthetic construct
  REGION 1..7: note = Description of Artificial Sequence: Synthetic peptide
GKGNASA

SEQ ID NO: 6792 - protein, 7 aa, synthetic construct
  REGION 1..7: note = Description of Artificial Sequence: Synthetic peptide
SGSSSVV

SEQ ID NO: 6793 - protein, 7 aa, synthetic construct
  REGION 1..7: note = Description of Artificial Sequence: Synthetic peptide
EPSRSSV

SEQ ID NO: 6794 - protein, 7 aa, synthetic construct
  REGION 1..7: note = Description of Artificial Sequence: Synthetic peptide
RDKGQSS

SEQ ID NO: 6795 - protein, 7 aa, synthetic construct
  REGION 1..7: note = Description of Artificial Sequence: Synthetic peptide
VGGSSPT

SEQ ID NO: 6796 - protein, 7 aa, synthetic construct
  REGION 1..7: note = Description of Artificial Sequence: Synthetic peptide
NGTGSAQ

SEQ ID NO: 6797 - protein, 7 aa, synthetic construct
  REGION 1..7: note = Description of Artificial Sequence: Synthetic peptide
GTGPSHV

SEQ ID NO: 6798 - protein, 7 aa, synthetic construct
  REGION 1..7: note = Description of Artificial Sequence: Synthetic peptide
AGSPSPR

SEQ ID NO: 6799 - protein, 7 aa, synthetic construct
  REGION 1..7: note = Description of Artificial Sequence: Synthetic peptide
NGAAKQV

SEQ ID NO: 6800 - protein, 7 aa, synthetic construct
  REGION 1..7: note = Description of Artificial Sequence: Synthetic peptide
TPNATPN

SEQ ID NO: 6801 - protein, 7 aa, synthetic construct
  REGION 1..7: note = Description of Artificial Sequence: Synthetic peptide
TATRSAG

SEQ ID NO: 6802 - protein, 7 aa, synthetic construct
  REGION 1..7: note = Description of Artificial Sequence: Synthetic peptide
TAGQTSL

SEQ ID NO: 6803 - protein, 7 aa, synthetic construct
  REGION 1..7: note = Description of Artificial Sequence: Synthetic peptide
TTNPSSS

SEQ ID NO: 6804 - protein, 7 aa, synthetic construct
  REGION 1..7: note = Description of Artificial Sequence: Synthetic peptide
SMNNPGK

SEQ ID NO: 6805 - protein, 7 aa, synthetic construct
  REGION 1..7: note = Description of Artificial Sequence: Synthetic peptide
MVSNPSS

SEQ ID NO: 6806 - protein, 7 aa, synthetic construct
  REGION 1..7: note = Description of Artificial Sequence: Synthetic peptide
QQGGAIA

SEQ ID NO: 6807 - protein, 7 aa, synthetic construct
  REGION 1..7: note = Description of Artificial Sequence: Synthetic peptide
QSDGTHR

SEQ ID NO: 6808 - protein, 7 aa, synthetic construct
  REGION 1..7: note = Description of Artificial Sequence: Synthetic peptide
LQGENSK

SEQ ID NO: 6809 - protein, 7 aa, synthetic construct
  REGION 1..7: note = Description of Artificial Sequence: Synthetic peptide
LGERSSG

SEQ ID NO: 6810 - protein, 7 aa, synthetic construct
  REGION 1..7: note = Description of Artificial Sequence: Synthetic peptide
EGSGERR

SEQ ID NO: 6811 - protein, 7 aa, synthetic construct
  REGION 1..7: note = Description of Artificial Sequence: Synthetic peptide
GTSNASA

SEQ ID NO: 6812 - protein, 7 aa, synthetic construct
  REGION 1..7: note = Description of Artificial Sequence: Synthetic peptide
GHTKISG

SEQ ID NO: 6813 - protein, 7 aa, synthetic construct
  REGION 1..7: note = Description of Artificial Sequence: Synthetic peptide
GALGTAG

SEQ ID NO: 6814 - protein, 7 aa, synthetic construct
  REGION 1..7: note = Description of Artificial Sequence: Synthetic peptide
VASKGPT

SEQ ID NO: 6815 - protein, 7 aa, synthetic construct
  REGION 1..7: note = Description of Artificial Sequence: Synthetic peptide
TGAQTVA

SEQ ID NO: 6816 - protein, 7 aa, synthetic construct
  REGION 1..7: note = Description of Artificial Sequence: Synthetic peptide
WGTTSPS

SEQ ID NO: 6817 - protein, 7 aa, synthetic construct
  REGION 1..7: note = Description of Artificial Sequence: Synthetic peptide
SIAGSTA

SEQ ID NO: 6818 - protein, 7 aa, synthetic construct
  REGION 1..7: note = Description of Artificial Sequence: Synthetic peptide
DVTEKSR

SEQ ID NO: 6819 - protein, 7 aa, synthetic construct
  REGION 1..7: note = Description of Artificial Sequence: Synthetic peptide
TIHQKSD

SEQ ID NO: 6820 - protein, 7 aa, synthetic construct
  REGION 1..7: note = Description of Artificial Sequence: Synthetic peptide
STDGRNT

SEQ ID NO: 6821 - protein, 7 aa, synthetic construct
  REGION 1..7: note = Description of Artificial Sequence: Synthetic peptide
GTERPNG

SEQ ID NO: 6822 - protein, 7 aa, synthetic construct
  REGION 1..7: note = Description of Artificial Sequence: Synthetic peptide
TNGNVPV

SEQ ID NO: 6823 - protein, 7 aa, synthetic construct
  REGION 1..7: note = Description of Artificial Sequence: Synthetic peptide
GGGSSQA

SEQ ID NO: 6824 - protein, 7 aa, synthetic construct
  REGION 1..7: note = Description of Artificial Sequence: Synthetic peptide
TGSGVNV

SEQ ID NO: 6825 - protein, 7 aa, synthetic construct
  REGION 1..7: note = Description of Artificial Sequence: Synthetic peptide
ALSKGSG

SEQ ID NO: 6826 - protein, 7 aa, synthetic construct
  REGION 1..7: note = Description of Artificial Sequence: Synthetic peptide
GKTDSMR

SEQ ID NO: 6827 - protein, 7 aa, synthetic construct
  REGION 1..7: note = Description of Artificial Sequence: Synthetic peptide
GVEGTRI

SEQ ID NO: 6828 - protein, 7 aa, synthetic construct
  REGION 1..7: note = Description of Artificial Sequence: Synthetic peptide
SGSDKAR

SEQ ID NO: 6829 - protein, 7 aa, synthetic construct
  REGION 1..7: note = Description of Artificial Sequence: Synthetic peptide
NVSSSNV

SEQ ID NO: 6830 - protein, 7 aa, synthetic construct
  REGION 1..7: note = Description of Artificial Sequence: Synthetic peptide
GLSSSTG

SEQ ID NO: 6831 - protein, 7 aa, synthetic construct
  REGION 1..7: note = Description of Artificial Sequence: Synthetic peptide
KESKESM

SEQ ID NO: 6832 - protein, 7 aa, synthetic construct
  REGION 1..7: note = Description of Artificial Sequence: Synthetic peptide
SGGSVNG

SEQ ID NO: 6833 - protein, 7 aa, synthetic construct
  REGION 1..7: note = Description of Artificial Sequence: Synthetic peptide
HASSSNT

SEQ ID NO: 6834 - protein, 7 aa, synthetic construct
  REGION 1..7: note = Description of Artificial Sequence: Synthetic peptide
EGGSTAT

SEQ ID NO: 6835 - protein, 7 aa, synthetic construct
  REGION 1..7: note = Description of Artificial Sequence: Synthetic peptide
ATSNNSV

SEQ ID NO: 6836 - protein, 7 aa, synthetic construct
  REGION 1..7: note = Description of Artificial Sequence: Synthetic peptide
NGKPNAS

SEQ ID NO: 6837 - protein, 7 aa, synthetic construct
  REGION 1..7: note = Description of Artificial Sequence: Synthetic peptide
VSGTNSA

SEQ ID NO: 6838 - protein, 7 aa, synthetic construct
  REGION 1..7: note = Description of Artificial Sequence: Synthetic peptide
AGTAKGV

SEQ ID NO: 6839 - protein, 7 aa, synthetic construct
  REGION 1..7: note = Description of Artificial Sequence: Synthetic peptide
LASQSQG

SEQ ID NO: 6840 - protein, 7 aa, synthetic construct
  REGION 1..7: note = Description of Artificial Sequence: Synthetic peptide
ASTGKVS

SEQ ID NO: 6841 - protein, 7 aa, synthetic construct
  REGION 1..7: note = Description of Artificial Sequence: Synthetic peptide
GQGGSGP

SEQ ID NO: 6842 - protein, 7 aa, synthetic construct
  REGION 1..7: note = Description of Artificial Sequence: Synthetic peptide
TKNTNVM

SEQ ID NO: 6843 - protein, 7 aa, synthetic construct
  REGION 1..7: note = Description of Artificial Sequence: Synthetic peptide
TSASAVT

SEQ ID NO: 6844 - protein, 7 aa, synthetic construct
  REGION 1..7: note = Description of Artificial Sequence: Synthetic peptide
GTTAQSS

SEQ ID NO: 6845 - protein, 7 aa, synthetic construct
  REGION 1..7: note = Description of Artificial Sequence: Synthetic peptide
TGDGKLH

SEQ ID NO: 6846 - protein, 7 aa, synthetic construct
  REGION 1..7: note = Description of Artificial Sequence: Synthetic peptide
NLNDTKG

SEQ ID NO: 6847 - protein, 7 aa, synthetic construct
  REGION 1..7: note = Description of Artificial Sequence: Synthetic peptide
DRNNEAR

SEQ ID NO: 6848 - protein, 7 aa, synthetic construct
  REGION 1..7: note = Description of Artificial Sequence: Synthetic peptide
HGNSSSH

SEQ ID NO: 6849 - protein, 7 aa, synthetic construct
  REGION 1..7: note = Description of Artificial Sequence: Synthetic peptide
GSLKAES

SEQ ID NO: 6850 - protein, 7 aa, synthetic construct
  REGION 1..7: note = Description of Artificial Sequence: Synthetic peptide
GATDKVN

SEQ ID NO: 6851 - protein, 7 aa, synthetic construct
  REGION 1..7: note = Description of Artificial Sequence: Synthetic peptide
VKSTASQ

SEQ ID NO: 6852 - protein, 7 aa, synthetic construct
  REGION 1..7: note = Description of Artificial Sequence: Synthetic peptide
SNQNSPT

SEQ ID NO: 6853 - protein, 7 aa, synthetic construct
  REGION 1..7: note = Description of Artificial Sequence: Synthetic peptide
STKGSNY

SEQ ID NO: 6854 - protein, 7 aa, synthetic construct
  REGION 1..7: note = Description of Artificial Sequence: Synthetic peptide
TTVSTSS

SEQ ID NO: 6855 - protein, 7 aa, synthetic construct
  REGION 1..7: note = Description of Artificial Sequence: Synthetic peptide
TSATSPV

SEQ ID NO: 6856 - protein, 7 aa, synthetic construct
  REGION 1..7: note = Description of Artificial Sequence: Synthetic peptide
QQEREVK

SEQ ID NO: 6857 - protein, 7 aa, synthetic construct
  REGION 1..7: note = Description of Artificial Sequence: Synthetic peptide
AVAKQSI

SEQ ID NO: 6858 - protein, 7 aa, synthetic construct
  REGION 1..7: note = Description of Artificial Sequence: Synthetic peptide
GDSRLNS

SEQ ID NO: 6859 - protein, 7 aa, synthetic construct
  REGION 1..7: note = Description of Artificial Sequence: Synthetic peptide
TDGSKVS

SEQ ID NO: 6860 - protein, 7 aa, synthetic construct
  REGION 1..7: note = Description of Artificial Sequence: Synthetic peptide
DRVGTSQ

SEQ ID NO: 6861 - protein, 7 aa, synthetic construct
  REGION 1..7: note = Description of Artificial Sequence: Synthetic peptide
GADTKLT

SEQ ID NO: 6862 - protein, 7 aa, synthetic construct
  REGION 1..7: note = Description of Artificial Sequence: Synthetic peptide
VQRTEQQ

SEQ ID NO: 6863 - protein, 7 aa, synthetic construct
  REGION 1..7: note = Description of Artificial Sequence: Synthetic peptide
NANSSPN

SEQ ID NO: 6864 - protein, 7 aa, synthetic construct
  REGION 1..7: note = Description of Artificial Sequence: Synthetic peptide
SSGSSSL

SEQ ID NO: 6865 - protein, 7 aa, synthetic construct
  REGION 1..7: note = Description of Artificial Sequence: Synthetic peptide
TGSTSNV

SEQ ID NO: 6866 - protein, 7 aa, synthetic construct
  REGION 1..7: note = Description of Artificial Sequence: Synthetic peptide
GLGEKSK

SEQ ID NO: 6867 - protein, 7 aa, synthetic construct
  REGION 1..7: note = Description of Artificial Sequence: Synthetic peptide
HAGKQNA

SEQ ID NO: 6868 - protein, 7 aa, synthetic construct
  REGION 1..7: note = Description of Artificial Sequence: Synthetic peptide
DRVSAPT

SEQ ID NO: 6869 - protein, 7 aa, synthetic construct
  REGION 1..7: note = Description of Artificial Sequence: Synthetic peptide
GGNGGSS

SEQ ID NO: 6870 - protein, 7 aa, synthetic construct
  REGION 1..7: note = Description of Artificial Sequence: Synthetic peptide
SDNRGTQ

SEQ ID NO: 6871 - protein, 7 aa, synthetic construct
  REGION 1..7: note = Description of Artificial Sequence: Synthetic peptide
NSGSPSQ

SEQ ID NO: 6872 - protein, 7 aa, synthetic construct
  REGION 1..7: note = Description of Artificial Sequence: Synthetic peptide
NSNERTQ

SEQ ID NO: 6873 - protein, 7 aa, synthetic construct
  REGION 1..7: note = Description of Artificial Sequence: Synthetic peptide
TGGSTGL

SEQ ID NO: 6874 - protein, 7 aa, synthetic construct
  REGION 1..7: note = Description of Artificial Sequence: Synthetic peptide
FSGNTAK

SEQ ID NO: 6875 - protein, 7 aa, synthetic construct
  REGION 1..7: note = Description of Artificial Sequence: Synthetic peptide
SGDTARS

SEQ ID NO: 6876 - protein, 7 aa, synthetic construct
  REGION 1..7: note = Description of Artificial Sequence: Synthetic peptide
ENGVSTR

SEQ ID NO: 6877 - protein, 7 aa, synthetic construct
  REGION 1..7: note = Description of Artificial Sequence: Synthetic peptide
SSSDSRA

SEQ ID NO: 6878 - protein, 7 aa, synthetic construct
  REGION 1..7: note = Description of Artificial Sequence: Synthetic peptide
NGGNAPG

SEQ ID NO: 6879 - protein, 7 aa, synthetic construct
  REGION 1..7: note = Description of Artificial Sequence: Synthetic peptide
TNGGTSR

SEQ ID NO: 6880 - protein, 7 aa, synthetic construct
  REGION 1..7: note = Description of Artificial Sequence: Synthetic peptide
ENGQPKT

SEQ ID NO: 6881 - protein, 7 aa, synthetic construct
  REGION 1..7: note = Description of Artificial Sequence: Synthetic peptide
APDLKGG

SEQ ID NO: 6882 - protein, 7 aa, synthetic construct
  REGION 1..7: note = Description of Artificial Sequence: Synthetic peptide
VVASANS

SEQ ID NO: 6883 - protein, 7 aa, synthetic construct
  REGION 1..7: note = Description of Artificial Sequence: Synthetic peptide
GANKSIG

SEQ ID NO: 6884 - protein, 7 aa, synthetic construct
  REGION 1..7: note = Description of Artificial Sequence: Synthetic peptide
TSGGGAP

SEQ ID NO: 6885 - protein, 7 aa, synthetic construct
  REGION 1..7: note = Description of Artificial Sequence: Synthetic peptide
VSSPASV

SEQ ID NO: 6886 - protein, 7 aa, synthetic construct
  REGION 1..7: note = Description of Artificial Sequence: Synthetic peptide
EGTNKVG

SEQ ID NO: 6887 - protein, 7 aa, synthetic construct
  REGION 1..7: note = Description of Artificial Sequence: Synthetic peptide
VASDKAH

SEQ ID NO: 6888 - protein, 7 aa, synthetic construct
  REGION 1..7: note = Description of Artificial Sequence: Synthetic peptide
SPSANGI

SEQ ID NO: 6889 - protein, 7 aa, synthetic construct
  REGION 1..7: note = Description of Artificial Sequence: Synthetic peptide
TSGTTPR

SEQ ID NO: 6890 - protein, 7 aa, synthetic construct
  REGION 1..7: note = Description of Artificial Sequence: Synthetic peptide
DAPARSV

SEQ ID NO: 6891 - protein, 7 aa, synthetic construct
  REGION 1..7: note = Description of Artificial Sequence: Synthetic peptide
SGSTSFS

SEQ ID NO: 6892 - protein, 7 aa, synthetic construct
  REGION 1..7: note = Description of Artificial Sequence: Synthetic peptide
QTETKGT

SEQ ID NO: 6893 - protein, 7 aa, synthetic construct
  REGION 1..7: note = Description of Artificial Sequence: Synthetic peptide
QQTNGKP

SEQ ID NO: 6894 - protein, 7 aa, synthetic construct
  REGION 1..7: note = Description of Artificial Sequence: Synthetic peptide
AQSNSHA

SEQ ID NO: 6895 - protein, 7 aa, synthetic construct
  REGION 1..7: note = Description of Artificial Sequence: Synthetic peptide
GAGSAAA

SEQ ID NO: 6896 - protein, 7 aa, synthetic construct
  REGION 1..7: note = Description of Artificial Sequence: Synthetic peptide
LQKSTPV

SEQ ID NO: 6897 - protein, 7 aa, synthetic construct
  REGION 1..7: note = Description of Artificial Sequence: Synthetic peptide
STNSKDR

SEQ ID NO: 6898 - protein, 7 aa, synthetic construct
  REGION 1..7: note = Description of Artificial Sequence: Synthetic peptide
SNGPPNT

SEQ ID NO: 6899 - protein, 7 aa, synthetic construct
  REGION 1..7: note = Description of Artificial Sequence: Synthetic peptide
GTQTDIR

SEQ ID NO: 6900 - protein, 7 aa, synthetic construct
  REGION 1..7: note = Description of Artificial Sequence: Synthetic peptide
GPTQSAT

SEQ ID NO: 6901 - protein, 7 aa, synthetic construct
  REGION 1..7: note = Description of Artificial Sequence: Synthetic peptide
ESSSRVA

SEQ ID NO: 6902 - protein, 7 aa, synthetic construct
  REGION 1..7: note = Description of Artificial Sequence: Synthetic peptide
APAESKS

SEQ ID NO: 6903 - protein, 7 aa, synthetic construct
  REGION 1..7: note = Description of Artificial Sequence: Synthetic peptide
SGSTHSV

SEQ ID NO: 6904 - protein, 7 aa, synthetic construct
  REGION 1..7: note = Description of Artificial Sequence: Synthetic peptide
ATGSSAN

SEQ ID NO: 6905 - protein, 7 aa, synthetic construct
  REGION 1..7: note = Description of Artificial Sequence: Synthetic peptide
STGKDNS

SEQ ID NO: 6906 - protein, 7 aa, synthetic construct
  REGION 1..7: note = Description of Artificial Sequence: Synthetic peptide
QRNESTV

SEQ ID NO: 6907 - protein, 7 aa, synthetic construct
  REGION 1..7: note = Description of Artificial Sequence: Synthetic peptide
EPQANRG

SEQ ID NO: 6908 - protein, 7 aa, synthetic construct
  REGION 1..7: note = Description of Artificial Sequence: Synthetic peptide
TVATPGT

SEQ ID NO: 6909 - protein, 7 aa, synthetic construct
  REGION 1..7: note = Description of Artificial Sequence: Synthetic peptide
TGGSGNS

SEQ ID NO: 6910 - protein, 7 aa, synthetic construct
  REGION 1..7: note = Description of Artificial Sequence: Synthetic peptide
MSGQNPS

SEQ ID NO: 6911 - protein, 7 aa, synthetic construct
  REGION 1..7: note = Description of Artificial Sequence: Synthetic peptide
QNQPNRG

SEQ ID NO: 6912 - protein, 7 aa, synthetic construct
  REGION 1..7: note = Description of Artificial Sequence: Synthetic peptide
HGSSTML

SEQ ID NO: 6913 - protein, 7 aa, synthetic construct
  REGION 1..7: note = Description of Artificial Sequence: Synthetic peptide
ESVSRNN

SEQ ID NO: 6914 - protein, 7 aa, synthetic construct
  REGION 1..7: note = Description of Artificial Sequence: Synthetic peptide
NSSSKAE

SEQ ID NO: 6915 - protein, 7 aa, synthetic construct
  REGION 1..7: note = Description of Artificial Sequence: Synthetic peptide
LTTNTSA

SEQ ID NO: 6916 - protein, 7 aa, synthetic construct
  REGION 1..7: note = Description of Artificial Sequence: Synthetic peptide
GHLPTSA

SEQ ID NO: 6917 - protein, 7 aa, synthetic construct
  REGION 1..7: note = Description of Artificial Sequence: Synthetic peptide
LGNQGVN

SEQ ID NO: 6918 - protein, 7 aa, synthetic construct
  REGION 1..7: note = Description of Artificial Sequence: Synthetic peptide
ASKNTPT

SEQ ID NO: 6919 - protein, 7 aa, synthetic construct
  REGION 1..7: note = Description of Artificial Sequence: Synthetic peptide
STANKSQ

SEQ ID NO: 6920 - protein, 7 aa, synthetic construct
  REGION 1..7: note = Description of Artificial Sequence: Synthetic peptide
GATKGQA

SEQ ID NO: 6921 - protein, 7 aa, synthetic construct
  REGION 1..7: note = Description of Artificial Sequence: Synthetic peptide
TANQSNL

SEQ ID NO: 6922 - protein, 7 aa, synthetic construct
  REGION 1..7: note = Description of Artificial Sequence: Synthetic peptide
ANLDPKT

SEQ ID NO: 6923 - protein, 7 aa, synthetic construct
  REGION 1..7: note = Description of Artificial Sequence: Synthetic peptide
HPASKPP

SEQ ID NO: 6924 - protein, 7 aa, synthetic construct
  REGION 1..7: note = Description of Artificial Sequence: Synthetic peptide
IPSDGSK

SEQ ID NO: 6925 - protein, 7 aa, synthetic construct
  REGION 1..7: note = Description of Artificial Sequence: Synthetic peptide
DGGSRDS

SEQ ID NO: 6926 - protein, 7 aa, synthetic construct
  REGION 1..7: note = Description of Artificial Sequence: Synthetic peptide
AATNKNQ

SEQ ID NO: 6927 - protein, 7 aa, synthetic construct
  REGION 1..7: note = Description of Artificial Sequence: Synthetic peptide
GNAASHA

SEQ ID NO: 6928 - protein, 7 aa, synthetic construct
  REGION 1..7: note = Description of Artificial Sequence: Synthetic peptide
GLSGPGK

SEQ ID NO: 6929 - protein, 7 aa, synthetic construct
  REGION 1..7: note = Description of Artificial Sequence: Synthetic peptide
DTGTSNR

SEQ ID NO: 6930 - protein, 7 aa, synthetic construct
  REGION 1..7: note = Description of Artificial Sequence: Synthetic peptide
DSGSQSR

SEQ ID NO: 6931 - protein, 7 aa, synthetic construct
  REGION 1..7: note = Description of Artificial Sequence: Synthetic peptide
GEPRANS

SEQ ID NO: 6932 - protein, 7 aa, synthetic construct
  REGION 1..7: note = Description of Artificial Sequence: Synthetic peptide
LTKSNSS

SEQ ID NO: 6933 - protein, 7 aa, synthetic construct
  REGION 1..7: note = Description of Artificial Sequence: Synthetic peptide
TRNKEVN

SEQ ID NO: 6934 - protein, 7 aa, synthetic construct
  REGION 1..7: note = Description of Artificial Sequence: Synthetic peptide
WGNSDKS

SEQ ID NO: 6935 - protein, 7 aa, synthetic construct
  REGION 1..7: note = Description of Artificial Sequence: Synthetic peptide
FGSNSGS

SEQ ID NO: 6936 - protein, 7 aa, synthetic construct
  REGION 1..7: note = Description of Artificial Sequence: Synthetic peptide
NGSDTQR

SEQ ID NO: 6937 - protein, 7 aa, synthetic construct
  REGION 1..7: note = Description of Artificial Sequence: Synthetic peptide
STATVPQ

SEQ ID NO: 6938 - protein, 7 aa, synthetic construct
  REGION 1..7: note = Description of Artificial Sequence: Synthetic peptide
SLGRSEG

SEQ ID NO: 6939 - protein, 7 aa, synthetic construct
  REGION 1..7: note = Description of Artificial Sequence: Synthetic peptide
ENHKPMI

SEQ ID NO: 6940 - protein, 7 aa, synthetic construct
  REGION 1..7: note = Description of Artificial Sequence: Synthetic peptide
AIDRQNG

SEQ ID NO: 6941 - protein, 7 aa, synthetic construct
  REGION 1..7: note = Description of Artificial Sequence: Synthetic peptide
GPEVALK

SEQ ID NO: 6942 - protein, 7 aa, synthetic construct
  REGION 1..7: note = Description of Artificial Sequence: Synthetic peptide
LGTTTTL

SEQ ID NO: 6943 - protein, 7 aa, synthetic construct
  REGION 1..7: note = Description of Artificial Sequence: Synthetic peptide
SRAAATV

SEQ ID NO: 6944 - protein, 7 aa, synthetic construct
  REGION 1..7: note = Description of Artificial Sequence: Synthetic peptide
SLGSHGS

SEQ ID NO: 6945 - protein, 7 aa, synthetic construct
  REGION 1..7: note = Description of Artificial Sequence: Synthetic peptide
HSTGSHG

SEQ ID NO: 6946 - protein, 7 aa, synthetic construct
  REGION 1..7: note = Description of Artificial Sequence: Synthetic peptide
LLKGASQ

SEQ ID NO: 6947 - protein, 7 aa, synthetic construct
  REGION 1..7: note = Description of Artificial Sequence: Synthetic peptide
ERGNAAS

SEQ ID NO: 6948 - protein, 7 aa, synthetic construct
  REGION 1..7: note = Description of Artificial Sequence: Synthetic peptide
EPATKGT

SEQ ID NO: 6949 - protein, 7 aa, synthetic construct
  REGION 1..7: note = Description of Artificial Sequence: Synthetic peptide
DDGRATV

SEQ ID NO: 6950 - protein, 7 aa, synthetic construct
  REGION 1..7: note = Description of Artificial Sequence: Synthetic peptide
RVTDKPS

SEQ ID NO: 6951 - protein, 7 aa, synthetic construct
  REGION 1..7: note = Description of Artificial Sequence: Synthetic peptide
TRNSPTQ

SEQ ID NO: 6952 - protein, 7 aa, synthetic construct
  REGION 1..7: note = Description of Artificial Sequence: Synthetic peptide
STGGSGT

SEQ ID NO: 6953 - protein, 7 aa, synthetic construct
  REGION 1..7: note = Description of Artificial Sequence: Synthetic peptide
SIASSGG

SEQ ID NO: 6954 - protein, 7 aa, synthetic construct
  REGION 1..7: note = Description of Artificial Sequence: Synthetic peptide
SHNTANS

SEQ ID NO: 6955 - protein, 7 aa, synthetic construct
  REGION 1..7: note = Description of Artificial Sequence: Synthetic peptide
QISDPKH

SEQ ID NO: 6956 - protein, 7 aa, synthetic construct
  REGION 1..7: note = Description of Artificial Sequence: Synthetic peptide
HNTSSPT

SEQ ID NO: 6957 - protein, 7 aa, synthetic construct
  REGION 1..7: note = Description of Artificial Sequence: Synthetic peptide
SKENVPV

SEQ ID NO: 6958 - protein, 7 aa, synthetic construct
  REGION 1..7: note = Description of Artificial Sequence: Synthetic peptide
HVDSGGG

SEQ ID NO: 6959 - protein, 7 aa, synthetic construct
  REGION 1..7: note = Description of Artificial Sequence: Synthetic peptide
AMSNESK

SEQ ID NO: 6960 - protein, 7 aa, synthetic construct
  REGION 1..7: note = Description of Artificial Sequence: Synthetic peptide
GEKAQKV

SEQ ID NO: 6961 - protein, 7 aa, synthetic construct
  REGION 1..7: note = Description of Artificial Sequence: Synthetic peptide
LSSGSSG

SEQ ID NO: 6962 - protein, 7 aa, synthetic construct
  REGION 1..7: note = Description of Artificial Sequence: Synthetic peptide
GVSNSSI

SEQ ID NO: 6963 - protein, 7 aa, synthetic construct
  REGION 1..7: note = Description of Artificial Sequence: Synthetic peptide
SSGTAIS

SEQ ID NO: 6964 - protein, 7 aa, synthetic construct
  REGION 1..7: note = Description of Artificial Sequence: Synthetic peptide
DKSSGGK

SEQ ID NO: 6965 - protein, 7 aa, synthetic construct
  REGION 1..7: note = Description of Artificial Sequence: Synthetic peptide
GSTGSGS

SEQ ID NO: 6966 - protein, 7 aa, synthetic construct
  REGION 1..7: note = Description of Artificial Sequence: Synthetic peptide
GADRPAG

SEQ ID NO: 6967 - protein, 7 aa, synthetic construct
  REGION 1..7: note = Description of Artificial Sequence: Synthetic peptide
MSHGSNS

SEQ ID NO: 6968 - protein, 7 aa, synthetic construct
  REGION 1..7: note = Description of Artificial Sequence: Synthetic peptide
IKQSPQS

SEQ ID NO: 6969 - protein, 7 aa, synthetic construct
  REGION 1..7: note = Description of Artificial Sequence: Synthetic peptide
SANGNNK

SEQ ID NO: 6970 - protein, 7 aa, synthetic construct
  REGION 1..7: note = Description of Artificial Sequence: Synthetic peptide
GAGASRS

SEQ ID NO: 6971 - protein, 7 aa, synthetic construct
  REGION 1..7: note = Description of Artificial Sequence: Synthetic peptide
SPQQTVS

SEQ ID NO: 6972 - protein, 7 aa, synthetic construct
  REGION 1..7: note = Description of Artificial Sequence: Synthetic peptide
NGNGAKL

SEQ ID NO: 6973 - protein, 7 aa, synthetic construct
  REGION 1..7: note = Description of Artificial Sequence: Synthetic peptide
GPKESNA

SEQ ID NO: 6974 - protein, 7 aa, synthetic construct
  REGION 1..7: note = Description of Artificial Sequence: Synthetic peptide
SNQSSPS

SEQ ID NO: 6975 - protein, 7 aa, synthetic construct
  REGION 1..7: note = Description of Artificial Sequence: Synthetic peptide
NSAQGGG

SEQ ID NO: 6976 - protein, 7 aa, synthetic construct
  REGION 1..7: note = Description of Artificial Sequence: Synthetic peptide
TGDRDRA

SEQ ID NO: 6977 - protein, 7 aa, synthetic construct
  REGION 1..7: note = Description of Artificial Sequence: Synthetic peptide
TNDSRPE

SEQ ID NO: 6978 - protein, 7 aa, synthetic construct
  REGION 1..7: note = Description of Artificial Sequence: Synthetic peptide
DSAGPRS

SEQ ID NO: 6979 - protein, 7 aa, synthetic construct
  REGION 1..7: note = Description of Artificial Sequence: Synthetic peptide
ATGKPGV

SEQ ID NO: 6980 - protein, 7 aa, synthetic construct
  REGION 1..7: note = Description of Artificial Sequence: Synthetic peptide
SGIKDSP

SEQ ID NO: 6981 - protein, 7 aa, synthetic construct
  REGION 1..7: note = Description of Artificial Sequence: Synthetic peptide
STHTPSS

SEQ ID NO: 6982 - protein, 7 aa, synthetic construct
  REGION 1..7: note = Description of Artificial Sequence: Synthetic peptide
NSSGNTP

SEQ ID NO: 6983 - protein, 7 aa, synthetic construct
  REGION 1..7: note = Description of Artificial Sequence: Synthetic peptide
QMAKSNE

SEQ ID NO: 6984 - protein, 7 aa, synthetic construct
  REGION 1..7: note = Description of Artificial Sequence: Synthetic peptide
DSNRVNV

SEQ ID NO: 6985 - protein, 7 aa, synthetic construct
  REGION 1..7: note = Description of Artificial Sequence: Synthetic peptide
SGVGSTL

SEQ ID NO: 6986 - protein, 7 aa, synthetic construct
  REGION 1..7: note = Description of Artificial Sequence: Synthetic peptide
TQKQAST

SEQ ID NO: 6987 - protein, 7 aa, synthetic construct
  REGION 1..7: note = Description of Artificial Sequence: Synthetic peptide
SAASTAS

SEQ ID NO: 6988 - protein, 7 aa, synthetic construct
  REGION 1..7: note = Description of Artificial Sequence: Synthetic peptide
GVASTSS

SEQ ID NO: 6989 - protein, 7 aa, synthetic construct
  REGION 1..7: note = Description of Artificial Sequence: Synthetic peptide
DGAKSSG

SEQ ID NO: 6990 - protein, 7 aa, synthetic construct
  REGION 1..7: note = Description of Artificial Sequence: Synthetic peptide
HATAGGS

SEQ ID NO: 6991 - protein, 7 aa, synthetic construct
  REGION 1..7: note = Description of Artificial Sequence: Synthetic peptide
SGSGSSV

SEQ ID NO: 6992 - protein, 7 aa, synthetic construct
  REGION 1..7: note = Description of Artificial Sequence: Synthetic peptide
GHGGTQN

SEQ ID NO: 6993 - protein, 7 aa, synthetic construct
  REGION 1..7: note = Description of Artificial Sequence: Synthetic peptide
SGTDKRS

SEQ ID NO: 6994 - protein, 7 aa, synthetic construct
  REGION 1..7: note = Description of Artificial Sequence: Synthetic peptide
DKEQKSM

SEQ ID NO: 6995 - protein, 7 aa, synthetic construct
  REGION 1..7: note = Description of Artificial Sequence: Synthetic peptide
NTGQRST

SEQ ID NO: 6996 - protein, 7 aa, synthetic construct
  REGION 1..7: note = Description of Artificial Sequence: Synthetic peptide
NLGAAAG

SEQ ID NO: 6997 - protein, 7 aa, synthetic construct
  REGION 1..7: note = Description of Artificial Sequence: Synthetic peptide
KGSTTVI

SEQ ID NO: 6998 - protein, 7 aa, synthetic construct
  REGION 1..7: note = Description of Artificial Sequence: Synthetic peptide
NATGTPV

SEQ ID NO: 6999 - protein, 7 aa, synthetic construct
  REGION 1..7: note = Description of Artificial Sequence: Synthetic peptide
TASASSG

SEQ ID NO: 7000 - protein, 7 aa, synthetic construct
  REGION 1..7: note = Description of Artificial Sequence: Synthetic peptide
TGTQTPG

SEQ ID NO: 7001 - protein, 7 aa, synthetic construct
  REGION 1..7: note = Description of Artificial Sequence: Synthetic peptide
STGAGAS

SEQ ID NO: 7002 - protein, 7 aa, synthetic construct
  REGION 1..7: note = Description of Artificial Sequence: Synthetic peptide
SLASKSG

SEQ ID NO: 7003 - protein, 7 aa, synthetic construct
  REGION 1..7: note = Description of Artificial Sequence: Synthetic peptide
SAMDSKR

SEQ ID NO: 7004 - protein, 7 aa, synthetic construct
  REGION 1..7: note = Description of Artificial Sequence: Synthetic peptide
RSTDKTT

SEQ ID NO: 7005 - protein, 7 aa, synthetic construct
  REGION 1..7: note = Description of Artificial Sequence: Synthetic peptide
ISSQQSH

SEQ ID NO: 7006 - protein, 7 aa, synthetic construct
  REGION 1..7: note = Description of Artificial Sequence: Synthetic peptide
QGGASLQ

SEQ ID NO: 7007 - protein, 7 aa, synthetic construct
  REGION 1..7: note = Description of Artificial Sequence: Synthetic peptide
HEEKSPR

SEQ ID NO: 7008 - protein, 7 aa, synthetic construct
  REGION 1..7: note = Description of Artificial Sequence: Synthetic peptide
LNHTNAG

SEQ ID NO: 7009 - protein, 7 aa, synthetic construct
  REGION 1..7: note = Description of Artificial Sequence: Synthetic peptide
LTTGERA

SEQ ID NO: 7010 - protein, 7 aa, synthetic construct
  REGION 1..7: note = Description of Artificial Sequence: Synthetic peptide
LSGTNAQ

SEQ ID NO: 7011 - protein, 7 aa, synthetic construct
  REGION 1..7: note = Description of Artificial Sequence: Synthetic peptide
DTGGSRH

SEQ ID NO: 7012 - protein, 7 aa, synthetic construct
  REGION 1..7: note = Description of Artificial Sequence: Synthetic peptide
ESRQSVQ

SEQ ID NO: 7013 - protein, 7 aa, synthetic construct
  REGION 1..7: note = Description of Artificial Sequence: Synthetic peptide
AGNTSRE

SEQ ID NO: 7014 - protein, 7 aa, synthetic construct
  REGION 1..7: note = Description of Artificial Sequence: Synthetic peptide
GPGASSS

SEQ ID NO: 7015 - protein, 7 aa, synthetic construct
  REGION 1..7: note = Description of Artificial Sequence: Synthetic peptide
SGSSALV

SEQ ID NO: 7016 - protein, 7 aa, synthetic construct
  REGION 1..7: note = Description of Artificial Sequence: Synthetic peptide
WRESKDI

SEQ ID NO: 7017 - protein, 7 aa, synthetic construct
  REGION 1..7: note = Description of Artificial Sequence: Synthetic peptide
GSGHKVL

SEQ ID NO: 7018 - protein, 7 aa, synthetic construct
  REGION 1..7: note = Description of Artificial Sequence: Synthetic peptide
ETTKQLG

SEQ ID NO: 7019 - protein, 7 aa, synthetic construct
  REGION 1..7: note = Description of Artificial Sequence: Synthetic peptide
HGTPSSV

SEQ ID NO: 7020 - protein, 7 aa, synthetic construct
  REGION 1..7: note = Description of Artificial Sequence: Synthetic peptide
ESSGERR

SEQ ID NO: 7021 - protein, 7 aa, synthetic construct
  REGION 1..7: note = Description of Artificial Sequence: Synthetic peptide
DKHGQPV

SEQ ID NO: 7022 - protein, 7 aa, synthetic construct
  REGION 1..7: note = Description of Artificial Sequence: Synthetic peptide
TQGGSSS

SEQ ID NO: 7023 - protein, 7 aa, synthetic construct
  REGION 1..7: note = Description of Artificial Sequence: Synthetic peptide
SRTASNV

SEQ ID NO: 7024 - protein, 7 aa, synthetic construct
  REGION 1..7: note = Description of Artificial Sequence: Synthetic peptide
VQKPTMA

SEQ ID NO: 7025 - protein, 7 aa, synthetic construct
  REGION 1..7: note = Description of Artificial Sequence: Synthetic peptide
TGNPSLT

SEQ ID NO: 7026 - protein, 7 aa, synthetic construct
  REGION 1..7: note = Description of Artificial Sequence: Synthetic peptide
GSHTPVT

SEQ ID NO: 7027 - protein, 7 aa, synthetic construct
  REGION 1..7: note = Description of Artificial Sequence: Synthetic peptide
TQQQSAT

SEQ ID NO: 7028 - protein, 7 aa, synthetic construct
  REGION 1..7: note = Description of Artificial Sequence: Synthetic peptide
TGVQTVG

SEQ ID NO: 7029 - protein, 7 aa, synthetic construct
  REGION 1..7: note = Description of Artificial Sequence: Synthetic peptide
SSTQTPS

SEQ ID NO: 7030 - protein, 7 aa, synthetic construct
  REGION 1..7: note = Description of Artificial Sequence: Synthetic peptide
ARGEHPI

SEQ ID NO: 7031 - protein, 7 aa, synthetic construct
  REGION 1..7: note = Description of Artificial Sequence: Synthetic peptide
NGKTGTA

SEQ ID NO: 7032 - protein, 7 aa, synthetic construct
  REGION 1..7: note = Description of Artificial Sequence: Synthetic peptide
ENTKSLA

SEQ ID NO: 7033 - protein, 7 aa, synthetic construct
  REGION 1..7: note = Description of Artificial Sequence: Synthetic peptide
GQGKEQG

SEQ ID NO: 7034 - protein, 7 aa, synthetic construct
  REGION 1..7: note = Description of Artificial Sequence: Synthetic peptide
TSSGTRN

SEQ ID NO: 7035 - protein, 7 aa, synthetic construct
  REGION 1..7: note = Description of Artificial Sequence: Synthetic peptide
VGVSNTQ

SEQ ID NO: 7036 - protein, 7 aa, synthetic construct
  REGION 1..7: note = Description of Artificial Sequence: Synthetic peptide
CLEPSNR

SEQ ID NO: 7037 - protein, 7 aa, synthetic construct
  REGION 1..7: note = Description of Artificial Sequence: Synthetic peptide
APEKDHR

SEQ ID NO: 7038 - protein, 7 aa, synthetic construct
  REGION 1..7: note = Description of Artificial Sequence: Synthetic peptide
SGDAVKQ

SEQ ID NO: 7039 - protein, 7 aa, synthetic construct
  REGION 1..7: note = Description of Artificial Sequence: Synthetic peptide
SSSSTIA

SEQ ID NO: 7040 - protein, 7 aa, synthetic construct
  REGION 1..7: note = Description of Artificial Sequence: Synthetic peptide
TATAAPM

SEQ ID NO: 7041 - protein, 7 aa, synthetic construct
  REGION 1..7: note = Description of Artificial Sequence: Synthetic peptide
ASSPGTT

SEQ ID NO: 7042 - protein, 7 aa, synthetic construct
  REGION 1..7: note = Description of Artificial Sequence: Synthetic peptide
SNSNKNG

SEQ ID NO: 7043 - protein, 7 aa, synthetic construct
  REGION 1..7: note = Description of Artificial Sequence: Synthetic peptide
AHQGSNT

SEQ ID NO: 7044 - protein, 7 aa, synthetic construct
  REGION 1..7: note = Description of Artificial Sequence: Synthetic peptide
GRSSQSG

SEQ ID NO: 7045 - protein, 7 aa, synthetic construct
  REGION 1..7: note = Description of Artificial Sequence: Synthetic peptide
SAAEKSA

SEQ ID NO: 7046 - protein, 7 aa, synthetic construct
  REGION 1..7: note = Description of Artificial Sequence: Synthetic peptide
VPDRTPV

SEQ ID NO: 7047 - protein, 7 aa, synthetic construct
  REGION 1..7: note = Description of Artificial Sequence: Synthetic peptide
NRDSSSS

SEQ ID NO: 7048 - protein, 7 aa, synthetic construct
  REGION 1..7: note = Description of Artificial Sequence: Synthetic peptide
SGDQKGS

SEQ ID NO: 7049 - protein, 7 aa, synthetic construct
  REGION 1..7: note = Description of Artificial Sequence: Synthetic peptide
ATQASSH

SEQ ID NO: 7050 - protein, 7 aa, synthetic construct
  REGION 1..7: note = Description of Artificial Sequence: Synthetic peptide
QTSPNGS

SEQ ID NO: 7051 - protein, 7 aa, synthetic construct
  REGION 1..7: note = Description of Artificial Sequence: Synthetic peptide
SGTPSLS

SEQ ID NO: 7052 - protein, 7 aa, synthetic construct
  REGION 1..7: note = Description of Artificial Sequence: Synthetic peptide
SMAGASR

SEQ ID NO: 7053 - protein, 7 aa, synthetic construct
  REGION 1..7: note = Description of Artificial Sequence: Synthetic peptide
MRTEQSM

SEQ ID NO: 7054 - protein, 7 aa, synthetic construct
  REGION 1..7: note = Description of Artificial Sequence: Synthetic peptide
GTGTHLQ

SEQ ID NO: 7055 - protein, 7 aa, synthetic construct
  REGION 1..7: note = Description of Artificial Sequence: Synthetic peptide
GQEERKY

SEQ ID NO: 7056 - protein, 7 aa, synthetic construct
  REGION 1..7: note = Description of Artificial Sequence: Synthetic peptide
SGSPTGL

SEQ ID NO: 7057 - protein, 7 aa, synthetic construct
  REGION 1..7: note = Description of Artificial Sequence: Synthetic peptide
GSTSSPN

SEQ ID NO: 7058 - protein, 7 aa, synthetic construct
  REGION 1..7: note = Description of Artificial Sequence: Synthetic peptide
GSNTPAL

SEQ ID NO: 7059 - protein, 7 aa, synthetic construct
  REGION 1..7: note = Description of Artificial Sequence: Synthetic peptide
RSGEHSV

SEQ ID NO: 7060 - protein, 7 aa, synthetic construct
  REGION 1..7: note = Description of Artificial Sequence: Synthetic peptide
SATKISS

SEQ ID NO: 7061 - protein, 7 aa, synthetic construct
  REGION 1..7: note = Description of Artificial Sequence: Synthetic peptide
SSGQGNG

SEQ ID NO: 7062 - protein, 7 aa, synthetic construct
  REGION 1..7: note = Description of Artificial Sequence: Synthetic peptide
QVHDGPK

SEQ ID NO: 7063 - protein, 7 aa, synthetic construct
  REGION 1..7: note = Description of Artificial Sequence: Synthetic peptide
NSEVRTS

SEQ ID NO: 7064 - protein, 7 aa, synthetic construct
  REGION 1..7: note = Description of Artificial Sequence: Synthetic peptide
RVGSAQG

SEQ ID NO: 7065 - protein, 7 aa, synthetic construct
  REGION 1..7: note = Description of Artificial Sequence: Synthetic peptide
LPTDGAK

SEQ ID NO: 7066 - protein, 7 aa, synthetic construct
  REGION 1..7: note = Description of Artificial Sequence: Synthetic peptide
ESSPSKG

SEQ ID NO: 7067 - protein, 7 aa, synthetic construct
  REGION 1..7: note = Description of Artificial Sequence: Synthetic peptide
AAGTTGT

SEQ ID NO: 7068 - protein, 7 aa, synthetic construct
  REGION 1..7: note = Description of Artificial Sequence: Synthetic peptide
AGDSTKL

SEQ ID NO: 7069 - protein, 7 aa, synthetic construct
  REGION 1..7: note = Description of Artificial Sequence: Synthetic peptide
GSTTSAG

SEQ ID NO: 7070 - protein, 7 aa, synthetic construct
  REGION 1..7: note = Description of Artificial Sequence: Synthetic peptide
VSSSQTS

SEQ ID NO: 7071 - protein, 7 aa, synthetic construct
  REGION 1..7: note = Description of Artificial Sequence: Synthetic peptide
TNGAPSQ

SEQ ID NO: 7072 - protein, 7 aa, synthetic construct
  REGION 1..7: note = Description of Artificial Sequence: Synthetic peptide
MGGQSGT

SEQ ID NO: 7073 - protein, 7 aa, synthetic construct
  REGION 1..7: note = Description of Artificial Sequence: Synthetic peptide
GSSTPSQ

SEQ ID NO: 7074 - protein, 7 aa, synthetic construct
  REGION 1..7: note = Description of Artificial Sequence: Synthetic peptide
SQGHSPT

SEQ ID NO: 7075 - protein, 7 aa, synthetic construct
  REGION 1..7: note = Description of Artificial Sequence: Synthetic peptide
MTGGSVA

SEQ ID NO: 7076 - protein, 7 aa, synthetic construct
  REGION 1..7: note = Description of Artificial Sequence: Synthetic peptide
EVKTPAV

SEQ ID NO: 7077 - protein, 7 aa, synthetic construct
  REGION 1..7: note = Description of Artificial Sequence: Synthetic peptide
SVSAPSR

SEQ ID NO: 7078 - protein, 7 aa, synthetic construct
  REGION 1..7: note = Description of Artificial Sequence: Synthetic peptide
GKVGANN

SEQ ID NO: 7079 - protein, 7 aa, synthetic construct
  REGION 1..7: note = Description of Artificial Sequence: Synthetic peptide
RDGNSTT

SEQ ID NO: 7080 - protein, 7 aa, synthetic construct
  REGION 1..7: note = Description of Artificial Sequence: Synthetic peptide
ENLAPSK

SEQ ID NO: 7081 - protein, 7 aa, synthetic construct
  REGION 1..7: note = Description of Artificial Sequence: Synthetic peptide
GISDKPT

SEQ ID NO: 7082 - protein, 7 aa, synthetic construct
  REGION 1..7: note = Description of Artificial Sequence: Synthetic peptide
TSSKVSS

SEQ ID NO: 7083 - protein, 7 aa, synthetic construct
  REGION 1..7: note = Description of Artificial Sequence: Synthetic peptide
LSAGGAG

SEQ ID NO: 7084 - protein, 7 aa, synthetic construct
  REGION 1..7: note = Description of Artificial Sequence: Synthetic peptide
QQQGKGP

SEQ ID NO: 7085 - protein, 7 aa, synthetic construct
  REGION 1..7: note = Description of Artificial Sequence: Synthetic peptide
LPQQNSK

SEQ ID NO: 7086 - protein, 7 aa, synthetic construct
  REGION 1..7: note = Description of Artificial Sequence: Synthetic peptide
GSSSPRE

SEQ ID NO: 7087 - protein, 7 aa, synthetic construct
  REGION 1..7: note = Description of Artificial Sequence: Synthetic peptide
TDSPTTK

SEQ ID NO: 7088 - protein, 7 aa, synthetic construct
  REGION 1..7: note = Description of Artificial Sequence: Synthetic peptide
TGSENRV

SEQ ID NO: 7089 - protein, 7 aa, synthetic construct
  REGION 1..7: note = Description of Artificial Sequence: Synthetic peptide
HKATTAV

SEQ ID NO: 7090 - protein, 7 aa, synthetic construct
  REGION 1..7: note = Description of Artificial Sequence: Synthetic peptide
LDNGKPP

SEQ ID NO: 7091 - protein, 7 aa, synthetic construct
  REGION 1..7: note = Description of Artificial Sequence: Synthetic peptide
SESRSSI

SEQ ID NO: 7092 - protein, 7 aa, synthetic construct
  REGION 1..7: note = Description of Artificial Sequence: Synthetic peptide
ESGQPAK

SEQ ID NO: 7093 - protein, 7 aa, synthetic construct
  REGION 1..7: note = Description of Artificial Sequence: Synthetic peptide
NAASAGA

SEQ ID NO: 7094 - protein, 7 aa, synthetic construct
  REGION 1..7: note = Description of Artificial Sequence: Synthetic peptide
HSESKLA

SEQ ID NO: 7095 - protein, 7 aa, synthetic construct
  REGION 1..7: note = Description of Artificial Sequence: Synthetic peptide
TPGDKTM

SEQ ID NO: 7096 - protein, 7 aa, synthetic construct
  REGION 1..7: note = Description of Artificial Sequence: Synthetic peptide
GIADSRT

SEQ ID NO: 7097 - protein, 7 aa, synthetic construct
  REGION 1..7: note = Description of Artificial Sequence: Synthetic peptide
GVDGKAT

SEQ ID NO: 7098 - protein, 7 aa, synthetic construct
  REGION 1..7: note = Description of Artificial Sequence: Synthetic peptide
DNHKPAQ

SEQ ID NO: 7099 - protein, 7 aa, synthetic construct
  REGION 1..7: note = Description of Artificial Sequence: Synthetic peptide
PPGQPQT

SEQ ID NO: 7100 - protein, 7 aa, synthetic construct
  REGION 1..7: note = Description of Artificial Sequence: Synthetic peptide
NNTSHPA

SEQ ID NO: 7101 - protein, 7 aa, synthetic construct
  REGION 1..7: note = Description of Artificial Sequence: Synthetic peptide
TGTSPSR

SEQ ID NO: 7102 - protein, 7 aa, synthetic construct
  REGION 1..7: note = Description of Artificial Sequence: Synthetic peptide
TGSPPPS

SEQ ID NO: 7103 - protein, 7 aa, synthetic construct
  REGION 1..7: note = Description of Artificial Sequence: Synthetic peptide
TGLKENP

SEQ ID NO: 7104 - protein, 7 aa, synthetic construct
  REGION 1..7: note = Description of Artificial Sequence: Synthetic peptide
SRNPSNS

SEQ ID NO: 7105 - protein, 7 aa, synthetic construct
  REGION 1..7: note = Description of Artificial Sequence: Synthetic peptide
LRTATSN

SEQ ID NO: 7106 - protein, 7 aa, synthetic construct
  REGION 1..7: note = Description of Artificial Sequence: Synthetic peptide
GDTQRSA

SEQ ID NO: 7107 - protein, 7 aa, synthetic construct
  REGION 1..7: note = Description of Artificial Sequence: Synthetic peptide
TQGKTNT

SEQ ID NO: 7108 - protein, 7 aa, synthetic construct
  REGION 1..7: note = Description of Artificial Sequence: Synthetic peptide
GTRATPQ

SEQ ID NO: 7109 - protein, 7 aa, synthetic construct
  REGION 1..7: note = Description of Artificial Sequence: Synthetic peptide
QSTKAVE

SEQ ID NO: 7110 - protein, 7 aa, synthetic construct
  REGION 1..7: note = Description of Artificial Sequence: Synthetic peptide
SSNSPTA

SEQ ID NO: 7111 - protein, 7 aa, synthetic construct
  REGION 1..7: note = Description of Artificial Sequence: Synthetic peptide
SQGSSLT

SEQ ID NO: 7112 - protein, 7 aa, synthetic construct
  REGION 1..7: note = Description of Artificial Sequence: Synthetic peptide
SHNSQGG

SEQ ID NO: 7113 - protein, 7 aa, synthetic construct
  REGION 1..7: note = Description of Artificial Sequence: Synthetic peptide
QGSSTST

SEQ ID NO: 7114 - protein, 7 aa, synthetic construct
  REGION 1..7: note = Description of Artificial Sequence: Synthetic peptide
QGKDASM

SEQ ID NO: 7115 - protein, 7 aa, synthetic construct
  REGION 1..7: note = Description of Artificial Sequence: Synthetic peptide
RMGAPTG

SEQ ID NO: 7116 - protein, 7 aa, synthetic construct
  REGION 1..7: note = Description of Artificial Sequence: Synthetic peptide
LDGTPSH

SEQ ID NO: 7117 - protein, 7 aa, synthetic construct
  REGION 1..7: note = Description of Artificial Sequence: Synthetic peptide
TTDTGNH

SEQ ID NO: 7118 - protein, 7 aa, synthetic construct
  REGION 1..7: note = Description of Artificial Sequence: Synthetic peptide
MSGQSSR

SEQ ID NO: 7119 - protein, 7 aa, synthetic construct
  REGION 1..7: note = Description of Artificial Sequence: Synthetic peptide
RTGSKSD

SEQ ID NO: 7120 - protein, 7 aa, synthetic construct
  REGION 1..7: note = Description of Artificial Sequence: Synthetic peptide
NVVRDSK

SEQ ID NO: 7121 - protein, 7 aa, synthetic construct
  REGION 1..7: note = Description of Artificial Sequence: Synthetic peptide
HTGSASA

SEQ ID NO: 7122 - protein, 7 aa, synthetic construct
  REGION 1..7: note = Description of Artificial Sequence: Synthetic peptide
DFSQKGM

SEQ ID NO: 7123 - protein, 7 aa, synthetic construct
  REGION 1..7: note = Description of Artificial Sequence: Synthetic peptide
GVSSSPA

SEQ ID NO: 7124 - protein, 7 aa, synthetic construct
  REGION 1..7: note = Description of Artificial Sequence: Synthetic peptide
SGQNKES

SEQ ID NO: 7125 - protein, 7 aa, synthetic construct
  REGION 1..7: note = Description of Artificial Sequence: Synthetic peptide
DGSRSGS

SEQ ID NO: 7126 - protein, 7 aa, synthetic construct
  REGION 1..7: note = Description of Artificial Sequence: Synthetic peptide
NSQSPSA

SEQ ID NO: 7127 - protein, 7 aa, synthetic construct
  REGION 1..7: note = Description of Artificial Sequence: Synthetic peptide
LTQGGNS

SEQ ID NO: 7128 - protein, 7 aa, synthetic construct
  REGION 1..7: note = Description of Artificial Sequence: Synthetic peptide
ARTAQPV

SEQ ID NO: 7129 - protein, 7 aa, synthetic construct
  REGION 1..7: note = Description of Artificial Sequence: Synthetic peptide
SADRVAT

SEQ ID NO: 7130 - protein, 7 aa, synthetic construct
  REGION 1..7: note = Description of Artificial Sequence: Synthetic peptide
GGPSANQ

SEQ ID NO: 7131 - protein, 7 aa, synthetic construct
  REGION 1..7: note = Description of Artificial Sequence: Synthetic peptide
TGTATSL

SEQ ID NO: 7132 - protein, 7 aa, synthetic construct
  REGION 1..7: note = Description of Artificial Sequence: Synthetic peptide
EKGNGST

SEQ ID NO: 7133 - protein, 7 aa, synthetic construct
  REGION 1..7: note = Description of Artificial Sequence: Synthetic peptide
VANASGG

SEQ ID NO: 7134 - protein, 7 aa, synthetic construct
  REGION 1..7: note = Description of Artificial Sequence: Synthetic peptide
SNDSKRV

SEQ ID NO: 7135 - protein, 7 aa, synthetic construct
  REGION 1..7: note = Description of Artificial Sequence: Synthetic peptide
SGEAKTK

SEQ ID NO: 7136 - protein, 7 aa, synthetic construct
  REGION 1..7: note = Description of Artificial Sequence: Synthetic peptide
QAGTSVN

SEQ ID NO: 7137 - protein, 7 aa, synthetic construct
  REGION 1..7: note = Description of Artificial Sequence: Synthetic peptide
ELPGGTK

SEQ ID NO: 7138 - protein, 7 aa, synthetic construct
  REGION 1..7: note = Description of Artificial Sequence: Synthetic peptide
GLGGERN

SEQ ID NO: 7139 - protein, 7 aa, synthetic construct
  REGION 1..7: note = Description of Artificial Sequence: Synthetic peptide
VPSQVGG

SEQ ID NO: 7140 - protein, 7 aa, synthetic construct
  REGION 1..7: note = Description of Artificial Sequence: Synthetic peptide
YRDDKTI

SEQ ID NO: 7141 - protein, 7 aa, synthetic construct
  REGION 1..7: note = Description of Artificial Sequence: Synthetic peptide
NSLDTSK

SEQ ID NO: 7142 - protein, 7 aa, synthetic construct
  REGION 1..7: note = Description of Artificial Sequence: Synthetic peptide
AGTQSTA

SEQ ID NO: 7143 - protein, 7 aa, synthetic construct
  REGION 1..7: note = Description of Artificial Sequence: Synthetic peptide
STVKGSQ

SEQ ID NO: 7144 - protein, 7 aa, synthetic construct
  REGION 1..7: note = Description of Artificial Sequence: Synthetic peptide
QLKSPSS

SEQ ID NO: 7145 - protein, 7 aa, synthetic construct
  REGION 1..7: note = Description of Artificial Sequence: Synthetic peptide
ASQERVA

SEQ ID NO: 7146 - protein, 7 aa, synthetic construct
  REGION 1..7: note = Description of Artificial Sequence: Synthetic peptide
ARSQTSS

SEQ ID NO: 7147 - protein, 7 aa, synthetic construct
  REGION 1..7: note = Description of Artificial Sequence: Synthetic peptide
GSSQGLT

SEQ ID NO: 7148 - protein, 7 aa, synthetic construct
  REGION 1..7: note = Description of Artificial Sequence: Synthetic peptide
ASHLKPP

SEQ ID NO: 7149 - protein, 7 aa, synthetic construct
  REGION 1..7: note = Description of Artificial Sequence: Synthetic peptide
ASTSPVV

SEQ ID NO: 7150 - protein, 7 aa, synthetic construct
  REGION 1..7: note = Description of Artificial Sequence: Synthetic peptide
LNSAKNS

SEQ ID NO: 7151 - protein, 7 aa, synthetic construct
  REGION 1..7: note = Description of Artificial Sequence: Synthetic peptide
GPEGGNR

SEQ ID NO: 7152 - protein, 7 aa, synthetic construct
  REGION 1..7: note = Description of Artificial Sequence: Synthetic peptide
SKGSGTL

SEQ ID NO: 7153 - protein, 7 aa, synthetic construct
  REGION 1..7: note = Description of Artificial Sequence: Synthetic peptide
DSKTPAR

SEQ ID NO: 7154 - protein, 7 aa, synthetic construct
  REGION 1..7: note = Description of Artificial Sequence: Synthetic peptide
SKSTGSV

SEQ ID NO: 7155 - protein, 7 aa, synthetic construct
  REGION 1..7: note = Description of Artificial Sequence: Synthetic peptide
LSGDAAR

SEQ ID NO: 7156 - protein, 7 aa, synthetic construct
  REGION 1..7: note = Description of Artificial Sequence: Synthetic peptide
LGSPVST

SEQ ID NO: 7157 - protein, 7 aa, synthetic construct
  REGION 1..7: note = Description of Artificial Sequence: Synthetic peptide
QATSSST

SEQ ID NO: 7158 - protein, 7 aa, synthetic construct
  REGION 1..7: note = Description of Artificial Sequence: Synthetic peptide
TGSNKSH

SEQ ID NO: 7159 - protein, 7 aa, synthetic construct
  REGION 1..7: note = Description of Artificial Sequence: Synthetic peptide
ETKTANK

SEQ ID NO: 7160 - protein, 7 aa, synthetic construct
  REGION 1..7: note = Description of Artificial Sequence: Synthetic peptide
GMTTAAG

SEQ ID NO: 7161 - protein, 7 aa, synthetic construct
  REGION 1..7: note = Description of Artificial Sequence: Synthetic peptide
TSVASTQ

SEQ ID NO: 7162 - protein, 7 aa, synthetic construct
  REGION 1..7: note = Description of Artificial Sequence: Synthetic peptide
TVAEKLG

SEQ ID NO: 7163 - protein, 7 aa, synthetic construct
  REGION 1..7: note = Description of Artificial Sequence: Synthetic peptide
ITGSTPP

SEQ ID NO: 7164 - protein, 7 aa, synthetic construct
  REGION 1..7: note = Description of Artificial Sequence: Synthetic peptide
DIGASHA

SEQ ID NO: 7165 - protein, 7 aa, synthetic construct
  REGION 1..7: note = Description of Artificial Sequence: Synthetic peptide
SSTSSTH

SEQ ID NO: 7166 - protein, 7 aa, synthetic construct
  REGION 1..7: note = Description of Artificial Sequence: Synthetic peptide
NNTPTLS

SEQ ID NO: 7167 - protein, 7 aa, synthetic construct
  REGION 1..7: note = Description of Artificial Sequence: Synthetic peptide
SSSSTSK

SEQ ID NO: 7168 - protein, 7 aa, synthetic construct
  REGION 1..7: note = Description of Artificial Sequence: Synthetic peptide
STGHSPH

SEQ ID NO: 7169 - protein, 7 aa, synthetic construct
  REGION 1..7: note = Description of Artificial Sequence: Synthetic peptide
NSSGAHT

SEQ ID NO: 7170 - protein, 7 aa, synthetic construct
  REGION 1..7: note = Description of Artificial Sequence: Synthetic peptide
TTGTSTP

SEQ ID NO: 7171 - protein, 7 aa, synthetic construct
  REGION 1..7: note = Description of Artificial Sequence: Synthetic peptide
QVGSNHS

SEQ ID NO: 7172 - protein, 7 aa, synthetic construct
  REGION 1..7: note = Description of Artificial Sequence: Synthetic peptide
DSRGPSS

SEQ ID NO: 7173 - protein, 7 aa, synthetic construct
  REGION 1..7: note = Description of Artificial Sequence: Synthetic peptide
HGAGNAA

SEQ ID NO: 7174 - protein, 7 aa, synthetic construct
  REGION 1..7: note = Description of Artificial Sequence: Synthetic peptide
VGSSTVM

SEQ ID NO: 7175 - protein, 7 aa, synthetic construct
  REGION 1..7: note = Description of Artificial Sequence: Synthetic peptide
EARSAHG

SEQ ID NO: 7176 - protein, 7 aa, synthetic construct
  REGION 1..7: note = Description of Artificial Sequence: Synthetic peptide
ATGTGNG

SEQ ID NO: 7177 - protein, 7 aa, synthetic construct
  REGION 1..7: note = Description of Artificial Sequence: Synthetic peptide
GSKANTL

SEQ ID NO: 7178 - protein, 7 aa, synthetic construct
  REGION 1..7: note = Description of Artificial Sequence: Synthetic peptide
TSGTGNQ

SEQ ID NO: 7179 - protein, 7 aa, synthetic construct
  REGION 1..7: note = Description of Artificial Sequence: Synthetic peptide
DRNGSQG

SEQ ID NO: 7180 - protein, 7 aa, synthetic construct
  REGION 1..7: note = Description of Artificial Sequence: Synthetic peptide
QQVNPKL

SEQ ID NO: 7181 - protein, 7 aa, synthetic construct
  REGION 1..7: note = Description of Artificial Sequence: Synthetic peptide
NGSLKPT

SEQ ID NO: 7182 - protein, 7 aa, synthetic construct
  REGION 1..7: note = Description of Artificial Sequence: Synthetic peptide
RNGSPNV

SEQ ID NO: 7183 - protein, 7 aa, synthetic construct
  REGION 1..7: note = Description of Artificial Sequence: Synthetic peptide
ESNKGIG

SEQ ID NO: 7184 - protein, 7 aa, synthetic construct
  REGION 1..7: note = Description of Artificial Sequence: Synthetic peptide
DTSPRNN

SEQ ID NO: 7185 - protein, 7 aa, synthetic construct
  REGION 1..7: note = Description of Artificial Sequence: Synthetic peptide
AGDSSRG

SEQ ID NO: 7186 - protein, 7 aa, synthetic construct
  REGION 1..7: note = Description of Artificial Sequence: Synthetic peptide
VGSREKG

SEQ ID NO: 7187 - protein, 7 aa, synthetic construct
  REGION 1..7: note = Description of Artificial Sequence: Synthetic peptide
SPSSKNS

SEQ ID NO: 7188 - protein, 7 aa, synthetic construct
  REGION 1..7: note = Description of Artificial Sequence: Synthetic peptide
RSQGASM

SEQ ID NO: 7189 - protein, 7 aa, synthetic construct
  REGION 1..7: note = Description of Artificial Sequence: Synthetic peptide
GTTPTSR

SEQ ID NO: 7190 - protein, 7 aa, synthetic construct
  REGION 1..7: note = Description of Artificial Sequence: Synthetic peptide
DGRVKNG

SEQ ID NO: 7191 - protein, 7 aa, synthetic construct
  REGION 1..7: note = Description of Artificial Sequence: Synthetic peptide
TQAVNGG

SEQ ID NO: 7192 - protein, 7 aa, synthetic construct
  REGION 1..7: note = Description of Artificial Sequence: Synthetic peptide
EQRATAQ

SEQ ID NO: 7193 - protein, 7 aa, synthetic construct
  REGION 1..7: note = Description of Artificial Sequence: Synthetic peptide
DLSGKSL

SEQ ID NO: 7194 - protein, 7 aa, synthetic construct
  REGION 1..7: note = Description of Artificial Sequence: Synthetic peptide
NTRSSTV

SEQ ID NO: 7195 - protein, 7 aa, synthetic construct
  REGION 1..7: note = Description of Artificial Sequence: Synthetic peptide
APSASPN

SEQ ID NO: 7196 - protein, 7 aa, synthetic construct
  REGION 1..7: note = Description of Artificial Sequence: Synthetic peptide
GSSKSPE

SEQ ID NO: 7197 - protein, 7 aa, synthetic construct
  REGION 1..7: note = Description of Artificial Sequence: Synthetic peptide
NGSDAKT

SEQ ID NO: 7198 - protein, 7 aa, synthetic construct
  REGION 1..7: note = Description of Artificial Sequence: Synthetic peptide
NSANQNH

SEQ ID NO: 7199 - protein, 7 aa, synthetic construct
  REGION 1..7: note = Description of Artificial Sequence: Synthetic peptide
SGGAPAV

SEQ ID NO: 7200 - protein, 7 aa, synthetic construct
  REGION 1..7: note = Description of Artificial Sequence: Synthetic peptide
LTSPAGA

SEQ ID NO: 7201 - protein, 7 aa, synthetic construct
  REGION 1..7: note = Description of Artificial Sequence: Synthetic peptide
DHSKDHS

SEQ ID NO: 7202 - protein, 7 aa, synthetic construct
  REGION 1..7: note = Description of Artificial Sequence: Synthetic peptide
ESGKPGL

SEQ ID NO: 7203 - protein, 7 aa, synthetic construct
  REGION 1..7: note = Description of Artificial Sequence: Synthetic peptide
VRDNSSQ

SEQ ID NO: 7204 - protein, 7 aa, synthetic construct
  REGION 1..7: note = Description of Artificial Sequence: Synthetic peptide
TQQSPSM

SEQ ID NO: 7205 - protein, 7 aa, synthetic construct
  REGION 1..7: note = Description of Artificial Sequence: Synthetic peptide
NGGSKSL

SEQ ID NO: 7206 - protein, 7 aa, synthetic construct
  REGION 1..7: note = Description of Artificial Sequence: Synthetic peptide
SPVSGGH

SEQ ID NO: 7207 - protein, 7 aa, synthetic construct
  REGION 1..7: note = Description of Artificial Sequence: Synthetic peptide
GRDDTRV

SEQ ID NO: 7208 - protein, 7 aa, synthetic construct
  REGION 1..7: note = Description of Artificial Sequence: Synthetic peptide
GMNSKLT

SEQ ID NO: 7209 - protein, 7 aa, synthetic construct
  REGION 1..7: note = Description of Artificial Sequence: Synthetic peptide
SGASATS

SEQ ID NO: 7210 - protein, 7 aa, synthetic construct
  REGION 1..7: note = Description of Artificial Sequence: Synthetic peptide
QGTMSNG

SEQ ID NO: 7211 - protein, 7 aa, synthetic construct
  REGION 1..7: note = Description of Artificial Sequence: Synthetic peptide
GGGTPLI

SEQ ID NO: 7212 - protein, 7 aa, synthetic construct
  REGION 1..7: note = Description of Artificial Sequence: Synthetic peptide
SQADSKQ

SEQ ID NO: 7213 - protein, 7 aa, synthetic construct
  REGION 1..7: note = Description of Artificial Sequence: Synthetic peptide
STSATNT

SEQ ID NO: 7214 - protein, 7 aa, synthetic construct
  REGION 1..7: note = Description of Artificial Sequence: Synthetic peptide
NSGEHAS

SEQ ID NO: 7215 - protein, 7 aa, synthetic construct
  REGION 1..7: note = Description of Artificial Sequence: Synthetic peptide
GPQPSKA

SEQ ID NO: 7216 - protein, 7 aa, synthetic construct
  REGION 1..7: note = Description of Artificial Sequence: Synthetic peptide
VNGTSKV

SEQ ID NO: 7217 - protein, 7 aa, synthetic construct
  REGION 1..7: note = Description of Artificial Sequence: Synthetic peptide
DVAKTSS

SEQ ID NO: 7218 - protein, 7 aa, synthetic construct
  REGION 1..7: note = Description of Artificial Sequence: Synthetic peptide
GTSPPGT

SEQ ID NO: 7219 - protein, 7 aa, synthetic construct
  REGION 1..7: note = Description of Artificial Sequence: Synthetic peptide
NPSPANV

SEQ ID NO: 7220 - protein, 7 aa, synthetic construct
  REGION 1..7: note = Description of Artificial Sequence: Synthetic peptide
QHTSTNA

SEQ ID NO: 7221 - protein, 7 aa, synthetic construct
  REGION 1..7: note = Description of Artificial Sequence: Synthetic peptide
VSSSTNS

SEQ ID NO: 7222 - protein, 7 aa, synthetic construct
  REGION 1..7: note = Description of Artificial Sequence: Synthetic peptide
LTSKGPS

SEQ ID NO: 7223 - protein, 7 aa, synthetic construct
  REGION 1..7: note = Description of Artificial Sequence: Synthetic peptide
RSNGSAG

SEQ ID NO: 7224 - protein, 7 aa, synthetic construct
  REGION 1..7: note = Description of Artificial Sequence: Synthetic peptide
SSNTSNV

SEQ ID NO: 7225 - protein, 7 aa, synthetic construct
  REGION 1..7: note = Description of Artificial Sequence: Synthetic peptide
NSKNNKE

SEQ ID NO: 7226 - protein, 7 aa, synthetic construct
  REGION 1..7: note = Description of Artificial Sequence: Synthetic peptide
NSQGNLG

SEQ ID NO: 7227 - protein, 7 aa, synthetic construct
  REGION 1..7: note = Description of Artificial Sequence: Synthetic peptide
NAGSHSQ

SEQ ID NO: 7228 - protein, 7 aa, synthetic construct
  REGION 1..7: note = Description of Artificial Sequence: Synthetic peptide
KVGQDRL

SEQ ID NO: 7229 - protein, 7 aa, synthetic construct
  REGION 1..7: note = Description of Artificial Sequence: Synthetic peptide
NGVASAT

SEQ ID NO: 7230 - protein, 7 aa, synthetic construct
  REGION 1..7: note = Description of Artificial Sequence: Synthetic peptide
TRSETSQ

SEQ ID NO: 7231 - protein, 7 aa, synthetic construct
  REGION 1..7: note = Description of Artificial Sequence: Synthetic peptide
TQVPAPS

SEQ ID NO: 7232 - protein, 7 aa, synthetic construct
  REGION 1..7: note = Description of Artificial Sequence: Synthetic peptide
TGKGSPN

SEQ ID NO: 7233 - protein, 7 aa, synthetic construct
  REGION 1..7: note = Description of Artificial Sequence: Synthetic peptide
SRVSSGT

SEQ ID NO: 7234 - protein, 7 aa, synthetic construct
  REGION 1..7: note = Description of Artificial Sequence: Synthetic peptide
IAGNTST

SEQ ID NO: 7235 - protein, 7 aa, synthetic construct
  REGION 1..7: note = Description of Artificial Sequence: Synthetic peptide
QASASSR

SEQ ID NO: 7236 - protein, 7 aa, synthetic construct
  REGION 1..7: note = Description of Artificial Sequence: Synthetic peptide
QGGSPPG

SEQ ID NO: 7237 - protein, 7 aa, synthetic construct
  REGION 1..7: note = Description of Artificial Sequence: Synthetic peptide
LMDQKSA

SEQ ID NO: 7238 - protein, 7 aa, synthetic construct
  REGION 1..7: note = Description of Artificial Sequence: Synthetic peptide
EGTNLRS

SEQ ID NO: 7239 - protein, 7 aa, synthetic construct
  REGION 1..7: note = Description of Artificial Sequence: Synthetic peptide
GKETRDK

SEQ ID NO: 7240 - protein, 7 aa, synthetic construct
  REGION 1..7: note = Description of Artificial Sequence: Synthetic peptide
GPGGRND

SEQ ID NO: 7241 - protein, 7 aa, synthetic construct
  REGION 1..7: note = Description of Artificial Sequence: Synthetic peptide
GNTRDSS

SEQ ID NO: 7242 - protein, 7 aa, synthetic construct
  REGION 1..7: note = Description of Artificial Sequence: Synthetic peptide
GSNSGAT

SEQ ID NO: 7243 - protein, 7 aa, synthetic construct
  REGION 1..7: note = Description of Artificial Sequence: Synthetic peptide
VSNKVQE

SEQ ID NO: 7244 - protein, 7 aa, synthetic construct
  REGION 1..7: note = Description of Artificial Sequence: Synthetic peptide
VQQSASR

SEQ ID NO: 7245 - protein, 7 aa, synthetic construct
  REGION 1..7: note = Description of Artificial Sequence: Synthetic peptide
FAASENR

SEQ ID NO: 7246 - protein, 7 aa, synthetic construct
  REGION 1..7: note = Description of Artificial Sequence: Synthetic peptide
QPKSSST

SEQ ID NO: 7247 - protein, 7 aa, synthetic construct
  REGION 1..7: note = Description of Artificial Sequence: Synthetic peptide
SSASNHT

SEQ ID NO: 7248 - protein, 7 aa, synthetic construct
  REGION 1..7: note = Description of Artificial Sequence: Synthetic peptide
DSVRSSG

SEQ ID NO: 7249 - protein, 7 aa, synthetic construct
  REGION 1..7: note = Description of Artificial Sequence: Synthetic peptide
NAVTTPN

SEQ ID NO: 7250 - protein, 7 aa, synthetic construct
  REGION 1..7: note = Description of Artificial Sequence: Synthetic peptide
VTAASNS

SEQ ID NO: 7251 - protein, 7 aa, synthetic construct
  REGION 1..7: note = Description of Artificial Sequence: Synthetic peptide
EPSSSKT

SEQ ID NO: 7252 - protein, 7 aa, synthetic construct
  REGION 1..7: note = Description of Artificial Sequence: Synthetic peptide
TPTNSKV

SEQ ID NO: 7253 - protein, 7 aa, synthetic construct
  REGION 1..7: note = Description of Artificial Sequence: Synthetic peptide
SGPTTVS

SEQ ID NO: 7254 - protein, 7 aa, synthetic construct
  REGION 1..7: note = Description of Artificial Sequence: Synthetic peptide
AMTSGSK

SEQ ID NO: 7255 - protein, 7 aa, synthetic construct
  REGION 1..7: note = Description of Artificial Sequence: Synthetic peptide
VNASSVQ

SEQ ID NO: 7256 - protein, 7 aa, synthetic construct
  REGION 1..7: note = Description of Artificial Sequence: Synthetic peptide
DSASSRG

SEQ ID NO: 7257 - protein, 7 aa, synthetic construct
  REGION 1..7: note = Description of Artificial Sequence: Synthetic peptide
GTGDRER

SEQ ID NO: 7258 - protein, 7 aa, synthetic construct
  REGION 1..7: note = Description of Artificial Sequence: Synthetic peptide
GSGGHNS

SEQ ID NO: 7259 - protein, 7 aa, synthetic construct
  REGION 1..7: note = Description of Artificial Sequence: Synthetic peptide
LTQGQTK

SEQ ID NO: 7260 - protein, 7 aa, synthetic construct
  REGION 1..7: note = Description of Artificial Sequence: Synthetic peptide
GGVESHQ

SEQ ID NO: 7261 - protein, 7 aa, synthetic construct
  REGION 1..7: note = Description of Artificial Sequence: Synthetic peptide
FGAGTSS

SEQ ID NO: 7262 - protein, 7 aa, synthetic construct
  REGION 1..7: note = Description of Artificial Sequence: Synthetic peptide
QRNSGNG

SEQ ID NO: 7263 - protein, 7 aa, synthetic construct
  REGION 1..7: note = Description of Artificial Sequence: Synthetic peptide
DTVTGKQ

SEQ ID NO: 7264 - protein, 7 aa, synthetic construct
  REGION 1..7: note = Description of Artificial Sequence: Synthetic peptide
AGSSTAA

SEQ ID NO: 7265 - protein, 7 aa, synthetic construct
  REGION 1..7: note = Description of Artificial Sequence: Synthetic peptide
RSENTPS

SEQ ID NO: 7266 - protein, 7 aa, synthetic construct
  REGION 1..7: note = Description of Artificial Sequence: Synthetic peptide
SFDNKGK

SEQ ID NO: 7267 - protein, 7 aa, synthetic construct
  REGION 1..7: note = Description of Artificial Sequence: Synthetic peptide
ERGTPGG

SEQ ID NO: 7268 - protein, 7 aa, synthetic construct
  REGION 1..7: note = Description of Artificial Sequence: Synthetic peptide
VGTSTIV

SEQ ID NO: 7269 - protein, 7 aa, synthetic construct
  REGION 1..7: note = Description of Artificial Sequence: Synthetic peptide
SGGKGAA

SEQ ID NO: 7270 - protein, 7 aa, synthetic construct
  REGION 1..7: note = Description of Artificial Sequence: Synthetic peptide
QSRPTVA

SEQ ID NO: 7271 - protein, 7 aa, synthetic construct
  REGION 1..7: note = Description of Artificial Sequence: Synthetic peptide
AGESAHS

SEQ ID NO: 7272 - protein, 7 aa, synthetic construct
  REGION 1..7: note = Description of Artificial Sequence: Synthetic peptide
STSTSSL

SEQ ID NO: 7273 - protein, 7 aa, synthetic construct
  REGION 1..7: note = Description of Artificial Sequence: Synthetic peptide
KPDAPGV

SEQ ID NO: 7274 - protein, 7 aa, synthetic construct
  REGION 1..7: note = Description of Artificial Sequence: Synthetic peptide
SSSTTAG

SEQ ID NO: 7275 - protein, 7 aa, synthetic construct
  REGION 1..7: note = Description of Artificial Sequence: Synthetic peptide
GRETPSL

SEQ ID NO: 7276 - protein, 7 aa, synthetic construct
  REGION 1..7: note = Description of Artificial Sequence: Synthetic peptide
SADSQKG

SEQ ID NO: 7277 - protein, 7 aa, synthetic construct
  REGION 1..7: note = Description of Artificial Sequence: Synthetic peptide
LGSGSGA

SEQ ID NO: 7278 - protein, 7 aa, synthetic construct
  REGION 1..7: note = Description of Artificial Sequence: Synthetic peptide
SNSERTS

SEQ ID NO: 7279 - protein, 7 aa, synthetic construct
  REGION 1..7: note = Description of Artificial Sequence: Synthetic peptide
SSPPSPS

SEQ ID NO: 7280 - protein, 7 aa, synthetic construct
  REGION 1..7: note = Description of Artificial Sequence: Synthetic peptide
DRAGTHN

SEQ ID NO: 7281 - protein, 7 aa, synthetic construct
  REGION 1..7: note = Description of Artificial Sequence: Synthetic peptide
LGTPSNG

SEQ ID NO: 7282 - protein, 7 aa, synthetic construct
  REGION 1..7: note = Description of Artificial Sequence: Synthetic peptide
EGSNKVV

SEQ ID NO: 7283 - protein, 7 aa, synthetic construct
  REGION 1..7: note = Description of Artificial Sequence: Synthetic peptide
GTSATAL

SEQ ID NO: 7284 - protein, 7 aa, synthetic construct
  REGION 1..7: note = Description of Artificial Sequence: Synthetic peptide
KQVSSPV

SEQ ID NO: 7285 - protein, 7 aa, synthetic construct
  REGION 1..7: note = Description of Artificial Sequence: Synthetic peptide
DATSSPQ

SEQ ID NO: 7286 - protein, 7 aa, synthetic construct
  REGION 1..7: note = Description of Artificial Sequence: Synthetic peptide
GQEHGVS

SEQ ID NO: 7287 - protein, 7 aa, synthetic construct
  REGION 1..7: note = Description of Artificial Sequence: Synthetic peptide
GVNSKAT

SEQ ID NO: 7288 - protein, 7 aa, synthetic construct
  REGION 1..7: note = Description of Artificial Sequence: Synthetic peptide
SPASTTK

SEQ ID NO: 7289 - protein, 7 aa, synthetic construct
  REGION 1..7: note = Description of Artificial Sequence: Synthetic peptide
ESTKPRD

SEQ ID NO: 7290 - protein, 7 aa, synthetic construct
  REGION 1..7: note = Description of Artificial Sequence: Synthetic peptide
NPSRESS

SEQ ID NO: 7291 - protein, 7 aa, synthetic construct
  REGION 1..7: note = Description of Artificial Sequence: Synthetic peptide
SESPKAG

SEQ ID NO: 7292 - protein, 7 aa, synthetic construct
  REGION 1..7: note = Description of Artificial Sequence: Synthetic peptide
NQSGDRS

SEQ ID NO: 7293 - protein, 7 aa, synthetic construct
  REGION 1..7: note = Description of Artificial Sequence: Synthetic peptide
AQGSSKT

SEQ ID NO: 7294 - protein, 7 aa, synthetic construct
  REGION 1..7: note = Description of Artificial Sequence: Synthetic peptide
RVDASNV

SEQ ID NO: 7295 - protein, 7 aa, synthetic construct
  REGION 1..7: note = Description of Artificial Sequence: Synthetic peptide
SKNGLQG

SEQ ID NO: 7296 - protein, 7 aa, synthetic construct
  REGION 1..7: note = Description of Artificial Sequence: Synthetic peptide
SDDSSRH

SEQ ID NO: 7297 - protein, 7 aa, synthetic construct
  REGION 1..7: note = Description of Artificial Sequence: Synthetic peptide
QHATSAG

SEQ ID NO: 7298 - protein, 7 aa, synthetic construct
  REGION 1..7: note = Description of Artificial Sequence: Synthetic peptide
DLGSHNR

SEQ ID NO: 7299 - protein, 7 aa, synthetic construct
  REGION 1..7: note = Description of Artificial Sequence: Synthetic peptide
APGGKMV

SEQ ID NO: 7300 - protein, 7 aa, synthetic construct
  REGION 1..7: note = Description of Artificial Sequence: Synthetic peptide
GSESRSG

SEQ ID NO: 7301 - protein, 7 aa, synthetic construct
  REGION 1..7: note = Description of Artificial Sequence: Synthetic peptide
VASSSTV

SEQ ID NO: 7302 - protein, 7 aa, synthetic construct
  REGION 1..7: note = Description of Artificial Sequence: Synthetic peptide
SGTSKAE

SEQ ID NO: 7303 - protein, 7 aa, synthetic construct
  REGION 1..7: note = Description of Artificial Sequence: Synthetic peptide
LGKDQIQ

SEQ ID NO: 7304 - protein, 7 aa, synthetic construct
  REGION 1..7: note = Description of Artificial Sequence: Synthetic peptide
VTSSSSQ

SEQ ID NO: 7305 - protein, 7 aa, synthetic construct
  REGION 1..7: note = Description of Artificial Sequence: Synthetic peptide
NKNQAAN

SEQ ID NO: 7306 - protein, 7 aa, synthetic construct
  REGION 1..7: note = Description of Artificial Sequence: Synthetic peptide
QGQQHSQ

SEQ ID NO: 7307 - protein, 7 aa, synthetic construct
  REGION 1..7: note = Description of Artificial Sequence: Synthetic peptide
LSDPQRG

SEQ ID NO: 7308 - protein, 7 aa, synthetic construct
  REGION 1..7: note = Description of Artificial Sequence: Synthetic peptide
GEKPGGN

SEQ ID NO: 7309 - protein, 7 aa, synthetic construct
  REGION 1..7: note = Description of Artificial Sequence: Synthetic peptide
GDISSKN

SEQ ID NO: 7310 - protein, 7 aa, synthetic construct
  REGION 1..7: note = Description of Artificial Sequence: Synthetic peptide
SSSTHSL

SEQ ID NO: 7311 - protein, 7 aa, synthetic construct
  REGION 1..7: note = Description of Artificial Sequence: Synthetic peptide
SSGNGHA

SEQ ID NO: 7312 - protein, 7 aa, synthetic construct
  REGION 1..7: note = Description of Artificial Sequence: Synthetic peptide
GDSSPKT

SEQ ID NO: 7313 - protein, 7 aa, synthetic construct
  REGION 1..7: note = Description of Artificial Sequence: Synthetic peptide
AVNSSAG

SEQ ID NO: 7314 - protein, 7 aa, synthetic construct
  REGION 1..7: note = Description of Artificial Sequence: Synthetic peptide
TTGSSST

SEQ ID NO: 7315 - protein, 7 aa, synthetic construct
  REGION 1..7: note = Description of Artificial Sequence: Synthetic peptide
SDGQTNR

SEQ ID NO: 7316 - protein, 7 aa, synthetic construct
  REGION 1..7: note = Description of Artificial Sequence: Synthetic peptide
SSSNSSQ

SEQ ID NO: 7317 - protein, 7 aa, synthetic construct
  REGION 1..7: note = Description of Artificial Sequence: Synthetic peptide
SSTPNGK

SEQ ID NO: 7318 - protein, 7 aa, synthetic construct
  REGION 1..7: note = Description of Artificial Sequence: Synthetic peptide
HPDSTGK

SEQ ID NO: 7319 - protein, 7 aa, synthetic construct
  REGION 1..7: note = Description of Artificial Sequence: Synthetic peptide
DSTKTSV

SEQ ID NO: 7320 - protein, 7 aa, synthetic construct
  REGION 1..7: note = Description of Artificial Sequence: Synthetic peptide
QVSAAAG

SEQ ID NO: 7321 - protein, 7 aa, synthetic construct
  REGION 1..7: note = Description of Artificial Sequence: Synthetic peptide
GDIKPSS

SEQ ID NO: 7322 - protein, 7 aa, synthetic construct
  REGION 1..7: note = Description of Artificial Sequence: Synthetic peptide
KTGNVSS

SEQ ID NO: 7323 - protein, 7 aa, synthetic construct
  REGION 1..7: note = Description of Artificial Sequence: Synthetic peptide
SSDSKTS

SEQ ID NO: 7324 - protein, 7 aa, synthetic construct
  REGION 1..7: note = Description of Artificial Sequence: Synthetic peptide
GTEPSHK

SEQ ID NO: 7325 - protein, 7 aa, synthetic construct
  REGION 1..7: note = Description of Artificial Sequence: Synthetic peptide
TTEKAQS

SEQ ID NO: 7326 - protein, 7 aa, synthetic construct
  REGION 1..7: note = Description of Artificial Sequence: Synthetic peptide
EKRDAVA

SEQ ID NO: 7327 - protein, 7 aa, synthetic construct
  REGION 1..7: note = Description of Artificial Sequence: Synthetic peptide
LGTSTSS

SEQ ID NO: 7328 - protein, 7 aa, synthetic construct
  REGION 1..7: note = Description of Artificial Sequence: Synthetic peptide
VQGSSAT

SEQ ID NO: 7329 - protein, 7 aa, synthetic construct
  REGION 1..7: note = Description of Artificial Sequence: Synthetic peptide
NLNLPKG

SEQ ID NO: 7330 - protein, 7 aa, synthetic construct
  REGION 1..7: note = Description of Artificial Sequence: Synthetic peptide
TVTSSRD

SEQ ID NO: 7331 - protein, 7 aa, synthetic construct
  REGION 1..7: note = Description of Artificial Sequence: Synthetic peptide
SLTSPAE

SEQ ID NO: 7332 - protein, 7 aa, synthetic construct
  REGION 1..7: note = Description of Artificial Sequence: Synthetic peptide
QRSQTSA

SEQ ID NO: 7333 - protein, 7 aa, synthetic construct
  REGION 1..7: note = Description of Artificial Sequence: Synthetic peptide
GTQSVPA

SEQ ID NO: 7334 - protein, 7 aa, synthetic construct
  REGION 1..7: note = Description of Artificial Sequence: Synthetic peptide
VASSSGG

SEQ ID NO: 7335 - protein, 7 aa, synthetic construct
  REGION 1..7: note = Description of Artificial Sequence: Synthetic peptide
SNTQPVS

SEQ ID NO: 7336 - protein, 7 aa, synthetic construct
  REGION 1..7: note = Description of Artificial Sequence: Synthetic peptide
DSKPSAL

SEQ ID NO: 7337 - protein, 7 aa, synthetic construct
  REGION 1..7: note = Description of Artificial Sequence: Synthetic peptide
GETSKVV

SEQ ID NO: 7338 - protein, 7 aa, synthetic construct
  REGION 1..7: note = Description of Artificial Sequence: Synthetic peptide
SGQASTH

SEQ ID NO: 7339 - protein, 7 aa, synthetic construct
  REGION 1..7: note = Description of Artificial Sequence: Synthetic peptide
DSHKTST

SEQ ID NO: 7340 - protein, 7 aa, synthetic construct
  REGION 1..7: note = Description of Artificial Sequence: Synthetic peptide
SVDKSTR

SEQ ID NO: 7341 - protein, 7 aa, synthetic construct
  REGION 1..7: note = Description of Artificial Sequence: Synthetic peptide
EVSPAAK

SEQ ID NO: 7342 - protein, 7 aa, synthetic construct
  REGION 1..7: note = Description of Artificial Sequence: Synthetic peptide
KDSGGHK

SEQ ID NO: 7343 - protein, 7 aa, synthetic construct
  REGION 1..7: note = Description of Artificial Sequence: Synthetic peptide
NKDTRPE

SEQ ID NO: 7344 - protein, 7 aa, synthetic construct
  REGION 1..7: note = Description of Artificial Sequence: Synthetic peptide
NKLGSAG

SEQ ID NO: 7345 - protein, 7 aa, synthetic construct
  REGION 1..7: note = Description of Artificial Sequence: Synthetic peptide
TTSAVSS

SEQ ID NO: 7346 - protein, 7 aa, synthetic construct
  REGION 1..7: note = Description of Artificial Sequence: Synthetic peptide
SGVGTHT

SEQ ID NO: 7347 - protein, 7 aa, synthetic construct
  REGION 1..7: note = Description of Artificial Sequence: Synthetic peptide
APTSGGQ

SEQ ID NO: 7348 - protein, 7 aa, synthetic construct
  REGION 1..7: note = Description of Artificial Sequence: Synthetic peptide
GEVKPSA

SEQ ID NO: 7349 - protein, 7 aa, synthetic construct
  REGION 1..7: note = Description of Artificial Sequence: Synthetic peptide
VSKPGGN

SEQ ID NO: 7350 - protein, 7 aa, synthetic construct
  REGION 1..7: note = Description of Artificial Sequence: Synthetic peptide
SSTKDQV

SEQ ID NO: 7351 - protein, 7 aa, synthetic construct
  REGION 1..7: note = Description of Artificial Sequence: Synthetic peptide
NGSNGQN

SEQ ID NO: 7352 - protein, 7 aa, synthetic construct
  REGION 1..7: note = Description of Artificial Sequence: Synthetic peptide
LPDAKGT

SEQ ID NO: 7353 - protein, 7 aa, synthetic construct
  REGION 1..7: note = Description of Artificial Sequence: Synthetic peptide
QSGTHSS

SEQ ID NO: 7354 - protein, 7 aa, synthetic construct
  REGION 1..7: note = Description of Artificial Sequence: Synthetic peptide
STNSSRD

SEQ ID NO: 7355 - protein, 7 aa, synthetic construct
  REGION 1..7: note = Description of Artificial Sequence: Synthetic peptide
TSNPTSG

SEQ ID NO: 7356 - protein, 7 aa, synthetic construct
  REGION 1..7: note = Description of Artificial Sequence: Synthetic peptide
VPVDGKQ

SEQ ID NO: 7357 - protein, 7 aa, synthetic construct
  REGION 1..7: note = Description of Artificial Sequence: Synthetic peptide
TATSKPD

SEQ ID NO: 7358 - protein, 7 aa, synthetic construct
  REGION 1..7: note = Description of Artificial Sequence: Synthetic peptide
DSTPATQ

SEQ ID NO: 7359 - protein, 7 aa, synthetic construct
  REGION 1..7: note = Description of Artificial Sequence: Synthetic peptide
DGASRAQ

SEQ ID NO: 7360 - protein, 7 aa, synthetic construct
  REGION 1..7: note = Description of Artificial Sequence: Synthetic peptide
SPQNTPS

SEQ ID NO: 7361 - protein, 7 aa, synthetic construct
  REGION 1..7: note = Description of Artificial Sequence: Synthetic peptide
RSNSPVE

SEQ ID NO: 7362 - protein, 7 aa, synthetic construct
  REGION 1..7: note = Description of Artificial Sequence: Synthetic peptide
KNGDRAS

SEQ ID NO: 7363 - protein, 7 aa, synthetic construct
  REGION 1..7: note = Description of Artificial Sequence: Synthetic peptide
NVEGSRT

SEQ ID NO: 7364 - protein, 7 aa, synthetic construct
  REGION 1..7: note = Description of Artificial Sequence: Synthetic peptide
SENRSPA

SEQ ID NO: 7365 - protein, 7 aa, synthetic construct
  REGION 1..7: note = Description of Artificial Sequence: Synthetic peptide
SRQAGSG

SEQ ID NO: 7366 - protein, 7 aa, synthetic construct
  REGION 1..7: note = Description of Artificial Sequence: Synthetic peptide
SGESKRG

SEQ ID NO: 7367 - protein, 7 aa, synthetic construct
  REGION 1..7: note = Description of Artificial Sequence: Synthetic peptide
DSNSRSI

SEQ ID NO: 7368 - protein, 7 aa, synthetic construct
  REGION 1..7: note = Description of Artificial Sequence: Synthetic peptide
SGANNSS

SEQ ID NO: 7369 - protein, 7 aa, synthetic construct
  REGION 1..7: note = Description of Artificial Sequence: Synthetic peptide
VGGPAPN

SEQ ID NO: 7370 - protein, 7 aa, synthetic construct
  REGION 1..7: note = Description of Artificial Sequence: Synthetic peptide
NGTQTSR

SEQ ID NO: 7371 - protein, 7 aa, synthetic construct
  REGION 1..7: note = Description of Artificial Sequence: Synthetic peptide
SADSNRS

SEQ ID NO: 7372 - protein, 7 aa, synthetic construct
  REGION 1..7: note = Description of Artificial Sequence: Synthetic peptide
GQNKTNH

SEQ ID NO: 7373 - protein, 7 aa, synthetic construct
  REGION 1..7: note = Description of Artificial Sequence: Synthetic peptide
NSGNENR

SEQ ID NO: 7374 - protein, 7 aa, synthetic construct
  REGION 1..7: note = Description of Artificial Sequence: Synthetic peptide
SSAGATS

SEQ ID NO: 7375 - protein, 7 aa, synthetic construct
  REGION 1..7: note = Description of Artificial Sequence: Synthetic peptide
SPVESSR

SEQ ID NO: 7376 - protein, 7 aa, synthetic construct
  REGION 1..7: note = Description of Artificial Sequence: Synthetic peptide
AGSREST

SEQ ID NO: 7377 - protein, 7 aa, synthetic construct
  REGION 1..7: note = Description of Artificial Sequence: Synthetic peptide
SQPPTGK

SEQ ID NO: 7378 - protein, 7 aa, synthetic construct
  REGION 1..7: note = Description of Artificial Sequence: Synthetic peptide
SAGSSIS

SEQ ID NO: 7379 - protein, 7 aa, synthetic construct
  REGION 1..7: note = Description of Artificial Sequence: Synthetic peptide
SGQSDKN

SEQ ID NO: 7380 - protein, 7 aa, synthetic construct
  REGION 1..7: note = Description of Artificial Sequence: Synthetic peptide
THTATSS

SEQ ID NO: 7381 - protein, 7 aa, synthetic construct
  REGION 1..7: note = Description of Artificial Sequence: Synthetic peptide
STAQRSE

SEQ ID NO: 7382 - protein, 7 aa, synthetic construct
  REGION 1..7: note = Description of Artificial Sequence: Synthetic peptide
GKETQSV

SEQ ID NO: 7383 - protein, 7 aa, synthetic construct
  REGION 1..7: note = Description of Artificial Sequence: Synthetic peptide
VSGEHSQ

SEQ ID NO: 7384 - protein, 7 aa, synthetic construct
  REGION 1..7: note = Description of Artificial Sequence: Synthetic peptide
SYGKTGS

SEQ ID NO: 7385 - protein, 7 aa, synthetic construct
  REGION 1..7: note = Description of Artificial Sequence: Synthetic peptide
QQTSDHR

SEQ ID NO: 7386 - protein, 7 aa, synthetic construct
  REGION 1..7: note = Description of Artificial Sequence: Synthetic peptide
TRGNPGT

SEQ ID NO: 7387 - protein, 7 aa, synthetic construct
  REGION 1..7: note = Description of Artificial Sequence: Synthetic peptide
QTSGKSN

SEQ ID NO: 7388 - protein, 7 aa, synthetic construct
  REGION 1..7: note = Description of Artificial Sequence: Synthetic peptide
MGNNTPS

SEQ ID NO: 7389 - protein, 7 aa, synthetic construct
  REGION 1..7: note = Description of Artificial Sequence: Synthetic peptide
HGVSTSN

SEQ ID NO: 7390 - protein, 7 aa, synthetic construct
  REGION 1..7: note = Description of Artificial Sequence: Synthetic peptide
QGHTNGK

SEQ ID NO: 7391 - protein, 7 aa, synthetic construct
  REGION 1..7: note = Description of Artificial Sequence: Synthetic peptide
VVTGSSK

SEQ ID NO: 7392 - protein, 7 aa, synthetic construct
  REGION 1..7: note = Description of Artificial Sequence: Synthetic peptide
SADRSGK

SEQ ID NO: 7393 - protein, 7 aa, synthetic construct
  REGION 1..7: note = Description of Artificial Sequence: Synthetic peptide
CDAKNTG

SEQ ID NO: 7394 - protein, 7 aa, synthetic construct
  REGION 1..7: note = Description of Artificial Sequence: Synthetic peptide
GTTKEHY

SEQ ID NO: 7395 - protein, 7 aa, synthetic construct
  REGION 1..7: note = Description of Artificial Sequence: Synthetic peptide
MPSKVAS

SEQ ID NO: 7396 - protein, 7 aa, synthetic construct
  REGION 1..7: note = Description of Artificial Sequence: Synthetic peptide
NGSGQKL

SEQ ID NO: 7397 - protein, 7 aa, synthetic construct
  REGION 1..7: note = Description of Artificial Sequence: Synthetic peptide
SGLTDKK

SEQ ID NO: 7398 - protein, 7 aa, synthetic construct
  REGION 1..7: note = Description of Artificial Sequence: Synthetic peptide
ENVSGIK

SEQ ID NO: 7399 - protein, 7 aa, synthetic construct
  REGION 1..7: note = Description of Artificial Sequence: Synthetic peptide
AGSSGKT

SEQ ID NO: 7400 - protein, 7 aa, synthetic construct
  REGION 1..7: note = Description of Artificial Sequence: Synthetic peptide
GMKQTST

SEQ ID NO: 7401 - protein, 7 aa, synthetic construct
  REGION 1..7: note = Description of Artificial Sequence: Synthetic peptide
SAAQQGN

SEQ ID NO: 7402 - protein, 7 aa, synthetic construct
  REGION 1..7: note = Description of Artificial Sequence: Synthetic peptide
SGDQHSR

SEQ ID NO: 7403 - protein, 7 aa, synthetic construct
  REGION 1..7: note = Description of Artificial Sequence: Synthetic peptide
VSNSKSE

SEQ ID NO: 7404 - protein, 7 aa, synthetic construct
  REGION 1..7: note = Description of Artificial Sequence: Synthetic peptide
TMSPSGH

SEQ ID NO: 7405 - protein, 7 aa, synthetic construct
  REGION 1..7: note = Description of Artificial Sequence: Synthetic peptide
SLTKGVG

SEQ ID NO: 7406 - protein, 7 aa, synthetic construct
  REGION 1..7: note = Description of Artificial Sequence: Synthetic peptide
SGTGEPR

SEQ ID NO: 7407 - protein, 7 aa, synthetic construct
  REGION 1..7: note = Description of Artificial Sequence: Synthetic peptide
HGTSPSM

SEQ ID NO: 7408 - protein, 7 aa, synthetic construct
  REGION 1..7: note = Description of Artificial Sequence: Synthetic peptide
GAKGSNL

SEQ ID NO: 7409 - protein, 7 aa, synthetic construct
  REGION 1..7: note = Description of Artificial Sequence: Synthetic peptide
GSGSSAQ

SEQ ID NO: 7410 - protein, 7 aa, synthetic construct
  REGION 1..7: note = Description of Artificial Sequence: Synthetic peptide
TLSQPNT

SEQ ID NO: 7411 - protein, 7 aa, synthetic construct
  REGION 1..7: note = Description of Artificial Sequence: Synthetic peptide
TTHNPSQ

SEQ ID NO: 7412 - protein, 7 aa, synthetic construct
  REGION 1..7: note = Description of Artificial Sequence: Synthetic peptide
SINQQGK

SEQ ID NO: 7413 - protein, 7 aa, synthetic construct
  REGION 1..7: note = Description of Artificial Sequence: Synthetic peptide
TQNSRAQ

SEQ ID NO: 7414 - protein, 7 aa, synthetic construct
  REGION 1..7: note = Description of Artificial Sequence: Synthetic peptide
QSDIKVN

SEQ ID NO: 7415 - protein, 7 aa, synthetic construct
  REGION 1..7: note = Description of Artificial Sequence: Synthetic peptide
LGTSSNG

SEQ ID NO: 7416 - protein, 7 aa, synthetic construct
  REGION 1..7: note = Description of Artificial Sequence: Synthetic peptide
SSGKTLT

SEQ ID NO: 7417 - protein, 7 aa, synthetic construct
  REGION 1..7: note = Description of Artificial Sequence: Synthetic peptide
TVASTNA

SEQ ID NO: 7418 - protein, 7 aa, synthetic construct
  REGION 1..7: note = Description of Artificial Sequence: Synthetic peptide
EVTKTGL

SEQ ID NO: 7419 - protein, 7 aa, synthetic construct
  REGION 1..7: note = Description of Artificial Sequence: Synthetic peptide
AVDNKNS

SEQ ID NO: 7420 - protein, 7 aa, synthetic construct
  REGION 1..7: note = Description of Artificial Sequence: Synthetic peptide
GRDSSPN

SEQ ID NO: 7421 - protein, 7 aa, synthetic construct
  REGION 1..7: note = Description of Artificial Sequence: Synthetic peptide
VTGPSTS

SEQ ID NO: 7422 - protein, 7 aa, synthetic construct
  REGION 1..7: note = Description of Artificial Sequence: Synthetic peptide
TTGTPSG

SEQ ID NO: 7423 - protein, 7 aa, synthetic construct
  REGION 1..7: note = Description of Artificial Sequence: Synthetic peptide
SKEGKPH

SEQ ID NO: 7424 - protein, 7 aa, synthetic construct
  REGION 1..7: note = Description of Artificial Sequence: Synthetic peptide
LTNTTSQ

SEQ ID NO: 7425 - protein, 7 aa, synthetic construct
  REGION 1..7: note = Description of Artificial Sequence: Synthetic peptide
ARDSKAQ

SEQ ID NO: 7426 - protein, 7 aa, synthetic construct
  REGION 1..7: note = Description of Artificial Sequence: Synthetic peptide
DRPTHQS

SEQ ID NO: 7427 - protein, 7 aa, synthetic construct
  REGION 1..7: note = Description of Artificial Sequence: Synthetic peptide
EGRPTSS

SEQ ID NO: 7428 - protein, 7 aa, synthetic construct
  REGION 1..7: note = Description of Artificial Sequence: Synthetic peptide
SIGSTNA

SEQ ID NO: 7429 - protein, 7 aa, synthetic construct
  REGION 1..7: note = Description of Artificial Sequence: Synthetic peptide
SESDPRK

SEQ ID NO: 7430 - protein, 7 aa, synthetic construct
  REGION 1..7: note = Description of Artificial Sequence: Synthetic peptide
NSQTHSG

SEQ ID NO: 7431 - protein, 7 aa, synthetic construct
  REGION 1..7: note = Description of Artificial Sequence: Synthetic peptide
SGKSDFS

SEQ ID NO: 7432 - protein, 7 aa, synthetic construct
  REGION 1..7: note = Description of Artificial Sequence: Synthetic peptide
MSGPSNS

SEQ ID NO: 7433 - protein, 7 aa, synthetic construct
  REGION 1..7: note = Description of Artificial Sequence: Synthetic peptide
QKADSVN

SEQ ID NO: 7434 - protein, 7 aa, synthetic construct
  REGION 1..7: note = Description of Artificial Sequence: Synthetic peptide
ATAPLKN

SEQ ID NO: 7435 - protein, 7 aa, synthetic construct
  REGION 1..7: note = Description of Artificial Sequence: Synthetic peptide
TSDAKLV

SEQ ID NO: 7436 - protein, 7 aa, synthetic construct
  REGION 1..7: note = Description of Artificial Sequence: Synthetic peptide
GSGSGSS

SEQ ID NO: 7437 - protein, 7 aa, synthetic construct
  REGION 1..7: note = Description of Artificial Sequence: Synthetic peptide
TQGDRAG

SEQ ID NO: 7438 - protein, 7 aa, synthetic construct
  REGION 1..7: note = Description of Artificial Sequence: Synthetic peptide
TRETDVR

SEQ ID NO: 7439 - protein, 7 aa, synthetic construct
  REGION 1..7: note = Description of Artificial Sequence: Synthetic peptide
DRATSSH

SEQ ID NO: 7440 - protein, 7 aa, synthetic construct
  REGION 1..7: note = Description of Artificial Sequence: Synthetic peptide
QPNNAQV

SEQ ID NO: 7441 - protein, 7 aa, synthetic construct
  REGION 1..7: note = Description of Artificial Sequence: Synthetic peptide
DPAKSAV

SEQ ID NO: 7442 - protein, 7 aa, synthetic construct
  REGION 1..7: note = Description of Artificial Sequence: Synthetic peptide
GSGKGGN

SEQ ID NO: 7443 - protein, 7 aa, synthetic construct
  REGION 1..7: note = Description of Artificial Sequence: Synthetic peptide
KRSDTTT

SEQ ID NO: 7444 - protein, 7 aa, synthetic construct
  REGION 1..7: note = Description of Artificial Sequence: Synthetic peptide
KDSGGNS

SEQ ID NO: 7445 - protein, 7 aa, synthetic construct
  REGION 1..7: note = Description of Artificial Sequence: Synthetic peptide
TVSPSHQ

SEQ ID NO: 7446 - protein, 7 aa, synthetic construct
  REGION 1..7: note = Description of Artificial Sequence: Synthetic peptide
SSPGKDQ

SEQ ID NO: 7447 - protein, 7 aa, synthetic construct
  REGION 1..7: note = Description of Artificial Sequence: Synthetic peptide
SQTPGNQ

SEQ ID NO: 7448 - protein, 7 aa, synthetic construct
  REGION 1..7: note = Description of Artificial Sequence: Synthetic peptide
HNASKIE

SEQ ID NO: 7449 - protein, 7 aa, synthetic construct
  REGION 1..7: note = Description of Artificial Sequence: Synthetic peptide
QRDSSPV

SEQ ID NO: 7450 - protein, 7 aa, synthetic construct
  REGION 1..7: note = Description of Artificial Sequence: Synthetic peptide
EATANTK

SEQ ID NO: 7451 - protein, 7 aa, synthetic construct
  REGION 1..7: note = Description of Artificial Sequence: Synthetic peptide
GFGQSKA

SEQ ID NO: 7452 - protein, 7 aa, synthetic construct
  REGION 1..7: note = Description of Artificial Sequence: Synthetic peptide
NSKATQS

SEQ ID NO: 7453 - protein, 7 aa, synthetic construct
  REGION 1..7: note = Description of Artificial Sequence: Synthetic peptide
TPAPSLT

SEQ ID NO: 7454 - protein, 7 aa, synthetic construct
  REGION 1..7: note = Description of Artificial Sequence: Synthetic peptide
EASVKGL

SEQ ID NO: 7455 - protein, 7 aa, synthetic construct
  REGION 1..7: note = Description of Artificial Sequence: Synthetic peptide
VNTPPSK

SEQ ID NO: 7456 - protein, 7 aa, synthetic construct
  REGION 1..7: note = Description of Artificial Sequence: Synthetic peptide
ANAVPAA

SEQ ID NO: 7457 - protein, 7 aa, synthetic construct
  REGION 1..7: note = Description of Artificial Sequence: Synthetic peptide
VTGTPIA

SEQ ID NO: 7458 - protein, 7 aa, synthetic construct
  REGION 1..7: note = Description of Artificial Sequence: Synthetic peptide
TVDKAAS

SEQ ID NO: 7459 - protein, 7 aa, synthetic construct
  REGION 1..7: note = Description of Artificial Sequence: Synthetic peptide
TGSGTPT

SEQ ID NO: 7460 - protein, 7 aa, synthetic construct
  REGION 1..7: note = Description of Artificial Sequence: Synthetic peptide
GQNSSIQ

SEQ ID NO: 7461 - protein, 7 aa, synthetic construct
  REGION 1..7: note = Description of Artificial Sequence: Synthetic peptide
VPNDHPV

SEQ ID NO: 7462 - protein, 7 aa, synthetic construct
  REGION 1..7: note = Description of Artificial Sequence: Synthetic peptide
HGDTPTK

SEQ ID NO: 7463 - protein, 7 aa, synthetic construct
  REGION 1..7: note = Description of Artificial Sequence: Synthetic peptide
AGNGPTS

SEQ ID NO: 7464 - protein, 7 aa, synthetic construct
  REGION 1..7: note = Description of Artificial Sequence: Synthetic peptide
GMKNAPT

SEQ ID NO: 7465 - protein, 7 aa, synthetic construct
  REGION 1..7: note = Description of Artificial Sequence: Synthetic peptide
GLKPSDK

SEQ ID NO: 7466 - protein, 7 aa, synthetic construct
  REGION 1..7: note = Description of Artificial Sequence: Synthetic peptide
TAQSSSH

SEQ ID NO: 7467 - protein, 7 aa, synthetic construct
  REGION 1..7: note = Description of Artificial Sequence: Synthetic peptide
SGQGTIL

SEQ ID NO: 7468 - protein, 7 aa, synthetic construct
  REGION 1..7: note = Description of Artificial Sequence: Synthetic peptide
LGGSSTT

SEQ ID NO: 7469 - protein, 7 aa, synthetic construct
  REGION 1..7: note = Description of Artificial Sequence: Synthetic peptide
LTSDKAS

SEQ ID NO: 7470 - protein, 7 aa, synthetic construct
  REGION 1..7: note = Description of Artificial Sequence: Synthetic peptide
NTTDHNR

SEQ ID NO: 7471 - protein, 7 aa, synthetic construct
  REGION 1..7: note = Description of Artificial Sequence: Synthetic peptide
QRVNSSA

SEQ ID NO: 7472 - protein, 7 aa, synthetic construct
  REGION 1..7: note = Description of Artificial Sequence: Synthetic peptide
TADRVGH

SEQ ID NO: 7473 - protein, 7 aa, synthetic construct
  REGION 1..7: note = Description of Artificial Sequence: Synthetic peptide
STGASNG

SEQ ID NO: 7474 - protein, 7 aa, synthetic construct
  REGION 1..7: note = Description of Artificial Sequence: Synthetic peptide
SGIASTA

SEQ ID NO: 7475 - protein, 7 aa, synthetic construct
  REGION 1..7: note = Description of Artificial Sequence: Synthetic peptide
SAPGTSS

SEQ ID NO: 7476 - protein, 7 aa, synthetic construct
  REGION 1..7: note = Description of Artificial Sequence: Synthetic peptide
GSGSNGS

SEQ ID NO: 7477 - protein, 7 aa, synthetic construct
  REGION 1..7: note = Description of Artificial Sequence: Synthetic peptide
SSSSTPS

SEQ ID NO: 7478 - protein, 7 aa, synthetic construct
  REGION 1..7: note = Description of Artificial Sequence: Synthetic peptide
ASVDSKS

SEQ ID NO: 7479 - protein, 7 aa, synthetic construct
  REGION 1..7: note = Description of Artificial Sequence: Synthetic peptide
TSNGSLT

SEQ ID NO: 7480 - protein, 7 aa, synthetic construct
  REGION 1..7: note = Description of Artificial Sequence: Synthetic peptide
RQESSKD

SEQ ID NO: 7481 - protein, 7 aa, synthetic construct
  REGION 1..7: note = Description of Artificial Sequence: Synthetic peptide
SGNSPNK

SEQ ID NO: 7482 - protein, 7 aa, synthetic construct
  REGION 1..7: note = Description of Artificial Sequence: Synthetic peptide
MGEKSTP

SEQ ID NO: 7483 - protein, 7 aa, synthetic construct
  REGION 1..7: note = Description of Artificial Sequence: Synthetic peptide
GAHQPSS

SEQ ID NO: 7484 - protein, 7 aa, synthetic construct
  REGION 1..7: note = Description of Artificial Sequence: Synthetic peptide
STTTANT

SEQ ID NO: 7485 - protein, 7 aa, synthetic construct
  REGION 1..7: note = Description of Artificial Sequence: Synthetic peptide
ERTDRPG

SEQ ID NO: 7486 - protein, 7 aa, synthetic construct
  REGION 1..7: note = Description of Artificial Sequence: Synthetic peptide
GVGQASS

SEQ ID NO: 7487 - protein, 7 aa, synthetic construct
  REGION 1..7: note = Description of Artificial Sequence: Synthetic peptide
TGVKDRP

SEQ ID NO: 7488 - protein, 7 aa, synthetic construct
  REGION 1..7: note = Description of Artificial Sequence: Synthetic peptide
KSGTPPV

SEQ ID NO: 7489 - protein, 7 aa, synthetic construct
  REGION 1..7: note = Description of Artificial Sequence: Synthetic peptide
TRETATS

SEQ ID NO: 7490 - protein, 7 aa, synthetic construct
  REGION 1..7: note = Description of Artificial Sequence: Synthetic peptide
QKSKDQA

SEQ ID NO: 7491 - protein, 7 aa, synthetic construct
  REGION 1..7: note = Description of Artificial Sequence: Synthetic peptide
DKGNGQL

SEQ ID NO: 7492 - protein, 7 aa, synthetic construct
  REGION 1..7: note = Description of Artificial Sequence: Synthetic peptide
GPDSNKS

SEQ ID NO: 7493 - protein, 7 aa, synthetic construct
  REGION 1..7: note = Description of Artificial Sequence: Synthetic peptide
ETTSNPR

SEQ ID NO: 7494 - protein, 7 aa, synthetic construct
  REGION 1..7: note = Description of Artificial Sequence: Synthetic peptide
SGTPPAS

SEQ ID NO: 7495 - protein, 7 aa, synthetic construct
  REGION 1..7: note = Description of Artificial Sequence: Synthetic peptide
SGSGHQS

SEQ ID NO: 7496 - protein, 7 aa, synthetic construct
  REGION 1..7: note = Description of Artificial Sequence: Synthetic peptide
AGSQSPL

SEQ ID NO: 7497 - protein, 7 aa, synthetic construct
  REGION 1..7: note = Description of Artificial Sequence: Synthetic peptide
GASSNQN

SEQ ID NO: 7498 - protein, 7 aa, synthetic construct
  REGION 1..7: note = Description of Artificial Sequence: Synthetic peptide
FTGKESV

SEQ ID NO: 7499 - protein, 7 aa, synthetic construct
  REGION 1..7: note = Description of Artificial Sequence: Synthetic peptide
NTPAKPT

SEQ ID NO: 7500 - protein, 7 aa, synthetic construct
  REGION 1..7: note = Description of Artificial Sequence: Synthetic peptide
MPDRSGS

SEQ ID NO: 7501 - protein, 7 aa, synthetic construct
  REGION 1..7: note = Description of Artificial Sequence: Synthetic peptide
QNNSHSA

SEQ ID NO: 7502 - protein, 7 aa, synthetic construct
  REGION 1..7: note = Description of Artificial Sequence: Synthetic peptide
ASSGQHP

SEQ ID NO: 7503 - protein, 7 aa, synthetic construct
  REGION 1..7: note = Description of Artificial Sequence: Synthetic peptide
GGQDDRK

SEQ ID NO: 7504 - protein, 7 aa, synthetic construct
  REGION 1..7: note = Description of Artificial Sequence: Synthetic peptide
NTSSKSG

SEQ ID NO: 7505 - protein, 7 aa, synthetic construct
  REGION 1..7: note = Description of Artificial Sequence: Synthetic peptide
VSDKSVS

SEQ ID NO: 7506 - protein, 7 aa, synthetic construct
  REGION 1..7: note = Description of Artificial Sequence: Synthetic peptide
GSEGTNS

SEQ ID NO: 7507 - protein, 7 aa, synthetic construct
  REGION 1..7: note = Description of Artificial Sequence: Synthetic peptide
NVGGGSG

SEQ ID NO: 7508 - protein, 7 aa, synthetic construct
  REGION 1..7: note = Description of Artificial Sequence: Synthetic peptide
ETSSTPS

SEQ ID NO: 7509 - protein, 7 aa, synthetic construct
  REGION 1..7: note = Description of Artificial Sequence: Synthetic peptide
GGPTEPK

SEQ ID NO: 7510 - protein, 7 aa, synthetic construct
  REGION 1..7: note = Description of Artificial Sequence: Synthetic peptide
VTDKSSN

SEQ ID NO: 7511 - protein, 7 aa, synthetic construct
  REGION 1..7: note = Description of Artificial Sequence: Synthetic peptide
QMGATPN

SEQ ID NO: 7512 - protein, 7 aa, synthetic construct
  REGION 1..7: note = Description of Artificial Sequence: Synthetic peptide
TPSSSTT

SEQ ID NO: 7513 - protein, 7 aa, synthetic construct
  REGION 1..7: note = Description of Artificial Sequence: Synthetic peptide
DNMSKQL

SEQ ID NO: 7514 - protein, 7 aa, synthetic construct
  REGION 1..7: note = Description of Artificial Sequence: Synthetic peptide
ETQRPNA

SEQ ID NO: 7515 - protein, 7 aa, synthetic construct
  REGION 1..7: note = Description of Artificial Sequence: Synthetic peptide
NGVTNNR

SEQ ID NO: 7516 - protein, 7 aa, synthetic construct
  REGION 1..7: note = Description of Artificial Sequence: Synthetic peptide
SLNGSRG

SEQ ID NO: 7517 - protein, 7 aa, synthetic construct
  REGION 1..7: note = Description of Artificial Sequence: Synthetic peptide
NGLNVKG

SEQ ID NO: 7518 - protein, 7 aa, synthetic construct
  REGION 1..7: note = Description of Artificial Sequence: Synthetic peptide
TGESQVK

SEQ ID NO: 7519 - protein, 7 aa, synthetic construct
  REGION 1..7: note = Description of Artificial Sequence: Synthetic peptide
TGGSSTL

SEQ ID NO: 7520 - protein, 7 aa, synthetic construct
  REGION 1..7: note = Description of Artificial Sequence: Synthetic peptide
ERATHTQ

SEQ ID NO: 7521 - protein, 7 aa, synthetic construct
  REGION 1..7: note = Description of Artificial Sequence: Synthetic peptide
SSTPRVA

SEQ ID NO: 7522 - protein, 7 aa, synthetic construct
  REGION 1..7: note = Description of Artificial Sequence: Synthetic peptide
SSSPTNH

SEQ ID NO: 7523 - protein, 7 aa, synthetic construct
  REGION 1..7: note = Description of Artificial Sequence: Synthetic peptide
TVNSGSG

SEQ ID NO: 7524 - protein, 7 aa, synthetic construct
  REGION 1..7: note = Description of Artificial Sequence: Synthetic peptide
HAGNAPV

SEQ ID NO: 7525 - protein, 7 aa, synthetic construct
  REGION 1..7: note = Description of Artificial Sequence: Synthetic peptide
GQAETLK

SEQ ID NO: 7526 - protein, 7 aa, synthetic construct
  REGION 1..7: note = Description of Artificial Sequence: Synthetic peptide
GAKSQAV

SEQ ID NO: 7527 - protein, 7 aa, synthetic construct
  REGION 1..7: note = Description of Artificial Sequence: Synthetic peptide
TLSDRGS

SEQ ID NO: 7528 - protein, 7 aa, synthetic construct
  REGION 1..7: note = Description of Artificial Sequence: Synthetic peptide
SGTSHTQ

SEQ ID NO: 7529 - protein, 7 aa, synthetic construct
  REGION 1..7: note = Description of Artificial Sequence: Synthetic peptide
REGAPPA

SEQ ID NO: 7530 - protein, 7 aa, synthetic construct
  REGION 1..7: note = Description of Artificial Sequence: Synthetic peptide
TATTTGS

SEQ ID NO: 7531 - protein, 7 aa, synthetic construct
  REGION 1..7: note = Description of Artificial Sequence: Synthetic peptide
QGQNQTR

SEQ ID NO: 7532 - protein, 7 aa, synthetic construct
  REGION 1..7: note = Description of Artificial Sequence: Synthetic peptide
LDPSKSS

SEQ ID NO: 7533 - protein, 7 aa, synthetic construct
  REGION 1..7: note = Description of Artificial Sequence: Synthetic peptide
DTNHSTK

SEQ ID NO: 7534 - protein, 7 aa, synthetic construct
  REGION 1..7: note = Description of Artificial Sequence: Synthetic peptide
GEKSSLS

SEQ ID NO: 7535 - protein, 7 aa, synthetic construct
  REGION 1..7: note = Description of Artificial Sequence: Synthetic peptide
SHSNNGS

SEQ ID NO: 7536 - protein, 7 aa, synthetic construct
  REGION 1..7: note = Description of Artificial Sequence: Synthetic peptide
SQVKPTS

SEQ ID NO: 7537 - protein, 7 aa, synthetic construct
  REGION 1..7: note = Description of Artificial Sequence: Synthetic peptide
ASKERNM

SEQ ID NO: 7538 - protein, 7 aa, synthetic construct
  REGION 1..7: note = Description of Artificial Sequence: Synthetic peptide
TANSAST

SEQ ID NO: 7539 - protein, 7 aa, synthetic construct
  REGION 1..7: note = Description of Artificial Sequence: Synthetic peptide
RGLPDKN

SEQ ID NO: 7540 - protein, 7 aa, synthetic construct
  REGION 1..7: note = Description of Artificial Sequence: Synthetic peptide
NASDRGG

SEQ ID NO: 7541 - protein, 7 aa, synthetic construct
  REGION 1..7: note = Description of Artificial Sequence: Synthetic peptide
SANSKLG

SEQ ID NO: 7542 - protein, 7 aa, synthetic construct
  REGION 1..7: note = Description of Artificial Sequence: Synthetic peptide
LSDGKGN

SEQ ID NO: 7543 - protein, 7 aa, synthetic construct
  REGION 1..7: note = Description of Artificial Sequence: Synthetic peptide
GGKSHGG

SEQ ID NO: 7544 - protein, 7 aa, synthetic construct
  REGION 1..7: note = Description of Artificial Sequence: Synthetic peptide
GDNKLNQ

SEQ ID NO: 7545 - protein, 7 aa, synthetic construct
  REGION 1..7: note = Description of Artificial Sequence: Synthetic peptide
CSGQSNK

SEQ ID NO: 7546 - protein, 7 aa, synthetic construct
  REGION 1..7: note = Description of Artificial Sequence: Synthetic peptide
LVTKASQ

SEQ ID NO: 7547 - protein, 7 aa, synthetic construct
  REGION 1..7: note = Description of Artificial Sequence: Synthetic peptide
STRTDNR

SEQ ID NO: 7548 - protein, 7 aa, synthetic construct
  REGION 1..7: note = Description of Artificial Sequence: Synthetic peptide
GKNTAAV

SEQ ID NO: 7549 - protein, 7 aa, synthetic construct
  REGION 1..7: note = Description of Artificial Sequence: Synthetic peptide
TNGTHAG

SEQ ID NO: 7550 - protein, 7 aa, synthetic construct
  REGION 1..7: note = Description of Artificial Sequence: Synthetic peptide
TGSGVKS

SEQ ID NO: 7551 - protein, 7 aa, synthetic construct
  REGION 1..7: note = Description of Artificial Sequence: Synthetic peptide
SDKATDR

SEQ ID NO: 7552 - protein, 7 aa, synthetic construct
  REGION 1..7: note = Description of Artificial Sequence: Synthetic peptide
DQSAARN

SEQ ID NO: 7553 - protein, 7 aa, synthetic construct
  REGION 1..7: note = Description of Artificial Sequence: Synthetic peptide
GRSTDVK

SEQ ID NO: 7554 - protein, 7 aa, synthetic construct
  REGION 1..7: note = Description of Artificial Sequence: Synthetic peptide
VANSSTA

SEQ ID NO: 7555 - protein, 7 aa, synthetic construct
  REGION 1..7: note = Description of Artificial Sequence: Synthetic peptide
AQKSSVN

SEQ ID NO: 7556 - protein, 7 aa, synthetic construct
  REGION 1..7: note = Description of Artificial Sequence: Synthetic peptide
NTSGKGL

SEQ ID NO: 7557 - protein, 7 aa, synthetic construct
  REGION 1..7: note = Description of Artificial Sequence: Synthetic peptide
SGNNVTS

SEQ ID NO: 7558 - protein, 7 aa, synthetic construct
  REGION 1..7: note = Description of Artificial Sequence: Synthetic peptide
MGSGAKE

SEQ ID NO: 7559 - protein, 7 aa, synthetic construct
  REGION 1..7: note = Description of Artificial Sequence: Synthetic peptide
NSIGKSD

SEQ ID NO: 7560 - protein, 7 aa, synthetic construct
  REGION 1..7: note = Description of Artificial Sequence: Synthetic peptide
SRDSGAL

SEQ ID NO: 7561 - protein, 7 aa, synthetic construct
  REGION 1..7: note = Description of Artificial Sequence: Synthetic peptide
DSYADKK

SEQ ID NO: 7562 - protein, 7 aa, synthetic construct
  REGION 1..7: note = Description of Artificial Sequence: Synthetic peptide
AHSSATS

SEQ ID NO: 7563 - protein, 7 aa, synthetic construct
  REGION 1..7: note = Description of Artificial Sequence: Synthetic peptide
TVGNSPT

SEQ ID NO: 7564 - protein, 7 aa, synthetic construct
  REGION 1..7: note = Description of Artificial Sequence: Synthetic peptide
DAANPQK

SEQ ID NO: 7565 - protein, 7 aa, synthetic construct
  REGION 1..7: note = Description of Artificial Sequence: Synthetic peptide
WGTDRSS

SEQ ID NO: 7566 - protein, 7 aa, synthetic construct
  REGION 1..7: note = Description of Artificial Sequence: Synthetic peptide
HTESKMA

SEQ ID NO: 7567 - protein, 7 aa, synthetic construct
  REGION 1..7: note = Description of Artificial Sequence: Synthetic peptide
DTNPAVK

SEQ ID NO: 7568 - protein, 7 aa, synthetic construct
  REGION 1..7: note = Description of Artificial Sequence: Synthetic peptide
STPGSSS

SEQ ID NO: 7569 - protein, 7 aa, synthetic construct
  REGION 1..7: note = Description of Artificial Sequence: Synthetic peptide
TPNQTPT

SEQ ID NO: 7570 - protein, 7 aa, synthetic construct
  REGION 1..7: note = Description of Artificial Sequence: Synthetic peptide
TSLGGNA

SEQ ID NO: 7571 - protein, 7 aa, synthetic construct
  REGION 1..7: note = Description of Artificial Sequence: Synthetic peptide
QQSTSST

SEQ ID NO: 7572 - protein, 7 aa, synthetic construct
  REGION 1..7: note = Description of Artificial Sequence: Synthetic peptide
DRSGQST

SEQ ID NO: 7573 - protein, 7 aa, synthetic construct
  REGION 1..7: note = Description of Artificial Sequence: Synthetic peptide
DSTKGRD

SEQ ID NO: 7574 - protein, 7 aa, synthetic construct
  REGION 1..7: note = Description of Artificial Sequence: Synthetic peptide
SDGHANN

SEQ ID NO: 7575 - protein, 7 aa, synthetic construct
  REGION 1..7: note = Description of Artificial Sequence: Synthetic peptide
QRDQQNA

SEQ ID NO: 7576 - protein, 7 aa, synthetic construct
  REGION 1..7: note = Description of Artificial Sequence: Synthetic peptide
EGVHTSN

SEQ ID NO: 7577 - protein, 7 aa, synthetic construct
  REGION 1..7: note = Description of Artificial Sequence: Synthetic peptide
DKVSSNA

SEQ ID NO: 7578 - protein, 7 aa, synthetic construct
  REGION 1..7: note = Description of Artificial Sequence: Synthetic peptide
DSVNARS

SEQ ID NO: 7579 - protein, 7 aa, synthetic construct
  REGION 1..7: note = Description of Artificial Sequence: Synthetic peptide
GVSPSDR

SEQ ID NO: 7580 - protein, 7 aa, synthetic construct
  REGION 1..7: note = Description of Artificial Sequence: Synthetic peptide
SSQSSVK

SEQ ID NO: 7581 - protein, 7 aa, synthetic construct
  REGION 1..7: note = Description of Artificial Sequence: Synthetic peptide
SRAGTSG

SEQ ID NO: 7582 - protein, 7 aa, synthetic construct
  REGION 1..7: note = Description of Artificial Sequence: Synthetic peptide
SGGGRND

SEQ ID NO: 7583 - protein, 7 aa, synthetic construct
  REGION 1..7: note = Description of Artificial Sequence: Synthetic peptide
TSATAVS

SEQ ID NO: 7584 - protein, 7 aa, synthetic construct
  REGION 1..7: note = Description of Artificial Sequence: Synthetic peptide
DNHPKPN

SEQ ID NO: 7585 - protein, 7 aa, synthetic construct
  REGION 1..7: note = Description of Artificial Sequence: Synthetic peptide
AAVNPKG

SEQ ID NO: 7586 - protein, 7 aa, synthetic construct
  REGION 1..7: note = Description of Artificial Sequence: Synthetic peptide
NLTKPGS

SEQ ID NO: 7587 - protein, 7 aa, synthetic construct
  REGION 1..7: note = Description of Artificial Sequence: Synthetic peptide
SSSPAGR

SEQ ID NO: 7588 - protein, 7 aa, synthetic construct
  REGION 1..7: note = Description of Artificial Sequence: Synthetic peptide
SSGMGSK

SEQ ID NO: 7589 - protein, 7 aa, synthetic construct
  REGION 1..7: note = Description of Artificial Sequence: Synthetic peptide
NSQTTVA

SEQ ID NO: 7590 - protein, 7 aa, synthetic construct
  REGION 1..7: note = Description of Artificial Sequence: Synthetic peptide
TGSSPLV

SEQ ID NO: 7591 - protein, 7 aa, synthetic construct
  REGION 1..7: note = Description of Artificial Sequence: Synthetic peptide
AVVKSPM

SEQ ID NO: 7592 - protein, 7 aa, synthetic construct
  REGION 1..7: note = Description of Artificial Sequence: Synthetic peptide
GDKPNTA

SEQ ID NO: 7593 - protein, 7 aa, synthetic construct
  REGION 1..7: note = Description of Artificial Sequence: Synthetic peptide
LQDSPSK

SEQ ID NO: 7594 - protein, 7 aa, synthetic construct
  REGION 1..7: note = Description of Artificial Sequence: Synthetic peptide
TPSDKIL

SEQ ID NO: 7595 - protein, 7 aa, synthetic construct
  REGION 1..7: note = Description of Artificial Sequence: Synthetic peptide
TAASPSN

SEQ ID NO: 7596 - protein, 7 aa, synthetic construct
  REGION 1..7: note = Description of Artificial Sequence: Synthetic peptide
SAAQTSL

SEQ ID NO: 7597 - protein, 7 aa, synthetic construct
  REGION 1..7: note = Description of Artificial Sequence: Synthetic peptide
GTAGDKQ

SEQ ID NO: 7598 - protein, 7 aa, synthetic construct
  REGION 1..7: note = Description of Artificial Sequence: Synthetic peptide
KTTDSKG

SEQ ID NO: 7599 - protein, 7 aa, synthetic construct
  REGION 1..7: note = Description of Artificial Sequence: Synthetic peptide
TSSDLRK

SEQ ID NO: 7600 - protein, 7 aa, synthetic construct
  REGION 1..7: note = Description of Artificial Sequence: Synthetic peptide
SVSKERA

SEQ ID NO: 7601 - protein, 7 aa, synthetic construct
  REGION 1..7: note = Description of Artificial Sequence: Synthetic peptide
SKTGSST

SEQ ID NO: 7602 - protein, 7 aa, synthetic construct
  REGION 1..7: note = Description of Artificial Sequence: Synthetic peptide
AGNGQTM

SEQ ID NO: 7603 - protein, 7 aa, synthetic construct
  REGION 1..7: note = Description of Artificial Sequence: Synthetic peptide
YGQTVSQ

SEQ ID NO: 7604 - protein, 7 aa, synthetic construct
  REGION 1..7: note = Description of Artificial Sequence: Synthetic peptide
SDGNTTK

SEQ ID NO: 7605 - protein, 7 aa, synthetic construct
  REGION 1..7: note = Description of Artificial Sequence: Synthetic peptide
TKAANQA

SEQ ID NO: 7606 - protein, 7 aa, synthetic construct
  REGION 1..7: note = Description of Artificial Sequence: Synthetic peptide
GLGKDTG

SEQ ID NO: 7607 - protein, 7 aa, synthetic construct
  REGION 1..7: note = Description of Artificial Sequence: Synthetic peptide
SMPSGKE

SEQ ID NO: 7608 - protein, 7 aa, synthetic construct
  REGION 1..7: note = Description of Artificial Sequence: Synthetic peptide
IPSNAGT

SEQ ID NO: 7609 - protein, 7 aa, synthetic construct
  REGION 1..7: note = Description of Artificial Sequence: Synthetic peptide
VSASGIS

SEQ ID NO: 7610 - protein, 7 aa, synthetic construct
  REGION 1..7: note = Description of Artificial Sequence: Synthetic peptide
STSREST

SEQ ID NO: 7611 - protein, 7 aa, synthetic construct
  REGION 1..7: note = Description of Artificial Sequence: Synthetic peptide
SEGQLSK

SEQ ID NO: 7612 - protein, 7 aa, synthetic construct
  REGION 1..7: note = Description of Artificial Sequence: Synthetic peptide
SHEKASG

SEQ ID NO: 7613 - protein, 7 aa, synthetic construct
  REGION 1..7: note = Description of Artificial Sequence: Synthetic peptide
TVDSKSY

SEQ ID NO: 7614 - protein, 7 aa, synthetic construct
  REGION 1..7: note = Description of Artificial Sequence: Synthetic peptide
RVGATNE

SEQ ID NO: 7615 - protein, 7 aa, synthetic construct
  REGION 1..7: note = Description of Artificial Sequence: Synthetic peptide
VRESPSH

SEQ ID NO: 7616 - protein, 7 aa, synthetic construct
  REGION 1..7: note = Description of Artificial Sequence: Synthetic peptide
SSTSAKE

SEQ ID NO: 7617 - protein, 7 aa, synthetic construct
  REGION 1..7: note = Description of Artificial Sequence: Synthetic peptide
GDHHGSG

SEQ ID NO: 7618 - protein, 7 aa, synthetic construct
  REGION 1..7: note = Description of Artificial Sequence: Synthetic peptide
GSGNLGT

SEQ ID NO: 7619 - protein, 7 aa, synthetic construct
  REGION 1..7: note = Description of Artificial Sequence: Synthetic peptide
NSPNSSG

SEQ ID NO: 7620 - protein, 7 aa, synthetic construct
  REGION 1..7: note = Description of Artificial Sequence: Synthetic peptide
ITSSNPP

SEQ ID NO: 7621 - protein, 7 aa, synthetic construct
  REGION 1..7: note = Description of Artificial Sequence: Synthetic peptide
STAPAGT

SEQ ID NO: 7622 - protein, 7 aa, synthetic construct
  REGION 1..7: note = Description of Artificial Sequence: Synthetic peptide
KSTSGSV

SEQ ID NO: 7623 - protein, 7 aa, synthetic construct
  REGION 1..7: note = Description of Artificial Sequence: Synthetic peptide
NSGNSMS

SEQ ID NO: 7624 - protein, 7 aa, synthetic construct
  REGION 1..7: note = Description of Artificial Sequence: Synthetic peptide
SSSGNNR

SEQ ID NO: 7625 - protein, 7 aa, synthetic construct
  REGION 1..7: note = Description of Artificial Sequence: Synthetic peptide
NRGSPSE

SEQ ID NO: 7626 - protein, 7 aa, synthetic construct
  REGION 1..7: note = Description of Artificial Sequence: Synthetic peptide
EMSSPNR

SEQ ID NO: 7627 - protein, 7 aa, synthetic construct
  REGION 1..7: note = Description of Artificial Sequence: Synthetic peptide
GGTSKRD

SEQ ID NO: 7628 - protein, 7 aa, synthetic construct
  REGION 1..7: note = Description of Artificial Sequence: Synthetic peptide
NLSTSSA

SEQ ID NO: 7629 - protein, 7 aa, synthetic construct
  REGION 1..7: note = Description of Artificial Sequence: Synthetic peptide
DREERSH

SEQ ID NO: 7630 - protein, 7 aa, synthetic construct
  REGION 1..7: note = Description of Artificial Sequence: Synthetic peptide
NASTAPS

SEQ ID NO: 7631 - protein, 7 aa, synthetic construct
  REGION 1..7: note = Description of Artificial Sequence: Synthetic peptide
SGTSSLS

SEQ ID NO: 7632 - protein, 7 aa, synthetic construct
  REGION 1..7: note = Description of Artificial Sequence: Synthetic peptide
GDGTASN

SEQ ID NO: 7633 - protein, 7 aa, synthetic construct
  REGION 1..7: note = Description of Artificial Sequence: Synthetic peptide
SASSSTV

SEQ ID NO: 7634 - protein, 7 aa, synthetic construct
  REGION 1..7: note = Description of Artificial Sequence: Synthetic peptide
GTEKPAP

SEQ ID NO: 7635 - protein, 7 aa, synthetic construct
  REGION 1..7: note = Description of Artificial Sequence: Synthetic peptide
NPSTPSS

SEQ ID NO: 7636 - protein, 7 aa, synthetic construct
  REGION 1..7: note = Description of Artificial Sequence: Synthetic peptide
SQGSALL

SEQ ID NO: 7637 - protein, 7 aa, synthetic construct
  REGION 1..7: note = Description of Artificial Sequence: Synthetic peptide
QGEGRTL

SEQ ID NO: 7638 - protein, 7 aa, synthetic construct
  REGION 1..7: note = Description of Artificial Sequence: Synthetic peptide
HGDRTTV

SEQ ID NO: 7639 - protein, 7 aa, synthetic construct
  REGION 1..7: note = Description of Artificial Sequence: Synthetic peptide
GGNEHAR

SEQ ID NO: 7640 - protein, 7 aa, synthetic construct
  REGION 1..7: note = Description of Artificial Sequence: Synthetic peptide
NQSTSGS

SEQ ID NO: 7641 - protein, 7 aa, synthetic construct
  REGION 1..7: note = Description of Artificial Sequence: Synthetic peptide
HGTSNTR

SEQ ID NO: 7642 - protein, 7 aa, synthetic construct
  REGION 1..7: note = Description of Artificial Sequence: Synthetic peptide
ETKTGSA

SEQ ID NO: 7643 - protein, 7 aa, synthetic construct
  REGION 1..7: note = Description of Artificial Sequence: Synthetic peptide
INVKGSQ

SEQ ID NO: 7644 - protein, 7 aa, synthetic construct
  REGION 1..7: note = Description of Artificial Sequence: Synthetic peptide
SGNPPGI

SEQ ID NO: 7645 - protein, 7 aa, synthetic construct
  REGION 1..7: note = Description of Artificial Sequence: Synthetic peptide
EGSTRPE

SEQ ID NO: 7646 - protein, 7 aa, synthetic construct
  REGION 1..7: note = Description of Artificial Sequence: Synthetic peptide
SSDNRPT

SEQ ID NO: 7647 - protein, 7 aa, synthetic construct
  REGION 1..7: note = Description of Artificial Sequence: Synthetic peptide
GNGTRGT

SEQ ID NO: 7648 - protein, 7 aa, synthetic construct
  REGION 1..7: note = Description of Artificial Sequence: Synthetic peptide
TGSQGNI

SEQ ID NO: 7649 - protein, 7 aa, synthetic construct
  REGION 1..7: note = Description of Artificial Sequence: Synthetic peptide
SEDRKSP

SEQ ID NO: 7650 - protein, 7 aa, synthetic construct
  REGION 1..7: note = Description of Artificial Sequence: Synthetic peptide
VTSDKSL

SEQ ID NO: 7651 - protein, 7 aa, synthetic construct
  REGION 1..7: note = Description of Artificial Sequence: Synthetic peptide
SNGQSNG

SEQ ID NO: 7652 - protein, 7 aa, synthetic construct
  REGION 1..7: note = Description of Artificial Sequence: Synthetic peptide
KASTDNK

SEQ ID NO: 7653 - protein, 7 aa, synthetic construct
  REGION 1..7: note = Description of Artificial Sequence: Synthetic peptide
NNSSRNL

SEQ ID NO: 7654 - protein, 7 aa, synthetic construct
  REGION 1..7: note = Description of Artificial Sequence: Synthetic peptide
NSQSGST

SEQ ID NO: 7655 - protein, 7 aa, synthetic construct
  REGION 1..7: note = Description of Artificial Sequence: Synthetic peptide
NSVSSTT

SEQ ID NO: 7656 - protein, 7 aa, synthetic construct
  REGION 1..7: note = Description of Artificial Sequence: Synthetic peptide
TSEHRAN

SEQ ID NO: 7657 - protein, 7 aa, synthetic construct
  REGION 1..7: note = Description of Artificial Sequence: Synthetic peptide
TDGTHPL

SEQ ID NO: 7658 - protein, 7 aa, synthetic construct
  REGION 1..7: note = Description of Artificial Sequence: Synthetic peptide
TNNNQPR

SEQ ID NO: 7659 - protein, 7 aa, synthetic construct
  REGION 1..7: note = Description of Artificial Sequence: Synthetic peptide
TQEPQLK

SEQ ID NO: 7660 - protein, 7 aa, synthetic construct
  REGION 1..7: note = Description of Artificial Sequence: Synthetic peptide
TSSTGVV

SEQ ID NO: 7661 - protein, 7 aa, synthetic construct
  REGION 1..7: note = Description of Artificial Sequence: Synthetic peptide
SPTGHKA

SEQ ID NO: 7662 - protein, 7 aa, synthetic construct
  REGION 1..7: note = Description of Artificial Sequence: Synthetic peptide
SPSTANL

SEQ ID NO: 7663 - protein, 7 aa, synthetic construct
  REGION 1..7: note = Description of Artificial Sequence: Synthetic peptide
SPGDRPL

SEQ ID NO: 7664 - protein, 7 aa, synthetic construct
  REGION 1..7: note = Description of Artificial Sequence: Synthetic peptide
SGEAQKT

SEQ ID NO: 7665 - protein, 7 aa, synthetic construct
  REGION 1..7: note = Description of Artificial Sequence: Synthetic peptide
SGDKSKT

SEQ ID NO: 7666 - protein, 7 aa, synthetic construct
  REGION 1..7: note = Description of Artificial Sequence: Synthetic peptide
SQASNRT

SEQ ID NO: 7667 - protein, 7 aa, synthetic construct
  REGION 1..7: note = Description of Artificial Sequence: Synthetic peptide
MEGAGQI

SEQ ID NO: 7668 - protein, 7 aa, synthetic construct
  REGION 1..7: note = Description of Artificial Sequence: Synthetic peptide
MVATGTQ

SEQ ID NO: 7669 - protein, 7 aa, synthetic construct
  REGION 1..7: note = Description of Artificial Sequence: Synthetic peptide
QANASTG

SEQ ID NO: 7670 - protein, 7 aa, synthetic construct
  REGION 1..7: note = Description of Artificial Sequence: Synthetic peptide
QVGASST

SEQ ID NO: 7671 - protein, 7 aa, synthetic construct
  REGION 1..7: note = Description of Artificial Sequence: Synthetic peptide
REGAPSA

SEQ ID NO: 7672 - protein, 7 aa, synthetic construct
  REGION 1..7: note = Description of Artificial Sequence: Synthetic peptide
LKTESQH

SEQ ID NO: 7673 - protein, 7 aa, synthetic construct
  REGION 1..7: note = Description of Artificial Sequence: Synthetic peptide
LTGHSPP

SEQ ID NO: 7674 - protein, 7 aa, synthetic construct
  REGION 1..7: note = Description of Artificial Sequence: Synthetic peptide
LATASPS

SEQ ID NO: 7675 - protein, 7 aa, synthetic construct
  REGION 1..7: note = Description of Artificial Sequence: Synthetic peptide
LGQPSRQ

SEQ ID NO: 7676 - protein, 7 aa, synthetic construct
  REGION 1..7: note = Description of Artificial Sequence: Synthetic peptide
LLEPKGL

SEQ ID NO: 7677 - protein, 7 aa, synthetic construct
  REGION 1..7: note = Description of Artificial Sequence: Synthetic peptide
EKPNAGA

SEQ ID NO: 7678 - protein, 7 aa, synthetic construct
  REGION 1..7: note = Description of Artificial Sequence: Synthetic peptide
ESATHAG

SEQ ID NO: 7679 - protein, 7 aa, synthetic construct
  REGION 1..7: note = Description of Artificial Sequence: Synthetic peptide
DKPPNNI

SEQ ID NO: 7680 - protein, 7 aa, synthetic construct
  REGION 1..7: note = Description of Artificial Sequence: Synthetic peptide
DTHRTPG

SEQ ID NO: 7681 - protein, 7 aa, synthetic construct
  REGION 1..7: note = Description of Artificial Sequence: Synthetic peptide
DGNSKTP

SEQ ID NO: 7682 - protein, 7 aa, synthetic construct
  REGION 1..7: note = Description of Artificial Sequence: Synthetic peptide
DGSTTKL

SEQ ID NO: 7683 - protein, 7 aa, synthetic construct
  REGION 1..7: note = Description of Artificial Sequence: Synthetic peptide
EAGSSAR

SEQ ID NO: 7684 - protein, 7 aa, synthetic construct
  REGION 1..7: note = Description of Artificial Sequence: Synthetic peptide
EARDKTR

SEQ ID NO: 7685 - protein, 7 aa, synthetic construct
  REGION 1..7: note = Description of Artificial Sequence: Synthetic peptide
DRNGSNK

SEQ ID NO: 7686 - protein, 7 aa, synthetic construct
  REGION 1..7: note = Description of Artificial Sequence: Synthetic peptide
ADSREKG

SEQ ID NO: 7687 - protein, 7 aa, synthetic construct
  REGION 1..7: note = Description of Artificial Sequence: Synthetic peptide
AAGSTKD

SEQ ID NO: 7688 - protein, 7 aa, synthetic construct
  REGION 1..7: note = Description of Artificial Sequence: Synthetic peptide
AGQAPLN

SEQ ID NO: 7689 - protein, 7 aa, synthetic construct
  REGION 1..7: note = Description of Artificial Sequence: Synthetic peptide
AQSQKAS

SEQ ID NO: 7690 - protein, 7 aa, synthetic construct
  REGION 1..7: note = Description of Artificial Sequence: Synthetic peptide
ALGGAPT

SEQ ID NO: 7691 - protein, 7 aa, synthetic construct
  REGION 1..7: note = Description of Artificial Sequence: Synthetic peptide
GKGETRT

SEQ ID NO: 7692 - protein, 7 aa, synthetic construct
  REGION 1..7: note = Description of Artificial Sequence: Synthetic peptide
GTPGHGQ

SEQ ID NO: 7693 - protein, 7 aa, synthetic construct
  REGION 1..7: note = Description of Artificial Sequence: Synthetic peptide
GLASSKG

SEQ ID NO: 7694 - protein, 7 aa, synthetic construct
  REGION 1..7: note = Description of Artificial Sequence: Synthetic peptide
GAASSNR

SEQ ID NO: 7695 - protein, 7 aa, synthetic construct
  REGION 1..7: note = Description of Artificial Sequence: Synthetic peptide
GTGDNKV

SEQ ID NO: 7696 - protein, 7 aa, synthetic construct
  REGION 1..7: note = Description of Artificial Sequence: Synthetic peptide
GKAQTSQ

SEQ ID NO: 7697 - protein, 7 aa, synthetic construct
  REGION 1..7: note = Description of Artificial Sequence: Synthetic peptide
GAGASVQ

SEQ ID NO: 7698 - protein, 7 aa, synthetic construct
  REGION 1..7: note = Description of Artificial Sequence: Synthetic peptide
GSGPNAP

SEQ ID NO: 7699 - protein, 7 aa, synthetic construct
  REGION 1..7: note = Description of Artificial Sequence: Synthetic peptide
VADRSGQ

SEQ ID NO: 7700 - protein, 7 aa, synthetic construct
  REGION 1..7: note = Description of Artificial Sequence: Synthetic peptide
YRNDSSV

SEQ ID NO: 7701 - protein, 7 aa, synthetic construct
  REGION 1..7: note = Description of Artificial Sequence: Synthetic peptide
YGKGGSQ

SEQ ID NO: 7702 - protein, 7 aa, synthetic construct
  REGION 1..7: note = Description of Artificial Sequence: Synthetic peptide
SMLPQKG

SEQ ID NO: 7703 - protein, 7 aa, synthetic construct
  REGION 1..7: note = Description of Artificial Sequence: Synthetic peptide
CVPTSAG

SEQ ID NO: 7704 - protein, 7 aa, synthetic construct
  REGION 1..7: note = Description of Artificial Sequence: Synthetic peptide
WGGPTAS

SEQ ID NO: 7705 - protein, 7 aa, synthetic construct
  REGION 1..7: note = Description of Artificial Sequence: Synthetic peptide
LNSERAA

SEQ ID NO: 7706 - protein, 7 aa, synthetic construct
  REGION 1..7: note = Description of Artificial Sequence: Synthetic peptide
DDNKKGL

SEQ ID NO: 7707 - protein, 7 aa, synthetic construct
  REGION 1..7: note = Description of Artificial Sequence: Synthetic peptide
DKPAPGK

SEQ ID NO: 7708 - protein, 7 aa, synthetic construct
  REGION 1..7: note = Description of Artificial Sequence: Synthetic peptide
GNAGSSV

SEQ ID NO: 7709 - protein, 7 aa, synthetic construct
  REGION 1..7: note = Description of Artificial Sequence: Synthetic peptide
NSTNPAS

SEQ ID NO: 7710 - protein, 7 aa, synthetic construct
  REGION 1..7: note = Description of Artificial Sequence: Synthetic peptide
TPSSKST

SEQ ID NO: 7711 - protein, 7 aa, synthetic construct
  REGION 1..7: note = Description of Artificial Sequence: Synthetic peptide
STNTAPH

SEQ ID NO: 7712 - protein, 7 aa, synthetic construct
  REGION 1..7: note = Description of Artificial Sequence: Synthetic peptide
GATSPSH

SEQ ID NO: 7713 - protein, 7 aa, synthetic construct
  REGION 1..7: note = Description of Artificial Sequence: Synthetic peptide
GNDSAGR

SEQ ID NO: 7714 - protein, 7 aa, synthetic construct
  REGION 1..7: note = Description of Artificial Sequence: Synthetic peptide
GSNVSNQ

SEQ ID NO: 7715 - protein, 7 aa, synthetic construct
  REGION 1..7: note = Description of Artificial Sequence: Synthetic peptide
DGKGTSG

SEQ ID NO: 7716 - protein, 7 aa, synthetic construct
  REGION 1..7: note = Description of Artificial Sequence: Synthetic peptide
SAGATPV

SEQ ID NO: 7717 - protein, 7 aa, synthetic construct
  REGION 1..7: note = Description of Artificial Sequence: Synthetic peptide
TGSNTVM

SEQ ID NO: 7718 - protein, 7 aa, synthetic construct
  REGION 1..7: note = Description of Artificial Sequence: Synthetic peptide
TTDARPA

SEQ ID NO: 7719 - protein, 7 aa, synthetic construct
  REGION 1..7: note = Description of Artificial Sequence: Synthetic peptide
ETRSSAA

SEQ ID NO: 7720 - protein, 7 aa, synthetic construct
  REGION 1..7: note = Description of Artificial Sequence: Synthetic peptide
DNGKSNR

SEQ ID NO: 7721 - protein, 7 aa, synthetic construct
  REGION 1..7: note = Description of Artificial Sequence: Synthetic peptide
SSQERPV

SEQ ID NO: 7722 - protein, 7 aa, synthetic construct
  REGION 1..7: note = Description of Artificial Sequence: Synthetic peptide
SLASTSQ

SEQ ID NO: 7723 - protein, 7 aa, synthetic construct
  REGION 1..7: note = Description of Artificial Sequence: Synthetic peptide
NQSRNES

SEQ ID NO: 7724 - protein, 7 aa, synthetic construct
  REGION 1..7: note = Description of Artificial Sequence: Synthetic peptide
QGSSPTA

SEQ ID NO: 7725 - protein, 7 aa, synthetic construct
  REGION 1..7: note = Description of Artificial Sequence: Synthetic peptide
DKSGPHS

SEQ ID NO: 7726 - protein, 7 aa, synthetic construct
  REGION 1..7: note = Description of Artificial Sequence: Synthetic peptide
ANAPDKS

SEQ ID NO: 7727 - protein, 7 aa, synthetic construct
  REGION 1..7: note = Description of Artificial Sequence: Synthetic peptide
SKQTNGG

SEQ ID NO: 7728 - protein, 7 aa, synthetic construct
  REGION 1..7: note = Description of Artificial Sequence: Synthetic peptide
IGEGKTA

SEQ ID NO: 7729 - protein, 7 aa, synthetic construct
  REGION 1..7: note = Description of Artificial Sequence: Synthetic peptide
EKATSGV

SEQ ID NO: 7730 - protein, 7 aa, synthetic construct
  REGION 1..7: note = Description of Artificial Sequence: Synthetic peptide
ETTGTRS

SEQ ID NO: 7731 - protein, 7 aa, synthetic construct
  REGION 1..7: note = Description of Artificial Sequence: Synthetic peptide
VTEGSMR

SEQ ID NO: 7732 - protein, 7 aa, synthetic construct
  REGION 1..7: note = Description of Artificial Sequence: Synthetic peptide
TDSQSPR

SEQ ID NO: 7733 - protein, 7 aa, synthetic construct
  REGION 1..7: note = Description of Artificial Sequence: Synthetic peptide
QTPTTNG

SEQ ID NO: 7734 - protein, 7 aa, synthetic construct
  REGION 1..7: note = Description of Artificial Sequence: Synthetic peptide
TLGAQGG

SEQ ID NO: 7735 - protein, 7 aa, synthetic construct
  REGION 1..7: note = Description of Artificial Sequence: Synthetic peptide
STTHKTL

SEQ ID NO: 7736 - protein, 7 aa, synthetic construct
  REGION 1..7: note = Description of Artificial Sequence: Synthetic peptide
SRSDKTH

SEQ ID NO: 7737 - protein, 7 aa, synthetic construct
  REGION 1..7: note = Description of Artificial Sequence: Synthetic peptide
LGGAQGS

SEQ ID NO: 7738 - protein, 7 aa, synthetic construct
  REGION 1..7: note = Description of Artificial Sequence: Synthetic peptide
SRSGGTA

SEQ ID NO: 7739 - protein, 7 aa, synthetic construct
  REGION 1..7: note = Description of Artificial Sequence: Synthetic peptide
DTNAGNH

SEQ ID NO: 7740 - protein, 7 aa, synthetic construct
  REGION 1..7: note = Description of Artificial Sequence: Synthetic peptide
DSKANNL

SEQ ID NO: 7741 - protein, 7 aa, synthetic construct
  REGION 1..7: note = Description of Artificial Sequence: Synthetic peptide
AEGSNRQ

SEQ ID NO: 7742 - protein, 7 aa, synthetic construct
  REGION 1..7: note = Description of Artificial Sequence: Synthetic peptide
GKSANVG

SEQ ID NO: 7743 - protein, 7 aa, synthetic construct
  REGION 1..7: note = Description of Artificial Sequence: Synthetic peptide
GTKPNTQ

SEQ ID NO: 7744 - protein, 7 aa, synthetic construct
  REGION 1..7: note = Description of Artificial Sequence: Synthetic peptide
KTTERSS

SEQ ID NO: 7745 - protein, 7 aa, synthetic construct
  REGION 1..7: note = Description of Artificial Sequence: Synthetic peptide
TLSERGV

SEQ ID NO: 7746 - protein, 7 aa, synthetic construct
  REGION 1..7: note = Description of Artificial Sequence: Synthetic peptide
GTVDLKR

SEQ ID NO: 7747 - protein, 7 aa, synthetic construct
  REGION 1..7: note = Description of Artificial Sequence: Synthetic peptide
LGAPASQ

SEQ ID NO: 7748 - protein, 7 aa, synthetic construct
  REGION 1..7: note = Description of Artificial Sequence: Synthetic peptide
QGKPNLG

SEQ ID NO: 7749 - protein, 7 aa, synthetic construct
  REGION 1..7: note = Description of Artificial Sequence: Synthetic peptide
DRPGTPG

SEQ ID NO: 7750 - protein, 7 aa, synthetic construct
  REGION 1..7: note = Description of Artificial Sequence: Synthetic peptide
DAASSRL

SEQ ID NO: 7751 - protein, 7 aa, synthetic construct
  REGION 1..7: note = Description of Artificial Sequence: Synthetic peptide
GQSATTV

SEQ ID NO: 7752 - protein, 7 aa, synthetic construct
  REGION 1..7: note = Description of Artificial Sequence: Synthetic peptide
QVDTKSS

SEQ ID NO: 7753 - protein, 7 aa, synthetic construct
  REGION 1..7: note = Description of Artificial Sequence: Synthetic peptide
GGGNATS

SEQ ID NO: 7754 - protein, 7 aa, synthetic construct
  REGION 1..7: note = Description of Artificial Sequence: Synthetic peptide
VSKSPAN

SEQ ID NO: 7755 - protein, 7 aa, synthetic construct
  REGION 1..7: note = Description of Artificial Sequence: Synthetic peptide
LGAGKDL

SEQ ID NO: 7756 - protein, 7 aa, synthetic construct
  REGION 1..7: note = Description of Artificial Sequence: Synthetic peptide
APESKVT

SEQ ID NO: 7757 - protein, 7 aa, synthetic construct
  REGION 1..7: note = Description of Artificial Sequence: Synthetic peptide
GTQAQPL

SEQ ID NO: 7758 - protein, 7 aa, synthetic construct
  REGION 1..7: note = Description of Artificial Sequence: Synthetic peptide
ALNDSRS

SEQ ID NO: 7759 - protein, 7 aa, synthetic construct
  REGION 1..7: note = Description of Artificial Sequence: Synthetic peptide
SSEKARA

SEQ ID NO: 7760 - protein, 7 aa, synthetic construct
  REGION 1..7: note = Description of Artificial Sequence: Synthetic peptide
GDGVKGV

SEQ ID NO: 7761 - protein, 7 aa, synthetic construct
  REGION 1..7: note = Description of Artificial Sequence: Synthetic peptide
VNNSPAT

SEQ ID NO: 7762 - protein, 7 aa, synthetic construct
  REGION 1..7: note = Description of Artificial Sequence: Synthetic peptide
TAQSNPH

SEQ ID NO: 7763 - protein, 7 aa, synthetic construct
  REGION 1..7: note = Description of Artificial Sequence: Synthetic peptide
TNTTSKV

SEQ ID NO: 7764 - protein, 7 aa, synthetic construct
  REGION 1..7: note = Description of Artificial Sequence: Synthetic peptide
DSTARPG

SEQ ID NO: 7765 - protein, 7 aa, synthetic construct
  REGION 1..7: note = Description of Artificial Sequence: Synthetic peptide
NSKGPQG

SEQ ID NO: 7766 - protein, 7 aa, synthetic construct
  REGION 1..7: note = Description of Artificial Sequence: Synthetic peptide
EHSGAAK

SEQ ID NO: 7767 - protein, 7 aa, synthetic construct
  REGION 1..7: note = Description of Artificial Sequence: Synthetic peptide
QTASSVS

SEQ ID NO: 7768 - protein, 7 aa, synthetic construct
  REGION 1..7: note = Description of Artificial Sequence: Synthetic peptide
VGTQSQA

SEQ ID NO: 7769 - protein, 7 aa, synthetic construct
  REGION 1..7: note = Description of Artificial Sequence: Synthetic peptide
SSAQGSS

SEQ ID NO: 7770 - protein, 7 aa, synthetic construct
  REGION 1..7: note = Description of Artificial Sequence: Synthetic peptide
SSEDRKL

SEQ ID NO: 7771 - protein, 7 aa, synthetic construct
  REGION 1..7: note = Description of Artificial Sequence: Synthetic peptide
NGSQTIQ

SEQ ID NO: 7772 - protein, 7 aa, synthetic construct
  REGION 1..7: note = Description of Artificial Sequence: Synthetic peptide
TSGGEPR

SEQ ID NO: 7773 - protein, 7 aa, synthetic construct
  REGION 1..7: note = Description of Artificial Sequence: Synthetic peptide
SQHKDLS

SEQ ID NO: 7774 - protein, 7 aa, synthetic construct
  REGION 1..7: note = Description of Artificial Sequence: Synthetic peptide
QQTKSSE

SEQ ID NO: 7775 - protein, 7 aa, synthetic construct
  REGION 1..7: note = Description of Artificial Sequence: Synthetic peptide
APDSRSA

SEQ ID NO: 7776 - protein, 7 aa, synthetic construct
  REGION 1..7: note = Description of Artificial Sequence: Synthetic peptide
AQSGGKS

SEQ ID NO: 7777 - protein, 7 aa, synthetic construct
  REGION 1..7: note = Description of Artificial Sequence: Synthetic peptide
NGAGTSS

SEQ ID NO: 7778 - protein, 7 aa, synthetic construct
  REGION 1..7: note = Description of Artificial Sequence: Synthetic peptide
SKQNASA

SEQ ID NO: 7779 - protein, 7 aa, synthetic construct
  REGION 1..7: note = Description of Artificial Sequence: Synthetic peptide
QGNLSSG

SEQ ID NO: 7780 - protein, 7 aa, synthetic construct
  REGION 1..7: note = Description of Artificial Sequence: Synthetic peptide
QGASQNI

SEQ ID NO: 7781 - protein, 7 aa, synthetic construct
  REGION 1..7: note = Description of Artificial Sequence: Synthetic peptide
AVTSGGK

SEQ ID NO: 7782 - protein, 7 aa, synthetic construct
  REGION 1..7: note = Description of Artificial Sequence: Synthetic peptide
GGVDTSK

SEQ ID NO: 7783 - protein, 7 aa, synthetic construct
  REGION 1..7: note = Description of Artificial Sequence: Synthetic peptide
RSNGSAS

SEQ ID NO: 7784 - protein, 7 aa, synthetic construct
  REGION 1..7: note = Description of Artificial Sequence: Synthetic peptide
DSLGTKK

SEQ ID NO: 7785 - protein, 7 aa, synthetic construct
  REGION 1..7: note = Description of Artificial Sequence: Synthetic peptide
GPGSNRG

SEQ ID NO: 7786 - protein, 7 aa, synthetic construct
  REGION 1..7: note = Description of Artificial Sequence: Synthetic peptide
NTSSSGL

SEQ ID NO: 7787 - protein, 7 aa, synthetic construct
  REGION 1..7: note = Description of Artificial Sequence: Synthetic peptide
NQSSGVS

SEQ ID NO: 7788 - protein, 7 aa, synthetic construct
  REGION 1..7: note = Description of Artificial Sequence: Synthetic peptide
TNGNPTT

SEQ ID NO: 7789 - protein, 7 aa, synthetic construct
  REGION 1..7: note = Description of Artificial Sequence: Synthetic peptide
SNSQRSS

SEQ ID NO: 7790 - protein, 7 aa, synthetic construct
  REGION 1..7: note = Description of Artificial Sequence: Synthetic peptide
ESGGSAS

SEQ ID NO: 7791 - protein, 7 aa, synthetic construct
  REGION 1..7: note = Description of Artificial Sequence: Synthetic peptide
GADSMPK

SEQ ID NO: 7792 - protein, 7 aa, synthetic construct
  REGION 1..7: note = Description of Artificial Sequence: Synthetic peptide
LNADHQK

SEQ ID NO: 7793 - protein, 7 aa, synthetic construct
  REGION 1..7: note = Description of Artificial Sequence: Synthetic peptide
TSGTVAR

SEQ ID NO: 7794 - protein, 7 aa, synthetic construct
  REGION 1..7: note = Description of Artificial Sequence: Synthetic peptide
SQSRDAL

SEQ ID NO: 7795 - protein, 7 aa, synthetic construct
  REGION 1..7: note = Description of Artificial Sequence: Synthetic peptide
NTNPSMA

SEQ ID NO: 7796 - protein, 7 aa, synthetic construct
  REGION 1..7: note = Description of Artificial Sequence: Synthetic peptide
TGQSNSA

SEQ ID NO: 7797 - protein, 7 aa, synthetic construct
  REGION 1..7: note = Description of Artificial Sequence: Synthetic peptide
DTTTAKA

SEQ ID NO: 7798 - protein, 7 aa, synthetic construct
  REGION 1..7: note = Description of Artificial Sequence: Synthetic peptide
ENPGGGR

SEQ ID NO: 7799 - protein, 7 aa, synthetic construct
  REGION 1..7: note = Description of Artificial Sequence: Synthetic peptide
ERNSNPG

SEQ ID NO: 7800 - protein, 7 aa, synthetic construct
  REGION 1..7: note = Description of Artificial Sequence: Synthetic peptide
GAGNDRT

SEQ ID NO: 7801 - protein, 7 aa, synthetic construct
  REGION 1..7: note = Description of Artificial Sequence: Synthetic peptide
GNTEGRS

SEQ ID NO: 7802 - protein, 7 aa, synthetic construct
  REGION 1..7: note = Description of Artificial Sequence: Synthetic peptide
SLATSNQ

SEQ ID NO: 7803 - protein, 7 aa, synthetic construct
  REGION 1..7: note = Description of Artificial Sequence: Synthetic peptide
VTKDSQS

SEQ ID NO: 7804 - protein, 7 aa, synthetic construct
  REGION 1..7: note = Description of Artificial Sequence: Synthetic peptide
SSANNKL

SEQ ID NO: 7805 - protein, 7 aa, synthetic construct
  REGION 1..7: note = Description of Artificial Sequence: Synthetic peptide
NDQGKSS

SEQ ID NO: 7806 - protein, 7 aa, synthetic construct
  REGION 1..7: note = Description of Artificial Sequence: Synthetic peptide
KNGNDRA

SEQ ID NO: 7807 - protein, 7 aa, synthetic construct
  REGION 1..7: note = Description of Artificial Sequence: Synthetic peptide
KGTPASA

SEQ ID NO: 7808 - protein, 7 aa, synthetic construct
  REGION 1..7: note = Description of Artificial Sequence: Synthetic peptide
NTKGTNT

SEQ ID NO: 7809 - protein, 7 aa, synthetic construct
  REGION 1..7: note = Description of Artificial Sequence: Synthetic peptide
ETSKSLP

SEQ ID NO: 7810 - protein, 7 aa, synthetic construct
  REGION 1..7: note = Description of Artificial Sequence: Synthetic peptide
GLSTEAH

SEQ ID NO: 7811 - protein, 7 aa, synthetic construct
  REGION 1..7: note = Description of Artificial Sequence: Synthetic peptide
SNSNKVS

SEQ ID NO: 7812 - protein, 7 aa, synthetic construct
  REGION 1..7: note = Description of Artificial Sequence: Synthetic peptide
NQAPSGS

SEQ ID NO: 7813 - protein, 7 aa, synthetic construct
  REGION 1..7: note = Description of Artificial Sequence: Synthetic peptide
SRNDKDA

SEQ ID NO: 7814 - protein, 7 aa, synthetic construct
  REGION 1..7: note = Description of Artificial Sequence: Synthetic peptide
YSGHEPK

SEQ ID NO: 7815 - protein, 7 aa, synthetic construct
  REGION 1..7: note = Description of Artificial Sequence: Synthetic peptide
STGVTPV

SEQ ID NO: 7816 - protein, 7 aa, synthetic construct
  REGION 1..7: note = Description of Artificial Sequence: Synthetic peptide
ATGTGQG

SEQ ID NO: 7817 - protein, 7 aa, synthetic construct
  REGION 1..7: note = Description of Artificial Sequence: Synthetic peptide
GHADNKT

SEQ ID NO: 7818 - protein, 7 aa, synthetic construct
  REGION 1..7: note = Description of Artificial Sequence: Synthetic peptide
DGVGHNP

SEQ ID NO: 7819 - protein, 7 aa, synthetic construct
  REGION 1..7: note = Description of Artificial Sequence: Synthetic peptide
SGTSSIL

SEQ ID NO: 7820 - protein, 7 aa, synthetic construct
  REGION 1..7: note = Description of Artificial Sequence: Synthetic peptide
TQHTSNQ

SEQ ID NO: 7821 - protein, 7 aa, synthetic construct
  REGION 1..7: note = Description of Artificial Sequence: Synthetic peptide
GSSKGSN

SEQ ID NO: 7822 - protein, 7 aa, synthetic construct
  REGION 1..7: note = Description of Artificial Sequence: Synthetic peptide
DRTSGVS

SEQ ID NO: 7823 - protein, 7 aa, synthetic construct
  REGION 1..7: note = Description of Artificial Sequence: Synthetic peptide
NISEQRS

SEQ ID NO: 7824 - protein, 7 aa, synthetic construct
  REGION 1..7: note = Description of Artificial Sequence: Synthetic peptide
NAKTSVG

SEQ ID NO: 7825 - protein, 7 aa, synthetic construct
  REGION 1..7: note = Description of Artificial Sequence: Synthetic peptide
TGGNSSS

SEQ ID NO: 7826 - protein, 7 aa, synthetic construct
  REGION 1..7: note = Description of Artificial Sequence: Synthetic peptide
DSGERGR

SEQ ID NO: 7827 - protein, 7 aa, synthetic construct
  REGION 1..7: note = Description of Artificial Sequence: Synthetic peptide
GANSSPS

SEQ ID NO: 7828 - protein, 7 aa, synthetic construct
  REGION 1..7: note = Description of Artificial Sequence: Synthetic peptide
GGHKSST

SEQ ID NO: 7829 - protein, 7 aa, synthetic construct
  REGION 1..7: note = Description of Artificial Sequence: Synthetic peptide
GKSGTSS

SEQ ID NO: 7830 - protein, 7 aa, synthetic construct
  REGION 1..7: note = Description of Artificial Sequence: Synthetic peptide
SRASGVS

SEQ ID NO: 7831 - protein, 7 aa, synthetic construct
  REGION 1..7: note = Description of Artificial Sequence: Synthetic peptide
SLASTHA

SEQ ID NO: 7832 - protein, 7 aa, synthetic construct
  REGION 1..7: note = Description of Artificial Sequence: Synthetic peptide
SQTSTHT

SEQ ID NO: 7833 - protein, 7 aa, synthetic construct
  REGION 1..7: note = Description of Artificial Sequence: Synthetic peptide
DGRSAAS

SEQ ID NO: 7834 - protein, 7 aa, synthetic construct
  REGION 1..7: note = Description of Artificial Sequence: Synthetic peptide
SVGTSSS

SEQ ID NO: 7835 - protein, 7 aa, synthetic construct
  REGION 1..7: note = Description of Artificial Sequence: Synthetic peptide
HSGNSNS

SEQ ID NO: 7836 - protein, 7 aa, synthetic construct
  REGION 1..7: note = Description of Artificial Sequence: Synthetic peptide
GTGSSVS

SEQ ID NO: 7837 - protein, 7 aa, synthetic construct
  REGION 1..7: note = Description of Artificial Sequence: Synthetic peptide
TNEGTNR

SEQ ID NO: 7838 - protein, 7 aa, synthetic construct
  REGION 1..7: note = Description of Artificial Sequence: Synthetic peptide
SKSKDIA

SEQ ID NO: 7839 - protein, 7 aa, synthetic construct
  REGION 1..7: note = Description of Artificial Sequence: Synthetic peptide
ASPGSSG

SEQ ID NO: 7840 - protein, 7 aa, synthetic construct
  REGION 1..7: note = Description of Artificial Sequence: Synthetic peptide
NLESRSA

SEQ ID NO: 7841 - protein, 7 aa, synthetic construct
  REGION 1..7: note = Description of Artificial Sequence: Synthetic peptide
HGIDSMK

SEQ ID NO: 7842 - protein, 7 aa, synthetic construct
  REGION 1..7: note = Description of Artificial Sequence: Synthetic peptide
NNGQNST

SEQ ID NO: 7843 - protein, 7 aa, synthetic construct
  REGION 1..7: note = Description of Artificial Sequence: Synthetic peptide
NSAASSV

SEQ ID NO: 7844 - protein, 7 aa, synthetic construct
  REGION 1..7: note = Description of Artificial Sequence: Synthetic peptide
TGKESMI

SEQ ID NO: 7845 - protein, 7 aa, synthetic construct
  REGION 1..7: note = Description of Artificial Sequence: Synthetic peptide
TAGTGKT

SEQ ID NO: 7846 - protein, 7 aa, synthetic construct
  REGION 1..7: note = Description of Artificial Sequence: Synthetic peptide
STTKDRV

SEQ ID NO: 7847 - protein, 7 aa, synthetic construct
  REGION 1..7: note = Description of Artificial Sequence: Synthetic peptide
SPSKDKE

SEQ ID NO: 7848 - protein, 7 aa, synthetic construct
  REGION 1..7: note = Description of Artificial Sequence: Synthetic peptide
HMNTSSK

SEQ ID NO: 7849 - protein, 7 aa, synthetic construct
  REGION 1..7: note = Description of Artificial Sequence: Synthetic peptide
HTHGEGK

SEQ ID NO: 7850 - protein, 7 aa, synthetic construct
  REGION 1..7: note = Description of Artificial Sequence: Synthetic peptide
LSGHSPQ

SEQ ID NO: 7851 - protein, 7 aa, synthetic construct
  REGION 1..7: note = Description of Artificial Sequence: Synthetic peptide
EGSVQSK

SEQ ID NO: 7852 - protein, 7 aa, synthetic construct
  REGION 1..7: note = Description of Artificial Sequence: Synthetic peptide
AGNTPKR

SEQ ID NO: 7853 - protein, 7 aa, synthetic construct
  REGION 1..7: note = Description of Artificial Sequence: Synthetic peptide
GPEHTPA

SEQ ID NO: 7854 - protein, 7 aa, synthetic construct
  REGION 1..7: note = Description of Artificial Sequence: Synthetic peptide
SSGKDLA

SEQ ID NO: 7855 - protein, 7 aa, synthetic construct
  REGION 1..7: note = Description of Artificial Sequence: Synthetic peptide
RTDTGPV

SEQ ID NO: 7856 - protein, 7 aa, synthetic construct
  REGION 1..7: note = Description of Artificial Sequence: Synthetic peptide
AQDPTHK

SEQ ID NO: 7857 - protein, 7 aa, synthetic construct
  REGION 1..7: note = Description of Artificial Sequence: Synthetic peptide
TNSERNL

SEQ ID NO: 7858 - protein, 7 aa, synthetic construct
  REGION 1..7: note = Description of Artificial Sequence: Synthetic peptide
AADSKGG

SEQ ID NO: 7859 - protein, 7 aa, synthetic construct
  REGION 1..7: note = Description of Artificial Sequence: Synthetic peptide
GNTTSTQ

SEQ ID NO: 7860 - protein, 7 aa, synthetic construct
  REGION 1..7: note = Description of Artificial Sequence: Synthetic peptide
VGAAPVS

SEQ ID NO: 7861 - protein, 7 aa, synthetic construct
  REGION 1..7: note = Description of Artificial Sequence: Synthetic peptide
DKGPQVV

SEQ ID NO: 7862 - protein, 7 aa, synthetic construct
  REGION 1..7: note = Description of Artificial Sequence: Synthetic peptide
NPSSSHM

SEQ ID NO: 7863 - protein, 7 aa, synthetic construct
  REGION 1..7: note = Description of Artificial Sequence: Synthetic peptide
NHGTPVE

SEQ ID NO: 7864 - protein, 7 aa, synthetic construct
  REGION 1..7: note = Description of Artificial Sequence: Synthetic peptide
NPSTNGN

SEQ ID NO: 7865 - protein, 7 aa, synthetic construct
  REGION 1..7: note = Description of Artificial Sequence: Synthetic peptide
NSEVSSK

SEQ ID NO: 7866 - protein, 7 aa, synthetic construct
  REGION 1..7: note = Description of Artificial Sequence: Synthetic peptide
QGPNHSS

SEQ ID NO: 7867 - protein, 7 aa, synthetic construct
  REGION 1..7: note = Description of Artificial Sequence: Synthetic peptide
VKAGKNE

SEQ ID NO: 7868 - protein, 7 aa, synthetic construct
  REGION 1..7: note = Description of Artificial Sequence: Synthetic peptide
GAFGEKG

SEQ ID NO: 7869 - protein, 7 aa, synthetic construct
  REGION 1..7: note = Description of Artificial Sequence: Synthetic peptide
TSRSAQA

SEQ ID NO: 7870 - protein, 7 aa, synthetic construct
  REGION 1..7: note = Description of Artificial Sequence: Synthetic peptide
SPGSSTL

SEQ ID NO: 7871 - protein, 7 aa, synthetic construct
  REGION 1..7: note = Description of Artificial Sequence: Synthetic peptide
RQGTTSG

SEQ ID NO: 7872 - protein, 7 aa, synthetic construct
  REGION 1..7: note = Description of Artificial Sequence: Synthetic peptide
AEQNRSS

SEQ ID NO: 7873 - protein, 7 aa, synthetic construct
  REGION 1..7: note = Description of Artificial Sequence: Synthetic peptide
GGTKGTT

SEQ ID NO: 7874 - protein, 7 aa, synthetic construct
  REGION 1..7: note = Description of Artificial Sequence: Synthetic peptide
FGDSRSN

SEQ ID NO: 7875 - protein, 7 aa, synthetic construct
  REGION 1..7: note = Description of Artificial Sequence: Synthetic peptide
QTNTGKG

SEQ ID NO: 7876 - protein, 7 aa, synthetic construct
  REGION 1..7: note = Description of Artificial Sequence: Synthetic peptide
KGNAGVE

SEQ ID NO: 7877 - protein, 7 aa, synthetic construct
  REGION 1..7: note = Description of Artificial Sequence: Synthetic peptide
LTQDKPV

SEQ ID NO: 7878 - protein, 7 aa, synthetic construct
  REGION 1..7: note = Description of Artificial Sequence: Synthetic peptide
GQHKSGT

SEQ ID NO: 7879 - protein, 7 aa, synthetic construct
  REGION 1..7: note = Description of Artificial Sequence: Synthetic peptide
VKESKGT

SEQ ID NO: 7880 - protein, 7 aa, synthetic construct
  REGION 1..7: note = Description of Artificial Sequence: Synthetic peptide
VESPSNR

SEQ ID NO: 7881 - protein, 7 aa, synthetic construct
  REGION 1..7: note = Description of Artificial Sequence: Synthetic peptide
YKEQNAK

SEQ ID NO: 7882 - protein, 7 aa, synthetic construct
  REGION 1..7: note = Description of Artificial Sequence: Synthetic peptide
DLPSAKA

SEQ ID NO: 7883 - protein, 7 aa, synthetic construct
  REGION 1..7: note = Description of Artificial Sequence: Synthetic peptide
ATSETKG

SEQ ID NO: 7884 - protein, 7 aa, synthetic construct
  REGION 1..7: note = Description of Artificial Sequence: Synthetic peptide
SRTTAPA

SEQ ID NO: 7885 - protein, 7 aa, synthetic construct
  REGION 1..7: note = Description of Artificial Sequence: Synthetic peptide
SMGTPPS

SEQ ID NO: 7886 - protein, 7 aa, synthetic construct
  REGION 1..7: note = Description of Artificial Sequence: Synthetic peptide
LGPSQNN

SEQ ID NO: 7887 - protein, 7 aa, synthetic construct
  REGION 1..7: note = Description of Artificial Sequence: Synthetic peptide
NTAMKGA

SEQ ID NO: 7888 - protein, 7 aa, synthetic construct
  REGION 1..7: note = Description of Artificial Sequence: Synthetic peptide
THGKGSE

SEQ ID NO: 7889 - protein, 7 aa, synthetic construct
  REGION 1..7: note = Description of Artificial Sequence: Synthetic peptide
TSDPRGV

SEQ ID NO: 7890 - protein, 7 aa, synthetic construct
  REGION 1..7: note = Description of Artificial Sequence: Synthetic peptide
RTSTEKN

SEQ ID NO: 7891 - protein, 7 aa, synthetic construct
  REGION 1..7: note = Description of Artificial Sequence: Synthetic peptide
SVIQGGS

SEQ ID NO: 7892 - protein, 7 aa, synthetic construct
  REGION 1..7: note = Description of Artificial Sequence: Synthetic peptide
QGQTTKA

SEQ ID NO: 7893 - protein, 7 aa, synthetic construct
  REGION 1..7: note = Description of Artificial Sequence: Synthetic peptide
EKENSQR

SEQ ID NO: 7894 - protein, 7 aa, synthetic construct
  REGION 1..7: note = Description of Artificial Sequence: Synthetic peptide
ADSGHNT

SEQ ID NO: 7895 - protein, 7 aa, synthetic construct
  REGION 1..7: note = Description of Artificial Sequence: Synthetic peptide
GTIGEKL

SEQ ID NO: 7896 - protein, 7 aa, synthetic construct
  REGION 1..7: note = Description of Artificial Sequence: Synthetic peptide
VPSAKTA

SEQ ID NO: 7897 - protein, 7 aa, synthetic construct
  REGION 1..7: note = Description of Artificial Sequence: Synthetic peptide
GTVPTNS

SEQ ID NO: 7898 - protein, 7 aa, synthetic construct
  REGION 1..7: note = Description of Artificial Sequence: Synthetic peptide
TANATPV

SEQ ID NO: 7899 - protein, 7 aa, synthetic construct
  REGION 1..7: note = Description of Artificial Sequence: Synthetic peptide
TTSRDAS

SEQ ID NO: 7900 - protein, 7 aa, synthetic construct
  REGION 1..7: note = Description of Artificial Sequence: Synthetic peptide
DGVESNR

SEQ ID NO: 7901 - protein, 7 aa, synthetic construct
  REGION 1..7: note = Description of Artificial Sequence: Synthetic peptide
TAGKSTD

SEQ ID NO: 7902 - protein, 7 aa, synthetic construct
  REGION 1..7: note = Description of Artificial Sequence: Synthetic peptide
TGVGNAA

SEQ ID NO: 7903 - protein, 7 aa, synthetic construct
  REGION 1..7: note = Description of Artificial Sequence: Synthetic peptide
DPGKMAC

SEQ ID NO: 7904 - protein, 7 aa, synthetic construct
  REGION 1..7: note = Description of Artificial Sequence: Synthetic peptide
EGSDSRS

SEQ ID NO: 7905 - protein, 7 aa, synthetic construct
  REGION 1..7: note = Description of Artificial Sequence: Synthetic peptide
AANSPRS

SEQ ID NO: 7906 - protein, 7 aa, synthetic construct
  REGION 1..7: note = Description of Artificial Sequence: Synthetic peptide
GTSANIK

SEQ ID NO: 7907 - protein, 7 aa, synthetic construct
  REGION 1..7: note = Description of Artificial Sequence: Synthetic peptide
NSSSNTK

SEQ ID NO: 7908 - protein, 7 aa, synthetic construct
  REGION 1..7: note = Description of Artificial Sequence: Synthetic peptide
GMSDTVK

SEQ ID NO: 7909 - protein, 7 aa, synthetic construct
  REGION 1..7: note = Description of Artificial Sequence: Synthetic peptide
SVTSKNV

SEQ ID NO: 7910 - protein, 7 aa, synthetic construct
  REGION 1..7: note = Description of Artificial Sequence: Synthetic peptide
GGNNAKN

SEQ ID NO: 7911 - protein, 7 aa, synthetic construct
  REGION 1..7: note = Description of Artificial Sequence: Synthetic peptide
DLDKPST

SEQ ID NO: 7912 - protein, 7 aa, synthetic construct
  REGION 1..7: note = Description of Artificial Sequence: Synthetic peptide
GGTEHRA

SEQ ID NO: 7913 - protein, 7 aa, synthetic construct
  REGION 1..7: note = Description of Artificial Sequence: Synthetic peptide
DSSSSHN

SEQ ID NO: 7914 - protein, 7 aa, synthetic construct
  REGION 1..7: note = Description of Artificial Sequence: Synthetic peptide
SHGENPR

SEQ ID NO: 7915 - protein, 7 aa, synthetic construct
  REGION 1..7: note = Description of Artificial Sequence: Synthetic peptide
SGDITKS

SEQ ID NO: 7916 - protein, 7 aa, synthetic construct
  REGION 1..7: note = Description of Artificial Sequence: Synthetic peptide
RNDGSTG

SEQ ID NO: 7917 - protein, 7 aa, synthetic construct
  REGION 1..7: note = Description of Artificial Sequence: Synthetic peptide
GSHSASN

SEQ ID NO: 7918 - protein, 7 aa, synthetic construct
  REGION 1..7: note = Description of Artificial Sequence: Synthetic peptide
SSNTKGL

SEQ ID NO: 7919 - protein, 7 aa, synthetic construct
  REGION 1..7: note = Description of Artificial Sequence: Synthetic peptide
NTSTSLN

SEQ ID NO: 7920 - protein, 7 aa, synthetic construct
  REGION 1..7: note = Description of Artificial Sequence: Synthetic peptide
VRNEKSS

SEQ ID NO: 7921 - protein, 7 aa, synthetic construct
  REGION 1..7: note = Description of Artificial Sequence: Synthetic peptide
TKHGQPV

SEQ ID NO: 7922 - protein, 7 aa, synthetic construct
  REGION 1..7: note = Description of Artificial Sequence: Synthetic peptide
GSSDHAR

SEQ ID NO: 7923 - protein, 7 aa, synthetic construct
  REGION 1..7: note = Description of Artificial Sequence: Synthetic peptide
GGSDSRK

SEQ ID NO: 7924 - protein, 7 aa, synthetic construct
  REGION 1..7: note = Description of Artificial Sequence: Synthetic peptide
NRAGAGT

SEQ ID NO: 7925 - protein, 7 aa, synthetic construct
  REGION 1..7: note = Description of Artificial Sequence: Synthetic peptide
RQNSNAG

SEQ ID NO: 7926 - protein, 7 aa, synthetic construct
  REGION 1..7: note = Description of Artificial Sequence: Synthetic peptide
LGAQVNK

SEQ ID NO: 7927 - protein, 7 aa, synthetic construct
  REGION 1..7: note = Description of Artificial Sequence: Synthetic peptide
ATVKPEV

SEQ ID NO: 7928 - protein, 7 aa, synthetic construct
  REGION 1..7: note = Description of Artificial Sequence: Synthetic peptide
SKSQVNT

SEQ ID NO: 7929 - protein, 7 aa, synthetic construct
  REGION 1..7: note = Description of Artificial Sequence: Synthetic peptide
TGNKDKP

SEQ ID NO: 7930 - protein, 7 aa, synthetic construct
  REGION 1..7: note = Description of Artificial Sequence: Synthetic peptide
TSKNVNT

SEQ ID NO: 7931 - protein, 7 aa, synthetic construct
  REGION 1..7: note = Description of Artificial Sequence: Synthetic peptide
STNGGPS

SEQ ID NO: 7932 - protein, 7 aa, synthetic construct
  REGION 1..7: note = Description of Artificial Sequence: Synthetic peptide
DVGLGNK

SEQ ID NO: 7933 - protein, 7 aa, synthetic construct
  REGION 1..7: note = Description of Artificial Sequence: Synthetic peptide
APSNAKV

SEQ ID NO: 7934 - protein, 7 aa, synthetic construct
  REGION 1..7: note = Description of Artificial Sequence: Synthetic peptide
ISGTVAK

SEQ ID NO: 7935 - protein, 7 aa, synthetic construct
  REGION 1..7: note = Description of Artificial Sequence: Synthetic peptide
GGTVSQG

SEQ ID NO: 7936 - protein, 7 aa, synthetic construct
  REGION 1..7: note = Description of Artificial Sequence: Synthetic peptide
RTTPSSG

SEQ ID NO: 7937 - protein, 7 aa, synthetic construct
  REGION 1..7: note = Description of Artificial Sequence: Synthetic peptide
SSGVGSV

SEQ ID NO: 7938 - protein, 7 aa, synthetic construct
  REGION 1..7: note = Description of Artificial Sequence: Synthetic peptide
GNQKSSQ

SEQ ID NO: 7939 - protein, 7 aa, synthetic construct
  REGION 1..7: note = Description of Artificial Sequence: Synthetic peptide
TKASQTA

SEQ ID NO: 7940 - protein, 7 aa, synthetic construct
  REGION 1..7: note = Description of Artificial Sequence: Synthetic peptide
RQSTPSV

SEQ ID NO: 7941 - protein, 7 aa, synthetic construct
  REGION 1..7: note = Description of Artificial Sequence: Synthetic peptide
LAETKPT

SEQ ID NO: 7942 - protein, 7 aa, synthetic construct
  REGION 1..7: note = Description of Artificial Sequence: Synthetic peptide
ASSGTLV

SEQ ID NO: 7943 - protein, 7 aa, synthetic construct
  REGION 1..7: note = Description of Artificial Sequence: Synthetic peptide
AGGSGSP

SEQ ID NO: 7944 - protein, 7 aa, synthetic construct
  REGION 1..7: note = Description of Artificial Sequence: Synthetic peptide
VDSGGSK

SEQ ID NO: 7945 - protein, 7 aa, synthetic construct
  REGION 1..7: note = Description of Artificial Sequence: Synthetic peptide
SQNVSSG

SEQ ID NO: 7946 - protein, 7 aa, synthetic construct
  REGION 1..7: note = Description of Artificial Sequence: Synthetic peptide
ESQSART

SEQ ID NO: 7947 - protein, 7 aa, synthetic construct
  REGION 1..7: note = Description of Artificial Sequence: Synthetic peptide
SQADAKQ

SEQ ID NO: 7948 - protein, 7 aa, synthetic construct
  REGION 1..7: note = Description of Artificial Sequence: Synthetic peptide
QDPAPTK

SEQ ID NO: 7949 - protein, 7 aa, synthetic construct
  REGION 1..7: note = Description of Artificial Sequence: Synthetic peptide
LSGTSSS

SEQ ID NO: 7950 - protein, 7 aa, synthetic construct
  REGION 1..7: note = Description of Artificial Sequence: Synthetic peptide
ENSDRLR

SEQ ID NO: 7951 - protein, 7 aa, synthetic construct
  REGION 1..7: note = Description of Artificial Sequence: Synthetic peptide
SPKGQGD

SEQ ID NO: 7952 - protein, 7 aa, synthetic construct
  REGION 1..7: note = Description of Artificial Sequence: Synthetic peptide
LGNGQGN

SEQ ID NO: 7953 - protein, 7 aa, synthetic construct
  REGION 1..7: note = Description of Artificial Sequence: Synthetic peptide
VGATTGS

SEQ ID NO: 7954 - protein, 7 aa, synthetic construct
  REGION 1..7: note = Description of Artificial Sequence: Synthetic peptide
KLAQQNA

SEQ ID NO: 7955 - protein, 7 aa, synthetic construct
  REGION 1..7: note = Description of Artificial Sequence: Synthetic peptide
SSQAQGQ

SEQ ID NO: 7956 - protein, 7 aa, synthetic construct
  REGION 1..7: note = Description of Artificial Sequence: Synthetic peptide
HQKGGGQ

SEQ ID NO: 7957 - protein, 7 aa, synthetic construct
  REGION 1..7: note = Description of Artificial Sequence: Synthetic peptide
EGNNRAH

SEQ ID NO: 7958 - protein, 7 aa, synthetic construct
  REGION 1..7: note = Description of Artificial Sequence: Synthetic peptide
ATNANPR

SEQ ID NO: 7959 - protein, 7 aa, synthetic construct
  REGION 1..7: note = Description of Artificial Sequence: Synthetic peptide
STSSQSG

SEQ ID NO: 7960 - protein, 7 aa, synthetic construct
  REGION 1..7: note = Description of Artificial Sequence: Synthetic peptide
TPSKTAT

SEQ ID NO: 7961 - protein, 7 aa, synthetic construct
  REGION 1..7: note = Description of Artificial Sequence: Synthetic peptide
QTGTTSA

SEQ ID NO: 7962 - protein, 7 aa, synthetic construct
  REGION 1..7: note = Description of Artificial Sequence: Synthetic peptide
QGSHSVM

SEQ ID NO: 7963 - protein, 7 aa, synthetic construct
  REGION 1..7: note = Description of Artificial Sequence: Synthetic peptide
NQVSTLG

SEQ ID NO: 7964 - protein, 7 aa, synthetic construct
  REGION 1..7: note = Description of Artificial Sequence: Synthetic peptide
HAGKGPT

SEQ ID NO: 7965 - protein, 7 aa, synthetic construct
  REGION 1..7: note = Description of Artificial Sequence: Synthetic peptide
SSTGSTG

SEQ ID NO: 7966 - protein, 7 aa, synthetic construct
  REGION 1..7: note = Description of Artificial Sequence: Synthetic peptide
GRTDSAT

SEQ ID NO: 7967 - protein, 7 aa, synthetic construct
  REGION 1..7: note = Description of Artificial Sequence: Synthetic peptide
STSGSSH

SEQ ID NO: 7968 - protein, 7 aa, synthetic construct
  REGION 1..7: note = Description of Artificial Sequence: Synthetic peptide
SQVGTNT

SEQ ID NO: 7969 - protein, 7 aa, synthetic construct
  REGION 1..7: note = Description of Artificial Sequence: Synthetic peptide
SHNSKAS

SEQ ID NO: 7970 - protein, 7 aa, synthetic construct
  REGION 1..7: note = Description of Artificial Sequence: Synthetic peptide
LTRERNE

SEQ ID NO: 7971 - protein, 7 aa, synthetic construct
  REGION 1..7: note = Description of Artificial Sequence: Synthetic peptide
RNDGPSK

SEQ ID NO: 7972 - protein, 7 aa, synthetic construct
  REGION 1..7: note = Description of Artificial Sequence: Synthetic peptide
RMDGKNA

SEQ ID NO: 7973 - protein, 7 aa, synthetic construct
  REGION 1..7: note = Description of Artificial Sequence: Synthetic peptide
SATSTAA

SEQ ID NO: 7974 - protein, 7 aa, synthetic construct
  REGION 1..7: note = Description of Artificial Sequence: Synthetic peptide
QLDKHNV

SEQ ID NO: 7975 - protein, 7 aa, synthetic construct
  REGION 1..7: note = Description of Artificial Sequence: Synthetic peptide
AHSQGNT

SEQ ID NO: 7976 - protein, 7 aa, synthetic construct
  REGION 1..7: note = Description of Artificial Sequence: Synthetic peptide
STTPSGP

SEQ ID NO: 7977 - protein, 7 aa, synthetic construct
  REGION 1..7: note = Description of Artificial Sequence: Synthetic peptide
SVAPRSG

SEQ ID NO: 7978 - protein, 7 aa, synthetic construct
  REGION 1..7: note = Description of Artificial Sequence: Synthetic peptide
QGEHASS

SEQ ID NO: 7979 - protein, 7 aa, synthetic construct
  REGION 1..7: note = Description of Artificial Sequence: Synthetic peptide
DTNSGPR

SEQ ID NO: 7980 - protein, 7 aa, synthetic construct
  REGION 1..7: note = Description of Artificial Sequence: Synthetic peptide
DKAIPGS

SEQ ID NO: 7981 - protein, 7 aa, synthetic construct
  REGION 1..7: note = Description of Artificial Sequence: Synthetic peptide
DAPTSRS

SEQ ID NO: 7982 - protein, 7 aa, synthetic construct
  REGION 1..7: note = Description of Artificial Sequence: Synthetic peptide
QSTGIHG

SEQ ID NO: 7983 - protein, 7 aa, synthetic construct
  REGION 1..7: note = Description of Artificial Sequence: Synthetic peptide
GVMPKEN

SEQ ID NO: 7984 - protein, 7 aa, synthetic construct
  REGION 1..7: note = Description of Artificial Sequence: Synthetic peptide
TPSTEKG

SEQ ID NO: 7985 - protein, 7 aa, synthetic construct
  REGION 1..7: note = Description of Artificial Sequence: Synthetic peptide
MADSKAN

SEQ ID NO: 7986 - protein, 7 aa, synthetic construct
  REGION 1..7: note = Description of Artificial Sequence: Synthetic peptide
GLTTGKL

SEQ ID NO: 7987 - protein, 7 aa, synthetic construct
  REGION 1..7: note = Description of Artificial Sequence: Synthetic peptide
VSGPNPA

SEQ ID NO: 7988 - protein, 7 aa, synthetic construct
  REGION 1..7: note = Description of Artificial Sequence: Synthetic peptide
ALTTNKD

SEQ ID NO: 7989 - protein, 7 aa, synthetic construct
  REGION 1..7: note = Description of Artificial Sequence: Synthetic peptide
VSGQSSP

SEQ ID NO: 7990 - protein, 7 aa, synthetic construct
  REGION 1..7: note = Description of Artificial Sequence: Synthetic peptide
SSSPAKV

SEQ ID NO: 7991 - protein, 7 aa, synthetic construct
  REGION 1..7: note = Description of Artificial Sequence: Synthetic peptide
DSASKAS

SEQ ID NO: 7992 - protein, 7 aa, synthetic construct
  REGION 1..7: note = Description of Artificial Sequence: Synthetic peptide
LATSKTT

SEQ ID NO: 7993 - protein, 7 aa, synthetic construct
  REGION 1..7: note = Description of Artificial Sequence: Synthetic peptide
AHSSKPA

SEQ ID NO: 7994 - protein, 7 aa, synthetic construct
  REGION 1..7: note = Description of Artificial Sequence: Synthetic peptide
GGVPSTH

SEQ ID NO: 7995 - protein, 7 aa, synthetic construct
  REGION 1..7: note = Description of Artificial Sequence: Synthetic peptide
ESGERSH

SEQ ID NO: 7996 - protein, 7 aa, synthetic construct
  REGION 1..7: note = Description of Artificial Sequence: Synthetic peptide
GGEPKLA

SEQ ID NO: 7997 - protein, 7 aa, synthetic construct
  REGION 1..7: note = Description of Artificial Sequence: Synthetic peptide
NSGDRGG

SEQ ID NO: 7998 - protein, 7 aa, synthetic construct
  REGION 1..7: note = Description of Artificial Sequence: Synthetic peptide
NGVKSTS

SEQ ID NO: 7999 - protein, 7 aa, synthetic construct
  REGION 1..7: note = Description of Artificial Sequence: Synthetic peptide
TGARETA

SEQ ID NO: 8000 - protein, 7 aa, synthetic construct
  REGION 1..7: note = Description of Artificial Sequence: Synthetic peptide
SNAGQHS

SEQ ID NO: 8001 - protein, 7 aa, synthetic construct
  REGION 1..7: note = Description of Artificial Sequence: Synthetic peptide
SGGTSLV

SEQ ID NO: 8002 - protein, 7 aa, synthetic construct
  REGION 1..7: note = Description of Artificial Sequence: Synthetic peptide
SSGNIHS

SEQ ID NO: 8003 - protein, 7 aa, synthetic construct
  REGION 1..7: note = Description of Artificial Sequence: Synthetic peptide
QSSSKTS

SEQ ID NO: 8004 - protein, 7 aa, synthetic construct
  REGION 1..7: note = Description of Artificial Sequence: Synthetic peptide
HAGGTAA

SEQ ID NO: 8005 - protein, 7 aa, synthetic construct
  REGION 1..7: note = Description of Artificial Sequence: Synthetic peptide
DPSRKNS

SEQ ID NO: 8006 - protein, 7 aa, synthetic construct
  REGION 1..7: note = Description of Artificial Sequence: Synthetic peptide
AMDKQNT

SEQ ID NO: 8007 - protein, 7 aa, synthetic construct
  REGION 1..7: note = Description of Artificial Sequence: Synthetic peptide
GQEGAGR

SEQ ID NO: 8008 - protein, 7 aa, synthetic construct
  REGION 1..7: note = Description of Artificial Sequence: Synthetic peptide
GTSNSRV

SEQ ID NO: 8009 - protein, 7 aa, synthetic construct
  REGION 1..7: note = Description of Artificial Sequence: Synthetic peptide
STGPSSL

SEQ ID NO: 8010 - protein, 7 aa, synthetic construct
  REGION 1..7: note = Description of Artificial Sequence: Synthetic peptide
SGTEIRK

SEQ ID NO: 8011 - protein, 7 aa, synthetic construct
  REGION 1..7: note = Description of Artificial Sequence: Synthetic peptide
RREKANE

SEQ ID NO: 8012 - protein, 7 aa, synthetic construct
  REGION 1..7: note = Description of Artificial Sequence: Synthetic peptide
RDLKPIE

SEQ ID NO: 8013 - protein, 7 aa, synthetic construct
  REGION 1..7: note = Description of Artificial Sequence: Synthetic peptide
EGKSPLT

SEQ ID NO: 8014 - protein, 7 aa, synthetic construct
  REGION 1..7: note = Description of Artificial Sequence: Synthetic peptide
AGSNEHR

SEQ ID NO: 8015 - protein, 7 aa, synthetic construct
  REGION 1..7: note = Description of Artificial Sequence: Synthetic peptide
LASGDKG

SEQ ID NO: 8016 - protein, 7 aa, synthetic construct
  REGION 1..7: note = Description of Artificial Sequence: Synthetic peptide
AETTKSL

SEQ ID NO: 8017 - protein, 7 aa, synthetic construct
  REGION 1..7: note = Description of Artificial Sequence: Synthetic peptide
GMHTSAG

SEQ ID NO: 8018 - protein, 7 aa, synthetic construct
  REGION 1..7: note = Description of Artificial Sequence: Synthetic peptide
NAISSTK

SEQ ID NO: 8019 - protein, 7 aa, synthetic construct
  REGION 1..7: note = Description of Artificial Sequence: Synthetic peptide
TDGNRGS

SEQ ID NO: 8020 - protein, 7 aa, synthetic construct
  REGION 1..7: note = Description of Artificial Sequence: Synthetic peptide
TQKTVTG

SEQ ID NO: 8021 - protein, 7 aa, synthetic construct
  REGION 1..7: note = Description of Artificial Sequence: Synthetic peptide
RDTKESG

SEQ ID NO: 8022 - protein, 7 aa, synthetic construct
  REGION 1..7: note = Description of Artificial Sequence: Synthetic peptide
ATQSSNK

SEQ ID NO: 8023 - protein, 7 aa, synthetic construct
  REGION 1..7: note = Description of Artificial Sequence: Synthetic peptide
GISKATS

SEQ ID NO: 8024 - protein, 7 aa, synthetic construct
  REGION 1..7: note = Description of Artificial Sequence: Synthetic peptide
TQESSSR

SEQ ID NO: 8025 - protein, 7 aa, synthetic construct
  REGION 1..7: note = Description of Artificial Sequence: Synthetic peptide
SSGSGVP

SEQ ID NO: 8026 - protein, 7 aa, synthetic construct
  REGION 1..7: note = Description of Artificial Sequence: Synthetic peptide
NPTNNSS

SEQ ID NO: 8027 - protein, 7 aa, synthetic construct
  REGION 1..7: note = Description of Artificial Sequence: Synthetic peptide
NAGKDLI

SEQ ID NO: 8028 - protein, 7 aa, synthetic construct
  REGION 1..7: note = Description of Artificial Sequence: Synthetic peptide
SAASPGA

SEQ ID NO: 8029 - protein, 7 aa, synthetic construct
  REGION 1..7: note = Description of Artificial Sequence: Synthetic peptide
DTNHPGR

SEQ ID NO: 8030 - protein, 7 aa, synthetic construct
  REGION 1..7: note = Description of Artificial Sequence: Synthetic peptide
GQKSQGG

SEQ ID NO: 8031 - protein, 7 aa, synthetic construct
  REGION 1..7: note = Description of Artificial Sequence: Synthetic peptide
GDGKGFL

SEQ ID NO: 8032 - protein, 7 aa, synthetic construct
  REGION 1..7: note = Description of Artificial Sequence: Synthetic peptide
QSNSGSR

SEQ ID NO: 8033 - protein, 7 aa, synthetic construct
  REGION 1..7: note = Description of Artificial Sequence: Synthetic peptide
ESGASTA

SEQ ID NO: 8034 - protein, 7 aa, synthetic construct
  REGION 1..7: note = Description of Artificial Sequence: Synthetic peptide
NNTESNK

SEQ ID NO: 8035 - protein, 7 aa, synthetic construct
  REGION 1..7: note = Description of Artificial Sequence: Synthetic peptide
TTHERGS

SEQ ID NO: 8036 - protein, 7 aa, synthetic construct
  REGION 1..7: note = Description of Artificial Sequence: Synthetic peptide
SARSPNV

SEQ ID NO: 8037 - protein, 7 aa, synthetic construct
  REGION 1..7: note = Description of Artificial Sequence: Synthetic peptide
GVSTGDR

SEQ ID NO: 8038 - protein, 7 aa, synthetic construct
  REGION 1..7: note = Description of Artificial Sequence: Synthetic peptide
YQSANAH

SEQ ID NO: 8039 - protein, 7 aa, synthetic construct
  REGION 1..7: note = Description of Artificial Sequence: Synthetic peptide
ISGNSQA

SEQ ID NO: 8040 - protein, 7 aa, synthetic construct
  REGION 1..7: note = Description of Artificial Sequence: Synthetic peptide
RGSDAKS

SEQ ID NO: 8041 - protein, 7 aa, synthetic construct
  REGION 1..7: note = Description of Artificial Sequence: Synthetic peptide
SGSSQGN

SEQ ID NO: 8042 - protein, 7 aa, synthetic construct
  REGION 1..7: note = Description of Artificial Sequence: Synthetic peptide
DRGSGTA

SEQ ID NO: 8043 - protein, 7 aa, synthetic construct
  REGION 1..7: note = Description of Artificial Sequence: Synthetic peptide
GHDSAPV

SEQ ID NO: 8044 - protein, 7 aa, synthetic construct
  REGION 1..7: note = Description of Artificial Sequence: Synthetic peptide
GSGQTLT

SEQ ID NO: 8045 - protein, 7 aa, synthetic construct
  REGION 1..7: note = Description of Artificial Sequence: Synthetic peptide
VTSSSVS

SEQ ID NO: 8046 - protein, 7 aa, synthetic construct
  REGION 1..7: note = Description of Artificial Sequence: Synthetic peptide
EGKSSLN

SEQ ID NO: 8047 - protein, 7 aa, synthetic construct
  REGION 1..7: note = Description of Artificial Sequence: Synthetic peptide
AKTNENK

SEQ ID NO: 8048 - protein, 7 aa, synthetic construct
  REGION 1..7: note = Description of Artificial Sequence: Synthetic peptide
GDRKGGQ

SEQ ID NO: 8049 - protein, 7 aa, synthetic construct
  REGION 1..7: note = Description of Artificial Sequence: Synthetic peptide
QAGSASM

SEQ ID NO: 8050 - protein, 7 aa, synthetic construct
  REGION 1..7: note = Description of Artificial Sequence: Synthetic peptide
ESTDPRI

SEQ ID NO: 8051 - protein, 7 aa, synthetic construct
  REGION 1..7: note = Description of Artificial Sequence: Synthetic peptide
LESKHAT

SEQ ID NO: 8052 - protein, 7 aa, synthetic construct
  REGION 1..7: note = Description of Artificial Sequence: Synthetic peptide
GKAQTNV

SEQ ID NO: 8053 - protein, 7 aa, synthetic construct
  REGION 1..7: note = Description of Artificial Sequence: Synthetic peptide
ERVSTNQ

SEQ ID NO: 8054 - protein, 7 aa, synthetic construct
  REGION 1..7: note = Description of Artificial Sequence: Synthetic peptide
SNVSGSG

SEQ ID NO: 8055 - protein, 7 aa, synthetic construct
  REGION 1..7: note = Description of Artificial Sequence: Synthetic peptide
TLQNPNG

SEQ ID NO: 8056 - protein, 7 aa, synthetic construct
  REGION 1..7: note = Description of Artificial Sequence: Synthetic peptide
APSPGGS

SEQ ID NO: 8057 - protein, 7 aa, synthetic construct
  REGION 1..7: note = Description of Artificial Sequence: Synthetic peptide
SAQAPTL

SEQ ID NO: 8058 - protein, 7 aa, synthetic construct
  REGION 1..7: note = Description of Artificial Sequence: Synthetic peptide
TGSDKSD

SEQ ID NO: 8059 - protein, 7 aa, synthetic construct
  REGION 1..7: note = Description of Artificial Sequence: Synthetic peptide
TSTAQST

SEQ ID NO: 8060 - protein, 7 aa, synthetic construct
  REGION 1..7: note = Description of Artificial Sequence: Synthetic peptide
SNGAASV

SEQ ID NO: 8061 - protein, 7 aa, synthetic construct
  REGION 1..7: note = Description of Artificial Sequence: Synthetic peptide
ESIKANS

SEQ ID NO: 8062 - protein, 7 aa, synthetic construct
  REGION 1..7: note = Description of Artificial Sequence: Synthetic peptide
TGSAPTT

SEQ ID NO: 8063 - protein, 7 aa, synthetic construct
  REGION 1..7: note = Description of Artificial Sequence: Synthetic peptide
LRAQKME

SEQ ID NO: 8064 - protein, 7 aa, synthetic construct
  REGION 1..7: note = Description of Artificial Sequence: Synthetic peptide
NTADRMG

SEQ ID NO: 8065 - protein, 7 aa, synthetic construct
  REGION 1..7: note = Description of Artificial Sequence: Synthetic peptide
ADEGSKK

SEQ ID NO: 8066 - protein, 7 aa, synthetic construct
  REGION 1..7: note = Description of Artificial Sequence: Synthetic peptide
VKESSRG

SEQ ID NO: 8067 - protein, 7 aa, synthetic construct
  REGION 1..7: note = Description of Artificial Sequence: Synthetic peptide
SSKQVNG

SEQ ID NO: 8068 - protein, 7 aa, synthetic construct
  REGION 1..7: note = Description of Artificial Sequence: Synthetic peptide
NGSSSPS

SEQ ID NO: 8069 - protein, 7 aa, synthetic construct
  REGION 1..7: note = Description of Artificial Sequence: Synthetic peptide
DSHGART

SEQ ID NO: 8070 - protein, 7 aa, synthetic construct
  REGION 1..7: note = Description of Artificial Sequence: Synthetic peptide
ANAKQGA

SEQ ID NO: 8071 - protein, 7 aa, synthetic construct
  REGION 1..7: note = Description of Artificial Sequence: Synthetic peptide
GSSNSQA

SEQ ID NO: 8072 - protein, 7 aa, synthetic construct
  REGION 1..7: note = Description of Artificial Sequence: Synthetic peptide
NSTGSPI

SEQ ID NO: 8073 - protein, 7 aa, synthetic construct
  REGION 1..7: note = Description of Artificial Sequence: Synthetic peptide
GTTGTLT

SEQ ID NO: 8074 - protein, 7 aa, synthetic construct
  REGION 1..7: note = Description of Artificial Sequence: Synthetic peptide
GVQDPAR

SEQ ID NO: 8075 - protein, 7 aa, synthetic construct
  REGION 1..7: note = Description of Artificial Sequence: Synthetic peptide
GSQSGSS

SEQ ID NO: 8076 - protein, 7 aa, synthetic construct
  REGION 1..7: note = Description of Artificial Sequence: Synthetic peptide
ATSSSQS

SEQ ID NO: 8077 - protein, 7 aa, synthetic construct
  REGION 1..7: note = Description of Artificial Sequence: Synthetic peptide
KESSPSL

SEQ ID NO: 8078 - protein, 7 aa, synthetic construct
  REGION 1..7: note = Description of Artificial Sequence: Synthetic peptide
ALPSKTT

SEQ ID NO: 8079 - protein, 7 aa, synthetic construct
  REGION 1..7: note = Description of Artificial Sequence: Synthetic peptide
SGSNTLS

SEQ ID NO: 8080 - protein, 7 aa, synthetic construct
  REGION 1..7: note = Description of Artificial Sequence: Synthetic peptide
SNQSSVI

SEQ ID NO: 8081 - protein, 7 aa, synthetic construct
  REGION 1..7: note = Description of Artificial Sequence: Synthetic peptide
SPLKQGG

SEQ ID NO: 8082 - protein, 7 aa, synthetic construct
  REGION 1..7: note = Description of Artificial Sequence: Synthetic peptide
SNSGSRL

SEQ ID NO: 8083 - protein, 7 aa, synthetic construct
  REGION 1..7: note = Description of Artificial Sequence: Synthetic peptide
DAGNGSH

SEQ ID NO: 8084 - protein, 7 aa, synthetic construct
  REGION 1..7: note = Description of Artificial Sequence: Synthetic peptide
GQNKPVN

SEQ ID NO: 8085 - protein, 7 aa, synthetic construct
  REGION 1..7: note = Description of Artificial Sequence: Synthetic peptide
ASTKPLL

SEQ ID NO: 8086 - protein, 7 aa, synthetic construct
  REGION 1..7: note = Description of Artificial Sequence: Synthetic peptide
GERPSPA

SEQ ID NO: 8087 - protein, 7 aa, synthetic construct
  REGION 1..7: note = Description of Artificial Sequence: Synthetic peptide
NSQNTHV

SEQ ID NO: 8088 - protein, 7 aa, synthetic construct
  REGION 1..7: note = Description of Artificial Sequence: Synthetic peptide
SSGQSGK

SEQ ID NO: 8089 - protein, 7 aa, synthetic construct
  REGION 1..7: note = Description of Artificial Sequence: Synthetic peptide
SPTKPVD

SEQ ID NO: 8090 - protein, 7 aa, synthetic construct
  REGION 1..7: note = Description of Artificial Sequence: Synthetic peptide
DPPSTSK

SEQ ID NO: 8091 - protein, 7 aa, synthetic construct
  REGION 1..7: note = Description of Artificial Sequence: Synthetic peptide
VISPKTN

SEQ ID NO: 8092 - protein, 7 aa, synthetic construct
  REGION 1..7: note = Description of Artificial Sequence: Synthetic peptide
NVSGHPN

SEQ ID NO: 8093 - protein, 7 aa, synthetic construct
  REGION 1..7: note = Description of Artificial Sequence: Synthetic peptide
SSGSGPM

SEQ ID NO: 8094 - protein, 7 aa, synthetic construct
  REGION 1..7: note = Description of Artificial Sequence: Synthetic peptide
EATSSTN

SEQ ID NO: 8095 - protein, 7 aa, synthetic construct
  REGION 1..7: note = Description of Artificial Sequence: Synthetic peptide
GQTQGRP

SEQ ID NO: 8096 - protein, 7 aa, synthetic construct
  REGION 1..7: note = Description of Artificial Sequence: Synthetic peptide
LSSSPIK

SEQ ID NO: 8097 - protein, 7 aa, synthetic construct
  REGION 1..7: note = Description of Artificial Sequence: Synthetic peptide
STNSKLM

SEQ ID NO: 8098 - protein, 7 aa, synthetic construct
  REGION 1..7: note = Description of Artificial Sequence: Synthetic peptide
ETASKVQ

SEQ ID NO: 8099 - protein, 7 aa, synthetic construct
  REGION 1..7: note = Description of Artificial Sequence: Synthetic peptide
VMSKAGS

SEQ ID NO: 8100 - protein, 7 aa, synthetic construct
  REGION 1..7: note = Description of Artificial Sequence: Synthetic peptide
SGGSSGL

SEQ ID NO: 8101 - protein, 7 aa, synthetic construct
  REGION 1..7: note = Description of Artificial Sequence: Synthetic peptide
ANSGSNL

SEQ ID NO: 8102 - protein, 7 aa, synthetic construct
  REGION 1..7: note = Description of Artificial Sequence: Synthetic peptide
STRPSSA

SEQ ID NO: 8103 - protein, 7 aa, synthetic construct
  REGION 1..7: note = Description of Artificial Sequence: Synthetic peptide
AQEQSGK

SEQ ID NO: 8104 - protein, 7 aa, synthetic construct
  REGION 1..7: note = Description of Artificial Sequence: Synthetic peptide
VANSHNK

SEQ ID NO: 8105 - protein, 7 aa, synthetic construct
  REGION 1..7: note = Description of Artificial Sequence: Synthetic peptide
ATMNASK

SEQ ID NO: 8106 - protein, 7 aa, synthetic construct
  REGION 1..7: note = Description of Artificial Sequence: Synthetic peptide
NPVKSTG

SEQ ID NO: 8107 - protein, 7 aa, synthetic construct
  REGION 1..7: note = Description of Artificial Sequence: Synthetic peptide
NANNSAS

SEQ ID NO: 8108 - protein, 7 aa, synthetic construct
  REGION 1..7: note = Description of Artificial Sequence: Synthetic peptide
SNATATM

SEQ ID NO: 8109 - protein, 7 aa, synthetic construct
  REGION 1..7: note = Description of Artificial Sequence: Synthetic peptide
DRQPTNT

SEQ ID NO: 8110 - protein, 7 aa, synthetic construct
  REGION 1..7: note = Description of Artificial Sequence: Synthetic peptide
GSETTVR

SEQ ID NO: 8111 - protein, 7 aa, synthetic construct
  REGION 1..7: note = Description of Artificial Sequence: Synthetic peptide
QSASANS

SEQ ID NO: 8112 - protein, 7 aa, synthetic construct
  REGION 1..7: note = Description of Artificial Sequence: Synthetic peptide
SGTPQRG

SEQ ID NO: 8113 - protein, 7 aa, synthetic construct
  REGION 1..7: note = Description of Artificial Sequence: Synthetic peptide
QSHKETT

SEQ ID NO: 8114 - protein, 7 aa, synthetic construct
  REGION 1..7: note = Description of Artificial Sequence: Synthetic peptide
TESNGHS

SEQ ID NO: 8115 - protein, 7 aa, synthetic construct
  REGION 1..7: note = Description of Artificial Sequence: Synthetic peptide
TKNTGNL

SEQ ID NO: 8116 - protein, 7 aa, synthetic construct
  REGION 1..7: note = Description of Artificial Sequence: Synthetic peptide
SSNDQRK

SEQ ID NO: 8117 - protein, 7 aa, synthetic construct
  REGION 1..7: note = Description of Artificial Sequence: Synthetic peptide
RNGGSSL

SEQ ID NO: 8118 - protein, 7 aa, synthetic construct
  REGION 1..7: note = Description of Artificial Sequence: Synthetic peptide
EGRASSG

SEQ ID NO: 8119 - protein, 7 aa, synthetic construct
  REGION 1..7: note = Description of Artificial Sequence: Synthetic peptide
DETQSRK

SEQ ID NO: 8120 - protein, 7 aa, synthetic construct
  REGION 1..7: note = Description of Artificial Sequence: Synthetic peptide
ETHTAKS

SEQ ID NO: 8121 - protein, 7 aa, synthetic construct
  REGION 1..7: note = Description of Artificial Sequence: Synthetic peptide
ASTSNAG

SEQ ID NO: 8122 - protein, 7 aa, synthetic construct
  REGION 1..7: note = Description of Artificial Sequence: Synthetic peptide
ASSNKEG

SEQ ID NO: 8123 - protein, 7 aa, synthetic construct
  REGION 1..7: note = Description of Artificial Sequence: Synthetic peptide
AGANTSN

SEQ ID NO: 8124 - protein, 7 aa, synthetic construct
  REGION 1..7: note = Description of Artificial Sequence: Synthetic peptide
GKETSLV

SEQ ID NO: 8125 - protein, 7 aa, synthetic construct
  REGION 1..7: note = Description of Artificial Sequence: Synthetic peptide
GGVSTNG

SEQ ID NO: 8126 - protein, 7 aa, synthetic construct
  REGION 1..7: note = Description of Artificial Sequence: Synthetic peptide
VANSNAK

SEQ ID NO: 8127 - protein, 7 aa, synthetic construct
  REGION 1..7: note = Description of Artificial Sequence: Synthetic peptide
VNTKSPT

SEQ ID NO: 8128 - protein, 7 aa, synthetic construct
  REGION 1..7: note = Description of Artificial Sequence: Synthetic peptide
TTSKASN

SEQ ID NO: 8129 - protein, 7 aa, synthetic construct
  REGION 1..7: note = Description of Artificial Sequence: Synthetic peptide
QLAEHGK

SEQ ID NO: 8130 - protein, 7 aa, synthetic construct
  REGION 1..7: note = Description of Artificial Sequence: Synthetic peptide
GANATDR

SEQ ID NO: 8131 - protein, 7 aa, synthetic construct
  REGION 1..7: note = Description of Artificial Sequence: Synthetic peptide
TADTPKQ

SEQ ID NO: 8132 - protein, 7 aa, synthetic construct
  REGION 1..7: note = Description of Artificial Sequence: Synthetic peptide
TNTTSTT

SEQ ID NO: 8133 - protein, 7 aa, synthetic construct
  REGION 1..7: note = Description of Artificial Sequence: Synthetic peptide
DTGRSSP

SEQ ID NO: 8134 - protein, 7 aa, synthetic construct
  REGION 1..7: note = Description of Artificial Sequence: Synthetic peptide
GTVPTSQ

SEQ ID NO: 8135 - protein, 7 aa, synthetic construct
  REGION 1..7: note = Description of Artificial Sequence: Synthetic peptide
GGTQDLR

SEQ ID NO: 8136 - protein, 7 aa, synthetic construct
  REGION 1..7: note = Description of Artificial Sequence: Synthetic peptide
GHDKALA

SEQ ID NO: 8137 - protein, 7 aa, synthetic construct
  REGION 1..7: note = Description of Artificial Sequence: Synthetic peptide
LPTTGSG

SEQ ID NO: 8138 - protein, 7 aa, synthetic construct
  REGION 1..7: note = Description of Artificial Sequence: Synthetic peptide
QGTSSVV

SEQ ID NO: 8139 - protein, 7 aa, synthetic construct
  REGION 1..7: note = Description of Artificial Sequence: Synthetic peptide
QGNGGPS

SEQ ID NO: 8140 - protein, 7 aa, synthetic construct
  REGION 1..7: note = Description of Artificial Sequence: Synthetic peptide
RPTDKST

SEQ ID NO: 8141 - protein, 7 aa, synthetic construct
  REGION 1..7: note = Description of Artificial Sequence: Synthetic peptide
SIATPSK

SEQ ID NO: 8142 - protein, 7 aa, synthetic construct
  REGION 1..7: note = Description of Artificial Sequence: Synthetic peptide
RQDKLGS

SEQ ID NO: 8143 - protein, 7 aa, synthetic construct
  REGION 1..7: note = Description of Artificial Sequence: Synthetic peptide
STKQSSG

SEQ ID NO: 8144 - protein, 7 aa, synthetic construct
  REGION 1..7: note = Description of Artificial Sequence: Synthetic peptide
MADKAAV

SEQ ID NO: 8145 - protein, 7 aa, synthetic construct
  REGION 1..7: note = Description of Artificial Sequence: Synthetic peptide
VGSDAVR

SEQ ID NO: 8146 - protein, 7 aa, synthetic construct
  REGION 1..7: note = Description of Artificial Sequence: Synthetic peptide
NVNSKDK

SEQ ID NO: 8147 - protein, 7 aa, synthetic construct
  REGION 1..7: note = Description of Artificial Sequence: Synthetic peptide
NLSTGGG

SEQ ID NO: 8148 - protein, 7 aa, synthetic construct
  REGION 1..7: note = Description of Artificial Sequence: Synthetic peptide
GRNVPSS

SEQ ID NO: 8149 - protein, 7 aa, synthetic construct
  REGION 1..7: note = Description of Artificial Sequence: Synthetic peptide
ANKEGPR

SEQ ID NO: 8150 - protein, 7 aa, synthetic construct
  REGION 1..7: note = Description of Artificial Sequence: Synthetic peptide
NASQTST

SEQ ID NO: 8151 - protein, 7 aa, synthetic construct
  REGION 1..7: note = Description of Artificial Sequence: Synthetic peptide
RNGGNSN

SEQ ID NO: 8152 - protein, 7 aa, synthetic construct
  REGION 1..7: note = Description of Artificial Sequence: Synthetic peptide
ASAKGSY

SEQ ID NO: 8153 - protein, 7 aa, synthetic construct
  REGION 1..7: note = Description of Artificial Sequence: Synthetic peptide
GETNTNR

SEQ ID NO: 8154 - protein, 7 aa, synthetic construct
  REGION 1..7: note = Description of Artificial Sequence: Synthetic peptide
IGTPATS

SEQ ID NO: 8155 - protein, 7 aa, synthetic construct
  REGION 1..7: note = Description of Artificial Sequence: Synthetic peptide
DSNATSR

SEQ ID NO: 8156 - protein, 7 aa, synthetic construct
  REGION 1..7: note = Description of Artificial Sequence: Synthetic peptide
QKVTNHE

SEQ ID NO: 8157 - protein, 7 aa, synthetic construct
  REGION 1..7: note = Description of Artificial Sequence: Synthetic peptide
ADGRSST

SEQ ID NO: 8158 - protein, 7 aa, synthetic construct
  REGION 1..7: note = Description of Artificial Sequence: Synthetic peptide
GATGSMN

SEQ ID NO: 8159 - protein, 7 aa, synthetic construct
  REGION 1..7: note = Description of Artificial Sequence: Synthetic peptide
GLSQSPT

SEQ ID NO: 8160 - protein, 7 aa, synthetic construct
  REGION 1..7: note = Description of Artificial Sequence: Synthetic peptide
TKSNEHA

SEQ ID NO: 8161 - protein, 7 aa, synthetic construct
  REGION 1..7: note = Description of Artificial Sequence: Synthetic peptide
SSDTRGL

SEQ ID NO: 8162 - protein, 7 aa, synthetic construct
  REGION 1..7: note = Description of Artificial Sequence: Synthetic peptide
VATKANT

SEQ ID NO: 8163 - protein, 7 aa, synthetic construct
  REGION 1..7: note = Description of Artificial Sequence: Synthetic peptide
DTGGKMV

SEQ ID NO: 8164 - protein, 7 aa, synthetic construct
  REGION 1..7: note = Description of Artificial Sequence: Synthetic peptide
AQHTKSA

SEQ ID NO: 8165 - protein, 7 aa, synthetic construct
  REGION 1..7: note = Description of Artificial Sequence: Synthetic peptide
APGSKHS

SEQ ID NO: 8166 - protein, 7 aa, synthetic construct
  REGION 1..7: note = Description of Artificial Sequence: Synthetic peptide
GTSIGDG

SEQ ID NO: 8167 - protein, 7 aa, synthetic construct
  REGION 1..7: note = Description of Artificial Sequence: Synthetic peptide
GSQDPRR

SEQ ID NO: 8168 - protein, 7 aa, synthetic construct
  REGION 1..7: note = Description of Artificial Sequence: Synthetic peptide
GLMKESP

SEQ ID NO: 8169 - protein, 7 aa, synthetic construct
  REGION 1..7: note = Description of Artificial Sequence: Synthetic peptide
VTHGKSE

SEQ ID NO: 8170 - protein, 7 aa, synthetic construct
  REGION 1..7: note = Description of Artificial Sequence: Synthetic peptide
SAASSNA

SEQ ID NO: 8171 - protein, 7 aa, synthetic construct
  REGION 1..7: note = Description of Artificial Sequence: Synthetic peptide
AAGVSSV

SEQ ID NO: 8172 - protein, 7 aa, synthetic construct
  REGION 1..7: note = Description of Artificial Sequence: Synthetic peptide
SQNEQRS

SEQ ID NO: 8173 - protein, 7 aa, synthetic construct
  REGION 1..7: note = Description of Artificial Sequence: Synthetic peptide
NSTSHSE

SEQ ID NO: 8174 - protein, 7 aa, synthetic construct
  REGION 1..7: note = Description of Artificial Sequence: Synthetic peptide
NHEAGKL

SEQ ID NO: 8175 - protein, 7 aa, synthetic construct
  REGION 1..7: note = Description of Artificial Sequence: Synthetic peptide
NGSPSAQ

SEQ ID NO: 8176 - protein, 7 aa, synthetic construct
  REGION 1..7: note = Description of Artificial Sequence: Synthetic peptide
TNTKTPS

SEQ ID NO: 8177 - protein, 7 aa, synthetic construct
  REGION 1..7: note = Description of Artificial Sequence: Synthetic peptide
DKGQTSR

SEQ ID NO: 8178 - protein, 7 aa, synthetic construct
  REGION 1..7: note = Description of Artificial Sequence: Synthetic peptide
SGTSTGH

SEQ ID NO: 8179 - protein, 7 aa, synthetic construct
  REGION 1..7: note = Description of Artificial Sequence: Synthetic peptide
VSSNSVA

SEQ ID NO: 8180 - protein, 7 aa, synthetic construct
  REGION 1..7: note = Description of Artificial Sequence: Synthetic peptide
QSNVPSS

SEQ ID NO: 8181 - protein, 7 aa, synthetic construct
  REGION 1..7: note = Description of Artificial Sequence: Synthetic peptide
DGGTHQA

SEQ ID NO: 8182 - protein, 7 aa, synthetic construct
  REGION 1..7: note = Description of Artificial Sequence: Synthetic peptide
HDGKQSL

SEQ ID NO: 8183 - protein, 7 aa, synthetic construct
  REGION 1..7: note = Description of Artificial Sequence: Synthetic peptide
HNTSSTQ

SEQ ID NO: 8184 - protein, 7 aa, synthetic construct
  REGION 1..7: note = Description of Artificial Sequence: Synthetic peptide
SPDSNIK

SEQ ID NO: 8185 - protein, 7 aa, synthetic construct
  REGION 1..7: note = Description of Artificial Sequence: Synthetic peptide
MASSTNV

SEQ ID NO: 8186 - protein, 7 aa, synthetic construct
  REGION 1..7: note = Description of Artificial Sequence: Synthetic peptide
GQIPDAK

SEQ ID NO: 8187 - protein, 7 aa, synthetic construct
  REGION 1..7: note = Description of Artificial Sequence: Synthetic peptide
GHSGSPN

SEQ ID NO: 8188 - protein, 7 aa, synthetic construct
  REGION 1..7: note = Description of Artificial Sequence: Synthetic peptide
AGVANGT

SEQ ID NO: 8189 - protein, 7 aa, synthetic construct
  REGION 1..7: note = Description of Artificial Sequence: Synthetic peptide
RSTSPSN

SEQ ID NO: 8190 - protein, 7 aa, synthetic construct
  REGION 1..7: note = Description of Artificial Sequence: Synthetic peptide
HPSNTQK

SEQ ID NO: 8191 - protein, 7 aa, synthetic construct
  REGION 1..7: note = Description of Artificial Sequence: Synthetic peptide
TSGSTLA

SEQ ID NO: 8192 - protein, 7 aa, synthetic construct
  REGION 1..7: note = Description of Artificial Sequence: Synthetic peptide
SSTSKGA

SEQ ID NO: 8193 - protein, 7 aa, synthetic construct
  REGION 1..7: note = Description of Artificial Sequence: Synthetic peptide
NSKTSSG

SEQ ID NO: 8194 - protein, 7 aa, synthetic construct
  REGION 1..7: note = Description of Artificial Sequence: Synthetic peptide
GDMSTKN

SEQ ID NO: 8195 - protein, 7 aa, synthetic construct
  REGION 1..7: note = Description of Artificial Sequence: Synthetic peptide
GGTKTEV

SEQ ID NO: 8196 - protein, 7 aa, synthetic construct
  REGION 1..7: note = Description of Artificial Sequence: Synthetic peptide
TTGEKGL

SEQ ID NO: 8197 - protein, 7 aa, synthetic construct
  REGION 1..7: note = Description of Artificial Sequence: Synthetic peptide
GLDTKSA

SEQ ID NO: 8198 - protein, 7 aa, synthetic construct
  REGION 1..7: note = Description of Artificial Sequence: Synthetic peptide
SNGASPV

SEQ ID NO: 8199 - protein, 7 aa, synthetic construct
  REGION 1..7: note = Description of Artificial Sequence: Synthetic peptide
LQTASSG

SEQ ID NO: 8200 - protein, 7 aa, synthetic construct
  REGION 1..7: note = Description of Artificial Sequence: Synthetic peptide
GSVGGDR

SEQ ID NO: 8201 - protein, 7 aa, synthetic construct
  REGION 1..7: note = Description of Artificial Sequence: Synthetic peptide
STTSSRS

SEQ ID NO: 8202 - protein, 7 aa, synthetic construct
  REGION 1..7: note = Description of Artificial Sequence: Synthetic peptide
SESHKPA

SEQ ID NO: 8203 - protein, 7 aa, synthetic construct
  REGION 1..7: note = Description of Artificial Sequence: Synthetic peptide
NPSSAPQ

SEQ ID NO: 8204 - protein, 7 aa, synthetic construct
  REGION 1..7: note = Description of Artificial Sequence: Synthetic peptide
TSSNKEQ

SEQ ID NO: 8205 - protein, 7 aa, synthetic construct
  REGION 1..7: note = Description of Artificial Sequence: Synthetic peptide
SGVSTSP

SEQ ID NO: 8206 - protein, 7 aa, synthetic construct
  REGION 1..7: note = Description of Artificial Sequence: Synthetic peptide
QESQQNS

SEQ ID NO: 8207 - protein, 7 aa, synthetic construct
  REGION 1..7: note = Description of Artificial Sequence: Synthetic peptide
LNEGKPL

SEQ ID NO: 8208 - protein, 7 aa, synthetic construct
  REGION 1..7: note = Description of Artificial Sequence: Synthetic peptide
ENPTNTS

SEQ ID NO: 8209 - protein, 7 aa, synthetic construct
  REGION 1..7: note = Description of Artificial Sequence: Synthetic peptide
DATQPSK

SEQ ID NO: 8210 - protein, 7 aa, synthetic construct
  REGION 1..7: note = Description of Artificial Sequence: Synthetic peptide
AQDKASS

SEQ ID NO: 8211 - protein, 7 aa, synthetic construct
  REGION 1..7: note = Description of Artificial Sequence: Synthetic peptide
GSKNAST

SEQ ID NO: 8212 - protein, 7 aa, synthetic construct
  REGION 1..7: note = Description of Artificial Sequence: Synthetic peptide
NNSGQNQ

SEQ ID NO: 8213 - protein, 7 aa, synthetic construct
  REGION 1..7: note = Description of Artificial Sequence: Synthetic peptide
DGPGSTK

SEQ ID NO: 8214 - protein, 7 aa, synthetic construct
  REGION 1..7: note = Description of Artificial Sequence: Synthetic peptide
LNGSQTH

SEQ ID NO: 8215 - protein, 7 aa, synthetic construct
  REGION 1..7: note = Description of Artificial Sequence: Synthetic peptide
KATAQSG

SEQ ID NO: 8216 - protein, 7 aa, synthetic construct
  REGION 1..7: note = Description of Artificial Sequence: Synthetic peptide
TLSGSAH

SEQ ID NO: 8217 - protein, 7 aa, synthetic construct
  REGION 1..7: note = Description of Artificial Sequence: Synthetic peptide
GSPSTSG

SEQ ID NO: 8218 - protein, 7 aa, synthetic construct
  REGION 1..7: note = Description of Artificial Sequence: Synthetic peptide
GLSRPNE

SEQ ID NO: 8219 - protein, 7 aa, synthetic construct
  REGION 1..7: note = Description of Artificial Sequence: Synthetic peptide
SRTENRI

SEQ ID NO: 8220 - protein, 7 aa, synthetic construct
  REGION 1..7: note = Description of Artificial Sequence: Synthetic peptide
DDKSNRA

SEQ ID NO: 8221 - protein, 7 aa, synthetic construct
  REGION 1..7: note = Description of Artificial Sequence: Synthetic peptide
QGNSAVQ

SEQ ID NO: 8222 - protein, 7 aa, synthetic construct
  REGION 1..7: note = Description of Artificial Sequence: Synthetic peptide
ASTSPAV

SEQ ID NO: 8223 - protein, 7 aa, synthetic construct
  REGION 1..7: note = Description of Artificial Sequence: Synthetic peptide
TGSTNTT

SEQ ID NO: 8224 - protein, 7 aa, synthetic construct
  REGION 1..7: note = Description of Artificial Sequence: Synthetic peptide
ERAGPSP

SEQ ID NO: 8225 - protein, 7 aa, synthetic construct
  REGION 1..7: note = Description of Artificial Sequence: Synthetic peptide
VDPSPAR

SEQ ID NO: 8226 - protein, 7 aa, synthetic construct
  REGION 1..7: note = Description of Artificial Sequence: Synthetic peptide
VVNSSTA

SEQ ID NO: 8227 - protein, 7 aa, synthetic construct
  REGION 1..7: note = Description of Artificial Sequence: Synthetic peptide
LREPKGT

SEQ ID NO: 8228 - protein, 7 aa, synthetic construct
  REGION 1..7: note = Description of Artificial Sequence: Synthetic peptide
LNASSTT

SEQ ID NO: 8229 - protein, 7 aa, synthetic construct
  REGION 1..7: note = Description of Artificial Sequence: Synthetic peptide
STMSSSS

SEQ ID NO: 8230 - protein, 7 aa, synthetic construct
  REGION 1..7: note = Description of Artificial Sequence: Synthetic peptide
EINNPKI

SEQ ID NO: 8231 - protein, 7 aa, synthetic construct
  REGION 1..7: note = Description of Artificial Sequence: Synthetic peptide
KSNQTSQ

SEQ ID NO: 8232 - protein, 7 aa, synthetic construct
  REGION 1..7: note = Description of Artificial Sequence: Synthetic peptide
GSTSQEK

SEQ ID NO: 8233 - protein, 7 aa, synthetic construct
  REGION 1..7: note = Description of Artificial Sequence: Synthetic peptide
GNSGDLR

SEQ ID NO: 8234 - protein, 7 aa, synthetic construct
  REGION 1..7: note = Description of Artificial Sequence: Synthetic peptide
SGSNSVS

SEQ ID NO: 8235 - protein, 7 aa, synthetic construct
  REGION 1..7: note = Description of Artificial Sequence: Synthetic peptide
KSGSSTN

SEQ ID NO: 8236 - protein, 7 aa, synthetic construct
  REGION 1..7: note = Description of Artificial Sequence: Synthetic peptide
SQGSAPT

SEQ ID NO: 8237 - protein, 7 aa, synthetic construct
  REGION 1..7: note = Description of Artificial Sequence: Synthetic peptide
NRTAQST

SEQ ID NO: 8238 - protein, 7 aa, synthetic construct
  REGION 1..7: note = Description of Artificial Sequence: Synthetic peptide
QGSTKNL

SEQ ID NO: 8239 - protein, 7 aa, synthetic construct
  REGION 1..7: note = Description of Artificial Sequence: Synthetic peptide
ESKQPSL

SEQ ID NO: 8240 - protein, 7 aa, synthetic construct
  REGION 1..7: note = Description of Artificial Sequence: Synthetic peptide
NHGQKDN

SEQ ID NO: 8241 - protein, 7 aa, synthetic construct
  REGION 1..7: note = Description of Artificial Sequence: Synthetic peptide
NAATQTR

SEQ ID NO: 8242 - protein, 7 aa, synthetic construct
  REGION 1..7: note = Description of Artificial Sequence: Synthetic peptide
RPVNPPE

SEQ ID NO: 8243 - protein, 7 aa, synthetic construct
  REGION 1..7: note = Description of Artificial Sequence: Synthetic peptide
SGSSSLG

SEQ ID NO: 8244 - protein, 7 aa, synthetic construct
  REGION 1..7: note = Description of Artificial Sequence: Synthetic peptide
QQGHNSA

SEQ ID NO: 8245 - protein, 7 aa, synthetic construct
  REGION 1..7: note = Description of Artificial Sequence: Synthetic peptide
RKDVSST

SEQ ID NO: 8246 - protein, 7 aa, synthetic construct
  REGION 1..7: note = Description of Artificial Sequence: Synthetic peptide
DGVSSKG

SEQ ID NO: 8247 - protein, 7 aa, synthetic construct
  REGION 1..7: note = Description of Artificial Sequence: Synthetic peptide
GDSPSKL

SEQ ID NO: 8248 - protein, 7 aa, synthetic construct
  REGION 1..7: note = Description of Artificial Sequence: Synthetic peptide
SQDTHHK

SEQ ID NO: 8249 - protein, 7 aa, synthetic construct
  REGION 1..7: note = Description of Artificial Sequence: Synthetic peptide
SNTGGVA

SEQ ID NO: 8250 - protein, 7 aa, synthetic construct
  REGION 1..7: note = Description of Artificial Sequence: Synthetic peptide
NGATSRG

SEQ ID NO: 8251 - protein, 7 aa, synthetic construct
  REGION 1..7: note = Description of Artificial Sequence: Synthetic peptide
HRGETSA

SEQ ID NO: 8252 - protein, 7 aa, synthetic construct
  REGION 1..7: note = Description of Artificial Sequence: Synthetic peptide
ENRQTIK

SEQ ID NO: 8253 - protein, 7 aa, synthetic construct
  REGION 1..7: note = Description of Artificial Sequence: Synthetic peptide
HNVEKTK

SEQ ID NO: 8254 - protein, 7 aa, synthetic construct
  REGION 1..7: note = Description of Artificial Sequence: Synthetic peptide
LQSNSSQ

SEQ ID NO: 8255 - protein, 7 aa, synthetic construct
  REGION 1..7: note = Description of Artificial Sequence: Synthetic peptide
NGNSSTS

SEQ ID NO: 8256 - protein, 7 aa, synthetic construct
  REGION 1..7: note = Description of Artificial Sequence: Synthetic peptide
TVQSTSR

SEQ ID NO: 8257 - protein, 7 aa, synthetic construct
  REGION 1..7: note = Description of Artificial Sequence: Synthetic peptide
STDSTPK

SEQ ID NO: 8258 - protein, 7 aa, synthetic construct
  REGION 1..7: note = Description of Artificial Sequence: Synthetic peptide
TSKPTNM

SEQ ID NO: 8259 - protein, 7 aa, synthetic construct
  REGION 1..7: note = Description of Artificial Sequence: Synthetic peptide
AKSSTTS

SEQ ID NO: 8260 - protein, 7 aa, synthetic construct
  REGION 1..7: note = Description of Artificial Sequence: Synthetic peptide
KTQGVGN

SEQ ID NO: 8261 - protein, 7 aa, synthetic construct
  REGION 1..7: note = Description of Artificial Sequence: Synthetic peptide
MGTGNTS

SEQ ID NO: 8262 - protein, 7 aa, synthetic construct
  REGION 1..7: note = Description of Artificial Sequence: Synthetic peptide
MGTANNH

SEQ ID NO: 8263 - protein, 7 aa, synthetic construct
  REGION 1..7: note = Description of Artificial Sequence: Synthetic peptide
GTEMPKL

SEQ ID NO: 8264 - protein, 7 aa, synthetic construct
  REGION 1..7: note = Description of Artificial Sequence: Synthetic peptide
GSTSKTQ

SEQ ID NO: 8265 - protein, 7 aa, synthetic construct
  REGION 1..7: note = Description of Artificial Sequence: Synthetic peptide
VQSTGSG

SEQ ID NO: 8266 - protein, 7 aa, synthetic construct
  REGION 1..7: note = Description of Artificial Sequence: Synthetic peptide
SQPGTTS

SEQ ID NO: 8267 - protein, 7 aa, synthetic construct
  REGION 1..7: note = Description of Artificial Sequence: Synthetic peptide
GTLTPAT

SEQ ID NO: 8268 - protein, 7 aa, synthetic construct
  REGION 1..7: note = Description of Artificial Sequence: Synthetic peptide
SPAAHSQ

SEQ ID NO: 8269 - protein, 7 aa, synthetic construct
  REGION 1..7: note = Description of Artificial Sequence: Synthetic peptide
TGSKTQS

SEQ ID NO: 8270 - protein, 7 aa, synthetic construct
  REGION 1..7: note = Description of Artificial Sequence: Synthetic peptide
NRAAQGG

SEQ ID NO: 8271 - protein, 7 aa, synthetic construct
  REGION 1..7: note = Description of Artificial Sequence: Synthetic peptide
TADRSGA

SEQ ID NO: 8272 - protein, 7 aa, synthetic construct
  REGION 1..7: note = Description of Artificial Sequence: Synthetic peptide
STTSDSK

SEQ ID NO: 8273 - protein, 7 aa, synthetic construct
  REGION 1..7: note = Description of Artificial Sequence: Synthetic peptide
MSEGTRS

SEQ ID NO: 8274 - protein, 7 aa, synthetic construct
  REGION 1..7: note = Description of Artificial Sequence: Synthetic peptide
HQGSKLA

SEQ ID NO: 8275 - protein, 7 aa, synthetic construct
  REGION 1..7: note = Description of Artificial Sequence: Synthetic peptide
VQQASSI

SEQ ID NO: 8276 - protein, 7 aa, synthetic construct
  REGION 1..7: note = Description of Artificial Sequence: Synthetic peptide
DRNGKVA

SEQ ID NO: 8277 - protein, 7 aa, synthetic construct
  REGION 1..7: note = Description of Artificial Sequence: Synthetic peptide
AGRDAAA

SEQ ID NO: 8278 - protein, 7 aa, synthetic construct
  REGION 1..7: note = Description of Artificial Sequence: Synthetic peptide
TSSQTPV

SEQ ID NO: 8279 - protein, 7 aa, synthetic construct
  REGION 1..7: note = Description of Artificial Sequence: Synthetic peptide
TTMSSHA

SEQ ID NO: 8280 - protein, 7 aa, synthetic construct
  REGION 1..7: note = Description of Artificial Sequence: Synthetic peptide
TTGQGMT

SEQ ID NO: 8281 - protein, 7 aa, synthetic construct
  REGION 1..7: note = Description of Artificial Sequence: Synthetic peptide
SEKSSAM

SEQ ID NO: 8282 - protein, 7 aa, synthetic construct
  REGION 1..7: note = Description of Artificial Sequence: Synthetic peptide
SGASQKP

SEQ ID NO: 8283 - protein, 7 aa, synthetic construct
  REGION 1..7: note = Description of Artificial Sequence: Synthetic peptide
SGNRTDG

SEQ ID NO: 8284 - protein, 7 aa, synthetic construct
  REGION 1..7: note = Description of Artificial Sequence: Synthetic peptide
DLSTKSG

SEQ ID NO: 8285 - protein, 7 aa, synthetic construct
  REGION 1..7: note = Description of Artificial Sequence: Synthetic peptide
GPDRAPT

SEQ ID NO: 8286 - protein, 7 aa, synthetic construct
  REGION 1..7: note = Description of Artificial Sequence: Synthetic peptide
NPASSSR

SEQ ID NO: 8287 - protein, 7 aa, synthetic construct
  REGION 1..7: note = Description of Artificial Sequence: Synthetic peptide
TDDHKGQ

SEQ ID NO: 8288 - protein, 7 aa, synthetic construct
  REGION 1..7: note = Description of Artificial Sequence: Synthetic peptide
DGVKSSS

SEQ ID NO: 8289 - protein, 7 aa, synthetic construct
  REGION 1..7: note = Description of Artificial Sequence: Synthetic peptide
AENKSMS

SEQ ID NO: 8290 - protein, 7 aa, synthetic construct
  REGION 1..7: note = Description of Artificial Sequence: Synthetic peptide
AGSSSIA

SEQ ID NO: 8291 - protein, 7 aa, synthetic construct
  REGION 1..7: note = Description of Artificial Sequence: Synthetic peptide
STTDRNV

SEQ ID NO: 8292 - protein, 7 aa, synthetic construct
  REGION 1..7: note = Description of Artificial Sequence: Synthetic peptide
TQSGGTT

SEQ ID NO: 8293 - protein, 7 aa, synthetic construct
  REGION 1..7: note = Description of Artificial Sequence: Synthetic peptide
SGPPPST

SEQ ID NO: 8294 - protein, 7 aa, synthetic construct
  REGION 1..7: note = Description of Artificial Sequence: Synthetic peptide
ARQSEVA

SEQ ID NO: 8295 - protein, 7 aa, synthetic construct
  REGION 1..7: note = Description of Artificial Sequence: Synthetic peptide
SSGHGNV

SEQ ID NO: 8296 - protein, 7 aa, synthetic construct
  REGION 1..7: note = Description of Artificial Sequence: Synthetic peptide
SDSSNRV

SEQ ID NO: 8297 - protein, 7 aa, synthetic construct
  REGION 1..7: note = Description of Artificial Sequence: Synthetic peptide
LGSPTNT

SEQ ID NO: 8298 - protein, 7 aa, synthetic construct
  REGION 1..7: note = Description of Artificial Sequence: Synthetic peptide
GMDSPSR

SEQ ID NO: 8299 - protein, 7 aa, synthetic construct
  REGION 1..7: note = Description of Artificial Sequence: Synthetic peptide
SGTSSST

SEQ ID NO: 8300 - protein, 7 aa, synthetic construct
  REGION 1..7: note = Description of Artificial Sequence: Synthetic peptide
SKGDAVG

SEQ ID NO: 8301 - protein, 7 aa, synthetic construct
  REGION 1..7: note = Description of Artificial Sequence: Synthetic peptide
STPAGNQ

SEQ ID NO: 8302 - protein, 7 aa, synthetic construct
  REGION 1..7: note = Description of Artificial Sequence: Synthetic peptide
QAQSTNL

SEQ ID NO: 8303 - protein, 7 aa, synthetic construct
  REGION 1..7: note = Description of Artificial Sequence: Synthetic peptide
EGSNTVV

SEQ ID NO: 8304 - protein, 7 aa, synthetic construct
  REGION 1..7: note = Description of Artificial Sequence: Synthetic peptide
SSNPSNE

SEQ ID NO: 8305 - protein, 7 aa, synthetic construct
  REGION 1..7: note = Description of Artificial Sequence: Synthetic peptide
DQGSVLK

SEQ ID NO: 8306 - protein, 7 aa, synthetic construct
  REGION 1..7: note = Description of Artificial Sequence: Synthetic peptide
GDRGKSS

SEQ ID NO: 8307 - protein, 7 aa, synthetic construct
  REGION 1..7: note = Description of Artificial Sequence: Synthetic peptide
SKASSHS

SEQ ID NO: 8308 - protein, 7 aa, synthetic construct
  REGION 1..7: note = Description of Artificial Sequence: Synthetic peptide
DGSGSTR

SEQ ID NO: 8309 - protein, 7 aa, synthetic construct
  REGION 1..7: note = Description of Artificial Sequence: Synthetic peptide
QGGGGQG

SEQ ID NO: 8310 - protein, 7 aa, synthetic construct
  REGION 1..7: note = Description of Artificial Sequence: Synthetic peptide
QGNGLLT

SEQ ID NO: 8311 - protein, 7 aa, synthetic construct
  REGION 1..7: note = Description of Artificial Sequence: Synthetic peptide
SGTSTLM

SEQ ID NO: 8312 - protein, 7 aa, synthetic construct
  REGION 1..7: note = Description of Artificial Sequence: Synthetic peptide
GTSGKGS

SEQ ID NO: 8313 - protein, 7 aa, synthetic construct
  REGION 1..7: note = Description of Artificial Sequence: Synthetic peptide
GVRGKES

SEQ ID NO: 8314 - protein, 7 aa, synthetic construct
  REGION 1..7: note = Description of Artificial Sequence: Synthetic peptide
AKSQGSL

SEQ ID NO: 8315 - protein, 7 aa, synthetic construct
  REGION 1..7: note = Description of Artificial Sequence: Synthetic peptide
HTTGTLA

SEQ ID NO: 8316 - protein, 7 aa, synthetic construct
  REGION 1..7: note = Description of Artificial Sequence: Synthetic peptide
TPAVNGH

SEQ ID NO: 8317 - protein, 7 aa, synthetic construct
  REGION 1..7: note = Description of Artificial Sequence: Synthetic peptide
SAVTTSA

SEQ ID NO: 8318 - protein, 7 aa, synthetic construct
  REGION 1..7: note = Description of Artificial Sequence: Synthetic peptide
SNASAAV

SEQ ID NO: 8319 - protein, 7 aa, synthetic construct
  REGION 1..7: note = Description of Artificial Sequence: Synthetic peptide
APHDGKT

SEQ ID NO: 8320 - protein, 7 aa, synthetic construct
  REGION 1..7: note = Description of Artificial Sequence: Synthetic peptide
SSAGTTQ

SEQ ID NO: 8321 - protein, 7 aa, synthetic construct
  REGION 1..7: note = Description of Artificial Sequence: Synthetic peptide
NQARTGE

SEQ ID NO: 8322 - protein, 7 aa, synthetic construct
  REGION 1..7: note = Description of Artificial Sequence: Synthetic peptide
TPQAVPT

SEQ ID NO: 8323 - protein, 7 aa, synthetic construct
  REGION 1..7: note = Description of Artificial Sequence: Synthetic peptide
STGTPTG

SEQ ID NO: 8324 - protein, 7 aa, synthetic construct
  REGION 1..7: note = Description of Artificial Sequence: Synthetic peptide
SSGKPAG

SEQ ID NO: 8325 - protein, 7 aa, synthetic construct
  REGION 1..7: note = Description of Artificial Sequence: Synthetic peptide
STTNAAL

SEQ ID NO: 8326 - protein, 7 aa, synthetic construct
  REGION 1..7: note = Description of Artificial Sequence: Synthetic peptide
IAAKGMN

SEQ ID NO: 8327 - protein, 7 aa, synthetic construct
  REGION 1..7: note = Description of Artificial Sequence: Synthetic peptide
MVSAAGS

SEQ ID NO: 8328 - protein, 7 aa, synthetic construct
  REGION 1..7: note = Description of Artificial Sequence: Synthetic peptide
QRDKTSG

SEQ ID NO: 8329 - protein, 7 aa, synthetic construct
  REGION 1..7: note = Description of Artificial Sequence: Synthetic peptide
HGAGSPS

SEQ ID NO: 8330 - protein, 7 aa, synthetic construct
  REGION 1..7: note = Description of Artificial Sequence: Synthetic peptide
QNSHATT

SEQ ID NO: 8331 - protein, 7 aa, synthetic construct
  REGION 1..7: note = Description of Artificial Sequence: Synthetic peptide
QTTGSRN

SEQ ID NO: 8332 - protein, 7 aa, synthetic construct
  REGION 1..7: note = Description of Artificial Sequence: Synthetic peptide
LTGQHHS

SEQ ID NO: 8333 - protein, 7 aa, synthetic construct
  REGION 1..7: note = Description of Artificial Sequence: Synthetic peptide
LSGTSTV

SEQ ID NO: 8334 - protein, 7 aa, synthetic construct
  REGION 1..7: note = Description of Artificial Sequence: Synthetic peptide
LPNSSSA

SEQ ID NO: 8335 - protein, 7 aa, synthetic construct
  REGION 1..7: note = Description of Artificial Sequence: Synthetic peptide
EKGATNL

SEQ ID NO: 8336 - protein, 7 aa, synthetic construct
  REGION 1..7: note = Description of Artificial Sequence: Synthetic peptide
DSGRSSG

SEQ ID NO: 8337 - protein, 7 aa, synthetic construct
  REGION 1..7: note = Description of Artificial Sequence: Synthetic peptide
DPTKESH

SEQ ID NO: 8338 - protein, 7 aa, synthetic construct
  REGION 1..7: note = Description of Artificial Sequence: Synthetic peptide
DGIKEHT

SEQ ID NO: 8339 - protein, 7 aa, synthetic construct
  REGION 1..7: note = Description of Artificial Sequence: Synthetic peptide
DLTSHKT

SEQ ID NO: 8340 - protein, 7 aa, synthetic construct
  REGION 1..7: note = Description of Artificial Sequence: Synthetic peptide
GSQDSHR

SEQ ID NO: 8341 - protein, 7 aa, synthetic construct
  REGION 1..7: note = Description of Artificial Sequence: Synthetic peptide
GGNKHGN

SEQ ID NO: 8342 - protein, 7 aa, synthetic construct
  REGION 1..7: note = Description of Artificial Sequence: Synthetic peptide
VTVSPSK

SEQ ID NO: 8343 - protein, 7 aa, synthetic construct
  REGION 1..7: note = Description of Artificial Sequence: Synthetic peptide
VGGTAVK

SEQ ID NO: 8344 - protein, 7 aa, synthetic construct
  REGION 1..7: note = Description of Artificial Sequence: Synthetic peptide
VASQRNE

SEQ ID NO: 8345 - protein, 7 aa, synthetic construct
  REGION 1..7: note = Description of Artificial Sequence: Synthetic peptide
CQDKNAP

SEQ ID NO: 8346 - protein, 7 aa, synthetic construct
  REGION 1..7: note = Description of Artificial Sequence: Synthetic peptide
LASKSSN

SEQ ID NO: 8347 - protein, 7 aa, synthetic construct
  REGION 1..7: note = Description of Artificial Sequence: Synthetic peptide
QVAAKSS

SEQ ID NO: 8348 - protein, 7 aa, synthetic construct
  REGION 1..7: note = Description of Artificial Sequence: Synthetic peptide
SETKGTA

SEQ ID NO: 8349 - protein, 7 aa, synthetic construct
  REGION 1..7: note = Description of Artificial Sequence: Synthetic peptide
STKSPVA

SEQ ID NO: 8350 - protein, 7 aa, synthetic construct
  REGION 1..7: note = Description of Artificial Sequence: Synthetic peptide
VSSNPPA

SEQ ID NO: 8351 - protein, 7 aa, synthetic construct
  REGION 1..7: note = Description of Artificial Sequence: Synthetic peptide
HGASAGS

SEQ ID NO: 8352 - protein, 7 aa, synthetic construct
  REGION 1..7: note = Description of Artificial Sequence: Synthetic peptide
NTVSSQN

SEQ ID NO: 8353 - protein, 7 aa, synthetic construct
  REGION 1..7: note = Description of Artificial Sequence: Synthetic peptide
AHSQSSQ

SEQ ID NO: 8354 - protein, 7 aa, synthetic construct
  REGION 1..7: note = Description of Artificial Sequence: Synthetic peptide
NPNGSST

SEQ ID NO: 8355 - protein, 7 aa, synthetic construct
  REGION 1..7: note = Description of Artificial Sequence: Synthetic peptide
SVASSNM

SEQ ID NO: 8356 - protein, 7 aa, synthetic construct
  REGION 1..7: note = Description of Artificial Sequence: Synthetic peptide
SSDRQSA

SEQ ID NO: 8357 - protein, 7 aa, synthetic construct
  REGION 1..7: note = Description of Artificial Sequence: Synthetic peptide
TADSARS

SEQ ID NO: 8358 - protein, 7 aa, synthetic construct
  REGION 1..7: note = Description of Artificial Sequence: Synthetic peptide
GPSHNQS

SEQ ID NO: 8359 - protein, 7 aa, synthetic construct
  REGION 1..7: note = Description of Artificial Sequence: Synthetic peptide
VAGPSPK

SEQ ID NO: 8360 - protein, 7 aa, synthetic construct
  REGION 1..7: note = Description of Artificial Sequence: Synthetic peptide
STSDSSR

SEQ ID NO: 8361 - protein, 7 aa, synthetic construct
  REGION 1..7: note = Description of Artificial Sequence: Synthetic peptide
QNTGSPT

SEQ ID NO: 8362 - protein, 7 aa, synthetic construct
  REGION 1..7: note = Description of Artificial Sequence: Synthetic peptide
MKAQSSG

SEQ ID NO: 8363 - protein, 7 aa, synthetic construct
  REGION 1..7: note = Description of Artificial Sequence: Synthetic peptide
ESGKTNM

SEQ ID NO: 8364 - protein, 7 aa, synthetic construct
  REGION 1..7: note = Description of Artificial Sequence: Synthetic peptide
LGSGERT

SEQ ID NO: 8365 - protein, 7 aa, synthetic construct
  REGION 1..7: note = Description of Artificial Sequence: Synthetic peptide
GLQKTSG

SEQ ID NO: 8366 - protein, 7 aa, synthetic construct
  REGION 1..7: note = Description of Artificial Sequence: Synthetic peptide
YKSDSQV

SEQ ID NO: 8367 - protein, 7 aa, synthetic construct
  REGION 1..7: note = Description of Artificial Sequence: Synthetic peptide
TATTKVD

SEQ ID NO: 8368 - protein, 7 aa, synthetic construct
  REGION 1..7: note = Description of Artificial Sequence: Synthetic peptide
LTSSTSN

SEQ ID NO: 8369 - protein, 7 aa, synthetic construct
  REGION 1..7: note = Description of Artificial Sequence: Synthetic peptide
SGASHNL

SEQ ID NO: 8370 - protein, 7 aa, synthetic construct
  REGION 1..7: note = Description of Artificial Sequence: Synthetic peptide
SAVNSSK

SEQ ID NO: 8371 - protein, 7 aa, synthetic construct
  REGION 1..7: note = Description of Artificial Sequence: Synthetic peptide
MTPPNKE

SEQ ID NO: 8372 - protein, 7 aa, synthetic construct
  REGION 1..7: note = Description of Artificial Sequence: Synthetic peptide
GDSASSK

SEQ ID NO: 8373 - protein, 7 aa, synthetic construct
  REGION 1..7: note = Description of Artificial Sequence: Synthetic peptide
GNRSEGK

SEQ ID NO: 8374 - protein, 7 aa, synthetic construct
  REGION 1..7: note = Description of Artificial Sequence: Synthetic peptide
AKQTSVV

SEQ ID NO: 8375 - protein, 7 aa, synthetic construct
  REGION 1..7: note = Description of Artificial Sequence: Synthetic peptide
GIGANSI

SEQ ID NO: 8376 - protein, 7 aa, synthetic construct
  REGION 1..7: note = Description of Artificial Sequence: Synthetic peptide
NAEKLGS

SEQ ID NO: 8377 - protein, 7 aa, synthetic construct
  REGION 1..7: note = Description of Artificial Sequence: Synthetic peptide
LAGAGSS

SEQ ID NO: 8378 - protein, 7 aa, synthetic construct
  REGION 1..7: note = Description of Artificial Sequence: Synthetic peptide
GESAKDG

SEQ ID NO: 8379 - protein, 7 aa, synthetic construct
  REGION 1..7: note = Description of Artificial Sequence: Synthetic peptide
GTAKPTH

SEQ ID NO: 8380 - protein, 7 aa, synthetic construct
  REGION 1..7: note = Description of Artificial Sequence: Synthetic peptide
MTQKSTA

SEQ ID NO: 8381 - protein, 7 aa, synthetic construct
  REGION 1..7: note = Description of Artificial Sequence: Synthetic peptide
GVANTQS

SEQ ID NO: 8382 - protein, 7 aa, synthetic construct
  REGION 1..7: note = Description of Artificial Sequence: Synthetic peptide
SSSNPST

SEQ ID NO: 8383 - protein, 7 aa, synthetic construct
  REGION 1..7: note = Description of Artificial Sequence: Synthetic peptide
TANAQNR

SEQ ID NO: 8384 - protein, 7 aa, synthetic construct
  REGION 1..7: note = Description of Artificial Sequence: Synthetic peptide
SQTSSSV

SEQ ID NO: 8385 - protein, 7 aa, synthetic construct
  REGION 1..7: note = Description of Artificial Sequence: Synthetic peptide
SPNERSH

SEQ ID NO: 8386 - protein, 7 aa, synthetic construct
  REGION 1..7: note = Description of Artificial Sequence: Synthetic peptide
QGSQATL

SEQ ID NO: 8387 - protein, 7 aa, synthetic construct
  REGION 1..7: note = Description of Artificial Sequence: Synthetic peptide
AEGARGL

SEQ ID NO: 8388 - protein, 7 aa, synthetic construct
  REGION 1..7: note = Description of Artificial Sequence: Synthetic peptide
GEEGKTK

SEQ ID NO: 8389 - protein, 7 aa, synthetic construct
  REGION 1..7: note = Description of Artificial Sequence: Synthetic peptide
GKTQHGA

SEQ ID NO: 8390 - protein, 7 aa, synthetic construct
  REGION 1..7: note = Description of Artificial Sequence: Synthetic peptide
GDSKPTT

SEQ ID NO: 8391 - protein, 7 aa, synthetic construct
  REGION 1..7: note = Description of Artificial Sequence: Synthetic peptide
LNGRESG

SEQ ID NO: 8392 - protein, 7 aa, synthetic construct
  REGION 1..7: note = Description of Artificial Sequence: Synthetic peptide
LAAPSNA

SEQ ID NO: 8393 - protein, 7 aa, synthetic construct
  REGION 1..7: note = Description of Artificial Sequence: Synthetic peptide
DSSKSAG

SEQ ID NO: 8394 - protein, 7 aa, synthetic construct
  REGION 1..7: note = Description of Artificial Sequence: Synthetic peptide
GGTSVHT

SEQ ID NO: 8395 - protein, 7 aa, synthetic construct
  REGION 1..7: note = Description of Artificial Sequence: Synthetic peptide
GVNSSKS

SEQ ID NO: 8396 - protein, 7 aa, synthetic construct
  REGION 1..7: note = Description of Artificial Sequence: Synthetic peptide
SHNGSNT

SEQ ID NO: 8397 - protein, 7 aa, synthetic construct
  REGION 1..7: note = Description of Artificial Sequence: Synthetic peptide
VGVPVST

SEQ ID NO: 8398 - protein, 7 aa, synthetic construct
  REGION 1..7: note = Description of Artificial Sequence: Synthetic peptide
ASNKVTS

SEQ ID NO: 8399 - protein, 7 aa, synthetic construct
  REGION 1..7: note = Description of Artificial Sequence: Synthetic peptide
GKSGGSS

SEQ ID NO: 8400 - protein, 7 aa, synthetic construct
  REGION 1..7: note = Description of Artificial Sequence: Synthetic peptide
TTGSGNR

SEQ ID NO: 8401 - protein, 7 aa, synthetic construct
  REGION 1..7: note = Description of Artificial Sequence: Synthetic peptide
TTGDGAK

SEQ ID NO: 8402 - protein, 7 aa, synthetic construct
  REGION 1..7: note = Description of Artificial Sequence: Synthetic peptide
LGGATNS

SEQ ID NO: 8403 - protein, 7 aa, synthetic construct
  REGION 1..7: note = Description of Artificial Sequence: Synthetic peptide
EGNSKLV

SEQ ID NO: 8404 - protein, 7 aa, synthetic construct
  REGION 1..7: note = Description of Artificial Sequence: Synthetic peptide
DGGSNQA

SEQ ID NO: 8405 - protein, 7 aa, synthetic construct
  REGION 1..7: note = Description of Artificial Sequence: Synthetic peptide
EGTESRR

SEQ ID NO: 8406 - protein, 7 aa, synthetic construct
  REGION 1..7: note = Description of Artificial Sequence: Synthetic peptide
VGSTSSS

SEQ ID NO: 8407 - protein, 7 aa, synthetic construct
  REGION 1..7: note = Description of Artificial Sequence: Synthetic peptide
TDGKHQP

SEQ ID NO: 8408 - protein, 7 aa, synthetic construct
  REGION 1..7: note = Description of Artificial Sequence: Synthetic peptide
ISTSASK

SEQ ID NO: 8409 - protein, 7 aa, synthetic construct
  REGION 1..7: note = Description of Artificial Sequence: Synthetic peptide
NANKDVA

SEQ ID NO: 8410 - protein, 7 aa, synthetic construct
  REGION 1..7: note = Description of Artificial Sequence: Synthetic peptide
QEAQKVG

SEQ ID NO: 8411 - protein, 7 aa, synthetic construct
  REGION 1..7: note = Description of Artificial Sequence: Synthetic peptide
GLDSTRI

SEQ ID NO: 8412 - protein, 7 aa, synthetic construct
  REGION 1..7: note = Description of Artificial Sequence: Synthetic peptide
SANNAAS

SEQ ID NO: 8413 - protein, 7 aa, synthetic construct
  REGION 1..7: note = Description of Artificial Sequence: Synthetic peptide
GATVKNL

SEQ ID NO: 8414 - protein, 7 aa, synthetic construct
  REGION 1..7: note = Description of Artificial Sequence: Synthetic peptide
NSPSTNS

SEQ ID NO: 8415 - protein, 7 aa, synthetic construct
  REGION 1..7: note = Description of Artificial Sequence: Synthetic peptide
MGQSQTL

SEQ ID NO: 8416 - protein, 7 aa, synthetic construct
  REGION 1..7: note = Description of Artificial Sequence: Synthetic peptide
QGSTKGI

SEQ ID NO: 8417 - protein, 7 aa, synthetic construct
  REGION 1..7: note = Description of Artificial Sequence: Synthetic peptide
STGPSAA

SEQ ID NO: 8418 - protein, 7 aa, synthetic construct
  REGION 1..7: note = Description of Artificial Sequence: Synthetic peptide
MSTNGST

SEQ ID NO: 8419 - protein, 7 aa, synthetic construct
  REGION 1..7: note = Description of Artificial Sequence: Synthetic peptide
EVTPHRG

SEQ ID NO: 8420 - protein, 7 aa, synthetic construct
  REGION 1..7: note = Description of Artificial Sequence: Synthetic peptide
DTTDKTR

SEQ ID NO: 8421 - protein, 7 aa, synthetic construct
  REGION 1..7: note = Description of Artificial Sequence: Synthetic peptide
HNSPSAK

SEQ ID NO: 8422 - protein, 7 aa, synthetic construct
  REGION 1..7: note = Description of Artificial Sequence: Synthetic peptide
DARSSAA

SEQ ID NO: 8423 - protein, 7 aa, synthetic construct
  REGION 1..7: note = Description of Artificial Sequence: Synthetic peptide
GKNGSTM

SEQ ID NO: 8424 - protein, 7 aa, synthetic construct
  REGION 1..7: note = Description of Artificial Sequence: Synthetic peptide
TGGGGQQ

SEQ ID NO: 8425 - protein, 7 aa, synthetic construct
  REGION 1..7: note = Description of Artificial Sequence: Synthetic peptide
SRSKASE

SEQ ID NO: 8426 - protein, 7 aa, synthetic construct
  REGION 1..7: note = Description of Artificial Sequence: Synthetic peptide
SGDRTEG

SEQ ID NO: 8427 - protein, 7 aa, synthetic construct
  REGION 1..7: note = Description of Artificial Sequence: Synthetic peptide
MSGTSSV

SEQ ID NO: 8428 - protein, 7 aa, synthetic construct
  REGION 1..7: note = Description of Artificial Sequence: Synthetic peptide
DARPTSG

SEQ ID NO: 8429 - protein, 7 aa, synthetic construct
  REGION 1..7: note = Description of Artificial Sequence: Synthetic peptide
ASASSNK

SEQ ID NO: 8430 - protein, 7 aa, synthetic construct
  REGION 1..7: note = Description of Artificial Sequence: Synthetic peptide
VGQKVGS

SEQ ID NO: 8431 - protein, 7 aa, synthetic construct
  REGION 1..7: note = Description of Artificial Sequence: Synthetic peptide
YSGTGNQ

SEQ ID NO: 8432 - protein, 7 aa, synthetic construct
  REGION 1..7: note = Description of Artificial Sequence: Synthetic peptide
SDTKSQS

SEQ ID NO: 8433 - protein, 7 aa, synthetic construct
  REGION 1..7: note = Description of Artificial Sequence: Synthetic peptide
GANKDTS

SEQ ID NO: 8434 - protein, 7 aa, synthetic construct
  REGION 1..7: note = Description of Artificial Sequence: Synthetic peptide
RQGQSVS

SEQ ID NO: 8435 - protein, 7 aa, synthetic construct
  REGION 1..7: note = Description of Artificial Sequence: Synthetic peptide
ENSQASR

SEQ ID NO: 8436 - protein, 7 aa, synthetic construct
  REGION 1..7: note = Description of Artificial Sequence: Synthetic peptide
EHVSKLG

SEQ ID NO: 8437 - protein, 7 aa, synthetic construct
  REGION 1..7: note = Description of Artificial Sequence: Synthetic peptide
ATGNQAQ

SEQ ID NO: 8438 - protein, 7 aa, synthetic construct
  REGION 1..7: note = Description of Artificial Sequence: Synthetic peptide
TSGTANN

SEQ ID NO: 8439 - protein, 7 aa, synthetic construct
  REGION 1..7: note = Description of Artificial Sequence: Synthetic peptide
SVVSSNQ

SEQ ID NO: 8440 - protein, 7 aa, synthetic construct
  REGION 1..7: note = Description of Artificial Sequence: Synthetic peptide
DKSTQSS

SEQ ID NO: 8441 - protein, 7 aa, synthetic construct
  REGION 1..7: note = Description of Artificial Sequence: Synthetic peptide
VQSSNIG

SEQ ID NO: 8442 - protein, 7 aa, synthetic construct
  REGION 1..7: note = Description of Artificial Sequence: Synthetic peptide
SPSNSTS

SEQ ID NO: 8443 - protein, 7 aa, synthetic construct
  REGION 1..7: note = Description of Artificial Sequence: Synthetic peptide
DSGKSQS

SEQ ID NO: 8444 - protein, 7 aa, synthetic construct
  REGION 1..7: note = Description of Artificial Sequence: Synthetic peptide
QPTASPS

SEQ ID NO: 8445 - protein, 7 aa, synthetic construct
  REGION 1..7: note = Description of Artificial Sequence: Synthetic peptide
NTNKTAS

SEQ ID NO: 8446 - protein, 7 aa, synthetic construct
  REGION 1..7: note = Description of Artificial Sequence: Synthetic peptide
SAPSGKE

SEQ ID NO: 8447 - protein, 7 aa, synthetic construct
  REGION 1..7: note = Description of Artificial Sequence: Synthetic peptide
SGLETKS

SEQ ID NO: 8448 - protein, 7 aa, synthetic construct
  REGION 1..7: note = Description of Artificial Sequence: Synthetic peptide
YTGKVSS

SEQ ID NO: 8449 - protein, 7 aa, synthetic construct
  REGION 1..7: note = Description of Artificial Sequence: Synthetic peptide
NLGSVRD

SEQ ID NO: 8450 - protein, 7 aa, synthetic construct
  REGION 1..7: note = Description of Artificial Sequence: Synthetic peptide
APDSKNG

SEQ ID NO: 8451 - protein, 7 aa, synthetic construct
  REGION 1..7: note = Description of Artificial Sequence: Synthetic peptide
NSAKGIA

SEQ ID NO: 8452 - protein, 7 aa, synthetic construct
  REGION 1..7: note = Description of Artificial Sequence: Synthetic peptide
STGAPAT

SEQ ID NO: 8453 - protein, 7 aa, synthetic construct
  REGION 1..7: note = Description of Artificial Sequence: Synthetic peptide
SQTGGRG

SEQ ID NO: 8454 - protein, 7 aa, synthetic construct
  REGION 1..7: note = Description of Artificial Sequence: Synthetic peptide
CSGDPRK

SEQ ID NO: 8455 - protein, 7 aa, synthetic construct
  REGION 1..7: note = Description of Artificial Sequence: Synthetic peptide
KSASPAH

SEQ ID NO: 8456 - protein, 7 aa, synthetic construct
  REGION 1..7: note = Description of Artificial Sequence: Synthetic peptide
EGVPSKL

SEQ ID NO: 8457 - protein, 7 aa, synthetic construct
  REGION 1..7: note = Description of Artificial Sequence: Synthetic peptide
GPSAKVN

SEQ ID NO: 8458 - protein, 7 aa, synthetic construct
  REGION 1..7: note = Description of Artificial Sequence: Synthetic peptide
TTGTTSR

SEQ ID NO: 8459 - protein, 7 aa, synthetic construct
  REGION 1..7: note = Description of Artificial Sequence: Synthetic peptide
TAEVRGS

SEQ ID NO: 8460 - protein, 7 aa, synthetic construct
  REGION 1..7: note = Description of Artificial Sequence: Synthetic peptide
STAVSSS

SEQ ID NO: 8461 - protein, 7 aa, synthetic construct
  REGION 1..7: note = Description of Artificial Sequence: Synthetic peptide
NGNQQGR

SEQ ID NO: 8462 - protein, 7 aa, synthetic construct
  REGION 1..7: note = Description of Artificial Sequence: Synthetic peptide
NSTEHSR

SEQ ID NO: 8463 - protein, 7 aa, synthetic construct
  REGION 1..7: note = Description of Artificial Sequence: Synthetic peptide
KDDRTTG

SEQ ID NO: 8464 - protein, 7 aa, synthetic construct
  REGION 1..7: note = Description of Artificial Sequence: Synthetic peptide
NQDSSKG

SEQ ID NO: 8465 - protein, 7 aa, synthetic construct
  REGION 1..7: note = Description of Artificial Sequence: Synthetic peptide
NGPSNGS

SEQ ID NO: 8466 - protein, 7 aa, synthetic construct
  REGION 1..7: note = Description of Artificial Sequence: Synthetic peptide
MEGGQRA

SEQ ID NO: 8467 - protein, 7 aa, synthetic construct
  REGION 1..7: note = Description of Artificial Sequence: Synthetic peptide
QDGRNQP

SEQ ID NO: 8468 - protein, 7 aa, synthetic construct
  REGION 1..7: note = Description of Artificial Sequence: Synthetic peptide
QVGSATA

SEQ ID NO: 8469 - protein, 7 aa, synthetic construct
  REGION 1..7: note = Description of Artificial Sequence: Synthetic peptide
EGSSRSG

SEQ ID NO: 8470 - protein, 7 aa, synthetic construct
  REGION 1..7: note = Description of Artificial Sequence: Synthetic peptide
DSSNLKS

SEQ ID NO: 8471 - protein, 7 aa, synthetic construct
  REGION 1..7: note = Description of Artificial Sequence: Synthetic peptide
ARSKDSS

SEQ ID NO: 8472 - protein, 7 aa, synthetic construct
  REGION 1..7: note = Description of Artificial Sequence: Synthetic peptide
GGTSSSI

SEQ ID NO: 8473 - protein, 7 aa, synthetic construct
  REGION 1..7: note = Description of Artificial Sequence: Synthetic peptide
VTTRESV

SEQ ID NO: 8474 - protein, 7 aa, synthetic construct
  REGION 1..7: note = Description of Artificial Sequence: Synthetic peptide
SSGTGPS

SEQ ID NO: 8475 - protein, 7 aa, synthetic construct
  REGION 1..7: note = Description of Artificial Sequence: Synthetic peptide
SSQPTLG

SEQ ID NO: 8476 - protein, 7 aa, synthetic construct
  REGION 1..7: note = Description of Artificial Sequence: Synthetic peptide
AVGTATS

SEQ ID NO: 8477 - protein, 7 aa, synthetic construct
  REGION 1..7: note = Description of Artificial Sequence: Synthetic peptide
ATTSGSL

SEQ ID NO: 8478 - protein, 7 aa, synthetic construct
  REGION 1..7: note = Description of Artificial Sequence: Synthetic peptide
TENRDSS

SEQ ID NO: 8479 - protein, 7 aa, synthetic construct
  REGION 1..7: note = Description of Artificial Sequence: Synthetic peptide
DKNNTAR

SEQ ID NO: 8480 - protein, 7 aa, synthetic construct
  REGION 1..7: note = Description of Artificial Sequence: Synthetic peptide
MASNDSK

SEQ ID NO: 8481 - protein, 7 aa, synthetic construct
  REGION 1..7: note = Description of Artificial Sequence: Synthetic peptide
HGSTASQ

SEQ ID NO: 8482 - protein, 7 aa, synthetic construct
  REGION 1..7: note = Description of Artificial Sequence: Synthetic peptide
DHSHAIK

SEQ ID NO: 8483 - protein, 7 aa, synthetic construct
  REGION 1..7: note = Description of Artificial Sequence: Synthetic peptide
NSGQHSN

SEQ ID NO: 8484 - protein, 7 aa, synthetic construct
  REGION 1..7: note = Description of Artificial Sequence: Synthetic peptide
SSNGVGA

SEQ ID NO: 8485 - protein, 7 aa, synthetic construct
  REGION 1..7: note = Description of Artificial Sequence: Synthetic peptide
EGKKADP

SEQ ID NO: 8486 - protein, 7 aa, synthetic construct
  REGION 1..7: note = Description of Artificial Sequence: Synthetic peptide
APQSSNG

SEQ ID NO: 8487 - protein, 7 aa, synthetic construct
  REGION 1..7: note = Description of Artificial Sequence: Synthetic peptide
ARSKEQQ

SEQ ID NO: 8488 - protein, 7 aa, synthetic construct
  REGION 1..7: note = Description of Artificial Sequence: Synthetic peptide
GQNGTIN

SEQ ID NO: 8489 - protein, 7 aa, synthetic construct
  REGION 1..7: note = Description of Artificial Sequence: Synthetic peptide
VTTAQPV

SEQ ID NO: 8490 - protein, 7 aa, synthetic construct
  REGION 1..7: note = Description of Artificial Sequence: Synthetic peptide
SGTKEMS

SEQ ID NO: 8491 - protein, 7 aa, synthetic construct
  REGION 1..7: note = Description of Artificial Sequence: Synthetic peptide
TSQATTQ

SEQ ID NO: 8492 - protein, 7 aa, synthetic construct
  REGION 1..7: note = Description of Artificial Sequence: Synthetic peptide
TKETTYL

SEQ ID NO: 8493 - protein, 7 aa, synthetic construct
  REGION 1..7: note = Description of Artificial Sequence: Synthetic peptide
TGVNSTR

SEQ ID NO: 8494 - protein, 7 aa, synthetic construct
  REGION 1..7: note = Description of Artificial Sequence: Synthetic peptide
SASTSTV

SEQ ID NO: 8495 - protein, 7 aa, synthetic construct
  REGION 1..7: note = Description of Artificial Sequence: Synthetic peptide
HNAAATA

SEQ ID NO: 8496 - protein, 7 aa, synthetic construct
  REGION 1..7: note = Description of Artificial Sequence: Synthetic peptide
TGQSAGT

SEQ ID NO: 8497 - protein, 7 aa, synthetic construct
  REGION 1..7: note = Description of Artificial Sequence: Synthetic peptide
GFGDKSV

SEQ ID NO: 8498 - protein, 7 aa, synthetic construct
  REGION 1..7: note = Description of Artificial Sequence: Synthetic peptide
NSSQPKT

SEQ ID NO: 8499 - protein, 7 aa, synthetic construct
  REGION 1..7: note = Description of Artificial Sequence: Synthetic peptide
TKQNAPL

SEQ ID NO: 8500 - protein, 7 aa, synthetic construct
  REGION 1..7: note = Description of Artificial Sequence: Synthetic peptide
SQEKSLG

SEQ ID NO: 8501 - protein, 7 aa, synthetic construct
  REGION 1..7: note = Description of Artificial Sequence: Synthetic peptide
SVSPRKG

SEQ ID NO: 8502 - protein, 7 aa, synthetic construct
  REGION 1..7: note = Description of Artificial Sequence: Synthetic peptide
QEHTKTS

SEQ ID NO: 8503 - protein, 7 aa, synthetic construct
  REGION 1..7: note = Description of Artificial Sequence: Synthetic peptide
DSSNPPQ

SEQ ID NO: 8504 - protein, 7 aa, synthetic construct
  REGION 1..7: note = Description of Artificial Sequence: Synthetic peptide
GSQESRH

SEQ ID NO: 8505 - protein, 7 aa, synthetic construct
  REGION 1..7: note = Description of Artificial Sequence: Synthetic peptide
GEGTSPT

SEQ ID NO: 8506 - protein, 7 aa, synthetic construct
  REGION 1..7: note = Description of Artificial Sequence: Synthetic peptide
GDSGANH

SEQ ID NO: 8507 - protein, 7 aa, synthetic construct
  REGION 1..7: note = Description of Artificial Sequence: Synthetic peptide
SGDPSRI

SEQ ID NO: 8508 - protein, 7 aa, synthetic construct
  REGION 1..7: note = Description of Artificial Sequence: Synthetic peptide
SASSSEK

SEQ ID NO: 8509 - protein, 7 aa, synthetic construct
  REGION 1..7: note = Description of Artificial Sequence: Synthetic peptide
SSKTSNN

SEQ ID NO: 8510 - protein, 7 aa, synthetic construct
  REGION 1..7: note = Description of Artificial Sequence: Synthetic peptide
EGSSSAA

SEQ ID NO: 8511 - protein, 7 aa, synthetic construct
  REGION 1..7: note = Description of Artificial Sequence: Synthetic peptide
GQIDGHK

SEQ ID NO: 8512 - protein, 7 aa, synthetic construct
  REGION 1..7: note = Description of Artificial Sequence: Synthetic peptide
GDAKAAY

SEQ ID NO: 8513 - protein, 7 aa, synthetic construct
  REGION 1..7: note = Description of Artificial Sequence: Synthetic peptide
ERNTASH

SEQ ID NO: 8514 - protein, 7 aa, synthetic construct
  REGION 1..7: note = Description of Artificial Sequence: Synthetic peptide
NGTAQIS

SEQ ID NO: 8515 - protein, 7 aa, synthetic construct
  REGION 1..7: note = Description of Artificial Sequence: Synthetic peptide
TTSSGSA

SEQ ID NO: 8516 - protein, 7 aa, synthetic construct
  REGION 1..7: note = Description of Artificial Sequence: Synthetic peptide
SQGGPSA

SEQ ID NO: 8517 - protein, 7 aa, synthetic construct
  REGION 1..7: note = Description of Artificial Sequence: Synthetic peptide
ATPSNTG

SEQ ID NO: 8518 - protein, 7 aa, synthetic construct
  REGION 1..7: note = Description of Artificial Sequence: Synthetic peptide
MNSGSSS

SEQ ID NO: 8519 - protein, 7 aa, synthetic construct
  REGION 1..7: note = Description of Artificial Sequence: Synthetic peptide
NSNPSIS

SEQ ID NO: 8520 - protein, 7 aa, synthetic construct
  REGION 1..7: note = Description of Artificial Sequence: Synthetic peptide
SAVSTPS

SEQ ID NO: 8521 - protein, 7 aa, synthetic construct
  REGION 1..7: note = Description of Artificial Sequence: Synthetic peptide
IGGQGGS

SEQ ID NO: 8522 - protein, 7 aa, synthetic construct
  REGION 1..7: note = Description of Artificial Sequence: Synthetic peptide
NREGSMV

SEQ ID NO: 8523 - protein, 7 aa, synthetic construct
  REGION 1..7: note = Description of Artificial Sequence: Synthetic peptide
TRSERSQ

SEQ ID NO: 8524 - protein, 7 aa, synthetic construct
  REGION 1..7: note = Description of Artificial Sequence: Synthetic peptide
AKPGSSA

SEQ ID NO: 8525 - protein, 7 aa, synthetic construct
  REGION 1..7: note = Description of Artificial Sequence: Synthetic peptide
SDKTGNV

SEQ ID NO: 8526 - protein, 7 aa, synthetic construct
  REGION 1..7: note = Description of Artificial Sequence: Synthetic peptide
STHGTKA

SEQ ID NO: 8527 - protein, 7 aa, synthetic construct
  REGION 1..7: note = Description of Artificial Sequence: Synthetic peptide
SAETSKG

SEQ ID NO: 8528 - protein, 7 aa, synthetic construct
  REGION 1..7: note = Description of Artificial Sequence: Synthetic peptide
STGTSSR

SEQ ID NO: 8529 - protein, 7 aa, synthetic construct
  REGION 1..7: note = Description of Artificial Sequence: Synthetic peptide
TGGTPSP

SEQ ID NO: 8530 - protein, 7 aa, synthetic construct
  REGION 1..7: note = Description of Artificial Sequence: Synthetic peptide
SKTTGPA

SEQ ID NO: 8531 - protein, 7 aa, synthetic construct
  REGION 1..7: note = Description of Artificial Sequence: Synthetic peptide
SSITGGG

SEQ ID NO: 8532 - protein, 7 aa, synthetic construct
  REGION 1..7: note = Description of Artificial Sequence: Synthetic peptide
IKSESTG

SEQ ID NO: 8533 - protein, 7 aa, synthetic construct
  REGION 1..7: note = Description of Artificial Sequence: Synthetic peptide
TSSPSLS

SEQ ID NO: 8534 - protein, 7 aa, synthetic construct
  REGION 1..7: note = Description of Artificial Sequence: Synthetic peptide
GARDKAN

SEQ ID NO: 8535 - protein, 7 aa, synthetic construct
  REGION 1..7: note = Description of Artificial Sequence: Synthetic peptide
TPESRSS

SEQ ID NO: 8536 - protein, 7 aa, synthetic construct
  REGION 1..7: note = Description of Artificial Sequence: Synthetic peptide
MGDKTFA

SEQ ID NO: 8537 - protein, 7 aa, synthetic construct
  REGION 1..7: note = Description of Artificial Sequence: Synthetic peptide
AQGSHSS

SEQ ID NO: 8538 - protein, 7 aa, synthetic construct
  REGION 1..7: note = Description of Artificial Sequence: Synthetic peptide
LNDRSPS

SEQ ID NO: 8539 - protein, 7 aa, synthetic construct
  REGION 1..7: note = Description of Artificial Sequence: Synthetic peptide
LNAGPGS

SEQ ID NO: 8540 - protein, 7 aa, synthetic construct
  REGION 1..7: note = Description of Artificial Sequence: Synthetic peptide
NRTGTNS

SEQ ID NO: 8541 - protein, 7 aa, synthetic construct
  REGION 1..7: note = Description of Artificial Sequence: Synthetic peptide
TNSPASS

SEQ ID NO: 8542 - protein, 7 aa, synthetic construct
  REGION 1..7: note = Description of Artificial Sequence: Synthetic peptide
SNSAKMS

SEQ ID NO: 8543 - protein, 7 aa, synthetic construct
  REGION 1..7: note = Description of Artificial Sequence: Synthetic peptide
QASGGTS

SEQ ID NO: 8544 - protein, 7 aa, synthetic construct
  REGION 1..7: note = Description of Artificial Sequence: Synthetic peptide
EQDSTNR

SEQ ID NO: 8545 - protein, 7 aa, synthetic construct
  REGION 1..7: note = Description of Artificial Sequence: Synthetic peptide
TQAKASA

SEQ ID NO: 8546 - protein, 7 aa, synthetic construct
  REGION 1..7: note = Description of Artificial Sequence: Synthetic peptide
LASGSPA

SEQ ID NO: 8547 - protein, 7 aa, synthetic construct
  REGION 1..7: note = Description of Artificial Sequence: Synthetic peptide
DSTGKGS

SEQ ID NO: 8548 - protein, 7 aa, synthetic construct
  REGION 1..7: note = Description of Artificial Sequence: Synthetic peptide
SSSTSSR

SEQ ID NO: 8549 - protein, 7 aa, synthetic construct
  REGION 1..7: note = Description of Artificial Sequence: Synthetic peptide
KNSGTTG

SEQ ID NO: 8550 - protein, 7 aa, synthetic construct
  REGION 1..7: note = Description of Artificial Sequence: Synthetic peptide
LANGATQ

SEQ ID NO: 8551 - protein, 7 aa, synthetic construct
  REGION 1..7: note = Description of Artificial Sequence: Synthetic peptide
TSGGSST

SEQ ID NO: 8552 - protein, 7 aa, synthetic construct
  REGION 1..7: note = Description of Artificial Sequence: Synthetic peptide
AQATASA

SEQ ID NO: 8553 - protein, 7 aa, synthetic construct
  REGION 1..7: note = Description of Artificial Sequence: Synthetic peptide
QGQSSPG

SEQ ID NO: 8554 - protein, 7 aa, synthetic construct
  REGION 1..7: note = Description of Artificial Sequence: Synthetic peptide
TRTDATV

SEQ ID NO: 8555 - protein, 7 aa, synthetic construct
  REGION 1..7: note = Description of Artificial Sequence: Synthetic peptide
TESQRNE

SEQ ID NO: 8556 - protein, 7 aa, synthetic construct
  REGION 1..7: note = Description of Artificial Sequence: Synthetic peptide
RTNAGQG

SEQ ID NO: 8557 - protein, 7 aa, synthetic construct
  REGION 1..7: note = Description of Artificial Sequence: Synthetic peptide
SPNGQKN

SEQ ID NO: 8558 - protein, 7 aa, synthetic construct
  REGION 1..7: note = Description of Artificial Sequence: Synthetic peptide
HIGGNAG

SEQ ID NO: 8559 - protein, 7 aa, synthetic construct
  REGION 1..7: note = Description of Artificial Sequence: Synthetic peptide
DSRPTMV

SEQ ID NO: 8560 - protein, 7 aa, synthetic construct
  REGION 1..7: note = Description of Artificial Sequence: Synthetic peptide
DGRPTTG

SEQ ID NO: 8561 - protein, 7 aa, synthetic construct
  REGION 1..7: note = Description of Artificial Sequence: Synthetic peptide
DNKSGNM

SEQ ID NO: 8562 - protein, 7 aa, synthetic construct
  REGION 1..7: note = Description of Artificial Sequence: Synthetic peptide
AGTSKKD

SEQ ID NO: 8563 - protein, 7 aa, synthetic construct
  REGION 1..7: note = Description of Artificial Sequence: Synthetic peptide
VQDSSRG

SEQ ID NO: 8564 - protein, 7 aa, synthetic construct
  REGION 1..7: note = Description of Artificial Sequence: Synthetic peptide
VAGSSPA

SEQ ID NO: 8565 - protein, 7 aa, synthetic construct
  REGION 1..7: note = Description of Artificial Sequence: Synthetic peptide
QGHGNGG

SEQ ID NO: 8566 - protein, 7 aa, synthetic construct
  REGION 1..7: note = Description of Artificial Sequence: Synthetic peptide
VKQDAQS

SEQ ID NO: 8567 - protein, 7 aa, synthetic construct
  REGION 1..7: note = Description of Artificial Sequence: Synthetic peptide
GQSSKPT

SEQ ID NO: 8568 - protein, 7 aa, synthetic construct
  REGION 1..7: note = Description of Artificial Sequence: Synthetic peptide
DSSKDRT

SEQ ID NO: 8569 - protein, 7 aa, synthetic construct
  REGION 1..7: note = Description of Artificial Sequence: Synthetic peptide
GTAVPAH

SEQ ID NO: 8570 - protein, 7 aa, synthetic construct
  REGION 1..7: note = Description of Artificial Sequence: Synthetic peptide
NDTPRMS

SEQ ID NO: 8571 - protein, 7 aa, synthetic construct
  REGION 1..7: note = Description of Artificial Sequence: Synthetic peptide
EHQSGSA

SEQ ID NO: 8572 - protein, 7 aa, synthetic construct
  REGION 1..7: note = Description of Artificial Sequence: Synthetic peptide
ASSGSPT

SEQ ID NO: 8573 - protein, 7 aa, synthetic construct
  REGION 1..7: note = Description of Artificial Sequence: Synthetic peptide
GGAQPSN

SEQ ID NO: 8574 - protein, 7 aa, synthetic construct
  REGION 1..7: note = Description of Artificial Sequence: Synthetic peptide
TTAGERA

SEQ ID NO: 8575 - protein, 7 aa, synthetic construct
  REGION 1..7: note = Description of Artificial Sequence: Synthetic peptide
QGKENPL

SEQ ID NO: 8576 - protein, 7 aa, synthetic construct
  REGION 1..7: note = Description of Artificial Sequence: Synthetic peptide
GSGQSVS

SEQ ID NO: 8577 - protein, 7 aa, synthetic construct
  REGION 1..7: note = Description of Artificial Sequence: Synthetic peptide
VDGNTPR

SEQ ID NO: 8578 - protein, 7 aa, synthetic construct
  REGION 1..7: note = Description of Artificial Sequence: Synthetic peptide
NQRDSPA

SEQ ID NO: 8579 - protein, 7 aa, synthetic construct
  REGION 1..7: note = Description of Artificial Sequence: Synthetic peptide
GITNGDK

SEQ ID NO: 8580 - protein, 7 aa, synthetic construct
  REGION 1..7: note = Description of Artificial Sequence: Synthetic peptide
LPIKDGN

SEQ ID NO: 8581 - protein, 7 aa, synthetic construct
  REGION 1..7: note = Description of Artificial Sequence: Synthetic peptide
NSDSRNH

SEQ ID NO: 8582 - protein, 7 aa, synthetic construct
  REGION 1..7: note = Description of Artificial Sequence: Synthetic peptide
NQGSSLT

SEQ ID NO: 8583 - protein, 7 aa, synthetic construct
  REGION 1..7: note = Description of Artificial Sequence: Synthetic peptide
INQSPSL

SEQ ID NO: 8584 - protein, 7 aa, synthetic construct
  REGION 1..7: note = Description of Artificial Sequence: Synthetic peptide
GSVVKPV

SEQ ID NO: 8585 - protein, 7 aa, synthetic construct
  REGION 1..7: note = Description of Artificial Sequence: Synthetic peptide
GSNVRVS

SEQ ID NO: 8586 - protein, 7 aa, synthetic construct
  REGION 1..7: note = Description of Artificial Sequence: Synthetic peptide
SLHAPTA

SEQ ID NO: 8587 - protein, 7 aa, synthetic construct
  REGION 1..7: note = Description of Artificial Sequence: Synthetic peptide
LGSSPVT

SEQ ID NO: 8588 - protein, 7 aa, synthetic construct
  REGION 1..7: note = Description of Artificial Sequence: Synthetic peptide
GGSSRPS

SEQ ID NO: 8589 - protein, 7 aa, synthetic construct
  REGION 1..7: note = Description of Artificial Sequence: Synthetic peptide
GVKGNVG

SEQ ID NO: 8590 - protein, 7 aa, synthetic construct
  REGION 1..7: note = Description of Artificial Sequence: Synthetic peptide
SLSNSKA

SEQ ID NO: 8591 - protein, 7 aa, synthetic construct
  REGION 1..7: note = Description of Artificial Sequence: Synthetic peptide
KLNASGG

SEQ ID NO: 8592 - protein, 7 aa, synthetic construct
  REGION 1..7: note = Description of Artificial Sequence: Synthetic peptide
GTVTSHA

SEQ ID NO: 8593 - protein, 7 aa, synthetic construct
  REGION 1..7: note = Description of Artificial Sequence: Synthetic peptide
DQSIHGK

SEQ ID NO: 8594 - protein, 7 aa, synthetic construct
  REGION 1..7: note = Description of Artificial Sequence: Synthetic peptide
SGQSKGV

SEQ ID NO: 8595 - protein, 7 aa, synthetic construct
  REGION 1..7: note = Description of Artificial Sequence: Synthetic peptide
KDGKQTM

SEQ ID NO: 8596 - protein, 7 aa, synthetic construct
  REGION 1..7: note = Description of Artificial Sequence: Synthetic peptide
SIAKERL

SEQ ID NO: 8597 - protein, 7 aa, synthetic construct
  REGION 1..7: note = Description of Artificial Sequence: Synthetic peptide
STTKGPN

SEQ ID NO: 8598 - protein, 7 aa, synthetic construct
  REGION 1..7: note = Description of Artificial Sequence: Synthetic peptide
ERPGGAK

SEQ ID NO: 8599 - protein, 7 aa, synthetic construct
  REGION 1..7: note = Description of Artificial Sequence: Synthetic peptide
GVAAAPS

SEQ ID NO: 8600 - protein, 7 aa, synthetic construct
  REGION 1..7: note = Description of Artificial Sequence: Synthetic peptide
VEGSVTK

SEQ ID NO: 8601 - protein, 7 aa, synthetic construct
  REGION 1..7: note = Description of Artificial Sequence: Synthetic peptide
VGNDTNR

SEQ ID NO: 8602 - protein, 7 aa, synthetic construct
  REGION 1..7: note = Description of Artificial Sequence: Synthetic peptide
NSSKPST

SEQ ID NO: 8603 - protein, 7 aa, synthetic construct
  REGION 1..7: note = Description of Artificial Sequence: Synthetic peptide
VTSTPIQ

SEQ ID NO: 8604 - protein, 7 aa, synthetic construct
  REGION 1..7: note = Description of Artificial Sequence: Synthetic peptide
MSGGNQP

SEQ ID NO: 8605 - protein, 7 aa, synthetic construct
  REGION 1..7: note = Description of Artificial Sequence: Synthetic peptide
KSGQSAV

SEQ ID NO: 8606 - protein, 7 aa, synthetic construct
  REGION 1..7: note = Description of Artificial Sequence: Synthetic peptide
SGKEAVK

SEQ ID NO: 8607 - protein, 7 aa, synthetic construct
  REGION 1..7: note = Description of Artificial Sequence: Synthetic peptide
RSGETHT

SEQ ID NO: 8608 - protein, 7 aa, synthetic construct
  REGION 1..7: note = Description of Artificial Sequence: Synthetic peptide
DSASKMT

SEQ ID NO: 8609 - protein, 7 aa, synthetic construct
  REGION 1..7: note = Description of Artificial Sequence: Synthetic peptide
GSAQEPR

SEQ ID NO: 8610 - protein, 7 aa, synthetic construct
  REGION 1..7: note = Description of Artificial Sequence: Synthetic peptide
SQAKESI

SEQ ID NO: 8611 - protein, 7 aa, synthetic construct
  REGION 1..7: note = Description of Artificial Sequence: Synthetic peptide
SISSDLK

SEQ ID NO: 8612 - protein, 7 aa, synthetic construct
  REGION 1..7: note = Description of Artificial Sequence: Synthetic peptide
LPSKANL

SEQ ID NO: 8613 - protein, 7 aa, synthetic construct
  REGION 1..7: note = Description of Artificial Sequence: Synthetic peptide
HGGQPSS

SEQ ID NO: 8614 - protein, 7 aa, synthetic construct
  REGION 1..7: note = Description of Artificial Sequence: Synthetic peptide
GGSESRK

SEQ ID NO: 8615 - protein, 7 aa, synthetic construct
  REGION 1..7: note = Description of Artificial Sequence: Synthetic peptide
MNQTRES

SEQ ID NO: 8616 - protein, 7 aa, synthetic construct
  REGION 1..7: note = Description of Artificial Sequence: Synthetic peptide
QKTNEAR

SEQ ID NO: 8617 - protein, 7 aa, synthetic construct
  REGION 1..7: note = Description of Artificial Sequence: Synthetic peptide
HGDNSRQ

SEQ ID NO: 8618 - protein, 7 aa, synthetic construct
  REGION 1..7: note = Description of Artificial Sequence: Synthetic peptide
VRTNAPE

SEQ ID NO: 8619 - protein, 7 aa, synthetic construct
  REGION 1..7: note = Description of Artificial Sequence: Synthetic peptide
SADTRSV

SEQ ID NO: 8620 - protein, 7 aa, synthetic construct
  REGION 1..7: note = Description of Artificial Sequence: Synthetic peptide
SGNHKSQ

SEQ ID NO: 8621 - protein, 7 aa, synthetic construct
  REGION 1..7: note = Description of Artificial Sequence: Synthetic peptide
QNGGKVS

SEQ ID NO: 8622 - protein, 7 aa, synthetic construct
  REGION 1..7: note = Description of Artificial Sequence: Synthetic peptide
AGVANPS

SEQ ID NO: 8623 - protein, 7 aa, synthetic construct
  REGION 1..7: note = Description of Artificial Sequence: Synthetic peptide
NVNVGNT

SEQ ID NO: 8624 - protein, 7 aa, synthetic construct
  REGION 1..7: note = Description of Artificial Sequence: Synthetic peptide
MRDNHSI

SEQ ID NO: 8625 - protein, 7 aa, synthetic construct
  REGION 1..7: note = Description of Artificial Sequence: Synthetic peptide
VQGGASR

SEQ ID NO: 8626 - protein, 7 aa, synthetic construct
  REGION 1..7: note = Description of Artificial Sequence: Synthetic peptide
STVGKPH

SEQ ID NO: 8627 - protein, 7 aa, synthetic construct
  REGION 1..7: note = Description of Artificial Sequence: Synthetic peptide
ATADTPK

SEQ ID NO: 8628 - protein, 7 aa, synthetic construct
  REGION 1..7: note = Description of Artificial Sequence: Synthetic peptide
TINAATK

SEQ ID NO: 8629 - protein, 7 aa, synthetic construct
  REGION 1..7: note = Description of Artificial Sequence: Synthetic peptide
VSGSSPK

SEQ ID NO: 8630 - protein, 7 aa, synthetic construct
  REGION 1..7: note = Description of Artificial Sequence: Synthetic peptide
SASSKQE

SEQ ID NO: 8631 - protein, 7 aa, synthetic construct
  REGION 1..7: note = Description of Artificial Sequence: Synthetic peptide
KNGNSVS

SEQ ID NO: 8632 - protein, 7 aa, synthetic construct
  REGION 1..7: note = Description of Artificial Sequence: Synthetic peptide
SAHNKSV

SEQ ID NO: 8633 - protein, 7 aa, synthetic construct
  REGION 1..7: note = Description of Artificial Sequence: Synthetic peptide
MSNEKSH

SEQ ID NO: 8634 - protein, 7 aa, synthetic construct
  REGION 1..7: note = Description of Artificial Sequence: Synthetic peptide
VQAQASL

SEQ ID NO: 8635 - protein, 7 aa, synthetic construct
  REGION 1..7: note = Description of Artificial Sequence: Synthetic peptide
SVTREHA

SEQ ID NO: 8636 - protein, 7 aa, synthetic construct
  REGION 1..7: note = Description of Artificial Sequence: Synthetic peptide
ISTKKSE

SEQ ID NO: 8637 - protein, 7 aa, synthetic construct
  REGION 1..7: note = Description of Artificial Sequence: Synthetic peptide
TNVSTTK

SEQ ID NO: 8638 - protein, 7 aa, synthetic construct
  REGION 1..7: note = Description of Artificial Sequence: Synthetic peptide
MASGAKP

SEQ ID NO: 8639 - protein, 7 aa, synthetic construct
  REGION 1..7: note = Description of Artificial Sequence: Synthetic peptide
SSGSKDP

SEQ ID NO: 8640 - protein, 7 aa, synthetic construct
  REGION 1..7: note = Description of Artificial Sequence: Synthetic peptide
GVGKDQQ

SEQ ID NO: 8641 - protein, 7 aa, synthetic construct
  REGION 1..7: note = Description of Artificial Sequence: Synthetic peptide
RGQGSPS

SEQ ID NO: 8642 - protein, 7 aa, synthetic construct
  REGION 1..7: note = Description of Artificial Sequence: Synthetic peptide
EQEKPAS

SEQ ID NO: 8643 - protein, 7 aa, synthetic construct
  REGION 1..7: note = Description of Artificial Sequence: Synthetic peptide
GSNPSKS

SEQ ID NO: 8644 - protein, 7 aa, synthetic construct
  REGION 1..7: note = Description of Artificial Sequence: Synthetic peptide
VTSQNAA

SEQ ID NO: 8645 - protein, 7 aa, synthetic construct
  REGION 1..7: note = Description of Artificial Sequence: Synthetic peptide
HGAGNAV

SEQ ID NO: 8646 - protein, 7 aa, synthetic construct
  REGION 1..7: note = Description of Artificial Sequence: Synthetic peptide
SSELSGK

SEQ ID NO: 8647 - protein, 7 aa, synthetic construct
  REGION 1..7: note = Description of Artificial Sequence: Synthetic peptide
EVAKGNM

SEQ ID NO: 8648 - protein, 7 aa, synthetic construct
  REGION 1..7: note = Description of Artificial Sequence: Synthetic peptide
GSLSEKG

SEQ ID NO: 8649 - protein, 7 aa, synthetic construct
  REGION 1..7: note = Description of Artificial Sequence: Synthetic peptide
YGSEPGS

SEQ ID NO: 8650 - protein, 7 aa, synthetic construct
  REGION 1..7: note = Description of Artificial Sequence: Synthetic peptide
SRSEVKT

SEQ ID NO: 8651 - protein, 7 aa, synthetic construct
  REGION 1..7: note = Description of Artificial Sequence: Synthetic peptide
AKEPKPV

SEQ ID NO: 8652 - protein, 7 aa, synthetic construct
  REGION 1..7: note = Description of Artificial Sequence: Synthetic peptide
SAVDKAT

SEQ ID NO: 8653 - protein, 7 aa, synthetic construct
  REGION 1..7: note = Description of Artificial Sequence: Synthetic peptide
SSTAKGN

SEQ ID NO: 8654 - protein, 7 aa, synthetic construct
  REGION 1..7: note = Description of Artificial Sequence: Synthetic peptide
NAEARSE

SEQ ID NO: 8655 - protein, 7 aa, synthetic construct
  REGION 1..7: note = Description of Artificial Sequence: Synthetic peptide
DPRSPPI

SEQ ID NO: 8656 - protein, 7 aa, synthetic construct
  REGION 1..7: note = Description of Artificial Sequence: Synthetic peptide
ATGGTRL

SEQ ID NO: 8657 - protein, 7 aa, synthetic construct
  REGION 1..7: note = Description of Artificial Sequence: Synthetic peptide
SQMSSPK

SEQ ID NO: 8658 - protein, 7 aa, synthetic construct
  REGION 1..7: note = Description of Artificial Sequence: Synthetic peptide
QMSNSNT

SEQ ID NO: 8659 - protein, 7 aa, synthetic construct
  REGION 1..7: note = Description of Artificial Sequence: Synthetic peptide
GVNKPSM

SEQ ID NO: 8660 - protein, 7 aa, synthetic construct
  REGION 1..7: note = Description of Artificial Sequence: Synthetic peptide
TTTNKLS

SEQ ID NO: 8661 - protein, 7 aa, synthetic construct
  REGION 1..7: note = Description of Artificial Sequence: Synthetic peptide
HKVGDQG

SEQ ID NO: 8662 - protein, 7 aa, synthetic construct
  REGION 1..7: note = Description of Artificial Sequence: Synthetic peptide
QSSAQSI

SEQ ID NO: 8663 - protein, 7 aa, synthetic construct
  REGION 1..7: note = Description of Artificial Sequence: Synthetic peptide
VGSNSVS

SEQ ID NO: 8664 - protein, 7 aa, synthetic construct
  REGION 1..7: note = Description of Artificial Sequence: Synthetic peptide
KDTGKVG

SEQ ID NO: 8665 - protein, 7 aa, synthetic construct
  REGION 1..7: note = Description of Artificial Sequence: Synthetic peptide
KPVNNKE

SEQ ID NO: 8666 - protein, 7 aa, synthetic construct
  REGION 1..7: note = Description of Artificial Sequence: Synthetic peptide
NHNSANS

SEQ ID NO: 8667 - protein, 7 aa, synthetic construct
  REGION 1..7: note = Description of Artificial Sequence: Synthetic peptide
NGRSNSA

SEQ ID NO: 8668 - protein, 7 aa, synthetic construct
  REGION 1..7: note = Description of Artificial Sequence: Synthetic peptide
NSGGSTQ

SEQ ID NO: 8669 - protein, 7 aa, synthetic construct
  REGION 1..7: note = Description of Artificial Sequence: Synthetic peptide
TNNTASG

SEQ ID NO: 8670 - protein, 7 aa, synthetic construct
  REGION 1..7: note = Description of Artificial Sequence: Synthetic peptide
SRSASNA

SEQ ID NO: 8671 - protein, 7 aa, synthetic construct
  REGION 1..7: note = Description of Artificial Sequence: Synthetic peptide
SDQVKSN

SEQ ID NO: 8672 - protein, 7 aa, synthetic construct
  REGION 1..7: note = Description of Artificial Sequence: Synthetic peptide
SASERSL

SEQ ID NO: 8673 - protein, 7 aa, synthetic construct
  REGION 1..7: note = Description of Artificial Sequence: Synthetic peptide
QSSGSTM

SEQ ID NO: 8674 - protein, 7 aa, synthetic construct
  REGION 1..7: note = Description of Artificial Sequence: Synthetic peptide
HLGSSNE

SEQ ID NO: 8675 - protein, 7 aa, synthetic construct
  REGION 1..7: note = Description of Artificial Sequence: Synthetic peptide
LGNSTTS

SEQ ID NO: 8676 - protein, 7 aa, synthetic construct
  REGION 1..7: note = Description of Artificial Sequence: Synthetic peptide
SPTGKGV

SEQ ID NO: 8677 - protein, 7 aa, synthetic construct
  REGION 1..7: note = Description of Artificial Sequence: Synthetic peptide
SGSNVPS

SEQ ID NO: 8678 - protein, 7 aa, synthetic construct
  REGION 1..7: note = Description of Artificial Sequence: Synthetic peptide
SNTPTTV

SEQ ID NO: 8679 - protein, 7 aa, synthetic construct
  REGION 1..7: note = Description of Artificial Sequence: Synthetic peptide
SRSDPKV

SEQ ID NO: 8680 - protein, 7 aa, synthetic construct
  REGION 1..7: note = Description of Artificial Sequence: Synthetic peptide
SLAASAN

SEQ ID NO: 8681 - protein, 7 aa, synthetic construct
  REGION 1..7: note = Description of Artificial Sequence: Synthetic peptide
SGVSSAT

SEQ ID NO: 8682 - protein, 7 aa, synthetic construct
  REGION 1..7: note = Description of Artificial Sequence: Synthetic peptide
SDSPHNK

SEQ ID NO: 8683 - protein, 7 aa, synthetic construct
  REGION 1..7: note = Description of Artificial Sequence: Synthetic peptide
GKAGNTT

SEQ ID NO: 8684 - protein, 7 aa, synthetic construct
  REGION 1..7: note = Description of Artificial Sequence: Synthetic peptide
NQGNQVS

SEQ ID NO: 8685 - protein, 7 aa, synthetic construct
  REGION 1..7: note = Description of Artificial Sequence: Synthetic peptide
AGSSSPR

SEQ ID NO: 8686 - protein, 7 aa, synthetic construct
  REGION 1..7: note = Description of Artificial Sequence: Synthetic peptide
KVPPTQG

SEQ ID NO: 8687 - protein, 7 aa, synthetic construct
  REGION 1..7: note = Description of Artificial Sequence: Synthetic peptide
EGQGTFA

SEQ ID NO: 8688 - protein, 7 aa, synthetic construct
  REGION 1..7: note = Description of Artificial Sequence: Synthetic peptide
ATNSPSL

SEQ ID NO: 8689 - protein, 7 aa, synthetic construct
  REGION 1..7: note = Description of Artificial Sequence: Synthetic peptide
SSRQSDG

SEQ ID NO: 8690 - protein, 7 aa, synthetic construct
  REGION 1..7: note = Description of Artificial Sequence: Synthetic peptide
ALSATPP

SEQ ID NO: 8691 - protein, 7 aa, synthetic construct
  REGION 1..7: note = Description of Artificial Sequence: Synthetic peptide
VDGGSTG

SEQ ID NO: 8692 - protein, 7 aa, synthetic construct
  REGION 1..7: note = Description of Artificial Sequence: Synthetic peptide
GSGSSNK

SEQ ID NO: 8693 - protein, 7 aa, synthetic construct
  REGION 1..7: note = Description of Artificial Sequence: Synthetic peptide
GSATTAS

SEQ ID NO: 8694 - protein, 7 aa, synthetic construct
  REGION 1..7: note = Description of Artificial Sequence: Synthetic peptide
QSKGAQG

SEQ ID NO: 8695 - protein, 7 aa, synthetic construct
  REGION 1..7: note = Description of Artificial Sequence: Synthetic peptide
GLDKHSV

SEQ ID NO: 8696 - protein, 7 aa, synthetic construct
  REGION 1..7: note = Description of Artificial Sequence: Synthetic peptide
GDVSHKN

SEQ ID NO: 8697 - protein, 7 aa, synthetic construct
  REGION 1..7: note = Description of Artificial Sequence: Synthetic peptide
GVSATPL

SEQ ID NO: 8698 - protein, 7 aa, synthetic construct
  REGION 1..7: note = Description of Artificial Sequence: Synthetic peptide
TRESQGS

SEQ ID NO: 8699 - protein, 7 aa, synthetic construct
  REGION 1..7: note = Description of Artificial Sequence: Synthetic peptide
QHNGDRS

SEQ ID NO: 8700 - protein, 7 aa, synthetic construct
  REGION 1..7: note = Description of Artificial Sequence: Synthetic peptide
NSVKATS

SEQ ID NO: 8701 - protein, 7 aa, synthetic construct
  REGION 1..7: note = Description of Artificial Sequence: Synthetic peptide
QKNSNSA

SEQ ID NO: 8702 - protein, 7 aa, synthetic construct
  REGION 1..7: note = Description of Artificial Sequence: Synthetic peptide
RQTDKIS

SEQ ID NO: 8703 - protein, 7 aa, synthetic construct
  REGION 1..7: note = Description of Artificial Sequence: Synthetic peptide
GGPGSTH

SEQ ID NO: 8704 - protein, 7 aa, synthetic construct
  REGION 1..7: note = Description of Artificial Sequence: Synthetic peptide
SSGHTSG

SEQ ID NO: 8705 - protein, 7 aa, synthetic construct
  REGION 1..7: note = Description of Artificial Sequence: Synthetic peptide
SGTSSVS

SEQ ID NO: 8706 - protein, 7 aa, synthetic construct
  REGION 1..7: note = Description of Artificial Sequence: Synthetic peptide
QASSSNT

SEQ ID NO: 8707 - protein, 7 aa, synthetic construct
  REGION 1..7: note = Description of Artificial Sequence: Synthetic peptide
GRESGAS

SEQ ID NO: 8708 - protein, 7 aa, synthetic construct
  REGION 1..7: note = Description of Artificial Sequence: Synthetic peptide
QKSDGFH

SEQ ID NO: 8709 - protein, 7 aa, synthetic construct
  REGION 1..7: note = Description of Artificial Sequence: Synthetic peptide
ASGSAAS

SEQ ID NO: 8710 - protein, 7 aa, synthetic construct
  REGION 1..7: note = Description of Artificial Sequence: Synthetic peptide
AAAIPNN

SEQ ID NO: 8711 - protein, 7 aa, synthetic construct
  REGION 1..7: note = Description of Artificial Sequence: Synthetic peptide
GKGTDAH

SEQ ID NO: 8712 - protein, 7 aa, synthetic construct
  REGION 1..7: note = Description of Artificial Sequence: Synthetic peptide
NSVQGQG

SEQ ID NO: 8713 - protein, 7 aa, synthetic construct
  REGION 1..7: note = Description of Artificial Sequence: Synthetic peptide
SSHSPHT

SEQ ID NO: 8714 - protein, 7 aa, synthetic construct
  REGION 1..7: note = Description of Artificial Sequence: Synthetic peptide
LNRTPNV

SEQ ID NO: 8715 - protein, 7 aa, synthetic construct
  REGION 1..7: note = Description of Artificial Sequence: Synthetic peptide
AGGTSSV

SEQ ID NO: 8716 - protein, 7 aa, synthetic construct
  REGION 1..7: note = Description of Artificial Sequence: Synthetic peptide
GTGTNSP

SEQ ID NO: 8717 - protein, 7 aa, synthetic construct
  REGION 1..7: note = Description of Artificial Sequence: Synthetic peptide
SQDKSAS

SEQ ID NO: 8718 - protein, 7 aa, synthetic construct
  REGION 1..7: note = Description of Artificial Sequence: Synthetic peptide
NGMTQKV

SEQ ID NO: 8719 - protein, 7 aa, synthetic construct
  REGION 1..7: note = Description of Artificial Sequence: Synthetic peptide
LADNKST

SEQ ID NO: 8720 - protein, 7 aa, synthetic construct
  REGION 1..7: note = Description of Artificial Sequence: Synthetic peptide
SATTSGA

SEQ ID NO: 8721 - protein, 7 aa, synthetic construct
  REGION 1..7: note = Description of Artificial Sequence: Synthetic peptide
NATSTPV

SEQ ID NO: 8722 - protein, 7 aa, synthetic construct
  REGION 1..7: note = Description of Artificial Sequence: Synthetic peptide
DTASRSH

SEQ ID NO: 8723 - protein, 7 aa, synthetic construct
  REGION 1..7: note = Description of Artificial Sequence: Synthetic peptide
GTSVPRV

SEQ ID NO: 8724 - protein, 7 aa, synthetic construct
  REGION 1..7: note = Description of Artificial Sequence: Synthetic peptide
QPKPRTE

SEQ ID NO: 8725 - protein, 7 aa, synthetic construct
  REGION 1..7: note = Description of Artificial Sequence: Synthetic peptide
IQPGSPK

SEQ ID NO: 8726 - protein, 7 aa, synthetic construct
  REGION 1..7: note = Description of Artificial Sequence: Synthetic peptide
KQEAPGT

SEQ ID NO: 8727 - protein, 7 aa, synthetic construct
  REGION 1..7: note = Description of Artificial Sequence: Synthetic peptide
SNSPGPH

SEQ ID NO: 8728 - protein, 7 aa, synthetic construct
  REGION 1..7: note = Description of Artificial Sequence: Synthetic peptide
SDGSSRV

SEQ ID NO: 8729 - protein, 7 aa, synthetic construct
  REGION 1..7: note = Description of Artificial Sequence: Synthetic peptide
SAGVAGK

SEQ ID NO: 8730 - protein, 7 aa, synthetic construct
  REGION 1..7: note = Description of Artificial Sequence: Synthetic peptide
SGGGSSS

SEQ ID NO: 8731 - protein, 7 aa, synthetic construct
  REGION 1..7: note = Description of Artificial Sequence: Synthetic peptide
HNSTATH

SEQ ID NO: 8732 - protein, 7 aa, synthetic construct
  REGION 1..7: note = Description of Artificial Sequence: Synthetic peptide
EGSQGAV

SEQ ID NO: 8733 - protein, 7 aa, synthetic construct
  REGION 1..7: note = Description of Artificial Sequence: Synthetic peptide
ARTTNKE

SEQ ID NO: 8734 - protein, 7 aa, synthetic construct
  REGION 1..7: note = Description of Artificial Sequence: Synthetic peptide
GGNRGDV

SEQ ID NO: 8735 - protein, 7 aa, synthetic construct
  REGION 1..7: note = Description of Artificial Sequence: Synthetic peptide
SSGKVPG

SEQ ID NO: 8736 - protein, 7 aa, synthetic construct
  REGION 1..7: note = Description of Artificial Sequence: Synthetic peptide
MTAKGSV

SEQ ID NO: 8737 - protein, 7 aa, synthetic construct
  REGION 1..7: note = Description of Artificial Sequence: Synthetic peptide
SGSSSTS

SEQ ID NO: 8738 - protein, 7 aa, synthetic construct
  REGION 1..7: note = Description of Artificial Sequence: Synthetic peptide
TNTQQYQ

SEQ ID NO: 8739 - protein, 7 aa, synthetic construct
  REGION 1..7: note = Description of Artificial Sequence: Synthetic peptide
AKQNTTL

SEQ ID NO: 8740 - protein, 7 aa, synthetic construct
  REGION 1..7: note = Description of Artificial Sequence: Synthetic peptide
GTGSKTV

SEQ ID NO: 8741 - protein, 7 aa, synthetic construct
  REGION 1..7: note = Description of Artificial Sequence: Synthetic peptide
TGGDPLK

SEQ ID NO: 8742 - protein, 7 aa, synthetic construct
  REGION 1..7: note = Description of Artificial Sequence: Synthetic peptide
TRVTSPS

SEQ ID NO: 8743 - protein, 7 aa, synthetic construct
  REGION 1..7: note = Description of Artificial Sequence: Synthetic peptide
QHGNKES

SEQ ID NO: 8744 - protein, 7 aa, synthetic construct
  REGION 1..7: note = Description of Artificial Sequence: Synthetic peptide
DRSPNPA

SEQ ID NO: 8745 - protein, 7 aa, synthetic construct
  REGION 1..7: note = Description of Artificial Sequence: Synthetic peptide
NSAKSTF

SEQ ID NO: 8746 - protein, 7 aa, synthetic construct
  REGION 1..7: note = Description of Artificial Sequence: Synthetic peptide
GQGQPSS

SEQ ID NO: 8747 - protein, 7 aa, synthetic construct
  REGION 1..7: note = Description of Artificial Sequence: Synthetic peptide
LISDKSA

SEQ ID NO: 8748 - protein, 7 aa, synthetic construct
  REGION 1..7: note = Description of Artificial Sequence: Synthetic peptide
SVSQSHV

SEQ ID NO: 8749 - protein, 7 aa, synthetic construct
  REGION 1..7: note = Description of Artificial Sequence: Synthetic peptide
NPAQANQ

SEQ ID NO: 8750 - protein, 7 aa, synthetic construct
  REGION 1..7: note = Description of Artificial Sequence: Synthetic peptide
HNSTPPV

SEQ ID NO: 8751 - protein, 7 aa, synthetic construct
  REGION 1..7: note = Description of Artificial Sequence: Synthetic peptide
GKQSQAA

SEQ ID NO: 8752 - protein, 7 aa, synthetic construct
  REGION 1..7: note = Description of Artificial Sequence: Synthetic peptide
GIQTPSA

SEQ ID NO: 8753 - protein, 7 aa, synthetic construct
  REGION 1..7: note = Description of Artificial Sequence: Synthetic peptide
ESSNARS

SEQ ID NO: 8754 - protein, 7 aa, synthetic construct
  REGION 1..7: note = Description of Artificial Sequence: Synthetic peptide
STREQKG

SEQ ID NO: 8755 - protein, 7 aa, synthetic construct
  REGION 1..7: note = Description of Artificial Sequence: Synthetic peptide
MPSNSSA

SEQ ID NO: 8756 - protein, 7 aa, synthetic construct
  REGION 1..7: note = Description of Artificial Sequence: Synthetic peptide
DSTTKNT

SEQ ID NO: 8757 - protein, 7 aa, synthetic construct
  REGION 1..7: note = Description of Artificial Sequence: Synthetic peptide
DVSGSKA

SEQ ID NO: 8758 - protein, 7 aa, synthetic construct
  REGION 1..7: note = Description of Artificial Sequence: Synthetic peptide
DVPAAKI

SEQ ID NO: 8759 - protein, 7 aa, synthetic construct
  REGION 1..7: note = Description of Artificial Sequence: Synthetic peptide
AGGNKES

SEQ ID NO: 8760 - protein, 7 aa, synthetic construct
  REGION 1..7: note = Description of Artificial Sequence: Synthetic peptide
ANQAGSQ

SEQ ID NO: 8761 - protein, 7 aa, synthetic construct
  REGION 1..7: note = Description of Artificial Sequence: Synthetic peptide
GRGDNVG

SEQ ID NO: 8762 - protein, 7 aa, synthetic construct
  REGION 1..7: note = Description of Artificial Sequence: Synthetic peptide
SGDSRVH

SEQ ID NO: 8763 - protein, 7 aa, synthetic construct
  REGION 1..7: note = Description of Artificial Sequence: Synthetic peptide
NGSNNTT

SEQ ID NO: 8764 - protein, 7 aa, synthetic construct
  REGION 1..7: note = Description of Artificial Sequence: Synthetic peptide
NSRTPPN

SEQ ID NO: 8765 - protein, 7 aa, synthetic construct
  REGION 1..7: note = Description of Artificial Sequence: Synthetic peptide
TPSSETR

SEQ ID NO: 8766 - protein, 7 aa, synthetic construct
  REGION 1..7: note = Description of Artificial Sequence: Synthetic peptide
TNSAGAA

SEQ ID NO: 8767 - protein, 7 aa, synthetic construct
  REGION 1..7: note = Description of Artificial Sequence: Synthetic peptide
TSRDAQK

SEQ ID NO: 8768 - protein, 7 aa, synthetic construct
  REGION 1..7: note = Description of Artificial Sequence: Synthetic peptide
GLESPRK

SEQ ID NO: 8769 - protein, 7 aa, synthetic construct
  REGION 1..7: note = Description of Artificial Sequence: Synthetic peptide
GSNTSVA

SEQ ID NO: 8770 - protein, 7 aa, synthetic construct
  REGION 1..7: note = Description of Artificial Sequence: Synthetic peptide
KGLSSST

SEQ ID NO: 8771 - protein, 7 aa, synthetic construct
  REGION 1..7: note = Description of Artificial Sequence: Synthetic peptide
SSGGQHQ

SEQ ID NO: 8772 - protein, 7 aa, synthetic construct
  REGION 1..7: note = Description of Artificial Sequence: Synthetic peptide
QSTKELA

SEQ ID NO: 8773 - protein, 7 aa, synthetic construct
  REGION 1..7: note = Description of Artificial Sequence: Synthetic peptide
AKANLST

SEQ ID NO: 8774 - protein, 7 aa, synthetic construct
  REGION 1..7: note = Description of Artificial Sequence: Synthetic peptide
ATTSPST

SEQ ID NO: 8775 - protein, 7 aa, synthetic construct
  REGION 1..7: note = Description of Artificial Sequence: Synthetic peptide
SGSPSSG

SEQ ID NO: 8776 - protein, 7 aa, synthetic construct
  REGION 1..7: note = Description of Artificial Sequence: Synthetic peptide
EPKPSST

SEQ ID NO: 8777 - protein, 7 aa, synthetic construct
  REGION 1..7: note = Description of Artificial Sequence: Synthetic peptide
SGSGQNQ

SEQ ID NO: 8778 - protein, 7 aa, synthetic construct
  REGION 1..7: note = Description of Artificial Sequence: Synthetic peptide
VGTNAPQ

SEQ ID NO: 8779 - protein, 7 aa, synthetic construct
  REGION 1..7: note = Description of Artificial Sequence: Synthetic peptide
TSSKEAV

SEQ ID NO: 8780 - protein, 7 aa, synthetic construct
  REGION 1..7: note = Description of Artificial Sequence: Synthetic peptide
SAGTKQT

SEQ ID NO: 8781 - protein, 7 aa, synthetic construct
  REGION 1..7: note = Description of Artificial Sequence: Synthetic peptide
ITAASST

SEQ ID NO: 8782 - protein, 7 aa, synthetic construct
  REGION 1..7: note = Description of Artificial Sequence: Synthetic peptide
TSDKGPR

SEQ ID NO: 8783 - protein, 7 aa, synthetic construct
  REGION 1..7: note = Description of Artificial Sequence: Synthetic peptide
TDPPSRS

SEQ ID NO: 8784 - protein, 7 aa, synthetic construct
  REGION 1..7: note = Description of Artificial Sequence: Synthetic peptide
SKMNSSV

SEQ ID NO: 8785 - protein, 7 aa, synthetic construct
  REGION 1..7: note = Description of Artificial Sequence: Synthetic peptide
SSSKPGL

SEQ ID NO: 8786 - protein, 7 aa, synthetic construct
  REGION 1..7: note = Description of Artificial Sequence: Synthetic peptide
DTGPAHT

SEQ ID NO: 8787 - protein, 7 aa, synthetic construct
  REGION 1..7: note = Description of Artificial Sequence: Synthetic peptide
EPTRGSS

SEQ ID NO: 8788 - protein, 7 aa, synthetic construct
  REGION 1..7: note = Description of Artificial Sequence: Synthetic peptide
ATSTDKN

SEQ ID NO: 8789 - protein, 7 aa, synthetic construct
  REGION 1..7: note = Description of Artificial Sequence: Synthetic peptide
GEHGSSG

SEQ ID NO: 8790 - protein, 7 aa, synthetic construct
  REGION 1..7: note = Description of Artificial Sequence: Synthetic peptide
GGHNVSN

SEQ ID NO: 8791 - protein, 7 aa, synthetic construct
  REGION 1..7: note = Description of Artificial Sequence: Synthetic peptide
GSTAGER

SEQ ID NO: 8792 - protein, 7 aa, synthetic construct
  REGION 1..7: note = Description of Artificial Sequence: Synthetic peptide
VGDMTKA

SEQ ID NO: 8793 - protein, 7 aa, synthetic construct
  REGION 1..7: note = Description of Artificial Sequence: Synthetic peptide
VKGGATN

SEQ ID NO: 8794 - protein, 7 aa, synthetic construct
  REGION 1..7: note = Description of Artificial Sequence: Synthetic peptide
LGNGIAN

SEQ ID NO: 8795 - protein, 7 aa, synthetic construct
  REGION 1..7: note = Description of Artificial Sequence: Synthetic peptide
TLAPTNA

SEQ ID NO: 8796 - protein, 7 aa, synthetic construct
  REGION 1..7: note = Description of Artificial Sequence: Synthetic peptide
GGTTSPK

SEQ ID NO: 8797 - protein, 7 aa, synthetic construct
  REGION 1..7: note = Description of Artificial Sequence: Synthetic peptide
QSQKVPA

SEQ ID NO: 8798 - protein, 7 aa, synthetic construct
  REGION 1..7: note = Description of Artificial Sequence: Synthetic peptide
TSGSNRG

SEQ ID NO: 8799 - protein, 7 aa, synthetic construct
  REGION 1..7: note = Description of Artificial Sequence: Synthetic peptide
GIDPKLA

SEQ ID NO: 8800 - protein, 7 aa, synthetic construct
  REGION 1..7: note = Description of Artificial Sequence: Synthetic peptide
LSGSTNS

SEQ ID NO: 8801 - protein, 7 aa, synthetic construct
  REGION 1..7: note = Description of Artificial Sequence: Synthetic peptide
GTTSGMK

SEQ ID NO: 8802 - protein, 7 aa, synthetic construct
  REGION 1..7: note = Description of Artificial Sequence: Synthetic peptide
SIKSPSD

SEQ ID NO: 8803 - protein, 7 aa, synthetic construct
  REGION 1..7: note = Description of Artificial Sequence: Synthetic peptide
SPSPSGG

SEQ ID NO: 8804 - protein, 7 aa, synthetic construct
  REGION 1..7: note = Description of Artificial Sequence: Synthetic peptide
MPGTSKS

SEQ ID NO: 8805 - protein, 7 aa, synthetic construct
  REGION 1..7: note = Description of Artificial Sequence: Synthetic peptide
HQATTSQ

SEQ ID NO: 8806 - protein, 7 aa, synthetic construct
  REGION 1..7: note = Description of Artificial Sequence: Synthetic peptide
AAVAGNG

SEQ ID NO: 8807 - protein, 7 aa, synthetic construct
  REGION 1..7: note = Description of Artificial Sequence: Synthetic peptide
SDHKSGV

SEQ ID NO: 8808 - protein, 7 aa, synthetic construct
  REGION 1..7: note = Description of Artificial Sequence: Synthetic peptide
SSSNAAN

SEQ ID NO: 8809 - protein, 7 aa, synthetic construct
  REGION 1..7: note = Description of Artificial Sequence: Synthetic peptide
DSRGSPK

SEQ ID NO: 8810 - protein, 7 aa, synthetic construct
  REGION 1..7: note = Description of Artificial Sequence: Synthetic peptide
RQDNRGG

SEQ ID NO: 8811 - protein, 7 aa, synthetic construct
  REGION 1..7: note = Description of Artificial Sequence: Synthetic peptide
SSGSKLG

SEQ ID NO: 8812 - protein, 7 aa, synthetic construct
  REGION 1..7: note = Description of Artificial Sequence: Synthetic peptide
GSGGNQN

SEQ ID NO: 8813 - protein, 7 aa, synthetic construct
  REGION 1..7: note = Description of Artificial Sequence: Synthetic peptide
VASQPTS

SEQ ID NO: 8814 - protein, 7 aa, synthetic construct
  REGION 1..7: note = Description of Artificial Sequence: Synthetic peptide
AKASGLS

SEQ ID NO: 8815 - protein, 7 aa, synthetic construct
  REGION 1..7: note = Description of Artificial Sequence: Synthetic peptide
AVSQEKQ

SEQ ID NO: 8816 - protein, 7 aa, synthetic construct
  REGION 1..7: note = Description of Artificial Sequence: Synthetic peptide
AKGEANG

SEQ ID NO: 8817 - protein, 7 aa, synthetic construct
  REGION 1..7: note = Description of Artificial Sequence: Synthetic peptide
GTGNSRT

SEQ ID NO: 8818 - protein, 7 aa, synthetic construct
  REGION 1..7: note = Description of Artificial Sequence: Synthetic peptide
SGLGNSV

SEQ ID NO: 8819 - protein, 7 aa, synthetic construct
  REGION 1..7: note = Description of Artificial Sequence: Synthetic peptide
CDSKSCS

SEQ ID NO: 8820 - protein, 7 aa, synthetic construct
  REGION 1..7: note = Description of Artificial Sequence: Synthetic peptide
EPKPANT

SEQ ID NO: 8821 - protein, 7 aa, synthetic construct
  REGION 1..7: note = Description of Artificial Sequence: Synthetic peptide
GSSQASL

SEQ ID NO: 8822 - protein, 7 aa, synthetic construct
  REGION 1..7: note = Description of Artificial Sequence: Synthetic peptide
TQSSPTS

SEQ ID NO: 8823 - protein, 7 aa, synthetic construct
  REGION 1..7: note = Description of Artificial Sequence: Synthetic peptide
TNGQKFS

SEQ ID NO: 8824 - protein, 7 aa, synthetic construct
  REGION 1..7: note = Description of Artificial Sequence: Synthetic peptide
RSDEKRL

SEQ ID NO: 8825 - protein, 7 aa, synthetic construct
  REGION 1..7: note = Description of Artificial Sequence: Synthetic peptide
SMQKEQT

SEQ ID NO: 8826 - protein, 7 aa, synthetic construct
  REGION 1..7: note = Description of Artificial Sequence: Synthetic peptide
SGAGSVG

SEQ ID NO: 8827 - protein, 7 aa, synthetic construct
  REGION 1..7: note = Description of Artificial Sequence: Synthetic peptide
EMPTRNG

SEQ ID NO: 8828 - protein, 7 aa, synthetic construct
  REGION 1..7: note = Description of Artificial Sequence: Synthetic peptide
DAITTKG

SEQ ID NO: 8829 - protein, 7 aa, synthetic construct
  REGION 1..7: note = Description of Artificial Sequence: Synthetic peptide
EATKSPS

SEQ ID NO: 8830 - protein, 7 aa, synthetic construct
  REGION 1..7: note = Description of Artificial Sequence: Synthetic peptide
DTMATSK

SEQ ID NO: 8831 - protein, 7 aa, synthetic construct
  REGION 1..7: note = Description of Artificial Sequence: Synthetic peptide
AGGNAGL

SEQ ID NO: 8832 - protein, 7 aa, synthetic construct
  REGION 1..7: note = Description of Artificial Sequence: Synthetic peptide
GVNGPNS

SEQ ID NO: 8833 - protein, 7 aa, synthetic construct
  REGION 1..7: note = Description of Artificial Sequence: Synthetic peptide
VSPGPKS

SEQ ID NO: 8834 - protein, 7 aa, synthetic construct
  REGION 1..7: note = Description of Artificial Sequence: Synthetic peptide
VTANMNT

SEQ ID NO: 8835 - protein, 7 aa, synthetic construct
  REGION 1..7: note = Description of Artificial Sequence: Synthetic peptide
LGNNTTA

SEQ ID NO: 8836 - protein, 7 aa, synthetic construct
  REGION 1..7: note = Description of Artificial Sequence: Synthetic peptide
GATSHTS

SEQ ID NO: 8837 - protein, 7 aa, synthetic construct
  REGION 1..7: note = Description of Artificial Sequence: Synthetic peptide
SPSVTST

SEQ ID NO: 8838 - protein, 7 aa, synthetic construct
  REGION 1..7: note = Description of Artificial Sequence: Synthetic peptide
GNATANS

SEQ ID NO: 8839 - protein, 7 aa, synthetic construct
  REGION 1..7: note = Description of Artificial Sequence: Synthetic peptide
NNKVKPE

SEQ ID NO: 8840 - protein, 7 aa, synthetic construct
  REGION 1..7: note = Description of Artificial Sequence: Synthetic peptide
QASSHPS

SEQ ID NO: 8841 - protein, 7 aa, synthetic construct
  REGION 1..7: note = Description of Artificial Sequence: Synthetic peptide
GLVDHKE

SEQ ID NO: 8842 - protein, 7 aa, synthetic construct
  REGION 1..7: note = Description of Artificial Sequence: Synthetic peptide
SANSGNV

SEQ ID NO: 8843 - protein, 7 aa, synthetic construct
  REGION 1..7: note = Description of Artificial Sequence: Synthetic peptide
SNNDPRR

SEQ ID NO: 8844 - protein, 7 aa, synthetic construct
  REGION 1..7: note = Description of Artificial Sequence: Synthetic peptide
EGNTRGT

SEQ ID NO: 8845 - protein, 7 aa, synthetic construct
  REGION 1..7: note = Description of Artificial Sequence: Synthetic peptide
ANSGGSS

SEQ ID NO: 8846 - protein, 7 aa, synthetic construct
  REGION 1..7: note = Description of Artificial Sequence: Synthetic peptide
GSTSTPV

SEQ ID NO: 8847 - protein, 7 aa, synthetic construct
  REGION 1..7: note = Description of Artificial Sequence: Synthetic peptide
GHGEANT

SEQ ID NO: 8848 - protein, 7 aa, synthetic construct
  REGION 1..7: note = Description of Artificial Sequence: Synthetic peptide
GNVAKPS

SEQ ID NO: 8849 - protein, 7 aa, synthetic construct
  REGION 1..7: note = Description of Artificial Sequence: Synthetic peptide
TLSNPVA

SEQ ID NO: 8850 - protein, 7 aa, synthetic construct
  REGION 1..7: note = Description of Artificial Sequence: Synthetic peptide
SLAGNRT

SEQ ID NO: 8851 - protein, 7 aa, synthetic construct
  REGION 1..7: note = Description of Artificial Sequence: Synthetic peptide
SDGARST

SEQ ID NO: 8852 - protein, 7 aa, synthetic construct
  REGION 1..7: note = Description of Artificial Sequence: Synthetic peptide
MGTNTPA

SEQ ID NO: 8853 - protein, 7 aa, synthetic construct
  REGION 1..7: note = Description of Artificial Sequence: Synthetic peptide
LGQSSTN

SEQ ID NO: 8854 - protein, 7 aa, synthetic construct
  REGION 1..7: note = Description of Artificial Sequence: Synthetic peptide
GLDSSVK

SEQ ID NO: 8855 - protein, 7 aa, synthetic construct
  REGION 1..7: note = Description of Artificial Sequence: Synthetic peptide
GERVGNR

SEQ ID NO: 8856 - protein, 7 aa, synthetic construct
  REGION 1..7: note = Description of Artificial Sequence: Synthetic peptide
VQGQASH

SEQ ID NO: 8857 - protein, 7 aa, synthetic construct
  REGION 1..7: note = Description of Artificial Sequence: Synthetic peptide
STRSPTI

SEQ ID NO: 8858 - protein, 7 aa, synthetic construct
  REGION 1..7: note = Description of Artificial Sequence: Synthetic peptide
LQNSTTL

SEQ ID NO: 8859 - protein, 7 aa, synthetic construct
  REGION 1..7: note = Description of Artificial Sequence: Synthetic peptide
HATKATT

SEQ ID NO: 8860 - protein, 7 aa, synthetic construct
  REGION 1..7: note = Description of Artificial Sequence: Synthetic peptide
TVQRDNQ

SEQ ID NO: 8861 - protein, 7 aa, synthetic construct
  REGION 1..7: note = Description of Artificial Sequence: Synthetic peptide
LKSGSTG

SEQ ID NO: 8862 - protein, 7 aa, synthetic construct
  REGION 1..7: note = Description of Artificial Sequence: Synthetic peptide
SSETRTA

SEQ ID NO: 8863 - protein, 7 aa, synthetic construct
  REGION 1..7: note = Description of Artificial Sequence: Synthetic peptide
NRVSSAN

SEQ ID NO: 8864 - protein, 7 aa, synthetic construct
  REGION 1..7: note = Description of Artificial Sequence: Synthetic peptide
TPNGQMT

SEQ ID NO: 8865 - protein, 7 aa, synthetic construct
  REGION 1..7: note = Description of Artificial Sequence: Synthetic peptide
TGTRSMQ

SEQ ID NO: 8866 - protein, 7 aa, synthetic construct
  REGION 1..7: note = Description of Artificial Sequence: Synthetic peptide
SVGQLPK

SEQ ID NO: 8867 - protein, 7 aa, synthetic construct
  REGION 1..7: note = Description of Artificial Sequence: Synthetic peptide
SATNQMS

SEQ ID NO: 8868 - protein, 7 aa, synthetic construct
  REGION 1..7: note = Description of Artificial Sequence: Synthetic peptide
KGVDSHG

SEQ ID NO: 8869 - protein, 7 aa, synthetic construct
  REGION 1..7: note = Description of Artificial Sequence: Synthetic peptide
NQHKPSE

SEQ ID NO: 8870 - protein, 7 aa, synthetic construct
  REGION 1..7: note = Description of Artificial Sequence: Synthetic peptide
SAQSSPL

SEQ ID NO: 8871 - protein, 7 aa, synthetic construct
  REGION 1..7: note = Description of Artificial Sequence: Synthetic peptide
SGISGVA

SEQ ID NO: 8872 - protein, 7 aa, synthetic construct
  REGION 1..7: note = Description of Artificial Sequence: Synthetic peptide
HGQSSVV

SEQ ID NO: 8873 - protein, 7 aa, synthetic construct
  REGION 1..7: note = Description of Artificial Sequence: Synthetic peptide
VPSNPPN

SEQ ID NO: 8874 - protein, 7 aa, synthetic construct
  REGION 1..7: note = Description of Artificial Sequence: Synthetic peptide
STKTAPT

SEQ ID NO: 8875 - protein, 7 aa, synthetic construct
  REGION 1..7: note = Description of Artificial Sequence: Synthetic peptide
NRESAST

SEQ ID NO: 8876 - protein, 7 aa, synthetic construct
  REGION 1..7: note = Description of Artificial Sequence: Synthetic peptide
NGSGAQI

SEQ ID NO: 8877 - protein, 7 aa, synthetic construct
  REGION 1..7: note = Description of Artificial Sequence: Synthetic peptide
TLGSTPV

SEQ ID NO: 8878 - protein, 7 aa, synthetic construct
  REGION 1..7: note = Description of Artificial Sequence: Synthetic peptide
SPGNRSG

SEQ ID NO: 8879 - protein, 7 aa, synthetic construct
  REGION 1..7: note = Description of Artificial Sequence: Synthetic peptide
RGQGANV

SEQ ID NO: 8880 - protein, 7 aa, synthetic construct
  REGION 1..7: note = Description of Artificial Sequence: Synthetic peptide
DRTKTNV

SEQ ID NO: 8881 - protein, 7 aa, synthetic construct
  REGION 1..7: note = Description of Artificial Sequence: Synthetic peptide
RSESSAV

SEQ ID NO: 8882 - protein, 7 aa, synthetic construct
  REGION 1..7: note = Description of Artificial Sequence: Synthetic peptide
LDSNKAP

SEQ ID NO: 8883 - protein, 7 aa, synthetic construct
  REGION 1..7: note = Description of Artificial Sequence: Synthetic peptide
KGESGGV

SEQ ID NO: 8884 - protein, 7 aa, synthetic construct
  REGION 1..7: note = Description of Artificial Sequence: Synthetic peptide
NAENSRL

SEQ ID NO: 8885 - protein, 7 aa, synthetic construct
  REGION 1..7: note = Description of Artificial Sequence: Synthetic peptide
DGQRTSS

SEQ ID NO: 8886 - protein, 7 aa, synthetic construct
  REGION 1..7: note = Description of Artificial Sequence: Synthetic peptide
ASSPGGM

SEQ ID NO: 8887 - protein, 7 aa, synthetic construct
  REGION 1..7: note = Description of Artificial Sequence: Synthetic peptide
TGSTGIK

SEQ ID NO: 8888 - protein, 7 aa, synthetic construct
  REGION 1..7: note = Description of Artificial Sequence: Synthetic peptide
TLGGTNS

SEQ ID NO: 8889 - protein, 7 aa, synthetic construct
  REGION 1..7: note = Description of Artificial Sequence: Synthetic peptide
IGSSTGG

SEQ ID NO: 8890 - protein, 7 aa, synthetic construct
  REGION 1..7: note = Description of Artificial Sequence: Synthetic peptide
SSLHKDG

SEQ ID NO: 8891 - protein, 7 aa, synthetic construct
  REGION 1..7: note = Description of Artificial Sequence: Synthetic peptide
NSGSKAS

SEQ ID NO: 8892 - protein, 7 aa, synthetic construct
  REGION 1..7: note = Description of Artificial Sequence: Synthetic peptide
SGAQSNR

SEQ ID NO: 8893 - protein, 7 aa, synthetic construct
  REGION 1..7: note = Description of Artificial Sequence: Synthetic peptide
TDEHKAY

SEQ ID NO: 8894 - protein, 7 aa, synthetic construct
  REGION 1..7: note = Description of Artificial Sequence: Synthetic peptide
QGENSTK

SEQ ID NO: 8895 - protein, 7 aa, synthetic construct
  REGION 1..7: note = Description of Artificial Sequence: Synthetic peptide
GMDPKAS

SEQ ID NO: 8896 - protein, 7 aa, synthetic construct
  REGION 1..7: note = Description of Artificial Sequence: Synthetic peptide
DGATGTQ

SEQ ID NO: 8897 - protein, 7 aa, synthetic construct
  REGION 1..7: note = Description of Artificial Sequence: Synthetic peptide
TQANGGK

SEQ ID NO: 8898 - protein, 7 aa, synthetic construct
  REGION 1..7: note = Description of Artificial Sequence: Synthetic peptide
GNGHNAI

SEQ ID NO: 8899 - protein, 7 aa, synthetic construct
  REGION 1..7: note = Description of Artificial Sequence: Synthetic peptide
GPSGQER

SEQ ID NO: 8900 - protein, 7 aa, synthetic construct
  REGION 1..7: note = Description of Artificial Sequence: Synthetic peptide
NGTSSHM

SEQ ID NO: 8901 - protein, 7 aa, synthetic construct
  REGION 1..7: note = Description of Artificial Sequence: Synthetic peptide
DVPKTGS

SEQ ID NO: 8902 - protein, 7 aa, synthetic construct
  REGION 1..7: note = Description of Artificial Sequence: Synthetic peptide
GAVPGQT

SEQ ID NO: 8903 - protein, 7 aa, synthetic construct
  REGION 1..7: note = Description of Artificial Sequence: Synthetic peptide
DRPPPGS

SEQ ID NO: 8904 - protein, 7 aa, synthetic construct
  REGION 1..7: note = Description of Artificial Sequence: Synthetic peptide
TRETSSG

SEQ ID NO: 8905 - protein, 7 aa, synthetic construct
  REGION 1..7: note = Description of Artificial Sequence: Synthetic peptide
RSGADPA

SEQ ID NO: 8906 - protein, 7 aa, synthetic construct
  REGION 1..7: note = Description of Artificial Sequence: Synthetic peptide
LTSQPAN

SEQ ID NO: 8907 - protein, 7 aa, synthetic construct
  REGION 1..7: note = Description of Artificial Sequence: Synthetic peptide
SLTTATK

SEQ ID NO: 8908 - protein, 7 aa, synthetic construct
  REGION 1..7: note = Description of Artificial Sequence: Synthetic peptide
DPDRSAK

SEQ ID NO: 8909 - protein, 7 aa, synthetic construct
  REGION 1..7: note = Description of Artificial Sequence: Synthetic peptide
SPSGSLS

SEQ ID NO: 8910 - protein, 7 aa, synthetic construct
  REGION 1..7: note = Description of Artificial Sequence: Synthetic peptide
STSGTSS

SEQ ID NO: 8911 - protein, 7 aa, synthetic construct
  REGION 1..7: note = Description of Artificial Sequence: Synthetic peptide
LTGATSS

SEQ ID NO: 8912 - protein, 7 aa, synthetic construct
  REGION 1..7: note = Description of Artificial Sequence: Synthetic peptide
LSNSPSA

SEQ ID NO: 8913 - protein, 7 aa, synthetic construct
  REGION 1..7: note = Description of Artificial Sequence: Synthetic peptide
ITGSGPA

SEQ ID NO: 8914 - protein, 7 aa, synthetic construct
  REGION 1..7: note = Description of Artificial Sequence: Synthetic peptide
GGGNASG

SEQ ID NO: 8915 - protein, 7 aa, synthetic construct
  REGION 1..7: note = Description of Artificial Sequence: Synthetic peptide
GTNSSLN

SEQ ID NO: 8916 - protein, 7 aa, synthetic construct
  REGION 1..7: note = Description of Artificial Sequence: Synthetic peptide
TMDSRSA

SEQ ID NO: 8917 - protein, 7 aa, synthetic construct
  REGION 1..7: note = Description of Artificial Sequence: Synthetic peptide
QRNGSPL

SEQ ID NO: 8918 - protein, 7 aa, synthetic construct
  REGION 1..7: note = Description of Artificial Sequence: Synthetic peptide
NNASAKS

SEQ ID NO: 8919 - protein, 7 aa, synthetic construct
  REGION 1..7: note = Description of Artificial Sequence: Synthetic peptide
KPQDNSS

SEQ ID NO: 8920 - protein, 7 aa, synthetic construct
  REGION 1..7: note = Description of Artificial Sequence: Synthetic peptide
IAGGKTV

SEQ ID NO: 8921 - protein, 7 aa, synthetic construct
  REGION 1..7: note = Description of Artificial Sequence: Synthetic peptide
LLSGDSR

SEQ ID NO: 8922 - protein, 7 aa, synthetic construct
  REGION 1..7: note = Description of Artificial Sequence: Synthetic peptide
GVQVSSG

SEQ ID NO: 8923 - protein, 7 aa, synthetic construct
  REGION 1..7: note = Description of Artificial Sequence: Synthetic peptide
VQNTGGG

SEQ ID NO: 8924 - protein, 7 aa, synthetic construct
  REGION 1..7: note = Description of Artificial Sequence: Synthetic peptide
SRNQSNS

SEQ ID NO: 8925 - protein, 7 aa, synthetic construct
  REGION 1..7: note = Description of Artificial Sequence: Synthetic peptide
AGIKPSQ

SEQ ID NO: 8926 - protein, 7 aa, synthetic construct
  REGION 1..7: note = Description of Artificial Sequence: Synthetic peptide
ASQPAGS

SEQ ID NO: 8927 - protein, 7 aa, synthetic construct
  REGION 1..7: note = Description of Artificial Sequence: Synthetic peptide
KANPSPA

SEQ ID NO: 8928 - protein, 7 aa, synthetic construct
  REGION 1..7: note = Description of Artificial Sequence: Synthetic peptide
KDQPSTN

SEQ ID NO: 8929 - protein, 7 aa, synthetic construct
  REGION 1..7: note = Description of Artificial Sequence: Synthetic peptide
MVGKSSS

SEQ ID NO: 8930 - protein, 7 aa, synthetic construct
  REGION 1..7: note = Description of Artificial Sequence: Synthetic peptide
QSTGSPT

SEQ ID NO: 8931 - protein, 7 aa, synthetic construct
  REGION 1..7: note = Description of Artificial Sequence: Synthetic peptide
LPSPSTL

SEQ ID NO: 8932 - protein, 7 aa, synthetic construct
  REGION 1..7: note = Description of Artificial Sequence: Synthetic peptide
DAISSKR

SEQ ID NO: 8933 - protein, 7 aa, synthetic construct
  REGION 1..7: note = Description of Artificial Sequence: Synthetic peptide
CSVPSLG

SEQ ID NO: 8934 - protein, 7 aa, synthetic construct
  REGION 1..7: note = Description of Artificial Sequence: Synthetic peptide
VRDSSTL

SEQ ID NO: 8935 - protein, 7 aa, synthetic construct
  REGION 1..7: note = Description of Artificial Sequence: Synthetic peptide
GVGDGKL

SEQ ID NO: 8936 - protein, 7 aa, synthetic construct
  REGION 1..7: note = Description of Artificial Sequence: Synthetic peptide
MQDNKAM

SEQ ID NO: 8937 - protein, 7 aa, synthetic construct
  REGION 1..7: note = Description of Artificial Sequence: Synthetic peptide
ASDSVPK

SEQ ID NO: 8938 - protein, 7 aa, synthetic construct
  REGION 1..7: note = Description of Artificial Sequence: Synthetic peptide
SGNDARR

SEQ ID NO: 8939 - protein, 7 aa, synthetic construct
  REGION 1..7: note = Description of Artificial Sequence: Synthetic peptide
TAGNSSQ

SEQ ID NO: 8940 - protein, 7 aa, synthetic construct
  REGION 1..7: note = Description of Artificial Sequence: Synthetic peptide
EKARQSA

SEQ ID NO: 8941 - protein, 7 aa, synthetic construct
  REGION 1..7: note = Description of Artificial Sequence: Synthetic peptide
AGKESNR

SEQ ID NO: 8942 - protein, 7 aa, synthetic construct
  REGION 1..7: note = Description of Artificial Sequence: Synthetic peptide
AHGNPSG

SEQ ID NO: 8943 - protein, 7 aa, synthetic construct
  REGION 1..7: note = Description of Artificial Sequence: Synthetic peptide
VGSSSAK

SEQ ID NO: 8944 - protein, 7 aa, synthetic construct
  REGION 1..7: note = Description of Artificial Sequence: Synthetic peptide
SLTKAQA

SEQ ID NO: 8945 - protein, 7 aa, synthetic construct
  REGION 1..7: note = Description of Artificial Sequence: Synthetic peptide
TASNAST

SEQ ID NO: 8946 - protein, 7 aa, synthetic construct
  REGION 1..7: note = Description of Artificial Sequence: Synthetic peptide
RNEGSPN

SEQ ID NO: 8947 - protein, 7 aa, synthetic construct
  REGION 1..7: note = Description of Artificial Sequence: Synthetic peptide
QSKEATS

SEQ ID NO: 8948 - protein, 7 aa, synthetic construct
  REGION 1..7: note = Description of Artificial Sequence: Synthetic peptide
HGLPNAK

SEQ ID NO: 8949 - protein, 7 aa, synthetic construct
  REGION 1..7: note = Description of Artificial Sequence: Synthetic peptide
SGAANPA

SEQ ID NO: 8950 - protein, 7 aa, synthetic construct
  REGION 1..7: note = Description of Artificial Sequence: Synthetic peptide
GLGSENH

SEQ ID NO: 8951 - protein, 7 aa, synthetic construct
  REGION 1..7: note = Description of Artificial Sequence: Synthetic peptide
SSNSDVR

SEQ ID NO: 8952 - protein, 7 aa, synthetic construct
  REGION 1..7: note = Description of Artificial Sequence: Synthetic peptide
SATGSNR

SEQ ID NO: 8953 - protein, 7 aa, synthetic construct
  REGION 1..7: note = Description of Artificial Sequence: Synthetic peptide
SRTDRPV

SEQ ID NO: 8954 - protein, 7 aa, synthetic construct
  REGION 1..7: note = Description of Artificial Sequence: Synthetic peptide
NSQKVNM

SEQ ID NO: 8955 - protein, 7 aa, synthetic construct
  REGION 1..7: note = Description of Artificial Sequence: Synthetic peptide
NGETGPK

SEQ ID NO: 8956 - protein, 7 aa, synthetic construct
  REGION 1..7: note = Description of Artificial Sequence: Synthetic peptide
SQVQTSK

SEQ ID NO: 8957 - protein, 7 aa, synthetic construct
  REGION 1..7: note = Description of Artificial Sequence: Synthetic peptide
GGQPSKD

SEQ ID NO: 8958 - protein, 7 aa, synthetic construct
  REGION 1..7: note = Description of Artificial Sequence: Synthetic peptide
GGVAPNQ

SEQ ID NO: 8959 - protein, 7 aa, synthetic construct
  REGION 1..7: note = Description of Artificial Sequence: Synthetic peptide
VTKGSQS

SEQ ID NO: 8960 - protein, 7 aa, synthetic construct
  REGION 1..7: note = Description of Artificial Sequence: Synthetic peptide
EMSATNS

SEQ ID NO: 8961 - protein, 7 aa, synthetic construct
  REGION 1..7: note = Description of Artificial Sequence: Synthetic peptide
DLQIAKG

SEQ ID NO: 8962 - protein, 7 aa, synthetic construct
  REGION 1..7: note = Description of Artificial Sequence: Synthetic peptide
ANNSSMQ

SEQ ID NO: 8963 - protein, 7 aa, synthetic construct
  REGION 1..7: note = Description of Artificial Sequence: Synthetic peptide
SQVAATV

SEQ ID NO: 8964 - protein, 7 aa, synthetic construct
  REGION 1..7: note = Description of Artificial Sequence: Synthetic peptide
LVKGSSS

SEQ ID NO: 8965 - protein, 7 aa, synthetic construct
  REGION 1..7: note = Description of Artificial Sequence: Synthetic peptide
DVSSKVP

SEQ ID NO: 8966 - protein, 7 aa, synthetic construct
  REGION 1..7: note = Description of Artificial Sequence: Synthetic peptide
FPNGNST

SEQ ID NO: 8967 - protein, 7 aa, synthetic construct
  REGION 1..7: note = Description of Artificial Sequence: Synthetic peptide
RNSTPST

SEQ ID NO: 8968 - protein, 7 aa, synthetic construct
  REGION 1..7: note = Description of Artificial Sequence: Synthetic peptide
SVLDGKS

SEQ ID NO: 8969 - protein, 7 aa, synthetic construct
  REGION 1..7: note = Description of Artificial Sequence: Synthetic peptide
DRQNASS

SEQ ID NO: 8970 - protein, 7 aa, synthetic construct
  REGION 1..7: note = Description of Artificial Sequence: Synthetic peptide
DGGSSLR

SEQ ID NO: 8971 - protein, 7 aa, synthetic construct
  REGION 1..7: note = Description of Artificial Sequence: Synthetic peptide
MPTKTST

SEQ ID NO: 8972 - protein, 7 aa, synthetic construct
  REGION 1..7: note = Description of Artificial Sequence: Synthetic peptide
SPDTAPR

SEQ ID NO: 8973 - protein, 7 aa, synthetic construct
  REGION 1..7: note = Description of Artificial Sequence: Synthetic peptide
TKSQSIM

SEQ ID NO: 8974 - protein, 7 aa, synthetic construct
  REGION 1..7: note = Description of Artificial Sequence: Synthetic peptide
RGNGAPA

SEQ ID NO: 8975 - protein, 7 aa, synthetic construct
  REGION 1..7: note = Description of Artificial Sequence: Synthetic peptide
QGSTSSR

SEQ ID NO: 8976 - protein, 7 aa, synthetic construct
  REGION 1..7: note = Description of Artificial Sequence: Synthetic peptide
TDPAPKH

SEQ ID NO: 8977 - protein, 7 aa, synthetic construct
  REGION 1..7: note = Description of Artificial Sequence: Synthetic peptide
SATSPNR

SEQ ID NO: 8978 - protein, 7 aa, synthetic construct
  REGION 1..7: note = Description of Artificial Sequence: Synthetic peptide
SVNSSPH

SEQ ID NO: 8979 - protein, 7 aa, synthetic construct
  REGION 1..7: note = Description of Artificial Sequence: Synthetic peptide
DVGDRPV

SEQ ID NO: 8980 - protein, 7 aa, synthetic construct
  REGION 1..7: note = Description of Artificial Sequence: Synthetic peptide
MSGASTA

SEQ ID NO: 8981 - protein, 7 aa, synthetic construct
  REGION 1..7: note = Description of Artificial Sequence: Synthetic peptide
LPAGKLA

SEQ ID NO: 8982 - protein, 7 aa, synthetic construct
  REGION 1..7: note = Description of Artificial Sequence: Synthetic peptide
SSLNGNS

SEQ ID NO: 8983 - protein, 7 aa, synthetic construct
  REGION 1..7: note = Description of Artificial Sequence: Synthetic peptide
DSMGTRN

SEQ ID NO: 8984 - protein, 7 aa, synthetic construct
  REGION 1..7: note = Description of Artificial Sequence: Synthetic peptide
NANGSLG

SEQ ID NO: 8985 - protein, 7 aa, synthetic construct
  REGION 1..7: note = Description of Artificial Sequence: Synthetic peptide
NPDVSGK

SEQ ID NO: 8986 - protein, 7 aa, synthetic construct
  REGION 1..7: note = Description of Artificial Sequence: Synthetic peptide
NATTPTN

SEQ ID NO: 8987 - protein, 7 aa, synthetic construct
  REGION 1..7: note = Description of Artificial Sequence: Synthetic peptide
TTNKQLA

SEQ ID NO: 8988 - protein, 7 aa, synthetic construct
  REGION 1..7: note = Description of Artificial Sequence: Synthetic peptide
TTQSTAQ

SEQ ID NO: 8989 - protein, 7 aa, synthetic construct
  REGION 1..7: note = Description of Artificial Sequence: Synthetic peptide
TGSNQPG

SEQ ID NO: 8990 - protein, 7 aa, synthetic construct
  REGION 1..7: note = Description of Artificial Sequence: Synthetic peptide
TNSNPSL

SEQ ID NO: 8991 - protein, 7 aa, synthetic construct
  REGION 1..7: note = Description of Artificial Sequence: Synthetic peptide
TTGATMS

SEQ ID NO: 8992 - protein, 7 aa, synthetic construct
  REGION 1..7: note = Description of Artificial Sequence: Synthetic peptide
THGDSKS

SEQ ID NO: 8993 - protein, 7 aa, synthetic construct
  REGION 1..7: note = Description of Artificial Sequence: Synthetic peptide
SSGATAV

SEQ ID NO: 8994 - protein, 7 aa, synthetic construct
  REGION 1..7: note = Description of Artificial Sequence: Synthetic peptide
SGGHTTA

SEQ ID NO: 8995 - protein, 7 aa, synthetic construct
  REGION 1..7: note = Description of Artificial Sequence: Synthetic peptide
RNAQPMT

SEQ ID NO: 8996 - protein, 7 aa, synthetic construct
  REGION 1..7: note = Description of Artificial Sequence: Synthetic peptide
RESQKSL

SEQ ID NO: 8997 - protein, 7 aa, synthetic construct
  REGION 1..7: note = Description of Artificial Sequence: Synthetic peptide
SKTSNNA

SEQ ID NO: 8998 - protein, 7 aa, synthetic construct
  REGION 1..7: note = Description of Artificial Sequence: Synthetic peptide
SKQPGGI

SEQ ID NO: 8999 - protein, 7 aa, synthetic construct
  REGION 1..7: note = Description of Artificial Sequence: Synthetic peptide
STGATMS

SEQ ID NO: 9000 - protein, 7 aa, synthetic construct
  REGION 1..7: note = Description of Artificial Sequence: Synthetic peptide
MAQSGTG

SEQ ID NO: 9001 - protein, 7 aa, synthetic construct
  REGION 1..7: note = Description of Artificial Sequence: Synthetic peptide
MGGVSSS

SEQ ID NO: 9002 - protein, 7 aa, synthetic construct
  REGION 1..7: note = Description of Artificial Sequence: Synthetic peptide
QTSRDSS

SEQ ID NO: 9003 - protein, 7 aa, synthetic construct
  REGION 1..7: note = Description of Artificial Sequence: Synthetic peptide
QGKSITG

SEQ ID NO: 9004 - protein, 7 aa, synthetic construct
  REGION 1..7: note = Description of Artificial Sequence: Synthetic peptide
HKSANVG

SEQ ID NO: 9005 - protein, 7 aa, synthetic construct
  REGION 1..7: note = Description of Artificial Sequence: Synthetic peptide
HTAKSSL

SEQ ID NO: 9006 - protein, 7 aa, synthetic construct
  REGION 1..7: note = Description of Artificial Sequence: Synthetic peptide
HQNQRDG

SEQ ID NO: 9007 - protein, 7 aa, synthetic construct
  REGION 1..7: note = Description of Artificial Sequence: Synthetic peptide
QEGTHTA

SEQ ID NO: 9008 - protein, 7 aa, synthetic construct
  REGION 1..7: note = Description of Artificial Sequence: Synthetic peptide
QDKGNTG

SEQ ID NO: 9009 - protein, 7 aa, synthetic construct
  REGION 1..7: note = Description of Artificial Sequence: Synthetic peptide
QVGSTPA

SEQ ID NO: 9010 - protein, 7 aa, synthetic construct
  REGION 1..7: note = Description of Artificial Sequence: Synthetic peptide
RGESKAN

SEQ ID NO: 9011 - protein, 7 aa, synthetic construct
  REGION 1..7: note = Description of Artificial Sequence: Synthetic peptide
LTTSGSQ

SEQ ID NO: 9012 - protein, 7 aa, synthetic construct
  REGION 1..7: note = Description of Artificial Sequence: Synthetic peptide
LSTSQPS

SEQ ID NO: 9013 - protein, 7 aa, synthetic construct
  REGION 1..7: note = Description of Artificial Sequence: Synthetic peptide
LQDRKAS

SEQ ID NO: 9014 - protein, 7 aa, synthetic construct
  REGION 1..7: note = Description of Artificial Sequence: Synthetic peptide
LANPPAG

SEQ ID NO: 9015 - protein, 7 aa, synthetic construct
  REGION 1..7: note = Description of Artificial Sequence: Synthetic peptide
EGPSGTH

SEQ ID NO: 9016 - protein, 7 aa, synthetic construct
  REGION 1..7: note = Description of Artificial Sequence: Synthetic peptide
EGGQSRV

SEQ ID NO: 9017 - protein, 7 aa, synthetic construct
  REGION 1..7: note = Description of Artificial Sequence: Synthetic peptide
DTTPRSS

SEQ ID NO: 9018 - protein, 7 aa, synthetic construct
  REGION 1..7: note = Description of Artificial Sequence: Synthetic peptide
DGTQAPV

SEQ ID NO: 9019 - protein, 7 aa, synthetic construct
  REGION 1..7: note = Description of Artificial Sequence: Synthetic peptide
DGRNHSA

SEQ ID NO: 9020 - protein, 7 aa, synthetic construct
  REGION 1..7: note = Description of Artificial Sequence: Synthetic peptide
DGGSAAR

SEQ ID NO: 9021 - protein, 7 aa, synthetic construct
  REGION 1..7: note = Description of Artificial Sequence: Synthetic peptide
EQGASSH

SEQ ID NO: 9022 - protein, 7 aa, synthetic construct
  REGION 1..7: note = Description of Artificial Sequence: Synthetic peptide
DTAPSNH

SEQ ID NO: 9023 - protein, 7 aa, synthetic construct
  REGION 1..7: note = Description of Artificial Sequence: Synthetic peptide
DRSGTPL

SEQ ID NO: 9024 - protein, 7 aa, synthetic construct
  REGION 1..7: note = Description of Artificial Sequence: Synthetic peptide
AKSNGSR

SEQ ID NO: 9025 - protein, 7 aa, synthetic construct
  REGION 1..7: note = Description of Artificial Sequence: Synthetic peptide
ADARNAG

SEQ ID NO: 9026 - protein, 7 aa, synthetic construct
  REGION 1..7: note = Description of Artificial Sequence: Synthetic peptide
APTDNRS

SEQ ID NO: 9027 - protein, 7 aa, synthetic construct
  REGION 1..7: note = Description of Artificial Sequence: Synthetic peptide
AVESRNV

SEQ ID NO: 9028 - protein, 7 aa, synthetic construct
  REGION 1..7: note = Description of Artificial Sequence: Synthetic peptide
GSTGQGR

SEQ ID NO: 9029 - protein, 7 aa, synthetic construct
  REGION 1..7: note = Description of Artificial Sequence: Synthetic peptide
GSENSPR

SEQ ID NO: 9030 - protein, 7 aa, synthetic construct
  REGION 1..7: note = Description of Artificial Sequence: Synthetic peptide
GHDRVAS

SEQ ID NO: 9031 - protein, 7 aa, synthetic construct
  REGION 1..7: note = Description of Artificial Sequence: Synthetic peptide
GLGEPRA

SEQ ID NO: 9032 - protein, 7 aa, synthetic construct
  REGION 1..7: note = Description of Artificial Sequence: Synthetic peptide
GMAQAGG

SEQ ID NO: 9033 - protein, 7 aa, synthetic construct
  REGION 1..7: note = Description of Artificial Sequence: Synthetic peptide
GPERAAL

SEQ ID NO: 9034 - protein, 7 aa, synthetic construct
  REGION 1..7: note = Description of Artificial Sequence: Synthetic peptide
GLGGKVN

SEQ ID NO: 9035 - protein, 7 aa, synthetic construct
  REGION 1..7: note = Description of Artificial Sequence: Synthetic peptide
GATTQST

SEQ ID NO: 9036 - protein, 7 aa, synthetic construct
  REGION 1..7: note = Description of Artificial Sequence: Synthetic peptide
GVGGSTS

SEQ ID NO: 9037 - protein, 7 aa, synthetic construct
  REGION 1..7: note = Description of Artificial Sequence: Synthetic peptide
GQNSGMT

SEQ ID NO: 9038 - protein, 7 aa, synthetic construct
  REGION 1..7: note = Description of Artificial Sequence: Synthetic peptide
GPSQSGG

SEQ ID NO: 9039 - protein, 7 aa, synthetic construct
  REGION 1..7: note = Description of Artificial Sequence: Synthetic peptide
VSTNKTP

SEQ ID NO: 9040 - protein, 7 aa, synthetic construct
  REGION 1..7: note = Description of Artificial Sequence: Synthetic peptide
VSESRPG

SEQ ID NO: 9041 - protein, 7 aa, synthetic construct
  REGION 1..7: note = Description of Artificial Sequence: Synthetic peptide
VAKASNT

SEQ ID NO: 9042 - protein, 7 aa, synthetic construct
  REGION 1..7: note = Description of Artificial Sequence: Synthetic peptide
VASDSSK

SEQ ID NO: 9043 - protein, 7 aa, synthetic construct
  REGION 1..7: note = Description of Artificial Sequence: Synthetic peptide
VGSATVI

SEQ ID NO: 9044 - protein, 7 aa, synthetic construct
  REGION 1..7: note = Description of Artificial Sequence: Synthetic peptide
SQSPQER

SEQ ID NO: 9045 - protein, 7 aa, synthetic construct
  REGION 1..7: note = Description of Artificial Sequence: Synthetic peptide
SGPTNRE

SEQ ID NO: 9046 - protein, 7 aa, synthetic construct
  REGION 1..7: note = Description of Artificial Sequence: Synthetic peptide
SGVEHTN

SEQ ID NO: 9047 - protein, 7 aa, synthetic construct
  REGION 1..7: note = Description of Artificial Sequence: Synthetic peptide
FGATAPG

SEQ ID NO: 9048 - protein, 7 aa, synthetic construct
  REGION 1..7: note = Description of Artificial Sequence: Synthetic peptide
SVTSGTG

SEQ ID NO: 9049 - protein, 7 aa, synthetic construct
  REGION 1..7: note = Description of Artificial Sequence: Synthetic peptide
TNGSTMS

SEQ ID NO: 9050 - protein, 7 aa, synthetic construct
  REGION 1..7: note = Description of Artificial Sequence: Synthetic peptide
GSLSNSG

SEQ ID NO: 9051 - protein, 7 aa, synthetic construct
  REGION 1..7: note = Description of Artificial Sequence: Synthetic peptide
RNQSPSI

SEQ ID NO: 9052 - protein, 7 aa, synthetic construct
  REGION 1..7: note = Description of Artificial Sequence: Synthetic peptide
TGTNNPT

SEQ ID NO: 9053 - protein, 7 aa, synthetic construct
  REGION 1..7: note = Description of Artificial Sequence: Synthetic peptide
TSAQPTT

SEQ ID NO: 9054 - protein, 7 aa, synthetic construct
  REGION 1..7: note = Description of Artificial Sequence: Synthetic peptide
LTTAKDP

SEQ ID NO: 9055 - protein, 7 aa, synthetic construct
  REGION 1..7: note = Description of Artificial Sequence: Synthetic peptide
STGTTTQ

SEQ ID NO: 9056 - protein, 7 aa, synthetic construct
  REGION 1..7: note = Description of Artificial Sequence: Synthetic peptide
RNGTSTN

SEQ ID NO: 9057 - protein, 7 aa, synthetic construct
  REGION 1..7: note = Description of Artificial Sequence: Synthetic peptide
DQIRSTH

SEQ ID NO: 9058 - protein, 7 aa, synthetic construct
  REGION 1..7: note = Description of Artificial Sequence: Synthetic peptide
DDGKPGT

SEQ ID NO: 9059 - protein, 7 aa, synthetic construct
  REGION 1..7: note = Description of Artificial Sequence: Synthetic peptide
VASNSSV

SEQ ID NO: 9060 - protein, 7 aa, synthetic construct
  REGION 1..7: note = Description of Artificial Sequence: Synthetic peptide
LTEPKLI

SEQ ID NO: 9061 - protein, 7 aa, synthetic construct
  REGION 1..7: note = Description of Artificial Sequence: Synthetic peptide
SPSNNKA

SEQ ID NO: 9062 - protein, 7 aa, synthetic construct
  REGION 1..7: note = Description of Artificial Sequence: Synthetic peptide
DANGKSS

SEQ ID NO: 9063 - protein, 7 aa, synthetic construct
  REGION 1..7: note = Description of Artificial Sequence: Synthetic peptide
SHNDKHV

SEQ ID NO: 9064 - protein, 7 aa, synthetic construct
  REGION 1..7: note = Description of Artificial Sequence: Synthetic peptide
SRVTVNE

SEQ ID NO: 9065 - protein, 7 aa, synthetic construct
  REGION 1..7: note = Description of Artificial Sequence: Synthetic peptide
RTTSGPT

SEQ ID NO: 9066 - protein, 7 aa, synthetic construct
  REGION 1..7: note = Description of Artificial Sequence: Synthetic peptide
DNGKKVV

SEQ ID NO: 9067 - protein, 7 aa, synthetic construct
  REGION 1..7: note = Description of Artificial Sequence: Synthetic peptide
SNNGAMA

SEQ ID NO: 9068 - protein, 7 aa, synthetic construct
  REGION 1..7: note = Description of Artificial Sequence: Synthetic peptide
TTHTAAK

SEQ ID NO: 9069 - protein, 7 aa, synthetic construct
  REGION 1..7: note = Description of Artificial Sequence: Synthetic peptide
MNSSAST

SEQ ID NO: 9070 - protein, 7 aa, synthetic construct
  REGION 1..7: note = Description of Artificial Sequence: Synthetic peptide
MSTDKIT

SEQ ID NO: 9071 - protein, 7 aa, synthetic construct
  REGION 1..7: note = Description of Artificial Sequence: Synthetic peptide
MGVNGTS

SEQ ID NO: 9072 - protein, 7 aa, synthetic construct
  REGION 1..7: note = Description of Artificial Sequence: Synthetic peptide
DSNSKMV

SEQ ID NO: 9073 - protein, 7 aa, synthetic construct
  REGION 1..7: note = Description of Artificial Sequence: Synthetic peptide
STGGDRS

SEQ ID NO: 9074 - protein, 7 aa, synthetic construct
  REGION 1..7: note = Description of Artificial Sequence: Synthetic peptide
LKNGNTN

SEQ ID NO: 9075 - protein, 7 aa, synthetic construct
  REGION 1..7: note = Description of Artificial Sequence: Synthetic peptide
GTSNHDK

SEQ ID NO: 9076 - protein, 7 aa, synthetic construct
  REGION 1..7: note = Description of Artificial Sequence: Synthetic peptide
KDGSTSL

SEQ ID NO: 9077 - protein, 7 aa, synthetic construct
  REGION 1..7: note = Description of Artificial Sequence: Synthetic peptide
KGVSQTS

SEQ ID NO: 9078 - protein, 7 aa, synthetic construct
  REGION 1..7: note = Description of Artificial Sequence: Synthetic peptide
SSNRDTM

SEQ ID NO: 9079 - protein, 7 aa, synthetic construct
  REGION 1..7: note = Description of Artificial Sequence: Synthetic peptide
TKGSEPH

SEQ ID NO: 9080 - protein, 7 aa, synthetic construct
  REGION 1..7: note = Description of Artificial Sequence: Synthetic peptide
STQKGAM

SEQ ID NO: 9081 - protein, 7 aa, synthetic construct
  REGION 1..7: note = Description of Artificial Sequence: Synthetic peptide
SGIPAGV

SEQ ID NO: 9082 - protein, 7 aa, synthetic construct
  REGION 1..7: note = Description of Artificial Sequence: Synthetic peptide
SGHPSNL

SEQ ID NO: 9083 - protein, 7 aa, synthetic construct
  REGION 1..7: note = Description of Artificial Sequence: Synthetic peptide
DNNNSRG

SEQ ID NO: 9084 - protein, 7 aa, synthetic construct
  REGION 1..7: note = Description of Artificial Sequence: Synthetic peptide
GSSQARE

SEQ ID NO: 9085 - protein, 7 aa, synthetic construct
  REGION 1..7: note = Description of Artificial Sequence: Synthetic peptide
RTGTGTE

SEQ ID NO: 9086 - protein, 7 aa, synthetic construct
  REGION 1..7: note = Description of Artificial Sequence: Synthetic peptide
GTGSKSV

SEQ ID NO: 9087 - protein, 7 aa, synthetic construct
  REGION 1..7: note = Description of Artificial Sequence: Synthetic peptide
QTANQNA

SEQ ID NO: 9088 - protein, 7 aa, synthetic construct
  REGION 1..7: note = Description of Artificial Sequence: Synthetic peptide
VSGSSTG

SEQ ID NO: 9089 - protein, 7 aa, synthetic construct
  REGION 1..7: note = Description of Artificial Sequence: Synthetic peptide
QDKSGSM

SEQ ID NO: 9090 - protein, 7 aa, synthetic construct
  REGION 1..7: note = Description of Artificial Sequence: Synthetic peptide
GQGHERA

SEQ ID NO: 9091 - protein, 7 aa, synthetic construct
  REGION 1..7: note = Description of Artificial Sequence: Synthetic peptide
SNNGSIS

SEQ ID NO: 9092 - protein, 7 aa, synthetic construct
  REGION 1..7: note = Description of Artificial Sequence: Synthetic peptide
TPNTGSS

SEQ ID NO: 9093 - protein, 7 aa, synthetic construct
  REGION 1..7: note = Description of Artificial Sequence: Synthetic peptide
QRTKTPE

SEQ ID NO: 9094 - protein, 7 aa, synthetic construct
  REGION 1..7: note = Description of Artificial Sequence: Synthetic peptide
AGVSNTG

SEQ ID NO: 9095 - protein, 7 aa, synthetic construct
  REGION 1..7: note = Description of Artificial Sequence: Synthetic peptide
GTGPVTS

SEQ ID NO: 9096 - protein, 7 aa, synthetic construct
  REGION 1..7: note = Description of Artificial Sequence: Synthetic peptide
GGVASNG

SEQ ID NO: 9097 - protein, 7 aa, synthetic construct
  REGION 1..7: note = Description of Artificial Sequence: Synthetic peptide
SGHNSST

SEQ ID NO: 9098 - protein, 7 aa, synthetic construct
  REGION 1..7: note = Description of Artificial Sequence: Synthetic peptide
DGTRAPS

SEQ ID NO: 9099 - protein, 7 aa, synthetic construct
  REGION 1..7: note = Description of Artificial Sequence: Synthetic peptide
LPSDPRS

SEQ ID NO: 9100 - protein, 7 aa, synthetic construct
  REGION 1..7: note = Description of Artificial Sequence: Synthetic peptide
QNTSKVL

SEQ ID NO: 9101 - protein, 7 aa, synthetic construct
  REGION 1..7: note = Description of Artificial Sequence: Synthetic peptide
GGSRDQT

SEQ ID NO: 9102 - protein, 7 aa, synthetic construct
  REGION 1..7: note = Description of Artificial Sequence: Synthetic peptide
MPSKGSQ

SEQ ID NO: 9103 - protein, 7 aa, synthetic construct
  REGION 1..7: note = Description of Artificial Sequence: Synthetic peptide
NVGSTSN

SEQ ID NO: 9104 - protein, 7 aa, synthetic construct
  REGION 1..7: note = Description of Artificial Sequence: Synthetic peptide
NSSGQVH

SEQ ID NO: 9105 - protein, 7 aa, synthetic construct
  REGION 1..7: note = Description of Artificial Sequence: Synthetic peptide
TQNHESK

SEQ ID NO: 9106 - protein, 7 aa, synthetic construct
  REGION 1..7: note = Description of Artificial Sequence: Synthetic peptide
QVTGTLG

SEQ ID NO: 9107 - protein, 7 aa, synthetic construct
  REGION 1..7: note = Description of Artificial Sequence: Synthetic peptide
AISGNSK

SEQ ID NO: 9108 - protein, 7 aa, synthetic construct
  REGION 1..7: note = Description of Artificial Sequence: Synthetic peptide
TMAKSGG

SEQ ID NO: 9109 - protein, 7 aa, synthetic construct
  REGION 1..7: note = Description of Artificial Sequence: Synthetic peptide
SKVDKPM

SEQ ID NO: 9110 - protein, 7 aa, synthetic construct
  REGION 1..7: note = Description of Artificial Sequence: Synthetic peptide
NSSPSLT

SEQ ID NO: 9111 - protein, 7 aa, synthetic construct
  REGION 1..7: note = Description of Artificial Sequence: Synthetic peptide
SLQSESK

SEQ ID NO: 9112 - protein, 7 aa, synthetic construct
  REGION 1..7: note = Description of Artificial Sequence: Synthetic peptide
SGAATAS

SEQ ID NO: 9113 - protein, 7 aa, synthetic construct
  REGION 1..7: note = Description of Artificial Sequence: Synthetic peptide
NQNKETL

SEQ ID NO: 9114 - protein, 7 aa, synthetic construct
  REGION 1..7: note = Description of Artificial Sequence: Synthetic peptide
SSTGAPG

SEQ ID NO: 9115 - protein, 7 aa, synthetic construct
  REGION 1..7: note = Description of Artificial Sequence: Synthetic peptide
HGATGGA

SEQ ID NO: 9116 - protein, 7 aa, synthetic construct
  REGION 1..7: note = Description of Artificial Sequence: Synthetic peptide
ETPGAGR

SEQ ID NO: 9117 - protein, 7 aa, synthetic construct
  REGION 1..7: note = Description of Artificial Sequence: Synthetic peptide
GSHDMKK

SEQ ID NO: 9118 - protein, 7 aa, synthetic construct
  REGION 1..7: note = Description of Artificial Sequence: Synthetic peptide
VISSDPK

SEQ ID NO: 9119 - protein, 7 aa, synthetic construct
  REGION 1..7: note = Description of Artificial Sequence: Synthetic peptide
SPGVTPG

SEQ ID NO: 9120 - protein, 7 aa, synthetic construct
  REGION 1..7: note = Description of Artificial Sequence: Synthetic peptide
HGSSPTT

SEQ ID NO: 9121 - protein, 7 aa, synthetic construct
  REGION 1..7: note = Description of Artificial Sequence: Synthetic peptide
DKNTKSS

SEQ ID NO: 9122 - protein, 7 aa, synthetic construct
  REGION 1..7: note = Description of Artificial Sequence: Synthetic peptide
NGSKTSL

SEQ ID NO: 9123 - protein, 7 aa, synthetic construct
  REGION 1..7: note = Description of Artificial Sequence: Synthetic peptide
TGAPSNS

SEQ ID NO: 9124 - protein, 7 aa, synthetic construct
  REGION 1..7: note = Description of Artificial Sequence: Synthetic peptide
APSSGLG

SEQ ID NO: 9125 - protein, 7 aa, synthetic construct
  REGION 1..7: note = Description of Artificial Sequence: Synthetic peptide
GQTSTPY

SEQ ID NO: 9126 - protein, 7 aa, synthetic construct
  REGION 1..7: note = Description of Artificial Sequence: Synthetic peptide
HSSTVSQ

SEQ ID NO: 9127 - protein, 7 aa, synthetic construct
  REGION 1..7: note = Description of Artificial Sequence: Synthetic peptide
HQGNGSH

SEQ ID NO: 9128 - protein, 7 aa, synthetic construct
  REGION 1..7: note = Description of Artificial Sequence: Synthetic peptide
LGLGKTE

SEQ ID NO: 9129 - protein, 7 aa, synthetic construct
  REGION 1..7: note = Description of Artificial Sequence: Synthetic peptide
SGLATPT

SEQ ID NO: 9130 - protein, 7 aa, synthetic construct
  REGION 1..7: note = Description of Artificial Sequence: Synthetic peptide
TPDSTPQ

SEQ ID NO: 9131 - protein, 7 aa, synthetic construct
  REGION 1..7: note = Description of Artificial Sequence: Synthetic peptide
TLSQNPT

SEQ ID NO: 9132 - protein, 7 aa, synthetic construct
  REGION 1..7: note = Description of Artificial Sequence: Synthetic peptide
GKGQTPS

SEQ ID NO: 9133 - protein, 7 aa, synthetic construct
  REGION 1..7: note = Description of Artificial Sequence: Synthetic peptide
GSVQANK

SEQ ID NO: 9134 - protein, 7 aa, synthetic construct
  REGION 1..7: note = Description of Artificial Sequence: Synthetic peptide
GNSDHKN

SEQ ID NO: 9135 - protein, 7 aa, synthetic construct
  REGION 1..7: note = Description of Artificial Sequence: Synthetic peptide
TPQSTHA

SEQ ID NO: 9136 - protein, 7 aa, synthetic construct
  REGION 1..7: note = Description of Artificial Sequence: Synthetic peptide
HSGKGSS

SEQ ID NO: 9137 - protein, 7 aa, synthetic construct
  REGION 1..7: note = Description of Artificial Sequence: Synthetic peptide
LSQKSAN

SEQ ID NO: 9138 - protein, 7 aa, synthetic construct
  REGION 1..7: note = Description of Artificial Sequence: Synthetic peptide
AAGGTSR

SEQ ID NO: 9139 - protein, 7 aa, synthetic construct
  REGION 1..7: note = Description of Artificial Sequence: Synthetic peptide
SRGATTS

SEQ ID NO: 9140 - protein, 7 aa, synthetic construct
  REGION 1..7: note = Description of Artificial Sequence: Synthetic peptide
GSNAQTV

SEQ ID NO: 9141 - protein, 7 aa, synthetic construct
  REGION 1..7: note = Description of Artificial Sequence: Synthetic peptide
QNSTTSA

SEQ ID NO: 9142 - protein, 7 aa, synthetic construct
  REGION 1..7: note = Description of Artificial Sequence: Synthetic peptide
LGSGNSH

SEQ ID NO: 9143 - protein, 7 aa, synthetic construct
  REGION 1..7: note = Description of Artificial Sequence: Synthetic peptide
DGGNAGR

SEQ ID NO: 9144 - protein, 7 aa, synthetic construct
  REGION 1..7: note = Description of Artificial Sequence: Synthetic peptide
DNDKTNS

SEQ ID NO: 9145 - protein, 7 aa, synthetic construct
  REGION 1..7: note = Description of Artificial Sequence: Synthetic peptide
NSATSVS

SEQ ID NO: 9146 - protein, 7 aa, synthetic construct
  REGION 1..7: note = Description of Artificial Sequence: Synthetic peptide
TDSQQGR

SEQ ID NO: 9147 - protein, 7 aa, synthetic construct
  REGION 1..7: note = Description of Artificial Sequence: Synthetic peptide
NMGASSS

SEQ ID NO: 9148 - protein, 7 aa, synthetic construct
  REGION 1..7: note = Description of Artificial Sequence: Synthetic peptide
MNTPKDG

SEQ ID NO: 9149 - protein, 7 aa, synthetic construct
  REGION 1..7: note = Description of Artificial Sequence: Synthetic peptide
QLSNSSA

SEQ ID NO: 9150 - protein, 7 aa, synthetic construct
  REGION 1..7: note = Description of Artificial Sequence: Synthetic peptide
VTSNSSS

SEQ ID NO: 9151 - protein, 7 aa, synthetic construct
  REGION 1..7: note = Description of Artificial Sequence: Synthetic peptide
SQTTPSL

SEQ ID NO: 9152 - protein, 7 aa, synthetic construct
  REGION 1..7: note = Description of Artificial Sequence: Synthetic peptide
TGNAPSH

SEQ ID NO: 9153 - protein, 7 aa, synthetic construct
  REGION 1..7: note = Description of Artificial Sequence: Synthetic peptide
TTADRKG

SEQ ID NO: 9154 - protein, 7 aa, synthetic construct
  REGION 1..7: note = Description of Artificial Sequence: Synthetic peptide
TGGSGSH

SEQ ID NO: 9155 - protein, 7 aa, synthetic construct
  REGION 1..7: note = Description of Artificial Sequence: Synthetic peptide
LKSAQDA

SEQ ID NO: 9156 - protein, 7 aa, synthetic construct
  REGION 1..7: note = Description of Artificial Sequence: Synthetic peptide
LVGTSSA

SEQ ID NO: 9157 - protein, 7 aa, synthetic construct
  REGION 1..7: note = Description of Artificial Sequence: Synthetic peptide
DDLSKPR

SEQ ID NO: 9158 - protein, 7 aa, synthetic construct
  REGION 1..7: note = Description of Artificial Sequence: Synthetic peptide
ASDQASK

SEQ ID NO: 9159 - protein, 7 aa, synthetic construct
  REGION 1..7: note = Description of Artificial Sequence: Synthetic peptide
AHSSNSV

SEQ ID NO: 9160 - protein, 7 aa, synthetic construct
  REGION 1..7: note = Description of Artificial Sequence: Synthetic peptide
YNASGIQ

SEQ ID NO: 9161 - protein, 7 aa, synthetic construct
  REGION 1..7: note = Description of Artificial Sequence: Synthetic peptide
DNGKSTV

SEQ ID NO: 9162 - protein, 7 aa, synthetic construct
  REGION 1..7: note = Description of Artificial Sequence: Synthetic peptide
STQSNPP

SEQ ID NO: 9163 - protein, 7 aa, synthetic construct
  REGION 1..7: note = Description of Artificial Sequence: Synthetic peptide
SLGTPTR

SEQ ID NO: 9164 - protein, 7 aa, synthetic construct
  REGION 1..7: note = Description of Artificial Sequence: Synthetic peptide
RNGSPSV

SEQ ID NO: 9165 - protein, 7 aa, synthetic construct
  REGION 1..7: note = Description of Artificial Sequence: Synthetic peptide
GSDGSRG

SEQ ID NO: 9166 - protein, 7 aa, synthetic construct
  REGION 1..7: note = Description of Artificial Sequence: Synthetic peptide
LGKGENN

SEQ ID NO: 9167 - protein, 7 aa, synthetic construct
  REGION 1..7: note = Description of Artificial Sequence: Synthetic peptide
DVNSSKV

SEQ ID NO: 9168 - protein, 7 aa, synthetic construct
  REGION 1..7: note = Description of Artificial Sequence: Synthetic peptide
ASTHTNN

SEQ ID NO: 9169 - protein, 7 aa, synthetic construct
  REGION 1..7: note = Description of Artificial Sequence: Synthetic peptide
ESGSTAT

SEQ ID NO: 9170 - protein, 7 aa, synthetic construct
  REGION 1..7: note = Description of Artificial Sequence: Synthetic peptide
SPSNNAV

SEQ ID NO: 9171 - protein, 7 aa, synthetic construct
  REGION 1..7: note = Description of Artificial Sequence: Synthetic peptide
NSSDAKA

SEQ ID NO: 9172 - protein, 7 aa, synthetic construct
  REGION 1..7: note = Description of Artificial Sequence: Synthetic peptide
SHTSSPA

SEQ ID NO: 9173 - protein, 7 aa, synthetic construct
  REGION 1..7: note = Description of Artificial Sequence: Synthetic peptide
ETSKTRA

SEQ ID NO: 9174 - protein, 7 aa, synthetic construct
  REGION 1..7: note = Description of Artificial Sequence: Synthetic peptide
VAGATTS

SEQ ID NO: 9175 - protein, 7 aa, synthetic construct
  REGION 1..7: note = Description of Artificial Sequence: Synthetic peptide
SHQGNNT

SEQ ID NO: 9176 - protein, 7 aa, synthetic construct
  REGION 1..7: note = Description of Artificial Sequence: Synthetic peptide
TATSSTE

SEQ ID NO: 9177 - protein, 7 aa, synthetic construct
  REGION 1..7: note = Description of Artificial Sequence: Synthetic peptide
HTQNTNS

SEQ ID NO: 9178 - protein, 7 aa, synthetic construct
  REGION 1..7: note = Description of Artificial Sequence: Synthetic peptide
SAERSPN

SEQ ID NO: 9179 - protein, 7 aa, synthetic construct
  REGION 1..7: note = Description of Artificial Sequence: Synthetic peptide
SNSSGLT

SEQ ID NO: 9180 - protein, 7 aa, synthetic construct
  REGION 1..7: note = Description of Artificial Sequence: Synthetic peptide
MNQKESS

SEQ ID NO: 9181 - protein, 7 aa, synthetic construct
  REGION 1..7: note = Description of Artificial Sequence: Synthetic peptide
SNGTPMV

SEQ ID NO: 9182 - protein, 7 aa, synthetic construct
  REGION 1..7: note = Description of Artificial Sequence: Synthetic peptide
QQHKASV

SEQ ID NO: 9183 - protein, 7 aa, synthetic construct
  REGION 1..7: note = Description of Artificial Sequence: Synthetic peptide
SRNSKDL

SEQ ID NO: 9184 - protein, 7 aa, synthetic construct
  REGION 1..7: note = Description of Artificial Sequence: Synthetic peptide
ASQTVNT

SEQ ID NO: 9185 - protein, 7 aa, synthetic construct
  REGION 1..7: note = Description of Artificial Sequence: Synthetic peptide
LPREGSG

SEQ ID NO: 9186 - protein, 7 aa, synthetic construct
  REGION 1..7: note = Description of Artificial Sequence: Synthetic peptide
AASASPS

SEQ ID NO: 9187 - protein, 7 aa, synthetic construct
  REGION 1..7: note = Description of Artificial Sequence: Synthetic peptide
GIGSSSG

SEQ ID NO: 9188 - protein, 7 aa, synthetic construct
  REGION 1..7: note = Description of Artificial Sequence: Synthetic peptide
GQKGAQL

SEQ ID NO: 9189 - protein, 7 aa, synthetic construct
  REGION 1..7: note = Description of Artificial Sequence: Synthetic peptide
VATTKAS

SEQ ID NO: 9190 - protein, 7 aa, synthetic construct
  REGION 1..7: note = Description of Artificial Sequence: Synthetic peptide
HQSTPSS

SEQ ID NO: 9191 - protein, 7 aa, synthetic construct
  REGION 1..7: note = Description of Artificial Sequence: Synthetic peptide
SSSSQPV

SEQ ID NO: 9192 - protein, 7 aa, synthetic construct
  REGION 1..7: note = Description of Artificial Sequence: Synthetic peptide
MPSGQNL

SEQ ID NO: 9193 - protein, 7 aa, synthetic construct
  REGION 1..7: note = Description of Artificial Sequence: Synthetic peptide
DPTRIGA

SEQ ID NO: 9194 - protein, 7 aa, synthetic construct
  REGION 1..7: note = Description of Artificial Sequence: Synthetic peptide
GSGGTNQ

SEQ ID NO: 9195 - protein, 7 aa, synthetic construct
  REGION 1..7: note = Description of Artificial Sequence: Synthetic peptide
GQAGSNP

SEQ ID NO: 9196 - protein, 7 aa, synthetic construct
  REGION 1..7: note = Description of Artificial Sequence: Synthetic peptide
VGSTSVL

SEQ ID NO: 9197 - protein, 7 aa, synthetic construct
  REGION 1..7: note = Description of Artificial Sequence: Synthetic peptide
SAGSKTG

SEQ ID NO: 9198 - protein, 7 aa, synthetic construct
  REGION 1..7: note = Description of Artificial Sequence: Synthetic peptide
SASTNHA

SEQ ID NO: 9199 - protein, 7 aa, synthetic construct
  REGION 1..7: note = Description of Artificial Sequence: Synthetic peptide
SSTQAKG

SEQ ID NO: 9200 - protein, 7 aa, synthetic construct
  REGION 1..7: note = Description of Artificial Sequence: Synthetic peptide
TTKSAST

SEQ ID NO: 9201 - protein, 7 aa, synthetic construct
  REGION 1..7: note = Description of Artificial Sequence: Synthetic peptide
HPPSNGT

SEQ ID NO: 9202 - protein, 7 aa, synthetic construct
  REGION 1..7: note = Description of Artificial Sequence: Synthetic peptide
EGYDKTN

SEQ ID NO: 9203 - protein, 7 aa, synthetic construct
  REGION 1..7: note = Description of Artificial Sequence: Synthetic peptide
GAGGQNQ

SEQ ID NO: 9204 - protein, 7 aa, synthetic construct
  REGION 1..7: note = Description of Artificial Sequence: Synthetic peptide
GLGGNAP

SEQ ID NO: 9205 - protein, 7 aa, synthetic construct
  REGION 1..7: note = Description of Artificial Sequence: Synthetic peptide
SPATHSS

SEQ ID NO: 9206 - protein, 7 aa, synthetic construct
  REGION 1..7: note = Description of Artificial Sequence: Synthetic peptide
DSSAGSK

SEQ ID NO: 9207 - protein, 7 aa, synthetic construct
  REGION 1..7: note = Description of Artificial Sequence: Synthetic peptide
GGSSSTL

SEQ ID NO: 9208 - protein, 7 aa, synthetic construct
  REGION 1..7: note = Description of Artificial Sequence: Synthetic peptide
SPVDSKM

SEQ ID NO: 9209 - protein, 7 aa, synthetic construct
  REGION 1..7: note = Description of Artificial Sequence: Synthetic peptide
ASTSHTS

SEQ ID NO: 9210 - protein, 7 aa, synthetic construct
  REGION 1..7: note = Description of Artificial Sequence: Synthetic peptide
GSTVNMG

SEQ ID NO: 9211 - protein, 7 aa, synthetic construct
  REGION 1..7: note = Description of Artificial Sequence: Synthetic peptide
NPSDALK

SEQ ID NO: 9212 - protein, 7 aa, synthetic construct
  REGION 1..7: note = Description of Artificial Sequence: Synthetic peptide
NSSQQAR

SEQ ID NO: 9213 - protein, 7 aa, synthetic construct
  REGION 1..7: note = Description of Artificial Sequence: Synthetic peptide
TSAKAAQ

SEQ ID NO: 9214 - protein, 7 aa, synthetic construct
  REGION 1..7: note = Description of Artificial Sequence: Synthetic peptide
SAASAPL

SEQ ID NO: 9215 - protein, 7 aa, synthetic construct
  REGION 1..7: note = Description of Artificial Sequence: Synthetic peptide
SNEKTMN

SEQ ID NO: 9216 - protein, 7 aa, synthetic construct
  REGION 1..7: note = Description of Artificial Sequence: Synthetic peptide
MRGNEGS

SEQ ID NO: 9217 - protein, 7 aa, synthetic construct
  REGION 1..7: note = Description of Artificial Sequence: Synthetic peptide
MVNDKPS

SEQ ID NO: 9218 - protein, 7 aa, synthetic construct
  REGION 1..7: note = Description of Artificial Sequence: Synthetic peptide
QQPEMKR

SEQ ID NO: 9219 - protein, 7 aa, synthetic construct
  REGION 1..7: note = Description of Artificial Sequence: Synthetic peptide
ETSGSPH

SEQ ID NO: 9220 - protein, 7 aa, synthetic construct
  REGION 1..7: note = Description of Artificial Sequence: Synthetic peptide
GTATGRG

SEQ ID NO: 9221 - protein, 7 aa, synthetic construct
  REGION 1..7: note = Description of Artificial Sequence: Synthetic peptide
SAGTKSS

SEQ ID NO: 9222 - protein, 7 aa, synthetic construct
  REGION 1..7: note = Description of Artificial Sequence: Synthetic peptide
QTDSSPR

SEQ ID NO: 9223 - protein, 7 aa, synthetic construct
  REGION 1..7: note = Description of Artificial Sequence: Synthetic peptide
NVGTSSA

SEQ ID NO: 9224 - protein, 7 aa, synthetic construct
  REGION 1..7: note = Description of Artificial Sequence: Synthetic peptide
KVTSSPE

SEQ ID NO: 9225 - protein, 7 aa, synthetic construct
  REGION 1..7: note = Description of Artificial Sequence: Synthetic peptide
ESKQQPS

SEQ ID NO: 9226 - protein, 7 aa, synthetic construct
  REGION 1..7: note = Description of Artificial Sequence: Synthetic peptide
QGSQTRE

SEQ ID NO: 9227 - protein, 7 aa, synthetic construct
  REGION 1..7: note = Description of Artificial Sequence: Synthetic peptide
ESTSDHR

SEQ ID NO: 9228 - protein, 7 aa, synthetic construct
  REGION 1..7: note = Description of Artificial Sequence: Synthetic peptide
DAKSVPT

SEQ ID NO: 9229 - protein, 7 aa, synthetic construct
  REGION 1..7: note = Description of Artificial Sequence: Synthetic peptide
TSTNAVS

SEQ ID NO: 9230 - protein, 7 aa, synthetic construct
  REGION 1..7: note = Description of Artificial Sequence: Synthetic peptide
SSHGVSG

SEQ ID NO: 9231 - protein, 7 aa, synthetic construct
  REGION 1..7: note = Description of Artificial Sequence: Synthetic peptide
SSGGLDK

SEQ ID NO: 9232 - protein, 7 aa, synthetic construct
  REGION 1..7: note = Description of Artificial Sequence: Synthetic peptide
SVSKSSG

SEQ ID NO: 9233 - protein, 7 aa, synthetic construct
  REGION 1..7: note = Description of Artificial Sequence: Synthetic peptide
SQKGNGA

SEQ ID NO: 9234 - protein, 7 aa, synthetic construct
  REGION 1..7: note = Description of Artificial Sequence: Synthetic peptide
HREGSGH

SEQ ID NO: 9235 - protein, 7 aa, synthetic construct
  REGION 1..7: note = Description of Artificial Sequence: Synthetic peptide
LANSSQV

SEQ ID NO: 9236 - protein, 7 aa, synthetic construct
  REGION 1..7: note = Description of Artificial Sequence: Synthetic peptide
DGRTPPT

SEQ ID NO: 9237 - protein, 7 aa, synthetic construct
  REGION 1..7: note = Description of Artificial Sequence: Synthetic peptide
AGASAVA

SEQ ID NO: 9238 - protein, 7 aa, synthetic construct
  REGION 1..7: note = Description of Artificial Sequence: Synthetic peptide
KGAKDSG

SEQ ID NO: 9239 - protein, 7 aa, synthetic construct
  REGION 1..7: note = Description of Artificial Sequence: Synthetic peptide
SASSDNR

SEQ ID NO: 9240 - protein, 7 aa, synthetic construct
  REGION 1..7: note = Description of Artificial Sequence: Synthetic peptide
HGNEPIK

SEQ ID NO: 9241 - protein, 7 aa, synthetic construct
  REGION 1..7: note = Description of Artificial Sequence: Synthetic peptide
GTGRSPM

SEQ ID NO: 9242 - protein, 7 aa, synthetic construct
  REGION 1..7: note = Description of Artificial Sequence: Synthetic peptide
VSSKDSA

SEQ ID NO: 9243 - protein, 7 aa, synthetic construct
  REGION 1..7: note = Description of Artificial Sequence: Synthetic peptide
SGGPSTL

SEQ ID NO: 9244 - protein, 7 aa, synthetic construct
  REGION 1..7: note = Description of Artificial Sequence: Synthetic peptide
RNNAHSV

SEQ ID NO: 9245 - protein, 7 aa, synthetic construct
  REGION 1..7: note = Description of Artificial Sequence: Synthetic peptide
ADDKNRA

SEQ ID NO: 9246 - protein, 7 aa, synthetic construct
  REGION 1..7: note = Description of Artificial Sequence: Synthetic peptide
LTSSNGS

SEQ ID NO: 9247 - protein, 7 aa, synthetic construct
  REGION 1..7: note = Description of Artificial Sequence: Synthetic peptide
IQGAGMT

SEQ ID NO: 9248 - protein, 7 aa, synthetic construct
  REGION 1..7: note = Description of Artificial Sequence: Synthetic peptide
MEERKPN

SEQ ID NO: 9249 - protein, 7 aa, synthetic construct
  REGION 1..7: note = Description of Artificial Sequence: Synthetic peptide
ITGGNGG

SEQ ID NO: 9250 - protein, 7 aa, synthetic construct
  REGION 1..7: note = Description of Artificial Sequence: Synthetic peptide
LSANETK

SEQ ID NO: 9251 - protein, 7 aa, synthetic construct
  REGION 1..7: note = Description of Artificial Sequence: Synthetic peptide
LQGANAT

SEQ ID NO: 9252 - protein, 7 aa, synthetic construct
  REGION 1..7: note = Description of Artificial Sequence: Synthetic peptide
LGAGAST

SEQ ID NO: 9253 - protein, 7 aa, synthetic construct
  REGION 1..7: note = Description of Artificial Sequence: Synthetic peptide
GIGERPA

SEQ ID NO: 9254 - protein, 7 aa, synthetic construct
  REGION 1..7: note = Description of Artificial Sequence: Synthetic peptide
VSSNSSS

SEQ ID NO: 9255 - protein, 7 aa, synthetic construct
  REGION 1..7: note = Description of Artificial Sequence: Synthetic peptide
SATNAKI

SEQ ID NO: 9256 - protein, 7 aa, synthetic construct
  REGION 1..7: note = Description of Artificial Sequence: Synthetic peptide
SGRGTST

SEQ ID NO: 9257 - protein, 7 aa, synthetic construct
  REGION 1..7: note = Description of Artificial Sequence: Synthetic peptide
WGGNNST

SEQ ID NO: 9258 - protein, 7 aa, synthetic construct
  REGION 1..7: note = Description of Artificial Sequence: Synthetic peptide
QDTSNTR

SEQ ID NO: 9259 - protein, 7 aa, synthetic construct
  REGION 1..7: note = Description of Artificial Sequence: Synthetic peptide
GNDAPRV

SEQ ID NO: 9260 - protein, 7 aa, synthetic construct
  REGION 1..7: note = Description of Artificial Sequence: Synthetic peptide
AQSGNRV

SEQ ID NO: 9261 - protein, 7 aa, synthetic construct
  REGION 1..7: note = Description of Artificial Sequence: Synthetic peptide
TQTSGVP

SEQ ID NO: 9262 - protein, 7 aa, synthetic construct
  REGION 1..7: note = Description of Artificial Sequence: Synthetic peptide
SDGAGMK

SEQ ID NO: 9263 - protein, 7 aa, synthetic construct
  REGION 1..7: note = Description of Artificial Sequence: Synthetic peptide
SAAQAKV

SEQ ID NO: 9264 - protein, 7 aa, synthetic construct
  REGION 1..7: note = Description of Artificial Sequence: Synthetic peptide
DGTGKQG

SEQ ID NO: 9265 - protein, 7 aa, synthetic construct
  REGION 1..7: note = Description of Artificial Sequence: Synthetic peptide
VRGASSE

SEQ ID NO: 9266 - protein, 7 aa, synthetic construct
  REGION 1..7: note = Description of Artificial Sequence: Synthetic peptide
SGNKSSI

SEQ ID NO: 9267 - protein, 7 aa, synthetic construct
  REGION 1..7: note = Description of Artificial Sequence: Synthetic peptide
TSSPTSA

SEQ ID NO: 9268 - protein, 7 aa, synthetic construct
  REGION 1..7: note = Description of Artificial Sequence: Synthetic peptide
NQGDRSV

SEQ ID NO: 9269 - protein, 7 aa, synthetic construct
  REGION 1..7: note = Description of Artificial Sequence: Synthetic peptide
QGTPTQS

SEQ ID NO: 9270 - protein, 7 aa, synthetic construct
  REGION 1..7: note = Description of Artificial Sequence: Synthetic peptide
TRLSEQK

SEQ ID NO: 9271 - protein, 7 aa, synthetic construct
  REGION 1..7: note = Description of Artificial Sequence: Synthetic peptide
LSQNPGK

SEQ ID NO: 9272 - protein, 7 aa, synthetic construct
  REGION 1..7: note = Description of Artificial Sequence: Synthetic peptide
LSSAGSQ

SEQ ID NO: 9273 - protein, 7 aa, synthetic construct
  REGION 1..7: note = Description of Artificial Sequence: Synthetic peptide
EGSSNTQ

SEQ ID NO: 9274 - protein, 7 aa, synthetic construct
  REGION 1..7: note = Description of Artificial Sequence: Synthetic peptide
SPETRGS

SEQ ID NO: 9275 - protein, 7 aa, synthetic construct
  REGION 1..7: note = Description of Artificial Sequence: Synthetic peptide
HQSNKPL

SEQ ID NO: 9276 - protein, 7 aa, synthetic construct
  REGION 1..7: note = Description of Artificial Sequence: Synthetic peptide
LPADRSS

SEQ ID NO: 9277 - protein, 7 aa, synthetic construct
  REGION 1..7: note = Description of Artificial Sequence: Synthetic peptide
DNGQAPQ

SEQ ID NO: 9278 - protein, 7 aa, synthetic construct
  REGION 1..7: note = Description of Artificial Sequence: Synthetic peptide
ARNGAGA

SEQ ID NO: 9279 - protein, 7 aa, synthetic construct
  REGION 1..7: note = Description of Artificial Sequence: Synthetic peptide
SSSPSNH

SEQ ID NO: 9280 - protein, 7 aa, synthetic construct
  REGION 1..7: note = Description of Artificial Sequence: Synthetic peptide
TPSQGSL

SEQ ID NO: 9281 - protein, 7 aa, synthetic construct
  REGION 1..7: note = Description of Artificial Sequence: Synthetic peptide
AGGAGTS

SEQ ID NO: 9282 - protein, 7 aa, synthetic construct
  REGION 1..7: note = Description of Artificial Sequence: Synthetic peptide
GNGQDHA

SEQ ID NO: 9283 - protein, 7 aa, synthetic construct
  REGION 1..7: note = Description of Artificial Sequence: Synthetic peptide
SLGSTPI

SEQ ID NO: 9284 - protein, 7 aa, synthetic construct
  REGION 1..7: note = Description of Artificial Sequence: Synthetic peptide
TTGASTT

SEQ ID NO: 9285 - protein, 7 aa, synthetic construct
  REGION 1..7: note = Description of Artificial Sequence: Synthetic peptide
ATVGGAK

SEQ ID NO: 9286 - protein, 7 aa, synthetic construct
  REGION 1..7: note = Description of Artificial Sequence: Synthetic peptide
AGSPKDS

SEQ ID NO: 9287 - protein, 7 aa, synthetic construct
  REGION 1..7: note = Description of Artificial Sequence: Synthetic peptide
GSVSHST

SEQ ID NO: 9288 - protein, 7 aa, synthetic construct
  REGION 1..7: note = Description of Artificial Sequence: Synthetic peptide
MPKDSNQ

SEQ ID NO: 9289 - protein, 7 aa, synthetic construct
  REGION 1..7: note = Description of Artificial Sequence: Synthetic peptide
VKTNGTS

SEQ ID NO: 9290 - protein, 7 aa, synthetic construct
  REGION 1..7: note = Description of Artificial Sequence: Synthetic peptide
TSQPTSV

SEQ ID NO: 9291 - protein, 7 aa, synthetic construct
  REGION 1..7: note = Description of Artificial Sequence: Synthetic peptide
DSAKSSH

SEQ ID NO: 9292 - protein, 7 aa, synthetic construct
  REGION 1..7: note = Description of Artificial Sequence: Synthetic peptide
SQNTTGK

SEQ ID NO: 9293 - protein, 7 aa, synthetic construct
  REGION 1..7: note = Description of Artificial Sequence: Synthetic peptide
HPLENKG

SEQ ID NO: 9294 - protein, 7 aa, synthetic construct
  REGION 1..7: note = Description of Artificial Sequence: Synthetic peptide
KTAQSVV

SEQ ID NO: 9295 - protein, 7 aa, synthetic construct
  REGION 1..7: note = Description of Artificial Sequence: Synthetic peptide
TLDAKSN

SEQ ID NO: 9296 - protein, 7 aa, synthetic construct
  REGION 1..7: note = Description of Artificial Sequence: Synthetic peptide
TSSGNSH

SEQ ID NO: 9297 - protein, 7 aa, synthetic construct
  REGION 1..7: note = Description of Artificial Sequence: Synthetic peptide
REQTPTS

SEQ ID NO: 9298 - protein, 7 aa, synthetic construct
  REGION 1..7: note = Description of Artificial Sequence: Synthetic peptide
SETDRKR

SEQ ID NO: 9299 - protein, 7 aa, synthetic construct
  REGION 1..7: note = Description of Artificial Sequence: Synthetic peptide
HGPEKQI

SEQ ID NO: 9300 - protein, 7 aa, synthetic construct
  REGION 1..7: note = Description of Artificial Sequence: Synthetic peptide
LSETSSK

SEQ ID NO: 9301 - protein, 7 aa, synthetic construct
  REGION 1..7: note = Description of Artificial Sequence: Synthetic peptide
DNAKPNI

SEQ ID NO: 9302 - protein, 7 aa, synthetic construct
  REGION 1..7: note = Description of Artificial Sequence: Synthetic peptide
DSMRANV

SEQ ID NO: 9303 - protein, 7 aa, synthetic construct
  REGION 1..7: note = Description of Artificial Sequence: Synthetic peptide
GTSVSAH

SEQ ID NO: 9304 - protein, 7 aa, synthetic construct
  REGION 1..7: note = Description of Artificial Sequence: Synthetic peptide
GHNGKSS

SEQ ID NO: 9305 - protein, 7 aa, synthetic construct
  REGION 1..7: note = Description of Artificial Sequence: Synthetic peptide
GHQSSSG

SEQ ID NO: 9306 - protein, 7 aa, synthetic construct
  REGION 1..7: note = Description of Artificial Sequence: Synthetic peptide
VSSTSSK

SEQ ID NO: 9307 - protein, 7 aa, synthetic construct
  REGION 1..7: note = Description of Artificial Sequence: Synthetic peptide
VASEKPV

SEQ ID NO: 9308 - protein, 7 aa, synthetic construct
  REGION 1..7: note = Description of Artificial Sequence: Synthetic peptide
FTGSAPS

SEQ ID NO: 9309 - protein, 7 aa, synthetic construct
  REGION 1..7: note = Description of Artificial Sequence: Synthetic peptide
NVAKSPL

SEQ ID NO: 9310 - protein, 7 aa, synthetic construct
  REGION 1..7: note = Description of Artificial Sequence: Synthetic peptide
ETITKPV

SEQ ID NO: 9311 - protein, 7 aa, synthetic construct
  REGION 1..7: note = Description of Artificial Sequence: Synthetic peptide
GSTSPNL

SEQ ID NO: 9312 - protein, 7 aa, synthetic construct
  REGION 1..7: note = Description of Artificial Sequence: Synthetic peptide
SLNTKAL

SEQ ID NO: 9313 - protein, 7 aa, synthetic construct
  REGION 1..7: note = Description of Artificial Sequence: Synthetic peptide
TMAASPH

SEQ ID NO: 9314 - protein, 7 aa, synthetic construct
  REGION 1..7: note = Description of Artificial Sequence: Synthetic peptide
TGVGTMS

SEQ ID NO: 9315 - protein, 7 aa, synthetic construct
  REGION 1..7: note = Description of Artificial Sequence: Synthetic peptide
SLASQHS

SEQ ID NO: 9316 - protein, 7 aa, synthetic construct
  REGION 1..7: note = Description of Artificial Sequence: Synthetic peptide
HQDTSNR

SEQ ID NO: 9317 - protein, 7 aa, synthetic construct
  REGION 1..7: note = Description of Artificial Sequence: Synthetic peptide
LPPAESK

SEQ ID NO: 9318 - protein, 7 aa, synthetic construct
  REGION 1..7: note = Description of Artificial Sequence: Synthetic peptide
EVPSKSR

SEQ ID NO: 9319 - protein, 7 aa, synthetic construct
  REGION 1..7: note = Description of Artificial Sequence: Synthetic peptide
DGNSSKQ

SEQ ID NO: 9320 - protein, 7 aa, synthetic construct
  REGION 1..7: note = Description of Artificial Sequence: Synthetic peptide
TGKPPSS

SEQ ID NO: 9321 - protein, 7 aa, synthetic construct
  REGION 1..7: note = Description of Artificial Sequence: Synthetic peptide
SGSTSSS

SEQ ID NO: 9322 - protein, 7 aa, synthetic construct
  REGION 1..7: note = Description of Artificial Sequence: Synthetic peptide
ARTATSV

SEQ ID NO: 9323 - protein, 7 aa, synthetic construct
  REGION 1..7: note = Description of Artificial Sequence: Synthetic peptide
ATDREKG

SEQ ID NO: 9324 - protein, 7 aa, synthetic construct
  REGION 1..7: note = Description of Artificial Sequence: Synthetic peptide
GNSPTAS

SEQ ID NO: 9325 - protein, 7 aa, synthetic construct
  REGION 1..7: note = Description of Artificial Sequence: Synthetic peptide
GTRSGTA

SEQ ID NO: 9326 - protein, 7 aa, synthetic construct
  REGION 1..7: note = Description of Artificial Sequence: Synthetic peptide
VGSGSQT

SEQ ID NO: 9327 - protein, 7 aa, synthetic construct
  REGION 1..7: note = Description of Artificial Sequence: Synthetic peptide
VRDSGSS

SEQ ID NO: 9328 - protein, 7 aa, synthetic construct
  REGION 1..7: note = Description of Artificial Sequence: Synthetic peptide
TRGQPAG

SEQ ID NO: 9329 - protein, 7 aa, synthetic construct
  REGION 1..7: note = Description of Artificial Sequence: Synthetic peptide
QTVPAPS

SEQ ID NO: 9330 - protein, 7 aa, synthetic construct
  REGION 1..7: note = Description of Artificial Sequence: Synthetic peptide
NNNQQSS

SEQ ID NO: 9331 - protein, 7 aa, synthetic construct
  REGION 1..7: note = Description of Artificial Sequence: Synthetic peptide
SSADRST

SEQ ID NO: 9332 - protein, 7 aa, synthetic construct
  REGION 1..7: note = Description of Artificial Sequence: Synthetic peptide
GQSSKKE

SEQ ID NO: 9333 - protein, 7 aa, synthetic construct
  REGION 1..7: note = Description of Artificial Sequence: Synthetic peptide
GVSGPTS

SEQ ID NO: 9334 - protein, 7 aa, synthetic construct
  REGION 1..7: note = Description of Artificial Sequence: Synthetic peptide
NPASTAQ

SEQ ID NO: 9335 - protein, 7 aa, synthetic construct
  REGION 1..7: note = Description of Artificial Sequence: Synthetic peptide
QPRPSPT

SEQ ID NO: 9336 - protein, 7 aa, synthetic construct
  REGION 1..7: note = Description of Artificial Sequence: Synthetic peptide
QSSDKLR

SEQ ID NO: 9337 - protein, 7 aa, synthetic construct
  REGION 1..7: note = Description of Artificial Sequence: Synthetic peptide
LGQSSQG

SEQ ID NO: 9338 - protein, 7 aa, synthetic construct
  REGION 1..7: note = Description of Artificial Sequence: Synthetic peptide
LVDNPKG

SEQ ID NO: 9339 - protein, 7 aa, synthetic construct
  REGION 1..7: note = Description of Artificial Sequence: Synthetic peptide
NSNGNNS

SEQ ID NO: 9340 - protein, 7 aa, synthetic construct
  REGION 1..7: note = Description of Artificial Sequence: Synthetic peptide
SSRQPVV

SEQ ID NO: 9341 - protein, 7 aa, synthetic construct
  REGION 1..7: note = Description of Artificial Sequence: Synthetic peptide
STSANPA

SEQ ID NO: 9342 - protein, 7 aa, synthetic construct
  REGION 1..7: note = Description of Artificial Sequence: Synthetic peptide
LSQGGGA

SEQ ID NO: 9343 - protein, 7 aa, synthetic construct
  REGION 1..7: note = Description of Artificial Sequence: Synthetic peptide
DKTSSPL

SEQ ID NO: 9344 - protein, 7 aa, synthetic construct
  REGION 1..7: note = Description of Artificial Sequence: Synthetic peptide
SVQKVNL

SEQ ID NO: 9345 - protein, 7 aa, synthetic construct
  REGION 1..7: note = Description of Artificial Sequence: Synthetic peptide
HPAQASG

SEQ ID NO: 9346 - protein, 7 aa, synthetic construct
  REGION 1..7: note = Description of Artificial Sequence: Synthetic peptide
ASVSTTK

SEQ ID NO: 9347 - protein, 7 aa, synthetic construct
  REGION 1..7: note = Description of Artificial Sequence: Synthetic peptide
NSLKGSS

SEQ ID NO: 9348 - protein, 7 aa, synthetic construct
  REGION 1..7: note = Description of Artificial Sequence: Synthetic peptide
STSRENL

SEQ ID NO: 9349 - protein, 7 aa, synthetic construct
  REGION 1..7: note = Description of Artificial Sequence: Synthetic peptide
LSVGNNS

SEQ ID NO: 9350 - protein, 7 aa, synthetic construct
  REGION 1..7: note = Description of Artificial Sequence: Synthetic peptide
GINSSRT

SEQ ID NO: 9351 - protein, 7 aa, synthetic construct
  REGION 1..7: note = Description of Artificial Sequence: Synthetic peptide
EAKANAA

SEQ ID NO: 9352 - protein, 7 aa, synthetic construct
  REGION 1..7: note = Description of Artificial Sequence: Synthetic peptide
GTLPSQQ

SEQ ID NO: 9353 - protein, 7 aa, synthetic construct
  REGION 1..7: note = Description of Artificial Sequence: Synthetic peptide
NPLASKD

SEQ ID NO: 9354 - protein, 7 aa, synthetic construct
  REGION 1..7: note = Description of Artificial Sequence: Synthetic peptide
NASSQPA

SEQ ID NO: 9355 - protein, 7 aa, synthetic construct
  REGION 1..7: note = Description of Artificial Sequence: Synthetic peptide
GNEMSVK

SEQ ID NO: 9356 - protein, 7 aa, synthetic construct
  REGION 1..7: note = Description of Artificial Sequence: Synthetic peptide
TSATAHH

SEQ ID NO: 9357 - protein, 7 aa, synthetic construct
  REGION 1..7: note = Description of Artificial Sequence: Synthetic peptide
VQKSVST

SEQ ID NO: 9358 - protein, 7 aa, synthetic construct
  REGION 1..7: note = Description of Artificial Sequence: Synthetic peptide
SVSTTNA

SEQ ID NO: 9359 - protein, 7 aa, synthetic construct
  REGION 1..7: note = Description of Artificial Sequence: Synthetic peptide
LSGQSAN

SEQ ID NO: 9360 - protein, 7 aa, synthetic construct
  REGION 1..7: note = Description of Artificial Sequence: Synthetic peptide
NQSQTTI

SEQ ID NO: 9361 - protein, 7 aa, synthetic construct
  REGION 1..7: note = Description of Artificial Sequence: Synthetic peptide
NATKGSV

SEQ ID NO: 9362 - protein, 7 aa, synthetic construct
  REGION 1..7: note = Description of Artificial Sequence: Synthetic peptide
TSSDARV

SEQ ID NO: 9363 - protein, 7 aa, synthetic construct
  REGION 1..7: note = Description of Artificial Sequence: Synthetic peptide
TQKDSKV

SEQ ID NO: 9364 - protein, 7 aa, synthetic construct
  REGION 1..7: note = Description of Artificial Sequence: Synthetic peptide
REAESSR

SEQ ID NO: 9365 - protein, 7 aa, synthetic construct
  REGION 1..7: note = Description of Artificial Sequence: Synthetic peptide
STTKGEM

SEQ ID NO: 9366 - protein, 7 aa, synthetic construct
  REGION 1..7: note = Description of Artificial Sequence: Synthetic peptide
SDGNANR

SEQ ID NO: 9367 - protein, 7 aa, synthetic construct
  REGION 1..7: note = Description of Artificial Sequence: Synthetic peptide
SGTESGS

SEQ ID NO: 9368 - protein, 7 aa, synthetic construct
  REGION 1..7: note = Description of Artificial Sequence: Synthetic peptide
MPTTDMK

SEQ ID NO: 9369 - protein, 7 aa, synthetic construct
  REGION 1..7: note = Description of Artificial Sequence: Synthetic peptide
HGEKLGQ

SEQ ID NO: 9370 - protein, 7 aa, synthetic construct
  REGION 1..7: note = Description of Artificial Sequence: Synthetic peptide
HGRGSEG

SEQ ID NO: 9371 - protein, 7 aa, synthetic construct
  REGION 1..7: note = Description of Artificial Sequence: Synthetic peptide
HGVSTGS

SEQ ID NO: 9372 - protein, 7 aa, synthetic construct
  REGION 1..7: note = Description of Artificial Sequence: Synthetic peptide
ESDSRNR

SEQ ID NO: 9373 - protein, 7 aa, synthetic construct
  REGION 1..7: note = Description of Artificial Sequence: Synthetic peptide
EQTQPVR

SEQ ID NO: 9374 - protein, 7 aa, synthetic construct
  REGION 1..7: note = Description of Artificial Sequence: Synthetic peptide
ASSGTMS

SEQ ID NO: 9375 - protein, 7 aa, synthetic construct
  REGION 1..7: note = Description of Artificial Sequence: Synthetic peptide
APNSKVV

SEQ ID NO: 9376 - protein, 7 aa, synthetic construct
  REGION 1..7: note = Description of Artificial Sequence: Synthetic peptide
GSNGKVF

SEQ ID NO: 9377 - protein, 7 aa, synthetic construct
  REGION 1..7: note = Description of Artificial Sequence: Synthetic peptide
GSTNTKV

SEQ ID NO: 9378 - protein, 7 aa, synthetic construct
  REGION 1..7: note = Description of Artificial Sequence: Synthetic peptide
GPNKPSF

SEQ ID NO: 9379 - protein, 7 aa, synthetic construct
  REGION 1..7: note = Description of Artificial Sequence: Synthetic peptide
GNGEHST

SEQ ID NO: 9380 - protein, 7 aa, synthetic construct
  REGION 1..7: note = Description of Artificial Sequence: Synthetic peptide
GTRPADT

SEQ ID NO: 9381 - protein, 7 aa, synthetic construct
  REGION 1..7: note = Description of Artificial Sequence: Synthetic peptide
STDSNFR

SEQ ID NO: 9382 - protein, 7 aa, synthetic construct
  REGION 1..7: note = Description of Artificial Sequence: Synthetic peptide
SISGKNQ

SEQ ID NO: 9383 - protein, 7 aa, synthetic construct
  REGION 1..7: note = Description of Artificial Sequence: Synthetic peptide
VQTTKSN

SEQ ID NO: 9384 - protein, 7 aa, synthetic construct
  REGION 1..7: note = Description of Artificial Sequence: Synthetic peptide
GASKHTA

SEQ ID NO: 9385 - protein, 7 aa, synthetic construct
  REGION 1..7: note = Description of Artificial Sequence: Synthetic peptide
HTKTTPE

SEQ ID NO: 9386 - protein, 7 aa, synthetic construct
  REGION 1..7: note = Description of Artificial Sequence: Synthetic peptide
QQASKAT

SEQ ID NO: 9387 - protein, 7 aa, synthetic construct
  REGION 1..7: note = Description of Artificial Sequence: Synthetic peptide
TSNGIAK

SEQ ID NO: 9388 - protein, 7 aa, synthetic construct
  REGION 1..7: note = Description of Artificial Sequence: Synthetic peptide
TNSSKMT

SEQ ID NO: 9389 - protein, 7 aa, synthetic construct
  REGION 1..7: note = Description of Artificial Sequence: Synthetic peptide
SNGSSAS

SEQ ID NO: 9390 - protein, 7 aa, synthetic construct
  REGION 1..7: note = Description of Artificial Sequence: Synthetic peptide
GGQSVPQ

SEQ ID NO: 9391 - protein, 7 aa, synthetic construct
  REGION 1..7: note = Description of Artificial Sequence: Synthetic peptide
TDSTKHG

SEQ ID NO: 9392 - protein, 7 aa, synthetic construct
  REGION 1..7: note = Description of Artificial Sequence: Synthetic peptide
QGMGNVI

SEQ ID NO: 9393 - protein, 7 aa, synthetic construct
  REGION 1..7: note = Description of Artificial Sequence: Synthetic peptide
DKIKTQQ

SEQ ID NO: 9394 - protein, 7 aa, synthetic construct
  REGION 1..7: note = Description of Artificial Sequence: Synthetic peptide
ESESSKG

SEQ ID NO: 9395 - protein, 7 aa, synthetic construct
  REGION 1..7: note = Description of Artificial Sequence: Synthetic peptide
VVSGGNS

SEQ ID NO: 9396 - protein, 7 aa, synthetic construct
  REGION 1..7: note = Description of Artificial Sequence: Synthetic peptide
AEGSRGG

SEQ ID NO: 9397 - protein, 7 aa, synthetic construct
  REGION 1..7: note = Description of Artificial Sequence: Synthetic peptide
GMERSLG

SEQ ID NO: 9398 - protein, 7 aa, synthetic construct
  REGION 1..7: note = Description of Artificial Sequence: Synthetic peptide
GQQREPM

SEQ ID NO: 9399 - protein, 7 aa, synthetic construct
  REGION 1..7: note = Description of Artificial Sequence: Synthetic peptide
MQSNDTK

SEQ ID NO: 9400 - protein, 7 aa, synthetic construct
  REGION 1..7: note = Description of Artificial Sequence: Synthetic peptide
QGTAQIA

SEQ ID NO: 9401 - protein, 7 aa, synthetic construct
  REGION 1..7: note = Description of Artificial Sequence: Synthetic peptide
SPTGDSK

SEQ ID NO: 9402 - protein, 7 aa, synthetic construct
  REGION 1..7: note = Description of Artificial Sequence: Synthetic peptide
STSGSTK

SEQ ID NO: 9403 - protein, 7 aa, synthetic construct
  REGION 1..7: note = Description of Artificial Sequence: Synthetic peptide
HNVEKAG

SEQ ID NO: 9404 - protein, 7 aa, synthetic construct
  REGION 1..7: note = Description of Artificial Sequence: Synthetic peptide
ENSNPRS

SEQ ID NO: 9405 - protein, 7 aa, synthetic construct
  REGION 1..7: note = Description of Artificial Sequence: Synthetic peptide
DSKAGTV

SEQ ID NO: 9406 - protein, 7 aa, synthetic construct
  REGION 1..7: note = Description of Artificial Sequence: Synthetic peptide
RHGSEQG

SEQ ID NO: 9407 - protein, 7 aa, synthetic construct
  REGION 1..7: note = Description of Artificial Sequence: Synthetic peptide
HASSSKG

SEQ ID NO: 9408 - protein, 7 aa, synthetic construct
  REGION 1..7: note = Description of Artificial Sequence: Synthetic peptide
ATGSTAI

SEQ ID NO: 9409 - protein, 7 aa, synthetic construct
  REGION 1..7: note = Description of Artificial Sequence: Synthetic peptide
TMASKPN

SEQ ID NO: 9410 - protein, 7 aa, synthetic construct
  REGION 1..7: note = Description of Artificial Sequence: Synthetic peptide
VKNGNVL

SEQ ID NO: 9411 - protein, 7 aa, synthetic construct
  REGION 1..7: note = Description of Artificial Sequence: Synthetic peptide
TTLQKPV

SEQ ID NO: 9412 - protein, 7 aa, synthetic construct
  REGION 1..7: note = Description of Artificial Sequence: Synthetic peptide
TVQNSKE

SEQ ID NO: 9413 - protein, 7 aa, synthetic construct
  REGION 1..7: note = Description of Artificial Sequence: Synthetic peptide
SQKPSGA

SEQ ID NO: 9414 - protein, 7 aa, synthetic construct
  REGION 1..7: note = Description of Artificial Sequence: Synthetic peptide
SAVQSSG

SEQ ID NO: 9415 - protein, 7 aa, synthetic construct
  REGION 1..7: note = Description of Artificial Sequence: Synthetic peptide
DRSERSI

SEQ ID NO: 9416 - protein, 7 aa, synthetic construct
  REGION 1..7: note = Description of Artificial Sequence: Synthetic peptide
AGVTPPS

SEQ ID NO: 9417 - protein, 7 aa, synthetic construct
  REGION 1..7: note = Description of Artificial Sequence: Synthetic peptide
ATRDKVV

SEQ ID NO: 9418 - protein, 7 aa, synthetic construct
  REGION 1..7: note = Description of Artificial Sequence: Synthetic peptide
SVHSGSA

SEQ ID NO: 9419 - protein, 7 aa, synthetic construct
  REGION 1..7: note = Description of Artificial Sequence: Synthetic peptide
TTASSPQ

SEQ ID NO: 9420 - protein, 7 aa, synthetic construct
  REGION 1..7: note = Description of Artificial Sequence: Synthetic peptide
NANGSSA

SEQ ID NO: 9421 - protein, 7 aa, synthetic construct
  REGION 1..7: note = Description of Artificial Sequence: Synthetic peptide
SGSTPRE

SEQ ID NO: 9422 - protein, 7 aa, synthetic construct
  REGION 1..7: note = Description of Artificial Sequence: Synthetic peptide
QNKSGSM

SEQ ID NO: 9423 - protein, 7 aa, synthetic construct
  REGION 1..7: note = Description of Artificial Sequence: Synthetic peptide
SALGKES

SEQ ID NO: 9424 - protein, 7 aa, synthetic construct
  REGION 1..7: note = Description of Artificial Sequence: Synthetic peptide
QSGSKVT

SEQ ID NO: 9425 - protein, 7 aa, synthetic construct
  REGION 1..7: note = Description of Artificial Sequence: Synthetic peptide
MTSDKST

SEQ ID NO: 9426 - protein, 7 aa, synthetic construct
  REGION 1..7: note = Description of Artificial Sequence: Synthetic peptide
LSNGKST

SEQ ID NO: 9427 - protein, 7 aa, synthetic construct
  REGION 1..7: note = Description of Artificial Sequence: Synthetic peptide
DNSTGIR

SEQ ID NO: 9428 - protein, 7 aa, synthetic construct
  REGION 1..7: note = Description of Artificial Sequence: Synthetic peptide
DTLDRSR

SEQ ID NO: 9429 - protein, 7 aa, synthetic construct
  REGION 1..7: note = Description of Artificial Sequence: Synthetic peptide
ASNNSQS

SEQ ID NO: 9430 - protein, 7 aa, synthetic construct
  REGION 1..7: note = Description of Artificial Sequence: Synthetic peptide
ASPTKSI

SEQ ID NO: 9431 - protein, 7 aa, synthetic construct
  REGION 1..7: note = Description of Artificial Sequence: Synthetic peptide
GPTNVQA

SEQ ID NO: 9432 - protein, 7 aa, synthetic construct
  REGION 1..7: note = Description of Artificial Sequence: Synthetic peptide
VGVDKVA

SEQ ID NO: 9433 - protein, 7 aa, synthetic construct
  REGION 1..7: note = Description of Artificial Sequence: Synthetic peptide
SSGQSMG

SEQ ID NO: 9434 - protein, 7 aa, synthetic construct
  REGION 1..7: note = Description of Artificial Sequence: Synthetic peptide
SGTKVAL

SEQ ID NO: 9435 - protein, 7 aa, synthetic construct
  REGION 1..7: note = Description of Artificial Sequence: Synthetic peptide
AAVSSPS

SEQ ID NO: 9436 - protein, 7 aa, synthetic construct
  REGION 1..7: note = Description of Artificial Sequence: Synthetic peptide
HGANNVQ

SEQ ID NO: 9437 - protein, 7 aa, synthetic construct
  REGION 1..7: note = Description of Artificial Sequence: Synthetic peptide
NTSDTKN

SEQ ID NO: 9438 - protein, 7 aa, synthetic construct
  REGION 1..7: note = Description of Artificial Sequence: Synthetic peptide
NPTNDQK

SEQ ID NO: 9439 - protein, 7 aa, synthetic construct
  REGION 1..7: note = Description of Artificial Sequence: Synthetic peptide
STQNHGN

SEQ ID NO: 9440 - protein, 7 aa, synthetic construct
  REGION 1..7: note = Description of Artificial Sequence: Synthetic peptide
QGNNTLM

SEQ ID NO: 9441 - protein, 7 aa, synthetic construct
  REGION 1..7: note = Description of Artificial Sequence: Synthetic peptide
LAIPDKG

SEQ ID NO: 9442 - protein, 7 aa, synthetic construct
  REGION 1..7: note = Description of Artificial Sequence: Synthetic peptide
ALSGGNS

SEQ ID NO: 9443 - protein, 7 aa, synthetic construct
  REGION 1..7: note = Description of Artificial Sequence: Synthetic peptide
VAATPPQ

SEQ ID NO: 9444 - protein, 7 aa, synthetic construct
  REGION 1..7: note = Description of Artificial Sequence: Synthetic peptide
KAGSSVG

SEQ ID NO: 9445 - protein, 7 aa, synthetic construct
  REGION 1..7: note = Description of Artificial Sequence: Synthetic peptide
IGAGNPS

SEQ ID NO: 9446 - protein, 7 aa, synthetic construct
  REGION 1..7: note = Description of Artificial Sequence: Synthetic peptide
HKDRENK

SEQ ID NO: 9447 - protein, 7 aa, synthetic construct
  REGION 1..7: note = Description of Artificial Sequence: Synthetic peptide
QNSNQLK

SEQ ID NO: 9448 - protein, 7 aa, synthetic construct
  REGION 1..7: note = Description of Artificial Sequence: Synthetic peptide
GTTNTSS

SEQ ID NO: 9449 - protein, 7 aa, synthetic construct
  REGION 1..7: note = Description of Artificial Sequence: Synthetic peptide
SPDHAKS

SEQ ID NO: 9450 - protein, 7 aa, synthetic construct
  REGION 1..7: note = Description of Artificial Sequence: Synthetic peptide
LPVNSTK

SEQ ID NO: 9451 - protein, 7 aa, synthetic construct
  REGION 1..7: note = Description of Artificial Sequence: Synthetic peptide
SGTKVSE

SEQ ID NO: 9452 - protein, 7 aa, synthetic construct
  REGION 1..7: note = Description of Artificial Sequence: Synthetic peptide
PLSGKGP

SEQ ID NO: 9453 - protein, 7 aa, synthetic construct
  REGION 1..7: note = Description of Artificial Sequence: Synthetic peptide
ANSHQNT

SEQ ID NO: 9454 - protein, 7 aa, synthetic construct
  REGION 1..7: note = Description of Artificial Sequence: Synthetic peptide
GVDSSRG

SEQ ID NO: 9455 - protein, 7 aa, synthetic construct
  REGION 1..7: note = Description of Artificial Sequence: Synthetic peptide
GSNHSSS

SEQ ID NO: 9456 - protein, 7 aa, synthetic construct
  REGION 1..7: note = Description of Artificial Sequence: Synthetic peptide
TDGSKGS

SEQ ID NO: 9457 - protein, 7 aa, synthetic construct
  REGION 1..7: note = Description of Artificial Sequence: Synthetic peptide
NGGTPMR

SEQ ID NO: 9458 - protein, 7 aa, synthetic construct
  REGION 1..7: note = Description of Artificial Sequence: Synthetic peptide
SATTVNS

SEQ ID NO: 9459 - protein, 7 aa, synthetic construct
  REGION 1..7: note = Description of Artificial Sequence: Synthetic peptide
NTSSPVV

SEQ ID NO: 9460 - protein, 7 aa, synthetic construct
  REGION 1..7: note = Description of Artificial Sequence: Synthetic peptide
DSSHHGR

SEQ ID NO: 9461 - protein, 7 aa, synthetic construct
  REGION 1..7: note = Description of Artificial Sequence: Synthetic peptide
DLLPPGK

SEQ ID NO: 9462 - protein, 7 aa, synthetic construct
  REGION 1..7: note = Description of Artificial Sequence: Synthetic peptide
SSGIGGA

SEQ ID NO: 9463 - protein, 7 aa, synthetic construct
  REGION 1..7: note = Description of Artificial Sequence: Synthetic peptide
TGKTSPT

SEQ ID NO: 9464 - protein, 7 aa, synthetic construct
  REGION 1..7: note = Description of Artificial Sequence: Synthetic peptide
TTVNSPS

SEQ ID NO: 9465 - protein, 7 aa, synthetic construct
  REGION 1..7: note = Description of Artificial Sequence: Synthetic peptide
KTGTGSS

SEQ ID NO: 9466 - protein, 7 aa, synthetic construct
  REGION 1..7: note = Description of Artificial Sequence: Synthetic peptide
TKGQTPG

SEQ ID NO: 9467 - protein, 7 aa, synthetic construct
  REGION 1..7: note = Description of Artificial Sequence: Synthetic peptide
TGGHKGS

SEQ ID NO: 9468 - protein, 7 aa, synthetic construct
  REGION 1..7: note = Description of Artificial Sequence: Synthetic peptide
THNGTAA

SEQ ID NO: 9469 - protein, 7 aa, synthetic construct
  REGION 1..7: note = Description of Artificial Sequence: Synthetic peptide
SNSSPTV

SEQ ID NO: 9470 - protein, 7 aa, synthetic construct
  REGION 1..7: note = Description of Artificial Sequence: Synthetic peptide
SSAQKDQ

SEQ ID NO: 9471 - protein, 7 aa, synthetic construct
  REGION 1..7: note = Description of Artificial Sequence: Synthetic peptide
SSGQPVS

SEQ ID NO: 9472 - protein, 7 aa, synthetic construct
  REGION 1..7: note = Description of Artificial Sequence: Synthetic peptide
MNDVKSN

SEQ ID NO: 9473 - protein, 7 aa, synthetic construct
  REGION 1..7: note = Description of Artificial Sequence: Synthetic peptide
LRAGQGM

SEQ ID NO: 9474 - protein, 7 aa, synthetic construct
  REGION 1..7: note = Description of Artificial Sequence: Synthetic peptide
LSGATSV

SEQ ID NO: 9475 - protein, 7 aa, synthetic construct
  REGION 1..7: note = Description of Artificial Sequence: Synthetic peptide
DTKQPQL

SEQ ID NO: 9476 - protein, 7 aa, synthetic construct
  REGION 1..7: note = Description of Artificial Sequence: Synthetic peptide
AKTVSSG

SEQ ID NO: 9477 - protein, 7 aa, synthetic construct
  REGION 1..7: note = Description of Artificial Sequence: Synthetic peptide
GPTPANS

SEQ ID NO: 9478 - protein, 7 aa, synthetic construct
  REGION 1..7: note = Description of Artificial Sequence: Synthetic peptide
GPESRNS

SEQ ID NO: 9479 - protein, 7 aa, synthetic construct
  REGION 1..7: note = Description of Artificial Sequence: Synthetic peptide
GDGHNAG

SEQ ID NO: 9480 - protein, 7 aa, synthetic construct
  REGION 1..7: note = Description of Artificial Sequence: Synthetic peptide
VTNGTTR

SEQ ID NO: 9481 - protein, 7 aa, synthetic construct
  REGION 1..7: note = Description of Artificial Sequence: Synthetic peptide
VAESKVN

SEQ ID NO: 9482 - protein, 7 aa, synthetic construct
  REGION 1..7: note = Description of Artificial Sequence: Synthetic peptide
VGESNHS

SEQ ID NO: 9483 - protein, 7 aa, synthetic construct
  REGION 1..7: note = Description of Artificial Sequence: Synthetic peptide
SEPSQKT

SEQ ID NO: 9484 - protein, 7 aa, synthetic construct
  REGION 1..7: note = Description of Artificial Sequence: Synthetic peptide
SGGQATM

SEQ ID NO: 9485 - protein, 7 aa, synthetic construct
  REGION 1..7: note = Description of Artificial Sequence: Synthetic peptide
TTSTRAE

SEQ ID NO: 9486 - protein, 7 aa, synthetic construct
  REGION 1..7: note = Description of Artificial Sequence: Synthetic peptide
SQSTSTL

SEQ ID NO: 9487 - protein, 7 aa, synthetic construct
  REGION 1..7: note = Description of Artificial Sequence: Synthetic peptide
SVLPNKA

SEQ ID NO: 9488 - protein, 7 aa, synthetic construct
  REGION 1..7: note = Description of Artificial Sequence: Synthetic peptide
SGSTSLA

SEQ ID NO: 9489 - protein, 7 aa, synthetic construct
  REGION 1..7: note = Description of Artificial Sequence: Synthetic peptide
DPLSTNR

SEQ ID NO: 9490 - protein, 7 aa, synthetic construct
  REGION 1..7: note = Description of Artificial Sequence: Synthetic peptide
DASERTH

SEQ ID NO: 9491 - protein, 7 aa, synthetic construct
  REGION 1..7: note = Description of Artificial Sequence: Synthetic peptide
TTQGNGH

SEQ ID NO: 9492 - protein, 7 aa, synthetic construct
  REGION 1..7: note = Description of Artificial Sequence: Synthetic peptide
ALAKSGS

SEQ ID NO: 9493 - protein, 7 aa, synthetic construct
  REGION 1..7: note = Description of Artificial Sequence: Synthetic peptide
DVGSSSN

SEQ ID NO: 9494 - protein, 7 aa, synthetic construct
  REGION 1..7: note = Description of Artificial Sequence: Synthetic peptide
GTTTQVK

SEQ ID NO: 9495 - protein, 7 aa, synthetic construct
  REGION 1..7: note = Description of Artificial Sequence: Synthetic peptide
KNTGAPS

SEQ ID NO: 9496 - protein, 7 aa, synthetic construct
  REGION 1..7: note = Description of Artificial Sequence: Synthetic peptide
EHADKLK

SEQ ID NO: 9497 - protein, 7 aa, synthetic construct
  REGION 1..7: note = Description of Artificial Sequence: Synthetic peptide
GSKGNST

SEQ ID NO: 9498 - protein, 7 aa, synthetic construct
  REGION 1..7: note = Description of Artificial Sequence: Synthetic peptide
LASKSST

SEQ ID NO: 9499 - protein, 7 aa, synthetic construct
  REGION 1..7: note = Description of Artificial Sequence: Synthetic peptide
EQSSLKN

SEQ ID NO: 9500 - protein, 7 aa, synthetic construct
  REGION 1..7: note = Description of Artificial Sequence: Synthetic peptide
VSTSRPS

SEQ ID NO: 9501 - protein, 7 aa, synthetic construct
  REGION 1..7: note = Description of Artificial Sequence: Synthetic peptide
LKDTSSI

SEQ ID NO: 9502 - protein, 7 aa, synthetic construct
  REGION 1..7: note = Description of Artificial Sequence: Synthetic peptide
TGAGSVA

SEQ ID NO: 9503 - protein, 7 aa, synthetic construct
  REGION 1..7: note = Description of Artificial Sequence: Synthetic peptide
QQIGSKE

SEQ ID NO: 9504 - protein, 7 aa, synthetic construct
  REGION 1..7: note = Description of Artificial Sequence: Synthetic peptide
ALSSKNV

SEQ ID NO: 9505 - protein, 7 aa, synthetic construct
  REGION 1..7: note = Description of Artificial Sequence: Synthetic peptide
AGDNSQK

SEQ ID NO: 9506 - protein, 7 aa, synthetic construct
  REGION 1..7: note = Description of Artificial Sequence: Synthetic peptide
GGETPLK

SEQ ID NO: 9507 - protein, 7 aa, synthetic construct
  REGION 1..7: note = Description of Artificial Sequence: Synthetic peptide
KASGNAV

SEQ ID NO: 9508 - protein, 7 aa, synthetic construct
  REGION 1..7: note = Description of Artificial Sequence: Synthetic peptide
TTASDHR

SEQ ID NO: 9509 - protein, 7 aa, synthetic construct
  REGION 1..7: note = Description of Artificial Sequence: Synthetic peptide
VGTSATT

SEQ ID NO: 9510 - protein, 7 aa, synthetic construct
  REGION 1..7: note = Description of Artificial Sequence: Synthetic peptide
NPGGSNK

SEQ ID NO: 9511 - protein, 7 aa, synthetic construct
  REGION 1..7: note = Description of Artificial Sequence: Synthetic peptide
TSAPTNK

SEQ ID NO: 9512 - protein, 7 aa, synthetic construct
  REGION 1..7: note = Description of Artificial Sequence: Synthetic peptide
SKSTGAI

SEQ ID NO: 9513 - protein, 7 aa, synthetic construct
  REGION 1..7: note = Description of Artificial Sequence: Synthetic peptide
SQQPSQG

SEQ ID NO: 9514 - protein, 7 aa, synthetic construct
  REGION 1..7: note = Description of Artificial Sequence: Synthetic peptide
MHESKSL

SEQ ID NO: 9515 - protein, 7 aa, synthetic construct
  REGION 1..7: note = Description of Artificial Sequence: Synthetic peptide
QNSTGTQ

SEQ ID NO: 9516 - protein, 7 aa, synthetic construct
  REGION 1..7: note = Description of Artificial Sequence: Synthetic peptide
QAHDSKS

SEQ ID NO: 9517 - protein, 7 aa, synthetic construct
  REGION 1..7: note = Description of Artificial Sequence: Synthetic peptide
EGRDSNG

SEQ ID NO: 9518 - protein, 7 aa, synthetic construct
  REGION 1..7: note = Description of Artificial Sequence: Synthetic peptide
DRANSTS

SEQ ID NO: 9519 - protein, 7 aa, synthetic construct
  REGION 1..7: note = Description of Artificial Sequence: Synthetic peptide
DGSTGPR

SEQ ID NO: 9520 - protein, 7 aa, synthetic construct
  REGION 1..7: note = Description of Artificial Sequence: Synthetic peptide
GSTQSTS

SEQ ID NO: 9521 - protein, 7 aa, synthetic construct
  REGION 1..7: note = Description of Artificial Sequence: Synthetic peptide
GSTTSVH

SEQ ID NO: 9522 - protein, 7 aa, synthetic construct
  REGION 1..7: note = Description of Artificial Sequence: Synthetic peptide
VNGSQML

SEQ ID NO: 9523 - protein, 7 aa, synthetic construct
  REGION 1..7: note = Description of Artificial Sequence: Synthetic peptide
NPAQTLS

SEQ ID NO: 9524 - protein, 7 aa, synthetic construct
  REGION 1..7: note = Description of Artificial Sequence: Synthetic peptide
SGATPIM

SEQ ID NO: 9525 - protein, 7 aa, synthetic construct
  REGION 1..7: note = Description of Artificial Sequence: Synthetic peptide
DNTGSRS

SEQ ID NO: 9526 - protein, 7 aa, synthetic construct
  REGION 1..7: note = Description of Artificial Sequence: Synthetic peptide
GGAASTL

SEQ ID NO: 9527 - protein, 7 aa, synthetic construct
  REGION 1..7: note = Description of Artificial Sequence: Synthetic peptide
TTTRSNS

SEQ ID NO: 9528 - protein, 7 aa, synthetic construct
  REGION 1..7: note = Description of Artificial Sequence: Synthetic peptide
NAHDTKG

SEQ ID NO: 9529 - protein, 7 aa, synthetic construct
  REGION 1..7: note = Description of Artificial Sequence: Synthetic peptide
TSQSKII

SEQ ID NO: 9530 - protein, 7 aa, synthetic construct
  REGION 1..7: note = Description of Artificial Sequence: Synthetic peptide
RGNGASG

SEQ ID NO: 9531 - protein, 7 aa, synthetic construct
  REGION 1..7: note = Description of Artificial Sequence: Synthetic peptide
HHSQDSK

SEQ ID NO: 9532 - protein, 7 aa, synthetic construct
  REGION 1..7: note = Description of Artificial Sequence: Synthetic peptide
ASATGNA

SEQ ID NO: 9533 - protein, 7 aa, synthetic construct
  REGION 1..7: note = Description of Artificial Sequence: Synthetic peptide
SEAKTVH

SEQ ID NO: 9534 - protein, 7 aa, synthetic construct
  REGION 1..7: note = Description of Artificial Sequence: Synthetic peptide
SNKSSAV

SEQ ID NO: 9535 - protein, 7 aa, synthetic construct
  REGION 1..7: note = Description of Artificial Sequence: Synthetic peptide
DSTPGRS

SEQ ID NO: 9536 - protein, 7 aa, synthetic construct
  REGION 1..7: note = Description of Artificial Sequence: Synthetic peptide
IAKPDST

SEQ ID NO: 9537 - protein, 7 aa, synthetic construct
  REGION 1..7: note = Description of Artificial Sequence: Synthetic peptide
NAEVRSS

SEQ ID NO: 9538 - protein, 7 aa, synthetic construct
  REGION 1..7: note = Description of Artificial Sequence: Synthetic peptide
ERPNNAG

SEQ ID NO: 9539 - protein, 7 aa, synthetic construct
  REGION 1..7: note = Description of Artificial Sequence: Synthetic peptide
SSGTSSS

SEQ ID NO: 9540 - protein, 7 aa, synthetic construct
  REGION 1..7: note = Description of Artificial Sequence: Synthetic peptide
SEGQIRS

SEQ ID NO: 9541 - protein, 7 aa, synthetic construct
  REGION 1..7: note = Description of Artificial Sequence: Synthetic peptide
TSHTPHT

SEQ ID NO: 9542 - protein, 7 aa, synthetic construct
  REGION 1..7: note = Description of Artificial Sequence: Synthetic peptide
SNGGSGS

SEQ ID NO: 9543 - protein, 7 aa, synthetic construct
  REGION 1..7: note = Description of Artificial Sequence: Synthetic peptide
IKTTSNA

SEQ ID NO: 9544 - protein, 7 aa, synthetic construct
  REGION 1..7: note = Description of Artificial Sequence: Synthetic peptide
GNMVKPS

SEQ ID NO: 9545 - protein, 7 aa, synthetic construct
  REGION 1..7: note = Description of Artificial Sequence: Synthetic peptide
GREPVQG

SEQ ID NO: 9546 - protein, 7 aa, synthetic construct
  REGION 1..7: note = Description of Artificial Sequence: Synthetic peptide
QVSSEAS

SEQ ID NO: 9547 - protein, 7 aa, synthetic construct
  REGION 1..7: note = Description of Artificial Sequence: Synthetic peptide
DSGNTPR

SEQ ID NO: 9548 - protein, 7 aa, synthetic construct
  REGION 1..7: note = Description of Artificial Sequence: Synthetic peptide
GTNTSMA

SEQ ID NO: 9549 - protein, 7 aa, synthetic construct
  REGION 1..7: note = Description of Artificial Sequence: Synthetic peptide
GDSKPNL

SEQ ID NO: 9550 - protein, 7 aa, synthetic construct
  REGION 1..7: note = Description of Artificial Sequence: Synthetic peptide
VTSTTSS

SEQ ID NO: 9551 - protein, 7 aa, synthetic construct
  REGION 1..7: note = Description of Artificial Sequence: Synthetic peptide
YADARAS

SEQ ID NO: 9552 - protein, 7 aa, synthetic construct
  REGION 1..7: note = Description of Artificial Sequence: Synthetic peptide
LPMGGQN

SEQ ID NO: 9553 - protein, 7 aa, synthetic construct
  REGION 1..7: note = Description of Artificial Sequence: Synthetic peptide
TMSGKGE

SEQ ID NO: 9554 - protein, 7 aa, synthetic construct
  REGION 1..7: note = Description of Artificial Sequence: Synthetic peptide
ATTPSTG

SEQ ID NO: 9555 - protein, 7 aa, synthetic construct
  REGION 1..7: note = Description of Artificial Sequence: Synthetic peptide
VQESQSR

SEQ ID NO: 9556 - protein, 7 aa, synthetic construct
  REGION 1..7: note = Description of Artificial Sequence: Synthetic peptide
LSGASAP

SEQ ID NO: 9557 - protein, 7 aa, synthetic construct
  REGION 1..7: note = Description of Artificial Sequence: Synthetic peptide
LETNKPP

SEQ ID NO: 9558 - protein, 7 aa, synthetic construct
  REGION 1..7: note = Description of Artificial Sequence: Synthetic peptide
MKSDSQL

SEQ ID NO: 9559 - protein, 7 aa, synthetic construct
  REGION 1..7: note = Description of Artificial Sequence: Synthetic peptide
GVNGTQK

SEQ ID NO: 9560 - protein, 7 aa, synthetic construct
  REGION 1..7: note = Description of Artificial Sequence: Synthetic peptide
GSAKQNV

SEQ ID NO: 9561 - protein, 7 aa, synthetic construct
  REGION 1..7: note = Description of Artificial Sequence: Synthetic peptide
KTVSTSS

SEQ ID NO: 9562 - protein, 7 aa, synthetic construct
  REGION 1..7: note = Description of Artificial Sequence: Synthetic peptide
QTGASNI

SEQ ID NO: 9563 - protein, 7 aa, synthetic construct
  REGION 1..7: note = Description of Artificial Sequence: Synthetic peptide
DNSHKIS

SEQ ID NO: 9564 - protein, 7 aa, synthetic construct
  REGION 1..7: note = Description of Artificial Sequence: Synthetic peptide
GSNDGVK

SEQ ID NO: 9565 - protein, 7 aa, synthetic construct
  REGION 1..7: note = Description of Artificial Sequence: Synthetic peptide
SAGAQST

SEQ ID NO: 9566 - protein, 7 aa, synthetic construct
  REGION 1..7: note = Description of Artificial Sequence: Synthetic peptide
ANTSTSS

SEQ ID NO: 9567 - protein, 7 aa, synthetic construct
  REGION 1..7: note = Description of Artificial Sequence: Synthetic peptide
HNGKNMG

SEQ ID NO: 9568 - protein, 7 aa, synthetic construct
  REGION 1..7: note = Description of Artificial Sequence: Synthetic peptide
SHSSPAN

SEQ ID NO: 9569 - protein, 7 aa, synthetic construct
  REGION 1..7: note = Description of Artificial Sequence: Synthetic peptide
SGERVGQ

SEQ ID NO: 9570 - protein, 7 aa, synthetic construct
  REGION 1..7: note = Description of Artificial Sequence: Synthetic peptide
LNTGQSH

SEQ ID NO: 9571 - protein, 7 aa, synthetic construct
  REGION 1..7: note = Description of Artificial Sequence: Synthetic peptide
ANKSNAT

SEQ ID NO: 9572 - protein, 7 aa, synthetic construct
  REGION 1..7: note = Description of Artificial Sequence: Synthetic peptide
AVSASPV

SEQ ID NO: 9573 - protein, 7 aa, synthetic construct
  REGION 1..7: note = Description of Artificial Sequence: Synthetic peptide
AKNSATS

SEQ ID NO: 9574 - protein, 7 aa, synthetic construct
  REGION 1..7: note = Description of Artificial Sequence: Synthetic peptide
SHKSENV

SEQ ID NO: 9575 - protein, 7 aa, synthetic construct
  REGION 1..7: note = Description of Artificial Sequence: Synthetic peptide
NGTQSMS

SEQ ID NO: 9576 - protein, 7 aa, synthetic construct
  REGION 1..7: note = Description of Artificial Sequence: Synthetic peptide
KRESQSA

SEQ ID NO: 9577 - protein, 7 aa, synthetic construct
  REGION 1..7: note = Description of Artificial Sequence: Synthetic peptide
TGSKTDS

SEQ ID NO: 9578 - protein, 7 aa, synthetic construct
  REGION 1..7: note = Description of Artificial Sequence: Synthetic peptide
ISGKESS

SEQ ID NO: 9579 - protein, 7 aa, synthetic construct
  REGION 1..7: note = Description of Artificial Sequence: Synthetic peptide
DKGSGKS

SEQ ID NO: 9580 - protein, 7 aa, synthetic construct
  REGION 1..7: note = Description of Artificial Sequence: Synthetic peptide
EKSSTPG

SEQ ID NO: 9581 - protein, 7 aa, synthetic construct
  REGION 1..7: note = Description of Artificial Sequence: Synthetic peptide
DMGSTQK

SEQ ID NO: 9582 - protein, 7 aa, synthetic construct
  REGION 1..7: note = Description of Artificial Sequence: Synthetic peptide
AHNTPSS

SEQ ID NO: 9583 - protein, 7 aa, synthetic construct
  REGION 1..7: note = Description of Artificial Sequence: Synthetic peptide
SNDSRLQ

SEQ ID NO: 9584 - protein, 7 aa, synthetic construct
  REGION 1..7: note = Description of Artificial Sequence: Synthetic peptide
TAEKSIK

SEQ ID NO: 9585 - protein, 7 aa, synthetic construct
  REGION 1..7: note = Description of Artificial Sequence: Synthetic peptide
EGTTNSK

SEQ ID NO: 9586 - protein, 7 aa, synthetic construct
  REGION 1..7: note = Description of Artificial Sequence: Synthetic peptide
DTVGTTK

SEQ ID NO: 9587 - protein, 7 aa, synthetic construct
  REGION 1..7: note = Description of Artificial Sequence: Synthetic peptide
QDVKMAP

SEQ ID NO: 9588 - protein, 7 aa, synthetic construct
  REGION 1..7: note = Description of Artificial Sequence: Synthetic peptide
KTDSGGQ

SEQ ID NO: 9589 - protein, 7 aa, synthetic construct
  REGION 1..7: note = Description of Artificial Sequence: Synthetic peptide
TEGKSMG

SEQ ID NO: 9590 - protein, 7 aa, synthetic construct
  REGION 1..7: note = Description of Artificial Sequence: Synthetic peptide
SSASGQP

SEQ ID NO: 9591 - protein, 7 aa, synthetic construct
  REGION 1..7: note = Description of Artificial Sequence: Synthetic peptide
SQKPSSG

SEQ ID NO: 9592 - protein, 7 aa, synthetic construct
  REGION 1..7: note = Description of Artificial Sequence: Synthetic peptide
GVTTNPG

SEQ ID NO: 9593 - protein, 7 aa, synthetic construct
  REGION 1..7: note = Description of Artificial Sequence: Synthetic peptide
SAARKDG

SEQ ID NO: 9594 - protein, 7 aa, synthetic construct
  REGION 1..7: note = Description of Artificial Sequence: Synthetic peptide
SESKQTV

SEQ ID NO: 9595 - protein, 7 aa, synthetic construct
  REGION 1..7: note = Description of Artificial Sequence: Synthetic peptide
SGGSQSS

SEQ ID NO: 9596 - protein, 7 aa, synthetic construct
  REGION 1..7: note = Description of Artificial Sequence: Synthetic peptide
MGNERVM

SEQ ID NO: 9597 - protein, 7 aa, synthetic construct
  REGION 1..7: note = Description of Artificial Sequence: Synthetic peptide
QSPAKSG

SEQ ID NO: 9598 - protein, 7 aa, synthetic construct
  REGION 1..7: note = Description of Artificial Sequence: Synthetic peptide
LVSDHSK

SEQ ID NO: 9599 - protein, 7 aa, synthetic construct
  REGION 1..7: note = Description of Artificial Sequence: Synthetic peptide
DITPGKS

SEQ ID NO: 9600 - protein, 7 aa, synthetic construct
  REGION 1..7: note = Description of Artificial Sequence: Synthetic peptide
EMSGKND

SEQ ID NO: 9601 - protein, 7 aa, synthetic construct
  REGION 1..7: note = Description of Artificial Sequence: Synthetic peptide
ANSDKMR

SEQ ID NO: 9602 - protein, 7 aa, synthetic construct
  REGION 1..7: note = Description of Artificial Sequence: Synthetic peptide
TNAPSPM

SEQ ID NO: 9603 - protein, 7 aa, synthetic construct
  REGION 1..7: note = Description of Artificial Sequence: Synthetic peptide
AAAHGNA

SEQ ID NO: 9604 - protein, 7 aa, synthetic construct
  REGION 1..7: note = Description of Artificial Sequence: Synthetic peptide
SSRTPST

SEQ ID NO: 9605 - protein, 7 aa, synthetic construct
  REGION 1..7: note = Description of Artificial Sequence: Synthetic peptide
KDAPPTQ

SEQ ID NO: 9606 - protein, 7 aa, synthetic construct
  REGION 1..7: note = Description of Artificial Sequence: Synthetic peptide
NVSPNGA

SEQ ID NO: 9607 - protein, 7 aa, synthetic construct
  REGION 1..7: note = Description of Artificial Sequence: Synthetic peptide
TTSGSYS

SEQ ID NO: 9608 - protein, 7 aa, synthetic construct
  REGION 1..7: note = Description of Artificial Sequence: Synthetic peptide
RREGESK

SEQ ID NO: 9609 - protein, 7 aa, synthetic construct
  REGION 1..7: note = Description of Artificial Sequence: Synthetic peptide
SNTREIT

SEQ ID NO: 9610 - protein, 7 aa, synthetic construct
  REGION 1..7: note = Description of Artificial Sequence: Synthetic peptide
SNSDRPM

SEQ ID NO: 9611 - protein, 7 aa, synthetic construct
  REGION 1..7: note = Description of Artificial Sequence: Synthetic peptide
STTHPSQ

SEQ ID NO: 9612 - protein, 7 aa, synthetic construct
  REGION 1..7: note = Description of Artificial Sequence: Synthetic peptide
SLGSGPH

SEQ ID NO: 9613 - protein, 7 aa, synthetic construct
  REGION 1..7: note = Description of Artificial Sequence: Synthetic peptide
ISSGTPS

SEQ ID NO: 9614 - protein, 7 aa, synthetic construct
  REGION 1..7: note = Description of Artificial Sequence: Synthetic peptide
DSSERVR

SEQ ID NO: 9615 - protein, 7 aa, synthetic construct
  REGION 1..7: note = Description of Artificial Sequence: Synthetic peptide
ESGSSRG

SEQ ID NO: 9616 - protein, 7 aa, synthetic construct
  REGION 1..7: note = Description of Artificial Sequence: Synthetic peptide
GSTNPGA

SEQ ID NO: 9617 - protein, 7 aa, synthetic construct
  REGION 1..7: note = Description of Artificial Sequence: Synthetic peptide
QGRPSSS

SEQ ID NO: 9618 - protein, 7 aa, synthetic construct
  REGION 1..7: note = Description of Artificial Sequence: Synthetic peptide
NGQTAHS

SEQ ID NO: 9619 - protein, 7 aa, synthetic construct
  REGION 1..7: note = Description of Artificial Sequence: Synthetic peptide
MPAKDRG

SEQ ID NO: 9620 - protein, 7 aa, synthetic construct
  REGION 1..7: note = Description of Artificial Sequence: Synthetic peptide
TEDRSLR

SEQ ID NO: 9621 - protein, 7 aa, synthetic construct
  REGION 1..7: note = Description of Artificial Sequence: Synthetic peptide
SGTSKSV

SEQ ID NO: 9622 - protein, 7 aa, synthetic construct
  REGION 1..7: note = Description of Artificial Sequence: Synthetic peptide
KGDRVQG

SEQ ID NO: 9623 - protein, 7 aa, synthetic construct
  REGION 1..7: note = Description of Artificial Sequence: Synthetic peptide
NTATSER

SEQ ID NO: 9624 - protein, 7 aa, synthetic construct
  REGION 1..7: note = Description of Artificial Sequence: Synthetic peptide
GSDIKKT

SEQ ID NO: 9625 - protein, 7 aa, synthetic construct
  REGION 1..7: note = Description of Artificial Sequence: Synthetic peptide
SNDKSSH

SEQ ID NO: 9626 - protein, 7 aa, synthetic construct
  REGION 1..7: note = Description of Artificial Sequence: Synthetic peptide
GQESTAR

SEQ ID NO: 9627 - protein, 7 aa, synthetic construct
  REGION 1..7: note = Description of Artificial Sequence: Synthetic peptide
GGRPENA

SEQ ID NO: 9628 - protein, 7 aa, synthetic construct
  REGION 1..7: note = Description of Artificial Sequence: Synthetic peptide
TPNSASN

SEQ ID NO: 9629 - protein, 7 aa, synthetic construct
  REGION 1..7: note = Description of Artificial Sequence: Synthetic peptide
SALSSPS

SEQ ID NO: 9630 - protein, 7 aa, synthetic construct
  REGION 1..7: note = Description of Artificial Sequence: Synthetic peptide
LASNGNV

SEQ ID NO: 9631 - protein, 7 aa, synthetic construct
  REGION 1..7: note = Description of Artificial Sequence: Synthetic peptide
ASQKPPV

SEQ ID NO: 9632 - protein, 7 aa, synthetic construct
  REGION 1..7: note = Description of Artificial Sequence: Synthetic peptide
TAGSKGN

SEQ ID NO: 9633 - protein, 7 aa, synthetic construct
  REGION 1..7: note = Description of Artificial Sequence: Synthetic peptide
SAQKSVG

SEQ ID NO: 9634 - protein, 7 aa, synthetic construct
  REGION 1..7: note = Description of Artificial Sequence: Synthetic peptide
RGAPNTT

SEQ ID NO: 9635 - protein, 7 aa, synthetic construct
  REGION 1..7: note = Description of Artificial Sequence: Synthetic peptide
EGAAPNT

SEQ ID NO: 9636 - protein, 7 aa, synthetic construct
  REGION 1..7: note = Description of Artificial Sequence: Synthetic peptide
EKSVKYD

SEQ ID NO: 9637 - protein, 7 aa, synthetic construct
  REGION 1..7: note = Description of Artificial Sequence: Synthetic peptide
ELNDKNK

SEQ ID NO: 9638 - protein, 7 aa, synthetic construct
  REGION 1..7: note = Description of Artificial Sequence: Synthetic peptide
GSKGELN

SEQ ID NO: 9639 - protein, 7 aa, synthetic construct
  REGION 1..7: note = Description of Artificial Sequence: Synthetic peptide
YTDKGSQ

SEQ ID NO: 9640 - protein, 7 aa, synthetic construct
  REGION 1..7: note = Description of Artificial Sequence: Synthetic peptide
EGRSSNQ

SEQ ID NO: 9641 - protein, 7 aa, synthetic construct
  REGION 1..7: note = Description of Artificial Sequence: Synthetic peptide
SSSPTMT

SEQ ID NO: 9642 - protein, 7 aa, synthetic construct
  REGION 1..7: note = Description of Artificial Sequence: Synthetic peptide
NMDTKPL

SEQ ID NO: 9643 - protein, 7 aa, synthetic construct
  REGION 1..7: note = Description of Artificial Sequence: Synthetic peptide
RATSERS

SEQ ID NO: 9644 - protein, 7 aa, synthetic construct
  REGION 1..7: note = Description of Artificial Sequence: Synthetic peptide
LTQQTST

SEQ ID NO: 9645 - protein, 7 aa, synthetic construct
  REGION 1..7: note = Description of Artificial Sequence: Synthetic peptide
DAQKTTF

SEQ ID NO: 9646 - protein, 7 aa, synthetic construct
  REGION 1..7: note = Description of Artificial Sequence: Synthetic peptide
AGSPSHN

SEQ ID NO: 9647 - protein, 7 aa, synthetic construct
  REGION 1..7: note = Description of Artificial Sequence: Synthetic peptide
LNSNKSQ

SEQ ID NO: 9648 - protein, 7 aa, synthetic construct
  REGION 1..7: note = Description of Artificial Sequence: Synthetic peptide
NVTGTTA

SEQ ID NO: 9649 - protein, 7 aa, synthetic construct
  REGION 1..7: note = Description of Artificial Sequence: Synthetic peptide
TQNGGPR

SEQ ID NO: 9650 - protein, 7 aa, synthetic construct
  REGION 1..7: note = Description of Artificial Sequence: Synthetic peptide
GLDASRH

SEQ ID NO: 9651 - protein, 7 aa, synthetic construct
  REGION 1..7: note = Description of Artificial Sequence: Synthetic peptide
MGGTSSK

SEQ ID NO: 9652 - protein, 7 aa, synthetic construct
  REGION 1..7: note = Description of Artificial Sequence: Synthetic peptide
ASNQSPS

SEQ ID NO: 9653 - protein, 7 aa, synthetic construct
  REGION 1..7: note = Description of Artificial Sequence: Synthetic peptide
SGVDSPR

SEQ ID NO: 9654 - protein, 7 aa, synthetic construct
  REGION 1..7: note = Description of Artificial Sequence: Synthetic peptide
AISGSPS

SEQ ID NO: 9655 - protein, 7 aa, synthetic construct
  REGION 1..7: note = Description of Artificial Sequence: Synthetic peptide
QHSNPPA

SEQ ID NO: 9656 - protein, 7 aa, synthetic construct
  REGION 1..7: note = Description of Artificial Sequence: Synthetic peptide
ASSPVNS

SEQ ID NO: 9657 - protein, 7 aa, synthetic construct
  REGION 1..7: note = Description of Artificial Sequence: Synthetic peptide
NNNPPSG

SEQ ID NO: 9658 - protein, 7 aa, synthetic construct
  REGION 1..7: note = Description of Artificial Sequence: Synthetic peptide
SQSSSKE

SEQ ID NO: 9659 - protein, 7 aa, synthetic construct
  REGION 1..7: note = Description of Artificial Sequence: Synthetic peptide
SDNKTER

SEQ ID NO: 9660 - protein, 7 aa, synthetic construct
  REGION 1..7: note = Description of Artificial Sequence: Synthetic peptide
HNNSSAV

SEQ ID NO: 9661 - protein, 7 aa, synthetic construct
  REGION 1..7: note = Description of Artificial Sequence: Synthetic peptide
LQKSSVE

SEQ ID NO: 9662 - protein, 7 aa, synthetic construct
  REGION 1..7: note = Description of Artificial Sequence: Synthetic peptide
NTAPPPS

SEQ ID NO: 9663 - protein, 7 aa, synthetic construct
  REGION 1..7: note = Description of Artificial Sequence: Synthetic peptide
LGTGSNN

SEQ ID NO: 9664 - protein, 7 aa, synthetic construct
  REGION 1..7: note = Description of Artificial Sequence: Synthetic peptide
NGKQTSN

SEQ ID NO: 9665 - protein, 7 aa, synthetic construct
  REGION 1..7: note = Description of Artificial Sequence: Synthetic peptide
NQSGATK

SEQ ID NO: 9666 - protein, 7 aa, synthetic construct
  REGION 1..7: note = Description of Artificial Sequence: Synthetic peptide
NGASKLH

SEQ ID NO: 9667 - protein, 7 aa, synthetic construct
  REGION 1..7: note = Description of Artificial Sequence: Synthetic peptide
TNNGVHA

SEQ ID NO: 9668 - protein, 7 aa, synthetic construct
  REGION 1..7: note = Description of Artificial Sequence: Synthetic peptide
TNNGSGN

SEQ ID NO: 9669 - protein, 7 aa, synthetic construct
  REGION 1..7: note = Description of Artificial Sequence: Synthetic peptide
TESGKAI

SEQ ID NO: 9670 - protein, 7 aa, synthetic construct
  REGION 1..7: note = Description of Artificial Sequence: Synthetic peptide
DSSTNAR

SEQ ID NO: 9671 - protein, 7 aa, synthetic construct
  REGION 1..7: note = Description of Artificial Sequence: Synthetic peptide
RAVGKTE

SEQ ID NO: 9672 - protein, 7 aa, synthetic construct
  REGION 1..7: note = Description of Artificial Sequence: Synthetic peptide
ATSSEKS

SEQ ID NO: 9673 - protein, 7 aa, synthetic construct
  REGION 1..7: note = Description of Artificial Sequence: Synthetic peptide
NTGGESG

SEQ ID NO: 9674 - protein, 7 aa, synthetic construct
  REGION 1..7: note = Description of Artificial Sequence: Synthetic peptide
SGKSNDV

SEQ ID NO: 9675 - protein, 7 aa, synthetic construct
  REGION 1..7: note = Description of Artificial Sequence: Synthetic peptide
LGTQHTS

SEQ ID NO: 9676 - protein, 7 aa, synthetic construct
  REGION 1..7: note = Description of Artificial Sequence: Synthetic peptide
DDSSAKS

SEQ ID NO: 9677 - protein, 7 aa, synthetic construct
  REGION 1..7: note = Description of Artificial Sequence: Synthetic peptide
GGPNTTH

SEQ ID NO: 9678 - protein, 7 aa, synthetic construct
  REGION 1..7: note = Description of Artificial Sequence: Synthetic peptide
SISTKES

SEQ ID NO: 9679 - protein, 7 aa, synthetic construct
  REGION 1..7: note = Description of Artificial Sequence: Synthetic peptide
TTSDARN

SEQ ID NO: 9680 - protein, 7 aa, synthetic construct
  REGION 1..7: note = Description of Artificial Sequence: Synthetic peptide
TDASARN

SEQ ID NO: 9681 - protein, 7 aa, synthetic construct
  REGION 1..7: note = Description of Artificial Sequence: Synthetic peptide
SSVPAKG

SEQ ID NO: 9682 - protein, 7 aa, synthetic construct
  REGION 1..7: note = Description of Artificial Sequence: Synthetic peptide
GHNGPNS

SEQ ID NO: 9683 - protein, 7 aa, synthetic construct
  REGION 1..7: note = Description of Artificial Sequence: Synthetic peptide
GSSGSSG

SEQ ID NO: 9684 - protein, 7 aa, synthetic construct
  REGION 1..7: note = Description of Artificial Sequence: Synthetic peptide
VVSDNSR

SEQ ID NO: 9685 - protein, 7 aa, synthetic construct
  REGION 1..7: note = Description of Artificial Sequence: Synthetic peptide
DRSPGSQ

SEQ ID NO: 9686 - protein, 7 aa, synthetic construct
  REGION 1..7: note = Description of Artificial Sequence: Synthetic peptide
GTTPPNA

SEQ ID NO: 9687 - protein, 7 aa, synthetic construct
  REGION 1..7: note = Description of Artificial Sequence: Synthetic peptide
LADKSSY

SEQ ID NO: 9688 - protein, 7 aa, synthetic construct
  REGION 1..7: note = Description of Artificial Sequence: Synthetic peptide
MSTTTNA

SEQ ID NO: 9689 - protein, 7 aa, synthetic construct
  REGION 1..7: note = Description of Artificial Sequence: Synthetic peptide
TTGVSPA

SEQ ID NO: 9690 - protein, 7 aa, synthetic construct
  REGION 1..7: note = Description of Artificial Sequence: Synthetic peptide
STDSSTK

SEQ ID NO: 9691 - protein, 7 aa, synthetic construct
  REGION 1..7: note = Description of Artificial Sequence: Synthetic peptide
DVQTPTT

SEQ ID NO: 9692 - protein, 7 aa, synthetic construct
  REGION 1..7: note = Description of Artificial Sequence: Synthetic peptide
ATSDRPV

SEQ ID NO: 9693 - protein, 7 aa, synthetic construct
  REGION 1..7: note = Description of Artificial Sequence: Synthetic peptide
SASHSAS

SEQ ID NO: 9694 - protein, 7 aa, synthetic construct
  REGION 1..7: note = Description of Artificial Sequence: Synthetic peptide
MSSNPKT

SEQ ID NO: 9695 - protein, 7 aa, synthetic construct
  REGION 1..7: note = Description of Artificial Sequence: Synthetic peptide
DQRNGPT

SEQ ID NO: 9696 - protein, 7 aa, synthetic construct
  REGION 1..7: note = Description of Artificial Sequence: Synthetic peptide
ESRNNGH

SEQ ID NO: 9697 - protein, 7 aa, synthetic construct
  REGION 1..7: note = Description of Artificial Sequence: Synthetic peptide
SSSKGHV

SEQ ID NO: 9698 - protein, 7 aa, synthetic construct
  REGION 1..7: note = Description of Artificial Sequence: Synthetic peptide
GGTQQNL

SEQ ID NO: 9699 - protein, 7 aa, synthetic construct
  REGION 1..7: note = Description of Artificial Sequence: Synthetic peptide
QQGTKST

SEQ ID NO: 9700 - protein, 7 aa, synthetic construct
  REGION 1..7: note = Description of Artificial Sequence: Synthetic peptide
NGGGKGG

SEQ ID NO: 9701 - protein, 7 aa, synthetic construct
  REGION 1..7: note = Description of Artificial Sequence: Synthetic peptide
NTSNKDT

SEQ ID NO: 9702 - protein, 7 aa, synthetic construct
  REGION 1..7: note = Description of Artificial Sequence: Synthetic peptide
NRSKQGD

SEQ ID NO: 9703 - protein, 7 aa, synthetic construct
  REGION 1..7: note = Description of Artificial Sequence: Synthetic peptide
NSLTANK

SEQ ID NO: 9704 - protein, 7 aa, synthetic construct
  REGION 1..7: note = Description of Artificial Sequence: Synthetic peptide
NLGTGGT

SEQ ID NO: 9705 - protein, 7 aa, synthetic construct
  REGION 1..7: note = Description of Artificial Sequence: Synthetic peptide
TQHGERS

SEQ ID NO: 9706 - protein, 7 aa, synthetic construct
  REGION 1..7: note = Description of Artificial Sequence: Synthetic peptide
SKSNGAS

SEQ ID NO: 9707 - protein, 7 aa, synthetic construct
  REGION 1..7: note = Description of Artificial Sequence: Synthetic peptide
SPTSSPG

SEQ ID NO: 9708 - protein, 7 aa, synthetic construct
  REGION 1..7: note = Description of Artificial Sequence: Synthetic peptide
SESSRSA

SEQ ID NO: 9709 - protein, 7 aa, synthetic construct
  REGION 1..7: note = Description of Artificial Sequence: Synthetic peptide
SAPSGKA

SEQ ID NO: 9710 - protein, 7 aa, synthetic construct
  REGION 1..7: note = Description of Artificial Sequence: Synthetic peptide
SGGSGPQ

SEQ ID NO: 9711 - protein, 7 aa, synthetic construct
  REGION 1..7: note = Description of Artificial Sequence: Synthetic peptide
SSNTSAT

SEQ ID NO: 9712 - protein, 7 aa, synthetic construct
  REGION 1..7: note = Description of Artificial Sequence: Synthetic peptide
MREDQVR

SEQ ID NO: 9713 - protein, 7 aa, synthetic construct
  REGION 1..7: note = Description of Artificial Sequence: Synthetic peptide
QSTPALS

SEQ ID NO: 9714 - protein, 7 aa, synthetic construct
  REGION 1..7: note = Description of Artificial Sequence: Synthetic peptide
LRETKIN

SEQ ID NO: 9715 - protein, 7 aa, synthetic construct
  REGION 1..7: note = Description of Artificial Sequence: Synthetic peptide
LSRDKIE

SEQ ID NO: 9716 - protein, 7 aa, synthetic construct
  REGION 1..7: note = Description of Artificial Sequence: Synthetic peptide
LRGGEGA

SEQ ID NO: 9717 - protein, 7 aa, synthetic construct
  REGION 1..7: note = Description of Artificial Sequence: Synthetic peptide
DNGNARS

SEQ ID NO: 9718 - protein, 7 aa, synthetic construct
  REGION 1..7: note = Description of Artificial Sequence: Synthetic peptide
ANTGHMA

SEQ ID NO: 9719 - protein, 7 aa, synthetic construct
  REGION 1..7: note = Description of Artificial Sequence: Synthetic peptide
AHTKENS

SEQ ID NO: 9720 - protein, 7 aa, synthetic construct
  REGION 1..7: note = Description of Artificial Sequence: Synthetic peptide
ADKGVGG

SEQ ID NO: 9721 - protein, 7 aa, synthetic construct
  REGION 1..7: note = Description of Artificial Sequence: Synthetic peptide
AGHGTSA

SEQ ID NO: 9722 - protein, 7 aa, synthetic construct
  REGION 1..7: note = Description of Artificial Sequence: Synthetic peptide
AVAQSNN

SEQ ID NO: 9723 - protein, 7 aa, synthetic construct
  REGION 1..7: note = Description of Artificial Sequence: Synthetic peptide
GSSGSST

SEQ ID NO: 9724 - protein, 7 aa, synthetic construct
  REGION 1..7: note = Description of Artificial Sequence: Synthetic peptide
GGIDGKN

SEQ ID NO: 9725 - protein, 7 aa, synthetic construct
  REGION 1..7: note = Description of Artificial Sequence: Synthetic peptide
GVPNRAG

SEQ ID NO: 9726 - protein, 7 aa, synthetic construct
  REGION 1..7: note = Description of Artificial Sequence: Synthetic peptide
GRSDSVH

SEQ ID NO: 9727 - protein, 7 aa, synthetic construct
  REGION 1..7: note = Description of Artificial Sequence: Synthetic peptide
VTQGTAS

SEQ ID NO: 9728 - protein, 7 aa, synthetic construct
  REGION 1..7: note = Description of Artificial Sequence: Synthetic peptide
YGQQPGG

SEQ ID NO: 9729 - protein, 7 aa, synthetic construct
  REGION 1..7: note = Description of Artificial Sequence: Synthetic peptide
SAKANSV

SEQ ID NO: 9730 - protein, 7 aa, synthetic construct
  REGION 1..7: note = Description of Artificial Sequence: Synthetic peptide
SATGTHS

SEQ ID NO: 9731 - protein, 7 aa, synthetic construct
  REGION 1..7: note = Description of Artificial Sequence: Synthetic peptide
LNSTKPA

SEQ ID NO: 9732 - protein, 7 aa, synthetic construct
  REGION 1..7: note = Description of Artificial Sequence: Synthetic peptide
ATTTSGG

SEQ ID NO: 9733 - protein, 7 aa, synthetic construct
  REGION 1..7: note = Description of Artificial Sequence: Synthetic peptide
DGLPNGR

SEQ ID NO: 9734 - protein, 7 aa, synthetic construct
  REGION 1..7: note = Description of Artificial Sequence: Synthetic peptide
RTNATTS

SEQ ID NO: 9735 - protein, 7 aa, synthetic construct
  REGION 1..7: note = Description of Artificial Sequence: Synthetic peptide
VPTGNHG

SEQ ID NO: 9736 - protein, 7 aa, synthetic construct
  REGION 1..7: note = Description of Artificial Sequence: Synthetic peptide
NGSAHKV

SEQ ID NO: 9737 - protein, 7 aa, synthetic construct
  REGION 1..7: note = Description of Artificial Sequence: Synthetic peptide
STSTTSR

SEQ ID NO: 9738 - protein, 7 aa, synthetic construct
  REGION 1..7: note = Description of Artificial Sequence: Synthetic peptide
HGMGTTT

SEQ ID NO: 9739 - protein, 7 aa, synthetic construct
  REGION 1..7: note = Description of Artificial Sequence: Synthetic peptide
HGGTASH

SEQ ID NO: 9740 - protein, 7 aa, synthetic construct
  REGION 1..7: note = Description of Artificial Sequence: Synthetic peptide
GSHGSTQ

SEQ ID NO: 9741 - protein, 7 aa, synthetic construct
  REGION 1..7: note = Description of Artificial Sequence: Synthetic peptide
HTSDKSA

SEQ ID NO: 9742 - protein, 7 aa, synthetic construct
  REGION 1..7: note = Description of Artificial Sequence: Synthetic peptide
AVHSNST

SEQ ID NO: 9743 - protein, 7 aa, synthetic construct
  REGION 1..7: note = Description of Artificial Sequence: Synthetic peptide
LATSSTV

SEQ ID NO: 9744 - protein, 7 aa, synthetic construct
  REGION 1..7: note = Description of Artificial Sequence: Synthetic peptide
NVDARNN

SEQ ID NO: 9745 - protein, 7 aa, synthetic construct
  REGION 1..7: note = Description of Artificial Sequence: Synthetic peptide
MKSQSAI

SEQ ID NO: 9746 - protein, 7 aa, synthetic construct
  REGION 1..7: note = Description of Artificial Sequence: Synthetic peptide
SPNQQSS

SEQ ID NO: 9747 - protein, 7 aa, synthetic construct
  REGION 1..7: note = Description of Artificial Sequence: Synthetic peptide
NNGTTSA

SEQ ID NO: 9748 - protein, 7 aa, synthetic construct
  REGION 1..7: note = Description of Artificial Sequence: Synthetic peptide
TSAQPNN

SEQ ID NO: 9749 - protein, 7 aa, synthetic construct
  REGION 1..7: note = Description of Artificial Sequence: Synthetic peptide
QTTKSSV

SEQ ID NO: 9750 - protein, 7 aa, synthetic construct
  REGION 1..7: note = Description of Artificial Sequence: Synthetic peptide
DSVNKRD

SEQ ID NO: 9751 - protein, 7 aa, synthetic construct
  REGION 1..7: note = Description of Artificial Sequence: Synthetic peptide
ATPGTSG

SEQ ID NO: 9752 - protein, 7 aa, synthetic construct
  REGION 1..7: note = Description of Artificial Sequence: Synthetic peptide
GVSSTAV

SEQ ID NO: 9753 - protein, 7 aa, synthetic construct
  REGION 1..7: note = Description of Artificial Sequence: Synthetic peptide
QRGGDSA

SEQ ID NO: 9754 - protein, 7 aa, synthetic construct
  REGION 1..7: note = Description of Artificial Sequence: Synthetic peptide
ATSNNSR

SEQ ID NO: 9755 - protein, 7 aa, synthetic construct
  REGION 1..7: note = Description of Artificial Sequence: Synthetic peptide
TKANSSE

SEQ ID NO: 9756 - protein, 7 aa, synthetic construct
  REGION 1..7: note = Description of Artificial Sequence: Synthetic peptide
SSGEQSR

SEQ ID NO: 9757 - protein, 7 aa, synthetic construct
  REGION 1..7: note = Description of Artificial Sequence: Synthetic peptide
SLNDSRR

SEQ ID NO: 9758 - protein, 7 aa, synthetic construct
  REGION 1..7: note = Description of Artificial Sequence: Synthetic peptide
HGSQAPA

SEQ ID NO: 9759 - protein, 7 aa, synthetic construct
  REGION 1..7: note = Description of Artificial Sequence: Synthetic peptide
YPDKSPI

SEQ ID NO: 9760 - protein, 7 aa, synthetic construct
  REGION 1..7: note = Description of Artificial Sequence: Synthetic peptide
NADRDNK

SEQ ID NO: 9761 - protein, 7 aa, synthetic construct
  REGION 1..7: note = Description of Artificial Sequence: Synthetic peptide
TKGGTTG

SEQ ID NO: 9762 - protein, 7 aa, synthetic construct
  REGION 1..7: note = Description of Artificial Sequence: Synthetic peptide
RQLPDKD

SEQ ID NO: 9763 - protein, 7 aa, synthetic construct
  REGION 1..7: note = Description of Artificial Sequence: Synthetic peptide
STSTGKS

SEQ ID NO: 9764 - protein, 7 aa, synthetic construct
  REGION 1..7: note = Description of Artificial Sequence: Synthetic peptide
NSGGNKN

SEQ ID NO: 9765 - protein, 7 aa, synthetic construct
  REGION 1..7: note = Description of Artificial Sequence: Synthetic peptide
SSRSSTV

SEQ ID NO: 9766 - protein, 7 aa, synthetic construct
  REGION 1..7: note = Description of Artificial Sequence: Synthetic peptide
SSPQGGN

SEQ ID NO: 9767 - protein, 7 aa, synthetic construct
  REGION 1..7: note = Description of Artificial Sequence: Synthetic peptide
SITGKGG

SEQ ID NO: 9768 - protein, 7 aa, synthetic construct
  REGION 1..7: note = Description of Artificial Sequence: Synthetic peptide
ISGAGSK

SEQ ID NO: 9769 - protein, 7 aa, synthetic construct
  REGION 1..7: note = Description of Artificial Sequence: Synthetic peptide
ASTDSRG

SEQ ID NO: 9770 - protein, 7 aa, synthetic construct
  REGION 1..7: note = Description of Artificial Sequence: Synthetic peptide
ALGTGKE

SEQ ID NO: 9771 - protein, 7 aa, synthetic construct
  REGION 1..7: note = Description of Artificial Sequence: Synthetic peptide
TGHPSTA

SEQ ID NO: 9772 - protein, 7 aa, synthetic construct
  REGION 1..7: note = Description of Artificial Sequence: Synthetic peptide
QSHSASS

SEQ ID NO: 9773 - protein, 7 aa, synthetic construct
  REGION 1..7: note = Description of Artificial Sequence: Synthetic peptide
DSQVKAM

SEQ ID NO: 9774 - protein, 7 aa, synthetic construct
  REGION 1..7: note = Description of Artificial Sequence: Synthetic peptide
SKDTQLI

SEQ ID NO: 9775 - protein, 7 aa, synthetic construct
  REGION 1..7: note = Description of Artificial Sequence: Synthetic peptide
TNDPRSS

SEQ ID NO: 9776 - protein, 7 aa, synthetic construct
  REGION 1..7: note = Description of Artificial Sequence: Synthetic peptide
SATKAGG

SEQ ID NO: 9777 - protein, 7 aa, synthetic construct
  REGION 1..7: note = Description of Artificial Sequence: Synthetic peptide
SGNKPEV

SEQ ID NO: 9778 - protein, 7 aa, synthetic construct
  REGION 1..7: note = Description of Artificial Sequence: Synthetic peptide
QANRNSG

SEQ ID NO: 9779 - protein, 7 aa, synthetic construct
  REGION 1..7: note = Description of Artificial Sequence: Synthetic peptide
DSAGSGK

SEQ ID NO: 9780 - protein, 7 aa, synthetic construct
  REGION 1..7: note = Description of Artificial Sequence: Synthetic peptide
GSNNNGQ

SEQ ID NO: 9781 - protein, 7 aa, synthetic construct
  REGION 1..7: note = Description of Artificial Sequence: Synthetic peptide
GRSGDTN

SEQ ID NO: 9782 - protein, 7 aa, synthetic construct
  REGION 1..7: note = Description of Artificial Sequence: Synthetic peptide
SKANSQM

SEQ ID NO: 9783 - protein, 7 aa, synthetic construct
  REGION 1..7: note = Description of Artificial Sequence: Synthetic peptide
SSGKSGM

SEQ ID NO: 9784 - protein, 7 aa, synthetic construct
  REGION 1..7: note = Description of Artificial Sequence: Synthetic peptide
SSATAQG

SEQ ID NO: 9785 - protein, 7 aa, synthetic construct
  REGION 1..7: note = Description of Artificial Sequence: Synthetic peptide
TRTNANG

SEQ ID NO: 9786 - protein, 7 aa, synthetic construct
  REGION 1..7: note = Description of Artificial Sequence: Synthetic peptide
LNSEKAP

SEQ ID NO: 9787 - protein, 7 aa, synthetic construct
  REGION 1..7: note = Description of Artificial Sequence: Synthetic peptide
EKMSSSS

SEQ ID NO: 9788 - protein, 7 aa, synthetic construct
  REGION 1..7: note = Description of Artificial Sequence: Synthetic peptide
ASISGAG

SEQ ID NO: 9789 - protein, 7 aa, synthetic construct
  REGION 1..7: note = Description of Artificial Sequence: Synthetic peptide
GTRSQSQ

SEQ ID NO: 9790 - protein, 7 aa, synthetic construct
  REGION 1..7: note = Description of Artificial Sequence: Synthetic peptide
VSGKTSA

SEQ ID NO: 9791 - protein, 7 aa, synthetic construct
  REGION 1..7: note = Description of Artificial Sequence: Synthetic peptide
TGVNNHH

SEQ ID NO: 9792 - protein, 7 aa, synthetic construct
  REGION 1..7: note = Description of Artificial Sequence: Synthetic peptide
SGDHHKT

SEQ ID NO: 9793 - protein, 7 aa, synthetic construct
  REGION 1..7: note = Description of Artificial Sequence: Synthetic peptide
LPSGVTK

SEQ ID NO: 9794 - protein, 7 aa, synthetic construct
  REGION 1..7: note = Description of Artificial Sequence: Synthetic peptide
LSGGTML

SEQ ID NO: 9795 - protein, 7 aa, synthetic construct
  REGION 1..7: note = Description of Artificial Sequence: Synthetic peptide
ASTGSTA

SEQ ID NO: 9796 - protein, 7 aa, synthetic construct
  REGION 1..7: note = Description of Artificial Sequence: Synthetic peptide
LQSSGNR

SEQ ID NO: 9797 - protein, 7 aa, synthetic construct
  REGION 1..7: note = Description of Artificial Sequence: Synthetic peptide
MSTSHSV

SEQ ID NO: 9798 - protein, 7 aa, synthetic construct
  REGION 1..7: note = Description of Artificial Sequence: Synthetic peptide
GAGNHAS

SEQ ID NO: 9799 - protein, 7 aa, synthetic construct
  REGION 1..7: note = Description of Artificial Sequence: Synthetic peptide
TKTETNA

SEQ ID NO: 9800 - protein, 7 aa, synthetic construct
  REGION 1..7: note = Description of Artificial Sequence: Synthetic peptide
DRGQGQM

SEQ ID NO: 9801 - protein, 7 aa, synthetic construct
  REGION 1..7: note = Description of Artificial Sequence: Synthetic peptide
GSSTNNV

SEQ ID NO: 9802 - protein, 7 aa, synthetic construct
  REGION 1..7: note = Description of Artificial Sequence: Synthetic peptide
FAGNTQA

SEQ ID NO: 9803 - protein, 7 aa, synthetic construct
  REGION 1..7: note = Description of Artificial Sequence: Synthetic peptide
SVSNSSQ

SEQ ID NO: 9804 - protein, 7 aa, synthetic construct
  REGION 1..7: note = Description of Artificial Sequence: Synthetic peptide
QSTKPSG

SEQ ID NO: 9805 - protein, 7 aa, synthetic construct
  REGION 1..7: note = Description of Artificial Sequence: Synthetic peptide
IPAKSTS

SEQ ID NO: 9806 - protein, 7 aa, synthetic construct
  REGION 1..7: note = Description of Artificial Sequence: Synthetic peptide
AGRDSLT

SEQ ID NO: 9807 - protein, 7 aa, synthetic construct
  REGION 1..7: note = Description of Artificial Sequence: Synthetic peptide
SNSKDTT

SEQ ID NO: 9808 - protein, 7 aa, synthetic construct
  REGION 1..7: note = Description of Artificial Sequence: Synthetic peptide
NTRNPAA

SEQ ID NO: 9809 - protein, 7 aa, synthetic construct
  REGION 1..7: note = Description of Artificial Sequence: Synthetic peptide
NYDAKSA

SEQ ID NO: 9810 - protein, 7 aa, synthetic construct
  REGION 1..7: note = Description of Artificial Sequence: Synthetic peptide
ESSGSRL

SEQ ID NO: 9811 - protein, 7 aa, synthetic construct
  REGION 1..7: note = Description of Artificial Sequence: Synthetic peptide
TNNTPSG

SEQ ID NO: 9812 - protein, 7 aa, synthetic construct
  REGION 1..7: note = Description of Artificial Sequence: Synthetic peptide
SPGSKVS

SEQ ID NO: 9813 - protein, 7 aa, synthetic construct
  REGION 1..7: note = Description of Artificial Sequence: Synthetic peptide
SGTTPSV

SEQ ID NO: 9814 - protein, 7 aa, synthetic construct
  REGION 1..7: note = Description of Artificial Sequence: Synthetic peptide
SGTVKLD

SEQ ID NO: 9815 - protein, 7 aa, synthetic construct
  REGION 1..7: note = Description of Artificial Sequence: Synthetic peptide
KEDRNTS

SEQ ID NO: 9816 - protein, 7 aa, synthetic construct
  REGION 1..7: note = Description of Artificial Sequence: Synthetic peptide
SGGGSLG

SEQ ID NO: 9817 - protein, 7 aa, synthetic construct
  REGION 1..7: note = Description of Artificial Sequence: Synthetic peptide
QAAAHTS

SEQ ID NO: 9818 - protein, 7 aa, synthetic construct
  REGION 1..7: note = Description of Artificial Sequence: Synthetic peptide
DGGAGVV

SEQ ID NO: 9819 - protein, 7 aa, synthetic construct
  REGION 1..7: note = Description of Artificial Sequence: Synthetic peptide
GSGKMNV

SEQ ID NO: 9820 - protein, 7 aa, synthetic construct
  REGION 1..7: note = Description of Artificial Sequence: Synthetic peptide
GLVNQQQ

SEQ ID NO: 9821 - protein, 7 aa, synthetic construct
  REGION 1..7: note = Description of Artificial Sequence: Synthetic peptide
VSGSTTT

SEQ ID NO: 9822 - protein, 7 aa, synthetic construct
  REGION 1..7: note = Description of Artificial Sequence: Synthetic peptide
SSFKGGG

SEQ ID NO: 9823 - protein, 7 aa, synthetic construct
  REGION 1..7: note = Description of Artificial Sequence: Synthetic peptide
SSAQSPS

SEQ ID NO: 9824 - protein, 7 aa, synthetic construct
  REGION 1..7: note = Description of Artificial Sequence: Synthetic peptide
VESKPSR

SEQ ID NO: 9825 - protein, 7 aa, synthetic construct
  REGION 1..7: note = Description of Artificial Sequence: Synthetic peptide
SASERNL

SEQ ID NO: 9826 - protein, 7 aa, synthetic construct
  REGION 1..7: note = Description of Artificial Sequence: Synthetic peptide
DSKEHSQ

SEQ ID NO: 9827 - protein, 7 aa, synthetic construct
  REGION 1..7: note = Description of Artificial Sequence: Synthetic peptide
ASDKVRN

SEQ ID NO: 9828 - protein, 7 aa, synthetic construct
  REGION 1..7: note = Description of Artificial Sequence: Synthetic peptide
GVDSNRN

SEQ ID NO: 9829 - protein, 7 aa, synthetic construct
  REGION 1..7: note = Description of Artificial Sequence: Synthetic peptide
LSGQRVE

SEQ ID NO: 9830 - protein, 7 aa, synthetic construct
  REGION 1..7: note = Description of Artificial Sequence: Synthetic peptide
YITKEAG

SEQ ID NO: 9831 - protein, 7 aa, synthetic construct
  REGION 1..7: note = Description of Artificial Sequence: Synthetic peptide
TSNTTHQ

SEQ ID NO: 9832 - protein, 7 aa, synthetic construct
  REGION 1..7: note = Description of Artificial Sequence: Synthetic peptide
RKEDVQR

SEQ ID NO: 9833 - protein, 7 aa, synthetic construct
  REGION 1..7: note = Description of Artificial Sequence: Synthetic peptide
MGTQGNG

SEQ ID NO: 9834 - protein, 7 aa, synthetic construct
  REGION 1..7: note = Description of Artificial Sequence: Synthetic peptide
LATDGPK

SEQ ID NO: 9835 - protein, 7 aa, synthetic construct
  REGION 1..7: note = Description of Artificial Sequence: Synthetic peptide
VGTPRSE

SEQ ID NO: 9836 - protein, 7 aa, synthetic construct
  REGION 1..7: note = Description of Artificial Sequence: Synthetic peptide
GPNHTTK

SEQ ID NO: 9837 - protein, 7 aa, synthetic construct
  REGION 1..7: note = Description of Artificial Sequence: Synthetic peptide
HVGTNNS

SEQ ID NO: 9838 - protein, 7 aa, synthetic construct
  REGION 1..7: note = Description of Artificial Sequence: Synthetic peptide
GTGPGGS

SEQ ID NO: 9839 - protein, 7 aa, synthetic construct
  REGION 1..7: note = Description of Artificial Sequence: Synthetic peptide
KNGENNR

SEQ ID NO: 9840 - protein, 7 aa, synthetic construct
  REGION 1..7: note = Description of Artificial Sequence: Synthetic peptide
SSEKTMS

SEQ ID NO: 9841 - protein, 7 aa, synthetic construct
  REGION 1..7: note = Description of Artificial Sequence: Synthetic peptide
GGSASAR

SEQ ID NO: 9842 - protein, 7 aa, synthetic construct
  REGION 1..7: note = Description of Artificial Sequence: Synthetic peptide
GSGARKD

SEQ ID NO: 9843 - protein, 7 aa, synthetic construct
  REGION 1..7: note = Description of Artificial Sequence: Synthetic peptide
GATGASS

SEQ ID NO: 9844 - protein, 7 aa, synthetic construct
  REGION 1..7: note = Description of Artificial Sequence: Synthetic peptide
GLGAQPT

SEQ ID NO: 9845 - protein, 7 aa, synthetic construct
  REGION 1..7: note = Description of Artificial Sequence: Synthetic peptide
VPTTTAK

SEQ ID NO: 9846 - protein, 7 aa, synthetic construct
  REGION 1..7: note = Description of Artificial Sequence: Synthetic peptide
RSDKRNE

SEQ ID NO: 9847 - protein, 7 aa, synthetic construct
  REGION 1..7: note = Description of Artificial Sequence: Synthetic peptide
QGVSGGS

SEQ ID NO: 9848 - protein, 7 aa, synthetic construct
  REGION 1..7: note = Description of Artificial Sequence: Synthetic peptide
LSSKDVA

SEQ ID NO: 9849 - protein, 7 aa, synthetic construct
  REGION 1..7: note = Description of Artificial Sequence: Synthetic peptide
DNLNKTN

SEQ ID NO: 9850 - protein, 7 aa, synthetic construct
  REGION 1..7: note = Description of Artificial Sequence: Synthetic peptide
GINTKSA

SEQ ID NO: 9851 - protein, 7 aa, synthetic construct
  REGION 1..7: note = Description of Artificial Sequence: Synthetic peptide
VATGAAK

SEQ ID NO: 9852 - protein, 7 aa, synthetic construct
  REGION 1..7: note = Description of Artificial Sequence: Synthetic peptide
NPNKPGT

SEQ ID NO: 9853 - protein, 7 aa, synthetic construct
  REGION 1..7: note = Description of Artificial Sequence: Synthetic peptide
VATQETK

SEQ ID NO: 9854 - protein, 7 aa, synthetic construct
  REGION 1..7: note = Description of Artificial Sequence: Synthetic peptide
DMSNKTV

SEQ ID NO: 9855 - protein, 7 aa, synthetic construct
  REGION 1..7: note = Description of Artificial Sequence: Synthetic peptide
AGGASNS

SEQ ID NO: 9856 - protein, 7 aa, synthetic construct
  REGION 1..7: note = Description of Artificial Sequence: Synthetic peptide
VTSTKPD

SEQ ID NO: 9857 - protein, 7 aa, synthetic construct
  REGION 1..7: note = Description of Artificial Sequence: Synthetic peptide
LSTKSVS

SEQ ID NO: 9858 - protein, 7 aa, synthetic construct
  REGION 1..7: note = Description of Artificial Sequence: Synthetic peptide
SAGGGSR

SEQ ID NO: 9859 - protein, 7 aa, synthetic construct
  REGION 1..7: note = Description of Artificial Sequence: Synthetic peptide
SGVTNSV

SEQ ID NO: 9860 - protein, 7 aa, synthetic construct
  REGION 1..7: note = Description of Artificial Sequence: Synthetic peptide
QHNDPKS

SEQ ID NO: 9861 - protein, 7 aa, synthetic construct
  REGION 1..7: note = Description of Artificial Sequence: Synthetic peptide
ENKNKST

SEQ ID NO: 9862 - protein, 7 aa, synthetic construct
  REGION 1..7: note = Description of Artificial Sequence: Synthetic peptide
EVPSQTR

SEQ ID NO: 9863 - protein, 7 aa, synthetic construct
  REGION 1..7: note = Description of Artificial Sequence: Synthetic peptide
AKTRETT

SEQ ID NO: 9864 - protein, 7 aa, synthetic construct
  REGION 1..7: note = Description of Artificial Sequence: Synthetic peptide
VTGTGSP

SEQ ID NO: 9865 - protein, 7 aa, synthetic construct
  REGION 1..7: note = Description of Artificial Sequence: Synthetic peptide
SAQQTGS

SEQ ID NO: 9866 - protein, 7 aa, synthetic construct
  REGION 1..7: note = Description of Artificial Sequence: Synthetic peptide
SPQSPSS

SEQ ID NO: 9867 - protein, 7 aa, synthetic construct
  REGION 1..7: note = Description of Artificial Sequence: Synthetic peptide
NSSKSPI

SEQ ID NO: 9868 - protein, 7 aa, synthetic construct
  REGION 1..7: note = Description of Artificial Sequence: Synthetic peptide
AVSDKGI

SEQ ID NO: 9869 - protein, 7 aa, synthetic construct
  REGION 1..7: note = Description of Artificial Sequence: Synthetic peptide
TGNASTA

SEQ ID NO: 9870 - protein, 7 aa, synthetic construct
  REGION 1..7: note = Description of Artificial Sequence: Synthetic peptide
TGAATVM

SEQ ID NO: 9871 - protein, 7 aa, synthetic construct
  REGION 1..7: note = Description of Artificial Sequence: Synthetic peptide
SQTDYKG

SEQ ID NO: 9872 - protein, 7 aa, synthetic construct
  REGION 1..7: note = Description of Artificial Sequence: Synthetic peptide
ASGHGAS

SEQ ID NO: 9873 - protein, 7 aa, synthetic construct
  REGION 1..7: note = Description of Artificial Sequence: Synthetic peptide
AGTSAPN

SEQ ID NO: 9874 - protein, 7 aa, synthetic construct
  REGION 1..7: note = Description of Artificial Sequence: Synthetic peptide
GPGTSNT

SEQ ID NO: 9875 - protein, 7 aa, synthetic construct
  REGION 1..7: note = Description of Artificial Sequence: Synthetic peptide
SQHTPPS

SEQ ID NO: 9876 - protein, 7 aa, synthetic construct
  REGION 1..7: note = Description of Artificial Sequence: Synthetic peptide
ENRTQNS

SEQ ID NO: 9877 - protein, 7 aa, synthetic construct
  REGION 1..7: note = Description of Artificial Sequence: Synthetic peptide
TMSNPGV

SEQ ID NO: 9878 - protein, 7 aa, synthetic construct
  REGION 1..7: note = Description of Artificial Sequence: Synthetic peptide
QTNKISV

SEQ ID NO: 9879 - protein, 7 aa, synthetic construct
  REGION 1..7: note = Description of Artificial Sequence: Synthetic peptide
SDGQTRS

SEQ ID NO: 9880 - protein, 7 aa, synthetic construct
  REGION 1..7: note = Description of Artificial Sequence: Synthetic peptide
SAKPQSK

SEQ ID NO: 9881 - protein, 7 aa, synthetic construct
  REGION 1..7: note = Description of Artificial Sequence: Synthetic peptide
FRTTATE

SEQ ID NO: 9882 - protein, 7 aa, synthetic construct
  REGION 1..7: note = Description of Artificial Sequence: Synthetic peptide
ERSGTPS

SEQ ID NO: 9883 - protein, 7 aa, synthetic construct
  REGION 1..7: note = Description of Artificial Sequence: Synthetic peptide
ALSDSRS

SEQ ID NO: 9884 - protein, 7 aa, synthetic construct
  REGION 1..7: note = Description of Artificial Sequence: Synthetic peptide
ADTKTGS

SEQ ID NO: 9885 - protein, 7 aa, synthetic construct
  REGION 1..7: note = Description of Artificial Sequence: Synthetic peptide
GTPSNNT

SEQ ID NO: 9886 - protein, 7 aa, synthetic construct
  REGION 1..7: note = Description of Artificial Sequence: Synthetic peptide
STGSAFS

SEQ ID NO: 9887 - protein, 7 aa, synthetic construct
  REGION 1..7: note = Description of Artificial Sequence: Synthetic peptide
ATVSKPA

SEQ ID NO: 9888 - protein, 7 aa, synthetic construct
  REGION 1..7: note = Description of Artificial Sequence: Synthetic peptide
NMGQNGV

SEQ ID NO: 9889 - protein, 7 aa, synthetic construct
  REGION 1..7: note = Description of Artificial Sequence: Synthetic peptide
SSIPSEK

SEQ ID NO: 9890 - protein, 7 aa, synthetic construct
  REGION 1..7: note = Description of Artificial Sequence: Synthetic peptide
SPESRAS

SEQ ID NO: 9891 - protein, 7 aa, synthetic construct
  REGION 1..7: note = Description of Artificial Sequence: Synthetic peptide
SNSKEQL

SEQ ID NO: 9892 - protein, 7 aa, synthetic construct
  REGION 1..7: note = Description of Artificial Sequence: Synthetic peptide
STRTSTS

SEQ ID NO: 9893 - protein, 7 aa, synthetic construct
  REGION 1..7: note = Description of Artificial Sequence: Synthetic peptide
SIQSPSS

SEQ ID NO: 9894 - protein, 7 aa, synthetic construct
  REGION 1..7: note = Description of Artificial Sequence: Synthetic peptide
LDNKTVI

SEQ ID NO: 9895 - protein, 7 aa, synthetic construct
  REGION 1..7: note = Description of Artificial Sequence: Synthetic peptide
EPSTISR

SEQ ID NO: 9896 - protein, 7 aa, synthetic construct
  REGION 1..7: note = Description of Artificial Sequence: Synthetic peptide
EGTSESK

SEQ ID NO: 9897 - protein, 7 aa, synthetic construct
  REGION 1..7: note = Description of Artificial Sequence: Synthetic peptide
GQSTSTA

SEQ ID NO: 9898 - protein, 7 aa, synthetic construct
  REGION 1..7: note = Description of Artificial Sequence: Synthetic peptide
VNGPNPT

SEQ ID NO: 9899 - protein, 7 aa, synthetic construct
  REGION 1..7: note = Description of Artificial Sequence: Synthetic peptide
NDTRGGQ

SEQ ID NO: 9900 - protein, 7 aa, synthetic construct
  REGION 1..7: note = Description of Artificial Sequence: Synthetic peptide
QGDRDVH

SEQ ID NO: 9901 - protein, 7 aa, synthetic construct
  REGION 1..7: note = Description of Artificial Sequence: Synthetic peptide
LQNASPG

SEQ ID NO: 9902 - protein, 7 aa, synthetic construct
  REGION 1..7: note = Description of Artificial Sequence: Synthetic peptide
AAPTTPG

SEQ ID NO: 9903 - protein, 7 aa, synthetic construct
  REGION 1..7: note = Description of Artificial Sequence: Synthetic peptide
GGQASGH

SEQ ID NO: 9904 - protein, 7 aa, synthetic construct
  REGION 1..7: note = Description of Artificial Sequence: Synthetic peptide
TNLPTVA

SEQ ID NO: 9905 - protein, 7 aa, synthetic construct
  REGION 1..7: note = Description of Artificial Sequence: Synthetic peptide
SGREDMR

SEQ ID NO: 9906 - protein, 7 aa, synthetic construct
  REGION 1..7: note = Description of Artificial Sequence: Synthetic peptide
GKSNERG

SEQ ID NO: 9907 - protein, 7 aa, synthetic construct
  REGION 1..7: note = Description of Artificial Sequence: Synthetic peptide
NGSTNSR

SEQ ID NO: 9908 - protein, 7 aa, synthetic construct
  REGION 1..7: note = Description of Artificial Sequence: Synthetic peptide
SQSKSFQ

SEQ ID NO: 9909 - protein, 7 aa, synthetic construct
  REGION 1..7: note = Description of Artificial Sequence: Synthetic peptide
ETPSKQT

SEQ ID NO: 9910 - protein, 7 aa, synthetic construct
  REGION 1..7: note = Description of Artificial Sequence: Synthetic peptide
ESSHTSR

SEQ ID NO: 9911 - protein, 7 aa, synthetic construct
  REGION 1..7: note = Description of Artificial Sequence: Synthetic peptide
GDNDSRK

SEQ ID NO: 9912 - protein, 7 aa, synthetic construct
  REGION 1..7: note = Description of Artificial Sequence: Synthetic peptide
RTENARS

SEQ ID NO: 9913 - protein, 7 aa, synthetic construct
  REGION 1..7: note = Description of Artificial Sequence: Synthetic peptide
MGGTAQG

SEQ ID NO: 9914 - protein, 7 aa, synthetic construct
  REGION 1..7: note = Description of Artificial Sequence: Synthetic peptide
AATGQHT

SEQ ID NO: 9915 - protein, 7 aa, synthetic construct
  REGION 1..7: note = Description of Artificial Sequence: Synthetic peptide
GTSSAPQ

SEQ ID NO: 9916 - protein, 7 aa, synthetic construct
  REGION 1..7: note = Description of Artificial Sequence: Synthetic peptide
SPNAKRD

SEQ ID NO: 9917 - protein, 7 aa, synthetic construct
  REGION 1..7: note = Description of Artificial Sequence: Synthetic peptide
AVGNSGK

SEQ ID NO: 9918 - protein, 7 aa, synthetic construct
  REGION 1..7: note = Description of Artificial Sequence: Synthetic peptide
SGRGSPM

SEQ ID NO: 9919 - protein, 7 aa, synthetic construct
  REGION 1..7: note = Description of Artificial Sequence: Synthetic peptide
SSQTTSS

SEQ ID NO: 9920 - protein, 7 aa, synthetic construct
  REGION 1..7: note = Description of Artificial Sequence: Synthetic peptide
NTGSGSA

SEQ ID NO: 9921 - protein, 7 aa, synthetic construct
  REGION 1..7: note = Description of Artificial Sequence: Synthetic peptide
QKIDTVR

SEQ ID NO: 9922 - protein, 7 aa, synthetic construct
  REGION 1..7: note = Description of Artificial Sequence: Synthetic peptide
GTHANAK

SEQ ID NO: 9923 - protein, 7 aa, synthetic construct
  REGION 1..7: note = Description of Artificial Sequence: Synthetic peptide
GVSKSLS

SEQ ID NO: 9924 - protein, 7 aa, synthetic construct
  REGION 1..7: note = Description of Artificial Sequence: Synthetic peptide
GTQSSRQ

SEQ ID NO: 9925 - protein, 7 aa, synthetic construct
  REGION 1..7: note = Description of Artificial Sequence: Synthetic peptide
NSTGTST

SEQ ID NO: 9926 - protein, 7 aa, synthetic construct
  REGION 1..7: note = Description of Artificial Sequence: Synthetic peptide
TRNTEVH

SEQ ID NO: 9927 - protein, 7 aa, synthetic construct
  REGION 1..7: note = Description of Artificial Sequence: Synthetic peptide
TPRATAE

SEQ ID NO: 9928 - protein, 7 aa, synthetic construct
  REGION 1..7: note = Description of Artificial Sequence: Synthetic peptide
NQSNTTV

SEQ ID NO: 9929 - protein, 7 aa, synthetic construct
  REGION 1..7: note = Description of Artificial Sequence: Synthetic peptide
TPIQDAK

SEQ ID NO: 9930 - protein, 7 aa, synthetic construct
  REGION 1..7: note = Description of Artificial Sequence: Synthetic peptide
SANSDRS

SEQ ID NO: 9931 - protein, 7 aa, synthetic construct
  REGION 1..7: note = Description of Artificial Sequence: Synthetic peptide
TPNAHPQ

SEQ ID NO: 9932 - protein, 7 aa, synthetic construct
  REGION 1..7: note = Description of Artificial Sequence: Synthetic peptide
SLTKGSV

SEQ ID NO: 9933 - protein, 7 aa, synthetic construct
  REGION 1..7: note = Description of Artificial Sequence: Synthetic peptide
SAAKSST

SEQ ID NO: 9934 - protein, 7 aa, synthetic construct
  REGION 1..7: note = Description of Artificial Sequence: Synthetic peptide
SNSTKTA

SEQ ID NO: 9935 - protein, 7 aa, synthetic construct
  REGION 1..7: note = Description of Artificial Sequence: Synthetic peptide
TNSQTSL

SEQ ID NO: 9936 - protein, 7 aa, synthetic construct
  REGION 1..7: note = Description of Artificial Sequence: Synthetic peptide
KNETSNG

SEQ ID NO: 9937 - protein, 7 aa, synthetic construct
  REGION 1..7: note = Description of Artificial Sequence: Synthetic peptide
NISHKGE

SEQ ID NO: 9938 - protein, 7 aa, synthetic construct
  REGION 1..7: note = Description of Artificial Sequence: Synthetic peptide
NASSKLQ

SEQ ID NO: 9939 - protein, 7 aa, synthetic construct
  REGION 1..7: note = Description of Artificial Sequence: Synthetic peptide
NSGAGLM

SEQ ID NO: 9940 - protein, 7 aa, synthetic construct
  REGION 1..7: note = Description of Artificial Sequence: Synthetic peptide
TMAQNPS

SEQ ID NO: 9941 - protein, 7 aa, synthetic construct
  REGION 1..7: note = Description of Artificial Sequence: Synthetic peptide
THQSGSV

SEQ ID NO: 9942 - protein, 7 aa, synthetic construct
  REGION 1..7: note = Description of Artificial Sequence: Synthetic peptide
TGQQSSI

SEQ ID NO: 9943 - protein, 7 aa, synthetic construct
  REGION 1..7: note = Description of Artificial Sequence: Synthetic peptide
TGGAPGG

SEQ ID NO: 9944 - protein, 7 aa, synthetic construct
  REGION 1..7: note = Description of Artificial Sequence: Synthetic peptide
RDGGASM

SEQ ID NO: 9945 - protein, 7 aa, synthetic construct
  REGION 1..7: note = Description of Artificial Sequence: Synthetic peptide
RGNSNSG

SEQ ID NO: 9946 - protein, 7 aa, synthetic construct
  REGION 1..7: note = Description of Artificial Sequence: Synthetic peptide
SKGDNGG

SEQ ID NO: 9947 - protein, 7 aa, synthetic construct
  REGION 1..7: note = Description of Artificial Sequence: Synthetic peptide
SRPEKVP

SEQ ID NO: 9948 - protein, 7 aa, synthetic construct
  REGION 1..7: note = Description of Artificial Sequence: Synthetic peptide
SSSSPVS

SEQ ID NO: 9949 - protein, 7 aa, synthetic construct
  REGION 1..7: note = Description of Artificial Sequence: Synthetic peptide
IGTGVSS

SEQ ID NO: 9950 - protein, 7 aa, synthetic construct
  REGION 1..7: note = Description of Artificial Sequence: Synthetic peptide
MSGSNPQ

SEQ ID NO: 9951 - protein, 7 aa, synthetic construct
  REGION 1..7: note = Description of Artificial Sequence: Synthetic peptide
IASQKVP

SEQ ID NO: 9952 - protein, 7 aa, synthetic construct
  REGION 1..7: note = Description of Artificial Sequence: Synthetic peptide
LSVSSAG

SEQ ID NO: 9953 - protein, 7 aa, synthetic construct
  REGION 1..7: note = Description of Artificial Sequence: Synthetic peptide
LAASSNA

SEQ ID NO: 9954 - protein, 7 aa, synthetic construct
  REGION 1..7: note = Description of Artificial Sequence: Synthetic peptide
DNTKELR

SEQ ID NO: 9955 - protein, 7 aa, synthetic construct
  REGION 1..7: note = Description of Artificial Sequence: Synthetic peptide
ASGKPGE

SEQ ID NO: 9956 - protein, 7 aa, synthetic construct
  REGION 1..7: note = Description of Artificial Sequence: Synthetic peptide
ASNSRDK

SEQ ID NO: 9957 - protein, 7 aa, synthetic construct
  REGION 1..7: note = Description of Artificial Sequence: Synthetic peptide
GILEKTR

SEQ ID NO: 9958 - protein, 7 aa, synthetic construct
  REGION 1..7: note = Description of Artificial Sequence: Synthetic peptide
GGGSHQS

SEQ ID NO: 9959 - protein, 7 aa, synthetic construct
  REGION 1..7: note = Description of Artificial Sequence: Synthetic peptide
GMDKTSR

SEQ ID NO: 9960 - protein, 7 aa, synthetic construct
  REGION 1..7: note = Description of Artificial Sequence: Synthetic peptide
GSVPDRK

SEQ ID NO: 9961 - protein, 7 aa, synthetic construct
  REGION 1..7: note = Description of Artificial Sequence: Synthetic peptide
GSHERNT

SEQ ID NO: 9962 - protein, 7 aa, synthetic construct
  REGION 1..7: note = Description of Artificial Sequence: Synthetic peptide
GIENLKE

SEQ ID NO: 9963 - protein, 7 aa, synthetic construct
  REGION 1..7: note = Description of Artificial Sequence: Synthetic peptide
GPVSGTG

SEQ ID NO: 9964 - protein, 7 aa, synthetic construct
  REGION 1..7: note = Description of Artificial Sequence: Synthetic peptide
VGAANSQ

SEQ ID NO: 9965 - protein, 7 aa, synthetic construct
  REGION 1..7: note = Description of Artificial Sequence: Synthetic peptide
SSTNTSA

SEQ ID NO: 9966 - protein, 7 aa, synthetic construct
  REGION 1..7: note = Description of Artificial Sequence: Synthetic peptide
FSDSPAK

SEQ ID NO: 9967 - protein, 7 aa, synthetic construct
  REGION 1..7: note = Description of Artificial Sequence: Synthetic peptide
TNDHSTS

SEQ ID NO: 9968 - protein, 7 aa, synthetic construct
  REGION 1..7: note = Description of Artificial Sequence: Synthetic peptide
GSPDPRS

SEQ ID NO: 9969 - protein, 7 aa, synthetic construct
  REGION 1..7: note = Description of Artificial Sequence: Synthetic peptide
TNDSRHE

SEQ ID NO: 9970 - protein, 7 aa, synthetic construct
  REGION 1..7: note = Description of Artificial Sequence: Synthetic peptide
STASSTL

SEQ ID NO: 9971 - protein, 7 aa, synthetic construct
  REGION 1..7: note = Description of Artificial Sequence: Synthetic peptide
MVNKQSS

SEQ ID NO: 9972 - protein, 7 aa, synthetic construct
  REGION 1..7: note = Description of Artificial Sequence: Synthetic peptide
EARSAST

SEQ ID NO: 9973 - protein, 7 aa, synthetic construct
  REGION 1..7: note = Description of Artificial Sequence: Synthetic peptide
GQGSASA

SEQ ID NO: 9974 - protein, 7 aa, synthetic construct
  REGION 1..7: note = Description of Artificial Sequence: Synthetic peptide
DGKSKLA

SEQ ID NO: 9975 - protein, 7 aa, synthetic construct
  REGION 1..7: note = Description of Artificial Sequence: Synthetic peptide
AGTNGLN

SEQ ID NO: 9976 - protein, 7 aa, synthetic construct
  REGION 1..7: note = Description of Artificial Sequence: Synthetic peptide
SVAAAPT

SEQ ID NO: 9977 - protein, 7 aa, synthetic construct
  REGION 1..7: note = Description of Artificial Sequence: Synthetic peptide
SSTNPGT

SEQ ID NO: 9978 - protein, 7 aa, synthetic construct
  REGION 1..7: note = Description of Artificial Sequence: Synthetic peptide
CCTGKSS

SEQ ID NO: 9979 - protein, 7 aa, synthetic construct
  REGION 1..7: note = Description of Artificial Sequence: Synthetic peptide
NSGSTAS

SEQ ID NO: 9980 - protein, 7 aa, synthetic construct
  REGION 1..7: note = Description of Artificial Sequence: Synthetic peptide
TALGSNS

SEQ ID NO: 9981 - protein, 7 aa, synthetic construct
  REGION 1..7: note = Description of Artificial Sequence: Synthetic peptide
SGGGTEN

SEQ ID NO: 9982 - protein, 7 aa, synthetic construct
  REGION 1..7: note = Description of Artificial Sequence: Synthetic peptide
DGGSNKA

SEQ ID NO: 9983 - protein, 7 aa, synthetic construct
  REGION 1..7: note = Description of Artificial Sequence: Synthetic peptide
AATTGGA

SEQ ID NO: 9984 - protein, 7 aa, synthetic construct
  REGION 1..7: note = Description of Artificial Sequence: Synthetic peptide
GPAKTDR

SEQ ID NO: 9985 - protein, 7 aa, synthetic construct
  REGION 1..7: note = Description of Artificial Sequence: Synthetic peptide
GTSNNKI

SEQ ID NO: 9986 - protein, 7 aa, synthetic construct
  REGION 1..7: note = Description of Artificial Sequence: Synthetic peptide
IKNSKEG

SEQ ID NO: 9987 - protein, 7 aa, synthetic construct
  REGION 1..7: note = Description of Artificial Sequence: Synthetic peptide
QPASTSV

SEQ ID NO: 9988 - protein, 7 aa, synthetic construct
  REGION 1..7: note = Description of Artificial Sequence: Synthetic peptide
DSSKTAV

SEQ ID NO: 9989 - protein, 7 aa, synthetic construct
  REGION 1..7: note = Description of Artificial Sequence: Synthetic peptide
GALNGHG

SEQ ID NO: 9990 - protein, 7 aa, synthetic construct
  REGION 1..7: note = Description of Artificial Sequence: Synthetic peptide
WGNSTNA

SEQ ID NO: 9991 - protein, 7 aa, synthetic construct
  REGION 1..7: note = Description of Artificial Sequence: Synthetic peptide
LNGKPSN

SEQ ID NO: 9992 - protein, 7 aa, synthetic construct
  REGION 1..7: note = Description of Artificial Sequence: Synthetic peptide
TGASSTL

SEQ ID NO: 9993 - protein, 7 aa, synthetic construct
  REGION 1..7: note = Description of Artificial Sequence: Synthetic peptide
QTADRRD

SEQ ID NO: 9994 - protein, 7 aa, synthetic construct
  REGION 1..7: note = Description of Artificial Sequence: Synthetic peptide
NSAHPAT

SEQ ID NO: 9995 - protein, 7 aa, synthetic construct
  REGION 1..7: note = Description of Artificial Sequence: Synthetic peptide
TTNTGLA

SEQ ID NO: 9996 - protein, 7 aa, synthetic construct
  REGION 1..7: note = Description of Artificial Sequence: Synthetic peptide
VSSGKVS

SEQ ID NO: 9997 - protein, 7 aa, synthetic construct
  REGION 1..7: note = Description of Artificial Sequence: Synthetic peptide
SPTSDRL

SEQ ID NO: 9998 - protein, 7 aa, synthetic construct
  REGION 1..7: note = Description of Artificial Sequence: Synthetic peptide
LSGHNSG

SEQ ID NO: 9999 - protein, 7 aa, synthetic construct
  REGION 1..7: note = Description of Artificial Sequence: Synthetic peptide
AKSPNSY

SEQ ID NO: 10000 - protein, 7 aa, synthetic construct
  REGION 1..7: note = Description of Artificial Sequence: Synthetic peptide
FTSEHGR

SEQ ID NO: 10001 - protein, 7 aa, synthetic construct
  REGION 1..7: note = Description of Artificial Sequence: Synthetic peptide
QSGGQTA

SEQ ID NO: 10002 - protein, 7 aa, synthetic construct
  REGION 1..7: note = Description of Artificial Sequence: Synthetic peptide
SQASTSL

SEQ ID NO: 10003 - protein, 7 aa, synthetic construct
  REGION 1..7: note = Description of Artificial Sequence: Synthetic peptide
DGSRQSI

SEQ ID NO: 10004 - protein, 7 aa, synthetic construct
  REGION 1..7: note = Description of Artificial Sequence: Synthetic peptide
SPNKPTH

SEQ ID NO: 10005 - protein, 7 aa, synthetic construct
  REGION 1..7: note = Description of Artificial Sequence: Synthetic peptide
STTSDRA

SEQ ID NO: 10006 - protein, 7 aa, synthetic construct
  REGION 1..7: note = Description of Artificial Sequence: Synthetic peptide
NSDESNR

SEQ ID NO: 10007 - protein, 7 aa, synthetic construct
  REGION 1..7: note = Description of Artificial Sequence: Synthetic peptide
NTSGQNP

SEQ ID NO: 10008 - protein, 7 aa, synthetic construct
  REGION 1..7: note = Description of Artificial Sequence: Synthetic peptide
NNNSSTN

SEQ ID NO: 10009 - protein, 7 aa, synthetic construct
  REGION 1..7: note = Description of Artificial Sequence: Synthetic peptide
TSGDARS

SEQ ID NO: 10010 - protein, 7 aa, synthetic construct
  REGION 1..7: note = Description of Artificial Sequence: Synthetic peptide
RDNTPAL

SEQ ID NO: 10011 - protein, 7 aa, synthetic construct
  REGION 1..7: note = Description of Artificial Sequence: Synthetic peptide
IVQENSK

SEQ ID NO: 10012 - protein, 7 aa, synthetic construct
  REGION 1..7: note = Description of Artificial Sequence: Synthetic peptide
MNSPGTS

SEQ ID NO: 10013 - protein, 7 aa, synthetic construct
  REGION 1..7: note = Description of Artificial Sequence: Synthetic peptide
ETSSRAS

SEQ ID NO: 10014 - protein, 7 aa, synthetic construct
  REGION 1..7: note = Description of Artificial Sequence: Synthetic peptide
DLQDSRK

SEQ ID NO: 10015 - protein, 7 aa, synthetic construct
  REGION 1..7: note = Description of Artificial Sequence: Synthetic peptide
DGKVSTK

SEQ ID NO: 10016 - protein, 7 aa, synthetic construct
  REGION 1..7: note = Description of Artificial Sequence: Synthetic peptide
GHVQSSK

SEQ ID NO: 10017 - protein, 7 aa, synthetic construct
  REGION 1..7: note = Description of Artificial Sequence: Synthetic peptide
GPDSNRV

SEQ ID NO: 10018 - protein, 7 aa, synthetic construct
  REGION 1..7: note = Description of Artificial Sequence: Synthetic peptide
LQSGEQR

SEQ ID NO: 10019 - protein, 7 aa, synthetic construct
  REGION 1..7: note = Description of Artificial Sequence: Synthetic peptide
NSSTKAV

SEQ ID NO: 10020 - protein, 7 aa, synthetic construct
  REGION 1..7: note = Description of Artificial Sequence: Synthetic peptide
GGQERNN

SEQ ID NO: 10021 - protein, 7 aa, synthetic construct
  REGION 1..7: note = Description of Artificial Sequence: Synthetic peptide
SMSATHV

SEQ ID NO: 10022 - protein, 7 aa, synthetic construct
  REGION 1..7: note = Description of Artificial Sequence: Synthetic peptide
DAREVSR

SEQ ID NO: 10023 - protein, 7 aa, synthetic construct
  REGION 1..7: note = Description of Artificial Sequence: Synthetic peptide
TLDKTNS

SEQ ID NO: 10024 - protein, 7 aa, synthetic construct
  REGION 1..7: note = Description of Artificial Sequence: Synthetic peptide
SNNKPNS

SEQ ID NO: 10025 - protein, 7 aa, synthetic construct
  REGION 1..7: note = Description of Artificial Sequence: Synthetic peptide
LTSEKHL

SEQ ID NO: 10026 - protein, 7 aa, synthetic construct
  REGION 1..7: note = Description of Artificial Sequence: Synthetic peptide
ESSSGSM

SEQ ID NO: 10027 - protein, 7 aa, synthetic construct
  REGION 1..7: note = Description of Artificial Sequence: Synthetic peptide
DLKDPRA

SEQ ID NO: 10028 - protein, 7 aa, synthetic construct
  REGION 1..7: note = Description of Artificial Sequence: Synthetic peptide
DVSQRNL

SEQ ID NO: 10029 - protein, 7 aa, synthetic construct
  REGION 1..7: note = Description of Artificial Sequence: Synthetic peptide
DQLGTSR

SEQ ID NO: 10030 - protein, 7 aa, synthetic construct
  REGION 1..7: note = Description of Artificial Sequence: Synthetic peptide
SVKNPTN

SEQ ID NO: 10031 - protein, 7 aa, synthetic construct
  REGION 1..7: note = Description of Artificial Sequence: Synthetic peptide
SSSESKS

SEQ ID NO: 10032 - protein, 7 aa, synthetic construct
  REGION 1..7: note = Description of Artificial Sequence: Synthetic peptide
AGSRETS

SEQ ID NO: 10033 - protein, 7 aa, synthetic construct
  REGION 1..7: note = Description of Artificial Sequence: Synthetic peptide
TNTGSSV

SEQ ID NO: 10034 - protein, 7 aa, synthetic construct
  REGION 1..7: note = Description of Artificial Sequence: Synthetic peptide
SEGSGGK

SEQ ID NO: 10035 - protein, 7 aa, synthetic construct
  REGION 1..7: note = Description of Artificial Sequence: Synthetic peptide
MVPGDKV

SEQ ID NO: 10036 - protein, 7 aa, synthetic construct
  REGION 1..7: note = Description of Artificial Sequence: Synthetic peptide
HNGSKGM

SEQ ID NO: 10037 - protein, 7 aa, synthetic construct
  REGION 1..7: note = Description of Artificial Sequence: Synthetic peptide
DPSHVNR

SEQ ID NO: 10038 - protein, 7 aa, synthetic construct
  REGION 1..7: note = Description of Artificial Sequence: Synthetic peptide
AAGDRSG

SEQ ID NO: 10039 - protein, 7 aa, synthetic construct
  REGION 1..7: note = Description of Artificial Sequence: Synthetic peptide
ASSGQSG

SEQ ID NO: 10040 - protein, 7 aa, synthetic construct
  REGION 1..7: note = Description of Artificial Sequence: Synthetic peptide
VEASGNK

SEQ ID NO: 10041 - protein, 7 aa, synthetic construct
  REGION 1..7: note = Description of Artificial Sequence: Synthetic peptide
GNAPNLK

SEQ ID NO: 10042 - protein, 7 aa, synthetic construct
  REGION 1..7: note = Description of Artificial Sequence: Synthetic peptide
THSSDNQ

SEQ ID NO: 10043 - protein, 7 aa, synthetic construct
  REGION 1..7: note = Description of Artificial Sequence: Synthetic peptide
SVSSPTK

SEQ ID NO: 10044 - protein, 7 aa, synthetic construct
  REGION 1..7: note = Description of Artificial Sequence: Synthetic peptide
TINSQPI

SEQ ID NO: 10045 - protein, 7 aa, synthetic construct
  REGION 1..7: note = Description of Artificial Sequence: Synthetic peptide
SLSQAPT

SEQ ID NO: 10046 - protein, 7 aa, synthetic construct
  REGION 1..7: note = Description of Artificial Sequence: Synthetic peptide
ESSGARL

SEQ ID NO: 10047 - protein, 7 aa, synthetic construct
  REGION 1..7: note = Description of Artificial Sequence: Synthetic peptide
SQSKQVS

SEQ ID NO: 10048 - protein, 7 aa, synthetic construct
  REGION 1..7: note = Description of Artificial Sequence: Synthetic peptide
WSSEKTR

SEQ ID NO: 10049 - protein, 7 aa, synthetic construct
  REGION 1..7: note = Description of Artificial Sequence: Synthetic peptide
DRLGKGP

SEQ ID NO: 10050 - protein, 7 aa, synthetic construct
  REGION 1..7: note = Description of Artificial Sequence: Synthetic peptide
SVVQASK

SEQ ID NO: 10051 - protein, 7 aa, synthetic construct
  REGION 1..7: note = Description of Artificial Sequence: Synthetic peptide
SSSSSSN

SEQ ID NO: 10052 - protein, 7 aa, synthetic construct
  REGION 1..7: note = Description of Artificial Sequence: Synthetic peptide
MNSQSSR

SEQ ID NO: 10053 - protein, 7 aa, synthetic construct
  REGION 1..7: note = Description of Artificial Sequence: Synthetic peptide
QTSGTQV

SEQ ID NO: 10054 - protein, 7 aa, synthetic construct
  REGION 1..7: note = Description of Artificial Sequence: Synthetic peptide
QSKGTTG

SEQ ID NO: 10055 - protein, 7 aa, synthetic construct
  REGION 1..7: note = Description of Artificial Sequence: Synthetic peptide
DVPSKQL

SEQ ID NO: 10056 - protein, 7 aa, synthetic construct
  REGION 1..7: note = Description of Artificial Sequence: Synthetic peptide
GVSKDRM

SEQ ID NO: 10057 - protein, 7 aa, synthetic construct
  REGION 1..7: note = Description of Artificial Sequence: Synthetic peptide
MGSNSSI

SEQ ID NO: 10058 - protein, 7 aa, synthetic construct
  REGION 1..7: note = Description of Artificial Sequence: Synthetic peptide
GTGRDTA

SEQ ID NO: 10059 - protein, 7 aa, synthetic construct
  REGION 1..7: note = Description of Artificial Sequence: Synthetic peptide
GTGTDLK

SEQ ID NO: 10060 - protein, 7 aa, synthetic construct
  REGION 1..7: note = Description of Artificial Sequence: Synthetic peptide
IDTKGGS

SEQ ID NO: 10061 - protein, 7 aa, synthetic construct
  REGION 1..7: note = Description of Artificial Sequence: Synthetic peptide
SSSQSKM

SEQ ID NO: 10062 - protein, 7 aa, synthetic construct
  REGION 1..7: note = Description of Artificial Sequence: Synthetic peptide
AAGANSG

SEQ ID NO: 10063 - protein, 7 aa, synthetic construct
  REGION 1..7: note = Description of Artificial Sequence: Synthetic peptide
KGSNTHG

SEQ ID NO: 10064 - protein, 7 aa, synthetic construct
  REGION 1..7: note = Description of Artificial Sequence: Synthetic peptide
NAPGQHG

SEQ ID NO: 10065 - protein, 7 aa, synthetic construct
  REGION 1..7: note = Description of Artificial Sequence: Synthetic peptide
NVSETPK

SEQ ID NO: 10066 - protein, 7 aa, synthetic construct
  REGION 1..7: note = Description of Artificial Sequence: Synthetic peptide
NTDTRSS

SEQ ID NO: 10067 - protein, 7 aa, synthetic construct
  REGION 1..7: note = Description of Artificial Sequence: Synthetic peptide
SRTPGSS

SEQ ID NO: 10068 - protein, 7 aa, synthetic construct
  REGION 1..7: note = Description of Artificial Sequence: Synthetic peptide
SGKSSNS

SEQ ID NO: 10069 - protein, 7 aa, synthetic construct
  REGION 1..7: note = Description of Artificial Sequence: Synthetic peptide
SGVSHAA

SEQ ID NO: 10070 - protein, 7 aa, synthetic construct
  REGION 1..7: note = Description of Artificial Sequence: Synthetic peptide
QATTAAR

SEQ ID NO: 10071 - protein, 7 aa, synthetic construct
  REGION 1..7: note = Description of Artificial Sequence: Synthetic peptide
DHVNKGG

SEQ ID NO: 10072 - protein, 7 aa, synthetic construct
  REGION 1..7: note = Description of Artificial Sequence: Synthetic peptide
VSSGSLS

SEQ ID NO: 10073 - protein, 7 aa, synthetic construct
  REGION 1..7: note = Description of Artificial Sequence: Synthetic peptide
SRGADLS

SEQ ID NO: 10074 - protein, 7 aa, synthetic construct
  REGION 1..7: note = Description of Artificial Sequence: Synthetic peptide
SGTNTAL

SEQ ID NO: 10075 - protein, 7 aa, synthetic construct
  REGION 1..7: note = Description of Artificial Sequence: Synthetic peptide
SSTPSIG

SEQ ID NO: 10076 - protein, 7 aa, synthetic construct
  REGION 1..7: note = Description of Artificial Sequence: Synthetic peptide
FAETKGG

SEQ ID NO: 10077 - protein, 7 aa, synthetic construct
  REGION 1..7: note = Description of Artificial Sequence: Synthetic peptide
RSTGGSS

SEQ ID NO: 10078 - protein, 7 aa, synthetic construct
  REGION 1..7: note = Description of Artificial Sequence: Synthetic peptide
GGGSGKT

SEQ ID NO: 10079 - protein, 7 aa, synthetic construct
  REGION 1..7: note = Description of Artificial Sequence: Synthetic peptide
LNNSGSH

SEQ ID NO: 10080 - protein, 7 aa, synthetic construct
  REGION 1..7: note = Description of Artificial Sequence: Synthetic peptide
TLSAPHS

SEQ ID NO: 10081 - protein, 7 aa, synthetic construct
  REGION 1..7: note = Description of Artificial Sequence: Synthetic peptide
NADSSTH

SEQ ID NO: 10082 - protein, 7 aa, synthetic construct
  REGION 1..7: note = Description of Artificial Sequence: Synthetic peptide
ASNVKSL

SEQ ID NO: 10083 - protein, 7 aa, synthetic construct
  REGION 1..7: note = Description of Artificial Sequence: Synthetic peptide
STSTPHQ

SEQ ID NO: 10084 - protein, 7 aa, synthetic construct
  REGION 1..7: note = Description of Artificial Sequence: Synthetic peptide
LNTPPSK

SEQ ID NO: 10085 - protein, 7 aa, synthetic construct
  REGION 1..7: note = Description of Artificial Sequence: Synthetic peptide
NASRETV

SEQ ID NO: 10086 - protein, 7 aa, synthetic construct
  REGION 1..7: note = Description of Artificial Sequence: Synthetic peptide
TAPERMA

SEQ ID NO: 10087 - protein, 7 aa, synthetic construct
  REGION 1..7: note = Description of Artificial Sequence: Synthetic peptide
DTGKTRS

SEQ ID NO: 10088 - protein, 7 aa, synthetic construct
  REGION 1..7: note = Description of Artificial Sequence: Synthetic peptide
GLLSSTK

SEQ ID NO: 10089 - protein, 7 aa, synthetic construct
  REGION 1..7: note = Description of Artificial Sequence: Synthetic peptide
SLSATSQ

SEQ ID NO: 10090 - protein, 7 aa, synthetic construct
  REGION 1..7: note = Description of Artificial Sequence: Synthetic peptide
SNERTPK

SEQ ID NO: 10091 - protein, 7 aa, synthetic construct
  REGION 1..7: note = Description of Artificial Sequence: Synthetic peptide
FEKSTPT

SEQ ID NO: 10092 - protein, 7 aa, synthetic construct
  REGION 1..7: note = Description of Artificial Sequence: Synthetic peptide
NASAQSK

SEQ ID NO: 10093 - protein, 7 aa, synthetic construct
  REGION 1..7: note = Description of Artificial Sequence: Synthetic peptide
TTENSRG

SEQ ID NO: 10094 - protein, 7 aa, synthetic construct
  REGION 1..7: note = Description of Artificial Sequence: Synthetic peptide
SSSTNPK

SEQ ID NO: 10095 - protein, 7 aa, synthetic construct
  REGION 1..7: note = Description of Artificial Sequence: Synthetic peptide
SNTQGLT

SEQ ID NO: 10096 - protein, 7 aa, synthetic construct
  REGION 1..7: note = Description of Artificial Sequence: Synthetic peptide
SAKPEGS

SEQ ID NO: 10097 - protein, 7 aa, synthetic construct
  REGION 1..7: note = Description of Artificial Sequence: Synthetic peptide
SRSKTDA

SEQ ID NO: 10098 - protein, 7 aa, synthetic construct
  REGION 1..7: note = Description of Artificial Sequence: Synthetic peptide
QGSTTAS

SEQ ID NO: 10099 - protein, 7 aa, synthetic construct
  REGION 1..7: note = Description of Artificial Sequence: Synthetic peptide
GNPNSAT

SEQ ID NO: 10100 - protein, 7 aa, synthetic construct
  REGION 1..7: note = Description of Artificial Sequence: Synthetic peptide
TGSTPVH

SEQ ID NO: 10101 - protein, 7 aa, synthetic construct
  REGION 1..7: note = Description of Artificial Sequence: Synthetic peptide
SSPGGSQ

SEQ ID NO: 10102 - protein, 7 aa, synthetic construct
  REGION 1..7: note = Description of Artificial Sequence: Synthetic peptide
ETTAKNG

SEQ ID NO: 10103 - protein, 7 aa, synthetic construct
  REGION 1..7: note = Description of Artificial Sequence: Synthetic peptide
ASGAPSK

SEQ ID NO: 10104 - protein, 7 aa, synthetic construct
  REGION 1..7: note = Description of Artificial Sequence: Synthetic peptide
VSSKETA

SEQ ID NO: 10105 - protein, 7 aa, synthetic construct
  REGION 1..7: note = Description of Artificial Sequence: Synthetic peptide
SETKVGI

SEQ ID NO: 10106 - protein, 7 aa, synthetic construct
  REGION 1..7: note = Description of Artificial Sequence: Synthetic peptide
GTAAVAS

SEQ ID NO: 10107 - protein, 7 aa, synthetic construct
  REGION 1..7: note = Description of Artificial Sequence: Synthetic peptide
NNAASVK

SEQ ID NO: 10108 - protein, 7 aa, synthetic construct
  REGION 1..7: note = Description of Artificial Sequence: Synthetic peptide
HGAAKSS

SEQ ID NO: 10109 - protein, 7 aa, synthetic construct
  REGION 1..7: note = Description of Artificial Sequence: Synthetic peptide
NTVSSGG

SEQ ID NO: 10110 - protein, 7 aa, synthetic construct
  REGION 1..7: note = Description of Artificial Sequence: Synthetic peptide
KSNDSSG

SEQ ID NO: 10111 - protein, 7 aa, synthetic construct
  REGION 1..7: note = Description of Artificial Sequence: Synthetic peptide
NNVQTTH

SEQ ID NO: 10112 - protein, 7 aa, synthetic construct
  REGION 1..7: note = Description of Artificial Sequence: Synthetic peptide
QGASTGS

SEQ ID NO: 10113 - protein, 7 aa, synthetic construct
  REGION 1..7: note = Description of Artificial Sequence: Synthetic peptide
ELGSKGH

SEQ ID NO: 10114 - protein, 7 aa, synthetic construct
  REGION 1..7: note = Description of Artificial Sequence: Synthetic peptide
GDRASPK

SEQ ID NO: 10115 - protein, 7 aa, synthetic construct
  REGION 1..7: note = Description of Artificial Sequence: Synthetic peptide
GSSGKSF

SEQ ID NO: 10116 - protein, 7 aa, synthetic construct
  REGION 1..7: note = Description of Artificial Sequence: Synthetic peptide
VKANEAS

SEQ ID NO: 10117 - protein, 7 aa, synthetic construct
  REGION 1..7: note = Description of Artificial Sequence: Synthetic peptide
SEGARHG

SEQ ID NO: 10118 - protein, 7 aa, synthetic construct
  REGION 1..7: note = Description of Artificial Sequence: Synthetic peptide
QVATGTS

SEQ ID NO: 10119 - protein, 7 aa, synthetic construct
  REGION 1..7: note = Description of Artificial Sequence: Synthetic peptide
SNGAGLT

SEQ ID NO: 10120 - protein, 7 aa, synthetic construct
  REGION 1..7: note = Description of Artificial Sequence: Synthetic peptide
LDPKPTS

SEQ ID NO: 10121 - protein, 7 aa, synthetic construct
  REGION 1..7: note = Description of Artificial Sequence: Synthetic peptide
SASKSST

SEQ ID NO: 10122 - protein, 7 aa, synthetic construct
  REGION 1..7: note = Description of Artificial Sequence: Synthetic peptide
TQSQVPI

SEQ ID NO: 10123 - protein, 7 aa, synthetic construct
  REGION 1..7: note = Description of Artificial Sequence: Synthetic peptide
SVNARTS

SEQ ID NO: 10124 - protein, 7 aa, synthetic construct
  REGION 1..7: note = Description of Artificial Sequence: Synthetic peptide
HGPSSQT

SEQ ID NO: 10125 - protein, 7 aa, synthetic construct
  REGION 1..7: note = Description of Artificial Sequence: Synthetic peptide
SNASSPS

SEQ ID NO: 10126 - protein, 7 aa, synthetic construct
  REGION 1..7: note = Description of Artificial Sequence: Synthetic peptide
KDTKQPN

SEQ ID NO: 10127 - protein, 7 aa, synthetic construct
  REGION 1..7: note = Description of Artificial Sequence: Synthetic peptide
TNTSGSG

SEQ ID NO: 10128 - protein, 7 aa, synthetic construct
  REGION 1..7: note = Description of Artificial Sequence: Synthetic peptide
LNTSKSV

SEQ ID NO: 10129 - protein, 7 aa, synthetic construct
  REGION 1..7: note = Description of Artificial Sequence: Synthetic peptide
GMSTGEG

SEQ ID NO: 10130 - protein, 7 aa, synthetic construct
  REGION 1..7: note = Description of Artificial Sequence: Synthetic peptide
LRTPNAG

SEQ ID NO: 10131 - protein, 7 aa, synthetic construct
  REGION 1..7: note = Description of Artificial Sequence: Synthetic peptide
SKAAQSI

SEQ ID NO: 10132 - protein, 7 aa, synthetic construct
  REGION 1..7: note = Description of Artificial Sequence: Synthetic peptide
MTDGSSK

SEQ ID NO: 10133 - protein, 7 aa, synthetic construct
  REGION 1..7: note = Description of Artificial Sequence: Synthetic peptide
DSTNKAA

SEQ ID NO: 10134 - protein, 7 aa, synthetic construct
  REGION 1..7: note = Description of Artificial Sequence: Synthetic peptide
GGSTLSK

SEQ ID NO: 10135 - protein, 7 aa, synthetic construct
  REGION 1..7: note = Description of Artificial Sequence: Synthetic peptide
STATGSK

SEQ ID NO: 10136 - protein, 7 aa, synthetic construct
  REGION 1..7: note = Description of Artificial Sequence: Synthetic peptide
LPSKVNT

SEQ ID NO: 10137 - protein, 7 aa, synthetic construct
  REGION 1..7: note = Description of Artificial Sequence: Synthetic peptide
VPSNKNG

SEQ ID NO: 10138 - protein, 7 aa, synthetic construct
  REGION 1..7: note = Description of Artificial Sequence: Synthetic peptide
NPASKAN

SEQ ID NO: 10139 - protein, 7 aa, synthetic construct
  REGION 1..7: note = Description of Artificial Sequence: Synthetic peptide
QGNHPSS

SEQ ID NO: 10140 - protein, 7 aa, synthetic construct
  REGION 1..7: note = Description of Artificial Sequence: Synthetic peptide
ARTGSPS

SEQ ID NO: 10141 - protein, 7 aa, synthetic construct
  REGION 1..7: note = Description of Artificial Sequence: Synthetic peptide
TTSSKTS

SEQ ID NO: 10142 - protein, 7 aa, synthetic construct
  REGION 1..7: note = Description of Artificial Sequence: Synthetic peptide
DIKSPSQ

SEQ ID NO: 10143 - protein, 7 aa, synthetic construct
  REGION 1..7: note = Description of Artificial Sequence: Synthetic peptide
TQATGKG

SEQ ID NO: 10144 - protein, 7 aa, synthetic construct
  REGION 1..7: note = Description of Artificial Sequence: Synthetic peptide
TSGVSTG

SEQ ID NO: 10145 - protein, 7 aa, synthetic construct
  REGION 1..7: note = Description of Artificial Sequence: Synthetic peptide
TNTNLKA

SEQ ID NO: 10146 - protein, 7 aa, synthetic construct
  REGION 1..7: note = Description of Artificial Sequence: Synthetic peptide
SKASSGL

SEQ ID NO: 10147 - protein, 7 aa, synthetic construct
  REGION 1..7: note = Description of Artificial Sequence: Synthetic peptide
STGSSIG

SEQ ID NO: 10148 - protein, 7 aa, synthetic construct
  REGION 1..7: note = Description of Artificial Sequence: Synthetic peptide
SVNPSMA

SEQ ID NO: 10149 - protein, 7 aa, synthetic construct
  REGION 1..7: note = Description of Artificial Sequence: Synthetic peptide
HRVSKDG

SEQ ID NO: 10150 - protein, 7 aa, synthetic construct
  REGION 1..7: note = Description of Artificial Sequence: Synthetic peptide
HQSGTSG

SEQ ID NO: 10151 - protein, 7 aa, synthetic construct
  REGION 1..7: note = Description of Artificial Sequence: Synthetic peptide
HESGQKS

SEQ ID NO: 10152 - protein, 7 aa, synthetic construct
  REGION 1..7: note = Description of Artificial Sequence: Synthetic peptide
LSSDKNS

SEQ ID NO: 10153 - protein, 7 aa, synthetic construct
  REGION 1..7: note = Description of Artificial Sequence: Synthetic peptide
DTVKSGT

SEQ ID NO: 10154 - protein, 7 aa, synthetic construct
  REGION 1..7: note = Description of Artificial Sequence: Synthetic peptide
ATTSEQH

SEQ ID NO: 10155 - protein, 7 aa, synthetic construct
  REGION 1..7: note = Description of Artificial Sequence: Synthetic peptide
YRGTENS

SEQ ID NO: 10156 - protein, 7 aa, synthetic construct
  REGION 1..7: note = Description of Artificial Sequence: Synthetic peptide
STNSTAR

SEQ ID NO: 10157 - protein, 7 aa, synthetic construct
  REGION 1..7: note = Description of Artificial Sequence: Synthetic peptide
SNGASLN

SEQ ID NO: 10158 - protein, 7 aa, synthetic construct
  REGION 1..7: note = Description of Artificial Sequence: Synthetic peptide
HSTGTPM

SEQ ID NO: 10159 - protein, 7 aa, synthetic construct
  REGION 1..7: note = Description of Artificial Sequence: Synthetic peptide
DETRARS

SEQ ID NO: 10160 - protein, 7 aa, synthetic construct
  REGION 1..7: note = Description of Artificial Sequence: Synthetic peptide
ESTSSVH

SEQ ID NO: 10161 - protein, 7 aa, synthetic construct
  REGION 1..7: note = Description of Artificial Sequence: Synthetic peptide
ATVDRNH

SEQ ID NO: 10162 - protein, 7 aa, synthetic construct
  REGION 1..7: note = Description of Artificial Sequence: Synthetic peptide
GLDAKPM

SEQ ID NO: 10163 - protein, 7 aa, synthetic construct
  REGION 1..7: note = Description of Artificial Sequence: Synthetic peptide
NSSDLKT

SEQ ID NO: 10164 - protein, 7 aa, synthetic construct
  REGION 1..7: note = Description of Artificial Sequence: Synthetic peptide
NGSGQIQ

SEQ ID NO: 10165 - protein, 7 aa, synthetic construct
  REGION 1..7: note = Description of Artificial Sequence: Synthetic peptide
MAIDKGK

SEQ ID NO: 10166 - protein, 7 aa, synthetic construct
  REGION 1..7: note = Description of Artificial Sequence: Synthetic peptide
ERREHGT

SEQ ID NO: 10167 - protein, 7 aa, synthetic construct
  REGION 1..7: note = Description of Artificial Sequence: Synthetic peptide
EPADKSS

SEQ ID NO: 10168 - protein, 7 aa, synthetic construct
  REGION 1..7: note = Description of Artificial Sequence: Synthetic peptide
ATTVTPK

SEQ ID NO: 10169 - protein, 7 aa, synthetic construct
  REGION 1..7: note = Description of Artificial Sequence: Synthetic peptide
GSGPAQQ

SEQ ID NO: 10170 - protein, 7 aa, synthetic construct
  REGION 1..7: note = Description of Artificial Sequence: Synthetic peptide
SSVSSTS

SEQ ID NO: 10171 - protein, 7 aa, synthetic construct
  REGION 1..7: note = Description of Artificial Sequence: Synthetic peptide
NTSSPTT

SEQ ID NO: 10172 - protein, 7 aa, synthetic construct
  REGION 1..7: note = Description of Artificial Sequence: Synthetic peptide
QTTTAAS

SEQ ID NO: 10173 - protein, 7 aa, synthetic construct
  REGION 1..7: note = Description of Artificial Sequence: Synthetic peptide
VSEGTTK

SEQ ID NO: 10174 - protein, 7 aa, synthetic construct
  REGION 1..7: note = Description of Artificial Sequence: Synthetic peptide
ESRGSSS

SEQ ID NO: 10175 - protein, 7 aa, synthetic construct
  REGION 1..7: note = Description of Artificial Sequence: Synthetic peptide
TMHGSSA

SEQ ID NO: 10176 - protein, 7 aa, synthetic construct
  REGION 1..7: note = Description of Artificial Sequence: Synthetic peptide
SNANTVH

SEQ ID NO: 10177 - protein, 7 aa, synthetic construct
  REGION 1..7: note = Description of Artificial Sequence: Synthetic peptide
SLGEKRQ

SEQ ID NO: 10178 - protein, 7 aa, synthetic construct
  REGION 1..7: note = Description of Artificial Sequence: Synthetic peptide
LGLKTSN

SEQ ID NO: 10179 - protein, 7 aa, synthetic construct
  REGION 1..7: note = Description of Artificial Sequence: Synthetic peptide
DNAPANR

SEQ ID NO: 10180 - protein, 7 aa, synthetic construct
  REGION 1..7: note = Description of Artificial Sequence: Synthetic peptide
DNTAAVK

SEQ ID NO: 10181 - protein, 7 aa, synthetic construct
  REGION 1..7: note = Description of Artificial Sequence: Synthetic peptide
DRTSGVA

SEQ ID NO: 10182 - protein, 7 aa, synthetic construct
  REGION 1..7: note = Description of Artificial Sequence: Synthetic peptide
AVSGKSI

SEQ ID NO: 10183 - protein, 7 aa, synthetic construct
  REGION 1..7: note = Description of Artificial Sequence: Synthetic peptide
AMGSSPG

SEQ ID NO: 10184 - protein, 7 aa, synthetic construct
  REGION 1..7: note = Description of Artificial Sequence: Synthetic peptide
GSKGSPH

SEQ ID NO: 10185 - protein, 7 aa, synthetic construct
  REGION 1..7: note = Description of Artificial Sequence: Synthetic peptide
GGDSVTK

SEQ ID NO: 10186 - protein, 7 aa, synthetic construct
  REGION 1..7: note = Description of Artificial Sequence: Synthetic peptide
GRTDQNS

SEQ ID NO: 10187 - protein, 7 aa, synthetic construct
  REGION 1..7: note = Description of Artificial Sequence: Synthetic peptide
GQAPGST

SEQ ID NO: 10188 - protein, 7 aa, synthetic construct
  REGION 1..7: note = Description of Artificial Sequence: Synthetic peptide
VQSSKSS

SEQ ID NO: 10189 - protein, 7 aa, synthetic construct
  REGION 1..7: note = Description of Artificial Sequence: Synthetic peptide
SQGKSSS

SEQ ID NO: 10190 - protein, 7 aa, synthetic construct
  REGION 1..7: note = Description of Artificial Sequence: Synthetic peptide
TPTGAGG

SEQ ID NO: 10191 - protein, 7 aa, synthetic construct
  REGION 1..7: note = Description of Artificial Sequence: Synthetic peptide
SNDAGKN

SEQ ID NO: 10192 - protein, 7 aa, synthetic construct
  REGION 1..7: note = Description of Artificial Sequence: Synthetic peptide
APGRDSS

SEQ ID NO: 10193 - protein, 7 aa, synthetic construct
  REGION 1..7: note = Description of Artificial Sequence: Synthetic peptide
GNSTSSS

SEQ ID NO: 10194 - protein, 7 aa, synthetic construct
  REGION 1..7: note = Description of Artificial Sequence: Synthetic peptide
SSGSSMG

SEQ ID NO: 10195 - protein, 7 aa, synthetic construct
  REGION 1..7: note = Description of Artificial Sequence: Synthetic peptide
SHGQGPQ

SEQ ID NO: 10196 - protein, 7 aa, synthetic construct
  REGION 1..7: note = Description of Artificial Sequence: Synthetic peptide
TNESTLR

SEQ ID NO: 10197 - protein, 7 aa, synthetic construct
  REGION 1..7: note = Description of Artificial Sequence: Synthetic peptide
SSGQPGR

SEQ ID NO: 10198 - protein, 7 aa, synthetic construct
  REGION 1..7: note = Description of Artificial Sequence: Synthetic peptide
QQMDNKT

SEQ ID NO: 10199 - protein, 7 aa, synthetic construct
  REGION 1..7: note = Description of Artificial Sequence: Synthetic peptide
ADGQSSS

SEQ ID NO: 10200 - protein, 7 aa, synthetic construct
  REGION 1..7: note = Description of Artificial Sequence: Synthetic peptide
GGPSSDR

SEQ ID NO: 10201 - protein, 7 aa, synthetic construct
  REGION 1..7: note = Description of Artificial Sequence: Synthetic peptide
NPVAQGN

SEQ ID NO: 10202 - protein, 7 aa, synthetic construct
  REGION 1..7: note = Description of Artificial Sequence: Synthetic peptide
NNDKSGL

SEQ ID NO: 10203 - protein, 7 aa, synthetic construct
  REGION 1..7: note = Description of Artificial Sequence: Synthetic peptide
TSSSEKA

SEQ ID NO: 10204 - protein, 7 aa, synthetic construct
  REGION 1..7: note = Description of Artificial Sequence: Synthetic peptide
ITNSATR

SEQ ID NO: 10205 - protein, 7 aa, synthetic construct
  REGION 1..7: note = Description of Artificial Sequence: Synthetic peptide
QAAKDQH

SEQ ID NO: 10206 - protein, 7 aa, synthetic construct
  REGION 1..7: note = Description of Artificial Sequence: Synthetic peptide
HSSTGGS

SEQ ID NO: 10207 - protein, 7 aa, synthetic construct
  REGION 1..7: note = Description of Artificial Sequence: Synthetic peptide
ESGSQNR

SEQ ID NO: 10208 - protein, 7 aa, synthetic construct
  REGION 1..7: note = Description of Artificial Sequence: Synthetic peptide
AEGKTAA

SEQ ID NO: 10209 - protein, 7 aa, synthetic construct
  REGION 1..7: note = Description of Artificial Sequence: Synthetic peptide
GTGANTT

SEQ ID NO: 10210 - protein, 7 aa, synthetic construct
  REGION 1..7: note = Description of Artificial Sequence: Synthetic peptide
GMASADK

SEQ ID NO: 10211 - protein, 7 aa, synthetic construct
  REGION 1..7: note = Description of Artificial Sequence: Synthetic peptide
YKAGQQQ

SEQ ID NO: 10212 - protein, 7 aa, synthetic construct
  REGION 1..7: note = Description of Artificial Sequence: Synthetic peptide
FQGSKAG

SEQ ID NO: 10213 - protein, 7 aa, synthetic construct
  REGION 1..7: note = Description of Artificial Sequence: Synthetic peptide
SRGQSSN

SEQ ID NO: 10214 - protein, 7 aa, synthetic construct
  REGION 1..7: note = Description of Artificial Sequence: Synthetic peptide
KGSSNST

SEQ ID NO: 10215 - protein, 7 aa, synthetic construct
  REGION 1..7: note = Description of Artificial Sequence: Synthetic peptide
SPSSKPS

SEQ ID NO: 10216 - protein, 7 aa, synthetic construct
  REGION 1..7: note = Description of Artificial Sequence: Synthetic peptide
SSATASA

SEQ ID NO: 10217 - protein, 7 aa, synthetic construct
  REGION 1..7: note = Description of Artificial Sequence: Synthetic peptide
KTDTSAH

SEQ ID NO: 10218 - protein, 7 aa, synthetic construct
  REGION 1..7: note = Description of Artificial Sequence: Synthetic peptide
GNAPPTR

SEQ ID NO: 10219 - protein, 7 aa, synthetic construct
  REGION 1..7: note = Description of Artificial Sequence: Synthetic peptide
SQNHTSS

SEQ ID NO: 10220 - protein, 7 aa, synthetic construct
  REGION 1..7: note = Description of Artificial Sequence: Synthetic peptide
SDNKTHT

SEQ ID NO: 10221 - protein, 7 aa, synthetic construct
  REGION 1..7: note = Description of Artificial Sequence: Synthetic peptide
GVENPRA

SEQ ID NO: 10222 - protein, 7 aa, synthetic construct
  REGION 1..7: note = Description of Artificial Sequence: Synthetic peptide
SQPSSVG

SEQ ID NO: 10223 - protein, 7 aa, synthetic construct
  REGION 1..7: note = Description of Artificial Sequence: Synthetic peptide
DSSATKL

SEQ ID NO: 10224 - protein, 7 aa, synthetic construct
  REGION 1..7: note = Description of Artificial Sequence: Synthetic peptide
VPNSSAG

SEQ ID NO: 10225 - protein, 7 aa, synthetic construct
  REGION 1..7: note = Description of Artificial Sequence: Synthetic peptide
SSSNKPG

SEQ ID NO: 10226 - protein, 7 aa, synthetic construct
  REGION 1..7: note = Description of Artificial Sequence: Synthetic peptide
CTGTPSG

SEQ ID NO: 10227 - protein, 7 aa, synthetic construct
  REGION 1..7: note = Description of Artificial Sequence: Synthetic peptide
LTNTASQ

SEQ ID NO: 10228 - protein, 7 aa, synthetic construct
  REGION 1..7: note = Description of Artificial Sequence: Synthetic peptide
VSGGAAR

SEQ ID NO: 10229 - protein, 7 aa, synthetic construct
  REGION 1..7: note = Description of Artificial Sequence: Synthetic peptide
VSKQQSA

SEQ ID NO: 10230 - protein, 7 aa, synthetic construct
  REGION 1..7: note = Description of Artificial Sequence: Synthetic peptide
GVNPSAS

SEQ ID NO: 10231 - protein, 7 aa, synthetic construct
  REGION 1..7: note = Description of Artificial Sequence: Synthetic peptide
SGSGAPA

SEQ ID NO: 10232 - protein, 7 aa, synthetic construct
  REGION 1..7: note = Description of Artificial Sequence: Synthetic peptide
QSSNSNA

SEQ ID NO: 10233 - protein, 7 aa, synthetic construct
  REGION 1..7: note = Description of Artificial Sequence: Synthetic peptide
TATASNQ

SEQ ID NO: 10234 - protein, 7 aa, synthetic construct
  REGION 1..7: note = Description of Artificial Sequence: Synthetic peptide
GDGRSPN

SEQ ID NO: 10235 - protein, 7 aa, synthetic construct
  REGION 1..7: note = Description of Artificial Sequence: Synthetic peptide
KSVPSVS

SEQ ID NO: 10236 - protein, 7 aa, synthetic construct
  REGION 1..7: note = Description of Artificial Sequence: Synthetic peptide
NQSSGGS

SEQ ID NO: 10237 - protein, 7 aa, synthetic construct
  REGION 1..7: note = Description of Artificial Sequence: Synthetic peptide
SSEKPAS

SEQ ID NO: 10238 - protein, 7 aa, synthetic construct
  REGION 1..7: note = Description of Artificial Sequence: Synthetic peptide
STKASNG

SEQ ID NO: 10239 - protein, 7 aa, synthetic construct
  REGION 1..7: note = Description of Artificial Sequence: Synthetic peptide
ISSSKVV

SEQ ID NO: 10240 - protein, 7 aa, synthetic construct
  REGION 1..7: note = Description of Artificial Sequence: Synthetic peptide
QSSSSTS

SEQ ID NO: 10241 - protein, 7 aa, synthetic construct
  REGION 1..7: note = Description of Artificial Sequence: Synthetic peptide
ERVPSSG

SEQ ID NO: 10242 - protein, 7 aa, synthetic construct
  REGION 1..7: note = Description of Artificial Sequence: Synthetic peptide
DNRSSNA

SEQ ID NO: 10243 - protein, 7 aa, synthetic construct
  REGION 1..7: note = Description of Artificial Sequence: Synthetic peptide
GAVDSVK

SEQ ID NO: 10244 - protein, 7 aa, synthetic construct
  REGION 1..7: note = Description of Artificial Sequence: Synthetic peptide
VTQGEMK

SEQ ID NO: 10245 - protein, 7 aa, synthetic construct
  REGION 1..7: note = Description of Artificial Sequence: Synthetic peptide
VAQNAPT

SEQ ID NO: 10246 - protein, 7 aa, synthetic construct
  REGION 1..7: note = Description of Artificial Sequence: Synthetic peptide
VNNSPSQ

SEQ ID NO: 10247 - protein, 7 aa, synthetic construct
  REGION 1..7: note = Description of Artificial Sequence: Synthetic peptide
LSGTASN

SEQ ID NO: 10248 - protein, 7 aa, synthetic construct
  REGION 1..7: note = Description of Artificial Sequence: Synthetic peptide
EGRASSV

SEQ ID NO: 10249 - protein, 7 aa, synthetic construct
  REGION 1..7: note = Description of Artificial Sequence: Synthetic peptide
DGAATVK

SEQ ID NO: 10250 - protein, 7 aa, synthetic construct
  REGION 1..7: note = Description of Artificial Sequence: Synthetic peptide
VQGKVTN

SEQ ID NO: 10251 - protein, 7 aa, synthetic construct
  REGION 1..7: note = Description of Artificial Sequence: Synthetic peptide
NSTKDGS

SEQ ID NO: 10252 - protein, 7 aa, synthetic construct
  REGION 1..7: note = Description of Artificial Sequence: Synthetic peptide
SNRESIQ

SEQ ID NO: 10253 - protein, 7 aa, synthetic construct
  REGION 1..7: note = Description of Artificial Sequence: Synthetic peptide
SSSKPKD

SEQ ID NO: 10254 - protein, 7 aa, synthetic construct
  REGION 1..7: note = Description of Artificial Sequence: Synthetic peptide
HAKNSNG

SEQ ID NO: 10255 - protein, 7 aa, synthetic construct
  REGION 1..7: note = Description of Artificial Sequence: Synthetic peptide
LDGSKMG

SEQ ID NO: 10256 - protein, 7 aa, synthetic construct
  REGION 1..7: note = Description of Artificial Sequence: Synthetic peptide
VSTGATR

SEQ ID NO: 10257 - protein, 7 aa, synthetic construct
  REGION 1..7: note = Description of Artificial Sequence: Synthetic peptide
SSDKIRS

SEQ ID NO: 10258 - protein, 7 aa, synthetic construct
  REGION 1..7: note = Description of Artificial Sequence: Synthetic peptide
NEVRQSN

SEQ ID NO: 10259 - protein, 7 aa, synthetic construct
  REGION 1..7: note = Description of Artificial Sequence: Synthetic peptide
LTGDQVK

SEQ ID NO: 10260 - protein, 7 aa, synthetic construct
  REGION 1..7: note = Description of Artificial Sequence: Synthetic peptide
EPGTSAQ

SEQ ID NO: 10261 - protein, 7 aa, synthetic construct
  REGION 1..7: note = Description of Artificial Sequence: Synthetic peptide
AEMKPVL

SEQ ID NO: 10262 - protein, 7 aa, synthetic construct
  REGION 1..7: note = Description of Artificial Sequence: Synthetic peptide
TSTGTLK

SEQ ID NO: 10263 - protein, 7 aa, synthetic construct
  REGION 1..7: note = Description of Artificial Sequence: Synthetic peptide
SGTSSPN

SEQ ID NO: 10264 - protein, 7 aa, synthetic construct
  REGION 1..7: note = Description of Artificial Sequence: Synthetic peptide
HQPEPRG

SEQ ID NO: 10265 - protein, 7 aa, synthetic construct
  REGION 1..7: note = Description of Artificial Sequence: Synthetic peptide
HSGGTSH

SEQ ID NO: 10266 - protein, 7 aa, synthetic construct
  REGION 1..7: note = Description of Artificial Sequence: Synthetic peptide
LSKSTSG

SEQ ID NO: 10267 - protein, 7 aa, synthetic construct
  REGION 1..7: note = Description of Artificial Sequence: Synthetic peptide
DKVGSPP

SEQ ID NO: 10268 - protein, 7 aa, synthetic construct
  REGION 1..7: note = Description of Artificial Sequence: Synthetic peptide
DTQKSSH

SEQ ID NO: 10269 - protein, 7 aa, synthetic construct
  REGION 1..7: note = Description of Artificial Sequence: Synthetic peptide
TDKPASR

SEQ ID NO: 10270 - protein, 7 aa, synthetic construct
  REGION 1..7: note = Description of Artificial Sequence: Synthetic peptide
SNSPGGL

SEQ ID NO: 10271 - protein, 7 aa, synthetic construct
  REGION 1..7: note = Description of Artificial Sequence: Synthetic peptide
DSANTKA

SEQ ID NO: 10272 - protein, 7 aa, synthetic construct
  REGION 1..7: note = Description of Artificial Sequence: Synthetic peptide
GLNKTTE

SEQ ID NO: 10273 - protein, 7 aa, synthetic construct
  REGION 1..7: note = Description of Artificial Sequence: Synthetic peptide
GVQGDSM

SEQ ID NO: 10274 - protein, 7 aa, synthetic construct
  REGION 1..7: note = Description of Artificial Sequence: Synthetic peptide
ASVKSQP

SEQ ID NO: 10275 - protein, 7 aa, synthetic construct
  REGION 1..7: note = Description of Artificial Sequence: Synthetic peptide
QGTSPTV

SEQ ID NO: 10276 - protein, 7 aa, synthetic construct
  REGION 1..7: note = Description of Artificial Sequence: Synthetic peptide
TGLQSSS

SEQ ID NO: 10277 - protein, 7 aa, synthetic construct
  REGION 1..7: note = Description of Artificial Sequence: Synthetic peptide
MPLKSGV

SEQ ID NO: 10278 - protein, 7 aa, synthetic construct
  REGION 1..7: note = Description of Artificial Sequence: Synthetic peptide
STTSANV

SEQ ID NO: 10279 - protein, 7 aa, synthetic construct
  REGION 1..7: note = Description of Artificial Sequence: Synthetic peptide
ATSGDRT

SEQ ID NO: 10280 - protein, 7 aa, synthetic construct
  REGION 1..7: note = Description of Artificial Sequence: Synthetic peptide
VSGNHSA

SEQ ID NO: 10281 - protein, 7 aa, synthetic construct
  REGION 1..7: note = Description of Artificial Sequence: Synthetic peptide
EPSRAAQ

SEQ ID NO: 10282 - protein, 7 aa, synthetic construct
  REGION 1..7: note = Description of Artificial Sequence: Synthetic peptide
QDGSNRS

SEQ ID NO: 10283 - protein, 7 aa, synthetic construct
  REGION 1..7: note = Description of Artificial Sequence: Synthetic peptide
NSSPGLN

SEQ ID NO: 10284 - protein, 7 aa, synthetic construct
  REGION 1..7: note = Description of Artificial Sequence: Synthetic peptide
MGSSPNI

SEQ ID NO: 10285 - protein, 7 aa, synthetic construct
  REGION 1..7: note = Description of Artificial Sequence: Synthetic peptide
HTQDKLS

SEQ ID NO: 10286 - protein, 7 aa, synthetic construct
  REGION 1..7: note = Description of Artificial Sequence: Synthetic peptide
LNSTSTT

SEQ ID NO: 10287 - protein, 7 aa, synthetic construct
  REGION 1..7: note = Description of Artificial Sequence: Synthetic peptide
LGGTTGK

SEQ ID NO: 10288 - protein, 7 aa, synthetic construct
  REGION 1..7: note = Description of Artificial Sequence: Synthetic peptide
DSGNDRS

SEQ ID NO: 10289 - protein, 7 aa, synthetic construct
  REGION 1..7: note = Description of Artificial Sequence: Synthetic peptide
AAEGNKK

SEQ ID NO: 10290 - protein, 7 aa, synthetic construct
  REGION 1..7: note = Description of Artificial Sequence: Synthetic peptide
GGTKSAV

SEQ ID NO: 10291 - protein, 7 aa, synthetic construct
  REGION 1..7: note = Description of Artificial Sequence: Synthetic peptide
SDKERGR

SEQ ID NO: 10292 - protein, 7 aa, synthetic construct
  REGION 1..7: note = Description of Artificial Sequence: Synthetic peptide
VSSSTVS

SEQ ID NO: 10293 - protein, 7 aa, synthetic construct
  REGION 1..7: note = Description of Artificial Sequence: Synthetic peptide
ESPQQSA

SEQ ID NO: 10294 - protein, 7 aa, synthetic construct
  REGION 1..7: note = Description of Artificial Sequence: Synthetic peptide
QSNGAVS

SEQ ID NO: 10295 - protein, 7 aa, synthetic construct
  REGION 1..7: note = Description of Artificial Sequence: Synthetic peptide
RTGNTSM

SEQ ID NO: 10296 - protein, 7 aa, synthetic construct
  REGION 1..7: note = Description of Artificial Sequence: Synthetic peptide
GSSKTAP

SEQ ID NO: 10297 - protein, 7 aa, synthetic construct
  REGION 1..7: note = Description of Artificial Sequence: Synthetic peptide
SQSASHS

SEQ ID NO: 10298 - protein, 7 aa, synthetic construct
  REGION 1..7: note = Description of Artificial Sequence: Synthetic peptide
SHASNNV

SEQ ID NO: 10299 - protein, 7 aa, synthetic construct
  REGION 1..7: note = Description of Artificial Sequence: Synthetic peptide
SSAKGSG

SEQ ID NO: 10300 - protein, 7 aa, synthetic construct
  REGION 1..7: note = Description of Artificial Sequence: Synthetic peptide
SGSTSMV

SEQ ID NO: 10301 - protein, 7 aa, synthetic construct
  REGION 1..7: note = Description of Artificial Sequence: Synthetic peptide
IPKQSVG

SEQ ID NO: 10302 - protein, 7 aa, synthetic construct
  REGION 1..7: note = Description of Artificial Sequence: Synthetic peptide
QGNQTPV

SEQ ID NO: 10303 - protein, 7 aa, synthetic construct
  REGION 1..7: note = Description of Artificial Sequence: Synthetic peptide
TDKGAGS

SEQ ID NO: 10304 - protein, 7 aa, synthetic construct
  REGION 1..7: note = Description of Artificial Sequence: Synthetic peptide
ISEGTAR

SEQ ID NO: 10305 - protein, 7 aa, synthetic construct
  REGION 1..7: note = Description of Artificial Sequence: Synthetic peptide
GSLSQSG

SEQ ID NO: 10306 - protein, 7 aa, synthetic construct
  REGION 1..7: note = Description of Artificial Sequence: Synthetic peptide
GPDSALR

SEQ ID NO: 10307 - protein, 7 aa, synthetic construct
  REGION 1..7: note = Description of Artificial Sequence: Synthetic peptide
GSLPQDR

SEQ ID NO: 10308 - protein, 7 aa, synthetic construct
  REGION 1..7: note = Description of Artificial Sequence: Synthetic peptide
KIETGGG

SEQ ID NO: 10309 - protein, 7 aa, synthetic construct
  REGION 1..7: note = Description of Artificial Sequence: Synthetic peptide
HGENVQG

SEQ ID NO: 10310 - protein, 7 aa, synthetic construct
  REGION 1..7: note = Description of Artificial Sequence: Synthetic peptide
DSANTHK

SEQ ID NO: 10311 - protein, 7 aa, synthetic construct
  REGION 1..7: note = Description of Artificial Sequence: Synthetic peptide
GSEKERH

SEQ ID NO: 10312 - protein, 7 aa, synthetic construct
  REGION 1..7: note = Description of Artificial Sequence: Synthetic peptide
GLVKEGS

SEQ ID NO: 10313 - protein, 7 aa, synthetic construct
  REGION 1..7: note = Description of Artificial Sequence: Synthetic peptide
VASRSNG

SEQ ID NO: 10314 - protein, 7 aa, synthetic construct
  REGION 1..7: note = Description of Artificial Sequence: Synthetic peptide
DAAVARS

SEQ ID NO: 10315 - protein, 7 aa, synthetic construct
  REGION 1..7: note = Description of Artificial Sequence: Synthetic peptide
SPQNNGS

SEQ ID NO: 10316 - protein, 7 aa, synthetic construct
  REGION 1..7: note = Description of Artificial Sequence: Synthetic peptide
GSTPGLS

SEQ ID NO: 10317 - protein, 7 aa, synthetic construct
  REGION 1..7: note = Description of Artificial Sequence: Synthetic peptide
SASGSGN

SEQ ID NO: 10318 - protein, 7 aa, synthetic construct
  REGION 1..7: note = Description of Artificial Sequence: Synthetic peptide
QGAPING

SEQ ID NO: 10319 - protein, 7 aa, synthetic construct
  REGION 1..7: note = Description of Artificial Sequence: Synthetic peptide
GSKSALQ

SEQ ID NO: 10320 - protein, 7 aa, synthetic construct
  REGION 1..7: note = Description of Artificial Sequence: Synthetic peptide
SLAGGQG

SEQ ID NO: 10321 - protein, 7 aa, synthetic construct
  REGION 1..7: note = Description of Artificial Sequence: Synthetic peptide
LGKQQTG

SEQ ID NO: 10322 - protein, 7 aa, synthetic construct
  REGION 1..7: note = Description of Artificial Sequence: Synthetic peptide
IKNSQST

SEQ ID NO: 10323 - protein, 7 aa, synthetic construct
  REGION 1..7: note = Description of Artificial Sequence: Synthetic peptide
NSLDRPM

SEQ ID NO: 10324 - protein, 7 aa, synthetic construct
  REGION 1..7: note = Description of Artificial Sequence: Synthetic peptide
TTGSGAT

SEQ ID NO: 10325 - protein, 7 aa, synthetic construct
  REGION 1..7: note = Description of Artificial Sequence: Synthetic peptide
TSGSRNG

SEQ ID NO: 10326 - protein, 7 aa, synthetic construct
  REGION 1..7: note = Description of Artificial Sequence: Synthetic peptide
QPGSERQ

SEQ ID NO: 10327 - protein, 7 aa, synthetic construct
  REGION 1..7: note = Description of Artificial Sequence: Synthetic peptide
MQSAPST

SEQ ID NO: 10328 - protein, 7 aa, synthetic construct
  REGION 1..7: note = Description of Artificial Sequence: Synthetic peptide
RESDSPK

SEQ ID NO: 10329 - protein, 7 aa, synthetic construct
  REGION 1..7: note = Description of Artificial Sequence: Synthetic peptide
QPVSKTA

SEQ ID NO: 10330 - protein, 7 aa, synthetic construct
  REGION 1..7: note = Description of Artificial Sequence: Synthetic peptide
SGQPVKG

SEQ ID NO: 10331 - protein, 7 aa, synthetic construct
  REGION 1..7: note = Description of Artificial Sequence: Synthetic peptide
SGLSSKQ

SEQ ID NO: 10332 - protein, 7 aa, synthetic construct
  REGION 1..7: note = Description of Artificial Sequence: Synthetic peptide
QPTDGSK

SEQ ID NO: 10333 - protein, 7 aa, synthetic construct
  REGION 1..7: note = Description of Artificial Sequence: Synthetic peptide
EGNSIHK

SEQ ID NO: 10334 - protein, 7 aa, synthetic construct
  REGION 1..7: note = Description of Artificial Sequence: Synthetic peptide
TTTQAKM

SEQ ID NO: 10335 - protein, 7 aa, synthetic construct
  REGION 1..7: note = Description of Artificial Sequence: Synthetic peptide
NAASKPL

SEQ ID NO: 10336 - protein, 7 aa, synthetic construct
  REGION 1..7: note = Description of Artificial Sequence: Synthetic peptide
GAGNQPK

SEQ ID NO: 10337 - protein, 7 aa, synthetic construct
  REGION 1..7: note = Description of Artificial Sequence: Synthetic peptide
GKVDKDK

SEQ ID NO: 10338 - protein, 7 aa, synthetic construct
  REGION 1..7: note = Description of Artificial Sequence: Synthetic peptide
AGVQGAT

SEQ ID NO: 10339 - protein, 7 aa, synthetic construct
  REGION 1..7: note = Description of Artificial Sequence: Synthetic peptide
SPDVKVA

SEQ ID NO: 10340 - protein, 7 aa, synthetic construct
  REGION 1..7: note = Description of Artificial Sequence: Synthetic peptide
IPSSKAV

SEQ ID NO: 10341 - protein, 7 aa, synthetic construct
  REGION 1..7: note = Description of Artificial Sequence: Synthetic peptide
DQGSHNR

SEQ ID NO: 10342 - protein, 7 aa, synthetic construct
  REGION 1..7: note = Description of Artificial Sequence: Synthetic peptide
KAEANTQ

SEQ ID NO: 10343 - protein, 7 aa, synthetic construct
  REGION 1..7: note = Description of Artificial Sequence: Synthetic peptide
KDSAGGS

SEQ ID NO: 10344 - protein, 7 aa, synthetic construct
  REGION 1..7: note = Description of Artificial Sequence: Synthetic peptide
TAEKSLV

SEQ ID NO: 10345 - protein, 7 aa, synthetic construct
  REGION 1..7: note = Description of Artificial Sequence: Synthetic peptide
SVAHTSA

SEQ ID NO: 10346 - protein, 7 aa, synthetic construct
  REGION 1..7: note = Description of Artificial Sequence: Synthetic peptide
NPEAKSK

SEQ ID NO: 10347 - protein, 7 aa, synthetic construct
  REGION 1..7: note = Description of Artificial Sequence: Synthetic peptide
QGTSVSG

SEQ ID NO: 10348 - protein, 7 aa, synthetic construct
  REGION 1..7: note = Description of Artificial Sequence: Synthetic peptide
ATNKAGL

SEQ ID NO: 10349 - protein, 7 aa, synthetic construct
  REGION 1..7: note = Description of Artificial Sequence: Synthetic peptide
STSQSNL

SEQ ID NO: 10350 - protein, 7 aa, synthetic construct
  REGION 1..7: note = Description of Artificial Sequence: Synthetic peptide
HAGEHRT

SEQ ID NO: 10351 - protein, 7 aa, synthetic construct
  REGION 1..7: note = Description of Artificial Sequence: Synthetic peptide
GSSSQSS

SEQ ID NO: 10352 - protein, 7 aa, synthetic construct
  REGION 1..7: note = Description of Artificial Sequence: Synthetic peptide
TVGSERS

SEQ ID NO: 10353 - protein, 7 aa, synthetic construct
  REGION 1..7: note = Description of Artificial Sequence: Synthetic peptide
HSSGSNA

SEQ ID NO: 10354 - protein, 7 aa, synthetic construct
  REGION 1..7: note = Description of Artificial Sequence: Synthetic peptide
RSGNGIS

SEQ ID NO: 10355 - protein, 7 aa, synthetic construct
  REGION 1..7: note = Description of Artificial Sequence: Synthetic peptide
DSQRSNQ

SEQ ID NO: 10356 - protein, 7 aa, synthetic construct
  REGION 1..7: note = Description of Artificial Sequence: Synthetic peptide
DSHKGSK

SEQ ID NO: 10357 - protein, 7 aa, synthetic construct
  REGION 1..7: note = Description of Artificial Sequence: Synthetic peptide
GTSKSER

SEQ ID NO: 10358 - protein, 7 aa, synthetic construct
  REGION 1..7: note = Description of Artificial Sequence: Synthetic peptide
VATNTPK

SEQ ID NO: 10359 - protein, 7 aa, synthetic construct
  REGION 1..7: note = Description of Artificial Sequence: Synthetic peptide
SGGQSAH

SEQ ID NO: 10360 - protein, 7 aa, synthetic construct
  REGION 1..7: note = Description of Artificial Sequence: Synthetic peptide
SGVDLKT

SEQ ID NO: 10361 - protein, 7 aa, synthetic construct
  REGION 1..7: note = Description of Artificial Sequence: Synthetic peptide
TAGSQHT

SEQ ID NO: 10362 - protein, 7 aa, synthetic construct
  REGION 1..7: note = Description of Artificial Sequence: Synthetic peptide
HQSGSGS

SEQ ID NO: 10363 - protein, 7 aa, synthetic construct
  REGION 1..7: note = Description of Artificial Sequence: Synthetic peptide
GDGPPTR

SEQ ID NO: 10364 - protein, 7 aa, synthetic construct
  REGION 1..7: note = Description of Artificial Sequence: Synthetic peptide
KQLSATT

SEQ ID NO: 10365 - protein, 7 aa, synthetic construct
  REGION 1..7: note = Description of Artificial Sequence: Synthetic peptide
SSAKASP

SEQ ID NO: 10366 - protein, 7 aa, synthetic construct
  REGION 1..7: note = Description of Artificial Sequence: Synthetic peptide
HPSQASK

SEQ ID NO: 10367 - protein, 7 aa, synthetic construct
  REGION 1..7: note = Description of Artificial Sequence: Synthetic peptide
ERNSKLS

SEQ ID NO: 10368 - protein, 7 aa, synthetic construct
  REGION 1..7: note = Description of Artificial Sequence: Synthetic peptide
VPDTGRK

SEQ ID NO: 10369 - protein, 7 aa, synthetic construct
  REGION 1..7: note = Description of Artificial Sequence: Synthetic peptide
ESKPSSG

SEQ ID NO: 10370 - protein, 7 aa, synthetic construct
  REGION 1..7: note = Description of Artificial Sequence: Synthetic peptide
SISTPTS

SEQ ID NO: 10371 - protein, 7 aa, synthetic construct
  REGION 1..7: note = Description of Artificial Sequence: Synthetic peptide
AQGSPIN

SEQ ID NO: 10372 - protein, 7 aa, synthetic construct
  REGION 1..7: note = Description of Artificial Sequence: Synthetic peptide
QPNSPSV

SEQ ID NO: 10373 - protein, 7 aa, synthetic construct
  REGION 1..7: note = Description of Artificial Sequence: Synthetic peptide
GVNSASH

SEQ ID NO: 10374 - protein, 7 aa, synthetic construct
  REGION 1..7: note = Description of Artificial Sequence: Synthetic peptide
TSNTKQG

SEQ ID NO: 10375 - protein, 7 aa, synthetic construct
  REGION 1..7: note = Description of Artificial Sequence: Synthetic peptide
ESSSSVS

SEQ ID NO: 10376 - protein, 7 aa, synthetic construct
  REGION 1..7: note = Description of Artificial Sequence: Synthetic peptide
VNAKPSL

SEQ ID NO: 10377 - protein, 7 aa, synthetic construct
  REGION 1..7: note = Description of Artificial Sequence: Synthetic peptide
GRDVPTR

SEQ ID NO: 10378 - protein, 7 aa, synthetic construct
  REGION 1..7: note = Description of Artificial Sequence: Synthetic peptide
EGVTKNK

SEQ ID NO: 10379 - protein, 7 aa, synthetic construct
  REGION 1..7: note = Description of Artificial Sequence: Synthetic peptide
AASPATA

SEQ ID NO: 10380 - protein, 7 aa, synthetic construct
  REGION 1..7: note = Description of Artificial Sequence: Synthetic peptide
TREGAPS

SEQ ID NO: 10381 - protein, 7 aa, synthetic construct
  REGION 1..7: note = Description of Artificial Sequence: Synthetic peptide
NVNKIRD

SEQ ID NO: 10382 - protein, 7 aa, synthetic construct
  REGION 1..7: note = Description of Artificial Sequence: Synthetic peptide
AGGKGLN

SEQ ID NO: 10383 - protein, 7 aa, synthetic construct
  REGION 1..7: note = Description of Artificial Sequence: Synthetic peptide
SGHGSNS

SEQ ID NO: 10384 - protein, 7 aa, synthetic construct
  REGION 1..7: note = Description of Artificial Sequence: Synthetic peptide
LEGKPNQ

SEQ ID NO: 10385 - protein, 7 aa, synthetic construct
  REGION 1..7: note = Description of Artificial Sequence: Synthetic peptide
KKATTNE

SEQ ID NO: 10386 - protein, 7 aa, synthetic construct
  REGION 1..7: note = Description of Artificial Sequence: Synthetic peptide
KSDDKTR

SEQ ID NO: 10387 - protein, 7 aa, synthetic construct
  REGION 1..7: note = Description of Artificial Sequence: Synthetic peptide
NSTSVNA

SEQ ID NO: 10388 - protein, 7 aa, synthetic construct
  REGION 1..7: note = Description of Artificial Sequence: Synthetic peptide
KEDKINS

SEQ ID NO: 10389 - protein, 7 aa, synthetic construct
  REGION 1..7: note = Description of Artificial Sequence: Synthetic peptide
KGSGSNV

SEQ ID NO: 10390 - protein, 7 aa, synthetic construct
  REGION 1..7: note = Description of Artificial Sequence: Synthetic peptide
NIGSQKG

SEQ ID NO: 10391 - protein, 7 aa, synthetic construct
  REGION 1..7: note = Description of Artificial Sequence: Synthetic peptide
NSGQVVA

SEQ ID NO: 10392 - protein, 7 aa, synthetic construct
  REGION 1..7: note = Description of Artificial Sequence: Synthetic peptide
TTQNSSA

SEQ ID NO: 10393 - protein, 7 aa, synthetic construct
  REGION 1..7: note = Description of Artificial Sequence: Synthetic peptide
TGQHTSS

SEQ ID NO: 10394 - protein, 7 aa, synthetic construct
  REGION 1..7: note = Description of Artificial Sequence: Synthetic peptide
TRNSPGE

SEQ ID NO: 10395 - protein, 7 aa, synthetic construct
  REGION 1..7: note = Description of Artificial Sequence: Synthetic peptide
TDDRSSQ

SEQ ID NO: 10396 - protein, 7 aa, synthetic construct
  REGION 1..7: note = Description of Artificial Sequence: Synthetic peptide
TSREKIT

SEQ ID NO: 10397 - protein, 7 aa, synthetic construct
  REGION 1..7: note = Description of Artificial Sequence: Synthetic peptide
RDNTRSS

SEQ ID NO: 10398 - protein, 7 aa, synthetic construct
  REGION 1..7: note = Description of Artificial Sequence: Synthetic peptide
SKDQSTG

SEQ ID NO: 10399 - protein, 7 aa, synthetic construct
  REGION 1..7: note = Description of Artificial Sequence: Synthetic peptide
SNHGEKG

SEQ ID NO: 10400 - protein, 7 aa, synthetic construct
  REGION 1..7: note = Description of Artificial Sequence: Synthetic peptide
STNSSHA

SEQ ID NO: 10401 - protein, 7 aa, synthetic construct
  REGION 1..7: note = Description of Artificial Sequence: Synthetic peptide
SSDGTHA

SEQ ID NO: 10402 - protein, 7 aa, synthetic construct
  REGION 1..7: note = Description of Artificial Sequence: Synthetic peptide
SQKEHPT

SEQ ID NO: 10403 - protein, 7 aa, synthetic construct
  REGION 1..7: note = Description of Artificial Sequence: Synthetic peptide
SASSSLK

SEQ ID NO: 10404 - protein, 7 aa, synthetic construct
  REGION 1..7: note = Description of Artificial Sequence: Synthetic peptide
IATGLTK

SEQ ID NO: 10405 - protein, 7 aa, synthetic construct
  REGION 1..7: note = Description of Artificial Sequence: Synthetic peptide
MKDTHAS

SEQ ID NO: 10406 - protein, 7 aa, synthetic construct
  REGION 1..7: note = Description of Artificial Sequence: Synthetic peptide
QNTTSVL

SEQ ID NO: 10407 - protein, 7 aa, synthetic construct
  REGION 1..7: note = Description of Artificial Sequence: Synthetic peptide
QNATRSE

SEQ ID NO: 10408 - protein, 7 aa, synthetic construct
  REGION 1..7: note = Description of Artificial Sequence: Synthetic peptide
QHGKDLG

SEQ ID NO: 10409 - protein, 7 aa, synthetic construct
  REGION 1..7: note = Description of Artificial Sequence: Synthetic peptide
QGHDSAR

SEQ ID NO: 10410 - protein, 7 aa, synthetic construct
  REGION 1..7: note = Description of Artificial Sequence: Synthetic peptide
RNEGGMT

SEQ ID NO: 10411 - protein, 7 aa, synthetic construct
  REGION 1..7: note = Description of Artificial Sequence: Synthetic peptide
RGDNPAS

SEQ ID NO: 10412 - protein, 7 aa, synthetic construct
  REGION 1..7: note = Description of Artificial Sequence: Synthetic peptide
LATEKST

SEQ ID NO: 10413 - protein, 7 aa, synthetic construct
  REGION 1..7: note = Description of Artificial Sequence: Synthetic peptide
LTETPKS

SEQ ID NO: 10414 - protein, 7 aa, synthetic construct
  REGION 1..7: note = Description of Artificial Sequence: Synthetic peptide
ENTQGGR

SEQ ID NO: 10415 - protein, 7 aa, synthetic construct
  REGION 1..7: note = Description of Artificial Sequence: Synthetic peptide
EPTASVR

SEQ ID NO: 10416 - protein, 7 aa, synthetic construct
  REGION 1..7: note = Description of Artificial Sequence: Synthetic peptide
DNRASAT

SEQ ID NO: 10417 - protein, 7 aa, synthetic construct
  REGION 1..7: note = Description of Artificial Sequence: Synthetic peptide
DNSNKMG

SEQ ID NO: 10418 - protein, 7 aa, synthetic construct
  REGION 1..7: note = Description of Artificial Sequence: Synthetic peptide
ESSNNLK

SEQ ID NO: 10419 - protein, 7 aa, synthetic construct
  REGION 1..7: note = Description of Artificial Sequence: Synthetic peptide
DNDRGKS

SEQ ID NO: 10420 - protein, 7 aa, synthetic construct
  REGION 1..7: note = Description of Artificial Sequence: Synthetic peptide
DSHKGIS

SEQ ID NO: 10421 - protein, 7 aa, synthetic construct
  REGION 1..7: note = Description of Artificial Sequence: Synthetic peptide
ATGGGGA

SEQ ID NO: 10422 - protein, 7 aa, synthetic construct
  REGION 1..7: note = Description of Artificial Sequence: Synthetic peptide
AATGQMS

SEQ ID NO: 10423 - protein, 7 aa, synthetic construct
  REGION 1..7: note = Description of Artificial Sequence: Synthetic peptide
AASKSSE

SEQ ID NO: 10424 - protein, 7 aa, synthetic construct
  REGION 1..7: note = Description of Artificial Sequence: Synthetic peptide
AGPSSPT

SEQ ID NO: 10425 - protein, 7 aa, synthetic construct
  REGION 1..7: note = Description of Artificial Sequence: Synthetic peptide
AGAPNKT

SEQ ID NO: 10426 - protein, 7 aa, synthetic construct
  REGION 1..7: note = Description of Artificial Sequence: Synthetic peptide
ATKEGIA

SEQ ID NO: 10427 - protein, 7 aa, synthetic construct
  REGION 1..7: note = Description of Artificial Sequence: Synthetic peptide
ANSSTEK

SEQ ID NO: 10428 - protein, 7 aa, synthetic construct
  REGION 1..7: note = Description of Artificial Sequence: Synthetic peptide
ADRPTTV

SEQ ID NO: 10429 - protein, 7 aa, synthetic construct
  REGION 1..7: note = Description of Artificial Sequence: Synthetic peptide
GNSQSSG

SEQ ID NO: 10430 - protein, 7 aa, synthetic construct
  REGION 1..7: note = Description of Artificial Sequence: Synthetic peptide
GTTTAGR

SEQ ID NO: 10431 - protein, 7 aa, synthetic construct
  REGION 1..7: note = Description of Artificial Sequence: Synthetic peptide
GTLADTK

SEQ ID NO: 10432 - protein, 7 aa, synthetic construct
  REGION 1..7: note = Description of Artificial Sequence: Synthetic peptide
GSKTDMR

SEQ ID NO: 10433 - protein, 7 aa, synthetic construct
  REGION 1..7: note = Description of Artificial Sequence: Synthetic peptide
GGISNSA

SEQ ID NO: 10434 - protein, 7 aa, synthetic construct
  REGION 1..7: note = Description of Artificial Sequence: Synthetic peptide
GVPLSTG

SEQ ID NO: 10435 - protein, 7 aa, synthetic construct
  REGION 1..7: note = Description of Artificial Sequence: Synthetic peptide
GVNRDAA

SEQ ID NO: 10436 - protein, 7 aa, synthetic construct
  REGION 1..7: note = Description of Artificial Sequence: Synthetic peptide
GTTGQMV

SEQ ID NO: 10437 - protein, 7 aa, synthetic construct
  REGION 1..7: note = Description of Artificial Sequence: Synthetic peptide
GTTLSEK

SEQ ID NO: 10438 - protein, 7 aa, synthetic construct
  REGION 1..7: note = Description of Artificial Sequence: Synthetic peptide
GLDTQKA

SEQ ID NO: 10439 - protein, 7 aa, synthetic construct
  REGION 1..7: note = Description of Artificial Sequence: Synthetic peptide
GGLQEVK

SEQ ID NO: 10440 - protein, 7 aa, synthetic construct
  REGION 1..7: note = Description of Artificial Sequence: Synthetic peptide
VGSSGHV

SEQ ID NO: 10441 - protein, 7 aa, synthetic construct
  REGION 1..7: note = Description of Artificial Sequence: Synthetic peptide
VGQRDTG

SEQ ID NO: 10442 - protein, 7 aa, synthetic construct
  REGION 1..7: note = Description of Artificial Sequence: Synthetic peptide
VNNSSTT

SEQ ID NO: 10443 - protein, 7 aa, synthetic construct
  REGION 1..7: note = Description of Artificial Sequence: Synthetic peptide
VTQSANG

SEQ ID NO: 10444 - protein, 7 aa, synthetic construct
  REGION 1..7: note = Description of Artificial Sequence: Synthetic peptide
VTSNSSV

SEQ ID NO: 10445 - protein, 7 aa, synthetic construct
  REGION 1..7: note = Description of Artificial Sequence: Synthetic peptide
YGDSPKN

SEQ ID NO: 10446 - protein, 7 aa, synthetic construct
  REGION 1..7: note = Description of Artificial Sequence: Synthetic peptide
SGSQAVL

SEQ ID NO: 10447 - protein, 7 aa, synthetic construct
  REGION 1..7: note = Description of Artificial Sequence: Synthetic peptide
SPPEHKV

SEQ ID NO: 10448 - protein, 7 aa, synthetic construct
  REGION 1..7: note = Description of Artificial Sequence: Synthetic peptide
LATSSTG

SEQ ID NO: 10449 - protein, 7 aa, synthetic construct
  REGION 1..7: note = Description of Artificial Sequence: Synthetic peptide
SQRPSSV

SEQ ID NO: 10450 - protein, 7 aa, synthetic construct
  REGION 1..7: note = Description of Artificial Sequence: Synthetic peptide
SSRDSKS

SEQ ID NO: 10451 - protein, 7 aa, synthetic construct
  REGION 1..7: note = Description of Artificial Sequence: Synthetic peptide
GMGGQNV

SEQ ID NO: 10452 - protein, 7 aa, synthetic construct
  REGION 1..7: note = Description of Artificial Sequence: Synthetic peptide
AGRSDKG

SEQ ID NO: 10453 - protein, 7 aa, synthetic construct
  REGION 1..7: note = Description of Artificial Sequence: Synthetic peptide
SATTSER

SEQ ID NO: 10454 - protein, 7 aa, synthetic construct
  REGION 1..7: note = Description of Artificial Sequence: Synthetic peptide
SANAARN

SEQ ID NO: 10455 - protein, 7 aa, synthetic construct
  REGION 1..7: note = Description of Artificial Sequence: Synthetic peptide
SGATPPR

SEQ ID NO: 10456 - protein, 7 aa, synthetic construct
  REGION 1..7: note = Description of Artificial Sequence: Synthetic peptide
NHEGKVQ

SEQ ID NO: 10457 - protein, 7 aa, synthetic construct
  REGION 1..7: note = Description of Artificial Sequence: Synthetic peptide
VRDGSNV

SEQ ID NO: 10458 - protein, 7 aa, synthetic construct
  REGION 1..7: note = Description of Artificial Sequence: Synthetic peptide
SLTRSSV

SEQ ID NO: 10459 - protein, 7 aa, synthetic construct
  REGION 1..7: note = Description of Artificial Sequence: Synthetic peptide
QTLGGSG

SEQ ID NO: 10460 - protein, 7 aa, synthetic construct
  REGION 1..7: note = Description of Artificial Sequence: Synthetic peptide
MSDGHST

SEQ ID NO: 10461 - protein, 7 aa, synthetic construct
  REGION 1..7: note = Description of Artificial Sequence: Synthetic peptide
LTAGSGT

SEQ ID NO: 10462 - protein, 7 aa, synthetic construct
  REGION 1..7: note = Description of Artificial Sequence: Synthetic peptide
DTTSKRA

SEQ ID NO: 10463 - protein, 7 aa, synthetic construct
  REGION 1..7: note = Description of Artificial Sequence: Synthetic peptide
HTAGNNV

SEQ ID NO: 10464 - protein, 7 aa, synthetic construct
  REGION 1..7: note = Description of Artificial Sequence: Synthetic peptide
AHSAKDA

SEQ ID NO: 10465 - protein, 7 aa, synthetic construct
  REGION 1..7: note = Description of Artificial Sequence: Synthetic peptide
TTESTTR

SEQ ID NO: 10466 - protein, 7 aa, synthetic construct
  REGION 1..7: note = Description of Artificial Sequence: Synthetic peptide
TTEASNR

SEQ ID NO: 10467 - protein, 7 aa, synthetic construct
  REGION 1..7: note = Description of Artificial Sequence: Synthetic peptide
DSKSAHA

SEQ ID NO: 10468 - protein, 7 aa, synthetic construct
  REGION 1..7: note = Description of Artificial Sequence: Synthetic peptide
GGLDKGV

SEQ ID NO: 10469 - protein, 7 aa, synthetic construct
  REGION 1..7: note = Description of Artificial Sequence: Synthetic peptide
VKVGEQH

SEQ ID NO: 10470 - protein, 7 aa, synthetic construct
  REGION 1..7: note = Description of Artificial Sequence: Synthetic peptide
TKSNGNT

SEQ ID NO: 10471 - protein, 7 aa, synthetic construct
  REGION 1..7: note = Description of Artificial Sequence: Synthetic peptide
VGATPVQ

SEQ ID NO: 10472 - protein, 7 aa, synthetic construct
  REGION 1..7: note = Description of Artificial Sequence: Synthetic peptide
TNDSKSK

SEQ ID NO: 10473 - protein, 7 aa, synthetic construct
  REGION 1..7: note = Description of Artificial Sequence: Synthetic peptide
MASNSPV

SEQ ID NO: 10474 - protein, 7 aa, synthetic construct
  REGION 1..7: note = Description of Artificial Sequence: Synthetic peptide
EPADKGT

SEQ ID NO: 10475 - protein, 7 aa, synthetic construct
  REGION 1..7: note = Description of Artificial Sequence: Synthetic peptide
VTTAGGS

SEQ ID NO: 10476 - protein, 7 aa, synthetic construct
  REGION 1..7: note = Description of Artificial Sequence: Synthetic peptide
VSTSSTR

SEQ ID NO: 10477 - protein, 7 aa, synthetic construct
  REGION 1..7: note = Description of Artificial Sequence: Synthetic peptide
ANSTKTM

SEQ ID NO: 10478 - protein, 7 aa, synthetic construct
  REGION 1..7: note = Description of Artificial Sequence: Synthetic peptide
DKVRDTQ

SEQ ID NO: 10479 - protein, 7 aa, synthetic construct
  REGION 1..7: note = Description of Artificial Sequence: Synthetic peptide
GPVGSSQ

SEQ ID NO: 10480 - protein, 7 aa, synthetic construct
  REGION 1..7: note = Description of Artificial Sequence: Synthetic peptide
MKTESQM

SEQ ID NO: 10481 - protein, 7 aa, synthetic construct
  REGION 1..7: note = Description of Artificial Sequence: Synthetic peptide
TTDKGRD

SEQ ID NO: 10482 - protein, 7 aa, synthetic construct
  REGION 1..7: note = Description of Artificial Sequence: Synthetic peptide
RQGDGGV

SEQ ID NO: 10483 - protein, 7 aa, synthetic construct
  REGION 1..7: note = Description of Artificial Sequence: Synthetic peptide
GSSNSAS

SEQ ID NO: 10484 - protein, 7 aa, synthetic construct
  REGION 1..7: note = Description of Artificial Sequence: Synthetic peptide
GQVGTHP

SEQ ID NO: 10485 - protein, 7 aa, synthetic construct
  REGION 1..7: note = Description of Artificial Sequence: Synthetic peptide
SEVAQKS

SEQ ID NO: 10486 - protein, 7 aa, synthetic construct
  REGION 1..7: note = Description of Artificial Sequence: Synthetic peptide
HGTSSTS

SEQ ID NO: 10487 - protein, 7 aa, synthetic construct
  REGION 1..7: note = Description of Artificial Sequence: Synthetic peptide
GAEGSIR

SEQ ID NO: 10488 - protein, 7 aa, synthetic construct
  REGION 1..7: note = Description of Artificial Sequence: Synthetic peptide
FEQGSRS

SEQ ID NO: 10489 - protein, 7 aa, synthetic construct
  REGION 1..7: note = Description of Artificial Sequence: Synthetic peptide
ANKSSAM

SEQ ID NO: 10490 - protein, 7 aa, synthetic construct
  REGION 1..7: note = Description of Artificial Sequence: Synthetic peptide
LDKNGSA

SEQ ID NO: 10491 - protein, 7 aa, synthetic construct
  REGION 1..7: note = Description of Artificial Sequence: Synthetic peptide
EKSNSNG

SEQ ID NO: 10492 - protein, 7 aa, synthetic construct
  REGION 1..7: note = Description of Artificial Sequence: Synthetic peptide
GSNQRTT

SEQ ID NO: 10493 - protein, 7 aa, synthetic construct
  REGION 1..7: note = Description of Artificial Sequence: Synthetic peptide
SGSSPFK

SEQ ID NO: 10494 - protein, 7 aa, synthetic construct
  REGION 1..7: note = Description of Artificial Sequence: Synthetic peptide
RNAEKAV

SEQ ID NO: 10495 - protein, 7 aa, synthetic construct
  REGION 1..7: note = Description of Artificial Sequence: Synthetic peptide
SQEKNSA

SEQ ID NO: 10496 - protein, 7 aa, synthetic construct
  REGION 1..7: note = Description of Artificial Sequence: Synthetic peptide
QNGKQAP

SEQ ID NO: 10497 - protein, 7 aa, synthetic construct
  REGION 1..7: note = Description of Artificial Sequence: Synthetic peptide
RQNSKDT

SEQ ID NO: 10498 - protein, 7 aa, synthetic construct
  REGION 1..7: note = Description of Artificial Sequence: Synthetic peptide
ASEKASL

SEQ ID NO: 10499 - protein, 7 aa, synthetic construct
  REGION 1..7: note = Description of Artificial Sequence: Synthetic peptide
LGSNSPT

SEQ ID NO: 10500 - protein, 7 aa, synthetic construct
  REGION 1..7: note = Description of Artificial Sequence: Synthetic peptide
TSESKSA

SEQ ID NO: 10501 - protein, 7 aa, synthetic construct
  REGION 1..7: note = Description of Artificial Sequence: Synthetic peptide
NAGAQNR

SEQ ID NO: 10502 - protein, 7 aa, synthetic construct
  REGION 1..7: note = Description of Artificial Sequence: Synthetic peptide
MSTSGHH

SEQ ID NO: 10503 - protein, 7 aa, synthetic construct
  REGION 1..7: note = Description of Artificial Sequence: Synthetic peptide
QGPERGG

SEQ ID NO: 10504 - protein, 7 aa, synthetic construct
  REGION 1..7: note = Description of Artificial Sequence: Synthetic peptide
LGHGNHS

SEQ ID NO: 10505 - protein, 7 aa, synthetic construct
  REGION 1..7: note = Description of Artificial Sequence: Synthetic peptide
ESVDRSR

SEQ ID NO: 10506 - protein, 7 aa, synthetic construct
  REGION 1..7: note = Description of Artificial Sequence: Synthetic peptide
ARSPGSG

SEQ ID NO: 10507 - protein, 7 aa, synthetic construct
  REGION 1..7: note = Description of Artificial Sequence: Synthetic peptide
VSNPGNQ

SEQ ID NO: 10508 - protein, 7 aa, synthetic construct
  REGION 1..7: note = Description of Artificial Sequence: Synthetic peptide
GTTDSRA

SEQ ID NO: 10509 - protein, 7 aa, synthetic construct
  REGION 1..7: note = Description of Artificial Sequence: Synthetic peptide
AGNNDQK

SEQ ID NO: 10510 - protein, 7 aa, synthetic construct
  REGION 1..7: note = Description of Artificial Sequence: Synthetic peptide
TPAVNNV

SEQ ID NO: 10511 - protein, 7 aa, synthetic construct
  REGION 1..7: note = Description of Artificial Sequence: Synthetic peptide
HRNTDVS

SEQ ID NO: 10512 - protein, 7 aa, synthetic construct
  REGION 1..7: note = Description of Artificial Sequence: Synthetic peptide
DMNSVSK

SEQ ID NO: 10513 - protein, 7 aa, synthetic construct
  REGION 1..7: note = Description of Artificial Sequence: Synthetic peptide
GSESGSH

SEQ ID NO: 10514 - protein, 7 aa, synthetic construct
  REGION 1..7: note = Description of Artificial Sequence: Synthetic peptide
AVGASSS

SEQ ID NO: 10515 - protein, 7 aa, synthetic construct
  REGION 1..7: note = Description of Artificial Sequence: Synthetic peptide
QPSQTPK

SEQ ID NO: 10516 - protein, 7 aa, synthetic construct
  REGION 1..7: note = Description of Artificial Sequence: Synthetic peptide
SPNQPSA

SEQ ID NO: 10517 - protein, 7 aa, synthetic construct
  REGION 1..7: note = Description of Artificial Sequence: Synthetic peptide
ADGGKTN

SEQ ID NO: 10518 - protein, 7 aa, synthetic construct
  REGION 1..7: note = Description of Artificial Sequence: Synthetic peptide
KGASASM

SEQ ID NO: 10519 - protein, 7 aa, synthetic construct
  REGION 1..7: note = Description of Artificial Sequence: Synthetic peptide
NSPSKST

SEQ ID NO: 10520 - protein, 7 aa, synthetic construct
  REGION 1..7: note = Description of Artificial Sequence: Synthetic peptide
TMDSRRD

SEQ ID NO: 10521 - protein, 7 aa, synthetic construct
  REGION 1..7: note = Description of Artificial Sequence: Synthetic peptide
TSGLTST

SEQ ID NO: 10522 - protein, 7 aa, synthetic construct
  REGION 1..7: note = Description of Artificial Sequence: Synthetic peptide
SSSSTGG

SEQ ID NO: 10523 - protein, 7 aa, synthetic construct
  REGION 1..7: note = Description of Artificial Sequence: Synthetic peptide
SPPGSKS

SEQ ID NO: 10524 - protein, 7 aa, synthetic construct
  REGION 1..7: note = Description of Artificial Sequence: Synthetic peptide
SGNPTKV

SEQ ID NO: 10525 - protein, 7 aa, synthetic construct
  REGION 1..7: note = Description of Artificial Sequence: Synthetic peptide
EGLSQSR

SEQ ID NO: 10526 - protein, 7 aa, synthetic construct
  REGION 1..7: note = Description of Artificial Sequence: Synthetic peptide
DTGVQSR

SEQ ID NO: 10527 - protein, 7 aa, synthetic construct
  REGION 1..7: note = Description of Artificial Sequence: Synthetic peptide
DGVQTAN

SEQ ID NO: 10528 - protein, 7 aa, synthetic construct
  REGION 1..7: note = Description of Artificial Sequence: Synthetic peptide
GGSAQER

SEQ ID NO: 10529 - protein, 7 aa, synthetic construct
  REGION 1..7: note = Description of Artificial Sequence: Synthetic peptide
GAGSTSK

SEQ ID NO: 10530 - protein, 7 aa, synthetic construct
  REGION 1..7: note = Description of Artificial Sequence: Synthetic peptide
SSSGSTQ

SEQ ID NO: 10531 - protein, 7 aa, synthetic construct
  REGION 1..7: note = Description of Artificial Sequence: Synthetic peptide
ASVPTSS

SEQ ID NO: 10532 - protein, 7 aa, synthetic construct
  REGION 1..7: note = Description of Artificial Sequence: Synthetic peptide
AVSKNTL

SEQ ID NO: 10533 - protein, 7 aa, synthetic construct
  REGION 1..7: note = Description of Artificial Sequence: Synthetic peptide
SHTPPNG

SEQ ID NO: 10534 - protein, 7 aa, synthetic construct
  REGION 1..7: note = Description of Artificial Sequence: Synthetic peptide
TGVDTNR

SEQ ID NO: 10535 - protein, 7 aa, synthetic construct
  REGION 1..7: note = Description of Artificial Sequence: Synthetic peptide
NQGGKGD

SEQ ID NO: 10536 - protein, 7 aa, synthetic construct
  REGION 1..7: note = Description of Artificial Sequence: Synthetic peptide
SNSTVHT

SEQ ID NO: 10537 - protein, 7 aa, synthetic construct
  REGION 1..7: note = Description of Artificial Sequence: Synthetic peptide
SSNKPGL

SEQ ID NO: 10538 - protein, 7 aa, synthetic construct
  REGION 1..7: note = Description of Artificial Sequence: Synthetic peptide
SSGKPNG

SEQ ID NO: 10539 - protein, 7 aa, synthetic construct
  REGION 1..7: note = Description of Artificial Sequence: Synthetic peptide
SSGPSGR

SEQ ID NO: 10540 - protein, 7 aa, synthetic construct
  REGION 1..7: note = Description of Artificial Sequence: Synthetic peptide
EKLSTAA

SEQ ID NO: 10541 - protein, 7 aa, synthetic construct
  REGION 1..7: note = Description of Artificial Sequence: Synthetic peptide
DTSSLAK

SEQ ID NO: 10542 - protein, 7 aa, synthetic construct
  REGION 1..7: note = Description of Artificial Sequence: Synthetic peptide
CASKDSR

SEQ ID NO: 10543 - protein, 7 aa, synthetic construct
  REGION 1..7: note = Description of Artificial Sequence: Synthetic peptide
TASGHNN

SEQ ID NO: 10544 - protein, 7 aa, synthetic construct
  REGION 1..7: note = Description of Artificial Sequence: Synthetic peptide
SNSTPSL

SEQ ID NO: 10545 - protein, 7 aa, synthetic construct
  REGION 1..7: note = Description of Artificial Sequence: Synthetic peptide
QPTNTSK

SEQ ID NO: 10546 - protein, 7 aa, synthetic construct
  REGION 1..7: note = Description of Artificial Sequence: Synthetic peptide
ADQKGST

SEQ ID NO: 10547 - protein, 7 aa, synthetic construct
  REGION 1..7: note = Description of Artificial Sequence: Synthetic peptide
RSNGTTQ

SEQ ID NO: 10548 - protein, 7 aa, synthetic construct
  REGION 1..7: note = Description of Artificial Sequence: Synthetic peptide
RTEGSGG

SEQ ID NO: 10549 - protein, 7 aa, synthetic construct
  REGION 1..7: note = Description of Artificial Sequence: Synthetic peptide
SGSEPRK

SEQ ID NO: 10550 - protein, 7 aa, synthetic construct
  REGION 1..7: note = Description of Artificial Sequence: Synthetic peptide
DTSAQRS

SEQ ID NO: 10551 - protein, 7 aa, synthetic construct
  REGION 1..7: note = Description of Artificial Sequence: Synthetic peptide
DRTKNVG

SEQ ID NO: 10552 - protein, 7 aa, synthetic construct
  REGION 1..7: note = Description of Artificial Sequence: Synthetic peptide
DAGSSPR

SEQ ID NO: 10553 - protein, 7 aa, synthetic construct
  REGION 1..7: note = Description of Artificial Sequence: Synthetic peptide
GTVARDG

SEQ ID NO: 10554 - protein, 7 aa, synthetic construct
  REGION 1..7: note = Description of Artificial Sequence: Synthetic peptide
GVQTPNH

SEQ ID NO: 10555 - protein, 7 aa, synthetic construct
  REGION 1..7: note = Description of Artificial Sequence: Synthetic peptide
GLSNSNR

SEQ ID NO: 10556 - protein, 7 aa, synthetic construct
  REGION 1..7: note = Description of Artificial Sequence: Synthetic peptide
VTSSSVL

SEQ ID NO: 10557 - protein, 7 aa, synthetic construct
  REGION 1..7: note = Description of Artificial Sequence: Synthetic peptide
LHSDPHS

SEQ ID NO: 10558 - protein, 7 aa, synthetic construct
  REGION 1..7: note = Description of Artificial Sequence: Synthetic peptide
FGQQTVK

SEQ ID NO: 10559 - protein, 7 aa, synthetic construct
  REGION 1..7: note = Description of Artificial Sequence: Synthetic peptide
SNKAQSI

SEQ ID NO: 10560 - protein, 7 aa, synthetic construct
  REGION 1..7: note = Description of Artificial Sequence: Synthetic peptide
ASTSSTA

SEQ ID NO: 10561 - protein, 7 aa, synthetic construct
  REGION 1..7: note = Description of Artificial Sequence: Synthetic peptide
SPSQSHG

SEQ ID NO: 10562 - protein, 7 aa, synthetic construct
  REGION 1..7: note = Description of Artificial Sequence: Synthetic peptide
QNHGSSS

SEQ ID NO: 10563 - protein, 7 aa, synthetic construct
  REGION 1..7: note = Description of Artificial Sequence: Synthetic peptide
VGGKPST

SEQ ID NO: 10564 - protein, 7 aa, synthetic construct
  REGION 1..7: note = Description of Artificial Sequence: Synthetic peptide
SSASNSS

SEQ ID NO: 10565 - protein, 7 aa, synthetic construct
  REGION 1..7: note = Description of Artificial Sequence: Synthetic peptide
LKDSGSS

SEQ ID NO: 10566 - protein, 7 aa, synthetic construct
  REGION 1..7: note = Description of Artificial Sequence: Synthetic peptide
TTARDTN

SEQ ID NO: 10567 - protein, 7 aa, synthetic construct
  REGION 1..7: note = Description of Artificial Sequence: Synthetic peptide
TAVPHSG

SEQ ID NO: 10568 - protein, 7 aa, synthetic construct
  REGION 1..7: note = Description of Artificial Sequence: Synthetic peptide
STTGSTS

SEQ ID NO: 10569 - protein, 7 aa, synthetic construct
  REGION 1..7: note = Description of Artificial Sequence: Synthetic peptide
MNSQSPS

SEQ ID NO: 10570 - protein, 7 aa, synthetic construct
  REGION 1..7: note = Description of Artificial Sequence: Synthetic peptide
PPSGPTK

SEQ ID NO: 10571 - protein, 7 aa, synthetic construct
  REGION 1..7: note = Description of Artificial Sequence: Synthetic peptide
SSGGQPS

SEQ ID NO: 10572 - protein, 7 aa, synthetic construct
  REGION 1..7: note = Description of Artificial Sequence: Synthetic peptide
SSTSTPR

SEQ ID NO: 10573 - protein, 7 aa, synthetic construct
  REGION 1..7: note = Description of Artificial Sequence: Synthetic peptide
VGQKSSM

SEQ ID NO: 10574 - protein, 7 aa, synthetic construct
  REGION 1..7: note = Description of Artificial Sequence: Synthetic peptide
DEGGPHR

SEQ ID NO: 10575 - protein, 7 aa, synthetic construct
  REGION 1..7: note = Description of Artificial Sequence: Synthetic peptide
NATRTSS

SEQ ID NO: 10576 - protein, 7 aa, synthetic construct
  REGION 1..7: note = Description of Artificial Sequence: Synthetic peptide
NRGATNQ

SEQ ID NO: 10577 - protein, 7 aa, synthetic construct
  REGION 1..7: note = Description of Artificial Sequence: Synthetic peptide
STRSSTS

SEQ ID NO: 10578 - protein, 7 aa, synthetic construct
  REGION 1..7: note = Description of Artificial Sequence: Synthetic peptide
VGTPSKE

SEQ ID NO: 10579 - protein, 7 aa, synthetic construct
  REGION 1..7: note = Description of Artificial Sequence: Synthetic peptide
LSTAKSS

SEQ ID NO: 10580 - protein, 7 aa, synthetic construct
  REGION 1..7: note = Description of Artificial Sequence: Synthetic peptide
KLSGSSS

SEQ ID NO: 10581 - protein, 7 aa, synthetic construct
  REGION 1..7: note = Description of Artificial Sequence: Synthetic peptide
TLGGNHM

SEQ ID NO: 10582 - protein, 7 aa, synthetic construct
  REGION 1..7: note = Description of Artificial Sequence: Synthetic peptide
SNGSDRN

SEQ ID NO: 10583 - protein, 7 aa, synthetic construct
  REGION 1..7: note = Description of Artificial Sequence: Synthetic peptide
QQSGQNI

SEQ ID NO: 10584 - protein, 7 aa, synthetic construct
  REGION 1..7: note = Description of Artificial Sequence: Synthetic peptide
DKSGQSR

SEQ ID NO: 10585 - protein, 7 aa, synthetic construct
  REGION 1..7: note = Description of Artificial Sequence: Synthetic peptide
AGNTMGS

SEQ ID NO: 10586 - protein, 7 aa, synthetic construct
  REGION 1..7: note = Description of Artificial Sequence: Synthetic peptide
AMGEQRA

SEQ ID NO: 10587 - protein, 7 aa, synthetic construct
  REGION 1..7: note = Description of Artificial Sequence: Synthetic peptide
VHAQDQH

SEQ ID NO: 10588 - protein, 7 aa, synthetic construct
  REGION 1..7: note = Description of Artificial Sequence: Synthetic peptide
FDNQPTS

SEQ ID NO: 10589 - protein, 7 aa, synthetic construct
  REGION 1..7: note = Description of Artificial Sequence: Synthetic peptide
HSSAESR

SEQ ID NO: 10590 - protein, 7 aa, synthetic construct
  REGION 1..7: note = Description of Artificial Sequence: Synthetic peptide
HGSPQNE

SEQ ID NO: 10591 - protein, 7 aa, synthetic construct
  REGION 1..7: note = Description of Artificial Sequence: Synthetic peptide
LSDGAIK

SEQ ID NO: 10592 - protein, 7 aa, synthetic construct
  REGION 1..7: note = Description of Artificial Sequence: Synthetic peptide
DSGDARV

SEQ ID NO: 10593 - protein, 7 aa, synthetic construct
  REGION 1..7: note = Description of Artificial Sequence: Synthetic peptide
GTGSQRS

SEQ ID NO: 10594 - protein, 7 aa, synthetic construct
  REGION 1..7: note = Description of Artificial Sequence: Synthetic peptide
GTDKAMG

SEQ ID NO: 10595 - protein, 7 aa, synthetic construct
  REGION 1..7: note = Description of Artificial Sequence: Synthetic peptide
GLTTPNN

SEQ ID NO: 10596 - protein, 7 aa, synthetic construct
  REGION 1..7: note = Description of Artificial Sequence: Synthetic peptide
VPGVSQP

SEQ ID NO: 10597 - protein, 7 aa, synthetic construct
  REGION 1..7: note = Description of Artificial Sequence: Synthetic peptide
SGSSGTR

SEQ ID NO: 10598 - protein, 7 aa, synthetic construct
  REGION 1..7: note = Description of Artificial Sequence: Synthetic peptide
TINSGPH

SEQ ID NO: 10599 - protein, 7 aa, synthetic construct
  REGION 1..7: note = Description of Artificial Sequence: Synthetic peptide
ERATGTA

SEQ ID NO: 10600 - protein, 7 aa, synthetic construct
  REGION 1..7: note = Description of Artificial Sequence: Synthetic peptide
GITGTNA

SEQ ID NO: 10601 - protein, 7 aa, synthetic construct
  REGION 1..7: note = Description of Artificial Sequence: Synthetic peptide
STASGVS

SEQ ID NO: 10602 - protein, 7 aa, synthetic construct
  REGION 1..7: note = Description of Artificial Sequence: Synthetic peptide
GSPPPVK

SEQ ID NO: 10603 - protein, 7 aa, synthetic construct
  REGION 1..7: note = Description of Artificial Sequence: Synthetic peptide
GSAGKLS

SEQ ID NO: 10604 - protein, 7 aa, synthetic construct
  REGION 1..7: note = Description of Artificial Sequence: Synthetic peptide
KTGADNA

SEQ ID NO: 10605 - protein, 7 aa, synthetic construct
  REGION 1..7: note = Description of Artificial Sequence: Synthetic peptide
RDSTNPK

SEQ ID NO: 10606 - protein, 7 aa, synthetic construct
  REGION 1..7: note = Description of Artificial Sequence: Synthetic peptide
RVGSSTQ

SEQ ID NO: 10607 - protein, 7 aa, synthetic construct
  REGION 1..7: note = Description of Artificial Sequence: Synthetic peptide
SASSQPS

SEQ ID NO: 10608 - protein, 7 aa, synthetic construct
  REGION 1..7: note = Description of Artificial Sequence: Synthetic peptide
SGIEQKK

SEQ ID NO: 10609 - protein, 7 aa, synthetic construct
  REGION 1..7: note = Description of Artificial Sequence: Synthetic peptide
RTTDQQS

SEQ ID NO: 10610 - protein, 7 aa, synthetic construct
  REGION 1..7: note = Description of Artificial Sequence: Synthetic peptide
IAGTSSS

SEQ ID NO: 10611 - protein, 7 aa, synthetic construct
  REGION 1..7: note = Description of Artificial Sequence: Synthetic peptide
HGSASQG

SEQ ID NO: 10612 - protein, 7 aa, synthetic construct
  REGION 1..7: note = Description of Artificial Sequence: Synthetic peptide
QLGTKEA

SEQ ID NO: 10613 - protein, 7 aa, synthetic construct
  REGION 1..7: note = Description of Artificial Sequence: Synthetic peptide
HNGDRNV

SEQ ID NO: 10614 - protein, 7 aa, synthetic construct
  REGION 1..7: note = Description of Artificial Sequence: Synthetic peptide
LRSTETK

SEQ ID NO: 10615 - protein, 7 aa, synthetic construct
  REGION 1..7: note = Description of Artificial Sequence: Synthetic peptide
GSQTSPM

SEQ ID NO: 10616 - protein, 7 aa, synthetic construct
  REGION 1..7: note = Description of Artificial Sequence: Synthetic peptide
NVDHAAK

SEQ ID NO: 10617 - protein, 7 aa, synthetic construct
  REGION 1..7: note = Description of Artificial Sequence: Synthetic peptide
TGVNGAT

SEQ ID NO: 10618 - protein, 7 aa, synthetic construct
  REGION 1..7: note = Description of Artificial Sequence: Synthetic peptide
DGLKSTG

SEQ ID NO: 10619 - protein, 7 aa, synthetic construct
  REGION 1..7: note = Description of Artificial Sequence: Synthetic peptide
VTSNSPK

SEQ ID NO: 10620 - protein, 7 aa, synthetic construct
  REGION 1..7: note = Description of Artificial Sequence: Synthetic peptide
SGTEHSR

SEQ ID NO: 10621 - protein, 7 aa, synthetic construct
  REGION 1..7: note = Description of Artificial Sequence: Synthetic peptide
NQRPSVE

SEQ ID NO: 10622 - protein, 7 aa, synthetic construct
  REGION 1..7: note = Description of Artificial Sequence: Synthetic peptide
TTSSPRL

SEQ ID NO: 10623 - protein, 7 aa, synthetic construct
  REGION 1..7: note = Description of Artificial Sequence: Synthetic peptide
DALKTNT

SEQ ID NO: 10624 - protein, 7 aa, synthetic construct
  REGION 1..7: note = Description of Artificial Sequence: Synthetic peptide
LRNGTSA

SEQ ID NO: 10625 - protein, 7 aa, synthetic construct
  REGION 1..7: note = Description of Artificial Sequence: Synthetic peptide
SSTEKST

SEQ ID NO: 10626 - protein, 7 aa, synthetic construct
  REGION 1..7: note = Description of Artificial Sequence: Synthetic peptide
SGVPPAA

SEQ ID NO: 10627 - protein, 7 aa, synthetic construct
  REGION 1..7: note = Description of Artificial Sequence: Synthetic peptide
SRNGTLA

SEQ ID NO: 10628 - protein, 7 aa, synthetic construct
  REGION 1..7: note = Description of Artificial Sequence: Synthetic peptide
IDKGTTL

SEQ ID NO: 10629 - protein, 7 aa, synthetic construct
  REGION 1..7: note = Description of Artificial Sequence: Synthetic peptide
QRQDTTN

SEQ ID NO: 10630 - protein, 7 aa, synthetic construct
  REGION 1..7: note = Description of Artificial Sequence: Synthetic peptide
VQEPKMQ

SEQ ID NO: 10631 - protein, 7 aa, synthetic construct
  REGION 1..7: note = Description of Artificial Sequence: Synthetic peptide
NVETSSK

SEQ ID NO: 10632 - protein, 7 aa, synthetic construct
  REGION 1..7: note = Description of Artificial Sequence: Synthetic peptide
SPASHPV

SEQ ID NO: 10633 - protein, 7 aa, synthetic construct
  REGION 1..7: note = Description of Artificial Sequence: Synthetic peptide
QKGSDIA

SEQ ID NO: 10634 - protein, 7 aa, synthetic construct
  REGION 1..7: note = Description of Artificial Sequence: Synthetic peptide
LRDSNNK

SEQ ID NO: 10635 - protein, 7 aa, synthetic construct
  REGION 1..7: note = Description of Artificial Sequence: Synthetic peptide
SGGDPQR

SEQ ID NO: 10636 - protein, 7 aa, synthetic construct
  REGION 1..7: note = Description of Artificial Sequence: Synthetic peptide
LSSEKTS

SEQ ID NO: 10637 - protein, 7 aa, synthetic construct
  REGION 1..7: note = Description of Artificial Sequence: Synthetic peptide
NKTDRPT

SEQ ID NO: 10638 - protein, 7 aa, synthetic construct
  REGION 1..7: note = Description of Artificial Sequence: Synthetic peptide
MSTNSPQ

SEQ ID NO: 10639 - protein, 7 aa, synthetic construct
  REGION 1..7: note = Description of Artificial Sequence: Synthetic peptide
NGQGVQQ

SEQ ID NO: 10640 - protein, 7 aa, synthetic construct
  REGION 1..7: note = Description of Artificial Sequence: Synthetic peptide
NSGVSPA

SEQ ID NO: 10641 - protein, 7 aa, synthetic construct
  REGION 1..7: note = Description of Artificial Sequence: Synthetic peptide
SKVQQAT

SEQ ID NO: 10642 - protein, 7 aa, synthetic construct
  REGION 1..7: note = Description of Artificial Sequence: Synthetic peptide
QSKVPVS

SEQ ID NO: 10643 - protein, 7 aa, synthetic construct
  REGION 1..7: note = Description of Artificial Sequence: Synthetic peptide
ESTAHAT

SEQ ID NO: 10644 - protein, 7 aa, synthetic construct
  REGION 1..7: note = Description of Artificial Sequence: Synthetic peptide
DGAVSHG

SEQ ID NO: 10645 - protein, 7 aa, synthetic construct
  REGION 1..7: note = Description of Artificial Sequence: Synthetic peptide
EGVQARG

SEQ ID NO: 10646 - protein, 7 aa, synthetic construct
  REGION 1..7: note = Description of Artificial Sequence: Synthetic peptide
ALSSSKA

SEQ ID NO: 10647 - protein, 7 aa, synthetic construct
  REGION 1..7: note = Description of Artificial Sequence: Synthetic peptide
AFGKSSA

SEQ ID NO: 10648 - protein, 7 aa, synthetic construct
  REGION 1..7: note = Description of Artificial Sequence: Synthetic peptide
GSKGSQM

SEQ ID NO: 10649 - protein, 7 aa, synthetic construct
  REGION 1..7: note = Description of Artificial Sequence: Synthetic peptide
GVHEAKR

SEQ ID NO: 10650 - protein, 7 aa, synthetic construct
  REGION 1..7: note = Description of Artificial Sequence: Synthetic peptide
GSNKVVA

SEQ ID NO: 10651 - protein, 7 aa, synthetic construct
  REGION 1..7: note = Description of Artificial Sequence: Synthetic peptide
SMNKDRL

SEQ ID NO: 10652 - protein, 7 aa, synthetic construct
  REGION 1..7: note = Description of Artificial Sequence: Synthetic peptide
TSDVKTL

SEQ ID NO: 10653 - protein, 7 aa, synthetic construct
  REGION 1..7: note = Description of Artificial Sequence: Synthetic peptide
NASKDLR

SEQ ID NO: 10654 - protein, 7 aa, synthetic construct
  REGION 1..7: note = Description of Artificial Sequence: Synthetic peptide
VSGPSAT

SEQ ID NO: 10655 - protein, 7 aa, synthetic construct
  REGION 1..7: note = Description of Artificial Sequence: Synthetic peptide
GSKEHGS

SEQ ID NO: 10656 - protein, 7 aa, synthetic construct
  REGION 1..7: note = Description of Artificial Sequence: Synthetic peptide
NDGLANS

SEQ ID NO: 10657 - protein, 7 aa, synthetic construct
  REGION 1..7: note = Description of Artificial Sequence: Synthetic peptide
TSHAPSM

SEQ ID NO: 10658 - protein, 7 aa, synthetic construct
  REGION 1..7: note = Description of Artificial Sequence: Synthetic peptide
TSGPSIG

SEQ ID NO: 10659 - protein, 7 aa, synthetic construct
  REGION 1..7: note = Description of Artificial Sequence: Synthetic peptide
SETRSAV

SEQ ID NO: 10660 - protein, 7 aa, synthetic construct
  REGION 1..7: note = Description of Artificial Sequence: Synthetic peptide
SSTGSPG

SEQ ID NO: 10661 - protein, 7 aa, synthetic construct
  REGION 1..7: note = Description of Artificial Sequence: Synthetic peptide
EAFKDGG

SEQ ID NO: 10662 - protein, 7 aa, synthetic construct
  REGION 1..7: note = Description of Artificial Sequence: Synthetic peptide
AGGAPMT

SEQ ID NO: 10663 - protein, 7 aa, synthetic construct
  REGION 1..7: note = Description of Artificial Sequence: Synthetic peptide
VPSTSTA

SEQ ID NO: 10664 - protein, 7 aa, synthetic construct
  REGION 1..7: note = Description of Artificial Sequence: Synthetic peptide
QGTGHVA

SEQ ID NO: 10665 - protein, 7 aa, synthetic construct
  REGION 1..7: note = Description of Artificial Sequence: Synthetic peptide
NQGATLG

SEQ ID NO: 10666 - protein, 7 aa, synthetic construct
  REGION 1..7: note = Description of Artificial Sequence: Synthetic peptide
NLGSSAN

SEQ ID NO: 10667 - protein, 7 aa, synthetic construct
  REGION 1..7: note = Description of Artificial Sequence: Synthetic peptide
TITPTSA

SEQ ID NO: 10668 - protein, 7 aa, synthetic construct
  REGION 1..7: note = Description of Artificial Sequence: Synthetic peptide
SLGQATA

SEQ ID NO: 10669 - protein, 7 aa, synthetic construct
  REGION 1..7: note = Description of Artificial Sequence: Synthetic peptide
SEGRATG

SEQ ID NO: 10670 - protein, 7 aa, synthetic construct
  REGION 1..7: note = Description of Artificial Sequence: Synthetic peptide
MGNNTPM

SEQ ID NO: 10671 - protein, 7 aa, synthetic construct
  REGION 1..7: note = Description of Artificial Sequence: Synthetic peptide
EGHSTAL

SEQ ID NO: 10672 - protein, 7 aa, synthetic construct
  REGION 1..7: note = Description of Artificial Sequence: Synthetic peptide
ALGQDKN

SEQ ID NO: 10673 - protein, 7 aa, synthetic construct
  REGION 1..7: note = Description of Artificial Sequence: Synthetic peptide
GTINTSS

SEQ ID NO: 10674 - protein, 7 aa, synthetic construct
  REGION 1..7: note = Description of Artificial Sequence: Synthetic peptide
SATSQNH

SEQ ID NO: 10675 - protein, 7 aa, synthetic construct
  REGION 1..7: note = Description of Artificial Sequence: Synthetic peptide
EGKANKG

SEQ ID NO: 10676 - protein, 7 aa, synthetic construct
  REGION 1..7: note = Description of Artificial Sequence: Synthetic peptide
LPAQNVT

SEQ ID NO: 10677 - protein, 7 aa, synthetic construct
  REGION 1..7: note = Description of Artificial Sequence: Synthetic peptide
NTQTHSK

SEQ ID NO: 10678 - protein, 7 aa, synthetic construct
  REGION 1..7: note = Description of Artificial Sequence: Synthetic peptide
SLTNNGK

SEQ ID NO: 10679 - protein, 7 aa, synthetic construct
  REGION 1..7: note = Description of Artificial Sequence: Synthetic peptide
SAPNGAA

SEQ ID NO: 10680 - protein, 7 aa, synthetic construct
  REGION 1..7: note = Description of Artificial Sequence: Synthetic peptide
QHSGSSA

SEQ ID NO: 10681 - protein, 7 aa, synthetic construct
  REGION 1..7: note = Description of Artificial Sequence: Synthetic peptide
GSASTPT

SEQ ID NO: 10682 - protein, 7 aa, synthetic construct
  REGION 1..7: note = Description of Artificial Sequence: Synthetic peptide
GSSNSNA

SEQ ID NO: 10683 - protein, 7 aa, synthetic construct
  REGION 1..7: note = Description of Artificial Sequence: Synthetic peptide
VNGGAVQ

SEQ ID NO: 10684 - protein, 7 aa, synthetic construct
  REGION 1..7: note = Description of Artificial Sequence: Synthetic peptide
SSGNLGA

SEQ ID NO: 10685 - protein, 7 aa, synthetic construct
  REGION 1..7: note = Description of Artificial Sequence: Synthetic peptide
NSKSAMT

SEQ ID NO: 10686 - protein, 7 aa, synthetic construct
  REGION 1..7: note = Description of Artificial Sequence: Synthetic peptide
NSPNSSS

SEQ ID NO: 10687 - protein, 7 aa, synthetic construct
  REGION 1..7: note = Description of Artificial Sequence: Synthetic peptide
NTLQTSH

SEQ ID NO: 10688 - protein, 7 aa, synthetic construct
  REGION 1..7: note = Description of Artificial Sequence: Synthetic peptide
TPSTSRG

SEQ ID NO: 10689 - protein, 7 aa, synthetic construct
  REGION 1..7: note = Description of Artificial Sequence: Synthetic peptide
ERLHETR

SEQ ID NO: 10690 - protein, 7 aa, synthetic construct
  REGION 1..7: note = Description of Artificial Sequence: Synthetic peptide
DQTTGNQ

SEQ ID NO: 10691 - protein, 7 aa, synthetic construct
  REGION 1..7: note = Description of Artificial Sequence: Synthetic peptide
TNSDSPR

SEQ ID NO: 10692 - protein, 7 aa, synthetic construct
  REGION 1..7: note = Description of Artificial Sequence: Synthetic peptide
DAVKQSR

SEQ ID NO: 10693 - protein, 7 aa, synthetic construct
  REGION 1..7: note = Description of Artificial Sequence: Synthetic peptide
FGDHGAK

SEQ ID NO: 10694 - protein, 7 aa, synthetic construct
  REGION 1..7: note = Description of Artificial Sequence: Synthetic peptide
NASPASG

SEQ ID NO: 10695 - protein, 7 aa, synthetic construct
  REGION 1..7: note = Description of Artificial Sequence: Synthetic peptide
TTHAKVG

SEQ ID NO: 10696 - protein, 7 aa, synthetic construct
  REGION 1..7: note = Description of Artificial Sequence: Synthetic peptide
TRGGHAE

SEQ ID NO: 10697 - protein, 7 aa, synthetic construct
  REGION 1..7: note = Description of Artificial Sequence: Synthetic peptide
STGQKGS

SEQ ID NO: 10698 - protein, 7 aa, synthetic construct
  REGION 1..7: note = Description of Artificial Sequence: Synthetic peptide
SEAKSVN

SEQ ID NO: 10699 - protein, 7 aa, synthetic construct
  REGION 1..7: note = Description of Artificial Sequence: Synthetic peptide
SGENRSL

SEQ ID NO: 10700 - protein, 7 aa, synthetic construct
  REGION 1..7: note = Description of Artificial Sequence: Synthetic peptide
MRGETSL

SEQ ID NO: 10701 - protein, 7 aa, synthetic construct
  REGION 1..7: note = Description of Artificial Sequence: Synthetic peptide
QSNGKTE

SEQ ID NO: 10702 - protein, 7 aa, synthetic construct
  REGION 1..7: note = Description of Artificial Sequence: Synthetic peptide
HGESSRT

SEQ ID NO: 10703 - protein, 7 aa, synthetic construct
  REGION 1..7: note = Description of Artificial Sequence: Synthetic peptide
LSGSASG

SEQ ID NO: 10704 - protein, 7 aa, synthetic construct
  REGION 1..7: note = Description of Artificial Sequence: Synthetic peptide
ENNNSGR

SEQ ID NO: 10705 - protein, 7 aa, synthetic construct
  REGION 1..7: note = Description of Artificial Sequence: Synthetic peptide
GHQKNEL

SEQ ID NO: 10706 - protein, 7 aa, synthetic construct
  REGION 1..7: note = Description of Artificial Sequence: Synthetic peptide
GKEQRVG

SEQ ID NO: 10707 - protein, 7 aa, synthetic construct
  REGION 1..7: note = Description of Artificial Sequence: Synthetic peptide
FGSSSPT

SEQ ID NO: 10708 - protein, 7 aa, synthetic construct
  REGION 1..7: note = Description of Artificial Sequence: Synthetic peptide
LTSQAST

SEQ ID NO: 10709 - protein, 7 aa, synthetic construct
  REGION 1..7: note = Description of Artificial Sequence: Synthetic peptide
RADGGNG

SEQ ID NO: 10710 - protein, 7 aa, synthetic construct
  REGION 1..7: note = Description of Artificial Sequence: Synthetic peptide
SQPPPSH

SEQ ID NO: 10711 - protein, 7 aa, synthetic construct
  REGION 1..7: note = Description of Artificial Sequence: Synthetic peptide
NAAASPK

SEQ ID NO: 10712 - protein, 7 aa, synthetic construct
  REGION 1..7: note = Description of Artificial Sequence: Synthetic peptide
NGNSDHR

SEQ ID NO: 10713 - protein, 7 aa, synthetic construct
  REGION 1..7: note = Description of Artificial Sequence: Synthetic peptide
LKEVPQS

SEQ ID NO: 10714 - protein, 7 aa, synthetic construct
  REGION 1..7: note = Description of Artificial Sequence: Synthetic peptide
GALGKGP

SEQ ID NO: 10715 - protein, 7 aa, synthetic construct
  REGION 1..7: note = Description of Artificial Sequence: Synthetic peptide
TSGSSAT

SEQ ID NO: 10716 - protein, 7 aa, synthetic construct
  REGION 1..7: note = Description of Artificial Sequence: Synthetic peptide
GTTAPGT

SEQ ID NO: 10717 - protein, 7 aa, synthetic construct
  REGION 1..7: note = Description of Artificial Sequence: Synthetic peptide
TSASNNS

SEQ ID NO: 10718 - protein, 7 aa, synthetic construct
  REGION 1..7: note = Description of Artificial Sequence: Synthetic peptide
RDNGKHD

SEQ ID NO: 10719 - protein, 7 aa, synthetic construct
  REGION 1..7: note = Description of Artificial Sequence: Synthetic peptide
HNNSGLT

SEQ ID NO: 10720 - protein, 7 aa, synthetic construct
  REGION 1..7: note = Description of Artificial Sequence: Synthetic peptide
DRQKATN

SEQ ID NO: 10721 - protein, 7 aa, synthetic construct
  REGION 1..7: note = Description of Artificial Sequence: Synthetic peptide
AGRDAAS

SEQ ID NO: 10722 - protein, 7 aa, synthetic construct
  REGION 1..7: note = Description of Artificial Sequence: Synthetic peptide
GGDGAHK

SEQ ID NO: 10723 - protein, 7 aa, synthetic construct
  REGION 1..7: note = Description of Artificial Sequence: Synthetic peptide
TITSSPS

SEQ ID NO: 10724 - protein, 7 aa, synthetic construct
  REGION 1..7: note = Description of Artificial Sequence: Synthetic peptide
NVGASPV

SEQ ID NO: 10725 - protein, 7 aa, synthetic construct
  REGION 1..7: note = Description of Artificial Sequence: Synthetic peptide
IQSGNSA

SEQ ID NO: 10726 - protein, 7 aa, synthetic construct
  REGION 1..7: note = Description of Artificial Sequence: Synthetic peptide
GNGSPVL

SEQ ID NO: 10727 - protein, 7 aa, synthetic construct
  REGION 1..7: note = Description of Artificial Sequence: Synthetic peptide
TQNKGLS

SEQ ID NO: 10728 - protein, 7 aa, synthetic construct
  REGION 1..7: note = Description of Artificial Sequence: Synthetic peptide
THEDKGY

SEQ ID NO: 10729 - protein, 7 aa, synthetic construct
  REGION 1..7: note = Description of Artificial Sequence: Synthetic peptide
TGTHNTV

SEQ ID NO: 10730 - protein, 7 aa, synthetic construct
  REGION 1..7: note = Description of Artificial Sequence: Synthetic peptide
STMPASK

SEQ ID NO: 10731 - protein, 7 aa, synthetic construct
  REGION 1..7: note = Description of Artificial Sequence: Synthetic peptide
SDGKVMV

SEQ ID NO: 10732 - protein, 7 aa, synthetic construct
  REGION 1..7: note = Description of Artificial Sequence: Synthetic peptide
MAKPGET

SEQ ID NO: 10733 - protein, 7 aa, synthetic construct
  REGION 1..7: note = Description of Artificial Sequence: Synthetic peptide
QTNSSKG

SEQ ID NO: 10734 - protein, 7 aa, synthetic construct
  REGION 1..7: note = Description of Artificial Sequence: Synthetic peptide
ATSSGST

SEQ ID NO: 10735 - protein, 7 aa, synthetic construct
  REGION 1..7: note = Description of Artificial Sequence: Synthetic peptide
GDQDRTK

SEQ ID NO: 10736 - protein, 7 aa, synthetic construct
  REGION 1..7: note = Description of Artificial Sequence: Synthetic peptide
SADAKGR

SEQ ID NO: 10737 - protein, 7 aa, synthetic construct
  REGION 1..7: note = Description of Artificial Sequence: Synthetic peptide
SAGPTGH

SEQ ID NO: 10738 - protein, 7 aa, synthetic construct
  REGION 1..7: note = Description of Artificial Sequence: Synthetic peptide
HSSTTPA

SEQ ID NO: 10739 - protein, 7 aa, synthetic construct
  REGION 1..7: note = Description of Artificial Sequence: Synthetic peptide
EARAPIT

SEQ ID NO: 10740 - protein, 7 aa, synthetic construct
  REGION 1..7: note = Description of Artificial Sequence: Synthetic peptide
SATRSGS

SEQ ID NO: 10741 - protein, 7 aa, synthetic construct
  REGION 1..7: note = Description of Artificial Sequence: Synthetic peptide
NSASRPS

SEQ ID NO: 10742 - protein, 7 aa, synthetic construct
  REGION 1..7: note = Description of Artificial Sequence: Synthetic peptide
GRGERIS

SEQ ID NO: 10743 - protein, 7 aa, synthetic construct
  REGION 1..7: note = Description of Artificial Sequence: Synthetic peptide
MTKGSTL

SEQ ID NO: 10744 - protein, 7 aa, synthetic construct
  REGION 1..7: note = Description of Artificial Sequence: Synthetic peptide
TGTNTMS

SEQ ID NO: 10745 - protein, 7 aa, synthetic construct
  REGION 1..7: note = Description of Artificial Sequence: Synthetic peptide
MNSSRSV

SEQ ID NO: 10746 - protein, 7 aa, synthetic construct
  REGION 1..7: note = Description of Artificial Sequence: Synthetic peptide
QSVGTTR

SEQ ID NO: 10747 - protein, 7 aa, synthetic construct
  REGION 1..7: note = Description of Artificial Sequence: Synthetic peptide
EASGKST

SEQ ID NO: 10748 - protein, 7 aa, synthetic construct
  REGION 1..7: note = Description of Artificial Sequence: Synthetic peptide
STSSSPH

SEQ ID NO: 10749 - protein, 7 aa, synthetic construct
  REGION 1..7: note = Description of Artificial Sequence: Synthetic peptide
ESSSALK

SEQ ID NO: 10750 - protein, 7 aa, synthetic construct
  REGION 1..7: note = Description of Artificial Sequence: Synthetic peptide
HPQSQPN

SEQ ID NO: 10751 - protein, 7 aa, synthetic construct
  REGION 1..7: note = Description of Artificial Sequence: Synthetic peptide
SNSQTGS

SEQ ID NO: 10752 - protein, 7 aa, synthetic construct
  REGION 1..7: note = Description of Artificial Sequence: Synthetic peptide
MTSSTAS

SEQ ID NO: 10753 - protein, 7 aa, synthetic construct
  REGION 1..7: note = Description of Artificial Sequence: Synthetic peptide
NTNNQPA

SEQ ID NO: 10754 - protein, 7 aa, synthetic construct
  REGION 1..7: note = Description of Artificial Sequence: Synthetic peptide
GNTSKNL

SEQ ID NO: 10755 - protein, 7 aa, synthetic construct
  REGION 1..7: note = Description of Artificial Sequence: Synthetic peptide
KVADRPS

SEQ ID NO: 10756 - protein, 7 aa, synthetic construct
  REGION 1..7: note = Description of Artificial Sequence: Synthetic peptide
NTSKSTD

SEQ ID NO: 10757 - protein, 7 aa, synthetic construct
  REGION 1..7: note = Description of Artificial Sequence: Synthetic peptide
NSGATIT

SEQ ID NO: 10758 - protein, 7 aa, synthetic construct
  REGION 1..7: note = Description of Artificial Sequence: Synthetic peptide
RENATPS

SEQ ID NO: 10759 - protein, 7 aa, synthetic construct
  REGION 1..7: note = Description of Artificial Sequence: Synthetic peptide
SNSGNSK

SEQ ID NO: 10760 - protein, 7 aa, synthetic construct
  REGION 1..7: note = Description of Artificial Sequence: Synthetic peptide
SSTKQIG

SEQ ID NO: 10761 - protein, 7 aa, synthetic construct
  REGION 1..7: note = Description of Artificial Sequence: Synthetic peptide
SAERSVS

SEQ ID NO: 10762 - protein, 7 aa, synthetic construct
  REGION 1..7: note = Description of Artificial Sequence: Synthetic peptide
SDTNRAS

SEQ ID NO: 10763 - protein, 7 aa, synthetic construct
  REGION 1..7: note = Description of Artificial Sequence: Synthetic peptide
MDKPTAA

SEQ ID NO: 10764 - protein, 7 aa, synthetic construct
  REGION 1..7: note = Description of Artificial Sequence: Synthetic peptide
EHKDNTK

SEQ ID NO: 10765 - protein, 7 aa, synthetic construct
  REGION 1..7: note = Description of Artificial Sequence: Synthetic peptide
DATTKTA

SEQ ID NO: 10766 - protein, 7 aa, synthetic construct
  REGION 1..7: note = Description of Artificial Sequence: Synthetic peptide
AATAPHG

SEQ ID NO: 10767 - protein, 7 aa, synthetic construct
  REGION 1..7: note = Description of Artificial Sequence: Synthetic peptide
GNQENRG

SEQ ID NO: 10768 - protein, 7 aa, synthetic construct
  REGION 1..7: note = Description of Artificial Sequence: Synthetic peptide
GDLPTQR

SEQ ID NO: 10769 - protein, 7 aa, synthetic construct
  REGION 1..7: note = Description of Artificial Sequence: Synthetic peptide
VVGTSTG

SEQ ID NO: 10770 - protein, 7 aa, synthetic construct
  REGION 1..7: note = Description of Artificial Sequence: Synthetic peptide
SSTAPGT

SEQ ID NO: 10771 - protein, 7 aa, synthetic construct
  REGION 1..7: note = Description of Artificial Sequence: Synthetic peptide
SSEPRSS

SEQ ID NO: 10772 - protein, 7 aa, synthetic construct
  REGION 1..7: note = Description of Artificial Sequence: Synthetic peptide
LVANTSK

SEQ ID NO: 10773 - protein, 7 aa, synthetic construct
  REGION 1..7: note = Description of Artificial Sequence: Synthetic peptide
LEGKGLK

SEQ ID NO: 10774 - protein, 7 aa, synthetic construct
  REGION 1..7: note = Description of Artificial Sequence: Synthetic peptide
DTTAKLS

SEQ ID NO: 10775 - protein, 7 aa, synthetic construct
  REGION 1..7: note = Description of Artificial Sequence: Synthetic peptide
NPVAGNN

SEQ ID NO: 10776 - protein, 7 aa, synthetic construct
  REGION 1..7: note = Description of Artificial Sequence: Synthetic peptide
SGATTAT

SEQ ID NO: 10777 - protein, 7 aa, synthetic construct
  REGION 1..7: note = Description of Artificial Sequence: Synthetic peptide
RSEAAVH

SEQ ID NO: 10778 - protein, 7 aa, synthetic construct
  REGION 1..7: note = Description of Artificial Sequence: Synthetic peptide
GENPTRT

SEQ ID NO: 10779 - protein, 7 aa, synthetic construct
  REGION 1..7: note = Description of Artificial Sequence: Synthetic peptide
GAHDKTI

SEQ ID NO: 10780 - protein, 7 aa, synthetic construct
  REGION 1..7: note = Description of Artificial Sequence: Synthetic peptide
GSTKSAC

SEQ ID NO: 10781 - protein, 7 aa, synthetic construct
  REGION 1..7: note = Description of Artificial Sequence: Synthetic peptide
VRNSSST

SEQ ID NO: 10782 - protein, 7 aa, synthetic construct
  REGION 1..7: note = Description of Artificial Sequence: Synthetic peptide
DQRSASA

SEQ ID NO: 10783 - protein, 7 aa, synthetic construct
  REGION 1..7: note = Description of Artificial Sequence: Synthetic peptide
GTNTGKG

SEQ ID NO: 10784 - protein, 7 aa, synthetic construct
  REGION 1..7: note = Description of Artificial Sequence: Synthetic peptide
SVANAPH

SEQ ID NO: 10785 - protein, 7 aa, synthetic construct
  REGION 1..7: note = Description of Artificial Sequence: Synthetic peptide
QAMEKTS

SEQ ID NO: 10786 - protein, 7 aa, synthetic construct
  REGION 1..7: note = Description of Artificial Sequence: Synthetic peptide
DTTNNRQ

SEQ ID NO: 10787 - protein, 7 aa, synthetic construct
  REGION 1..7: note = Description of Artificial Sequence: Synthetic peptide
VSGVSNT

SEQ ID NO: 10788 - protein, 7 aa, synthetic construct
  REGION 1..7: note = Description of Artificial Sequence: Synthetic peptide
TGNPSVH

SEQ ID NO: 10789 - protein, 7 aa, synthetic construct
  REGION 1..7: note = Description of Artificial Sequence: Synthetic peptide
QSDSPHT

SEQ ID NO: 10790 - protein, 7 aa, synthetic construct
  REGION 1..7: note = Description of Artificial Sequence: Synthetic peptide
LNTSPNQ

SEQ ID NO: 10791 - protein, 7 aa, synthetic construct
  REGION 1..7: note = Description of Artificial Sequence: Synthetic peptide
GPGKSEG

SEQ ID NO: 10792 - protein, 7 aa, synthetic construct
  REGION 1..7: note = Description of Artificial Sequence: Synthetic peptide
NGVSSVN

SEQ ID NO: 10793 - protein, 7 aa, synthetic construct
  REGION 1..7: note = Description of Artificial Sequence: Synthetic peptide
NQSNVQG

SEQ ID NO: 10794 - protein, 7 aa, synthetic construct
  REGION 1..7: note = Description of Artificial Sequence: Synthetic peptide
SSTSNRA

SEQ ID NO: 10795 - protein, 7 aa, synthetic construct
  REGION 1..7: note = Description of Artificial Sequence: Synthetic peptide
EREKETG

SEQ ID NO: 10796 - protein, 7 aa, synthetic construct
  REGION 1..7: note = Description of Artificial Sequence: Synthetic peptide
QTGSTSI

SEQ ID NO: 10797 - protein, 7 aa, synthetic construct
  REGION 1..7: note = Description of Artificial Sequence: Synthetic peptide
LSGHKTS

SEQ ID NO: 10798 - protein, 7 aa, synthetic construct
  REGION 1..7: note = Description of Artificial Sequence: Synthetic peptide
QASTKAV

SEQ ID NO: 10799 - protein, 7 aa, synthetic construct
  REGION 1..7: note = Description of Artificial Sequence: Synthetic peptide
EGGQKLA

SEQ ID NO: 10800 - protein, 7 aa, synthetic construct
  REGION 1..7: note = Description of Artificial Sequence: Synthetic peptide
DPERNGG

SEQ ID NO: 10801 - protein, 7 aa, synthetic construct
  REGION 1..7: note = Description of Artificial Sequence: Synthetic peptide
AGNAPVS

SEQ ID NO: 10802 - protein, 7 aa, synthetic construct
  REGION 1..7: note = Description of Artificial Sequence: Synthetic peptide
SAVSSAS

SEQ ID NO: 10803 - protein, 7 aa, synthetic construct
  REGION 1..7: note = Description of Artificial Sequence: Synthetic peptide
SGKDRVI

SEQ ID NO: 10804 - protein, 7 aa, synthetic construct
  REGION 1..7: note = Description of Artificial Sequence: Synthetic peptide
SGNSQTQ

SEQ ID NO: 10805 - protein, 7 aa, synthetic construct
  REGION 1..7: note = Description of Artificial Sequence: Synthetic peptide
GTSGSGS

SEQ ID NO: 10806 - protein, 7 aa, synthetic construct
  REGION 1..7: note = Description of Artificial Sequence: Synthetic peptide
KPSPSSG

SEQ ID NO: 10807 - protein, 7 aa, synthetic construct
  REGION 1..7: note = Description of Artificial Sequence: Synthetic peptide
NGINSPQ

SEQ ID NO: 10808 - protein, 7 aa, synthetic construct
  REGION 1..7: note = Description of Artificial Sequence: Synthetic peptide
QGVQGLQ

SEQ ID NO: 10809 - protein, 7 aa, synthetic construct
  REGION 1..7: note = Description of Artificial Sequence: Synthetic peptide
DRVSSSK

SEQ ID NO: 10810 - protein, 7 aa, synthetic construct
  REGION 1..7: note = Description of Artificial Sequence: Synthetic peptide
GTNKVSL

SEQ ID NO: 10811 - protein, 7 aa, synthetic construct
  REGION 1..7: note = Description of Artificial Sequence: Synthetic peptide
KGTPVSS

SEQ ID NO: 10812 - protein, 7 aa, synthetic construct
  REGION 1..7: note = Description of Artificial Sequence: Synthetic peptide
TGSSRST

SEQ ID NO: 10813 - protein, 7 aa, synthetic construct
  REGION 1..7: note = Description of Artificial Sequence: Synthetic peptide
SNKGSDS

SEQ ID NO: 10814 - protein, 7 aa, synthetic construct
  REGION 1..7: note = Description of Artificial Sequence: Synthetic peptide
MTEHRPP

SEQ ID NO: 10815 - protein, 7 aa, synthetic construct
  REGION 1..7: note = Description of Artificial Sequence: Synthetic peptide
ISGTTNT

SEQ ID NO: 10816 - protein, 7 aa, synthetic construct
  REGION 1..7: note = Description of Artificial Sequence: Synthetic peptide
HSAPSSA

SEQ ID NO: 10817 - protein, 7 aa, synthetic construct
  REGION 1..7: note = Description of Artificial Sequence: Synthetic peptide
DKSSKHS

SEQ ID NO: 10818 - protein, 7 aa, synthetic construct
  REGION 1..7: note = Description of Artificial Sequence: Synthetic peptide
AGSPQLG

SEQ ID NO: 10819 - protein, 7 aa, synthetic construct
  REGION 1..7: note = Description of Artificial Sequence: Synthetic peptide
GRNNEPL

SEQ ID NO: 10820 - protein, 7 aa, synthetic construct
  REGION 1..7: note = Description of Artificial Sequence: Synthetic peptide
LGSSVVQ

SEQ ID NO: 10821 - protein, 7 aa, synthetic construct
  REGION 1..7: note = Description of Artificial Sequence: Synthetic peptide
MHESPNR

SEQ ID NO: 10822 - protein, 7 aa, synthetic construct
  REGION 1..7: note = Description of Artificial Sequence: Synthetic peptide
TQRQSTG

SEQ ID NO: 10823 - protein, 7 aa, synthetic construct
  REGION 1..7: note = Description of Artificial Sequence: Synthetic peptide
GLATPAV

SEQ ID NO: 10824 - protein, 7 aa, synthetic construct
  REGION 1..7: note = Description of Artificial Sequence: Synthetic peptide
VSKKDQV

SEQ ID NO: 10825 - protein, 7 aa, synthetic construct
  REGION 1..7: note = Description of Artificial Sequence: Synthetic peptide
STATPHS

SEQ ID NO: 10826 - protein, 7 aa, synthetic construct
  REGION 1..7: note = Description of Artificial Sequence: Synthetic peptide
QSTPPGT

SEQ ID NO: 10827 - protein, 7 aa, synthetic construct
  REGION 1..7: note = Description of Artificial Sequence: Synthetic peptide
QGDITKG

SEQ ID NO: 10828 - protein, 7 aa, synthetic construct
  REGION 1..7: note = Description of Artificial Sequence: Synthetic peptide
GIGNDNM

SEQ ID NO: 10829 - protein, 7 aa, synthetic construct
  REGION 1..7: note = Description of Artificial Sequence: Synthetic peptide
GADSRKN

SEQ ID NO: 10830 - protein, 7 aa, synthetic construct
  REGION 1..7: note = Description of Artificial Sequence: Synthetic peptide
YKDELQR

SEQ ID NO: 10831 - protein, 7 aa, synthetic construct
  REGION 1..7: note = Description of Artificial Sequence: Synthetic peptide
SSDIKMQ

SEQ ID NO: 10832 - protein, 7 aa, synthetic construct
  REGION 1..7: note = Description of Artificial Sequence: Synthetic peptide
TVGSNAL

SEQ ID NO: 10833 - protein, 7 aa, synthetic construct
  REGION 1..7: note = Description of Artificial Sequence: Synthetic peptide
VGSNSTH

SEQ ID NO: 10834 - protein, 7 aa, synthetic construct
  REGION 1..7: note = Description of Artificial Sequence: Synthetic peptide
KSDGSTS

SEQ ID NO: 10835 - protein, 7 aa, synthetic construct
  REGION 1..7: note = Description of Artificial Sequence: Synthetic peptide
TPSSTNV

SEQ ID NO: 10836 - protein, 7 aa, synthetic construct
  REGION 1..7: note = Description of Artificial Sequence: Synthetic peptide
APTKSSE

SEQ ID NO: 10837 - protein, 7 aa, synthetic construct
  REGION 1..7: note = Description of Artificial Sequence: Synthetic peptide
GSMKSSN

SEQ ID NO: 10838 - protein, 7 aa, synthetic construct
  REGION 1..7: note = Description of Artificial Sequence: Synthetic peptide
GLSGEKP

SEQ ID NO: 10839 - protein, 7 aa, synthetic construct
  REGION 1..7: note = Description of Artificial Sequence: Synthetic peptide
SAANTSR

SEQ ID NO: 10840 - protein, 7 aa, synthetic construct
  REGION 1..7: note = Description of Artificial Sequence: Synthetic peptide
GTDSTTR

SEQ ID NO: 10841 - protein, 7 aa, synthetic construct
  REGION 1..7: note = Description of Artificial Sequence: Synthetic peptide
RTNTTPT

SEQ ID NO: 10842 - protein, 7 aa, synthetic construct
  REGION 1..7: note = Description of Artificial Sequence: Synthetic peptide
SAGGHGQ

SEQ ID NO: 10843 - protein, 7 aa, synthetic construct
  REGION 1..7: note = Description of Artificial Sequence: Synthetic peptide
QPLKGNA

SEQ ID NO: 10844 - protein, 7 aa, synthetic construct
  REGION 1..7: note = Description of Artificial Sequence: Synthetic peptide
HREKASG

SEQ ID NO: 10845 - protein, 7 aa, synthetic construct
  REGION 1..7: note = Description of Artificial Sequence: Synthetic peptide
LTTRTST

SEQ ID NO: 10846 - protein, 7 aa, synthetic construct
  REGION 1..7: note = Description of Artificial Sequence: Synthetic peptide
ATDQGKL

SEQ ID NO: 10847 - protein, 7 aa, synthetic construct
  REGION 1..7: note = Description of Artificial Sequence: Synthetic peptide
ASKEASS

SEQ ID NO: 10848 - protein, 7 aa, synthetic construct
  REGION 1..7: note = Description of Artificial Sequence: Synthetic peptide
GVVGSPT

SEQ ID NO: 10849 - protein, 7 aa, synthetic construct
  REGION 1..7: note = Description of Artificial Sequence: Synthetic peptide
AKDGQSR

SEQ ID NO: 10850 - protein, 7 aa, synthetic construct
  REGION 1..7: note = Description of Artificial Sequence: Synthetic peptide
TSDHSSS

SEQ ID NO: 10851 - protein, 7 aa, synthetic construct
  REGION 1..7: note = Description of Artificial Sequence: Synthetic peptide
GGSPGVH

SEQ ID NO: 10852 - protein, 7 aa, synthetic construct
  REGION 1..7: note = Description of Artificial Sequence: Synthetic peptide
KGEGSVH

SEQ ID NO: 10853 - protein, 7 aa, synthetic construct
  REGION 1..7: note = Description of Artificial Sequence: Synthetic peptide
KGSGNTV

SEQ ID NO: 10854 - protein, 7 aa, synthetic construct
  REGION 1..7: note = Description of Artificial Sequence: Synthetic peptide
NSGSTPT

SEQ ID NO: 10855 - protein, 7 aa, synthetic construct
  REGION 1..7: note = Description of Artificial Sequence: Synthetic peptide
TKAGSTV

SEQ ID NO: 10856 - protein, 7 aa, synthetic construct
  REGION 1..7: note = Description of Artificial Sequence: Synthetic peptide
TDKATSG

SEQ ID NO: 10857 - protein, 7 aa, synthetic construct
  REGION 1..7: note = Description of Artificial Sequence: Synthetic peptide
SQGSSST

SEQ ID NO: 10858 - protein, 7 aa, synthetic construct
  REGION 1..7: note = Description of Artificial Sequence: Synthetic peptide
SAGTSGG

SEQ ID NO: 10859 - protein, 7 aa, synthetic construct
  REGION 1..7: note = Description of Artificial Sequence: Synthetic peptide
SGSTNHG

SEQ ID NO: 10860 - protein, 7 aa, synthetic construct
  REGION 1..7: note = Description of Artificial Sequence: Synthetic peptide
SGAEKVH

SEQ ID NO: 10861 - protein, 7 aa, synthetic construct
  REGION 1..7: note = Description of Artificial Sequence: Synthetic peptide
SPAHSGG

SEQ ID NO: 10862 - protein, 7 aa, synthetic construct
  REGION 1..7: note = Description of Artificial Sequence: Synthetic peptide
SSNSRSS

SEQ ID NO: 10863 - protein, 7 aa, synthetic construct
  REGION 1..7: note = Description of Artificial Sequence: Synthetic peptide
MSTSPGT

SEQ ID NO: 10864 - protein, 7 aa, synthetic construct
  REGION 1..7: note = Description of Artificial Sequence: Synthetic peptide
HSEVKSG

SEQ ID NO: 10865 - protein, 7 aa, synthetic construct
  REGION 1..7: note = Description of Artificial Sequence: Synthetic peptide
ERGGQTT

SEQ ID NO: 10866 - protein, 7 aa, synthetic construct
  REGION 1..7: note = Description of Artificial Sequence: Synthetic peptide
DSESKNV

SEQ ID NO: 10867 - protein, 7 aa, synthetic construct
  REGION 1..7: note = Description of Artificial Sequence: Synthetic peptide
EDGASRV

SEQ ID NO: 10868 - protein, 7 aa, synthetic construct
  REGION 1..7: note = Description of Artificial Sequence: Synthetic peptide
DRQGSVA

SEQ ID NO: 10869 - protein, 7 aa, synthetic construct
  REGION 1..7: note = Description of Artificial Sequence: Synthetic peptide
ATATKGN

SEQ ID NO: 10870 - protein, 7 aa, synthetic construct
  REGION 1..7: note = Description of Artificial Sequence: Synthetic peptide
ANKSPPD

SEQ ID NO: 10871 - protein, 7 aa, synthetic construct
  REGION 1..7: note = Description of Artificial Sequence: Synthetic peptide
ARGASTI

SEQ ID NO: 10872 - protein, 7 aa, synthetic construct
  REGION 1..7: note = Description of Artificial Sequence: Synthetic peptide
GTANGGP

SEQ ID NO: 10873 - protein, 7 aa, synthetic construct
  REGION 1..7: note = Description of Artificial Sequence: Synthetic peptide
GGTKALG

SEQ ID NO: 10874 - protein, 7 aa, synthetic construct
  REGION 1..7: note = Description of Artificial Sequence: Synthetic peptide
GVSSPKQ

SEQ ID NO: 10875 - protein, 7 aa, synthetic construct
  REGION 1..7: note = Description of Artificial Sequence: Synthetic peptide
VTESSSR

SEQ ID NO: 10876 - protein, 7 aa, synthetic construct
  REGION 1..7: note = Description of Artificial Sequence: Synthetic peptide
SSKDHPN

SEQ ID NO: 10877 - protein, 7 aa, synthetic construct
  REGION 1..7: note = Description of Artificial Sequence: Synthetic peptide
FGKSPSN

SEQ ID NO: 10878 - protein, 7 aa, synthetic construct
  REGION 1..7: note = Description of Artificial Sequence: Synthetic peptide
MMANANQ

SEQ ID NO: 10879 - protein, 7 aa, synthetic construct
  REGION 1..7: note = Description of Artificial Sequence: Synthetic peptide
NGSKPTI

SEQ ID NO: 10880 - protein, 7 aa, synthetic construct
  REGION 1..7: note = Description of Artificial Sequence: Synthetic peptide
QRGNTPE

SEQ ID NO: 10881 - protein, 7 aa, synthetic construct
  REGION 1..7: note = Description of Artificial Sequence: Synthetic peptide
ETHPKAT

SEQ ID NO: 10882 - protein, 7 aa, synthetic construct
  REGION 1..7: note = Description of Artificial Sequence: Synthetic peptide
GVTSHNS

SEQ ID NO: 10883 - protein, 7 aa, synthetic construct
  REGION 1..7: note = Description of Artificial Sequence: Synthetic peptide
LSGSQAA

SEQ ID NO: 10884 - protein, 7 aa, synthetic construct
  REGION 1..7: note = Description of Artificial Sequence: Synthetic peptide
NGASSPN

SEQ ID NO: 10885 - protein, 7 aa, synthetic construct
  REGION 1..7: note = Description of Artificial Sequence: Synthetic peptide
ISNSTSG

SEQ ID NO: 10886 - protein, 7 aa, synthetic construct
  REGION 1..7: note = Description of Artificial Sequence: Synthetic peptide
QTVDKPR

SEQ ID NO: 10887 - protein, 7 aa, synthetic construct
  REGION 1..7: note = Description of Artificial Sequence: Synthetic peptide
RRNGTAE

SEQ ID NO: 10888 - protein, 7 aa, synthetic construct
  REGION 1..7: note = Description of Artificial Sequence: Synthetic peptide
GLLDSKS

SEQ ID NO: 10889 - protein, 7 aa, synthetic construct
  REGION 1..7: note = Description of Artificial Sequence: Synthetic peptide
TSKTSQL

SEQ ID NO: 10890 - protein, 7 aa, synthetic construct
  REGION 1..7: note = Description of Artificial Sequence: Synthetic peptide
SNRSSTA

SEQ ID NO: 10891 - protein, 7 aa, synthetic construct
  REGION 1..7: note = Description of Artificial Sequence: Synthetic peptide
SNATASA

SEQ ID NO: 10892 - protein, 7 aa, synthetic construct
  REGION 1..7: note = Description of Artificial Sequence: Synthetic peptide
QNGGKSV

SEQ ID NO: 10893 - protein, 7 aa, synthetic construct
  REGION 1..7: note = Description of Artificial Sequence: Synthetic peptide
SRESNHS

SEQ ID NO: 10894 - protein, 7 aa, synthetic construct
  REGION 1..7: note = Description of Artificial Sequence: Synthetic peptide
TQATSSS

SEQ ID NO: 10895 - protein, 7 aa, synthetic construct
  REGION 1..7: note = Description of Artificial Sequence: Synthetic peptide
STSKNSP

SEQ ID NO: 10896 - protein, 7 aa, synthetic construct
  REGION 1..7: note = Description of Artificial Sequence: Synthetic peptide
SQKAGSA

SEQ ID NO: 10897 - protein, 7 aa, synthetic construct
  REGION 1..7: note = Description of Artificial Sequence: Synthetic peptide
SAPGNSG

SEQ ID NO: 10898 - protein, 7 aa, synthetic construct
  REGION 1..7: note = Description of Artificial Sequence: Synthetic peptide
SLRKDGS

SEQ ID NO: 10899 - protein, 7 aa, synthetic construct
  REGION 1..7: note = Description of Artificial Sequence: Synthetic peptide
QNETPRS

SEQ ID NO: 10900 - protein, 7 aa, synthetic construct
  REGION 1..7: note = Description of Artificial Sequence: Synthetic peptide
DIQNPPR

SEQ ID NO: 10901 - protein, 7 aa, synthetic construct
  REGION 1..7: note = Description of Artificial Sequence: Synthetic peptide
DNNHGKL

SEQ ID NO: 10902 - protein, 7 aa, synthetic construct
  REGION 1..7: note = Description of Artificial Sequence: Synthetic peptide
AGAGLQS

SEQ ID NO: 10903 - protein, 7 aa, synthetic construct
  REGION 1..7: note = Description of Artificial Sequence: Synthetic peptide
GSDKVSN

SEQ ID NO: 10904 - protein, 7 aa, synthetic construct
  REGION 1..7: note = Description of Artificial Sequence: Synthetic peptide
SQTPVGV

SEQ ID NO: 10905 - protein, 7 aa, synthetic construct
  REGION 1..7: note = Description of Artificial Sequence: Synthetic peptide
DKSQHAM

SEQ ID NO: 10906 - protein, 7 aa, synthetic construct
  REGION 1..7: note = Description of Artificial Sequence: Synthetic peptide
GASPSNG

SEQ ID NO: 10907 - protein, 7 aa, synthetic construct
  REGION 1..7: note = Description of Artificial Sequence: Synthetic peptide
HVSSKAD

SEQ ID NO: 10908 - protein, 7 aa, synthetic construct
  REGION 1..7: note = Description of Artificial Sequence: Synthetic peptide
LAQKSST

SEQ ID NO: 10909 - protein, 7 aa, synthetic construct
  REGION 1..7: note = Description of Artificial Sequence: Synthetic peptide
IGKSNLS

SEQ ID NO: 10910 - protein, 7 aa, synthetic construct
  REGION 1..7: note = Description of Artificial Sequence: Synthetic peptide
QASSSQT

SEQ ID NO: 10911 - protein, 7 aa, synthetic construct
  REGION 1..7: note = Description of Artificial Sequence: Synthetic peptide
RTTTDRA

SEQ ID NO: 10912 - protein, 7 aa, synthetic construct
  REGION 1..7: note = Description of Artificial Sequence: Synthetic peptide
QDLKTPQ

SEQ ID NO: 10913 - protein, 7 aa, synthetic construct
  REGION 1..7: note = Description of Artificial Sequence: Synthetic peptide
GAPVSNL

SEQ ID NO: 10914 - protein, 7 aa, synthetic construct
  REGION 1..7: note = Description of Artificial Sequence: Synthetic peptide
VTRKDSM

SEQ ID NO: 10915 - protein, 7 aa, synthetic construct
  REGION 1..7: note = Description of Artificial Sequence: Synthetic peptide
ERANHTT

SEQ ID NO: 10916 - protein, 7 aa, synthetic construct
  REGION 1..7: note = Description of Artificial Sequence: Synthetic peptide
THDNKSI

SEQ ID NO: 10917 - protein, 7 aa, synthetic construct
  REGION 1..7: note = Description of Artificial Sequence: Synthetic peptide
ETSSTNR

SEQ ID NO: 10918 - protein, 7 aa, synthetic construct
  REGION 1..7: note = Description of Artificial Sequence: Synthetic peptide
EPDNPSR

SEQ ID NO: 10919 - protein, 7 aa, synthetic construct
  REGION 1..7: note = Description of Artificial Sequence: Synthetic peptide
GTGQSRA

SEQ ID NO: 10920 - protein, 7 aa, synthetic construct
  REGION 1..7: note = Description of Artificial Sequence: Synthetic peptide
SGVRDTA

SEQ ID NO: 10921 - protein, 7 aa, synthetic construct
  REGION 1..7: note = Description of Artificial Sequence: Synthetic peptide
DPGAKPL

SEQ ID NO: 10922 - protein, 7 aa, synthetic construct
  REGION 1..7: note = Description of Artificial Sequence: Synthetic peptide
GVLNRDK

SEQ ID NO: 10923 - protein, 7 aa, synthetic construct
  REGION 1..7: note = Description of Artificial Sequence: Synthetic peptide
SQHGTSS

SEQ ID NO: 10924 - protein, 7 aa, synthetic construct
  REGION 1..7: note = Description of Artificial Sequence: Synthetic peptide
TKDHQAN

SEQ ID NO: 10925 - protein, 7 aa, synthetic construct
  REGION 1..7: note = Description of Artificial Sequence: Synthetic peptide
TGTNHAL

SEQ ID NO: 10926 - protein, 7 aa, synthetic construct
  REGION 1..7: note = Description of Artificial Sequence: Synthetic peptide
QNSKPSS

SEQ ID NO: 10927 - protein, 7 aa, synthetic construct
  REGION 1..7: note = Description of Artificial Sequence: Synthetic peptide
STNGSHG

SEQ ID NO: 10928 - protein, 7 aa, synthetic construct
  REGION 1..7: note = Description of Artificial Sequence: Synthetic peptide
NSGTHGS

SEQ ID NO: 10929 - protein, 7 aa, synthetic construct
  REGION 1..7: note = Description of Artificial Sequence: Synthetic peptide
TGSEHQN

SEQ ID NO: 10930 - protein, 7 aa, synthetic construct
  REGION 1..7: note = Description of Artificial Sequence: Synthetic peptide
SRNDSNK

SEQ ID NO: 10931 - protein, 7 aa, synthetic construct
  REGION 1..7: note = Description of Artificial Sequence: Synthetic peptide
SLTSANV

SEQ ID NO: 10932 - protein, 7 aa, synthetic construct
  REGION 1..7: note = Description of Artificial Sequence: Synthetic peptide
HHSTASQ

SEQ ID NO: 10933 - protein, 7 aa, synthetic construct
  REGION 1..7: note = Description of Artificial Sequence: Synthetic peptide
EESPKKG

SEQ ID NO: 10934 - protein, 7 aa, synthetic construct
  REGION 1..7: note = Description of Artificial Sequence: Synthetic peptide
AGASSQG

SEQ ID NO: 10935 - protein, 7 aa, synthetic construct
  REGION 1..7: note = Description of Artificial Sequence: Synthetic peptide
TNQGGNH

SEQ ID NO: 10936 - protein, 7 aa, synthetic construct
  REGION 1..7: note = Description of Artificial Sequence: Synthetic peptide
ATTAAPV

SEQ ID NO: 10937 - protein, 7 aa, synthetic construct
  REGION 1..7: note = Description of Artificial Sequence: Synthetic peptide
NGMSSST

SEQ ID NO: 10938 - protein, 7 aa, synthetic construct
  REGION 1..7: note = Description of Artificial Sequence: Synthetic peptide
SNSETAS

SEQ ID NO: 10939 - protein, 7 aa, synthetic construct
  REGION 1..7: note = Description of Artificial Sequence: Synthetic peptide
QPVTSNQ

SEQ ID NO: 10940 - protein, 7 aa, synthetic construct
  REGION 1..7: note = Description of Artificial Sequence: Synthetic peptide
EGRGTSP

SEQ ID NO: 10941 - protein, 7 aa, synthetic construct
  REGION 1..7: note = Description of Artificial Sequence: Synthetic peptide
DLNAQKS

SEQ ID NO: 10942 - protein, 7 aa, synthetic construct
  REGION 1..7: note = Description of Artificial Sequence: Synthetic peptide
GAANDTR

SEQ ID NO: 10943 - protein, 7 aa, synthetic construct
  REGION 1..7: note = Description of Artificial Sequence: Synthetic peptide
LNNTSSG

SEQ ID NO: 10944 - protein, 7 aa, synthetic construct
  REGION 1..7: note = Description of Artificial Sequence: Synthetic peptide
NQTSNPH

SEQ ID NO: 10945 - protein, 7 aa, synthetic construct
  REGION 1..7: note = Description of Artificial Sequence: Synthetic peptide
TRQNSSN

SEQ ID NO: 10946 - protein, 7 aa, synthetic construct
  REGION 1..7: note = Description of Artificial Sequence: Synthetic peptide
SNAGGKS

SEQ ID NO: 10947 - protein, 7 aa, synthetic construct
  REGION 1..7: note = Description of Artificial Sequence: Synthetic peptide
SSDTSKG

SEQ ID NO: 10948 - protein, 7 aa, synthetic construct
  REGION 1..7: note = Description of Artificial Sequence: Synthetic peptide
SEVAKSG

SEQ ID NO: 10949 - protein, 7 aa, synthetic construct
  REGION 1..7: note = Description of Artificial Sequence: Synthetic peptide
SDVKAHN

SEQ ID NO: 10950 - protein, 7 aa, synthetic construct
  REGION 1..7: note = Description of Artificial Sequence: Synthetic peptide
LGADRVA

SEQ ID NO: 10951 - protein, 7 aa, synthetic construct
  REGION 1..7: note = Description of Artificial Sequence: Synthetic peptide
DSRTTSG

SEQ ID NO: 10952 - protein, 7 aa, synthetic construct
  REGION 1..7: note = Description of Artificial Sequence: Synthetic peptide
ASSTSTR

SEQ ID NO: 10953 - protein, 7 aa, synthetic construct
  REGION 1..7: note = Description of Artificial Sequence: Synthetic peptide
CSQPKAG

SEQ ID NO: 10954 - protein, 7 aa, synthetic construct
  REGION 1..7: note = Description of Artificial Sequence: Synthetic peptide
GLEGASR

SEQ ID NO: 10955 - protein, 7 aa, synthetic construct
  REGION 1..7: note = Description of Artificial Sequence: Synthetic peptide
TQSDRPP

SEQ ID NO: 10956 - protein, 7 aa, synthetic construct
  REGION 1..7: note = Description of Artificial Sequence: Synthetic peptide
TQTQSAS

SEQ ID NO: 10957 - protein, 7 aa, synthetic construct
  REGION 1..7: note = Description of Artificial Sequence: Synthetic peptide
QGSENGR

SEQ ID NO: 10958 - protein, 7 aa, synthetic construct
  REGION 1..7: note = Description of Artificial Sequence: Synthetic peptide
EGNSSRS

SEQ ID NO: 10959 - protein, 7 aa, synthetic construct
  REGION 1..7: note = Description of Artificial Sequence: Synthetic peptide
DTPAAAK

SEQ ID NO: 10960 - protein, 7 aa, synthetic construct
  REGION 1..7: note = Description of Artificial Sequence: Synthetic peptide
AASNGPS

SEQ ID NO: 10961 - protein, 7 aa, synthetic construct
  REGION 1..7: note = Description of Artificial Sequence: Synthetic peptide
GATSSAS

SEQ ID NO: 10962 - protein, 7 aa, synthetic construct
  REGION 1..7: note = Description of Artificial Sequence: Synthetic peptide
SQSTPSV

SEQ ID NO: 10963 - protein, 7 aa, synthetic construct
  REGION 1..7: note = Description of Artificial Sequence: Synthetic peptide
TSKSTST

SEQ ID NO: 10964 - protein, 7 aa, synthetic construct
  REGION 1..7: note = Description of Artificial Sequence: Synthetic peptide
DGPRTSV

SEQ ID NO: 10965 - protein, 7 aa, synthetic construct
  REGION 1..7: note = Description of Artificial Sequence: Synthetic peptide
SNSARLG

SEQ ID NO: 10966 - protein, 7 aa, synthetic construct
  REGION 1..7: note = Description of Artificial Sequence: Synthetic peptide
TPTDGRS

SEQ ID NO: 10967 - protein, 7 aa, synthetic construct
  REGION 1..7: note = Description of Artificial Sequence: Synthetic peptide
TPNSRPE

SEQ ID NO: 10968 - protein, 7 aa, synthetic construct
  REGION 1..7: note = Description of Artificial Sequence: Synthetic peptide
TSNAHNV

SEQ ID NO: 10969 - protein, 7 aa, synthetic construct
  REGION 1..7: note = Description of Artificial Sequence: Synthetic peptide
STAASTA

SEQ ID NO: 10970 - protein, 7 aa, synthetic construct
  REGION 1..7: note = Description of Artificial Sequence: Synthetic peptide
SLGNQGA

SEQ ID NO: 10971 - protein, 7 aa, synthetic construct
  REGION 1..7: note = Description of Artificial Sequence: Synthetic peptide
ENSRVGT

SEQ ID NO: 10972 - protein, 7 aa, synthetic construct
  REGION 1..7: note = Description of Artificial Sequence: Synthetic peptide
EGKASVL

SEQ ID NO: 10973 - protein, 7 aa, synthetic construct
  REGION 1..7: note = Description of Artificial Sequence: Synthetic peptide
DSRTAGN

SEQ ID NO: 10974 - protein, 7 aa, synthetic construct
  REGION 1..7: note = Description of Artificial Sequence: Synthetic peptide
GRQGTDK

SEQ ID NO: 10975 - protein, 7 aa, synthetic construct
  REGION 1..7: note = Description of Artificial Sequence: Synthetic peptide
GPSSTIS

SEQ ID NO: 10976 - protein, 7 aa, synthetic construct
  REGION 1..7: note = Description of Artificial Sequence: Synthetic peptide
GALPSQT

SEQ ID NO: 10977 - protein, 7 aa, synthetic construct
  REGION 1..7: note = Description of Artificial Sequence: Synthetic peptide
GSNGGRS

SEQ ID NO: 10978 - protein, 7 aa, synthetic construct
  REGION 1..7: note = Description of Artificial Sequence: Synthetic peptide
GLGEDRV

SEQ ID NO: 10979 - protein, 7 aa, synthetic construct
  REGION 1..7: note = Description of Artificial Sequence: Synthetic peptide
SQNTGHP

SEQ ID NO: 10980 - protein, 7 aa, synthetic construct
  REGION 1..7: note = Description of Artificial Sequence: Synthetic peptide
TSGSARD

SEQ ID NO: 10981 - protein, 7 aa, synthetic construct
  REGION 1..7: note = Description of Artificial Sequence: Synthetic peptide
AQGQGHA

SEQ ID NO: 10982 - protein, 7 aa, synthetic construct
  REGION 1..7: note = Description of Artificial Sequence: Synthetic peptide
LAAGSSG

SEQ ID NO: 10983 - protein, 7 aa, synthetic construct
  REGION 1..7: note = Description of Artificial Sequence: Synthetic peptide
NLSTAGS

SEQ ID NO: 10984 - protein, 7 aa, synthetic construct
  REGION 1..7: note = Description of Artificial Sequence: Synthetic peptide
TSNANNK

SEQ ID NO: 10985 - protein, 7 aa, synthetic construct
  REGION 1..7: note = Description of Artificial Sequence: Synthetic peptide
RGTPPSD

SEQ ID NO: 10986 - protein, 7 aa, synthetic construct
  REGION 1..7: note = Description of Artificial Sequence: Synthetic peptide
SANQAGS

SEQ ID NO: 10987 - protein, 7 aa, synthetic construct
  REGION 1..7: note = Description of Artificial Sequence: Synthetic peptide
QKGETVA

SEQ ID NO: 10988 - protein, 7 aa, synthetic construct
  REGION 1..7: note = Description of Artificial Sequence: Synthetic peptide
SQSSGVS

SEQ ID NO: 10989 - protein, 7 aa, synthetic construct
  REGION 1..7: note = Description of Artificial Sequence: Synthetic peptide
LSGKAGG

SEQ ID NO: 10990 - protein, 7 aa, synthetic construct
  REGION 1..7: note = Description of Artificial Sequence: Synthetic peptide
SSGSNHI

SEQ ID NO: 10991 - protein, 7 aa, synthetic construct
  REGION 1..7: note = Description of Artificial Sequence: Synthetic peptide
RQGSTPA

SEQ ID NO: 10992 - protein, 7 aa, synthetic construct
  REGION 1..7: note = Description of Artificial Sequence: Synthetic peptide
DALSKTS

SEQ ID NO: 10993 - protein, 7 aa, synthetic construct
  REGION 1..7: note = Description of Artificial Sequence: Synthetic peptide
GARSPTN

SEQ ID NO: 10994 - protein, 7 aa, synthetic construct
  REGION 1..7: note = Description of Artificial Sequence: Synthetic peptide
LPTQHSS

SEQ ID NO: 10995 - protein, 7 aa, synthetic construct
  REGION 1..7: note = Description of Artificial Sequence: Synthetic peptide
VTSSGSQ

SEQ ID NO: 10996 - protein, 7 aa, synthetic construct
  REGION 1..7: note = Description of Artificial Sequence: Synthetic peptide
KTESPMA

SEQ ID NO: 10997 - protein, 7 aa, synthetic construct
  REGION 1..7: note = Description of Artificial Sequence: Synthetic peptide
TPDQKMV

SEQ ID NO: 10998 - protein, 7 aa, synthetic construct
  REGION 1..7: note = Description of Artificial Sequence: Synthetic peptide
SNMERPS

SEQ ID NO: 10999 - protein, 7 aa, synthetic construct
  REGION 1..7: note = Description of Artificial Sequence: Synthetic peptide
SNDKLNA

SEQ ID NO: 11000 - protein, 7 aa, synthetic construct
  REGION 1..7: note = Description of Artificial Sequence: Synthetic peptide
LLSNKSG

SEQ ID NO: 11001 - protein, 7 aa, synthetic construct
  REGION 1..7: note = Description of Artificial Sequence: Synthetic peptide
AGASPGR

SEQ ID NO: 11002 - protein, 7 aa, synthetic construct
  REGION 1..7: note = Description of Artificial Sequence: Synthetic peptide
SGQGEHS

SEQ ID NO: 11003 - protein, 7 aa, synthetic construct
  REGION 1..7: note = Description of Artificial Sequence: Synthetic peptide
TGKPSTL

SEQ ID NO: 11004 - protein, 7 aa, synthetic construct
  REGION 1..7: note = Description of Artificial Sequence: Synthetic peptide
SPTEPVR

SEQ ID NO: 11005 - protein, 7 aa, synthetic construct
  REGION 1..7: note = Description of Artificial Sequence: Synthetic peptide
GAGTHGA

SEQ ID NO: 11006 - protein, 7 aa, synthetic construct
  REGION 1..7: note = Description of Artificial Sequence: Synthetic peptide
NQQQTTT

SEQ ID NO: 11007 - protein, 7 aa, synthetic construct
  REGION 1..7: note = Description of Artificial Sequence: Synthetic peptide
EGSSPVM

SEQ ID NO: 11008 - protein, 7 aa, synthetic construct
  REGION 1..7: note = Description of Artificial Sequence: Synthetic peptide
SRENVPS

SEQ ID NO: 11009 - protein, 7 aa, synthetic construct
  REGION 1..7: note = Description of Artificial Sequence: Synthetic peptide
SGQTQRA

SEQ ID NO: 11010 - protein, 7 aa, synthetic construct
  REGION 1..7: note = Description of Artificial Sequence: Synthetic peptide
TGVSGHL

SEQ ID NO: 11011 - protein, 7 aa, synthetic construct
  REGION 1..7: note = Description of Artificial Sequence: Synthetic peptide
EAQSGSR

SEQ ID NO: 11012 - protein, 7 aa, synthetic construct
  REGION 1..7: note = Description of Artificial Sequence: Synthetic peptide
TNASKPS

SEQ ID NO: 11013 - protein, 7 aa, synthetic construct
  REGION 1..7: note = Description of Artificial Sequence: Synthetic peptide
NTGQKGL

SEQ ID NO: 11014 - protein, 7 aa, synthetic construct
  REGION 1..7: note = Description of Artificial Sequence: Synthetic peptide
VKDAPKT

SEQ ID NO: 11015 - protein, 7 aa, synthetic construct
  REGION 1..7: note = Description of Artificial Sequence: Synthetic peptide
QVGKNPL

SEQ ID NO: 11016 - protein, 7 aa, synthetic construct
  REGION 1..7: note = Description of Artificial Sequence: Synthetic peptide
DKQKSSY

SEQ ID NO: 11017 - protein, 7 aa, synthetic construct
  REGION 1..7: note = Description of Artificial Sequence: Synthetic peptide
DGSGNLR

SEQ ID NO: 11018 - protein, 7 aa, synthetic construct
  REGION 1..7: note = Description of Artificial Sequence: Synthetic peptide
AEQSVTK

SEQ ID NO: 11019 - protein, 7 aa, synthetic construct
  REGION 1..7: note = Description of Artificial Sequence: Synthetic peptide
AGVTGHR

SEQ ID NO: 11020 - protein, 7 aa, synthetic construct
  REGION 1..7: note = Description of Artificial Sequence: Synthetic peptide
VKGQAGQ

SEQ ID NO: 11021 - protein, 7 aa, synthetic construct
  REGION 1..7: note = Description of Artificial Sequence: Synthetic peptide
IGTGASR

SEQ ID NO: 11022 - protein, 7 aa, synthetic construct
  REGION 1..7: note = Description of Artificial Sequence: Synthetic peptide
SSKPSPD

SEQ ID NO: 11023 - protein, 7 aa, synthetic construct
  REGION 1..7: note = Description of Artificial Sequence: Synthetic peptide
IHNDSVK

SEQ ID NO: 11024 - protein, 7 aa, synthetic construct
  REGION 1..7: note = Description of Artificial Sequence: Synthetic peptide
QNPAATS

SEQ ID NO: 11025 - protein, 7 aa, synthetic construct
  REGION 1..7: note = Description of Artificial Sequence: Synthetic peptide
RTESTAR

SEQ ID NO: 11026 - protein, 7 aa, synthetic construct
  REGION 1..7: note = Description of Artificial Sequence: Synthetic peptide
MNTGSPT

SEQ ID NO: 11027 - protein, 7 aa, synthetic construct
  REGION 1..7: note = Description of Artificial Sequence: Synthetic peptide
AGEGKLS

SEQ ID NO: 11028 - protein, 7 aa, synthetic construct
  REGION 1..7: note = Description of Artificial Sequence: Synthetic peptide
SSSNAMK

SEQ ID NO: 11029 - protein, 7 aa, synthetic construct
  REGION 1..7: note = Description of Artificial Sequence: Synthetic peptide
TDGKHQG

SEQ ID NO: 11030 - protein, 7 aa, synthetic construct
  REGION 1..7: note = Description of Artificial Sequence: Synthetic peptide
DASPGHT

SEQ ID NO: 11031 - protein, 7 aa, synthetic construct
  REGION 1..7: note = Description of Artificial Sequence: Synthetic peptide
STGSQSP

SEQ ID NO: 11032 - protein, 7 aa, synthetic construct
  REGION 1..7: note = Description of Artificial Sequence: Synthetic peptide
LNGATTA

SEQ ID NO: 11033 - protein, 7 aa, synthetic construct
  REGION 1..7: note = Description of Artificial Sequence: Synthetic peptide
NLTSSGG

SEQ ID NO: 11034 - protein, 7 aa, synthetic construct
  REGION 1..7: note = Description of Artificial Sequence: Synthetic peptide
NASSERH

SEQ ID NO: 11035 - protein, 7 aa, synthetic construct
  REGION 1..7: note = Description of Artificial Sequence: Synthetic peptide
SLPSNGG

SEQ ID NO: 11036 - protein, 7 aa, synthetic construct
  REGION 1..7: note = Description of Artificial Sequence: Synthetic peptide
MDSRNSG

SEQ ID NO: 11037 - protein, 7 aa, synthetic construct
  REGION 1..7: note = Description of Artificial Sequence: Synthetic peptide
GASKGPY

SEQ ID NO: 11038 - protein, 7 aa, synthetic construct
  REGION 1..7: note = Description of Artificial Sequence: Synthetic peptide
SLAQTPK

SEQ ID NO: 11039 - protein, 7 aa, synthetic construct
  REGION 1..7: note = Description of Artificial Sequence: Synthetic peptide
HSESKQS

SEQ ID NO: 11040 - protein, 7 aa, synthetic construct
  REGION 1..7: note = Description of Artificial Sequence: Synthetic peptide
KVTDKSL

SEQ ID NO: 11041 - protein, 7 aa, synthetic construct
  REGION 1..7: note = Description of Artificial Sequence: Synthetic peptide
QMPGEHS

SEQ ID NO: 11042 - protein, 7 aa, synthetic construct
  REGION 1..7: note = Description of Artificial Sequence: Synthetic peptide
QDTQQPR

SEQ ID NO: 11043 - protein, 7 aa, synthetic construct
  REGION 1..7: note = Description of Artificial Sequence: Synthetic peptide
QGKTGST

SEQ ID NO: 11044 - protein, 7 aa, synthetic construct
  REGION 1..7: note = Description of Artificial Sequence: Synthetic peptide
GNSTSAV

SEQ ID NO: 11045 - protein, 7 aa, synthetic construct
  REGION 1..7: note = Description of Artificial Sequence: Synthetic peptide
GGNSKGV

SEQ ID NO: 11046 - protein, 7 aa, synthetic construct
  REGION 1..7: note = Description of Artificial Sequence: Synthetic peptide
SSAGSSA

SEQ ID NO: 11047 - protein, 7 aa, synthetic construct
  REGION 1..7: note = Description of Artificial Sequence: Synthetic peptide
QGDAARV

SEQ ID NO: 11048 - protein, 7 aa, synthetic construct
  REGION 1..7: note = Description of Artificial Sequence: Synthetic peptide
HHGQNGS

SEQ ID NO: 11049 - protein, 7 aa, synthetic construct
  REGION 1..7: note = Description of Artificial Sequence: Synthetic peptide
ANEPNLR

SEQ ID NO: 11050 - protein, 7 aa, synthetic construct
  REGION 1..7: note = Description of Artificial Sequence: Synthetic peptide
VNSGHTV

SEQ ID NO: 11051 - protein, 7 aa, synthetic construct
  REGION 1..7: note = Description of Artificial Sequence: Synthetic peptide
VPSSQSK

SEQ ID NO: 11052 - protein, 7 aa, synthetic construct
  REGION 1..7: note = Description of Artificial Sequence: Synthetic peptide
GLSTKDS

SEQ ID NO: 11053 - protein, 7 aa, synthetic construct
  REGION 1..7: note = Description of Artificial Sequence: Synthetic peptide
STQPSVK

SEQ ID NO: 11054 - protein, 7 aa, synthetic construct
  REGION 1..7: note = Description of Artificial Sequence: Synthetic peptide
QMSEPKQ

SEQ ID NO: 11055 - protein, 7 aa, synthetic construct
  REGION 1..7: note = Description of Artificial Sequence: Synthetic peptide
NHNPPSG

SEQ ID NO: 11056 - protein, 7 aa, synthetic construct
  REGION 1..7: note = Description of Artificial Sequence: Synthetic peptide
KGQLANV

SEQ ID NO: 11057 - protein, 7 aa, synthetic construct
  REGION 1..7: note = Description of Artificial Sequence: Synthetic peptide
TDTANPR

SEQ ID NO: 11058 - protein, 7 aa, synthetic construct
  REGION 1..7: note = Description of Artificial Sequence: Synthetic peptide
SVQRNGE

SEQ ID NO: 11059 - protein, 7 aa, synthetic construct
  REGION 1..7: note = Description of Artificial Sequence: Synthetic peptide
GTKSPTQ

SEQ ID NO: 11060 - protein, 7 aa, synthetic construct
  REGION 1..7: note = Description of Artificial Sequence: Synthetic peptide
SSTSTHG

SEQ ID NO: 11061 - protein, 7 aa, synthetic construct
  REGION 1..7: note = Description of Artificial Sequence: Synthetic peptide
GVTKGSS

SEQ ID NO: 11062 - protein, 7 aa, synthetic construct
  REGION 1..7: note = Description of Artificial Sequence: Synthetic peptide
NSGSNGG

SEQ ID NO: 11063 - protein, 7 aa, synthetic construct
  REGION 1..7: note = Description of Artificial Sequence: Synthetic peptide
SVGSTNG

SEQ ID NO: 11064 - protein, 7 aa, synthetic construct
  REGION 1..7: note = Description of Artificial Sequence: Synthetic peptide
DVATSNR

SEQ ID NO: 11065 - protein, 7 aa, synthetic construct
  REGION 1..7: note = Description of Artificial Sequence: Synthetic peptide
GLVKPNM

SEQ ID NO: 11066 - protein, 7 aa, synthetic construct
  REGION 1..7: note = Description of Artificial Sequence: Synthetic peptide
SKASAPS

SEQ ID NO: 11067 - protein, 7 aa, synthetic construct
  REGION 1..7: note = Description of Artificial Sequence: Synthetic peptide
SMSSSNT

SEQ ID NO: 11068 - protein, 7 aa, synthetic construct
  REGION 1..7: note = Description of Artificial Sequence: Synthetic peptide
SGAGGTS

SEQ ID NO: 11069 - protein, 7 aa, synthetic construct
  REGION 1..7: note = Description of Artificial Sequence: Synthetic peptide
MRDNQTQ

SEQ ID NO: 11070 - protein, 7 aa, synthetic construct
  REGION 1..7: note = Description of Artificial Sequence: Synthetic peptide
GNKQQPL

SEQ ID NO: 11071 - protein, 7 aa, synthetic construct
  REGION 1..7: note = Description of Artificial Sequence: Synthetic peptide
SPLSSKD

SEQ ID NO: 11072 - protein, 7 aa, synthetic construct
  REGION 1..7: note = Description of Artificial Sequence: Synthetic peptide
TGSDPLK

SEQ ID NO: 11073 - protein, 7 aa, synthetic construct
  REGION 1..7: note = Description of Artificial Sequence: Synthetic peptide
MTTGSTP

SEQ ID NO: 11074 - protein, 7 aa, synthetic construct
  REGION 1..7: note = Description of Artificial Sequence: Synthetic peptide
QNDGNRH

SEQ ID NO: 11075 - protein, 7 aa, synthetic construct
  REGION 1..7: note = Description of Artificial Sequence: Synthetic peptide
DSGNGKL

SEQ ID NO: 11076 - protein, 7 aa, synthetic construct
  REGION 1..7: note = Description of Artificial Sequence: Synthetic peptide
ARDNNNI

SEQ ID NO: 11077 - protein, 7 aa, synthetic construct
  REGION 1..7: note = Description of Artificial Sequence: Synthetic peptide
STTSPNS

SEQ ID NO: 11078 - protein, 7 aa, synthetic construct
  REGION 1..7: note = Description of Artificial Sequence: Synthetic peptide
NRTTSSQ

SEQ ID NO: 11079 - protein, 7 aa, synthetic construct
  REGION 1..7: note = Description of Artificial Sequence: Synthetic peptide
IATSHST

SEQ ID NO: 11080 - protein, 7 aa, synthetic construct
  REGION 1..7: note = Description of Artificial Sequence: Synthetic peptide
QPQKDSV

SEQ ID NO: 11081 - protein, 7 aa, synthetic construct
  REGION 1..7: note = Description of Artificial Sequence: Synthetic peptide
HAGKTTL

SEQ ID NO: 11082 - protein, 7 aa, synthetic construct
  REGION 1..7: note = Description of Artificial Sequence: Synthetic peptide
LQAAGST

SEQ ID NO: 11083 - protein, 7 aa, synthetic construct
  REGION 1..7: note = Description of Artificial Sequence: Synthetic peptide
QGSAPVQ

SEQ ID NO: 11084 - protein, 7 aa, synthetic construct
  REGION 1..7: note = Description of Artificial Sequence: Synthetic peptide
TSGNTSG

SEQ ID NO: 11085 - protein, 7 aa, synthetic construct
  REGION 1..7: note = Description of Artificial Sequence: Synthetic peptide
QVKTPNV

SEQ ID NO: 11086 - protein, 7 aa, synthetic construct
  REGION 1..7: note = Description of Artificial Sequence: Synthetic peptide
SGNTPSL

SEQ ID NO: 11087 - protein, 7 aa, synthetic construct
  REGION 1..7: note = Description of Artificial Sequence: Synthetic peptide
GNTQGIS

SEQ ID NO: 11088 - protein, 7 aa, synthetic construct
  REGION 1..7: note = Description of Artificial Sequence: Synthetic peptide
KGTNGAS

SEQ ID NO: 11089 - protein, 7 aa, synthetic construct
  REGION 1..7: note = Description of Artificial Sequence: Synthetic peptide
NSGQKID

SEQ ID NO: 11090 - protein, 7 aa, synthetic construct
  REGION 1..7: note = Description of Artificial Sequence: Synthetic peptide
TKISGAT

SEQ ID NO: 11091 - protein, 7 aa, synthetic construct
  REGION 1..7: note = Description of Artificial Sequence: Synthetic peptide
TMPKGDN

SEQ ID NO: 11092 - protein, 7 aa, synthetic construct
  REGION 1..7: note = Description of Artificial Sequence: Synthetic peptide
TRSNSNN

SEQ ID NO: 11093 - protein, 7 aa, synthetic construct
  REGION 1..7: note = Description of Artificial Sequence: Synthetic peptide
TGDSPTH

SEQ ID NO: 11094 - protein, 7 aa, synthetic construct
  REGION 1..7: note = Description of Artificial Sequence: Synthetic peptide
TPGTSRV

SEQ ID NO: 11095 - protein, 7 aa, synthetic construct
  REGION 1..7: note = Description of Artificial Sequence: Synthetic peptide
TSPGSHT

SEQ ID NO: 11096 - protein, 7 aa, synthetic construct
  REGION 1..7: note = Description of Artificial Sequence: Synthetic peptide
SKSTLAT

SEQ ID NO: 11097 - protein, 7 aa, synthetic construct
  REGION 1..7: note = Description of Artificial Sequence: Synthetic peptide
STASNPV

SEQ ID NO: 11098 - protein, 7 aa, synthetic construct
  REGION 1..7: note = Description of Artificial Sequence: Synthetic peptide
SSTNAQS

SEQ ID NO: 11099 - protein, 7 aa, synthetic construct
  REGION 1..7: note = Description of Artificial Sequence: Synthetic peptide
SADTKTS

SEQ ID NO: 11100 - protein, 7 aa, synthetic construct
  REGION 1..7: note = Description of Artificial Sequence: Synthetic peptide
SPMASKG

SEQ ID NO: 11101 - protein, 7 aa, synthetic construct
  REGION 1..7: note = Description of Artificial Sequence: Synthetic peptide
SGDTVHR

SEQ ID NO: 11102 - protein, 7 aa, synthetic construct
  REGION 1..7: note = Description of Artificial Sequence: Synthetic peptide
QTGRDST

SEQ ID NO: 11103 - protein, 7 aa, synthetic construct
  REGION 1..7: note = Description of Artificial Sequence: Synthetic peptide
QPNNGTR

SEQ ID NO: 11104 - protein, 7 aa, synthetic construct
  REGION 1..7: note = Description of Artificial Sequence: Synthetic peptide
QPAKGNM

SEQ ID NO: 11105 - protein, 7 aa, synthetic construct
  REGION 1..7: note = Description of Artificial Sequence: Synthetic peptide
RNGQTAG

SEQ ID NO: 11106 - protein, 7 aa, synthetic construct
  REGION 1..7: note = Description of Artificial Sequence: Synthetic peptide
LKSSSGG

SEQ ID NO: 11107 - protein, 7 aa, synthetic construct
  REGION 1..7: note = Description of Artificial Sequence: Synthetic peptide
EINKSNM

SEQ ID NO: 11108 - protein, 7 aa, synthetic construct
  REGION 1..7: note = Description of Artificial Sequence: Synthetic peptide
DRGGSTH

SEQ ID NO: 11109 - protein, 7 aa, synthetic construct
  REGION 1..7: note = Description of Artificial Sequence: Synthetic peptide
DSGHEKP

SEQ ID NO: 11110 - protein, 7 aa, synthetic construct
  REGION 1..7: note = Description of Artificial Sequence: Synthetic peptide
ETGSERT

SEQ ID NO: 11111 - protein, 7 aa, synthetic construct
  REGION 1..7: note = Description of Artificial Sequence: Synthetic peptide
EAKEPRS

SEQ ID NO: 11112 - protein, 7 aa, synthetic construct
  REGION 1..7: note = Description of Artificial Sequence: Synthetic peptide
EGGSTQV

SEQ ID NO: 11113 - protein, 7 aa, synthetic construct
  REGION 1..7: note = Description of Artificial Sequence: Synthetic peptide
EGSRKMD

SEQ ID NO: 11114 - protein, 7 aa, synthetic construct
  REGION 1..7: note = Description of Artificial Sequence: Synthetic peptide
DVNDRRT

SEQ ID NO: 11115 - protein, 7 aa, synthetic construct
  REGION 1..7: note = Description of Artificial Sequence: Synthetic peptide
AKADKNT

SEQ ID NO: 11116 - protein, 7 aa, synthetic construct
  REGION 1..7: note = Description of Artificial Sequence: Synthetic peptide
AGGQVTR

SEQ ID NO: 11117 - protein, 7 aa, synthetic construct
  REGION 1..7: note = Description of Artificial Sequence: Synthetic peptide
AGHSAPA

SEQ ID NO: 11118 - protein, 7 aa, synthetic construct
  REGION 1..7: note = Description of Artificial Sequence: Synthetic peptide
GITSSNK

SEQ ID NO: 11119 - protein, 7 aa, synthetic construct
  REGION 1..7: note = Description of Artificial Sequence: Synthetic peptide
GKGNSTA

SEQ ID NO: 11120 - protein, 7 aa, synthetic construct
  REGION 1..7: note = Description of Artificial Sequence: Synthetic peptide
STNAHSG

SEQ ID NO: 11121 - protein, 7 aa, synthetic construct
  REGION 1..7: note = Description of Artificial Sequence: Synthetic peptide
SDSRATV

SEQ ID NO: 11122 - protein, 7 aa, synthetic construct
  REGION 1..7: note = Description of Artificial Sequence: Synthetic peptide
SVNSPAL

SEQ ID NO: 11123 - protein, 7 aa, synthetic construct
  REGION 1..7: note = Description of Artificial Sequence: Synthetic peptide
GSSKGSG

SEQ ID NO: 11124 - protein, 7 aa, synthetic construct
  REGION 1..7: note = Description of Artificial Sequence: Synthetic peptide
AGGERPN

SEQ ID NO: 11125 - protein, 7 aa, synthetic construct
  REGION 1..7: note = Description of Artificial Sequence: Synthetic peptide
SGSDRTR

SEQ ID NO: 11126 - protein, 7 aa, synthetic construct
  REGION 1..7: note = Description of Artificial Sequence: Synthetic peptide
ATTSDRS

SEQ ID NO: 11127 - protein, 7 aa, synthetic construct
  REGION 1..7: note = Description of Artificial Sequence: Synthetic peptide
ERSQSVS

SEQ ID NO: 11128 - protein, 7 aa, synthetic construct
  REGION 1..7: note = Description of Artificial Sequence: Synthetic peptide
SRTQSVS

SEQ ID NO: 11129 - protein, 7 aa, synthetic construct
  REGION 1..7: note = Description of Artificial Sequence: Synthetic peptide
DGSSTHI

SEQ ID NO: 11130 - protein, 7 aa, synthetic construct
  REGION 1..7: note = Description of Artificial Sequence: Synthetic peptide
TATQAST

SEQ ID NO: 11131 - protein, 7 aa, synthetic construct
  REGION 1..7: note = Description of Artificial Sequence: Synthetic peptide
GSATQHS

SEQ ID NO: 11132 - protein, 7 aa, synthetic construct
  REGION 1..7: note = Description of Artificial Sequence: Synthetic peptide
FTEPSSK

SEQ ID NO: 11133 - protein, 7 aa, synthetic construct
  REGION 1..7: note = Description of Artificial Sequence: Synthetic peptide
DQTMKTG

SEQ ID NO: 11134 - protein, 7 aa, synthetic construct
  REGION 1..7: note = Description of Artificial Sequence: Synthetic peptide
DLQPTSR

SEQ ID NO: 11135 - protein, 7 aa, synthetic construct
  REGION 1..7: note = Description of Artificial Sequence: Synthetic peptide
VQSGKGS

SEQ ID NO: 11136 - protein, 7 aa, synthetic construct
  REGION 1..7: note = Description of Artificial Sequence: Synthetic peptide
SRSDSVS

SEQ ID NO: 11137 - protein, 7 aa, synthetic construct
  REGION 1..7: note = Description of Artificial Sequence: Synthetic peptide
QTSKPSA

SEQ ID NO: 11138 - protein, 7 aa, synthetic construct
  REGION 1..7: note = Description of Artificial Sequence: Synthetic peptide
QTSERPV

SEQ ID NO: 11139 - protein, 7 aa, synthetic construct
  REGION 1..7: note = Description of Artificial Sequence: Synthetic peptide
DSSRVSS

SEQ ID NO: 11140 - protein, 7 aa, synthetic construct
  REGION 1..7: note = Description of Artificial Sequence: Synthetic peptide
GIGNDTT

SEQ ID NO: 11141 - protein, 7 aa, synthetic construct
  REGION 1..7: note = Description of Artificial Sequence: Synthetic peptide
STVVKSE

SEQ ID NO: 11142 - protein, 7 aa, synthetic construct
  REGION 1..7: note = Description of Artificial Sequence: Synthetic peptide
SPVTSEG

SEQ ID NO: 11143 - protein, 7 aa, synthetic construct
  REGION 1..7: note = Description of Artificial Sequence: Synthetic peptide
FGSTSAH

SEQ ID NO: 11144 - protein, 7 aa, synthetic construct
  REGION 1..7: note = Description of Artificial Sequence: Synthetic peptide
VGKGPSN

SEQ ID NO: 11145 - protein, 7 aa, synthetic construct
  REGION 1..7: note = Description of Artificial Sequence: Synthetic peptide
GDRPSAM

SEQ ID NO: 11146 - protein, 7 aa, synthetic construct
  REGION 1..7: note = Description of Artificial Sequence: Synthetic peptide
QRDVGAK

SEQ ID NO: 11147 - protein, 7 aa, synthetic construct
  REGION 1..7: note = Description of Artificial Sequence: Synthetic peptide
TQGTTPV

SEQ ID NO: 11148 - protein, 7 aa, synthetic construct
  REGION 1..7: note = Description of Artificial Sequence: Synthetic peptide
AKSEQGT

SEQ ID NO: 11149 - protein, 7 aa, synthetic construct
  REGION 1..7: note = Description of Artificial Sequence: Synthetic peptide
ALNSSKS

SEQ ID NO: 11150 - protein, 7 aa, synthetic construct
  REGION 1..7: note = Description of Artificial Sequence: Synthetic peptide
GSSGSKS

SEQ ID NO: 11151 - protein, 7 aa, synthetic construct
  REGION 1..7: note = Description of Artificial Sequence: Synthetic peptide
SSSSQAN

SEQ ID NO: 11152 - protein, 7 aa, synthetic construct
  REGION 1..7: note = Description of Artificial Sequence: Synthetic peptide
VLTKGSA

SEQ ID NO: 11153 - protein, 7 aa, synthetic construct
  REGION 1..7: note = Description of Artificial Sequence: Synthetic peptide
NRAPNSA

SEQ ID NO: 11154 - protein, 7 aa, synthetic construct
  REGION 1..7: note = Description of Artificial Sequence: Synthetic peptide
EGSSASG

SEQ ID NO: 11155 - protein, 7 aa, synthetic construct
  REGION 1..7: note = Description of Artificial Sequence: Synthetic peptide
TTASSPG

SEQ ID NO: 11156 - protein, 7 aa, synthetic construct
  REGION 1..7: note = Description of Artificial Sequence: Synthetic peptide
SEARGNN

SEQ ID NO: 11157 - protein, 7 aa, synthetic construct
  REGION 1..7: note = Description of Artificial Sequence: Synthetic peptide
NEKGATK

SEQ ID NO: 11158 - protein, 7 aa, synthetic construct
  REGION 1..7: note = Description of Artificial Sequence: Synthetic peptide
SSSEKLQ

SEQ ID NO: 11159 - protein, 7 aa, synthetic construct
  REGION 1..7: note = Description of Artificial Sequence: Synthetic peptide
DGNPTKE

SEQ ID NO: 11160 - protein, 7 aa, synthetic construct
  REGION 1..7: note = Description of Artificial Sequence: Synthetic peptide
SGRDTNS

SEQ ID NO: 11161 - protein, 7 aa, synthetic construct
  REGION 1..7: note = Description of Artificial Sequence: Synthetic peptide
RTTTDSK

SEQ ID NO: 11162 - protein, 7 aa, synthetic construct
  REGION 1..7: note = Description of Artificial Sequence: Synthetic peptide
ESRAPVS

SEQ ID NO: 11163 - protein, 7 aa, synthetic construct
  REGION 1..7: note = Description of Artificial Sequence: Synthetic peptide
ARNDSMI

SEQ ID NO: 11164 - protein, 7 aa, synthetic construct
  REGION 1..7: note = Description of Artificial Sequence: Synthetic peptide
STNQAPM

SEQ ID NO: 11165 - protein, 7 aa, synthetic construct
  REGION 1..7: note = Description of Artificial Sequence: Synthetic peptide
AGMQKFT

SEQ ID NO: 11166 - protein, 7 aa, synthetic construct
  REGION 1..7: note = Description of Artificial Sequence: Synthetic peptide
SSQPSNK

SEQ ID NO: 11167 - protein, 7 aa, synthetic construct
  REGION 1..7: note = Description of Artificial Sequence: Synthetic peptide
QPGKIAT

SEQ ID NO: 11168 - protein, 7 aa, synthetic construct
  REGION 1..7: note = Description of Artificial Sequence: Synthetic peptide
LQKSPSI

SEQ ID NO: 11169 - protein, 7 aa, synthetic construct
  REGION 1..7: note = Description of Artificial Sequence: Synthetic peptide
APTQGSG

SEQ ID NO: 11170 - protein, 7 aa, synthetic construct
  REGION 1..7: note = Description of Artificial Sequence: Synthetic peptide
LPDGLKG

SEQ ID NO: 11171 - protein, 7 aa, synthetic construct
  REGION 1..7: note = Description of Artificial Sequence: Synthetic peptide
TTEQNRQ

SEQ ID NO: 11172 - protein, 7 aa, synthetic construct
  REGION 1..7: note = Description of Artificial Sequence: Synthetic peptide
AANDKLR

SEQ ID NO: 11173 - protein, 7 aa, synthetic construct
  REGION 1..7: note = Description of Artificial Sequence: Synthetic peptide
TSGDKQL

SEQ ID NO: 11174 - protein, 7 aa, synthetic construct
  REGION 1..7: note = Description of Artificial Sequence: Synthetic peptide
TVTPATS

SEQ ID NO: 11175 - protein, 7 aa, synthetic construct
  REGION 1..7: note = Description of Artificial Sequence: Synthetic peptide
HSQKGGM

SEQ ID NO: 11176 - protein, 7 aa, synthetic construct
  REGION 1..7: note = Description of Artificial Sequence: Synthetic peptide
DPGVSAR

SEQ ID NO: 11177 - protein, 7 aa, synthetic construct
  REGION 1..7: note = Description of Artificial Sequence: Synthetic peptide
GTSKTQS

SEQ ID NO: 11178 - protein, 7 aa, synthetic construct
  REGION 1..7: note = Description of Artificial Sequence: Synthetic peptide
TGSSQSH

SEQ ID NO: 11179 - protein, 7 aa, synthetic construct
  REGION 1..7: note = Description of Artificial Sequence: Synthetic peptide
ELLQKPT

SEQ ID NO: 11180 - protein, 7 aa, synthetic construct
  REGION 1..7: note = Description of Artificial Sequence: Synthetic peptide
EASSNRG

SEQ ID NO: 11181 - protein, 7 aa, synthetic construct
  REGION 1..7: note = Description of Artificial Sequence: Synthetic peptide
GPGPSTN

SEQ ID NO: 11182 - protein, 7 aa, synthetic construct
  REGION 1..7: note = Description of Artificial Sequence: Synthetic peptide
GTGSKLG

SEQ ID NO: 11183 - protein, 7 aa, synthetic construct
  REGION 1..7: note = Description of Artificial Sequence: Synthetic peptide
GIHQNSG

SEQ ID NO: 11184 - protein, 7 aa, synthetic construct
  REGION 1..7: note = Description of Artificial Sequence: Synthetic peptide
STGNPPR

SEQ ID NO: 11185 - protein, 7 aa, synthetic construct
  REGION 1..7: note = Description of Artificial Sequence: Synthetic peptide
DQHDRRA

SEQ ID NO: 11186 - protein, 7 aa, synthetic construct
  REGION 1..7: note = Description of Artificial Sequence: Synthetic peptide
GSGANKP

SEQ ID NO: 11187 - protein, 7 aa, synthetic construct
  REGION 1..7: note = Description of Artificial Sequence: Synthetic peptide
QGSSNGI

SEQ ID NO: 11188 - protein, 7 aa, synthetic construct
  REGION 1..7: note = Description of Artificial Sequence: Synthetic peptide
DRPGEKA

SEQ ID NO: 11189 - protein, 7 aa, synthetic construct
  REGION 1..7: note = Description of Artificial Sequence: Synthetic peptide
EGGSSGS

SEQ ID NO: 11190 - protein, 7 aa, synthetic construct
  REGION 1..7: note = Description of Artificial Sequence: Synthetic peptide
VQGKHTQ

SEQ ID NO: 11191 - protein, 7 aa, synthetic construct
  REGION 1..7: note = Description of Artificial Sequence: Synthetic peptide
NPKSTVT

SEQ ID NO: 11192 - protein, 7 aa, synthetic construct
  REGION 1..7: note = Description of Artificial Sequence: Synthetic peptide
LASSSQT

SEQ ID NO: 11193 - protein, 7 aa, synthetic construct
  REGION 1..7: note = Description of Artificial Sequence: Synthetic peptide
SPNGASR

SEQ ID NO: 11194 - protein, 7 aa, synthetic construct
  REGION 1..7: note = Description of Artificial Sequence: Synthetic peptide
AGDKIRL

SEQ ID NO: 11195 - protein, 7 aa, synthetic construct
  REGION 1..7: note = Description of Artificial Sequence: Synthetic peptide
NGMKTGT

SEQ ID NO: 11196 - protein, 7 aa, synthetic construct
  REGION 1..7: note = Description of Artificial Sequence: Synthetic peptide
SNGSKVS

SEQ ID NO: 11197 - protein, 7 aa, synthetic construct
  REGION 1..7: note = Description of Artificial Sequence: Synthetic peptide
KNTSTSQ

SEQ ID NO: 11198 - protein, 7 aa, synthetic construct
  REGION 1..7: note = Description of Artificial Sequence: Synthetic peptide
KGQPPKE

SEQ ID NO: 11199 - protein, 7 aa, synthetic construct
  REGION 1..7: note = Description of Artificial Sequence: Synthetic peptide
NVHTATA

SEQ ID NO: 11200 - protein, 7 aa, synthetic construct
  REGION 1..7: note = Description of Artificial Sequence: Synthetic peptide
SNSKDTL

SEQ ID NO: 11201 - protein, 7 aa, synthetic construct
  REGION 1..7: note = Description of Artificial Sequence: Synthetic peptide
MPNGSNK

SEQ ID NO: 11202 - protein, 7 aa, synthetic construct
  REGION 1..7: note = Description of Artificial Sequence: Synthetic peptide
ERGAHSV

SEQ ID NO: 11203 - protein, 7 aa, synthetic construct
  REGION 1..7: note = Description of Artificial Sequence: Synthetic peptide
EGSPLGH

SEQ ID NO: 11204 - protein, 7 aa, synthetic construct
  REGION 1..7: note = Description of Artificial Sequence: Synthetic peptide
DNNNARQ

SEQ ID NO: 11205 - protein, 7 aa, synthetic construct
  REGION 1..7: note = Description of Artificial Sequence: Synthetic peptide
GGKGNNV

SEQ ID NO: 11206 - protein, 7 aa, synthetic construct
  REGION 1..7: note = Description of Artificial Sequence: Synthetic peptide
SQAQSNN

SEQ ID NO: 11207 - protein, 7 aa, synthetic construct
  REGION 1..7: note = Description of Artificial Sequence: Synthetic peptide
THTSPSI

SEQ ID NO: 11208 - protein, 7 aa, synthetic construct
  REGION 1..7: note = Description of Artificial Sequence: Synthetic peptide
ETATSRG

SEQ ID NO: 11209 - protein, 7 aa, synthetic construct
  REGION 1..7: note = Description of Artificial Sequence: Synthetic peptide
ATEDNRK

SEQ ID NO: 11210 - protein, 7 aa, synthetic construct
  REGION 1..7: note = Description of Artificial Sequence: Synthetic peptide
NAVGTHS

SEQ ID NO: 11211 - protein, 7 aa, synthetic construct
  REGION 1..7: note = Description of Artificial Sequence: Synthetic peptide
GNTERKG

SEQ ID NO: 11212 - protein, 7 aa, synthetic construct
  REGION 1..7: note = Description of Artificial Sequence: Synthetic peptide
GHSQGLA

SEQ ID NO: 11213 - protein, 7 aa, synthetic construct
  REGION 1..7: note = Description of Artificial Sequence: Synthetic peptide
VKSTSTE

SEQ ID NO: 11214 - protein, 7 aa, synthetic construct
  REGION 1..7: note = Description of Artificial Sequence: Synthetic peptide
SRSGQGP

SEQ ID NO: 11215 - protein, 7 aa, synthetic construct
  REGION 1..7: note = Description of Artificial Sequence: Synthetic peptide
SATGSGV

SEQ ID NO: 11216 - protein, 7 aa, synthetic construct
  REGION 1..7: note = Description of Artificial Sequence: Synthetic peptide
HSSNGTQ

SEQ ID NO: 11217 - protein, 7 aa, synthetic construct
  REGION 1..7: note = Description of Artificial Sequence: Synthetic peptide
TTVSGST

SEQ ID NO: 11218 - protein, 7 aa, synthetic construct
  REGION 1..7: note = Description of Artificial Sequence: Synthetic peptide
SKVSSPP

SEQ ID NO: 11219 - protein, 7 aa, synthetic construct
  REGION 1..7: note = Description of Artificial Sequence: Synthetic peptide
SNGERSN

SEQ ID NO: 11220 - protein, 7 aa, synthetic construct
  REGION 1..7: note = Description of Artificial Sequence: Synthetic peptide
SNAKGVV

SEQ ID NO: 11221 - protein, 7 aa, synthetic construct
  REGION 1..7: note = Description of Artificial Sequence: Synthetic peptide
FKNTKDG

SEQ ID NO: 11222 - protein, 7 aa, synthetic construct
  REGION 1..7: note = Description of Artificial Sequence: Synthetic peptide
TTNTAVA

SEQ ID NO: 11223 - protein, 7 aa, synthetic construct
  REGION 1..7: note = Description of Artificial Sequence: Synthetic peptide
TNGNGGS

SEQ ID NO: 11224 - protein, 7 aa, synthetic construct
  REGION 1..7: note = Description of Artificial Sequence: Synthetic peptide
TIGSSST

SEQ ID NO: 11225 - protein, 7 aa, synthetic construct
  REGION 1..7: note = Description of Artificial Sequence: Synthetic peptide
SMANLKD

SEQ ID NO: 11226 - protein, 7 aa, synthetic construct
  REGION 1..7: note = Description of Artificial Sequence: Synthetic peptide
DVSKATS

SEQ ID NO: 11227 - protein, 7 aa, synthetic construct
  REGION 1..7: note = Description of Artificial Sequence: Synthetic peptide
AVSGAKG

SEQ ID NO: 11228 - protein, 7 aa, synthetic construct
  REGION 1..7: note = Description of Artificial Sequence: Synthetic peptide
GSIPSSS

SEQ ID NO: 11229 - protein, 7 aa, synthetic construct
  REGION 1..7: note = Description of Artificial Sequence: Synthetic peptide
GSGNTAE

SEQ ID NO: 11230 - protein, 7 aa, synthetic construct
  REGION 1..7: note = Description of Artificial Sequence: Synthetic peptide
GSGSAKL

SEQ ID NO: 11231 - protein, 7 aa, synthetic construct
  REGION 1..7: note = Description of Artificial Sequence: Synthetic peptide
TTRSKNE

SEQ ID NO: 11232 - protein, 7 aa, synthetic construct
  REGION 1..7: note = Description of Artificial Sequence: Synthetic peptide
GLSASIR

SEQ ID NO: 11233 - protein, 7 aa, synthetic construct
  REGION 1..7: note = Description of Artificial Sequence: Synthetic peptide
TQMKPTR

SEQ ID NO: 11234 - protein, 7 aa, synthetic construct
  REGION 1..7: note = Description of Artificial Sequence: Synthetic peptide
SQTNGAV

SEQ ID NO: 11235 - protein, 7 aa, synthetic construct
  REGION 1..7: note = Description of Artificial Sequence: Synthetic peptide
AGDQTRI

SEQ ID NO: 11236 - protein, 7 aa, synthetic construct
  REGION 1..7: note = Description of Artificial Sequence: Synthetic peptide
ATTSSPK

SEQ ID NO: 11237 - protein, 7 aa, synthetic construct
  REGION 1..7: note = Description of Artificial Sequence: Synthetic peptide
GTIANAR

SEQ ID NO: 11238 - protein, 7 aa, synthetic construct
  REGION 1..7: note = Description of Artificial Sequence: Synthetic peptide
GSGSPSA

SEQ ID NO: 11239 - protein, 7 aa, synthetic construct
  REGION 1..7: note = Description of Artificial Sequence: Synthetic peptide
NSNSREK

SEQ ID NO: 11240 - protein, 7 aa, synthetic construct
  REGION 1..7: note = Description of Artificial Sequence: Synthetic peptide
NSTGTGS

SEQ ID NO: 11241 - protein, 7 aa, synthetic construct
  REGION 1..7: note = Description of Artificial Sequence: Synthetic peptide
NQSNVPL

SEQ ID NO: 11242 - protein, 7 aa, synthetic construct
  REGION 1..7: note = Description of Artificial Sequence: Synthetic peptide
TPANAQA

SEQ ID NO: 11243 - protein, 7 aa, synthetic construct
  REGION 1..7: note = Description of Artificial Sequence: Synthetic peptide
SIGNKTL

SEQ ID NO: 11244 - protein, 7 aa, synthetic construct
  REGION 1..7: note = Description of Artificial Sequence: Synthetic peptide
SSYKGEG

SEQ ID NO: 11245 - protein, 7 aa, synthetic construct
  REGION 1..7: note = Description of Artificial Sequence: Synthetic peptide
LDKVKTT

SEQ ID NO: 11246 - protein, 7 aa, synthetic construct
  REGION 1..7: note = Description of Artificial Sequence: Synthetic peptide
ESDGGKS

SEQ ID NO: 11247 - protein, 7 aa, synthetic construct
  REGION 1..7: note = Description of Artificial Sequence: Synthetic peptide
DRTQDAH

SEQ ID NO: 11248 - protein, 7 aa, synthetic construct
  REGION 1..7: note = Description of Artificial Sequence: Synthetic peptide
ANTDKRV

SEQ ID NO: 11249 - protein, 7 aa, synthetic construct
  REGION 1..7: note = Description of Artificial Sequence: Synthetic peptide
AGNTLAA

SEQ ID NO: 11250 - protein, 7 aa, synthetic construct
  REGION 1..7: note = Description of Artificial Sequence: Synthetic peptide
AGTSTMS

SEQ ID NO: 11251 - protein, 7 aa, synthetic construct
  REGION 1..7: note = Description of Artificial Sequence: Synthetic peptide
AMSKKEA

SEQ ID NO: 11252 - protein, 7 aa, synthetic construct
  REGION 1..7: note = Description of Artificial Sequence: Synthetic peptide
GRKDAAV

SEQ ID NO: 11253 - protein, 7 aa, synthetic construct
  REGION 1..7: note = Description of Artificial Sequence: Synthetic peptide
VAGSSTV

SEQ ID NO: 11254 - protein, 7 aa, synthetic construct
  REGION 1..7: note = Description of Artificial Sequence: Synthetic peptide
YKVGTES

SEQ ID NO: 11255 - protein, 7 aa, synthetic construct
  REGION 1..7: note = Description of Artificial Sequence: Synthetic peptide
TNANVPR

SEQ ID NO: 11256 - protein, 7 aa, synthetic construct
  REGION 1..7: note = Description of Artificial Sequence: Synthetic peptide
LGSGRPE

SEQ ID NO: 11257 - protein, 7 aa, synthetic construct
  REGION 1..7: note = Description of Artificial Sequence: Synthetic peptide
LGNASNN

SEQ ID NO: 11258 - protein, 7 aa, synthetic construct
  REGION 1..7: note = Description of Artificial Sequence: Synthetic peptide
TPSTPAS

SEQ ID NO: 11259 - protein, 7 aa, synthetic construct
  REGION 1..7: note = Description of Artificial Sequence: Synthetic peptide
LSGSNSS

SEQ ID NO: 11260 - protein, 7 aa, synthetic construct
  REGION 1..7: note = Description of Artificial Sequence: Synthetic peptide
DLSVKTQ

SEQ ID NO: 11261 - protein, 7 aa, synthetic construct
  REGION 1..7: note = Description of Artificial Sequence: Synthetic peptide
GLATSSQ

SEQ ID NO: 11262 - protein, 7 aa, synthetic construct
  REGION 1..7: note = Description of Artificial Sequence: Synthetic peptide
IGAERSV

SEQ ID NO: 11263 - protein, 7 aa, synthetic construct
  REGION 1..7: note = Description of Artificial Sequence: Synthetic peptide
GNLTTTK

SEQ ID NO: 11264 - protein, 7 aa, synthetic construct
  REGION 1..7: note = Description of Artificial Sequence: Synthetic peptide
DGSAKLV

SEQ ID NO: 11265 - protein, 7 aa, synthetic construct
  REGION 1..7: note = Description of Artificial Sequence: Synthetic peptide
SDSRAGG

SEQ ID NO: 11266 - protein, 7 aa, synthetic construct
  REGION 1..7: note = Description of Artificial Sequence: Synthetic peptide
LSHSKAT

SEQ ID NO: 11267 - protein, 7 aa, synthetic construct
  REGION 1..7: note = Description of Artificial Sequence: Synthetic peptide
RSESAST

SEQ ID NO: 11268 - protein, 7 aa, synthetic construct
  REGION 1..7: note = Description of Artificial Sequence: Synthetic peptide
STNRSSG

SEQ ID NO: 11269 - protein, 7 aa, synthetic construct
  REGION 1..7: note = Description of Artificial Sequence: Synthetic peptide
ASEKKVL

SEQ ID NO: 11270 - protein, 7 aa, synthetic construct
  REGION 1..7: note = Description of Artificial Sequence: Synthetic peptide
GNKAVSG

SEQ ID NO: 11271 - protein, 7 aa, synthetic construct
  REGION 1..7: note = Description of Artificial Sequence: Synthetic peptide
GGSKAVD

SEQ ID NO: 11272 - protein, 7 aa, synthetic construct
  REGION 1..7: note = Description of Artificial Sequence: Synthetic peptide
GVDKKSP

SEQ ID NO: 11273 - protein, 7 aa, synthetic construct
  REGION 1..7: note = Description of Artificial Sequence: Synthetic peptide
SAGNSKI

SEQ ID NO: 11274 - protein, 7 aa, synthetic construct
  REGION 1..7: note = Description of Artificial Sequence: Synthetic peptide
HNGGSNK

SEQ ID NO: 11275 - protein, 7 aa, synthetic construct
  REGION 1..7: note = Description of Artificial Sequence: Synthetic peptide
TGSGHIS

SEQ ID NO: 11276 - protein, 7 aa, synthetic construct
  REGION 1..7: note = Description of Artificial Sequence: Synthetic peptide
LQKPSGT

SEQ ID NO: 11277 - protein, 7 aa, synthetic construct
  REGION 1..7: note = Description of Artificial Sequence: Synthetic peptide
MSTSSSR

SEQ ID NO: 11278 - protein, 7 aa, synthetic construct
  REGION 1..7: note = Description of Artificial Sequence: Synthetic peptide
ANSTNHT

SEQ ID NO: 11279 - protein, 7 aa, synthetic construct
  REGION 1..7: note = Description of Artificial Sequence: Synthetic peptide
NSSPVSN

SEQ ID NO: 11280 - protein, 7 aa, synthetic construct
  REGION 1..7: note = Description of Artificial Sequence: Synthetic peptide
TNNATAT

SEQ ID NO: 11281 - protein, 7 aa, synthetic construct
  REGION 1..7: note = Description of Artificial Sequence: Synthetic peptide
TGTNPNG

SEQ ID NO: 11282 - protein, 7 aa, synthetic construct
  REGION 1..7: note = Description of Artificial Sequence: Synthetic peptide
RNGDQAA

SEQ ID NO: 11283 - protein, 7 aa, synthetic construct
  REGION 1..7: note = Description of Artificial Sequence: Synthetic peptide
SRGESKS

SEQ ID NO: 11284 - protein, 7 aa, synthetic construct
  REGION 1..7: note = Description of Artificial Sequence: Synthetic peptide
EVGKHSS

SEQ ID NO: 11285 - protein, 7 aa, synthetic construct
  REGION 1..7: note = Description of Artificial Sequence: Synthetic peptide
ANREKIL

SEQ ID NO: 11286 - protein, 7 aa, synthetic construct
  REGION 1..7: note = Description of Artificial Sequence: Synthetic peptide
AGTNANK

SEQ ID NO: 11287 - protein, 7 aa, synthetic construct
  REGION 1..7: note = Description of Artificial Sequence: Synthetic peptide
VPDNKQL

SEQ ID NO: 11288 - protein, 7 aa, synthetic construct
  REGION 1..7: note = Description of Artificial Sequence: Synthetic peptide
AGPSGKI

SEQ ID NO: 11289 - protein, 7 aa, synthetic construct
  REGION 1..7: note = Description of Artificial Sequence: Synthetic peptide
DTGRGGN

SEQ ID NO: 11290 - protein, 7 aa, synthetic construct
  REGION 1..7: note = Description of Artificial Sequence: Synthetic peptide
RDGTSPE

SEQ ID NO: 11291 - protein, 7 aa, synthetic construct
  REGION 1..7: note = Description of Artificial Sequence: Synthetic peptide
QSAQASK

SEQ ID NO: 11292 - protein, 7 aa, synthetic construct
  REGION 1..7: note = Description of Artificial Sequence: Synthetic peptide
TTDKGGR

SEQ ID NO: 11293 - protein, 7 aa, synthetic construct
  REGION 1..7: note = Description of Artificial Sequence: Synthetic peptide
QASTSPL

SEQ ID NO: 11294 - protein, 7 aa, synthetic construct
  REGION 1..7: note = Description of Artificial Sequence: Synthetic peptide
DRSPSAV

SEQ ID NO: 11295 - protein, 7 aa, synthetic construct
  REGION 1..7: note = Description of Artificial Sequence: Synthetic peptide
AAPGAGG

SEQ ID NO: 11296 - protein, 7 aa, synthetic construct
  REGION 1..7: note = Description of Artificial Sequence: Synthetic peptide
LPNQKDT

SEQ ID NO: 11297 - protein, 7 aa, synthetic construct
  REGION 1..7: note = Description of Artificial Sequence: Synthetic peptide
FPNNKNG

SEQ ID NO: 11298 - protein, 7 aa, synthetic construct
  REGION 1..7: note = Description of Artificial Sequence: Synthetic peptide
GPLTRDG

SEQ ID NO: 11299 - protein, 7 aa, synthetic construct
  REGION 1..7: note = Description of Artificial Sequence: Synthetic peptide
TPNSSNG

SEQ ID NO: 11300 - protein, 7 aa, synthetic construct
  REGION 1..7: note = Description of Artificial Sequence: Synthetic peptide
HKEVATA

SEQ ID NO: 11301 - protein, 7 aa, synthetic construct
  REGION 1..7: note = Description of Artificial Sequence: Synthetic peptide
KTGSPQD

SEQ ID NO: 11302 - protein, 7 aa, synthetic construct
  REGION 1..7: note = Description of Artificial Sequence: Synthetic peptide
TDGNSTR

SEQ ID NO: 11303 - protein, 7 aa, synthetic construct
  REGION 1..7: note = Description of Artificial Sequence: Synthetic peptide
RKDTETH

SEQ ID NO: 11304 - protein, 7 aa, synthetic construct
  REGION 1..7: note = Description of Artificial Sequence: Synthetic peptide
SSSTTRV

SEQ ID NO: 11305 - protein, 7 aa, synthetic construct
  REGION 1..7: note = Description of Artificial Sequence: Synthetic peptide
QSGGVSG

SEQ ID NO: 11306 - protein, 7 aa, synthetic construct
  REGION 1..7: note = Description of Artificial Sequence: Synthetic peptide
VPSGGSN

SEQ ID NO: 11307 - protein, 7 aa, synthetic construct
  REGION 1..7: note = Description of Artificial Sequence: Synthetic peptide
SNQRGNS

SEQ ID NO: 11308 - protein, 7 aa, synthetic construct
  REGION 1..7: note = Description of Artificial Sequence: Synthetic peptide
SSGNGLH

SEQ ID NO: 11309 - protein, 7 aa, synthetic construct
  REGION 1..7: note = Description of Artificial Sequence: Synthetic peptide
RDGSSKD

SEQ ID NO: 11310 - protein, 7 aa, synthetic construct
  REGION 1..7: note = Description of Artificial Sequence: Synthetic peptide
STSGNHA

SEQ ID NO: 11311 - protein, 7 aa, synthetic construct
  REGION 1..7: note = Description of Artificial Sequence: Synthetic peptide
LPAKTDS

SEQ ID NO: 11312 - protein, 7 aa, synthetic construct
  REGION 1..7: note = Description of Artificial Sequence: Synthetic peptide
LAEKTTP

SEQ ID NO: 11313 - protein, 7 aa, synthetic construct
  REGION 1..7: note = Description of Artificial Sequence: Synthetic peptide
AHNDTKK

SEQ ID NO: 11314 - protein, 7 aa, synthetic construct
  REGION 1..7: note = Description of Artificial Sequence: Synthetic peptide
GVTGPRS

SEQ ID NO: 11315 - protein, 7 aa, synthetic construct
  REGION 1..7: note = Description of Artificial Sequence: Synthetic peptide
VTNAHNS

SEQ ID NO: 11316 - protein, 7 aa, synthetic construct
  REGION 1..7: note = Description of Artificial Sequence: Synthetic peptide
SSTSSGG

SEQ ID NO: 11317 - protein, 7 aa, synthetic construct
  REGION 1..7: note = Description of Artificial Sequence: Synthetic peptide
SPSDKVS

SEQ ID NO: 11318 - protein, 7 aa, synthetic construct
  REGION 1..7: note = Description of Artificial Sequence: Synthetic peptide
QNASPGN

SEQ ID NO: 11319 - protein, 7 aa, synthetic construct
  REGION 1..7: note = Description of Artificial Sequence: Synthetic peptide
SIDQARS

SEQ ID NO: 11320 - protein, 7 aa, synthetic construct
  REGION 1..7: note = Description of Artificial Sequence: Synthetic peptide
VASPGGN

SEQ ID NO: 11321 - protein, 7 aa, synthetic construct
  REGION 1..7: note = Description of Artificial Sequence: Synthetic peptide
TGTQGSS

SEQ ID NO: 11322 - protein, 7 aa, synthetic construct
  REGION 1..7: note = Description of Artificial Sequence: Synthetic peptide
VKLDRSV

SEQ ID NO: 11323 - protein, 7 aa, synthetic construct
  REGION 1..7: note = Description of Artificial Sequence: Synthetic peptide
VTSTASV

SEQ ID NO: 11324 - protein, 7 aa, synthetic construct
  REGION 1..7: note = Description of Artificial Sequence: Synthetic peptide
STDTSAS

SEQ ID NO: 11325 - protein, 7 aa, synthetic construct
  REGION 1..7: note = Description of Artificial Sequence: Synthetic peptide
GDSSRAS

SEQ ID NO: 11326 - protein, 7 aa, synthetic construct
  REGION 1..7: note = Description of Artificial Sequence: Synthetic peptide
STQSPTR

SEQ ID NO: 11327 - protein, 7 aa, synthetic construct
  REGION 1..7: note = Description of Artificial Sequence: Synthetic peptide
KVGGTNT

SEQ ID NO: 11328 - protein, 7 aa, synthetic construct
  REGION 1..7: note = Description of Artificial Sequence: Synthetic peptide
NRTSGEK

SEQ ID NO: 11329 - protein, 7 aa, synthetic construct
  REGION 1..7: note = Description of Artificial Sequence: Synthetic peptide
TLASPHG

SEQ ID NO: 11330 - protein, 7 aa, synthetic construct
  REGION 1..7: note = Description of Artificial Sequence: Synthetic peptide
TGLNNPS

SEQ ID NO: 11331 - protein, 7 aa, synthetic construct
  REGION 1..7: note = Description of Artificial Sequence: Synthetic peptide
TKDNVHK

SEQ ID NO: 11332 - protein, 7 aa, synthetic construct
  REGION 1..7: note = Description of Artificial Sequence: Synthetic peptide
STSSAPY

SEQ ID NO: 11333 - protein, 7 aa, synthetic construct
  REGION 1..7: note = Description of Artificial Sequence: Synthetic peptide
RHDATSQ

SEQ ID NO: 11334 - protein, 7 aa, synthetic construct
  REGION 1..7: note = Description of Artificial Sequence: Synthetic peptide
SPNPTGS

SEQ ID NO: 11335 - protein, 7 aa, synthetic construct
  REGION 1..7: note = Description of Artificial Sequence: Synthetic peptide
SGSAHGL

SEQ ID NO: 11336 - protein, 7 aa, synthetic construct
  REGION 1..7: note = Description of Artificial Sequence: Synthetic peptide
SSGSGIG

SEQ ID NO: 11337 - protein, 7 aa, synthetic construct
  REGION 1..7: note = Description of Artificial Sequence: Synthetic peptide
MNSSGGK

SEQ ID NO: 11338 - protein, 7 aa, synthetic construct
  REGION 1..7: note = Description of Artificial Sequence: Synthetic peptide
QNDRTST

SEQ ID NO: 11339 - protein, 7 aa, synthetic construct
  REGION 1..7: note = Description of Artificial Sequence: Synthetic peptide
QGQEPKR

SEQ ID NO: 11340 - protein, 7 aa, synthetic construct
  REGION 1..7: note = Description of Artificial Sequence: Synthetic peptide
HSSPPNS

SEQ ID NO: 11341 - protein, 7 aa, synthetic construct
  REGION 1..7: note = Description of Artificial Sequence: Synthetic peptide
EISSSKL

SEQ ID NO: 11342 - protein, 7 aa, synthetic construct
  REGION 1..7: note = Description of Artificial Sequence: Synthetic peptide
EQRSTSS

SEQ ID NO: 11343 - protein, 7 aa, synthetic construct
  REGION 1..7: note = Description of Artificial Sequence: Synthetic peptide
DATSPKV

SEQ ID NO: 11344 - protein, 7 aa, synthetic construct
  REGION 1..7: note = Description of Artificial Sequence: Synthetic peptide
EDGRSSA

SEQ ID NO: 11345 - protein, 7 aa, synthetic construct
  REGION 1..7: note = Description of Artificial Sequence: Synthetic peptide
AQSQTNT

SEQ ID NO: 11346 - protein, 7 aa, synthetic construct
  REGION 1..7: note = Description of Artificial Sequence: Synthetic peptide
AGQKQGM

SEQ ID NO: 11347 - protein, 7 aa, synthetic construct
  REGION 1..7: note = Description of Artificial Sequence: Synthetic peptide
GTAGTNT

SEQ ID NO: 11348 - protein, 7 aa, synthetic construct
  REGION 1..7: note = Description of Artificial Sequence: Synthetic peptide
GGHSERR

SEQ ID NO: 11349 - protein, 7 aa, synthetic construct
  REGION 1..7: note = Description of Artificial Sequence: Synthetic peptide
GTIGVHK

SEQ ID NO: 11350 - protein, 7 aa, synthetic construct
  REGION 1..7: note = Description of Artificial Sequence: Synthetic peptide
GSPSNQG

SEQ ID NO: 11351 - protein, 7 aa, synthetic construct
  REGION 1..7: note = Description of Artificial Sequence: Synthetic peptide
VNQSHSM

SEQ ID NO: 11352 - protein, 7 aa, synthetic construct
  REGION 1..7: note = Description of Artificial Sequence: Synthetic peptide
SPQGSLG

SEQ ID NO: 11353 - protein, 7 aa, synthetic construct
  REGION 1..7: note = Description of Artificial Sequence: Synthetic peptide
STQPRSQ

SEQ ID NO: 11354 - protein, 7 aa, synthetic construct
  REGION 1..7: note = Description of Artificial Sequence: Synthetic peptide
FKESGGG

SEQ ID NO: 11355 - protein, 7 aa, synthetic construct
  REGION 1..7: note = Description of Artificial Sequence: Synthetic peptide
DRNRDTT

SEQ ID NO: 11356 - protein, 7 aa, synthetic construct
  REGION 1..7: note = Description of Artificial Sequence: Synthetic peptide
LNNSQHA

SEQ ID NO: 11357 - protein, 7 aa, synthetic construct
  REGION 1..7: note = Description of Artificial Sequence: Synthetic peptide
HSGSGLS

SEQ ID NO: 11358 - protein, 7 aa, synthetic construct
  REGION 1..7: note = Description of Artificial Sequence: Synthetic peptide
TTGGTMQ

SEQ ID NO: 11359 - protein, 7 aa, synthetic construct
  REGION 1..7: note = Description of Artificial Sequence: Synthetic peptide
TGQRSAS

SEQ ID NO: 11360 - protein, 7 aa, synthetic construct
  REGION 1..7: note = Description of Artificial Sequence: Synthetic peptide
MDTGPRE

SEQ ID NO: 11361 - protein, 7 aa, synthetic construct
  REGION 1..7: note = Description of Artificial Sequence: Synthetic peptide
EPLSSPK

SEQ ID NO: 11362 - protein, 7 aa, synthetic construct
  REGION 1..7: note = Description of Artificial Sequence: Synthetic peptide
SIESKSA

SEQ ID NO: 11363 - protein, 7 aa, synthetic construct
  REGION 1..7: note = Description of Artificial Sequence: Synthetic peptide
SGSNASS

SEQ ID NO: 11364 - protein, 7 aa, synthetic construct
  REGION 1..7: note = Description of Artificial Sequence: Synthetic peptide
RVNGGSG

SEQ ID NO: 11365 - protein, 7 aa, synthetic construct
  REGION 1..7: note = Description of Artificial Sequence: Synthetic peptide
SGMESRV

SEQ ID NO: 11366 - protein, 7 aa, synthetic construct
  REGION 1..7: note = Description of Artificial Sequence: Synthetic peptide
EGGNGQM

SEQ ID NO: 11367 - protein, 7 aa, synthetic construct
  REGION 1..7: note = Description of Artificial Sequence: Synthetic peptide
GQTKERP

SEQ ID NO: 11368 - protein, 7 aa, synthetic construct
  REGION 1..7: note = Description of Artificial Sequence: Synthetic peptide
GDLPSSG

SEQ ID NO: 11369 - protein, 7 aa, synthetic construct
  REGION 1..7: note = Description of Artificial Sequence: Synthetic peptide
SGKGGTV

SEQ ID NO: 11370 - protein, 7 aa, synthetic construct
  REGION 1..7: note = Description of Artificial Sequence: Synthetic peptide
MNNSPTK

SEQ ID NO: 11371 - protein, 7 aa, synthetic construct
  REGION 1..7: note = Description of Artificial Sequence: Synthetic peptide
VSAGAPS

SEQ ID NO: 11372 - protein, 7 aa, synthetic construct
  REGION 1..7: note = Description of Artificial Sequence: Synthetic peptide
TQGVSRE

SEQ ID NO: 11373 - protein, 7 aa, synthetic construct
  REGION 1..7: note = Description of Artificial Sequence: Synthetic peptide
SSTSPSR

SEQ ID NO: 11374 - protein, 7 aa, synthetic construct
  REGION 1..7: note = Description of Artificial Sequence: Synthetic peptide
HNQGKSA

SEQ ID NO: 11375 - protein, 7 aa, synthetic construct
  REGION 1..7: note = Description of Artificial Sequence: Synthetic peptide
AGIKDVR

SEQ ID NO: 11376 - protein, 7 aa, synthetic construct
  REGION 1..7: note = Description of Artificial Sequence: Synthetic peptide
TTHKATV

SEQ ID NO: 11377 - protein, 7 aa, synthetic construct
  REGION 1..7: note = Description of Artificial Sequence: Synthetic peptide
TPEKGTV

SEQ ID NO: 11378 - protein, 7 aa, synthetic construct
  REGION 1..7: note = Description of Artificial Sequence: Synthetic peptide
STGSTLG

SEQ ID NO: 11379 - protein, 7 aa, synthetic construct
  REGION 1..7: note = Description of Artificial Sequence: Synthetic peptide
DPVSERK

SEQ ID NO: 11380 - protein, 7 aa, synthetic construct
  REGION 1..7: note = Description of Artificial Sequence: Synthetic peptide
AGNSGLG

SEQ ID NO: 11381 - protein, 7 aa, synthetic construct
  REGION 1..7: note = Description of Artificial Sequence: Synthetic peptide
ANGSTRA

SEQ ID NO: 11382 - protein, 7 aa, synthetic construct
  REGION 1..7: note = Description of Artificial Sequence: Synthetic peptide
DSRKGSN

SEQ ID NO: 11383 - protein, 7 aa, synthetic construct
  REGION 1..7: note = Description of Artificial Sequence: Synthetic peptide
LPSDKQS

SEQ ID NO: 11384 - protein, 7 aa, synthetic construct
  REGION 1..7: note = Description of Artificial Sequence: Synthetic peptide
ERDRVTA

SEQ ID NO: 11385 - protein, 7 aa, synthetic construct
  REGION 1..7: note = Description of Artificial Sequence: Synthetic peptide
AATAPNR

SEQ ID NO: 11386 - protein, 7 aa, synthetic construct
  REGION 1..7: note = Description of Artificial Sequence: Synthetic peptide
STGNGPS

SEQ ID NO: 11387 - protein, 7 aa, synthetic construct
  REGION 1..7: note = Description of Artificial Sequence: Synthetic peptide
NGVTGNH

SEQ ID NO: 11388 - protein, 7 aa, synthetic construct
  REGION 1..7: note = Description of Artificial Sequence: Synthetic peptide
GNPSAAT

SEQ ID NO: 11389 - protein, 7 aa, synthetic construct
  REGION 1..7: note = Description of Artificial Sequence: Synthetic peptide
SGGDNAR

SEQ ID NO: 11390 - protein, 7 aa, synthetic construct
  REGION 1..7: note = Description of Artificial Sequence: Synthetic peptide
SSSSKTF

SEQ ID NO: 11391 - protein, 7 aa, synthetic construct
  REGION 1..7: note = Description of Artificial Sequence: Synthetic peptide
IGTGSPP

SEQ ID NO: 11392 - protein, 7 aa, synthetic construct
  REGION 1..7: note = Description of Artificial Sequence: Synthetic peptide
VPSGQPV

SEQ ID NO: 11393 - protein, 7 aa, synthetic construct
  REGION 1..7: note = Description of Artificial Sequence: Synthetic peptide
SDARSST

SEQ ID NO: 11394 - protein, 7 aa, synthetic construct
  REGION 1..7: note = Description of Artificial Sequence: Synthetic peptide
KQQPSPT

SEQ ID NO: 11395 - protein, 7 aa, synthetic construct
  REGION 1..7: note = Description of Artificial Sequence: Synthetic peptide
SSVKSNA

SEQ ID NO: 11396 - protein, 7 aa, synthetic construct
  REGION 1..7: note = Description of Artificial Sequence: Synthetic peptide
TLSRSSS

SEQ ID NO: 11397 - protein, 7 aa, synthetic construct
  REGION 1..7: note = Description of Artificial Sequence: Synthetic peptide
SRTNTSL

SEQ ID NO: 11398 - protein, 7 aa, synthetic construct
  REGION 1..7: note = Description of Artificial Sequence: Synthetic peptide
QQGESSH

SEQ ID NO: 11399 - protein, 7 aa, synthetic construct
  REGION 1..7: note = Description of Artificial Sequence: Synthetic peptide
RQDSSSG

SEQ ID NO: 11400 - protein, 7 aa, synthetic construct
  REGION 1..7: note = Description of Artificial Sequence: Synthetic peptide
LATSDTK

SEQ ID NO: 11401 - protein, 7 aa, synthetic construct
  REGION 1..7: note = Description of Artificial Sequence: Synthetic peptide
EVASGGK

SEQ ID NO: 11402 - protein, 7 aa, synthetic construct
  REGION 1..7: note = Description of Artificial Sequence: Synthetic peptide
GSNDLRT

SEQ ID NO: 11403 - protein, 7 aa, synthetic construct
  REGION 1..7: note = Description of Artificial Sequence: Synthetic peptide
VTGSTLG

SEQ ID NO: 11404 - protein, 7 aa, synthetic construct
  REGION 1..7: note = Description of Artificial Sequence: Synthetic peptide
VTGGSGV

SEQ ID NO: 11405 - protein, 7 aa, synthetic construct
  REGION 1..7: note = Description of Artificial Sequence: Synthetic peptide
TIGSHPT

SEQ ID NO: 11406 - protein, 7 aa, synthetic construct
  REGION 1..7: note = Description of Artificial Sequence: Synthetic peptide
NNTPQSG

SEQ ID NO: 11407 - protein, 7 aa, synthetic construct
  REGION 1..7: note = Description of Artificial Sequence: Synthetic peptide
SSSKSDG

SEQ ID NO: 11408 - protein, 7 aa, synthetic construct
  REGION 1..7: note = Description of Artificial Sequence: Synthetic peptide
MREGQMM

SEQ ID NO: 11409 - protein, 7 aa, synthetic construct
  REGION 1..7: note = Description of Artificial Sequence: Synthetic peptide
QKGESST

SEQ ID NO: 11410 - protein, 7 aa, synthetic construct
  REGION 1..7: note = Description of Artificial Sequence: Synthetic peptide
HGGPTSS

SEQ ID NO: 11411 - protein, 7 aa, synthetic construct
  REGION 1..7: note = Description of Artificial Sequence: Synthetic peptide
DVRTTSS

SEQ ID NO: 11412 - protein, 7 aa, synthetic construct
  REGION 1..7: note = Description of Artificial Sequence: Synthetic peptide
GIESHKM

SEQ ID NO: 11413 - protein, 7 aa, synthetic construct
  REGION 1..7: note = Description of Artificial Sequence: Synthetic peptide
YGNPTPG

SEQ ID NO: 11414 - protein, 7 aa, synthetic construct
  REGION 1..7: note = Description of Artificial Sequence: Synthetic peptide
SPNGHLK

SEQ ID NO: 11415 - protein, 7 aa, synthetic construct
  REGION 1..7: note = Description of Artificial Sequence: Synthetic peptide
LRSDSQS

SEQ ID NO: 11416 - protein, 7 aa, synthetic construct
  REGION 1..7: note = Description of Artificial Sequence: Synthetic peptide
QQGNNIT

SEQ ID NO: 11417 - protein, 7 aa, synthetic construct
  REGION 1..7: note = Description of Artificial Sequence: Synthetic peptide
DRTNAKG

SEQ ID NO: 11418 - protein, 7 aa, synthetic construct
  REGION 1..7: note = Description of Artificial Sequence: Synthetic peptide
NGSGQNH

SEQ ID NO: 11419 - protein, 7 aa, synthetic construct
  REGION 1..7: note = Description of Artificial Sequence: Synthetic peptide
MSSHSST

SEQ ID NO: 11420 - protein, 7 aa, synthetic construct
  REGION 1..7: note = Description of Artificial Sequence: Synthetic peptide
QAVSSNS

SEQ ID NO: 11421 - protein, 7 aa, synthetic construct
  REGION 1..7: note = Description of Artificial Sequence: Synthetic peptide
GTSGNLN

SEQ ID NO: 11422 - protein, 7 aa, synthetic construct
  REGION 1..7: note = Description of Artificial Sequence: Synthetic peptide
STKERAD

SEQ ID NO: 11423 - protein, 7 aa, synthetic construct
  REGION 1..7: note = Description of Artificial Sequence: Synthetic peptide
SPSVNPA

SEQ ID NO: 11424 - protein, 7 aa, synthetic construct
  REGION 1..7: note = Description of Artificial Sequence: Synthetic peptide
SAGREHA

SEQ ID NO: 11425 - protein, 7 aa, synthetic construct
  REGION 1..7: note = Description of Artificial Sequence: Synthetic peptide
QSGAASK

SEQ ID NO: 11426 - protein, 7 aa, synthetic construct
  REGION 1..7: note = Description of Artificial Sequence: Synthetic peptide
TRADSSS

SEQ ID NO: 11427 - protein, 7 aa, synthetic construct
  REGION 1..7: note = Description of Artificial Sequence: Synthetic peptide
SVSTSSS

SEQ ID NO: 11428 - protein, 7 aa, synthetic construct
  REGION 1..7: note = Description of Artificial Sequence: Synthetic peptide
EGMDRGS

SEQ ID NO: 11429 - protein, 7 aa, synthetic construct
  REGION 1..7: note = Description of Artificial Sequence: Synthetic peptide
AAGPSAG

SEQ ID NO: 11430 - protein, 7 aa, synthetic construct
  REGION 1..7: note = Description of Artificial Sequence: Synthetic peptide
SEKSRPN

SEQ ID NO: 11431 - protein, 7 aa, synthetic construct
  REGION 1..7: note = Description of Artificial Sequence: Synthetic peptide
GTMDTKV

SEQ ID NO: 11432 - protein, 7 aa, synthetic construct
  REGION 1..7: note = Description of Artificial Sequence: Synthetic peptide
GTVIGDK

SEQ ID NO: 11433 - protein, 7 aa, synthetic construct
  REGION 1..7: note = Description of Artificial Sequence: Synthetic peptide
NKVERQE

SEQ ID NO: 11434 - protein, 7 aa, synthetic construct
  REGION 1..7: note = Description of Artificial Sequence: Synthetic peptide
TPAISGS

SEQ ID NO: 11435 - protein, 7 aa, synthetic construct
  REGION 1..7: note = Description of Artificial Sequence: Synthetic peptide
MGTQSRE

SEQ ID NO: 11436 - protein, 7 aa, synthetic construct
  REGION 1..7: note = Description of Artificial Sequence: Synthetic peptide
QNGSGVS

SEQ ID NO: 11437 - protein, 7 aa, synthetic construct
  REGION 1..7: note = Description of Artificial Sequence: Synthetic peptide
LGDKGAR

SEQ ID NO: 11438 - protein, 7 aa, synthetic construct
  REGION 1..7: note = Description of Artificial Sequence: Synthetic peptide
EAVQRGT

SEQ ID NO: 11439 - protein, 7 aa, synthetic construct
  REGION 1..7: note = Description of Artificial Sequence: Synthetic peptide
ANASGSK

SEQ ID NO: 11440 - protein, 7 aa, synthetic construct
  REGION 1..7: note = Description of Artificial Sequence: Synthetic peptide
GSTVKSG

SEQ ID NO: 11441 - protein, 7 aa, synthetic construct
  REGION 1..7: note = Description of Artificial Sequence: Synthetic peptide
GVNDVNK

SEQ ID NO: 11442 - protein, 7 aa, synthetic construct
  REGION 1..7: note = Description of Artificial Sequence: Synthetic peptide
VTNKGTT

SEQ ID NO: 11443 - protein, 7 aa, synthetic construct
  REGION 1..7: note = Description of Artificial Sequence: Synthetic peptide
NSVNGIT

SEQ ID NO: 11444 - protein, 7 aa, synthetic construct
  REGION 1..7: note = Description of Artificial Sequence: Synthetic peptide
NHGDVQK

SEQ ID NO: 11445 - protein, 7 aa, synthetic construct
  REGION 1..7: note = Description of Artificial Sequence: Synthetic peptide
SQSSSVS

SEQ ID NO: 11446 - protein, 7 aa, synthetic construct
  REGION 1..7: note = Description of Artificial Sequence: Synthetic peptide
AGSGQAR

SEQ ID NO: 11447 - protein, 7 aa, synthetic construct
  REGION 1..7: note = Description of Artificial Sequence: Synthetic peptide
TQSQSVT

SEQ ID NO: 11448 - protein, 7 aa, synthetic construct
  REGION 1..7: note = Description of Artificial Sequence: Synthetic peptide
TADAVPK

SEQ ID NO: 11449 - protein, 7 aa, synthetic construct
  REGION 1..7: note = Description of Artificial Sequence: Synthetic peptide
QATNTPL

SEQ ID NO: 11450 - protein, 7 aa, synthetic construct
  REGION 1..7: note = Description of Artificial Sequence: Synthetic peptide
GTTSRNV

SEQ ID NO: 11451 - protein, 7 aa, synthetic construct
  REGION 1..7: note = Description of Artificial Sequence: Synthetic peptide
ENSTRSG

SEQ ID NO: 11452 - protein, 7 aa, synthetic construct
  REGION 1..7: note = Description of Artificial Sequence: Synthetic peptide
DSGKSRE

SEQ ID NO: 11453 - protein, 7 aa, synthetic construct
  REGION 1..7: note = Description of Artificial Sequence: Synthetic peptide
GTSGALT

SEQ ID NO: 11454 - protein, 7 aa, synthetic construct
  REGION 1..7: note = Description of Artificial Sequence: Synthetic peptide
GRTENRT

SEQ ID NO: 11455 - protein, 7 aa, synthetic construct
  REGION 1..7: note = Description of Artificial Sequence: Synthetic peptide
HPTNNGL

SEQ ID NO: 11456 - protein, 7 aa, synthetic construct
  REGION 1..7: note = Description of Artificial Sequence: Synthetic peptide
NTSPVGN

SEQ ID NO: 11457 - protein, 7 aa, synthetic construct
  REGION 1..7: note = Description of Artificial Sequence: Synthetic peptide
NHSKDTS

SEQ ID NO: 11458 - protein, 7 aa, synthetic construct
  REGION 1..7: note = Description of Artificial Sequence: Synthetic peptide
TGTGGMT

SEQ ID NO: 11459 - protein, 7 aa, synthetic construct
  REGION 1..7: note = Description of Artificial Sequence: Synthetic peptide
TSNQRNS

SEQ ID NO: 11460 - protein, 7 aa, synthetic construct
  REGION 1..7: note = Description of Artificial Sequence: Synthetic peptide
TTGNSTG

SEQ ID NO: 11461 - protein, 7 aa, synthetic construct
  REGION 1..7: note = Description of Artificial Sequence: Synthetic peptide
RVAASGG

SEQ ID NO: 11462 - protein, 7 aa, synthetic construct
  REGION 1..7: note = Description of Artificial Sequence: Synthetic peptide
ITGDKPI

SEQ ID NO: 11463 - protein, 7 aa, synthetic construct
  REGION 1..7: note = Description of Artificial Sequence: Synthetic peptide
QKQGPTA

SEQ ID NO: 11464 - protein, 7 aa, synthetic construct
  REGION 1..7: note = Description of Artificial Sequence: Synthetic peptide
QAKGAQQ

SEQ ID NO: 11465 - protein, 7 aa, synthetic construct
  REGION 1..7: note = Description of Artificial Sequence: Synthetic peptide
HTQTTSS

SEQ ID NO: 11466 - protein, 7 aa, synthetic construct
  REGION 1..7: note = Description of Artificial Sequence: Synthetic peptide
HTAAGVT

SEQ ID NO: 11467 - protein, 7 aa, synthetic construct
  REGION 1..7: note = Description of Artificial Sequence: Synthetic peptide
LKTEHTT

SEQ ID NO: 11468 - protein, 7 aa, synthetic construct
  REGION 1..7: note = Description of Artificial Sequence: Synthetic peptide
LASSSVQ

SEQ ID NO: 11469 - protein, 7 aa, synthetic construct
  REGION 1..7: note = Description of Artificial Sequence: Synthetic peptide
LGNKSNS

SEQ ID NO: 11470 - protein, 7 aa, synthetic construct
  REGION 1..7: note = Description of Artificial Sequence: Synthetic peptide
GSTGSHK

SEQ ID NO: 11471 - protein, 7 aa, synthetic construct
  REGION 1..7: note = Description of Artificial Sequence: Synthetic peptide
GNTGTTF

SEQ ID NO: 11472 - protein, 7 aa, synthetic construct
  REGION 1..7: note = Description of Artificial Sequence: Synthetic peptide
VHTSSTT

SEQ ID NO: 11473 - protein, 7 aa, synthetic construct
  REGION 1..7: note = Description of Artificial Sequence: Synthetic peptide
LNAQQTA

SEQ ID NO: 11474 - protein, 7 aa, synthetic construct
  REGION 1..7: note = Description of Artificial Sequence: Synthetic peptide
TSGDSRN

SEQ ID NO: 11475 - protein, 7 aa, synthetic construct
  REGION 1..7: note = Description of Artificial Sequence: Synthetic peptide
VGNSTHQ

SEQ ID NO: 11476 - protein, 7 aa, synthetic construct
  REGION 1..7: note = Description of Artificial Sequence: Synthetic peptide
QVSTTPA

SEQ ID NO: 11477 - protein, 7 aa, synthetic construct
  REGION 1..7: note = Description of Artificial Sequence: Synthetic peptide
HTAGTNG

SEQ ID NO: 11478 - protein, 7 aa, synthetic construct
  REGION 1..7: note = Description of Artificial Sequence: Synthetic peptide
LGNSSSR

SEQ ID NO: 11479 - protein, 7 aa, synthetic construct
  REGION 1..7: note = Description of Artificial Sequence: Synthetic peptide
GDRSSQH

SEQ ID NO: 11480 - protein, 7 aa, synthetic construct
  REGION 1..7: note = Description of Artificial Sequence: Synthetic peptide
GLASARE

SEQ ID NO: 11481 - protein, 7 aa, synthetic construct
  REGION 1..7: note = Description of Artificial Sequence: Synthetic peptide
SGNAPRT

SEQ ID NO: 11482 - protein, 7 aa, synthetic construct
  REGION 1..7: note = Description of Artificial Sequence: Synthetic peptide
NGIKSSM

SEQ ID NO: 11483 - protein, 7 aa, synthetic construct
  REGION 1..7: note = Description of Artificial Sequence: Synthetic peptide
TIKPNSG

SEQ ID NO: 11484 - protein, 7 aa, synthetic construct
  REGION 1..7: note = Description of Artificial Sequence: Synthetic peptide
SAERATT

SEQ ID NO: 11485 - protein, 7 aa, synthetic construct
  REGION 1..7: note = Description of Artificial Sequence: Synthetic peptide
NGTGSGR

SEQ ID NO: 11486 - protein, 7 aa, synthetic construct
  REGION 1..7: note = Description of Artificial Sequence: Synthetic peptide
NGTNTGG

SEQ ID NO: 11487 - protein, 7 aa, synthetic construct
  REGION 1..7: note = Description of Artificial Sequence: Synthetic peptide
MNTKGPI

SEQ ID NO: 11488 - protein, 7 aa, synthetic construct
  REGION 1..7: note = Description of Artificial Sequence: Synthetic peptide
EHTGSKL

SEQ ID NO: 11489 - protein, 7 aa, synthetic construct
  REGION 1..7: note = Description of Artificial Sequence: Synthetic peptide
GQNRETV

SEQ ID NO: 11490 - protein, 7 aa, synthetic construct
  REGION 1..7: note = Description of Artificial Sequence: Synthetic peptide
NSNRSPA

SEQ ID NO: 11491 - protein, 7 aa, synthetic construct
  REGION 1..7: note = Description of Artificial Sequence: Synthetic peptide
TKAAATI

SEQ ID NO: 11492 - protein, 7 aa, synthetic construct
  REGION 1..7: note = Description of Artificial Sequence: Synthetic peptide
GVSNGAQ

SEQ ID NO: 11493 - protein, 7 aa, synthetic construct
  REGION 1..7: note = Description of Artificial Sequence: Synthetic peptide
NPAATPA

SEQ ID NO: 11494 - protein, 7 aa, synthetic construct
  REGION 1..7: note = Description of Artificial Sequence: Synthetic peptide
NPGDNRL

SEQ ID NO: 11495 - protein, 7 aa, synthetic construct
  REGION 1..7: note = Description of Artificial Sequence: Synthetic peptide
TGSHNPS

SEQ ID NO: 11496 - protein, 7 aa, synthetic construct
  REGION 1..7: note = Description of Artificial Sequence: Synthetic peptide
SSLNTTS

SEQ ID NO: 11497 - protein, 7 aa, synthetic construct
  REGION 1..7: note = Description of Artificial Sequence: Synthetic peptide
QPGNTRL

SEQ ID NO: 11498 - protein, 7 aa, synthetic construct
  REGION 1..7: note = Description of Artificial Sequence: Synthetic peptide
QTSRESG

SEQ ID NO: 11499 - protein, 7 aa, synthetic construct
  REGION 1..7: note = Description of Artificial Sequence: Synthetic peptide
LPREHSV

SEQ ID NO: 11500 - protein, 7 aa, synthetic construct
  REGION 1..7: note = Description of Artificial Sequence: Synthetic peptide
DRLSQTN

SEQ ID NO: 11501 - protein, 7 aa, synthetic construct
  REGION 1..7: note = Description of Artificial Sequence: Synthetic peptide
DTGTKNS

SEQ ID NO: 11502 - protein, 7 aa, synthetic construct
  REGION 1..7: note = Description of Artificial Sequence: Synthetic peptide
AHEQRNA

SEQ ID NO: 11503 - protein, 7 aa, synthetic construct
  REGION 1..7: note = Description of Artificial Sequence: Synthetic peptide
GSSPGPN

SEQ ID NO: 11504 - protein, 7 aa, synthetic construct
  REGION 1..7: note = Description of Artificial Sequence: Synthetic peptide
GPSSGTP

SEQ ID NO: 11505 - protein, 7 aa, synthetic construct
  REGION 1..7: note = Description of Artificial Sequence: Synthetic peptide
TSGNANN

SEQ ID NO: 11506 - protein, 7 aa, synthetic construct
  REGION 1..7: note = Description of Artificial Sequence: Synthetic peptide
AGISSTS

SEQ ID NO: 11507 - protein, 7 aa, synthetic construct
  REGION 1..7: note = Description of Artificial Sequence: Synthetic peptide
SGGNLNA

SEQ ID NO: 11508 - protein, 7 aa, synthetic construct
  REGION 1..7: note = Description of Artificial Sequence: Synthetic peptide
TSASKGT

SEQ ID NO: 11509 - protein, 7 aa, synthetic construct
  REGION 1..7: note = Description of Artificial Sequence: Synthetic peptide
SVTGNSK

SEQ ID NO: 11510 - protein, 7 aa, synthetic construct
  REGION 1..7: note = Description of Artificial Sequence: Synthetic peptide
EGKSQGR

SEQ ID NO: 11511 - protein, 7 aa, synthetic construct
  REGION 1..7: note = Description of Artificial Sequence: Synthetic peptide
AANKSKE

SEQ ID NO: 11512 - protein, 7 aa, synthetic construct
  REGION 1..7: note = Description of Artificial Sequence: Synthetic peptide
VSTGPTT

SEQ ID NO: 11513 - protein, 7 aa, synthetic construct
  REGION 1..7: note = Description of Artificial Sequence: Synthetic peptide
LLQGSGA

SEQ ID NO: 11514 - protein, 7 aa, synthetic construct
  REGION 1..7: note = Description of Artificial Sequence: Synthetic peptide
NAHSAGG

SEQ ID NO: 11515 - protein, 7 aa, synthetic construct
  REGION 1..7: note = Description of Artificial Sequence: Synthetic peptide
TRASPAS

SEQ ID NO: 11516 - protein, 7 aa, synthetic construct
  REGION 1..7: note = Description of Artificial Sequence: Synthetic peptide
TLDVGGK

SEQ ID NO: 11517 - protein, 7 aa, synthetic construct
  REGION 1..7: note = Description of Artificial Sequence: Synthetic peptide
TVGSAQG

SEQ ID NO: 11518 - protein, 7 aa, synthetic construct
  REGION 1..7: note = Description of Artificial Sequence: Synthetic peptide
TPIPSKG

SEQ ID NO: 11519 - protein, 7 aa, synthetic construct
  REGION 1..7: note = Description of Artificial Sequence: Synthetic peptide
DRVSASS

SEQ ID NO: 11520 - protein, 7 aa, synthetic construct
  REGION 1..7: note = Description of Artificial Sequence: Synthetic peptide
GAQSNRA

SEQ ID NO: 11521 - protein, 7 aa, synthetic construct
  REGION 1..7: note = Description of Artificial Sequence: Synthetic peptide
RSAGTSA

SEQ ID NO: 11522 - protein, 7 aa, synthetic construct
  REGION 1..7: note = Description of Artificial Sequence: Synthetic peptide
RNGVSPA

SEQ ID NO: 11523 - protein, 7 aa, synthetic construct
  REGION 1..7: note = Description of Artificial Sequence: Synthetic peptide
DQSSSHV

SEQ ID NO: 11524 - protein, 7 aa, synthetic construct
  REGION 1..7: note = Description of Artificial Sequence: Synthetic peptide
GSGNQRT

SEQ ID NO: 11525 - protein, 7 aa, synthetic construct
  REGION 1..7: note = Description of Artificial Sequence: Synthetic peptide
MRDAKTQ

SEQ ID NO: 11526 - protein, 7 aa, synthetic construct
  REGION 1..7: note = Description of Artificial Sequence: Synthetic peptide
TTHTPNQ

SEQ ID NO: 11527 - protein, 7 aa, synthetic construct
  REGION 1..7: note = Description of Artificial Sequence: Synthetic peptide
KVDSRGE

SEQ ID NO: 11528 - protein, 7 aa, synthetic construct
  REGION 1..7: note = Description of Artificial Sequence: Synthetic peptide
NGDQKLV

SEQ ID NO: 11529 - protein, 7 aa, synthetic construct
  REGION 1..7: note = Description of Artificial Sequence: Synthetic peptide
NGSNHGT

SEQ ID NO: 11530 - protein, 7 aa, synthetic construct
  REGION 1..7: note = Description of Artificial Sequence: Synthetic peptide
TPSKTNT

SEQ ID NO: 11531 - protein, 7 aa, synthetic construct
  REGION 1..7: note = Description of Artificial Sequence: Synthetic peptide
TDAGTQS

SEQ ID NO: 11532 - protein, 7 aa, synthetic construct
  REGION 1..7: note = Description of Artificial Sequence: Synthetic peptide
SVVTSQG

SEQ ID NO: 11533 - protein, 7 aa, synthetic construct
  REGION 1..7: note = Description of Artificial Sequence: Synthetic peptide
MNQKSTY

SEQ ID NO: 11534 - protein, 7 aa, synthetic construct
  REGION 1..7: note = Description of Artificial Sequence: Synthetic peptide
HPSQGGS

SEQ ID NO: 11535 - protein, 7 aa, synthetic construct
  REGION 1..7: note = Description of Artificial Sequence: Synthetic peptide
HPSASVG

SEQ ID NO: 11536 - protein, 7 aa, synthetic construct
  REGION 1..7: note = Description of Artificial Sequence: Synthetic peptide
EAGSKSV

SEQ ID NO: 11537 - protein, 7 aa, synthetic construct
  REGION 1..7: note = Description of Artificial Sequence: Synthetic peptide
ARDRNNT

SEQ ID NO: 11538 - protein, 7 aa, synthetic construct
  REGION 1..7: note = Description of Artificial Sequence: Synthetic peptide
ASKDSTA

SEQ ID NO: 11539 - protein, 7 aa, synthetic construct
  REGION 1..7: note = Description of Artificial Sequence: Synthetic peptide
ASNSPIG

SEQ ID NO: 11540 - protein, 7 aa, synthetic construct
  REGION 1..7: note = Description of Artificial Sequence: Synthetic peptide
AMSETSR

SEQ ID NO: 11541 - protein, 7 aa, synthetic construct
  REGION 1..7: note = Description of Artificial Sequence: Synthetic peptide
GASNSKL

SEQ ID NO: 11542 - protein, 7 aa, synthetic construct
  REGION 1..7: note = Description of Artificial Sequence: Synthetic peptide
GANKTAP

SEQ ID NO: 11543 - protein, 7 aa, synthetic construct
  REGION 1..7: note = Description of Artificial Sequence: Synthetic peptide
SNSERSN

SEQ ID NO: 11544 - protein, 7 aa, synthetic construct
  REGION 1..7: note = Description of Artificial Sequence: Synthetic peptide
SSNQSSA

SEQ ID NO: 11545 - protein, 7 aa, synthetic construct
  REGION 1..7: note = Description of Artificial Sequence: Synthetic peptide
LPATSAR

SEQ ID NO: 11546 - protein, 7 aa, synthetic construct
  REGION 1..7: note = Description of Artificial Sequence: Synthetic peptide
TPDRTSI

SEQ ID NO: 11547 - protein, 7 aa, synthetic construct
  REGION 1..7: note = Description of Artificial Sequence: Synthetic peptide
DTLQATK

SEQ ID NO: 11548 - protein, 7 aa, synthetic construct
  REGION 1..7: note = Description of Artificial Sequence: Synthetic peptide
DSNSVSK

SEQ ID NO: 11549 - protein, 7 aa, synthetic construct
  REGION 1..7: note = Description of Artificial Sequence: Synthetic peptide
TPTSHAQ

SEQ ID NO: 11550 - protein, 7 aa, synthetic construct
  REGION 1..7: note = Description of Artificial Sequence: Synthetic peptide
TSDVTAT

SEQ ID NO: 11551 - protein, 7 aa, synthetic construct
  REGION 1..7: note = Description of Artificial Sequence: Synthetic peptide
ASNSHAG

SEQ ID NO: 11552 - protein, 7 aa, synthetic construct
  REGION 1..7: note = Description of Artificial Sequence: Synthetic peptide
VTEQKVG

SEQ ID NO: 11553 - protein, 7 aa, synthetic construct
  REGION 1..7: note = Description of Artificial Sequence: Synthetic peptide
VGSTGNH

SEQ ID NO: 11554 - protein, 7 aa, synthetic construct
  REGION 1..7: note = Description of Artificial Sequence: Synthetic peptide
VSQSGPT

SEQ ID NO: 11555 - protein, 7 aa, synthetic construct
  REGION 1..7: note = Description of Artificial Sequence: Synthetic peptide
SPHGGSN

SEQ ID NO: 11556 - protein, 7 aa, synthetic construct
  REGION 1..7: note = Description of Artificial Sequence: Synthetic peptide
KPMAQAE

SEQ ID NO: 11557 - protein, 7 aa, synthetic construct
  REGION 1..7: note = Description of Artificial Sequence: Synthetic peptide
TQSGHPT

SEQ ID NO: 11558 - protein, 7 aa, synthetic construct
  REGION 1..7: note = Description of Artificial Sequence: Synthetic peptide
ISGQVNS

SEQ ID NO: 11559 - protein, 7 aa, synthetic construct
  REGION 1..7: note = Description of Artificial Sequence: Synthetic peptide
ETVSKQS

SEQ ID NO: 11560 - protein, 7 aa, synthetic construct
  REGION 1..7: note = Description of Artificial Sequence: Synthetic peptide
DPTGGSG

SEQ ID NO: 11561 - protein, 7 aa, synthetic construct
  REGION 1..7: note = Description of Artificial Sequence: Synthetic peptide
GSSNGSH

SEQ ID NO: 11562 - protein, 7 aa, synthetic construct
  REGION 1..7: note = Description of Artificial Sequence: Synthetic peptide
YKNAATS

SEQ ID NO: 11563 - protein, 7 aa, synthetic construct
  REGION 1..7: note = Description of Artificial Sequence: Synthetic peptide
ANATPLK

SEQ ID NO: 11564 - protein, 7 aa, synthetic construct
  REGION 1..7: note = Description of Artificial Sequence: Synthetic peptide
NTSEVAR

SEQ ID NO: 11565 - protein, 7 aa, synthetic construct
  REGION 1..7: note = Description of Artificial Sequence: Synthetic peptide
NGTGNGI

SEQ ID NO: 11566 - protein, 7 aa, synthetic construct
  REGION 1..7: note = Description of Artificial Sequence: Synthetic peptide
RTGTETR

SEQ ID NO: 11567 - protein, 7 aa, synthetic construct
  REGION 1..7: note = Description of Artificial Sequence: Synthetic peptide
SETNKSS

SEQ ID NO: 11568 - protein, 7 aa, synthetic construct
  REGION 1..7: note = Description of Artificial Sequence: Synthetic peptide
MKDTGPV

SEQ ID NO: 11569 - protein, 7 aa, synthetic construct
  REGION 1..7: note = Description of Artificial Sequence: Synthetic peptide
DPSSGNV

SEQ ID NO: 11570 - protein, 7 aa, synthetic construct
  REGION 1..7: note = Description of Artificial Sequence: Synthetic peptide
AVTGSTN

SEQ ID NO: 11571 - protein, 7 aa, synthetic construct
  REGION 1..7: note = Description of Artificial Sequence: Synthetic peptide
ESGTQGK

SEQ ID NO: 11572 - protein, 7 aa, synthetic construct
  REGION 1..7: note = Description of Artificial Sequence: Synthetic peptide
SGGANHL

SEQ ID NO: 11573 - protein, 7 aa, synthetic construct
  REGION 1..7: note = Description of Artificial Sequence: Synthetic peptide
DRQGSAR

SEQ ID NO: 11574 - protein, 7 aa, synthetic construct
  REGION 1..7: note = Description of Artificial Sequence: Synthetic peptide
GSKGNGS

SEQ ID NO: 11575 - protein, 7 aa, synthetic construct
  REGION 1..7: note = Description of Artificial Sequence: Synthetic peptide
QVSGHNE

SEQ ID NO: 11576 - protein, 7 aa, synthetic construct
  REGION 1..7: note = Description of Artificial Sequence: Synthetic peptide
GTSKSIG

SEQ ID NO: 11577 - protein, 7 aa, synthetic construct
  REGION 1..7: note = Description of Artificial Sequence: Synthetic peptide
YATERTQ

SEQ ID NO: 11578 - protein, 7 aa, synthetic construct
  REGION 1..7: note = Description of Artificial Sequence: Synthetic peptide
ASTTRTG

SEQ ID NO: 11579 - protein, 7 aa, synthetic construct
  REGION 1..7: note = Description of Artificial Sequence: Synthetic peptide
GSQGSHA

SEQ ID NO: 11580 - protein, 7 aa, synthetic construct
  REGION 1..7: note = Description of Artificial Sequence: Synthetic peptide
SQSTSHL

SEQ ID NO: 11581 - protein, 7 aa, synthetic construct
  REGION 1..7: note = Description of Artificial Sequence: Synthetic peptide
DGARSSA

SEQ ID NO: 11582 - protein, 7 aa, synthetic construct
  REGION 1..7: note = Description of Artificial Sequence: Synthetic peptide
IRESPAK

SEQ ID NO: 11583 - protein, 7 aa, synthetic construct
  REGION 1..7: note = Description of Artificial Sequence: Synthetic peptide
SSQPALV

SEQ ID NO: 11584 - protein, 7 aa, synthetic construct
  REGION 1..7: note = Description of Artificial Sequence: Synthetic peptide
NISKATI

SEQ ID NO: 11585 - protein, 7 aa, synthetic construct
  REGION 1..7: note = Description of Artificial Sequence: Synthetic peptide
NGSGQNL

SEQ ID NO: 11586 - protein, 7 aa, synthetic construct
  REGION 1..7: note = Description of Artificial Sequence: Synthetic peptide
TRNDTSN

SEQ ID NO: 11587 - protein, 7 aa, synthetic construct
  REGION 1..7: note = Description of Artificial Sequence: Synthetic peptide
TPSDNTR

SEQ ID NO: 11588 - protein, 7 aa, synthetic construct
  REGION 1..7: note = Description of Artificial Sequence: Synthetic peptide
SDTARTA

SEQ ID NO: 11589 - protein, 7 aa, synthetic construct
  REGION 1..7: note = Description of Artificial Sequence: Synthetic peptide
SGTSATV

SEQ ID NO: 11590 - protein, 7 aa, synthetic construct
  REGION 1..7: note = Description of Artificial Sequence: Synthetic peptide
HSGGSTS

SEQ ID NO: 11591 - protein, 7 aa, synthetic construct
  REGION 1..7: note = Description of Artificial Sequence: Synthetic peptide
DRASSST

SEQ ID NO: 11592 - protein, 7 aa, synthetic construct
  REGION 1..7: note = Description of Artificial Sequence: Synthetic peptide
DTSLSPH

SEQ ID NO: 11593 - protein, 7 aa, synthetic construct
  REGION 1..7: note = Description of Artificial Sequence: Synthetic peptide
VDSDRAK

SEQ ID NO: 11594 - protein, 7 aa, synthetic construct
  REGION 1..7: note = Description of Artificial Sequence: Synthetic peptide
GPTRDTT

SEQ ID NO: 11595 - protein, 7 aa, synthetic construct
  REGION 1..7: note = Description of Artificial Sequence: Synthetic peptide
TNDAPGR

SEQ ID NO: 11596 - protein, 7 aa, synthetic construct
  REGION 1..7: note = Description of Artificial Sequence: Synthetic peptide
IRDKSSV

SEQ ID NO: 11597 - protein, 7 aa, synthetic construct
  REGION 1..7: note = Description of Artificial Sequence: Synthetic peptide
AQNGAGT

SEQ ID NO: 11598 - protein, 7 aa, synthetic construct
  REGION 1..7: note = Description of Artificial Sequence: Synthetic peptide
AGQSTHA

SEQ ID NO: 11599 - protein, 7 aa, synthetic construct
  REGION 1..7: note = Description of Artificial Sequence: Synthetic peptide
AQVKTPI

SEQ ID NO: 11600 - protein, 7 aa, synthetic construct
  REGION 1..7: note = Description of Artificial Sequence: Synthetic peptide
TQASNPH

SEQ ID NO: 11601 - protein, 7 aa, synthetic construct
  REGION 1..7: note = Description of Artificial Sequence: Synthetic peptide
NPKNGSS

SEQ ID NO: 11602 - protein, 7 aa, synthetic construct
  REGION 1..7: note = Description of Artificial Sequence: Synthetic peptide
TSTSGNA

SEQ ID NO: 11603 - protein, 7 aa, synthetic construct
  REGION 1..7: note = Description of Artificial Sequence: Synthetic peptide
SSSSPKM

SEQ ID NO: 11604 - protein, 7 aa, synthetic construct
  REGION 1..7: note = Description of Artificial Sequence: Synthetic peptide
SSANRSE

SEQ ID NO: 11605 - protein, 7 aa, synthetic construct
  REGION 1..7: note = Description of Artificial Sequence: Synthetic peptide
SVSKDKY

SEQ ID NO: 11606 - protein, 7 aa, synthetic construct
  REGION 1..7: note = Description of Artificial Sequence: Synthetic peptide
HLGKNGE

SEQ ID NO: 11607 - protein, 7 aa, synthetic construct
  REGION 1..7: note = Description of Artificial Sequence: Synthetic peptide
EAGRGPS

SEQ ID NO: 11608 - protein, 7 aa, synthetic construct
  REGION 1..7: note = Description of Artificial Sequence: Synthetic peptide
EQHNNSG

SEQ ID NO: 11609 - protein, 7 aa, synthetic construct
  REGION 1..7: note = Description of Artificial Sequence: Synthetic peptide
ASSGEQR

SEQ ID NO: 11610 - protein, 7 aa, synthetic construct
  REGION 1..7: note = Description of Artificial Sequence: Synthetic peptide
SESPKLA

SEQ ID NO: 11611 - protein, 7 aa, synthetic construct
  REGION 1..7: note = Description of Artificial Sequence: Synthetic peptide
SGSPSIV

SEQ ID NO: 11612 - protein, 7 aa, synthetic construct
  REGION 1..7: note = Description of Artificial Sequence: Synthetic peptide
TSTKPYD

SEQ ID NO: 11613 - protein, 7 aa, synthetic construct
  REGION 1..7: note = Description of Artificial Sequence: Synthetic peptide
SNDGPLK

SEQ ID NO: 11614 - protein, 7 aa, synthetic construct
  REGION 1..7: note = Description of Artificial Sequence: Synthetic peptide
STLKTGS

SEQ ID NO: 11615 - protein, 7 aa, synthetic construct
  REGION 1..7: note = Description of Artificial Sequence: Synthetic peptide
LPHDKPR

SEQ ID NO: 11616 - protein, 7 aa, synthetic construct
  REGION 1..7: note = Description of Artificial Sequence: Synthetic peptide
MSSTSST

SEQ ID NO: 11617 - protein, 7 aa, synthetic construct
  REGION 1..7: note = Description of Artificial Sequence: Synthetic peptide
KHSSPVE

SEQ ID NO: 11618 - protein, 7 aa, synthetic construct
  REGION 1..7: note = Description of Artificial Sequence: Synthetic peptide
RSDGDKQ

SEQ ID NO: 11619 - protein, 7 aa, synthetic construct
  REGION 1..7: note = Description of Artificial Sequence: Synthetic peptide
SKEGKYE

SEQ ID NO: 11620 - protein, 7 aa, synthetic construct
  REGION 1..7: note = Description of Artificial Sequence: Synthetic peptide
DRTGQRG

SEQ ID NO: 11621 - protein, 7 aa, synthetic construct
  REGION 1..7: note = Description of Artificial Sequence: Synthetic peptide
DSVPTSA

SEQ ID NO: 11622 - protein, 7 aa, synthetic construct
  REGION 1..7: note = Description of Artificial Sequence: Synthetic peptide
DLSTPTK

SEQ ID NO: 11623 - protein, 7 aa, synthetic construct
  REGION 1..7: note = Description of Artificial Sequence: Synthetic peptide
ARGANSM

SEQ ID NO: 11624 - protein, 7 aa, synthetic construct
  REGION 1..7: note = Description of Artificial Sequence: Synthetic peptide
AVDNQRI

SEQ ID NO: 11625 - protein, 7 aa, synthetic construct
  REGION 1..7: note = Description of Artificial Sequence: Synthetic peptide
VQASSNA

SEQ ID NO: 11626 - protein, 7 aa, synthetic construct
  REGION 1..7: note = Description of Artificial Sequence: Synthetic peptide
SASSERN

SEQ ID NO: 11627 - protein, 7 aa, synthetic construct
  REGION 1..7: note = Description of Artificial Sequence: Synthetic peptide
GNGSPVV

SEQ ID NO: 11628 - protein, 7 aa, synthetic construct
  REGION 1..7: note = Description of Artificial Sequence: Synthetic peptide
GATGKQA

SEQ ID NO: 11629 - protein, 7 aa, synthetic construct
  REGION 1..7: note = Description of Artificial Sequence: Synthetic peptide
TTSKGNS

SEQ ID NO: 11630 - protein, 7 aa, synthetic construct
  REGION 1..7: note = Description of Artificial Sequence: Synthetic peptide
TRDTGHS

SEQ ID NO: 11631 - protein, 7 aa, synthetic construct
  REGION 1..7: note = Description of Artificial Sequence: Synthetic peptide
GRTPPSA

SEQ ID NO: 11632 - protein, 7 aa, synthetic construct
  REGION 1..7: note = Description of Artificial Sequence: Synthetic peptide
SDDKSLK

SEQ ID NO: 11633 - protein, 7 aa, synthetic construct
  REGION 1..7: note = Description of Artificial Sequence: Synthetic peptide
RQNDKSV

SEQ ID NO: 11634 - protein, 7 aa, synthetic construct
  REGION 1..7: note = Description of Artificial Sequence: Synthetic peptide
LNNSSSG

SEQ ID NO: 11635 - protein, 7 aa, synthetic construct
  REGION 1..7: note = Description of Artificial Sequence: Synthetic peptide
ASSVPTK

SEQ ID NO: 11636 - protein, 7 aa, synthetic construct
  REGION 1..7: note = Description of Artificial Sequence: Synthetic peptide
GSSTTMK

SEQ ID NO: 11637 - protein, 7 aa, synthetic construct
  REGION 1..7: note = Description of Artificial Sequence: Synthetic peptide
QSGSGQG

SEQ ID NO: 11638 - protein, 7 aa, synthetic construct
  REGION 1..7: note = Description of Artificial Sequence: Synthetic peptide
NSSDRAT

SEQ ID NO: 11639 - protein, 7 aa, synthetic construct
  REGION 1..7: note = Description of Artificial Sequence: Synthetic peptide
DSVNART

SEQ ID NO: 11640 - protein, 7 aa, synthetic construct
  REGION 1..7: note = Description of Artificial Sequence: Synthetic peptide
TSSGSNL

SEQ ID NO: 11641 - protein, 7 aa, synthetic construct
  REGION 1..7: note = Description of Artificial Sequence: Synthetic peptide
QMTTKAN

SEQ ID NO: 11642 - protein, 7 aa, synthetic construct
  REGION 1..7: note = Description of Artificial Sequence: Synthetic peptide
GYDSERR

SEQ ID NO: 11643 - protein, 7 aa, synthetic construct
  REGION 1..7: note = Description of Artificial Sequence: Synthetic peptide
GSAQKAF

SEQ ID NO: 11644 - protein, 7 aa, synthetic construct
  REGION 1..7: note = Description of Artificial Sequence: Synthetic peptide
VGVQSVS

SEQ ID NO: 11645 - protein, 7 aa, synthetic construct
  REGION 1..7: note = Description of Artificial Sequence: Synthetic peptide
RSGTPDR

SEQ ID NO: 11646 - protein, 7 aa, synthetic construct
  REGION 1..7: note = Description of Artificial Sequence: Synthetic peptide
GQPNLNK

SEQ ID NO: 11647 - protein, 7 aa, synthetic construct
  REGION 1..7: note = Description of Artificial Sequence: Synthetic peptide
EPVSKNM

SEQ ID NO: 11648 - protein, 7 aa, synthetic construct
  REGION 1..7: note = Description of Artificial Sequence: Synthetic peptide
DTRSPST

SEQ ID NO: 11649 - protein, 7 aa, synthetic construct
  REGION 1..7: note = Description of Artificial Sequence: Synthetic peptide
AAGTGTT

SEQ ID NO: 11650 - protein, 7 aa, synthetic construct
  REGION 1..7: note = Description of Artificial Sequence: Synthetic peptide
GESKSGK

SEQ ID NO: 11651 - protein, 7 aa, synthetic construct
  REGION 1..7: note = Description of Artificial Sequence: Synthetic peptide
TGNSALT

SEQ ID NO: 11652 - protein, 7 aa, synthetic construct
  REGION 1..7: note = Description of Artificial Sequence: Synthetic peptide
ARTEASR

SEQ ID NO: 11653 - protein, 7 aa, synthetic construct
  REGION 1..7: note = Description of Artificial Sequence: Synthetic peptide
SPSKPGS

SEQ ID NO: 11654 - protein, 7 aa, synthetic construct
  REGION 1..7: note = Description of Artificial Sequence: Synthetic peptide
SVGGKGA

SEQ ID NO: 11655 - protein, 7 aa, synthetic construct
  REGION 1..7: note = Description of Artificial Sequence: Synthetic peptide
TQASTAQ

SEQ ID NO: 11656 - protein, 7 aa, synthetic construct
  REGION 1..7: note = Description of Artificial Sequence: Synthetic peptide
QGGHGSA

SEQ ID NO: 11657 - protein, 7 aa, synthetic construct
  REGION 1..7: note = Description of Artificial Sequence: Synthetic peptide
LPNPTSG

SEQ ID NO: 11658 - protein, 7 aa, synthetic construct
  REGION 1..7: note = Description of Artificial Sequence: Synthetic peptide
DSIGGKN

SEQ ID NO: 11659 - protein, 7 aa, synthetic construct
  REGION 1..7: note = Description of Artificial Sequence: Synthetic peptide
AKSSETS

SEQ ID NO: 11660 - protein, 7 aa, synthetic construct
  REGION 1..7: note = Description of Artificial Sequence: Synthetic peptide
SASGSMK

SEQ ID NO: 11661 - protein, 7 aa, synthetic construct
  REGION 1..7: note = Description of Artificial Sequence: Synthetic peptide
SGSQTMK

SEQ ID NO: 11662 - protein, 7 aa, synthetic construct
  REGION 1..7: note = Description of Artificial Sequence: Synthetic peptide
LLKSPPT

SEQ ID NO: 11663 - protein, 7 aa, synthetic construct
  REGION 1..7: note = Description of Artificial Sequence: Synthetic peptide
NSISNVK

SEQ ID NO: 11664 - protein, 7 aa, synthetic construct
  REGION 1..7: note = Description of Artificial Sequence: Synthetic peptide
AMGGSKQ

SEQ ID NO: 11665 - protein, 7 aa, synthetic construct
  REGION 1..7: note = Description of Artificial Sequence: Synthetic peptide
NSADRGA

SEQ ID NO: 11666 - protein, 7 aa, synthetic construct
  REGION 1..7: note = Description of Artificial Sequence: Synthetic peptide
SAGSAAQ

SEQ ID NO: 11667 - protein, 7 aa, synthetic construct
  REGION 1..7: note = Description of Artificial Sequence: Synthetic peptide
LVNSTGG

SEQ ID NO: 11668 - protein, 7 aa, synthetic construct
  REGION 1..7: note = Description of Artificial Sequence: Synthetic peptide
DSGKGHE

SEQ ID NO: 11669 - protein, 7 aa, synthetic construct
  REGION 1..7: note = Description of Artificial Sequence: Synthetic peptide
DPLQNRN

SEQ ID NO: 11670 - protein, 7 aa, synthetic construct
  REGION 1..7: note = Description of Artificial Sequence: Synthetic peptide
GKEALPQ

SEQ ID NO: 11671 - protein, 7 aa, synthetic construct
  REGION 1..7: note = Description of Artificial Sequence: Synthetic peptide
GNGKTKD

SEQ ID NO: 11672 - protein, 7 aa, synthetic construct
  REGION 1..7: note = Description of Artificial Sequence: Synthetic peptide
GTAASQL

SEQ ID NO: 11673 - protein, 7 aa, synthetic construct
  REGION 1..7: note = Description of Artificial Sequence: Synthetic peptide
QMDTPTK

SEQ ID NO: 11674 - protein, 7 aa, synthetic construct
  REGION 1..7: note = Description of Artificial Sequence: Synthetic peptide
DSVPTAA

SEQ ID NO: 11675 - protein, 7 aa, synthetic construct
  REGION 1..7: note = Description of Artificial Sequence: Synthetic peptide
DRVSSPM

SEQ ID NO: 11676 - protein, 7 aa, synthetic construct
  REGION 1..7: note = Description of Artificial Sequence: Synthetic peptide
ANGAPQK

SEQ ID NO: 11677 - protein, 7 aa, synthetic construct
  REGION 1..7: note = Description of Artificial Sequence: Synthetic peptide
STSDGNR

SEQ ID NO: 11678 - protein, 7 aa, synthetic construct
  REGION 1..7: note = Description of Artificial Sequence: Synthetic peptide
TTGSNTH

SEQ ID NO: 11679 - protein, 7 aa, synthetic construct
  REGION 1..7: note = Description of Artificial Sequence: Synthetic peptide
RSSKELD

SEQ ID NO: 11680 - protein, 7 aa, synthetic construct
  REGION 1..7: note = Description of Artificial Sequence: Synthetic peptide
QKTDSLK

SEQ ID NO: 11681 - protein, 7 aa, synthetic construct
  REGION 1..7: note = Description of Artificial Sequence: Synthetic peptide
DAATKPN

SEQ ID NO: 11682 - protein, 7 aa, synthetic construct
  REGION 1..7: note = Description of Artificial Sequence: Synthetic peptide
NANPERG

SEQ ID NO: 11683 - protein, 7 aa, synthetic construct
  REGION 1..7: note = Description of Artificial Sequence: Synthetic peptide
TSNNGPR

SEQ ID NO: 11684 - protein, 7 aa, synthetic construct
  REGION 1..7: note = Description of Artificial Sequence: Synthetic peptide
HRDVKPD

SEQ ID NO: 11685 - protein, 7 aa, synthetic construct
  REGION 1..7: note = Description of Artificial Sequence: Synthetic peptide
LTGSGIS

SEQ ID NO: 11686 - protein, 7 aa, synthetic construct
  REGION 1..7: note = Description of Artificial Sequence: Synthetic peptide
SHNATNT

SEQ ID NO: 11687 - protein, 7 aa, synthetic construct
  REGION 1..7: note = Description of Artificial Sequence: Synthetic peptide
QSDARAK

SEQ ID NO: 11688 - protein, 7 aa, synthetic construct
  REGION 1..7: note = Description of Artificial Sequence: Synthetic peptide
YRESEAR

SEQ ID NO: 11689 - protein, 7 aa, synthetic construct
  REGION 1..7: note = Description of Artificial Sequence: Synthetic peptide
HTTKESY

SEQ ID NO: 11690 - protein, 7 aa, synthetic construct
  REGION 1..7: note = Description of Artificial Sequence: Synthetic peptide
SATGNHS

SEQ ID NO: 11691 - protein, 7 aa, synthetic construct
  REGION 1..7: note = Description of Artificial Sequence: Synthetic peptide
DLPTKHT

SEQ ID NO: 11692 - protein, 7 aa, synthetic construct
  REGION 1..7: note = Description of Artificial Sequence: Synthetic peptide
GLGTNKL

SEQ ID NO: 11693 - protein, 7 aa, synthetic construct
  REGION 1..7: note = Description of Artificial Sequence: Synthetic peptide
TSDSKVG

SEQ ID NO: 11694 - protein, 7 aa, synthetic construct
  REGION 1..7: note = Description of Artificial Sequence: Synthetic peptide
MGQNAPQ

SEQ ID NO: 11695 - protein, 7 aa, synthetic construct
  REGION 1..7: note = Description of Artificial Sequence: Synthetic peptide
LPSHETR

SEQ ID NO: 11696 - protein, 7 aa, synthetic construct
  REGION 1..7: note = Description of Artificial Sequence: Synthetic peptide
GSESALR

SEQ ID NO: 11697 - protein, 7 aa, synthetic construct
  REGION 1..7: note = Description of Artificial Sequence: Synthetic peptide
SHSPSNM

SEQ ID NO: 11698 - protein, 7 aa, synthetic construct
  REGION 1..7: note = Description of Artificial Sequence: Synthetic peptide
FVEKPNS

SEQ ID NO: 11699 - protein, 7 aa, synthetic construct
  REGION 1..7: note = Description of Artificial Sequence: Synthetic peptide
ANSQGNL

SEQ ID NO: 11700 - protein, 7 aa, synthetic construct
  REGION 1..7: note = Description of Artificial Sequence: Synthetic peptide
STSRTPV

SEQ ID NO: 11701 - protein, 7 aa, synthetic construct
  REGION 1..7: note = Description of Artificial Sequence: Synthetic peptide
RDSGAKN

SEQ ID NO: 11702 - protein, 7 aa, synthetic construct
  REGION 1..7: note = Description of Artificial Sequence: Synthetic peptide
TQAGDHR

SEQ ID NO: 11703 - protein, 7 aa, synthetic construct
  REGION 1..7: note = Description of Artificial Sequence: Synthetic peptide
ASGVQGQ

SEQ ID NO: 11704 - protein, 7 aa, synthetic construct
  REGION 1..7: note = Description of Artificial Sequence: Synthetic peptide
GANGRGS

SEQ ID NO: 11705 - protein, 7 aa, synthetic construct
  REGION 1..7: note = Description of Artificial Sequence: Synthetic peptide
YATKEPR

SEQ ID NO: 11706 - protein, 7 aa, synthetic construct
  REGION 1..7: note = Description of Artificial Sequence: Synthetic peptide
NVTTSTQ

SEQ ID NO: 11707 - protein, 7 aa, synthetic construct
  REGION 1..7: note = Description of Artificial Sequence: Synthetic peptide
DGQPRSA

SEQ ID NO: 11708 - protein, 7 aa, synthetic construct
  REGION 1..7: note = Description of Artificial Sequence: Synthetic peptide
GDRNQPH

SEQ ID NO: 11709 - protein, 7 aa, synthetic construct
  REGION 1..7: note = Description of Artificial Sequence: Synthetic peptide
DGARTPT

SEQ ID NO: 11710 - protein, 7 aa, synthetic construct
  REGION 1..7: note = Description of Artificial Sequence: Synthetic peptide
KSHDKSS

SEQ ID NO: 11711 - protein, 7 aa, synthetic construct
  REGION 1..7: note = Description of Artificial Sequence: Synthetic peptide
HLGSDKS

SEQ ID NO: 11712 - protein, 7 aa, synthetic construct
  REGION 1..7: note = Description of Artificial Sequence: Synthetic peptide
TSSKPYT

SEQ ID NO: 11713 - protein, 7 aa, synthetic construct
  REGION 1..7: note = Description of Artificial Sequence: Synthetic peptide
SKTNTAS

SEQ ID NO: 11714 - protein, 7 aa, synthetic construct
  REGION 1..7: note = Description of Artificial Sequence: Synthetic peptide
SLSKSHE

SEQ ID NO: 11715 - protein, 7 aa, synthetic construct
  REGION 1..7: note = Description of Artificial Sequence: Synthetic peptide
ESSAKVP

SEQ ID NO: 11716 - protein, 7 aa, synthetic construct
  REGION 1..7: note = Description of Artificial Sequence: Synthetic peptide
AGDGRVN

SEQ ID NO: 11717 - protein, 7 aa, synthetic construct
  REGION 1..7: note = Description of Artificial Sequence: Synthetic peptide
GLTKPTA

SEQ ID NO: 11718 - protein, 7 aa, synthetic construct
  REGION 1..7: note = Description of Artificial Sequence: Synthetic peptide
VGKGQAP

SEQ ID NO: 11719 - protein, 7 aa, synthetic construct
  REGION 1..7: note = Description of Artificial Sequence: Synthetic peptide
STSTHQG

SEQ ID NO: 11720 - protein, 7 aa, synthetic construct
  REGION 1..7: note = Description of Artificial Sequence: Synthetic peptide
SAIGANT

SEQ ID NO: 11721 - protein, 7 aa, synthetic construct
  REGION 1..7: note = Description of Artificial Sequence: Synthetic peptide
TSTNVKE

SEQ ID NO: 11722 - protein, 7 aa, synthetic construct
  REGION 1..7: note = Description of Artificial Sequence: Synthetic peptide
THQEHNS

SEQ ID NO: 11723 - protein, 7 aa, synthetic construct
  REGION 1..7: note = Description of Artificial Sequence: Synthetic peptide
SRSPDTT

SEQ ID NO: 11724 - protein, 7 aa, synthetic construct
  REGION 1..7: note = Description of Artificial Sequence: Synthetic peptide
RNADPQQ

SEQ ID NO: 11725 - protein, 7 aa, synthetic construct
  REGION 1..7: note = Description of Artificial Sequence: Synthetic peptide
GPNNEPR

SEQ ID NO: 11726 - protein, 7 aa, synthetic construct
  REGION 1..7: note = Description of Artificial Sequence: Synthetic peptide
LPSKSTG

SEQ ID NO: 11727 - protein, 7 aa, synthetic construct
  REGION 1..7: note = Description of Artificial Sequence: Synthetic peptide
GTSGDSH

SEQ ID NO: 11728 - protein, 7 aa, synthetic construct
  REGION 1..7: note = Description of Artificial Sequence: Synthetic peptide
TANGTNS

SEQ ID NO: 11729 - protein, 7 aa, synthetic construct
  REGION 1..7: note = Description of Artificial Sequence: Synthetic peptide
TNSNMHT

SEQ ID NO: 11730 - protein, 7 aa, synthetic construct
  REGION 1..7: note = Description of Artificial Sequence: Synthetic peptide
TSPGAGR

SEQ ID NO: 11731 - protein, 7 aa, synthetic construct
  REGION 1..7: note = Description of Artificial Sequence: Synthetic peptide
TGRSSMS

SEQ ID NO: 11732 - protein, 7 aa, synthetic construct
  REGION 1..7: note = Description of Artificial Sequence: Synthetic peptide
TGMADKG

SEQ ID NO: 11733 - protein, 7 aa, synthetic construct
  REGION 1..7: note = Description of Artificial Sequence: Synthetic peptide
TSGTSSL

SEQ ID NO: 11734 - protein, 7 aa, synthetic construct
  REGION 1..7: note = Description of Artificial Sequence: Synthetic peptide
SQTSHTV

SEQ ID NO: 11735 - protein, 7 aa, synthetic construct
  REGION 1..7: note = Description of Artificial Sequence: Synthetic peptide
GLMGASK

SEQ ID NO: 11736 - protein, 7 aa, synthetic construct
  REGION 1..7: note = Description of Artificial Sequence: Synthetic peptide
VPNNSPN

SEQ ID NO: 11737 - protein, 7 aa, synthetic construct
  REGION 1..7: note = Description of Artificial Sequence: Synthetic peptide
GHSKSPI

SEQ ID NO: 11738 - protein, 7 aa, synthetic construct
  REGION 1..7: note = Description of Artificial Sequence: Synthetic peptide
TDVKTPH

SEQ ID NO: 11739 - protein, 7 aa, synthetic construct
  REGION 1..7: note = Description of Artificial Sequence: Synthetic peptide
TASRSNS

SEQ ID NO: 11740 - protein, 7 aa, synthetic construct
  REGION 1..7: note = Description of Artificial Sequence: Synthetic peptide
HNGDIKG

SEQ ID NO: 11741 - protein, 7 aa, synthetic construct
  REGION 1..7: note = Description of Artificial Sequence: Synthetic peptide
AGSSHTG

SEQ ID NO: 11742 - protein, 7 aa, synthetic construct
  REGION 1..7: note = Description of Artificial Sequence: Synthetic peptide
GSLGNER

SEQ ID NO: 11743 - protein, 7 aa, synthetic construct
  REGION 1..7: note = Description of Artificial Sequence: Synthetic peptide
NRTHTNV

SEQ ID NO: 11744 - protein, 7 aa, synthetic construct
  REGION 1..7: note = Description of Artificial Sequence: Synthetic peptide
TERAASV

SEQ ID NO: 11745 - protein, 7 aa, synthetic construct
  REGION 1..7: note = Description of Artificial Sequence: Synthetic peptide
INQTKPE

SEQ ID NO: 11746 - protein, 7 aa, synthetic construct
  REGION 1..7: note = Description of Artificial Sequence: Synthetic peptide
RTSNGTS

SEQ ID NO: 11747 - protein, 7 aa, synthetic construct
  REGION 1..7: note = Description of Artificial Sequence: Synthetic peptide
GRANGVA

SEQ ID NO: 11748 - protein, 7 aa, synthetic construct
  REGION 1..7: note = Description of Artificial Sequence: Synthetic peptide
STNPVNV

SEQ ID NO: 11749 - protein, 7 aa, synthetic construct
  REGION 1..7: note = Description of Artificial Sequence: Synthetic peptide
DGKSSPV

SEQ ID NO: 11750 - protein, 7 aa, synthetic construct
  REGION 1..7: note = Description of Artificial Sequence: Synthetic peptide
MQQTSTA

SEQ ID NO: 11751 - protein, 7 aa, synthetic construct
  REGION 1..7: note = Description of Artificial Sequence: Synthetic peptide
LGASSAA

SEQ ID NO: 11752 - protein, 7 aa, synthetic construct
  REGION 1..7: note = Description of Artificial Sequence: Synthetic peptide
AKTTSLA

SEQ ID NO: 11753 - protein, 7 aa, synthetic construct
  REGION 1..7: note = Description of Artificial Sequence: Synthetic peptide
SSSTTNT

SEQ ID NO: 11754 - protein, 7 aa, synthetic construct
  REGION 1..7: note = Description of Artificial Sequence: Synthetic peptide
NTGSGNS

SEQ ID NO: 11755 - protein, 7 aa, synthetic construct
  REGION 1..7: note = Description of Artificial Sequence: Synthetic peptide
TTATNFA

SEQ ID NO: 11756 - protein, 7 aa, synthetic construct
  REGION 1..7: note = Description of Artificial Sequence: Synthetic peptide
QSPGAHN

SEQ ID NO: 11757 - protein, 7 aa, synthetic construct
  REGION 1..7: note = Description of Artificial Sequence: Synthetic peptide
SVASDRI

SEQ ID NO: 11758 - protein, 7 aa, synthetic construct
  REGION 1..7: note = Description of Artificial Sequence: Synthetic peptide
LADRSNT

SEQ ID NO: 11759 - protein, 7 aa, synthetic construct
  REGION 1..7: note = Description of Artificial Sequence: Synthetic peptide
SQATVSR

SEQ ID NO: 11760 - protein, 7 aa, synthetic construct
  REGION 1..7: note = Description of Artificial Sequence: Synthetic peptide
NGRGTVV

SEQ ID NO: 11761 - protein, 7 aa, synthetic construct
  REGION 1..7: note = Description of Artificial Sequence: Synthetic peptide
VSSASPT

SEQ ID NO: 11762 - protein, 7 aa, synthetic construct
  REGION 1..7: note = Description of Artificial Sequence: Synthetic peptide
SGSDVSR

SEQ ID NO: 11763 - protein, 7 aa, synthetic construct
  REGION 1..7: note = Description of Artificial Sequence: Synthetic peptide
TNVAAQG

SEQ ID NO: 11764 - protein, 7 aa, synthetic construct
  REGION 1..7: note = Description of Artificial Sequence: Synthetic peptide
VTSSPTL

SEQ ID NO: 11765 - protein, 7 aa, synthetic construct
  REGION 1..7: note = Description of Artificial Sequence: Synthetic peptide
STTTPST

SEQ ID NO: 11766 - protein, 7 aa, synthetic construct
  REGION 1..7: note = Description of Artificial Sequence: Synthetic peptide
GDGTRPK

SEQ ID NO: 11767 - protein, 7 aa, synthetic construct
  REGION 1..7: note = Description of Artificial Sequence: Synthetic peptide
SSTTHSK

SEQ ID NO: 11768 - protein, 7 aa, synthetic construct
  REGION 1..7: note = Description of Artificial Sequence: Synthetic peptide
ASQPKGG

SEQ ID NO: 11769 - protein, 7 aa, synthetic construct
  REGION 1..7: note = Description of Artificial Sequence: Synthetic peptide
SASSSPV

SEQ ID NO: 11770 - protein, 7 aa, synthetic construct
  REGION 1..7: note = Description of Artificial Sequence: Synthetic peptide
HQNGPQK

SEQ ID NO: 11771 - protein, 7 aa, synthetic construct
  REGION 1..7: note = Description of Artificial Sequence: Synthetic peptide
GNGEQRG

SEQ ID NO: 11772 - protein, 7 aa, synthetic construct
  REGION 1..7: note = Description of Artificial Sequence: Synthetic peptide
GTQNSKL

SEQ ID NO: 11773 - protein, 7 aa, synthetic construct
  REGION 1..7: note = Description of Artificial Sequence: Synthetic peptide
NRLPSAS

SEQ ID NO: 11774 - protein, 7 aa, synthetic construct
  REGION 1..7: note = Description of Artificial Sequence: Synthetic peptide
LPTAPRD

SEQ ID NO: 11775 - protein, 7 aa, synthetic construct
  REGION 1..7: note = Description of Artificial Sequence: Synthetic peptide
QGDNQFK

SEQ ID NO: 11776 - protein, 7 aa, synthetic construct
  REGION 1..7: note = Description of Artificial Sequence: Synthetic peptide
STGSTTG

SEQ ID NO: 11777 - protein, 7 aa, synthetic construct
  REGION 1..7: note = Description of Artificial Sequence: Synthetic peptide
TGASSGN

SEQ ID NO: 11778 - protein, 7 aa, synthetic construct
  REGION 1..7: note = Description of Artificial Sequence: Synthetic peptide
DHGKTSV

SEQ ID NO: 11779 - protein, 7 aa, synthetic construct
  REGION 1..7: note = Description of Artificial Sequence: Synthetic peptide
ESDRAKH

SEQ ID NO: 11780 - protein, 7 aa, synthetic construct
  REGION 1..7: note = Description of Artificial Sequence: Synthetic peptide
NNGHADR

SEQ ID NO: 11781 - protein, 7 aa, synthetic construct
  REGION 1..7: note = Description of Artificial Sequence: Synthetic peptide
NSATNSL

SEQ ID NO: 11782 - protein, 7 aa, synthetic construct
  REGION 1..7: note = Description of Artificial Sequence: Synthetic peptide
KQSPPDK

SEQ ID NO: 11783 - protein, 7 aa, synthetic construct
  REGION 1..7: note = Description of Artificial Sequence: Synthetic peptide
KGTEQPH

SEQ ID NO: 11784 - protein, 7 aa, synthetic construct
  REGION 1..7: note = Description of Artificial Sequence: Synthetic peptide
NATSNPH

SEQ ID NO: 11785 - protein, 7 aa, synthetic construct
  REGION 1..7: note = Description of Artificial Sequence: Synthetic peptide
TTQKATM

SEQ ID NO: 11786 - protein, 7 aa, synthetic construct
  REGION 1..7: note = Description of Artificial Sequence: Synthetic peptide
TTLDGAK

SEQ ID NO: 11787 - protein, 7 aa, synthetic construct
  REGION 1..7: note = Description of Artificial Sequence: Synthetic peptide
TTDMKLG

SEQ ID NO: 11788 - protein, 7 aa, synthetic construct
  REGION 1..7: note = Description of Artificial Sequence: Synthetic peptide
TSRESPP

SEQ ID NO: 11789 - protein, 7 aa, synthetic construct
  REGION 1..7: note = Description of Artificial Sequence: Synthetic peptide
TLSKSSI

SEQ ID NO: 11790 - protein, 7 aa, synthetic construct
  REGION 1..7: note = Description of Artificial Sequence: Synthetic peptide
TDATSSG

SEQ ID NO: 11791 - protein, 7 aa, synthetic construct
  REGION 1..7: note = Description of Artificial Sequence: Synthetic peptide
TGTTSTM

SEQ ID NO: 11792 - protein, 7 aa, synthetic construct
  REGION 1..7: note = Description of Artificial Sequence: Synthetic peptide
SKVSSQE

SEQ ID NO: 11793 - protein, 7 aa, synthetic construct
  REGION 1..7: note = Description of Artificial Sequence: Synthetic peptide
SSMPAAG

SEQ ID NO: 11794 - protein, 7 aa, synthetic construct
  REGION 1..7: note = Description of Artificial Sequence: Synthetic peptide
SSGSAQP

SEQ ID NO: 11795 - protein, 7 aa, synthetic construct
  REGION 1..7: note = Description of Artificial Sequence: Synthetic peptide
SQAHVTK

SEQ ID NO: 11796 - protein, 7 aa, synthetic construct
  REGION 1..7: note = Description of Artificial Sequence: Synthetic peptide
SPATNKI

SEQ ID NO: 11797 - protein, 7 aa, synthetic construct
  REGION 1..7: note = Description of Artificial Sequence: Synthetic peptide
SESTRTT

SEQ ID NO: 11798 - protein, 7 aa, synthetic construct
  REGION 1..7: note = Description of Artificial Sequence: Synthetic peptide
SGHSKLP

SEQ ID NO: 11799 - protein, 7 aa, synthetic construct
  REGION 1..7: note = Description of Artificial Sequence: Synthetic peptide
SVSAAKG

SEQ ID NO: 11800 - protein, 7 aa, synthetic construct
  REGION 1..7: note = Description of Artificial Sequence: Synthetic peptide
RTEQGSN

SEQ ID NO: 11801 - protein, 7 aa, synthetic construct
  REGION 1..7: note = Description of Artificial Sequence: Synthetic peptide
SSSSRNT

SEQ ID NO: 11802 - protein, 7 aa, synthetic construct
  REGION 1..7: note = Description of Artificial Sequence: Synthetic peptide
MAGQRDS

SEQ ID NO: 11803 - protein, 7 aa, synthetic construct
  REGION 1..7: note = Description of Artificial Sequence: Synthetic peptide
QSTPNLK

SEQ ID NO: 11804 - protein, 7 aa, synthetic construct
  REGION 1..7: note = Description of Artificial Sequence: Synthetic peptide
QGVQAAS

SEQ ID NO: 11805 - protein, 7 aa, synthetic construct
  REGION 1..7: note = Description of Artificial Sequence: Synthetic peptide
QSSHSSA

SEQ ID NO: 11806 - protein, 7 aa, synthetic construct
  REGION 1..7: note = Description of Artificial Sequence: Synthetic peptide
QLGKPDS

SEQ ID NO: 11807 - protein, 7 aa, synthetic construct
  REGION 1..7: note = Description of Artificial Sequence: Synthetic peptide
LQPGSAG

SEQ ID NO: 11808 - protein, 7 aa, synthetic construct
  REGION 1..7: note = Description of Artificial Sequence: Synthetic peptide
LTDTKGA

SEQ ID NO: 11809 - protein, 7 aa, synthetic construct
  REGION 1..7: note = Description of Artificial Sequence: Synthetic peptide
LSVKPMS

SEQ ID NO: 11810 - protein, 7 aa, synthetic construct
  REGION 1..7: note = Description of Artificial Sequence: Synthetic peptide
EDSARSN

SEQ ID NO: 11811 - protein, 7 aa, synthetic construct
  REGION 1..7: note = Description of Artificial Sequence: Synthetic peptide
EGNGVHN

SEQ ID NO: 11812 - protein, 7 aa, synthetic construct
  REGION 1..7: note = Description of Artificial Sequence: Synthetic peptide
DSKDRSI

SEQ ID NO: 11813 - protein, 7 aa, synthetic construct
  REGION 1..7: note = Description of Artificial Sequence: Synthetic peptide
DPPKTSP

SEQ ID NO: 11814 - protein, 7 aa, synthetic construct
  REGION 1..7: note = Description of Artificial Sequence: Synthetic peptide
EKGASSA

SEQ ID NO: 11815 - protein, 7 aa, synthetic construct
  REGION 1..7: note = Description of Artificial Sequence: Synthetic peptide
EPGTSPN

SEQ ID NO: 11816 - protein, 7 aa, synthetic construct
  REGION 1..7: note = Description of Artificial Sequence: Synthetic peptide
DNHSSKS

SEQ ID NO: 11817 - protein, 7 aa, synthetic construct
  REGION 1..7: note = Description of Artificial Sequence: Synthetic peptide
DSSKSMV

SEQ ID NO: 11818 - protein, 7 aa, synthetic construct
  REGION 1..7: note = Description of Artificial Sequence: Synthetic peptide
ASTGDKR

SEQ ID NO: 11819 - protein, 7 aa, synthetic construct
  REGION 1..7: note = Description of Artificial Sequence: Synthetic peptide
AMNTASS

SEQ ID NO: 11820 - protein, 7 aa, synthetic construct
  REGION 1..7: note = Description of Artificial Sequence: Synthetic peptide
ADQQPTR

SEQ ID NO: 11821 - protein, 7 aa, synthetic construct
  REGION 1..7: note = Description of Artificial Sequence: Synthetic peptide
AGDVARQ

SEQ ID NO: 11822 - protein, 7 aa, synthetic construct
  REGION 1..7: note = Description of Artificial Sequence: Synthetic peptide
AGGSTSK

SEQ ID NO: 11823 - protein, 7 aa, synthetic construct
  REGION 1..7: note = Description of Artificial Sequence: Synthetic peptide
AMASGSS

SEQ ID NO: 11824 - protein, 7 aa, synthetic construct
  REGION 1..7: note = Description of Artificial Sequence: Synthetic peptide
GNPTDQK

SEQ ID NO: 11825 - protein, 7 aa, synthetic construct
  REGION 1..7: note = Description of Artificial Sequence: Synthetic peptide
GSTPSTL

SEQ ID NO: 11826 - protein, 7 aa, synthetic construct
  REGION 1..7: note = Description of Artificial Sequence: Synthetic peptide
GPQTSKS

SEQ ID NO: 11827 - protein, 7 aa, synthetic construct
  REGION 1..7: note = Description of Artificial Sequence: Synthetic peptide
GGTNGIQ

SEQ ID NO: 11828 - protein, 7 aa, synthetic construct
  REGION 1..7: note = Description of Artificial Sequence: Synthetic peptide
GSKGDLT

SEQ ID NO: 11829 - protein, 7 aa, synthetic construct
  REGION 1..7: note = Description of Artificial Sequence: Synthetic peptide
GSEKDRH

SEQ ID NO: 11830 - protein, 7 aa, synthetic construct
  REGION 1..7: note = Description of Artificial Sequence: Synthetic peptide
VSAKGVM

SEQ ID NO: 11831 - protein, 7 aa, synthetic construct
  REGION 1..7: note = Description of Artificial Sequence: Synthetic peptide
VESKINS

SEQ ID NO: 11832 - protein, 7 aa, synthetic construct
  REGION 1..7: note = Description of Artificial Sequence: Synthetic peptide
VGASSIA

SEQ ID NO: 11833 - protein, 7 aa, synthetic construct
  REGION 1..7: note = Description of Artificial Sequence: Synthetic peptide
STKAPSG

SEQ ID NO: 11834 - protein, 7 aa, synthetic construct
  REGION 1..7: note = Description of Artificial Sequence: Synthetic peptide
SSKSQPS

SEQ ID NO: 11835 - protein, 7 aa, synthetic construct
  REGION 1..7: note = Description of Artificial Sequence: Synthetic peptide
SGRGSSE

SEQ ID NO: 11836 - protein, 7 aa, synthetic construct
  REGION 1..7: note = Description of Artificial Sequence: Synthetic peptide
LKTTGSG

SEQ ID NO: 11837 - protein, 7 aa, synthetic construct
  REGION 1..7: note = Description of Artificial Sequence: Synthetic peptide
LPSGKDP

SEQ ID NO: 11838 - protein, 7 aa, synthetic construct
  REGION 1..7: note = Description of Artificial Sequence: Synthetic peptide
TGNPGNT

SEQ ID NO: 11839 - protein, 7 aa, synthetic construct
  REGION 1..7: note = Description of Artificial Sequence: Synthetic peptide
MGQTSLS

SEQ ID NO: 11840 - protein, 7 aa, synthetic construct
  REGION 1..7: note = Description of Artificial Sequence: Synthetic peptide
TPSAPSN

SEQ ID NO: 11841 - protein, 7 aa, synthetic construct
  REGION 1..7: note = Description of Artificial Sequence: Synthetic peptide
SSSNHPT

SEQ ID NO: 11842 - protein, 7 aa, synthetic construct
  REGION 1..7: note = Description of Artificial Sequence: Synthetic peptide
ASEQSAK

SEQ ID NO: 11843 - protein, 7 aa, synthetic construct
  REGION 1..7: note = Description of Artificial Sequence: Synthetic peptide
SGTSHVL

SEQ ID NO: 11844 - protein, 7 aa, synthetic construct
  REGION 1..7: note = Description of Artificial Sequence: Synthetic peptide
VGSPSAS

SEQ ID NO: 11845 - protein, 7 aa, synthetic construct
  REGION 1..7: note = Description of Artificial Sequence: Synthetic peptide
NINSAHS

SEQ ID NO: 11846 - protein, 7 aa, synthetic construct
  REGION 1..7: note = Description of Artificial Sequence: Synthetic peptide
LTGTSTP

SEQ ID NO: 11847 - protein, 7 aa, synthetic construct
  REGION 1..7: note = Description of Artificial Sequence: Synthetic peptide
SGGQPLN

SEQ ID NO: 11848 - protein, 7 aa, synthetic construct
  REGION 1..7: note = Description of Artificial Sequence: Synthetic peptide
ENTSTVH

SEQ ID NO: 11849 - protein, 7 aa, synthetic construct
  REGION 1..7: note = Description of Artificial Sequence: Synthetic peptide
NGGDVSR

SEQ ID NO: 11850 - protein, 7 aa, synthetic construct
  REGION 1..7: note = Description of Artificial Sequence: Synthetic peptide
DFGKTST

SEQ ID NO: 11851 - protein, 7 aa, synthetic construct
  REGION 1..7: note = Description of Artificial Sequence: Synthetic peptide
GIVHSER

SEQ ID NO: 11852 - protein, 7 aa, synthetic construct
  REGION 1..7: note = Description of Artificial Sequence: Synthetic peptide
RGSEPVN

SEQ ID NO: 11853 - protein, 7 aa, synthetic construct
  REGION 1..7: note = Description of Artificial Sequence: Synthetic peptide
STTSSSR

SEQ ID NO: 11854 - protein, 7 aa, synthetic construct
  REGION 1..7: note = Description of Artificial Sequence: Synthetic peptide
GGVDTSR

SEQ ID NO: 11855 - protein, 7 aa, synthetic construct
  REGION 1..7: note = Description of Artificial Sequence: Synthetic peptide
GSGGVRG

SEQ ID NO: 11856 - protein, 7 aa, synthetic construct
  REGION 1..7: note = Description of Artificial Sequence: Synthetic peptide
NQSTRPD

SEQ ID NO: 11857 - protein, 7 aa, synthetic construct
  REGION 1..7: note = Description of Artificial Sequence: Synthetic peptide
TRDSTKS

SEQ ID NO: 11858 - protein, 7 aa, synthetic construct
  REGION 1..7: note = Description of Artificial Sequence: Synthetic peptide
SNTTHSA

SEQ ID NO: 11859 - protein, 7 aa, synthetic construct
  REGION 1..7: note = Description of Artificial Sequence: Synthetic peptide
SRNATSA

SEQ ID NO: 11860 - protein, 7 aa, synthetic construct
  REGION 1..7: note = Description of Artificial Sequence: Synthetic peptide
SGSGTVR

SEQ ID NO: 11861 - protein, 7 aa, synthetic construct
  REGION 1..7: note = Description of Artificial Sequence: Synthetic peptide
SRTVSST

SEQ ID NO: 11862 - protein, 7 aa, synthetic construct
  REGION 1..7: note = Description of Artificial Sequence: Synthetic peptide
APGEAQS

SEQ ID NO: 11863 - protein, 7 aa, synthetic construct
  REGION 1..7: note = Description of Artificial Sequence: Synthetic peptide
EPSNNSK

SEQ ID NO: 11864 - protein, 7 aa, synthetic construct
  REGION 1..7: note = Description of Artificial Sequence: Synthetic peptide
DQQSTNR

SEQ ID NO: 11865 - protein, 7 aa, synthetic construct
  REGION 1..7: note = Description of Artificial Sequence: Synthetic peptide
GLTKQET

SEQ ID NO: 11866 - protein, 7 aa, synthetic construct
  REGION 1..7: note = Description of Artificial Sequence: Synthetic peptide
SDKSGIV

SEQ ID NO: 11867 - protein, 7 aa, synthetic construct
  REGION 1..7: note = Description of Artificial Sequence: Synthetic peptide
EGQKTES

SEQ ID NO: 11868 - protein, 7 aa, synthetic construct
  REGION 1..7: note = Description of Artificial Sequence: Synthetic peptide
ARDSHTT

SEQ ID NO: 11869 - protein, 7 aa, synthetic construct
  REGION 1..7: note = Description of Artificial Sequence: Synthetic peptide
SNPQSMG

SEQ ID NO: 11870 - protein, 7 aa, synthetic construct
  REGION 1..7: note = Description of Artificial Sequence: Synthetic peptide
QNKESYK

SEQ ID NO: 11871 - protein, 7 aa, synthetic construct
  REGION 1..7: note = Description of Artificial Sequence: Synthetic peptide
GNRGGTS

SEQ ID NO: 11872 - protein, 7 aa, synthetic construct
  REGION 1..7: note = Description of Artificial Sequence: Synthetic peptide
NPMVNGK

SEQ ID NO: 11873 - protein, 7 aa, synthetic construct
  REGION 1..7: note = Description of Artificial Sequence: Synthetic peptide
NVQAATK

SEQ ID NO: 11874 - protein, 7 aa, synthetic construct
  REGION 1..7: note = Description of Artificial Sequence: Synthetic peptide
SSSSKGV

SEQ ID NO: 11875 - protein, 7 aa, synthetic construct
  REGION 1..7: note = Description of Artificial Sequence: Synthetic peptide
IRTKESH

SEQ ID NO: 11876 - protein, 7 aa, synthetic construct
  REGION 1..7: note = Description of Artificial Sequence: Synthetic peptide
QSSPPKT

SEQ ID NO: 11877 - protein, 7 aa, synthetic construct
  REGION 1..7: note = Description of Artificial Sequence: Synthetic peptide
DTRGKGI

SEQ ID NO: 11878 - protein, 7 aa, synthetic construct
  REGION 1..7: note = Description of Artificial Sequence: Synthetic peptide
EVNSARA

SEQ ID NO: 11879 - protein, 7 aa, synthetic construct
  REGION 1..7: note = Description of Artificial Sequence: Synthetic peptide
EVGKHSN

SEQ ID NO: 11880 - protein, 7 aa, synthetic construct
  REGION 1..7: note = Description of Artificial Sequence: Synthetic peptide
SIGGTNG

SEQ ID NO: 11881 - protein, 7 aa, synthetic construct
  REGION 1..7: note = Description of Artificial Sequence: Synthetic peptide
TPTTKRE

SEQ ID NO: 11882 - protein, 7 aa, synthetic construct
  REGION 1..7: note = Description of Artificial Sequence: Synthetic peptide
QVASANP

SEQ ID NO: 11883 - protein, 7 aa, synthetic construct
  REGION 1..7: note = Description of Artificial Sequence: Synthetic peptide
DQAKSIR

SEQ ID NO: 11884 - protein, 7 aa, synthetic construct
  REGION 1..7: note = Description of Artificial Sequence: Synthetic peptide
GSMGTAK

SEQ ID NO: 11885 - protein, 7 aa, synthetic construct
  REGION 1..7: note = Description of Artificial Sequence: Synthetic peptide
VNGGHGK

SEQ ID NO: 11886 - protein, 7 aa, synthetic construct
  REGION 1..7: note = Description of Artificial Sequence: Synthetic peptide
VSSGGTA

SEQ ID NO: 11887 - protein, 7 aa, synthetic construct
  REGION 1..7: note = Description of Artificial Sequence: Synthetic peptide
SLGQSTA

SEQ ID NO: 11888 - protein, 7 aa, synthetic construct
  REGION 1..7: note = Description of Artificial Sequence: Synthetic peptide
QGVTNKS

SEQ ID NO: 11889 - protein, 7 aa, synthetic construct
  REGION 1..7: note = Description of Artificial Sequence: Synthetic peptide
EGVTTGS

SEQ ID NO: 11890 - protein, 7 aa, synthetic construct
  REGION 1..7: note = Description of Artificial Sequence: Synthetic peptide
SQSAQNQ

SEQ ID NO: 11891 - protein, 7 aa, synthetic construct
  REGION 1..7: note = Description of Artificial Sequence: Synthetic peptide
SSANGTR

SEQ ID NO: 11892 - protein, 7 aa, synthetic construct
  REGION 1..7: note = Description of Artificial Sequence: Synthetic peptide
EVNAPRK

SEQ ID NO: 11893 - protein, 7 aa, synthetic construct
  REGION 1..7: note = Description of Artificial Sequence: Synthetic peptide
TMTSSAA

SEQ ID NO: 11894 - protein, 7 aa, synthetic construct
  REGION 1..7: note = Description of Artificial Sequence: Synthetic peptide
RDPPSSS

SEQ ID NO: 11895 - protein, 7 aa, synthetic construct
  REGION 1..7: note = Description of Artificial Sequence: Synthetic peptide
RVNKSSE

SEQ ID NO: 11896 - protein, 7 aa, synthetic construct
  REGION 1..7: note = Description of Artificial Sequence: Synthetic peptide
QSDKEPR

SEQ ID NO: 11897 - protein, 7 aa, synthetic construct
  REGION 1..7: note = Description of Artificial Sequence: Synthetic peptide
VSVPPSN

SEQ ID NO: 11898 - protein, 7 aa, synthetic construct
  REGION 1..7: note = Description of Artificial Sequence: Synthetic peptide
NSDGKVR

SEQ ID NO: 11899 - protein, 7 aa, synthetic construct
  REGION 1..7: note = Description of Artificial Sequence: Synthetic peptide
SGNNGNA

SEQ ID NO: 11900 - protein, 7 aa, synthetic construct
  REGION 1..7: note = Description of Artificial Sequence: Synthetic peptide
QVNTNGG

SEQ ID NO: 11901 - protein, 7 aa, synthetic construct
  REGION 1..7: note = Description of Artificial Sequence: Synthetic peptide
AHKATNV

SEQ ID NO: 11902 - protein, 7 aa, synthetic construct
  REGION 1..7: note = Description of Artificial Sequence: Synthetic peptide
AASQATV

SEQ ID NO: 11903 - protein, 7 aa, synthetic construct
  REGION 1..7: note = Description of Artificial Sequence: Synthetic peptide
VGGSPNS

SEQ ID NO: 11904 - protein, 7 aa, synthetic construct
  REGION 1..7: note = Description of Artificial Sequence: Synthetic peptide
VGGSSKG

SEQ ID NO: 11905 - protein, 7 aa, synthetic construct
  REGION 1..7: note = Description of Artificial Sequence: Synthetic peptide
GTTTVAG

SEQ ID NO: 11906 - protein, 7 aa, synthetic construct
  REGION 1..7: note = Description of Artificial Sequence: Synthetic peptide
TQVTSPA

SEQ ID NO: 11907 - protein, 7 aa, synthetic construct
  REGION 1..7: note = Description of Artificial Sequence: Synthetic peptide
GTESQRL

SEQ ID NO: 11908 - protein, 7 aa, synthetic construct
  REGION 1..7: note = Description of Artificial Sequence: Synthetic peptide
TGAAANH

SEQ ID NO: 11909 - protein, 7 aa, synthetic construct
  REGION 1..7: note = Description of Artificial Sequence: Synthetic peptide
SNNNGST

SEQ ID NO: 11910 - protein, 7 aa, synthetic construct
  REGION 1..7: note = Description of Artificial Sequence: Synthetic peptide
SSDQRNG

SEQ ID NO: 11911 - protein, 7 aa, synthetic construct
  REGION 1..7: note = Description of Artificial Sequence: Synthetic peptide
SGLNKSG

SEQ ID NO: 11912 - protein, 7 aa, synthetic construct
  REGION 1..7: note = Description of Artificial Sequence: Synthetic peptide
QVNAPNS

SEQ ID NO: 11913 - protein, 7 aa, synthetic construct
  REGION 1..7: note = Description of Artificial Sequence: Synthetic peptide
SGHDRSG

SEQ ID NO: 11914 - protein, 7 aa, synthetic construct
  REGION 1..7: note = Description of Artificial Sequence: Synthetic peptide
STRSGEG

SEQ ID NO: 11915 - protein, 7 aa, synthetic construct
  REGION 1..7: note = Description of Artificial Sequence: Synthetic peptide
STSSHPI

SEQ ID NO: 11916 - protein, 7 aa, synthetic construct
  REGION 1..7: note = Description of Artificial Sequence: Synthetic peptide
ATDRQGA

SEQ ID NO: 11917 - protein, 7 aa, synthetic construct
  REGION 1..7: note = Description of Artificial Sequence: Synthetic peptide
SPVERKS

SEQ ID NO: 11918 - protein, 7 aa, synthetic construct
  REGION 1..7: note = Description of Artificial Sequence: Synthetic peptide
SPSNSRT

SEQ ID NO: 11919 - protein, 7 aa, synthetic construct
  REGION 1..7: note = Description of Artificial Sequence: Synthetic peptide
ADNQKSQ

SEQ ID NO: 11920 - protein, 7 aa, synthetic construct
  REGION 1..7: note = Description of Artificial Sequence: Synthetic peptide
NATTTGH

SEQ ID NO: 11921 - protein, 7 aa, synthetic construct
  REGION 1..7: note = Description of Artificial Sequence: Synthetic peptide
TSDKQFP

SEQ ID NO: 11922 - protein, 7 aa, synthetic construct
  REGION 1..7: note = Description of Artificial Sequence: Synthetic peptide
TPEGRTS

SEQ ID NO: 11923 - protein, 7 aa, synthetic construct
  REGION 1..7: note = Description of Artificial Sequence: Synthetic peptide
SNNKAML

SEQ ID NO: 11924 - protein, 7 aa, synthetic construct
  REGION 1..7: note = Description of Artificial Sequence: Synthetic peptide
SDSRKDG

SEQ ID NO: 11925 - protein, 7 aa, synthetic construct
  REGION 1..7: note = Description of Artificial Sequence: Synthetic peptide
LTSQGKN

SEQ ID NO: 11926 - protein, 7 aa, synthetic construct
  REGION 1..7: note = Description of Artificial Sequence: Synthetic peptide
GSKTSLT

SEQ ID NO: 11927 - protein, 7 aa, synthetic construct
  REGION 1..7: note = Description of Artificial Sequence: Synthetic peptide
YGTGSVV

SEQ ID NO: 11928 - protein, 7 aa, synthetic construct
  REGION 1..7: note = Description of Artificial Sequence: Synthetic peptide
STGSGAN

SEQ ID NO: 11929 - protein, 7 aa, synthetic construct
  REGION 1..7: note = Description of Artificial Sequence: Synthetic peptide
IPNAKEQ

SEQ ID NO: 11930 - protein, 7 aa, synthetic construct
  REGION 1..7: note = Description of Artificial Sequence: Synthetic peptide
SADKSLS

SEQ ID NO: 11931 - protein, 7 aa, synthetic construct
  REGION 1..7: note = Description of Artificial Sequence: Synthetic peptide
DPGIPKS

SEQ ID NO: 11932 - protein, 7 aa, synthetic construct
  REGION 1..7: note = Description of Artificial Sequence: Synthetic peptide
GLSVPPN

SEQ ID NO: 11933 - protein, 7 aa, synthetic construct
  REGION 1..7: note = Description of Artificial Sequence: Synthetic peptide
SVDNKGL

SEQ ID NO: 11934 - protein, 7 aa, synthetic construct
  REGION 1..7: note = Description of Artificial Sequence: Synthetic peptide
HTDASRS

SEQ ID NO: 11935 - protein, 7 aa, synthetic construct
  REGION 1..7: note = Description of Artificial Sequence: Synthetic peptide
SSNSSTV

SEQ ID NO: 11936 - protein, 7 aa, synthetic construct
  REGION 1..7: note = Description of Artificial Sequence: Synthetic peptide
AQRAEMK

SEQ ID NO: 11937 - protein, 7 aa, synthetic construct
  REGION 1..7: note = Description of Artificial Sequence: Synthetic peptide
TSANAST

SEQ ID NO: 11938 - protein, 7 aa, synthetic construct
  REGION 1..7: note = Description of Artificial Sequence: Synthetic peptide
SNRTPTT

SEQ ID NO: 11939 - protein, 7 aa, synthetic construct
  REGION 1..7: note = Description of Artificial Sequence: Synthetic peptide
SGDSHSR

SEQ ID NO: 11940 - protein, 7 aa, synthetic construct
  REGION 1..7: note = Description of Artificial Sequence: Synthetic peptide
DQTSTAR

SEQ ID NO: 11941 - protein, 7 aa, synthetic construct
  REGION 1..7: note = Description of Artificial Sequence: Synthetic peptide
DSHSPGS

SEQ ID NO: 11942 - protein, 7 aa, synthetic construct
  REGION 1..7: note = Description of Artificial Sequence: Synthetic peptide
ASSSSTL

SEQ ID NO: 11943 - protein, 7 aa, synthetic construct
  REGION 1..7: note = Description of Artificial Sequence: Synthetic peptide
AEHSKIQ

SEQ ID NO: 11944 - protein, 7 aa, synthetic construct
  REGION 1..7: note = Description of Artificial Sequence: Synthetic peptide
SAATSNI

SEQ ID NO: 11945 - protein, 7 aa, synthetic construct
  REGION 1..7: note = Description of Artificial Sequence: Synthetic peptide
SSDTRPS

SEQ ID NO: 11946 - protein, 7 aa, synthetic construct
  REGION 1..7: note = Description of Artificial Sequence: Synthetic peptide
LPSTSGS

SEQ ID NO: 11947 - protein, 7 aa, synthetic construct
  REGION 1..7: note = Description of Artificial Sequence: Synthetic peptide
NTDTSRN

SEQ ID NO: 11948 - protein, 7 aa, synthetic construct
  REGION 1..7: note = Description of Artificial Sequence: Synthetic peptide
TPTNDRS

SEQ ID NO: 11949 - protein, 7 aa, synthetic construct
  REGION 1..7: note = Description of Artificial Sequence: Synthetic peptide
TGGSALG

SEQ ID NO: 11950 - protein, 7 aa, synthetic construct
  REGION 1..7: note = Description of Artificial Sequence: Synthetic peptide
SSNTSQG

SEQ ID NO: 11951 - protein, 7 aa, synthetic construct
  REGION 1..7: note = Description of Artificial Sequence: Synthetic peptide
SGVGSMN

SEQ ID NO: 11952 - protein, 7 aa, synthetic construct
  REGION 1..7: note = Description of Artificial Sequence: Synthetic peptide
SSSQSSH

SEQ ID NO: 11953 - protein, 7 aa, synthetic construct
  REGION 1..7: note = Description of Artificial Sequence: Synthetic peptide
HELSGTK

SEQ ID NO: 11954 - protein, 7 aa, synthetic construct
  REGION 1..7: note = Description of Artificial Sequence: Synthetic peptide
QMATGNV

SEQ ID NO: 11955 - protein, 7 aa, synthetic construct
  REGION 1..7: note = Description of Artificial Sequence: Synthetic peptide
DESVKPQ

SEQ ID NO: 11956 - protein, 7 aa, synthetic construct
  REGION 1..7: note = Description of Artificial Sequence: Synthetic peptide
DSVNTRT

SEQ ID NO: 11957 - protein, 7 aa, synthetic construct
  REGION 1..7: note = Description of Artificial Sequence: Synthetic peptide
DSVTKRA

SEQ ID NO: 11958 - protein, 7 aa, synthetic construct
  REGION 1..7: note = Description of Artificial Sequence: Synthetic peptide
GTGTSVL

SEQ ID NO: 11959 - protein, 7 aa, synthetic construct
  REGION 1..7: note = Description of Artificial Sequence: Synthetic peptide
SLSNSSG

SEQ ID NO: 11960 - protein, 7 aa, synthetic construct
  REGION 1..7: note = Description of Artificial Sequence: Synthetic peptide
TQASRVS

SEQ ID NO: 11961 - protein, 7 aa, synthetic construct
  REGION 1..7: note = Description of Artificial Sequence: Synthetic peptide
ISNTATP

SEQ ID NO: 11962 - protein, 7 aa, synthetic construct
  REGION 1..7: note = Description of Artificial Sequence: Synthetic peptide
LRDSATH

SEQ ID NO: 11963 - protein, 7 aa, synthetic construct
  REGION 1..7: note = Description of Artificial Sequence: Synthetic peptide
NDAKSGN

SEQ ID NO: 11964 - protein, 7 aa, synthetic construct
  REGION 1..7: note = Description of Artificial Sequence: Synthetic peptide
TDPTPSK

SEQ ID NO: 11965 - protein, 7 aa, synthetic construct
  REGION 1..7: note = Description of Artificial Sequence: Synthetic peptide
ADTPRNQ

SEQ ID NO: 11966 - protein, 7 aa, synthetic construct
  REGION 1..7: note = Description of Artificial Sequence: Synthetic peptide
AGNNAPS

SEQ ID NO: 11967 - protein, 7 aa, synthetic construct
  REGION 1..7: note = Description of Artificial Sequence: Synthetic peptide
GSTNSHN

SEQ ID NO: 11968 - protein, 7 aa, synthetic construct
  REGION 1..7: note = Description of Artificial Sequence: Synthetic peptide
LAAGAGA

SEQ ID NO: 11969 - protein, 7 aa, synthetic construct
  REGION 1..7: note = Description of Artificial Sequence: Synthetic peptide
SGSGKMV

SEQ ID NO: 11970 - protein, 7 aa, synthetic construct
  REGION 1..7: note = Description of Artificial Sequence: Synthetic peptide
RPKPSDG

SEQ ID NO: 11971 - protein, 7 aa, synthetic construct
  REGION 1..7: note = Description of Artificial Sequence: Synthetic peptide
SATNSKL

SEQ ID NO: 11972 - protein, 7 aa, synthetic construct
  REGION 1..7: note = Description of Artificial Sequence: Synthetic peptide
NSDTRTA

SEQ ID NO: 11973 - protein, 7 aa, synthetic construct
  REGION 1..7: note = Description of Artificial Sequence: Synthetic peptide
TTPAQHA

SEQ ID NO: 11974 - protein, 7 aa, synthetic construct
  REGION 1..7: note = Description of Artificial Sequence: Synthetic peptide
TRSSPSM

SEQ ID NO: 11975 - protein, 7 aa, synthetic construct
  REGION 1..7: note = Description of Artificial Sequence: Synthetic peptide
TGGNNMQ

SEQ ID NO: 11976 - protein, 7 aa, synthetic construct
  REGION 1..7: note = Description of Artificial Sequence: Synthetic peptide
SKDHQNA

SEQ ID NO: 11977 - protein, 7 aa, synthetic construct
  REGION 1..7: note = Description of Artificial Sequence: Synthetic peptide
QSSGTNL

SEQ ID NO: 11978 - protein, 7 aa, synthetic construct
  REGION 1..7: note = Description of Artificial Sequence: Synthetic peptide
LVSENGR

SEQ ID NO: 11979 - protein, 7 aa, synthetic construct
  REGION 1..7: note = Description of Artificial Sequence: Synthetic peptide
LQGTGGS

SEQ ID NO: 11980 - protein, 7 aa, synthetic construct
  REGION 1..7: note = Description of Artificial Sequence: Synthetic peptide
DSVSART

SEQ ID NO: 11981 - protein, 7 aa, synthetic construct
  REGION 1..7: note = Description of Artificial Sequence: Synthetic peptide
ATQGSSV

SEQ ID NO: 11982 - protein, 7 aa, synthetic construct
  REGION 1..7: note = Description of Artificial Sequence: Synthetic peptide
NLKASSG

SEQ ID NO: 11983 - protein, 7 aa, synthetic construct
  REGION 1..7: note = Description of Artificial Sequence: Synthetic peptide
SGKSSSQ

SEQ ID NO: 11984 - protein, 7 aa, synthetic construct
  REGION 1..7: note = Description of Artificial Sequence: Synthetic peptide
NPSTPHH

SEQ ID NO: 11985 - protein, 7 aa, synthetic construct
  REGION 1..7: note = Description of Artificial Sequence: Synthetic peptide
STKTQSS

SEQ ID NO: 11986 - protein, 7 aa, synthetic construct
  REGION 1..7: note = Description of Artificial Sequence: Synthetic peptide
SLDSSRN

SEQ ID NO: 11987 - protein, 7 aa, synthetic construct
  REGION 1..7: note = Description of Artificial Sequence: Synthetic peptide
ISSNSSS

SEQ ID NO: 11988 - protein, 7 aa, synthetic construct
  REGION 1..7: note = Description of Artificial Sequence: Synthetic peptide
QGNSQFT

SEQ ID NO: 11989 - protein, 7 aa, synthetic construct
  REGION 1..7: note = Description of Artificial Sequence: Synthetic peptide
DTGSSSH

SEQ ID NO: 11990 - protein, 7 aa, synthetic construct
  REGION 1..7: note = Description of Artificial Sequence: Synthetic peptide
GVNGGSN

SEQ ID NO: 11991 - protein, 7 aa, synthetic construct
  REGION 1..7: note = Description of Artificial Sequence: Synthetic peptide
GSGDKVL

SEQ ID NO: 11992 - protein, 7 aa, synthetic construct
  REGION 1..7: note = Description of Artificial Sequence: Synthetic peptide
DGKTKNG

SEQ ID NO: 11993 - protein, 7 aa, synthetic construct
  REGION 1..7: note = Description of Artificial Sequence: Synthetic peptide
RTSDTSV

SEQ ID NO: 11994 - protein, 7 aa, synthetic construct
  REGION 1..7: note = Description of Artificial Sequence: Synthetic peptide
SQPDKAN

SEQ ID NO: 11995 - protein, 7 aa, synthetic construct
  REGION 1..7: note = Description of Artificial Sequence: Synthetic peptide
SQAQPVS

SEQ ID NO: 11996 - protein, 7 aa, synthetic construct
  REGION 1..7: note = Description of Artificial Sequence: Synthetic peptide
MQQTSAL

SEQ ID NO: 11997 - protein, 7 aa, synthetic construct
  REGION 1..7: note = Description of Artificial Sequence: Synthetic peptide
GVKSPHQ

SEQ ID NO: 11998 - protein, 7 aa, synthetic construct
  REGION 1..7: note = Description of Artificial Sequence: Synthetic peptide
RNGPPSQ

SEQ ID NO: 11999 - protein, 7 aa, synthetic construct
  REGION 1..7: note = Description of Artificial Sequence: Synthetic peptide
NSSEKVK

SEQ ID NO: 12000 - protein, 7 aa, synthetic construct
  REGION 1..7: note = Description of Artificial Sequence: Synthetic peptide
TGNHGPS

SEQ ID NO: 12001 - protein, 7 aa, synthetic construct
  REGION 1..7: note = Description of Artificial Sequence: Synthetic peptide
SGMDGKH

SEQ ID NO: 12002 - protein, 7 aa, synthetic construct
  REGION 1..7: note = Description of Artificial Sequence: Synthetic peptide
ILDSKSA

SEQ ID NO: 12003 - protein, 7 aa, synthetic construct
  REGION 1..7: note = Description of Artificial Sequence: Synthetic peptide
DRSASDK

SEQ ID NO: 12004 - protein, 7 aa, synthetic construct
  REGION 1..7: note = Description of Artificial Sequence: Synthetic peptide
SSTSSKT

SEQ ID NO: 12005 - protein, 7 aa, synthetic construct
  REGION 1..7: note = Description of Artificial Sequence: Synthetic peptide
LEGRTNS

SEQ ID NO: 12006 - protein, 7 aa, synthetic construct
  REGION 1..7: note = Description of Artificial Sequence: Synthetic peptide
RQAPALS

SEQ ID NO: 12007 - protein, 7 aa, synthetic construct
  REGION 1..7: note = Description of Artificial Sequence: Synthetic peptide
SKVTAEA

SEQ ID NO: 12008 - protein, 7 aa, synthetic construct
  REGION 1..7: note = Description of Artificial Sequence: Synthetic peptide
QSTSTSA

SEQ ID NO: 12009 - protein, 7 aa, synthetic construct
  REGION 1..7: note = Description of Artificial Sequence: Synthetic peptide
QGLTDKN

SEQ ID NO: 12010 - protein, 7 aa, synthetic construct
  REGION 1..7: note = Description of Artificial Sequence: Synthetic peptide
GLNNTTT

SEQ ID NO: 12011 - protein, 7 aa, synthetic construct
  REGION 1..7: note = Description of Artificial Sequence: Synthetic peptide
VSDKNLP

SEQ ID NO: 12012 - protein, 7 aa, synthetic construct
  REGION 1..7: note = Description of Artificial Sequence: Synthetic peptide
SSGGDSR

SEQ ID NO: 12013 - protein, 7 aa, synthetic construct
  REGION 1..7: note = Description of Artificial Sequence: Synthetic peptide
NGASNAR

SEQ ID NO: 12014 - protein, 7 aa, synthetic construct
  REGION 1..7: note = Description of Artificial Sequence: Synthetic peptide
SGVPSMN

SEQ ID NO: 12015 - protein, 7 aa, synthetic construct
  REGION 1..7: note = Description of Artificial Sequence: Synthetic peptide
APAVSSG

SEQ ID NO: 12016 - protein, 7 aa, synthetic construct
  REGION 1..7: note = Description of Artificial Sequence: Synthetic peptide
KAAGPNG

SEQ ID NO: 12017 - protein, 7 aa, synthetic construct
  REGION 1..7: note = Description of Artificial Sequence: Synthetic peptide
KTSGGTE

SEQ ID NO: 12018 - protein, 7 aa, synthetic construct
  REGION 1..7: note = Description of Artificial Sequence: Synthetic peptide
SANSSNT

SEQ ID NO: 12019 - protein, 7 aa, synthetic construct
  REGION 1..7: note = Description of Artificial Sequence: Synthetic peptide
SGSTQAP

SEQ ID NO: 12020 - protein, 7 aa, synthetic construct
  REGION 1..7: note = Description of Artificial Sequence: Synthetic peptide
HAGSSSA

SEQ ID NO: 12021 - protein, 7 aa, synthetic construct
  REGION 1..7: note = Description of Artificial Sequence: Synthetic peptide
QEKTGTS

SEQ ID NO: 12022 - protein, 7 aa, synthetic construct
  REGION 1..7: note = Description of Artificial Sequence: Synthetic peptide
QGSSTGV

SEQ ID NO: 12023 - protein, 7 aa, synthetic construct
  REGION 1..7: note = Description of Artificial Sequence: Synthetic peptide
GLEGNSK

SEQ ID NO: 12024 - protein, 7 aa, synthetic construct
  REGION 1..7: note = Description of Artificial Sequence: Synthetic peptide
GTPERAN

SEQ ID NO: 12025 - protein, 7 aa, synthetic construct
  REGION 1..7: note = Description of Artificial Sequence: Synthetic peptide
GVTNKSF

SEQ ID NO: 12026 - protein, 7 aa, synthetic construct
  REGION 1..7: note = Description of Artificial Sequence: Synthetic peptide
VSDKPLM

SEQ ID NO: 12027 - protein, 7 aa, synthetic construct
  REGION 1..7: note = Description of Artificial Sequence: Synthetic peptide
VQAPTLG

SEQ ID NO: 12028 - protein, 7 aa, synthetic construct
  REGION 1..7: note = Description of Artificial Sequence: Synthetic peptide
DSKTPTV

SEQ ID NO: 12029 - protein, 7 aa, synthetic construct
  REGION 1..7: note = Description of Artificial Sequence: Synthetic peptide
GNSTAIK

SEQ ID NO: 12030 - protein, 7 aa, synthetic construct
  REGION 1..7: note = Description of Artificial Sequence: Synthetic peptide
TKETQTI

SEQ ID NO: 12031 - protein, 7 aa, synthetic construct
  REGION 1..7: note = Description of Artificial Sequence: Synthetic peptide
LQRGTQG

SEQ ID NO: 12032 - protein, 7 aa, synthetic construct
  REGION 1..7: note = Description of Artificial Sequence: Synthetic peptide
LSGSGSS

SEQ ID NO: 12033 - protein, 7 aa, synthetic construct
  REGION 1..7: note = Description of Artificial Sequence: Synthetic peptide
GSSNKTL

SEQ ID NO: 12034 - protein, 7 aa, synthetic construct
  REGION 1..7: note = Description of Artificial Sequence: Synthetic peptide
DTDARAH

SEQ ID NO: 12035 - protein, 7 aa, synthetic construct
  REGION 1..7: note = Description of Artificial Sequence: Synthetic peptide
SKIRSSE

SEQ ID NO: 12036 - protein, 7 aa, synthetic construct
  REGION 1..7: note = Description of Artificial Sequence: Synthetic peptide
GMTSKPI

SEQ ID NO: 12037 - protein, 7 aa, synthetic construct
  REGION 1..7: note = Description of Artificial Sequence: Synthetic peptide
VLSSNNS

SEQ ID NO: 12038 - protein, 7 aa, synthetic construct
  REGION 1..7: note = Description of Artificial Sequence: Synthetic peptide
SASKGSQ

SEQ ID NO: 12039 - protein, 7 aa, synthetic construct
  REGION 1..7: note = Description of Artificial Sequence: Synthetic peptide
NTSSKSQ

SEQ ID NO: 12040 - protein, 7 aa, synthetic construct
  REGION 1..7: note = Description of Artificial Sequence: Synthetic peptide
STPSSKT

SEQ ID NO: 12041 - protein, 7 aa, synthetic construct
  REGION 1..7: note = Description of Artificial Sequence: Synthetic peptide
SLGSKGT

SEQ ID NO: 12042 - protein, 7 aa, synthetic construct
  REGION 1..7: note = Description of Artificial Sequence: Synthetic peptide
SVSSSVG

SEQ ID NO: 12043 - protein, 7 aa, synthetic construct
  REGION 1..7: note = Description of Artificial Sequence: Synthetic peptide
DVAGNRL

SEQ ID NO: 12044 - protein, 7 aa, synthetic construct
  REGION 1..7: note = Description of Artificial Sequence: Synthetic peptide
GGGQSSF

SEQ ID NO: 12045 - protein, 7 aa, synthetic construct
  REGION 1..7: note = Description of Artificial Sequence: Synthetic peptide
HNTPPSG

SEQ ID NO: 12046 - protein, 7 aa, synthetic construct
  REGION 1..7: note = Description of Artificial Sequence: Synthetic peptide
LPNSSTT

SEQ ID NO: 12047 - protein, 7 aa, synthetic construct
  REGION 1..7: note = Description of Artificial Sequence: Synthetic peptide
QGTGKFI

SEQ ID NO: 12048 - protein, 7 aa, synthetic construct
  REGION 1..7: note = Description of Artificial Sequence: Synthetic peptide
GTTASHG

SEQ ID NO: 12049 - protein, 7 aa, synthetic construct
  REGION 1..7: note = Description of Artificial Sequence: Synthetic peptide
TVSSNPA

SEQ ID NO: 12050 - protein, 7 aa, synthetic construct
  REGION 1..7: note = Description of Artificial Sequence: Synthetic peptide
SSDKVRD

SEQ ID NO: 12051 - protein, 7 aa, synthetic construct
  REGION 1..7: note = Description of Artificial Sequence: Synthetic peptide
IGIGTSH

SEQ ID NO: 12052 - protein, 7 aa, synthetic construct
  REGION 1..7: note = Description of Artificial Sequence: Synthetic peptide
QPSSTSV

SEQ ID NO: 12053 - protein, 7 aa, synthetic construct
  REGION 1..7: note = Description of Artificial Sequence: Synthetic peptide
ESASGVS

SEQ ID NO: 12054 - protein, 7 aa, synthetic construct
  REGION 1..7: note = Description of Artificial Sequence: Synthetic peptide
DMSAHGK

SEQ ID NO: 12055 - protein, 7 aa, synthetic construct
  REGION 1..7: note = Description of Artificial Sequence: Synthetic peptide
GNGNTMQ

SEQ ID NO: 12056 - protein, 7 aa, synthetic construct
  REGION 1..7: note = Description of Artificial Sequence: Synthetic peptide
GESNKMT

SEQ ID NO: 12057 - protein, 7 aa, synthetic construct
  REGION 1..7: note = Description of Artificial Sequence: Synthetic peptide
GSTSARD

SEQ ID NO: 12058 - protein, 7 aa, synthetic construct
  REGION 1..7: note = Description of Artificial Sequence: Synthetic peptide
VGLKSGG

SEQ ID NO: 12059 - protein, 7 aa, synthetic construct
  REGION 1..7: note = Description of Artificial Sequence: Synthetic peptide
YGDSVVR

SEQ ID NO: 12060 - protein, 7 aa, synthetic construct
  REGION 1..7: note = Description of Artificial Sequence: Synthetic peptide
QGSPSHH

SEQ ID NO: 12061 - protein, 7 aa, synthetic construct
  REGION 1..7: note = Description of Artificial Sequence: Synthetic peptide
NQAAHSA

SEQ ID NO: 12062 - protein, 7 aa, synthetic construct
  REGION 1..7: note = Description of Artificial Sequence: Synthetic peptide
KSTGSSV

SEQ ID NO: 12063 - protein, 7 aa, synthetic construct
  REGION 1..7: note = Description of Artificial Sequence: Synthetic peptide
NPQSSSS

SEQ ID NO: 12064 - protein, 7 aa, synthetic construct
  REGION 1..7: note = Description of Artificial Sequence: Synthetic peptide
TPAQDSR

SEQ ID NO: 12065 - protein, 7 aa, synthetic construct
  REGION 1..7: note = Description of Artificial Sequence: Synthetic peptide
DKAQHTL

SEQ ID NO: 12066 - protein, 7 aa, synthetic construct
  REGION 1..7: note = Description of Artificial Sequence: Synthetic peptide
GNTQALG

SEQ ID NO: 12067 - protein, 7 aa, synthetic construct
  REGION 1..7: note = Description of Artificial Sequence: Synthetic peptide
TSNSPSL

SEQ ID NO: 12068 - protein, 7 aa, synthetic construct
  REGION 1..7: note = Description of Artificial Sequence: Synthetic peptide
SGIGSGQ

SEQ ID NO: 12069 - protein, 7 aa, synthetic construct
  REGION 1..7: note = Description of Artificial Sequence: Synthetic peptide
LGTKNGQ

SEQ ID NO: 12070 - protein, 7 aa, synthetic construct
  REGION 1..7: note = Description of Artificial Sequence: Synthetic peptide
STSGTQH

SEQ ID NO: 12071 - protein, 7 aa, synthetic construct
  REGION 1..7: note = Description of Artificial Sequence: Synthetic peptide
TTSNSNL

SEQ ID NO: 12072 - protein, 7 aa, synthetic construct
  REGION 1..7: note = Description of Artificial Sequence: Synthetic peptide
TSQPTHV

SEQ ID NO: 12073 - protein, 7 aa, synthetic construct
  REGION 1..7: note = Description of Artificial Sequence: Synthetic peptide
QQASGAM

SEQ ID NO: 12074 - protein, 7 aa, synthetic construct
  REGION 1..7: note = Description of Artificial Sequence: Synthetic peptide
HSKPQVT

SEQ ID NO: 12075 - protein, 7 aa, synthetic construct
  REGION 1..7: note = Description of Artificial Sequence: Synthetic peptide
NGSSSIS

SEQ ID NO: 12076 - protein, 7 aa, synthetic construct
  REGION 1..7: note = Description of Artificial Sequence: Synthetic peptide
TSATAAV

SEQ ID NO: 12077 - protein, 7 aa, synthetic construct
  REGION 1..7: note = Description of Artificial Sequence: Synthetic peptide
TESSKLG

SEQ ID NO: 12078 - protein, 7 aa, synthetic construct
  REGION 1..7: note = Description of Artificial Sequence: Synthetic peptide
IRETPTH

SEQ ID NO: 12079 - protein, 7 aa, synthetic construct
  REGION 1..7: note = Description of Artificial Sequence: Synthetic peptide
HGQSSLA

SEQ ID NO: 12080 - protein, 7 aa, synthetic construct
  REGION 1..7: note = Description of Artificial Sequence: Synthetic peptide
QSTSKAG

SEQ ID NO: 12081 - protein, 7 aa, synthetic construct
  REGION 1..7: note = Description of Artificial Sequence: Synthetic peptide
DNDQKRA

SEQ ID NO: 12082 - protein, 7 aa, synthetic construct
  REGION 1..7: note = Description of Artificial Sequence: Synthetic peptide
SSGDKSS

SEQ ID NO: 12083 - protein, 7 aa, synthetic construct
  REGION 1..7: note = Description of Artificial Sequence: Synthetic peptide
SESKDYT

SEQ ID NO: 12084 - protein, 7 aa, synthetic construct
  REGION 1..7: note = Description of Artificial Sequence: Synthetic peptide
SISDRNR

SEQ ID NO: 12085 - protein, 7 aa, synthetic construct
  REGION 1..7: note = Description of Artificial Sequence: Synthetic peptide
HASATPL

SEQ ID NO: 12086 - protein, 7 aa, synthetic construct
  REGION 1..7: note = Description of Artificial Sequence: Synthetic peptide
ASHGTNT

SEQ ID NO: 12087 - protein, 7 aa, synthetic construct
  REGION 1..7: note = Description of Artificial Sequence: Synthetic peptide
GQTPSAN

SEQ ID NO: 12088 - protein, 7 aa, synthetic construct
  REGION 1..7: note = Description of Artificial Sequence: Synthetic peptide
VRTGKEQ

SEQ ID NO: 12089 - protein, 7 aa, synthetic construct
  REGION 1..7: note = Description of Artificial Sequence: Synthetic peptide
LKDRSST

SEQ ID NO: 12090 - protein, 7 aa, synthetic construct
  REGION 1..7: note = Description of Artificial Sequence: Synthetic peptide
NARSPSS

SEQ ID NO: 12091 - protein, 7 aa, synthetic construct
  REGION 1..7: note = Description of Artificial Sequence: Synthetic peptide
KSDGSTG

SEQ ID NO: 12092 - protein, 7 aa, synthetic construct
  REGION 1..7: note = Description of Artificial Sequence: Synthetic peptide
SKNSSPS

SEQ ID NO: 12093 - protein, 7 aa, synthetic construct
  REGION 1..7: note = Description of Artificial Sequence: Synthetic peptide
QTEGTLR

SEQ ID NO: 12094 - protein, 7 aa, synthetic construct
  REGION 1..7: note = Description of Artificial Sequence: Synthetic peptide
RTGTNPS

SEQ ID NO: 12095 - protein, 7 aa, synthetic construct
  REGION 1..7: note = Description of Artificial Sequence: Synthetic peptide
AGSRSPA

SEQ ID NO: 12096 - protein, 7 aa, synthetic construct
  REGION 1..7: note = Description of Artificial Sequence: Synthetic peptide
SPQIAEK

SEQ ID NO: 12097 - protein, 7 aa, synthetic construct
  REGION 1..7: note = Description of Artificial Sequence: Synthetic peptide
KQSTASL

SEQ ID NO: 12098 - protein, 7 aa, synthetic construct
  REGION 1..7: note = Description of Artificial Sequence: Synthetic peptide
RTDGPVK

SEQ ID NO: 12099 - protein, 7 aa, synthetic construct
  REGION 1..7: note = Description of Artificial Sequence: Synthetic peptide
HSGSKET

SEQ ID NO: 12100 - protein, 7 aa, synthetic construct
  REGION 1..7: note = Description of Artificial Sequence: Synthetic peptide
QTSQHTS

SEQ ID NO: 12101 - protein, 7 aa, synthetic construct
  REGION 1..7: note = Description of Artificial Sequence: Synthetic peptide
DKGAGAP

SEQ ID NO: 12102 - protein, 7 aa, synthetic construct
  REGION 1..7: note = Description of Artificial Sequence: Synthetic peptide
APDNTSK

SEQ ID NO: 12103 - protein, 7 aa, synthetic construct
  REGION 1..7: note = Description of Artificial Sequence: Synthetic peptide
STSSPAT

SEQ ID NO: 12104 - protein, 7 aa, synthetic construct
  REGION 1..7: note = Description of Artificial Sequence: Synthetic peptide
HGSEQPR

SEQ ID NO: 12105 - protein, 7 aa, synthetic construct
  REGION 1..7: note = Description of Artificial Sequence: Synthetic peptide
HSDAKGK

SEQ ID NO: 12106 - protein, 7 aa, synthetic construct
  REGION 1..7: note = Description of Artificial Sequence: Synthetic peptide
GDTTPVR

SEQ ID NO: 12107 - protein, 7 aa, synthetic construct
  REGION 1..7: note = Description of Artificial Sequence: Synthetic peptide
EGQSSRG

SEQ ID NO: 12108 - protein, 7 aa, synthetic construct
  REGION 1..7: note = Description of Artificial Sequence: Synthetic peptide
DMAKSTK

SEQ ID NO: 12109 - protein, 7 aa, synthetic construct
  REGION 1..7: note = Description of Artificial Sequence: Synthetic peptide
DGHSSRV

SEQ ID NO: 12110 - protein, 7 aa, synthetic construct
  REGION 1..7: note = Description of Artificial Sequence: Synthetic peptide
STGVATK

SEQ ID NO: 12111 - protein, 7 aa, synthetic construct
  REGION 1..7: note = Description of Artificial Sequence: Synthetic peptide
VGGSRSQ

SEQ ID NO: 12112 - protein, 7 aa, synthetic construct
  REGION 1..7: note = Description of Artificial Sequence: Synthetic peptide
SQASAPR

SEQ ID NO: 12113 - protein, 7 aa, synthetic construct
  REGION 1..7: note = Description of Artificial Sequence: Synthetic peptide
NTGGDLR

SEQ ID NO: 12114 - protein, 7 aa, synthetic construct
  REGION 1..7: note = Description of Artificial Sequence: Synthetic peptide
NKVSAPS

SEQ ID NO: 12115 - protein, 7 aa, synthetic construct
  REGION 1..7: note = Description of Artificial Sequence: Synthetic peptide
NATVTPR

SEQ ID NO: 12116 - protein, 7 aa, synthetic construct
  REGION 1..7: note = Description of Artificial Sequence: Synthetic peptide
TQAGPKE

SEQ ID NO: 12117 - protein, 7 aa, synthetic construct
  REGION 1..7: note = Description of Artificial Sequence: Synthetic peptide
TKEGSIV

SEQ ID NO: 12118 - protein, 7 aa, synthetic construct
  REGION 1..7: note = Description of Artificial Sequence: Synthetic peptide
TGSPTSG

SEQ ID NO: 12119 - protein, 7 aa, synthetic construct
  REGION 1..7: note = Description of Artificial Sequence: Synthetic peptide
SETKGHP

SEQ ID NO: 12120 - protein, 7 aa, synthetic construct
  REGION 1..7: note = Description of Artificial Sequence: Synthetic peptide
SGPGSQV

SEQ ID NO: 12121 - protein, 7 aa, synthetic construct
  REGION 1..7: note = Description of Artificial Sequence: Synthetic peptide
SVTSATQ

SEQ ID NO: 12122 - protein, 7 aa, synthetic construct
  REGION 1..7: note = Description of Artificial Sequence: Synthetic peptide
ERTSGSY

SEQ ID NO: 12123 - protein, 7 aa, synthetic construct
  REGION 1..7: note = Description of Artificial Sequence: Synthetic peptide
DTLKDRF

SEQ ID NO: 12124 - protein, 7 aa, synthetic construct
  REGION 1..7: note = Description of Artificial Sequence: Synthetic peptide
DRAGSHT

SEQ ID NO: 12125 - protein, 7 aa, synthetic construct
  REGION 1..7: note = Description of Artificial Sequence: Synthetic peptide
EQGQNRI

SEQ ID NO: 12126 - protein, 7 aa, synthetic construct
  REGION 1..7: note = Description of Artificial Sequence: Synthetic peptide
ASGSTST

SEQ ID NO: 12127 - protein, 7 aa, synthetic construct
  REGION 1..7: note = Description of Artificial Sequence: Synthetic peptide
GHTAEVG

SEQ ID NO: 12128 - protein, 7 aa, synthetic construct
  REGION 1..7: note = Description of Artificial Sequence: Synthetic peptide
GASDNPR

SEQ ID NO: 12129 - protein, 7 aa, synthetic construct
  REGION 1..7: note = Description of Artificial Sequence: Synthetic peptide
VSTAKLA

SEQ ID NO: 12130 - protein, 7 aa, synthetic construct
  REGION 1..7: note = Description of Artificial Sequence: Synthetic peptide
SLNGASG

SEQ ID NO: 12131 - protein, 7 aa, synthetic construct
  REGION 1..7: note = Description of Artificial Sequence: Synthetic peptide
SSEMGSK

SEQ ID NO: 12132 - protein, 7 aa, synthetic construct
  REGION 1..7: note = Description of Artificial Sequence: Synthetic peptide
SDAQASS

SEQ ID NO: 12133 - protein, 7 aa, synthetic construct
  REGION 1..7: note = Description of Artificial Sequence: Synthetic peptide
CSGSSPG

SEQ ID NO: 12134 - protein, 7 aa, synthetic construct
  REGION 1..7: note = Description of Artificial Sequence: Synthetic peptide
NRGENSV

SEQ ID NO: 12135 - protein, 7 aa, synthetic construct
  REGION 1..7: note = Description of Artificial Sequence: Synthetic peptide
GGKSNAG

SEQ ID NO: 12136 - protein, 7 aa, synthetic construct
  REGION 1..7: note = Description of Artificial Sequence: Synthetic peptide
SNSTKSG

SEQ ID NO: 12137 - protein, 7 aa, synthetic construct
  REGION 1..7: note = Description of Artificial Sequence: Synthetic peptide
NTSGSKA

SEQ ID NO: 12138 - protein, 7 aa, synthetic construct
  REGION 1..7: note = Description of Artificial Sequence: Synthetic peptide
TVSQTPI

SEQ ID NO: 12139 - protein, 7 aa, synthetic construct
  REGION 1..7: note = Description of Artificial Sequence: Synthetic peptide
TGLNGVG

SEQ ID NO: 12140 - protein, 7 aa, synthetic construct
  REGION 1..7: note = Description of Artificial Sequence: Synthetic peptide
SSQGSGS

SEQ ID NO: 12141 - protein, 7 aa, synthetic construct
  REGION 1..7: note = Description of Artificial Sequence: Synthetic peptide
DRVKDVK

SEQ ID NO: 12142 - protein, 7 aa, synthetic construct
  REGION 1..7: note = Description of Artificial Sequence: Synthetic peptide
AETRAAS

SEQ ID NO: 12143 - protein, 7 aa, synthetic construct
  REGION 1..7: note = Description of Artificial Sequence: Synthetic peptide
GHGQSMH

SEQ ID NO: 12144 - protein, 7 aa, synthetic construct
  REGION 1..7: note = Description of Artificial Sequence: Synthetic peptide
TSSERPP

SEQ ID NO: 12145 - protein, 7 aa, synthetic construct
  REGION 1..7: note = Description of Artificial Sequence: Synthetic peptide
LRTTKES

SEQ ID NO: 12146 - protein, 7 aa, synthetic construct
  REGION 1..7: note = Description of Artificial Sequence: Synthetic peptide
TTEKNMH

SEQ ID NO: 12147 - protein, 7 aa, synthetic construct
  REGION 1..7: note = Description of Artificial Sequence: Synthetic peptide
TPSTHVT

SEQ ID NO: 12148 - protein, 7 aa, synthetic construct
  REGION 1..7: note = Description of Artificial Sequence: Synthetic peptide
GHSPPGG

SEQ ID NO: 12149 - protein, 7 aa, synthetic construct
  REGION 1..7: note = Description of Artificial Sequence: Synthetic peptide
GASPVNS

SEQ ID NO: 12150 - protein, 7 aa, synthetic construct
  REGION 1..7: note = Description of Artificial Sequence: Synthetic peptide
VQGQKME

SEQ ID NO: 12151 - protein, 7 aa, synthetic construct
  REGION 1..7: note = Description of Artificial Sequence: Synthetic peptide
VKNSSTH

SEQ ID NO: 12152 - protein, 7 aa, synthetic construct
  REGION 1..7: note = Description of Artificial Sequence: Synthetic peptide
HEDPRTK

SEQ ID NO: 12153 - protein, 7 aa, synthetic construct
  REGION 1..7: note = Description of Artificial Sequence: Synthetic peptide
MTGKTTT

SEQ ID NO: 12154 - protein, 7 aa, synthetic construct
  REGION 1..7: note = Description of Artificial Sequence: Synthetic peptide
HTDNAKG

SEQ ID NO: 12155 - protein, 7 aa, synthetic construct
  REGION 1..7: note = Description of Artificial Sequence: Synthetic peptide
EGINRNT

SEQ ID NO: 12156 - protein, 7 aa, synthetic construct
  REGION 1..7: note = Description of Artificial Sequence: Synthetic peptide
AGDAHKS

SEQ ID NO: 12157 - protein, 7 aa, synthetic construct
  REGION 1..7: note = Description of Artificial Sequence: Synthetic peptide
YGDRNNL

SEQ ID NO: 12158 - protein, 7 aa, synthetic construct
  REGION 1..7: note = Description of Artificial Sequence: Synthetic peptide
SDGSHHG

SEQ ID NO: 12159 - protein, 7 aa, synthetic construct
  REGION 1..7: note = Description of Artificial Sequence: Synthetic peptide
SSAAVPT

SEQ ID NO: 12160 - protein, 7 aa, synthetic construct
  REGION 1..7: note = Description of Artificial Sequence: Synthetic peptide
GPANSAT

SEQ ID NO: 12161 - protein, 7 aa, synthetic construct
  REGION 1..7: note = Description of Artificial Sequence: Synthetic peptide
NGSQTGQ

SEQ ID NO: 12162 - protein, 7 aa, synthetic construct
  REGION 1..7: note = Description of Artificial Sequence: Synthetic peptide
TKGESMN

SEQ ID NO: 12163 - protein, 7 aa, synthetic construct
  REGION 1..7: note = Description of Artificial Sequence: Synthetic peptide
HTTGSRD

SEQ ID NO: 12164 - protein, 7 aa, synthetic construct
  REGION 1..7: note = Description of Artificial Sequence: Synthetic peptide
LPRPDST

SEQ ID NO: 12165 - protein, 7 aa, synthetic construct
  REGION 1..7: note = Description of Artificial Sequence: Synthetic peptide
GNLNGSP

SEQ ID NO: 12166 - protein, 7 aa, synthetic construct
  REGION 1..7: note = Description of Artificial Sequence: Synthetic peptide
GDHDRKM

SEQ ID NO: 12167 - protein, 7 aa, synthetic construct
  REGION 1..7: note = Description of Artificial Sequence: Synthetic peptide
TTQSSAL

SEQ ID NO: 12168 - protein, 7 aa, synthetic construct
  REGION 1..7: note = Description of Artificial Sequence: Synthetic peptide
LAQTQPQ

SEQ ID NO: 12169 - protein, 7 aa, synthetic construct
  REGION 1..7: note = Description of Artificial Sequence: Synthetic peptide
LATSSQS

SEQ ID NO: 12170 - protein, 7 aa, synthetic construct
  REGION 1..7: note = Description of Artificial Sequence: Synthetic peptide
TTTQPVL

SEQ ID NO: 12171 - protein, 7 aa, synthetic construct
  REGION 1..7: note = Description of Artificial Sequence: Synthetic peptide
SGIPSGH

SEQ ID NO: 12172 - protein, 7 aa, synthetic construct
  REGION 1..7: note = Description of Artificial Sequence: Synthetic peptide
QSAGSRQ

SEQ ID NO: 12173 - protein, 7 aa, synthetic construct
  REGION 1..7: note = Description of Artificial Sequence: Synthetic peptide
DRVGSSA

SEQ ID NO: 12174 - protein, 7 aa, synthetic construct
  REGION 1..7: note = Description of Artificial Sequence: Synthetic peptide
AIGKDNT

SEQ ID NO: 12175 - protein, 7 aa, synthetic construct
  REGION 1..7: note = Description of Artificial Sequence: Synthetic peptide
GSEKKLP

SEQ ID NO: 12176 - protein, 7 aa, synthetic construct
  REGION 1..7: note = Description of Artificial Sequence: Synthetic peptide
VQGGNNS

SEQ ID NO: 12177 - protein, 7 aa, synthetic construct
  REGION 1..7: note = Description of Artificial Sequence: Synthetic peptide
TSKDSTT

SEQ ID NO: 12178 - protein, 7 aa, synthetic construct
  REGION 1..7: note = Description of Artificial Sequence: Synthetic peptide
ASVPASS

SEQ ID NO: 12179 - protein, 7 aa, synthetic construct
  REGION 1..7: note = Description of Artificial Sequence: Synthetic peptide
ESARSAP

SEQ ID NO: 12180 - protein, 7 aa, synthetic construct
  REGION 1..7: note = Description of Artificial Sequence: Synthetic peptide
MGQSTPS

SEQ ID NO: 12181 - protein, 7 aa, synthetic construct
  REGION 1..7: note = Description of Artificial Sequence: Synthetic peptide
GTAKSIS

SEQ ID NO: 12182 - protein, 7 aa, synthetic construct
  REGION 1..7: note = Description of Artificial Sequence: Synthetic peptide
SPDSKIH

SEQ ID NO: 12183 - protein, 7 aa, synthetic construct
  REGION 1..7: note = Description of Artificial Sequence: Synthetic peptide
HNNTTSQ

SEQ ID NO: 12184 - protein, 7 aa, synthetic construct
  REGION 1..7: note = Description of Artificial Sequence: Synthetic peptide
HPQTSPV

SEQ ID NO: 12185 - protein, 7 aa, synthetic construct
  REGION 1..7: note = Description of Artificial Sequence: Synthetic peptide
ETTKGSA

SEQ ID NO: 12186 - protein, 7 aa, synthetic construct
  REGION 1..7: note = Description of Artificial Sequence: Synthetic peptide
ESPQKAS

SEQ ID NO: 12187 - protein, 7 aa, synthetic construct
  REGION 1..7: note = Description of Artificial Sequence: Synthetic peptide
GDVSQRN

SEQ ID NO: 12188 - protein, 7 aa, synthetic construct
  REGION 1..7: note = Description of Artificial Sequence: Synthetic peptide
HASTPAR

SEQ ID NO: 12189 - protein, 7 aa, synthetic construct
  REGION 1..7: note = Description of Artificial Sequence: Synthetic peptide
DSGTHAV

SEQ ID NO: 12190 - protein, 7 aa, synthetic construct
  REGION 1..7: note = Description of Artificial Sequence: Synthetic peptide
VSGTPPA

SEQ ID NO: 12191 - protein, 7 aa, synthetic construct
  REGION 1..7: note = Description of Artificial Sequence: Synthetic peptide
SRGEAVS

SEQ ID NO: 12192 - protein, 7 aa, synthetic construct
  REGION 1..7: note = Description of Artificial Sequence: Synthetic peptide
SGAEVKQ

SEQ ID NO: 12193 - protein, 7 aa, synthetic construct
  REGION 1..7: note = Description of Artificial Sequence: Synthetic peptide
SQSGVNN

SEQ ID NO: 12194 - protein, 7 aa, synthetic construct
  REGION 1..7: note = Description of Artificial Sequence: Synthetic peptide
MGNTSLS

SEQ ID NO: 12195 - protein, 7 aa, synthetic construct
  REGION 1..7: note = Description of Artificial Sequence: Synthetic peptide
RETAKGD

SEQ ID NO: 12196 - protein, 7 aa, synthetic construct
  REGION 1..7: note = Description of Artificial Sequence: Synthetic peptide
LNASAPP

SEQ ID NO: 12197 - protein, 7 aa, synthetic construct
  REGION 1..7: note = Description of Artificial Sequence: Synthetic peptide
LRGNSNG

SEQ ID NO: 12198 - protein, 7 aa, synthetic construct
  REGION 1..7: note = Description of Artificial Sequence: Synthetic peptide
ERTAEVK

SEQ ID NO: 12199 - protein, 7 aa, synthetic construct
  REGION 1..7: note = Description of Artificial Sequence: Synthetic peptide
SSNRSNA

SEQ ID NO: 12200 - protein, 7 aa, synthetic construct
  REGION 1..7: note = Description of Artificial Sequence: Synthetic peptide
SSVPSPK

SEQ ID NO: 12201 - protein, 7 aa, synthetic construct
  REGION 1..7: note = Description of Artificial Sequence: Synthetic peptide
LTDQKGF

SEQ ID NO: 12202 - protein, 7 aa, synthetic construct
  REGION 1..7: note = Description of Artificial Sequence: Synthetic peptide
QVSDPKT

SEQ ID NO: 12203 - protein, 7 aa, synthetic construct
  REGION 1..7: note = Description of Artificial Sequence: Synthetic peptide
LTVGTHP

SEQ ID NO: 12204 - protein, 7 aa, synthetic construct
  REGION 1..7: note = Description of Artificial Sequence: Synthetic peptide
DRDKANT

SEQ ID NO: 12205 - protein, 7 aa, synthetic construct
  REGION 1..7: note = Description of Artificial Sequence: Synthetic peptide
SSGVASV

SEQ ID NO: 12206 - protein, 7 aa, synthetic construct
  REGION 1..7: note = Description of Artificial Sequence: Synthetic peptide
NTHGDKG

SEQ ID NO: 12207 - protein, 7 aa, synthetic construct
  REGION 1..7: note = Description of Artificial Sequence: Synthetic peptide
TTLQRPE

SEQ ID NO: 12208 - protein, 7 aa, synthetic construct
  REGION 1..7: note = Description of Artificial Sequence: Synthetic peptide
SQNLASG

SEQ ID NO: 12209 - protein, 7 aa, synthetic construct
  REGION 1..7: note = Description of Artificial Sequence: Synthetic peptide
STGSQNQ

SEQ ID NO: 12210 - protein, 7 aa, synthetic construct
  REGION 1..7: note = Description of Artificial Sequence: Synthetic peptide
IAGNVPT

SEQ ID NO: 12211 - protein, 7 aa, synthetic construct
  REGION 1..7: note = Description of Artificial Sequence: Synthetic peptide
MDSAQIK

SEQ ID NO: 12212 - protein, 7 aa, synthetic construct
  REGION 1..7: note = Description of Artificial Sequence: Synthetic peptide
ESGGKHP

SEQ ID NO: 12213 - protein, 7 aa, synthetic construct
  REGION 1..7: note = Description of Artificial Sequence: Synthetic peptide
ATTTQNH

SEQ ID NO: 12214 - protein, 7 aa, synthetic construct
  REGION 1..7: note = Description of Artificial Sequence: Synthetic peptide
GPSREGT

SEQ ID NO: 12215 - protein, 7 aa, synthetic construct
  REGION 1..7: note = Description of Artificial Sequence: Synthetic peptide
GGIPKKG

SEQ ID NO: 12216 - protein, 7 aa, synthetic construct
  REGION 1..7: note = Description of Artificial Sequence: Synthetic peptide
LPERSAS

SEQ ID NO: 12217 - protein, 7 aa, synthetic construct
  REGION 1..7: note = Description of Artificial Sequence: Synthetic peptide
DKVPSGT

SEQ ID NO: 12218 - protein, 7 aa, synthetic construct
  REGION 1..7: note = Description of Artificial Sequence: Synthetic peptide
NSSGTQI

SEQ ID NO: 12219 - protein, 7 aa, synthetic construct
  REGION 1..7: note = Description of Artificial Sequence: Synthetic peptide
KVGSNSG

SEQ ID NO: 12220 - protein, 7 aa, synthetic construct
  REGION 1..7: note = Description of Artificial Sequence: Synthetic peptide
NRTDRSL

SEQ ID NO: 12221 - protein, 7 aa, synthetic construct
  REGION 1..7: note = Description of Artificial Sequence: Synthetic peptide
TMDARSG

SEQ ID NO: 12222 - protein, 7 aa, synthetic construct
  REGION 1..7: note = Description of Artificial Sequence: Synthetic peptide
TTGDSRS

SEQ ID NO: 12223 - protein, 7 aa, synthetic construct
  REGION 1..7: note = Description of Artificial Sequence: Synthetic peptide
GSHGTAT

SEQ ID NO: 12224 - protein, 7 aa, synthetic construct
  REGION 1..7: note = Description of Artificial Sequence: Synthetic peptide
TTNESRA

SEQ ID NO: 12225 - protein, 7 aa, synthetic construct
  REGION 1..7: note = Description of Artificial Sequence: Synthetic peptide
TIDNVPK

SEQ ID NO: 12226 - protein, 7 aa, synthetic construct
  REGION 1..7: note = Description of Artificial Sequence: Synthetic peptide
LVGDKGN

SEQ ID NO: 12227 - protein, 7 aa, synthetic construct
  REGION 1..7: note = Description of Artificial Sequence: Synthetic peptide
SNTKVAV

SEQ ID NO: 12228 - protein, 7 aa, synthetic construct
  REGION 1..7: note = Description of Artificial Sequence: Synthetic peptide
LSSSSTL

SEQ ID NO: 12229 - protein, 7 aa, synthetic construct
  REGION 1..7: note = Description of Artificial Sequence: Synthetic peptide
VKTSSNN

SEQ ID NO: 12230 - protein, 7 aa, synthetic construct
  REGION 1..7: note = Description of Artificial Sequence: Synthetic peptide
HPISQPT

SEQ ID NO: 12231 - protein, 7 aa, synthetic construct
  REGION 1..7: note = Description of Artificial Sequence: Synthetic peptide
EANGQSR

SEQ ID NO: 12232 - protein, 7 aa, synthetic construct
  REGION 1..7: note = Description of Artificial Sequence: Synthetic peptide
STMSPTS

SEQ ID NO: 12233 - protein, 7 aa, synthetic construct
  REGION 1..7: note = Description of Artificial Sequence: Synthetic peptide
TGLNSPV

SEQ ID NO: 12234 - protein, 7 aa, synthetic construct
  REGION 1..7: note = Description of Artificial Sequence: Synthetic peptide
GNNSPVA

SEQ ID NO: 12235 - protein, 7 aa, synthetic construct
  REGION 1..7: note = Description of Artificial Sequence: Synthetic peptide
KEGSRSV

SEQ ID NO: 12236 - protein, 7 aa, synthetic construct
  REGION 1..7: note = Description of Artificial Sequence: Synthetic peptide
KRESSTL

SEQ ID NO: 12237 - protein, 7 aa, synthetic construct
  REGION 1..7: note = Description of Artificial Sequence: Synthetic peptide
NQTSSKS

SEQ ID NO: 12238 - protein, 7 aa, synthetic construct
  REGION 1..7: note = Description of Artificial Sequence: Synthetic peptide
NDSSRVT

SEQ ID NO: 12239 - protein, 7 aa, synthetic construct
  REGION 1..7: note = Description of Artificial Sequence: Synthetic peptide
TRTETTQ

SEQ ID NO: 12240 - protein, 7 aa, synthetic construct
  REGION 1..7: note = Description of Artificial Sequence: Synthetic peptide
TSNTSPT

SEQ ID NO: 12241 - protein, 7 aa, synthetic construct
  REGION 1..7: note = Description of Artificial Sequence: Synthetic peptide
SRTSSSG

SEQ ID NO: 12242 - protein, 7 aa, synthetic construct
  REGION 1..7: note = Description of Artificial Sequence: Synthetic peptide
SPDTHLK

SEQ ID NO: 12243 - protein, 7 aa, synthetic construct
  REGION 1..7: note = Description of Artificial Sequence: Synthetic peptide
SEIQSKG

SEQ ID NO: 12244 - protein, 7 aa, synthetic construct
  REGION 1..7: note = Description of Artificial Sequence: Synthetic peptide
MDSKGGP

SEQ ID NO: 12245 - protein, 7 aa, synthetic construct
  REGION 1..7: note = Description of Artificial Sequence: Synthetic peptide
QSHNGSL

SEQ ID NO: 12246 - protein, 7 aa, synthetic construct
  REGION 1..7: note = Description of Artificial Sequence: Synthetic peptide
QSGSDKV

SEQ ID NO: 12247 - protein, 7 aa, synthetic construct
  REGION 1..7: note = Description of Artificial Sequence: Synthetic peptide
QMQVSNQ

SEQ ID NO: 12248 - protein, 7 aa, synthetic construct
  REGION 1..7: note = Description of Artificial Sequence: Synthetic peptide
HQQKTPT

SEQ ID NO: 12249 - protein, 7 aa, synthetic construct
  REGION 1..7: note = Description of Artificial Sequence: Synthetic peptide
RVQGNSG

SEQ ID NO: 12250 - protein, 7 aa, synthetic construct
  REGION 1..7: note = Description of Artificial Sequence: Synthetic peptide
LADNTRG

SEQ ID NO: 12251 - protein, 7 aa, synthetic construct
  REGION 1..7: note = Description of Artificial Sequence: Synthetic peptide
ESGSNSS

SEQ ID NO: 12252 - protein, 7 aa, synthetic construct
  REGION 1..7: note = Description of Artificial Sequence: Synthetic peptide
DKGKAAA

SEQ ID NO: 12253 - protein, 7 aa, synthetic construct
  REGION 1..7: note = Description of Artificial Sequence: Synthetic peptide
ELTKPNE

SEQ ID NO: 12254 - protein, 7 aa, synthetic construct
  REGION 1..7: note = Description of Artificial Sequence: Synthetic peptide
ASDHPSR

SEQ ID NO: 12255 - protein, 7 aa, synthetic construct
  REGION 1..7: note = Description of Artificial Sequence: Synthetic peptide
ASGPARS

SEQ ID NO: 12256 - protein, 7 aa, synthetic construct
  REGION 1..7: note = Description of Artificial Sequence: Synthetic peptide
AQAEHSQ

SEQ ID NO: 12257 - protein, 7 aa, synthetic construct
  REGION 1..7: note = Description of Artificial Sequence: Synthetic peptide
AEKPGSL

SEQ ID NO: 12258 - protein, 7 aa, synthetic construct
  REGION 1..7: note = Description of Artificial Sequence: Synthetic peptide
GSTNDAR

SEQ ID NO: 12259 - protein, 7 aa, synthetic construct
  REGION 1..7: note = Description of Artificial Sequence: Synthetic peptide
VGTSHIQ

SEQ ID NO: 12260 - protein, 7 aa, synthetic construct
  REGION 1..7: note = Description of Artificial Sequence: Synthetic peptide
YGTSNVG

SEQ ID NO: 12261 - protein, 7 aa, synthetic construct
  REGION 1..7: note = Description of Artificial Sequence: Synthetic peptide
VTQSPPL

SEQ ID NO: 12262 - protein, 7 aa, synthetic construct
  REGION 1..7: note = Description of Artificial Sequence: Synthetic peptide
SGSQHVT

SEQ ID NO: 12263 - protein, 7 aa, synthetic construct
  REGION 1..7: note = Description of Artificial Sequence: Synthetic peptide
TAISKPA

SEQ ID NO: 12264 - protein, 7 aa, synthetic construct
  REGION 1..7: note = Description of Artificial Sequence: Synthetic peptide
AASANPL

SEQ ID NO: 12265 - protein, 7 aa, synthetic construct
  REGION 1..7: note = Description of Artificial Sequence: Synthetic peptide
ANASPNV

SEQ ID NO: 12266 - protein, 7 aa, synthetic construct
  REGION 1..7: note = Description of Artificial Sequence: Synthetic peptide
NVSPSSL

SEQ ID NO: 12267 - protein, 7 aa, synthetic construct
  REGION 1..7: note = Description of Artificial Sequence: Synthetic peptide
SGGSASA

SEQ ID NO: 12268 - protein, 7 aa, synthetic construct
  REGION 1..7: note = Description of Artificial Sequence: Synthetic peptide
LPLAQSQ

SEQ ID NO: 12269 - protein, 7 aa, synthetic construct
  REGION 1..7: note = Description of Artificial Sequence: Synthetic peptide
EASSNPT

SEQ ID NO: 12270 - protein, 7 aa, synthetic construct
  REGION 1..7: note = Description of Artificial Sequence: Synthetic peptide
GLGGDMK

SEQ ID NO: 12271 - protein, 7 aa, synthetic construct
  REGION 1..7: note = Description of Artificial Sequence: Synthetic peptide
GHLTGGS

SEQ ID NO: 12272 - protein, 7 aa, synthetic construct
  REGION 1..7: note = Description of Artificial Sequence: Synthetic peptide
GPSAKSA

SEQ ID NO: 12273 - protein, 7 aa, synthetic construct
  REGION 1..7: note = Description of Artificial Sequence: Synthetic peptide
SQTNTGT

SEQ ID NO: 12274 - protein, 7 aa, synthetic construct
  REGION 1..7: note = Description of Artificial Sequence: Synthetic peptide
GVSKANA

SEQ ID NO: 12275 - protein, 7 aa, synthetic construct
  REGION 1..7: note = Description of Artificial Sequence: Synthetic peptide
KTAPHTT

SEQ ID NO: 12276 - protein, 7 aa, synthetic construct
  REGION 1..7: note = Description of Artificial Sequence: Synthetic peptide
TPSDHAV

SEQ ID NO: 12277 - protein, 7 aa, synthetic construct
  REGION 1..7: note = Description of Artificial Sequence: Synthetic peptide
SIASSGS

SEQ ID NO: 12278 - protein, 7 aa, synthetic construct
  REGION 1..7: note = Description of Artificial Sequence: Synthetic peptide
LGSSAGG

SEQ ID NO: 12279 - protein, 7 aa, synthetic construct
  REGION 1..7: note = Description of Artificial Sequence: Synthetic peptide
DSRNVSG

SEQ ID NO: 12280 - protein, 7 aa, synthetic construct
  REGION 1..7: note = Description of Artificial Sequence: Synthetic peptide
DHRSEKS

SEQ ID NO: 12281 - protein, 7 aa, synthetic construct
  REGION 1..7: note = Description of Artificial Sequence: Synthetic peptide
DVDNQKK

SEQ ID NO: 12282 - protein, 7 aa, synthetic construct
  REGION 1..7: note = Description of Artificial Sequence: Synthetic peptide
AEGTGRV

SEQ ID NO: 12283 - protein, 7 aa, synthetic construct
  REGION 1..7: note = Description of Artificial Sequence: Synthetic peptide
MSGQDQK

SEQ ID NO: 12284 - protein, 7 aa, synthetic construct
  REGION 1..7: note = Description of Artificial Sequence: Synthetic peptide
TTNGSMT

SEQ ID NO: 12285 - protein, 7 aa, synthetic construct
  REGION 1..7: note = Description of Artificial Sequence: Synthetic peptide
NVKSGSG

SEQ ID NO: 12286 - protein, 7 aa, synthetic construct
  REGION 1..7: note = Description of Artificial Sequence: Synthetic peptide
AAGAHAS

SEQ ID NO: 12287 - protein, 7 aa, synthetic construct
  REGION 1..7: note = Description of Artificial Sequence: Synthetic peptide
STNNSNV

SEQ ID NO: 12288 - protein, 7 aa, synthetic construct
  REGION 1..7: note = Description of Artificial Sequence: Synthetic peptide
HTQSSSG

SEQ ID NO: 12289 - protein, 7 aa, synthetic construct
  REGION 1..7: note = Description of Artificial Sequence: Synthetic peptide
EGVGPLR

SEQ ID NO: 12290 - protein, 7 aa, synthetic construct
  REGION 1..7: note = Description of Artificial Sequence: Synthetic peptide
AANGTNG

SEQ ID NO: 12291 - protein, 7 aa, synthetic construct
  REGION 1..7: note = Description of Artificial Sequence: Synthetic peptide
GSDRTRL

SEQ ID NO: 12292 - protein, 7 aa, synthetic construct
  REGION 1..7: note = Description of Artificial Sequence: Synthetic peptide
KASGNSS

SEQ ID NO: 12293 - protein, 7 aa, synthetic construct
  REGION 1..7: note = Description of Artificial Sequence: Synthetic peptide
ERHKVTE

SEQ ID NO: 12294 - protein, 7 aa, synthetic construct
  REGION 1..7: note = Description of Artificial Sequence: Synthetic peptide
ESGPNGS

SEQ ID NO: 12295 - protein, 7 aa, synthetic construct
  REGION 1..7: note = Description of Artificial Sequence: Synthetic peptide
NTATQGT

SEQ ID NO: 12296 - protein, 7 aa, synthetic construct
  REGION 1..7: note = Description of Artificial Sequence: Synthetic peptide
SVNGSNA

SEQ ID NO: 12297 - protein, 7 aa, synthetic construct
  REGION 1..7: note = Description of Artificial Sequence: Synthetic peptide
AANEAVR

SEQ ID NO: 12298 - protein, 7 aa, synthetic construct
  REGION 1..7: note = Description of Artificial Sequence: Synthetic peptide
QSNHKNT

SEQ ID NO: 12299 - protein, 7 aa, synthetic construct
  REGION 1..7: note = Description of Artificial Sequence: Synthetic peptide
SAHTGSS

SEQ ID NO: 12300 - protein, 7 aa, synthetic construct
  REGION 1..7: note = Description of Artificial Sequence: Synthetic peptide
MGNSQGM

SEQ ID NO: 12301 - protein, 7 aa, synthetic construct
  REGION 1..7: note = Description of Artificial Sequence: Synthetic peptide
NKETKAT

SEQ ID NO: 12302 - protein, 7 aa, synthetic construct
  REGION 1..7: note = Description of Artificial Sequence: Synthetic peptide
SHGTSSE

SEQ ID NO: 12303 - protein, 7 aa, synthetic construct
  REGION 1..7: note = Description of Artificial Sequence: Synthetic peptide
SHGSTSA

SEQ ID NO: 12304 - protein, 7 aa, synthetic construct
  REGION 1..7: note = Description of Artificial Sequence: Synthetic peptide
SLGQPST

SEQ ID NO: 12305 - protein, 7 aa, synthetic construct
  REGION 1..7: note = Description of Artificial Sequence: Synthetic peptide
SEASANR

SEQ ID NO: 12306 - protein, 7 aa, synthetic construct
  REGION 1..7: note = Description of Artificial Sequence: Synthetic peptide
INSDRSA

SEQ ID NO: 12307 - protein, 7 aa, synthetic construct
  REGION 1..7: note = Description of Artificial Sequence: Synthetic peptide
HPKSQGE

SEQ ID NO: 12308 - protein, 7 aa, synthetic construct
  REGION 1..7: note = Description of Artificial Sequence: Synthetic peptide
DDHTPRK

SEQ ID NO: 12309 - protein, 7 aa, synthetic construct
  REGION 1..7: note = Description of Artificial Sequence: Synthetic peptide
DRVVKSD

SEQ ID NO: 12310 - protein, 7 aa, synthetic construct
  REGION 1..7: note = Description of Artificial Sequence: Synthetic peptide
GRESAVT

SEQ ID NO: 12311 - protein, 7 aa, synthetic construct
  REGION 1..7: note = Description of Artificial Sequence: Synthetic peptide
GPNSSPQ

SEQ ID NO: 12312 - protein, 7 aa, synthetic construct
  REGION 1..7: note = Description of Artificial Sequence: Synthetic peptide
NVTKSSG

SEQ ID NO: 12313 - protein, 7 aa, synthetic construct
  REGION 1..7: note = Description of Artificial Sequence: Synthetic peptide
VQSTNTK

SEQ ID NO: 12314 - protein, 7 aa, synthetic construct
  REGION 1..7: note = Description of Artificial Sequence: Synthetic peptide
SASGSTT

SEQ ID NO: 12315 - protein, 7 aa, synthetic construct
  REGION 1..7: note = Description of Artificial Sequence: Synthetic peptide
GVKASMG

SEQ ID NO: 12316 - protein, 7 aa, synthetic construct
  REGION 1..7: note = Description of Artificial Sequence: Synthetic peptide
STVQKSG

SEQ ID NO: 12317 - protein, 7 aa, synthetic construct
  REGION 1..7: note = Description of Artificial Sequence: Synthetic peptide
GNNPSSV

SEQ ID NO: 12318 - protein, 7 aa, synthetic construct
  REGION 1..7: note = Description of Artificial Sequence: Synthetic peptide
QRTSSPE

SEQ ID NO: 12319 - protein, 7 aa, synthetic construct
  REGION 1..7: note = Description of Artificial Sequence: Synthetic peptide
TSAKSDG

SEQ ID NO: 12320 - protein, 7 aa, synthetic construct
  REGION 1..7: note = Description of Artificial Sequence: Synthetic peptide
SSAPNGG

SEQ ID NO: 12321 - protein, 7 aa, synthetic construct
  REGION 1..7: note = Description of Artificial Sequence: Synthetic peptide
LEGSNAK

SEQ ID NO: 12322 - protein, 7 aa, synthetic construct
  REGION 1..7: note = Description of Artificial Sequence: Synthetic peptide
GFEKERG

SEQ ID NO: 12323 - protein, 7 aa, synthetic construct
  REGION 1..7: note = Description of Artificial Sequence: Synthetic peptide
STGSALK

SEQ ID NO: 12324 - protein, 7 aa, synthetic construct
  REGION 1..7: note = Description of Artificial Sequence: Synthetic peptide
KSSEGTN

SEQ ID NO: 12325 - protein, 7 aa, synthetic construct
  REGION 1..7: note = Description of Artificial Sequence: Synthetic peptide
TGGPTNR

SEQ ID NO: 12326 - protein, 7 aa, synthetic construct
  REGION 1..7: note = Description of Artificial Sequence: Synthetic peptide
QATTPSQ

SEQ ID NO: 12327 - protein, 7 aa, synthetic construct
  REGION 1..7: note = Description of Artificial Sequence: Synthetic peptide
LNGASSH

SEQ ID NO: 12328 - protein, 7 aa, synthetic construct
  REGION 1..7: note = Description of Artificial Sequence: Synthetic peptide
DLTEKRT

SEQ ID NO: 12329 - protein, 7 aa, synthetic construct
  REGION 1..7: note = Description of Artificial Sequence: Synthetic peptide
NNGSSVS

SEQ ID NO: 12330 - protein, 7 aa, synthetic construct
  REGION 1..7: note = Description of Artificial Sequence: Synthetic peptide
TSHAPNT

SEQ ID NO: 12331 - protein, 7 aa, synthetic construct
  REGION 1..7: note = Description of Artificial Sequence: Synthetic peptide
GSAKAVA

SEQ ID NO: 12332 - protein, 7 aa, synthetic construct
  REGION 1..7: note = Description of Artificial Sequence: Synthetic peptide
SGNKPYT

SEQ ID NO: 12333 - protein, 7 aa, synthetic construct
  REGION 1..7: note = Description of Artificial Sequence: Synthetic peptide
DKIDKQV

SEQ ID NO: 12334 - protein, 7 aa, synthetic construct
  REGION 1..7: note = Description of Artificial Sequence: Synthetic peptide
NERSPVH

SEQ ID NO: 12335 - protein, 7 aa, synthetic construct
  REGION 1..7: note = Description of Artificial Sequence: Synthetic peptide
SNSPQKM

SEQ ID NO: 12336 - protein, 7 aa, synthetic construct
  REGION 1..7: note = Description of Artificial Sequence: Synthetic peptide
SAMNGTA

SEQ ID NO: 12337 - protein, 7 aa, synthetic construct
  REGION 1..7: note = Description of Artificial Sequence: Synthetic peptide
LDGHKSS

SEQ ID NO: 12338 - protein, 7 aa, synthetic construct
  REGION 1..7: note = Description of Artificial Sequence: Synthetic peptide
LDGHGQA

SEQ ID NO: 12339 - protein, 7 aa, synthetic construct
  REGION 1..7: note = Description of Artificial Sequence: Synthetic peptide
ESLTKSN

SEQ ID NO: 12340 - protein, 7 aa, synthetic construct
  REGION 1..7: note = Description of Artificial Sequence: Synthetic peptide
AMSSGGG

SEQ ID NO: 12341 - protein, 7 aa, synthetic construct
  REGION 1..7: note = Description of Artificial Sequence: Synthetic peptide
GNDKQMG

SEQ ID NO: 12342 - protein, 7 aa, synthetic construct
  REGION 1..7: note = Description of Artificial Sequence: Synthetic peptide
GASNSTR

SEQ ID NO: 12343 - protein, 7 aa, synthetic construct
  REGION 1..7: note = Description of Artificial Sequence: Synthetic peptide
GQVAGQA

SEQ ID NO: 12344 - protein, 7 aa, synthetic construct
  REGION 1..7: note = Description of Artificial Sequence: Synthetic peptide
GGTQTPP

SEQ ID NO: 12345 - protein, 7 aa, synthetic construct
  REGION 1..7: note = Description of Artificial Sequence: Synthetic peptide
GETNSRN

SEQ ID NO: 12346 - protein, 7 aa, synthetic construct
  REGION 1..7: note = Description of Artificial Sequence: Synthetic peptide
VSTPSAA

SEQ ID NO: 12347 - protein, 7 aa, synthetic construct
  REGION 1..7: note = Description of Artificial Sequence: Synthetic peptide
VGGSSVA

SEQ ID NO: 12348 - protein, 7 aa, synthetic construct
  REGION 1..7: note = Description of Artificial Sequence: Synthetic peptide
YGNSTPS

SEQ ID NO: 12349 - protein, 7 aa, synthetic construct
  REGION 1..7: note = Description of Artificial Sequence: Synthetic peptide
SEAEKTK

SEQ ID NO: 12350 - protein, 7 aa, synthetic construct
  REGION 1..7: note = Description of Artificial Sequence: Synthetic peptide
CTGNSNN

SEQ ID NO: 12351 - protein, 7 aa, synthetic construct
  REGION 1..7: note = Description of Artificial Sequence: Synthetic peptide
DATTPRS

SEQ ID NO: 12352 - protein, 7 aa, synthetic construct
  REGION 1..7: note = Description of Artificial Sequence: Synthetic peptide
QVKDHTL

SEQ ID NO: 12353 - protein, 7 aa, synthetic construct
  REGION 1..7: note = Description of Artificial Sequence: Synthetic peptide
IGSPNAR

SEQ ID NO: 12354 - protein, 7 aa, synthetic construct
  REGION 1..7: note = Description of Artificial Sequence: Synthetic peptide
LQGSPHN

SEQ ID NO: 12355 - protein, 7 aa, synthetic construct
  REGION 1..7: note = Description of Artificial Sequence: Synthetic peptide
GVASSQT

SEQ ID NO: 12356 - protein, 7 aa, synthetic construct
  REGION 1..7: note = Description of Artificial Sequence: Synthetic peptide
TALSGPK

SEQ ID NO: 12357 - protein, 7 aa, synthetic construct
  REGION 1..7: note = Description of Artificial Sequence: Synthetic peptide
SGANTNS

SEQ ID NO: 12358 - protein, 7 aa, synthetic construct
  REGION 1..7: note = Description of Artificial Sequence: Synthetic peptide
DTKEGVG

SEQ ID NO: 12359 - protein, 7 aa, synthetic construct
  REGION 1..7: note = Description of Artificial Sequence: Synthetic peptide
DTKNHPA

SEQ ID NO: 12360 - protein, 7 aa, synthetic construct
  REGION 1..7: note = Description of Artificial Sequence: Synthetic peptide
IQNDRSQ

SEQ ID NO: 12361 - protein, 7 aa, synthetic construct
  REGION 1..7: note = Description of Artificial Sequence: Synthetic peptide
MASPGSK

SEQ ID NO: 12362 - protein, 7 aa, synthetic construct
  REGION 1..7: note = Description of Artificial Sequence: Synthetic peptide
QRGHDQS

SEQ ID NO: 12363 - protein, 7 aa, synthetic construct
  REGION 1..7: note = Description of Artificial Sequence: Synthetic peptide
DGGSHIR

SEQ ID NO: 12364 - protein, 7 aa, synthetic construct
  REGION 1..7: note = Description of Artificial Sequence: Synthetic peptide
EVTPRST

SEQ ID NO: 12365 - protein, 7 aa, synthetic construct
  REGION 1..7: note = Description of Artificial Sequence: Synthetic peptide
GNNPGST

SEQ ID NO: 12366 - protein, 7 aa, synthetic construct
  REGION 1..7: note = Description of Artificial Sequence: Synthetic peptide
FGNSAAK

SEQ ID NO: 12367 - protein, 7 aa, synthetic construct
  REGION 1..7: note = Description of Artificial Sequence: Synthetic peptide
SSVNGNK

SEQ ID NO: 12368 - protein, 7 aa, synthetic construct
  REGION 1..7: note = Description of Artificial Sequence: Synthetic peptide
QSSPSSR

SEQ ID NO: 12369 - protein, 7 aa, synthetic construct
  REGION 1..7: note = Description of Artificial Sequence: Synthetic peptide
TQPQKQS

SEQ ID NO: 12370 - protein, 7 aa, synthetic construct
  REGION 1..7: note = Description of Artificial Sequence: Synthetic peptide
RADKPSL

SEQ ID NO: 12371 - protein, 7 aa, synthetic construct
  REGION 1..7: note = Description of Artificial Sequence: Synthetic peptide
AQPSHSQ

SEQ ID NO: 12372 - protein, 7 aa, synthetic construct
  REGION 1..7: note = Description of Artificial Sequence: Synthetic peptide
LTGTHSA

SEQ ID NO: 12373 - protein, 7 aa, synthetic construct
  REGION 1..7: note = Description of Artificial Sequence: Synthetic peptide
AAVSTPA

SEQ ID NO: 12374 - protein, 7 aa, synthetic construct
  REGION 1..7: note = Description of Artificial Sequence: Synthetic peptide
TVGDNRS

SEQ ID NO: 12375 - protein, 7 aa, synthetic construct
  REGION 1..7: note = Description of Artificial Sequence: Synthetic peptide
SDSSKAA

SEQ ID NO: 12376 - protein, 7 aa, synthetic construct
  REGION 1..7: note = Description of Artificial Sequence: Synthetic peptide
ERGHENG

SEQ ID NO: 12377 - protein, 7 aa, synthetic construct
  REGION 1..7: note = Description of Artificial Sequence: Synthetic peptide
DNVGVSR

SEQ ID NO: 12378 - protein, 7 aa, synthetic construct
  REGION 1..7: note = Description of Artificial Sequence: Synthetic peptide
GEGRVTT

SEQ ID NO: 12379 - protein, 7 aa, synthetic construct
  REGION 1..7: note = Description of Artificial Sequence: Synthetic peptide
SKNTPTA

SEQ ID NO: 12380 - protein, 7 aa, synthetic construct
  REGION 1..7: note = Description of Artificial Sequence: Synthetic peptide
DSGASKM

SEQ ID NO: 12381 - protein, 7 aa, synthetic construct
  REGION 1..7: note = Description of Artificial Sequence: Synthetic peptide
GQAKTLT

SEQ ID NO: 12382 - protein, 7 aa, synthetic construct
  REGION 1..7: note = Description of Artificial Sequence: Synthetic peptide
DSGNTTR

SEQ ID NO: 12383 - protein, 7 aa, synthetic construct
  REGION 1..7: note = Description of Artificial Sequence: Synthetic peptide
NLSTNKD

SEQ ID NO: 12384 - protein, 7 aa, synthetic construct
  REGION 1..7: note = Description of Artificial Sequence: Synthetic peptide
NGSSQAN

SEQ ID NO: 12385 - protein, 7 aa, synthetic construct
  REGION 1..7: note = Description of Artificial Sequence: Synthetic peptide
TMSDRPT

SEQ ID NO: 12386 - protein, 7 aa, synthetic construct
  REGION 1..7: note = Description of Artificial Sequence: Synthetic peptide
GNNPSAR

SEQ ID NO: 12387 - protein, 7 aa, synthetic construct
  REGION 1..7: note = Description of Artificial Sequence: Synthetic peptide
VGNPGAG

SEQ ID NO: 12388 - protein, 7 aa, synthetic construct
  REGION 1..7: note = Description of Artificial Sequence: Synthetic peptide
YRESSSV

SEQ ID NO: 12389 - protein, 7 aa, synthetic construct
  REGION 1..7: note = Description of Artificial Sequence: Synthetic peptide
TSSGQNC

SEQ ID NO: 12390 - protein, 7 aa, synthetic construct
  REGION 1..7: note = Description of Artificial Sequence: Synthetic peptide
TPSPNTK

SEQ ID NO: 12391 - protein, 7 aa, synthetic construct
  REGION 1..7: note = Description of Artificial Sequence: Synthetic peptide
TQRKPTE

SEQ ID NO: 12392 - protein, 7 aa, synthetic construct
  REGION 1..7: note = Description of Artificial Sequence: Synthetic peptide
SSNSSPR

SEQ ID NO: 12393 - protein, 7 aa, synthetic construct
  REGION 1..7: note = Description of Artificial Sequence: Synthetic peptide
TSAATYN

SEQ ID NO: 12394 - protein, 7 aa, synthetic construct
  REGION 1..7: note = Description of Artificial Sequence: Synthetic peptide
LTESKPR

SEQ ID NO: 12395 - protein, 7 aa, synthetic construct
  REGION 1..7: note = Description of Artificial Sequence: Synthetic peptide
GSLPNGS

SEQ ID NO: 12396 - protein, 7 aa, synthetic construct
  REGION 1..7: note = Description of Artificial Sequence: Synthetic peptide
TTSDPAR

SEQ ID NO: 12397 - protein, 7 aa, synthetic construct
  REGION 1..7: note = Description of Artificial Sequence: Synthetic peptide
IPSNSPS

SEQ ID NO: 12398 - protein, 7 aa, synthetic construct
  REGION 1..7: note = Description of Artificial Sequence: Synthetic peptide
VSSGTTI

SEQ ID NO: 12399 - protein, 7 aa, synthetic construct
  REGION 1..7: note = Description of Artificial Sequence: Synthetic peptide
NNLGSQS

SEQ ID NO: 12400 - protein, 7 aa, synthetic construct
  REGION 1..7: note = Description of Artificial Sequence: Synthetic peptide
SDARNPT

SEQ ID NO: 12401 - protein, 7 aa, synthetic construct
  REGION 1..7: note = Description of Artificial Sequence: Synthetic peptide
LDDSKIR

SEQ ID NO: 12402 - protein, 7 aa, synthetic construct
  REGION 1..7: note = Description of Artificial Sequence: Synthetic peptide
ATSNQAS

SEQ ID NO: 12403 - protein, 7 aa, synthetic construct
  REGION 1..7: note = Description of Artificial Sequence: Synthetic peptide
APSQSVK

SEQ ID NO: 12404 - protein, 7 aa, synthetic construct
  REGION 1..7: note = Description of Artificial Sequence: Synthetic peptide
GRANDQS

SEQ ID NO: 12405 - protein, 7 aa, synthetic construct
  REGION 1..7: note = Description of Artificial Sequence: Synthetic peptide
GIDANQR

SEQ ID NO: 12406 - protein, 7 aa, synthetic construct
  REGION 1..7: note = Description of Artificial Sequence: Synthetic peptide
ANTSNAT

SEQ ID NO: 12407 - protein, 7 aa, synthetic construct
  REGION 1..7: note = Description of Artificial Sequence: Synthetic peptide
DTPPLKN

SEQ ID NO: 12408 - protein, 7 aa, synthetic construct
  REGION 1..7: note = Description of Artificial Sequence: Synthetic peptide
NPGPAMN

SEQ ID NO: 12409 - protein, 7 aa, synthetic construct
  REGION 1..7: note = Description of Artificial Sequence: Synthetic peptide
TGTNSLG

SEQ ID NO: 12410 - protein, 7 aa, synthetic construct
  REGION 1..7: note = Description of Artificial Sequence: Synthetic peptide
SVGTSPP

SEQ ID NO: 12411 - protein, 7 aa, synthetic construct
  REGION 1..7: note = Description of Artificial Sequence: Synthetic peptide
RHDASAG

SEQ ID NO: 12412 - protein, 7 aa, synthetic construct
  REGION 1..7: note = Description of Artificial Sequence: Synthetic peptide
TTQPTPS

SEQ ID NO: 12413 - protein, 7 aa, synthetic construct
  REGION 1..7: note = Description of Artificial Sequence: Synthetic peptide
SGMGSPK

SEQ ID NO: 12414 - protein, 7 aa, synthetic construct
  REGION 1..7: note = Description of Artificial Sequence: Synthetic peptide
HASEPRT

SEQ ID NO: 12415 - protein, 7 aa, synthetic construct
  REGION 1..7: note = Description of Artificial Sequence: Synthetic peptide
AGNDRRV

SEQ ID NO: 12416 - protein, 7 aa, synthetic construct
  REGION 1..7: note = Description of Artificial Sequence: Synthetic peptide
SDVKSEK

SEQ ID NO: 12417 - protein, 7 aa, synthetic construct
  REGION 1..7: note = Description of Artificial Sequence: Synthetic peptide
ESRVSQA

SEQ ID NO: 12418 - protein, 7 aa, synthetic construct
  REGION 1..7: note = Description of Artificial Sequence: Synthetic peptide
TTVNQSG

SEQ ID NO: 12419 - protein, 7 aa, synthetic construct
  REGION 1..7: note = Description of Artificial Sequence: Synthetic peptide
SHAERPS

SEQ ID NO: 12420 - protein, 7 aa, synthetic construct
  REGION 1..7: note = Description of Artificial Sequence: Synthetic peptide
SGAQGMH

SEQ ID NO: 12421 - protein, 7 aa, synthetic construct
  REGION 1..7: note = Description of Artificial Sequence: Synthetic peptide
SMSVKTE

SEQ ID NO: 12422 - protein, 7 aa, synthetic construct
  REGION 1..7: note = Description of Artificial Sequence: Synthetic peptide
QIEGRGA

SEQ ID NO: 12423 - protein, 7 aa, synthetic construct
  REGION 1..7: note = Description of Artificial Sequence: Synthetic peptide
DQQGHEK

SEQ ID NO: 12424 - protein, 7 aa, synthetic construct
  REGION 1..7: note = Description of Artificial Sequence: Synthetic peptide
GRANTPT

SEQ ID NO: 12425 - protein, 7 aa, synthetic construct
  REGION 1..7: note = Description of Artificial Sequence: Synthetic peptide
VNSQSAQ

SEQ ID NO: 12426 - protein, 7 aa, synthetic construct
  REGION 1..7: note = Description of Artificial Sequence: Synthetic peptide
CPPGEKS

SEQ ID NO: 12427 - protein, 7 aa, synthetic construct
  REGION 1..7: note = Description of Artificial Sequence: Synthetic peptide
NPSSHST

SEQ ID NO: 12428 - protein, 7 aa, synthetic construct
  REGION 1..7: note = Description of Artificial Sequence: Synthetic peptide
SNSAGSL

SEQ ID NO: 12429 - protein, 7 aa, synthetic construct
  REGION 1..7: note = Description of Artificial Sequence: Synthetic peptide
QGSRDPA

SEQ ID NO: 12430 - protein, 7 aa, synthetic construct
  REGION 1..7: note = Description of Artificial Sequence: Synthetic peptide
ERGDSAY

SEQ ID NO: 12431 - protein, 7 aa, synthetic construct
  REGION 1..7: note = Description of Artificial Sequence: Synthetic peptide
ANTMTTK

SEQ ID NO: 12432 - protein, 7 aa, synthetic construct
  REGION 1..7: note = Description of Artificial Sequence: Synthetic peptide
LGTNKDQ

SEQ ID NO: 12433 - protein, 7 aa, synthetic construct
  REGION 1..7: note = Description of Artificial Sequence: Synthetic peptide
SGQPTVL

SEQ ID NO: 12434 - protein, 7 aa, synthetic construct
  REGION 1..7: note = Description of Artificial Sequence: Synthetic peptide
TTASRGL

SEQ ID NO: 12435 - protein, 7 aa, synthetic construct
  REGION 1..7: note = Description of Artificial Sequence: Synthetic peptide
HNGSHTI

SEQ ID NO: 12436 - protein, 7 aa, synthetic construct
  REGION 1..7: note = Description of Artificial Sequence: Synthetic peptide
ANGATVA

SEQ ID NO: 12437 - protein, 7 aa, synthetic construct
  REGION 1..7: note = Description of Artificial Sequence: Synthetic peptide
GAKTGSV

SEQ ID NO: 12438 - protein, 7 aa, synthetic construct
  REGION 1..7: note = Description of Artificial Sequence: Synthetic peptide
SGSTSPR

SEQ ID NO: 12439 - protein, 7 aa, synthetic construct
  REGION 1..7: note = Description of Artificial Sequence: Synthetic peptide
ASQPNGI

SEQ ID NO: 12440 - protein, 7 aa, synthetic construct
  REGION 1..7: note = Description of Artificial Sequence: Synthetic peptide
GNTRTPP

SEQ ID NO: 12441 - protein, 7 aa, synthetic construct
  REGION 1..7: note = Description of Artificial Sequence: Synthetic peptide
GHNGSKV

SEQ ID NO: 12442 - protein, 7 aa, synthetic construct
  REGION 1..7: note = Description of Artificial Sequence: Synthetic peptide
YGDKSGA

SEQ ID NO: 12443 - protein, 7 aa, synthetic construct
  REGION 1..7: note = Description of Artificial Sequence: Synthetic peptide
NGQPSAL

SEQ ID NO: 12444 - protein, 7 aa, synthetic construct
  REGION 1..7: note = Description of Artificial Sequence: Synthetic peptide
NGRSTSS

SEQ ID NO: 12445 - protein, 7 aa, synthetic construct
  REGION 1..7: note = Description of Artificial Sequence: Synthetic peptide
NGSGGPS

SEQ ID NO: 12446 - protein, 7 aa, synthetic construct
  REGION 1..7: note = Description of Artificial Sequence: Synthetic peptide
NGHSSTQ

SEQ ID NO: 12447 - protein, 7 aa, synthetic construct
  REGION 1..7: note = Description of Artificial Sequence: Synthetic peptide
NNQASNK

SEQ ID NO: 12448 - protein, 7 aa, synthetic construct
  REGION 1..7: note = Description of Artificial Sequence: Synthetic peptide
NNDKNQQ

SEQ ID NO: 12449 - protein, 7 aa, synthetic construct
  REGION 1..7: note = Description of Artificial Sequence: Synthetic peptide
NTARSSA

SEQ ID NO: 12450 - protein, 7 aa, synthetic construct
  REGION 1..7: note = Description of Artificial Sequence: Synthetic peptide
TGASTGS

SEQ ID NO: 12451 - protein, 7 aa, synthetic construct
  REGION 1..7: note = Description of Artificial Sequence: Synthetic peptide
TVGATPI

SEQ ID NO: 12452 - protein, 7 aa, synthetic construct
  REGION 1..7: note = Description of Artificial Sequence: Synthetic peptide
TKAKGDH

SEQ ID NO: 12453 - protein, 7 aa, synthetic construct
  REGION 1..7: note = Description of Artificial Sequence: Synthetic peptide
TGTDKPG

SEQ ID NO: 12454 - protein, 7 aa, synthetic construct
  REGION 1..7: note = Description of Artificial Sequence: Synthetic peptide
STSPDSK

SEQ ID NO: 12455 - protein, 7 aa, synthetic construct
  REGION 1..7: note = Description of Artificial Sequence: Synthetic peptide
SQSSGHL

SEQ ID NO: 12456 - protein, 7 aa, synthetic construct
  REGION 1..7: note = Description of Artificial Sequence: Synthetic peptide
SPQSAIK

SEQ ID NO: 12457 - protein, 7 aa, synthetic construct
  REGION 1..7: note = Description of Artificial Sequence: Synthetic peptide
SDSPKLG

SEQ ID NO: 12458 - protein, 7 aa, synthetic construct
  REGION 1..7: note = Description of Artificial Sequence: Synthetic peptide
SGVANTA

SEQ ID NO: 12459 - protein, 7 aa, synthetic construct
  REGION 1..7: note = Description of Artificial Sequence: Synthetic peptide
SGVSAQN

SEQ ID NO: 12460 - protein, 7 aa, synthetic construct
  REGION 1..7: note = Description of Artificial Sequence: Synthetic peptide
IPNKSGG

SEQ ID NO: 12461 - protein, 7 aa, synthetic construct
  REGION 1..7: note = Description of Artificial Sequence: Synthetic peptide
IARDAQQ

SEQ ID NO: 12462 - protein, 7 aa, synthetic construct
  REGION 1..7: note = Description of Artificial Sequence: Synthetic peptide
QREDHSK

SEQ ID NO: 12463 - protein, 7 aa, synthetic construct
  REGION 1..7: note = Description of Artificial Sequence: Synthetic peptide
HTAQTPG

SEQ ID NO: 12464 - protein, 7 aa, synthetic construct
  REGION 1..7: note = Description of Artificial Sequence: Synthetic peptide
LGHNKSA

SEQ ID NO: 12465 - protein, 7 aa, synthetic construct
  REGION 1..7: note = Description of Artificial Sequence: Synthetic peptide
ESRSSVL

SEQ ID NO: 12466 - protein, 7 aa, synthetic construct
  REGION 1..7: note = Description of Artificial Sequence: Synthetic peptide
DNQPSSN

SEQ ID NO: 12467 - protein, 7 aa, synthetic construct
  REGION 1..7: note = Description of Artificial Sequence: Synthetic peptide
DHRETSK

SEQ ID NO: 12468 - protein, 7 aa, synthetic construct
  REGION 1..7: note = Description of Artificial Sequence: Synthetic peptide
EVPKTPS

SEQ ID NO: 12469 - protein, 7 aa, synthetic construct
  REGION 1..7: note = Description of Artificial Sequence: Synthetic peptide
DPKGSQG

SEQ ID NO: 12470 - protein, 7 aa, synthetic construct
  REGION 1..7: note = Description of Artificial Sequence: Synthetic peptide
DGRGSSL

SEQ ID NO: 12471 - protein, 7 aa, synthetic construct
  REGION 1..7: note = Description of Artificial Sequence: Synthetic peptide
AGPRDLQ

SEQ ID NO: 12472 - protein, 7 aa, synthetic construct
  REGION 1..7: note = Description of Artificial Sequence: Synthetic peptide
ASSSSPG

SEQ ID NO: 12473 - protein, 7 aa, synthetic construct
  REGION 1..7: note = Description of Artificial Sequence: Synthetic peptide
GNTGTPP

SEQ ID NO: 12474 - protein, 7 aa, synthetic construct
  REGION 1..7: note = Description of Artificial Sequence: Synthetic peptide
GSQKTVG

SEQ ID NO: 12475 - protein, 7 aa, synthetic construct
  REGION 1..7: note = Description of Artificial Sequence: Synthetic peptide
GVSSQPQ

SEQ ID NO: 12476 - protein, 7 aa, synthetic construct
  REGION 1..7: note = Description of Artificial Sequence: Synthetic peptide
GQGSSVV

SEQ ID NO: 12477 - protein, 7 aa, synthetic construct
  REGION 1..7: note = Description of Artificial Sequence: Synthetic peptide
VNSTPVK

SEQ ID NO: 12478 - protein, 7 aa, synthetic construct
  REGION 1..7: note = Description of Artificial Sequence: Synthetic peptide
VSNTQGQ

SEQ ID NO: 12479 - protein, 7 aa, synthetic construct
  REGION 1..7: note = Description of Artificial Sequence: Synthetic peptide
VGHPTAM

SEQ ID NO: 12480 - protein, 7 aa, synthetic construct
  REGION 1..7: note = Description of Artificial Sequence: Synthetic peptide
SMNQSSK

SEQ ID NO: 12481 - protein, 7 aa, synthetic construct
  REGION 1..7: note = Description of Artificial Sequence: Synthetic peptide
STLAGVN

SEQ ID NO: 12482 - protein, 7 aa, synthetic construct
  REGION 1..7: note = Description of Artificial Sequence: Synthetic peptide
SSQADIR

SEQ ID NO: 12483 - protein, 7 aa, synthetic construct
  REGION 1..7: note = Description of Artificial Sequence: Synthetic peptide
NSVGSMM

SEQ ID NO: 12484 - protein, 7 aa, synthetic construct
  REGION 1..7: note = Description of Artificial Sequence: Synthetic peptide
RTDRGSG

SEQ ID NO: 12485 - protein, 7 aa, synthetic construct
  REGION 1..7: note = Description of Artificial Sequence: Synthetic peptide
LGGQHPS

SEQ ID NO: 12486 - protein, 7 aa, synthetic construct
  REGION 1..7: note = Description of Artificial Sequence: Synthetic peptide
QGNGSVV

SEQ ID NO: 12487 - protein, 7 aa, synthetic construct
  REGION 1..7: note = Description of Artificial Sequence: Synthetic peptide
HKDTSTA

SEQ ID NO: 12488 - protein, 7 aa, synthetic construct
  REGION 1..7: note = Description of Artificial Sequence: Synthetic peptide
DTAKINV

SEQ ID NO: 12489 - protein, 7 aa, synthetic construct
  REGION 1..7: note = Description of Artificial Sequence: Synthetic peptide
VASQANA

SEQ ID NO: 12490 - protein, 7 aa, synthetic construct
  REGION 1..7: note = Description of Artificial Sequence: Synthetic peptide
VSSQTVR

SEQ ID NO: 12491 - protein, 7 aa, synthetic construct
  REGION 1..7: note = Description of Artificial Sequence: Synthetic peptide
NQTKLGQ

SEQ ID NO: 12492 - protein, 7 aa, synthetic construct
  REGION 1..7: note = Description of Artificial Sequence: Synthetic peptide
SDSVKDS

SEQ ID NO: 12493 - protein, 7 aa, synthetic construct
  REGION 1..7: note = Description of Artificial Sequence: Synthetic peptide
ASAGTHT

SEQ ID NO: 12494 - protein, 7 aa, synthetic construct
  REGION 1..7: note = Description of Artificial Sequence: Synthetic peptide
GEKTGVA

SEQ ID NO: 12495 - protein, 7 aa, synthetic construct
  REGION 1..7: note = Description of Artificial Sequence: Synthetic peptide
TQSKAMA

SEQ ID NO: 12496 - protein, 7 aa, synthetic construct
  REGION 1..7: note = Description of Artificial Sequence: Synthetic peptide
SNDTRRT

SEQ ID NO: 12497 - protein, 7 aa, synthetic construct
  REGION 1..7: note = Description of Artificial Sequence: Synthetic peptide
MGSREVM

SEQ ID NO: 12498 - protein, 7 aa, synthetic construct
  REGION 1..7: note = Description of Artificial Sequence: Synthetic peptide
HSSGTLS

SEQ ID NO: 12499 - protein, 7 aa, synthetic construct
  REGION 1..7: note = Description of Artificial Sequence: Synthetic peptide
LQGSNAS

SEQ ID NO: 12500 - protein, 7 aa, synthetic construct
  REGION 1..7: note = Description of Artificial Sequence: Synthetic peptide
DPGNSLR

SEQ ID NO: 12501 - protein, 7 aa, synthetic construct
  REGION 1..7: note = Description of Artificial Sequence: Synthetic peptide
DVQTPPR

SEQ ID NO: 12502 - protein, 7 aa, synthetic construct
  REGION 1..7: note = Description of Artificial Sequence: Synthetic peptide
ERMNTQG

SEQ ID NO: 12503 - protein, 7 aa, synthetic construct
  REGION 1..7: note = Description of Artificial Sequence: Synthetic peptide
DGGEAQR

SEQ ID NO: 12504 - protein, 7 aa, synthetic construct
  REGION 1..7: note = Description of Artificial Sequence: Synthetic peptide
GTNDSRV

SEQ ID NO: 12505 - protein, 7 aa, synthetic construct
  REGION 1..7: note = Description of Artificial Sequence: Synthetic peptide
ESLSTSR

SEQ ID NO: 12506 - protein, 7 aa, synthetic construct
  REGION 1..7: note = Description of Artificial Sequence: Synthetic peptide
TTRTPTA

SEQ ID NO: 12507 - protein, 7 aa, synthetic construct
  REGION 1..7: note = Description of Artificial Sequence: Synthetic peptide
GGDKPTS

SEQ ID NO: 12508 - protein, 7 aa, synthetic construct
  REGION 1..7: note = Description of Artificial Sequence: Synthetic peptide
KELSGTT

SEQ ID NO: 12509 - protein, 7 aa, synthetic construct
  REGION 1..7: note = Description of Artificial Sequence: Synthetic peptide
TNSGHPP

SEQ ID NO: 12510 - protein, 7 aa, synthetic construct
  REGION 1..7: note = Description of Artificial Sequence: Synthetic peptide
TEQSRSV

SEQ ID NO: 12511 - protein, 7 aa, synthetic construct
  REGION 1..7: note = Description of Artificial Sequence: Synthetic peptide
SSDGGNR

SEQ ID NO: 12512 - protein, 7 aa, synthetic construct
  REGION 1..7: note = Description of Artificial Sequence: Synthetic peptide
ELPKTGR

SEQ ID NO: 12513 - protein, 7 aa, synthetic construct
  REGION 1..7: note = Description of Artificial Sequence: Synthetic peptide
GDTTPRG

SEQ ID NO: 12514 - protein, 7 aa, synthetic construct
  REGION 1..7: note = Description of Artificial Sequence: Synthetic peptide
VTSDKAA

SEQ ID NO: 12515 - protein, 7 aa, synthetic construct
  REGION 1..7: note = Description of Artificial Sequence: Synthetic peptide
VGSTANE

SEQ ID NO: 12516 - protein, 7 aa, synthetic construct
  REGION 1..7: note = Description of Artificial Sequence: Synthetic peptide
SLNSTGG

SEQ ID NO: 12517 - protein, 7 aa, synthetic construct
  REGION 1..7: note = Description of Artificial Sequence: Synthetic peptide
SSGGSMR

SEQ ID NO: 12518 - protein, 7 aa, synthetic construct
  REGION 1..7: note = Description of Artificial Sequence: Synthetic peptide
FVEDRTK

SEQ ID NO: 12519 - protein, 7 aa, synthetic construct
  REGION 1..7: note = Description of Artificial Sequence: Synthetic peptide
NDARPGI

SEQ ID NO: 12520 - protein, 7 aa, synthetic construct
  REGION 1..7: note = Description of Artificial Sequence: Synthetic peptide
GAPTAAT

SEQ ID NO: 12521 - protein, 7 aa, synthetic construct
  REGION 1..7: note = Description of Artificial Sequence: Synthetic peptide
GIGERRG

SEQ ID NO: 12522 - protein, 7 aa, synthetic construct
  REGION 1..7: note = Description of Artificial Sequence: Synthetic peptide
NPSTNSP

SEQ ID NO: 12523 - protein, 7 aa, synthetic construct
  REGION 1..7: note = Description of Artificial Sequence: Synthetic peptide
THAGSRG

SEQ ID NO: 12524 - protein, 7 aa, synthetic construct
  REGION 1..7: note = Description of Artificial Sequence: Synthetic peptide
TLDNTNR

SEQ ID NO: 12525 - protein, 7 aa, synthetic construct
  REGION 1..7: note = Description of Artificial Sequence: Synthetic peptide
RSDTNQG

SEQ ID NO: 12526 - protein, 7 aa, synthetic construct
  REGION 1..7: note = Description of Artificial Sequence: Synthetic peptide
ALKSGNA

SEQ ID NO: 12527 - protein, 7 aa, synthetic construct
  REGION 1..7: note = Description of Artificial Sequence: Synthetic peptide
NAGQRSS

SEQ ID NO: 12528 - protein, 7 aa, synthetic construct
  REGION 1..7: note = Description of Artificial Sequence: Synthetic peptide
HPGPTQG

SEQ ID NO: 12529 - protein, 7 aa, synthetic construct
  REGION 1..7: note = Description of Artificial Sequence: Synthetic peptide
SRTASTE

SEQ ID NO: 12530 - protein, 7 aa, synthetic construct
  REGION 1..7: note = Description of Artificial Sequence: Synthetic peptide
TPGSTVL

SEQ ID NO: 12531 - protein, 7 aa, synthetic construct
  REGION 1..7: note = Description of Artificial Sequence: Synthetic peptide
NLGQSNK

SEQ ID NO: 12532 - protein, 7 aa, synthetic construct
  REGION 1..7: note = Description of Artificial Sequence: Synthetic peptide
TAGKNSG

SEQ ID NO: 12533 - protein, 7 aa, synthetic construct
  REGION 1..7: note = Description of Artificial Sequence: Synthetic peptide
SPGGSVS

SEQ ID NO: 12534 - protein, 7 aa, synthetic construct
  REGION 1..7: note = Description of Artificial Sequence: Synthetic peptide
SVSAATN

SEQ ID NO: 12535 - protein, 7 aa, synthetic construct
  REGION 1..7: note = Description of Artificial Sequence: Synthetic peptide
SVGGNAL

SEQ ID NO: 12536 - protein, 7 aa, synthetic construct
  REGION 1..7: note = Description of Artificial Sequence: Synthetic peptide
MANTAVA

SEQ ID NO: 12537 - protein, 7 aa, synthetic construct
  REGION 1..7: note = Description of Artificial Sequence: Synthetic peptide
QEAGSKA

SEQ ID NO: 12538 - protein, 7 aa, synthetic construct
  REGION 1..7: note = Description of Artificial Sequence: Synthetic peptide
LVQKDNS

SEQ ID NO: 12539 - protein, 7 aa, synthetic construct
  REGION 1..7: note = Description of Artificial Sequence: Synthetic peptide
DTTGNRN

SEQ ID NO: 12540 - protein, 7 aa, synthetic construct
  REGION 1..7: note = Description of Artificial Sequence: Synthetic peptide
GTEGTHR

SEQ ID NO: 12541 - protein, 7 aa, synthetic construct
  REGION 1..7: note = Description of Artificial Sequence: Synthetic peptide
GTVSSGG

SEQ ID NO: 12542 - protein, 7 aa, synthetic construct
  REGION 1..7: note = Description of Artificial Sequence: Synthetic peptide
VEGNKGY

SEQ ID NO: 12543 - protein, 7 aa, synthetic construct
  REGION 1..7: note = Description of Artificial Sequence: Synthetic peptide
LMTSSPA

SEQ ID NO: 12544 - protein, 7 aa, synthetic construct
  REGION 1..7: note = Description of Artificial Sequence: Synthetic peptide
EKSTPSS

SEQ ID NO: 12545 - protein, 7 aa, synthetic construct
  REGION 1..7: note = Description of Artificial Sequence: Synthetic peptide
ADASRAS

SEQ ID NO: 12546 - protein, 7 aa, synthetic construct
  REGION 1..7: note = Description of Artificial Sequence: Synthetic peptide
AGTSPSV

SEQ ID NO: 12547 - protein, 7 aa, synthetic construct
  REGION 1..7: note = Description of Artificial Sequence: Synthetic peptide
TKEGAGA

SEQ ID NO: 12548 - protein, 7 aa, synthetic construct
  REGION 1..7: note = Description of Artificial Sequence: Synthetic peptide
SSGQPSH

SEQ ID NO: 12549 - protein, 7 aa, synthetic construct
  REGION 1..7: note = Description of Artificial Sequence: Synthetic peptide
SGSPRDG

SEQ ID NO: 12550 - protein, 7 aa, synthetic construct
  REGION 1..7: note = Description of Artificial Sequence: Synthetic peptide
QQKATVE

SEQ ID NO: 12551 - protein, 7 aa, synthetic construct
  REGION 1..7: note = Description of Artificial Sequence: Synthetic peptide
DHPSRDK

SEQ ID NO: 12552 - protein, 7 aa, synthetic construct
  REGION 1..7: note = Description of Artificial Sequence: Synthetic peptide
DAPGKVT

SEQ ID NO: 12553 - protein, 7 aa, synthetic construct
  REGION 1..7: note = Description of Artificial Sequence: Synthetic peptide
DYGEPKS

SEQ ID NO: 12554 - protein, 7 aa, synthetic construct
  REGION 1..7: note = Description of Artificial Sequence: Synthetic peptide
DQSSKQH

SEQ ID NO: 12555 - protein, 7 aa, synthetic construct
  REGION 1..7: note = Description of Artificial Sequence: Synthetic peptide
VEGNPPK

SEQ ID NO: 12556 - protein, 7 aa, synthetic construct
  REGION 1..7: note = Description of Artificial Sequence: Synthetic peptide
FTGGTGS

SEQ ID NO: 12557 - protein, 7 aa, synthetic construct
  REGION 1..7: note = Description of Artificial Sequence: Synthetic peptide
LGHPKNS

SEQ ID NO: 12558 - protein, 7 aa, synthetic construct
  REGION 1..7: note = Description of Artificial Sequence: Synthetic peptide
KTGTSSN

SEQ ID NO: 12559 - protein, 7 aa, synthetic construct
  REGION 1..7: note = Description of Artificial Sequence: Synthetic peptide
SQSNAAT

SEQ ID NO: 12560 - protein, 7 aa, synthetic construct
  REGION 1..7: note = Description of Artificial Sequence: Synthetic peptide
TATKENI

SEQ ID NO: 12561 - protein, 7 aa, synthetic construct
  REGION 1..7: note = Description of Artificial Sequence: Synthetic peptide
SGLKPLN

SEQ ID NO: 12562 - protein, 7 aa, synthetic construct
  REGION 1..7: note = Description of Artificial Sequence: Synthetic peptide
EAVKPAT

SEQ ID NO: 12563 - protein, 7 aa, synthetic construct
  REGION 1..7: note = Description of Artificial Sequence: Synthetic peptide
DGLTNHI

SEQ ID NO: 12564 - protein, 7 aa, synthetic construct
  REGION 1..7: note = Description of Artificial Sequence: Synthetic peptide
ANETRPP

SEQ ID NO: 12565 - protein, 7 aa, synthetic construct
  REGION 1..7: note = Description of Artificial Sequence: Synthetic peptide
GGGQNSL

SEQ ID NO: 12566 - protein, 7 aa, synthetic construct
  REGION 1..7: note = Description of Artificial Sequence: Synthetic peptide
VQSEART

SEQ ID NO: 12567 - protein, 7 aa, synthetic construct
  REGION 1..7: note = Description of Artificial Sequence: Synthetic peptide
SHGSPSV

SEQ ID NO: 12568 - protein, 7 aa, synthetic construct
  REGION 1..7: note = Description of Artificial Sequence: Synthetic peptide
NTEAVLK

SEQ ID NO: 12569 - protein, 7 aa, synthetic construct
  REGION 1..7: note = Description of Artificial Sequence: Synthetic peptide
TSGGTVP

SEQ ID NO: 12570 - protein, 7 aa, synthetic construct
  REGION 1..7: note = Description of Artificial Sequence: Synthetic peptide
MATKTSV

SEQ ID NO: 12571 - protein, 7 aa, synthetic construct
  REGION 1..7: note = Description of Artificial Sequence: Synthetic peptide
ASGSSVL

SEQ ID NO: 12572 - protein, 7 aa, synthetic construct
  REGION 1..7: note = Description of Artificial Sequence: Synthetic peptide
ASNTITK

SEQ ID NO: 12573 - protein, 7 aa, synthetic construct
  REGION 1..7: note = Description of Artificial Sequence: Synthetic peptide
GSVDIQK

SEQ ID NO: 12574 - protein, 7 aa, synthetic construct
  REGION 1..7: note = Description of Artificial Sequence: Synthetic peptide
VSTNQVT

SEQ ID NO: 12575 - protein, 7 aa, synthetic construct
  REGION 1..7: note = Description of Artificial Sequence: Synthetic peptide
NAGASKN

SEQ ID NO: 12576 - protein, 7 aa, synthetic construct
  REGION 1..7: note = Description of Artificial Sequence: Synthetic peptide
TSHTKPP

SEQ ID NO: 12577 - protein, 7 aa, synthetic construct
  REGION 1..7: note = Description of Artificial Sequence: Synthetic peptide
SPGDGRR

SEQ ID NO: 12578 - protein, 7 aa, synthetic construct
  REGION 1..7: note = Description of Artificial Sequence: Synthetic peptide
ASEGKYL

SEQ ID NO: 12579 - protein, 7 aa, synthetic construct
  REGION 1..7: note = Description of Artificial Sequence: Synthetic peptide
GVSKDTN

SEQ ID NO: 12580 - protein, 7 aa, synthetic construct
  REGION 1..7: note = Description of Artificial Sequence: Synthetic peptide
SLGGGSG

SEQ ID NO: 12581 - protein, 7 aa, synthetic construct
  REGION 1..7: note = Description of Artificial Sequence: Synthetic peptide
SLSGQRE

SEQ ID NO: 12582 - protein, 7 aa, synthetic construct
  REGION 1..7: note = Description of Artificial Sequence: Synthetic peptide
SGTSRTV

SEQ ID NO: 12583 - protein, 7 aa, synthetic construct
  REGION 1..7: note = Description of Artificial Sequence: Synthetic peptide
GSATASS

SEQ ID NO: 12584 - protein, 7 aa, synthetic construct
  REGION 1..7: note = Description of Artificial Sequence: Synthetic peptide
DTGTHSN

SEQ ID NO: 12585 - protein, 7 aa, synthetic construct
  REGION 1..7: note = Description of Artificial Sequence: Synthetic peptide
NNGGVNA

SEQ ID NO: 12586 - protein, 7 aa, synthetic construct
  REGION 1..7: note = Description of Artificial Sequence: Synthetic peptide
NTPTTQG

SEQ ID NO: 12587 - protein, 7 aa, synthetic construct
  REGION 1..7: note = Description of Artificial Sequence: Synthetic peptide
LNETRPS

SEQ ID NO: 12588 - protein, 7 aa, synthetic construct
  REGION 1..7: note = Description of Artificial Sequence: Synthetic peptide
DAPKQVA

SEQ ID NO: 12589 - protein, 7 aa, synthetic construct
  REGION 1..7: note = Description of Artificial Sequence: Synthetic peptide
EGRNASG

SEQ ID NO: 12590 - protein, 7 aa, synthetic construct
  REGION 1..7: note = Description of Artificial Sequence: Synthetic peptide
AGTQNKA

SEQ ID NO: 12591 - protein, 7 aa, synthetic construct
  REGION 1..7: note = Description of Artificial Sequence: Synthetic peptide
GLGAPGT

SEQ ID NO: 12592 - protein, 7 aa, synthetic construct
  REGION 1..7: note = Description of Artificial Sequence: Synthetic peptide
GSASKDV

SEQ ID NO: 12593 - protein, 7 aa, synthetic construct
  REGION 1..7: note = Description of Artificial Sequence: Synthetic peptide
SNSKTLQ

SEQ ID NO: 12594 - protein, 7 aa, synthetic construct
  REGION 1..7: note = Description of Artificial Sequence: Synthetic peptide
TQGNGIQ

SEQ ID NO: 12595 - protein, 7 aa, synthetic construct
  REGION 1..7: note = Description of Artificial Sequence: Synthetic peptide
NRVNGNT

SEQ ID NO: 12596 - protein, 7 aa, synthetic construct
  REGION 1..7: note = Description of Artificial Sequence: Synthetic peptide
TGMQGSH

SEQ ID NO: 12597 - protein, 7 aa, synthetic construct
  REGION 1..7: note = Description of Artificial Sequence: Synthetic peptide
TMDSKGQ

SEQ ID NO: 12598 - protein, 7 aa, synthetic construct
  REGION 1..7: note = Description of Artificial Sequence: Synthetic peptide
SSSGGIT

SEQ ID NO: 12599 - protein, 7 aa, synthetic construct
  REGION 1..7: note = Description of Artificial Sequence: Synthetic peptide
SDQPSRG

SEQ ID NO: 12600 - protein, 7 aa, synthetic construct
  REGION 1..7: note = Description of Artificial Sequence: Synthetic peptide
SGSPGIQ

SEQ ID NO: 12601 - protein, 7 aa, synthetic construct
  REGION 1..7: note = Description of Artificial Sequence: Synthetic peptide
MGDKSLY

SEQ ID NO: 12602 - protein, 7 aa, synthetic construct
  REGION 1..7: note = Description of Artificial Sequence: Synthetic peptide
HHSEKRD

SEQ ID NO: 12603 - protein, 7 aa, synthetic construct
  REGION 1..7: note = Description of Artificial Sequence: Synthetic peptide
LQGSSQP

SEQ ID NO: 12604 - protein, 7 aa, synthetic construct
  REGION 1..7: note = Description of Artificial Sequence: Synthetic peptide
ENTSIPK

SEQ ID NO: 12605 - protein, 7 aa, synthetic construct
  REGION 1..7: note = Description of Artificial Sequence: Synthetic peptide
EGVSKAD

SEQ ID NO: 12606 - protein, 7 aa, synthetic construct
  REGION 1..7: note = Description of Artificial Sequence: Synthetic peptide
DKSSSRE

SEQ ID NO: 12607 - protein, 7 aa, synthetic construct
  REGION 1..7: note = Description of Artificial Sequence: Synthetic peptide
GTSAGGS

SEQ ID NO: 12608 - protein, 7 aa, synthetic construct
  REGION 1..7: note = Description of Artificial Sequence: Synthetic peptide
VTSKGTN

SEQ ID NO: 12609 - protein, 7 aa, synthetic construct
  REGION 1..7: note = Description of Artificial Sequence: Synthetic peptide
CTDGKSA

SEQ ID NO: 12610 - protein, 7 aa, synthetic construct
  REGION 1..7: note = Description of Artificial Sequence: Synthetic peptide
EVTNKTL

SEQ ID NO: 12611 - protein, 7 aa, synthetic construct
  REGION 1..7: note = Description of Artificial Sequence: Synthetic peptide
NSHTAST

SEQ ID NO: 12612 - protein, 7 aa, synthetic construct
  REGION 1..7: note = Description of Artificial Sequence: Synthetic peptide
LTTSTGG

SEQ ID NO: 12613 - protein, 7 aa, synthetic construct
  REGION 1..7: note = Description of Artificial Sequence: Synthetic peptide
VASATST

SEQ ID NO: 12614 - protein, 7 aa, synthetic construct
  REGION 1..7: note = Description of Artificial Sequence: Synthetic peptide
TSTATSI

SEQ ID NO: 12615 - protein, 7 aa, synthetic construct
  REGION 1..7: note = Description of Artificial Sequence: Synthetic peptide
ISTNTSH

SEQ ID NO: 12616 - protein, 7 aa, synthetic construct
  REGION 1..7: note = Description of Artificial Sequence: Synthetic peptide
GESNHHT

SEQ ID NO: 12617 - protein, 7 aa, synthetic construct
  REGION 1..7: note = Description of Artificial Sequence: Synthetic peptide
VQTQTAA

SEQ ID NO: 12618 - protein, 7 aa, synthetic construct
  REGION 1..7: note = Description of Artificial Sequence: Synthetic peptide
SNAVKSS

SEQ ID NO: 12619 - protein, 7 aa, synthetic construct
  REGION 1..7: note = Description of Artificial Sequence: Synthetic peptide
SVTTPRN

SEQ ID NO: 12620 - protein, 7 aa, synthetic construct
  REGION 1..7: note = Description of Artificial Sequence: Synthetic peptide
NGGSTLS

SEQ ID NO: 12621 - protein, 7 aa, synthetic construct
  REGION 1..7: note = Description of Artificial Sequence: Synthetic peptide
TAEGART

SEQ ID NO: 12622 - protein, 7 aa, synthetic construct
  REGION 1..7: note = Description of Artificial Sequence: Synthetic peptide
IQASANK

SEQ ID NO: 12623 - protein, 7 aa, synthetic construct
  REGION 1..7: note = Description of Artificial Sequence: Synthetic peptide
GATHGSS

SEQ ID NO: 12624 - protein, 7 aa, synthetic construct
  REGION 1..7: note = Description of Artificial Sequence: Synthetic peptide
VSSGTLG

SEQ ID NO: 12625 - protein, 7 aa, synthetic construct
  REGION 1..7: note = Description of Artificial Sequence: Synthetic peptide
SIGAANA

SEQ ID NO: 12626 - protein, 7 aa, synthetic construct
  REGION 1..7: note = Description of Artificial Sequence: Synthetic peptide
SMAARPS

SEQ ID NO: 12627 - protein, 7 aa, synthetic construct
  REGION 1..7: note = Description of Artificial Sequence: Synthetic peptide
SANSTPG

SEQ ID NO: 12628 - protein, 7 aa, synthetic construct
  REGION 1..7: note = Description of Artificial Sequence: Synthetic peptide
SVSSSNM

SEQ ID NO: 12629 - protein, 7 aa, synthetic construct
  REGION 1..7: note = Description of Artificial Sequence: Synthetic peptide
VPSSSPT

SEQ ID NO: 12630 - protein, 7 aa, synthetic construct
  REGION 1..7: note = Description of Artificial Sequence: Synthetic peptide
TTSPPSS

SEQ ID NO: 12631 - protein, 7 aa, synthetic construct
  REGION 1..7: note = Description of Artificial Sequence: Synthetic peptide
TLSPDAK

SEQ ID NO: 12632 - protein, 7 aa, synthetic construct
  REGION 1..7: note = Description of Artificial Sequence: Synthetic peptide
GLPASNS

SEQ ID NO: 12633 - protein, 7 aa, synthetic construct
  REGION 1..7: note = Description of Artificial Sequence: Synthetic peptide
VSVKPES

SEQ ID NO: 12634 - protein, 7 aa, synthetic construct
  REGION 1..7: note = Description of Artificial Sequence: Synthetic peptide
VKSESQA

SEQ ID NO: 12635 - protein, 7 aa, synthetic construct
  REGION 1..7: note = Description of Artificial Sequence: Synthetic peptide
LNSTSLS

SEQ ID NO: 12636 - protein, 7 aa, synthetic construct
  REGION 1..7: note = Description of Artificial Sequence: Synthetic peptide
KQTQSPT

SEQ ID NO: 12637 - protein, 7 aa, synthetic construct
  REGION 1..7: note = Description of Artificial Sequence: Synthetic peptide
HAQRTNE

SEQ ID NO: 12638 - protein, 7 aa, synthetic construct
  REGION 1..7: note = Description of Artificial Sequence: Synthetic peptide
GTGRERS

SEQ ID NO: 12639 - protein, 7 aa, synthetic construct
  REGION 1..7: note = Description of Artificial Sequence: Synthetic peptide
ASTSTTS

SEQ ID NO: 12640 - protein, 7 aa, synthetic construct
  REGION 1..7: note = Description of Artificial Sequence: Synthetic peptide
TGQRDVT

SEQ ID NO: 12641 - protein, 7 aa, synthetic construct
  REGION 1..7: note = Description of Artificial Sequence: Synthetic peptide
SGVGTVV

SEQ ID NO: 12642 - protein, 7 aa, synthetic construct
  REGION 1..7: note = Description of Artificial Sequence: Synthetic peptide
HAASPSI

SEQ ID NO: 12643 - protein, 7 aa, synthetic construct
  REGION 1..7: note = Description of Artificial Sequence: Synthetic peptide
GTGTDSH

SEQ ID NO: 12644 - protein, 7 aa, synthetic construct
  REGION 1..7: note = Description of Artificial Sequence: Synthetic peptide
GSASSNG

SEQ ID NO: 12645 - protein, 7 aa, synthetic construct
  REGION 1..7: note = Description of Artificial Sequence: Synthetic peptide
SQSSQSA

SEQ ID NO: 12646 - protein, 7 aa, synthetic construct
  REGION 1..7: note = Description of Artificial Sequence: Synthetic peptide
SESVKGS

SEQ ID NO: 12647 - protein, 7 aa, synthetic construct
  REGION 1..7: note = Description of Artificial Sequence: Synthetic peptide
LNSSPTH

SEQ ID NO: 12648 - protein, 7 aa, synthetic construct
  REGION 1..7: note = Description of Artificial Sequence: Synthetic peptide
DGKDRSP

SEQ ID NO: 12649 - protein, 7 aa, synthetic construct
  REGION 1..7: note = Description of Artificial Sequence: Synthetic peptide
AGVTERS

SEQ ID NO: 12650 - protein, 7 aa, synthetic construct
  REGION 1..7: note = Description of Artificial Sequence: Synthetic peptide
GNATTQA

SEQ ID NO: 12651 - protein, 7 aa, synthetic construct
  REGION 1..7: note = Description of Artificial Sequence: Synthetic peptide
GTARSTL

SEQ ID NO: 12652 - protein, 7 aa, synthetic construct
  REGION 1..7: note = Description of Artificial Sequence: Synthetic peptide
GSDKPQN

SEQ ID NO: 12653 - protein, 7 aa, synthetic construct
  REGION 1..7: note = Description of Artificial Sequence: Synthetic peptide
VKNGSSN

SEQ ID NO: 12654 - protein, 7 aa, synthetic construct
  REGION 1..7: note = Description of Artificial Sequence: Synthetic peptide
VTDRPSV

SEQ ID NO: 12655 - protein, 7 aa, synthetic construct
  REGION 1..7: note = Description of Artificial Sequence: Synthetic peptide
STGSKQD

SEQ ID NO: 12656 - protein, 7 aa, synthetic construct
  REGION 1..7: note = Description of Artificial Sequence: Synthetic peptide
SQSSGVR

SEQ ID NO: 12657 - protein, 7 aa, synthetic construct
  REGION 1..7: note = Description of Artificial Sequence: Synthetic peptide
GPGEKVQ

SEQ ID NO: 12658 - protein, 7 aa, synthetic construct
  REGION 1..7: note = Description of Artificial Sequence: Synthetic peptide
SQDRGSQ

SEQ ID NO: 12659 - protein, 7 aa, synthetic construct
  REGION 1..7: note = Description of Artificial Sequence: Synthetic peptide
QSSGTGT

SEQ ID NO: 12660 - protein, 7 aa, synthetic construct
  REGION 1..7: note = Description of Artificial Sequence: Synthetic peptide
GSVDRSS

SEQ ID NO: 12661 - protein, 7 aa, synthetic construct
  REGION 1..7: note = Description of Artificial Sequence: Synthetic peptide
TTDPASR

SEQ ID NO: 12662 - protein, 7 aa, synthetic construct
  REGION 1..7: note = Description of Artificial Sequence: Synthetic peptide
LASTSPS

SEQ ID NO: 12663 - protein, 7 aa, synthetic construct
  REGION 1..7: note = Description of Artificial Sequence: Synthetic peptide
RDGSSSR

SEQ ID NO: 12664 - protein, 7 aa, synthetic construct
  REGION 1..7: note = Description of Artificial Sequence: Synthetic peptide
GTTLSEG

SEQ ID NO: 12665 - protein, 7 aa, synthetic construct
  REGION 1..7: note = Description of Artificial Sequence: Synthetic peptide
SGLKGTN

SEQ ID NO: 12666 - protein, 7 aa, synthetic construct
  REGION 1..7: note = Description of Artificial Sequence: Synthetic peptide
KGVKPEC

SEQ ID NO: 12667 - protein, 7 aa, synthetic construct
  REGION 1..7: note = Description of Artificial Sequence: Synthetic peptide
NGLDKSL

SEQ ID NO: 12668 - protein, 7 aa, synthetic construct
  REGION 1..7: note = Description of Artificial Sequence: Synthetic peptide
TGTHSSV

SEQ ID NO: 12669 - protein, 7 aa, synthetic construct
  REGION 1..7: note = Description of Artificial Sequence: Synthetic peptide
RHEEKMS

SEQ ID NO: 12670 - protein, 7 aa, synthetic construct
  REGION 1..7: note = Description of Artificial Sequence: Synthetic peptide
SRESKGD

SEQ ID NO: 12671 - protein, 7 aa, synthetic construct
  REGION 1..7: note = Description of Artificial Sequence: Synthetic peptide
MNSKEPS

SEQ ID NO: 12672 - protein, 7 aa, synthetic construct
  REGION 1..7: note = Description of Artificial Sequence: Synthetic peptide
QGGSNLK

SEQ ID NO: 12673 - protein, 7 aa, synthetic construct
  REGION 1..7: note = Description of Artificial Sequence: Synthetic peptide
HTTPATV

SEQ ID NO: 12674 - protein, 7 aa, synthetic construct
  REGION 1..7: note = Description of Artificial Sequence: Synthetic peptide
HVSTPTR

SEQ ID NO: 12675 - protein, 7 aa, synthetic construct
  REGION 1..7: note = Description of Artificial Sequence: Synthetic peptide
RSDNPST

SEQ ID NO: 12676 - protein, 7 aa, synthetic construct
  REGION 1..7: note = Description of Artificial Sequence: Synthetic peptide
DMQQKPC

SEQ ID NO: 12677 - protein, 7 aa, synthetic construct
  REGION 1..7: note = Description of Artificial Sequence: Synthetic peptide
GDSPGST

SEQ ID NO: 12678 - protein, 7 aa, synthetic construct
  REGION 1..7: note = Description of Artificial Sequence: Synthetic peptide
GLAEGQS

SEQ ID NO: 12679 - protein, 7 aa, synthetic construct
  REGION 1..7: note = Description of Artificial Sequence: Synthetic peptide
VKTASTA

SEQ ID NO: 12680 - protein, 7 aa, synthetic construct
  REGION 1..7: note = Description of Artificial Sequence: Synthetic peptide
VNGKSPA

SEQ ID NO: 12681 - protein, 7 aa, synthetic construct
  REGION 1..7: note = Description of Artificial Sequence: Synthetic peptide
SNATVSK

SEQ ID NO: 12682 - protein, 7 aa, synthetic construct
  REGION 1..7: note = Description of Artificial Sequence: Synthetic peptide
SNKSTTS

SEQ ID NO: 12683 - protein, 7 aa, synthetic construct
  REGION 1..7: note = Description of Artificial Sequence: Synthetic peptide
STSVGPV

SEQ ID NO: 12684 - protein, 7 aa, synthetic construct
  REGION 1..7: note = Description of Artificial Sequence: Synthetic peptide
CGSVSCQ

SEQ ID NO: 12685 - protein, 7 aa, synthetic construct
  REGION 1..7: note = Description of Artificial Sequence: Synthetic peptide
LGTQSMK

SEQ ID NO: 12686 - protein, 7 aa, synthetic construct
  REGION 1..7: note = Description of Artificial Sequence: Synthetic peptide
FRGDKSA

SEQ ID NO: 12687 - protein, 7 aa, synthetic construct
  REGION 1..7: note = Description of Artificial Sequence: Synthetic peptide
FSKEKSQ

SEQ ID NO: 12688 - protein, 7 aa, synthetic construct
  REGION 1..7: note = Description of Artificial Sequence: Synthetic peptide
SPQQSHN

SEQ ID NO: 12689 - protein, 7 aa, synthetic construct
  REGION 1..7: note = Description of Artificial Sequence: Synthetic peptide
HQNSASV

SEQ ID NO: 12690 - protein, 7 aa, synthetic construct
  REGION 1..7: note = Description of Artificial Sequence: Synthetic peptide
NENSPRG

SEQ ID NO: 12691 - protein, 7 aa, synthetic construct
  REGION 1..7: note = Description of Artificial Sequence: Synthetic peptide
SVNPKEG

SEQ ID NO: 12692 - protein, 7 aa, synthetic construct
  REGION 1..7: note = Description of Artificial Sequence: Synthetic peptide
LGSSSGG

SEQ ID NO: 12693 - protein, 7 aa, synthetic construct
  REGION 1..7: note = Description of Artificial Sequence: Synthetic peptide
TRANPGN

SEQ ID NO: 12694 - protein, 7 aa, synthetic construct
  REGION 1..7: note = Description of Artificial Sequence: Synthetic peptide
LKNNGTG

SEQ ID NO: 12695 - protein, 7 aa, synthetic construct
  REGION 1..7: note = Description of Artificial Sequence: Synthetic peptide
LDGKQRA

SEQ ID NO: 12696 - protein, 7 aa, synthetic construct
  REGION 1..7: note = Description of Artificial Sequence: Synthetic peptide
LTNGSVP

SEQ ID NO: 12697 - protein, 7 aa, synthetic construct
  REGION 1..7: note = Description of Artificial Sequence: Synthetic peptide
STVNHSV

SEQ ID NO: 12698 - protein, 7 aa, synthetic construct
  REGION 1..7: note = Description of Artificial Sequence: Synthetic peptide
MSASTNV

SEQ ID NO: 12699 - protein, 7 aa, synthetic construct
  REGION 1..7: note = Description of Artificial Sequence: Synthetic peptide
NQATGTS

SEQ ID NO: 12700 - protein, 7 aa, synthetic construct
  REGION 1..7: note = Description of Artificial Sequence: Synthetic peptide
LNTNSVI

SEQ ID NO: 12701 - protein, 7 aa, synthetic construct
  REGION 1..7: note = Description of Artificial Sequence: Synthetic peptide
GNGNVLR

SEQ ID NO: 12702 - protein, 7 aa, synthetic construct
  REGION 1..7: note = Description of Artificial Sequence: Synthetic peptide
SDKSSAH

SEQ ID NO: 12703 - protein, 7 aa, synthetic construct
  REGION 1..7: note = Description of Artificial Sequence: Synthetic peptide
LGTSPGH

SEQ ID NO: 12704 - protein, 7 aa, synthetic construct
  REGION 1..7: note = Description of Artificial Sequence: Synthetic peptide
LPSPQSG

SEQ ID NO: 12705 - protein, 7 aa, synthetic construct
  REGION 1..7: note = Description of Artificial Sequence: Synthetic peptide
DGMTNHK

SEQ ID NO: 12706 - protein, 7 aa, synthetic construct
  REGION 1..7: note = Description of Artificial Sequence: Synthetic peptide
ESDHKSG

SEQ ID NO: 12707 - protein, 7 aa, synthetic construct
  REGION 1..7: note = Description of Artificial Sequence: Synthetic peptide
AAEKSNT

SEQ ID NO: 12708 - protein, 7 aa, synthetic construct
  REGION 1..7: note = Description of Artificial Sequence: Synthetic peptide
GTKTASA

SEQ ID NO: 12709 - protein, 7 aa, synthetic construct
  REGION 1..7: note = Description of Artificial Sequence: Synthetic peptide
GSDGTKL

SEQ ID NO: 12710 - protein, 7 aa, synthetic construct
  REGION 1..7: note = Description of Artificial Sequence: Synthetic peptide
GTRTDPN

SEQ ID NO: 12711 - protein, 7 aa, synthetic construct
  REGION 1..7: note = Description of Artificial Sequence: Synthetic peptide
SGPGTAQ

SEQ ID NO: 12712 - protein, 7 aa, synthetic construct
  REGION 1..7: note = Description of Artificial Sequence: Synthetic peptide
SVESNPA

SEQ ID NO: 12713 - protein, 7 aa, synthetic construct
  REGION 1..7: note = Description of Artificial Sequence: Synthetic peptide
HGGSAVS

SEQ ID NO: 12714 - protein, 7 aa, synthetic construct
  REGION 1..7: note = Description of Artificial Sequence: Synthetic peptide
LDNKSTS

SEQ ID NO: 12715 - protein, 7 aa, synthetic construct
  REGION 1..7: note = Description of Artificial Sequence: Synthetic peptide
LGQSTLS

SEQ ID NO: 12716 - protein, 7 aa, synthetic construct
  REGION 1..7: note = Description of Artificial Sequence: Synthetic peptide
ATPAKDG

SEQ ID NO: 12717 - protein, 7 aa, synthetic construct
  REGION 1..7: note = Description of Artificial Sequence: Synthetic peptide
AQGDSVT

SEQ ID NO: 12718 - protein, 7 aa, synthetic construct
  REGION 1..7: note = Description of Artificial Sequence: Synthetic peptide
VQQGSAG

SEQ ID NO: 12719 - protein, 7 aa, synthetic construct
  REGION 1..7: note = Description of Artificial Sequence: Synthetic peptide
SGNSGLA

SEQ ID NO: 12720 - protein, 7 aa, synthetic construct
  REGION 1..7: note = Description of Artificial Sequence: Synthetic peptide
ANAPPRN

SEQ ID NO: 12721 - protein, 7 aa, synthetic construct
  REGION 1..7: note = Description of Artificial Sequence: Synthetic peptide
NPSTKSD

SEQ ID NO: 12722 - protein, 7 aa, synthetic construct
  REGION 1..7: note = Description of Artificial Sequence: Synthetic peptide
TNSKDQT

SEQ ID NO: 12723 - protein, 7 aa, synthetic construct
  REGION 1..7: note = Description of Artificial Sequence: Synthetic peptide
TAEGTRI

SEQ ID NO: 12724 - protein, 7 aa, synthetic construct
  REGION 1..7: note = Description of Artificial Sequence: Synthetic peptide
TPREAGG

SEQ ID NO: 12725 - protein, 7 aa, synthetic construct
  REGION 1..7: note = Description of Artificial Sequence: Synthetic peptide
TQDPQFK

SEQ ID NO: 12726 - protein, 7 aa, synthetic construct
  REGION 1..7: note = Description of Artificial Sequence: Synthetic peptide
TLGSSTN

SEQ ID NO: 12727 - protein, 7 aa, synthetic construct
  REGION 1..7: note = Description of Artificial Sequence: Synthetic peptide
IGSGSSP

SEQ ID NO: 12728 - protein, 7 aa, synthetic construct
  REGION 1..7: note = Description of Artificial Sequence: Synthetic peptide
ISGSDTK

SEQ ID NO: 12729 - protein, 7 aa, synthetic construct
  REGION 1..7: note = Description of Artificial Sequence: Synthetic peptide
QSGNNAA

SEQ ID NO: 12730 - protein, 7 aa, synthetic construct
  REGION 1..7: note = Description of Artificial Sequence: Synthetic peptide
QGRSPAT

SEQ ID NO: 12731 - protein, 7 aa, synthetic construct
  REGION 1..7: note = Description of Artificial Sequence: Synthetic peptide
DTGDKQS

SEQ ID NO: 12732 - protein, 7 aa, synthetic construct
  REGION 1..7: note = Description of Artificial Sequence: Synthetic peptide
VGQASTQ

SEQ ID NO: 12733 - protein, 7 aa, synthetic construct
  REGION 1..7: note = Description of Artificial Sequence: Synthetic peptide
SSSSSSS

SEQ ID NO: 12734 - protein, 7 aa, synthetic construct
  REGION 1..7: note = Description of Artificial Sequence: Synthetic peptide
TSTGVNA

SEQ ID NO: 12735 - protein, 7 aa, synthetic construct
  REGION 1..7: note = Description of Artificial Sequence: Synthetic peptide
TMGTTHT

SEQ ID NO: 12736 - protein, 7 aa, synthetic construct
  REGION 1..7: note = Description of Artificial Sequence: Synthetic peptide
TGATTVS

SEQ ID NO: 12737 - protein, 7 aa, synthetic construct
  REGION 1..7: note = Description of Artificial Sequence: Synthetic peptide
TKTTSNS

SEQ ID NO: 12738 - protein, 7 aa, synthetic construct
  REGION 1..7: note = Description of Artificial Sequence: Synthetic peptide
SSDRGRS

SEQ ID NO: 12739 - protein, 7 aa, synthetic construct
  REGION 1..7: note = Description of Artificial Sequence: Synthetic peptide
SEASPSH

SEQ ID NO: 12740 - DNA, 21 bp, synthetic construct
  misc_feature 1..21: note = Description of Artificial Sequence: Synthetic oligonucleotide
  source 1..21: mol_type = other DNA
agcggcctcaaaggcaccggc

SEQ ID NO: 12741 - DNA, 21 bp, synthetic construct
  misc_feature 1..21: note = Description of Artificial Sequence: Synthetic oligonucleotide
  source 1..21: mol_type = other DNA
gtgggtgggactcagggtaag

SEQ ID NO: 12742 - DNA, 21 bp, synthetic construct
  misc_feature 1..21: note = Description of Artificial Sequence: Synthetic oligonucleotide
  source 1..21: mol_type = other DNA
agcatggacagcagacccggc

SEQ ID NO: 12743 - DNA, 21 bp, synthetic construct
  misc_feature 1..21: note = Description of Artificial Sequence: Synthetic oligonucleotide
  source 1..21: mol_type = other DNA
ggtagtagtcctagtaaggct

SEQ ID NO: 12744 - DNA, 21 bp, synthetic construct
  misc_feature 1..21: note = Description of Artificial Sequence: Synthetic oligonucleotide
  source 1..21: mol_type = other DNA
actggtacggcgaatccgttg

SEQ ID NO: 12745 - DNA, 21 bp, synthetic construct
  misc_feature 1..21: note = Description of Artificial Sequence: Synthetic oligonucleotide
  source 1..21: mol_type = other DNA
agccaaggcgccaaacccgtc

SEQ ID NO: 12746 - DNA, 21 bp, synthetic construct
  misc_feature 1..21: note = Description of Artificial Sequence: Synthetic oligonucleotide
  source 1..21: mol_type = other DNA
cagggggagaagaatactatg

SEQ ID NO: 12747 - DNA, 21 bp, synthetic construct
  misc_feature 1..21: note = Description of Artificial Sequence: Synthetic oligonucleotide
  source 1..21: mol_type = other DNA
accagcggcaacagcagcaaa

SEQ ID NO: 12748 - DNA, 21 bp, synthetic construct
  misc_feature 1..21: note = Description of Artificial Sequence: Synthetic oligonucleotide
  source 1..21: mol_type = other DNA
acgacgtctaagcctggtact

SEQ ID NO: 12749 - DNA, 21 bp, synthetic construct
  misc_feature 1..21: note = Description of Artificial Sequence: Synthetic oligonucleotide
  source 1..21: mol_type = other DNA
agccaaggcaaaggcggcagc

SEQ ID NO: 12750 - DNA, 21 bp, synthetic construct
  misc_feature 1..21: note = Description of Artificial Sequence: Synthetic oligonucleotide
  source 1..21: mol_type = other DNA
gggtcgattaagggggaggct

SEQ ID NO: 12751 - DNA, 21 bp, synthetic construct
  misc_feature 1..21: note = Description of Artificial Sequence: Synthetic oligonucleotide
  source 1..21: mol_type = other DNA
aacagcggcaccaccggcaac

SEQ ID NO: 12752 - DNA, 21 bp, synthetic construct
  misc_feature 1..21: note = Description of Artificial Sequence: Synthetic oligonucleotide
  source 1..21: mol_type = other DNA
gaaagaaccaaagaaaccctc

SEQ ID NO: 12753 - DNA, 21 bp, synthetic construct
  misc_feature 1..21: note = Description of Artificial Sequence: Synthetic oligonucleotide
  source 1..21: mol_type = other DNA
gatcatggtaaggggaatcag

SEQ ID NO: 12754 - DNA, 21 bp, synthetic construct
  misc_feature 1..21: note = Description of Artificial Sequence: Synthetic oligonucleotide
  source 1..21: mol_type = other DNA
gatgggcagcagcggagtagt

SEQ ID NO: 12755 - DNA, 21 bp, synthetic construct
  misc_feature 1..21: note = Description of Artificial Sequence: Synthetic oligonucleotide
  source 1..21: mol_type = other DNA
tcgggtaatagtactaataag

SEQ ID NO: 12756 - DNA, 21 bp, synthetic construct
  misc_feature 1..21: note = Description of Artificial Sequence: Synthetic oligonucleotide
  source 1..21: mol_type = other DNA
ggtgttgagcagcgttcgggg

SEQ ID NO: 12757 - DNA, 21 bp, synthetic construct
  misc_feature 1..21: note = Description of Artificial Sequence: Synthetic oligonucleotide
  source 1..21: mol_type = other DNA
aatggtggtaagtcgagttcg

SEQ ID NO: 12758 - DNA, 21 bp, synthetic construct
  misc_feature 1..21: note = Description of Artificial Sequence: Synthetic oligonucleotide
  source 1..21: mol_type = other DNA
tcgactaataagagtaatctg

SEQ ID NO: 12759 - DNA, 21 bp, synthetic construct
  misc_feature 1..21: note = Description of Artificial Sequence: Synthetic oligonucleotide
  source 1..21: mol_type = other DNA
gacggccaaggcaacggcaaa

SEQ ID NO: 12760 - DNA, 21 bp, synthetic construct
  misc_feature 1..21: note = Description of Artificial Sequence: Synthetic oligonucleotide
  source 1..21: mol_type = other DNA
ggggaggggaagggtcagagt

SEQ ID NO: 12761 - DNA, 21 bp, synthetic construct
  misc_feature 1..21: note = Description of Artificial Sequence: Synthetic oligonucleotide
  source 1..21: mol_type = other DNA
ggcgtcaacagcagcggcaga

SEQ ID NO: 12762 - DNA, 21 bp, synthetic construct
  misc_feature 1..21: note = Description of Artificial Sequence: Synthetic oligonucleotide
  source 1..21: mol_type = other DNA
gacaccggcacccccatcaaa

SEQ ID NO: 12763 - DNA, 21 bp, synthetic construct
  misc_feature 1..21: note = Description of Artificial Sequence: Synthetic oligonucleotide
  source 1..21: mol_type = other DNA
gggagttcggggtcgatgaag

SEQ ID NO: 12764 - DNA, 21 bp, synthetic construct
  misc_feature 1..21: note = Description of Artificial Sequence: Synthetic oligonucleotide
  source 1..21: mol_type = other DNA
ggtaattcttctaagcagttt

SEQ ID NO: 12765 - DNA, 21 bp, synthetic construct
  misc_feature 1..21: note = Description of Artificial Sequence: Synthetic oligonucleotide
  source 1..21: mol_type = other DNA
gaaaccggcaacaaaggcggc

SEQ ID NO: 12766 - DNA, 21 bp, synthetic construct
  misc_feature 1..21: note = Description of Artificial Sequence: Synthetic oligonucleotide
  source 1..21: mol_type = other DNA
tcgggtgtggagaagcaggcg

SEQ ID NO: 12767 - DNA, 21 bp, synthetic construct
  misc_feature 1..21: note = Description of Artificial Sequence: Synthetic oligonucleotide
  source 1..21: mol_type = other DNA
gacaacctcggccaaagcaaa

SEQ ID NO: 12768 - DNA, 21 bp, synthetic construct
  misc_feature 1..21: note = Description of Artificial Sequence: Synthetic oligonucleotide
  source 1..21: mol_type = other DNA
ctcggcacccaaagcgccaaa

SEQ ID NO: 12769 - DNA, 21 bp, synthetic construct
  misc_feature 1..21: note = Description of Artificial Sequence: Synthetic oligonucleotide
  source 1..21: mol_type = other DNA
aacggcgacaacagcaccaga

SEQ ID NO: 12770 - DNA, 21 bp, synthetic construct
  misc_feature 1..21: note = Description of Artificial Sequence: Synthetic oligonucleotide
  source 1..21: mol_type = other DNA
accaccggcagccccagccaa

SEQ ID NO: 12771 - DNA, 21 bp, synthetic construct
  misc_feature 1..21: note = Description of Artificial Sequence: Synthetic oligonucleotide
  source 1..21: mol_type = other DNA
aacagcagcggcacccccagc

SEQ ID NO: 12772 - DNA, 21 bp, synthetic construct
  misc_feature 1..21: note = Description of Artificial Sequence: Synthetic oligonucleotide
  source 1..21: mol_type = other DNA
agtgctagttcgactccgcat

SEQ ID NO: 12773 - DNA, 21 bp, synthetic construct
  misc_feature 1..21: note = Description of Artificial Sequence: Synthetic oligonucleotide
  source 1..21: mol_type = other DNA
ggtcagggtaatgggttgtct

SEQ ID NO: 12774 - DNA, 21 bp, synthetic construct
  misc_feature 1..21: note = Description of Artificial Sequence: Synthetic oligonucleotide
  source 1..21: mol_type = other DNA
ggtactggtaagagtcaggct

SEQ ID NO: 12775 - DNA, 21 bp, synthetic construct
  misc_feature 1..21: note = Description of Artificial Sequence: Synthetic oligonucleotide
  source 1..21: mol_type = other DNA
agcgacaacaaaagccaacac

SEQ ID NO: 12776 - DNA, 21 bp, synthetic construct
  misc_feature 1..21: note = Description of Artificial Sequence: Synthetic oligonucleotide
  source 1..21: mol_type = other DNA
ggtgtggtgcagggggctcgg

SEQ ID NO: 12777 - DNA, 21 bp, synthetic construct
  misc_feature 1..21: note = Description of Artificial Sequence: Synthetic oligonucleotide
  source 1..21: mol_type = other DNA
gacggcggccaagccagaagc

SEQ ID NO: 12778 - DNA, 21 bp, synthetic construct
  misc_feature 1..21: note = Description of Artificial Sequence: Synthetic oligonucleotide
  source 1..21: mol_type = other DNA
aatggtgctcagaaggtgaat

SEQ ID NO: 12779 - DNA, 21 bp, synthetic construct
  misc_feature 1..21: note = Description of Artificial Sequence: Synthetic oligonucleotide
  source 1..21: mol_type = other DNA
acttcggattctaagacgact

SEQ ID NO: 12780 - DNA, 21 bp, synthetic construct
  misc_feature 1..21: note = Description of Artificial Sequence: Synthetic oligonucleotide
  source 1..21: mol_type = other DNA
ggttataataaggattctggt

SEQ ID NO: 12781 - DNA, 21 bp, synthetic construct
  misc_feature 1..21: note = Description of Artificial Sequence: Synthetic oligonucleotide
  source 1..21: mol_type = other DNA
ggcggcgtcggcgccgccggc

SEQ ID NO: 12782 - DNA, 21 bp, synthetic construct
  misc_feature 1..21: note = Description of Artificial Sequence: Synthetic oligonucleotide
  source 1..21: mol_type = other DNA
aatgttagtcataatgggggg

SEQ ID NO: 12783 - DNA, 21 bp, synthetic construct
  misc_feature 1..21: note = Description of Artificial Sequence: Synthetic oligonucleotide
  source 1..21: mol_type = other DNA
tctagtacggggacgaatcat

SEQ ID NO: 12784 - DNA, 21 bp, synthetic construct
  misc_feature 1..21: note = Description of Artificial Sequence: Synthetic oligonucleotide
  source 1..21: mol_type = other DNA
ggtacggggaaggatcgggtg

SEQ ID NO: 12785 - DNA, 21 bp, synthetic construct
  misc_feature 1..21: note = Description of Artificial Sequence: Synthetic oligonucleotide
  source 1..21: mol_type = other DNA
gacggcaacatggccaacaaa

SEQ ID NO: 12786 - DNA, 21 bp, synthetic construct
  misc_feature 1..21: note = Description of Artificial Sequence: Synthetic oligonucleotide
  source 1..21: mol_type = other DNA
acgctgaataataaggggctt

SEQ ID NO: 12787 - DNA, 21 bp, synthetic construct
  misc_feature 1..21: note = Description of Artificial Sequence: Synthetic oligonucleotide
  source 1..21: mol_type = other DNA
accgacgccagcaaagtcagc

SEQ ID NO: 12788 - DNA, 21 bp, synthetic construct
  misc_feature 1..21: note = Description of Artificial Sequence: Synthetic oligonucleotide
  source 1..21: mol_type = other DNA
aatacggggaagaatggtctt

SEQ ID NO: 12789 - DNA, 21 bp, synthetic construct
  misc_feature 1..21: note = Description of Artificial Sequence: Synthetic oligonucleotide
  source 1..21: mol_type = other DNA
agcggcaccagcaaaaacgtc

SEQ ID NO: 12790 - DNA, 21 bp, synthetic construct
  misc_feature 1..21: note = Description of Artificial Sequence: Synthetic oligonucleotide
  source 1..21: mol_type = other DNA
gatcatgcgagtacgaacaag

SEQ ID NO: 12791 - DNA, 21 bp, synthetic construct
  misc_feature 1..21: note = Description of Artificial Sequence: Synthetic oligonucleotide
  source 1..21: mol_type = other DNA
ggcaacagcagcacccccaaa

SEQ ID NO: 12792 - DNA, 21 bp, synthetic construct
  misc_feature 1..21: note = Description of Artificial Sequence: Synthetic oligonucleotide
  source 1..21: mol_type = other DNA
acggagagtcagaagattgtt

SEQ ID NO: 12793 - DNA, 21 bp, synthetic construct
  misc_feature 1..21: note = Description of Artificial Sequence: Synthetic oligonucleotide
  source 1..21: mol_type = other DNA
gagggtgggaaggggcctgct

SEQ ID NO: 12794 - DNA, 21 bp, synthetic construct
  misc_feature 1..21: note = Description of Artificial Sequence: Synthetic oligonucleotide
  source 1..21: mol_type = other DNA
ggcaacggcagcaaagccgtc

SEQ ID NO: 12795 - DNA, 21 bp, synthetic construct
  misc_feature 1..21: note = Description of Artificial Sequence: Synthetic oligonucleotide
  source 1..21: mol_type = other DNA
accggccaaagcagcaccagc

SEQ ID NO: 12796 - DNA, 21 bp, synthetic construct
  misc_feature 1..21: note = Description of Artificial Sequence: Synthetic oligonucleotide
  source 1..21: mol_type = other DNA
gcgggttcgaagactagtgcg

SEQ ID NO: 12797 - DNA, 21 bp, synthetic construct
  misc_feature 1..21: note = Description of Artificial Sequence: Synthetic oligonucleotide
  source 1..21: mol_type = other DNA
tctaatcgggataaggcgtcg

SEQ ID NO: 12798 - DNA, 21 bp, synthetic construct
  misc_feature 1..21: note = Description of Artificial Sequence: Synthetic oligonucleotide
  source 1..21: mol_type = other DNA
ggcagcggcaaccaaaccggc

SEQ ID NO: 12799 - DNA, 21 bp, synthetic construct
  misc_feature 1..21: note = Description of Artificial Sequence: Synthetic oligonucleotide
  source 1..21: mol_type = other DNA
gggactgggtctaagccgtat

SEQ ID NO: 12800 - DNA, 21 bp, synthetic construct
  misc_feature 1..21: note = Description of Artificial Sequence: Synthetic oligonucleotide
  source 1..21: mol_type = other DNA
agtgctagtgggaagaatacg

SEQ ID NO: 12801 - DNA, 21 bp, synthetic construct
  misc_feature 1..21: note = Description of Artificial Sequence: Synthetic oligonucleotide
  source 1..21: mol_type = other DNA
ttgggtgatgggaagccggtt

SEQ ID NO: 12802 - DNA, 21 bp, synthetic construct
  misc_feature 1..21: note = Description of Artificial Sequence: Synthetic oligonucleotide
  source 1..21: mol_type = other DNA
agtggtgtgactggggttgcg

SEQ ID NO: 12803 - DNA, 21 bp, synthetic construct
  misc_feature 1..21: note = Description of Artificial Sequence: Synthetic oligonucleotide
  source 1..21: mol_type = other DNA
gaaagaagcagccccaccagc

SEQ ID NO: 12804 - DNA, 21 bp, synthetic construct
  misc_feature 1..21: note = Description of Artificial Sequence: Synthetic oligonucleotide
  source 1..21: mol_type = other DNA
gatggtacgactcgttctact

SEQ ID NO: 12805 - DNA, 21 bp, synthetic construct
  misc_feature 1..21: note = Description of Artificial Sequence: Synthetic oligonucleotide
  source 1..21: mol_type = other DNA
actacgaataagggggctagt

SEQ ID NO: 12806 - DNA, 21 bp, synthetic construct
  misc_feature 1..21: note = Description of Artificial Sequence: Synthetic oligonucleotide
  source 1..21: mol_type = other DNA
gccggcagcggcaacaccagc

SEQ ID NO: 12807 - DNA, 21 bp, synthetic construct
  misc_feature 1..21: note = Description of Artificial Sequence: Synthetic oligonucleotide
  source 1..21: mol_type = other DNA
caagccggcaacggcagcaaa

SEQ ID NO: 12808 - DNA, 21 bp, synthetic construct
  misc_feature 1..21: note = Description of Artificial Sequence: Synthetic oligonucleotide
  source 1..21: mol_type = other DNA
cagcagggtaagcagtcggtt

SEQ ID NO: 12809 - DNA, 21 bp, synthetic construct
  misc_feature 1..21: note = Description of Artificial Sequence: Synthetic oligonucleotide
  source 1..21: mol_type = other DNA
accaacggcagcaaacccctc

SEQ ID NO: 12810 - DNA, 21 bp, synthetic construct
  misc_feature 1..21: note = Description of Artificial Sequence: Synthetic oligonucleotide
  source 1..21: mol_type = other DNA
accgacagaagcaaaagcccc

SEQ ID NO: 12811 - DNA, 21 bp, synthetic construct
  misc_feature 1..21: note = Description of Artificial Sequence: Synthetic oligonucleotide
  source 1..21: mol_type = other DNA
gataggactgagaagtctaat

SEQ ID NO: 12812 - DNA, 21 bp, synthetic construct
  misc_feature 1..21: note = Description of Artificial Sequence: Synthetic oligonucleotide
  source 1..21: mol_type = other DNA
ggtggtggtcagaagtcttct

SEQ ID NO: 12813 - DNA, 21 bp, synthetic construct
  misc_feature 1..21: note = Description of Artificial Sequence: Synthetic oligonucleotide
  source 1..21: mol_type = other DNA
tcgacgaatagtaagtcggcg

SEQ ID NO: 12814 - DNA, 21 bp, synthetic construct
  misc_feature 1..21: note = Description of Artificial Sequence: Synthetic oligonucleotide
  source 1..21: mol_type = other DNA
agcaacaccaaaagcgccggc

SEQ ID NO: 12815 - DNA, 21 bp, synthetic construct
  misc_feature 1..21: note = Description of Artificial Sequence: Synthetic oligonucleotide
  source 1..21: mol_type = other DNA
caggggactaatgcgacggtt

SEQ ID NO: 12816 - DNA, 21 bp, synthetic construct
  misc_feature 1..21: note = Description of Artificial Sequence: Synthetic oligonucleotide
  source 1..21: mol_type = other DNA
aatacgactagggagagtggt

SEQ ID NO: 12817 - DNA, 21 bp, synthetic construct
  misc_feature 1..21: note = Description of Artificial Sequence: Synthetic oligonucleotide
  source 1..21: mol_type = other DNA
gggtcgggtaagactgctgcg

SEQ ID NO: 12818 - DNA, 21 bp, synthetic construct
  misc_feature 1..21: note = Description of Artificial Sequence: Synthetic oligonucleotide
  source 1..21: mol_type = other DNA
ggcagccaaagccccagcagc

SEQ ID NO: 12819 - DNA, 21 bp, synthetic construct
  misc_feature 1..21: note = Description of Artificial Sequence: Synthetic oligonucleotide
  source 1..21: mol_type = other DNA
gaccaacacagcgccagaaac

SEQ ID NO: 12820 - DNA, 21 bp, synthetic construct
  misc_feature 1..21: note = Description of Artificial Sequence: Synthetic oligonucleotide
  source 1..21: mol_type = other DNA
caggcgactacgaagccgtcg

SEQ ID NO: 12821 - DNA, 21 bp, synthetic construct
  misc_feature 1..21: note = Description of Artificial Sequence: Synthetic oligonucleotide
  source 1..21: mol_type = other DNA
acgactggttctgcggcggtt

SEQ ID NO: 12822 - DNA, 21 bp, synthetic construct
  misc_feature 1..21: note = Description of Artificial Sequence: Synthetic oligonucleotide
  source 1..21: mol_type = other DNA
actacgactaaggctaatgcg

SEQ ID NO: 12823 - DNA, 21 bp, synthetic construct
  misc_feature 1..21: note = Description of Artificial Sequence: Synthetic oligonucleotide
  source 1..21: mol_type = other DNA
agccaaagccaaaccaacagc

SEQ ID NO: 12824 - DNA, 21 bp, synthetic construct
  misc_feature 1..21: note = Description of Artificial Sequence: Synthetic oligonucleotide
  source 1..21: mol_type = other DNA
caaaccagcgaagccggcaga

SEQ ID NO: 12825 - DNA, 21 bp, synthetic construct
  misc_feature 1..21: note = Description of Artificial Sequence: Synthetic oligonucleotide
  source 1..21: mol_type = other DNA
agcagccaacaaagcgccaaa

SEQ ID NO: 12826 - DNA, 21 bp, synthetic construct
  misc_feature 1..21: note = Description of Artificial Sequence: Synthetic oligonucleotide
  source 1..21: mol_type = other DNA
ggtaatggtaagacgcttcag

SEQ ID NO: 12827 - DNA, 21 bp, synthetic construct
  misc_feature 1..21: note = Description of Artificial Sequence: Synthetic oligonucleotide
  source 1..21: mol_type = other DNA
ggtattcctaagggttctcag

SEQ ID NO: 12828 - DNA, 21 bp, synthetic construct
  misc_feature 1..21: note = Description of Artificial Sequence: Synthetic oligonucleotide
  source 1..21: mol_type = other DNA
ggcaccggcggcagcgcccaa

SEQ ID NO: 12829 - DNA, 21 bp, synthetic construct
  misc_feature 1..21: note = Description of Artificial Sequence: Synthetic oligonucleotide
  source 1..21: mol_type = other DNA
agtgcttctcagaaggttcag

SEQ ID NO: 12830 - DNA, 21 bp, synthetic construct
  misc_feature 1..21: note = Description of Artificial Sequence: Synthetic oligonucleotide
  source 1..21: mol_type = other DNA
ggtagtggtcatgatcggact

SEQ ID NO: 12831 - DNA, 21 bp, synthetic construct
  misc_feature 1..21: note = Description of Artificial Sequence: Synthetic oligonucleotide
  source 1..21: mol_type = other DNA
gccaccgacaaaagcagcaaa

SEQ ID NO: 12832 - DNA, 21 bp, synthetic construct
  misc_feature 1..21: note = Description of Artificial Sequence: Synthetic oligonucleotide
  source 1..21: mol_type = other DNA
gaaagaggcgaaagccaaaaa

SEQ ID NO: 12833 - DNA, 21 bp, synthetic construct
  misc_feature 1..21: note = Description of Artificial Sequence: Synthetic oligonucleotide
  source 1..21: mol_type = other DNA
gacaacaccgccagccccaga

SEQ ID NO: 12834 - DNA, 21 bp, synthetic construct
  misc_feature 1..21: note = Description of Artificial Sequence: Synthetic oligonucleotide
  source 1..21: mol_type = other DNA
gcggctggggcgcctggtaag

SEQ ID NO: 12835 - DNA, 21 bp, synthetic construct
  misc_feature 1..21: note = Description of Artificial Sequence: Synthetic oligonucleotide
  source 1..21: mol_type = other DNA
atgactagtagtagtgctaag

SEQ ID NO: 12836 - DNA, 21 bp, synthetic construct
  misc_feature 1..21: note = Description of Artificial Sequence: Synthetic oligonucleotide
  source 1..21: mol_type = other DNA
acgcagtcgtcgcctcctaag

SEQ ID NO: 12837 - DNA, 21 bp, synthetic construct
  misc_feature 1..21: note = Description of Artificial Sequence: Synthetic oligonucleotide
  source 1..21: mol_type = other DNA
gatgggtctacggcgaatcgt

SEQ ID NO: 12838 - DNA, 21 bp, synthetic construct
  misc_feature 1..21: note = Description of Artificial Sequence: Synthetic oligonucleotide
  source 1..21: mol_type = other DNA
caggggagtgctacgactttg

SEQ ID NO: 12839 - DNA, 21 bp, synthetic construct
  misc_feature 1..21: note = Description of Artificial Sequence: Synthetic oligonucleotide
  source 1..21: mol_type = other DNA
caaaacggcagcgacagaacc

SEQ ID NO: 12840 - DNA, 21 bp, synthetic construct
  misc_feature 1..21: note = Description of Artificial Sequence: Synthetic oligonucleotide
  source 1..21: mol_type = other DNA
aacagcgccagcaacgccaaa

SEQ ID NO: 12841 - DNA, 21 bp, synthetic construct
  misc_feature 1..21: note = Description of Artificial Sequence: Synthetic oligonucleotide
  source 1..21: mol_type = other DNA
caaaccagcaaaaccgccagc

SEQ ID NO: 12842 - DNA, 21 bp, synthetic construct
  misc_feature 1..21: note = Description of Artificial Sequence: Synthetic oligonucleotide
  source 1..21: mol_type = other DNA
caaaacggcaacggccacaga

SEQ ID NO: 12843 - DNA, 21 bp, synthetic construct
  misc_feature 1..21: note = Description of Artificial Sequence: Synthetic oligonucleotide
  source 1..21: mol_type = other DNA
ggcagcggcaccagcgccgtc

SEQ ID NO: 12844 - DNA, 21 bp, synthetic construct
  misc_feature 1..21: note = Description of Artificial Sequence: Synthetic oligonucleotide
  source 1..21: mol_type = other DNA
ggcaacacccccagcagcgtc

SEQ ID NO: 12845 - DNA, 21 bp, synthetic construct
  misc_feature 1..21: note = Description of Artificial Sequence: Synthetic oligonucleotide
  source 1..21: mol_type = other DNA
ggcacccaaaaagaaaacacc

SEQ ID NO: 12846 - DNA, 21 bp, synthetic construct
  misc_feature 1..21: note = Description of Artificial Sequence: Synthetic oligonucleotide
  source 1..21: mol_type = other DNA
gcgcgtgattcttcggttctg

SEQ ID NO: 12847 - DNA, 21 bp, synthetic construct
  misc_feature 1..21: note = Description of Artificial Sequence: Synthetic oligonucleotide
  source 1..21: mol_type = other DNA
gaaggcaacagcaaccacacc

SEQ ID NO: 12848 - DNA, 21 bp, synthetic construct
  misc_feature 1..21: note = Description of Artificial Sequence: Synthetic oligonucleotide
  source 1..21: mol_type = other DNA
ggtactggttcgaagccgtcg

SEQ ID NO: 12849 - DNA, 21 bp, synthetic construct
  misc_feature 1..21: note = Description of Artificial Sequence: Synthetic oligonucleotide
  source 1..21: mol_type = other DNA
gccaccggcagcaccaacaac

SEQ ID NO: 12850 - DNA, 21 bp, synthetic construct
  misc_feature 1..21: note = Description of Artificial Sequence: Synthetic oligonucleotide
  source 1..21: mol_type = other DNA
ggtgggtctcgtccgtctgag

SEQ ID NO: 12851 - DNA, 21 bp, synthetic construct
  misc_feature 1..21: note = Description of Artificial Sequence: Synthetic oligonucleotide
  source 1..21: mol_type = other DNA
cttggttctaagactagtgcg

SEQ ID NO: 12852 - DNA, 21 bp, synthetic construct
  misc_feature 1..21: note = Description of Artificial Sequence: Synthetic oligonucleotide
  source 1..21: mol_type = other DNA
ggccaaaacagcaaacccgcc

SEQ ID NO: 12853 - DNA, 21 bp, synthetic construct
  misc_feature 1..21: note = Description of Artificial Sequence: Synthetic oligonucleotide
  source 1..21: mol_type = other DNA
tcgactaatacgaagagtact

SEQ ID NO: 12854 - DNA, 21 bp, synthetic construct
  misc_feature 1..21: note = Description of Artificial Sequence: Synthetic oligonucleotide
  source 1..21: mol_type = other DNA
caaggcaccagcaacggcagc

SEQ ID NO: 12855 - DNA, 21 bp, synthetic construct
  misc_feature 1..21: note = Description of Artificial Sequence: Synthetic oligonucleotide
  source 1..21: mol_type = other DNA
caagccaacgacaaaatgggc

SEQ ID NO: 12856 - DNA, 21 bp, synthetic construct
  misc_feature 1..21: note = Description of Artificial Sequence: Synthetic oligonucleotide
  source 1..21: mol_type = other DNA
agaaacggcaacgaagtcaaa

SEQ ID NO: 12857 - DNA, 21 bp, synthetic construct
  misc_feature 1..21: note = Description of Artificial Sequence: Synthetic oligonucleotide
  source 1..21: mol_type = other DNA
agcgcccccggcagcagcaaa

SEQ ID NO: 12858 - DNA, 21 bp, synthetic construct
  misc_feature 1..21: note = Description of Artificial Sequence: Synthetic oligonucleotide
  source 1..21: mol_type = other DNA
accgccagcagcaaacacgaa

SEQ ID NO: 12859 - DNA, 21 bp, synthetic construct
  misc_feature 1..21: note = Description of Artificial Sequence: Synthetic oligonucleotide
  source 1..21: mol_type = other DNA
gggggtggtgataagagtaag

SEQ ID NO: 12860 - DNA, 21 bp, synthetic construct
  misc_feature 1..21: note = Description of Artificial Sequence: Synthetic oligonucleotide
  source 1..21: mol_type = other DNA
agtgggggtgcgcatccgtct

SEQ ID NO: 12861 - DNA, 21 bp, synthetic construct
  misc_feature 1..21: note = Description of Artificial Sequence: Synthetic oligonucleotide
  source 1..21: mol_type = other DNA
acttcgggtacgaataatgtt

SEQ ID NO: 12862 - DNA, 21 bp, synthetic construct
  misc_feature 1..21: note = Description of Artificial Sequence: Synthetic oligonucleotide
  source 1..21: mol_type = other DNA
tcgacggcttcgactccgtcg

SEQ ID NO: 12863 - DNA, 21 bp, synthetic construct
  misc_feature 1..21: note = Description of Artificial Sequence: Synthetic oligonucleotide
  source 1..21: mol_type = other DNA
cagggtacgggttcgactact

SEQ ID NO: 12864 - DNA, 21 bp, synthetic construct
  misc_feature 1..21: note = Description of Artificial Sequence: Synthetic oligonucleotide
  source 1..21: mol_type = other DNA
cagggtgggggttctcctacg

SEQ ID NO: 12865 - DNA, 21 bp, synthetic construct
  misc_feature 1..21: note = Description of Artificial Sequence: Synthetic oligonucleotide
  source 1..21: mol_type = other DNA
gaagccggcagcaaaagccaa

SEQ ID NO: 12866 - DNA, 21 bp, synthetic construct
  misc_feature 1..21: note = Description of Artificial Sequence: Synthetic oligonucleotide
  source 1..21: mol_type = other DNA
gggggtaatggtaaggatcgg

SEQ ID NO: 12867 - DNA, 21 bp, synthetic construct
  misc_feature 1..21: note = Description of Artificial Sequence: Synthetic oligonucleotide
  source 1..21: mol_type = other DNA
gtcagcggcaacggcaacagc

SEQ ID NO: 12868 - DNA, 21 bp, synthetic construct
  misc_feature 1..21: note = Description of Artificial Sequence: Synthetic oligonucleotide
  source 1..21: mol_type = other DNA
ggccaaggcaaagacaaaagc

SEQ ID NO: 12869 - DNA, 21 bp, synthetic construct
  misc_feature 1..21: note = Description of Artificial Sequence: Synthetic oligonucleotide
  source 1..21: mol_type = other DNA
acgtcgtcttcgcctcatact

SEQ ID NO: 12870 - DNA, 21 bp, synthetic construct
  misc_feature 1..21: note = Description of Artificial Sequence: Synthetic oligonucleotide
  source 1..21: mol_type = other DNA
gacagcagcagcagcaacaga

SEQ ID NO: 12871 - DNA, 21 bp, synthetic construct
  misc_feature 1..21: note = Description of Artificial Sequence: Synthetic oligonucleotide
  source 1..21: mol_type = other DNA
gacggccaaaaaggcgccagc

SEQ ID NO: 12872 - DNA, 21 bp, synthetic construct
  misc_feature 1..21: note = Description of Artificial Sequence: Synthetic oligonucleotide
  source 1..21: mol_type = other DNA
agtcagactaagagttctaat

SEQ ID NO: 12873 - DNA, 21 bp, synthetic construct
  misc_feature 1..21: note = Description of Artificial Sequence: Synthetic oligonucleotide
  source 1..21: mol_type = other DNA
agtagtacggggaagtctgtg

SEQ ID NO: 12874 - DNA, 21 bp, synthetic construct
  misc_feature 1..21: note = Description of Artificial Sequence: Synthetic oligonucleotide
  source 1..21: mol_type = other DNA
accaccaaaagccaagcccaa

SEQ ID NO: 12875 - DNA, 21 bp, synthetic construct
  misc_feature 1..21: note = Description of Artificial Sequence: Synthetic oligonucleotide
  source 1..21: mol_type = other DNA
agcggcaacaaaagcagccaa

SEQ ID NO: 12876 - DNA, 21 bp, synthetic construct
  misc_feature 1..21: note = Description of Artificial Sequence: Synthetic oligonucleotide
  source 1..21: mol_type = other DNA
agcggcagaaccggcgccggc

SEQ ID NO: 12877 - DNA, 21 bp, synthetic construct
  misc_feature 1..21: note = Description of Artificial Sequence: Synthetic oligonucleotide
  source 1..21: mol_type = other DNA
gatagttctacgaagcctatg

SEQ ID NO: 12878 - DNA, 21 bp, synthetic construct
  misc_feature 1..21: note = Description of Artificial Sequence: Synthetic oligonucleotide
  source 1..21: mol_type = other DNA
acgtcttcgcctcagtctaag

SEQ ID NO: 12879 - DNA, 21 bp, synthetic construct
  misc_feature 1..21: note = Description of Artificial Sequence: Synthetic oligonucleotide
  source 1..21: mol_type = other DNA
actactagtactactcctaag

SEQ ID NO: 12880 - DNA, 21 bp, synthetic construct
  misc_feature 1..21: note = Description of Artificial Sequence: Synthetic oligonucleotide
  source 1..21: mol_type = other DNA
aatagttctgataaggggaag

SEQ ID NO: 12881 - DNA, 21 bp, synthetic construct
  misc_feature 1..21: note = Description of Artificial Sequence: Synthetic oligonucleotide
  source 1..21: mol_type = other DNA
ggtactcaggggactggtacg

SEQ ID NO: 12882 - DNA, 21 bp, synthetic construct
  misc_feature 1..21: note = Description of Artificial Sequence: Synthetic oligonucleotide
  source 1..21: mol_type = other DNA
gagcatgagggtaagcctatt

SEQ ID NO: 12883 - DNA, 21 bp, synthetic construct
  misc_feature 1..21: note = Description of Artificial Sequence: Synthetic oligonucleotide
  source 1..21: mol_type = other DNA
agcgccgtcagcagcaacaaa

SEQ ID NO: 12884 - DNA, 21 bp, synthetic construct
  misc_feature 1..21: note = Description of Artificial Sequence: Synthetic oligonucleotide
  source 1..21: mol_type = other DNA
gccgacgccaacaaacaaagc

SEQ ID NO: 12885 - DNA, 21 bp, synthetic construct
  misc_feature 1..21: note = Description of Artificial Sequence: Synthetic oligonucleotide
  source 1..21: mol_type = other DNA
gaccaagtcaacaaacccgtc

SEQ ID NO: 12886 - DNA, 21 bp, synthetic construct
  misc_feature 1..21: note = Description of Artificial Sequence: Synthetic oligonucleotide
  source 1..21: mol_type = other DNA
gaggggactacgccttcgagg

SEQ ID NO: 12887 - DNA, 21 bp, synthetic construct
  misc_feature 1..21: note = Description of Artificial Sequence: Synthetic oligonucleotide
  source 1..21: mol_type = other DNA
ggcggcgccaaaagcagcgaa

SEQ ID NO: 12888 - DNA, 21 bp, synthetic construct
  misc_feature 1..21: note = Description of Artificial Sequence: Synthetic oligonucleotide
  source 1..21: mol_type = other DNA
agcggcgccggcaccgccacc

SEQ ID NO: 12889 - DNA, 21 bp, synthetic construct
  misc_feature 1..21: note = Description of Artificial Sequence: Synthetic oligonucleotide
  source 1..21: mol_type = other DNA
gaggggcataagggtgctggt

SEQ ID NO: 12890 - DNA, 21 bp, synthetic construct
  misc_feature 1..21: note = Description of Artificial Sequence: Synthetic oligonucleotide
  source 1..21: mol_type = other DNA
agcagcaacaccagcaccgcc

SEQ ID NO: 12891 - DNA, 21 bp, synthetic construct
  misc_feature 1..21: note = Description of Artificial Sequence: Synthetic oligonucleotide
  source 1..21: mol_type = other DNA
agcaccagcagcaaaagccaa

SEQ ID NO: 12892 - DNA, 21 bp, synthetic construct
  misc_feature 1..21: note = Description of Artificial Sequence: Synthetic oligonucleotide
  source 1..21: mol_type = other DNA
gccagcagcaaacccggcgtc

SEQ ID NO: 12893 - DNA, 21 bp, synthetic construct
  misc_feature 1..21: note = Description of Artificial Sequence: Synthetic oligonucleotide
  source 1..21: mol_type = other DNA
gaggggtcgaagactagttcg

SEQ ID NO: 12894 - DNA, 21 bp, synthetic construct
  misc_feature 1..21: note = Description of Artificial Sequence: Synthetic oligonucleotide
  source 1..21: mol_type = other DNA
gatggggtgtctaagacgagg

SEQ ID NO: 12895 - DNA, 21 bp, synthetic construct
  misc_feature 1..21: note = Description of Artificial Sequence: Synthetic oligonucleotide
  source 1..21: mol_type = other DNA
ggtgcgggttcgagtagtaag

SEQ ID NO: 12896 - DNA, 21 bp, synthetic construct
  misc_feature 1..21: note = Description of Artificial Sequence: Synthetic oligonucleotide
  source 1..21: mol_type = other DNA
ggggggacgtcgaagagtagt

SEQ ID NO: 12897 - DNA, 21 bp, synthetic construct
  misc_feature 1..21: note = Description of Artificial Sequence: Synthetic oligonucleotide
  source 1..21: mol_type = other DNA
ctcggcagcagcaaaaacgtc

SEQ ID NO: 12898 - DNA, 21 bp, synthetic construct
  misc_feature 1..21: note = Description of Artificial Sequence: Synthetic oligonucleotide
  source 1..21: mol_type = other DNA
aattcgtcggggaagtcgtct

SEQ ID NO: 12899 - DNA, 21 bp, synthetic construct
  misc_feature 1..21: note = Description of Artificial Sequence: Synthetic oligonucleotide
  source 1..21: mol_type = other DNA
actgggatgaaggatgcgaag

SEQ ID NO: 12900 - DNA, 21 bp, synthetic construct
  misc_feature 1..21: note = Description of Artificial Sequence: Synthetic oligonucleotide
  source 1..21: mol_type = other DNA
gccgaccacggcaaagtcacc

SEQ ID NO: 12901 - DNA, 21 bp, synthetic construct
  misc_feature 1..21: note = Description of Artificial Sequence: Synthetic oligonucleotide
  source 1..21: mol_type = other DNA
ggtgctgaggggtctgtgaag

SEQ ID NO: 12902 - DNA, 21 bp, synthetic construct
  misc_feature 1..21: note = Description of Artificial Sequence: Synthetic oligonucleotide
  source 1..21: mol_type = other DNA
cagggttcttcgcaggtgact

SEQ ID NO: 12903 - DNA, 21 bp, synthetic construct
  misc_feature 1..21: note = Description of Artificial Sequence: Synthetic oligonucleotide
  source 1..21: mol_type = other DNA
aattctaagacgggtagtgcg

SEQ ID NO: 12904 - DNA, 21 bp, synthetic construct
  misc_feature 1..21: note = Description of Artificial Sequence: Synthetic oligonucleotide
  source 1..21: mol_type = other DNA
accagcgacagagtcagcacc

SEQ ID NO: 12905 - DNA, 21 bp, synthetic construct
  misc_feature 1..21: note = Description of Artificial Sequence: Synthetic oligonucleotide
  source 1..21: mol_type = other DNA
accggcgaaagaaaactcgaa

SEQ ID NO: 12906 - DNA, 21 bp, synthetic construct
  misc_feature 1..21: note = Description of Artificial Sequence: Synthetic oligonucleotide
  source 1..21: mol_type = other DNA
acgcctacgcagacgccggtg

SEQ ID NO: 12907 - DNA, 21 bp, synthetic construct
  misc_feature 1..21: note = Description of Artificial Sequence: Synthetic oligonucleotide
  source 1..21: mol_type = other DNA
agtgggaatacgagtaatcat

SEQ ID NO: 12908 - DNA, 21 bp, synthetic construct
  misc_feature 1..21: note = Description of Artificial Sequence: Synthetic oligonucleotide
  source 1..21: mol_type = other DNA
gggggtgcgaatgagcggagt

SEQ ID NO: 12909 - DNA, 21 bp, synthetic construct
  misc_feature 1..21: note = Description of Artificial Sequence: Synthetic oligonucleotide
  source 1..21: mol_type = other DNA
accggcagccaaagcatgcaa

SEQ ID NO: 12910 - DNA, 21 bp, synthetic construct
  misc_feature 1..21: note = Description of Artificial Sequence: Synthetic oligonucleotide
  source 1..21: mol_type = other DNA
cacggcaccgaaagagccagc

SEQ ID NO: 12911 - DNA, 21 bp, synthetic construct
  misc_feature 1..21: note = Description of Artificial Sequence: Synthetic oligonucleotide
  source 1..21: mol_type = other DNA
caaagcgacaccggcaacaaa

SEQ ID NO: 12912 - DNA, 21 bp, synthetic construct
  misc_feature 1..21: note = Description of Artificial Sequence: Synthetic oligonucleotide
  source 1..21: mol_type = other DNA
ggcgccggcgaaagaagcaaa

SEQ ID NO: 12913 - DNA, 21 bp, synthetic construct
  misc_feature 1..21: note = Description of Artificial Sequence: Synthetic oligonucleotide
  source 1..21: mol_type = other DNA
actggtgggcagacttctacg

SEQ ID NO: 12914 - DNA, 21 bp, synthetic construct
  misc_feature 1..21: note = Description of Artificial Sequence: Synthetic oligonucleotide
  source 1..21: mol_type = other DNA
ggcgaaaccagaacccaaagc

SEQ ID NO: 12915 - DNA, 21 bp, synthetic construct
  misc_feature 1..21: note = Description of Artificial Sequence: Synthetic oligonucleotide
  source 1..21: mol_type = other DNA
agtggtgcgaatcatcctagt

SEQ ID NO: 12916 - DNA, 21 bp, synthetic construct
  misc_feature 1..21: note = Description of Artificial Sequence: Synthetic oligonucleotide
  source 1..21: mol_type = other DNA
ggtgcttctaagggttcggat

SEQ ID NO: 12917 - DNA, 21 bp, synthetic construct
  misc_feature 1..21: note = Description of Artificial Sequence: Synthetic oligonucleotide
  source 1..21: mol_type = other DNA
gcccaaaccagcaaaaccgaa

SEQ ID NO: 12918 - DNA, 21 bp, synthetic construct
  misc_feature 1..21: note = Description of Artificial Sequence: Synthetic oligonucleotide
  source 1..21: mol_type = other DNA
ggttctgggtcgcctactcgg

SEQ ID NO: 12919 - DNA, 21 bp, synthetic construct
  misc_feature 1..21: note = Description of Artificial Sequence: Synthetic oligonucleotide
  source 1..21: mol_type = other DNA
ggcctcagcaaacccagcagc

SEQ ID NO: 12920 - DNA, 21 bp, synthetic construct
  misc_feature 1..21: note = Description of Artificial Sequence: Synthetic oligonucleotide
  source 1..21: mol_type = other DNA
ggtacgacgacgcgtgatggg

SEQ ID NO: 12921 - DNA, 21 bp, synthetic construct
  misc_feature 1..21: note = Description of Artificial Sequence: Synthetic oligonucleotide
  source 1..21: mol_type = other DNA
caaggccaaaccaaacccagc

SEQ ID NO: 12922 - DNA, 21 bp, synthetic construct
  misc_feature 1..21: note = Description of Artificial Sequence: Synthetic oligonucleotide
  source 1..21: mol_type = other DNA
ggcgccgacaaaaacgtcaga

SEQ ID NO: 12923 - DNA, 21 bp, synthetic construct
  misc_feature 1..21: note = Description of Artificial Sequence: Synthetic oligonucleotide
  source 1..21: mol_type = other DNA
agttctagtcctcagagggtg

SEQ ID NO: 12924 - DNA, 21 bp, synthetic construct
  misc_feature 1..21: note = Description of Artificial Sequence: Synthetic oligonucleotide
  source 1..21: mol_type = other DNA
ggtaatgctggttcggttaag

SEQ ID NO: 12925 - DNA, 21 bp, synthetic construct
  misc_feature 1..21: note = Description of Artificial Sequence: Synthetic oligonucleotide
  source 1..21: mol_type = other DNA
aatacggggcagcatgctact

SEQ ID NO: 12926 - DNA, 21 bp, synthetic construct
  misc_feature 1..21: note = Description of Artificial Sequence: Synthetic oligonucleotide
  source 1..21: mol_type = other DNA
ggccaaggcagccccaaagcc

SEQ ID NO: 12927 - DNA, 21 bp, synthetic construct
  misc_feature 1..21: note = Description of Artificial Sequence: Synthetic oligonucleotide
  source 1..21: mol_type = other DNA
caaggcgacaaacacagcacc

SEQ ID NO: 12928 - DNA, 21 bp, synthetic construct
  misc_feature 1..21: note = Description of Artificial Sequence: Synthetic oligonucleotide
  source 1..21: mol_type = other DNA
ggcaccggcaccaaacaagtc

SEQ ID NO: 12929 - DNA, 21 bp, synthetic construct
  misc_feature 1..21: note = Description of Artificial Sequence: Synthetic oligonucleotide
  source 1..21: mol_type = other DNA
aactgttctggacagaatcaa

SEQ ID NO: 12930 - DNA, 21 bp, synthetic construct
  misc_feature 1..21: note = Description of Artificial Sequence: Synthetic oligonucleotide
  source 1..21: mol_type = other DNA
ctgactgcgaaggggactaat

SEQ ID NO: 12931 - DNA, 21 bp, synthetic construct
  misc_feature 1..21: note = Description of Artificial Sequence: Synthetic oligonucleotide
  source 1..21: mol_type = other DNA
cgttcgtctaaggaggctggg

SEQ ID NO: 12932 - DNA, 21 bp, synthetic construct
  misc_feature 1..21: note = Description of Artificial Sequence: Synthetic oligonucleotide
  source 1..21: mol_type = other DNA
tctggggcttcgcctagttct

SEQ ID NO: 12933 - DNA, 21 bp, synthetic construct
  misc_feature 1..21: note = Description of Artificial Sequence: Synthetic oligonucleotide
  source 1..21: mol_type = other DNA
gggaaggattcgaagcctttt

SEQ ID NO: 12934 - DNA, 21 bp, synthetic construct
  misc_feature 1..21: note = Description of Artificial Sequence: Synthetic oligonucleotide
  source 1..21: mol_type = other DNA
gggaatgctaagagtgcgctt

SEQ ID NO: 12935 - DNA, 21 bp, synthetic construct
  misc_feature 1..21: note = Description of Artificial Sequence: Synthetic oligonucleotide
  source 1..21: mol_type = other DNA
gacggcagccaaaaattcagc

SEQ ID NO: 12936 - DNA, 21 bp, synthetic construct
  misc_feature 1..21: note = Description of Artificial Sequence: Synthetic oligonucleotide
  source 1..21: mol_type = other DNA
gaccccagcacccaacccaaa

SEQ ID NO: 12937 - DNA, 21 bp, synthetic construct
  misc_feature 1..21: note = Description of Artificial Sequence: Synthetic oligonucleotide
  source 1..21: mol_type = other DNA
ggtggtactccgtctttgggt

SEQ ID NO: 12938 - DNA, 21 bp, synthetic construct
  misc_feature 1..21: note = Description of Artificial Sequence: Synthetic oligonucleotide
  source 1..21: mol_type = other DNA
atgagcagaagccccaccgaa

SEQ ID NO: 12939 - DNA, 21 bp, synthetic construct
  misc_feature 1..21: note = Description of Artificial Sequence: Synthetic oligonucleotide
  source 1..21: mol_type = other DNA
tctaatggtaattcgcctcgt

SEQ ID NO: 12940 - DNA, 21 bp, synthetic construct
  misc_feature 1..21: note = Description of Artificial Sequence: Synthetic oligonucleotide
  source 1..21: mol_type = other DNA
agcaccaccgcccccccccaa

SEQ ID NO: 12941 - DNA, 21 bp, synthetic construct
  misc_feature 1..21: note = Description of Artificial Sequence: Synthetic oligonucleotide
  source 1..21: mol_type = other DNA
accgtcagcgccaaccaaaaa

SEQ ID NO: 12942 - DNA, 21 bp, synthetic construct
  misc_feature 1..21: note = Description of Artificial Sequence: Synthetic oligonucleotide
  source 1..21: mol_type = other DNA
agtcaggggaagggttctttg

SEQ ID NO: 12943 - DNA, 21 bp, synthetic construct
  misc_feature 1..21: note = Description of Artificial Sequence: Synthetic oligonucleotide
  source 1..21: mol_type = other DNA
gtcggcaccggcaaagacggc

SEQ ID NO: 12944 - DNA, 21 bp, synthetic construct
  misc_feature 1..21: note = Description of Artificial Sequence: Synthetic oligonucleotide
  source 1..21: mol_type = other DNA
ggcagcggcaacaaaaccacc

SEQ ID NO: 12945 - DNA, 21 bp, synthetic construct
  misc_feature 1..21: note = Description of Artificial Sequence: Synthetic oligonucleotide
  source 1..21: mol_type = other DNA
aattcgggtggtggtgctaag

SEQ ID NO: 12946 - DNA, 21 bp, synthetic construct
  misc_feature 1..21: note = Description of Artificial Sequence: Synthetic oligonucleotide
  source 1..21: mol_type = other DNA
agcggcagcaaaagcctcggc

SEQ ID NO: 12947 - DNA, 21 bp, synthetic construct
  misc_feature 1..21: note = Description of Artificial Sequence: Synthetic oligonucleotide
  source 1..21: mol_type = other DNA
tctgggggttcgaaggggtct

SEQ ID NO: 12948 - DNA, 21 bp, synthetic construct
  misc_feature 1..21: note = Description of Artificial Sequence: Synthetic oligonucleotide
  source 1..21: mol_type = other DNA
gtcggcgaacaaagaggcacc

SEQ ID NO: 12949 - DNA, 21 bp, synthetic construct
  misc_feature 1..21: note = Description of Artificial Sequence: Synthetic oligonucleotide
  source 1..21: mol_type = other DNA
cggagtgatggtaagatggct

SEQ ID NO: 12950 - DNA, 21 bp, synthetic construct
  misc_feature 1..21: note = Description of Artificial Sequence: Synthetic oligonucleotide
  source 1..21: mol_type = other DNA
agtaaggggtctagtaatgag

SEQ ID NO: 12951 - DNA, 21 bp, synthetic construct
  misc_feature 1..21: note = Description of Artificial Sequence: Synthetic oligonucleotide
  source 1..21: mol_type = other DNA
gggagggatgggaagcctacg

SEQ ID NO: 12952 - DNA, 21 bp, synthetic construct
  misc_feature 1..21: note = Description of Artificial Sequence: Synthetic oligonucleotide
  source 1..21: mol_type = other DNA
agcggcggcacccccagcaac

SEQ ID NO: 12953 - DNA, 21 bp, synthetic construct
  misc_feature 1..21: note = Description of Artificial Sequence: Synthetic oligonucleotide
  source 1..21: mol_type = other DNA
tcgagttctacgaaggctgtt

SEQ ID NO: 12954 - DNA, 21 bp, synthetic construct
  misc_feature 1..21: note = Description of Artificial Sequence: Synthetic oligonucleotide
  source 1..21: mol_type = other DNA
aggtcgcagaagccgagtgag

SEQ ID NO: 12955 - DNA, 21 bp, synthetic construct
  misc_feature 1..21: note = Description of Artificial Sequence: Synthetic oligonucleotide
  source 1..21: mol_type = other DNA
agtcagcctgatcctaggact

SEQ ID NO: 12956 - DNA, 21 bp, synthetic construct
  misc_feature 1..21: note = Description of Artificial Sequence: Synthetic oligonucleotide
  source 1..21: mol_type = other DNA
gatcgtagggaggcgagtacg

SEQ ID NO: 12957 - DNA, 21 bp, synthetic construct
  misc_feature 1..21: note = Description of Artificial Sequence: Synthetic oligonucleotide
  source 1..21: mol_type = other DNA
gaccaaagcggcaccaccaga

SEQ ID NO: 12958 - DNA, 21 bp, synthetic construct
  misc_feature 1..21: note = Description of Artificial Sequence: Synthetic oligonucleotide
  source 1..21: mol_type = other DNA
agtagtgataagggtaggaat

SEQ ID NO: 12959 - DNA, 21 bp, synthetic construct
  misc_feature 1..21: note = Description of Artificial Sequence: Synthetic oligonucleotide
  source 1..21: mol_type = other DNA
aaaggcgccagccacaacgaa

SEQ ID NO: 12960 - DNA, 21 bp, synthetic construct
  misc_feature 1..21: note = Description of Artificial Sequence: Synthetic oligonucleotide
  source 1..21: mol_type = other DNA
agttcttcgaagcaggctcag

SEQ ID NO: 12961 - DNA, 21 bp, synthetic construct
  misc_feature 1..21: note = Description of Artificial Sequence: Synthetic oligonucleotide
  source 1..21: mol_type = other DNA
cagatggagaagtctaatagt

SEQ ID NO: 12962 - DNA, 21 bp, synthetic construct
  misc_feature 1..21: note = Description of Artificial Sequence: Synthetic oligonucleotide
  source 1..21: mol_type = other DNA
gctgcggcgtcgcagagtagt

SEQ ID NO: 12963 - DNA, 21 bp, synthetic construct
  misc_feature 1..21: note = Description of Artificial Sequence: Synthetic oligonucleotide
  source 1..21: mol_type = other DNA
accagaaaccaaaccagcagc

SEQ ID NO: 12964 - DNA, 21 bp, synthetic construct
  misc_feature 1..21: note = Description of Artificial Sequence: Synthetic oligonucleotide
  source 1..21: mol_type = other DNA
gacaccagccacaaagccagc

SEQ ID NO: 12965 - DNA, 21 bp, synthetic construct
  misc_feature 1..21: note = Description of Artificial Sequence: Synthetic oligonucleotide
  source 1..21: mol_type = other DNA
gattctaatactaagatggtt

SEQ ID NO: 12966 - DNA, 21 bp, synthetic construct
  misc_feature 1..21: note = Description of Artificial Sequence: Synthetic oligonucleotide
  source 1..21: mol_type = other DNA
tctgtgtctacgggtaataag

SEQ ID NO: 12967 - DNA, 21 bp, synthetic construct
  misc_feature 1..21: note = Description of Artificial Sequence: Synthetic oligonucleotide
  source 1..21: mol_type = other DNA
cacgccggcaacaacaacgcc

SEQ ID NO: 12968 - DNA, 21 bp, synthetic construct
  misc_feature 1..21: note = Description of Artificial Sequence: Synthetic oligonucleotide
  source 1..21: mol_type = other DNA
tctacgggtagtccgggtaat

SEQ ID NO: 12969 - DNA, 21 bp, synthetic construct
  misc_feature 1..21: note = Description of Artificial Sequence: Synthetic oligonucleotide
  source 1..21: mol_type = other DNA
gatcatccttctgggaagcat

SEQ ID NO: 12970 - DNA, 21 bp, synthetic construct
  misc_feature 1..21: note = Description of Artificial Sequence: Synthetic oligonucleotide
  source 1..21: mol_type = other DNA
gataatactaaggctgggatg

SEQ ID NO: 12971 - DNA, 21 bp, synthetic construct
  misc_feature 1..21: note = Description of Artificial Sequence: Synthetic oligonucleotide
  source 1..21: mol_type = other DNA
caggggagtagtaagatgact

SEQ ID NO: 12972 - DNA, 21 bp, synthetic construct
  misc_feature 1..21: note = Description of Artificial Sequence: Synthetic oligonucleotide
  source 1..21: mol_type = other DNA
gaaaacagaagcaccagcgtc

SEQ ID NO: 12973 - DNA, 21 bp, synthetic construct
  misc_feature 1..21: note = Description of Artificial Sequence: Synthetic oligonucleotide
  source 1..21: mol_type = other DNA
agtggggataggggggtgcag

SEQ ID NO: 12974 - DNA, 21 bp, synthetic construct
  misc_feature 1..21: note = Description of Artificial Sequence: Synthetic oligonucleotide
  source 1..21: mol_type = other DNA
aacagcgaagccacccccaga

SEQ ID NO: 12975 - DNA, 21 bp, synthetic construct
  misc_feature 1..21: note = Description of Artificial Sequence: Synthetic oligonucleotide
  source 1..21: mol_type = other DNA
atgggtacggagcgtaatgtt

SEQ ID NO: 12976 - DNA, 21 bp, synthetic construct
  misc_feature 1..21: note = Description of Artificial Sequence: Synthetic oligonucleotide
  source 1..21: mol_type = other DNA
ggcggcaccagcagccccacc

SEQ ID NO: 12977 - DNA, 21 bp, synthetic construct
  misc_feature 1..21: note = Description of Artificial Sequence: Synthetic oligonucleotide
  source 1..21: mol_type = other DNA
gctgtgggttctaagtcgaat

SEQ ID NO: 12978 - DNA, 21 bp, synthetic construct
  misc_feature 1..21: note = Description of Artificial Sequence: Synthetic oligonucleotide
  source 1..21: mol_type = other DNA
gcgggtacgaataaggcttct

SEQ ID NO: 12979 - DNA, 21 bp, synthetic construct
  misc_feature 1..21: note = Description of Artificial Sequence: Synthetic oligonucleotide
  source 1..21: mol_type = other DNA
agtactgggaagactaatact

SEQ ID NO: 12980 - DNA, 21 bp, synthetic construct
  misc_feature 1..21: note = Description of Artificial Sequence: Synthetic oligonucleotide
  source 1..21: mol_type = other DNA
gaccccagcaaaaccgccctc

SEQ ID NO: 12981 - DNA, 21 bp, synthetic construct
  misc_feature 1..21: note = Description of Artificial Sequence: Synthetic oligonucleotide
  source 1..21: mol_type = other DNA
ggcaccagcggcaaaagcatc

SEQ ID NO: 12982 - DNA, 21 bp, synthetic construct
  misc_feature 1..21: note = Description of Artificial Sequence: Synthetic oligonucleotide
  source 1..21: mol_type = other DNA
ggtagtgggtctcctattaag

SEQ ID NO: 12983 - DNA, 21 bp, synthetic construct
  misc_feature 1..21: note = Description of Artificial Sequence: Synthetic oligonucleotide
  source 1..21: mol_type = other DNA
ggtgggtctcagacgaagatt

SEQ ID NO: 12984 - DNA, 21 bp, synthetic construct
  misc_feature 1..21: note = Description of Artificial Sequence: Synthetic oligonucleotide
  source 1..21: mol_type = other DNA
aacaccggcaccagcgccaga

SEQ ID NO: 12985 - DNA, 21 bp, synthetic construct
  misc_feature 1..21: note = Description of Artificial Sequence: Synthetic oligonucleotide
  source 1..21: mol_type = other DNA
accggcaacaccagccaaagc

SEQ ID NO: 12986 - DNA, 21 bp, synthetic construct
  misc_feature 1..21: note = Description of Artificial Sequence: Synthetic oligonucleotide
  source 1..21: mol_type = other DNA
ggcagaggcagcggcagcagc

SEQ ID NO: 12987 - DNA, 21 bp, synthetic construct
  misc_feature 1..21: note = Description of Artificial Sequence: Synthetic oligonucleotide
  source 1..21: mol_type = other DNA
tcgggggagcgtaatccggtt

SEQ ID NO: 12988 - DNA, 21 bp, synthetic construct
  misc_feature 1..21: note = Description of Artificial Sequence: Synthetic oligonucleotide
  source 1..21: mol_type = other DNA
gaaagcaaacccagcagcgtc

SEQ ID NO: 12989 - DNA, 21 bp, synthetic construct
  misc_feature 1..21: note = Description of Artificial Sequence: Synthetic oligonucleotide
  source 1..21: mol_type = other DNA
accaccagcggcaaacccccc

SEQ ID NO: 12990 - DNA, 21 bp, synthetic construct
  misc_feature 1..21: note = Description of Artificial Sequence: Synthetic oligonucleotide
  source 1..21: mol_type = other DNA
gggaatgggcatgctccgact

SEQ ID NO: 12991 - DNA, 21 bp, synthetic construct
  misc_feature 1..21: note = Description of Artificial Sequence: Synthetic oligonucleotide
  source 1..21: mol_type = other DNA
agccaagccagcaaacccatc

SEQ ID NO: 12992 - DNA, 21 bp, synthetic construct
  misc_feature 1..21: note = Description of Artificial Sequence: Synthetic oligonucleotide
  source 1..21: mol_type = other DNA
caaggcgacagcaacgccaga

SEQ ID NO: 12993 - DNA, 21 bp, synthetic construct
  misc_feature 1..21: note = Description of Artificial Sequence: Synthetic oligonucleotide
  source 1..21: mol_type = other DNA
ttccccgccaccaaacaaggc

SEQ ID NO: 12994 - DNA, 21 bp, synthetic construct
  misc_feature 1..21: note = Description of Artificial Sequence: Synthetic oligonucleotide
  source 1..21: mol_type = other DNA
gggtctgctgcgagtgttaag

SEQ ID NO: 12995 - DNA, 21 bp, synthetic construct
  misc_feature 1..21: note = Description of Artificial Sequence: Synthetic oligonucleotide
  source 1..21: mol_type = other DNA
actggtgcgggtgggactgct

SEQ ID NO: 12996 - DNA, 21 bp, synthetic construct
  misc_feature 1..21: note = Description of Artificial Sequence: Synthetic oligonucleotide
  source 1..21: mol_type = other DNA
caacaaaccggccccacccac

SEQ ID NO: 12997 - DNA, 21 bp, synthetic construct
  misc_feature 1..21: note = Description of Artificial Sequence: Synthetic oligonucleotide
  source 1..21: mol_type = other DNA
accagagaaggcaaaggcatc

SEQ ID NO: 12998 - DNA, 21 bp, synthetic construct
  misc_feature 1..21: note = Description of Artificial Sequence: Synthetic oligonucleotide
  source 1..21: mol_type = other DNA
agcagcaccaccaccggcggc

SEQ ID NO: 12999 - DNA, 21 bp, synthetic construct
  misc_feature 1..21: note = Description of Artificial Sequence: Synthetic oligonucleotide
  source 1..21: mol_type = other DNA
ggtcagggtaatagtacgaag

SEQ ID NO: 13000 - DNA, 21 bp, synthetic construct
  misc_feature 1..21: note = Description of Artificial Sequence: Synthetic oligonucleotide
  source 1..21: mol_type = other DNA
gggagtatgtctcctagtcgt

SEQ ID NO: 13001 - DNA, 21 bp, synthetic construct
  misc_feature 1..21: note = Description of Artificial Sequence: Synthetic oligonucleotide
  source 1..21: mol_type = other DNA
agcagccaaaccaccgccaaa

SEQ ID NO: 13002 - DNA, 21 bp, synthetic construct
  misc_feature 1..21: note = Description of Artificial Sequence: Synthetic oligonucleotide
  source 1..21: mol_type = other DNA
ggcaacggcggcagcaacaga

SEQ ID NO: 13003 - DNA, 21 bp, synthetic construct
  misc_feature 1..21: note = Description of Artificial Sequence: Synthetic oligonucleotide
  source 1..21: mol_type = other DNA
aacagcggcaaaagccccgtc

SEQ ID NO: 13004 - DNA, 21 bp, synthetic construct
  misc_feature 1..21: note = Description of Artificial Sequence: Synthetic oligonucleotide
  source 1..21: mol_type = other DNA
ggtgataataagtcgtcttat

SEQ ID NO: 13005 - DNA, 21 bp, synthetic construct
  misc_feature 1..21: note = Description of Artificial Sequence: Synthetic oligonucleotide
  source 1..21: mol_type = other DNA
gagggtaagtctgatcatgcg

SEQ ID NO: 13006 - DNA, 21 bp, synthetic construct
  misc_feature 1..21: note = Description of Artificial Sequence: Synthetic oligonucleotide
  source 1..21: mol_type = other DNA
aataatggtgcgaaggctggg

SEQ ID NO: 13007 - DNA, 21 bp, synthetic construct
  misc_feature 1..21: note = Description of Artificial Sequence: Synthetic oligonucleotide
  source 1..21: mol_type = other DNA
ggcagcaaacccggcaccagc

SEQ ID NO: 13008 - DNA, 21 bp, synthetic construct
  misc_feature 1..21: note = Description of Artificial Sequence: Synthetic oligonucleotide
  source 1..21: mol_type = other DNA
gctcagactaagtcttcggtt

SEQ ID NO: 13009 - DNA, 21 bp, synthetic construct
  misc_feature 1..21: note = Description of Artificial Sequence: Synthetic oligonucleotide
  source 1..21: mol_type = other DNA
tcgacggggtcgcatccggcg

SEQ ID NO: 13010 - DNA, 21 bp, synthetic construct
  misc_feature 1..21: note = Description of Artificial Sequence: Synthetic oligonucleotide
  source 1..21: mol_type = other DNA
agcatgagcagcaaaagcgcc

SEQ ID NO: 13011 - DNA, 21 bp, synthetic construct
  misc_feature 1..21: note = Description of Artificial Sequence: Synthetic oligonucleotide
  source 1..21: mol_type = other DNA
gttagtacttcgaaggcgggt

SEQ ID NO: 13012 - DNA, 21 bp, synthetic construct
  misc_feature 1..21: note = Description of Artificial Sequence: Synthetic oligonucleotide
  source 1..21: mol_type = other DNA
accagcggcaccgccaacagc

SEQ ID NO: 13013 - DNA, 21 bp, synthetic construct
  misc_feature 1..21: note = Description of Artificial Sequence: Synthetic oligonucleotide
  source 1..21: mol_type = other DNA
attggtggttctgggtctgcg

SEQ ID NO: 13014 - DNA, 21 bp, synthetic construct
  misc_feature 1..21: note = Description of Artificial Sequence: Synthetic oligonucleotide
  source 1..21: mol_type = other DNA
ggtcagaataagggggcgagt

SEQ ID NO: 13015 - DNA, 21 bp, synthetic construct
  misc_feature 1..21: note = Description of Artificial Sequence: Synthetic oligonucleotide
  source 1..21: mol_type = other DNA
gacagagccggcagcagcgtc

SEQ ID NO: 13016 - DNA, 21 bp, synthetic construct
  misc_feature 1..21: note = Description of Artificial Sequence: Synthetic oligonucleotide
  source 1..21: mol_type = other DNA
gaaggcagaggcaccagcagc

SEQ ID NO: 13017 - DNA, 21 bp, synthetic construct
  misc_feature 1..21: note = Description of Artificial Sequence: Synthetic oligonucleotide
  source 1..21: mol_type = other DNA
cacagcagcagcaaaagcagc

SEQ ID NO: 13018 - DNA, 21 bp, synthetic construct
  misc_feature 1..21: note = Description of Artificial Sequence: Synthetic oligonucleotide
  source 1..21: mol_type = other DNA
actaattctcagacgcatggg

SEQ ID NO: 13019 - DNA, 21 bp, synthetic construct
  misc_feature 1..21: note = Description of Artificial Sequence: Synthetic oligonucleotide
  source 1..21: mol_type = other DNA
aatggtggtaagccgaatgct

SEQ ID NO: 13020 - DNA, 21 bp, synthetic construct
  misc_feature 1..21: note = Description of Artificial Sequence: Synthetic oligonucleotide
  source 1..21: mol_type = other DNA
aacggcgccagcaaaagcagc

SEQ ID NO: 13021 - DNA, 21 bp, synthetic construct
  misc_feature 1..21: note = Description of Artificial Sequence: Synthetic oligonucleotide
  source 1..21: mol_type = other DNA
caaaccggcgaaaaagccaga

SEQ ID NO: 13022 - DNA, 21 bp, synthetic construct
  misc_feature 1..21: note = Description of Artificial Sequence: Synthetic oligonucleotide
  source 1..21: mol_type = other DNA
gatgatacgaagagtaatagt

SEQ ID NO: 13023 - DNA, 21 bp, synthetic construct
  misc_feature 1..21: note = Description of Artificial Sequence: Synthetic oligonucleotide
  source 1..21: mol_type = other DNA
gtccaaggcaaccccatcagc

SEQ ID NO: 13024 - DNA, 21 bp, synthetic construct
  misc_feature 1..21: note = Description of Artificial Sequence: Synthetic oligonucleotide
  source 1..21: mol_type = other DNA
agcaaaagcaccacccccacc

SEQ ID NO: 13025 - DNA, 21 bp, synthetic construct
  misc_feature 1..21: note = Description of Artificial Sequence: Synthetic oligonucleotide
  source 1..21: mol_type = other DNA
agttcgaatggggttatgaag

SEQ ID NO: 13026 - DNA, 21 bp, synthetic construct
  misc_feature 1..21: note = Description of Artificial Sequence: Synthetic oligonucleotide
  source 1..21: mol_type = other DNA
gcggggtcgaagggtaaggat

SEQ ID NO: 13027 - DNA, 21 bp, synthetic construct
  misc_feature 1..21: note = Description of Artificial Sequence: Synthetic oligonucleotide
  source 1..21: mol_type = other DNA
gatcctgataagtctaggtcg

SEQ ID NO: 13028 - DNA, 21 bp, synthetic construct
  misc_feature 1..21: note = Description of Artificial Sequence: Synthetic oligonucleotide
  source 1..21: mol_type = other DNA
agccccagcggcgaccacaga

SEQ ID NO: 13029 - DNA, 21 bp, synthetic construct
  misc_feature 1..21: note = Description of Artificial Sequence: Synthetic oligonucleotide
  source 1..21: mol_type = other DNA
ttgccgacggctaattctagt

SEQ ID NO: 13030 - DNA, 21 bp, synthetic construct
  misc_feature 1..21: note = Description of Artificial Sequence: Synthetic oligonucleotide
  source 1..21: mol_type = other DNA
agcagcgaccaagccagagcc

SEQ ID NO: 13031 - DNA, 21 bp, synthetic construct
  misc_feature 1..21: note = Description of Artificial Sequence: Synthetic oligonucleotide
  source 1..21: mol_type = other DNA
agtggtgttaatactccgacg

SEQ ID NO: 13032 - DNA, 21 bp, synthetic construct
  misc_feature 1..21: note = Description of Artificial Sequence: Synthetic oligonucleotide
  source 1..21: mol_type = other DNA
agttcgggtcgtgaggcttct

SEQ ID NO: 13033 - DNA, 21 bp, synthetic construct
  misc_feature 1..21: note = Description of Artificial Sequence: Synthetic oligonucleotide
  source 1..21: mol_type = other DNA
gggagttctaagggtccgagt

SEQ ID NO: 13034 - DNA, 21 bp, synthetic construct
  misc_feature 1..21: note = Description of Artificial Sequence: Synthetic oligonucleotide
  source 1..21: mol_type = other DNA
ggtgggtcggggagtgttaag

SEQ ID NO: 13035 - DNA, 21 bp, synthetic construct
  misc_feature 1..21: note = Description of Artificial Sequence: Synthetic oligonucleotide
  source 1..21: mol_type = other DNA
ggcgaacacaaacccagcaac

SEQ ID NO: 13036 - DNA, 21 bp, synthetic construct
  misc_feature 1..21: note = Description of Artificial Sequence: Synthetic oligonucleotide
  source 1..21: mol_type = other DNA
ctcagcgccaaagaaggcagc

SEQ ID NO: 13037 - DNA, 21 bp, synthetic construct
  misc_feature 1..21: note = Description of Artificial Sequence: Synthetic oligonucleotide
  source 1..21: mol_type = other DNA
atgagcagcggcagccaaggc

SEQ ID NO: 13038 - DNA, 21 bp, synthetic construct
  misc_feature 1..21: note = Description of Artificial Sequence: Synthetic oligonucleotide
  source 1..21: mol_type = other DNA
cacaacaacagcaaagtcgaa

SEQ ID NO: 13039 - DNA, 21 bp, synthetic construct
  misc_feature 1..21: note = Description of Artificial Sequence: Synthetic oligonucleotide
  source 1..21: mol_type = other DNA
acgagtggtccggcgttgaag

SEQ ID NO: 13040 - DNA, 21 bp, synthetic construct
  misc_feature 1..21: note = Description of Artificial Sequence: Synthetic oligonucleotide
  source 1..21: mol_type = other DNA
cttgatagtaagcctgttcat

SEQ ID NO: 13041 - DNA, 21 bp, synthetic construct
  misc_feature 1..21: note = Description of Artificial Sequence: Synthetic oligonucleotide
  source 1..21: mol_type = other DNA
tccggtcttaaggatcaggct

SEQ ID NO: 13042 - DNA, 21 bp, synthetic construct
  misc_feature 1..21: note = Description of Artificial Sequence: Synthetic oligonucleotide
  source 1..21: mol_type = other DNA
gtcaacaacaccaaaaacgtc

SEQ ID NO: 13043 - DNA, 21 bp, synthetic construct
  misc_feature 1..21: note = Description of Artificial Sequence: Synthetic oligonucleotide
  source 1..21: mol_type = other DNA
ggcggcgccaccgccaccaga

SEQ ID NO: 13044 - DNA, 21 bp, synthetic construct
  misc_feature 1..21: note = Description of Artificial Sequence: Synthetic oligonucleotide
  source 1..21: mol_type = other DNA
ggcagcagcggcagccccagc

SEQ ID NO: 13045 - DNA, 21 bp, synthetic construct
  misc_feature 1..21: note = Description of Artificial Sequence: Synthetic oligonucleotide
  source 1..21: mol_type = other DNA
actcggggtggtagttctact

SEQ ID NO: 13046 - DNA, 21 bp, synthetic construct
  misc_feature 1..21: note = Description of Artificial Sequence: Synthetic oligonucleotide
  source 1..21: mol_type = other DNA
gtcggcaccacccacctcagc

SEQ ID NO: 13047 - DNA, 21 bp, synthetic construct
  misc_feature 1..21: note = Description of Artificial Sequence: Synthetic oligonucleotide
  source 1..21: mol_type = other DNA
gatgggggtgctagtaataag

SEQ ID NO: 13048 - DNA, 21 bp, synthetic construct
  misc_feature 1..21: note = Description of Artificial Sequence: Synthetic oligonucleotide
  source 1..21: mol_type = other DNA
aaaagcgccacccccagcaac

SEQ ID NO: 13049 - DNA, 21 bp, synthetic construct
  misc_feature 1..21: note = Description of Artificial Sequence: Synthetic oligonucleotide
  source 1..21: mol_type = other DNA
gggacgattgataaggggcat

SEQ ID NO: 13050 - DNA, 21 bp, synthetic construct
  misc_feature 1..21: note = Description of Artificial Sequence: Synthetic oligonucleotide
  source 1..21: mol_type = other DNA
aaagaccaaagccccacccac

SEQ ID NO: 13051 - DNA, 21 bp, synthetic construct
  misc_feature 1..21: note = Description of Artificial Sequence: Synthetic oligonucleotide
  source 1..21: mol_type = other DNA
accagaagccaaaccagcgtc

SEQ ID NO: 13052 - DNA, 21 bp, synthetic construct
  misc_feature 1..21: note = Description of Artificial Sequence: Synthetic oligonucleotide
  source 1..21: mol_type = other DNA
accagagaaaacaaaagcctc

SEQ ID NO: 13053 - DNA, 21 bp, synthetic construct
  misc_feature 1..21: note = Description of Artificial Sequence: Synthetic oligonucleotide
  source 1..21: mol_type = other DNA
gagcctggttcgcataagaat

SEQ ID NO: 13054 - DNA, 21 bp, synthetic construct
  misc_feature 1..21: note = Description of Artificial Sequence: Synthetic oligonucleotide
  source 1..21: mol_type = other DNA
gttgggcagtcgtcttcgaat

SEQ ID NO: 13055 - DNA, 21 bp, synthetic construct
  misc_feature 1..21: note = Description of Artificial Sequence: Synthetic oligonucleotide
  source 1..21: mol_type = other DNA
gacaacaaagacaaagtcctc

SEQ ID NO: 13056 - DNA, 21 bp, synthetic construct
  misc_feature 1..21: note = Description of Artificial Sequence: Synthetic oligonucleotide
  source 1..21: mol_type = other DNA
accaacagcaaaagcgccgtc

SEQ ID NO: 13057 - DNA, 21 bp, synthetic construct
  misc_feature 1..21: note = Description of Artificial Sequence: Synthetic oligonucleotide
  source 1..21: mol_type = other DNA
tcgacggcgaagggttctaat

SEQ ID NO: 13058 - DNA, 21 bp, synthetic construct
  misc_feature 1..21: note = Description of Artificial Sequence: Synthetic oligonucleotide
  source 1..21: mol_type = other DNA
gctgggtctaaggtgacgact

SEQ ID NO: 13059 - DNA, 21 bp, synthetic construct
  misc_feature 1..21: note = Description of Artificial Sequence: Synthetic oligonucleotide
  source 1..21: mol_type = other DNA
aatcgtgagtcgagtacggtg

SEQ ID NO: 13060 - DNA, 21 bp, synthetic construct
  misc_feature 1..21: note = Description of Artificial Sequence: Synthetic oligonucleotide
  source 1..21: mol_type = other DNA
gagttgcctgctggtaagtcg

SEQ ID NO: 13061 - DNA, 21 bp, synthetic construct
  misc_feature 1..21: note = Description of Artificial Sequence: Synthetic oligonucleotide
  source 1..21: mol_type = other DNA
accaccggccaaagcgtcggc

SEQ ID NO: 13062 - DNA, 21 bp, synthetic construct
  misc_feature 1..21: note = Description of Artificial Sequence: Synthetic oligonucleotide
  source 1..21: mol_type = other DNA
gctagtggtagtcataattct

SEQ ID NO: 13063 - DNA, 21 bp, synthetic construct
  misc_feature 1..21: note = Description of Artificial Sequence: Synthetic oligonucleotide
  source 1..21: mol_type = other DNA
aatgcttcgacgaagtcgggt

SEQ ID NO: 13064 - DNA, 21 bp, synthetic construct
  misc_feature 1..21: note = Description of Artificial Sequence: Synthetic oligonucleotide
  source 1..21: mol_type = other DNA
ggggggagtcctacggctcag

SEQ ID NO: 13065 - DNA, 21 bp, synthetic construct
  misc_feature 1..21: note = Description of Artificial Sequence: Synthetic oligonucleotide
  source 1..21: mol_type = other DNA
aatactccgtctaaggcgtct

SEQ ID NO: 13066 - DNA, 21 bp, synthetic construct
  misc_feature 1..21: note = Description of Artificial Sequence: Synthetic oligonucleotide
  source 1..21: mol_type = other DNA
aatggtagtgcgtcgaatcgg

SEQ ID NO: 13067 - DNA, 21 bp, synthetic construct
  misc_feature 1..21: note = Description of Artificial Sequence: Synthetic oligonucleotide
  source 1..21: mol_type = other DNA
tcggtgtcgggtggtcagggt

SEQ ID NO: 13068 - DNA, 21 bp, synthetic construct
  misc_feature 1..21: note = Description of Artificial Sequence: Synthetic oligonucleotide
  source 1..21: mol_type = other DNA
atgagtaagcctacgaatgtg

SEQ ID NO: 13069 - DNA, 21 bp, synthetic construct
  misc_feature 1..21: note = Description of Artificial Sequence: Synthetic oligonucleotide
  source 1..21: mol_type = other DNA
cagccggcggctactcctaat

SEQ ID NO: 13070 - DNA, 21 bp, synthetic construct
  misc_feature 1..21: note = Description of Artificial Sequence: Synthetic oligonucleotide
  source 1..21: mol_type = other DNA
gaacccgtcaaaagcaccatc

SEQ ID NO: 13071 - DNA, 21 bp, synthetic construct
  misc_feature 1..21: note = Description of Artificial Sequence: Synthetic oligonucleotide
  source 1..21: mol_type = other DNA
gagcagagtaagcagagtaag

SEQ ID NO: 13072 - DNA, 21 bp, synthetic construct
  misc_feature 1..21: note = Description of Artificial Sequence: Synthetic oligonucleotide
  source 1..21: mol_type = other DNA
ggcaccagccaaagcagcaac

SEQ ID NO: 13073 - DNA, 21 bp, synthetic construct
  misc_feature 1..21: note = Description of Artificial Sequence: Synthetic oligonucleotide
  source 1..21: mol_type = other DNA
ggcaacagcggcagcggcgtc

SEQ ID NO: 13074 - DNA, 21 bp, synthetic construct
  misc_feature 1..21: note = Description of Artificial Sequence: Synthetic oligonucleotide
  source 1..21: mol_type = other DNA
ctggggtctgggcaggttcag

SEQ ID NO: 13075 - DNA, 21 bp, synthetic construct
  misc_feature 1..21: note = Description of Artificial Sequence: Synthetic oligonucleotide
  source 1..21: mol_type = other DNA
gatgctggtcataagtctacg

SEQ ID NO: 13076 - DNA, 21 bp, synthetic construct
  misc_feature 1..21: note = Description of Artificial Sequence: Synthetic oligonucleotide
  source 1..21: mol_type = other DNA
ggtgatggtggggctcagaag

SEQ ID NO: 13077 - DNA, 21 bp, synthetic construct
  misc_feature 1..21: note = Description of Artificial Sequence: Synthetic oligonucleotide
  source 1..21: mol_type = other DNA
agcggcaacaaacccatcagc

SEQ ID NO: 13078 - DNA, 21 bp, synthetic construct
  misc_feature 1..21: note = Description of Artificial Sequence: Synthetic oligonucleotide
  source 1..21: mol_type = other DNA
gtcagcggcgccaaacccctc

SEQ ID NO: 13079 - DNA, 21 bp, synthetic construct
  misc_feature 1..21: note = Description of Artificial Sequence: Synthetic oligonucleotide
  source 1..21: mol_type = other DNA
aacgccagcaaaagcagcgcc

SEQ ID NO: 13080 - DNA, 21 bp, synthetic construct
  misc_feature 1..21: note = Description of Artificial Sequence: Synthetic oligonucleotide
  source 1..21: mol_type = other DNA
ggcatcggcggccacaacagc

SEQ ID NO: 13081 - DNA, 21 bp, synthetic construct
  misc_feature 1..21: note = Description of Artificial Sequence: Synthetic oligonucleotide
  source 1..21: mol_type = other DNA
ggtgggcagagtaagccgacg

SEQ ID NO: 13082 - DNA, 21 bp, synthetic construct
  misc_feature 1..21: note = Description of Artificial Sequence: Synthetic oligonucleotide
  source 1..21: mol_type = other DNA
cagggggataagtcttcgtat

SEQ ID NO: 13083 - DNA, 21 bp, synthetic construct
  misc_feature 1..21: note = Description of Artificial Sequence: Synthetic oligonucleotide
  source 1..21: mol_type = other DNA
cagggtcctaagtcggataat

SEQ ID NO: 13084 - DNA, 21 bp, synthetic construct
  misc_feature 1..21: note = Description of Artificial Sequence: Synthetic oligonucleotide
  source 1..21: mol_type = other DNA
gaagccagcagcggcggcaga

SEQ ID NO: 13085 - DNA, 21 bp, synthetic construct
  misc_feature 1..21: note = Description of Artificial Sequence: Synthetic oligonucleotide
  source 1..21: mol_type = other DNA
gccaacaccggcaccacccaa

SEQ ID NO: 13086 - DNA, 21 bp, synthetic construct
  misc_feature 1..21: note = Description of Artificial Sequence: Synthetic oligonucleotide
  source 1..21: mol_type = other DNA
gacagcaacagcaccaccaga

SEQ ID NO: 13087 - DNA, 21 bp, synthetic construct
  misc_feature 1..21: note = Description of Artificial Sequence: Synthetic oligonucleotide
  source 1..21: mol_type = other DNA
ggggaggctcgtccgactaat

SEQ ID NO: 13088 - DNA, 21 bp, synthetic construct
  misc_feature 1..21: note = Description of Artificial Sequence: Synthetic oligonucleotide
  source 1..21: mol_type = other DNA
agcctcaacaaaaacaacatg

SEQ ID NO: 13089 - DNA, 21 bp, synthetic construct
  misc_feature 1..21: note = Description of Artificial Sequence: Synthetic oligonucleotide
  source 1..21: mol_type = other DNA
gggcgtgctaatggttctacg

SEQ ID NO: 13090 - DNA, 21 bp, synthetic construct
  misc_feature 1..21: note = Description of Artificial Sequence: Synthetic oligonucleotide
  source 1..21: mol_type = other DNA
caaagcaacaccgcccacgcc

SEQ ID NO: 13091 - DNA, 21 bp, synthetic construct
  misc_feature 1..21: note = Description of Artificial Sequence: Synthetic oligonucleotide
  source 1..21: mol_type = other DNA
cagggtacttctaagagttcg

SEQ ID NO: 13092 - DNA, 21 bp, synthetic construct
  misc_feature 1..21: note = Description of Artificial Sequence: Synthetic oligonucleotide
  source 1..21: mol_type = other DNA
actggtgggtctaagagtagt

SEQ ID NO: 13093 - DNA, 21 bp, synthetic construct
  misc_feature 1..21: note = Description of Artificial Sequence: Synthetic oligonucleotide
  source 1..21: mol_type = other DNA
caggttgctaagcctgcttcg

SEQ ID NO: 13094 - DNA, 21 bp, synthetic construct
  misc_feature 1..21: note = Description of Artificial Sequence: Synthetic oligonucleotide
  source 1..21: mol_type = other DNA
gtcgccaacccccccagccaa

SEQ ID NO: 13095 - DNA, 21 bp, synthetic construct
  misc_feature 1..21: note = Description of Artificial Sequence: Synthetic oligonucleotide
  source 1..21: mol_type = other DNA
gccaccaccaaagccaccgaa

SEQ ID NO: 13096 - DNA, 21 bp, synthetic construct
  misc_feature 1..21: note = Description of Artificial Sequence: Synthetic oligonucleotide
  source 1..21: mol_type = other DNA
cagacggcctctacgaataag

SEQ ID NO: 13097 - DNA, 21 bp, synthetic construct
  misc_feature 1..21: note = Description of Artificial Sequence: Synthetic oligonucleotide
  source 1..21: mol_type = other DNA
tctggttctgttccgagtact

SEQ ID NO: 13098 - DNA, 21 bp, synthetic construct
  misc_feature 1..21: note = Description of Artificial Sequence: Synthetic oligonucleotide
  source 1..21: mol_type = other DNA
agccaacccaaagccggcagc

SEQ ID NO: 13099 - DNA, 21 bp, synthetic construct
  misc_feature 1..21: note = Description of Artificial Sequence: Synthetic oligonucleotide
  source 1..21: mol_type = other DNA
accgtcagcaccgccaccaaa

SEQ ID NO: 13100 - DNA, 21 bp, synthetic construct
  misc_feature 1..21: note = Description of Artificial Sequence: Synthetic oligonucleotide
  source 1..21: mol_type = other DNA
agagacaacaccaaaaccggc

SEQ ID NO: 13101 - DNA, 21 bp, synthetic construct
  misc_feature 1..21: note = Description of Artificial Sequence: Synthetic oligonucleotide
  source 1..21: mol_type = other DNA
atgaacaacaccaacagcaaa

SEQ ID NO: 13102 - DNA, 21 bp, synthetic construct
  misc_feature 1..21: note = Description of Artificial Sequence: Synthetic oligonucleotide
  source 1..21: mol_type = other DNA
gccggcaccagccacgcccaa

SEQ ID NO: 13103 - DNA, 21 bp, synthetic construct
  misc_feature 1..21: note = Description of Artificial Sequence: Synthetic oligonucleotide
  source 1..21: mol_type = other DNA
tcgggtaagaatgctgttgcg

SEQ ID NO: 13104 - DNA, 21 bp, synthetic construct
  misc_feature 1..21: note = Description of Artificial Sequence: Synthetic oligonucleotide
  source 1..21: mol_type = other DNA
actggttcgcagcataattct

SEQ ID NO: 13105 - DNA, 21 bp, synthetic construct
  misc_feature 1..21: note = Description of Artificial Sequence: Synthetic oligonucleotide
  source 1..21: mol_type = other DNA
gtgggtaatggtcaggggcgt

SEQ ID NO: 13106 - DNA, 21 bp, synthetic construct
  misc_feature 1..21: note = Description of Artificial Sequence: Synthetic oligonucleotide
  source 1..21: mol_type = other DNA
gaggtgggtgggcattctaag

SEQ ID NO: 13107 - DNA, 21 bp, synthetic construct
  misc_feature 1..21: note = Description of Artificial Sequence: Synthetic oligonucleotide
  source 1..21: mol_type = other DNA
agccccgacaaagccaacgtc

SEQ ID NO: 13108 - DNA, 21 bp, synthetic construct
  misc_feature 1..21: note = Description of Artificial Sequence: Synthetic oligonucleotide
  source 1..21: mol_type = other DNA
ggtgttaagaatacgactggg

SEQ ID NO: 13109 - DNA, 21 bp, synthetic construct
  misc_feature 1..21: note = Description of Artificial Sequence: Synthetic oligonucleotide
  source 1..21: mol_type = other DNA
accaccggcagcaaacccagc

SEQ ID NO: 13110 - DNA, 21 bp, synthetic construct
  misc_feature 1..21: note = Description of Artificial Sequence: Synthetic oligonucleotide
  source 1..21: mol_type = other DNA
gggtcgaatacgtctagtggg

SEQ ID NO: 13111 - DNA, 21 bp, synthetic construct
  misc_feature 1..21: note = Description of Artificial Sequence: Synthetic oligonucleotide
  source 1..21: mol_type = other DNA
aaaggcagcagcaccgtcggc

SEQ ID NO: 13112 - DNA, 21 bp, synthetic construct
  misc_feature 1..21: note = Description of Artificial Sequence: Synthetic oligonucleotide
  source 1..21: mol_type = other DNA
gctgctgggactccgtctaat

SEQ ID NO: 13113 - DNA, 21 bp, synthetic construct
  misc_feature 1..21: note = Description of Artificial Sequence: Synthetic oligonucleotide
  source 1..21: mol_type = other DNA
agccaagtcaaaggcggcagc

SEQ ID NO: 13114 - DNA, 21 bp, synthetic construct
  misc_feature 1..21: note = Description of Artificial Sequence: Synthetic oligonucleotide
  source 1..21: mol_type = other DNA
ggcaacagccacgaaagcaaa

SEQ ID NO: 13115 - DNA, 21 bp, synthetic construct
  misc_feature 1..21: note = Description of Artificial Sequence: Synthetic oligonucleotide
  source 1..21: mol_type = other DNA
ggtaatggggcgactactttg

SEQ ID NO: 13116 - DNA, 21 bp, synthetic construct
  misc_feature 1..21: note = Description of Artificial Sequence: Synthetic oligonucleotide
  source 1..21: mol_type = other DNA
aagaatcatccgaagaatgag

SEQ ID NO: 13117 - DNA, 21 bp, synthetic construct
  misc_feature 1..21: note = Description of Artificial Sequence: Synthetic oligonucleotide
  source 1..21: mol_type = other DNA
caggggtctaagggggcgaat

SEQ ID NO: 13118 - DNA, 21 bp, synthetic construct
  misc_feature 1..21: note = Description of Artificial Sequence: Synthetic oligonucleotide
  source 1..21: mol_type = other DNA
caggggaattctaatcagagt

SEQ ID NO: 13119 - DNA, 21 bp, synthetic construct
  misc_feature 1..21: note = Description of Artificial Sequence: Synthetic oligonucleotide
  source 1..21: mol_type = other DNA
tcttctggttctcatccgtcg

SEQ ID NO: 13120 - DNA, 21 bp, synthetic construct
  misc_feature 1..21: note = Description of Artificial Sequence: Synthetic oligonucleotide
  source 1..21: mol_type = other DNA
tcgtcttcgaagccgggtact

SEQ ID NO: 13121 - DNA, 21 bp, synthetic construct
  misc_feature 1..21: note = Description of Artificial Sequence: Synthetic oligonucleotide
  source 1..21: mol_type = other DNA
ggcaaccaaaccaaacccctc

SEQ ID NO: 13122 - DNA, 21 bp, synthetic construct
  misc_feature 1..21: note = Description of Artificial Sequence: Synthetic oligonucleotide
  source 1..21: mol_type = other DNA
tcgggtacgaatactactagt

SEQ ID NO: 13123 - DNA, 21 bp, synthetic construct
  misc_feature 1..21: note = Description of Artificial Sequence: Synthetic oligonucleotide
  source 1..21: mol_type = other DNA
ggggctcatgagaattctaag

SEQ ID NO: 13124 - DNA, 21 bp, synthetic construct
  misc_feature 1..21: note = Description of Artificial Sequence: Synthetic oligonucleotide
  source 1..21: mol_type = other DNA
gagggtgagtcccggaagggg

SEQ ID NO: 13125 - DNA, 21 bp, synthetic construct
  misc_feature 1..21: note = Description of Artificial Sequence: Synthetic oligonucleotide
  source 1..21: mol_type = other DNA
ggcagcgaagacaaaagaatc

SEQ ID NO: 13126 - DNA, 21 bp, synthetic construct
  misc_feature 1..21: note = Description of Artificial Sequence: Synthetic oligonucleotide
  source 1..21: mol_type = other DNA
gacagcagcagcagaagcacc

SEQ ID NO: 13127 - DNA, 21 bp, synthetic construct
  misc_feature 1..21: note = Description of Artificial Sequence: Synthetic oligonucleotide
  source 1..21: mol_type = other DNA
accggcagccaaccccaacac

SEQ ID NO: 13128 - DNA, 21 bp, synthetic construct
  misc_feature 1..21: note = Description of Artificial Sequence: Synthetic oligonucleotide
  source 1..21: mol_type = other DNA
atgactgatactaagccggct

SEQ ID NO: 13129 - DNA, 21 bp, synthetic construct
  misc_feature 1..21: note = Description of Artificial Sequence: Synthetic oligonucleotide
  source 1..21: mol_type = other DNA
caggtgtctaaggcttctttg

SEQ ID NO: 13130 - DNA, 21 bp, synthetic construct
  misc_feature 1..21: note = Description of Artificial Sequence: Synthetic oligonucleotide
  source 1..21: mol_type = other DNA
agcaccggcggcaccggcaaa

SEQ ID NO: 13131 - DNA, 21 bp, synthetic construct
  misc_feature 1..21: note = Description of Artificial Sequence: Synthetic oligonucleotide
  source 1..21: mol_type = other DNA
cagtctgataagccgatttcg

SEQ ID NO: 13132 - DNA, 21 bp, synthetic construct
  misc_feature 1..21: note = Description of Artificial Sequence: Synthetic oligonucleotide
  source 1..21: mol_type = other DNA
gccggcggcgccagccaagtc

SEQ ID NO: 13133 - DNA, 21 bp, synthetic construct
  misc_feature 1..21: note = Description of Artificial Sequence: Synthetic oligonucleotide
  source 1..21: mol_type = other DNA
tctaggggtggttcgcaggct

SEQ ID NO: 13134 - DNA, 21 bp, synthetic construct
  misc_feature 1..21: note = Description of Artificial Sequence: Synthetic oligonucleotide
  source 1..21: mol_type = other DNA
acgatgaatgggaagcctact

SEQ ID NO: 13135 - DNA, 21 bp, synthetic construct
  misc_feature 1..21: note = Description of Artificial Sequence: Synthetic oligonucleotide
  source 1..21: mol_type = other DNA
ggtccgactcagggtacgggt

SEQ ID NO: 13136 - DNA, 21 bp, synthetic construct
  misc_feature 1..21: note = Description of Artificial Sequence: Synthetic oligonucleotide
  source 1..21: mol_type = other DNA
tcgggggtgacgaagggtagt

SEQ ID NO: 13137 - DNA, 21 bp, synthetic construct
  misc_feature 1..21: note = Description of Artificial Sequence: Synthetic oligonucleotide
  source 1..21: mol_type = other DNA
gaaaccggcagacccgccacc

SEQ ID NO: 13138 - DNA, 21 bp, synthetic construct
  misc_feature 1..21: note = Description of Artificial Sequence: Synthetic oligonucleotide
  source 1..21: mol_type = other DNA
ttggggagtaaggaatctagt

SEQ ID NO: 13139 - DNA, 21 bp, synthetic construct
  misc_feature 1..21: note = Description of Artificial Sequence: Synthetic oligonucleotide
  source 1..21: mol_type = other DNA
aatactggtgagaagcagagt

SEQ ID NO: 13140 - DNA, 21 bp, synthetic construct
  misc_feature 1..21: note = Description of Artificial Sequence: Synthetic oligonucleotide
  source 1..21: mol_type = other DNA
gcgtcggctgggagtcagtcg

SEQ ID NO: 13141 - DNA, 21 bp, synthetic construct
  misc_feature 1..21: note = Description of Artificial Sequence: Synthetic oligonucleotide
  source 1..21: mol_type = other DNA
gttacgagtgagaagaatgcg

SEQ ID NO: 13142 - DNA, 21 bp, synthetic construct
  misc_feature 1..21: note = Description of Artificial Sequence: Synthetic oligonucleotide
  source 1..21: mol_type = other DNA
accggcagcaacagcgtcagc

SEQ ID NO: 13143 - DNA, 21 bp, synthetic construct
  misc_feature 1..21: note = Description of Artificial Sequence: Synthetic oligonucleotide
  source 1..21: mol_type = other DNA
gagcggactagttctgttgtt

SEQ ID NO: 13144 - DNA, 21 bp, synthetic construct
  misc_feature 1..21: note = Description of Artificial Sequence: Synthetic oligonucleotide
  source 1..21: mol_type = other DNA
ggccccagcaaccccagcagc

SEQ ID NO: 13145 - DNA, 21 bp, synthetic construct
  misc_feature 1..21: note = Description of Artificial Sequence: Synthetic oligonucleotide
  source 1..21: mol_type = other DNA
tcttctagttctaagcctgct

SEQ ID NO: 13146 - DNA, 21 bp, synthetic construct
  misc_feature 1..21: note = Description of Artificial Sequence: Synthetic oligonucleotide
  source 1..21: mol_type = other DNA
caggataggacgccgagtgtg

SEQ ID NO: 13147 - DNA, 21 bp, synthetic construct
  misc_feature 1..21: note = Description of Artificial Sequence: Synthetic oligonucleotide
  source 1..21: mol_type = other DNA
tctacgactagggaggcggtg

SEQ ID NO: 13148 - DNA, 21 bp, synthetic construct
  misc_feature 1..21: note = Description of Artificial Sequence: Synthetic oligonucleotide
  source 1..21: mol_type = other DNA
actactaataagagttctgtt

SEQ ID NO: 13149 - DNA, 21 bp, synthetic construct
  misc_feature 1..21: note = Description of Artificial Sequence: Synthetic oligonucleotide
  source 1..21: mol_type = other DNA
accatcagccaaaaccccgcc

SEQ ID NO: 13150 - DNA, 21 bp, synthetic construct
  misc_feature 1..21: note = Description of Artificial Sequence: Synthetic oligonucleotide
  source 1..21: mol_type = other DNA
agcaccgaaagaaacaaccac

SEQ ID NO: 13151 - DNA, 21 bp, synthetic construct
  misc_feature 1..21: note = Description of Artificial Sequence: Synthetic oligonucleotide
  source 1..21: mol_type = other DNA
accagaacccccgccagcacc

SEQ ID NO: 13152 - DNA, 21 bp, synthetic construct
  misc_feature 1..21: note = Description of Artificial Sequence: Synthetic oligonucleotide
  source 1..21: mol_type = other DNA
gcgggtgtggataggtcgcat

SEQ ID NO: 13153 - DNA, 21 bp, synthetic construct
  misc_feature 1..21: note = Description of Artificial Sequence: Synthetic oligonucleotide
  source 1..21: mol_type = other DNA
aacaccagcggcaccggcagc

SEQ ID NO: 13154 - DNA, 21 bp, synthetic construct
  misc_feature 1..21: note = Description of Artificial Sequence: Synthetic oligonucleotide
  source 1..21: mol_type = other DNA
gggaggggtaaggatagtgtt

SEQ ID NO: 13155 - DNA, 21 bp, synthetic construct
  misc_feature 1..21: note = Description of Artificial Sequence: Synthetic oligonucleotide
  source 1..21: mol_type = other DNA
cttacgtcgactgcgcctaag

SEQ ID NO: 13156 - DNA, 21 bp, synthetic construct
  misc_feature 1..21: note = Description of Artificial Sequence: Synthetic oligonucleotide
  source 1..21: mol_type = other DNA
caaagcgtcaacacccccaaa

SEQ ID NO: 13157 - DNA, 21 bp, synthetic construct
  misc_feature 1..21: note = Description of Artificial Sequence: Synthetic oligonucleotide
  source 1..21: mol_type = other DNA
accaaaagccaaacccccgtc

SEQ ID NO: 13158 - DNA, 21 bp, synthetic construct
  misc_feature 1..21: note = Description of Artificial Sequence: Synthetic oligonucleotide
  source 1..21: mol_type = other DNA
agcagccaaagcgccaccaaa

SEQ ID NO: 13159 - DNA, 21 bp, synthetic construct
  misc_feature 1..21: note = Description of Artificial Sequence: Synthetic oligonucleotide
  source 1..21: mol_type = other DNA
aaggggggtggttctacgaat

SEQ ID NO: 13160 - DNA, 21 bp, synthetic construct
  misc_feature 1..21: note = Description of Artificial Sequence: Synthetic oligonucleotide
  source 1..21: mol_type = other DNA
acgaattctggtgctggtatt

SEQ ID NO: 13161 - DNA, 21 bp, synthetic construct
  misc_feature 1..21: note = Description of Artificial Sequence: Synthetic oligonucleotide
  source 1..21: mol_type = other DNA
gataatagtgtgaagtctgtg

SEQ ID NO: 13162 - DNA, 21 bp, synthetic construct
  misc_feature 1..21: note = Description of Artificial Sequence: Synthetic oligonucleotide
  source 1..21: mol_type = other DNA
agcatcaacagcggcagcaaa

SEQ ID NO: 13163 - DNA, 21 bp, synthetic construct
  misc_feature 1..21: note = Description of Artificial Sequence: Synthetic oligonucleotide
  source 1..21: mol_type = other DNA
tctactacgggtgcttcgaag

SEQ ID NO: 13164 - DNA, 21 bp, synthetic construct
  misc_feature 1..21: note = Description of Artificial Sequence: Synthetic oligonucleotide
  source 1..21: mol_type = other DNA
ggcggcggcggcagcagcgtc

SEQ ID NO: 13165 - DNA, 21 bp, synthetic construct
  misc_feature 1..21: note = Description of Artificial Sequence: Synthetic oligonucleotide
  source 1..21: mol_type = other DNA
ggtatgagtaatccttctaat

SEQ ID NO: 13166 - DNA, 21 bp, synthetic construct
  misc_feature 1..21: note = Description of Artificial Sequence: Synthetic oligonucleotide
  source 1..21: mol_type = other DNA
cagagtaatagtagtctttcg

SEQ ID NO: 13167 - DNA, 21 bp, synthetic construct
  misc_feature 1..21: note = Description of Artificial Sequence: Synthetic oligonucleotide
  source 1..21: mol_type = other DNA
caaagcggcaaaagcgccgac

SEQ ID NO: 13168 - DNA, 21 bp, synthetic construct
  misc_feature 1..21: note = Description of Artificial Sequence: Synthetic oligonucleotide
  source 1..21: mol_type = other DNA
cagacgggggagaggcatgtt

SEQ ID NO: 13169 - DNA, 21 bp, synthetic construct
  misc_feature 1..21: note = Description of Artificial Sequence: Synthetic oligonucleotide
  source 1..21: mol_type = other DNA
aattctgcgacgaggcctgtt

SEQ ID NO: 13170 - DNA, 21 bp, synthetic construct
  misc_feature 1..21: note = Description of Artificial Sequence: Synthetic oligonucleotide
  source 1..21: mol_type = other DNA
gtttctacgaataagaatgtt

SEQ ID NO: 13171 - DNA, 21 bp, synthetic construct
  misc_feature 1..21: note = Description of Artificial Sequence: Synthetic oligonucleotide
  source 1..21: mol_type = other DNA
tctaatgggactaagcagact

SEQ ID NO: 13172 - DNA, 21 bp, synthetic construct
  misc_feature 1..21: note = Description of Artificial Sequence: Synthetic oligonucleotide
  source 1..21: mol_type = other DNA
aatgatagtcctacggcgagg

SEQ ID NO: 13173 - DNA, 21 bp, synthetic construct
  misc_feature 1..21: note = Description of Artificial Sequence: Synthetic oligonucleotide
  source 1..21: mol_type = other DNA
ctcagacaacaagtcagcgaa

SEQ ID NO: 13174 - DNA, 21 bp, synthetic construct
  misc_feature 1..21: note = Description of Artificial Sequence: Synthetic oligonucleotide
  source 1..21: mol_type = other DNA
aatactggtgagggtgcgaag

SEQ ID NO: 13175 - DNA, 21 bp, synthetic construct
  misc_feature 1..21: note = Description of Artificial Sequence: Synthetic oligonucleotide
  source 1..21: mol_type = other DNA
accggcaccgcccaccccagc

SEQ ID NO: 13176 - DNA, 21 bp, synthetic construct
  misc_feature 1..21: note = Description of Artificial Sequence: Synthetic oligonucleotide
  source 1..21: mol_type = other DNA
actggttcgccttctagtgct

SEQ ID NO: 13177 - DNA, 21 bp, synthetic construct
  misc_feature 1..21: note = Description of Artificial Sequence: Synthetic oligonucleotide
  source 1..21: mol_type = other DNA
ggcaaagacaacagcaaaaac

SEQ ID NO: 13178 - DNA, 21 bp, synthetic construct
  misc_feature 1..21: note = Description of Artificial Sequence: Synthetic oligonucleotide
  source 1..21: mol_type = other DNA
aattctggtcagcagaatggt

SEQ ID NO: 13179 - DNA, 21 bp, synthetic construct
  misc_feature 1..21: note = Description of Artificial Sequence: Synthetic oligonucleotide
  source 1..21: mol_type = other DNA
agcagcagcaacgccagccac

SEQ ID NO: 13180 - DNA, 21 bp, synthetic construct
  misc_feature 1..21: note = Description of Artificial Sequence: Synthetic oligonucleotide
  source 1..21: mol_type = other DNA
aacaacgccgccacccaaagc

SEQ ID NO: 13181 - DNA, 21 bp, synthetic construct
  misc_feature 1..21: note = Description of Artificial Sequence: Synthetic oligonucleotide
  source 1..21: mol_type = other DNA
acccccgaaagagccggcagc

SEQ ID NO: 13182 - DNA, 21 bp, synthetic construct
  misc_feature 1..21: note = Description of Artificial Sequence: Synthetic oligonucleotide
  source 1..21: mol_type = other DNA
caaagcggcaaaagcaccacc

SEQ ID NO: 13183 - DNA, 21 bp, synthetic construct
  misc_feature 1..21: note = Description of Artificial Sequence: Synthetic oligonucleotide
  source 1..21: mol_type = other DNA
acgattggtaagccgggggct

SEQ ID NO: 13184 - DNA, 21 bp, synthetic construct
  misc_feature 1..21: note = Description of Artificial Sequence: Synthetic oligonucleotide
  source 1..21: mol_type = other DNA
atcagcggcaaagccagcacc

SEQ ID NO: 13185 - DNA, 21 bp, synthetic construct
  misc_feature 1..21: note = Description of Artificial Sequence: Synthetic oligonucleotide
  source 1..21: mol_type = other DNA
gaaaacagcaacaaattcacc

SEQ ID NO: 13186 - DNA, 21 bp, synthetic construct
  misc_feature 1..21: note = Description of Artificial Sequence: Synthetic oligonucleotide
  source 1..21: mol_type = other DNA
ggccacaccaacaaccccctc

SEQ ID NO: 13187 - DNA, 21 bp, synthetic construct
  misc_feature 1..21: note = Description of Artificial Sequence: Synthetic oligonucleotide
  source 1..21: mol_type = other DNA
agttcggatgggaggggtact

SEQ ID NO: 13188 - DNA, 21 bp, synthetic construct
  misc_feature 1..21: note = Description of Artificial Sequence: Synthetic oligonucleotide
  source 1..21: mol_type = other DNA
gctcctgttcagcagggtggg

SEQ ID NO: 13189 - DNA, 21 bp, synthetic construct
  misc_feature 1..21: note = Description of Artificial Sequence: Synthetic oligonucleotide
  source 1..21: mol_type = other DNA
actattggtggtaagcctgat

SEQ ID NO: 13190 - DNA, 21 bp, synthetic construct
  misc_feature 1..21: note = Description of Artificial Sequence: Synthetic oligonucleotide
  source 1..21: mol_type = other DNA
gggacggctagttcgcagtct

SEQ ID NO: 13191 - DNA, 21 bp, synthetic construct
  misc_feature 1..21: note = Description of Artificial Sequence: Synthetic oligonucleotide
  source 1..21: mol_type = other DNA
gacatggccaaagaaagaagc

SEQ ID NO: 13192 - DNA, 21 bp, synthetic construct
  misc_feature 1..21: note = Description of Artificial Sequence: Synthetic oligonucleotide
  source 1..21: mol_type = other DNA
gatgctaattcgaaggggaag

SEQ ID NO: 13193 - DNA, 21 bp, synthetic construct
  misc_feature 1..21: note = Description of Artificial Sequence: Synthetic oligonucleotide
  source 1..21: mol_type = other DNA
tctggtgagaggagtactact

SEQ ID NO: 13194 - DNA, 21 bp, synthetic construct
  misc_feature 1..21: note = Description of Artificial Sequence: Synthetic oligonucleotide
  source 1..21: mol_type = other DNA
gaacacagcagcagcgtcaaa

SEQ ID NO: 13195 - DNA, 21 bp, synthetic construct
  misc_feature 1..21: note = Description of Artificial Sequence: Synthetic oligonucleotide
  source 1..21: mol_type = other DNA
agcagcggcagccccggcaaa

SEQ ID NO: 13196 - DNA, 21 bp, synthetic construct
  misc_feature 1..21: note = Description of Artificial Sequence: Synthetic oligonucleotide
  source 1..21: mol_type = other DNA
ggcaaaagcaccagcggcggc

SEQ ID NO: 13197 - DNA, 21 bp, synthetic construct
  misc_feature 1..21: note = Description of Artificial Sequence: Synthetic oligonucleotide
  source 1..21: mol_type = other DNA
acgggggtgaatagtccgcat

SEQ ID NO: 13198 - DNA, 21 bp, synthetic construct
  misc_feature 1..21: note = Description of Artificial Sequence: Synthetic oligonucleotide
  source 1..21: mol_type = other DNA
ggcagcagcgcccaccccaaa

SEQ ID NO: 13199 - DNA, 21 bp, synthetic construct
  misc_feature 1..21: note = Description of Artificial Sequence: Synthetic oligonucleotide
  source 1..21: mol_type = other DNA
tctgggactgagaaggcgcgg

SEQ ID NO: 13200 - DNA, 21 bp, synthetic construct
  misc_feature 1..21: note = Description of Artificial Sequence: Synthetic oligonucleotide
  source 1..21: mol_type = other DNA
tcgccttcttcgaatcctcag

SEQ ID NO: 13201 - DNA, 21 bp, synthetic construct
  misc_feature 1..21: note = Description of Artificial Sequence: Synthetic oligonucleotide
  source 1..21: mol_type = other DNA
actgcgaataagactactttg

SEQ ID NO: 13202 - DNA, 21 bp, synthetic construct
  misc_feature 1..21: note = Description of Artificial Sequence: Synthetic oligonucleotide
  source 1..21: mol_type = other DNA
actggtactaagcctctgggg

SEQ ID NO: 13203 - DNA, 21 bp, synthetic construct
  misc_feature 1..21: note = Description of Artificial Sequence: Synthetic oligonucleotide
  source 1..21: mol_type = other DNA
agtaatcagaagactagtatt

SEQ ID NO: 13204 - DNA, 21 bp, synthetic construct
  misc_feature 1..21: note = Description of Artificial Sequence: Synthetic oligonucleotide
  source 1..21: mol_type = other DNA
agcctcaacgaccacagcaaa

SEQ ID NO: 13205 - DNA, 21 bp, synthetic construct
  misc_feature 1..21: note = Description of Artificial Sequence: Synthetic oligonucleotide
  source 1..21: mol_type = other DNA
cattcgtcggagcagggtaag

SEQ ID NO: 13206 - DNA, 21 bp, synthetic construct
  misc_feature 1..21: note = Description of Artificial Sequence: Synthetic oligonucleotide
  source 1..21: mol_type = other DNA
aatcagggtaagactgcggag

SEQ ID NO: 13207 - DNA, 21 bp, synthetic construct
  misc_feature 1..21: note = Description of Artificial Sequence: Synthetic oligonucleotide
  source 1..21: mol_type = other DNA
agagccgaaggcaaaaacgtc

SEQ ID NO: 13208 - DNA, 21 bp, synthetic construct
  misc_feature 1..21: note = Description of Artificial Sequence: Synthetic oligonucleotide
  source 1..21: mol_type = other DNA
actggtgcttcttctggttcg

SEQ ID NO: 13209 - DNA, 21 bp, synthetic construct
  misc_feature 1..21: note = Description of Artificial Sequence: Synthetic oligonucleotide
  source 1..21: mol_type = other DNA
agagaaaacaaacccgacagc

SEQ ID NO: 13210 - DNA, 21 bp, synthetic construct
  misc_feature 1..21: note = Description of Artificial Sequence: Synthetic oligonucleotide
  source 1..21: mol_type = other DNA
gagtcgcggtctccgtctcat

SEQ ID NO: 13211 - DNA, 21 bp, synthetic construct
  misc_feature 1..21: note = Description of Artificial Sequence: Synthetic oligonucleotide
  source 1..21: mol_type = other DNA
gttagtggtaagcagattagt

SEQ ID NO: 13212 - DNA, 21 bp, synthetic construct
  misc_feature 1..21: note = Description of Artificial Sequence: Synthetic oligonucleotide
  source 1..21: mol_type = other DNA
ctgtctggtaaggctcctaat

SEQ ID NO: 13213 - DNA, 21 bp, synthetic construct
  misc_feature 1..21: note = Description of Artificial Sequence: Synthetic oligonucleotide
  source 1..21: mol_type = other DNA
gggactactggtgagagggcg

SEQ ID NO: 13214 - DNA, 21 bp, synthetic construct
  misc_feature 1..21: note = Description of Artificial Sequence: Synthetic oligonucleotide
  source 1..21: mol_type = other DNA
gtcgccagcagcaaaaccacc

SEQ ID NO: 13215 - DNA, 21 bp, synthetic construct
  misc_feature 1..21: note = Description of Artificial Sequence: Synthetic oligonucleotide
  source 1..21: mol_type = other DNA
accgacagaacccccagcatg

SEQ ID NO: 13216 - DNA, 21 bp, synthetic construct
  misc_feature 1..21: note = Description of Artificial Sequence: Synthetic oligonucleotide
  source 1..21: mol_type = other DNA
agcgccgaaagcgtcaacaaa

SEQ ID NO: 13217 - DNA, 21 bp, synthetic construct
  misc_feature 1..21: note = Description of Artificial Sequence: Synthetic oligonucleotide
  source 1..21: mol_type = other DNA
gtcagaggccaaaccaccagc

SEQ ID NO: 13218 - DNA, 21 bp, synthetic construct
  misc_feature 1..21: note = Description of Artificial Sequence: Synthetic oligonucleotide
  source 1..21: mol_type = other DNA
ggccaaggcaccaaagtcacc

SEQ ID NO: 13219 - DNA, 21 bp, synthetic construct
  misc_feature 1..21: note = Description of Artificial Sequence: Synthetic oligonucleotide
  source 1..21: mol_type = other DNA
acgaggtctcagcctactact

SEQ ID NO: 13220 - DNA, 21 bp, synthetic construct
  misc_feature 1..21: note = Description of Artificial Sequence: Synthetic oligonucleotide
  source 1..21: mol_type = other DNA
cagagggtgacggagtctcat

SEQ ID NO: 13221 - DNA, 21 bp, synthetic construct
  misc_feature 1..21: note = Description of Artificial Sequence: Synthetic oligonucleotide
  source 1..21: mol_type = other DNA
caaggcgacaaacccagactc

SEQ ID NO: 13222 - DNA, 21 bp, synthetic construct
  misc_feature 1..21: note = Description of Artificial Sequence: Synthetic oligonucleotide
  source 1..21: mol_type = other DNA
gcttcgaagcctagtaatatt

SEQ ID NO: 13223 - DNA, 21 bp, synthetic construct
  misc_feature 1..21: note = Description of Artificial Sequence: Synthetic oligonucleotide
  source 1..21: mol_type = other DNA
gaaaccgccagacccaaccaa

SEQ ID NO: 13224 - DNA, 21 bp, synthetic construct
  misc_feature 1..21: note = Description of Artificial Sequence: Synthetic oligonucleotide
  source 1..21: mol_type = other DNA
cagtcgacgtctaagacttcg

SEQ ID NO: 13225 - DNA, 21 bp, synthetic construct
  misc_feature 1..21: note = Description of Artificial Sequence: Synthetic oligonucleotide
  source 1..21: mol_type = other DNA
agcagcgacaccaaaatcagc

SEQ ID NO: 13226 - DNA, 21 bp, synthetic construct
  misc_feature 1..21: note = Description of Artificial Sequence: Synthetic oligonucleotide
  source 1..21: mol_type = other DNA
aacggcaccgacagaaccacc

SEQ ID NO: 13227 - DNA, 21 bp, synthetic construct
  misc_feature 1..21: note = Description of Artificial Sequence: Synthetic oligonucleotide
  source 1..21: mol_type = other DNA
acgcagaagcctacgaatggg

SEQ ID NO: 13228 - DNA, 21 bp, synthetic construct
  misc_feature 1..21: note = Description of Artificial Sequence: Synthetic oligonucleotide
  source 1..21: mol_type = other DNA
caacaaggcgaagccttcaaa

SEQ ID NO: 13229 - DNA, 21 bp, synthetic construct
  misc_feature 1..21: note = Description of Artificial Sequence: Synthetic oligonucleotide
  source 1..21: mol_type = other DNA
gatggtcagccgcctactaag

SEQ ID NO: 13230 - DNA, 21 bp, synthetic construct
  misc_feature 1..21: note = Description of Artificial Sequence: Synthetic oligonucleotide
  source 1..21: mol_type = other DNA
tcgaatggtcagaagcaggat

SEQ ID NO: 13231 - DNA, 21 bp, synthetic construct
  misc_feature 1..21: note = Description of Artificial Sequence: Synthetic oligonucleotide
  source 1..21: mol_type = other DNA
tctacgagtactaagtcgggt

SEQ ID NO: 13232 - DNA, 21 bp, synthetic construct
  misc_feature 1..21: note = Description of Artificial Sequence: Synthetic oligonucleotide
  source 1..21: mol_type = other DNA
tctggtggtggttctcctgtg

SEQ ID NO: 13233 - DNA, 21 bp, synthetic construct
  misc_feature 1..21: note = Description of Artificial Sequence: Synthetic oligonucleotide
  source 1..21: mol_type = other DNA
tctgtgtcgaagagtagtatt

SEQ ID NO: 13234 - DNA, 21 bp, synthetic construct
  misc_feature 1..21: note = Description of Artificial Sequence: Synthetic oligonucleotide
  source 1..21: mol_type = other DNA
caagtcggcagcgaccacaga

SEQ ID NO: 13235 - DNA, 21 bp, synthetic construct
  misc_feature 1..21: note = Description of Artificial Sequence: Synthetic oligonucleotide
  source 1..21: mol_type = other DNA
ggttctaatgggagtaggggg

SEQ ID NO: 13236 - DNA, 21 bp, synthetic construct
  misc_feature 1..21: note = Description of Artificial Sequence: Synthetic oligonucleotide
  source 1..21: mol_type = other DNA
gccagcagccaaaaagtcgtc

SEQ ID NO: 13237 - DNA, 21 bp, synthetic construct
  misc_feature 1..21: note = Description of Artificial Sequence: Synthetic oligonucleotide
  source 1..21: mol_type = other DNA
agcccccaccaagccggcacc

SEQ ID NO: 13238 - DNA, 21 bp, synthetic construct
  misc_feature 1..21: note = Description of Artificial Sequence: Synthetic oligonucleotide
  source 1..21: mol_type = other DNA
ggtgggagtgagcgtgctaag

SEQ ID NO: 13239 - DNA, 21 bp, synthetic construct
  misc_feature 1..21: note = Description of Artificial Sequence: Synthetic oligonucleotide
  source 1..21: mol_type = other DNA
gctggtgggggtaaggctact

SEQ ID NO: 13240 - DNA, 21 bp, synthetic construct
  misc_feature 1..21: note = Description of Artificial Sequence: Synthetic oligonucleotide
  source 1..21: mol_type = other DNA
ggtatgtcggctgggactggg

SEQ ID NO: 13241 - DNA, 21 bp, synthetic construct
  misc_feature 1..21: note = Description of Artificial Sequence: Synthetic oligonucleotide
  source 1..21: mol_type = other DNA
agccaaagcaaaagcgccctc

SEQ ID NO: 13242 - DNA, 21 bp, synthetic construct
  misc_feature 1..21: note = Description of Artificial Sequence: Synthetic oligonucleotide
  source 1..21: mol_type = other DNA
agccaccaaaccggcagcggc

SEQ ID NO: 13243 - DNA, 21 bp, synthetic construct
  misc_feature 1..21: note = Description of Artificial Sequence: Synthetic oligonucleotide
  source 1..21: mol_type = other DNA
ggggggaagtctccggctcat

SEQ ID NO: 13244 - DNA, 21 bp, synthetic construct
  misc_feature 1..21: note = Description of Artificial Sequence: Synthetic oligonucleotide
  source 1..21: mol_type = other DNA
agaatgaacaaaaccagcgaa

SEQ ID NO: 13245 - DNA, 21 bp, synthetic construct
  misc_feature 1..21: note = Description of Artificial Sequence: Synthetic oligonucleotide
  source 1..21: mol_type = other DNA
gccagagacaccaaagccagc

SEQ ID NO: 13246 - DNA, 21 bp, synthetic construct
  misc_feature 1..21: note = Description of Artificial Sequence: Synthetic oligonucleotide
  source 1..21: mol_type = other DNA
aacggcaacaaacacgccagc

SEQ ID NO: 13247 - DNA, 21 bp, synthetic construct
  misc_feature 1..21: note = Description of Artificial Sequence: Synthetic oligonucleotide
  source 1..21: mol_type = other DNA
cttactcagaagtctccgagt

SEQ ID NO: 13248 - DNA, 21 bp, synthetic construct
  misc_feature 1..21: note = Description of Artificial Sequence: Synthetic oligonucleotide
  source 1..21: mol_type = other DNA
gatgcgacttctaagtttgct

SEQ ID NO: 13249 - DNA, 21 bp, synthetic construct
  misc_feature 1..21: note = Description of Artificial Sequence: Synthetic oligonucleotide
  source 1..21: mol_type = other DNA
agcctcggcaaaaccgccagc

SEQ ID NO: 13250 - DNA, 21 bp, synthetic construct
  misc_feature 1..21: note = Description of Artificial Sequence: Synthetic oligonucleotide
  source 1..21: mol_type = other DNA
tcttcggctagttctaatcag

SEQ ID NO: 13251 - DNA, 21 bp, synthetic construct
  misc_feature 1..21: note = Description of Artificial Sequence: Synthetic oligonucleotide
  source 1..21: mol_type = other DNA
ggtaatcatagtcctcctaag

SEQ ID NO: 13252 - DNA, 21 bp, synthetic construct
  misc_feature 1..21: note = Description of Artificial Sequence: Synthetic oligonucleotide
  source 1..21: mol_type = other DNA
caaaccgccaaacccggcgtc

SEQ ID NO: 13253 - DNA, 21 bp, synthetic construct
  misc_feature 1..21: note = Description of Artificial Sequence: Synthetic oligonucleotide
  source 1..21: mol_type = other DNA
aacagcaccaccaaagtcagc

SEQ ID NO: 13254 - DNA, 21 bp, synthetic construct
  misc_feature 1..21: note = Description of Artificial Sequence: Synthetic oligonucleotide
  source 1..21: mol_type = other DNA
ggtactggggggacgcttagt

SEQ ID NO: 13255 - DNA, 21 bp, synthetic construct
  misc_feature 1..21: note = Description of Artificial Sequence: Synthetic oligonucleotide
  source 1..21: mol_type = other DNA
cattctgcgagtccgactgtt

SEQ ID NO: 13256 - DNA, 21 bp, synthetic construct
  misc_feature 1..21: note = Description of Artificial Sequence: Synthetic oligonucleotide
  source 1..21: mol_type = other DNA
actccgcagaaggatgctaag

SEQ ID NO: 13257 - DNA, 21 bp, synthetic construct
  misc_feature 1..21: note = Description of Artificial Sequence: Synthetic oligonucleotide
  source 1..21: mol_type = other DNA
caaaccgccaccgtccccaaa

SEQ ID NO: 13258 - DNA, 21 bp, synthetic construct
  misc_feature 1..21: note = Description of Artificial Sequence: Synthetic oligonucleotide
  source 1..21: mol_type = other DNA
gatggtggtacttctcgggtt

SEQ ID NO: 13259 - DNA, 21 bp, synthetic construct
  misc_feature 1..21: note = Description of Artificial Sequence: Synthetic oligonucleotide
  source 1..21: mol_type = other DNA
tctgagtctaaggctaatgcg

SEQ ID NO: 13260 - DNA, 21 bp, synthetic construct
  misc_feature 1..21: note = Description of Artificial Sequence: Synthetic oligonucleotide
  source 1..21: mol_type = other DNA
gctactcatcagccggctacg

SEQ ID NO: 13261 - DNA, 21 bp, synthetic construct
  misc_feature 1..21: note = Description of Artificial Sequence: Synthetic oligonucleotide
  source 1..21: mol_type = other DNA
ttgcaggcgaaggcttctggt

SEQ ID NO: 13262 - DNA, 21 bp, synthetic construct
  misc_feature 1..21: note = Description of Artificial Sequence: Synthetic oligonucleotide
  source 1..21: mol_type = other DNA
aagggtaattcttctactact

SEQ ID NO: 13263 - DNA, 21 bp, synthetic construct
  misc_feature 1..21: note = Description of Artificial Sequence: Synthetic oligonucleotide
  source 1..21: mol_type = other DNA
gcggcggatcgttcttcgact

SEQ ID NO: 13264 - DNA, 21 bp, synthetic construct
  misc_feature 1..21: note = Description of Artificial Sequence: Synthetic oligonucleotide
  source 1..21: mol_type = other DNA
agccccagccccacccccaaa

SEQ ID NO: 13265 - DNA, 21 bp, synthetic construct
  misc_feature 1..21: note = Description of Artificial Sequence: Synthetic oligonucleotide
  source 1..21: mol_type = other DNA
agcggcaacggcaaagtcacc

SEQ ID NO: 13266 - DNA, 21 bp, synthetic construct
  misc_feature 1..21: note = Description of Artificial Sequence: Synthetic oligonucleotide
  source 1..21: mol_type = other DNA
gagcagggtaataataagcat

SEQ ID NO: 13267 - DNA, 21 bp, synthetic construct
  misc_feature 1..21: note = Description of Artificial Sequence: Synthetic oligonucleotide
  source 1..21: mol_type = other DNA
ggtggttctaagcaggcttct

SEQ ID NO: 13268 - DNA, 21 bp, synthetic construct
  misc_feature 1..21: note = Description of Artificial Sequence: Synthetic oligonucleotide
  source 1..21: mol_type = other DNA
caaagaggcgccaccaacggc

SEQ ID NO: 13269 - DNA, 21 bp, synthetic construct
  misc_feature 1..21: note = Description of Artificial Sequence: Synthetic oligonucleotide
  source 1..21: mol_type = other DNA
ggtaagactaatcagcagtct

SEQ ID NO: 13270 - DNA, 21 bp, synthetic construct
  misc_feature 1..21: note = Description of Artificial Sequence: Synthetic oligonucleotide
  source 1..21: mol_type = other DNA
actaatggtaagtctagttct

SEQ ID NO: 13271 - DNA, 21 bp, synthetic construct
  misc_feature 1..21: note = Description of Artificial Sequence: Synthetic oligonucleotide
  source 1..21: mol_type = other DNA
caagacggcaaaggccaacaa

SEQ ID NO: 13272 - DNA, 21 bp, synthetic construct
  misc_feature 1..21: note = Description of Artificial Sequence: Synthetic oligonucleotide
  source 1..21: mol_type = other DNA
tcgcgtcagaatgctaattct

SEQ ID NO: 13273 - DNA, 21 bp, synthetic construct
  misc_feature 1..21: note = Description of Artificial Sequence: Synthetic oligonucleotide
  source 1..21: mol_type = other DNA
catggtagttcgtctaagact

SEQ ID NO: 13274 - DNA, 21 bp, synthetic construct
  misc_feature 1..21: note = Description of Artificial Sequence: Synthetic oligonucleotide
  source 1..21: mol_type = other DNA
aacggttctggacagaatcaa

SEQ ID NO: 13275 - DNA, 21 bp, synthetic construct
  misc_feature 1..21: note = Description of Artificial Sequence: Synthetic oligonucleotide
  source 1..21: mol_type = other DNA
ggtaatgttaatggtacgggt

SEQ ID NO: 13276 - DNA, 21 bp, synthetic construct
  misc_feature 1..21: note = Description of Artificial Sequence: Synthetic oligonucleotide
  source 1..21: mol_type = other DNA
gccaccggcaaaagcagcctc

SEQ ID NO: 13277 - DNA, 21 bp, synthetic construct
  misc_feature 1..21: note = Description of Artificial Sequence: Synthetic oligonucleotide
  source 1..21: mol_type = other DNA
aaccaaggcaccaaagtccaa

SEQ ID NO: 13278 - DNA, 21 bp, synthetic construct
  misc_feature 1..21: note = Description of Artificial Sequence: Synthetic oligonucleotide
  source 1..21: mol_type = other DNA
actgctactgataagacttat

SEQ ID NO: 13279 - DNA, 21 bp, synthetic construct
  misc_feature 1..21: note = Description of Artificial Sequence: Synthetic oligonucleotide
  source 1..21: mol_type = other DNA
gtgactggtaagagtcagatg

SEQ ID NO: 13280 - DNA, 21 bp, synthetic construct
  misc_feature 1..21: note = Description of Artificial Sequence: Synthetic oligonucleotide
  source 1..21: mol_type = other DNA
agccaagtccaaaaagtcggc

SEQ ID NO: 13281 - DNA, 21 bp, synthetic construct
  misc_feature 1..21: note = Description of Artificial Sequence: Synthetic oligonucleotide
  source 1..21: mol_type = other DNA
gatccgattagtgctaagaat

SEQ ID NO: 13282 - DNA, 21 bp, synthetic construct
  misc_feature 1..21: note = Description of Artificial Sequence: Synthetic oligonucleotide
  source 1..21: mol_type = other DNA
agcagaaacaacaccaccacc

SEQ ID NO: 13283 - DNA, 21 bp, synthetic construct
  misc_feature 1..21: note = Description of Artificial Sequence: Synthetic oligonucleotide
  source 1..21: mol_type = other DNA
gaaggcagcaacaaaaccctc

SEQ ID NO: 13284 - DNA, 21 bp, synthetic construct
  misc_feature 1..21: note = Description of Artificial Sequence: Synthetic oligonucleotide
  source 1..21: mol_type = other DNA
gtcgccaaaagcaccaccctc

SEQ ID NO: 13285 - DNA, 21 bp, synthetic construct
  misc_feature 1..21: note = Description of Artificial Sequence: Synthetic oligonucleotide
  source 1..21: mol_type = other DNA
agtaatggtgctccgactcgg

SEQ ID NO: 13286 - DNA, 21 bp, synthetic construct
  misc_feature 1..21: note = Description of Artificial Sequence: Synthetic oligonucleotide
  source 1..21: mol_type = other DNA
caaggcaccaacagccaagtc

SEQ ID NO: 13287 - DNA, 21 bp, synthetic construct
  misc_feature 1..21: note = Description of Artificial Sequence: Synthetic oligonucleotide
  source 1..21: mol_type = other DNA
tacccccccagcaaaggcagc

SEQ ID NO: 13288 - DNA, 21 bp, synthetic construct
  misc_feature 1..21: note = Description of Artificial Sequence: Synthetic oligonucleotide
  source 1..21: mol_type = other DNA
tcggggagtggtggttctcag

SEQ ID NO: 13289 - DNA, 21 bp, synthetic construct
  misc_feature 1..21: note = Description of Artificial Sequence: Synthetic oligonucleotide
  source 1..21: mol_type = other DNA
tcgactacgcaggggccgacg

SEQ ID NO: 13290 - DNA, 21 bp, synthetic construct
  misc_feature 1..21: note = Description of Artificial Sequence: Synthetic oligonucleotide
  source 1..21: mol_type = other DNA
gccgtcgccaacgtcaacacc

SEQ ID NO: 13291 - DNA, 21 bp, synthetic construct
  misc_feature 1..21: note = Description of Artificial Sequence: Synthetic oligonucleotide
  source 1..21: mol_type = other DNA
ctcggcagccaacaaagcaaa

SEQ ID NO: 13292 - DNA, 21 bp, synthetic construct
  misc_feature 1..21: note = Description of Artificial Sequence: Synthetic oligonucleotide
  source 1..21: mol_type = other DNA
acgagtgatacgcggggtatg

SEQ ID NO: 13293 - DNA, 21 bp, synthetic construct
  misc_feature 1..21: note = Description of Artificial Sequence: Synthetic oligonucleotide
  source 1..21: mol_type = other DNA
agcaacgccagccccggcagc

SEQ ID NO: 13294 - DNA, 21 bp, synthetic construct
  misc_feature 1..21: note = Description of Artificial Sequence: Synthetic oligonucleotide
  source 1..21: mol_type = other DNA
gggagtactgggcagtctaag

SEQ ID NO: 13295 - DNA, 21 bp, synthetic construct
  misc_feature 1..21: note = Description of Artificial Sequence: Synthetic oligonucleotide
  source 1..21: mol_type = other DNA
aaggctcagagttctgctggt

SEQ ID NO: 13296 - DNA, 21 bp, synthetic construct
  misc_feature 1..21: note = Description of Artificial Sequence: Synthetic oligonucleotide
  source 1..21: mol_type = other DNA
ggcgtcggcagcaaaggcgtc

SEQ ID NO: 13297 - DNA, 21 bp, synthetic construct
  misc_feature 1..21: note = Description of Artificial Sequence: Synthetic oligonucleotide
  source 1..21: mol_type = other DNA
tctagtggtactgctaatttg

SEQ ID NO: 13298 - DNA, 21 bp, synthetic construct
  misc_feature 1..21: note = Description of Artificial Sequence: Synthetic oligonucleotide
  source 1..21: mol_type = other DNA
gtcatcaacggcaaaagcgac

SEQ ID NO: 13299 - DNA, 21 bp, synthetic construct
  misc_feature 1..21: note = Description of Artificial Sequence: Synthetic oligonucleotide
  source 1..21: mol_type = other DNA
cagggtagggatcctcagtct

SEQ ID NO: 13300 - DNA, 21 bp, synthetic construct
  misc_feature 1..21: note = Description of Artificial Sequence: Synthetic oligonucleotide
  source 1..21: mol_type = other DNA
gccctcgaaaaccccagcaaa

SEQ ID NO: 13301 - DNA, 21 bp, synthetic construct
  misc_feature 1..21: note = Description of Artificial Sequence: Synthetic oligonucleotide
  source 1..21: mol_type = other DNA
gccggcagcggcccccaactc

SEQ ID NO: 13302 - DNA, 21 bp, synthetic construct
  misc_feature 1..21: note = Description of Artificial Sequence: Synthetic oligonucleotide
  source 1..21: mol_type = other DNA
gaaggcaccagcagccacacc

SEQ ID NO: 13303 - DNA, 21 bp, synthetic construct
  misc_feature 1..21: note = Description of Artificial Sequence: Synthetic oligonucleotide
  source 1..21: mol_type = other DNA
gacacccccagccccatcaaa

SEQ ID NO: 13304 - DNA, 21 bp, synthetic construct
  misc_feature 1..21: note = Description of Artificial Sequence: Synthetic oligonucleotide
  source 1..21: mol_type = other DNA
ctcagcaccaacaaaagcgtc

SEQ ID NO: 13305 - DNA, 21 bp, synthetic construct
  misc_feature 1..21: note = Description of Artificial Sequence: Synthetic oligonucleotide
  source 1..21: mol_type = other DNA
tcgattgggtcgccgtctcgt

SEQ ID NO: 13306 - DNA, 21 bp, synthetic construct
  misc_feature 1..21: note = Description of Artificial Sequence: Synthetic oligonucleotide
  source 1..21: mol_type = other DNA
accggcaacaaaaccgccagc

SEQ ID NO: 13307 - DNA, 21 bp, synthetic construct
  misc_feature 1..21: note = Description of Artificial Sequence: Synthetic oligonucleotide
  source 1..21: mol_type = other DNA
agccacaacagcagcaccagc

SEQ ID NO: 13308 - DNA, 21 bp, synthetic construct
  misc_feature 1..21: note = Description of Artificial Sequence: Synthetic oligonucleotide
  source 1..21: mol_type = other DNA
agcaacagcacccaccccgcc

SEQ ID NO: 13309 - DNA, 21 bp, synthetic construct
  misc_feature 1..21: note = Description of Artificial Sequence: Synthetic oligonucleotide
  source 1..21: mol_type = other DNA
agccaagccgtccccagcaaa

SEQ ID NO: 13310 - DNA, 21 bp, synthetic construct
  misc_feature 1..21: note = Description of Artificial Sequence: Synthetic oligonucleotide
  source 1..21: mol_type = other DNA
caaatcaacaacaaaaccgcc

SEQ ID NO: 13311 - DNA, 21 bp, synthetic construct
  misc_feature 1..21: note = Description of Artificial Sequence: Synthetic oligonucleotide
  source 1..21: mol_type = other DNA
acttctgggagtggtatgaag

SEQ ID NO: 13312 - DNA, 21 bp, synthetic construct
  misc_feature 1..21: note = Description of Artificial Sequence: Synthetic oligonucleotide
  source 1..21: mol_type = other DNA
acggggacgaagcagttgtct

SEQ ID NO: 13313 - DNA, 21 bp, synthetic construct
  misc_feature 1..21: note = Description of Artificial Sequence: Synthetic oligonucleotide
  source 1..21: mol_type = other DNA
acccaaggcagcaaccccccc

SEQ ID NO: 13314 - DNA, 21 bp, synthetic construct
  misc_feature 1..21: note = Description of Artificial Sequence: Synthetic oligonucleotide
  source 1..21: mol_type = other DNA
acgcagcctagtactcatgtg

SEQ ID NO: 13315 - DNA, 21 bp, synthetic construct
  misc_feature 1..21: note = Description of Artificial Sequence: Synthetic oligonucleotide
  source 1..21: mol_type = other DNA
gctgattcgaagccgacttct

SEQ ID NO: 13316 - DNA, 21 bp, synthetic construct
  misc_feature 1..21: note = Description of Artificial Sequence: Synthetic oligonucleotide
  source 1..21: mol_type = other DNA
ggcaacggcagagaagccagc

SEQ ID NO: 13317 - DNA, 21 bp, synthetic construct
  misc_feature 1..21: note = Description of Artificial Sequence: Synthetic oligonucleotide
  source 1..21: mol_type = other DNA
agcaccagccaaaaaagcgtc

SEQ ID NO: 13318 - DNA, 21 bp, synthetic construct
  misc_feature 1..21: note = Description of Artificial Sequence: Synthetic oligonucleotide
  source 1..21: mol_type = other DNA
gggactagtcctcaggttaag

SEQ ID NO: 13319 - DNA, 21 bp, synthetic construct
  misc_feature 1..21: note = Description of Artificial Sequence: Synthetic oligonucleotide
  source 1..21: mol_type = other DNA
accaccggcagccacagcgcc

SEQ ID NO: 13320 - DNA, 21 bp, synthetic construct
  misc_feature 1..21: note = Description of Artificial Sequence: Synthetic oligonucleotide
  source 1..21: mol_type = other DNA
ggtactgctagtgggacgagg

SEQ ID NO: 13321 - DNA, 21 bp, synthetic construct
  misc_feature 1..21: note = Description of Artificial Sequence: Synthetic oligonucleotide
  source 1..21: mol_type = other DNA
cacaacaccagcaaacaaggc

SEQ ID NO: 13322 - DNA, 21 bp, synthetic construct
  misc_feature 1..21: note = Description of Artificial Sequence: Synthetic oligonucleotide
  source 1..21: mol_type = other DNA
gacatcacccaaaaaagcaaa

SEQ ID NO: 13323 - DNA, 21 bp, synthetic construct
  misc_feature 1..21: note = Description of Artificial Sequence: Synthetic oligonucleotide
  source 1..21: mol_type = other DNA
gttacgcggtctaatagtgtg

SEQ ID NO: 13324 - DNA, 21 bp, synthetic construct
  misc_feature 1..21: note = Description of Artificial Sequence: Synthetic oligonucleotide
  source 1..21: mol_type = other DNA
gagggtgcgaagcctgctttt

SEQ ID NO: 13325 - DNA, 21 bp, synthetic construct
  misc_feature 1..21: note = Description of Artificial Sequence: Synthetic oligonucleotide
  source 1..21: mol_type = other DNA
gctatgagtagtgggaataag

SEQ ID NO: 13326 - DNA, 21 bp, synthetic construct
  misc_feature 1..21: note = Description of Artificial Sequence: Synthetic oligonucleotide
  source 1..21: mol_type = other DNA
gttgctaataatggtaatgct

SEQ ID NO: 13327 - DNA, 21 bp, synthetic construct
  misc_feature 1..21: note = Description of Artificial Sequence: Synthetic oligonucleotide
  source 1..21: mol_type = other DNA
aacagcaccagcggcaccaaa

SEQ ID NO: 13328 - DNA, 21 bp, synthetic construct
  misc_feature 1..21: note = Description of Artificial Sequence: Synthetic oligonucleotide
  source 1..21: mol_type = other DNA
gggtctgggggtggtcagtcg

SEQ ID NO: 13329 - DNA, 21 bp, synthetic construct
  misc_feature 1..21: note = Description of Artificial Sequence: Synthetic oligonucleotide
  source 1..21: mol_type = other DNA
gctacgagtggtacgtcgcat

SEQ ID NO: 13330 - DNA, 21 bp, synthetic construct
  misc_feature 1..21: note = Description of Artificial Sequence: Synthetic oligonucleotide
  source 1..21: mol_type = other DNA
gggccgagtccgcaggggaag

SEQ ID NO: 13331 - DNA, 21 bp, synthetic construct
  misc_feature 1..21: note = Description of Artificial Sequence: Synthetic oligonucleotide
  source 1..21: mol_type = other DNA
gcgggtgatagtagtgggcgt

SEQ ID NO: 13332 - DNA, 21 bp, synthetic construct
  misc_feature 1..21: note = Description of Artificial Sequence: Synthetic oligonucleotide
  source 1..21: mol_type = other DNA
actgtgagtgatactaataag

SEQ ID NO: 13333 - DNA, 21 bp, synthetic construct
  misc_feature 1..21: note = Description of Artificial Sequence: Synthetic oligonucleotide
  source 1..21: mol_type = other DNA
gataatgggaaggcgcagaat

SEQ ID NO: 13334 - DNA, 21 bp, synthetic construct
  misc_feature 1..21: note = Description of Artificial Sequence: Synthetic oligonucleotide
  source 1..21: mol_type = other DNA
cagggggagcgttctttggcg

SEQ ID NO: 13335 - DNA, 21 bp, synthetic construct
  misc_feature 1..21: note = Description of Artificial Sequence: Synthetic oligonucleotide
  source 1..21: mol_type = other DNA
agcggcgaaaacaacagagtc

SEQ ID NO: 13336 - DNA, 21 bp, synthetic construct
  misc_feature 1..21: note = Description of Artificial Sequence: Synthetic oligonucleotide
  source 1..21: mol_type = other DNA
ctccaaaaccaaaaagacggc

SEQ ID NO: 13337 - DNA, 21 bp, synthetic construct
  misc_feature 1..21: note = Description of Artificial Sequence: Synthetic oligonucleotide
  source 1..21: mol_type = other DNA
gcgtctactggggcttcgaag

SEQ ID NO: 13338 - DNA, 21 bp, synthetic construct
  misc_feature 1..21: note = Description of Artificial Sequence: Synthetic oligonucleotide
  source 1..21: mol_type = other DNA
ggcagcggcaaagacagaaac

SEQ ID NO: 13339 - DNA, 21 bp, synthetic construct
  misc_feature 1..21: note = Description of Artificial Sequence: Synthetic oligonucleotide
  source 1..21: mol_type = other DNA
ggtacgggggtgtctaataag

SEQ ID NO: 13340 - DNA, 21 bp, synthetic construct
  misc_feature 1..21: note = Description of Artificial Sequence: Synthetic oligonucleotide
  source 1..21: mol_type = other DNA
ggcaacgccgccaaaccccaa

SEQ ID NO: 13341 - DNA, 21 bp, synthetic construct
  misc_feature 1..21: note = Description of Artificial Sequence: Synthetic oligonucleotide
  source 1..21: mol_type = other DNA
agcggcgacagcaaaagacac

SEQ ID NO: 13342 - DNA, 21 bp, synthetic construct
  misc_feature 1..21: note = Description of Artificial Sequence: Synthetic oligonucleotide
  source 1..21: mol_type = other DNA
accagcaccagcaaaaacacc

SEQ ID NO: 13343 - DNA, 21 bp, synthetic construct
  misc_feature 1..21: note = Description of Artificial Sequence: Synthetic oligonucleotide
  source 1..21: mol_type = other DNA
gggtctacggggaataattct

SEQ ID NO: 13344 - DNA, 21 bp, synthetic construct
  misc_feature 1..21: note = Description of Artificial Sequence: Synthetic oligonucleotide
  source 1..21: mol_type = other DNA
tctggtagttctgggggtcgg

SEQ ID NO: 13345 - DNA, 21 bp, synthetic construct
  misc_feature 1..21: note = Description of Artificial Sequence: Synthetic oligonucleotide
  source 1..21: mol_type = other DNA
ttcggcaccaaaggcggcgaa

SEQ ID NO: 13346 - DNA, 21 bp, synthetic construct
  misc_feature 1..21: note = Description of Artificial Sequence: Synthetic oligonucleotide
  source 1..21: mol_type = other DNA
tctacgggtgttaagcctatg

SEQ ID NO: 13347 - DNA, 21 bp, synthetic construct
  misc_feature 1..21: note = Description of Artificial Sequence: Synthetic oligonucleotide
  source 1..21: mol_type = other DNA
aacagcgtcggcaaaagcggc

SEQ ID NO: 13348 - DNA, 21 bp, synthetic construct
  misc_feature 1..21: note = Description of Artificial Sequence: Synthetic oligonucleotide
  source 1..21: mol_type = other DNA
ggcatcgccggccccaaaagc

SEQ ID NO: 13349 - DNA, 21 bp, synthetic construct
  misc_feature 1..21: note = Description of Artificial Sequence: Synthetic oligonucleotide
  source 1..21: mol_type = other DNA
tctaagcctactagtgggggg

SEQ ID NO: 13350 - DNA, 21 bp, synthetic construct
  misc_feature 1..21: note = Description of Artificial Sequence: Synthetic oligonucleotide
  source 1..21: mol_type = other DNA
tcggctagtacgaagtcggtt

SEQ ID NO: 13351 - DNA, 21 bp, synthetic construct
  misc_feature 1..21: note = Description of Artificial Sequence: Synthetic oligonucleotide
  source 1..21: mol_type = other DNA
ggcaccagccaaaaaccccac

SEQ ID NO: 13352 - DNA, 21 bp, synthetic construct
  misc_feature 1..21: note = Description of Artificial Sequence: Synthetic oligonucleotide
  source 1..21: mol_type = other DNA
ggcaacggcagccccaccagc

SEQ ID NO: 13353 - DNA, 21 bp, synthetic construct
  misc_feature 1..21: note = Description of Artificial Sequence: Synthetic oligonucleotide
  source 1..21: mol_type = other DNA
aacagcggcgccaccaaaaac

SEQ ID NO: 13354 - DNA, 21 bp, synthetic construct
  misc_feature 1..21: note = Description of Artificial Sequence: Synthetic oligonucleotide
  source 1..21: mol_type = other DNA
gacaccgcccaacacaacaga

SEQ ID NO: 13355 - DNA, 21 bp, synthetic construct
  misc_feature 1..21: note = Description of Artificial Sequence: Synthetic oligonucleotide
  source 1..21: mol_type = other DNA
caaagaaccggcagcaacagc

SEQ ID NO: 13356 - DNA, 21 bp, synthetic construct
  misc_feature 1..21: note = Description of Artificial Sequence: Synthetic oligonucleotide
  source 1..21: mol_type = other DNA
ctgaaggacagtaagccgttg

SEQ ID NO: 13357 - DNA, 21 bp, synthetic construct
  misc_feature 1..21: note = Description of Artificial Sequence: Synthetic oligonucleotide
  source 1..21: mol_type = other DNA
agccccaccaacagcccccac

SEQ ID NO: 13358 - DNA, 21 bp, synthetic construct
  misc_feature 1..21: note = Description of Artificial Sequence: Synthetic oligonucleotide
  source 1..21: mol_type = other DNA
aacggcacccaaaaaagccac

SEQ ID NO: 13359 - DNA, 21 bp, synthetic construct
  misc_feature 1..21: note = Description of Artificial Sequence: Synthetic oligonucleotide
  source 1..21: mol_type = other DNA
acggttgggaagccgagttcg

SEQ ID NO: 13360 - DNA, 21 bp, synthetic construct
  misc_feature 1..21: note = Description of Artificial Sequence: Synthetic oligonucleotide
  source 1..21: mol_type = other DNA
gggcggggggagagtagtaag

SEQ ID NO: 13361 - DNA, 21 bp, synthetic construct
  misc_feature 1..21: note = Description of Artificial Sequence: Synthetic oligonucleotide
  source 1..21: mol_type = other DNA
gtgactcagagtgctagtaag

SEQ ID NO: 13362 - DNA, 21 bp, synthetic construct
  misc_feature 1..21: note = Description of Artificial Sequence: Synthetic oligonucleotide
  source 1..21: mol_type = other DNA
ggcaacggcaccaaaaccatc

SEQ ID NO: 13363 - DNA, 21 bp, synthetic construct
  misc_feature 1..21: note = Description of Artificial Sequence: Synthetic oligonucleotide
  source 1..21: mol_type = other DNA
gtgcagcaggatccggttagg

SEQ ID NO: 13364 - DNA, 21 bp, synthetic construct
  misc_feature 1..21: note = Description of Artificial Sequence: Synthetic oligonucleotide
  source 1..21: mol_type = other DNA
agaagagaaaccaccaacacc

SEQ ID NO: 13365 - DNA, 21 bp, synthetic construct
  misc_feature 1..21: note = Description of Artificial Sequence: Synthetic oligonucleotide
  source 1..21: mol_type = other DNA
gccggcaacaacacccacacc

SEQ ID NO: 13366 - DNA, 21 bp, synthetic construct
  misc_feature 1..21: note = Description of Artificial Sequence: Synthetic oligonucleotide
  source 1..21: mol_type = other DNA
tctcagaatgctccgcataat

SEQ ID NO: 13367 - DNA, 21 bp, synthetic construct
  misc_feature 1..21: note = Description of Artificial Sequence: Synthetic oligonucleotide
  source 1..21: mol_type = other DNA
tctctgcagccgccgtcgaag

SEQ ID NO: 13368 - DNA, 21 bp, synthetic construct
  misc_feature 1..21: note = Description of Artificial Sequence: Synthetic oligonucleotide
  source 1..21: mol_type = other DNA
agaggcgacagcagaagagaa

SEQ ID NO: 13369 - DNA, 21 bp, synthetic construct
  misc_feature 1..21: note = Description of Artificial Sequence: Synthetic oligonucleotide
  source 1..21: mol_type = other DNA
tttgggaaggggtctaatacg

SEQ ID NO: 13370 - DNA, 21 bp, synthetic construct
  misc_feature 1..21: note = Description of Artificial Sequence: Synthetic oligonucleotide
  source 1..21: mol_type = other DNA
gcccccgccaccaaacccagc

SEQ ID NO: 13371 - DNA, 21 bp, synthetic construct
  misc_feature 1..21: note = Description of Artificial Sequence: Synthetic oligonucleotide
  source 1..21: mol_type = other DNA
gaacccaccggcagaaacaac

SEQ ID NO: 13372 - DNA, 21 bp, synthetic construct
  misc_feature 1..21: note = Description of Artificial Sequence: Synthetic oligonucleotide
  source 1..21: mol_type = other DNA
ctgaggagtaaggagtctact

SEQ ID NO: 13373 - DNA, 21 bp, synthetic construct
  misc_feature 1..21: note = Description of Artificial Sequence: Synthetic oligonucleotide
  source 1..21: mol_type = other DNA
gacggcgccggcaaacccacc

SEQ ID NO: 13374 - DNA, 21 bp, synthetic construct
  misc_feature 1..21: note = Description of Artificial Sequence: Synthetic oligonucleotide
  source 1..21: mol_type = other DNA
gttcagacgggtgcgtctaag

SEQ ID NO: 13375 - DNA, 21 bp, synthetic construct
  misc_feature 1..21: note = Description of Artificial Sequence: Synthetic oligonucleotide
  source 1..21: mol_type = other DNA
ggcgccagcaacggccacggc

SEQ ID NO: 13376 - DNA, 21 bp, synthetic construct
  misc_feature 1..21: note = Description of Artificial Sequence: Synthetic oligonucleotide
  source 1..21: mol_type = other DNA
atggacaaacccaccgtcgtc

SEQ ID NO: 13377 - DNA, 21 bp, synthetic construct
  misc_feature 1..21: note = Description of Artificial Sequence: Synthetic oligonucleotide
  source 1..21: mol_type = other DNA
gacccccaacccaccgccaaa

SEQ ID NO: 13378 - DNA, 21 bp, synthetic construct
  misc_feature 1..21: note = Description of Artificial Sequence: Synthetic oligonucleotide
  source 1..21: mol_type = other DNA
gacagcagccccaccctcaaa

SEQ ID NO: 13379 - DNA, 21 bp, synthetic construct
  misc_feature 1..21: note = Description of Artificial Sequence: Synthetic oligonucleotide
  source 1..21: mol_type = other DNA
ggtcttcgtggtcagaatacg

SEQ ID NO: 13380 - DNA, 21 bp, synthetic construct
  misc_feature 1..21: note = Description of Artificial Sequence: Synthetic oligonucleotide
  source 1..21: mol_type = other DNA
tcggcttcggatagggcgtct

SEQ ID NO: 13381 - DNA, 21 bp, synthetic construct
  misc_feature 1..21: note = Description of Artificial Sequence: Synthetic oligonucleotide
  source 1..21: mol_type = other DNA
ggtactacgggtgcgcgtacg

SEQ ID NO: 13382 - DNA, 21 bp, synthetic construct
  misc_feature 1..21: note = Description of Artificial Sequence: Synthetic oligonucleotide
  source 1..21: mol_type = other DNA
gatggtacgtcttcgcttagg

SEQ ID NO: 13383 - DNA, 21 bp, synthetic construct
  misc_feature 1..21: note = Description of Artificial Sequence: Synthetic oligonucleotide
  source 1..21: mol_type = other DNA
agagacggcgccagccaagcc

SEQ ID NO: 13384 - DNA, 21 bp, synthetic construct
  misc_feature 1..21: note = Description of Artificial Sequence: Synthetic oligonucleotide
  source 1..21: mol_type = other DNA
accggcggcagcaaagccacc

SEQ ID NO: 13385 - DNA, 21 bp, synthetic construct
  misc_feature 1..21: note = Description of Artificial Sequence: Synthetic oligonucleotide
  source 1..21: mol_type = other DNA
atgcatgataaggcgactgcg

SEQ ID NO: 13386 - DNA, 21 bp, synthetic construct
  misc_feature 1..21: note = Description of Artificial Sequence: Synthetic oligonucleotide
  source 1..21: mol_type = other DNA
ggcgccagcagccccagaaac

SEQ ID NO: 13387 - DNA, 21 bp, synthetic construct
  misc_feature 1..21: note = Description of Artificial Sequence: Synthetic oligonucleotide
  source 1..21: mol_type = other DNA
tcgggtaataataattcgaag

SEQ ID NO: 13388 - DNA, 21 bp, synthetic construct
  misc_feature 1..21: note = Description of Artificial Sequence: Synthetic oligonucleotide
  source 1..21: mol_type = other DNA
aatgggggtcgtgctccggtt

SEQ ID NO: 13389 - DNA, 21 bp, synthetic construct
  misc_feature 1..21: note = Description of Artificial Sequence: Synthetic oligonucleotide
  source 1..21: mol_type = other DNA
agcaccgtcgccagccccaaa

SEQ ID NO: 13390 - DNA, 21 bp, synthetic construct
  misc_feature 1..21: note = Description of Artificial Sequence: Synthetic oligonucleotide
  source 1..21: mol_type = other DNA
gtcaacaacggcaaacccagc

SEQ ID NO: 13391 - DNA, 21 bp, synthetic construct
  misc_feature 1..21: note = Description of Artificial Sequence: Synthetic oligonucleotide
  source 1..21: mol_type = other DNA
gggggtgttaagcattctgat

SEQ ID NO: 13392 - DNA, 21 bp, synthetic construct
  misc_feature 1..21: note = Description of Artificial Sequence: Synthetic oligonucleotide
  source 1..21: mol_type = other DNA
agaaacagccaagccagcggc

SEQ ID NO: 13393 - DNA, 21 bp, synthetic construct
  misc_feature 1..21: note = Description of Artificial Sequence: Synthetic oligonucleotide
  source 1..21: mol_type = other DNA
tcgaatcagtcggggtctaag

SEQ ID NO: 13394 - DNA, 21 bp, synthetic construct
  misc_feature 1..21: note = Description of Artificial Sequence: Synthetic oligonucleotide
  source 1..21: mol_type = other DNA
gccatgaacaacaaagccgaa

SEQ ID NO: 13395 - DNA, 21 bp, synthetic construct
  misc_feature 1..21: note = Description of Artificial Sequence: Synthetic oligonucleotide
  source 1..21: mol_type = other DNA
gccagcaacaaccccagaacc

SEQ ID NO: 13396 - DNA, 21 bp, synthetic construct
  misc_feature 1..21: note = Description of Artificial Sequence: Synthetic oligonucleotide
  source 1..21: mol_type = other DNA
gaggggcagagtccgcagtct

SEQ ID NO: 13397 - DNA, 21 bp, synthetic construct
  misc_feature 1..21: note = Description of Artificial Sequence: Synthetic oligonucleotide
  source 1..21: mol_type = other DNA
accggcagcggcaacagcagc

SEQ ID NO: 13398 - DNA, 21 bp, synthetic construct
  misc_feature 1..21: note = Description of Artificial Sequence: Synthetic oligonucleotide
  source 1..21: mol_type = other DNA
agcggcagcgccaacctcacc

SEQ ID NO: 13399 - DNA, 21 bp, synthetic construct
  misc_feature 1..21: note = Description of Artificial Sequence: Synthetic oligonucleotide
  source 1..21: mol_type = other DNA
atgggccaagccagcaacatc

SEQ ID NO: 13400 - DNA, 21 bp, synthetic construct
  misc_feature 1..21: note = Description of Artificial Sequence: Synthetic oligonucleotide
  source 1..21: mol_type = other DNA
ctggggaatcagtctcctaag

SEQ ID NO: 13401 - DNA, 21 bp, synthetic construct
  misc_feature 1..21: note = Description of Artificial Sequence: Synthetic oligonucleotide
  source 1..21: mol_type = other DNA
ggcagcgacagaagcagcggc

SEQ ID NO: 13402 - DNA, 21 bp, synthetic construct
  misc_feature 1..21: note = Description of Artificial Sequence: Synthetic oligonucleotide
  source 1..21: mol_type = other DNA
gttgttaataaggcttcgtcg

SEQ ID NO: 13403 - DNA, 21 bp, synthetic construct
  misc_feature 1..21: note = Description of Artificial Sequence: Synthetic oligonucleotide
  source 1..21: mol_type = other DNA
acggggcgtcctagtcctact

SEQ ID NO: 13404 - DNA, 21 bp, synthetic construct
  misc_feature 1..21: note = Description of Artificial Sequence: Synthetic oligonucleotide
  source 1..21: mol_type = other DNA
agcagcggcgacaaaagacac

SEQ ID NO: 13405 - DNA, 21 bp, synthetic construct
  misc_feature 1..21: note = Description of Artificial Sequence: Synthetic oligonucleotide
  source 1..21: mol_type = other DNA
gatagtgcggcgaagatgagt

SEQ ID NO: 13406 - DNA, 21 bp, synthetic construct
  misc_feature 1..21: note = Description of Artificial Sequence: Synthetic oligonucleotide
  source 1..21: mol_type = other DNA
ggcaccagcacccccgtcacc

SEQ ID NO: 13407 - DNA, 21 bp, synthetic construct
  misc_feature 1..21: note = Description of Artificial Sequence: Synthetic oligonucleotide
  source 1..21: mol_type = other DNA
acggtgggtaaggttaatagt

SEQ ID NO: 13408 - DNA, 21 bp, synthetic construct
  misc_feature 1..21: note = Description of Artificial Sequence: Synthetic oligonucleotide
  source 1..21: mol_type = other DNA
gttgggaattcgcagcctcct

SEQ ID NO: 13409 - DNA, 21 bp, synthetic construct
  misc_feature 1..21: note = Description of Artificial Sequence: Synthetic oligonucleotide
  source 1..21: mol_type = other DNA
acgggggtttcgaagcctgtt

SEQ ID NO: 13410 - DNA, 21 bp, synthetic construct
  misc_feature 1..21: note = Description of Artificial Sequence: Synthetic oligonucleotide
  source 1..21: mol_type = other DNA
agtgagaagacggcgaattct

SEQ ID NO: 13411 - DNA, 21 bp, synthetic construct
  misc_feature 1..21: note = Description of Artificial Sequence: Synthetic oligonucleotide
  source 1..21: mol_type = other DNA
tcgtctggtacttctgctggt

SEQ ID NO: 13412 - DNA, 21 bp, synthetic construct
  misc_feature 1..21: note = Description of Artificial Sequence: Synthetic oligonucleotide
  source 1..21: mol_type = other DNA
gggcgtagtggtacgaatgct

SEQ ID NO: 13413 - DNA, 21 bp, synthetic construct
  misc_feature 1..21: note = Description of Artificial Sequence: Synthetic oligonucleotide
  source 1..21: mol_type = other DNA
gttgcgcagtctccgacttct

SEQ ID NO: 13414 - DNA, 21 bp, synthetic construct
  misc_feature 1..21: note = Description of Artificial Sequence: Synthetic oligonucleotide
  source 1..21: mol_type = other DNA
catgggtcgtctagtggtaag

SEQ ID NO: 13415 - DNA, 21 bp, synthetic construct
  misc_feature 1..21: note = Description of Artificial Sequence: Synthetic oligonucleotide
  source 1..21: mol_type = other DNA
aatccgtctgggtcgacgggt

SEQ ID NO: 13416 - DNA, 21 bp, synthetic construct
  misc_feature 1..21: note = Description of Artificial Sequence: Synthetic oligonucleotide
  source 1..21: mol_type = other DNA
caagccgaaaacagcagaaac

SEQ ID NO: 13417 - DNA, 21 bp, synthetic construct
  misc_feature 1..21: note = Description of Artificial Sequence: Synthetic oligonucleotide
  source 1..21: mol_type = other DNA
accagcagcaccaacttcagc

SEQ ID NO: 13418 - DNA, 21 bp, synthetic construct
  misc_feature 1..21: note = Description of Artificial Sequence: Synthetic oligonucleotide
  source 1..21: mol_type = other DNA
actggtagtcagtcgtcgggt

SEQ ID NO: 13419 - DNA, 21 bp, synthetic construct
  misc_feature 1..21: note = Description of Artificial Sequence: Synthetic oligonucleotide
  source 1..21: mol_type = other DNA
tctggtgttacgaagtcgtcg

SEQ ID NO: 13420 - DNA, 21 bp, synthetic construct
  misc_feature 1..21: note = Description of Artificial Sequence: Synthetic oligonucleotide
  source 1..21: mol_type = other DNA
caaggcagcaaaagcgtcctc

SEQ ID NO: 13421 - DNA, 21 bp, synthetic construct
  misc_feature 1..21: note = Description of Artificial Sequence: Synthetic oligonucleotide
  source 1..21: mol_type = other DNA
gcgggtgcttctgttaatgcg

SEQ ID NO: 13422 - DNA, 21 bp, synthetic construct
  misc_feature 1..21: note = Description of Artificial Sequence: Synthetic oligonucleotide
  source 1..21: mol_type = other DNA
tctcgtgatagtccgcctaag

SEQ ID NO: 13423 - DNA, 21 bp, synthetic construct
  misc_feature 1..21: note = Description of Artificial Sequence: Synthetic oligonucleotide
  source 1..21: mol_type = other DNA
cgttctgataataaggcgagt

SEQ ID NO: 13424 - DNA, 21 bp, synthetic construct
  misc_feature 1..21: note = Description of Artificial Sequence: Synthetic oligonucleotide
  source 1..21: mol_type = other DNA
caagtccaaaaaagcagcagc

SEQ ID NO: 13425 - DNA, 21 bp, synthetic construct
  misc_feature 1..21: note = Description of Artificial Sequence: Synthetic oligonucleotide
  source 1..21: mol_type = other DNA
ggcagcgtcaccaacagcggc

SEQ ID NO: 13426 - DNA, 21 bp, synthetic construct
  misc_feature 1..21: note = Description of Artificial Sequence: Synthetic oligonucleotide
  source 1..21: mol_type = other DNA
ggcggcgccagccccagcaga

SEQ ID NO: 13427 - DNA, 21 bp, synthetic construct
  misc_feature 1..21: note = Description of Artificial Sequence: Synthetic oligonucleotide
  source 1..21: mol_type = other DNA
ctgcaggcgaataagtctcag

SEQ ID NO: 13428 - DNA, 21 bp, synthetic construct
  misc_feature 1..21: note = Description of Artificial Sequence: Synthetic oligonucleotide
  source 1..21: mol_type = other DNA
gggcgttctggtgagaattcg

SEQ ID NO: 13429 - DNA, 21 bp, synthetic construct
  misc_feature 1..21: note = Description of Artificial Sequence: Synthetic oligonucleotide
  source 1..21: mol_type = other DNA
aacgaaagcaacagacaaagc

SEQ ID NO: 13430 - DNA, 21 bp, synthetic construct
  misc_feature 1..21: note = Description of Artificial Sequence: Synthetic oligonucleotide
  source 1..21: mol_type = other DNA
accatcggcaaaggcggcagc

SEQ ID NO: 13431 - DNA, 21 bp, synthetic construct
  misc_feature 1..21: note = Description of Artificial Sequence: Synthetic oligonucleotide
  source 1..21: mol_type = other DNA
ggcaccggcagcggcagcaga

SEQ ID NO: 13432 - DNA, 21 bp, synthetic construct
  misc_feature 1..21: note = Description of Artificial Sequence: Synthetic oligonucleotide
  source 1..21: mol_type = other DNA
atttcgggtagtaattctaag

SEQ ID NO: 13433 - DNA, 21 bp, synthetic construct
  misc_feature 1..21: note = Description of Artificial Sequence: Synthetic oligonucleotide
  source 1..21: mol_type = other DNA
gaaaacagcaccgcccccaaa

SEQ ID NO: 13434 - DNA, 21 bp, synthetic construct
  misc_feature 1..21: note = Description of Artificial Sequence: Synthetic oligonucleotide
  source 1..21: mol_type = other DNA
gggggttctgggactatgaag

SEQ ID NO: 13435 - DNA, 21 bp, synthetic construct
  misc_feature 1..21: note = Description of Artificial Sequence: Synthetic oligonucleotide
  source 1..21: mol_type = other DNA
gccggcgccagccccaaccac

SEQ ID NO: 13436 - DNA, 21 bp, synthetic construct
  misc_feature 1..21: note = Description of Artificial Sequence: Synthetic oligonucleotide
  source 1..21: mol_type = other DNA
gaccaaagcaccaaaggcagc

SEQ ID NO: 13437 - DNA, 21 bp, synthetic construct
  misc_feature 1..21: note = Description of Artificial Sequence: Synthetic oligonucleotide
  source 1..21: mol_type = other DNA
ggcgacctcaccagcaccaaa

SEQ ID NO: 13438 - DNA, 21 bp, synthetic construct
  misc_feature 1..21: note = Description of Artificial Sequence: Synthetic oligonucleotide
  source 1..21: mol_type = other DNA
gccggcaaaagcaccgtcaac

SEQ ID NO: 13439 - DNA, 21 bp, synthetic construct
  misc_feature 1..21: note = Description of Artificial Sequence: Synthetic oligonucleotide
  source 1..21: mol_type = other DNA
gctactcatgctcctcagagt

SEQ ID NO: 13440 - DNA, 21 bp, synthetic construct
  misc_feature 1..21: note = Description of Artificial Sequence: Synthetic oligonucleotide
  source 1..21: mol_type = other DNA
gccaccaaacccagccaaggc

SEQ ID NO: 13441 - DNA, 21 bp, synthetic construct
  misc_feature 1..21: note = Description of Artificial Sequence: Synthetic oligonucleotide
  source 1..21: mol_type = other DNA
acggatagtggggcttcgaag

SEQ ID NO: 13442 - DNA, 21 bp, synthetic construct
  misc_feature 1..21: note = Description of Artificial Sequence: Synthetic oligonucleotide
  source 1..21: mol_type = other DNA
acgactgggtcgaagggtatg

SEQ ID NO: 13443 - DNA, 21 bp, synthetic construct
  misc_feature 1..21: note = Description of Artificial Sequence: Synthetic oligonucleotide
  source 1..21: mol_type = other DNA
actggtgcgaataatctgaag

SEQ ID NO: 13444 - DNA, 21 bp, synthetic construct
  misc_feature 1..21: note = Description of Artificial Sequence: Synthetic oligonucleotide
  source 1..21: mol_type = other DNA
agcagaagcaccaaacccgaa

SEQ ID NO: 13445 - DNA, 21 bp, synthetic construct
  misc_feature 1..21: note = Description of Artificial Sequence: Synthetic oligonucleotide
  source 1..21: mol_type = other DNA
gggagtggtggtagtaagagt

SEQ ID NO: 13446 - DNA, 21 bp, synthetic construct
  misc_feature 1..21: note = Description of Artificial Sequence: Synthetic oligonucleotide
  source 1..21: mol_type = other DNA
accagcggcagccccaacagc

SEQ ID NO: 13447 - DNA, 21 bp, synthetic construct
  misc_feature 1..21: note = Description of Artificial Sequence: Synthetic oligonucleotide
  source 1..21: mol_type = other DNA
agtatgggtaagtcggcggtg

SEQ ID NO: 13448 - DNA, 21 bp, synthetic construct
  misc_feature 1..21: note = Description of Artificial Sequence: Synthetic oligonucleotide
  source 1..21: mol_type = other DNA
tcggctgctggtagtccgact

SEQ ID NO: 13449 - DNA, 21 bp, synthetic construct
  misc_feature 1..21: note = Description of Artificial Sequence: Synthetic oligonucleotide
  source 1..21: mol_type = other DNA
actcagaatagtccgaatggt

SEQ ID NO: 13450 - DNA, 21 bp, synthetic construct
  misc_feature 1..21: note = Description of Artificial Sequence: Synthetic oligonucleotide
  source 1..21: mol_type = other DNA
agttcttcgcagaagccgtcg

SEQ ID NO: 13451 - DNA, 21 bp, synthetic construct
  misc_feature 1..21: note = Description of Artificial Sequence: Synthetic oligonucleotide
  source 1..21: mol_type = other DNA
aagggggcgccgaataattct

SEQ ID NO: 13452 - DNA, 21 bp, synthetic construct
  misc_feature 1..21: note = Description of Artificial Sequence: Synthetic oligonucleotide
  source 1..21: mol_type = other DNA
actagggatgttaaggcgggg

SEQ ID NO: 13453 - DNA, 21 bp, synthetic construct
  misc_feature 1..21: note = Description of Artificial Sequence: Synthetic oligonucleotide
  source 1..21: mol_type = other DNA
cacagagaaagcaaaagcacc

SEQ ID NO: 13454 - DNA, 21 bp, synthetic construct
  misc_feature 1..21: note = Description of Artificial Sequence: Synthetic oligonucleotide
  source 1..21: mol_type = other DNA
ggttcggataagaatcggggg

SEQ ID NO: 13455 - DNA, 21 bp, synthetic construct
  misc_feature 1..21: note = Description of Artificial Sequence: Synthetic oligonucleotide
  source 1..21: mol_type = other DNA
atcagcaacaaaagcagcaac

SEQ ID NO: 13456 - DNA, 21 bp, synthetic construct
  misc_feature 1..21: note = Description of Artificial Sequence: Synthetic oligonucleotide
  source 1..21: mol_type = other DNA
gggaattcgggtccttcgaag

SEQ ID NO: 13457 - DNA, 21 bp, synthetic construct
  misc_feature 1..21: note = Description of Artificial Sequence: Synthetic oligonucleotide
  source 1..21: mol_type = other DNA
caggggaatgatcgtaaggtt

SEQ ID NO: 13458 - DNA, 21 bp, synthetic construct
  misc_feature 1..21: note = Description of Artificial Sequence: Synthetic oligonucleotide
  source 1..21: mol_type = other DNA
gctccggatacgaagccgact

SEQ ID NO: 13459 - DNA, 21 bp, synthetic construct
  misc_feature 1..21: note = Description of Artificial Sequence: Synthetic oligonucleotide
  source 1..21: mol_type = other DNA
cagggtaagactgggtcggtt

SEQ ID NO: 13460 - DNA, 21 bp, synthetic construct
  misc_feature 1..21: note = Description of Artificial Sequence: Synthetic oligonucleotide
  source 1..21: mol_type = other DNA
gcgaatacgactgcgagtgtt

SEQ ID NO: 13461 - DNA, 21 bp, synthetic construct
  misc_feature 1..21: note = Description of Artificial Sequence: Synthetic oligonucleotide
  source 1..21: mol_type = other DNA
actaattcttcgtctcatatg

SEQ ID NO: 13462 - DNA, 21 bp, synthetic construct
  misc_feature 1..21: note = Description of Artificial Sequence: Synthetic oligonucleotide
  source 1..21: mol_type = other DNA
ggtgcggggcgtgagggggct

SEQ ID NO: 13463 - DNA, 21 bp, synthetic construct
  misc_feature 1..21: note = Description of Artificial Sequence: Synthetic oligonucleotide
  source 1..21: mol_type = other DNA
gatagttcgacgcgtcctttg

SEQ ID NO: 13464 - DNA, 21 bp, synthetic construct
  misc_feature 1..21: note = Description of Artificial Sequence: Synthetic oligonucleotide
  source 1..21: mol_type = other DNA
acgcctggttcgaagactatg

SEQ ID NO: 13465 - DNA, 21 bp, synthetic construct
  misc_feature 1..21: note = Description of Artificial Sequence: Synthetic oligonucleotide
  source 1..21: mol_type = other DNA
gagtctgctacgaagtcgtcg

SEQ ID NO: 13466 - DNA, 21 bp, synthetic construct
  misc_feature 1..21: note = Description of Artificial Sequence: Synthetic oligonucleotide
  source 1..21: mol_type = other DNA
aatcaggatgcgaagcagtat

SEQ ID NO: 13467 - DNA, 21 bp, synthetic construct
  misc_feature 1..21: note = Description of Artificial Sequence: Synthetic oligonucleotide
  source 1..21: mol_type = other DNA
tcggtggggaattcgaataag

SEQ ID NO: 13468 - DNA, 21 bp, synthetic construct
  misc_feature 1..21: note = Description of Artificial Sequence: Synthetic oligonucleotide
  source 1..21: mol_type = other DNA
tctcagggtgataagactacg

SEQ ID NO: 13469 - DNA, 21 bp, synthetic construct
  misc_feature 1..21: note = Description of Artificial Sequence: Synthetic oligonucleotide
  source 1..21: mol_type = other DNA
aatcggaatggtacttcgggg

SEQ ID NO: 13470 - DNA, 21 bp, synthetic construct
  misc_feature 1..21: note = Description of Artificial Sequence: Synthetic oligonucleotide
  source 1..21: mol_type = other DNA
cagtcgagtggtaaggggggt

SEQ ID NO: 13471 - DNA, 21 bp, synthetic construct
  misc_feature 1..21: note = Description of Artificial Sequence: Synthetic oligonucleotide
  source 1..21: mol_type = other DNA
ggcgccagccaaaaaaccgtc

SEQ ID NO: 13472 - DNA, 21 bp, synthetic construct
  misc_feature 1..21: note = Description of Artificial Sequence: Synthetic oligonucleotide
  source 1..21: mol_type = other DNA
aatggtactactacggggggg

SEQ ID NO: 13473 - DNA, 21 bp, synthetic construct
  misc_feature 1..21: note = Description of Artificial Sequence: Synthetic oligonucleotide
  source 1..21: mol_type = other DNA
gtccccagcaaaaccagcacc

SEQ ID NO: 13474 - DNA, 21 bp, synthetic construct
  misc_feature 1..21: note = Description of Artificial Sequence: Synthetic oligonucleotide
  source 1..21: mol_type = other DNA
acccccagcaacagaaccgaa

SEQ ID NO: 13475 - DNA, 21 bp, synthetic construct
  misc_feature 1..21: note = Description of Artificial Sequence: Synthetic oligonucleotide
  source 1..21: mol_type = other DNA
ggtagggataagggtacgggt

SEQ ID NO: 13476 - DNA, 21 bp, synthetic construct
  misc_feature 1..21: note = Description of Artificial Sequence: Synthetic oligonucleotide
  source 1..21: mol_type = other DNA
accagccccggcaaacccgtc

SEQ ID NO: 13477 - DNA, 21 bp, synthetic construct
  misc_feature 1..21: note = Description of Artificial Sequence: Synthetic oligonucleotide
  source 1..21: mol_type = other DNA
ggtcgtactaatgagcctaag

SEQ ID NO: 13478 - DNA, 21 bp, synthetic construct
  misc_feature 1..21: note = Description of Artificial Sequence: Synthetic oligonucleotide
  source 1..21: mol_type = other DNA
ggcagcagcagccccatcaaa

SEQ ID NO: 13479 - DNA, 21 bp, synthetic construct
  misc_feature 1..21: note = Description of Artificial Sequence: Synthetic oligonucleotide
  source 1..21: mol_type = other DNA
acccaagccgtcaaaagcatc

SEQ ID NO: 13480 - DNA, 21 bp, synthetic construct
  misc_feature 1..21: note = Description of Artificial Sequence: Synthetic oligonucleotide
  source 1..21: mol_type = other DNA
agttcggggagtggtgctggt

SEQ ID NO: 13481 - DNA, 21 bp, synthetic construct
  misc_feature 1..21: note = Description of Artificial Sequence: Synthetic oligonucleotide
  source 1..21: mol_type = other DNA
cagactactcctgcttctggt

SEQ ID NO: 13482 - DNA, 21 bp, synthetic construct
  misc_feature 1..21: note = Description of Artificial Sequence: Synthetic oligonucleotide
  source 1..21: mol_type = other DNA
caggctcagactgataagagt

SEQ ID NO: 13483 - DNA, 21 bp, synthetic construct
  misc_feature 1..21: note = Description of Artificial Sequence: Synthetic oligonucleotide
  source 1..21: mol_type = other DNA
cataataattctaaggagcgg

SEQ ID NO: 13484 - DNA, 21 bp, synthetic construct
  misc_feature 1..21: note = Description of Artificial Sequence: Synthetic oligonucleotide
  source 1..21: mol_type = other DNA
gcccacggcagcaacccccaa

SEQ ID NO: 13485 - DNA, 21 bp, synthetic construct
  misc_feature 1..21: note = Description of Artificial Sequence: Synthetic oligonucleotide
  source 1..21: mol_type = other DNA
ggcaccgaaaacgccggcaga

SEQ ID NO: 13486 - DNA, 21 bp, synthetic construct
  misc_feature 1..21: note = Description of Artificial Sequence: Synthetic oligonucleotide
  source 1..21: mol_type = other DNA
ggccccagcaccagcggcgcc

SEQ ID NO: 13487 - DNA, 21 bp, synthetic construct
  misc_feature 1..21: note = Description of Artificial Sequence: Synthetic oligonucleotide
  source 1..21: mol_type = other DNA
caaaacaaaagcgtcgccagc

SEQ ID NO: 13488 - DNA, 21 bp, synthetic construct
  misc_feature 1..21: note = Description of Artificial Sequence: Synthetic oligonucleotide
  source 1..21: mol_type = other DNA
ggtaatcagaagcctccgact

SEQ ID NO: 13489 - DNA, 21 bp, synthetic construct
  misc_feature 1..21: note = Description of Artificial Sequence: Synthetic oligonucleotide
  source 1..21: mol_type = other DNA
tcggcgcatgttaaggggtct

SEQ ID NO: 13490 - DNA, 21 bp, synthetic construct
  misc_feature 1..21: note = Description of Artificial Sequence: Synthetic oligonucleotide
  source 1..21: mol_type = other DNA
ggtgttgcgacttctgcttct

SEQ ID NO: 13491 - DNA, 21 bp, synthetic construct
  misc_feature 1..21: note = Description of Artificial Sequence: Synthetic oligonucleotide
  source 1..21: mol_type = other DNA
tctggtcattctcctgttaat

SEQ ID NO: 13492 - DNA, 21 bp, synthetic construct
  misc_feature 1..21: note = Description of Artificial Sequence: Synthetic oligonucleotide
  source 1..21: mol_type = other DNA
agcaacgacagcgccagaaaa

SEQ ID NO: 13493 - DNA, 21 bp, synthetic construct
  misc_feature 1..21: note = Description of Artificial Sequence: Synthetic oligonucleotide
  source 1..21: mol_type = other DNA
aacgccagcaccaaagccctc

SEQ ID NO: 13494 - DNA, 21 bp, synthetic construct
  misc_feature 1..21: note = Description of Artificial Sequence: Synthetic oligonucleotide
  source 1..21: mol_type = other DNA
actaatatgaagccgagttct

SEQ ID NO: 13495 - DNA, 21 bp, synthetic construct
  misc_feature 1..21: note = Description of Artificial Sequence: Synthetic oligonucleotide
  source 1..21: mol_type = other DNA
gccagcgcccaagtcagcaaa

SEQ ID NO: 13496 - DNA, 21 bp, synthetic construct
  misc_feature 1..21: note = Description of Artificial Sequence: Synthetic oligonucleotide
  source 1..21: mol_type = other DNA
ggcaccagcaaaagcgccgcc

SEQ ID NO: 13497 - DNA, 21 bp, synthetic construct
  misc_feature 1..21: note = Description of Artificial Sequence: Synthetic oligonucleotide
  source 1..21: mol_type = other DNA
acccccgacagcaaaggcaaa

SEQ ID NO: 13498 - DNA, 21 bp, synthetic construct
  misc_feature 1..21: note = Description of Artificial Sequence: Synthetic oligonucleotide
  source 1..21: mol_type = other DNA
cagcagaattctgatacgaag

SEQ ID NO: 13499 - DNA, 21 bp, synthetic construct
  misc_feature 1..21: note = Description of Artificial Sequence: Synthetic oligonucleotide
  source 1..21: mol_type = other DNA
gataggtcgccggggactgct

SEQ ID NO: 13500 - DNA, 21 bp, synthetic construct
  misc_feature 1..21: note = Description of Artificial Sequence: Synthetic oligonucleotide
  source 1..21: mol_type = other DNA
gccggcggcggcggcgtcaac

SEQ ID NO: 13501 - DNA, 21 bp, synthetic construct
  misc_feature 1..21: note = Description of Artificial Sequence: Synthetic oligonucleotide
  source 1..21: mol_type = other DNA
ttgactcagaagcagagtggt

SEQ ID NO: 13502 - DNA, 21 bp, synthetic construct
  misc_feature 1..21: note = Description of Artificial Sequence: Synthetic oligonucleotide
  source 1..21: mol_type = other DNA
gaaagaagcaccagcagcgcc

SEQ ID NO: 13503 - DNA, 21 bp, synthetic construct
  misc_feature 1..21: note = Description of Artificial Sequence: Synthetic oligonucleotide
  source 1..21: mol_type = other DNA
cacagaggcgacagccaagcc

SEQ ID NO: 13504 - DNA, 21 bp, synthetic construct
  misc_feature 1..21: note = Description of Artificial Sequence: Synthetic oligonucleotide
  source 1..21: mol_type = other DNA
aacagccacaccaccccccaa

SEQ ID NO: 13505 - DNA, 21 bp, synthetic construct
  misc_feature 1..21: note = Description of Artificial Sequence: Synthetic oligonucleotide
  source 1..21: mol_type = other DNA
ggcaccaacacccccagagcc

SEQ ID NO: 13506 - DNA, 21 bp, synthetic construct
  misc_feature 1..21: note = Description of Artificial Sequence: Synthetic oligonucleotide
  source 1..21: mol_type = other DNA
gggggggttcagtcttctaag

SEQ ID NO: 13507 - DNA, 21 bp, synthetic construct
  misc_feature 1..21: note = Description of Artificial Sequence: Synthetic oligonucleotide
  source 1..21: mol_type = other DNA
ggttctaatcgttctagtgag

SEQ ID NO: 13508 - DNA, 21 bp, synthetic construct
  misc_feature 1..21: note = Description of Artificial Sequence: Synthetic oligonucleotide
  source 1..21: mol_type = other DNA
gacagagccaccagcgcccaa

SEQ ID NO: 13509 - DNA, 21 bp, synthetic construct
  misc_feature 1..21: note = Description of Artificial Sequence: Synthetic oligonucleotide
  source 1..21: mol_type = other DNA
aatcagagtgggactaagggt

SEQ ID NO: 13510 - DNA, 21 bp, synthetic construct
  misc_feature 1..21: note = Description of Artificial Sequence: Synthetic oligonucleotide
  source 1..21: mol_type = other DNA
agcggcagcggccccaccaga

SEQ ID NO: 13511 - DNA, 21 bp, synthetic construct
  misc_feature 1..21: note = Description of Artificial Sequence: Synthetic oligonucleotide
  source 1..21: mol_type = other DNA
agccaaaccaaaagcctcacc

SEQ ID NO: 13512 - DNA, 21 bp, synthetic construct
  misc_feature 1..21: note = Description of Artificial Sequence: Synthetic oligonucleotide
  source 1..21: mol_type = other DNA
cagtctaagcctggtggttct

SEQ ID NO: 13513 - DNA, 21 bp, synthetic construct
  misc_feature 1..21: note = Description of Artificial Sequence: Synthetic oligonucleotide
  source 1..21: mol_type = other DNA
caggcggttcctacggctggt

SEQ ID NO: 13514 - DNA, 21 bp, synthetic construct
  misc_feature 1..21: note = Description of Artificial Sequence: Synthetic oligonucleotide
  source 1..21: mol_type = other DNA
agcggcaccgaagtcatcaaa

SEQ ID NO: 13515 - DNA, 21 bp, synthetic construct
  misc_feature 1..21: note = Description of Artificial Sequence: Synthetic oligonucleotide
  source 1..21: mol_type = other DNA
agtctgactaagcctcagacg

SEQ ID NO: 13516 - DNA, 21 bp, synthetic construct
  misc_feature 1..21: note = Description of Artificial Sequence: Synthetic oligonucleotide
  source 1..21: mol_type = other DNA
cacggcgaaagaaccaacaac

SEQ ID NO: 13517 - DNA, 21 bp, synthetic construct
  misc_feature 1..21: note = Description of Artificial Sequence: Synthetic oligonucleotide
  source 1..21: mol_type = other DNA
ggtaataataagacgcttatg

SEQ ID NO: 13518 - DNA, 21 bp, synthetic construct
  misc_feature 1..21: note = Description of Artificial Sequence: Synthetic oligonucleotide
  source 1..21: mol_type = other DNA
actacgggtgagaagcgtcct

SEQ ID NO: 13519 - DNA, 21 bp, synthetic construct
  misc_feature 1..21: note = Description of Artificial Sequence: Synthetic oligonucleotide
  source 1..21: mol_type = other DNA
gaaatgatcagcaaaagcaaa

SEQ ID NO: 13520 - DNA, 21 bp, synthetic construct
  misc_feature 1..21: note = Description of Artificial Sequence: Synthetic oligonucleotide
  source 1..21: mol_type = other DNA
gaacacagaagccccagcatc

SEQ ID NO: 13521 - DNA, 21 bp, synthetic construct
  misc_feature 1..21: note = Description of Artificial Sequence: Synthetic oligonucleotide
  source 1..21: mol_type = other DNA
ggcctcgaaaccagagcccaa

SEQ ID NO: 13522 - DNA, 21 bp, synthetic construct
  misc_feature 1..21: note = Description of Artificial Sequence: Synthetic oligonucleotide
  source 1..21: mol_type = other DNA
actggtgtgtcgccggtggcg

SEQ ID NO: 13523 - DNA, 21 bp, synthetic construct
  misc_feature 1..21: note = Description of Artificial Sequence: Synthetic oligonucleotide
  source 1..21: mol_type = other DNA
tcttcgacttcttcggcttct

SEQ ID NO: 13524 - DNA, 21 bp, synthetic construct
  misc_feature 1..21: note = Description of Artificial Sequence: Synthetic oligonucleotide
  source 1..21: mol_type = other DNA
tctggtaatgctaagagtaat

SEQ ID NO: 13525 - DNA, 21 bp, synthetic construct
  misc_feature 1..21: note = Description of Artificial Sequence: Synthetic oligonucleotide
  source 1..21: mol_type = other DNA
ggtgtggcgtctccgcgttct

SEQ ID NO: 13526 - DNA, 21 bp, synthetic construct
  misc_feature 1..21: note = Description of Artificial Sequence: Synthetic oligonucleotide
  source 1..21: mol_type = other DNA
ggtcctttggctactgttaag

SEQ ID NO: 13527 - DNA, 21 bp, synthetic construct
  misc_feature 1..21: note = Description of Artificial Sequence: Synthetic oligonucleotide
  source 1..21: mol_type = other DNA
agccccaccagccaaaacaac

SEQ ID NO: 13528 - DNA, 21 bp, synthetic construct
  misc_feature 1..21: note = Description of Artificial Sequence: Synthetic oligonucleotide
  source 1..21: mol_type = other DNA
cagggtaaggcgcagcaggcg

SEQ ID NO: 13529 - DNA, 21 bp, synthetic construct
  misc_feature 1..21: note = Description of Artificial Sequence: Synthetic oligonucleotide
  source 1..21: mol_type = other DNA
ggcaccgccagccaaaacagc

SEQ ID NO: 13530 - DNA, 21 bp, synthetic construct
  misc_feature 1..21: note = Description of Artificial Sequence: Synthetic oligonucleotide
  source 1..21: mol_type = other DNA
aacagcgccagcagcagcagc

SEQ ID NO: 13531 - DNA, 21 bp, synthetic construct
  misc_feature 1..21: note = Description of Artificial Sequence: Synthetic oligonucleotide
  source 1..21: mol_type = other DNA
ctcgccaccaaaggcagcgcc

SEQ ID NO: 13532 - DNA, 21 bp, synthetic construct
  misc_feature 1..21: note = Description of Artificial Sequence: Synthetic oligonucleotide
  source 1..21: mol_type = other DNA
ggcagagaccacaaaaccagc

SEQ ID NO: 13533 - DNA, 21 bp, synthetic construct
  misc_feature 1..21: note = Description of Artificial Sequence: Synthetic oligonucleotide
  source 1..21: mol_type = other DNA
ggcagccccggcaccagcaac

SEQ ID NO: 13534 - DNA, 21 bp, synthetic construct
  misc_feature 1..21: note = Description of Artificial Sequence: Synthetic oligonucleotide
  source 1..21: mol_type = other DNA
aggtcggatggtaataagggg

SEQ ID NO: 13535 - DNA, 21 bp, synthetic construct
  misc_feature 1..21: note = Description of Artificial Sequence: Synthetic oligonucleotide
  source 1..21: mol_type = other DNA
accagccaaagagaccacgcc

SEQ ID NO: 13536 - DNA, 21 bp, synthetic construct
  misc_feature 1..21: note = Description of Artificial Sequence: Synthetic oligonucleotide
  source 1..21: mol_type = other DNA
ggggtgcctaaggataagggg

SEQ ID NO: 13537 - DNA, 21 bp, synthetic construct
  misc_feature 1..21: note = Description of Artificial Sequence: Synthetic oligonucleotide
  source 1..21: mol_type = other DNA
gttggtacgaagtctcagggg

SEQ ID NO: 13538 - DNA, 21 bp, synthetic construct
  misc_feature 1..21: note = Description of Artificial Sequence: Synthetic oligonucleotide
  source 1..21: mol_type = other DNA
gaagccaacagcagaagcacc

SEQ ID NO: 13539 - DNA, 21 bp, synthetic construct
  misc_feature 1..21: note = Description of Artificial Sequence: Synthetic oligonucleotide
  source 1..21: mol_type = other DNA
accgtcagcacccccagcagc

SEQ ID NO: 13540 - DNA, 21 bp, synthetic construct
  misc_feature 1..21: note = Description of Artificial Sequence: Synthetic oligonucleotide
  source 1..21: mol_type = other DNA
ggcaccaacagcccccccaga

SEQ ID NO: 13541 - DNA, 21 bp, synthetic construct
  misc_feature 1..21: note = Description of Artificial Sequence: Synthetic oligonucleotide
  source 1..21: mol_type = other DNA
ggcccccaaggcgaaaacaga

SEQ ID NO: 13542 - DNA, 21 bp, synthetic construct
  misc_feature 1..21: note = Description of Artificial Sequence: Synthetic oligonucleotide
  source 1..21: mol_type = other DNA
gaccaagccaaaggcggcaga

SEQ ID NO: 13543 - DNA, 21 bp, synthetic construct
  misc_feature 1..21: note = Description of Artificial Sequence: Synthetic oligonucleotide
  source 1..21: mol_type = other DNA
agccaaagaagccccggcacc

SEQ ID NO: 13544 - DNA, 21 bp, synthetic construct
  misc_feature 1..21: note = Description of Artificial Sequence: Synthetic oligonucleotide
  source 1..21: mol_type = other DNA
accaccaacaccaaagccacc

SEQ ID NO: 13545 - DNA, 21 bp, synthetic construct
  misc_feature 1..21: note = Description of Artificial Sequence: Synthetic oligonucleotide
  source 1..21: mol_type = other DNA
gatggggttggtggtcgtggg

SEQ ID NO: 13546 - DNA, 21 bp, synthetic construct
  misc_feature 1..21: note = Description of Artificial Sequence: Synthetic oligonucleotide
  source 1..21: mol_type = other DNA
ggccccaccaacagcgtcaaa

SEQ ID NO: 13547 - DNA, 21 bp, synthetic construct
  misc_feature 1..21: note = Description of Artificial Sequence: Synthetic oligonucleotide
  source 1..21: mol_type = other DNA
actcctgtgaatagtccgcat

SEQ ID NO: 13548 - DNA, 21 bp, synthetic construct
  misc_feature 1..21: note = Description of Artificial Sequence: Synthetic oligonucleotide
  source 1..21: mol_type = other DNA
agaggcagcggcagcagcagc

SEQ ID NO: 13549 - DNA, 21 bp, synthetic construct
  misc_feature 1..21: note = Description of Artificial Sequence: Synthetic oligonucleotide
  source 1..21: mol_type = other DNA
ctccacagcgacaaaaccacc

SEQ ID NO: 13550 - DNA, 21 bp, synthetic construct
  misc_feature 1..21: note = Description of Artificial Sequence: Synthetic oligonucleotide
  source 1..21: mol_type = other DNA
actagtcatgataagattcgg

SEQ ID NO: 13551 - DNA, 21 bp, synthetic construct
  misc_feature 1..21: note = Description of Artificial Sequence: Synthetic oligonucleotide
  source 1..21: mol_type = other DNA
agcgtcgaaggcaaaaacaga

SEQ ID NO: 13552 - DNA, 21 bp, synthetic construct
  misc_feature 1..21: note = Description of Artificial Sequence: Synthetic oligonucleotide
  source 1..21: mol_type = other DNA
ggtacgtcggtgaaggctact

SEQ ID NO: 13553 - DNA, 21 bp, synthetic construct
  misc_feature 1..21: note = Description of Artificial Sequence: Synthetic oligonucleotide
  source 1..21: mol_type = other DNA
agcaacaccaacgccagcgtc

SEQ ID NO: 13554 - DNA, 21 bp, synthetic construct
  misc_feature 1..21: note = Description of Artificial Sequence: Synthetic oligonucleotide
  source 1..21: mol_type = other DNA
gccaacagcagcaaagtcgtc

SEQ ID NO: 13555 - DNA, 21 bp, synthetic construct
  misc_feature 1..21: note = Description of Artificial Sequence: Synthetic oligonucleotide
  source 1..21: mol_type = other DNA
cacaacagcagcaccagcagc

SEQ ID NO: 13556 - DNA, 21 bp, synthetic construct
  misc_feature 1..21: note = Description of Artificial Sequence: Synthetic oligonucleotide
  source 1..21: mol_type = other DNA
aatgatggtaagaatagtttg

SEQ ID NO: 13557 - DNA, 21 bp, synthetic construct
  misc_feature 1..21: note = Description of Artificial Sequence: Synthetic oligonucleotide
  source 1..21: mol_type = other DNA
actggtcagaatgggagtgcg

SEQ ID NO: 13558 - DNA, 21 bp, synthetic construct
  misc_feature 1..21: note = Description of Artificial Sequence: Synthetic oligonucleotide
  source 1..21: mol_type = other DNA
ggccacgccgaaagcagcaaa

SEQ ID NO: 13559 - DNA, 21 bp, synthetic construct
  misc_feature 1..21: note = Description of Artificial Sequence: Synthetic oligonucleotide
  source 1..21: mol_type = other DNA
agcgccggcggcaaacccgcc

SEQ ID NO: 13560 - DNA, 21 bp, synthetic construct
  misc_feature 1..21: note = Description of Artificial Sequence: Synthetic oligonucleotide
  source 1..21: mol_type = other DNA
actcagtcgaagtcggcgatg

SEQ ID NO: 13561 - DNA, 21 bp, synthetic construct
  misc_feature 1..21: note = Description of Artificial Sequence: Synthetic oligonucleotide
  source 1..21: mol_type = other DNA
cacacccacagccccacccaa

SEQ ID NO: 13562 - DNA, 21 bp, synthetic construct
  misc_feature 1..21: note = Description of Artificial Sequence: Synthetic oligonucleotide
  source 1..21: mol_type = other DNA
acgaataataagcaggctctt

SEQ ID NO: 13563 - DNA, 21 bp, synthetic construct
  misc_feature 1..21: note = Description of Artificial Sequence: Synthetic oligonucleotide
  source 1..21: mol_type = other DNA
tctagtacttcgaagacggtt

SEQ ID NO: 13564 - DNA, 21 bp, synthetic construct
  misc_feature 1..21: note = Description of Artificial Sequence: Synthetic oligonucleotide
  source 1..21: mol_type = other DNA
actcaggagtctaagtatggt

SEQ ID NO: 13565 - DNA, 21 bp, synthetic construct
  misc_feature 1..21: note = Description of Artificial Sequence: Synthetic oligonucleotide
  source 1..21: mol_type = other DNA
ggcctcaccggcaaaagcagc

SEQ ID NO: 13566 - DNA, 21 bp, synthetic construct
  misc_feature 1..21: note = Description of Artificial Sequence: Synthetic oligonucleotide
  source 1..21: mol_type = other DNA
aacggcgtcccccccaaccaa

SEQ ID NO: 13567 - DNA, 21 bp, synthetic construct
  misc_feature 1..21: note = Description of Artificial Sequence: Synthetic oligonucleotide
  source 1..21: mol_type = other DNA
agagacggcaacaacgccacc

SEQ ID NO: 13568 - DNA, 21 bp, synthetic construct
  misc_feature 1..21: note = Description of Artificial Sequence: Synthetic oligonucleotide
  source 1..21: mol_type = other DNA
agcaccgccaccgccagcagc

SEQ ID NO: 13569 - DNA, 21 bp, synthetic construct
  misc_feature 1..21: note = Description of Artificial Sequence: Synthetic oligonucleotide
  source 1..21: mol_type = other DNA
agcatgaccaaaaccaacgtc

SEQ ID NO: 13570 - DNA, 21 bp, synthetic construct
  misc_feature 1..21: note = Description of Artificial Sequence: Synthetic oligonucleotide
  source 1..21: mol_type = other DNA
agcggcaaaagcgtcaacaac

SEQ ID NO: 13571 - DNA, 21 bp, synthetic construct
  misc_feature 1..21: note = Description of Artificial Sequence: Synthetic oligonucleotide
  source 1..21: mol_type = other DNA
cacatcaacggcaaaagccaa

SEQ ID NO: 13572 - DNA, 21 bp, synthetic construct
  misc_feature 1..21: note = Description of Artificial Sequence: Synthetic oligonucleotide
  source 1..21: mol_type = other DNA
ggcgccagcagcaaagaaaaa

SEQ ID NO: 13573 - DNA, 21 bp, synthetic construct
  misc_feature 1..21: note = Description of Artificial Sequence: Synthetic oligonucleotide
  source 1..21: mol_type = other DNA
tcgtctccgcagagtacgggt

SEQ ID NO: 13574 - DNA, 21 bp, synthetic construct
  misc_feature 1..21: note = Description of Artificial Sequence: Synthetic oligonucleotide
  source 1..21: mol_type = other DNA
gcttcggctaagtcgagtacg

SEQ ID NO: 13575 - DNA, 21 bp, synthetic construct
  misc_feature 1..21: note = Description of Artificial Sequence: Synthetic oligonucleotide
  source 1..21: mol_type = other DNA
aatcaggctacggctttgtcg

SEQ ID NO: 13576 - DNA, 21 bp, synthetic construct
  misc_feature 1..21: note = Description of Artificial Sequence: Synthetic oligonucleotide
  source 1..21: mol_type = other DNA
caagtcaccaaaaccaacaac

SEQ ID NO: 13577 - DNA, 21 bp, synthetic construct
  misc_feature 1..21: note = Description of Artificial Sequence: Synthetic oligonucleotide
  source 1..21: mol_type = other DNA
caacaaaacagcaaactcgtc

SEQ ID NO: 13578 - DNA, 21 bp, synthetic construct
  misc_feature 1..21: note = Description of Artificial Sequence: Synthetic oligonucleotide
  source 1..21: mol_type = other DNA
gccgccggcgccaaaagcggc

SEQ ID NO: 13579 - DNA, 21 bp, synthetic construct
  misc_feature 1..21: note = Description of Artificial Sequence: Synthetic oligonucleotide
  source 1..21: mol_type = other DNA
aaccccagcaacaaaaacaac

SEQ ID NO: 13580 - DNA, 21 bp, synthetic construct
  misc_feature 1..21: note = Description of Artificial Sequence: Synthetic oligonucleotide
  source 1..21: mol_type = other DNA
agcgccagcagagacaaagcc

SEQ ID NO: 13581 - DNA, 21 bp, synthetic construct
  misc_feature 1..21: note = Description of Artificial Sequence: Synthetic oligonucleotide
  source 1..21: mol_type = other DNA
accgccagcaacacccccagc

SEQ ID NO: 13582 - DNA, 21 bp, synthetic construct
  misc_feature 1..21: note = Description of Artificial Sequence: Synthetic oligonucleotide
  source 1..21: mol_type = other DNA
acccccagccaaaaaggcacc

SEQ ID NO: 13583 - DNA, 21 bp, synthetic construct
  misc_feature 1..21: note = Description of Artificial Sequence: Synthetic oligonucleotide
  source 1..21: mol_type = other DNA
gtcaccaacaccaaaagccac

SEQ ID NO: 13584 - DNA, 21 bp, synthetic construct
  misc_feature 1..21: note = Description of Artificial Sequence: Synthetic oligonucleotide
  source 1..21: mol_type = other DNA
aacaccagcagcaaacccacc

SEQ ID NO: 13585 - DNA, 21 bp, synthetic construct
  misc_feature 1..21: note = Description of Artificial Sequence: Synthetic oligonucleotide
  source 1..21: mol_type = other DNA
agcatgagccaaaaaagcggc

SEQ ID NO: 13586 - DNA, 21 bp, synthetic construct
  misc_feature 1..21: note = Description of Artificial Sequence: Synthetic oligonucleotide
  source 1..21: mol_type = other DNA
aacagcggcaaaaccctcatc

SEQ ID NO: 13587 - DNA, 21 bp, synthetic construct
  misc_feature 1..21: note = Description of Artificial Sequence: Synthetic oligonucleotide
  source 1..21: mol_type = other DNA
ggtgcttcgacgaagactgtg

SEQ ID NO: 13588 - DNA, 21 bp, synthetic construct
  misc_feature 1..21: note = Description of Artificial Sequence: Synthetic oligonucleotide
  source 1..21: mol_type = other DNA
agtattgcgtctaagcctacg

SEQ ID NO: 13589 - DNA, 21 bp, synthetic construct
  misc_feature 1..21: note = Description of Artificial Sequence: Synthetic oligonucleotide
  source 1..21: mol_type = other DNA
cagactgcttctagttctaag

SEQ ID NO: 13590 - DNA, 21 bp, synthetic construct
  misc_feature 1..21: note = Description of Artificial Sequence: Synthetic oligonucleotide
  source 1..21: mol_type = other DNA
tctagtgatgctaagcctatt

SEQ ID NO: 13591 - DNA, 21 bp, synthetic construct
  misc_feature 1..21: note = Description of Artificial Sequence: Synthetic oligonucleotide
  source 1..21: mol_type = other DNA
aacggttctggacagaataaa

SEQ ID NO: 13592 - DNA, 21 bp, synthetic construct
  misc_feature 1..21: note = Description of Artificial Sequence: Synthetic oligonucleotide
  source 1..21: mol_type = other DNA
agtacggctaaggctacgggt

SEQ ID NO: 13593 - DNA, 21 bp, synthetic construct
  misc_feature 1..21: note = Description of Artificial Sequence: Synthetic oligonucleotide
  source 1..21: mol_type = other DNA
atgcctgatcagaaggcgagt

SEQ ID NO: 13594 - DNA, 21 bp, synthetic construct
  misc_feature 1..21: note = Description of Artificial Sequence: Synthetic oligonucleotide
  source 1..21: mol_type = other DNA
gatgggactttgtctagtaag

SEQ ID NO: 13595 - DNA, 21 bp, synthetic construct
  misc_feature 1..21: note = Description of Artificial Sequence: Synthetic oligonucleotide
  source 1..21: mol_type = other DNA
tctgattcgagtaagtcgcag

SEQ ID NO: 13596 - DNA, 21 bp, synthetic construct
  misc_feature 1..21: note = Description of Artificial Sequence: Synthetic oligonucleotide
  source 1..21: mol_type = other DNA
catcagaagtcgggtggtagt

SEQ ID NO: 13597 - DNA, 21 bp, synthetic construct
  misc_feature 1..21: note = Description of Artificial Sequence: Synthetic oligonucleotide
  source 1..21: mol_type = other DNA
gacgggtctccgaggtctgtg

SEQ ID NO: 13598 - DNA, 21 bp, synthetic construct
  misc_feature 1..21: note = Description of Artificial Sequence: Synthetic oligonucleotide
  source 1..21: mol_type = other DNA
tcgccggtgactcatggtaag

SEQ ID NO: 13599 - DNA, 21 bp, synthetic construct
  misc_feature 1..21: note = Description of Artificial Sequence: Synthetic oligonucleotide
  source 1..21: mol_type = other DNA
cagattgctgataagaatcat

SEQ ID NO: 13600 - DNA, 21 bp, synthetic construct
  misc_feature 1..21: note = Description of Artificial Sequence: Synthetic oligonucleotide
  source 1..21: mol_type = other DNA
actgcgggtaaggcgaatagt

SEQ ID NO: 13601 - DNA, 21 bp, synthetic construct
  misc_feature 1..21: note = Description of Artificial Sequence: Synthetic oligonucleotide
  source 1..21: mol_type = other DNA
aacctcagagacgcccccaaa

SEQ ID NO: 13602 - DNA, 21 bp, synthetic construct
  misc_feature 1..21: note = Description of Artificial Sequence: Synthetic oligonucleotide
  source 1..21: mol_type = other DNA
gctcatgagagtaaggcgtct

SEQ ID NO: 13603 - DNA, 21 bp, synthetic construct
  misc_feature 1..21: note = Description of Artificial Sequence: Synthetic oligonucleotide
  source 1..21: mol_type = other DNA
acgggtgggcatagtactaat

SEQ ID NO: 13604 - DNA, 21 bp, synthetic construct
  misc_feature 1..21: note = Description of Artificial Sequence: Synthetic oligonucleotide
  source 1..21: mol_type = other DNA
agcgtcggcaaagacagaaac

SEQ ID NO: 13605 - DNA, 21 bp, synthetic construct
  misc_feature 1..21: note = Description of Artificial Sequence: Synthetic oligonucleotide
  source 1..21: mol_type = other DNA
aacgccaacaaaagcctcacc

SEQ ID NO: 13606 - DNA, 21 bp, synthetic construct
  misc_feature 1..21: note = Description of Artificial Sequence: Synthetic oligonucleotide
  source 1..21: mol_type = other DNA
agtcagaatggggctcatcgt

SEQ ID NO: 13607 - DNA, 21 bp, synthetic construct
  misc_feature 1..21: note = Description of Artificial Sequence: Synthetic oligonucleotide
  source 1..21: mol_type = other DNA
cacagcggcaaaagcaccacc

SEQ ID NO: 13608 - DNA, 21 bp, synthetic construct
  misc_feature 1..21: note = Description of Artificial Sequence: Synthetic oligonucleotide
  source 1..21: mol_type = other DNA
aacctcagcaaaaccgaccaa

SEQ ID NO: 13609 - DNA, 21 bp, synthetic construct
  misc_feature 1..21: note = Description of Artificial Sequence: Synthetic oligonucleotide
  source 1..21: mol_type = other DNA
gacgtcagcgccagccccaaa

SEQ ID NO: 13610 - DNA, 21 bp, synthetic construct
  misc_feature 1..21: note = Description of Artificial Sequence: Synthetic oligonucleotide
  source 1..21: mol_type = other DNA
actagtctgaaggggactaat

SEQ ID NO: 13611 - DNA, 21 bp, synthetic construct
  misc_feature 1..21: note = Description of Artificial Sequence: Synthetic oligonucleotide
  source 1..21: mol_type = other DNA
caagccgacagcaaacccgtc

SEQ ID NO: 13612 - DNA, 21 bp, synthetic construct
  misc_feature 1..21: note = Description of Artificial Sequence: Synthetic oligonucleotide
  source 1..21: mol_type = other DNA
gccaaaagcaacaccaacagc

SEQ ID NO: 13613 - DNA, 21 bp, synthetic construct
  misc_feature 1..21: note = Description of Artificial Sequence: Synthetic oligonucleotide
  source 1..21: mol_type = other DNA
ggtgggtctaaggctaattcg

SEQ ID NO: 13614 - DNA, 21 bp, synthetic construct
  misc_feature 1..21: note = Description of Artificial Sequence: Synthetic oligonucleotide
  source 1..21: mol_type = other DNA
gggggtgcgaagggtcaggct

SEQ ID NO: 13615 - DNA, 21 bp, synthetic construct
  misc_feature 1..21: note = Description of Artificial Sequence: Synthetic oligonucleotide
  source 1..21: mol_type = other DNA
tctaatgagaagccgttggtg

SEQ ID NO: 13616 - DNA, 21 bp, synthetic construct
  misc_feature 1..21: note = Description of Artificial Sequence: Synthetic oligonucleotide
  source 1..21: mol_type = other DNA
cagaatcattctaagcaggat

SEQ ID NO: 13617 - DNA, 21 bp, synthetic construct
  misc_feature 1..21: note = Description of Artificial Sequence: Synthetic oligonucleotide
  source 1..21: mol_type = other DNA
agcggcggcagcggcatccac

SEQ ID NO: 13618 - DNA, 21 bp, synthetic construct
  misc_feature 1..21: note = Description of Artificial Sequence: Synthetic oligonucleotide
  source 1..21: mol_type = other DNA
gccggcaccaaacaacccaac

SEQ ID NO: 13619 - DNA, 21 bp, synthetic construct
  misc_feature 1..21: note = Description of Artificial Sequence: Synthetic oligonucleotide
  source 1..21: mol_type = other DNA
tctaatgcgactggtacgagt

SEQ ID NO: 13620 - DNA, 21 bp, synthetic construct
  misc_feature 1..21: note = Description of Artificial Sequence: Synthetic oligonucleotide
  source 1..21: mol_type = other DNA
acgagggatcagtctcatagt

SEQ ID NO: 13621 - DNA, 21 bp, synthetic construct
  misc_feature 1..21: note = Description of Artificial Sequence: Synthetic oligonucleotide
  source 1..21: mol_type = other DNA
agcaacagccccgccaacacc

SEQ ID NO: 13622 - DNA, 21 bp, synthetic construct
  misc_feature 1..21: note = Description of Artificial Sequence: Synthetic oligonucleotide
  source 1..21: mol_type = other DNA
aagaatgagactaagacgatt

SEQ ID NO: 13623 - DNA, 21 bp, synthetic construct
  misc_feature 1..21: note = Description of Artificial Sequence: Synthetic oligonucleotide
  source 1..21: mol_type = other DNA
gggcctacgtctaagcagagt

SEQ ID NO: 13624 - DNA, 21 bp, synthetic construct
  misc_feature 1..21: note = Description of Artificial Sequence: Synthetic oligonucleotide
  source 1..21: mol_type = other DNA
tcgacttcgacttcgtctagg

SEQ ID NO: 13625 - DNA, 21 bp, synthetic construct
  misc_feature 1..21: note = Description of Artificial Sequence: Synthetic oligonucleotide
  source 1..21: mol_type = other DNA
caggattctcctcagcctagg

SEQ ID NO: 13626 - DNA, 21 bp, synthetic construct
  misc_feature 1..21: note = Description of Artificial Sequence: Synthetic oligonucleotide
  source 1..21: mol_type = other DNA
ggcaacagcggcaaaatgttc

SEQ ID NO: 13627 - DNA, 21 bp, synthetic construct
  misc_feature 1..21: note = Description of Artificial Sequence: Synthetic oligonucleotide
  source 1..21: mol_type = other DNA
ggcatcagaagccccagcgaa

SEQ ID NO: 13628 - DNA, 21 bp, synthetic construct
  misc_feature 1..21: note = Description of Artificial Sequence: Synthetic oligonucleotide
  source 1..21: mol_type = other DNA
aacagcagcagcaaaagcagc

SEQ ID NO: 13629 - DNA, 21 bp, synthetic construct
  misc_feature 1..21: note = Description of Artificial Sequence: Synthetic oligonucleotide
  source 1..21: mol_type = other DNA
agccccagcggcaaaggcctc

SEQ ID NO: 13630 - DNA, 21 bp, synthetic construct
  misc_feature 1..21: note = Description of Artificial Sequence: Synthetic oligonucleotide
  source 1..21: mol_type = other DNA
agtacggataaggctcgtgtt

SEQ ID NO: 13631 - DNA, 21 bp, synthetic construct
  misc_feature 1..21: note = Description of Artificial Sequence: Synthetic oligonucleotide
  source 1..21: mol_type = other DNA
cgtagtgaggcgtctgtgaag

SEQ ID NO: 13632 - DNA, 21 bp, synthetic construct
  misc_feature 1..21: note = Description of Artificial Sequence: Synthetic oligonucleotide
  source 1..21: mol_type = other DNA
gacaacagcagcgtcaacaaa

SEQ ID NO: 13633 - DNA, 21 bp, synthetic construct
  misc_feature 1..21: note = Description of Artificial Sequence: Synthetic oligonucleotide
  source 1..21: mol_type = other DNA
agcagcaccgtcaaacccgtc

SEQ ID NO: 13634 - DNA, 21 bp, synthetic construct
  misc_feature 1..21: note = Description of Artificial Sequence: Synthetic oligonucleotide
  source 1..21: mol_type = other DNA
atgggcgtcaaacccgacctc

SEQ ID NO: 13635 - DNA, 21 bp, synthetic construct
  misc_feature 1..21: note = Description of Artificial Sequence: Synthetic oligonucleotide
  source 1..21: mol_type = other DNA
accaaccaaaaaaccgccgcc

SEQ ID NO: 13636 - DNA, 21 bp, synthetic construct
  misc_feature 1..21: note = Description of Artificial Sequence: Synthetic oligonucleotide
  source 1..21: mol_type = other DNA
ggcaccggcaacaaacacgcc

SEQ ID NO: 13637 - DNA, 21 bp, synthetic construct
  misc_feature 1..21: note = Description of Artificial Sequence: Synthetic oligonucleotide
  source 1..21: mol_type = other DNA
ggtctgaataatagttcgggt

SEQ ID NO: 13638 - DNA, 21 bp, synthetic construct
  misc_feature 1..21: note = Description of Artificial Sequence: Synthetic oligonucleotide
  source 1..21: mol_type = other DNA
gggcgggaggcgccgacgcgg

SEQ ID NO: 13639 - DNA, 21 bp, synthetic construct
  misc_feature 1..21: note = Description of Artificial Sequence: Synthetic oligonucleotide
  source 1..21: mol_type = other DNA
agcaccctcaaacccatccaa

SEQ ID NO: 13640 - DNA, 21 bp, synthetic construct
  misc_feature 1..21: note = Description of Artificial Sequence: Synthetic oligonucleotide
  source 1..21: mol_type = other DNA
agttctgctcaggctgtgagt

SEQ ID NO: 13641 - DNA, 21 bp, synthetic construct
  misc_feature 1..21: note = Description of Artificial Sequence: Synthetic oligonucleotide
  source 1..21: mol_type = other DNA
gacggcctcaaaggccaaagc

SEQ ID NO: 13642 - DNA, 21 bp, synthetic construct
  misc_feature 1..21: note = Description of Artificial Sequence: Synthetic oligonucleotide
  source 1..21: mol_type = other DNA
gtggctgggacttcgcagtct

SEQ ID NO: 13643 - DNA, 21 bp, synthetic construct
  misc_feature 1..21: note = Description of Artificial Sequence: Synthetic oligonucleotide
  source 1..21: mol_type = other DNA
catgcgactcaggcgagtact

SEQ ID NO: 13644 - DNA, 21 bp, synthetic construct
  misc_feature 1..21: note = Description of Artificial Sequence: Synthetic oligonucleotide
  source 1..21: mol_type = other DNA
acccaaggcagcagaaacagc

SEQ ID NO: 13645 - DNA, 21 bp, synthetic construct
  misc_feature 1..21: note = Description of Artificial Sequence: Synthetic oligonucleotide
  source 1..21: mol_type = other DNA
actactagtggtcagagtaag

SEQ ID NO: 13646 - DNA, 21 bp, synthetic construct
  misc_feature 1..21: note = Description of Artificial Sequence: Synthetic oligonucleotide
  source 1..21: mol_type = other DNA
gccgccgccggcagcaccaaa

SEQ ID NO: 13647 - DNA, 21 bp, synthetic construct
  misc_feature 1..21: note = Description of Artificial Sequence: Synthetic oligonucleotide
  source 1..21: mol_type = other DNA
ttgagtactcagacttcttcg

SEQ ID NO: 13648 - DNA, 21 bp, synthetic construct
  misc_feature 1..21: note = Description of Artificial Sequence: Synthetic oligonucleotide
  source 1..21: mol_type = other DNA
aacgcccaaggcacccccgtc

SEQ ID NO: 13649 - DNA, 21 bp, synthetic construct
  misc_feature 1..21: note = Description of Artificial Sequence: Synthetic oligonucleotide
  source 1..21: mol_type = other DNA
tcgtcggggagtaagcagtct

SEQ ID NO: 13650 - DNA, 21 bp, synthetic construct
  misc_feature 1..21: note = Description of Artificial Sequence: Synthetic oligonucleotide
  source 1..21: mol_type = other DNA
actgggggtgcgccgactact

SEQ ID NO: 13651 - DNA, 21 bp, synthetic construct
  misc_feature 1..21: note = Description of Artificial Sequence: Synthetic oligonucleotide
  source 1..21: mol_type = other DNA
agaggcaccagccaacaagcc

SEQ ID NO: 13652 - DNA, 21 bp, synthetic construct
  misc_feature 1..21: note = Description of Artificial Sequence: Synthetic oligonucleotide
  source 1..21: mol_type = other DNA
atcggcaccggcaaagcccaa

SEQ ID NO: 13653 - DNA, 21 bp, synthetic construct
  misc_feature 1..21: note = Description of Artificial Sequence: Synthetic oligonucleotide
  source 1..21: mol_type = other DNA
gcggggtctaaggagacgcgg

SEQ ID NO: 13654 - DNA, 21 bp, synthetic construct
  misc_feature 1..21: note = Description of Artificial Sequence: Synthetic oligonucleotide
  source 1..21: mol_type = other DNA
gggcaggcgagtcctcagaag

SEQ ID NO: 13655 - DNA, 21 bp, synthetic construct
  misc_feature 1..21: note = Description of Artificial Sequence: Synthetic oligonucleotide
  source 1..21: mol_type = other DNA
agcagcgacagccaccccacc

SEQ ID NO: 13656 - DNA, 21 bp, synthetic construct
  misc_feature 1..21: note = Description of Artificial Sequence: Synthetic oligonucleotide
  source 1..21: mol_type = other DNA
acgaatacggggaagccgctg

SEQ ID NO: 13657 - DNA, 21 bp, synthetic construct
  misc_feature 1..21: note = Description of Artificial Sequence: Synthetic oligonucleotide
  source 1..21: mol_type = other DNA
gtcgtccaaaaacccgccgaa

SEQ ID NO: 13658 - DNA, 21 bp, synthetic construct
  misc_feature 1..21: note = Description of Artificial Sequence: Synthetic oligonucleotide
  source 1..21: mol_type = other DNA
agtccggggtcgggtagtcag

SEQ ID NO: 13659 - DNA, 21 bp, synthetic construct
  misc_feature 1..21: note = Description of Artificial Sequence: Synthetic oligonucleotide
  source 1..21: mol_type = other DNA
ctcggcacccaaaaaaccgtc

SEQ ID NO: 13660 - DNA, 21 bp, synthetic construct
  misc_feature 1..21: note = Description of Artificial Sequence: Synthetic oligonucleotide
  source 1..21: mol_type = other DNA
agcggccaaagcggcgtcaaa

SEQ ID NO: 13661 - DNA, 21 bp, synthetic construct
  misc_feature 1..21: note = Description of Artificial Sequence: Synthetic oligonucleotide
  source 1..21: mol_type = other DNA
gcttctacttctactcaggcg

SEQ ID NO: 13662 - DNA, 21 bp, synthetic construct
  misc_feature 1..21: note = Description of Artificial Sequence: Synthetic oligonucleotide
  source 1..21: mol_type = other DNA
ggtatggcgggttcttcgcag

SEQ ID NO: 13663 - DNA, 21 bp, synthetic construct
  misc_feature 1..21: note = Description of Artificial Sequence: Synthetic oligonucleotide
  source 1..21: mol_type = other DNA
accaaaagcaccacccccatc

SEQ ID NO: 13664 - DNA, 21 bp, synthetic construct
  misc_feature 1..21: note = Description of Artificial Sequence: Synthetic oligonucleotide
  source 1..21: mol_type = other DNA
accagcggcaacaaccccatg

SEQ ID NO: 13665 - DNA, 21 bp, synthetic construct
  misc_feature 1..21: note = Description of Artificial Sequence: Synthetic oligonucleotide
  source 1..21: mol_type = other DNA
gacaacatccaaaaagccaac

SEQ ID NO: 13666 - DNA, 21 bp, synthetic construct
  misc_feature 1..21: note = Description of Artificial Sequence: Synthetic oligonucleotide
  source 1..21: mol_type = other DNA
accagcgacagagtccaaggc

SEQ ID NO: 13667 - DNA, 21 bp, synthetic construct
  misc_feature 1..21: note = Description of Artificial Sequence: Synthetic oligonucleotide
  source 1..21: mol_type = other DNA
gatgggctgtctaagccgact

SEQ ID NO: 13668 - DNA, 21 bp, synthetic construct
  misc_feature 1..21: note = Description of Artificial Sequence: Synthetic oligonucleotide
  source 1..21: mol_type = other DNA
ggccacaacagccccaccctc

SEQ ID NO: 13669 - DNA, 21 bp, synthetic construct
  misc_feature 1..21: note = Description of Artificial Sequence: Synthetic oligonucleotide
  source 1..21: mol_type = other DNA
acttctagtcagcggtcttcg

SEQ ID NO: 13670 - DNA, 21 bp, synthetic construct
  misc_feature 1..21: note = Description of Artificial Sequence: Synthetic oligonucleotide
  source 1..21: mol_type = other DNA
gctcaggcgactccgcatgtt

SEQ ID NO: 13671 - DNA, 21 bp, synthetic construct
  misc_feature 1..21: note = Description of Artificial Sequence: Synthetic oligonucleotide
  source 1..21: mol_type = other DNA
gctaagagtacggtgaatact

SEQ ID NO: 13672 - DNA, 21 bp, synthetic construct
  misc_feature 1..21: note = Description of Artificial Sequence: Synthetic oligonucleotide
  source 1..21: mol_type = other DNA
atgaacggcagcggcgcccac

SEQ ID NO: 13673 - DNA, 21 bp, synthetic construct
  misc_feature 1..21: note = Description of Artificial Sequence: Synthetic oligonucleotide
  source 1..21: mol_type = other DNA
cagaatgctgcgaagaatcct

SEQ ID NO: 13674 - DNA, 21 bp, synthetic construct
  misc_feature 1..21: note = Description of Artificial Sequence: Synthetic oligonucleotide
  source 1..21: mol_type = other DNA
atggccagcaaccccagagaa

SEQ ID NO: 13675 - DNA, 21 bp, synthetic construct
  misc_feature 1..21: note = Description of Artificial Sequence: Synthetic oligonucleotide
  source 1..21: mol_type = other DNA
cagtctaatactgtttcgtcg

SEQ ID NO: 13676 - DNA, 21 bp, synthetic construct
  misc_feature 1..21: note = Description of Artificial Sequence: Synthetic oligonucleotide
  source 1..21: mol_type = other DNA
gattcttcgcctactcatcgg

SEQ ID NO: 13677 - DNA, 21 bp, synthetic construct
  misc_feature 1..21: note = Description of Artificial Sequence: Synthetic oligonucleotide
  source 1..21: mol_type = other DNA
aatgggacttcggagaggcgt

SEQ ID NO: 13678 - DNA, 21 bp, synthetic construct
  misc_feature 1..21: note = Description of Artificial Sequence: Synthetic oligonucleotide
  source 1..21: mol_type = other DNA
gccgccagcgacggcagaaac

SEQ ID NO: 13679 - DNA, 21 bp, synthetic construct
  misc_feature 1..21: note = Description of Artificial Sequence: Synthetic oligonucleotide
  source 1..21: mol_type = other DNA
gagatttcgtcgcctgggcgt

SEQ ID NO: 13680 - DNA, 21 bp, synthetic construct
  misc_feature 1..21: note = Description of Artificial Sequence: Synthetic oligonucleotide
  source 1..21: mol_type = other DNA
tctgggcaggagcgtgctacg

SEQ ID NO: 13681 - DNA, 21 bp, synthetic construct
  misc_feature 1..21: note = Description of Artificial Sequence: Synthetic oligonucleotide
  source 1..21: mol_type = other DNA
actcagaatggtgggggtaat

SEQ ID NO: 13682 - DNA, 21 bp, synthetic construct
  misc_feature 1..21: note = Description of Artificial Sequence: Synthetic oligonucleotide
  source 1..21: mol_type = other DNA
agcagaagcggcagcagcagc

SEQ ID NO: 13683 - DNA, 21 bp, synthetic construct
  misc_feature 1..21: note = Description of Artificial Sequence: Synthetic oligonucleotide
  source 1..21: mol_type = other DNA
cagactaagcctacgacgact

SEQ ID NO: 13684 - DNA, 21 bp, synthetic construct
  misc_feature 1..21: note = Description of Artificial Sequence: Synthetic oligonucleotide
  source 1..21: mol_type = other DNA
gacaccgtcccccccagcaaa

SEQ ID NO: 13685 - DNA, 21 bp, synthetic construct
  misc_feature 1..21: note = Description of Artificial Sequence: Synthetic oligonucleotide
  source 1..21: mol_type = other DNA
gatgggcggcaggctggggtt

SEQ ID NO: 13686 - DNA, 21 bp, synthetic construct
  misc_feature 1..21: note = Description of Artificial Sequence: Synthetic oligonucleotide
  source 1..21: mol_type = other DNA
gtcggccccaacaaccaaagc

SEQ ID NO: 13687 - DNA, 21 bp, synthetic construct
  misc_feature 1..21: note = Description of Artificial Sequence: Synthetic oligonucleotide
  source 1..21: mol_type = other DNA
cgtaattcgggtaatcagggg

SEQ ID NO: 13688 - DNA, 21 bp, synthetic construct
  misc_feature 1..21: note = Description of Artificial Sequence: Synthetic oligonucleotide
  source 1..21: mol_type = other DNA
ggtgtgaataataaggcgggt

SEQ ID NO: 13689 - DNA, 21 bp, synthetic construct
  misc_feature 1..21: note = Description of Artificial Sequence: Synthetic oligonucleotide
  source 1..21: mol_type = other DNA
caacccaacggccaaatcaaa

SEQ ID NO: 13690 - DNA, 21 bp, synthetic construct
  misc_feature 1..21: note = Description of Artificial Sequence: Synthetic oligonucleotide
  source 1..21: mol_type = other DNA
aacctcagcaccagcggcggc

SEQ ID NO: 13691 - DNA, 21 bp, synthetic construct
  misc_feature 1..21: note = Description of Artificial Sequence: Synthetic oligonucleotide
  source 1..21: mol_type = other DNA
caacacaccaaaacccccagc

SEQ ID NO: 13692 - DNA, 21 bp, synthetic construct
  misc_feature 1..21: note = Description of Artificial Sequence: Synthetic oligonucleotide
  source 1..21: mol_type = other DNA
gatgcgggtaataaggctcgt

SEQ ID NO: 13693 - DNA, 21 bp, synthetic construct
  misc_feature 1..21: note = Description of Artificial Sequence: Synthetic oligonucleotide
  source 1..21: mol_type = other DNA
actacttcggctaaggttcag

SEQ ID NO: 13694 - DNA, 21 bp, synthetic construct
  misc_feature 1..21: note = Description of Artificial Sequence: Synthetic oligonucleotide
  source 1..21: mol_type = other DNA
agccacagcaccaaaagcacc

SEQ ID NO: 13695 - DNA, 21 bp, synthetic construct
  misc_feature 1..21: note = Description of Artificial Sequence: Synthetic oligonucleotide
  source 1..21: mol_type = other DNA
gccaacgccggcaaactcagc

SEQ ID NO: 13696 - DNA, 21 bp, synthetic construct
  misc_feature 1..21: note = Description of Artificial Sequence: Synthetic oligonucleotide
  source 1..21: mol_type = other DNA
tacggcagcaaagacctcagc

SEQ ID NO: 13697 - DNA, 21 bp, synthetic construct
  misc_feature 1..21: note = Description of Artificial Sequence: Synthetic oligonucleotide
  source 1..21: mol_type = other DNA
agcaacaaaagcagcggcggc

SEQ ID NO: 13698 - DNA, 21 bp, synthetic construct
  misc_feature 1..21: note = Description of Artificial Sequence: Synthetic oligonucleotide
  source 1..21: mol_type = other DNA
aataatgcgaataagtctgtt

SEQ ID NO: 13699 - DNA, 21 bp, synthetic construct
  misc_feature 1..21: note = Description of Artificial Sequence: Synthetic oligonucleotide
  source 1..21: mol_type = other DNA
accagcagcaaaagcgccgtc

SEQ ID NO: 13700 - DNA, 21 bp, synthetic construct
  misc_feature 1..21: note = Description of Artificial Sequence: Synthetic oligonucleotide
  source 1..21: mol_type = other DNA
agtaatgcgggttctatgcag

SEQ ID NO: 13701 - DNA, 21 bp, synthetic construct
  misc_feature 1..21: note = Description of Artificial Sequence: Synthetic oligonucleotide
  source 1..21: mol_type = other DNA
ggcgtcgccaaaagcagcagc

SEQ ID NO: 13702 - DNA, 21 bp, synthetic construct
  misc_feature 1..21: note = Description of Artificial Sequence: Synthetic oligonucleotide
  source 1..21: mol_type = other DNA
accaaagtcggcacccccgtc

SEQ ID NO: 13703 - DNA, 21 bp, synthetic construct
  misc_feature 1..21: note = Description of Artificial Sequence: Synthetic oligonucleotide
  source 1..21: mol_type = other DNA
ggtacgagttctaagccgttg

SEQ ID NO: 13704 - DNA, 21 bp, synthetic construct
  misc_feature 1..21: note = Description of Artificial Sequence: Synthetic oligonucleotide
  source 1..21: mol_type = other DNA
agcaccagcagcagcaacctc

SEQ ID NO: 13705 - DNA, 21 bp, synthetic construct
  misc_feature 1..21: note = Description of Artificial Sequence: Synthetic oligonucleotide
  source 1..21: mol_type = other DNA
agccccagcaaaagcggcacc

SEQ ID NO: 13706 - DNA, 21 bp, synthetic construct
  misc_feature 1..21: note = Description of Artificial Sequence: Synthetic oligonucleotide
  source 1..21: mol_type = other DNA
aacaacaacaccagcaacgtc

SEQ ID NO: 13707 - DNA, 21 bp, synthetic construct
  misc_feature 1..21: note = Description of Artificial Sequence: Synthetic oligonucleotide
  source 1..21: mol_type = other DNA
gataatggttcttcgcgtcag

SEQ ID NO: 13708 - DNA, 21 bp, synthetic construct
  misc_feature 1..21: note = Description of Artificial Sequence: Synthetic oligonucleotide
  source 1..21: mol_type = other DNA
agcaacgacccccccagcaaa

SEQ ID NO: 13709 - DNA, 21 bp, synthetic construct
  misc_feature 1..21: note = Description of Artificial Sequence: Synthetic oligonucleotide
  source 1..21: mol_type = other DNA
caaggcagccaaagcgccatg

SEQ ID NO: 13710 - DNA, 21 bp, synthetic construct
  misc_feature 1..21: note = Description of Artificial Sequence: Synthetic oligonucleotide
  source 1..21: mol_type = other DNA
aacaccgacaaacccgccgtc

SEQ ID NO: 13711 - DNA, 21 bp, synthetic construct
  misc_feature 1..21: note = Description of Artificial Sequence: Synthetic oligonucleotide
  source 1..21: mol_type = other DNA
aggagtgatggttctccgagg

SEQ ID NO: 13712 - DNA, 21 bp, synthetic construct
  misc_feature 1..21: note = Description of Artificial Sequence: Synthetic oligonucleotide
  source 1..21: mol_type = other DNA
atgggtaattcgagttctgtt

SEQ ID NO: 13713 - DNA, 21 bp, synthetic construct
  misc_feature 1..21: note = Description of Artificial Sequence: Synthetic oligonucleotide
  source 1..21: mol_type = other DNA
aagattggggcttcgagtgct

SEQ ID NO: 13714 - DNA, 21 bp, synthetic construct
  misc_feature 1..21: note = Description of Artificial Sequence: Synthetic oligonucleotide
  source 1..21: mol_type = other DNA
accaccagcaacagcaccaaa

SEQ ID NO: 13715 - DNA, 21 bp, synthetic construct
  misc_feature 1..21: note = Description of Artificial Sequence: Synthetic oligonucleotide
  source 1..21: mol_type = other DNA
agcagaaacaccagcaacacc

SEQ ID NO: 13716 - DNA, 21 bp, synthetic construct
  misc_feature 1..21: note = Description of Artificial Sequence: Synthetic oligonucleotide
  source 1..21: mol_type = other DNA
cacagcaccgaaaaacaaaga

SEQ ID NO: 13717 - DNA, 21 bp, synthetic construct
  misc_feature 1..21: note = Description of Artificial Sequence: Synthetic oligonucleotide
  source 1..21: mol_type = other DNA
gacagacccggcaacggcggc

SEQ ID NO: 13718 - DNA, 21 bp, synthetic construct
  misc_feature 1..21: note = Description of Artificial Sequence: Synthetic oligonucleotide
  source 1..21: mol_type = other DNA
agcggcctcaaacccaccgtc

SEQ ID NO: 13719 - DNA, 21 bp, synthetic construct
  misc_feature 1..21: note = Description of Artificial Sequence: Synthetic oligonucleotide
  source 1..21: mol_type = other DNA
aaaggccaaggcagcaccgtc

SEQ ID NO: 13720 - DNA, 21 bp, synthetic construct
  misc_feature 1..21: note = Description of Artificial Sequence: Synthetic oligonucleotide
  source 1..21: mol_type = other DNA
caaaccacccccagcagccaa

SEQ ID NO: 13721 - DNA, 21 bp, synthetic construct
  misc_feature 1..21: note = Description of Artificial Sequence: Synthetic oligonucleotide
  source 1..21: mol_type = other DNA
gcccacggccaagtcccccaa

SEQ ID NO: 13722 - DNA, 21 bp, synthetic construct
  misc_feature 1..21: note = Description of Artificial Sequence: Synthetic oligonucleotide
  source 1..21: mol_type = other DNA
gagactgggcataaggctgct

SEQ ID NO: 13723 - DNA, 21 bp, synthetic construct
  misc_feature 1..21: note = Description of Artificial Sequence: Synthetic oligonucleotide
  source 1..21: mol_type = other DNA
accaaagcccaaagccccctc

SEQ ID NO: 13724 - DNA, 21 bp, synthetic construct
  misc_feature 1..21: note = Description of Artificial Sequence: Synthetic oligonucleotide
  source 1..21: mol_type = other DNA
aatagttcgacgaagactccg

SEQ ID NO: 13725 - DNA, 21 bp, synthetic construct
  misc_feature 1..21: note = Description of Artificial Sequence: Synthetic oligonucleotide
  source 1..21: mol_type = other DNA
gccaccaccggcgacagcaaa

SEQ ID NO: 13726 - DNA, 21 bp, synthetic construct
  misc_feature 1..21: note = Description of Artificial Sequence: Synthetic oligonucleotide
  source 1..21: mol_type = other DNA
gcgggtacgactaatgcgcat

SEQ ID NO: 13727 - DNA, 21 bp, synthetic construct
  misc_feature 1..21: note = Description of Artificial Sequence: Synthetic oligonucleotide
  source 1..21: mol_type = other DNA
gtcaacggcaaacccaacgcc

SEQ ID NO: 13728 - DNA, 21 bp, synthetic construct
  misc_feature 1..21: note = Description of Artificial Sequence: Synthetic oligonucleotide
  source 1..21: mol_type = other DNA
cacagcgccacccccaacaaa

SEQ ID NO: 13729 - DNA, 21 bp, synthetic construct
  misc_feature 1..21: note = Description of Artificial Sequence: Synthetic oligonucleotide
  source 1..21: mol_type = other DNA
agtaatgggcagaagcctccg

SEQ ID NO: 13730 - DNA, 21 bp, synthetic construct
  misc_feature 1..21: note = Description of Artificial Sequence: Synthetic oligonucleotide
  source 1..21: mol_type = other DNA
ctcggcaacaaagaccaagcc

SEQ ID NO: 13731 - DNA, 21 bp, synthetic construct
  misc_feature 1..21: note = Description of Artificial Sequence: Synthetic oligonucleotide
  source 1..21: mol_type = other DNA
gtccaaggcacccacacccaa

SEQ ID NO: 13732 - DNA, 21 bp, synthetic construct
  misc_feature 1..21: note = Description of Artificial Sequence: Synthetic oligonucleotide
  source 1..21: mol_type = other DNA
gacgtccacgtcaaaaaccaa

SEQ ID NO: 13733 - DNA, 21 bp, synthetic construct
  misc_feature 1..21: note = Description of Artificial Sequence: Synthetic oligonucleotide
  source 1..21: mol_type = other DNA
gccaccaccaaaagcagcacc

SEQ ID NO: 13734 - DNA, 21 bp, synthetic construct
  misc_feature 1..21: note = Description of Artificial Sequence: Synthetic oligonucleotide
  source 1..21: mol_type = other DNA
agtacggctacgagttctcat

SEQ ID NO: 13735 - DNA, 21 bp, synthetic construct
  misc_feature 1..21: note = Description of Artificial Sequence: Synthetic oligonucleotide
  source 1..21: mol_type = other DNA
gttagtcagccgtctgttgct

SEQ ID NO: 13736 - DNA, 21 bp, synthetic construct
  misc_feature 1..21: note = Description of Artificial Sequence: Synthetic oligonucleotide
  source 1..21: mol_type = other DNA
agcagcaacggccacggcagc

SEQ ID NO: 13737 - DNA, 21 bp, synthetic construct
  misc_feature 1..21: note = Description of Artificial Sequence: Synthetic oligonucleotide
  source 1..21: mol_type = other DNA
gccagcaacaccggcagcacc

SEQ ID NO: 13738 - DNA, 21 bp, synthetic construct
  misc_feature 1..21: note = Description of Artificial Sequence: Synthetic oligonucleotide
  source 1..21: mol_type = other DNA
accggcgccagcaaccaaaaa

SEQ ID NO: 13739 - DNA, 21 bp, synthetic construct
  misc_feature 1..21: note = Description of Artificial Sequence: Synthetic oligonucleotide
  source 1..21: mol_type = other DNA
agcagcgacaccaaccacgcc

SEQ ID NO: 13740 - DNA, 21 bp, synthetic construct
  misc_feature 1..21: note = Description of Artificial Sequence: Synthetic oligonucleotide
  source 1..21: mol_type = other DNA
agtatgggtaagtcttcggtg

SEQ ID NO: 13741 - DNA, 21 bp, synthetic construct
  misc_feature 1..21: note = Description of Artificial Sequence: Synthetic oligonucleotide
  source 1..21: mol_type = other DNA
ctcaacaacggcaaagccacc

SEQ ID NO: 13742 - DNA, 21 bp, synthetic construct
  misc_feature 1..21: note = Description of Artificial Sequence: Synthetic oligonucleotide
  source 1..21: mol_type = other DNA
caggctgggcgtgattcgcag

SEQ ID NO: 13743 - DNA, 21 bp, synthetic construct
  misc_feature 1..21: note = Description of Artificial Sequence: Synthetic oligonucleotide
  source 1..21: mol_type = other DNA
actccggcgcagaagagtcag

SEQ ID NO: 13744 - DNA, 21 bp, synthetic construct
  misc_feature 1..21: note = Description of Artificial Sequence: Synthetic oligonucleotide
  source 1..21: mol_type = other DNA
cagaatgtgaagccttcggtg

SEQ ID NO: 13745 - DNA, 21 bp, synthetic construct
  misc_feature 1..21: note = Description of Artificial Sequence: Synthetic oligonucleotide
  source 1..21: mol_type = other DNA
ctcggcaacagcggcaccaac

SEQ ID NO: 13746 - DNA, 21 bp, synthetic construct
  misc_feature 1..21: note = Description of Artificial Sequence: Synthetic oligonucleotide
  source 1..21: mol_type = other DNA
gaaggcatgaaacccagcctc

SEQ ID NO: 13747 - DNA, 21 bp, synthetic construct
  misc_feature 1..21: note = Description of Artificial Sequence: Synthetic oligonucleotide
  source 1..21: mol_type = other DNA
ggcggcggccacagccccaaa

SEQ ID NO: 13748 - DNA, 21 bp, synthetic construct
  misc_feature 1..21: note = Description of Artificial Sequence: Synthetic oligonucleotide
  source 1..21: mol_type = other DNA
actcatcagactactagtgct

SEQ ID NO: 13749 - DNA, 21 bp, synthetic construct
  misc_feature 1..21: note = Description of Artificial Sequence: Synthetic oligonucleotide
  source 1..21: mol_type = other DNA
gtcaccaccagcagccccaaa

SEQ ID NO: 13750 - DNA, 21 bp, synthetic construct
  misc_feature 1..21: note = Description of Artificial Sequence: Synthetic oligonucleotide
  source 1..21: mol_type = other DNA
ggcgccgacagccccggcaga

SEQ ID NO: 13751 - DNA, 21 bp, synthetic construct
  misc_feature 1..21: note = Description of Artificial Sequence: Synthetic oligonucleotide
  source 1..21: mol_type = other DNA
caacacgacgccaaaatggcc

SEQ ID NO: 13752 - DNA, 21 bp, synthetic construct
  misc_feature 1..21: note = Description of Artificial Sequence: Synthetic oligonucleotide
  source 1..21: mol_type = other DNA
aggactggggcggagagtcgt

SEQ ID NO: 13753 - DNA, 21 bp, synthetic construct
  misc_feature 1..21: note = Description of Artificial Sequence: Synthetic oligonucleotide
  source 1..21: mol_type = other DNA
agaaacggcgccagcagcggc

SEQ ID NO: 13754 - DNA, 21 bp, synthetic construct
  misc_feature 1..21: note = Description of Artificial Sequence: Synthetic oligonucleotide
  source 1..21: mol_type = other DNA
ggtgcggagactaagccttcg

SEQ ID NO: 13755 - DNA, 21 bp, synthetic construct
  misc_feature 1..21: note = Description of Artificial Sequence: Synthetic oligonucleotide
  source 1..21: mol_type = other DNA
tctcaggggaataagacgctg

SEQ ID NO: 13756 - DNA, 21 bp, synthetic construct
  misc_feature 1..21: note = Description of Artificial Sequence: Synthetic oligonucleotide
  source 1..21: mol_type = other DNA
cattcggctacgaagtcttcg

SEQ ID NO: 13757 - DNA, 21 bp, synthetic construct
  misc_feature 1..21: note = Description of Artificial Sequence: Synthetic oligonucleotide
  source 1..21: mol_type = other DNA
agcagcgccagcgtcgccaaa

SEQ ID NO: 13758 - DNA, 21 bp, synthetic construct
  misc_feature 1..21: note = Description of Artificial Sequence: Synthetic oligonucleotide
  source 1..21: mol_type = other DNA
acttctcagagtggtcatcat

SEQ ID NO: 13759 - DNA, 21 bp, synthetic construct
  misc_feature 1..21: note = Description of Artificial Sequence: Synthetic oligonucleotide
  source 1..21: mol_type = other DNA
ggcaccaccagccacgccagc

SEQ ID NO: 13760 - DNA, 21 bp, synthetic construct
  misc_feature 1..21: note = Description of Artificial Sequence: Synthetic oligonucleotide
  source 1..21: mol_type = other DNA
cagacgacttctccttcgaag

SEQ ID NO: 13761 - DNA, 21 bp, synthetic construct
  misc_feature 1..21: note = Description of Artificial Sequence: Synthetic oligonucleotide
  source 1..21: mol_type = other DNA
agcgccaacagacccggcgtc

SEQ ID NO: 13762 - DNA, 21 bp, synthetic construct
  misc_feature 1..21: note = Description of Artificial Sequence: Synthetic oligonucleotide
  source 1..21: mol_type = other DNA
agcgccagcaccaaaagcctc

SEQ ID NO: 13763 - DNA, 21 bp, synthetic construct
  misc_feature 1..21: note = Description of Artificial Sequence: Synthetic oligonucleotide
  source 1..21: mol_type = other DNA
gccaacggcgtcaaactccaa

SEQ ID NO: 13764 - DNA, 21 bp, synthetic construct
  misc_feature 1..21: note = Description of Artificial Sequence: Synthetic oligonucleotide
  source 1..21: mol_type = other DNA
ttgcagagttctaagccgact

SEQ ID NO: 13765 - DNA, 21 bp, synthetic construct
  misc_feature 1..21: note = Description of Artificial Sequence: Synthetic oligonucleotide
  source 1..21: mol_type = other DNA
ggcaccgccacccccgtcaaa

SEQ ID NO: 13766 - DNA, 21 bp, synthetic construct
  misc_feature 1..21: note = Description of Artificial Sequence: Synthetic oligonucleotide
  source 1..21: mol_type = other DNA
gggaattctgggcagtcgagg

SEQ ID NO: 13767 - DNA, 21 bp, synthetic construct
  misc_feature 1..21: note = Description of Artificial Sequence: Synthetic oligonucleotide
  source 1..21: mol_type = other DNA
ctcaacggcgaaaaaatcagc

SEQ ID NO: 13768 - DNA, 21 bp, synthetic construct
  misc_feature 1..21: note = Description of Artificial Sequence: Synthetic oligonucleotide
  source 1..21: mol_type = other DNA
aatagggatggtagtactact

SEQ ID NO: 13769 - DNA, 21 bp, synthetic construct
  misc_feature 1..21: note = Description of Artificial Sequence: Synthetic oligonucleotide
  source 1..21: mol_type = other DNA
atgggtaagtctagtgcgcag

SEQ ID NO: 13770 - DNA, 21 bp, synthetic construct
  misc_feature 1..21: note = Description of Artificial Sequence: Synthetic oligonucleotide
  source 1..21: mol_type = other DNA
gtcagccaaagccccgtcaaa

SEQ ID NO: 13771 - DNA, 21 bp, synthetic construct
  misc_feature 1..21: note = Description of Artificial Sequence: Synthetic oligonucleotide
  source 1..21: mol_type = other DNA
agtgttggggaggctcagaag

SEQ ID NO: 13772 - DNA, 21 bp, synthetic construct
  misc_feature 1..21: note = Description of Artificial Sequence: Synthetic oligonucleotide
  source 1..21: mol_type = other DNA
gataagactcagccgcataag

SEQ ID NO: 13773 - DNA, 21 bp, synthetic construct
  misc_feature 1..21: note = Description of Artificial Sequence: Synthetic oligonucleotide
  source 1..21: mol_type = other DNA
ggcgccggcagcaaacccatc

SEQ ID NO: 13774 - DNA, 21 bp, synthetic construct
  misc_feature 1..21: note = Description of Artificial Sequence: Synthetic oligonucleotide
  source 1..21: mol_type = other DNA
aaccaacaaggcaacggcggc

SEQ ID NO: 13775 - DNA, 21 bp, synthetic construct
  misc_feature 1..21: note = Description of Artificial Sequence: Synthetic oligonucleotide
  source 1..21: mol_type = other DNA
accatcaacaacaaacacagc

SEQ ID NO: 13776 - DNA, 21 bp, synthetic construct
  misc_feature 1..21: note = Description of Artificial Sequence: Synthetic oligonucleotide
  source 1..21: mol_type = other DNA
tctggtggtagtccgtcggtg

SEQ ID NO: 13777 - DNA, 21 bp, synthetic construct
  misc_feature 1..21: note = Description of Artificial Sequence: Synthetic oligonucleotide
  source 1..21: mol_type = other DNA
ggcaccagcgcccccgccaga

SEQ ID NO: 13778 - DNA, 21 bp, synthetic construct
  misc_feature 1..21: note = Description of Artificial Sequence: Synthetic oligonucleotide
  source 1..21: mol_type = other DNA
tcggcgtctcattcgccggtg

SEQ ID NO: 13779 - DNA, 21 bp, synthetic construct
  misc_feature 1..21: note = Description of Artificial Sequence: Synthetic oligonucleotide
  source 1..21: mol_type = other DNA
caaaacagccccagcatgagc

SEQ ID NO: 13780 - DNA, 21 bp, synthetic construct
  misc_feature 1..21: note = Description of Artificial Sequence: Synthetic oligonucleotide
  source 1..21: mol_type = other DNA
ctgccgcagaatcctacttcg

SEQ ID NO: 13781 - DNA, 21 bp, synthetic construct
  misc_feature 1..21: note = Description of Artificial Sequence: Synthetic oligonucleotide
  source 1..21: mol_type = other DNA
caaagaaccgaaaccaacgtc

SEQ ID NO: 13782 - DNA, 21 bp, synthetic construct
  misc_feature 1..21: note = Description of Artificial Sequence: Synthetic oligonucleotide
  source 1..21: mol_type = other DNA
ggcctcggcaaagccgccgcc

SEQ ID NO: 13783 - DNA, 21 bp, synthetic construct
  misc_feature 1..21: note = Description of Artificial Sequence: Synthetic oligonucleotide
  source 1..21: mol_type = other DNA
agcagcgccagcaaacccctc

SEQ ID NO: 13784 - DNA, 21 bp, synthetic construct
  misc_feature 1..21: note = Description of Artificial Sequence: Synthetic oligonucleotide
  source 1..21: mol_type = other DNA
caaagcagcggcaaagccagc

SEQ ID NO: 13785 - DNA, 21 bp, synthetic construct
  misc_feature 1..21: note = Description of Artificial Sequence: Synthetic oligonucleotide
  source 1..21: mol_type = other DNA
tgggggtcgaagaatgataat

SEQ ID NO: 13786 - DNA, 21 bp, synthetic construct
  misc_feature 1..21: note = Description of Artificial Sequence: Synthetic oligonucleotide
  source 1..21: mol_type = other DNA
gatggtcatacgaagcagtcg

SEQ ID NO: 13787 - DNA, 21 bp, synthetic construct
  misc_feature 1..21: note = Description of Artificial Sequence: Synthetic oligonucleotide
  source 1..21: mol_type = other DNA
gtccccaacagcagaaccacc

SEQ ID NO: 13788 - DNA, 21 bp, synthetic construct
  misc_feature 1..21: note = Description of Artificial Sequence: Synthetic oligonucleotide
  source 1..21: mol_type = other DNA
aacaccagccaaaaagccagc

SEQ ID NO: 13789 - DNA, 21 bp, synthetic construct
  misc_feature 1..21: note = Description of Artificial Sequence: Synthetic oligonucleotide
  source 1..21: mol_type = other DNA
agcggccaaagcagccacagc

SEQ ID NO: 13790 - DNA, 21 bp, synthetic construct
  misc_feature 1..21: note = Description of Artificial Sequence: Synthetic oligonucleotide
  source 1..21: mol_type = other DNA
gccggcctcaaaagcacccaa

SEQ ID NO: 13791 - DNA, 21 bp, synthetic construct
  misc_feature 1..21: note = Description of Artificial Sequence: Synthetic oligonucleotide
  source 1..21: mol_type = other DNA
ggcggcgtcaaacccttcacc

SEQ ID NO: 13792 - DNA, 21 bp, synthetic construct
  misc_feature 1..21: note = Description of Artificial Sequence: Synthetic oligonucleotide
  source 1..21: mol_type = other DNA
ggtgtggaggctcgttctact

SEQ ID NO: 13793 - DNA, 21 bp, synthetic construct
  misc_feature 1..21: note = Description of Artificial Sequence: Synthetic oligonucleotide
  source 1..21: mol_type = other DNA
gaaagaaacaaagtcaccacc

SEQ ID NO: 13794 - DNA, 21 bp, synthetic construct
  misc_feature 1..21: note = Description of Artificial Sequence: Synthetic oligonucleotide
  source 1..21: mol_type = other DNA
accgccgcccaaagcggcggc

SEQ ID NO: 13795 - DNA, 21 bp, synthetic construct
  misc_feature 1..21: note = Description of Artificial Sequence: Synthetic oligonucleotide
  source 1..21: mol_type = other DNA
agcctcgaaagcaaacccgcc

SEQ ID NO: 13796 - DNA, 21 bp, synthetic construct
  misc_feature 1..21: note = Description of Artificial Sequence: Synthetic oligonucleotide
  source 1..21: mol_type = other DNA
agcggcgacagacaacaagcc

SEQ ID NO: 13797 - DNA, 21 bp, synthetic construct
  misc_feature 1..21: note = Description of Artificial Sequence: Synthetic oligonucleotide
  source 1..21: mol_type = other DNA
cataagacgacgagtgcgaat

SEQ ID NO: 13798 - DNA, 21 bp, synthetic construct
  misc_feature 1..21: note = Description of Artificial Sequence: Synthetic oligonucleotide
  source 1..21: mol_type = other DNA
ctcgaaggccaaagcaacaga

SEQ ID NO: 13799 - DNA, 21 bp, synthetic construct
  misc_feature 1..21: note = Description of Artificial Sequence: Synthetic oligonucleotide
  source 1..21: mol_type = other DNA
ctcgccggcaaccaaaaagaa

SEQ ID NO: 13800 - DNA, 21 bp, synthetic construct
  misc_feature 1..21: note = Description of Artificial Sequence: Synthetic oligonucleotide
  source 1..21: mol_type = other DNA
gatcctaagggtagttctagt

SEQ ID NO: 13801 - DNA, 21 bp, synthetic construct
  misc_feature 1..21: note = Description of Artificial Sequence: Synthetic oligonucleotide
  source 1..21: mol_type = other DNA
gccctccaccaaaaagccggc

SEQ ID NO: 13802 - DNA, 21 bp, synthetic construct
  misc_feature 1..21: note = Description of Artificial Sequence: Synthetic oligonucleotide
  source 1..21: mol_type = other DNA
agcctcaacaaacccatccaa

SEQ ID NO: 13803 - DNA, 21 bp, synthetic construct
  misc_feature 1..21: note = Description of Artificial Sequence: Synthetic oligonucleotide
  source 1..21: mol_type = other DNA
gctgctagtccgcctaataag

SEQ ID NO: 13804 - DNA, 21 bp, synthetic construct
  misc_feature 1..21: note = Description of Artificial Sequence: Synthetic oligonucleotide
  source 1..21: mol_type = other DNA
ctcggcgtcagcaacagcggc

SEQ ID NO: 13805 - DNA, 21 bp, synthetic construct
  misc_feature 1..21: note = Description of Artificial Sequence: Synthetic oligonucleotide
  source 1..21: mol_type = other DNA
atgaattcgaaggcgcaggct

SEQ ID NO: 13806 - DNA, 21 bp, synthetic construct
  misc_feature 1..21: note = Description of Artificial Sequence: Synthetic oligonucleotide
  source 1..21: mol_type = other DNA
aacagcagcagcaaagtcagc

SEQ ID NO: 13807 - DNA, 21 bp, synthetic construct
  misc_feature 1..21: note = Description of Artificial Sequence: Synthetic oligonucleotide
  source 1..21: mol_type = other DNA
acccaaaccaaagtcaacctc

SEQ ID NO: 13808 - DNA, 21 bp, synthetic construct
  misc_feature 1..21: note = Description of Artificial Sequence: Synthetic oligonucleotide
  source 1..21: mol_type = other DNA
cgtatgggtgatcagtctggg

SEQ ID NO: 13809 - DNA, 21 bp, synthetic construct
  misc_feature 1..21: note = Description of Artificial Sequence: Synthetic oligonucleotide
  source 1..21: mol_type = other DNA
ttgccgaatagtaatcaggct

SEQ ID NO: 13810 - DNA, 21 bp, synthetic construct
  misc_feature 1..21: note = Description of Artificial Sequence: Synthetic oligonucleotide
  source 1..21: mol_type = other DNA
acccaaggcaaaaccgtcggc

SEQ ID NO: 13811 - DNA, 21 bp, synthetic construct
  misc_feature 1..21: note = Description of Artificial Sequence: Synthetic oligonucleotide
  source 1..21: mol_type = other DNA
actcagtcgaaggagcttcgt

SEQ ID NO: 13812 - DNA, 21 bp, synthetic construct
  misc_feature 1..21: note = Description of Artificial Sequence: Synthetic oligonucleotide
  source 1..21: mol_type = other DNA
agttcggggaagtctgcgact

SEQ ID NO: 13813 - DNA, 21 bp, synthetic construct
  misc_feature 1..21: note = Description of Artificial Sequence: Synthetic oligonucleotide
  source 1..21: mol_type = other DNA
gttggtagttctcctcaggtt

SEQ ID NO: 13814 - DNA, 21 bp, synthetic construct
  misc_feature 1..21: note = Description of Artificial Sequence: Synthetic oligonucleotide
  source 1..21: mol_type = other DNA
agtaagtctaatagtgtgaat

SEQ ID NO: 13815 - DNA, 21 bp, synthetic construct
  misc_feature 1..21: note = Description of Artificial Sequence: Synthetic oligonucleotide
  source 1..21: mol_type = other DNA
aacgacagaaaagaccaacaa

SEQ ID NO: 13816 - DNA, 21 bp, synthetic construct
  misc_feature 1..21: note = Description of Artificial Sequence: Synthetic oligonucleotide
  source 1..21: mol_type = other DNA
actccgtctgcgaaggtgagt

SEQ ID NO: 13817 - DNA, 21 bp, synthetic construct
  misc_feature 1..21: note = Description of Artificial Sequence: Synthetic oligonucleotide
  source 1..21: mol_type = other DNA
agtagggcgaagcagggtgag

SEQ ID NO: 13818 - DNA, 21 bp, synthetic construct
  misc_feature 1..21: note = Description of Artificial Sequence: Synthetic oligonucleotide
  source 1..21: mol_type = other DNA
cattcggctcctaataatggg

SEQ ID NO: 13819 - DNA, 21 bp, synthetic construct
  misc_feature 1..21: note = Description of Artificial Sequence: Synthetic oligonucleotide
  source 1..21: mol_type = other DNA
agcggcgtcaccagccccgcc

SEQ ID NO: 13820 - DNA, 21 bp, synthetic construct
  misc_feature 1..21: note = Description of Artificial Sequence: Synthetic oligonucleotide
  source 1..21: mol_type = other DNA
atgggcagcaacggccaaaaa

SEQ ID NO: 13821 - DNA, 21 bp, synthetic construct
  misc_feature 1..21: note = Description of Artificial Sequence: Synthetic oligonucleotide
  source 1..21: mol_type = other DNA
gccacccaaagccccagcctc

SEQ ID NO: 13822 - DNA, 21 bp, synthetic construct
  misc_feature 1..21: note = Description of Artificial Sequence: Synthetic oligonucleotide
  source 1..21: mol_type = other DNA
ggttcggagacgcgtgctgct

SEQ ID NO: 13823 - DNA, 21 bp, synthetic construct
  misc_feature 1..21: note = Description of Artificial Sequence: Synthetic oligonucleotide
  source 1..21: mol_type = other DNA
aacaccagcaccaccagcaga

SEQ ID NO: 13824 - DNA, 21 bp, synthetic construct
  misc_feature 1..21: note = Description of Artificial Sequence: Synthetic oligonucleotide
  source 1..21: mol_type = other DNA
agcgtccacagcaaaagcgtc

SEQ ID NO: 13825 - DNA, 21 bp, synthetic construct
  misc_feature 1..21: note = Description of Artificial Sequence: Synthetic oligonucleotide
  source 1..21: mol_type = other DNA
accctcggcaaccccagcaga

SEQ ID NO: 13826 - DNA, 21 bp, synthetic construct
  misc_feature 1..21: note = Description of Artificial Sequence: Synthetic oligonucleotide
  source 1..21: mol_type = other DNA
tcgcggtcggggactccggtg

SEQ ID NO: 13827 - DNA, 21 bp, synthetic construct
  misc_feature 1..21: note = Description of Artificial Sequence: Synthetic oligonucleotide
  source 1..21: mol_type = other DNA
accagcagcagccccagcgtc

SEQ ID NO: 13828 - DNA, 21 bp, synthetic construct
  misc_feature 1..21: note = Description of Artificial Sequence: Synthetic oligonucleotide
  source 1..21: mol_type = other DNA
agcaacgccaccaaacccacc

SEQ ID NO: 13829 - DNA, 21 bp, synthetic construct
  misc_feature 1..21: note = Description of Artificial Sequence: Synthetic oligonucleotide
  source 1..21: mol_type = other DNA
gcgggtaagtcgtctcagacg

SEQ ID NO: 13830 - DNA, 21 bp, synthetic construct
  misc_feature 1..21: note = Description of Artificial Sequence: Synthetic oligonucleotide
  source 1..21: mol_type = other DNA
aattcgacgtctgggggtggt

SEQ ID NO: 13831 - DNA, 21 bp, synthetic construct
  misc_feature 1..21: note = Description of Artificial Sequence: Synthetic oligonucleotide
  source 1..21: mol_type = other DNA
agcagcagaagcacccaagcc

SEQ ID NO: 13832 - DNA, 21 bp, synthetic construct
  misc_feature 1..21: note = Description of Artificial Sequence: Synthetic oligonucleotide
  source 1..21: mol_type = other DNA
aagtcgaatgagcggacgacg

SEQ ID NO: 13833 - DNA, 21 bp, synthetic construct
  misc_feature 1..21: note = Description of Artificial Sequence: Synthetic oligonucleotide
  source 1..21: mol_type = other DNA
tctcgtgggccgacgactgtt

SEQ ID NO: 13834 - DNA, 21 bp, synthetic construct
  misc_feature 1..21: note = Description of Artificial Sequence: Synthetic oligonucleotide
  source 1..21: mol_type = other DNA
agcggcgtcagcaaacaaggc

SEQ ID NO: 13835 - DNA, 21 bp, synthetic construct
  misc_feature 1..21: note = Description of Artificial Sequence: Synthetic oligonucleotide
  source 1..21: mol_type = other DNA
caaagccaaaacgccggcagc

SEQ ID NO: 13836 - DNA, 21 bp, synthetic construct
  misc_feature 1..21: note = Description of Artificial Sequence: Synthetic oligonucleotide
  source 1..21: mol_type = other DNA
gtcgccaccagcaaaagcagc

SEQ ID NO: 13837 - DNA, 21 bp, synthetic construct
  misc_feature 1..21: note = Description of Artificial Sequence: Synthetic oligonucleotide
  source 1..21: mol_type = other DNA
cggggttcgactagttctact

SEQ ID NO: 13838 - DNA, 21 bp, synthetic construct
  misc_feature 1..21: note = Description of Artificial Sequence: Synthetic oligonucleotide
  source 1..21: mol_type = other DNA
gctccggcgggtgatcgtgtt

SEQ ID NO: 13839 - DNA, 21 bp, synthetic construct
  misc_feature 1..21: note = Description of Artificial Sequence: Synthetic oligonucleotide
  source 1..21: mol_type = other DNA
ggtggtcttgatagtcataag

SEQ ID NO: 13840 - DNA, 21 bp, synthetic construct
  misc_feature 1..21: note = Description of Artificial Sequence: Synthetic oligonucleotide
  source 1..21: mol_type = other DNA
gtccacgacggcaaaggcaaa

SEQ ID NO: 13841 - DNA, 21 bp, synthetic construct
  misc_feature 1..21: note = Description of Artificial Sequence: Synthetic oligonucleotide
  source 1..21: mol_type = other DNA
ggcaacaccaaccccgccaaa

SEQ ID NO: 13842 - DNA, 21 bp, synthetic construct
  misc_feature 1..21: note = Description of Artificial Sequence: Synthetic oligonucleotide
  source 1..21: mol_type = other DNA
tcgcggagtacggggaatcag

SEQ ID NO: 13843 - DNA, 21 bp, synthetic construct
  misc_feature 1..21: note = Description of Artificial Sequence: Synthetic oligonucleotide
  source 1..21: mol_type = other DNA
ggttcggcgaattctccgaag

SEQ ID NO: 13844 - DNA, 21 bp, synthetic construct
  misc_feature 1..21: note = Description of Artificial Sequence: Synthetic oligonucleotide
  source 1..21: mol_type = other DNA
aacaacaacaacaaagccagc

SEQ ID NO: 13845 - DNA, 21 bp, synthetic construct
  misc_feature 1..21: note = Description of Artificial Sequence: Synthetic oligonucleotide
  source 1..21: mol_type = other DNA
cgttctgcgtcgcctactgtt

SEQ ID NO: 13846 - DNA, 21 bp, synthetic construct
  misc_feature 1..21: note = Description of Artificial Sequence: Synthetic oligonucleotide
  source 1..21: mol_type = other DNA
gccagcaccggccccagagac

SEQ ID NO: 13847 - DNA, 21 bp, synthetic construct
  misc_feature 1..21: note = Description of Artificial Sequence: Synthetic oligonucleotide
  source 1..21: mol_type = other DNA
ttcggcaacagcagcagcgcc

SEQ ID NO: 13848 - DNA, 21 bp, synthetic construct
  misc_feature 1..21: note = Description of Artificial Sequence: Synthetic oligonucleotide
  source 1..21: mol_type = other DNA
gtccaacaagccgcccccagc

SEQ ID NO: 13849 - DNA, 21 bp, synthetic construct
  misc_feature 1..21: note = Description of Artificial Sequence: Synthetic oligonucleotide
  source 1..21: mol_type = other DNA
gattctagttcgcggggtcat

SEQ ID NO: 13850 - DNA, 21 bp, synthetic construct
  misc_feature 1..21: note = Description of Artificial Sequence: Synthetic oligonucleotide
  source 1..21: mol_type = other DNA
ggcctcgacagcaaaatgacc

SEQ ID NO: 13851 - DNA, 21 bp, synthetic construct
  misc_feature 1..21: note = Description of Artificial Sequence: Synthetic oligonucleotide
  source 1..21: mol_type = other DNA
aaccccgccggcggcagcgcc

SEQ ID NO: 13852 - DNA, 21 bp, synthetic construct
  misc_feature 1..21: note = Description of Artificial Sequence: Synthetic oligonucleotide
  source 1..21: mol_type = other DNA
ggcagcaacagcaccaaagcc

SEQ ID NO: 13853 - DNA, 21 bp, synthetic construct
  misc_feature 1..21: note = Description of Artificial Sequence: Synthetic oligonucleotide
  source 1..21: mol_type = other DNA
tcgactactaagccgttgagt

SEQ ID NO: 13854 - DNA, 21 bp, synthetic construct
  misc_feature 1..21: note = Description of Artificial Sequence: Synthetic oligonucleotide
  source 1..21: mol_type = other DNA
gccagcagcagcggcatggtc

SEQ ID NO: 13855 - DNA, 21 bp, synthetic construct
  misc_feature 1..21: note = Description of Artificial Sequence: Synthetic oligonucleotide
  source 1..21: mol_type = other DNA
agcagccaaaaaaccagccaa

SEQ ID NO: 13856 - DNA, 21 bp, synthetic construct
  misc_feature 1..21: note = Description of Artificial Sequence: Synthetic oligonucleotide
  source 1..21: mol_type = other DNA
ggcagcaccagccccgcccaa

SEQ ID NO: 13857 - DNA, 21 bp, synthetic construct
  misc_feature 1..21: note = Description of Artificial Sequence: Synthetic oligonucleotide
  source 1..21: mol_type = other DNA
gttgcgggtcagagtgctgtt

SEQ ID NO: 13858 - DNA, 21 bp, synthetic construct
  misc_feature 1..21: note = Description of Artificial Sequence: Synthetic oligonucleotide
  source 1..21: mol_type = other DNA
agcaccaccaaaggccccgaa

SEQ ID NO: 13859 - DNA, 21 bp, synthetic construct
  misc_feature 1..21: note = Description of Artificial Sequence: Synthetic oligonucleotide
  source 1..21: mol_type = other DNA
agaagcgacaacggcaacaga

SEQ ID NO: 13860 - DNA, 21 bp, synthetic construct
  misc_feature 1..21: note = Description of Artificial Sequence: Synthetic oligonucleotide
  source 1..21: mol_type = other DNA
tctgttggtacgcctacgtct

SEQ ID NO: 13861 - DNA, 21 bp, synthetic construct
  misc_feature 1..21: note = Description of Artificial Sequence: Synthetic oligonucleotide
  source 1..21: mol_type = other DNA
acggctcatgggaagccggtt

SEQ ID NO: 13862 - DNA, 21 bp, synthetic construct
  misc_feature 1..21: note = Description of Artificial Sequence: Synthetic oligonucleotide
  source 1..21: mol_type = other DNA
accagcaccagcaaagtcgcc

SEQ ID NO: 13863 - DNA, 21 bp, synthetic construct
  misc_feature 1..21: note = Description of Artificial Sequence: Synthetic oligonucleotide
  source 1..21: mol_type = other DNA
aacatcagcaaaagcaacagc

SEQ ID NO: 13864 - DNA, 21 bp, synthetic construct
  misc_feature 1..21: note = Description of Artificial Sequence: Synthetic oligonucleotide
  source 1..21: mol_type = other DNA
agcgtcggcaaagccgccgcc

SEQ ID NO: 13865 - DNA, 21 bp, synthetic construct
  misc_feature 1..21: note = Description of Artificial Sequence: Synthetic oligonucleotide
  source 1..21: mol_type = other DNA
gaccccagcgacgtcaaaaga

SEQ ID NO: 13866 - DNA, 21 bp, synthetic construct
  misc_feature 1..21: note = Description of Artificial Sequence: Synthetic oligonucleotide
  source 1..21: mol_type = other DNA
gtggttacgaagcctagtact

SEQ ID NO: 13867 - DNA, 21 bp, synthetic construct
  misc_feature 1..21: note = Description of Artificial Sequence: Synthetic oligonucleotide
  source 1..21: mol_type = other DNA
agcaacaccgccagccccgtc

SEQ ID NO: 13868 - DNA, 21 bp, synthetic construct
  misc_feature 1..21: note = Description of Artificial Sequence: Synthetic oligonucleotide
  source 1..21: mol_type = other DNA
atgcccgccaaaagcagcgtc

SEQ ID NO: 13869 - DNA, 21 bp, synthetic construct
  misc_feature 1..21: note = Description of Artificial Sequence: Synthetic oligonucleotide
  source 1..21: mol_type = other DNA
gacaacggcaaaggccaactc

SEQ ID NO: 13870 - DNA, 21 bp, synthetic construct
  misc_feature 1..21: note = Description of Artificial Sequence: Synthetic oligonucleotide
  source 1..21: mol_type = other DNA
ggtcatacggataagacgacg

SEQ ID NO: 13871 - DNA, 21 bp, synthetic construct
  misc_feature 1..21: note = Description of Artificial Sequence: Synthetic oligonucleotide
  source 1..21: mol_type = other DNA
gatctgcgtgagaagcctgcg

SEQ ID NO: 13872 - DNA, 21 bp, synthetic construct
  misc_feature 1..21: note = Description of Artificial Sequence: Synthetic oligonucleotide
  source 1..21: mol_type = other DNA
tctggggggtcgggtcatacg

SEQ ID NO: 13873 - DNA, 21 bp, synthetic construct
  misc_feature 1..21: note = Description of Artificial Sequence: Synthetic oligonucleotide
  source 1..21: mol_type = other DNA
aatgttacttctaaggctatg

SEQ ID NO: 13874 - DNA, 21 bp, synthetic construct
  misc_feature 1..21: note = Description of Artificial Sequence: Synthetic oligonucleotide
  source 1..21: mol_type = other DNA
aatgttagtcctacgcaggcg

SEQ ID NO: 13875 - DNA, 21 bp, synthetic construct
  misc_feature 1..21: note = Description of Artificial Sequence: Synthetic oligonucleotide
  source 1..21: mol_type = other DNA
gaaagaagcagcgccaccagc

SEQ ID NO: 13876 - DNA, 21 bp, synthetic construct
  misc_feature 1..21: note = Description of Artificial Sequence: Synthetic oligonucleotide
  source 1..21: mol_type = other DNA
ggcaccagcgaaaacaaaggc

SEQ ID NO: 13877 - DNA, 21 bp, synthetic construct
  misc_feature 1..21: note = Description of Artificial Sequence: Synthetic oligonucleotide
  source 1..21: mol_type = other DNA
tcgcgggggggtagtagtggg

SEQ ID NO: 13878 - DNA, 21 bp, synthetic construct
  misc_feature 1..21: note = Description of Artificial Sequence: Synthetic oligonucleotide
  source 1..21: mol_type = other DNA
cagaatagtaagtctgcggtg

SEQ ID NO: 13879 - DNA, 21 bp, synthetic construct
  misc_feature 1..21: note = Description of Artificial Sequence: Synthetic oligonucleotide
  source 1..21: mol_type = other DNA
accaccagccccaaccaccaa

SEQ ID NO: 13880 - DNA, 21 bp, synthetic construct
  misc_feature 1..21: note = Description of Artificial Sequence: Synthetic oligonucleotide
  source 1..21: mol_type = other DNA
aaccccggcggcagaaacggc

SEQ ID NO: 13881 - DNA, 21 bp, synthetic construct
  misc_feature 1..21: note = Description of Artificial Sequence: Synthetic oligonucleotide
  source 1..21: mol_type = other DNA
accaacagcagcaaccccgcc

SEQ ID NO: 13882 - DNA, 21 bp, synthetic construct
  misc_feature 1..21: note = Description of Artificial Sequence: Synthetic oligonucleotide
  source 1..21: mol_type = other DNA
ttggattctgttaagtctcgg

SEQ ID NO: 13883 - DNA, 21 bp, synthetic construct
  misc_feature 1..21: note = Description of Artificial Sequence: Synthetic oligonucleotide
  source 1..21: mol_type = other DNA
gggcgtactgagcctcatacg

SEQ ID NO: 13884 - DNA, 21 bp, synthetic construct
  misc_feature 1..21: note = Description of Artificial Sequence: Synthetic oligonucleotide
  source 1..21: mol_type = other DNA
gatagtgctgttaggggtaat

SEQ ID NO: 13885 - DNA, 21 bp, synthetic construct
  misc_feature 1..21: note = Description of Artificial Sequence: Synthetic oligonucleotide
  source 1..21: mol_type = other DNA
attgctacgaaggtgggttct

SEQ ID NO: 13886 - DNA, 21 bp, synthetic construct
  misc_feature 1..21: note = Description of Artificial Sequence: Synthetic oligonucleotide
  source 1..21: mol_type = other DNA
ctcggcgccagcaaaaacggc

SEQ ID NO: 13887 - DNA, 21 bp, synthetic construct
  misc_feature 1..21: note = Description of Artificial Sequence: Synthetic oligonucleotide
  source 1..21: mol_type = other DNA
gacagacaagtcggcaccacc

SEQ ID NO: 13888 - DNA, 21 bp, synthetic construct
  misc_feature 1..21: note = Description of Artificial Sequence: Synthetic oligonucleotide
  source 1..21: mol_type = other DNA
gatactgggactgctaggggt

SEQ ID NO: 13889 - DNA, 21 bp, synthetic construct
  misc_feature 1..21: note = Description of Artificial Sequence: Synthetic oligonucleotide
  source 1..21: mol_type = other DNA
cggcagtcggataagagtgtg

SEQ ID NO: 13890 - DNA, 21 bp, synthetic construct
  misc_feature 1..21: note = Description of Artificial Sequence: Synthetic oligonucleotide
  source 1..21: mol_type = other DNA
accggcgtcgccagcaacgtc

SEQ ID NO: 13891 - DNA, 21 bp, synthetic construct
  misc_feature 1..21: note = Description of Artificial Sequence: Synthetic oligonucleotide
  source 1..21: mol_type = other DNA
ctggctgatactcctcggact

SEQ ID NO: 13892 - DNA, 21 bp, synthetic construct
  misc_feature 1..21: note = Description of Artificial Sequence: Synthetic oligonucleotide
  source 1..21: mol_type = other DNA
atgagtagtaaggtgtcgact

SEQ ID NO: 13893 - DNA, 21 bp, synthetic construct
  misc_feature 1..21: note = Description of Artificial Sequence: Synthetic oligonucleotide
  source 1..21: mol_type = other DNA
agtaataatagtaagccgcag

SEQ ID NO: 13894 - DNA, 21 bp, synthetic construct
  misc_feature 1..21: note = Description of Artificial Sequence: Synthetic oligonucleotide
  source 1..21: mol_type = other DNA
ggcaccgaaaacgccagaggc

SEQ ID NO: 13895 - DNA, 21 bp, synthetic construct
  misc_feature 1..21: note = Description of Artificial Sequence: Synthetic oligonucleotide
  source 1..21: mol_type = other DNA
ttggggaatagtagtcctgcg

SEQ ID NO: 13896 - DNA, 21 bp, synthetic construct
  misc_feature 1..21: note = Description of Artificial Sequence: Synthetic oligonucleotide
  source 1..21: mol_type = other DNA
agaagcgaaagcaaaatcacc

SEQ ID NO: 13897 - DNA, 21 bp, synthetic construct
  misc_feature 1..21: note = Description of Artificial Sequence: Synthetic oligonucleotide
  source 1..21: mol_type = other DNA
gcgtctgagtctcgtaatgtg

SEQ ID NO: 13898 - DNA, 21 bp, synthetic construct
  misc_feature 1..21: note = Description of Artificial Sequence: Synthetic oligonucleotide
  source 1..21: mol_type = other DNA
ggcagcaccgaaggcctcaga

SEQ ID NO: 13899 - DNA, 21 bp, synthetic construct
  misc_feature 1..21: note = Description of Artificial Sequence: Synthetic oligonucleotide
  source 1..21: mol_type = other DNA
tcgtcgcttccgtcgaagggg

SEQ ID NO: 13900 - DNA, 21 bp, synthetic construct
  misc_feature 1..21: note = Description of Artificial Sequence: Synthetic oligonucleotide
  source 1..21: mol_type = other DNA
acggatcgtaaggatgatcgg

SEQ ID NO: 13901 - DNA, 21 bp, synthetic construct
  misc_feature 1..21: note = Description of Artificial Sequence: Synthetic oligonucleotide
  source 1..21: mol_type = other DNA
gggactgctacgaataatcat

SEQ ID NO: 13902 - DNA, 21 bp, synthetic construct
  misc_feature 1..21: note = Description of Artificial Sequence: Synthetic oligonucleotide
  source 1..21: mol_type = other DNA
accagcagcaccaaaaccgtc

SEQ ID NO: 13903 - DNA, 21 bp, synthetic construct
  misc_feature 1..21: note = Description of Artificial Sequence: Synthetic oligonucleotide
  source 1..21: mol_type = other DNA
agtggtacgggtaattctggt

SEQ ID NO: 13904 - DNA, 21 bp, synthetic construct
  misc_feature 1..21: note = Description of Artificial Sequence: Synthetic oligonucleotide
  source 1..21: mol_type = other DNA
ggcggcgacggcaaagccaga

SEQ ID NO: 13905 - DNA, 21 bp, synthetic construct
  misc_feature 1..21: note = Description of Artificial Sequence: Synthetic oligonucleotide
  source 1..21: mol_type = other DNA
actcggtctgagggttcggtg

SEQ ID NO: 13906 - DNA, 21 bp, synthetic construct
  misc_feature 1..21: note = Description of Artificial Sequence: Synthetic oligonucleotide
  source 1..21: mol_type = other DNA
agcggcctcggcaaacccgtc

SEQ ID NO: 13907 - DNA, 21 bp, synthetic construct
  misc_feature 1..21: note = Description of Artificial Sequence: Synthetic oligonucleotide
  source 1..21: mol_type = other DNA
gcccccatccaaagcggcagc

SEQ ID NO: 13908 - DNA, 21 bp, synthetic construct
  misc_feature 1..21: note = Description of Artificial Sequence: Synthetic oligonucleotide
  source 1..21: mol_type = other DNA
ttcggcagccccacccccagc

SEQ ID NO: 13909 - DNA, 21 bp, synthetic construct
  misc_feature 1..21: note = Description of Artificial Sequence: Synthetic oligonucleotide
  source 1..21: mol_type = other DNA
tcgaggtctactactagtact

SEQ ID NO: 13910 - DNA, 21 bp, synthetic construct
  misc_feature 1..21: note = Description of Artificial Sequence: Synthetic oligonucleotide
  source 1..21: mol_type = other DNA
aattctggtgggactcattct

SEQ ID NO: 13911 - DNA, 21 bp, synthetic construct
  misc_feature 1..21: note = Description of Artificial Sequence: Synthetic oligonucleotide
  source 1..21: mol_type = other DNA
agcacccaaagcggcaacaga

SEQ ID NO: 13912 - DNA, 21 bp, synthetic construct
  misc_feature 1..21: note = Description of Artificial Sequence: Synthetic oligonucleotide
  source 1..21: mol_type = other DNA
atggagggtactcatggtggt

SEQ ID NO: 13913 - DNA, 21 bp, synthetic construct
  misc_feature 1..21: note = Description of Artificial Sequence: Synthetic oligonucleotide
  source 1..21: mol_type = other DNA
cagtcgggggggtcgaatgtg

SEQ ID NO: 13914 - DNA, 21 bp, synthetic construct
  misc_feature 1..21: note = Description of Artificial Sequence: Synthetic oligonucleotide
  source 1..21: mol_type = other DNA
catggtactgcgaagacgtcg

SEQ ID NO: 13915 - DNA, 21 bp, synthetic construct
  misc_feature 1..21: note = Description of Artificial Sequence: Synthetic oligonucleotide
  source 1..21: mol_type = other DNA
ctcggcaacggcaaaaccgtc

SEQ ID NO: 13916 - DNA, 21 bp, synthetic construct
  misc_feature 1..21: note = Description of Artificial Sequence: Synthetic oligonucleotide
  source 1..21: mol_type = other DNA
cttaataatcagaagactgtt

SEQ ID NO: 13917 - DNA, 21 bp, synthetic construct
  misc_feature 1..21: note = Description of Artificial Sequence: Synthetic oligonucleotide
  source 1..21: mol_type = other DNA
gatcagacggcgcgttcgacg

SEQ ID NO: 13918 - DNA, 21 bp, synthetic construct
  misc_feature 1..21: note = Description of Artificial Sequence: Synthetic oligonucleotide
  source 1..21: mol_type = other DNA
gccggcaaaggcgccgccagc

SEQ ID NO: 13919 - DNA, 21 bp, synthetic construct
  misc_feature 1..21: note = Description of Artificial Sequence: Synthetic oligonucleotide
  source 1..21: mol_type = other DNA
gcgagtgggcggagtgttagc

SEQ ID NO: 13920 - DNA, 21 bp, synthetic construct
  misc_feature 1..21: note = Description of Artificial Sequence: Synthetic oligonucleotide
  source 1..21: mol_type = other DNA
ggcctcagcggcgacatcaaa

SEQ ID NO: 13921 - DNA, 21 bp, synthetic construct
  misc_feature 1..21: note = Description of Artificial Sequence: Synthetic oligonucleotide
  source 1..21: mol_type = other DNA
ggtcctaatcgtgattcgggt

SEQ ID NO: 13922 - DNA, 21 bp, synthetic construct
  misc_feature 1..21: note = Description of Artificial Sequence: Synthetic oligonucleotide
  source 1..21: mol_type = other DNA
tctcagggtcaggctaatact

SEQ ID NO: 13923 - DNA, 21 bp, synthetic construct
  misc_feature 1..21: note = Description of Artificial Sequence: Synthetic oligonucleotide
  source 1..21: mol_type = other DNA
catcatgatgctcaggttaag

SEQ ID NO: 13924 - DNA, 21 bp, synthetic construct
  misc_feature 1..21: note = Description of Artificial Sequence: Synthetic oligonucleotide
  source 1..21: mol_type = other DNA
ggttcggggactcctggtgct

SEQ ID NO: 13925 - DNA, 21 bp, synthetic construct
  misc_feature 1..21: note = Description of Artificial Sequence: Synthetic oligonucleotide
  source 1..21: mol_type = other DNA
gacaccggcagcagaagcaga

SEQ ID NO: 13926 - DNA, 21 bp, synthetic construct
  misc_feature 1..21: note = Description of Artificial Sequence: Synthetic oligonucleotide
  source 1..21: mol_type = other DNA
tcttctgtgccgtcgcaggcg

SEQ ID NO: 13927 - DNA, 21 bp, synthetic construct
  misc_feature 1..21: note = Description of Artificial Sequence: Synthetic oligonucleotide
  source 1..21: mol_type = other DNA
tctgggacgcctactcataat

SEQ ID NO: 13928 - DNA, 21 bp, synthetic construct
  misc_feature 1..21: note = Description of Artificial Sequence: Synthetic oligonucleotide
  source 1..21: mol_type = other DNA
tctggtggttcgtcttctaag

SEQ ID NO: 13929 - DNA, 21 bp, synthetic construct
  misc_feature 1..21: note = Description of Artificial Sequence: Synthetic oligonucleotide
  source 1..21: mol_type = other DNA
ggcaccggcaaacccgcccaa

SEQ ID NO: 13930 - DNA, 21 bp, synthetic construct
  misc_feature 1..21: note = Description of Artificial Sequence: Synthetic oligonucleotide
  source 1..21: mol_type = other DNA
aatgcgaataagacggctggt

SEQ ID NO: 13931 - DNA, 21 bp, synthetic construct
  misc_feature 1..21: note = Description of Artificial Sequence: Synthetic oligonucleotide
  source 1..21: mol_type = other DNA
aatacggagcgtccgactgct

SEQ ID NO: 13932 - DNA, 21 bp, synthetic construct
  misc_feature 1..21: note = Description of Artificial Sequence: Synthetic oligonucleotide
  source 1..21: mol_type = other DNA
gctagttctccgactcaggcg

SEQ ID NO: 13933 - DNA, 21 bp, synthetic construct
  misc_feature 1..21: note = Description of Artificial Sequence: Synthetic oligonucleotide
  source 1..21: mol_type = other DNA
ggccacgccggcggcaacagc

SEQ ID NO: 13934 - DNA, 21 bp, synthetic construct
  misc_feature 1..21: note = Description of Artificial Sequence: Synthetic oligonucleotide
  source 1..21: mol_type = other DNA
agccccgaaggcaaaaacaga

SEQ ID NO: 13935 - DNA, 21 bp, synthetic construct
  misc_feature 1..21: note = Description of Artificial Sequence: Synthetic oligonucleotide
  source 1..21: mol_type = other DNA
agcatggtcgccagccaaggc

SEQ ID NO: 13936 - DNA, 21 bp, synthetic construct
  misc_feature 1..21: note = Description of Artificial Sequence: Synthetic oligonucleotide
  source 1..21: mol_type = other DNA
gggcgtgaggtgtcgccgaag

SEQ ID NO: 13937 - DNA, 21 bp, synthetic construct
  misc_feature 1..21: note = Description of Artificial Sequence: Synthetic oligonucleotide
  source 1..21: mol_type = other DNA
gccaccaccgccagccccaaa

SEQ ID NO: 13938 - DNA, 21 bp, synthetic construct
  misc_feature 1..21: note = Description of Artificial Sequence: Synthetic oligonucleotide
  source 1..21: mol_type = other DNA
atgggggtgactggttcggct

SEQ ID NO: 13939 - DNA, 21 bp, synthetic construct
  misc_feature 1..21: note = Description of Artificial Sequence: Synthetic oligonucleotide
  source 1..21: mol_type = other DNA
gcgccttctagtcagtctgct

SEQ ID NO: 13940 - DNA, 21 bp, synthetic construct
  misc_feature 1..21: note = Description of Artificial Sequence: Synthetic oligonucleotide
  source 1..21: mol_type = other DNA
ggcagcaccgcccaacccaga

SEQ ID NO: 13941 - DNA, 21 bp, synthetic construct
  misc_feature 1..21: note = Description of Artificial Sequence: Synthetic oligonucleotide
  source 1..21: mol_type = other DNA
aagaatggtaatagtacgtat

SEQ ID NO: 13942 - DNA, 21 bp, synthetic construct
  misc_feature 1..21: note = Description of Artificial Sequence: Synthetic oligonucleotide
  source 1..21: mol_type = other DNA
agtaatcagggtgggattact

SEQ ID NO: 13943 - DNA, 21 bp, synthetic construct
  misc_feature 1..21: note = Description of Artificial Sequence: Synthetic oligonucleotide
  source 1..21: mol_type = other DNA
agcgtcaacaaaagcgacaac

SEQ ID NO: 13944 - DNA, 21 bp, synthetic construct
  misc_feature 1..21: note = Description of Artificial Sequence: Synthetic oligonucleotide
  source 1..21: mol_type = other DNA
accagcggcggcctcaaaagc

SEQ ID NO: 13945 - DNA, 21 bp, synthetic construct
  misc_feature 1..21: note = Description of Artificial Sequence: Synthetic oligonucleotide
  source 1..21: mol_type = other DNA
ggcgtcgtcagccccgccaaa

SEQ ID NO: 13946 - DNA, 21 bp, synthetic construct
  misc_feature 1..21: note = Description of Artificial Sequence: Synthetic oligonucleotide
  source 1..21: mol_type = other DNA
ggccaagtccaaggcaccacc

SEQ ID NO: 13947 - DNA, 21 bp, synthetic construct
  misc_feature 1..21: note = Description of Artificial Sequence: Synthetic oligonucleotide
  source 1..21: mol_type = other DNA
agcatggccaaaagcacccaa

SEQ ID NO: 13948 - DNA, 21 bp, synthetic construct
  misc_feature 1..21: note = Description of Artificial Sequence: Synthetic oligonucleotide
  source 1..21: mol_type = other DNA
acggcggcgaagattgggagt

SEQ ID NO: 13949 - DNA, 21 bp, synthetic construct
  misc_feature 1..21: note = Description of Artificial Sequence: Synthetic oligonucleotide
  source 1..21: mol_type = other DNA
gggagtacgaagagtacttcg

SEQ ID NO: 13950 - DNA, 21 bp, synthetic construct
  misc_feature 1..21: note = Description of Artificial Sequence: Synthetic oligonucleotide
  source 1..21: mol_type = other DNA
tcgtcgcataagtctgttgcg

SEQ ID NO: 13951 - DNA, 21 bp, synthetic construct
  misc_feature 1..21: note = Description of Artificial Sequence: Synthetic oligonucleotide
  source 1..21: mol_type = other DNA
agccaaggcgccagcctcggc

SEQ ID NO: 13952 - DNA, 21 bp, synthetic construct
  misc_feature 1..21: note = Description of Artificial Sequence: Synthetic oligonucleotide
  source 1..21: mol_type = other DNA
actaattcttcgtcggcgagt

SEQ ID NO: 13953 - DNA, 21 bp, synthetic construct
  misc_feature 1..21: note = Description of Artificial Sequence: Synthetic oligonucleotide
  source 1..21: mol_type = other DNA
ggttcttcgagggatagtccg

SEQ ID NO: 13954 - DNA, 21 bp, synthetic construct
  misc_feature 1..21: note = Description of Artificial Sequence: Synthetic oligonucleotide
  source 1..21: mol_type = other DNA
aaaagcgccaaaagcatcgaa

SEQ ID NO: 13955 - DNA, 21 bp, synthetic construct
  misc_feature 1..21: note = Description of Artificial Sequence: Synthetic oligonucleotide
  source 1..21: mol_type = other DNA
agcagccaaaccccccaagcc

SEQ ID NO: 13956 - DNA, 21 bp, synthetic construct
  misc_feature 1..21: note = Description of Artificial Sequence: Synthetic oligonucleotide
  source 1..21: mol_type = other DNA
ggcggcgacaaacccagcgtc

SEQ ID NO: 13957 - DNA, 21 bp, synthetic construct
  misc_feature 1..21: note = Description of Artificial Sequence: Synthetic oligonucleotide
  source 1..21: mol_type = other DNA
aagtcgggttctgcgtcttct

SEQ ID NO: 13958 - DNA, 21 bp, synthetic construct
  misc_feature 1..21: note = Description of Artificial Sequence: Synthetic oligonucleotide
  source 1..21: mol_type = other DNA
tacggcagcagcaaaaaccaa

SEQ ID NO: 13959 - DNA, 21 bp, synthetic construct
  misc_feature 1..21: note = Description of Artificial Sequence: Synthetic oligonucleotide
  source 1..21: mol_type = other DNA
tctcatagtaaggagcagctt

SEQ ID NO: 13960 - DNA, 21 bp, synthetic construct
  misc_feature 1..21: note = Description of Artificial Sequence: Synthetic oligonucleotide
  source 1..21: mol_type = other DNA
acgcgttcgactagtactact

SEQ ID NO: 13961 - DNA, 21 bp, synthetic construct
  misc_feature 1..21: note = Description of Artificial Sequence: Synthetic oligonucleotide
  source 1..21: mol_type = other DNA
agcaaacccggcgaacacggc

SEQ ID NO: 13962 - DNA, 21 bp, synthetic construct
  misc_feature 1..21: note = Description of Artificial Sequence: Synthetic oligonucleotide
  source 1..21: mol_type = other DNA
agtaaggggtctccgagtgct

SEQ ID NO: 13963 - DNA, 21 bp, synthetic construct
  misc_feature 1..21: note = Description of Artificial Sequence: Synthetic oligonucleotide
  source 1..21: mol_type = other DNA
ggttcgcggcctaatagtggg

SEQ ID NO: 13964 - DNA, 21 bp, synthetic construct
  misc_feature 1..21: note = Description of Artificial Sequence: Synthetic oligonucleotide
  source 1..21: mol_type = other DNA
ggcgcccaaaccgcccacgtc

SEQ ID NO: 13965 - DNA, 21 bp, synthetic construct
  misc_feature 1..21: note = Description of Artificial Sequence: Synthetic oligonucleotide
  source 1..21: mol_type = other DNA
gcgaatggtgctcctacgcgt

SEQ ID NO: 13966 - DNA, 21 bp, synthetic construct
  misc_feature 1..21: note = Description of Artificial Sequence: Synthetic oligonucleotide
  source 1..21: mol_type = other DNA
agcggcgccgccaaagaaagc

SEQ ID NO: 13967 - DNA, 21 bp, synthetic construct
  misc_feature 1..21: note = Description of Artificial Sequence: Synthetic oligonucleotide
  source 1..21: mol_type = other DNA
atgcagacgtctagttctatt

SEQ ID NO: 13968 - DNA, 21 bp, synthetic construct
  misc_feature 1..21: note = Description of Artificial Sequence: Synthetic oligonucleotide
  source 1..21: mol_type = other DNA
ggcagcagcacccccaaactc

SEQ ID NO: 13969 - DNA, 21 bp, synthetic construct
  misc_feature 1..21: note = Description of Artificial Sequence: Synthetic oligonucleotide
  source 1..21: mol_type = other DNA
gggtcgactaagcctaattat

SEQ ID NO: 13970 - DNA, 21 bp, synthetic construct
  misc_feature 1..21: note = Description of Artificial Sequence: Synthetic oligonucleotide
  source 1..21: mol_type = other DNA
gccgccggcgcccacaccgtc

SEQ ID NO: 13971 - DNA, 21 bp, synthetic construct
  misc_feature 1..21: note = Description of Artificial Sequence: Synthetic oligonucleotide
  source 1..21: mol_type = other DNA
ggcctcgaagccagcaaagaa

SEQ ID NO: 13972 - DNA, 21 bp, synthetic construct
  misc_feature 1..21: note = Description of Artificial Sequence: Synthetic oligonucleotide
  source 1..21: mol_type = other DNA
accaccaacgcccccgtcggc

SEQ ID NO: 13973 - DNA, 21 bp, synthetic construct
  misc_feature 1..21: note = Description of Artificial Sequence: Synthetic oligonucleotide
  source 1..21: mol_type = other DNA
agcaccagcaccaaaagcatg

SEQ ID NO: 13974 - DNA, 21 bp, synthetic construct
  misc_feature 1..21: note = Description of Artificial Sequence: Synthetic oligonucleotide
  source 1..21: mol_type = other DNA
gatgtggggaagcagagtaag

SEQ ID NO: 13975 - DNA, 21 bp, synthetic construct
  misc_feature 1..21: note = Description of Artificial Sequence: Synthetic oligonucleotide
  source 1..21: mol_type = other DNA
caaagcaacaccaccagcagc

SEQ ID NO: 13976 - DNA, 21 bp, synthetic construct
  misc_feature 1..21: note = Description of Artificial Sequence: Synthetic oligonucleotide
  source 1..21: mol_type = other DNA
agcagccacagccccagcctc

SEQ ID NO: 13977 - DNA, 21 bp, synthetic construct
  misc_feature 1..21: note = Description of Artificial Sequence: Synthetic oligonucleotide
  source 1..21: mol_type = other DNA
ggcgtcggcagcaaaaccgcc

SEQ ID NO: 13978 - DNA, 21 bp, synthetic construct
  misc_feature 1..21: note = Description of Artificial Sequence: Synthetic oligonucleotide
  source 1..21: mol_type = other DNA
agtcttaatggtaagcctggg

SEQ ID NO: 13979 - DNA, 21 bp, synthetic construct
  misc_feature 1..21: note = Description of Artificial Sequence: Synthetic oligonucleotide
  source 1..21: mol_type = other DNA
actagtgagaagccgtttaat

SEQ ID NO: 13980 - DNA, 21 bp, synthetic construct
  misc_feature 1..21: note = Description of Artificial Sequence: Synthetic oligonucleotide
  source 1..21: mol_type = other DNA
agtattacgaagggtaatcct

SEQ ID NO: 13981 - DNA, 21 bp, synthetic construct
  misc_feature 1..21: note = Description of Artificial Sequence: Synthetic oligonucleotide
  source 1..21: mol_type = other DNA
ggtacggctaatccgtcgcgt

SEQ ID NO: 13982 - DNA, 21 bp, synthetic construct
  misc_feature 1..21: note = Description of Artificial Sequence: Synthetic oligonucleotide
  source 1..21: mol_type = other DNA
agccccaacaaacccgccagc

SEQ ID NO: 13983 - DNA, 21 bp, synthetic construct
  misc_feature 1..21: note = Description of Artificial Sequence: Synthetic oligonucleotide
  source 1..21: mol_type = other DNA
accaacagcaaacccgtcagc

SEQ ID NO: 13984 - DNA, 21 bp, synthetic construct
  misc_feature 1..21: note = Description of Artificial Sequence: Synthetic oligonucleotide
  source 1..21: mol_type = other DNA
agtcgtgataagaatagtggt

SEQ ID NO: 13985 - DNA, 21 bp, synthetic construct
  misc_feature 1..21: note = Description of Artificial Sequence: Synthetic oligonucleotide
  source 1..21: mol_type = other DNA
aattcgacgaatcatccgtct

SEQ ID NO: 13986 - DNA, 21 bp, synthetic construct
  misc_feature 1..21: note = Description of Artificial Sequence: Synthetic oligonucleotide
  source 1..21: mol_type = other DNA
accgaaaaaagcaaagccatc

SEQ ID NO: 13987 - DNA, 21 bp, synthetic construct
  misc_feature 1..21: note = Description of Artificial Sequence: Synthetic oligonucleotide
  source 1..21: mol_type = other DNA
agcggccccgacctcaaaagc

SEQ ID NO: 13988 - DNA, 21 bp, synthetic construct
  misc_feature 1..21: note = Description of Artificial Sequence: Synthetic oligonucleotide
  source 1..21: mol_type = other DNA
gaccaaaccgccagaaacgtc

SEQ ID NO: 13989 - DNA, 21 bp, synthetic construct
  misc_feature 1..21: note = Description of Artificial Sequence: Synthetic oligonucleotide
  source 1..21: mol_type = other DNA
tcggatagtcagaagactcgt

SEQ ID NO: 13990 - DNA, 21 bp, synthetic construct
  misc_feature 1..21: note = Description of Artificial Sequence: Synthetic oligonucleotide
  source 1..21: mol_type = other DNA
atgagcgacaacaaagtcctc

SEQ ID NO: 13991 - DNA, 21 bp, synthetic construct
  misc_feature 1..21: note = Description of Artificial Sequence: Synthetic oligonucleotide
  source 1..21: mol_type = other DNA
atgacgtctactaaggcttct

SEQ ID NO: 13992 - DNA, 21 bp, synthetic construct
  misc_feature 1..21: note = Description of Artificial Sequence: Synthetic oligonucleotide
  source 1..21: mol_type = other DNA
gcggtttcgagtaagcattcg

SEQ ID NO: 13993 - DNA, 21 bp, synthetic construct
  misc_feature 1..21: note = Description of Artificial Sequence: Synthetic oligonucleotide
  source 1..21: mol_type = other DNA
tcgcatcagtcgtctgctaat

SEQ ID NO: 13994 - DNA, 21 bp, synthetic construct
  misc_feature 1..21: note = Description of Artificial Sequence: Synthetic oligonucleotide
  source 1..21: mol_type = other DNA
catggggttaaggattctaag

SEQ ID NO: 13995 - DNA, 21 bp, synthetic construct
  misc_feature 1..21: note = Description of Artificial Sequence: Synthetic oligonucleotide
  source 1..21: mol_type = other DNA
ctcggcggcacccaaaacaaa

SEQ ID NO: 13996 - DNA, 21 bp, synthetic construct
  misc_feature 1..21: note = Description of Artificial Sequence: Synthetic oligonucleotide
  source 1..21: mol_type = other DNA
tcgggggcgactccgattaag

SEQ ID NO: 13997 - DNA, 21 bp, synthetic construct
  misc_feature 1..21: note = Description of Artificial Sequence: Synthetic oligonucleotide
  source 1..21: mol_type = other DNA
actggtgggaatacggctcat

SEQ ID NO: 13998 - DNA, 21 bp, synthetic construct
  misc_feature 1..21: note = Description of Artificial Sequence: Synthetic oligonucleotide
  source 1..21: mol_type = other DNA
cttggtgatcagagggtgact

SEQ ID NO: 13999 - DNA, 21 bp, synthetic construct
  misc_feature 1..21: note = Description of Artificial Sequence: Synthetic oligonucleotide
  source 1..21: mol_type = other DNA
tctgggtctgtgcagccggct

SEQ ID NO: 14000 - DNA, 21 bp, synthetic construct
  misc_feature 1..21: note = Description of Artificial Sequence: Synthetic oligonucleotide
  source 1..21: mol_type = other DNA
aacgccgacaccagaagcagc

SEQ ID NO: 14001 - DNA, 21 bp, synthetic construct
  misc_feature 1..21: note = Description of Artificial Sequence: Synthetic oligonucleotide
  source 1..21: mol_type = other DNA
tcttctgcttctaagtctaat

SEQ ID NO: 14002 - DNA, 21 bp, synthetic construct
  misc_feature 1..21: note = Description of Artificial Sequence: Synthetic oligonucleotide
  source 1..21: mol_type = other DNA
aacggcagcgccagcagcagc

SEQ ID NO: 14003 - DNA, 21 bp, synthetic construct
  misc_feature 1..21: note = Description of Artificial Sequence: Synthetic oligonucleotide
  source 1..21: mol_type = other DNA
aacgccaacggcagacaacaa

SEQ ID NO: 14004 - DNA, 21 bp, synthetic construct
  misc_feature 1..21: note = Description of Artificial Sequence: Synthetic oligonucleotide
  source 1..21: mol_type = other DNA
ggcatgggccacagcgccgcc

SEQ ID NO: 14005 - DNA, 21 bp, synthetic construct
  misc_feature 1..21: note = Description of Artificial Sequence: Synthetic oligonucleotide
  source 1..21: mol_type = other DNA
gctggttcgggtcattcgacg

SEQ ID NO: 14006 - DNA, 21 bp, synthetic construct
  misc_feature 1..21: note = Description of Artificial Sequence: Synthetic oligonucleotide
  source 1..21: mol_type = other DNA
gacttcggcaaagccaacgcc

SEQ ID NO: 14007 - DNA, 21 bp, synthetic construct
  misc_feature 1..21: note = Description of Artificial Sequence: Synthetic oligonucleotide
  source 1..21: mol_type = other DNA
ctcgccggcaacggcaacgcc

SEQ ID NO: 14008 - DNA, 21 bp, synthetic construct
  misc_feature 1..21: note = Description of Artificial Sequence: Synthetic oligonucleotide
  source 1..21: mol_type = other DNA
gtccccgccggcaaaggcagc

SEQ ID NO: 14009 - DNA, 21 bp, synthetic construct
  misc_feature 1..21: note = Description of Artificial Sequence: Synthetic oligonucleotide
  source 1..21: mol_type = other DNA
acgagtgctccgacgtctggg

SEQ ID NO: 14010 - DNA, 21 bp, synthetic construct
  misc_feature 1..21: note = Description of Artificial Sequence: Synthetic oligonucleotide
  source 1..21: mol_type = other DNA
attagtagtaagcagtcttct

SEQ ID NO: 14011 - DNA, 21 bp, synthetic construct
  misc_feature 1..21: note = Description of Artificial Sequence: Synthetic oligonucleotide
  source 1..21: mol_type = other DNA
gccaacaacggcaccggcggc

SEQ ID NO: 14012 - DNA, 21 bp, synthetic construct
  misc_feature 1..21: note = Description of Artificial Sequence: Synthetic oligonucleotide
  source 1..21: mol_type = other DNA
tcttcgtcggggcggaatgag

SEQ ID NO: 14013 - DNA, 21 bp, synthetic construct
  misc_feature 1..21: note = Description of Artificial Sequence: Synthetic oligonucleotide
  source 1..21: mol_type = other DNA
gctggtactacgcatggtggt

SEQ ID NO: 14014 - DNA, 21 bp, synthetic construct
  misc_feature 1..21: note = Description of Artificial Sequence: Synthetic oligonucleotide
  source 1..21: mol_type = other DNA
atgcctacgtcttctcaggtt

SEQ ID NO: 14015 - DNA, 21 bp, synthetic construct
  misc_feature 1..21: note = Description of Artificial Sequence: Synthetic oligonucleotide
  source 1..21: mol_type = other DNA
agaagcggcgaccccatcaaa

SEQ ID NO: 14016 - DNA, 21 bp, synthetic construct
  misc_feature 1..21: note = Description of Artificial Sequence: Synthetic oligonucleotide
  source 1..21: mol_type = other DNA
caggcgggtagtagtaatggt

SEQ ID NO: 14017 - DNA, 21 bp, synthetic construct
  misc_feature 1..21: note = Description of Artificial Sequence: Synthetic oligonucleotide
  source 1..21: mol_type = other DNA
ttcggcagcggcagcgccaac

SEQ ID NO: 14018 - DNA, 21 bp, synthetic construct
  misc_feature 1..21: note = Description of Artificial Sequence: Synthetic oligonucleotide
  source 1..21: mol_type = other DNA
acgtctacgggtactcaggcg

SEQ ID NO: 14019 - DNA, 21 bp, synthetic construct
  misc_feature 1..21: note = Description of Artificial Sequence: Synthetic oligonucleotide
  source 1..21: mol_type = other DNA
aacaaagaccacgccaacgtc

SEQ ID NO: 14020 - DNA, 21 bp, synthetic construct
  misc_feature 1..21: note = Description of Artificial Sequence: Synthetic oligonucleotide
  source 1..21: mol_type = other DNA
gataattctagtatgtcgaag

SEQ ID NO: 14021 - DNA, 21 bp, synthetic construct
  misc_feature 1..21: note = Description of Artificial Sequence: Synthetic oligonucleotide
  source 1..21: mol_type = other DNA
tctcctagtggtggtggtaat

SEQ ID NO: 14022 - DNA, 21 bp, synthetic construct
  misc_feature 1..21: note = Description of Artificial Sequence: Synthetic oligonucleotide
  source 1..21: mol_type = other DNA
aatttggggggtaaggctgtg

SEQ ID NO: 14023 - DNA, 21 bp, synthetic construct
  misc_feature 1..21: note = Description of Artificial Sequence: Synthetic oligonucleotide
  source 1..21: mol_type = other DNA
tcttcgacgaataaggctatg

SEQ ID NO: 14024 - DNA, 21 bp, synthetic construct
  misc_feature 1..21: note = Description of Artificial Sequence: Synthetic oligonucleotide
  source 1..21: mol_type = other DNA
agcaccgacatcaaagcccaa

SEQ ID NO: 14025 - DNA, 21 bp, synthetic construct
  misc_feature 1..21: note = Description of Artificial Sequence: Synthetic oligonucleotide
  source 1..21: mol_type = other DNA
tctgggagtagtaatcatgtt

SEQ ID NO: 14026 - DNA, 21 bp, synthetic construct
  misc_feature 1..21: note = Description of Artificial Sequence: Synthetic oligonucleotide
  source 1..21: mol_type = other DNA
actactgttggttcgaattcg

SEQ ID NO: 14027 - DNA, 21 bp, synthetic construct
  misc_feature 1..21: note = Description of Artificial Sequence: Synthetic oligonucleotide
  source 1..21: mol_type = other DNA
agcgccaaccacagccccacc

SEQ ID NO: 14028 - DNA, 21 bp, synthetic construct
  misc_feature 1..21: note = Description of Artificial Sequence: Synthetic oligonucleotide
  source 1..21: mol_type = other DNA
gtcaccgccaacgccagcagc

SEQ ID NO: 14029 - DNA, 21 bp, synthetic construct
  misc_feature 1..21: note = Description of Artificial Sequence: Synthetic oligonucleotide
  source 1..21: mol_type = other DNA
acccccagcaaaagcagcctc

SEQ ID NO: 14030 - DNA, 21 bp, synthetic construct
  misc_feature 1..21: note = Description of Artificial Sequence: Synthetic oligonucleotide
  source 1..21: mol_type = other DNA
actggggggaggccgtcggag

SEQ ID NO: 14031 - DNA, 21 bp, synthetic construct
  misc_feature 1..21: note = Description of Artificial Sequence: Synthetic oligonucleotide
  source 1..21: mol_type = other DNA
ctggtttcttctgagcagaag

SEQ ID NO: 14032 - DNA, 21 bp, synthetic construct
  misc_feature 1..21: note = Description of Artificial Sequence: Synthetic oligonucleotide
  source 1..21: mol_type = other DNA
atgggcggcgcccaaggcagc

SEQ ID NO: 14033 - DNA, 21 bp, synthetic construct
  misc_feature 1..21: note = Description of Artificial Sequence: Synthetic oligonucleotide
  source 1..21: mol_type = other DNA
aacggttctagacagaatcaa

SEQ ID NO: 14034 - DNA, 21 bp, synthetic construct
  misc_feature 1..21: note = Description of Artificial Sequence: Synthetic oligonucleotide
  source 1..21: mol_type = other DNA
catggtacgggtaagggtgcg

SEQ ID NO: 14035 - DNA, 21 bp, synthetic construct
  misc_feature 1..21: note = Description of Artificial Sequence: Synthetic oligonucleotide
  source 1..21: mol_type = other DNA
gggaattctgctggtcttagt

SEQ ID NO: 14036 - DNA, 21 bp, synthetic construct
  misc_feature 1..21: note = Description of Artificial Sequence: Synthetic oligonucleotide
  source 1..21: mol_type = other DNA
agcggcatccaaaaacccgcc

SEQ ID NO: 14037 - DNA, 21 bp, synthetic construct
  misc_feature 1..21: note = Description of Artificial Sequence: Synthetic oligonucleotide
  source 1..21: mol_type = other DNA
ggcagcaaaggcagccaaaac

SEQ ID NO: 14038 - DNA, 21 bp, synthetic construct
  misc_feature 1..21: note = Description of Artificial Sequence: Synthetic oligonucleotide
  source 1..21: mol_type = other DNA
gctactggtgatccgcgtagg

SEQ ID NO: 14039 - DNA, 21 bp, synthetic construct
  misc_feature 1..21: note = Description of Artificial Sequence: Synthetic oligonucleotide
  source 1..21: mol_type = other DNA
gatgcggcgcgtccgcaggct

SEQ ID NO: 14040 - DNA, 21 bp, synthetic construct
  misc_feature 1..21: note = Description of Artificial Sequence: Synthetic oligonucleotide
  source 1..21: mol_type = other DNA
gaaaacaccagccccagcctc

SEQ ID NO: 14041 - DNA, 21 bp, synthetic construct
  misc_feature 1..21: note = Description of Artificial Sequence: Synthetic oligonucleotide
  source 1..21: mol_type = other DNA
gatggtgataagtctcgtgcg

SEQ ID NO: 14042 - DNA, 21 bp, synthetic construct
  misc_feature 1..21: note = Description of Artificial Sequence: Synthetic oligonucleotide
  source 1..21: mol_type = other DNA
agcgccagcggcgccaccggc

SEQ ID NO: 14043 - DNA, 21 bp, synthetic construct
  misc_feature 1..21: note = Description of Artificial Sequence: Synthetic oligonucleotide
  source 1..21: mol_type = other DNA
ctccccggcaaaaccaacagc

SEQ ID NO: 14044 - DNA, 21 bp, synthetic construct
  misc_feature 1..21: note = Description of Artificial Sequence: Synthetic oligonucleotide
  source 1..21: mol_type = other DNA
gaggtggggcatagtaagggg

SEQ ID NO: 14045 - DNA, 21 bp, synthetic construct
  misc_feature 1..21: note = Description of Artificial Sequence: Synthetic oligonucleotide
  source 1..21: mol_type = other DNA
gccggcgccacccccatgaga

SEQ ID NO: 14046 - DNA, 21 bp, synthetic construct
  misc_feature 1..21: note = Description of Artificial Sequence: Synthetic oligonucleotide
  source 1..21: mol_type = other DNA
atgagaagccaagacaccacc

SEQ ID NO: 14047 - DNA, 21 bp, synthetic construct
  misc_feature 1..21: note = Description of Artificial Sequence: Synthetic oligonucleotide
  source 1..21: mol_type = other DNA
caaagcggccaacccggcaga

SEQ ID NO: 14048 - DNA, 21 bp, synthetic construct
  misc_feature 1..21: note = Description of Artificial Sequence: Synthetic oligonucleotide
  source 1..21: mol_type = other DNA
gatggggttcggagttcgaat

SEQ ID NO: 14049 - DNA, 21 bp, synthetic construct
  misc_feature 1..21: note = Description of Artificial Sequence: Synthetic oligonucleotide
  source 1..21: mol_type = other DNA
accaccacccacaaccccgtc

SEQ ID NO: 14050 - DNA, 21 bp, synthetic construct
  misc_feature 1..21: note = Description of Artificial Sequence: Synthetic oligonucleotide
  source 1..21: mol_type = other DNA
cttccttcttcgccggcgact

SEQ ID NO: 14051 - DNA, 21 bp, synthetic construct
  misc_feature 1..21: note = Description of Artificial Sequence: Synthetic oligonucleotide
  source 1..21: mol_type = other DNA
gatgggtctagtcctcagatt

SEQ ID NO: 14052 - DNA, 21 bp, synthetic construct
  misc_feature 1..21: note = Description of Artificial Sequence: Synthetic oligonucleotide
  source 1..21: mol_type = other DNA
agcgccggcagcaaaaccgcc

SEQ ID NO: 14053 - DNA, 21 bp, synthetic construct
  misc_feature 1..21: note = Description of Artificial Sequence: Synthetic oligonucleotide
  source 1..21: mol_type = other DNA
ggtagtaagactcattcttcg

SEQ ID NO: 14054 - DNA, 21 bp, synthetic construct
  misc_feature 1..21: note = Description of Artificial Sequence: Synthetic oligonucleotide
  source 1..21: mol_type = other DNA
tcggggaatagtgcgaagacg

SEQ ID NO: 14055 - DNA, 21 bp, synthetic construct
  misc_feature 1..21: note = Description of Artificial Sequence: Synthetic oligonucleotide
  source 1..21: mol_type = other DNA
catggtgggtctaagactacg

SEQ ID NO: 14056 - DNA, 21 bp, synthetic construct
  misc_feature 1..21: note = Description of Artificial Sequence: Synthetic oligonucleotide
  source 1..21: mol_type = other DNA
gttccttcggataggtcgagt

SEQ ID NO: 14057 - DNA, 21 bp, synthetic construct
  misc_feature 1..21: note = Description of Artificial Sequence: Synthetic oligonucleotide
  source 1..21: mol_type = other DNA
caacaaggcaaaagcgccctc

SEQ ID NO: 14058 - DNA, 21 bp, synthetic construct
  misc_feature 1..21: note = Description of Artificial Sequence: Synthetic oligonucleotide
  source 1..21: mol_type = other DNA
atgcatgatggtaagtcggtt

SEQ ID NO: 14059 - DNA, 21 bp, synthetic construct
  misc_feature 1..21: note = Description of Artificial Sequence: Synthetic oligonucleotide
  source 1..21: mol_type = other DNA
gattctgctggtaatcgtctt

SEQ ID NO: 14060 - DNA, 21 bp, synthetic construct
  misc_feature 1..21: note = Description of Artificial Sequence: Synthetic oligonucleotide
  source 1..21: mol_type = other DNA
gtgagtgggtctagtcatgct

SEQ ID NO: 14061 - DNA, 21 bp, synthetic construct
  misc_feature 1..21: note = Description of Artificial Sequence: Synthetic oligonucleotide
  source 1..21: mol_type = other DNA
agttctgatcggtctcctgtt

SEQ ID NO: 14062 - DNA, 21 bp, synthetic construct
  misc_feature 1..21: note = Description of Artificial Sequence: Synthetic oligonucleotide
  source 1..21: mol_type = other DNA
gggaatgctaaggcgccgagt

SEQ ID NO: 14063 - DNA, 21 bp, synthetic construct
  misc_feature 1..21: note = Description of Artificial Sequence: Synthetic oligonucleotide
  source 1..21: mol_type = other DNA
ggtactgctggttcgaggaat

SEQ ID NO: 14064 - DNA, 21 bp, synthetic construct
  misc_feature 1..21: note = Description of Artificial Sequence: Synthetic oligonucleotide
  source 1..21: mol_type = other DNA
gtcagcgacaaacccgccatc

SEQ ID NO: 14065 - DNA, 21 bp, synthetic construct
  misc_feature 1..21: note = Description of Artificial Sequence: Synthetic oligonucleotide
  source 1..21: mol_type = other DNA
ttgcgtggtgcgtcgtctgag

SEQ ID NO: 14066 - DNA, 21 bp, synthetic construct
  misc_feature 1..21: note = Description of Artificial Sequence: Synthetic oligonucleotide
  source 1..21: mol_type = other DNA
gaaagcagcggcagcatgaga

SEQ ID NO: 14067 - DNA, 21 bp, synthetic construct
  misc_feature 1..21: note = Description of Artificial Sequence: Synthetic oligonucleotide
  source 1..21: mol_type = other DNA
ggtagtactaaggttacgcag

SEQ ID NO: 14068 - DNA, 21 bp, synthetic construct
  misc_feature 1..21: note = Description of Artificial Sequence: Synthetic oligonucleotide
  source 1..21: mol_type = other DNA
agtggtgctaaggcttctggg

SEQ ID NO: 14069 - DNA, 21 bp, synthetic construct
  misc_feature 1..21: note = Description of Artificial Sequence: Synthetic oligonucleotide
  source 1..21: mol_type = other DNA
ggcagagacacccacaacaaa

SEQ ID NO: 14070 - DNA, 21 bp, synthetic construct
  misc_feature 1..21: note = Description of Artificial Sequence: Synthetic oligonucleotide
  source 1..21: mol_type = other DNA
tcgggtacgcctaatgggcat

SEQ ID NO: 14071 - DNA, 21 bp, synthetic construct
  misc_feature 1..21: note = Description of Artificial Sequence: Synthetic oligonucleotide
  source 1..21: mol_type = other DNA
ggcagccacagccaaaaaggc

SEQ ID NO: 14072 - DNA, 21 bp, synthetic construct
  misc_feature 1..21: note = Description of Artificial Sequence: Synthetic oligonucleotide
  source 1..21: mol_type = other DNA
tctaatggtgttcgttcttcg

SEQ ID NO: 14073 - DNA, 21 bp, synthetic construct
  misc_feature 1..21: note = Description of Artificial Sequence: Synthetic oligonucleotide
  source 1..21: mol_type = other DNA
gggcgtggttctggtgataag

SEQ ID NO: 14074 - DNA, 21 bp, synthetic construct
  misc_feature 1..21: note = Description of Artificial Sequence: Synthetic oligonucleotide
  source 1..21: mol_type = other DNA
agtagtgggaattcgcggtcg

SEQ ID NO: 14075 - DNA, 21 bp, synthetic construct
  misc_feature 1..21: note = Description of Artificial Sequence: Synthetic oligonucleotide
  source 1..21: mol_type = other DNA
gtccccgacaaaagcagcaaa

SEQ ID NO: 14076 - DNA, 21 bp, synthetic construct
  misc_feature 1..21: note = Description of Artificial Sequence: Synthetic oligonucleotide
  source 1..21: mol_type = other DNA
attccgtctactaagtctcag

SEQ ID NO: 14077 - DNA, 21 bp, synthetic construct
  misc_feature 1..21: note = Description of Artificial Sequence: Synthetic oligonucleotide
  source 1..21: mol_type = other DNA
agaaacggcaaagaaaacagc

SEQ ID NO: 14078 - DNA, 21 bp, synthetic construct
  misc_feature 1..21: note = Description of Artificial Sequence: Synthetic oligonucleotide
  source 1..21: mol_type = other DNA
caaatccaagcccccgccagc

SEQ ID NO: 14079 - DNA, 21 bp, synthetic construct
  misc_feature 1..21: note = Description of Artificial Sequence: Synthetic oligonucleotide
  source 1..21: mol_type = other DNA
ggttcggtgaaggtggagagt

SEQ ID NO: 14080 - DNA, 21 bp, synthetic construct
  misc_feature 1..21: note = Description of Artificial Sequence: Synthetic oligonucleotide
  source 1..21: mol_type = other DNA
acccccaccggcgccagaaac

SEQ ID NO: 14081 - DNA, 21 bp, synthetic construct
  misc_feature 1..21: note = Description of Artificial Sequence: Synthetic oligonucleotide
  source 1..21: mol_type = other DNA
gataatcagggtgggcgtggt

SEQ ID NO: 14082 - DNA, 21 bp, synthetic construct
  misc_feature 1..21: note = Description of Artificial Sequence: Synthetic oligonucleotide
  source 1..21: mol_type = other DNA
ggcaccagccccagcgacaga

SEQ ID NO: 14083 - DNA, 21 bp, synthetic construct
  misc_feature 1..21: note = Description of Artificial Sequence: Synthetic oligonucleotide
  source 1..21: mol_type = other DNA
gcgtcggatcagacgggtaag

SEQ ID NO: 14084 - DNA, 21 bp, synthetic construct
  misc_feature 1..21: note = Description of Artificial Sequence: Synthetic oligonucleotide
  source 1..21: mol_type = other DNA
gtcacccaaagccacagcacc

SEQ ID NO: 14085 - DNA, 21 bp, synthetic construct
  misc_feature 1..21: note = Description of Artificial Sequence: Synthetic oligonucleotide
  source 1..21: mol_type = other DNA
agccccgacaccagacccgtc

SEQ ID NO: 14086 - DNA, 21 bp, synthetic construct
  misc_feature 1..21: note = Description of Artificial Sequence: Synthetic oligonucleotide
  source 1..21: mol_type = other DNA
ggcagcggcaacagcaccctc

SEQ ID NO: 14087 - DNA, 21 bp, synthetic construct
  misc_feature 1..21: note = Description of Artificial Sequence: Synthetic oligonucleotide
  source 1..21: mol_type = other DNA
aatggtggtagtaagccgcct

SEQ ID NO: 14088 - DNA, 21 bp, synthetic construct
  misc_feature 1..21: note = Description of Artificial Sequence: Synthetic oligonucleotide
  source 1..21: mol_type = other DNA
atgggttctaatgagcagagg

SEQ ID NO: 14089 - DNA, 21 bp, synthetic construct
  misc_feature 1..21: note = Description of Artificial Sequence: Synthetic oligonucleotide
  source 1..21: mol_type = other DNA
agcagcaccaccaccaacgtc

SEQ ID NO: 14090 - DNA, 21 bp, synthetic construct
  misc_feature 1..21: note = Description of Artificial Sequence: Synthetic oligonucleotide
  source 1..21: mol_type = other DNA
ggcagcaacgcccccatcaaa

SEQ ID NO: 14091 - DNA, 21 bp, synthetic construct
  misc_feature 1..21: note = Description of Artificial Sequence: Synthetic oligonucleotide
  source 1..21: mol_type = other DNA
actcctagtaagacttctact

SEQ ID NO: 14092 - DNA, 21 bp, synthetic construct
  misc_feature 1..21: note = Description of Artificial Sequence: Synthetic oligonucleotide
  source 1..21: mol_type = other DNA
agtactagtaggactaatact

SEQ ID NO: 14093 - DNA, 21 bp, synthetic construct
  misc_feature 1..21: note = Description of Artificial Sequence: Synthetic oligonucleotide
  source 1..21: mol_type = other DNA
caagtcagcgcccccagagaa

SEQ ID NO: 14094 - DNA, 21 bp, synthetic construct
  misc_feature 1..21: note = Description of Artificial Sequence: Synthetic oligonucleotide
  source 1..21: mol_type = other DNA
gacatggccagcaaacccgcc

SEQ ID NO: 14095 - DNA, 21 bp, synthetic construct
  misc_feature 1..21: note = Description of Artificial Sequence: Synthetic oligonucleotide
  source 1..21: mol_type = other DNA
ctcaaccaaaaaagcgtcgcc

SEQ ID NO: 14096 - DNA, 21 bp, synthetic construct
  misc_feature 1..21: note = Description of Artificial Sequence: Synthetic oligonucleotide
  source 1..21: mol_type = other DNA
aacgccggcgcccacgccggc

SEQ ID NO: 14097 - DNA, 21 bp, synthetic construct
  misc_feature 1..21: note = Description of Artificial Sequence: Synthetic oligonucleotide
  source 1..21: mol_type = other DNA
accagcggcgacagcaacaga

SEQ ID NO: 14098 - DNA, 21 bp, synthetic construct
  misc_feature 1..21: note = Description of Artificial Sequence: Synthetic oligonucleotide
  source 1..21: mol_type = other DNA
agcaccaccggcagcagaagc

SEQ ID NO: 14099 - DNA, 21 bp, synthetic construct
  misc_feature 1..21: note = Description of Artificial Sequence: Synthetic oligonucleotide
  source 1..21: mol_type = other DNA
agtattggtaatccttctact

SEQ ID NO: 14100 - DNA, 21 bp, synthetic construct
  misc_feature 1..21: note = Description of Artificial Sequence: Synthetic oligonucleotide
  source 1..21: mol_type = other DNA
attgggactactcctgcgagg

SEQ ID NO: 14101 - DNA, 21 bp, synthetic construct
  misc_feature 1..21: note = Description of Artificial Sequence: Synthetic oligonucleotide
  source 1..21: mol_type = other DNA
gggactaataagacggtttct

SEQ ID NO: 14102 - DNA, 21 bp, synthetic construct
  misc_feature 1..21: note = Description of Artificial Sequence: Synthetic oligonucleotide
  source 1..21: mol_type = other DNA
gtcaccggcagccccagcaga

SEQ ID NO: 14103 - DNA, 21 bp, synthetic construct
  misc_feature 1..21: note = Description of Artificial Sequence: Synthetic oligonucleotide
  source 1..21: mol_type = other DNA
gttcgggattctaagtctacg

SEQ ID NO: 14104 - DNA, 21 bp, synthetic construct
  misc_feature 1..21: note = Description of Artificial Sequence: Synthetic oligonucleotide
  source 1..21: mol_type = other DNA
tctcagaaggcgtcggttcag

SEQ ID NO: 14105 - DNA, 21 bp, synthetic construct
  misc_feature 1..21: note = Description of Artificial Sequence: Synthetic oligonucleotide
  source 1..21: mol_type = other DNA
acgagggctcagccttcttct

SEQ ID NO: 14106 - DNA, 21 bp, synthetic construct
  misc_feature 1..21: note = Description of Artificial Sequence: Synthetic oligonucleotide
  source 1..21: mol_type = other DNA
accaccaaacccaacagcgcc

SEQ ID NO: 14107 - DNA, 21 bp, synthetic construct
  misc_feature 1..21: note = Description of Artificial Sequence: Synthetic oligonucleotide
  source 1..21: mol_type = other DNA
gacaaccccatccccgtcaaa

SEQ ID NO: 14108 - DNA, 21 bp, synthetic construct
  misc_feature 1..21: note = Description of Artificial Sequence: Synthetic oligonucleotide
  source 1..21: mol_type = other DNA
ggtaagacggatcgtaatagt

SEQ ID NO: 14109 - DNA, 21 bp, synthetic construct
  misc_feature 1..21: note = Description of Artificial Sequence: Synthetic oligonucleotide
  source 1..21: mol_type = other DNA
aatagtacggggaagctgggg

SEQ ID NO: 14110 - DNA, 21 bp, synthetic construct
  misc_feature 1..21: note = Description of Artificial Sequence: Synthetic oligonucleotide
  source 1..21: mol_type = other DNA
accgtcagcagcaccaaccac

SEQ ID NO: 14111 - DNA, 21 bp, synthetic construct
  misc_feature 1..21: note = Description of Artificial Sequence: Synthetic oligonucleotide
  source 1..21: mol_type = other DNA
agcagcagcaccggcatgcaa

SEQ ID NO: 14112 - DNA, 21 bp, synthetic construct
  misc_feature 1..21: note = Description of Artificial Sequence: Synthetic oligonucleotide
  source 1..21: mol_type = other DNA
gcgtctaatgtgccgaataag

SEQ ID NO: 14113 - DNA, 21 bp, synthetic construct
  misc_feature 1..21: note = Description of Artificial Sequence: Synthetic oligonucleotide
  source 1..21: mol_type = other DNA
gcttctgctagtcctactctt

SEQ ID NO: 14114 - DNA, 21 bp, synthetic construct
  misc_feature 1..21: note = Description of Artificial Sequence: Synthetic oligonucleotide
  source 1..21: mol_type = other DNA
cacaccagcgacaaaaccgtc

SEQ ID NO: 14115 - DNA, 21 bp, synthetic construct
  misc_feature 1..21: note = Description of Artificial Sequence: Synthetic oligonucleotide
  source 1..21: mol_type = other DNA
tctagtactaagcctactagt

SEQ ID NO: 14116 - DNA, 21 bp, synthetic construct
  misc_feature 1..21: note = Description of Artificial Sequence: Synthetic oligonucleotide
  source 1..21: mol_type = other DNA
aacagaaaaaacgacacccaa

SEQ ID NO: 14117 - DNA, 21 bp, synthetic construct
  misc_feature 1..21: note = Description of Artificial Sequence: Synthetic oligonucleotide
  source 1..21: mol_type = other DNA
agcgtccccaccggcaaaggc

SEQ ID NO: 14118 - DNA, 21 bp, synthetic construct
  misc_feature 1..21: note = Description of Artificial Sequence: Synthetic oligonucleotide
  source 1..21: mol_type = other DNA
gagccttctaagagtatgatt

SEQ ID NO: 14119 - DNA, 21 bp, synthetic construct
  misc_feature 1..21: note = Description of Artificial Sequence: Synthetic oligonucleotide
  source 1..21: mol_type = other DNA
gcccaagccaccaaacccagc

SEQ ID NO: 14120 - DNA, 21 bp, synthetic construct
  misc_feature 1..21: note = Description of Artificial Sequence: Synthetic oligonucleotide
  source 1..21: mol_type = other DNA
aatactggtaagtctcagacg

SEQ ID NO: 14121 - DNA, 21 bp, synthetic construct
  misc_feature 1..21: note = Description of Artificial Sequence: Synthetic oligonucleotide
  source 1..21: mol_type = other DNA
agaggcaccaaaccccaagaa

SEQ ID NO: 14122 - DNA, 21 bp, synthetic construct
  misc_feature 1..21: note = Description of Artificial Sequence: Synthetic oligonucleotide
  source 1..21: mol_type = other DNA
agcaaagaaaacaaagccagc

SEQ ID NO: 14123 - DNA, 21 bp, synthetic construct
  misc_feature 1..21: note = Description of Artificial Sequence: Synthetic oligonucleotide
  source 1..21: mol_type = other DNA
cagcaggctaaggggaatgcg

SEQ ID NO: 14124 - DNA, 21 bp, synthetic construct
  misc_feature 1..21: note = Description of Artificial Sequence: Synthetic oligonucleotide
  source 1..21: mol_type = other DNA
aaaggcaacagcaccgtcaac

SEQ ID NO: 14125 - DNA, 21 bp, synthetic construct
  misc_feature 1..21: note = Description of Artificial Sequence: Synthetic oligonucleotide
  source 1..21: mol_type = other DNA
caaggcagcagcggcctcggc

SEQ ID NO: 14126 - DNA, 21 bp, synthetic construct
  misc_feature 1..21: note = Description of Artificial Sequence: Synthetic oligonucleotide
  source 1..21: mol_type = other DNA
gacagaagccccagcaacgtc

SEQ ID NO: 14127 - DNA, 21 bp, synthetic construct
  misc_feature 1..21: note = Description of Artificial Sequence: Synthetic oligonucleotide
  source 1..21: mol_type = other DNA
gccggcgacagcaaagccaga

SEQ ID NO: 14128 - DNA, 21 bp, synthetic construct
  misc_feature 1..21: note = Description of Artificial Sequence: Synthetic oligonucleotide
  source 1..21: mol_type = other DNA
actccttcgaaggataaggcg

SEQ ID NO: 14129 - DNA, 21 bp, synthetic construct
  misc_feature 1..21: note = Description of Artificial Sequence: Synthetic oligonucleotide
  source 1..21: mol_type = other DNA
aaacaaggccccagcgccgaa

SEQ ID NO: 14130 - DNA, 21 bp, synthetic construct
  misc_feature 1..21: note = Description of Artificial Sequence: Synthetic oligonucleotide
  source 1..21: mol_type = other DNA
tcgcggggtgctcctggtacg

SEQ ID NO: 14131 - DNA, 21 bp, synthetic construct
  misc_feature 1..21: note = Description of Artificial Sequence: Synthetic oligonucleotide
  source 1..21: mol_type = other DNA
ggcagcgcccaaagccccaga

SEQ ID NO: 14132 - DNA, 21 bp, synthetic construct
  misc_feature 1..21: note = Description of Artificial Sequence: Synthetic oligonucleotide
  source 1..21: mol_type = other DNA
accaacagaaaccccaacctc

SEQ ID NO: 14133 - DNA, 21 bp, synthetic construct
  misc_feature 1..21: note = Description of Artificial Sequence: Synthetic oligonucleotide
  source 1..21: mol_type = other DNA
atcgacagcaaacccaccaac

SEQ ID NO: 14134 - DNA, 21 bp, synthetic construct
  misc_feature 1..21: note = Description of Artificial Sequence: Synthetic oligonucleotide
  source 1..21: mol_type = other DNA
gtcaccggcggcaccaaaggc

SEQ ID NO: 14135 - DNA, 21 bp, synthetic construct
  misc_feature 1..21: note = Description of Artificial Sequence: Synthetic oligonucleotide
  source 1..21: mol_type = other DNA
accaccaacacccccctcaaa

SEQ ID NO: 14136 - DNA, 21 bp, synthetic construct
  misc_feature 1..21: note = Description of Artificial Sequence: Synthetic oligonucleotide
  source 1..21: mol_type = other DNA
agccacgaaggcaaaagcacc

SEQ ID NO: 14137 - DNA, 21 bp, synthetic construct
  misc_feature 1..21: note = Description of Artificial Sequence: Synthetic oligonucleotide
  source 1..21: mol_type = other DNA
atggacaaacccagccaaggc

SEQ ID NO: 14138 - DNA, 21 bp, synthetic construct
  misc_feature 1..21: note = Description of Artificial Sequence: Synthetic oligonucleotide
  source 1..21: mol_type = other DNA
acccaacaagccaaaaccgaa

SEQ ID NO: 14139 - DNA, 21 bp, synthetic construct
  misc_feature 1..21: note = Description of Artificial Sequence: Synthetic oligonucleotide
  source 1..21: mol_type = other DNA
ggcgacaacaaagtcctcaaa

SEQ ID NO: 14140 - DNA, 21 bp, synthetic construct
  misc_feature 1..21: note = Description of Artificial Sequence: Synthetic oligonucleotide
  source 1..21: mol_type = other DNA
acgcggagtaatccgcaggcg

SEQ ID NO: 14141 - DNA, 21 bp, synthetic construct
  misc_feature 1..21: note = Description of Artificial Sequence: Synthetic oligonucleotide
  source 1..21: mol_type = other DNA
agcctcagcagcggcaccaaa

SEQ ID NO: 14142 - DNA, 21 bp, synthetic construct
  misc_feature 1..21: note = Description of Artificial Sequence: Synthetic oligonucleotide
  source 1..21: mol_type = other DNA
atgagcggcggccccaaaaac

SEQ ID NO: 14143 - DNA, 21 bp, synthetic construct
  misc_feature 1..21: note = Description of Artificial Sequence: Synthetic oligonucleotide
  source 1..21: mol_type = other DNA
gttgggactggtcagcagggt

SEQ ID NO: 14144 - DNA, 21 bp, synthetic construct
  misc_feature 1..21: note = Description of Artificial Sequence: Synthetic oligonucleotide
  source 1..21: mol_type = other DNA
gctgagtctgggcgtaatacg

SEQ ID NO: 14145 - DNA, 21 bp, synthetic construct
  misc_feature 1..21: note = Description of Artificial Sequence: Synthetic oligonucleotide
  source 1..21: mol_type = other DNA
accatcaacaaacaagccacc

SEQ ID NO: 14146 - DNA, 21 bp, synthetic construct
  misc_feature 1..21: note = Description of Artificial Sequence: Synthetic oligonucleotide
  source 1..21: mol_type = other DNA
gccaaaagcagcggcagcggc

SEQ ID NO: 14147 - DNA, 21 bp, synthetic construct
  misc_feature 1..21: note = Description of Artificial Sequence: Synthetic oligonucleotide
  source 1..21: mol_type = other DNA
aacaccagcaaagccagcgcc

SEQ ID NO: 14148 - DNA, 21 bp, synthetic construct
  misc_feature 1..21: note = Description of Artificial Sequence: Synthetic oligonucleotide
  source 1..21: mol_type = other DNA
agcggcaaacccgccagcgcc

SEQ ID NO: 14149 - DNA, 21 bp, synthetic construct
  misc_feature 1..21: note = Description of Artificial Sequence: Synthetic oligonucleotide
  source 1..21: mol_type = other DNA
tcgatgacgaagagtaatgtt

SEQ ID NO: 14150 - DNA, 21 bp, synthetic construct
  misc_feature 1..21: note = Description of Artificial Sequence: Synthetic oligonucleotide
  source 1..21: mol_type = other DNA
agcaccagaaccagcagcgaa

SEQ ID NO: 14151 - DNA, 21 bp, synthetic construct
  misc_feature 1..21: note = Description of Artificial Sequence: Synthetic oligonucleotide
  source 1..21: mol_type = other DNA
agacaaggcagcgacgccaga

SEQ ID NO: 14152 - DNA, 21 bp, synthetic construct
  misc_feature 1..21: note = Description of Artificial Sequence: Synthetic oligonucleotide
  source 1..21: mol_type = other DNA
cagaaggctccttctgcttcg

SEQ ID NO: 14153 - DNA, 21 bp, synthetic construct
  misc_feature 1..21: note = Description of Artificial Sequence: Synthetic oligonucleotide
  source 1..21: mol_type = other DNA
ggcggcagccccgccgccagc

SEQ ID NO: 14154 - DNA, 21 bp, synthetic construct
  misc_feature 1..21: note = Description of Artificial Sequence: Synthetic oligonucleotide
  source 1..21: mol_type = other DNA
gtcggcagcagcagcagcatg

SEQ ID NO: 14155 - DNA, 21 bp, synthetic construct
  misc_feature 1..21: note = Description of Artificial Sequence: Synthetic oligonucleotide
  source 1..21: mol_type = other DNA
agcctcagcgtccccaaagac

SEQ ID NO: 14156 - DNA, 21 bp, synthetic construct
  misc_feature 1..21: note = Description of Artificial Sequence: Synthetic oligonucleotide
  source 1..21: mol_type = other DNA
atgtcttctaagcctgctacg

SEQ ID NO: 14157 - DNA, 21 bp, synthetic construct
  misc_feature 1..21: note = Description of Artificial Sequence: Synthetic oligonucleotide
  source 1..21: mol_type = other DNA
agtgtgatgcagaaggctagt

SEQ ID NO: 14158 - DNA, 21 bp, synthetic construct
  misc_feature 1..21: note = Description of Artificial Sequence: Synthetic oligonucleotide
  source 1..21: mol_type = other DNA
actgggtctactgcgactctg

SEQ ID NO: 14159 - DNA, 21 bp, synthetic construct
  misc_feature 1..21: note = Description of Artificial Sequence: Synthetic oligonucleotide
  source 1..21: mol_type = other DNA
tcgccgcagaagaataatggt

SEQ ID NO: 14160 - DNA, 21 bp, synthetic construct
  misc_feature 1..21: note = Description of Artificial Sequence: Synthetic oligonucleotide
  source 1..21: mol_type = other DNA
gggccggagcgtcctgcgggt

SEQ ID NO: 14161 - DNA, 21 bp, synthetic construct
  misc_feature 1..21: note = Description of Artificial Sequence: Synthetic oligonucleotide
  source 1..21: mol_type = other DNA
aaacccagagaaagcagcggc

SEQ ID NO: 14162 - DNA, 21 bp, synthetic construct
  misc_feature 1..21: note = Description of Artificial Sequence: Synthetic oligonucleotide
  source 1..21: mol_type = other DNA
catgctgatcgtcaggctagt

SEQ ID NO: 14163 - DNA, 21 bp, synthetic construct
  misc_feature 1..21: note = Description of Artificial Sequence: Synthetic oligonucleotide
  source 1..21: mol_type = other DNA
gccagcggcagcggccaaagc

SEQ ID NO: 14164 - DNA, 21 bp, synthetic construct
  misc_feature 1..21: note = Description of Artificial Sequence: Synthetic oligonucleotide
  source 1..21: mol_type = other DNA
tcgagtactaataatcctaag

SEQ ID NO: 14165 - DNA, 21 bp, synthetic construct
  misc_feature 1..21: note = Description of Artificial Sequence: Synthetic oligonucleotide
  source 1..21: mol_type = other DNA
gctggtactccttctcctcgg

SEQ ID NO: 14166 - DNA, 21 bp, synthetic construct
  misc_feature 1..21: note = Description of Artificial Sequence: Synthetic oligonucleotide
  source 1..21: mol_type = other DNA
agtggtaggccggatgtgtcg

SEQ ID NO: 14167 - DNA, 21 bp, synthetic construct
  misc_feature 1..21: note = Description of Artificial Sequence: Synthetic oligonucleotide
  source 1..21: mol_type = other DNA
cacaccagccccggcaaaaac

SEQ ID NO: 14168 - DNA, 21 bp, synthetic construct
  misc_feature 1..21: note = Description of Artificial Sequence: Synthetic oligonucleotide
  source 1..21: mol_type = other DNA
ggttctgctaagaattctgcg

SEQ ID NO: 14169 - DNA, 21 bp, synthetic construct
  misc_feature 1..21: note = Description of Artificial Sequence: Synthetic oligonucleotide
  source 1..21: mol_type = other DNA
gcccaagccagccaaaccaaa

SEQ ID NO: 14170 - DNA, 21 bp, synthetic construct
  misc_feature 1..21: note = Description of Artificial Sequence: Synthetic oligonucleotide
  source 1..21: mol_type = other DNA
ggcagccaaaaaccctacagc

SEQ ID NO: 14171 - DNA, 21 bp, synthetic construct
  misc_feature 1..21: note = Description of Artificial Sequence: Synthetic oligonucleotide
  source 1..21: mol_type = other DNA
gtcagcagcaccacccaaacc

SEQ ID NO: 14172 - DNA, 21 bp, synthetic construct
  misc_feature 1..21: note = Description of Artificial Sequence: Synthetic oligonucleotide
  source 1..21: mol_type = other DNA
tctgtgacttctcaggggaag

SEQ ID NO: 14173 - DNA, 21 bp, synthetic construct
  misc_feature 1..21: note = Description of Artificial Sequence: Synthetic oligonucleotide
  source 1..21: mol_type = other DNA
agcgtcgccagcggcaacaaa

SEQ ID NO: 14174 - DNA, 21 bp, synthetic construct
  misc_feature 1..21: note = Description of Artificial Sequence: Synthetic oligonucleotide
  source 1..21: mol_type = other DNA
tctggtgctcagcagccgcgg

SEQ ID NO: 14175 - DNA, 21 bp, synthetic construct
  misc_feature 1..21: note = Description of Artificial Sequence: Synthetic oligonucleotide
  source 1..21: mol_type = other DNA
cattctaagcctagtactatg

SEQ ID NO: 14176 - DNA, 21 bp, synthetic construct
  misc_feature 1..21: note = Description of Artificial Sequence: Synthetic oligonucleotide
  source 1..21: mol_type = other DNA
aacggcagaggcggcacccaa

SEQ ID NO: 14177 - DNA, 21 bp, synthetic construct
  misc_feature 1..21: note = Description of Artificial Sequence: Synthetic oligonucleotide
  source 1..21: mol_type = other DNA
ctgcctggtaaggcgatgact

SEQ ID NO: 14178 - DNA, 21 bp, synthetic construct
  misc_feature 1..21: note = Description of Artificial Sequence: Synthetic oligonucleotide
  source 1..21: mol_type = other DNA
caaaccggcgaaatcggcaaa

SEQ ID NO: 14179 - DNA, 21 bp, synthetic construct
  misc_feature 1..21: note = Description of Artificial Sequence: Synthetic oligonucleotide
  source 1..21: mol_type = other DNA
agcagcaaccacaccagcagc

SEQ ID NO: 14180 - DNA, 21 bp, synthetic construct
  misc_feature 1..21: note = Description of Artificial Sequence: Synthetic oligonucleotide
  source 1..21: mol_type = other DNA
cggcaggagtcgaagagtatg

SEQ ID NO: 14181 - DNA, 21 bp, synthetic construct
  misc_feature 1..21: note = Description of Artificial Sequence: Synthetic oligonucleotide
  source 1..21: mol_type = other DNA
gttggtcagggtaagaatgcg

SEQ ID NO: 14182 - DNA, 21 bp, synthetic construct
  misc_feature 1..21: note = Description of Artificial Sequence: Synthetic oligonucleotide
  source 1..21: mol_type = other DNA
acccccggcagcaacggcaga

SEQ ID NO: 14183 - DNA, 21 bp, synthetic construct
  misc_feature 1..21: note = Description of Artificial Sequence: Synthetic oligonucleotide
  source 1..21: mol_type = other DNA
acgactgggacggataagttg

SEQ ID NO: 14184 - DNA, 21 bp, synthetic construct
  misc_feature 1..21: note = Description of Artificial Sequence: Synthetic oligonucleotide
  source 1..21: mol_type = other DNA
gaacccagcgccacccaaaga

SEQ ID NO: 14185 - DNA, 21 bp, synthetic construct
  misc_feature 1..21: note = Description of Artificial Sequence: Synthetic oligonucleotide
  source 1..21: mol_type = other DNA
aatgttggtacggcttctaag

SEQ ID NO: 14186 - DNA, 21 bp, synthetic construct
  misc_feature 1..21: note = Description of Artificial Sequence: Synthetic oligonucleotide
  source 1..21: mol_type = other DNA
ggtgggggtactgcgcatatg

SEQ ID NO: 14187 - DNA, 21 bp, synthetic construct
  misc_feature 1..21: note = Description of Artificial Sequence: Synthetic oligonucleotide
  source 1..21: mol_type = other DNA
ggtcagtctactcatcatcag

SEQ ID NO: 14188 - DNA, 21 bp, synthetic construct
  misc_feature 1..21: note = Description of Artificial Sequence: Synthetic oligonucleotide
  source 1..21: mol_type = other DNA
aaggctaatcaggggtctggg

SEQ ID NO: 14189 - DNA, 21 bp, synthetic construct
  misc_feature 1..21: note = Description of Artificial Sequence: Synthetic oligonucleotide
  source 1..21: mol_type = other DNA
ggcagaaccaacatcacccaa

SEQ ID NO: 14190 - DNA, 21 bp, synthetic construct
  misc_feature 1..21: note = Description of Artificial Sequence: Synthetic oligonucleotide
  source 1..21: mol_type = other DNA
agcaccagcagcaaaatgggc

SEQ ID NO: 14191 - DNA, 21 bp, synthetic construct
  misc_feature 1..21: note = Description of Artificial Sequence: Synthetic oligonucleotide
  source 1..21: mol_type = other DNA
gtccaaaccggcagccacagc

SEQ ID NO: 14192 - DNA, 21 bp, synthetic construct
  misc_feature 1..21: note = Description of Artificial Sequence: Synthetic oligonucleotide
  source 1..21: mol_type = other DNA
agtgcgagtccgacgagtggt

SEQ ID NO: 14193 - DNA, 21 bp, synthetic construct
  misc_feature 1..21: note = Description of Artificial Sequence: Synthetic oligonucleotide
  source 1..21: mol_type = other DNA
gtcagagacaaaagcaccgcc

SEQ ID NO: 14194 - DNA, 21 bp, synthetic construct
  misc_feature 1..21: note = Description of Artificial Sequence: Synthetic oligonucleotide
  source 1..21: mol_type = other DNA
caaagcagcggcagcagaagc

SEQ ID NO: 14195 - DNA, 21 bp, synthetic construct
  misc_feature 1..21: note = Description of Artificial Sequence: Synthetic oligonucleotide
  source 1..21: mol_type = other DNA
aatgctcagagtccgattcgg

SEQ ID NO: 14196 - DNA, 21 bp, synthetic construct
  misc_feature 1..21: note = Description of Artificial Sequence: Synthetic oligonucleotide
  source 1..21: mol_type = other DNA
ggcgccagcgtcggcagccac

SEQ ID NO: 14197 - DNA, 21 bp, synthetic construct
  misc_feature 1..21: note = Description of Artificial Sequence: Synthetic oligonucleotide
  source 1..21: mol_type = other DNA
aaaggcgacaaagtcttcctc

SEQ ID NO: 14198 - DNA, 21 bp, synthetic construct
  misc_feature 1..21: note = Description of Artificial Sequence: Synthetic oligonucleotide
  source 1..21: mol_type = other DNA
acggggcatgcgcctaatgtg

SEQ ID NO: 14199 - DNA, 21 bp, synthetic construct
  misc_feature 1..21: note = Description of Artificial Sequence: Synthetic oligonucleotide
  source 1..21: mol_type = other DNA
aatgctctgggtgcggggggg

SEQ ID NO: 14200 - DNA, 21 bp, synthetic construct
  misc_feature 1..21: note = Description of Artificial Sequence: Synthetic oligonucleotide
  source 1..21: mol_type = other DNA
agcgtcagcaaacccatcagc

SEQ ID NO: 14201 - DNA, 21 bp, synthetic construct
  misc_feature 1..21: note = Description of Artificial Sequence: Synthetic oligonucleotide
  source 1..21: mol_type = other DNA
tacaacggcagcaaactccaa

SEQ ID NO: 14202 - DNA, 21 bp, synthetic construct
  misc_feature 1..21: note = Description of Artificial Sequence: Synthetic oligonucleotide
  source 1..21: mol_type = other DNA
gaggctaatactaagcctcat

SEQ ID NO: 14203 - DNA, 21 bp, synthetic construct
  misc_feature 1..21: note = Description of Artificial Sequence: Synthetic oligonucleotide
  source 1..21: mol_type = other DNA
aatacgaatggtgctgggcgt

SEQ ID NO: 14204 - DNA, 21 bp, synthetic construct
  misc_feature 1..21: note = Description of Artificial Sequence: Synthetic oligonucleotide
  source 1..21: mol_type = other DNA
gtcagcgccaaccccccccaa

SEQ ID NO: 14205 - DNA, 21 bp, synthetic construct
  misc_feature 1..21: note = Description of Artificial Sequence: Synthetic oligonucleotide
  source 1..21: mol_type = other DNA
aatactagtggtaagggtgtt

SEQ ID NO: 14206 - DNA, 21 bp, synthetic construct
  misc_feature 1..21: note = Description of Artificial Sequence: Synthetic oligonucleotide
  source 1..21: mol_type = other DNA
agtagtactagtgttatgaag

SEQ ID NO: 14207 - DNA, 21 bp, synthetic construct
  misc_feature 1..21: note = Description of Artificial Sequence: Synthetic oligonucleotide
  source 1..21: mol_type = other DNA
gacagaagcaaagccagcacc

SEQ ID NO: 14208 - DNA, 21 bp, synthetic construct
  misc_feature 1..21: note = Description of Artificial Sequence: Synthetic oligonucleotide
  source 1..21: mol_type = other DNA
agaagcaaagaaagccaagtc

SEQ ID NO: 14209 - DNA, 21 bp, synthetic construct
  misc_feature 1..21: note = Description of Artificial Sequence: Synthetic oligonucleotide
  source 1..21: mol_type = other DNA
agttctgggcagtctatttcg

SEQ ID NO: 14210 - DNA, 21 bp, synthetic construct
  misc_feature 1..21: note = Description of Artificial Sequence: Synthetic oligonucleotide
  source 1..21: mol_type = other DNA
acgcctagtacgtcgggtagg

SEQ ID NO: 14211 - DNA, 21 bp, synthetic construct
  misc_feature 1..21: note = Description of Artificial Sequence: Synthetic oligonucleotide
  source 1..21: mol_type = other DNA
gaccccaccagcggcaaaggc

SEQ ID NO: 14212 - DNA, 21 bp, synthetic construct
  misc_feature 1..21: note = Description of Artificial Sequence: Synthetic oligonucleotide
  source 1..21: mol_type = other DNA
gggactgcgtctccggcgaat

SEQ ID NO: 14213 - DNA, 21 bp, synthetic construct
  misc_feature 1..21: note = Description of Artificial Sequence: Synthetic oligonucleotide
  source 1..21: mol_type = other DNA
cagccgacttcgaagtcgcac

SEQ ID NO: 14214 - DNA, 21 bp, synthetic construct
  misc_feature 1..21: note = Description of Artificial Sequence: Synthetic oligonucleotide
  source 1..21: mol_type = other DNA
accggcagcgccaaccacgtc

SEQ ID NO: 14215 - DNA, 21 bp, synthetic construct
  misc_feature 1..21: note = Description of Artificial Sequence: Synthetic oligonucleotide
  source 1..21: mol_type = other DNA
caggctcgtagtagtcaggag

SEQ ID NO: 14216 - DNA, 21 bp, synthetic construct
  misc_feature 1..21: note = Description of Artificial Sequence: Synthetic oligonucleotide
  source 1..21: mol_type = other DNA
gacgccagacaaaaaagcgtc

SEQ ID NO: 14217 - DNA, 21 bp, synthetic construct
  misc_feature 1..21: note = Description of Artificial Sequence: Synthetic oligonucleotide
  source 1..21: mol_type = other DNA
gccggcgccagcagcgtcaac

SEQ ID NO: 14218 - DNA, 21 bp, synthetic construct
  misc_feature 1..21: note = Description of Artificial Sequence: Synthetic oligonucleotide
  source 1..21: mol_type = other DNA
catgagcttaaggggactacg

SEQ ID NO: 14219 - DNA, 21 bp, synthetic construct
  misc_feature 1..21: note = Description of Artificial Sequence: Synthetic oligonucleotide
  source 1..21: mol_type = other DNA
gtcagcaaccccgaaaccaaa

SEQ ID NO: 14220 - DNA, 21 bp, synthetic construct
  misc_feature 1..21: note = Description of Artificial Sequence: Synthetic oligonucleotide
  source 1..21: mol_type = other DNA
cagcagcagtctccttctttg

SEQ ID NO: 14221 - DNA, 21 bp, synthetic construct
  misc_feature 1..21: note = Description of Artificial Sequence: Synthetic oligonucleotide
  source 1..21: mol_type = other DNA
gctgatactactccgactaag

SEQ ID NO: 14222 - DNA, 21 bp, synthetic construct
  misc_feature 1..21: note = Description of Artificial Sequence: Synthetic oligonucleotide
  source 1..21: mol_type = other DNA
gataattctaaggggtctcgt

SEQ ID NO: 14223 - DNA, 21 bp, synthetic construct
  misc_feature 1..21: note = Description of Artificial Sequence: Synthetic oligonucleotide
  source 1..21: mol_type = other DNA
gccaacgccaaacccagccaa

SEQ ID NO: 14224 - DNA, 21 bp, synthetic construct
  misc_feature 1..21: note = Description of Artificial Sequence: Synthetic oligonucleotide
  source 1..21: mol_type = other DNA
gcggggggggcttctggtact

SEQ ID NO: 14225 - DNA, 21 bp, synthetic construct
  misc_feature 1..21: note = Description of Artificial Sequence: Synthetic oligonucleotide
  source 1..21: mol_type = other DNA
gggaatggtgctccgggtctg

SEQ ID NO: 14226 - DNA, 21 bp, synthetic construct
  misc_feature 1..21: note = Description of Artificial Sequence: Synthetic oligonucleotide
  source 1..21: mol_type = other DNA
aacagaaccggcaaactcgaa

SEQ ID NO: 14227 - DNA, 21 bp, synthetic construct
  misc_feature 1..21: note = Description of Artificial Sequence: Synthetic oligonucleotide
  source 1..21: mol_type = other DNA
ggtaatgataagcagcattct

SEQ ID NO: 14228 - DNA, 21 bp, synthetic construct
  misc_feature 1..21: note = Description of Artificial Sequence: Synthetic oligonucleotide
  source 1..21: mol_type = other DNA
cagagtggtcctcctaatcgt

SEQ ID NO: 14229 - DNA, 21 bp, synthetic construct
  misc_feature 1..21: note = Description of Artificial Sequence: Synthetic oligonucleotide
  source 1..21: mol_type = other DNA
ggcagcgccagcaacaacaaa

SEQ ID NO: 14230 - DNA, 21 bp, synthetic construct
  misc_feature 1..21: note = Description of Artificial Sequence: Synthetic oligonucleotide
  source 1..21: mol_type = other DNA
agcaccgtcagcaaaaccgcc

SEQ ID NO: 14231 - DNA, 21 bp, synthetic construct
  misc_feature 1..21: note = Description of Artificial Sequence: Synthetic oligonucleotide
  source 1..21: mol_type = other DNA
atgagcacccaaaaactcggc

SEQ ID NO: 14232 - DNA, 21 bp, synthetic construct
  misc_feature 1..21: note = Description of Artificial Sequence: Synthetic oligonucleotide
  source 1..21: mol_type = other DNA
atttctcgtagtagtcagcag

SEQ ID NO: 14233 - DNA, 21 bp, synthetic construct
  misc_feature 1..21: note = Description of Artificial Sequence: Synthetic oligonucleotide
  source 1..21: mol_type = other DNA
gagtctaatactcctcctaag

SEQ ID NO: 14234 - DNA, 21 bp, synthetic construct
  misc_feature 1..21: note = Description of Artificial Sequence: Synthetic oligonucleotide
  source 1..21: mol_type = other DNA
acgcgtgctcaggcgaatagt

SEQ ID NO: 14235 - DNA, 21 bp, synthetic construct
  misc_feature 1..21: note = Description of Artificial Sequence: Synthetic oligonucleotide
  source 1..21: mol_type = other DNA
actaatgcggcgaagagtagt

SEQ ID NO: 14236 - DNA, 21 bp, synthetic construct
  misc_feature 1..21: note = Description of Artificial Sequence: Synthetic oligonucleotide
  source 1..21: mol_type = other DNA
catcctttgcagtctggtacg

SEQ ID NO: 14237 - DNA, 21 bp, synthetic construct
  misc_feature 1..21: note = Description of Artificial Sequence: Synthetic oligonucleotide
  source 1..21: mol_type = other DNA
gatccttctaagaagaatgcg

SEQ ID NO: 14238 - DNA, 21 bp, synthetic construct
  misc_feature 1..21: note = Description of Artificial Sequence: Synthetic oligonucleotide
  source 1..21: mol_type = other DNA
aacggcagagaaacccccaaa

SEQ ID NO: 14239 - DNA, 21 bp, synthetic construct
  misc_feature 1..21: note = Description of Artificial Sequence: Synthetic oligonucleotide
  source 1..21: mol_type = other DNA
agcacccacaaaagcagcgtc

SEQ ID NO: 14240 - DNA, 21 bp, synthetic construct
  misc_feature 1..21: note = Description of Artificial Sequence: Synthetic oligonucleotide
  source 1..21: mol_type = other DNA
gacaccggcagaacccccacc

SEQ ID NO: 14241 - DNA, 21 bp, synthetic construct
  misc_feature 1..21: note = Description of Artificial Sequence: Synthetic oligonucleotide
  source 1..21: mol_type = other DNA
gatgctggtactaggagtctt

SEQ ID NO: 14242 - DNA, 21 bp, synthetic construct
  misc_feature 1..21: note = Description of Artificial Sequence: Synthetic oligonucleotide
  source 1..21: mol_type = other DNA
gttagtggtcagcatcagaag

SEQ ID NO: 14243 - DNA, 21 bp, synthetic construct
  misc_feature 1..21: note = Description of Artificial Sequence: Synthetic oligonucleotide
  source 1..21: mol_type = other DNA
agaaacggccaaagcgccgcc

SEQ ID NO: 14244 - DNA, 21 bp, synthetic construct
  misc_feature 1..21: note = Description of Artificial Sequence: Synthetic oligonucleotide
  source 1..21: mol_type = other DNA
gggacgagtggtgatcgtgtt

SEQ ID NO: 14245 - DNA, 21 bp, synthetic construct
  misc_feature 1..21: note = Description of Artificial Sequence: Synthetic oligonucleotide
  source 1..21: mol_type = other DNA
aaccacagcggcagccccagc

SEQ ID NO: 14246 - DNA, 21 bp, synthetic construct
  misc_feature 1..21: note = Description of Artificial Sequence: Synthetic oligonucleotide
  source 1..21: mol_type = other DNA
ggcagcggccaaaaacaactc

SEQ ID NO: 14247 - DNA, 21 bp, synthetic construct
  misc_feature 1..21: note = Description of Artificial Sequence: Synthetic oligonucleotide
  source 1..21: mol_type = other DNA
ggctacgccgacgcccacaaa

SEQ ID NO: 14248 - DNA, 21 bp, synthetic construct
  misc_feature 1..21: note = Description of Artificial Sequence: Synthetic oligonucleotide
  source 1..21: mol_type = other DNA
aacggcaacagcaaccaccaa

SEQ ID NO: 14249 - DNA, 21 bp, synthetic construct
  misc_feature 1..21: note = Description of Artificial Sequence: Synthetic oligonucleotide
  source 1..21: mol_type = other DNA
gctggtgagaaggggcgtaat

SEQ ID NO: 14250 - DNA, 21 bp, synthetic construct
  misc_feature 1..21: note = Description of Artificial Sequence: Synthetic oligonucleotide
  source 1..21: mol_type = other DNA
cagcgtagtactacttctact

SEQ ID NO: 14251 - DNA, 21 bp, synthetic construct
  misc_feature 1..21: note = Description of Artificial Sequence: Synthetic oligonucleotide
  source 1..21: mol_type = other DNA
ctcccccaaggcaccagaagc

SEQ ID NO: 14252 - DNA, 21 bp, synthetic construct
  misc_feature 1..21: note = Description of Artificial Sequence: Synthetic oligonucleotide
  source 1..21: mol_type = other DNA
aatacgaatccgccgtctaag

SEQ ID NO: 14253 - DNA, 21 bp, synthetic construct
  misc_feature 1..21: note = Description of Artificial Sequence: Synthetic oligonucleotide
  source 1..21: mol_type = other DNA
cagacttctaagtctagtgtt

SEQ ID NO: 14254 - DNA, 21 bp, synthetic construct
  misc_feature 1..21: note = Description of Artificial Sequence: Synthetic oligonucleotide
  source 1..21: mol_type = other DNA
agtcagcataagccgtatacg

SEQ ID NO: 14255 - DNA, 21 bp, synthetic construct
  misc_feature 1..21: note = Description of Artificial Sequence: Synthetic oligonucleotide
  source 1..21: mol_type = other DNA
gaaagcacccccagaaccgcc

SEQ ID NO: 14256 - DNA, 21 bp, synthetic construct
  misc_feature 1..21: note = Description of Artificial Sequence: Synthetic oligonucleotide
  source 1..21: mol_type = other DNA
atgaatgataagtctaggaat

SEQ ID NO: 14257 - DNA, 21 bp, synthetic construct
  misc_feature 1..21: note = Description of Artificial Sequence: Synthetic oligonucleotide
  source 1..21: mol_type = other DNA
tcgcctggtgttacgaatact

SEQ ID NO: 14258 - DNA, 21 bp, synthetic construct
  misc_feature 1..21: note = Description of Artificial Sequence: Synthetic oligonucleotide
  source 1..21: mol_type = other DNA
gaccaactcaaaagcagcgcc

SEQ ID NO: 14259 - DNA, 21 bp, synthetic construct
  misc_feature 1..21: note = Description of Artificial Sequence: Synthetic oligonucleotide
  source 1..21: mol_type = other DNA
gctgagagtgatcgtaagcat

SEQ ID NO: 14260 - DNA, 21 bp, synthetic construct
  misc_feature 1..21: note = Description of Artificial Sequence: Synthetic oligonucleotide
  source 1..21: mol_type = other DNA
acgtcggttacgaagccggtt

SEQ ID NO: 14261 - DNA, 21 bp, synthetic construct
  misc_feature 1..21: note = Description of Artificial Sequence: Synthetic oligonucleotide
  source 1..21: mol_type = other DNA
tctggttctccttctgcgcat

SEQ ID NO: 14262 - DNA, 21 bp, synthetic construct
  misc_feature 1..21: note = Description of Artificial Sequence: Synthetic oligonucleotide
  source 1..21: mol_type = other DNA
gcgccgggtgggaatcatact

SEQ ID NO: 14263 - DNA, 21 bp, synthetic construct
  misc_feature 1..21: note = Description of Artificial Sequence: Synthetic oligonucleotide
  source 1..21: mol_type = other DNA
gcgggtaattctgaggctaag

SEQ ID NO: 14264 - DNA, 21 bp, synthetic construct
  misc_feature 1..21: note = Description of Artificial Sequence: Synthetic oligonucleotide
  source 1..21: mol_type = other DNA
ggcaccaccaccagcgtcaga

SEQ ID NO: 14265 - DNA, 21 bp, synthetic construct
  misc_feature 1..21: note = Description of Artificial Sequence: Synthetic oligonucleotide
  source 1..21: mol_type = other DNA
agccaaaccccccccagcgcc

SEQ ID NO: 14266 - DNA, 21 bp, synthetic construct
  misc_feature 1..21: note = Description of Artificial Sequence: Synthetic oligonucleotide
  source 1..21: mol_type = other DNA
ggtgctagtcagtcgctgtcg

SEQ ID NO: 14267 - DNA, 21 bp, synthetic construct
  misc_feature 1..21: note = Description of Artificial Sequence: Synthetic oligonucleotide
  source 1..21: mol_type = other DNA
gccggcagcacccacgccgtc

SEQ ID NO: 14268 - DNA, 21 bp, synthetic construct
  misc_feature 1..21: note = Description of Artificial Sequence: Synthetic oligonucleotide
  source 1..21: mol_type = other DNA
agcaccaaccccaccagaggc

SEQ ID NO: 14269 - DNA, 21 bp, synthetic construct
  misc_feature 1..21: note = Description of Artificial Sequence: Synthetic oligonucleotide
  source 1..21: mol_type = other DNA
ggcagagacacccccagcaga

SEQ ID NO: 14270 - DNA, 21 bp, synthetic construct
  misc_feature 1..21: note = Description of Artificial Sequence: Synthetic oligonucleotide
  source 1..21: mol_type = other DNA
gagtcgtcgagggatatgaag

SEQ ID NO: 14271 - DNA, 21 bp, synthetic construct
  misc_feature 1..21: note = Description of Artificial Sequence: Synthetic oligonucleotide
  source 1..21: mol_type = other DNA
gccgccaacagcaaaaacctc

SEQ ID NO: 14272 - DNA, 21 bp, synthetic construct
  misc_feature 1..21: note = Description of Artificial Sequence: Synthetic oligonucleotide
  source 1..21: mol_type = other DNA
cagacgggtgctcatactgcg

SEQ ID NO: 14273 - DNA, 21 bp, synthetic construct
  misc_feature 1..21: note = Description of Artificial Sequence: Synthetic oligonucleotide
  source 1..21: mol_type = other DNA
tctaatgcgtctagtaattcg

SEQ ID NO: 14274 - DNA, 21 bp, synthetic construct
  misc_feature 1..21: note = Description of Artificial Sequence: Synthetic oligonucleotide
  source 1..21: mol_type = other DNA
gtcagcagcagcaaagccacc

SEQ ID NO: 14275 - DNA, 21 bp, synthetic construct
  misc_feature 1..21: note = Description of Artificial Sequence: Synthetic oligonucleotide
  source 1..21: mol_type = other DNA
gaaaaaaccaacgccatggtc

SEQ ID NO: 14276 - DNA, 21 bp, synthetic construct
  misc_feature 1..21: note = Description of Artificial Sequence: Synthetic oligonucleotide
  source 1..21: mol_type = other DNA
gaaggcatgagcaccaccaga

SEQ ID NO: 14277 - DNA, 21 bp, synthetic construct
  misc_feature 1..21: note = Description of Artificial Sequence: Synthetic oligonucleotide
  source 1..21: mol_type = other DNA
gatacgcgtgggacgcattct

SEQ ID NO: 14278 - DNA, 21 bp, synthetic construct
  misc_feature 1..21: note = Description of Artificial Sequence: Synthetic oligonucleotide
  source 1..21: mol_type = other DNA
aatgagcaggctgctgctcgt

SEQ ID NO: 14279 - DNA, 21 bp, synthetic construct
  misc_feature 1..21: note = Description of Artificial Sequence: Synthetic oligonucleotide
  source 1..21: mol_type = other DNA
accaaaagcggcgtcaaccaa

SEQ ID NO: 14280 - DNA, 21 bp, synthetic construct
  misc_feature 1..21: note = Description of Artificial Sequence: Synthetic oligonucleotide
  source 1..21: mol_type = other DNA
accgaaaacgccagacccggc

SEQ ID NO: 14281 - DNA, 21 bp, synthetic construct
  misc_feature 1..21: note = Description of Artificial Sequence: Synthetic oligonucleotide
  source 1..21: mol_type = other DNA
actactggtgctaagcctcat

SEQ ID NO: 14282 - DNA, 21 bp, synthetic construct
  misc_feature 1..21: note = Description of Artificial Sequence: Synthetic oligonucleotide
  source 1..21: mol_type = other DNA
agcaacagcaaaggcgaaggc

SEQ ID NO: 14283 - DNA, 21 bp, synthetic construct
  misc_feature 1..21: note = Description of Artificial Sequence: Synthetic oligonucleotide
  source 1..21: mol_type = other DNA
agcaccgccagaggcaacagc

SEQ ID NO: 14284 - DNA, 21 bp, synthetic construct
  misc_feature 1..21: note = Description of Artificial Sequence: Synthetic oligonucleotide
  source 1..21: mol_type = other DNA
agccccgtcaccgccagccaa

SEQ ID NO: 14285 - DNA, 21 bp, synthetic construct
  misc_feature 1..21: note = Description of Artificial Sequence: Synthetic oligonucleotide
  source 1..21: mol_type = other DNA
agcggcaacagccccatggtc

SEQ ID NO: 14286 - DNA, 21 bp, synthetic construct
  misc_feature 1..21: note = Description of Artificial Sequence: Synthetic oligonucleotide
  source 1..21: mol_type = other DNA
agtaggaatgatgctaaggtg

SEQ ID NO: 14287 - DNA, 21 bp, synthetic construct
  misc_feature 1..21: note = Description of Artificial Sequence: Synthetic oligonucleotide
  source 1..21: mol_type = other DNA
agtgggggtaatcatgggagt

SEQ ID NO: 14288 - DNA, 21 bp, synthetic construct
  misc_feature 1..21: note = Description of Artificial Sequence: Synthetic oligonucleotide
  source 1..21: mol_type = other DNA
caaggcaccggcagcctcggc

SEQ ID NO: 14289 - DNA, 21 bp, synthetic construct
  misc_feature 1..21: note = Description of Artificial Sequence: Synthetic oligonucleotide
  source 1..21: mol_type = other DNA
cacagcaccgcccaacaaaaa

SEQ ID NO: 14290 - DNA, 21 bp, synthetic construct
  misc_feature 1..21: note = Description of Artificial Sequence: Synthetic oligonucleotide
  source 1..21: mol_type = other DNA
gaattcaaaagcaacaacgtc

SEQ ID NO: 14291 - DNA, 21 bp, synthetic construct
  misc_feature 1..21: note = Description of Artificial Sequence: Synthetic oligonucleotide
  source 1..21: mol_type = other DNA
gatggtgagcggcctagtgtg

SEQ ID NO: 14292 - DNA, 21 bp, synthetic construct
  misc_feature 1..21: note = Description of Artificial Sequence: Synthetic oligonucleotide
  source 1..21: mol_type = other DNA
gatggtgctaaggtgaataag

SEQ ID NO: 14293 - DNA, 21 bp, synthetic construct
  misc_feature 1..21: note = Description of Artificial Sequence: Synthetic oligonucleotide
  source 1..21: mol_type = other DNA
gccggcaccaacaaaccccaa

SEQ ID NO: 14294 - DNA, 21 bp, synthetic construct
  misc_feature 1..21: note = Description of Artificial Sequence: Synthetic oligonucleotide
  source 1..21: mol_type = other DNA
ggtactgttaagccgcagtct

SEQ ID NO: 14295 - DNA, 21 bp, synthetic construct
  misc_feature 1..21: note = Description of Artificial Sequence: Synthetic oligonucleotide
  source 1..21: mol_type = other DNA
ggtatggctcataatagtggg

SEQ ID NO: 14296 - DNA, 21 bp, synthetic construct
  misc_feature 1..21: note = Description of Artificial Sequence: Synthetic oligonucleotide
  source 1..21: mol_type = other DNA
ggtgggaatcatgagatgaag

SEQ ID NO: 14297 - DNA, 21 bp, synthetic construct
  misc_feature 1..21: note = Description of Artificial Sequence: Synthetic oligonucleotide
  source 1..21: mol_type = other DNA
gtgacgaataagccgagtatg

SEQ ID NO: 14298 - DNA, 21 bp, synthetic construct
  misc_feature 1..21: note = Description of Artificial Sequence: Synthetic oligonucleotide
  source 1..21: mol_type = other DNA
aacagcggcaacaccgtcaaa

SEQ ID NO: 14299 - DNA, 21 bp, synthetic construct
  misc_feature 1..21: note = Description of Artificial Sequence: Synthetic oligonucleotide
  source 1..21: mol_type = other DNA
gacaacaaccccagaaccagc

SEQ ID NO: 14300 - DNA, 21 bp, synthetic construct
  misc_feature 1..21: note = Description of Artificial Sequence: Synthetic oligonucleotide
  source 1..21: mol_type = other DNA
gaacccaccaccagaaacagc

SEQ ID NO: 14301 - DNA, 21 bp, synthetic construct
  misc_feature 1..21: note = Description of Artificial Sequence: Synthetic oligonucleotide
  source 1..21: mol_type = other DNA
ggcagcgccagcggcaccgcc

SEQ ID NO: 14302 - DNA, 21 bp, synthetic construct
  misc_feature 1..21: note = Description of Artificial Sequence: Synthetic oligonucleotide
  source 1..21: mol_type = other DNA
aatactagtcagacggggcgt

SEQ ID NO: 14303 - DNA, 21 bp, synthetic construct
  misc_feature 1..21: note = Description of Artificial Sequence: Synthetic oligonucleotide
  source 1..21: mol_type = other DNA
agcagcaccaccagcaccaaa

SEQ ID NO: 14304 - DNA, 21 bp, synthetic construct
  misc_feature 1..21: note = Description of Artificial Sequence: Synthetic oligonucleotide
  source 1..21: mol_type = other DNA
acggggcaggataagcctggg

SEQ ID NO: 14305 - DNA, 21 bp, synthetic construct
  misc_feature 1..21: note = Description of Artificial Sequence: Synthetic oligonucleotide
  source 1..21: mol_type = other DNA
acggctgcgaggagtggtagt

SEQ ID NO: 14306 - DNA, 21 bp, synthetic construct
  misc_feature 1..21: note = Description of Artificial Sequence: Synthetic oligonucleotide
  source 1..21: mol_type = other DNA
ggcgtccccagcaccggcggc

SEQ ID NO: 14307 - DNA, 21 bp, synthetic construct
  misc_feature 1..21: note = Description of Artificial Sequence: Synthetic oligonucleotide
  source 1..21: mol_type = other DNA
gcgccgagttcgacgaagggg

SEQ ID NO: 14308 - DNA, 21 bp, synthetic construct
  misc_feature 1..21: note = Description of Artificial Sequence: Synthetic oligonucleotide
  source 1..21: mol_type = other DNA
accaaaaacagccccacccaa

SEQ ID NO: 14309 - DNA, 21 bp, synthetic construct
  misc_feature 1..21: note = Description of Artificial Sequence: Synthetic oligonucleotide
  source 1..21: mol_type = other DNA
cttgcgactactaagccttct

SEQ ID NO: 14310 - DNA, 21 bp, synthetic construct
  misc_feature 1..21: note = Description of Artificial Sequence: Synthetic oligonucleotide
  source 1..21: mol_type = other DNA
gtgcgggagtcgtctaatact

SEQ ID NO: 14311 - DNA, 21 bp, synthetic construct
  misc_feature 1..21: note = Description of Artificial Sequence: Synthetic oligonucleotide
  source 1..21: mol_type = other DNA
gacgtcagcaacaaaagcagc

SEQ ID NO: 14312 - DNA, 21 bp, synthetic construct
  misc_feature 1..21: note = Description of Artificial Sequence: Synthetic oligonucleotide
  source 1..21: mol_type = other DNA
ggcaaaagcagccccgtcaaa

SEQ ID NO: 14313 - DNA, 21 bp, synthetic construct
  misc_feature 1..21: note = Description of Artificial Sequence: Synthetic oligonucleotide
  source 1..21: mol_type = other DNA
cttcctgggaagactcatagt

SEQ ID NO: 14314 - DNA, 21 bp, synthetic construct
  misc_feature 1..21: note = Description of Artificial Sequence: Synthetic oligonucleotide
  source 1..21: mol_type = other DNA
gctggggtgaagccggcgact

SEQ ID NO: 14315 - DNA, 21 bp, synthetic construct
  misc_feature 1..21: note = Description of Artificial Sequence: Synthetic oligonucleotide
  source 1..21: mol_type = other DNA
ctcggcaacggccaaggccaa

SEQ ID NO: 14316 - DNA, 21 bp, synthetic construct
  misc_feature 1..21: note = Description of Artificial Sequence: Synthetic oligonucleotide
  source 1..21: mol_type = other DNA
ctgcctactaataagtctctt

SEQ ID NO: 14317 - DNA, 21 bp, synthetic construct
  misc_feature 1..21: note = Description of Artificial Sequence: Synthetic oligonucleotide
  source 1..21: mol_type = other DNA
ggttctgatggtaagttttcg

SEQ ID NO: 14318 - DNA, 21 bp, synthetic construct
  misc_feature 1..21: note = Description of Artificial Sequence: Synthetic oligonucleotide
  source 1..21: mol_type = other DNA
caaagcggcgcccaacacagc

SEQ ID NO: 14319 - DNA, 21 bp, synthetic construct
  misc_feature 1..21: note = Description of Artificial Sequence: Synthetic oligonucleotide
  source 1..21: mol_type = other DNA
ctcaccagcaccagcagcacc

SEQ ID NO: 14320 - DNA, 21 bp, synthetic construct
  misc_feature 1..21: note = Description of Artificial Sequence: Synthetic oligonucleotide
  source 1..21: mol_type = other DNA
caggcgactaattcgggtggg

SEQ ID NO: 14321 - DNA, 21 bp, synthetic construct
  misc_feature 1..21: note = Description of Artificial Sequence: Synthetic oligonucleotide
  source 1..21: mol_type = other DNA
ggtgcttcggttaagcctctg

SEQ ID NO: 14322 - DNA, 21 bp, synthetic construct
  misc_feature 1..21: note = Description of Artificial Sequence: Synthetic oligonucleotide
  source 1..21: mol_type = other DNA
gacgtcaaagccaaaacccaa

SEQ ID NO: 14323 - DNA, 21 bp, synthetic construct
  misc_feature 1..21: note = Description of Artificial Sequence: Synthetic oligonucleotide
  source 1..21: mol_type = other DNA
actgatggggcggcgcctaag

SEQ ID NO: 14324 - DNA, 21 bp, synthetic construct
  misc_feature 1..21: note = Description of Artificial Sequence: Synthetic oligonucleotide
  source 1..21: mol_type = other DNA
gaccacaccaaaaaaagcagc

SEQ ID NO: 14325 - DNA, 21 bp, synthetic construct
  misc_feature 1..21: note = Description of Artificial Sequence: Synthetic oligonucleotide
  source 1..21: mol_type = other DNA
agaagcggccaacaaatggtc

SEQ ID NO: 14326 - DNA, 21 bp, synthetic construct
  misc_feature 1..21: note = Description of Artificial Sequence: Synthetic oligonucleotide
  source 1..21: mol_type = other DNA
gacgaaagcaccagaaacagc

SEQ ID NO: 14327 - DNA, 21 bp, synthetic construct
  misc_feature 1..21: note = Description of Artificial Sequence: Synthetic oligonucleotide
  source 1..21: mol_type = other DNA
gattctagtgagaggattagg

SEQ ID NO: 14328 - DNA, 21 bp, synthetic construct
  misc_feature 1..21: note = Description of Artificial Sequence: Synthetic oligonucleotide
  source 1..21: mol_type = other DNA
atgagaaacagcgccaccagc

SEQ ID NO: 14329 - DNA, 21 bp, synthetic construct
  misc_feature 1..21: note = Description of Artificial Sequence: Synthetic oligonucleotide
  source 1..21: mol_type = other DNA
ggcgacgccgccgtcagcaga

SEQ ID NO: 14330 - DNA, 21 bp, synthetic construct
  misc_feature 1..21: note = Description of Artificial Sequence: Synthetic oligonucleotide
  source 1..21: mol_type = other DNA
gatagtactaagcctgggagg

SEQ ID NO: 14331 - DNA, 21 bp, synthetic construct
  misc_feature 1..21: note = Description of Artificial Sequence: Synthetic oligonucleotide
  source 1..21: mol_type = other DNA
ttcggcgacaacaccgtcaga

SEQ ID NO: 14332 - DNA, 21 bp, synthetic construct
  misc_feature 1..21: note = Description of Artificial Sequence: Synthetic oligonucleotide
  source 1..21: mol_type = other DNA
atggataagagtgggtcgcat

SEQ ID NO: 14333 - DNA, 21 bp, synthetic construct
  misc_feature 1..21: note = Description of Artificial Sequence: Synthetic oligonucleotide
  source 1..21: mol_type = other DNA
gacagaagagacagcagcagc

SEQ ID NO: 14334 - DNA, 21 bp, synthetic construct
  misc_feature 1..21: note = Description of Artificial Sequence: Synthetic oligonucleotide
  source 1..21: mol_type = other DNA
ggcagaagcgacaaaagctac

SEQ ID NO: 14335 - DNA, 21 bp, synthetic construct
  misc_feature 1..21: note = Description of Artificial Sequence: Synthetic oligonucleotide
  source 1..21: mol_type = other DNA
gccaccggcagcaaaaccgcc

SEQ ID NO: 14336 - DNA, 21 bp, synthetic construct
  misc_feature 1..21: note = Description of Artificial Sequence: Synthetic oligonucleotide
  source 1..21: mol_type = other DNA
ggcagcagcgccaaacccacc

SEQ ID NO: 14337 - DNA, 21 bp, synthetic construct
  misc_feature 1..21: note = Description of Artificial Sequence: Synthetic oligonucleotide
  source 1..21: mol_type = other DNA
accagaggcggcagcgccacc

SEQ ID NO: 14338 - DNA, 21 bp, synthetic construct
  misc_feature 1..21: note = Description of Artificial Sequence: Synthetic oligonucleotide
  source 1..21: mol_type = other DNA
agcaccaccagcaaaagcacc

SEQ ID NO: 14339 - DNA, 21 bp, synthetic construct
  misc_feature 1..21: note = Description of Artificial Sequence: Synthetic oligonucleotide
  source 1..21: mol_type = other DNA
agcaccgacaccagacccagc

SEQ ID NO: 14340 - DNA, 21 bp, synthetic construct
  misc_feature 1..21: note = Description of Artificial Sequence: Synthetic oligonucleotide
  source 1..21: mol_type = other DNA
acgggtacggtgagtactagg

SEQ ID NO: 14341 - DNA, 21 bp, synthetic construct
  misc_feature 1..21: note = Description of Artificial Sequence: Synthetic oligonucleotide
  source 1..21: mol_type = other DNA
ggtactcttaaggggggtgag

SEQ ID NO: 14342 - DNA, 21 bp, synthetic construct
  misc_feature 1..21: note = Description of Artificial Sequence: Synthetic oligonucleotide
  source 1..21: mol_type = other DNA
ggtcagggtaagacttctcag

SEQ ID NO: 14343 - DNA, 21 bp, synthetic construct
  misc_feature 1..21: note = Description of Artificial Sequence: Synthetic oligonucleotide
  source 1..21: mol_type = other DNA
ggcggcggcaacgtcggcaaa

SEQ ID NO: 14344 - DNA, 21 bp, synthetic construct
  misc_feature 1..21: note = Description of Artificial Sequence: Synthetic oligonucleotide
  source 1..21: mol_type = other DNA
cacggcggcagcagcgtcaac

SEQ ID NO: 14345 - DNA, 21 bp, synthetic construct
  misc_feature 1..21: note = Description of Artificial Sequence: Synthetic oligonucleotide
  source 1..21: mol_type = other DNA
accaaagccgacggcagcaga

SEQ ID NO: 14346 - DNA, 21 bp, synthetic construct
  misc_feature 1..21: note = Description of Artificial Sequence: Synthetic oligonucleotide
  source 1..21: mol_type = other DNA
caccccagcaacgccccccac

SEQ ID NO: 14347 - DNA, 21 bp, synthetic construct
  misc_feature 1..21: note = Description of Artificial Sequence: Synthetic oligonucleotide
  source 1..21: mol_type = other DNA
gtcaccgcccccagcaccaaa

SEQ ID NO: 14348 - DNA, 21 bp, synthetic construct
  misc_feature 1..21: note = Description of Artificial Sequence: Synthetic oligonucleotide
  source 1..21: mol_type = other DNA
accagcggcaaaggcgccctc

SEQ ID NO: 14349 - DNA, 21 bp, synthetic construct
  misc_feature 1..21: note = Description of Artificial Sequence: Synthetic oligonucleotide
  source 1..21: mol_type = other DNA
tctgtgtctgatcgtaatcat

SEQ ID NO: 14350 - DNA, 21 bp, synthetic construct
  misc_feature 1..21: note = Description of Artificial Sequence: Synthetic oligonucleotide
  source 1..21: mol_type = other DNA
gtcgccgccaacgccaccaaa

SEQ ID NO: 14351 - DNA, 21 bp, synthetic construct
  misc_feature 1..21: note = Description of Artificial Sequence: Synthetic oligonucleotide
  source 1..21: mol_type = other DNA
agcgtccaccaaaaaagcagc

SEQ ID NO: 14352 - DNA, 21 bp, synthetic construct
  misc_feature 1..21: note = Description of Artificial Sequence: Synthetic oligonucleotide
  source 1..21: mol_type = other DNA
gaaggcgcccacagcaaagtc

SEQ ID NO: 14353 - DNA, 21 bp, synthetic construct
  misc_feature 1..21: note = Description of Artificial Sequence: Synthetic oligonucleotide
  source 1..21: mol_type = other DNA
gagactacggcgcttagtaag

SEQ ID NO: 14354 - DNA, 21 bp, synthetic construct
  misc_feature 1..21: note = Description of Artificial Sequence: Synthetic oligonucleotide
  source 1..21: mol_type = other DNA
cgtagtgaggcgcagcctaag

SEQ ID NO: 14355 - DNA, 21 bp, synthetic construct
  misc_feature 1..21: note = Description of Artificial Sequence: Synthetic oligonucleotide
  source 1..21: mol_type = other DNA
acgaattcggctgcggcgaag

SEQ ID NO: 14356 - DNA, 21 bp, synthetic construct
  misc_feature 1..21: note = Description of Artificial Sequence: Synthetic oligonucleotide
  source 1..21: mol_type = other DNA
actgctgctaagtctgctcag

SEQ ID NO: 14357 - DNA, 21 bp, synthetic construct
  misc_feature 1..21: note = Description of Artificial Sequence: Synthetic oligonucleotide
  source 1..21: mol_type = other DNA
accggcgccggcgccagcctc

SEQ ID NO: 14358 - DNA, 21 bp, synthetic construct
  misc_feature 1..21: note = Description of Artificial Sequence: Synthetic oligonucleotide
  source 1..21: mol_type = other DNA
gccggcaccgacaaaaccgcc

SEQ ID NO: 14359 - DNA, 21 bp, synthetic construct
  misc_feature 1..21: note = Description of Artificial Sequence: Synthetic oligonucleotide
  source 1..21: mol_type = other DNA
ttgggttctcagacgagtacg

SEQ ID NO: 14360 - DNA, 21 bp, synthetic construct
  misc_feature 1..21: note = Description of Artificial Sequence: Synthetic oligonucleotide
  source 1..21: mol_type = other DNA
caaggcagcaaaccccaaaac

SEQ ID NO: 14361 - DNA, 21 bp, synthetic construct
  misc_feature 1..21: note = Description of Artificial Sequence: Synthetic oligonucleotide
  source 1..21: mol_type = other DNA
gagagggagagttcggcgacg

SEQ ID NO: 14362 - DNA, 21 bp, synthetic construct
  misc_feature 1..21: note = Description of Artificial Sequence: Synthetic oligonucleotide
  source 1..21: mol_type = other DNA
ggtactaatactagggcgagt

SEQ ID NO: 14363 - DNA, 21 bp, synthetic construct
  misc_feature 1..21: note = Description of Artificial Sequence: Synthetic oligonucleotide
  source 1..21: mol_type = other DNA
accaacgcccaaaaaatcaac

SEQ ID NO: 14364 - DNA, 21 bp, synthetic construct
  misc_feature 1..21: note = Description of Artificial Sequence: Synthetic oligonucleotide
  source 1..21: mol_type = other DNA
aatcagcatcagtcgtctagt

SEQ ID NO: 14365 - DNA, 21 bp, synthetic construct
  misc_feature 1..21: note = Description of Artificial Sequence: Synthetic oligonucleotide
  source 1..21: mol_type = other DNA
agcaccaccaacgccaaagtc

SEQ ID NO: 14366 - DNA, 21 bp, synthetic construct
  misc_feature 1..21: note = Description of Artificial Sequence: Synthetic oligonucleotide
  source 1..21: mol_type = other DNA
ggcctcggcaaagccgccaac

SEQ ID NO: 14367 - DNA, 21 bp, synthetic construct
  misc_feature 1..21: note = Description of Artificial Sequence: Synthetic oligonucleotide
  source 1..21: mol_type = other DNA
aataataagcctcagatggtt

SEQ ID NO: 14368 - DNA, 21 bp, synthetic construct
  misc_feature 1..21: note = Description of Artificial Sequence: Synthetic oligonucleotide
  source 1..21: mol_type = other DNA
acccaccccaaacccaccgaa

SEQ ID NO: 14369 - DNA, 21 bp, synthetic construct
  misc_feature 1..21: note = Description of Artificial Sequence: Synthetic oligonucleotide
  source 1..21: mol_type = other DNA
acgcatggtactcctctgtcg

SEQ ID NO: 14370 - DNA, 21 bp, synthetic construct
  misc_feature 1..21: note = Description of Artificial Sequence: Synthetic oligonucleotide
  source 1..21: mol_type = other DNA
tcttctgggaatgggacgccg

SEQ ID NO: 14371 - DNA, 21 bp, synthetic construct
  misc_feature 1..21: note = Description of Artificial Sequence: Synthetic oligonucleotide
  source 1..21: mol_type = other DNA
accaccagcaacaaacaagac

SEQ ID NO: 14372 - DNA, 21 bp, synthetic construct
  misc_feature 1..21: note = Description of Artificial Sequence: Synthetic oligonucleotide
  source 1..21: mol_type = other DNA
atggggttggataagtcgctt

SEQ ID NO: 14373 - DNA, 21 bp, synthetic construct
  misc_feature 1..21: note = Description of Artificial Sequence: Synthetic oligonucleotide
  source 1..21: mol_type = other DNA
aatattggtgctagtaattcg

SEQ ID NO: 14374 - DNA, 21 bp, synthetic construct
  misc_feature 1..21: note = Description of Artificial Sequence: Synthetic oligonucleotide
  source 1..21: mol_type = other DNA
gggtctcagaagagtgcgagt

SEQ ID NO: 14375 - DNA, 21 bp, synthetic construct
  misc_feature 1..21: note = Description of Artificial Sequence: Synthetic oligonucleotide
  source 1..21: mol_type = other DNA
gacggcctcagcggcacccac

SEQ ID NO: 14376 - DNA, 21 bp, synthetic construct
  misc_feature 1..21: note = Description of Artificial Sequence: Synthetic oligonucleotide
  source 1..21: mol_type = other DNA
cagcgtgtgaaggacacgtct

SEQ ID NO: 14377 - DNA, 21 bp, synthetic construct
  misc_feature 1..21: note = Description of Artificial Sequence: Synthetic oligonucleotide
  source 1..21: mol_type = other DNA
accctcagcgacagaaacagc

SEQ ID NO: 14378 - DNA, 21 bp, synthetic construct
  misc_feature 1..21: note = Description of Artificial Sequence: Synthetic oligonucleotide
  source 1..21: mol_type = other DNA
actacgaatgcgccgcagggg

SEQ ID NO: 14379 - DNA, 21 bp, synthetic construct
  misc_feature 1..21: note = Description of Artificial Sequence: Synthetic oligonucleotide
  source 1..21: mol_type = other DNA
gtcagaagcgacaaaacccaa

SEQ ID NO: 14380 - DNA, 21 bp, synthetic construct
  misc_feature 1..21: note = Description of Artificial Sequence: Synthetic oligonucleotide
  source 1..21: mol_type = other DNA
acgaatattgcttcttcgaag

SEQ ID NO: 14381 - DNA, 21 bp, synthetic construct
  misc_feature 1..21: note = Description of Artificial Sequence: Synthetic oligonucleotide
  source 1..21: mol_type = other DNA
agcagcaccagcagacccagc

SEQ ID NO: 14382 - DNA, 21 bp, synthetic construct
  misc_feature 1..21: note = Description of Artificial Sequence: Synthetic oligonucleotide
  source 1..21: mol_type = other DNA
agtggggtggatagtcggact

SEQ ID NO: 14383 - DNA, 21 bp, synthetic construct
  misc_feature 1..21: note = Description of Artificial Sequence: Synthetic oligonucleotide
  source 1..21: mol_type = other DNA
ctccaccaaagcagccccacc

SEQ ID NO: 14384 - DNA, 21 bp, synthetic construct
  misc_feature 1..21: note = Description of Artificial Sequence: Synthetic oligonucleotide
  source 1..21: mol_type = other DNA
cttgggggtggtaagagtggt

SEQ ID NO: 14385 - DNA, 21 bp, synthetic construct
  misc_feature 1..21: note = Description of Artificial Sequence: Synthetic oligonucleotide
  source 1..21: mol_type = other DNA
cttacttcggcgtcgccgtcg

SEQ ID NO: 14386 - DNA, 21 bp, synthetic construct
  misc_feature 1..21: note = Description of Artificial Sequence: Synthetic oligonucleotide
  source 1..21: mol_type = other DNA
gaccccagcagccccggcgtc

SEQ ID NO: 14387 - DNA, 21 bp, synthetic construct
  misc_feature 1..21: note = Description of Artificial Sequence: Synthetic oligonucleotide
  source 1..21: mol_type = other DNA
gaagtcaccaccccccacacc

SEQ ID NO: 14388 - DNA, 21 bp, synthetic construct
  misc_feature 1..21: note = Description of Artificial Sequence: Synthetic oligonucleotide
  source 1..21: mol_type = other DNA
agcggcggcaccggcaacaga

SEQ ID NO: 14389 - DNA, 21 bp, synthetic construct
  misc_feature 1..21: note = Description of Artificial Sequence: Synthetic oligonucleotide
  source 1..21: mol_type = other DNA
gggcggattgctgatgttaag

SEQ ID NO: 14390 - DNA, 21 bp, synthetic construct
  misc_feature 1..21: note = Description of Artificial Sequence: Synthetic oligonucleotide
  source 1..21: mol_type = other DNA
cataataatgatacgcctcgt

SEQ ID NO: 14391 - DNA, 21 bp, synthetic construct
  misc_feature 1..21: note = Description of Artificial Sequence: Synthetic oligonucleotide
  source 1..21: mol_type = other DNA
gcccaaaaaagcaccatcagc

SEQ ID NO: 14392 - DNA, 21 bp, synthetic construct
  misc_feature 1..21: note = Description of Artificial Sequence: Synthetic oligonucleotide
  source 1..21: mol_type = other DNA
agagacggcaacagcagcagc

SEQ ID NO: 14393 - DNA, 21 bp, synthetic construct
  misc_feature 1..21: note = Description of Artificial Sequence: Synthetic oligonucleotide
  source 1..21: mol_type = other DNA
cacggcggcaccagcgtcaaa

SEQ ID NO: 14394 - DNA, 21 bp, synthetic construct
  misc_feature 1..21: note = Description of Artificial Sequence: Synthetic oligonucleotide
  source 1..21: mol_type = other DNA
aaccccgtcgccaacaacaaa

SEQ ID NO: 14395 - DNA, 21 bp, synthetic construct
  misc_feature 1..21: note = Description of Artificial Sequence: Synthetic oligonucleotide
  source 1..21: mol_type = other DNA
gggactacgcttaagcctggg

SEQ ID NO: 14396 - DNA, 21 bp, synthetic construct
  misc_feature 1..21: note = Description of Artificial Sequence: Synthetic oligonucleotide
  source 1..21: mol_type = other DNA
accagccaaccccccaacgcc

SEQ ID NO: 14397 - DNA, 21 bp, synthetic construct
  misc_feature 1..21: note = Description of Artificial Sequence: Synthetic oligonucleotide
  source 1..21: mol_type = other DNA
agcatcggcaacgtcgccaaa

SEQ ID NO: 14398 - DNA, 21 bp, synthetic construct
  misc_feature 1..21: note = Description of Artificial Sequence: Synthetic oligonucleotide
  source 1..21: mol_type = other DNA
gttggtggggttacttcgagt

SEQ ID NO: 14399 - DNA, 21 bp, synthetic construct
  misc_feature 1..21: note = Description of Artificial Sequence: Synthetic oligonucleotide
  source 1..21: mol_type = other DNA
cggggtactacgagtacgtcg

SEQ ID NO: 14400 - DNA, 21 bp, synthetic construct
  misc_feature 1..21: note = Description of Artificial Sequence: Synthetic oligonucleotide
  source 1..21: mol_type = other DNA
aacctcggcaaaagccccacc

SEQ ID NO: 14401 - DNA, 21 bp, synthetic construct
  misc_feature 1..21: note = Description of Artificial Sequence: Synthetic oligonucleotide
  source 1..21: mol_type = other DNA
caacccggcggcaaaaacgtc

SEQ ID NO: 14402 - DNA, 21 bp, synthetic construct
  misc_feature 1..21: note = Description of Artificial Sequence: Synthetic oligonucleotide
  source 1..21: mol_type = other DNA
aaaaccaccggcgcccaaagc

SEQ ID NO: 14403 - DNA, 21 bp, synthetic construct
  misc_feature 1..21: note = Description of Artificial Sequence: Synthetic oligonucleotide
  source 1..21: mol_type = other DNA
gctggggttcctagtggtaat

SEQ ID NO: 14404 - DNA, 21 bp, synthetic construct
  misc_feature 1..21: note = Description of Artificial Sequence: Synthetic oligonucleotide
  source 1..21: mol_type = other DNA
ggcagcacccaaagagccaac

SEQ ID NO: 14405 - DNA, 21 bp, synthetic construct
  misc_feature 1..21: note = Description of Artificial Sequence: Synthetic oligonucleotide
  source 1..21: mol_type = other DNA
aattctgctcagcctccgaat

SEQ ID NO: 14406 - DNA, 21 bp, synthetic construct
  misc_feature 1..21: note = Description of Artificial Sequence: Synthetic oligonucleotide
  source 1..21: mol_type = other DNA
tctacggggatgtcggggaag

SEQ ID NO: 14407 - DNA, 21 bp, synthetic construct
  misc_feature 1..21: note = Description of Artificial Sequence: Synthetic oligonucleotide
  source 1..21: mol_type = other DNA
gaaggcagcaccagcaaaaga

SEQ ID NO: 14408 - DNA, 21 bp, synthetic construct
  misc_feature 1..21: note = Description of Artificial Sequence: Synthetic oligonucleotide
  source 1..21: mol_type = other DNA
ggcaccgcccacaacagcggc

SEQ ID NO: 14409 - DNA, 21 bp, synthetic construct
  misc_feature 1..21: note = Description of Artificial Sequence: Synthetic oligonucleotide
  source 1..21: mol_type = other DNA
agcgtccaaagaagcagcggc

SEQ ID NO: 14410 - DNA, 21 bp, synthetic construct
  misc_feature 1..21: note = Description of Artificial Sequence: Synthetic oligonucleotide
  source 1..21: mol_type = other DNA
agtggggctcctgctaataag

SEQ ID NO: 14411 - DNA, 21 bp, synthetic construct
  misc_feature 1..21: note = Description of Artificial Sequence: Synthetic oligonucleotide
  source 1..21: mol_type = other DNA
cagaatagttcgagggtggag

SEQ ID NO: 14412 - DNA, 21 bp, synthetic construct
  misc_feature 1..21: note = Description of Artificial Sequence: Synthetic oligonucleotide
  source 1..21: mol_type = other DNA
ggtcgggatacgaagatgatg

SEQ ID NO: 14413 - DNA, 21 bp, synthetic construct
  misc_feature 1..21: note = Description of Artificial Sequence: Synthetic oligonucleotide
  source 1..21: mol_type = other DNA
tctggtatttctgctcatacg

SEQ ID NO: 14414 - DNA, 21 bp, synthetic construct
  misc_feature 1..21: note = Description of Artificial Sequence: Synthetic oligonucleotide
  source 1..21: mol_type = other DNA
aatctttcgcataagtcgggt

SEQ ID NO: 14415 - DNA, 21 bp, synthetic construct
  misc_feature 1..21: note = Description of Artificial Sequence: Synthetic oligonucleotide
  source 1..21: mol_type = other DNA
tctgagacgcggtcgtcgact

SEQ ID NO: 14416 - DNA, 21 bp, synthetic construct
  misc_feature 1..21: note = Description of Artificial Sequence: Synthetic oligonucleotide
  source 1..21: mol_type = other DNA
gggagggctgattctcagaag

SEQ ID NO: 14417 - DNA, 21 bp, synthetic construct
  misc_feature 1..21: note = Description of Artificial Sequence: Synthetic oligonucleotide
  source 1..21: mol_type = other DNA
accagaagcagccccgccaac

SEQ ID NO: 14418 - DNA, 21 bp, synthetic construct
  misc_feature 1..21: note = Description of Artificial Sequence: Synthetic oligonucleotide
  source 1..21: mol_type = other DNA
gatcctcagttgtctatgaag

SEQ ID NO: 14419 - DNA, 21 bp, synthetic construct
  misc_feature 1..21: note = Description of Artificial Sequence: Synthetic oligonucleotide
  source 1..21: mol_type = other DNA
cgggggagtagtcagcagggg

SEQ ID NO: 14420 - DNA, 21 bp, synthetic construct
  misc_feature 1..21: note = Description of Artificial Sequence: Synthetic oligonucleotide
  source 1..21: mol_type = other DNA
tctaatgcgaataagtcgtat

SEQ ID NO: 14421 - DNA, 21 bp, synthetic construct
  misc_feature 1..21: note = Description of Artificial Sequence: Synthetic oligonucleotide
  source 1..21: mol_type = other DNA
cagggtactcgtcctagtgag

SEQ ID NO: 14422 - DNA, 21 bp, synthetic construct
  misc_feature 1..21: note = Description of Artificial Sequence: Synthetic oligonucleotide
  source 1..21: mol_type = other DNA
tctggtggttcttctgtgaag

SEQ ID NO: 14423 - DNA, 21 bp, synthetic construct
  misc_feature 1..21: note = Description of Artificial Sequence: Synthetic oligonucleotide
  source 1..21: mol_type = other DNA
ctcaccagcaaaggcagccaa

SEQ ID NO: 14424 - DNA, 21 bp, synthetic construct
  misc_feature 1..21: note = Description of Artificial Sequence: Synthetic oligonucleotide
  source 1..21: mol_type = other DNA
agcggcgaaagaagcaacgaa

SEQ ID NO: 14425 - DNA, 21 bp, synthetic construct
  misc_feature 1..21: note = Description of Artificial Sequence: Synthetic oligonucleotide
  source 1..21: mol_type = other DNA
atgcccggcagcaccagcggc

SEQ ID NO: 14426 - DNA, 21 bp, synthetic construct
  misc_feature 1..21: note = Description of Artificial Sequence: Synthetic oligonucleotide
  source 1..21: mol_type = other DNA
gaggctcgtaataagcaggtg

SEQ ID NO: 14427 - DNA, 21 bp, synthetic construct
  misc_feature 1..21: note = Description of Artificial Sequence: Synthetic oligonucleotide
  source 1..21: mol_type = other DNA
ttgtcgtctaagacgtcgaat

SEQ ID NO: 14428 - DNA, 21 bp, synthetic construct
  misc_feature 1..21: note = Description of Artificial Sequence: Synthetic oligonucleotide
  source 1..21: mol_type = other DNA
agcggcaccaccaaacccagc

SEQ ID NO: 14429 - DNA, 21 bp, synthetic construct
  misc_feature 1..21: note = Description of Artificial Sequence: Synthetic oligonucleotide
  source 1..21: mol_type = other DNA
atcgccaacaaaagccccgtc

SEQ ID NO: 14430 - DNA, 21 bp, synthetic construct
  misc_feature 1..21: note = Description of Artificial Sequence: Synthetic oligonucleotide
  source 1..21: mol_type = other DNA
atggctaattcgcctaatcgt

SEQ ID NO: 14431 - DNA, 21 bp, synthetic construct
  misc_feature 1..21: note = Description of Artificial Sequence: Synthetic oligonucleotide
  source 1..21: mol_type = other DNA
gatagtactcggggtagtggg

SEQ ID NO: 14432 - DNA, 21 bp, synthetic construct
  misc_feature 1..21: note = Description of Artificial Sequence: Synthetic oligonucleotide
  source 1..21: mol_type = other DNA
ggccaaagccaaaccagccac

SEQ ID NO: 14433 - DNA, 21 bp, synthetic construct
  misc_feature 1..21: note = Description of Artificial Sequence: Synthetic oligonucleotide
  source 1..21: mol_type = other DNA
aataattctacggtgggtcat

SEQ ID NO: 14434 - DNA, 21 bp, synthetic construct
  misc_feature 1..21: note = Description of Artificial Sequence: Synthetic oligonucleotide
  source 1..21: mol_type = other DNA
accggcaacagacccaccgaa

SEQ ID NO: 14435 - DNA, 21 bp, synthetic construct
  misc_feature 1..21: note = Description of Artificial Sequence: Synthetic oligonucleotide
  source 1..21: mol_type = other DNA
gccaccaacaaagtcgccacc

SEQ ID NO: 14436 - DNA, 21 bp, synthetic construct
  misc_feature 1..21: note = Description of Artificial Sequence: Synthetic oligonucleotide
  source 1..21: mol_type = other DNA
gccaccggcaaagcccaagcc

SEQ ID NO: 14437 - DNA, 21 bp, synthetic construct
  misc_feature 1..21: note = Description of Artificial Sequence: Synthetic oligonucleotide
  source 1..21: mol_type = other DNA
gaagtcagcggcaaacaactc

SEQ ID NO: 14438 - DNA, 21 bp, synthetic construct
  misc_feature 1..21: note = Description of Artificial Sequence: Synthetic oligonucleotide
  source 1..21: mol_type = other DNA
gatcaggcggcgaataggcag

SEQ ID NO: 14439 - DNA, 21 bp, synthetic construct
  misc_feature 1..21: note = Description of Artificial Sequence: Synthetic oligonucleotide
  source 1..21: mol_type = other DNA
gcgaatacgggggctgcgaag

SEQ ID NO: 14440 - DNA, 21 bp, synthetic construct
  misc_feature 1..21: note = Description of Artificial Sequence: Synthetic oligonucleotide
  source 1..21: mol_type = other DNA
agcagcgacagcaacaacaga

SEQ ID NO: 14441 - DNA, 21 bp, synthetic construct
  misc_feature 1..21: note = Description of Artificial Sequence: Synthetic oligonucleotide
  source 1..21: mol_type = other DNA
ggcaccaaaagcgtcggcagc

SEQ ID NO: 14442 - DNA, 21 bp, synthetic construct
  misc_feature 1..21: note = Description of Artificial Sequence: Synthetic oligonucleotide
  source 1..21: mol_type = other DNA
tcgcctttgaattcttctaag

SEQ ID NO: 14443 - DNA, 21 bp, synthetic construct
  misc_feature 1..21: note = Description of Artificial Sequence: Synthetic oligonucleotide
  source 1..21: mol_type = other DNA
accaaaggcggcagcaacacc

SEQ ID NO: 14444 - DNA, 21 bp, synthetic construct
  misc_feature 1..21: note = Description of Artificial Sequence: Synthetic oligonucleotide
  source 1..21: mol_type = other DNA
gtcaacggcaccagaaacacc

SEQ ID NO: 14445 - DNA, 21 bp, synthetic construct
  misc_feature 1..21: note = Description of Artificial Sequence: Synthetic oligonucleotide
  source 1..21: mol_type = other DNA
gtccccaacaaaagcagcagc

SEQ ID NO: 14446 - DNA, 21 bp, synthetic construct
  misc_feature 1..21: note = Description of Artificial Sequence: Synthetic oligonucleotide
  source 1..21: mol_type = other DNA
aagtcggatgctaagggtaat

SEQ ID NO: 14447 - DNA, 21 bp, synthetic construct
  misc_feature 1..21: note = Description of Artificial Sequence: Synthetic oligonucleotide
  source 1..21: mol_type = other DNA
ggcgaaggcagacccagcgtc

SEQ ID NO: 14448 - DNA, 21 bp, synthetic construct
  misc_feature 1..21: note = Description of Artificial Sequence: Synthetic oligonucleotide
  source 1..21: mol_type = other DNA
gctacggagcggccttctact

SEQ ID NO: 14449 - DNA, 21 bp, synthetic construct
  misc_feature 1..21: note = Description of Artificial Sequence: Synthetic oligonucleotide
  source 1..21: mol_type = other DNA
gccggcaccaccaccaacaaa

SEQ ID NO: 14450 - DNA, 21 bp, synthetic construct
  misc_feature 1..21: note = Description of Artificial Sequence: Synthetic oligonucleotide
  source 1..21: mol_type = other DNA
gatactgtgcgggcggggtcg

SEQ ID NO: 14451 - DNA, 21 bp, synthetic construct
  misc_feature 1..21: note = Description of Artificial Sequence: Synthetic oligonucleotide
  source 1..21: mol_type = other DNA
agccaacaaaaaaccggcatg

SEQ ID NO: 14452 - DNA, 21 bp, synthetic construct
  misc_feature 1..21: note = Description of Artificial Sequence: Synthetic oligonucleotide
  source 1..21: mol_type = other DNA
caaagcgacaacaaaacccac

SEQ ID NO: 14453 - DNA, 21 bp, synthetic construct
  misc_feature 1..21: note = Description of Artificial Sequence: Synthetic oligonucleotide
  source 1..21: mol_type = other DNA
aaaagcggcgaaagacccacc

SEQ ID NO: 14454 - DNA, 21 bp, synthetic construct
  misc_feature 1..21: note = Description of Artificial Sequence: Synthetic oligonucleotide
  source 1..21: mol_type = other DNA
agccaaagcggcaccctcgcc

SEQ ID NO: 14455 - DNA, 21 bp, synthetic construct
  misc_feature 1..21: note = Description of Artificial Sequence: Synthetic oligonucleotide
  source 1..21: mol_type = other DNA
agcggcagcgacagaaacagc

SEQ ID NO: 14456 - DNA, 21 bp, synthetic construct
  misc_feature 1..21: note = Description of Artificial Sequence: Synthetic oligonucleotide
  source 1..21: mol_type = other DNA
agggaggatcgggctaaggag

SEQ ID NO: 14457 - DNA, 21 bp, synthetic construct
  misc_feature 1..21: note = Description of Artificial Sequence: Synthetic oligonucleotide
  source 1..21: mol_type = other DNA
atgcccaacagcaacgccagc

SEQ ID NO: 14458 - DNA, 21 bp, synthetic construct
  misc_feature 1..21: note = Description of Artificial Sequence: Synthetic oligonucleotide
  source 1..21: mol_type = other DNA
caaggcacccaaaccaaaagc

SEQ ID NO: 14459 - DNA, 21 bp, synthetic construct
  misc_feature 1..21: note = Description of Artificial Sequence: Synthetic oligonucleotide
  source 1..21: mol_type = other DNA
caaggcgtcggcaacaccgcc

SEQ ID NO: 14460 - DNA, 21 bp, synthetic construct
  misc_feature 1..21: note = Description of Artificial Sequence: Synthetic oligonucleotide
  source 1..21: mol_type = other DNA
gctggtcgtcaggggagtaat

SEQ ID NO: 14461 - DNA, 21 bp, synthetic construct
  misc_feature 1..21: note = Description of Artificial Sequence: Synthetic oligonucleotide
  source 1..21: mol_type = other DNA
tctcctggtgagcgtgcgaag

SEQ ID NO: 14462 - DNA, 21 bp, synthetic construct
  misc_feature 1..21: note = Description of Artificial Sequence: Synthetic oligonucleotide
  source 1..21: mol_type = other DNA
tctggtccttctaagcctgct

SEQ ID NO: 14463 - DNA, 21 bp, synthetic construct
  misc_feature 1..21: note = Description of Artificial Sequence: Synthetic oligonucleotide
  source 1..21: mol_type = other DNA
tgcaccaacaccaaacccggc

SEQ ID NO: 14464 - DNA, 21 bp, synthetic construct
  misc_feature 1..21: note = Description of Artificial Sequence: Synthetic oligonucleotide
  source 1..21: mol_type = other DNA
agtcctccgaatactgggtcg

SEQ ID NO: 14465 - DNA, 21 bp, synthetic construct
  misc_feature 1..21: note = Description of Artificial Sequence: Synthetic oligonucleotide
  source 1..21: mol_type = other DNA
gacggccaaagagtcagcctc

SEQ ID NO: 14466 - DNA, 21 bp, synthetic construct
  misc_feature 1..21: note = Description of Artificial Sequence: Synthetic oligonucleotide
  source 1..21: mol_type = other DNA
aatgatacgaagtctccgtcg

SEQ ID NO: 14467 - DNA, 21 bp, synthetic construct
  misc_feature 1..21: note = Description of Artificial Sequence: Synthetic oligonucleotide
  source 1..21: mol_type = other DNA
agcaccgaaagccccaccaga

SEQ ID NO: 14468 - DNA, 21 bp, synthetic construct
  misc_feature 1..21: note = Description of Artificial Sequence: Synthetic oligonucleotide
  source 1..21: mol_type = other DNA
aagacgagtccgagtacgagt

SEQ ID NO: 14469 - DNA, 21 bp, synthetic construct
  misc_feature 1..21: note = Description of Artificial Sequence: Synthetic oligonucleotide
  source 1..21: mol_type = other DNA
ctcaacggcagcgaaaaaagc

SEQ ID NO: 14470 - DNA, 21 bp, synthetic construct
  misc_feature 1..21: note = Description of Artificial Sequence: Synthetic oligonucleotide
  source 1..21: mol_type = other DNA
agcacccaaggcagcgtcaaa

SEQ ID NO: 14471 - DNA, 21 bp, synthetic construct
  misc_feature 1..21: note = Description of Artificial Sequence: Synthetic oligonucleotide
  source 1..21: mol_type = other DNA
gccagcggcagcggcatgcac

SEQ ID NO: 14472 - DNA, 21 bp, synthetic construct
  misc_feature 1..21: note = Description of Artificial Sequence: Synthetic oligonucleotide
  source 1..21: mol_type = other DNA
ggcggcgccagcagcaaagcc

SEQ ID NO: 14473 - DNA, 21 bp, synthetic construct
  misc_feature 1..21: note = Description of Artificial Sequence: Synthetic oligonucleotide
  source 1..21: mol_type = other DNA
attccttcggataaggggact

SEQ ID NO: 14474 - DNA, 21 bp, synthetic construct
  misc_feature 1..21: note = Description of Artificial Sequence: Synthetic oligonucleotide
  source 1..21: mol_type = other DNA
ggcgaaaaaagcaaaccccaa

SEQ ID NO: 14475 - DNA, 21 bp, synthetic construct
  misc_feature 1..21: note = Description of Artificial Sequence: Synthetic oligonucleotide
  source 1..21: mol_type = other DNA
acgcaggatcgttcttcgact

SEQ ID NO: 14476 - DNA, 21 bp, synthetic construct
  misc_feature 1..21: note = Description of Artificial Sequence: Synthetic oligonucleotide
  source 1..21: mol_type = other DNA
gccatcggcaaacaaggcacc

SEQ ID NO: 14477 - DNA, 21 bp, synthetic construct
  misc_feature 1..21: note = Description of Artificial Sequence: Synthetic oligonucleotide
  source 1..21: mol_type = other DNA
agtactgggtcgggtatgtcg

SEQ ID NO: 14478 - DNA, 21 bp, synthetic construct
  misc_feature 1..21: note = Description of Artificial Sequence: Synthetic oligonucleotide
  source 1..21: mol_type = other DNA
gccgacgtcagacccaacacc

SEQ ID NO: 14479 - DNA, 21 bp, synthetic construct
  misc_feature 1..21: note = Description of Artificial Sequence: Synthetic oligonucleotide
  source 1..21: mol_type = other DNA
gccggcaaaggcaccagcagc

SEQ ID NO: 14480 - DNA, 21 bp, synthetic construct
  misc_feature 1..21: note = Description of Artificial Sequence: Synthetic oligonucleotide
  source 1..21: mol_type = other DNA
gccatgggcaaaaccagcgcc

SEQ ID NO: 14481 - DNA, 21 bp, synthetic construct
  misc_feature 1..21: note = Description of Artificial Sequence: Synthetic oligonucleotide
  source 1..21: mol_type = other DNA
aaaggcaacagcgccctcacc

SEQ ID NO: 14482 - DNA, 21 bp, synthetic construct
  misc_feature 1..21: note = Description of Artificial Sequence: Synthetic oligonucleotide
  source 1..21: mol_type = other DNA
gagggtcagtctcagaagatg

SEQ ID NO: 14483 - DNA, 21 bp, synthetic construct
  misc_feature 1..21: note = Description of Artificial Sequence: Synthetic oligonucleotide
  source 1..21: mol_type = other DNA
cacaccgtcaaagccagccaa

SEQ ID NO: 14484 - DNA, 21 bp, synthetic construct
  misc_feature 1..21: note = Description of Artificial Sequence: Synthetic oligonucleotide
  source 1..21: mol_type = other DNA
aacggccccagaagcaccagc

SEQ ID NO: 14485 - DNA, 21 bp, synthetic construct
  misc_feature 1..21: note = Description of Artificial Sequence: Synthetic oligonucleotide
  source 1..21: mol_type = other DNA
gtcaacagcaaacccgcccaa

SEQ ID NO: 14486 - DNA, 21 bp, synthetic construct
  misc_feature 1..21: note = Description of Artificial Sequence: Synthetic oligonucleotide
  source 1..21: mol_type = other DNA
catggtgagtctcggacttct

SEQ ID NO: 14487 - DNA, 21 bp, synthetic construct
  misc_feature 1..21: note = Description of Artificial Sequence: Synthetic oligonucleotide
  source 1..21: mol_type = other DNA
gggaggaataatactaattcg

SEQ ID NO: 14488 - DNA, 21 bp, synthetic construct
  misc_feature 1..21: note = Description of Artificial Sequence: Synthetic oligonucleotide
  source 1..21: mol_type = other DNA
actactaatactaaggttcag

SEQ ID NO: 14489 - DNA, 21 bp, synthetic construct
  misc_feature 1..21: note = Description of Artificial Sequence: Synthetic oligonucleotide
  source 1..21: mol_type = other DNA
agcggcaccgccaccagagac

SEQ ID NO: 14490 - DNA, 21 bp, synthetic construct
  misc_feature 1..21: note = Description of Artificial Sequence: Synthetic oligonucleotide
  source 1..21: mol_type = other DNA
gagcctactcagtctaggtct

SEQ ID NO: 14491 - DNA, 21 bp, synthetic construct
  misc_feature 1..21: note = Description of Artificial Sequence: Synthetic oligonucleotide
  source 1..21: mol_type = other DNA
ggcctcgccagcaaaaacagc

SEQ ID NO: 14492 - DNA, 21 bp, synthetic construct
  misc_feature 1..21: note = Description of Artificial Sequence: Synthetic oligonucleotide
  source 1..21: mol_type = other DNA
tggggcaccgacaaaatgaga

SEQ ID NO: 14493 - DNA, 21 bp, synthetic construct
  misc_feature 1..21: note = Description of Artificial Sequence: Synthetic oligonucleotide
  source 1..21: mol_type = other DNA
cggggtgggcagaattctgtg

SEQ ID NO: 14494 - DNA, 21 bp, synthetic construct
  misc_feature 1..21: note = Description of Artificial Sequence: Synthetic oligonucleotide
  source 1..21: mol_type = other DNA
ggcaccaccaacagcagcaga

SEQ ID NO: 14495 - DNA, 21 bp, synthetic construct
  misc_feature 1..21: note = Description of Artificial Sequence: Synthetic oligonucleotide
  source 1..21: mol_type = other DNA
accgccaacacccaccccacc

SEQ ID NO: 14496 - DNA, 21 bp, synthetic construct
  misc_feature 1..21: note = Description of Artificial Sequence: Synthetic oligonucleotide
  source 1..21: mol_type = other DNA
caaaccgccaacagcagccaa

SEQ ID NO: 14497 - DNA, 21 bp, synthetic construct
  misc_feature 1..21: note = Description of Artificial Sequence: Synthetic oligonucleotide
  source 1..21: mol_type = other DNA
accaccagcagccacagcctc

SEQ ID NO: 14498 - DNA, 21 bp, synthetic construct
  misc_feature 1..21: note = Description of Artificial Sequence: Synthetic oligonucleotide
  source 1..21: mol_type = other DNA
accgccgacaacagaaccgcc

SEQ ID NO: 14499 - DNA, 21 bp, synthetic construct
  misc_feature 1..21: note = Description of Artificial Sequence: Synthetic oligonucleotide
  source 1..21: mol_type = other DNA
gagacgcggacgggtacggtg

SEQ ID NO: 14500 - DNA, 21 bp, synthetic construct
  misc_feature 1..21: note = Description of Artificial Sequence: Synthetic oligonucleotide
  source 1..21: mol_type = other DNA
acccaaggccaaaaagccacc

SEQ ID NO: 14501 - DNA, 21 bp, synthetic construct
  misc_feature 1..21: note = Description of Artificial Sequence: Synthetic oligonucleotide
  source 1..21: mol_type = other DNA
gaaagaaaaaccggcaacggc

SEQ ID NO: 14502 - DNA, 21 bp, synthetic construct
  misc_feature 1..21: note = Description of Artificial Sequence: Synthetic oligonucleotide
  source 1..21: mol_type = other DNA
ggggataagtcgtctcgtgag

SEQ ID NO: 14503 - DNA, 21 bp, synthetic construct
  misc_feature 1..21: note = Description of Artificial Sequence: Synthetic oligonucleotide
  source 1..21: mol_type = other DNA
aacaacagcgacagaagagac

SEQ ID NO: 14504 - DNA, 21 bp, synthetic construct
  misc_feature 1..21: note = Description of Artificial Sequence: Synthetic oligonucleotide
  source 1..21: mol_type = other DNA
gcgcctggtgcgcatcagtcg

SEQ ID NO: 14505 - DNA, 21 bp, synthetic construct
  misc_feature 1..21: note = Description of Artificial Sequence: Synthetic oligonucleotide
  source 1..21: mol_type = other DNA
cacagccaaggcaaaaacgtc

SEQ ID NO: 14506 - DNA, 21 bp, synthetic construct
  misc_feature 1..21: note = Description of Artificial Sequence: Synthetic oligonucleotide
  source 1..21: mol_type = other DNA
agccaaaccagcaaccacatc

SEQ ID NO: 14507 - DNA, 21 bp, synthetic construct
  misc_feature 1..21: note = Description of Artificial Sequence: Synthetic oligonucleotide
  source 1..21: mol_type = other DNA
ctcggcgaaaaaagccacagc

SEQ ID NO: 14508 - DNA, 21 bp, synthetic construct
  misc_feature 1..21: note = Description of Artificial Sequence: Synthetic oligonucleotide
  source 1..21: mol_type = other DNA
gtgggtgatcggccggcgatt

SEQ ID NO: 14509 - DNA, 21 bp, synthetic construct
  misc_feature 1..21: note = Description of Artificial Sequence: Synthetic oligonucleotide
  source 1..21: mol_type = other DNA
agtaattcgcaggttgctagt

SEQ ID NO: 14510 - DNA, 21 bp, synthetic construct
  misc_feature 1..21: note = Description of Artificial Sequence: Synthetic oligonucleotide
  source 1..21: mol_type = other DNA
gcttctgtgccttctagtggt

SEQ ID NO: 14511 - DNA, 21 bp, synthetic construct
  misc_feature 1..21: note = Description of Artificial Sequence: Synthetic oligonucleotide
  source 1..21: mol_type = other DNA
tctagggatggtaaggttgtt

SEQ ID NO: 14512 - DNA, 21 bp, synthetic construct
  misc_feature 1..21: note = Description of Artificial Sequence: Synthetic oligonucleotide
  source 1..21: mol_type = other DNA
ggtactgggaagcatgctgcg

SEQ ID NO: 14513 - DNA, 21 bp, synthetic construct
  misc_feature 1..21: note = Description of Artificial Sequence: Synthetic oligonucleotide
  source 1..21: mol_type = other DNA
agaggcgccggcaacagcaac

SEQ ID NO: 14514 - DNA, 21 bp, synthetic construct
  misc_feature 1..21: note = Description of Artificial Sequence: Synthetic oligonucleotide
  source 1..21: mol_type = other DNA
acgaatgtgacgaagtcgtct

SEQ ID NO: 14515 - DNA, 21 bp, synthetic construct
  misc_feature 1..21: note = Description of Artificial Sequence: Synthetic oligonucleotide
  source 1..21: mol_type = other DNA
agtagtgctgatcgtaattcg

SEQ ID NO: 14516 - DNA, 21 bp, synthetic construct
  misc_feature 1..21: note = Description of Artificial Sequence: Synthetic oligonucleotide
  source 1..21: mol_type = other DNA
aacagcggcaccggcagcaga

SEQ ID NO: 14517 - DNA, 21 bp, synthetic construct
  misc_feature 1..21: note = Description of Artificial Sequence: Synthetic oligonucleotide
  source 1..21: mol_type = other DNA
agcggcagcagacccagcgtc

SEQ ID NO: 14518 - DNA, 21 bp, synthetic construct
  misc_feature 1..21: note = Description of Artificial Sequence: Synthetic oligonucleotide
  source 1..21: mol_type = other DNA
atgggggatcgttctcagggt

SEQ ID NO: 14519 - DNA, 21 bp, synthetic construct
  misc_feature 1..21: note = Description of Artificial Sequence: Synthetic oligonucleotide
  source 1..21: mol_type = other DNA
gggcataataaggctgtgggt

SEQ ID NO: 14520 - DNA, 21 bp, synthetic construct
  misc_feature 1..21: note = Description of Artificial Sequence: Synthetic oligonucleotide
  source 1..21: mol_type = other DNA
tcgtctcagaagcctggtggg

SEQ ID NO: 14521 - DNA, 21 bp, synthetic construct
  misc_feature 1..21: note = Description of Artificial Sequence: Synthetic oligonucleotide
  source 1..21: mol_type = other DNA
agcggcagccccgccaacaga

SEQ ID NO: 14522 - DNA, 21 bp, synthetic construct
  misc_feature 1..21: note = Description of Artificial Sequence: Synthetic oligonucleotide
  source 1..21: mol_type = other DNA
atgggcagcggcaccgccacc

SEQ ID NO: 14523 - DNA, 21 bp, synthetic construct
  misc_feature 1..21: note = Description of Artificial Sequence: Synthetic oligonucleotide
  source 1..21: mol_type = other DNA
attgggggtgggccttcttca

SEQ ID NO: 14524 - DNA, 21 bp, synthetic construct
  misc_feature 1..21: note = Description of Artificial Sequence: Synthetic oligonucleotide
  source 1..21: mol_type = other DNA
aatgttaggacgcctacgtcg

SEQ ID NO: 14525 - DNA, 21 bp, synthetic construct
  misc_feature 1..21: note = Description of Artificial Sequence: Synthetic oligonucleotide
  source 1..21: mol_type = other DNA
tctggggagagtcagcataag

SEQ ID NO: 14526 - DNA, 21 bp, synthetic construct
  misc_feature 1..21: note = Description of Artificial Sequence: Synthetic oligonucleotide
  source 1..21: mol_type = other DNA
caagtcagccccagcacccaa

SEQ ID NO: 14527 - DNA, 21 bp, synthetic construct
  misc_feature 1..21: note = Description of Artificial Sequence: Synthetic oligonucleotide
  source 1..21: mol_type = other DNA
gccagccacaaacccatcacc

SEQ ID NO: 14528 - DNA, 21 bp, synthetic construct
  misc_feature 1..21: note = Description of Artificial Sequence: Synthetic oligonucleotide
  source 1..21: mol_type = other DNA
gccagcgtccccagcaaagcc

SEQ ID NO: 14529 - DNA, 21 bp, synthetic construct
  misc_feature 1..21: note = Description of Artificial Sequence: Synthetic oligonucleotide
  source 1..21: mol_type = other DNA
aacacccaaagcaacagcaga

SEQ ID NO: 14530 - DNA, 21 bp, synthetic construct
  misc_feature 1..21: note = Description of Artificial Sequence: Synthetic oligonucleotide
  source 1..21: mol_type = other DNA
gttacgggtacgacgcagggg

SEQ ID NO: 14531 - DNA, 21 bp, synthetic construct
  misc_feature 1..21: note = Description of Artificial Sequence: Synthetic oligonucleotide
  source 1..21: mol_type = other DNA
acggggacgactgggcatagt

SEQ ID NO: 14532 - DNA, 21 bp, synthetic construct
  misc_feature 1..21: note = Description of Artificial Sequence: Synthetic oligonucleotide
  source 1..21: mol_type = other DNA
agcagaagccccagccaaagc

SEQ ID NO: 14533 - DNA, 21 bp, synthetic construct
  misc_feature 1..21: note = Description of Artificial Sequence: Synthetic oligonucleotide
  source 1..21: mol_type = other DNA
ggcgacatgcaaggcggcaaa

SEQ ID NO: 14534 - DNA, 21 bp, synthetic construct
  misc_feature 1..21: note = Description of Artificial Sequence: Synthetic oligonucleotide
  source 1..21: mol_type = other DNA
accaaagacaccagacccatc

SEQ ID NO: 14535 - DNA, 21 bp, synthetic construct
  misc_feature 1..21: note = Description of Artificial Sequence: Synthetic oligonucleotide
  source 1..21: mol_type = other DNA
cagaatactaggtctattgcg

SEQ ID NO: 14536 - DNA, 21 bp, synthetic construct
  misc_feature 1..21: note = Description of Artificial Sequence: Synthetic oligonucleotide
  source 1..21: mol_type = other DNA
cagagtgctgcgtctactaag

SEQ ID NO: 14537 - DNA, 21 bp, synthetic construct
  misc_feature 1..21: note = Description of Artificial Sequence: Synthetic oligonucleotide
  source 1..21: mol_type = other DNA
agaaacgacagcaaaagccac

SEQ ID NO: 14538 - DNA, 21 bp, synthetic construct
  misc_feature 1..21: note = Description of Artificial Sequence: Synthetic oligonucleotide
  source 1..21: mol_type = other DNA
agtacgcctcaggggtctggt

SEQ ID NO: 14539 - DNA, 21 bp, synthetic construct
  misc_feature 1..21: note = Description of Artificial Sequence: Synthetic oligonucleotide
  source 1..21: mol_type = other DNA
gctactgctagtaaggttacg

SEQ ID NO: 14540 - DNA, 21 bp, synthetic construct
  misc_feature 1..21: note = Description of Artificial Sequence: Synthetic oligonucleotide
  source 1..21: mol_type = other DNA
gaagccgtcgcccccaacaaa

SEQ ID NO: 14541 - DNA, 21 bp, synthetic construct
  misc_feature 1..21: note = Description of Artificial Sequence: Synthetic oligonucleotide
  source 1..21: mol_type = other DNA
gtggattcttctaggacttcg

SEQ ID NO: 14542 - DNA, 21 bp, synthetic construct
  misc_feature 1..21: note = Description of Artificial Sequence: Synthetic oligonucleotide
  source 1..21: mol_type = other DNA
ggcaacagcgccggcagcaaa

SEQ ID NO: 14543 - DNA, 21 bp, synthetic construct
  misc_feature 1..21: note = Description of Artificial Sequence: Synthetic oligonucleotide
  source 1..21: mol_type = other DNA
aatcggggggagaagcctggt

SEQ ID NO: 14544 - DNA, 21 bp, synthetic construct
  misc_feature 1..21: note = Description of Artificial Sequence: Synthetic oligonucleotide
  source 1..21: mol_type = other DNA
agtgtgttgaataaggggggt

SEQ ID NO: 14545 - DNA, 21 bp, synthetic construct
  misc_feature 1..21: note = Description of Artificial Sequence: Synthetic oligonucleotide
  source 1..21: mol_type = other DNA
cagaataatactgcgactcag

SEQ ID NO: 14546 - DNA, 21 bp, synthetic construct
  misc_feature 1..21: note = Description of Artificial Sequence: Synthetic oligonucleotide
  source 1..21: mol_type = other DNA
caggagaatgctgcgaacaag

SEQ ID NO: 14547 - DNA, 21 bp, synthetic construct
  misc_feature 1..21: note = Description of Artificial Sequence: Synthetic oligonucleotide
  source 1..21: mol_type = other DNA
gctagtgtgtcgaggagttcg

SEQ ID NO: 14548 - DNA, 21 bp, synthetic construct
  misc_feature 1..21: note = Description of Artificial Sequence: Synthetic oligonucleotide
  source 1..21: mol_type = other DNA
ggcgccggcgtcaaaaacctc

SEQ ID NO: 14549 - DNA, 21 bp, synthetic construct
  misc_feature 1..21: note = Description of Artificial Sequence: Synthetic oligonucleotide
  source 1..21: mol_type = other DNA
agaggcgacagcaacaaactc

SEQ ID NO: 14550 - DNA, 21 bp, synthetic construct
  misc_feature 1..21: note = Description of Artificial Sequence: Synthetic oligonucleotide
  source 1..21: mol_type = other DNA
agtagtaatagtgcggtgcgg

SEQ ID NO: 14551 - DNA, 21 bp, synthetic construct
  misc_feature 1..21: note = Description of Artificial Sequence: Synthetic oligonucleotide
  source 1..21: mol_type = other DNA
tctcagtcgggtcagggtact

SEQ ID NO: 14552 - DNA, 21 bp, synthetic construct
  misc_feature 1..21: note = Description of Artificial Sequence: Synthetic oligonucleotide
  source 1..21: mol_type = other DNA
agtgtggataggactcagggg

SEQ ID NO: 14553 - DNA, 21 bp, synthetic construct
  misc_feature 1..21: note = Description of Artificial Sequence: Synthetic oligonucleotide
  source 1..21: mol_type = other DNA
attggttctagtactaatgcg

SEQ ID NO: 14554 - DNA, 21 bp, synthetic construct
  misc_feature 1..21: note = Description of Artificial Sequence: Synthetic oligonucleotide
  source 1..21: mol_type = other DNA
gagaataataagtctcagatg

SEQ ID NO: 14555 - DNA, 21 bp, synthetic construct
  misc_feature 1..21: note = Description of Artificial Sequence: Synthetic oligonucleotide
  source 1..21: mol_type = other DNA
gggggttctaagtctgcgtcg

SEQ ID NO: 14556 - DNA, 21 bp, synthetic construct
  misc_feature 1..21: note = Description of Artificial Sequence: Synthetic oligonucleotide
  source 1..21: mol_type = other DNA
ctcggcacccaaccccccgtc

SEQ ID NO: 14557 - DNA, 21 bp, synthetic construct
  misc_feature 1..21: note = Description of Artificial Sequence: Synthetic oligonucleotide
  source 1..21: mol_type = other DNA
agtttgcataagccgacgtct

SEQ ID NO: 14558 - DNA, 21 bp, synthetic construct
  misc_feature 1..21: note = Description of Artificial Sequence: Synthetic oligonucleotide
  source 1..21: mol_type = other DNA
gggaagcagacttctgtgggt

SEQ ID NO: 14559 - DNA, 21 bp, synthetic construct
  misc_feature 1..21: note = Description of Artificial Sequence: Synthetic oligonucleotide
  source 1..21: mol_type = other DNA
aggggtcagactacgcctggg

SEQ ID NO: 14560 - DNA, 21 bp, synthetic construct
  misc_feature 1..21: note = Description of Artificial Sequence: Synthetic oligonucleotide
  source 1..21: mol_type = other DNA
agtacgggggagaatcggggg

SEQ ID NO: 14561 - DNA, 21 bp, synthetic construct
  misc_feature 1..21: note = Description of Artificial Sequence: Synthetic oligonucleotide
  source 1..21: mol_type = other DNA
agcgccggcaaaagcaccacc

SEQ ID NO: 14562 - DNA, 21 bp, synthetic construct
  misc_feature 1..21: note = Description of Artificial Sequence: Synthetic oligonucleotide
  source 1..21: mol_type = other DNA
agcggcggcaccgccatggtc

SEQ ID NO: 14563 - DNA, 21 bp, synthetic construct
  misc_feature 1..21: note = Description of Artificial Sequence: Synthetic oligonucleotide
  source 1..21: mol_type = other DNA
caccacaacgcccccgcccaa

SEQ ID NO: 14564 - DNA, 21 bp, synthetic construct
  misc_feature 1..21: note = Description of Artificial Sequence: Synthetic oligonucleotide
  source 1..21: mol_type = other DNA
acttcgggttctgataggctg

SEQ ID NO: 14565 - DNA, 21 bp, synthetic construct
  misc_feature 1..21: note = Description of Artificial Sequence: Synthetic oligonucleotide
  source 1..21: mol_type = other DNA
agacccgacaaacaaagcatc

SEQ ID NO: 14566 - DNA, 21 bp, synthetic construct
  misc_feature 1..21: note = Description of Artificial Sequence: Synthetic oligonucleotide
  source 1..21: mol_type = other DNA
aacaccacccaaaaaggcggc

SEQ ID NO: 14567 - DNA, 21 bp, synthetic construct
  misc_feature 1..21: note = Description of Artificial Sequence: Synthetic oligonucleotide
  source 1..21: mol_type = other DNA
actcagatttctacgactggt

SEQ ID NO: 14568 - DNA, 21 bp, synthetic construct
  misc_feature 1..21: note = Description of Artificial Sequence: Synthetic oligonucleotide
  source 1..21: mol_type = other DNA
atccccagcaaacccgccaac

SEQ ID NO: 14569 - DNA, 21 bp, synthetic construct
  misc_feature 1..21: note = Description of Artificial Sequence: Synthetic oligonucleotide
  source 1..21: mol_type = other DNA
gacggcaacaaagtcctcggc

SEQ ID NO: 14570 - DNA, 21 bp, synthetic construct
  misc_feature 1..21: note = Description of Artificial Sequence: Synthetic oligonucleotide
  source 1..21: mol_type = other DNA
gcccccggccaaaaacccctc

SEQ ID NO: 14571 - DNA, 21 bp, synthetic construct
  misc_feature 1..21: note = Description of Artificial Sequence: Synthetic oligonucleotide
  source 1..21: mol_type = other DNA
taccaagccgccgacaccaaa

SEQ ID NO: 14572 - DNA, 21 bp, synthetic construct
  misc_feature 1..21: note = Description of Artificial Sequence: Synthetic oligonucleotide
  source 1..21: mol_type = other DNA
ggtgagggtagtaagtcgcgg

SEQ ID NO: 14573 - DNA, 21 bp, synthetic construct
  misc_feature 1..21: note = Description of Artificial Sequence: Synthetic oligonucleotide
  source 1..21: mol_type = other DNA
gacgccaaagtcaacggcaga

SEQ ID NO: 14574 - DNA, 21 bp, synthetic construct
  misc_feature 1..21: note = Description of Artificial Sequence: Synthetic oligonucleotide
  source 1..21: mol_type = other DNA
gatggtgctaataggagtagt

SEQ ID NO: 14575 - DNA, 21 bp, synthetic construct
  misc_feature 1..21: note = Description of Artificial Sequence: Synthetic oligonucleotide
  source 1..21: mol_type = other DNA
tcttcgcagcagggtcctgcg

SEQ ID NO: 14576 - DNA, 21 bp, synthetic construct
  misc_feature 1..21: note = Description of Artificial Sequence: Synthetic oligonucleotide
  source 1..21: mol_type = other DNA
caaagaagcaaagacagcgcc

SEQ ID NO: 14577 - DNA, 21 bp, synthetic construct
  misc_feature 1..21: note = Description of Artificial Sequence: Synthetic oligonucleotide
  source 1..21: mol_type = other DNA
aatcgggttacgaagtctgag

SEQ ID NO: 14578 - DNA, 21 bp, synthetic construct
  misc_feature 1..21: note = Description of Artificial Sequence: Synthetic oligonucleotide
  source 1..21: mol_type = other DNA
gatcagcgtggtagtgtttcg

SEQ ID NO: 14579 - DNA, 21 bp, synthetic construct
  misc_feature 1..21: note = Description of Artificial Sequence: Synthetic oligonucleotide
  source 1..21: mol_type = other DNA
ggtcaggttccgaagactggg

SEQ ID NO: 14580 - DNA, 21 bp, synthetic construct
  misc_feature 1..21: note = Description of Artificial Sequence: Synthetic oligonucleotide
  source 1..21: mol_type = other DNA
tcgggtagttctaagggtcat

SEQ ID NO: 14581 - DNA, 21 bp, synthetic construct
  misc_feature 1..21: note = Description of Artificial Sequence: Synthetic oligonucleotide
  source 1..21: mol_type = other DNA
ctgcagcagaagtctcatggg

SEQ ID NO: 14582 - DNA, 21 bp, synthetic construct
  misc_feature 1..21: note = Description of Artificial Sequence: Synthetic oligonucleotide
  source 1..21: mol_type = other DNA
gacagcggcgccaacagagtc

SEQ ID NO: 14583 - DNA, 21 bp, synthetic construct
  misc_feature 1..21: note = Description of Artificial Sequence: Synthetic oligonucleotide
  source 1..21: mol_type = other DNA
gcgcagggtaataaggcgcat

SEQ ID NO: 14584 - DNA, 21 bp, synthetic construct
  misc_feature 1..21: note = Description of Artificial Sequence: Synthetic oligonucleotide
  source 1..21: mol_type = other DNA
gctagtgataataagccttct

SEQ ID NO: 14585 - DNA, 21 bp, synthetic construct
  misc_feature 1..21: note = Description of Artificial Sequence: Synthetic oligonucleotide
  source 1..21: mol_type = other DNA
tctcaggcgcatagttcggcg

SEQ ID NO: 14586 - DNA, 21 bp, synthetic construct
  misc_feature 1..21: note = Description of Artificial Sequence: Synthetic oligonucleotide
  source 1..21: mol_type = other DNA
aattcgtcgaagactagttcg

SEQ ID NO: 14587 - DNA, 21 bp, synthetic construct
  misc_feature 1..21: note = Description of Artificial Sequence: Synthetic oligonucleotide
  source 1..21: mol_type = other DNA
acttctgagggtacgcatagg

SEQ ID NO: 14588 - DNA, 21 bp, synthetic construct
  misc_feature 1..21: note = Description of Artificial Sequence: Synthetic oligonucleotide
  source 1..21: mol_type = other DNA
gatgggcctaagcctgggtct

SEQ ID NO: 14589 - DNA, 21 bp, synthetic construct
  misc_feature 1..21: note = Description of Artificial Sequence: Synthetic oligonucleotide
  source 1..21: mol_type = other DNA
gggaggtctcagacgtctgtg

SEQ ID NO: 14590 - DNA, 21 bp, synthetic construct
  misc_feature 1..21: note = Description of Artificial Sequence: Synthetic oligonucleotide
  source 1..21: mol_type = other DNA
acccaagaaggcaaacaaagc

SEQ ID NO: 14591 - DNA, 21 bp, synthetic construct
  misc_feature 1..21: note = Description of Artificial Sequence: Synthetic oligonucleotide
  source 1..21: mol_type = other DNA
gaactcagcagccccagaaac

SEQ ID NO: 14592 - DNA, 21 bp, synthetic construct
  misc_feature 1..21: note = Description of Artificial Sequence: Synthetic oligonucleotide
  source 1..21: mol_type = other DNA
gccagcagcagcaaaaccagc

SEQ ID NO: 14593 - DNA, 21 bp, synthetic construct
  misc_feature 1..21: note = Description of Artificial Sequence: Synthetic oligonucleotide
  source 1..21: mol_type = other DNA
gcgggtactacgaagaatagt

SEQ ID NO: 14594 - DNA, 21 bp, synthetic construct
  misc_feature 1..21: note = Description of Artificial Sequence: Synthetic oligonucleotide
  source 1..21: mol_type = other DNA
ggcgtcgccaaagtcggcggc

SEQ ID NO: 14595 - DNA, 21 bp, synthetic construct
  misc_feature 1..21: note = Description of Artificial Sequence: Synthetic oligonucleotide
  source 1..21: mol_type = other DNA
agtacgaatactaaggctttg

SEQ ID NO: 14596 - DNA, 21 bp, synthetic construct
  misc_feature 1..21: note = Description of Artificial Sequence: Synthetic oligonucleotide
  source 1..21: mol_type = other DNA
gagcatacggggaagcagatg

SEQ ID NO: 14597 - DNA, 21 bp, synthetic construct
  misc_feature 1..21: note = Description of Artificial Sequence: Synthetic oligonucleotide
  source 1..21: mol_type = other DNA
caaaccggcagcaacaacaaa

SEQ ID NO: 14598 - DNA, 21 bp, synthetic construct
  misc_feature 1..21: note = Description of Artificial Sequence: Synthetic oligonucleotide
  source 1..21: mol_type = other DNA
ctccaaaacaaaagcagcctc

SEQ ID NO: 14599 - DNA, 21 bp, synthetic construct
  misc_feature 1..21: note = Description of Artificial Sequence: Synthetic oligonucleotide
  source 1..21: mol_type = other DNA
tctccttcgacgaatgggcgt

SEQ ID NO: 14600 - DNA, 21 bp, synthetic construct
  misc_feature 1..21: note = Description of Artificial Sequence: Synthetic oligonucleotide
  source 1..21: mol_type = other DNA
aattcggtgcctgggagtact

SEQ ID NO: 14601 - DNA, 21 bp, synthetic construct
  misc_feature 1..21: note = Description of Artificial Sequence: Synthetic oligonucleotide
  source 1..21: mol_type = other DNA
accaccgtcaaacccaacctc

SEQ ID NO: 14602 - DNA, 21 bp, synthetic construct
  misc_feature 1..21: note = Description of Artificial Sequence: Synthetic oligonucleotide
  source 1..21: mol_type = other DNA
ggcgacacccccagcagaaaa

SEQ ID NO: 14603 - DNA, 21 bp, synthetic construct
  misc_feature 1..21: note = Description of Artificial Sequence: Synthetic oligonucleotide
  source 1..21: mol_type = other DNA
accaccaccaaagccagcgcc

SEQ ID NO: 14604 - DNA, 21 bp, synthetic construct
  misc_feature 1..21: note = Description of Artificial Sequence: Synthetic oligonucleotide
  source 1..21: mol_type = other DNA
gctggtatgggtaaggcttct

SEQ ID NO: 14605 - DNA, 21 bp, synthetic construct
  misc_feature 1..21: note = Description of Artificial Sequence: Synthetic oligonucleotide
  source 1..21: mol_type = other DNA
ctgtctgggcagtctagtact

SEQ ID NO: 14606 - DNA, 21 bp, synthetic construct
  misc_feature 1..21: note = Description of Artificial Sequence: Synthetic oligonucleotide
  source 1..21: mol_type = other DNA
aggggttcgagtagttcgacg

SEQ ID NO: 14607 - DNA, 21 bp, synthetic construct
  misc_feature 1..21: note = Description of Artificial Sequence: Synthetic oligonucleotide
  source 1..21: mol_type = other DNA
tcgggttcgaaggctctggag

SEQ ID NO: 14608 - DNA, 21 bp, synthetic construct
  misc_feature 1..21: note = Description of Artificial Sequence: Synthetic oligonucleotide
  source 1..21: mol_type = other DNA
ggccccagcaccaaaagcctc

SEQ ID NO: 14609 - DNA, 21 bp, synthetic construct
  misc_feature 1..21: note = Description of Artificial Sequence: Synthetic oligonucleotide
  source 1..21: mol_type = other DNA
ggcaccagcaccgccctcaaa

SEQ ID NO: 14610 - DNA, 21 bp, synthetic construct
  misc_feature 1..21: note = Description of Artificial Sequence: Synthetic oligonucleotide
  source 1..21: mol_type = other DNA
ctccccagcaccaacggcagc

SEQ ID NO: 14611 - DNA, 21 bp, synthetic construct
  misc_feature 1..21: note = Description of Artificial Sequence: Synthetic oligonucleotide
  source 1..21: mol_type = other DNA
aataggcaggataagccgagt

SEQ ID NO: 14612 - DNA, 21 bp, synthetic construct
  misc_feature 1..21: note = Description of Artificial Sequence: Synthetic oligonucleotide
  source 1..21: mol_type = other DNA
agaagcggcgaaagacccagc

SEQ ID NO: 14613 - DNA, 21 bp, synthetic construct
  misc_feature 1..21: note = Description of Artificial Sequence: Synthetic oligonucleotide
  source 1..21: mol_type = other DNA
gctcagcatcctaagcagcag

SEQ ID NO: 14614 - DNA, 21 bp, synthetic construct
  misc_feature 1..21: note = Description of Artificial Sequence: Synthetic oligonucleotide
  source 1..21: mol_type = other DNA
ggcagcgacagaaacagcggc

SEQ ID NO: 14615 - DNA, 21 bp, synthetic construct
  misc_feature 1..21: note = Description of Artificial Sequence: Synthetic oligonucleotide
  source 1..21: mol_type = other DNA
tcgcagactgctgctcctacg

SEQ ID NO: 14616 - DNA, 21 bp, synthetic construct
  misc_feature 1..21: note = Description of Artificial Sequence: Synthetic oligonucleotide
  source 1..21: mol_type = other DNA
agcgtcagcgacagaaacaaa

SEQ ID NO: 14617 - DNA, 21 bp, synthetic construct
  misc_feature 1..21: note = Description of Artificial Sequence: Synthetic oligonucleotide
  source 1..21: mol_type = other DNA
gggccgacgcagaaggctaat

SEQ ID NO: 14618 - DNA, 21 bp, synthetic construct
  misc_feature 1..21: note = Description of Artificial Sequence: Synthetic oligonucleotide
  source 1..21: mol_type = other DNA
ggtggggcgtcttcgaatacg

SEQ ID NO: 14619 - DNA, 21 bp, synthetic construct
  misc_feature 1..21: note = Description of Artificial Sequence: Synthetic oligonucleotide
  source 1..21: mol_type = other DNA
agcagcaaagccaaaagcgac

SEQ ID NO: 14620 - DNA, 21 bp, synthetic construct
  misc_feature 1..21: note = Description of Artificial Sequence: Synthetic oligonucleotide
  source 1..21: mol_type = other DNA
tctactaatagggcgacgggt

SEQ ID NO: 14621 - DNA, 21 bp, synthetic construct
  misc_feature 1..21: note = Description of Artificial Sequence: Synthetic oligonucleotide
  source 1..21: mol_type = other DNA
aggacggggactggggctact

SEQ ID NO: 14622 - DNA, 21 bp, synthetic construct
  misc_feature 1..21: note = Description of Artificial Sequence: Synthetic oligonucleotide
  source 1..21: mol_type = other DNA
agaagcagcacccccacccaa

SEQ ID NO: 14623 - DNA, 21 bp, synthetic construct
  misc_feature 1..21: note = Description of Artificial Sequence: Synthetic oligonucleotide
  source 1..21: mol_type = other DNA
agcaccgccagcaaacaagcc

SEQ ID NO: 14624 - DNA, 21 bp, synthetic construct
  misc_feature 1..21: note = Description of Artificial Sequence: Synthetic oligonucleotide
  source 1..21: mol_type = other DNA
actggtgctggtcctaatctg

SEQ ID NO: 14625 - DNA, 21 bp, synthetic construct
  misc_feature 1..21: note = Description of Artificial Sequence: Synthetic oligonucleotide
  source 1..21: mol_type = other DNA
gccagcaccagccccgccacc

SEQ ID NO: 14626 - DNA, 21 bp, synthetic construct
  misc_feature 1..21: note = Description of Artificial Sequence: Synthetic oligonucleotide
  source 1..21: mol_type = other DNA
gttccgagttcttcgcctaag

SEQ ID NO: 14627 - DNA, 21 bp, synthetic construct
  misc_feature 1..21: note = Description of Artificial Sequence: Synthetic oligonucleotide
  source 1..21: mol_type = other DNA
gtccccaccagcaaagccgtc

SEQ ID NO: 14628 - DNA, 21 bp, synthetic construct
  misc_feature 1..21: note = Description of Artificial Sequence: Synthetic oligonucleotide
  source 1..21: mol_type = other DNA
aaaggcgccagcaacgtcagc

SEQ ID NO: 14629 - DNA, 21 bp, synthetic construct
  misc_feature 1..21: note = Description of Artificial Sequence: Synthetic oligonucleotide
  source 1..21: mol_type = other DNA
aatggtgctgataagcagcgg

SEQ ID NO: 14630 - DNA, 21 bp, synthetic construct
  misc_feature 1..21: note = Description of Artificial Sequence: Synthetic oligonucleotide
  source 1..21: mol_type = other DNA
acccaaagccaaagagccagc

SEQ ID NO: 14631 - DNA, 21 bp, synthetic construct
  misc_feature 1..21: note = Description of Artificial Sequence: Synthetic oligonucleotide
  source 1..21: mol_type = other DNA
acccacggcgcccccaacgcc

SEQ ID NO: 14632 - DNA, 21 bp, synthetic construct
  misc_feature 1..21: note = Description of Artificial Sequence: Synthetic oligonucleotide
  source 1..21: mol_type = other DNA
agaaccggcgacagcggcggc

SEQ ID NO: 14633 - DNA, 21 bp, synthetic construct
  misc_feature 1..21: note = Description of Artificial Sequence: Synthetic oligonucleotide
  source 1..21: mol_type = other DNA
agaggcgaaagcaaattcacc

SEQ ID NO: 14634 - DNA, 21 bp, synthetic construct
  misc_feature 1..21: note = Description of Artificial Sequence: Synthetic oligonucleotide
  source 1..21: mol_type = other DNA
agtcagaattctaagcaggtt

SEQ ID NO: 14635 - DNA, 21 bp, synthetic construct
  misc_feature 1..21: note = Description of Artificial Sequence: Synthetic oligonucleotide
  source 1..21: mol_type = other DNA
atgcctgggaagacgtctagt

SEQ ID NO: 14636 - DNA, 21 bp, synthetic construct
  misc_feature 1..21: note = Description of Artificial Sequence: Synthetic oligonucleotide
  source 1..21: mol_type = other DNA
atggcgtctaaggataatcgg

SEQ ID NO: 14637 - DNA, 21 bp, synthetic construct
  misc_feature 1..21: note = Description of Artificial Sequence: Synthetic oligonucleotide
  source 1..21: mol_type = other DNA
ctcaccgaaaaaagcagcaaa

SEQ ID NO: 14638 - DNA, 21 bp, synthetic construct
  misc_feature 1..21: note = Description of Artificial Sequence: Synthetic oligonucleotide
  source 1..21: mol_type = other DNA
gacagcggcaaaagcagcaga

SEQ ID NO: 14639 - DNA, 21 bp, synthetic construct
  misc_feature 1..21: note = Description of Artificial Sequence: Synthetic oligonucleotide
  source 1..21: mol_type = other DNA
gacggcagcaacggccacaga

SEQ ID NO: 14640 - DNA, 21 bp, synthetic construct
  misc_feature 1..21: note = Description of Artificial Sequence: Synthetic oligonucleotide
  source 1..21: mol_type = other DNA
gcgggtgttagggatatgact

SEQ ID NO: 14641 - DNA, 21 bp, synthetic construct
  misc_feature 1..21: note = Description of Artificial Sequence: Synthetic oligonucleotide
  source 1..21: mol_type = other DNA
ggtctgccgaatggtcagaag

SEQ ID NO: 14642 - DNA, 21 bp, synthetic construct
  misc_feature 1..21: note = Description of Artificial Sequence: Synthetic oligonucleotide
  source 1..21: mol_type = other DNA
gtcggcagcagagaccaagtc

SEQ ID NO: 14643 - DNA, 21 bp, synthetic construct
  misc_feature 1..21: note = Description of Artificial Sequence: Synthetic oligonucleotide
  source 1..21: mol_type = other DNA
gtttcgaagcctgcgatggtg

SEQ ID NO: 14644 - DNA, 21 bp, synthetic construct
  misc_feature 1..21: note = Description of Artificial Sequence: Synthetic oligonucleotide
  source 1..21: mol_type = other DNA
gtttctacggctaaggcgcag

SEQ ID NO: 14645 - DNA, 21 bp, synthetic construct
  misc_feature 1..21: note = Description of Artificial Sequence: Synthetic oligonucleotide
  source 1..21: mol_type = other DNA
tctagggcgactcagactgtt

SEQ ID NO: 14646 - DNA, 21 bp, synthetic construct
  misc_feature 1..21: note = Description of Artificial Sequence: Synthetic oligonucleotide
  source 1..21: mol_type = other DNA
caacccaacagcaaacccgtc

SEQ ID NO: 14647 - DNA, 21 bp, synthetic construct
  misc_feature 1..21: note = Description of Artificial Sequence: Synthetic oligonucleotide
  source 1..21: mol_type = other DNA
agcggcaaaggccaactcaac

SEQ ID NO: 14648 - DNA, 21 bp, synthetic construct
  misc_feature 1..21: note = Description of Artificial Sequence: Synthetic oligonucleotide
  source 1..21: mol_type = other DNA
ggggcggctagtgggcaggtt

SEQ ID NO: 14649 - DNA, 21 bp, synthetic construct
  misc_feature 1..21: note = Description of Artificial Sequence: Synthetic oligonucleotide
  source 1..21: mol_type = other DNA
agtcagatggctaattcgaag

SEQ ID NO: 14650 - DNA, 21 bp, synthetic construct
  misc_feature 1..21: note = Description of Artificial Sequence: Synthetic oligonucleotide
  source 1..21: mol_type = other DNA
caaaccagaaccgccaaccaa

SEQ ID NO: 14651 - DNA, 21 bp, synthetic construct
  misc_feature 1..21: note = Description of Artificial Sequence: Synthetic oligonucleotide
  source 1..21: mol_type = other DNA
gaaggcgccgacagacacaga

SEQ ID NO: 14652 - DNA, 21 bp, synthetic construct
  misc_feature 1..21: note = Description of Artificial Sequence: Synthetic oligonucleotide
  source 1..21: mol_type = other DNA
gttcagaatgagcggtcgcgg

SEQ ID NO: 14653 - DNA, 21 bp, synthetic construct
  misc_feature 1..21: note = Description of Artificial Sequence: Synthetic oligonucleotide
  source 1..21: mol_type = other DNA
tcgtcgaatagtacgcgtagt

SEQ ID NO: 14654 - DNA, 21 bp, synthetic construct
  misc_feature 1..21: note = Description of Artificial Sequence: Synthetic oligonucleotide
  source 1..21: mol_type = other DNA
agcaacggcaacagcagagcc

SEQ ID NO: 14655 - DNA, 21 bp, synthetic construct
  misc_feature 1..21: note = Description of Artificial Sequence: Synthetic oligonucleotide
  source 1..21: mol_type = other DNA
agcgtcagcaaaagcaccaac

SEQ ID NO: 14656 - DNA, 21 bp, synthetic construct
  misc_feature 1..21: note = Description of Artificial Sequence: Synthetic oligonucleotide
  source 1..21: mol_type = other DNA
ggcatcggcaaaaacggcgcc

SEQ ID NO: 14657 - DNA, 21 bp, synthetic construct
  misc_feature 1..21: note = Description of Artificial Sequence: Synthetic oligonucleotide
  source 1..21: mol_type = other DNA
gccgaaagcagaccccccctc

SEQ ID NO: 14658 - DNA, 21 bp, synthetic construct
  misc_feature 1..21: note = Description of Artificial Sequence: Synthetic oligonucleotide
  source 1..21: mol_type = other DNA
acgaataatactcgtcctgag

SEQ ID NO: 14659 - DNA, 21 bp, synthetic construct
  misc_feature 1..21: note = Description of Artificial Sequence: Synthetic oligonucleotide
  source 1..21: mol_type = other DNA
gtcgtcgccaaaagcagcagc

SEQ ID NO: 14660 - DNA, 21 bp, synthetic construct
  misc_feature 1..21: note = Description of Artificial Sequence: Synthetic oligonucleotide
  source 1..21: mol_type = other DNA
cagggtgcggggtctatggct

SEQ ID NO: 14661 - DNA, 21 bp, synthetic construct
  misc_feature 1..21: note = Description of Artificial Sequence: Synthetic oligonucleotide
  source 1..21: mol_type = other DNA
actggggttgagaagcttcat

SEQ ID NO: 14662 - DNA, 21 bp, synthetic construct
  misc_feature 1..21: note = Description of Artificial Sequence: Synthetic oligonucleotide
  source 1..21: mol_type = other DNA
ctcagcgacaaacccgccaga

SEQ ID NO: 14663 - DNA, 21 bp, synthetic construct
  misc_feature 1..21: note = Description of Artificial Sequence: Synthetic oligonucleotide
  source 1..21: mol_type = other DNA
gagcggtctccgtctgctact

SEQ ID NO: 14664 - DNA, 21 bp, synthetic construct
  misc_feature 1..21: note = Description of Artificial Sequence: Synthetic oligonucleotide
  source 1..21: mol_type = other DNA
attacggcgagtccgactatt

SEQ ID NO: 14665 - DNA, 21 bp, synthetic construct
  misc_feature 1..21: note = Description of Artificial Sequence: Synthetic oligonucleotide
  source 1..21: mol_type = other DNA
ggtttgaataaggaggttcgt

SEQ ID NO: 14666 - DNA, 21 bp, synthetic construct
  misc_feature 1..21: note = Description of Artificial Sequence: Synthetic oligonucleotide
  source 1..21: mol_type = other DNA
catggggatcggacgaattcg

SEQ ID NO: 14667 - DNA, 21 bp, synthetic construct
  misc_feature 1..21: note = Description of Artificial Sequence: Synthetic oligonucleotide
  source 1..21: mol_type = other DNA
ctcggcgacagacaaatgcac

SEQ ID NO: 14668 - DNA, 21 bp, synthetic construct
  misc_feature 1..21: note = Description of Artificial Sequence: Synthetic oligonucleotide
  source 1..21: mol_type = other DNA
caaagcatccacaaaagcgaa

SEQ ID NO: 14669 - DNA, 21 bp, synthetic construct
  misc_feature 1..21: note = Description of Artificial Sequence: Synthetic oligonucleotide
  source 1..21: mol_type = other DNA
agcaccagcagccaaaaaacc

SEQ ID NO: 14670 - DNA, 21 bp, synthetic construct
  misc_feature 1..21: note = Description of Artificial Sequence: Synthetic oligonucleotide
  source 1..21: mol_type = other DNA
gatcgggcggtgcagaatttg

SEQ ID NO: 14671 - DNA, 21 bp, synthetic construct
  misc_feature 1..21: note = Description of Artificial Sequence: Synthetic oligonucleotide
  source 1..21: mol_type = other DNA
accagcggcaccagcatcctc

SEQ ID NO: 14672 - DNA, 21 bp, synthetic construct
  misc_feature 1..21: note = Description of Artificial Sequence: Synthetic oligonucleotide
  source 1..21: mol_type = other DNA
caacaaggcgccagccaagcc

SEQ ID NO: 14673 - DNA, 21 bp, synthetic construct
  misc_feature 1..21: note = Description of Artificial Sequence: Synthetic oligonucleotide
  source 1..21: mol_type = other DNA
ctcggcggcgccagcgtcaaa

SEQ ID NO: 14674 - DNA, 21 bp, synthetic construct
  misc_feature 1..21: note = Description of Artificial Sequence: Synthetic oligonucleotide
  source 1..21: mol_type = other DNA
actaagagtactccgtcggtg

SEQ ID NO: 14675 - DNA, 21 bp, synthetic construct
  misc_feature 1..21: note = Description of Artificial Sequence: Synthetic oligonucleotide
  source 1..21: mol_type = other DNA
gccctcaccagcaaaagccaa

SEQ ID NO: 14676 - DNA, 21 bp, synthetic construct
  misc_feature 1..21: note = Description of Artificial Sequence: Synthetic oligonucleotide
  source 1..21: mol_type = other DNA
aaaagcagcggcgaccaaacc

SEQ ID NO: 14677 - DNA, 21 bp, synthetic construct
  misc_feature 1..21: note = Description of Artificial Sequence: Synthetic oligonucleotide
  source 1..21: mol_type = other DNA
cacagcacccccaccaacacc

SEQ ID NO: 14678 - DNA, 21 bp, synthetic construct
  misc_feature 1..21: note = Description of Artificial Sequence: Synthetic oligonucleotide
  source 1..21: mol_type = other DNA
cttcagacttctaagcctcag

SEQ ID NO: 14679 - DNA, 21 bp, synthetic construct
  misc_feature 1..21: note = Description of Artificial Sequence: Synthetic oligonucleotide
  source 1..21: mol_type = other DNA
agagccagcccccccagcagc

SEQ ID NO: 14680 - DNA, 21 bp, synthetic construct
  misc_feature 1..21: note = Description of Artificial Sequence: Synthetic oligonucleotide
  source 1..21: mol_type = other DNA
acgccggctaaggctcagctg

SEQ ID NO: 14681 - DNA, 21 bp, synthetic construct
  misc_feature 1..21: note = Description of Artificial Sequence: Synthetic oligonucleotide
  source 1..21: mol_type = other DNA
tcgtctgatcggtctaatgtg

SEQ ID NO: 14682 - DNA, 21 bp, synthetic construct
  misc_feature 1..21: note = Description of Artificial Sequence: Synthetic oligonucleotide
  source 1..21: mol_type = other DNA
accggcaacagcagcgtcatc

SEQ ID NO: 14683 - DNA, 21 bp, synthetic construct
  misc_feature 1..21: note = Description of Artificial Sequence: Synthetic oligonucleotide
  source 1..21: mol_type = other DNA
cttagtggtaataaggctatt

SEQ ID NO: 14684 - DNA, 21 bp, synthetic construct
  misc_feature 1..21: note = Description of Artificial Sequence: Synthetic oligonucleotide
  source 1..21: mol_type = other DNA
aatggggcttctcggactact

SEQ ID NO: 14685 - DNA, 21 bp, synthetic construct
  misc_feature 1..21: note = Description of Artificial Sequence: Synthetic oligonucleotide
  source 1..21: mol_type = other DNA
gaaagcaccgccacccccaga

SEQ ID NO: 14686 - DNA, 21 bp, synthetic construct
  misc_feature 1..21: note = Description of Artificial Sequence: Synthetic oligonucleotide
  source 1..21: mol_type = other DNA
aaaagcagcggcagccccctc

SEQ ID NO: 14687 - DNA, 21 bp, synthetic construct
  misc_feature 1..21: note = Description of Artificial Sequence: Synthetic oligonucleotide
  source 1..21: mol_type = other DNA
caggggggtgcgtctaatcgt

SEQ ID NO: 14688 - DNA, 21 bp, synthetic construct
  misc_feature 1..21: note = Description of Artificial Sequence: Synthetic oligonucleotide
  source 1..21: mol_type = other DNA
catgttaagccgactagtgtg

SEQ ID NO: 14689 - DNA, 21 bp, synthetic construct
  misc_feature 1..21: note = Description of Artificial Sequence: Synthetic oligonucleotide
  source 1..21: mol_type = other DNA
ggtgttaattctggtggtcat

SEQ ID NO: 14690 - DNA, 21 bp, synthetic construct
  misc_feature 1..21: note = Description of Artificial Sequence: Synthetic oligonucleotide
  source 1..21: mol_type = other DNA
acccccagcgccaaaggcaac

SEQ ID NO: 14691 - DNA, 21 bp, synthetic construct
  misc_feature 1..21: note = Description of Artificial Sequence: Synthetic oligonucleotide
  source 1..21: mol_type = other DNA
aaacaaggcagcagcagcgtc

SEQ ID NO: 14692 - DNA, 21 bp, synthetic construct
  misc_feature 1..21: note = Description of Artificial Sequence: Synthetic oligonucleotide
  source 1..21: mol_type = other DNA
actaagcagtcgtctattgcg

SEQ ID NO: 14693 - DNA, 21 bp, synthetic construct
  misc_feature 1..21: note = Description of Artificial Sequence: Synthetic oligonucleotide
  source 1..21: mol_type = other DNA
agcagagcccaaggcaccgcc

SEQ ID NO: 14694 - DNA, 21 bp, synthetic construct
  misc_feature 1..21: note = Description of Artificial Sequence: Synthetic oligonucleotide
  source 1..21: mol_type = other DNA
actggtcggaatgggaatcag

SEQ ID NO: 14695 - DNA, 21 bp, synthetic construct
  misc_feature 1..21: note = Description of Artificial Sequence: Synthetic oligonucleotide
  source 1..21: mol_type = other DNA
ggttcgcctcagaagaatcag

SEQ ID NO: 14696 - DNA, 21 bp, synthetic construct
  misc_feature 1..21: note = Description of Artificial Sequence: Synthetic oligonucleotide
  source 1..21: mol_type = other DNA
acccccagcaaagaaagaagc

SEQ ID NO: 14697 - DNA, 21 bp, synthetic construct
  misc_feature 1..21: note = Description of Artificial Sequence: Synthetic oligonucleotide
  source 1..21: mol_type = other DNA
atcaccagccaaaaaagcgtc

SEQ ID NO: 14698 - DNA, 21 bp, synthetic construct
  misc_feature 1..21: note = Description of Artificial Sequence: Synthetic oligonucleotide
  source 1..21: mol_type = other DNA
attcagactaaggatcagctt

SEQ ID NO: 14699 - DNA, 21 bp, synthetic construct
  misc_feature 1..21: note = Description of Artificial Sequence: Synthetic oligonucleotide
  source 1..21: mol_type = other DNA
tatgggtctgatagtaatcgt

SEQ ID NO: 14700 - DNA, 21 bp, synthetic construct
  misc_feature 1..21: note = Description of Artificial Sequence: Synthetic oligonucleotide
  source 1..21: mol_type = other DNA
ggtgggtcgcctcggggtact

SEQ ID NO: 14701 - DNA, 21 bp, synthetic construct
  misc_feature 1..21: note = Description of Artificial Sequence: Synthetic oligonucleotide
  source 1..21: mol_type = other DNA
cttacgaaggcgtcttctgtt

SEQ ID NO: 14702 - DNA, 21 bp, synthetic construct
  misc_feature 1..21: note = Description of Artificial Sequence: Synthetic oligonucleotide
  source 1..21: mol_type = other DNA
agttcttctcagaagccgatg

SEQ ID NO: 14703 - DNA, 21 bp, synthetic construct
  misc_feature 1..21: note = Description of Artificial Sequence: Synthetic oligonucleotide
  source 1..21: mol_type = other DNA
gacagccaacaaagaggcagc

SEQ ID NO: 14704 - DNA, 21 bp, synthetic construct
  misc_feature 1..21: note = Description of Artificial Sequence: Synthetic oligonucleotide
  source 1..21: mol_type = other DNA
tcgactgtgaaggctcatagt

SEQ ID NO: 14705 - DNA, 21 bp, synthetic construct
  misc_feature 1..21: note = Description of Artificial Sequence: Synthetic oligonucleotide
  source 1..21: mol_type = other DNA
aagtcgcagtcgccttctacg

SEQ ID NO: 14706 - DNA, 21 bp, synthetic construct
  misc_feature 1..21: note = Description of Artificial Sequence: Synthetic oligonucleotide
  source 1..21: mol_type = other DNA
atcagcaccagccccggcaaa

SEQ ID NO: 14707 - DNA, 21 bp, synthetic construct
  misc_feature 1..21: note = Description of Artificial Sequence: Synthetic oligonucleotide
  source 1..21: mol_type = other DNA
gggtcgggtcagaggcctgat

SEQ ID NO: 14708 - DNA, 21 bp, synthetic construct
  misc_feature 1..21: note = Description of Artificial Sequence: Synthetic oligonucleotide
  source 1..21: mol_type = other DNA
accgtcagcaaaagcaacagc

SEQ ID NO: 14709 - DNA, 21 bp, synthetic construct
  misc_feature 1..21: note = Description of Artificial Sequence: Synthetic oligonucleotide
  source 1..21: mol_type = other DNA
cacagcggcggcagcagcgtc

SEQ ID NO: 14710 - DNA, 21 bp, synthetic construct
  misc_feature 1..21: note = Description of Artificial Sequence: Synthetic oligonucleotide
  source 1..21: mol_type = other DNA
ggcagcaccaaacccctcctc

SEQ ID NO: 14711 - DNA, 21 bp, synthetic construct
  misc_feature 1..21: note = Description of Artificial Sequence: Synthetic oligonucleotide
  source 1..21: mol_type = other DNA
cacaccaccaaaagcgccacc

SEQ ID NO: 14712 - DNA, 21 bp, synthetic construct
  misc_feature 1..21: note = Description of Artificial Sequence: Synthetic oligonucleotide
  source 1..21: mol_type = other DNA
agcagcagcaaaggcaacagc

SEQ ID NO: 14713 - DNA, 21 bp, synthetic construct
  misc_feature 1..21: note = Description of Artificial Sequence: Synthetic oligonucleotide
  source 1..21: mol_type = other DNA
tctctggcgaagggtaataat

SEQ ID NO: 14714 - DNA, 21 bp, synthetic construct
  misc_feature 1..21: note = Description of Artificial Sequence: Synthetic oligonucleotide
  source 1..21: mol_type = other DNA
gcccaaggcaaacccggcccc

SEQ ID NO: 14715 - DNA, 21 bp, synthetic construct
  misc_feature 1..21: note = Description of Artificial Sequence: Synthetic oligonucleotide
  source 1..21: mol_type = other DNA
accggcggcaacaaaagcacc

SEQ ID NO: 14716 - DNA, 21 bp, synthetic construct
  misc_feature 1..21: note = Description of Artificial Sequence: Synthetic oligonucleotide
  source 1..21: mol_type = other DNA
atgggtgataatcgggctagt

SEQ ID NO: 14717 - DNA, 21 bp, synthetic construct
  misc_feature 1..21: note = Description of Artificial Sequence: Synthetic oligonucleotide
  source 1..21: mol_type = other DNA
gagcgtactgtttctccgacg

SEQ ID NO: 14718 - DNA, 21 bp, synthetic construct
  misc_feature 1..21: note = Description of Artificial Sequence: Synthetic oligonucleotide
  source 1..21: mol_type = other DNA
tcgccgattcaggctagtaag

SEQ ID NO: 14719 - DNA, 21 bp, synthetic construct
  misc_feature 1..21: note = Description of Artificial Sequence: Synthetic oligonucleotide
  source 1..21: mol_type = other DNA
actggtacgaatgctgtgatg

SEQ ID NO: 14720 - DNA, 21 bp, synthetic construct
  misc_feature 1..21: note = Description of Artificial Sequence: Synthetic oligonucleotide
  source 1..21: mol_type = other DNA
catactaatacgaaggtgggg

SEQ ID NO: 14721 - DNA, 21 bp, synthetic construct
  misc_feature 1..21: note = Description of Artificial Sequence: Synthetic oligonucleotide
  source 1..21: mol_type = other DNA
aagggtcagggtccggcggtg

SEQ ID NO: 14722 - DNA, 21 bp, synthetic construct
  misc_feature 1..21: note = Description of Artificial Sequence: Synthetic oligonucleotide
  source 1..21: mol_type = other DNA
aattcggatcgttctcatgtg

SEQ ID NO: 14723 - DNA, 21 bp, synthetic construct
  misc_feature 1..21: note = Description of Artificial Sequence: Synthetic oligonucleotide
  source 1..21: mol_type = other DNA
accaccagcagcaaacaagaa

SEQ ID NO: 14724 - DNA, 21 bp, synthetic construct
  misc_feature 1..21: note = Description of Artificial Sequence: Synthetic oligonucleotide
  source 1..21: mol_type = other DNA
ctccaaaccaaaagccaaacc

SEQ ID NO: 14725 - DNA, 21 bp, synthetic construct
  misc_feature 1..21: note = Description of Artificial Sequence: Synthetic oligonucleotide
  source 1..21: mol_type = other DNA
gatgctgggggtaatagtgct

SEQ ID NO: 14726 - DNA, 21 bp, synthetic construct
  misc_feature 1..21: note = Description of Artificial Sequence: Synthetic oligonucleotide
  source 1..21: mol_type = other DNA
aagggttcgaataatggtcag

SEQ ID NO: 14727 - DNA, 21 bp, synthetic construct
  misc_feature 1..21: note = Description of Artificial Sequence: Synthetic oligonucleotide
  source 1..21: mol_type = other DNA
ggcctcggcaaaagcgccctc

SEQ ID NO: 14728 - DNA, 21 bp, synthetic construct
  misc_feature 1..21: note = Description of Artificial Sequence: Synthetic oligonucleotide
  source 1..21: mol_type = other DNA
tcgcagggtgcgccgacgaag

SEQ ID NO: 14729 - DNA, 21 bp, synthetic construct
  misc_feature 1..21: note = Description of Artificial Sequence: Synthetic oligonucleotide
  source 1..21: mol_type = other DNA
accaccagcgacaaaatcgtc

SEQ ID NO: 14730 - DNA, 21 bp, synthetic construct
  misc_feature 1..21: note = Description of Artificial Sequence: Synthetic oligonucleotide
  source 1..21: mol_type = other DNA
catagtagtcagtctcagagt

SEQ ID NO: 14731 - DNA, 21 bp, synthetic construct
  misc_feature 1..21: note = Description of Artificial Sequence: Synthetic oligonucleotide
  source 1..21: mol_type = other DNA
gaagccggcagacccaacctc

SEQ ID NO: 14732 - DNA, 21 bp, synthetic construct
  misc_feature 1..21: note = Description of Artificial Sequence: Synthetic oligonucleotide
  source 1..21: mol_type = other DNA
ggcgccgacagaaaagcccaa

SEQ ID NO: 14733 - DNA, 21 bp, synthetic construct
  misc_feature 1..21: note = Description of Artificial Sequence: Synthetic oligonucleotide
  source 1..21: mol_type = other DNA
tacggcaaaagcaaccaaatc

SEQ ID NO: 14734 - DNA, 21 bp, synthetic construct
  misc_feature 1..21: note = Description of Artificial Sequence: Synthetic oligonucleotide
  source 1..21: mol_type = other DNA
tgtactaatggggcgaataag

SEQ ID NO: 14735 - DNA, 21 bp, synthetic construct
  misc_feature 1..21: note = Description of Artificial Sequence: Synthetic oligonucleotide
  source 1..21: mol_type = other DNA
caaagcagccaagccatgacc

SEQ ID NO: 14736 - DNA, 21 bp, synthetic construct
  misc_feature 1..21: note = Description of Artificial Sequence: Synthetic oligonucleotide
  source 1..21: mol_type = other DNA
cacaccaccagccccaacaac

SEQ ID NO: 14737 - DNA, 21 bp, synthetic construct
  misc_feature 1..21: note = Description of Artificial Sequence: Synthetic oligonucleotide
  source 1..21: mol_type = other DNA
tctgggacgtcttctcattct

SEQ ID NO: 14738 - DNA, 21 bp, synthetic construct
  misc_feature 1..21: note = Description of Artificial Sequence: Synthetic oligonucleotide
  source 1..21: mol_type = other DNA
agcagaaacaacggcagcggc

SEQ ID NO: 14739 - DNA, 21 bp, synthetic construct
  misc_feature 1..21: note = Description of Artificial Sequence: Synthetic oligonucleotide
  source 1..21: mol_type = other DNA
actctgaatactgctgcgggg

SEQ ID NO: 14740 - DNA, 21 bp, synthetic construct
  misc_feature 1..21: note = Description of Artificial Sequence: Synthetic oligonucleotide
  source 1..21: mol_type = other DNA
gaaagacaaagcaccagcagc

SEQ ID NO: 14741 - DNA, 21 bp, synthetic construct
  misc_feature 1..21: note = Description of Artificial Sequence: Synthetic oligonucleotide
  source 1..21: mol_type = other DNA
ggcagcggcgccccccaaacc

SEQ ID NO: 14742 - DNA, 21 bp, synthetic construct
  misc_feature 1..21: note = Description of Artificial Sequence: Synthetic oligonucleotide
  source 1..21: mol_type = other DNA
gagcagaatactgttaatcgt

SEQ ID NO: 14743 - DNA, 21 bp, synthetic construct
  misc_feature 1..21: note = Description of Artificial Sequence: Synthetic oligonucleotide
  source 1..21: mol_type = other DNA
aaaaccgccacccccagcctc

SEQ ID NO: 14744 - DNA, 21 bp, synthetic construct
  misc_feature 1..21: note = Description of Artificial Sequence: Synthetic oligonucleotide
  source 1..21: mol_type = other DNA
agcgaaaaagcccaaccccac

SEQ ID NO: 14745 - DNA, 21 bp, synthetic construct
  misc_feature 1..21: note = Description of Artificial Sequence: Synthetic oligonucleotide
  source 1..21: mol_type = other DNA
aatggtcatacttcgactctg

SEQ ID NO: 14746 - DNA, 21 bp, synthetic construct
  misc_feature 1..21: note = Description of Artificial Sequence: Synthetic oligonucleotide
  source 1..21: mol_type = other DNA
agcaccaccagcgaacccaga

SEQ ID NO: 14747 - DNA, 21 bp, synthetic construct
  misc_feature 1..21: note = Description of Artificial Sequence: Synthetic oligonucleotide
  source 1..21: mol_type = other DNA
tcggggactagtccgcatctg

SEQ ID NO: 14748 - DNA, 21 bp, synthetic construct
  misc_feature 1..21: note = Description of Artificial Sequence: Synthetic oligonucleotide
  source 1..21: mol_type = other DNA
actccttctaagggtgcgact

SEQ ID NO: 14749 - DNA, 21 bp, synthetic construct
  misc_feature 1..21: note = Description of Artificial Sequence: Synthetic oligonucleotide
  source 1..21: mol_type = other DNA
gggcaggagaataaggttact

SEQ ID NO: 14750 - DNA, 21 bp, synthetic construct
  misc_feature 1..21: note = Description of Artificial Sequence: Synthetic oligonucleotide
  source 1..21: mol_type = other DNA
ggtacgtcgcagctttctaag

SEQ ID NO: 14751 - DNA, 21 bp, synthetic construct
  misc_feature 1..21: note = Description of Artificial Sequence: Synthetic oligonucleotide
  source 1..21: mol_type = other DNA
caaagcgtcaaaccccccgtc

SEQ ID NO: 14752 - DNA, 21 bp, synthetic construct
  misc_feature 1..21: note = Description of Artificial Sequence: Synthetic oligonucleotide
  source 1..21: mol_type = other DNA
gacaacggcagacccagccaa

SEQ ID NO: 14753 - DNA, 21 bp, synthetic construct
  misc_feature 1..21: note = Description of Artificial Sequence: Synthetic oligonucleotide
  source 1..21: mol_type = other DNA
gcttcgggtaagcctacttct

SEQ ID NO: 14754 - DNA, 21 bp, synthetic construct
  misc_feature 1..21: note = Description of Artificial Sequence: Synthetic oligonucleotide
  source 1..21: mol_type = other DNA
tgtaataattctggtaagggg

SEQ ID NO: 14755 - DNA, 21 bp, synthetic construct
  misc_feature 1..21: note = Description of Artificial Sequence: Synthetic oligonucleotide
  source 1..21: mol_type = other DNA
ttcaccgaacccggccaaaaa

SEQ ID NO: 14756 - DNA, 21 bp, synthetic construct
  misc_feature 1..21: note = Description of Artificial Sequence: Synthetic oligonucleotide
  source 1..21: mol_type = other DNA
agcggcgccagcaccggcagc

SEQ ID NO: 14757 - DNA, 21 bp, synthetic construct
  misc_feature 1..21: note = Description of Artificial Sequence: Synthetic oligonucleotide
  source 1..21: mol_type = other DNA
gcgtcgcagacgagtaataag

SEQ ID NO: 14758 - DNA, 21 bp, synthetic construct
  misc_feature 1..21: note = Description of Artificial Sequence: Synthetic oligonucleotide
  source 1..21: mol_type = other DNA
tctagtgcgtctaaggggaat

SEQ ID NO: 14759 - DNA, 21 bp, synthetic construct
  misc_feature 1..21: note = Description of Artificial Sequence: Synthetic oligonucleotide
  source 1..21: mol_type = other DNA
tctacgtcgggtcggcatgag

SEQ ID NO: 14760 - DNA, 21 bp, synthetic construct
  misc_feature 1..21: note = Description of Artificial Sequence: Synthetic oligonucleotide
  source 1..21: mol_type = other DNA
ctcggcgacagcagaaccatg

SEQ ID NO: 14761 - DNA, 21 bp, synthetic construct
  misc_feature 1..21: note = Description of Artificial Sequence: Synthetic oligonucleotide
  source 1..21: mol_type = other DNA
gccgccacccccggcacccac

SEQ ID NO: 14762 - DNA, 21 bp, synthetic construct
  misc_feature 1..21: note = Description of Artificial Sequence: Synthetic oligonucleotide
  source 1..21: mol_type = other DNA
agcggcaacagcagacaaagc

SEQ ID NO: 14763 - DNA, 21 bp, synthetic construct
  misc_feature 1..21: note = Description of Artificial Sequence: Synthetic oligonucleotide
  source 1..21: mol_type = other DNA
agacaaggcaacgcccccagc

SEQ ID NO: 14764 - DNA, 21 bp, synthetic construct
  misc_feature 1..21: note = Description of Artificial Sequence: Synthetic oligonucleotide
  source 1..21: mol_type = other DNA
agcacccaaagccccacccac

SEQ ID NO: 14765 - DNA, 21 bp, synthetic construct
  misc_feature 1..21: note = Description of Artificial Sequence: Synthetic oligonucleotide
  source 1..21: mol_type = other DNA
caaggcggcagccaccaactc

SEQ ID NO: 14766 - DNA, 21 bp, synthetic construct
  misc_feature 1..21: note = Description of Artificial Sequence: Synthetic oligonucleotide
  source 1..21: mol_type = other DNA
acccccagcaccgccggcggc

SEQ ID NO: 14767 - DNA, 21 bp, synthetic construct
  misc_feature 1..21: note = Description of Artificial Sequence: Synthetic oligonucleotide
  source 1..21: mol_type = other DNA
actttggagcagaagagtgtg

SEQ ID NO: 14768 - DNA, 21 bp, synthetic construct
  misc_feature 1..21: note = Description of Artificial Sequence: Synthetic oligonucleotide
  source 1..21: mol_type = other DNA
aatgttggtaattcgagtgtt

SEQ ID NO: 14769 - DNA, 21 bp, synthetic construct
  misc_feature 1..21: note = Description of Artificial Sequence: Synthetic oligonucleotide
  source 1..21: mol_type = other DNA
atcaccagcaaagtcgccacc

SEQ ID NO: 14770 - DNA, 21 bp, synthetic construct
  misc_feature 1..21: note = Description of Artificial Sequence: Synthetic oligonucleotide
  source 1..21: mol_type = other DNA
acgacgaatcggcctggtgat

SEQ ID NO: 14771 - DNA, 21 bp, synthetic construct
  misc_feature 1..21: note = Description of Artificial Sequence: Synthetic oligonucleotide
  source 1..21: mol_type = other DNA
agtgctagtaatacgccgagg

SEQ ID NO: 14772 - DNA, 21 bp, synthetic construct
  misc_feature 1..21: note = Description of Artificial Sequence: Synthetic oligonucleotide
  source 1..21: mol_type = other DNA
gacggcgccagaaccgccgtc

SEQ ID NO: 14773 - DNA, 21 bp, synthetic construct
  misc_feature 1..21: note = Description of Artificial Sequence: Synthetic oligonucleotide
  source 1..21: mol_type = other DNA
gggagtcgggcgcctgctctt

SEQ ID NO: 14774 - DNA, 21 bp, synthetic construct
  misc_feature 1..21: note = Description of Artificial Sequence: Synthetic oligonucleotide
  source 1..21: mol_type = other DNA
gacagcaacagcccccaaaga

SEQ ID NO: 14775 - DNA, 21 bp, synthetic construct
  misc_feature 1..21: note = Description of Artificial Sequence: Synthetic oligonucleotide
  source 1..21: mol_type = other DNA
ggtagtaagtctacgatttct

SEQ ID NO: 14776 - DNA, 21 bp, synthetic construct
  misc_feature 1..21: note = Description of Artificial Sequence: Synthetic oligonucleotide
  source 1..21: mol_type = other DNA
agtgggcctagtccgagttcg

SEQ ID NO: 14777 - DNA, 21 bp, synthetic construct
  misc_feature 1..21: note = Description of Artificial Sequence: Synthetic oligonucleotide
  source 1..21: mol_type = other DNA
tctaaggggaattctgctgtg

SEQ ID NO: 14778 - DNA, 21 bp, synthetic construct
  misc_feature 1..21: note = Description of Artificial Sequence: Synthetic oligonucleotide
  source 1..21: mol_type = other DNA
aacgtcagcaaaagcagcagc

SEQ ID NO: 14779 - DNA, 21 bp, synthetic construct
  misc_feature 1..21: note = Description of Artificial Sequence: Synthetic oligonucleotide
  source 1..21: mol_type = other DNA
actgggcagggtaaggcttcg

SEQ ID NO: 14780 - DNA, 21 bp, synthetic construct
  misc_feature 1..21: note = Description of Artificial Sequence: Synthetic oligonucleotide
  source 1..21: mol_type = other DNA
gggagggctgagagtcctcgt

SEQ ID NO: 14781 - DNA, 21 bp, synthetic construct
  misc_feature 1..21: note = Description of Artificial Sequence: Synthetic oligonucleotide
  source 1..21: mol_type = other DNA
caagccgccaaaagcaccagc

SEQ ID NO: 14782 - DNA, 21 bp, synthetic construct
  misc_feature 1..21: note = Description of Artificial Sequence: Synthetic oligonucleotide
  source 1..21: mol_type = other DNA
agccccatcaaaagcagcgcc

SEQ ID NO: 14783 - DNA, 21 bp, synthetic construct
  misc_feature 1..21: note = Description of Artificial Sequence: Synthetic oligonucleotide
  source 1..21: mol_type = other DNA
aaccaagccgccagccacaaa

SEQ ID NO: 14784 - DNA, 21 bp, synthetic construct
  misc_feature 1..21: note = Description of Artificial Sequence: Synthetic oligonucleotide
  source 1..21: mol_type = other DNA
actgcgactaattctcctagg

SEQ ID NO: 14785 - DNA, 21 bp, synthetic construct
  misc_feature 1..21: note = Description of Artificial Sequence: Synthetic oligonucleotide
  source 1..21: mol_type = other DNA
aggggtacttcgacgcttgct

SEQ ID NO: 14786 - DNA, 21 bp, synthetic construct
  misc_feature 1..21: note = Description of Artificial Sequence: Synthetic oligonucleotide
  source 1..21: mol_type = other DNA
cagccgacggagaagtctgtg

SEQ ID NO: 14787 - DNA, 21 bp, synthetic construct
  misc_feature 1..21: note = Description of Artificial Sequence: Synthetic oligonucleotide
  source 1..21: mol_type = other DNA
gccggcatgggcaccaacacc

SEQ ID NO: 14788 - DNA, 21 bp, synthetic construct
  misc_feature 1..21: note = Description of Artificial Sequence: Synthetic oligonucleotide
  source 1..21: mol_type = other DNA
gggcttgagcggaatttgggg

SEQ ID NO: 14789 - DNA, 21 bp, synthetic construct
  misc_feature 1..21: note = Description of Artificial Sequence: Synthetic oligonucleotide
  source 1..21: mol_type = other DNA
tcgcttacggctccggcgaag

SEQ ID NO: 14790 - DNA, 21 bp, synthetic construct
  misc_feature 1..21: note = Description of Artificial Sequence: Synthetic oligonucleotide
  source 1..21: mol_type = other DNA
actagtgagccttctgctaag

SEQ ID NO: 14791 - DNA, 21 bp, synthetic construct
  misc_feature 1..21: note = Description of Artificial Sequence: Synthetic oligonucleotide
  source 1..21: mol_type = other DNA
caaagagaaagccccaccaga

SEQ ID NO: 14792 - DNA, 21 bp, synthetic construct
  misc_feature 1..21: note = Description of Artificial Sequence: Synthetic oligonucleotide
  source 1..21: mol_type = other DNA
ctcagccccggcgccggcagc

SEQ ID NO: 14793 - DNA, 21 bp, synthetic construct
  misc_feature 1..21: note = Description of Artificial Sequence: Synthetic oligonucleotide
  source 1..21: mol_type = other DNA
cttgctggtggttctacgtcg

SEQ ID NO: 14794 - DNA, 21 bp, synthetic construct
  misc_feature 1..21: note = Description of Artificial Sequence: Synthetic oligonucleotide
  source 1..21: mol_type = other DNA
aatactggtgctgggcagctg

SEQ ID NO: 14795 - DNA, 21 bp, synthetic construct
  misc_feature 1..21: note = Description of Artificial Sequence: Synthetic oligonucleotide
  source 1..21: mol_type = other DNA
acgtgtacgaaggaggggtgt

SEQ ID NO: 14796 - DNA, 21 bp, synthetic construct
  misc_feature 1..21: note = Description of Artificial Sequence: Synthetic oligonucleotide
  source 1..21: mol_type = other DNA
gtcaccaccaacaaaaccgaa

SEQ ID NO: 14797 - DNA, 21 bp, synthetic construct
  misc_feature 1..21: note = Description of Artificial Sequence: Synthetic oligonucleotide
  source 1..21: mol_type = other DNA
actttgtctaagagtgcggct

SEQ ID NO: 14798 - DNA, 21 bp, synthetic construct
  misc_feature 1..21: note = Description of Artificial Sequence: Synthetic oligonucleotide
  source 1..21: mol_type = other DNA
aggggtgagcagtctactttt

SEQ ID NO: 14799 - DNA, 21 bp, synthetic construct
  misc_feature 1..21: note = Description of Artificial Sequence: Synthetic oligonucleotide
  source 1..21: mol_type = other DNA
gctactactccgggtcatact

SEQ ID NO: 14800 - DNA, 21 bp, synthetic construct
  misc_feature 1..21: note = Description of Artificial Sequence: Synthetic oligonucleotide
  source 1..21: mol_type = other DNA
catgcgtcttctcagtctaag

SEQ ID NO: 14801 - DNA, 21 bp, synthetic construct
  misc_feature 1..21: note = Description of Artificial Sequence: Synthetic oligonucleotide
  source 1..21: mol_type = other DNA
aggagtcatgataaggcggcg

SEQ ID NO: 14802 - DNA, 21 bp, synthetic construct
  misc_feature 1..21: note = Description of Artificial Sequence: Synthetic oligonucleotide
  source 1..21: mol_type = other DNA
cagaaggaggataggattgcg

SEQ ID NO: 14803 - DNA, 21 bp, synthetic construct
  misc_feature 1..21: note = Description of Artificial Sequence: Synthetic oligonucleotide
  source 1..21: mol_type = other DNA
gttacgaatacgaagcctcag

SEQ ID NO: 14804 - DNA, 21 bp, synthetic construct
  misc_feature 1..21: note = Description of Artificial Sequence: Synthetic oligonucleotide
  source 1..21: mol_type = other DNA
tctggtagtaataagttttcg

SEQ ID NO: 14805 - DNA, 21 bp, synthetic construct
  misc_feature 1..21: note = Description of Artificial Sequence: Synthetic oligonucleotide
  source 1..21: mol_type = other DNA
gttgctaagtcgcctatgact

SEQ ID NO: 14806 - DNA, 21 bp, synthetic construct
  misc_feature 1..21: note = Description of Artificial Sequence: Synthetic oligonucleotide
  source 1..21: mol_type = other DNA
aattcgtcgtctcctacgcat

SEQ ID NO: 14807 - DNA, 21 bp, synthetic construct
  misc_feature 1..21: note = Description of Artificial Sequence: Synthetic oligonucleotide
  source 1..21: mol_type = other DNA
gacagcaccgccaaacccaga

SEQ ID NO: 14808 - DNA, 21 bp, synthetic construct
  misc_feature 1..21: note = Description of Artificial Sequence: Synthetic oligonucleotide
  source 1..21: mol_type = other DNA
aacatcagcggcagcagcaaa

SEQ ID NO: 14809 - DNA, 21 bp, synthetic construct
  misc_feature 1..21: note = Description of Artificial Sequence: Synthetic oligonucleotide
  source 1..21: mol_type = other DNA
acgggggggggtcagtctctt

SEQ ID NO: 14810 - DNA, 21 bp, synthetic construct
  misc_feature 1..21: note = Description of Artificial Sequence: Synthetic oligonucleotide
  source 1..21: mol_type = other DNA
agagacggcggcagcagcaga

SEQ ID NO: 14811 - DNA, 21 bp, synthetic construct
  misc_feature 1..21: note = Description of Artificial Sequence: Synthetic oligonucleotide
  source 1..21: mol_type = other DNA
gccggcaccggcaaactcatc

SEQ ID NO: 14812 - DNA, 21 bp, synthetic construct
  misc_feature 1..21: note = Description of Artificial Sequence: Synthetic oligonucleotide
  source 1..21: mol_type = other DNA
atcagcaccgacaaaatgaaa

SEQ ID NO: 14813 - DNA, 21 bp, synthetic construct
  misc_feature 1..21: note = Description of Artificial Sequence: Synthetic oligonucleotide
  source 1..21: mol_type = other DNA
atgagttcggggaagaatttg

SEQ ID NO: 14814 - DNA, 21 bp, synthetic construct
  misc_feature 1..21: note = Description of Artificial Sequence: Synthetic oligonucleotide
  source 1..21: mol_type = other DNA
ggttctggtcttggtggtgtg

SEQ ID NO: 14815 - DNA, 21 bp, synthetic construct
  misc_feature 1..21: note = Description of Artificial Sequence: Synthetic oligonucleotide
  source 1..21: mol_type = other DNA
ttcggcagcaccaaacacgaa

SEQ ID NO: 14816 - DNA, 21 bp, synthetic construct
  misc_feature 1..21: note = Description of Artificial Sequence: Synthetic oligonucleotide
  source 1..21: mol_type = other DNA
agtgagaatagtaagcctggt

SEQ ID NO: 14817 - DNA, 21 bp, synthetic construct
  misc_feature 1..21: note = Description of Artificial Sequence: Synthetic oligonucleotide
  source 1..21: mol_type = other DNA
gaaagaagcaccgccggcgtc

SEQ ID NO: 14818 - DNA, 21 bp, synthetic construct
  misc_feature 1..21: note = Description of Artificial Sequence: Synthetic oligonucleotide
  source 1..21: mol_type = other DNA
accatcagcggcaacagagaa

SEQ ID NO: 14819 - DNA, 21 bp, synthetic construct
  misc_feature 1..21: note = Description of Artificial Sequence: Synthetic oligonucleotide
  source 1..21: mol_type = other DNA
actgggaattcttctactatg

SEQ ID NO: 14820 - DNA, 21 bp, synthetic construct
  misc_feature 1..21: note = Description of Artificial Sequence: Synthetic oligonucleotide
  source 1..21: mol_type = other DNA
atgggtggtcaggtgcctgcg

SEQ ID NO: 14821 - DNA, 21 bp, synthetic construct
  misc_feature 1..21: note = Description of Artificial Sequence: Synthetic oligonucleotide
  source 1..21: mol_type = other DNA
caaagcctcaaacccgtcagc

SEQ ID NO: 14822 - DNA, 21 bp, synthetic construct
  misc_feature 1..21: note = Description of Artificial Sequence: Synthetic oligonucleotide
  source 1..21: mol_type = other DNA
cagaatgattctcggactagt

SEQ ID NO: 14823 - DNA, 21 bp, synthetic construct
  misc_feature 1..21: note = Description of Artificial Sequence: Synthetic oligonucleotide
  source 1..21: mol_type = other DNA
catgttaagacgagtccgggt

SEQ ID NO: 14824 - DNA, 21 bp, synthetic construct
  misc_feature 1..21: note = Description of Artificial Sequence: Synthetic oligonucleotide
  source 1..21: mol_type = other DNA
ctcaccaacaaacccgtcagc

SEQ ID NO: 14825 - DNA, 21 bp, synthetic construct
  misc_feature 1..21: note = Description of Artificial Sequence: Synthetic oligonucleotide
  source 1..21: mol_type = other DNA
gacagcggcaaacaaagcagc

SEQ ID NO: 14826 - DNA, 21 bp, synthetic construct
  misc_feature 1..21: note = Description of Artificial Sequence: Synthetic oligonucleotide
  source 1..21: mol_type = other DNA
gagaggggtgatgggggtcgt

SEQ ID NO: 14827 - DNA, 21 bp, synthetic construct
  misc_feature 1..21: note = Description of Artificial Sequence: Synthetic oligonucleotide
  source 1..21: mol_type = other DNA
ggcaacgccagcaaaggcggc

SEQ ID NO: 14828 - DNA, 21 bp, synthetic construct
  misc_feature 1..21: note = Description of Artificial Sequence: Synthetic oligonucleotide
  source 1..21: mol_type = other DNA
gtggcgtcgggttcttctggt

SEQ ID NO: 14829 - DNA, 21 bp, synthetic construct
  misc_feature 1..21: note = Description of Artificial Sequence: Synthetic oligonucleotide
  source 1..21: mol_type = other DNA
accggcatcggcacccccaaa

SEQ ID NO: 14830 - DNA, 21 bp, synthetic construct
  misc_feature 1..21: note = Description of Artificial Sequence: Synthetic oligonucleotide
  source 1..21: mol_type = other DNA
tcgcgggctccttcgagtgcg

SEQ ID NO: 14831 - DNA, 21 bp, synthetic construct
  misc_feature 1..21: note = Description of Artificial Sequence: Synthetic oligonucleotide
  source 1..21: mol_type = other DNA
actagtagggggactcaggcg

SEQ ID NO: 14832 - DNA, 21 bp, synthetic construct
  misc_feature 1..21: note = Description of Artificial Sequence: Synthetic oligonucleotide
  source 1..21: mol_type = other DNA
aagcgggagaatactgcggtt

SEQ ID NO: 14833 - DNA, 21 bp, synthetic construct
  misc_feature 1..21: note = Description of Artificial Sequence: Synthetic oligonucleotide
  source 1..21: mol_type = other DNA
gctggtacttcttctatttcg

SEQ ID NO: 14834 - DNA, 21 bp, synthetic construct
  misc_feature 1..21: note = Description of Artificial Sequence: Synthetic oligonucleotide
  source 1..21: mol_type = other DNA
agcaccagcagaagcaacacc

SEQ ID NO: 14835 - DNA, 21 bp, synthetic construct
  misc_feature 1..21: note = Description of Artificial Sequence: Synthetic oligonucleotide
  source 1..21: mol_type = other DNA
accagcgccgtcaaaaccaac

SEQ ID NO: 14836 - DNA, 21 bp, synthetic construct
  misc_feature 1..21: note = Description of Artificial Sequence: Synthetic oligonucleotide
  source 1..21: mol_type = other DNA
caaagaagccccgaccaaaaa

SEQ ID NO: 14837 - DNA, 21 bp, synthetic construct
  misc_feature 1..21: note = Description of Artificial Sequence: Synthetic oligonucleotide
  source 1..21: mol_type = other DNA
caaatcggcggcaccggcagc

SEQ ID NO: 14838 - DNA, 21 bp, synthetic construct
  misc_feature 1..21: note = Description of Artificial Sequence: Synthetic oligonucleotide
  source 1..21: mol_type = other DNA
cgggagggtactcataattcg

SEQ ID NO: 14839 - DNA, 21 bp, synthetic construct
  misc_feature 1..21: note = Description of Artificial Sequence: Synthetic oligonucleotide
  source 1..21: mol_type = other DNA
caaagcagccccaaagtcagc

SEQ ID NO: 14840 - DNA, 21 bp, synthetic construct
  misc_feature 1..21: note = Description of Artificial Sequence: Synthetic oligonucleotide
  source 1..21: mol_type = other DNA
gtccaaggcaaacccagccaa

SEQ ID NO: 14841 - DNA, 21 bp, synthetic construct
  misc_feature 1..21: note = Description of Artificial Sequence: Synthetic oligonucleotide
  source 1..21: mol_type = other DNA
aacagcagcaacaacggcagc

SEQ ID NO: 14842 - DNA, 21 bp, synthetic construct
  misc_feature 1..21: note = Description of Artificial Sequence: Synthetic oligonucleotide
  source 1..21: mol_type = other DNA
gtgcagtcgaagggttcgatg

SEQ ID NO: 14843 - DNA, 21 bp, synthetic construct
  misc_feature 1..21: note = Description of Artificial Sequence: Synthetic oligonucleotide
  source 1..21: mol_type = other DNA
accaacgacagcagaagccac

SEQ ID NO: 14844 - DNA, 21 bp, synthetic construct
  misc_feature 1..21: note = Description of Artificial Sequence: Synthetic oligonucleotide
  source 1..21: mol_type = other DNA
ctcagcaccaaaagcaacgtc

SEQ ID NO: 14845 - DNA, 21 bp, synthetic construct
  misc_feature 1..21: note = Description of Artificial Sequence: Synthetic oligonucleotide
  source 1..21: mol_type = other DNA
gcccaaaacaccgtcggcaga

SEQ ID NO: 14846 - DNA, 21 bp, synthetic construct
  misc_feature 1..21: note = Description of Artificial Sequence: Synthetic oligonucleotide
  source 1..21: mol_type = other DNA
gggatgaattcttcttctaag

SEQ ID NO: 14847 - DNA, 21 bp, synthetic construct
  misc_feature 1..21: note = Description of Artificial Sequence: Synthetic oligonucleotide
  source 1..21: mol_type = other DNA
tctagtgttactaagtcggct

SEQ ID NO: 14848 - DNA, 21 bp, synthetic construct
  misc_feature 1..21: note = Description of Artificial Sequence: Synthetic oligonucleotide
  source 1..21: mol_type = other DNA
tcgcatacgtcgaaggcttct

SEQ ID NO: 14849 - DNA, 21 bp, synthetic construct
  misc_feature 1..21: note = Description of Artificial Sequence: Synthetic oligonucleotide
  source 1..21: mol_type = other DNA
ggtactacgtctccgacgact

SEQ ID NO: 14850 - DNA, 21 bp, synthetic construct
  misc_feature 1..21: note = Description of Artificial Sequence: Synthetic oligonucleotide
  source 1..21: mol_type = other DNA
tctatggttagtgatagtaag

SEQ ID NO: 14851 - DNA, 21 bp, synthetic construct
  misc_feature 1..21: note = Description of Artificial Sequence: Synthetic oligonucleotide
  source 1..21: mol_type = other DNA
gggactaagagtgctcttggg

SEQ ID NO: 14852 - DNA, 21 bp, synthetic construct
  misc_feature 1..21: note = Description of Artificial Sequence: Synthetic oligonucleotide
  source 1..21: mol_type = other DNA
aagatggggtctgcttcttct

SEQ ID NO: 14853 - DNA, 21 bp, synthetic construct
  misc_feature 1..21: note = Description of Artificial Sequence: Synthetic oligonucleotide
  source 1..21: mol_type = other DNA
atcaccagcggcaaacaagaa

SEQ ID NO: 14854 - DNA, 21 bp, synthetic construct
  misc_feature 1..21: note = Description of Artificial Sequence: Synthetic oligonucleotide
  source 1..21: mol_type = other DNA
gacgccagcagagcccccagc

SEQ ID NO: 14855 - DNA, 21 bp, synthetic construct
  misc_feature 1..21: note = Description of Artificial Sequence: Synthetic oligonucleotide
  source 1..21: mol_type = other DNA
ggtattaatactggtaatggg

SEQ ID NO: 14856 - DNA, 21 bp, synthetic construct
  misc_feature 1..21: note = Description of Artificial Sequence: Synthetic oligonucleotide
  source 1..21: mol_type = other DNA
gtcagaaccggcacccccaac

SEQ ID NO: 14857 - DNA, 21 bp, synthetic construct
  misc_feature 1..21: note = Description of Artificial Sequence: Synthetic oligonucleotide
  source 1..21: mol_type = other DNA
agcgtcggccaaaaacccctc

SEQ ID NO: 14858 - DNA, 21 bp, synthetic construct
  misc_feature 1..21: note = Description of Artificial Sequence: Synthetic oligonucleotide
  source 1..21: mol_type = other DNA
agtcctgctcgggctgcggtg

SEQ ID NO: 14859 - DNA, 21 bp, synthetic construct
  misc_feature 1..21: note = Description of Artificial Sequence: Synthetic oligonucleotide
  source 1..21: mol_type = other DNA
gccgtcggcagccccacccaa

SEQ ID NO: 14860 - DNA, 21 bp, synthetic construct
  misc_feature 1..21: note = Description of Artificial Sequence: Synthetic oligonucleotide
  source 1..21: mol_type = other DNA
gaggctaaggttaagcctgat

SEQ ID NO: 14861 - DNA, 21 bp, synthetic construct
  misc_feature 1..21: note = Description of Artificial Sequence: Synthetic oligonucleotide
  source 1..21: mol_type = other DNA
cacaccggcagcggccaagcc

SEQ ID NO: 14862 - DNA, 21 bp, synthetic construct
  misc_feature 1..21: note = Description of Artificial Sequence: Synthetic oligonucleotide
  source 1..21: mol_type = other DNA
gcccccagcaaaagccacgaa

SEQ ID NO: 14863 - DNA, 21 bp, synthetic construct
  misc_feature 1..21: note = Description of Artificial Sequence: Synthetic oligonucleotide
  source 1..21: mol_type = other DNA
ggcagcaacggcgccggcccc

SEQ ID NO: 14864 - DNA, 21 bp, synthetic construct
  misc_feature 1..21: note = Description of Artificial Sequence: Synthetic oligonucleotide
  source 1..21: mol_type = other DNA
ggtcagactcttgggggtaag

SEQ ID NO: 14865 - DNA, 21 bp, synthetic construct
  misc_feature 1..21: note = Description of Artificial Sequence: Synthetic oligonucleotide
  source 1..21: mol_type = other DNA
ctcagaaccgaacacacccaa

SEQ ID NO: 14866 - DNA, 21 bp, synthetic construct
  misc_feature 1..21: note = Description of Artificial Sequence: Synthetic oligonucleotide
  source 1..21: mol_type = other DNA
actaagaatgcgtctgcggtt

SEQ ID NO: 14867 - DNA, 21 bp, synthetic construct
  misc_feature 1..21: note = Description of Artificial Sequence: Synthetic oligonucleotide
  source 1..21: mol_type = other DNA
accagcggcggcagcttcatc

SEQ ID NO: 14868 - DNA, 21 bp, synthetic construct
  misc_feature 1..21: note = Description of Artificial Sequence: Synthetic oligonucleotide
  source 1..21: mol_type = other DNA
atgagaagcgacagccaactc

SEQ ID NO: 14869 - DNA, 21 bp, synthetic construct
  misc_feature 1..21: note = Description of Artificial Sequence: Synthetic oligonucleotide
  source 1..21: mol_type = other DNA
aacggcgaaagacaaacccac

SEQ ID NO: 14870 - DNA, 21 bp, synthetic construct
  misc_feature 1..21: note = Description of Artificial Sequence: Synthetic oligonucleotide
  source 1..21: mol_type = other DNA
agcaccggcaaaatcaccacc

SEQ ID NO: 14871 - DNA, 21 bp, synthetic construct
  misc_feature 1..21: note = Description of Artificial Sequence: Synthetic oligonucleotide
  source 1..21: mol_type = other DNA
agcagccaagccgtcggccaa

SEQ ID NO: 14872 - DNA, 21 bp, synthetic construct
  misc_feature 1..21: note = Description of Artificial Sequence: Synthetic oligonucleotide
  source 1..21: mol_type = other DNA
cagcaggtgagtaagccggtt

SEQ ID NO: 14873 - DNA, 21 bp, synthetic construct
  misc_feature 1..21: note = Description of Artificial Sequence: Synthetic oligonucleotide
  source 1..21: mol_type = other DNA
cacagcagcaacgccaccaga

SEQ ID NO: 14874 - DNA, 21 bp, synthetic construct
  misc_feature 1..21: note = Description of Artificial Sequence: Synthetic oligonucleotide
  source 1..21: mol_type = other DNA
tcgagtcctgggacggttgtt

SEQ ID NO: 14875 - DNA, 21 bp, synthetic construct
  misc_feature 1..21: note = Description of Artificial Sequence: Synthetic oligonucleotide
  source 1..21: mol_type = other DNA
aacgacagcgccgacagaaga

SEQ ID NO: 14876 - DNA, 21 bp, synthetic construct
  misc_feature 1..21: note = Description of Artificial Sequence: Synthetic oligonucleotide
  source 1..21: mol_type = other DNA
ggcagagacaccagcagcagc

SEQ ID NO: 14877 - DNA, 21 bp, synthetic construct
  misc_feature 1..21: note = Description of Artificial Sequence: Synthetic oligonucleotide
  source 1..21: mol_type = other DNA
cagcaggcgggtaaggttgct

SEQ ID NO: 14878 - DNA, 21 bp, synthetic construct
  misc_feature 1..21: note = Description of Artificial Sequence: Synthetic oligonucleotide
  source 1..21: mol_type = other DNA
agcagcgaagccaaacaaagc

SEQ ID NO: 14879 - DNA, 21 bp, synthetic construct
  misc_feature 1..21: note = Description of Artificial Sequence: Synthetic oligonucleotide
  source 1..21: mol_type = other DNA
caaaccggcaaaagcagctac

SEQ ID NO: 14880 - DNA, 21 bp, synthetic construct
  misc_feature 1..21: note = Description of Artificial Sequence: Synthetic oligonucleotide
  source 1..21: mol_type = other DNA
caagccaccagcaccagactc

SEQ ID NO: 14881 - DNA, 21 bp, synthetic construct
  misc_feature 1..21: note = Description of Artificial Sequence: Synthetic oligonucleotide
  source 1..21: mol_type = other DNA
gaaaaaaacaacgccctcagc

SEQ ID NO: 14882 - DNA, 21 bp, synthetic construct
  misc_feature 1..21: note = Description of Artificial Sequence: Synthetic oligonucleotide
  source 1..21: mol_type = other DNA
gggaatgctagggataatact

SEQ ID NO: 14883 - DNA, 21 bp, synthetic construct
  misc_feature 1..21: note = Description of Artificial Sequence: Synthetic oligonucleotide
  source 1..21: mol_type = other DNA
gggacgggggctcggactagt

SEQ ID NO: 14884 - DNA, 21 bp, synthetic construct
  misc_feature 1..21: note = Description of Artificial Sequence: Synthetic oligonucleotide
  source 1..21: mol_type = other DNA
caaaccagcacccccctcgtc

SEQ ID NO: 14885 - DNA, 21 bp, synthetic construct
  misc_feature 1..21: note = Description of Artificial Sequence: Synthetic oligonucleotide
  source 1..21: mol_type = other DNA
atgggtggtaagttgaatggt

SEQ ID NO: 14886 - DNA, 21 bp, synthetic construct
  misc_feature 1..21: note = Description of Artificial Sequence: Synthetic oligonucleotide
  source 1..21: mol_type = other DNA
gggtctggggatatgcgttcg

SEQ ID NO: 14887 - DNA, 21 bp, synthetic construct
  misc_feature 1..21: note = Description of Artificial Sequence: Synthetic oligonucleotide
  source 1..21: mol_type = other DNA
cgtgaggagagtaggagtctt

SEQ ID NO: 14888 - DNA, 21 bp, synthetic construct
  misc_feature 1..21: note = Description of Artificial Sequence: Synthetic oligonucleotide
  source 1..21: mol_type = other DNA
cttagtgataagaaggtgctg

SEQ ID NO: 14889 - DNA, 21 bp, synthetic construct
  misc_feature 1..21: note = Description of Artificial Sequence: Synthetic oligonucleotide
  source 1..21: mol_type = other DNA
gccaccaaaaccagccccgaa

SEQ ID NO: 14890 - DNA, 21 bp, synthetic construct
  misc_feature 1..21: note = Description of Artificial Sequence: Synthetic oligonucleotide
  source 1..21: mol_type = other DNA
accagaagcaccggcaccgcc

SEQ ID NO: 14891 - DNA, 21 bp, synthetic construct
  misc_feature 1..21: note = Description of Artificial Sequence: Synthetic oligonucleotide
  source 1..21: mol_type = other DNA
agcaccgccagagacgtcaac

SEQ ID NO: 14892 - DNA, 21 bp, synthetic construct
  misc_feature 1..21: note = Description of Artificial Sequence: Synthetic oligonucleotide
  source 1..21: mol_type = other DNA
atgggcagcggcaaagccaac

SEQ ID NO: 14893 - DNA, 21 bp, synthetic construct
  misc_feature 1..21: note = Description of Artificial Sequence: Synthetic oligonucleotide
  source 1..21: mol_type = other DNA
ggcggcagcggcgacagagtc

SEQ ID NO: 14894 - DNA, 21 bp, synthetic construct
  misc_feature 1..21: note = Description of Artificial Sequence: Synthetic oligonucleotide
  source 1..21: mol_type = other DNA
tctaatgagcggtctcatgcg

SEQ ID NO: 14895 - DNA, 21 bp, synthetic construct
  misc_feature 1..21: note = Description of Artificial Sequence: Synthetic oligonucleotide
  source 1..21: mol_type = other DNA
accagcagcagaagcacccaa

SEQ ID NO: 14896 - DNA, 21 bp, synthetic construct
  misc_feature 1..21: note = Description of Artificial Sequence: Synthetic oligonucleotide
  source 1..21: mol_type = other DNA
aacggcaacaccgtcagcggc

SEQ ID NO: 14897 - DNA, 21 bp, synthetic construct
  misc_feature 1..21: note = Description of Artificial Sequence: Synthetic oligonucleotide
  source 1..21: mol_type = other DNA
aacgccggcaaaagcgcctac

SEQ ID NO: 14898 - DNA, 21 bp, synthetic construct
  misc_feature 1..21: note = Description of Artificial Sequence: Synthetic oligonucleotide
  source 1..21: mol_type = other DNA
gaggataattctaagtctgct

SEQ ID NO: 14899 - DNA, 21 bp, synthetic construct
  misc_feature 1..21: note = Description of Artificial Sequence: Synthetic oligonucleotide
  source 1..21: mol_type = other DNA
gatgttatttcgaatcctaag

SEQ ID NO: 14900 - DNA, 21 bp, synthetic construct
  misc_feature 1..21: note = Description of Artificial Sequence: Synthetic oligonucleotide
  source 1..21: mol_type = other DNA
gacggcatgagcaaacacgtc

SEQ ID NO: 14901 - DNA, 21 bp, synthetic construct
  misc_feature 1..21: note = Description of Artificial Sequence: Synthetic oligonucleotide
  source 1..21: mol_type = other DNA
aacctcagcagcagcaacaaa

SEQ ID NO: 14902 - DNA, 21 bp, synthetic construct
  misc_feature 1..21: note = Description of Artificial Sequence: Synthetic oligonucleotide
  source 1..21: mol_type = other DNA
gccggcggcagcgccttcaaa

SEQ ID NO: 14903 - DNA, 21 bp, synthetic construct
  misc_feature 1..21: note = Description of Artificial Sequence: Synthetic oligonucleotide
  source 1..21: mol_type = other DNA
tcggataatgcgaagcctagg

SEQ ID NO: 14904 - DNA, 21 bp, synthetic construct
  misc_feature 1..21: note = Description of Artificial Sequence: Synthetic oligonucleotide
  source 1..21: mol_type = other DNA
agcagaaccagccaaggcgtc

SEQ ID NO: 14905 - DNA, 21 bp, synthetic construct
  misc_feature 1..21: note = Description of Artificial Sequence: Synthetic oligonucleotide
  source 1..21: mol_type = other DNA
agtgcggctacgtctgcgagt

SEQ ID NO: 14906 - DNA, 21 bp, synthetic construct
  misc_feature 1..21: note = Description of Artificial Sequence: Synthetic oligonucleotide
  source 1..21: mol_type = other DNA
ctgtctgataagagtgctcgt

SEQ ID NO: 14907 - DNA, 21 bp, synthetic construct
  misc_feature 1..21: note = Description of Artificial Sequence: Synthetic oligonucleotide
  source 1..21: mol_type = other DNA
ggtcggacggattcttctagg

SEQ ID NO: 14908 - DNA, 21 bp, synthetic construct
  misc_feature 1..21: note = Description of Artificial Sequence: Synthetic oligonucleotide
  source 1..21: mol_type = other DNA
tataatgatgcggcttctagg

SEQ ID NO: 14909 - DNA, 21 bp, synthetic construct
  misc_feature 1..21: note = Description of Artificial Sequence: Synthetic oligonucleotide
  source 1..21: mol_type = other DNA
gccggcgccaccagcatcgcc

SEQ ID NO: 14910 - DNA, 21 bp, synthetic construct
  misc_feature 1..21: note = Description of Artificial Sequence: Synthetic oligonucleotide
  source 1..21: mol_type = other DNA
agtcatagttcttcttcgttg

SEQ ID NO: 14911 - DNA, 21 bp, synthetic construct
  misc_feature 1..21: note = Description of Artificial Sequence: Synthetic oligonucleotide
  source 1..21: mol_type = other DNA
tcgggtcgtgagacgggtaag

SEQ ID NO: 14912 - DNA, 21 bp, synthetic construct
  misc_feature 1..21: note = Description of Artificial Sequence: Synthetic oligonucleotide
  source 1..21: mol_type = other DNA
caaggcgcccacaccacccac

SEQ ID NO: 14913 - DNA, 21 bp, synthetic construct
  misc_feature 1..21: note = Description of Artificial Sequence: Synthetic oligonucleotide
  source 1..21: mol_type = other DNA
agcggcagaagccaaagcaac

SEQ ID NO: 14914 - DNA, 21 bp, synthetic construct
  misc_feature 1..21: note = Description of Artificial Sequence: Synthetic oligonucleotide
  source 1..21: mol_type = other DNA
caaggcagcaacaaagtcgaa

SEQ ID NO: 14915 - DNA, 21 bp, synthetic construct
  misc_feature 1..21: note = Description of Artificial Sequence: Synthetic oligonucleotide
  source 1..21: mol_type = other DNA
gaaagcgccggccccggcaaa

SEQ ID NO: 14916 - DNA, 21 bp, synthetic construct
  misc_feature 1..21: note = Description of Artificial Sequence: Synthetic oligonucleotide
  source 1..21: mol_type = other DNA
ggcgacagacaaacccccaaa

SEQ ID NO: 14917 - DNA, 21 bp, synthetic construct
  misc_feature 1..21: note = Description of Artificial Sequence: Synthetic oligonucleotide
  source 1..21: mol_type = other DNA
accagcagcaccagccacagc

SEQ ID NO: 14918 - DNA, 21 bp, synthetic construct
  misc_feature 1..21: note = Description of Artificial Sequence: Synthetic oligonucleotide
  source 1..21: mol_type = other DNA
acccaacccggcaaagccatg

SEQ ID NO: 14919 - DNA, 21 bp, synthetic construct
  misc_feature 1..21: note = Description of Artificial Sequence: Synthetic oligonucleotide
  source 1..21: mol_type = other DNA
gcccaaagcggcacccacacc

SEQ ID NO: 14920 - DNA, 21 bp, synthetic construct
  misc_feature 1..21: note = Description of Artificial Sequence: Synthetic oligonucleotide
  source 1..21: mol_type = other DNA
tcggcttctgataggaagtct

SEQ ID NO: 14921 - DNA, 21 bp, synthetic construct
  misc_feature 1..21: note = Description of Artificial Sequence: Synthetic oligonucleotide
  source 1..21: mol_type = other DNA
tttgcgggtaaggttcaggct

SEQ ID NO: 14922 - DNA, 21 bp, synthetic construct
  misc_feature 1..21: note = Description of Artificial Sequence: Synthetic oligonucleotide
  source 1..21: mol_type = other DNA
aatcatgagagtaaggagcgt

SEQ ID NO: 14923 - DNA, 21 bp, synthetic construct
  misc_feature 1..21: note = Description of Artificial Sequence: Synthetic oligonucleotide
  source 1..21: mol_type = other DNA
agcgccggcagaaccgccgcc

SEQ ID NO: 14924 - DNA, 21 bp, synthetic construct
  misc_feature 1..21: note = Description of Artificial Sequence: Synthetic oligonucleotide
  source 1..21: mol_type = other DNA
ggcatcaaaggccaacaaagc

SEQ ID NO: 14925 - DNA, 21 bp, synthetic construct
  misc_feature 1..21: note = Description of Artificial Sequence: Synthetic oligonucleotide
  source 1..21: mol_type = other DNA
gtcgcccacgacaaagtcctc

SEQ ID NO: 14926 - DNA, 21 bp, synthetic construct
  misc_feature 1..21: note = Description of Artificial Sequence: Synthetic oligonucleotide
  source 1..21: mol_type = other DNA
gcgagttcggggacgaggtct

SEQ ID NO: 14927 - DNA, 21 bp, synthetic construct
  misc_feature 1..21: note = Description of Artificial Sequence: Synthetic oligonucleotide
  source 1..21: mol_type = other DNA
tcgggtagggataagttgatg

SEQ ID NO: 14928 - DNA, 21 bp, synthetic construct
  misc_feature 1..21: note = Description of Artificial Sequence: Synthetic oligonucleotide
  source 1..21: mol_type = other DNA
gccggcgtcaaaagcaacatc

SEQ ID NO: 14929 - DNA, 21 bp, synthetic construct
  misc_feature 1..21: note = Description of Artificial Sequence: Synthetic oligonucleotide
  source 1..21: mol_type = other DNA
catactagtaaggtttctgtt

SEQ ID NO: 14930 - DNA, 21 bp, synthetic construct
  misc_feature 1..21: note = Description of Artificial Sequence: Synthetic oligonucleotide
  source 1..21: mol_type = other DNA
caaggcaacaaacccatcgtc

SEQ ID NO: 14931 - DNA, 21 bp, synthetic construct
  misc_feature 1..21: note = Description of Artificial Sequence: Synthetic oligonucleotide
  source 1..21: mol_type = other DNA
ttggttacgaagacgcaggcg

SEQ ID NO: 14932 - DNA, 21 bp, synthetic construct
  misc_feature 1..21: note = Description of Artificial Sequence: Synthetic oligonucleotide
  source 1..21: mol_type = other DNA
aacagaaccagcagcaccaac

SEQ ID NO: 14933 - DNA, 21 bp, synthetic construct
  misc_feature 1..21: note = Description of Artificial Sequence: Synthetic oligonucleotide
  source 1..21: mol_type = other DNA
actcgtaatacggctgtgagt

SEQ ID NO: 14934 - DNA, 21 bp, synthetic construct
  misc_feature 1..21: note = Description of Artificial Sequence: Synthetic oligonucleotide
  source 1..21: mol_type = other DNA
agccaagaaggcagaggcagc

SEQ ID NO: 14935 - DNA, 21 bp, synthetic construct
  misc_feature 1..21: note = Description of Artificial Sequence: Synthetic oligonucleotide
  source 1..21: mol_type = other DNA
cagtctgctggttctacgtcg

SEQ ID NO: 14936 - DNA, 21 bp, synthetic construct
  misc_feature 1..21: note = Description of Artificial Sequence: Synthetic oligonucleotide
  source 1..21: mol_type = other DNA
gaaggcagcagaagcatcacc

SEQ ID NO: 14937 - DNA, 21 bp, synthetic construct
  misc_feature 1..21: note = Description of Artificial Sequence: Synthetic oligonucleotide
  source 1..21: mol_type = other DNA
gacagaagcaccaaacccgtc

SEQ ID NO: 14938 - DNA, 21 bp, synthetic construct
  misc_feature 1..21: note = Description of Artificial Sequence: Synthetic oligonucleotide
  source 1..21: mol_type = other DNA
agcggcaaaggcaacgtcgcc

SEQ ID NO: 14939 - DNA, 21 bp, synthetic construct
  misc_feature 1..21: note = Description of Artificial Sequence: Synthetic oligonucleotide
  source 1..21: mol_type = other DNA
aacagcgcccccaacggcaaa

SEQ ID NO: 14940 - DNA, 21 bp, synthetic construct
  misc_feature 1..21: note = Description of Artificial Sequence: Synthetic oligonucleotide
  source 1..21: mol_type = other DNA
aaggctgatagttcgactaag

SEQ ID NO: 14941 - DNA, 21 bp, synthetic construct
  misc_feature 1..21: note = Description of Artificial Sequence: Synthetic oligonucleotide
  source 1..21: mol_type = other DNA
accagcgtcggcaaaaccacc

SEQ ID NO: 14942 - DNA, 21 bp, synthetic construct
  misc_feature 1..21: note = Description of Artificial Sequence: Synthetic oligonucleotide
  source 1..21: mol_type = other DNA
agccccagcaaaccccaagaa

SEQ ID NO: 14943 - DNA, 21 bp, synthetic construct
  misc_feature 1..21: note = Description of Artificial Sequence: Synthetic oligonucleotide
  source 1..21: mol_type = other DNA
atgaccagcaaaagcgccgaa

SEQ ID NO: 14944 - DNA, 21 bp, synthetic construct
  misc_feature 1..21: note = Description of Artificial Sequence: Synthetic oligonucleotide
  source 1..21: mol_type = other DNA
cacgacaaacccacccaaggc

SEQ ID NO: 14945 - DNA, 21 bp, synthetic construct
  misc_feature 1..21: note = Description of Artificial Sequence: Synthetic oligonucleotide
  source 1..21: mol_type = other DNA
gaaaacagcaaaggcaacctc

SEQ ID NO: 14946 - DNA, 21 bp, synthetic construct
  misc_feature 1..21: note = Description of Artificial Sequence: Synthetic oligonucleotide
  source 1..21: mol_type = other DNA
gacgtcagagacgtcaacaga

SEQ ID NO: 14947 - DNA, 21 bp, synthetic construct
  misc_feature 1..21: note = Description of Artificial Sequence: Synthetic oligonucleotide
  source 1..21: mol_type = other DNA
gagcggggtcagcatcagact

SEQ ID NO: 14948 - DNA, 21 bp, synthetic construct
  misc_feature 1..21: note = Description of Artificial Sequence: Synthetic oligonucleotide
  source 1..21: mol_type = other DNA
gccaacaaacaacccaccctc

SEQ ID NO: 14949 - DNA, 21 bp, synthetic construct
  misc_feature 1..21: note = Description of Artificial Sequence: Synthetic oligonucleotide
  source 1..21: mol_type = other DNA
ggcgccagcaaaaccctcgtc

SEQ ID NO: 14950 - DNA, 21 bp, synthetic construct
  misc_feature 1..21: note = Description of Artificial Sequence: Synthetic oligonucleotide
  source 1..21: mol_type = other DNA
ggggatggtaagtctcctaag

SEQ ID NO: 14951 - DNA, 21 bp, synthetic construct
  misc_feature 1..21: note = Description of Artificial Sequence: Synthetic oligonucleotide
  source 1..21: mol_type = other DNA
gttgggcagaagtctagtagt

SEQ ID NO: 14952 - DNA, 21 bp, synthetic construct
  misc_feature 1..21: note = Description of Artificial Sequence: Synthetic oligonucleotide
  source 1..21: mol_type = other DNA
accagcagcaccaacatgacc

SEQ ID NO: 14953 - DNA, 21 bp, synthetic construct
  misc_feature 1..21: note = Description of Artificial Sequence: Synthetic oligonucleotide
  source 1..21: mol_type = other DNA
ctcaccaacaaagccaccacc

SEQ ID NO: 14954 - DNA, 21 bp, synthetic construct
  misc_feature 1..21: note = Description of Artificial Sequence: Synthetic oligonucleotide
  source 1..21: mol_type = other DNA
gtccccgacagcaaaagcatg

SEQ ID NO: 14955 - DNA, 21 bp, synthetic construct
  misc_feature 1..21: note = Description of Artificial Sequence: Synthetic oligonucleotide
  source 1..21: mol_type = other DNA
cagaatagtgcggctgtgact

SEQ ID NO: 14956 - DNA, 21 bp, synthetic construct
  misc_feature 1..21: note = Description of Artificial Sequence: Synthetic oligonucleotide
  source 1..21: mol_type = other DNA
acccaagtcggccccagcaaa

SEQ ID NO: 14957 - DNA, 21 bp, synthetic construct
  misc_feature 1..21: note = Description of Artificial Sequence: Synthetic oligonucleotide
  source 1..21: mol_type = other DNA
gtcggcctcaaacccagcgcc

SEQ ID NO: 14958 - DNA, 21 bp, synthetic construct
  misc_feature 1..21: note = Description of Artificial Sequence: Synthetic oligonucleotide
  source 1..21: mol_type = other DNA
gttggttcgggggctcagaag

SEQ ID NO: 14959 - DNA, 21 bp, synthetic construct
  misc_feature 1..21: note = Description of Artificial Sequence: Synthetic oligonucleotide
  source 1..21: mol_type = other DNA
catgggaatcctaatcctcgg

SEQ ID NO: 14960 - DNA, 21 bp, synthetic construct
  misc_feature 1..21: note = Description of Artificial Sequence: Synthetic oligonucleotide
  source 1..21: mol_type = other DNA
ctgaatgggggtgcggctatg

SEQ ID NO: 14961 - DNA, 21 bp, synthetic construct
  misc_feature 1..21: note = Description of Artificial Sequence: Synthetic oligonucleotide
  source 1..21: mol_type = other DNA
gtgtcgggttctactaattct

SEQ ID NO: 14962 - DNA, 21 bp, synthetic construct
  misc_feature 1..21: note = Description of Artificial Sequence: Synthetic oligonucleotide
  source 1..21: mol_type = other DNA
gccagcgacagaagcccccaa

SEQ ID NO: 14963 - DNA, 21 bp, synthetic construct
  misc_feature 1..21: note = Description of Artificial Sequence: Synthetic oligonucleotide
  source 1..21: mol_type = other DNA
tctaatccttcgcgtgaggcg

SEQ ID NO: 14964 - DNA, 21 bp, synthetic construct
  misc_feature 1..21: note = Description of Artificial Sequence: Synthetic oligonucleotide
  source 1..21: mol_type = other DNA
accctcacccaaaaaagcggc

SEQ ID NO: 14965 - DNA, 21 bp, synthetic construct
  misc_feature 1..21: note = Description of Artificial Sequence: Synthetic oligonucleotide
  source 1..21: mol_type = other DNA
gtcagcgaaaaaaacaccaga

SEQ ID NO: 14966 - DNA, 21 bp, synthetic construct
  misc_feature 1..21: note = Description of Artificial Sequence: Synthetic oligonucleotide
  source 1..21: mol_type = other DNA
agtcgtggtaatggtaatgtt

SEQ ID NO: 14967 - DNA, 21 bp, synthetic construct
  misc_feature 1..21: note = Description of Artificial Sequence: Synthetic oligonucleotide
  source 1..21: mol_type = other DNA
gccagcggcgacagccacaga

SEQ ID NO: 14968 - DNA, 21 bp, synthetic construct
  misc_feature 1..21: note = Description of Artificial Sequence: Synthetic oligonucleotide
  source 1..21: mol_type = other DNA
atgggcggcaaacccggcaaa

SEQ ID NO: 14969 - DNA, 21 bp, synthetic construct
  misc_feature 1..21: note = Description of Artificial Sequence: Synthetic oligonucleotide
  source 1..21: mol_type = other DNA
ggcaccagcaacagcgcccac

SEQ ID NO: 14970 - DNA, 21 bp, synthetic construct
  misc_feature 1..21: note = Description of Artificial Sequence: Synthetic oligonucleotide
  source 1..21: mol_type = other DNA
ggcaaaaacaccgtcagcctc

SEQ ID NO: 14971 - DNA, 21 bp, synthetic construct
  misc_feature 1..21: note = Description of Artificial Sequence: Synthetic oligonucleotide
  source 1..21: mol_type = other DNA
tcgggtaatgggaggtcgtct

SEQ ID NO: 14972 - DNA, 21 bp, synthetic construct
  misc_feature 1..21: note = Description of Artificial Sequence: Synthetic oligonucleotide
  source 1..21: mol_type = other DNA
aacggcagcaccagcaccaga

SEQ ID NO: 14973 - DNA, 21 bp, synthetic construct
  misc_feature 1..21: note = Description of Artificial Sequence: Synthetic oligonucleotide
  source 1..21: mol_type = other DNA
aagagtgataagtctgcgtcg

SEQ ID NO: 14974 - DNA, 21 bp, synthetic construct
  misc_feature 1..21: note = Description of Artificial Sequence: Synthetic oligonucleotide
  source 1..21: mol_type = other DNA
gctacgtctaagacgatttct

SEQ ID NO: 14975 - DNA, 21 bp, synthetic construct
  misc_feature 1..21: note = Description of Artificial Sequence: Synthetic oligonucleotide
  source 1..21: mol_type = other DNA
cgtcagagtggtactgcgggt

SEQ ID NO: 14976 - DNA, 21 bp, synthetic construct
  misc_feature 1..21: note = Description of Artificial Sequence: Synthetic oligonucleotide
  source 1..21: mol_type = other DNA
accagaagcgtcggcaacacc

SEQ ID NO: 14977 - DNA, 21 bp, synthetic construct
  misc_feature 1..21: note = Description of Artificial Sequence: Synthetic oligonucleotide
  source 1..21: mol_type = other DNA
caaagcacccaacccagccac

SEQ ID NO: 14978 - DNA, 21 bp, synthetic construct
  misc_feature 1..21: note = Description of Artificial Sequence: Synthetic oligonucleotide
  source 1..21: mol_type = other DNA
catgggggttctggggctggt

SEQ ID NO: 14979 - DNA, 21 bp, synthetic construct
  misc_feature 1..21: note = Description of Artificial Sequence: Synthetic oligonucleotide
  source 1..21: mol_type = other DNA
gccaaagccaccagcagcgtc

SEQ ID NO: 14980 - DNA, 21 bp, synthetic construct
  misc_feature 1..21: note = Description of Artificial Sequence: Synthetic oligonucleotide
  source 1..21: mol_type = other DNA
accaccagcaacgtcaacctc

SEQ ID NO: 14981 - DNA, 21 bp, synthetic construct
  misc_feature 1..21: note = Description of Artificial Sequence: Synthetic oligonucleotide
  source 1..21: mol_type = other DNA
tcggatgctaagcctgttact

SEQ ID NO: 14982 - DNA, 21 bp, synthetic construct
  misc_feature 1..21: note = Description of Artificial Sequence: Synthetic oligonucleotide
  source 1..21: mol_type = other DNA
cttaattcgggtactattcgg

SEQ ID NO: 14983 - DNA, 21 bp, synthetic construct
  misc_feature 1..21: note = Description of Artificial Sequence: Synthetic oligonucleotide
  source 1..21: mol_type = other DNA
tctggtgcggctgcgccggct

SEQ ID NO: 14984 - DNA, 21 bp, synthetic construct
  misc_feature 1..21: note = Description of Artificial Sequence: Synthetic oligonucleotide
  source 1..21: mol_type = other DNA
agttcttcttctaagcagctg

SEQ ID NO: 14985 - DNA, 21 bp, synthetic construct
  misc_feature 1..21: note = Description of Artificial Sequence: Synthetic oligonucleotide
  source 1..21: mol_type = other DNA
tctcgtaatcagtctaatgtt

SEQ ID NO: 14986 - DNA, 21 bp, synthetic construct
  misc_feature 1..21: note = Description of Artificial Sequence: Synthetic oligonucleotide
  source 1..21: mol_type = other DNA
gcgacctcgagtagtgttaag

SEQ ID NO: 14987 - DNA, 21 bp, synthetic construct
  misc_feature 1..21: note = Description of Artificial Sequence: Synthetic oligonucleotide
  source 1..21: mol_type = other DNA
accagaagcggcaccagcggc

SEQ ID NO: 14988 - DNA, 21 bp, synthetic construct
  misc_feature 1..21: note = Description of Artificial Sequence: Synthetic oligonucleotide
  source 1..21: mol_type = other DNA
acgagtctgggtaagccgtct

SEQ ID NO: 14989 - DNA, 21 bp, synthetic construct
  misc_feature 1..21: note = Description of Artificial Sequence: Synthetic oligonucleotide
  source 1..21: mol_type = other DNA
tcttctccgggtaagcctgtt

SEQ ID NO: 14990 - DNA, 21 bp, synthetic construct
  misc_feature 1..21: note = Description of Artificial Sequence: Synthetic oligonucleotide
  source 1..21: mol_type = other DNA
agcagcagcggcgtcagaagc

SEQ ID NO: 14991 - DNA, 21 bp, synthetic construct
  misc_feature 1..21: note = Description of Artificial Sequence: Synthetic oligonucleotide
  source 1..21: mol_type = other DNA
gtctcttcgaagtctgctcat

SEQ ID NO: 14992 - DNA, 21 bp, synthetic construct
  misc_feature 1..21: note = Description of Artificial Sequence: Synthetic oligonucleotide
  source 1..21: mol_type = other DNA
actggtggtaaggataagggt

SEQ ID NO: 14993 - DNA, 21 bp, synthetic construct
  misc_feature 1..21: note = Description of Artificial Sequence: Synthetic oligonucleotide
  source 1..21: mol_type = other DNA
ggcatcagcgccaaacccagc

SEQ ID NO: 14994 - DNA, 21 bp, synthetic construct
  misc_feature 1..21: note = Description of Artificial Sequence: Synthetic oligonucleotide
  source 1..21: mol_type = other DNA
aacagcaacaccgccaccacc

SEQ ID NO: 14995 - DNA, 21 bp, synthetic construct
  misc_feature 1..21: note = Description of Artificial Sequence: Synthetic oligonucleotide
  source 1..21: mol_type = other DNA
accagcggcgccggcgccccc

SEQ ID NO: 14996 - DNA, 21 bp, synthetic construct
  misc_feature 1..21: note = Description of Artificial Sequence: Synthetic oligonucleotide
  source 1..21: mol_type = other DNA
agcgtcagcaacagccaagcc

SEQ ID NO: 14997 - DNA, 21 bp, synthetic construct
  misc_feature 1..21: note = Description of Artificial Sequence: Synthetic oligonucleotide
  source 1..21: mol_type = other DNA
aatatgtcggataagaatggt

SEQ ID NO: 14998 - DNA, 21 bp, synthetic construct
  misc_feature 1..21: note = Description of Artificial Sequence: Synthetic oligonucleotide
  source 1..21: mol_type = other DNA
cgtacttcggggcagactggg

SEQ ID NO: 14999 - DNA, 21 bp, synthetic construct
  misc_feature 1..21: note = Description of Artificial Sequence: Synthetic oligonucleotide
  source 1..21: mol_type = other DNA
gacggcagaggccaaagcggc

SEQ ID NO: 15000 - DNA, 21 bp, synthetic construct
  misc_feature 1..21: note = Description of Artificial Sequence: Synthetic oligonucleotide
  source 1..21: mol_type = other DNA
gcccaacacagcggcaccagc

SEQ ID NO: 15001 - DNA, 21 bp, synthetic construct
  misc_feature 1..21: note = Description of Artificial Sequence: Synthetic oligonucleotide
  source 1..21: mol_type = other DNA
agtacgggtcataataaggag

SEQ ID NO: 15002 - DNA, 21 bp, synthetic construct
  misc_feature 1..21: note = Description of Artificial Sequence: Synthetic oligonucleotide
  source 1..21: mol_type = other DNA
ggcgtcggcgtcacccccaaa

SEQ ID NO: 15003 - DNA, 21 bp, synthetic construct
  misc_feature 1..21: note = Description of Artificial Sequence: Synthetic oligonucleotide
  source 1..21: mol_type = other DNA
acttctgatcggtcgagtatg

SEQ ID NO: 15004 - DNA, 21 bp, synthetic construct
  misc_feature 1..21: note = Description of Artificial Sequence: Synthetic oligonucleotide
  source 1..21: mol_type = other DNA
agaggcaacggccaaagcgcc

SEQ ID NO: 15005 - DNA, 21 bp, synthetic construct
  misc_feature 1..21: note = Description of Artificial Sequence: Synthetic oligonucleotide
  source 1..21: mol_type = other DNA
gccctcggcagcaccagcaaa

SEQ ID NO: 15006 - DNA, 21 bp, synthetic construct
  misc_feature 1..21: note = Description of Artificial Sequence: Synthetic oligonucleotide
  source 1..21: mol_type = other DNA
ttttcgggtggtaaggggcct

SEQ ID NO: 15007 - DNA, 21 bp, synthetic construct
  misc_feature 1..21: note = Description of Artificial Sequence: Synthetic oligonucleotide
  source 1..21: mol_type = other DNA
agcgtcagcgaaagacccagc

SEQ ID NO: 15008 - DNA, 21 bp, synthetic construct
  misc_feature 1..21: note = Description of Artificial Sequence: Synthetic oligonucleotide
  source 1..21: mol_type = other DNA
ggcagcagagaacaccaagcc

SEQ ID NO: 15009 - DNA, 21 bp, synthetic construct
  misc_feature 1..21: note = Description of Artificial Sequence: Synthetic oligonucleotide
  source 1..21: mol_type = other DNA
gggacgaattcgaagcataat

SEQ ID NO: 15010 - DNA, 21 bp, synthetic construct
  misc_feature 1..21: note = Description of Artificial Sequence: Synthetic oligonucleotide
  source 1..21: mol_type = other DNA
ctcaccgccagccccagcaaa

SEQ ID NO: 15011 - DNA, 21 bp, synthetic construct
  misc_feature 1..21: note = Description of Artificial Sequence: Synthetic oligonucleotide
  source 1..21: mol_type = other DNA
gatggtaagaataagccgatg

SEQ ID NO: 15012 - DNA, 21 bp, synthetic construct
  misc_feature 1..21: note = Description of Artificial Sequence: Synthetic oligonucleotide
  source 1..21: mol_type = other DNA
gccgccacccaacccaccagc

SEQ ID NO: 15013 - DNA, 21 bp, synthetic construct
  misc_feature 1..21: note = Description of Artificial Sequence: Synthetic oligonucleotide
  source 1..21: mol_type = other DNA
ggcggcaacagcaaaatggtc

SEQ ID NO: 15014 - DNA, 21 bp, synthetic construct
  misc_feature 1..21: note = Description of Artificial Sequence: Synthetic oligonucleotide
  source 1..21: mol_type = other DNA
gccgtcaacaaaaacatcggc

SEQ ID NO: 15015 - DNA, 21 bp, synthetic construct
  misc_feature 1..21: note = Description of Artificial Sequence: Synthetic oligonucleotide
  source 1..21: mol_type = other DNA
acccacgccgtcaaacccgcc

SEQ ID NO: 15016 - DNA, 21 bp, synthetic construct
  misc_feature 1..21: note = Description of Artificial Sequence: Synthetic oligonucleotide
  source 1..21: mol_type = other DNA
cacaccagcgacagaagcagc

SEQ ID NO: 15017 - DNA, 21 bp, synthetic construct
  misc_feature 1..21: note = Description of Artificial Sequence: Synthetic oligonucleotide
  source 1..21: mol_type = other DNA
ggttcttcgcctacgttgcgg

SEQ ID NO: 15018 - DNA, 21 bp, synthetic construct
  misc_feature 1..21: note = Description of Artificial Sequence: Synthetic oligonucleotide
  source 1..21: mol_type = other DNA
ctccaacccggcaaaccccaa

SEQ ID NO: 15019 - DNA, 21 bp, synthetic construct
  misc_feature 1..21: note = Description of Artificial Sequence: Synthetic oligonucleotide
  source 1..21: mol_type = other DNA
agcaccagcagacccgtcacc

SEQ ID NO: 15020 - DNA, 21 bp, synthetic construct
  misc_feature 1..21: note = Description of Artificial Sequence: Synthetic oligonucleotide
  source 1..21: mol_type = other DNA
gctatgcgttcgccgacgtct

SEQ ID NO: 15021 - DNA, 21 bp, synthetic construct
  misc_feature 1..21: note = Description of Artificial Sequence: Synthetic oligonucleotide
  source 1..21: mol_type = other DNA
aatgggtctagggattctagg

SEQ ID NO: 15022 - DNA, 21 bp, synthetic construct
  misc_feature 1..21: note = Description of Artificial Sequence: Synthetic oligonucleotide
  source 1..21: mol_type = other DNA
agcagcgcccaaggcagcaaa

SEQ ID NO: 15023 - DNA, 21 bp, synthetic construct
  misc_feature 1..21: note = Description of Artificial Sequence: Synthetic oligonucleotide
  source 1..21: mol_type = other DNA
agcgccaacagcgccaccaga

SEQ ID NO: 15024 - DNA, 21 bp, synthetic construct
  misc_feature 1..21: note = Description of Artificial Sequence: Synthetic oligonucleotide
  source 1..21: mol_type = other DNA
agtaatgggggtcagcgtgct

SEQ ID NO: 15025 - DNA, 21 bp, synthetic construct
  misc_feature 1..21: note = Description of Artificial Sequence: Synthetic oligonucleotide
  source 1..21: mol_type = other DNA
ggtagttcgagtaagggggtg

SEQ ID NO: 15026 - DNA, 21 bp, synthetic construct
  misc_feature 1..21: note = Description of Artificial Sequence: Synthetic oligonucleotide
  source 1..21: mol_type = other DNA
gtcgtcagcaaaggcaacatg

SEQ ID NO: 15027 - DNA, 21 bp, synthetic construct
  misc_feature 1..21: note = Description of Artificial Sequence: Synthetic oligonucleotide
  source 1..21: mol_type = other DNA
gataatggtaataagctttat

SEQ ID NO: 15028 - DNA, 21 bp, synthetic construct
  misc_feature 1..21: note = Description of Artificial Sequence: Synthetic oligonucleotide
  source 1..21: mol_type = other DNA
gacagagcccaaaccgtcaga

SEQ ID NO: 15029 - DNA, 21 bp, synthetic construct
  misc_feature 1..21: note = Description of Artificial Sequence: Synthetic oligonucleotide
  source 1..21: mol_type = other DNA
agccacaacagcagccacacc

SEQ ID NO: 15030 - DNA, 21 bp, synthetic construct
  misc_feature 1..21: note = Description of Artificial Sequence: Synthetic oligonucleotide
  source 1..21: mol_type = other DNA
cacaaaaacagccaacaactc

SEQ ID NO: 15031 - DNA, 21 bp, synthetic construct
  misc_feature 1..21: note = Description of Artificial Sequence: Synthetic oligonucleotide
  source 1..21: mol_type = other DNA
tctacgtcgaataaggcttct

SEQ ID NO: 15032 - DNA, 21 bp, synthetic construct
  misc_feature 1..21: note = Description of Artificial Sequence: Synthetic oligonucleotide
  source 1..21: mol_type = other DNA
tctgctagtaataagcctcat

SEQ ID NO: 15033 - DNA, 21 bp, synthetic construct
  misc_feature 1..21: note = Description of Artificial Sequence: Synthetic oligonucleotide
  source 1..21: mol_type = other DNA
gccgccaaaggcagccccccc

SEQ ID NO: 15034 - DNA, 21 bp, synthetic construct
  misc_feature 1..21: note = Description of Artificial Sequence: Synthetic oligonucleotide
  source 1..21: mol_type = other DNA
gacaccggcagcggcagaggc

SEQ ID NO: 15035 - DNA, 21 bp, synthetic construct
  misc_feature 1..21: note = Description of Artificial Sequence: Synthetic oligonucleotide
  source 1..21: mol_type = other DNA
caggctgggacggggattact

SEQ ID NO: 15036 - DNA, 21 bp, synthetic construct
  misc_feature 1..21: note = Description of Artificial Sequence: Synthetic oligonucleotide
  source 1..21: mol_type = other DNA
cttggggtgagtagtcctggg

SEQ ID NO: 15037 - DNA, 21 bp, synthetic construct
  misc_feature 1..21: note = Description of Artificial Sequence: Synthetic oligonucleotide
  source 1..21: mol_type = other DNA
gaacccgtcagaagccccacc

SEQ ID NO: 15038 - DNA, 21 bp, synthetic construct
  misc_feature 1..21: note = Description of Artificial Sequence: Synthetic oligonucleotide
  source 1..21: mol_type = other DNA
acgcagactcagaagacgttt

SEQ ID NO: 15039 - DNA, 21 bp, synthetic construct
  misc_feature 1..21: note = Description of Artificial Sequence: Synthetic oligonucleotide
  source 1..21: mol_type = other DNA
tctactaagtctactgcgagt

SEQ ID NO: 15040 - DNA, 21 bp, synthetic construct
  misc_feature 1..21: note = Description of Artificial Sequence: Synthetic oligonucleotide
  source 1..21: mol_type = other DNA
ctcgtcaacagcaaaaacagc

SEQ ID NO: 15041 - DNA, 21 bp, synthetic construct
  misc_feature 1..21: note = Description of Artificial Sequence: Synthetic oligonucleotide
  source 1..21: mol_type = other DNA
tctaggagtacgaaggcggag

SEQ ID NO: 15042 - DNA, 21 bp, synthetic construct
  misc_feature 1..21: note = Description of Artificial Sequence: Synthetic oligonucleotide
  source 1..21: mol_type = other DNA
aacaacagcgtcaaacccatc

SEQ ID NO: 15043 - DNA, 21 bp, synthetic construct
  misc_feature 1..21: note = Description of Artificial Sequence: Synthetic oligonucleotide
  source 1..21: mol_type = other DNA
aattctaataagtctccgtcg

SEQ ID NO: 15044 - DNA, 21 bp, synthetic construct
  misc_feature 1..21: note = Description of Artificial Sequence: Synthetic oligonucleotide
  source 1..21: mol_type = other DNA
actggtgcgagtaagccggct

SEQ ID NO: 15045 - DNA, 21 bp, synthetic construct
  misc_feature 1..21: note = Description of Artificial Sequence: Synthetic oligonucleotide
  source 1..21: mol_type = other DNA
tcgcctatgactccgcatgtt

SEQ ID NO: 15046 - DNA, 21 bp, synthetic construct
  misc_feature 1..21: note = Description of Artificial Sequence: Synthetic oligonucleotide
  source 1..21: mol_type = other DNA
acccccgtccccagcggcggc

SEQ ID NO: 15047 - DNA, 21 bp, synthetic construct
  misc_feature 1..21: note = Description of Artificial Sequence: Synthetic oligonucleotide
  source 1..21: mol_type = other DNA
accgcccaaagccccgtcggc

SEQ ID NO: 15048 - DNA, 21 bp, synthetic construct
  misc_feature 1..21: note = Description of Artificial Sequence: Synthetic oligonucleotide
  source 1..21: mol_type = other DNA
accggcctcaaaggcgaaaaa

SEQ ID NO: 15049 - DNA, 21 bp, synthetic construct
  misc_feature 1..21: note = Description of Artificial Sequence: Synthetic oligonucleotide
  source 1..21: mol_type = other DNA
agaagcaaaaccgacaccaac

SEQ ID NO: 15050 - DNA, 21 bp, synthetic construct
  misc_feature 1..21: note = Description of Artificial Sequence: Synthetic oligonucleotide
  source 1..21: mol_type = other DNA
caggctacgtctaaggtggat

SEQ ID NO: 15051 - DNA, 21 bp, synthetic construct
  misc_feature 1..21: note = Description of Artificial Sequence: Synthetic oligonucleotide
  source 1..21: mol_type = other DNA
cgttcggaggggaaggcgcag

SEQ ID NO: 15052 - DNA, 21 bp, synthetic construct
  misc_feature 1..21: note = Description of Artificial Sequence: Synthetic oligonucleotide
  source 1..21: mol_type = other DNA
gaggcgtctaaggggattagt

SEQ ID NO: 15053 - DNA, 21 bp, synthetic construct
  misc_feature 1..21: note = Description of Artificial Sequence: Synthetic oligonucleotide
  source 1..21: mol_type = other DNA
gatcgggcggatcgtactgtt

SEQ ID NO: 15054 - DNA, 21 bp, synthetic construct
  misc_feature 1..21: note = Description of Artificial Sequence: Synthetic oligonucleotide
  source 1..21: mol_type = other DNA
gctactagtccgaataatcat

SEQ ID NO: 15055 - DNA, 21 bp, synthetic construct
  misc_feature 1..21: note = Description of Artificial Sequence: Synthetic oligonucleotide
  source 1..21: mol_type = other DNA
accaccaacaacgacagacac

SEQ ID NO: 15056 - DNA, 21 bp, synthetic construct
  misc_feature 1..21: note = Description of Artificial Sequence: Synthetic oligonucleotide
  source 1..21: mol_type = other DNA
agcaccaccgtcaaacccaac

SEQ ID NO: 15057 - DNA, 21 bp, synthetic construct
  misc_feature 1..21: note = Description of Artificial Sequence: Synthetic oligonucleotide
  source 1..21: mol_type = other DNA
agaaacagcagccccaccacc

SEQ ID NO: 15058 - DNA, 21 bp, synthetic construct
  misc_feature 1..21: note = Description of Artificial Sequence: Synthetic oligonucleotide
  source 1..21: mol_type = other DNA
tctccgtctcctactctggtg

SEQ ID NO: 15059 - DNA, 21 bp, synthetic construct
  misc_feature 1..21: note = Description of Artificial Sequence: Synthetic oligonucleotide
  source 1..21: mol_type = other DNA
aatatggcgtctaatgcgaag

SEQ ID NO: 15060 - DNA, 21 bp, synthetic construct
  misc_feature 1..21: note = Description of Artificial Sequence: Synthetic oligonucleotide
  source 1..21: mol_type = other DNA
accaaaaacagcaaaaccagc

SEQ ID NO: 15061 - DNA, 21 bp, synthetic construct
  misc_feature 1..21: note = Description of Artificial Sequence: Synthetic oligonucleotide
  source 1..21: mol_type = other DNA
cattctggtcagaagacgccg

SEQ ID NO: 15062 - DNA, 21 bp, synthetic construct
  misc_feature 1..21: note = Description of Artificial Sequence: Synthetic oligonucleotide
  source 1..21: mol_type = other DNA
ggcagccaagcccccgtcaga

SEQ ID NO: 15063 - DNA, 21 bp, synthetic construct
  misc_feature 1..21: note = Description of Artificial Sequence: Synthetic oligonucleotide
  source 1..21: mol_type = other DNA
ggtgattcgcggcctattagt

SEQ ID NO: 15064 - DNA, 21 bp, synthetic construct
  misc_feature 1..21: note = Description of Artificial Sequence: Synthetic oligonucleotide
  source 1..21: mol_type = other DNA
ctcaccaacaaagccgtcatc

SEQ ID NO: 15065 - DNA, 21 bp, synthetic construct
  misc_feature 1..21: note = Description of Artificial Sequence: Synthetic oligonucleotide
  source 1..21: mol_type = other DNA
ggcgtcaacaaagtcaccagc

SEQ ID NO: 15066 - DNA, 21 bp, synthetic construct
  misc_feature 1..21: note = Description of Artificial Sequence: Synthetic oligonucleotide
  source 1..21: mol_type = other DNA
gtcggcagcggcacccccctc

SEQ ID NO: 15067 - DNA, 21 bp, synthetic construct
  misc_feature 1..21: note = Description of Artificial Sequence: Synthetic oligonucleotide
  source 1..21: mol_type = other DNA
agcggcggcaccaccgtcctc

SEQ ID NO: 15068 - DNA, 21 bp, synthetic construct
  misc_feature 1..21: note = Description of Artificial Sequence: Synthetic oligonucleotide
  source 1..21: mol_type = other DNA
gaaagacccagcagcgccagc

SEQ ID NO: 15069 - DNA, 21 bp, synthetic construct
  misc_feature 1..21: note = Description of Artificial Sequence: Synthetic oligonucleotide
  source 1..21: mol_type = other DNA
gatggtcgggaggcgattcgt

SEQ ID NO: 15070 - DNA, 21 bp, synthetic construct
  misc_feature 1..21: note = Description of Artificial Sequence: Synthetic oligonucleotide
  source 1..21: mol_type = other DNA
agcacccaaggcgccgccacc

SEQ ID NO: 15071 - DNA, 21 bp, synthetic construct
  misc_feature 1..21: note = Description of Artificial Sequence: Synthetic oligonucleotide
  source 1..21: mol_type = other DNA
agttctcatgggtcttctggt

SEQ ID NO: 15072 - DNA, 21 bp, synthetic construct
  misc_feature 1..21: note = Description of Artificial Sequence: Synthetic oligonucleotide
  source 1..21: mol_type = other DNA
gtgggtacgtctaagtttcag

SEQ ID NO: 15073 - DNA, 21 bp, synthetic construct
  misc_feature 1..21: note = Description of Artificial Sequence: Synthetic oligonucleotide
  source 1..21: mol_type = other DNA
cacggcagccccaaacccagc

SEQ ID NO: 15074 - DNA, 21 bp, synthetic construct
  misc_feature 1..21: note = Description of Artificial Sequence: Synthetic oligonucleotide
  source 1..21: mol_type = other DNA
aagagtggtgcgggtaattct

SEQ ID NO: 15075 - DNA, 21 bp, synthetic construct
  misc_feature 1..21: note = Description of Artificial Sequence: Synthetic oligonucleotide
  source 1..21: mol_type = other DNA
actaatgataatcctaagcat

SEQ ID NO: 15076 - DNA, 21 bp, synthetic construct
  misc_feature 1..21: note = Description of Artificial Sequence: Synthetic oligonucleotide
  source 1..21: mol_type = other DNA
ctcggcagcggcaaccaacac

SEQ ID NO: 15077 - DNA, 21 bp, synthetic construct
  misc_feature 1..21: note = Description of Artificial Sequence: Synthetic oligonucleotide
  source 1..21: mol_type = other DNA
gacggcagccacagcaccagc

SEQ ID NO: 15078 - DNA, 21 bp, synthetic construct
  misc_feature 1..21: note = Description of Artificial Sequence: Synthetic oligonucleotide
  source 1..21: mol_type = other DNA
gggcaggctggtaaggttaag

SEQ ID NO: 15079 - DNA, 21 bp, synthetic construct
  misc_feature 1..21: note = Description of Artificial Sequence: Synthetic oligonucleotide
  source 1..21: mol_type = other DNA
tctttgacgaagtctactgag

SEQ ID NO: 15080 - DNA, 21 bp, synthetic construct
  misc_feature 1..21: note = Description of Artificial Sequence: Synthetic oligonucleotide
  source 1..21: mol_type = other DNA
acgactcatagtaagcagaat

SEQ ID NO: 15081 - DNA, 21 bp, synthetic construct
  misc_feature 1..21: note = Description of Artificial Sequence: Synthetic oligonucleotide
  source 1..21: mol_type = other DNA
ggcaccaaagcccccagcagc

SEQ ID NO: 15082 - DNA, 21 bp, synthetic construct
  misc_feature 1..21: note = Description of Artificial Sequence: Synthetic oligonucleotide
  source 1..21: mol_type = other DNA
aaccccgtcggccaaaaaagc

SEQ ID NO: 15083 - DNA, 21 bp, synthetic construct
  misc_feature 1..21: note = Description of Artificial Sequence: Synthetic oligonucleotide
  source 1..21: mol_type = other DNA
agtgcgagtaatagtacggcg

SEQ ID NO: 15084 - DNA, 21 bp, synthetic construct
  misc_feature 1..21: note = Description of Artificial Sequence: Synthetic oligonucleotide
  source 1..21: mol_type = other DNA
ctcggcagcaaagccaacgaa

SEQ ID NO: 15085 - DNA, 21 bp, synthetic construct
  misc_feature 1..21: note = Description of Artificial Sequence: Synthetic oligonucleotide
  source 1..21: mol_type = other DNA
gctgcgacggggtctcagggt

SEQ ID NO: 15086 - DNA, 21 bp, synthetic construct
  misc_feature 1..21: note = Description of Artificial Sequence: Synthetic oligonucleotide
  source 1..21: mol_type = other DNA
gggcctgataagtcgaatagg

SEQ ID NO: 15087 - DNA, 21 bp, synthetic construct
  misc_feature 1..21: note = Description of Artificial Sequence: Synthetic oligonucleotide
  source 1..21: mol_type = other DNA
agttctggtagtcagaattcg

SEQ ID NO: 15088 - DNA, 21 bp, synthetic construct
  misc_feature 1..21: note = Description of Artificial Sequence: Synthetic oligonucleotide
  source 1..21: mol_type = other DNA
catgggggttctagtaattct

SEQ ID NO: 15089 - DNA, 21 bp, synthetic construct
  misc_feature 1..21: note = Description of Artificial Sequence: Synthetic oligonucleotide
  source 1..21: mol_type = other DNA
aacggtcctggacagaatcaa

SEQ ID NO: 15090 - DNA, 21 bp, synthetic construct
  misc_feature 1..21: note = Description of Artificial Sequence: Synthetic oligonucleotide
  source 1..21: mol_type = other DNA
ggcaccgtcaccaaaaacgcc

SEQ ID NO: 15091 - DNA, 21 bp, synthetic construct
  misc_feature 1..21: note = Description of Artificial Sequence: Synthetic oligonucleotide
  source 1..21: mol_type = other DNA
ggcagcaccagcgccaacacc

SEQ ID NO: 15092 - DNA, 21 bp, synthetic construct
  misc_feature 1..21: note = Description of Artificial Sequence: Synthetic oligonucleotide
  source 1..21: mol_type = other DNA
tcgggtagtagtaaggttatt

SEQ ID NO: 15093 - DNA, 21 bp, synthetic construct
  misc_feature 1..21: note = Description of Artificial Sequence: Synthetic oligonucleotide
  source 1..21: mol_type = other DNA
atcagaaccggcaaaaccgac

SEQ ID NO: 15094 - DNA, 21 bp, synthetic construct
  misc_feature 1..21: note = Description of Artificial Sequence: Synthetic oligonucleotide
  source 1..21: mol_type = other DNA
catggggtggagaagcgtact

SEQ ID NO: 15095 - DNA, 21 bp, synthetic construct
  misc_feature 1..21: note = Description of Artificial Sequence: Synthetic oligonucleotide
  source 1..21: mol_type = other DNA
acggagacggataaggcgcat

SEQ ID NO: 15096 - DNA, 21 bp, synthetic construct
  misc_feature 1..21: note = Description of Artificial Sequence: Synthetic oligonucleotide
  source 1..21: mol_type = other DNA
gatcgtgctaatagtgctact

SEQ ID NO: 15097 - DNA, 21 bp, synthetic construct
  misc_feature 1..21: note = Description of Artificial Sequence: Synthetic oligonucleotide
  source 1..21: mol_type = other DNA
aaccaaggcgacagaaacttc

SEQ ID NO: 15098 - DNA, 21 bp, synthetic construct
  misc_feature 1..21: note = Description of Artificial Sequence: Synthetic oligonucleotide
  source 1..21: mol_type = other DNA
cggcaggatgctaagactgat

SEQ ID NO: 15099 - DNA, 21 bp, synthetic construct
  misc_feature 1..21: note = Description of Artificial Sequence: Synthetic oligonucleotide
  source 1..21: mol_type = other DNA
agtcggagtactagtaattcc

SEQ ID NO: 15100 - DNA, 21 bp, synthetic construct
  misc_feature 1..21: note = Description of Artificial Sequence: Synthetic oligonucleotide
  source 1..21: mol_type = other DNA
caaggcgtcaacaaagtcggc

SEQ ID NO: 15101 - DNA, 21 bp, synthetic construct
  misc_feature 1..21: note = Description of Artificial Sequence: Synthetic oligonucleotide
  source 1..21: mol_type = other DNA
caggggacgacgaatcatcag

SEQ ID NO: 15102 - DNA, 21 bp, synthetic construct
  misc_feature 1..21: note = Description of Artificial Sequence: Synthetic oligonucleotide
  source 1..21: mol_type = other DNA
cggcagcagacttcgatttcg

SEQ ID NO: 15103 - DNA, 21 bp, synthetic construct
  misc_feature 1..21: note = Description of Artificial Sequence: Synthetic oligonucleotide
  source 1..21: mol_type = other DNA
gacggccaaggcaccaaaatg

SEQ ID NO: 15104 - DNA, 21 bp, synthetic construct
  misc_feature 1..21: note = Description of Artificial Sequence: Synthetic oligonucleotide
  source 1..21: mol_type = other DNA
ggtactaatagtaagaatttg

SEQ ID NO: 15105 - DNA, 21 bp, synthetic construct
  misc_feature 1..21: note = Description of Artificial Sequence: Synthetic oligonucleotide
  source 1..21: mol_type = other DNA
gtcgccgtcgcccccaccaaa

SEQ ID NO: 15106 - DNA, 21 bp, synthetic construct
  misc_feature 1..21: note = Description of Artificial Sequence: Synthetic oligonucleotide
  source 1..21: mol_type = other DNA
tacagcggcaaaagcgtcgtc

SEQ ID NO: 15107 - DNA, 21 bp, synthetic construct
  misc_feature 1..21: note = Description of Artificial Sequence: Synthetic oligonucleotide
  source 1..21: mol_type = other DNA
ttgccttcgcagtctccgcag

SEQ ID NO: 15108 - DNA, 21 bp, synthetic construct
  misc_feature 1..21: note = Description of Artificial Sequence: Synthetic oligonucleotide
  source 1..21: mol_type = other DNA
ggcgacgccagcatgagaagc

SEQ ID NO: 15109 - DNA, 21 bp, synthetic construct
  misc_feature 1..21: note = Description of Artificial Sequence: Synthetic oligonucleotide
  source 1..21: mol_type = other DNA
gtcggcaacagccaaaaactc

SEQ ID NO: 15110 - DNA, 21 bp, synthetic construct
  misc_feature 1..21: note = Description of Artificial Sequence: Synthetic oligonucleotide
  source 1..21: mol_type = other DNA
tggggcaccgccaaacccgcc

SEQ ID NO: 15111 - DNA, 21 bp, synthetic construct
  misc_feature 1..21: note = Description of Artificial Sequence: Synthetic oligonucleotide
  source 1..21: mol_type = other DNA
actcagtcggatagggctcgg

SEQ ID NO: 15112 - DNA, 21 bp, synthetic construct
  misc_feature 1..21: note = Description of Artificial Sequence: Synthetic oligonucleotide
  source 1..21: mol_type = other DNA
gctccggtttctaagacggct

SEQ ID NO: 15113 - DNA, 21 bp, synthetic construct
  misc_feature 1..21: note = Description of Artificial Sequence: Synthetic oligonucleotide
  source 1..21: mol_type = other DNA
gttgggaatcagaataatatt

SEQ ID NO: 15114 - DNA, 21 bp, synthetic construct
  misc_feature 1..21: note = Description of Artificial Sequence: Synthetic oligonucleotide
  source 1..21: mol_type = other DNA
agaggcggcagcggcagcagc

SEQ ID NO: 15115 - DNA, 21 bp, synthetic construct
  misc_feature 1..21: note = Description of Artificial Sequence: Synthetic oligonucleotide
  source 1..21: mol_type = other DNA
gacctcagcggcaaaagaagc

SEQ ID NO: 15116 - DNA, 21 bp, synthetic construct
  misc_feature 1..21: note = Description of Artificial Sequence: Synthetic oligonucleotide
  source 1..21: mol_type = other DNA
gtcgccgtcggcgccgccaaa

SEQ ID NO: 15117 - DNA, 21 bp, synthetic construct
  misc_feature 1..21: note = Description of Artificial Sequence: Synthetic oligonucleotide
  source 1..21: mol_type = other DNA
gtcggccaaagcaccagcaga

SEQ ID NO: 15118 - DNA, 21 bp, synthetic construct
  misc_feature 1..21: note = Description of Artificial Sequence: Synthetic oligonucleotide
  source 1..21: mol_type = other DNA
ttggcggctggggcggggcat

SEQ ID NO: 15119 - DNA, 21 bp, synthetic construct
  misc_feature 1..21: note = Description of Artificial Sequence: Synthetic oligonucleotide
  source 1..21: mol_type = other DNA
acgcaggctaagagtattggg

SEQ ID NO: 15120 - DNA, 21 bp, synthetic construct
  misc_feature 1..21: note = Description of Artificial Sequence: Synthetic oligonucleotide
  source 1..21: mol_type = other DNA
agaaccgacaccaaaatcctc

SEQ ID NO: 15121 - DNA, 21 bp, synthetic construct
  misc_feature 1..21: note = Description of Artificial Sequence: Synthetic oligonucleotide
  source 1..21: mol_type = other DNA
cttaatcataattcgcagggt

SEQ ID NO: 15122 - DNA, 21 bp, synthetic construct
  misc_feature 1..21: note = Description of Artificial Sequence: Synthetic oligonucleotide
  source 1..21: mol_type = other DNA
ggcaccggcagcaccatgaga

SEQ ID NO: 15123 - DNA, 21 bp, synthetic construct
  misc_feature 1..21: note = Description of Artificial Sequence: Synthetic oligonucleotide
  source 1..21: mol_type = other DNA
tctgcgtcttctgggcatagt

SEQ ID NO: 15124 - DNA, 21 bp, synthetic construct
  misc_feature 1..21: note = Description of Artificial Sequence: Synthetic oligonucleotide
  source 1..21: mol_type = other DNA
accaccagcagcaccctcacc

SEQ ID NO: 15125 - DNA, 21 bp, synthetic construct
  misc_feature 1..21: note = Description of Artificial Sequence: Synthetic oligonucleotide
  source 1..21: mol_type = other DNA
ggcaaccacagcggcagccac

SEQ ID NO: 15126 - DNA, 21 bp, synthetic construct
  misc_feature 1..21: note = Description of Artificial Sequence: Synthetic oligonucleotide
  source 1..21: mol_type = other DNA
ggcagcagcagcaaacccgcc

SEQ ID NO: 15127 - DNA, 21 bp, synthetic construct
  misc_feature 1..21: note = Description of Artificial Sequence: Synthetic oligonucleotide
  source 1..21: mol_type = other DNA
ggtgctactcctcctagtaag

SEQ ID NO: 15128 - DNA, 21 bp, synthetic construct
  misc_feature 1..21: note = Description of Artificial Sequence: Synthetic oligonucleotide
  source 1..21: mol_type = other DNA
gttcctcagtctaagccggtt

SEQ ID NO: 15129 - DNA, 21 bp, synthetic construct
  misc_feature 1..21: note = Description of Artificial Sequence: Synthetic oligonucleotide
  source 1..21: mol_type = other DNA
gtgcaggggaagtcgcagctt

SEQ ID NO: 15130 - DNA, 21 bp, synthetic construct
  misc_feature 1..21: note = Description of Artificial Sequence: Synthetic oligonucleotide
  source 1..21: mol_type = other DNA
accggcgaaagaaccgccctc

SEQ ID NO: 15131 - DNA, 21 bp, synthetic construct
  misc_feature 1..21: note = Description of Artificial Sequence: Synthetic oligonucleotide
  source 1..21: mol_type = other DNA
acgggttctggtaaggttgtg

SEQ ID NO: 15132 - DNA, 21 bp, synthetic construct
  misc_feature 1..21: note = Description of Artificial Sequence: Synthetic oligonucleotide
  source 1..21: mol_type = other DNA
agcggcaccacccccatcaga

SEQ ID NO: 15133 - DNA, 21 bp, synthetic construct
  misc_feature 1..21: note = Description of Artificial Sequence: Synthetic oligonucleotide
  source 1..21: mol_type = other DNA
tctcaggatagtcatcgttcg

SEQ ID NO: 15134 - DNA, 21 bp, synthetic construct
  misc_feature 1..21: note = Description of Artificial Sequence: Synthetic oligonucleotide
  source 1..21: mol_type = other DNA
accaacacccaaagcaccctc

SEQ ID NO: 15135 - DNA, 21 bp, synthetic construct
  misc_feature 1..21: note = Description of Artificial Sequence: Synthetic oligonucleotide
  source 1..21: mol_type = other DNA
accatgggcaccaaacccagc

SEQ ID NO: 15136 - DNA, 21 bp, synthetic construct
  misc_feature 1..21: note = Description of Artificial Sequence: Synthetic oligonucleotide
  source 1..21: mol_type = other DNA
agacaaagcgaaaaaacccaa

SEQ ID NO: 15137 - DNA, 21 bp, synthetic construct
  misc_feature 1..21: note = Description of Artificial Sequence: Synthetic oligonucleotide
  source 1..21: mol_type = other DNA
ggcacccaagccagacaaggc

SEQ ID NO: 15138 - DNA, 21 bp, synthetic construct
  misc_feature 1..21: note = Description of Artificial Sequence: Synthetic oligonucleotide
  source 1..21: mol_type = other DNA
gttggtacggatgcttctagg

SEQ ID NO: 15139 - DNA, 21 bp, synthetic construct
  misc_feature 1..21: note = Description of Artificial Sequence: Synthetic oligonucleotide
  source 1..21: mol_type = other DNA
ttggatgataagaaggctggg

SEQ ID NO: 15140 - DNA, 21 bp, synthetic construct
  misc_feature 1..21: note = Description of Artificial Sequence: Synthetic oligonucleotide
  source 1..21: mol_type = other DNA
agcctccccaccgccaacaac

SEQ ID NO: 15141 - DNA, 21 bp, synthetic construct
  misc_feature 1..21: note = Description of Artificial Sequence: Synthetic oligonucleotide
  source 1..21: mol_type = other DNA
accagcggcaaagccggcacc

SEQ ID NO: 15142 - DNA, 21 bp, synthetic construct
  misc_feature 1..21: note = Description of Artificial Sequence: Synthetic oligonucleotide
  source 1..21: mol_type = other DNA
attcaggagactaggagtaat

SEQ ID NO: 15143 - DNA, 21 bp, synthetic construct
  misc_feature 1..21: note = Description of Artificial Sequence: Synthetic oligonucleotide
  source 1..21: mol_type = other DNA
gctaggtctgataagttgcat

SEQ ID NO: 15144 - DNA, 21 bp, synthetic construct
  misc_feature 1..21: note = Description of Artificial Sequence: Synthetic oligonucleotide
  source 1..21: mol_type = other DNA
caggggtcgcagacgcaggtt

SEQ ID NO: 15145 - DNA, 21 bp, synthetic construct
  misc_feature 1..21: note = Description of Artificial Sequence: Synthetic oligonucleotide
  source 1..21: mol_type = other DNA
agcaccgacggcacccaaaga

SEQ ID NO: 15146 - DNA, 21 bp, synthetic construct
  misc_feature 1..21: note = Description of Artificial Sequence: Synthetic oligonucleotide
  source 1..21: mol_type = other DNA
cagacggtgaagggtagtagt

SEQ ID NO: 15147 - DNA, 21 bp, synthetic construct
  misc_feature 1..21: note = Description of Artificial Sequence: Synthetic oligonucleotide
  source 1..21: mol_type = other DNA
caaaaaaccgaccaccccgcc

SEQ ID NO: 15148 - DNA, 21 bp, synthetic construct
  misc_feature 1..21: note = Description of Artificial Sequence: Synthetic oligonucleotide
  source 1..21: mol_type = other DNA
gacaccagacccaacaaagac

SEQ ID NO: 15149 - DNA, 21 bp, synthetic construct
  misc_feature 1..21: note = Description of Artificial Sequence: Synthetic oligonucleotide
  source 1..21: mol_type = other DNA
gtcagaaacgacaaaaccgaa

SEQ ID NO: 15150 - DNA, 21 bp, synthetic construct
  misc_feature 1..21: note = Description of Artificial Sequence: Synthetic oligonucleotide
  source 1..21: mol_type = other DNA
ggtactggtgatatgcggagg

SEQ ID NO: 15151 - DNA, 21 bp, synthetic construct
  misc_feature 1..21: note = Description of Artificial Sequence: Synthetic oligonucleotide
  source 1..21: mol_type = other DNA
ctcggcgacaaaaaagtcgtc

SEQ ID NO: 15152 - DNA, 21 bp, synthetic construct
  misc_feature 1..21: note = Description of Artificial Sequence: Synthetic oligonucleotide
  source 1..21: mol_type = other DNA
agtccgactggtaagactgtg

SEQ ID NO: 15153 - DNA, 21 bp, synthetic construct
  misc_feature 1..21: note = Description of Artificial Sequence: Synthetic oligonucleotide
  source 1..21: mol_type = other DNA
ctccccggcaacagcaccaaa

SEQ ID NO: 15154 - DNA, 21 bp, synthetic construct
  misc_feature 1..21: note = Description of Artificial Sequence: Synthetic oligonucleotide
  source 1..21: mol_type = other DNA
catggtaataagcctatggtg

SEQ ID NO: 15155 - DNA, 21 bp, synthetic construct
  misc_feature 1..21: note = Description of Artificial Sequence: Synthetic oligonucleotide
  source 1..21: mol_type = other DNA
gggaagagtactaatatgcat

SEQ ID NO: 15156 - DNA, 21 bp, synthetic construct
  misc_feature 1..21: note = Description of Artificial Sequence: Synthetic oligonucleotide
  source 1..21: mol_type = other DNA
gaaggcggcagcgtcggcaga

SEQ ID NO: 15157 - DNA, 21 bp, synthetic construct
  misc_feature 1..21: note = Description of Artificial Sequence: Synthetic oligonucleotide
  source 1..21: mol_type = other DNA
aacatcagcacccccagaaac

SEQ ID NO: 15158 - DNA, 21 bp, synthetic construct
  misc_feature 1..21: note = Description of Artificial Sequence: Synthetic oligonucleotide
  source 1..21: mol_type = other DNA
agcgccaacaacagcaccgtc

SEQ ID NO: 15159 - DNA, 21 bp, synthetic construct
  misc_feature 1..21: note = Description of Artificial Sequence: Synthetic oligonucleotide
  source 1..21: mol_type = other DNA
agcgccggccaaggcctcaaa

SEQ ID NO: 15160 - DNA, 21 bp, synthetic construct
  misc_feature 1..21: note = Description of Artificial Sequence: Synthetic oligonucleotide
  source 1..21: mol_type = other DNA
catggtactgctaagagtggt

SEQ ID NO: 15161 - DNA, 21 bp, synthetic construct
  misc_feature 1..21: note = Description of Artificial Sequence: Synthetic oligonucleotide
  source 1..21: mol_type = other DNA
gttgctaataagagttcgggg

SEQ ID NO: 15162 - DNA, 21 bp, synthetic construct
  misc_feature 1..21: note = Description of Artificial Sequence: Synthetic oligonucleotide
  source 1..21: mol_type = other DNA
acgtcggttcctcagcatggt

SEQ ID NO: 15163 - DNA, 21 bp, synthetic construct
  misc_feature 1..21: note = Description of Artificial Sequence: Synthetic oligonucleotide
  source 1..21: mol_type = other DNA
ctcaccgccaaaacccccagc

SEQ ID NO: 15164 - DNA, 21 bp, synthetic construct
  misc_feature 1..21: note = Description of Artificial Sequence: Synthetic oligonucleotide
  source 1..21: mol_type = other DNA
gaagaccacagacccaccgtc

SEQ ID NO: 15165 - DNA, 21 bp, synthetic construct
  misc_feature 1..21: note = Description of Artificial Sequence: Synthetic oligonucleotide
  source 1..21: mol_type = other DNA
ggcaccgccgccagaaccgaa

SEQ ID NO: 15166 - DNA, 21 bp, synthetic construct
  misc_feature 1..21: note = Description of Artificial Sequence: Synthetic oligonucleotide
  source 1..21: mol_type = other DNA
gggatgaatcctagggattcg

SEQ ID NO: 15167 - DNA, 21 bp, synthetic construct
  misc_feature 1..21: note = Description of Artificial Sequence: Synthetic oligonucleotide
  source 1..21: mol_type = other DNA
gtttctgcgcctggtaatacg

SEQ ID NO: 15168 - DNA, 21 bp, synthetic construct
  misc_feature 1..21: note = Description of Artificial Sequence: Synthetic oligonucleotide
  source 1..21: mol_type = other DNA
tcggcggataagacgcagaat

SEQ ID NO: 15169 - DNA, 21 bp, synthetic construct
  misc_feature 1..21: note = Description of Artificial Sequence: Synthetic oligonucleotide
  source 1..21: mol_type = other DNA
accagcgccaacgtcagcagc

SEQ ID NO: 15170 - DNA, 21 bp, synthetic construct
  misc_feature 1..21: note = Description of Artificial Sequence: Synthetic oligonucleotide
  source 1..21: mol_type = other DNA
tgcaccggcaaacccgacagc

SEQ ID NO: 15171 - DNA, 21 bp, synthetic construct
  misc_feature 1..21: note = Description of Artificial Sequence: Synthetic oligonucleotide
  source 1..21: mol_type = other DNA
accagccacaccaccagcaac

SEQ ID NO: 15172 - DNA, 21 bp, synthetic construct
  misc_feature 1..21: note = Description of Artificial Sequence: Synthetic oligonucleotide
  source 1..21: mol_type = other DNA
agcggcatgggcggcaccagc

SEQ ID NO: 15173 - DNA, 21 bp, synthetic construct
  misc_feature 1..21: note = Description of Artificial Sequence: Synthetic oligonucleotide
  source 1..21: mol_type = other DNA
acgcgggagaagagtagtttg

SEQ ID NO: 15174 - DNA, 21 bp, synthetic construct
  misc_feature 1..21: note = Description of Artificial Sequence: Synthetic oligonucleotide
  source 1..21: mol_type = other DNA
agcctcaccagccccgccagc

SEQ ID NO: 15175 - DNA, 21 bp, synthetic construct
  misc_feature 1..21: note = Description of Artificial Sequence: Synthetic oligonucleotide
  source 1..21: mol_type = other DNA
agcggcacccacaaaggccaa

SEQ ID NO: 15176 - DNA, 21 bp, synthetic construct
  misc_feature 1..21: note = Description of Artificial Sequence: Synthetic oligonucleotide
  source 1..21: mol_type = other DNA
atttctggtagtactccgacg

SEQ ID NO: 15177 - DNA, 21 bp, synthetic construct
  misc_feature 1..21: note = Description of Artificial Sequence: Synthetic oligonucleotide
  source 1..21: mol_type = other DNA
cttcggtctaaggagactatt

SEQ ID NO: 15178 - DNA, 21 bp, synthetic construct
  misc_feature 1..21: note = Description of Artificial Sequence: Synthetic oligonucleotide
  source 1..21: mol_type = other DNA
gacgtccccaacaaacacagc

SEQ ID NO: 15179 - DNA, 21 bp, synthetic construct
  misc_feature 1..21: note = Description of Artificial Sequence: Synthetic oligonucleotide
  source 1..21: mol_type = other DNA
gtgaagactgatagggcttct

SEQ ID NO: 15180 - DNA, 21 bp, synthetic construct
  misc_feature 1..21: note = Description of Artificial Sequence: Synthetic oligonucleotide
  source 1..21: mol_type = other DNA
gatgggacgaaggggaagtct

SEQ ID NO: 15181 - DNA, 21 bp, synthetic construct
  misc_feature 1..21: note = Description of Artificial Sequence: Synthetic oligonucleotide
  source 1..21: mol_type = other DNA
gccagcaacggcagcaaacaa

SEQ ID NO: 15182 - DNA, 21 bp, synthetic construct
  misc_feature 1..21: note = Description of Artificial Sequence: Synthetic oligonucleotide
  source 1..21: mol_type = other DNA
gccggcagcagcaaactcagc

SEQ ID NO: 15183 - DNA, 21 bp, synthetic construct
  misc_feature 1..21: note = Description of Artificial Sequence: Synthetic oligonucleotide
  source 1..21: mol_type = other DNA
acgaagggggataagcatgat

SEQ ID NO: 15184 - DNA, 21 bp, synthetic construct
  misc_feature 1..21: note = Description of Artificial Sequence: Synthetic oligonucleotide
  source 1..21: mol_type = other DNA
gatgggaataagaataagctt

SEQ ID NO: 15185 - DNA, 21 bp, synthetic construct
  misc_feature 1..21: note = Description of Artificial Sequence: Synthetic oligonucleotide
  source 1..21: mol_type = other DNA
gcgcgtgggggggatcagccg

SEQ ID NO: 15186 - DNA, 21 bp, synthetic construct
  misc_feature 1..21: note = Description of Artificial Sequence: Synthetic oligonucleotide
  source 1..21: mol_type = other DNA
actactgctgcgaattatcag

SEQ ID NO: 15187 - DNA, 21 bp, synthetic construct
  misc_feature 1..21: note = Description of Artificial Sequence: Synthetic oligonucleotide
  source 1..21: mol_type = other DNA
agcggcgtcggcagcggcctc

SEQ ID NO: 15188 - DNA, 21 bp, synthetic construct
  misc_feature 1..21: note = Description of Artificial Sequence: Synthetic oligonucleotide
  source 1..21: mol_type = other DNA
aattgtagtaagtcgaattgt

SEQ ID NO: 15189 - DNA, 21 bp, synthetic construct
  misc_feature 1..21: note = Description of Artificial Sequence: Synthetic oligonucleotide
  source 1..21: mol_type = other DNA
agcagaaacggcagccccgtc

SEQ ID NO: 15190 - DNA, 21 bp, synthetic construct
  misc_feature 1..21: note = Description of Artificial Sequence: Synthetic oligonucleotide
  source 1..21: mol_type = other DNA
agcgaaaaaaaaaacagcctc

SEQ ID NO: 15191 - DNA, 21 bp, synthetic construct
  misc_feature 1..21: note = Description of Artificial Sequence: Synthetic oligonucleotide
  source 1..21: mol_type = other DNA
ggggcgacgtctgagaggcgt

SEQ ID NO: 15192 - DNA, 21 bp, synthetic construct
  misc_feature 1..21: note = Description of Artificial Sequence: Synthetic oligonucleotide
  source 1..21: mol_type = other DNA
acgacggggaagcattcgcag

SEQ ID NO: 15193 - DNA, 21 bp, synthetic construct
  misc_feature 1..21: note = Description of Artificial Sequence: Synthetic oligonucleotide
  source 1..21: mol_type = other DNA
aggcatggggagtctacgact

SEQ ID NO: 15194 - DNA, 21 bp, synthetic construct
  misc_feature 1..21: note = Description of Artificial Sequence: Synthetic oligonucleotide
  source 1..21: mol_type = other DNA
aacaccaacaaacccatgagc

SEQ ID NO: 15195 - DNA, 21 bp, synthetic construct
  misc_feature 1..21: note = Description of Artificial Sequence: Synthetic oligonucleotide
  source 1..21: mol_type = other DNA
atgggcgacaaacccaccaga

SEQ ID NO: 15196 - DNA, 21 bp, synthetic construct
  misc_feature 1..21: note = Description of Artificial Sequence: Synthetic oligonucleotide
  source 1..21: mol_type = other DNA
tctaatcagacgccgacgagg

SEQ ID NO: 15197 - DNA, 21 bp, synthetic construct
  misc_feature 1..21: note = Description of Artificial Sequence: Synthetic oligonucleotide
  source 1..21: mol_type = other DNA
atgtctggtcattctcaggct

SEQ ID NO: 15198 - DNA, 21 bp, synthetic construct
  misc_feature 1..21: note = Description of Artificial Sequence: Synthetic oligonucleotide
  source 1..21: mol_type = other DNA
caaggcgtcgacagcagaagc

SEQ ID NO: 15199 - DNA, 21 bp, synthetic construct
  misc_feature 1..21: note = Description of Artificial Sequence: Synthetic oligonucleotide
  source 1..21: mol_type = other DNA
agtggtggtagtagtagggtg

SEQ ID NO: 15200 - DNA, 21 bp, synthetic construct
  misc_feature 1..21: note = Description of Artificial Sequence: Synthetic oligonucleotide
  source 1..21: mol_type = other DNA
acccccggcggccaccaagcc

SEQ ID NO: 15201 - DNA, 21 bp, synthetic construct
  misc_feature 1..21: note = Description of Artificial Sequence: Synthetic oligonucleotide
  source 1..21: mol_type = other DNA
actggtcgtgattctattcag

SEQ ID NO: 15202 - DNA, 21 bp, synthetic construct
  misc_feature 1..21: note = Description of Artificial Sequence: Synthetic oligonucleotide
  source 1..21: mol_type = other DNA
cgtgatggtacgcctcgtgat

SEQ ID NO: 15203 - DNA, 21 bp, synthetic construct
  misc_feature 1..21: note = Description of Artificial Sequence: Synthetic oligonucleotide
  source 1..21: mol_type = other DNA
accgcccccgccgccggcagc

SEQ ID NO: 15204 - DNA, 21 bp, synthetic construct
  misc_feature 1..21: note = Description of Artificial Sequence: Synthetic oligonucleotide
  source 1..21: mol_type = other DNA
actcttggggagcatagtcgt

SEQ ID NO: 15205 - DNA, 21 bp, synthetic construct
  misc_feature 1..21: note = Description of Artificial Sequence: Synthetic oligonucleotide
  source 1..21: mol_type = other DNA
cagaataatgctcctgcgcat

SEQ ID NO: 15206 - DNA, 21 bp, synthetic construct
  misc_feature 1..21: note = Description of Artificial Sequence: Synthetic oligonucleotide
  source 1..21: mol_type = other DNA
gaaggcagcagcagcctcacc

SEQ ID NO: 15207 - DNA, 21 bp, synthetic construct
  misc_feature 1..21: note = Description of Artificial Sequence: Synthetic oligonucleotide
  source 1..21: mol_type = other DNA
tcgggtaagcctaatgagcgt

SEQ ID NO: 15208 - DNA, 21 bp, synthetic construct
  misc_feature 1..21: note = Description of Artificial Sequence: Synthetic oligonucleotide
  source 1..21: mol_type = other DNA
aatcagtctacttctgctaag

SEQ ID NO: 15209 - DNA, 21 bp, synthetic construct
  misc_feature 1..21: note = Description of Artificial Sequence: Synthetic oligonucleotide
  source 1..21: mol_type = other DNA
accggcaaaaacgaaaacctc

SEQ ID NO: 15210 - DNA, 21 bp, synthetic construct
  misc_feature 1..21: note = Description of Artificial Sequence: Synthetic oligonucleotide
  source 1..21: mol_type = other DNA
gacagcgccagcagcagcaga

SEQ ID NO: 15211 - DNA, 21 bp, synthetic construct
  misc_feature 1..21: note = Description of Artificial Sequence: Synthetic oligonucleotide
  source 1..21: mol_type = other DNA
aattcgacgcgtgaggcggct

SEQ ID NO: 15212 - DNA, 21 bp, synthetic construct
  misc_feature 1..21: note = Description of Artificial Sequence: Synthetic oligonucleotide
  source 1..21: mol_type = other DNA
agtgctacgagtcggccggtt

SEQ ID NO: 15213 - DNA, 21 bp, synthetic construct
  misc_feature 1..21: note = Description of Artificial Sequence: Synthetic oligonucleotide
  source 1..21: mol_type = other DNA
gctggtcagactgcttcgact

SEQ ID NO: 15214 - DNA, 21 bp, synthetic construct
  misc_feature 1..21: note = Description of Artificial Sequence: Synthetic oligonucleotide
  source 1..21: mol_type = other DNA
tctcctgatcgttctagtagt

SEQ ID NO: 15215 - DNA, 21 bp, synthetic construct
  misc_feature 1..21: note = Description of Artificial Sequence: Synthetic oligonucleotide
  source 1..21: mol_type = other DNA
aacgaagccagagccacccaa

SEQ ID NO: 15216 - DNA, 21 bp, synthetic construct
  misc_feature 1..21: note = Description of Artificial Sequence: Synthetic oligonucleotide
  source 1..21: mol_type = other DNA
accgtcggcggcagaggcagc

SEQ ID NO: 15217 - DNA, 21 bp, synthetic construct
  misc_feature 1..21: note = Description of Artificial Sequence: Synthetic oligonucleotide
  source 1..21: mol_type = other DNA
agcaccctccccccccaaaaa

SEQ ID NO: 15218 - DNA, 21 bp, synthetic construct
  misc_feature 1..21: note = Description of Artificial Sequence: Synthetic oligonucleotide
  source 1..21: mol_type = other DNA
gaaaacaacagcggccccaga

SEQ ID NO: 15219 - DNA, 21 bp, synthetic construct
  misc_feature 1..21: note = Description of Artificial Sequence: Synthetic oligonucleotide
  source 1..21: mol_type = other DNA
gccccccccagcagcggcaaa

SEQ ID NO: 15220 - DNA, 21 bp, synthetic construct
  misc_feature 1..21: note = Description of Artificial Sequence: Synthetic oligonucleotide
  source 1..21: mol_type = other DNA
tcgagtaattctgcttcgtct

SEQ ID NO: 15221 - DNA, 21 bp, synthetic construct
  misc_feature 1..21: note = Description of Artificial Sequence: Synthetic oligonucleotide
  source 1..21: mol_type = other DNA
agcatcgccaccgcccaaaaa

SEQ ID NO: 15222 - DNA, 21 bp, synthetic construct
  misc_feature 1..21: note = Description of Artificial Sequence: Synthetic oligonucleotide
  source 1..21: mol_type = other DNA
gacaaatgcagcggctgcgcc

SEQ ID NO: 15223 - DNA, 21 bp, synthetic construct
  misc_feature 1..21: note = Description of Artificial Sequence: Synthetic oligonucleotide
  source 1..21: mol_type = other DNA
aataataatgtgcctgtgcag

SEQ ID NO: 15224 - DNA, 21 bp, synthetic construct
  misc_feature 1..21: note = Description of Artificial Sequence: Synthetic oligonucleotide
  source 1..21: mol_type = other DNA
agacaagacgtcagcaacggc

SEQ ID NO: 15225 - DNA, 21 bp, synthetic construct
  misc_feature 1..21: note = Description of Artificial Sequence: Synthetic oligonucleotide
  source 1..21: mol_type = other DNA
agcagagaaaaaggcagcaac

SEQ ID NO: 15226 - DNA, 21 bp, synthetic construct
  misc_feature 1..21: note = Description of Artificial Sequence: Synthetic oligonucleotide
  source 1..21: mol_type = other DNA
agtggtgttaattctagtggg

SEQ ID NO: 15227 - DNA, 21 bp, synthetic construct
  misc_feature 1..21: note = Description of Artificial Sequence: Synthetic oligonucleotide
  source 1..21: mol_type = other DNA
gtcagcagcccccccaacaga

SEQ ID NO: 15228 - DNA, 21 bp, synthetic construct
  misc_feature 1..21: note = Description of Artificial Sequence: Synthetic oligonucleotide
  source 1..21: mol_type = other DNA
ttcaccggcagcaacagcacc

SEQ ID NO: 15229 - DNA, 21 bp, synthetic construct
  misc_feature 1..21: note = Description of Artificial Sequence: Synthetic oligonucleotide
  source 1..21: mol_type = other DNA
gccagcaccagcggcatgcac

SEQ ID NO: 15230 - DNA, 21 bp, synthetic construct
  misc_feature 1..21: note = Description of Artificial Sequence: Synthetic oligonucleotide
  source 1..21: mol_type = other DNA
agcagaaccagcagcaacgtc

SEQ ID NO: 15231 - DNA, 21 bp, synthetic construct
  misc_feature 1..21: note = Description of Artificial Sequence: Synthetic oligonucleotide
  source 1..21: mol_type = other DNA
cagactggttctgctacggct

SEQ ID NO: 15232 - DNA, 21 bp, synthetic construct
  misc_feature 1..21: note = Description of Artificial Sequence: Synthetic oligonucleotide
  source 1..21: mol_type = other DNA
gaaagcgtcggcaaaagcgcc

SEQ ID NO: 15233 - DNA, 21 bp, synthetic construct
  misc_feature 1..21: note = Description of Artificial Sequence: Synthetic oligonucleotide
  source 1..21: mol_type = other DNA
gacggcagccaaagacccaaa

SEQ ID NO: 15234 - DNA, 21 bp, synthetic construct
  misc_feature 1..21: note = Description of Artificial Sequence: Synthetic oligonucleotide
  source 1..21: mol_type = other DNA
caaggcaacgaaggccacatc

SEQ ID NO: 15235 - DNA, 21 bp, synthetic construct
  misc_feature 1..21: note = Description of Artificial Sequence: Synthetic oligonucleotide
  source 1..21: mol_type = other DNA
ctcgccctcggcggcaaaggc

SEQ ID NO: 15236 - DNA, 21 bp, synthetic construct
  misc_feature 1..21: note = Description of Artificial Sequence: Synthetic oligonucleotide
  source 1..21: mol_type = other DNA
tctaattcgagtaagttgaat

SEQ ID NO: 15237 - DNA, 21 bp, synthetic construct
  misc_feature 1..21: note = Description of Artificial Sequence: Synthetic oligonucleotide
  source 1..21: mol_type = other DNA
ctgtcgaatcagcctaaggat

SEQ ID NO: 15238 - DNA, 21 bp, synthetic construct
  misc_feature 1..21: note = Description of Artificial Sequence: Synthetic oligonucleotide
  source 1..21: mol_type = other DNA
agcggcggcggccaagcccac

SEQ ID NO: 15239 - DNA, 21 bp, synthetic construct
  misc_feature 1..21: note = Description of Artificial Sequence: Synthetic oligonucleotide
  source 1..21: mol_type = other DNA
agtgctaattctgggcattcg

SEQ ID NO: 15240 - DNA, 21 bp, synthetic construct
  misc_feature 1..21: note = Description of Artificial Sequence: Synthetic oligonucleotide
  source 1..21: mol_type = other DNA
ggcagcgccaaaaccagcaac

SEQ ID NO: 15241 - DNA, 21 bp, synthetic construct
  misc_feature 1..21: note = Description of Artificial Sequence: Synthetic oligonucleotide
  source 1..21: mol_type = other DNA
caaagcagcaaacccaacatc

SEQ ID NO: 15242 - DNA, 21 bp, synthetic construct
  misc_feature 1..21: note = Description of Artificial Sequence: Synthetic oligonucleotide
  source 1..21: mol_type = other DNA
tcgggtgcgaatacgttgcat

SEQ ID NO: 15243 - DNA, 21 bp, synthetic construct
  misc_feature 1..21: note = Description of Artificial Sequence: Synthetic oligonucleotide
  source 1..21: mol_type = other DNA
ggcagacaaaacagcgcccaa

SEQ ID NO: 15244 - DNA, 21 bp, synthetic construct
  misc_feature 1..21: note = Description of Artificial Sequence: Synthetic oligonucleotide
  source 1..21: mol_type = other DNA
aaaggcgccgacagacaaagc

SEQ ID NO: 15245 - DNA, 21 bp, synthetic construct
  misc_feature 1..21: note = Description of Artificial Sequence: Synthetic oligonucleotide
  source 1..21: mol_type = other DNA
accgacggcagcggcaacaaa

SEQ ID NO: 15246 - DNA, 21 bp, synthetic construct
  misc_feature 1..21: note = Description of Artificial Sequence: Synthetic oligonucleotide
  source 1..21: mol_type = other DNA
accaaagacaaccacagcagc

SEQ ID NO: 15247 - DNA, 21 bp, synthetic construct
  misc_feature 1..21: note = Description of Artificial Sequence: Synthetic oligonucleotide
  source 1..21: mol_type = other DNA
actgttagtaagtctactatg

SEQ ID NO: 15248 - DNA, 21 bp, synthetic construct
  misc_feature 1..21: note = Description of Artificial Sequence: Synthetic oligonucleotide
  source 1..21: mol_type = other DNA
tctggtactcctcgtaatgct

SEQ ID NO: 15249 - DNA, 21 bp, synthetic construct
  misc_feature 1..21: note = Description of Artificial Sequence: Synthetic oligonucleotide
  source 1..21: mol_type = other DNA
caaagcaccagccccagcctc

SEQ ID NO: 15250 - DNA, 21 bp, synthetic construct
  misc_feature 1..21: note = Description of Artificial Sequence: Synthetic oligonucleotide
  source 1..21: mol_type = other DNA
catggtaacagtactcttcag

SEQ ID NO: 15251 - DNA, 21 bp, synthetic construct
  misc_feature 1..21: note = Description of Artificial Sequence: Synthetic oligonucleotide
  source 1..21: mol_type = other DNA
ggcaccgccaaacaattcgcc

SEQ ID NO: 15252 - DNA, 21 bp, synthetic construct
  misc_feature 1..21: note = Description of Artificial Sequence: Synthetic oligonucleotide
  source 1..21: mol_type = other DNA
aaccaaacccccgccctcggc

SEQ ID NO: 15253 - DNA, 21 bp, synthetic construct
  misc_feature 1..21: note = Description of Artificial Sequence: Synthetic oligonucleotide
  source 1..21: mol_type = other DNA
accagaaccgacagcagcagc

SEQ ID NO: 15254 - DNA, 21 bp, synthetic construct
  misc_feature 1..21: note = Description of Artificial Sequence: Synthetic oligonucleotide
  source 1..21: mol_type = other DNA
actagtagtaatgttcctggg

SEQ ID NO: 15255 - DNA, 21 bp, synthetic construct
  misc_feature 1..21: note = Description of Artificial Sequence: Synthetic oligonucleotide
  source 1..21: mol_type = other DNA
agcatcgacagcgcccacaga

SEQ ID NO: 15256 - DNA, 21 bp, synthetic construct
  misc_feature 1..21: note = Description of Artificial Sequence: Synthetic oligonucleotide
  source 1..21: mol_type = other DNA
agcggcagcaccaaaggcacc

SEQ ID NO: 15257 - DNA, 21 bp, synthetic construct
  misc_feature 1..21: note = Description of Artificial Sequence: Synthetic oligonucleotide
  source 1..21: mol_type = other DNA
cacagcaacaccaccagcaac

SEQ ID NO: 15258 - DNA, 21 bp, synthetic construct
  misc_feature 1..21: note = Description of Artificial Sequence: Synthetic oligonucleotide
  source 1..21: mol_type = other DNA
cagattaatagtaagtcgacg

SEQ ID NO: 15259 - DNA, 21 bp, synthetic construct
  misc_feature 1..21: note = Description of Artificial Sequence: Synthetic oligonucleotide
  source 1..21: mol_type = other DNA
gaaaccgtcaaaaaaagcagc

SEQ ID NO: 15260 - DNA, 21 bp, synthetic construct
  misc_feature 1..21: note = Description of Artificial Sequence: Synthetic oligonucleotide
  source 1..21: mol_type = other DNA
gacggcgtcaacaaaatgaga

SEQ ID NO: 15261 - DNA, 21 bp, synthetic construct
  misc_feature 1..21: note = Description of Artificial Sequence: Synthetic oligonucleotide
  source 1..21: mol_type = other DNA
gccaacagcgtccccaacacc

SEQ ID NO: 15262 - DNA, 21 bp, synthetic construct
  misc_feature 1..21: note = Description of Artificial Sequence: Synthetic oligonucleotide
  source 1..21: mol_type = other DNA
ggcagccaaagcggcaaagtc

SEQ ID NO: 15263 - DNA, 21 bp, synthetic construct
  misc_feature 1..21: note = Description of Artificial Sequence: Synthetic oligonucleotide
  source 1..21: mol_type = other DNA
tctacttctcaggctgggaat

SEQ ID NO: 15264 - DNA, 21 bp, synthetic construct
  misc_feature 1..21: note = Description of Artificial Sequence: Synthetic oligonucleotide
  source 1..21: mol_type = other DNA
tctcctggtaagggtttggtg

SEQ ID NO: 15265 - DNA, 21 bp, synthetic construct
  misc_feature 1..21: note = Description of Artificial Sequence: Synthetic oligonucleotide
  source 1..21: mol_type = other DNA
ttcagaaccgaaagcgtcgcc

SEQ ID NO: 15266 - DNA, 21 bp, synthetic construct
  misc_feature 1..21: note = Description of Artificial Sequence: Synthetic oligonucleotide
  source 1..21: mol_type = other DNA
gacagacaacacaccaacatc

SEQ ID NO: 15267 - DNA, 21 bp, synthetic construct
  misc_feature 1..21: note = Description of Artificial Sequence: Synthetic oligonucleotide
  source 1..21: mol_type = other DNA
acccaagccaaagtcagcggc

SEQ ID NO: 15268 - DNA, 21 bp, synthetic construct
  misc_feature 1..21: note = Description of Artificial Sequence: Synthetic oligonucleotide
  source 1..21: mol_type = other DNA
tcttcgggtcatggggcgagt

SEQ ID NO: 15269 - DNA, 21 bp, synthetic construct
  misc_feature 1..21: note = Description of Artificial Sequence: Synthetic oligonucleotide
  source 1..21: mol_type = other DNA
aatggtagtactaagattact

SEQ ID NO: 15270 - DNA, 21 bp, synthetic construct
  misc_feature 1..21: note = Description of Artificial Sequence: Synthetic oligonucleotide
  source 1..21: mol_type = other DNA
gaaggccaccccagaaccagc

SEQ ID NO: 15271 - DNA, 21 bp, synthetic construct
  misc_feature 1..21: note = Description of Artificial Sequence: Synthetic oligonucleotide
  source 1..21: mol_type = other DNA
tcgccgagtacgaatcgggag

SEQ ID NO: 15272 - DNA, 21 bp, synthetic construct
  misc_feature 1..21: note = Description of Artificial Sequence: Synthetic oligonucleotide
  source 1..21: mol_type = other DNA
aatactggtcgtgatcctcgt

SEQ ID NO: 15273 - DNA, 21 bp, synthetic construct
  misc_feature 1..21: note = Description of Artificial Sequence: Synthetic oligonucleotide
  source 1..21: mol_type = other DNA
agcagcagcgccggcagcctc

SEQ ID NO: 15274 - DNA, 21 bp, synthetic construct
  misc_feature 1..21: note = Description of Artificial Sequence: Synthetic oligonucleotide
  source 1..21: mol_type = other DNA
catacgagtaaggttgcgcat

SEQ ID NO: 15275 - DNA, 21 bp, synthetic construct
  misc_feature 1..21: note = Description of Artificial Sequence: Synthetic oligonucleotide
  source 1..21: mol_type = other DNA
ctcaacccccacggcagcggc

SEQ ID NO: 15276 - DNA, 21 bp, synthetic construct
  misc_feature 1..21: note = Description of Artificial Sequence: Synthetic oligonucleotide
  source 1..21: mol_type = other DNA
gtccccaacaacggccaaaaa

SEQ ID NO: 15277 - DNA, 21 bp, synthetic construct
  misc_feature 1..21: note = Description of Artificial Sequence: Synthetic oligonucleotide
  source 1..21: mol_type = other DNA
gcccaacccgccggcaaaatc

SEQ ID NO: 15278 - DNA, 21 bp, synthetic construct
  misc_feature 1..21: note = Description of Artificial Sequence: Synthetic oligonucleotide
  source 1..21: mol_type = other DNA
gggactaaggggtcgaatacg

SEQ ID NO: 15279 - DNA, 21 bp, synthetic construct
  misc_feature 1..21: note = Description of Artificial Sequence: Synthetic oligonucleotide
  source 1..21: mol_type = other DNA
accaacggcccccaaaccaaa

SEQ ID NO: 15280 - DNA, 21 bp, synthetic construct
  misc_feature 1..21: note = Description of Artificial Sequence: Synthetic oligonucleotide
  source 1..21: mol_type = other DNA
acgatttcggataagagtttg

SEQ ID NO: 15281 - DNA, 21 bp, synthetic construct
  misc_feature 1..21: note = Description of Artificial Sequence: Synthetic oligonucleotide
  source 1..21: mol_type = other DNA
agtacgggggctgggggtcag

SEQ ID NO: 15282 - DNA, 21 bp, synthetic construct
  misc_feature 1..21: note = Description of Artificial Sequence: Synthetic oligonucleotide
  source 1..21: mol_type = other DNA
agcgccggcaacaacaacaga

SEQ ID NO: 15283 - DNA, 21 bp, synthetic construct
  misc_feature 1..21: note = Description of Artificial Sequence: Synthetic oligonucleotide
  source 1..21: mol_type = other DNA
gcccaaggcaaccccgccaaa

SEQ ID NO: 15284 - DNA, 21 bp, synthetic construct
  misc_feature 1..21: note = Description of Artificial Sequence: Synthetic oligonucleotide
  source 1..21: mol_type = other DNA
gctattaatgagaaggcggtg

SEQ ID NO: 15285 - DNA, 21 bp, synthetic construct
  misc_feature 1..21: note = Description of Artificial Sequence: Synthetic oligonucleotide
  source 1..21: mol_type = other DNA
atcggcagcaccacccaaagc

SEQ ID NO: 15286 - DNA, 21 bp, synthetic construct
  misc_feature 1..21: note = Description of Artificial Sequence: Synthetic oligonucleotide
  source 1..21: mol_type = other DNA
gatgggcgggtttctcagggt

SEQ ID NO: 15287 - DNA, 21 bp, synthetic construct
  misc_feature 1..21: note = Description of Artificial Sequence: Synthetic oligonucleotide
  source 1..21: mol_type = other DNA
gctacgggtgcgactcctcgg

SEQ ID NO: 15288 - DNA, 21 bp, synthetic construct
  misc_feature 1..21: note = Description of Artificial Sequence: Synthetic oligonucleotide
  source 1..21: mol_type = other DNA
gtcagcagcaaaaaaaccgaa

SEQ ID NO: 15289 - DNA, 21 bp, synthetic construct
  misc_feature 1..21: note = Description of Artificial Sequence: Synthetic oligonucleotide
  source 1..21: mol_type = other DNA
atggcgtctaagacttctcag

SEQ ID NO: 15290 - DNA, 21 bp, synthetic construct
  misc_feature 1..21: note = Description of Artificial Sequence: Synthetic oligonucleotide
  source 1..21: mol_type = other DNA
gggaggcagcagcagtctggg

SEQ ID NO: 15291 - DNA, 21 bp, synthetic construct
  misc_feature 1..21: note = Description of Artificial Sequence: Synthetic oligonucleotide
  source 1..21: mol_type = other DNA
actgcgaatgcttctcattct

SEQ ID NO: 15292 - DNA, 21 bp, synthetic construct
  misc_feature 1..21: note = Description of Artificial Sequence: Synthetic oligonucleotide
  source 1..21: mol_type = other DNA
ggtggtgtgtcttcgaatact

SEQ ID NO: 15293 - DNA, 21 bp, synthetic construct
  misc_feature 1..21: note = Description of Artificial Sequence: Synthetic oligonucleotide
  source 1..21: mol_type = other DNA
aacagccaaggcagcaccctc

SEQ ID NO: 15294 - DNA, 21 bp, synthetic construct
  misc_feature 1..21: note = Description of Artificial Sequence: Synthetic oligonucleotide
  source 1..21: mol_type = other DNA
aacaccggcagcggcctcaaa

SEQ ID NO: 15295 - DNA, 21 bp, synthetic construct
  misc_feature 1..21: note = Description of Artificial Sequence: Synthetic oligonucleotide
  source 1..21: mol_type = other DNA
cgttcggctagtcctcctgtt

SEQ ID NO: 15296 - DNA, 21 bp, synthetic construct
  misc_feature 1..21: note = Description of Artificial Sequence: Synthetic oligonucleotide
  source 1..21: mol_type = other DNA
gaaagcggcgacagagtcaaa

SEQ ID NO: 15297 - DNA, 21 bp, synthetic construct
  misc_feature 1..21: note = Description of Artificial Sequence: Synthetic oligonucleotide
  source 1..21: mol_type = other DNA
gctggtaatcagagtactggg

SEQ ID NO: 15298 - DNA, 21 bp, synthetic construct
  misc_feature 1..21: note = Description of Artificial Sequence: Synthetic oligonucleotide
  source 1..21: mol_type = other DNA
tcgttgacgaagaatggtgct

SEQ ID NO: 15299 - DNA, 21 bp, synthetic construct
  misc_feature 1..21: note = Description of Artificial Sequence: Synthetic oligonucleotide
  source 1..21: mol_type = other DNA
agtcctggtaagggggcgagt

SEQ ID NO: 15300 - DNA, 21 bp, synthetic construct
  misc_feature 1..21: note = Description of Artificial Sequence: Synthetic oligonucleotide
  source 1..21: mol_type = other DNA
tctaatgtgaattcgatgaag

SEQ ID NO: 15301 - DNA, 21 bp, synthetic construct
  misc_feature 1..21: note = Description of Artificial Sequence: Synthetic oligonucleotide
  source 1..21: mol_type = other DNA
aagcaggcgggggcgatggag

SEQ ID NO: 15302 - DNA, 21 bp, synthetic construct
  misc_feature 1..21: note = Description of Artificial Sequence: Synthetic oligonucleotide
  source 1..21: mol_type = other DNA
cttagtagtggttctatgggt

SEQ ID NO: 15303 - DNA, 21 bp, synthetic construct
  misc_feature 1..21: note = Description of Artificial Sequence: Synthetic oligonucleotide
  source 1..21: mol_type = other DNA
gccctcaacagcaaaaccaac

SEQ ID NO: 15304 - DNA, 21 bp, synthetic construct
  misc_feature 1..21: note = Description of Artificial Sequence: Synthetic oligonucleotide
  source 1..21: mol_type = other DNA
ggcgtcgaaagcagacaaaaa

SEQ ID NO: 15305 - DNA, 21 bp, synthetic construct
  misc_feature 1..21: note = Description of Artificial Sequence: Synthetic oligonucleotide
  source 1..21: mol_type = other DNA
accggcagaacccccgccgtc

SEQ ID NO: 15306 - DNA, 21 bp, synthetic construct
  misc_feature 1..21: note = Description of Artificial Sequence: Synthetic oligonucleotide
  source 1..21: mol_type = other DNA
gattcgaataatgctaatcgt

SEQ ID NO: 15307 - DNA, 21 bp, synthetic construct
  misc_feature 1..21: note = Description of Artificial Sequence: Synthetic oligonucleotide
  source 1..21: mol_type = other DNA
aaaagcaacagcgccatcacc

SEQ ID NO: 15308 - DNA, 21 bp, synthetic construct
  misc_feature 1..21: note = Description of Artificial Sequence: Synthetic oligonucleotide
  source 1..21: mol_type = other DNA
atgactggtggtgcgggtagt

SEQ ID NO: 15309 - DNA, 21 bp, synthetic construct
  misc_feature 1..21: note = Description of Artificial Sequence: Synthetic oligonucleotide
  source 1..21: mol_type = other DNA
tcggtggagcataagggtggt

SEQ ID NO: 15310 - DNA, 21 bp, synthetic construct
  misc_feature 1..21: note = Description of Artificial Sequence: Synthetic oligonucleotide
  source 1..21: mol_type = other DNA
tctaatggtcgggcgaatgcg

SEQ ID NO: 15311 - DNA, 21 bp, synthetic construct
  misc_feature 1..21: note = Description of Artificial Sequence: Synthetic oligonucleotide
  source 1..21: mol_type = other DNA
ggcaacagcagcagcaaaagc

SEQ ID NO: 15312 - DNA, 21 bp, synthetic construct
  misc_feature 1..21: note = Description of Artificial Sequence: Synthetic oligonucleotide
  source 1..21: mol_type = other DNA
agccaaaccaccaaaaccagc

SEQ ID NO: 15313 - DNA, 21 bp, synthetic construct
  misc_feature 1..21: note = Description of Artificial Sequence: Synthetic oligonucleotide
  source 1..21: mol_type = other DNA
ctcaccagccaaaaacccgcc

SEQ ID NO: 15314 - DNA, 21 bp, synthetic construct
  misc_feature 1..21: note = Description of Artificial Sequence: Synthetic oligonucleotide
  source 1..21: mol_type = other DNA
gaaaccgaaagcagagccgcc

SEQ ID NO: 15315 - DNA, 21 bp, synthetic construct
  misc_feature 1..21: note = Description of Artificial Sequence: Synthetic oligonucleotide
  source 1..21: mol_type = other DNA
ggcgtccccagcagcaccaaa

SEQ ID NO: 15316 - DNA, 21 bp, synthetic construct
  misc_feature 1..21: note = Description of Artificial Sequence: Synthetic oligonucleotide
  source 1..21: mol_type = other DNA
cagggtccttctaagggttcg

SEQ ID NO: 15317 - DNA, 21 bp, synthetic construct
  misc_feature 1..21: note = Description of Artificial Sequence: Synthetic oligonucleotide
  source 1..21: mol_type = other DNA
ctgagtgggtcttctaatttg

SEQ ID NO: 15318 - DNA, 21 bp, synthetic construct
  misc_feature 1..21: note = Description of Artificial Sequence: Synthetic oligonucleotide
  source 1..21: mol_type = other DNA
gtcaccgacaccccccaccaa

SEQ ID NO: 15319 - DNA, 21 bp, synthetic construct
  misc_feature 1..21: note = Description of Artificial Sequence: Synthetic oligonucleotide
  source 1..21: mol_type = other DNA
ttgactggttcgaattcgaag

SEQ ID NO: 15320 - DNA, 21 bp, synthetic construct
  misc_feature 1..21: note = Description of Artificial Sequence: Synthetic oligonucleotide
  source 1..21: mol_type = other DNA
actatttcgagtacgccttcg

SEQ ID NO: 15321 - DNA, 21 bp, synthetic construct
  misc_feature 1..21: note = Description of Artificial Sequence: Synthetic oligonucleotide
  source 1..21: mol_type = other DNA
aatcctggtggttcgaagctt

SEQ ID NO: 15322 - DNA, 21 bp, synthetic construct
  misc_feature 1..21: note = Description of Artificial Sequence: Synthetic oligonucleotide
  source 1..21: mol_type = other DNA
acccaagaacacaaaagcacc

SEQ ID NO: 15323 - DNA, 21 bp, synthetic construct
  misc_feature 1..21: note = Description of Artificial Sequence: Synthetic oligonucleotide
  source 1..21: mol_type = other DNA
gataaggttccgcatggtgtt

SEQ ID NO: 15324 - DNA, 21 bp, synthetic construct
  misc_feature 1..21: note = Description of Artificial Sequence: Synthetic oligonucleotide
  source 1..21: mol_type = other DNA
gtggggagtcggccggataag

SEQ ID NO: 15325 - DNA, 21 bp, synthetic construct
  misc_feature 1..21: note = Description of Artificial Sequence: Synthetic oligonucleotide
  source 1..21: mol_type = other DNA
ggtacggctggtggtcagagt

SEQ ID NO: 15326 - DNA, 21 bp, synthetic construct
  misc_feature 1..21: note = Description of Artificial Sequence: Synthetic oligonucleotide
  source 1..21: mol_type = other DNA
cagtcggagcgtacgcctacg

SEQ ID NO: 15327 - DNA, 21 bp, synthetic construct
  misc_feature 1..21: note = Description of Artificial Sequence: Synthetic oligonucleotide
  source 1..21: mol_type = other DNA
gccaacgccgcccccctcaaa

SEQ ID NO: 15328 - DNA, 21 bp, synthetic construct
  misc_feature 1..21: note = Description of Artificial Sequence: Synthetic oligonucleotide
  source 1..21: mol_type = other DNA
aatcatagtacttcggcgcct

SEQ ID NO: 15329 - DNA, 21 bp, synthetic construct
  misc_feature 1..21: note = Description of Artificial Sequence: Synthetic oligonucleotide
  source 1..21: mol_type = other DNA
acggtttctggtagtactaag

SEQ ID NO: 15330 - DNA, 21 bp, synthetic construct
  misc_feature 1..21: note = Description of Artificial Sequence: Synthetic oligonucleotide
  source 1..21: mol_type = other DNA
gccagcagccccatcaacaaa

SEQ ID NO: 15331 - DNA, 21 bp, synthetic construct
  misc_feature 1..21: note = Description of Artificial Sequence: Synthetic oligonucleotide
  source 1..21: mol_type = other DNA
gggacgtcgggtaagtcgatg

SEQ ID NO: 15332 - DNA, 21 bp, synthetic construct
  misc_feature 1..21: note = Description of Artificial Sequence: Synthetic oligonucleotide
  source 1..21: mol_type = other DNA
ctcgccaacgtccccacccaa

SEQ ID NO: 15333 - DNA, 21 bp, synthetic construct
  misc_feature 1..21: note = Description of Artificial Sequence: Synthetic oligonucleotide
  source 1..21: mol_type = other DNA
agtcaggctgctagtcctagg

SEQ ID NO: 15334 - DNA, 21 bp, synthetic construct
  misc_feature 1..21: note = Description of Artificial Sequence: Synthetic oligonucleotide
  source 1..21: mol_type = other DNA
agtgttgataagaataatagg

SEQ ID NO: 15335 - DNA, 21 bp, synthetic construct
  misc_feature 1..21: note = Description of Artificial Sequence: Synthetic oligonucleotide
  source 1..21: mol_type = other DNA
ggcagcgacagaaaaagcgaa

SEQ ID NO: 15336 - DNA, 21 bp, synthetic construct
  misc_feature 1..21: note = Description of Artificial Sequence: Synthetic oligonucleotide
  source 1..21: mol_type = other DNA
accagcaccagcagacccaac

SEQ ID NO: 15337 - DNA, 21 bp, synthetic construct
  misc_feature 1..21: note = Description of Artificial Sequence: Synthetic oligonucleotide
  source 1..21: mol_type = other DNA
caaggcagcggcaaaatgagc

SEQ ID NO: 15338 - DNA, 21 bp, synthetic construct
  misc_feature 1..21: note = Description of Artificial Sequence: Synthetic oligonucleotide
  source 1..21: mol_type = other DNA
gacaccagaagcgccaaccaa

SEQ ID NO: 15339 - DNA, 21 bp, synthetic construct
  misc_feature 1..21: note = Description of Artificial Sequence: Synthetic oligonucleotide
  source 1..21: mol_type = other DNA
aagactggtcagtcttctagt

SEQ ID NO: 15340 - DNA, 21 bp, synthetic construct
  misc_feature 1..21: note = Description of Artificial Sequence: Synthetic oligonucleotide
  source 1..21: mol_type = other DNA
gggcgtgataagacggtttct

SEQ ID NO: 15341 - DNA, 21 bp, synthetic construct
  misc_feature 1..21: note = Description of Artificial Sequence: Synthetic oligonucleotide
  source 1..21: mol_type = other DNA
ggtctgtctgagcataaggtg

SEQ ID NO: 15342 - DNA, 21 bp, synthetic construct
  misc_feature 1..21: note = Description of Artificial Sequence: Synthetic oligonucleotide
  source 1..21: mol_type = other DNA
actacgaatactaaggatagg

SEQ ID NO: 15343 - DNA, 21 bp, synthetic construct
  misc_feature 1..21: note = Description of Artificial Sequence: Synthetic oligonucleotide
  source 1..21: mol_type = other DNA
gagaggccgggtccggctaag

SEQ ID NO: 15344 - DNA, 21 bp, synthetic construct
  misc_feature 1..21: note = Description of Artificial Sequence: Synthetic oligonucleotide
  source 1..21: mol_type = other DNA
ggggcggggccttcgcctacg

SEQ ID NO: 15345 - DNA, 21 bp, synthetic construct
  misc_feature 1..21: note = Description of Artificial Sequence: Synthetic oligonucleotide
  source 1..21: mol_type = other DNA
gaaagagacggcaaaaacttc

SEQ ID NO: 15346 - DNA, 21 bp, synthetic construct
  misc_feature 1..21: note = Description of Artificial Sequence: Synthetic oligonucleotide
  source 1..21: mol_type = other DNA
agcgccgacagagaaaacaga

SEQ ID NO: 15347 - DNA, 21 bp, synthetic construct
  misc_feature 1..21: note = Description of Artificial Sequence: Synthetic oligonucleotide
  source 1..21: mol_type = other DNA
gacagcaacagaggcagcgcc

SEQ ID NO: 15348 - DNA, 21 bp, synthetic construct
  misc_feature 1..21: note = Description of Artificial Sequence: Synthetic oligonucleotide
  source 1..21: mol_type = other DNA
gctttgaagaattctaatcag

SEQ ID NO: 15349 - DNA, 21 bp, synthetic construct
  misc_feature 1..21: note = Description of Artificial Sequence: Synthetic oligonucleotide
  source 1..21: mol_type = other DNA
ctgaatagtggtaagcttagt

SEQ ID NO: 15350 - DNA, 21 bp, synthetic construct
  misc_feature 1..21: note = Description of Artificial Sequence: Synthetic oligonucleotide
  source 1..21: mol_type = other DNA
ggccaacacaacgccaccacc

SEQ ID NO: 15351 - DNA, 21 bp, synthetic construct
  misc_feature 1..21: note = Description of Artificial Sequence: Synthetic oligonucleotide
  source 1..21: mol_type = other DNA
ctcgtcggcagcaaaagcgaa

SEQ ID NO: 15352 - DNA, 21 bp, synthetic construct
  misc_feature 1..21: note = Description of Artificial Sequence: Synthetic oligonucleotide
  source 1..21: mol_type = other DNA
gccaccgtcagcaaaaccgcc

SEQ ID NO: 15353 - DNA, 21 bp, synthetic construct
  misc_feature 1..21: note = Description of Artificial Sequence: Synthetic oligonucleotide
  source 1..21: mol_type = other DNA
gctcggactgggtcttctact

SEQ ID NO: 15354 - DNA, 21 bp, synthetic construct
  misc_feature 1..21: note = Description of Artificial Sequence: Synthetic oligonucleotide
  source 1..21: mol_type = other DNA
acccaacacaaagacaaaccc

SEQ ID NO: 15355 - DNA, 21 bp, synthetic construct
  misc_feature 1..21: note = Description of Artificial Sequence: Synthetic oligonucleotide
  source 1..21: mol_type = other DNA
accccccacaccgccaacaaa

SEQ ID NO: 15356 - DNA, 21 bp, synthetic construct
  misc_feature 1..21: note = Description of Artificial Sequence: Synthetic oligonucleotide
  source 1..21: mol_type = other DNA
agcggcaccaaagcccacgac

SEQ ID NO: 15357 - DNA, 21 bp, synthetic construct
  misc_feature 1..21: note = Description of Artificial Sequence: Synthetic oligonucleotide
  source 1..21: mol_type = other DNA
agcggcagcaacagcagagac

SEQ ID NO: 15358 - DNA, 21 bp, synthetic construct
  misc_feature 1..21: note = Description of Artificial Sequence: Synthetic oligonucleotide
  source 1..21: mol_type = other DNA
atgagggttgataagcagatt

SEQ ID NO: 15359 - DNA, 21 bp, synthetic construct
  misc_feature 1..21: note = Description of Artificial Sequence: Synthetic oligonucleotide
  source 1..21: mol_type = other DNA
attcctcggcagcagccgggt

SEQ ID NO: 15360 - DNA, 21 bp, synthetic construct
  misc_feature 1..21: note = Description of Artificial Sequence: Synthetic oligonucleotide
  source 1..21: mol_type = other DNA
tctccgtcgagtcagggtggg

SEQ ID NO: 15361 - DNA, 21 bp, synthetic construct
  misc_feature 1..21: note = Description of Artificial Sequence: Synthetic oligonucleotide
  source 1..21: mol_type = other DNA
tctcctgggggtcgtgattct

SEQ ID NO: 15362 - DNA, 21 bp, synthetic construct
  misc_feature 1..21: note = Description of Artificial Sequence: Synthetic oligonucleotide
  source 1..21: mol_type = other DNA
gctacggggtctggtagtcgg

SEQ ID NO: 15363 - DNA, 21 bp, synthetic construct
  misc_feature 1..21: note = Description of Artificial Sequence: Synthetic oligonucleotide
  source 1..21: mol_type = other DNA
gggaggtcggatacgccttct

SEQ ID NO: 15364 - DNA, 21 bp, synthetic construct
  misc_feature 1..21: note = Description of Artificial Sequence: Synthetic oligonucleotide
  source 1..21: mol_type = other DNA
agaggcagcagcaccagcacc

SEQ ID NO: 15365 - DNA, 21 bp, synthetic construct
  misc_feature 1..21: note = Description of Artificial Sequence: Synthetic oligonucleotide
  source 1..21: mol_type = other DNA
ggcagactcagcagcgaaaaa

SEQ ID NO: 15366 - DNA, 21 bp, synthetic construct
  misc_feature 1..21: note = Description of Artificial Sequence: Synthetic oligonucleotide
  source 1..21: mol_type = other DNA
gccgtcggcaccacccccagc

SEQ ID NO: 15367 - DNA, 21 bp, synthetic construct
  misc_feature 1..21: note = Description of Artificial Sequence: Synthetic oligonucleotide
  source 1..21: mol_type = other DNA
gcccccagcatgagcggcaaa

SEQ ID NO: 15368 - DNA, 21 bp, synthetic construct
  misc_feature 1..21: note = Description of Artificial Sequence: Synthetic oligonucleotide
  source 1..21: mol_type = other DNA
aacggcaacggccccggcaaa

SEQ ID NO: 15369 - DNA, 21 bp, synthetic construct
  misc_feature 1..21: note = Description of Artificial Sequence: Synthetic oligonucleotide
  source 1..21: mol_type = other DNA
accagcgacgccagacccagc

SEQ ID NO: 15370 - DNA, 21 bp, synthetic construct
  misc_feature 1..21: note = Description of Artificial Sequence: Synthetic oligonucleotide
  source 1..21: mol_type = other DNA
acccccgaaagagtcggcggc

SEQ ID NO: 15371 - DNA, 21 bp, synthetic construct
  misc_feature 1..21: note = Description of Artificial Sequence: Synthetic oligonucleotide
  source 1..21: mol_type = other DNA
agttcggctacgaagagtatt

SEQ ID NO: 15372 - DNA, 21 bp, synthetic construct
  misc_feature 1..21: note = Description of Artificial Sequence: Synthetic oligonucleotide
  source 1..21: mol_type = other DNA
gccggcaacagcgacaaaaga

SEQ ID NO: 15373 - DNA, 21 bp, synthetic construct
  misc_feature 1..21: note = Description of Artificial Sequence: Synthetic oligonucleotide
  source 1..21: mol_type = other DNA
aatcctgtggctcggtcggag

SEQ ID NO: 15374 - DNA, 21 bp, synthetic construct
  misc_feature 1..21: note = Description of Artificial Sequence: Synthetic oligonucleotide
  source 1..21: mol_type = other DNA
accagagacgccagcgtccac

SEQ ID NO: 15375 - DNA, 21 bp, synthetic construct
  misc_feature 1..21: note = Description of Artificial Sequence: Synthetic oligonucleotide
  source 1..21: mol_type = other DNA
aatccgagtactccgaagggt

SEQ ID NO: 15376 - DNA, 21 bp, synthetic construct
  misc_feature 1..21: note = Description of Artificial Sequence: Synthetic oligonucleotide
  source 1..21: mol_type = other DNA
actgggaaggggtcttcgggt

SEQ ID NO: 15377 - DNA, 21 bp, synthetic construct
  misc_feature 1..21: note = Description of Artificial Sequence: Synthetic oligonucleotide
  source 1..21: mol_type = other DNA
cagggtgctactgggaatcgt

SEQ ID NO: 15378 - DNA, 21 bp, synthetic construct
  misc_feature 1..21: note = Description of Artificial Sequence: Synthetic oligonucleotide
  source 1..21: mol_type = other DNA
tctgttagggagaagcctgcg

SEQ ID NO: 15379 - DNA, 21 bp, synthetic construct
  misc_feature 1..21: note = Description of Artificial Sequence: Synthetic oligonucleotide
  source 1..21: mol_type = other DNA
accaccaaaaccaccgccagc

SEQ ID NO: 15380 - DNA, 21 bp, synthetic construct
  misc_feature 1..21: note = Description of Artificial Sequence: Synthetic oligonucleotide
  source 1..21: mol_type = other DNA
accggcgacagaagcaacacc

SEQ ID NO: 15381 - DNA, 21 bp, synthetic construct
  misc_feature 1..21: note = Description of Artificial Sequence: Synthetic oligonucleotide
  source 1..21: mol_type = other DNA
catgttgggagtaagagtggg

SEQ ID NO: 15382 - DNA, 21 bp, synthetic construct
  misc_feature 1..21: note = Description of Artificial Sequence: Synthetic oligonucleotide
  source 1..21: mol_type = other DNA
gcgacgtctaagccgactact

SEQ ID NO: 15383 - DNA, 21 bp, synthetic construct
  misc_feature 1..21: note = Description of Artificial Sequence: Synthetic oligonucleotide
  source 1..21: mol_type = other DNA
tatgctaatgggaaggttggt

SEQ ID NO: 15384 - DNA, 21 bp, synthetic construct
  misc_feature 1..21: note = Description of Artificial Sequence: Synthetic oligonucleotide
  source 1..21: mol_type = other DNA
ctggcttcttcgcatagtact

SEQ ID NO: 15385 - DNA, 21 bp, synthetic construct
  misc_feature 1..21: note = Description of Artificial Sequence: Synthetic oligonucleotide
  source 1..21: mol_type = other DNA
gcgggttctgatcatacgcgg

SEQ ID NO: 15386 - DNA, 21 bp, synthetic construct
  misc_feature 1..21: note = Description of Artificial Sequence: Synthetic oligonucleotide
  source 1..21: mol_type = other DNA
gtccccgaaaaaggcaccctc

SEQ ID NO: 15387 - DNA, 21 bp, synthetic construct
  misc_feature 1..21: note = Description of Artificial Sequence: Synthetic oligonucleotide
  source 1..21: mol_type = other DNA
agtgctggtgggggggcgtcg

SEQ ID NO: 15388 - DNA, 21 bp, synthetic construct
  misc_feature 1..21: note = Description of Artificial Sequence: Synthetic oligonucleotide
  source 1..21: mol_type = other DNA
ggcaccgccgccagagacgtc

SEQ ID NO: 15389 - DNA, 21 bp, synthetic construct
  misc_feature 1..21: note = Description of Artificial Sequence: Synthetic oligonucleotide
  source 1..21: mol_type = other DNA
caaggcagcgaaagaagcaga

SEQ ID NO: 15390 - DNA, 21 bp, synthetic construct
  misc_feature 1..21: note = Description of Artificial Sequence: Synthetic oligonucleotide
  source 1..21: mol_type = other DNA
cagagtaaggcttctcaggtt

SEQ ID NO: 15391 - DNA, 21 bp, synthetic construct
  misc_feature 1..21: note = Description of Artificial Sequence: Synthetic oligonucleotide
  source 1..21: mol_type = other DNA
cggcagggtgaggttcagtct

SEQ ID NO: 15392 - DNA, 21 bp, synthetic construct
  misc_feature 1..21: note = Description of Artificial Sequence: Synthetic oligonucleotide
  source 1..21: mol_type = other DNA
gacagaagccccggcgcccaa

SEQ ID NO: 15393 - DNA, 21 bp, synthetic construct
  misc_feature 1..21: note = Description of Artificial Sequence: Synthetic oligonucleotide
  source 1..21: mol_type = other DNA
ctcagcgccaccaaaaccccc

SEQ ID NO: 15394 - DNA, 21 bp, synthetic construct
  misc_feature 1..21: note = Description of Artificial Sequence: Synthetic oligonucleotide
  source 1..21: mol_type = other DNA
aagcagggtagtggtctgtct

SEQ ID NO: 15395 - DNA, 21 bp, synthetic construct
  misc_feature 1..21: note = Description of Artificial Sequence: Synthetic oligonucleotide
  source 1..21: mol_type = other DNA
aattctactcctactgttagg

SEQ ID NO: 15396 - DNA, 21 bp, synthetic construct
  misc_feature 1..21: note = Description of Artificial Sequence: Synthetic oligonucleotide
  source 1..21: mol_type = other DNA
actacgggtaaggagaagaat

SEQ ID NO: 15397 - DNA, 21 bp, synthetic construct
  misc_feature 1..21: note = Description of Artificial Sequence: Synthetic oligonucleotide
  source 1..21: mol_type = other DNA
acttcttctaagtcgcctact

SEQ ID NO: 15398 - DNA, 21 bp, synthetic construct
  misc_feature 1..21: note = Description of Artificial Sequence: Synthetic oligonucleotide
  source 1..21: mol_type = other DNA
agacaaggccaagccaccgcc

SEQ ID NO: 15399 - DNA, 21 bp, synthetic construct
  misc_feature 1..21: note = Description of Artificial Sequence: Synthetic oligonucleotide
  source 1..21: mol_type = other DNA
agcctcggccaacccggcagc

SEQ ID NO: 15400 - DNA, 21 bp, synthetic construct
  misc_feature 1..21: note = Description of Artificial Sequence: Synthetic oligonucleotide
  source 1..21: mol_type = other DNA
agcgccggcgacagcagaaac

SEQ ID NO: 15401 - DNA, 21 bp, synthetic construct
  misc_feature 1..21: note = Description of Artificial Sequence: Synthetic oligonucleotide
  source 1..21: mol_type = other DNA
cagcctagtgggggtaatact

SEQ ID NO: 15402 - DNA, 21 bp, synthetic construct
  misc_feature 1..21: note = Description of Artificial Sequence: Synthetic oligonucleotide
  source 1..21: mol_type = other DNA
gatcctggtccttctagttct

SEQ ID NO: 15403 - DNA, 21 bp, synthetic construct
  misc_feature 1..21: note = Description of Artificial Sequence: Synthetic oligonucleotide
  source 1..21: mol_type = other DNA
gccgccaccgaaaaaggcaga

SEQ ID NO: 15404 - DNA, 21 bp, synthetic construct
  misc_feature 1..21: note = Description of Artificial Sequence: Synthetic oligonucleotide
  source 1..21: mol_type = other DNA
tcgtcggggacgttggggtcg

SEQ ID NO: 15405 - DNA, 21 bp, synthetic construct
  misc_feature 1..21: note = Description of Artificial Sequence: Synthetic oligonucleotide
  source 1..21: mol_type = other DNA
tcgtctagtccgtcgcttaag

SEQ ID NO: 15406 - DNA, 21 bp, synthetic construct
  misc_feature 1..21: note = Description of Artificial Sequence: Synthetic oligonucleotide
  source 1..21: mol_type = other DNA
ttcgaaggcagcggcgccaaa

SEQ ID NO: 15407 - DNA, 21 bp, synthetic construct
  misc_feature 1..21: note = Description of Artificial Sequence: Synthetic oligonucleotide
  source 1..21: mol_type = other DNA
gacagcggcagacccaccacc

SEQ ID NO: 15408 - DNA, 21 bp, synthetic construct
  misc_feature 1..21: note = Description of Artificial Sequence: Synthetic oligonucleotide
  source 1..21: mol_type = other DNA
catgcttctgcgtctcctact

SEQ ID NO: 15409 - DNA, 21 bp, synthetic construct
  misc_feature 1..21: note = Description of Artificial Sequence: Synthetic oligonucleotide
  source 1..21: mol_type = other DNA
gatactcgtaaggcgtctgct

SEQ ID NO: 15410 - DNA, 21 bp, synthetic construct
  misc_feature 1..21: note = Description of Artificial Sequence: Synthetic oligonucleotide
  source 1..21: mol_type = other DNA
agccaaggcgtcaaccccccc

SEQ ID NO: 15411 - DNA, 21 bp, synthetic construct
  misc_feature 1..21: note = Description of Artificial Sequence: Synthetic oligonucleotide
  source 1..21: mol_type = other DNA
gtccaaaacagcggcggcaac

SEQ ID NO: 15412 - DNA, 21 bp, synthetic construct
  misc_feature 1..21: note = Description of Artificial Sequence: Synthetic oligonucleotide
  source 1..21: mol_type = other DNA
tctcttccggatcataagacg

SEQ ID NO: 15413 - DNA, 21 bp, synthetic construct
  misc_feature 1..21: note = Description of Artificial Sequence: Synthetic oligonucleotide
  source 1..21: mol_type = other DNA
gatactactaatgggaatgtg

SEQ ID NO: 15414 - DNA, 21 bp, synthetic construct
  misc_feature 1..21: note = Description of Artificial Sequence: Synthetic oligonucleotide
  source 1..21: mol_type = other DNA
ggcaaaaaccaaagcagcatg

SEQ ID NO: 15415 - DNA, 21 bp, synthetic construct
  misc_feature 1..21: note = Description of Artificial Sequence: Synthetic oligonucleotide
  source 1..21: mol_type = other DNA
agcagaagcaccagccccagc

SEQ ID NO: 15416 - DNA, 21 bp, synthetic construct
  misc_feature 1..21: note = Description of Artificial Sequence: Synthetic oligonucleotide
  source 1..21: mol_type = other DNA
agcaacagcggcggcagcaaa

SEQ ID NO: 15417 - DNA, 21 bp, synthetic construct
  misc_feature 1..21: note = Description of Artificial Sequence: Synthetic oligonucleotide
  source 1..21: mol_type = other DNA
gaggggcatacgaagatgctt

SEQ ID NO: 15418 - DNA, 21 bp, synthetic construct
  misc_feature 1..21: note = Description of Artificial Sequence: Synthetic oligonucleotide
  source 1..21: mol_type = other DNA
gctgcgggtagtactgtgcat

SEQ ID NO: 15419 - DNA, 21 bp, synthetic construct
  misc_feature 1..21: note = Description of Artificial Sequence: Synthetic oligonucleotide
  source 1..21: mol_type = other DNA
gtccaagccgccaacagccaa

SEQ ID NO: 15420 - DNA, 21 bp, synthetic construct
  misc_feature 1..21: note = Description of Artificial Sequence: Synthetic oligonucleotide
  source 1..21: mol_type = other DNA
acggtgggtaaggggttgcag

SEQ ID NO: 15421 - DNA, 21 bp, synthetic construct
  misc_feature 1..21: note = Description of Artificial Sequence: Synthetic oligonucleotide
  source 1..21: mol_type = other DNA
agcggcgccgtcaaacccaac

SEQ ID NO: 15422 - DNA, 21 bp, synthetic construct
  misc_feature 1..21: note = Description of Artificial Sequence: Synthetic oligonucleotide
  source 1..21: mol_type = other DNA
gacagaacccccacccacacc

SEQ ID NO: 15423 - DNA, 21 bp, synthetic construct
  misc_feature 1..21: note = Description of Artificial Sequence: Synthetic oligonucleotide
  source 1..21: mol_type = other DNA
ggtgggagtcgtgagcagtct

SEQ ID NO: 15424 - DNA, 21 bp, synthetic construct
  misc_feature 1..21: note = Description of Artificial Sequence: Synthetic oligonucleotide
  source 1..21: mol_type = other DNA
gggaagacgggtactcatatg

SEQ ID NO: 15425 - DNA, 21 bp, synthetic construct
  misc_feature 1..21: note = Description of Artificial Sequence: Synthetic oligonucleotide
  source 1..21: mol_type = other DNA
acgactagttcgagttcgatg

SEQ ID NO: 15426 - DNA, 21 bp, synthetic construct
  misc_feature 1..21: note = Description of Artificial Sequence: Synthetic oligonucleotide
  source 1..21: mol_type = other DNA
agcagaagcacccaagccgaa

SEQ ID NO: 15427 - DNA, 21 bp, synthetic construct
  misc_feature 1..21: note = Description of Artificial Sequence: Synthetic oligonucleotide
  source 1..21: mol_type = other DNA
cagacgagtgggaagcctatg

SEQ ID NO: 15428 - DNA, 21 bp, synthetic construct
  misc_feature 1..21: note = Description of Artificial Sequence: Synthetic oligonucleotide
  source 1..21: mol_type = other DNA
tctggttctgggaatggttcg

SEQ ID NO: 15429 - DNA, 21 bp, synthetic construct
  misc_feature 1..21: note = Description of Artificial Sequence: Synthetic oligonucleotide
  source 1..21: mol_type = other DNA
aacgccgtcaaaccctacagc

SEQ ID NO: 15430 - DNA, 21 bp, synthetic construct
  misc_feature 1..21: note = Description of Artificial Sequence: Synthetic oligonucleotide
  source 1..21: mol_type = other DNA
agcagcggccaaagaaccagc

SEQ ID NO: 15431 - DNA, 21 bp, synthetic construct
  misc_feature 1..21: note = Description of Artificial Sequence: Synthetic oligonucleotide
  source 1..21: mol_type = other DNA
gccggcaaccaccccgccacc

SEQ ID NO: 15432 - DNA, 21 bp, synthetic construct
  misc_feature 1..21: note = Description of Artificial Sequence: Synthetic oligonucleotide
  source 1..21: mol_type = other DNA
cattctagggagtctcagcag

SEQ ID NO: 15433 - DNA, 21 bp, synthetic construct
  misc_feature 1..21: note = Description of Artificial Sequence: Synthetic oligonucleotide
  source 1..21: mol_type = other DNA
tctcgtactgataggcctatt

SEQ ID NO: 15434 - DNA, 21 bp, synthetic construct
  misc_feature 1..21: note = Description of Artificial Sequence: Synthetic oligonucleotide
  source 1..21: mol_type = other DNA
atgggcagcagcaaaaccacc

SEQ ID NO: 15435 - DNA, 21 bp, synthetic construct
  misc_feature 1..21: note = Description of Artificial Sequence: Synthetic oligonucleotide
  source 1..21: mol_type = other DNA
cttcagactaattctacggct

SEQ ID NO: 15436 - DNA, 21 bp, synthetic construct
  misc_feature 1..21: note = Description of Artificial Sequence: Synthetic oligonucleotide
  source 1..21: mol_type = other DNA
gattctccgccttctaagcat

SEQ ID NO: 15437 - DNA, 21 bp, synthetic construct
  misc_feature 1..21: note = Description of Artificial Sequence: Synthetic oligonucleotide
  source 1..21: mol_type = other DNA
accggcgtcaccaaacccagc

SEQ ID NO: 15438 - DNA, 21 bp, synthetic construct
  misc_feature 1..21: note = Description of Artificial Sequence: Synthetic oligonucleotide
  source 1..21: mol_type = other DNA
agcctcaccaacagcagaagc

SEQ ID NO: 15439 - DNA, 21 bp, synthetic construct
  misc_feature 1..21: note = Description of Artificial Sequence: Synthetic oligonucleotide
  source 1..21: mol_type = other DNA
ggccccagcccccccaccacc

SEQ ID NO: 15440 - DNA, 21 bp, synthetic construct
  misc_feature 1..21: note = Description of Artificial Sequence: Synthetic oligonucleotide
  source 1..21: mol_type = other DNA
aagagtggggctaatactgtt

SEQ ID NO: 15441 - DNA, 21 bp, synthetic construct
  misc_feature 1..21: note = Description of Artificial Sequence: Synthetic oligonucleotide
  source 1..21: mol_type = other DNA
cgtaattctgaggggcctaag

SEQ ID NO: 15442 - DNA, 21 bp, synthetic construct
  misc_feature 1..21: note = Description of Artificial Sequence: Synthetic oligonucleotide
  source 1..21: mol_type = other DNA
tctactaagagtgtgtcgact

SEQ ID NO: 15443 - DNA, 21 bp, synthetic construct
  misc_feature 1..21: note = Description of Artificial Sequence: Synthetic oligonucleotide
  source 1..21: mol_type = other DNA
agcaaccacagccccaacgtc

SEQ ID NO: 15444 - DNA, 21 bp, synthetic construct
  misc_feature 1..21: note = Description of Artificial Sequence: Synthetic oligonucleotide
  source 1..21: mol_type = other DNA
agcagcgtccaaaaacaacaa

SEQ ID NO: 15445 - DNA, 21 bp, synthetic construct
  misc_feature 1..21: note = Description of Artificial Sequence: Synthetic oligonucleotide
  source 1..21: mol_type = other DNA
agcggcagaggcagcaacagc

SEQ ID NO: 15446 - DNA, 21 bp, synthetic construct
  misc_feature 1..21: note = Description of Artificial Sequence: Synthetic oligonucleotide
  source 1..21: mol_type = other DNA
atggacaaccaaaaagccaga

SEQ ID NO: 15447 - DNA, 21 bp, synthetic construct
  misc_feature 1..21: note = Description of Artificial Sequence: Synthetic oligonucleotide
  source 1..21: mol_type = other DNA
ctcgccagcggcagcagaagc

SEQ ID NO: 15448 - DNA, 21 bp, synthetic construct
  misc_feature 1..21: note = Description of Artificial Sequence: Synthetic oligonucleotide
  source 1..21: mol_type = other DNA
gaccaaaacggcagcagactc

SEQ ID NO: 15449 - DNA, 21 bp, synthetic construct
  misc_feature 1..21: note = Description of Artificial Sequence: Synthetic oligonucleotide
  source 1..21: mol_type = other DNA
gagacaactcgtcctactacg

SEQ ID NO: 15450 - DNA, 21 bp, synthetic construct
  misc_feature 1..21: note = Description of Artificial Sequence: Synthetic oligonucleotide
  source 1..21: mol_type = other DNA
ggtagtttgggtacgggtaat

SEQ ID NO: 15451 - DNA, 21 bp, synthetic construct
  misc_feature 1..21: note = Description of Artificial Sequence: Synthetic oligonucleotide
  source 1..21: mol_type = other DNA
actggtacgagtactgcgact

SEQ ID NO: 15452 - DNA, 21 bp, synthetic construct
  misc_feature 1..21: note = Description of Artificial Sequence: Synthetic oligonucleotide
  source 1..21: mol_type = other DNA
aacagcggcagacccagcacc

SEQ ID NO: 15453 - DNA, 21 bp, synthetic construct
  misc_feature 1..21: note = Description of Artificial Sequence: Synthetic oligonucleotide
  source 1..21: mol_type = other DNA
acgcagctgggtgcgccgaag

SEQ ID NO: 15454 - DNA, 21 bp, synthetic construct
  misc_feature 1..21: note = Description of Artificial Sequence: Synthetic oligonucleotide
  source 1..21: mol_type = other DNA
cagcagcgtcagagtacgggt

SEQ ID NO: 15455 - DNA, 21 bp, synthetic construct
  misc_feature 1..21: note = Description of Artificial Sequence: Synthetic oligonucleotide
  source 1..21: mol_type = other DNA
gccaccggcatccccagcacc

SEQ ID NO: 15456 - DNA, 21 bp, synthetic construct
  misc_feature 1..21: note = Description of Artificial Sequence: Synthetic oligonucleotide
  source 1..21: mol_type = other DNA
gggcagtcgcagccttttaag

SEQ ID NO: 15457 - DNA, 21 bp, synthetic construct
  misc_feature 1..21: note = Description of Artificial Sequence: Synthetic oligonucleotide
  source 1..21: mol_type = other DNA
gtcgccgccaaaggcagcagc

SEQ ID NO: 15458 - DNA, 21 bp, synthetic construct
  misc_feature 1..21: note = Description of Artificial Sequence: Synthetic oligonucleotide
  source 1..21: mol_type = other DNA
gccgtcagcaaaagcaccatc

SEQ ID NO: 15459 - DNA, 21 bp, synthetic construct
  misc_feature 1..21: note = Description of Artificial Sequence: Synthetic oligonucleotide
  source 1..21: mol_type = other DNA
atgagcagccaaggcggcagc

SEQ ID NO: 15460 - DNA, 21 bp, synthetic construct
  misc_feature 1..21: note = Description of Artificial Sequence: Synthetic oligonucleotide
  source 1..21: mol_type = other DNA
cagcattcgggttcgagtact

SEQ ID NO: 15461 - DNA, 21 bp, synthetic construct
  misc_feature 1..21: note = Description of Artificial Sequence: Synthetic oligonucleotide
  source 1..21: mol_type = other DNA
catactgatcttaagactacg

SEQ ID NO: 15462 - DNA, 21 bp, synthetic construct
  misc_feature 1..21: note = Description of Artificial Sequence: Synthetic oligonucleotide
  source 1..21: mol_type = other DNA
gcggtggagggttcgaagaat

SEQ ID NO: 15463 - DNA, 21 bp, synthetic construct
  misc_feature 1..21: note = Description of Artificial Sequence: Synthetic oligonucleotide
  source 1..21: mol_type = other DNA
gctcggtctgggaataatatt

SEQ ID NO: 15464 - DNA, 21 bp, synthetic construct
  misc_feature 1..21: note = Description of Artificial Sequence: Synthetic oligonucleotide
  source 1..21: mol_type = other DNA
gggccgggggctccttcgaag

SEQ ID NO: 15465 - DNA, 21 bp, synthetic construct
  misc_feature 1..21: note = Description of Artificial Sequence: Synthetic oligonucleotide
  source 1..21: mol_type = other DNA
tcggctgctgatccgaaggtg

SEQ ID NO: 15466 - DNA, 21 bp, synthetic construct
  misc_feature 1..21: note = Description of Artificial Sequence: Synthetic oligonucleotide
  source 1..21: mol_type = other DNA
tctcatgggactgagaataag

SEQ ID NO: 15467 - DNA, 21 bp, synthetic construct
  misc_feature 1..21: note = Description of Artificial Sequence: Synthetic oligonucleotide
  source 1..21: mol_type = other DNA
tctcctgttagtgggacgacg

SEQ ID NO: 15468 - DNA, 21 bp, synthetic construct
  misc_feature 1..21: note = Description of Artificial Sequence: Synthetic oligonucleotide
  source 1..21: mol_type = other DNA
gtcaacaccagcaacaccacc

SEQ ID NO: 15469 - DNA, 21 bp, synthetic construct
  misc_feature 1..21: note = Description of Artificial Sequence: Synthetic oligonucleotide
  source 1..21: mol_type = other DNA
agcagcaccagcggcgccggc

SEQ ID NO: 15470 - DNA, 21 bp, synthetic construct
  misc_feature 1..21: note = Description of Artificial Sequence: Synthetic oligonucleotide
  source 1..21: mol_type = other DNA
ggcacccccagcaaagccggc

SEQ ID NO: 15471 - DNA, 21 bp, synthetic construct
  misc_feature 1..21: note = Description of Artificial Sequence: Synthetic oligonucleotide
  source 1..21: mol_type = other DNA
gacaaaaccaccgccggccaa

SEQ ID NO: 15472 - DNA, 21 bp, synthetic construct
  misc_feature 1..21: note = Description of Artificial Sequence: Synthetic oligonucleotide
  source 1..21: mol_type = other DNA
accaccggcggccacagcagc

SEQ ID NO: 15473 - DNA, 21 bp, synthetic construct
  misc_feature 1..21: note = Description of Artificial Sequence: Synthetic oligonucleotide
  source 1..21: mol_type = other DNA
ggcgccagcaacagcaccggc

SEQ ID NO: 15474 - DNA, 21 bp, synthetic construct
  misc_feature 1..21: note = Description of Artificial Sequence: Synthetic oligonucleotide
  source 1..21: mol_type = other DNA
gccatcaacggcaaagccggc

SEQ ID NO: 15475 - DNA, 21 bp, synthetic construct
  misc_feature 1..21: note = Description of Artificial Sequence: Synthetic oligonucleotide
  source 1..21: mol_type = other DNA
gtcatcgacaccaaagccggc

SEQ ID NO: 15476 - DNA, 21 bp, synthetic construct
  misc_feature 1..21: note = Description of Artificial Sequence: Synthetic oligonucleotide
  source 1..21: mol_type = other DNA
aacgccagcagcagcaccggc

SEQ ID NO: 15477 - DNA, 21 bp, synthetic construct
  misc_feature 1..21: note = Description of Artificial Sequence: Synthetic oligonucleotide
  source 1..21: mol_type = other DNA
ggtacgagtagtccggctaat

SEQ ID NO: 15478 - DNA, 21 bp, synthetic construct
  misc_feature 1..21: note = Description of Artificial Sequence: Synthetic oligonucleotide
  source 1..21: mol_type = other DNA
ggccccggcgacaccagaagc

SEQ ID NO: 15479 - DNA, 21 bp, synthetic construct
  misc_feature 1..21: note = Description of Artificial Sequence: Synthetic oligonucleotide
  source 1..21: mol_type = other DNA
gggaatgggtcgtcggcgctg

SEQ ID NO: 15480 - DNA, 21 bp, synthetic construct
  misc_feature 1..21: note = Description of Artificial Sequence: Synthetic oligonucleotide
  source 1..21: mol_type = other DNA
ggcagaagcggcggcaccggc

SEQ ID NO: 15481 - DNA, 21 bp, synthetic construct
  misc_feature 1..21: note = Description of Artificial Sequence: Synthetic oligonucleotide
  source 1..21: mol_type = other DNA
agcaccggccccacccccgcc

SEQ ID NO: 15482 - DNA, 21 bp, synthetic construct
  misc_feature 1..21: note = Description of Artificial Sequence: Synthetic oligonucleotide
  source 1..21: mol_type = other DNA
catggggggagggattctagt

SEQ ID NO: 15483 - DNA, 21 bp, synthetic construct
  misc_feature 1..21: note = Description of Artificial Sequence: Synthetic oligonucleotide
  source 1..21: mol_type = other DNA
ggttctggtacgcctaatggg

SEQ ID NO: 15484 - DNA, 21 bp, synthetic construct
  misc_feature 1..21: note = Description of Artificial Sequence: Synthetic oligonucleotide
  source 1..21: mol_type = other DNA
ggcaaagccggcagcaccggc

SEQ ID NO: 15485 - DNA, 21 bp, synthetic construct
  misc_feature 1..21: note = Description of Artificial Sequence: Synthetic oligonucleotide
  source 1..21: mol_type = other DNA
cttagtgcgggtaagggtgag

SEQ ID NO: 15486 - DNA, 21 bp, synthetic construct
  misc_feature 1..21: note = Description of Artificial Sequence: Synthetic oligonucleotide
  source 1..21: mol_type = other DNA
gtcggcatccccagcgccggc

SEQ ID NO: 15487 - DNA, 21 bp, synthetic construct
  misc_feature 1..21: note = Description of Artificial Sequence: Synthetic oligonucleotide
  source 1..21: mol_type = other DNA
agtggtgggcagaaggataat

SEQ ID NO: 15488 - DNA, 21 bp, synthetic construct
  misc_feature 1..21: note = Description of Artificial Sequence: Synthetic oligonucleotide
  source 1..21: mol_type = other DNA
gaaaccggcggcagccccaaa

SEQ ID NO: 15489 - DNA, 21 bp, synthetic construct
  misc_feature 1..21: note = Description of Artificial Sequence: Synthetic oligonucleotide
  source 1..21: mol_type = other DNA
caaggccacaccaacgtcgcc

SEQ ID NO: 15490 - DNA, 21 bp, synthetic construct
  misc_feature 1..21: note = Description of Artificial Sequence: Synthetic oligonucleotide
  source 1..21: mol_type = other DNA
tcgcatgggagtccggctagt

SEQ ID NO: 15491 - DNA, 21 bp, synthetic construct
  misc_feature 1..21: note = Description of Artificial Sequence: Synthetic oligonucleotide
  source 1..21: mol_type = other DNA
agccaaaaaagcgtcgccggc

SEQ ID NO: 15492 - DNA, 21 bp, synthetic construct
  misc_feature 1..21: note = Description of Artificial Sequence: Synthetic oligonucleotide
  source 1..21: mol_type = other DNA
gttggtcagtctgctgctcag

SEQ ID NO: 15493 - DNA, 21 bp, synthetic construct
  misc_feature 1..21: note = Description of Artificial Sequence: Synthetic oligonucleotide
  source 1..21: mol_type = other DNA
gacggccaaagcagcaaaagc

SEQ ID NO: 15494 - DNA, 21 bp, synthetic construct
  misc_feature 1..21: note = Description of Artificial Sequence: Synthetic oligonucleotide
  source 1..21: mol_type = other DNA
gcccaagccaaacccgccggc

SEQ ID NO: 15495 - DNA, 21 bp, synthetic construct
  misc_feature 1..21: note = Description of Artificial Sequence: Synthetic oligonucleotide
  source 1..21: mol_type = other DNA
accggccacaacagcagcatg

SEQ ID NO: 15496 - DNA, 21 bp, synthetic construct
  misc_feature 1..21: note = Description of Artificial Sequence: Synthetic oligonucleotide
  source 1..21: mol_type = other DNA
ggccaaagcaccagcagcggc

SEQ ID NO: 15497 - DNA, 21 bp, synthetic construct
  misc_feature 1..21: note = Description of Artificial Sequence: Synthetic oligonucleotide
  source 1..21: mol_type = other DNA
accggcatcagcggcgccggc

SEQ ID NO: 15498 - DNA, 21 bp, synthetic construct
  misc_feature 1..21: note = Description of Artificial Sequence: Synthetic oligonucleotide
  source 1..21: mol_type = other DNA
gtcagagacaccagcagcagc

SEQ ID NO: 15499 - DNA, 21 bp, synthetic construct
  misc_feature 1..21: note = Description of Artificial Sequence: Synthetic oligonucleotide
  source 1..21: mol_type = other DNA
gtcagcagcaaaggcctcgcc

SEQ ID NO: 15500 - DNA, 21 bp, synthetic construct
  misc_feature 1..21: note = Description of Artificial Sequence: Synthetic oligonucleotide
  source 1..21: mol_type = other DNA
gatggtcggtcgactagtgct

SEQ ID NO: 15501 - DNA, 21 bp, synthetic construct
  misc_feature 1..21: note = Description of Artificial Sequence: Synthetic oligonucleotide
  source 1..21: mol_type = other DNA
agcagcaacaccggccacacc

SEQ ID NO: 15502 - DNA, 21 bp, synthetic construct
  misc_feature 1..21: note = Description of Artificial Sequence: Synthetic oligonucleotide
  source 1..21: mol_type = other DNA
cagaataattctaagacggag

SEQ ID NO: 15503 - DNA, 21 bp, synthetic construct
  misc_feature 1..21: note = Description of Artificial Sequence: Synthetic oligonucleotide
  source 1..21: mol_type = other DNA
caggaggggtcttcgtctaag

SEQ ID NO: 15504 - DNA, 21 bp, synthetic construct
  misc_feature 1..21: note = Description of Artificial Sequence: Synthetic oligonucleotide
  source 1..21: mol_type = other DNA
aacaccaaaaccaccaccggc

SEQ ID NO: 15505 - DNA, 21 bp, synthetic construct
  misc_feature 1..21: note = Description of Artificial Sequence: Synthetic oligonucleotide
  source 1..21: mol_type = other DNA
gccagcaacagcggcagcacc

SEQ ID NO: 15506 - DNA, 21 bp, synthetic construct
  misc_feature 1..21: note = Description of Artificial Sequence: Synthetic oligonucleotide
  source 1..21: mol_type = other DNA
ctgggtggtgggaaggagtcg

SEQ ID NO: 15507 - DNA, 21 bp, synthetic construct
  misc_feature 1..21: note = Description of Artificial Sequence: Synthetic oligonucleotide
  source 1..21: mol_type = other DNA
gggaatgggaagagtgatggt

SEQ ID NO: 15508 - DNA, 21 bp, synthetic construct
  misc_feature 1..21: note = Description of Artificial Sequence: Synthetic oligonucleotide
  source 1..21: mol_type = other DNA
tcggaggctaatcagaagctt

SEQ ID NO: 15509 - DNA, 21 bp, synthetic construct
  misc_feature 1..21: note = Description of Artificial Sequence: Synthetic oligonucleotide
  source 1..21: mol_type = other DNA
gccagcagccccagcggcggc

SEQ ID NO: 15510 - DNA, 21 bp, synthetic construct
  misc_feature 1..21: note = Description of Artificial Sequence: Synthetic oligonucleotide
  source 1..21: mol_type = other DNA
gatacgggtaaggcgtcgatg

SEQ ID NO: 15511 - DNA, 21 bp, synthetic construct
  misc_feature 1..21: note = Description of Artificial Sequence: Synthetic oligonucleotide
  source 1..21: mol_type = other DNA
gagacttcgaaggagagggct

SEQ ID NO: 15512 - DNA, 21 bp, synthetic construct
  misc_feature 1..21: note = Description of Artificial Sequence: Synthetic oligonucleotide
  source 1..21: mol_type = other DNA
ggcggcggccacaaagaaagc

SEQ ID NO: 15513 - DNA, 21 bp, synthetic construct
  misc_feature 1..21: note = Description of Artificial Sequence: Synthetic oligonucleotide
  source 1..21: mol_type = other DNA
gacaacggcaccaaagtcatc

SEQ ID NO: 15514 - DNA, 21 bp, synthetic construct
  misc_feature 1..21: note = Description of Artificial Sequence: Synthetic oligonucleotide
  source 1..21: mol_type = other DNA
caggtggggaaggatagtcat

SEQ ID NO: 15515 - DNA, 21 bp, synthetic construct
  misc_feature 1..21: note = Description of Artificial Sequence: Synthetic oligonucleotide
  source 1..21: mol_type = other DNA
accaccagcgccaccagcgtc

SEQ ID NO: 15516 - DNA, 21 bp, synthetic construct
  misc_feature 1..21: note = Description of Artificial Sequence: Synthetic oligonucleotide
  source 1..21: mol_type = other DNA
caggctactggtgggacgcag

SEQ ID NO: 15517 - DNA, 21 bp, synthetic construct
  misc_feature 1..21: note = Description of Artificial Sequence: Synthetic oligonucleotide
  source 1..21: mol_type = other DNA
gagtctgggaagggtagtttg

SEQ ID NO: 15518 - DNA, 21 bp, synthetic construct
  misc_feature 1..21: note = Description of Artificial Sequence: Synthetic oligonucleotide
  source 1..21: mol_type = other DNA
gaaaacagcagcggccacgcc

SEQ ID NO: 15519 - DNA, 21 bp, synthetic construct
  misc_feature 1..21: note = Description of Artificial Sequence: Synthetic oligonucleotide
  source 1..21: mol_type = other DNA
gacaccaaaaccagccccggc

SEQ ID NO: 15520 - DNA, 21 bp, synthetic construct
  misc_feature 1..21: note = Description of Artificial Sequence: Synthetic oligonucleotide
  source 1..21: mol_type = other DNA
catggtaatactacgtctggt

SEQ ID NO: 15521 - DNA, 21 bp, synthetic construct
  misc_feature 1..21: note = Description of Artificial Sequence: Synthetic oligonucleotide
  source 1..21: mol_type = other DNA
aacgtcggcgccaccagcacc

SEQ ID NO: 15522 - DNA, 21 bp, synthetic construct
  misc_feature 1..21: note = Description of Artificial Sequence: Synthetic oligonucleotide
  source 1..21: mol_type = other DNA
aacggcaacggccaaagcaaa

SEQ ID NO: 15523 - DNA, 21 bp, synthetic construct
  misc_feature 1..21: note = Description of Artificial Sequence: Synthetic oligonucleotide
  source 1..21: mol_type = other DNA
ggcctcagcggcagcgccggc

SEQ ID NO: 15524 - DNA, 21 bp, synthetic construct
  misc_feature 1..21: note = Description of Artificial Sequence: Synthetic oligonucleotide
  source 1..21: mol_type = other DNA
acgaatgggagtaagccggat

SEQ ID NO: 15525 - DNA, 21 bp, synthetic construct
  misc_feature 1..21: note = Description of Artificial Sequence: Synthetic oligonucleotide
  source 1..21: mol_type = other DNA
tatcctgaggcgaagggggct

SEQ ID NO: 15526 - DNA, 21 bp, synthetic construct
  misc_feature 1..21: note = Description of Artificial Sequence: Synthetic oligonucleotide
  source 1..21: mol_type = other DNA
gggcagtcgtcggggggtggt

SEQ ID NO: 15527 - DNA, 21 bp, synthetic construct
  misc_feature 1..21: note = Description of Artificial Sequence: Synthetic oligonucleotide
  source 1..21: mol_type = other DNA
gatatgaatggtgctggtaag

SEQ ID NO: 15528 - DNA, 21 bp, synthetic construct
  misc_feature 1..21: note = Description of Artificial Sequence: Synthetic oligonucleotide
  source 1..21: mol_type = other DNA
ggtaatggtaataaggttatt

SEQ ID NO: 15529 - DNA, 21 bp, synthetic construct
  misc_feature 1..21: note = Description of Artificial Sequence: Synthetic oligonucleotide
  source 1..21: mol_type = other DNA
acgtctgattctaagaatacg

SEQ ID NO: 15530 - DNA, 21 bp, synthetic construct
  misc_feature 1..21: note = Description of Artificial Sequence: Synthetic oligonucleotide
  source 1..21: mol_type = other DNA
gcgggtaagggtacttcggag

SEQ ID NO: 15531 - DNA, 21 bp, synthetic construct
  misc_feature 1..21: note = Description of Artificial Sequence: Synthetic oligonucleotide
  source 1..21: mol_type = other DNA
acgagtgaggatcgttcgaag

SEQ ID NO: 15532 - DNA, 21 bp, synthetic construct
  misc_feature 1..21: note = Description of Artificial Sequence: Synthetic oligonucleotide
  source 1..21: mol_type = other DNA
gtccaaagcagcagcaccacc

SEQ ID NO: 15533 - DNA, 21 bp, synthetic construct
  misc_feature 1..21: note = Description of Artificial Sequence: Synthetic oligonucleotide
  source 1..21: mol_type = other DNA
agcggcgtcagcgaaagaggc

SEQ ID NO: 15534 - DNA, 21 bp, synthetic construct
  misc_feature 1..21: note = Description of Artificial Sequence: Synthetic oligonucleotide
  source 1..21: mol_type = other DNA
aaggagggttctaatggggtt

SEQ ID NO: 15535 - DNA, 21 bp, synthetic construct
  misc_feature 1..21: note = Description of Artificial Sequence: Synthetic oligonucleotide
  source 1..21: mol_type = other DNA
gacagaggccaagaaagcaga

SEQ ID NO: 15536 - DNA, 21 bp, synthetic construct
  misc_feature 1..21: note = Description of Artificial Sequence: Synthetic oligonucleotide
  source 1..21: mol_type = other DNA
gatggtgtgtctgataggaag

SEQ ID NO: 15537 - DNA, 21 bp, synthetic construct
  misc_feature 1..21: note = Description of Artificial Sequence: Synthetic oligonucleotide
  source 1..21: mol_type = other DNA
accggccaaggcaccaacgtc

SEQ ID NO: 15538 - DNA, 21 bp, synthetic construct
  misc_feature 1..21: note = Description of Artificial Sequence: Synthetic oligonucleotide
  source 1..21: mol_type = other DNA
gaaaacggcaccaaacccggc

SEQ ID NO: 15539 - DNA, 21 bp, synthetic construct
  misc_feature 1..21: note = Description of Artificial Sequence: Synthetic oligonucleotide
  source 1..21: mol_type = other DNA
gaagccggccacggcaacggc

SEQ ID NO: 15540 - DNA, 21 bp, synthetic construct
  misc_feature 1..21: note = Description of Artificial Sequence: Synthetic oligonucleotide
  source 1..21: mol_type = other DNA
gatgggtctgggaagattaac

SEQ ID NO: 15541 - DNA, 21 bp, synthetic construct
  misc_feature 1..21: note = Description of Artificial Sequence: Synthetic oligonucleotide
  source 1..21: mol_type = other DNA
caaaacggcagcagccaaagc

SEQ ID NO: 15542 - DNA, 21 bp, synthetic construct
  misc_feature 1..21: note = Description of Artificial Sequence: Synthetic oligonucleotide
  source 1..21: mol_type = other DNA
agcaacggcaaaaccagcgtc

SEQ ID NO: 15543 - DNA, 21 bp, synthetic construct
  misc_feature 1..21: note = Description of Artificial Sequence: Synthetic oligonucleotide
  source 1..21: mol_type = other DNA
tcaagtgctggtaagggtgat

SEQ ID NO: 15544 - DNA, 21 bp, synthetic construct
  misc_feature 1..21: note = Description of Artificial Sequence: Synthetic oligonucleotide
  source 1..21: mol_type = other DNA
caaagcaaaagcagccaaggc

SEQ ID NO: 15545 - DNA, 21 bp, synthetic construct
  misc_feature 1..21: note = Description of Artificial Sequence: Synthetic oligonucleotide
  source 1..21: mol_type = other DNA
gatcctagtgataagccgagg

SEQ ID NO: 15546 - DNA, 21 bp, synthetic construct
  misc_feature 1..21: note = Description of Artificial Sequence: Synthetic oligonucleotide
  source 1..21: mol_type = other DNA
ggttctagtgaggcgcggggt

SEQ ID NO: 15547 - DNA, 21 bp, synthetic construct
  misc_feature 1..21: note = Description of Artificial Sequence: Synthetic oligonucleotide
  source 1..21: mol_type = other DNA
aatggtactaagcaggggact

SEQ ID NO: 15548 - DNA, 21 bp, synthetic construct
  misc_feature 1..21: note = Description of Artificial Sequence: Synthetic oligonucleotide
  source 1..21: mol_type = other DNA
gaggggggtagttctgtgaat

SEQ ID NO: 15549 - DNA, 21 bp, synthetic construct
  misc_feature 1..21: note = Description of Artificial Sequence: Synthetic oligonucleotide
  source 1..21: mol_type = other DNA
gggtcgggtaagggttcgggg

SEQ ID NO: 15550 - DNA, 21 bp, synthetic construct
  misc_feature 1..21: note = Description of Artificial Sequence: Synthetic oligonucleotide
  source 1..21: mol_type = other DNA
gacgccaccaaagccggcctc

SEQ ID NO: 15551 - DNA, 21 bp, synthetic construct
  misc_feature 1..21: note = Description of Artificial Sequence: Synthetic oligonucleotide
  source 1..21: mol_type = other DNA
caaaaaaccagcaacaccgaa

SEQ ID NO: 15552 - DNA, 21 bp, synthetic construct
  misc_feature 1..21: note = Description of Artificial Sequence: Synthetic oligonucleotide
  source 1..21: mol_type = other DNA
cataatagtaaggatactgtt

SEQ ID NO: 15553 - DNA, 21 bp, synthetic construct
  misc_feature 1..21: note = Description of Artificial Sequence: Synthetic oligonucleotide
  source 1..21: mol_type = other DNA
aacggcaccgacaaaaaacaa

SEQ ID NO: 15554 - DNA, 21 bp, synthetic construct
  misc_feature 1..21: note = Description of Artificial Sequence: Synthetic oligonucleotide
  source 1..21: mol_type = other DNA
agcagcggcggcggcagcagc

SEQ ID NO: 15555 - DNA, 21 bp, synthetic construct
  misc_feature 1..21: note = Description of Artificial Sequence: Synthetic oligonucleotide
  source 1..21: mol_type = other DNA
ggcaaccaaaccaccgccggc

SEQ ID NO: 15556 - DNA, 21 bp, synthetic construct
  misc_feature 1..21: note = Description of Artificial Sequence: Synthetic oligonucleotide
  source 1..21: mol_type = other DNA
caggggtctacttcgcttagt

SEQ ID NO: 15557 - DNA, 21 bp, synthetic construct
  misc_feature 1..21: note = Description of Artificial Sequence: Synthetic oligonucleotide
  source 1..21: mol_type = other DNA
ggccacagcaaccccagcagc

SEQ ID NO: 15558 - DNA, 21 bp, synthetic construct
  misc_feature 1..21: note = Description of Artificial Sequence: Synthetic oligonucleotide
  source 1..21: mol_type = other DNA
aatgggacggggaatgcgagt

SEQ ID NO: 15559 - DNA, 21 bp, synthetic construct
  misc_feature 1..21: note = Description of Artificial Sequence: Synthetic oligonucleotide
  source 1..21: mol_type = other DNA
ggcagccaagacagcaaaagc

SEQ ID NO: 15560 - DNA, 21 bp, synthetic construct
  misc_feature 1..21: note = Description of Artificial Sequence: Synthetic oligonucleotide
  source 1..21: mol_type = other DNA
gccggcgacacccacaaaacc

SEQ ID NO: 15561 - DNA, 21 bp, synthetic construct
  misc_feature 1..21: note = Description of Artificial Sequence: Synthetic oligonucleotide
  source 1..21: mol_type = other DNA
agtaatgtggggaagcaggat

SEQ ID NO: 15562 - DNA, 21 bp, synthetic construct
  misc_feature 1..21: note = Description of Artificial Sequence: Synthetic oligonucleotide
  source 1..21: mol_type = other DNA
agtcggggggagcatagtcag

SEQ ID NO: 15563 - DNA, 21 bp, synthetic construct
  misc_feature 1..21: note = Description of Artificial Sequence: Synthetic oligonucleotide
  source 1..21: mol_type = other DNA
gcgtcgggttcggggaatagt

SEQ ID NO: 15564 - DNA, 21 bp, synthetic construct
  misc_feature 1..21: note = Description of Artificial Sequence: Synthetic oligonucleotide
  source 1..21: mol_type = other DNA
ctcggcagccaaagccccagc

SEQ ID NO: 15565 - DNA, 21 bp, synthetic construct
  misc_feature 1..21: note = Description of Artificial Sequence: Synthetic oligonucleotide
  source 1..21: mol_type = other DNA
accggcctcaccagcagcgcc

SEQ ID NO: 15566 - DNA, 21 bp, synthetic construct
  misc_feature 1..21: note = Description of Artificial Sequence: Synthetic oligonucleotide
  source 1..21: mol_type = other DNA
acgagttctggtaagggggat

SEQ ID NO: 15567 - DNA, 21 bp, synthetic construct
  misc_feature 1..21: note = Description of Artificial Sequence: Synthetic oligonucleotide
  source 1..21: mol_type = other DNA
gcggatgggaagccttcttcg

SEQ ID NO: 15568 - DNA, 21 bp, synthetic construct
  misc_feature 1..21: note = Description of Artificial Sequence: Synthetic oligonucleotide
  source 1..21: mol_type = other DNA
atgacgggttctagttctagt

SEQ ID NO: 15569 - DNA, 21 bp, synthetic construct
  misc_feature 1..21: note = Description of Artificial Sequence: Synthetic oligonucleotide
  source 1..21: mol_type = other DNA
tcgaatggttctaagacggat

SEQ ID NO: 15570 - DNA, 21 bp, synthetic construct
  misc_feature 1..21: note = Description of Artificial Sequence: Synthetic oligonucleotide
  source 1..21: mol_type = other DNA
gacagcagcagcaaagccctc

SEQ ID NO: 15571 - DNA, 21 bp, synthetic construct
  misc_feature 1..21: note = Description of Artificial Sequence: Synthetic oligonucleotide
  source 1..21: mol_type = other DNA
agaagcgaaaaagtcgccggc

SEQ ID NO: 15572 - DNA, 21 bp, synthetic construct
  misc_feature 1..21: note = Description of Artificial Sequence: Synthetic oligonucleotide
  source 1..21: mol_type = other DNA
caaatggaaagaaaagccggc

SEQ ID NO: 15573 - DNA, 21 bp, synthetic construct
  misc_feature 1..21: note = Description of Artificial Sequence: Synthetic oligonucleotide
  source 1..21: mol_type = other DNA
gaaagcagcaccagacccggc

SEQ ID NO: 15574 - DNA, 21 bp, synthetic construct
  misc_feature 1..21: note = Description of Artificial Sequence: Synthetic oligonucleotide
  source 1..21: mol_type = other DNA
ggcaacagccccagcaacacc

SEQ ID NO: 15575 - DNA, 21 bp, synthetic construct
  misc_feature 1..21: note = Description of Artificial Sequence: Synthetic oligonucleotide
  source 1..21: mol_type = other DNA
tctctttcgaataagtctgag

SEQ ID NO: 15576 - DNA, 21 bp, synthetic construct
  misc_feature 1..21: note = Description of Artificial Sequence: Synthetic oligonucleotide
  source 1..21: mol_type = other DNA
agtggtagtacgtcgccgact

SEQ ID NO: 15577 - DNA, 21 bp, synthetic construct
  misc_feature 1..21: note = Description of Artificial Sequence: Synthetic oligonucleotide
  source 1..21: mol_type = other DNA
ggcatgggcaccagcggcacc

SEQ ID NO: 15578 - DNA, 21 bp, synthetic construct
  misc_feature 1..21: note = Description of Artificial Sequence: Synthetic oligonucleotide
  source 1..21: mol_type = other DNA
gacgtcaacagcaacagcaga

SEQ ID NO: 15579 - DNA, 21 bp, synthetic construct
  misc_feature 1..21: note = Description of Artificial Sequence: Synthetic oligonucleotide
  source 1..21: mol_type = other DNA
gcgacgtctgataaggcggct

SEQ ID NO: 15580 - DNA, 21 bp, synthetic construct
  misc_feature 1..21: note = Description of Artificial Sequence: Synthetic oligonucleotide
  source 1..21: mol_type = other DNA
aatagtggttcggatcgtaat

SEQ ID NO: 15581 - DNA, 21 bp, synthetic construct
  misc_feature 1..21: note = Description of Artificial Sequence: Synthetic oligonucleotide
  source 1..21: mol_type = other DNA
cagggggagtcgaagtttacg

SEQ ID NO: 15582 - DNA, 21 bp, synthetic construct
  misc_feature 1..21: note = Description of Artificial Sequence: Synthetic oligonucleotide
  source 1..21: mol_type = other DNA
tctatgtcgaaggagtctact

SEQ ID NO: 15583 - DNA, 21 bp, synthetic construct
  misc_feature 1..21: note = Description of Artificial Sequence: Synthetic oligonucleotide
  source 1..21: mol_type = other DNA
gggacgagtagtgatactaag

SEQ ID NO: 15584 - DNA, 21 bp, synthetic construct
  misc_feature 1..21: note = Description of Artificial Sequence: Synthetic oligonucleotide
  source 1..21: mol_type = other DNA
aatcctggtaatagttcgggg

SEQ ID NO: 15585 - DNA, 21 bp, synthetic construct
  misc_feature 1..21: note = Description of Artificial Sequence: Synthetic oligonucleotide
  source 1..21: mol_type = other DNA
agccacagcagcggcagcagc

SEQ ID NO: 15586 - DNA, 21 bp, synthetic construct
  misc_feature 1..21: note = Description of Artificial Sequence: Synthetic oligonucleotide
  source 1..21: mol_type = other DNA
gaaagcggcaccaacagcaga

SEQ ID NO: 15587 - DNA, 21 bp, synthetic construct
  misc_feature 1..21: note = Description of Artificial Sequence: Synthetic oligonucleotide
  source 1..21: mol_type = other DNA
gatacgagtcataagtctgag

SEQ ID NO: 15588 - DNA, 21 bp, synthetic construct
  misc_feature 1..21: note = Description of Artificial Sequence: Synthetic oligonucleotide
  source 1..21: mol_type = other DNA
tctggggctcagcctgggaat

SEQ ID NO: 15589 - DNA, 21 bp, synthetic construct
  misc_feature 1..21: note = Description of Artificial Sequence: Synthetic oligonucleotide
  source 1..21: mol_type = other DNA
accgacggccaaaccagcaga

SEQ ID NO: 15590 - DNA, 21 bp, synthetic construct
  misc_feature 1..21: note = Description of Artificial Sequence: Synthetic oligonucleotide
  source 1..21: mol_type = other DNA
ggtcatagtgatgctcctcgg

SEQ ID NO: 15591 - DNA, 21 bp, synthetic construct
  misc_feature 1..21: note = Description of Artificial Sequence: Synthetic oligonucleotide
  source 1..21: mol_type = other DNA
gacagcgccggcacccccaga

SEQ ID NO: 15592 - DNA, 21 bp, synthetic construct
  misc_feature 1..21: note = Description of Artificial Sequence: Synthetic oligonucleotide
  source 1..21: mol_type = other DNA
gtcggcaccagcaccagcaaa

SEQ ID NO: 15593 - DNA, 21 bp, synthetic construct
  misc_feature 1..21: note = Description of Artificial Sequence: Synthetic oligonucleotide
  source 1..21: mol_type = other DNA
gtggggcagggtgcgcagagt

SEQ ID NO: 15594 - DNA, 21 bp, synthetic construct
  misc_feature 1..21: note = Description of Artificial Sequence: Synthetic oligonucleotide
  source 1..21: mol_type = other DNA
gaaggcaccaaacaaggcacc

SEQ ID NO: 15595 - DNA, 21 bp, synthetic construct
  misc_feature 1..21: note = Description of Artificial Sequence: Synthetic oligonucleotide
  source 1..21: mol_type = other DNA
aacatccccagcggcaccggc

SEQ ID NO: 15596 - DNA, 21 bp, synthetic construct
  misc_feature 1..21: note = Description of Artificial Sequence: Synthetic oligonucleotide
  source 1..21: mol_type = other DNA
aatccggggcagactatttct

SEQ ID NO: 15597 - DNA, 21 bp, synthetic construct
  misc_feature 1..21: note = Description of Artificial Sequence: Synthetic oligonucleotide
  source 1..21: mol_type = other DNA
accagcggcaccggccaaccc

SEQ ID NO: 15598 - DNA, 21 bp, synthetic construct
  misc_feature 1..21: note = Description of Artificial Sequence: Synthetic oligonucleotide
  source 1..21: mol_type = other DNA
agcaccaacgtcagccccggc

SEQ ID NO: 15599 - DNA, 21 bp, synthetic construct
  misc_feature 1..21: note = Description of Artificial Sequence: Synthetic oligonucleotide
  source 1..21: mol_type = other DNA
agcggcatcggccacaccgac

SEQ ID NO: 15600 - DNA, 21 bp, synthetic construct
  misc_feature 1..21: note = Description of Artificial Sequence: Synthetic oligonucleotide
  source 1..21: mol_type = other DNA
caagtcggcaacaaacccggc

SEQ ID NO: 15601 - DNA, 21 bp, synthetic construct
  misc_feature 1..21: note = Description of Artificial Sequence: Synthetic oligonucleotide
  source 1..21: mol_type = other DNA
gaaggcaccagaacccccggc

SEQ ID NO: 15602 - DNA, 21 bp, synthetic construct
  misc_feature 1..21: note = Description of Artificial Sequence: Synthetic oligonucleotide
  source 1..21: mol_type = other DNA
tctacgtctagtcagcctttg

SEQ ID NO: 15603 - DNA, 21 bp, synthetic construct
  misc_feature 1..21: note = Description of Artificial Sequence: Synthetic oligonucleotide
  source 1..21: mol_type = other DNA
gattcgagtacgaagtctatt

SEQ ID NO: 15604 - DNA, 21 bp, synthetic construct
  misc_feature 1..21: note = Description of Artificial Sequence: Synthetic oligonucleotide
  source 1..21: mol_type = other DNA
gcccaaagcagcaccagcgtc

SEQ ID NO: 15605 - DNA, 21 bp, synthetic construct
  misc_feature 1..21: note = Description of Artificial Sequence: Synthetic oligonucleotide
  source 1..21: mol_type = other DNA
actggtggtgggaaggatggt

SEQ ID NO: 15606 - DNA, 21 bp, synthetic construct
  misc_feature 1..21: note = Description of Artificial Sequence: Synthetic oligonucleotide
  source 1..21: mol_type = other DNA
ggcatcagcgaaaaagccagc

SEQ ID NO: 15607 - DNA, 21 bp, synthetic construct
  misc_feature 1..21: note = Description of Artificial Sequence: Synthetic oligonucleotide
  source 1..21: mol_type = other DNA
agcggcaacaccggcagcagc

SEQ ID NO: 15608 - DNA, 21 bp, synthetic construct
  misc_feature 1..21: note = Description of Artificial Sequence: Synthetic oligonucleotide
  source 1..21: mol_type = other DNA
gaacccgtcagcgccggcaaa

SEQ ID NO: 15609 - DNA, 21 bp, synthetic construct
  misc_feature 1..21: note = Description of Artificial Sequence: Synthetic oligonucleotide
  source 1..21: mol_type = other DNA
gggagttctgaggcgcagaag

SEQ ID NO: 15610 - DNA, 21 bp, synthetic construct
  misc_feature 1..21: note = Description of Artificial Sequence: Synthetic oligonucleotide
  source 1..21: mol_type = other DNA
ggtttgaatggtggtaagtcg

SEQ ID NO: 15611 - DNA, 21 bp, synthetic construct
  misc_feature 1..21: note = Description of Artificial Sequence: Synthetic oligonucleotide
  source 1..21: mol_type = other DNA
aacagcagcagcagcgtcgcc

SEQ ID NO: 15612 - DNA, 21 bp, synthetic construct
  misc_feature 1..21: note = Description of Artificial Sequence: Synthetic oligonucleotide
  source 1..21: mol_type = other DNA
aacggcgccggccaaaaccaa

SEQ ID NO: 15613 - DNA, 21 bp, synthetic construct
  misc_feature 1..21: note = Description of Artificial Sequence: Synthetic oligonucleotide
  source 1..21: mol_type = other DNA
gatggtaataatcagaagacg

SEQ ID NO: 15614 - DNA, 21 bp, synthetic construct
  misc_feature 1..21: note = Description of Artificial Sequence: Synthetic oligonucleotide
  source 1..21: mol_type = other DNA
gagagtaggccttcttctgct

SEQ ID NO: 15615 - DNA, 21 bp, synthetic construct
  misc_feature 1..21: note = Description of Artificial Sequence: Synthetic oligonucleotide
  source 1..21: mol_type = other DNA
gttcaggggacgtctagtact

SEQ ID NO: 15616 - DNA, 21 bp, synthetic construct
  misc_feature 1..21: note = Description of Artificial Sequence: Synthetic oligonucleotide
  source 1..21: mol_type = other DNA
ggcagcagcagccccagccaa

SEQ ID NO: 15617 - DNA, 21 bp, synthetic construct
  misc_feature 1..21: note = Description of Artificial Sequence: Synthetic oligonucleotide
  source 1..21: mol_type = other DNA
tcgaactcgactccgagtgtg

SEQ ID NO: 15618 - DNA, 21 bp, synthetic construct
  misc_feature 1..21: note = Description of Artificial Sequence: Synthetic oligonucleotide
  source 1..21: mol_type = other DNA
ggtagttctgataaggctcgg

SEQ ID NO: 15619 - DNA, 21 bp, synthetic construct
  misc_feature 1..21: note = Description of Artificial Sequence: Synthetic oligonucleotide
  source 1..21: mol_type = other DNA
gggaaggttgaggggaataag

SEQ ID NO: 15620 - DNA, 21 bp, synthetic construct
  misc_feature 1..21: note = Description of Artificial Sequence: Synthetic oligonucleotide
  source 1..21: mol_type = other DNA
acgatgagtacgaagtcggag

SEQ ID NO: 15621 - DNA, 21 bp, synthetic construct
  misc_feature 1..21: note = Description of Artificial Sequence: Synthetic oligonucleotide
  source 1..21: mol_type = other DNA
ggggtgggtcagaatccgcag

SEQ ID NO: 15622 - DNA, 21 bp, synthetic construct
  misc_feature 1..21: note = Description of Artificial Sequence: Synthetic oligonucleotide
  source 1..21: mol_type = other DNA
gggacggttgggaagccgatg

SEQ ID NO: 15623 - DNA, 21 bp, synthetic construct
  misc_feature 1..21: note = Description of Artificial Sequence: Synthetic oligonucleotide
  source 1..21: mol_type = other DNA
caagtcagcgacaaaaaccaa

SEQ ID NO: 15624 - DNA, 21 bp, synthetic construct
  misc_feature 1..21: note = Description of Artificial Sequence: Synthetic oligonucleotide
  source 1..21: mol_type = other DNA
caaggcgcccaaagcagcgtc

SEQ ID NO: 15625 - DNA, 21 bp, synthetic construct
  misc_feature 1..21: note = Description of Artificial Sequence: Synthetic oligonucleotide
  source 1..21: mol_type = other DNA
gaagccaacaaagtcgccgtc

SEQ ID NO: 15626 - DNA, 21 bp, synthetic construct
  misc_feature 1..21: note = Description of Artificial Sequence: Synthetic oligonucleotide
  source 1..21: mol_type = other DNA
aacaccaaagaaagcagcggc

SEQ ID NO: 15627 - DNA, 21 bp, synthetic construct
  misc_feature 1..21: note = Description of Artificial Sequence: Synthetic oligonucleotide
  source 1..21: mol_type = other DNA
agcggcggccaaagcgtcagc

SEQ ID NO: 15628 - DNA, 21 bp, synthetic construct
  misc_feature 1..21: note = Description of Artificial Sequence: Synthetic oligonucleotide
  source 1..21: mol_type = other DNA
caccaagaaagcagacccggc

SEQ ID NO: 15629 - DNA, 21 bp, synthetic construct
  misc_feature 1..21: note = Description of Artificial Sequence: Synthetic oligonucleotide
  source 1..21: mol_type = other DNA
accaccagcgacaaaagcatc

SEQ ID NO: 15630 - DNA, 21 bp, synthetic construct
  misc_feature 1..21: note = Description of Artificial Sequence: Synthetic oligonucleotide
  source 1..21: mol_type = other DNA
acgacggatagtaagtctcag

SEQ ID NO: 15631 - DNA, 21 bp, synthetic construct
  misc_feature 1..21: note = Description of Artificial Sequence: Synthetic oligonucleotide
  source 1..21: mol_type = other DNA
aacgccggcggccacgccagc

SEQ ID NO: 15632 - DNA, 21 bp, synthetic construct
  misc_feature 1..21: note = Description of Artificial Sequence: Synthetic oligonucleotide
  source 1..21: mol_type = other DNA
ggtccggcgacgaataatggt

SEQ ID NO: 15633 - DNA, 21 bp, synthetic construct
  misc_feature 1..21: note = Description of Artificial Sequence: Synthetic oligonucleotide
  source 1..21: mol_type = other DNA
gtcggcaaaaccagcaacgtc

SEQ ID NO: 15634 - DNA, 21 bp, synthetic construct
  misc_feature 1..21: note = Description of Artificial Sequence: Synthetic oligonucleotide
  source 1..21: mol_type = other DNA
agcgaaagcagaagcgtcagc

SEQ ID NO: 15635 - DNA, 21 bp, synthetic construct
  misc_feature 1..21: note = Description of Artificial Sequence: Synthetic oligonucleotide
  source 1..21: mol_type = other DNA
accagcgccagcaaaagcgac

SEQ ID NO: 15636 - DNA, 21 bp, synthetic construct
  misc_feature 1..21: note = Description of Artificial Sequence: Synthetic oligonucleotide
  source 1..21: mol_type = other DNA
acgtcgtcgtctggtaatatg

SEQ ID NO: 15637 - DNA, 21 bp, synthetic construct
  misc_feature 1..21: note = Description of Artificial Sequence: Synthetic oligonucleotide
  source 1..21: mol_type = other DNA
atgaacagcggcagcaccacc

SEQ ID NO: 15638 - DNA, 21 bp, synthetic construct
  misc_feature 1..21: note = Description of Artificial Sequence: Synthetic oligonucleotide
  source 1..21: mol_type = other DNA
gggccgactcagccgaataat

SEQ ID NO: 15639 - DNA, 21 bp, synthetic construct
  misc_feature 1..21: note = Description of Artificial Sequence: Synthetic oligonucleotide
  source 1..21: mol_type = other DNA
accaaagcccaaggcgccggc

SEQ ID NO: 15640 - DNA, 21 bp, synthetic construct
  misc_feature 1..21: note = Description of Artificial Sequence: Synthetic oligonucleotide
  source 1..21: mol_type = other DNA
agcgtcaaccacgaagccggc

SEQ ID NO: 15641 - DNA, 21 bp, synthetic construct
  misc_feature 1..21: note = Description of Artificial Sequence: Synthetic oligonucleotide
  source 1..21: mol_type = other DNA
accggcaccgccagcatcacc

SEQ ID NO: 15642 - DNA, 21 bp, synthetic construct
  misc_feature 1..21: note = Description of Artificial Sequence: Synthetic oligonucleotide
  source 1..21: mol_type = other DNA
actggggggacgcataattct

SEQ ID NO: 15643 - DNA, 21 bp, synthetic construct
  misc_feature 1..21: note = Description of Artificial Sequence: Synthetic oligonucleotide
  source 1..21: mol_type = other DNA
aatcagggttctagttcttct

SEQ ID NO: 15644 - DNA, 21 bp, synthetic construct
  misc_feature 1..21: note = Description of Artificial Sequence: Synthetic oligonucleotide
  source 1..21: mol_type = other DNA
gacggcgtcagcagcaacaga

SEQ ID NO: 15645 - DNA, 21 bp, synthetic construct
  misc_feature 1..21: note = Description of Artificial Sequence: Synthetic oligonucleotide
  source 1..21: mol_type = other DNA
atgaccagcaccggcagcacc

SEQ ID NO: 15646 - DNA, 21 bp, synthetic construct
  misc_feature 1..21: note = Description of Artificial Sequence: Synthetic oligonucleotide
  source 1..21: mol_type = other DNA
ggcaccgccaccggcaaccaa

SEQ ID NO: 15647 - DNA, 21 bp, synthetic construct
  misc_feature 1..21: note = Description of Artificial Sequence: Synthetic oligonucleotide
  source 1..21: mol_type = other DNA
gagaaaagtacgaagccgaat

SEQ ID NO: 15648 - DNA, 21 bp, synthetic construct
  misc_feature 1..21: note = Description of Artificial Sequence: Synthetic oligonucleotide
  source 1..21: mol_type = other DNA
ggcggcagcggcgaaaaaacc

SEQ ID NO: 15649 - DNA, 21 bp, synthetic construct
  misc_feature 1..21: note = Description of Artificial Sequence: Synthetic oligonucleotide
  source 1..21: mol_type = other DNA
aatgttcagtcttctaatgtt

SEQ ID NO: 15650 - DNA, 21 bp, synthetic construct
  misc_feature 1..21: note = Description of Artificial Sequence: Synthetic oligonucleotide
  source 1..21: mol_type = other DNA
gggagtggttctcatagtggt

SEQ ID NO: 15651 - DNA, 21 bp, synthetic construct
  misc_feature 1..21: note = Description of Artificial Sequence: Synthetic oligonucleotide
  source 1..21: mol_type = other DNA
aacagcggcaacagcggcaaa

SEQ ID NO: 15652 - DNA, 21 bp, synthetic construct
  misc_feature 1..21: note = Description of Artificial Sequence: Synthetic oligonucleotide
  source 1..21: mol_type = other DNA
agcagcagcaacggcagcaaa

SEQ ID NO: 15653 - DNA, 21 bp, synthetic construct
  misc_feature 1..21: note = Description of Artificial Sequence: Synthetic oligonucleotide
  source 1..21: mol_type = other DNA
cagggggctagttctggttcg

SEQ ID NO: 15654 - DNA, 21 bp, synthetic construct
  misc_feature 1..21: note = Description of Artificial Sequence: Synthetic oligonucleotide
  source 1..21: mol_type = other DNA
tctggtacggagaatgtgagg

SEQ ID NO: 15655 - DNA, 21 bp, synthetic construct
  misc_feature 1..21: note = Description of Artificial Sequence: Synthetic oligonucleotide
  source 1..21: mol_type = other DNA
ggtacgagtaatgggccgtct

SEQ ID NO: 15656 - DNA, 21 bp, synthetic construct
  misc_feature 1..21: note = Description of Artificial Sequence: Synthetic oligonucleotide
  source 1..21: mol_type = other DNA
aacgccagccccagccccggc

SEQ ID NO: 15657 - DNA, 21 bp, synthetic construct
  misc_feature 1..21: note = Description of Artificial Sequence: Synthetic oligonucleotide
  source 1..21: mol_type = other DNA
caaggcaacggcaaccaaggc

SEQ ID NO: 15658 - DNA, 21 bp, synthetic construct
  misc_feature 1..21: note = Description of Artificial Sequence: Synthetic oligonucleotide
  source 1..21: mol_type = other DNA
cacggcaccaacagcgccggc

SEQ ID NO: 15659 - DNA, 21 bp, synthetic construct
  misc_feature 1..21: note = Description of Artificial Sequence: Synthetic oligonucleotide
  source 1..21: mol_type = other DNA
gcgacttcgtcgactagtatt

SEQ ID NO: 15660 - DNA, 21 bp, synthetic construct
  misc_feature 1..21: note = Description of Artificial Sequence: Synthetic oligonucleotide
  source 1..21: mol_type = other DNA
tctaatggtagtacgcattcg

SEQ ID NO: 15661 - DNA, 21 bp, synthetic construct
  misc_feature 1..21: note = Description of Artificial Sequence: Synthetic oligonucleotide
  source 1..21: mol_type = other DNA
ggtaataagtctactccgtcg

SEQ ID NO: 15662 - DNA, 21 bp, synthetic construct
  misc_feature 1..21: note = Description of Artificial Sequence: Synthetic oligonucleotide
  source 1..21: mol_type = other DNA
ctccaaaccagcagccccggc

SEQ ID NO: 15663 - DNA, 21 bp, synthetic construct
  misc_feature 1..21: note = Description of Artificial Sequence: Synthetic oligonucleotide
  source 1..21: mol_type = other DNA
ggtccgaataattctgggtct

SEQ ID NO: 15664 - DNA, 21 bp, synthetic construct
  misc_feature 1..21: note = Description of Artificial Sequence: Synthetic oligonucleotide
  source 1..21: mol_type = other DNA
agagccaacggcgccaacagc

SEQ ID NO: 15665 - DNA, 21 bp, synthetic construct
  misc_feature 1..21: note = Description of Artificial Sequence: Synthetic oligonucleotide
  source 1..21: mol_type = other DNA
actgcttctggtgagcgggcg

SEQ ID NO: 15666 - DNA, 21 bp, synthetic construct
  misc_feature 1..21: note = Description of Artificial Sequence: Synthetic oligonucleotide
  source 1..21: mol_type = other DNA
aacagcaccagcagccccggc

SEQ ID NO: 15667 - DNA, 21 bp, synthetic construct
  misc_feature 1..21: note = Description of Artificial Sequence: Synthetic oligonucleotide
  source 1..21: mol_type = other DNA
cagggggattcgcataagggg

SEQ ID NO: 15668 - DNA, 21 bp, synthetic construct
  misc_feature 1..21: note = Description of Artificial Sequence: Synthetic oligonucleotide
  source 1..21: mol_type = other DNA
gatagtactgcggtgcctaag

SEQ ID NO: 15669 - DNA, 21 bp, synthetic construct
  misc_feature 1..21: note = Description of Artificial Sequence: Synthetic oligonucleotide
  source 1..21: mol_type = other DNA
accagcaacagcaaaaccctc

SEQ ID NO: 15670 - DNA, 21 bp, synthetic construct
  misc_feature 1..21: note = Description of Artificial Sequence: Synthetic oligonucleotide
  source 1..21: mol_type = other DNA
gaaagaaccgaaaacagcaga

SEQ ID NO: 15671 - DNA, 21 bp, synthetic construct
  misc_feature 1..21: note = Description of Artificial Sequence: Synthetic oligonucleotide
  source 1..21: mol_type = other DNA
gggagtcagcagagtactggg

SEQ ID NO: 15672 - DNA, 21 bp, synthetic construct
  misc_feature 1..21: note = Description of Artificial Sequence: Synthetic oligonucleotide
  source 1..21: mol_type = other DNA
cacggcggccaaagcaccagc

SEQ ID NO: 15673 - DNA, 21 bp, synthetic construct
  misc_feature 1..21: note = Description of Artificial Sequence: Synthetic oligonucleotide
  source 1..21: mol_type = other DNA
ggtgggggtaatccggctcgg

SEQ ID NO: 15674 - DNA, 21 bp, synthetic construct
  misc_feature 1..21: note = Description of Artificial Sequence: Synthetic oligonucleotide
  source 1..21: mol_type = other DNA
tctgcgactggtactaattcg

SEQ ID NO: 15675 - DNA, 21 bp, synthetic construct
  misc_feature 1..21: note = Description of Artificial Sequence: Synthetic oligonucleotide
  source 1..21: mol_type = other DNA
agcggcggccaagccggcatg

SEQ ID NO: 15676 - DNA, 21 bp, synthetic construct
  misc_feature 1..21: note = Description of Artificial Sequence: Synthetic oligonucleotide
  source 1..21: mol_type = other DNA
ggcaacgccagcggccaagcc

SEQ ID NO: 15677 - DNA, 21 bp, synthetic construct
  misc_feature 1..21: note = Description of Artificial Sequence: Synthetic oligonucleotide
  source 1..21: mol_type = other DNA
aacgtcggcaacaacgcccaa

SEQ ID NO: 15678 - DNA, 21 bp, synthetic construct
  misc_feature 1..21: note = Description of Artificial Sequence: Synthetic oligonucleotide
  source 1..21: mol_type = other DNA
ggggtgggttcttcttcgcag

SEQ ID NO: 15679 - DNA, 21 bp, synthetic construct
  misc_feature 1..21: note = Description of Artificial Sequence: Synthetic oligonucleotide
  source 1..21: mol_type = other DNA
tctagtggttcgactccttct

SEQ ID NO: 15680 - DNA, 21 bp, synthetic construct
  misc_feature 1..21: note = Description of Artificial Sequence: Synthetic oligonucleotide
  source 1..21: mol_type = other DNA
aacaccagccaaagcagcggc

SEQ ID NO: 15681 - DNA, 21 bp, synthetic construct
  misc_feature 1..21: note = Description of Artificial Sequence: Synthetic oligonucleotide
  source 1..21: mol_type = other DNA
ctcagcggcaaagaaaacgtc

SEQ ID NO: 15682 - DNA, 21 bp, synthetic construct
  misc_feature 1..21: note = Description of Artificial Sequence: Synthetic oligonucleotide
  source 1..21: mol_type = other DNA
ggcggcaaagaaagccacgcc

SEQ ID NO: 15683 - DNA, 21 bp, synthetic construct
  misc_feature 1..21: note = Description of Artificial Sequence: Synthetic oligonucleotide
  source 1..21: mol_type = other DNA
atgggcggcggcagcagcacc

SEQ ID NO: 15684 - DNA, 21 bp, synthetic construct
  misc_feature 1..21: note = Description of Artificial Sequence: Synthetic oligonucleotide
  source 1..21: mol_type = other DNA
accggcgtcaccacccaaggc

SEQ ID NO: 15685 - DNA, 21 bp, synthetic construct
  misc_feature 1..21: note = Description of Artificial Sequence: Synthetic oligonucleotide
  source 1..21: mol_type = other DNA
agcggcggcagcggcaccatg

SEQ ID NO: 15686 - DNA, 21 bp, synthetic construct
  misc_feature 1..21: note = Description of Artificial Sequence: Synthetic oligonucleotide
  source 1..21: mol_type = other DNA
gttgctgagaaggcgtctagt

SEQ ID NO: 15687 - DNA, 21 bp, synthetic construct
  misc_feature 1..21: note = Description of Artificial Sequence: Synthetic oligonucleotide
  source 1..21: mol_type = other DNA
gatagtgcgggtaagtctagt

SEQ ID NO: 15688 - DNA, 21 bp, synthetic construct
  misc_feature 1..21: note = Description of Artificial Sequence: Synthetic oligonucleotide
  source 1..21: mol_type = other DNA
agcaccgcccaacccaccggc

SEQ ID NO: 15689 - DNA, 21 bp, synthetic construct
  misc_feature 1..21: note = Description of Artificial Sequence: Synthetic oligonucleotide
  source 1..21: mol_type = other DNA
agcaccggccacggcaacgtc

SEQ ID NO: 15690 - DNA, 21 bp, synthetic construct
  misc_feature 1..21: note = Description of Artificial Sequence: Synthetic oligonucleotide
  source 1..21: mol_type = other DNA
agcgccagccaaagcgccggc

SEQ ID NO: 15691 - DNA, 21 bp, synthetic construct
  misc_feature 1..21: note = Description of Artificial Sequence: Synthetic oligonucleotide
  source 1..21: mol_type = other DNA
ctcaccgaaggcaaagccaac

SEQ ID NO: 15692 - DNA, 21 bp, synthetic construct
  misc_feature 1..21: note = Description of Artificial Sequence: Synthetic oligonucleotide
  source 1..21: mol_type = other DNA
ctcggcgccgacaaaatccaa

SEQ ID NO: 15693 - DNA, 21 bp, synthetic construct
  misc_feature 1..21: note = Description of Artificial Sequence: Synthetic oligonucleotide
  source 1..21: mol_type = other DNA
ggtgctggttctagtagtacg

SEQ ID NO: 15694 - DNA, 21 bp, synthetic construct
  misc_feature 1..21: note = Description of Artificial Sequence: Synthetic oligonucleotide
  source 1..21: mol_type = other DNA
gaaggcggcaacaaagtcatg

SEQ ID NO: 15695 - DNA, 21 bp, synthetic construct
  misc_feature 1..21: note = Description of Artificial Sequence: Synthetic oligonucleotide
  source 1..21: mol_type = other DNA
agcagccaaaaaagcgaaggc

SEQ ID NO: 15696 - DNA, 21 bp, synthetic construct
  misc_feature 1..21: note = Description of Artificial Sequence: Synthetic oligonucleotide
  source 1..21: mol_type = other DNA
gccagcagcaacggcaacgtc

SEQ ID NO: 15697 - DNA, 21 bp, synthetic construct
  misc_feature 1..21: note = Description of Artificial Sequence: Synthetic oligonucleotide
  source 1..21: mol_type = other DNA
accagcaacagcgaaaacaga

SEQ ID NO: 15698 - DNA, 21 bp, synthetic construct
  misc_feature 1..21: note = Description of Artificial Sequence: Synthetic oligonucleotide
  source 1..21: mol_type = other DNA
agcggcagcgaaagaagcacc

SEQ ID NO: 15699 - DNA, 21 bp, synthetic construct
  misc_feature 1..21: note = Description of Artificial Sequence: Synthetic oligonucleotide
  source 1..21: mol_type = other DNA
gcgcaggcgaaggagactaat

SEQ ID NO: 15700 - DNA, 21 bp, synthetic construct
  misc_feature 1..21: note = Description of Artificial Sequence: Synthetic oligonucleotide
  source 1..21: mol_type = other DNA
ctcgaaggcaaagccagcagc

SEQ ID NO: 15701 - DNA, 21 bp, synthetic construct
  misc_feature 1..21: note = Description of Artificial Sequence: Synthetic oligonucleotide
  source 1..21: mol_type = other DNA
aacagcgccggcagcagcagc

SEQ ID NO: 15702 - DNA, 21 bp, synthetic construct
  misc_feature 1..21: note = Description of Artificial Sequence: Synthetic oligonucleotide
  source 1..21: mol_type = other DNA
agcaccgccagccccagagaa

SEQ ID NO: 15703 - DNA, 21 bp, synthetic construct
  misc_feature 1..21: note = Description of Artificial Sequence: Synthetic oligonucleotide
  source 1..21: mol_type = other DNA
gacggcaccaccagcaaagtc

SEQ ID NO: 15704 - DNA, 21 bp, synthetic construct
  misc_feature 1..21: note = Description of Artificial Sequence: Synthetic oligonucleotide
  source 1..21: mol_type = other DNA
tcggataataagacgatgcag

SEQ ID NO: 15705 - DNA, 21 bp, synthetic construct
  misc_feature 1..21: note = Description of Artificial Sequence: Synthetic oligonucleotide
  source 1..21: mol_type = other DNA
cacagcgcccccgtcgccggc

SEQ ID NO: 15706 - DNA, 21 bp, synthetic construct
  misc_feature 1..21: note = Description of Artificial Sequence: Synthetic oligonucleotide
  source 1..21: mol_type = other DNA
gggacgggtgggaataatact

SEQ ID NO: 15707 - DNA, 21 bp, synthetic construct
  misc_feature 1..21: note = Description of Artificial Sequence: Synthetic oligonucleotide
  source 1..21: mol_type = other DNA
cagggtgagactactcggacg

SEQ ID NO: 15708 - DNA, 21 bp, synthetic construct
  misc_feature 1..21: note = Description of Artificial Sequence: Synthetic oligonucleotide
  source 1..21: mol_type = other DNA
ggcaacgcccccagcagcacc

SEQ ID NO: 15709 - DNA, 21 bp, synthetic construct
  misc_feature 1..21: note = Description of Artificial Sequence: Synthetic oligonucleotide
  source 1..21: mol_type = other DNA
gtccaaggcagcgcccccggc

SEQ ID NO: 15710 - DNA, 21 bp, synthetic construct
  misc_feature 1..21: note = Description of Artificial Sequence: Synthetic oligonucleotide
  source 1..21: mol_type = other DNA
ctcggcagcagcaaagacaac

SEQ ID NO: 15711 - DNA, 21 bp, synthetic construct
  misc_feature 1..21: note = Description of Artificial Sequence: Synthetic oligonucleotide
  source 1..21: mol_type = other DNA
agtactgtggataaggggacg

SEQ ID NO: 15712 - DNA, 21 bp, synthetic construct
  misc_feature 1..21: note = Description of Artificial Sequence: Synthetic oligonucleotide
  source 1..21: mol_type = other DNA
agttcgaaggcgtcgactgtt

SEQ ID NO: 15713 - DNA, 21 bp, synthetic construct
  misc_feature 1..21: note = Description of Artificial Sequence: Synthetic oligonucleotide
  source 1..21: mol_type = other DNA
gacaacaccaacaaagccagc

SEQ ID NO: 15714 - DNA, 21 bp, synthetic construct
  misc_feature 1..21: note = Description of Artificial Sequence: Synthetic oligonucleotide
  source 1..21: mol_type = other DNA
agcatcggcgaccccagaagc

SEQ ID NO: 15715 - DNA, 21 bp, synthetic construct
  misc_feature 1..21: note = Description of Artificial Sequence: Synthetic oligonucleotide
  source 1..21: mol_type = other DNA
gaaaaaaacagcaccgtcatg

SEQ ID NO: 15716 - DNA, 21 bp, synthetic construct
  misc_feature 1..21: note = Description of Artificial Sequence: Synthetic oligonucleotide
  source 1..21: mol_type = other DNA
agtgagagtcagaagggttcg

SEQ ID NO: 15717 - DNA, 21 bp, synthetic construct
  misc_feature 1..21: note = Description of Artificial Sequence: Synthetic oligonucleotide
  source 1..21: mol_type = other DNA
accaaaaacggcgcccaagcc

SEQ ID NO: 15718 - DNA, 21 bp, synthetic construct
  misc_feature 1..21: note = Description of Artificial Sequence: Synthetic oligonucleotide
  source 1..21: mol_type = other DNA
gatggttctccggttaataag

SEQ ID NO: 15719 - DNA, 21 bp, synthetic construct
  misc_feature 1..21: note = Description of Artificial Sequence: Synthetic oligonucleotide
  source 1..21: mol_type = other DNA
agcaccaccggcgacagcaaa

SEQ ID NO: 15720 - DNA, 21 bp, synthetic construct
  misc_feature 1..21: note = Description of Artificial Sequence: Synthetic oligonucleotide
  source 1..21: mol_type = other DNA
agccccggccaaaccagcagc

SEQ ID NO: 15721 - DNA, 21 bp, synthetic construct
  misc_feature 1..21: note = Description of Artificial Sequence: Synthetic oligonucleotide
  source 1..21: mol_type = other DNA
caagccggcggcaaacccggc

SEQ ID NO: 15722 - DNA, 21 bp, synthetic construct
  misc_feature 1..21: note = Description of Artificial Sequence: Synthetic oligonucleotide
  source 1..21: mol_type = other DNA
ggcagcagcaacaccgccggc

SEQ ID NO: 15723 - DNA, 21 bp, synthetic construct
  misc_feature 1..21: note = Description of Artificial Sequence: Synthetic oligonucleotide
  source 1..21: mol_type = other DNA
ggtgatattaagaatggggct

SEQ ID NO: 15724 - DNA, 21 bp, synthetic construct
  misc_feature 1..21: note = Description of Artificial Sequence: Synthetic oligonucleotide
  source 1..21: mol_type = other DNA
agcggcggcaacaccctcagc

SEQ ID NO: 15725 - DNA, 21 bp, synthetic construct
  misc_feature 1..21: note = Description of Artificial Sequence: Synthetic oligonucleotide
  source 1..21: mol_type = other DNA
agcaacggcaacaccagaaac

SEQ ID NO: 15726 - DNA, 21 bp, synthetic construct
  misc_feature 1..21: note = Description of Artificial Sequence: Synthetic oligonucleotide
  source 1..21: mol_type = other DNA
gaaaacagcaccagcaccaaa

SEQ ID NO: 15727 - DNA, 21 bp, synthetic construct
  misc_feature 1..21: note = Description of Artificial Sequence: Synthetic oligonucleotide
  source 1..21: mol_type = other DNA
ggtggggctactccgcagggg

SEQ ID NO: 15728 - DNA, 21 bp, synthetic construct
  misc_feature 1..21: note = Description of Artificial Sequence: Synthetic oligonucleotide
  source 1..21: mol_type = other DNA
agccccagcgaacccatcaaa

SEQ ID NO: 15729 - DNA, 21 bp, synthetic construct
  misc_feature 1..21: note = Description of Artificial Sequence: Synthetic oligonucleotide
  source 1..21: mol_type = other DNA
accagcggcagcagcgccgcc

SEQ ID NO: 15730 - DNA, 21 bp, synthetic construct
  misc_feature 1..21: note = Description of Artificial Sequence: Synthetic oligonucleotide
  source 1..21: mol_type = other DNA
gagagtaaggctgctagtagt

SEQ ID NO: 15731 - DNA, 21 bp, synthetic construct
  misc_feature 1..21: note = Description of Artificial Sequence: Synthetic oligonucleotide
  source 1..21: mol_type = other DNA
gcttcgacggataagttggcg

SEQ ID NO: 15732 - DNA, 21 bp, synthetic construct
  misc_feature 1..21: note = Description of Artificial Sequence: Synthetic oligonucleotide
  source 1..21: mol_type = other DNA
ctccaagaccacagcaaaggc

SEQ ID NO: 15733 - DNA, 21 bp, synthetic construct
  misc_feature 1..21: note = Description of Artificial Sequence: Synthetic oligonucleotide
  source 1..21: mol_type = other DNA
tctggtactccgtcgactggt

SEQ ID NO: 15734 - DNA, 21 bp, synthetic construct
  misc_feature 1..21: note = Description of Artificial Sequence: Synthetic oligonucleotide
  source 1..21: mol_type = other DNA
gagtcgggtaagggtattctg

SEQ ID NO: 15735 - DNA, 21 bp, synthetic construct
  misc_feature 1..21: note = Description of Artificial Sequence: Synthetic oligonucleotide
  source 1..21: mol_type = other DNA
atcggcgccaacagcagcgcc

SEQ ID NO: 15736 - DNA, 21 bp, synthetic construct
  misc_feature 1..21: note = Description of Artificial Sequence: Synthetic oligonucleotide
  source 1..21: mol_type = other DNA
ggccccggcagccccggcaaa

SEQ ID NO: 15737 - DNA, 21 bp, synthetic construct
  misc_feature 1..21: note = Description of Artificial Sequence: Synthetic oligonucleotide
  source 1..21: mol_type = other DNA
accaccggcggcaacggccaa

SEQ ID NO: 15738 - DNA, 21 bp, synthetic construct
  misc_feature 1..21: note = Description of Artificial Sequence: Synthetic oligonucleotide
  source 1..21: mol_type = other DNA
aacaacagcggcagcaacagc

SEQ ID NO: 15739 - DNA, 21 bp, synthetic construct
  misc_feature 1..21: note = Description of Artificial Sequence: Synthetic oligonucleotide
  source 1..21: mol_type = other DNA
tacggcaccggcagcagcccc

SEQ ID NO: 15740 - DNA, 21 bp, synthetic construct
  misc_feature 1..21: note = Description of Artificial Sequence: Synthetic oligonucleotide
  source 1..21: mol_type = other DNA
gattcgggttctcagaggggt

SEQ ID NO: 15741 - DNA, 21 bp, synthetic construct
  misc_feature 1..21: note = Description of Artificial Sequence: Synthetic oligonucleotide
  source 1..21: mol_type = other DNA
accagcgtccccggcgccggc

SEQ ID NO: 15742 - DNA, 21 bp, synthetic construct
  misc_feature 1..21: note = Description of Artificial Sequence: Synthetic oligonucleotide
  source 1..21: mol_type = other DNA
agccccagcgacaaacccgtc

SEQ ID NO: 15743 - DNA, 21 bp, synthetic construct
  misc_feature 1..21: note = Description of Artificial Sequence: Synthetic oligonucleotide
  source 1..21: mol_type = other DNA
actaatgggtcgaattctaag

SEQ ID NO: 15744 - DNA, 21 bp, synthetic construct
  misc_feature 1..21: note = Description of Artificial Sequence: Synthetic oligonucleotide
  source 1..21: mol_type = other DNA
aatgcttctggggcgcgtgat

SEQ ID NO: 15745 - DNA, 21 bp, synthetic construct
  misc_feature 1..21: note = Description of Artificial Sequence: Synthetic oligonucleotide
  source 1..21: mol_type = other DNA
tctgtggggtcgagtgggagt

SEQ ID NO: 15746 - DNA, 21 bp, synthetic construct
  misc_feature 1..21: note = Description of Artificial Sequence: Synthetic oligonucleotide
  source 1..21: mol_type = other DNA
cagggggggaataatggttct

SEQ ID NO: 15747 - DNA, 21 bp, synthetic construct
  misc_feature 1..21: note = Description of Artificial Sequence: Synthetic oligonucleotide
  source 1..21: mol_type = other DNA
gagacgtctaagtcgccggtg

SEQ ID NO: 15748 - DNA, 21 bp, synthetic construct
  misc_feature 1..21: note = Description of Artificial Sequence: Synthetic oligonucleotide
  source 1..21: mol_type = other DNA
ggtggtgttgggtcgtctaat

SEQ ID NO: 15749 - DNA, 21 bp, synthetic construct
  misc_feature 1..21: note = Description of Artificial Sequence: Synthetic oligonucleotide
  source 1..21: mol_type = other DNA
accagcggcagcagcaccgcc

SEQ ID NO: 15750 - DNA, 21 bp, synthetic construct
  misc_feature 1..21: note = Description of Artificial Sequence: Synthetic oligonucleotide
  source 1..21: mol_type = other DNA
accaccaacagcacccccagc

SEQ ID NO: 15751 - DNA, 21 bp, synthetic construct
  misc_feature 1..21: note = Description of Artificial Sequence: Synthetic oligonucleotide
  source 1..21: mol_type = other DNA
aacaccgacaaacacgccggc

SEQ ID NO: 15752 - DNA, 21 bp, synthetic construct
  misc_feature 1..21: note = Description of Artificial Sequence: Synthetic oligonucleotide
  source 1..21: mol_type = other DNA
ggcaccggcgccggcagcaac

SEQ ID NO: 15753 - DNA, 21 bp, synthetic construct
  misc_feature 1..21: note = Description of Artificial Sequence: Synthetic oligonucleotide
  source 1..21: mol_type = other DNA
cagggtagtcctgcggcgtcg

SEQ ID NO: 15754 - DNA, 21 bp, synthetic construct
  misc_feature 1..21: note = Description of Artificial Sequence: Synthetic oligonucleotide
  source 1..21: mol_type = other DNA
gagagtagtaatcggggtagt

SEQ ID NO: 15755 - DNA, 21 bp, synthetic construct
  misc_feature 1..21: note = Description of Artificial Sequence: Synthetic oligonucleotide
  source 1..21: mol_type = other DNA
gggggtaaggcgactcagggt

SEQ ID NO: 15756 - DNA, 21 bp, synthetic construct
  misc_feature 1..21: note = Description of Artificial Sequence: Synthetic oligonucleotide
  source 1..21: mol_type = other DNA
aacaccatccccaaacccggc

SEQ ID NO: 15757 - DNA, 21 bp, synthetic construct
  misc_feature 1..21: note = Description of Artificial Sequence: Synthetic oligonucleotide
  source 1..21: mol_type = other DNA
agtgggtcggagcgtgcgtcg

SEQ ID NO: 15758 - DNA, 21 bp, synthetic construct
  misc_feature 1..21: note = Description of Artificial Sequence: Synthetic oligonucleotide
  source 1..21: mol_type = other DNA
agcaacagcaaagacagcagc

SEQ ID NO: 15759 - DNA, 21 bp, synthetic construct
  misc_feature 1..21: note = Description of Artificial Sequence: Synthetic oligonucleotide
  source 1..21: mol_type = other DNA
agcggcgtcagcacccacaac

SEQ ID NO: 15760 - DNA, 21 bp, synthetic construct
  misc_feature 1..21: note = Description of Artificial Sequence: Synthetic oligonucleotide
  source 1..21: mol_type = other DNA
cacagcggcaccggcagcacc

SEQ ID NO: 15761 - DNA, 21 bp, synthetic construct
  misc_feature 1..21: note = Description of Artificial Sequence: Synthetic oligonucleotide
  source 1..21: mol_type = other DNA
gagagtgggaaggctactact

SEQ ID NO: 15762 - DNA, 21 bp, synthetic construct
  misc_feature 1..21: note = Description of Artificial Sequence: Synthetic oligonucleotide
  source 1..21: mol_type = other DNA
gggcatactgaggggaagacg

SEQ ID NO: 15763 - DNA, 21 bp, synthetic construct
  misc_feature 1..21: note = Description of Artificial Sequence: Synthetic oligonucleotide
  source 1..21: mol_type = other DNA
ggcagcagcagcggcggcacc

SEQ ID NO: 15764 - DNA, 21 bp, synthetic construct
  misc_feature 1..21: note = Description of Artificial Sequence: Synthetic oligonucleotide
  source 1..21: mol_type = other DNA
accagccccaaccccagcacc

SEQ ID NO: 15765 - DNA, 21 bp, synthetic construct
  misc_feature 1..21: note = Description of Artificial Sequence: Synthetic oligonucleotide
  source 1..21: mol_type = other DNA
acggctggtgggtcgagtcag

SEQ ID NO: 15766 - DNA, 21 bp, synthetic construct
  misc_feature 1..21: note = Description of Artificial Sequence: Synthetic oligonucleotide
  source 1..21: mol_type = other DNA
aacggcaacgccagcagcggc

SEQ ID NO: 15767 - DNA, 21 bp, synthetic construct
  misc_feature 1..21: note = Description of Artificial Sequence: Synthetic oligonucleotide
  source 1..21: mol_type = other DNA
gggagtgggacgcctacgcat

SEQ ID NO: 15768 - DNA, 21 bp, synthetic construct
  misc_feature 1..21: note = Description of Artificial Sequence: Synthetic oligonucleotide
  source 1..21: mol_type = other DNA
agccaaggcaccgacggcaaa

SEQ ID NO: 15769 - DNA, 21 bp, synthetic construct
  misc_feature 1..21: note = Description of Artificial Sequence: Synthetic oligonucleotide
  source 1..21: mol_type = other DNA
agcggccaacccggcaacacc

SEQ ID NO: 15770 - DNA, 21 bp, synthetic construct
  misc_feature 1..21: note = Description of Artificial Sequence: Synthetic oligonucleotide
  source 1..21: mol_type = other DNA
ggtgctgttaataataagagt

SEQ ID NO: 15771 - DNA, 21 bp, synthetic construct
  misc_feature 1..21: note = Description of Artificial Sequence: Synthetic oligonucleotide
  source 1..21: mol_type = other DNA
agtagttctcatagtgctagt

SEQ ID NO: 15772 - DNA, 21 bp, synthetic construct
  misc_feature 1..21: note = Description of Artificial Sequence: Synthetic oligonucleotide
  source 1..21: mol_type = other DNA
aataatgcgacggcgacttct

SEQ ID NO: 15773 - DNA, 21 bp, synthetic construct
  misc_feature 1..21: note = Description of Artificial Sequence: Synthetic oligonucleotide
  source 1..21: mol_type = other DNA
agcagcaacgaaaaactcgcc

SEQ ID NO: 15774 - DNA, 21 bp, synthetic construct
  misc_feature 1..21: note = Description of Artificial Sequence: Synthetic oligonucleotide
  source 1..21: mol_type = other DNA
ggtcattcggttaaggcggag

SEQ ID NO: 15775 - DNA, 21 bp, synthetic construct
  misc_feature 1..21: note = Description of Artificial Sequence: Synthetic oligonucleotide
  source 1..21: mol_type = other DNA
tcgacgggtgctaatcctatc

SEQ ID NO: 15776 - DNA, 21 bp, synthetic construct
  misc_feature 1..21: note = Description of Artificial Sequence: Synthetic oligonucleotide
  source 1..21: mol_type = other DNA
agtgatcagcagaagggtgct

SEQ ID NO: 15777 - DNA, 21 bp, synthetic construct
  misc_feature 1..21: note = Description of Artificial Sequence: Synthetic oligonucleotide
  source 1..21: mol_type = other DNA
actgggactagtcagcctacg

SEQ ID NO: 15778 - DNA, 21 bp, synthetic construct
  misc_feature 1..21: note = Description of Artificial Sequence: Synthetic oligonucleotide
  source 1..21: mol_type = other DNA
ggcgtcagcgccacccccacc

SEQ ID NO: 15779 - DNA, 21 bp, synthetic construct
  misc_feature 1..21: note = Description of Artificial Sequence: Synthetic oligonucleotide
  source 1..21: mol_type = other DNA
caggggtctaatacggctact

SEQ ID NO: 15780 - DNA, 21 bp, synthetic construct
  misc_feature 1..21: note = Description of Artificial Sequence: Synthetic oligonucleotide
  source 1..21: mol_type = other DNA
aacagcgccggcgccaccacc

SEQ ID NO: 15781 - DNA, 21 bp, synthetic construct
  misc_feature 1..21: note = Description of Artificial Sequence: Synthetic oligonucleotide
  source 1..21: mol_type = other DNA
agcagcggcgaaggcatgaga

SEQ ID NO: 15782 - DNA, 21 bp, synthetic construct
  misc_feature 1..21: note = Description of Artificial Sequence: Synthetic oligonucleotide
  source 1..21: mol_type = other DNA
agacaaacccccgccgccggc

SEQ ID NO: 15783 - DNA, 21 bp, synthetic construct
  misc_feature 1..21: note = Description of Artificial Sequence: Synthetic oligonucleotide
  source 1..21: mol_type = other DNA
agcggcggcaccgccgccatc

SEQ ID NO: 15784 - DNA, 21 bp, synthetic construct
  misc_feature 1..21: note = Description of Artificial Sequence: Synthetic oligonucleotide
  source 1..21: mol_type = other DNA
ctcaccggccaaaacaaccaa

SEQ ID NO: 15785 - DNA, 21 bp, synthetic construct
  misc_feature 1..21: note = Description of Artificial Sequence: Synthetic oligonucleotide
  source 1..21: mol_type = other DNA
ctccaaagcgtcagccccggc

SEQ ID NO: 15786 - DNA, 21 bp, synthetic construct
  misc_feature 1..21: note = Description of Artificial Sequence: Synthetic oligonucleotide
  source 1..21: mol_type = other DNA
gccggccaacaagccagccaa

SEQ ID NO: 15787 - DNA, 21 bp, synthetic construct
  misc_feature 1..21: note = Description of Artificial Sequence: Synthetic oligonucleotide
  source 1..21: mol_type = other DNA
gggaggaatacgagtaatgct

SEQ ID NO: 15788 - DNA, 21 bp, synthetic construct
  misc_feature 1..21: note = Description of Artificial Sequence: Synthetic oligonucleotide
  source 1..21: mol_type = other DNA
aacgacgccagcaaaggcaac

SEQ ID NO: 15789 - DNA, 21 bp, synthetic construct
  misc_feature 1..21: note = Description of Artificial Sequence: Synthetic oligonucleotide
  source 1..21: mol_type = other DNA
accggcaccggcagccccgcc

SEQ ID NO: 15790 - DNA, 21 bp, synthetic construct
  misc_feature 1..21: note = Description of Artificial Sequence: Synthetic oligonucleotide
  source 1..21: mol_type = other DNA
gggttgaattcttctgctaag

SEQ ID NO: 15791 - DNA, 21 bp, synthetic construct
  misc_feature 1..21: note = Description of Artificial Sequence: Synthetic oligonucleotide
  source 1..21: mol_type = other DNA
ggcgtcaccagcagcccccac

SEQ ID NO: 15792 - DNA, 21 bp, synthetic construct
  misc_feature 1..21: note = Description of Artificial Sequence: Synthetic oligonucleotide
  source 1..21: mol_type = other DNA
ggccaaggcaccggcctcagc

SEQ ID NO: 15793 - DNA, 21 bp, synthetic construct
  misc_feature 1..21: note = Description of Artificial Sequence: Synthetic oligonucleotide
  source 1..21: mol_type = other DNA
ggcaccaccaaaaccagcgaa

SEQ ID NO: 15794 - DNA, 21 bp, synthetic construct
  misc_feature 1..21: note = Description of Artificial Sequence: Synthetic oligonucleotide
  source 1..21: mol_type = other DNA
gacagcctcaaaggcaacggc

SEQ ID NO: 15795 - DNA, 21 bp, synthetic construct
  misc_feature 1..21: note = Description of Artificial Sequence: Synthetic oligonucleotide
  source 1..21: mol_type = other DNA
gggatgactaattcggggggg

SEQ ID NO: 15796 - DNA, 21 bp, synthetic construct
  misc_feature 1..21: note = Description of Artificial Sequence: Synthetic oligonucleotide
  source 1..21: mol_type = other DNA
agcgccaccaaagtcaacgaa

SEQ ID NO: 15797 - DNA, 21 bp, synthetic construct
  misc_feature 1..21: note = Description of Artificial Sequence: Synthetic oligonucleotide
  source 1..21: mol_type = other DNA
ggttctgataaggcggctcct

SEQ ID NO: 15798 - DNA, 21 bp, synthetic construct
  misc_feature 1..21: note = Description of Artificial Sequence: Synthetic oligonucleotide
  source 1..21: mol_type = other DNA
aatggtgggcctcagtctacg

SEQ ID NO: 15799 - DNA, 21 bp, synthetic construct
  misc_feature 1..21: note = Description of Artificial Sequence: Synthetic oligonucleotide
  source 1..21: mol_type = other DNA
ggcaacggcaaagacggcaac

SEQ ID NO: 15800 - DNA, 21 bp, synthetic construct
  misc_feature 1..21: note = Description of Artificial Sequence: Synthetic oligonucleotide
  source 1..21: mol_type = other DNA
ggtcaggcgacgtctgctaag

SEQ ID NO: 15801 - DNA, 21 bp, synthetic construct
  misc_feature 1..21: note = Description of Artificial Sequence: Synthetic oligonucleotide
  source 1..21: mol_type = other DNA
ggtaatccgacggggggtagt

SEQ ID NO: 15802 - DNA, 21 bp, synthetic construct
  misc_feature 1..21: note = Description of Artificial Sequence: Synthetic oligonucleotide
  source 1..21: mol_type = other DNA
gacaacaccaaaagcaaccaa

SEQ ID NO: 15803 - DNA, 21 bp, synthetic construct
  misc_feature 1..21: note = Description of Artificial Sequence: Synthetic oligonucleotide
  source 1..21: mol_type = other DNA
gacgccgtcagcagccccaaa

SEQ ID NO: 15804 - DNA, 21 bp, synthetic construct
  misc_feature 1..21: note = Description of Artificial Sequence: Synthetic oligonucleotide
  source 1..21: mol_type = other DNA
agtaagactgagaggagtgtg

SEQ ID NO: 15805 - DNA, 21 bp, synthetic construct
  misc_feature 1..21: note = Description of Artificial Sequence: Synthetic oligonucleotide
  source 1..21: mol_type = other DNA
aacggcagcggcgccagcagc

SEQ ID NO: 15806 - DNA, 21 bp, synthetic construct
  misc_feature 1..21: note = Description of Artificial Sequence: Synthetic oligonucleotide
  source 1..21: mol_type = other DNA
ggtactgcttcgggtagtggt

SEQ ID NO: 15807 - DNA, 21 bp, synthetic construct
  misc_feature 1..21: note = Description of Artificial Sequence: Synthetic oligonucleotide
  source 1..21: mol_type = other DNA
tcgagtgggactagtactgtg

SEQ ID NO: 15808 - DNA, 21 bp, synthetic construct
  misc_feature 1..21: note = Description of Artificial Sequence: Synthetic oligonucleotide
  source 1..21: mol_type = other DNA
aacagcagcggcccccccggc

SEQ ID NO: 15809 - DNA, 21 bp, synthetic construct
  misc_feature 1..21: note = Description of Artificial Sequence: Synthetic oligonucleotide
  source 1..21: mol_type = other DNA
ctcaaaagccaaagcaccggc

SEQ ID NO: 15810 - DNA, 21 bp, synthetic construct
  misc_feature 1..21: note = Description of Artificial Sequence: Synthetic oligonucleotide
  source 1..21: mol_type = other DNA
ctcggccaaaccggccaactc

SEQ ID NO: 15811 - DNA, 21 bp, synthetic construct
  misc_feature 1..21: note = Description of Artificial Sequence: Synthetic oligonucleotide
  source 1..21: mol_type = other DNA
gaaagcaacagcagacccggc

SEQ ID NO: 15812 - DNA, 21 bp, synthetic construct
  misc_feature 1..21: note = Description of Artificial Sequence: Synthetic oligonucleotide
  source 1..21: mol_type = other DNA
acgacgtcgggtcagcatggt

SEQ ID NO: 15813 - DNA, 21 bp, synthetic construct
  misc_feature 1..21: note = Description of Artificial Sequence: Synthetic oligonucleotide
  source 1..21: mol_type = other DNA
cagggttcgcagaaggtttct

SEQ ID NO: 15814 - DNA, 21 bp, synthetic construct
  misc_feature 1..21: note = Description of Artificial Sequence: Synthetic oligonucleotide
  source 1..21: mol_type = other DNA
agcgccagcgacctcaaaagc

SEQ ID NO: 15815 - DNA, 21 bp, synthetic construct
  misc_feature 1..21: note = Description of Artificial Sequence: Synthetic oligonucleotide
  source 1..21: mol_type = other DNA
agcaccggcggcagcagccaa

SEQ ID NO: 15816 - DNA, 21 bp, synthetic construct
  misc_feature 1..21: note = Description of Artificial Sequence: Synthetic oligonucleotide
  source 1..21: mol_type = other DNA
tctgctggtccgtcttctgcg

SEQ ID NO: 15817 - DNA, 21 bp, synthetic construct
  misc_feature 1..21: note = Description of Artificial Sequence: Synthetic oligonucleotide
  source 1..21: mol_type = other DNA
agcggcggcaccagcagcgtc

SEQ ID NO: 15818 - DNA, 21 bp, synthetic construct
  misc_feature 1..21: note = Description of Artificial Sequence: Synthetic oligonucleotide
  source 1..21: mol_type = other DNA
ggtagtgggcataagggtgag

SEQ ID NO: 15819 - DNA, 21 bp, synthetic construct
  misc_feature 1..21: note = Description of Artificial Sequence: Synthetic oligonucleotide
  source 1..21: mol_type = other DNA
acgggtactacgcatacgacg

SEQ ID NO: 15820 - DNA, 21 bp, synthetic construct
  misc_feature 1..21: note = Description of Artificial Sequence: Synthetic oligonucleotide
  source 1..21: mol_type = other DNA
attgcgacgaaggggaatgtt

SEQ ID NO: 15821 - DNA, 21 bp, synthetic construct
  misc_feature 1..21: note = Description of Artificial Sequence: Synthetic oligonucleotide
  source 1..21: mol_type = other DNA
ctccaaagccccagaaccggc

SEQ ID NO: 15822 - DNA, 21 bp, synthetic construct
  misc_feature 1..21: note = Description of Artificial Sequence: Synthetic oligonucleotide
  source 1..21: mol_type = other DNA
gccggccaaaacagcagcgtc

SEQ ID NO: 15823 - DNA, 21 bp, synthetic construct
  misc_feature 1..21: note = Description of Artificial Sequence: Synthetic oligonucleotide
  source 1..21: mol_type = other DNA
gtccccagccacgccgccggc

SEQ ID NO: 15824 - DNA, 21 bp, synthetic construct
  misc_feature 1..21: note = Description of Artificial Sequence: Synthetic oligonucleotide
  source 1..21: mol_type = other DNA
caagccagcagcggcgccagc

SEQ ID NO: 15825 - DNA, 21 bp, synthetic construct
  misc_feature 1..21: note = Description of Artificial Sequence: Synthetic oligonucleotide
  source 1..21: mol_type = other DNA
agttcgtcgaataaggatgct

SEQ ID NO: 15826 - DNA, 21 bp, synthetic construct
  misc_feature 1..21: note = Description of Artificial Sequence: Synthetic oligonucleotide
  source 1..21: mol_type = other DNA
caggggggtagtggtagttcg

SEQ ID NO: 15827 - DNA, 21 bp, synthetic construct
  misc_feature 1..21: note = Description of Artificial Sequence: Synthetic oligonucleotide
  source 1..21: mol_type = other DNA
ggccccgccagccaaagcggc

SEQ ID NO: 15828 - DNA, 21 bp, synthetic construct
  misc_feature 1..21: note = Description of Artificial Sequence: Synthetic oligonucleotide
  source 1..21: mol_type = other DNA
aaccccggcagcaccaccgcc

SEQ ID NO: 15829 - DNA, 21 bp, synthetic construct
  misc_feature 1..21: note = Description of Artificial Sequence: Synthetic oligonucleotide
  source 1..21: mol_type = other DNA
atgaacagcaacagcaacagc

SEQ ID NO: 15830 - DNA, 21 bp, synthetic construct
  misc_feature 1..21: note = Description of Artificial Sequence: Synthetic oligonucleotide
  source 1..21: mol_type = other DNA
ggtagtgataaggcgaagcag

SEQ ID NO: 15831 - DNA, 21 bp, synthetic construct
  misc_feature 1..21: note = Description of Artificial Sequence: Synthetic oligonucleotide
  source 1..21: mol_type = other DNA
accggcagcagcagcgtcagc

SEQ ID NO: 15832 - DNA, 21 bp, synthetic construct
  misc_feature 1..21: note = Description of Artificial Sequence: Synthetic oligonucleotide
  source 1..21: mol_type = other DNA
gacagagccacccccagcgtc

SEQ ID NO: 15833 - DNA, 21 bp, synthetic construct
  misc_feature 1..21: note = Description of Artificial Sequence: Synthetic oligonucleotide
  source 1..21: mol_type = other DNA
tctgcgggttctcctggtaat

SEQ ID NO: 15834 - DNA, 21 bp, synthetic construct
  misc_feature 1..21: note = Description of Artificial Sequence: Synthetic oligonucleotide
  source 1..21: mol_type = other DNA
agtcagactagttcgccgcag

SEQ ID NO: 15835 - DNA, 21 bp, synthetic construct
  misc_feature 1..21: note = Description of Artificial Sequence: Synthetic oligonucleotide
  source 1..21: mol_type = other DNA
agcgccgaaggcaaaatgatg

SEQ ID NO: 15836 - DNA, 21 bp, synthetic construct
  misc_feature 1..21: note = Description of Artificial Sequence: Synthetic oligonucleotide
  source 1..21: mol_type = other DNA
ggtcctaagagttctccggcg

SEQ ID NO: 15837 - DNA, 21 bp, synthetic construct
  misc_feature 1..21: note = Description of Artificial Sequence: Synthetic oligonucleotide
  source 1..21: mol_type = other DNA
cagtcgcctggtcagactagt

SEQ ID NO: 15838 - DNA, 21 bp, synthetic construct
  misc_feature 1..21: note = Description of Artificial Sequence: Synthetic oligonucleotide
  source 1..21: mol_type = other DNA
gtccaaggcgccggcagcagc

SEQ ID NO: 15839 - DNA, 21 bp, synthetic construct
  misc_feature 1..21: note = Description of Artificial Sequence: Synthetic oligonucleotide
  source 1..21: mol_type = other DNA
ggccaaggcaccagcgacggc

SEQ ID NO: 15840 - DNA, 21 bp, synthetic construct
  misc_feature 1..21: note = Description of Artificial Sequence: Synthetic oligonucleotide
  source 1..21: mol_type = other DNA
accagagaaggcagcagcggc

SEQ ID NO: 15841 - DNA, 21 bp, synthetic construct
  misc_feature 1..21: note = Description of Artificial Sequence: Synthetic oligonucleotide
  source 1..21: mol_type = other DNA
cagaatagtgggactaataat

SEQ ID NO: 15842 - DNA, 21 bp, synthetic construct
  misc_feature 1..21: note = Description of Artificial Sequence: Synthetic oligonucleotide
  source 1..21: mol_type = other DNA
aacggcggcaccggcagcaga

SEQ ID NO: 15843 - DNA, 21 bp, synthetic construct
  misc_feature 1..21: note = Description of Artificial Sequence: Synthetic oligonucleotide
  source 1..21: mol_type = other DNA
aaccaaggcagcagcagcgtc

SEQ ID NO: 15844 - DNA, 21 bp, synthetic construct
  misc_feature 1..21: note = Description of Artificial Sequence: Synthetic oligonucleotide
  source 1..21: mol_type = other DNA
aacggcgccggccaaaaacaa

SEQ ID NO: 15845 - DNA, 21 bp, synthetic construct
  misc_feature 1..21: note = Description of Artificial Sequence: Synthetic oligonucleotide
  source 1..21: mol_type = other DNA
ctgagtgataagaagccgaat

SEQ ID NO: 15846 - DNA, 21 bp, synthetic construct
  misc_feature 1..21: note = Description of Artificial Sequence: Synthetic oligonucleotide
  source 1..21: mol_type = other DNA
aatggggttaagtcgcagacg

SEQ ID NO: 15847 - DNA, 21 bp, synthetic construct
  misc_feature 1..21: note = Description of Artificial Sequence: Synthetic oligonucleotide
  source 1..21: mol_type = other DNA
gttcagggtgggagttctacg

SEQ ID NO: 15848 - DNA, 21 bp, synthetic construct
  misc_feature 1..21: note = Description of Artificial Sequence: Synthetic oligonucleotide
  source 1..21: mol_type = other DNA
tcttctggggctggtagtttg

SEQ ID NO: 15849 - DNA, 21 bp, synthetic construct
  misc_feature 1..21: note = Description of Artificial Sequence: Synthetic oligonucleotide
  source 1..21: mol_type = other DNA
agcagcgaacacaaaggcagc

SEQ ID NO: 15850 - DNA, 21 bp, synthetic construct
  misc_feature 1..21: note = Description of Artificial Sequence: Synthetic oligonucleotide
  source 1..21: mol_type = other DNA
agcagcaccaaacaacccggc

SEQ ID NO: 15851 - DNA, 21 bp, synthetic construct
  misc_feature 1..21: note = Description of Artificial Sequence: Synthetic oligonucleotide
  source 1..21: mol_type = other DNA
agtggtcagggtagttcggtg

SEQ ID NO: 15852 - DNA, 21 bp, synthetic construct
  misc_feature 1..21: note = Description of Artificial Sequence: Synthetic oligonucleotide
  source 1..21: mol_type = other DNA
atgggcgaaacccacgccggc

SEQ ID NO: 15853 - DNA, 21 bp, synthetic construct
  misc_feature 1..21: note = Description of Artificial Sequence: Synthetic oligonucleotide
  source 1..21: mol_type = other DNA
agtactgcgagtgataaggcg

SEQ ID NO: 15854 - DNA, 21 bp, synthetic construct
  misc_feature 1..21: note = Description of Artificial Sequence: Synthetic oligonucleotide
  source 1..21: mol_type = other DNA
acccacgccaaccccgccggc

SEQ ID NO: 15855 - DNA, 21 bp, synthetic construct
  misc_feature 1..21: note = Description of Artificial Sequence: Synthetic oligonucleotide
  source 1..21: mol_type = other DNA
acgagtagtcagcagtcgggg

SEQ ID NO: 15856 - DNA, 21 bp, synthetic construct
  misc_feature 1..21: note = Description of Artificial Sequence: Synthetic oligonucleotide
  source 1..21: mol_type = other DNA
agcgaccaacaaaccaccaaa

SEQ ID NO: 15857 - DNA, 21 bp, synthetic construct
  misc_feature 1..21: note = Description of Artificial Sequence: Synthetic oligonucleotide
  source 1..21: mol_type = other DNA
gaaagcaccaccagacccggc

SEQ ID NO: 15858 - DNA, 21 bp, synthetic construct
  misc_feature 1..21: note = Description of Artificial Sequence: Synthetic oligonucleotide
  source 1..21: mol_type = other DNA
gccagctacaaaggcgccggc

SEQ ID NO: 15859 - DNA, 21 bp, synthetic construct
  misc_feature 1..21: note = Description of Artificial Sequence: Synthetic oligonucleotide
  source 1..21: mol_type = other DNA
ggccaacacgcccaagccggc

SEQ ID NO: 15860 - DNA, 21 bp, synthetic construct
  misc_feature 1..21: note = Description of Artificial Sequence: Synthetic oligonucleotide
  source 1..21: mol_type = other DNA
ggcagcggcgcccccagcaac

SEQ ID NO: 15861 - DNA, 21 bp, synthetic construct
  misc_feature 1..21: note = Description of Artificial Sequence: Synthetic oligonucleotide
  source 1..21: mol_type = other DNA
gatccgaagccgggttctacg

SEQ ID NO: 15862 - DNA, 21 bp, synthetic construct
  misc_feature 1..21: note = Description of Artificial Sequence: Synthetic oligonucleotide
  source 1..21: mol_type = other DNA
gggggggatgcgaagagtgtg

SEQ ID NO: 15863 - DNA, 21 bp, synthetic construct
  misc_feature 1..21: note = Description of Artificial Sequence: Synthetic oligonucleotide
  source 1..21: mol_type = other DNA
ggcgaccaaaaagccagcaac

SEQ ID NO: 15864 - DNA, 21 bp, synthetic construct
  misc_feature 1..21: note = Description of Artificial Sequence: Synthetic oligonucleotide
  source 1..21: mol_type = other DNA
tacagagacagcgccagccac

SEQ ID NO: 15865 - DNA, 21 bp, synthetic construct
  misc_feature 1..21: note = Description of Artificial Sequence: Synthetic oligonucleotide
  source 1..21: mol_type = other DNA
ggcagcggcagagacgccgtc

SEQ ID NO: 15866 - DNA, 21 bp, synthetic construct
  misc_feature 1..21: note = Description of Artificial Sequence: Synthetic oligonucleotide
  source 1..21: mol_type = other DNA
agcaacggcagccaaggcagc

SEQ ID NO: 15867 - DNA, 21 bp, synthetic construct
  misc_feature 1..21: note = Description of Artificial Sequence: Synthetic oligonucleotide
  source 1..21: mol_type = other DNA
tctcctggtagttcttcgggt

SEQ ID NO: 15868 - DNA, 21 bp, synthetic construct
  misc_feature 1..21: note = Description of Artificial Sequence: Synthetic oligonucleotide
  source 1..21: mol_type = other DNA
gatggtcataagacgcttgtg

SEQ ID NO: 15869 - DNA, 21 bp, synthetic construct
  misc_feature 1..21: note = Description of Artificial Sequence: Synthetic oligonucleotide
  source 1..21: mol_type = other DNA
gtggggacttcgcaggctact

SEQ ID NO: 15870 - DNA, 21 bp, synthetic construct
  misc_feature 1..21: note = Description of Artificial Sequence: Synthetic oligonucleotide
  source 1..21: mol_type = other DNA
gccaccggcagcggcagcaac

SEQ ID NO: 15871 - DNA, 21 bp, synthetic construct
  misc_feature 1..21: note = Description of Artificial Sequence: Synthetic oligonucleotide
  source 1..21: mol_type = other DNA
aacgccacccccaccaaccaa

SEQ ID NO: 15872 - DNA, 21 bp, synthetic construct
  misc_feature 1..21: note = Description of Artificial Sequence: Synthetic oligonucleotide
  source 1..21: mol_type = other DNA
aacaccaccgcccccaccgtc

SEQ ID NO: 15873 - DNA, 21 bp, synthetic construct
  misc_feature 1..21: note = Description of Artificial Sequence: Synthetic oligonucleotide
  source 1..21: mol_type = other DNA
gccgcccccgccagcgccggc

SEQ ID NO: 15874 - DNA, 21 bp, synthetic construct
  misc_feature 1..21: note = Description of Artificial Sequence: Synthetic oligonucleotide
  source 1..21: mol_type = other DNA
gcgagtcagcctgctagtgct

SEQ ID NO: 15875 - DNA, 21 bp, synthetic construct
  misc_feature 1..21: note = Description of Artificial Sequence: Synthetic oligonucleotide
  source 1..21: mol_type = other DNA
caaggcagcagcagcgtcgtc

SEQ ID NO: 15876 - DNA, 21 bp, synthetic construct
  misc_feature 1..21: note = Description of Artificial Sequence: Synthetic oligonucleotide
  source 1..21: mol_type = other DNA
agtcagcataaggagcagccg

SEQ ID NO: 15877 - DNA, 21 bp, synthetic construct
  misc_feature 1..21: note = Description of Artificial Sequence: Synthetic oligonucleotide
  source 1..21: mol_type = other DNA
actggtacgactgagaagcat

SEQ ID NO: 15878 - DNA, 21 bp, synthetic construct
  misc_feature 1..21: note = Description of Artificial Sequence: Synthetic oligonucleotide
  source 1..21: mol_type = other DNA
gttaataagagtccggttact

SEQ ID NO: 15879 - DNA, 21 bp, synthetic construct
  misc_feature 1..21: note = Description of Artificial Sequence: Synthetic oligonucleotide
  source 1..21: mol_type = other DNA
aaaggcggcagcaacagcgtc

SEQ ID NO: 15880 - DNA, 21 bp, synthetic construct
  misc_feature 1..21: note = Description of Artificial Sequence: Synthetic oligonucleotide
  source 1..21: mol_type = other DNA
agcggcaccagcaccagccac

SEQ ID NO: 15881 - DNA, 21 bp, synthetic construct
  misc_feature 1..21: note = Description of Artificial Sequence: Synthetic oligonucleotide
  source 1..21: mol_type = other DNA
agtagtgttggtgagcagaag

SEQ ID NO: 15882 - DNA, 21 bp, synthetic construct
  misc_feature 1..21: note = Description of Artificial Sequence: Synthetic oligonucleotide
  source 1..21: mol_type = other DNA
gacaacagcagcaaagccgtc

SEQ ID NO: 15883 - DNA, 21 bp, synthetic construct
  misc_feature 1..21: note = Description of Artificial Sequence: Synthetic oligonucleotide
  source 1..21: mol_type = other DNA
agtggtgggacgtctgctggg

SEQ ID NO: 15884 - DNA, 21 bp, synthetic construct
  misc_feature 1..21: note = Description of Artificial Sequence: Synthetic oligonucleotide
  source 1..21: mol_type = other DNA
gccaacagcgaaaaaagcccc

SEQ ID NO: 15885 - DNA, 21 bp, synthetic construct
  misc_feature 1..21: note = Description of Artificial Sequence: Synthetic oligonucleotide
  source 1..21: mol_type = other DNA
accaaaaacggcagccaagcc

SEQ ID NO: 15886 - DNA, 21 bp, synthetic construct
  misc_feature 1..21: note = Description of Artificial Sequence: Synthetic oligonucleotide
  source 1..21: mol_type = other DNA
gatactactaagacgtcgggt

SEQ ID NO: 15887 - DNA, 21 bp, synthetic construct
  misc_feature 1..21: note = Description of Artificial Sequence: Synthetic oligonucleotide
  source 1..21: mol_type = other DNA
agcagcggcgccagcagcagc

SEQ ID NO: 15888 - DNA, 21 bp, synthetic construct
  misc_feature 1..21: note = Description of Artificial Sequence: Synthetic oligonucleotide
  source 1..21: mol_type = other DNA
gataagtcgccgaatagtggg

SEQ ID NO: 15889 - DNA, 21 bp, synthetic construct
  misc_feature 1..21: note = Description of Artificial Sequence: Synthetic oligonucleotide
  source 1..21: mol_type = other DNA
gacggcaccaaaaaaaacgcc

SEQ ID NO: 15890 - DNA, 21 bp, synthetic construct
  misc_feature 1..21: note = Description of Artificial Sequence: Synthetic oligonucleotide
  source 1..21: mol_type = other DNA
catggtaattctagtcagggt

SEQ ID NO: 15891 - DNA, 21 bp, synthetic construct
  misc_feature 1..21: note = Description of Artificial Sequence: Synthetic oligonucleotide
  source 1..21: mol_type = other DNA
tcgagtaattcggggactcag

SEQ ID NO: 15892 - DNA, 21 bp, synthetic construct
  misc_feature 1..21: note = Description of Artificial Sequence: Synthetic oligonucleotide
  source 1..21: mol_type = other DNA
ggtgcgggtgatcgtagtggg

SEQ ID NO: 15893 - DNA, 21 bp, synthetic construct
  misc_feature 1..21: note = Description of Artificial Sequence: Synthetic oligonucleotide
  source 1..21: mol_type = other DNA
aaaagcaacaccagcgccgcc

SEQ ID NO: 15894 - DNA, 21 bp, synthetic construct
  misc_feature 1..21: note = Description of Artificial Sequence: Synthetic oligonucleotide
  source 1..21: mol_type = other DNA
gaaagcgacggcaaaagccac

SEQ ID NO: 15895 - DNA, 21 bp, synthetic construct
  misc_feature 1..21: note = Description of Artificial Sequence: Synthetic oligonucleotide
  source 1..21: mol_type = other DNA
gacgccagcagcaaaggcctc

SEQ ID NO: 15896 - DNA, 21 bp, synthetic construct
  misc_feature 1..21: note = Description of Artificial Sequence: Synthetic oligonucleotide
  source 1..21: mol_type = other DNA
caaagcggcgacaaaagccac

SEQ ID NO: 15897 - DNA, 21 bp, synthetic construct
  misc_feature 1..21: note = Description of Artificial Sequence: Synthetic oligonucleotide
  source 1..21: mol_type = other DNA
ctcaccggcgccagcaccagc

SEQ ID NO: 15898 - DNA, 21 bp, synthetic construct
  misc_feature 1..21: note = Description of Artificial Sequence: Synthetic oligonucleotide
  source 1..21: mol_type = other DNA
gatgggagtagtagtccgggg

SEQ ID NO: 15899 - DNA, 21 bp, synthetic construct
  misc_feature 1..21: note = Description of Artificial Sequence: Synthetic oligonucleotide
  source 1..21: mol_type = other DNA
actactactagtacgccggtt

SEQ ID NO: 15900 - DNA, 21 bp, synthetic construct
  misc_feature 1..21: note = Description of Artificial Sequence: Synthetic oligonucleotide
  source 1..21: mol_type = other DNA
gacatcagcaaaagcaacatc

SEQ ID NO: 15901 - DNA, 21 bp, synthetic construct
  misc_feature 1..21: note = Description of Artificial Sequence: Synthetic oligonucleotide
  source 1..21: mol_type = other DNA
ggggggagtccttctaatcag

SEQ ID NO: 15902 - DNA, 21 bp, synthetic construct
  misc_feature 1..21: note = Description of Artificial Sequence: Synthetic oligonucleotide
  source 1..21: mol_type = other DNA
tcttctggggagggtaataag

SEQ ID NO: 15903 - DNA, 21 bp, synthetic construct
  misc_feature 1..21: note = Description of Artificial Sequence: Synthetic oligonucleotide
  source 1..21: mol_type = other DNA
ggcagcaccggcagccaaggc

SEQ ID NO: 15904 - DNA, 21 bp, synthetic construct
  misc_feature 1..21: note = Description of Artificial Sequence: Synthetic oligonucleotide
  source 1..21: mol_type = other DNA
tcggagagtagtaagtctgtt

SEQ ID NO: 15905 - DNA, 21 bp, synthetic construct
  misc_feature 1..21: note = Description of Artificial Sequence: Synthetic oligonucleotide
  source 1..21: mol_type = other DNA
gataatggtactagttcgcgt

SEQ ID NO: 15906 - DNA, 21 bp, synthetic construct
  misc_feature 1..21: note = Description of Artificial Sequence: Synthetic oligonucleotide
  source 1..21: mol_type = other DNA
ggcctcaaagaaagcaacaga

SEQ ID NO: 15907 - DNA, 21 bp, synthetic construct
  misc_feature 1..21: note = Description of Artificial Sequence: Synthetic oligonucleotide
  source 1..21: mol_type = other DNA
accaacggcagcagcaccagc

SEQ ID NO: 15908 - DNA, 21 bp, synthetic construct
  misc_feature 1..21: note = Description of Artificial Sequence: Synthetic oligonucleotide
  source 1..21: mol_type = other DNA
gtcgaccaaggcggcagcaaa

SEQ ID NO: 15909 - DNA, 21 bp, synthetic construct
  misc_feature 1..21: note = Description of Artificial Sequence: Synthetic oligonucleotide
  source 1..21: mol_type = other DNA
caaaccgaaaaaggcagagaa

SEQ ID NO: 15910 - DNA, 21 bp, synthetic construct
  misc_feature 1..21: note = Description of Artificial Sequence: Synthetic oligonucleotide
  source 1..21: mol_type = other DNA
ggcagcaaccccaacggcacc

SEQ ID NO: 15911 - DNA, 21 bp, synthetic construct
  misc_feature 1..21: note = Description of Artificial Sequence: Synthetic oligonucleotide
  source 1..21: mol_type = other DNA
gatggtgctagtccttctaag

SEQ ID NO: 15912 - DNA, 21 bp, synthetic construct
  misc_feature 1..21: note = Description of Artificial Sequence: Synthetic oligonucleotide
  source 1..21: mol_type = other DNA
aatggttctactagttcgtcg

SEQ ID NO: 15913 - DNA, 21 bp, synthetic construct
  misc_feature 1..21: note = Description of Artificial Sequence: Synthetic oligonucleotide
  source 1..21: mol_type = other DNA
gaaaacaacaaaagcaccgcc

SEQ ID NO: 15914 - DNA, 21 bp, synthetic construct
  misc_feature 1..21: note = Description of Artificial Sequence: Synthetic oligonucleotide
  source 1..21: mol_type = other DNA
gccagcggcagcaacccccac

SEQ ID NO: 15915 - DNA, 21 bp, synthetic construct
  misc_feature 1..21: note = Description of Artificial Sequence: Synthetic oligonucleotide
  source 1..21: mol_type = other DNA
gatccggtggcgaagggtacg

SEQ ID NO: 15916 - DNA, 21 bp, synthetic construct
  misc_feature 1..21: note = Description of Artificial Sequence: Synthetic oligonucleotide
  source 1..21: mol_type = other DNA
caaggcgtccccagcggcacc

SEQ ID NO: 15917 - DNA, 21 bp, synthetic construct
  misc_feature 1..21: note = Description of Artificial Sequence: Synthetic oligonucleotide
  source 1..21: mol_type = other DNA
aacaccggcaacagcggcggc

SEQ ID NO: 15918 - DNA, 21 bp, synthetic construct
  misc_feature 1..21: note = Description of Artificial Sequence: Synthetic oligonucleotide
  source 1..21: mol_type = other DNA
caaggcggcggcagcagcacc

SEQ ID NO: 15919 - DNA, 21 bp, synthetic construct
  misc_feature 1..21: note = Description of Artificial Sequence: Synthetic oligonucleotide
  source 1..21: mol_type = other DNA
cacggcgtccccagcagcggc

SEQ ID NO: 15920 - DNA, 21 bp, synthetic construct
  misc_feature 1..21: note = Description of Artificial Sequence: Synthetic oligonucleotide
  source 1..21: mol_type = other DNA
gaggctcatgctagtgttaag

SEQ ID NO: 15921 - DNA, 21 bp, synthetic construct
  misc_feature 1..21: note = Description of Artificial Sequence: Synthetic oligonucleotide
  source 1..21: mol_type = other DNA
agcggcaacggcaaagacatg

SEQ ID NO: 15922 - DNA, 21 bp, synthetic construct
  misc_feature 1..21: note = Description of Artificial Sequence: Synthetic oligonucleotide
  source 1..21: mol_type = other DNA
aacggcagcaacaaccccacc

SEQ ID NO: 15923 - DNA, 21 bp, synthetic construct
  misc_feature 1..21: note = Description of Artificial Sequence: Synthetic oligonucleotide
  source 1..21: mol_type = other DNA
aatgttatgccggattctaag

SEQ ID NO: 15924 - DNA, 21 bp, synthetic construct
  misc_feature 1..21: note = Description of Artificial Sequence: Synthetic oligonucleotide
  source 1..21: mol_type = other DNA
gtcggcgacagcagcagcaga

SEQ ID NO: 15925 - DNA, 21 bp, synthetic construct
  misc_feature 1..21: note = Description of Artificial Sequence: Synthetic oligonucleotide
  source 1..21: mol_type = other DNA
agcagcggcagcagcagcgtc

SEQ ID NO: 15926 - DNA, 21 bp, synthetic construct
  misc_feature 1..21: note = Description of Artificial Sequence: Synthetic oligonucleotide
  source 1..21: mol_type = other DNA
gccaccagcaacgacaccaaa

SEQ ID NO: 15927 - DNA, 21 bp, synthetic construct
  misc_feature 1..21: note = Description of Artificial Sequence: Synthetic oligonucleotide
  source 1..21: mol_type = other DNA
caaaacggcaaaggcaacgcc

SEQ ID NO: 15928 - DNA, 21 bp, synthetic construct
  misc_feature 1..21: note = Description of Artificial Sequence: Synthetic oligonucleotide
  source 1..21: mol_type = other DNA
gcccccagcagcgaaaacaaa

SEQ ID NO: 15929 - DNA, 21 bp, synthetic construct
  misc_feature 1..21: note = Description of Artificial Sequence: Synthetic oligonucleotide
  source 1..21: mol_type = other DNA
aattcttcgcagtctccttct

SEQ ID NO: 15930 - DNA, 21 bp, synthetic construct
  misc_feature 1..21: note = Description of Artificial Sequence: Synthetic oligonucleotide
  source 1..21: mol_type = other DNA
gacaacggcagcaacaacaga

SEQ ID NO: 15931 - DNA, 21 bp, synthetic construct
  misc_feature 1..21: note = Description of Artificial Sequence: Synthetic oligonucleotide
  source 1..21: mol_type = other DNA
agtggggcgtcgggtgctggg

SEQ ID NO: 15932 - DNA, 21 bp, synthetic construct
  misc_feature 1..21: note = Description of Artificial Sequence: Synthetic oligonucleotide
  source 1..21: mol_type = other DNA
gatccgctggctaataagcat

SEQ ID NO: 15933 - DNA, 21 bp, synthetic construct
  misc_feature 1..21: note = Description of Artificial Sequence: Synthetic oligonucleotide
  source 1..21: mol_type = other DNA
agtggttctagtaataatgtt

SEQ ID NO: 15934 - DNA, 21 bp, synthetic construct
  misc_feature 1..21: note = Description of Artificial Sequence: Synthetic oligonucleotide
  source 1..21: mol_type = other DNA
gggcatcagactgggagtggg

SEQ ID NO: 15935 - DNA, 21 bp, synthetic construct
  misc_feature 1..21: note = Description of Artificial Sequence: Synthetic oligonucleotide
  source 1..21: mol_type = other DNA
gatgggaagtcgtcggtttct

SEQ ID NO: 15936 - DNA, 21 bp, synthetic construct
  misc_feature 1..21: note = Description of Artificial Sequence: Synthetic oligonucleotide
  source 1..21: mol_type = other DNA
caaggcagcgacagacccgtc

SEQ ID NO: 15937 - DNA, 21 bp, synthetic construct
  misc_feature 1..21: note = Description of Artificial Sequence: Synthetic oligonucleotide
  source 1..21: mol_type = other DNA
gtttcttcgcagaaggctggt

SEQ ID NO: 15938 - DNA, 21 bp, synthetic construct
  misc_feature 1..21: note = Description of Artificial Sequence: Synthetic oligonucleotide
  source 1..21: mol_type = other DNA
gattctacgactaagacgggt

SEQ ID NO: 15939 - DNA, 21 bp, synthetic construct
  misc_feature 1..21: note = Description of Artificial Sequence: Synthetic oligonucleotide
  source 1..21: mol_type = other DNA
ggccaaaccggcgcccccgtc

SEQ ID NO: 15940 - DNA, 21 bp, synthetic construct
  misc_feature 1..21: note = Description of Artificial Sequence: Synthetic oligonucleotide
  source 1..21: mol_type = other DNA
agcaccgccgtcaccaccggc

SEQ ID NO: 15941 - DNA, 21 bp, synthetic construct
  misc_feature 1..21: note = Description of Artificial Sequence: Synthetic oligonucleotide
  source 1..21: mol_type = other DNA
caagccaacaacagccccacc

SEQ ID NO: 15942 - DNA, 21 bp, synthetic construct
  misc_feature 1..21: note = Description of Artificial Sequence: Synthetic oligonucleotide
  source 1..21: mol_type = other DNA
atgggcaacggcgccagcaac

SEQ ID NO: 15943 - DNA, 21 bp, synthetic construct
  misc_feature 1..21: note = Description of Artificial Sequence: Synthetic oligonucleotide
  source 1..21: mol_type = other DNA
atgaataataaggagaatcat

SEQ ID NO: 15944 - DNA, 21 bp, synthetic construct
  misc_feature 1..21: note = Description of Artificial Sequence: Synthetic oligonucleotide
  source 1..21: mol_type = other DNA
acgggtaataagtctaatgag

SEQ ID NO: 15945 - DNA, 21 bp, synthetic construct
  misc_feature 1..21: note = Description of Artificial Sequence: Synthetic oligonucleotide
  source 1..21: mol_type = other DNA
gacctcagcaccaaaagcaga

SEQ ID NO: 15946 - DNA, 21 bp, synthetic construct
  misc_feature 1..21: note = Description of Artificial Sequence: Synthetic oligonucleotide
  source 1..21: mol_type = other DNA
acgcctagtcaggataggcat

SEQ ID NO: 15947 - DNA, 21 bp, synthetic construct
  misc_feature 1..21: note = Description of Artificial Sequence: Synthetic oligonucleotide
  source 1..21: mol_type = other DNA
gcccaagaaaaaagcagcaga

SEQ ID NO: 15948 - DNA, 21 bp, synthetic construct
  misc_feature 1..21: note = Description of Artificial Sequence: Synthetic oligonucleotide
  source 1..21: mol_type = other DNA
gagcctagtaagtcgaatact

SEQ ID NO: 15949 - DNA, 21 bp, synthetic construct
  misc_feature 1..21: note = Description of Artificial Sequence: Synthetic oligonucleotide
  source 1..21: mol_type = other DNA
accgacggcaccaaaagccaa

SEQ ID NO: 15950 - DNA, 21 bp, synthetic construct
  misc_feature 1..21: note = Description of Artificial Sequence: Synthetic oligonucleotide
  source 1..21: mol_type = other DNA
ggccacgaaaaaggcaacaac

SEQ ID NO: 15951 - DNA, 21 bp, synthetic construct
  misc_feature 1..21: note = Description of Artificial Sequence: Synthetic oligonucleotide
  source 1..21: mol_type = other DNA
acgagtggtgcggggagtttg

SEQ ID NO: 15952 - DNA, 21 bp, synthetic construct
  misc_feature 1..21: note = Description of Artificial Sequence: Synthetic oligonucleotide
  source 1..21: mol_type = other DNA
gagggttctaagcagggggcg

SEQ ID NO: 15953 - DNA, 21 bp, synthetic construct
  misc_feature 1..21: note = Description of Artificial Sequence: Synthetic oligonucleotide
  source 1..21: mol_type = other DNA
cagcctgataataaggggggt

SEQ ID NO: 15954 - DNA, 21 bp, synthetic construct
  misc_feature 1..21: note = Description of Artificial Sequence: Synthetic oligonucleotide
  source 1..21: mol_type = other DNA
gagcgtcaggggtcgacgctg

SEQ ID NO: 15955 - DNA, 21 bp, synthetic construct
  misc_feature 1..21: note = Description of Artificial Sequence: Synthetic oligonucleotide
  source 1..21: mol_type = other DNA
gaaggcagcaccggcagcaga

SEQ ID NO: 15956 - DNA, 21 bp, synthetic construct
  misc_feature 1..21: note = Description of Artificial Sequence: Synthetic oligonucleotide
  source 1..21: mol_type = other DNA
gaaggcggcaccagcaccagc

SEQ ID NO: 15957 - DNA, 21 bp, synthetic construct
  misc_feature 1..21: note = Description of Artificial Sequence: Synthetic oligonucleotide
  source 1..21: mol_type = other DNA
ggcggcgaaagcaacagactc

SEQ ID NO: 15958 - DNA, 21 bp, synthetic construct
  misc_feature 1..21: note = Description of Artificial Sequence: Synthetic oligonucleotide
  source 1..21: mol_type = other DNA
ggtttggctggtaatgcgaag

SEQ ID NO: 15959 - DNA, 21 bp, synthetic construct
  misc_feature 1..21: note = Description of Artificial Sequence: Synthetic oligonucleotide
  source 1..21: mol_type = other DNA
agcaccggccacgtcaacggc

SEQ ID NO: 15960 - DNA, 21 bp, synthetic construct
  misc_feature 1..21: note = Description of Artificial Sequence: Synthetic oligonucleotide
  source 1..21: mol_type = other DNA
agcctcaacgccggcgccggc

SEQ ID NO: 15961 - DNA, 21 bp, synthetic construct
  misc_feature 1..21: note = Description of Artificial Sequence: Synthetic oligonucleotide
  source 1..21: mol_type = other DNA
gcttctaatcagagtactcag

SEQ ID NO: 15962 - DNA, 21 bp, synthetic construct
  misc_feature 1..21: note = Description of Artificial Sequence: Synthetic oligonucleotide
  source 1..21: mol_type = other DNA
gattcgcattcgaagactaat

SEQ ID NO: 15963 - DNA, 21 bp, synthetic construct
  misc_feature 1..21: note = Description of Artificial Sequence: Synthetic oligonucleotide
  source 1..21: mol_type = other DNA
caggatggtacgaagacttcg

SEQ ID NO: 15964 - DNA, 21 bp, synthetic construct
  misc_feature 1..21: note = Description of Artificial Sequence: Synthetic oligonucleotide
  source 1..21: mol_type = other DNA
gatcagtctaagcaggggtcg

SEQ ID NO: 15965 - DNA, 21 bp, synthetic construct
  misc_feature 1..21: note = Description of Artificial Sequence: Synthetic oligonucleotide
  source 1..21: mol_type = other DNA
gtcggcagcaccacccccacc

SEQ ID NO: 15966 - DNA, 21 bp, synthetic construct
  misc_feature 1..21: note = Description of Artificial Sequence: Synthetic oligonucleotide
  source 1..21: mol_type = other DNA
actcctggggggtctcaggcg

SEQ ID NO: 15967 - DNA, 21 bp, synthetic construct
  misc_feature 1..21: note = Description of Artificial Sequence: Synthetic oligonucleotide
  source 1..21: mol_type = other DNA
agcggcggcaccgccagcgcc

SEQ ID NO: 15968 - DNA, 21 bp, synthetic construct
  misc_feature 1..21: note = Description of Artificial Sequence: Synthetic oligonucleotide
  source 1..21: mol_type = other DNA
aatggtttggataagagtcag

SEQ ID NO: 15969 - DNA, 21 bp, synthetic construct
  misc_feature 1..21: note = Description of Artificial Sequence: Synthetic oligonucleotide
  source 1..21: mol_type = other DNA
gctggggggggtagtaatacg

SEQ ID NO: 15970 - DNA, 21 bp, synthetic construct
  misc_feature 1..21: note = Description of Artificial Sequence: Synthetic oligonucleotide
  source 1..21: mol_type = other DNA
gttaagggggctgctagttct

SEQ ID NO: 15971 - DNA, 21 bp, synthetic construct
  misc_feature 1..21: note = Description of Artificial Sequence: Synthetic oligonucleotide
  source 1..21: mol_type = other DNA
gaccaaaccgacagaaaccaa

SEQ ID NO: 15972 - DNA, 21 bp, synthetic construct
  misc_feature 1..21: note = Description of Artificial Sequence: Synthetic oligonucleotide
  source 1..21: mol_type = other DNA
tctcttagtcagtcgagtaaa

SEQ ID NO: 15973 - DNA, 21 bp, synthetic construct
  misc_feature 1..21: note = Description of Artificial Sequence: Synthetic oligonucleotide
  source 1..21: mol_type = other DNA
atgggcaacgaaagagccaac

SEQ ID NO: 15974 - DNA, 21 bp, synthetic construct
  misc_feature 1..21: note = Description of Artificial Sequence: Synthetic oligonucleotide
  source 1..21: mol_type = other DNA
cagagtggtgctgataagtct

SEQ ID NO: 15975 - DNA, 21 bp, synthetic construct
  misc_feature 1..21: note = Description of Artificial Sequence: Synthetic oligonucleotide
  source 1..21: mol_type = other DNA
cacggcggccccaccagcatc

SEQ ID NO: 15976 - DNA, 21 bp, synthetic construct
  misc_feature 1..21: note = Description of Artificial Sequence: Synthetic oligonucleotide
  source 1..21: mol_type = other DNA
gatggtaatagtgcgaatcat

SEQ ID NO: 15977 - DNA, 21 bp, synthetic construct
  misc_feature 1..21: note = Description of Artificial Sequence: Synthetic oligonucleotide
  source 1..21: mol_type = other DNA
gattcgaatagtaagcttact

SEQ ID NO: 15978 - DNA, 21 bp, synthetic construct
  misc_feature 1..21: note = Description of Artificial Sequence: Synthetic oligonucleotide
  source 1..21: mol_type = other DNA
gacaccccccaaagccaaaaa

SEQ ID NO: 15979 - DNA, 21 bp, synthetic construct
  misc_feature 1..21: note = Description of Artificial Sequence: Synthetic oligonucleotide
  source 1..21: mol_type = other DNA
ggcgccgaaaccgacaaaaga

SEQ ID NO: 15980 - DNA, 21 bp, synthetic construct
  misc_feature 1..21: note = Description of Artificial Sequence: Synthetic oligonucleotide
  source 1..21: mol_type = other DNA
caaagcgccgccagcaaccac

SEQ ID NO: 15981 - DNA, 21 bp, synthetic construct
  misc_feature 1..21: note = Description of Artificial Sequence: Synthetic oligonucleotide
  source 1..21: mol_type = other DNA
agcaccaaagccaccaacgaa

SEQ ID NO: 15982 - DNA, 21 bp, synthetic construct
  misc_feature 1..21: note = Description of Artificial Sequence: Synthetic oligonucleotide
  source 1..21: mol_type = other DNA
ggtcagtcgactgctccgaat

SEQ ID NO: 15983 - DNA, 21 bp, synthetic construct
  misc_feature 1..21: note = Description of Artificial Sequence: Synthetic oligonucleotide
  source 1..21: mol_type = other DNA
agaaccggcaacgtcagcagc

SEQ ID NO: 15984 - DNA, 21 bp, synthetic construct
  misc_feature 1..21: note = Description of Artificial Sequence: Synthetic oligonucleotide
  source 1..21: mol_type = other DNA
gatgggaagtcgggtgctggt

SEQ ID NO: 15985 - DNA, 21 bp, synthetic construct
  misc_feature 1..21: note = Description of Artificial Sequence: Synthetic oligonucleotide
  source 1..21: mol_type = other DNA
gagcaggctaaggttaatgtg

SEQ ID NO: 15986 - DNA, 21 bp, synthetic construct
  misc_feature 1..21: note = Description of Artificial Sequence: Synthetic oligonucleotide
  source 1..21: mol_type = other DNA
gacaacagaagcagcaacagc

SEQ ID NO: 15987 - DNA, 21 bp, synthetic construct
  misc_feature 1..21: note = Description of Artificial Sequence: Synthetic oligonucleotide
  source 1..21: mol_type = other DNA
aacaccggcagcggcaccagc

SEQ ID NO: 15988 - DNA, 21 bp, synthetic construct
  misc_feature 1..21: note = Description of Artificial Sequence: Synthetic oligonucleotide
  source 1..21: mol_type = other DNA
cagcaggagtcccataagttg

SEQ ID NO: 15989 - DNA, 21 bp, synthetic construct
  misc_feature 1..21: note = Description of Artificial Sequence: Synthetic oligonucleotide
  source 1..21: mol_type = other DNA
gacagcaccaaaaccaccagc

SEQ ID NO: 15990 - DNA, 21 bp, synthetic construct
  misc_feature 1..21: note = Description of Artificial Sequence: Synthetic oligonucleotide
  source 1..21: mol_type = other DNA
gcccccgtcagccccgtcaaa

SEQ ID NO: 15991 - DNA, 21 bp, synthetic construct
  misc_feature 1..21: note = Description of Artificial Sequence: Synthetic oligonucleotide
  source 1..21: mol_type = other DNA
acgagtggtgttagtccggcg

SEQ ID NO: 15992 - DNA, 21 bp, synthetic construct
  misc_feature 1..21: note = Description of Artificial Sequence: Synthetic oligonucleotide
  source 1..21: mol_type = other DNA
ggcagcgacaaactccacagc

SEQ ID NO: 15993 - DNA, 21 bp, synthetic construct
  misc_feature 1..21: note = Description of Artificial Sequence: Synthetic oligonucleotide
  source 1..21: mol_type = other DNA
gatcagttgtcgaagtcgcag

SEQ ID NO: 15994 - DNA, 21 bp, synthetic construct
  misc_feature 1..21: note = Description of Artificial Sequence: Synthetic oligonucleotide
  source 1..21: mol_type = other DNA
agccacagcgacaaaaccagc

SEQ ID NO: 15995 - DNA, 21 bp, synthetic construct
  misc_feature 1..21: note = Description of Artificial Sequence: Synthetic oligonucleotide
  source 1..21: mol_type = other DNA
agcgtcgaaagcaaaagcacc

SEQ ID NO: 15996 - DNA, 21 bp, synthetic construct
  misc_feature 1..21: note = Description of Artificial Sequence: Synthetic oligonucleotide
  source 1..21: mol_type = other DNA
gcgacgagtggtactcaggct

SEQ ID NO: 15997 - DNA, 21 bp, synthetic construct
  misc_feature 1..21: note = Description of Artificial Sequence: Synthetic oligonucleotide
  source 1..21: mol_type = other DNA
gtcaacaccagcgccacccaa

SEQ ID NO: 15998 - DNA, 21 bp, synthetic construct
  misc_feature 1..21: note = Description of Artificial Sequence: Synthetic oligonucleotide
  source 1..21: mol_type = other DNA
ggtaatgcggggggtcagaat

SEQ ID NO: 15999 - DNA, 21 bp, synthetic construct
  misc_feature 1..21: note = Description of Artificial Sequence: Synthetic oligonucleotide
  source 1..21: mol_type = other DNA
agcgacggcaaaggcagcctc

SEQ ID NO: 16000 - DNA, 21 bp, synthetic construct
  misc_feature 1..21: note = Description of Artificial Sequence: Synthetic oligonucleotide
  source 1..21: mol_type = other DNA
accggcaacgaaaacaacaga

SEQ ID NO: 16001 - DNA, 21 bp, synthetic construct
  misc_feature 1..21: note = Description of Artificial Sequence: Synthetic oligonucleotide
  source 1..21: mol_type = other DNA
gccgccaacgaaagaagcagc

SEQ ID NO: 16002 - DNA, 21 bp, synthetic construct
  misc_feature 1..21: note = Description of Artificial Sequence: Synthetic oligonucleotide
  source 1..21: mol_type = other DNA
atgcccagcaccaaagaaggc

SEQ ID NO: 16003 - DNA, 21 bp, synthetic construct
  misc_feature 1..21: note = Description of Artificial Sequence: Synthetic oligonucleotide
  source 1..21: mol_type = other DNA
cagcaggggtcgagtgggagt

SEQ ID NO: 16004 - DNA, 21 bp, synthetic construct
  misc_feature 1..21: note = Description of Artificial Sequence: Synthetic oligonucleotide
  source 1..21: mol_type = other DNA
agcctcaacagccccaaaaac

SEQ ID NO: 16005 - DNA, 21 bp, synthetic construct
  misc_feature 1..21: note = Description of Artificial Sequence: Synthetic oligonucleotide
  source 1..21: mol_type = other DNA
caaaccggcaccggcggcgcc

SEQ ID NO: 16006 - DNA, 21 bp, synthetic construct
  misc_feature 1..21: note = Description of Artificial Sequence: Synthetic oligonucleotide
  source 1..21: mol_type = other DNA
tcgggggggtcttcggcttcg

SEQ ID NO: 16007 - DNA, 21 bp, synthetic construct
  misc_feature 1..21: note = Description of Artificial Sequence: Synthetic oligonucleotide
  source 1..21: mol_type = other DNA
ggcagcgacaccaaagtcctc

SEQ ID NO: 16008 - DNA, 21 bp, synthetic construct
  misc_feature 1..21: note = Description of Artificial Sequence: Synthetic oligonucleotide
  source 1..21: mol_type = other DNA
ggtactgcggcgtctaatagt

SEQ ID NO: 16009 - DNA, 21 bp, synthetic construct
  misc_feature 1..21: note = Description of Artificial Sequence: Synthetic oligonucleotide
  source 1..21: mol_type = other DNA
gaaggcaccagccacaccaaa

SEQ ID NO: 16010 - DNA, 21 bp, synthetic construct
  misc_feature 1..21: note = Description of Artificial Sequence: Synthetic oligonucleotide
  source 1..21: mol_type = other DNA
ggcaccagcagcacccccctc

SEQ ID NO: 16011 - DNA, 21 bp, synthetic construct
  misc_feature 1..21: note = Description of Artificial Sequence: Synthetic oligonucleotide
  source 1..21: mol_type = other DNA
gggacgggtcgtgatcagaat

SEQ ID NO: 16012 - DNA, 21 bp, synthetic construct
  misc_feature 1..21: note = Description of Artificial Sequence: Synthetic oligonucleotide
  source 1..21: mol_type = other DNA
gacgtcagcgccagcaacaga

SEQ ID NO: 16013 - DNA, 21 bp, synthetic construct
  misc_feature 1..21: note = Description of Artificial Sequence: Synthetic oligonucleotide
  source 1..21: mol_type = other DNA
aatgaggctcggactccgcag

SEQ ID NO: 16014 - DNA, 21 bp, synthetic construct
  misc_feature 1..21: note = Description of Artificial Sequence: Synthetic oligonucleotide
  source 1..21: mol_type = other DNA
gctcaggttaaggctggtgcg

SEQ ID NO: 16015 - DNA, 21 bp, synthetic construct
  misc_feature 1..21: note = Description of Artificial Sequence: Synthetic oligonucleotide
  source 1..21: mol_type = other DNA
actcagggggctgctgcgtct

SEQ ID NO: 16016 - DNA, 21 bp, synthetic construct
  misc_feature 1..21: note = Description of Artificial Sequence: Synthetic oligonucleotide
  source 1..21: mol_type = other DNA
gacgtcaccggcggcaaaggc

SEQ ID NO: 16017 - DNA, 21 bp, synthetic construct
  misc_feature 1..21: note = Description of Artificial Sequence: Synthetic oligonucleotide
  source 1..21: mol_type = other DNA
ggtaatattgatggtaagaag

SEQ ID NO: 16018 - DNA, 21 bp, synthetic construct
  misc_feature 1..21: note = Description of Artificial Sequence: Synthetic oligonucleotide
  source 1..21: mol_type = other DNA
cacaacggcgcccccagcagc

SEQ ID NO: 16019 - DNA, 21 bp, synthetic construct
  misc_feature 1..21: note = Description of Artificial Sequence: Synthetic oligonucleotide
  source 1..21: mol_type = other DNA
atgcatgatgctaagagtggg

SEQ ID NO: 16020 - DNA, 21 bp, synthetic construct
  misc_feature 1..21: note = Description of Artificial Sequence: Synthetic oligonucleotide
  source 1..21: mol_type = other DNA
gatggtgcgggtgcgagtcat

SEQ ID NO: 16021 - DNA, 21 bp, synthetic construct
  misc_feature 1..21: note = Description of Artificial Sequence: Synthetic oligonucleotide
  source 1..21: mol_type = other DNA
gttacggatgctaagagttct

SEQ ID NO: 16022 - DNA, 21 bp, synthetic construct
  misc_feature 1..21: note = Description of Artificial Sequence: Synthetic oligonucleotide
  source 1..21: mol_type = other DNA
gaaagccaaagagccggcggc

SEQ ID NO: 16023 - DNA, 21 bp, synthetic construct
  misc_feature 1..21: note = Description of Artificial Sequence: Synthetic oligonucleotide
  source 1..21: mol_type = other DNA
gaaagcaacaacggcggcaaa

SEQ ID NO: 16024 - DNA, 21 bp, synthetic construct
  misc_feature 1..21: note = Description of Artificial Sequence: Synthetic oligonucleotide
  source 1..21: mol_type = other DNA
gacgccggcaccaaagccatg

SEQ ID NO: 16025 - DNA, 21 bp, synthetic construct
  misc_feature 1..21: note = Description of Artificial Sequence: Synthetic oligonucleotide
  source 1..21: mol_type = other DNA
ggcgaaggccaaagcaacaga

SEQ ID NO: 16026 - DNA, 21 bp, synthetic construct
  misc_feature 1..21: note = Description of Artificial Sequence: Synthetic oligonucleotide
  source 1..21: mol_type = other DNA
tctccgggtacttcgcagggg

SEQ ID NO: 16027 - DNA, 21 bp, synthetic construct
  misc_feature 1..21: note = Description of Artificial Sequence: Synthetic oligonucleotide
  source 1..21: mol_type = other DNA
agcggcaacagcagcctcagc

SEQ ID NO: 16028 - DNA, 21 bp, synthetic construct
  misc_feature 1..21: note = Description of Artificial Sequence: Synthetic oligonucleotide
  source 1..21: mol_type = other DNA
agcagaaccaccgacaccacc

SEQ ID NO: 16029 - DNA, 21 bp, synthetic construct
  misc_feature 1..21: note = Description of Artificial Sequence: Synthetic oligonucleotide
  source 1..21: mol_type = other DNA
gaggggaagtctgcggcgctt

SEQ ID NO: 16030 - DNA, 21 bp, synthetic construct
  misc_feature 1..21: note = Description of Artificial Sequence: Synthetic oligonucleotide
  source 1..21: mol_type = other DNA
ggcggcgccgccaacagcggc

SEQ ID NO: 16031 - DNA, 21 bp, synthetic construct
  misc_feature 1..21: note = Description of Artificial Sequence: Synthetic oligonucleotide
  source 1..21: mol_type = other DNA
agcagagaaggcagcaacgtc

SEQ ID NO: 16032 - DNA, 21 bp, synthetic construct
  misc_feature 1..21: note = Description of Artificial Sequence: Synthetic oligonucleotide
  source 1..21: mol_type = other DNA
ggttctacgtcgcagcctgcg

SEQ ID NO: 16033 - DNA, 21 bp, synthetic construct
  misc_feature 1..21: note = Description of Artificial Sequence: Synthetic oligonucleotide
  source 1..21: mol_type = other DNA
aacagcgaaaccaaagccagc

SEQ ID NO: 16034 - DNA, 21 bp, synthetic construct
  misc_feature 1..21: note = Description of Artificial Sequence: Synthetic oligonucleotide
  source 1..21: mol_type = other DNA
agtaagacgcagactagtatt

SEQ ID NO: 16035 - DNA, 21 bp, synthetic construct
  misc_feature 1..21: note = Description of Artificial Sequence: Synthetic oligonucleotide
  source 1..21: mol_type = other DNA
ctgaatggtaagacgaatagt

SEQ ID NO: 16036 - DNA, 21 bp, synthetic construct
  misc_feature 1..21: note = Description of Artificial Sequence: Synthetic oligonucleotide
  source 1..21: mol_type = other DNA
aacgtcggcaaagacagagcc

SEQ ID NO: 16037 - DNA, 21 bp, synthetic construct
  misc_feature 1..21: note = Description of Artificial Sequence: Synthetic oligonucleotide
  source 1..21: mol_type = other DNA
aatacggttggtcagaatact

SEQ ID NO: 16038 - DNA, 21 bp, synthetic construct
  misc_feature 1..21: note = Description of Artificial Sequence: Synthetic oligonucleotide
  source 1..21: mol_type = other DNA
caagccagccaaagcgccaaa

SEQ ID NO: 16039 - DNA, 21 bp, synthetic construct
  misc_feature 1..21: note = Description of Artificial Sequence: Synthetic oligonucleotide
  source 1..21: mol_type = other DNA
gagcataatagtgagtctaag

SEQ ID NO: 16040 - DNA, 21 bp, synthetic construct
  misc_feature 1..21: note = Description of Artificial Sequence: Synthetic oligonucleotide
  source 1..21: mol_type = other DNA
aacaccaacagccccagcgcc

SEQ ID NO: 16041 - DNA, 21 bp, synthetic construct
  misc_feature 1..21: note = Description of Artificial Sequence: Synthetic oligonucleotide
  source 1..21: mol_type = other DNA
aacagcggcccccccaccggc

SEQ ID NO: 16042 - DNA, 21 bp, synthetic construct
  misc_feature 1..21: note = Description of Artificial Sequence: Synthetic oligonucleotide
  source 1..21: mol_type = other DNA
aacggcaaagccagccccggc

SEQ ID NO: 16043 - DNA, 21 bp, synthetic construct
  misc_feature 1..21: note = Description of Artificial Sequence: Synthetic oligonucleotide
  source 1..21: mol_type = other DNA
aatgggtcggcgaagccgagt

SEQ ID NO: 16044 - DNA, 21 bp, synthetic construct
  misc_feature 1..21: note = Description of Artificial Sequence: Synthetic oligonucleotide
  source 1..21: mol_type = other DNA
accggccacggcagcgtcgcc

SEQ ID NO: 16045 - DNA, 21 bp, synthetic construct
  misc_feature 1..21: note = Description of Artificial Sequence: Synthetic oligonucleotide
  source 1..21: mol_type = other DNA
acgcgtgattctagtacgact

SEQ ID NO: 16046 - DNA, 21 bp, synthetic construct
  misc_feature 1..21: note = Description of Artificial Sequence: Synthetic oligonucleotide
  source 1..21: mol_type = other DNA
agcagagacgccggccaccac

SEQ ID NO: 16047 - DNA, 21 bp, synthetic construct
  misc_feature 1..21: note = Description of Artificial Sequence: Synthetic oligonucleotide
  source 1..21: mol_type = other DNA
agcggcaaaaacgaagccggc

SEQ ID NO: 16048 - DNA, 21 bp, synthetic construct
  misc_feature 1..21: note = Description of Artificial Sequence: Synthetic oligonucleotide
  source 1..21: mol_type = other DNA
atcagcgacaaagcccccggc

SEQ ID NO: 16049 - DNA, 21 bp, synthetic construct
  misc_feature 1..21: note = Description of Artificial Sequence: Synthetic oligonucleotide
  source 1..21: mol_type = other DNA
caaaccggcggcagcggcagc

SEQ ID NO: 16050 - DNA, 21 bp, synthetic construct
  misc_feature 1..21: note = Description of Artificial Sequence: Synthetic oligonucleotide
  source 1..21: mol_type = other DNA
caaggcggcagcagcagccaa

SEQ ID NO: 16051 - DNA, 21 bp, synthetic construct
  misc_feature 1..21: note = Description of Artificial Sequence: Synthetic oligonucleotide
  source 1..21: mol_type = other DNA
gaaagcagcaacaaaggcggc

SEQ ID NO: 16052 - DNA, 21 bp, synthetic construct
  misc_feature 1..21: note = Description of Artificial Sequence: Synthetic oligonucleotide
  source 1..21: mol_type = other DNA
gaagccagcgaaagacccggc

SEQ ID NO: 16053 - DNA, 21 bp, synthetic construct
  misc_feature 1..21: note = Description of Artificial Sequence: Synthetic oligonucleotide
  source 1..21: mol_type = other DNA
gacagcaaagtcagcacccaa

SEQ ID NO: 16054 - DNA, 21 bp, synthetic construct
  misc_feature 1..21: note = Description of Artificial Sequence: Synthetic oligonucleotide
  source 1..21: mol_type = other DNA
ggcaccggcaacacccccctc

SEQ ID NO: 16055 - DNA, 21 bp, synthetic construct
  misc_feature 1..21: note = Description of Artificial Sequence: Synthetic oligonucleotide
  source 1..21: mol_type = other DNA
ggcagccccgccaccaccggc

SEQ ID NO: 16056 - DNA, 21 bp, synthetic construct
  misc_feature 1..21: note = Description of Artificial Sequence: Synthetic oligonucleotide
  source 1..21: mol_type = other DNA
ggcatcaccccccccggccaa

SEQ ID NO: 16057 - DNA, 21 bp, synthetic construct
  misc_feature 1..21: note = Description of Artificial Sequence: Synthetic oligonucleotide
  source 1..21: mol_type = other DNA
gtccacggcgacaaaaccggc

SEQ ID NO: 16058 - DNA, 21 bp, synthetic construct
  misc_feature 1..21: note = Description of Artificial Sequence: Synthetic oligonucleotide
  source 1..21: mol_type = other DNA
gtcggcacccccaccagcgtc

SEQ ID NO: 16059 - DNA, 21 bp, synthetic construct
  misc_feature 1..21: note = Description of Artificial Sequence: Synthetic oligonucleotide
  source 1..21: mol_type = other DNA
agcagcaccaccaccagcagc

SEQ ID NO: 16060 - DNA, 21 bp, synthetic construct
  misc_feature 1..21: note = Description of Artificial Sequence: Synthetic oligonucleotide
  source 1..21: mol_type = other DNA
caggggacggggaatgatcgg

SEQ ID NO: 16061 - DNA, 21 bp, synthetic construct
  misc_feature 1..21: note = Description of Artificial Sequence: Synthetic oligonucleotide
  source 1..21: mol_type = other DNA
ggtattaaggagtctaagcag

SEQ ID NO: 16062 - DNA, 21 bp, synthetic construct
  misc_feature 1..21: note = Description of Artificial Sequence: Synthetic oligonucleotide
  source 1..21: mol_type = other DNA
tctccgactacgaagaatgtt

SEQ ID NO: 16063 - DNA, 21 bp, synthetic construct
  misc_feature 1..21: note = Description of Artificial Sequence: Synthetic oligonucleotide
  source 1..21: mol_type = other DNA
accggcagcaacgcccccgcc

SEQ ID NO: 16064 - DNA, 21 bp, synthetic construct
  misc_feature 1..21: note = Description of Artificial Sequence: Synthetic oligonucleotide
  source 1..21: mol_type = other DNA
aacagcagcggcacccccacc

SEQ ID NO: 16065 - DNA, 21 bp, synthetic construct
  misc_feature 1..21: note = Description of Artificial Sequence: Synthetic oligonucleotide
  source 1..21: mol_type = other DNA
gtcaacaacagcggcagccac

SEQ ID NO: 16066 - DNA, 21 bp, synthetic construct
  misc_feature 1..21: note = Description of Artificial Sequence: Synthetic oligonucleotide
  source 1..21: mol_type = other DNA
agtgttcatgcgacgccgacg

SEQ ID NO: 16067 - DNA, 21 bp, synthetic construct
  misc_feature 1..21: note = Description of Artificial Sequence: Synthetic oligonucleotide
  source 1..21: mol_type = other DNA
ggcggcgccaaccccggcacc

SEQ ID NO: 16068 - DNA, 21 bp, synthetic construct
  misc_feature 1..21: note = Description of Artificial Sequence: Synthetic oligonucleotide
  source 1..21: mol_type = other DNA
cagagggcggatcatagtagt

SEQ ID NO: 16069 - DNA, 21 bp, synthetic construct
  misc_feature 1..21: note = Description of Artificial Sequence: Synthetic oligonucleotide
  source 1..21: mol_type = other DNA
gaaaaccaaagccccaacaaa

SEQ ID NO: 16070 - DNA, 21 bp, synthetic construct
  misc_feature 1..21: note = Description of Artificial Sequence: Synthetic oligonucleotide
  source 1..21: mol_type = other DNA
agcaccggcaacagcaacgcc

SEQ ID NO: 16071 - DNA, 21 bp, synthetic construct
  misc_feature 1..21: note = Description of Artificial Sequence: Synthetic oligonucleotide
  source 1..21: mol_type = other DNA
aacgccggcgccaacagcatc

SEQ ID NO: 16072 - DNA, 21 bp, synthetic construct
  misc_feature 1..21: note = Description of Artificial Sequence: Synthetic oligonucleotide
  source 1..21: mol_type = other DNA
ggtgctcttactgatcagaag

SEQ ID NO: 16073 - DNA, 21 bp, synthetic construct
  misc_feature 1..21: note = Description of Artificial Sequence: Synthetic oligonucleotide
  source 1..21: mol_type = other DNA
agtagtgcttcgcagccgtcg

SEQ ID NO: 16074 - DNA, 21 bp, synthetic construct
  misc_feature 1..21: note = Description of Artificial Sequence: Synthetic oligonucleotide
  source 1..21: mol_type = other DNA
aacggcagcacccccagccaa

SEQ ID NO: 16075 - DNA, 21 bp, synthetic construct
  misc_feature 1..21: note = Description of Artificial Sequence: Synthetic oligonucleotide
  source 1..21: mol_type = other DNA
tcgacgattagtgctgggaag

SEQ ID NO: 16076 - DNA, 21 bp, synthetic construct
  misc_feature 1..21: note = Description of Artificial Sequence: Synthetic oligonucleotide
  source 1..21: mol_type = other DNA
cttcctaatcctgggagtggg

SEQ ID NO: 16077 - DNA, 21 bp, synthetic construct
  misc_feature 1..21: note = Description of Artificial Sequence: Synthetic oligonucleotide
  source 1..21: mol_type = other DNA
catactggtacttcgaatagt

SEQ ID NO: 16078 - DNA, 21 bp, synthetic construct
  misc_feature 1..21: note = Description of Artificial Sequence: Synthetic oligonucleotide
  source 1..21: mol_type = other DNA
ggcagcggcagcaaagtcgtc

SEQ ID NO: 16079 - DNA, 21 bp, synthetic construct
  misc_feature 1..21: note = Description of Artificial Sequence: Synthetic oligonucleotide
  source 1..21: mol_type = other DNA
accaaagacagcagcccccaa

SEQ ID NO: 16080 - DNA, 21 bp, synthetic construct
  misc_feature 1..21: note = Description of Artificial Sequence: Synthetic oligonucleotide
  source 1..21: mol_type = other DNA
ggcaacagcgacagaagcagc

SEQ ID NO: 16081 - DNA, 21 bp, synthetic construct
  misc_feature 1..21: note = Description of Artificial Sequence: Synthetic oligonucleotide
  source 1..21: mol_type = other DNA
caaagcggcgacagcatcaaa

SEQ ID NO: 16082 - DNA, 21 bp, synthetic construct
  misc_feature 1..21: note = Description of Artificial Sequence: Synthetic oligonucleotide
  source 1..21: mol_type = other DNA
accagcgccaacgccgccacc

SEQ ID NO: 16083 - DNA, 21 bp, synthetic construct
  misc_feature 1..21: note = Description of Artificial Sequence: Synthetic oligonucleotide
  source 1..21: mol_type = other DNA
caaggcgacaaaaccctcgtc

SEQ ID NO: 16084 - DNA, 21 bp, synthetic construct
  misc_feature 1..21: note = Description of Artificial Sequence: Synthetic oligonucleotide
  source 1..21: mol_type = other DNA
ggtatgagtgataagccgatt

SEQ ID NO: 16085 - DNA, 21 bp, synthetic construct
  misc_feature 1..21: note = Description of Artificial Sequence: Synthetic oligonucleotide
  source 1..21: mol_type = other DNA
ggccccaacaccgacgtcaaa

SEQ ID NO: 16086 - DNA, 21 bp, synthetic construct
  misc_feature 1..21: note = Description of Artificial Sequence: Synthetic oligonucleotide
  source 1..21: mol_type = other DNA
accagcgacagcagcaaaggc

SEQ ID NO: 16087 - DNA, 21 bp, synthetic construct
  misc_feature 1..21: note = Description of Artificial Sequence: Synthetic oligonucleotide
  source 1..21: mol_type = other DNA
ctcagcggcaacaaagacgcc

SEQ ID NO: 16088 - DNA, 21 bp, synthetic construct
  misc_feature 1..21: note = Description of Artificial Sequence: Synthetic oligonucleotide
  source 1..21: mol_type = other DNA
ctcggcgccggccaagccctc

SEQ ID NO: 16089 - DNA, 21 bp, synthetic construct
  misc_feature 1..21: note = Description of Artificial Sequence: Synthetic oligonucleotide
  source 1..21: mol_type = other DNA
tcgcagctggagcgtagtgcg

SEQ ID NO: 16090 - DNA, 21 bp, synthetic construct
  misc_feature 1..21: note = Description of Artificial Sequence: Synthetic oligonucleotide
  source 1..21: mol_type = other DNA
cacaacgacaccaaagccacc

SEQ ID NO: 16091 - DNA, 21 bp, synthetic construct
  misc_feature 1..21: note = Description of Artificial Sequence: Synthetic oligonucleotide
  source 1..21: mol_type = other DNA
accggcgaaacccacaaagcc

SEQ ID NO: 16092 - DNA, 21 bp, synthetic construct
  misc_feature 1..21: note = Description of Artificial Sequence: Synthetic oligonucleotide
  source 1..21: mol_type = other DNA
ggcgccgaaaaaaacaacggc

SEQ ID NO: 16093 - DNA, 21 bp, synthetic construct
  misc_feature 1..21: note = Description of Artificial Sequence: Synthetic oligonucleotide
  source 1..21: mol_type = other DNA
gggacgggtaaggatagtttg

SEQ ID NO: 16094 - DNA, 21 bp, synthetic construct
  misc_feature 1..21: note = Description of Artificial Sequence: Synthetic oligonucleotide
  source 1..21: mol_type = other DNA
aaaaccggcaccggcaccgaa

SEQ ID NO: 16095 - DNA, 21 bp, synthetic construct
  misc_feature 1..21: note = Description of Artificial Sequence: Synthetic oligonucleotide
  source 1..21: mol_type = other DNA
ggcggcgccaacagccccagc

SEQ ID NO: 16096 - DNA, 21 bp, synthetic construct
  misc_feature 1..21: note = Description of Artificial Sequence: Synthetic oligonucleotide
  source 1..21: mol_type = other DNA
gacagcaccgacaaaagaacc

SEQ ID NO: 16097 - DNA, 21 bp, synthetic construct
  misc_feature 1..21: note = Description of Artificial Sequence: Synthetic oligonucleotide
  source 1..21: mol_type = other DNA
atttcggataagcagtctgtt

SEQ ID NO: 16098 - DNA, 21 bp, synthetic construct
  misc_feature 1..21: note = Description of Artificial Sequence: Synthetic oligonucleotide
  source 1..21: mol_type = other DNA
gaactcaccggcaccaaagcc

SEQ ID NO: 16099 - DNA, 21 bp, synthetic construct
  misc_feature 1..21: note = Description of Artificial Sequence: Synthetic oligonucleotide
  source 1..21: mol_type = other DNA
ggggcgcaggataagagggag

SEQ ID NO: 16100 - DNA, 21 bp, synthetic construct
  misc_feature 1..21: note = Description of Artificial Sequence: Synthetic oligonucleotide
  source 1..21: mol_type = other DNA
gaaacccacaaagccagcaac

SEQ ID NO: 16101 - DNA, 21 bp, synthetic construct
  misc_feature 1..21: note = Description of Artificial Sequence: Synthetic oligonucleotide
  source 1..21: mol_type = other DNA
caggggactgatcagcatgcg

SEQ ID NO: 16102 - DNA, 21 bp, synthetic construct
  misc_feature 1..21: note = Description of Artificial Sequence: Synthetic oligonucleotide
  source 1..21: mol_type = other DNA
agcggcaccaacaacaacgtc

SEQ ID NO: 16103 - DNA, 21 bp, synthetic construct
  misc_feature 1..21: note = Description of Artificial Sequence: Synthetic oligonucleotide
  source 1..21: mol_type = other DNA
aacctcggcgcccaacacagc

SEQ ID NO: 16104 - DNA, 21 bp, synthetic construct
  misc_feature 1..21: note = Description of Artificial Sequence: Synthetic oligonucleotide
  source 1..21: mol_type = other DNA
gatggtaaggctccttctctt

SEQ ID NO: 16105 - DNA, 21 bp, synthetic construct
  misc_feature 1..21: note = Description of Artificial Sequence: Synthetic oligonucleotide
  source 1..21: mol_type = other DNA
gtcgccggcaccaaaagcgaa

SEQ ID NO: 16106 - DNA, 21 bp, synthetic construct
  misc_feature 1..21: note = Description of Artificial Sequence: Synthetic oligonucleotide
  source 1..21: mol_type = other DNA
agtcctagtaatgtgtcgaag

SEQ ID NO: 16107 - DNA, 21 bp, synthetic construct
  misc_feature 1..21: note = Description of Artificial Sequence: Synthetic oligonucleotide
  source 1..21: mol_type = other DNA
agcgccaccggcaacggcggc

SEQ ID NO: 16108 - DNA, 21 bp, synthetic construct
  misc_feature 1..21: note = Description of Artificial Sequence: Synthetic oligonucleotide
  source 1..21: mol_type = other DNA
tcgggtggtgctgggccggct

SEQ ID NO: 16109 - DNA, 21 bp, synthetic construct
  misc_feature 1..21: note = Description of Artificial Sequence: Synthetic oligonucleotide
  source 1..21: mol_type = other DNA
aacggcggccaaagcaaaacc

SEQ ID NO: 16110 - DNA, 21 bp, synthetic construct
  misc_feature 1..21: note = Description of Artificial Sequence: Synthetic oligonucleotide
  source 1..21: mol_type = other DNA
gttcagggtagtaatcctaat

SEQ ID NO: 16111 - DNA, 21 bp, synthetic construct
  misc_feature 1..21: note = Description of Artificial Sequence: Synthetic oligonucleotide
  source 1..21: mol_type = other DNA
caaggcagccaagcccaagtc

SEQ ID NO: 16112 - DNA, 21 bp, synthetic construct
  misc_feature 1..21: note = Description of Artificial Sequence: Synthetic oligonucleotide
  source 1..21: mol_type = other DNA
agcggcaacagccaaatgaac

SEQ ID NO: 16113 - DNA, 21 bp, synthetic construct
  misc_feature 1..21: note = Description of Artificial Sequence: Synthetic oligonucleotide
  source 1..21: mol_type = other DNA
gaccaaagcagcaaagccgtc

SEQ ID NO: 16114 - DNA, 21 bp, synthetic construct
  misc_feature 1..21: note = Description of Artificial Sequence: Synthetic oligonucleotide
  source 1..21: mol_type = other DNA
agaaccggcaacaccagcgtc

SEQ ID NO: 16115 - DNA, 21 bp, synthetic construct
  misc_feature 1..21: note = Description of Artificial Sequence: Synthetic oligonucleotide
  source 1..21: mol_type = other DNA
gccagaagcgaaagcaccggc

SEQ ID NO: 16116 - DNA, 21 bp, synthetic construct
  misc_feature 1..21: note = Description of Artificial Sequence: Synthetic oligonucleotide
  source 1..21: mol_type = other DNA
gccagcagcaaagaaaacaga

SEQ ID NO: 16117 - DNA, 21 bp, synthetic construct
  misc_feature 1..21: note = Description of Artificial Sequence: Synthetic oligonucleotide
  source 1..21: mol_type = other DNA
tcgaatcagaatgctaaggcg

SEQ ID NO: 16118 - DNA, 21 bp, synthetic construct
  misc_feature 1..21: note = Description of Artificial Sequence: Synthetic oligonucleotide
  source 1..21: mol_type = other DNA
ctgagtgggagtacttcgaat

SEQ ID NO: 16119 - DNA, 21 bp, synthetic construct
  misc_feature 1..21: note = Description of Artificial Sequence: Synthetic oligonucleotide
  source 1..21: mol_type = other DNA
ggtactaatacgaattctggg

SEQ ID NO: 16120 - DNA, 21 bp, synthetic construct
  misc_feature 1..21: note = Description of Artificial Sequence: Synthetic oligonucleotide
  source 1..21: mol_type = other DNA
ggcaccggcggcagcagcagc

SEQ ID NO: 16121 - DNA, 21 bp, synthetic construct
  misc_feature 1..21: note = Description of Artificial Sequence: Synthetic oligonucleotide
  source 1..21: mol_type = other DNA
gagtctgggggtaagcctggt

SEQ ID NO: 16122 - DNA, 21 bp, synthetic construct
  misc_feature 1..21: note = Description of Artificial Sequence: Synthetic oligonucleotide
  source 1..21: mol_type = other DNA
gccaccggcgccagcaacaac

SEQ ID NO: 16123 - DNA, 21 bp, synthetic construct
  misc_feature 1..21: note = Description of Artificial Sequence: Synthetic oligonucleotide
  source 1..21: mol_type = other DNA
tctggtgtgtctggtacgaat

SEQ ID NO: 16124 - DNA, 21 bp, synthetic construct
  misc_feature 1..21: note = Description of Artificial Sequence: Synthetic oligonucleotide
  source 1..21: mol_type = other DNA
gggagtaatactcctctggct

SEQ ID NO: 16125 - DNA, 21 bp, synthetic construct
  misc_feature 1..21: note = Description of Artificial Sequence: Synthetic oligonucleotide
  source 1..21: mol_type = other DNA
tcgggttctaagagtcttctg

SEQ ID NO: 16126 - DNA, 21 bp, synthetic construct
  misc_feature 1..21: note = Description of Artificial Sequence: Synthetic oligonucleotide
  source 1..21: mol_type = other DNA
caaggcagcagcagcgccgtc

SEQ ID NO: 16127 - DNA, 21 bp, synthetic construct
  misc_feature 1..21: note = Description of Artificial Sequence: Synthetic oligonucleotide
  source 1..21: mol_type = other DNA
aattcgaaggcgaataatgtt

SEQ ID NO: 16128 - DNA, 21 bp, synthetic construct
  misc_feature 1..21: note = Description of Artificial Sequence: Synthetic oligonucleotide
  source 1..21: mol_type = other DNA
ctcagcgccaaaagcaacggc

SEQ ID NO: 16129 - DNA, 21 bp, synthetic construct
  misc_feature 1..21: note = Description of Artificial Sequence: Synthetic oligonucleotide
  source 1..21: mol_type = other DNA
agtggtaaggatacttctggg

SEQ ID NO: 16130 - DNA, 21 bp, synthetic construct
  misc_feature 1..21: note = Description of Artificial Sequence: Synthetic oligonucleotide
  source 1..21: mol_type = other DNA
atgaccggcagcaaccacgcc

SEQ ID NO: 16131 - DNA, 21 bp, synthetic construct
  misc_feature 1..21: note = Description of Artificial Sequence: Synthetic oligonucleotide
  source 1..21: mol_type = other DNA
tctaattcgcaggttaatagt

SEQ ID NO: 16132 - DNA, 21 bp, synthetic construct
  misc_feature 1..21: note = Description of Artificial Sequence: Synthetic oligonucleotide
  source 1..21: mol_type = other DNA
agcggcctcgccagcaccggc

SEQ ID NO: 16133 - DNA, 21 bp, synthetic construct
  misc_feature 1..21: note = Description of Artificial Sequence: Synthetic oligonucleotide
  source 1..21: mol_type = other DNA
accaacagcagcaacaacgtc

SEQ ID NO: 16134 - DNA, 21 bp, synthetic construct
  misc_feature 1..21: note = Description of Artificial Sequence: Synthetic oligonucleotide
  source 1..21: mol_type = other DNA
ggcaccacccaagacagaagc

SEQ ID NO: 16135 - DNA, 21 bp, synthetic construct
  misc_feature 1..21: note = Description of Artificial Sequence: Synthetic oligonucleotide
  source 1..21: mol_type = other DNA
ggcgtcagcggcaacaaagac

SEQ ID NO: 16136 - DNA, 21 bp, synthetic construct
  misc_feature 1..21: note = Description of Artificial Sequence: Synthetic oligonucleotide
  source 1..21: mol_type = other DNA
actcaggctagtacgcctacg

SEQ ID NO: 16137 - DNA, 21 bp, synthetic construct
  misc_feature 1..21: note = Description of Artificial Sequence: Synthetic oligonucleotide
  source 1..21: mol_type = other DNA
tctgggtcggggtctacgagg

SEQ ID NO: 16138 - DNA, 21 bp, synthetic construct
  misc_feature 1..21: note = Description of Artificial Sequence: Synthetic oligonucleotide
  source 1..21: mol_type = other DNA
gatgctggtcaggctccgaag

SEQ ID NO: 16139 - DNA, 21 bp, synthetic construct
  misc_feature 1..21: note = Description of Artificial Sequence: Synthetic oligonucleotide
  source 1..21: mol_type = other DNA
agcgaccaacaacccaccaaa

SEQ ID NO: 16140 - DNA, 21 bp, synthetic construct
  misc_feature 1..21: note = Description of Artificial Sequence: Synthetic oligonucleotide
  source 1..21: mol_type = other DNA
agcagcaccacccaccccagc

SEQ ID NO: 16141 - DNA, 21 bp, synthetic construct
  misc_feature 1..21: note = Description of Artificial Sequence: Synthetic oligonucleotide
  source 1..21: mol_type = other DNA
tcggggagtgggactagtaat

SEQ ID NO: 16142 - DNA, 21 bp, synthetic construct
  misc_feature 1..21: note = Description of Artificial Sequence: Synthetic oligonucleotide
  source 1..21: mol_type = other DNA
gccaccaaaaccaccaacggc

SEQ ID NO: 16143 - DNA, 21 bp, synthetic construct
  misc_feature 1..21: note = Description of Artificial Sequence: Synthetic oligonucleotide
  source 1..21: mol_type = other DNA
aatggttcggctcagggtcgg

SEQ ID NO: 16144 - DNA, 21 bp, synthetic construct
  misc_feature 1..21: note = Description of Artificial Sequence: Synthetic oligonucleotide
  source 1..21: mol_type = other DNA
ctcaccaccagcaaagccgaa

SEQ ID NO: 16145 - DNA, 21 bp, synthetic construct
  misc_feature 1..21: note = Description of Artificial Sequence: Synthetic oligonucleotide
  source 1..21: mol_type = other DNA
gacggcgtcacccccaaccac

SEQ ID NO: 16146 - DNA, 21 bp, synthetic construct
  misc_feature 1..21: note = Description of Artificial Sequence: Synthetic oligonucleotide
  source 1..21: mol_type = other DNA
aacggcgccaaagccgacagc

SEQ ID NO: 16147 - DNA, 21 bp, synthetic construct
  misc_feature 1..21: note = Description of Artificial Sequence: Synthetic oligonucleotide
  source 1..21: mol_type = other DNA
accagaaccgacagcaccggc

SEQ ID NO: 16148 - DNA, 21 bp, synthetic construct
  misc_feature 1..21: note = Description of Artificial Sequence: Synthetic oligonucleotide
  source 1..21: mol_type = other DNA
agcacccaacaaagccccggc

SEQ ID NO: 16149 - DNA, 21 bp, synthetic construct
  misc_feature 1..21: note = Description of Artificial Sequence: Synthetic oligonucleotide
  source 1..21: mol_type = other DNA
caaggcaccgccacccaaagc

SEQ ID NO: 16150 - DNA, 21 bp, synthetic construct
  misc_feature 1..21: note = Description of Artificial Sequence: Synthetic oligonucleotide
  source 1..21: mol_type = other DNA
agttctcagacttctgggaag

SEQ ID NO: 16151 - DNA, 21 bp, synthetic construct
  misc_feature 1..21: note = Description of Artificial Sequence: Synthetic oligonucleotide
  source 1..21: mol_type = other DNA
actggggtggggaagggtctt

SEQ ID NO: 16152 - DNA, 21 bp, synthetic construct
  misc_feature 1..21: note = Description of Artificial Sequence: Synthetic oligonucleotide
  source 1..21: mol_type = other DNA
aatggtgggaatgctagtact

SEQ ID NO: 16153 - DNA, 21 bp, synthetic construct
  misc_feature 1..21: note = Description of Artificial Sequence: Synthetic oligonucleotide
  source 1..21: mol_type = other DNA
acggatcagtctaaggtgtct

SEQ ID NO: 16154 - DNA, 21 bp, synthetic construct
  misc_feature 1..21: note = Description of Artificial Sequence: Synthetic oligonucleotide
  source 1..21: mol_type = other DNA
gcttcttctaaggcggtggtt

SEQ ID NO: 16155 - DNA, 21 bp, synthetic construct
  misc_feature 1..21: note = Description of Artificial Sequence: Synthetic oligonucleotide
  source 1..21: mol_type = other DNA
agcagcagcagcacccccaac

SEQ ID NO: 16156 - DNA, 21 bp, synthetic construct
  misc_feature 1..21: note = Description of Artificial Sequence: Synthetic oligonucleotide
  source 1..21: mol_type = other DNA
gccaacaccaaagacaccgcc

SEQ ID NO: 16157 - DNA, 21 bp, synthetic construct
  misc_feature 1..21: note = Description of Artificial Sequence: Synthetic oligonucleotide
  source 1..21: mol_type = other DNA
gggaatacgggtggtacttct

SEQ ID NO: 16158 - DNA, 21 bp, synthetic construct
  misc_feature 1..21: note = Description of Artificial Sequence: Synthetic oligonucleotide
  source 1..21: mol_type = other DNA
agcggcagcggcgaagccaaa

SEQ ID NO: 16159 - DNA, 21 bp, synthetic construct
  misc_feature 1..21: note = Description of Artificial Sequence: Synthetic oligonucleotide
  source 1..21: mol_type = other DNA
gtcagcaccaaaagcgccgtc

SEQ ID NO: 16160 - DNA, 21 bp, synthetic construct
  misc_feature 1..21: note = Description of Artificial Sequence: Synthetic oligonucleotide
  source 1..21: mol_type = other DNA
cagcctgggaatcagactagt

SEQ ID NO: 16161 - DNA, 21 bp, synthetic construct
  misc_feature 1..21: note = Description of Artificial Sequence: Synthetic oligonucleotide
  source 1..21: mol_type = other DNA
agcaccaccaccagcagcggc

SEQ ID NO: 16162 - DNA, 21 bp, synthetic construct
  misc_feature 1..21: note = Description of Artificial Sequence: Synthetic oligonucleotide
  source 1..21: mol_type = other DNA
agcaccgtcaccggcggcagc

SEQ ID NO: 16163 - DNA, 21 bp, synthetic construct
  misc_feature 1..21: note = Description of Artificial Sequence: Synthetic oligonucleotide
  source 1..21: mol_type = other DNA
atgcccagcaacaacagcacc

SEQ ID NO: 16164 - DNA, 21 bp, synthetic construct
  misc_feature 1..21: note = Description of Artificial Sequence: Synthetic oligonucleotide
  source 1..21: mol_type = other DNA
accagcggcgcccccagcgcc

SEQ ID NO: 16165 - DNA, 21 bp, synthetic construct
  misc_feature 1..21: note = Description of Artificial Sequence: Synthetic oligonucleotide
  source 1..21: mol_type = other DNA
ggtaatcagacttctccgatt

SEQ ID NO: 16166 - DNA, 21 bp, synthetic construct
  misc_feature 1..21: note = Description of Artificial Sequence: Synthetic oligonucleotide
  source 1..21: mol_type = other DNA
gagacgaagtctacgcctaat

SEQ ID NO: 16167 - DNA, 21 bp, synthetic construct
  misc_feature 1..21: note = Description of Artificial Sequence: Synthetic oligonucleotide
  source 1..21: mol_type = other DNA
aaccccggcagaaacaccggc

SEQ ID NO: 16168 - DNA, 21 bp, synthetic construct
  misc_feature 1..21: note = Description of Artificial Sequence: Synthetic oligonucleotide
  source 1..21: mol_type = other DNA
caacaaaccgcccaaaccggc

SEQ ID NO: 16169 - DNA, 21 bp, synthetic construct
  misc_feature 1..21: note = Description of Artificial Sequence: Synthetic oligonucleotide
  source 1..21: mol_type = other DNA
gccagagaaatcaaccccggc

SEQ ID NO: 16170 - DNA, 21 bp, synthetic construct
  misc_feature 1..21: note = Description of Artificial Sequence: Synthetic oligonucleotide
  source 1..21: mol_type = other DNA
gccggccaaaaagacagcacc

SEQ ID NO: 16171 - DNA, 21 bp, synthetic construct
  misc_feature 1..21: note = Description of Artificial Sequence: Synthetic oligonucleotide
  source 1..21: mol_type = other DNA
tcttcgaataagggtagtccg

SEQ ID NO: 16172 - DNA, 21 bp, synthetic construct
  misc_feature 1..21: note = Description of Artificial Sequence: Synthetic oligonucleotide
  source 1..21: mol_type = other DNA
accagcaccaaccaacccgtc

SEQ ID NO: 16173 - DNA, 21 bp, synthetic construct
  misc_feature 1..21: note = Description of Artificial Sequence: Synthetic oligonucleotide
  source 1..21: mol_type = other DNA
tctgttgctggggatcgttct

SEQ ID NO: 16174 - DNA, 21 bp, synthetic construct
  misc_feature 1..21: note = Description of Artificial Sequence: Synthetic oligonucleotide
  source 1..21: mol_type = other DNA
accgacagcaccagaagcacc

SEQ ID NO: 16175 - DNA, 21 bp, synthetic construct
  misc_feature 1..21: note = Description of Artificial Sequence: Synthetic oligonucleotide
  source 1..21: mol_type = other DNA
agcggcagcaccagccccaac

SEQ ID NO: 16176 - DNA, 21 bp, synthetic construct
  misc_feature 1..21: note = Description of Artificial Sequence: Synthetic oligonucleotide
  source 1..21: mol_type = other DNA
gggtcgggtagttcgaatact

SEQ ID NO: 16177 - DNA, 21 bp, synthetic construct
  misc_feature 1..21: note = Description of Artificial Sequence: Synthetic oligonucleotide
  source 1..21: mol_type = other DNA
gggagtacgcagtcgtcggct

SEQ ID NO: 16178 - DNA, 21 bp, synthetic construct
  misc_feature 1..21: note = Description of Artificial Sequence: Synthetic oligonucleotide
  source 1..21: mol_type = other DNA
aacgaccaaagcaaacccctc

SEQ ID NO: 16179 - DNA, 21 bp, synthetic construct
  misc_feature 1..21: note = Description of Artificial Sequence: Synthetic oligonucleotide
  source 1..21: mol_type = other DNA
gagtctaggtcgcgtaatgag

SEQ ID NO: 16180 - DNA, 21 bp, synthetic construct
  misc_feature 1..21: note = Description of Artificial Sequence: Synthetic oligonucleotide
  source 1..21: mol_type = other DNA
gatgctacgactcgtcctcct

SEQ ID NO: 16181 - DNA, 21 bp, synthetic construct
  misc_feature 1..21: note = Description of Artificial Sequence: Synthetic oligonucleotide
  source 1..21: mol_type = other DNA
agcagcaccaacaaaaccgtc

SEQ ID NO: 16182 - DNA, 21 bp, synthetic construct
  misc_feature 1..21: note = Description of Artificial Sequence: Synthetic oligonucleotide
  source 1..21: mol_type = other DNA
gcgggttctgctaaggataag

SEQ ID NO: 16183 - DNA, 21 bp, synthetic construct
  misc_feature 1..21: note = Description of Artificial Sequence: Synthetic oligonucleotide
  source 1..21: mol_type = other DNA
gatattgggaagacgcatgcg

SEQ ID NO: 16184 - DNA, 21 bp, synthetic construct
  misc_feature 1..21: note = Description of Artificial Sequence: Synthetic oligonucleotide
  source 1..21: mol_type = other DNA
caagtcaacagcacccccgtc

SEQ ID NO: 16185 - DNA, 21 bp, synthetic construct
  misc_feature 1..21: note = Description of Artificial Sequence: Synthetic oligonucleotide
  source 1..21: mol_type = other DNA
tctggtgcttctagtgtgacg

SEQ ID NO: 16186 - DNA, 21 bp, synthetic construct
  misc_feature 1..21: note = Description of Artificial Sequence: Synthetic oligonucleotide
  source 1..21: mol_type = other DNA
gatagtggtcgtagtccgaat

SEQ ID NO: 16187 - DNA, 21 bp, synthetic construct
  misc_feature 1..21: note = Description of Artificial Sequence: Synthetic oligonucleotide
  source 1..21: mol_type = other DNA
agtaatgatagtaagagtact

SEQ ID NO: 16188 - DNA, 21 bp, synthetic construct
  misc_feature 1..21: note = Description of Artificial Sequence: Synthetic oligonucleotide
  source 1..21: mol_type = other DNA
agtaatgttaagcagatgcct

SEQ ID NO: 16189 - DNA, 21 bp, synthetic construct
  misc_feature 1..21: note = Description of Artificial Sequence: Synthetic oligonucleotide
  source 1..21: mol_type = other DNA
gatggtgggactcatgtgaag

SEQ ID NO: 16190 - DNA, 21 bp, synthetic construct
  misc_feature 1..21: note = Description of Artificial Sequence: Synthetic oligonucleotide
  source 1..21: mol_type = other DNA
ctcagcgacggcaaacccaac

SEQ ID NO: 16191 - DNA, 21 bp, synthetic construct
  misc_feature 1..21: note = Description of Artificial Sequence: Synthetic oligonucleotide
  source 1..21: mol_type = other DNA
gacgcccacaaagtcaacctc

SEQ ID NO: 16192 - DNA, 21 bp, synthetic construct
  misc_feature 1..21: note = Description of Artificial Sequence: Synthetic oligonucleotide
  source 1..21: mol_type = other DNA
gatagtgctgctaaggctgct

SEQ ID NO: 16193 - DNA, 21 bp, synthetic construct
  misc_feature 1..21: note = Description of Artificial Sequence: Synthetic oligonucleotide
  source 1..21: mol_type = other DNA
accggcacccaaaccaacagc

SEQ ID NO: 16194 - DNA, 21 bp, synthetic construct
  misc_feature 1..21: note = Description of Artificial Sequence: Synthetic oligonucleotide
  source 1..21: mol_type = other DNA
aatggtgggggtgctcaggct

SEQ ID NO: 16195 - DNA, 21 bp, synthetic construct
  misc_feature 1..21: note = Description of Artificial Sequence: Synthetic oligonucleotide
  source 1..21: mol_type = other DNA
ggcgccaccagcaaaagcgtc

SEQ ID NO: 16196 - DNA, 21 bp, synthetic construct
  misc_feature 1..21: note = Description of Artificial Sequence: Synthetic oligonucleotide
  source 1..21: mol_type = other DNA
caggcttcggatccgaagctg

SEQ ID NO: 16197 - DNA, 21 bp, synthetic construct
  misc_feature 1..21: note = Description of Artificial Sequence: Synthetic oligonucleotide
  source 1..21: mol_type = other DNA
aacggcaaaagccaagtcagc

SEQ ID NO: 16198 - DNA, 21 bp, synthetic construct
  misc_feature 1..21: note = Description of Artificial Sequence: Synthetic oligonucleotide
  source 1..21: mol_type = other DNA
tctgcttctggtactgggcag

SEQ ID NO: 16199 - DNA, 21 bp, synthetic construct
  misc_feature 1..21: note = Description of Artificial Sequence: Synthetic oligonucleotide
  source 1..21: mol_type = other DNA
ggcgccagcaaaagcaacggc

SEQ ID NO: 16200 - DNA, 21 bp, synthetic construct
  misc_feature 1..21: note = Description of Artificial Sequence: Synthetic oligonucleotide
  source 1..21: mol_type = other DNA
gtcggcgaagccaaaaaagcc

SEQ ID NO: 16201 - DNA, 21 bp, synthetic construct
  misc_feature 1..21: note = Description of Artificial Sequence: Synthetic oligonucleotide
  source 1..21: mol_type = other DNA
atcaccggcagcaccgccgcc

SEQ ID NO: 16202 - DNA, 21 bp, synthetic construct
  misc_feature 1..21: note = Description of Artificial Sequence: Synthetic oligonucleotide
  source 1..21: mol_type = other DNA
actagttcggatcgtcctact

SEQ ID NO: 16203 - DNA, 21 bp, synthetic construct
  misc_feature 1..21: note = Description of Artificial Sequence: Synthetic oligonucleotide
  source 1..21: mol_type = other DNA
gccgccggccaaggcagaagc

SEQ ID NO: 16204 - DNA, 21 bp, synthetic construct
  misc_feature 1..21: note = Description of Artificial Sequence: Synthetic oligonucleotide
  source 1..21: mol_type = other DNA
catactcaggcgtcgccgact

SEQ ID NO: 16205 - DNA, 21 bp, synthetic construct
  misc_feature 1..21: note = Description of Artificial Sequence: Synthetic oligonucleotide
  source 1..21: mol_type = other DNA
ggtagttcgactgagcgggtg

SEQ ID NO: 16206 - DNA, 21 bp, synthetic construct
  misc_feature 1..21: note = Description of Artificial Sequence: Synthetic oligonucleotide
  source 1..21: mol_type = other DNA
actggtgataaggcgattgct

SEQ ID NO: 16207 - DNA, 21 bp, synthetic construct
  misc_feature 1..21: note = Description of Artificial Sequence: Synthetic oligonucleotide
  source 1..21: mol_type = other DNA
ggcaaaaccaccggccaatac

SEQ ID NO: 16208 - DNA, 21 bp, synthetic construct
  misc_feature 1..21: note = Description of Artificial Sequence: Synthetic oligonucleotide
  source 1..21: mol_type = other DNA
agttctactaagacgtcgctt

SEQ ID NO: 16209 - DNA, 21 bp, synthetic construct
  misc_feature 1..21: note = Description of Artificial Sequence: Synthetic oligonucleotide
  source 1..21: mol_type = other DNA
gagggggcgagtgctggtaag

SEQ ID NO: 16210 - DNA, 21 bp, synthetic construct
  misc_feature 1..21: note = Description of Artificial Sequence: Synthetic oligonucleotide
  source 1..21: mol_type = other DNA
caaaccaacaccccccacagc

SEQ ID NO: 16211 - DNA, 21 bp, synthetic construct
  misc_feature 1..21: note = Description of Artificial Sequence: Synthetic oligonucleotide
  source 1..21: mol_type = other DNA
gacagcggcagcagaagcgtc

SEQ ID NO: 16212 - DNA, 21 bp, synthetic construct
  misc_feature 1..21: note = Description of Artificial Sequence: Synthetic oligonucleotide
  source 1..21: mol_type = other DNA
actccgatggataagaaggag

SEQ ID NO: 16213 - DNA, 21 bp, synthetic construct
  misc_feature 1..21: note = Description of Artificial Sequence: Synthetic oligonucleotide
  source 1..21: mol_type = other DNA
agcagaaacaacagcagcgaa

SEQ ID NO: 16214 - DNA, 21 bp, synthetic construct
  misc_feature 1..21: note = Description of Artificial Sequence: Synthetic oligonucleotide
  source 1..21: mol_type = other DNA
agcggcaccaaccacaccacc

SEQ ID NO: 16215 - DNA, 21 bp, synthetic construct
  misc_feature 1..21: note = Description of Artificial Sequence: Synthetic oligonucleotide
  source 1..21: mol_type = other DNA
catggtagtaattcgagtcag

SEQ ID NO: 16216 - DNA, 21 bp, synthetic construct
  misc_feature 1..21: note = Description of Artificial Sequence: Synthetic oligonucleotide
  source 1..21: mol_type = other DNA
ggtggggagaaggtgcattcg

SEQ ID NO: 16217 - DNA, 21 bp, synthetic construct
  misc_feature 1..21: note = Description of Artificial Sequence: Synthetic oligonucleotide
  source 1..21: mol_type = other DNA
ctggtgaataagtcgtctctt

SEQ ID NO: 16218 - DNA, 21 bp, synthetic construct
  misc_feature 1..21: note = Description of Artificial Sequence: Synthetic oligonucleotide
  source 1..21: mol_type = other DNA
gattcgcctaattcgacgaag

SEQ ID NO: 16219 - DNA, 21 bp, synthetic construct
  misc_feature 1..21: note = Description of Artificial Sequence: Synthetic oligonucleotide
  source 1..21: mol_type = other DNA
accaacagcagcagcgtccaa

SEQ ID NO: 16220 - DNA, 21 bp, synthetic construct
  misc_feature 1..21: note = Description of Artificial Sequence: Synthetic oligonucleotide
  source 1..21: mol_type = other DNA
ggggcggatcggggtggttcg

SEQ ID NO: 16221 - DNA, 21 bp, synthetic construct
  misc_feature 1..21: note = Description of Artificial Sequence: Synthetic oligonucleotide
  source 1..21: mol_type = other DNA
cgtgggaatggttctacgtat

SEQ ID NO: 16222 - DNA, 21 bp, synthetic construct
  misc_feature 1..21: note = Description of Artificial Sequence: Synthetic oligonucleotide
  source 1..21: mol_type = other DNA
aacaccggcagccaagcccaa

SEQ ID NO: 16223 - DNA, 21 bp, synthetic construct
  misc_feature 1..21: note = Description of Artificial Sequence: Synthetic oligonucleotide
  source 1..21: mol_type = other DNA
accatcggcggcagccccagc

SEQ ID NO: 16224 - DNA, 21 bp, synthetic construct
  misc_feature 1..21: note = Description of Artificial Sequence: Synthetic oligonucleotide
  source 1..21: mol_type = other DNA
gtgcagaataagcagatgggg

SEQ ID NO: 16225 - DNA, 21 bp, synthetic construct
  misc_feature 1..21: note = Description of Artificial Sequence: Synthetic oligonucleotide
  source 1..21: mol_type = other DNA
agaggcaccagcgaaagaagc

SEQ ID NO: 16226 - DNA, 21 bp, synthetic construct
  misc_feature 1..21: note = Description of Artificial Sequence: Synthetic oligonucleotide
  source 1..21: mol_type = other DNA
cagggtgctccttctattcag

SEQ ID NO: 16227 - DNA, 21 bp, synthetic construct
  misc_feature 1..21: note = Description of Artificial Sequence: Synthetic oligonucleotide
  source 1..21: mol_type = other DNA
cttggtgggagtcagagtaat

SEQ ID NO: 16228 - DNA, 21 bp, synthetic construct
  misc_feature 1..21: note = Description of Artificial Sequence: Synthetic oligonucleotide
  source 1..21: mol_type = other DNA
agcggcacccccgccgccacc

SEQ ID NO: 16229 - DNA, 21 bp, synthetic construct
  misc_feature 1..21: note = Description of Artificial Sequence: Synthetic oligonucleotide
  source 1..21: mol_type = other DNA
gcgacggggagtgagagtcgg

SEQ ID NO: 16230 - DNA, 21 bp, synthetic construct
  misc_feature 1..21: note = Description of Artificial Sequence: Synthetic oligonucleotide
  source 1..21: mol_type = other DNA
ctcggcagccaaaacaacagc

SEQ ID NO: 16231 - DNA, 21 bp, synthetic construct
  misc_feature 1..21: note = Description of Artificial Sequence: Synthetic oligonucleotide
  source 1..21: mol_type = other DNA
aatgtgggtagtacgcatacg

SEQ ID NO: 16232 - DNA, 21 bp, synthetic construct
  misc_feature 1..21: note = Description of Artificial Sequence: Synthetic oligonucleotide
  source 1..21: mol_type = other DNA
gggacggctccgggttcggtg

SEQ ID NO: 16233 - DNA, 21 bp, synthetic construct
  misc_feature 1..21: note = Description of Artificial Sequence: Synthetic oligonucleotide
  source 1..21: mol_type = other DNA
tcgagtcatgagtcgaagggg

SEQ ID NO: 16234 - DNA, 21 bp, synthetic construct
  misc_feature 1..21: note = Description of Artificial Sequence: Synthetic oligonucleotide
  source 1..21: mol_type = other DNA
aatacgacgaagcctaatgat

SEQ ID NO: 16235 - DNA, 21 bp, synthetic construct
  misc_feature 1..21: note = Description of Artificial Sequence: Synthetic oligonucleotide
  source 1..21: mol_type = other DNA
agtcaggcgagtaataagtct

SEQ ID NO: 16236 - DNA, 21 bp, synthetic construct
  misc_feature 1..21: note = Description of Artificial Sequence: Synthetic oligonucleotide
  source 1..21: mol_type = other DNA
ggcagcagcagcaacagaacc

SEQ ID NO: 16237 - DNA, 21 bp, synthetic construct
  misc_feature 1..21: note = Description of Artificial Sequence: Synthetic oligonucleotide
  source 1..21: mol_type = other DNA
agcagcagcgacagaagcagc

SEQ ID NO: 16238 - DNA, 21 bp, synthetic construct
  misc_feature 1..21: note = Description of Artificial Sequence: Synthetic oligonucleotide
  source 1..21: mol_type = other DNA
caaggcagcaccagcggccac

SEQ ID NO: 16239 - DNA, 21 bp, synthetic construct
  misc_feature 1..21: note = Description of Artificial Sequence: Synthetic oligonucleotide
  source 1..21: mol_type = other DNA
acgccggagagtaagtctcag

SEQ ID NO: 16240 - DNA, 21 bp, synthetic construct
  misc_feature 1..21: note = Description of Artificial Sequence: Synthetic oligonucleotide
  source 1..21: mol_type = other DNA
tctacgaatgataagtcgagt

SEQ ID NO: 16241 - DNA, 21 bp, synthetic construct
  misc_feature 1..21: note = Description of Artificial Sequence: Synthetic oligonucleotide
  source 1..21: mol_type = other DNA
tcgttgtctgagaggaaggat

SEQ ID NO: 16242 - DNA, 21 bp, synthetic construct
  misc_feature 1..21: note = Description of Artificial Sequence: Synthetic oligonucleotide
  source 1..21: mol_type = other DNA
aatgttagtaatcttaaggat

SEQ ID NO: 16243 - DNA, 21 bp, synthetic construct
  misc_feature 1..21: note = Description of Artificial Sequence: Synthetic oligonucleotide
  source 1..21: mol_type = other DNA
acggggactggttctcagcct

SEQ ID NO: 16244 - DNA, 21 bp, synthetic construct
  misc_feature 1..21: note = Description of Artificial Sequence: Synthetic oligonucleotide
  source 1..21: mol_type = other DNA
caggggaataatactgcgcat

SEQ ID NO: 16245 - DNA, 21 bp, synthetic construct
  misc_feature 1..21: note = Description of Artificial Sequence: Synthetic oligonucleotide
  source 1..21: mol_type = other DNA
ggtgagcataagactacgagt

SEQ ID NO: 16246 - DNA, 21 bp, synthetic construct
  misc_feature 1..21: note = Description of Artificial Sequence: Synthetic oligonucleotide
  source 1..21: mol_type = other DNA
aaaagcgacgccggcagcacc

SEQ ID NO: 16247 - DNA, 21 bp, synthetic construct
  misc_feature 1..21: note = Description of Artificial Sequence: Synthetic oligonucleotide
  source 1..21: mol_type = other DNA
aatactagtaatccgtcgaat

SEQ ID NO: 16248 - DNA, 21 bp, synthetic construct
  misc_feature 1..21: note = Description of Artificial Sequence: Synthetic oligonucleotide
  source 1..21: mol_type = other DNA
agcagcaccgccccccacaac

SEQ ID NO: 16249 - DNA, 21 bp, synthetic construct
  misc_feature 1..21: note = Description of Artificial Sequence: Synthetic oligonucleotide
  source 1..21: mol_type = other DNA
aggcagggtgataagagtgcg

SEQ ID NO: 16250 - DNA, 21 bp, synthetic construct
  misc_feature 1..21: note = Description of Artificial Sequence: Synthetic oligonucleotide
  source 1..21: mol_type = other DNA
gcgggtgaggggtctacttcg

SEQ ID NO: 16251 - DNA, 21 bp, synthetic construct
  misc_feature 1..21: note = Description of Artificial Sequence: Synthetic oligonucleotide
  source 1..21: mol_type = other DNA
agcagcaacagcacccccagc

SEQ ID NO: 16252 - DNA, 21 bp, synthetic construct
  misc_feature 1..21: note = Description of Artificial Sequence: Synthetic oligonucleotide
  source 1..21: mol_type = other DNA
gaggctgggagtccgactcgg

SEQ ID NO: 16253 - DNA, 21 bp, synthetic construct
  misc_feature 1..21: note = Description of Artificial Sequence: Synthetic oligonucleotide
  source 1..21: mol_type = other DNA
taccccaacgaaaaaacccac

SEQ ID NO: 16254 - DNA, 21 bp, synthetic construct
  misc_feature 1..21: note = Description of Artificial Sequence: Synthetic oligonucleotide
  source 1..21: mol_type = other DNA
ggtactccgggtactggtacg

SEQ ID NO: 16255 - DNA, 21 bp, synthetic construct
  misc_feature 1..21: note = Description of Artificial Sequence: Synthetic oligonucleotide
  source 1..21: mol_type = other DNA
aacgtcggcggcgacaaaaga

SEQ ID NO: 16256 - DNA, 21 bp, synthetic construct
  misc_feature 1..21: note = Description of Artificial Sequence: Synthetic oligonucleotide
  source 1..21: mol_type = other DNA
agtgggaattctgctaattcg

SEQ ID NO: 16257 - DNA, 21 bp, synthetic construct
  misc_feature 1..21: note = Description of Artificial Sequence: Synthetic oligonucleotide
  source 1..21: mol_type = other DNA
ggcgaactcagccaaaacaaa

SEQ ID NO: 16258 - DNA, 21 bp, synthetic construct
  misc_feature 1..21: note = Description of Artificial Sequence: Synthetic oligonucleotide
  source 1..21: mol_type = other DNA
gctggtgataagtctagttct

SEQ ID NO: 16259 - DNA, 21 bp, synthetic construct
  misc_feature 1..21: note = Description of Artificial Sequence: Synthetic oligonucleotide
  source 1..21: mol_type = other DNA
gccggcaacggcgccagccaa

SEQ ID NO: 16260 - DNA, 21 bp, synthetic construct
  misc_feature 1..21: note = Description of Artificial Sequence: Synthetic oligonucleotide
  source 1..21: mol_type = other DNA
accaccagcagcaccggcggc

SEQ ID NO: 16261 - DNA, 21 bp, synthetic construct
  misc_feature 1..21: note = Description of Artificial Sequence: Synthetic oligonucleotide
  source 1..21: mol_type = other DNA
gagggggttcaggggggtcgt

SEQ ID NO: 16262 - DNA, 21 bp, synthetic construct
  misc_feature 1..21: note = Description of Artificial Sequence: Synthetic oligonucleotide
  source 1..21: mol_type = other DNA
aaaaccggcggcaacggcagc

SEQ ID NO: 16263 - DNA, 21 bp, synthetic construct
  misc_feature 1..21: note = Description of Artificial Sequence: Synthetic oligonucleotide
  source 1..21: mol_type = other DNA
ggttctgggcagtctacggct

SEQ ID NO: 16264 - DNA, 21 bp, synthetic construct
  misc_feature 1..21: note = Description of Artificial Sequence: Synthetic oligonucleotide
  source 1..21: mol_type = other DNA
gcgggttcgacgtcgcctcgt

SEQ ID NO: 16265 - DNA, 21 bp, synthetic construct
  misc_feature 1..21: note = Description of Artificial Sequence: Synthetic oligonucleotide
  source 1..21: mol_type = other DNA
cagaatgcgaagagtacgagt

SEQ ID NO: 16266 - DNA, 21 bp, synthetic construct
  misc_feature 1..21: note = Description of Artificial Sequence: Synthetic oligonucleotide
  source 1..21: mol_type = other DNA
gacaacacccccaccaacaga

SEQ ID NO: 16267 - DNA, 21 bp, synthetic construct
  misc_feature 1..21: note = Description of Artificial Sequence: Synthetic oligonucleotide
  source 1..21: mol_type = other DNA
acgcagggtggttctactgcg

SEQ ID NO: 16268 - DNA, 21 bp, synthetic construct
  misc_feature 1..21: note = Description of Artificial Sequence: Synthetic oligonucleotide
  source 1..21: mol_type = other DNA
ggcagcggccaaaccaccagc

SEQ ID NO: 16269 - DNA, 21 bp, synthetic construct
  misc_feature 1..21: note = Description of Artificial Sequence: Synthetic oligonucleotide
  source 1..21: mol_type = other DNA
gccgacggcagcagcggcaga

SEQ ID NO: 16270 - DNA, 21 bp, synthetic construct
  misc_feature 1..21: note = Description of Artificial Sequence: Synthetic oligonucleotide
  source 1..21: mol_type = other DNA
aataatgggtctgcttctaat

SEQ ID NO: 16271 - DNA, 21 bp, synthetic construct
  misc_feature 1..21: note = Description of Artificial Sequence: Synthetic oligonucleotide
  source 1..21: mol_type = other DNA
agtggtgagtctactcgtcat

SEQ ID NO: 16272 - DNA, 21 bp, synthetic construct
  misc_feature 1..21: note = Description of Artificial Sequence: Synthetic oligonucleotide
  source 1..21: mol_type = other DNA
gacagcatcagcaaagccacc

SEQ ID NO: 16273 - DNA, 21 bp, synthetic construct
  misc_feature 1..21: note = Description of Artificial Sequence: Synthetic oligonucleotide
  source 1..21: mol_type = other DNA
acgggtggtagtcctctttct

SEQ ID NO: 16274 - DNA, 21 bp, synthetic construct
  misc_feature 1..21: note = Description of Artificial Sequence: Synthetic oligonucleotide
  source 1..21: mol_type = other DNA
agcaccagcaacaccagccac

SEQ ID NO: 16275 - DNA, 21 bp, synthetic construct
  misc_feature 1..21: note = Description of Artificial Sequence: Synthetic oligonucleotide
  source 1..21: mol_type = other DNA
ctcgccggcaaccccggccac

SEQ ID NO: 16276 - DNA, 21 bp, synthetic construct
  misc_feature 1..21: note = Description of Artificial Sequence: Synthetic oligonucleotide
  source 1..21: mol_type = other DNA
ggcgaagccaaacaccaaccc

SEQ ID NO: 16277 - DNA, 21 bp, synthetic construct
  misc_feature 1..21: note = Description of Artificial Sequence: Synthetic oligonucleotide
  source 1..21: mol_type = other DNA
gccaccaacggcaaacccatc

SEQ ID NO: 16278 - DNA, 21 bp, synthetic construct
  misc_feature 1..21: note = Description of Artificial Sequence: Synthetic oligonucleotide
  source 1..21: mol_type = other DNA
ggcgccgacagcaaaaacagc

SEQ ID NO: 16279 - DNA, 21 bp, synthetic construct
  misc_feature 1..21: note = Description of Artificial Sequence: Synthetic oligonucleotide
  source 1..21: mol_type = other DNA
gacagcgccggcaaaatgggc

SEQ ID NO: 16280 - DNA, 21 bp, synthetic construct
  misc_feature 1..21: note = Description of Artificial Sequence: Synthetic oligonucleotide
  source 1..21: mol_type = other DNA
tcgcagggtgcttctacggct

SEQ ID NO: 16281 - DNA, 21 bp, synthetic construct
  misc_feature 1..21: note = Description of Artificial Sequence: Synthetic oligonucleotide
  source 1..21: mol_type = other DNA
ggtgggggtgagcatagggct

SEQ ID NO: 16282 - DNA, 21 bp, synthetic construct
  misc_feature 1..21: note = Description of Artificial Sequence: Synthetic oligonucleotide
  source 1..21: mol_type = other DNA
agtacggggcatgagcgggtt

SEQ ID NO: 16283 - DNA, 21 bp, synthetic construct
  misc_feature 1..21: note = Description of Artificial Sequence: Synthetic oligonucleotide
  source 1..21: mol_type = other DNA
gccgaaggcaaaaccagcagc

SEQ ID NO: 16284 - DNA, 21 bp, synthetic construct
  misc_feature 1..21: note = Description of Artificial Sequence: Synthetic oligonucleotide
  source 1..21: mol_type = other DNA
gacagcggcagcagccccaaa

SEQ ID NO: 16285 - DNA, 21 bp, synthetic construct
  misc_feature 1..21: note = Description of Artificial Sequence: Synthetic oligonucleotide
  source 1..21: mol_type = other DNA
gaaggccaccaaaccaaaagc

SEQ ID NO: 16286 - DNA, 21 bp, synthetic construct
  misc_feature 1..21: note = Description of Artificial Sequence: Synthetic oligonucleotide
  source 1..21: mol_type = other DNA
gacggcaacggcggcaccaga

SEQ ID NO: 16287 - DNA, 21 bp, synthetic construct
  misc_feature 1..21: note = Description of Artificial Sequence: Synthetic oligonucleotide
  source 1..21: mol_type = other DNA
cagcagtctgcgactagtcag

SEQ ID NO: 16288 - DNA, 21 bp, synthetic construct
  misc_feature 1..21: note = Description of Artificial Sequence: Synthetic oligonucleotide
  source 1..21: mol_type = other DNA
caagccagcagccaaaaccaa

SEQ ID NO: 16289 - DNA, 21 bp, synthetic construct
  misc_feature 1..21: note = Description of Artificial Sequence: Synthetic oligonucleotide
  source 1..21: mol_type = other DNA
catagtactgggggtcagggg

SEQ ID NO: 16290 - DNA, 21 bp, synthetic construct
  misc_feature 1..21: note = Description of Artificial Sequence: Synthetic oligonucleotide
  source 1..21: mol_type = other DNA
gacagaaccgacaaaaacacc

SEQ ID NO: 16291 - DNA, 21 bp, synthetic construct
  misc_feature 1..21: note = Description of Artificial Sequence: Synthetic oligonucleotide
  source 1..21: mol_type = other DNA
ggtaagacgggtcagagtgcg

SEQ ID NO: 16292 - DNA, 21 bp, synthetic construct
  misc_feature 1..21: note = Description of Artificial Sequence: Synthetic oligonucleotide
  source 1..21: mol_type = other DNA
gctgcgactactagtactacg

SEQ ID NO: 16293 - DNA, 21 bp, synthetic construct
  misc_feature 1..21: note = Description of Artificial Sequence: Synthetic oligonucleotide
  source 1..21: mol_type = other DNA
gatattgggtcgaagcgggat

SEQ ID NO: 16294 - DNA, 21 bp, synthetic construct
  misc_feature 1..21: note = Description of Artificial Sequence: Synthetic oligonucleotide
  source 1..21: mol_type = other DNA
gagcagcgtgctaatcctact

SEQ ID NO: 16295 - DNA, 21 bp, synthetic construct
  misc_feature 1..21: note = Description of Artificial Sequence: Synthetic oligonucleotide
  source 1..21: mol_type = other DNA
catcagacttcggggagtaat

SEQ ID NO: 16296 - DNA, 21 bp, synthetic construct
  misc_feature 1..21: note = Description of Artificial Sequence: Synthetic oligonucleotide
  source 1..21: mol_type = other DNA
gataatgcgtcgagggcggcg

SEQ ID NO: 16297 - DNA, 21 bp, synthetic construct
  misc_feature 1..21: note = Description of Artificial Sequence: Synthetic oligonucleotide
  source 1..21: mol_type = other DNA
tcttcgagtcagaagtcgaat

SEQ ID NO: 16298 - DNA, 21 bp, synthetic construct
  misc_feature 1..21: note = Description of Artificial Sequence: Synthetic oligonucleotide
  source 1..21: mol_type = other DNA
agcaaaggcgacaaaaccatc

SEQ ID NO: 16299 - DNA, 21 bp, synthetic construct
  misc_feature 1..21: note = Description of Artificial Sequence: Synthetic oligonucleotide
  source 1..21: mol_type = other DNA
agcagcagcaccacccccgtc

SEQ ID NO: 16300 - DNA, 21 bp, synthetic construct
  misc_feature 1..21: note = Description of Artificial Sequence: Synthetic oligonucleotide
  source 1..21: mol_type = other DNA
gatgctcgtagtgggcaggct

SEQ ID NO: 16301 - DNA, 21 bp, synthetic construct
  misc_feature 1..21: note = Description of Artificial Sequence: Synthetic oligonucleotide
  source 1..21: mol_type = other DNA
agcggcaacggcaccgtccaa

SEQ ID NO: 16302 - DNA, 21 bp, synthetic construct
  misc_feature 1..21: note = Description of Artificial Sequence: Synthetic oligonucleotide
  source 1..21: mol_type = other DNA
agcggcgccaccagcaacagc

SEQ ID NO: 16303 - DNA, 21 bp, synthetic construct
  misc_feature 1..21: note = Description of Artificial Sequence: Synthetic oligonucleotide
  source 1..21: mol_type = other DNA
gttgctaatggtacggctaag

SEQ ID NO: 16304 - DNA, 21 bp, synthetic construct
  misc_feature 1..21: note = Description of Artificial Sequence: Synthetic oligonucleotide
  source 1..21: mol_type = other DNA
ggcagcagcggcagcaacctc

SEQ ID NO: 16305 - DNA, 21 bp, synthetic construct
  misc_feature 1..21: note = Description of Artificial Sequence: Synthetic oligonucleotide
  source 1..21: mol_type = other DNA
gggcgggaggggtcgtcgagt

SEQ ID NO: 16306 - DNA, 21 bp, synthetic construct
  misc_feature 1..21: note = Description of Artificial Sequence: Synthetic oligonucleotide
  source 1..21: mol_type = other DNA
ggcatcggcagcagccccagc

SEQ ID NO: 16307 - DNA, 21 bp, synthetic construct
  misc_feature 1..21: note = Description of Artificial Sequence: Synthetic oligonucleotide
  source 1..21: mol_type = other DNA
ggcggcggcagagacgtcgcc

SEQ ID NO: 16308 - DNA, 21 bp, synthetic construct
  misc_feature 1..21: note = Description of Artificial Sequence: Synthetic oligonucleotide
  source 1..21: mol_type = other DNA
accgccagcaccgccaccgtc

SEQ ID NO: 16309 - DNA, 21 bp, synthetic construct
  misc_feature 1..21: note = Description of Artificial Sequence: Synthetic oligonucleotide
  source 1..21: mol_type = other DNA
aatgggtctcagaaggttcag

SEQ ID NO: 16310 - DNA, 21 bp, synthetic construct
  misc_feature 1..21: note = Description of Artificial Sequence: Synthetic oligonucleotide
  source 1..21: mol_type = other DNA
aacggcaacaccaacggccaa

SEQ ID NO: 16311 - DNA, 21 bp, synthetic construct
  misc_feature 1..21: note = Description of Artificial Sequence: Synthetic oligonucleotide
  source 1..21: mol_type = other DNA
ctcggcagcggcagcaccacc

SEQ ID NO: 16312 - DNA, 21 bp, synthetic construct
  misc_feature 1..21: note = Description of Artificial Sequence: Synthetic oligonucleotide
  source 1..21: mol_type = other DNA
aatagtggtggttcttcgtct

SEQ ID NO: 16313 - DNA, 21 bp, synthetic construct
  misc_feature 1..21: note = Description of Artificial Sequence: Synthetic oligonucleotide
  source 1..21: mol_type = other DNA
aatggtaatcctactccttcg

SEQ ID NO: 16314 - DNA, 21 bp, synthetic construct
  misc_feature 1..21: note = Description of Artificial Sequence: Synthetic oligonucleotide
  source 1..21: mol_type = other DNA
tctggtacgaatcatactggt

SEQ ID NO: 16315 - DNA, 21 bp, synthetic construct
  misc_feature 1..21: note = Description of Artificial Sequence: Synthetic oligonucleotide
  source 1..21: mol_type = other DNA
gggactggttctgatcgtact

SEQ ID NO: 16316 - DNA, 21 bp, synthetic construct
  misc_feature 1..21: note = Description of Artificial Sequence: Synthetic oligonucleotide
  source 1..21: mol_type = other DNA
gtccccagcagcaaccccaac

SEQ ID NO: 16317 - DNA, 21 bp, synthetic construct
  misc_feature 1..21: note = Description of Artificial Sequence: Synthetic oligonucleotide
  source 1..21: mol_type = other DNA
cagacgccgagtaagatgtct

SEQ ID NO: 16318 - DNA, 21 bp, synthetic construct
  misc_feature 1..21: note = Description of Artificial Sequence: Synthetic oligonucleotide
  source 1..21: mol_type = other DNA
gaaggcaaaagcagcctcgcc

SEQ ID NO: 16319 - DNA, 21 bp, synthetic construct
  misc_feature 1..21: note = Description of Artificial Sequence: Synthetic oligonucleotide
  source 1..21: mol_type = other DNA
gctaatggtgcgggttctcat

SEQ ID NO: 16320 - DNA, 21 bp, synthetic construct
  misc_feature 1..21: note = Description of Artificial Sequence: Synthetic oligonucleotide
  source 1..21: mol_type = other DNA
agactcgacaacaccggcggc

SEQ ID NO: 16321 - DNA, 21 bp, synthetic construct
  misc_feature 1..21: note = Description of Artificial Sequence: Synthetic oligonucleotide
  source 1..21: mol_type = other DNA
aataaggtgcagagtcatgag

SEQ ID NO: 16322 - DNA, 21 bp, synthetic construct
  misc_feature 1..21: note = Description of Artificial Sequence: Synthetic oligonucleotide
  source 1..21: mol_type = other DNA
agcaccggcgccaccagcagc

SEQ ID NO: 16323 - DNA, 21 bp, synthetic construct
  misc_feature 1..21: note = Description of Artificial Sequence: Synthetic oligonucleotide
  source 1..21: mol_type = other DNA
catactgataagagtggggct

SEQ ID NO: 16324 - DNA, 21 bp, synthetic construct
  misc_feature 1..21: note = Description of Artificial Sequence: Synthetic oligonucleotide
  source 1..21: mol_type = other DNA
actgggagtagtactattact

SEQ ID NO: 16325 - DNA, 21 bp, synthetic construct
  misc_feature 1..21: note = Description of Artificial Sequence: Synthetic oligonucleotide
  source 1..21: mol_type = other DNA
ctgagttctcagaagggtaat

SEQ ID NO: 16326 - DNA, 21 bp, synthetic construct
  misc_feature 1..21: note = Description of Artificial Sequence: Synthetic oligonucleotide
  source 1..21: mol_type = other DNA
atgcccagcaacagcagcacc

SEQ ID NO: 16327 - DNA, 21 bp, synthetic construct
  misc_feature 1..21: note = Description of Artificial Sequence: Synthetic oligonucleotide
  source 1..21: mol_type = other DNA
accagaaacacccccaccgaa

SEQ ID NO: 16328 - DNA, 21 bp, synthetic construct
  misc_feature 1..21: note = Description of Artificial Sequence: Synthetic oligonucleotide
  source 1..21: mol_type = other DNA
gccgtcgacaacaaaagccac

SEQ ID NO: 16329 - DNA, 21 bp, synthetic construct
  misc_feature 1..21: note = Description of Artificial Sequence: Synthetic oligonucleotide
  source 1..21: mol_type = other DNA
aacagcgtcagcagcaccggc

SEQ ID NO: 16330 - DNA, 21 bp, synthetic construct
  misc_feature 1..21: note = Description of Artificial Sequence: Synthetic oligonucleotide
  source 1..21: mol_type = other DNA
gccgccagcagcaccccccaa

SEQ ID NO: 16331 - DNA, 21 bp, synthetic construct
  misc_feature 1..21: note = Description of Artificial Sequence: Synthetic oligonucleotide
  source 1..21: mol_type = other DNA
ggcagcagagacagcaccggc

SEQ ID NO: 16332 - DNA, 21 bp, synthetic construct
  misc_feature 1..21: note = Description of Artificial Sequence: Synthetic oligonucleotide
  source 1..21: mol_type = other DNA
ggcgaactcaaaaacgccggc

SEQ ID NO: 16333 - DNA, 21 bp, synthetic construct
  misc_feature 1..21: note = Description of Artificial Sequence: Synthetic oligonucleotide
  source 1..21: mol_type = other DNA
tcgggtagggatgggcataat

SEQ ID NO: 16334 - DNA, 21 bp, synthetic construct
  misc_feature 1..21: note = Description of Artificial Sequence: Synthetic oligonucleotide
  source 1..21: mol_type = other DNA
agcgccggcaacggcaaaagc

SEQ ID NO: 16335 - DNA, 21 bp, synthetic construct
  misc_feature 1..21: note = Description of Artificial Sequence: Synthetic oligonucleotide
  source 1..21: mol_type = other DNA
gacaacaaaaccgccagcaac

SEQ ID NO: 16336 - DNA, 21 bp, synthetic construct
  misc_feature 1..21: note = Description of Artificial Sequence: Synthetic oligonucleotide
  source 1..21: mol_type = other DNA
accgccaccgaaagcagaggc

SEQ ID NO: 16337 - DNA, 21 bp, synthetic construct
  misc_feature 1..21: note = Description of Artificial Sequence: Synthetic oligonucleotide
  source 1..21: mol_type = other DNA
gccaccaccccccccaccagc

SEQ ID NO: 16338 - DNA, 21 bp, synthetic construct
  misc_feature 1..21: note = Description of Artificial Sequence: Synthetic oligonucleotide
  source 1..21: mol_type = other DNA
cagagttcgaatcagatgacg

SEQ ID NO: 16339 - DNA, 21 bp, synthetic construct
  misc_feature 1..21: note = Description of Artificial Sequence: Synthetic oligonucleotide
  source 1..21: mol_type = other DNA
gggaatcatcagccttcttct

SEQ ID NO: 16340 - DNA, 21 bp, synthetic construct
  misc_feature 1..21: note = Description of Artificial Sequence: Synthetic oligonucleotide
  source 1..21: mol_type = other DNA
acgagtaagcctaatccgtct

SEQ ID NO: 16341 - DNA, 21 bp, synthetic construct
  misc_feature 1..21: note = Description of Artificial Sequence: Synthetic oligonucleotide
  source 1..21: mol_type = other DNA
actgggggtactaattctgtt

SEQ ID NO: 16342 - DNA, 21 bp, synthetic construct
  misc_feature 1..21: note = Description of Artificial Sequence: Synthetic oligonucleotide
  source 1..21: mol_type = other DNA
gacaccggcgtcaacagaggc

SEQ ID NO: 16343 - DNA, 21 bp, synthetic construct
  misc_feature 1..21: note = Description of Artificial Sequence: Synthetic oligonucleotide
  source 1..21: mol_type = other DNA
tctggggctggtactcctagt

SEQ ID NO: 16344 - DNA, 21 bp, synthetic construct
  misc_feature 1..21: note = Description of Artificial Sequence: Synthetic oligonucleotide
  source 1..21: mol_type = other DNA
gataatactgttaagactaat

SEQ ID NO: 16345 - DNA, 21 bp, synthetic construct
  misc_feature 1..21: note = Description of Artificial Sequence: Synthetic oligonucleotide
  source 1..21: mol_type = other DNA
gatcagggttctgttagtaag

SEQ ID NO: 16346 - DNA, 21 bp, synthetic construct
  misc_feature 1..21: note = Description of Artificial Sequence: Synthetic oligonucleotide
  source 1..21: mol_type = other DNA
gccatgggcgacagcaaaggc

SEQ ID NO: 16347 - DNA, 21 bp, synthetic construct
  misc_feature 1..21: note = Description of Artificial Sequence: Synthetic oligonucleotide
  source 1..21: mol_type = other DNA
ggcaacagcgccggcggcgcc

SEQ ID NO: 16348 - DNA, 21 bp, synthetic construct
  misc_feature 1..21: note = Description of Artificial Sequence: Synthetic oligonucleotide
  source 1..21: mol_type = other DNA
ggtactgctaaggatgttgct

SEQ ID NO: 16349 - DNA, 21 bp, synthetic construct
  misc_feature 1..21: note = Description of Artificial Sequence: Synthetic oligonucleotide
  source 1..21: mol_type = other DNA
gacagagccgacaaaatgggc

SEQ ID NO: 16350 - DNA, 21 bp, synthetic construct
  misc_feature 1..21: note = Description of Artificial Sequence: Synthetic oligonucleotide
  source 1..21: mol_type = other DNA
gacagaggcaccccccccacc

SEQ ID NO: 16351 - DNA, 21 bp, synthetic construct
  misc_feature 1..21: note = Description of Artificial Sequence: Synthetic oligonucleotide
  source 1..21: mol_type = other DNA
ggcgacggcggcagcctcaaa

SEQ ID NO: 16352 - DNA, 21 bp, synthetic construct
  misc_feature 1..21: note = Description of Artificial Sequence: Synthetic oligonucleotide
  source 1..21: mol_type = other DNA
accatgagcgacaaaggcatg

SEQ ID NO: 16353 - DNA, 21 bp, synthetic construct
  misc_feature 1..21: note = Description of Artificial Sequence: Synthetic oligonucleotide
  source 1..21: mol_type = other DNA
aacaccatcggcgacaacaaa

SEQ ID NO: 16354 - DNA, 21 bp, synthetic construct
  misc_feature 1..21: note = Description of Artificial Sequence: Synthetic oligonucleotide
  source 1..21: mol_type = other DNA
accaccagcgacggcgccaaa

SEQ ID NO: 16355 - DNA, 21 bp, synthetic construct
  misc_feature 1..21: note = Description of Artificial Sequence: Synthetic oligonucleotide
  source 1..21: mol_type = other DNA
agcaacagcaacggccacagc

SEQ ID NO: 16356 - DNA, 21 bp, synthetic construct
  misc_feature 1..21: note = Description of Artificial Sequence: Synthetic oligonucleotide
  source 1..21: mol_type = other DNA
agtggttcgcctcctgctgct

SEQ ID NO: 16357 - DNA, 21 bp, synthetic construct
  misc_feature 1..21: note = Description of Artificial Sequence: Synthetic oligonucleotide
  source 1..21: mol_type = other DNA
agtgggtcgaatcagcctagg

SEQ ID NO: 16358 - DNA, 21 bp, synthetic construct
  misc_feature 1..21: note = Description of Artificial Sequence: Synthetic oligonucleotide
  source 1..21: mol_type = other DNA
cgggatgggtctggtaaggtg

SEQ ID NO: 16359 - DNA, 21 bp, synthetic construct
  misc_feature 1..21: note = Description of Artificial Sequence: Synthetic oligonucleotide
  source 1..21: mol_type = other DNA
aaccaagccgccagccccgtc

SEQ ID NO: 16360 - DNA, 21 bp, synthetic construct
  misc_feature 1..21: note = Description of Artificial Sequence: Synthetic oligonucleotide
  source 1..21: mol_type = other DNA
tcgggttctgcttcgaatgtt

SEQ ID NO: 16361 - DNA, 21 bp, synthetic construct
  misc_feature 1..21: note = Description of Artificial Sequence: Synthetic oligonucleotide
  source 1..21: mol_type = other DNA
agtattgctaaggatcgggcg

SEQ ID NO: 16362 - DNA, 21 bp, synthetic construct
  misc_feature 1..21: note = Description of Artificial Sequence: Synthetic oligonucleotide
  source 1..21: mol_type = other DNA
gatcgtacggttaaggaggtt

SEQ ID NO: 16363 - DNA, 21 bp, synthetic construct
  misc_feature 1..21: note = Description of Artificial Sequence: Synthetic oligonucleotide
  source 1..21: mol_type = other DNA
accaaaaacagccaagtcgtc

SEQ ID NO: 16364 - DNA, 21 bp, synthetic construct
  misc_feature 1..21: note = Description of Artificial Sequence: Synthetic oligonucleotide
  source 1..21: mol_type = other DNA
gaaagcgccaacagaaacgcc

SEQ ID NO: 16365 - DNA, 21 bp, synthetic construct
  misc_feature 1..21: note = Description of Artificial Sequence: Synthetic oligonucleotide
  source 1..21: mol_type = other DNA
agccacagcgaaagcgccaaa

SEQ ID NO: 16366 - DNA, 21 bp, synthetic construct
  misc_feature 1..21: note = Description of Artificial Sequence: Synthetic oligonucleotide
  source 1..21: mol_type = other DNA
agcggcgtcggcggcaaagaa

SEQ ID NO: 16367 - DNA, 21 bp, synthetic construct
  misc_feature 1..21: note = Description of Artificial Sequence: Synthetic oligonucleotide
  source 1..21: mol_type = other DNA
gccccccccgaaggcgccaaa

SEQ ID NO: 16368 - DNA, 21 bp, synthetic construct
  misc_feature 1..21: note = Description of Artificial Sequence: Synthetic oligonucleotide
  source 1..21: mol_type = other DNA
aatgcgcagggggcgaatgct

SEQ ID NO: 16369 - DNA, 21 bp, synthetic construct
  misc_feature 1..21: note = Description of Artificial Sequence: Synthetic oligonucleotide
  source 1..21: mol_type = other DNA
caagtcggcgcccaaaacagc

SEQ ID NO: 16370 - DNA, 21 bp, synthetic construct
  misc_feature 1..21: note = Description of Artificial Sequence: Synthetic oligonucleotide
  source 1..21: mol_type = other DNA
cacagcaacggccacgcccaa

SEQ ID NO: 16371 - DNA, 21 bp, synthetic construct
  misc_feature 1..21: note = Description of Artificial Sequence: Synthetic oligonucleotide
  source 1..21: mol_type = other DNA
ggcaacgccagccccagcgtc

SEQ ID NO: 16372 - DNA, 21 bp, synthetic construct
  misc_feature 1..21: note = Description of Artificial Sequence: Synthetic oligonucleotide
  source 1..21: mol_type = other DNA
ggggattcgaagagtacgctt

SEQ ID NO: 16373 - DNA, 21 bp, synthetic construct
  misc_feature 1..21: note = Description of Artificial Sequence: Synthetic oligonucleotide
  source 1..21: mol_type = other DNA
actcgggctagtggttctact

SEQ ID NO: 16374 - DNA, 21 bp, synthetic construct
  misc_feature 1..21: note = Description of Artificial Sequence: Synthetic oligonucleotide
  source 1..21: mol_type = other DNA
agcgtcacccccagcggcggc

SEQ ID NO: 16375 - DNA, 21 bp, synthetic construct
  misc_feature 1..21: note = Description of Artificial Sequence: Synthetic oligonucleotide
  source 1..21: mol_type = other DNA
acgagtcagacttctactact

SEQ ID NO: 16376 - DNA, 21 bp, synthetic construct
  misc_feature 1..21: note = Description of Artificial Sequence: Synthetic oligonucleotide
  source 1..21: mol_type = other DNA
gaagccaaaagcgaccacaga

SEQ ID NO: 16377 - DNA, 21 bp, synthetic construct
  misc_feature 1..21: note = Description of Artificial Sequence: Synthetic oligonucleotide
  source 1..21: mol_type = other DNA
gccgaaagccacaacgtcaaa

SEQ ID NO: 16378 - DNA, 21 bp, synthetic construct
  misc_feature 1..21: note = Description of Artificial Sequence: Synthetic oligonucleotide
  source 1..21: mol_type = other DNA
ggcatcggcagccccaccgcc

SEQ ID NO: 16379 - DNA, 21 bp, synthetic construct
  misc_feature 1..21: note = Description of Artificial Sequence: Synthetic oligonucleotide
  source 1..21: mol_type = other DNA
ggccaaggcgccggcgccagc

SEQ ID NO: 16380 - DNA, 21 bp, synthetic construct
  misc_feature 1..21: note = Description of Artificial Sequence: Synthetic oligonucleotide
  source 1..21: mol_type = other DNA
caacaaggcagcggcagccac

SEQ ID NO: 16381 - DNA, 21 bp, synthetic construct
  misc_feature 1..21: note = Description of Artificial Sequence: Synthetic oligonucleotide
  source 1..21: mol_type = other DNA
gacaaccccaccaaaacccaa

SEQ ID NO: 16382 - DNA, 21 bp, synthetic construct
  misc_feature 1..21: note = Description of Artificial Sequence: Synthetic oligonucleotide
  source 1..21: mol_type = other DNA
actggtactacggctgctact

SEQ ID NO: 16383 - DNA, 21 bp, synthetic construct
  misc_feature 1..21: note = Description of Artificial Sequence: Synthetic oligonucleotide
  source 1..21: mol_type = other DNA
acttcggggtctgctccgact

SEQ ID NO: 16384 - DNA, 21 bp, synthetic construct
  misc_feature 1..21: note = Description of Artificial Sequence: Synthetic oligonucleotide
  source 1..21: mol_type = other DNA
gggactggttcgacttctaat

SEQ ID NO: 16385 - DNA, 21 bp, synthetic construct
  misc_feature 1..21: note = Description of Artificial Sequence: Synthetic oligonucleotide
  source 1..21: mol_type = other DNA
aattctgggtctaattctatg

SEQ ID NO: 16386 - DNA, 21 bp, synthetic construct
  misc_feature 1..21: note = Description of Artificial Sequence: Synthetic oligonucleotide
  source 1..21: mol_type = other DNA
caaaccggccaacacagcacc

SEQ ID NO: 16387 - DNA, 21 bp, synthetic construct
  misc_feature 1..21: note = Description of Artificial Sequence: Synthetic oligonucleotide
  source 1..21: mol_type = other DNA
ggcgaccccaaaaacagcggc

SEQ ID NO: 16388 - DNA, 21 bp, synthetic construct
  misc_feature 1..21: note = Description of Artificial Sequence: Synthetic oligonucleotide
  source 1..21: mol_type = other DNA
tcttcgccgccgccttcgcat

SEQ ID NO: 16389 - DNA, 21 bp, synthetic construct
  misc_feature 1..21: note = Description of Artificial Sequence: Synthetic oligonucleotide
  source 1..21: mol_type = other DNA
ggccaagacagagtcgccagc

SEQ ID NO: 16390 - DNA, 21 bp, synthetic construct
  misc_feature 1..21: note = Description of Artificial Sequence: Synthetic oligonucleotide
  source 1..21: mol_type = other DNA
gaggtggcgcagccttctaat

SEQ ID NO: 16391 - DNA, 21 bp, synthetic construct
  misc_feature 1..21: note = Description of Artificial Sequence: Synthetic oligonucleotide
  source 1..21: mol_type = other DNA
ctcaacgaacacaaagtcagc

SEQ ID NO: 16392 - DNA, 21 bp, synthetic construct
  misc_feature 1..21: note = Description of Artificial Sequence: Synthetic oligonucleotide
  source 1..21: mol_type = other DNA
ggtgagactggtcagcataag

SEQ ID NO: 16393 - DNA, 21 bp, synthetic construct
  misc_feature 1..21: note = Description of Artificial Sequence: Synthetic oligonucleotide
  source 1..21: mol_type = other DNA
tcgactcaggaggctaagcat

SEQ ID NO: 16394 - DNA, 21 bp, synthetic construct
  misc_feature 1..21: note = Description of Artificial Sequence: Synthetic oligonucleotide
  source 1..21: mol_type = other DNA
cagagtcatgataagactaat

SEQ ID NO: 16395 - DNA, 21 bp, synthetic construct
  misc_feature 1..21: note = Description of Artificial Sequence: Synthetic oligonucleotide
  source 1..21: mol_type = other DNA
cacagcgacaccagcaaaagc

SEQ ID NO: 16396 - DNA, 21 bp, synthetic construct
  misc_feature 1..21: note = Description of Artificial Sequence: Synthetic oligonucleotide
  source 1..21: mol_type = other DNA
agcggcatcggcaccagcacc

SEQ ID NO: 16397 - DNA, 21 bp, synthetic construct
  misc_feature 1..21: note = Description of Artificial Sequence: Synthetic oligonucleotide
  source 1..21: mol_type = other DNA
aatacgggggagactccgagg

SEQ ID NO: 16398 - DNA, 21 bp, synthetic construct
  misc_feature 1..21: note = Description of Artificial Sequence: Synthetic oligonucleotide
  source 1..21: mol_type = other DNA
caggggggtgatagtacgcgt

SEQ ID NO: 16399 - DNA, 21 bp, synthetic construct
  misc_feature 1..21: note = Description of Artificial Sequence: Synthetic oligonucleotide
  source 1..21: mol_type = other DNA
acgacgactgagaagtctggt

SEQ ID NO: 16400 - DNA, 21 bp, synthetic construct
  misc_feature 1..21: note = Description of Artificial Sequence: Synthetic oligonucleotide
  source 1..21: mol_type = other DNA
acgactactgcgacttctcag

SEQ ID NO: 16401 - DNA, 21 bp, synthetic construct
  misc_feature 1..21: note = Description of Artificial Sequence: Synthetic oligonucleotide
  source 1..21: mol_type = other DNA
tctggggcgaagtcggatgct

SEQ ID NO: 16402 - DNA, 21 bp, synthetic construct
  misc_feature 1..21: note = Description of Artificial Sequence: Synthetic oligonucleotide
  source 1..21: mol_type = other DNA
aacagcgccgacaaaagcatc

SEQ ID NO: 16403 - DNA, 21 bp, synthetic construct
  misc_feature 1..21: note = Description of Artificial Sequence: Synthetic oligonucleotide
  source 1..21: mol_type = other DNA
gccagcagccccagcagcatg

SEQ ID NO: 16404 - DNA, 21 bp, synthetic construct
  misc_feature 1..21: note = Description of Artificial Sequence: Synthetic oligonucleotide
  source 1..21: mol_type = other DNA
gcgcctagttctaatcctgtt

SEQ ID NO: 16405 - DNA, 21 bp, synthetic construct
  misc_feature 1..21: note = Description of Artificial Sequence: Synthetic oligonucleotide
  source 1..21: mol_type = other DNA
ggcatcgacgccaaaatgagc

SEQ ID NO: 16406 - DNA, 21 bp, synthetic construct
  misc_feature 1..21: note = Description of Artificial Sequence: Synthetic oligonucleotide
  source 1..21: mol_type = other DNA
gatacggtttctaagacggct

SEQ ID NO: 16407 - DNA, 21 bp, synthetic construct
  misc_feature 1..21: note = Description of Artificial Sequence: Synthetic oligonucleotide
  source 1..21: mol_type = other DNA
aattcgggtagtcaggcgaat

SEQ ID NO: 16408 - DNA, 21 bp, synthetic construct
  misc_feature 1..21: note = Description of Artificial Sequence: Synthetic oligonucleotide
  source 1..21: mol_type = other DNA
accagccaagcccaaaccggc

SEQ ID NO: 16409 - DNA, 21 bp, synthetic construct
  misc_feature 1..21: note = Description of Artificial Sequence: Synthetic oligonucleotide
  source 1..21: mol_type = other DNA
accggccaacccagcagcgtc

SEQ ID NO: 16410 - DNA, 21 bp, synthetic construct
  misc_feature 1..21: note = Description of Artificial Sequence: Synthetic oligonucleotide
  source 1..21: mol_type = other DNA
agcaccggccaagcccccagc

SEQ ID NO: 16411 - DNA, 21 bp, synthetic construct
  misc_feature 1..21: note = Description of Artificial Sequence: Synthetic oligonucleotide
  source 1..21: mol_type = other DNA
agccccggccacaaactcatg

SEQ ID NO: 16412 - DNA, 21 bp, synthetic construct
  misc_feature 1..21: note = Description of Artificial Sequence: Synthetic oligonucleotide
  source 1..21: mol_type = other DNA
ggcaccgaaaccaaaaccggc

SEQ ID NO: 16413 - DNA, 21 bp, synthetic construct
  misc_feature 1..21: note = Description of Artificial Sequence: Synthetic oligonucleotide
  source 1..21: mol_type = other DNA
ggtggtgatcagggggttaag

SEQ ID NO: 16414 - DNA, 21 bp, synthetic construct
  misc_feature 1..21: note = Description of Artificial Sequence: Synthetic oligonucleotide
  source 1..21: mol_type = other DNA
gtcgtcggcagaacccccggc

SEQ ID NO: 16415 - DNA, 21 bp, synthetic construct
  misc_feature 1..21: note = Description of Artificial Sequence: Synthetic oligonucleotide
  source 1..21: mol_type = other DNA
gaaggcagcaaaacccccgtc

SEQ ID NO: 16416 - DNA, 21 bp, synthetic construct
  misc_feature 1..21: note = Description of Artificial Sequence: Synthetic oligonucleotide
  source 1..21: mol_type = other DNA
accagcgacagaaccagcacc

SEQ ID NO: 16417 - DNA, 21 bp, synthetic construct
  misc_feature 1..21: note = Description of Artificial Sequence: Synthetic oligonucleotide
  source 1..21: mol_type = other DNA
atgaagcagacgtcggctgtg

SEQ ID NO: 16418 - DNA, 21 bp, synthetic construct
  misc_feature 1..21: note = Description of Artificial Sequence: Synthetic oligonucleotide
  source 1..21: mol_type = other DNA
gacgtccccaccagcaaagcc

SEQ ID NO: 16419 - DNA, 21 bp, synthetic construct
  misc_feature 1..21: note = Description of Artificial Sequence: Synthetic oligonucleotide
  source 1..21: mol_type = other DNA
actgcggcgactgtggctaag

SEQ ID NO: 16420 - DNA, 21 bp, synthetic construct
  misc_feature 1..21: note = Description of Artificial Sequence: Synthetic oligonucleotide
  source 1..21: mol_type = other DNA
aggcagtctgataaggtttct

SEQ ID NO: 16421 - DNA, 21 bp, synthetic construct
  misc_feature 1..21: note = Description of Artificial Sequence: Synthetic oligonucleotide
  source 1..21: mol_type = other DNA
ggcctccaaaccaacggcacc

SEQ ID NO: 16422 - DNA, 21 bp, synthetic construct
  misc_feature 1..21: note = Description of Artificial Sequence: Synthetic oligonucleotide
  source 1..21: mol_type = other DNA
agcggcgtccaagccaccaac

SEQ ID NO: 16423 - DNA, 21 bp, synthetic construct
  misc_feature 1..21: note = Description of Artificial Sequence: Synthetic oligonucleotide
  source 1..21: mol_type = other DNA
gctacgaatgagaagacgttt

SEQ ID NO: 16424 - DNA, 21 bp, synthetic construct
  misc_feature 1..21: note = Description of Artificial Sequence: Synthetic oligonucleotide
  source 1..21: mol_type = other DNA
tctggggaggctaaggttgct

SEQ ID NO: 16425 - DNA, 21 bp, synthetic construct
  misc_feature 1..21: note = Description of Artificial Sequence: Synthetic oligonucleotide
  source 1..21: mol_type = other DNA
gacagcgccaaacccaacagc

SEQ ID NO: 16426 - DNA, 21 bp, synthetic construct
  misc_feature 1..21: note = Description of Artificial Sequence: Synthetic oligonucleotide
  source 1..21: mol_type = other DNA
actacgggggcgtctcctatt

SEQ ID NO: 16427 - DNA, 21 bp, synthetic construct
  misc_feature 1..21: note = Description of Artificial Sequence: Synthetic oligonucleotide
  source 1..21: mol_type = other DNA
gttacggggaatgctggtact

SEQ ID NO: 16428 - DNA, 21 bp, synthetic construct
  misc_feature 1..21: note = Description of Artificial Sequence: Synthetic oligonucleotide
  source 1..21: mol_type = other DNA
aatacgacttcgggtaataat

SEQ ID NO: 16429 - DNA, 21 bp, synthetic construct
  misc_feature 1..21: note = Description of Artificial Sequence: Synthetic oligonucleotide
  source 1..21: mol_type = other DNA
aatgatagtcagaaggtggct

SEQ ID NO: 16430 - DNA, 21 bp, synthetic construct
  misc_feature 1..21: note = Description of Artificial Sequence: Synthetic oligonucleotide
  source 1..21: mol_type = other DNA
gcgagtacgggttcgagtaag

SEQ ID NO: 16431 - DNA, 21 bp, synthetic construct
  misc_feature 1..21: note = Description of Artificial Sequence: Synthetic oligonucleotide
  source 1..21: mol_type = other DNA
tcgtctgggggggcgtcgacg

SEQ ID NO: 16432 - DNA, 21 bp, synthetic construct
  misc_feature 1..21: note = Description of Artificial Sequence: Synthetic oligonucleotide
  source 1..21: mol_type = other DNA
gacggcagacaaaccaccagc

SEQ ID NO: 16433 - DNA, 21 bp, synthetic construct
  misc_feature 1..21: note = Description of Artificial Sequence: Synthetic oligonucleotide
  source 1..21: mol_type = other DNA
gctggggagactgcgaggacg

SEQ ID NO: 16434 - DNA, 21 bp, synthetic construct
  misc_feature 1..21: note = Description of Artificial Sequence: Synthetic oligonucleotide
  source 1..21: mol_type = other DNA
gccagcaacagccccgtcagc

SEQ ID NO: 16435 - DNA, 21 bp, synthetic construct
  misc_feature 1..21: note = Description of Artificial Sequence: Synthetic oligonucleotide
  source 1..21: mol_type = other DNA
agcggcaaaggcagcagcgtc

SEQ ID NO: 16436 - DNA, 21 bp, synthetic construct
  misc_feature 1..21: note = Description of Artificial Sequence: Synthetic oligonucleotide
  source 1..21: mol_type = other DNA
tctgggagtgagtcgccgaag

SEQ ID NO: 16437 - DNA, 21 bp, synthetic construct
  misc_feature 1..21: note = Description of Artificial Sequence: Synthetic oligonucleotide
  source 1..21: mol_type = other DNA
accgccagcggcaccccccaa

SEQ ID NO: 16438 - DNA, 21 bp, synthetic construct
  misc_feature 1..21: note = Description of Artificial Sequence: Synthetic oligonucleotide
  source 1..21: mol_type = other DNA
aacaccggcagcgccagcatc

SEQ ID NO: 16439 - DNA, 21 bp, synthetic construct
  misc_feature 1..21: note = Description of Artificial Sequence: Synthetic oligonucleotide
  source 1..21: mol_type = other DNA
gaggctactgttaagacgggg

SEQ ID NO: 16440 - DNA, 21 bp, synthetic construct
  misc_feature 1..21: note = Description of Artificial Sequence: Synthetic oligonucleotide
  source 1..21: mol_type = other DNA
atccaaaaaggcaacaacgaa

SEQ ID NO: 16441 - DNA, 21 bp, synthetic construct
  misc_feature 1..21: note = Description of Artificial Sequence: Synthetic oligonucleotide
  source 1..21: mol_type = other DNA
gattcgaataagcagaatctt

SEQ ID NO: 16442 - DNA, 21 bp, synthetic construct
  misc_feature 1..21: note = Description of Artificial Sequence: Synthetic oligonucleotide
  source 1..21: mol_type = other DNA
actggtggtaatccggttacg

SEQ ID NO: 16443 - DNA, 21 bp, synthetic construct
  misc_feature 1..21: note = Description of Artificial Sequence: Synthetic oligonucleotide
  source 1..21: mol_type = other DNA
caaggcagcaacaacagcaga

SEQ ID NO: 16444 - DNA, 21 bp, synthetic construct
  misc_feature 1..21: note = Description of Artificial Sequence: Synthetic oligonucleotide
  source 1..21: mol_type = other DNA
aaagtcgccaccagcagcagc

SEQ ID NO: 16445 - DNA, 21 bp, synthetic construct
  misc_feature 1..21: note = Description of Artificial Sequence: Synthetic oligonucleotide
  source 1..21: mol_type = other DNA
gacagcagcagagaagccaga

SEQ ID NO: 16446 - DNA, 21 bp, synthetic construct
  misc_feature 1..21: note = Description of Artificial Sequence: Synthetic oligonucleotide
  source 1..21: mol_type = other DNA
gaaggcagcagcagcagcatg

SEQ ID NO: 16447 - DNA, 21 bp, synthetic construct
  misc_feature 1..21: note = Description of Artificial Sequence: Synthetic oligonucleotide
  source 1..21: mol_type = other DNA
aataatggttcttctgttgcg

SEQ ID NO: 16448 - DNA, 21 bp, synthetic construct
  misc_feature 1..21: note = Description of Artificial Sequence: Synthetic oligonucleotide
  source 1..21: mol_type = other DNA
gaaaccagcgaaagaaaccaa

SEQ ID NO: 16449 - DNA, 21 bp, synthetic construct
  misc_feature 1..21: note = Description of Artificial Sequence: Synthetic oligonucleotide
  source 1..21: mol_type = other DNA
gacagcggcaccggccccacc

SEQ ID NO: 16450 - DNA, 21 bp, synthetic construct
  misc_feature 1..21: note = Description of Artificial Sequence: Synthetic oligonucleotide
  source 1..21: mol_type = other DNA
gatagtgctaagtctagtgtt

SEQ ID NO: 16451 - DNA, 21 bp, synthetic construct
  misc_feature 1..21: note = Description of Artificial Sequence: Synthetic oligonucleotide
  source 1..21: mol_type = other DNA
tctgatactaagacgtctacg

SEQ ID NO: 16452 - DNA, 21 bp, synthetic construct
  misc_feature 1..21: note = Description of Artificial Sequence: Synthetic oligonucleotide
  source 1..21: mol_type = other DNA
cagggtcagggtcaggctagt

SEQ ID NO: 16453 - DNA, 21 bp, synthetic construct
  misc_feature 1..21: note = Description of Artificial Sequence: Synthetic oligonucleotide
  source 1..21: mol_type = other DNA
aacaacggcgtcagcagcacc

SEQ ID NO: 16454 - DNA, 21 bp, synthetic construct
  misc_feature 1..21: note = Description of Artificial Sequence: Synthetic oligonucleotide
  source 1..21: mol_type = other DNA
agacaagccagcagcaccacc

SEQ ID NO: 16455 - DNA, 21 bp, synthetic construct
  misc_feature 1..21: note = Description of Artificial Sequence: Synthetic oligonucleotide
  source 1..21: mol_type = other DNA
agcaacaacgccagccccagc

SEQ ID NO: 16456 - DNA, 21 bp, synthetic construct
  misc_feature 1..21: note = Description of Artificial Sequence: Synthetic oligonucleotide
  source 1..21: mol_type = other DNA
agcgacggcaaaagccacccc

SEQ ID NO: 16457 - DNA, 21 bp, synthetic construct
  misc_feature 1..21: note = Description of Artificial Sequence: Synthetic oligonucleotide
  source 1..21: mol_type = other DNA
tcgcctagtaattcgcatagt

SEQ ID NO: 16458 - DNA, 21 bp, synthetic construct
  misc_feature 1..21: note = Description of Artificial Sequence: Synthetic oligonucleotide
  source 1..21: mol_type = other DNA
gctcagtctgagaagacgctt

SEQ ID NO: 16459 - DNA, 21 bp, synthetic construct
  misc_feature 1..21: note = Description of Artificial Sequence: Synthetic oligonucleotide
  source 1..21: mol_type = other DNA
tctacttctaaggattatagt

SEQ ID NO: 16460 - DNA, 21 bp, synthetic construct
  misc_feature 1..21: note = Description of Artificial Sequence: Synthetic oligonucleotide
  source 1..21: mol_type = other DNA
agcaccggcgccaccagcaac

SEQ ID NO: 16461 - DNA, 21 bp, synthetic construct
  misc_feature 1..21: note = Description of Artificial Sequence: Synthetic oligonucleotide
  source 1..21: mol_type = other DNA
accggcagcggcagcagcagc

SEQ ID NO: 16462 - DNA, 21 bp, synthetic construct
  misc_feature 1..21: note = Description of Artificial Sequence: Synthetic oligonucleotide
  source 1..21: mol_type = other DNA
actgggtctaatcatcctggt

SEQ ID NO: 16463 - DNA, 21 bp, synthetic construct
  misc_feature 1..21: note = Description of Artificial Sequence: Synthetic oligonucleotide
  source 1..21: mol_type = other DNA
accagagcccccaccaccggc

SEQ ID NO: 16464 - DNA, 21 bp, synthetic construct
  misc_feature 1..21: note = Description of Artificial Sequence: Synthetic oligonucleotide
  source 1..21: mol_type = other DNA
agtggggtgaatacgccggct

SEQ ID NO: 16465 - DNA, 21 bp, synthetic construct
  misc_feature 1..21: note = Description of Artificial Sequence: Synthetic oligonucleotide
  source 1..21: mol_type = other DNA
cacggcgccggccaaagcagc

SEQ ID NO: 16466 - DNA, 21 bp, synthetic construct
  misc_feature 1..21: note = Description of Artificial Sequence: Synthetic oligonucleotide
  source 1..21: mol_type = other DNA
ggtggtgggaatacggctatg

SEQ ID NO: 16467 - DNA, 21 bp, synthetic construct
  misc_feature 1..21: note = Description of Artificial Sequence: Synthetic oligonucleotide
  source 1..21: mol_type = other DNA
ggttcttctgcgcctgctctg

SEQ ID NO: 16468 - DNA, 21 bp, synthetic construct
  misc_feature 1..21: note = Description of Artificial Sequence: Synthetic oligonucleotide
  source 1..21: mol_type = other DNA
cagaatgctacgactagttct

SEQ ID NO: 16469 - DNA, 21 bp, synthetic construct
  misc_feature 1..21: note = Description of Artificial Sequence: Synthetic oligonucleotide
  source 1..21: mol_type = other DNA
ggcagccaaaacggcctcagc

SEQ ID NO: 16470 - DNA, 21 bp, synthetic construct
  misc_feature 1..21: note = Description of Artificial Sequence: Synthetic oligonucleotide
  source 1..21: mol_type = other DNA
cagtctactcctggtactcag

SEQ ID NO: 16471 - DNA, 21 bp, synthetic construct
  misc_feature 1..21: note = Description of Artificial Sequence: Synthetic oligonucleotide
  source 1..21: mol_type = other DNA
aggaaggagcagtcgagtcag

SEQ ID NO: 16472 - DNA, 21 bp, synthetic construct
  misc_feature 1..21: note = Description of Artificial Sequence: Synthetic oligonucleotide
  source 1..21: mol_type = other DNA
ggggttgggggggcttcgtct

SEQ ID NO: 16473 - DNA, 21 bp, synthetic construct
  misc_feature 1..21: note = Description of Artificial Sequence: Synthetic oligonucleotide
  source 1..21: mol_type = other DNA
aggcagagtgggagtaaggat

SEQ ID NO: 16474 - DNA, 21 bp, synthetic construct
  misc_feature 1..21: note = Description of Artificial Sequence: Synthetic oligonucleotide
  source 1..21: mol_type = other DNA
gccacccaaagcgccagcagc

SEQ ID NO: 16475 - DNA, 21 bp, synthetic construct
  misc_feature 1..21: note = Description of Artificial Sequence: Synthetic oligonucleotide
  source 1..21: mol_type = other DNA
agaaacggcggcagcagcatg

SEQ ID NO: 16476 - DNA, 21 bp, synthetic construct
  misc_feature 1..21: note = Description of Artificial Sequence: Synthetic oligonucleotide
  source 1..21: mol_type = other DNA
agcggcggcgccagcagcctc

SEQ ID NO: 16477 - DNA, 21 bp, synthetic construct
  misc_feature 1..21: note = Description of Artificial Sequence: Synthetic oligonucleotide
  source 1..21: mol_type = other DNA
cagacgacggcgccgcatggt

SEQ ID NO: 16478 - DNA, 21 bp, synthetic construct
  misc_feature 1..21: note = Description of Artificial Sequence: Synthetic oligonucleotide
  source 1..21: mol_type = other DNA
agcaacagcaccgccccccac

SEQ ID NO: 16479 - DNA, 21 bp, synthetic construct
  misc_feature 1..21: note = Description of Artificial Sequence: Synthetic oligonucleotide
  source 1..21: mol_type = other DNA
agcggcagcaacaccccccac

SEQ ID NO: 16480 - DNA, 21 bp, synthetic construct
  misc_feature 1..21: note = Description of Artificial Sequence: Synthetic oligonucleotide
  source 1..21: mol_type = other DNA
ggcagcagcgccggcggcaac

SEQ ID NO: 16481 - DNA, 21 bp, synthetic construct
  misc_feature 1..21: note = Description of Artificial Sequence: Synthetic oligonucleotide
  source 1..21: mol_type = other DNA
acgggtactaatactgtgttg

SEQ ID NO: 16482 - DNA, 21 bp, synthetic construct
  misc_feature 1..21: note = Description of Artificial Sequence: Synthetic oligonucleotide
  source 1..21: mol_type = other DNA
aaagacggcggcagccaagtc

SEQ ID NO: 16483 - DNA, 21 bp, synthetic construct
  misc_feature 1..21: note = Description of Artificial Sequence: Synthetic oligonucleotide
  source 1..21: mol_type = other DNA
accaccggcggcaccaacgtc

SEQ ID NO: 16484 - DNA, 21 bp, synthetic construct
  misc_feature 1..21: note = Description of Artificial Sequence: Synthetic oligonucleotide
  source 1..21: mol_type = other DNA
cagaatcaggataagccgact

SEQ ID NO: 16485 - DNA, 21 bp, synthetic construct
  misc_feature 1..21: note = Description of Artificial Sequence: Synthetic oligonucleotide
  source 1..21: mol_type = other DNA
gaacaaagaagcagcggcctc

SEQ ID NO: 16486 - DNA, 21 bp, synthetic construct
  misc_feature 1..21: note = Description of Artificial Sequence: Synthetic oligonucleotide
  source 1..21: mol_type = other DNA
agtactactaattctggtggt

SEQ ID NO: 16487 - DNA, 21 bp, synthetic construct
  misc_feature 1..21: note = Description of Artificial Sequence: Synthetic oligonucleotide
  source 1..21: mol_type = other DNA
accctcgtcgccaaacccgaa

SEQ ID NO: 16488 - DNA, 21 bp, synthetic construct
  misc_feature 1..21: note = Description of Artificial Sequence: Synthetic oligonucleotide
  source 1..21: mol_type = other DNA
gagagtcctcagaagtctggg

SEQ ID NO: 16489 - DNA, 21 bp, synthetic construct
  misc_feature 1..21: note = Description of Artificial Sequence: Synthetic oligonucleotide
  source 1..21: mol_type = other DNA
gaccccagcaaaagcagcggc

SEQ ID NO: 16490 - DNA, 21 bp, synthetic construct
  misc_feature 1..21: note = Description of Artificial Sequence: Synthetic oligonucleotide
  source 1..21: mol_type = other DNA
aatgttggttctggtactctt

SEQ ID NO: 16491 - DNA, 21 bp, synthetic construct
  misc_feature 1..21: note = Description of Artificial Sequence: Synthetic oligonucleotide
  source 1..21: mol_type = other DNA
agtcatgggaataaggagacg

SEQ ID NO: 16492 - DNA, 21 bp, synthetic construct
  misc_feature 1..21: note = Description of Artificial Sequence: Synthetic oligonucleotide
  source 1..21: mol_type = other DNA
aacagcggccacgcccccgtc

SEQ ID NO: 16493 - DNA, 21 bp, synthetic construct
  misc_feature 1..21: note = Description of Artificial Sequence: Synthetic oligonucleotide
  source 1..21: mol_type = other DNA
aatgagcataatggggttaag

SEQ ID NO: 16494 - DNA, 21 bp, synthetic construct
  misc_feature 1..21: note = Description of Artificial Sequence: Synthetic oligonucleotide
  source 1..21: mol_type = other DNA
accggccaacccagcagcaga

SEQ ID NO: 16495 - DNA, 21 bp, synthetic construct
  misc_feature 1..21: note = Description of Artificial Sequence: Synthetic oligonucleotide
  source 1..21: mol_type = other DNA
caaggccccagccaacccggc

SEQ ID NO: 16496 - DNA, 21 bp, synthetic construct
  misc_feature 1..21: note = Description of Artificial Sequence: Synthetic oligonucleotide
  source 1..21: mol_type = other DNA
gctactacgtcttctaatagt

SEQ ID NO: 16497 - DNA, 21 bp, synthetic construct
  misc_feature 1..21: note = Description of Artificial Sequence: Synthetic oligonucleotide
  source 1..21: mol_type = other DNA
gtgactagtaatgataagggg

SEQ ID NO: 16498 - DNA, 21 bp, synthetic construct
  misc_feature 1..21: note = Description of Artificial Sequence: Synthetic oligonucleotide
  source 1..21: mol_type = other DNA
attggtactggtaagcctgag

SEQ ID NO: 16499 - DNA, 21 bp, synthetic construct
  misc_feature 1..21: note = Description of Artificial Sequence: Synthetic oligonucleotide
  source 1..21: mol_type = other DNA
gccaccggcgccagcagcaac

SEQ ID NO: 16500 - DNA, 21 bp, synthetic construct
  misc_feature 1..21: note = Description of Artificial Sequence: Synthetic oligonucleotide
  source 1..21: mol_type = other DNA
ctccccagcaacgccaaaggc

SEQ ID NO: 16501 - DNA, 21 bp, synthetic construct
  misc_feature 1..21: note = Description of Artificial Sequence: Synthetic oligonucleotide
  source 1..21: mol_type = other DNA
agcgtcggcagcgccggcggc

SEQ ID NO: 16502 - DNA, 21 bp, synthetic construct
  misc_feature 1..21: note = Description of Artificial Sequence: Synthetic oligonucleotide
  source 1..21: mol_type = other DNA
aacaccggcagcggcggcacc

SEQ ID NO: 16503 - DNA, 21 bp, synthetic construct
  misc_feature 1..21: note = Description of Artificial Sequence: Synthetic oligonucleotide
  source 1..21: mol_type = other DNA
ggtgcgggtggtaattcttct

SEQ ID NO: 16504 - DNA, 21 bp, synthetic construct
  misc_feature 1..21: note = Description of Artificial Sequence: Synthetic oligonucleotide
  source 1..21: mol_type = other DNA
agcaacaacaaacccagcctc

SEQ ID NO: 16505 - DNA, 21 bp, synthetic construct
  misc_feature 1..21: note = Description of Artificial Sequence: Synthetic oligonucleotide
  source 1..21: mol_type = other DNA
gaacaaggcaaaaacagccac

SEQ ID NO: 16506 - DNA, 21 bp, synthetic construct
  misc_feature 1..21: note = Description of Artificial Sequence: Synthetic oligonucleotide
  source 1..21: mol_type = other DNA
gattcgtcttctattgtgaag

SEQ ID NO: 16507 - DNA, 21 bp, synthetic construct
  misc_feature 1..21: note = Description of Artificial Sequence: Synthetic oligonucleotide
  source 1..21: mol_type = other DNA
gccaccggcaccagcggcaga

SEQ ID NO: 16508 - DNA, 21 bp, synthetic construct
  misc_feature 1..21: note = Description of Artificial Sequence: Synthetic oligonucleotide
  source 1..21: mol_type = other DNA
accaccaacgaacccagaatc

SEQ ID NO: 16509 - DNA, 21 bp, synthetic construct
  misc_feature 1..21: note = Description of Artificial Sequence: Synthetic oligonucleotide
  source 1..21: mol_type = other DNA
cataatacttctgggattgcg

SEQ ID NO: 16510 - DNA, 21 bp, synthetic construct
  misc_feature 1..21: note = Description of Artificial Sequence: Synthetic oligonucleotide
  source 1..21: mol_type = other DNA
agcggcaccaacagcagcagc

SEQ ID NO: 16511 - DNA, 21 bp, synthetic construct
  misc_feature 1..21: note = Description of Artificial Sequence: Synthetic oligonucleotide
  source 1..21: mol_type = other DNA
atgggtgggaatactgctggt

SEQ ID NO: 16512 - DNA, 21 bp, synthetic construct
  misc_feature 1..21: note = Description of Artificial Sequence: Synthetic oligonucleotide
  source 1..21: mol_type = other DNA
ggcgccagcccccaaaaaggc

SEQ ID NO: 16513 - DNA, 21 bp, synthetic construct
  misc_feature 1..21: note = Description of Artificial Sequence: Synthetic oligonucleotide
  source 1..21: mol_type = other DNA
gggattgggaagtcggatgcg

SEQ ID NO: 16514 - DNA, 21 bp, synthetic construct
  misc_feature 1..21: note = Description of Artificial Sequence: Synthetic oligonucleotide
  source 1..21: mol_type = other DNA
gtcagcagcggcagcagcacc

SEQ ID NO: 16515 - DNA, 21 bp, synthetic construct
  misc_feature 1..21: note = Description of Artificial Sequence: Synthetic oligonucleotide
  source 1..21: mol_type = other DNA
agcgccaccaacaccagcaac

SEQ ID NO: 16516 - DNA, 21 bp, synthetic construct
  misc_feature 1..21: note = Description of Artificial Sequence: Synthetic oligonucleotide
  source 1..21: mol_type = other DNA
aattctggggttacgcatgct

SEQ ID NO: 16517 - DNA, 21 bp, synthetic construct
  misc_feature 1..21: note = Description of Artificial Sequence: Synthetic oligonucleotide
  source 1..21: mol_type = other DNA
gggtcgtcttctcctgcgaag

SEQ ID NO: 16518 - DNA, 21 bp, synthetic construct
  misc_feature 1..21: note = Description of Artificial Sequence: Synthetic oligonucleotide
  source 1..21: mol_type = other DNA
gcgggtagttctagttcgaag

SEQ ID NO: 16519 - DNA, 21 bp, synthetic construct
  misc_feature 1..21: note = Description of Artificial Sequence: Synthetic oligonucleotide
  source 1..21: mol_type = other DNA
ggggggatttctgataataag

SEQ ID NO: 16520 - DNA, 21 bp, synthetic construct
  misc_feature 1..21: note = Description of Artificial Sequence: Synthetic oligonucleotide
  source 1..21: mol_type = other DNA
aacagcaaaaccaacagccaa

SEQ ID NO: 16521 - DNA, 21 bp, synthetic construct
  misc_feature 1..21: note = Description of Artificial Sequence: Synthetic oligonucleotide
  source 1..21: mol_type = other DNA
atgaacggcagcgccgccagc

SEQ ID NO: 16522 - DNA, 21 bp, synthetic construct
  misc_feature 1..21: note = Description of Artificial Sequence: Synthetic oligonucleotide
  source 1..21: mol_type = other DNA
caaggcaaagacagcggcagc

SEQ ID NO: 16523 - DNA, 21 bp, synthetic construct
  misc_feature 1..21: note = Description of Artificial Sequence: Synthetic oligonucleotide
  source 1..21: mol_type = other DNA
aggactgtgggtgatcggtct

SEQ ID NO: 16524 - DNA, 21 bp, synthetic construct
  misc_feature 1..21: note = Description of Artificial Sequence: Synthetic oligonucleotide
  source 1..21: mol_type = other DNA
gaagccgccaacaaaaacatc

SEQ ID NO: 16525 - DNA, 21 bp, synthetic construct
  misc_feature 1..21: note = Description of Artificial Sequence: Synthetic oligonucleotide
  source 1..21: mol_type = other DNA
agtacgacgacgaaggcgggg

SEQ ID NO: 16526 - DNA, 21 bp, synthetic construct
  misc_feature 1..21: note = Description of Artificial Sequence: Synthetic oligonucleotide
  source 1..21: mol_type = other DNA
cataagacggagaatgggggg

SEQ ID NO: 16527 - DNA, 21 bp, synthetic construct
  misc_feature 1..21: note = Description of Artificial Sequence: Synthetic oligonucleotide
  source 1..21: mol_type = other DNA
gacaacaacggcagaaacacc

SEQ ID NO: 16528 - DNA, 21 bp, synthetic construct
  misc_feature 1..21: note = Description of Artificial Sequence: Synthetic oligonucleotide
  source 1..21: mol_type = other DNA
actcagtcttcgtcggctaat

SEQ ID NO: 16529 - DNA, 21 bp, synthetic construct
  misc_feature 1..21: note = Description of Artificial Sequence: Synthetic oligonucleotide
  source 1..21: mol_type = other DNA
tctggtaatgcgaatacgctt

SEQ ID NO: 16530 - DNA, 21 bp, synthetic construct
  misc_feature 1..21: note = Description of Artificial Sequence: Synthetic oligonucleotide
  source 1..21: mol_type = other DNA
agcaccagcaacggcgccaaa

SEQ ID NO: 16531 - DNA, 21 bp, synthetic construct
  misc_feature 1..21: note = Description of Artificial Sequence: Synthetic oligonucleotide
  source 1..21: mol_type = other DNA
gccaacggcgcccacagcagc

SEQ ID NO: 16532 - DNA, 21 bp, synthetic construct
  misc_feature 1..21: note = Description of Artificial Sequence: Synthetic oligonucleotide
  source 1..21: mol_type = other DNA
ggcagcggcaacgcccacagc

SEQ ID NO: 16533 - DNA, 21 bp, synthetic construct
  misc_feature 1..21: note = Description of Artificial Sequence: Synthetic oligonucleotide
  source 1..21: mol_type = other DNA
acggtgaattctaaggctcag

SEQ ID NO: 16534 - DNA, 21 bp, synthetic construct
  misc_feature 1..21: note = Description of Artificial Sequence: Synthetic oligonucleotide
  source 1..21: mol_type = other DNA
ctgggggggtcttctcctaag

SEQ ID NO: 16535 - DNA, 21 bp, synthetic construct
  misc_feature 1..21: note = Description of Artificial Sequence: Synthetic oligonucleotide
  source 1..21: mol_type = other DNA
gaaaaacccaaccccggccac

SEQ ID NO: 16536 - DNA, 21 bp, synthetic construct
  misc_feature 1..21: note = Description of Artificial Sequence: Synthetic oligonucleotide
  source 1..21: mol_type = other DNA
gaaagaacccccagcagccaa

SEQ ID NO: 16537 - DNA, 21 bp, synthetic construct
  misc_feature 1..21: note = Description of Artificial Sequence: Synthetic oligonucleotide
  source 1..21: mol_type = other DNA
gccgtcaacagcagcaccggc

SEQ ID NO: 16538 - DNA, 21 bp, synthetic construct
  misc_feature 1..21: note = Description of Artificial Sequence: Synthetic oligonucleotide
  source 1..21: mol_type = other DNA
tctcattctaatgatcgtgcg

SEQ ID NO: 16539 - DNA, 21 bp, synthetic construct
  misc_feature 1..21: note = Description of Artificial Sequence: Synthetic oligonucleotide
  source 1..21: mol_type = other DNA
agcaccgccaccgccagcgcc

SEQ ID NO: 16540 - DNA, 21 bp, synthetic construct
  misc_feature 1..21: note = Description of Artificial Sequence: Synthetic oligonucleotide
  source 1..21: mol_type = other DNA
caaagcaccaccaacggcagc

SEQ ID NO: 16541 - DNA, 21 bp, synthetic construct
  misc_feature 1..21: note = Description of Artificial Sequence: Synthetic oligonucleotide
  source 1..21: mol_type = other DNA
agcggcggcaaccccatcaac

SEQ ID NO: 16542 - DNA, 21 bp, synthetic construct
  misc_feature 1..21: note = Description of Artificial Sequence: Synthetic oligonucleotide
  source 1..21: mol_type = other DNA
gattctgtgaatccgaagcag

SEQ ID NO: 16543 - DNA, 21 bp, synthetic construct
  misc_feature 1..21: note = Description of Artificial Sequence: Synthetic oligonucleotide
  source 1..21: mol_type = other DNA
aacggcaccaccagcgccaga

SEQ ID NO: 16544 - DNA, 21 bp, synthetic construct
  misc_feature 1..21: note = Description of Artificial Sequence: Synthetic oligonucleotide
  source 1..21: mol_type = other DNA
aataatgatcgtgcgtcgctt

SEQ ID NO: 16545 - DNA, 21 bp, synthetic construct
  misc_feature 1..21: note = Description of Artificial Sequence: Synthetic oligonucleotide
  source 1..21: mol_type = other DNA
accaacggcagcagccccgtc

SEQ ID NO: 16546 - DNA, 21 bp, synthetic construct
  misc_feature 1..21: note = Description of Artificial Sequence: Synthetic oligonucleotide
  source 1..21: mol_type = other DNA
gttagtggttcgggtaatcag

SEQ ID NO: 16547 - DNA, 21 bp, synthetic construct
  misc_feature 1..21: note = Description of Artificial Sequence: Synthetic oligonucleotide
  source 1..21: mol_type = other DNA
ggccaaatcagcagccccaaa

SEQ ID NO: 16548 - DNA, 21 bp, synthetic construct
  misc_feature 1..21: note = Description of Artificial Sequence: Synthetic oligonucleotide
  source 1..21: mol_type = other DNA
agtgtgtcgccgtcgaatacg

SEQ ID NO: 16549 - DNA, 21 bp, synthetic construct
  misc_feature 1..21: note = Description of Artificial Sequence: Synthetic oligonucleotide
  source 1..21: mol_type = other DNA
gaggttgtttcgaagactggt

SEQ ID NO: 16550 - DNA, 21 bp, synthetic construct
  misc_feature 1..21: note = Description of Artificial Sequence: Synthetic oligonucleotide
  source 1..21: mol_type = other DNA
cagggggagtcgcgttctgcg

SEQ ID NO: 16551 - DNA, 21 bp, synthetic construct
  misc_feature 1..21: note = Description of Artificial Sequence: Synthetic oligonucleotide
  source 1..21: mol_type = other DNA
cacaccaccagcagcagcggc

SEQ ID NO: 16552 - DNA, 21 bp, synthetic construct
  misc_feature 1..21: note = Description of Artificial Sequence: Synthetic oligonucleotide
  source 1..21: mol_type = other DNA
gttgggaagggtagttctgtg

SEQ ID NO: 16553 - DNA, 21 bp, synthetic construct
  misc_feature 1..21: note = Description of Artificial Sequence: Synthetic oligonucleotide
  source 1..21: mol_type = other DNA
gatacgcgtgatggtaagagt

SEQ ID NO: 16554 - DNA, 21 bp, synthetic construct
  misc_feature 1..21: note = Description of Artificial Sequence: Synthetic oligonucleotide
  source 1..21: mol_type = other DNA
tcgggtaatgtgacgagtggg

SEQ ID NO: 16555 - DNA, 21 bp, synthetic construct
  misc_feature 1..21: note = Description of Artificial Sequence: Synthetic oligonucleotide
  source 1..21: mol_type = other DNA
acccaaggcaacaccagcggc

SEQ ID NO: 16556 - DNA, 21 bp, synthetic construct
  misc_feature 1..21: note = Description of Artificial Sequence: Synthetic oligonucleotide
  source 1..21: mol_type = other DNA
caagccgacaaaaacatgggc

SEQ ID NO: 16557 - DNA, 21 bp, synthetic construct
  misc_feature 1..21: note = Description of Artificial Sequence: Synthetic oligonucleotide
  source 1..21: mol_type = other DNA
agccaaggcagcagcgccatc

SEQ ID NO: 16558 - DNA, 21 bp, synthetic construct
  misc_feature 1..21: note = Description of Artificial Sequence: Synthetic oligonucleotide
  source 1..21: mol_type = other DNA
atcagagacagcaccagcaac

SEQ ID NO: 16559 - DNA, 21 bp, synthetic construct
  misc_feature 1..21: note = Description of Artificial Sequence: Synthetic oligonucleotide
  source 1..21: mol_type = other DNA
ggcggcagagaagtcaacagc

SEQ ID NO: 16560 - DNA, 21 bp, synthetic construct
  misc_feature 1..21: note = Description of Artificial Sequence: Synthetic oligonucleotide
  source 1..21: mol_type = other DNA
gaaggcggcgccaccatgagc

SEQ ID NO: 16561 - DNA, 21 bp, synthetic construct
  misc_feature 1..21: note = Description of Artificial Sequence: Synthetic oligonucleotide
  source 1..21: mol_type = other DNA
agaaaccaaggccaaagcatc

SEQ ID NO: 16562 - DNA, 21 bp, synthetic construct
  misc_feature 1..21: note = Description of Artificial Sequence: Synthetic oligonucleotide
  source 1..21: mol_type = other DNA
agtgtgggtgcggcgagttcg

SEQ ID NO: 16563 - DNA, 21 bp, synthetic construct
  misc_feature 1..21: note = Description of Artificial Sequence: Synthetic oligonucleotide
  source 1..21: mol_type = other DNA
atgaagcagaataatcaggag

SEQ ID NO: 16564 - DNA, 21 bp, synthetic construct
  misc_feature 1..21: note = Description of Artificial Sequence: Synthetic oligonucleotide
  source 1..21: mol_type = other DNA
attcggagtaaggattcggtt

SEQ ID NO: 16565 - DNA, 21 bp, synthetic construct
  misc_feature 1..21: note = Description of Artificial Sequence: Synthetic oligonucleotide
  source 1..21: mol_type = other DNA
agtactactgagcggtctggt

SEQ ID NO: 16566 - DNA, 21 bp, synthetic construct
  misc_feature 1..21: note = Description of Artificial Sequence: Synthetic oligonucleotide
  source 1..21: mol_type = other DNA
agtaatggtccttcttctggg

SEQ ID NO: 16567 - DNA, 21 bp, synthetic construct
  misc_feature 1..21: note = Description of Artificial Sequence: Synthetic oligonucleotide
  source 1..21: mol_type = other DNA
accaccaaccccagcaacagc

SEQ ID NO: 16568 - DNA, 21 bp, synthetic construct
  misc_feature 1..21: note = Description of Artificial Sequence: Synthetic oligonucleotide
  source 1..21: mol_type = other DNA
gaaagacaacaacaacccgtc

SEQ ID NO: 16569 - DNA, 21 bp, synthetic construct
  misc_feature 1..21: note = Description of Artificial Sequence: Synthetic oligonucleotide
  source 1..21: mol_type = other DNA
ggtaatggttctccgattacg

SEQ ID NO: 16570 - DNA, 21 bp, synthetic construct
  misc_feature 1..21: note = Description of Artificial Sequence: Synthetic oligonucleotide
  source 1..21: mol_type = other DNA
aatcgtggggagagtgtgtcg

SEQ ID NO: 16571 - DNA, 21 bp, synthetic construct
  misc_feature 1..21: note = Description of Artificial Sequence: Synthetic oligonucleotide
  source 1..21: mol_type = other DNA
agcagcagcgcccaacacacc

SEQ ID NO: 16572 - DNA, 21 bp, synthetic construct
  misc_feature 1..21: note = Description of Artificial Sequence: Synthetic oligonucleotide
  source 1..21: mol_type = other DNA
agcgccacccaagcccccagc

SEQ ID NO: 16573 - DNA, 21 bp, synthetic construct
  misc_feature 1..21: note = Description of Artificial Sequence: Synthetic oligonucleotide
  source 1..21: mol_type = other DNA
aacgccaacgcccacgccacc

SEQ ID NO: 16574 - DNA, 21 bp, synthetic construct
  misc_feature 1..21: note = Description of Artificial Sequence: Synthetic oligonucleotide
  source 1..21: mol_type = other DNA
agttcgggtagtgctccttct

SEQ ID NO: 16575 - DNA, 21 bp, synthetic construct
  misc_feature 1..21: note = Description of Artificial Sequence: Synthetic oligonucleotide
  source 1..21: mol_type = other DNA
caacccgaaggcaccaacaaa

SEQ ID NO: 16576 - DNA, 21 bp, synthetic construct
  misc_feature 1..21: note = Description of Artificial Sequence: Synthetic oligonucleotide
  source 1..21: mol_type = other DNA
actcttagtgataagccgctg

SEQ ID NO: 16577 - DNA, 21 bp, synthetic construct
  misc_feature 1..21: note = Description of Artificial Sequence: Synthetic oligonucleotide
  source 1..21: mol_type = other DNA
atcggcgaaaaaagcaacacc

SEQ ID NO: 16578 - DNA, 21 bp, synthetic construct
  misc_feature 1..21: note = Description of Artificial Sequence: Synthetic oligonucleotide
  source 1..21: mol_type = other DNA
gatccttcgaagacgaatggg

SEQ ID NO: 16579 - DNA, 21 bp, synthetic construct
  misc_feature 1..21: note = Description of Artificial Sequence: Synthetic oligonucleotide
  source 1..21: mol_type = other DNA
aacggcagcagcagcggcgcc

SEQ ID NO: 16580 - DNA, 21 bp, synthetic construct
  misc_feature 1..21: note = Description of Artificial Sequence: Synthetic oligonucleotide
  source 1..21: mol_type = other DNA
caagccggcaacgccaccgcc

SEQ ID NO: 16581 - DNA, 21 bp, synthetic construct
  misc_feature 1..21: note = Description of Artificial Sequence: Synthetic oligonucleotide
  source 1..21: mol_type = other DNA
gattctagtcatacgaataag

SEQ ID NO: 16582 - DNA, 21 bp, synthetic construct
  misc_feature 1..21: note = Description of Artificial Sequence: Synthetic oligonucleotide
  source 1..21: mol_type = other DNA
gccggcggccccaccgccacc

SEQ ID NO: 16583 - DNA, 21 bp, synthetic construct
  misc_feature 1..21: note = Description of Artificial Sequence: Synthetic oligonucleotide
  source 1..21: mol_type = other DNA
caacacggcgaaatgaaaggc

SEQ ID NO: 16584 - DNA, 21 bp, synthetic construct
  misc_feature 1..21: note = Description of Artificial Sequence: Synthetic oligonucleotide
  source 1..21: mol_type = other DNA
caggtggatgcggggaatcgg

SEQ ID NO: 16585 - DNA, 21 bp, synthetic construct
  misc_feature 1..21: note = Description of Artificial Sequence: Synthetic oligonucleotide
  source 1..21: mol_type = other DNA
gtcaacaacagcgccaccatg

SEQ ID NO: 16586 - DNA, 21 bp, synthetic construct
  misc_feature 1..21: note = Description of Artificial Sequence: Synthetic oligonucleotide
  source 1..21: mol_type = other DNA
agcaacggcgccggcaccaaa

SEQ ID NO: 16587 - DNA, 21 bp, synthetic construct
  misc_feature 1..21: note = Description of Artificial Sequence: Synthetic oligonucleotide
  source 1..21: mol_type = other DNA
agcaccagcaccaaagacagc

SEQ ID NO: 16588 - DNA, 21 bp, synthetic construct
  misc_feature 1..21: note = Description of Artificial Sequence: Synthetic oligonucleotide
  source 1..21: mol_type = other DNA
ggcgccagcgacaccaacaga

SEQ ID NO: 16589 - DNA, 21 bp, synthetic construct
  misc_feature 1..21: note = Description of Artificial Sequence: Synthetic oligonucleotide
  source 1..21: mol_type = other DNA
gacggcatgggcaccacccaa

SEQ ID NO: 16590 - DNA, 21 bp, synthetic construct
  misc_feature 1..21: note = Description of Artificial Sequence: Synthetic oligonucleotide
  source 1..21: mol_type = other DNA
agttcggcgaattcgccgtcg

SEQ ID NO: 16591 - DNA, 21 bp, synthetic construct
  misc_feature 1..21: note = Description of Artificial Sequence: Synthetic oligonucleotide
  source 1..21: mol_type = other DNA
agcgcccacaaaggcgaaagc

SEQ ID NO: 16592 - DNA, 21 bp, synthetic construct
  misc_feature 1..21: note = Description of Artificial Sequence: Synthetic oligonucleotide
  source 1..21: mol_type = other DNA
catggttctgagaagttgtct

SEQ ID NO: 16593 - DNA, 21 bp, synthetic construct
  misc_feature 1..21: note = Description of Artificial Sequence: Synthetic oligonucleotide
  source 1..21: mol_type = other DNA
actggtgggggtagtagggag

SEQ ID NO: 16594 - DNA, 21 bp, synthetic construct
  misc_feature 1..21: note = Description of Artificial Sequence: Synthetic oligonucleotide
  source 1..21: mol_type = other DNA
agcggcatcgacaaaagcctc

SEQ ID NO: 16595 - DNA, 21 bp, synthetic construct
  misc_feature 1..21: note = Description of Artificial Sequence: Synthetic oligonucleotide
  source 1..21: mol_type = other DNA
gacgccaccaaaaccaccaac

SEQ ID NO: 16596 - DNA, 21 bp, synthetic construct
  misc_feature 1..21: note = Description of Artificial Sequence: Synthetic oligonucleotide
  source 1..21: mol_type = other DNA
gggacgacggggtctccgggg

SEQ ID NO: 16597 - DNA, 21 bp, synthetic construct
  misc_feature 1..21: note = Description of Artificial Sequence: Synthetic oligonucleotide
  source 1..21: mol_type = other DNA
gatgttccgggtactaagggt

SEQ ID NO: 16598 - DNA, 21 bp, synthetic construct
  misc_feature 1..21: note = Description of Artificial Sequence: Synthetic oligonucleotide
  source 1..21: mol_type = other DNA
gaagtcgtcaaagccggcagc

SEQ ID NO: 16599 - DNA, 21 bp, synthetic construct
  misc_feature 1..21: note = Description of Artificial Sequence: Synthetic oligonucleotide
  source 1..21: mol_type = other DNA
gggcagggttctgcggcttcg

SEQ ID NO: 16600 - DNA, 21 bp, synthetic construct
  misc_feature 1..21: note = Description of Artificial Sequence: Synthetic oligonucleotide
  source 1..21: mol_type = other DNA
ggcgacatgaaaaccagcagc

SEQ ID NO: 16601 - DNA, 21 bp, synthetic construct
  misc_feature 1..21: note = Description of Artificial Sequence: Synthetic oligonucleotide
  source 1..21: mol_type = other DNA
accagcgacagccccggcaga

SEQ ID NO: 16602 - DNA, 21 bp, synthetic construct
  misc_feature 1..21: note = Description of Artificial Sequence: Synthetic oligonucleotide
  source 1..21: mol_type = other DNA
cacgccagcagcagccccacc

SEQ ID NO: 16603 - DNA, 21 bp, synthetic construct
  misc_feature 1..21: note = Description of Artificial Sequence: Synthetic oligonucleotide
  source 1..21: mol_type = other DNA
gaaagagccacccaaagcgtc

SEQ ID NO: 16604 - DNA, 21 bp, synthetic construct
  misc_feature 1..21: note = Description of Artificial Sequence: Synthetic oligonucleotide
  source 1..21: mol_type = other DNA
gacccccccgaaaaaaccggc

SEQ ID NO: 16605 - DNA, 21 bp, synthetic construct
  misc_feature 1..21: note = Description of Artificial Sequence: Synthetic oligonucleotide
  source 1..21: mol_type = other DNA
gagactactgggaataagtcg

SEQ ID NO: 16606 - DNA, 21 bp, synthetic construct
  misc_feature 1..21: note = Description of Artificial Sequence: Synthetic oligonucleotide
  source 1..21: mol_type = other DNA
gagggtgggtcttctcggggg

SEQ ID NO: 16607 - DNA, 21 bp, synthetic construct
  misc_feature 1..21: note = Description of Artificial Sequence: Synthetic oligonucleotide
  source 1..21: mol_type = other DNA
gccatgcacgccaccgccggc

SEQ ID NO: 16608 - DNA, 21 bp, synthetic construct
  misc_feature 1..21: note = Description of Artificial Sequence: Synthetic oligonucleotide
  source 1..21: mol_type = other DNA
ggccacaccaccaaagacgcc

SEQ ID NO: 16609 - DNA, 21 bp, synthetic construct
  misc_feature 1..21: note = Description of Artificial Sequence: Synthetic oligonucleotide
  source 1..21: mol_type = other DNA
tctgatgtgaaggggagtaat

SEQ ID NO: 16610 - DNA, 21 bp, synthetic construct
  misc_feature 1..21: note = Description of Artificial Sequence: Synthetic oligonucleotide
  source 1..21: mol_type = other DNA
ggcctcgccaccgacaccaaa

SEQ ID NO: 16611 - DNA, 21 bp, synthetic construct
  misc_feature 1..21: note = Description of Artificial Sequence: Synthetic oligonucleotide
  source 1..21: mol_type = other DNA
gaaaccctcagcggcgccaaa

SEQ ID NO: 16612 - DNA, 21 bp, synthetic construct
  misc_feature 1..21: note = Description of Artificial Sequence: Synthetic oligonucleotide
  source 1..21: mol_type = other DNA
atcagcaacggcaaactcgcc

SEQ ID NO: 16613 - DNA, 21 bp, synthetic construct
  misc_feature 1..21: note = Description of Artificial Sequence: Synthetic oligonucleotide
  source 1..21: mol_type = other DNA
cagactgggcagtcggctgct

SEQ ID NO: 16614 - DNA, 21 bp, synthetic construct
  misc_feature 1..21: note = Description of Artificial Sequence: Synthetic oligonucleotide
  source 1..21: mol_type = other DNA
gggagtggtaaggggaatgtt

SEQ ID NO: 16615 - DNA, 21 bp, synthetic construct
  misc_feature 1..21: note = Description of Artificial Sequence: Synthetic oligonucleotide
  source 1..21: mol_type = other DNA
ggtaatgcgggtgcttcgact

SEQ ID NO: 16616 - DNA, 21 bp, synthetic construct
  misc_feature 1..21: note = Description of Artificial Sequence: Synthetic oligonucleotide
  source 1..21: mol_type = other DNA
agcaccaacacccacggcaaa

SEQ ID NO: 16617 - DNA, 21 bp, synthetic construct
  misc_feature 1..21: note = Description of Artificial Sequence: Synthetic oligonucleotide
  source 1..21: mol_type = other DNA
gaaaccagaaaagacgcccaa

SEQ ID NO: 16618 - DNA, 21 bp, synthetic construct
  misc_feature 1..21: note = Description of Artificial Sequence: Synthetic oligonucleotide
  source 1..21: mol_type = other DNA
ggcaacaaaagcgaaagccaa

SEQ ID NO: 16619 - DNA, 21 bp, synthetic construct
  misc_feature 1..21: note = Description of Artificial Sequence: Synthetic oligonucleotide
  source 1..21: mol_type = other DNA
ttgggggattcgagttcgaag

SEQ ID NO: 16620 - DNA, 21 bp, synthetic construct
  misc_feature 1..21: note = Description of Artificial Sequence: Synthetic oligonucleotide
  source 1..21: mol_type = other DNA
ggcggcaacaaagccgacagc

SEQ ID NO: 16621 - DNA, 21 bp, synthetic construct
  misc_feature 1..21: note = Description of Artificial Sequence: Synthetic oligonucleotide
  source 1..21: mol_type = other DNA
agttcttctgggacgactagt

SEQ ID NO: 16622 - DNA, 21 bp, synthetic construct
  misc_feature 1..21: note = Description of Artificial Sequence: Synthetic oligonucleotide
  source 1..21: mol_type = other DNA
agcaccggcgccagcgccgtc

SEQ ID NO: 16623 - DNA, 21 bp, synthetic construct
  misc_feature 1..21: note = Description of Artificial Sequence: Synthetic oligonucleotide
  source 1..21: mol_type = other DNA
actggggggacggctactagt

SEQ ID NO: 16624 - DNA, 21 bp, synthetic construct
  misc_feature 1..21: note = Description of Artificial Sequence: Synthetic oligonucleotide
  source 1..21: mol_type = other DNA
ctcaccggcaacagcagcccc

SEQ ID NO: 16625 - DNA, 21 bp, synthetic construct
  misc_feature 1..21: note = Description of Artificial Sequence: Synthetic oligonucleotide
  source 1..21: mol_type = other DNA
ttttcggagaatagtgttaag

SEQ ID NO: 16626 - DNA, 21 bp, synthetic construct
  misc_feature 1..21: note = Description of Artificial Sequence: Synthetic oligonucleotide
  source 1..21: mol_type = other DNA
aatgcgggtgctacgtcgaat

SEQ ID NO: 16627 - DNA, 21 bp, synthetic construct
  misc_feature 1..21: note = Description of Artificial Sequence: Synthetic oligonucleotide
  source 1..21: mol_type = other DNA
atgaccaacagcaacgtcaaa

SEQ ID NO: 16628 - DNA, 21 bp, synthetic construct
  misc_feature 1..21: note = Description of Artificial Sequence: Synthetic oligonucleotide
  source 1..21: mol_type = other DNA
agcagcgacgcccacagcaaa

SEQ ID NO: 16629 - DNA, 21 bp, synthetic construct
  misc_feature 1..21: note = Description of Artificial Sequence: Synthetic oligonucleotide
  source 1..21: mol_type = other DNA
ggcaaaggcgccggcagcacc

SEQ ID NO: 16630 - DNA, 21 bp, synthetic construct
  misc_feature 1..21: note = Description of Artificial Sequence: Synthetic oligonucleotide
  source 1..21: mol_type = other DNA
aacaccggcagcagcgacaaa

SEQ ID NO: 16631 - DNA, 21 bp, synthetic construct
  misc_feature 1..21: note = Description of Artificial Sequence: Synthetic oligonucleotide
  source 1..21: mol_type = other DNA
agaaacggcggcaccagcagc

SEQ ID NO: 16632 - DNA, 21 bp, synthetic construct
  misc_feature 1..21: note = Description of Artificial Sequence: Synthetic oligonucleotide
  source 1..21: mol_type = other DNA
gtcagcaccggcaacaacggc

SEQ ID NO: 16633 - DNA, 21 bp, synthetic construct
  misc_feature 1..21: note = Description of Artificial Sequence: Synthetic oligonucleotide
  source 1..21: mol_type = other DNA
acggatgggcctcagcgttcg

SEQ ID NO: 16634 - DNA, 21 bp, synthetic construct
  misc_feature 1..21: note = Description of Artificial Sequence: Synthetic oligonucleotide
  source 1..21: mol_type = other DNA
gccaacggcacccacaccgcc

SEQ ID NO: 16635 - DNA, 21 bp, synthetic construct
  misc_feature 1..21: note = Description of Artificial Sequence: Synthetic oligonucleotide
  source 1..21: mol_type = other DNA
gacagaagcagagaaagcgtc

SEQ ID NO: 16636 - DNA, 21 bp, synthetic construct
  misc_feature 1..21: note = Description of Artificial Sequence: Synthetic oligonucleotide
  source 1..21: mol_type = other DNA
aattctgttgataaggctagt

SEQ ID NO: 16637 - DNA, 21 bp, synthetic construct
  misc_feature 1..21: note = Description of Artificial Sequence: Synthetic oligonucleotide
  source 1..21: mol_type = other DNA
gtgtcgggtgctaattctatt

SEQ ID NO: 16638 - DNA, 21 bp, synthetic construct
  misc_feature 1..21: note = Description of Artificial Sequence: Synthetic oligonucleotide
  source 1..21: mol_type = other DNA
cggagttctcctactagtgtg

SEQ ID NO: 16639 - DNA, 21 bp, synthetic construct
  misc_feature 1..21: note = Description of Artificial Sequence: Synthetic oligonucleotide
  source 1..21: mol_type = other DNA
accagagacaccagcagcctc

SEQ ID NO: 16640 - DNA, 21 bp, synthetic construct
  misc_feature 1..21: note = Description of Artificial Sequence: Synthetic oligonucleotide
  source 1..21: mol_type = other DNA
agcctcagcagcaccaacagc

SEQ ID NO: 16641 - DNA, 21 bp, synthetic construct
  misc_feature 1..21: note = Description of Artificial Sequence: Synthetic oligonucleotide
  source 1..21: mol_type = other DNA
aatgcggatagtagtaagttg

SEQ ID NO: 16642 - DNA, 21 bp, synthetic construct
  misc_feature 1..21: note = Description of Artificial Sequence: Synthetic oligonucleotide
  source 1..21: mol_type = other DNA
agaaccggcgcccaacccggc

SEQ ID NO: 16643 - DNA, 21 bp, synthetic construct
  misc_feature 1..21: note = Description of Artificial Sequence: Synthetic oligonucleotide
  source 1..21: mol_type = other DNA
agtccgggtggggatttgaag

SEQ ID NO: 16644 - DNA, 21 bp, synthetic construct
  misc_feature 1..21: note = Description of Artificial Sequence: Synthetic oligonucleotide
  source 1..21: mol_type = other DNA
cacggcgccaccacccccggc

SEQ ID NO: 16645 - DNA, 21 bp, synthetic construct
  misc_feature 1..21: note = Description of Artificial Sequence: Synthetic oligonucleotide
  source 1..21: mol_type = other DNA
ggccccaccatgaacgacaaa

SEQ ID NO: 16646 - DNA, 21 bp, synthetic construct
  misc_feature 1..21: note = Description of Artificial Sequence: Synthetic oligonucleotide
  source 1..21: mol_type = other DNA
gggagttcgcagtctgggacg

SEQ ID NO: 16647 - DNA, 21 bp, synthetic construct
  misc_feature 1..21: note = Description of Artificial Sequence: Synthetic oligonucleotide
  source 1..21: mol_type = other DNA
ggggataagaaggagatggcg

SEQ ID NO: 16648 - DNA, 21 bp, synthetic construct
  misc_feature 1..21: note = Description of Artificial Sequence: Synthetic oligonucleotide
  source 1..21: mol_type = other DNA
ctccaaagcaaaaccggcagc

SEQ ID NO: 16649 - DNA, 21 bp, synthetic construct
  misc_feature 1..21: note = Description of Artificial Sequence: Synthetic oligonucleotide
  source 1..21: mol_type = other DNA
tctccgatttcgaaggagggg

SEQ ID NO: 16650 - DNA, 21 bp, synthetic construct
  misc_feature 1..21: note = Description of Artificial Sequence: Synthetic oligonucleotide
  source 1..21: mol_type = other DNA
agaggcaccggcagcaccacc

SEQ ID NO: 16651 - DNA, 21 bp, synthetic construct
  misc_feature 1..21: note = Description of Artificial Sequence: Synthetic oligonucleotide
  source 1..21: mol_type = other DNA
gcgaattctgggacgtcgact

SEQ ID NO: 16652 - DNA, 21 bp, synthetic construct
  misc_feature 1..21: note = Description of Artificial Sequence: Synthetic oligonucleotide
  source 1..21: mol_type = other DNA
tcgactggggcgacggctctt

SEQ ID NO: 16653 - DNA, 21 bp, synthetic construct
  misc_feature 1..21: note = Description of Artificial Sequence: Synthetic oligonucleotide
  source 1..21: mol_type = other DNA
agcggcgcccccagcgtcaac

SEQ ID NO: 16654 - DNA, 21 bp, synthetic construct
  misc_feature 1..21: note = Description of Artificial Sequence: Synthetic oligonucleotide
  source 1..21: mol_type = other DNA
agcgtcgccagccaaagccaa

SEQ ID NO: 16655 - DNA, 21 bp, synthetic construct
  misc_feature 1..21: note = Description of Artificial Sequence: Synthetic oligonucleotide
  source 1..21: mol_type = other DNA
ggccaccaaggcagcagcagc

SEQ ID NO: 16656 - DNA, 21 bp, synthetic construct
  misc_feature 1..21: note = Description of Artificial Sequence: Synthetic oligonucleotide
  source 1..21: mol_type = other DNA
aatagtgttgataaggctaag

SEQ ID NO: 16657 - DNA, 21 bp, synthetic construct
  misc_feature 1..21: note = Description of Artificial Sequence: Synthetic oligonucleotide
  source 1..21: mol_type = other DNA
aacacccacgccaacagcacc

SEQ ID NO: 16658 - DNA, 21 bp, synthetic construct
  misc_feature 1..21: note = Description of Artificial Sequence: Synthetic oligonucleotide
  source 1..21: mol_type = other DNA
ggccaacaccaacccctcgcc

SEQ ID NO: 16659 - DNA, 21 bp, synthetic construct
  misc_feature 1..21: note = Description of Artificial Sequence: Synthetic oligonucleotide
  source 1..21: mol_type = other DNA
tcgacgaagagttcgcctagt

SEQ ID NO: 16660 - DNA, 21 bp, synthetic construct
  misc_feature 1..21: note = Description of Artificial Sequence: Synthetic oligonucleotide
  source 1..21: mol_type = other DNA
gatacgtctagtactgggaag

SEQ ID NO: 16661 - DNA, 21 bp, synthetic construct
  misc_feature 1..21: note = Description of Artificial Sequence: Synthetic oligonucleotide
  source 1..21: mol_type = other DNA
gtccccagcagcaaccccaaa

SEQ ID NO: 16662 - DNA, 21 bp, synthetic construct
  misc_feature 1..21: note = Description of Artificial Sequence: Synthetic oligonucleotide
  source 1..21: mol_type = other DNA
accaaaaacggccacaacagc

SEQ ID NO: 16663 - DNA, 21 bp, synthetic construct
  misc_feature 1..21: note = Description of Artificial Sequence: Synthetic oligonucleotide
  source 1..21: mol_type = other DNA
gaaaccggccaaaaagaaggc

SEQ ID NO: 16664 - DNA, 21 bp, synthetic construct
  misc_feature 1..21: note = Description of Artificial Sequence: Synthetic oligonucleotide
  source 1..21: mol_type = other DNA
gggccgaataaggatgtgcat

SEQ ID NO: 16665 - DNA, 21 bp, synthetic construct
  misc_feature 1..21: note = Description of Artificial Sequence: Synthetic oligonucleotide
  source 1..21: mol_type = other DNA
gggcctggtaatgggaatggg

SEQ ID NO: 16666 - DNA, 21 bp, synthetic construct
  misc_feature 1..21: note = Description of Artificial Sequence: Synthetic oligonucleotide
  source 1..21: mol_type = other DNA
agtagtcagaagacggggtct

SEQ ID NO: 16667 - DNA, 21 bp, synthetic construct
  misc_feature 1..21: note = Description of Artificial Sequence: Synthetic oligonucleotide
  source 1..21: mol_type = other DNA
aatacggatagttctcggagt

SEQ ID NO: 16668 - DNA, 21 bp, synthetic construct
  misc_feature 1..21: note = Description of Artificial Sequence: Synthetic oligonucleotide
  source 1..21: mol_type = other DNA
cacggcgaaagcaaaaacaac

SEQ ID NO: 16669 - DNA, 21 bp, synthetic construct
  misc_feature 1..21: note = Description of Artificial Sequence: Synthetic oligonucleotide
  source 1..21: mol_type = other DNA
gatggtcagtcgcagaatcgg

SEQ ID NO: 16670 - DNA, 21 bp, synthetic construct
  misc_feature 1..21: note = Description of Artificial Sequence: Synthetic oligonucleotide
  source 1..21: mol_type = other DNA
ggcgaacacaaagacagcaga

SEQ ID NO: 16671 - DNA, 21 bp, synthetic construct
  misc_feature 1..21: note = Description of Artificial Sequence: Synthetic oligonucleotide
  source 1..21: mol_type = other DNA
ggcgaagtcaccggcagaacc

SEQ ID NO: 16672 - DNA, 21 bp, synthetic construct
  misc_feature 1..21: note = Description of Artificial Sequence: Synthetic oligonucleotide
  source 1..21: mol_type = other DNA
gatggtgcggctactaagaat

SEQ ID NO: 16673 - DNA, 21 bp, synthetic construct
  misc_feature 1..21: note = Description of Artificial Sequence: Synthetic oligonucleotide
  source 1..21: mol_type = other DNA
catcgtgatacggagtcgaag

SEQ ID NO: 16674 - DNA, 21 bp, synthetic construct
  misc_feature 1..21: note = Description of Artificial Sequence: Synthetic oligonucleotide
  source 1..21: mol_type = other DNA
accagcggcgacagaaccggc

SEQ ID NO: 16675 - DNA, 21 bp, synthetic construct
  misc_feature 1..21: note = Description of Artificial Sequence: Synthetic oligonucleotide
  source 1..21: mol_type = other DNA
agtgttggtgaggcgaggtct

SEQ ID NO: 16676 - DNA, 21 bp, synthetic construct
  misc_feature 1..21: note = Description of Artificial Sequence: Synthetic oligonucleotide
  source 1..21: mol_type = other DNA
caaagcaacaccagcaccggc

SEQ ID NO: 16677 - DNA, 21 bp, synthetic construct
  misc_feature 1..21: note = Description of Artificial Sequence: Synthetic oligonucleotide
  source 1..21: mol_type = other DNA
gaaaaacaaagcaccagcgtc

SEQ ID NO: 16678 - DNA, 21 bp, synthetic construct
  misc_feature 1..21: note = Description of Artificial Sequence: Synthetic oligonucleotide
  source 1..21: mol_type = other DNA
gagccgacgaagtcggctagt

SEQ ID NO: 16679 - DNA, 21 bp, synthetic construct
  misc_feature 1..21: note = Description of Artificial Sequence: Synthetic oligonucleotide
  source 1..21: mol_type = other DNA
agtcctattccgaataagggt

SEQ ID NO: 16680 - DNA, 21 bp, synthetic construct
  misc_feature 1..21: note = Description of Artificial Sequence: Synthetic oligonucleotide
  source 1..21: mol_type = other DNA
gccaccaccagaaacaacagc

SEQ ID NO: 16681 - DNA, 21 bp, synthetic construct
  misc_feature 1..21: note = Description of Artificial Sequence: Synthetic oligonucleotide
  source 1..21: mol_type = other DNA
gccagcagccaaagcgccaaa

SEQ ID NO: 16682 - DNA, 21 bp, synthetic construct
  misc_feature 1..21: note = Description of Artificial Sequence: Synthetic oligonucleotide
  source 1..21: mol_type = other DNA
caaggcgtcagcagcagcacc

SEQ ID NO: 16683 - DNA, 21 bp, synthetic construct
  misc_feature 1..21: note = Description of Artificial Sequence: Synthetic oligonucleotide
  source 1..21: mol_type = other DNA
ggtaataataaggttaatagt

SEQ ID NO: 16684 - DNA, 21 bp, synthetic construct
  misc_feature 1..21: note = Description of Artificial Sequence: Synthetic oligonucleotide
  source 1..21: mol_type = other DNA
gaaggcaacagccccatcaga

SEQ ID NO: 16685 - DNA, 21 bp, synthetic construct
  misc_feature 1..21: note = Description of Artificial Sequence: Synthetic oligonucleotide
  source 1..21: mol_type = other DNA
tcgggggggaagcaggggatt

SEQ ID NO: 16686 - DNA, 21 bp, synthetic construct
  misc_feature 1..21: note = Description of Artificial Sequence: Synthetic oligonucleotide
  source 1..21: mol_type = other DNA
gataagactaagggggggcag

SEQ ID NO: 16687 - DNA, 21 bp, synthetic construct
  misc_feature 1..21: note = Description of Artificial Sequence: Synthetic oligonucleotide
  source 1..21: mol_type = other DNA
acggctgcgacttctactagt

SEQ ID NO: 16688 - DNA, 21 bp, synthetic construct
  misc_feature 1..21: note = Description of Artificial Sequence: Synthetic oligonucleotide
  source 1..21: mol_type = other DNA
catcaggcgaatagtactcat

SEQ ID NO: 16689 - DNA, 21 bp, synthetic construct
  misc_feature 1..21: note = Description of Artificial Sequence: Synthetic oligonucleotide
  source 1..21: mol_type = other DNA
actgggtctggtaatccggtt

SEQ ID NO: 16690 - DNA, 21 bp, synthetic construct
  misc_feature 1..21: note = Description of Artificial Sequence: Synthetic oligonucleotide
  source 1..21: mol_type = other DNA
gttgagtctaaggggactcag

SEQ ID NO: 16691 - DNA, 21 bp, synthetic construct
  misc_feature 1..21: note = Description of Artificial Sequence: Synthetic oligonucleotide
  source 1..21: mol_type = other DNA
ggtaagcagggtagtaatgct

SEQ ID NO: 16692 - DNA, 21 bp, synthetic construct
  misc_feature 1..21: note = Description of Artificial Sequence: Synthetic oligonucleotide
  source 1..21: mol_type = other DNA
cagcgtaatgagaaggcgagt

SEQ ID NO: 16693 - DNA, 21 bp, synthetic construct
  misc_feature 1..21: note = Description of Artificial Sequence: Synthetic oligonucleotide
  source 1..21: mol_type = other DNA
caaagcaaagacagccaacaa

SEQ ID NO: 16694 - DNA, 21 bp, synthetic construct
  misc_feature 1..21: note = Description of Artificial Sequence: Synthetic oligonucleotide
  source 1..21: mol_type = other DNA
acgacgggttctagtcctggg

SEQ ID NO: 16695 - DNA, 21 bp, synthetic construct
  misc_feature 1..21: note = Description of Artificial Sequence: Synthetic oligonucleotide
  source 1..21: mol_type = other DNA
tctggtgctggggggactacg

SEQ ID NO: 16696 - DNA, 21 bp, synthetic construct
  misc_feature 1..21: note = Description of Artificial Sequence: Synthetic oligonucleotide
  source 1..21: mol_type = other DNA
cttacttctggtaaggagagt

SEQ ID NO: 16697 - DNA, 21 bp, synthetic construct
  misc_feature 1..21: note = Description of Artificial Sequence: Synthetic oligonucleotide
  source 1..21: mol_type = other DNA
gagcggagtgtgagtactcag

SEQ ID NO: 16698 - DNA, 21 bp, synthetic construct
  misc_feature 1..21: note = Description of Artificial Sequence: Synthetic oligonucleotide
  source 1..21: mol_type = other DNA
ggtgggacgacgaatgggaat

SEQ ID NO: 16699 - DNA, 21 bp, synthetic construct
  misc_feature 1..21: note = Description of Artificial Sequence: Synthetic oligonucleotide
  source 1..21: mol_type = other DNA
agcaccagcagcaccaacagc

SEQ ID NO: 16700 - DNA, 21 bp, synthetic construct
  misc_feature 1..21: note = Description of Artificial Sequence: Synthetic oligonucleotide
  source 1..21: mol_type = other DNA
gacagccaaacccccctcaga

SEQ ID NO: 16701 - DNA, 21 bp, synthetic construct
  misc_feature 1..21: note = Description of Artificial Sequence: Synthetic oligonucleotide
  source 1..21: mol_type = other DNA
gtcggcggcagcagcaacaaa

SEQ ID NO: 16702 - DNA, 21 bp, synthetic construct
  misc_feature 1..21: note = Description of Artificial Sequence: Synthetic oligonucleotide
  source 1..21: mol_type = other DNA
tcgtctaagccttcgtctgtg

SEQ ID NO: 16703 - DNA, 21 bp, synthetic construct
  misc_feature 1..21: note = Description of Artificial Sequence: Synthetic oligonucleotide
  source 1..21: mol_type = other DNA
caaggcgtcaccagcagcagc

SEQ ID NO: 16704 - DNA, 21 bp, synthetic construct
  misc_feature 1..21: note = Description of Artificial Sequence: Synthetic oligonucleotide
  source 1..21: mol_type = other DNA
gacagcagcaaaagcggcgtc

SEQ ID NO: 16705 - DNA, 21 bp, synthetic construct
  misc_feature 1..21: note = Description of Artificial Sequence: Synthetic oligonucleotide
  source 1..21: mol_type = other DNA
atgggcagcagcggcaacaaa

SEQ ID NO: 16706 - DNA, 21 bp, synthetic construct
  misc_feature 1..21: note = Description of Artificial Sequence: Synthetic oligonucleotide
  source 1..21: mol_type = other DNA
aattctaagactggggttgcg

SEQ ID NO: 16707 - DNA, 21 bp, synthetic construct
  misc_feature 1..21: note = Description of Artificial Sequence: Synthetic oligonucleotide
  source 1..21: mol_type = other DNA
gctggtagttctactagtact

SEQ ID NO: 16708 - DNA, 21 bp, synthetic construct
  misc_feature 1..21: note = Description of Artificial Sequence: Synthetic oligonucleotide
  source 1..21: mol_type = other DNA
ggcagcggcagcagcgcccac

SEQ ID NO: 16709 - DNA, 21 bp, synthetic construct
  misc_feature 1..21: note = Description of Artificial Sequence: Synthetic oligonucleotide
  source 1..21: mol_type = other DNA
agtacgtctcagtctagttct

SEQ ID NO: 16710 - DNA, 21 bp, synthetic construct
  misc_feature 1..21: note = Description of Artificial Sequence: Synthetic oligonucleotide
  source 1..21: mol_type = other DNA
gacaacgccaaaagcagcgcc

SEQ ID NO: 16711 - DNA, 21 bp, synthetic construct
  misc_feature 1..21: note = Description of Artificial Sequence: Synthetic oligonucleotide
  source 1..21: mol_type = other DNA
ggtaagcagggtcagtcttcg

SEQ ID NO: 16712 - DNA, 21 bp, synthetic construct
  misc_feature 1..21: note = Description of Artificial Sequence: Synthetic oligonucleotide
  source 1..21: mol_type = other DNA
gcttctactaaggcgaatact

SEQ ID NO: 16713 - DNA, 21 bp, synthetic construct
  misc_feature 1..21: note = Description of Artificial Sequence: Synthetic oligonucleotide
  source 1..21: mol_type = other DNA
agcagaaacggcgaagccgcc

SEQ ID NO: 16714 - DNA, 21 bp, synthetic construct
  misc_feature 1..21: note = Description of Artificial Sequence: Synthetic oligonucleotide
  source 1..21: mol_type = other DNA
aacgtcagcagcagccccacc

SEQ ID NO: 16715 - DNA, 21 bp, synthetic construct
  misc_feature 1..21: note = Description of Artificial Sequence: Synthetic oligonucleotide
  source 1..21: mol_type = other DNA
tctagtacttcgcagccgggg

SEQ ID NO: 16716 - DNA, 21 bp, synthetic construct
  misc_feature 1..21: note = Description of Artificial Sequence: Synthetic oligonucleotide
  source 1..21: mol_type = other DNA
ggcttcggcgtcaaacccgaa

SEQ ID NO: 16717 - DNA, 21 bp, synthetic construct
  misc_feature 1..21: note = Description of Artificial Sequence: Synthetic oligonucleotide
  source 1..21: mol_type = other DNA
caaagcgccagcacccaagtc

SEQ ID NO: 16718 - DNA, 21 bp, synthetic construct
  misc_feature 1..21: note = Description of Artificial Sequence: Synthetic oligonucleotide
  source 1..21: mol_type = other DNA
gccggcagcagccccatcgtc

SEQ ID NO: 16719 - DNA, 21 bp, synthetic construct
  misc_feature 1..21: note = Description of Artificial Sequence: Synthetic oligonucleotide
  source 1..21: mol_type = other DNA
ggtacgggtggtaaggcggcc

SEQ ID NO: 16720 - DNA, 21 bp, synthetic construct
  misc_feature 1..21: note = Description of Artificial Sequence: Synthetic oligonucleotide
  source 1..21: mol_type = other DNA
accggccaaggcggcggcagc

SEQ ID NO: 16721 - DNA, 21 bp, synthetic construct
  misc_feature 1..21: note = Description of Artificial Sequence: Synthetic oligonucleotide
  source 1..21: mol_type = other DNA
ctgggtagtacggagaagcat

SEQ ID NO: 16722 - DNA, 21 bp, synthetic construct
  misc_feature 1..21: note = Description of Artificial Sequence: Synthetic oligonucleotide
  source 1..21: mol_type = other DNA
gggggtaatcaggcttcttct

SEQ ID NO: 16723 - DNA, 21 bp, synthetic construct
  misc_feature 1..21: note = Description of Artificial Sequence: Synthetic oligonucleotide
  source 1..21: mol_type = other DNA
ggtagtaagcagacttctgtt

SEQ ID NO: 16724 - DNA, 21 bp, synthetic construct
  misc_feature 1..21: note = Description of Artificial Sequence: Synthetic oligonucleotide
  source 1..21: mol_type = other DNA
gttaatgatggtcatccgaag

SEQ ID NO: 16725 - DNA, 21 bp, synthetic construct
  misc_feature 1..21: note = Description of Artificial Sequence: Synthetic oligonucleotide
  source 1..21: mol_type = other DNA
tcgaatgggacttctacgaat

SEQ ID NO: 16726 - DNA, 21 bp, synthetic construct
  misc_feature 1..21: note = Description of Artificial Sequence: Synthetic oligonucleotide
  source 1..21: mol_type = other DNA
tcgcctcagggtaatggtggt

SEQ ID NO: 16727 - DNA, 21 bp, synthetic construct
  misc_feature 1..21: note = Description of Artificial Sequence: Synthetic oligonucleotide
  source 1..21: mol_type = other DNA
ctcagccacaaaagcagcgaa

SEQ ID NO: 16728 - DNA, 21 bp, synthetic construct
  misc_feature 1..21: note = Description of Artificial Sequence: Synthetic oligonucleotide
  source 1..21: mol_type = other DNA
tcgccgtctactaagtcgaat

SEQ ID NO: 16729 - DNA, 21 bp, synthetic construct
  misc_feature 1..21: note = Description of Artificial Sequence: Synthetic oligonucleotide
  source 1..21: mol_type = other DNA
gaaagaaacagcggcaccacc

SEQ ID NO: 16730 - DNA, 21 bp, synthetic construct
  misc_feature 1..21: note = Description of Artificial Sequence: Synthetic oligonucleotide
  source 1..21: mol_type = other DNA
ggcaacggccaaagccaaacc

SEQ ID NO: 16731 - DNA, 21 bp, synthetic construct
  misc_feature 1..21: note = Description of Artificial Sequence: Synthetic oligonucleotide
  source 1..21: mol_type = other DNA
agcagcggcagcaaaatggaa

SEQ ID NO: 16732 - DNA, 21 bp, synthetic construct
  misc_feature 1..21: note = Description of Artificial Sequence: Synthetic oligonucleotide
  source 1..21: mol_type = other DNA
actcaggggtcggataaggtg

SEQ ID NO: 16733 - DNA, 21 bp, synthetic construct
  misc_feature 1..21: note = Description of Artificial Sequence: Synthetic oligonucleotide
  source 1..21: mol_type = other DNA
gacagcatcaaagccgccagc

SEQ ID NO: 16734 - DNA, 21 bp, synthetic construct
  misc_feature 1..21: note = Description of Artificial Sequence: Synthetic oligonucleotide
  source 1..21: mol_type = other DNA
gagaataaggcttctactcag

SEQ ID NO: 16735 - DNA, 21 bp, synthetic construct
  misc_feature 1..21: note = Description of Artificial Sequence: Synthetic oligonucleotide
  source 1..21: mol_type = other DNA
gaagccgtcacccccgtcaga

SEQ ID NO: 16736 - DNA, 21 bp, synthetic construct
  misc_feature 1..21: note = Description of Artificial Sequence: Synthetic oligonucleotide
  source 1..21: mol_type = other DNA
agtgcttcttcgaagggtagt

SEQ ID NO: 16737 - DNA, 21 bp, synthetic construct
  misc_feature 1..21: note = Description of Artificial Sequence: Synthetic oligonucleotide
  source 1..21: mol_type = other DNA
aaccaaaccgccagccccacc

SEQ ID NO: 16738 - DNA, 21 bp, synthetic construct
  misc_feature 1..21: note = Description of Artificial Sequence: Synthetic oligonucleotide
  source 1..21: mol_type = other DNA
gaggggaagggtcagagtaat

SEQ ID NO: 16739 - DNA, 21 bp, synthetic construct
  misc_feature 1..21: note = Description of Artificial Sequence: Synthetic oligonucleotide
  source 1..21: mol_type = other DNA
ggtactaatgcggggagtggg

SEQ ID NO: 16740 - DNA, 21 bp, synthetic construct
  misc_feature 1..21: note = Description of Artificial Sequence: Synthetic oligonucleotide
  source 1..21: mol_type = other DNA
acgactactaagtctactgag

SEQ ID NO: 16741 - DNA, 21 bp, synthetic construct
  misc_feature 1..21: note = Description of Artificial Sequence: Synthetic oligonucleotide
  source 1..21: mol_type = other DNA
gagagtaagccgtctaatctt

SEQ ID NO: 16742 - DNA, 21 bp, synthetic construct
  misc_feature 1..21: note = Description of Artificial Sequence: Synthetic oligonucleotide
  source 1..21: mol_type = other DNA
agcaccggcggcagcagcagc

SEQ ID NO: 16743 - DNA, 21 bp, synthetic construct
  misc_feature 1..21: note = Description of Artificial Sequence: Synthetic oligonucleotide
  source 1..21: mol_type = other DNA
gaccaaagccaagccgtcaaa

SEQ ID NO: 16744 - DNA, 21 bp, synthetic construct
  misc_feature 1..21: note = Description of Artificial Sequence: Synthetic oligonucleotide
  source 1..21: mol_type = other DNA
ggcagcaaccccagcagcggc

SEQ ID NO: 16745 - DNA, 21 bp, synthetic construct
  misc_feature 1..21: note = Description of Artificial Sequence: Synthetic oligonucleotide
  source 1..21: mol_type = other DNA
ggggtgactgattcttcgaag

SEQ ID NO: 16746 - DNA, 21 bp, synthetic construct
  misc_feature 1..21: note = Description of Artificial Sequence: Synthetic oligonucleotide
  source 1..21: mol_type = other DNA
agcaccaccggcgacgccaaa

SEQ ID NO: 16747 - DNA, 21 bp, synthetic construct
  misc_feature 1..21: note = Description of Artificial Sequence: Synthetic oligonucleotide
  source 1..21: mol_type = other DNA
gaccccagcagcaaaaaagaa

SEQ ID NO: 16748 - DNA, 21 bp, synthetic construct
  misc_feature 1..21: note = Description of Artificial Sequence: Synthetic oligonucleotide
  source 1..21: mol_type = other DNA
ggttctactggggagcagcgg

SEQ ID NO: 16749 - DNA, 21 bp, synthetic construct
  misc_feature 1..21: note = Description of Artificial Sequence: Synthetic oligonucleotide
  source 1..21: mol_type = other DNA
gtcaacagcgaaagaagcgcc

SEQ ID NO: 16750 - DNA, 21 bp, synthetic construct
  misc_feature 1..21: note = Description of Artificial Sequence: Synthetic oligonucleotide
  source 1..21: mol_type = other DNA
ggtaatgggtcgagtatgtcg

SEQ ID NO: 16751 - DNA, 21 bp, synthetic construct
  misc_feature 1..21: note = Description of Artificial Sequence: Synthetic oligonucleotide
  source 1..21: mol_type = other DNA
acggggactaataatgctaat

SEQ ID NO: 16752 - DNA, 21 bp, synthetic construct
  misc_feature 1..21: note = Description of Artificial Sequence: Synthetic oligonucleotide
  source 1..21: mol_type = other DNA
atttcgggtcagcagcctact

SEQ ID NO: 16753 - DNA, 21 bp, synthetic construct
  misc_feature 1..21: note = Description of Artificial Sequence: Synthetic oligonucleotide
  source 1..21: mol_type = other DNA
caaggcgacagcagcctcaaa

SEQ ID NO: 16754 - DNA, 21 bp, synthetic construct
  misc_feature 1..21: note = Description of Artificial Sequence: Synthetic oligonucleotide
  source 1..21: mol_type = other DNA
acccaaaccgccaccgccaac

SEQ ID NO: 16755 - DNA, 21 bp, synthetic construct
  misc_feature 1..21: note = Description of Artificial Sequence: Synthetic oligonucleotide
  source 1..21: mol_type = other DNA
tctccgcatggggataagtcg

SEQ ID NO: 16756 - DNA, 21 bp, synthetic construct
  misc_feature 1..21: note = Description of Artificial Sequence: Synthetic oligonucleotide
  source 1..21: mol_type = other DNA
agtggtgctactccggcgttg

SEQ ID NO: 16757 - DNA, 21 bp, synthetic construct
  misc_feature 1..21: note = Description of Artificial Sequence: Synthetic oligonucleotide
  source 1..21: mol_type = other DNA
gacagcctcagcagcagcaaa

SEQ ID NO: 16758 - DNA, 21 bp, synthetic construct
  misc_feature 1..21: note = Description of Artificial Sequence: Synthetic oligonucleotide
  source 1..21: mol_type = other DNA
gggactgcgtctgataagcag

SEQ ID NO: 16759 - DNA, 21 bp, synthetic construct
  misc_feature 1..21: note = Description of Artificial Sequence: Synthetic oligonucleotide
  source 1..21: mol_type = other DNA
agcgtcaacaaaaccggcggc

SEQ ID NO: 16760 - DNA, 21 bp, synthetic construct
  misc_feature 1..21: note = Description of Artificial Sequence: Synthetic oligonucleotide
  source 1..21: mol_type = other DNA
agcagagacgccaaagtcagc

SEQ ID NO: 16761 - DNA, 21 bp, synthetic construct
  misc_feature 1..21: note = Description of Artificial Sequence: Synthetic oligonucleotide
  source 1..21: mol_type = other DNA
actgggtctactactactctt

SEQ ID NO: 16762 - DNA, 21 bp, synthetic construct
  misc_feature 1..21: note = Description of Artificial Sequence: Synthetic oligonucleotide
  source 1..21: mol_type = other DNA
accagcgaaaccaaattcggc

SEQ ID NO: 16763 - DNA, 21 bp, synthetic construct
  misc_feature 1..21: note = Description of Artificial Sequence: Synthetic oligonucleotide
  source 1..21: mol_type = other DNA
cagggtggttctagtgtgtcg

SEQ ID NO: 16764 - DNA, 21 bp, synthetic construct
  misc_feature 1..21: note = Description of Artificial Sequence: Synthetic oligonucleotide
  source 1..21: mol_type = other DNA
acgaaggagcagacggcgcag

SEQ ID NO: 16765 - DNA, 21 bp, synthetic construct
  misc_feature 1..21: note = Description of Artificial Sequence: Synthetic oligonucleotide
  source 1..21: mol_type = other DNA
agcaccggcaaaagcgtcacc

SEQ ID NO: 16766 - DNA, 21 bp, synthetic construct
  misc_feature 1..21: note = Description of Artificial Sequence: Synthetic oligonucleotide
  source 1..21: mol_type = other DNA
ctcagcagcagcaccgtcccc

SEQ ID NO: 16767 - DNA, 21 bp, synthetic construct
  misc_feature 1..21: note = Description of Artificial Sequence: Synthetic oligonucleotide
  source 1..21: mol_type = other DNA
gttggtactacggcggggaag

SEQ ID NO: 16768 - DNA, 21 bp, synthetic construct
  misc_feature 1..21: note = Description of Artificial Sequence: Synthetic oligonucleotide
  source 1..21: mol_type = other DNA
ggcctcagcagcagcaaagaa

SEQ ID NO: 16769 - DNA, 21 bp, synthetic construct
  misc_feature 1..21: note = Description of Artificial Sequence: Synthetic oligonucleotide
  source 1..21: mol_type = other DNA
accggcgtcaaagaaatcgtc

SEQ ID NO: 16770 - DNA, 21 bp, synthetic construct
  misc_feature 1..21: note = Description of Artificial Sequence: Synthetic oligonucleotide
  source 1..21: mol_type = other DNA
cagggtgcgacgacgggtacg

SEQ ID NO: 16771 - DNA, 21 bp, synthetic construct
  misc_feature 1..21: note = Description of Artificial Sequence: Synthetic oligonucleotide
  source 1..21: mol_type = other DNA
ggcagcagcgccaccgacaga

SEQ ID NO: 16772 - DNA, 21 bp, synthetic construct
  misc_feature 1..21: note = Description of Artificial Sequence: Synthetic oligonucleotide
  source 1..21: mol_type = other DNA
aatactggtacgcctaagaat

SEQ ID NO: 16773 - DNA, 21 bp, synthetic construct
  misc_feature 1..21: note = Description of Artificial Sequence: Synthetic oligonucleotide
  source 1..21: mol_type = other DNA
catacttcttctaatgggggt

SEQ ID NO: 16774 - DNA, 21 bp, synthetic construct
  misc_feature 1..21: note = Description of Artificial Sequence: Synthetic oligonucleotide
  source 1..21: mol_type = other DNA
tctacgtctacggggagtacg

SEQ ID NO: 16775 - DNA, 21 bp, synthetic construct
  misc_feature 1..21: note = Description of Artificial Sequence: Synthetic oligonucleotide
  source 1..21: mol_type = other DNA
ttcggcgaaggcagcgtcaaa

SEQ ID NO: 16776 - DNA, 21 bp, synthetic construct
  misc_feature 1..21: note = Description of Artificial Sequence: Synthetic oligonucleotide
  source 1..21: mol_type = other DNA
gacaacagcgtcaaaaaccaa

SEQ ID NO: 16777 - DNA, 21 bp, synthetic construct
  misc_feature 1..21: note = Description of Artificial Sequence: Synthetic oligonucleotide
  source 1..21: mol_type = other DNA
agcagcgccaaagccagcctc

SEQ ID NO: 16778 - DNA, 21 bp, synthetic construct
  misc_feature 1..21: note = Description of Artificial Sequence: Synthetic oligonucleotide
  source 1..21: mol_type = other DNA
gccgccaccagcagcaacacc

SEQ ID NO: 16779 - DNA, 21 bp, synthetic construct
  misc_feature 1..21: note = Description of Artificial Sequence: Synthetic oligonucleotide
  source 1..21: mol_type = other DNA
ggtacttcgacgaggagtgag

SEQ ID NO: 16780 - DNA, 21 bp, synthetic construct
  misc_feature 1..21: note = Description of Artificial Sequence: Synthetic oligonucleotide
  source 1..21: mol_type = other DNA
actactgatgcgaagactgtt

SEQ ID NO: 16781 - DNA, 21 bp, synthetic construct
  misc_feature 1..21: note = Description of Artificial Sequence: Synthetic oligonucleotide
  source 1..21: mol_type = other DNA
agcaccaccgcccccagcaga

SEQ ID NO: 16782 - DNA, 21 bp, synthetic construct
  misc_feature 1..21: note = Description of Artificial Sequence: Synthetic oligonucleotide
  source 1..21: mol_type = other DNA
gcgtcggatggtgctggtcgg

SEQ ID NO: 16783 - DNA, 21 bp, synthetic construct
  misc_feature 1..21: note = Description of Artificial Sequence: Synthetic oligonucleotide
  source 1..21: mol_type = other DNA
gatagtaataagacggggcct

SEQ ID NO: 16784 - DNA, 21 bp, synthetic construct
  misc_feature 1..21: note = Description of Artificial Sequence: Synthetic oligonucleotide
  source 1..21: mol_type = other DNA
ggttctcttgataataagggt

SEQ ID NO: 16785 - DNA, 21 bp, synthetic construct
  misc_feature 1..21: note = Description of Artificial Sequence: Synthetic oligonucleotide
  source 1..21: mol_type = other DNA
agccaagccagcgccaacacc

SEQ ID NO: 16786 - DNA, 21 bp, synthetic construct
  misc_feature 1..21: note = Description of Artificial Sequence: Synthetic oligonucleotide
  source 1..21: mol_type = other DNA
gatgggaagggttctggtaat

SEQ ID NO: 16787 - DNA, 21 bp, synthetic construct
  misc_feature 1..21: note = Description of Artificial Sequence: Synthetic oligonucleotide
  source 1..21: mol_type = other DNA
tcgggtacttctagttctggt

SEQ ID NO: 16788 - DNA, 21 bp, synthetic construct
  misc_feature 1..21: note = Description of Artificial Sequence: Synthetic oligonucleotide
  source 1..21: mol_type = other DNA
gtcaccggcagcaacggcggc

SEQ ID NO: 16789 - DNA, 21 bp, synthetic construct
  misc_feature 1..21: note = Description of Artificial Sequence: Synthetic oligonucleotide
  source 1..21: mol_type = other DNA
agcaacagcaccagcggcagc

SEQ ID NO: 16790 - DNA, 21 bp, synthetic construct
  misc_feature 1..21: note = Description of Artificial Sequence: Synthetic oligonucleotide
  source 1..21: mol_type = other DNA
tctgggtctaagacgtctagt

SEQ ID NO: 16791 - DNA, 21 bp, synthetic construct
  misc_feature 1..21: note = Description of Artificial Sequence: Synthetic oligonucleotide
  source 1..21: mol_type = other DNA
tctgatgcggggaagcaggtt

SEQ ID NO: 16792 - DNA, 21 bp, synthetic construct
  misc_feature 1..21: note = Description of Artificial Sequence: Synthetic oligonucleotide
  source 1..21: mol_type = other DNA
agtagtaatactccttcttcg

SEQ ID NO: 16793 - DNA, 21 bp, synthetic construct
  misc_feature 1..21: note = Description of Artificial Sequence: Synthetic oligonucleotide
  source 1..21: mol_type = other DNA
ctcgccgaaagcaaaaccatg

SEQ ID NO: 16794 - DNA, 21 bp, synthetic construct
  misc_feature 1..21: note = Description of Artificial Sequence: Synthetic oligonucleotide
  source 1..21: mol_type = other DNA
ggcaccaccggcgacatcaaa

SEQ ID NO: 16795 - DNA, 21 bp, synthetic construct
  misc_feature 1..21: note = Description of Artificial Sequence: Synthetic oligonucleotide
  source 1..21: mol_type = other DNA
gccggcaccgaaagaagcatg

SEQ ID NO: 16796 - DNA, 21 bp, synthetic construct
  misc_feature 1..21: note = Description of Artificial Sequence: Synthetic oligonucleotide
  source 1..21: mol_type = other DNA
gtgtctggttctacgcctact

SEQ ID NO: 16797 - DNA, 21 bp, synthetic construct
  misc_feature 1..21: note = Description of Artificial Sequence: Synthetic oligonucleotide
  source 1..21: mol_type = other DNA
atgaacaacggcaaagtcagc

SEQ ID NO: 16798 - DNA, 21 bp, synthetic construct
  misc_feature 1..21: note = Description of Artificial Sequence: Synthetic oligonucleotide
  source 1..21: mol_type = other DNA
actgggaaggatacgatggtg

SEQ ID NO: 16799 - DNA, 21 bp, synthetic construct
  misc_feature 1..21: note = Description of Artificial Sequence: Synthetic oligonucleotide
  source 1..21: mol_type = other DNA
atggtcgccggcaacaaaggc

SEQ ID NO: 16800 - DNA, 21 bp, synthetic construct
  misc_feature 1..21: note = Description of Artificial Sequence: Synthetic oligonucleotide
  source 1..21: mol_type = other DNA
ggcgccgacagcgtcaccaaa

SEQ ID NO: 16801 - DNA, 21 bp, synthetic construct
  misc_feature 1..21: note = Description of Artificial Sequence: Synthetic oligonucleotide
  source 1..21: mol_type = other DNA
acccaaagcgccagcaccgcc

SEQ ID NO: 16802 - DNA, 21 bp, synthetic construct
  misc_feature 1..21: note = Description of Artificial Sequence: Synthetic oligonucleotide
  source 1..21: mol_type = other DNA
gacagaaccaacgcccccagc

SEQ ID NO: 16803 - DNA, 21 bp, synthetic construct
  misc_feature 1..21: note = Description of Artificial Sequence: Synthetic oligonucleotide
  source 1..21: mol_type = other DNA
accagcagcaccaccagcggc

SEQ ID NO: 16804 - DNA, 21 bp, synthetic construct
  misc_feature 1..21: note = Description of Artificial Sequence: Synthetic oligonucleotide
  source 1..21: mol_type = other DNA
gtcagaggcaaagaacccatg

SEQ ID NO: 16805 - DNA, 21 bp, synthetic construct
  misc_feature 1..21: note = Description of Artificial Sequence: Synthetic oligonucleotide
  source 1..21: mol_type = other DNA
gacgccgccagaaccaacgtc

SEQ ID NO: 16806 - DNA, 21 bp, synthetic construct
  misc_feature 1..21: note = Description of Artificial Sequence: Synthetic oligonucleotide
  source 1..21: mol_type = other DNA
gagaaggtgacgagtagtggt

SEQ ID NO: 16807 - DNA, 21 bp, synthetic construct
  misc_feature 1..21: note = Description of Artificial Sequence: Synthetic oligonucleotide
  source 1..21: mol_type = other DNA
gacggcatcagcagcaaccac

SEQ ID NO: 16808 - DNA, 21 bp, synthetic construct
  misc_feature 1..21: note = Description of Artificial Sequence: Synthetic oligonucleotide
  source 1..21: mol_type = other DNA
agcggcaaccaacaaagcaac

SEQ ID NO: 16809 - DNA, 21 bp, synthetic construct
  misc_feature 1..21: note = Description of Artificial Sequence: Synthetic oligonucleotide
  source 1..21: mol_type = other DNA
ggcggcgtcagcaacagcatc

SEQ ID NO: 16810 - DNA, 21 bp, synthetic construct
  misc_feature 1..21: note = Description of Artificial Sequence: Synthetic oligonucleotide
  source 1..21: mol_type = other DNA
ggtattaatggtaaggatggt

SEQ ID NO: 16811 - DNA, 21 bp, synthetic construct
  misc_feature 1..21: note = Description of Artificial Sequence: Synthetic oligonucleotide
  source 1..21: mol_type = other DNA
agttctgcggatccgaagtct

SEQ ID NO: 16812 - DNA, 21 bp, synthetic construct
  misc_feature 1..21: note = Description of Artificial Sequence: Synthetic oligonucleotide
  source 1..21: mol_type = other DNA
aacggccaaagcgtcaacagc

SEQ ID NO: 16813 - DNA, 21 bp, synthetic construct
  misc_feature 1..21: note = Description of Artificial Sequence: Synthetic oligonucleotide
  source 1..21: mol_type = other DNA
gcggtttcggagaagtcgggg

SEQ ID NO: 16814 - DNA, 21 bp, synthetic construct
  misc_feature 1..21: note = Description of Artificial Sequence: Synthetic oligonucleotide
  source 1..21: mol_type = other DNA
agtagtcagacttctaatgtt

SEQ ID NO: 16815 - DNA, 21 bp, synthetic construct
  misc_feature 1..21: note = Description of Artificial Sequence: Synthetic oligonucleotide
  source 1..21: mol_type = other DNA
ttgcagtctacgaagggtagt

SEQ ID NO: 16816 - DNA, 21 bp, synthetic construct
  misc_feature 1..21: note = Description of Artificial Sequence: Synthetic oligonucleotide
  source 1..21: mol_type = other DNA
agcaacgacgacaaacccaga

SEQ ID NO: 16817 - DNA, 21 bp, synthetic construct
  misc_feature 1..21: note = Description of Artificial Sequence: Synthetic oligonucleotide
  source 1..21: mol_type = other DNA
caggggaattcggcgatgact

SEQ ID NO: 16818 - DNA, 21 bp, synthetic construct
  misc_feature 1..21: note = Description of Artificial Sequence: Synthetic oligonucleotide
  source 1..21: mol_type = other DNA
cattctgatagtactcagaag

SEQ ID NO: 16819 - DNA, 21 bp, synthetic construct
  misc_feature 1..21: note = Description of Artificial Sequence: Synthetic oligonucleotide
  source 1..21: mol_type = other DNA
agccaaaaacccagcccccaa

SEQ ID NO: 16820 - DNA, 21 bp, synthetic construct
  misc_feature 1..21: note = Description of Artificial Sequence: Synthetic oligonucleotide
  source 1..21: mol_type = other DNA
gacggcctccaaaccaccaga

SEQ ID NO: 16821 - DNA, 21 bp, synthetic construct
  misc_feature 1..21: note = Description of Artificial Sequence: Synthetic oligonucleotide
  source 1..21: mol_type = other DNA
tcggctcatgataagacgaat

SEQ ID NO: 16822 - DNA, 21 bp, synthetic construct
  misc_feature 1..21: note = Description of Artificial Sequence: Synthetic oligonucleotide
  source 1..21: mol_type = other DNA
atgggtggttcgactcagcag

SEQ ID NO: 16823 - DNA, 21 bp, synthetic construct
  misc_feature 1..21: note = Description of Artificial Sequence: Synthetic oligonucleotide
  source 1..21: mol_type = other DNA
ggcgtcaccggcagcaaagcc

SEQ ID NO: 16824 - DNA, 21 bp, synthetic construct
  misc_feature 1..21: note = Description of Artificial Sequence: Synthetic oligonucleotide
  source 1..21: mol_type = other DNA
cgtgagggtcagacttctatg

SEQ ID NO: 16825 - DNA, 21 bp, synthetic construct
  misc_feature 1..21: note = Description of Artificial Sequence: Synthetic oligonucleotide
  source 1..21: mol_type = other DNA
agcaaaagcaccaacctcgcc

SEQ ID NO: 16826 - DNA, 21 bp, synthetic construct
  misc_feature 1..21: note = Description of Artificial Sequence: Synthetic oligonucleotide
  source 1..21: mol_type = other DNA
agcagcggcagcagcgtcaaa

SEQ ID NO: 16827 - DNA, 21 bp, synthetic construct
  misc_feature 1..21: note = Description of Artificial Sequence: Synthetic oligonucleotide
  source 1..21: mol_type = other DNA
aacgccgccaacccccccggc

SEQ ID NO: 16828 - DNA, 21 bp, synthetic construct
  misc_feature 1..21: note = Description of Artificial Sequence: Synthetic oligonucleotide
  source 1..21: mol_type = other DNA
aattcgactccggggagtggg

SEQ ID NO: 16829 - DNA, 21 bp, synthetic construct
  misc_feature 1..21: note = Description of Artificial Sequence: Synthetic oligonucleotide
  source 1..21: mol_type = other DNA
accgtcgcccccaaaaccggc

SEQ ID NO: 16830 - DNA, 21 bp, synthetic construct
  misc_feature 1..21: note = Description of Artificial Sequence: Synthetic oligonucleotide
  source 1..21: mol_type = other DNA
actcagaatcagagtcttggt

SEQ ID NO: 16831 - DNA, 21 bp, synthetic construct
  misc_feature 1..21: note = Description of Artificial Sequence: Synthetic oligonucleotide
  source 1..21: mol_type = other DNA
agcaaagaagaaaaaaacagc

SEQ ID NO: 16832 - DNA, 21 bp, synthetic construct
  misc_feature 1..21: note = Description of Artificial Sequence: Synthetic oligonucleotide
  source 1..21: mol_type = other DNA
agcagcgaaagcaaaagcgcc

SEQ ID NO: 16833 - DNA, 21 bp, synthetic construct
  misc_feature 1..21: note = Description of Artificial Sequence: Synthetic oligonucleotide
  source 1..21: mol_type = other DNA
agcgtcgaacccaaagtccaa

SEQ ID NO: 16834 - DNA, 21 bp, synthetic construct
  misc_feature 1..21: note = Description of Artificial Sequence: Synthetic oligonucleotide
  source 1..21: mol_type = other DNA
agtatggaggctaggaatgct

SEQ ID NO: 16835 - DNA, 21 bp, synthetic construct
  misc_feature 1..21: note = Description of Artificial Sequence: Synthetic oligonucleotide
  source 1..21: mol_type = other DNA
caaggcggcaaccacagcggc

SEQ ID NO: 16836 - DNA, 21 bp, synthetic construct
  misc_feature 1..21: note = Description of Artificial Sequence: Synthetic oligonucleotide
  source 1..21: mol_type = other DNA
ctcgccagcaaagacgccggc

SEQ ID NO: 16837 - DNA, 21 bp, synthetic construct
  misc_feature 1..21: note = Description of Artificial Sequence: Synthetic oligonucleotide
  source 1..21: mol_type = other DNA
gacagcaccagcggcaaaaga

SEQ ID NO: 16838 - DNA, 21 bp, synthetic construct
  misc_feature 1..21: note = Description of Artificial Sequence: Synthetic oligonucleotide
  source 1..21: mol_type = other DNA
gcccacaccagcagccccggc

SEQ ID NO: 16839 - DNA, 21 bp, synthetic construct
  misc_feature 1..21: note = Description of Artificial Sequence: Synthetic oligonucleotide
  source 1..21: mol_type = other DNA
gctgatcataagacgtcgggg

SEQ ID NO: 16840 - DNA, 21 bp, synthetic construct
  misc_feature 1..21: note = Description of Artificial Sequence: Synthetic oligonucleotide
  source 1..21: mol_type = other DNA
ggcaccggcgaacccagaagc

SEQ ID NO: 16841 - DNA, 21 bp, synthetic construct
  misc_feature 1..21: note = Description of Artificial Sequence: Synthetic oligonucleotide
  source 1..21: mol_type = other DNA
gggaaggggggggttaatcct

SEQ ID NO: 16842 - DNA, 21 bp, synthetic construct
  misc_feature 1..21: note = Description of Artificial Sequence: Synthetic oligonucleotide
  source 1..21: mol_type = other DNA
ggtatggattctaagaggctt

SEQ ID NO: 16843 - DNA, 21 bp, synthetic construct
  misc_feature 1..21: note = Description of Artificial Sequence: Synthetic oligonucleotide
  source 1..21: mol_type = other DNA
ggtccggctggtaatactgtt

SEQ ID NO: 16844 - DNA, 21 bp, synthetic construct
  misc_feature 1..21: note = Description of Artificial Sequence: Synthetic oligonucleotide
  source 1..21: mol_type = other DNA
accgtcggcacccccgtcagc

SEQ ID NO: 16845 - DNA, 21 bp, synthetic construct
  misc_feature 1..21: note = Description of Artificial Sequence: Synthetic oligonucleotide
  source 1..21: mol_type = other DNA
ctgtctgagaagtcttcgtcg

SEQ ID NO: 16846 - DNA, 21 bp, synthetic construct
  misc_feature 1..21: note = Description of Artificial Sequence: Synthetic oligonucleotide
  source 1..21: mol_type = other DNA
gatactaatgggaaggctact

SEQ ID NO: 16847 - DNA, 21 bp, synthetic construct
  misc_feature 1..21: note = Description of Artificial Sequence: Synthetic oligonucleotide
  source 1..21: mol_type = other DNA
ggcctcaccaaaagcaccggc

SEQ ID NO: 16848 - DNA, 21 bp, synthetic construct
  misc_feature 1..21: note = Description of Artificial Sequence: Synthetic oligonucleotide
  source 1..21: mol_type = other DNA
accaacagcacccacgccgcc

SEQ ID NO: 16849 - DNA, 21 bp, synthetic construct
  misc_feature 1..21: note = Description of Artificial Sequence: Synthetic oligonucleotide
  source 1..21: mol_type = other DNA
accagcgaaagagcccccggc

SEQ ID NO: 16850 - DNA, 21 bp, synthetic construct
  misc_feature 1..21: note = Description of Artificial Sequence: Synthetic oligonucleotide
  source 1..21: mol_type = other DNA
acgtcttctaatacgccgatg

SEQ ID NO: 16851 - DNA, 21 bp, synthetic construct
  misc_feature 1..21: note = Description of Artificial Sequence: Synthetic oligonucleotide
  source 1..21: mol_type = other DNA
agcaaaggcagcggcgccggc

SEQ ID NO: 16852 - DNA, 21 bp, synthetic construct
  misc_feature 1..21: note = Description of Artificial Sequence: Synthetic oligonucleotide
  source 1..21: mol_type = other DNA
agcaccaccggcgccaccggc

SEQ ID NO: 16853 - DNA, 21 bp, synthetic construct
  misc_feature 1..21: note = Description of Artificial Sequence: Synthetic oligonucleotide
  source 1..21: mol_type = other DNA
agccccgccgccggccacaac

SEQ ID NO: 16854 - DNA, 21 bp, synthetic construct
  misc_feature 1..21: note = Description of Artificial Sequence: Synthetic oligonucleotide
  source 1..21: mol_type = other DNA
ggcgccagcaaacccggccac

SEQ ID NO: 16855 - DNA, 21 bp, synthetic construct
  misc_feature 1..21: note = Description of Artificial Sequence: Synthetic oligonucleotide
  source 1..21: mol_type = other DNA
agcgccaacaaacccgccggc

SEQ ID NO: 16856 - DNA, 21 bp, synthetic construct
  misc_feature 1..21: note = Description of Artificial Sequence: Synthetic oligonucleotide
  source 1..21: mol_type = other DNA
ggtcctgtgggttcggcgacg

SEQ ID NO: 16857 - DNA, 21 bp, synthetic construct
  misc_feature 1..21: note = Description of Artificial Sequence: Synthetic oligonucleotide
  source 1..21: mol_type = other DNA
gaaggcagcagcaccgtcaga

SEQ ID NO: 16858 - DNA, 21 bp, synthetic construct
  misc_feature 1..21: note = Description of Artificial Sequence: Synthetic oligonucleotide
  source 1..21: mol_type = other DNA
gctaattcgagttcggcgacg

SEQ ID NO: 16859 - DNA, 21 bp, synthetic construct
  misc_feature 1..21: note = Description of Artificial Sequence: Synthetic oligonucleotide
  source 1..21: mol_type = other DNA
gtcagcggcgccagcaccgcc

SEQ ID NO: 16860 - DNA, 21 bp, synthetic construct
  misc_feature 1..21: note = Description of Artificial Sequence: Synthetic oligonucleotide
  source 1..21: mol_type = other DNA
ggcagcagcagccccgcccac

SEQ ID NO: 16861 - DNA, 21 bp, synthetic construct
  misc_feature 1..21: note = Description of Artificial Sequence: Synthetic oligonucleotide
  source 1..21: mol_type = other DNA
atgagcggcaccggcagcagc

SEQ ID NO: 16862 - DNA, 21 bp, synthetic construct
  misc_feature 1..21: note = Description of Artificial Sequence: Synthetic oligonucleotide
  source 1..21: mol_type = other DNA
catacgggggggtcgccttct

SEQ ID NO: 16863 - DNA, 21 bp, synthetic construct
  misc_feature 1..21: note = Description of Artificial Sequence: Synthetic oligonucleotide
  source 1..21: mol_type = other DNA
tcgaagcagaatggggtgact

SEQ ID NO: 16864 - DNA, 21 bp, synthetic construct
  misc_feature 1..21: note = Description of Artificial Sequence: Synthetic oligonucleotide
  source 1..21: mol_type = other DNA
gaaagcatggacaaagccaga

SEQ ID NO: 16865 - DNA, 21 bp, synthetic construct
  misc_feature 1..21: note = Description of Artificial Sequence: Synthetic oligonucleotide
  source 1..21: mol_type = other DNA
ttgcgggagacttcttctcat

SEQ ID NO: 16866 - DNA, 21 bp, synthetic construct
  misc_feature 1..21: note = Description of Artificial Sequence: Synthetic oligonucleotide
  source 1..21: mol_type = other DNA
gagcgggctgataggtctatt

SEQ ID NO: 16867 - DNA, 21 bp, synthetic construct
  misc_feature 1..21: note = Description of Artificial Sequence: Synthetic oligonucleotide
  source 1..21: mol_type = other DNA
cgtagtgagtctaagggtggg

SEQ ID NO: 16868 - DNA, 21 bp, synthetic construct
  misc_feature 1..21: note = Description of Artificial Sequence: Synthetic oligonucleotide
  source 1..21: mol_type = other DNA
gaacacagcagcgccagcggc

SEQ ID NO: 16869 - DNA, 21 bp, synthetic construct
  misc_feature 1..21: note = Description of Artificial Sequence: Synthetic oligonucleotide
  source 1..21: mol_type = other DNA
gcgcatagtaaggagaatatg

SEQ ID NO: 16870 - DNA, 21 bp, synthetic construct
  misc_feature 1..21: note = Description of Artificial Sequence: Synthetic oligonucleotide
  source 1..21: mol_type = other DNA
gggattaataataaggctggt

SEQ ID NO: 16871 - DNA, 21 bp, synthetic construct
  misc_feature 1..21: note = Description of Artificial Sequence: Synthetic oligonucleotide
  source 1..21: mol_type = other DNA
ggtactgcgtctggtgctcag

SEQ ID NO: 16872 - DNA, 21 bp, synthetic construct
  misc_feature 1..21: note = Description of Artificial Sequence: Synthetic oligonucleotide
  source 1..21: mol_type = other DNA
agcaccaacagcagcagccac

SEQ ID NO: 16873 - DNA, 21 bp, synthetic construct
  misc_feature 1..21: note = Description of Artificial Sequence: Synthetic oligonucleotide
  source 1..21: mol_type = other DNA
acccaaaccaacagcagcagc

SEQ ID NO: 16874 - DNA, 21 bp, synthetic construct
  misc_feature 1..21: note = Description of Artificial Sequence: Synthetic oligonucleotide
  source 1..21: mol_type = other DNA
gaaagcagccaaccccccaga

SEQ ID NO: 16875 - DNA, 21 bp, synthetic construct
  misc_feature 1..21: note = Description of Artificial Sequence: Synthetic oligonucleotide
  source 1..21: mol_type = other DNA
gaaagaaacagcagccccacc

SEQ ID NO: 16876 - DNA, 21 bp, synthetic construct
  misc_feature 1..21: note = Description of Artificial Sequence: Synthetic oligonucleotide
  source 1..21: mol_type = other DNA
agcctcgacaacaaaagcggc

SEQ ID NO: 16877 - DNA, 21 bp, synthetic construct
  misc_feature 1..21: note = Description of Artificial Sequence: Synthetic oligonucleotide
  source 1..21: mol_type = other DNA
gacaacggccacaaaatgctc

SEQ ID NO: 16878 - DNA, 21 bp, synthetic construct
  misc_feature 1..21: note = Description of Artificial Sequence: Synthetic oligonucleotide
  source 1..21: mol_type = other DNA
gaggggaagagtaatgatggg

SEQ ID NO: 16879 - DNA, 21 bp, synthetic construct
  misc_feature 1..21: note = Description of Artificial Sequence: Synthetic oligonucleotide
  source 1..21: mol_type = other DNA
cagactagtagtggtagtggt

SEQ ID NO: 16880 - DNA, 21 bp, synthetic construct
  misc_feature 1..21: note = Description of Artificial Sequence: Synthetic oligonucleotide
  source 1..21: mol_type = other DNA
gggtctgggcagacttcttct

SEQ ID NO: 16881 - DNA, 21 bp, synthetic construct
  misc_feature 1..21: note = Description of Artificial Sequence: Synthetic oligonucleotide
  source 1..21: mol_type = other DNA
tctattcctactggttctggg

SEQ ID NO: 16882 - DNA, 21 bp, synthetic construct
  misc_feature 1..21: note = Description of Artificial Sequence: Synthetic oligonucleotide
  source 1..21: mol_type = other DNA
agtcagggttcgaaggattcg

SEQ ID NO: 16883 - DNA, 21 bp, synthetic construct
  misc_feature 1..21: note = Description of Artificial Sequence: Synthetic oligonucleotide
  source 1..21: mol_type = other DNA
gccagcgacagccccagcaga

SEQ ID NO: 16884 - DNA, 21 bp, synthetic construct
  misc_feature 1..21: note = Description of Artificial Sequence: Synthetic oligonucleotide
  source 1..21: mol_type = other DNA
gaaaaagtcagcagcgtcggc

SEQ ID NO: 16885 - DNA, 21 bp, synthetic construct
  misc_feature 1..21: note = Description of Artificial Sequence: Synthetic oligonucleotide
  source 1..21: mol_type = other DNA
ggcgaaggcgccagactcagc

SEQ ID NO: 16886 - DNA, 21 bp, synthetic construct
  misc_feature 1..21: note = Description of Artificial Sequence: Synthetic oligonucleotide
  source 1..21: mol_type = other DNA
ggtgctggtactaggacggag

SEQ ID NO: 16887 - DNA, 21 bp, synthetic construct
  misc_feature 1..21: note = Description of Artificial Sequence: Synthetic oligonucleotide
  source 1..21: mol_type = other DNA
ggtaaggagaatggggctcag

SEQ ID NO: 16888 - DNA, 21 bp, synthetic construct
  misc_feature 1..21: note = Description of Artificial Sequence: Synthetic oligonucleotide
  source 1..21: mol_type = other DNA
aatcggcagccgaagcaggag

SEQ ID NO: 16889 - DNA, 21 bp, synthetic construct
  misc_feature 1..21: note = Description of Artificial Sequence: Synthetic oligonucleotide
  source 1..21: mol_type = other DNA
aacaccgccgccagcaacacc

SEQ ID NO: 16890 - DNA, 21 bp, synthetic construct
  misc_feature 1..21: note = Description of Artificial Sequence: Synthetic oligonucleotide
  source 1..21: mol_type = other DNA
accagacaaaccaaagtcgaa

SEQ ID NO: 16891 - DNA, 21 bp, synthetic construct
  misc_feature 1..21: note = Description of Artificial Sequence: Synthetic oligonucleotide
  source 1..21: mol_type = other DNA
agtctgtctactgctcctact

SEQ ID NO: 16892 - DNA, 21 bp, synthetic construct
  misc_feature 1..21: note = Description of Artificial Sequence: Synthetic oligonucleotide
  source 1..21: mol_type = other DNA
gaccaaagcagcaaaaccaac

SEQ ID NO: 16893 - DNA, 21 bp, synthetic construct
  misc_feature 1..21: note = Description of Artificial Sequence: Synthetic oligonucleotide
  source 1..21: mol_type = other DNA
actgcggcgagtagtactagt

SEQ ID NO: 16894 - DNA, 21 bp, synthetic construct
  misc_feature 1..21: note = Description of Artificial Sequence: Synthetic oligonucleotide
  source 1..21: mol_type = other DNA
atgggttctccgagtgcgtct

SEQ ID NO: 16895 - DNA, 21 bp, synthetic construct
  misc_feature 1..21: note = Description of Artificial Sequence: Synthetic oligonucleotide
  source 1..21: mol_type = other DNA
ctccaaagcaccgcccccagc

SEQ ID NO: 16896 - DNA, 21 bp, synthetic construct
  misc_feature 1..21: note = Description of Artificial Sequence: Synthetic oligonucleotide
  source 1..21: mol_type = other DNA
aatcatgggtctcctggggtt

SEQ ID NO: 16897 - DNA, 21 bp, synthetic construct
  misc_feature 1..21: note = Description of Artificial Sequence: Synthetic oligonucleotide
  source 1..21: mol_type = other DNA
ggttctggtacgtctatgaat

SEQ ID NO: 16898 - DNA, 21 bp, synthetic construct
  misc_feature 1..21: note = Description of Artificial Sequence: Synthetic oligonucleotide
  source 1..21: mol_type = other DNA
accggcaccagcagcgtcgcc

SEQ ID NO: 16899 - DNA, 21 bp, synthetic construct
  misc_feature 1..21: note = Description of Artificial Sequence: Synthetic oligonucleotide
  source 1..21: mol_type = other DNA
gatgctaaggggggcgctggt

SEQ ID NO: 16900 - DNA, 21 bp, synthetic construct
  misc_feature 1..21: note = Description of Artificial Sequence: Synthetic oligonucleotide
  source 1..21: mol_type = other DNA
actggttcttctacggcgcat

SEQ ID NO: 16901 - DNA, 21 bp, synthetic construct
  misc_feature 1..21: note = Description of Artificial Sequence: Synthetic oligonucleotide
  source 1..21: mol_type = other DNA
actactggttcggggaatctt

SEQ ID NO: 16902 - DNA, 21 bp, synthetic construct
  misc_feature 1..21: note = Description of Artificial Sequence: Synthetic oligonucleotide
  source 1..21: mol_type = other DNA
agcaccgcccaaaccagcgtc

SEQ ID NO: 16903 - DNA, 21 bp, synthetic construct
  misc_feature 1..21: note = Description of Artificial Sequence: Synthetic oligonucleotide
  source 1..21: mol_type = other DNA
tctgggaatgataatcggaat

SEQ ID NO: 16904 - DNA, 21 bp, synthetic construct
  misc_feature 1..21: note = Description of Artificial Sequence: Synthetic oligonucleotide
  source 1..21: mol_type = other DNA
actttgaatggtaaggcggtg

SEQ ID NO: 16905 - DNA, 21 bp, synthetic construct
  misc_feature 1..21: note = Description of Artificial Sequence: Synthetic oligonucleotide
  source 1..21: mol_type = other DNA
gcggagccggggaataagatg

SEQ ID NO: 16906 - DNA, 21 bp, synthetic construct
  misc_feature 1..21: note = Description of Artificial Sequence: Synthetic oligonucleotide
  source 1..21: mol_type = other DNA
aacaccagcaacggcagccaa

SEQ ID NO: 16907 - DNA, 21 bp, synthetic construct
  misc_feature 1..21: note = Description of Artificial Sequence: Synthetic oligonucleotide
  source 1..21: mol_type = other DNA
cagtctaatactgctcattct

SEQ ID NO: 16908 - DNA, 21 bp, synthetic construct
  misc_feature 1..21: note = Description of Artificial Sequence: Synthetic oligonucleotide
  source 1..21: mol_type = other DNA
aaaaccgccaccagcagcacc

SEQ ID NO: 16909 - DNA, 21 bp, synthetic construct
  misc_feature 1..21: note = Description of Artificial Sequence: Synthetic oligonucleotide
  source 1..21: mol_type = other DNA
gtcagcggcaccagcaacgtc

SEQ ID NO: 16910 - DNA, 21 bp, synthetic construct
  misc_feature 1..21: note = Description of Artificial Sequence: Synthetic oligonucleotide
  source 1..21: mol_type = other DNA
tcgggttcgaaggaggcgact

SEQ ID NO: 16911 - DNA, 21 bp, synthetic construct
  misc_feature 1..21: note = Description of Artificial Sequence: Synthetic oligonucleotide
  source 1..21: mol_type = other DNA
actggtggttcttcgtcgctt

SEQ ID NO: 16912 - DNA, 21 bp, synthetic construct
  misc_feature 1..21: note = Description of Artificial Sequence: Synthetic oligonucleotide
  source 1..21: mol_type = other DNA
gatgttactaagagttctgcg

SEQ ID NO: 16913 - DNA, 21 bp, synthetic construct
  misc_feature 1..21: note = Description of Artificial Sequence: Synthetic oligonucleotide
  source 1..21: mol_type = other DNA
aatacgactggtcattcgagt

SEQ ID NO: 16914 - DNA, 21 bp, synthetic construct
  misc_feature 1..21: note = Description of Artificial Sequence: Synthetic oligonucleotide
  source 1..21: mol_type = other DNA
gataatgttcagaaggtgtcg

SEQ ID NO: 16915 - DNA, 21 bp, synthetic construct
  misc_feature 1..21: note = Description of Artificial Sequence: Synthetic oligonucleotide
  source 1..21: mol_type = other DNA
ggtaatggggtgccgaatggt

SEQ ID NO: 16916 - DNA, 21 bp, synthetic construct
  misc_feature 1..21: note = Description of Artificial Sequence: Synthetic oligonucleotide
  source 1..21: mol_type = other DNA
caacaagccgcccccagcgtc

SEQ ID NO: 16917 - DNA, 21 bp, synthetic construct
  misc_feature 1..21: note = Description of Artificial Sequence: Synthetic oligonucleotide
  source 1..21: mol_type = other DNA
tcgcaggataataataggtcg

SEQ ID NO: 16918 - DNA, 21 bp, synthetic construct
  misc_feature 1..21: note = Description of Artificial Sequence: Synthetic oligonucleotide
  source 1..21: mol_type = other DNA
gtggagaagggtaagaatgag

SEQ ID NO: 16919 - DNA, 21 bp, synthetic construct
  misc_feature 1..21: note = Description of Artificial Sequence: Synthetic oligonucleotide
  source 1..21: mol_type = other DNA
agcacccaaggcaccagcagc

SEQ ID NO: 16920 - DNA, 21 bp, synthetic construct
  misc_feature 1..21: note = Description of Artificial Sequence: Synthetic oligonucleotide
  source 1..21: mol_type = other DNA
agaagcggcgacaaccccagc

SEQ ID NO: 16921 - DNA, 21 bp, synthetic construct
  misc_feature 1..21: note = Description of Artificial Sequence: Synthetic oligonucleotide
  source 1..21: mol_type = other DNA
accaccgccagccacaacgtc

SEQ ID NO: 16922 - DNA, 21 bp, synthetic construct
  misc_feature 1..21: note = Description of Artificial Sequence: Synthetic oligonucleotide
  source 1..21: mol_type = other DNA
caaagcgtcgaccccaaactc

SEQ ID NO: 16923 - DNA, 21 bp, synthetic construct
  misc_feature 1..21: note = Description of Artificial Sequence: Synthetic oligonucleotide
  source 1..21: mol_type = other DNA
ggtgttacgaatgcgaagtct

SEQ ID NO: 16924 - DNA, 21 bp, synthetic construct
  misc_feature 1..21: note = Description of Artificial Sequence: Synthetic oligonucleotide
  source 1..21: mol_type = other DNA
aatgagtctcgggggtcgtcg

SEQ ID NO: 16925 - DNA, 21 bp, synthetic construct
  misc_feature 1..21: note = Description of Artificial Sequence: Synthetic oligonucleotide
  source 1..21: mol_type = other DNA
caagacagcaaacaaggcgcc

SEQ ID NO: 16926 - DNA, 21 bp, synthetic construct
  misc_feature 1..21: note = Description of Artificial Sequence: Synthetic oligonucleotide
  source 1..21: mol_type = other DNA
agcatgagcagcgaacccaaa

SEQ ID NO: 16927 - DNA, 21 bp, synthetic construct
  misc_feature 1..21: note = Description of Artificial Sequence: Synthetic oligonucleotide
  source 1..21: mol_type = other DNA
agcggcgccggcgccagcctc

SEQ ID NO: 16928 - DNA, 21 bp, synthetic construct
  misc_feature 1..21: note = Description of Artificial Sequence: Synthetic oligonucleotide
  source 1..21: mol_type = other DNA
caaaccagcggcagccacggc

SEQ ID NO: 16929 - DNA, 21 bp, synthetic construct
  misc_feature 1..21: note = Description of Artificial Sequence: Synthetic oligonucleotide
  source 1..21: mol_type = other DNA
gtcggcaacagcaacaccacc

SEQ ID NO: 16930 - DNA, 21 bp, synthetic construct
  misc_feature 1..21: note = Description of Artificial Sequence: Synthetic oligonucleotide
  source 1..21: mol_type = other DNA
agcaaaagcgccgcccccacc

SEQ ID NO: 16931 - DNA, 21 bp, synthetic construct
  misc_feature 1..21: note = Description of Artificial Sequence: Synthetic oligonucleotide
  source 1..21: mol_type = other DNA
gggacgggtcagtctccggtt

SEQ ID NO: 16932 - DNA, 21 bp, synthetic construct
  misc_feature 1..21: note = Description of Artificial Sequence: Synthetic oligonucleotide
  source 1..21: mol_type = other DNA
agcagcaccagcagccacagc

SEQ ID NO: 16933 - DNA, 21 bp, synthetic construct
  misc_feature 1..21: note = Description of Artificial Sequence: Synthetic oligonucleotide
  source 1..21: mol_type = other DNA
atcaaaaacagccaaaccagc

SEQ ID NO: 16934 - DNA, 21 bp, synthetic construct
  misc_feature 1..21: note = Description of Artificial Sequence: Synthetic oligonucleotide
  source 1..21: mol_type = other DNA
agtcatggggataagactctt

SEQ ID NO: 16935 - DNA, 21 bp, synthetic construct
  misc_feature 1..21: note = Description of Artificial Sequence: Synthetic oligonucleotide
  source 1..21: mol_type = other DNA
aatgcttctcagcaggggcag

SEQ ID NO: 16936 - DNA, 21 bp, synthetic construct
  misc_feature 1..21: note = Description of Artificial Sequence: Synthetic oligonucleotide
  source 1..21: mol_type = other DNA
gatggggtgggtactgggagc

SEQ ID NO: 16937 - DNA, 21 bp, synthetic construct
  misc_feature 1..21: note = Description of Artificial Sequence: Synthetic oligonucleotide
  source 1..21: mol_type = other DNA
ggtagtacggggtcgagtgtg

SEQ ID NO: 16938 - DNA, 21 bp, synthetic construct
  misc_feature 1..21: note = Description of Artificial Sequence: Synthetic oligonucleotide
  source 1..21: mol_type = other DNA
gccgtcagcaaccccagccaa

SEQ ID NO: 16939 - DNA, 21 bp, synthetic construct
  misc_feature 1..21: note = Description of Artificial Sequence: Synthetic oligonucleotide
  source 1..21: mol_type = other DNA
accagcggccaaaccggcagc

SEQ ID NO: 16940 - DNA, 21 bp, synthetic construct
  misc_feature 1..21: note = Description of Artificial Sequence: Synthetic oligonucleotide
  source 1..21: mol_type = other DNA
agcggcaccagcaccaccagc

SEQ ID NO: 16941 - DNA, 21 bp, synthetic construct
  misc_feature 1..21: note = Description of Artificial Sequence: Synthetic oligonucleotide
  source 1..21: mol_type = other DNA
cggcaggatgctaagtctgag

SEQ ID NO: 16942 - DNA, 21 bp, synthetic construct
  misc_feature 1..21: note = Description of Artificial Sequence: Synthetic oligonucleotide
  source 1..21: mol_type = other DNA
atgagcaccgtcaaaccccaa

SEQ ID NO: 16943 - DNA, 21 bp, synthetic construct
  misc_feature 1..21: note = Description of Artificial Sequence: Synthetic oligonucleotide
  source 1..21: mol_type = other DNA
gcttttgatcctaagggtggt

SEQ ID NO: 16944 - DNA, 21 bp, synthetic construct
  misc_feature 1..21: note = Description of Artificial Sequence: Synthetic oligonucleotide
  source 1..21: mol_type = other DNA
gttgcgggggcttcgactggt

SEQ ID NO: 16945 - DNA, 21 bp, synthetic construct
  misc_feature 1..21: note = Description of Artificial Sequence: Synthetic oligonucleotide
  source 1..21: mol_type = other DNA
agtggtgctgggactattagt

SEQ ID NO: 16946 - DNA, 21 bp, synthetic construct
  misc_feature 1..21: note = Description of Artificial Sequence: Synthetic oligonucleotide
  source 1..21: mol_type = other DNA
agcctcagcgacaaagccaga

SEQ ID NO: 16947 - DNA, 21 bp, synthetic construct
  misc_feature 1..21: note = Description of Artificial Sequence: Synthetic oligonucleotide
  source 1..21: mol_type = other DNA
tcgactcagtcggctcctact

SEQ ID NO: 16948 - DNA, 21 bp, synthetic construct
  misc_feature 1..21: note = Description of Artificial Sequence: Synthetic oligonucleotide
  source 1..21: mol_type = other DNA
gtgacgggtaagactgatagt

SEQ ID NO: 16949 - DNA, 21 bp, synthetic construct
  misc_feature 1..21: note = Description of Artificial Sequence: Synthetic oligonucleotide
  source 1..21: mol_type = other DNA
caggatactaagagtacttct

SEQ ID NO: 16950 - DNA, 21 bp, synthetic construct
  misc_feature 1..21: note = Description of Artificial Sequence: Synthetic oligonucleotide
  source 1..21: mol_type = other DNA
caagtcggcagcagcagcgtc

SEQ ID NO: 16951 - DNA, 21 bp, synthetic construct
  misc_feature 1..21: note = Description of Artificial Sequence: Synthetic oligonucleotide
  source 1..21: mol_type = other DNA
aacagccaagccccccccaac

SEQ ID NO: 16952 - DNA, 21 bp, synthetic construct
  misc_feature 1..21: note = Description of Artificial Sequence: Synthetic oligonucleotide
  source 1..21: mol_type = other DNA
atgacttcgaaggatatggtg

SEQ ID NO: 16953 - DNA, 21 bp, synthetic construct
  misc_feature 1..21: note = Description of Artificial Sequence: Synthetic oligonucleotide
  source 1..21: mol_type = other DNA
cagtcgtcgagtcagcctggg

SEQ ID NO: 16954 - DNA, 21 bp, synthetic construct
  misc_feature 1..21: note = Description of Artificial Sequence: Synthetic oligonucleotide
  source 1..21: mol_type = other DNA
ggcaccggcagcgcccccgtc

SEQ ID NO: 16955 - DNA, 21 bp, synthetic construct
  misc_feature 1..21: note = Description of Artificial Sequence: Synthetic oligonucleotide
  source 1..21: mol_type = other DNA
tcgggtagttctactgctacg

SEQ ID NO: 16956 - DNA, 21 bp, synthetic construct
  misc_feature 1..21: note = Description of Artificial Sequence: Synthetic oligonucleotide
  source 1..21: mol_type = other DNA
ttgaatactcagtctccgtct

SEQ ID NO: 16957 - DNA, 21 bp, synthetic construct
  misc_feature 1..21: note = Description of Artificial Sequence: Synthetic oligonucleotide
  source 1..21: mol_type = other DNA
ggcgacaccaacgtcaaaggc

SEQ ID NO: 16958 - DNA, 21 bp, synthetic construct
  misc_feature 1..21: note = Description of Artificial Sequence: Synthetic oligonucleotide
  source 1..21: mol_type = other DNA
gccagcaccggcaaagacggc

SEQ ID NO: 16959 - DNA, 21 bp, synthetic construct
  misc_feature 1..21: note = Description of Artificial Sequence: Synthetic oligonucleotide
  source 1..21: mol_type = other DNA
cgtactgggtcttcgaatggt

SEQ ID NO: 16960 - DNA, 21 bp, synthetic construct
  misc_feature 1..21: note = Description of Artificial Sequence: Synthetic oligonucleotide
  source 1..21: mol_type = other DNA
tacaacaacggcgtcagcaaa

SEQ ID NO: 16961 - DNA, 21 bp, synthetic construct
  misc_feature 1..21: note = Description of Artificial Sequence: Synthetic oligonucleotide
  source 1..21: mol_type = other DNA
aacgtcggcagcaccaacagc

SEQ ID NO: 16962 - DNA, 21 bp, synthetic construct
  misc_feature 1..21: note = Description of Artificial Sequence: Synthetic oligonucleotide
  source 1..21: mol_type = other DNA
gggatggcggatcggaataag

SEQ ID NO: 16963 - DNA, 21 bp, synthetic construct
  misc_feature 1..21: note = Description of Artificial Sequence: Synthetic oligonucleotide
  source 1..21: mol_type = other DNA
gggaggcaggatggtgcgaag

SEQ ID NO: 16964 - DNA, 21 bp, synthetic construct
  misc_feature 1..21: note = Description of Artificial Sequence: Synthetic oligonucleotide
  source 1..21: mol_type = other DNA
acgaagtcgaatccgaatagt

SEQ ID NO: 16965 - DNA, 21 bp, synthetic construct
  misc_feature 1..21: note = Description of Artificial Sequence: Synthetic oligonucleotide
  source 1..21: mol_type = other DNA
ggcagcaacaacagcagcggc

SEQ ID NO: 16966 - DNA, 21 bp, synthetic construct
  misc_feature 1..21: note = Description of Artificial Sequence: Synthetic oligonucleotide
  source 1..21: mol_type = other DNA
gtcggcaccaccagcgccagc

SEQ ID NO: 16967 - DNA, 21 bp, synthetic construct
  misc_feature 1..21: note = Description of Artificial Sequence: Synthetic oligonucleotide
  source 1..21: mol_type = other DNA
gtggagggggctagtgtgcgt

SEQ ID NO: 16968 - DNA, 21 bp, synthetic construct
  misc_feature 1..21: note = Description of Artificial Sequence: Synthetic oligonucleotide
  source 1..21: mol_type = other DNA
ggcagcgccaccaaaagcacc

SEQ ID NO: 16969 - DNA, 21 bp, synthetic construct
  misc_feature 1..21: note = Description of Artificial Sequence: Synthetic oligonucleotide
  source 1..21: mol_type = other DNA
tcggctaaggctccgtctctt

SEQ ID NO: 16970 - DNA, 21 bp, synthetic construct
  misc_feature 1..21: note = Description of Artificial Sequence: Synthetic oligonucleotide
  source 1..21: mol_type = other DNA
ggtacgaatacgaataaggcg

SEQ ID NO: 16971 - DNA, 21 bp, synthetic construct
  misc_feature 1..21: note = Description of Artificial Sequence: Synthetic oligonucleotide
  source 1..21: mol_type = other DNA
gaaggcagcagcggcgtcaaa

SEQ ID NO: 16972 - DNA, 21 bp, synthetic construct
  misc_feature 1..21: note = Description of Artificial Sequence: Synthetic oligonucleotide
  source 1..21: mol_type = other DNA
gatagtcgttctgcgagtagt

SEQ ID NO: 16973 - DNA, 21 bp, synthetic construct
  misc_feature 1..21: note = Description of Artificial Sequence: Synthetic oligonucleotide
  source 1..21: mol_type = other DNA
gagaagggtgctgggtcgaag

SEQ ID NO: 16974 - DNA, 21 bp, synthetic construct
  misc_feature 1..21: note = Description of Artificial Sequence: Synthetic oligonucleotide
  source 1..21: mol_type = other DNA
aacaacgccggcaacctcggc

SEQ ID NO: 16975 - DNA, 21 bp, synthetic construct
  misc_feature 1..21: note = Description of Artificial Sequence: Synthetic oligonucleotide
  source 1..21: mol_type = other DNA
agagacgccagcaccaccggc

SEQ ID NO: 16976 - DNA, 21 bp, synthetic construct
  misc_feature 1..21: note = Description of Artificial Sequence: Synthetic oligonucleotide
  source 1..21: mol_type = other DNA
agcagcaaaccccaaagcatg

SEQ ID NO: 16977 - DNA, 21 bp, synthetic construct
  misc_feature 1..21: note = Description of Artificial Sequence: Synthetic oligonucleotide
  source 1..21: mol_type = other DNA
gccaccgacaaaaccgccctc

SEQ ID NO: 16978 - DNA, 21 bp, synthetic construct
  misc_feature 1..21: note = Description of Artificial Sequence: Synthetic oligonucleotide
  source 1..21: mol_type = other DNA
gaaagcagcagccccgccatg

SEQ ID NO: 16979 - DNA, 21 bp, synthetic construct
  misc_feature 1..21: note = Description of Artificial Sequence: Synthetic oligonucleotide
  source 1..21: mol_type = other DNA
atgctcaacgacgccggcaaa

SEQ ID NO: 16980 - DNA, 21 bp, synthetic construct
  misc_feature 1..21: note = Description of Artificial Sequence: Synthetic oligonucleotide
  source 1..21: mol_type = other DNA
caagccggcaacagccccgcc

SEQ ID NO: 16981 - DNA, 21 bp, synthetic construct
  misc_feature 1..21: note = Description of Artificial Sequence: Synthetic oligonucleotide
  source 1..21: mol_type = other DNA
gccggccccagcggcggcggc

SEQ ID NO: 16982 - DNA, 21 bp, synthetic construct
  misc_feature 1..21: note = Description of Artificial Sequence: Synthetic oligonucleotide
  source 1..21: mol_type = other DNA
ggtaatagtaagtcgagtcag

SEQ ID NO: 16983 - DNA, 21 bp, synthetic construct
  misc_feature 1..21: note = Description of Artificial Sequence: Synthetic oligonucleotide
  source 1..21: mol_type = other DNA
ggtgataagacgagtttgacg

SEQ ID NO: 16984 - DNA, 21 bp, synthetic construct
  misc_feature 1..21: note = Description of Artificial Sequence: Synthetic oligonucleotide
  source 1..21: mol_type = other DNA
accgccggccaaggcagcagc

SEQ ID NO: 16985 - DNA, 21 bp, synthetic construct
  misc_feature 1..21: note = Description of Artificial Sequence: Synthetic oligonucleotide
  source 1..21: mol_type = other DNA
aacaccaccagcgccagcgcc

SEQ ID NO: 16986 - DNA, 21 bp, synthetic construct
  misc_feature 1..21: note = Description of Artificial Sequence: Synthetic oligonucleotide
  source 1..21: mol_type = other DNA
ggcgtcgccgcccaaaacagc

SEQ ID NO: 16987 - DNA, 21 bp, synthetic construct
  misc_feature 1..21: note = Description of Artificial Sequence: Synthetic oligonucleotide
  source 1..21: mol_type = other DNA
ggtcagggtcagaagtcgatg

SEQ ID NO: 16988 - DNA, 21 bp, synthetic construct
  misc_feature 1..21: note = Description of Artificial Sequence: Synthetic oligonucleotide
  source 1..21: mol_type = other DNA
ggtcagccttctggtaagacg

SEQ ID NO: 16989 - DNA, 21 bp, synthetic construct
  misc_feature 1..21: note = Description of Artificial Sequence: Synthetic oligonucleotide
  source 1..21: mol_type = other DNA
gaacccagcaccaaaggcctc

SEQ ID NO: 16990 - DNA, 21 bp, synthetic construct
  misc_feature 1..21: note = Description of Artificial Sequence: Synthetic oligonucleotide
  source 1..21: mol_type = other DNA
acggcgactgattctcgtact

SEQ ID NO: 16991 - DNA, 21 bp, synthetic construct
  misc_feature 1..21: note = Description of Artificial Sequence: Synthetic oligonucleotide
  source 1..21: mol_type = other DNA
caaagcgacaacgtcaacaga

SEQ ID NO: 16992 - DNA, 21 bp, synthetic construct
  misc_feature 1..21: note = Description of Artificial Sequence: Synthetic oligonucleotide
  source 1..21: mol_type = other DNA
gctcaggttaagtctaatggt

SEQ ID NO: 16993 - DNA, 21 bp, synthetic construct
  misc_feature 1..21: note = Description of Artificial Sequence: Synthetic oligonucleotide
  source 1..21: mol_type = other DNA
caaagcagccccaccagcagc

SEQ ID NO: 16994 - DNA, 21 bp, synthetic construct
  misc_feature 1..21: note = Description of Artificial Sequence: Synthetic oligonucleotide
  source 1..21: mol_type = other DNA
gatgctgcgcgtaattcggcg

SEQ ID NO: 16995 - DNA, 21 bp, synthetic construct
  misc_feature 1..21: note = Description of Artificial Sequence: Synthetic oligonucleotide
  source 1..21: mol_type = other DNA
gtggatgggggtaagactaat

SEQ ID NO: 16996 - DNA, 21 bp, synthetic construct
  misc_feature 1..21: note = Description of Artificial Sequence: Synthetic oligonucleotide
  source 1..21: mol_type = other DNA
cacggttctggacagaatcaa

SEQ ID NO: 16997 - DNA, 21 bp, synthetic construct
  misc_feature 1..21: note = Description of Artificial Sequence: Synthetic oligonucleotide
  source 1..21: mol_type = other DNA
cttagtggtggttctacgggg

SEQ ID NO: 16998 - DNA, 21 bp, synthetic construct
  misc_feature 1..21: note = Description of Artificial Sequence: Synthetic oligonucleotide
  source 1..21: mol_type = other DNA
cagacgaagccgcaggcggct

SEQ ID NO: 16999 - DNA, 21 bp, synthetic construct
  misc_feature 1..21: note = Description of Artificial Sequence: Synthetic oligonucleotide
  source 1..21: mol_type = other DNA
gacaccaccgccaaaaacatc

SEQ ID NO: 17000 - DNA, 21 bp, synthetic construct
  misc_feature 1..21: note = Description of Artificial Sequence: Synthetic oligonucleotide
  source 1..21: mol_type = other DNA
tctggtgcgcagactgctttg

SEQ ID NO: 17001 - DNA, 21 bp, synthetic construct
  misc_feature 1..21: note = Description of Artificial Sequence: Synthetic oligonucleotide
  source 1..21: mol_type = other DNA
ggcagaaacggcgaagtcaaa

SEQ ID NO: 17002 - DNA, 21 bp, synthetic construct
  misc_feature 1..21: note = Description of Artificial Sequence: Synthetic oligonucleotide
  source 1..21: mol_type = other DNA
cagcataaggatggggcgggg

SEQ ID NO: 17003 - DNA, 21 bp, synthetic construct
  misc_feature 1..21: note = Description of Artificial Sequence: Synthetic oligonucleotide
  source 1..21: mol_type = other DNA
accctcgacagcgtcggcaaa

SEQ ID NO: 17004 - DNA, 21 bp, synthetic construct
  misc_feature 1..21: note = Description of Artificial Sequence: Synthetic oligonucleotide
  source 1..21: mol_type = other DNA
aagcataattcggagcagtcg

SEQ ID NO: 17005 - DNA, 21 bp, synthetic construct
  misc_feature 1..21: note = Description of Artificial Sequence: Synthetic oligonucleotide
  source 1..21: mol_type = other DNA
cagcaggcttcgagtactggt

SEQ ID NO: 17006 - DNA, 21 bp, synthetic construct
  misc_feature 1..21: note = Description of Artificial Sequence: Synthetic oligonucleotide
  source 1..21: mol_type = other DNA
gctacgagtccgccgtctggt

SEQ ID NO: 17007 - DNA, 21 bp, synthetic construct
  misc_feature 1..21: note = Description of Artificial Sequence: Synthetic oligonucleotide
  source 1..21: mol_type = other DNA
cacaccaaagcccaagccggc

SEQ ID NO: 17008 - DNA, 21 bp, synthetic construct
  misc_feature 1..21: note = Description of Artificial Sequence: Synthetic oligonucleotide
  source 1..21: mol_type = other DNA
cgtagtaatggggcggcttct

SEQ ID NO: 17009 - DNA, 21 bp, synthetic construct
  misc_feature 1..21: note = Description of Artificial Sequence: Synthetic oligonucleotide
  source 1..21: mol_type = other DNA
gtcgccaccaaaagcaccagc

SEQ ID NO: 17010 - DNA, 21 bp, synthetic construct
  misc_feature 1..21: note = Description of Artificial Sequence: Synthetic oligonucleotide
  source 1..21: mol_type = other DNA
accagcggcgccggcgtcaac

SEQ ID NO: 17011 - DNA, 21 bp, synthetic construct
  misc_feature 1..21: note = Description of Artificial Sequence: Synthetic oligonucleotide
  source 1..21: mol_type = other DNA
acccacaacagcagcagcagc

SEQ ID NO: 17012 - DNA, 21 bp, synthetic construct
  misc_feature 1..21: note = Description of Artificial Sequence: Synthetic oligonucleotide
  source 1..21: mol_type = other DNA
ggtgagggtaatgcgaggaat

SEQ ID NO: 17013 - DNA, 21 bp, synthetic construct
  misc_feature 1..21: note = Description of Artificial Sequence: Synthetic oligonucleotide
  source 1..21: mol_type = other DNA
ggcagcgtcaaaaccagcagc

SEQ ID NO: 17014 - DNA, 21 bp, synthetic construct
  misc_feature 1..21: note = Description of Artificial Sequence: Synthetic oligonucleotide
  source 1..21: mol_type = other DNA
gctggggagaaggggcttcat

SEQ ID NO: 17015 - DNA, 21 bp, synthetic construct
  misc_feature 1..21: note = Description of Artificial Sequence: Synthetic oligonucleotide
  source 1..21: mol_type = other DNA
ggtcagactgggtctaagacg

SEQ ID NO: 17016 - DNA, 21 bp, synthetic construct
  misc_feature 1..21: note = Description of Artificial Sequence: Synthetic oligonucleotide
  source 1..21: mol_type = other DNA
ggtgggtctaaggggtctcag

SEQ ID NO: 17017 - DNA, 21 bp, synthetic construct
  misc_feature 1..21: note = Description of Artificial Sequence: Synthetic oligonucleotide
  source 1..21: mol_type = other DNA
agtcagtctgcgccgaataag

SEQ ID NO: 17018 - DNA, 21 bp, synthetic construct
  misc_feature 1..21: note = Description of Artificial Sequence: Synthetic oligonucleotide
  source 1..21: mol_type = other DNA
agcgtcgaaggcaccagagtc

SEQ ID NO: 17019 - DNA, 21 bp, synthetic construct
  misc_feature 1..21: note = Description of Artificial Sequence: Synthetic oligonucleotide
  source 1..21: mol_type = other DNA
caaagcggcagccaaggcaac

SEQ ID NO: 17020 - DNA, 21 bp, synthetic construct
  misc_feature 1..21: note = Description of Artificial Sequence: Synthetic oligonucleotide
  source 1..21: mol_type = other DNA
ggtactgatcgtcctagtgtt

SEQ ID NO: 17021 - DNA, 21 bp, synthetic construct
  misc_feature 1..21: note = Description of Artificial Sequence: Synthetic oligonucleotide
  source 1..21: mol_type = other DNA
aacgccagcgccggcagcggc

SEQ ID NO: 17022 - DNA, 21 bp, synthetic construct
  misc_feature 1..21: note = Description of Artificial Sequence: Synthetic oligonucleotide
  source 1..21: mol_type = other DNA
ggcggcagcaaagccctcgaa

SEQ ID NO: 17023 - DNA, 21 bp, synthetic construct
  misc_feature 1..21: note = Description of Artificial Sequence: Synthetic oligonucleotide
  source 1..21: mol_type = other DNA
gacggcaaacaacccggcgtc

SEQ ID NO: 17024 - DNA, 21 bp, synthetic construct
  misc_feature 1..21: note = Description of Artificial Sequence: Synthetic oligonucleotide
  source 1..21: mol_type = other DNA
agcggcaccaccagcaacctc

SEQ ID NO: 17025 - DNA, 21 bp, synthetic construct
  misc_feature 1..21: note = Description of Artificial Sequence: Synthetic oligonucleotide
  source 1..21: mol_type = other DNA
gaaagcagagccaccagcacc

SEQ ID NO: 17026 - DNA, 21 bp, synthetic construct
  misc_feature 1..21: note = Description of Artificial Sequence: Synthetic oligonucleotide
  source 1..21: mol_type = other DNA
tctgcgggggctacgcaggct

SEQ ID NO: 17027 - DNA, 21 bp, synthetic construct
  misc_feature 1..21: note = Description of Artificial Sequence: Synthetic oligonucleotide
  source 1..21: mol_type = other DNA
cacagcgccgccgccaccacc

SEQ ID NO: 17028 - DNA, 21 bp, synthetic construct
  misc_feature 1..21: note = Description of Artificial Sequence: Synthetic oligonucleotide
  source 1..21: mol_type = other DNA
gccaccagccaaggcgccacc

SEQ ID NO: 17029 - DNA, 21 bp, synthetic construct
  misc_feature 1..21: note = Description of Artificial Sequence: Synthetic oligonucleotide
  source 1..21: mol_type = other DNA
agccacaaaagcagcaacgaa

SEQ ID NO: 17030 - DNA, 21 bp, synthetic construct
  misc_feature 1..21: note = Description of Artificial Sequence: Synthetic oligonucleotide
  source 1..21: mol_type = other DNA
atgcaaagcgccagcagcggc

SEQ ID NO: 17031 - DNA, 21 bp, synthetic construct
  misc_feature 1..21: note = Description of Artificial Sequence: Synthetic oligonucleotide
  source 1..21: mol_type = other DNA
ctgggtggtgggaattctact

SEQ ID NO: 17032 - DNA, 21 bp, synthetic construct
  misc_feature 1..21: note = Description of Artificial Sequence: Synthetic oligonucleotide
  source 1..21: mol_type = other DNA
agcggcaaagacagcctcgcc

SEQ ID NO: 17033 - DNA, 21 bp, synthetic construct
  misc_feature 1..21: note = Description of Artificial Sequence: Synthetic oligonucleotide
  source 1..21: mol_type = other DNA
actcagtcgacttcttctgct

SEQ ID NO: 17034 - DNA, 21 bp, synthetic construct
  misc_feature 1..21: note = Description of Artificial Sequence: Synthetic oligonucleotide
  source 1..21: mol_type = other DNA
catactggttctcagagtggg

SEQ ID NO: 17035 - DNA, 21 bp, synthetic construct
  misc_feature 1..21: note = Description of Artificial Sequence: Synthetic oligonucleotide
  source 1..21: mol_type = other DNA
gtcaccaccaacagcaacgcc

SEQ ID NO: 17036 - DNA, 21 bp, synthetic construct
  misc_feature 1..21: note = Description of Artificial Sequence: Synthetic oligonucleotide
  source 1..21: mol_type = other DNA
tctcatgaggctagtccgcat

SEQ ID NO: 17037 - DNA, 21 bp, synthetic construct
  misc_feature 1..21: note = Description of Artificial Sequence: Synthetic oligonucleotide
  source 1..21: mol_type = other DNA
aaccaaaaacaaagccccagc

SEQ ID NO: 17038 - DNA, 21 bp, synthetic construct
  misc_feature 1..21: note = Description of Artificial Sequence: Synthetic oligonucleotide
  source 1..21: mol_type = other DNA
accagcggcaccagcagcaga

SEQ ID NO: 17039 - DNA, 21 bp, synthetic construct
  misc_feature 1..21: note = Description of Artificial Sequence: Synthetic oligonucleotide
  source 1..21: mol_type = other DNA
caacacaccaaccaaaacagc

SEQ ID NO: 17040 - DNA, 21 bp, synthetic construct
  misc_feature 1..21: note = Description of Artificial Sequence: Synthetic oligonucleotide
  source 1..21: mol_type = other DNA
gggacggcgtcgtcggcttcg

SEQ ID NO: 17041 - DNA, 21 bp, synthetic construct
  misc_feature 1..21: note = Description of Artificial Sequence: Synthetic oligonucleotide
  source 1..21: mol_type = other DNA
gggactgagccgcagccgaag

SEQ ID NO: 17042 - DNA, 21 bp, synthetic construct
  misc_feature 1..21: note = Description of Artificial Sequence: Synthetic oligonucleotide
  source 1..21: mol_type = other DNA
aacggcgaaagaagcagcggc

SEQ ID NO: 17043 - DNA, 21 bp, synthetic construct
  misc_feature 1..21: note = Description of Artificial Sequence: Synthetic oligonucleotide
  source 1..21: mol_type = other DNA
atgaccaccaacagcaaagaa

SEQ ID NO: 17044 - DNA, 21 bp, synthetic construct
  misc_feature 1..21: note = Description of Artificial Sequence: Synthetic oligonucleotide
  source 1..21: mol_type = other DNA
caaaccggcggccacagcaga

SEQ ID NO: 17045 - DNA, 21 bp, synthetic construct
  misc_feature 1..21: note = Description of Artificial Sequence: Synthetic oligonucleotide
  source 1..21: mol_type = other DNA
gaactcagcagcaaagccggc

SEQ ID NO: 17046 - DNA, 21 bp, synthetic construct
  misc_feature 1..21: note = Description of Artificial Sequence: Synthetic oligonucleotide
  source 1..21: mol_type = other DNA
gccgacagcaaaagcagccac

SEQ ID NO: 17047 - DNA, 21 bp, synthetic construct
  misc_feature 1..21: note = Description of Artificial Sequence: Synthetic oligonucleotide
  source 1..21: mol_type = other DNA
ggcctcagcagaaacaccggc

SEQ ID NO: 17048 - DNA, 21 bp, synthetic construct
  misc_feature 1..21: note = Description of Artificial Sequence: Synthetic oligonucleotide
  source 1..21: mol_type = other DNA
ttgaataatggtagtaatact

SEQ ID NO: 17049 - DNA, 21 bp, synthetic construct
  misc_feature 1..21: note = Description of Artificial Sequence: Synthetic oligonucleotide
  source 1..21: mol_type = other DNA
gttagtggtaattcgagtcat

SEQ ID NO: 17050 - DNA, 21 bp, synthetic construct
  misc_feature 1..21: note = Description of Artificial Sequence: Synthetic oligonucleotide
  source 1..21: mol_type = other DNA
agcggcgtcgccaccagcacc

SEQ ID NO: 17051 - DNA, 21 bp, synthetic construct
  misc_feature 1..21: note = Description of Artificial Sequence: Synthetic oligonucleotide
  source 1..21: mol_type = other DNA
agcagcagcaaagaagccagc

SEQ ID NO: 17052 - DNA, 21 bp, synthetic construct
  misc_feature 1..21: note = Description of Artificial Sequence: Synthetic oligonucleotide
  source 1..21: mol_type = other DNA
tctcctcagtctgatacgaag

SEQ ID NO: 17053 - DNA, 21 bp, synthetic construct
  misc_feature 1..21: note = Description of Artificial Sequence: Synthetic oligonucleotide
  source 1..21: mol_type = other DNA
agcggcggcagcgaaagagcc

SEQ ID NO: 17054 - DNA, 21 bp, synthetic construct
  misc_feature 1..21: note = Description of Artificial Sequence: Synthetic oligonucleotide
  source 1..21: mol_type = other DNA
atggggagtgatcatgtgcgg

SEQ ID NO: 17055 - DNA, 21 bp, synthetic construct
  misc_feature 1..21: note = Description of Artificial Sequence: Synthetic oligonucleotide
  source 1..21: mol_type = other DNA
gcccccagcgccgaaagaggc

SEQ ID NO: 17056 - DNA, 21 bp, synthetic construct
  misc_feature 1..21: note = Description of Artificial Sequence: Synthetic oligonucleotide
  source 1..21: mol_type = other DNA
aggaatggtggtgctaatatg

SEQ ID NO: 17057 - DNA, 21 bp, synthetic construct
  misc_feature 1..21: note = Description of Artificial Sequence: Synthetic oligonucleotide
  source 1..21: mol_type = other DNA
agggctgatggtgatgcgaag

SEQ ID NO: 17058 - DNA, 21 bp, synthetic construct
  misc_feature 1..21: note = Description of Artificial Sequence: Synthetic oligonucleotide
  source 1..21: mol_type = other DNA
acgaatgattcgaagatggct

SEQ ID NO: 17059 - DNA, 21 bp, synthetic construct
  misc_feature 1..21: note = Description of Artificial Sequence: Synthetic oligonucleotide
  source 1..21: mol_type = other DNA
gacagaatcgaaaaaagcagc

SEQ ID NO: 17060 - DNA, 21 bp, synthetic construct
  misc_feature 1..21: note = Description of Artificial Sequence: Synthetic oligonucleotide
  source 1..21: mol_type = other DNA
ggcgtcgacagccccaacaga

SEQ ID NO: 17061 - DNA, 21 bp, synthetic construct
  misc_feature 1..21: note = Description of Artificial Sequence: Synthetic oligonucleotide
  source 1..21: mol_type = other DNA
tctgttacttcgagtcctcat

SEQ ID NO: 17062 - DNA, 21 bp, synthetic construct
  misc_feature 1..21: note = Description of Artificial Sequence: Synthetic oligonucleotide
  source 1..21: mol_type = other DNA
agacaagacagccccgcccaa

SEQ ID NO: 17063 - DNA, 21 bp, synthetic construct
  misc_feature 1..21: note = Description of Artificial Sequence: Synthetic oligonucleotide
  source 1..21: mol_type = other DNA
tcttcgaatggtaagtcggct

SEQ ID NO: 17064 - DNA, 21 bp, synthetic construct
  misc_feature 1..21: note = Description of Artificial Sequence: Synthetic oligonucleotide
  source 1..21: mol_type = other DNA
aacagcgccggccaaagccac

SEQ ID NO: 17065 - DNA, 21 bp, synthetic construct
  misc_feature 1..21: note = Description of Artificial Sequence: Synthetic oligonucleotide
  source 1..21: mol_type = other DNA
gggagtcatgataagtcgacg

SEQ ID NO: 17066 - DNA, 21 bp, synthetic construct
  misc_feature 1..21: note = Description of Artificial Sequence: Synthetic oligonucleotide
  source 1..21: mol_type = other DNA
ggggaggtgggtcagtctcgt

SEQ ID NO: 17067 - DNA, 21 bp, synthetic construct
  misc_feature 1..21: note = Description of Artificial Sequence: Synthetic oligonucleotide
  source 1..21: mol_type = other DNA
atgggttcgaaggagagtggg

SEQ ID NO: 17068 - DNA, 21 bp, synthetic construct
  misc_feature 1..21: note = Description of Artificial Sequence: Synthetic oligonucleotide
  source 1..21: mol_type = other DNA
agcgccctcaaaaaccaaggc

SEQ ID NO: 17069 - DNA, 21 bp, synthetic construct
  misc_feature 1..21: note = Description of Artificial Sequence: Synthetic oligonucleotide
  source 1..21: mol_type = other DNA
accacccaaagcaccagcatc

SEQ ID NO: 17070 - DNA, 21 bp, synthetic construct
  misc_feature 1..21: note = Description of Artificial Sequence: Synthetic oligonucleotide
  source 1..21: mol_type = other DNA
tcgtctggtggggcgactacg

SEQ ID NO: 17071 - DNA, 21 bp, synthetic construct
  misc_feature 1..21: note = Description of Artificial Sequence: Synthetic oligonucleotide
  source 1..21: mol_type = other DNA
agtgatgataagagtcgtatg

SEQ ID NO: 17072 - DNA, 21 bp, synthetic construct
  misc_feature 1..21: note = Description of Artificial Sequence: Synthetic oligonucleotide
  source 1..21: mol_type = other DNA
ggcagcaccctcggcagcggc

SEQ ID NO: 17073 - DNA, 21 bp, synthetic construct
  misc_feature 1..21: note = Description of Artificial Sequence: Synthetic oligonucleotide
  source 1..21: mol_type = other DNA
actgggggtcctgggaatggt

SEQ ID NO: 17074 - DNA, 21 bp, synthetic construct
  misc_feature 1..21: note = Description of Artificial Sequence: Synthetic oligonucleotide
  source 1..21: mol_type = other DNA
aacaccaaccacaaagaaggc

SEQ ID NO: 17075 - DNA, 21 bp, synthetic construct
  misc_feature 1..21: note = Description of Artificial Sequence: Synthetic oligonucleotide
  source 1..21: mol_type = other DNA
agccaaaacagcggcaaagtc

SEQ ID NO: 17076 - DNA, 21 bp, synthetic construct
  misc_feature 1..21: note = Description of Artificial Sequence: Synthetic oligonucleotide
  source 1..21: mol_type = other DNA
gaggggcgtggtactccgggt

SEQ ID NO: 17077 - DNA, 21 bp, synthetic construct
  misc_feature 1..21: note = Description of Artificial Sequence: Synthetic oligonucleotide
  source 1..21: mol_type = other DNA
agcacccacaaacccctcgaa

SEQ ID NO: 17078 - DNA, 21 bp, synthetic construct
  misc_feature 1..21: note = Description of Artificial Sequence: Synthetic oligonucleotide
  source 1..21: mol_type = other DNA
ggccccggcagcaacctcacc

SEQ ID NO: 17079 - DNA, 21 bp, synthetic construct
  misc_feature 1..21: note = Description of Artificial Sequence: Synthetic oligonucleotide
  source 1..21: mol_type = other DNA
gacctcgacagcagaaaaagc

SEQ ID NO: 17080 - DNA, 21 bp, synthetic construct
  misc_feature 1..21: note = Description of Artificial Sequence: Synthetic oligonucleotide
  source 1..21: mol_type = other DNA
gtcaccaccaccggcagcagc

SEQ ID NO: 17081 - DNA, 21 bp, synthetic construct
  misc_feature 1..21: note = Description of Artificial Sequence: Synthetic oligonucleotide
  source 1..21: mol_type = other DNA
ttgggtactacgtctgggggt

SEQ ID NO: 17082 - DNA, 21 bp, synthetic construct
  misc_feature 1..21: note = Description of Artificial Sequence: Synthetic oligonucleotide
  source 1..21: mol_type = other DNA
tcgaatagttctaagtcgggg

SEQ ID NO: 17083 - DNA, 21 bp, synthetic construct
  misc_feature 1..21: note = Description of Artificial Sequence: Synthetic oligonucleotide
  source 1..21: mol_type = other DNA
actggtagtggttctcatggt

SEQ ID NO: 17084 - DNA, 21 bp, synthetic construct
  misc_feature 1..21: note = Description of Artificial Sequence: Synthetic oligonucleotide
  source 1..21: mol_type = other DNA
caactcagcaaagaaagcagc

SEQ ID NO: 17085 - DNA, 21 bp, synthetic construct
  misc_feature 1..21: note = Description of Artificial Sequence: Synthetic oligonucleotide
  source 1..21: mol_type = other DNA
agcggcggcacccccagcagc

SEQ ID NO: 17086 - DNA, 21 bp, synthetic construct
  misc_feature 1..21: note = Description of Artificial Sequence: Synthetic oligonucleotide
  source 1..21: mol_type = other DNA
gacaccggcacccccaaacac

SEQ ID NO: 17087 - DNA, 21 bp, synthetic construct
  misc_feature 1..21: note = Description of Artificial Sequence: Synthetic oligonucleotide
  source 1..21: mol_type = other DNA
accaaaaccggcagccccatg

SEQ ID NO: 17088 - DNA, 21 bp, synthetic construct
  misc_feature 1..21: note = Description of Artificial Sequence: Synthetic oligonucleotide
  source 1..21: mol_type = other DNA
ggtactacggcgactgatcgt

SEQ ID NO: 17089 - DNA, 21 bp, synthetic construct
  misc_feature 1..21: note = Description of Artificial Sequence: Synthetic oligonucleotide
  source 1..21: mol_type = other DNA
cacaacaccgcccccaccagc

SEQ ID NO: 17090 - DNA, 21 bp, synthetic construct
  misc_feature 1..21: note = Description of Artificial Sequence: Synthetic oligonucleotide
  source 1..21: mol_type = other DNA
aggggtgggagtgcttctgat

SEQ ID NO: 17091 - DNA, 21 bp, synthetic construct
  misc_feature 1..21: note = Description of Artificial Sequence: Synthetic oligonucleotide
  source 1..21: mol_type = other DNA
gaggctgcgaatcagggtaag

SEQ ID NO: 17092 - DNA, 21 bp, synthetic construct
  misc_feature 1..21: note = Description of Artificial Sequence: Synthetic oligonucleotide
  source 1..21: mol_type = other DNA
accagaaccgccaccgccgcc

SEQ ID NO: 17093 - DNA, 21 bp, synthetic construct
  misc_feature 1..21: note = Description of Artificial Sequence: Synthetic oligonucleotide
  source 1..21: mol_type = other DNA
cacaacaacagcgccaccaaa

SEQ ID NO: 17094 - DNA, 21 bp, synthetic construct
  misc_feature 1..21: note = Description of Artificial Sequence: Synthetic oligonucleotide
  source 1..21: mol_type = other DNA
ggcagcgaagacaaacacaaa

SEQ ID NO: 17095 - DNA, 21 bp, synthetic construct
  misc_feature 1..21: note = Description of Artificial Sequence: Synthetic oligonucleotide
  source 1..21: mol_type = other DNA
ggtcagagtaagggtaattcg

SEQ ID NO: 17096 - DNA, 21 bp, synthetic construct
  misc_feature 1..21: note = Description of Artificial Sequence: Synthetic oligonucleotide
  source 1..21: mol_type = other DNA
ggtcatggtgatattaagggt

SEQ ID NO: 17097 - DNA, 21 bp, synthetic construct
  misc_feature 1..21: note = Description of Artificial Sequence: Synthetic oligonucleotide
  source 1..21: mol_type = other DNA
aatgctagttctgctacgtct

SEQ ID NO: 17098 - DNA, 21 bp, synthetic construct
  misc_feature 1..21: note = Description of Artificial Sequence: Synthetic oligonucleotide
  source 1..21: mol_type = other DNA
accaccagcgacaaaagcacc

SEQ ID NO: 17099 - DNA, 21 bp, synthetic construct
  misc_feature 1..21: note = Description of Artificial Sequence: Synthetic oligonucleotide
  source 1..21: mol_type = other DNA
tctgcgaatgctgggggtggt

SEQ ID NO: 17100 - DNA, 21 bp, synthetic construct
  misc_feature 1..21: note = Description of Artificial Sequence: Synthetic oligonucleotide
  source 1..21: mol_type = other DNA
gatgggattacgactccgaag

SEQ ID NO: 17101 - DNA, 21 bp, synthetic construct
  misc_feature 1..21: note = Description of Artificial Sequence: Synthetic oligonucleotide
  source 1..21: mol_type = other DNA
aataattctaaggcgagtgct

SEQ ID NO: 17102 - DNA, 21 bp, synthetic construct
  misc_feature 1..21: note = Description of Artificial Sequence: Synthetic oligonucleotide
  source 1..21: mol_type = other DNA
ggtcatagtgggactacgagt

SEQ ID NO: 17103 - DNA, 21 bp, synthetic construct
  misc_feature 1..21: note = Description of Artificial Sequence: Synthetic oligonucleotide
  source 1..21: mol_type = other DNA
agcggcggcagcaccgcccaa

SEQ ID NO: 17104 - DNA, 21 bp, synthetic construct
  misc_feature 1..21: note = Description of Artificial Sequence: Synthetic oligonucleotide
  source 1..21: mol_type = other DNA
agtggtgctgcttcttcgggt

SEQ ID NO: 17105 - DNA, 21 bp, synthetic construct
  misc_feature 1..21: note = Description of Artificial Sequence: Synthetic oligonucleotide
  source 1..21: mol_type = other DNA
ctggttgcggatggttctaag

SEQ ID NO: 17106 - DNA, 21 bp, synthetic construct
  misc_feature 1..21: note = Description of Artificial Sequence: Synthetic oligonucleotide
  source 1..21: mol_type = other DNA
aacgacggcaaaaccctcgcc

SEQ ID NO: 17107 - DNA, 21 bp, synthetic construct
  misc_feature 1..21: note = Description of Artificial Sequence: Synthetic oligonucleotide
  source 1..21: mol_type = other DNA
atggggactcctaattctaag

SEQ ID NO: 17108 - DNA, 21 bp, synthetic construct
  misc_feature 1..21: note = Description of Artificial Sequence: Synthetic oligonucleotide
  source 1..21: mol_type = other DNA
aatcaggcgtctagtaatcat

SEQ ID NO: 17109 - DNA, 21 bp, synthetic construct
  misc_feature 1..21: note = Description of Artificial Sequence: Synthetic oligonucleotide
  source 1..21: mol_type = other DNA
agccaaagcggcgccggcggc

SEQ ID NO: 17110 - DNA, 21 bp, synthetic construct
  misc_feature 1..21: note = Description of Artificial Sequence: Synthetic oligonucleotide
  source 1..21: mol_type = other DNA
atcaccagcagcagccccacc

SEQ ID NO: 17111 - DNA, 21 bp, synthetic construct
  misc_feature 1..21: note = Description of Artificial Sequence: Synthetic oligonucleotide
  source 1..21: mol_type = other DNA
accaacagccccaacggcgcc

SEQ ID NO: 17112 - DNA, 21 bp, synthetic construct
  misc_feature 1..21: note = Description of Artificial Sequence: Synthetic oligonucleotide
  source 1..21: mol_type = other DNA
tcggggcctactgataagagt

SEQ ID NO: 17113 - DNA, 21 bp, synthetic construct
  misc_feature 1..21: note = Description of Artificial Sequence: Synthetic oligonucleotide
  source 1..21: mol_type = other DNA
accagcaccaccaaaaccggc

SEQ ID NO: 17114 - DNA, 21 bp, synthetic construct
  misc_feature 1..21: note = Description of Artificial Sequence: Synthetic oligonucleotide
  source 1..21: mol_type = other DNA
agcagcgaacaagccagcaga

SEQ ID NO: 17115 - DNA, 21 bp, synthetic construct
  misc_feature 1..21: note = Description of Artificial Sequence: Synthetic oligonucleotide
  source 1..21: mol_type = other DNA
atgcccaacaacaacgccggc

SEQ ID NO: 17116 - DNA, 21 bp, synthetic construct
  misc_feature 1..21: note = Description of Artificial Sequence: Synthetic oligonucleotide
  source 1..21: mol_type = other DNA
cacaccggcggccacgccacc

SEQ ID NO: 17117 - DNA, 21 bp, synthetic construct
  misc_feature 1..21: note = Description of Artificial Sequence: Synthetic oligonucleotide
  source 1..21: mol_type = other DNA
gccctccccgacagcaaagcc

SEQ ID NO: 17118 - DNA, 21 bp, synthetic construct
  misc_feature 1..21: note = Description of Artificial Sequence: Synthetic oligonucleotide
  source 1..21: mol_type = other DNA
gctagtgggggtaaggttatt

SEQ ID NO: 17119 - DNA, 21 bp, synthetic construct
  misc_feature 1..21: note = Description of Artificial Sequence: Synthetic oligonucleotide
  source 1..21: mol_type = other DNA
ggcaccagcccccacgccggc

SEQ ID NO: 17120 - DNA, 21 bp, synthetic construct
  misc_feature 1..21: note = Description of Artificial Sequence: Synthetic oligonucleotide
  source 1..21: mol_type = other DNA
ggcagccaaaaaaccgccggc

SEQ ID NO: 17121 - DNA, 21 bp, synthetic construct
  misc_feature 1..21: note = Description of Artificial Sequence: Synthetic oligonucleotide
  source 1..21: mol_type = other DNA
ggccccaccaacagcagagcc

SEQ ID NO: 17122 - DNA, 21 bp, synthetic construct
  misc_feature 1..21: note = Description of Artificial Sequence: Synthetic oligonucleotide
  source 1..21: mol_type = other DNA
gggaaggatggggtggttaag

SEQ ID NO: 17123 - DNA, 21 bp, synthetic construct
  misc_feature 1..21: note = Description of Artificial Sequence: Synthetic oligonucleotide
  source 1..21: mol_type = other DNA
gtgactaataatcctacggtt

SEQ ID NO: 17124 - DNA, 21 bp, synthetic construct
  misc_feature 1..21: note = Description of Artificial Sequence: Synthetic oligonucleotide
  source 1..21: mol_type = other DNA
tctggtcagacgagtaagcag

SEQ ID NO: 17125 - DNA, 21 bp, synthetic construct
  misc_feature 1..21: note = Description of Artificial Sequence: Synthetic oligonucleotide
  source 1..21: mol_type = other DNA
tcttcgaataatacgactagt

SEQ ID NO: 17126 - DNA, 21 bp, synthetic construct
  misc_feature 1..21: note = Description of Artificial Sequence: Synthetic oligonucleotide
  source 1..21: mol_type = other DNA
ctcgccagccaaggcaacagc

SEQ ID NO: 17127 - DNA, 21 bp, synthetic construct
  misc_feature 1..21: note = Description of Artificial Sequence: Synthetic oligonucleotide
  source 1..21: mol_type = other DNA
agacaagaacaaaacagcgtc

SEQ ID NO: 17128 - DNA, 21 bp, synthetic construct
  misc_feature 1..21: note = Description of Artificial Sequence: Synthetic oligonucleotide
  source 1..21: mol_type = other DNA
gatgggtctactgctggtcgt

SEQ ID NO: 17129 - DNA, 21 bp, synthetic construct
  misc_feature 1..21: note = Description of Artificial Sequence: Synthetic oligonucleotide
  source 1..21: mol_type = other DNA
accggcggccaaggcgccaac

SEQ ID NO: 17130 - DNA, 21 bp, synthetic construct
  misc_feature 1..21: note = Description of Artificial Sequence: Synthetic oligonucleotide
  source 1..21: mol_type = other DNA
catcaggcgacgaagtcgggg

SEQ ID NO: 17131 - DNA, 21 bp, synthetic construct
  misc_feature 1..21: note = Description of Artificial Sequence: Synthetic oligonucleotide
  source 1..21: mol_type = other DNA
agggaggggtctagttctgcg

SEQ ID NO: 17132 - DNA, 21 bp, synthetic construct
  misc_feature 1..21: note = Description of Artificial Sequence: Synthetic oligonucleotide
  source 1..21: mol_type = other DNA
gaaaccggcagcaacagcaga

SEQ ID NO: 17133 - DNA, 21 bp, synthetic construct
  misc_feature 1..21: note = Description of Artificial Sequence: Synthetic oligonucleotide
  source 1..21: mol_type = other DNA
ggcgtcaccgaacccagaaaa

SEQ ID NO: 17134 - DNA, 21 bp, synthetic construct
  misc_feature 1..21: note = Description of Artificial Sequence: Synthetic oligonucleotide
  source 1..21: mol_type = other DNA
ggcatcggcgccaaaggcacc

SEQ ID NO: 17135 - DNA, 21 bp, synthetic construct
  misc_feature 1..21: note = Description of Artificial Sequence: Synthetic oligonucleotide
  source 1..21: mol_type = other DNA
acccaacaaagcagcaacacc

SEQ ID NO: 17136 - DNA, 21 bp, synthetic construct
  misc_feature 1..21: note = Description of Artificial Sequence: Synthetic oligonucleotide
  source 1..21: mol_type = other DNA
aacgccgaaaacaaagccgtc

SEQ ID NO: 17137 - DNA, 21 bp, synthetic construct
  misc_feature 1..21: note = Description of Artificial Sequence: Synthetic oligonucleotide
  source 1..21: mol_type = other DNA
gtcaccaccagcagcagcgcc

SEQ ID NO: 17138 - DNA, 21 bp, synthetic construct
  misc_feature 1..21: note = Description of Artificial Sequence: Synthetic oligonucleotide
  source 1..21: mol_type = other DNA
caaagcggcaacgaactcaaa

SEQ ID NO: 17139 - DNA, 21 bp, synthetic construct
  misc_feature 1..21: note = Description of Artificial Sequence: Synthetic oligonucleotide
  source 1..21: mol_type = other DNA
gaaaccggcggcaaacacgtc

SEQ ID NO: 17140 - DNA, 21 bp, synthetic construct
  misc_feature 1..21: note = Description of Artificial Sequence: Synthetic oligonucleotide
  source 1..21: mol_type = other DNA
gaaagcagcagaagcgccccc

SEQ ID NO: 17141 - DNA, 21 bp, synthetic construct
  misc_feature 1..21: note = Description of Artificial Sequence: Synthetic oligonucleotide
  source 1..21: mol_type = other DNA
atgcagaaggagtcgcctgcg

SEQ ID NO: 17142 - DNA, 21 bp, synthetic construct
  misc_feature 1..21: note = Description of Artificial Sequence: Synthetic oligonucleotide
  source 1..21: mol_type = other DNA
gtgatggggacttctagtggt

SEQ ID NO: 17143 - DNA, 21 bp, synthetic construct
  misc_feature 1..21: note = Description of Artificial Sequence: Synthetic oligonucleotide
  source 1..21: mol_type = other DNA
gacggcagccccaccaccgcc

SEQ ID NO: 17144 - DNA, 21 bp, synthetic construct
  misc_feature 1..21: note = Description of Artificial Sequence: Synthetic oligonucleotide
  source 1..21: mol_type = other DNA
ggcggcagcggcaaagaccaa

SEQ ID NO: 17145 - DNA, 21 bp, synthetic construct
  misc_feature 1..21: note = Description of Artificial Sequence: Synthetic oligonucleotide
  source 1..21: mol_type = other DNA
gccagcggccaaaaaggcgac

SEQ ID NO: 17146 - DNA, 21 bp, synthetic construct
  misc_feature 1..21: note = Description of Artificial Sequence: Synthetic oligonucleotide
  source 1..21: mol_type = other DNA
tctaatgcggcgggtgctagt

SEQ ID NO: 17147 - DNA, 21 bp, synthetic construct
  misc_feature 1..21: note = Description of Artificial Sequence: Synthetic oligonucleotide
  source 1..21: mol_type = other DNA
ggtgagattgcggctaagggt

SEQ ID NO: 17148 - DNA, 21 bp, synthetic construct
  misc_feature 1..21: note = Description of Artificial Sequence: Synthetic oligonucleotide
  source 1..21: mol_type = other DNA
accaacaccgaaaccaccaga

SEQ ID NO: 17149 - DNA, 21 bp, synthetic construct
  misc_feature 1..21: note = Description of Artificial Sequence: Synthetic oligonucleotide
  source 1..21: mol_type = other DNA
caaagcaccagcaccgtcggc

SEQ ID NO: 17150 - DNA, 21 bp, synthetic construct
  misc_feature 1..21: note = Description of Artificial Sequence: Synthetic oligonucleotide
  source 1..21: mol_type = other DNA
accaccgccggcaacggcagc

SEQ ID NO: 17151 - DNA, 21 bp, synthetic construct
  misc_feature 1..21: note = Description of Artificial Sequence: Synthetic oligonucleotide
  source 1..21: mol_type = other DNA
accagagacagcagcagccac

SEQ ID NO: 17152 - DNA, 21 bp, synthetic construct
  misc_feature 1..21: note = Description of Artificial Sequence: Synthetic oligonucleotide
  source 1..21: mol_type = other DNA
accggcggcgaagtccccaga

SEQ ID NO: 17153 - DNA, 21 bp, synthetic construct
  misc_feature 1..21: note = Description of Artificial Sequence: Synthetic oligonucleotide
  source 1..21: mol_type = other DNA
agcgccaccaacaaagccagc

SEQ ID NO: 17154 - DNA, 21 bp, synthetic construct
  misc_feature 1..21: note = Description of Artificial Sequence: Synthetic oligonucleotide
  source 1..21: mol_type = other DNA
ggtagttcggggactccgggg

SEQ ID NO: 17155 - DNA, 21 bp, synthetic construct
  misc_feature 1..21: note = Description of Artificial Sequence: Synthetic oligonucleotide
  source 1..21: mol_type = other DNA
acggctgggtcgcagaagaat

SEQ ID NO: 17156 - DNA, 21 bp, synthetic construct
  misc_feature 1..21: note = Description of Artificial Sequence: Synthetic oligonucleotide
  source 1..21: mol_type = other DNA
gatcctggtacttctaatcgt

SEQ ID NO: 17157 - DNA, 21 bp, synthetic construct
  misc_feature 1..21: note = Description of Artificial Sequence: Synthetic oligonucleotide
  source 1..21: mol_type = other DNA
cagggtgctcagtctcttggg

SEQ ID NO: 17158 - DNA, 21 bp, synthetic construct
  misc_feature 1..21: note = Description of Artificial Sequence: Synthetic oligonucleotide
  source 1..21: mol_type = other DNA
caaaacagaagccccagcgaa

SEQ ID NO: 17159 - DNA, 21 bp, synthetic construct
  misc_feature 1..21: note = Description of Artificial Sequence: Synthetic oligonucleotide
  source 1..21: mol_type = other DNA
gacatgagcccccccaaacaa

SEQ ID NO: 17160 - DNA, 21 bp, synthetic construct
  misc_feature 1..21: note = Description of Artificial Sequence: Synthetic oligonucleotide
  source 1..21: mol_type = other DNA
acgggttcgacgagttcgatg

SEQ ID NO: 17161 - DNA, 21 bp, synthetic construct
  misc_feature 1..21: note = Description of Artificial Sequence: Synthetic oligonucleotide
  source 1..21: mol_type = other DNA
ggggaggcgtctccggttagg

SEQ ID NO: 17162 - DNA, 21 bp, synthetic construct
  misc_feature 1..21: note = Description of Artificial Sequence: Synthetic oligonucleotide
  source 1..21: mol_type = other DNA
gacagcgtcgccaacaacaga

SEQ ID NO: 17163 - DNA, 21 bp, synthetic construct
  misc_feature 1..21: note = Description of Artificial Sequence: Synthetic oligonucleotide
  source 1..21: mol_type = other DNA
gtccccagcagcagcaacgtc

SEQ ID NO: 17164 - DNA, 21 bp, synthetic construct
  misc_feature 1..21: note = Description of Artificial Sequence: Synthetic oligonucleotide
  source 1..21: mol_type = other DNA
acgggtagtaagacggtggag

SEQ ID NO: 17165 - DNA, 21 bp, synthetic construct
  misc_feature 1..21: note = Description of Artificial Sequence: Synthetic oligonucleotide
  source 1..21: mol_type = other DNA
cagattgattcgaagaagggt

SEQ ID NO: 17166 - DNA, 21 bp, synthetic construct
  misc_feature 1..21: note = Description of Artificial Sequence: Synthetic oligonucleotide
  source 1..21: mol_type = other DNA
ctcaacggcgcccccggcagc

SEQ ID NO: 17167 - DNA, 21 bp, synthetic construct
  misc_feature 1..21: note = Description of Artificial Sequence: Synthetic oligonucleotide
  source 1..21: mol_type = other DNA
gggactagtcgggagtcgggg

SEQ ID NO: 17168 - DNA, 21 bp, synthetic construct
  misc_feature 1..21: note = Description of Artificial Sequence: Synthetic oligonucleotide
  source 1..21: mol_type = other DNA
gtcggcgccagccccgaaaga

SEQ ID NO: 17169 - DNA, 21 bp, synthetic construct
  misc_feature 1..21: note = Description of Artificial Sequence: Synthetic oligonucleotide
  source 1..21: mol_type = other DNA
gccaacggcgcccccaccacc

SEQ ID NO: 17170 - DNA, 21 bp, synthetic construct
  misc_feature 1..21: note = Description of Artificial Sequence: Synthetic oligonucleotide
  source 1..21: mol_type = other DNA
actcggaattctggtgctacg

SEQ ID NO: 17171 - DNA, 21 bp, synthetic construct
  misc_feature 1..21: note = Description of Artificial Sequence: Synthetic oligonucleotide
  source 1..21: mol_type = other DNA
agcaccagcaccaaaagcagc

SEQ ID NO: 17172 - DNA, 21 bp, synthetic construct
  misc_feature 1..21: note = Description of Artificial Sequence: Synthetic oligonucleotide
  source 1..21: mol_type = other DNA
ggcgcccacagcaccgaaaaa

SEQ ID NO: 17173 - DNA, 21 bp, synthetic construct
  misc_feature 1..21: note = Description of Artificial Sequence: Synthetic oligonucleotide
  source 1..21: mol_type = other DNA
aatggtgttagtgggaagtcg

SEQ ID NO: 17174 - DNA, 21 bp, synthetic construct
  misc_feature 1..21: note = Description of Artificial Sequence: Synthetic oligonucleotide
  source 1..21: mol_type = other DNA
gacagcaccaccaccggcaaa

SEQ ID NO: 17175 - DNA, 21 bp, synthetic construct
  misc_feature 1..21: note = Description of Artificial Sequence: Synthetic oligonucleotide
  source 1..21: mol_type = other DNA
tctaatggtgctaataagttg

SEQ ID NO: 17176 - DNA, 21 bp, synthetic construct
  misc_feature 1..21: note = Description of Artificial Sequence: Synthetic oligonucleotide
  source 1..21: mol_type = other DNA
gccagcgacaaagccagcaga

SEQ ID NO: 17177 - DNA, 21 bp, synthetic construct
  misc_feature 1..21: note = Description of Artificial Sequence: Synthetic oligonucleotide
  source 1..21: mol_type = other DNA
agcgtcagccaacccaccagc

SEQ ID NO: 17178 - DNA, 21 bp, synthetic construct
  misc_feature 1..21: note = Description of Artificial Sequence: Synthetic oligonucleotide
  source 1..21: mol_type = other DNA
gttggtggtaatggtcaggcg

SEQ ID NO: 17179 - DNA, 21 bp, synthetic construct
  misc_feature 1..21: note = Description of Artificial Sequence: Synthetic oligonucleotide
  source 1..21: mol_type = other DNA
aacagcgccaccgccaaagcc

SEQ ID NO: 17180 - DNA, 21 bp, synthetic construct
  misc_feature 1..21: note = Description of Artificial Sequence: Synthetic oligonucleotide
  source 1..21: mol_type = other DNA
gacctcagcagcaaaagcatc

SEQ ID NO: 17181 - DNA, 21 bp, synthetic construct
  misc_feature 1..21: note = Description of Artificial Sequence: Synthetic oligonucleotide
  source 1..21: mol_type = other DNA
gctagtgcgagtccgaatcag

SEQ ID NO: 17182 - DNA, 21 bp, synthetic construct
  misc_feature 1..21: note = Description of Artificial Sequence: Synthetic oligonucleotide
  source 1..21: mol_type = other DNA
gaaagcggcaccaccggcaga

SEQ ID NO: 17183 - DNA, 21 bp, synthetic construct
  misc_feature 1..21: note = Description of Artificial Sequence: Synthetic oligonucleotide
  source 1..21: mol_type = other DNA
acgagtacgtcggcgcctgtg

SEQ ID NO: 17184 - DNA, 21 bp, synthetic construct
  misc_feature 1..21: note = Description of Artificial Sequence: Synthetic oligonucleotide
  source 1..21: mol_type = other DNA
aacaacggcgccagcagcagc

SEQ ID NO: 17185 - DNA, 21 bp, synthetic construct
  misc_feature 1..21: note = Description of Artificial Sequence: Synthetic oligonucleotide
  source 1..21: mol_type = other DNA
ggcggcggccaacaacccagc

SEQ ID NO: 17186 - DNA, 21 bp, synthetic construct
  misc_feature 1..21: note = Description of Artificial Sequence: Synthetic oligonucleotide
  source 1..21: mol_type = other DNA
gggaaggataatggtgtgtct

SEQ ID NO: 17187 - DNA, 21 bp, synthetic construct
  misc_feature 1..21: note = Description of Artificial Sequence: Synthetic oligonucleotide
  source 1..21: mol_type = other DNA
gatcggcagactccgactctt

SEQ ID NO: 17188 - DNA, 21 bp, synthetic construct
  misc_feature 1..21: note = Description of Artificial Sequence: Synthetic oligonucleotide
  source 1..21: mol_type = other DNA
accagagaaaacaaaaccgaa

SEQ ID NO: 17189 - DNA, 21 bp, synthetic construct
  misc_feature 1..21: note = Description of Artificial Sequence: Synthetic oligonucleotide
  source 1..21: mol_type = other DNA
accgccggcagcaccgtccac

SEQ ID NO: 17190 - DNA, 21 bp, synthetic construct
  misc_feature 1..21: note = Description of Artificial Sequence: Synthetic oligonucleotide
  source 1..21: mol_type = other DNA
agcggcagcagcaccgtcgcc

SEQ ID NO: 17191 - DNA, 21 bp, synthetic construct
  misc_feature 1..21: note = Description of Artificial Sequence: Synthetic oligonucleotide
  source 1..21: mol_type = other DNA
agtgctagtcagacttcgcat

SEQ ID NO: 17192 - DNA, 21 bp, synthetic construct
  misc_feature 1..21: note = Description of Artificial Sequence: Synthetic oligonucleotide
  source 1..21: mol_type = other DNA
aacagcgaaagcagcaaaggc

SEQ ID NO: 17193 - DNA, 21 bp, synthetic construct
  misc_feature 1..21: note = Description of Artificial Sequence: Synthetic oligonucleotide
  source 1..21: mol_type = other DNA
ggcagaaccaacgccgaagcc

SEQ ID NO: 17194 - DNA, 21 bp, synthetic construct
  misc_feature 1..21: note = Description of Artificial Sequence: Synthetic oligonucleotide
  source 1..21: mol_type = other DNA
caacaaagcagcaacaacgtc

SEQ ID NO: 17195 - DNA, 21 bp, synthetic construct
  misc_feature 1..21: note = Description of Artificial Sequence: Synthetic oligonucleotide
  source 1..21: mol_type = other DNA
caagccagcggcagccccgcc

SEQ ID NO: 17196 - DNA, 21 bp, synthetic construct
  misc_feature 1..21: note = Description of Artificial Sequence: Synthetic oligonucleotide
  source 1..21: mol_type = other DNA
acttctggggggtcttctctg

SEQ ID NO: 17197 - DNA, 21 bp, synthetic construct
  misc_feature 1..21: note = Description of Artificial Sequence: Synthetic oligonucleotide
  source 1..21: mol_type = other DNA
aacaacagcacccaccccggc

SEQ ID NO: 17198 - DNA, 21 bp, synthetic construct
  misc_feature 1..21: note = Description of Artificial Sequence: Synthetic oligonucleotide
  source 1..21: mol_type = other DNA
aatgggaattcgcctgctatg

SEQ ID NO: 17199 - DNA, 21 bp, synthetic construct
  misc_feature 1..21: note = Description of Artificial Sequence: Synthetic oligonucleotide
  source 1..21: mol_type = other DNA
aatggtggtgttgcgtcgtct

SEQ ID NO: 17200 - DNA, 21 bp, synthetic construct
  misc_feature 1..21: note = Description of Artificial Sequence: Synthetic oligonucleotide
  source 1..21: mol_type = other DNA
accagcagcaccagcaccggc

SEQ ID NO: 17201 - DNA, 21 bp, synthetic construct
  misc_feature 1..21: note = Description of Artificial Sequence: Synthetic oligonucleotide
  source 1..21: mol_type = other DNA
agtcgtacgaaggagtcggtt

SEQ ID NO: 17202 - DNA, 21 bp, synthetic construct
  misc_feature 1..21: note = Description of Artificial Sequence: Synthetic oligonucleotide
  source 1..21: mol_type = other DNA
gatagtccggggacgctgaag

SEQ ID NO: 17203 - DNA, 21 bp, synthetic construct
  misc_feature 1..21: note = Description of Artificial Sequence: Synthetic oligonucleotide
  source 1..21: mol_type = other DNA
gccggcaccggccaagtccaa

SEQ ID NO: 17204 - DNA, 21 bp, synthetic construct
  misc_feature 1..21: note = Description of Artificial Sequence: Synthetic oligonucleotide
  source 1..21: mol_type = other DNA
gccggccacggcagccaagcc

SEQ ID NO: 17205 - DNA, 21 bp, synthetic construct
  misc_feature 1..21: note = Description of Artificial Sequence: Synthetic oligonucleotide
  source 1..21: mol_type = other DNA
ggcgtcgaaagcagccccaga

SEQ ID NO: 17206 - DNA, 21 bp, synthetic construct
  misc_feature 1..21: note = Description of Artificial Sequence: Synthetic oligonucleotide
  source 1..21: mol_type = other DNA
ggcgtcggcaccgtcaccggc

SEQ ID NO: 17207 - DNA, 21 bp, synthetic construct
  misc_feature 1..21: note = Description of Artificial Sequence: Synthetic oligonucleotide
  source 1..21: mol_type = other DNA
ggggctcataaggatgatggg

SEQ ID NO: 17208 - DNA, 21 bp, synthetic construct
  misc_feature 1..21: note = Description of Artificial Sequence: Synthetic oligonucleotide
  source 1..21: mol_type = other DNA
ggcagcggccaaagccacgcc

SEQ ID NO: 17209 - DNA, 21 bp, synthetic construct
  misc_feature 1..21: note = Description of Artificial Sequence: Synthetic oligonucleotide
  source 1..21: mol_type = other DNA
aagtctgatgggcagcaggcg

SEQ ID NO: 17210 - DNA, 21 bp, synthetic construct
  misc_feature 1..21: note = Description of Artificial Sequence: Synthetic oligonucleotide
  source 1..21: mol_type = other DNA
gaagccaccggcagcagactc

SEQ ID NO: 17211 - DNA, 21 bp, synthetic construct
  misc_feature 1..21: note = Description of Artificial Sequence: Synthetic oligonucleotide
  source 1..21: mol_type = other DNA
gccagcgacagcaaacacggc

SEQ ID NO: 17212 - DNA, 21 bp, synthetic construct
  misc_feature 1..21: note = Description of Artificial Sequence: Synthetic oligonucleotide
  source 1..21: mol_type = other DNA
agcaacagcagcagcaccagc

SEQ ID NO: 17213 - DNA, 21 bp, synthetic construct
  misc_feature 1..21: note = Description of Artificial Sequence: Synthetic oligonucleotide
  source 1..21: mol_type = other DNA
gccaaaaacaccaccagcagc

SEQ ID NO: 17214 - DNA, 21 bp, synthetic construct
  misc_feature 1..21: note = Description of Artificial Sequence: Synthetic oligonucleotide
  source 1..21: mol_type = other DNA
atgaatagtccgtcgagtctg

SEQ ID NO: 17215 - DNA, 21 bp, synthetic construct
  misc_feature 1..21: note = Description of Artificial Sequence: Synthetic oligonucleotide
  source 1..21: mol_type = other DNA
accgtcgccaacacccccagc

SEQ ID NO: 17216 - DNA, 21 bp, synthetic construct
  misc_feature 1..21: note = Description of Artificial Sequence: Synthetic oligonucleotide
  source 1..21: mol_type = other DNA
actggggcgcagaataaggat

SEQ ID NO: 17217 - DNA, 21 bp, synthetic construct
  misc_feature 1..21: note = Description of Artificial Sequence: Synthetic oligonucleotide
  source 1..21: mol_type = other DNA
ggcccccaacccaaagacggc

SEQ ID NO: 17218 - DNA, 21 bp, synthetic construct
  misc_feature 1..21: note = Description of Artificial Sequence: Synthetic oligonucleotide
  source 1..21: mol_type = other DNA
ggcgaaaccagcggcaaaaac

SEQ ID NO: 17219 - DNA, 21 bp, synthetic construct
  misc_feature 1..21: note = Description of Artificial Sequence: Synthetic oligonucleotide
  source 1..21: mol_type = other DNA
atggccgaaagcggcaaaagc

SEQ ID NO: 17220 - DNA, 21 bp, synthetic construct
  misc_feature 1..21: note = Description of Artificial Sequence: Synthetic oligonucleotide
  source 1..21: mol_type = other DNA
accggcgccagcagcagcgtc

SEQ ID NO: 17221 - DNA, 21 bp, synthetic construct
  misc_feature 1..21: note = Description of Artificial Sequence: Synthetic oligonucleotide
  source 1..21: mol_type = other DNA
cgtactaatactacttcggtt

SEQ ID NO: 17222 - DNA, 21 bp, synthetic construct
  misc_feature 1..21: note = Description of Artificial Sequence: Synthetic oligonucleotide
  source 1..21: mol_type = other DNA
gccggcagcgaaaccggcaaa

SEQ ID NO: 17223 - DNA, 21 bp, synthetic construct
  misc_feature 1..21: note = Description of Artificial Sequence: Synthetic oligonucleotide
  source 1..21: mol_type = other DNA
ggcaacagagaagtcaacaaa

SEQ ID NO: 17224 - DNA, 21 bp, synthetic construct
  misc_feature 1..21: note = Description of Artificial Sequence: Synthetic oligonucleotide
  source 1..21: mol_type = other DNA
agcggcagcggcagcagcggc

SEQ ID NO: 17225 - DNA, 21 bp, synthetic construct
  misc_feature 1..21: note = Description of Artificial Sequence: Synthetic oligonucleotide
  source 1..21: mol_type = other DNA
cgggagggtcaggttgcgacg

SEQ ID NO: 17226 - DNA, 21 bp, synthetic construct
  misc_feature 1..21: note = Description of Artificial Sequence: Synthetic oligonucleotide
  source 1..21: mol_type = other DNA
ggcatgagcaacagccccagc

SEQ ID NO: 17227 - DNA, 21 bp, synthetic construct
  misc_feature 1..21: note = Description of Artificial Sequence: Synthetic oligonucleotide
  source 1..21: mol_type = other DNA
caggagcctaagcctctgaat

SEQ ID NO: 17228 - DNA, 21 bp, synthetic construct
  misc_feature 1..21: note = Description of Artificial Sequence: Synthetic oligonucleotide
  source 1..21: mol_type = other DNA
ggggctgatgctagtaagttg

SEQ ID NO: 17229 - DNA, 21 bp, synthetic construct
  misc_feature 1..21: note = Description of Artificial Sequence: Synthetic oligonucleotide
  source 1..21: mol_type = other DNA
caaagcagcgacagaagcgtc

SEQ ID NO: 17230 - DNA, 21 bp, synthetic construct
  misc_feature 1..21: note = Description of Artificial Sequence: Synthetic oligonucleotide
  source 1..21: mol_type = other DNA
gggtcttcgccgggggttcat

SEQ ID NO: 17231 - DNA, 21 bp, synthetic construct
  misc_feature 1..21: note = Description of Artificial Sequence: Synthetic oligonucleotide
  source 1..21: mol_type = other DNA
agtggtacgccgagttctttg

SEQ ID NO: 17232 - DNA, 21 bp, synthetic construct
  misc_feature 1..21: note = Description of Artificial Sequence: Synthetic oligonucleotide
  source 1..21: mol_type = other DNA
agcagcagcaaagaagtcgcc

SEQ ID NO: 17233 - DNA, 21 bp, synthetic construct
  misc_feature 1..21: note = Description of Artificial Sequence: Synthetic oligonucleotide
  source 1..21: mol_type = other DNA
gggcgtggtagtccgaaggat

SEQ ID NO: 17234 - DNA, 21 bp, synthetic construct
  misc_feature 1..21: note = Description of Artificial Sequence: Synthetic oligonucleotide
  source 1..21: mol_type = other DNA
agcaacagcagcacccccacc

SEQ ID NO: 17235 - DNA, 21 bp, synthetic construct
  misc_feature 1..21: note = Description of Artificial Sequence: Synthetic oligonucleotide
  source 1..21: mol_type = other DNA
ctcagcggcacccccagcacc

SEQ ID NO: 17236 - DNA, 21 bp, synthetic construct
  misc_feature 1..21: note = Description of Artificial Sequence: Synthetic oligonucleotide
  source 1..21: mol_type = other DNA
accggcaacagcaaccaacaa

SEQ ID NO: 17237 - DNA, 21 bp, synthetic construct
  misc_feature 1..21: note = Description of Artificial Sequence: Synthetic oligonucleotide
  source 1..21: mol_type = other DNA
gtcagcgacggcaaaaacctc

SEQ ID NO: 17238 - DNA, 21 bp, synthetic construct
  misc_feature 1..21: note = Description of Artificial Sequence: Synthetic oligonucleotide
  source 1..21: mol_type = other DNA
agccaacaaagcaccccccac

SEQ ID NO: 17239 - DNA, 21 bp, synthetic construct
  misc_feature 1..21: note = Description of Artificial Sequence: Synthetic oligonucleotide
  source 1..21: mol_type = other DNA
ggcagcggccccagcgccacc

SEQ ID NO: 17240 - DNA, 21 bp, synthetic construct
  misc_feature 1..21: note = Description of Artificial Sequence: Synthetic oligonucleotide
  source 1..21: mol_type = other DNA
ggtactggtcctactcctcct

SEQ ID NO: 17241 - DNA, 21 bp, synthetic construct
  misc_feature 1..21: note = Description of Artificial Sequence: Synthetic oligonucleotide
  source 1..21: mol_type = other DNA
cagactggtaatggtgggaat

SEQ ID NO: 17242 - DNA, 21 bp, synthetic construct
  misc_feature 1..21: note = Description of Artificial Sequence: Synthetic oligonucleotide
  source 1..21: mol_type = other DNA
aacgccggcggcagcaacaga

SEQ ID NO: 17243 - DNA, 21 bp, synthetic construct
  misc_feature 1..21: note = Description of Artificial Sequence: Synthetic oligonucleotide
  source 1..21: mol_type = other DNA
gacaccagcaaagacagcaaa

SEQ ID NO: 17244 - DNA, 21 bp, synthetic construct
  misc_feature 1..21: note = Description of Artificial Sequence: Synthetic oligonucleotide
  source 1..21: mol_type = other DNA
tcggggtctccgaatgggttg

SEQ ID NO: 17245 - DNA, 21 bp, synthetic construct
  misc_feature 1..21: note = Description of Artificial Sequence: Synthetic oligonucleotide
  source 1..21: mol_type = other DNA
ggcaccggcgccaaccacgcc

SEQ ID NO: 17246 - DNA, 21 bp, synthetic construct
  misc_feature 1..21: note = Description of Artificial Sequence: Synthetic oligonucleotide
  source 1..21: mol_type = other DNA
ctcggcaccaccaaaagcgcc

SEQ ID NO: 17247 - DNA, 21 bp, synthetic construct
  misc_feature 1..21: note = Description of Artificial Sequence: Synthetic oligonucleotide
  source 1..21: mol_type = other DNA
agcacccccagcgccaccaaa

SEQ ID NO: 17248 - DNA, 21 bp, synthetic construct
  misc_feature 1..21: note = Description of Artificial Sequence: Synthetic oligonucleotide
  source 1..21: mol_type = other DNA
gaactcagaagcagcaacgtc

SEQ ID NO: 17249 - DNA, 21 bp, synthetic construct
  misc_feature 1..21: note = Description of Artificial Sequence: Synthetic oligonucleotide
  source 1..21: mol_type = other DNA
aagggtagtggtagtaatggt

SEQ ID NO: 17250 - DNA, 21 bp, synthetic construct
  misc_feature 1..21: note = Description of Artificial Sequence: Synthetic oligonucleotide
  source 1..21: mol_type = other DNA
actaattctagtaaggctctg

SEQ ID NO: 17251 - DNA, 21 bp, synthetic construct
  misc_feature 1..21: note = Description of Artificial Sequence: Synthetic oligonucleotide
  source 1..21: mol_type = other DNA
cagaagggggcgggtgcgact

SEQ ID NO: 17252 - DNA, 21 bp, synthetic construct
  misc_feature 1..21: note = Description of Artificial Sequence: Synthetic oligonucleotide
  source 1..21: mol_type = other DNA
tcgggtaatgattctcgtacg

SEQ ID NO: 17253 - DNA, 21 bp, synthetic construct
  misc_feature 1..21: note = Description of Artificial Sequence: Synthetic oligonucleotide
  source 1..21: mol_type = other DNA
actaggaattcttcgacgacg

SEQ ID NO: 17254 - DNA, 21 bp, synthetic construct
  misc_feature 1..21: note = Description of Artificial Sequence: Synthetic oligonucleotide
  source 1..21: mol_type = other DNA
ggtagttctacttcgtcgacg

SEQ ID NO: 17255 - DNA, 21 bp, synthetic construct
  misc_feature 1..21: note = Description of Artificial Sequence: Synthetic oligonucleotide
  source 1..21: mol_type = other DNA
gacagcaacgccaaaagcggc

SEQ ID NO: 17256 - DNA, 21 bp, synthetic construct
  misc_feature 1..21: note = Description of Artificial Sequence: Synthetic oligonucleotide
  source 1..21: mol_type = other DNA
gtgaatactggtggtagtaat

SEQ ID NO: 17257 - DNA, 21 bp, synthetic construct
  misc_feature 1..21: note = Description of Artificial Sequence: Synthetic oligonucleotide
  source 1..21: mol_type = other DNA
ctcaaccaaggcagcgtccaa

SEQ ID NO: 17258 - DNA, 21 bp, synthetic construct
  misc_feature 1..21: note = Description of Artificial Sequence: Synthetic oligonucleotide
  source 1..21: mol_type = other DNA
gaaaacgtcaacaaaaacaac

SEQ ID NO: 17259 - DNA, 21 bp, synthetic construct
  misc_feature 1..21: note = Description of Artificial Sequence: Synthetic oligonucleotide
  source 1..21: mol_type = other DNA
aatagtaatcagactcagggt

SEQ ID NO: 17260 - DNA, 21 bp, synthetic construct
  misc_feature 1..21: note = Description of Artificial Sequence: Synthetic oligonucleotide
  source 1..21: mol_type = other DNA
aatgcgagtcaggggcatgcg

SEQ ID NO: 17261 - DNA, 21 bp, synthetic construct
  misc_feature 1..21: note = Description of Artificial Sequence: Synthetic oligonucleotide
  source 1..21: mol_type = other DNA
cagacttctgttagtagtgct

SEQ ID NO: 17262 - DNA, 21 bp, synthetic construct
  misc_feature 1..21: note = Description of Artificial Sequence: Synthetic oligonucleotide
  source 1..21: mol_type = other DNA
gggcagggggcgacgacgtct

SEQ ID NO: 17263 - DNA, 21 bp, synthetic construct
  misc_feature 1..21: note = Description of Artificial Sequence: Synthetic oligonucleotide
  source 1..21: mol_type = other DNA
acccaccaaagcagcaccagc

SEQ ID NO: 17264 - DNA, 21 bp, synthetic construct
  misc_feature 1..21: note = Description of Artificial Sequence: Synthetic oligonucleotide
  source 1..21: mol_type = other DNA
acggggaatggttcggcttct

SEQ ID NO: 17265 - DNA, 21 bp, synthetic construct
  misc_feature 1..21: note = Description of Artificial Sequence: Synthetic oligonucleotide
  source 1..21: mol_type = other DNA
agcggccccgacagcaaaagc

SEQ ID NO: 17266 - DNA, 21 bp, synthetic construct
  misc_feature 1..21: note = Description of Artificial Sequence: Synthetic oligonucleotide
  source 1..21: mol_type = other DNA
accggcagcagcagcgtcgtc

SEQ ID NO: 17267 - DNA, 21 bp, synthetic construct
  misc_feature 1..21: note = Description of Artificial Sequence: Synthetic oligonucleotide
  source 1..21: mol_type = other DNA
agcaccagcagcaaagtcagc

SEQ ID NO: 17268 - DNA, 21 bp, synthetic construct
  misc_feature 1..21: note = Description of Artificial Sequence: Synthetic oligonucleotide
  source 1..21: mol_type = other DNA
aacgcccaaaccgccggcggc

SEQ ID NO: 17269 - DNA, 21 bp, synthetic construct
  misc_feature 1..21: note = Description of Artificial Sequence: Synthetic oligonucleotide
  source 1..21: mol_type = other DNA
aacggcagcggccaacaacaa

SEQ ID NO: 17270 - DNA, 21 bp, synthetic construct
  misc_feature 1..21: note = Description of Artificial Sequence: Synthetic oligonucleotide
  source 1..21: mol_type = other DNA
accagagtccccagcgccggc

SEQ ID NO: 17271 - DNA, 21 bp, synthetic construct
  misc_feature 1..21: note = Description of Artificial Sequence: Synthetic oligonucleotide
  source 1..21: mol_type = other DNA
agcaccaccaccggcggcggc

SEQ ID NO: 17272 - DNA, 21 bp, synthetic construct
  misc_feature 1..21: note = Description of Artificial Sequence: Synthetic oligonucleotide
  source 1..21: mol_type = other DNA
agcggcgaacaaaaacaagcc

SEQ ID NO: 17273 - DNA, 21 bp, synthetic construct
  misc_feature 1..21: note = Description of Artificial Sequence: Synthetic oligonucleotide
  source 1..21: mol_type = other DNA
atgaaaggcaacacccccggc

SEQ ID NO: 17274 - DNA, 21 bp, synthetic construct
  misc_feature 1..21: note = Description of Artificial Sequence: Synthetic oligonucleotide
  source 1..21: mol_type = other DNA
cacggcagcggccaacaccaa

SEQ ID NO: 17275 - DNA, 21 bp, synthetic construct
  misc_feature 1..21: note = Description of Artificial Sequence: Synthetic oligonucleotide
  source 1..21: mol_type = other DNA
gacagaagcgaccaccccaaa

SEQ ID NO: 17276 - DNA, 21 bp, synthetic construct
  misc_feature 1..21: note = Description of Artificial Sequence: Synthetic oligonucleotide
  source 1..21: mol_type = other DNA
gacagagccggccaaaccttc

SEQ ID NO: 17277 - DNA, 21 bp, synthetic construct
  misc_feature 1..21: note = Description of Artificial Sequence: Synthetic oligonucleotide
  source 1..21: mol_type = other DNA
gacagcagaaacagcagcgcc

SEQ ID NO: 17278 - DNA, 21 bp, synthetic construct
  misc_feature 1..21: note = Description of Artificial Sequence: Synthetic oligonucleotide
  source 1..21: mol_type = other DNA
gagtcggggtctcatagtatg

SEQ ID NO: 17279 - DNA, 21 bp, synthetic construct
  misc_feature 1..21: note = Description of Artificial Sequence: Synthetic oligonucleotide
  source 1..21: mol_type = other DNA
gccagcaacagcgccgtcaaa

SEQ ID NO: 17280 - DNA, 21 bp, synthetic construct
  misc_feature 1..21: note = Description of Artificial Sequence: Synthetic oligonucleotide
  source 1..21: mol_type = other DNA
gccagcgaaagaagcggcacc

SEQ ID NO: 17281 - DNA, 21 bp, synthetic construct
  misc_feature 1..21: note = Description of Artificial Sequence: Synthetic oligonucleotide
  source 1..21: mol_type = other DNA
gctaatggggctgggagtacg

SEQ ID NO: 17282 - DNA, 21 bp, synthetic construct
  misc_feature 1..21: note = Description of Artificial Sequence: Synthetic oligonucleotide
  source 1..21: mol_type = other DNA
gctaatgttgagaagcctcag

SEQ ID NO: 17283 - DNA, 21 bp, synthetic construct
  misc_feature 1..21: note = Description of Artificial Sequence: Synthetic oligonucleotide
  source 1..21: mol_type = other DNA
ggtaaggaggggggtcatggg

SEQ ID NO: 17284 - DNA, 21 bp, synthetic construct
  misc_feature 1..21: note = Description of Artificial Sequence: Synthetic oligonucleotide
  source 1..21: mol_type = other DNA
ggtaggacgggtcagccgggt

SEQ ID NO: 17285 - DNA, 21 bp, synthetic construct
  misc_feature 1..21: note = Description of Artificial Sequence: Synthetic oligonucleotide
  source 1..21: mol_type = other DNA
cacggcacccaacaaaccgcc

SEQ ID NO: 17286 - DNA, 21 bp, synthetic construct
  misc_feature 1..21: note = Description of Artificial Sequence: Synthetic oligonucleotide
  source 1..21: mol_type = other DNA
accaccagcagcagcggcagc

SEQ ID NO: 17287 - DNA, 21 bp, synthetic construct
  misc_feature 1..21: note = Description of Artificial Sequence: Synthetic oligonucleotide
  source 1..21: mol_type = other DNA
ctcggcgtcaaagacaccaac

SEQ ID NO: 17288 - DNA, 21 bp, synthetic construct
  misc_feature 1..21: note = Description of Artificial Sequence: Synthetic oligonucleotide
  source 1..21: mol_type = other DNA
cttggtgtgccggataatagg

SEQ ID NO: 17289 - DNA, 21 bp, synthetic construct
  misc_feature 1..21: note = Description of Artificial Sequence: Synthetic oligonucleotide
  source 1..21: mol_type = other DNA
accaaccaaaccagcagccac

SEQ ID NO: 17290 - DNA, 21 bp, synthetic construct
  misc_feature 1..21: note = Description of Artificial Sequence: Synthetic oligonucleotide
  source 1..21: mol_type = other DNA
ttggcttctgataaggctgct

SEQ ID NO: 17291 - DNA, 21 bp, synthetic construct
  misc_feature 1..21: note = Description of Artificial Sequence: Synthetic oligonucleotide
  source 1..21: mol_type = other DNA
gatggtacgaagacgactggt

SEQ ID NO: 17292 - DNA, 21 bp, synthetic construct
  misc_feature 1..21: note = Description of Artificial Sequence: Synthetic oligonucleotide
  source 1..21: mol_type = other DNA
ggtcctactgggagtgggggg

SEQ ID NO: 17293 - DNA, 21 bp, synthetic construct
  misc_feature 1..21: note = Description of Artificial Sequence: Synthetic oligonucleotide
  source 1..21: mol_type = other DNA
ggtgataatgcgcagttgaag

SEQ ID NO: 17294 - DNA, 21 bp, synthetic construct
  misc_feature 1..21: note = Description of Artificial Sequence: Synthetic oligonucleotide
  source 1..21: mol_type = other DNA
agcagaagcgccaccagcacc

SEQ ID NO: 17295 - DNA, 21 bp, synthetic construct
  misc_feature 1..21: note = Description of Artificial Sequence: Synthetic oligonucleotide
  source 1..21: mol_type = other DNA
caggctactacgagtacttcg

SEQ ID NO: 17296 - DNA, 21 bp, synthetic construct
  misc_feature 1..21: note = Description of Artificial Sequence: Synthetic oligonucleotide
  source 1..21: mol_type = other DNA
agcacccaagccaccggcaaa

SEQ ID NO: 17297 - DNA, 21 bp, synthetic construct
  misc_feature 1..21: note = Description of Artificial Sequence: Synthetic oligonucleotide
  source 1..21: mol_type = other DNA
aacagcggcaccaaaggcggc

SEQ ID NO: 17298 - DNA, 21 bp, synthetic construct
  misc_feature 1..21: note = Description of Artificial Sequence: Synthetic oligonucleotide
  source 1..21: mol_type = other DNA
aacgccatcgaaaaaaccaaa

SEQ ID NO: 17299 - DNA, 21 bp, synthetic construct
  misc_feature 1..21: note = Description of Artificial Sequence: Synthetic oligonucleotide
  source 1..21: mol_type = other DNA
gatgggaagaatagtcttgcg

SEQ ID NO: 17300 - DNA, 21 bp, synthetic construct
  misc_feature 1..21: note = Description of Artificial Sequence: Synthetic oligonucleotide
  source 1..21: mol_type = other DNA
tctacgacgaagcctaatgat

SEQ ID NO: 17301 - DNA, 21 bp, synthetic construct
  misc_feature 1..21: note = Description of Artificial Sequence: Synthetic oligonucleotide
  source 1..21: mol_type = other DNA
ggcgaaaaacaaggcaccacc

SEQ ID NO: 17302 - DNA, 21 bp, synthetic construct
  misc_feature 1..21: note = Description of Artificial Sequence: Synthetic oligonucleotide
  source 1..21: mol_type = other DNA
ggggttgctaatccttcgtcg

SEQ ID NO: 17303 - DNA, 21 bp, synthetic construct
  misc_feature 1..21: note = Description of Artificial Sequence: Synthetic oligonucleotide
  source 1..21: mol_type = other DNA
ggtactgaggctcatcggacg

SEQ ID NO: 17304 - DNA, 21 bp, synthetic construct
  misc_feature 1..21: note = Description of Artificial Sequence: Synthetic oligonucleotide
  source 1..21: mol_type = other DNA
accgccgccagcacccccagc

SEQ ID NO: 17305 - DNA, 21 bp, synthetic construct
  misc_feature 1..21: note = Description of Artificial Sequence: Synthetic oligonucleotide
  source 1..21: mol_type = other DNA
cagaatggtgcgtctccgaat

SEQ ID NO: 17306 - DNA, 21 bp, synthetic construct
  misc_feature 1..21: note = Description of Artificial Sequence: Synthetic oligonucleotide
  source 1..21: mol_type = other DNA
gtcagcgccgccagcgtcagc

SEQ ID NO: 17307 - DNA, 21 bp, synthetic construct
  misc_feature 1..21: note = Description of Artificial Sequence: Synthetic oligonucleotide
  source 1..21: mol_type = other DNA
ggctacggcagcaaaggcgaa

SEQ ID NO: 17308 - DNA, 21 bp, synthetic construct
  misc_feature 1..21: note = Description of Artificial Sequence: Synthetic oligonucleotide
  source 1..21: mol_type = other DNA
tctgtgtcgagtcctagtgct

SEQ ID NO: 17309 - DNA, 21 bp, synthetic construct
  misc_feature 1..21: note = Description of Artificial Sequence: Synthetic oligonucleotide
  source 1..21: mol_type = other DNA
caaggcaacggccacatccaa

SEQ ID NO: 17310 - DNA, 21 bp, synthetic construct
  misc_feature 1..21: note = Description of Artificial Sequence: Synthetic oligonucleotide
  source 1..21: mol_type = other DNA
caaagcgcccccgaaaccaaa

SEQ ID NO: 17311 - DNA, 21 bp, synthetic construct
  misc_feature 1..21: note = Description of Artificial Sequence: Synthetic oligonucleotide
  source 1..21: mol_type = other DNA
gctaatacgtctcatagtagt

SEQ ID NO: 17312 - DNA, 21 bp, synthetic construct
  misc_feature 1..21: note = Description of Artificial Sequence: Synthetic oligonucleotide
  source 1..21: mol_type = other DNA
ggcggcaaagccagcagcgcc

SEQ ID NO: 17313 - DNA, 21 bp, synthetic construct
  misc_feature 1..21: note = Description of Artificial Sequence: Synthetic oligonucleotide
  source 1..21: mol_type = other DNA
agcagaaacgaaggccccaaa

SEQ ID NO: 17314 - DNA, 21 bp, synthetic construct
  misc_feature 1..21: note = Description of Artificial Sequence: Synthetic oligonucleotide
  source 1..21: mol_type = other DNA
tcttctagtcagactcatact

SEQ ID NO: 17315 - DNA, 21 bp, synthetic construct
  misc_feature 1..21: note = Description of Artificial Sequence: Synthetic oligonucleotide
  source 1..21: mol_type = other DNA
accgtcggcaaagaccccatg

SEQ ID NO: 17316 - DNA, 21 bp, synthetic construct
  misc_feature 1..21: note = Description of Artificial Sequence: Synthetic oligonucleotide
  source 1..21: mol_type = other DNA
tcgaggaatactcagtctgag

SEQ ID NO: 17317 - DNA, 21 bp, synthetic construct
  misc_feature 1..21: note = Description of Artificial Sequence: Synthetic oligonucleotide
  source 1..21: mol_type = other DNA
agcaaaacccaaacccccgcc

SEQ ID NO: 17318 - DNA, 21 bp, synthetic construct
  misc_feature 1..21: note = Description of Artificial Sequence: Synthetic oligonucleotide
  source 1..21: mol_type = other DNA
agcaaaggccaaagcaccagc

SEQ ID NO: 17319 - DNA, 21 bp, synthetic construct
  misc_feature 1..21: note = Description of Artificial Sequence: Synthetic oligonucleotide
  source 1..21: mol_type = other DNA
cagggtgagaataatgttaag

SEQ ID NO: 17320 - DNA, 21 bp, synthetic construct
  misc_feature 1..21: note = Description of Artificial Sequence: Synthetic oligonucleotide
  source 1..21: mol_type = other DNA
accagcggcagcaccgtcgcc

SEQ ID NO: 17321 - DNA, 21 bp, synthetic construct
  misc_feature 1..21: note = Description of Artificial Sequence: Synthetic oligonucleotide
  source 1..21: mol_type = other DNA
tcttctgctgcgggtcagggt

SEQ ID NO: 17322 - DNA, 21 bp, synthetic construct
  misc_feature 1..21: note = Description of Artificial Sequence: Synthetic oligonucleotide
  source 1..21: mol_type = other DNA
gtcgccggcggcaacagcgtc

SEQ ID NO: 17323 - DNA, 21 bp, synthetic construct
  misc_feature 1..21: note = Description of Artificial Sequence: Synthetic oligonucleotide
  source 1..21: mol_type = other DNA
acggataatagtggtcctaag

SEQ ID NO: 17324 - DNA, 21 bp, synthetic construct
  misc_feature 1..21: note = Description of Artificial Sequence: Synthetic oligonucleotide
  source 1..21: mol_type = other DNA
gttggtggtagttctaatgcg

SEQ ID NO: 17325 - DNA, 21 bp, synthetic construct
  misc_feature 1..21: note = Description of Artificial Sequence: Synthetic oligonucleotide
  source 1..21: mol_type = other DNA
ggcagccaagccagacccctc

SEQ ID NO: 17326 - DNA, 21 bp, synthetic construct
  misc_feature 1..21: note = Description of Artificial Sequence: Synthetic oligonucleotide
  source 1..21: mol_type = other DNA
gtttctgggggggcttcgcct

SEQ ID NO: 17327 - DNA, 21 bp, synthetic construct
  misc_feature 1..21: note = Description of Artificial Sequence: Synthetic oligonucleotide
  source 1..21: mol_type = other DNA
caggatgggaagcctagtgct

SEQ ID NO: 17328 - DNA, 21 bp, synthetic construct
  misc_feature 1..21: note = Description of Artificial Sequence: Synthetic oligonucleotide
  source 1..21: mol_type = other DNA
agcggcaccgacacccacaga

SEQ ID NO: 17329 - DNA, 21 bp, synthetic construct
  misc_feature 1..21: note = Description of Artificial Sequence: Synthetic oligonucleotide
  source 1..21: mol_type = other DNA
gccatcgaaagcaaacccagc

SEQ ID NO: 17330 - DNA, 21 bp, synthetic construct
  misc_feature 1..21: note = Description of Artificial Sequence: Synthetic oligonucleotide
  source 1..21: mol_type = other DNA
agcagcgccaccgcccaaagc

SEQ ID NO: 17331 - DNA, 21 bp, synthetic construct
  misc_feature 1..21: note = Description of Artificial Sequence: Synthetic oligonucleotide
  source 1..21: mol_type = other DNA
gcgggtactagtaatagggtt

SEQ ID NO: 17332 - DNA, 21 bp, synthetic construct
  misc_feature 1..21: note = Description of Artificial Sequence: Synthetic oligonucleotide
  source 1..21: mol_type = other DNA
ggggtgaatggtgcttcgagg

SEQ ID NO: 17333 - DNA, 21 bp, synthetic construct
  misc_feature 1..21: note = Description of Artificial Sequence: Synthetic oligonucleotide
  source 1..21: mol_type = other DNA
cagcagcctccgcctggtaag

SEQ ID NO: 17334 - DNA, 21 bp, synthetic construct
  misc_feature 1..21: note = Description of Artificial Sequence: Synthetic oligonucleotide
  source 1..21: mol_type = other DNA
ggtactgcgagtgagaatcgg

SEQ ID NO: 17335 - DNA, 21 bp, synthetic construct
  misc_feature 1..21: note = Description of Artificial Sequence: Synthetic oligonucleotide
  source 1..21: mol_type = other DNA
aaaagcggcaacagcaacgtc

SEQ ID NO: 17336 - DNA, 21 bp, synthetic construct
  misc_feature 1..21: note = Description of Artificial Sequence: Synthetic oligonucleotide
  source 1..21: mol_type = other DNA
gccggcagccccagcaacggc

SEQ ID NO: 17337 - DNA, 21 bp, synthetic construct
  misc_feature 1..21: note = Description of Artificial Sequence: Synthetic oligonucleotide
  source 1..21: mol_type = other DNA
ggcctcagcaaagaaagaccc

SEQ ID NO: 17338 - DNA, 21 bp, synthetic construct
  misc_feature 1..21: note = Description of Artificial Sequence: Synthetic oligonucleotide
  source 1..21: mol_type = other DNA
ggtgcgcatacggggtctcag

SEQ ID NO: 17339 - DNA, 21 bp, synthetic construct
  misc_feature 1..21: note = Description of Artificial Sequence: Synthetic oligonucleotide
  source 1..21: mol_type = other DNA
gttggtgttagtaaggagtct

SEQ ID NO: 17340 - DNA, 21 bp, synthetic construct
  misc_feature 1..21: note = Description of Artificial Sequence: Synthetic oligonucleotide
  source 1..21: mol_type = other DNA
gattctcagaaggctaatgct

SEQ ID NO: 17341 - DNA, 21 bp, synthetic construct
  misc_feature 1..21: note = Description of Artificial Sequence: Synthetic oligonucleotide
  source 1..21: mol_type = other DNA
gtgcctcagaatagtactaag

SEQ ID NO: 17342 - DNA, 21 bp, synthetic construct
  misc_feature 1..21: note = Description of Artificial Sequence: Synthetic oligonucleotide
  source 1..21: mol_type = other DNA
actgatagtactcatacgtcg

SEQ ID NO: 17343 - DNA, 21 bp, synthetic construct
  misc_feature 1..21: note = Description of Artificial Sequence: Synthetic oligonucleotide
  source 1..21: mol_type = other DNA
agcaccgaaaaaagcctcggc

SEQ ID NO: 17344 - DNA, 21 bp, synthetic construct
  misc_feature 1..21: note = Description of Artificial Sequence: Synthetic oligonucleotide
  source 1..21: mol_type = other DNA
cacgccggcagcaacagcagc

SEQ ID NO: 17345 - DNA, 21 bp, synthetic construct
  misc_feature 1..21: note = Description of Artificial Sequence: Synthetic oligonucleotide
  source 1..21: mol_type = other DNA
gagaggactactccgagtaat

SEQ ID NO: 17346 - DNA, 21 bp, synthetic construct
  misc_feature 1..21: note = Description of Artificial Sequence: Synthetic oligonucleotide
  source 1..21: mol_type = other DNA
ggcaacggcagcagcagcggc

SEQ ID NO: 17347 - DNA, 21 bp, synthetic construct
  misc_feature 1..21: note = Description of Artificial Sequence: Synthetic oligonucleotide
  source 1..21: mol_type = other DNA
tctgggcagaatagttcggtg

SEQ ID NO: 17348 - DNA, 21 bp, synthetic construct
  misc_feature 1..21: note = Description of Artificial Sequence: Synthetic oligonucleotide
  source 1..21: mol_type = other DNA
gaaaaccccagcggcaaaggc

SEQ ID NO: 17349 - DNA, 21 bp, synthetic construct
  misc_feature 1..21: note = Description of Artificial Sequence: Synthetic oligonucleotide
  source 1..21: mol_type = other DNA
aacggttctggacagaatgga

SEQ ID NO: 17350 - DNA, 21 bp, synthetic construct
  misc_feature 1..21: note = Description of Artificial Sequence: Synthetic oligonucleotide
  source 1..21: mol_type = other DNA
ggtagtaattcgactccgtct

SEQ ID NO: 17351 - DNA, 21 bp, synthetic construct
  misc_feature 1..21: note = Description of Artificial Sequence: Synthetic oligonucleotide
  source 1..21: mol_type = other DNA
gacggcaaaggcgaaaaaagc

SEQ ID NO: 17352 - DNA, 21 bp, synthetic construct
  misc_feature 1..21: note = Description of Artificial Sequence: Synthetic oligonucleotide
  source 1..21: mol_type = other DNA
ggcgccgaccccaaaaacggc

SEQ ID NO: 17353 - DNA, 21 bp, synthetic construct
  misc_feature 1..21: note = Description of Artificial Sequence: Synthetic oligonucleotide
  source 1..21: mol_type = other DNA
tattctgggaaggatgtgtcg

SEQ ID NO: 17354 - DNA, 21 bp, synthetic construct
  misc_feature 1..21: note = Description of Artificial Sequence: Synthetic oligonucleotide
  source 1..21: mol_type = other DNA
tctgttggtgcttcgaattct

SEQ ID NO: 17355 - DNA, 21 bp, synthetic construct
  misc_feature 1..21: note = Description of Artificial Sequence: Synthetic oligonucleotide
  source 1..21: mol_type = other DNA
accagcaacagccccttcacc

SEQ ID NO: 17356 - DNA, 21 bp, synthetic construct
  misc_feature 1..21: note = Description of Artificial Sequence: Synthetic oligonucleotide
  source 1..21: mol_type = other DNA
gaaggcagcacccaaaccaaa

SEQ ID NO: 17357 - DNA, 21 bp, synthetic construct
  misc_feature 1..21: note = Description of Artificial Sequence: Synthetic oligonucleotide
  source 1..21: mol_type = other DNA
accaccgaagccggcagcaaa

SEQ ID NO: 17358 - DNA, 21 bp, synthetic construct
  misc_feature 1..21: note = Description of Artificial Sequence: Synthetic oligonucleotide
  source 1..21: mol_type = other DNA
gagaataaggggagtaatagt

SEQ ID NO: 17359 - DNA, 21 bp, synthetic construct
  misc_feature 1..21: note = Description of Artificial Sequence: Synthetic oligonucleotide
  source 1..21: mol_type = other DNA
actgggatttctggtacgaat

SEQ ID NO: 17360 - DNA, 21 bp, synthetic construct
  misc_feature 1..21: note = Description of Artificial Sequence: Synthetic oligonucleotide
  source 1..21: mol_type = other DNA
ggggatacgaagccgattcat

SEQ ID NO: 17361 - DNA, 21 bp, synthetic construct
  misc_feature 1..21: note = Description of Artificial Sequence: Synthetic oligonucleotide
  source 1..21: mol_type = other DNA
acccccagcgacaaaaccgtc

SEQ ID NO: 17362 - DNA, 21 bp, synthetic construct
  misc_feature 1..21: note = Description of Artificial Sequence: Synthetic oligonucleotide
  source 1..21: mol_type = other DNA
gaacccaacagcaaacaaggc

SEQ ID NO: 17363 - DNA, 21 bp, synthetic construct
  misc_feature 1..21: note = Description of Artificial Sequence: Synthetic oligonucleotide
  source 1..21: mol_type = other DNA
gtcaccctcgacaaaagcagc

SEQ ID NO: 17364 - DNA, 21 bp, synthetic construct
  misc_feature 1..21: note = Description of Artificial Sequence: Synthetic oligonucleotide
  source 1..21: mol_type = other DNA
actacggggggttcttcgact

SEQ ID NO: 17365 - DNA, 21 bp, synthetic construct
  misc_feature 1..21: note = Description of Artificial Sequence: Synthetic oligonucleotide
  source 1..21: mol_type = other DNA
accagcgccgccggcaccgcc

SEQ ID NO: 17366 - DNA, 21 bp, synthetic construct
  misc_feature 1..21: note = Description of Artificial Sequence: Synthetic oligonucleotide
  source 1..21: mol_type = other DNA
actggtgagtcgcatccgaat

SEQ ID NO: 17367 - DNA, 21 bp, synthetic construct
  misc_feature 1..21: note = Description of Artificial Sequence: Synthetic oligonucleotide
  source 1..21: mol_type = other DNA
gttagtaattctaagtctacg

SEQ ID NO: 17368 - DNA, 21 bp, synthetic construct
  misc_feature 1..21: note = Description of Artificial Sequence: Synthetic oligonucleotide
  source 1..21: mol_type = other DNA
agcagccaaaaacccgtcaac

SEQ ID NO: 17369 - DNA, 21 bp, synthetic construct
  misc_feature 1..21: note = Description of Artificial Sequence: Synthetic oligonucleotide
  source 1..21: mol_type = other DNA
agtagtgaggctcgtaatcat

SEQ ID NO: 17370 - DNA, 21 bp, synthetic construct
  misc_feature 1..21: note = Description of Artificial Sequence: Synthetic oligonucleotide
  source 1..21: mol_type = other DNA
gatcaggctaatccgcgtcag

SEQ ID NO: 17371 - DNA, 21 bp, synthetic construct
  misc_feature 1..21: note = Description of Artificial Sequence: Synthetic oligonucleotide
  source 1..21: mol_type = other DNA
agcaccaacacccccccccaa

SEQ ID NO: 17372 - DNA, 21 bp, synthetic construct
  misc_feature 1..21: note = Description of Artificial Sequence: Synthetic oligonucleotide
  source 1..21: mol_type = other DNA
gggaatcagcagggtgcttcg

SEQ ID NO: 17373 - DNA, 21 bp, synthetic construct
  misc_feature 1..21: note = Description of Artificial Sequence: Synthetic oligonucleotide
  source 1..21: mol_type = other DNA
ttgggtaattctcctacgacg

SEQ ID NO: 17374 - DNA, 21 bp, synthetic construct
  misc_feature 1..21: note = Description of Artificial Sequence: Synthetic oligonucleotide
  source 1..21: mol_type = other DNA
aatcagtctagtgcgggtggt

SEQ ID NO: 17375 - DNA, 21 bp, synthetic construct
  misc_feature 1..21: note = Description of Artificial Sequence: Synthetic oligonucleotide
  source 1..21: mol_type = other DNA
tctcagacttcgagtagtcag

SEQ ID NO: 17376 - DNA, 21 bp, synthetic construct
  misc_feature 1..21: note = Description of Artificial Sequence: Synthetic oligonucleotide
  source 1..21: mol_type = other DNA
aaaggcaccagcaacagccaa

SEQ ID NO: 17377 - DNA, 21 bp, synthetic construct
  misc_feature 1..21: note = Description of Artificial Sequence: Synthetic oligonucleotide
  source 1..21: mol_type = other DNA
gaaagaagcgacaaacccttc

SEQ ID NO: 17378 - DNA, 21 bp, synthetic construct
  misc_feature 1..21: note = Description of Artificial Sequence: Synthetic oligonucleotide
  source 1..21: mol_type = other DNA
agcaacgtcagcagccacacc

SEQ ID NO: 17379 - DNA, 21 bp, synthetic construct
  misc_feature 1..21: note = Description of Artificial Sequence: Synthetic oligonucleotide
  source 1..21: mol_type = other DNA
agcaacgccagcggcaacaac

SEQ ID NO: 17380 - DNA, 21 bp, synthetic construct
  misc_feature 1..21: note = Description of Artificial Sequence: Synthetic oligonucleotide
  source 1..21: mol_type = other DNA
caggatagggagaagacgctt

SEQ ID NO: 17381 - DNA, 21 bp, synthetic construct
  misc_feature 1..21: note = Description of Artificial Sequence: Synthetic oligonucleotide
  source 1..21: mol_type = other DNA
aacaacgccagcaccagcacc

SEQ ID NO: 17382 - DNA, 21 bp, synthetic construct
  misc_feature 1..21: note = Description of Artificial Sequence: Synthetic oligonucleotide
  source 1..21: mol_type = other DNA
agaagcgaaggcgccagcgtc

SEQ ID NO: 17383 - DNA, 21 bp, synthetic construct
  misc_feature 1..21: note = Description of Artificial Sequence: Synthetic oligonucleotide
  source 1..21: mol_type = other DNA
tcgactggttcgggtccgtcg

SEQ ID NO: 17384 - DNA, 21 bp, synthetic construct
  misc_feature 1..21: note = Description of Artificial Sequence: Synthetic oligonucleotide
  source 1..21: mol_type = other DNA
tctagtcagacggctaataag

SEQ ID NO: 17385 - DNA, 21 bp, synthetic construct
  misc_feature 1..21: note = Description of Artificial Sequence: Synthetic oligonucleotide
  source 1..21: mol_type = other DNA
atgtctactagtgctaatcat

SEQ ID NO: 17386 - DNA, 21 bp, synthetic construct
  misc_feature 1..21: note = Description of Artificial Sequence: Synthetic oligonucleotide
  source 1..21: mol_type = other DNA
tctggtgcgagtacggggaat

SEQ ID NO: 17387 - DNA, 21 bp, synthetic construct
  misc_feature 1..21: note = Description of Artificial Sequence: Synthetic oligonucleotide
  source 1..21: mol_type = other DNA
gatcagttgtctaatgctaag

SEQ ID NO: 17388 - DNA, 21 bp, synthetic construct
  misc_feature 1..21: note = Description of Artificial Sequence: Synthetic oligonucleotide
  source 1..21: mol_type = other DNA
gacagcagcagccacagcaaa

SEQ ID NO: 17389 - DNA, 21 bp, synthetic construct
  misc_feature 1..21: note = Description of Artificial Sequence: Synthetic oligonucleotide
  source 1..21: mol_type = other DNA
caggggacgtcgagtgtgccg

SEQ ID NO: 17390 - DNA, 21 bp, synthetic construct
  misc_feature 1..21: note = Description of Artificial Sequence: Synthetic oligonucleotide
  source 1..21: mol_type = other DNA
ggcaccgtcggcagcaacagc

SEQ ID NO: 17391 - DNA, 21 bp, synthetic construct
  misc_feature 1..21: note = Description of Artificial Sequence: Synthetic oligonucleotide
  source 1..21: mol_type = other DNA
agcgtcagcagcacccccagc

SEQ ID NO: 17392 - DNA, 21 bp, synthetic construct
  misc_feature 1..21: note = Description of Artificial Sequence: Synthetic oligonucleotide
  source 1..21: mol_type = other DNA
aacagcatcggccaaagcaaa

SEQ ID NO: 17393 - DNA, 21 bp, synthetic construct
  misc_feature 1..21: note = Description of Artificial Sequence: Synthetic oligonucleotide
  source 1..21: mol_type = other DNA
gccgccggcagcaacagcacc

SEQ ID NO: 17394 - DNA, 21 bp, synthetic construct
  misc_feature 1..21: note = Description of Artificial Sequence: Synthetic oligonucleotide
  source 1..21: mol_type = other DNA
acgtctgctcgtgatgttcag

SEQ ID NO: 17395 - DNA, 21 bp, synthetic construct
  misc_feature 1..21: note = Description of Artificial Sequence: Synthetic oligonucleotide
  source 1..21: mol_type = other DNA
atgaacaccagcaaccccgtc

SEQ ID NO: 17396 - DNA, 21 bp, synthetic construct
  misc_feature 1..21: note = Description of Artificial Sequence: Synthetic oligonucleotide
  source 1..21: mol_type = other DNA
accggcagcaccggcaacatg

SEQ ID NO: 17397 - DNA, 21 bp, synthetic construct
  misc_feature 1..21: note = Description of Artificial Sequence: Synthetic oligonucleotide
  source 1..21: mol_type = other DNA
agcaacggcaccagcggcggc

SEQ ID NO: 17398 - DNA, 21 bp, synthetic construct
  misc_feature 1..21: note = Description of Artificial Sequence: Synthetic oligonucleotide
  source 1..21: mol_type = other DNA
agggagggggatcgtgggggg

SEQ ID NO: 17399 - DNA, 21 bp, synthetic construct
  misc_feature 1..21: note = Description of Artificial Sequence: Synthetic oligonucleotide
  source 1..21: mol_type = other DNA
atgccccccaaacccagcacc

SEQ ID NO: 17400 - DNA, 21 bp, synthetic construct
  misc_feature 1..21: note = Description of Artificial Sequence: Synthetic oligonucleotide
  source 1..21: mol_type = other DNA
atggacggcaccagcagcaga

SEQ ID NO: 17401 - DNA, 21 bp, synthetic construct
  misc_feature 1..21: note = Description of Artificial Sequence: Synthetic oligonucleotide
  source 1..21: mol_type = other DNA
cttactggttctaagtctgat

SEQ ID NO: 17402 - DNA, 21 bp, synthetic construct
  misc_feature 1..21: note = Description of Artificial Sequence: Synthetic oligonucleotide
  source 1..21: mol_type = other DNA
gattcttctaatcagaggaat

SEQ ID NO: 17403 - DNA, 21 bp, synthetic construct
  misc_feature 1..21: note = Description of Artificial Sequence: Synthetic oligonucleotide
  source 1..21: mol_type = other DNA
ggtactgggccgtcgaagagt

SEQ ID NO: 17404 - DNA, 21 bp, synthetic construct
  misc_feature 1..21: note = Description of Artificial Sequence: Synthetic oligonucleotide
  source 1..21: mol_type = other DNA
gtgacgtctagtaagacggag

SEQ ID NO: 17405 - DNA, 21 bp, synthetic construct
  misc_feature 1..21: note = Description of Artificial Sequence: Synthetic oligonucleotide
  source 1..21: mol_type = other DNA
accgacaaagccaacgccgtc

SEQ ID NO: 17406 - DNA, 21 bp, synthetic construct
  misc_feature 1..21: note = Description of Artificial Sequence: Synthetic oligonucleotide
  source 1..21: mol_type = other DNA
accggcagcagcggcagcggc

SEQ ID NO: 17407 - DNA, 21 bp, synthetic construct
  misc_feature 1..21: note = Description of Artificial Sequence: Synthetic oligonucleotide
  source 1..21: mol_type = other DNA
cttaatggttctagtagtcgc

SEQ ID NO: 17408 - DNA, 21 bp, synthetic construct
  misc_feature 1..21: note = Description of Artificial Sequence: Synthetic oligonucleotide
  source 1..21: mol_type = other DNA
gagaggacgacgggggttggt

SEQ ID NO: 17409 - DNA, 21 bp, synthetic construct
  misc_feature 1..21: note = Description of Artificial Sequence: Synthetic oligonucleotide
  source 1..21: mol_type = other DNA
acgggtagtgggtcgacttct

SEQ ID NO: 17410 - DNA, 21 bp, synthetic construct
  misc_feature 1..21: note = Description of Artificial Sequence: Synthetic oligonucleotide
  source 1..21: mol_type = other DNA
gcgagtggtggtaagaatgag

SEQ ID NO: 17411 - DNA, 21 bp, synthetic construct
  misc_feature 1..21: note = Description of Artificial Sequence: Synthetic oligonucleotide
  source 1..21: mol_type = other DNA
gtgggggagaattctccgcgt

SEQ ID NO: 17412 - DNA, 21 bp, synthetic construct
  misc_feature 1..21: note = Description of Artificial Sequence: Synthetic oligonucleotide
  source 1..21: mol_type = other DNA
accgccaacaaaagcaaagac

SEQ ID NO: 17413 - DNA, 21 bp, synthetic construct
  misc_feature 1..21: note = Description of Artificial Sequence: Synthetic oligonucleotide
  source 1..21: mol_type = other DNA
agtctgggttctaagggttcg

SEQ ID NO: 17414 - DNA, 21 bp, synthetic construct
  misc_feature 1..21: note = Description of Artificial Sequence: Synthetic oligonucleotide
  source 1..21: mol_type = other DNA
aacggcagcggcacccccagc

SEQ ID NO: 17415 - DNA, 21 bp, synthetic construct
  misc_feature 1..21: note = Description of Artificial Sequence: Synthetic oligonucleotide
  source 1..21: mol_type = other DNA
aaaggcaacaccagcgccgcc

SEQ ID NO: 17416 - DNA, 21 bp, synthetic construct
  misc_feature 1..21: note = Description of Artificial Sequence: Synthetic oligonucleotide
  source 1..21: mol_type = other DNA
cggagtgatcagggtaatatt

SEQ ID NO: 17417 - DNA, 21 bp, synthetic construct
  misc_feature 1..21: note = Description of Artificial Sequence: Synthetic oligonucleotide
  source 1..21: mol_type = other DNA
ctcaacggcagcaaccaaacc

SEQ ID NO: 17418 - DNA, 21 bp, synthetic construct
  misc_feature 1..21: note = Description of Artificial Sequence: Synthetic oligonucleotide
  source 1..21: mol_type = other DNA
agcggcagcggcagcaacctc

SEQ ID NO: 17419 - DNA, 21 bp, synthetic construct
  misc_feature 1..21: note = Description of Artificial Sequence: Synthetic oligonucleotide
  source 1..21: mol_type = other DNA
gagtcggtttcgaagaatttg

SEQ ID NO: 17420 - DNA, 21 bp, synthetic construct
  misc_feature 1..21: note = Description of Artificial Sequence: Synthetic oligonucleotide
  source 1..21: mol_type = other DNA
ggttctcttaaggatgctacg

SEQ ID NO: 17421 - DNA, 21 bp, synthetic construct
  misc_feature 1..21: note = Description of Artificial Sequence: Synthetic oligonucleotide
  source 1..21: mol_type = other DNA
atgaccgtcaaaagcagcgaa

SEQ ID NO: 17422 - DNA, 21 bp, synthetic construct
  misc_feature 1..21: note = Description of Artificial Sequence: Synthetic oligonucleotide
  source 1..21: mol_type = other DNA
ggcagcgtcaaaggcgaaccc

SEQ ID NO: 17423 - DNA, 21 bp, synthetic construct
  misc_feature 1..21: note = Description of Artificial Sequence: Synthetic oligonucleotide
  source 1..21: mol_type = other DNA
gctcagggtgggtctgttaag

SEQ ID NO: 17424 - DNA, 21 bp, synthetic construct
  misc_feature 1..21: note = Description of Artificial Sequence: Synthetic oligonucleotide
  source 1..21: mol_type = other DNA
agcaacagcagcggccacgtc

SEQ ID NO: 17425 - DNA, 21 bp, synthetic construct
  misc_feature 1..21: note = Description of Artificial Sequence: Synthetic oligonucleotide
  source 1..21: mol_type = other DNA
ggtaagagtacttcggagggt

SEQ ID NO: 17426 - DNA, 21 bp, synthetic construct
  misc_feature 1..21: note = Description of Artificial Sequence: Synthetic oligonucleotide
  source 1..21: mol_type = other DNA
ggcagcagcgacaaaagaaac

SEQ ID NO: 17427 - DNA, 21 bp, synthetic construct
  misc_feature 1..21: note = Description of Artificial Sequence: Synthetic oligonucleotide
  source 1..21: mol_type = other DNA
tctgtttctgctccttcgacg

SEQ ID NO: 17428 - DNA, 21 bp, synthetic construct
  misc_feature 1..21: note = Description of Artificial Sequence: Synthetic oligonucleotide
  source 1..21: mol_type = other DNA
accagagacagcaaaagcctc

SEQ ID NO: 17429 - DNA, 21 bp, synthetic construct
  misc_feature 1..21: note = Description of Artificial Sequence: Synthetic oligonucleotide
  source 1..21: mol_type = other DNA
atgcgggatgcttcgactact

SEQ ID NO: 17430 - DNA, 21 bp, synthetic construct
  misc_feature 1..21: note = Description of Artificial Sequence: Synthetic oligonucleotide
  source 1..21: mol_type = other DNA
caaggcagcaccagccccatc

SEQ ID NO: 17431 - DNA, 21 bp, synthetic construct
  misc_feature 1..21: note = Description of Artificial Sequence: Synthetic oligonucleotide
  source 1..21: mol_type = other DNA
gacaacagagaccccaaactc

SEQ ID NO: 17432 - DNA, 21 bp, synthetic construct
  misc_feature 1..21: note = Description of Artificial Sequence: Synthetic oligonucleotide
  source 1..21: mol_type = other DNA
accggcagccaaagcagcacc

SEQ ID NO: 17433 - DNA, 21 bp, synthetic construct
  misc_feature 1..21: note = Description of Artificial Sequence: Synthetic oligonucleotide
  source 1..21: mol_type = other DNA
gagacgccgacttcgaatcgg

SEQ ID NO: 17434 - DNA, 21 bp, synthetic construct
  misc_feature 1..21: note = Description of Artificial Sequence: Synthetic oligonucleotide
  source 1..21: mol_type = other DNA
gttcgcgatagtagtaatcat

SEQ ID NO: 17435 - DNA, 21 bp, synthetic construct
  misc_feature 1..21: note = Description of Artificial Sequence: Synthetic oligonucleotide
  source 1..21: mol_type = other DNA
gctgctgggagttcgaatacg

SEQ ID NO: 17436 - DNA, 21 bp, synthetic construct
  misc_feature 1..21: note = Description of Artificial Sequence: Synthetic oligonucleotide
  source 1..21: mol_type = other DNA
gacggcagagccagcgtcagc

SEQ ID NO: 17437 - DNA, 21 bp, synthetic construct
  misc_feature 1..21: note = Description of Artificial Sequence: Synthetic oligonucleotide
  source 1..21: mol_type = other DNA
ggcctcggcgcccaagccgcc

SEQ ID NO: 17438 - DNA, 21 bp, synthetic construct
  misc_feature 1..21: note = Description of Artificial Sequence: Synthetic oligonucleotide
  source 1..21: mol_type = other DNA
agcgtcagcagcagccccagc

SEQ ID NO: 17439 - DNA, 21 bp, synthetic construct
  misc_feature 1..21: note = Description of Artificial Sequence: Synthetic oligonucleotide
  source 1..21: mol_type = other DNA
cagttgaatccgaaggatggg

SEQ ID NO: 17440 - DNA, 21 bp, synthetic construct
  misc_feature 1..21: note = Description of Artificial Sequence: Synthetic oligonucleotide
  source 1..21: mol_type = other DNA
gccggcaccgaaaaaatcagc

SEQ ID NO: 17441 - DNA, 21 bp, synthetic construct
  misc_feature 1..21: note = Description of Artificial Sequence: Synthetic oligonucleotide
  source 1..21: mol_type = other DNA
accgccagcgacaaaaccaga

SEQ ID NO: 17442 - DNA, 21 bp, synthetic construct
  misc_feature 1..21: note = Description of Artificial Sequence: Synthetic oligonucleotide
  source 1..21: mol_type = other DNA
aattcgactacgaaggcgaat

SEQ ID NO: 17443 - DNA, 21 bp, synthetic construct
  misc_feature 1..21: note = Description of Artificial Sequence: Synthetic oligonucleotide
  source 1..21: mol_type = other DNA
tctaagtctaataatcgtgag

SEQ ID NO: 17444 - DNA, 21 bp, synthetic construct
  misc_feature 1..21: note = Description of Artificial Sequence: Synthetic oligonucleotide
  source 1..21: mol_type = other DNA
agtttgagtcagaagagtgag

SEQ ID NO: 17445 - DNA, 21 bp, synthetic construct
  misc_feature 1..21: note = Description of Artificial Sequence: Synthetic oligonucleotide
  source 1..21: mol_type = other DNA
aatgttggtcatcctaatgag

SEQ ID NO: 17446 - DNA, 21 bp, synthetic construct
  misc_feature 1..21: note = Description of Artificial Sequence: Synthetic oligonucleotide
  source 1..21: mol_type = other DNA
agcagcgaacaccccaaaggc

SEQ ID NO: 17447 - DNA, 21 bp, synthetic construct
  misc_feature 1..21: note = Description of Artificial Sequence: Synthetic oligonucleotide
  source 1..21: mol_type = other DNA
agcgcccaacccagcggcggc

SEQ ID NO: 17448 - DNA, 21 bp, synthetic construct
  misc_feature 1..21: note = Description of Artificial Sequence: Synthetic oligonucleotide
  source 1..21: mol_type = other DNA
agtggtagttctaggacggag

SEQ ID NO: 17449 - DNA, 21 bp, synthetic construct
  misc_feature 1..21: note = Description of Artificial Sequence: Synthetic oligonucleotide
  source 1..21: mol_type = other DNA
caggataatcagggtaagccg

SEQ ID NO: 17450 - DNA, 21 bp, synthetic construct
  misc_feature 1..21: note = Description of Artificial Sequence: Synthetic oligonucleotide
  source 1..21: mol_type = other DNA
gaaggcgacaaacaccccgtc

SEQ ID NO: 17451 - DNA, 21 bp, synthetic construct
  misc_feature 1..21: note = Description of Artificial Sequence: Synthetic oligonucleotide
  source 1..21: mol_type = other DNA
gaaggcgcccacagacccggc

SEQ ID NO: 17452 - DNA, 21 bp, synthetic construct
  misc_feature 1..21: note = Description of Artificial Sequence: Synthetic oligonucleotide
  source 1..21: mol_type = other DNA
ggccccgaaagcagaccccaa

SEQ ID NO: 17453 - DNA, 21 bp, synthetic construct
  misc_feature 1..21: note = Description of Artificial Sequence: Synthetic oligonucleotide
  source 1..21: mol_type = other DNA
gggactagtgagaagacgatt

SEQ ID NO: 17454 - DNA, 21 bp, synthetic construct
  misc_feature 1..21: note = Description of Artificial Sequence: Synthetic oligonucleotide
  source 1..21: mol_type = other DNA
ggtaatggttcttctagggat

SEQ ID NO: 17455 - DNA, 21 bp, synthetic construct
  misc_feature 1..21: note = Description of Artificial Sequence: Synthetic oligonucleotide
  source 1..21: mol_type = other DNA
ttccccaccgaaagcgccggc

SEQ ID NO: 17456 - DNA, 21 bp, synthetic construct
  misc_feature 1..21: note = Description of Artificial Sequence: Synthetic oligonucleotide
  source 1..21: mol_type = other DNA
aaccccggcaaagacagcaga

SEQ ID NO: 17457 - DNA, 21 bp, synthetic construct
  misc_feature 1..21: note = Description of Artificial Sequence: Synthetic oligonucleotide
  source 1..21: mol_type = other DNA
atggggggttcgggtcatggt

SEQ ID NO: 17458 - DNA, 21 bp, synthetic construct
  misc_feature 1..21: note = Description of Artificial Sequence: Synthetic oligonucleotide
  source 1..21: mol_type = other DNA
accgaaagcaaaagcagcgtc

SEQ ID NO: 17459 - DNA, 21 bp, synthetic construct
  misc_feature 1..21: note = Description of Artificial Sequence: Synthetic oligonucleotide
  source 1..21: mol_type = other DNA
accaccgccagccccaacaaa

SEQ ID NO: 17460 - DNA, 21 bp, synthetic construct
  misc_feature 1..21: note = Description of Artificial Sequence: Synthetic oligonucleotide
  source 1..21: mol_type = other DNA
acgtcgaagagtacgacgtcg

SEQ ID NO: 17461 - DNA, 21 bp, synthetic construct
  misc_feature 1..21: note = Description of Artificial Sequence: Synthetic oligonucleotide
  source 1..21: mol_type = other DNA
gacatgaccggcaccaacaaa

SEQ ID NO: 17462 - DNA, 21 bp, synthetic construct
  misc_feature 1..21: note = Description of Artificial Sequence: Synthetic oligonucleotide
  source 1..21: mol_type = other DNA
agcaacaccagcggcgtcacc

SEQ ID NO: 17463 - DNA, 21 bp, synthetic construct
  misc_feature 1..21: note = Description of Artificial Sequence: Synthetic oligonucleotide
  source 1..21: mol_type = other DNA
gaaatggacagcaaaggcacc

SEQ ID NO: 17464 - DNA, 21 bp, synthetic construct
  misc_feature 1..21: note = Description of Artificial Sequence: Synthetic oligonucleotide
  source 1..21: mol_type = other DNA
ggcagcggcggcagcaaagaa

SEQ ID NO: 17465 - DNA, 21 bp, synthetic construct
  misc_feature 1..21: note = Description of Artificial Sequence: Synthetic oligonucleotide
  source 1..21: mol_type = other DNA
gagattccggcggggaagtct

SEQ ID NO: 17466 - DNA, 21 bp, synthetic construct
  misc_feature 1..21: note = Description of Artificial Sequence: Synthetic oligonucleotide
  source 1..21: mol_type = other DNA
gtcggcgacgccaaagccatg

SEQ ID NO: 17467 - DNA, 21 bp, synthetic construct
  misc_feature 1..21: note = Description of Artificial Sequence: Synthetic oligonucleotide
  source 1..21: mol_type = other DNA
gaacaaagaaaaagcatggtc

SEQ ID NO: 17468 - DNA, 21 bp, synthetic construct
  misc_feature 1..21: note = Description of Artificial Sequence: Synthetic oligonucleotide
  source 1..21: mol_type = other DNA
ggcagcggcaccgccggcaac

SEQ ID NO: 17469 - DNA, 21 bp, synthetic construct
  misc_feature 1..21: note = Description of Artificial Sequence: Synthetic oligonucleotide
  source 1..21: mol_type = other DNA
agccaaaccagcgccaaccaa

SEQ ID NO: 17470 - DNA, 21 bp, synthetic construct
  misc_feature 1..21: note = Description of Artificial Sequence: Synthetic oligonucleotide
  source 1..21: mol_type = other DNA
agtggtgggtctcaggggcag

SEQ ID NO: 17471 - DNA, 21 bp, synthetic construct
  misc_feature 1..21: note = Description of Artificial Sequence: Synthetic oligonucleotide
  source 1..21: mol_type = other DNA
caaaacggcaaacaacccctc

SEQ ID NO: 17472 - DNA, 21 bp, synthetic construct
  misc_feature 1..21: note = Description of Artificial Sequence: Synthetic oligonucleotide
  source 1..21: mol_type = other DNA
agcagagaccaaaacggccac

SEQ ID NO: 17473 - DNA, 21 bp, synthetic construct
  misc_feature 1..21: note = Description of Artificial Sequence: Synthetic oligonucleotide
  source 1..21: mol_type = other DNA
agtgaggcgggtagtggtaaa

SEQ ID NO: 17474 - DNA, 21 bp, synthetic construct
  misc_feature 1..21: note = Description of Artificial Sequence: Synthetic oligonucleotide
  source 1..21: mol_type = other DNA
ggcgacggcagcagcagagcc

SEQ ID NO: 17475 - DNA, 21 bp, synthetic construct
  misc_feature 1..21: note = Description of Artificial Sequence: Synthetic oligonucleotide
  source 1..21: mol_type = other DNA
agcggcagcaaaagcatcgaa

SEQ ID NO: 17476 - DNA, 21 bp, synthetic construct
  misc_feature 1..21: note = Description of Artificial Sequence: Synthetic oligonucleotide
  source 1..21: mol_type = other DNA
atgaccgaaagcgccagcaaa

SEQ ID NO: 17477 - DNA, 21 bp, synthetic construct
  misc_feature 1..21: note = Description of Artificial Sequence: Synthetic oligonucleotide
  source 1..21: mol_type = other DNA
cagtctgggagtggtacggct

SEQ ID NO: 17478 - DNA, 21 bp, synthetic construct
  misc_feature 1..21: note = Description of Artificial Sequence: Synthetic oligonucleotide
  source 1..21: mol_type = other DNA
gtcaacgacagcaaaaccacc

SEQ ID NO: 17479 - DNA, 21 bp, synthetic construct
  misc_feature 1..21: note = Description of Artificial Sequence: Synthetic oligonucleotide
  source 1..21: mol_type = other DNA
gacggcaaagcccccctcctc

SEQ ID NO: 17480 - DNA, 21 bp, synthetic construct
  misc_feature 1..21: note = Description of Artificial Sequence: Synthetic oligonucleotide
  source 1..21: mol_type = other DNA
cacgccaacagcgccaaagaa

SEQ ID NO: 17481 - DNA, 21 bp, synthetic construct
  misc_feature 1..21: note = Description of Artificial Sequence: Synthetic oligonucleotide
  source 1..21: mol_type = other DNA
agcccccaaggcgaacacaaa

SEQ ID NO: 17482 - DNA, 21 bp, synthetic construct
  misc_feature 1..21: note = Description of Artificial Sequence: Synthetic oligonucleotide
  source 1..21: mol_type = other DNA
tcgggtgagacgactaagagg

SEQ ID NO: 17483 - DNA, 21 bp, synthetic construct
  misc_feature 1..21: note = Description of Artificial Sequence: Synthetic oligonucleotide
  source 1..21: mol_type = other DNA
ggtcaggattctattaagggg

SEQ ID NO: 17484 - DNA, 21 bp, synthetic construct
  misc_feature 1..21: note = Description of Artificial Sequence: Synthetic oligonucleotide
  source 1..21: mol_type = other DNA
agcggccaaagcaaacccgac

SEQ ID NO: 17485 - DNA, 21 bp, synthetic construct
  misc_feature 1..21: note = Description of Artificial Sequence: Synthetic oligonucleotide
  source 1..21: mol_type = other DNA
cttgtggagaagtcttctagt

SEQ ID NO: 17486 - DNA, 21 bp, synthetic construct
  misc_feature 1..21: note = Description of Artificial Sequence: Synthetic oligonucleotide
  source 1..21: mol_type = other DNA
actccggcgagttctagtatt

SEQ ID NO: 17487 - DNA, 21 bp, synthetic construct
  misc_feature 1..21: note = Description of Artificial Sequence: Synthetic oligonucleotide
  source 1..21: mol_type = other DNA
aacagcggccccagcggccaa

SEQ ID NO: 17488 - DNA, 21 bp, synthetic construct
  misc_feature 1..21: note = Description of Artificial Sequence: Synthetic oligonucleotide
  source 1..21: mol_type = other DNA
agcagcacccccagcagcggc

SEQ ID NO: 17489 - DNA, 21 bp, synthetic construct
  misc_feature 1..21: note = Description of Artificial Sequence: Synthetic oligonucleotide
  source 1..21: mol_type = other DNA
accgtcggcagcggcagcccc

SEQ ID NO: 17490 - DNA, 21 bp, synthetic construct
  misc_feature 1..21: note = Description of Artificial Sequence: Synthetic oligonucleotide
  source 1..21: mol_type = other DNA
tctggtgtgagttcgacggcg

SEQ ID NO: 17491 - DNA, 21 bp, synthetic construct
  misc_feature 1..21: note = Description of Artificial Sequence: Synthetic oligonucleotide
  source 1..21: mol_type = other DNA
gagagggttcagacttcggag

SEQ ID NO: 17492 - DNA, 21 bp, synthetic construct
  misc_feature 1..21: note = Description of Artificial Sequence: Synthetic oligonucleotide
  source 1..21: mol_type = other DNA
gcggctggggctgagcggggg

SEQ ID NO: 17493 - DNA, 21 bp, synthetic construct
  misc_feature 1..21: note = Description of Artificial Sequence: Synthetic oligonucleotide
  source 1..21: mol_type = other DNA
ggtcttgataagtcgctgacg

SEQ ID NO: 17494 - DNA, 21 bp, synthetic construct
  misc_feature 1..21: note = Description of Artificial Sequence: Synthetic oligonucleotide
  source 1..21: mol_type = other DNA
catggtaataattcgccgagt

SEQ ID NO: 17495 - DNA, 21 bp, synthetic construct
  misc_feature 1..21: note = Description of Artificial Sequence: Synthetic oligonucleotide
  source 1..21: mol_type = other DNA
aacggcaccagcaaacaagac

SEQ ID NO: 17496 - DNA, 21 bp, synthetic construct
  misc_feature 1..21: note = Description of Artificial Sequence: Synthetic oligonucleotide
  source 1..21: mol_type = other DNA
gaaatcaacaaagccaaccaa

SEQ ID NO: 17497 - DNA, 21 bp, synthetic construct
  misc_feature 1..21: note = Description of Artificial Sequence: Synthetic oligonucleotide
  source 1..21: mol_type = other DNA
gatggtacttcgcataagtct

SEQ ID NO: 17498 - DNA, 21 bp, synthetic construct
  misc_feature 1..21: note = Description of Artificial Sequence: Synthetic oligonucleotide
  source 1..21: mol_type = other DNA
gccaccagccaaagcaacatg

SEQ ID NO: 17499 - DNA, 21 bp, synthetic construct
  misc_feature 1..21: note = Description of Artificial Sequence: Synthetic oligonucleotide
  source 1..21: mol_type = other DNA
atgaacggcggcaccggcacc

SEQ ID NO: 17500 - DNA, 21 bp, synthetic construct
  misc_feature 1..21: note = Description of Artificial Sequence: Synthetic oligonucleotide
  source 1..21: mol_type = other DNA
agacaaggcgaccaccccagc

SEQ ID NO: 17501 - DNA, 21 bp, synthetic construct
  misc_feature 1..21: note = Description of Artificial Sequence: Synthetic oligonucleotide
  source 1..21: mol_type = other DNA
tcgtcgggtaaggagtctggt

SEQ ID NO: 17502 - DNA, 21 bp, synthetic construct
  misc_feature 1..21: note = Description of Artificial Sequence: Synthetic oligonucleotide
  source 1..21: mol_type = other DNA
agccccagcaccaccggccaa

SEQ ID NO: 17503 - DNA, 21 bp, synthetic construct
  misc_feature 1..21: note = Description of Artificial Sequence: Synthetic oligonucleotide
  source 1..21: mol_type = other DNA
ggcggcaacgaccacaaaacc

SEQ ID NO: 17504 - DNA, 21 bp, synthetic construct
  misc_feature 1..21: note = Description of Artificial Sequence: Synthetic oligonucleotide
  source 1..21: mol_type = other DNA
ggtgatcctaagtcgactctg

SEQ ID NO: 17505 - DNA, 21 bp, synthetic construct
  misc_feature 1..21: note = Description of Artificial Sequence: Synthetic oligonucleotide
  source 1..21: mol_type = other DNA
ggtgcttcggggaagatgatg

SEQ ID NO: 17506 - DNA, 21 bp, synthetic construct
  misc_feature 1..21: note = Description of Artificial Sequence: Synthetic oligonucleotide
  source 1..21: mol_type = other DNA
ggggatgggagtcatactagg

SEQ ID NO: 17507 - DNA, 21 bp, synthetic construct
  misc_feature 1..21: note = Description of Artificial Sequence: Synthetic oligonucleotide
  source 1..21: mol_type = other DNA
agcatgagcagcagccccacc

SEQ ID NO: 17508 - DNA, 21 bp, synthetic construct
  misc_feature 1..21: note = Description of Artificial Sequence: Synthetic oligonucleotide
  source 1..21: mol_type = other DNA
cagcagacggctgatactaag

SEQ ID NO: 17509 - DNA, 21 bp, synthetic construct
  misc_feature 1..21: note = Description of Artificial Sequence: Synthetic oligonucleotide
  source 1..21: mol_type = other DNA
aattctgctagtacgtcgggt

SEQ ID NO: 17510 - DNA, 21 bp, synthetic construct
  misc_feature 1..21: note = Description of Artificial Sequence: Synthetic oligonucleotide
  source 1..21: mol_type = other DNA
agcaacaccaaccacaacagc

SEQ ID NO: 17511 - DNA, 21 bp, synthetic construct
  misc_feature 1..21: note = Description of Artificial Sequence: Synthetic oligonucleotide
  source 1..21: mol_type = other DNA
aacgtcagcggccaaaaccaa

SEQ ID NO: 17512 - DNA, 21 bp, synthetic construct
  misc_feature 1..21: note = Description of Artificial Sequence: Synthetic oligonucleotide
  source 1..21: mol_type = other DNA
accagcagcaacgtcccccaa

SEQ ID NO: 17513 - DNA, 21 bp, synthetic construct
  misc_feature 1..21: note = Description of Artificial Sequence: Synthetic oligonucleotide
  source 1..21: mol_type = other DNA
tctggggctagttctagtcat

SEQ ID NO: 17514 - DNA, 21 bp, synthetic construct
  misc_feature 1..21: note = Description of Artificial Sequence: Synthetic oligonucleotide
  source 1..21: mol_type = other DNA
gatgggtctcgtgttgctcat

SEQ ID NO: 17515 - DNA, 21 bp, synthetic construct
  misc_feature 1..21: note = Description of Artificial Sequence: Synthetic oligonucleotide
  source 1..21: mol_type = other DNA
gatactcagagtaatcggacg

SEQ ID NO: 17516 - DNA, 21 bp, synthetic construct
  misc_feature 1..21: note = Description of Artificial Sequence: Synthetic oligonucleotide
  source 1..21: mol_type = other DNA
atgaccagcaaaaccgtcggc

SEQ ID NO: 17517 - DNA, 21 bp, synthetic construct
  misc_feature 1..21: note = Description of Artificial Sequence: Synthetic oligonucleotide
  source 1..21: mol_type = other DNA
gaaggcaaccaaaccggcagc

SEQ ID NO: 17518 - DNA, 21 bp, synthetic construct
  misc_feature 1..21: note = Description of Artificial Sequence: Synthetic oligonucleotide
  source 1..21: mol_type = other DNA
ggcagcaacggcgccagcacc

SEQ ID NO: 17519 - DNA, 21 bp, synthetic construct
  misc_feature 1..21: note = Description of Artificial Sequence: Synthetic oligonucleotide
  source 1..21: mol_type = other DNA
tttccgtctagtacgcctaag

SEQ ID NO: 17520 - DNA, 21 bp, synthetic construct
  misc_feature 1..21: note = Description of Artificial Sequence: Synthetic oligonucleotide
  source 1..21: mol_type = other DNA
agcctcaccgaagtcaacaaa

SEQ ID NO: 17521 - DNA, 21 bp, synthetic construct
  misc_feature 1..21: note = Description of Artificial Sequence: Synthetic oligonucleotide
  source 1..21: mol_type = other DNA
ggcaccgccagccccagcagc

SEQ ID NO: 17522 - DNA, 21 bp, synthetic construct
  misc_feature 1..21: note = Description of Artificial Sequence: Synthetic oligonucleotide
  source 1..21: mol_type = other DNA
ggccaaagcgacgccatcaaa

SEQ ID NO: 17523 - DNA, 21 bp, synthetic construct
  misc_feature 1..21: note = Description of Artificial Sequence: Synthetic oligonucleotide
  source 1..21: mol_type = other DNA
gacaaccacgaaaaaaccagc

SEQ ID NO: 17524 - DNA, 21 bp, synthetic construct
  misc_feature 1..21: note = Description of Artificial Sequence: Synthetic oligonucleotide
  source 1..21: mol_type = other DNA
ggtaagacggatggtactcat

SEQ ID NO: 17525 - DNA, 21 bp, synthetic construct
  misc_feature 1..21: note = Description of Artificial Sequence: Synthetic oligonucleotide
  source 1..21: mol_type = other DNA
ggttctgaggttgcgcctaag

SEQ ID NO: 17526 - DNA, 21 bp, synthetic construct
  misc_feature 1..21: note = Description of Artificial Sequence: Synthetic oligonucleotide
  source 1..21: mol_type = other DNA
ggcaacaccggcgccagcagc

SEQ ID NO: 17527 - DNA, 21 bp, synthetic construct
  misc_feature 1..21: note = Description of Artificial Sequence: Synthetic oligonucleotide
  source 1..21: mol_type = other DNA
agcagcggcggcaccagaaac

SEQ ID NO: 17528 - DNA, 21 bp, synthetic construct
  misc_feature 1..21: note = Description of Artificial Sequence: Synthetic oligonucleotide
  source 1..21: mol_type = other DNA
gattctaatgttacgcataag

SEQ ID NO: 17529 - DNA, 21 bp, synthetic construct
  misc_feature 1..21: note = Description of Artificial Sequence: Synthetic oligonucleotide
  source 1..21: mol_type = other DNA
ggttatgaggggaatggtaag

SEQ ID NO: 17530 - DNA, 21 bp, synthetic construct
  misc_feature 1..21: note = Description of Artificial Sequence: Synthetic oligonucleotide
  source 1..21: mol_type = other DNA
gggacgggtgctgctggtact

SEQ ID NO: 17531 - DNA, 21 bp, synthetic construct
  misc_feature 1..21: note = Description of Artificial Sequence: Synthetic oligonucleotide
  source 1..21: mol_type = other DNA
aatagttcgtctcctacgacg

SEQ ID NO: 17532 - DNA, 21 bp, synthetic construct
  misc_feature 1..21: note = Description of Artificial Sequence: Synthetic oligonucleotide
  source 1..21: mol_type = other DNA
acgggttctccgtctggtcag

SEQ ID NO: 17533 - DNA, 21 bp, synthetic construct
  misc_feature 1..21: note = Description of Artificial Sequence: Synthetic oligonucleotide
  source 1..21: mol_type = other DNA
gctggtacttctactagtaat

SEQ ID NO: 17534 - DNA, 21 bp, synthetic construct
  misc_feature 1..21: note = Description of Artificial Sequence: Synthetic oligonucleotide
  source 1..21: mol_type = other DNA
caggctacgtcggcggcggcg

SEQ ID NO: 17535 - DNA, 21 bp, synthetic construct
  misc_feature 1..21: note = Description of Artificial Sequence: Synthetic oligonucleotide
  source 1..21: mol_type = other DNA
acgtcggcggcgcgtgctgag

SEQ ID NO: 17536 - DNA, 21 bp, synthetic construct
  misc_feature 1..21: note = Description of Artificial Sequence: Synthetic oligonucleotide
  source 1..21: mol_type = other DNA
gcggggtctccttcgactcag

SEQ ID NO: 17537 - DNA, 21 bp, synthetic construct
  misc_feature 1..21: note = Description of Artificial Sequence: Synthetic oligonucleotide
  source 1..21: mol_type = other DNA
gtccccgaccacagcgtcaaa

SEQ ID NO: 17538 - DNA, 21 bp, synthetic construct
  misc_feature 1..21: note = Description of Artificial Sequence: Synthetic oligonucleotide
  source 1..21: mol_type = other DNA
tcgagtgggacggtgcctggt

SEQ ID NO: 17539 - DNA, 21 bp, synthetic construct
  misc_feature 1..21: note = Description of Artificial Sequence: Synthetic oligonucleotide
  source 1..21: mol_type = other DNA
aatcttgggacgagtagtggt

SEQ ID NO: 17540 - DNA, 21 bp, synthetic construct
  misc_feature 1..21: note = Description of Artificial Sequence: Synthetic oligonucleotide
  source 1..21: mol_type = other DNA
actcataatactagtaatgcg

SEQ ID NO: 17541 - DNA, 21 bp, synthetic construct
  misc_feature 1..21: note = Description of Artificial Sequence: Synthetic oligonucleotide
  source 1..21: mol_type = other DNA
acgaattcgggtacggggaag

SEQ ID NO: 17542 - DNA, 21 bp, synthetic construct
  misc_feature 1..21: note = Description of Artificial Sequence: Synthetic oligonucleotide
  source 1..21: mol_type = other DNA
aatactcataagacggcgtct

SEQ ID NO: 17543 - DNA, 21 bp, synthetic construct
  misc_feature 1..21: note = Description of Artificial Sequence: Synthetic oligonucleotide
  source 1..21: mol_type = other DNA
aaccccggcgccagccccggc

SEQ ID NO: 17544 - DNA, 21 bp, synthetic construct
  misc_feature 1..21: note = Description of Artificial Sequence: Synthetic oligonucleotide
  source 1..21: mol_type = other DNA
acgggtggatctccgaagaat

SEQ ID NO: 17545 - DNA, 21 bp, synthetic construct
  misc_feature 1..21: note = Description of Artificial Sequence: Synthetic oligonucleotide
  source 1..21: mol_type = other DNA
cacagcggcaaagacagcagc

SEQ ID NO: 17546 - DNA, 21 bp, synthetic construct
  misc_feature 1..21: note = Description of Artificial Sequence: Synthetic oligonucleotide
  source 1..21: mol_type = other DNA
cagggggctgcgacggttgcg

SEQ ID NO: 17547 - DNA, 21 bp, synthetic construct
  misc_feature 1..21: note = Description of Artificial Sequence: Synthetic oligonucleotide
  source 1..21: mol_type = other DNA
cttgtgggtgagaaggctgtt

SEQ ID NO: 17548 - DNA, 21 bp, synthetic construct
  misc_feature 1..21: note = Description of Artificial Sequence: Synthetic oligonucleotide
  source 1..21: mol_type = other DNA
gacaaaagcagcggcaccggc

SEQ ID NO: 17549 - DNA, 21 bp, synthetic construct
  misc_feature 1..21: note = Description of Artificial Sequence: Synthetic oligonucleotide
  source 1..21: mol_type = other DNA
gccgtcggcagcgccaccggc

SEQ ID NO: 17550 - DNA, 21 bp, synthetic construct
  misc_feature 1..21: note = Description of Artificial Sequence: Synthetic oligonucleotide
  source 1..21: mol_type = other DNA
ggtggggtgcctcctactggg

SEQ ID NO: 17551 - DNA, 21 bp, synthetic construct
  misc_feature 1..21: note = Description of Artificial Sequence: Synthetic oligonucleotide
  source 1..21: mol_type = other DNA
agacaagacaaagtcgccgcc

SEQ ID NO: 17552 - DNA, 21 bp, synthetic construct
  misc_feature 1..21: note = Description of Artificial Sequence: Synthetic oligonucleotide
  source 1..21: mol_type = other DNA
gggactcaggagagtagtagg

SEQ ID NO: 17553 - DNA, 21 bp, synthetic construct
  misc_feature 1..21: note = Description of Artificial Sequence: Synthetic oligonucleotide
  source 1..21: mol_type = other DNA
ggcaccaacaaaagcgtcgtc

SEQ ID NO: 17554 - DNA, 21 bp, synthetic construct
  misc_feature 1..21: note = Description of Artificial Sequence: Synthetic oligonucleotide
  source 1..21: mol_type = other DNA
agtgctcagactagttctctg

SEQ ID NO: 17555 - DNA, 21 bp, synthetic construct
  misc_feature 1..21: note = Description of Artificial Sequence: Synthetic oligonucleotide
  source 1..21: mol_type = other DNA
ggtcatgaggggcctaagggg

SEQ ID NO: 17556 - DNA, 21 bp, synthetic construct
  misc_feature 1..21: note = Description of Artificial Sequence: Synthetic oligonucleotide
  source 1..21: mol_type = other DNA
actgggagttcgacgactgct

SEQ ID NO: 17557 - DNA, 21 bp, synthetic construct
  misc_feature 1..21: note = Description of Artificial Sequence: Synthetic oligonucleotide
  source 1..21: mol_type = other DNA
catgaggatgcgaaggctggg

SEQ ID NO: 17558 - DNA, 21 bp, synthetic construct
  misc_feature 1..21: note = Description of Artificial Sequence: Synthetic oligonucleotide
  source 1..21: mol_type = other DNA
ggcggccccgccaccgccacc

SEQ ID NO: 17559 - DNA, 21 bp, synthetic construct
  misc_feature 1..21: note = Description of Artificial Sequence: Synthetic oligonucleotide
  source 1..21: mol_type = other DNA
gacagaaccaacgaagcccac

SEQ ID NO: 17560 - DNA, 21 bp, synthetic construct
  misc_feature 1..21: note = Description of Artificial Sequence: Synthetic oligonucleotide
  source 1..21: mol_type = other DNA
ggtggggggaatcattcggtg

SEQ ID NO: 17561 - DNA, 21 bp, synthetic construct
  misc_feature 1..21: note = Description of Artificial Sequence: Synthetic oligonucleotide
  source 1..21: mol_type = other DNA
gtcaccaacagcaccaccaaa

SEQ ID NO: 17562 - DNA, 21 bp, synthetic construct
  misc_feature 1..21: note = Description of Artificial Sequence: Synthetic oligonucleotide
  source 1..21: mol_type = other DNA
caaagcgcccaaggcgccgcc

SEQ ID NO: 17563 - DNA, 21 bp, synthetic construct
  misc_feature 1..21: note = Description of Artificial Sequence: Synthetic oligonucleotide
  source 1..21: mol_type = other DNA
gacggcagaggcgccaccagc

SEQ ID NO: 17564 - DNA, 21 bp, synthetic construct
  misc_feature 1..21: note = Description of Artificial Sequence: Synthetic oligonucleotide
  source 1..21: mol_type = other DNA
aacggcgccagaagcagcgaa

SEQ ID NO: 17565 - DNA, 21 bp, synthetic construct
  misc_feature 1..21: note = Description of Artificial Sequence: Synthetic oligonucleotide
  source 1..21: mol_type = other DNA
agcgaaagccaaggccacaaa

SEQ ID NO: 17566 - DNA, 21 bp, synthetic construct
  misc_feature 1..21: note = Description of Artificial Sequence: Synthetic oligonucleotide
  source 1..21: mol_type = other DNA
attgcgtcgcagaaggctgag

SEQ ID NO: 17567 - DNA, 21 bp, synthetic construct
  misc_feature 1..21: note = Description of Artificial Sequence: Synthetic oligonucleotide
  source 1..21: mol_type = other DNA
caaaacagccccggcaacgtc

SEQ ID NO: 17568 - DNA, 21 bp, synthetic construct
  misc_feature 1..21: note = Description of Artificial Sequence: Synthetic oligonucleotide
  source 1..21: mol_type = other DNA
atggccgccggcaacgaaaaa

SEQ ID NO: 17569 - DNA, 21 bp, synthetic construct
  misc_feature 1..21: note = Description of Artificial Sequence: Synthetic oligonucleotide
  source 1..21: mol_type = other DNA
gataggggtgagcatagtcgg

SEQ ID NO: 17570 - DNA, 21 bp, synthetic construct
  misc_feature 1..21: note = Description of Artificial Sequence: Synthetic oligonucleotide
  source 1..21: mol_type = other DNA
cacaccaccagccaaaacagc

SEQ ID NO: 17571 - DNA, 21 bp, synthetic construct
  misc_feature 1..21: note = Description of Artificial Sequence: Synthetic oligonucleotide
  source 1..21: mol_type = other DNA
attggttcggggtcgtctacg

SEQ ID NO: 17572 - DNA, 21 bp, synthetic construct
  misc_feature 1..21: note = Description of Artificial Sequence: Synthetic oligonucleotide
  source 1..21: mol_type = other DNA
gatgcgactggtcagagggtg

SEQ ID NO: 17573 - DNA, 21 bp, synthetic construct
  misc_feature 1..21: note = Description of Artificial Sequence: Synthetic oligonucleotide
  source 1..21: mol_type = other DNA
aatcggaatggggcttctggg

SEQ ID NO: 17574 - DNA, 21 bp, synthetic construct
  misc_feature 1..21: note = Description of Artificial Sequence: Synthetic oligonucleotide
  source 1..21: mol_type = other DNA
agcaacggcagcgccagcagc

SEQ ID NO: 17575 - DNA, 21 bp, synthetic construct
  misc_feature 1..21: note = Description of Artificial Sequence: Synthetic oligonucleotide
  source 1..21: mol_type = other DNA
gagcttactaaggctaatacg

SEQ ID NO: 17576 - DNA, 21 bp, synthetic construct
  misc_feature 1..21: note = Description of Artificial Sequence: Synthetic oligonucleotide
  source 1..21: mol_type = other DNA
atgcccaacggcaaccaacaa

SEQ ID NO: 17577 - DNA, 21 bp, synthetic construct
  misc_feature 1..21: note = Description of Artificial Sequence: Synthetic oligonucleotide
  source 1..21: mol_type = other DNA
ggtggggagtctcgttcgtcg

SEQ ID NO: 17578 - DNA, 21 bp, synthetic construct
  misc_feature 1..21: note = Description of Artificial Sequence: Synthetic oligonucleotide
  source 1..21: mol_type = other DNA
gccagcgccagcaaagtcagc

SEQ ID NO: 17579 - DNA, 21 bp, synthetic construct
  misc_feature 1..21: note = Description of Artificial Sequence: Synthetic oligonucleotide
  source 1..21: mol_type = other DNA
agttctactccgagtagtgct

SEQ ID NO: 17580 - DNA, 21 bp, synthetic construct
  misc_feature 1..21: note = Description of Artificial Sequence: Synthetic oligonucleotide
  source 1..21: mol_type = other DNA
tctagtgtgagtggtagtaat

SEQ ID NO: 17581 - DNA, 21 bp, synthetic construct
  misc_feature 1..21: note = Description of Artificial Sequence: Synthetic oligonucleotide
  source 1..21: mol_type = other DNA
agcacccaaagcgacagaagc

SEQ ID NO: 17582 - DNA, 21 bp, synthetic construct
  misc_feature 1..21: note = Description of Artificial Sequence: Synthetic oligonucleotide
  source 1..21: mol_type = other DNA
gtcagcaacggcagcggcgcc

SEQ ID NO: 17583 - DNA, 21 bp, synthetic construct
  misc_feature 1..21: note = Description of Artificial Sequence: Synthetic oligonucleotide
  source 1..21: mol_type = other DNA
tctaataatagtggtcctact

SEQ ID NO: 17584 - DNA, 21 bp, synthetic construct
  misc_feature 1..21: note = Description of Artificial Sequence: Synthetic oligonucleotide
  source 1..21: mol_type = other DNA
ttgactccgggtactgctgcg

SEQ ID NO: 17585 - DNA, 21 bp, synthetic construct
  misc_feature 1..21: note = Description of Artificial Sequence: Synthetic oligonucleotide
  source 1..21: mol_type = other DNA
agtaatgcttcgcctcatgcg

SEQ ID NO: 17586 - DNA, 21 bp, synthetic construct
  misc_feature 1..21: note = Description of Artificial Sequence: Synthetic oligonucleotide
  source 1..21: mol_type = other DNA
actaatgcgagttctactgcg

SEQ ID NO: 17587 - DNA, 21 bp, synthetic construct
  misc_feature 1..21: note = Description of Artificial Sequence: Synthetic oligonucleotide
  source 1..21: mol_type = other DNA
gctggtcataaggagactact

SEQ ID NO: 17588 - DNA, 21 bp, synthetic construct
  misc_feature 1..21: note = Description of Artificial Sequence: Synthetic oligonucleotide
  source 1..21: mol_type = other DNA
ggcagcgaagccaccgccaaa

SEQ ID NO: 17589 - DNA, 21 bp, synthetic construct
  misc_feature 1..21: note = Description of Artificial Sequence: Synthetic oligonucleotide
  source 1..21: mol_type = other DNA
ggcgccaccagcccccaccaa

SEQ ID NO: 17590 - DNA, 21 bp, synthetic construct
  misc_feature 1..21: note = Description of Artificial Sequence: Synthetic oligonucleotide
  source 1..21: mol_type = other DNA
aattcgggttctcctggttcg

SEQ ID NO: 17591 - DNA, 21 bp, synthetic construct
  misc_feature 1..21: note = Description of Artificial Sequence: Synthetic oligonucleotide
  source 1..21: mol_type = other DNA
agcgtcggcaacagcagcagc

SEQ ID NO: 17592 - DNA, 21 bp, synthetic construct
  misc_feature 1..21: note = Description of Artificial Sequence: Synthetic oligonucleotide
  source 1..21: mol_type = other DNA
agtcgggtgaagaatgagagt

SEQ ID NO: 17593 - DNA, 21 bp, synthetic construct
  misc_feature 1..21: note = Description of Artificial Sequence: Synthetic oligonucleotide
  source 1..21: mol_type = other DNA
actagtgcggggtcgaaggat

SEQ ID NO: 17594 - DNA, 21 bp, synthetic construct
  misc_feature 1..21: note = Description of Artificial Sequence: Synthetic oligonucleotide
  source 1..21: mol_type = other DNA
agcagagaaaaaaccgaacac

SEQ ID NO: 17595 - DNA, 21 bp, synthetic construct
  misc_feature 1..21: note = Description of Artificial Sequence: Synthetic oligonucleotide
  source 1..21: mol_type = other DNA
agcaacggcaccagcagcggc

SEQ ID NO: 17596 - DNA, 21 bp, synthetic construct
  misc_feature 1..21: note = Description of Artificial Sequence: Synthetic oligonucleotide
  source 1..21: mol_type = other DNA
aacggcggcaaaggcagcagc

SEQ ID NO: 17597 - DNA, 21 bp, synthetic construct
  misc_feature 1..21: note = Description of Artificial Sequence: Synthetic oligonucleotide
  source 1..21: mol_type = other DNA
aagactgcgcaggtgtcggcg

SEQ ID NO: 17598 - DNA, 21 bp, synthetic construct
  misc_feature 1..21: note = Description of Artificial Sequence: Synthetic oligonucleotide
  source 1..21: mol_type = other DNA
caaagcaaaagccccagccac

SEQ ID NO: 17599 - DNA, 21 bp, synthetic construct
  misc_feature 1..21: note = Description of Artificial Sequence: Synthetic oligonucleotide
  source 1..21: mol_type = other DNA
cataatggggagcagagtcgt

SEQ ID NO: 17600 - DNA, 21 bp, synthetic construct
  misc_feature 1..21: note = Description of Artificial Sequence: Synthetic oligonucleotide
  source 1..21: mol_type = other DNA
gagagtacgactccgggtcgt

SEQ ID NO: 17601 - DNA, 21 bp, synthetic construct
  misc_feature 1..21: note = Description of Artificial Sequence: Synthetic oligonucleotide
  source 1..21: mol_type = other DNA
agcagcgaaagcaaaagcgtc

SEQ ID NO: 17602 - DNA, 21 bp, synthetic construct
  misc_feature 1..21: note = Description of Artificial Sequence: Synthetic oligonucleotide
  source 1..21: mol_type = other DNA
cagactgggtcttcgaatggt

SEQ ID NO: 17603 - DNA, 21 bp, synthetic construct
  misc_feature 1..21: note = Description of Artificial Sequence: Synthetic oligonucleotide
  source 1..21: mol_type = other DNA
gaaagcgccagccacagcaga

SEQ ID NO: 17604 - DNA, 21 bp, synthetic construct
  misc_feature 1..21: note = Description of Artificial Sequence: Synthetic oligonucleotide
  source 1..21: mol_type = other DNA
gaggctcattctgcgaataag

SEQ ID NO: 17605 - DNA, 21 bp, synthetic construct
  misc_feature 1..21: note = Description of Artificial Sequence: Synthetic oligonucleotide
  source 1..21: mol_type = other DNA
ggcgacaaaaccagcctcaaa

SEQ ID NO: 17606 - DNA, 21 bp, synthetic construct
  misc_feature 1..21: note = Description of Artificial Sequence: Synthetic oligonucleotide
  source 1..21: mol_type = other DNA
gccggcgtcagcaaacccagc

SEQ ID NO: 17607 - DNA, 21 bp, synthetic construct
  misc_feature 1..21: note = Description of Artificial Sequence: Synthetic oligonucleotide
  source 1..21: mol_type = other DNA
acccacggcgccagcagcagc

SEQ ID NO: 17608 - DNA, 21 bp, synthetic construct
  misc_feature 1..21: note = Description of Artificial Sequence: Synthetic oligonucleotide
  source 1..21: mol_type = other DNA
agcaccggcagcggcagcagc

SEQ ID NO: 17609 - DNA, 21 bp, synthetic construct
  misc_feature 1..21: note = Description of Artificial Sequence: Synthetic oligonucleotide
  source 1..21: mol_type = other DNA
cggaagggggctagtacggag

SEQ ID NO: 17610 - DNA, 21 bp, synthetic construct
  misc_feature 1..21: note = Description of Artificial Sequence: Synthetic oligonucleotide
  source 1..21: mol_type = other DNA
tcgttgacggataagtcttct

SEQ ID NO: 17611 - DNA, 21 bp, synthetic construct
  misc_feature 1..21: note = Description of Artificial Sequence: Synthetic oligonucleotide
  source 1..21: mol_type = other DNA
ctcgccaccaaagacaacagc

SEQ ID NO: 17612 - DNA, 21 bp, synthetic construct
  misc_feature 1..21: note = Description of Artificial Sequence: Synthetic oligonucleotide
  source 1..21: mol_type = other DNA
aagaatggtagtacgcctgag

SEQ ID NO: 17613 - DNA, 21 bp, synthetic construct
  misc_feature 1..21: note = Description of Artificial Sequence: Synthetic oligonucleotide
  source 1..21: mol_type = other DNA
tctacggctacttctgcggcg

SEQ ID NO: 17614 - DNA, 21 bp, synthetic construct
  misc_feature 1..21: note = Description of Artificial Sequence: Synthetic oligonucleotide
  source 1..21: mol_type = other DNA
accaccaccaccaaaagcagc

SEQ ID NO: 17615 - DNA, 21 bp, synthetic construct
  misc_feature 1..21: note = Description of Artificial Sequence: Synthetic oligonucleotide
  source 1..21: mol_type = other DNA
acccaaggcaaccccagccaa

SEQ ID NO: 17616 - DNA, 21 bp, synthetic construct
  misc_feature 1..21: note = Description of Artificial Sequence: Synthetic oligonucleotide
  source 1..21: mol_type = other DNA
gttagtgggtctggtggtaag

SEQ ID NO: 17617 - DNA, 21 bp, synthetic construct
  misc_feature 1..21: note = Description of Artificial Sequence: Synthetic oligonucleotide
  source 1..21: mol_type = other DNA
atgcccaaaaacacccccagc

SEQ ID NO: 17618 - DNA, 21 bp, synthetic construct
  misc_feature 1..21: note = Description of Artificial Sequence: Synthetic oligonucleotide
  source 1..21: mol_type = other DNA
tctcagaagtctccgccgatt

SEQ ID NO: 17619 - DNA, 21 bp, synthetic construct
  misc_feature 1..21: note = Description of Artificial Sequence: Synthetic oligonucleotide
  source 1..21: mol_type = other DNA
gacagcatcagagaaagcaaa

SEQ ID NO: 17620 - DNA, 21 bp, synthetic construct
  misc_feature 1..21: note = Description of Artificial Sequence: Synthetic oligonucleotide
  source 1..21: mol_type = other DNA
gccggcgaccaaagcaaactc

SEQ ID NO: 17621 - DNA, 21 bp, synthetic construct
  misc_feature 1..21: note = Description of Artificial Sequence: Synthetic oligonucleotide
  source 1..21: mol_type = other DNA
gaacacaacggcggcaacaaa

SEQ ID NO: 17622 - DNA, 21 bp, synthetic construct
  misc_feature 1..21: note = Description of Artificial Sequence: Synthetic oligonucleotide
  source 1..21: mol_type = other DNA
tcgactatgacgacttcgagt

SEQ ID NO: 17623 - DNA, 21 bp, synthetic construct
  misc_feature 1..21: note = Description of Artificial Sequence: Synthetic oligonucleotide
  source 1..21: mol_type = other DNA
tctaatgcgtctaagaatgag

SEQ ID NO: 17624 - DNA, 21 bp, synthetic construct
  misc_feature 1..21: note = Description of Artificial Sequence: Synthetic oligonucleotide
  source 1..21: mol_type = other DNA
ggcaacggcagcggccccagc

SEQ ID NO: 17625 - DNA, 21 bp, synthetic construct
  misc_feature 1..21: note = Description of Artificial Sequence: Synthetic oligonucleotide
  source 1..21: mol_type = other DNA
actactcatacgactagtggt

SEQ ID NO: 17626 - DNA, 21 bp, synthetic construct
  misc_feature 1..21: note = Description of Artificial Sequence: Synthetic oligonucleotide
  source 1..21: mol_type = other DNA
tctcaggagcctagtcgtggg

SEQ ID NO: 17627 - DNA, 21 bp, synthetic construct
  misc_feature 1..21: note = Description of Artificial Sequence: Synthetic oligonucleotide
  source 1..21: mol_type = other DNA
agcaaacaacaaagcagcgaa

SEQ ID NO: 17628 - DNA, 21 bp, synthetic construct
  misc_feature 1..21: note = Description of Artificial Sequence: Synthetic oligonucleotide
  source 1..21: mol_type = other DNA
gacagcagcggcaaagccaac

SEQ ID NO: 17629 - DNA, 21 bp, synthetic construct
  misc_feature 1..21: note = Description of Artificial Sequence: Synthetic oligonucleotide
  source 1..21: mol_type = other DNA
ggcgccaacaacagcagcacc

SEQ ID NO: 17630 - DNA, 21 bp, synthetic construct
  misc_feature 1..21: note = Description of Artificial Sequence: Synthetic oligonucleotide
  source 1..21: mol_type = other DNA
atggatgggtcgagtcctcat

SEQ ID NO: 17631 - DNA, 21 bp, synthetic construct
  misc_feature 1..21: note = Description of Artificial Sequence: Synthetic oligonucleotide
  source 1..21: mol_type = other DNA
gaccccagcagcagaccccaa

SEQ ID NO: 17632 - DNA, 21 bp, synthetic construct
  misc_feature 1..21: note = Description of Artificial Sequence: Synthetic oligonucleotide
  source 1..21: mol_type = other DNA
gctggggagactggtattaag

SEQ ID NO: 17633 - DNA, 21 bp, synthetic construct
  misc_feature 1..21: note = Description of Artificial Sequence: Synthetic oligonucleotide
  source 1..21: mol_type = other DNA
ggcaacagccaaacccaaggc

SEQ ID NO: 17634 - DNA, 21 bp, synthetic construct
  misc_feature 1..21: note = Description of Artificial Sequence: Synthetic oligonucleotide
  source 1..21: mol_type = other DNA
acggggcagactagtacgtcg

SEQ ID NO: 17635 - DNA, 21 bp, synthetic construct
  misc_feature 1..21: note = Description of Artificial Sequence: Synthetic oligonucleotide
  source 1..21: mol_type = other DNA
gtcgccagcaaaagcaccgtc

SEQ ID NO: 17636 - DNA, 21 bp, synthetic construct
  misc_feature 1..21: note = Description of Artificial Sequence: Synthetic oligonucleotide
  source 1..21: mol_type = other DNA
gagggtgcgaatcatgcgtcg

SEQ ID NO: 17637 - DNA, 21 bp, synthetic construct
  misc_feature 1..21: note = Description of Artificial Sequence: Synthetic oligonucleotide
  source 1..21: mol_type = other DNA
ctgaatacgccttctgctgcg

SEQ ID NO: 17638 - DNA, 21 bp, synthetic construct
  misc_feature 1..21: note = Description of Artificial Sequence: Synthetic oligonucleotide
  source 1..21: mol_type = other DNA
caagccagcgacaaaacctac

SEQ ID NO: 17639 - DNA, 21 bp, synthetic construct
  misc_feature 1..21: note = Description of Artificial Sequence: Synthetic oligonucleotide
  source 1..21: mol_type = other DNA
agtcaggggggttcgacttcg

SEQ ID NO: 17640 - DNA, 21 bp, synthetic construct
  misc_feature 1..21: note = Description of Artificial Sequence: Synthetic oligonucleotide
  source 1..21: mol_type = other DNA
cttgatgggaagaattctatg

SEQ ID NO: 17641 - DNA, 21 bp, synthetic construct
  misc_feature 1..21: note = Description of Artificial Sequence: Synthetic oligonucleotide
  source 1..21: mol_type = other DNA
atgaatacgccgaatcctcat

SEQ ID NO: 17642 - DNA, 21 bp, synthetic construct
  misc_feature 1..21: note = Description of Artificial Sequence: Synthetic oligonucleotide
  source 1..21: mol_type = other DNA
gacgtccccagcaaaagcgcc

SEQ ID NO: 17643 - DNA, 21 bp, synthetic construct
  misc_feature 1..21: note = Description of Artificial Sequence: Synthetic oligonucleotide
  source 1..21: mol_type = other DNA
ggcatcagcaacggcaacagc

SEQ ID NO: 17644 - DNA, 21 bp, synthetic construct
  misc_feature 1..21: note = Description of Artificial Sequence: Synthetic oligonucleotide
  source 1..21: mol_type = other DNA
gccctcagcagcagcaacaaa

SEQ ID NO: 17645 - DNA, 21 bp, synthetic construct
  misc_feature 1..21: note = Description of Artificial Sequence: Synthetic oligonucleotide
  source 1..21: mol_type = other DNA
gtcagcagcaaagaagccacc

SEQ ID NO: 17646 - DNA, 21 bp, synthetic construct
  misc_feature 1..21: note = Description of Artificial Sequence: Synthetic oligonucleotide
  source 1..21: mol_type = other DNA
tctgggggggcgccgagtacg

SEQ ID NO: 17647 - DNA, 21 bp, synthetic construct
  misc_feature 1..21: note = Description of Artificial Sequence: Synthetic oligonucleotide
  source 1..21: mol_type = other DNA
aatgatacgtcggggacccgt

SEQ ID NO: 17648 - DNA, 21 bp, synthetic construct
  misc_feature 1..21: note = Description of Artificial Sequence: Synthetic oligonucleotide
  source 1..21: mol_type = other DNA
accggcagcgaaagcgtcaga

SEQ ID NO: 17649 - DNA, 21 bp, synthetic construct
  misc_feature 1..21: note = Description of Artificial Sequence: Synthetic oligonucleotide
  source 1..21: mol_type = other DNA
ggcgacggcaaaagcaccatc

SEQ ID NO: 17650 - DNA, 21 bp, synthetic construct
  misc_feature 1..21: note = Description of Artificial Sequence: Synthetic oligonucleotide
  source 1..21: mol_type = other DNA
ctcagcggcgaccccagaggc

SEQ ID NO: 17651 - DNA, 21 bp, synthetic construct
  misc_feature 1..21: note = Description of Artificial Sequence: Synthetic oligonucleotide
  source 1..21: mol_type = other DNA
ggttcggtgccgggtaatact

SEQ ID NO: 17652 - DNA, 21 bp, synthetic construct
  misc_feature 1..21: note = Description of Artificial Sequence: Synthetic oligonucleotide
  source 1..21: mol_type = other DNA
acgactacgagtactacggcg

SEQ ID NO: 17653 - DNA, 21 bp, synthetic construct
  misc_feature 1..21: note = Description of Artificial Sequence: Synthetic oligonucleotide
  source 1..21: mol_type = other DNA
caaaacgccaccgccgtcagc

SEQ ID NO: 17654 - DNA, 21 bp, synthetic construct
  misc_feature 1..21: note = Description of Artificial Sequence: Synthetic oligonucleotide
  source 1..21: mol_type = other DNA
caagtccccgaaggccaaaaa

SEQ ID NO: 17655 - DNA, 21 bp, synthetic construct
  misc_feature 1..21: note = Description of Artificial Sequence: Synthetic oligonucleotide
  source 1..21: mol_type = other DNA
agcaccagcaaaaccgaaagc

SEQ ID NO: 17656 - DNA, 21 bp, synthetic construct
  misc_feature 1..21: note = Description of Artificial Sequence: Synthetic oligonucleotide
  source 1..21: mol_type = other DNA
gaaagcggcagccacagcgcc

SEQ ID NO: 17657 - DNA, 21 bp, synthetic construct
  misc_feature 1..21: note = Description of Artificial Sequence: Synthetic oligonucleotide
  source 1..21: mol_type = other DNA
ggcagcaccgccgccccccac

SEQ ID NO: 17658 - DNA, 21 bp, synthetic construct
  misc_feature 1..21: note = Description of Artificial Sequence: Synthetic oligonucleotide
  source 1..21: mol_type = other DNA
aatggtgcgccgactgcgtcg

SEQ ID NO: 17659 - DNA, 21 bp, synthetic construct
  misc_feature 1..21: note = Description of Artificial Sequence: Synthetic oligonucleotide
  source 1..21: mol_type = other DNA
accggcagcagccccagcacc

SEQ ID NO: 17660 - DNA, 21 bp, synthetic construct
  misc_feature 1..21: note = Description of Artificial Sequence: Synthetic oligonucleotide
  source 1..21: mol_type = other DNA
gtgactggtaatgagtcgaag

SEQ ID NO: 17661 - DNA, 21 bp, synthetic construct
  misc_feature 1..21: note = Description of Artificial Sequence: Synthetic oligonucleotide
  source 1..21: mol_type = other DNA
tctggtgcgactacttcgggt

SEQ ID NO: 17662 - DNA, 21 bp, synthetic construct
  misc_feature 1..21: note = Description of Artificial Sequence: Synthetic oligonucleotide
  source 1..21: mol_type = other DNA
gcgggtgctaatagtacgctt

SEQ ID NO: 17663 - DNA, 21 bp, synthetic construct
  misc_feature 1..21: note = Description of Artificial Sequence: Synthetic oligonucleotide
  source 1..21: mol_type = other DNA
cagcaggatggttcgcatcat

SEQ ID NO: 17664 - DNA, 21 bp, synthetic construct
  misc_feature 1..21: note = Description of Artificial Sequence: Synthetic oligonucleotide
  source 1..21: mol_type = other DNA
ggcgccagcaccagcccccac

SEQ ID NO: 17665 - DNA, 21 bp, synthetic construct
  misc_feature 1..21: note = Description of Artificial Sequence: Synthetic oligonucleotide
  source 1..21: mol_type = other DNA
aacagaggcagcggcaccagc

SEQ ID NO: 17666 - DNA, 21 bp, synthetic construct
  misc_feature 1..21: note = Description of Artificial Sequence: Synthetic oligonucleotide
  source 1..21: mol_type = other DNA
aatagtaattcttcggcgggt

SEQ ID NO: 17667 - DNA, 21 bp, synthetic construct
  misc_feature 1..21: note = Description of Artificial Sequence: Synthetic oligonucleotide
  source 1..21: mol_type = other DNA
cagtcggggggtactagtcat

SEQ ID NO: 17668 - DNA, 21 bp, synthetic construct
  misc_feature 1..21: note = Description of Artificial Sequence: Synthetic oligonucleotide
  source 1..21: mol_type = other DNA
gtgtctgggaaggagactagt

SEQ ID NO: 17669 - DNA, 21 bp, synthetic construct
  misc_feature 1..21: note = Description of Artificial Sequence: Synthetic oligonucleotide
  source 1..21: mol_type = other DNA
gggacgaataaggatttgcgt

SEQ ID NO: 17670 - DNA, 21 bp, synthetic construct
  misc_feature 1..21: note = Description of Artificial Sequence: Synthetic oligonucleotide
  source 1..21: mol_type = other DNA
caactcagcggcggcaccaaa

SEQ ID NO: 17671 - DNA, 21 bp, synthetic construct
  misc_feature 1..21: note = Description of Artificial Sequence: Synthetic oligonucleotide
  source 1..21: mol_type = other DNA
gatgctactttgaagggtaat

SEQ ID NO: 17672 - DNA, 21 bp, synthetic construct
  misc_feature 1..21: note = Description of Artificial Sequence: Synthetic oligonucleotide
  source 1..21: mol_type = other DNA
gccggcaaccaagtcgccagc

SEQ ID NO: 17673 - DNA, 21 bp, synthetic construct
  misc_feature 1..21: note = Description of Artificial Sequence: Synthetic oligonucleotide
  source 1..21: mol_type = other DNA
gctagtaatgagaagggtggg

SEQ ID NO: 17674 - DNA, 21 bp, synthetic construct
  misc_feature 1..21: note = Description of Artificial Sequence: Synthetic oligonucleotide
  source 1..21: mol_type = other DNA
acttctagtagtgcggcgacg

SEQ ID NO: 17675 - DNA, 21 bp, synthetic construct
  misc_feature 1..21: note = Description of Artificial Sequence: Synthetic oligonucleotide
  source 1..21: mol_type = other DNA
actagggatactggttcggtg

SEQ ID NO: 17676 - DNA, 21 bp, synthetic construct
  misc_feature 1..21: note = Description of Artificial Sequence: Synthetic oligonucleotide
  source 1..21: mol_type = other DNA
aaactcagcaaacccagcgac

SEQ ID NO: 17677 - DNA, 21 bp, synthetic construct
  misc_feature 1..21: note = Description of Artificial Sequence: Synthetic oligonucleotide
  source 1..21: mol_type = other DNA
atgggcgaaagcaaaatcatg

SEQ ID NO: 17678 - DNA, 21 bp, synthetic construct
  misc_feature 1..21: note = Description of Artificial Sequence: Synthetic oligonucleotide
  source 1..21: mol_type = other DNA
ggtgatgctaagaatttggcg

SEQ ID NO: 17679 - DNA, 21 bp, synthetic construct
  misc_feature 1..21: note = Description of Artificial Sequence: Synthetic oligonucleotide
  source 1..21: mol_type = other DNA
tcgcagggtagtagtacggag

SEQ ID NO: 17680 - DNA, 21 bp, synthetic construct
  misc_feature 1..21: note = Description of Artificial Sequence: Synthetic oligonucleotide
  source 1..21: mol_type = other DNA
aacaccggcagcagcggccaa

SEQ ID NO: 17681 - DNA, 21 bp, synthetic construct
  misc_feature 1..21: note = Description of Artificial Sequence: Synthetic oligonucleotide
  source 1..21: mol_type = other DNA
gaaagaggcgccagcagcatc

SEQ ID NO: 17682 - DNA, 21 bp, synthetic construct
  misc_feature 1..21: note = Description of Artificial Sequence: Synthetic oligonucleotide
  source 1..21: mol_type = other DNA
gccaccaccgccagcaaaggc

SEQ ID NO: 17683 - DNA, 21 bp, synthetic construct
  misc_feature 1..21: note = Description of Artificial Sequence: Synthetic oligonucleotide
  source 1..21: mol_type = other DNA
gctgcggatgcgaaggggtct

SEQ ID NO: 17684 - DNA, 21 bp, synthetic construct
  misc_feature 1..21: note = Description of Artificial Sequence: Synthetic oligonucleotide
  source 1..21: mol_type = other DNA
ggccaaggcagcgaaagcaga

SEQ ID NO: 17685 - DNA, 21 bp, synthetic construct
  misc_feature 1..21: note = Description of Artificial Sequence: Synthetic oligonucleotide
  source 1..21: mol_type = other DNA
aacgccagcaaccacaaagaa

SEQ ID NO: 17686 - DNA, 21 bp, synthetic construct
  misc_feature 1..21: note = Description of Artificial Sequence: Synthetic oligonucleotide
  source 1..21: mol_type = other DNA
ggtaatgcggataataggcat

SEQ ID NO: 17687 - DNA, 21 bp, synthetic construct
  misc_feature 1..21: note = Description of Artificial Sequence: Synthetic oligonucleotide
  source 1..21: mol_type = other DNA
agttctaatagtcctaatatg

SEQ ID NO: 17688 - DNA, 21 bp, synthetic construct
  misc_feature 1..21: note = Description of Artificial Sequence: Synthetic oligonucleotide
  source 1..21: mol_type = other DNA
agcggcagccaacccgtcggc

SEQ ID NO: 17689 - DNA, 21 bp, synthetic construct
  misc_feature 1..21: note = Description of Artificial Sequence: Synthetic oligonucleotide
  source 1..21: mol_type = other DNA
agtaatagtgagaggtctgct

SEQ ID NO: 17690 - DNA, 21 bp, synthetic construct
  misc_feature 1..21: note = Description of Artificial Sequence: Synthetic oligonucleotide
  source 1..21: mol_type = other DNA
agtgttgatcaggtgaatagg

SEQ ID NO: 17691 - DNA, 21 bp, synthetic construct
  misc_feature 1..21: note = Description of Artificial Sequence: Synthetic oligonucleotide
  source 1..21: mol_type = other DNA
ggccccgccaaaagcagcatc

SEQ ID NO: 17692 - DNA, 21 bp, synthetic construct
  misc_feature 1..21: note = Description of Artificial Sequence: Synthetic oligonucleotide
  source 1..21: mol_type = other DNA
ggggttggtagtagtaatctt

SEQ ID NO: 17693 - DNA, 21 bp, synthetic construct
  misc_feature 1..21: note = Description of Artificial Sequence: Synthetic oligonucleotide
  source 1..21: mol_type = other DNA
aataataataagtcttcgact

SEQ ID NO: 17694 - DNA, 21 bp, synthetic construct
  misc_feature 1..21: note = Description of Artificial Sequence: Synthetic oligonucleotide
  source 1..21: mol_type = other DNA
gcgggtaatagtccttctctt

SEQ ID NO: 17695 - DNA, 21 bp, synthetic construct
  misc_feature 1..21: note = Description of Artificial Sequence: Synthetic oligonucleotide
  source 1..21: mol_type = other DNA
ggcagagacgccgtcatcggc

SEQ ID NO: 17696 - DNA, 21 bp, synthetic construct
  misc_feature 1..21: note = Description of Artificial Sequence: Synthetic oligonucleotide
  source 1..21: mol_type = other DNA
actagtagtacgtctacgcag

SEQ ID NO: 17697 - DNA, 21 bp, synthetic construct
  misc_feature 1..21: note = Description of Artificial Sequence: Synthetic oligonucleotide
  source 1..21: mol_type = other DNA
gaagtcgccaaaaccagccaa

SEQ ID NO: 17698 - DNA, 21 bp, synthetic construct
  misc_feature 1..21: note = Description of Artificial Sequence: Synthetic oligonucleotide
  source 1..21: mol_type = other DNA
accgaccaaagccaagtcaaa

SEQ ID NO: 17699 - DNA, 21 bp, synthetic construct
  misc_feature 1..21: note = Description of Artificial Sequence: Synthetic oligonucleotide
  source 1..21: mol_type = other DNA
acgcaggctacggcgactgtt

SEQ ID NO: 17700 - DNA, 21 bp, synthetic construct
  misc_feature 1..21: note = Description of Artificial Sequence: Synthetic oligonucleotide
  source 1..21: mol_type = other DNA
gacggcagcggccaaaaccaa

SEQ ID NO: 17701 - DNA, 21 bp, synthetic construct
  misc_feature 1..21: note = Description of Artificial Sequence: Synthetic oligonucleotide
  source 1..21: mol_type = other DNA
gccggcgtcggcagcaccccc

SEQ ID NO: 17702 - DNA, 21 bp, synthetic construct
  misc_feature 1..21: note = Description of Artificial Sequence: Synthetic oligonucleotide
  source 1..21: mol_type = other DNA
aatagtagtaagccgtctgag

SEQ ID NO: 17703 - DNA, 21 bp, synthetic construct
  misc_feature 1..21: note = Description of Artificial Sequence: Synthetic oligonucleotide
  source 1..21: mol_type = other DNA
agcggcggcgccagcggcagc

SEQ ID NO: 17704 - DNA, 21 bp, synthetic construct
  misc_feature 1..21: note = Description of Artificial Sequence: Synthetic oligonucleotide
  source 1..21: mol_type = other DNA
catagtaatcagtcgagtagt

SEQ ID NO: 17705 - DNA, 21 bp, synthetic construct
  misc_feature 1..21: note = Description of Artificial Sequence: Synthetic oligonucleotide
  source 1..21: mol_type = other DNA
gtgactcctagtaatccgccg

SEQ ID NO: 17706 - DNA, 21 bp, synthetic construct
  misc_feature 1..21: note = Description of Artificial Sequence: Synthetic oligonucleotide
  source 1..21: mol_type = other DNA
accggcgccagcgtcaacgaa

SEQ ID NO: 17707 - DNA, 21 bp, synthetic construct
  misc_feature 1..21: note = Description of Artificial Sequence: Synthetic oligonucleotide
  source 1..21: mol_type = other DNA
gcccaaggccccaccagcggc

SEQ ID NO: 17708 - DNA, 21 bp, synthetic construct
  misc_feature 1..21: note = Description of Artificial Sequence: Synthetic oligonucleotide
  source 1..21: mol_type = other DNA
gctggtccgactaataatcag

SEQ ID NO: 17709 - DNA, 21 bp, synthetic construct
  misc_feature 1..21: note = Description of Artificial Sequence: Synthetic oligonucleotide
  source 1..21: mol_type = other DNA
aacagcggcgccgacctcaaa

SEQ ID NO: 17710 - DNA, 21 bp, synthetic construct
  misc_feature 1..21: note = Description of Artificial Sequence: Synthetic oligonucleotide
  source 1..21: mol_type = other DNA
gattctgctgggaagccttcg

SEQ ID NO: 17711 - DNA, 21 bp, synthetic construct
  misc_feature 1..21: note = Description of Artificial Sequence: Synthetic oligonucleotide
  source 1..21: mol_type = other DNA
agcaacggcagcagcatcgcc

SEQ ID NO: 17712 - DNA, 21 bp, synthetic construct
  misc_feature 1..21: note = Description of Artificial Sequence: Synthetic oligonucleotide
  source 1..21: mol_type = other DNA
agaaccaacagcgaacccaaa

SEQ ID NO: 17713 - DNA, 21 bp, synthetic construct
  misc_feature 1..21: note = Description of Artificial Sequence: Synthetic oligonucleotide
  source 1..21: mol_type = other DNA
caaaccgacaaacccaacagc

SEQ ID NO: 17714 - DNA, 21 bp, synthetic construct
  misc_feature 1..21: note = Description of Artificial Sequence: Synthetic oligonucleotide
  source 1..21: mol_type = other DNA
gagggtcagccggctattcgg

SEQ ID NO: 17715 - DNA, 21 bp, synthetic construct
  misc_feature 1..21: note = Description of Artificial Sequence: Synthetic oligonucleotide
  source 1..21: mol_type = other DNA
ggtactgtgaatgggaagggg

SEQ ID NO: 17716 - DNA, 21 bp, synthetic construct
  misc_feature 1..21: note = Description of Artificial Sequence: Synthetic oligonucleotide
  source 1..21: mol_type = other DNA
gccggcaccgacaaaagaacc

SEQ ID NO: 17717 - DNA, 21 bp, synthetic construct
  misc_feature 1..21: note = Description of Artificial Sequence: Synthetic oligonucleotide
  source 1..21: mol_type = other DNA
acgtcgcctgggaagccgctt

SEQ ID NO: 17718 - DNA, 21 bp, synthetic construct
  misc_feature 1..21: note = Description of Artificial Sequence: Synthetic oligonucleotide
  source 1..21: mol_type = other DNA
catgctggtaagtctaatact

SEQ ID NO: 17719 - DNA, 21 bp, synthetic construct
  misc_feature 1..21: note = Description of Artificial Sequence: Synthetic oligonucleotide
  source 1..21: mol_type = other DNA
aatgctaatcctcctaatact

SEQ ID NO: 17720 - DNA, 21 bp, synthetic construct
  misc_feature 1..21: note = Description of Artificial Sequence: Synthetic oligonucleotide
  source 1..21: mol_type = other DNA
agtgatgtttctggggctaag

SEQ ID NO: 17721 - DNA, 21 bp, synthetic construct
  misc_feature 1..21: note = Description of Artificial Sequence: Synthetic oligonucleotide
  source 1..21: mol_type = other DNA
tctgggactaatgtgactgct

SEQ ID NO: 17722 - DNA, 21 bp, synthetic construct
  misc_feature 1..21: note = Description of Artificial Sequence: Synthetic oligonucleotide
  source 1..21: mol_type = other DNA
agcaacggcagccccaccgcc

SEQ ID NO: 17723 - DNA, 21 bp, synthetic construct
  misc_feature 1..21: note = Description of Artificial Sequence: Synthetic oligonucleotide
  source 1..21: mol_type = other DNA
actggtaatgggcctacttcg

SEQ ID NO: 17724 - DNA, 21 bp, synthetic construct
  misc_feature 1..21: note = Description of Artificial Sequence: Synthetic oligonucleotide
  source 1..21: mol_type = other DNA
gatgcggtgcatggtaaggct

SEQ ID NO: 17725 - DNA, 21 bp, synthetic construct
  misc_feature 1..21: note = Description of Artificial Sequence: Synthetic oligonucleotide
  source 1..21: mol_type = other DNA
ggtactacttcttctcctagt

SEQ ID NO: 17726 - DNA, 21 bp, synthetic construct
  misc_feature 1..21: note = Description of Artificial Sequence: Synthetic oligonucleotide
  source 1..21: mol_type = other DNA
aacggcaccaccagaagccaa

SEQ ID NO: 17727 - DNA, 21 bp, synthetic construct
  misc_feature 1..21: note = Description of Artificial Sequence: Synthetic oligonucleotide
  source 1..21: mol_type = other DNA
agagacggcaccagcgccacc

SEQ ID NO: 17728 - DNA, 21 bp, synthetic construct
  misc_feature 1..21: note = Description of Artificial Sequence: Synthetic oligonucleotide
  source 1..21: mol_type = other DNA
agccccagcaaagaaaaagtc

SEQ ID NO: 17729 - DNA, 21 bp, synthetic construct
  misc_feature 1..21: note = Description of Artificial Sequence: Synthetic oligonucleotide
  source 1..21: mol_type = other DNA
catattagtcctacgaagggg

SEQ ID NO: 17730 - DNA, 21 bp, synthetic construct
  misc_feature 1..21: note = Description of Artificial Sequence: Synthetic oligonucleotide
  source 1..21: mol_type = other DNA
gatacgaagccgggtactagt

SEQ ID NO: 17731 - DNA, 21 bp, synthetic construct
  misc_feature 1..21: note = Description of Artificial Sequence: Synthetic oligonucleotide
  source 1..21: mol_type = other DNA
ggcagaaaaagcgaaggcggc

SEQ ID NO: 17732 - DNA, 21 bp, synthetic construct
  misc_feature 1..21: note = Description of Artificial Sequence: Synthetic oligonucleotide
  source 1..21: mol_type = other DNA
agcagcgacaccaccagcaaa

SEQ ID NO: 17733 - DNA, 21 bp, synthetic construct
  misc_feature 1..21: note = Description of Artificial Sequence: Synthetic oligonucleotide
  source 1..21: mol_type = other DNA
gacaacaacagaaaccccgtc

SEQ ID NO: 17734 - DNA, 21 bp, synthetic construct
  misc_feature 1..21: note = Description of Artificial Sequence: Synthetic oligonucleotide
  source 1..21: mol_type = other DNA
cagactgttgggactcaggct

SEQ ID NO: 17735 - DNA, 21 bp, synthetic construct
  misc_feature 1..21: note = Description of Artificial Sequence: Synthetic oligonucleotide
  source 1..21: mol_type = other DNA
gccagcgcccccagcggcaaa

SEQ ID NO: 17736 - DNA, 21 bp, synthetic construct
  misc_feature 1..21: note = Description of Artificial Sequence: Synthetic oligonucleotide
  source 1..21: mol_type = other DNA
accctccaaaccgccagcagc

SEQ ID NO: 17737 - DNA, 21 bp, synthetic construct
  misc_feature 1..21: note = Description of Artificial Sequence: Synthetic oligonucleotide
  source 1..21: mol_type = other DNA
gatgggtcgtctcataagacg

SEQ ID NO: 17738 - DNA, 21 bp, synthetic construct
  misc_feature 1..21: note = Description of Artificial Sequence: Synthetic oligonucleotide
  source 1..21: mol_type = other DNA
atgtcgcagagtccgacgttg

SEQ ID NO: 17739 - DNA, 21 bp, synthetic construct
  misc_feature 1..21: note = Description of Artificial Sequence: Synthetic oligonucleotide
  source 1..21: mol_type = other DNA
aaccacgccagcagcgccgcc

SEQ ID NO: 17740 - DNA, 21 bp, synthetic construct
  misc_feature 1..21: note = Description of Artificial Sequence: Synthetic oligonucleotide
  source 1..21: mol_type = other DNA
aatacgtcttcgcctacgtct

SEQ ID NO: 17741 - DNA, 21 bp, synthetic construct
  misc_feature 1..21: note = Description of Artificial Sequence: Synthetic oligonucleotide
  source 1..21: mol_type = other DNA
aatatgggtactacggctaag

SEQ ID NO: 17742 - DNA, 21 bp, synthetic construct
  misc_feature 1..21: note = Description of Artificial Sequence: Synthetic oligonucleotide
  source 1..21: mol_type = other DNA
caaggcaacggcaaccaaatc

SEQ ID NO: 17743 - DNA, 21 bp, synthetic construct
  misc_feature 1..21: note = Description of Artificial Sequence: Synthetic oligonucleotide
  source 1..21: mol_type = other DNA
gttggtacgaataattcttct

SEQ ID NO: 17744 - DNA, 21 bp, synthetic construct
  misc_feature 1..21: note = Description of Artificial Sequence: Synthetic oligonucleotide
  source 1..21: mol_type = other DNA
ggcagcagcagcaaaaccgtc

SEQ ID NO: 17745 - DNA, 21 bp, synthetic construct
  misc_feature 1..21: note = Description of Artificial Sequence: Synthetic oligonucleotide
  source 1..21: mol_type = other DNA
gacaacagagccaaagacggc

SEQ ID NO: 17746 - DNA, 21 bp, synthetic construct
  misc_feature 1..21: note = Description of Artificial Sequence: Synthetic oligonucleotide
  source 1..21: mol_type = other DNA
aaaaccgaaagcagcgcccaa

SEQ ID NO: 17747 - DNA, 21 bp, synthetic construct
  misc_feature 1..21: note = Description of Artificial Sequence: Synthetic oligonucleotide
  source 1..21: mol_type = other DNA
gtcaaaaacagccccagcacc

SEQ ID NO: 17748 - DNA, 21 bp, synthetic construct
  misc_feature 1..21: note = Description of Artificial Sequence: Synthetic oligonucleotide
  source 1..21: mol_type = other DNA
acgggtactgggagtcgggag

SEQ ID NO: 17749 - DNA, 21 bp, synthetic construct
  misc_feature 1..21: note = Description of Artificial Sequence: Synthetic oligonucleotide
  source 1..21: mol_type = other DNA
gtcaccggcgccaacagcgcc

SEQ ID NO: 17750 - DNA, 21 bp, synthetic construct
  misc_feature 1..21: note = Description of Artificial Sequence: Synthetic oligonucleotide
  source 1..21: mol_type = other DNA
agcagcgccgacagaaacacc

SEQ ID NO: 17751 - DNA, 21 bp, synthetic construct
  misc_feature 1..21: note = Description of Artificial Sequence: Synthetic oligonucleotide
  source 1..21: mol_type = other DNA
tctggtagttctacgagtgtg

SEQ ID NO: 17752 - DNA, 21 bp, synthetic construct
  misc_feature 1..21: note = Description of Artificial Sequence: Synthetic oligonucleotide
  source 1..21: mol_type = other DNA
accatgagcagcaaaaccctc

SEQ ID NO: 17753 - DNA, 21 bp, synthetic construct
  misc_feature 1..21: note = Description of Artificial Sequence: Synthetic oligonucleotide
  source 1..21: mol_type = other DNA
ggcagagaagccacccccagc

SEQ ID NO: 17754 - DNA, 21 bp, synthetic construct
  misc_feature 1..21: note = Description of Artificial Sequence: Synthetic oligonucleotide
  source 1..21: mol_type = other DNA
gggggttctactggggggagt

SEQ ID NO: 17755 - DNA, 21 bp, synthetic construct
  misc_feature 1..21: note = Description of Artificial Sequence: Synthetic oligonucleotide
  source 1..21: mol_type = other DNA
aacggcagcaccgaaaacaga

SEQ ID NO: 17756 - DNA, 21 bp, synthetic construct
  misc_feature 1..21: note = Description of Artificial Sequence: Synthetic oligonucleotide
  source 1..21: mol_type = other DNA
agcgccagcagcagcaaagtc

SEQ ID NO: 17757 - DNA, 21 bp, synthetic construct
  misc_feature 1..21: note = Description of Artificial Sequence: Synthetic oligonucleotide
  source 1..21: mol_type = other DNA
caactcaccgaaaaaggcagc

SEQ ID NO: 17758 - DNA, 21 bp, synthetic construct
  misc_feature 1..21: note = Description of Artificial Sequence: Synthetic oligonucleotide
  source 1..21: mol_type = other DNA
gagccggtttcgggtggtagt

SEQ ID NO: 17759 - DNA, 21 bp, synthetic construct
  misc_feature 1..21: note = Description of Artificial Sequence: Synthetic oligonucleotide
  source 1..21: mol_type = other DNA
tctacgaatagtccgaaggct

SEQ ID NO: 17760 - DNA, 21 bp, synthetic construct
  misc_feature 1..21: note = Description of Artificial Sequence: Synthetic oligonucleotide
  source 1..21: mol_type = other DNA
agtacgactaagggtggggat

SEQ ID NO: 17761 - DNA, 21 bp, synthetic construct
  misc_feature 1..21: note = Description of Artificial Sequence: Synthetic oligonucleotide
  source 1..21: mol_type = other DNA
ttgcagacttctaaggctact

SEQ ID NO: 17762 - DNA, 21 bp, synthetic construct
  misc_feature 1..21: note = Description of Artificial Sequence: Synthetic oligonucleotide
  source 1..21: mol_type = other DNA
cttcagtcttcgaaggatggt

SEQ ID NO: 17763 - DNA, 21 bp, synthetic construct
  misc_feature 1..21: note = Description of Artificial Sequence: Synthetic oligonucleotide
  source 1..21: mol_type = other DNA
agcaccggcagccccgccctc

SEQ ID NO: 17764 - DNA, 21 bp, synthetic construct
  misc_feature 1..21: note = Description of Artificial Sequence: Synthetic oligonucleotide
  source 1..21: mol_type = other DNA
acttcggctgggacgaattct

SEQ ID NO: 17765 - DNA, 21 bp, synthetic construct
  misc_feature 1..21: note = Description of Artificial Sequence: Synthetic oligonucleotide
  source 1..21: mol_type = other DNA
gggccttcgactgctcagaat

SEQ ID NO: 17766 - DNA, 21 bp, synthetic construct
  misc_feature 1..21: note = Description of Artificial Sequence: Synthetic oligonucleotide
  source 1..21: mol_type = other DNA
agcggcagcggcagcggcacc

SEQ ID NO: 17767 - DNA, 21 bp, synthetic construct
  misc_feature 1..21: note = Description of Artificial Sequence: Synthetic oligonucleotide
  source 1..21: mol_type = other DNA
aaagccgacagcgccagaggc

SEQ ID NO: 17768 - DNA, 21 bp, synthetic construct
  misc_feature 1..21: note = Description of Artificial Sequence: Synthetic oligonucleotide
  source 1..21: mol_type = other DNA
aacaacggcggcaaagccaac

SEQ ID NO: 17769 - DNA, 21 bp, synthetic construct
  misc_feature 1..21: note = Description of Artificial Sequence: Synthetic oligonucleotide
  source 1..21: mol_type = other DNA
atggagaataagagtaatgtg

SEQ ID NO: 17770 - DNA, 21 bp, synthetic construct
  misc_feature 1..21: note = Description of Artificial Sequence: Synthetic oligonucleotide
  source 1..21: mol_type = other DNA
gaaagccccaaactcggcagc

SEQ ID NO: 17771 - DNA, 21 bp, synthetic construct
  misc_feature 1..21: note = Description of Artificial Sequence: Synthetic oligonucleotide
  source 1..21: mol_type = other DNA
gtcaccgcccccagcgccgcc

SEQ ID NO: 17772 - DNA, 21 bp, synthetic construct
  misc_feature 1..21: note = Description of Artificial Sequence: Synthetic oligonucleotide
  source 1..21: mol_type = other DNA
gggacgacttcgaatagtacg

SEQ ID NO: 17773 - DNA, 21 bp, synthetic construct
  misc_feature 1..21: note = Description of Artificial Sequence: Synthetic oligonucleotide
  source 1..21: mol_type = other DNA
gccagcagcaaaagcatcatg

SEQ ID NO: 17774 - DNA, 21 bp, synthetic construct
  misc_feature 1..21: note = Description of Artificial Sequence: Synthetic oligonucleotide
  source 1..21: mol_type = other DNA
ggcaacctcaaaggcgccaac

SEQ ID NO: 17775 - DNA, 21 bp, synthetic construct
  misc_feature 1..21: note = Description of Artificial Sequence: Synthetic oligonucleotide
  source 1..21: mol_type = other DNA
accggcgccacccccaccaac

SEQ ID NO: 17776 - DNA, 21 bp, synthetic construct
  misc_feature 1..21: note = Description of Artificial Sequence: Synthetic oligonucleotide
  source 1..21: mol_type = other DNA
gggccggggacggggaaggct

SEQ ID NO: 17777 - DNA, 21 bp, synthetic construct
  misc_feature 1..21: note = Description of Artificial Sequence: Synthetic oligonucleotide
  source 1..21: mol_type = other DNA
atgggtgttgggagtccgaag

SEQ ID NO: 17778 - DNA, 21 bp, synthetic construct
  misc_feature 1..21: note = Description of Artificial Sequence: Synthetic oligonucleotide
  source 1..21: mol_type = other DNA
tctacggcgagtgggacgaat

SEQ ID NO: 17779 - DNA, 21 bp, synthetic construct
  misc_feature 1..21: note = Description of Artificial Sequence: Synthetic oligonucleotide
  source 1..21: mol_type = other DNA
aattctaatgctactggtaag

SEQ ID NO: 17780 - DNA, 21 bp, synthetic construct
  misc_feature 1..21: note = Description of Artificial Sequence: Synthetic oligonucleotide
  source 1..21: mol_type = other DNA
atgaccggcagcagcaccagc

SEQ ID NO: 17781 - DNA, 21 bp, synthetic construct
  misc_feature 1..21: note = Description of Artificial Sequence: Synthetic oligonucleotide
  source 1..21: mol_type = other DNA
tctgattcgacgcggaatact

SEQ ID NO: 17782 - DNA, 21 bp, synthetic construct
  misc_feature 1..21: note = Description of Artificial Sequence: Synthetic oligonucleotide
  source 1..21: mol_type = other DNA
accagcgaaagcagaaccagc

SEQ ID NO: 17783 - DNA, 21 bp, synthetic construct
  misc_feature 1..21: note = Description of Artificial Sequence: Synthetic oligonucleotide
  source 1..21: mol_type = other DNA
gcccccaacgacagcaaactc

SEQ ID NO: 17784 - DNA, 21 bp, synthetic construct
  misc_feature 1..21: note = Description of Artificial Sequence: Synthetic oligonucleotide
  source 1..21: mol_type = other DNA
ggtacgggggattctcgggcg

SEQ ID NO: 17785 - DNA, 21 bp, synthetic construct
  misc_feature 1..21: note = Description of Artificial Sequence: Synthetic oligonucleotide
  source 1..21: mol_type = other DNA
tctggtgcgaataatacgcgg

SEQ ID NO: 17786 - DNA, 21 bp, synthetic construct
  misc_feature 1..21: note = Description of Artificial Sequence: Synthetic oligonucleotide
  source 1..21: mol_type = other DNA
cttactggtaaggatcggctt

SEQ ID NO: 17787 - DNA, 21 bp, synthetic construct
  misc_feature 1..21: note = Description of Artificial Sequence: Synthetic oligonucleotide
  source 1..21: mol_type = other DNA
gagtctagtactaagggggtt

SEQ ID NO: 17788 - DNA, 21 bp, synthetic construct
  misc_feature 1..21: note = Description of Artificial Sequence: Synthetic oligonucleotide
  source 1..21: mol_type = other DNA
gacaccagacaaagccaaaaa

SEQ ID NO: 17789 - DNA, 21 bp, synthetic construct
  misc_feature 1..21: note = Description of Artificial Sequence: Synthetic oligonucleotide
  source 1..21: mol_type = other DNA
agcagcaaaagcaccgccacc

SEQ ID NO: 17790 - DNA, 21 bp, synthetic construct
  misc_feature 1..21: note = Description of Artificial Sequence: Synthetic oligonucleotide
  source 1..21: mol_type = other DNA
aggttgggggataaggcggag

SEQ ID NO: 17791 - DNA, 21 bp, synthetic construct
  misc_feature 1..21: note = Description of Artificial Sequence: Synthetic oligonucleotide
  source 1..21: mol_type = other DNA
accggcgacgccaaaatccac

SEQ ID NO: 17792 - DNA, 21 bp, synthetic construct
  misc_feature 1..21: note = Description of Artificial Sequence: Synthetic oligonucleotide
  source 1..21: mol_type = other DNA
agcaacgacaaacaaggcctc

SEQ ID NO: 17793 - DNA, 21 bp, synthetic construct
  misc_feature 1..21: note = Description of Artificial Sequence: Synthetic oligonucleotide
  source 1..21: mol_type = other DNA
gaaaacacccacaaaaccgtc

SEQ ID NO: 17794 - DNA, 21 bp, synthetic construct
  misc_feature 1..21: note = Description of Artificial Sequence: Synthetic oligonucleotide
  source 1..21: mol_type = other DNA
gctggttctcaggagaagact

SEQ ID NO: 17795 - DNA, 21 bp, synthetic construct
  misc_feature 1..21: note = Description of Artificial Sequence: Synthetic oligonucleotide
  source 1..21: mol_type = other DNA
aacatgaacgacgccagaagc

SEQ ID NO: 17796 - DNA, 21 bp, synthetic construct
  misc_feature 1..21: note = Description of Artificial Sequence: Synthetic oligonucleotide
  source 1..21: mol_type = other DNA
gacagcatggccagcgtcaaa

SEQ ID NO: 17797 - DNA, 21 bp, synthetic construct
  misc_feature 1..21: note = Description of Artificial Sequence: Synthetic oligonucleotide
  source 1..21: mol_type = other DNA
caagacagcctcaaagaaaga

SEQ ID NO: 17798 - DNA, 21 bp, synthetic construct
  misc_feature 1..21: note = Description of Artificial Sequence: Synthetic oligonucleotide
  source 1..21: mol_type = other DNA
gagaatactactaagtcttcg

SEQ ID NO: 17799 - DNA, 21 bp, synthetic construct
  misc_feature 1..21: note = Description of Artificial Sequence: Synthetic oligonucleotide
  source 1..21: mol_type = other DNA
gccagcaacgccagccccagc

SEQ ID NO: 17800 - DNA, 21 bp, synthetic construct
  misc_feature 1..21: note = Description of Artificial Sequence: Synthetic oligonucleotide
  source 1..21: mol_type = other DNA
tctactgctccggttaatgcg

SEQ ID NO: 17801 - DNA, 21 bp, synthetic construct
  misc_feature 1..21: note = Description of Artificial Sequence: Synthetic oligonucleotide
  source 1..21: mol_type = other DNA
aacgccggcgccgccagccac

SEQ ID NO: 17802 - DNA, 21 bp, synthetic construct
  misc_feature 1..21: note = Description of Artificial Sequence: Synthetic oligonucleotide
  source 1..21: mol_type = other DNA
accagcggcagcgaccccaga

SEQ ID NO: 17803 - DNA, 21 bp, synthetic construct
  misc_feature 1..21: note = Description of Artificial Sequence: Synthetic oligonucleotide
  source 1..21: mol_type = other DNA
agcggccaaagcgtcaacagc

SEQ ID NO: 17804 - DNA, 21 bp, synthetic construct
  misc_feature 1..21: note = Description of Artificial Sequence: Synthetic oligonucleotide
  source 1..21: mol_type = other DNA
agtagtaataagattagtcag

SEQ ID NO: 17805 - DNA, 21 bp, synthetic construct
  misc_feature 1..21: note = Description of Artificial Sequence: Synthetic oligonucleotide
  source 1..21: mol_type = other DNA
caaaacgcccaaaaaaccagc

SEQ ID NO: 17806 - DNA, 21 bp, synthetic construct
  misc_feature 1..21: note = Description of Artificial Sequence: Synthetic oligonucleotide
  source 1..21: mol_type = other DNA
gaagtcagaagcaacaaaggc

SEQ ID NO: 17807 - DNA, 21 bp, synthetic construct
  misc_feature 1..21: note = Description of Artificial Sequence: Synthetic oligonucleotide
  source 1..21: mol_type = other DNA
gtcagagaccaaaccaccggc

SEQ ID NO: 17808 - DNA, 21 bp, synthetic construct
  misc_feature 1..21: note = Description of Artificial Sequence: Synthetic oligonucleotide
  source 1..21: mol_type = other DNA
ttccccgccggcagcaaagac

SEQ ID NO: 17809 - DNA, 21 bp, synthetic construct
  misc_feature 1..21: note = Description of Artificial Sequence: Synthetic oligonucleotide
  source 1..21: mol_type = other DNA
aacagcaaagccagcgccagc

SEQ ID NO: 17810 - DNA, 21 bp, synthetic construct
  misc_feature 1..21: note = Description of Artificial Sequence: Synthetic oligonucleotide
  source 1..21: mol_type = other DNA
aacgccgcccaacacaacacc

SEQ ID NO: 17811 - DNA, 21 bp, synthetic construct
  misc_feature 1..21: note = Description of Artificial Sequence: Synthetic oligonucleotide
  source 1..21: mol_type = other DNA
aattctggtaatgcgagtacg

SEQ ID NO: 17812 - DNA, 21 bp, synthetic construct
  misc_feature 1..21: note = Description of Artificial Sequence: Synthetic oligonucleotide
  source 1..21: mol_type = other DNA
acccacacccaaagcaccggc

SEQ ID NO: 17813 - DNA, 21 bp, synthetic construct
  misc_feature 1..21: note = Description of Artificial Sequence: Synthetic oligonucleotide
  source 1..21: mol_type = other DNA
accggccacaacagcctcaaa

SEQ ID NO: 17814 - DNA, 21 bp, synthetic construct
  misc_feature 1..21: note = Description of Artificial Sequence: Synthetic oligonucleotide
  source 1..21: mol_type = other DNA
accgtcaacgccaaagccggc

SEQ ID NO: 17815 - DNA, 21 bp, synthetic construct
  misc_feature 1..21: note = Description of Artificial Sequence: Synthetic oligonucleotide
  source 1..21: mol_type = other DNA
acgaattctccgacgacgcag

SEQ ID NO: 17816 - DNA, 21 bp, synthetic construct
  misc_feature 1..21: note = Description of Artificial Sequence: Synthetic oligonucleotide
  source 1..21: mol_type = other DNA
acgatgggtgggtctaatagt

SEQ ID NO: 17817 - DNA, 21 bp, synthetic construct
  misc_feature 1..21: note = Description of Artificial Sequence: Synthetic oligonucleotide
  source 1..21: mol_type = other DNA
actattggggatcatcctagg

SEQ ID NO: 17818 - DNA, 21 bp, synthetic construct
  misc_feature 1..21: note = Description of Artificial Sequence: Synthetic oligonucleotide
  source 1..21: mol_type = other DNA
acttcgagtccgccggcgaat

SEQ ID NO: 17819 - DNA, 21 bp, synthetic construct
  misc_feature 1..21: note = Description of Artificial Sequence: Synthetic oligonucleotide
  source 1..21: mol_type = other DNA
agcagcagcggcaccaaaagc

SEQ ID NO: 17820 - DNA, 21 bp, synthetic construct
  misc_feature 1..21: note = Description of Artificial Sequence: Synthetic oligonucleotide
  source 1..21: mol_type = other DNA
agccccgaaagcaacagcaaa

SEQ ID NO: 17821 - DNA, 21 bp, synthetic construct
  misc_feature 1..21: note = Description of Artificial Sequence: Synthetic oligonucleotide
  source 1..21: mol_type = other DNA
agcggcgccagcagcgccgtc

SEQ ID NO: 17822 - DNA, 21 bp, synthetic construct
  misc_feature 1..21: note = Description of Artificial Sequence: Synthetic oligonucleotide
  source 1..21: mol_type = other DNA
agcggcgcccaaggcaacatg

SEQ ID NO: 17823 - DNA, 21 bp, synthetic construct
  misc_feature 1..21: note = Description of Artificial Sequence: Synthetic oligonucleotide
  source 1..21: mol_type = other DNA
atgagcgccggcaaagccggc

SEQ ID NO: 17824 - DNA, 21 bp, synthetic construct
  misc_feature 1..21: note = Description of Artificial Sequence: Synthetic oligonucleotide
  source 1..21: mol_type = other DNA
atgtcgagtgataagggttcg

SEQ ID NO: 17825 - DNA, 21 bp, synthetic construct
  misc_feature 1..21: note = Description of Artificial Sequence: Synthetic oligonucleotide
  source 1..21: mol_type = other DNA
cacaccggcggcgaaaaagcc

SEQ ID NO: 17826 - DNA, 21 bp, synthetic construct
  misc_feature 1..21: note = Description of Artificial Sequence: Synthetic oligonucleotide
  source 1..21: mol_type = other DNA
cagaatacgactggtactacg

SEQ ID NO: 17827 - DNA, 21 bp, synthetic construct
  misc_feature 1..21: note = Description of Artificial Sequence: Synthetic oligonucleotide
  source 1..21: mol_type = other DNA
ctcaccagcagagaccaagtc

SEQ ID NO: 17828 - DNA, 21 bp, synthetic construct
  misc_feature 1..21: note = Description of Artificial Sequence: Synthetic oligonucleotide
  source 1..21: mol_type = other DNA
ctccaaagcggcgtcaccggc

SEQ ID NO: 17829 - DNA, 21 bp, synthetic construct
  misc_feature 1..21: note = Description of Artificial Sequence: Synthetic oligonucleotide
  source 1..21: mol_type = other DNA
gaaagcaccggcgccagcagc

SEQ ID NO: 17830 - DNA, 21 bp, synthetic construct
  misc_feature 1..21: note = Description of Artificial Sequence: Synthetic oligonucleotide
  source 1..21: mol_type = other DNA
gaaggcgccggcagcgccggc

SEQ ID NO: 17831 - DNA, 21 bp, synthetic construct
  misc_feature 1..21: note = Description of Artificial Sequence: Synthetic oligonucleotide
  source 1..21: mol_type = other DNA
gaagtcagcagaaaccccggc

SEQ ID NO: 17832 - DNA, 21 bp, synthetic construct
  misc_feature 1..21: note = Description of Artificial Sequence: Synthetic oligonucleotide
  source 1..21: mol_type = other DNA
gatcgggtggggtctagtact

SEQ ID NO: 17833 - DNA, 21 bp, synthetic construct
  misc_feature 1..21: note = Description of Artificial Sequence: Synthetic oligonucleotide
  source 1..21: mol_type = other DNA
gccaccaaaagcaacgccggc

SEQ ID NO: 17834 - DNA, 21 bp, synthetic construct
  misc_feature 1..21: note = Description of Artificial Sequence: Synthetic oligonucleotide
  source 1..21: mol_type = other DNA
gccccccccaccggcggccac

SEQ ID NO: 17835 - DNA, 21 bp, synthetic construct
  misc_feature 1..21: note = Description of Artificial Sequence: Synthetic oligonucleotide
  source 1..21: mol_type = other DNA
ggccacaccgccagagacggc

SEQ ID NO: 17836 - DNA, 21 bp, synthetic construct
  misc_feature 1..21: note = Description of Artificial Sequence: Synthetic oligonucleotide
  source 1..21: mol_type = other DNA
ggcgccgccggcgccgccagc

SEQ ID NO: 17837 - DNA, 21 bp, synthetic construct
  misc_feature 1..21: note = Description of Artificial Sequence: Synthetic oligonucleotide
  source 1..21: mol_type = other DNA
gggggttctaatgcgcctgtt

SEQ ID NO: 17838 - DNA, 21 bp, synthetic construct
  misc_feature 1..21: note = Description of Artificial Sequence: Synthetic oligonucleotide
  source 1..21: mol_type = other DNA
gtcgccggcgccaccgccggc

SEQ ID NO: 17839 - DNA, 21 bp, synthetic construct
  misc_feature 1..21: note = Description of Artificial Sequence: Synthetic oligonucleotide
  source 1..21: mol_type = other DNA
tcgatgaatgataagtcgact

SEQ ID NO: 17840 - DNA, 21 bp, synthetic construct
  misc_feature 1..21: note = Description of Artificial Sequence: Synthetic oligonucleotide
  source 1..21: mol_type = other DNA
tcgcatattacttctgagaag

SEQ ID NO: 17841 - DNA, 21 bp, synthetic construct
  misc_feature 1..21: note = Description of Artificial Sequence: Synthetic oligonucleotide
  source 1..21: mol_type = other DNA
ttgacgaatagtaatgcggct

SEQ ID NO: 17842 - DNA, 21 bp, synthetic construct
  misc_feature 1..21: note = Description of Artificial Sequence: Synthetic oligonucleotide
  source 1..21: mol_type = other DNA
ttgcagggtactggtgcgggt

SEQ ID NO: 17843 - DNA, 21 bp, synthetic construct
  misc_feature 1..21: note = Description of Artificial Sequence: Synthetic oligonucleotide
  source 1..21: mol_type = other DNA
gctaatacgacgaagtctagt

SEQ ID NO: 17844 - DNA, 21 bp, synthetic construct
  misc_feature 1..21: note = Description of Artificial Sequence: Synthetic oligonucleotide
  source 1..21: mol_type = other DNA
gcggctaatgataggaatctt

SEQ ID NO: 17845 - DNA, 21 bp, synthetic construct
  misc_feature 1..21: note = Description of Artificial Sequence: Synthetic oligonucleotide
  source 1..21: mol_type = other DNA
cacggcaacaacacccccacc

SEQ ID NO: 17846 - DNA, 21 bp, synthetic construct
  misc_feature 1..21: note = Description of Artificial Sequence: Synthetic oligonucleotide
  source 1..21: mol_type = other DNA
acgcagaatactgctacgtct

SEQ ID NO: 17847 - DNA, 21 bp, synthetic construct
  misc_feature 1..21: note = Description of Artificial Sequence: Synthetic oligonucleotide
  source 1..21: mol_type = other DNA
actagtggtcagccgagtcgt

SEQ ID NO: 17848 - DNA, 21 bp, synthetic construct
  misc_feature 1..21: note = Description of Artificial Sequence: Synthetic oligonucleotide
  source 1..21: mol_type = other DNA
accatgacccaaaccagcagc

SEQ ID NO: 17849 - DNA, 21 bp, synthetic construct
  misc_feature 1..21: note = Description of Artificial Sequence: Synthetic oligonucleotide
  source 1..21: mol_type = other DNA
tctgatcagaagggtgctcag

SEQ ID NO: 17850 - DNA, 21 bp, synthetic construct
  misc_feature 1..21: note = Description of Artificial Sequence: Synthetic oligonucleotide
  source 1..21: mol_type = other DNA
gggcagcgggggcaggagggt

SEQ ID NO: 17851 - DNA, 21 bp, synthetic construct
  misc_feature 1..21: note = Description of Artificial Sequence: Synthetic oligonucleotide
  source 1..21: mol_type = other DNA
gagaattcgtcgagtagtcgt

SEQ ID NO: 17852 - DNA, 21 bp, synthetic construct
  misc_feature 1..21: note = Description of Artificial Sequence: Synthetic oligonucleotide
  source 1..21: mol_type = other DNA
acggctgcgacgcatcctgcg

SEQ ID NO: 17853 - DNA, 21 bp, synthetic construct
  misc_feature 1..21: note = Description of Artificial Sequence: Synthetic oligonucleotide
  source 1..21: mol_type = other DNA
gctagtactggtaagatgacg

SEQ ID NO: 17854 - DNA, 21 bp, synthetic construct
  misc_feature 1..21: note = Description of Artificial Sequence: Synthetic oligonucleotide
  source 1..21: mol_type = other DNA
tcttctgagagtaatcgttcg

SEQ ID NO: 17855 - DNA, 21 bp, synthetic construct
  misc_feature 1..21: note = Description of Artificial Sequence: Synthetic oligonucleotide
  source 1..21: mol_type = other DNA
tctagtggtaatgggtcttcg

SEQ ID NO: 17856 - DNA, 21 bp, synthetic construct
  misc_feature 1..21: note = Description of Artificial Sequence: Synthetic oligonucleotide
  source 1..21: mol_type = other DNA
agcaacggcagcagcaccgcc

SEQ ID NO: 17857 - DNA, 21 bp, synthetic construct
  misc_feature 1..21: note = Description of Artificial Sequence: Synthetic oligonucleotide
  source 1..21: mol_type = other DNA
ggcagcagcaccagacccgaa

SEQ ID NO: 17858 - DNA, 21 bp, synthetic construct
  misc_feature 1..21: note = Description of Artificial Sequence: Synthetic oligonucleotide
  source 1..21: mol_type = other DNA
catgtggagccgaagcttggg

SEQ ID NO: 17859 - DNA, 21 bp, synthetic construct
  misc_feature 1..21: note = Description of Artificial Sequence: Synthetic oligonucleotide
  source 1..21: mol_type = other DNA
ggcagcagcgacagcagaagc

SEQ ID NO: 17860 - DNA, 21 bp, synthetic construct
  misc_feature 1..21: note = Description of Artificial Sequence: Synthetic oligonucleotide
  source 1..21: mol_type = other DNA
ggcgacagcaaagtcaacaac

SEQ ID NO: 17861 - DNA, 21 bp, synthetic construct
  misc_feature 1..21: note = Description of Artificial Sequence: Synthetic oligonucleotide
  source 1..21: mol_type = other DNA
gttggtaagtctagtaattcg

SEQ ID NO: 17862 - DNA, 21 bp, synthetic construct
  misc_feature 1..21: note = Description of Artificial Sequence: Synthetic oligonucleotide
  source 1..21: mol_type = other DNA
tctcctggtagtagtgtttcg

SEQ ID NO: 17863 - DNA, 21 bp, synthetic construct
  misc_feature 1..21: note = Description of Artificial Sequence: Synthetic oligonucleotide
  source 1..21: mol_type = other DNA
ctcaccggccccagcaacacc

SEQ ID NO: 17864 - DNA, 21 bp, synthetic construct
  misc_feature 1..21: note = Description of Artificial Sequence: Synthetic oligonucleotide
  source 1..21: mol_type = other DNA
ggcggcatcggcaccaaagaa

SEQ ID NO: 17865 - DNA, 21 bp, synthetic construct
  misc_feature 1..21: note = Description of Artificial Sequence: Synthetic oligonucleotide
  source 1..21: mol_type = other DNA
caagtcgcccccagcaacagc

SEQ ID NO: 17866 - DNA, 21 bp, synthetic construct
  misc_feature 1..21: note = Description of Artificial Sequence: Synthetic oligonucleotide
  source 1..21: mol_type = other DNA
ggtactagtcagacgagtagt

SEQ ID NO: 17867 - DNA, 21 bp, synthetic construct
  misc_feature 1..21: note = Description of Artificial Sequence: Synthetic oligonucleotide
  source 1..21: mol_type = other DNA
tcggggaatagttctcatgct

SEQ ID NO: 17868 - DNA, 21 bp, synthetic construct
  misc_feature 1..21: note = Description of Artificial Sequence: Synthetic oligonucleotide
  source 1..21: mol_type = other DNA
atgactactacgaaggctgag

SEQ ID NO: 17869 - DNA, 21 bp, synthetic construct
  misc_feature 1..21: note = Description of Artificial Sequence: Synthetic oligonucleotide
  source 1..21: mol_type = other DNA
gaagccagcaccagaagcggc

SEQ ID NO: 17870 - DNA, 21 bp, synthetic construct
  misc_feature 1..21: note = Description of Artificial Sequence: Synthetic oligonucleotide
  source 1..21: mol_type = other DNA
tcgaataagccgggtactaat

SEQ ID NO: 17871 - DNA, 21 bp, synthetic construct
  misc_feature 1..21: note = Description of Artificial Sequence: Synthetic oligonucleotide
  source 1..21: mol_type = other DNA
aacagcagaccccaaaacaac

SEQ ID NO: 17872 - DNA, 21 bp, synthetic construct
  misc_feature 1..21: note = Description of Artificial Sequence: Synthetic oligonucleotide
  source 1..21: mol_type = other DNA
caaggccaaagcaacggcagc

SEQ ID NO: 17873 - DNA, 21 bp, synthetic construct
  misc_feature 1..21: note = Description of Artificial Sequence: Synthetic oligonucleotide
  source 1..21: mol_type = other DNA
aaccccaccgccggcggcagc

SEQ ID NO: 17874 - DNA, 21 bp, synthetic construct
  misc_feature 1..21: note = Description of Artificial Sequence: Synthetic oligonucleotide
  source 1..21: mol_type = other DNA
catggttctggtaataagggg

SEQ ID NO: 17875 - DNA, 21 bp, synthetic construct
  misc_feature 1..21: note = Description of Artificial Sequence: Synthetic oligonucleotide
  source 1..21: mol_type = other DNA
agcggcggcagcggcgccaaa

SEQ ID NO: 17876 - DNA, 21 bp, synthetic construct
  misc_feature 1..21: note = Description of Artificial Sequence: Synthetic oligonucleotide
  source 1..21: mol_type = other DNA
acccacaccagcaaaatgagc

SEQ ID NO: 17877 - DNA, 21 bp, synthetic construct
  misc_feature 1..21: note = Description of Artificial Sequence: Synthetic oligonucleotide
  source 1..21: mol_type = other DNA
agagacgtcaaacccgccagc

SEQ ID NO: 17878 - DNA, 21 bp, synthetic construct
  misc_feature 1..21: note = Description of Artificial Sequence: Synthetic oligonucleotide
  source 1..21: mol_type = other DNA
gacagaagcgccgaaaccaga

SEQ ID NO: 17879 - DNA, 21 bp, synthetic construct
  misc_feature 1..21: note = Description of Artificial Sequence: Synthetic oligonucleotide
  source 1..21: mol_type = other DNA
gacgccgtcaccagcaccaaa

SEQ ID NO: 17880 - DNA, 21 bp, synthetic construct
  misc_feature 1..21: note = Description of Artificial Sequence: Synthetic oligonucleotide
  source 1..21: mol_type = other DNA
caaagcaccggcaaactcggc

SEQ ID NO: 17881 - DNA, 21 bp, synthetic construct
  misc_feature 1..21: note = Description of Artificial Sequence: Synthetic oligonucleotide
  source 1..21: mol_type = other DNA
gatagtctgtcgtcgcctaag

SEQ ID NO: 17882 - DNA, 21 bp, synthetic construct
  misc_feature 1..21: note = Description of Artificial Sequence: Synthetic oligonucleotide
  source 1..21: mol_type = other DNA
ggtgatactcgggtttcgagt

SEQ ID NO: 17883 - DNA, 21 bp, synthetic construct
  misc_feature 1..21: note = Description of Artificial Sequence: Synthetic oligonucleotide
  source 1..21: mol_type = other DNA
cacagcgcccaaggcagcagc

SEQ ID NO: 17884 - DNA, 21 bp, synthetic construct
  misc_feature 1..21: note = Description of Artificial Sequence: Synthetic oligonucleotide
  source 1..21: mol_type = other DNA
ggtatgaatactaaggctact

SEQ ID NO: 17885 - DNA, 21 bp, synthetic construct
  misc_feature 1..21: note = Description of Artificial Sequence: Synthetic oligonucleotide
  source 1..21: mol_type = other DNA
tatggtagtgataagtctctg

SEQ ID NO: 17886 - DNA, 21 bp, synthetic construct
  misc_feature 1..21: note = Description of Artificial Sequence: Synthetic oligonucleotide
  source 1..21: mol_type = other DNA
actgaggatggtaagcagcat

SEQ ID NO: 17887 - DNA, 21 bp, synthetic construct
  misc_feature 1..21: note = Description of Artificial Sequence: Synthetic oligonucleotide
  source 1..21: mol_type = other DNA
agcaccgacagccaaggcaaa

SEQ ID NO: 17888 - DNA, 21 bp, synthetic construct
  misc_feature 1..21: note = Description of Artificial Sequence: Synthetic oligonucleotide
  source 1..21: mol_type = other DNA
gtgatggcggataagagtagt

SEQ ID NO: 17889 - DNA, 21 bp, synthetic construct
  misc_feature 1..21: note = Description of Artificial Sequence: Synthetic oligonucleotide
  source 1..21: mol_type = other DNA
ggcgccagcagcgccagagaa

SEQ ID NO: 17890 - DNA, 21 bp, synthetic construct
  misc_feature 1..21: note = Description of Artificial Sequence: Synthetic oligonucleotide
  source 1..21: mol_type = other DNA
gtcaacggcagcaccgtcacc

SEQ ID NO: 17891 - DNA, 21 bp, synthetic construct
  misc_feature 1..21: note = Description of Artificial Sequence: Synthetic oligonucleotide
  source 1..21: mol_type = other DNA
ggtaagcagggtgttagtgct

SEQ ID NO: 17892 - DNA, 21 bp, synthetic construct
  misc_feature 1..21: note = Description of Artificial Sequence: Synthetic oligonucleotide
  source 1..21: mol_type = other DNA
accgtcaccgacggcaacaga

SEQ ID NO: 17893 - DNA, 21 bp, synthetic construct
  misc_feature 1..21: note = Description of Artificial Sequence: Synthetic oligonucleotide
  source 1..21: mol_type = other DNA
gtcagcgaccacaaaagcggc

SEQ ID NO: 17894 - DNA, 21 bp, synthetic construct
  misc_feature 1..21: note = Description of Artificial Sequence: Synthetic oligonucleotide
  source 1..21: mol_type = other DNA
cacagcgccagccaccaagcc

SEQ ID NO: 17895 - DNA, 21 bp, synthetic construct
  misc_feature 1..21: note = Description of Artificial Sequence: Synthetic oligonucleotide
  source 1..21: mol_type = other DNA
gtcagcacccccagcaacctc

SEQ ID NO: 17896 - DNA, 21 bp, synthetic construct
  misc_feature 1..21: note = Description of Artificial Sequence: Synthetic oligonucleotide
  source 1..21: mol_type = other DNA
agcgccggcagcagcagaacc

SEQ ID NO: 17897 - DNA, 21 bp, synthetic construct
  misc_feature 1..21: note = Description of Artificial Sequence: Synthetic oligonucleotide
  source 1..21: mol_type = other DNA
acgccgggtgcgagtaatgtg

SEQ ID NO: 17898 - DNA, 21 bp, synthetic construct
  misc_feature 1..21: note = Description of Artificial Sequence: Synthetic oligonucleotide
  source 1..21: mol_type = other DNA
accaccagcgccccccccaac

SEQ ID NO: 17899 - DNA, 21 bp, synthetic construct
  misc_feature 1..21: note = Description of Artificial Sequence: Synthetic oligonucleotide
  source 1..21: mol_type = other DNA
aattctaagcaggtgcctggt

SEQ ID NO: 17900 - DNA, 21 bp, synthetic construct
  misc_feature 1..21: note = Description of Artificial Sequence: Synthetic oligonucleotide
  source 1..21: mol_type = other DNA
caaagcgacagcgcccccaga

SEQ ID NO: 17901 - DNA, 21 bp, synthetic construct
  misc_feature 1..21: note = Description of Artificial Sequence: Synthetic oligonucleotide
  source 1..21: mol_type = other DNA
ttgtcgaataagggttctggg

SEQ ID NO: 17902 - DNA, 21 bp, synthetic construct
  misc_feature 1..21: note = Description of Artificial Sequence: Synthetic oligonucleotide
  source 1..21: mol_type = other DNA
aaaaacagcggcgccagccaa

SEQ ID NO: 17903 - DNA, 21 bp, synthetic construct
  misc_feature 1..21: note = Description of Artificial Sequence: Synthetic oligonucleotide
  source 1..21: mol_type = other DNA
accatcgccgacagcaacaga

SEQ ID NO: 17904 - DNA, 21 bp, synthetic construct
  misc_feature 1..21: note = Description of Artificial Sequence: Synthetic oligonucleotide
  source 1..21: mol_type = other DNA
agcgccggcggccaaatgagc

SEQ ID NO: 17905 - DNA, 21 bp, synthetic construct
  misc_feature 1..21: note = Description of Artificial Sequence: Synthetic oligonucleotide
  source 1..21: mol_type = other DNA
aacagcgacaacagaggcatc

SEQ ID NO: 17906 - DNA, 21 bp, synthetic construct
  misc_feature 1..21: note = Description of Artificial Sequence: Synthetic oligonucleotide
  source 1..21: mol_type = other DNA
aatactgggagtgatgttaag

SEQ ID NO: 17907 - DNA, 21 bp, synthetic construct
  misc_feature 1..21: note = Description of Artificial Sequence: Synthetic oligonucleotide
  source 1..21: mol_type = other DNA
aatgctagtacttctagtggt

SEQ ID NO: 17908 - DNA, 21 bp, synthetic construct
  misc_feature 1..21: note = Description of Artificial Sequence: Synthetic oligonucleotide
  source 1..21: mol_type = other DNA
cggcgtgataaggagttgtct

SEQ ID NO: 17909 - DNA, 21 bp, synthetic construct
  misc_feature 1..21: note = Description of Artificial Sequence: Synthetic oligonucleotide
  source 1..21: mol_type = other DNA
gagacggttaataagcctagt

SEQ ID NO: 17910 - DNA, 21 bp, synthetic construct
  misc_feature 1..21: note = Description of Artificial Sequence: Synthetic oligonucleotide
  source 1..21: mol_type = other DNA
aatcagggtaatggtagtagt

SEQ ID NO: 17911 - DNA, 21 bp, synthetic construct
  misc_feature 1..21: note = Description of Artificial Sequence: Synthetic oligonucleotide
  source 1..21: mol_type = other DNA
gaggggtcgagtcgggttggg

SEQ ID NO: 17912 - DNA, 21 bp, synthetic construct
  misc_feature 1..21: note = Description of Artificial Sequence: Synthetic oligonucleotide
  source 1..21: mol_type = other DNA
ggttcgattgcggggagtaat

SEQ ID NO: 17913 - DNA, 21 bp, synthetic construct
  misc_feature 1..21: note = Description of Artificial Sequence: Synthetic oligonucleotide
  source 1..21: mol_type = other DNA
aaccaaaccagcaacagcacc

SEQ ID NO: 17914 - DNA, 21 bp, synthetic construct
  misc_feature 1..21: note = Description of Artificial Sequence: Synthetic oligonucleotide
  source 1..21: mol_type = other DNA
gagggtacggataggtttggg

SEQ ID NO: 17915 - DNA, 21 bp, synthetic construct
  misc_feature 1..21: note = Description of Artificial Sequence: Synthetic oligonucleotide
  source 1..21: mol_type = other DNA
gccggcggcaacgccagccaa

SEQ ID NO: 17916 - DNA, 21 bp, synthetic construct
  misc_feature 1..21: note = Description of Artificial Sequence: Synthetic oligonucleotide
  source 1..21: mol_type = other DNA
cgtaatactagtccgggtgtg

SEQ ID NO: 17917 - DNA, 21 bp, synthetic construct
  misc_feature 1..21: note = Description of Artificial Sequence: Synthetic oligonucleotide
  source 1..21: mol_type = other DNA
actggttctaatagtactggt

SEQ ID NO: 17918 - DNA, 21 bp, synthetic construct
  misc_feature 1..21: note = Description of Artificial Sequence: Synthetic oligonucleotide
  source 1..21: mol_type = other DNA
caacccggcagcagcctcaaa

SEQ ID NO: 17919 - DNA, 21 bp, synthetic construct
  misc_feature 1..21: note = Description of Artificial Sequence: Synthetic oligonucleotide
  source 1..21: mol_type = other DNA
attaatgaggggaattcgaag

SEQ ID NO: 17920 - DNA, 21 bp, synthetic construct
  misc_feature 1..21: note = Description of Artificial Sequence: Synthetic oligonucleotide
  source 1..21: mol_type = other DNA
aacgtccccagcggcaacagc

SEQ ID NO: 17921 - DNA, 21 bp, synthetic construct
  misc_feature 1..21: note = Description of Artificial Sequence: Synthetic oligonucleotide
  source 1..21: mol_type = other DNA
gaaagaggcgccaacaccaaa

SEQ ID NO: 17922 - DNA, 21 bp, synthetic construct
  misc_feature 1..21: note = Description of Artificial Sequence: Synthetic oligonucleotide
  source 1..21: mol_type = other DNA
gggtctgcgcagggttcggtt

SEQ ID NO: 17923 - DNA, 21 bp, synthetic construct
  misc_feature 1..21: note = Description of Artificial Sequence: Synthetic oligonucleotide
  source 1..21: mol_type = other DNA
gatccggtgactcctcgggct

SEQ ID NO: 17924 - DNA, 21 bp, synthetic construct
  misc_feature 1..21: note = Description of Artificial Sequence: Synthetic oligonucleotide
  source 1..21: mol_type = other DNA
gatagtaagtctgggacgact

SEQ ID NO: 17925 - DNA, 21 bp, synthetic construct
  misc_feature 1..21: note = Description of Artificial Sequence: Synthetic oligonucleotide
  source 1..21: mol_type = other DNA
ggtactacgactgagagtcgt

SEQ ID NO: 17926 - DNA, 21 bp, synthetic construct
  misc_feature 1..21: note = Description of Artificial Sequence: Synthetic oligonucleotide
  source 1..21: mol_type = other DNA
gccggcaacagagacaacgtc

SEQ ID NO: 17927 - DNA, 21 bp, synthetic construct
  misc_feature 1..21: note = Description of Artificial Sequence: Synthetic oligonucleotide
  source 1..21: mol_type = other DNA
gcgattcagggggattctaag

SEQ ID NO: 17928 - DNA, 21 bp, synthetic construct
  misc_feature 1..21: note = Description of Artificial Sequence: Synthetic oligonucleotide
  source 1..21: mol_type = other DNA
gggaagtctgatcctcagggt

SEQ ID NO: 17929 - DNA, 21 bp, synthetic construct
  misc_feature 1..21: note = Description of Artificial Sequence: Synthetic oligonucleotide
  source 1..21: mol_type = other DNA
gaactcagcagccccaaaacc

SEQ ID NO: 17930 - DNA, 21 bp, synthetic construct
  misc_feature 1..21: note = Description of Artificial Sequence: Synthetic oligonucleotide
  source 1..21: mol_type = other DNA
ggttcgtcgccttctgttcat

SEQ ID NO: 17931 - DNA, 21 bp, synthetic construct
  misc_feature 1..21: note = Description of Artificial Sequence: Synthetic oligonucleotide
  source 1..21: mol_type = other DNA
caaccccaagacgcccccaaa

SEQ ID NO: 17932 - DNA, 21 bp, synthetic construct
  misc_feature 1..21: note = Description of Artificial Sequence: Synthetic oligonucleotide
  source 1..21: mol_type = other DNA
aacagcggcaccaacagcagc

SEQ ID NO: 17933 - DNA, 21 bp, synthetic construct
  misc_feature 1..21: note = Description of Artificial Sequence: Synthetic oligonucleotide
  source 1..21: mol_type = other DNA
gctactggttcgcatagtgtt

SEQ ID NO: 17934 - DNA, 21 bp, synthetic construct
  misc_feature 1..21: note = Description of Artificial Sequence: Synthetic oligonucleotide
  source 1..21: mol_type = other DNA
gacagcagcaccagcgccaaa

SEQ ID NO: 17935 - DNA, 21 bp, synthetic construct
  misc_feature 1..21: note = Description of Artificial Sequence: Synthetic oligonucleotide
  source 1..21: mol_type = other DNA
caacaaccccaagccggcagc

SEQ ID NO: 17936 - DNA, 21 bp, synthetic construct
  misc_feature 1..21: note = Description of Artificial Sequence: Synthetic oligonucleotide
  source 1..21: mol_type = other DNA
ggcagcagcagcgtcagagaa

SEQ ID NO: 17937 - DNA, 21 bp, synthetic construct
  misc_feature 1..21: note = Description of Artificial Sequence: Synthetic oligonucleotide
  source 1..21: mol_type = other DNA
tcggtgggtggggatttgaag

SEQ ID NO: 17938 - DNA, 21 bp, synthetic construct
  misc_feature 1..21: note = Description of Artificial Sequence: Synthetic oligonucleotide
  source 1..21: mol_type = other DNA
gtccaaaccgcccaaaacggc

SEQ ID NO: 17939 - DNA, 21 bp, synthetic construct
  misc_feature 1..21: note = Description of Artificial Sequence: Synthetic oligonucleotide
  source 1..21: mol_type = other DNA
gacaaaaccgacaaaacctac

SEQ ID NO: 17940 - DNA, 21 bp, synthetic construct
  misc_feature 1..21: note = Description of Artificial Sequence: Synthetic oligonucleotide
  source 1..21: mol_type = other DNA
agcggcggcgacagccacaga

SEQ ID NO: 17941 - DNA, 21 bp, synthetic construct
  misc_feature 1..21: note = Description of Artificial Sequence: Synthetic oligonucleotide
  source 1..21: mol_type = other DNA
agtatggggagtgagaaggct

SEQ ID NO: 17942 - DNA, 21 bp, synthetic construct
  misc_feature 1..21: note = Description of Artificial Sequence: Synthetic oligonucleotide
  source 1..21: mol_type = other DNA
cagcctccggattctaagacg

SEQ ID NO: 17943 - DNA, 21 bp, synthetic construct
  misc_feature 1..21: note = Description of Artificial Sequence: Synthetic oligonucleotide
  source 1..21: mol_type = other DNA
gccaccggccaaccccccaga

SEQ ID NO: 17944 - DNA, 21 bp, synthetic construct
  misc_feature 1..21: note = Description of Artificial Sequence: Synthetic oligonucleotide
  source 1..21: mol_type = other DNA
gtcggcagcagcagcggcggc

SEQ ID NO: 17945 - DNA, 21 bp, synthetic construct
  misc_feature 1..21: note = Description of Artificial Sequence: Synthetic oligonucleotide
  source 1..21: mol_type = other DNA
agcgccaacagcacccccaga

SEQ ID NO: 17946 - DNA, 21 bp, synthetic construct
  misc_feature 1..21: note = Description of Artificial Sequence: Synthetic oligonucleotide
  source 1..21: mol_type = other DNA
aacagcagcagagaaagcgtc

SEQ ID NO: 17947 - DNA, 21 bp, synthetic construct
  misc_feature 1..21: note = Description of Artificial Sequence: Synthetic oligonucleotide
  source 1..21: mol_type = other DNA
aatcatggtgataggggtggt

SEQ ID NO: 17948 - DNA, 21 bp, synthetic construct
  misc_feature 1..21: note = Description of Artificial Sequence: Synthetic oligonucleotide
  source 1..21: mol_type = other DNA
ggtgttggggatacgaatcgt

SEQ ID NO: 17949 - DNA, 21 bp, synthetic construct
  misc_feature 1..21: note = Description of Artificial Sequence: Synthetic oligonucleotide
  source 1..21: mol_type = other DNA
agcgacagcaaccacagaaac

SEQ ID NO: 17950 - DNA, 21 bp, synthetic construct
  misc_feature 1..21: note = Description of Artificial Sequence: Synthetic oligonucleotide
  source 1..21: mol_type = other DNA
agcaccgaaagaagcggcaac

SEQ ID NO: 17951 - DNA, 21 bp, synthetic construct
  misc_feature 1..21: note = Description of Artificial Sequence: Synthetic oligonucleotide
  source 1..21: mol_type = other DNA
cacagcagcgacagcgtcaaa

SEQ ID NO: 17952 - DNA, 21 bp, synthetic construct
  misc_feature 1..21: note = Description of Artificial Sequence: Synthetic oligonucleotide
  source 1..21: mol_type = other DNA
catggtcaggcgactattagt

SEQ ID NO: 17953 - DNA, 21 bp, synthetic construct
  misc_feature 1..21: note = Description of Artificial Sequence: Synthetic oligonucleotide
  source 1..21: mol_type = other DNA
agccccgtccccaccagcgcc

SEQ ID NO: 17954 - DNA, 21 bp, synthetic construct
  misc_feature 1..21: note = Description of Artificial Sequence: Synthetic oligonucleotide
  source 1..21: mol_type = other DNA
actaagacgactgctaatggg

SEQ ID NO: 17955 - DNA, 21 bp, synthetic construct
  misc_feature 1..21: note = Description of Artificial Sequence: Synthetic oligonucleotide
  source 1..21: mol_type = other DNA
gaggatcatggtagtaagggg

SEQ ID NO: 17956 - DNA, 21 bp, synthetic construct
  misc_feature 1..21: note = Description of Artificial Sequence: Synthetic oligonucleotide
  source 1..21: mol_type = other DNA
gaggggcggactcctttgatg

SEQ ID NO: 17957 - DNA, 21 bp, synthetic construct
  misc_feature 1..21: note = Description of Artificial Sequence: Synthetic oligonucleotide
  source 1..21: mol_type = other DNA
gttgcgtctgagaggagtgtt

SEQ ID NO: 17958 - DNA, 21 bp, synthetic construct
  misc_feature 1..21: note = Description of Artificial Sequence: Synthetic oligonucleotide
  source 1..21: mol_type = other DNA
caggttagtagtgggcatgct

SEQ ID NO: 17959 - DNA, 21 bp, synthetic construct
  misc_feature 1..21: note = Description of Artificial Sequence: Synthetic oligonucleotide
  source 1..21: mol_type = other DNA
ctgacgggtactgataagggg

SEQ ID NO: 17960 - DNA, 21 bp, synthetic construct
  misc_feature 1..21: note = Description of Artificial Sequence: Synthetic oligonucleotide
  source 1..21: mol_type = other DNA
tctaatgggtctgcggtgtct

SEQ ID NO: 17961 - DNA, 21 bp, synthetic construct
  misc_feature 1..21: note = Description of Artificial Sequence: Synthetic oligonucleotide
  source 1..21: mol_type = other DNA
accggcgccgccagacccgac

SEQ ID NO: 17962 - DNA, 21 bp, synthetic construct
  misc_feature 1..21: note = Description of Artificial Sequence: Synthetic oligonucleotide
  source 1..21: mol_type = other DNA
gtttcgagtagttctgctacg

SEQ ID NO: 17963 - DNA, 21 bp, synthetic construct
  misc_feature 1..21: note = Description of Artificial Sequence: Synthetic oligonucleotide
  source 1..21: mol_type = other DNA
gccagcagcagcagccaacaa

SEQ ID NO: 17964 - DNA, 21 bp, synthetic construct
  misc_feature 1..21: note = Description of Artificial Sequence: Synthetic oligonucleotide
  source 1..21: mol_type = other DNA
agcgcccccggcgacaccaaa

SEQ ID NO: 17965 - DNA, 21 bp, synthetic construct
  misc_feature 1..21: note = Description of Artificial Sequence: Synthetic oligonucleotide
  source 1..21: mol_type = other DNA
ggcgacagccaaaaacaaggc

SEQ ID NO: 17966 - DNA, 21 bp, synthetic construct
  misc_feature 1..21: note = Description of Artificial Sequence: Synthetic oligonucleotide
  source 1..21: mol_type = other DNA
accggcagcaccggcatgagc

SEQ ID NO: 17967 - DNA, 21 bp, synthetic construct
  misc_feature 1..21: note = Description of Artificial Sequence: Synthetic oligonucleotide
  source 1..21: mol_type = other DNA
gggacgtcgcagccgtcgact

SEQ ID NO: 17968 - DNA, 21 bp, synthetic construct
  misc_feature 1..21: note = Description of Artificial Sequence: Synthetic oligonucleotide
  source 1..21: mol_type = other DNA
gggacttctccgggtcataat

SEQ ID NO: 17969 - DNA, 21 bp, synthetic construct
  misc_feature 1..21: note = Description of Artificial Sequence: Synthetic oligonucleotide
  source 1..21: mol_type = other DNA
ggggctggggaggataggcat

SEQ ID NO: 17970 - DNA, 21 bp, synthetic construct
  misc_feature 1..21: note = Description of Artificial Sequence: Synthetic oligonucleotide
  source 1..21: mol_type = other DNA
ggttctactaagcagaatgag

SEQ ID NO: 17971 - DNA, 21 bp, synthetic construct
  misc_feature 1..21: note = Description of Artificial Sequence: Synthetic oligonucleotide
  source 1..21: mol_type = other DNA
gatgcttctaatcctggtcgg

SEQ ID NO: 17972 - DNA, 21 bp, synthetic construct
  misc_feature 1..21: note = Description of Artificial Sequence: Synthetic oligonucleotide
  source 1..21: mol_type = other DNA
tcgcatgctagtgctcagggt

SEQ ID NO: 17973 - DNA, 21 bp, synthetic construct
  misc_feature 1..21: note = Description of Artificial Sequence: Synthetic oligonucleotide
  source 1..21: mol_type = other DNA
gagggtgggtctcatgttttg

SEQ ID NO: 17974 - DNA, 21 bp, synthetic construct
  misc_feature 1..21: note = Description of Artificial Sequence: Synthetic oligonucleotide
  source 1..21: mol_type = other DNA
acgcatggtgataagcttatg

SEQ ID NO: 17975 - DNA, 21 bp, synthetic construct
  misc_feature 1..21: note = Description of Artificial Sequence: Synthetic oligonucleotide
  source 1..21: mol_type = other DNA
ggtaatgtgtctggtcatagt

SEQ ID NO: 17976 - DNA, 21 bp, synthetic construct
  misc_feature 1..21: note = Description of Artificial Sequence: Synthetic oligonucleotide
  source 1..21: mol_type = other DNA
tctactactactaagggtatg

SEQ ID NO: 17977 - DNA, 21 bp, synthetic construct
  misc_feature 1..21: note = Description of Artificial Sequence: Synthetic oligonucleotide
  source 1..21: mol_type = other DNA
gaaagcaccagcggcggcaaa

SEQ ID NO: 17978 - DNA, 21 bp, synthetic construct
  misc_feature 1..21: note = Description of Artificial Sequence: Synthetic oligonucleotide
  source 1..21: mol_type = other DNA
ggtgatgttggtaagtcggtt

SEQ ID NO: 17979 - DNA, 21 bp, synthetic construct
  misc_feature 1..21: note = Description of Artificial Sequence: Synthetic oligonucleotide
  source 1..21: mol_type = other DNA
accagccaaacccaccccaaa

SEQ ID NO: 17980 - DNA, 21 bp, synthetic construct
  misc_feature 1..21: note = Description of Artificial Sequence: Synthetic oligonucleotide
  source 1..21: mol_type = other DNA
gagagtagtgctagtccgcgt

SEQ ID NO: 17981 - DNA, 21 bp, synthetic construct
  misc_feature 1..21: note = Description of Artificial Sequence: Synthetic oligonucleotide
  source 1..21: mol_type = other DNA
actcagtctacgtctggtact

SEQ ID NO: 17982 - DNA, 21 bp, synthetic construct
  misc_feature 1..21: note = Description of Artificial Sequence: Synthetic oligonucleotide
  source 1..21: mol_type = other DNA
gccgccaacagcggcagcacc

SEQ ID NO: 17983 - DNA, 21 bp, synthetic construct
  misc_feature 1..21: note = Description of Artificial Sequence: Synthetic oligonucleotide
  source 1..21: mol_type = other DNA
gcttcgggtagtcatgctact

SEQ ID NO: 17984 - DNA, 21 bp, synthetic construct
  misc_feature 1..21: note = Description of Artificial Sequence: Synthetic oligonucleotide
  source 1..21: mol_type = other DNA
gagcctactgctaagggtaat

SEQ ID NO: 17985 - DNA, 21 bp, synthetic construct
  misc_feature 1..21: note = Description of Artificial Sequence: Synthetic oligonucleotide
  source 1..21: mol_type = other DNA
tcgggttcgagtagtagtgtg

SEQ ID NO: 17986 - DNA, 21 bp, synthetic construct
  misc_feature 1..21: note = Description of Artificial Sequence: Synthetic oligonucleotide
  source 1..21: mol_type = other DNA
aacagcggcaacagcagcggc

SEQ ID NO: 17987 - DNA, 21 bp, synthetic construct
  misc_feature 1..21: note = Description of Artificial Sequence: Synthetic oligonucleotide
  source 1..21: mol_type = other DNA
acgggtatggataaggctctg

SEQ ID NO: 17988 - DNA, 21 bp, synthetic construct
  misc_feature 1..21: note = Description of Artificial Sequence: Synthetic oligonucleotide
  source 1..21: mol_type = other DNA
gagggtacgggtaagcttttg

SEQ ID NO: 17989 - DNA, 21 bp, synthetic construct
  misc_feature 1..21: note = Description of Artificial Sequence: Synthetic oligonucleotide
  source 1..21: mol_type = other DNA
gcgtcgtctcgtactcctgag

SEQ ID NO: 17990 - DNA, 21 bp, synthetic construct
  misc_feature 1..21: note = Description of Artificial Sequence: Synthetic oligonucleotide
  source 1..21: mol_type = other DNA
aatccgaagccgtcgaatact

SEQ ID NO: 17991 - DNA, 21 bp, synthetic construct
  misc_feature 1..21: note = Description of Artificial Sequence: Synthetic oligonucleotide
  source 1..21: mol_type = other DNA
actacggagaggtcgggtgtg

SEQ ID NO: 17992 - DNA, 21 bp, synthetic construct
  misc_feature 1..21: note = Description of Artificial Sequence: Synthetic oligonucleotide
  source 1..21: mol_type = other DNA
ggccaaaccgacaccatgaaa

SEQ ID NO: 17993 - DNA, 21 bp, synthetic construct
  misc_feature 1..21: note = Description of Artificial Sequence: Synthetic oligonucleotide
  source 1..21: mol_type = other DNA
caaggcagcgacaccgtcaga

SEQ ID NO: 17994 - DNA, 21 bp, synthetic construct
  misc_feature 1..21: note = Description of Artificial Sequence: Synthetic oligonucleotide
  source 1..21: mol_type = other DNA
caccaaaacgccggcgtccaa

SEQ ID NO: 17995 - DNA, 21 bp, synthetic construct
  misc_feature 1..21: note = Description of Artificial Sequence: Synthetic oligonucleotide
  source 1..21: mol_type = other DNA
aacggcgacagcgtccacaaa

SEQ ID NO: 17996 - DNA, 21 bp, synthetic construct
  misc_feature 1..21: note = Description of Artificial Sequence: Synthetic oligonucleotide
  source 1..21: mol_type = other DNA
tcgtcgggtagtgctaaggag

SEQ ID NO: 17997 - DNA, 21 bp, synthetic construct
  misc_feature 1..21: note = Description of Artificial Sequence: Synthetic oligonucleotide
  source 1..21: mol_type = other DNA
aacaccagcagcagcgccaac

SEQ ID NO: 17998 - DNA, 21 bp, synthetic construct
  misc_feature 1..21: note = Description of Artificial Sequence: Synthetic oligonucleotide
  source 1..21: mol_type = other DNA
attatgcagaataagcagagt

SEQ ID NO: 17999 - DNA, 21 bp, synthetic construct
  misc_feature 1..21: note = Description of Artificial Sequence: Synthetic oligonucleotide
  source 1..21: mol_type = other DNA
agttcggcgagtcctaagggg

SEQ ID NO: 18000 - DNA, 21 bp, synthetic construct
  misc_feature 1..21: note = Description of Artificial Sequence: Synthetic oligonucleotide
  source 1..21: mol_type = other DNA
atgacggggccgagggcttcg

SEQ ID NO: 18001 - DNA, 21 bp, synthetic construct
  misc_feature 1..21: note = Description of Artificial Sequence: Synthetic oligonucleotide
  source 1..21: mol_type = other DNA
cagggggagggtgctgggaag

SEQ ID NO: 18002 - DNA, 21 bp, synthetic construct
  misc_feature 1..21: note = Description of Artificial Sequence: Synthetic oligonucleotide
  source 1..21: mol_type = other DNA
gatcagacgggtgcgccgcat

SEQ ID NO: 18003 - DNA, 21 bp, synthetic construct
  misc_feature 1..21: note = Description of Artificial Sequence: Synthetic oligonucleotide
  source 1..21: mol_type = other DNA
ggtacgaaggtgactaatcag

SEQ ID NO: 18004 - DNA, 21 bp, synthetic construct
  misc_feature 1..21: note = Description of Artificial Sequence: Synthetic oligonucleotide
  source 1..21: mol_type = other DNA
gaaaaactccaacacaccagc

SEQ ID NO: 18005 - DNA, 21 bp, synthetic construct
  misc_feature 1..21: note = Description of Artificial Sequence: Synthetic oligonucleotide
  source 1..21: mol_type = other DNA
gaacaagccagccacaacgcc

SEQ ID NO: 18006 - DNA, 21 bp, synthetic construct
  misc_feature 1..21: note = Description of Artificial Sequence: Synthetic oligonucleotide
  source 1..21: mol_type = other DNA
gtgcagtcgtctagtacggct

SEQ ID NO: 18007 - DNA, 21 bp, synthetic construct
  misc_feature 1..21: note = Description of Artificial Sequence: Synthetic oligonucleotide
  source 1..21: mol_type = other DNA
agttctgcgagtcagaatgtt

SEQ ID NO: 18008 - DNA, 21 bp, synthetic construct
  misc_feature 1..21: note = Description of Artificial Sequence: Synthetic oligonucleotide
  source 1..21: mol_type = other DNA
agcggcgccagcgccgccgcc

SEQ ID NO: 18009 - DNA, 21 bp, synthetic construct
  misc_feature 1..21: note = Description of Artificial Sequence: Synthetic oligonucleotide
  source 1..21: mol_type = other DNA
agcgtcggcggcagcgccaac

SEQ ID NO: 18010 - DNA, 21 bp, synthetic construct
  misc_feature 1..21: note = Description of Artificial Sequence: Synthetic oligonucleotide
  source 1..21: mol_type = other DNA
ctgcagaatagtcaggctcag

SEQ ID NO: 18011 - DNA, 21 bp, synthetic construct
  misc_feature 1..21: note = Description of Artificial Sequence: Synthetic oligonucleotide
  source 1..21: mol_type = other DNA
gacaacgcccacaccaccagc

SEQ ID NO: 18012 - DNA, 21 bp, synthetic construct
  misc_feature 1..21: note = Description of Artificial Sequence: Synthetic oligonucleotide
  source 1..21: mol_type = other DNA
gctcagaatccgactaatatg

SEQ ID NO: 18013 - DNA, 21 bp, synthetic construct
  misc_feature 1..21: note = Description of Artificial Sequence: Synthetic oligonucleotide
  source 1..21: mol_type = other DNA
ggcgtcagcgacaaaaccagc

SEQ ID NO: 18014 - DNA, 21 bp, synthetic construct
  misc_feature 1..21: note = Description of Artificial Sequence: Synthetic oligonucleotide
  source 1..21: mol_type = other DNA
aacggcagcagcagcgccacc

SEQ ID NO: 18015 - DNA, 21 bp, synthetic construct
  misc_feature 1..21: note = Description of Artificial Sequence: Synthetic oligonucleotide
  source 1..21: mol_type = other DNA
tcttcgaatgctactatgaag

SEQ ID NO: 18016 - DNA, 21 bp, synthetic construct
  misc_feature 1..21: note = Description of Artificial Sequence: Synthetic oligonucleotide
  source 1..21: mol_type = other DNA
gtcaccaacaaagccagcgtc

SEQ ID NO: 18017 - DNA, 21 bp, synthetic construct
  misc_feature 1..21: note = Description of Artificial Sequence: Synthetic oligonucleotide
  source 1..21: mol_type = other DNA
agcgacgaaagagccagcacc

SEQ ID NO: 18018 - DNA, 21 bp, synthetic construct
  misc_feature 1..21: note = Description of Artificial Sequence: Synthetic oligonucleotide
  source 1..21: mol_type = other DNA
gtcgccggcgacaaacccaac

SEQ ID NO: 18019 - DNA, 21 bp, synthetic construct
  misc_feature 1..21: note = Description of Artificial Sequence: Synthetic oligonucleotide
  source 1..21: mol_type = other DNA
agcagcaccgaaaaacccctc

SEQ ID NO: 18020 - DNA, 21 bp, synthetic construct
  misc_feature 1..21: note = Description of Artificial Sequence: Synthetic oligonucleotide
  source 1..21: mol_type = other DNA
gtttcgactgggaattcgaat

SEQ ID NO: 18021 - DNA, 21 bp, synthetic construct
  misc_feature 1..21: note = Description of Artificial Sequence: Synthetic oligonucleotide
  source 1..21: mol_type = other DNA
gtcaccggcagcaacgccacc

SEQ ID NO: 18022 - DNA, 21 bp, synthetic construct
  misc_feature 1..21: note = Description of Artificial Sequence: Synthetic oligonucleotide
  source 1..21: mol_type = other DNA
tcgagtactaagggtgagggg

SEQ ID NO: 18023 - DNA, 21 bp, synthetic construct
  misc_feature 1..21: note = Description of Artificial Sequence: Synthetic oligonucleotide
  source 1..21: mol_type = other DNA
tcgggtgggacgtcgtctatt

SEQ ID NO: 18024 - DNA, 21 bp, synthetic construct
  misc_feature 1..21: note = Description of Artificial Sequence: Synthetic oligonucleotide
  source 1..21: mol_type = other DNA
atggtcagcaccggcggcaaa

SEQ ID NO: 18025 - DNA, 21 bp, synthetic construct
  misc_feature 1..21: note = Description of Artificial Sequence: Synthetic oligonucleotide
  source 1..21: mol_type = other DNA
gaaagagccaacaacaacaac

SEQ ID NO: 18026 - DNA, 21 bp, synthetic construct
  misc_feature 1..21: note = Description of Artificial Sequence: Synthetic oligonucleotide
  source 1..21: mol_type = other DNA
gtcgccggcaccagcagcaac

SEQ ID NO: 18027 - DNA, 21 bp, synthetic construct
  misc_feature 1..21: note = Description of Artificial Sequence: Synthetic oligonucleotide
  source 1..21: mol_type = other DNA
gacagcggccccaccagcaga

SEQ ID NO: 18028 - DNA, 21 bp, synthetic construct
  misc_feature 1..21: note = Description of Artificial Sequence: Synthetic oligonucleotide
  source 1..21: mol_type = other DNA
acgaatatggctccgtcgacg

SEQ ID NO: 18029 - DNA, 21 bp, synthetic construct
  misc_feature 1..21: note = Description of Artificial Sequence: Synthetic oligonucleotide
  source 1..21: mol_type = other DNA
gcgagtcagaaggcttctggt

SEQ ID NO: 18030 - DNA, 21 bp, synthetic construct
  misc_feature 1..21: note = Description of Artificial Sequence: Synthetic oligonucleotide
  source 1..21: mol_type = other DNA
tcgagtgcggctaatagtaag

SEQ ID NO: 18031 - DNA, 21 bp, synthetic construct
  misc_feature 1..21: note = Description of Artificial Sequence: Synthetic oligonucleotide
  source 1..21: mol_type = other DNA
accagccaaggcggcaacgcc

SEQ ID NO: 18032 - DNA, 21 bp, synthetic construct
  misc_feature 1..21: note = Description of Artificial Sequence: Synthetic oligonucleotide
  source 1..21: mol_type = other DNA
accggcagcacccacgccgcc

SEQ ID NO: 18033 - DNA, 21 bp, synthetic construct
  misc_feature 1..21: note = Description of Artificial Sequence: Synthetic oligonucleotide
  source 1..21: mol_type = other DNA
agtacggttgatccgaaggct

SEQ ID NO: 18034 - DNA, 21 bp, synthetic construct
  misc_feature 1..21: note = Description of Artificial Sequence: Synthetic oligonucleotide
  source 1..21: mol_type = other DNA
gctgctgggaattcgtctaag

SEQ ID NO: 18035 - DNA, 21 bp, synthetic construct
  misc_feature 1..21: note = Description of Artificial Sequence: Synthetic oligonucleotide
  source 1..21: mol_type = other DNA
ggggttaatggggttaaggct

SEQ ID NO: 18036 - DNA, 21 bp, synthetic construct
  misc_feature 1..21: note = Description of Artificial Sequence: Synthetic oligonucleotide
  source 1..21: mol_type = other DNA
ggtacgaatgctccgcctagt

SEQ ID NO: 18037 - DNA, 21 bp, synthetic construct
  misc_feature 1..21: note = Description of Artificial Sequence: Synthetic oligonucleotide
  source 1..21: mol_type = other DNA
tctgggactcaggtgtctggt

SEQ ID NO: 18038 - DNA, 21 bp, synthetic construct
  misc_feature 1..21: note = Description of Artificial Sequence: Synthetic oligonucleotide
  source 1..21: mol_type = other DNA
agccacggcagccccaccagc

SEQ ID NO: 18039 - DNA, 21 bp, synthetic construct
  misc_feature 1..21: note = Description of Artificial Sequence: Synthetic oligonucleotide
  source 1..21: mol_type = other DNA
gggatgtctaaggaggctagc

SEQ ID NO: 18040 - DNA, 21 bp, synthetic construct
  misc_feature 1..21: note = Description of Artificial Sequence: Synthetic oligonucleotide
  source 1..21: mol_type = other DNA
tcgtcgtctggtgggtctcag

SEQ ID NO: 18041 - DNA, 21 bp, synthetic construct
  misc_feature 1..21: note = Description of Artificial Sequence: Synthetic oligonucleotide
  source 1..21: mol_type = other DNA
caacaagccaccccccacggc

SEQ ID NO: 18042 - DNA, 21 bp, synthetic construct
  misc_feature 1..21: note = Description of Artificial Sequence: Synthetic oligonucleotide
  source 1..21: mol_type = other DNA
ggtgttgggaatcctgttaat

SEQ ID NO: 18043 - DNA, 21 bp, synthetic construct
  misc_feature 1..21: note = Description of Artificial Sequence: Synthetic oligonucleotide
  source 1..21: mol_type = other DNA
gccagcaccggcgaacccaaa

SEQ ID NO: 18044 - DNA, 21 bp, synthetic construct
  misc_feature 1..21: note = Description of Artificial Sequence: Synthetic oligonucleotide
  source 1..21: mol_type = other DNA
ggcagccccaacggcaacgtc

SEQ ID NO: 18045 - DNA, 21 bp, synthetic construct
  misc_feature 1..21: note = Description of Artificial Sequence: Synthetic oligonucleotide
  source 1..21: mol_type = other DNA
aaccaacccaccaccgccggc

SEQ ID NO: 18046 - DNA, 21 bp, synthetic construct
  misc_feature 1..21: note = Description of Artificial Sequence: Synthetic oligonucleotide
  source 1..21: mol_type = other DNA
caaaaaggcgacagaagcaac

SEQ ID NO: 18047 - DNA, 21 bp, synthetic construct
  misc_feature 1..21: note = Description of Artificial Sequence: Synthetic oligonucleotide
  source 1..21: mol_type = other DNA
ctcgccaccggcaaagacggc

SEQ ID NO: 18048 - DNA, 21 bp, synthetic construct
  misc_feature 1..21: note = Description of Artificial Sequence: Synthetic oligonucleotide
  source 1..21: mol_type = other DNA
gaacaaagcaaaatcgccgtc

SEQ ID NO: 18049 - DNA, 21 bp, synthetic construct
  misc_feature 1..21: note = Description of Artificial Sequence: Synthetic oligonucleotide
  source 1..21: mol_type = other DNA
gccaacaccaaacaaacccaa

SEQ ID NO: 18050 - DNA, 21 bp, synthetic construct
  misc_feature 1..21: note = Description of Artificial Sequence: Synthetic oligonucleotide
  source 1..21: mol_type = other DNA
gtttcttcgggtcagcctgct

SEQ ID NO: 18051 - DNA, 21 bp, synthetic construct
  misc_feature 1..21: note = Description of Artificial Sequence: Synthetic oligonucleotide
  source 1..21: mol_type = other DNA
agcagcggcaccagcaccaaa

SEQ ID NO: 18052 - DNA, 21 bp, synthetic construct
  misc_feature 1..21: note = Description of Artificial Sequence: Synthetic oligonucleotide
  source 1..21: mol_type = other DNA
actgatcagaagacgtctgtg

SEQ ID NO: 18053 - DNA, 21 bp, synthetic construct
  misc_feature 1..21: note = Description of Artificial Sequence: Synthetic oligonucleotide
  source 1..21: mol_type = other DNA
gccagcacccaaggcaacagc

SEQ ID NO: 18054 - DNA, 21 bp, synthetic construct
  misc_feature 1..21: note = Description of Artificial Sequence: Synthetic oligonucleotide
  source 1..21: mol_type = other DNA
gatagtgataaggtgcgtaat

SEQ ID NO: 18055 - DNA, 21 bp, synthetic construct
  misc_feature 1..21: note = Description of Artificial Sequence: Synthetic oligonucleotide
  source 1..21: mol_type = other DNA
aaggagggtacggcgaatagg

SEQ ID NO: 18056 - DNA, 21 bp, synthetic construct
  misc_feature 1..21: note = Description of Artificial Sequence: Synthetic oligonucleotide
  source 1..21: mol_type = other DNA
agtacgagttcgcagagtgtt

SEQ ID NO: 18057 - DNA, 21 bp, synthetic construct
  misc_feature 1..21: note = Description of Artificial Sequence: Synthetic oligonucleotide
  source 1..21: mol_type = other DNA
ggggtgtcttcgaagtctaat

SEQ ID NO: 18058 - DNA, 21 bp, synthetic construct
  misc_feature 1..21: note = Description of Artificial Sequence: Synthetic oligonucleotide
  source 1..21: mol_type = other DNA
tatcctgctggtgataagggg

SEQ ID NO: 18059 - DNA, 21 bp, synthetic construct
  misc_feature 1..21: note = Description of Artificial Sequence: Synthetic oligonucleotide
  source 1..21: mol_type = other DNA
gctcatgcgaaggagtcgggt

SEQ ID NO: 18060 - DNA, 21 bp, synthetic construct
  misc_feature 1..21: note = Description of Artificial Sequence: Synthetic oligonucleotide
  source 1..21: mol_type = other DNA
cagaattctacttcggctagt

SEQ ID NO: 18061 - DNA, 21 bp, synthetic construct
  misc_feature 1..21: note = Description of Artificial Sequence: Synthetic oligonucleotide
  source 1..21: mol_type = other DNA
ggggctgatcctactagtcgg

SEQ ID NO: 18062 - DNA, 21 bp, synthetic construct
  misc_feature 1..21: note = Description of Artificial Sequence: Synthetic oligonucleotide
  source 1..21: mol_type = other DNA
agccaagtcaacagcagcaaa

SEQ ID NO: 18063 - DNA, 21 bp, synthetic construct
  misc_feature 1..21: note = Description of Artificial Sequence: Synthetic oligonucleotide
  source 1..21: mol_type = other DNA
gacagcagaaaccccaacgcc

SEQ ID NO: 18064 - DNA, 21 bp, synthetic construct
  misc_feature 1..21: note = Description of Artificial Sequence: Synthetic oligonucleotide
  source 1..21: mol_type = other DNA
gacagcggcagcgccagcgtc

SEQ ID NO: 18065 - DNA, 21 bp, synthetic construct
  misc_feature 1..21: note = Description of Artificial Sequence: Synthetic oligonucleotide
  source 1..21: mol_type = other DNA
gccaacccccccaccagcggc

SEQ ID NO: 18066 - DNA, 21 bp, synthetic construct
  misc_feature 1..21: note = Description of Artificial Sequence: Synthetic oligonucleotide
  source 1..21: mol_type = other DNA
ggccaaggcgacagactcacc

SEQ ID NO: 18067 - DNA, 21 bp, synthetic construct
  misc_feature 1..21: note = Description of Artificial Sequence: Synthetic oligonucleotide
  source 1..21: mol_type = other DNA
agtgggcgtgattcgagtggt

SEQ ID NO: 18068 - DNA, 21 bp, synthetic construct
  misc_feature 1..21: note = Description of Artificial Sequence: Synthetic oligonucleotide
  source 1..21: mol_type = other DNA
gggggtaattctacgagtaat

SEQ ID NO: 18069 - DNA, 21 bp, synthetic construct
  misc_feature 1..21: note = Description of Artificial Sequence: Synthetic oligonucleotide
  source 1..21: mol_type = other DNA
gggttgggggatgggcgtcag

SEQ ID NO: 18070 - DNA, 21 bp, synthetic construct
  misc_feature 1..21: note = Description of Artificial Sequence: Synthetic oligonucleotide
  source 1..21: mol_type = other DNA
tctgctagtggtagtactcag

SEQ ID NO: 18071 - DNA, 21 bp, synthetic construct
  misc_feature 1..21: note = Description of Artificial Sequence: Synthetic oligonucleotide
  source 1..21: mol_type = other DNA
agagccgaaaacagccccacc

SEQ ID NO: 18072 - DNA, 21 bp, synthetic construct
  misc_feature 1..21: note = Description of Artificial Sequence: Synthetic oligonucleotide
  source 1..21: mol_type = other DNA
gttacggattcgaagagtttg

SEQ ID NO: 18073 - DNA, 21 bp, synthetic construct
  misc_feature 1..21: note = Description of Artificial Sequence: Synthetic oligonucleotide
  source 1..21: mol_type = other DNA
aaaaacggcagcagcagcggc

SEQ ID NO: 18074 - DNA, 21 bp, synthetic construct
  misc_feature 1..21: note = Description of Artificial Sequence: Synthetic oligonucleotide
  source 1..21: mol_type = other DNA
gacagcaaaagcaacctcaac

SEQ ID NO: 18075 - DNA, 21 bp, synthetic construct
  misc_feature 1..21: note = Description of Artificial Sequence: Synthetic oligonucleotide
  source 1..21: mol_type = other DNA
agcgccaacgacaaaagagtc

SEQ ID NO: 18076 - DNA, 21 bp, synthetic construct
  misc_feature 1..21: note = Description of Artificial Sequence: Synthetic oligonucleotide
  source 1..21: mol_type = other DNA
gcgacgaaggagcagagtcat

SEQ ID NO: 18077 - DNA, 21 bp, synthetic construct
  misc_feature 1..21: note = Description of Artificial Sequence: Synthetic oligonucleotide
  source 1..21: mol_type = other DNA
agcaacgaccccagcgtcaaa

SEQ ID NO: 18078 - DNA, 21 bp, synthetic construct
  misc_feature 1..21: note = Description of Artificial Sequence: Synthetic oligonucleotide
  source 1..21: mol_type = other DNA
ctcacccaagacaaacccagc

SEQ ID NO: 18079 - DNA, 21 bp, synthetic construct
  misc_feature 1..21: note = Description of Artificial Sequence: Synthetic oligonucleotide
  source 1..21: mol_type = other DNA
catggtggtactagtagtagt

SEQ ID NO: 18080 - DNA, 21 bp, synthetic construct
  misc_feature 1..21: note = Description of Artificial Sequence: Synthetic oligonucleotide
  source 1..21: mol_type = other DNA
ggtgttgataaggctaatttg

SEQ ID NO: 18081 - DNA, 21 bp, synthetic construct
  misc_feature 1..21: note = Description of Artificial Sequence: Synthetic oligonucleotide
  source 1..21: mol_type = other DNA
aatcatgttacgaagcctacg

SEQ ID NO: 18082 - DNA, 21 bp, synthetic construct
  misc_feature 1..21: note = Description of Artificial Sequence: Synthetic oligonucleotide
  source 1..21: mol_type = other DNA
agcagagacaccaaaaacaac

SEQ ID NO: 18083 - DNA, 21 bp, synthetic construct
  misc_feature 1..21: note = Description of Artificial Sequence: Synthetic oligonucleotide
  source 1..21: mol_type = other DNA
gaaggcgccagcaaactcccc

SEQ ID NO: 18084 - DNA, 21 bp, synthetic construct
  misc_feature 1..21: note = Description of Artificial Sequence: Synthetic oligonucleotide
  source 1..21: mol_type = other DNA
tcgacttctcctcagaatgct

SEQ ID NO: 18085 - DNA, 21 bp, synthetic construct
  misc_feature 1..21: note = Description of Artificial Sequence: Synthetic oligonucleotide
  source 1..21: mol_type = other DNA
tacggcgacaaaaccaaaagc

SEQ ID NO: 18086 - DNA, 21 bp, synthetic construct
  misc_feature 1..21: note = Description of Artificial Sequence: Synthetic oligonucleotide
  source 1..21: mol_type = other DNA
accagaaacgccaccagcgtc

SEQ ID NO: 18087 - DNA, 21 bp, synthetic construct
  misc_feature 1..21: note = Description of Artificial Sequence: Synthetic oligonucleotide
  source 1..21: mol_type = other DNA
atgagcaccgaaagaagcggc

SEQ ID NO: 18088 - DNA, 21 bp, synthetic construct
  misc_feature 1..21: note = Description of Artificial Sequence: Synthetic oligonucleotide
  source 1..21: mol_type = other DNA
attcaggctagtggggcgcag

SEQ ID NO: 18089 - DNA, 21 bp, synthetic construct
  misc_feature 1..21: note = Description of Artificial Sequence: Synthetic oligonucleotide
  source 1..21: mol_type = other DNA
cagtcgcagggtgcgagtatg

SEQ ID NO: 18090 - DNA, 21 bp, synthetic construct
  misc_feature 1..21: note = Description of Artificial Sequence: Synthetic oligonucleotide
  source 1..21: mol_type = other DNA
gcggagaagggtgcgtctagt

SEQ ID NO: 18091 - DNA, 21 bp, synthetic construct
  misc_feature 1..21: note = Description of Artificial Sequence: Synthetic oligonucleotide
  source 1..21: mol_type = other DNA
tctgcgggtcagggtttgggt

SEQ ID NO: 18092 - DNA, 21 bp, synthetic construct
  misc_feature 1..21: note = Description of Artificial Sequence: Synthetic oligonucleotide
  source 1..21: mol_type = other DNA
aacgccagcagcaaaggcacc

SEQ ID NO: 18093 - DNA, 21 bp, synthetic construct
  misc_feature 1..21: note = Description of Artificial Sequence: Synthetic oligonucleotide
  source 1..21: mol_type = other DNA
actgctgggagttctaggggt

SEQ ID NO: 18094 - DNA, 21 bp, synthetic construct
  misc_feature 1..21: note = Description of Artificial Sequence: Synthetic oligonucleotide
  source 1..21: mol_type = other DNA
ttgactaagacggggtctgcg

SEQ ID NO: 18095 - DNA, 21 bp, synthetic construct
  misc_feature 1..21: note = Description of Artificial Sequence: Synthetic oligonucleotide
  source 1..21: mol_type = other DNA
ggtagttctcggcctagtgag

SEQ ID NO: 18096 - DNA, 21 bp, synthetic construct
  misc_feature 1..21: note = Description of Artificial Sequence: Synthetic oligonucleotide
  source 1..21: mol_type = other DNA
ggtactgatcagggtcgtagt

SEQ ID NO: 18097 - DNA, 21 bp, synthetic construct
  misc_feature 1..21: note = Description of Artificial Sequence: Synthetic oligonucleotide
  source 1..21: mol_type = other DNA
agcaccggcgccgccaccacc

SEQ ID NO: 18098 - DNA, 21 bp, synthetic construct
  misc_feature 1..21: note = Description of Artificial Sequence: Synthetic oligonucleotide
  source 1..21: mol_type = other DNA
gcttcgactggtcagtctgtt

SEQ ID NO: 18099 - DNA, 21 bp, synthetic construct
  misc_feature 1..21: note = Description of Artificial Sequence: Synthetic oligonucleotide
  source 1..21: mol_type = other DNA
gggattggtaataagccgaat

SEQ ID NO: 18100 - DNA, 21 bp, synthetic construct
  misc_feature 1..21: note = Description of Artificial Sequence: Synthetic oligonucleotide
  source 1..21: mol_type = other DNA
gccaccgccagaccccccggc

SEQ ID NO: 18101 - DNA, 21 bp, synthetic construct
  misc_feature 1..21: note = Description of Artificial Sequence: Synthetic oligonucleotide
  source 1..21: mol_type = other DNA
aatactgcgccggctaagggt

SEQ ID NO: 18102 - DNA, 21 bp, synthetic construct
  misc_feature 1..21: note = Description of Artificial Sequence: Synthetic oligonucleotide
  source 1..21: mol_type = other DNA
ctggggggtaatgggcagggt

SEQ ID NO: 18103 - DNA, 21 bp, synthetic construct
  misc_feature 1..21: note = Description of Artificial Sequence: Synthetic oligonucleotide
  source 1..21: mol_type = other DNA
aacggcgtcgcccccgccggc

SEQ ID NO: 18104 - DNA, 21 bp, synthetic construct
  misc_feature 1..21: note = Description of Artificial Sequence: Synthetic oligonucleotide
  source 1..21: mol_type = other DNA
acgagtgggagttctccgaag

SEQ ID NO: 18105 - DNA, 21 bp, synthetic construct
  misc_feature 1..21: note = Description of Artificial Sequence: Synthetic oligonucleotide
  source 1..21: mol_type = other DNA
ctcaccggccccagcgccggc

SEQ ID NO: 18106 - DNA, 21 bp, synthetic construct
  misc_feature 1..21: note = Description of Artificial Sequence: Synthetic oligonucleotide
  source 1..21: mol_type = other DNA
gaccaaagagaaaaaggcgcc

SEQ ID NO: 18107 - DNA, 21 bp, synthetic construct
  misc_feature 1..21: note = Description of Artificial Sequence: Synthetic oligonucleotide
  source 1..21: mol_type = other DNA
gaccaaggcagaacccccggc

SEQ ID NO: 18108 - DNA, 21 bp, synthetic construct
  misc_feature 1..21: note = Description of Artificial Sequence: Synthetic oligonucleotide
  source 1..21: mol_type = other DNA
gccggcgacaaaagcccctac

SEQ ID NO: 18109 - DNA, 21 bp, synthetic construct
  misc_feature 1..21: note = Description of Artificial Sequence: Synthetic oligonucleotide
  source 1..21: mol_type = other DNA
ggcgccatcaaacccaccggc

SEQ ID NO: 18110 - DNA, 21 bp, synthetic construct
  misc_feature 1..21: note = Description of Artificial Sequence: Synthetic oligonucleotide
  source 1..21: mol_type = other DNA
ggtcatactgatattaagggt

SEQ ID NO: 18111 - DNA, 21 bp, synthetic construct
  misc_feature 1..21: note = Description of Artificial Sequence: Synthetic oligonucleotide
  source 1..21: mol_type = other DNA
gtcgccggcatggaaaaaggc

SEQ ID NO: 18112 - DNA, 21 bp, synthetic construct
  misc_feature 1..21: note = Description of Artificial Sequence: Synthetic oligonucleotide
  source 1..21: mol_type = other DNA
tcgcctacgacgactaatttg

SEQ ID NO: 18113 - DNA, 21 bp, synthetic construct
  misc_feature 1..21: note = Description of Artificial Sequence: Synthetic oligonucleotide
  source 1..21: mol_type = other DNA
ttgcagggtagtaatagtgct

SEQ ID NO: 18114 - DNA, 21 bp, synthetic construct
  misc_feature 1..21: note = Description of Artificial Sequence: Synthetic oligonucleotide
  source 1..21: mol_type = other DNA
aaccaagaaagacccaacgcc

SEQ ID NO: 18115 - DNA, 21 bp, synthetic construct
  misc_feature 1..21: note = Description of Artificial Sequence: Synthetic oligonucleotide
  source 1..21: mol_type = other DNA
aacgccgccaaaaccatgggc

SEQ ID NO: 18116 - DNA, 21 bp, synthetic construct
  misc_feature 1..21: note = Description of Artificial Sequence: Synthetic oligonucleotide
  source 1..21: mol_type = other DNA
accaccggcaacgccggcctc

SEQ ID NO: 18117 - DNA, 21 bp, synthetic construct
  misc_feature 1..21: note = Description of Artificial Sequence: Synthetic oligonucleotide
  source 1..21: mol_type = other DNA
accagagacagcaccagagcc

SEQ ID NO: 18118 - DNA, 21 bp, synthetic construct
  misc_feature 1..21: note = Description of Artificial Sequence: Synthetic oligonucleotide
  source 1..21: mol_type = other DNA
agcagaaccaacgccaacatg

SEQ ID NO: 18119 - DNA, 21 bp, synthetic construct
  misc_feature 1..21: note = Description of Artificial Sequence: Synthetic oligonucleotide
  source 1..21: mol_type = other DNA
caaatcagacccagcgacggc

SEQ ID NO: 18120 - DNA, 21 bp, synthetic construct
  misc_feature 1..21: note = Description of Artificial Sequence: Synthetic oligonucleotide
  source 1..21: mol_type = other DNA
aacagagacagcagcgccagc

SEQ ID NO: 18121 - DNA, 21 bp, synthetic construct
  misc_feature 1..21: note = Description of Artificial Sequence: Synthetic oligonucleotide
  source 1..21: mol_type = other DNA
aagggtggtgggaatagtagt

SEQ ID NO: 18122 - DNA, 21 bp, synthetic construct
  misc_feature 1..21: note = Description of Artificial Sequence: Synthetic oligonucleotide
  source 1..21: mol_type = other DNA
aataatacgccttctactact

SEQ ID NO: 18123 - DNA, 21 bp, synthetic construct
  misc_feature 1..21: note = Description of Artificial Sequence: Synthetic oligonucleotide
  source 1..21: mol_type = other DNA
actagttcgtctgcgcatacg

SEQ ID NO: 18124 - DNA, 21 bp, synthetic construct
  misc_feature 1..21: note = Description of Artificial Sequence: Synthetic oligonucleotide
  source 1..21: mol_type = other DNA
ggcgccagcgaccaacccaga

SEQ ID NO: 18125 - DNA, 21 bp, synthetic construct
  misc_feature 1..21: note = Description of Artificial Sequence: Synthetic oligonucleotide
  source 1..21: mol_type = other DNA
cagtcttctacgactaatact

SEQ ID NO: 18126 - DNA, 21 bp, synthetic construct
  misc_feature 1..21: note = Description of Artificial Sequence: Synthetic oligonucleotide
  source 1..21: mol_type = other DNA
tcgggggagggttcgggtcgt

SEQ ID NO: 18127 - DNA, 21 bp, synthetic construct
  misc_feature 1..21: note = Description of Artificial Sequence: Synthetic oligonucleotide
  source 1..21: mol_type = other DNA
atcgtcggcggcgccggcgcc

SEQ ID NO: 18128 - DNA, 21 bp, synthetic construct
  misc_feature 1..21: note = Description of Artificial Sequence: Synthetic oligonucleotide
  source 1..21: mol_type = other DNA
ggtacggtggatacgaggact

SEQ ID NO: 18129 - DNA, 21 bp, synthetic construct
  misc_feature 1..21: note = Description of Artificial Sequence: Synthetic oligonucleotide
  source 1..21: mol_type = other DNA
tcttctgatagtaatccgagg

SEQ ID NO: 18130 - DNA, 21 bp, synthetic construct
  misc_feature 1..21: note = Description of Artificial Sequence: Synthetic oligonucleotide
  source 1..21: mol_type = other DNA
ggcagcgccaccaccatcaaa

SEQ ID NO: 18131 - DNA, 21 bp, synthetic construct
  misc_feature 1..21: note = Description of Artificial Sequence: Synthetic oligonucleotide
  source 1..21: mol_type = other DNA
catacggggactcctacggtg

SEQ ID NO: 18132 - DNA, 21 bp, synthetic construct
  misc_feature 1..21: note = Description of Artificial Sequence: Synthetic oligonucleotide
  source 1..21: mol_type = other DNA
gacggccccagaagcgacaaa

SEQ ID NO: 18133 - DNA, 21 bp, synthetic construct
  misc_feature 1..21: note = Description of Artificial Sequence: Synthetic oligonucleotide
  source 1..21: mol_type = other DNA
tcgagtactgctgaggtgaag

SEQ ID NO: 18134 - DNA, 21 bp, synthetic construct
  misc_feature 1..21: note = Description of Artificial Sequence: Synthetic oligonucleotide
  source 1..21: mol_type = other DNA
accggcagcggcggcagcgcc

SEQ ID NO: 18135 - DNA, 21 bp, synthetic construct
  misc_feature 1..21: note = Description of Artificial Sequence: Synthetic oligonucleotide
  source 1..21: mol_type = other DNA
aacggcagcagcaccaccaac

SEQ ID NO: 18136 - DNA, 21 bp, synthetic construct
  misc_feature 1..21: note = Description of Artificial Sequence: Synthetic oligonucleotide
  source 1..21: mol_type = other DNA
cttggtcaggcttcgcatggt

SEQ ID NO: 18137 - DNA, 21 bp, synthetic construct
  misc_feature 1..21: note = Description of Artificial Sequence: Synthetic oligonucleotide
  source 1..21: mol_type = other DNA
ctgcaggataagccggcgggg

SEQ ID NO: 18138 - DNA, 21 bp, synthetic construct
  misc_feature 1..21: note = Description of Artificial Sequence: Synthetic oligonucleotide
  source 1..21: mol_type = other DNA
tcgaataataattctgcttct

SEQ ID NO: 18139 - DNA, 21 bp, synthetic construct
  misc_feature 1..21: note = Description of Artificial Sequence: Synthetic oligonucleotide
  source 1..21: mol_type = other DNA
aaccaaagccccgccgtccaa

SEQ ID NO: 18140 - DNA, 21 bp, synthetic construct
  misc_feature 1..21: note = Description of Artificial Sequence: Synthetic oligonucleotide
  source 1..21: mol_type = other DNA
gacagcttcaaaagcggcagc

SEQ ID NO: 18141 - DNA, 21 bp, synthetic construct
  misc_feature 1..21: note = Description of Artificial Sequence: Synthetic oligonucleotide
  source 1..21: mol_type = other DNA
ggcacccaagacggcaccaga

SEQ ID NO: 18142 - DNA, 21 bp, synthetic construct
  misc_feature 1..21: note = Description of Artificial Sequence: Synthetic oligonucleotide
  source 1..21: mol_type = other DNA
gtgacgggggcgaatcctaat

SEQ ID NO: 18143 - DNA, 21 bp, synthetic construct
  misc_feature 1..21: note = Description of Artificial Sequence: Synthetic oligonucleotide
  source 1..21: mol_type = other DNA
tcgactggggcttcttctcat

SEQ ID NO: 18144 - DNA, 21 bp, synthetic construct
  misc_feature 1..21: note = Description of Artificial Sequence: Synthetic oligonucleotide
  source 1..21: mol_type = other DNA
gcccaaagcaaagaaaacacc

SEQ ID NO: 18145 - DNA, 21 bp, synthetic construct
  misc_feature 1..21: note = Description of Artificial Sequence: Synthetic oligonucleotide
  source 1..21: mol_type = other DNA
accaaacaagccacccccctc

SEQ ID NO: 18146 - DNA, 21 bp, synthetic construct
  misc_feature 1..21: note = Description of Artificial Sequence: Synthetic oligonucleotide
  source 1..21: mol_type = other DNA
acgtcggagcaggttgctcgg

SEQ ID NO: 18147 - DNA, 21 bp, synthetic construct
  misc_feature 1..21: note = Description of Artificial Sequence: Synthetic oligonucleotide
  source 1..21: mol_type = other DNA
agtagtggtgagaaggcgctt

SEQ ID NO: 18148 - DNA, 21 bp, synthetic construct
  misc_feature 1..21: note = Description of Artificial Sequence: Synthetic oligonucleotide
  source 1..21: mol_type = other DNA
atcggcggcaccgccgccggc

SEQ ID NO: 18149 - DNA, 21 bp, synthetic construct
  misc_feature 1..21: note = Description of Artificial Sequence: Synthetic oligonucleotide
  source 1..21: mol_type = other DNA
ctcaccaccagcaccaacgcc

SEQ ID NO: 18150 - DNA, 21 bp, synthetic construct
  misc_feature 1..21: note = Description of Artificial Sequence: Synthetic oligonucleotide
  source 1..21: mol_type = other DNA
tatggtagtaagggtagtgct

SEQ ID NO: 18151 - DNA, 21 bp, synthetic construct
  misc_feature 1..21: note = Description of Artificial Sequence: Synthetic oligonucleotide
  source 1..21: mol_type = other DNA
acgtctggtaagaataataat

SEQ ID NO: 18152 - DNA, 21 bp, synthetic construct
  misc_feature 1..21: note = Description of Artificial Sequence: Synthetic oligonucleotide
  source 1..21: mol_type = other DNA
ggcagcaaaagcggcgtcgcc

SEQ ID NO: 18153 - DNA, 21 bp, synthetic construct
  misc_feature 1..21: note = Description of Artificial Sequence: Synthetic oligonucleotide
  source 1..21: mol_type = other DNA
agcggcagcggcgacaaaagc

SEQ ID NO: 18154 - DNA, 21 bp, synthetic construct
  misc_feature 1..21: note = Description of Artificial Sequence: Synthetic oligonucleotide
  source 1..21: mol_type = other DNA
atgaacaacaccagcaacaaa

SEQ ID NO: 18155 - DNA, 21 bp, synthetic construct
  misc_feature 1..21: note = Description of Artificial Sequence: Synthetic oligonucleotide
  source 1..21: mol_type = other DNA
gataatggtaaggctattgct

SEQ ID NO: 18156 - DNA, 21 bp, synthetic construct
  misc_feature 1..21: note = Description of Artificial Sequence: Synthetic oligonucleotide
  source 1..21: mol_type = other DNA
actaatgttgataaggctagt

SEQ ID NO: 18157 - DNA, 21 bp, synthetic construct
  misc_feature 1..21: note = Description of Artificial Sequence: Synthetic oligonucleotide
  source 1..21: mol_type = other DNA
atgcctggtgagactaagggg

SEQ ID NO: 18158 - DNA, 21 bp, synthetic construct
  misc_feature 1..21: note = Description of Artificial Sequence: Synthetic oligonucleotide
  source 1..21: mol_type = other DNA
caagccaaccaaggcggcaac

SEQ ID NO: 18159 - DNA, 21 bp, synthetic construct
  misc_feature 1..21: note = Description of Artificial Sequence: Synthetic oligonucleotide
  source 1..21: mol_type = other DNA
gaaagaagcaccagcagcacc

SEQ ID NO: 18160 - DNA, 21 bp, synthetic construct
  misc_feature 1..21: note = Description of Artificial Sequence: Synthetic oligonucleotide
  source 1..21: mol_type = other DNA
ctcgccagagacaaaagcgtc

SEQ ID NO: 18161 - DNA, 21 bp, synthetic construct
  misc_feature 1..21: note = Description of Artificial Sequence: Synthetic oligonucleotide
  source 1..21: mol_type = other DNA
accggcagcagcagccccgtc

SEQ ID NO: 18162 - DNA, 21 bp, synthetic construct
  misc_feature 1..21: note = Description of Artificial Sequence: Synthetic oligonucleotide
  source 1..21: mol_type = other DNA
gaaagcagcacccccgccaga

SEQ ID NO: 18163 - DNA, 21 bp, synthetic construct
  misc_feature 1..21: note = Description of Artificial Sequence: Synthetic oligonucleotide
  source 1..21: mol_type = other DNA
agcgccagccccagcacccaa

SEQ ID NO: 18164 - DNA, 21 bp, synthetic construct
  misc_feature 1..21: note = Description of Artificial Sequence: Synthetic oligonucleotide
  source 1..21: mol_type = other DNA
aacaacgcccaaggcagcagc

SEQ ID NO: 18165 - DNA, 21 bp, synthetic construct
  misc_feature 1..21: note = Description of Artificial Sequence: Synthetic oligonucleotide
  source 1..21: mol_type = other DNA
gatgcgcagcgtcctactgct

SEQ ID NO: 18166 - DNA, 21 bp, synthetic construct
  misc_feature 1..21: note = Description of Artificial Sequence: Synthetic oligonucleotide
  source 1..21: mol_type = other DNA
gatacgacggctaagcagggg

SEQ ID NO: 18167 - DNA, 21 bp, synthetic construct
  misc_feature 1..21: note = Description of Artificial Sequence: Synthetic oligonucleotide
  source 1..21: mol_type = other DNA
gcgggtggtaataatgctcat

SEQ ID NO: 18168 - DNA, 21 bp, synthetic construct
  misc_feature 1..21: note = Description of Artificial Sequence: Synthetic oligonucleotide
  source 1..21: mol_type = other DNA
gccagcaaaggcaacagcctc

SEQ ID NO: 18169 - DNA, 21 bp, synthetic construct
  misc_feature 1..21: note = Description of Artificial Sequence: Synthetic oligonucleotide
  source 1..21: mol_type = other DNA
ggtgataaggctaatgcgcat

SEQ ID NO: 18170 - DNA, 21 bp, synthetic construct
  misc_feature 1..21: note = Description of Artificial Sequence: Synthetic oligonucleotide
  source 1..21: mol_type = other DNA
gagcctggggcggctattaag

SEQ ID NO: 18171 - DNA, 21 bp, synthetic construct
  misc_feature 1..21: note = Description of Artificial Sequence: Synthetic oligonucleotide
  source 1..21: mol_type = other DNA
attagtgataagacgccgcag

SEQ ID NO: 18172 - DNA, 21 bp, synthetic construct
  misc_feature 1..21: note = Description of Artificial Sequence: Synthetic oligonucleotide
  source 1..21: mol_type = other DNA
tttagtaatgcgaagaatggg

SEQ ID NO: 18173 - DNA, 21 bp, synthetic construct
  misc_feature 1..21: note = Description of Artificial Sequence: Synthetic oligonucleotide
  source 1..21: mol_type = other DNA
accagcgaacacaaaagccaa

SEQ ID NO: 18174 - DNA, 21 bp, synthetic construct
  misc_feature 1..21: note = Description of Artificial Sequence: Synthetic oligonucleotide
  source 1..21: mol_type = other DNA
acgggtgggaatggttttgct

SEQ ID NO: 18175 - DNA, 21 bp, synthetic construct
  misc_feature 1..21: note = Description of Artificial Sequence: Synthetic oligonucleotide
  source 1..21: mol_type = other DNA
agtagtaagccttcggcggct

SEQ ID NO: 18176 - DNA, 21 bp, synthetic construct
  misc_feature 1..21: note = Description of Artificial Sequence: Synthetic oligonucleotide
  source 1..21: mol_type = other DNA
gtcggcaaaagcgaactcacc

SEQ ID NO: 18177 - DNA, 21 bp, synthetic construct
  misc_feature 1..21: note = Description of Artificial Sequence: Synthetic oligonucleotide
  source 1..21: mol_type = other DNA
aacagcagaacccccagcacc

SEQ ID NO: 18178 - DNA, 21 bp, synthetic construct
  misc_feature 1..21: note = Description of Artificial Sequence: Synthetic oligonucleotide
  source 1..21: mol_type = other DNA
acggggcaggagaggtcttct

SEQ ID NO: 18179 - DNA, 21 bp, synthetic construct
  misc_feature 1..21: note = Description of Artificial Sequence: Synthetic oligonucleotide
  source 1..21: mol_type = other DNA
aattctgcggggagtaattct

SEQ ID NO: 18180 - DNA, 21 bp, synthetic construct
  misc_feature 1..21: note = Description of Artificial Sequence: Synthetic oligonucleotide
  source 1..21: mol_type = other DNA
agcggcagcaacaccgtccaa

SEQ ID NO: 18181 - DNA, 21 bp, synthetic construct
  misc_feature 1..21: note = Description of Artificial Sequence: Synthetic oligonucleotide
  source 1..21: mol_type = other DNA
agttctacgaaggtggctcag

SEQ ID NO: 18182 - DNA, 21 bp, synthetic construct
  misc_feature 1..21: note = Description of Artificial Sequence: Synthetic oligonucleotide
  source 1..21: mol_type = other DNA
gcttctgggggttctcgtact

SEQ ID NO: 18183 - DNA, 21 bp, synthetic construct
  misc_feature 1..21: note = Description of Artificial Sequence: Synthetic oligonucleotide
  source 1..21: mol_type = other DNA
cagagttctactagtcaggtg

SEQ ID NO: 18184 - DNA, 21 bp, synthetic construct
  misc_feature 1..21: note = Description of Artificial Sequence: Synthetic oligonucleotide
  source 1..21: mol_type = other DNA
aatgtggggaatcctgtgtcg

SEQ ID NO: 18185 - DNA, 21 bp, synthetic construct
  misc_feature 1..21: note = Description of Artificial Sequence: Synthetic oligonucleotide
  source 1..21: mol_type = other DNA
agcaacaccgccagcgccagc

SEQ ID NO: 18186 - DNA, 21 bp, synthetic construct
  misc_feature 1..21: note = Description of Artificial Sequence: Synthetic oligonucleotide
  source 1..21: mol_type = other DNA
gaaggcacccaccccatcgtc

SEQ ID NO: 18187 - DNA, 21 bp, synthetic construct
  misc_feature 1..21: note = Description of Artificial Sequence: Synthetic oligonucleotide
  source 1..21: mol_type = other DNA
gccgtcgccggcgccaaagcc

SEQ ID NO: 18188 - DNA, 21 bp, synthetic construct
  misc_feature 1..21: note = Description of Artificial Sequence: Synthetic oligonucleotide
  source 1..21: mol_type = other DNA
ggcgaaagcggccccaaaagc

SEQ ID NO: 18189 - DNA, 21 bp, synthetic construct
  misc_feature 1..21: note = Description of Artificial Sequence: Synthetic oligonucleotide
  source 1..21: mol_type = other DNA
actcatggtaagactccggtt

SEQ ID NO: 18190 - DNA, 21 bp, synthetic construct
  misc_feature 1..21: note = Description of Artificial Sequence: Synthetic oligonucleotide
  source 1..21: mol_type = other DNA
gtcgccagccaaacccaagcc

SEQ ID NO: 18191 - DNA, 21 bp, synthetic construct
  misc_feature 1..21: note = Description of Artificial Sequence: Synthetic oligonucleotide
  source 1..21: mol_type = other DNA
agcagcaccaccagcgtccac

SEQ ID NO: 18192 - DNA, 21 bp, synthetic construct
  misc_feature 1..21: note = Description of Artificial Sequence: Synthetic oligonucleotide
  source 1..21: mol_type = other DNA
tcggggacgagttcgttgcag

SEQ ID NO: 18193 - DNA, 21 bp, synthetic construct
  misc_feature 1..21: note = Description of Artificial Sequence: Synthetic oligonucleotide
  source 1..21: mol_type = other DNA
agtagtggggcgagtaattcg

SEQ ID NO: 18194 - DNA, 21 bp, synthetic construct
  misc_feature 1..21: note = Description of Artificial Sequence: Synthetic oligonucleotide
  source 1..21: mol_type = other DNA
cagaataagccgggttctgtt

SEQ ID NO: 18195 - DNA, 21 bp, synthetic construct
  misc_feature 1..21: note = Description of Artificial Sequence: Synthetic oligonucleotide
  source 1..21: mol_type = other DNA
accaccggcagcgccgccctc

SEQ ID NO: 18196 - DNA, 21 bp, synthetic construct
  misc_feature 1..21: note = Description of Artificial Sequence: Synthetic oligonucleotide
  source 1..21: mol_type = other DNA
aacgtcagacaaaccaacgaa

SEQ ID NO: 18197 - DNA, 21 bp, synthetic construct
  misc_feature 1..21: note = Description of Artificial Sequence: Synthetic oligonucleotide
  source 1..21: mol_type = other DNA
gaccaaggcaccagcaccctc

SEQ ID NO: 18198 - DNA, 21 bp, synthetic construct
  misc_feature 1..21: note = Description of Artificial Sequence: Synthetic oligonucleotide
  source 1..21: mol_type = other DNA
gtcagcggccaagtcagcagc

SEQ ID NO: 18199 - DNA, 21 bp, synthetic construct
  misc_feature 1..21: note = Description of Artificial Sequence: Synthetic oligonucleotide
  source 1..21: mol_type = other DNA
aacctcaaaagcagccccagc

SEQ ID NO: 18200 - DNA, 21 bp, synthetic construct
  misc_feature 1..21: note = Description of Artificial Sequence: Synthetic oligonucleotide
  source 1..21: mol_type = other DNA
aacagcggcgacgcccaacac

SEQ ID NO: 18201 - DNA, 21 bp, synthetic construct
  misc_feature 1..21: note = Description of Artificial Sequence: Synthetic oligonucleotide
  source 1..21: mol_type = other DNA
ggtactgcgggggctatgtcg

SEQ ID NO: 18202 - DNA, 21 bp, synthetic construct
  misc_feature 1..21: note = Description of Artificial Sequence: Synthetic oligonucleotide
  source 1..21: mol_type = other DNA
accaaagacaaaggcatgacc

SEQ ID NO: 18203 - DNA, 21 bp, synthetic construct
  misc_feature 1..21: note = Description of Artificial Sequence: Synthetic oligonucleotide
  source 1..21: mol_type = other DNA
gccaacaccaaagacggcaga

SEQ ID NO: 18204 - DNA, 21 bp, synthetic construct
  misc_feature 1..21: note = Description of Artificial Sequence: Synthetic oligonucleotide
  source 1..21: mol_type = other DNA
aacggcaacctcagcaccggc

SEQ ID NO: 18205 - DNA, 21 bp, synthetic construct
  misc_feature 1..21: note = Description of Artificial Sequence: Synthetic oligonucleotide
  source 1..21: mol_type = other DNA
accagcaaaggcaacagcggc

SEQ ID NO: 18206 - DNA, 21 bp, synthetic construct
  misc_feature 1..21: note = Description of Artificial Sequence: Synthetic oligonucleotide
  source 1..21: mol_type = other DNA
agcaccagccccagcggcggc

SEQ ID NO: 18207 - DNA, 21 bp, synthetic construct
  misc_feature 1..21: note = Description of Artificial Sequence: Synthetic oligonucleotide
  source 1..21: mol_type = other DNA
agcggcagccccggcgccggc

SEQ ID NO: 18208 - DNA, 21 bp, synthetic construct
  misc_feature 1..21: note = Description of Artificial Sequence: Synthetic oligonucleotide
  source 1..21: mol_type = other DNA
caacaaagcagcggcaccggc

SEQ ID NO: 18209 - DNA, 21 bp, synthetic construct
  misc_feature 1..21: note = Description of Artificial Sequence: Synthetic oligonucleotide
  source 1..21: mol_type = other DNA
gatgtgacggctaagaatgcg

SEQ ID NO: 18210 - DNA, 21 bp, synthetic construct
  misc_feature 1..21: note = Description of Artificial Sequence: Synthetic oligonucleotide
  source 1..21: mol_type = other DNA
gccagcgacaaaagcgccggc

SEQ ID NO: 18211 - DNA, 21 bp, synthetic construct
  misc_feature 1..21: note = Description of Artificial Sequence: Synthetic oligonucleotide
  source 1..21: mol_type = other DNA
gctccgacggagggtgggcgt

SEQ ID NO: 18212 - DNA, 21 bp, synthetic construct
  misc_feature 1..21: note = Description of Artificial Sequence: Synthetic oligonucleotide
  source 1..21: mol_type = other DNA
ggcagccccaacggccacgcc

SEQ ID NO: 18213 - DNA, 21 bp, synthetic construct
  misc_feature 1..21: note = Description of Artificial Sequence: Synthetic oligonucleotide
  source 1..21: mol_type = other DNA
ggcggcaccgaaaaactcagc

SEQ ID NO: 18214 - DNA, 21 bp, synthetic construct
  misc_feature 1..21: note = Description of Artificial Sequence: Synthetic oligonucleotide
  source 1..21: mol_type = other DNA
gtcagaaacagcgccaccgaa

SEQ ID NO: 18215 - DNA, 21 bp, synthetic construct
  misc_feature 1..21: note = Description of Artificial Sequence: Synthetic oligonucleotide
  source 1..21: mol_type = other DNA
ttggatgggaagtctgtttcg

SEQ ID NO: 18216 - DNA, 21 bp, synthetic construct
  misc_feature 1..21: note = Description of Artificial Sequence: Synthetic oligonucleotide
  source 1..21: mol_type = other DNA
ggcgccgaaaccaacagagtc

SEQ ID NO: 18217 - DNA, 21 bp, synthetic construct
  misc_feature 1..21: note = Description of Artificial Sequence: Synthetic oligonucleotide
  source 1..21: mol_type = other DNA
atgcagactaagcagcctggg

SEQ ID NO: 18218 - DNA, 21 bp, synthetic construct
  misc_feature 1..21: note = Description of Artificial Sequence: Synthetic oligonucleotide
  source 1..21: mol_type = other DNA
cttggtacgcagaatgtgacg

SEQ ID NO: 18219 - DNA, 21 bp, synthetic construct
  misc_feature 1..21: note = Description of Artificial Sequence: Synthetic oligonucleotide
  source 1..21: mol_type = other DNA
gaccaacaaagcaacctcaaa

SEQ ID NO: 18220 - DNA, 21 bp, synthetic construct
  misc_feature 1..21: note = Description of Artificial Sequence: Synthetic oligonucleotide
  source 1..21: mol_type = other DNA
ggtcctgggagtggtagtacg

SEQ ID NO: 18221 - DNA, 21 bp, synthetic construct
  misc_feature 1..21: note = Description of Artificial Sequence: Synthetic oligonucleotide
  source 1..21: mol_type = other DNA
caaggcagcaacccccccacc

SEQ ID NO: 18222 - DNA, 21 bp, synthetic construct
  misc_feature 1..21: note = Description of Artificial Sequence: Synthetic oligonucleotide
  source 1..21: mol_type = other DNA
gacgacgccagccaaaaactc

SEQ ID NO: 18223 - DNA, 21 bp, synthetic construct
  misc_feature 1..21: note = Description of Artificial Sequence: Synthetic oligonucleotide
  source 1..21: mol_type = other DNA
ggcaacgtcagcaaaggcggc

SEQ ID NO: 18224 - DNA, 21 bp, synthetic construct
  misc_feature 1..21: note = Description of Artificial Sequence: Synthetic oligonucleotide
  source 1..21: mol_type = other DNA
ggcgccgacaccaaagcccac

SEQ ID NO: 18225 - DNA, 21 bp, synthetic construct
  misc_feature 1..21: note = Description of Artificial Sequence: Synthetic oligonucleotide
  source 1..21: mol_type = other DNA
atgggtagtaatcctccgaat

SEQ ID NO: 18226 - DNA, 21 bp, synthetic construct
  misc_feature 1..21: note = Description of Artificial Sequence: Synthetic oligonucleotide
  source 1..21: mol_type = other DNA
aagagtggtacgcatccggat

SEQ ID NO: 18227 - DNA, 21 bp, synthetic construct
  misc_feature 1..21: note = Description of Artificial Sequence: Synthetic oligonucleotide
  source 1..21: mol_type = other DNA
gaagtcagccccaaaaccagc

SEQ ID NO: 18228 - DNA, 21 bp, synthetic construct
  misc_feature 1..21: note = Description of Artificial Sequence: Synthetic oligonucleotide
  source 1..21: mol_type = other DNA
gattcgacggcgttgagtaag

SEQ ID NO: 18229 - DNA, 21 bp, synthetic construct
  misc_feature 1..21: note = Description of Artificial Sequence: Synthetic oligonucleotide
  source 1..21: mol_type = other DNA
agagacggcggcaaaggcagc

SEQ ID NO: 18230 - DNA, 21 bp, synthetic construct
  misc_feature 1..21: note = Description of Artificial Sequence: Synthetic oligonucleotide
  source 1..21: mol_type = other DNA
agtaatttgtcgacgccgaag

SEQ ID NO: 18231 - DNA, 21 bp, synthetic construct
  misc_feature 1..21: note = Description of Artificial Sequence: Synthetic oligonucleotide
  source 1..21: mol_type = other DNA
aaaagcacccccagcgccgtc

SEQ ID NO: 18232 - DNA, 21 bp, synthetic construct
  misc_feature 1..21: note = Description of Artificial Sequence: Synthetic oligonucleotide
  source 1..21: mol_type = other DNA
ggcaacgcccaaagccccgtc

SEQ ID NO: 18233 - DNA, 21 bp, synthetic construct
  misc_feature 1..21: note = Description of Artificial Sequence: Synthetic oligonucleotide
  source 1..21: mol_type = other DNA
ggcgtcaccaacagcgccgcc

SEQ ID NO: 18234 - DNA, 21 bp, synthetic construct
  misc_feature 1..21: note = Description of Artificial Sequence: Synthetic oligonucleotide
  source 1..21: mol_type = other DNA
tttactgatagtaaggcttct

SEQ ID NO: 18235 - DNA, 21 bp, synthetic construct
  misc_feature 1..21: note = Description of Artificial Sequence: Synthetic oligonucleotide
  source 1..21: mol_type = other DNA
agcaacaacagcaccatcaaa

SEQ ID NO: 18236 - DNA, 21 bp, synthetic construct
  misc_feature 1..21: note = Description of Artificial Sequence: Synthetic oligonucleotide
  source 1..21: mol_type = other DNA
atgcccctcgaaagcagcaaa

SEQ ID NO: 18237 - DNA, 21 bp, synthetic construct
  misc_feature 1..21: note = Description of Artificial Sequence: Synthetic oligonucleotide
  source 1..21: mol_type = other DNA
accggcaaacaaagcggcagc

SEQ ID NO: 18238 - DNA, 21 bp, synthetic construct
  misc_feature 1..21: note = Description of Artificial Sequence: Synthetic oligonucleotide
  source 1..21: mol_type = other DNA
gtccccaacggcagccccaac

SEQ ID NO: 18239 - DNA, 21 bp, synthetic construct
  misc_feature 1..21: note = Description of Artificial Sequence: Synthetic oligonucleotide
  source 1..21: mol_type = other DNA
aacggcaccgcccaaaacctc

SEQ ID NO: 18240 - DNA, 21 bp, synthetic construct
  misc_feature 1..21: note = Description of Artificial Sequence: Synthetic oligonucleotide
  source 1..21: mol_type = other DNA
agtatgaataagtctgggttg

SEQ ID NO: 18241 - DNA, 21 bp, synthetic construct
  misc_feature 1..21: note = Description of Artificial Sequence: Synthetic oligonucleotide
  source 1..21: mol_type = other DNA
ttggcggataagggtactgct

SEQ ID NO: 18242 - DNA, 21 bp, synthetic construct
  misc_feature 1..21: note = Description of Artificial Sequence: Synthetic oligonucleotide
  source 1..21: mol_type = other DNA
aacgggcctgtgccggttaag

SEQ ID NO: 18243 - DNA, 21 bp, synthetic construct
  misc_feature 1..21: note = Description of Artificial Sequence: Synthetic oligonucleotide
  source 1..21: mol_type = other DNA
agtcgggcgacttcgaatgct

SEQ ID NO: 18244 - DNA, 21 bp, synthetic construct
  misc_feature 1..21: note = Description of Artificial Sequence: Synthetic oligonucleotide
  source 1..21: mol_type = other DNA
agcggcagcgacagccacaga

SEQ ID NO: 18245 - DNA, 21 bp, synthetic construct
  misc_feature 1..21: note = Description of Artificial Sequence: Synthetic oligonucleotide
  source 1..21: mol_type = other DNA
aacggcggcgacaaattcaaa

SEQ ID NO: 18246 - DNA, 21 bp, synthetic construct
  misc_feature 1..21: note = Description of Artificial Sequence: Synthetic oligonucleotide
  source 1..21: mol_type = other DNA
gcccaagccgaccaaagcaaa

SEQ ID NO: 18247 - DNA, 21 bp, synthetic construct
  misc_feature 1..21: note = Description of Artificial Sequence: Synthetic oligonucleotide
  source 1..21: mol_type = other DNA
tctactaagagtgctgagggg

SEQ ID NO: 18248 - DNA, 21 bp, synthetic construct
  misc_feature 1..21: note = Description of Artificial Sequence: Synthetic oligonucleotide
  source 1..21: mol_type = other DNA
aacagcgaaagcaaagccagc

SEQ ID NO: 18249 - DNA, 21 bp, synthetic construct
  misc_feature 1..21: note = Description of Artificial Sequence: Synthetic oligonucleotide
  source 1..21: mol_type = other DNA
cacaccgccaacgccaccagc

SEQ ID NO: 18250 - DNA, 21 bp, synthetic construct
  misc_feature 1..21: note = Description of Artificial Sequence: Synthetic oligonucleotide
  source 1..21: mol_type = other DNA
agcaccagccaaagcagcgcc

SEQ ID NO: 18251 - DNA, 21 bp, synthetic construct
  misc_feature 1..21: note = Description of Artificial Sequence: Synthetic oligonucleotide
  source 1..21: mol_type = other DNA
cagaattcgacgcatccttct

SEQ ID NO: 18252 - DNA, 21 bp, synthetic construct
  misc_feature 1..21: note = Description of Artificial Sequence: Synthetic oligonucleotide
  source 1..21: mol_type = other DNA
gacacccaaaaaagcctcaac

SEQ ID NO: 18253 - DNA, 21 bp, synthetic construct
  misc_feature 1..21: note = Description of Artificial Sequence: Synthetic oligonucleotide
  source 1..21: mol_type = other DNA
agcggcatcggcagcgccacc

SEQ ID NO: 18254 - DNA, 21 bp, synthetic construct
  misc_feature 1..21: note = Description of Artificial Sequence: Synthetic oligonucleotide
  source 1..21: mol_type = other DNA
attggtcgtgagaagagtcag

SEQ ID NO: 18255 - DNA, 21 bp, synthetic construct
  misc_feature 1..21: note = Description of Artificial Sequence: Synthetic oligonucleotide
  source 1..21: mol_type = other DNA
cagaagcagcatgctagtgag

SEQ ID NO: 18256 - DNA, 21 bp, synthetic construct
  misc_feature 1..21: note = Description of Artificial Sequence: Synthetic oligonucleotide
  source 1..21: mol_type = other DNA
gacagcaccaaacaagccttc

SEQ ID NO: 18257 - DNA, 21 bp, synthetic construct
  misc_feature 1..21: note = Description of Artificial Sequence: Synthetic oligonucleotide
  source 1..21: mol_type = other DNA
cttcgtgattctggtaatggg

SEQ ID NO: 18258 - DNA, 21 bp, synthetic construct
  misc_feature 1..21: note = Description of Artificial Sequence: Synthetic oligonucleotide
  source 1..21: mol_type = other DNA
agcgccagcacccccaaagac

SEQ ID NO: 18259 - DNA, 21 bp, synthetic construct
  misc_feature 1..21: note = Description of Artificial Sequence: Synthetic oligonucleotide
  source 1..21: mol_type = other DNA
tcgggggcgcctagttctttg

SEQ ID NO: 18260 - DNA, 21 bp, synthetic construct
  misc_feature 1..21: note = Description of Artificial Sequence: Synthetic oligonucleotide
  source 1..21: mol_type = other DNA
aagacttcttcgactaatgtt

SEQ ID NO: 18261 - DNA, 21 bp, synthetic construct
  misc_feature 1..21: note = Description of Artificial Sequence: Synthetic oligonucleotide
  source 1..21: mol_type = other DNA
ggtggtggtccgagtgcgggt

SEQ ID NO: 18262 - DNA, 21 bp, synthetic construct
  misc_feature 1..21: note = Description of Artificial Sequence: Synthetic oligonucleotide
  source 1..21: mol_type = other DNA
gaaggcgtcaacagcgccaaa

SEQ ID NO: 18263 - DNA, 21 bp, synthetic construct
  misc_feature 1..21: note = Description of Artificial Sequence: Synthetic oligonucleotide
  source 1..21: mol_type = other DNA
agtactggtaagcctgggaat

SEQ ID NO: 18264 - DNA, 21 bp, synthetic construct
  misc_feature 1..21: note = Description of Artificial Sequence: Synthetic oligonucleotide
  source 1..21: mol_type = other DNA
gaggggggggggcaggcgcat

SEQ ID NO: 18265 - DNA, 21 bp, synthetic construct
  misc_feature 1..21: note = Description of Artificial Sequence: Synthetic oligonucleotide
  source 1..21: mol_type = other DNA
agtgggaagggtactagtatt

SEQ ID NO: 18266 - DNA, 21 bp, synthetic construct
  misc_feature 1..21: note = Description of Artificial Sequence: Synthetic oligonucleotide
  source 1..21: mol_type = other DNA
agcagcaccaacggcaccagc

SEQ ID NO: 18267 - DNA, 21 bp, synthetic construct
  misc_feature 1..21: note = Description of Artificial Sequence: Synthetic oligonucleotide
  source 1..21: mol_type = other DNA
gccagcgacaacagccccaga

SEQ ID NO: 18268 - DNA, 21 bp, synthetic construct
  misc_feature 1..21: note = Description of Artificial Sequence: Synthetic oligonucleotide
  source 1..21: mol_type = other DNA
accaaaaacagcggcaacagc

SEQ ID NO: 18269 - DNA, 21 bp, synthetic construct
  misc_feature 1..21: note = Description of Artificial Sequence: Synthetic oligonucleotide
  source 1..21: mol_type = other DNA
agtgctaatggtaagcctatg

SEQ ID NO: 18270 - DNA, 21 bp, synthetic construct
  misc_feature 1..21: note = Description of Artificial Sequence: Synthetic oligonucleotide
  source 1..21: mol_type = other DNA
agtacgggtgatcagaggcag

SEQ ID NO: 18271 - DNA, 21 bp, synthetic construct
  misc_feature 1..21: note = Description of Artificial Sequence: Synthetic oligonucleotide
  source 1..21: mol_type = other DNA
agcggccaaaacgtcaacggc

SEQ ID NO: 18272 - DNA, 21 bp, synthetic construct
  misc_feature 1..21: note = Description of Artificial Sequence: Synthetic oligonucleotide
  source 1..21: mol_type = other DNA
gtcagaagcaccagcaacgtc

SEQ ID NO: 18273 - DNA, 21 bp, synthetic construct
  misc_feature 1..21: note = Description of Artificial Sequence: Synthetic oligonucleotide
  source 1..21: mol_type = other DNA
agcagcgcccaaaaaggcgac

SEQ ID NO: 18274 - DNA, 21 bp, synthetic construct
  misc_feature 1..21: note = Description of Artificial Sequence: Synthetic oligonucleotide
  source 1..21: mol_type = other DNA
gttggtactccgcatagtggg

SEQ ID NO: 18275 - DNA, 21 bp, synthetic construct
  misc_feature 1..21: note = Description of Artificial Sequence: Synthetic oligonucleotide
  source 1..21: mol_type = other DNA
aaggggggtgatagtagttct

SEQ ID NO: 18276 - DNA, 21 bp, synthetic construct
  misc_feature 1..21: note = Description of Artificial Sequence: Synthetic oligonucleotide
  source 1..21: mol_type = other DNA
aaccaagtccaacaaagccac

SEQ ID NO: 18277 - DNA, 21 bp, synthetic construct
  misc_feature 1..21: note = Description of Artificial Sequence: Synthetic oligonucleotide
  source 1..21: mol_type = other DNA
agccccgacaaaagcaccgcc

SEQ ID NO: 18278 - DNA, 21 bp, synthetic construct
  misc_feature 1..21: note = Description of Artificial Sequence: Synthetic oligonucleotide
  source 1..21: mol_type = other DNA
ctcaccaccagcagcagcggc

SEQ ID NO: 18279 - DNA, 21 bp, synthetic construct
  misc_feature 1..21: note = Description of Artificial Sequence: Synthetic oligonucleotide
  source 1..21: mol_type = other DNA
gaaaacaaaagccccagcctc

SEQ ID NO: 18280 - DNA, 21 bp, synthetic construct
  misc_feature 1..21: note = Description of Artificial Sequence: Synthetic oligonucleotide
  source 1..21: mol_type = other DNA
gatatgtcttctaaggctacg

SEQ ID NO: 18281 - DNA, 21 bp, synthetic construct
  misc_feature 1..21: note = Description of Artificial Sequence: Synthetic oligonucleotide
  source 1..21: mol_type = other DNA
ctcggcacccaacccggcacc

SEQ ID NO: 18282 - DNA, 21 bp, synthetic construct
  misc_feature 1..21: note = Description of Artificial Sequence: Synthetic oligonucleotide
  source 1..21: mol_type = other DNA
aatggggcttcgaaggatagt

SEQ ID NO: 18283 - DNA, 21 bp, synthetic construct
  misc_feature 1..21: note = Description of Artificial Sequence: Synthetic oligonucleotide
  source 1..21: mol_type = other DNA
agttctacggctacgcatgtt

SEQ ID NO: 18284 - DNA, 21 bp, synthetic construct
  misc_feature 1..21: note = Description of Artificial Sequence: Synthetic oligonucleotide
  source 1..21: mol_type = other DNA
caccaaggcgccgccagcagc

SEQ ID NO: 18285 - DNA, 21 bp, synthetic construct
  misc_feature 1..21: note = Description of Artificial Sequence: Synthetic oligonucleotide
  source 1..21: mol_type = other DNA
gggaggaatagtacgcctcat

SEQ ID NO: 18286 - DNA, 21 bp, synthetic construct
  misc_feature 1..21: note = Description of Artificial Sequence: Synthetic oligonucleotide
  source 1..21: mol_type = other DNA
caaaccagcaccagcgtcgcc

SEQ ID NO: 18287 - DNA, 21 bp, synthetic construct
  misc_feature 1..21: note = Description of Artificial Sequence: Synthetic oligonucleotide
  source 1..21: mol_type = other DNA
gtgggtactaagcagcctgtt

SEQ ID NO: 18288 - DNA, 21 bp, synthetic construct
  misc_feature 1..21: note = Description of Artificial Sequence: Synthetic oligonucleotide
  source 1..21: mol_type = other DNA
ggtgataataatgcgaagact

SEQ ID NO: 18289 - DNA, 21 bp, synthetic construct
  misc_feature 1..21: note = Description of Artificial Sequence: Synthetic oligonucleotide
  source 1..21: mol_type = other DNA
gtcggcggcggcgccatcaaa

SEQ ID NO: 18290 - DNA, 21 bp, synthetic construct
  misc_feature 1..21: note = Description of Artificial Sequence: Synthetic oligonucleotide
  source 1..21: mol_type = other DNA
ggcaccggcgccgaaaaagcc

SEQ ID NO: 18291 - DNA, 21 bp, synthetic construct
  misc_feature 1..21: note = Description of Artificial Sequence: Synthetic oligonucleotide
  source 1..21: mol_type = other DNA
aacagccccacccaaggcagc

SEQ ID NO: 18292 - DNA, 21 bp, synthetic construct
  misc_feature 1..21: note = Description of Artificial Sequence: Synthetic oligonucleotide
  source 1..21: mol_type = other DNA
gacaccggcagcaaacacagc

SEQ ID NO: 18293 - DNA, 21 bp, synthetic construct
  misc_feature 1..21: note = Description of Artificial Sequence: Synthetic oligonucleotide
  source 1..21: mol_type = other DNA
gggactactcaggtgagtaag

SEQ ID NO: 18294 - DNA, 21 bp, synthetic construct
  misc_feature 1..21: note = Description of Artificial Sequence: Synthetic oligonucleotide
  source 1..21: mol_type = other DNA
tatggtggtaagactggtacg

SEQ ID NO: 18295 - DNA, 21 bp, synthetic construct
  misc_feature 1..21: note = Description of Artificial Sequence: Synthetic oligonucleotide
  source 1..21: mol_type = other DNA
gacagcagcaacaaaagcgtc

SEQ ID NO: 18296 - DNA, 21 bp, synthetic construct
  misc_feature 1..21: note = Description of Artificial Sequence: Synthetic oligonucleotide
  source 1..21: mol_type = other DNA
aacgccggcagcagcagccac

SEQ ID NO: 18297 - DNA, 21 bp, synthetic construct
  misc_feature 1..21: note = Description of Artificial Sequence: Synthetic oligonucleotide
  source 1..21: mol_type = other DNA
aatcaggggaatgggggtatg

SEQ ID NO: 18298 - DNA, 21 bp, synthetic construct
  misc_feature 1..21: note = Description of Artificial Sequence: Synthetic oligonucleotide
  source 1..21: mol_type = other DNA
gcggggtcgtctcagtctggt

SEQ ID NO: 18299 - DNA, 21 bp, synthetic construct
  misc_feature 1..21: note = Description of Artificial Sequence: Synthetic oligonucleotide
  source 1..21: mol_type = other DNA
gcgtctactggtgataaggtg

SEQ ID NO: 18300 - DNA, 21 bp, synthetic construct
  misc_feature 1..21: note = Description of Artificial Sequence: Synthetic oligonucleotide
  source 1..21: mol_type = other DNA
ggcaccaccagcgccaaagaa

SEQ ID NO: 18301 - DNA, 21 bp, synthetic construct
  misc_feature 1..21: note = Description of Artificial Sequence: Synthetic oligonucleotide
  source 1..21: mol_type = other DNA
gggattggtacgggtaatctt

SEQ ID NO: 18302 - DNA, 21 bp, synthetic construct
  misc_feature 1..21: note = Description of Artificial Sequence: Synthetic oligonucleotide
  source 1..21: mol_type = other DNA
tcgccggttcctaatgggttg

SEQ ID NO: 18303 - DNA, 21 bp, synthetic construct
  misc_feature 1..21: note = Description of Artificial Sequence: Synthetic oligonucleotide
  source 1..21: mol_type = other DNA
gaccaaagcagcaaactccaa

SEQ ID NO: 18304 - DNA, 21 bp, synthetic construct
  misc_feature 1..21: note = Description of Artificial Sequence: Synthetic oligonucleotide
  source 1..21: mol_type = other DNA
caaagcgccaacccccccatc

SEQ ID NO: 18305 - DNA, 21 bp, synthetic construct
  misc_feature 1..21: note = Description of Artificial Sequence: Synthetic oligonucleotide
  source 1..21: mol_type = other DNA
ggcagcgaaagcagacccctc

SEQ ID NO: 18306 - DNA, 21 bp, synthetic construct
  misc_feature 1..21: note = Description of Artificial Sequence: Synthetic oligonucleotide
  source 1..21: mol_type = other DNA
tgcaccgccagcaaagccgaa

SEQ ID NO: 18307 - DNA, 21 bp, synthetic construct
  misc_feature 1..21: note = Description of Artificial Sequence: Synthetic oligonucleotide
  source 1..21: mol_type = other DNA
caggctgatgctccgtctagg

SEQ ID NO: 18308 - DNA, 21 bp, synthetic construct
  misc_feature 1..21: note = Description of Artificial Sequence: Synthetic oligonucleotide
  source 1..21: mol_type = other DNA
gaagccatcagcgcccccaaa

SEQ ID NO: 18309 - DNA, 21 bp, synthetic construct
  misc_feature 1..21: note = Description of Artificial Sequence: Synthetic oligonucleotide
  source 1..21: mol_type = other DNA
gattcgggttcggctaatcgg

SEQ ID NO: 18310 - DNA, 21 bp, synthetic construct
  misc_feature 1..21: note = Description of Artificial Sequence: Synthetic oligonucleotide
  source 1..21: mol_type = other DNA
gccaccggccccaccagccac

SEQ ID NO: 18311 - DNA, 21 bp, synthetic construct
  misc_feature 1..21: note = Description of Artificial Sequence: Synthetic oligonucleotide
  source 1..21: mol_type = other DNA
accgccgccgccagcagcaaa

SEQ ID NO: 18312 - DNA, 21 bp, synthetic construct
  misc_feature 1..21: note = Description of Artificial Sequence: Synthetic oligonucleotide
  source 1..21: mol_type = other DNA
agcggcgccgaaagaagcctc

SEQ ID NO: 18313 - DNA, 21 bp, synthetic construct
  misc_feature 1..21: note = Description of Artificial Sequence: Synthetic oligonucleotide
  source 1..21: mol_type = other DNA
gacagcaaaagcggcaccagc

SEQ ID NO: 18314 - DNA, 21 bp, synthetic construct
  misc_feature 1..21: note = Description of Artificial Sequence: Synthetic oligonucleotide
  source 1..21: mol_type = other DNA
agtgttggtcagtcgccgaat

SEQ ID NO: 18315 - DNA, 21 bp, synthetic construct
  misc_feature 1..21: note = Description of Artificial Sequence: Synthetic oligonucleotide
  source 1..21: mol_type = other DNA
ggcgtcgcccaaagagacggc

SEQ ID NO: 18316 - DNA, 21 bp, synthetic construct
  misc_feature 1..21: note = Description of Artificial Sequence: Synthetic oligonucleotide
  source 1..21: mol_type = other DNA
gattcggggcaggcgagtaag

SEQ ID NO: 18317 - DNA, 21 bp, synthetic construct
  misc_feature 1..21: note = Description of Artificial Sequence: Synthetic oligonucleotide
  source 1..21: mol_type = other DNA
gccggcgacaacgccaccaga

SEQ ID NO: 18318 - DNA, 21 bp, synthetic construct
  misc_feature 1..21: note = Description of Artificial Sequence: Synthetic oligonucleotide
  source 1..21: mol_type = other DNA
atggcgaagccgactagtact

SEQ ID NO: 18319 - DNA, 21 bp, synthetic construct
  misc_feature 1..21: note = Description of Artificial Sequence: Synthetic oligonucleotide
  source 1..21: mol_type = other DNA
gatgctacttctaggaatact

SEQ ID NO: 18320 - DNA, 21 bp, synthetic construct
  misc_feature 1..21: note = Description of Artificial Sequence: Synthetic oligonucleotide
  source 1..21: mol_type = other DNA
accaacgaaggcaaccacaga

SEQ ID NO: 18321 - DNA, 21 bp, synthetic construct
  misc_feature 1..21: note = Description of Artificial Sequence: Synthetic oligonucleotide
  source 1..21: mol_type = other DNA
acggggcagagtcctggttcg

SEQ ID NO: 18322 - DNA, 21 bp, synthetic construct
  misc_feature 1..21: note = Description of Artificial Sequence: Synthetic oligonucleotide
  source 1..21: mol_type = other DNA
aacagcagcccccccaccacc

SEQ ID NO: 18323 - DNA, 21 bp, synthetic construct
  misc_feature 1..21: note = Description of Artificial Sequence: Synthetic oligonucleotide
  source 1..21: mol_type = other DNA
attactggtcagggtggtgtt

SEQ ID NO: 18324 - DNA, 21 bp, synthetic construct
  misc_feature 1..21: note = Description of Artificial Sequence: Synthetic oligonucleotide
  source 1..21: mol_type = other DNA
ctcagcggcagcgccagcagc

SEQ ID NO: 18325 - DNA, 21 bp, synthetic construct
  misc_feature 1..21: note = Description of Artificial Sequence: Synthetic oligonucleotide
  source 1..21: mol_type = other DNA
gccaaaggcaacggcatgaac

SEQ ID NO: 18326 - DNA, 21 bp, synthetic construct
  misc_feature 1..21: note = Description of Artificial Sequence: Synthetic oligonucleotide
  source 1..21: mol_type = other DNA
tctcagggtgaggtgggtagg

SEQ ID NO: 18327 - DNA, 21 bp, synthetic construct
  misc_feature 1..21: note = Description of Artificial Sequence: Synthetic oligonucleotide
  source 1..21: mol_type = other DNA
gacggcagcaaaagcgccctc

SEQ ID NO: 18328 - DNA, 21 bp, synthetic construct
  misc_feature 1..21: note = Description of Artificial Sequence: Synthetic oligonucleotide
  source 1..21: mol_type = other DNA
ggccccgacaacgcccaaaaa

SEQ ID NO: 18329 - DNA, 21 bp, synthetic construct
  misc_feature 1..21: note = Description of Artificial Sequence: Synthetic oligonucleotide
  source 1..21: mol_type = other DNA
ggcgtcgacggcaaacccagc

SEQ ID NO: 18330 - DNA, 21 bp, synthetic construct
  misc_feature 1..21: note = Description of Artificial Sequence: Synthetic oligonucleotide
  source 1..21: mol_type = other DNA
aaccaaggcagcaacctcagc

SEQ ID NO: 18331 - DNA, 21 bp, synthetic construct
  misc_feature 1..21: note = Description of Artificial Sequence: Synthetic oligonucleotide
  source 1..21: mol_type = other DNA
agagacagcaacgccaacggc

SEQ ID NO: 18332 - DNA, 21 bp, synthetic construct
  misc_feature 1..21: note = Description of Artificial Sequence: Synthetic oligonucleotide
  source 1..21: mol_type = other DNA
gctggtgagtcttcgatgaag

SEQ ID NO: 18333 - DNA, 21 bp, synthetic construct
  misc_feature 1..21: note = Description of Artificial Sequence: Synthetic oligonucleotide
  source 1..21: mol_type = other DNA
gacagcagcagcaaaaacagc

SEQ ID NO: 18334 - DNA, 21 bp, synthetic construct
  misc_feature 1..21: note = Description of Artificial Sequence: Synthetic oligonucleotide
  source 1..21: mol_type = other DNA
accggcaccaacaccgtccaa

SEQ ID NO: 18335 - DNA, 21 bp, synthetic construct
  misc_feature 1..21: note = Description of Artificial Sequence: Synthetic oligonucleotide
  source 1..21: mol_type = other DNA
attggtgagacgacgaagggg

SEQ ID NO: 18336 - DNA, 21 bp, synthetic construct
  misc_feature 1..21: note = Description of Artificial Sequence: Synthetic oligonucleotide
  source 1..21: mol_type = other DNA
atgagagaagacaaactcctc

SEQ ID NO: 18337 - DNA, 21 bp, synthetic construct
  misc_feature 1..21: note = Description of Artificial Sequence: Synthetic oligonucleotide
  source 1..21: mol_type = other DNA
actagtccgcaggggcaggct

SEQ ID NO: 18338 - DNA, 21 bp, synthetic construct
  misc_feature 1..21: note = Description of Artificial Sequence: Synthetic oligonucleotide
  source 1..21: mol_type = other DNA
ggtatggatcagacgcggtct

SEQ ID NO: 18339 - DNA, 21 bp, synthetic construct
  misc_feature 1..21: note = Description of Artificial Sequence: Synthetic oligonucleotide
  source 1..21: mol_type = other DNA
gtcaacggcggcagcatcaaa

SEQ ID NO: 18340 - DNA, 21 bp, synthetic construct
  misc_feature 1..21: note = Description of Artificial Sequence: Synthetic oligonucleotide
  source 1..21: mol_type = other DNA
agcagccccggcaccgaaaga

SEQ ID NO: 18341 - DNA, 21 bp, synthetic construct
  misc_feature 1..21: note = Description of Artificial Sequence: Synthetic oligonucleotide
  source 1..21: mol_type = other DNA
gtccccgacagcagaagccaa

SEQ ID NO: 18342 - DNA, 21 bp, synthetic construct
  misc_feature 1..21: note = Description of Artificial Sequence: Synthetic oligonucleotide
  source 1..21: mol_type = other DNA
agcagcgaccaaagcagaaaa

SEQ ID NO: 18343 - DNA, 21 bp, synthetic construct
  misc_feature 1..21: note = Description of Artificial Sequence: Synthetic oligonucleotide
  source 1..21: mol_type = other DNA
gagggtagtagtactattgtg

SEQ ID NO: 18344 - DNA, 21 bp, synthetic construct
  misc_feature 1..21: note = Description of Artificial Sequence: Synthetic oligonucleotide
  source 1..21: mol_type = other DNA
gttactaatgcggctacgggg

SEQ ID NO: 18345 - DNA, 21 bp, synthetic construct
  misc_feature 1..21: note = Description of Artificial Sequence: Synthetic oligonucleotide
  source 1..21: mol_type = other DNA
tacagcggcgacaaacccacc

SEQ ID NO: 18346 - DNA, 21 bp, synthetic construct
  misc_feature 1..21: note = Description of Artificial Sequence: Synthetic oligonucleotide
  source 1..21: mol_type = other DNA
agcgccaccaccgccaacacc

SEQ ID NO: 18347 - DNA, 21 bp, synthetic construct
  misc_feature 1..21: note = Description of Artificial Sequence: Synthetic oligonucleotide
  source 1..21: mol_type = other DNA
tctgctgttcaggcgccgtcg

SEQ ID NO: 18348 - DNA, 21 bp, synthetic construct
  misc_feature 1..21: note = Description of Artificial Sequence: Synthetic oligonucleotide
  source 1..21: mol_type = other DNA
tcgtcttctaagacggcgaat

SEQ ID NO: 18349 - DNA, 21 bp, synthetic construct
  misc_feature 1..21: note = Description of Artificial Sequence: Synthetic oligonucleotide
  source 1..21: mol_type = other DNA
aataatagtggtacgttgagt

SEQ ID NO: 18350 - DNA, 21 bp, synthetic construct
  misc_feature 1..21: note = Description of Artificial Sequence: Synthetic oligonucleotide
  source 1..21: mol_type = other DNA
ggcgaccccagccccagacaa

SEQ ID NO: 18351 - DNA, 21 bp, synthetic construct
  misc_feature 1..21: note = Description of Artificial Sequence: Synthetic oligonucleotide
  source 1..21: mol_type = other DNA
atggtgcagagtcctgctacg

SEQ ID NO: 18352 - DNA, 21 bp, synthetic construct
  misc_feature 1..21: note = Description of Artificial Sequence: Synthetic oligonucleotide
  source 1..21: mol_type = other DNA
cgtggtcaggataagccgaat

SEQ ID NO: 18353 - DNA, 21 bp, synthetic construct
  misc_feature 1..21: note = Description of Artificial Sequence: Synthetic oligonucleotide
  source 1..21: mol_type = other DNA
accagcagcagcacccacagc

SEQ ID NO: 18354 - DNA, 21 bp, synthetic construct
  misc_feature 1..21: note = Description of Artificial Sequence: Synthetic oligonucleotide
  source 1..21: mol_type = other DNA
ggcgccggcagcgccaacagc

SEQ ID NO: 18355 - DNA, 21 bp, synthetic construct
  misc_feature 1..21: note = Description of Artificial Sequence: Synthetic oligonucleotide
  source 1..21: mol_type = other DNA
atgcaaagcgccaaaagcggc

SEQ ID NO: 18356 - DNA, 21 bp, synthetic construct
  misc_feature 1..21: note = Description of Artificial Sequence: Synthetic oligonucleotide
  source 1..21: mol_type = other DNA
agtagggatgagaagctgcgt

SEQ ID NO: 18357 - DNA, 21 bp, synthetic construct
  misc_feature 1..21: note = Description of Artificial Sequence: Synthetic oligonucleotide
  source 1..21: mol_type = other DNA
ctcacccaaagccccggcacc

SEQ ID NO: 18358 - DNA, 21 bp, synthetic construct
  misc_feature 1..21: note = Description of Artificial Sequence: Synthetic oligonucleotide
  source 1..21: mol_type = other DNA
gacggcagcaacgtcaaaagc

SEQ ID NO: 18359 - DNA, 21 bp, synthetic construct
  misc_feature 1..21: note = Description of Artificial Sequence: Synthetic oligonucleotide
  source 1..21: mol_type = other DNA
ggtagtttgccggctaatagt

SEQ ID NO: 18360 - DNA, 21 bp, synthetic construct
  misc_feature 1..21: note = Description of Artificial Sequence: Synthetic oligonucleotide
  source 1..21: mol_type = other DNA
gctgctgggggtacgcatggt

SEQ ID NO: 18361 - DNA, 21 bp, synthetic construct
  misc_feature 1..21: note = Description of Artificial Sequence: Synthetic oligonucleotide
  source 1..21: mol_type = other DNA
aacaacagcaaaaacggcggc

SEQ ID NO: 18362 - DNA, 21 bp, synthetic construct
  misc_feature 1..21: note = Description of Artificial Sequence: Synthetic oligonucleotide
  source 1..21: mol_type = other DNA
agcgtcggcatgacccccccc

SEQ ID NO: 18363 - DNA, 21 bp, synthetic construct
  misc_feature 1..21: note = Description of Artificial Sequence: Synthetic oligonucleotide
  source 1..21: mol_type = other DNA
tcgaatacggctactcctcag

SEQ ID NO: 18364 - DNA, 21 bp, synthetic construct
  misc_feature 1..21: note = Description of Artificial Sequence: Synthetic oligonucleotide
  source 1..21: mol_type = other DNA
gccctccacaaaagcagcacc

SEQ ID NO: 18365 - DNA, 21 bp, synthetic construct
  misc_feature 1..21: note = Description of Artificial Sequence: Synthetic oligonucleotide
  source 1..21: mol_type = other DNA
ggtcttgttagggagactggt

SEQ ID NO: 18366 - DNA, 21 bp, synthetic construct
  misc_feature 1..21: note = Description of Artificial Sequence: Synthetic oligonucleotide
  source 1..21: mol_type = other DNA
aagaataattctagttcgcag

SEQ ID NO: 18367 - DNA, 21 bp, synthetic construct
  misc_feature 1..21: note = Description of Artificial Sequence: Synthetic oligonucleotide
  source 1..21: mol_type = other DNA
gccagccccagcaaagacagc

SEQ ID NO: 18368 - DNA, 21 bp, synthetic construct
  misc_feature 1..21: note = Description of Artificial Sequence: Synthetic oligonucleotide
  source 1..21: mol_type = other DNA
cattcgagtgagagggctggg

SEQ ID NO: 18369 - DNA, 21 bp, synthetic construct
  misc_feature 1..21: note = Description of Artificial Sequence: Synthetic oligonucleotide
  source 1..21: mol_type = other DNA
ggtcctagtacgaataattcg

SEQ ID NO: 18370 - DNA, 21 bp, synthetic construct
  misc_feature 1..21: note = Description of Artificial Sequence: Synthetic oligonucleotide
  source 1..21: mol_type = other DNA
gccggcggcgacaccgccaaa

SEQ ID NO: 18371 - DNA, 21 bp, synthetic construct
  misc_feature 1..21: note = Description of Artificial Sequence: Synthetic oligonucleotide
  source 1..21: mol_type = other DNA
ggtactggtcattcgtcttcg

SEQ ID NO: 18372 - DNA, 21 bp, synthetic construct
  misc_feature 1..21: note = Description of Artificial Sequence: Synthetic oligonucleotide
  source 1..21: mol_type = other DNA
gccagcaacgacaaaatgagc

SEQ ID NO: 18373 - DNA, 21 bp, synthetic construct
  misc_feature 1..21: note = Description of Artificial Sequence: Synthetic oligonucleotide
  source 1..21: mol_type = other DNA
actcctagtactagtaatcat

SEQ ID NO: 18374 - DNA, 21 bp, synthetic construct
  misc_feature 1..21: note = Description of Artificial Sequence: Synthetic oligonucleotide
  source 1..21: mol_type = other DNA
gacacccccgcccacaccaaa

SEQ ID NO: 18375 - DNA, 21 bp, synthetic construct
  misc_feature 1..21: note = Description of Artificial Sequence: Synthetic oligonucleotide
  source 1..21: mol_type = other DNA
atttcggcgggtagttcgtct

SEQ ID NO: 18376 - DNA, 21 bp, synthetic construct
  misc_feature 1..21: note = Description of Artificial Sequence: Synthetic oligonucleotide
  source 1..21: mol_type = other DNA
gaccaaaacagaacccacggc

SEQ ID NO: 18377 - DNA, 21 bp, synthetic construct
  misc_feature 1..21: note = Description of Artificial Sequence: Synthetic oligonucleotide
  source 1..21: mol_type = other DNA
gcgaatatgggtgatgttaag

SEQ ID NO: 18378 - DNA, 21 bp, synthetic construct
  misc_feature 1..21: note = Description of Artificial Sequence: Synthetic oligonucleotide
  source 1..21: mol_type = other DNA
ggcaccagccccggcagcatg

SEQ ID NO: 18379 - DNA, 21 bp, synthetic construct
  misc_feature 1..21: note = Description of Artificial Sequence: Synthetic oligonucleotide
  source 1..21: mol_type = other DNA
gaggggcatgagcattctcgg

SEQ ID NO: 18380 - DNA, 21 bp, synthetic construct
  misc_feature 1..21: note = Description of Artificial Sequence: Synthetic oligonucleotide
  source 1..21: mol_type = other DNA
agcaacaacaccagccccaac

SEQ ID NO: 18381 - DNA, 21 bp, synthetic construct
  misc_feature 1..21: note = Description of Artificial Sequence: Synthetic oligonucleotide
  source 1..21: mol_type = other DNA
aatacgactgctccgtctcat

SEQ ID NO: 18382 - DNA, 21 bp, synthetic construct
  misc_feature 1..21: note = Description of Artificial Sequence: Synthetic oligonucleotide
  source 1..21: mol_type = other DNA
ggtagtgattctggtacgcgg

SEQ ID NO: 18383 - DNA, 21 bp, synthetic construct
  misc_feature 1..21: note = Description of Artificial Sequence: Synthetic oligonucleotide
  source 1..21: mol_type = other DNA
atgggcaaccccaccgccagc

SEQ ID NO: 18384 - DNA, 21 bp, synthetic construct
  misc_feature 1..21: note = Description of Artificial Sequence: Synthetic oligonucleotide
  source 1..21: mol_type = other DNA
gaagccagaagcccccccaaa

SEQ ID NO: 18385 - DNA, 21 bp, synthetic construct
  misc_feature 1..21: note = Description of Artificial Sequence: Synthetic oligonucleotide
  source 1..21: mol_type = other DNA
gaccccctcaacgtcaaagtc

SEQ ID NO: 18386 - DNA, 21 bp, synthetic construct
  misc_feature 1..21: note = Description of Artificial Sequence: Synthetic oligonucleotide
  source 1..21: mol_type = other DNA
gacaaacccacccccagcatc

SEQ ID NO: 18387 - DNA, 21 bp, synthetic construct
  misc_feature 1..21: note = Description of Artificial Sequence: Synthetic oligonucleotide
  source 1..21: mol_type = other DNA
aatcattctgataaggctgcg

SEQ ID NO: 18388 - DNA, 21 bp, synthetic construct
  misc_feature 1..21: note = Description of Artificial Sequence: Synthetic oligonucleotide
  source 1..21: mol_type = other DNA
gcggatcagagtcctaagctg

SEQ ID NO: 18389 - DNA, 21 bp, synthetic construct
  misc_feature 1..21: note = Description of Artificial Sequence: Synthetic oligonucleotide
  source 1..21: mol_type = other DNA
ggccaaaaaggcaacgccgtc

SEQ ID NO: 18390 - DNA, 21 bp, synthetic construct
  misc_feature 1..21: note = Description of Artificial Sequence: Synthetic oligonucleotide
  source 1..21: mol_type = other DNA
tcgggtactagtcatcctgct

SEQ ID NO: 18391 - DNA, 21 bp, synthetic construct
  misc_feature 1..21: note = Description of Artificial Sequence: Synthetic oligonucleotide
  source 1..21: mol_type = other DNA
gcgaatacgagttcgaatagt

SEQ ID NO: 18392 - DNA, 21 bp, synthetic construct
  misc_feature 1..21: note = Description of Artificial Sequence: Synthetic oligonucleotide
  source 1..21: mol_type = other DNA
cagggtaagtctggtggggcg

SEQ ID NO: 18393 - DNA, 21 bp, synthetic construct
  misc_feature 1..21: note = Description of Artificial Sequence: Synthetic oligonucleotide
  source 1..21: mol_type = other DNA
aatactaatccgtctggtgct

SEQ ID NO: 18394 - DNA, 21 bp, synthetic construct
  misc_feature 1..21: note = Description of Artificial Sequence: Synthetic oligonucleotide
  source 1..21: mol_type = other DNA
aaagacaaccccgaaagaggc

SEQ ID NO: 18395 - DNA, 21 bp, synthetic construct
  misc_feature 1..21: note = Description of Artificial Sequence: Synthetic oligonucleotide
  source 1..21: mol_type = other DNA
aacggcggcagcaaagtcgcc

SEQ ID NO: 18396 - DNA, 21 bp, synthetic construct
  misc_feature 1..21: note = Description of Artificial Sequence: Synthetic oligonucleotide
  source 1..21: mol_type = other DNA
aacgtcgaccaagccaaaaac

SEQ ID NO: 18397 - DNA, 21 bp, synthetic construct
  misc_feature 1..21: note = Description of Artificial Sequence: Synthetic oligonucleotide
  source 1..21: mol_type = other DNA
accagcgacagcaaagtcagc

SEQ ID NO: 18398 - DNA, 21 bp, synthetic construct
  misc_feature 1..21: note = Description of Artificial Sequence: Synthetic oligonucleotide
  source 1..21: mol_type = other DNA
accggccacaacgccaccacc

SEQ ID NO: 18399 - DNA, 21 bp, synthetic construct
  misc_feature 1..21: note = Description of Artificial Sequence: Synthetic oligonucleotide
  source 1..21: mol_type = other DNA
accggcgaaaaagtcagagtc

SEQ ID NO: 18400 - DNA, 21 bp, synthetic construct
  misc_feature 1..21: note = Description of Artificial Sequence: Synthetic oligonucleotide
  source 1..21: mol_type = other DNA
actaatggtgagcagcgtacg

SEQ ID NO: 18401 - DNA, 21 bp, synthetic construct
  misc_feature 1..21: note = Description of Artificial Sequence: Synthetic oligonucleotide
  source 1..21: mol_type = other DNA
actggtaaggattcgatgtct

SEQ ID NO: 18402 - DNA, 21 bp, synthetic construct
  misc_feature 1..21: note = Description of Artificial Sequence: Synthetic oligonucleotide
  source 1..21: mol_type = other DNA
agcacccacagcgccagcaac

SEQ ID NO: 18403 - DNA, 21 bp, synthetic construct
  misc_feature 1..21: note = Description of Artificial Sequence: Synthetic oligonucleotide
  source 1..21: mol_type = other DNA
agcagagaagaacccagaacc

SEQ ID NO: 18404 - DNA, 21 bp, synthetic construct
  misc_feature 1..21: note = Description of Artificial Sequence: Synthetic oligonucleotide
  source 1..21: mol_type = other DNA
agtacgtcgaagtcggtggct

SEQ ID NO: 18405 - DNA, 21 bp, synthetic construct
  misc_feature 1..21: note = Description of Artificial Sequence: Synthetic oligonucleotide
  source 1..21: mol_type = other DNA
agtgggaatggtaagcttttg

SEQ ID NO: 18406 - DNA, 21 bp, synthetic construct
  misc_feature 1..21: note = Description of Artificial Sequence: Synthetic oligonucleotide
  source 1..21: mol_type = other DNA
attgcttctagtagtgctgcg

SEQ ID NO: 18407 - DNA, 21 bp, synthetic construct
  misc_feature 1..21: note = Description of Artificial Sequence: Synthetic oligonucleotide
  source 1..21: mol_type = other DNA
caaggccaagaaagaaaaagc

SEQ ID NO: 18408 - DNA, 21 bp, synthetic construct
  misc_feature 1..21: note = Description of Artificial Sequence: Synthetic oligonucleotide
  source 1..21: mol_type = other DNA
ctccaaggcagcaacgtcgcc

SEQ ID NO: 18409 - DNA, 21 bp, synthetic construct
  misc_feature 1..21: note = Description of Artificial Sequence: Synthetic oligonucleotide
  source 1..21: mol_type = other DNA
gacagcgtcagccccaaaaaa

SEQ ID NO: 18410 - DNA, 21 bp, synthetic construct
  misc_feature 1..21: note = Description of Artificial Sequence: Synthetic oligonucleotide
  source 1..21: mol_type = other DNA
gacgtccccagcagcaaaggc

SEQ ID NO: 18411 - DNA, 21 bp, synthetic construct
  misc_feature 1..21: note = Description of Artificial Sequence: Synthetic oligonucleotide
  source 1..21: mol_type = other DNA
gagtctgatagtaggtctcat

SEQ ID NO: 18412 - DNA, 21 bp, synthetic construct
  misc_feature 1..21: note = Description of Artificial Sequence: Synthetic oligonucleotide
  source 1..21: mol_type = other DNA
gataatacgaggaatgggggt

SEQ ID NO: 18413 - DNA, 21 bp, synthetic construct
  misc_feature 1..21: note = Description of Artificial Sequence: Synthetic oligonucleotide
  source 1..21: mol_type = other DNA
gccctcagcaacaacagcaaa

SEQ ID NO: 18414 - DNA, 21 bp, synthetic construct
  misc_feature 1..21: note = Description of Artificial Sequence: Synthetic oligonucleotide
  source 1..21: mol_type = other DNA
gcgacgagtcagcatagtaat

SEQ ID NO: 18415 - DNA, 21 bp, synthetic construct
  misc_feature 1..21: note = Description of Artificial Sequence: Synthetic oligonucleotide
  source 1..21: mol_type = other DNA
gctaagcagcctaatgcgaat

SEQ ID NO: 18416 - DNA, 21 bp, synthetic construct
  misc_feature 1..21: note = Description of Artificial Sequence: Synthetic oligonucleotide
  source 1..21: mol_type = other DNA
ggcaccgaagtcaaagccggc

SEQ ID NO: 18417 - DNA, 21 bp, synthetic construct
  misc_feature 1..21: note = Description of Artificial Sequence: Synthetic oligonucleotide
  source 1..21: mol_type = other DNA
ggtactggtagtagtatttcg

SEQ ID NO: 18418 - DNA, 21 bp, synthetic construct
  misc_feature 1..21: note = Description of Artificial Sequence: Synthetic oligonucleotide
  source 1..21: mol_type = other DNA
gttgtgtctgggaatgggggg

SEQ ID NO: 18419 - DNA, 21 bp, synthetic construct
  misc_feature 1..21: note = Description of Artificial Sequence: Synthetic oligonucleotide
  source 1..21: mol_type = other DNA
tctgctactagtaatggtggg

SEQ ID NO: 18420 - DNA, 21 bp, synthetic construct
  misc_feature 1..21: note = Description of Artificial Sequence: Synthetic oligonucleotide
  source 1..21: mol_type = other DNA
gatcgtggtgagaagcatacg

SEQ ID NO: 18421 - DNA, 21 bp, synthetic construct
  misc_feature 1..21: note = Description of Artificial Sequence: Synthetic oligonucleotide
  source 1..21: mol_type = other DNA
ggcaccgccgacagccactac

SEQ ID NO: 18422 - DNA, 21 bp, synthetic construct
  misc_feature 1..21: note = Description of Artificial Sequence: Synthetic oligonucleotide
  source 1..21: mol_type = other DNA
agcggcgcccccaccctcctc

SEQ ID NO: 18423 - DNA, 21 bp, synthetic construct
  misc_feature 1..21: note = Description of Artificial Sequence: Synthetic oligonucleotide
  source 1..21: mol_type = other DNA
gccgccagcgacaaaagcagc

SEQ ID NO: 18424 - DNA, 21 bp, synthetic construct
  misc_feature 1..21: note = Description of Artificial Sequence: Synthetic oligonucleotide
  source 1..21: mol_type = other DNA
agcaccagcgacagacacacc

SEQ ID NO: 18425 - DNA, 21 bp, synthetic construct
  misc_feature 1..21: note = Description of Artificial Sequence: Synthetic oligonucleotide
  source 1..21: mol_type = other DNA
atcgacaaagtcagccccagc

SEQ ID NO: 18426 - DNA, 21 bp, synthetic construct
  misc_feature 1..21: note = Description of Artificial Sequence: Synthetic oligonucleotide
  source 1..21: mol_type = other DNA
gaaggcaaaagcgtcaacgcc

SEQ ID NO: 18427 - DNA, 21 bp, synthetic construct
  misc_feature 1..21: note = Description of Artificial Sequence: Synthetic oligonucleotide
  source 1..21: mol_type = other DNA
ttgaaggataaggcgaattct

SEQ ID NO: 18428 - DNA, 21 bp, synthetic construct
  misc_feature 1..21: note = Description of Artificial Sequence: Synthetic oligonucleotide
  source 1..21: mol_type = other DNA
gccaccggcgccgacatgaga

SEQ ID NO: 18429 - DNA, 21 bp, synthetic construct
  misc_feature 1..21: note = Description of Artificial Sequence: Synthetic oligonucleotide
  source 1..21: mol_type = other DNA
gagaggaatactgcggggagt

SEQ ID NO: 18430 - DNA, 21 bp, synthetic construct
  misc_feature 1..21: note = Description of Artificial Sequence: Synthetic oligonucleotide
  source 1..21: mol_type = other DNA
gacggcatgccccaaaaagtc

SEQ ID NO: 18431 - DNA, 21 bp, synthetic construct
  misc_feature 1..21: note = Description of Artificial Sequence: Synthetic oligonucleotide
  source 1..21: mol_type = other DNA
gcggggcagcggtctgatggt

SEQ ID NO: 18432 - DNA, 21 bp, synthetic construct
  misc_feature 1..21: note = Description of Artificial Sequence: Synthetic oligonucleotide
  source 1..21: mol_type = other DNA
gccggcaaaagcagccaaccc

SEQ ID NO: 18433 - DNA, 21 bp, synthetic construct
  misc_feature 1..21: note = Description of Artificial Sequence: Synthetic oligonucleotide
  source 1..21: mol_type = other DNA
gtcagcaaaagcagcaacagc

SEQ ID NO: 18434 - DNA, 21 bp, synthetic construct
  misc_feature 1..21: note = Description of Artificial Sequence: Synthetic oligonucleotide
  source 1..21: mol_type = other DNA
accagcagcagcacccccacc

SEQ ID NO: 18435 - DNA, 21 bp, synthetic construct
  misc_feature 1..21: note = Description of Artificial Sequence: Synthetic oligonucleotide
  source 1..21: mol_type = other DNA
tcgggtggggcggggtcgcag

SEQ ID NO: 18436 - DNA, 21 bp, synthetic construct
  misc_feature 1..21: note = Description of Artificial Sequence: Synthetic oligonucleotide
  source 1..21: mol_type = other DNA
agccccggcaacgtcgccacc

SEQ ID NO: 18437 - DNA, 21 bp, synthetic construct
  misc_feature 1..21: note = Description of Artificial Sequence: Synthetic oligonucleotide
  source 1..21: mol_type = other DNA
gtccaaaacagcgacgccaaa

SEQ ID NO: 18438 - DNA, 21 bp, synthetic construct
  misc_feature 1..21: note = Description of Artificial Sequence: Synthetic oligonucleotide
  source 1..21: mol_type = other DNA
gctaatgataaggcgccttcg

SEQ ID NO: 18439 - DNA, 21 bp, synthetic construct
  misc_feature 1..21: note = Description of Artificial Sequence: Synthetic oligonucleotide
  source 1..21: mol_type = other DNA
agcgacggcaccagaggcacc

SEQ ID NO: 18440 - DNA, 21 bp, synthetic construct
  misc_feature 1..21: note = Description of Artificial Sequence: Synthetic oligonucleotide
  source 1..21: mol_type = other DNA
gccatcagcaccagcaacagc

SEQ ID NO: 18441 - DNA, 21 bp, synthetic construct
  misc_feature 1..21: note = Description of Artificial Sequence: Synthetic oligonucleotide
  source 1..21: mol_type = other DNA
ggtcagaaggagggtccttct

SEQ ID NO: 18442 - DNA, 21 bp, synthetic construct
  misc_feature 1..21: note = Description of Artificial Sequence: Synthetic oligonucleotide
  source 1..21: mol_type = other DNA
gcccaaggcggcagcagcggc

SEQ ID NO: 18443 - DNA, 21 bp, synthetic construct
  misc_feature 1..21: note = Description of Artificial Sequence: Synthetic oligonucleotide
  source 1..21: mol_type = other DNA
tctacgtctaattctaggggt

SEQ ID NO: 18444 - DNA, 21 bp, synthetic construct
  misc_feature 1..21: note = Description of Artificial Sequence: Synthetic oligonucleotide
  source 1..21: mol_type = other DNA
agcagcggcggcagagacaaa

SEQ ID NO: 18445 - DNA, 21 bp, synthetic construct
  misc_feature 1..21: note = Description of Artificial Sequence: Synthetic oligonucleotide
  source 1..21: mol_type = other DNA
ttgccgtcgcaggggggtggt

SEQ ID NO: 18446 - DNA, 21 bp, synthetic construct
  misc_feature 1..21: note = Description of Artificial Sequence: Synthetic oligonucleotide
  source 1..21: mol_type = other DNA
aatacggggacgaatgctagt

SEQ ID NO: 18447 - DNA, 21 bp, synthetic construct
  misc_feature 1..21: note = Description of Artificial Sequence: Synthetic oligonucleotide
  source 1..21: mol_type = other DNA
actacgggtcagaatagtcag

SEQ ID NO: 18448 - DNA, 21 bp, synthetic construct
  misc_feature 1..21: note = Description of Artificial Sequence: Synthetic oligonucleotide
  source 1..21: mol_type = other DNA
gccgccagcagcagcaccagc

SEQ ID NO: 18449 - DNA, 21 bp, synthetic construct
  misc_feature 1..21: note = Description of Artificial Sequence: Synthetic oligonucleotide
  source 1..21: mol_type = other DNA
accctcggcagcggcggcagc

SEQ ID NO: 18450 - DNA, 21 bp, synthetic construct
  misc_feature 1..21: note = Description of Artificial Sequence: Synthetic oligonucleotide
  source 1..21: mol_type = other DNA
aaaggcagcagcagcggcggc

SEQ ID NO: 18451 - DNA, 21 bp, synthetic construct
  misc_feature 1..21: note = Description of Artificial Sequence: Synthetic oligonucleotide
  source 1..21: mol_type = other DNA
agcagcggcgaccacagaacc

SEQ ID NO: 18452 - DNA, 21 bp, synthetic construct
  misc_feature 1..21: note = Description of Artificial Sequence: Synthetic oligonucleotide
  source 1..21: mol_type = other DNA
gatacgggggggcttgggaag

SEQ ID NO: 18453 - DNA, 21 bp, synthetic construct
  misc_feature 1..21: note = Description of Artificial Sequence: Synthetic oligonucleotide
  source 1..21: mol_type = other DNA
gcgggtcagtcggctacgggg

SEQ ID NO: 18454 - DNA, 21 bp, synthetic construct
  misc_feature 1..21: note = Description of Artificial Sequence: Synthetic oligonucleotide
  source 1..21: mol_type = other DNA
aatgctggtgctaattcgacg

SEQ ID NO: 18455 - DNA, 21 bp, synthetic construct
  misc_feature 1..21: note = Description of Artificial Sequence: Synthetic oligonucleotide
  source 1..21: mol_type = other DNA
gaaagcgtcgccagcgtcaaa

SEQ ID NO: 18456 - DNA, 21 bp, synthetic construct
  misc_feature 1..21: note = Description of Artificial Sequence: Synthetic oligonucleotide
  source 1..21: mol_type = other DNA
gatagtgcttcttcgggtaag

SEQ ID NO: 18457 - DNA, 21 bp, synthetic construct
  misc_feature 1..21: note = Description of Artificial Sequence: Synthetic oligonucleotide
  source 1..21: mol_type = other DNA
agcaccgacaacgccggcaaa

SEQ ID NO: 18458 - DNA, 21 bp, synthetic construct
  misc_feature 1..21: note = Description of Artificial Sequence: Synthetic oligonucleotide
  source 1..21: mol_type = other DNA
cagtcttcgaatgctgctgcg

SEQ ID NO: 18459 - DNA, 21 bp, synthetic construct
  misc_feature 1..21: note = Description of Artificial Sequence: Synthetic oligonucleotide
  source 1..21: mol_type = other DNA
accaccgccagccccgccacc

SEQ ID NO: 18460 - DNA, 21 bp, synthetic construct
  misc_feature 1..21: note = Description of Artificial Sequence: Synthetic oligonucleotide
  source 1..21: mol_type = other DNA
acgacgactcagtctaatatt

SEQ ID NO: 18461 - DNA, 21 bp, synthetic construct
  misc_feature 1..21: note = Description of Artificial Sequence: Synthetic oligonucleotide
  source 1..21: mol_type = other DNA
agcagcggcgacagaagcggc

SEQ ID NO: 18462 - DNA, 21 bp, synthetic construct
  misc_feature 1..21: note = Description of Artificial Sequence: Synthetic oligonucleotide
  source 1..21: mol_type = other DNA
gagaatagtgataaggtgagg

SEQ ID NO: 18463 - DNA, 21 bp, synthetic construct
  misc_feature 1..21: note = Description of Artificial Sequence: Synthetic oligonucleotide
  source 1..21: mol_type = other DNA
gctacgacgaagactagtcag

SEQ ID NO: 18464 - DNA, 21 bp, synthetic construct
  misc_feature 1..21: note = Description of Artificial Sequence: Synthetic oligonucleotide
  source 1..21: mol_type = other DNA
tcgaatggtgctacgccggcg

SEQ ID NO: 18465 - DNA, 21 bp, synthetic construct
  misc_feature 1..21: note = Description of Artificial Sequence: Synthetic oligonucleotide
  source 1..21: mol_type = other DNA
agttcgagggatcaggtgaag

SEQ ID NO: 18466 - DNA, 21 bp, synthetic construct
  misc_feature 1..21: note = Description of Artificial Sequence: Synthetic oligonucleotide
  source 1..21: mol_type = other DNA
gtcagcagcggcaccggcaaa

SEQ ID NO: 18467 - DNA, 21 bp, synthetic construct
  misc_feature 1..21: note = Description of Artificial Sequence: Synthetic oligonucleotide
  source 1..21: mol_type = other DNA
tcgaatgaggggcctagtaag

SEQ ID NO: 18468 - DNA, 21 bp, synthetic construct
  misc_feature 1..21: note = Description of Artificial Sequence: Synthetic oligonucleotide
  source 1..21: mol_type = other DNA
gacctcggcaacaaaacccac

SEQ ID NO: 18469 - DNA, 21 bp, synthetic construct
  misc_feature 1..21: note = Description of Artificial Sequence: Synthetic oligonucleotide
  source 1..21: mol_type = other DNA
gatgcggggaatcttaagact

SEQ ID NO: 18470 - DNA, 21 bp, synthetic construct
  misc_feature 1..21: note = Description of Artificial Sequence: Synthetic oligonucleotide
  source 1..21: mol_type = other DNA
attggggataagagttcgacg

SEQ ID NO: 18471 - DNA, 21 bp, synthetic construct
  misc_feature 1..21: note = Description of Artificial Sequence: Synthetic oligonucleotide
  source 1..21: mol_type = other DNA
ggcaccggccccgaccaaaga

SEQ ID NO: 18472 - DNA, 21 bp, synthetic construct
  misc_feature 1..21: note = Description of Artificial Sequence: Synthetic oligonucleotide
  source 1..21: mol_type = other DNA
aacaccggcgaagccagagcc

SEQ ID NO: 18473 - DNA, 21 bp, synthetic construct
  misc_feature 1..21: note = Description of Artificial Sequence: Synthetic oligonucleotide
  source 1..21: mol_type = other DNA
gccaccaaagccggcagcgcc

SEQ ID NO: 18474 - DNA, 21 bp, synthetic construct
  misc_feature 1..21: note = Description of Artificial Sequence: Synthetic oligonucleotide
  source 1..21: mol_type = other DNA
acgacgggttcgcatagttct

SEQ ID NO: 18475 - DNA, 21 bp, synthetic construct
  misc_feature 1..21: note = Description of Artificial Sequence: Synthetic oligonucleotide
  source 1..21: mol_type = other DNA
gagcctaatgcgcctaagaat

SEQ ID NO: 18476 - DNA, 21 bp, synthetic construct
  misc_feature 1..21: note = Description of Artificial Sequence: Synthetic oligonucleotide
  source 1..21: mol_type = other DNA
ggtgattctaaggagcggctg

SEQ ID NO: 18477 - DNA, 21 bp, synthetic construct
  misc_feature 1..21: note = Description of Artificial Sequence: Synthetic oligonucleotide
  source 1..21: mol_type = other DNA
cagtcgaagggtactgagggt

SEQ ID NO: 18478 - DNA, 21 bp, synthetic construct
  misc_feature 1..21: note = Description of Artificial Sequence: Synthetic oligonucleotide
  source 1..21: mol_type = other DNA
gacggcggcgccaacgccaga

SEQ ID NO: 18479 - DNA, 21 bp, synthetic construct
  misc_feature 1..21: note = Description of Artificial Sequence: Synthetic oligonucleotide
  source 1..21: mol_type = other DNA
aaaagcagcagccaaagcgtc

SEQ ID NO: 18480 - DNA, 21 bp, synthetic construct
  misc_feature 1..21: note = Description of Artificial Sequence: Synthetic oligonucleotide
  source 1..21: mol_type = other DNA
cttggtggtcaggggtcggcg

SEQ ID NO: 18481 - DNA, 21 bp, synthetic construct
  misc_feature 1..21: note = Description of Artificial Sequence: Synthetic oligonucleotide
  source 1..21: mol_type = other DNA
gggcctctgaaggatacgggt

SEQ ID NO: 18482 - DNA, 21 bp, synthetic construct
  misc_feature 1..21: note = Description of Artificial Sequence: Synthetic oligonucleotide
  source 1..21: mol_type = other DNA
aatcaggggacttctactggt

SEQ ID NO: 18483 - DNA, 21 bp, synthetic construct
  misc_feature 1..21: note = Description of Artificial Sequence: Synthetic oligonucleotide
  source 1..21: mol_type = other DNA
accggccaaaaagacctcggc

SEQ ID NO: 18484 - DNA, 21 bp, synthetic construct
  misc_feature 1..21: note = Description of Artificial Sequence: Synthetic oligonucleotide
  source 1..21: mol_type = other DNA
ctcaccgccggcagcggcggc

SEQ ID NO: 18485 - DNA, 21 bp, synthetic construct
  misc_feature 1..21: note = Description of Artificial Sequence: Synthetic oligonucleotide
  source 1..21: mol_type = other DNA
tctgggaataatggtatgcat

SEQ ID NO: 18486 - DNA, 21 bp, synthetic construct
  misc_feature 1..21: note = Description of Artificial Sequence: Synthetic oligonucleotide
  source 1..21: mol_type = other DNA
acttctgggacggcttctacg

SEQ ID NO: 18487 - DNA, 21 bp, synthetic construct
  misc_feature 1..21: note = Description of Artificial Sequence: Synthetic oligonucleotide
  source 1..21: mol_type = other DNA
tctaatagtccgacgacgatg

SEQ ID NO: 18488 - DNA, 21 bp, synthetic construct
  misc_feature 1..21: note = Description of Artificial Sequence: Synthetic oligonucleotide
  source 1..21: mol_type = other DNA
cagaatgcttcttcgcatgcg

SEQ ID NO: 18489 - DNA, 21 bp, synthetic construct
  misc_feature 1..21: note = Description of Artificial Sequence: Synthetic oligonucleotide
  source 1..21: mol_type = other DNA
tcgacttctactgataatcgg

SEQ ID NO: 18490 - DNA, 21 bp, synthetic construct
  misc_feature 1..21: note = Description of Artificial Sequence: Synthetic oligonucleotide
  source 1..21: mol_type = other DNA
gagggtaagagtacgccgatt

SEQ ID NO: 18491 - DNA, 21 bp, synthetic construct
  misc_feature 1..21: note = Description of Artificial Sequence: Synthetic oligonucleotide
  source 1..21: mol_type = other DNA
gattctctggagcctcggaag

SEQ ID NO: 18492 - DNA, 21 bp, synthetic construct
  misc_feature 1..21: note = Description of Artificial Sequence: Synthetic oligonucleotide
  source 1..21: mol_type = other DNA
gccatgaccgaaagcaacaga

SEQ ID NO: 18493 - DNA, 21 bp, synthetic construct
  misc_feature 1..21: note = Description of Artificial Sequence: Synthetic oligonucleotide
  source 1..21: mol_type = other DNA
ggggagacgaataaggggtat

SEQ ID NO: 18494 - DNA, 21 bp, synthetic construct
  misc_feature 1..21: note = Description of Artificial Sequence: Synthetic oligonucleotide
  source 1..21: mol_type = other DNA
ggggctcagagttctgggaag

SEQ ID NO: 18495 - DNA, 21 bp, synthetic construct
  misc_feature 1..21: note = Description of Artificial Sequence: Synthetic oligonucleotide
  source 1..21: mol_type = other DNA
ggtgggcaggataagaagagt

SEQ ID NO: 18496 - DNA, 21 bp, synthetic construct
  misc_feature 1..21: note = Description of Artificial Sequence: Synthetic oligonucleotide
  source 1..21: mol_type = other DNA
cacggccaaagccccggcagc

SEQ ID NO: 18497 - DNA, 21 bp, synthetic construct
  misc_feature 1..21: note = Description of Artificial Sequence: Synthetic oligonucleotide
  source 1..21: mol_type = other DNA
ctcggcggcgcccaacccaaa

SEQ ID NO: 18498 - DNA, 21 bp, synthetic construct
  misc_feature 1..21: note = Description of Artificial Sequence: Synthetic oligonucleotide
  source 1..21: mol_type = other DNA
tcgggtcagtcgccttcgaat

SEQ ID NO: 18499 - DNA, 21 bp, synthetic construct
  misc_feature 1..21: note = Description of Artificial Sequence: Synthetic oligonucleotide
  source 1..21: mol_type = other DNA
ggcaccagcagcaccaaaagc

SEQ ID NO: 18500 - DNA, 21 bp, synthetic construct
  misc_feature 1..21: note = Description of Artificial Sequence: Synthetic oligonucleotide
  source 1..21: mol_type = other DNA
ttgactaatacttcggctgct

SEQ ID NO: 18501 - DNA, 21 bp, synthetic construct
  misc_feature 1..21: note = Description of Artificial Sequence: Synthetic oligonucleotide
  source 1..21: mol_type = other DNA
cagaattcgcctactcctctt

SEQ ID NO: 18502 - DNA, 21 bp, synthetic construct
  misc_feature 1..21: note = Description of Artificial Sequence: Synthetic oligonucleotide
  source 1..21: mol_type = other DNA
agcaccaccggcgccggcacc

SEQ ID NO: 18503 - DNA, 21 bp, synthetic construct
  misc_feature 1..21: note = Description of Artificial Sequence: Synthetic oligonucleotide
  source 1..21: mol_type = other DNA
gtcgtcgacagcagcaacaga

SEQ ID NO: 18504 - DNA, 21 bp, synthetic construct
  misc_feature 1..21: note = Description of Artificial Sequence: Synthetic oligonucleotide
  source 1..21: mol_type = other DNA
ggcgacaccggcagcagaagc

SEQ ID NO: 18505 - DNA, 21 bp, synthetic construct
  misc_feature 1..21: note = Description of Artificial Sequence: Synthetic oligonucleotide
  source 1..21: mol_type = other DNA
actgtgggttcgagttcttct

SEQ ID NO: 18506 - DNA, 21 bp, synthetic construct
  misc_feature 1..21: note = Description of Artificial Sequence: Synthetic oligonucleotide
  source 1..21: mol_type = other DNA
aatactagtgggactaatagt

SEQ ID NO: 18507 - DNA, 21 bp, synthetic construct
  misc_feature 1..21: note = Description of Artificial Sequence: Synthetic oligonucleotide
  source 1..21: mol_type = other DNA
actggttcgcagaatcttgtg

SEQ ID NO: 18508 - DNA, 21 bp, synthetic construct
  misc_feature 1..21: note = Description of Artificial Sequence: Synthetic oligonucleotide
  source 1..21: mol_type = other DNA
agtgcgaatgggcctaatact

SEQ ID NO: 18509 - DNA, 21 bp, synthetic construct
  misc_feature 1..21: note = Description of Artificial Sequence: Synthetic oligonucleotide
  source 1..21: mol_type = other DNA
ctcgccggcgacagaacccaa

SEQ ID NO: 18510 - DNA, 21 bp, synthetic construct
  misc_feature 1..21: note = Description of Artificial Sequence: Synthetic oligonucleotide
  source 1..21: mol_type = other DNA
gacatggccaaccccaaaaga

SEQ ID NO: 18511 - DNA, 21 bp, synthetic construct
  misc_feature 1..21: note = Description of Artificial Sequence: Synthetic oligonucleotide
  source 1..21: mol_type = other DNA
ttggggaatgggaaggtgtcg

SEQ ID NO: 18512 - DNA, 21 bp, synthetic construct
  misc_feature 1..21: note = Description of Artificial Sequence: Synthetic oligonucleotide
  source 1..21: mol_type = other DNA
ggcgccgacagcaaaggcctc

SEQ ID NO: 18513 - DNA, 21 bp, synthetic construct
  misc_feature 1..21: note = Description of Artificial Sequence: Synthetic oligonucleotide
  source 1..21: mol_type = other DNA
ctcggcagcaaagacgcccac

SEQ ID NO: 18514 - DNA, 21 bp, synthetic construct
  misc_feature 1..21: note = Description of Artificial Sequence: Synthetic oligonucleotide
  source 1..21: mol_type = other DNA
actgggagtgcgtctagttct

SEQ ID NO: 18515 - DNA, 21 bp, synthetic construct
  misc_feature 1..21: note = Description of Artificial Sequence: Synthetic oligonucleotide
  source 1..21: mol_type = other DNA
caaagcagccccagcgccaaa

SEQ ID NO: 18516 - DNA, 21 bp, synthetic construct
  misc_feature 1..21: note = Description of Artificial Sequence: Synthetic oligonucleotide
  source 1..21: mol_type = other DNA
gatacggggaagattggtggt

SEQ ID NO: 18517 - DNA, 21 bp, synthetic construct
  misc_feature 1..21: note = Description of Artificial Sequence: Synthetic oligonucleotide
  source 1..21: mol_type = other DNA
ggcaccaccggcgaaagcaga

SEQ ID NO: 18518 - DNA, 21 bp, synthetic construct
  misc_feature 1..21: note = Description of Artificial Sequence: Synthetic oligonucleotide
  source 1..21: mol_type = other DNA
gtccaaggcagcaccagcaac

SEQ ID NO: 18519 - DNA, 21 bp, synthetic construct
  misc_feature 1..21: note = Description of Artificial Sequence: Synthetic oligonucleotide
  source 1..21: mol_type = other DNA
tcggcttctaaggatcatgct

SEQ ID NO: 18520 - DNA, 21 bp, synthetic construct
  misc_feature 1..21: note = Description of Artificial Sequence: Synthetic oligonucleotide
  source 1..21: mol_type = other DNA
atgaaacaagaaagcgccgtc

SEQ ID NO: 18521 - DNA, 21 bp, synthetic construct
  misc_feature 1..21: note = Description of Artificial Sequence: Synthetic oligonucleotide
  source 1..21: mol_type = other DNA
ctcgccagcaccagcagcacc

SEQ ID NO: 18522 - DNA, 21 bp, synthetic construct
  misc_feature 1..21: note = Description of Artificial Sequence: Synthetic oligonucleotide
  source 1..21: mol_type = other DNA
ggtggggtgaagactggtgat

SEQ ID NO: 18523 - DNA, 21 bp, synthetic construct
  misc_feature 1..21: note = Description of Artificial Sequence: Synthetic oligonucleotide
  source 1..21: mol_type = other DNA
caagtccacaaaagcgccgtc

SEQ ID NO: 18524 - DNA, 21 bp, synthetic construct
  misc_feature 1..21: note = Description of Artificial Sequence: Synthetic oligonucleotide
  source 1..21: mol_type = other DNA
ggcggcagcaaaaacaacacc

SEQ ID NO: 18525 - DNA, 21 bp, synthetic construct
  misc_feature 1..21: note = Description of Artificial Sequence: Synthetic oligonucleotide
  source 1..21: mol_type = other DNA
gacggcgccaaccacaccaac

SEQ ID NO: 18526 - DNA, 21 bp, synthetic construct
  misc_feature 1..21: note = Description of Artificial Sequence: Synthetic oligonucleotide
  source 1..21: mol_type = other DNA
cagtctacgagtagttctgct

SEQ ID NO: 18527 - DNA, 21 bp, synthetic construct
  misc_feature 1..21: note = Description of Artificial Sequence: Synthetic oligonucleotide
  source 1..21: mol_type = other DNA
ggtactggtgttgggggtatg

SEQ ID NO: 18528 - DNA, 21 bp, synthetic construct
  misc_feature 1..21: note = Description of Artificial Sequence: Synthetic oligonucleotide
  source 1..21: mol_type = other DNA
aatcagggtgcgtctcctgtg

SEQ ID NO: 18529 - DNA, 21 bp, synthetic construct
  misc_feature 1..21: note = Description of Artificial Sequence: Synthetic oligonucleotide
  source 1..21: mol_type = other DNA
aacaccagcaacaaaaccgac

SEQ ID NO: 18530 - DNA, 21 bp, synthetic construct
  misc_feature 1..21: note = Description of Artificial Sequence: Synthetic oligonucleotide
  source 1..21: mol_type = other DNA
gatagtaagtctagtgctacg

SEQ ID NO: 18531 - DNA, 21 bp, synthetic construct
  misc_feature 1..21: note = Description of Artificial Sequence: Synthetic oligonucleotide
  source 1..21: mol_type = other DNA
ggtacgacgccgagtggtccg

SEQ ID NO: 18532 - DNA, 21 bp, synthetic construct
  misc_feature 1..21: note = Description of Artificial Sequence: Synthetic oligonucleotide
  source 1..21: mol_type = other DNA
acgactgagtcttcgatgcgg

SEQ ID NO: 18533 - DNA, 21 bp, synthetic construct
  misc_feature 1..21: note = Description of Artificial Sequence: Synthetic oligonucleotide
  source 1..21: mol_type = other DNA
aatcgtaatagtacgtcgtct

SEQ ID NO: 18534 - DNA, 21 bp, synthetic construct
  misc_feature 1..21: note = Description of Artificial Sequence: Synthetic oligonucleotide
  source 1..21: mol_type = other DNA
gaacccgtcaacggccacaaa

SEQ ID NO: 18535 - DNA, 21 bp, synthetic construct
  misc_feature 1..21: note = Description of Artificial Sequence: Synthetic oligonucleotide
  source 1..21: mol_type = other DNA
gatcctacggctaatacgaag

SEQ ID NO: 18536 - DNA, 21 bp, synthetic construct
  misc_feature 1..21: note = Description of Artificial Sequence: Synthetic oligonucleotide
  source 1..21: mol_type = other DNA
ggccaagacaaaagcaccgtc

SEQ ID NO: 18537 - DNA, 21 bp, synthetic construct
  misc_feature 1..21: note = Description of Artificial Sequence: Synthetic oligonucleotide
  source 1..21: mol_type = other DNA
tcgaatgctcagcttgctaag

SEQ ID NO: 18538 - DNA, 21 bp, synthetic construct
  misc_feature 1..21: note = Description of Artificial Sequence: Synthetic oligonucleotide
  source 1..21: mol_type = other DNA
gcgactgggacgactcctggt

SEQ ID NO: 18539 - DNA, 21 bp, synthetic construct
  misc_feature 1..21: note = Description of Artificial Sequence: Synthetic oligonucleotide
  source 1..21: mol_type = other DNA
actatgagtaattctccggtt

SEQ ID NO: 18540 - DNA, 21 bp, synthetic construct
  misc_feature 1..21: note = Description of Artificial Sequence: Synthetic oligonucleotide
  source 1..21: mol_type = other DNA
catggtcatgataaggctcag

SEQ ID NO: 18541 - DNA, 21 bp, synthetic construct
  misc_feature 1..21: note = Description of Artificial Sequence: Synthetic oligonucleotide
  source 1..21: mol_type = other DNA
tcttctgggtctcattctgcg

SEQ ID NO: 18542 - DNA, 21 bp, synthetic construct
  misc_feature 1..21: note = Description of Artificial Sequence: Synthetic oligonucleotide
  source 1..21: mol_type = other DNA
gaacaaagaagcaaacccatg

SEQ ID NO: 18543 - DNA, 21 bp, synthetic construct
  misc_feature 1..21: note = Description of Artificial Sequence: Synthetic oligonucleotide
  source 1..21: mol_type = other DNA
ctcaccgacgccaacagaggc

SEQ ID NO: 18544 - DNA, 21 bp, synthetic construct
  misc_feature 1..21: note = Description of Artificial Sequence: Synthetic oligonucleotide
  source 1..21: mol_type = other DNA
gttcagtcgcaggggacgcct

SEQ ID NO: 18545 - DNA, 21 bp, synthetic construct
  misc_feature 1..21: note = Description of Artificial Sequence: Synthetic oligonucleotide
  source 1..21: mol_type = other DNA
atttcgacgggtggttcttct

SEQ ID NO: 18546 - DNA, 21 bp, synthetic construct
  misc_feature 1..21: note = Description of Artificial Sequence: Synthetic oligonucleotide
  source 1..21: mol_type = other DNA
aacagcaacaccagcagcagc

SEQ ID NO: 18547 - DNA, 21 bp, synthetic construct
  misc_feature 1..21: note = Description of Artificial Sequence: Synthetic oligonucleotide
  source 1..21: mol_type = other DNA
accggcaccaaccacctcgcc

SEQ ID NO: 18548 - DNA, 21 bp, synthetic construct
  misc_feature 1..21: note = Description of Artificial Sequence: Synthetic oligonucleotide
  source 1..21: mol_type = other DNA
actcatggtggttctacgcct

SEQ ID NO: 18549 - DNA, 21 bp, synthetic construct
  misc_feature 1..21: note = Description of Artificial Sequence: Synthetic oligonucleotide
  source 1..21: mol_type = other DNA
cagggttcgtcttctgttatg

SEQ ID NO: 18550 - DNA, 21 bp, synthetic construct
  misc_feature 1..21: note = Description of Artificial Sequence: Synthetic oligonucleotide
  source 1..21: mol_type = other DNA
ggcgaagccagccaaagcaga

SEQ ID NO: 18551 - DNA, 21 bp, synthetic construct
  misc_feature 1..21: note = Description of Artificial Sequence: Synthetic oligonucleotide
  source 1..21: mol_type = other DNA
ggtcagagtagtccttctagt

SEQ ID NO: 18552 - DNA, 21 bp, synthetic construct
  misc_feature 1..21: note = Description of Artificial Sequence: Synthetic oligonucleotide
  source 1..21: mol_type = other DNA
gccagccaaacccccaccagc

SEQ ID NO: 18553 - DNA, 21 bp, synthetic construct
  misc_feature 1..21: note = Description of Artificial Sequence: Synthetic oligonucleotide
  source 1..21: mol_type = other DNA
gacggcaccagcaaaaaactc

SEQ ID NO: 18554 - DNA, 21 bp, synthetic construct
  misc_feature 1..21: note = Description of Artificial Sequence: Synthetic oligonucleotide
  source 1..21: mol_type = other DNA
gagggtgtttctcctaagacg

SEQ ID NO: 18555 - DNA, 21 bp, synthetic construct
  misc_feature 1..21: note = Description of Artificial Sequence: Synthetic oligonucleotide
  source 1..21: mol_type = other DNA
cagtctcagtcttctacgatg

SEQ ID NO: 18556 - DNA, 21 bp, synthetic construct
  misc_feature 1..21: note = Description of Artificial Sequence: Synthetic oligonucleotide
  source 1..21: mol_type = other DNA
gaaaccagcaacaccggcaaa

SEQ ID NO: 18557 - DNA, 21 bp, synthetic construct
  misc_feature 1..21: note = Description of Artificial Sequence: Synthetic oligonucleotide
  source 1..21: mol_type = other DNA
tcgccgaatcagtctagtggt

SEQ ID NO: 18558 - DNA, 21 bp, synthetic construct
  misc_feature 1..21: note = Description of Artificial Sequence: Synthetic oligonucleotide
  source 1..21: mol_type = other DNA
acccccaccgacaacaaaggc

SEQ ID NO: 18559 - DNA, 21 bp, synthetic construct
  misc_feature 1..21: note = Description of Artificial Sequence: Synthetic oligonucleotide
  source 1..21: mol_type = other DNA
agaggcgaccaaaccctcgcc

SEQ ID NO: 18560 - DNA, 21 bp, synthetic construct
  misc_feature 1..21: note = Description of Artificial Sequence: Synthetic oligonucleotide
  source 1..21: mol_type = other DNA
gaaagcggccaaagcaaaggc

SEQ ID NO: 18561 - DNA, 21 bp, synthetic construct
  misc_feature 1..21: note = Description of Artificial Sequence: Synthetic oligonucleotide
  source 1..21: mol_type = other DNA
ggtgtggcgactccttcgaag

SEQ ID NO: 18562 - DNA, 21 bp, synthetic construct
  misc_feature 1..21: note = Description of Artificial Sequence: Synthetic oligonucleotide
  source 1..21: mol_type = other DNA
tcgtcggttagtacggcgtct

SEQ ID NO: 18563 - DNA, 21 bp, synthetic construct
  misc_feature 1..21: note = Description of Artificial Sequence: Synthetic oligonucleotide
  source 1..21: mol_type = other DNA
gcccaagaaagagacgccaaa

SEQ ID NO: 18564 - DNA, 21 bp, synthetic construct
  misc_feature 1..21: note = Description of Artificial Sequence: Synthetic oligonucleotide
  source 1..21: mol_type = other DNA
ggtccgagtaatcagaagatg

SEQ ID NO: 18565 - DNA, 21 bp, synthetic construct
  misc_feature 1..21: note = Description of Artificial Sequence: Synthetic oligonucleotide
  source 1..21: mol_type = other DNA
aacaacggcaacgccaccacc

SEQ ID NO: 18566 - DNA, 21 bp, synthetic construct
  misc_feature 1..21: note = Description of Artificial Sequence: Synthetic oligonucleotide
  source 1..21: mol_type = other DNA
accagcggcggcaccatgagc

SEQ ID NO: 18567 - DNA, 21 bp, synthetic construct
  misc_feature 1..21: note = Description of Artificial Sequence: Synthetic oligonucleotide
  source 1..21: mol_type = other DNA
acgggtaagactagtacgtct

SEQ ID NO: 18568 - DNA, 21 bp, synthetic construct
  misc_feature 1..21: note = Description of Artificial Sequence: Synthetic oligonucleotide
  source 1..21: mol_type = other DNA
aacggcaacgacaccgccaaa

SEQ ID NO: 18569 - DNA, 21 bp, synthetic construct
  misc_feature 1..21: note = Description of Artificial Sequence: Synthetic oligonucleotide
  source 1..21: mol_type = other DNA
gctgattctaagcagaatgct

SEQ ID NO: 18570 - DNA, 21 bp, synthetic construct
  misc_feature 1..21: note = Description of Artificial Sequence: Synthetic oligonucleotide
  source 1..21: mol_type = other DNA
tcgccggggccggctacgaag

SEQ ID NO: 18571 - DNA, 21 bp, synthetic construct
  misc_feature 1..21: note = Description of Artificial Sequence: Synthetic oligonucleotide
  source 1..21: mol_type = other DNA
tcggggcagaaggttaattcg

SEQ ID NO: 18572 - DNA, 21 bp, synthetic construct
  misc_feature 1..21: note = Description of Artificial Sequence: Synthetic oligonucleotide
  source 1..21: mol_type = other DNA
gggtcgaatgctcagtctcgt

SEQ ID NO: 18573 - DNA, 21 bp, synthetic construct
  misc_feature 1..21: note = Description of Artificial Sequence: Synthetic oligonucleotide
  source 1..21: mol_type = other DNA
cagccgtctagtacgcctacg

SEQ ID NO: 18574 - DNA, 21 bp, synthetic construct
  misc_feature 1..21: note = Description of Artificial Sequence: Synthetic oligonucleotide
  source 1..21: mol_type = other DNA
ggggttacttcgaagcctgat

SEQ ID NO: 18575 - DNA, 21 bp, synthetic construct
  misc_feature 1..21: note = Description of Artificial Sequence: Synthetic oligonucleotide
  source 1..21: mol_type = other DNA
accaacctcggcagccccagc

SEQ ID NO: 18576 - DNA, 21 bp, synthetic construct
  misc_feature 1..21: note = Description of Artificial Sequence: Synthetic oligonucleotide
  source 1..21: mol_type = other DNA
cagaatagtgagaagggtcag

SEQ ID NO: 18577 - DNA, 21 bp, synthetic construct
  misc_feature 1..21: note = Description of Artificial Sequence: Synthetic oligonucleotide
  source 1..21: mol_type = other DNA
gaaagaaccggcagcagcggc

SEQ ID NO: 18578 - DNA, 21 bp, synthetic construct
  misc_feature 1..21: note = Description of Artificial Sequence: Synthetic oligonucleotide
  source 1..21: mol_type = other DNA
aatgggacgcagaatgcgcag

SEQ ID NO: 18579 - DNA, 21 bp, synthetic construct
  misc_feature 1..21: note = Description of Artificial Sequence: Synthetic oligonucleotide
  source 1..21: mol_type = other DNA
ctcagagacaaaagcagcggc

SEQ ID NO: 18580 - DNA, 21 bp, synthetic construct
  misc_feature 1..21: note = Description of Artificial Sequence: Synthetic oligonucleotide
  source 1..21: mol_type = other DNA
acgccttcgaagactagtgcg

SEQ ID NO: 18581 - DNA, 21 bp, synthetic construct
  misc_feature 1..21: note = Description of Artificial Sequence: Synthetic oligonucleotide
  source 1..21: mol_type = other DNA
agccaagtcagccaaggcgcc

SEQ ID NO: 18582 - DNA, 21 bp, synthetic construct
  misc_feature 1..21: note = Description of Artificial Sequence: Synthetic oligonucleotide
  source 1..21: mol_type = other DNA
tcgacgcataaggatcagtcg

SEQ ID NO: 18583 - DNA, 21 bp, synthetic construct
  misc_feature 1..21: note = Description of Artificial Sequence: Synthetic oligonucleotide
  source 1..21: mol_type = other DNA
accagcgcccaagccaccagc

SEQ ID NO: 18584 - DNA, 21 bp, synthetic construct
  misc_feature 1..21: note = Description of Artificial Sequence: Synthetic oligonucleotide
  source 1..21: mol_type = other DNA
acgcctacttcttcgtctatg

SEQ ID NO: 18585 - DNA, 21 bp, synthetic construct
  misc_feature 1..21: note = Description of Artificial Sequence: Synthetic oligonucleotide
  source 1..21: mol_type = other DNA
agcagcaccaacgcccccacc

SEQ ID NO: 18586 - DNA, 21 bp, synthetic construct
  misc_feature 1..21: note = Description of Artificial Sequence: Synthetic oligonucleotide
  source 1..21: mol_type = other DNA
gctagtccggctggttctggt

SEQ ID NO: 18587 - DNA, 21 bp, synthetic construct
  misc_feature 1..21: note = Description of Artificial Sequence: Synthetic oligonucleotide
  source 1..21: mol_type = other DNA
aatggtgcggctcctgtgtct

SEQ ID NO: 18588 - DNA, 21 bp, synthetic construct
  misc_feature 1..21: note = Description of Artificial Sequence: Synthetic oligonucleotide
  source 1..21: mol_type = other DNA
gacatgggccacaaaggccaa

SEQ ID NO: 18589 - DNA, 21 bp, synthetic construct
  misc_feature 1..21: note = Description of Artificial Sequence: Synthetic oligonucleotide
  source 1..21: mol_type = other DNA
ggtggggagacgcggactagt

SEQ ID NO: 18590 - DNA, 21 bp, synthetic construct
  misc_feature 1..21: note = Description of Artificial Sequence: Synthetic oligonucleotide
  source 1..21: mol_type = other DNA
cacacccaaaacaccagcgcc

SEQ ID NO: 18591 - DNA, 21 bp, synthetic construct
  misc_feature 1..21: note = Description of Artificial Sequence: Synthetic oligonucleotide
  source 1..21: mol_type = other DNA
cagaatgcgcctacttcgggt

SEQ ID NO: 18592 - DNA, 21 bp, synthetic construct
  misc_feature 1..21: note = Description of Artificial Sequence: Synthetic oligonucleotide
  source 1..21: mol_type = other DNA
accgtcagcagcaacggcgcc

SEQ ID NO: 18593 - DNA, 21 bp, synthetic construct
  misc_feature 1..21: note = Description of Artificial Sequence: Synthetic oligonucleotide
  source 1..21: mol_type = other DNA
tcggttagtaagtcttctgtt

SEQ ID NO: 18594 - DNA, 21 bp, synthetic construct
  misc_feature 1..21: note = Description of Artificial Sequence: Synthetic oligonucleotide
  source 1..21: mol_type = other DNA
tgcagcgacagcaaaagccaa

SEQ ID NO: 18595 - DNA, 21 bp, synthetic construct
  misc_feature 1..21: note = Description of Artificial Sequence: Synthetic oligonucleotide
  source 1..21: mol_type = other DNA
caggttgcggatgctaatagg

SEQ ID NO: 18596 - DNA, 21 bp, synthetic construct
  misc_feature 1..21: note = Description of Artificial Sequence: Synthetic oligonucleotide
  source 1..21: mol_type = other DNA
ggggagccgaggaataatagt

SEQ ID NO: 18597 - DNA, 21 bp, synthetic construct
  misc_feature 1..21: note = Description of Artificial Sequence: Synthetic oligonucleotide
  source 1..21: mol_type = other DNA
gagtcgtctggtacgtcgagg

SEQ ID NO: 18598 - DNA, 21 bp, synthetic construct
  misc_feature 1..21: note = Description of Artificial Sequence: Synthetic oligonucleotide
  source 1..21: mol_type = other DNA
ggcagagacggcgccagcggc

SEQ ID NO: 18599 - DNA, 21 bp, synthetic construct
  misc_feature 1..21: note = Description of Artificial Sequence: Synthetic oligonucleotide
  source 1..21: mol_type = other DNA
aacaccagcaaaggcaacagc

SEQ ID NO: 18600 - DNA, 21 bp, synthetic construct
  misc_feature 1..21: note = Description of Artificial Sequence: Synthetic oligonucleotide
  source 1..21: mol_type = other DNA
atccccagcagcagcagcagc

SEQ ID NO: 18601 - DNA, 21 bp, synthetic construct
  misc_feature 1..21: note = Description of Artificial Sequence: Synthetic oligonucleotide
  source 1..21: mol_type = other DNA
atgcccggcaccgccgccccc

SEQ ID NO: 18602 - DNA, 21 bp, synthetic construct
  misc_feature 1..21: note = Description of Artificial Sequence: Synthetic oligonucleotide
  source 1..21: mol_type = other DNA
aacagagccaccgccaccgcc

SEQ ID NO: 18603 - DNA, 21 bp, synthetic construct
  misc_feature 1..21: note = Description of Artificial Sequence: Synthetic oligonucleotide
  source 1..21: mol_type = other DNA
ggggttgcgcagccgcatggt

SEQ ID NO: 18604 - DNA, 21 bp, synthetic construct
  misc_feature 1..21: note = Description of Artificial Sequence: Synthetic oligonucleotide
  source 1..21: mol_type = other DNA
agcagcaccggcaaagtcagc

SEQ ID NO: 18605 - DNA, 21 bp, synthetic construct
  misc_feature 1..21: note = Description of Artificial Sequence: Synthetic oligonucleotide
  source 1..21: mol_type = other DNA
cgtattgatgggaggaaggat

SEQ ID NO: 18606 - DNA, 21 bp, synthetic construct
  misc_feature 1..21: note = Description of Artificial Sequence: Synthetic oligonucleotide
  source 1..21: mol_type = other DNA
agtacgaatgctggtggtagt

SEQ ID NO: 18607 - DNA, 21 bp, synthetic construct
  misc_feature 1..21: note = Description of Artificial Sequence: Synthetic oligonucleotide
  source 1..21: mol_type = other DNA
catagtggggagcgtcagggt

SEQ ID NO: 18608 - DNA, 21 bp, synthetic construct
  misc_feature 1..21: note = Description of Artificial Sequence: Synthetic oligonucleotide
  source 1..21: mol_type = other DNA
ggccccaacaccagccccagc

SEQ ID NO: 18609 - DNA, 21 bp, synthetic construct
  misc_feature 1..21: note = Description of Artificial Sequence: Synthetic oligonucleotide
  source 1..21: mol_type = other DNA
tctgatgataagattcgtggt

SEQ ID NO: 18610 - DNA, 21 bp, synthetic construct
  misc_feature 1..21: note = Description of Artificial Sequence: Synthetic oligonucleotide
  source 1..21: mol_type = other DNA
aacagaagcgaaagccccagc

SEQ ID NO: 18611 - DNA, 21 bp, synthetic construct
  misc_feature 1..21: note = Description of Artificial Sequence: Synthetic oligonucleotide
  source 1..21: mol_type = other DNA
gacggcaaacccagcagcgtc

SEQ ID NO: 18612 - DNA, 21 bp, synthetic construct
  misc_feature 1..21: note = Description of Artificial Sequence: Synthetic oligonucleotide
  source 1..21: mol_type = other DNA
caaggcagcagcaccaacagc

SEQ ID NO: 18613 - DNA, 21 bp, synthetic construct
  misc_feature 1..21: note = Description of Artificial Sequence: Synthetic oligonucleotide
  source 1..21: mol_type = other DNA
ggcaaaggcacccccgacagc

SEQ ID NO: 18614 - DNA, 21 bp, synthetic construct
  misc_feature 1..21: note = Description of Artificial Sequence: Synthetic oligonucleotide
  source 1..21: mol_type = other DNA
cttgggactaagccgaatatg

SEQ ID NO: 18615 - DNA, 21 bp, synthetic construct
  misc_feature 1..21: note = Description of Artificial Sequence: Synthetic oligonucleotide
  source 1..21: mol_type = other DNA
cacagcgaccccaaaggcctc

SEQ ID NO: 18616 - DNA, 21 bp, synthetic construct
  misc_feature 1..21: note = Description of Artificial Sequence: Synthetic oligonucleotide
  source 1..21: mol_type = other DNA
atggagaagccgagtcttgct

SEQ ID NO: 18617 - DNA, 21 bp, synthetic construct
  misc_feature 1..21: note = Description of Artificial Sequence: Synthetic oligonucleotide
  source 1..21: mol_type = other DNA
aacagcaccaacagcagcaaa

SEQ ID NO: 18618 - DNA, 21 bp, synthetic construct
  misc_feature 1..21: note = Description of Artificial Sequence: Synthetic oligonucleotide
  source 1..21: mol_type = other DNA
atgggccaaggccccaaagac

SEQ ID NO: 18619 - DNA, 21 bp, synthetic construct
  misc_feature 1..21: note = Description of Artificial Sequence: Synthetic oligonucleotide
  source 1..21: mol_type = other DNA
ctcagcagcaaagaaaccacc

SEQ ID NO: 18620 - DNA, 21 bp, synthetic construct
  misc_feature 1..21: note = Description of Artificial Sequence: Synthetic oligonucleotide
  source 1..21: mol_type = other DNA
gccctcggcagcaaccccggc

SEQ ID NO: 18621 - DNA, 21 bp, synthetic construct
  misc_feature 1..21: note = Description of Artificial Sequence: Synthetic oligonucleotide
  source 1..21: mol_type = other DNA
gccggcacccaaagcaccatg

SEQ ID NO: 18622 - DNA, 21 bp, synthetic construct
  misc_feature 1..21: note = Description of Artificial Sequence: Synthetic oligonucleotide
  source 1..21: mol_type = other DNA
gccggcaccggcagcagcaaa

SEQ ID NO: 18623 - DNA, 21 bp, synthetic construct
  misc_feature 1..21: note = Description of Artificial Sequence: Synthetic oligonucleotide
  source 1..21: mol_type = other DNA
ggcaccggcagagacaacctc

SEQ ID NO: 18624 - DNA, 21 bp, synthetic construct
  misc_feature 1..21: note = Description of Artificial Sequence: Synthetic oligonucleotide
  source 1..21: mol_type = other DNA
gggactagtaatagtggttcg

SEQ ID NO: 18625 - DNA, 21 bp, synthetic construct
  misc_feature 1..21: note = Description of Artificial Sequence: Synthetic oligonucleotide
  source 1..21: mol_type = other DNA
ggggagaagacgaatatgtct

SEQ ID NO: 18626 - DNA, 21 bp, synthetic construct
  misc_feature 1..21: note = Description of Artificial Sequence: Synthetic oligonucleotide
  source 1..21: mol_type = other DNA
gtccaaaacaccgccgccggc

SEQ ID NO: 18627 - DNA, 21 bp, synthetic construct
  misc_feature 1..21: note = Description of Artificial Sequence: Synthetic oligonucleotide
  source 1..21: mol_type = other DNA
accgacagcagagacaaagtc

SEQ ID NO: 18628 - DNA, 21 bp, synthetic construct
  misc_feature 1..21: note = Description of Artificial Sequence: Synthetic oligonucleotide
  source 1..21: mol_type = other DNA
gacacccacagcaccagcaga

SEQ ID NO: 18629 - DNA, 21 bp, synthetic construct
  misc_feature 1..21: note = Description of Artificial Sequence: Synthetic oligonucleotide
  source 1..21: mol_type = other DNA
tctccttcgactaaggagtct

SEQ ID NO: 18630 - DNA, 21 bp, synthetic construct
  misc_feature 1..21: note = Description of Artificial Sequence: Synthetic oligonucleotide
  source 1..21: mol_type = other DNA
accgccggcaacgccaacagc

SEQ ID NO: 18631 - DNA, 21 bp, synthetic construct
  misc_feature 1..21: note = Description of Artificial Sequence: Synthetic oligonucleotide
  source 1..21: mol_type = other DNA
agtactctgtctgcgaagggg

SEQ ID NO: 18632 - DNA, 21 bp, synthetic construct
  misc_feature 1..21: note = Description of Artificial Sequence: Synthetic oligonucleotide
  source 1..21: mol_type = other DNA
accggcggccaaagcaacgtc

SEQ ID NO: 18633 - DNA, 21 bp, synthetic construct
  misc_feature 1..21: note = Description of Artificial Sequence: Synthetic oligonucleotide
  source 1..21: mol_type = other DNA
agccaaagcagccccacccaa

SEQ ID NO: 18634 - DNA, 21 bp, synthetic construct
  misc_feature 1..21: note = Description of Artificial Sequence: Synthetic oligonucleotide
  source 1..21: mol_type = other DNA
aatggggagtcgaagccgatg

SEQ ID NO: 18635 - DNA, 21 bp, synthetic construct
  misc_feature 1..21: note = Description of Artificial Sequence: Synthetic oligonucleotide
  source 1..21: mol_type = other DNA
accaacgccaccaaccacgtc

SEQ ID NO: 18636 - DNA, 21 bp, synthetic construct
  misc_feature 1..21: note = Description of Artificial Sequence: Synthetic oligonucleotide
  source 1..21: mol_type = other DNA
agcaacggcggccccagcagc

SEQ ID NO: 18637 - DNA, 21 bp, synthetic construct
  misc_feature 1..21: note = Description of Artificial Sequence: Synthetic oligonucleotide
  source 1..21: mol_type = other DNA
gatggtgtgagggagaaggtg

SEQ ID NO: 18638 - DNA, 21 bp, synthetic construct
  misc_feature 1..21: note = Description of Artificial Sequence: Synthetic oligonucleotide
  source 1..21: mol_type = other DNA
gggaatagtccgacgctgcag

SEQ ID NO: 18639 - DNA, 21 bp, synthetic construct
  misc_feature 1..21: note = Description of Artificial Sequence: Synthetic oligonucleotide
  source 1..21: mol_type = other DNA
gtcaccggcgtccccaccacc

SEQ ID NO: 18640 - DNA, 21 bp, synthetic construct
  misc_feature 1..21: note = Description of Artificial Sequence: Synthetic oligonucleotide
  source 1..21: mol_type = other DNA
agcgaaatcaaccccaaactc

SEQ ID NO: 18641 - DNA, 21 bp, synthetic construct
  misc_feature 1..21: note = Description of Artificial Sequence: Synthetic oligonucleotide
  source 1..21: mol_type = other DNA
gctactggttctggtagttct

SEQ ID NO: 18642 - DNA, 21 bp, synthetic construct
  misc_feature 1..21: note = Description of Artificial Sequence: Synthetic oligonucleotide
  source 1..21: mol_type = other DNA
gaacacggcaaaagcagcgtc

SEQ ID NO: 18643 - DNA, 21 bp, synthetic construct
  misc_feature 1..21: note = Description of Artificial Sequence: Synthetic oligonucleotide
  source 1..21: mol_type = other DNA
ggcgtcggccaaagcaacggc

SEQ ID NO: 18644 - DNA, 21 bp, synthetic construct
  misc_feature 1..21: note = Description of Artificial Sequence: Synthetic oligonucleotide
  source 1..21: mol_type = other DNA
ggcagcgccaccgccaacgcc

SEQ ID NO: 18645 - DNA, 21 bp, synthetic construct
  misc_feature 1..21: note = Description of Artificial Sequence: Synthetic oligonucleotide
  source 1..21: mol_type = other DNA
agcgccgaaatcaaaggcgcc

SEQ ID NO: 18646 - DNA, 21 bp, synthetic construct
  misc_feature 1..21: note = Description of Artificial Sequence: Synthetic oligonucleotide
  source 1..21: mol_type = other DNA
ctgaatagtcctacgacgggt

SEQ ID NO: 18647 - DNA, 21 bp, synthetic construct
  misc_feature 1..21: note = Description of Artificial Sequence: Synthetic oligonucleotide
  source 1..21: mol_type = other DNA
aaccacgacggcgccggcaaa

SEQ ID NO: 18648 - DNA, 21 bp, synthetic construct
  misc_feature 1..21: note = Description of Artificial Sequence: Synthetic oligonucleotide
  source 1..21: mol_type = other DNA
gacagagccagccccaccacc

SEQ ID NO: 18649 - DNA, 21 bp, synthetic construct
  misc_feature 1..21: note = Description of Artificial Sequence: Synthetic oligonucleotide
  source 1..21: mol_type = other DNA
attggtacgtcgtcgcagggt

SEQ ID NO: 18650 - DNA, 21 bp, synthetic construct
  misc_feature 1..21: note = Description of Artificial Sequence: Synthetic oligonucleotide
  source 1..21: mol_type = other DNA
accggcgccgaccccctcaaa

SEQ ID NO: 18651 - DNA, 21 bp, synthetic construct
  misc_feature 1..21: note = Description of Artificial Sequence: Synthetic oligonucleotide
  source 1..21: mol_type = other DNA
acgttggctagtacgaatcag

SEQ ID NO: 18652 - DNA, 21 bp, synthetic construct
  misc_feature 1..21: note = Description of Artificial Sequence: Synthetic oligonucleotide
  source 1..21: mol_type = other DNA
gctctggagactcctacgcgg

SEQ ID NO: 18653 - DNA, 21 bp, synthetic construct
  misc_feature 1..21: note = Description of Artificial Sequence: Synthetic oligonucleotide
  source 1..21: mol_type = other DNA
gaaggcagaagcagcgtcgtc

SEQ ID NO: 18654 - DNA, 21 bp, synthetic construct
  misc_feature 1..21: note = Description of Artificial Sequence: Synthetic oligonucleotide
  source 1..21: mol_type = other DNA
caaggcacccacaaacaagac

SEQ ID NO: 18655 - DNA, 21 bp, synthetic construct
  misc_feature 1..21: note = Description of Artificial Sequence: Synthetic oligonucleotide
  source 1..21: mol_type = other DNA
accagcggcgaccacatgaaa

SEQ ID NO: 18656 - DNA, 21 bp, synthetic construct
  misc_feature 1..21: note = Description of Artificial Sequence: Synthetic oligonucleotide
  source 1..21: mol_type = other DNA
gacagcaacgtcaccaaaccc

SEQ ID NO: 18657 - DNA, 21 bp, synthetic construct
  misc_feature 1..21: note = Description of Artificial Sequence: Synthetic oligonucleotide
  source 1..21: mol_type = other DNA
aacggcggcgcccacgtcacc

SEQ ID NO: 18658 - DNA, 21 bp, synthetic construct
  misc_feature 1..21: note = Description of Artificial Sequence: Synthetic oligonucleotide
  source 1..21: mol_type = other DNA
aatgcgggggggaatgctatt

SEQ ID NO: 18659 - DNA, 21 bp, synthetic construct
  misc_feature 1..21: note = Description of Artificial Sequence: Synthetic oligonucleotide
  source 1..21: mol_type = other DNA
acgggggcgggtagtagtgtc

SEQ ID NO: 18660 - DNA, 21 bp, synthetic construct
  misc_feature 1..21: note = Description of Artificial Sequence: Synthetic oligonucleotide
  source 1..21: mol_type = other DNA
tctagtcctggtgctagttcg

SEQ ID NO: 18661 - DNA, 21 bp, synthetic construct
  misc_feature 1..21: note = Description of Artificial Sequence: Synthetic oligonucleotide
  source 1..21: mol_type = other DNA
aacaccaaaggcaccacccaa

SEQ ID NO: 18662 - DNA, 21 bp, synthetic construct
  misc_feature 1..21: note = Description of Artificial Sequence: Synthetic oligonucleotide
  source 1..21: mol_type = other DNA
ggcagcgccaccgccagcacc

SEQ ID NO: 18663 - DNA, 21 bp, synthetic construct
  misc_feature 1..21: note = Description of Artificial Sequence: Synthetic oligonucleotide
  source 1..21: mol_type = other DNA
agcctcggcagccaaagcaaa

SEQ ID NO: 18664 - DNA, 21 bp, synthetic construct
  misc_feature 1..21: note = Description of Artificial Sequence: Synthetic oligonucleotide
  source 1..21: mol_type = other DNA
agcggcaaagacaccatgcaa

SEQ ID NO: 18665 - DNA, 21 bp, synthetic construct
  misc_feature 1..21: note = Description of Artificial Sequence: Synthetic oligonucleotide
  source 1..21: mol_type = other DNA
gggaatgttgataaggttgtg

SEQ ID NO: 18666 - DNA, 21 bp, synthetic construct
  misc_feature 1..21: note = Description of Artificial Sequence: Synthetic oligonucleotide
  source 1..21: mol_type = other DNA
agcgtcagcaaagaaaccatg

SEQ ID NO: 18667 - DNA, 21 bp, synthetic construct
  misc_feature 1..21: note = Description of Artificial Sequence: Synthetic oligonucleotide
  source 1..21: mol_type = other DNA
gcttcggatggtaagacggct

SEQ ID NO: 18668 - DNA, 21 bp, synthetic construct
  misc_feature 1..21: note = Description of Artificial Sequence: Synthetic oligonucleotide
  source 1..21: mol_type = other DNA
gggaagaatggtcatgcgggt

SEQ ID NO: 18669 - DNA, 21 bp, synthetic construct
  misc_feature 1..21: note = Description of Artificial Sequence: Synthetic oligonucleotide
  source 1..21: mol_type = other DNA
gggggttctgataataagaat

SEQ ID NO: 18670 - DNA, 21 bp, synthetic construct
  misc_feature 1..21: note = Description of Artificial Sequence: Synthetic oligonucleotide
  source 1..21: mol_type = other DNA
agcagagaaggcacccccctc

SEQ ID NO: 18671 - DNA, 21 bp, synthetic construct
  misc_feature 1..21: note = Description of Artificial Sequence: Synthetic oligonucleotide
  source 1..21: mol_type = other DNA
ttggtggggaagtctactagt

SEQ ID NO: 18672 - DNA, 21 bp, synthetic construct
  misc_feature 1..21: note = Description of Artificial Sequence: Synthetic oligonucleotide
  source 1..21: mol_type = other DNA
agcaacgacagcagaaaaggc

SEQ ID NO: 18673 - DNA, 21 bp, synthetic construct
  misc_feature 1..21: note = Description of Artificial Sequence: Synthetic oligonucleotide
  source 1..21: mol_type = other DNA
aacgccgaccaacccggcaaa

SEQ ID NO: 18674 - DNA, 21 bp, synthetic construct
  misc_feature 1..21: note = Description of Artificial Sequence: Synthetic oligonucleotide
  source 1..21: mol_type = other DNA
atggcgacgaatgcgacggct

SEQ ID NO: 18675 - DNA, 21 bp, synthetic construct
  misc_feature 1..21: note = Description of Artificial Sequence: Synthetic oligonucleotide
  source 1..21: mol_type = other DNA
gaagtcagccccaccagcaaa

SEQ ID NO: 18676 - DNA, 21 bp, synthetic construct
  misc_feature 1..21: note = Description of Artificial Sequence: Synthetic oligonucleotide
  source 1..21: mol_type = other DNA
ggccccaacacccccgccgtc

SEQ ID NO: 18677 - DNA, 21 bp, synthetic construct
  misc_feature 1..21: note = Description of Artificial Sequence: Synthetic oligonucleotide
  source 1..21: mol_type = other DNA
cagcaggggtcgaatgcgaat

SEQ ID NO: 18678 - DNA, 21 bp, synthetic construct
  misc_feature 1..21: note = Description of Artificial Sequence: Synthetic oligonucleotide
  source 1..21: mol_type = other DNA
gtgtctggttcggctgcggct

SEQ ID NO: 18679 - DNA, 21 bp, synthetic construct
  misc_feature 1..21: note = Description of Artificial Sequence: Synthetic oligonucleotide
  source 1..21: mol_type = other DNA
gctgagacttcgggttcgaag

SEQ ID NO: 18680 - DNA, 21 bp, synthetic construct
  misc_feature 1..21: note = Description of Artificial Sequence: Synthetic oligonucleotide
  source 1..21: mol_type = other DNA
caaggcacccccaaacccgac

SEQ ID NO: 18681 - DNA, 21 bp, synthetic construct
  misc_feature 1..21: note = Description of Artificial Sequence: Synthetic oligonucleotide
  source 1..21: mol_type = other DNA
gagcaggcgactaagtctccg

SEQ ID NO: 18682 - DNA, 21 bp, synthetic construct
  misc_feature 1..21: note = Description of Artificial Sequence: Synthetic oligonucleotide
  source 1..21: mol_type = other DNA
agccccgtcaacaccaaagtc

SEQ ID NO: 18683 - DNA, 21 bp, synthetic construct
  misc_feature 1..21: note = Description of Artificial Sequence: Synthetic oligonucleotide
  source 1..21: mol_type = other DNA
actcagaggggggcttctcag

SEQ ID NO: 18684 - DNA, 21 bp, synthetic construct
  misc_feature 1..21: note = Description of Artificial Sequence: Synthetic oligonucleotide
  source 1..21: mol_type = other DNA
attaggagtgattctacggcg

SEQ ID NO: 18685 - DNA, 21 bp, synthetic construct
  misc_feature 1..21: note = Description of Artificial Sequence: Synthetic oligonucleotide
  source 1..21: mol_type = other DNA
cgggaggggtcgggttcggct

SEQ ID NO: 18686 - DNA, 21 bp, synthetic construct
  misc_feature 1..21: note = Description of Artificial Sequence: Synthetic oligonucleotide
  source 1..21: mol_type = other DNA
gacagaagcagcgcccaagcc

SEQ ID NO: 18687 - DNA, 21 bp, synthetic construct
  misc_feature 1..21: note = Description of Artificial Sequence: Synthetic oligonucleotide
  source 1..21: mol_type = other DNA
gatcaggcgggggagaggagt

SEQ ID NO: 18688 - DNA, 21 bp, synthetic construct
  misc_feature 1..21: note = Description of Artificial Sequence: Synthetic oligonucleotide
  source 1..21: mol_type = other DNA
gccagcagcgaaaaagacaga

SEQ ID NO: 18689 - DNA, 21 bp, synthetic construct
  misc_feature 1..21: note = Description of Artificial Sequence: Synthetic oligonucleotide
  source 1..21: mol_type = other DNA
gggattagtgcgagtacgggt

SEQ ID NO: 18690 - DNA, 21 bp, synthetic construct
  misc_feature 1..21: note = Description of Artificial Sequence: Synthetic oligonucleotide
  source 1..21: mol_type = other DNA
gtttctcaggggacgtcggtg

SEQ ID NO: 18691 - DNA, 21 bp, synthetic construct
  misc_feature 1..21: note = Description of Artificial Sequence: Synthetic oligonucleotide
  source 1..21: mol_type = other DNA
tctgatgtggggaatgggaag

SEQ ID NO: 18692 - DNA, 21 bp, synthetic construct
  misc_feature 1..21: note = Description of Artificial Sequence: Synthetic oligonucleotide
  source 1..21: mol_type = other DNA
ggcagccccggcaccagcagc

SEQ ID NO: 18693 - DNA, 21 bp, synthetic construct
  misc_feature 1..21: note = Description of Artificial Sequence: Synthetic oligonucleotide
  source 1..21: mol_type = other DNA
gcgagggggaagacgtctgag

SEQ ID NO: 18694 - DNA, 21 bp, synthetic construct
  misc_feature 1..21: note = Description of Artificial Sequence: Synthetic oligonucleotide
  source 1..21: mol_type = other DNA
caaaccgtcaccagcagccaa

SEQ ID NO: 18695 - DNA, 21 bp, synthetic construct
  misc_feature 1..21: note = Description of Artificial Sequence: Synthetic oligonucleotide
  source 1..21: mol_type = other DNA
agaagcaacagcgccaccagc

SEQ ID NO: 18696 - DNA, 21 bp, synthetic construct
  misc_feature 1..21: note = Description of Artificial Sequence: Synthetic oligonucleotide
  source 1..21: mol_type = other DNA
agcaacaacagcgcccaaggc

SEQ ID NO: 18697 - DNA, 21 bp, synthetic construct
  misc_feature 1..21: note = Description of Artificial Sequence: Synthetic oligonucleotide
  source 1..21: mol_type = other DNA
aacaccaccgacaaaggcagc

SEQ ID NO: 18698 - DNA, 21 bp, synthetic construct
  misc_feature 1..21: note = Description of Artificial Sequence: Synthetic oligonucleotide
  source 1..21: mol_type = other DNA
agcagcgacacccaaaaaaac

SEQ ID NO: 18699 - DNA, 21 bp, synthetic construct
  misc_feature 1..21: note = Description of Artificial Sequence: Synthetic oligonucleotide
  source 1..21: mol_type = other DNA
ctcagcagcagcggcggcggc

SEQ ID NO: 18700 - DNA, 21 bp, synthetic construct
  misc_feature 1..21: note = Description of Artificial Sequence: Synthetic oligonucleotide
  source 1..21: mol_type = other DNA
ctcgccaacagcaacaccagc

SEQ ID NO: 18701 - DNA, 21 bp, synthetic construct
  misc_feature 1..21: note = Description of Artificial Sequence: Synthetic oligonucleotide
  source 1..21: mol_type = other DNA
gggtctcattctcagagtggt

SEQ ID NO: 18702 - DNA, 21 bp, synthetic construct
  misc_feature 1..21: note = Description of Artificial Sequence: Synthetic oligonucleotide
  source 1..21: mol_type = other DNA
agcgcccccgacagaggcggc

SEQ ID NO: 18703 - DNA, 21 bp, synthetic construct
  misc_feature 1..21: note = Description of Artificial Sequence: Synthetic oligonucleotide
  source 1..21: mol_type = other DNA
gacaccagcaaaagcgccctc

SEQ ID NO: 18704 - DNA, 21 bp, synthetic construct
  misc_feature 1..21: note = Description of Artificial Sequence: Synthetic oligonucleotide
  source 1..21: mol_type = other DNA
ggcgaaaacggcaaaagcgtc

SEQ ID NO: 18705 - DNA, 21 bp, synthetic construct
  misc_feature 1..21: note = Description of Artificial Sequence: Synthetic oligonucleotide
  source 1..21: mol_type = other DNA
ctgggggagacgaaggctggg

SEQ ID NO: 18706 - DNA, 21 bp, synthetic construct
  misc_feature 1..21: note = Description of Artificial Sequence: Synthetic oligonucleotide
  source 1..21: mol_type = other DNA
ctcggcgacaacacccaaaaa

SEQ ID NO: 18707 - DNA, 21 bp, synthetic construct
  misc_feature 1..21: note = Description of Artificial Sequence: Synthetic oligonucleotide
  source 1..21: mol_type = other DNA
caaagcaccggcaccctcagc

SEQ ID NO: 18708 - DNA, 21 bp, synthetic construct
  misc_feature 1..21: note = Description of Artificial Sequence: Synthetic oligonucleotide
  source 1..21: mol_type = other DNA
gacagcgccagcaaacacggc

SEQ ID NO: 18709 - DNA, 21 bp, synthetic construct
  misc_feature 1..21: note = Description of Artificial Sequence: Synthetic oligonucleotide
  source 1..21: mol_type = other DNA
tcgggtgttgaggcgcggagt

SEQ ID NO: 18710 - DNA, 21 bp, synthetic construct
  misc_feature 1..21: note = Description of Artificial Sequence: Synthetic oligonucleotide
  source 1..21: mol_type = other DNA
aacaacagcgacaccaacaaa

SEQ ID NO: 18711 - DNA, 21 bp, synthetic construct
  misc_feature 1..21: note = Description of Artificial Sequence: Synthetic oligonucleotide
  source 1..21: mol_type = other DNA
catgttagtgggacgcctgct

SEQ ID NO: 18712 - DNA, 21 bp, synthetic construct
  misc_feature 1..21: note = Description of Artificial Sequence: Synthetic oligonucleotide
  source 1..21: mol_type = other DNA
agcaacggcggcaccaaaacc

SEQ ID NO: 18713 - DNA, 21 bp, synthetic construct
  misc_feature 1..21: note = Description of Artificial Sequence: Synthetic oligonucleotide
  source 1..21: mol_type = other DNA
aatggtggtaagacgaatgtg

SEQ ID NO: 18714 - DNA, 21 bp, synthetic construct
  misc_feature 1..21: note = Description of Artificial Sequence: Synthetic oligonucleotide
  source 1..21: mol_type = other DNA
aatggtagtactagtcttaag

SEQ ID NO: 18715 - DNA, 21 bp, synthetic construct
  misc_feature 1..21: note = Description of Artificial Sequence: Synthetic oligonucleotide
  source 1..21: mol_type = other DNA
aatagtaatgagaagtctggt

SEQ ID NO: 18716 - DNA, 21 bp, synthetic construct
  misc_feature 1..21: note = Description of Artificial Sequence: Synthetic oligonucleotide
  source 1..21: mol_type = other DNA
aggacttctggtccgaatacg

SEQ ID NO: 18717 - DNA, 21 bp, synthetic construct
  misc_feature 1..21: note = Description of Artificial Sequence: Synthetic oligonucleotide
  source 1..21: mol_type = other DNA
gagtctccgtctcataataag

SEQ ID NO: 18718 - DNA, 21 bp, synthetic construct
  misc_feature 1..21: note = Description of Artificial Sequence: Synthetic oligonucleotide
  source 1..21: mol_type = other DNA
gctgggggtgagctgcagaag

SEQ ID NO: 18719 - DNA, 21 bp, synthetic construct
  misc_feature 1..21: note = Description of Artificial Sequence: Synthetic oligonucleotide
  source 1..21: mol_type = other DNA
ctcaccagcggcaaaggcagc

SEQ ID NO: 18720 - DNA, 21 bp, synthetic construct
  misc_feature 1..21: note = Description of Artificial Sequence: Synthetic oligonucleotide
  source 1..21: mol_type = other DNA
aaagccaccagcaccagcagc

SEQ ID NO: 18721 - DNA, 21 bp, synthetic construct
  misc_feature 1..21: note = Description of Artificial Sequence: Synthetic oligonucleotide
  source 1..21: mol_type = other DNA
gatgggagtaatgggaagatg

SEQ ID NO: 18722 - DNA, 21 bp, synthetic construct
  misc_feature 1..21: note = Description of Artificial Sequence: Synthetic oligonucleotide
  source 1..21: mol_type = other DNA
tcggtggataagacggcgggg

SEQ ID NO: 18723 - DNA, 21 bp, synthetic construct
  misc_feature 1..21: note = Description of Artificial Sequence: Synthetic oligonucleotide
  source 1..21: mol_type = other DNA
caaggcatcaccaacagcaac

SEQ ID NO: 18724 - DNA, 21 bp, synthetic construct
  misc_feature 1..21: note = Description of Artificial Sequence: Synthetic oligonucleotide
  source 1..21: mol_type = other DNA
catcagtcggggagtcctact

SEQ ID NO: 18725 - DNA, 21 bp, synthetic construct
  misc_feature 1..21: note = Description of Artificial Sequence: Synthetic oligonucleotide
  source 1..21: mol_type = other DNA
gagacggttaagagtagtcag

SEQ ID NO: 18726 - DNA, 21 bp, synthetic construct
  misc_feature 1..21: note = Description of Artificial Sequence: Synthetic oligonucleotide
  source 1..21: mol_type = other DNA
gagtctggggatcgtgggaag

SEQ ID NO: 18727 - DNA, 21 bp, synthetic construct
  misc_feature 1..21: note = Description of Artificial Sequence: Synthetic oligonucleotide
  source 1..21: mol_type = other DNA
accagcaaacccagcagcgaa

SEQ ID NO: 18728 - DNA, 21 bp, synthetic construct
  misc_feature 1..21: note = Description of Artificial Sequence: Synthetic oligonucleotide
  source 1..21: mol_type = other DNA
ggcgccaccagccccacccaa

SEQ ID NO: 18729 - DNA, 21 bp, synthetic construct
  misc_feature 1..21: note = Description of Artificial Sequence: Synthetic oligonucleotide
  source 1..21: mol_type = other DNA
caggcgaatgatcggtctgct

SEQ ID NO: 18730 - DNA, 21 bp, synthetic construct
  misc_feature 1..21: note = Description of Artificial Sequence: Synthetic oligonucleotide
  source 1..21: mol_type = other DNA
aacaacaacgcccacgccagc

SEQ ID NO: 18731 - DNA, 21 bp, synthetic construct
  misc_feature 1..21: note = Description of Artificial Sequence: Synthetic oligonucleotide
  source 1..21: mol_type = other DNA
caggcgcagagtgctagtaag

SEQ ID NO: 18732 - DNA, 21 bp, synthetic construct
  misc_feature 1..21: note = Description of Artificial Sequence: Synthetic oligonucleotide
  source 1..21: mol_type = other DNA
agcagctacgaacccaacaaa

SEQ ID NO: 18733 - DNA, 21 bp, synthetic construct
  misc_feature 1..21: note = Description of Artificial Sequence: Synthetic oligonucleotide
  source 1..21: mol_type = other DNA
agcaaaaccggcggcaccagc

SEQ ID NO: 18734 - DNA, 21 bp, synthetic construct
  misc_feature 1..21: note = Description of Artificial Sequence: Synthetic oligonucleotide
  source 1..21: mol_type = other DNA
agcagcagcgacaaacacggc

SEQ ID NO: 18735 - DNA, 21 bp, synthetic construct
  misc_feature 1..21: note = Description of Artificial Sequence: Synthetic oligonucleotide
  source 1..21: mol_type = other DNA
agcatgcccggcgaaaaaaga

SEQ ID NO: 18736 - DNA, 21 bp, synthetic construct
  misc_feature 1..21: note = Description of Artificial Sequence: Synthetic oligonucleotide
  source 1..21: mol_type = other DNA
atcgaaggcagcggccacagc

SEQ ID NO: 18737 - DNA, 21 bp, synthetic construct
  misc_feature 1..21: note = Description of Artificial Sequence: Synthetic oligonucleotide
  source 1..21: mol_type = other DNA
ggcagcaccgccgcccccggc

SEQ ID NO: 18738 - DNA, 21 bp, synthetic construct
  misc_feature 1..21: note = Description of Artificial Sequence: Synthetic oligonucleotide
  source 1..21: mol_type = other DNA
gggacgactgctactgttggt

SEQ ID NO: 18739 - DNA, 21 bp, synthetic construct
  misc_feature 1..21: note = Description of Artificial Sequence: Synthetic oligonucleotide
  source 1..21: mol_type = other DNA
ggccaaaccaccggcacccac

SEQ ID NO: 18740 - DNA, 21 bp, synthetic construct
  misc_feature 1..21: note = Description of Artificial Sequence: Synthetic oligonucleotide
  source 1..21: mol_type = other DNA
accaacagcagccccaccctc

SEQ ID NO: 18741 - DNA, 21 bp, synthetic construct
  misc_feature 1..21: note = Description of Artificial Sequence: Synthetic oligonucleotide
  source 1..21: mol_type = other DNA
agcaccagcagacaagaaggc

SEQ ID NO: 18742 - DNA, 21 bp, synthetic construct
  misc_feature 1..21: note = Description of Artificial Sequence: Synthetic oligonucleotide
  source 1..21: mol_type = other DNA
acgactgttggtccgaatcat

SEQ ID NO: 18743 - DNA, 21 bp, synthetic construct
  misc_feature 1..21: note = Description of Artificial Sequence: Synthetic oligonucleotide
  source 1..21: mol_type = other DNA
gaaaacagcagcgccatcaaa

SEQ ID NO: 18744 - DNA, 21 bp, synthetic construct
  misc_feature 1..21: note = Description of Artificial Sequence: Synthetic oligonucleotide
  source 1..21: mol_type = other DNA
gtggctacgacgtctagtagt

SEQ ID NO: 18745 - DNA, 21 bp, synthetic construct
  misc_feature 1..21: note = Description of Artificial Sequence: Synthetic oligonucleotide
  source 1..21: mol_type = other DNA
agagaccacacccccaccacc

SEQ ID NO: 18746 - DNA, 21 bp, synthetic construct
  misc_feature 1..21: note = Description of Artificial Sequence: Synthetic oligonucleotide
  source 1..21: mol_type = other DNA
atcagcagcagaggcagcgaa

SEQ ID NO: 18747 - DNA, 21 bp, synthetic construct
  misc_feature 1..21: note = Description of Artificial Sequence: Synthetic oligonucleotide
  source 1..21: mol_type = other DNA
gggggtggtactccggttacg

SEQ ID NO: 18748 - DNA, 21 bp, synthetic construct
  misc_feature 1..21: note = Description of Artificial Sequence: Synthetic oligonucleotide
  source 1..21: mol_type = other DNA
accagcaccacccaaccccac

SEQ ID NO: 18749 - DNA, 21 bp, synthetic construct
  misc_feature 1..21: note = Description of Artificial Sequence: Synthetic oligonucleotide
  source 1..21: mol_type = other DNA
gccagaacccaaagcagcagc

SEQ ID NO: 18750 - DNA, 21 bp, synthetic construct
  misc_feature 1..21: note = Description of Artificial Sequence: Synthetic oligonucleotide
  source 1..21: mol_type = other DNA
ggcaaagtcaacaccaccacc

SEQ ID NO: 18751 - DNA, 21 bp, synthetic construct
  misc_feature 1..21: note = Description of Artificial Sequence: Synthetic oligonucleotide
  source 1..21: mol_type = other DNA
actgggggggagaagaagagt

SEQ ID NO: 18752 - DNA, 21 bp, synthetic construct
  misc_feature 1..21: note = Description of Artificial Sequence: Synthetic oligonucleotide
  source 1..21: mol_type = other DNA
ggttcggggtcgtcgagtgtg

SEQ ID NO: 18753 - DNA, 21 bp, synthetic construct
  misc_feature 1..21: note = Description of Artificial Sequence: Synthetic oligonucleotide
  source 1..21: mol_type = other DNA
caggtgactggtaatcctcct

SEQ ID NO: 18754 - DNA, 21 bp, synthetic construct
  misc_feature 1..21: note = Description of Artificial Sequence: Synthetic oligonucleotide
  source 1..21: mol_type = other DNA
gttactggtggtgcttctcag

SEQ ID NO: 18755 - DNA, 21 bp, synthetic construct
  misc_feature 1..21: note = Description of Artificial Sequence: Synthetic oligonucleotide
  source 1..21: mol_type = other DNA
aatgcgtctcctagtgcgggt

SEQ ID NO: 18756 - DNA, 21 bp, synthetic construct
  misc_feature 1..21: note = Description of Artificial Sequence: Synthetic oligonucleotide
  source 1..21: mol_type = other DNA
gggcatggggatgggcctcgt

SEQ ID NO: 18757 - DNA, 21 bp, synthetic construct
  misc_feature 1..21: note = Description of Artificial Sequence: Synthetic oligonucleotide
  source 1..21: mol_type = other DNA
tctactacgggtgatactaag

SEQ ID NO: 18758 - DNA, 21 bp, synthetic construct
  misc_feature 1..21: note = Description of Artificial Sequence: Synthetic oligonucleotide
  source 1..21: mol_type = other DNA
actggtactaagtcggataat

SEQ ID NO: 18759 - DNA, 21 bp, synthetic construct
  misc_feature 1..21: note = Description of Artificial Sequence: Synthetic oligonucleotide
  source 1..21: mol_type = other DNA
agcggcatcaacgcccccacc

SEQ ID NO: 18760 - DNA, 21 bp, synthetic construct
  misc_feature 1..21: note = Description of Artificial Sequence: Synthetic oligonucleotide
  source 1..21: mol_type = other DNA
ggcctcggcagcagcagcacc

SEQ ID NO: 18761 - DNA, 21 bp, synthetic construct
  misc_feature 1..21: note = Description of Artificial Sequence: Synthetic oligonucleotide
  source 1..21: mol_type = other DNA
agcgccggcaacacccccctc

SEQ ID NO: 18762 - DNA, 21 bp, synthetic construct
  misc_feature 1..21: note = Description of Artificial Sequence: Synthetic oligonucleotide
  source 1..21: mol_type = other DNA
accaaagaccacacccccagc

SEQ ID NO: 18763 - DNA, 21 bp, synthetic construct
  misc_feature 1..21: note = Description of Artificial Sequence: Synthetic oligonucleotide
  source 1..21: mol_type = other DNA
agaggcagcgacaccgccaac

SEQ ID NO: 18764 - DNA, 21 bp, synthetic construct
  misc_feature 1..21: note = Description of Artificial Sequence: Synthetic oligonucleotide
  source 1..21: mol_type = other DNA
gattctactgcgaaggatagt

SEQ ID NO: 18765 - DNA, 21 bp, synthetic construct
  misc_feature 1..21: note = Description of Artificial Sequence: Synthetic oligonucleotide
  source 1..21: mol_type = other DNA
ggtaagagtaatgctactttt

SEQ ID NO: 18766 - DNA, 21 bp, synthetic construct
  misc_feature 1..21: note = Description of Artificial Sequence: Synthetic oligonucleotide
  source 1..21: mol_type = other DNA
tcggtgggtagggatcctagt

SEQ ID NO: 18767 - DNA, 21 bp, synthetic construct
  misc_feature 1..21: note = Description of Artificial Sequence: Synthetic oligonucleotide
  source 1..21: mol_type = other DNA
ttgacgggtcatcaggggggt

SEQ ID NO: 18768 - DNA, 21 bp, synthetic construct
  misc_feature 1..21: note = Description of Artificial Sequence: Synthetic oligonucleotide
  source 1..21: mol_type = other DNA
caaagaggcaaccaaaacgtc

SEQ ID NO: 18769 - DNA, 21 bp, synthetic construct
  misc_feature 1..21: note = Description of Artificial Sequence: Synthetic oligonucleotide
  source 1..21: mol_type = other DNA
agtacgaattcgggtggttcg

SEQ ID NO: 18770 - DNA, 21 bp, synthetic construct
  misc_feature 1..21: note = Description of Artificial Sequence: Synthetic oligonucleotide
  source 1..21: mol_type = other DNA
cacggcggcggcagcgtcacc

SEQ ID NO: 18771 - DNA, 21 bp, synthetic construct
  misc_feature 1..21: note = Description of Artificial Sequence: Synthetic oligonucleotide
  source 1..21: mol_type = other DNA
atgagtgggcagacgtcggtt

SEQ ID NO: 18772 - DNA, 21 bp, synthetic construct
  misc_feature 1..21: note = Description of Artificial Sequence: Synthetic oligonucleotide
  source 1..21: mol_type = other DNA
gacaacgtcagccccaaaagc

SEQ ID NO: 18773 - DNA, 21 bp, synthetic construct
  misc_feature 1..21: note = Description of Artificial Sequence: Synthetic oligonucleotide
  source 1..21: mol_type = other DNA
agcggcaacgccggccccagc

SEQ ID NO: 18774 - DNA, 21 bp, synthetic construct
  misc_feature 1..21: note = Description of Artificial Sequence: Synthetic oligonucleotide
  source 1..21: mol_type = other DNA
gagcggggtagtgggactaat

SEQ ID NO: 18775 - DNA, 21 bp, synthetic construct
  misc_feature 1..21: note = Description of Artificial Sequence: Synthetic oligonucleotide
  source 1..21: mol_type = other DNA
gggaatgatcatcagaagact

SEQ ID NO: 18776 - DNA, 21 bp, synthetic construct
  misc_feature 1..21: note = Description of Artificial Sequence: Synthetic oligonucleotide
  source 1..21: mol_type = other DNA
aaacccctcgacaaacacgaa

SEQ ID NO: 18777 - DNA, 21 bp, synthetic construct
  misc_feature 1..21: note = Description of Artificial Sequence: Synthetic oligonucleotide
  source 1..21: mol_type = other DNA
catcagacttctagttcgacc

SEQ ID NO: 18778 - DNA, 21 bp, synthetic construct
  misc_feature 1..21: note = Description of Artificial Sequence: Synthetic oligonucleotide
  source 1..21: mol_type = other DNA
tctcagccgacgggtcagact

SEQ ID NO: 18779 - DNA, 21 bp, synthetic construct
  misc_feature 1..21: note = Description of Artificial Sequence: Synthetic oligonucleotide
  source 1..21: mol_type = other DNA
aacgccgccagcgacctcaaa

SEQ ID NO: 18780 - DNA, 21 bp, synthetic construct
  misc_feature 1..21: note = Description of Artificial Sequence: Synthetic oligonucleotide
  source 1..21: mol_type = other DNA
ctggttggtacgactcctgct

SEQ ID NO: 18781 - DNA, 21 bp, synthetic construct
  misc_feature 1..21: note = Description of Artificial Sequence: Synthetic oligonucleotide
  source 1..21: mol_type = other DNA
gtcgccaccggcagcaccacc

SEQ ID NO: 18782 - DNA, 21 bp, synthetic construct
  misc_feature 1..21: note = Description of Artificial Sequence: Synthetic oligonucleotide
  source 1..21: mol_type = other DNA
gatgttgctaaggggaaggat

SEQ ID NO: 18783 - DNA, 21 bp, synthetic construct
  misc_feature 1..21: note = Description of Artificial Sequence: Synthetic oligonucleotide
  source 1..21: mol_type = other DNA
gcggaggtacagaagtctggg

SEQ ID NO: 18784 - DNA, 21 bp, synthetic construct
  misc_feature 1..21: note = Description of Artificial Sequence: Synthetic oligonucleotide
  source 1..21: mol_type = other DNA
ggcctcggcgtccacgccgcc

SEQ ID NO: 18785 - DNA, 21 bp, synthetic construct
  misc_feature 1..21: note = Description of Artificial Sequence: Synthetic oligonucleotide
  source 1..21: mol_type = other DNA
ggtcctcagacgagttcgggt

SEQ ID NO: 18786 - DNA, 21 bp, synthetic construct
  misc_feature 1..21: note = Description of Artificial Sequence: Synthetic oligonucleotide
  source 1..21: mol_type = other DNA
aaaaacgccagcggcgccacc

SEQ ID NO: 18787 - DNA, 21 bp, synthetic construct
  misc_feature 1..21: note = Description of Artificial Sequence: Synthetic oligonucleotide
  source 1..21: mol_type = other DNA
accggcaacggcgccggccaa

SEQ ID NO: 18788 - DNA, 21 bp, synthetic construct
  misc_feature 1..21: note = Description of Artificial Sequence: Synthetic oligonucleotide
  source 1..21: mol_type = other DNA
atgaacagcggccaaagcagc

SEQ ID NO: 18789 - DNA, 21 bp, synthetic construct
  misc_feature 1..21: note = Description of Artificial Sequence: Synthetic oligonucleotide
  source 1..21: mol_type = other DNA
atttcgacggataaggcgaat

SEQ ID NO: 18790 - DNA, 21 bp, synthetic construct
  misc_feature 1..21: note = Description of Artificial Sequence: Synthetic oligonucleotide
  source 1..21: mol_type = other DNA
gagcctagtaataatcgtgtg

SEQ ID NO: 18791 - DNA, 21 bp, synthetic construct
  misc_feature 1..21: note = Description of Artificial Sequence: Synthetic oligonucleotide
  source 1..21: mol_type = other DNA
ggccaaggcaccggccccatc

SEQ ID NO: 18792 - DNA, 21 bp, synthetic construct
  misc_feature 1..21: note = Description of Artificial Sequence: Synthetic oligonucleotide
  source 1..21: mol_type = other DNA
gacagcagacccagcagcaac

SEQ ID NO: 18793 - DNA, 21 bp, synthetic construct
  misc_feature 1..21: note = Description of Artificial Sequence: Synthetic oligonucleotide
  source 1..21: mol_type = other DNA
gaacaaagaaccaaagacagc

SEQ ID NO: 18794 - DNA, 21 bp, synthetic construct
  misc_feature 1..21: note = Description of Artificial Sequence: Synthetic oligonucleotide
  source 1..21: mol_type = other DNA
gaactcagcagcaaagccagc

SEQ ID NO: 18795 - DNA, 21 bp, synthetic construct
  misc_feature 1..21: note = Description of Artificial Sequence: Synthetic oligonucleotide
  source 1..21: mol_type = other DNA
agcgccgacagaaacaacgcc

SEQ ID NO: 18796 - DNA, 21 bp, synthetic construct
  misc_feature 1..21: note = Description of Artificial Sequence: Synthetic oligonucleotide
  source 1..21: mol_type = other DNA
cagaagcctgggaatcttggt

SEQ ID NO: 18797 - DNA, 21 bp, synthetic construct
  misc_feature 1..21: note = Description of Artificial Sequence: Synthetic oligonucleotide
  source 1..21: mol_type = other DNA
catactactgataagattcag

SEQ ID NO: 18798 - DNA, 21 bp, synthetic construct
  misc_feature 1..21: note = Description of Artificial Sequence: Synthetic oligonucleotide
  source 1..21: mol_type = other DNA
aacagcaacagcagaaacgaa

SEQ ID NO: 18799 - DNA, 21 bp, synthetic construct
  misc_feature 1..21: note = Description of Artificial Sequence: Synthetic oligonucleotide
  source 1..21: mol_type = other DNA
gatagtcttgcggtgactaag

SEQ ID NO: 18800 - DNA, 21 bp, synthetic construct
  misc_feature 1..21: note = Description of Artificial Sequence: Synthetic oligonucleotide
  source 1..21: mol_type = other DNA
gatgggcagaatactgcgtct

SEQ ID NO: 18801 - DNA, 21 bp, synthetic construct
  misc_feature 1..21: note = Description of Artificial Sequence: Synthetic oligonucleotide
  source 1..21: mol_type = other DNA
gtccaaaacacccacagcagc

SEQ ID NO: 18802 - DNA, 21 bp, synthetic construct
  misc_feature 1..21: note = Description of Artificial Sequence: Synthetic oligonucleotide
  source 1..21: mol_type = other DNA
agtacggttggttcgccgagt

SEQ ID NO: 18803 - DNA, 21 bp, synthetic construct
  misc_feature 1..21: note = Description of Artificial Sequence: Synthetic oligonucleotide
  source 1..21: mol_type = other DNA
aacaacaccaccagcagcgcc

SEQ ID NO: 18804 - DNA, 21 bp, synthetic construct
  misc_feature 1..21: note = Description of Artificial Sequence: Synthetic oligonucleotide
  source 1..21: mol_type = other DNA
accggcagcacccccgccctc

SEQ ID NO: 18805 - DNA, 21 bp, synthetic construct
  misc_feature 1..21: note = Description of Artificial Sequence: Synthetic oligonucleotide
  source 1..21: mol_type = other DNA
gtgtctagttcttcttctggt

SEQ ID NO: 18806 - DNA, 21 bp, synthetic construct
  misc_feature 1..21: note = Description of Artificial Sequence: Synthetic oligonucleotide
  source 1..21: mol_type = other DNA
cacaacaccgaaaaacccagc

SEQ ID NO: 18807 - DNA, 21 bp, synthetic construct
  misc_feature 1..21: note = Description of Artificial Sequence: Synthetic oligonucleotide
  source 1..21: mol_type = other DNA
cagacgggtggtactgcgggt

SEQ ID NO: 18808 - DNA, 21 bp, synthetic construct
  misc_feature 1..21: note = Description of Artificial Sequence: Synthetic oligonucleotide
  source 1..21: mol_type = other DNA
tctacgactcagtctcaggcg

SEQ ID NO: 18809 - DNA, 21 bp, synthetic construct
  misc_feature 1..21: note = Description of Artificial Sequence: Synthetic oligonucleotide
  source 1..21: mol_type = other DNA
accaccggcagcggcaaccaa

SEQ ID NO: 18810 - DNA, 21 bp, synthetic construct
  misc_feature 1..21: note = Description of Artificial Sequence: Synthetic oligonucleotide
  source 1..21: mol_type = other DNA
cacggcgtcaacagccccagc

SEQ ID NO: 18811 - DNA, 21 bp, synthetic construct
  misc_feature 1..21: note = Description of Artificial Sequence: Synthetic oligonucleotide
  source 1..21: mol_type = other DNA
gccagaagcaccagcaacagc

SEQ ID NO: 18812 - DNA, 21 bp, synthetic construct
  misc_feature 1..21: note = Description of Artificial Sequence: Synthetic oligonucleotide
  source 1..21: mol_type = other DNA
gaaagcaccggcagcctcaaa

SEQ ID NO: 18813 - DNA, 21 bp, synthetic construct
  misc_feature 1..21: note = Description of Artificial Sequence: Synthetic oligonucleotide
  source 1..21: mol_type = other DNA
acccccgacgccaaaagcgtc

SEQ ID NO: 18814 - DNA, 21 bp, synthetic construct
  misc_feature 1..21: note = Description of Artificial Sequence: Synthetic oligonucleotide
  source 1..21: mol_type = other DNA
ggttctagtacgtctccggtt

SEQ ID NO: 18815 - DNA, 21 bp, synthetic construct
  misc_feature 1..21: note = Description of Artificial Sequence: Synthetic oligonucleotide
  source 1..21: mol_type = other DNA
tctggtcagcaggttaatgtt

SEQ ID NO: 18816 - DNA, 21 bp, synthetic construct
  misc_feature 1..21: note = Description of Artificial Sequence: Synthetic oligonucleotide
  source 1..21: mol_type = other DNA
gacaacaccggcaaaggcagc

SEQ ID NO: 18817 - DNA, 21 bp, synthetic construct
  misc_feature 1..21: note = Description of Artificial Sequence: Synthetic oligonucleotide
  source 1..21: mol_type = other DNA
actgatgatcgttctaagagt

SEQ ID NO: 18818 - DNA, 21 bp, synthetic construct
  misc_feature 1..21: note = Description of Artificial Sequence: Synthetic oligonucleotide
  source 1..21: mol_type = other DNA
ggcaacgacggcagaagcgcc

SEQ ID NO: 18819 - DNA, 21 bp, synthetic construct
  misc_feature 1..21: note = Description of Artificial Sequence: Synthetic oligonucleotide
  source 1..21: mol_type = other DNA
accacccaaacccccagcctc

SEQ ID NO: 18820 - DNA, 21 bp, synthetic construct
  misc_feature 1..21: note = Description of Artificial Sequence: Synthetic oligonucleotide
  source 1..21: mol_type = other DNA
agaaacggcaaagaaatcgtc

SEQ ID NO: 18821 - DNA, 21 bp, synthetic construct
  misc_feature 1..21: note = Description of Artificial Sequence: Synthetic oligonucleotide
  source 1..21: mol_type = other DNA
ggggatagtcgtcagtcggtg

SEQ ID NO: 18822 - DNA, 21 bp, synthetic construct
  misc_feature 1..21: note = Description of Artificial Sequence: Synthetic oligonucleotide
  source 1..21: mol_type = other DNA
cagactcagaagggtaatggg

SEQ ID NO: 18823 - DNA, 21 bp, synthetic construct
  misc_feature 1..21: note = Description of Artificial Sequence: Synthetic oligonucleotide
  source 1..21: mol_type = other DNA
ggcaacatcagcggcagcaaa

SEQ ID NO: 18824 - DNA, 21 bp, synthetic construct
  misc_feature 1..21: note = Description of Artificial Sequence: Synthetic oligonucleotide
  source 1..21: mol_type = other DNA
agcaaagccaccagcaacggc

SEQ ID NO: 18825 - DNA, 21 bp, synthetic construct
  misc_feature 1..21: note = Description of Artificial Sequence: Synthetic oligonucleotide
  source 1..21: mol_type = other DNA
cacaaaggccaacacaccgaa

SEQ ID NO: 18826 - DNA, 21 bp, synthetic construct
  misc_feature 1..21: note = Description of Artificial Sequence: Synthetic oligonucleotide
  source 1..21: mol_type = other DNA
cacaacagcgaaatcgccaaa

SEQ ID NO: 18827 - DNA, 21 bp, synthetic construct
  misc_feature 1..21: note = Description of Artificial Sequence: Synthetic oligonucleotide
  source 1..21: mol_type = other DNA
cagaatccgcctcctgctaag

SEQ ID NO: 18828 - DNA, 21 bp, synthetic construct
  misc_feature 1..21: note = Description of Artificial Sequence: Synthetic oligonucleotide
  source 1..21: mol_type = other DNA
cgtagtggtgaggatactaag

SEQ ID NO: 18829 - DNA, 21 bp, synthetic construct
  misc_feature 1..21: note = Description of Artificial Sequence: Synthetic oligonucleotide
  source 1..21: mol_type = other DNA
gcgcaggggtcgagtgctacg

SEQ ID NO: 18830 - DNA, 21 bp, synthetic construct
  misc_feature 1..21: note = Description of Artificial Sequence: Synthetic oligonucleotide
  source 1..21: mol_type = other DNA
ggcaccatgaccgacagaagc

SEQ ID NO: 18831 - DNA, 21 bp, synthetic construct
  misc_feature 1..21: note = Description of Artificial Sequence: Synthetic oligonucleotide
  source 1..21: mol_type = other DNA
ggcctcgccgccaacagcctc

SEQ ID NO: 18832 - DNA, 21 bp, synthetic construct
  misc_feature 1..21: note = Description of Artificial Sequence: Synthetic oligonucleotide
  source 1..21: mol_type = other DNA
tcgactactaagggtggttcg

SEQ ID NO: 18833 - DNA, 21 bp, synthetic construct
  misc_feature 1..21: note = Description of Artificial Sequence: Synthetic oligonucleotide
  source 1..21: mol_type = other DNA
ctcagcagcaacgccggcaaa

SEQ ID NO: 18834 - DNA, 21 bp, synthetic construct
  misc_feature 1..21: note = Description of Artificial Sequence: Synthetic oligonucleotide
  source 1..21: mol_type = other DNA
gatacggggtcgaggacgtct

SEQ ID NO: 18835 - DNA, 21 bp, synthetic construct
  misc_feature 1..21: note = Description of Artificial Sequence: Synthetic oligonucleotide
  source 1..21: mol_type = other DNA
ggcaaaagcaccaacaacatg

SEQ ID NO: 18836 - DNA, 21 bp, synthetic construct
  misc_feature 1..21: note = Description of Artificial Sequence: Synthetic oligonucleotide
  source 1..21: mol_type = other DNA
agacaagacgccgccggcagc

SEQ ID NO: 18837 - DNA, 21 bp, synthetic construct
  misc_feature 1..21: note = Description of Artificial Sequence: Synthetic oligonucleotide
  source 1..21: mol_type = other DNA
agcggccaacccgtccccagc

SEQ ID NO: 18838 - DNA, 21 bp, synthetic construct
  misc_feature 1..21: note = Description of Artificial Sequence: Synthetic oligonucleotide
  source 1..21: mol_type = other DNA
attccggaggcgaagcttggt

SEQ ID NO: 18839 - DNA, 21 bp, synthetic construct
  misc_feature 1..21: note = Description of Artificial Sequence: Synthetic oligonucleotide
  source 1..21: mol_type = other DNA
agcaccggcggcaacctcaaa

SEQ ID NO: 18840 - DNA, 21 bp, synthetic construct
  misc_feature 1..21: note = Description of Artificial Sequence: Synthetic oligonucleotide
  source 1..21: mol_type = other DNA
accagcatggacaaaaccagc

SEQ ID NO: 18841 - DNA, 21 bp, synthetic construct
  misc_feature 1..21: note = Description of Artificial Sequence: Synthetic oligonucleotide
  source 1..21: mol_type = other DNA
atcaccggcaccaccagccaa

SEQ ID NO: 18842 - DNA, 21 bp, synthetic construct
  misc_feature 1..21: note = Description of Artificial Sequence: Synthetic oligonucleotide
  source 1..21: mol_type = other DNA
gctgtggggccttcgagtcag

SEQ ID NO: 18843 - DNA, 21 bp, synthetic construct
  misc_feature 1..21: note = Description of Artificial Sequence: Synthetic oligonucleotide
  source 1..21: mol_type = other DNA
ggcaacatgccccccaacaaa

SEQ ID NO: 18844 - DNA, 21 bp, synthetic construct
  misc_feature 1..21: note = Description of Artificial Sequence: Synthetic oligonucleotide
  source 1..21: mol_type = other DNA
aacgccagcggcaccgacaga

SEQ ID NO: 18845 - DNA, 21 bp, synthetic construct
  misc_feature 1..21: note = Description of Artificial Sequence: Synthetic oligonucleotide
  source 1..21: mol_type = other DNA
gacaccaccgccacccccaga

SEQ ID NO: 18846 - DNA, 21 bp, synthetic construct
  misc_feature 1..21: note = Description of Artificial Sequence: Synthetic oligonucleotide
  source 1..21: mol_type = other DNA
ggcctcgacatgaaaagcacc

SEQ ID NO: 18847 - DNA, 21 bp, synthetic construct
  misc_feature 1..21: note = Description of Artificial Sequence: Synthetic oligonucleotide
  source 1..21: mol_type = other DNA
gtcgccaccgccgccaccaaa

SEQ ID NO: 18848 - DNA, 21 bp, synthetic construct
  misc_feature 1..21: note = Description of Artificial Sequence: Synthetic oligonucleotide
  source 1..21: mol_type = other DNA
gggtcgattcctagtcctaag

SEQ ID NO: 18849 - DNA, 21 bp, synthetic construct
  misc_feature 1..21: note = Description of Artificial Sequence: Synthetic oligonucleotide
  source 1..21: mol_type = other DNA
aacaaagtcagcgccgacggc

SEQ ID NO: 18850 - DNA, 21 bp, synthetic construct
  misc_feature 1..21: note = Description of Artificial Sequence: Synthetic oligonucleotide
  source 1..21: mol_type = other DNA
agcaccagcaacgtcaacaga

SEQ ID NO: 18851 - DNA, 21 bp, synthetic construct
  misc_feature 1..21: note = Description of Artificial Sequence: Synthetic oligonucleotide
  source 1..21: mol_type = other DNA
agcagcacccaaagcagcaac

SEQ ID NO: 18852 - DNA, 21 bp, synthetic construct
  misc_feature 1..21: note = Description of Artificial Sequence: Synthetic oligonucleotide
  source 1..21: mol_type = other DNA
agtactaagtcggcttcttct

SEQ ID NO: 18853 - DNA, 21 bp, synthetic construct
  misc_feature 1..21: note = Description of Artificial Sequence: Synthetic oligonucleotide
  source 1..21: mol_type = other DNA
gctagtacgaatcatgctact

SEQ ID NO: 18854 - DNA, 21 bp, synthetic construct
  misc_feature 1..21: note = Description of Artificial Sequence: Synthetic oligonucleotide
  source 1..21: mol_type = other DNA
gaaagcgccaacagaaacagc

SEQ ID NO: 18855 - DNA, 21 bp, synthetic construct
  misc_feature 1..21: note = Description of Artificial Sequence: Synthetic oligonucleotide
  source 1..21: mol_type = other DNA
accatcggcaaaagcagcagc

SEQ ID NO: 18856 - DNA, 21 bp, synthetic construct
  misc_feature 1..21: note = Description of Artificial Sequence: Synthetic oligonucleotide
  source 1..21: mol_type = other DNA
actccggtggagcataagggg

SEQ ID NO: 18857 - DNA, 21 bp, synthetic construct
  misc_feature 1..21: note = Description of Artificial Sequence: Synthetic oligonucleotide
  source 1..21: mol_type = other DNA
caagacagcagcagcgtcaaa

SEQ ID NO: 18858 - DNA, 21 bp, synthetic construct
  misc_feature 1..21: note = Description of Artificial Sequence: Synthetic oligonucleotide
  source 1..21: mol_type = other DNA
gagtcggggtcttctcgggag

SEQ ID NO: 18859 - DNA, 21 bp, synthetic construct
  misc_feature 1..21: note = Description of Artificial Sequence: Synthetic oligonucleotide
  source 1..21: mol_type = other DNA
ggcaccagcaaagccgtcggc

SEQ ID NO: 18860 - DNA, 21 bp, synthetic construct
  misc_feature 1..21: note = Description of Artificial Sequence: Synthetic oligonucleotide
  source 1..21: mol_type = other DNA
ggccaaagcaacaaagtcggc

SEQ ID NO: 18861 - DNA, 21 bp, synthetic construct
  misc_feature 1..21: note = Description of Artificial Sequence: Synthetic oligonucleotide
  source 1..21: mol_type = other DNA
tctgctcctacgggtaatgtt

SEQ ID NO: 18862 - DNA, 21 bp, synthetic construct
  misc_feature 1..21: note = Description of Artificial Sequence: Synthetic oligonucleotide
  source 1..21: mol_type = other DNA
ggtcataatagtccttctgtt

SEQ ID NO: 18863 - DNA, 21 bp, synthetic construct
  misc_feature 1..21: note = Description of Artificial Sequence: Synthetic oligonucleotide
  source 1..21: mol_type = other DNA
gttgggtcgcctgcgtctact

SEQ ID NO: 18864 - DNA, 21 bp, synthetic construct
  misc_feature 1..21: note = Description of Artificial Sequence: Synthetic oligonucleotide
  source 1..21: mol_type = other DNA
cagtcgaaggctgcgatggtt

SEQ ID NO: 18865 - DNA, 21 bp, synthetic construct
  misc_feature 1..21: note = Description of Artificial Sequence: Synthetic oligonucleotide
  source 1..21: mol_type = other DNA
gccggcagcaccgcccccaga

SEQ ID NO: 18866 - DNA, 21 bp, synthetic construct
  misc_feature 1..21: note = Description of Artificial Sequence: Synthetic oligonucleotide
  source 1..21: mol_type = other DNA
aatgctactaaggatcaggtt

SEQ ID NO: 18867 - DNA, 21 bp, synthetic construct
  misc_feature 1..21: note = Description of Artificial Sequence: Synthetic oligonucleotide
  source 1..21: mol_type = other DNA
gacgccgaaagaaccaaaagc

SEQ ID NO: 18868 - DNA, 21 bp, synthetic construct
  misc_feature 1..21: note = Description of Artificial Sequence: Synthetic oligonucleotide
  source 1..21: mol_type = other DNA
catcctagtcctacgacggcg

SEQ ID NO: 18869 - DNA, 21 bp, synthetic construct
  misc_feature 1..21: note = Description of Artificial Sequence: Synthetic oligonucleotide
  source 1..21: mol_type = other DNA
ggcaaacaaaccgtcagccaa

SEQ ID NO: 18870 - DNA, 21 bp, synthetic construct
  misc_feature 1..21: note = Description of Artificial Sequence: Synthetic oligonucleotide
  source 1..21: mol_type = other DNA
ggcggcaaagacagcgtcaac

SEQ ID NO: 18871 - DNA, 21 bp, synthetic construct
  misc_feature 1..21: note = Description of Artificial Sequence: Synthetic oligonucleotide
  source 1..21: mol_type = other DNA
gggaaggagtcgcatcctgtg

SEQ ID NO: 18872 - DNA, 21 bp, synthetic construct
  misc_feature 1..21: note = Description of Artificial Sequence: Synthetic oligonucleotide
  source 1..21: mol_type = other DNA
tctcttcatgctccgacttcg

SEQ ID NO: 18873 - DNA, 21 bp, synthetic construct
  misc_feature 1..21: note = Description of Artificial Sequence: Synthetic oligonucleotide
  source 1..21: mol_type = other DNA
aattctgataagaatgctaag

SEQ ID NO: 18874 - DNA, 21 bp, synthetic construct
  misc_feature 1..21: note = Description of Artificial Sequence: Synthetic oligonucleotide
  source 1..21: mol_type = other DNA
actacgaatgctcagagtaag

SEQ ID NO: 18875 - DNA, 21 bp, synthetic construct
  misc_feature 1..21: note = Description of Artificial Sequence: Synthetic oligonucleotide
  source 1..21: mol_type = other DNA
gagacgaagaattctcttggt

SEQ ID NO: 18876 - DNA, 21 bp, synthetic construct
  misc_feature 1..21: note = Description of Artificial Sequence: Synthetic oligonucleotide
  source 1..21: mol_type = other DNA
agaggcagcgacaccaccagc

SEQ ID NO: 18877 - DNA, 21 bp, synthetic construct
  misc_feature 1..21: note = Description of Artificial Sequence: Synthetic oligonucleotide
  source 1..21: mol_type = other DNA
ggtagtcagaagattgcgacg

SEQ ID NO: 18878 - DNA, 21 bp, synthetic construct
  misc_feature 1..21: note = Description of Artificial Sequence: Synthetic oligonucleotide
  source 1..21: mol_type = other DNA
gtccaagacaaaaccaacacc

SEQ ID NO: 18879 - DNA, 21 bp, synthetic construct
  misc_feature 1..21: note = Description of Artificial Sequence: Synthetic oligonucleotide
  source 1..21: mol_type = other DNA
atgcatgataagccggcgtct

SEQ ID NO: 18880 - DNA, 21 bp, synthetic construct
  misc_feature 1..21: note = Description of Artificial Sequence: Synthetic oligonucleotide
  source 1..21: mol_type = other DNA
gacaaccccgccggcatcaga

SEQ ID NO: 18881 - DNA, 21 bp, synthetic construct
  misc_feature 1..21: note = Description of Artificial Sequence: Synthetic oligonucleotide
  source 1..21: mol_type = other DNA
accaccgtcagcgccgccagc

SEQ ID NO: 18882 - DNA, 21 bp, synthetic construct
  misc_feature 1..21: note = Description of Artificial Sequence: Synthetic oligonucleotide
  source 1..21: mol_type = other DNA
aggtctaatggtcagcttagt

SEQ ID NO: 18883 - DNA, 21 bp, synthetic construct
  misc_feature 1..21: note = Description of Artificial Sequence: Synthetic oligonucleotide
  source 1..21: mol_type = other DNA
catgggactcaggagcctcgt

SEQ ID NO: 18884 - DNA, 21 bp, synthetic construct
  misc_feature 1..21: note = Description of Artificial Sequence: Synthetic oligonucleotide
  source 1..21: mol_type = other DNA
gacaccagcaaagaaaccaga

SEQ ID NO: 18885 - DNA, 21 bp, synthetic construct
  misc_feature 1..21: note = Description of Artificial Sequence: Synthetic oligonucleotide
  source 1..21: mol_type = other DNA
gccgacggcgccggcagagcc

SEQ ID NO: 18886 - DNA, 21 bp, synthetic construct
  misc_feature 1..21: note = Description of Artificial Sequence: Synthetic oligonucleotide
  source 1..21: mol_type = other DNA
gacggcaacaacagccacaga

SEQ ID NO: 18887 - DNA, 21 bp, synthetic construct
  misc_feature 1..21: note = Description of Artificial Sequence: Synthetic oligonucleotide
  source 1..21: mol_type = other DNA
atggcgcagtctactaatacg

SEQ ID NO: 18888 - DNA, 21 bp, synthetic construct
  misc_feature 1..21: note = Description of Artificial Sequence: Synthetic oligonucleotide
  source 1..21: mol_type = other DNA
gattcgcaggcgtctccgcat

SEQ ID NO: 18889 - DNA, 21 bp, synthetic construct
  misc_feature 1..21: note = Description of Artificial Sequence: Synthetic oligonucleotide
  source 1..21: mol_type = other DNA
accggcggcagcaaaatcagc

SEQ ID NO: 18890 - DNA, 21 bp, synthetic construct
  misc_feature 1..21: note = Description of Artificial Sequence: Synthetic oligonucleotide
  source 1..21: mol_type = other DNA
aacggcctcgacaaaatcaga

SEQ ID NO: 18891 - DNA, 21 bp, synthetic construct
  misc_feature 1..21: note = Description of Artificial Sequence: Synthetic oligonucleotide
  source 1..21: mol_type = other DNA
agcgaaagcaccggcaccaga

SEQ ID NO: 18892 - DNA, 21 bp, synthetic construct
  misc_feature 1..21: note = Description of Artificial Sequence: Synthetic oligonucleotide
  source 1..21: mol_type = other DNA
agcaaaggcagccccagcagc

SEQ ID NO: 18893 - DNA, 21 bp, synthetic construct
  misc_feature 1..21: note = Description of Artificial Sequence: Synthetic oligonucleotide
  source 1..21: mol_type = other DNA
gggctttctggtgcttcgggg

SEQ ID NO: 18894 - DNA, 21 bp, synthetic construct
  misc_feature 1..21: note = Description of Artificial Sequence: Synthetic oligonucleotide
  source 1..21: mol_type = other DNA
agcatgggcaaagacagccac

SEQ ID NO: 18895 - DNA, 21 bp, synthetic construct
  misc_feature 1..21: note = Description of Artificial Sequence: Synthetic oligonucleotide
  source 1..21: mol_type = other DNA
cagggttctccttcggcgcat

SEQ ID NO: 18896 - DNA, 21 bp, synthetic construct
  misc_feature 1..21: note = Description of Artificial Sequence: Synthetic oligonucleotide
  source 1..21: mol_type = other DNA
tctccgagtaagtctgcggag

SEQ ID NO: 18897 - DNA, 21 bp, synthetic construct
  misc_feature 1..21: note = Description of Artificial Sequence: Synthetic oligonucleotide
  source 1..21: mol_type = other DNA
agtaagggtgatggtgcttcg

SEQ ID NO: 18898 - DNA, 21 bp, synthetic construct
  misc_feature 1..21: note = Description of Artificial Sequence: Synthetic oligonucleotide
  source 1..21: mol_type = other DNA
atggggaattcttcgcagggt

SEQ ID NO: 18899 - DNA, 21 bp, synthetic construct
  misc_feature 1..21: note = Description of Artificial Sequence: Synthetic oligonucleotide
  source 1..21: mol_type = other DNA
ggtgagagtaattcggctcat

SEQ ID NO: 18900 - DNA, 21 bp, synthetic construct
  misc_feature 1..21: note = Description of Artificial Sequence: Synthetic oligonucleotide
  source 1..21: mol_type = other DNA
gtcaccggcaccaccgtcggc

SEQ ID NO: 18901 - DNA, 21 bp, synthetic construct
  misc_feature 1..21: note = Description of Artificial Sequence: Synthetic oligonucleotide
  source 1..21: mol_type = other DNA
aagatgacggctagtcagggt

SEQ ID NO: 18902 - DNA, 21 bp, synthetic construct
  misc_feature 1..21: note = Description of Artificial Sequence: Synthetic oligonucleotide
  source 1..21: mol_type = other DNA
atgccgtctagtccggcgtct

SEQ ID NO: 18903 - DNA, 21 bp, synthetic construct
  misc_feature 1..21: note = Description of Artificial Sequence: Synthetic oligonucleotide
  source 1..21: mol_type = other DNA
gagacgagtgatcctcgtact

SEQ ID NO: 18904 - DNA, 21 bp, synthetic construct
  misc_feature 1..21: note = Description of Artificial Sequence: Synthetic oligonucleotide
  source 1..21: mol_type = other DNA
aacagcaccaacagcggcgcc

SEQ ID NO: 18905 - DNA, 21 bp, synthetic construct
  misc_feature 1..21: note = Description of Artificial Sequence: Synthetic oligonucleotide
  source 1..21: mol_type = other DNA
agccccaaaggcaacggcaac

SEQ ID NO: 18906 - DNA, 21 bp, synthetic construct
  misc_feature 1..21: note = Description of Artificial Sequence: Synthetic oligonucleotide
  source 1..21: mol_type = other DNA
agcggcgccagccccagcgcc

SEQ ID NO: 18907 - DNA, 21 bp, synthetic construct
  misc_feature 1..21: note = Description of Artificial Sequence: Synthetic oligonucleotide
  source 1..21: mol_type = other DNA
ggcaccgacaaaagcaaaccc

SEQ ID NO: 18908 - DNA, 21 bp, synthetic construct
  misc_feature 1..21: note = Description of Artificial Sequence: Synthetic oligonucleotide
  source 1..21: mol_type = other DNA
gttaatgggggtgctgctgcg

SEQ ID NO: 18909 - DNA, 21 bp, synthetic construct
  misc_feature 1..21: note = Description of Artificial Sequence: Synthetic oligonucleotide
  source 1..21: mol_type = other DNA
gccagagacgtcggcagcggc

SEQ ID NO: 18910 - DNA, 21 bp, synthetic construct
  misc_feature 1..21: note = Description of Artificial Sequence: Synthetic oligonucleotide
  source 1..21: mol_type = other DNA
cagatgggggcgacggggacg

SEQ ID NO: 18911 - DNA, 21 bp, synthetic construct
  misc_feature 1..21: note = Description of Artificial Sequence: Synthetic oligonucleotide
  source 1..21: mol_type = other DNA
gctggtcagggtaagactctt

SEQ ID NO: 18912 - DNA, 21 bp, synthetic construct
  misc_feature 1..21: note = Description of Artificial Sequence: Synthetic oligonucleotide
  source 1..21: mol_type = other DNA
acccccagcaacaccaccctc

SEQ ID NO: 18913 - DNA, 21 bp, synthetic construct
  misc_feature 1..21: note = Description of Artificial Sequence: Synthetic oligonucleotide
  source 1..21: mol_type = other DNA
ggcagcgaagcccccagcaga

SEQ ID NO: 18914 - DNA, 21 bp, synthetic construct
  misc_feature 1..21: note = Description of Artificial Sequence: Synthetic oligonucleotide
  source 1..21: mol_type = other DNA
agaagcggcgacagcatcagc

SEQ ID NO: 18915 - DNA, 21 bp, synthetic construct
  misc_feature 1..21: note = Description of Artificial Sequence: Synthetic oligonucleotide
  source 1..21: mol_type = other DNA
ctcggcaccaacagcagccac

SEQ ID NO: 18916 - DNA, 21 bp, synthetic construct
  misc_feature 1..21: note = Description of Artificial Sequence: Synthetic oligonucleotide
  source 1..21: mol_type = other DNA
gaaagcaaaaccggcagcggc

SEQ ID NO: 18917 - DNA, 21 bp, synthetic construct
  misc_feature 1..21: note = Description of Artificial Sequence: Synthetic oligonucleotide
  source 1..21: mol_type = other DNA
gaaagcgccaaacaaaacttc

SEQ ID NO: 18918 - DNA, 21 bp, synthetic construct
  misc_feature 1..21: note = Description of Artificial Sequence: Synthetic oligonucleotide
  source 1..21: mol_type = other DNA
ggccccgaaagccccagaagc

SEQ ID NO: 18919 - DNA, 21 bp, synthetic construct
  misc_feature 1..21: note = Description of Artificial Sequence: Synthetic oligonucleotide
  source 1..21: mol_type = other DNA
gttaatggtcagtctactgcg

SEQ ID NO: 18920 - DNA, 21 bp, synthetic construct
  misc_feature 1..21: note = Description of Artificial Sequence: Synthetic oligonucleotide
  source 1..21: mol_type = other DNA
ctccccagcagcgaccaaaga

SEQ ID NO: 18921 - DNA, 21 bp, synthetic construct
  misc_feature 1..21: note = Description of Artificial Sequence: Synthetic oligonucleotide
  source 1..21: mol_type = other DNA
agcaccggcagcgccaccagc

SEQ ID NO: 18922 - DNA, 21 bp, synthetic construct
  misc_feature 1..21: note = Description of Artificial Sequence: Synthetic oligonucleotide
  source 1..21: mol_type = other DNA
aatcgtaatactacggcgagt

SEQ ID NO: 18923 - DNA, 21 bp, synthetic construct
  misc_feature 1..21: note = Description of Artificial Sequence: Synthetic oligonucleotide
  source 1..21: mol_type = other DNA
gggtcgtcgagtgatcatcgg

SEQ ID NO: 18924 - DNA, 21 bp, synthetic construct
  misc_feature 1..21: note = Description of Artificial Sequence: Synthetic oligonucleotide
  source 1..21: mol_type = other DNA
gagcagggggcgagttcgcgg

SEQ ID NO: 18925 - DNA, 21 bp, synthetic construct
  misc_feature 1..21: note = Description of Artificial Sequence: Synthetic oligonucleotide
  source 1..21: mol_type = other DNA
aaaagcaccggcagccaaggc

SEQ ID NO: 18926 - DNA, 21 bp, synthetic construct
  misc_feature 1..21: note = Description of Artificial Sequence: Synthetic oligonucleotide
  source 1..21: mol_type = other DNA
tcgggttcggagcggtcactt

SEQ ID NO: 18927 - DNA, 21 bp, synthetic construct
  misc_feature 1..21: note = Description of Artificial Sequence: Synthetic oligonucleotide
  source 1..21: mol_type = other DNA
ggtggtgcttctacgacgcat

SEQ ID NO: 18928 - DNA, 21 bp, synthetic construct
  misc_feature 1..21: note = Description of Artificial Sequence: Synthetic oligonucleotide
  source 1..21: mol_type = other DNA
aaggggagtcctgcgtcgagt

SEQ ID NO: 18929 - DNA, 21 bp, synthetic construct
  misc_feature 1..21: note = Description of Artificial Sequence: Synthetic oligonucleotide
  source 1..21: mol_type = other DNA
gaggttagtgggcagcgtcag

SEQ ID NO: 18930 - DNA, 21 bp, synthetic construct
  misc_feature 1..21: note = Description of Artificial Sequence: Synthetic oligonucleotide
  source 1..21: mol_type = other DNA
gcccacgtcggcgacaaaagc

SEQ ID NO: 18931 - DNA, 21 bp, synthetic construct
  misc_feature 1..21: note = Description of Artificial Sequence: Synthetic oligonucleotide
  source 1..21: mol_type = other DNA
acccccagcgacaaaggcgcc

SEQ ID NO: 18932 - DNA, 21 bp, synthetic construct
  misc_feature 1..21: note = Description of Artificial Sequence: Synthetic oligonucleotide
  source 1..21: mol_type = other DNA
actcagagtagtaatccttct

SEQ ID NO: 18933 - DNA, 21 bp, synthetic construct
  misc_feature 1..21: note = Description of Artificial Sequence: Synthetic oligonucleotide
  source 1..21: mol_type = other DNA
gggtctacggagcggcattct

SEQ ID NO: 18934 - DNA, 21 bp, synthetic construct
  misc_feature 1..21: note = Description of Artificial Sequence: Synthetic oligonucleotide
  source 1..21: mol_type = other DNA
ggcaccgccgcccccgcccac

SEQ ID NO: 18935 - DNA, 21 bp, synthetic construct
  misc_feature 1..21: note = Description of Artificial Sequence: Synthetic oligonucleotide
  source 1..21: mol_type = other DNA
accatggccggcaccaaccaa

SEQ ID NO: 18936 - DNA, 21 bp, synthetic construct
  misc_feature 1..21: note = Description of Artificial Sequence: Synthetic oligonucleotide
  source 1..21: mol_type = other DNA
agcacccaaaaccccaaagac

SEQ ID NO: 18937 - DNA, 21 bp, synthetic construct
  misc_feature 1..21: note = Description of Artificial Sequence: Synthetic oligonucleotide
  source 1..21: mol_type = other DNA
gagggtcagacgactagtttg

SEQ ID NO: 18938 - DNA, 21 bp, synthetic construct
  misc_feature 1..21: note = Description of Artificial Sequence: Synthetic oligonucleotide
  source 1..21: mol_type = other DNA
gatcgtgcgaaggagtcttcg

SEQ ID NO: 18939 - DNA, 21 bp, synthetic construct
  misc_feature 1..21: note = Description of Artificial Sequence: Synthetic oligonucleotide
  source 1..21: mol_type = other DNA
gtcaccaccaccaacagcaaa

SEQ ID NO: 18940 - DNA, 21 bp, synthetic construct
  misc_feature 1..21: note = Description of Artificial Sequence: Synthetic oligonucleotide
  source 1..21: mol_type = other DNA
tcgagtcagacgaataatgtt

SEQ ID NO: 18941 - DNA, 21 bp, synthetic construct
  misc_feature 1..21: note = Description of Artificial Sequence: Synthetic oligonucleotide
  source 1..21: mol_type = other DNA
tcgtcgactaagagttctcct

SEQ ID NO: 18942 - DNA, 21 bp, synthetic construct
  misc_feature 1..21: note = Description of Artificial Sequence: Synthetic oligonucleotide
  source 1..21: mol_type = other DNA
agcagcggcccccaacccagc

SEQ ID NO: 18943 - DNA, 21 bp, synthetic construct
  misc_feature 1..21: note = Description of Artificial Sequence: Synthetic oligonucleotide
  source 1..21: mol_type = other DNA
caaaccgacgccaaaagcctc

SEQ ID NO: 18944 - DNA, 21 bp, synthetic construct
  misc_feature 1..21: note = Description of Artificial Sequence: Synthetic oligonucleotide
  source 1..21: mol_type = other DNA
gtccccgccggcagcggcggc

SEQ ID NO: 18945 - DNA, 21 bp, synthetic construct
  misc_feature 1..21: note = Description of Artificial Sequence: Synthetic oligonucleotide
  source 1..21: mol_type = other DNA
atgcaagcccaaaaagaaagc

SEQ ID NO: 18946 - DNA, 21 bp, synthetic construct
  misc_feature 1..21: note = Description of Artificial Sequence: Synthetic oligonucleotide
  source 1..21: mol_type = other DNA
cacgtcaacatgaaagaaggc

SEQ ID NO: 18947 - DNA, 21 bp, synthetic construct
  misc_feature 1..21: note = Description of Artificial Sequence: Synthetic oligonucleotide
  source 1..21: mol_type = other DNA
gacaccgtcagcaaaagcaac

SEQ ID NO: 18948 - DNA, 21 bp, synthetic construct
  misc_feature 1..21: note = Description of Artificial Sequence: Synthetic oligonucleotide
  source 1..21: mol_type = other DNA
gacagcaacaaaagcccccac

SEQ ID NO: 18949 - DNA, 21 bp, synthetic construct
  misc_feature 1..21: note = Description of Artificial Sequence: Synthetic oligonucleotide
  source 1..21: mol_type = other DNA
aacggcgtcccccaacccaaa

SEQ ID NO: 18950 - DNA, 21 bp, synthetic construct
  misc_feature 1..21: note = Description of Artificial Sequence: Synthetic oligonucleotide
  source 1..21: mol_type = other DNA
aatagttctgggtctggtggt

SEQ ID NO: 18951 - DNA, 21 bp, synthetic construct
  misc_feature 1..21: note = Description of Artificial Sequence: Synthetic oligonucleotide
  source 1..21: mol_type = other DNA
acttcggctcagactcctcat

SEQ ID NO: 18952 - DNA, 21 bp, synthetic construct
  misc_feature 1..21: note = Description of Artificial Sequence: Synthetic oligonucleotide
  source 1..21: mol_type = other DNA
agcagcggcgacggctaccaa

SEQ ID NO: 18953 - DNA, 21 bp, synthetic construct
  misc_feature 1..21: note = Description of Artificial Sequence: Synthetic oligonucleotide
  source 1..21: mol_type = other DNA
gacgccagaggcagcgtcagc

SEQ ID NO: 18954 - DNA, 21 bp, synthetic construct
  misc_feature 1..21: note = Description of Artificial Sequence: Synthetic oligonucleotide
  source 1..21: mol_type = other DNA
tcggctggggatcggaatctt

SEQ ID NO: 18955 - DNA, 21 bp, synthetic construct
  misc_feature 1..21: note = Description of Artificial Sequence: Synthetic oligonucleotide
  source 1..21: mol_type = other DNA
accgacgccagccaaagaagc

SEQ ID NO: 18956 - DNA, 21 bp, synthetic construct
  misc_feature 1..21: note = Description of Artificial Sequence: Synthetic oligonucleotide
  source 1..21: mol_type = other DNA
agtagtggtgataagagtttg

SEQ ID NO: 18957 - DNA, 21 bp, synthetic construct
  misc_feature 1..21: note = Description of Artificial Sequence: Synthetic oligonucleotide
  source 1..21: mol_type = other DNA
tctcatgctaagtcttctgag

SEQ ID NO: 18958 - DNA, 21 bp, synthetic construct
  misc_feature 1..21: note = Description of Artificial Sequence: Synthetic oligonucleotide
  source 1..21: mol_type = other DNA
gtcagaagcgaaagcaccgcc

SEQ ID NO: 18959 - DNA, 21 bp, synthetic construct
  misc_feature 1..21: note = Description of Artificial Sequence: Synthetic oligonucleotide
  source 1..21: mol_type = other DNA
tctgcgggtagtactccgact

SEQ ID NO: 18960 - DNA, 21 bp, synthetic construct
  misc_feature 1..21: note = Description of Artificial Sequence: Synthetic oligonucleotide
  source 1..21: mol_type = other DNA
agcaaaagcaccacccccagc

SEQ ID NO: 18961 - DNA, 21 bp, synthetic construct
  misc_feature 1..21: note = Description of Artificial Sequence: Synthetic oligonucleotide
  source 1..21: mol_type = other DNA
agcagcgccggcgtcggcgcc

SEQ ID NO: 18962 - DNA, 21 bp, synthetic construct
  misc_feature 1..21: note = Description of Artificial Sequence: Synthetic oligonucleotide
  source 1..21: mol_type = other DNA
caccccctcaaagacggcggc

SEQ ID NO: 18963 - DNA, 21 bp, synthetic construct
  misc_feature 1..21: note = Description of Artificial Sequence: Synthetic oligonucleotide
  source 1..21: mol_type = other DNA
accgacagcagccccagcaaa

SEQ ID NO: 18964 - DNA, 21 bp, synthetic construct
  misc_feature 1..21: note = Description of Artificial Sequence: Synthetic oligonucleotide
  source 1..21: mol_type = other DNA
aatggggatgttggtaggggg

SEQ ID NO: 18965 - DNA, 21 bp, synthetic construct
  misc_feature 1..21: note = Description of Artificial Sequence: Synthetic oligonucleotide
  source 1..21: mol_type = other DNA
aacggttctggacagaaggaa

SEQ ID NO: 18966 - DNA, 21 bp, synthetic construct
  misc_feature 1..21: note = Description of Artificial Sequence: Synthetic oligonucleotide
  source 1..21: mol_type = other DNA
ggcgaacccagcgtcaacaaa

SEQ ID NO: 18967 - DNA, 21 bp, synthetic construct
  misc_feature 1..21: note = Description of Artificial Sequence: Synthetic oligonucleotide
  source 1..21: mol_type = other DNA
aacaccaaagaaggcagcggc

SEQ ID NO: 18968 - DNA, 21 bp, synthetic construct
  misc_feature 1..21: note = Description of Artificial Sequence: Synthetic oligonucleotide
  source 1..21: mol_type = other DNA
aaccccgacgccagcggcaaa

SEQ ID NO: 18969 - DNA, 21 bp, synthetic construct
  misc_feature 1..21: note = Description of Artificial Sequence: Synthetic oligonucleotide
  source 1..21: mol_type = other DNA
agcagcatggccaaaacccaa

SEQ ID NO: 18970 - DNA, 21 bp, synthetic construct
  misc_feature 1..21: note = Description of Artificial Sequence: Synthetic oligonucleotide
  source 1..21: mol_type = other DNA
atgcctggtacgaaggttatt

SEQ ID NO: 18971 - DNA, 21 bp, synthetic construct
  misc_feature 1..21: note = Description of Artificial Sequence: Synthetic oligonucleotide
  source 1..21: mol_type = other DNA
caggctagttcttcgtcggtt

SEQ ID NO: 18972 - DNA, 21 bp, synthetic construct
  misc_feature 1..21: note = Description of Artificial Sequence: Synthetic oligonucleotide
  source 1..21: mol_type = other DNA
gaaggcagacaaggcggcagc

SEQ ID NO: 18973 - DNA, 21 bp, synthetic construct
  misc_feature 1..21: note = Description of Artificial Sequence: Synthetic oligonucleotide
  source 1..21: mol_type = other DNA
tctactgcgggggcgaatgcg

SEQ ID NO: 18974 - DNA, 21 bp, synthetic construct
  misc_feature 1..21: note = Description of Artificial Sequence: Synthetic oligonucleotide
  source 1..21: mol_type = other DNA
tctggtaatcctggtggggct

SEQ ID NO: 18975 - DNA, 21 bp, synthetic construct
  misc_feature 1..21: note = Description of Artificial Sequence: Synthetic oligonucleotide
  source 1..21: mol_type = other DNA
accatcgaaaccggcaaaggc

SEQ ID NO: 18976 - DNA, 21 bp, synthetic construct
  misc_feature 1..21: note = Description of Artificial Sequence: Synthetic oligonucleotide
  source 1..21: mol_type = other DNA
agccaaggcgacgccagcaga

SEQ ID NO: 18977 - DNA, 21 bp, synthetic construct
  misc_feature 1..21: note = Description of Artificial Sequence: Synthetic oligonucleotide
  source 1..21: mol_type = other DNA
ggcgaaagaggcgaaaaaagc

SEQ ID NO: 18978 - DNA, 21 bp, synthetic construct
  misc_feature 1..21: note = Description of Artificial Sequence: Synthetic oligonucleotide
  source 1..21: mol_type = other DNA
aacggcagcagcaccgccagc

SEQ ID NO: 18979 - DNA, 21 bp, synthetic construct
  misc_feature 1..21: note = Description of Artificial Sequence: Synthetic oligonucleotide
  source 1..21: mol_type = other DNA
accggcaacagcggcagcacc

SEQ ID NO: 18980 - DNA, 21 bp, synthetic construct
  misc_feature 1..21: note = Description of Artificial Sequence: Synthetic oligonucleotide
  source 1..21: mol_type = other DNA
agtcgggggtcggatgctagt

SEQ ID NO: 18981 - DNA, 21 bp, synthetic construct
  misc_feature 1..21: note = Description of Artificial Sequence: Synthetic oligonucleotide
  source 1..21: mol_type = other DNA
cataattcttcggggattcat

SEQ ID NO: 18982 - DNA, 21 bp, synthetic construct
  misc_feature 1..21: note = Description of Artificial Sequence: Synthetic oligonucleotide
  source 1..21: mol_type = other DNA
actcctgatgcgaatcggcgt

SEQ ID NO: 18983 - DNA, 21 bp, synthetic construct
  misc_feature 1..21: note = Description of Artificial Sequence: Synthetic oligonucleotide
  source 1..21: mol_type = other DNA
gtcaacggcgccagcgtcagc

SEQ ID NO: 18984 - DNA, 21 bp, synthetic construct
  misc_feature 1..21: note = Description of Artificial Sequence: Synthetic oligonucleotide
  source 1..21: mol_type = other DNA
ctcaacagcagcaaaagcggc

SEQ ID NO: 18985 - DNA, 21 bp, synthetic construct
  misc_feature 1..21: note = Description of Artificial Sequence: Synthetic oligonucleotide
  source 1..21: mol_type = other DNA
ctggctagtggtaatgggcag

SEQ ID NO: 18986 - DNA, 21 bp, synthetic construct
  misc_feature 1..21: note = Description of Artificial Sequence: Synthetic oligonucleotide
  source 1..21: mol_type = other DNA
gccaccagcgacaaaaacccc

SEQ ID NO: 18987 - DNA, 21 bp, synthetic construct
  misc_feature 1..21: note = Description of Artificial Sequence: Synthetic oligonucleotide
  source 1..21: mol_type = other DNA
gaggcgagtcgttcgtcgtct

SEQ ID NO: 18988 - DNA, 21 bp, synthetic construct
  misc_feature 1..21: note = Description of Artificial Sequence: Synthetic oligonucleotide
  source 1..21: mol_type = other DNA
gttgggtctggtagtcctagg

SEQ ID NO: 18989 - DNA, 21 bp, synthetic construct
  misc_feature 1..21: note = Description of Artificial Sequence: Synthetic oligonucleotide
  source 1..21: mol_type = other DNA
caaggccaaggcaccgccacc

SEQ ID NO: 18990 - DNA, 21 bp, synthetic construct
  misc_feature 1..21: note = Description of Artificial Sequence: Synthetic oligonucleotide
  source 1..21: mol_type = other DNA
aaagccaacgaccccaaagcc

SEQ ID NO: 18991 - DNA, 21 bp, synthetic construct
  misc_feature 1..21: note = Description of Artificial Sequence: Synthetic oligonucleotide
  source 1..21: mol_type = other DNA
gacaccagcagaaaaagcgaa

SEQ ID NO: 18992 - DNA, 21 bp, synthetic construct
  misc_feature 1..21: note = Description of Artificial Sequence: Synthetic oligonucleotide
  source 1..21: mol_type = other DNA
ggtaaggtttcttcggagaag

SEQ ID NO: 18993 - DNA, 21 bp, synthetic construct
  misc_feature 1..21: note = Description of Artificial Sequence: Synthetic oligonucleotide
  source 1..21: mol_type = other DNA
actcgggagagggagactgtt

SEQ ID NO: 18994 - DNA, 21 bp, synthetic construct
  misc_feature 1..21: note = Description of Artificial Sequence: Synthetic oligonucleotide
  source 1..21: mol_type = other DNA
agttcttctgttcctaaggtg

SEQ ID NO: 18995 - DNA, 21 bp, synthetic construct
  misc_feature 1..21: note = Description of Artificial Sequence: Synthetic oligonucleotide
  source 1..21: mol_type = other DNA
caagccaccggcaaactccaa

SEQ ID NO: 18996 - DNA, 21 bp, synthetic construct
  misc_feature 1..21: note = Description of Artificial Sequence: Synthetic oligonucleotide
  source 1..21: mol_type = other DNA
gaaaacaccggcagcaacagc

SEQ ID NO: 18997 - DNA, 21 bp, synthetic construct
  misc_feature 1..21: note = Description of Artificial Sequence: Synthetic oligonucleotide
  source 1..21: mol_type = other DNA
gcgagttctcctgcggtggct

SEQ ID NO: 18998 - DNA, 21 bp, synthetic construct
  misc_feature 1..21: note = Description of Artificial Sequence: Synthetic oligonucleotide
  source 1..21: mol_type = other DNA
gcgcggcaggaggctactcat

SEQ ID NO: 18999 - DNA, 21 bp, synthetic construct
  misc_feature 1..21: note = Description of Artificial Sequence: Synthetic oligonucleotide
  source 1..21: mol_type = other DNA
agcggcaccgtcagcaaaccc

SEQ ID NO: 19000 - DNA, 21 bp, synthetic construct
  misc_feature 1..21: note = Description of Artificial Sequence: Synthetic oligonucleotide
  source 1..21: mol_type = other DNA
cagattagtaatccggcgcat

SEQ ID NO: 19001 - DNA, 21 bp, synthetic construct
  misc_feature 1..21: note = Description of Artificial Sequence: Synthetic oligonucleotide
  source 1..21: mol_type = other DNA
gatactgctgctgttaagtct

SEQ ID NO: 19002 - DNA, 21 bp, synthetic construct
  misc_feature 1..21: note = Description of Artificial Sequence: Synthetic oligonucleotide
  source 1..21: mol_type = other DNA
gatgggagtaattcgcctaat

SEQ ID NO: 19003 - DNA, 21 bp, synthetic construct
  misc_feature 1..21: note = Description of Artificial Sequence: Synthetic oligonucleotide
  source 1..21: mol_type = other DNA
ggtactgggcataatagtacg

SEQ ID NO: 19004 - DNA, 21 bp, synthetic construct
  misc_feature 1..21: note = Description of Artificial Sequence: Synthetic oligonucleotide
  source 1..21: mol_type = other DNA
tcggcgggtaatcaggggtct

SEQ ID NO: 19005 - DNA, 21 bp, synthetic construct
  misc_feature 1..21: note = Description of Artificial Sequence: Synthetic oligonucleotide
  source 1..21: mol_type = other DNA
actaaggatggtaggaatact

SEQ ID NO: 19006 - DNA, 21 bp, synthetic construct
  misc_feature 1..21: note = Description of Artificial Sequence: Synthetic oligonucleotide
  source 1..21: mol_type = other DNA
agcggccccaccaaacccgtc

SEQ ID NO: 19007 - DNA, 21 bp, synthetic construct
  misc_feature 1..21: note = Description of Artificial Sequence: Synthetic oligonucleotide
  source 1..21: mol_type = other DNA
gacaaaagcggcagcatcgcc

SEQ ID NO: 19008 - DNA, 21 bp, synthetic construct
  misc_feature 1..21: note = Description of Artificial Sequence: Synthetic oligonucleotide
  source 1..21: mol_type = other DNA
gcccaaggccaaaacaacctc

SEQ ID NO: 19009 - DNA, 21 bp, synthetic construct
  misc_feature 1..21: note = Description of Artificial Sequence: Synthetic oligonucleotide
  source 1..21: mol_type = other DNA
gacagcgcccccagcctcaaa

SEQ ID NO: 19010 - DNA, 21 bp, synthetic construct
  misc_feature 1..21: note = Description of Artificial Sequence: Synthetic oligonucleotide
  source 1..21: mol_type = other DNA
atggctggtgctgcttctact

SEQ ID NO: 19011 - DNA, 21 bp, synthetic construct
  misc_feature 1..21: note = Description of Artificial Sequence: Synthetic oligonucleotide
  source 1..21: mol_type = other DNA
gacagcagcaaaaccagcgcc

SEQ ID NO: 19012 - DNA, 21 bp, synthetic construct
  misc_feature 1..21: note = Description of Artificial Sequence: Synthetic oligonucleotide
  source 1..21: mol_type = other DNA
actgcgcagggtagtcatagt

SEQ ID NO: 19013 - DNA, 21 bp, synthetic construct
  misc_feature 1..21: note = Description of Artificial Sequence: Synthetic oligonucleotide
  source 1..21: mol_type = other DNA
agcggcgtcaccagcggcggc

SEQ ID NO: 19014 - DNA, 21 bp, synthetic construct
  misc_feature 1..21: note = Description of Artificial Sequence: Synthetic oligonucleotide
  source 1..21: mol_type = other DNA
acggcttctccgactccgttg

SEQ ID NO: 19015 - DNA, 21 bp, synthetic construct
  misc_feature 1..21: note = Description of Artificial Sequence: Synthetic oligonucleotide
  source 1..21: mol_type = other DNA
cttactgggaaggctcctgct

SEQ ID NO: 19016 - DNA, 21 bp, synthetic construct
  misc_feature 1..21: note = Description of Artificial Sequence: Synthetic oligonucleotide
  source 1..21: mol_type = other DNA
agcgacagccacagcgccaaa

SEQ ID NO: 19017 - DNA, 21 bp, synthetic construct
  misc_feature 1..21: note = Description of Artificial Sequence: Synthetic oligonucleotide
  source 1..21: mol_type = other DNA
agcaccggcagcaaccccgcc

SEQ ID NO: 19018 - DNA, 21 bp, synthetic construct
  misc_feature 1..21: note = Description of Artificial Sequence: Synthetic oligonucleotide
  source 1..21: mol_type = other DNA
gccacccacggcgccagcacc

SEQ ID NO: 19019 - DNA, 21 bp, synthetic construct
  misc_feature 1..21: note = Description of Artificial Sequence: Synthetic oligonucleotide
  source 1..21: mol_type = other DNA
gggtctgatactaagcctctt

SEQ ID NO: 19020 - DNA, 21 bp, synthetic construct
  misc_feature 1..21: note = Description of Artificial Sequence: Synthetic oligonucleotide
  source 1..21: mol_type = other DNA
gccaacaacaaaggcaacgtc

SEQ ID NO: 19021 - DNA, 21 bp, synthetic construct
  misc_feature 1..21: note = Description of Artificial Sequence: Synthetic oligonucleotide
  source 1..21: mol_type = other DNA
actggtgcttcggctaagacg

SEQ ID NO: 19022 - DNA, 21 bp, synthetic construct
  misc_feature 1..21: note = Description of Artificial Sequence: Synthetic oligonucleotide
  source 1..21: mol_type = other DNA
ctcagcaacagcaaaagcctc

SEQ ID NO: 19023 - DNA, 21 bp, synthetic construct
  misc_feature 1..21: note = Description of Artificial Sequence: Synthetic oligonucleotide
  source 1..21: mol_type = other DNA
cttcaggcgtcggggtcgctg

SEQ ID NO: 19024 - DNA, 21 bp, synthetic construct
  misc_feature 1..21: note = Description of Artificial Sequence: Synthetic oligonucleotide
  source 1..21: mol_type = other DNA
tcgtcttcgagtgataagagt

SEQ ID NO: 19025 - DNA, 21 bp, synthetic construct
  misc_feature 1..21: note = Description of Artificial Sequence: Synthetic oligonucleotide
  source 1..21: mol_type = other DNA
ggtggtggggatgctcgttcg

SEQ ID NO: 19026 - DNA, 21 bp, synthetic construct
  misc_feature 1..21: note = Description of Artificial Sequence: Synthetic oligonucleotide
  source 1..21: mol_type = other DNA
gtccccagcagcaccgccaaa

SEQ ID NO: 19027 - DNA, 21 bp, synthetic construct
  misc_feature 1..21: note = Description of Artificial Sequence: Synthetic oligonucleotide
  source 1..21: mol_type = other DNA
accaccagcaccggcagcgcc

SEQ ID NO: 19028 - DNA, 21 bp, synthetic construct
  misc_feature 1..21: note = Description of Artificial Sequence: Synthetic oligonucleotide
  source 1..21: mol_type = other DNA
caaagcagcggcaacagcgtc

SEQ ID NO: 19029 - DNA, 21 bp, synthetic construct
  misc_feature 1..21: note = Description of Artificial Sequence: Synthetic oligonucleotide
  source 1..21: mol_type = other DNA
gatactacgcctaagcctggt

SEQ ID NO: 19030 - DNA, 21 bp, synthetic construct
  misc_feature 1..21: note = Description of Artificial Sequence: Synthetic oligonucleotide
  source 1..21: mol_type = other DNA
acgggtgagagttcgaagtct

SEQ ID NO: 19031 - DNA, 21 bp, synthetic construct
  misc_feature 1..21: note = Description of Artificial Sequence: Synthetic oligonucleotide
  source 1..21: mol_type = other DNA
gggtctgatcagcctgttcgt

SEQ ID NO: 19032 - DNA, 21 bp, synthetic construct
  misc_feature 1..21: note = Description of Artificial Sequence: Synthetic oligonucleotide
  source 1..21: mol_type = other DNA
gatggggttaagcagacgcct

SEQ ID NO: 19033 - DNA, 21 bp, synthetic construct
  misc_feature 1..21: note = Description of Artificial Sequence: Synthetic oligonucleotide
  source 1..21: mol_type = other DNA
ggcagcgacaaactcaaactc

SEQ ID NO: 19034 - DNA, 21 bp, synthetic construct
  misc_feature 1..21: note = Description of Artificial Sequence: Synthetic oligonucleotide
  source 1..21: mol_type = other DNA
gattcggtgagtagtattaag

SEQ ID NO: 19035 - DNA, 21 bp, synthetic construct
  misc_feature 1..21: note = Description of Artificial Sequence: Synthetic oligonucleotide
  source 1..21: mol_type = other DNA
cagacggggccgagtccgact

SEQ ID NO: 19036 - DNA, 21 bp, synthetic construct
  misc_feature 1..21: note = Description of Artificial Sequence: Synthetic oligonucleotide
  source 1..21: mol_type = other DNA
caaggcagagacgcccaaccc

SEQ ID NO: 19037 - DNA, 21 bp, synthetic construct
  misc_feature 1..21: note = Description of Artificial Sequence: Synthetic oligonucleotide
  source 1..21: mol_type = other DNA
aacagcagcaccaccagcaga

SEQ ID NO: 19038 - DNA, 21 bp, synthetic construct
  misc_feature 1..21: note = Description of Artificial Sequence: Synthetic oligonucleotide
  source 1..21: mol_type = other DNA
aaccaactcgtcggcgccggc

SEQ ID NO: 19039 - DNA, 21 bp, synthetic construct
  misc_feature 1..21: note = Description of Artificial Sequence: Synthetic oligonucleotide
  source 1..21: mol_type = other DNA
aacgaaaaaaccagcagcagc

SEQ ID NO: 19040 - DNA, 21 bp, synthetic construct
  misc_feature 1..21: note = Description of Artificial Sequence: Synthetic oligonucleotide
  source 1..21: mol_type = other DNA
aatccggattcgcaggctagg

SEQ ID NO: 19041 - DNA, 21 bp, synthetic construct
  misc_feature 1..21: note = Description of Artificial Sequence: Synthetic oligonucleotide
  source 1..21: mol_type = other DNA
accaccaacagccccaacaaa

SEQ ID NO: 19042 - DNA, 21 bp, synthetic construct
  misc_feature 1..21: note = Description of Artificial Sequence: Synthetic oligonucleotide
  source 1..21: mol_type = other DNA
accagcagccaaggccccggc

SEQ ID NO: 19043 - DNA, 21 bp, synthetic construct
  misc_feature 1..21: note = Description of Artificial Sequence: Synthetic oligonucleotide
  source 1..21: mol_type = other DNA
accgccgacaacaaagtcaga

SEQ ID NO: 19044 - DNA, 21 bp, synthetic construct
  misc_feature 1..21: note = Description of Artificial Sequence: Synthetic oligonucleotide
  source 1..21: mol_type = other DNA
acgaatagtcaggggtcttct

SEQ ID NO: 19045 - DNA, 21 bp, synthetic construct
  misc_feature 1..21: note = Description of Artificial Sequence: Synthetic oligonucleotide
  source 1..21: mol_type = other DNA
acgactgataataatcggatt

SEQ ID NO: 19046 - DNA, 21 bp, synthetic construct
  misc_feature 1..21: note = Description of Artificial Sequence: Synthetic oligonucleotide
  source 1..21: mol_type = other DNA
acgagtggtccttcttcgggg

SEQ ID NO: 19047 - DNA, 21 bp, synthetic construct
  misc_feature 1..21: note = Description of Artificial Sequence: Synthetic oligonucleotide
  source 1..21: mol_type = other DNA
agaggcggcggcagcgccgcc

SEQ ID NO: 19048 - DNA, 21 bp, synthetic construct
  misc_feature 1..21: note = Description of Artificial Sequence: Synthetic oligonucleotide
  source 1..21: mol_type = other DNA
agcagcaaccccagcctcggc

SEQ ID NO: 19049 - DNA, 21 bp, synthetic construct
  misc_feature 1..21: note = Description of Artificial Sequence: Synthetic oligonucleotide
  source 1..21: mol_type = other DNA
agcgtcggcagcgacagaatc

SEQ ID NO: 19050 - DNA, 21 bp, synthetic construct
  misc_feature 1..21: note = Description of Artificial Sequence: Synthetic oligonucleotide
  source 1..21: mol_type = other DNA
atgggtagtaagaaggatagt

SEQ ID NO: 19051 - DNA, 21 bp, synthetic construct
  misc_feature 1..21: note = Description of Artificial Sequence: Synthetic oligonucleotide
  source 1..21: mol_type = other DNA
atgggtggtacgggttcgtct

SEQ ID NO: 19052 - DNA, 21 bp, synthetic construct
  misc_feature 1..21: note = Description of Artificial Sequence: Synthetic oligonucleotide
  source 1..21: mol_type = other DNA
caaaacaacaccggccacaac

SEQ ID NO: 19053 - DNA, 21 bp, synthetic construct
  misc_feature 1..21: note = Description of Artificial Sequence: Synthetic oligonucleotide
  source 1..21: mol_type = other DNA
caggttgcttcgagtaataat

SEQ ID NO: 19054 - DNA, 21 bp, synthetic construct
  misc_feature 1..21: note = Description of Artificial Sequence: Synthetic oligonucleotide
  source 1..21: mol_type = other DNA
catggtcagtctgcgtcttct

SEQ ID NO: 19055 - DNA, 21 bp, synthetic construct
  misc_feature 1..21: note = Description of Artificial Sequence: Synthetic oligonucleotide
  source 1..21: mol_type = other DNA
catggttcgtctaaggcgggg

SEQ ID NO: 19056 - DNA, 21 bp, synthetic construct
  misc_feature 1..21: note = Description of Artificial Sequence: Synthetic oligonucleotide
  source 1..21: mol_type = other DNA
ctcagcgcccccaccagcgcc

SEQ ID NO: 19057 - DNA, 21 bp, synthetic construct
  misc_feature 1..21: note = Description of Artificial Sequence: Synthetic oligonucleotide
  source 1..21: mol_type = other DNA
ctcggcgccaacgccgccggc

SEQ ID NO: 19058 - DNA, 21 bp, synthetic construct
  misc_feature 1..21: note = Description of Artificial Sequence: Synthetic oligonucleotide
  source 1..21: mol_type = other DNA
gaacaaagaagcaccaccggc

SEQ ID NO: 19059 - DNA, 21 bp, synthetic construct
  misc_feature 1..21: note = Description of Artificial Sequence: Synthetic oligonucleotide
  source 1..21: mol_type = other DNA
gataataggactgttaataag

SEQ ID NO: 19060 - DNA, 21 bp, synthetic construct
  misc_feature 1..21: note = Description of Artificial Sequence: Synthetic oligonucleotide
  source 1..21: mol_type = other DNA
gatcagaatattaagccgaat

SEQ ID NO: 19061 - DNA, 21 bp, synthetic construct
  misc_feature 1..21: note = Description of Artificial Sequence: Synthetic oligonucleotide
  source 1..21: mol_type = other DNA
gattcggcttcgaagctgagt

SEQ ID NO: 19062 - DNA, 21 bp, synthetic construct
  misc_feature 1..21: note = Description of Artificial Sequence: Synthetic oligonucleotide
  source 1..21: mol_type = other DNA
gccagcgacagcaaaaacgtc

SEQ ID NO: 19063 - DNA, 21 bp, synthetic construct
  misc_feature 1..21: note = Description of Artificial Sequence: Synthetic oligonucleotide
  source 1..21: mol_type = other DNA
gccatgaacgacagcaaactc

SEQ ID NO: 19064 - DNA, 21 bp, synthetic construct
  misc_feature 1..21: note = Description of Artificial Sequence: Synthetic oligonucleotide
  source 1..21: mol_type = other DNA
gccctcaccgaccaaagaggc

SEQ ID NO: 19065 - DNA, 21 bp, synthetic construct
  misc_feature 1..21: note = Description of Artificial Sequence: Synthetic oligonucleotide
  source 1..21: mol_type = other DNA
gccgccaccctccccgccggc

SEQ ID NO: 19066 - DNA, 21 bp, synthetic construct
  misc_feature 1..21: note = Description of Artificial Sequence: Synthetic oligonucleotide
  source 1..21: mol_type = other DNA
gccgccagcagcaacaacaaa

SEQ ID NO: 19067 - DNA, 21 bp, synthetic construct
  misc_feature 1..21: note = Description of Artificial Sequence: Synthetic oligonucleotide
  source 1..21: mol_type = other DNA
gctgaatcgagggagaagggg

SEQ ID NO: 19068 - DNA, 21 bp, synthetic construct
  misc_feature 1..21: note = Description of Artificial Sequence: Synthetic oligonucleotide
  source 1..21: mol_type = other DNA
ggcatcgccgaaaaccacaaa

SEQ ID NO: 19069 - DNA, 21 bp, synthetic construct
  misc_feature 1..21: note = Description of Artificial Sequence: Synthetic oligonucleotide
  source 1..21: mol_type = other DNA
ggcggcaaaagcagcgtcagc

SEQ ID NO: 19070 - DNA, 21 bp, synthetic construct
  misc_feature 1..21: note = Description of Artificial Sequence: Synthetic oligonucleotide
  source 1..21: mol_type = other DNA
ggcgtcaacggcgtcagcaac

SEQ ID NO: 19071 - DNA, 21 bp, synthetic construct
  misc_feature 1..21: note = Description of Artificial Sequence: Synthetic oligonucleotide
  source 1..21: mol_type = other DNA
gggaatagtacgtctaatggg

SEQ ID NO: 19072 - DNA, 21 bp, synthetic construct
  misc_feature 1..21: note = Description of Artificial Sequence: Synthetic oligonucleotide
  source 1..21: mol_type = other DNA
gggtcgggtggggggattgcg

SEQ ID NO: 19073 - DNA, 21 bp, synthetic construct
  misc_feature 1..21: note = Description of Artificial Sequence: Synthetic oligonucleotide
  source 1..21: mol_type = other DNA
ggtaagaatagtgatgttcat

SEQ ID NO: 19074 - DNA, 21 bp, synthetic construct
  misc_feature 1..21: note = Description of Artificial Sequence: Synthetic oligonucleotide
  source 1..21: mol_type = other DNA
ggttctgcagattctagtaag

SEQ ID NO: 19075 - DNA, 21 bp, synthetic construct
  misc_feature 1..21: note = Description of Artificial Sequence: Synthetic oligonucleotide
  source 1..21: mol_type = other DNA
gtcaacagcaccggcgtccac

SEQ ID NO: 19076 - DNA, 21 bp, synthetic construct
  misc_feature 1..21: note = Description of Artificial Sequence: Synthetic oligonucleotide
  source 1..21: mol_type = other DNA
gtcgccaccagcggccccaaa

SEQ ID NO: 19077 - DNA, 21 bp, synthetic construct
  misc_feature 1..21: note = Description of Artificial Sequence: Synthetic oligonucleotide
  source 1..21: mol_type = other DNA
gtgtctaatggtacgagtggt

SEQ ID NO: 19078 - DNA, 21 bp, synthetic construct
  misc_feature 1..21: note = Description of Artificial Sequence: Synthetic oligonucleotide
  source 1..21: mol_type = other DNA
gttgggaatagttcgttgcgg

SEQ ID NO: 19079 - DNA, 21 bp, synthetic construct
  misc_feature 1..21: note = Description of Artificial Sequence: Synthetic oligonucleotide
  source 1..21: mol_type = other DNA
tcgcaggagcggtctctggct

SEQ ID NO: 19080 - DNA, 21 bp, synthetic construct
  misc_feature 1..21: note = Description of Artificial Sequence: Synthetic oligonucleotide
  source 1..21: mol_type = other DNA
tcggtgtctggtgagcggtct

SEQ ID NO: 19081 - DNA, 21 bp, synthetic construct
  misc_feature 1..21: note = Description of Artificial Sequence: Synthetic oligonucleotide
  source 1..21: mol_type = other DNA
tctaattcgtcgtctgctagt

SEQ ID NO: 19082 - DNA, 21 bp, synthetic construct
  misc_feature 1..21: note = Description of Artificial Sequence: Synthetic oligonucleotide
  source 1..21: mol_type = other DNA
ttgcctactggttctaagtcg

SEQ ID NO: 19083 - DNA, 21 bp, synthetic construct
  misc_feature 1..21: note = Description of Artificial Sequence: Synthetic oligonucleotide
  source 1..21: mol_type = other DNA
tctaatgggaagtctcctcag

SEQ ID NO: 19084 - DNA, 21 bp, synthetic construct
  misc_feature 1..21: note = Description of Artificial Sequence: Synthetic oligonucleotide
  source 1..21: mol_type = other DNA
gctggtgagggttcttctcgg

SEQ ID NO: 19085 - DNA, 21 bp, synthetic construct
  misc_feature 1..21: note = Description of Artificial Sequence: Synthetic oligonucleotide
  source 1..21: mol_type = other DNA
aaggatgcgggtactagttcg

SEQ ID NO: 19086 - DNA, 21 bp, synthetic construct
  misc_feature 1..21: note = Description of Artificial Sequence: Synthetic oligonucleotide
  source 1..21: mol_type = other DNA
agtggggatcagaaaggtgct

SEQ ID NO: 19087 - DNA, 21 bp, synthetic construct
  misc_feature 1..21: note = Description of Artificial Sequence: Synthetic oligonucleotide
  source 1..21: mol_type = other DNA
atgtctgggaatactggtaat

SEQ ID NO: 19088 - DNA, 21 bp, synthetic construct
  misc_feature 1..21: note = Description of Artificial Sequence: Synthetic oligonucleotide
  source 1..21: mol_type = other DNA
cttcaggagaagccgagtgct

SEQ ID NO: 19089 - DNA, 21 bp, synthetic construct
  misc_feature 1..21: note = Description of Artificial Sequence: Synthetic oligonucleotide
  source 1..21: mol_type = other DNA
gctcagaataataatgcgggg

SEQ ID NO: 19090 - DNA, 21 bp, synthetic construct
  misc_feature 1..21: note = Description of Artificial Sequence: Synthetic oligonucleotide
  source 1..21: mol_type = other DNA
gggactggtgagcgtcatctt

SEQ ID NO: 19091 - DNA, 21 bp, synthetic construct
  misc_feature 1..21: note = Description of Artificial Sequence: Synthetic oligonucleotide
  source 1..21: mol_type = other DNA
gggagtcagtcgtctactcgg

SEQ ID NO: 19092 - DNA, 21 bp, synthetic construct
  misc_feature 1..21: note = Description of Artificial Sequence: Synthetic oligonucleotide
  source 1..21: mol_type = other DNA
gggctgaatacggcgtctggg

SEQ ID NO: 19093 - DNA, 21 bp, synthetic construct
  misc_feature 1..21: note = Description of Artificial Sequence: Synthetic oligonucleotide
  source 1..21: mol_type = other DNA
tctcgggagagtgctaatcat

SEQ ID NO: 19094 - DNA, 21 bp, synthetic construct
  misc_feature 1..21: note = Description of Artificial Sequence: Synthetic oligonucleotide
  source 1..21: mol_type = other DNA
aggactactgcgaatagtggt

SEQ ID NO: 19095 - DNA, 21 bp, synthetic construct
  misc_feature 1..21: note = Description of Artificial Sequence: Synthetic oligonucleotide
  source 1..21: mol_type = other DNA
gtcaccgacaaacccaacatg

SEQ ID NO: 19096 - DNA, 21 bp, synthetic construct
  misc_feature 1..21: note = Description of Artificial Sequence: Synthetic oligonucleotide
  source 1..21: mol_type = other DNA
agcctcaccaacagcaacagc

SEQ ID NO: 19097 - DNA, 21 bp, synthetic construct
  misc_feature 1..21: note = Description of Artificial Sequence: Synthetic oligonucleotide
  source 1..21: mol_type = other DNA
acgggggctggtcatacgtcg

SEQ ID NO: 19098 - DNA, 21 bp, synthetic construct
  misc_feature 1..21: note = Description of Artificial Sequence: Synthetic oligonucleotide
  source 1..21: mol_type = other DNA
accctcgccagcaccaacgcc

SEQ ID NO: 19099 - DNA, 21 bp, synthetic construct
  misc_feature 1..21: note = Description of Artificial Sequence: Synthetic oligonucleotide
  source 1..21: mol_type = other DNA
ggcgacgtcaacgtcaaacaa

SEQ ID NO: 19100 - DNA, 21 bp, synthetic construct
  misc_feature 1..21: note = Description of Artificial Sequence: Synthetic oligonucleotide
  source 1..21: mol_type = other DNA
gcttctcatgataagtcgtct

SEQ ID NO: 19101 - DNA, 21 bp, synthetic construct
  misc_feature 1..21: note = Description of Artificial Sequence: Synthetic oligonucleotide
  source 1..21: mol_type = other DNA
gttggttcgagtaaggatggt

SEQ ID NO: 19102 - DNA, 21 bp, synthetic construct
  misc_feature 1..21: note = Description of Artificial Sequence: Synthetic oligonucleotide
  source 1..21: mol_type = other DNA
catgatggttcgaagtctatg

SEQ ID NO: 19103 - DNA, 21 bp, synthetic construct
  misc_feature 1..21: note = Description of Artificial Sequence: Synthetic oligonucleotide
  source 1..21: mol_type = other DNA
gacagcacccacggcaacacc

SEQ ID NO: 19104 - DNA, 21 bp, synthetic construct
  misc_feature 1..21: note = Description of Artificial Sequence: Synthetic oligonucleotide
  source 1..21: mol_type = other DNA
ggcctcaaacaagcccccacc

SEQ ID NO: 19105 - DNA, 21 bp, synthetic construct
  misc_feature 1..21: note = Description of Artificial Sequence: Synthetic oligonucleotide
  source 1..21: mol_type = other DNA
ggtgattctaagaagcctccg

SEQ ID NO: 19106 - DNA, 21 bp, synthetic construct
  misc_feature 1..21: note = Description of Artificial Sequence: Synthetic oligonucleotide
  source 1..21: mol_type = other DNA
acgccgggtgggtcggcgcct

SEQ ID NO: 19107 - DNA, 21 bp, synthetic construct
  misc_feature 1..21: note = Description of Artificial Sequence: Synthetic oligonucleotide
  source 1..21: mol_type = other DNA
cgtggtgggtctgatagtgct

SEQ ID NO: 19108 - DNA, 21 bp, synthetic construct
  misc_feature 1..21: note = Description of Artificial Sequence: Synthetic oligonucleotide
  source 1..21: mol_type = other DNA
ggcaccagcggcggcggcacc

SEQ ID NO: 19109 - DNA, 21 bp, synthetic construct
  misc_feature 1..21: note = Description of Artificial Sequence: Synthetic oligonucleotide
  source 1..21: mol_type = other DNA
agcgtcggcacccccagcgcc

SEQ ID NO: 19110 - DNA, 21 bp, synthetic construct
  misc_feature 1..21: note = Description of Artificial Sequence: Synthetic oligonucleotide
  source 1..21: mol_type = other DNA
gaaaccggcgccagcagcctc

SEQ ID NO: 19111 - DNA, 21 bp, synthetic construct
  misc_feature 1..21: note = Description of Artificial Sequence: Synthetic oligonucleotide
  source 1..21: mol_type = other DNA
acgggtccgacggagaagtct

SEQ ID NO: 19112 - DNA, 21 bp, synthetic construct
  misc_feature 1..21: note = Description of Artificial Sequence: Synthetic oligonucleotide
  source 1..21: mol_type = other DNA
agccccaaacccggcagcatc

SEQ ID NO: 19113 - DNA, 21 bp, synthetic construct
  misc_feature 1..21: note = Description of Artificial Sequence: Synthetic oligonucleotide
  source 1..21: mol_type = other DNA
tctgattcgacgcggtctcag

SEQ ID NO: 19114 - DNA, 21 bp, synthetic construct
  misc_feature 1..21: note = Description of Artificial Sequence: Synthetic oligonucleotide
  source 1..21: mol_type = other DNA
acgggtaattcgagtgcgcct

SEQ ID NO: 19115 - DNA, 21 bp, synthetic construct
  misc_feature 1..21: note = Description of Artificial Sequence: Synthetic oligonucleotide
  source 1..21: mol_type = other DNA
gatgcgcgggagaggaatcag

SEQ ID NO: 19116 - DNA, 21 bp, synthetic construct
  misc_feature 1..21: note = Description of Artificial Sequence: Synthetic oligonucleotide
  source 1..21: mol_type = other DNA
accaacaccaccagcgccacc

SEQ ID NO: 19117 - DNA, 21 bp, synthetic construct
  misc_feature 1..21: note = Description of Artificial Sequence: Synthetic oligonucleotide
  source 1..21: mol_type = other DNA
cttgggactagttcttctgtg

SEQ ID NO: 19118 - DNA, 21 bp, synthetic construct
  misc_feature 1..21: note = Description of Artificial Sequence: Synthetic oligonucleotide
  source 1..21: mol_type = other DNA
caggggcagaatcatcctaat

SEQ ID NO: 19119 - DNA, 21 bp, synthetic construct
  misc_feature 1..21: note = Description of Artificial Sequence: Synthetic oligonucleotide
  source 1..21: mol_type = other DNA
ggtggtactgggacgcttggg

SEQ ID NO: 19120 - DNA, 21 bp, synthetic construct
  misc_feature 1..21: note = Description of Artificial Sequence: Synthetic oligonucleotide
  source 1..21: mol_type = other DNA
ttggggacgggtacgtcgact

SEQ ID NO: 19121 - DNA, 21 bp, synthetic construct
  misc_feature 1..21: note = Description of Artificial Sequence: Synthetic oligonucleotide
  source 1..21: mol_type = other DNA
gaaggcagccaacccctccaa

SEQ ID NO: 19122 - DNA, 21 bp, synthetic construct
  misc_feature 1..21: note = Description of Artificial Sequence: Synthetic oligonucleotide
  source 1..21: mol_type = other DNA
gaaagcggcatgcaaaacagc

SEQ ID NO: 19123 - DNA, 21 bp, synthetic construct
  misc_feature 1..21: note = Description of Artificial Sequence: Synthetic oligonucleotide
  source 1..21: mol_type = other DNA
ggggttgatcacgcgaagacg

SEQ ID NO: 19124 - DNA, 21 bp, synthetic construct
  misc_feature 1..21: note = Description of Artificial Sequence: Synthetic oligonucleotide
  source 1..21: mol_type = other DNA
agccccatcaccaacggccac

SEQ ID NO: 19125 - DNA, 21 bp, synthetic construct
  misc_feature 1..21: note = Description of Artificial Sequence: Synthetic oligonucleotide
  source 1..21: mol_type = other DNA
atgagcggcagcgccaaagac

SEQ ID NO: 19126 - DNA, 21 bp, synthetic construct
  misc_feature 1..21: note = Description of Artificial Sequence: Synthetic oligonucleotide
  source 1..21: mol_type = other DNA
caaagcggcgaagcccccaga

SEQ ID NO: 19127 - DNA, 21 bp, synthetic construct
  misc_feature 1..21: note = Description of Artificial Sequence: Synthetic oligonucleotide
  source 1..21: mol_type = other DNA
ggcgaaaccagcagaaccagc

SEQ ID NO: 19128 - DNA, 21 bp, synthetic construct
  misc_feature 1..21: note = Description of Artificial Sequence: Synthetic oligonucleotide
  source 1..21: mol_type = other DNA
ggtgattcgcggcctctgaat

SEQ ID NO: 19129 - DNA, 21 bp, synthetic construct
  misc_feature 1..21: note = Description of Artificial Sequence: Synthetic oligonucleotide
  source 1..21: mol_type = other DNA
aataatggttctcagcttaag

SEQ ID NO: 19130 - DNA, 21 bp, synthetic construct
  misc_feature 1..21: note = Description of Artificial Sequence: Synthetic oligonucleotide
  source 1..21: mol_type = other DNA
agtactgctaatgcgtcgtcg

SEQ ID NO: 19131 - DNA, 21 bp, synthetic construct
  misc_feature 1..21: note = Description of Artificial Sequence: Synthetic oligonucleotide
  source 1..21: mol_type = other DNA
ggccccaacagcaacaaaagc

SEQ ID NO: 19132 - DNA, 21 bp, synthetic construct
  misc_feature 1..21: note = Description of Artificial Sequence: Synthetic oligonucleotide
  source 1..21: mol_type = other DNA
tctggggataatctgcggggg

SEQ ID NO: 19133 - DNA, 21 bp, synthetic construct
  misc_feature 1..21: note = Description of Artificial Sequence: Synthetic oligonucleotide
  source 1..21: mol_type = other DNA
ggcggcagcaaacccaacctc

SEQ ID NO: 19134 - DNA, 21 bp, synthetic construct
  misc_feature 1..21: note = Description of Artificial Sequence: Synthetic oligonucleotide
  source 1..21: mol_type = other DNA
ggcagcagcggcagccacagc

SEQ ID NO: 19135 - DNA, 21 bp, synthetic construct
  misc_feature 1..21: note = Description of Artificial Sequence: Synthetic oligonucleotide
  source 1..21: mol_type = other DNA
agcggcatgaacggccaaaac

SEQ ID NO: 19136 - DNA, 21 bp, synthetic construct
  misc_feature 1..21: note = Description of Artificial Sequence: Synthetic oligonucleotide
  source 1..21: mol_type = other DNA
cagactaattcgggttcgact

SEQ ID NO: 19137 - DNA, 21 bp, synthetic construct
  misc_feature 1..21: note = Description of Artificial Sequence: Synthetic oligonucleotide
  source 1..21: mol_type = other DNA
gccagcggcagccacagcagc

SEQ ID NO: 19138 - DNA, 21 bp, synthetic construct
  misc_feature 1..21: note = Description of Artificial Sequence: Synthetic oligonucleotide
  source 1..21: mol_type = other DNA
gccctcagcgaaaaaaccctc

SEQ ID NO: 19139 - DNA, 21 bp, synthetic construct
  misc_feature 1..21: note = Description of Artificial Sequence: Synthetic oligonucleotide
  source 1..21: mol_type = other DNA
gagtcgtcgaagccttctttg

SEQ ID NO: 19140 - DNA, 21 bp, synthetic construct
  misc_feature 1..21: note = Description of Artificial Sequence: Synthetic oligonucleotide
  source 1..21: mol_type = other DNA
ggtgggggtactactcaggct

SEQ ID NO: 19141 - DNA, 21 bp, synthetic construct
  misc_feature 1..21: note = Description of Artificial Sequence: Synthetic oligonucleotide
  source 1..21: mol_type = other DNA
tctaaggcgaatactccgaat

SEQ ID NO: 19142 - DNA, 21 bp, synthetic construct
  misc_feature 1..21: note = Description of Artificial Sequence: Synthetic oligonucleotide
  source 1..21: mol_type = other DNA
agcacccaacccagcagcggc

SEQ ID NO: 19143 - DNA, 21 bp, synthetic construct
  misc_feature 1..21: note = Description of Artificial Sequence: Synthetic oligonucleotide
  source 1..21: mol_type = other DNA
gtcgccgaccaaaaacaaggc

SEQ ID NO: 19144 - DNA, 21 bp, synthetic construct
  misc_feature 1..21: note = Description of Artificial Sequence: Synthetic oligonucleotide
  source 1..21: mol_type = other DNA
cacggcagcaacggcagcagc

SEQ ID NO: 19145 - DNA, 21 bp, synthetic construct
  misc_feature 1..21: note = Description of Artificial Sequence: Synthetic oligonucleotide
  source 1..21: mol_type = other DNA
gatactgggaagagtcctgtg

SEQ ID NO: 19146 - DNA, 21 bp, synthetic construct
  misc_feature 1..21: note = Description of Artificial Sequence: Synthetic oligonucleotide
  source 1..21: mol_type = other DNA
aatatgacgtctgcgaaggat

SEQ ID NO: 19147 - DNA, 21 bp, synthetic construct
  misc_feature 1..21: note = Description of Artificial Sequence: Synthetic oligonucleotide
  source 1..21: mol_type = other DNA
agcaccaccggcgaagccaaa

SEQ ID NO: 19148 - DNA, 21 bp, synthetic construct
  misc_feature 1..21: note = Description of Artificial Sequence: Synthetic oligonucleotide
  source 1..21: mol_type = other DNA
gaaaacagcaccagccacagc

SEQ ID NO: 19149 - DNA, 21 bp, synthetic construct
  misc_feature 1..21: note = Description of Artificial Sequence: Synthetic oligonucleotide
  source 1..21: mol_type = other DNA
gtcagcaacagccccaccaaa

SEQ ID NO: 19150 - DNA, 21 bp, synthetic construct
  misc_feature 1..21: note = Description of Artificial Sequence: Synthetic oligonucleotide
  source 1..21: mol_type = other DNA
aacgccggcgccagcaccctc

SEQ ID NO: 19151 - DNA, 21 bp, synthetic construct
  misc_feature 1..21: note = Description of Artificial Sequence: Synthetic oligonucleotide
  source 1..21: mol_type = other DNA
agttctgcgactaataatacg

SEQ ID NO: 19152 - DNA, 21 bp, synthetic construct
  misc_feature 1..21: note = Description of Artificial Sequence: Synthetic oligonucleotide
  source 1..21: mol_type = other DNA
accaccggcgtcggcggcacc

SEQ ID NO: 19153 - DNA, 21 bp, synthetic construct
  misc_feature 1..21: note = Description of Artificial Sequence: Synthetic oligonucleotide
  source 1..21: mol_type = other DNA
gcgaatacgacgggtcttagt

SEQ ID NO: 19154 - DNA, 21 bp, synthetic construct
  misc_feature 1..21: note = Description of Artificial Sequence: Synthetic oligonucleotide
  source 1..21: mol_type = other DNA
tcgaatggtacggctaagagt

SEQ ID NO: 19155 - DNA, 21 bp, synthetic construct
  misc_feature 1..21: note = Description of Artificial Sequence: Synthetic oligonucleotide
  source 1..21: mol_type = other DNA
gcccacaaagacaaagacggc

SEQ ID NO: 19156 - DNA, 21 bp, synthetic construct
  misc_feature 1..21: note = Description of Artificial Sequence: Synthetic oligonucleotide
  source 1..21: mol_type = other DNA
tcgagtggtacttctacggct

SEQ ID NO: 19157 - DNA, 21 bp, synthetic construct
  misc_feature 1..21: note = Description of Artificial Sequence: Synthetic oligonucleotide
  source 1..21: mol_type = other DNA
actaatgagaatagtaatcgg

SEQ ID NO: 19158 - DNA, 21 bp, synthetic construct
  misc_feature 1..21: note = Description of Artificial Sequence: Synthetic oligonucleotide
  source 1..21: mol_type = other DNA
caaatcgccaaagacagcagc

SEQ ID NO: 19159 - DNA, 21 bp, synthetic construct
  misc_feature 1..21: note = Description of Artificial Sequence: Synthetic oligonucleotide
  source 1..21: mol_type = other DNA
ctcagcaccagccaagtcagc

SEQ ID NO: 19160 - DNA, 21 bp, synthetic construct
  misc_feature 1..21: note = Description of Artificial Sequence: Synthetic oligonucleotide
  source 1..21: mol_type = other DNA
cagagtgaggcgaagggggcg

SEQ ID NO: 19161 - DNA, 21 bp, synthetic construct
  misc_feature 1..21: note = Description of Artificial Sequence: Synthetic oligonucleotide
  source 1..21: mol_type = other DNA
gttggtgttaaggcgtctcag

SEQ ID NO: 19162 - DNA, 21 bp, synthetic construct
  misc_feature 1..21: note = Description of Artificial Sequence: Synthetic oligonucleotide
  source 1..21: mol_type = other DNA
gaccccagcaaagccagcgtc

SEQ ID NO: 19163 - DNA, 21 bp, synthetic construct
  misc_feature 1..21: note = Description of Artificial Sequence: Synthetic oligonucleotide
  source 1..21: mol_type = other DNA
aaccccagcagcggcgacaaa

SEQ ID NO: 19164 - DNA, 21 bp, synthetic construct
  misc_feature 1..21: note = Description of Artificial Sequence: Synthetic oligonucleotide
  source 1..21: mol_type = other DNA
atgggcagcaccgccaacggc

SEQ ID NO: 19165 - DNA, 21 bp, synthetic construct
  misc_feature 1..21: note = Description of Artificial Sequence: Synthetic oligonucleotide
  source 1..21: mol_type = other DNA
ggcgccagcggcgacaaccac

SEQ ID NO: 19166 - DNA, 21 bp, synthetic construct
  misc_feature 1..21: note = Description of Artificial Sequence: Synthetic oligonucleotide
  source 1..21: mol_type = other DNA
tggagggagtcggagacgaag

SEQ ID NO: 19167 - DNA, 21 bp, synthetic construct
  misc_feature 1..21: note = Description of Artificial Sequence: Synthetic oligonucleotide
  source 1..21: mol_type = other DNA
aacaccggcgcccccgccagc

SEQ ID NO: 19168 - DNA, 21 bp, synthetic construct
  misc_feature 1..21: note = Description of Artificial Sequence: Synthetic oligonucleotide
  source 1..21: mol_type = other DNA
gacgccaacagcggcaaaatg

SEQ ID NO: 19169 - DNA, 21 bp, synthetic construct
  misc_feature 1..21: note = Description of Artificial Sequence: Synthetic oligonucleotide
  source 1..21: mol_type = other DNA
gcgagtaagagtggtgctgct

SEQ ID NO: 19170 - DNA, 21 bp, synthetic construct
  misc_feature 1..21: note = Description of Artificial Sequence: Synthetic oligonucleotide
  source 1..21: mol_type = other DNA
ggtcttggttcgtctacgtcg

SEQ ID NO: 19171 - DNA, 21 bp, synthetic construct
  misc_feature 1..21: note = Description of Artificial Sequence: Synthetic oligonucleotide
  source 1..21: mol_type = other DNA
gacagcagcaaaagcgcctac

SEQ ID NO: 19172 - DNA, 21 bp, synthetic construct
  misc_feature 1..21: note = Description of Artificial Sequence: Synthetic oligonucleotide
  source 1..21: mol_type = other DNA
agcggcaaacaaagccccgcc

SEQ ID NO: 19173 - DNA, 21 bp, synthetic construct
  misc_feature 1..21: note = Description of Artificial Sequence: Synthetic oligonucleotide
  source 1..21: mol_type = other DNA
actgttacgaatacgtctggg

SEQ ID NO: 19174 - DNA, 21 bp, synthetic construct
  misc_feature 1..21: note = Description of Artificial Sequence: Synthetic oligonucleotide
  source 1..21: mol_type = other DNA
atcgccggccccggcacccaa

SEQ ID NO: 19175 - DNA, 21 bp, synthetic construct
  misc_feature 1..21: note = Description of Artificial Sequence: Synthetic oligonucleotide
  source 1..21: mol_type = other DNA
gggttggataaggctggtaag

SEQ ID NO: 19176 - DNA, 21 bp, synthetic construct
  misc_feature 1..21: note = Description of Artificial Sequence: Synthetic oligonucleotide
  source 1..21: mol_type = other DNA
gtggatggtaagacttcgaat

SEQ ID NO: 19177 - DNA, 21 bp, synthetic construct
  misc_feature 1..21: note = Description of Artificial Sequence: Synthetic oligonucleotide
  source 1..21: mol_type = other DNA
accgccggcggcagccacctc

SEQ ID NO: 19178 - DNA, 21 bp, synthetic construct
  misc_feature 1..21: note = Description of Artificial Sequence: Synthetic oligonucleotide
  source 1..21: mol_type = other DNA
gccagccaaagccccagcctc

SEQ ID NO: 19179 - DNA, 21 bp, synthetic construct
  misc_feature 1..21: note = Description of Artificial Sequence: Synthetic oligonucleotide
  source 1..21: mol_type = other DNA
tctgttggttcttcttcgaat

SEQ ID NO: 19180 - DNA, 21 bp, synthetic construct
  misc_feature 1..21: note = Description of Artificial Sequence: Synthetic oligonucleotide
  source 1..21: mol_type = other DNA
aatacggcggctccgactgct

SEQ ID NO: 19181 - DNA, 21 bp, synthetic construct
  misc_feature 1..21: note = Description of Artificial Sequence: Synthetic oligonucleotide
  source 1..21: mol_type = other DNA
aatactcatacgaagtcgacg

SEQ ID NO: 19182 - DNA, 21 bp, synthetic construct
  misc_feature 1..21: note = Description of Artificial Sequence: Synthetic oligonucleotide
  source 1..21: mol_type = other DNA
ggcaacagccaacccaacgcc

SEQ ID NO: 19183 - DNA, 21 bp, synthetic construct
  misc_feature 1..21: note = Description of Artificial Sequence: Synthetic oligonucleotide
  source 1..21: mol_type = other DNA
tctctttcggataagcagggt

SEQ ID NO: 19184 - DNA, 21 bp, synthetic construct
  misc_feature 1..21: note = Description of Artificial Sequence: Synthetic oligonucleotide
  source 1..21: mol_type = other DNA
accaccggcagcagcatgatg

SEQ ID NO: 19185 - DNA, 21 bp, synthetic construct
  misc_feature 1..21: note = Description of Artificial Sequence: Synthetic oligonucleotide
  source 1..21: mol_type = other DNA
actactgtttctagtccgcat

SEQ ID NO: 19186 - DNA, 21 bp, synthetic construct
  misc_feature 1..21: note = Description of Artificial Sequence: Synthetic oligonucleotide
  source 1..21: mol_type = other DNA
agccaaaccggccaaaaccaa

SEQ ID NO: 19187 - DNA, 21 bp, synthetic construct
  misc_feature 1..21: note = Description of Artificial Sequence: Synthetic oligonucleotide
  source 1..21: mol_type = other DNA
atggggagttctaaggtgggt

SEQ ID NO: 19188 - DNA, 21 bp, synthetic construct
  misc_feature 1..21: note = Description of Artificial Sequence: Synthetic oligonucleotide
  source 1..21: mol_type = other DNA
gtcggcgcccccaccaacaga

SEQ ID NO: 19189 - DNA, 21 bp, synthetic construct
  misc_feature 1..21: note = Description of Artificial Sequence: Synthetic oligonucleotide
  source 1..21: mol_type = other DNA
tctgggatgcctgcgggtact

SEQ ID NO: 19190 - DNA, 21 bp, synthetic construct
  misc_feature 1..21: note = Description of Artificial Sequence: Synthetic oligonucleotide
  source 1..21: mol_type = other DNA
ggcagcaccaaagaagccaac

SEQ ID NO: 19191 - DNA, 21 bp, synthetic construct
  misc_feature 1..21: note = Description of Artificial Sequence: Synthetic oligonucleotide
  source 1..21: mol_type = other DNA
caaaccaacgccaccctcggc

SEQ ID NO: 19192 - DNA, 21 bp, synthetic construct
  misc_feature 1..21: note = Description of Artificial Sequence: Synthetic oligonucleotide
  source 1..21: mol_type = other DNA
gacagcggcggcagccccaga

SEQ ID NO: 19193 - DNA, 21 bp, synthetic construct
  misc_feature 1..21: note = Description of Artificial Sequence: Synthetic oligonucleotide
  source 1..21: mol_type = other DNA
ggcagcgtcaaacccggcctc

SEQ ID NO: 19194 - DNA, 21 bp, synthetic construct
  misc_feature 1..21: note = Description of Artificial Sequence: Synthetic oligonucleotide
  source 1..21: mol_type = other DNA
gggtcgagttcgaagagtact

SEQ ID NO: 19195 - DNA, 21 bp, synthetic construct
  misc_feature 1..21: note = Description of Artificial Sequence: Synthetic oligonucleotide
  source 1..21: mol_type = other DNA
gtcaaaagccaagccaacaac

SEQ ID NO: 19196 - DNA, 21 bp, synthetic construct
  misc_feature 1..21: note = Description of Artificial Sequence: Synthetic oligonucleotide
  source 1..21: mol_type = other DNA
tcgcagacgactcagtcgggt

SEQ ID NO: 19197 - DNA, 21 bp, synthetic construct
  misc_feature 1..21: note = Description of Artificial Sequence: Synthetic oligonucleotide
  source 1..21: mol_type = other DNA
gggacgccttcgtctagtact

SEQ ID NO: 19198 - DNA, 21 bp, synthetic construct
  misc_feature 1..21: note = Description of Artificial Sequence: Synthetic oligonucleotide
  source 1..21: mol_type = other DNA
cggtctagtgataagagtggt

SEQ ID NO: 19199 - DNA, 21 bp, synthetic construct
  misc_feature 1..21: note = Description of Artificial Sequence: Synthetic oligonucleotide
  source 1..21: mol_type = other DNA
aattcgagtcggtcgaatgag

SEQ ID NO: 19200 - DNA, 21 bp, synthetic construct
  misc_feature 1..21: note = Description of Artificial Sequence: Synthetic oligonucleotide
  source 1..21: mol_type = other DNA
accggccccaccccccaagtc

SEQ ID NO: 19201 - DNA, 21 bp, synthetic construct
  misc_feature 1..21: note = Description of Artificial Sequence: Synthetic oligonucleotide
  source 1..21: mol_type = other DNA
actacgggtacgactccttcg

SEQ ID NO: 19202 - DNA, 21 bp, synthetic construct
  misc_feature 1..21: note = Description of Artificial Sequence: Synthetic oligonucleotide
  source 1..21: mol_type = other DNA
agcgacggcagcgccgccgcc

SEQ ID NO: 19203 - DNA, 21 bp, synthetic construct
  misc_feature 1..21: note = Description of Artificial Sequence: Synthetic oligonucleotide
  source 1..21: mol_type = other DNA
attgggactacttctcagagt

SEQ ID NO: 19204 - DNA, 21 bp, synthetic construct
  misc_feature 1..21: note = Description of Artificial Sequence: Synthetic oligonucleotide
  source 1..21: mol_type = other DNA
agcaccggcgcccccaacgcc

SEQ ID NO: 19205 - DNA, 21 bp, synthetic construct
  misc_feature 1..21: note = Description of Artificial Sequence: Synthetic oligonucleotide
  source 1..21: mol_type = other DNA
gaaagcaaaaaacccgccctc

SEQ ID NO: 19206 - DNA, 21 bp, synthetic construct
  misc_feature 1..21: note = Description of Artificial Sequence: Synthetic oligonucleotide
  source 1..21: mol_type = other DNA
ggccaccaaaccacccccacc

SEQ ID NO: 19207 - DNA, 21 bp, synthetic construct
  misc_feature 1..21: note = Description of Artificial Sequence: Synthetic oligonucleotide
  source 1..21: mol_type = other DNA
gggaatctggcgaaggctgag

SEQ ID NO: 19208 - DNA, 21 bp, synthetic construct
  misc_feature 1..21: note = Description of Artificial Sequence: Synthetic oligonucleotide
  source 1..21: mol_type = other DNA
gaacccaccagcagaaacgcc

SEQ ID NO: 19209 - DNA, 21 bp, synthetic construct
  misc_feature 1..21: note = Description of Artificial Sequence: Synthetic oligonucleotide
  source 1..21: mol_type = other DNA
agtgctactaatgctgctact

SEQ ID NO: 19210 - DNA, 21 bp, synthetic construct
  misc_feature 1..21: note = Description of Artificial Sequence: Synthetic oligonucleotide
  source 1..21: mol_type = other DNA
ggtaattcgcagtctatgact

SEQ ID NO: 19211 - DNA, 21 bp, synthetic construct
  misc_feature 1..21: note = Description of Artificial Sequence: Synthetic oligonucleotide
  source 1..21: mol_type = other DNA
gtcggcggcagcggcccccaa

SEQ ID NO: 19212 - DNA, 21 bp, synthetic construct
  misc_feature 1..21: note = Description of Artificial Sequence: Synthetic oligonucleotide
  source 1..21: mol_type = other DNA
actccgactaagcctaatacg

SEQ ID NO: 19213 - DNA, 21 bp, synthetic construct
  misc_feature 1..21: note = Description of Artificial Sequence: Synthetic oligonucleotide
  source 1..21: mol_type = other DNA
ggtacggccaggaataatggt

SEQ ID NO: 19214 - DNA, 21 bp, synthetic construct
  misc_feature 1..21: note = Description of Artificial Sequence: Synthetic oligonucleotide
  source 1..21: mol_type = other DNA
aacgtcagcaccaacaacggc

SEQ ID NO: 19215 - DNA, 21 bp, synthetic construct
  misc_feature 1..21: note = Description of Artificial Sequence: Synthetic oligonucleotide
  source 1..21: mol_type = other DNA
aacaccaccagcggcctcgcc

SEQ ID NO: 19216 - DNA, 21 bp, synthetic construct
  misc_feature 1..21: note = Description of Artificial Sequence: Synthetic oligonucleotide
  source 1..21: mol_type = other DNA
aatcaggcggctcagggtgtt

SEQ ID NO: 19217 - DNA, 21 bp, synthetic construct
  misc_feature 1..21: note = Description of Artificial Sequence: Synthetic oligonucleotide
  source 1..21: mol_type = other DNA
accaacgccagccccagcagc

SEQ ID NO: 19218 - DNA, 21 bp, synthetic construct
  misc_feature 1..21: note = Description of Artificial Sequence: Synthetic oligonucleotide
  source 1..21: mol_type = other DNA
actgggaaggatcagtcttcg

SEQ ID NO: 19219 - DNA, 21 bp, synthetic construct
  misc_feature 1..21: note = Description of Artificial Sequence: Synthetic oligonucleotide
  source 1..21: mol_type = other DNA
acttcttcgccgacgggtgtt

SEQ ID NO: 19220 - DNA, 21 bp, synthetic construct
  misc_feature 1..21: note = Description of Artificial Sequence: Synthetic oligonucleotide
  source 1..21: mol_type = other DNA
agtgggggtaagccttctaat

SEQ ID NO: 19221 - DNA, 21 bp, synthetic construct
  misc_feature 1..21: note = Description of Artificial Sequence: Synthetic oligonucleotide
  source 1..21: mol_type = other DNA
gaaagcagcagcagaagcatc

SEQ ID NO: 19222 - DNA, 21 bp, synthetic construct
  misc_feature 1..21: note = Description of Artificial Sequence: Synthetic oligonucleotide
  source 1..21: mol_type = other DNA
gccagcgacaaacccgccctc

SEQ ID NO: 19223 - DNA, 21 bp, synthetic construct
  misc_feature 1..21: note = Description of Artificial Sequence: Synthetic oligonucleotide
  source 1..21: mol_type = other DNA
gtcaaaacccaagccaccatc

SEQ ID NO: 19224 - DNA, 21 bp, synthetic construct
  misc_feature 1..21: note = Description of Artificial Sequence: Synthetic oligonucleotide
  source 1..21: mol_type = other DNA
acccacagccccaacggcaac

SEQ ID NO: 19225 - DNA, 21 bp, synthetic construct
  misc_feature 1..21: note = Description of Artificial Sequence: Synthetic oligonucleotide
  source 1..21: mol_type = other DNA
cagacgagtcaggctcctgtt

SEQ ID NO: 19226 - DNA, 21 bp, synthetic construct
  misc_feature 1..21: note = Description of Artificial Sequence: Synthetic oligonucleotide
  source 1..21: mol_type = other DNA
acggatgggactaaggttaat

SEQ ID NO: 19227 - DNA, 21 bp, synthetic construct
  misc_feature 1..21: note = Description of Artificial Sequence: Synthetic oligonucleotide
  source 1..21: mol_type = other DNA
atcatggaaagcaaaagcatg

SEQ ID NO: 19228 - DNA, 21 bp, synthetic construct
  misc_feature 1..21: note = Description of Artificial Sequence: Synthetic oligonucleotide
  source 1..21: mol_type = other DNA
agcagcgaaagaagcagcaac

SEQ ID NO: 19229 - DNA, 21 bp, synthetic construct
  misc_feature 1..21: note = Description of Artificial Sequence: Synthetic oligonucleotide
  source 1..21: mol_type = other DNA
cagactaagagtaatccttcg

SEQ ID NO: 19230 - DNA, 21 bp, synthetic construct
  misc_feature 1..21: note = Description of Artificial Sequence: Synthetic oligonucleotide
  source 1..21: mol_type = other DNA
gacggcgtcgacaaaagaggc

SEQ ID NO: 19231 - DNA, 21 bp, synthetic construct
  misc_feature 1..21: note = Description of Artificial Sequence: Synthetic oligonucleotide
  source 1..21: mol_type = other DNA
ggtgctgcggttaagagtact

SEQ ID NO: 19232 - DNA, 21 bp, synthetic construct
  misc_feature 1..21: note = Description of Artificial Sequence: Synthetic oligonucleotide
  source 1..21: mol_type = other DNA
ggggatgggaattctcatgtg

SEQ ID NO: 19233 - DNA, 21 bp, synthetic construct
  misc_feature 1..21: note = Description of Artificial Sequence: Synthetic oligonucleotide
  source 1..21: mol_type = other DNA
tctgggtctgagcagattaag

SEQ ID NO: 19234 - DNA, 21 bp, synthetic construct
  misc_feature 1..21: note = Description of Artificial Sequence: Synthetic oligonucleotide
  source 1..21: mol_type = other DNA
aacaccacccccgccagcgcc

SEQ ID NO: 19235 - DNA, 21 bp, synthetic construct
  misc_feature 1..21: note = Description of Artificial Sequence: Synthetic oligonucleotide
  source 1..21: mol_type = other DNA
gacaacaccggcagcaccaac

SEQ ID NO: 19236 - DNA, 21 bp, synthetic construct
  misc_feature 1..21: note = Description of Artificial Sequence: Synthetic oligonucleotide
  source 1..21: mol_type = other DNA
gatgggcctagtcctgctagg

SEQ ID NO: 19237 - DNA, 21 bp, synthetic construct
  misc_feature 1..21: note = Description of Artificial Sequence: Synthetic oligonucleotide
  source 1..21: mol_type = other DNA
ggtggtactgcgacgcctctt

SEQ ID NO: 19238 - DNA, 21 bp, synthetic construct
  misc_feature 1..21: note = Description of Artificial Sequence: Synthetic oligonucleotide
  source 1..21: mol_type = other DNA
accagcggcgacagaatcagc

SEQ ID NO: 19239 - DNA, 21 bp, synthetic construct
  misc_feature 1..21: note = Description of Artificial Sequence: Synthetic oligonucleotide
  source 1..21: mol_type = other DNA
ggtccgagtgagggtcagcgt

SEQ ID NO: 19240 - DNA, 21 bp, synthetic construct
  misc_feature 1..21: note = Description of Artificial Sequence: Synthetic oligonucleotide
  source 1..21: mol_type = other DNA
acgactgatcataagagtgtt

SEQ ID NO: 19241 - DNA, 21 bp, synthetic construct
  misc_feature 1..21: note = Description of Artificial Sequence: Synthetic oligonucleotide
  source 1..21: mol_type = other DNA
aacggcgaaaaaatcggcaac

SEQ ID NO: 19242 - DNA, 21 bp, synthetic construct
  misc_feature 1..21: note = Description of Artificial Sequence: Synthetic oligonucleotide
  source 1..21: mol_type = other DNA
tctaagtcggttcagccgtcg

SEQ ID NO: 19243 - DNA, 21 bp, synthetic construct
  misc_feature 1..21: note = Description of Artificial Sequence: Synthetic oligonucleotide
  source 1..21: mol_type = other DNA
cgtgctgatcagaatcgtggg

SEQ ID NO: 19244 - DNA, 21 bp, synthetic construct
  misc_feature 1..21: note = Description of Artificial Sequence: Synthetic oligonucleotide
  source 1..21: mol_type = other DNA
aaccaacacaaacccagcgcc

SEQ ID NO: 19245 - DNA, 21 bp, synthetic construct
  misc_feature 1..21: note = Description of Artificial Sequence: Synthetic oligonucleotide
  source 1..21: mol_type = other DNA
agcaaagccaccagcgccgcc

SEQ ID NO: 19246 - DNA, 21 bp, synthetic construct
  misc_feature 1..21: note = Description of Artificial Sequence: Synthetic oligonucleotide
  source 1..21: mol_type = other DNA
agcgtcagcagcgccaaagac

SEQ ID NO: 19247 - DNA, 21 bp, synthetic construct
  misc_feature 1..21: note = Description of Artificial Sequence: Synthetic oligonucleotide
  source 1..21: mol_type = other DNA
tctacggggattagtaatgtt

SEQ ID NO: 19248 - DNA, 21 bp, synthetic construct
  misc_feature 1..21: note = Description of Artificial Sequence: Synthetic oligonucleotide
  source 1..21: mol_type = other DNA
gacccccccgacaacaaagtc

SEQ ID NO: 19249 - DNA, 21 bp, synthetic construct
  misc_feature 1..21: note = Description of Artificial Sequence: Synthetic oligonucleotide
  source 1..21: mol_type = other DNA
aacagcgccagcgcccaaagc

SEQ ID NO: 19250 - DNA, 21 bp, synthetic construct
  misc_feature 1..21: note = Description of Artificial Sequence: Synthetic oligonucleotide
  source 1..21: mol_type = other DNA
aaccccagcggcagaaacgaa

SEQ ID NO: 19251 - DNA, 21 bp, synthetic construct
  misc_feature 1..21: note = Description of Artificial Sequence: Synthetic oligonucleotide
  source 1..21: mol_type = other DNA
accgccggcgacagcagagcc

SEQ ID NO: 19252 - DNA, 21 bp, synthetic construct
  misc_feature 1..21: note = Description of Artificial Sequence: Synthetic oligonucleotide
  source 1..21: mol_type = other DNA
cgggttagtgctgataggggg

SEQ ID NO: 19253 - DNA, 21 bp, synthetic construct
  misc_feature 1..21: note = Description of Artificial Sequence: Synthetic oligonucleotide
  source 1..21: mol_type = other DNA
tctagggataaggaggtggcg

SEQ ID NO: 19254 - DNA, 21 bp, synthetic construct
  misc_feature 1..21: note = Description of Artificial Sequence: Synthetic oligonucleotide
  source 1..21: mol_type = other DNA
aatactcctaatcagtctacg

SEQ ID NO: 19255 - DNA, 21 bp, synthetic construct
  misc_feature 1..21: note = Description of Artificial Sequence: Synthetic oligonucleotide
  source 1..21: mol_type = other DNA
agcaacggcggcagcaacagc

SEQ ID NO: 19256 - DNA, 21 bp, synthetic construct
  misc_feature 1..21: note = Description of Artificial Sequence: Synthetic oligonucleotide
  source 1..21: mol_type = other DNA
caaaccaaccacaccaacagc

SEQ ID NO: 19257 - DNA, 21 bp, synthetic construct
  misc_feature 1..21: note = Description of Artificial Sequence: Synthetic oligonucleotide
  source 1..21: mol_type = other DNA
ggtgctgctgcgaatttggct

SEQ ID NO: 19258 - DNA, 21 bp, synthetic construct
  misc_feature 1..21: note = Description of Artificial Sequence: Synthetic oligonucleotide
  source 1..21: mol_type = other DNA
accggcagcagcagcgccacc

SEQ ID NO: 19259 - DNA, 21 bp, synthetic construct
  misc_feature 1..21: note = Description of Artificial Sequence: Synthetic oligonucleotide
  source 1..21: mol_type = other DNA
aacggccacagcggcatcagc

SEQ ID NO: 19260 - DNA, 21 bp, synthetic construct
  misc_feature 1..21: note = Description of Artificial Sequence: Synthetic oligonucleotide
  source 1..21: mol_type = other DNA
accaccaccgccggcctcacc

SEQ ID NO: 19261 - DNA, 21 bp, synthetic construct
  misc_feature 1..21: note = Description of Artificial Sequence: Synthetic oligonucleotide
  source 1..21: mol_type = other DNA
agcagcggcaccgtcggcaaa

SEQ ID NO: 19262 - DNA, 21 bp, synthetic construct
  misc_feature 1..21: note = Description of Artificial Sequence: Synthetic oligonucleotide
  source 1..21: mol_type = other DNA
agcgtcggccacgaccacaga

SEQ ID NO: 19263 - DNA, 21 bp, synthetic construct
  misc_feature 1..21: note = Description of Artificial Sequence: Synthetic oligonucleotide
  source 1..21: mol_type = other DNA
agtgggaagagtgagcagacg

SEQ ID NO: 19264 - DNA, 21 bp, synthetic construct
  misc_feature 1..21: note = Description of Artificial Sequence: Synthetic oligonucleotide
  source 1..21: mol_type = other DNA
ggcggcaacagcgccgccacc

SEQ ID NO: 19265 - DNA, 21 bp, synthetic construct
  misc_feature 1..21: note = Description of Artificial Sequence: Synthetic oligonucleotide
  source 1..21: mol_type = other DNA
ttgggttcgggggctagggag

SEQ ID NO: 19266 - DNA, 21 bp, synthetic construct
  misc_feature 1..21: note = Description of Artificial Sequence: Synthetic oligonucleotide
  source 1..21: mol_type = other DNA
ttggttccggaggctaagggg

SEQ ID NO: 19267 - DNA, 21 bp, synthetic construct
  misc_feature 1..21: note = Description of Artificial Sequence: Synthetic oligonucleotide
  source 1..21: mol_type = other DNA
attcagtcgccgtcttcgggg

SEQ ID NO: 19268 - DNA, 21 bp, synthetic construct
  misc_feature 1..21: note = Description of Artificial Sequence: Synthetic oligonucleotide
  source 1..21: mol_type = other DNA
aacctcggcagcgacagcaaa

SEQ ID NO: 19269 - DNA, 21 bp, synthetic construct
  misc_feature 1..21: note = Description of Artificial Sequence: Synthetic oligonucleotide
  source 1..21: mol_type = other DNA
gagcctgctcctggtactaag

SEQ ID NO: 19270 - DNA, 21 bp, synthetic construct
  misc_feature 1..21: note = Description of Artificial Sequence: Synthetic oligonucleotide
  source 1..21: mol_type = other DNA
agccccaccgccggcggcggc

SEQ ID NO: 19271 - DNA, 21 bp, synthetic construct
  misc_feature 1..21: note = Description of Artificial Sequence: Synthetic oligonucleotide
  source 1..21: mol_type = other DNA
ctggcgagtaaggttgggcag

SEQ ID NO: 19272 - DNA, 21 bp, synthetic construct
  misc_feature 1..21: note = Description of Artificial Sequence: Synthetic oligonucleotide
  source 1..21: mol_type = other DNA
gaaagcctcggcggcaacaaa

SEQ ID NO: 19273 - DNA, 21 bp, synthetic construct
  misc_feature 1..21: note = Description of Artificial Sequence: Synthetic oligonucleotide
  source 1..21: mol_type = other DNA
gttactggtgcgtctatgaat

SEQ ID NO: 19274 - DNA, 21 bp, synthetic construct
  misc_feature 1..21: note = Description of Artificial Sequence: Synthetic oligonucleotide
  source 1..21: mol_type = other DNA
acgtctagtcaggctacggtt

SEQ ID NO: 19275 - DNA, 21 bp, synthetic construct
  misc_feature 1..21: note = Description of Artificial Sequence: Synthetic oligonucleotide
  source 1..21: mol_type = other DNA
catcatgctgataagggtagt

SEQ ID NO: 19276 - DNA, 21 bp, synthetic construct
  misc_feature 1..21: note = Description of Artificial Sequence: Synthetic oligonucleotide
  source 1..21: mol_type = other DNA
cggcctgattctaagagtact

SEQ ID NO: 19277 - DNA, 21 bp, synthetic construct
  misc_feature 1..21: note = Description of Artificial Sequence: Synthetic oligonucleotide
  source 1..21: mol_type = other DNA
ggtgtgcctgagagtaagcag

SEQ ID NO: 19278 - DNA, 21 bp, synthetic construct
  misc_feature 1..21: note = Description of Artificial Sequence: Synthetic oligonucleotide
  source 1..21: mol_type = other DNA
gacagcagcagcagagccagc

SEQ ID NO: 19279 - DNA, 21 bp, synthetic construct
  misc_feature 1..21: note = Description of Artificial Sequence: Synthetic oligonucleotide
  source 1..21: mol_type = other DNA
agcaaaagccccagccaagcc

SEQ ID NO: 19280 - DNA, 21 bp, synthetic construct
  misc_feature 1..21: note = Description of Artificial Sequence: Synthetic oligonucleotide
  source 1..21: mol_type = other DNA
gaccccggcaaactcacccac

SEQ ID NO: 19281 - DNA, 21 bp, synthetic construct
  misc_feature 1..21: note = Description of Artificial Sequence: Synthetic oligonucleotide
  source 1..21: mol_type = other DNA
agtcttgataatcagcgtcag

SEQ ID NO: 19282 - DNA, 21 bp, synthetic construct
  misc_feature 1..21: note = Description of Artificial Sequence: Synthetic oligonucleotide
  source 1..21: mol_type = other DNA
ggtgcgagtaatggttctgcg

SEQ ID NO: 19283 - DNA, 21 bp, synthetic construct
  misc_feature 1..21: note = Description of Artificial Sequence: Synthetic oligonucleotide
  source 1..21: mol_type = other DNA
cacagaaacagcaccagcagc

SEQ ID NO: 19284 - DNA, 21 bp, synthetic construct
  misc_feature 1..21: note = Description of Artificial Sequence: Synthetic oligonucleotide
  source 1..21: mol_type = other DNA
cacaccagcaccaaagacagc

SEQ ID NO: 19285 - DNA, 21 bp, synthetic construct
  misc_feature 1..21: note = Description of Artificial Sequence: Synthetic oligonucleotide
  source 1..21: mol_type = other DNA
gttcagcatgggtcttcgact

SEQ ID NO: 19286 - DNA, 21 bp, synthetic construct
  misc_feature 1..21: note = Description of Artificial Sequence: Synthetic oligonucleotide
  source 1..21: mol_type = other DNA
gacggcgccggcgccaacgtc

SEQ ID NO: 19287 - DNA, 21 bp, synthetic construct
  misc_feature 1..21: note = Description of Artificial Sequence: Synthetic oligonucleotide
  source 1..21: mol_type = other DNA
ggtggtcctccttcgaatacg

SEQ ID NO: 19288 - DNA, 21 bp, synthetic construct
  misc_feature 1..21: note = Description of Artificial Sequence: Synthetic oligonucleotide
  source 1..21: mol_type = other DNA
gcgtctaattcgggggctgtt

SEQ ID NO: 19289 - DNA, 21 bp, synthetic construct
  misc_feature 1..21: note = Description of Artificial Sequence: Synthetic oligonucleotide
  source 1..21: mol_type = other DNA
aacagagacagcagcctccac

SEQ ID NO: 19290 - DNA, 21 bp, synthetic construct
  misc_feature 1..21: note = Description of Artificial Sequence: Synthetic oligonucleotide
  source 1..21: mol_type = other DNA
aacgacaccagaaccaccagc

SEQ ID NO: 19291 - DNA, 21 bp, synthetic construct
  misc_feature 1..21: note = Description of Artificial Sequence: Synthetic oligonucleotide
  source 1..21: mol_type = other DNA
accggcagcgccaccatggtc

SEQ ID NO: 19292 - DNA, 21 bp, synthetic construct
  misc_feature 1..21: note = Description of Artificial Sequence: Synthetic oligonucleotide
  source 1..21: mol_type = other DNA
acggggatgacgtctactagt

SEQ ID NO: 19293 - DNA, 21 bp, synthetic construct
  misc_feature 1..21: note = Description of Artificial Sequence: Synthetic oligonucleotide
  source 1..21: mol_type = other DNA
agacaagccggccaactcgcc

SEQ ID NO: 19294 - DNA, 21 bp, synthetic construct
  misc_feature 1..21: note = Description of Artificial Sequence: Synthetic oligonucleotide
  source 1..21: mol_type = other DNA
cagacggtgtctagttctggt

SEQ ID NO: 19295 - DNA, 21 bp, synthetic construct
  misc_feature 1..21: note = Description of Artificial Sequence: Synthetic oligonucleotide
  source 1..21: mol_type = other DNA
ggtacgactccgggtaagaat

SEQ ID NO: 19296 - DNA, 21 bp, synthetic construct
  misc_feature 1..21: note = Description of Artificial Sequence: Synthetic oligonucleotide
  source 1..21: mol_type = other DNA
agcagcaccgccaccggcctc

SEQ ID NO: 19297 - DNA, 21 bp, synthetic construct
  misc_feature 1..21: note = Description of Artificial Sequence: Synthetic oligonucleotide
  source 1..21: mol_type = other DNA
agaaacgccagcagcagccaa

SEQ ID NO: 19298 - DNA, 21 bp, synthetic construct
  misc_feature 1..21: note = Description of Artificial Sequence: Synthetic oligonucleotide
  source 1..21: mol_type = other DNA
catgttggtaagtcttcgacg

SEQ ID NO: 19299 - DNA, 21 bp, synthetic construct
  misc_feature 1..21: note = Description of Artificial Sequence: Synthetic oligonucleotide
  source 1..21: mol_type = other DNA
tcgtctgagcgggctgggcat

SEQ ID NO: 19300 - DNA, 21 bp, synthetic construct
  misc_feature 1..21: note = Description of Artificial Sequence: Synthetic oligonucleotide
  source 1..21: mol_type = other DNA
gacagaaccggcgccaaaaac

SEQ ID NO: 19301 - DNA, 21 bp, synthetic construct
  misc_feature 1..21: note = Description of Artificial Sequence: Synthetic oligonucleotide
  source 1..21: mol_type = other DNA
gaccacagccacaaaaacgcc

SEQ ID NO: 19302 - DNA, 21 bp, synthetic construct
  misc_feature 1..21: note = Description of Artificial Sequence: Synthetic oligonucleotide
  source 1..21: mol_type = other DNA
cacgtcgaaagaagccacggc

SEQ ID NO: 19303 - DNA, 21 bp, synthetic construct
  misc_feature 1..21: note = Description of Artificial Sequence: Synthetic oligonucleotide
  source 1..21: mol_type = other DNA
agtaatccggggagggatggt

SEQ ID NO: 19304 - DNA, 21 bp, synthetic construct
  misc_feature 1..21: note = Description of Artificial Sequence: Synthetic oligonucleotide
  source 1..21: mol_type = other DNA
ggtgattctggtcgtcaggct

SEQ ID NO: 19305 - DNA, 21 bp, synthetic construct
  misc_feature 1..21: note = Description of Artificial Sequence: Synthetic oligonucleotide
  source 1..21: mol_type = other DNA
atgcaggatagtcgtgctcag

SEQ ID NO: 19306 - DNA, 21 bp, synthetic construct
  misc_feature 1..21: note = Description of Artificial Sequence: Synthetic oligonucleotide
  source 1..21: mol_type = other DNA
cttggggggccgtcgaattcg

SEQ ID NO: 19307 - DNA, 21 bp, synthetic construct
  misc_feature 1..21: note = Description of Artificial Sequence: Synthetic oligonucleotide
  source 1..21: mol_type = other DNA
gacagcaaagccgccccccaa

SEQ ID NO: 19308 - DNA, 21 bp, synthetic construct
  misc_feature 1..21: note = Description of Artificial Sequence: Synthetic oligonucleotide
  source 1..21: mol_type = other DNA
gtggatgctaaggagaggagt

SEQ ID NO: 19309 - DNA, 21 bp, synthetic construct
  misc_feature 1..21: note = Description of Artificial Sequence: Synthetic oligonucleotide
  source 1..21: mol_type = other DNA
accaccagcagcgccagcgcc

SEQ ID NO: 19310 - DNA, 21 bp, synthetic construct
  misc_feature 1..21: note = Description of Artificial Sequence: Synthetic oligonucleotide
  source 1..21: mol_type = other DNA
agcagcgacagagacagcaaa

SEQ ID NO: 19311 - DNA, 21 bp, synthetic construct
  misc_feature 1..21: note = Description of Artificial Sequence: Synthetic oligonucleotide
  source 1..21: mol_type = other DNA
agcggcaccggcagaagcgac

SEQ ID NO: 19312 - DNA, 21 bp, synthetic construct
  misc_feature 1..21: note = Description of Artificial Sequence: Synthetic oligonucleotide
  source 1..21: mol_type = other DNA
ggcaacggcgccagcgccagc

SEQ ID NO: 19313 - DNA, 21 bp, synthetic construct
  misc_feature 1..21: note = Description of Artificial Sequence: Synthetic oligonucleotide
  source 1..21: mol_type = other DNA
ggtacgcatggttcgagtaat

SEQ ID NO: 19314 - DNA, 21 bp, synthetic construct
  misc_feature 1..21: note = Description of Artificial Sequence: Synthetic oligonucleotide
  source 1..21: mol_type = other DNA
aacagagccgaaggcagcggc

SEQ ID NO: 19315 - DNA, 21 bp, synthetic construct
  misc_feature 1..21: note = Description of Artificial Sequence: Synthetic oligonucleotide
  source 1..21: mol_type = other DNA
accggcaaccccgccagccac

SEQ ID NO: 19316 - DNA, 21 bp, synthetic construct
  misc_feature 1..21: note = Description of Artificial Sequence: Synthetic oligonucleotide
  source 1..21: mol_type = other DNA
agtggtgtgaattctgttggt

SEQ ID NO: 19317 - DNA, 21 bp, synthetic construct
  misc_feature 1..21: note = Description of Artificial Sequence: Synthetic oligonucleotide
  source 1..21: mol_type = other DNA
agaaacaccagcagcgtccaa

SEQ ID NO: 19318 - DNA, 21 bp, synthetic construct
  misc_feature 1..21: note = Description of Artificial Sequence: Synthetic oligonucleotide
  source 1..21: mol_type = other DNA
gtcaaaagcaacggcgccagc

SEQ ID NO: 19319 - DNA, 21 bp, synthetic construct
  misc_feature 1..21: note = Description of Artificial Sequence: Synthetic oligonucleotide
  source 1..21: mol_type = other DNA
agcaacaacaaacccaccaac

SEQ ID NO: 19320 - DNA, 21 bp, synthetic construct
  misc_feature 1..21: note = Description of Artificial Sequence: Synthetic oligonucleotide
  source 1..21: mol_type = other DNA
accggccaagacgtcatgaga

SEQ ID NO: 19321 - DNA, 21 bp, synthetic construct
  misc_feature 1..21: note = Description of Artificial Sequence: Synthetic oligonucleotide
  source 1..21: mol_type = other DNA
tcggtgggtaagccgacgagt

SEQ ID NO: 19322 - DNA, 21 bp, synthetic construct
  misc_feature 1..21: note = Description of Artificial Sequence: Synthetic oligonucleotide
  source 1..21: mol_type = other DNA
actactggtaattctgtgcct

SEQ ID NO: 19323 - DNA, 21 bp, synthetic construct
  misc_feature 1..21: note = Description of Artificial Sequence: Synthetic oligonucleotide
  source 1..21: mol_type = other DNA
caggcgaagcagaattcgatt

SEQ ID NO: 19324 - DNA, 21 bp, synthetic construct
  misc_feature 1..21: note = Description of Artificial Sequence: Synthetic oligonucleotide
  source 1..21: mol_type = other DNA
agcagagaagacaaaatccac

SEQ ID NO: 19325 - DNA, 21 bp, synthetic construct
  misc_feature 1..21: note = Description of Artificial Sequence: Synthetic oligonucleotide
  source 1..21: mol_type = other DNA
gggtctactcagcctagtagt

SEQ ID NO: 19326 - DNA, 21 bp, synthetic construct
  misc_feature 1..21: note = Description of Artificial Sequence: Synthetic oligonucleotide
  source 1..21: mol_type = other DNA
accagagacgccaccgtcaga

SEQ ID NO: 19327 - DNA, 21 bp, synthetic construct
  misc_feature 1..21: note = Description of Artificial Sequence: Synthetic oligonucleotide
  source 1..21: mol_type = other DNA
cattctggtactcctacgggg

SEQ ID NO: 19328 - DNA, 21 bp, synthetic construct
  misc_feature 1..21: note = Description of Artificial Sequence: Synthetic oligonucleotide
  source 1..21: mol_type = other DNA
gacaaacccggcggcatgagc

SEQ ID NO: 19329 - DNA, 21 bp, synthetic construct
  misc_feature 1..21: note = Description of Artificial Sequence: Synthetic oligonucleotide
  source 1..21: mol_type = other DNA
agccacaccagcggcagcgcc

SEQ ID NO: 19330 - DNA, 21 bp, synthetic construct
  misc_feature 1..21: note = Description of Artificial Sequence: Synthetic oligonucleotide
  source 1..21: mol_type = other DNA
attggggctggtacttcgtct

SEQ ID NO: 19331 - DNA, 21 bp, synthetic construct
  misc_feature 1..21: note = Description of Artificial Sequence: Synthetic oligonucleotide
  source 1..21: mol_type = other DNA
attggttcgaatacgactact

SEQ ID NO: 19332 - DNA, 21 bp, synthetic construct
  misc_feature 1..21: note = Description of Artificial Sequence: Synthetic oligonucleotide
  source 1..21: mol_type = other DNA
actcaggatcataataggtct

SEQ ID NO: 19333 - DNA, 21 bp, synthetic construct
  misc_feature 1..21: note = Description of Artificial Sequence: Synthetic oligonucleotide
  source 1..21: mol_type = other DNA
aaccccggcgcccacgccagc

SEQ ID NO: 19334 - DNA, 21 bp, synthetic construct
  misc_feature 1..21: note = Description of Artificial Sequence: Synthetic oligonucleotide
  source 1..21: mol_type = other DNA
aacgcccaaacccacgccagc

SEQ ID NO: 19335 - DNA, 21 bp, synthetic construct
  misc_feature 1..21: note = Description of Artificial Sequence: Synthetic oligonucleotide
  source 1..21: mol_type = other DNA
accagcaccagcggcctcgcc

SEQ ID NO: 19336 - DNA, 21 bp, synthetic construct
  misc_feature 1..21: note = Description of Artificial Sequence: Synthetic oligonucleotide
  source 1..21: mol_type = other DNA
gatttgaattctacgagtaag

SEQ ID NO: 19337 - DNA, 21 bp, synthetic construct
  misc_feature 1..21: note = Description of Artificial Sequence: Synthetic oligonucleotide
  source 1..21: mol_type = other DNA
actaatgcgagtagtccgatg

SEQ ID NO: 19338 - DNA, 21 bp, synthetic construct
  misc_feature 1..21: note = Description of Artificial Sequence: Synthetic oligonucleotide
  source 1..21: mol_type = other DNA
aacaccaaccaagccgccggc

SEQ ID NO: 19339 - DNA, 21 bp, synthetic construct
  misc_feature 1..21: note = Description of Artificial Sequence: Synthetic oligonucleotide
  source 1..21: mol_type = other DNA
agccaaagcagccccagcatg

SEQ ID NO: 19340 - DNA, 21 bp, synthetic construct
  misc_feature 1..21: note = Description of Artificial Sequence: Synthetic oligonucleotide
  source 1..21: mol_type = other DNA
gaaaaaggccaacacaaccaa

SEQ ID NO: 19341 - DNA, 21 bp, synthetic construct
  misc_feature 1..21: note = Description of Artificial Sequence: Synthetic oligonucleotide
  source 1..21: mol_type = other DNA
gatagtaagcctagtacgtcg

SEQ ID NO: 19342 - DNA, 21 bp, synthetic construct
  misc_feature 1..21: note = Description of Artificial Sequence: Synthetic oligonucleotide
  source 1..21: mol_type = other DNA
gatcctagtagtgcgtctaag

SEQ ID NO: 19343 - DNA, 21 bp, synthetic construct
  misc_feature 1..21: note = Description of Artificial Sequence: Synthetic oligonucleotide
  source 1..21: mol_type = other DNA
ggcaccgaacccaccagaggc

SEQ ID NO: 19344 - DNA, 21 bp, synthetic construct
  misc_feature 1..21: note = Description of Artificial Sequence: Synthetic oligonucleotide
  source 1..21: mol_type = other DNA
ggcgacaccaccagaaacaac

SEQ ID NO: 19345 - DNA, 21 bp, synthetic construct
  misc_feature 1..21: note = Description of Artificial Sequence: Synthetic oligonucleotide
  source 1..21: mol_type = other DNA
gtcggcgtcggcagcgccgcc

SEQ ID NO: 19346 - DNA, 21 bp, synthetic construct
  misc_feature 1..21: note = Description of Artificial Sequence: Synthetic oligonucleotide
  source 1..21: mol_type = other DNA
tcggttacggataagggtaag

SEQ ID NO: 19347 - DNA, 21 bp, synthetic construct
  misc_feature 1..21: note = Description of Artificial Sequence: Synthetic oligonucleotide
  source 1..21: mol_type = other DNA
tctagtacgatgaaggagggg

SEQ ID NO: 19348 - DNA, 21 bp, synthetic construct
  misc_feature 1..21: note = Description of Artificial Sequence: Synthetic oligonucleotide
  source 1..21: mol_type = other DNA
ttggatcaggcgaagcctaat

SEQ ID NO: 19349 - DNA, 21 bp, synthetic construct
  misc_feature 1..21: note = Description of Artificial Sequence: Synthetic oligonucleotide
  source 1..21: mol_type = other DNA
gcgactgctaatacgggtggg

SEQ ID NO: 19350 - DNA, 21 bp, synthetic construct
  misc_feature 1..21: note = Description of Artificial Sequence: Synthetic oligonucleotide
  source 1..21: mol_type = other DNA
agcaccggcaaaagcctcggc

SEQ ID NO: 19351 - DNA, 21 bp, synthetic construct
  misc_feature 1..21: note = Description of Artificial Sequence: Synthetic oligonucleotide
  source 1..21: mol_type = other DNA
cacggcgtcagcacccccacc

SEQ ID NO: 19352 - DNA, 21 bp, synthetic construct
  misc_feature 1..21: note = Description of Artificial Sequence: Synthetic oligonucleotide
  source 1..21: mol_type = other DNA
tctaagggtgctagtcctcag

SEQ ID NO: 19353 - DNA, 21 bp, synthetic construct
  misc_feature 1..21: note = Description of Artificial Sequence: Synthetic oligonucleotide
  source 1..21: mol_type = other DNA
gaccccaccgaaagagccaga

SEQ ID NO: 19354 - DNA, 21 bp, synthetic construct
  misc_feature 1..21: note = Description of Artificial Sequence: Synthetic oligonucleotide
  source 1..21: mol_type = other DNA
acgcctaattcttctggtggt

SEQ ID NO: 19355 - DNA, 21 bp, synthetic construct
  misc_feature 1..21: note = Description of Artificial Sequence: Synthetic oligonucleotide
  source 1..21: mol_type = other DNA
accagcaacagcaaagtcaac

SEQ ID NO: 19356 - DNA, 21 bp, synthetic construct
  misc_feature 1..21: note = Description of Artificial Sequence: Synthetic oligonucleotide
  source 1..21: mol_type = other DNA
agccccggcgccagcaccgcc

SEQ ID NO: 19357 - DNA, 21 bp, synthetic construct
  misc_feature 1..21: note = Description of Artificial Sequence: Synthetic oligonucleotide
  source 1..21: mol_type = other DNA
gacaaagcccaaggcgtcaac

SEQ ID NO: 19358 - DNA, 21 bp, synthetic construct
  misc_feature 1..21: note = Description of Artificial Sequence: Synthetic oligonucleotide
  source 1..21: mol_type = other DNA
tctcgtactaaggaggggatg

SEQ ID NO: 19359 - DNA, 21 bp, synthetic construct
  misc_feature 1..21: note = Description of Artificial Sequence: Synthetic oligonucleotide
  source 1..21: mol_type = other DNA
agtccgtctaatggtgggcag

SEQ ID NO: 19360 - DNA, 21 bp, synthetic construct
  misc_feature 1..21: note = Description of Artificial Sequence: Synthetic oligonucleotide
  source 1..21: mol_type = other DNA
gcggtttctggggctagtggt

SEQ ID NO: 19361 - DNA, 21 bp, synthetic construct
  misc_feature 1..21: note = Description of Artificial Sequence: Synthetic oligonucleotide
  source 1..21: mol_type = other DNA
gggaaggagagtgataagtcg

SEQ ID NO: 19362 - DNA, 21 bp, synthetic construct
  misc_feature 1..21: note = Description of Artificial Sequence: Synthetic oligonucleotide
  source 1..21: mol_type = other DNA
tcgtcgaataagacgagtcag

SEQ ID NO: 19363 - DNA, 21 bp, synthetic construct
  misc_feature 1..21: note = Description of Artificial Sequence: Synthetic oligonucleotide
  source 1..21: mol_type = other DNA
ggcaaacaagaagccagagtc

SEQ ID NO: 19364 - DNA, 21 bp, synthetic construct
  misc_feature 1..21: note = Description of Artificial Sequence: Synthetic oligonucleotide
  source 1..21: mol_type = other DNA
accggcgaccccaaactcggc

SEQ ID NO: 19365 - DNA, 21 bp, synthetic construct
  misc_feature 1..21: note = Description of Artificial Sequence: Synthetic oligonucleotide
  source 1..21: mol_type = other DNA
agcagagtcagcagcgacaaa

SEQ ID NO: 19366 - DNA, 21 bp, synthetic construct
  misc_feature 1..21: note = Description of Artificial Sequence: Synthetic oligonucleotide
  source 1..21: mol_type = other DNA
tcgctgaatacgtcttcggct

SEQ ID NO: 19367 - DNA, 21 bp, synthetic construct
  misc_feature 1..21: note = Description of Artificial Sequence: Synthetic oligonucleotide
  source 1..21: mol_type = other DNA
aagactacgtctgggtcgcag

SEQ ID NO: 19368 - DNA, 21 bp, synthetic construct
  misc_feature 1..21: note = Description of Artificial Sequence: Synthetic oligonucleotide
  source 1..21: mol_type = other DNA
agtaatggtgcgcctactggt

SEQ ID NO: 19369 - DNA, 21 bp, synthetic construct
  misc_feature 1..21: note = Description of Artificial Sequence: Synthetic oligonucleotide
  source 1..21: mol_type = other DNA
ggtcttgatcagcagcgtagt

SEQ ID NO: 19370 - DNA, 21 bp, synthetic construct
  misc_feature 1..21: note = Description of Artificial Sequence: Synthetic oligonucleotide
  source 1..21: mol_type = other DNA
tctttgacgagtgttaataag

SEQ ID NO: 19371 - DNA, 21 bp, synthetic construct
  misc_feature 1..21: note = Description of Artificial Sequence: Synthetic oligonucleotide
  source 1..21: mol_type = other DNA
agcaccgccaccaacaacaac

SEQ ID NO: 19372 - DNA, 21 bp, synthetic construct
  misc_feature 1..21: note = Description of Artificial Sequence: Synthetic oligonucleotide
  source 1..21: mol_type = other DNA
tcggggcagactgctacgacg

SEQ ID NO: 19373 - DNA, 21 bp, synthetic construct
  misc_feature 1..21: note = Description of Artificial Sequence: Synthetic oligonucleotide
  source 1..21: mol_type = other DNA
agcgccgcccaaagcagagaa

SEQ ID NO: 19374 - DNA, 21 bp, synthetic construct
  misc_feature 1..21: note = Description of Artificial Sequence: Synthetic oligonucleotide
  source 1..21: mol_type = other DNA
tcgtctggtcctcctgtggct

SEQ ID NO: 19375 - DNA, 21 bp, synthetic construct
  misc_feature 1..21: note = Description of Artificial Sequence: Synthetic oligonucleotide
  source 1..21: mol_type = other DNA
agtgaggggaatccttctagg

SEQ ID NO: 19376 - DNA, 21 bp, synthetic construct
  misc_feature 1..21: note = Description of Artificial Sequence: Synthetic oligonucleotide
  source 1..21: mol_type = other DNA
agtggggcttcgggttctatg

SEQ ID NO: 19377 - DNA, 21 bp, synthetic construct
  misc_feature 1..21: note = Description of Artificial Sequence: Synthetic oligonucleotide
  source 1..21: mol_type = other DNA
gaaagcgccggcaaagccctc

SEQ ID NO: 19378 - DNA, 21 bp, synthetic construct
  misc_feature 1..21: note = Description of Artificial Sequence: Synthetic oligonucleotide
  source 1..21: mol_type = other DNA
gccggcgacggccacgtcaaa

SEQ ID NO: 19379 - DNA, 21 bp, synthetic construct
  misc_feature 1..21: note = Description of Artificial Sequence: Synthetic oligonucleotide
  source 1..21: mol_type = other DNA
ggcagcaaagaaggcaacggc

SEQ ID NO: 19380 - DNA, 21 bp, synthetic construct
  misc_feature 1..21: note = Description of Artificial Sequence: Synthetic oligonucleotide
  source 1..21: mol_type = other DNA
gtcagcgaaagcggcaccacc

SEQ ID NO: 19381 - DNA, 21 bp, synthetic construct
  misc_feature 1..21: note = Description of Artificial Sequence: Synthetic oligonucleotide
  source 1..21: mol_type = other DNA
gcttctgataaggtttctgct

SEQ ID NO: 19382 - DNA, 21 bp, synthetic construct
  misc_feature 1..21: note = Description of Artificial Sequence: Synthetic oligonucleotide
  source 1..21: mol_type = other DNA
atgagcggcaccggcggcagc

SEQ ID NO: 19383 - DNA, 21 bp, synthetic construct
  misc_feature 1..21: note = Description of Artificial Sequence: Synthetic oligonucleotide
  source 1..21: mol_type = other DNA
aacagcgtcccccacaccagc

SEQ ID NO: 19384 - DNA, 21 bp, synthetic construct
  misc_feature 1..21: note = Description of Artificial Sequence: Synthetic oligonucleotide
  source 1..21: mol_type = other DNA
agcatcagcaaacccggcacc

SEQ ID NO: 19385 - DNA, 21 bp, synthetic construct
  misc_feature 1..21: note = Description of Artificial Sequence: Synthetic oligonucleotide
  source 1..21: mol_type = other DNA
gacaccctcaacagcaaaaac

SEQ ID NO: 19386 - DNA, 21 bp, synthetic construct
  misc_feature 1..21: note = Description of Artificial Sequence: Synthetic oligonucleotide
  source 1..21: mol_type = other DNA
gccgccgccggccccaacggc

SEQ ID NO: 19387 - DNA, 21 bp, synthetic construct
  misc_feature 1..21: note = Description of Artificial Sequence: Synthetic oligonucleotide
  source 1..21: mol_type = other DNA
actggttcgcctgctcctagt

SEQ ID NO: 19388 - DNA, 21 bp, synthetic construct
  misc_feature 1..21: note = Description of Artificial Sequence: Synthetic oligonucleotide
  source 1..21: mol_type = other DNA
accagaaaccccaccagcacc

SEQ ID NO: 19389 - DNA, 21 bp, synthetic construct
  misc_feature 1..21: note = Description of Artificial Sequence: Synthetic oligonucleotide
  source 1..21: mol_type = other DNA
accagcggcaccgccgccatg

SEQ ID NO: 19390 - DNA, 21 bp, synthetic construct
  misc_feature 1..21: note = Description of Artificial Sequence: Synthetic oligonucleotide
  source 1..21: mol_type = other DNA
agcaccagcagcagcagcaaa

SEQ ID NO: 19391 - DNA, 21 bp, synthetic construct
  misc_feature 1..21: note = Description of Artificial Sequence: Synthetic oligonucleotide
  source 1..21: mol_type = other DNA
agcagcggcacccccagaacc

SEQ ID NO: 19392 - DNA, 21 bp, synthetic construct
  misc_feature 1..21: note = Description of Artificial Sequence: Synthetic oligonucleotide
  source 1..21: mol_type = other DNA
gaaatgcaaaccagcaacaaa

SEQ ID NO: 19393 - DNA, 21 bp, synthetic construct
  misc_feature 1..21: note = Description of Artificial Sequence: Synthetic oligonucleotide
  source 1..21: mol_type = other DNA
tctgctgggcatgcgtcgtct

SEQ ID NO: 19394 - DNA, 21 bp, synthetic construct
  misc_feature 1..21: note = Description of Artificial Sequence: Synthetic oligonucleotide
  source 1..21: mol_type = other DNA
caagccggcgtcagcaacgtc

SEQ ID NO: 19395 - DNA, 21 bp, synthetic construct
  misc_feature 1..21: note = Description of Artificial Sequence: Synthetic oligonucleotide
  source 1..21: mol_type = other DNA
cacggcagcggccaagccacc

SEQ ID NO: 19396 - DNA, 21 bp, synthetic construct
  misc_feature 1..21: note = Description of Artificial Sequence: Synthetic oligonucleotide
  source 1..21: mol_type = other DNA
cagcagtctaatagtggtact

SEQ ID NO: 19397 - DNA, 21 bp, synthetic construct
  misc_feature 1..21: note = Description of Artificial Sequence: Synthetic oligonucleotide
  source 1..21: mol_type = other DNA
ggcgtcgtcagcaaaagcgtc

SEQ ID NO: 19398 - DNA, 21 bp, synthetic construct
  misc_feature 1..21: note = Description of Artificial Sequence: Synthetic oligonucleotide
  source 1..21: mol_type = other DNA
gttccttctggtagtccgcat

SEQ ID NO: 19399 - DNA, 21 bp, synthetic construct
  misc_feature 1..21: note = Description of Artificial Sequence: Synthetic oligonucleotide
  source 1..21: mol_type = other DNA
gagactgttaataagggtacg

SEQ ID NO: 19400 - DNA, 21 bp, synthetic construct
  misc_feature 1..21: note = Description of Artificial Sequence: Synthetic oligonucleotide
  source 1..21: mol_type = other DNA
acccccagcggcagcggccaa

SEQ ID NO: 19401 - DNA, 21 bp, synthetic construct
  misc_feature 1..21: note = Description of Artificial Sequence: Synthetic oligonucleotide
  source 1..21: mol_type = other DNA
agcggcggcgacagcttcaaa

SEQ ID NO: 19402 - DNA, 21 bp, synthetic construct
  misc_feature 1..21: note = Description of Artificial Sequence: Synthetic oligonucleotide
  source 1..21: mol_type = other DNA
aatggtgtttcgaaggttgtt

SEQ ID NO: 19403 - DNA, 21 bp, synthetic construct
  misc_feature 1..21: note = Description of Artificial Sequence: Synthetic oligonucleotide
  source 1..21: mol_type = other DNA
catggggattctcagaggact

SEQ ID NO: 19404 - DNA, 21 bp, synthetic construct
  misc_feature 1..21: note = Description of Artificial Sequence: Synthetic oligonucleotide
  source 1..21: mol_type = other DNA
agcagcagcaaaagcaccctc

SEQ ID NO: 19405 - DNA, 21 bp, synthetic construct
  misc_feature 1..21: note = Description of Artificial Sequence: Synthetic oligonucleotide
  source 1..21: mol_type = other DNA
actcgtaatgggagtgtgggg

SEQ ID NO: 19406 - DNA, 21 bp, synthetic construct
  misc_feature 1..21: note = Description of Artificial Sequence: Synthetic oligonucleotide
  source 1..21: mol_type = other DNA
ggcagcgccgtccccgccgcc

SEQ ID NO: 19407 - DNA, 21 bp, synthetic construct
  misc_feature 1..21: note = Description of Artificial Sequence: Synthetic oligonucleotide
  source 1..21: mol_type = other DNA
agtgctaattcgaagtctacg

SEQ ID NO: 19408 - DNA, 21 bp, synthetic construct
  misc_feature 1..21: note = Description of Artificial Sequence: Synthetic oligonucleotide
  source 1..21: mol_type = other DNA
gaacaaaacgccggccccaaa

SEQ ID NO: 19409 - DNA, 21 bp, synthetic construct
  misc_feature 1..21: note = Description of Artificial Sequence: Synthetic oligonucleotide
  source 1..21: mol_type = other DNA
acttctacggctagtactggg

SEQ ID NO: 19410 - DNA, 21 bp, synthetic construct
  misc_feature 1..21: note = Description of Artificial Sequence: Synthetic oligonucleotide
  source 1..21: mol_type = other DNA
acttctgggagtcatggtgct

SEQ ID NO: 19411 - DNA, 21 bp, synthetic construct
  misc_feature 1..21: note = Description of Artificial Sequence: Synthetic oligonucleotide
  source 1..21: mol_type = other DNA
ctcgccgccggcaaagccggc

SEQ ID NO: 19412 - DNA, 21 bp, synthetic construct
  misc_feature 1..21: note = Description of Artificial Sequence: Synthetic oligonucleotide
  source 1..21: mol_type = other DNA
gatgggtctggtagtgttcag

SEQ ID NO: 19413 - DNA, 21 bp, synthetic construct
  misc_feature 1..21: note = Description of Artificial Sequence: Synthetic oligonucleotide
  source 1..21: mol_type = other DNA
gccgccaaagacggcaaagcc

SEQ ID NO: 19414 - DNA, 21 bp, synthetic construct
  misc_feature 1..21: note = Description of Artificial Sequence: Synthetic oligonucleotide
  source 1..21: mol_type = other DNA
gccggcaccagcaacgaaaaa

SEQ ID NO: 19415 - DNA, 21 bp, synthetic construct
  misc_feature 1..21: note = Description of Artificial Sequence: Synthetic oligonucleotide
  source 1..21: mol_type = other DNA
gcgggtaattctggtcttagt

SEQ ID NO: 19416 - DNA, 21 bp, synthetic construct
  misc_feature 1..21: note = Description of Artificial Sequence: Synthetic oligonucleotide
  source 1..21: mol_type = other DNA
ggcaacgccgaaaaacccagc

SEQ ID NO: 19417 - DNA, 21 bp, synthetic construct
  misc_feature 1..21: note = Description of Artificial Sequence: Synthetic oligonucleotide
  source 1..21: mol_type = other DNA
ggtaggcagggttctacgaat

SEQ ID NO: 19418 - DNA, 21 bp, synthetic construct
  misc_feature 1..21: note = Description of Artificial Sequence: Synthetic oligonucleotide
  source 1..21: mol_type = other DNA
ttcaccagcggcacccccacc

SEQ ID NO: 19419 - DNA, 21 bp, synthetic construct
  misc_feature 1..21: note = Description of Artificial Sequence: Synthetic oligonucleotide
  source 1..21: mol_type = other DNA
atgcagcctagtcagaagggg

SEQ ID NO: 19420 - DNA, 21 bp, synthetic construct
  misc_feature 1..21: note = Description of Artificial Sequence: Synthetic oligonucleotide
  source 1..21: mol_type = other DNA
tctggtactaagactcagaat

SEQ ID NO: 19421 - DNA, 21 bp, synthetic construct
  misc_feature 1..21: note = Description of Artificial Sequence: Synthetic oligonucleotide
  source 1..21: mol_type = other DNA
gaggttcatcagggtaagggt

SEQ ID NO: 19422 - DNA, 21 bp, synthetic construct
  misc_feature 1..21: note = Description of Artificial Sequence: Synthetic oligonucleotide
  source 1..21: mol_type = other DNA
gccaacgccagccacagcacc

SEQ ID NO: 19423 - DNA, 21 bp, synthetic construct
  misc_feature 1..21: note = Description of Artificial Sequence: Synthetic oligonucleotide
  source 1..21: mol_type = other DNA
ggcaaaagcgacaccagaagc

SEQ ID NO: 19424 - DNA, 21 bp, synthetic construct
  misc_feature 1..21: note = Description of Artificial Sequence: Synthetic oligonucleotide
  source 1..21: mol_type = other DNA
ttgagtgcgagttctactggt

SEQ ID NO: 19425 - DNA, 21 bp, synthetic construct
  misc_feature 1..21: note = Description of Artificial Sequence: Synthetic oligonucleotide
  source 1..21: mol_type = other DNA
acggggagttcgcatcttgtg

SEQ ID NO: 19426 - DNA, 21 bp, synthetic construct
  misc_feature 1..21: note = Description of Artificial Sequence: Synthetic oligonucleotide
  source 1..21: mol_type = other DNA
agtcctaatgggaatcatcag

SEQ ID NO: 19427 - DNA, 21 bp, synthetic construct
  misc_feature 1..21: note = Description of Artificial Sequence: Synthetic oligonucleotide
  source 1..21: mol_type = other DNA
gaacaaatcaacagcaaagcc

SEQ ID NO: 19428 - DNA, 21 bp, synthetic construct
  misc_feature 1..21: note = Description of Artificial Sequence: Synthetic oligonucleotide
  source 1..21: mol_type = other DNA
caaggcacccccaccaacggc

SEQ ID NO: 19429 - DNA, 21 bp, synthetic construct
  misc_feature 1..21: note = Description of Artificial Sequence: Synthetic oligonucleotide
  source 1..21: mol_type = other DNA
cagggggtttcgagtcataat

SEQ ID NO: 19430 - DNA, 21 bp, synthetic construct
  misc_feature 1..21: note = Description of Artificial Sequence: Synthetic oligonucleotide
  source 1..21: mol_type = other DNA
ctcagcggcgaaagagccgcc

SEQ ID NO: 19431 - DNA, 21 bp, synthetic construct
  misc_feature 1..21: note = Description of Artificial Sequence: Synthetic oligonucleotide
  source 1..21: mol_type = other DNA
ggtgctgtggataggagtggg

SEQ ID NO: 19432 - DNA, 21 bp, synthetic construct
  misc_feature 1..21: note = Description of Artificial Sequence: Synthetic oligonucleotide
  source 1..21: mol_type = other DNA
tctcgggatcctgctggtggt

SEQ ID NO: 19433 - DNA, 21 bp, synthetic construct
  misc_feature 1..21: note = Description of Artificial Sequence: Synthetic oligonucleotide
  source 1..21: mol_type = other DNA
agccaaagcaacaccagcgtc

SEQ ID NO: 19434 - DNA, 21 bp, synthetic construct
  misc_feature 1..21: note = Description of Artificial Sequence: Synthetic oligonucleotide
  source 1..21: mol_type = other DNA
agcggcagagacaaactcaac

SEQ ID NO: 19435 - DNA, 21 bp, synthetic construct
  misc_feature 1..21: note = Description of Artificial Sequence: Synthetic oligonucleotide
  source 1..21: mol_type = other DNA
catgttgataagtcgggtatg

SEQ ID NO: 19436 - DNA, 21 bp, synthetic construct
  misc_feature 1..21: note = Description of Artificial Sequence: Synthetic oligonucleotide
  source 1..21: mol_type = other DNA
gagggtagtacgtcgaagcat

SEQ ID NO: 19437 - DNA, 21 bp, synthetic construct
  misc_feature 1..21: note = Description of Artificial Sequence: Synthetic oligonucleotide
  source 1..21: mol_type = other DNA
aatccgagtccttctgtgaag

SEQ ID NO: 19438 - DNA, 21 bp, synthetic construct
  misc_feature 1..21: note = Description of Artificial Sequence: Synthetic oligonucleotide
  source 1..21: mol_type = other DNA
caacccagcaacgccgccagc

SEQ ID NO: 19439 - DNA, 21 bp, synthetic construct
  misc_feature 1..21: note = Description of Artificial Sequence: Synthetic oligonucleotide
  source 1..21: mol_type = other DNA
atgagcaacagccccagcagc

SEQ ID NO: 19440 - DNA, 21 bp, synthetic construct
  misc_feature 1..21: note = Description of Artificial Sequence: Synthetic oligonucleotide
  source 1..21: mol_type = other DNA
ctgggcggtaatgaggcgagg

SEQ ID NO: 19441 - DNA, 21 bp, synthetic construct
  misc_feature 1..21: note = Description of Artificial Sequence: Synthetic oligonucleotide
  source 1..21: mol_type = other DNA
gagcagtcgaagcatgcgagt

SEQ ID NO: 19442 - DNA, 21 bp, synthetic construct
  misc_feature 1..21: note = Description of Artificial Sequence: Synthetic oligonucleotide
  source 1..21: mol_type = other DNA
accagcagcgccaccagcatc

SEQ ID NO: 19443 - DNA, 21 bp, synthetic construct
  misc_feature 1..21: note = Description of Artificial Sequence: Synthetic oligonucleotide
  source 1..21: mol_type = other DNA
gatgagggtcggagtcatacg

SEQ ID NO: 19444 - DNA, 21 bp, synthetic construct
  misc_feature 1..21: note = Description of Artificial Sequence: Synthetic oligonucleotide
  source 1..21: mol_type = other DNA
gatggtacgcggactagtggg

SEQ ID NO: 19445 - DNA, 21 bp, synthetic construct
  misc_feature 1..21: note = Description of Artificial Sequence: Synthetic oligonucleotide
  source 1..21: mol_type = other DNA
gccgccgacagaagcagcagc

SEQ ID NO: 19446 - DNA, 21 bp, synthetic construct
  misc_feature 1..21: note = Description of Artificial Sequence: Synthetic oligonucleotide
  source 1..21: mol_type = other DNA
agccaacccagcggcggcggc

SEQ ID NO: 19447 - DNA, 21 bp, synthetic construct
  misc_feature 1..21: note = Description of Artificial Sequence: Synthetic oligonucleotide
  source 1..21: mol_type = other DNA
ctcagaagcagcgaaaaaggc

SEQ ID NO: 19448 - DNA, 21 bp, synthetic construct
  misc_feature 1..21: note = Description of Artificial Sequence: Synthetic oligonucleotide
  source 1..21: mol_type = other DNA
gagggtggtgctaatagtcgt

SEQ ID NO: 19449 - DNA, 21 bp, synthetic construct
  misc_feature 1..21: note = Description of Artificial Sequence: Synthetic oligonucleotide
  source 1..21: mol_type = other DNA
tcttctgcgcagggttcgggt

SEQ ID NO: 19450 - DNA, 21 bp, synthetic construct
  misc_feature 1..21: note = Description of Artificial Sequence: Synthetic oligonucleotide
  source 1..21: mol_type = other DNA
acggaggttagtaaggttcag

SEQ ID NO: 19451 - DNA, 21 bp, synthetic construct
  misc_feature 1..21: note = Description of Artificial Sequence: Synthetic oligonucleotide
  source 1..21: mol_type = other DNA
aacaccggcaaagacaacccc

SEQ ID NO: 19452 - DNA, 21 bp, synthetic construct
  misc_feature 1..21: note = Description of Artificial Sequence: Synthetic oligonucleotide
  source 1..21: mol_type = other DNA
aaggctcagaatgctccgcag

SEQ ID NO: 19453 - DNA, 21 bp, synthetic construct
  misc_feature 1..21: note = Description of Artificial Sequence: Synthetic oligonucleotide
  source 1..21: mol_type = other DNA
atgggtccggagaggcctcag

SEQ ID NO: 19454 - DNA, 21 bp, synthetic construct
  misc_feature 1..21: note = Description of Artificial Sequence: Synthetic oligonucleotide
  source 1..21: mol_type = other DNA
gagagtggtaagacttcttct

SEQ ID NO: 19455 - DNA, 21 bp, synthetic construct
  misc_feature 1..21: note = Description of Artificial Sequence: Synthetic oligonucleotide
  source 1..21: mol_type = other DNA
cagcctactaaggagcatcat

SEQ ID NO: 19456 - DNA, 21 bp, synthetic construct
  misc_feature 1..21: note = Description of Artificial Sequence: Synthetic oligonucleotide
  source 1..21: mol_type = other DNA
tctcctcctaatggtggggtg

SEQ ID NO: 19457 - DNA, 21 bp, synthetic construct
  misc_feature 1..21: note = Description of Artificial Sequence: Synthetic oligonucleotide
  source 1..21: mol_type = other DNA
gattctgcgactcgttctggg

SEQ ID NO: 19458 - DNA, 21 bp, synthetic construct
  misc_feature 1..21: note = Description of Artificial Sequence: Synthetic oligonucleotide
  source 1..21: mol_type = other DNA
acggatggtcctaggtctaat

SEQ ID NO: 19459 - DNA, 21 bp, synthetic construct
  misc_feature 1..21: note = Description of Artificial Sequence: Synthetic oligonucleotide
  source 1..21: mol_type = other DNA
aatcgtttggagaaggagtcg

SEQ ID NO: 19460 - DNA, 21 bp, synthetic construct
  misc_feature 1..21: note = Description of Artificial Sequence: Synthetic oligonucleotide
  source 1..21: mol_type = other DNA
gaagccaccagcagcggcacc

SEQ ID NO: 19461 - DNA, 21 bp, synthetic construct
  misc_feature 1..21: note = Description of Artificial Sequence: Synthetic oligonucleotide
  source 1..21: mol_type = other DNA
ggcaaagaccccaacagcgcc

SEQ ID NO: 19462 - DNA, 21 bp, synthetic construct
  misc_feature 1..21: note = Description of Artificial Sequence: Synthetic oligonucleotide
  source 1..21: mol_type = other DNA
aacagagacaaaagcatggcc

SEQ ID NO: 19463 - DNA, 21 bp, synthetic construct
  misc_feature 1..21: note = Description of Artificial Sequence: Synthetic oligonucleotide
  source 1..21: mol_type = other DNA
acgccttcgaattctactagt

SEQ ID NO: 19464 - DNA, 21 bp, synthetic construct
  misc_feature 1..21: note = Description of Artificial Sequence: Synthetic oligonucleotide
  source 1..21: mol_type = other DNA
ggcagagtcgccgaagaaaaa

SEQ ID NO: 19465 - DNA, 21 bp, synthetic construct
  misc_feature 1..21: note = Description of Artificial Sequence: Synthetic oligonucleotide
  source 1..21: mol_type = other DNA
ggcagcaccgacgccaaagtc

SEQ ID NO: 19466 - DNA, 21 bp, synthetic construct
  misc_feature 1..21: note = Description of Artificial Sequence: Synthetic oligonucleotide
  source 1..21: mol_type = other DNA
tgcggcagcagcagctgcagc

SEQ ID NO: 19467 - DNA, 21 bp, synthetic construct
  misc_feature 1..21: note = Description of Artificial Sequence: Synthetic oligonucleotide
  source 1..21: mol_type = other DNA
ttcaaacaagcccaaaccgcc

SEQ ID NO: 19468 - DNA, 21 bp, synthetic construct
  misc_feature 1..21: note = Description of Artificial Sequence: Synthetic oligonucleotide
  source 1..21: mol_type = other DNA
gataggcctccgtctaaggat

SEQ ID NO: 19469 - DNA, 21 bp, synthetic construct
  misc_feature 1..21: note = Description of Artificial Sequence: Synthetic oligonucleotide
  source 1..21: mol_type = other DNA
gtgggggggactactacggcg

SEQ ID NO: 19470 - DNA, 21 bp, synthetic construct
  misc_feature 1..21: note = Description of Artificial Sequence: Synthetic oligonucleotide
  source 1..21: mol_type = other DNA
agtggtgagtcgcggcctaag

SEQ ID NO: 19471 - DNA, 21 bp, synthetic construct
  misc_feature 1..21: note = Description of Artificial Sequence: Synthetic oligonucleotide
  source 1..21: mol_type = other DNA
agcagcggccccagcagcagc

SEQ ID NO: 19472 - DNA, 21 bp, synthetic construct
  misc_feature 1..21: note = Description of Artificial Sequence: Synthetic oligonucleotide
  source 1..21: mol_type = other DNA
tctcatacgaatagtccgtcg

SEQ ID NO: 19473 - DNA, 21 bp, synthetic construct
  misc_feature 1..21: note = Description of Artificial Sequence: Synthetic oligonucleotide
  source 1..21: mol_type = other DNA
acggttgggcattcgaatcag

SEQ ID NO: 19474 - DNA, 21 bp, synthetic construct
  misc_feature 1..21: note = Description of Artificial Sequence: Synthetic oligonucleotide
  source 1..21: mol_type = other DNA
aaaggcaccagcaccagcctc

SEQ ID NO: 19475 - DNA, 21 bp, synthetic construct
  misc_feature 1..21: note = Description of Artificial Sequence: Synthetic oligonucleotide
  source 1..21: mol_type = other DNA
acccacaccagcgcccccgtc

SEQ ID NO: 19476 - DNA, 21 bp, synthetic construct
  misc_feature 1..21: note = Description of Artificial Sequence: Synthetic oligonucleotide
  source 1..21: mol_type = other DNA
agtaaggataatgcgactttg

SEQ ID NO: 19477 - DNA, 21 bp, synthetic construct
  misc_feature 1..21: note = Description of Artificial Sequence: Synthetic oligonucleotide
  source 1..21: mol_type = other DNA
atcagcgaaagccccaacaga

SEQ ID NO: 19478 - DNA, 21 bp, synthetic construct
  misc_feature 1..21: note = Description of Artificial Sequence: Synthetic oligonucleotide
  source 1..21: mol_type = other DNA
caaagagccaccaacagcatc

SEQ ID NO: 19479 - DNA, 21 bp, synthetic construct
  misc_feature 1..21: note = Description of Artificial Sequence: Synthetic oligonucleotide
  source 1..21: mol_type = other DNA
ctcaaaagcagccccaccgtc

SEQ ID NO: 19480 - DNA, 21 bp, synthetic construct
  misc_feature 1..21: note = Description of Artificial Sequence: Synthetic oligonucleotide
  source 1..21: mol_type = other DNA
gacggccacggcgccgtcagc

SEQ ID NO: 19481 - DNA, 21 bp, synthetic construct
  misc_feature 1..21: note = Description of Artificial Sequence: Synthetic oligonucleotide
  source 1..21: mol_type = other DNA
ggcggcacccaaagcgccaaa

SEQ ID NO: 19482 - DNA, 21 bp, synthetic construct
  misc_feature 1..21: note = Description of Artificial Sequence: Synthetic oligonucleotide
  source 1..21: mol_type = other DNA
gtgcggacggctaataataat

SEQ ID NO: 19483 - DNA, 21 bp, synthetic construct
  misc_feature 1..21: note = Description of Artificial Sequence: Synthetic oligonucleotide
  source 1..21: mol_type = other DNA
actcctacggtgtctccgggt

SEQ ID NO: 19484 - DNA, 21 bp, synthetic construct
  misc_feature 1..21: note = Description of Artificial Sequence: Synthetic oligonucleotide
  source 1..21: mol_type = other DNA
agtattgggacgtcgtctggt

SEQ ID NO: 19485 - DNA, 21 bp, synthetic construct
  misc_feature 1..21: note = Description of Artificial Sequence: Synthetic oligonucleotide
  source 1..21: mol_type = other DNA
catgggacgacgacgactacg

SEQ ID NO: 19486 - DNA, 21 bp, synthetic construct
  misc_feature 1..21: note = Description of Artificial Sequence: Synthetic oligonucleotide
  source 1..21: mol_type = other DNA
gctccgactgagtcttctaag

SEQ ID NO: 19487 - DNA, 21 bp, synthetic construct
  misc_feature 1..21: note = Description of Artificial Sequence: Synthetic oligonucleotide
  source 1..21: mol_type = other DNA
aagcttagtgataagtcgctg

SEQ ID NO: 19488 - DNA, 21 bp, synthetic construct
  misc_feature 1..21: note = Description of Artificial Sequence: Synthetic oligonucleotide
  source 1..21: mol_type = other DNA
gccaacggcgaagccaacaga

SEQ ID NO: 19489 - DNA, 21 bp, synthetic construct
  misc_feature 1..21: note = Description of Artificial Sequence: Synthetic oligonucleotide
  source 1..21: mol_type = other DNA
gacaacgtcaaccccgccaga

SEQ ID NO: 19490 - DNA, 21 bp, synthetic construct
  misc_feature 1..21: note = Description of Artificial Sequence: Synthetic oligonucleotide
  source 1..21: mol_type = other DNA
gggagggagcggcctagtgag

SEQ ID NO: 19491 - DNA, 21 bp, synthetic construct
  misc_feature 1..21: note = Description of Artificial Sequence: Synthetic oligonucleotide
  source 1..21: mol_type = other DNA
ggtaatagtgataagtcgagt

SEQ ID NO: 19492 - DNA, 21 bp, synthetic construct
  misc_feature 1..21: note = Description of Artificial Sequence: Synthetic oligonucleotide
  source 1..21: mol_type = other DNA
gtcaccaccggcggcaccagc

SEQ ID NO: 19493 - DNA, 21 bp, synthetic construct
  misc_feature 1..21: note = Description of Artificial Sequence: Synthetic oligonucleotide
  source 1..21: mol_type = other DNA
gagtctacgggtagtcgtgct

SEQ ID NO: 19494 - DNA, 21 bp, synthetic construct
  misc_feature 1..21: note = Description of Artificial Sequence: Synthetic oligonucleotide
  source 1..21: mol_type = other DNA
ggtccttcgactaatgagaag

SEQ ID NO: 19495 - DNA, 21 bp, synthetic construct
  misc_feature 1..21: note = Description of Artificial Sequence: Synthetic oligonucleotide
  source 1..21: mol_type = other DNA
caagacaccaaaaccgccaac

SEQ ID NO: 19496 - DNA, 21 bp, synthetic construct
  misc_feature 1..21: note = Description of Artificial Sequence: Synthetic oligonucleotide
  source 1..21: mol_type = other DNA
cgggagaatgggaagtcgatt

SEQ ID NO: 19497 - DNA, 21 bp, synthetic construct
  misc_feature 1..21: note = Description of Artificial Sequence: Synthetic oligonucleotide
  source 1..21: mol_type = other DNA
gacggcaacagacccaacggc

SEQ ID NO: 19498 - DNA, 21 bp, synthetic construct
  misc_feature 1..21: note = Description of Artificial Sequence: Synthetic oligonucleotide
  source 1..21: mol_type = other DNA
gctggtgataatactcgggct

SEQ ID NO: 19499 - DNA, 21 bp, synthetic construct
  misc_feature 1..21: note = Description of Artificial Sequence: Synthetic oligonucleotide
  source 1..21: mol_type = other DNA
tcgacttcggcgactagtagt

SEQ ID NO: 19500 - DNA, 21 bp, synthetic construct
  misc_feature 1..21: note = Description of Artificial Sequence: Synthetic oligonucleotide
  source 1..21: mol_type = other DNA
caacaagccagcagcaccagc

SEQ ID NO: 19501 - DNA, 21 bp, synthetic construct
  misc_feature 1..21: note = Description of Artificial Sequence: Synthetic oligonucleotide
  source 1..21: mol_type = other DNA
agtggtaatcagagtctgaat

SEQ ID NO: 19502 - DNA, 21 bp, synthetic construct
  misc_feature 1..21: note = Description of Artificial Sequence: Synthetic oligonucleotide
  source 1..21: mol_type = other DNA
actgttcatgataaggggaat

SEQ ID NO: 19503 - DNA, 21 bp, synthetic construct
  misc_feature 1..21: note = Description of Artificial Sequence: Synthetic oligonucleotide
  source 1..21: mol_type = other DNA
agcgacggcagaggcagcggc

SEQ ID NO: 19504 - DNA, 21 bp, synthetic construct
  misc_feature 1..21: note = Description of Artificial Sequence: Synthetic oligonucleotide
  source 1..21: mol_type = other DNA
agcggcagcaccacccccatg

SEQ ID NO: 19505 - DNA, 21 bp, synthetic construct
  misc_feature 1..21: note = Description of Artificial Sequence: Synthetic oligonucleotide
  source 1..21: mol_type = other DNA
gacacccaaggcagaaaagac

SEQ ID NO: 19506 - DNA, 21 bp, synthetic construct
  misc_feature 1..21: note = Description of Artificial Sequence: Synthetic oligonucleotide
  source 1..21: mol_type = other DNA
ggcagcgacaaaggcagagac

SEQ ID NO: 19507 - DNA, 21 bp, synthetic construct
  misc_feature 1..21: note = Description of Artificial Sequence: Synthetic oligonucleotide
  source 1..21: mol_type = other DNA
caggggtctactcctcagctt

SEQ ID NO: 19508 - DNA, 21 bp, synthetic construct
  misc_feature 1..21: note = Description of Artificial Sequence: Synthetic oligonucleotide
  source 1..21: mol_type = other DNA
agtagtgataagactgggagg

SEQ ID NO: 19509 - DNA, 21 bp, synthetic construct
  misc_feature 1..21: note = Description of Artificial Sequence: Synthetic oligonucleotide
  source 1..21: mol_type = other DNA
aacaccagcagcaccagcggc

SEQ ID NO: 19510 - DNA, 21 bp, synthetic construct
  misc_feature 1..21: note = Description of Artificial Sequence: Synthetic oligonucleotide
  source 1..21: mol_type = other DNA
cacgccaaaggcgccggcgac

SEQ ID NO: 19511 - DNA, 21 bp, synthetic construct
  misc_feature 1..21: note = Description of Artificial Sequence: Synthetic oligonucleotide
  source 1..21: mol_type = other DNA
ggcagagacgacaaagtcggc

SEQ ID NO: 19512 - DNA, 21 bp, synthetic construct
  misc_feature 1..21: note = Description of Artificial Sequence: Synthetic oligonucleotide
  source 1..21: mol_type = other DNA
tcgctgggtgcggggagtggt

SEQ ID NO: 19513 - DNA, 21 bp, synthetic construct
  misc_feature 1..21: note = Description of Artificial Sequence: Synthetic oligonucleotide
  source 1..21: mol_type = other DNA
actcgtcagggggcgcctgtt

SEQ ID NO: 19514 - DNA, 21 bp, synthetic construct
  misc_feature 1..21: note = Description of Artificial Sequence: Synthetic oligonucleotide
  source 1..21: mol_type = other DNA
gacagaaaccccagcagccac

SEQ ID NO: 19515 - DNA, 21 bp, synthetic construct
  misc_feature 1..21: note = Description of Artificial Sequence: Synthetic oligonucleotide
  source 1..21: mol_type = other DNA
catacggataagaatgctggg

SEQ ID NO: 19516 - DNA, 21 bp, synthetic construct
  misc_feature 1..21: note = Description of Artificial Sequence: Synthetic oligonucleotide
  source 1..21: mol_type = other DNA
agtggtactaatactatgacg

SEQ ID NO: 19517 - DNA, 21 bp, synthetic construct
  misc_feature 1..21: note = Description of Artificial Sequence: Synthetic oligonucleotide
  source 1..21: mol_type = other DNA
catcagacgggggcggggtcg

SEQ ID NO: 19518 - DNA, 21 bp, synthetic construct
  misc_feature 1..21: note = Description of Artificial Sequence: Synthetic oligonucleotide
  source 1..21: mol_type = other DNA
agcggcagcgccaacaccaga

SEQ ID NO: 19519 - DNA, 21 bp, synthetic construct
  misc_feature 1..21: note = Description of Artificial Sequence: Synthetic oligonucleotide
  source 1..21: mol_type = other DNA
ggcgacagaagcaaagccaac

SEQ ID NO: 19520 - DNA, 21 bp, synthetic construct
  misc_feature 1..21: note = Description of Artificial Sequence: Synthetic oligonucleotide
  source 1..21: mol_type = other DNA
gggaagggtaatgcgtctgcg

SEQ ID NO: 19521 - DNA, 21 bp, synthetic construct
  misc_feature 1..21: note = Description of Artificial Sequence: Synthetic oligonucleotide
  source 1..21: mol_type = other DNA
agtggttcttcttcggttgtg

SEQ ID NO: 19522 - DNA, 21 bp, synthetic construct
  misc_feature 1..21: note = Description of Artificial Sequence: Synthetic oligonucleotide
  source 1..21: mol_type = other DNA
gaacccagcagaagcagcgtc

SEQ ID NO: 19523 - DNA, 21 bp, synthetic construct
  misc_feature 1..21: note = Description of Artificial Sequence: Synthetic oligonucleotide
  source 1..21: mol_type = other DNA
cgtgataagggtcagtcttcg

SEQ ID NO: 19524 - DNA, 21 bp, synthetic construct
  misc_feature 1..21: note = Description of Artificial Sequence: Synthetic oligonucleotide
  source 1..21: mol_type = other DNA
gttggtggtagttctcctact

SEQ ID NO: 19525 - DNA, 21 bp, synthetic construct
  misc_feature 1..21: note = Description of Artificial Sequence: Synthetic oligonucleotide
  source 1..21: mol_type = other DNA
aacggcaccggcagcgcccaa

SEQ ID NO: 19526 - DNA, 21 bp, synthetic construct
  misc_feature 1..21: note = Description of Artificial Sequence: Synthetic oligonucleotide
  source 1..21: mol_type = other DNA
ggtacggggccgtcgcatgtt

SEQ ID NO: 19527 - DNA, 21 bp, synthetic construct
  misc_feature 1..21: note = Description of Artificial Sequence: Synthetic oligonucleotide
  source 1..21: mol_type = other DNA
gccggcagccccagccccaga

SEQ ID NO: 19528 - DNA, 21 bp, synthetic construct
  misc_feature 1..21: note = Description of Artificial Sequence: Synthetic oligonucleotide
  source 1..21: mol_type = other DNA
aatggggctgctaagcaggtg

SEQ ID NO: 19529 - DNA, 21 bp, synthetic construct
  misc_feature 1..21: note = Description of Artificial Sequence: Synthetic oligonucleotide
  source 1..21: mol_type = other DNA
acccccaacgccacccccaac

SEQ ID NO: 19530 - DNA, 21 bp, synthetic construct
  misc_feature 1..21: note = Description of Artificial Sequence: Synthetic oligonucleotide
  source 1..21: mol_type = other DNA
accgccaccagaagcgccggc

SEQ ID NO: 19531 - DNA, 21 bp, synthetic construct
  misc_feature 1..21: note = Description of Artificial Sequence: Synthetic oligonucleotide
  source 1..21: mol_type = other DNA
accgccggccaaaccagcctc

SEQ ID NO: 19532 - DNA, 21 bp, synthetic construct
  misc_feature 1..21: note = Description of Artificial Sequence: Synthetic oligonucleotide
  source 1..21: mol_type = other DNA
actactaatccttcttcgagt

SEQ ID NO: 19533 - DNA, 21 bp, synthetic construct
  misc_feature 1..21: note = Description of Artificial Sequence: Synthetic oligonucleotide
  source 1..21: mol_type = other DNA
agtatgaataatccgggtaag

SEQ ID NO: 19534 - DNA, 21 bp, synthetic construct
  misc_feature 1..21: note = Description of Artificial Sequence: Synthetic oligonucleotide
  source 1..21: mol_type = other DNA
atggtttcgaatccttctagt

SEQ ID NO: 19535 - DNA, 21 bp, synthetic construct
  misc_feature 1..21: note = Description of Artificial Sequence: Synthetic oligonucleotide
  source 1..21: mol_type = other DNA
cagcagggtggtgctattgct

SEQ ID NO: 19536 - DNA, 21 bp, synthetic construct
  misc_feature 1..21: note = Description of Artificial Sequence: Synthetic oligonucleotide
  source 1..21: mol_type = other DNA
cagtcggatggtacgcatagg

SEQ ID NO: 19537 - DNA, 21 bp, synthetic construct
  misc_feature 1..21: note = Description of Artificial Sequence: Synthetic oligonucleotide
  source 1..21: mol_type = other DNA
ctccaaggcgaaaacagcaaa

SEQ ID NO: 19538 - DNA, 21 bp, synthetic construct
  misc_feature 1..21: note = Description of Artificial Sequence: Synthetic oligonucleotide
  source 1..21: mol_type = other DNA
ctcggcgaaagaagcagcggc

SEQ ID NO: 19539 - DNA, 21 bp, synthetic construct
  misc_feature 1..21: note = Description of Artificial Sequence: Synthetic oligonucleotide
  source 1..21: mol_type = other DNA
gagggtagtggtgagaggcgt

SEQ ID NO: 19540 - DNA, 21 bp, synthetic construct
  misc_feature 1..21: note = Description of Artificial Sequence: Synthetic oligonucleotide
  source 1..21: mol_type = other DNA
ggcaccagcaacgccagcgcc

SEQ ID NO: 19541 - DNA, 21 bp, synthetic construct
  misc_feature 1..21: note = Description of Artificial Sequence: Synthetic oligonucleotide
  source 1..21: mol_type = other DNA
ggccacaccaaaatcagcggc

SEQ ID NO: 19542 - DNA, 21 bp, synthetic construct
  misc_feature 1..21: note = Description of Artificial Sequence: Synthetic oligonucleotide
  source 1..21: mol_type = other DNA
ggcgccctcggcaccgccggc

SEQ ID NO: 19543 - DNA, 21 bp, synthetic construct
  misc_feature 1..21: note = Description of Artificial Sequence: Synthetic oligonucleotide
  source 1..21: mol_type = other DNA
gttgcttctaaggggcctacg

SEQ ID NO: 19544 - DNA, 21 bp, synthetic construct
  misc_feature 1..21: note = Description of Artificial Sequence: Synthetic oligonucleotide
  source 1..21: mol_type = other DNA
accggcgcccaaaccgtcgcc

SEQ ID NO: 19545 - DNA, 21 bp, synthetic construct
  misc_feature 1..21: note = Description of Artificial Sequence: Synthetic oligonucleotide
  source 1..21: mol_type = other DNA
tgggggactacttcgccgtct

SEQ ID NO: 19546 - DNA, 21 bp, synthetic construct
  misc_feature 1..21: note = Description of Artificial Sequence: Synthetic oligonucleotide
  source 1..21: mol_type = other DNA
agcatcgccggcagcaccgcc

SEQ ID NO: 19547 - DNA, 21 bp, synthetic construct
  misc_feature 1..21: note = Description of Artificial Sequence: Synthetic oligonucleotide
  source 1..21: mol_type = other DNA
gacgtcaccgaaaaaagcaga

SEQ ID NO: 19548 - DNA, 21 bp, synthetic construct
  misc_feature 1..21: note = Description of Artificial Sequence: Synthetic oligonucleotide
  source 1..21: mol_type = other DNA
actattcatcagaagagtgat

SEQ ID NO: 19549 - DNA, 21 bp, synthetic construct
  misc_feature 1..21: note = Description of Artificial Sequence: Synthetic oligonucleotide
  source 1..21: mol_type = other DNA
agcaccgacggcagaaacacc

SEQ ID NO: 19550 - DNA, 21 bp, synthetic construct
  misc_feature 1..21: note = Description of Artificial Sequence: Synthetic oligonucleotide
  source 1..21: mol_type = other DNA
gggactgagcgtccgaatggt

SEQ ID NO: 19551 - DNA, 21 bp, synthetic construct
  misc_feature 1..21: note = Description of Artificial Sequence: Synthetic oligonucleotide
  source 1..21: mol_type = other DNA
accaacggcaacgtccccgtc

SEQ ID NO: 19552 - DNA, 21 bp, synthetic construct
  misc_feature 1..21: note = Description of Artificial Sequence: Synthetic oligonucleotide
  source 1..21: mol_type = other DNA
ggcggcggcagcagccaagcc

SEQ ID NO: 19553 - DNA, 21 bp, synthetic construct
  misc_feature 1..21: note = Description of Artificial Sequence: Synthetic oligonucleotide
  source 1..21: mol_type = other DNA
accggcagcggcgtcaacgtc

SEQ ID NO: 19554 - DNA, 21 bp, synthetic construct
  misc_feature 1..21: note = Description of Artificial Sequence: Synthetic oligonucleotide
  source 1..21: mol_type = other DNA
gccctcagcaaaggcagcggc

SEQ ID NO: 19555 - DNA, 21 bp, synthetic construct
  misc_feature 1..21: note = Description of Artificial Sequence: Synthetic oligonucleotide
  source 1..21: mol_type = other DNA
ggcaaaaccgacagcatgaga

SEQ ID NO: 19556 - DNA, 21 bp, synthetic construct
  misc_feature 1..21: note = Description of Artificial Sequence: Synthetic oligonucleotide
  source 1..21: mol_type = other DNA
ggcgtcgaaggcaccagaatc

SEQ ID NO: 19557 - DNA, 21 bp, synthetic construct
  misc_feature 1..21: note = Description of Artificial Sequence: Synthetic oligonucleotide
  source 1..21: mol_type = other DNA
tcgggttctgataaggctagg

SEQ ID NO: 19558 - DNA, 21 bp, synthetic construct
  misc_feature 1..21: note = Description of Artificial Sequence: Synthetic oligonucleotide
  source 1..21: mol_type = other DNA
aatgtttcgtcgtcgaatgtg

SEQ ID NO: 19559 - DNA, 21 bp, synthetic construct
  misc_feature 1..21: note = Description of Artificial Sequence: Synthetic oligonucleotide
  source 1..21: mol_type = other DNA
gggctgtctagtagtactggt

SEQ ID NO: 19560 - DNA, 21 bp, synthetic construct
  misc_feature 1..21: note = Description of Artificial Sequence: Synthetic oligonucleotide
  source 1..21: mol_type = other DNA
aaagaaagcaaagaaagcatg

SEQ ID NO: 19561 - DNA, 21 bp, synthetic construct
  misc_feature 1..21: note = Description of Artificial Sequence: Synthetic oligonucleotide
  source 1..21: mol_type = other DNA
agcggcggcagcgtcaacggc

SEQ ID NO: 19562 - DNA, 21 bp, synthetic construct
  misc_feature 1..21: note = Description of Artificial Sequence: Synthetic oligonucleotide
  source 1..21: mol_type = other DNA
cacgccagcagcagcaacacc

SEQ ID NO: 19563 - DNA, 21 bp, synthetic construct
  misc_feature 1..21: note = Description of Artificial Sequence: Synthetic oligonucleotide
  source 1..21: mol_type = other DNA
gaaggcggcagcaccgccacc

SEQ ID NO: 19564 - DNA, 21 bp, synthetic construct
  misc_feature 1..21: note = Description of Artificial Sequence: Synthetic oligonucleotide
  source 1..21: mol_type = other DNA
gctacgagtaataatagtgtg

SEQ ID NO: 19565 - DNA, 21 bp, synthetic construct
  misc_feature 1..21: note = Description of Artificial Sequence: Synthetic oligonucleotide
  source 1..21: mol_type = other DNA
aacggcaaacccaacgccagc

SEQ ID NO: 19566 - DNA, 21 bp, synthetic construct
  misc_feature 1..21: note = Description of Artificial Sequence: Synthetic oligonucleotide
  source 1..21: mol_type = other DNA
gtcagcggcaccaacagcgcc

SEQ ID NO: 19567 - DNA, 21 bp, synthetic construct
  misc_feature 1..21: note = Description of Artificial Sequence: Synthetic oligonucleotide
  source 1..21: mol_type = other DNA
gctggtacggcgaagggtgtt

SEQ ID NO: 19568 - DNA, 21 bp, synthetic construct
  misc_feature 1..21: note = Description of Artificial Sequence: Synthetic oligonucleotide
  source 1..21: mol_type = other DNA
cttgcttcgcagtctcagggt

SEQ ID NO: 19569 - DNA, 21 bp, synthetic construct
  misc_feature 1..21: note = Description of Artificial Sequence: Synthetic oligonucleotide
  source 1..21: mol_type = other DNA
gcttcgactggtaaggtgagt

SEQ ID NO: 19570 - DNA, 21 bp, synthetic construct
  misc_feature 1..21: note = Description of Artificial Sequence: Synthetic oligonucleotide
  source 1..21: mol_type = other DNA
gggcagggtggttctgggcct

SEQ ID NO: 19571 - DNA, 21 bp, synthetic construct
  misc_feature 1..21: note = Description of Artificial Sequence: Synthetic oligonucleotide
  source 1..21: mol_type = other DNA
accaaaaacaccaacgtcatg

SEQ ID NO: 19572 - DNA, 21 bp, synthetic construct
  misc_feature 1..21: note = Description of Artificial Sequence: Synthetic oligonucleotide
  source 1..21: mol_type = other DNA
accagcgccagcgccgtcacc

SEQ ID NO: 19573 - DNA, 21 bp, synthetic construct
  misc_feature 1..21: note = Description of Artificial Sequence: Synthetic oligonucleotide
  source 1..21: mol_type = other DNA
ggcaccaccgcccaaagcagc

SEQ ID NO: 19574 - DNA, 21 bp, synthetic construct
  misc_feature 1..21: note = Description of Artificial Sequence: Synthetic oligonucleotide
  source 1..21: mol_type = other DNA
actggggatgggaagttgcat

SEQ ID NO: 19575 - DNA, 21 bp, synthetic construct
  misc_feature 1..21: note = Description of Artificial Sequence: Synthetic oligonucleotide
  source 1..21: mol_type = other DNA
aatttgaatgatactaagggt

SEQ ID NO: 19576 - DNA, 21 bp, synthetic construct
  misc_feature 1..21: note = Description of Artificial Sequence: Synthetic oligonucleotide
  source 1..21: mol_type = other DNA
gataggaataatgaggctcgt

SEQ ID NO: 19577 - DNA, 21 bp, synthetic construct
  misc_feature 1..21: note = Description of Artificial Sequence: Synthetic oligonucleotide
  source 1..21: mol_type = other DNA
cacggcaacagcagcagccac

SEQ ID NO: 19578 - DNA, 21 bp, synthetic construct
  misc_feature 1..21: note = Description of Artificial Sequence: Synthetic oligonucleotide
  source 1..21: mol_type = other DNA
ggcagcctcaaagccgaaagc

SEQ ID NO: 19579 - DNA, 21 bp, synthetic construct
  misc_feature 1..21: note = Description of Artificial Sequence: Synthetic oligonucleotide
  source 1..21: mol_type = other DNA
ggcgccaccgacaaagtcaac

SEQ ID NO: 19580 - DNA, 21 bp, synthetic construct
  misc_feature 1..21: note = Description of Artificial Sequence: Synthetic oligonucleotide
  source 1..21: mol_type = other DNA
gtgaagagtactgcgagtcag

SEQ ID NO: 19581 - DNA, 21 bp, synthetic construct
  misc_feature 1..21: note = Description of Artificial Sequence: Synthetic oligonucleotide
  source 1..21: mol_type = other DNA
tctaatcagaatagtccgacg

SEQ ID NO: 19582 - DNA, 21 bp, synthetic construct
  misc_feature 1..21: note = Description of Artificial Sequence: Synthetic oligonucleotide
  source 1..21: mol_type = other DNA
agtactaagggttcgaattat

SEQ ID NO: 19583 - DNA, 21 bp, synthetic construct
  misc_feature 1..21: note = Description of Artificial Sequence: Synthetic oligonucleotide
  source 1..21: mol_type = other DNA
accaccgtcagcaccagcagc

SEQ ID NO: 19584 - DNA, 21 bp, synthetic construct
  misc_feature 1..21: note = Description of Artificial Sequence: Synthetic oligonucleotide
  source 1..21: mol_type = other DNA
accagcgccaccagccccgtc

SEQ ID NO: 19585 - DNA, 21 bp, synthetic construct
  misc_feature 1..21: note = Description of Artificial Sequence: Synthetic oligonucleotide
  source 1..21: mol_type = other DNA
cagcaggagcgggaggttaag

SEQ ID NO: 19586 - DNA, 21 bp, synthetic construct
  misc_feature 1..21: note = Description of Artificial Sequence: Synthetic oligonucleotide
  source 1..21: mol_type = other DNA
gcggttgcgaagcagtctatt

SEQ ID NO: 19587 - DNA, 21 bp, synthetic construct
  misc_feature 1..21: note = Description of Artificial Sequence: Synthetic oligonucleotide
  source 1..21: mol_type = other DNA
ggcgacagcagactcaacagc

SEQ ID NO: 19588 - DNA, 21 bp, synthetic construct
  misc_feature 1..21: note = Description of Artificial Sequence: Synthetic oligonucleotide
  source 1..21: mol_type = other DNA
actgatggttctaaggtttcg

SEQ ID NO: 19589 - DNA, 21 bp, synthetic construct
  misc_feature 1..21: note = Description of Artificial Sequence: Synthetic oligonucleotide
  source 1..21: mol_type = other DNA
gacagagtcggcaccagccaa

SEQ ID NO: 19590 - DNA, 21 bp, synthetic construct
  misc_feature 1..21: note = Description of Artificial Sequence: Synthetic oligonucleotide
  source 1..21: mol_type = other DNA
ggtgcggatactaagttgacg

SEQ ID NO: 19591 - DNA, 21 bp, synthetic construct
  misc_feature 1..21: note = Description of Artificial Sequence: Synthetic oligonucleotide
  source 1..21: mol_type = other DNA
gtccaaagaaccgaacaacaa

SEQ ID NO: 19592 - DNA, 21 bp, synthetic construct
  misc_feature 1..21: note = Description of Artificial Sequence: Synthetic oligonucleotide
  source 1..21: mol_type = other DNA
aacgccaacagcagccccaac

SEQ ID NO: 19593 - DNA, 21 bp, synthetic construct
  misc_feature 1..21: note = Description of Artificial Sequence: Synthetic oligonucleotide
  source 1..21: mol_type = other DNA
tcttctgggtcgtcgtcgctt

SEQ ID NO: 19594 - DNA, 21 bp, synthetic construct
  misc_feature 1..21: note = Description of Artificial Sequence: Synthetic oligonucleotide
  source 1..21: mol_type = other DNA
acgggttcgactagtaatgtg

SEQ ID NO: 19595 - DNA, 21 bp, synthetic construct
  misc_feature 1..21: note = Description of Artificial Sequence: Synthetic oligonucleotide
  source 1..21: mol_type = other DNA
ggcctcggcgaaaaaagcaaa

SEQ ID NO: 19596 - DNA, 21 bp, synthetic construct
  misc_feature 1..21: note = Description of Artificial Sequence: Synthetic oligonucleotide
  source 1..21: mol_type = other DNA
catgcgggtaagcagaatgcg

SEQ ID NO: 19597 - DNA, 21 bp, synthetic construct
  misc_feature 1..21: note = Description of Artificial Sequence: Synthetic oligonucleotide
  source 1..21: mol_type = other DNA
gatagggttagtgctccgact

SEQ ID NO: 19598 - DNA, 21 bp, synthetic construct
  misc_feature 1..21: note = Description of Artificial Sequence: Synthetic oligonucleotide
  source 1..21: mol_type = other DNA
ggtggtaatggtgggtcttct

SEQ ID NO: 19599 - DNA, 21 bp, synthetic construct
  misc_feature 1..21: note = Description of Artificial Sequence: Synthetic oligonucleotide
  source 1..21: mol_type = other DNA
tcggataatagggggacgcag

SEQ ID NO: 19600 - DNA, 21 bp, synthetic construct
  misc_feature 1..21: note = Description of Artificial Sequence: Synthetic oligonucleotide
  source 1..21: mol_type = other DNA
aacagcggcagccccagccaa

SEQ ID NO: 19601 - DNA, 21 bp, synthetic construct
  misc_feature 1..21: note = Description of Artificial Sequence: Synthetic oligonucleotide
  source 1..21: mol_type = other DNA
aatagtaatgagcgtacgcag

SEQ ID NO: 19602 - DNA, 21 bp, synthetic construct
  misc_feature 1..21: note = Description of Artificial Sequence: Synthetic oligonucleotide
  source 1..21: mol_type = other DNA
accggcggcagcaccggcctc

SEQ ID NO: 19603 - DNA, 21 bp, synthetic construct
  misc_feature 1..21: note = Description of Artificial Sequence: Synthetic oligonucleotide
  source 1..21: mol_type = other DNA
ttcagcggcaacaccgccaaa

SEQ ID NO: 19604 - DNA, 21 bp, synthetic construct
  misc_feature 1..21: note = Description of Artificial Sequence: Synthetic oligonucleotide
  source 1..21: mol_type = other DNA
agcggcgacaccgccagaagc

SEQ ID NO: 19605 - DNA, 21 bp, synthetic construct
  misc_feature 1..21: note = Description of Artificial Sequence: Synthetic oligonucleotide
  source 1..21: mol_type = other DNA
gaaaacggcgtcagcaccaga

SEQ ID NO: 19606 - DNA, 21 bp, synthetic construct
  misc_feature 1..21: note = Description of Artificial Sequence: Synthetic oligonucleotide
  source 1..21: mol_type = other DNA
tcttcgtcggattctagggcg

SEQ ID NO: 19607 - DNA, 21 bp, synthetic construct
  misc_feature 1..21: note = Description of Artificial Sequence: Synthetic oligonucleotide
  source 1..21: mol_type = other DNA
aatggtgggaatgctccgggg

SEQ ID NO: 19608 - DNA, 21 bp, synthetic construct
  misc_feature 1..21: note = Description of Artificial Sequence: Synthetic oligonucleotide
  source 1..21: mol_type = other DNA
accaacggcggcaccagcaga

SEQ ID NO: 19609 - DNA, 21 bp, synthetic construct
  misc_feature 1..21: note = Description of Artificial Sequence: Synthetic oligonucleotide
  source 1..21: mol_type = other DNA
gagaatggtcagcctaagacg

SEQ ID NO: 19610 - DNA, 21 bp, synthetic construct
  misc_feature 1..21: note = Description of Artificial Sequence: Synthetic oligonucleotide
  source 1..21: mol_type = other DNA
gcccccgacctcaaaggcggc

SEQ ID NO: 19611 - DNA, 21 bp, synthetic construct
  misc_feature 1..21: note = Description of Artificial Sequence: Synthetic oligonucleotide
  source 1..21: mol_type = other DNA
gtcgtcgccagcgccaacagc

SEQ ID NO: 19612 - DNA, 21 bp, synthetic construct
  misc_feature 1..21: note = Description of Artificial Sequence: Synthetic oligonucleotide
  source 1..21: mol_type = other DNA
ggggcgaataagtctattggt

SEQ ID NO: 19613 - DNA, 21 bp, synthetic construct
  misc_feature 1..21: note = Description of Artificial Sequence: Synthetic oligonucleotide
  source 1..21: mol_type = other DNA
accagcggcggcggcgccccc

SEQ ID NO: 19614 - DNA, 21 bp, synthetic construct
  misc_feature 1..21: note = Description of Artificial Sequence: Synthetic oligonucleotide
  source 1..21: mol_type = other DNA
gtcagcagccccgccagcgtc

SEQ ID NO: 19615 - DNA, 21 bp, synthetic construct
  misc_feature 1..21: note = Description of Artificial Sequence: Synthetic oligonucleotide
  source 1..21: mol_type = other DNA
gaaggcaccaacaaagtcggc

SEQ ID NO: 19616 - DNA, 21 bp, synthetic construct
  misc_feature 1..21: note = Description of Artificial Sequence: Synthetic oligonucleotide
  source 1..21: mol_type = other DNA
gtcgccagcgacaaagcccac

SEQ ID NO: 19617 - DNA, 21 bp, synthetic construct
  misc_feature 1..21: note = Description of Artificial Sequence: Synthetic oligonucleotide
  source 1..21: mol_type = other DNA
tcgcctagtgctaatgggatt

SEQ ID NO: 19618 - DNA, 21 bp, synthetic construct
  misc_feature 1..21: note = Description of Artificial Sequence: Synthetic oligonucleotide
  source 1..21: mol_type = other DNA
acttcggggacgactcctagg

SEQ ID NO: 19619 - DNA, 21 bp, synthetic construct
  misc_feature 1..21: note = Description of Artificial Sequence: Synthetic oligonucleotide
  source 1..21: mol_type = other DNA
gacgcccccgccagaagcgtc

SEQ ID NO: 19620 - DNA, 21 bp, synthetic construct
  misc_feature 1..21: note = Description of Artificial Sequence: Synthetic oligonucleotide
  source 1..21: mol_type = other DNA
tctggttctacttcgttttcg

SEQ ID NO: 19621 - DNA, 21 bp, synthetic construct
  misc_feature 1..21: note = Description of Artificial Sequence: Synthetic oligonucleotide
  source 1..21: mol_type = other DNA
caaaccgaaaccaaaggcacc

SEQ ID NO: 19622 - DNA, 21 bp, synthetic construct
  misc_feature 1..21: note = Description of Artificial Sequence: Synthetic oligonucleotide
  source 1..21: mol_type = other DNA
caacaaaccaacggcaaaccc

SEQ ID NO: 19623 - DNA, 21 bp, synthetic construct
  misc_feature 1..21: note = Description of Artificial Sequence: Synthetic oligonucleotide
  source 1..21: mol_type = other DNA
gcccaaagcaacagccacgcc

SEQ ID NO: 19624 - DNA, 21 bp, synthetic construct
  misc_feature 1..21: note = Description of Artificial Sequence: Synthetic oligonucleotide
  source 1..21: mol_type = other DNA
ggcgccggcagcgccgccgcc

SEQ ID NO: 19625 - DNA, 21 bp, synthetic construct
  misc_feature 1..21: note = Description of Artificial Sequence: Synthetic oligonucleotide
  source 1..21: mol_type = other DNA
ttgcagaagagtactcctgtg

SEQ ID NO: 19626 - DNA, 21 bp, synthetic construct
  misc_feature 1..21: note = Description of Artificial Sequence: Synthetic oligonucleotide
  source 1..21: mol_type = other DNA
agcaccaacagcaaagacaga

SEQ ID NO: 19627 - DNA, 21 bp, synthetic construct
  misc_feature 1..21: note = Description of Artificial Sequence: Synthetic oligonucleotide
  source 1..21: mol_type = other DNA
agcaacggcccccccaacacc

SEQ ID NO: 19628 - DNA, 21 bp, synthetic construct
  misc_feature 1..21: note = Description of Artificial Sequence: Synthetic oligonucleotide
  source 1..21: mol_type = other DNA
gggactcagactgatatccgt

SEQ ID NO: 19629 - DNA, 21 bp, synthetic construct
  misc_feature 1..21: note = Description of Artificial Sequence: Synthetic oligonucleotide
  source 1..21: mol_type = other DNA
gggcctactcagtctgcgact

SEQ ID NO: 19630 - DNA, 21 bp, synthetic construct
  misc_feature 1..21: note = Description of Artificial Sequence: Synthetic oligonucleotide
  source 1..21: mol_type = other DNA
gagagctcttcgcgggttgcg

SEQ ID NO: 19631 - DNA, 21 bp, synthetic construct
  misc_feature 1..21: note = Description of Artificial Sequence: Synthetic oligonucleotide
  source 1..21: mol_type = other DNA
gcccccgccgaaagcaaaagc

SEQ ID NO: 19632 - DNA, 21 bp, synthetic construct
  misc_feature 1..21: note = Description of Artificial Sequence: Synthetic oligonucleotide
  source 1..21: mol_type = other DNA
tcgggttctactcattctgtt

SEQ ID NO: 19633 - DNA, 21 bp, synthetic construct
  misc_feature 1..21: note = Description of Artificial Sequence: Synthetic oligonucleotide
  source 1..21: mol_type = other DNA
gccaccggcagcagcgccaac

SEQ ID NO: 19634 - DNA, 21 bp, synthetic construct
  misc_feature 1..21: note = Description of Artificial Sequence: Synthetic oligonucleotide
  source 1..21: mol_type = other DNA
agcaccggcaaagacaacagc

SEQ ID NO: 19635 - DNA, 21 bp, synthetic construct
  misc_feature 1..21: note = Description of Artificial Sequence: Synthetic oligonucleotide
  source 1..21: mol_type = other DNA
cagcgtaatgagagtactgtt

SEQ ID NO: 19636 - DNA, 21 bp, synthetic construct
  misc_feature 1..21: note = Description of Artificial Sequence: Synthetic oligonucleotide
  source 1..21: mol_type = other DNA
gagcctcaggcgaatcggggt

SEQ ID NO: 19637 - DNA, 21 bp, synthetic construct
  misc_feature 1..21: note = Description of Artificial Sequence: Synthetic oligonucleotide
  source 1..21: mol_type = other DNA
actgttgcgactcctgggacg

SEQ ID NO: 19638 - DNA, 21 bp, synthetic construct
  misc_feature 1..21: note = Description of Artificial Sequence: Synthetic oligonucleotide
  source 1..21: mol_type = other DNA
actggtgggtcgggtaatagt

SEQ ID NO: 19639 - DNA, 21 bp, synthetic construct
  misc_feature 1..21: note = Description of Artificial Sequence: Synthetic oligonucleotide
  source 1..21: mol_type = other DNA
atgtcgggtcagaatccgtcg

SEQ ID NO: 19640 - DNA, 21 bp, synthetic construct
  misc_feature 1..21: note = Description of Artificial Sequence: Synthetic oligonucleotide
  source 1..21: mol_type = other DNA
caaaaccaacccaacagaggc

SEQ ID NO: 19641 - DNA, 21 bp, synthetic construct
  misc_feature 1..21: note = Description of Artificial Sequence: Synthetic oligonucleotide
  source 1..21: mol_type = other DNA
cacggcagcagcaccatgctc

SEQ ID NO: 19642 - DNA, 21 bp, synthetic construct
  misc_feature 1..21: note = Description of Artificial Sequence: Synthetic oligonucleotide
  source 1..21: mol_type = other DNA
gagagtgtgagtcgtaataat

SEQ ID NO: 19643 - DNA, 21 bp, synthetic construct
  misc_feature 1..21: note = Description of Artificial Sequence: Synthetic oligonucleotide
  source 1..21: mol_type = other DNA
aattcgtcttcgaaggctgag

SEQ ID NO: 19644 - DNA, 21 bp, synthetic construct
  misc_feature 1..21: note = Description of Artificial Sequence: Synthetic oligonucleotide
  source 1..21: mol_type = other DNA
ctgacgactaatacttcggcg

SEQ ID NO: 19645 - DNA, 21 bp, synthetic construct
  misc_feature 1..21: note = Description of Artificial Sequence: Synthetic oligonucleotide
  source 1..21: mol_type = other DNA
ggtcatttgccgacttcggcg

SEQ ID NO: 19646 - DNA, 21 bp, synthetic construct
  misc_feature 1..21: note = Description of Artificial Sequence: Synthetic oligonucleotide
  source 1..21: mol_type = other DNA
ctggggaatcagggtgttaat

SEQ ID NO: 19647 - DNA, 21 bp, synthetic construct
  misc_feature 1..21: note = Description of Artificial Sequence: Synthetic oligonucleotide
  source 1..21: mol_type = other DNA
gcttctaagaatactccgact

SEQ ID NO: 19648 - DNA, 21 bp, synthetic construct
  misc_feature 1..21: note = Description of Artificial Sequence: Synthetic oligonucleotide
  source 1..21: mol_type = other DNA
agtacggctaataagagtcag

SEQ ID NO: 19649 - DNA, 21 bp, synthetic construct
  misc_feature 1..21: note = Description of Artificial Sequence: Synthetic oligonucleotide
  source 1..21: mol_type = other DNA
ggcgccaccaaaggccaagcc

SEQ ID NO: 19650 - DNA, 21 bp, synthetic construct
  misc_feature 1..21: note = Description of Artificial Sequence: Synthetic oligonucleotide
  source 1..21: mol_type = other DNA
accgccaaccaaagcaacctc

SEQ ID NO: 19651 - DNA, 21 bp, synthetic construct
  misc_feature 1..21: note = Description of Artificial Sequence: Synthetic oligonucleotide
  source 1..21: mol_type = other DNA
gccaacctcgaccccaaaacc

SEQ ID NO: 19652 - DNA, 21 bp, synthetic construct
  misc_feature 1..21: note = Description of Artificial Sequence: Synthetic oligonucleotide
  source 1..21: mol_type = other DNA
catcctgctagtaagcctcct

SEQ ID NO: 19653 - DNA, 21 bp, synthetic construct
  misc_feature 1..21: note = Description of Artificial Sequence: Synthetic oligonucleotide
  source 1..21: mol_type = other DNA
atccccagcgacggcagcaaa

SEQ ID NO: 19654 - DNA, 21 bp, synthetic construct
  misc_feature 1..21: note = Description of Artificial Sequence: Synthetic oligonucleotide
  source 1..21: mol_type = other DNA
gacggcggcagcagagacagc

SEQ ID NO: 19655 - DNA, 21 bp, synthetic construct
  misc_feature 1..21: note = Description of Artificial Sequence: Synthetic oligonucleotide
  source 1..21: mol_type = other DNA
gccgccaccaacaaaaaccaa

SEQ ID NO: 19656 - DNA, 21 bp, synthetic construct
  misc_feature 1..21: note = Description of Artificial Sequence: Synthetic oligonucleotide
  source 1..21: mol_type = other DNA
gggaatgctgcgtcgcatgcg

SEQ ID NO: 19657 - DNA, 21 bp, synthetic construct
  misc_feature 1..21: note = Description of Artificial Sequence: Synthetic oligonucleotide
  source 1..21: mol_type = other DNA
gggctttcgggtcctggtaag

SEQ ID NO: 19658 - DNA, 21 bp, synthetic construct
  misc_feature 1..21: note = Description of Artificial Sequence: Synthetic oligonucleotide
  source 1..21: mol_type = other DNA
gatactggtactagtaatcgg

SEQ ID NO: 19659 - DNA, 21 bp, synthetic construct
  misc_feature 1..21: note = Description of Artificial Sequence: Synthetic oligonucleotide
  source 1..21: mol_type = other DNA
gattctggtagtcagtcgcgt

SEQ ID NO: 19660 - DNA, 21 bp, synthetic construct
  misc_feature 1..21: note = Description of Artificial Sequence: Synthetic oligonucleotide
  source 1..21: mol_type = other DNA
ggcgaacccagagccaacagc

SEQ ID NO: 19661 - DNA, 21 bp, synthetic construct
  misc_feature 1..21: note = Description of Artificial Sequence: Synthetic oligonucleotide
  source 1..21: mol_type = other DNA
ctcaccaaaagcaacagcagc

SEQ ID NO: 19662 - DNA, 21 bp, synthetic construct
  misc_feature 1..21: note = Description of Artificial Sequence: Synthetic oligonucleotide
  source 1..21: mol_type = other DNA
acgcgtaataaggaggttaat

SEQ ID NO: 19663 - DNA, 21 bp, synthetic construct
  misc_feature 1..21: note = Description of Artificial Sequence: Synthetic oligonucleotide
  source 1..21: mol_type = other DNA
tggggcaacagcgacaaaagc

SEQ ID NO: 19664 - DNA, 21 bp, synthetic construct
  misc_feature 1..21: note = Description of Artificial Sequence: Synthetic oligonucleotide
  source 1..21: mol_type = other DNA
ttcggcagcaacagcggcagc

SEQ ID NO: 19665 - DNA, 21 bp, synthetic construct
  misc_feature 1..21: note = Description of Artificial Sequence: Synthetic oligonucleotide
  source 1..21: mol_type = other DNA
aacggcagcgacacccaaaga

SEQ ID NO: 19666 - DNA, 21 bp, synthetic construct
  misc_feature 1..21: note = Description of Artificial Sequence: Synthetic oligonucleotide
  source 1..21: mol_type = other DNA
agcaccgccaccgtcccccaa

SEQ ID NO: 19667 - DNA, 21 bp, synthetic construct
  misc_feature 1..21: note = Description of Artificial Sequence: Synthetic oligonucleotide
  source 1..21: mol_type = other DNA
agcctcggcagaagcgaaggc

SEQ ID NO: 19668 - DNA, 21 bp, synthetic construct
  misc_feature 1..21: note = Description of Artificial Sequence: Synthetic oligonucleotide
  source 1..21: mol_type = other DNA
gagaatcataagccgatgatt

SEQ ID NO: 19669 - DNA, 21 bp, synthetic construct
  misc_feature 1..21: note = Description of Artificial Sequence: Synthetic oligonucleotide
  source 1..21: mol_type = other DNA
gccatcgacagacaaaacggc

SEQ ID NO: 19670 - DNA, 21 bp, synthetic construct
  misc_feature 1..21: note = Description of Artificial Sequence: Synthetic oligonucleotide
  source 1..21: mol_type = other DNA
ggtccggaggttgcgttgaag

SEQ ID NO: 19671 - DNA, 21 bp, synthetic construct
  misc_feature 1..21: note = Description of Artificial Sequence: Synthetic oligonucleotide
  source 1..21: mol_type = other DNA
ttgggtacgactactactttg

SEQ ID NO: 19672 - DNA, 21 bp, synthetic construct
  misc_feature 1..21: note = Description of Artificial Sequence: Synthetic oligonucleotide
  source 1..21: mol_type = other DNA
agcagagccgccgccaccgtc

SEQ ID NO: 19673 - DNA, 21 bp, synthetic construct
  misc_feature 1..21: note = Description of Artificial Sequence: Synthetic oligonucleotide
  source 1..21: mol_type = other DNA
tctctgggtagtcatggttcg

SEQ ID NO: 19674 - DNA, 21 bp, synthetic construct
  misc_feature 1..21: note = Description of Artificial Sequence: Synthetic oligonucleotide
  source 1..21: mol_type = other DNA
cacagcaccggcagccacggc

SEQ ID NO: 19675 - DNA, 21 bp, synthetic construct
  misc_feature 1..21: note = Description of Artificial Sequence: Synthetic oligonucleotide
  source 1..21: mol_type = other DNA
ctgcttaagggggcttctcag

SEQ ID NO: 19676 - DNA, 21 bp, synthetic construct
  misc_feature 1..21: note = Description of Artificial Sequence: Synthetic oligonucleotide
  source 1..21: mol_type = other DNA
gaaagaggcaacgccgccagc

SEQ ID NO: 19677 - DNA, 21 bp, synthetic construct
  misc_feature 1..21: note = Description of Artificial Sequence: Synthetic oligonucleotide
  source 1..21: mol_type = other DNA
gagccggctactaaggggact

SEQ ID NO: 19678 - DNA, 21 bp, synthetic construct
  misc_feature 1..21: note = Description of Artificial Sequence: Synthetic oligonucleotide
  source 1..21: mol_type = other DNA
gatgatgggagggcgactgtt

SEQ ID NO: 19679 - DNA, 21 bp, synthetic construct
  misc_feature 1..21: note = Description of Artificial Sequence: Synthetic oligonucleotide
  source 1..21: mol_type = other DNA
agagtcaccgacaaacccagc

SEQ ID NO: 19680 - DNA, 21 bp, synthetic construct
  misc_feature 1..21: note = Description of Artificial Sequence: Synthetic oligonucleotide
  source 1..21: mol_type = other DNA
acgcggaatagtcctacgcag

SEQ ID NO: 19681 - DNA, 21 bp, synthetic construct
  misc_feature 1..21: note = Description of Artificial Sequence: Synthetic oligonucleotide
  source 1..21: mol_type = other DNA
agtacgggtggtagtggtact

SEQ ID NO: 19682 - DNA, 21 bp, synthetic construct
  misc_feature 1..21: note = Description of Artificial Sequence: Synthetic oligonucleotide
  source 1..21: mol_type = other DNA
agcatcgccagcagcggcggc

SEQ ID NO: 19683 - DNA, 21 bp, synthetic construct
  misc_feature 1..21: note = Description of Artificial Sequence: Synthetic oligonucleotide
  source 1..21: mol_type = other DNA
tctcataatacggcgaattcg

SEQ ID NO: 19684 - DNA, 21 bp, synthetic construct
  misc_feature 1..21: note = Description of Artificial Sequence: Synthetic oligonucleotide
  source 1..21: mol_type = other DNA
cagatttcggatcctaagcat

SEQ ID NO: 19685 - DNA, 21 bp, synthetic construct
  misc_feature 1..21: note = Description of Artificial Sequence: Synthetic oligonucleotide
  source 1..21: mol_type = other DNA
cataatactagttctcctact

SEQ ID NO: 19686 - DNA, 21 bp, synthetic construct
  misc_feature 1..21: note = Description of Artificial Sequence: Synthetic oligonucleotide
  source 1..21: mol_type = other DNA
agtaaggagaatgtgccggtt

SEQ ID NO: 19687 - DNA, 21 bp, synthetic construct
  misc_feature 1..21: note = Description of Artificial Sequence: Synthetic oligonucleotide
  source 1..21: mol_type = other DNA
catgtggatagtggggggggg

SEQ ID NO: 19688 - DNA, 21 bp, synthetic construct
  misc_feature 1..21: note = Description of Artificial Sequence: Synthetic oligonucleotide
  source 1..21: mol_type = other DNA
gccatgagcaacgaaagcaaa

SEQ ID NO: 19689 - DNA, 21 bp, synthetic construct
  misc_feature 1..21: note = Description of Artificial Sequence: Synthetic oligonucleotide
  source 1..21: mol_type = other DNA
ggggagaaggcgcagaaggtg

SEQ ID NO: 19690 - DNA, 21 bp, synthetic construct
  misc_feature 1..21: note = Description of Artificial Sequence: Synthetic oligonucleotide
  source 1..21: mol_type = other DNA
ttgagttcggggtcttcgggg

SEQ ID NO: 19691 - DNA, 21 bp, synthetic construct
  misc_feature 1..21: note = Description of Artificial Sequence: Synthetic oligonucleotide
  source 1..21: mol_type = other DNA
ggcgtcagcaacagcagcatc

SEQ ID NO: 19692 - DNA, 21 bp, synthetic construct
  misc_feature 1..21: note = Description of Artificial Sequence: Synthetic oligonucleotide
  source 1..21: mol_type = other DNA
tcttcggggacggctattagt

SEQ ID NO: 19693 - DNA, 21 bp, synthetic construct
  misc_feature 1..21: note = Description of Artificial Sequence: Synthetic oligonucleotide
  source 1..21: mol_type = other DNA
gacaaaagcagcggcggcaaa

SEQ ID NO: 19694 - DNA, 21 bp, synthetic construct
  misc_feature 1..21: note = Description of Artificial Sequence: Synthetic oligonucleotide
  source 1..21: mol_type = other DNA
ggcagcaccggcagcggcagc

SEQ ID NO: 19695 - DNA, 21 bp, synthetic construct
  misc_feature 1..21: note = Description of Artificial Sequence: Synthetic oligonucleotide
  source 1..21: mol_type = other DNA
ggtgctgataggcctgcgggt

SEQ ID NO: 19696 - DNA, 21 bp, synthetic construct
  misc_feature 1..21: note = Description of Artificial Sequence: Synthetic oligonucleotide
  source 1..21: mol_type = other DNA
atgagccacggcagcaacagc

SEQ ID NO: 19697 - DNA, 21 bp, synthetic construct
  misc_feature 1..21: note = Description of Artificial Sequence: Synthetic oligonucleotide
  source 1..21: mol_type = other DNA
atcaaacaaagcccccaaagc

SEQ ID NO: 19698 - DNA, 21 bp, synthetic construct
  misc_feature 1..21: note = Description of Artificial Sequence: Synthetic oligonucleotide
  source 1..21: mol_type = other DNA
agcgccaacggcaacaacaaa

SEQ ID NO: 19699 - DNA, 21 bp, synthetic construct
  misc_feature 1..21: note = Description of Artificial Sequence: Synthetic oligonucleotide
  source 1..21: mol_type = other DNA
ggggcgggggcttctaggagt

SEQ ID NO: 19700 - DNA, 21 bp, synthetic construct
  misc_feature 1..21: note = Description of Artificial Sequence: Synthetic oligonucleotide
  source 1..21: mol_type = other DNA
agtcctcagcagactgtttct

SEQ ID NO: 19701 - DNA, 21 bp, synthetic construct
  misc_feature 1..21: note = Description of Artificial Sequence: Synthetic oligonucleotide
  source 1..21: mol_type = other DNA
aatgggaatggtgctaagctg

SEQ ID NO: 19702 - DNA, 21 bp, synthetic construct
  misc_feature 1..21: note = Description of Artificial Sequence: Synthetic oligonucleotide
  source 1..21: mol_type = other DNA
gggcctaaggagtctaatgct

SEQ ID NO: 19703 - DNA, 21 bp, synthetic construct
  misc_feature 1..21: note = Description of Artificial Sequence: Synthetic oligonucleotide
  source 1..21: mol_type = other DNA
agcaaccaaagcagccccagc

SEQ ID NO: 19704 - DNA, 21 bp, synthetic construct
  misc_feature 1..21: note = Description of Artificial Sequence: Synthetic oligonucleotide
  source 1..21: mol_type = other DNA
aattctgcgcagggtggtggg

SEQ ID NO: 19705 - DNA, 21 bp, synthetic construct
  misc_feature 1..21: note = Description of Artificial Sequence: Synthetic oligonucleotide
  source 1..21: mol_type = other DNA
acgggggatcgggatagggct

SEQ ID NO: 19706 - DNA, 21 bp, synthetic construct
  misc_feature 1..21: note = Description of Artificial Sequence: Synthetic oligonucleotide
  source 1..21: mol_type = other DNA
accaacgacagcagacccgaa

SEQ ID NO: 19707 - DNA, 21 bp, synthetic construct
  misc_feature 1..21: note = Description of Artificial Sequence: Synthetic oligonucleotide
  source 1..21: mol_type = other DNA
gacagcgccggccccagaagc

SEQ ID NO: 19708 - DNA, 21 bp, synthetic construct
  misc_feature 1..21: note = Description of Artificial Sequence: Synthetic oligonucleotide
  source 1..21: mol_type = other DNA
gccaccggcaaacccggcgtc

SEQ ID NO: 19709 - DNA, 21 bp, synthetic construct
  misc_feature 1..21: note = Description of Artificial Sequence: Synthetic oligonucleotide
  source 1..21: mol_type = other DNA
agcggcatcaaagacagcccc

SEQ ID NO: 19710 - DNA, 21 bp, synthetic construct
  misc_feature 1..21: note = Description of Artificial Sequence: Synthetic oligonucleotide
  source 1..21: mol_type = other DNA
agtactcatactccgagtagt

SEQ ID NO: 19711 - DNA, 21 bp, synthetic construct
  misc_feature 1..21: note = Description of Artificial Sequence: Synthetic oligonucleotide
  source 1..21: mol_type = other DNA
aacagcagcggcaacaccccc

SEQ ID NO: 19712 - DNA, 21 bp, synthetic construct
  misc_feature 1..21: note = Description of Artificial Sequence: Synthetic oligonucleotide
  source 1..21: mol_type = other DNA
cagatggctaagtcgaatgag

SEQ ID NO: 19713 - DNA, 21 bp, synthetic construct
  misc_feature 1..21: note = Description of Artificial Sequence: Synthetic oligonucleotide
  source 1..21: mol_type = other DNA
gattcgaatcgggtgaatgtg

SEQ ID NO: 19714 - DNA, 21 bp, synthetic construct
  misc_feature 1..21: note = Description of Artificial Sequence: Synthetic oligonucleotide
  source 1..21: mol_type = other DNA
tctggggttgggagtacgttg

SEQ ID NO: 19715 - DNA, 21 bp, synthetic construct
  misc_feature 1..21: note = Description of Artificial Sequence: Synthetic oligonucleotide
  source 1..21: mol_type = other DNA
acccaaaaacaagccagcacc

SEQ ID NO: 19716 - DNA, 21 bp, synthetic construct
  misc_feature 1..21: note = Description of Artificial Sequence: Synthetic oligonucleotide
  source 1..21: mol_type = other DNA
agcgccgccagcaccgccagc

SEQ ID NO: 19717 - DNA, 21 bp, synthetic construct
  misc_feature 1..21: note = Description of Artificial Sequence: Synthetic oligonucleotide
  source 1..21: mol_type = other DNA
ggtgtggcgagtacgtcttct

SEQ ID NO: 19718 - DNA, 21 bp, synthetic construct
  misc_feature 1..21: note = Description of Artificial Sequence: Synthetic oligonucleotide
  source 1..21: mol_type = other DNA
gatggtgcgaagtcttctggt

SEQ ID NO: 19719 - DNA, 21 bp, synthetic construct
  misc_feature 1..21: note = Description of Artificial Sequence: Synthetic oligonucleotide
  source 1..21: mol_type = other DNA
catgctacggctggtggtagt

SEQ ID NO: 19720 - DNA, 21 bp, synthetic construct
  misc_feature 1..21: note = Description of Artificial Sequence: Synthetic oligonucleotide
  source 1..21: mol_type = other DNA
agcggcagcggcagcagcgtc

SEQ ID NO: 19721 - DNA, 21 bp, synthetic construct
  misc_feature 1..21: note = Description of Artificial Sequence: Synthetic oligonucleotide
  source 1..21: mol_type = other DNA
ggccacggcggcacccaaaac

SEQ ID NO: 19722 - DNA, 21 bp, synthetic construct
  misc_feature 1..21: note = Description of Artificial Sequence: Synthetic oligonucleotide
  source 1..21: mol_type = other DNA
agtggtactgataagaggtcg

SEQ ID NO: 19723 - DNA, 21 bp, synthetic construct
  misc_feature 1..21: note = Description of Artificial Sequence: Synthetic oligonucleotide
  source 1..21: mol_type = other DNA
gataaggagcagaagagtatg

SEQ ID NO: 19724 - DNA, 21 bp, synthetic construct
  misc_feature 1..21: note = Description of Artificial Sequence: Synthetic oligonucleotide
  source 1..21: mol_type = other DNA
aacaccggccaaagaagcacc

SEQ ID NO: 19725 - DNA, 21 bp, synthetic construct
  misc_feature 1..21: note = Description of Artificial Sequence: Synthetic oligonucleotide
  source 1..21: mol_type = other DNA
aacctcggcgccgccgccggc

SEQ ID NO: 19726 - DNA, 21 bp, synthetic construct
  misc_feature 1..21: note = Description of Artificial Sequence: Synthetic oligonucleotide
  source 1..21: mol_type = other DNA
aagggtagtactacggttatt

SEQ ID NO: 19727 - DNA, 21 bp, synthetic construct
  misc_feature 1..21: note = Description of Artificial Sequence: Synthetic oligonucleotide
  source 1..21: mol_type = other DNA
aatgcgacgggtactccggtt

SEQ ID NO: 19728 - DNA, 21 bp, synthetic construct
  misc_feature 1..21: note = Description of Artificial Sequence: Synthetic oligonucleotide
  source 1..21: mol_type = other DNA
accgccagcgccagcagcggc

SEQ ID NO: 19729 - DNA, 21 bp, synthetic construct
  misc_feature 1..21: note = Description of Artificial Sequence: Synthetic oligonucleotide
  source 1..21: mol_type = other DNA
accggcacccaaacccccggc

SEQ ID NO: 19730 - DNA, 21 bp, synthetic construct
  misc_feature 1..21: note = Description of Artificial Sequence: Synthetic oligonucleotide
  source 1..21: mol_type = other DNA
agcaccggcgccggcgccagc

SEQ ID NO: 19731 - DNA, 21 bp, synthetic construct
  misc_feature 1..21: note = Description of Artificial Sequence: Synthetic oligonucleotide
  source 1..21: mol_type = other DNA
agcctcgccagcaaaagcggc

SEQ ID NO: 19732 - DNA, 21 bp, synthetic construct
  misc_feature 1..21: note = Description of Artificial Sequence: Synthetic oligonucleotide
  source 1..21: mol_type = other DNA
agcgccatggacagcaaaaga

SEQ ID NO: 19733 - DNA, 21 bp, synthetic construct
  misc_feature 1..21: note = Description of Artificial Sequence: Synthetic oligonucleotide
  source 1..21: mol_type = other DNA
aggagtactgataagactacg

SEQ ID NO: 19734 - DNA, 21 bp, synthetic construct
  misc_feature 1..21: note = Description of Artificial Sequence: Synthetic oligonucleotide
  source 1..21: mol_type = other DNA
atcagcagccaacaaagccac

SEQ ID NO: 19735 - DNA, 21 bp, synthetic construct
  misc_feature 1..21: note = Description of Artificial Sequence: Synthetic oligonucleotide
  source 1..21: mol_type = other DNA
caaggcggcgccagcctccaa

SEQ ID NO: 19736 - DNA, 21 bp, synthetic construct
  misc_feature 1..21: note = Description of Artificial Sequence: Synthetic oligonucleotide
  source 1..21: mol_type = other DNA
cacgaagaaaaaagccccaga

SEQ ID NO: 19737 - DNA, 21 bp, synthetic construct
  misc_feature 1..21: note = Description of Artificial Sequence: Synthetic oligonucleotide
  source 1..21: mol_type = other DNA
ctcaaccacaccaacgccggc

SEQ ID NO: 19738 - DNA, 21 bp, synthetic construct
  misc_feature 1..21: note = Description of Artificial Sequence: Synthetic oligonucleotide
  source 1..21: mol_type = other DNA
ctcaccaccggcgaaagagcc

SEQ ID NO: 19739 - DNA, 21 bp, synthetic construct
  misc_feature 1..21: note = Description of Artificial Sequence: Synthetic oligonucleotide
  source 1..21: mol_type = other DNA
ctcagcggcaccaacgcccaa

SEQ ID NO: 19740 - DNA, 21 bp, synthetic construct
  misc_feature 1..21: note = Description of Artificial Sequence: Synthetic oligonucleotide
  source 1..21: mol_type = other DNA
gacaccggcggcagcagacac

SEQ ID NO: 19741 - DNA, 21 bp, synthetic construct
  misc_feature 1..21: note = Description of Artificial Sequence: Synthetic oligonucleotide
  source 1..21: mol_type = other DNA
gagtcgcggcagagtgttcag

SEQ ID NO: 19742 - DNA, 21 bp, synthetic construct
  misc_feature 1..21: note = Description of Artificial Sequence: Synthetic oligonucleotide
  source 1..21: mol_type = other DNA
gccggcaacaccagcagagaa

SEQ ID NO: 19743 - DNA, 21 bp, synthetic construct
  misc_feature 1..21: note = Description of Artificial Sequence: Synthetic oligonucleotide
  source 1..21: mol_type = other DNA
gggccgggtgcttcttcttct

SEQ ID NO: 19744 - DNA, 21 bp, synthetic construct
  misc_feature 1..21: note = Description of Artificial Sequence: Synthetic oligonucleotide
  source 1..21: mol_type = other DNA
tctggttcttcggcgttggtc

SEQ ID NO: 19745 - DNA, 21 bp, synthetic construct
  misc_feature 1..21: note = Description of Artificial Sequence: Synthetic oligonucleotide
  source 1..21: mol_type = other DNA
tggcgtgagtcgaaggatatt

SEQ ID NO: 19746 - DNA, 21 bp, synthetic construct
  misc_feature 1..21: note = Description of Artificial Sequence: Synthetic oligonucleotide
  source 1..21: mol_type = other DNA
ggcagcggccacaaagtcctc

SEQ ID NO: 19747 - DNA, 21 bp, synthetic construct
  misc_feature 1..21: note = Description of Artificial Sequence: Synthetic oligonucleotide
  source 1..21: mol_type = other DNA
gagacgactaagcagcttggg

SEQ ID NO: 19748 - DNA, 21 bp, synthetic construct
  misc_feature 1..21: note = Description of Artificial Sequence: Synthetic oligonucleotide
  source 1..21: mol_type = other DNA
cacggcacccccagcagcgtc

SEQ ID NO: 19749 - DNA, 21 bp, synthetic construct
  misc_feature 1..21: note = Description of Artificial Sequence: Synthetic oligonucleotide
  source 1..21: mol_type = other DNA
gagtcgtctggtgagcgtagg

SEQ ID NO: 19750 - DNA, 21 bp, synthetic construct
  misc_feature 1..21: note = Description of Artificial Sequence: Synthetic oligonucleotide
  source 1..21: mol_type = other DNA
gataagcatggtcagcctgtg

SEQ ID NO: 19751 - DNA, 21 bp, synthetic construct
  misc_feature 1..21: note = Description of Artificial Sequence: Synthetic oligonucleotide
  source 1..21: mol_type = other DNA
acgcagggtgggtcttcgtcg

SEQ ID NO: 19752 - DNA, 21 bp, synthetic construct
  misc_feature 1..21: note = Description of Artificial Sequence: Synthetic oligonucleotide
  source 1..21: mol_type = other DNA
agcagaaccgccagcaacgtc

SEQ ID NO: 19753 - DNA, 21 bp, synthetic construct
  misc_feature 1..21: note = Description of Artificial Sequence: Synthetic oligonucleotide
  source 1..21: mol_type = other DNA
gtgcagaagccgacgatggct

SEQ ID NO: 19754 - DNA, 21 bp, synthetic construct
  misc_feature 1..21: note = Description of Artificial Sequence: Synthetic oligonucleotide
  source 1..21: mol_type = other DNA
accggcaaccccagcctcacc

SEQ ID NO: 19755 - DNA, 21 bp, synthetic construct
  misc_feature 1..21: note = Description of Artificial Sequence: Synthetic oligonucleotide
  source 1..21: mol_type = other DNA
ggttctcatacgccggttacg

SEQ ID NO: 19756 - DNA, 21 bp, synthetic construct
  misc_feature 1..21: note = Description of Artificial Sequence: Synthetic oligonucleotide
  source 1..21: mol_type = other DNA
actcagcagcagtcggctact

SEQ ID NO: 19757 - DNA, 21 bp, synthetic construct
  misc_feature 1..21: note = Description of Artificial Sequence: Synthetic oligonucleotide
  source 1..21: mol_type = other DNA
actggggttcagactgttggt

SEQ ID NO: 19758 - DNA, 21 bp, synthetic construct
  misc_feature 1..21: note = Description of Artificial Sequence: Synthetic oligonucleotide
  source 1..21: mol_type = other DNA
agcagcacccaaacccccagc

SEQ ID NO: 19759 - DNA, 21 bp, synthetic construct
  misc_feature 1..21: note = Description of Artificial Sequence: Synthetic oligonucleotide
  source 1..21: mol_type = other DNA
gctaggggggagcatccgatt

SEQ ID NO: 19760 - DNA, 21 bp, synthetic construct
  misc_feature 1..21: note = Description of Artificial Sequence: Synthetic oligonucleotide
  source 1..21: mol_type = other DNA
aatggtaagactggtactgcg

SEQ ID NO: 19761 - DNA, 21 bp, synthetic construct
  misc_feature 1..21: note = Description of Artificial Sequence: Synthetic oligonucleotide
  source 1..21: mol_type = other DNA
gagaatactaagagtctggct

SEQ ID NO: 19762 - DNA, 21 bp, synthetic construct
  misc_feature 1..21: note = Description of Artificial Sequence: Synthetic oligonucleotide
  source 1..21: mol_type = other DNA
gggcagggtaaggagcagggt

SEQ ID NO: 19763 - DNA, 21 bp, synthetic construct
  misc_feature 1..21: note = Description of Artificial Sequence: Synthetic oligonucleotide
  source 1..21: mol_type = other DNA
accagcagcggcaccagaaac

SEQ ID NO: 19764 - DNA, 21 bp, synthetic construct
  misc_feature 1..21: note = Description of Artificial Sequence: Synthetic oligonucleotide
  source 1..21: mol_type = other DNA
gtgggtgttagtaatacgcag

SEQ ID NO: 19765 - DNA, 21 bp, synthetic construct
  misc_feature 1..21: note = Description of Artificial Sequence: Synthetic oligonucleotide
  source 1..21: mol_type = other DNA
tgcctcgaacccagcaacaga

SEQ ID NO: 19766 - DNA, 21 bp, synthetic construct
  misc_feature 1..21: note = Description of Artificial Sequence: Synthetic oligonucleotide
  source 1..21: mol_type = other DNA
gcccccgaaaaagaccacaga

SEQ ID NO: 19767 - DNA, 21 bp, synthetic construct
  misc_feature 1..21: note = Description of Artificial Sequence: Synthetic oligonucleotide
  source 1..21: mol_type = other DNA
tctggtgatgctgttaagcag

SEQ ID NO: 19768 - DNA, 21 bp, synthetic construct
  misc_feature 1..21: note = Description of Artificial Sequence: Synthetic oligonucleotide
  source 1..21: mol_type = other DNA
agcagcagcagcaccatcgcc

SEQ ID NO: 19769 - DNA, 21 bp, synthetic construct
  misc_feature 1..21: note = Description of Artificial Sequence: Synthetic oligonucleotide
  source 1..21: mol_type = other DNA
actgctacggctgcgcctatg

SEQ ID NO: 19770 - DNA, 21 bp, synthetic construct
  misc_feature 1..21: note = Description of Artificial Sequence: Synthetic oligonucleotide
  source 1..21: mol_type = other DNA
gccagcagccccggcaccacc

SEQ ID NO: 19771 - DNA, 21 bp, synthetic construct
  misc_feature 1..21: note = Description of Artificial Sequence: Synthetic oligonucleotide
  source 1..21: mol_type = other DNA
agcaacagcaacaaaaacggc

SEQ ID NO: 19772 - DNA, 21 bp, synthetic construct
  misc_feature 1..21: note = Description of Artificial Sequence: Synthetic oligonucleotide
  source 1..21: mol_type = other DNA
gcccaccaaggcagcaacacc

SEQ ID NO: 19773 - DNA, 21 bp, synthetic construct
  misc_feature 1..21: note = Description of Artificial Sequence: Synthetic oligonucleotide
  source 1..21: mol_type = other DNA
gggcggagttcgcagagtggg

SEQ ID NO: 19774 - DNA, 21 bp, synthetic construct
  misc_feature 1..21: note = Description of Artificial Sequence: Synthetic oligonucleotide
  source 1..21: mol_type = other DNA
tcggcggctgagaagtctgcg

SEQ ID NO: 19775 - DNA, 21 bp, synthetic construct
  misc_feature 1..21: note = Description of Artificial Sequence: Synthetic oligonucleotide
  source 1..21: mol_type = other DNA
gtgcctgatcggacgcctgtg

SEQ ID NO: 19776 - DNA, 21 bp, synthetic construct
  misc_feature 1..21: note = Description of Artificial Sequence: Synthetic oligonucleotide
  source 1..21: mol_type = other DNA
aacagagacagcagcagcagc

SEQ ID NO: 19777 - DNA, 21 bp, synthetic construct
  misc_feature 1..21: note = Description of Artificial Sequence: Synthetic oligonucleotide
  source 1..21: mol_type = other DNA
agcggcgaccaaaaaggcagc

SEQ ID NO: 19778 - DNA, 21 bp, synthetic construct
  misc_feature 1..21: note = Description of Artificial Sequence: Synthetic oligonucleotide
  source 1..21: mol_type = other DNA
gccacccaagccagcagccac

SEQ ID NO: 19779 - DNA, 21 bp, synthetic construct
  misc_feature 1..21: note = Description of Artificial Sequence: Synthetic oligonucleotide
  source 1..21: mol_type = other DNA
cagacgtctccgaatgggtcg

SEQ ID NO: 19780 - DNA, 21 bp, synthetic construct
  misc_feature 1..21: note = Description of Artificial Sequence: Synthetic oligonucleotide
  source 1..21: mol_type = other DNA
agcggcacccccagcctcagc

SEQ ID NO: 19781 - DNA, 21 bp, synthetic construct
  misc_feature 1..21: note = Description of Artificial Sequence: Synthetic oligonucleotide
  source 1..21: mol_type = other DNA
agtatggctggggcgagtagg

SEQ ID NO: 19782 - DNA, 21 bp, synthetic construct
  misc_feature 1..21: note = Description of Artificial Sequence: Synthetic oligonucleotide
  source 1..21: mol_type = other DNA
atgagaaccgaacaaagcatg

SEQ ID NO: 19783 - DNA, 21 bp, synthetic construct
  misc_feature 1..21: note = Description of Artificial Sequence: Synthetic oligonucleotide
  source 1..21: mol_type = other DNA
ggcaccggcacccacctccaa

SEQ ID NO: 19784 - DNA, 21 bp, synthetic construct
  misc_feature 1..21: note = Description of Artificial Sequence: Synthetic oligonucleotide
  source 1..21: mol_type = other DNA
ggccaagaagaaagaaaatac

SEQ ID NO: 19785 - DNA, 21 bp, synthetic construct
  misc_feature 1..21: note = Description of Artificial Sequence: Synthetic oligonucleotide
  source 1..21: mol_type = other DNA
tctgggagtccgactgggttg

SEQ ID NO: 19786 - DNA, 21 bp, synthetic construct
  misc_feature 1..21: note = Description of Artificial Sequence: Synthetic oligonucleotide
  source 1..21: mol_type = other DNA
ggcagcaccagcagccccaac

SEQ ID NO: 19787 - DNA, 21 bp, synthetic construct
  misc_feature 1..21: note = Description of Artificial Sequence: Synthetic oligonucleotide
  source 1..21: mol_type = other DNA
gggtctaatactcctgcgctg

SEQ ID NO: 19788 - DNA, 21 bp, synthetic construct
  misc_feature 1..21: note = Description of Artificial Sequence: Synthetic oligonucleotide
  source 1..21: mol_type = other DNA
agaagcggcgaacacagcgtc

SEQ ID NO: 19789 - DNA, 21 bp, synthetic construct
  misc_feature 1..21: note = Description of Artificial Sequence: Synthetic oligonucleotide
  source 1..21: mol_type = other DNA
agcgccaccaaaatcagcagc

SEQ ID NO: 19790 - DNA, 21 bp, synthetic construct
  misc_feature 1..21: note = Description of Artificial Sequence: Synthetic oligonucleotide
  source 1..21: mol_type = other DNA
agtagtggtcagggtaatggt

SEQ ID NO: 19791 - DNA, 21 bp, synthetic construct
  misc_feature 1..21: note = Description of Artificial Sequence: Synthetic oligonucleotide
  source 1..21: mol_type = other DNA
caggttcatgatggtccgaag

SEQ ID NO: 19792 - DNA, 21 bp, synthetic construct
  misc_feature 1..21: note = Description of Artificial Sequence: Synthetic oligonucleotide
  source 1..21: mol_type = other DNA
aacagcgaagtcagaaccagc

SEQ ID NO: 19793 - DNA, 21 bp, synthetic construct
  misc_feature 1..21: note = Description of Artificial Sequence: Synthetic oligonucleotide
  source 1..21: mol_type = other DNA
agagtcggcagcgcccaaggc

SEQ ID NO: 19794 - DNA, 21 bp, synthetic construct
  misc_feature 1..21: note = Description of Artificial Sequence: Synthetic oligonucleotide
  source 1..21: mol_type = other DNA
ctccccaccgacggcgccaaa

SEQ ID NO: 19795 - DNA, 21 bp, synthetic construct
  misc_feature 1..21: note = Description of Artificial Sequence: Synthetic oligonucleotide
  source 1..21: mol_type = other DNA
gagtcttctccttcgaagggg

SEQ ID NO: 19796 - DNA, 21 bp, synthetic construct
  misc_feature 1..21: note = Description of Artificial Sequence: Synthetic oligonucleotide
  source 1..21: mol_type = other DNA
gccgccggcaccaccggcacc

SEQ ID NO: 19797 - DNA, 21 bp, synthetic construct
  misc_feature 1..21: note = Description of Artificial Sequence: Synthetic oligonucleotide
  source 1..21: mol_type = other DNA
gctggggatagtacgaagctg

SEQ ID NO: 19798 - DNA, 21 bp, synthetic construct
  misc_feature 1..21: note = Description of Artificial Sequence: Synthetic oligonucleotide
  source 1..21: mol_type = other DNA
ggtagtactacgtctgctggg

SEQ ID NO: 19799 - DNA, 21 bp, synthetic construct
  misc_feature 1..21: note = Description of Artificial Sequence: Synthetic oligonucleotide
  source 1..21: mol_type = other DNA
gtcagcagcagccaaaccagc

SEQ ID NO: 19800 - DNA, 21 bp, synthetic construct
  misc_feature 1..21: note = Description of Artificial Sequence: Synthetic oligonucleotide
  source 1..21: mol_type = other DNA
accaacggcgcccccagccaa

SEQ ID NO: 19801 - DNA, 21 bp, synthetic construct
  misc_feature 1..21: note = Description of Artificial Sequence: Synthetic oligonucleotide
  source 1..21: mol_type = other DNA
atgggtggtcagtctggtact

SEQ ID NO: 19802 - DNA, 21 bp, synthetic construct
  misc_feature 1..21: note = Description of Artificial Sequence: Synthetic oligonucleotide
  source 1..21: mol_type = other DNA
ggcagcagcacccccagccaa

SEQ ID NO: 19803 - DNA, 21 bp, synthetic construct
  misc_feature 1..21: note = Description of Artificial Sequence: Synthetic oligonucleotide
  source 1..21: mol_type = other DNA
tctcaggggcatagtccgact

SEQ ID NO: 19804 - DNA, 21 bp, synthetic construct
  misc_feature 1..21: note = Description of Artificial Sequence: Synthetic oligonucleotide
  source 1..21: mol_type = other DNA
atgactggtgggtctgtggct

SEQ ID NO: 19805 - DNA, 21 bp, synthetic construct
  misc_feature 1..21: note = Description of Artificial Sequence: Synthetic oligonucleotide
  source 1..21: mol_type = other DNA
gaggtgaagactcctgcggtt

SEQ ID NO: 19806 - DNA, 21 bp, synthetic construct
  misc_feature 1..21: note = Description of Artificial Sequence: Synthetic oligonucleotide
  source 1..21: mol_type = other DNA
agcgtcagcgcccccagcaga

SEQ ID NO: 19807 - DNA, 21 bp, synthetic construct
  misc_feature 1..21: note = Description of Artificial Sequence: Synthetic oligonucleotide
  source 1..21: mol_type = other DNA
ggcaaagtcggcgccaacaac

SEQ ID NO: 19808 - DNA, 21 bp, synthetic construct
  misc_feature 1..21: note = Description of Artificial Sequence: Synthetic oligonucleotide
  source 1..21: mol_type = other DNA
agagacggcaacagcaccacc

SEQ ID NO: 19809 - DNA, 21 bp, synthetic construct
  misc_feature 1..21: note = Description of Artificial Sequence: Synthetic oligonucleotide
  source 1..21: mol_type = other DNA
gagaatctggctcctagtaag

SEQ ID NO: 19810 - DNA, 21 bp, synthetic construct
  misc_feature 1..21: note = Description of Artificial Sequence: Synthetic oligonucleotide
  source 1..21: mol_type = other DNA
ggcatcagcgacaaacccacc

SEQ ID NO: 19811 - DNA, 21 bp, synthetic construct
  misc_feature 1..21: note = Description of Artificial Sequence: Synthetic oligonucleotide
  source 1..21: mol_type = other DNA
accagcagcaaagtcagcagc

SEQ ID NO: 19812 - DNA, 21 bp, synthetic construct
  misc_feature 1..21: note = Description of Artificial Sequence: Synthetic oligonucleotide
  source 1..21: mol_type = other DNA
ctgagtgcggggggggctggg

SEQ ID NO: 19813 - DNA, 21 bp, synthetic construct
  misc_feature 1..21: note = Description of Artificial Sequence: Synthetic oligonucleotide
  source 1..21: mol_type = other DNA
caacaacaaggcaaaggcccc

SEQ ID NO: 19814 - DNA, 21 bp, synthetic construct
  misc_feature 1..21: note = Description of Artificial Sequence: Synthetic oligonucleotide
  source 1..21: mol_type = other DNA
ctcccccaacaaaacagcaaa

SEQ ID NO: 19815 - DNA, 21 bp, synthetic construct
  misc_feature 1..21: note = Description of Artificial Sequence: Synthetic oligonucleotide
  source 1..21: mol_type = other DNA
ggcagcagcagccccagagaa

SEQ ID NO: 19816 - DNA, 21 bp, synthetic construct
  misc_feature 1..21: note = Description of Artificial Sequence: Synthetic oligonucleotide
  source 1..21: mol_type = other DNA
accgacagccccaccaccaaa

SEQ ID NO: 19817 - DNA, 21 bp, synthetic construct
  misc_feature 1..21: note = Description of Artificial Sequence: Synthetic oligonucleotide
  source 1..21: mol_type = other DNA
acgggtagtgagaatcgggtt

SEQ ID NO: 19818 - DNA, 21 bp, synthetic construct
  misc_feature 1..21: note = Description of Artificial Sequence: Synthetic oligonucleotide
  source 1..21: mol_type = other DNA
cacaaagccaccaccgccgtc

SEQ ID NO: 19819 - DNA, 21 bp, synthetic construct
  misc_feature 1..21: note = Description of Artificial Sequence: Synthetic oligonucleotide
  source 1..21: mol_type = other DNA
ctcgacaacggcaaacccccc

SEQ ID NO: 19820 - DNA, 21 bp, synthetic construct
  misc_feature 1..21: note = Description of Artificial Sequence: Synthetic oligonucleotide
  source 1..21: mol_type = other DNA
agcgaaagcagaagcagcatc

SEQ ID NO: 19821 - DNA, 21 bp, synthetic construct
  misc_feature 1..21: note = Description of Artificial Sequence: Synthetic oligonucleotide
  source 1..21: mol_type = other DNA
gaaagcggccaacccgccaaa

SEQ ID NO: 19822 - DNA, 21 bp, synthetic construct
  misc_feature 1..21: note = Description of Artificial Sequence: Synthetic oligonucleotide
  source 1..21: mol_type = other DNA
aacgccgccagcgccggcgcc

SEQ ID NO: 19823 - DNA, 21 bp, synthetic construct
  misc_feature 1..21: note = Description of Artificial Sequence: Synthetic oligonucleotide
  source 1..21: mol_type = other DNA
catagtgagagtaagttggct

SEQ ID NO: 19824 - DNA, 21 bp, synthetic construct
  misc_feature 1..21: note = Description of Artificial Sequence: Synthetic oligonucleotide
  source 1..21: mol_type = other DNA
actcctggggataagacgatg

SEQ ID NO: 19825 - DNA, 21 bp, synthetic construct
  misc_feature 1..21: note = Description of Artificial Sequence: Synthetic oligonucleotide
  source 1..21: mol_type = other DNA
ggcatcgccgacagcagaacc

SEQ ID NO: 19826 - DNA, 21 bp, synthetic construct
  misc_feature 1..21: note = Description of Artificial Sequence: Synthetic oligonucleotide
  source 1..21: mol_type = other DNA
ggcgtcgacggcaaagccacc

SEQ ID NO: 19827 - DNA, 21 bp, synthetic construct
  misc_feature 1..21: note = Description of Artificial Sequence: Synthetic oligonucleotide
  source 1..21: mol_type = other DNA
gataatcataagccggctcag

SEQ ID NO: 19828 - DNA, 21 bp, synthetic construct
  misc_feature 1..21: note = Description of Artificial Sequence: Synthetic oligonucleotide
  source 1..21: mol_type = other DNA
ccgccgggtcagcctcagacg

SEQ ID NO: 19829 - DNA, 21 bp, synthetic construct
  misc_feature 1..21: note = Description of Artificial Sequence: Synthetic oligonucleotide
  source 1..21: mol_type = other DNA
aacaacaccagccaccccgcc

SEQ ID NO: 19830 - DNA, 21 bp, synthetic construct
  misc_feature 1..21: note = Description of Artificial Sequence: Synthetic oligonucleotide
  source 1..21: mol_type = other DNA
accggcaccagccccagcaga

SEQ ID NO: 19831 - DNA, 21 bp, synthetic construct
  misc_feature 1..21: note = Description of Artificial Sequence: Synthetic oligonucleotide
  source 1..21: mol_type = other DNA
accggcagccccccccccagc

SEQ ID NO: 19832 - DNA, 21 bp, synthetic construct
  misc_feature 1..21: note = Description of Artificial Sequence: Synthetic oligonucleotide
  source 1..21: mol_type = other DNA
accggcctcaaagaaaacccc

SEQ ID NO: 19833 - DNA, 21 bp, synthetic construct
  misc_feature 1..21: note = Description of Artificial Sequence: Synthetic oligonucleotide
  source 1..21: mol_type = other DNA
agcagaaaccccagcaacagc

SEQ ID NO: 19834 - DNA, 21 bp, synthetic construct
  misc_feature 1..21: note = Description of Artificial Sequence: Synthetic oligonucleotide
  source 1..21: mol_type = other DNA
cttcggacggctactagtaat

SEQ ID NO: 19835 - DNA, 21 bp, synthetic construct
  misc_feature 1..21: note = Description of Artificial Sequence: Synthetic oligonucleotide
  source 1..21: mol_type = other DNA
ggggatactcagcggtctgcg

SEQ ID NO: 19836 - DNA, 21 bp, synthetic construct
  misc_feature 1..21: note = Description of Artificial Sequence: Synthetic oligonucleotide
  source 1..21: mol_type = other DNA
acccaaggcaaaaccaacacc

SEQ ID NO: 19837 - DNA, 21 bp, synthetic construct
  misc_feature 1..21: note = Description of Artificial Sequence: Synthetic oligonucleotide
  source 1..21: mol_type = other DNA
ggtactagggcgactcctcag

SEQ ID NO: 19838 - DNA, 21 bp, synthetic construct
  misc_feature 1..21: note = Description of Artificial Sequence: Synthetic oligonucleotide
  source 1..21: mol_type = other DNA
cagagtactaaggctgttgag

SEQ ID NO: 19839 - DNA, 21 bp, synthetic construct
  misc_feature 1..21: note = Description of Artificial Sequence: Synthetic oligonucleotide
  source 1..21: mol_type = other DNA
agcagcaacagccccaccgcc

SEQ ID NO: 19840 - DNA, 21 bp, synthetic construct
  misc_feature 1..21: note = Description of Artificial Sequence: Synthetic oligonucleotide
  source 1..21: mol_type = other DNA
agccaaggcagcagcctcacc

SEQ ID NO: 19841 - DNA, 21 bp, synthetic construct
  misc_feature 1..21: note = Description of Artificial Sequence: Synthetic oligonucleotide
  source 1..21: mol_type = other DNA
agccacaacagccaaggcggc

SEQ ID NO: 19842 - DNA, 21 bp, synthetic construct
  misc_feature 1..21: note = Description of Artificial Sequence: Synthetic oligonucleotide
  source 1..21: mol_type = other DNA
caaggcagcagcaccagcacc

SEQ ID NO: 19843 - DNA, 21 bp, synthetic construct
  misc_feature 1..21: note = Description of Artificial Sequence: Synthetic oligonucleotide
  source 1..21: mol_type = other DNA
caggggaaggatgcttctatg

SEQ ID NO: 19844 - DNA, 21 bp, synthetic construct
  misc_feature 1..21: note = Description of Artificial Sequence: Synthetic oligonucleotide
  source 1..21: mol_type = other DNA
cgtatgggtgctccgacgggg

SEQ ID NO: 19845 - DNA, 21 bp, synthetic construct
  misc_feature 1..21: note = Description of Artificial Sequence: Synthetic oligonucleotide
  source 1..21: mol_type = other DNA
ctcgacggcacccccagccac

SEQ ID NO: 19846 - DNA, 21 bp, synthetic construct
  misc_feature 1..21: note = Description of Artificial Sequence: Synthetic oligonucleotide
  source 1..21: mol_type = other DNA
accaccgacaccggcaaccac

SEQ ID NO: 19847 - DNA, 21 bp, synthetic construct
  misc_feature 1..21: note = Description of Artificial Sequence: Synthetic oligonucleotide
  source 1..21: mol_type = other DNA
atgtctggtcagtcgtctcgt

SEQ ID NO: 19848 - DNA, 21 bp, synthetic construct
  misc_feature 1..21: note = Description of Artificial Sequence: Synthetic oligonucleotide
  source 1..21: mol_type = other DNA
agaaccggcagcaaaagcgac

SEQ ID NO: 19849 - DNA, 21 bp, synthetic construct
  misc_feature 1..21: note = Description of Artificial Sequence: Synthetic oligonucleotide
  source 1..21: mol_type = other DNA
aatgtggttagggattctaag

SEQ ID NO: 19850 - DNA, 21 bp, synthetic construct
  misc_feature 1..21: note = Description of Artificial Sequence: Synthetic oligonucleotide
  source 1..21: mol_type = other DNA
catactggttcggcgtcggct

SEQ ID NO: 19851 - DNA, 21 bp, synthetic construct
  misc_feature 1..21: note = Description of Artificial Sequence: Synthetic oligonucleotide
  source 1..21: mol_type = other DNA
gattttagtcagaaggggatg

SEQ ID NO: 19852 - DNA, 21 bp, synthetic construct
  misc_feature 1..21: note = Description of Artificial Sequence: Synthetic oligonucleotide
  source 1..21: mol_type = other DNA
ggcgtcagcagcagccccgcc

SEQ ID NO: 19853 - DNA, 21 bp, synthetic construct
  misc_feature 1..21: note = Description of Artificial Sequence: Synthetic oligonucleotide
  source 1..21: mol_type = other DNA
tcggggcagaataaggagtcg

SEQ ID NO: 19854 - DNA, 21 bp, synthetic construct
  misc_feature 1..21: note = Description of Artificial Sequence: Synthetic oligonucleotide
  source 1..21: mol_type = other DNA
gatgggtctcgtagtgggtct

SEQ ID NO: 19855 - DNA, 21 bp, synthetic construct
  misc_feature 1..21: note = Description of Artificial Sequence: Synthetic oligonucleotide
  source 1..21: mol_type = other DNA
aatagtcagtcgccgtctgcg

SEQ ID NO: 19856 - DNA, 21 bp, synthetic construct
  misc_feature 1..21: note = Description of Artificial Sequence: Synthetic oligonucleotide
  source 1..21: mol_type = other DNA
ctcacccaaggcggcaacagc

SEQ ID NO: 19857 - DNA, 21 bp, synthetic construct
  misc_feature 1..21: note = Description of Artificial Sequence: Synthetic oligonucleotide
  source 1..21: mol_type = other DNA
gctcggacggcgcagcctgtt

SEQ ID NO: 19858 - DNA, 21 bp, synthetic construct
  misc_feature 1..21: note = Description of Artificial Sequence: Synthetic oligonucleotide
  source 1..21: mol_type = other DNA
tcggcggatagggtggctacg

SEQ ID NO: 19859 - DNA, 21 bp, synthetic construct
  misc_feature 1..21: note = Description of Artificial Sequence: Synthetic oligonucleotide
  source 1..21: mol_type = other DNA
ggcggccccagcgccaaccaa

SEQ ID NO: 19860 - DNA, 21 bp, synthetic construct
  misc_feature 1..21: note = Description of Artificial Sequence: Synthetic oligonucleotide
  source 1..21: mol_type = other DNA
actggtacggcgacttctttg

SEQ ID NO: 19861 - DNA, 21 bp, synthetic construct
  misc_feature 1..21: note = Description of Artificial Sequence: Synthetic oligonucleotide
  source 1..21: mol_type = other DNA
gaaaaaggcaacggcagcacc

SEQ ID NO: 19862 - DNA, 21 bp, synthetic construct
  misc_feature 1..21: note = Description of Artificial Sequence: Synthetic oligonucleotide
  source 1..21: mol_type = other DNA
gttgcgaatgcttctggtggg

SEQ ID NO: 19863 - DNA, 21 bp, synthetic construct
  misc_feature 1..21: note = Description of Artificial Sequence: Synthetic oligonucleotide
  source 1..21: mol_type = other DNA
agcaacgacagcaaaagagtc

SEQ ID NO: 19864 - DNA, 21 bp, synthetic construct
  misc_feature 1..21: note = Description of Artificial Sequence: Synthetic oligonucleotide
  source 1..21: mol_type = other DNA
agcggcgaagccaaaaccaaa

SEQ ID NO: 19865 - DNA, 21 bp, synthetic construct
  misc_feature 1..21: note = Description of Artificial Sequence: Synthetic oligonucleotide
  source 1..21: mol_type = other DNA
caggctggtacgtcggttaat

SEQ ID NO: 19866 - DNA, 21 bp, synthetic construct
  misc_feature 1..21: note = Description of Artificial Sequence: Synthetic oligonucleotide
  source 1..21: mol_type = other DNA
gaactccccggcggcaccaaa

SEQ ID NO: 19867 - DNA, 21 bp, synthetic construct
  misc_feature 1..21: note = Description of Artificial Sequence: Synthetic oligonucleotide
  source 1..21: mol_type = other DNA
ggtttgggtggggagcgtaat

SEQ ID NO: 19868 - DNA, 21 bp, synthetic construct
  misc_feature 1..21: note = Description of Artificial Sequence: Synthetic oligonucleotide
  source 1..21: mol_type = other DNA
gttccgagtcaggttgggggt

SEQ ID NO: 19869 - DNA, 21 bp, synthetic construct
  misc_feature 1..21: note = Description of Artificial Sequence: Synthetic oligonucleotide
  source 1..21: mol_type = other DNA
tatagggatgataagactatt

SEQ ID NO: 19870 - DNA, 21 bp, synthetic construct
  misc_feature 1..21: note = Description of Artificial Sequence: Synthetic oligonucleotide
  source 1..21: mol_type = other DNA
aacagcctcgacaccagcaaa

SEQ ID NO: 19871 - DNA, 21 bp, synthetic construct
  misc_feature 1..21: note = Description of Artificial Sequence: Synthetic oligonucleotide
  source 1..21: mol_type = other DNA
gctggtacgcagagtactgct

SEQ ID NO: 19872 - DNA, 21 bp, synthetic construct
  misc_feature 1..21: note = Description of Artificial Sequence: Synthetic oligonucleotide
  source 1..21: mol_type = other DNA
agcaccgtcaaaggcagccaa

SEQ ID NO: 19873 - DNA, 21 bp, synthetic construct
  misc_feature 1..21: note = Description of Artificial Sequence: Synthetic oligonucleotide
  source 1..21: mol_type = other DNA
caactcaaaagccccagcagc

SEQ ID NO: 19874 - DNA, 21 bp, synthetic construct
  misc_feature 1..21: note = Description of Artificial Sequence: Synthetic oligonucleotide
  source 1..21: mol_type = other DNA
gccagccaagaaagagtcgcc

SEQ ID NO: 19875 - DNA, 21 bp, synthetic construct
  misc_feature 1..21: note = Description of Artificial Sequence: Synthetic oligonucleotide
  source 1..21: mol_type = other DNA
gctcgtagtcagacttcgagt

SEQ ID NO: 19876 - DNA, 21 bp, synthetic construct
  misc_feature 1..21: note = Description of Artificial Sequence: Synthetic oligonucleotide
  source 1..21: mol_type = other DNA
ggcagcagccaaggcctcacc

SEQ ID NO: 19877 - DNA, 21 bp, synthetic construct
  misc_feature 1..21: note = Description of Artificial Sequence: Synthetic oligonucleotide
  source 1..21: mol_type = other DNA
gccagccacctcaaacccccc

SEQ ID NO: 19878 - DNA, 21 bp, synthetic construct
  misc_feature 1..21: note = Description of Artificial Sequence: Synthetic oligonucleotide
  source 1..21: mol_type = other DNA
gcttcgacttcgcctgttgtt

SEQ ID NO: 19879 - DNA, 21 bp, synthetic construct
  misc_feature 1..21: note = Description of Artificial Sequence: Synthetic oligonucleotide
  source 1..21: mol_type = other DNA
ctcaacagcgccaaaaacagc

SEQ ID NO: 19880 - DNA, 21 bp, synthetic construct
  misc_feature 1..21: note = Description of Artificial Sequence: Synthetic oligonucleotide
  source 1..21: mol_type = other DNA
ggccccgaaggcggcaacaga

SEQ ID NO: 19881 - DNA, 21 bp, synthetic construct
  misc_feature 1..21: note = Description of Artificial Sequence: Synthetic oligonucleotide
  source 1..21: mol_type = other DNA
agtaaggggtcggggactctg

SEQ ID NO: 19882 - DNA, 21 bp, synthetic construct
  misc_feature 1..21: note = Description of Artificial Sequence: Synthetic oligonucleotide
  source 1..21: mol_type = other DNA
gattctaagacgcctgcgcgg

SEQ ID NO: 19883 - DNA, 21 bp, synthetic construct
  misc_feature 1..21: note = Description of Artificial Sequence: Synthetic oligonucleotide
  source 1..21: mol_type = other DNA
agtaagtctactggttctgtt

SEQ ID NO: 19884 - DNA, 21 bp, synthetic construct
  misc_feature 1..21: note = Description of Artificial Sequence: Synthetic oligonucleotide
  source 1..21: mol_type = other DNA
ctcagcggcgacgccgccaga

SEQ ID NO: 19885 - DNA, 21 bp, synthetic construct
  misc_feature 1..21: note = Description of Artificial Sequence: Synthetic oligonucleotide
  source 1..21: mol_type = other DNA
ctgggttctcctgttagtacg

SEQ ID NO: 19886 - DNA, 21 bp, synthetic construct
  misc_feature 1..21: note = Description of Artificial Sequence: Synthetic oligonucleotide
  source 1..21: mol_type = other DNA
caagccaccagcagcagcacc

SEQ ID NO: 19887 - DNA, 21 bp, synthetic construct
  misc_feature 1..21: note = Description of Artificial Sequence: Synthetic oligonucleotide
  source 1..21: mol_type = other DNA
accggcagcaacaaaagccac

SEQ ID NO: 19888 - DNA, 21 bp, synthetic construct
  misc_feature 1..21: note = Description of Artificial Sequence: Synthetic oligonucleotide
  source 1..21: mol_type = other DNA
gagacgaagacggctaataag

SEQ ID NO: 19889 - DNA, 21 bp, synthetic construct
  misc_feature 1..21: note = Description of Artificial Sequence: Synthetic oligonucleotide
  source 1..21: mol_type = other DNA
ggtatgacgacggcggcgggg

SEQ ID NO: 19890 - DNA, 21 bp, synthetic construct
  misc_feature 1..21: note = Description of Artificial Sequence: Synthetic oligonucleotide
  source 1..21: mol_type = other DNA
accagcgtcgccagcacccaa

SEQ ID NO: 19891 - DNA, 21 bp, synthetic construct
  misc_feature 1..21: note = Description of Artificial Sequence: Synthetic oligonucleotide
  source 1..21: mol_type = other DNA
acggttgctgagaagttgggt

SEQ ID NO: 19892 - DNA, 21 bp, synthetic construct
  misc_feature 1..21: note = Description of Artificial Sequence: Synthetic oligonucleotide
  source 1..21: mol_type = other DNA
atcaccggcagcacccccccc

SEQ ID NO: 19893 - DNA, 21 bp, synthetic construct
  misc_feature 1..21: note = Description of Artificial Sequence: Synthetic oligonucleotide
  source 1..21: mol_type = other DNA
gacatcggcgccagccacgcc

SEQ ID NO: 19894 - DNA, 21 bp, synthetic construct
  misc_feature 1..21: note = Description of Artificial Sequence: Synthetic oligonucleotide
  source 1..21: mol_type = other DNA
tcgagtacgtcgagtacgcat

SEQ ID NO: 19895 - DNA, 21 bp, synthetic construct
  misc_feature 1..21: note = Description of Artificial Sequence: Synthetic oligonucleotide
  source 1..21: mol_type = other DNA
aacaacacccccaccctcagc

SEQ ID NO: 19896 - DNA, 21 bp, synthetic construct
  misc_feature 1..21: note = Description of Artificial Sequence: Synthetic oligonucleotide
  source 1..21: mol_type = other DNA
agtagtagttctacttctaag

SEQ ID NO: 19897 - DNA, 21 bp, synthetic construct
  misc_feature 1..21: note = Description of Artificial Sequence: Synthetic oligonucleotide
  source 1..21: mol_type = other DNA
tcgacgggtcattctcctcat

SEQ ID NO: 19898 - DNA, 21 bp, synthetic construct
  misc_feature 1..21: note = Description of Artificial Sequence: Synthetic oligonucleotide
  source 1..21: mol_type = other DNA
aacagcagcggcgcccacacc

SEQ ID NO: 19899 - DNA, 21 bp, synthetic construct
  misc_feature 1..21: note = Description of Artificial Sequence: Synthetic oligonucleotide
  source 1..21: mol_type = other DNA
accaccggcaccagcaccccc

SEQ ID NO: 19900 - DNA, 21 bp, synthetic construct
  misc_feature 1..21: note = Description of Artificial Sequence: Synthetic oligonucleotide
  source 1..21: mol_type = other DNA
caagtcggcagcaaccacagc

SEQ ID NO: 19901 - DNA, 21 bp, synthetic construct
  misc_feature 1..21: note = Description of Artificial Sequence: Synthetic oligonucleotide
  source 1..21: mol_type = other DNA
gacagcagaggccccagcagc

SEQ ID NO: 19902 - DNA, 21 bp, synthetic construct
  misc_feature 1..21: note = Description of Artificial Sequence: Synthetic oligonucleotide
  source 1..21: mol_type = other DNA
cacggcgccggcaacgccgcc

SEQ ID NO: 19903 - DNA, 21 bp, synthetic construct
  misc_feature 1..21: note = Description of Artificial Sequence: Synthetic oligonucleotide
  source 1..21: mol_type = other DNA
gtcggcagcagcaccgtcatg

SEQ ID NO: 19904 - DNA, 21 bp, synthetic construct
  misc_feature 1..21: note = Description of Artificial Sequence: Synthetic oligonucleotide
  source 1..21: mol_type = other DNA
gaggcgcgttcggcgcatggg

SEQ ID NO: 19905 - DNA, 21 bp, synthetic construct
  misc_feature 1..21: note = Description of Artificial Sequence: Synthetic oligonucleotide
  source 1..21: mol_type = other DNA
gctacgggtactggtaatggt

SEQ ID NO: 19906 - DNA, 21 bp, synthetic construct
  misc_feature 1..21: note = Description of Artificial Sequence: Synthetic oligonucleotide
  source 1..21: mol_type = other DNA
ggttctaaggctaatactttg

SEQ ID NO: 19907 - DNA, 21 bp, synthetic construct
  misc_feature 1..21: note = Description of Artificial Sequence: Synthetic oligonucleotide
  source 1..21: mol_type = other DNA
accagcggcaccggcaaccaa

SEQ ID NO: 19908 - DNA, 21 bp, synthetic construct
  misc_feature 1..21: note = Description of Artificial Sequence: Synthetic oligonucleotide
  source 1..21: mol_type = other DNA
gacagaaacggcagccaaggc

SEQ ID NO: 19909 - DNA, 21 bp, synthetic construct
  misc_feature 1..21: note = Description of Artificial Sequence: Synthetic oligonucleotide
  source 1..21: mol_type = other DNA
caacaagtcaaccccaaactc

SEQ ID NO: 19910 - DNA, 21 bp, synthetic construct
  misc_feature 1..21: note = Description of Artificial Sequence: Synthetic oligonucleotide
  source 1..21: mol_type = other DNA
aacggcagcctcaaacccacc

SEQ ID NO: 19911 - DNA, 21 bp, synthetic construct
  misc_feature 1..21: note = Description of Artificial Sequence: Synthetic oligonucleotide
  source 1..21: mol_type = other DNA
agaaacggcagccccaacgtc

SEQ ID NO: 19912 - DNA, 21 bp, synthetic construct
  misc_feature 1..21: note = Description of Artificial Sequence: Synthetic oligonucleotide
  source 1..21: mol_type = other DNA
gaaagcaacaaaggcatcggc

SEQ ID NO: 19913 - DNA, 21 bp, synthetic construct
  misc_feature 1..21: note = Description of Artificial Sequence: Synthetic oligonucleotide
  source 1..21: mol_type = other DNA
gacaccagccccagaaacaac

SEQ ID NO: 19914 - DNA, 21 bp, synthetic construct
  misc_feature 1..21: note = Description of Artificial Sequence: Synthetic oligonucleotide
  source 1..21: mol_type = other DNA
gcgggtgattcgtcgaggggg

SEQ ID NO: 19915 - DNA, 21 bp, synthetic construct
  misc_feature 1..21: note = Description of Artificial Sequence: Synthetic oligonucleotide
  source 1..21: mol_type = other DNA
gtcggcagcagagaaaaaggc

SEQ ID NO: 19916 - DNA, 21 bp, synthetic construct
  misc_feature 1..21: note = Description of Artificial Sequence: Synthetic oligonucleotide
  source 1..21: mol_type = other DNA
tcgccttcgagtaagaatagt

SEQ ID NO: 19917 - DNA, 21 bp, synthetic construct
  misc_feature 1..21: note = Description of Artificial Sequence: Synthetic oligonucleotide
  source 1..21: mol_type = other DNA
agaagccaaggcgccagcatg

SEQ ID NO: 19918 - DNA, 21 bp, synthetic construct
  misc_feature 1..21: note = Description of Artificial Sequence: Synthetic oligonucleotide
  source 1..21: mol_type = other DNA
ggtacgacgcctacgagtcgt

SEQ ID NO: 19919 - DNA, 21 bp, synthetic construct
  misc_feature 1..21: note = Description of Artificial Sequence: Synthetic oligonucleotide
  source 1..21: mol_type = other DNA
gatggtcgggtgaagaatggg

SEQ ID NO: 19920 - DNA, 21 bp, synthetic construct
  misc_feature 1..21: note = Description of Artificial Sequence: Synthetic oligonucleotide
  source 1..21: mol_type = other DNA
actcaggctgttaatggtggt

SEQ ID NO: 19921 - DNA, 21 bp, synthetic construct
  misc_feature 1..21: note = Description of Artificial Sequence: Synthetic oligonucleotide
  source 1..21: mol_type = other DNA
gaacaaagagccaccgcccaa

SEQ ID NO: 19922 - DNA, 21 bp, synthetic construct
  misc_feature 1..21: note = Description of Artificial Sequence: Synthetic oligonucleotide
  source 1..21: mol_type = other DNA
gatctttcgggtaagtctctt

SEQ ID NO: 19923 - DNA, 21 bp, synthetic construct
  misc_feature 1..21: note = Description of Artificial Sequence: Synthetic oligonucleotide
  source 1..21: mol_type = other DNA
aacaccagaagcagcaccgtc

SEQ ID NO: 19924 - DNA, 21 bp, synthetic construct
  misc_feature 1..21: note = Description of Artificial Sequence: Synthetic oligonucleotide
  source 1..21: mol_type = other DNA
gcccccagcgccagccccaac

SEQ ID NO: 19925 - DNA, 21 bp, synthetic construct
  misc_feature 1..21: note = Description of Artificial Sequence: Synthetic oligonucleotide
  source 1..21: mol_type = other DNA
ggcagcagcaaaagccccgaa

SEQ ID NO: 19926 - DNA, 21 bp, synthetic construct
  misc_feature 1..21: note = Description of Artificial Sequence: Synthetic oligonucleotide
  source 1..21: mol_type = other DNA
aacggcagcgacgccaaaacc

SEQ ID NO: 19927 - DNA, 21 bp, synthetic construct
  misc_feature 1..21: note = Description of Artificial Sequence: Synthetic oligonucleotide
  source 1..21: mol_type = other DNA
aattctgctaatcagaatcat

SEQ ID NO: 19928 - DNA, 21 bp, synthetic construct
  misc_feature 1..21: note = Description of Artificial Sequence: Synthetic oligonucleotide
  source 1..21: mol_type = other DNA
agcggcggcgcccccgccgtc

SEQ ID NO: 19929 - DNA, 21 bp, synthetic construct
  misc_feature 1..21: note = Description of Artificial Sequence: Synthetic oligonucleotide
  source 1..21: mol_type = other DNA
ctcaccagccccgccggcgcc

SEQ ID NO: 19930 - DNA, 21 bp, synthetic construct
  misc_feature 1..21: note = Description of Artificial Sequence: Synthetic oligonucleotide
  source 1..21: mol_type = other DNA
gaccacagcaaagaccacagc

SEQ ID NO: 19931 - DNA, 21 bp, synthetic construct
  misc_feature 1..21: note = Description of Artificial Sequence: Synthetic oligonucleotide
  source 1..21: mol_type = other DNA
gagagtgggaagccgggtttg

SEQ ID NO: 19932 - DNA, 21 bp, synthetic construct
  misc_feature 1..21: note = Description of Artificial Sequence: Synthetic oligonucleotide
  source 1..21: mol_type = other DNA
gttagggataatagtagtcag

SEQ ID NO: 19933 - DNA, 21 bp, synthetic construct
  misc_feature 1..21: note = Description of Artificial Sequence: Synthetic oligonucleotide
  source 1..21: mol_type = other DNA
acgcagcagtctcctagtatg

SEQ ID NO: 19934 - DNA, 21 bp, synthetic construct
  misc_feature 1..21: note = Description of Artificial Sequence: Synthetic oligonucleotide
  source 1..21: mol_type = other DNA
aacggcggcagcaaaagcctc

SEQ ID NO: 19935 - DNA, 21 bp, synthetic construct
  misc_feature 1..21: note = Description of Artificial Sequence: Synthetic oligonucleotide
  source 1..21: mol_type = other DNA
agtcctgtgagtggtggtcat

SEQ ID NO: 19936 - DNA, 21 bp, synthetic construct
  misc_feature 1..21: note = Description of Artificial Sequence: Synthetic oligonucleotide
  source 1..21: mol_type = other DNA
gggcgggatgatactagggtt

SEQ ID NO: 19937 - DNA, 21 bp, synthetic construct
  misc_feature 1..21: note = Description of Artificial Sequence: Synthetic oligonucleotide
  source 1..21: mol_type = other DNA
ggtatgaatagtaagcttacg

SEQ ID NO: 19938 - DNA, 21 bp, synthetic construct
  misc_feature 1..21: note = Description of Artificial Sequence: Synthetic oligonucleotide
  source 1..21: mol_type = other DNA
agcggcgccagcgccaccagc

SEQ ID NO: 19939 - DNA, 21 bp, synthetic construct
  misc_feature 1..21: note = Description of Artificial Sequence: Synthetic oligonucleotide
  source 1..21: mol_type = other DNA
caaggcaccatgagcaacggc

SEQ ID NO: 19940 - DNA, 21 bp, synthetic construct
  misc_feature 1..21: note = Description of Artificial Sequence: Synthetic oligonucleotide
  source 1..21: mol_type = other DNA
ggcggcggcacccccctcatc

SEQ ID NO: 19941 - DNA, 21 bp, synthetic construct
  misc_feature 1..21: note = Description of Artificial Sequence: Synthetic oligonucleotide
  source 1..21: mol_type = other DNA
tctcaggcggattctaagcag

SEQ ID NO: 19942 - DNA, 21 bp, synthetic construct
  misc_feature 1..21: note = Description of Artificial Sequence: Synthetic oligonucleotide
  source 1..21: mol_type = other DNA
agcaccagcgccaccaacacc

SEQ ID NO: 19943 - DNA, 21 bp, synthetic construct
  misc_feature 1..21: note = Description of Artificial Sequence: Synthetic oligonucleotide
  source 1..21: mol_type = other DNA
aacagcggcgaacacgccagc

SEQ ID NO: 19944 - DNA, 21 bp, synthetic construct
  misc_feature 1..21: note = Description of Artificial Sequence: Synthetic oligonucleotide
  source 1..21: mol_type = other DNA
ggtccgcagcctagtaaggcg

SEQ ID NO: 19945 - DNA, 21 bp, synthetic construct
  misc_feature 1..21: note = Description of Artificial Sequence: Synthetic oligonucleotide
  source 1..21: mol_type = other DNA
gtcaacggcaccagcaaagtc

SEQ ID NO: 19946 - DNA, 21 bp, synthetic construct
  misc_feature 1..21: note = Description of Artificial Sequence: Synthetic oligonucleotide
  source 1..21: mol_type = other DNA
gatgttgcgaagacttcttct

SEQ ID NO: 19947 - DNA, 21 bp, synthetic construct
  misc_feature 1..21: note = Description of Artificial Sequence: Synthetic oligonucleotide
  source 1..21: mol_type = other DNA
ggtacgtcgcctcctgggact

SEQ ID NO: 19948 - DNA, 21 bp, synthetic construct
  misc_feature 1..21: note = Description of Artificial Sequence: Synthetic oligonucleotide
  source 1..21: mol_type = other DNA
aatccttctcctgctaatgtt

SEQ ID NO: 19949 - DNA, 21 bp, synthetic construct
  misc_feature 1..21: note = Description of Artificial Sequence: Synthetic oligonucleotide
  source 1..21: mol_type = other DNA
caacacaccagcaccaacgcc

SEQ ID NO: 19950 - DNA, 21 bp, synthetic construct
  misc_feature 1..21: note = Description of Artificial Sequence: Synthetic oligonucleotide
  source 1..21: mol_type = other DNA
gtcagcagcagcaccaacagc

SEQ ID NO: 19951 - DNA, 21 bp, synthetic construct
  misc_feature 1..21: note = Description of Artificial Sequence: Synthetic oligonucleotide
  source 1..21: mol_type = other DNA
ctcaccagcaaaggccccagc

SEQ ID NO: 19952 - DNA, 21 bp, synthetic construct
  misc_feature 1..21: note = Description of Artificial Sequence: Synthetic oligonucleotide
  source 1..21: mol_type = other DNA
agaagcaacggcagcgccggc

SEQ ID NO: 19953 - DNA, 21 bp, synthetic construct
  misc_feature 1..21: note = Description of Artificial Sequence: Synthetic oligonucleotide
  source 1..21: mol_type = other DNA
agcagcaacaccagcaacgtc

SEQ ID NO: 19954 - DNA, 21 bp, synthetic construct
  misc_feature 1..21: note = Description of Artificial Sequence: Synthetic oligonucleotide
  source 1..21: mol_type = other DNA
aacagcaaaaacaacaaagaa

SEQ ID NO: 19955 - DNA, 21 bp, synthetic construct
  misc_feature 1..21: note = Description of Artificial Sequence: Synthetic oligonucleotide
  source 1..21: mol_type = other DNA
aacagccaaggcaacctcggc

SEQ ID NO: 19956 - DNA, 21 bp, synthetic construct
  misc_feature 1..21: note = Description of Artificial Sequence: Synthetic oligonucleotide
  source 1..21: mol_type = other DNA
aacgccggcagccacagccaa

SEQ ID NO: 19957 - DNA, 21 bp, synthetic construct
  misc_feature 1..21: note = Description of Artificial Sequence: Synthetic oligonucleotide
  source 1..21: mol_type = other DNA
aaggttgggcaggatcgtctt

SEQ ID NO: 19958 - DNA, 21 bp, synthetic construct
  misc_feature 1..21: note = Description of Artificial Sequence: Synthetic oligonucleotide
  source 1..21: mol_type = other DNA
aatggtgtggcttcggcgact

SEQ ID NO: 19959 - DNA, 21 bp, synthetic construct
  misc_feature 1..21: note = Description of Artificial Sequence: Synthetic oligonucleotide
  source 1..21: mol_type = other DNA
accagaagcgaaaccagccaa

SEQ ID NO: 19960 - DNA, 21 bp, synthetic construct
  misc_feature 1..21: note = Description of Artificial Sequence: Synthetic oligonucleotide
  source 1..21: mol_type = other DNA
acccaagtccccgcccccagc

SEQ ID NO: 19961 - DNA, 21 bp, synthetic construct
  misc_feature 1..21: note = Description of Artificial Sequence: Synthetic oligonucleotide
  source 1..21: mol_type = other DNA
actggtaagggttctccgaat

SEQ ID NO: 19962 - DNA, 21 bp, synthetic construct
  misc_feature 1..21: note = Description of Artificial Sequence: Synthetic oligonucleotide
  source 1..21: mol_type = other DNA
agcagagtcagcagcggcacc

SEQ ID NO: 19963 - DNA, 21 bp, synthetic construct
  misc_feature 1..21: note = Description of Artificial Sequence: Synthetic oligonucleotide
  source 1..21: mol_type = other DNA
atcgccggcaacaccagcacc

SEQ ID NO: 19964 - DNA, 21 bp, synthetic construct
  misc_feature 1..21: note = Description of Artificial Sequence: Synthetic oligonucleotide
  source 1..21: mol_type = other DNA
caagccagcgccagcagcaga

SEQ ID NO: 19965 - DNA, 21 bp, synthetic construct
  misc_feature 1..21: note = Description of Artificial Sequence: Synthetic oligonucleotide
  source 1..21: mol_type = other DNA
caaggcggcagcccccccggc

SEQ ID NO: 19966 - DNA, 21 bp, synthetic construct
  misc_feature 1..21: note = Description of Artificial Sequence: Synthetic oligonucleotide
  source 1..21: mol_type = other DNA
ctcatggaccaaaaaagcgcc

SEQ ID NO: 19967 - DNA, 21 bp, synthetic construct
  misc_feature 1..21: note = Description of Artificial Sequence: Synthetic oligonucleotide
  source 1..21: mol_type = other DNA
gaaggcaccaacctcagaagc

SEQ ID NO: 19968 - DNA, 21 bp, synthetic construct
  misc_feature 1..21: note = Description of Artificial Sequence: Synthetic oligonucleotide
  source 1..21: mol_type = other DNA
ggcaaagaaaccagagacaaa

SEQ ID NO: 19969 - DNA, 21 bp, synthetic construct
  misc_feature 1..21: note = Description of Artificial Sequence: Synthetic oligonucleotide
  source 1..21: mol_type = other DNA
ggccccggcggcagaaacgac

SEQ ID NO: 19970 - DNA, 21 bp, synthetic construct
  misc_feature 1..21: note = Description of Artificial Sequence: Synthetic oligonucleotide
  source 1..21: mol_type = other DNA
ggtaatactagggatagttct

SEQ ID NO: 19971 - DNA, 21 bp, synthetic construct
  misc_feature 1..21: note = Description of Artificial Sequence: Synthetic oligonucleotide
  source 1..21: mol_type = other DNA
ggtagtaattctggggctacg

SEQ ID NO: 19972 - DNA, 21 bp, synthetic construct
  misc_feature 1..21: note = Description of Artificial Sequence: Synthetic oligonucleotide
  source 1..21: mol_type = other DNA
gtcagcaacaaagtccaagaa

SEQ ID NO: 19973 - DNA, 21 bp, synthetic construct
  misc_feature 1..21: note = Description of Artificial Sequence: Synthetic oligonucleotide
  source 1..21: mol_type = other DNA
gttcagcagtctgctagtcgg

SEQ ID NO: 19974 - DNA, 21 bp, synthetic construct
  misc_feature 1..21: note = Description of Artificial Sequence: Synthetic oligonucleotide
  source 1..21: mol_type = other DNA
ttcgccgccagcgaaaacaga

SEQ ID NO: 19975 - DNA, 21 bp, synthetic construct
  misc_feature 1..21: note = Description of Artificial Sequence: Synthetic oligonucleotide
  source 1..21: mol_type = other DNA
caacccaaaagcagcagcacc

SEQ ID NO: 19976 - DNA, 21 bp, synthetic construct
  misc_feature 1..21: note = Description of Artificial Sequence: Synthetic oligonucleotide
  source 1..21: mol_type = other DNA
tcgagtgcgtctaatcatacg

SEQ ID NO: 19977 - DNA, 21 bp, synthetic construct
  misc_feature 1..21: note = Description of Artificial Sequence: Synthetic oligonucleotide
  source 1..21: mol_type = other DNA
gattcggttcgttcttcgggg

SEQ ID NO: 19978 - DNA, 21 bp, synthetic construct
  misc_feature 1..21: note = Description of Artificial Sequence: Synthetic oligonucleotide
  source 1..21: mol_type = other DNA
aatgctgtgacgacgcctaat

SEQ ID NO: 19979 - DNA, 21 bp, synthetic construct
  misc_feature 1..21: note = Description of Artificial Sequence: Synthetic oligonucleotide
  source 1..21: mol_type = other DNA
gttactgcggcgtctaattct

SEQ ID NO: 19980 - DNA, 21 bp, synthetic construct
  misc_feature 1..21: note = Description of Artificial Sequence: Synthetic oligonucleotide
  source 1..21: mol_type = other DNA
gaacccagcagcagcaaaacc

SEQ ID NO: 19981 - DNA, 21 bp, synthetic construct
  misc_feature 1..21: note = Description of Artificial Sequence: Synthetic oligonucleotide
  source 1..21: mol_type = other DNA
acgccgacgaatagtaaggtt

SEQ ID NO: 19982 - DNA, 21 bp, synthetic construct
  misc_feature 1..21: note = Description of Artificial Sequence: Synthetic oligonucleotide
  source 1..21: mol_type = other DNA
agcggccccaccaccgtcagc

SEQ ID NO: 19983 - DNA, 21 bp, synthetic construct
  misc_feature 1..21: note = Description of Artificial Sequence: Synthetic oligonucleotide
  source 1..21: mol_type = other DNA
gccatgaccagcggcagcaaa

SEQ ID NO: 19984 - DNA, 21 bp, synthetic construct
  misc_feature 1..21: note = Description of Artificial Sequence: Synthetic oligonucleotide
  source 1..21: mol_type = other DNA
gtcaacgccagcagcgtccaa

SEQ ID NO: 19985 - DNA, 21 bp, synthetic construct
  misc_feature 1..21: note = Description of Artificial Sequence: Synthetic oligonucleotide
  source 1..21: mol_type = other DNA
gacagcgccagcagcagaggc

SEQ ID NO: 19986 - DNA, 21 bp, synthetic construct
  misc_feature 1..21: note = Description of Artificial Sequence: Synthetic oligonucleotide
  source 1..21: mol_type = other DNA
ggtacgggggatcgtgagcgt

SEQ ID NO: 19987 - DNA, 21 bp, synthetic construct
  misc_feature 1..21: note = Description of Artificial Sequence: Synthetic oligonucleotide
  source 1..21: mol_type = other DNA
gggagtggtggtcataattcg

SEQ ID NO: 19988 - DNA, 21 bp, synthetic construct
  misc_feature 1..21: note = Description of Artificial Sequence: Synthetic oligonucleotide
  source 1..21: mol_type = other DNA
ctcacccaaggccaaaccaaa

SEQ ID NO: 19989 - DNA, 21 bp, synthetic construct
  misc_feature 1..21: note = Description of Artificial Sequence: Synthetic oligonucleotide
  source 1..21: mol_type = other DNA
ggcggcgtcgaaagccaccaa

SEQ ID NO: 19990 - DNA, 21 bp, synthetic construct
  misc_feature 1..21: note = Description of Artificial Sequence: Synthetic oligonucleotide
  source 1..21: mol_type = other DNA
tttggggcgggtactagttct

SEQ ID NO: 19991 - DNA, 21 bp, synthetic construct
  misc_feature 1..21: note = Description of Artificial Sequence: Synthetic oligonucleotide
  source 1..21: mol_type = other DNA
caaagaaacagcggcaacggc

SEQ ID NO: 19992 - DNA, 21 bp, synthetic construct
  misc_feature 1..21: note = Description of Artificial Sequence: Synthetic oligonucleotide
  source 1..21: mol_type = other DNA
gacaccgtcaccggcaaacaa

SEQ ID NO: 19993 - DNA, 21 bp, synthetic construct
  misc_feature 1..21: note = Description of Artificial Sequence: Synthetic oligonucleotide
  source 1..21: mol_type = other DNA
gctggttcttcgactgctgcg

SEQ ID NO: 19994 - DNA, 21 bp, synthetic construct
  misc_feature 1..21: note = Description of Artificial Sequence: Synthetic oligonucleotide
  source 1..21: mol_type = other DNA
agaagcgaaaacacccccagc

SEQ ID NO: 19995 - DNA, 21 bp, synthetic construct
  misc_feature 1..21: note = Description of Artificial Sequence: Synthetic oligonucleotide
  source 1..21: mol_type = other DNA
agcttcgacaacaaaggcaaa

SEQ ID NO: 19996 - DNA, 21 bp, synthetic construct
  misc_feature 1..21: note = Description of Artificial Sequence: Synthetic oligonucleotide
  source 1..21: mol_type = other DNA
gaaagaggcacccccggcggc

SEQ ID NO: 19997 - DNA, 21 bp, synthetic construct
  misc_feature 1..21: note = Description of Artificial Sequence: Synthetic oligonucleotide
  source 1..21: mol_type = other DNA
gtcggcaccagcaccatcgtc

SEQ ID NO: 19998 - DNA, 21 bp, synthetic construct
  misc_feature 1..21: note = Description of Artificial Sequence: Synthetic oligonucleotide
  source 1..21: mol_type = other DNA
tcggggggtaagggtgctgcg

SEQ ID NO: 19999 - DNA, 21 bp, synthetic construct
  misc_feature 1..21: note = Description of Artificial Sequence: Synthetic oligonucleotide
  source 1..21: mol_type = other DNA
cagtctcggcctactgtggcg

SEQ ID NO: 20000 - DNA, 21 bp, synthetic construct
  misc_feature 1..21: note = Description of Artificial Sequence: Synthetic oligonucleotide
  source 1..21: mol_type = other DNA
gccggcgaaagcgcccacagc

SEQ ID NO: 20001 - DNA, 21 bp, synthetic construct
  misc_feature 1..21: note = Description of Artificial Sequence: Synthetic oligonucleotide
  source 1..21: mol_type = other DNA
tctacttcgacgagttcgctg

SEQ ID NO: 20002 - DNA, 21 bp, synthetic construct
  misc_feature 1..21: note = Description of Artificial Sequence: Synthetic oligonucleotide
  source 1..21: mol_type = other DNA
aagcctgatgcgccgggtgtg

SEQ ID NO: 20003 - DNA, 21 bp, synthetic construct
  misc_feature 1..21: note = Description of Artificial Sequence: Synthetic oligonucleotide
  source 1..21: mol_type = other DNA
agtagtagtacgacggcgggt

SEQ ID NO: 20004 - DNA, 21 bp, synthetic construct
  misc_feature 1..21: note = Description of Artificial Sequence: Synthetic oligonucleotide
  source 1..21: mol_type = other DNA
ggtcgtgagactccgtctctg

SEQ ID NO: 20005 - DNA, 21 bp, synthetic construct
  misc_feature 1..21: note = Description of Artificial Sequence: Synthetic oligonucleotide
  source 1..21: mol_type = other DNA
tctgctgattctcagaagggg

SEQ ID NO: 20006 - DNA, 21 bp, synthetic construct
  misc_feature 1..21: note = Description of Artificial Sequence: Synthetic oligonucleotide
  source 1..21: mol_type = other DNA
ctcggcagcggcagcggcgcc

SEQ ID NO: 20007 - DNA, 21 bp, synthetic construct
  misc_feature 1..21: note = Description of Artificial Sequence: Synthetic oligonucleotide
  source 1..21: mol_type = other DNA
agcaacagcgaaagaaccagc

SEQ ID NO: 20008 - DNA, 21 bp, synthetic construct
  misc_feature 1..21: note = Description of Artificial Sequence: Synthetic oligonucleotide
  source 1..21: mol_type = other DNA
agcagcccccccagccccagc

SEQ ID NO: 20009 - DNA, 21 bp, synthetic construct
  misc_feature 1..21: note = Description of Artificial Sequence: Synthetic oligonucleotide
  source 1..21: mol_type = other DNA
gatcgggctgggactcataat

SEQ ID NO: 20010 - DNA, 21 bp, synthetic construct
  misc_feature 1..21: note = Description of Artificial Sequence: Synthetic oligonucleotide
  source 1..21: mol_type = other DNA
ttgggtacgccgagtaatggg

SEQ ID NO: 20011 - DNA, 21 bp, synthetic construct
  misc_feature 1..21: note = Description of Artificial Sequence: Synthetic oligonucleotide
  source 1..21: mol_type = other DNA
gaaggcagcaacaaagtcgtc

SEQ ID NO: 20012 - DNA, 21 bp, synthetic construct
  misc_feature 1..21: note = Description of Artificial Sequence: Synthetic oligonucleotide
  source 1..21: mol_type = other DNA
ggcaccagcgccaccgccctc

SEQ ID NO: 20013 - DNA, 21 bp, synthetic construct
  misc_feature 1..21: note = Description of Artificial Sequence: Synthetic oligonucleotide
  source 1..21: mol_type = other DNA
aagcaggtttcgtctcctgtt

SEQ ID NO: 20014 - DNA, 21 bp, synthetic construct
  misc_feature 1..21: note = Description of Artificial Sequence: Synthetic oligonucleotide
  source 1..21: mol_type = other DNA
gacgccaccagcagcccccaa

SEQ ID NO: 20015 - DNA, 21 bp, synthetic construct
  misc_feature 1..21: note = Description of Artificial Sequence: Synthetic oligonucleotide
  source 1..21: mol_type = other DNA
gggcaggagcatggtgtgagt

SEQ ID NO: 20016 - DNA, 21 bp, synthetic construct
  misc_feature 1..21: note = Description of Artificial Sequence: Synthetic oligonucleotide
  source 1..21: mol_type = other DNA
ggtgtgaatagtaaggcgacg

SEQ ID NO: 20017 - DNA, 21 bp, synthetic construct
  misc_feature 1..21: note = Description of Artificial Sequence: Synthetic oligonucleotide
  source 1..21: mol_type = other DNA
agccccgccagcaccaccaaa

SEQ ID NO: 20018 - DNA, 21 bp, synthetic construct
  misc_feature 1..21: note = Description of Artificial Sequence: Synthetic oligonucleotide
  source 1..21: mol_type = other DNA
gaaagcaccaaacccagagac

SEQ ID NO: 20019 - DNA, 21 bp, synthetic construct
  misc_feature 1..21: note = Description of Artificial Sequence: Synthetic oligonucleotide
  source 1..21: mol_type = other DNA
aatccgtctcgggagtcttcg

SEQ ID NO: 20020 - DNA, 21 bp, synthetic construct
  misc_feature 1..21: note = Description of Artificial Sequence: Synthetic oligonucleotide
  source 1..21: mol_type = other DNA
agtgagtctcctaaggcgggt

SEQ ID NO: 20021 - DNA, 21 bp, synthetic construct
  misc_feature 1..21: note = Description of Artificial Sequence: Synthetic oligonucleotide
  source 1..21: mol_type = other DNA
aatcagtctggtgatcggtcg

SEQ ID NO: 20022 - DNA, 21 bp, synthetic construct
  misc_feature 1..21: note = Description of Artificial Sequence: Synthetic oligonucleotide
  source 1..21: mol_type = other DNA
gcccaaggcagcagcaaaacc

SEQ ID NO: 20023 - DNA, 21 bp, synthetic construct
  misc_feature 1..21: note = Description of Artificial Sequence: Synthetic oligonucleotide
  source 1..21: mol_type = other DNA
agagtcgacgccagcaacgtc

SEQ ID NO: 20024 - DNA, 21 bp, synthetic construct
  misc_feature 1..21: note = Description of Artificial Sequence: Synthetic oligonucleotide
  source 1..21: mol_type = other DNA
agcaaaaacggcctccaaggc

SEQ ID NO: 20025 - DNA, 21 bp, synthetic construct
  misc_feature 1..21: note = Description of Artificial Sequence: Synthetic oligonucleotide
  source 1..21: mol_type = other DNA
agcgacgacagcagcagacac

SEQ ID NO: 20026 - DNA, 21 bp, synthetic construct
  misc_feature 1..21: note = Description of Artificial Sequence: Synthetic oligonucleotide
  source 1..21: mol_type = other DNA
cagcatgcgacgtcggctggg

SEQ ID NO: 20027 - DNA, 21 bp, synthetic construct
  misc_feature 1..21: note = Description of Artificial Sequence: Synthetic oligonucleotide
  source 1..21: mol_type = other DNA
gatcttgggtcgcataatagg

SEQ ID NO: 20028 - DNA, 21 bp, synthetic construct
  misc_feature 1..21: note = Description of Artificial Sequence: Synthetic oligonucleotide
  source 1..21: mol_type = other DNA
gcccccggcggcaaaatggtc

SEQ ID NO: 20029 - DNA, 21 bp, synthetic construct
  misc_feature 1..21: note = Description of Artificial Sequence: Synthetic oligonucleotide
  source 1..21: mol_type = other DNA
ggcagcgaaagcagaagcggc

SEQ ID NO: 20030 - DNA, 21 bp, synthetic construct
  misc_feature 1..21: note = Description of Artificial Sequence: Synthetic oligonucleotide
  source 1..21: mol_type = other DNA
gtggcgtcgtcgtcgactgtg

SEQ ID NO: 20031 - DNA, 21 bp, synthetic construct
  misc_feature 1..21: note = Description of Artificial Sequence: Synthetic oligonucleotide
  source 1..21: mol_type = other DNA
agtggtacttctaaggcggag

SEQ ID NO: 20032 - DNA, 21 bp, synthetic construct
  misc_feature 1..21: note = Description of Artificial Sequence: Synthetic oligonucleotide
  source 1..21: mol_type = other DNA
ctgggtaaggatcagattcag

SEQ ID NO: 20033 - DNA, 21 bp, synthetic construct
  misc_feature 1..21: note = Description of Artificial Sequence: Synthetic oligonucleotide
  source 1..21: mol_type = other DNA
gtcaccagcagcagcagccaa

SEQ ID NO: 20034 - DNA, 21 bp, synthetic construct
  misc_feature 1..21: note = Description of Artificial Sequence: Synthetic oligonucleotide
  source 1..21: mol_type = other DNA
aacaaaaaccaagccgccaac

SEQ ID NO: 20035 - DNA, 21 bp, synthetic construct
  misc_feature 1..21: note = Description of Artificial Sequence: Synthetic oligonucleotide
  source 1..21: mol_type = other DNA
caaggccaacaacacagccaa

SEQ ID NO: 20036 - DNA, 21 bp, synthetic construct
  misc_feature 1..21: note = Description of Artificial Sequence: Synthetic oligonucleotide
  source 1..21: mol_type = other DNA
ctgtcggatccgcagaggggg

SEQ ID NO: 20037 - DNA, 21 bp, synthetic construct
  misc_feature 1..21: note = Description of Artificial Sequence: Synthetic oligonucleotide
  source 1..21: mol_type = other DNA
ggtgagaagcctggtggtaat

SEQ ID NO: 20038 - DNA, 21 bp, synthetic construct
  misc_feature 1..21: note = Description of Artificial Sequence: Synthetic oligonucleotide
  source 1..21: mol_type = other DNA
ggtgatattagttctaagaat

SEQ ID NO: 20039 - DNA, 21 bp, synthetic construct
  misc_feature 1..21: note = Description of Artificial Sequence: Synthetic oligonucleotide
  source 1..21: mol_type = other DNA
tcttcgagtacgcatagtctt

SEQ ID NO: 20040 - DNA, 21 bp, synthetic construct
  misc_feature 1..21: note = Description of Artificial Sequence: Synthetic oligonucleotide
  source 1..21: mol_type = other DNA
tcttctggtaatggtcatgct

SEQ ID NO: 20041 - DNA, 21 bp, synthetic construct
  misc_feature 1..21: note = Description of Artificial Sequence: Synthetic oligonucleotide
  source 1..21: mol_type = other DNA
ggtgattcttctcctaagacg

SEQ ID NO: 20042 - DNA, 21 bp, synthetic construct
  misc_feature 1..21: note = Description of Artificial Sequence: Synthetic oligonucleotide
  source 1..21: mol_type = other DNA
gctgttaattcttcggctggg

SEQ ID NO: 20043 - DNA, 21 bp, synthetic construct
  misc_feature 1..21: note = Description of Artificial Sequence: Synthetic oligonucleotide
  source 1..21: mol_type = other DNA
actacgggttctagttctact

SEQ ID NO: 20044 - DNA, 21 bp, synthetic construct
  misc_feature 1..21: note = Description of Artificial Sequence: Synthetic oligonucleotide
  source 1..21: mol_type = other DNA
agtgatgggcagacgaatagg

SEQ ID NO: 20045 - DNA, 21 bp, synthetic construct
  misc_feature 1..21: note = Description of Artificial Sequence: Synthetic oligonucleotide
  source 1..21: mol_type = other DNA
agttcgagtaattcttcgcag

SEQ ID NO: 20046 - DNA, 21 bp, synthetic construct
  misc_feature 1..21: note = Description of Artificial Sequence: Synthetic oligonucleotide
  source 1..21: mol_type = other DNA
agttctacgcctaatgggaag

SEQ ID NO: 20047 - DNA, 21 bp, synthetic construct
  misc_feature 1..21: note = Description of Artificial Sequence: Synthetic oligonucleotide
  source 1..21: mol_type = other DNA
caccccgacagcaccggcaaa

SEQ ID NO: 20048 - DNA, 21 bp, synthetic construct
  misc_feature 1..21: note = Description of Artificial Sequence: Synthetic oligonucleotide
  source 1..21: mol_type = other DNA
gacagcaccaaaaccagcgtc

SEQ ID NO: 20049 - DNA, 21 bp, synthetic construct
  misc_feature 1..21: note = Description of Artificial Sequence: Synthetic oligonucleotide
  source 1..21: mol_type = other DNA
caggtgagtgctgctgcgggt

SEQ ID NO: 20050 - DNA, 21 bp, synthetic construct
  misc_feature 1..21: note = Description of Artificial Sequence: Synthetic oligonucleotide
  source 1..21: mol_type = other DNA
ggcgacatcaaacccagcagc

SEQ ID NO: 20051 - DNA, 21 bp, synthetic construct
  misc_feature 1..21: note = Description of Artificial Sequence: Synthetic oligonucleotide
  source 1..21: mol_type = other DNA
aagactggtaatgtgagtagc

SEQ ID NO: 20052 - DNA, 21 bp, synthetic construct
  misc_feature 1..21: note = Description of Artificial Sequence: Synthetic oligonucleotide
  source 1..21: mol_type = other DNA
agcagcgacagcaaaaccagc

SEQ ID NO: 20053 - DNA, 21 bp, synthetic construct
  misc_feature 1..21: note = Description of Artificial Sequence: Synthetic oligonucleotide
  source 1..21: mol_type = other DNA
ggcaccgaacccagccacaaa

SEQ ID NO: 20054 - DNA, 21 bp, synthetic construct
  misc_feature 1..21: note = Description of Artificial Sequence: Synthetic oligonucleotide
  source 1..21: mol_type = other DNA
acgacggagaaggctcagtct

SEQ ID NO: 20055 - DNA, 21 bp, synthetic construct
  misc_feature 1..21: note = Description of Artificial Sequence: Synthetic oligonucleotide
  source 1..21: mol_type = other DNA
gaaaaaagagacgccgtcgcc

SEQ ID NO: 20056 - DNA, 21 bp, synthetic construct
  misc_feature 1..21: note = Description of Artificial Sequence: Synthetic oligonucleotide
  source 1..21: mol_type = other DNA
ttggggacttctacgtctagt

SEQ ID NO: 20057 - DNA, 21 bp, synthetic construct
  misc_feature 1..21: note = Description of Artificial Sequence: Synthetic oligonucleotide
  source 1..21: mol_type = other DNA
gttcagggttcgtcggctact

SEQ ID NO: 20058 - DNA, 21 bp, synthetic construct
  misc_feature 1..21: note = Description of Artificial Sequence: Synthetic oligonucleotide
  source 1..21: mol_type = other DNA
aatctgaatttgcctaagggt

SEQ ID NO: 20059 - DNA, 21 bp, synthetic construct
  misc_feature 1..21: note = Description of Artificial Sequence: Synthetic oligonucleotide
  source 1..21: mol_type = other DNA
acggttactagttctcgtgat

SEQ ID NO: 20060 - DNA, 21 bp, synthetic construct
  misc_feature 1..21: note = Description of Artificial Sequence: Synthetic oligonucleotide
  source 1..21: mol_type = other DNA
agcctcaccagccccgccgaa

SEQ ID NO: 20061 - DNA, 21 bp, synthetic construct
  misc_feature 1..21: note = Description of Artificial Sequence: Synthetic oligonucleotide
  source 1..21: mol_type = other DNA
cagcgtagtcagacttcggct

SEQ ID NO: 20062 - DNA, 21 bp, synthetic construct
  misc_feature 1..21: note = Description of Artificial Sequence: Synthetic oligonucleotide
  source 1..21: mol_type = other DNA
ggcacccaaagcgtccccgcc

SEQ ID NO: 20063 - DNA, 21 bp, synthetic construct
  misc_feature 1..21: note = Description of Artificial Sequence: Synthetic oligonucleotide
  source 1..21: mol_type = other DNA
gtcgccagcagcagcggcggc

SEQ ID NO: 20064 - DNA, 21 bp, synthetic construct
  misc_feature 1..21: note = Description of Artificial Sequence: Synthetic oligonucleotide
  source 1..21: mol_type = other DNA
tcgaatactcagccggttagc

SEQ ID NO: 20065 - DNA, 21 bp, synthetic construct
  misc_feature 1..21: note = Description of Artificial Sequence: Synthetic oligonucleotide
  source 1..21: mol_type = other DNA
gacagcaaacccagcgccctc

SEQ ID NO: 20066 - DNA, 21 bp, synthetic construct
  misc_feature 1..21: note = Description of Artificial Sequence: Synthetic oligonucleotide
  source 1..21: mol_type = other DNA
ggcgaaaccagcaaagtcgtc

SEQ ID NO: 20067 - DNA, 21 bp, synthetic construct
  misc_feature 1..21: note = Description of Artificial Sequence: Synthetic oligonucleotide
  source 1..21: mol_type = other DNA
agcggccaagccagcacccac

SEQ ID NO: 20068 - DNA, 21 bp, synthetic construct
  misc_feature 1..21: note = Description of Artificial Sequence: Synthetic oligonucleotide
  source 1..21: mol_type = other DNA
gattcgcataagacgtctacg

SEQ ID NO: 20069 - DNA, 21 bp, synthetic construct
  misc_feature 1..21: note = Description of Artificial Sequence: Synthetic oligonucleotide
  source 1..21: mol_type = other DNA
agcgtcgacaaaagcaccaga

SEQ ID NO: 20070 - DNA, 21 bp, synthetic construct
  misc_feature 1..21: note = Description of Artificial Sequence: Synthetic oligonucleotide
  source 1..21: mol_type = other DNA
gaagtcagccccgccgccaaa

SEQ ID NO: 20071 - DNA, 21 bp, synthetic construct
  misc_feature 1..21: note = Description of Artificial Sequence: Synthetic oligonucleotide
  source 1..21: mol_type = other DNA
aaagacagcggcggccacaaa

SEQ ID NO: 20072 - DNA, 21 bp, synthetic construct
  misc_feature 1..21: note = Description of Artificial Sequence: Synthetic oligonucleotide
  source 1..21: mol_type = other DNA
aacaaagacaccagacccgaa

SEQ ID NO: 20073 - DNA, 21 bp, synthetic construct
  misc_feature 1..21: note = Description of Artificial Sequence: Synthetic oligonucleotide
  source 1..21: mol_type = other DNA
aataagctggggtcggctggt

SEQ ID NO: 20074 - DNA, 21 bp, synthetic construct
  misc_feature 1..21: note = Description of Artificial Sequence: Synthetic oligonucleotide
  source 1..21: mol_type = other DNA
actactagtgctgtgagttct

SEQ ID NO: 20075 - DNA, 21 bp, synthetic construct
  misc_feature 1..21: note = Description of Artificial Sequence: Synthetic oligonucleotide
  source 1..21: mol_type = other DNA
agcggcgtcggcacccacacc

SEQ ID NO: 20076 - DNA, 21 bp, synthetic construct
  misc_feature 1..21: note = Description of Artificial Sequence: Synthetic oligonucleotide
  source 1..21: mol_type = other DNA
gcgccgactagtggtggtcag

SEQ ID NO: 20077 - DNA, 21 bp, synthetic construct
  misc_feature 1..21: note = Description of Artificial Sequence: Synthetic oligonucleotide
  source 1..21: mol_type = other DNA
ggtgaggttaagccttcggct

SEQ ID NO: 20078 - DNA, 21 bp, synthetic construct
  misc_feature 1..21: note = Description of Artificial Sequence: Synthetic oligonucleotide
  source 1..21: mol_type = other DNA
gttagtaagcctggtgggaat

SEQ ID NO: 20079 - DNA, 21 bp, synthetic construct
  misc_feature 1..21: note = Description of Artificial Sequence: Synthetic oligonucleotide
  source 1..21: mol_type = other DNA
tcgagtacgaaggatcaggtg

SEQ ID NO: 20080 - DNA, 21 bp, synthetic construct
  misc_feature 1..21: note = Description of Artificial Sequence: Synthetic oligonucleotide
  source 1..21: mol_type = other DNA
aatgggagtaatggtcagaac

SEQ ID NO: 20081 - DNA, 21 bp, synthetic construct
  misc_feature 1..21: note = Description of Artificial Sequence: Synthetic oligonucleotide
  source 1..21: mol_type = other DNA
ttgcctgatgctaagggtacg

SEQ ID NO: 20082 - DNA, 21 bp, synthetic construct
  misc_feature 1..21: note = Description of Artificial Sequence: Synthetic oligonucleotide
  source 1..21: mol_type = other DNA
caaagcggcacccacagcagc

SEQ ID NO: 20083 - DNA, 21 bp, synthetic construct
  misc_feature 1..21: note = Description of Artificial Sequence: Synthetic oligonucleotide
  source 1..21: mol_type = other DNA
tcgactaattcttctcgtgat

SEQ ID NO: 20084 - DNA, 21 bp, synthetic construct
  misc_feature 1..21: note = Description of Artificial Sequence: Synthetic oligonucleotide
  source 1..21: mol_type = other DNA
accagcaaccccaccagcggc

SEQ ID NO: 20085 - DNA, 21 bp, synthetic construct
  misc_feature 1..21: note = Description of Artificial Sequence: Synthetic oligonucleotide
  source 1..21: mol_type = other DNA
gtccccgtcgacggcaaacaa

SEQ ID NO: 20086 - DNA, 21 bp, synthetic construct
  misc_feature 1..21: note = Description of Artificial Sequence: Synthetic oligonucleotide
  source 1..21: mol_type = other DNA
accgccaccagcaaacccgac

SEQ ID NO: 20087 - DNA, 21 bp, synthetic construct
  misc_feature 1..21: note = Description of Artificial Sequence: Synthetic oligonucleotide
  source 1..21: mol_type = other DNA
gacagcacccccgccacccaa

SEQ ID NO: 20088 - DNA, 21 bp, synthetic construct
  misc_feature 1..21: note = Description of Artificial Sequence: Synthetic oligonucleotide
  source 1..21: mol_type = other DNA
gacggcgccagcagagcccaa

SEQ ID NO: 20089 - DNA, 21 bp, synthetic construct
  misc_feature 1..21: note = Description of Artificial Sequence: Synthetic oligonucleotide
  source 1..21: mol_type = other DNA
tctcctcagaatactccgagt

SEQ ID NO: 20090 - DNA, 21 bp, synthetic construct
  misc_feature 1..21: note = Description of Artificial Sequence: Synthetic oligonucleotide
  source 1..21: mol_type = other DNA
cgttctaatagtcctgtggag

SEQ ID NO: 20091 - DNA, 21 bp, synthetic construct
  misc_feature 1..21: note = Description of Artificial Sequence: Synthetic oligonucleotide
  source 1..21: mol_type = other DNA
aagaatggtgatagggcttct

SEQ ID NO: 20092 - DNA, 21 bp, synthetic construct
  misc_feature 1..21: note = Description of Artificial Sequence: Synthetic oligonucleotide
  source 1..21: mol_type = other DNA
aatgtggagggttctcggacg

SEQ ID NO: 20093 - DNA, 21 bp, synthetic construct
  misc_feature 1..21: note = Description of Artificial Sequence: Synthetic oligonucleotide
  source 1..21: mol_type = other DNA
agtgagaatcggagtcctgcg

SEQ ID NO: 20094 - DNA, 21 bp, synthetic construct
  misc_feature 1..21: note = Description of Artificial Sequence: Synthetic oligonucleotide
  source 1..21: mol_type = other DNA
agcagacaagccggcagcggc

SEQ ID NO: 20095 - DNA, 21 bp, synthetic construct
  misc_feature 1..21: note = Description of Artificial Sequence: Synthetic oligonucleotide
  source 1..21: mol_type = other DNA
agtggtgagtctaagcggggg

SEQ ID NO: 20096 - DNA, 21 bp, synthetic construct
  misc_feature 1..21: note = Description of Artificial Sequence: Synthetic oligonucleotide
  source 1..21: mol_type = other DNA
gattctaatagtcggtctatt

SEQ ID NO: 20097 - DNA, 21 bp, synthetic construct
  misc_feature 1..21: note = Description of Artificial Sequence: Synthetic oligonucleotide
  source 1..21: mol_type = other DNA
tctggtgcgaataattcttcg

SEQ ID NO: 20098 - DNA, 21 bp, synthetic construct
  misc_feature 1..21: note = Description of Artificial Sequence: Synthetic oligonucleotide
  source 1..21: mol_type = other DNA
gttgggggtcctgctcctaat

SEQ ID NO: 20099 - DNA, 21 bp, synthetic construct
  misc_feature 1..21: note = Description of Artificial Sequence: Synthetic oligonucleotide
  source 1..21: mol_type = other DNA
aacggcacccaaaccagcaga

SEQ ID NO: 20100 - DNA, 21 bp, synthetic construct
  misc_feature 1..21: note = Description of Artificial Sequence: Synthetic oligonucleotide
  source 1..21: mol_type = other DNA
tctgctgattcgaataggagt

SEQ ID NO: 20101 - DNA, 21 bp, synthetic construct
  misc_feature 1..21: note = Description of Artificial Sequence: Synthetic oligonucleotide
  source 1..21: mol_type = other DNA
ggccaaaacaaaaccaaccac

SEQ ID NO: 20102 - DNA, 21 bp, synthetic construct
  misc_feature 1..21: note = Description of Artificial Sequence: Synthetic oligonucleotide
  source 1..21: mol_type = other DNA
aacagcggcaacgaaaacaga

SEQ ID NO: 20103 - DNA, 21 bp, synthetic construct
  misc_feature 1..21: note = Description of Artificial Sequence: Synthetic oligonucleotide
  source 1..21: mol_type = other DNA
agcagcgccggcgccaccagc

SEQ ID NO: 20104 - DNA, 21 bp, synthetic construct
  misc_feature 1..21: note = Description of Artificial Sequence: Synthetic oligonucleotide
  source 1..21: mol_type = other DNA
agccccgtcgaaagcagcaga

SEQ ID NO: 20105 - DNA, 21 bp, synthetic construct
  misc_feature 1..21: note = Description of Artificial Sequence: Synthetic oligonucleotide
  source 1..21: mol_type = other DNA
gccggcagcagagaaagcacc

SEQ ID NO: 20106 - DNA, 21 bp, synthetic construct
  misc_feature 1..21: note = Description of Artificial Sequence: Synthetic oligonucleotide
  source 1..21: mol_type = other DNA
tcgcagccgcctacggggaag

SEQ ID NO: 20107 - DNA, 21 bp, synthetic construct
  misc_feature 1..21: note = Description of Artificial Sequence: Synthetic oligonucleotide
  source 1..21: mol_type = other DNA
tctgcgggtagttcgattagt

SEQ ID NO: 20108 - DNA, 21 bp, synthetic construct
  misc_feature 1..21: note = Description of Artificial Sequence: Synthetic oligonucleotide
  source 1..21: mol_type = other DNA
tctggtcagagtgataagaat

SEQ ID NO: 20109 - DNA, 21 bp, synthetic construct
  misc_feature 1..21: note = Description of Artificial Sequence: Synthetic oligonucleotide
  source 1..21: mol_type = other DNA
actcatacggctactagttcg

SEQ ID NO: 20110 - DNA, 21 bp, synthetic construct
  misc_feature 1..21: note = Description of Artificial Sequence: Synthetic oligonucleotide
  source 1..21: mol_type = other DNA
agcaccgcccaaagaagcgaa

SEQ ID NO: 20111 - DNA, 21 bp, synthetic construct
  misc_feature 1..21: note = Description of Artificial Sequence: Synthetic oligonucleotide
  source 1..21: mol_type = other DNA
ggtaaggagacgcagagtgtt

SEQ ID NO: 20112 - DNA, 21 bp, synthetic construct
  misc_feature 1..21: note = Description of Artificial Sequence: Synthetic oligonucleotide
  source 1..21: mol_type = other DNA
gtgtcgggggagcattctcag

SEQ ID NO: 20113 - DNA, 21 bp, synthetic construct
  misc_feature 1..21: note = Description of Artificial Sequence: Synthetic oligonucleotide
  source 1..21: mol_type = other DNA
tcgtatgggaagacgggtagt

SEQ ID NO: 20114 - DNA, 21 bp, synthetic construct
  misc_feature 1..21: note = Description of Artificial Sequence: Synthetic oligonucleotide
  source 1..21: mol_type = other DNA
cagcagacgtcggatcatcgg

SEQ ID NO: 20115 - DNA, 21 bp, synthetic construct
  misc_feature 1..21: note = Description of Artificial Sequence: Synthetic oligonucleotide
  source 1..21: mol_type = other DNA
acgcggggtaatcctgggacg

SEQ ID NO: 20116 - DNA, 21 bp, synthetic construct
  misc_feature 1..21: note = Description of Artificial Sequence: Synthetic oligonucleotide
  source 1..21: mol_type = other DNA
caaaccagcggcaaaagcaac

SEQ ID NO: 20117 - DNA, 21 bp, synthetic construct
  misc_feature 1..21: note = Description of Artificial Sequence: Synthetic oligonucleotide
  source 1..21: mol_type = other DNA
atgggcaacaacacccccagc

SEQ ID NO: 20118 - DNA, 21 bp, synthetic construct
  misc_feature 1..21: note = Description of Artificial Sequence: Synthetic oligonucleotide
  source 1..21: mol_type = other DNA
catggtgttagtacgtcgaat

SEQ ID NO: 20119 - DNA, 21 bp, synthetic construct
  misc_feature 1..21: note = Description of Artificial Sequence: Synthetic oligonucleotide
  source 1..21: mol_type = other DNA
cagggtcatactaatgggaag

SEQ ID NO: 20120 - DNA, 21 bp, synthetic construct
  misc_feature 1..21: note = Description of Artificial Sequence: Synthetic oligonucleotide
  source 1..21: mol_type = other DNA
gtggtgacgggttcgtctaag

SEQ ID NO: 20121 - DNA, 21 bp, synthetic construct
  misc_feature 1..21: note = Description of Artificial Sequence: Synthetic oligonucleotide
  source 1..21: mol_type = other DNA
tctgctgatcgttctggtaag

SEQ ID NO: 20122 - DNA, 21 bp, synthetic construct
  misc_feature 1..21: note = Description of Artificial Sequence: Synthetic oligonucleotide
  source 1..21: mol_type = other DNA
tgtgatgctaagaatacgggt

SEQ ID NO: 20123 - DNA, 21 bp, synthetic construct
  misc_feature 1..21: note = Description of Artificial Sequence: Synthetic oligonucleotide
  source 1..21: mol_type = other DNA
ggcaccaccaaagaacactac

SEQ ID NO: 20124 - DNA, 21 bp, synthetic construct
  misc_feature 1..21: note = Description of Artificial Sequence: Synthetic oligonucleotide
  source 1..21: mol_type = other DNA
atgccgtcgaaggttgcgtct

SEQ ID NO: 20125 - DNA, 21 bp, synthetic construct
  misc_feature 1..21: note = Description of Artificial Sequence: Synthetic oligonucleotide
  source 1..21: mol_type = other DNA
aacggttctggacagaagtta

SEQ ID NO: 20126 - DNA, 21 bp, synthetic construct
  misc_feature 1..21: note = Description of Artificial Sequence: Synthetic oligonucleotide
  source 1..21: mol_type = other DNA
agtgggcttacggataagaag

SEQ ID NO: 20127 - DNA, 21 bp, synthetic construct
  misc_feature 1..21: note = Description of Artificial Sequence: Synthetic oligonucleotide
  source 1..21: mol_type = other DNA
gaaaacgtcagcggcatcaaa

SEQ ID NO: 20128 - DNA, 21 bp, synthetic construct
  misc_feature 1..21: note = Description of Artificial Sequence: Synthetic oligonucleotide
  source 1..21: mol_type = other DNA
gccggcagcagcggcaaaacc

SEQ ID NO: 20129 - DNA, 21 bp, synthetic construct
  misc_feature 1..21: note = Description of Artificial Sequence: Synthetic oligonucleotide
  source 1..21: mol_type = other DNA
gggatgaagcagacttcgact

SEQ ID NO: 20130 - DNA, 21 bp, synthetic construct
  misc_feature 1..21: note = Description of Artificial Sequence: Synthetic oligonucleotide
  source 1..21: mol_type = other DNA
agcgccgcccaacaaggcaac

SEQ ID NO: 20131 - DNA, 21 bp, synthetic construct
  misc_feature 1..21: note = Description of Artificial Sequence: Synthetic oligonucleotide
  source 1..21: mol_type = other DNA
agcggcgaccaacacagcaga

SEQ ID NO: 20132 - DNA, 21 bp, synthetic construct
  misc_feature 1..21: note = Description of Artificial Sequence: Synthetic oligonucleotide
  source 1..21: mol_type = other DNA
gtttcgaattctaagtcggag

SEQ ID NO: 20133 - DNA, 21 bp, synthetic construct
  misc_feature 1..21: note = Description of Artificial Sequence: Synthetic oligonucleotide
  source 1..21: mol_type = other DNA
accatgagccccagcggccac

SEQ ID NO: 20134 - DNA, 21 bp, synthetic construct
  misc_feature 1..21: note = Description of Artificial Sequence: Synthetic oligonucleotide
  source 1..21: mol_type = other DNA
agcctcaccaaaggcgtcggc

SEQ ID NO: 20135 - DNA, 21 bp, synthetic construct
  misc_feature 1..21: note = Description of Artificial Sequence: Synthetic oligonucleotide
  source 1..21: mol_type = other DNA
agcggcaccggcgaacccaga

SEQ ID NO: 20136 - DNA, 21 bp, synthetic construct
  misc_feature 1..21: note = Description of Artificial Sequence: Synthetic oligonucleotide
  source 1..21: mol_type = other DNA
cacggcaccagccccagcatg

SEQ ID NO: 20137 - DNA, 21 bp, synthetic construct
  misc_feature 1..21: note = Description of Artificial Sequence: Synthetic oligonucleotide
  source 1..21: mol_type = other DNA
ggcgccaaaggcagcaacctc

SEQ ID NO: 20138 - DNA, 21 bp, synthetic construct
  misc_feature 1..21: note = Description of Artificial Sequence: Synthetic oligonucleotide
  source 1..21: mol_type = other DNA
gggtctggtagtagtgcgcag

SEQ ID NO: 20139 - DNA, 21 bp, synthetic construct
  misc_feature 1..21: note = Description of Artificial Sequence: Synthetic oligonucleotide
  source 1..21: mol_type = other DNA
actctttcgcagccgaatacg

SEQ ID NO: 20140 - DNA, 21 bp, synthetic construct
  misc_feature 1..21: note = Description of Artificial Sequence: Synthetic oligonucleotide
  source 1..21: mol_type = other DNA
accacccacaaccccagccaa

SEQ ID NO: 20141 - DNA, 21 bp, synthetic construct
  misc_feature 1..21: note = Description of Artificial Sequence: Synthetic oligonucleotide
  source 1..21: mol_type = other DNA
agcatcaaccaacaaggcaaa

SEQ ID NO: 20142 - DNA, 21 bp, synthetic construct
  misc_feature 1..21: note = Description of Artificial Sequence: Synthetic oligonucleotide
  source 1..21: mol_type = other DNA
acccaaaacagcagagcccaa

SEQ ID NO: 20143 - DNA, 21 bp, synthetic construct
  misc_feature 1..21: note = Description of Artificial Sequence: Synthetic oligonucleotide
  source 1..21: mol_type = other DNA
cagtcggatattaaggtgaat

SEQ ID NO: 20144 - DNA, 21 bp, synthetic construct
  misc_feature 1..21: note = Description of Artificial Sequence: Synthetic oligonucleotide
  source 1..21: mol_type = other DNA
cttgggacttcgtctaatggg

SEQ ID NO: 20145 - DNA, 21 bp, synthetic construct
  misc_feature 1..21: note = Description of Artificial Sequence: Synthetic oligonucleotide
  source 1..21: mol_type = other DNA
agcagcggcaaaaccctcacc

SEQ ID NO: 20146 - DNA, 21 bp, synthetic construct
  misc_feature 1..21: note = Description of Artificial Sequence: Synthetic oligonucleotide
  source 1..21: mol_type = other DNA
acggttgcttcgactaatgcg

SEQ ID NO: 20147 - DNA, 21 bp, synthetic construct
  misc_feature 1..21: note = Description of Artificial Sequence: Synthetic oligonucleotide
  source 1..21: mol_type = other DNA
gaggtgactaagacgggtttg

SEQ ID NO: 20148 - DNA, 21 bp, synthetic construct
  misc_feature 1..21: note = Description of Artificial Sequence: Synthetic oligonucleotide
  source 1..21: mol_type = other DNA
gccgtcgacaacaaaaacagc

SEQ ID NO: 20149 - DNA, 21 bp, synthetic construct
  misc_feature 1..21: note = Description of Artificial Sequence: Synthetic oligonucleotide
  source 1..21: mol_type = other DNA
ggtagggatagttcgcctaat

SEQ ID NO: 20150 - DNA, 21 bp, synthetic construct
  misc_feature 1..21: note = Description of Artificial Sequence: Synthetic oligonucleotide
  source 1..21: mol_type = other DNA
gttactggtccttcgacgagt

SEQ ID NO: 20151 - DNA, 21 bp, synthetic construct
  misc_feature 1..21: note = Description of Artificial Sequence: Synthetic oligonucleotide
  source 1..21: mol_type = other DNA
acgactggtactccgtcgggt

SEQ ID NO: 20152 - DNA, 21 bp, synthetic construct
  misc_feature 1..21: note = Description of Artificial Sequence: Synthetic oligonucleotide
  source 1..21: mol_type = other DNA
agcaaagaaggcaaaccccac

SEQ ID NO: 20153 - DNA, 21 bp, synthetic construct
  misc_feature 1..21: note = Description of Artificial Sequence: Synthetic oligonucleotide
  source 1..21: mol_type = other DNA
ctcaccaacaccaccagccaa

SEQ ID NO: 20154 - DNA, 21 bp, synthetic construct
  misc_feature 1..21: note = Description of Artificial Sequence: Synthetic oligonucleotide
  source 1..21: mol_type = other DNA
gccagagacagcaaagcccaa

SEQ ID NO: 20155 - DNA, 21 bp, synthetic construct
  misc_feature 1..21: note = Description of Artificial Sequence: Synthetic oligonucleotide
  source 1..21: mol_type = other DNA
gatcgtccgactcatcagtct

SEQ ID NO: 20156 - DNA, 21 bp, synthetic construct
  misc_feature 1..21: note = Description of Artificial Sequence: Synthetic oligonucleotide
  source 1..21: mol_type = other DNA
gaaggcagacccaccagcagc

SEQ ID NO: 20157 - DNA, 21 bp, synthetic construct
  misc_feature 1..21: note = Description of Artificial Sequence: Synthetic oligonucleotide
  source 1..21: mol_type = other DNA
tcgattggttctactaatgct

SEQ ID NO: 20158 - DNA, 21 bp, synthetic construct
  misc_feature 1..21: note = Description of Artificial Sequence: Synthetic oligonucleotide
  source 1..21: mol_type = other DNA
tcggagagtgatccgaggaag

SEQ ID NO: 20159 - DNA, 21 bp, synthetic construct
  misc_feature 1..21: note = Description of Artificial Sequence: Synthetic oligonucleotide
  source 1..21: mol_type = other DNA
aacagccaaacccacagcggc

SEQ ID NO: 20160 - DNA, 21 bp, synthetic construct
  misc_feature 1..21: note = Description of Artificial Sequence: Synthetic oligonucleotide
  source 1..21: mol_type = other DNA
agcggcaaaagcgacttcagc

SEQ ID NO: 20161 - DNA, 21 bp, synthetic construct
  misc_feature 1..21: note = Description of Artificial Sequence: Synthetic oligonucleotide
  source 1..21: mol_type = other DNA
atgtcgggtccttcgaatagt

SEQ ID NO: 20162 - DNA, 21 bp, synthetic construct
  misc_feature 1..21: note = Description of Artificial Sequence: Synthetic oligonucleotide
  source 1..21: mol_type = other DNA
caaaaagccgacagcgtcaac

SEQ ID NO: 20163 - DNA, 21 bp, synthetic construct
  misc_feature 1..21: note = Description of Artificial Sequence: Synthetic oligonucleotide
  source 1..21: mol_type = other DNA
gctactgcgcctttgaagaat

SEQ ID NO: 20164 - DNA, 21 bp, synthetic construct
  misc_feature 1..21: note = Description of Artificial Sequence: Synthetic oligonucleotide
  source 1..21: mol_type = other DNA
accagcgacgccaaactcgtc

SEQ ID NO: 20165 - DNA, 21 bp, synthetic construct
  misc_feature 1..21: note = Description of Artificial Sequence: Synthetic oligonucleotide
  source 1..21: mol_type = other DNA
ggttcgggttcgggttcttcg

SEQ ID NO: 20166 - DNA, 21 bp, synthetic construct
  misc_feature 1..21: note = Description of Artificial Sequence: Synthetic oligonucleotide
  source 1..21: mol_type = other DNA
acgcagggtgatagggctggt

SEQ ID NO: 20167 - DNA, 21 bp, synthetic construct
  misc_feature 1..21: note = Description of Artificial Sequence: Synthetic oligonucleotide
  source 1..21: mol_type = other DNA
actcgggagacggatgtgcgt

SEQ ID NO: 20168 - DNA, 21 bp, synthetic construct
  misc_feature 1..21: note = Description of Artificial Sequence: Synthetic oligonucleotide
  source 1..21: mol_type = other DNA
gatcgtgctactagttctcat

SEQ ID NO: 20169 - DNA, 21 bp, synthetic construct
  misc_feature 1..21: note = Description of Artificial Sequence: Synthetic oligonucleotide
  source 1..21: mol_type = other DNA
cagcctaataatgctcaggtt

SEQ ID NO: 20170 - DNA, 21 bp, synthetic construct
  misc_feature 1..21: note = Description of Artificial Sequence: Synthetic oligonucleotide
  source 1..21: mol_type = other DNA
gaccccgccaaaagcgccgtc

SEQ ID NO: 20171 - DNA, 21 bp, synthetic construct
  misc_feature 1..21: note = Description of Artificial Sequence: Synthetic oligonucleotide
  source 1..21: mol_type = other DNA
ggttctggtaaggggggtaat

SEQ ID NO: 20172 - DNA, 21 bp, synthetic construct
  misc_feature 1..21: note = Description of Artificial Sequence: Synthetic oligonucleotide
  source 1..21: mol_type = other DNA
aaaagaagcgacaccaccacc

SEQ ID NO: 20173 - DNA, 21 bp, synthetic construct
  misc_feature 1..21: note = Description of Artificial Sequence: Synthetic oligonucleotide
  source 1..21: mol_type = other DNA
aaggattctggggggaattcg

SEQ ID NO: 20174 - DNA, 21 bp, synthetic construct
  misc_feature 1..21: note = Description of Artificial Sequence: Synthetic oligonucleotide
  source 1..21: mol_type = other DNA
actgtgagtccgtcgcatcag

SEQ ID NO: 20175 - DNA, 21 bp, synthetic construct
  misc_feature 1..21: note = Description of Artificial Sequence: Synthetic oligonucleotide
  source 1..21: mol_type = other DNA
agcagccccggcaaagaccaa

SEQ ID NO: 20176 - DNA, 21 bp, synthetic construct
  misc_feature 1..21: note = Description of Artificial Sequence: Synthetic oligonucleotide
  source 1..21: mol_type = other DNA
agccaaacccccggcaaccaa

SEQ ID NO: 20177 - DNA, 21 bp, synthetic construct
  misc_feature 1..21: note = Description of Artificial Sequence: Synthetic oligonucleotide
  source 1..21: mol_type = other DNA
cacaacgccagcaaaatcgaa

SEQ ID NO: 20178 - DNA, 21 bp, synthetic construct
  misc_feature 1..21: note = Description of Artificial Sequence: Synthetic oligonucleotide
  source 1..21: mol_type = other DNA
cagcgtgattcttcgcctgtt

SEQ ID NO: 20179 - DNA, 21 bp, synthetic construct
  misc_feature 1..21: note = Description of Artificial Sequence: Synthetic oligonucleotide
  source 1..21: mol_type = other DNA
gaggcgactgcgaatacgaag

SEQ ID NO: 20180 - DNA, 21 bp, synthetic construct
  misc_feature 1..21: note = Description of Artificial Sequence: Synthetic oligonucleotide
  source 1..21: mol_type = other DNA
ggcttcggccaaagcaaagcc

SEQ ID NO: 20181 - DNA, 21 bp, synthetic construct
  misc_feature 1..21: note = Description of Artificial Sequence: Synthetic oligonucleotide
  source 1..21: mol_type = other DNA
aattctaaggcgactcagtcg

SEQ ID NO: 20182 - DNA, 21 bp, synthetic construct
  misc_feature 1..21: note = Description of Artificial Sequence: Synthetic oligonucleotide
  source 1..21: mol_type = other DNA
actcctgctccttctcttact

SEQ ID NO: 20183 - DNA, 21 bp, synthetic construct
  misc_feature 1..21: note = Description of Artificial Sequence: Synthetic oligonucleotide
  source 1..21: mol_type = other DNA
gaagccagcgtcaaaggcctc

SEQ ID NO: 20184 - DNA, 21 bp, synthetic construct
  misc_feature 1..21: note = Description of Artificial Sequence: Synthetic oligonucleotide
  source 1..21: mol_type = other DNA
gttaatacgcctccgagtaag

SEQ ID NO: 20185 - DNA, 21 bp, synthetic construct
  misc_feature 1..21: note = Description of Artificial Sequence: Synthetic oligonucleotide
  source 1..21: mol_type = other DNA
gccaacgccgtccccgccgcc

SEQ ID NO: 20186 - DNA, 21 bp, synthetic construct
  misc_feature 1..21: note = Description of Artificial Sequence: Synthetic oligonucleotide
  source 1..21: mol_type = other DNA
gtgacgggtactcctattgct

SEQ ID NO: 20187 - DNA, 21 bp, synthetic construct
  misc_feature 1..21: note = Description of Artificial Sequence: Synthetic oligonucleotide
  source 1..21: mol_type = other DNA
accgtcgacaaagccgccagc

SEQ ID NO: 20188 - DNA, 21 bp, synthetic construct
  misc_feature 1..21: note = Description of Artificial Sequence: Synthetic oligonucleotide
  source 1..21: mol_type = other DNA
acggggtctgggactcctact

SEQ ID NO: 20189 - DNA, 21 bp, synthetic construct
  misc_feature 1..21: note = Description of Artificial Sequence: Synthetic oligonucleotide
  source 1..21: mol_type = other DNA
ggccaaaacagcagcatccaa

SEQ ID NO: 20190 - DNA, 21 bp, synthetic construct
  misc_feature 1..21: note = Description of Artificial Sequence: Synthetic oligonucleotide
  source 1..21: mol_type = other DNA
gttccgaatgatcatccggtg

SEQ ID NO: 20191 - DNA, 21 bp, synthetic construct
  misc_feature 1..21: note = Description of Artificial Sequence: Synthetic oligonucleotide
  source 1..21: mol_type = other DNA
cacggcgacacccccaccaaa

SEQ ID NO: 20192 - DNA, 21 bp, synthetic construct
  misc_feature 1..21: note = Description of Artificial Sequence: Synthetic oligonucleotide
  source 1..21: mol_type = other DNA
gcgggtaatggtccgacttcg

SEQ ID NO: 20193 - DNA, 21 bp, synthetic construct
  misc_feature 1..21: note = Description of Artificial Sequence: Synthetic oligonucleotide
  source 1..21: mol_type = other DNA
ggcatgaaaaacgcccccacc

SEQ ID NO: 20194 - DNA, 21 bp, synthetic construct
  misc_feature 1..21: note = Description of Artificial Sequence: Synthetic oligonucleotide
  source 1..21: mol_type = other DNA
ggtcttaagccttctgataag

SEQ ID NO: 20195 - DNA, 21 bp, synthetic construct
  misc_feature 1..21: note = Description of Artificial Sequence: Synthetic oligonucleotide
  source 1..21: mol_type = other DNA
actgcgcagtcttcttcgcat

SEQ ID NO: 20196 - DNA, 21 bp, synthetic construct
  misc_feature 1..21: note = Description of Artificial Sequence: Synthetic oligonucleotide
  source 1..21: mol_type = other DNA
agtgggcaggggactattttg

SEQ ID NO: 20197 - DNA, 21 bp, synthetic construct
  misc_feature 1..21: note = Description of Artificial Sequence: Synthetic oligonucleotide
  source 1..21: mol_type = other DNA
ctcggcggcagcagcaccacc

SEQ ID NO: 20198 - DNA, 21 bp, synthetic construct
  misc_feature 1..21: note = Description of Artificial Sequence: Synthetic oligonucleotide
  source 1..21: mol_type = other DNA
ctgacgagtgataaggcgtcg

SEQ ID NO: 20199 - DNA, 21 bp, synthetic construct
  misc_feature 1..21: note = Description of Artificial Sequence: Synthetic oligonucleotide
  source 1..21: mol_type = other DNA
aacaccaccgaccacaacaga

SEQ ID NO: 20200 - DNA, 21 bp, synthetic construct
  misc_feature 1..21: note = Description of Artificial Sequence: Synthetic oligonucleotide
  source 1..21: mol_type = other DNA
caaagagtcaacagcagcgcc

SEQ ID NO: 20201 - DNA, 21 bp, synthetic construct
  misc_feature 1..21: note = Description of Artificial Sequence: Synthetic oligonucleotide
  source 1..21: mol_type = other DNA
acggctgatagggtgggtcat

SEQ ID NO: 20202 - DNA, 21 bp, synthetic construct
  misc_feature 1..21: note = Description of Artificial Sequence: Synthetic oligonucleotide
  source 1..21: mol_type = other DNA
agcaccggcgccagcaacggc

SEQ ID NO: 20203 - DNA, 21 bp, synthetic construct
  misc_feature 1..21: note = Description of Artificial Sequence: Synthetic oligonucleotide
  source 1..21: mol_type = other DNA
agcggcatcgccagcaccgcc

SEQ ID NO: 20204 - DNA, 21 bp, synthetic construct
  misc_feature 1..21: note = Description of Artificial Sequence: Synthetic oligonucleotide
  source 1..21: mol_type = other DNA
agtgctccgggtacttcttct

SEQ ID NO: 20205 - DNA, 21 bp, synthetic construct
  misc_feature 1..21: note = Description of Artificial Sequence: Synthetic oligonucleotide
  source 1..21: mol_type = other DNA
ggcagcggcagcaacggcagc

SEQ ID NO: 20206 - DNA, 21 bp, synthetic construct
  misc_feature 1..21: note = Description of Artificial Sequence: Synthetic oligonucleotide
  source 1..21: mol_type = other DNA
agtagttctagtacgccgtcg

SEQ ID NO: 20207 - DNA, 21 bp, synthetic construct
  misc_feature 1..21: note = Description of Artificial Sequence: Synthetic oligonucleotide
  source 1..21: mol_type = other DNA
gcttcggttgatagtaagtct

SEQ ID NO: 20208 - DNA, 21 bp, synthetic construct
  misc_feature 1..21: note = Description of Artificial Sequence: Synthetic oligonucleotide
  source 1..21: mol_type = other DNA
accagcaacggcagcctcacc

SEQ ID NO: 20209 - DNA, 21 bp, synthetic construct
  misc_feature 1..21: note = Description of Artificial Sequence: Synthetic oligonucleotide
  source 1..21: mol_type = other DNA
agacaagaaagcagcaaagac

SEQ ID NO: 20210 - DNA, 21 bp, synthetic construct
  misc_feature 1..21: note = Description of Artificial Sequence: Synthetic oligonucleotide
  source 1..21: mol_type = other DNA
agcggcaacagccccaacaaa

SEQ ID NO: 20211 - DNA, 21 bp, synthetic construct
  misc_feature 1..21: note = Description of Artificial Sequence: Synthetic oligonucleotide
  source 1..21: mol_type = other DNA
atgggcgaaaaaagcaccccc

SEQ ID NO: 20212 - DNA, 21 bp, synthetic construct
  misc_feature 1..21: note = Description of Artificial Sequence: Synthetic oligonucleotide
  source 1..21: mol_type = other DNA
ggggcgcatcagccttctagt

SEQ ID NO: 20213 - DNA, 21 bp, synthetic construct
  misc_feature 1..21: note = Description of Artificial Sequence: Synthetic oligonucleotide
  source 1..21: mol_type = other DNA
tcgacgactacggctaatact

SEQ ID NO: 20214 - DNA, 21 bp, synthetic construct
  misc_feature 1..21: note = Description of Artificial Sequence: Synthetic oligonucleotide
  source 1..21: mol_type = other DNA
gagcgtactgatcgtccgggg

SEQ ID NO: 20215 - DNA, 21 bp, synthetic construct
  misc_feature 1..21: note = Description of Artificial Sequence: Synthetic oligonucleotide
  source 1..21: mol_type = other DNA
ggcgtcggccaagccagcagc

SEQ ID NO: 20216 - DNA, 21 bp, synthetic construct
  misc_feature 1..21: note = Description of Artificial Sequence: Synthetic oligonucleotide
  source 1..21: mol_type = other DNA
accggcgtcaaagacagaccc

SEQ ID NO: 20217 - DNA, 21 bp, synthetic construct
  misc_feature 1..21: note = Description of Artificial Sequence: Synthetic oligonucleotide
  source 1..21: mol_type = other DNA
aagtcgggtactccgcctgtt

SEQ ID NO: 20218 - DNA, 21 bp, synthetic construct
  misc_feature 1..21: note = Description of Artificial Sequence: Synthetic oligonucleotide
  source 1..21: mol_type = other DNA
accagagaaaccgccaccagc

SEQ ID NO: 20219 - DNA, 21 bp, synthetic construct
  misc_feature 1..21: note = Description of Artificial Sequence: Synthetic oligonucleotide
  source 1..21: mol_type = other DNA
caaaaaagcaaagaccaagcc

SEQ ID NO: 20220 - DNA, 21 bp, synthetic construct
  misc_feature 1..21: note = Description of Artificial Sequence: Synthetic oligonucleotide
  source 1..21: mol_type = other DNA
gataaggggaatggtcagttg

SEQ ID NO: 20221 - DNA, 21 bp, synthetic construct
  misc_feature 1..21: note = Description of Artificial Sequence: Synthetic oligonucleotide
  source 1..21: mol_type = other DNA
ggccccgacagcaacaaaagc

SEQ ID NO: 20222 - DNA, 21 bp, synthetic construct
  misc_feature 1..21: note = Description of Artificial Sequence: Synthetic oligonucleotide
  source 1..21: mol_type = other DNA
gaaaccaccagcaaccccaga

SEQ ID NO: 20223 - DNA, 21 bp, synthetic construct
  misc_feature 1..21: note = Description of Artificial Sequence: Synthetic oligonucleotide
  source 1..21: mol_type = other DNA
agcggcaccccccccgccagc

SEQ ID NO: 20224 - DNA, 21 bp, synthetic construct
  misc_feature 1..21: note = Description of Artificial Sequence: Synthetic oligonucleotide
  source 1..21: mol_type = other DNA
agcggcagcggccaccaaagc

SEQ ID NO: 20225 - DNA, 21 bp, synthetic construct
  misc_feature 1..21: note = Description of Artificial Sequence: Synthetic oligonucleotide
  source 1..21: mol_type = other DNA
gctgggtctcagtcgcctctg

SEQ ID NO: 20226 - DNA, 21 bp, synthetic construct
  misc_feature 1..21: note = Description of Artificial Sequence: Synthetic oligonucleotide
  source 1..21: mol_type = other DNA
ggcgccagcagcaaccaaaac

SEQ ID NO: 20227 - DNA, 21 bp, synthetic construct
  misc_feature 1..21: note = Description of Artificial Sequence: Synthetic oligonucleotide
  source 1..21: mol_type = other DNA
tttacggggaaggagtcggtt

SEQ ID NO: 20228 - DNA, 21 bp, synthetic construct
  misc_feature 1..21: note = Description of Artificial Sequence: Synthetic oligonucleotide
  source 1..21: mol_type = other DNA
aatacgccggctaagcctacg

SEQ ID NO: 20229 - DNA, 21 bp, synthetic construct
  misc_feature 1..21: note = Description of Artificial Sequence: Synthetic oligonucleotide
  source 1..21: mol_type = other DNA
atgcctgatcgttctgggagt

SEQ ID NO: 20230 - DNA, 21 bp, synthetic construct
  misc_feature 1..21: note = Description of Artificial Sequence: Synthetic oligonucleotide
  source 1..21: mol_type = other DNA
caaaacaacagccacagcgcc

SEQ ID NO: 20231 - DNA, 21 bp, synthetic construct
  misc_feature 1..21: note = Description of Artificial Sequence: Synthetic oligonucleotide
  source 1..21: mol_type = other DNA
gccagcagcggccaacacccc

SEQ ID NO: 20232 - DNA, 21 bp, synthetic construct
  misc_feature 1..21: note = Description of Artificial Sequence: Synthetic oligonucleotide
  source 1..21: mol_type = other DNA
ggcggccaagacgacagaaaa

SEQ ID NO: 20233 - DNA, 21 bp, synthetic construct
  misc_feature 1..21: note = Description of Artificial Sequence: Synthetic oligonucleotide
  source 1..21: mol_type = other DNA
aatacgagtagtaagtcgggg

SEQ ID NO: 20234 - DNA, 21 bp, synthetic construct
  misc_feature 1..21: note = Description of Artificial Sequence: Synthetic oligonucleotide
  source 1..21: mol_type = other DNA
gtttctgataagagtgtgagt

SEQ ID NO: 20235 - DNA, 21 bp, synthetic construct
  misc_feature 1..21: note = Description of Artificial Sequence: Synthetic oligonucleotide
  source 1..21: mol_type = other DNA
ggcagcgaaggcaccaacagc

SEQ ID NO: 20236 - DNA, 21 bp, synthetic construct
  misc_feature 1..21: note = Description of Artificial Sequence: Synthetic oligonucleotide
  source 1..21: mol_type = other DNA
aatgttggtggggggtctggg

SEQ ID NO: 20237 - DNA, 21 bp, synthetic construct
  misc_feature 1..21: note = Description of Artificial Sequence: Synthetic oligonucleotide
  source 1..21: mol_type = other DNA
gaaaccagcagcacccccagc

SEQ ID NO: 20238 - DNA, 21 bp, synthetic construct
  misc_feature 1..21: note = Description of Artificial Sequence: Synthetic oligonucleotide
  source 1..21: mol_type = other DNA
ggcggccccaccgaacccaaa

SEQ ID NO: 20239 - DNA, 21 bp, synthetic construct
  misc_feature 1..21: note = Description of Artificial Sequence: Synthetic oligonucleotide
  source 1..21: mol_type = other DNA
gttactgataagtcgagtaat

SEQ ID NO: 20240 - DNA, 21 bp, synthetic construct
  misc_feature 1..21: note = Description of Artificial Sequence: Synthetic oligonucleotide
  source 1..21: mol_type = other DNA
caaatgggcgccacccccaac

SEQ ID NO: 20241 - DNA, 21 bp, synthetic construct
  misc_feature 1..21: note = Description of Artificial Sequence: Synthetic oligonucleotide
  source 1..21: mol_type = other DNA
actccgtcgtcttctactacg

SEQ ID NO: 20242 - DNA, 21 bp, synthetic construct
  misc_feature 1..21: note = Description of Artificial Sequence: Synthetic oligonucleotide
  source 1..21: mol_type = other DNA
gacaacatgagcaaacaactc

SEQ ID NO: 20243 - DNA, 21 bp, synthetic construct
  misc_feature 1..21: note = Description of Artificial Sequence: Synthetic oligonucleotide
  source 1..21: mol_type = other DNA
gagactcagaggccgaatgcg

SEQ ID NO: 20244 - DNA, 21 bp, synthetic construct
  misc_feature 1..21: note = Description of Artificial Sequence: Synthetic oligonucleotide
  source 1..21: mol_type = other DNA
aacggcgtcaccaacaacaga

SEQ ID NO: 20245 - DNA, 21 bp, synthetic construct
  misc_feature 1..21: note = Description of Artificial Sequence: Synthetic oligonucleotide
  source 1..21: mol_type = other DNA
tctctgaatggttctaggggt

SEQ ID NO: 20246 - DNA, 21 bp, synthetic construct
  misc_feature 1..21: note = Description of Artificial Sequence: Synthetic oligonucleotide
  source 1..21: mol_type = other DNA
aacggcctcaacgtcaaaggc

SEQ ID NO: 20247 - DNA, 21 bp, synthetic construct
  misc_feature 1..21: note = Description of Artificial Sequence: Synthetic oligonucleotide
  source 1..21: mol_type = other DNA
accggcgaaagccaagtcaaa

SEQ ID NO: 20248 - DNA, 21 bp, synthetic construct
  misc_feature 1..21: note = Description of Artificial Sequence: Synthetic oligonucleotide
  source 1..21: mol_type = other DNA
accggcggcagcagcaccctc

SEQ ID NO: 20249 - DNA, 21 bp, synthetic construct
  misc_feature 1..21: note = Description of Artificial Sequence: Synthetic oligonucleotide
  source 1..21: mol_type = other DNA
gaaagagccacccacacccaa

SEQ ID NO: 20250 - DNA, 21 bp, synthetic construct
  misc_feature 1..21: note = Description of Artificial Sequence: Synthetic oligonucleotide
  source 1..21: mol_type = other DNA
agcagcacccccagagtcgcc

SEQ ID NO: 20251 - DNA, 21 bp, synthetic construct
  misc_feature 1..21: note = Description of Artificial Sequence: Synthetic oligonucleotide
  source 1..21: mol_type = other DNA
agcagcagccccaccaaccac

SEQ ID NO: 20252 - DNA, 21 bp, synthetic construct
  misc_feature 1..21: note = Description of Artificial Sequence: Synthetic oligonucleotide
  source 1..21: mol_type = other DNA
acggtgaattcgggttctggt

SEQ ID NO: 20253 - DNA, 21 bp, synthetic construct
  misc_feature 1..21: note = Description of Artificial Sequence: Synthetic oligonucleotide
  source 1..21: mol_type = other DNA
cacgccggcaacgcccccgtc

SEQ ID NO: 20254 - DNA, 21 bp, synthetic construct
  misc_feature 1..21: note = Description of Artificial Sequence: Synthetic oligonucleotide
  source 1..21: mol_type = other DNA
ggtcaggctgagactttgaag

SEQ ID NO: 20255 - DNA, 21 bp, synthetic construct
  misc_feature 1..21: note = Description of Artificial Sequence: Synthetic oligonucleotide
  source 1..21: mol_type = other DNA
ggtgcgaagtcgcaggcggtt

SEQ ID NO: 20256 - DNA, 21 bp, synthetic construct
  misc_feature 1..21: note = Description of Artificial Sequence: Synthetic oligonucleotide
  source 1..21: mol_type = other DNA
accctcagcgacagaggcagc

SEQ ID NO: 20257 - DNA, 21 bp, synthetic construct
  misc_feature 1..21: note = Description of Artificial Sequence: Synthetic oligonucleotide
  source 1..21: mol_type = other DNA
tcggggacgtcgcatactcag

SEQ ID NO: 20258 - DNA, 21 bp, synthetic construct
  misc_feature 1..21: note = Description of Artificial Sequence: Synthetic oligonucleotide
  source 1..21: mol_type = other DNA
agagaaggcgccccccccgcc

SEQ ID NO: 20259 - DNA, 21 bp, synthetic construct
  misc_feature 1..21: note = Description of Artificial Sequence: Synthetic oligonucleotide
  source 1..21: mol_type = other DNA
acggctactacgactggttct

SEQ ID NO: 20260 - DNA, 21 bp, synthetic construct
  misc_feature 1..21: note = Description of Artificial Sequence: Synthetic oligonucleotide
  source 1..21: mol_type = other DNA
caaggccaaaaccaaaccaga

SEQ ID NO: 20261 - DNA, 21 bp, synthetic construct
  misc_feature 1..21: note = Description of Artificial Sequence: Synthetic oligonucleotide
  source 1..21: mol_type = other DNA
ctcgaccccagcaaaagcagc

SEQ ID NO: 20262 - DNA, 21 bp, synthetic construct
  misc_feature 1..21: note = Description of Artificial Sequence: Synthetic oligonucleotide
  source 1..21: mol_type = other DNA
gacaccaaccacagcaccaaa

SEQ ID NO: 20263 - DNA, 21 bp, synthetic construct
  misc_feature 1..21: note = Description of Artificial Sequence: Synthetic oligonucleotide
  source 1..21: mol_type = other DNA
ggggagaagagttcgctttcg

SEQ ID NO: 20264 - DNA, 21 bp, synthetic construct
  misc_feature 1..21: note = Description of Artificial Sequence: Synthetic oligonucleotide
  source 1..21: mol_type = other DNA
agccacagcaacaacggcagc

SEQ ID NO: 20265 - DNA, 21 bp, synthetic construct
  misc_feature 1..21: note = Description of Artificial Sequence: Synthetic oligonucleotide
  source 1..21: mol_type = other DNA
tctcaggttaagccaacgagt

SEQ ID NO: 20266 - DNA, 21 bp, synthetic construct
  misc_feature 1..21: note = Description of Artificial Sequence: Synthetic oligonucleotide
  source 1..21: mol_type = other DNA
gcgtcgaaggagcgtaatatg

SEQ ID NO: 20267 - DNA, 21 bp, synthetic construct
  misc_feature 1..21: note = Description of Artificial Sequence: Synthetic oligonucleotide
  source 1..21: mol_type = other DNA
accgccaacagcgccagcacc

SEQ ID NO: 20268 - DNA, 21 bp, synthetic construct
  misc_feature 1..21: note = Description of Artificial Sequence: Synthetic oligonucleotide
  source 1..21: mol_type = other DNA
agaggcctccccgacaaaaac

SEQ ID NO: 20269 - DNA, 21 bp, synthetic construct
  misc_feature 1..21: note = Description of Artificial Sequence: Synthetic oligonucleotide
  source 1..21: mol_type = other DNA
aatgcttcggatcggggtggt

SEQ ID NO: 20270 - DNA, 21 bp, synthetic construct
  misc_feature 1..21: note = Description of Artificial Sequence: Synthetic oligonucleotide
  source 1..21: mol_type = other DNA
agcgccaacagcaaactcggc

SEQ ID NO: 20271 - DNA, 21 bp, synthetic construct
  misc_feature 1..21: note = Description of Artificial Sequence: Synthetic oligonucleotide
  source 1..21: mol_type = other DNA
ctttctgatgggaagggtaat

SEQ ID NO: 20272 - DNA, 21 bp, synthetic construct
  misc_feature 1..21: note = Description of Artificial Sequence: Synthetic oligonucleotide
  source 1..21: mol_type = other DNA
ggcggcaaaagccacggcggc

SEQ ID NO: 20273 - DNA, 21 bp, synthetic construct
  misc_feature 1..21: note = Description of Artificial Sequence: Synthetic oligonucleotide
  source 1..21: mol_type = other DNA
ggtgataataagttgaatcag

SEQ ID NO: 20274 - DNA, 21 bp, synthetic construct
  misc_feature 1..21: note = Description of Artificial Sequence: Synthetic oligonucleotide
  source 1..21: mol_type = other DNA
tgttcgggtcagtcgaataag

SEQ ID NO: 20275 - DNA, 21 bp, synthetic construct
  misc_feature 1..21: note = Description of Artificial Sequence: Synthetic oligonucleotide
  source 1..21: mol_type = other DNA
ttggtgacgaaggctagtcag

SEQ ID NO: 20276 - DNA, 21 bp, synthetic construct
  misc_feature 1..21: note = Description of Artificial Sequence: Synthetic oligonucleotide
  source 1..21: mol_type = other DNA
agcaccagaaccgacaacaga

SEQ ID NO: 20277 - DNA, 21 bp, synthetic construct
  misc_feature 1..21: note = Description of Artificial Sequence: Synthetic oligonucleotide
  source 1..21: mol_type = other DNA
ggcaaaaacaccgccgccgtc

SEQ ID NO: 20278 - DNA, 21 bp, synthetic construct
  misc_feature 1..21: note = Description of Artificial Sequence: Synthetic oligonucleotide
  source 1..21: mol_type = other DNA
actaatgggactcatgcgggt

SEQ ID NO: 20279 - DNA, 21 bp, synthetic construct
  misc_feature 1..21: note = Description of Artificial Sequence: Synthetic oligonucleotide
  source 1..21: mol_type = other DNA
actgggtctggggttaagagt

SEQ ID NO: 20280 - DNA, 21 bp, synthetic construct
  misc_feature 1..21: note = Description of Artificial Sequence: Synthetic oligonucleotide
  source 1..21: mol_type = other DNA
agcgacaaagccaccgacaga

SEQ ID NO: 20281 - DNA, 21 bp, synthetic construct
  misc_feature 1..21: note = Description of Artificial Sequence: Synthetic oligonucleotide
  source 1..21: mol_type = other DNA
gaccaaagcgccgccagaaac

SEQ ID NO: 20282 - DNA, 21 bp, synthetic construct
  misc_feature 1..21: note = Description of Artificial Sequence: Synthetic oligonucleotide
  source 1..21: mol_type = other DNA
ggcagaagcaccgacgtcaaa

SEQ ID NO: 20283 - DNA, 21 bp, synthetic construct
  misc_feature 1..21: note = Description of Artificial Sequence: Synthetic oligonucleotide
  source 1..21: mol_type = other DNA
gtcgccaacagcagcaccgcc

SEQ ID NO: 20284 - DNA, 21 bp, synthetic construct
  misc_feature 1..21: note = Description of Artificial Sequence: Synthetic oligonucleotide
  source 1..21: mol_type = other DNA
gcgcagaagtctagtgtgaat

SEQ ID NO: 20285 - DNA, 21 bp, synthetic construct
  misc_feature 1..21: note = Description of Artificial Sequence: Synthetic oligonucleotide
  source 1..21: mol_type = other DNA
aacaccagcggcaaaggcctc

SEQ ID NO: 20286 - DNA, 21 bp, synthetic construct
  misc_feature 1..21: note = Description of Artificial Sequence: Synthetic oligonucleotide
  source 1..21: mol_type = other DNA
agcggcaacaacgtcaccagc

SEQ ID NO: 20287 - DNA, 21 bp, synthetic construct
  misc_feature 1..21: note = Description of Artificial Sequence: Synthetic oligonucleotide
  source 1..21: mol_type = other DNA
atgggcagcggcgccaaagaa

SEQ ID NO: 20288 - DNA, 21 bp, synthetic construct
  misc_feature 1..21: note = Description of Artificial Sequence: Synthetic oligonucleotide
  source 1..21: mol_type = other DNA
aattctatcggtaagtctgat

SEQ ID NO: 20289 - DNA, 21 bp, synthetic construct
  misc_feature 1..21: note = Description of Artificial Sequence: Synthetic oligonucleotide
  source 1..21: mol_type = other DNA
agtcgggattctggtgcgctg

SEQ ID NO: 20290 - DNA, 21 bp, synthetic construct
  misc_feature 1..21: note = Description of Artificial Sequence: Synthetic oligonucleotide
  source 1..21: mol_type = other DNA
gacagctacgccgacaaaaaa

SEQ ID NO: 20291 - DNA, 21 bp, synthetic construct
  misc_feature 1..21: note = Description of Artificial Sequence: Synthetic oligonucleotide
  source 1..21: mol_type = other DNA
gcccacagcagcgccaccagc

SEQ ID NO: 20292 - DNA, 21 bp, synthetic construct
  misc_feature 1..21: note = Description of Artificial Sequence: Synthetic oligonucleotide
  source 1..21: mol_type = other DNA
accgtcggcaacagccccacc

SEQ ID NO: 20293 - DNA, 21 bp, synthetic construct
  misc_feature 1..21: note = Description of Artificial Sequence: Synthetic oligonucleotide
  source 1..21: mol_type = other DNA
gatgctgctaatccgcagaag

SEQ ID NO: 20294 - DNA, 21 bp, synthetic construct
  misc_feature 1..21: note = Description of Artificial Sequence: Synthetic oligonucleotide
  source 1..21: mol_type = other DNA
tggggcaccgacagaagcagc

SEQ ID NO: 20295 - DNA, 21 bp, synthetic construct
  misc_feature 1..21: note = Description of Artificial Sequence: Synthetic oligonucleotide
  source 1..21: mol_type = other DNA
cacaccgaaagcaaaatggcc

SEQ ID NO: 20296 - DNA, 21 bp, synthetic construct
  misc_feature 1..21: note = Description of Artificial Sequence: Synthetic oligonucleotide
  source 1..21: mol_type = other DNA
gatacgaatccggcggttaag

SEQ ID NO: 20297 - DNA, 21 bp, synthetic construct
  misc_feature 1..21: note = Description of Artificial Sequence: Synthetic oligonucleotide
  source 1..21: mol_type = other DNA
tcgactccgggtagttcttct

SEQ ID NO: 20298 - DNA, 21 bp, synthetic construct
  misc_feature 1..21: note = Description of Artificial Sequence: Synthetic oligonucleotide
  source 1..21: mol_type = other DNA
acgccgaatcagacgcctact

SEQ ID NO: 20299 - DNA, 21 bp, synthetic construct
  misc_feature 1..21: note = Description of Artificial Sequence: Synthetic oligonucleotide
  source 1..21: mol_type = other DNA
accagcctcggcggcaacgcc

SEQ ID NO: 20300 - DNA, 21 bp, synthetic construct
  misc_feature 1..21: note = Description of Artificial Sequence: Synthetic oligonucleotide
  source 1..21: mol_type = other DNA
caacaaagcaccagcagcacc

SEQ ID NO: 20301 - DNA, 21 bp, synthetic construct
  misc_feature 1..21: note = Description of Artificial Sequence: Synthetic oligonucleotide
  source 1..21: mol_type = other DNA
gacagaagcggccaaagcacc

SEQ ID NO: 20302 - DNA, 21 bp, synthetic construct
  misc_feature 1..21: note = Description of Artificial Sequence: Synthetic oligonucleotide
  source 1..21: mol_type = other DNA
gacagcaccaaaggcagagac

SEQ ID NO: 20303 - DNA, 21 bp, synthetic construct
  misc_feature 1..21: note = Description of Artificial Sequence: Synthetic oligonucleotide
  source 1..21: mol_type = other DNA
agtgatggtcatgcgaataat

SEQ ID NO: 20304 - DNA, 21 bp, synthetic construct
  misc_feature 1..21: note = Description of Artificial Sequence: Synthetic oligonucleotide
  source 1..21: mol_type = other DNA
caaagagaccaacaaaacgcc

SEQ ID NO: 20305 - DNA, 21 bp, synthetic construct
  misc_feature 1..21: note = Description of Artificial Sequence: Synthetic oligonucleotide
  source 1..21: mol_type = other DNA
gaaggcgtccacaccagcaac

SEQ ID NO: 20306 - DNA, 21 bp, synthetic construct
  misc_feature 1..21: note = Description of Artificial Sequence: Synthetic oligonucleotide
  source 1..21: mol_type = other DNA
gacaaagtcagcagcaacgcc

SEQ ID NO: 20307 - DNA, 21 bp, synthetic construct
  misc_feature 1..21: note = Description of Artificial Sequence: Synthetic oligonucleotide
  source 1..21: mol_type = other DNA
gattcggttaatgcgcgtagt

SEQ ID NO: 20308 - DNA, 21 bp, synthetic construct
  misc_feature 1..21: note = Description of Artificial Sequence: Synthetic oligonucleotide
  source 1..21: mol_type = other DNA
ggtgtgtcgccttcggatagg

SEQ ID NO: 20309 - DNA, 21 bp, synthetic construct
  misc_feature 1..21: note = Description of Artificial Sequence: Synthetic oligonucleotide
  source 1..21: mol_type = other DNA
agcagccaaagcagcgtcaaa

SEQ ID NO: 20310 - DNA, 21 bp, synthetic construct
  misc_feature 1..21: note = Description of Artificial Sequence: Synthetic oligonucleotide
  source 1..21: mol_type = other DNA
agcagagccggcaccagcggc

SEQ ID NO: 20311 - DNA, 21 bp, synthetic construct
  misc_feature 1..21: note = Description of Artificial Sequence: Synthetic oligonucleotide
  source 1..21: mol_type = other DNA
agcggcggcggcagaaacgac

SEQ ID NO: 20312 - DNA, 21 bp, synthetic construct
  misc_feature 1..21: note = Description of Artificial Sequence: Synthetic oligonucleotide
  source 1..21: mol_type = other DNA
acttcggctactgcggttagt

SEQ ID NO: 20313 - DNA, 21 bp, synthetic construct
  misc_feature 1..21: note = Description of Artificial Sequence: Synthetic oligonucleotide
  source 1..21: mol_type = other DNA
gacaaccaccccaaacccaac

SEQ ID NO: 20314 - DNA, 21 bp, synthetic construct
  misc_feature 1..21: note = Description of Artificial Sequence: Synthetic oligonucleotide
  source 1..21: mol_type = other DNA
gcggcggtgaatccgaagggt

SEQ ID NO: 20315 - DNA, 21 bp, synthetic construct
  misc_feature 1..21: note = Description of Artificial Sequence: Synthetic oligonucleotide
  source 1..21: mol_type = other DNA
aatcttacgaagccgggtagt

SEQ ID NO: 20316 - DNA, 21 bp, synthetic construct
  misc_feature 1..21: note = Description of Artificial Sequence: Synthetic oligonucleotide
  source 1..21: mol_type = other DNA
agcagcagccccgccggcaga

SEQ ID NO: 20317 - DNA, 21 bp, synthetic construct
  misc_feature 1..21: note = Description of Artificial Sequence: Synthetic oligonucleotide
  source 1..21: mol_type = other DNA
agtagtgggatgggtagtaag

SEQ ID NO: 20318 - DNA, 21 bp, synthetic construct
  misc_feature 1..21: note = Description of Artificial Sequence: Synthetic oligonucleotide
  source 1..21: mol_type = other DNA
aacagccaaaccaccgtcgcc

SEQ ID NO: 20319 - DNA, 21 bp, synthetic construct
  misc_feature 1..21: note = Description of Artificial Sequence: Synthetic oligonucleotide
  source 1..21: mol_type = other DNA
actggttctagtccgcttgtt

SEQ ID NO: 20320 - DNA, 21 bp, synthetic construct
  misc_feature 1..21: note = Description of Artificial Sequence: Synthetic oligonucleotide
  source 1..21: mol_type = other DNA
gctgtggttaagagtccgatg

SEQ ID NO: 20321 - DNA, 21 bp, synthetic construct
  misc_feature 1..21: note = Description of Artificial Sequence: Synthetic oligonucleotide
  source 1..21: mol_type = other DNA
ggcgacaaacccaacaccgcc

SEQ ID NO: 20322 - DNA, 21 bp, synthetic construct
  misc_feature 1..21: note = Description of Artificial Sequence: Synthetic oligonucleotide
  source 1..21: mol_type = other DNA
cttcaggatagtccgtctaag

SEQ ID NO: 20323 - DNA, 21 bp, synthetic construct
  misc_feature 1..21: note = Description of Artificial Sequence: Synthetic oligonucleotide
  source 1..21: mol_type = other DNA
actcctagtgataagattttg

SEQ ID NO: 20324 - DNA, 21 bp, synthetic construct
  misc_feature 1..21: note = Description of Artificial Sequence: Synthetic oligonucleotide
  source 1..21: mol_type = other DNA
actgcggctagtccgagtaat

SEQ ID NO: 20325 - DNA, 21 bp, synthetic construct
  misc_feature 1..21: note = Description of Artificial Sequence: Synthetic oligonucleotide
  source 1..21: mol_type = other DNA
agtgctgctcagacgtcgctg

SEQ ID NO: 20326 - DNA, 21 bp, synthetic construct
  misc_feature 1..21: note = Description of Artificial Sequence: Synthetic oligonucleotide
  source 1..21: mol_type = other DNA
ggcaccgccggcgacaaacaa

SEQ ID NO: 20327 - DNA, 21 bp, synthetic construct
  misc_feature 1..21: note = Description of Artificial Sequence: Synthetic oligonucleotide
  source 1..21: mol_type = other DNA
aaaaccaccgacagcaaaggc

SEQ ID NO: 20328 - DNA, 21 bp, synthetic construct
  misc_feature 1..21: note = Description of Artificial Sequence: Synthetic oligonucleotide
  source 1..21: mol_type = other DNA
accagcagcgacctcagaaaa

SEQ ID NO: 20329 - DNA, 21 bp, synthetic construct
  misc_feature 1..21: note = Description of Artificial Sequence: Synthetic oligonucleotide
  source 1..21: mol_type = other DNA
tctgtgtcgaaggagcgtgct

SEQ ID NO: 20330 - DNA, 21 bp, synthetic construct
  misc_feature 1..21: note = Description of Artificial Sequence: Synthetic oligonucleotide
  source 1..21: mol_type = other DNA
agcaaaaccggcagcagcacc

SEQ ID NO: 20331 - DNA, 21 bp, synthetic construct
  misc_feature 1..21: note = Description of Artificial Sequence: Synthetic oligonucleotide
  source 1..21: mol_type = other DNA
gctgggaatgggcagactatg

SEQ ID NO: 20332 - DNA, 21 bp, synthetic construct
  misc_feature 1..21: note = Description of Artificial Sequence: Synthetic oligonucleotide
  source 1..21: mol_type = other DNA
tatgggcagacggtttctcag

SEQ ID NO: 20333 - DNA, 21 bp, synthetic construct
  misc_feature 1..21: note = Description of Artificial Sequence: Synthetic oligonucleotide
  source 1..21: mol_type = other DNA
tcggatggtaatactacgaag

SEQ ID NO: 20334 - DNA, 21 bp, synthetic construct
  misc_feature 1..21: note = Description of Artificial Sequence: Synthetic oligonucleotide
  source 1..21: mol_type = other DNA
actaaggctgctaatcaggcg

SEQ ID NO: 20335 - DNA, 21 bp, synthetic construct
  misc_feature 1..21: note = Description of Artificial Sequence: Synthetic oligonucleotide
  source 1..21: mol_type = other DNA
gggcttggtaaggatactggt

SEQ ID NO: 20336 - DNA, 21 bp, synthetic construct
  misc_feature 1..21: note = Description of Artificial Sequence: Synthetic oligonucleotide
  source 1..21: mol_type = other DNA
agcatgcccagcggcaaagaa

SEQ ID NO: 20337 - DNA, 21 bp, synthetic construct
  misc_feature 1..21: note = Description of Artificial Sequence: Synthetic oligonucleotide
  source 1..21: mol_type = other DNA
attccgtctaatgctgggact

SEQ ID NO: 20338 - DNA, 21 bp, synthetic construct
  misc_feature 1..21: note = Description of Artificial Sequence: Synthetic oligonucleotide
  source 1..21: mol_type = other DNA
gttagtgcgtcgggtattagt

SEQ ID NO: 20339 - DNA, 21 bp, synthetic construct
  misc_feature 1..21: note = Description of Artificial Sequence: Synthetic oligonucleotide
  source 1..21: mol_type = other DNA
tcgacttcgcgggagagtact

SEQ ID NO: 20340 - DNA, 21 bp, synthetic construct
  misc_feature 1..21: note = Description of Artificial Sequence: Synthetic oligonucleotide
  source 1..21: mol_type = other DNA
tcggagggtcagctttctaag

SEQ ID NO: 20341 - DNA, 21 bp, synthetic construct
  misc_feature 1..21: note = Description of Artificial Sequence: Synthetic oligonucleotide
  source 1..21: mol_type = other DNA
tctcatgagaaggctagtggt

SEQ ID NO: 20342 - DNA, 21 bp, synthetic construct
  misc_feature 1..21: note = Description of Artificial Sequence: Synthetic oligonucleotide
  source 1..21: mol_type = other DNA
accgtcgacagcaaaagctac

SEQ ID NO: 20343 - DNA, 21 bp, synthetic construct
  misc_feature 1..21: note = Description of Artificial Sequence: Synthetic oligonucleotide
  source 1..21: mol_type = other DNA
agagtcggcgccaccaacgaa

SEQ ID NO: 20344 - DNA, 21 bp, synthetic construct
  misc_feature 1..21: note = Description of Artificial Sequence: Synthetic oligonucleotide
  source 1..21: mol_type = other DNA
gtcagagaaagccccagccac

SEQ ID NO: 20345 - DNA, 21 bp, synthetic construct
  misc_feature 1..21: note = Description of Artificial Sequence: Synthetic oligonucleotide
  source 1..21: mol_type = other DNA
agcagcaccagcgccaaagaa

SEQ ID NO: 20346 - DNA, 21 bp, synthetic construct
  misc_feature 1..21: note = Description of Artificial Sequence: Synthetic oligonucleotide
  source 1..21: mol_type = other DNA
ggcgaccaccacggcagcggc

SEQ ID NO: 20347 - DNA, 21 bp, synthetic construct
  misc_feature 1..21: note = Description of Artificial Sequence: Synthetic oligonucleotide
  source 1..21: mol_type = other DNA
ggcagcggcaacctcggcacc

SEQ ID NO: 20348 - DNA, 21 bp, synthetic construct
  misc_feature 1..21: note = Description of Artificial Sequence: Synthetic oligonucleotide
  source 1..21: mol_type = other DNA
aattcgcctaattctagtggg

SEQ ID NO: 20349 - DNA, 21 bp, synthetic construct
  misc_feature 1..21: note = Description of Artificial Sequence: Synthetic oligonucleotide
  source 1..21: mol_type = other DNA
attacgtcttctaatcctccg

SEQ ID NO: 20350 - DNA, 21 bp, synthetic construct
  misc_feature 1..21: note = Description of Artificial Sequence: Synthetic oligonucleotide
  source 1..21: mol_type = other DNA
tcgacggctccggctgggact

SEQ ID NO: 20351 - DNA, 21 bp, synthetic construct
  misc_feature 1..21: note = Description of Artificial Sequence: Synthetic oligonucleotide
  source 1..21: mol_type = other DNA
aaaagcaccagcggcagcgtc

SEQ ID NO: 20352 - DNA, 21 bp, synthetic construct
  misc_feature 1..21: note = Description of Artificial Sequence: Synthetic oligonucleotide
  source 1..21: mol_type = other DNA
aacagcggcaacagcatgagc

SEQ ID NO: 20353 - DNA, 21 bp, synthetic construct
  misc_feature 1..21: note = Description of Artificial Sequence: Synthetic oligonucleotide
  source 1..21: mol_type = other DNA
agcagcagcggcaacaacaga

SEQ ID NO: 20354 - DNA, 21 bp, synthetic construct
  misc_feature 1..21: note = Description of Artificial Sequence: Synthetic oligonucleotide
  source 1..21: mol_type = other DNA
aacagaggcagccccagcgaa

SEQ ID NO: 20355 - DNA, 21 bp, synthetic construct
  misc_feature 1..21: note = Description of Artificial Sequence: Synthetic oligonucleotide
  source 1..21: mol_type = other DNA
gaaatgagcagccccaacaga

SEQ ID NO: 20356 - DNA, 21 bp, synthetic construct
  misc_feature 1..21: note = Description of Artificial Sequence: Synthetic oligonucleotide
  source 1..21: mol_type = other DNA
ggcggcaccagcaaaagagac

SEQ ID NO: 20357 - DNA, 21 bp, synthetic construct
  misc_feature 1..21: note = Description of Artificial Sequence: Synthetic oligonucleotide
  source 1..21: mol_type = other DNA
aacctcagcaccagcagcgcc

SEQ ID NO: 20358 - DNA, 21 bp, synthetic construct
  misc_feature 1..21: note = Description of Artificial Sequence: Synthetic oligonucleotide
  source 1..21: mol_type = other DNA
gatcgtgaggagcgtagtcat

SEQ ID NO: 20359 - DNA, 21 bp, synthetic construct
  misc_feature 1..21: note = Description of Artificial Sequence: Synthetic oligonucleotide
  source 1..21: mol_type = other DNA
aacgccagcaccgcccccagc

SEQ ID NO: 20360 - DNA, 21 bp, synthetic construct
  misc_feature 1..21: note = Description of Artificial Sequence: Synthetic oligonucleotide
  source 1..21: mol_type = other DNA
agcggcaccagcagcctcagc

SEQ ID NO: 20361 - DNA, 21 bp, synthetic construct
  misc_feature 1..21: note = Description of Artificial Sequence: Synthetic oligonucleotide
  source 1..21: mol_type = other DNA
ggcgacggcaccgccagcaac

SEQ ID NO: 20362 - DNA, 21 bp, synthetic construct
  misc_feature 1..21: note = Description of Artificial Sequence: Synthetic oligonucleotide
  source 1..21: mol_type = other DNA
agtgcgtcttcttctactgtt

SEQ ID NO: 20363 - DNA, 21 bp, synthetic construct
  misc_feature 1..21: note = Description of Artificial Sequence: Synthetic oligonucleotide
  source 1..21: mol_type = other DNA
gggactgagaagccggcgcct

SEQ ID NO: 20364 - DNA, 21 bp, synthetic construct
  misc_feature 1..21: note = Description of Artificial Sequence: Synthetic oligonucleotide
  source 1..21: mol_type = other DNA
aatccgagtactccgtcttcg

SEQ ID NO: 20365 - DNA, 21 bp, synthetic construct
  misc_feature 1..21: note = Description of Artificial Sequence: Synthetic oligonucleotide
  source 1..21: mol_type = other DNA
agccaaggcagcgccctcctc

SEQ ID NO: 20366 - DNA, 21 bp, synthetic construct
  misc_feature 1..21: note = Description of Artificial Sequence: Synthetic oligonucleotide
  source 1..21: mol_type = other DNA
caaggcgaaggcagaaccctc

SEQ ID NO: 20367 - DNA, 21 bp, synthetic construct
  misc_feature 1..21: note = Description of Artificial Sequence: Synthetic oligonucleotide
  source 1..21: mol_type = other DNA
cacggcgacagaaccaccgtc

SEQ ID NO: 20368 - DNA, 21 bp, synthetic construct
  misc_feature 1..21: note = Description of Artificial Sequence: Synthetic oligonucleotide
  source 1..21: mol_type = other DNA
ggcggcaacgaacacgccaga

SEQ ID NO: 20369 - DNA, 21 bp, synthetic construct
  misc_feature 1..21: note = Description of Artificial Sequence: Synthetic oligonucleotide
  source 1..21: mol_type = other DNA
aatcagtctacgtcgggttcg

SEQ ID NO: 20370 - DNA, 21 bp, synthetic construct
  misc_feature 1..21: note = Description of Artificial Sequence: Synthetic oligonucleotide
  source 1..21: mol_type = other DNA
catgggacgtctaatacgcgt

SEQ ID NO: 20371 - DNA, 21 bp, synthetic construct
  misc_feature 1..21: note = Description of Artificial Sequence: Synthetic oligonucleotide
  source 1..21: mol_type = other DNA
gaaaccaaaaccggcagcgcc

SEQ ID NO: 20372 - DNA, 21 bp, synthetic construct
  misc_feature 1..21: note = Description of Artificial Sequence: Synthetic oligonucleotide
  source 1..21: mol_type = other DNA
attaatgtgaagggtagtcag

SEQ ID NO: 20373 - DNA, 21 bp, synthetic construct
  misc_feature 1..21: note = Description of Artificial Sequence: Synthetic oligonucleotide
  source 1..21: mol_type = other DNA
agcggcaacccccccggcatc

SEQ ID NO: 20374 - DNA, 21 bp, synthetic construct
  misc_feature 1..21: note = Description of Artificial Sequence: Synthetic oligonucleotide
  source 1..21: mol_type = other DNA
gaggggtcgactcgtcctgag

SEQ ID NO: 20375 - DNA, 21 bp, synthetic construct
  misc_feature 1..21: note = Description of Artificial Sequence: Synthetic oligonucleotide
  source 1..21: mol_type = other DNA
agcagcgacaacagacccacc

SEQ ID NO: 20376 - DNA, 21 bp, synthetic construct
  misc_feature 1..21: note = Description of Artificial Sequence: Synthetic oligonucleotide
  source 1..21: mol_type = other DNA
ggcaacggcaccagaggcacc

SEQ ID NO: 20377 - DNA, 21 bp, synthetic construct
  misc_feature 1..21: note = Description of Artificial Sequence: Synthetic oligonucleotide
  source 1..21: mol_type = other DNA
acggggagtcagggtaatatt

SEQ ID NO: 20378 - DNA, 21 bp, synthetic construct
  misc_feature 1..21: note = Description of Artificial Sequence: Synthetic oligonucleotide
  source 1..21: mol_type = other DNA
tctgaggataggaagagtcct

SEQ ID NO: 20379 - DNA, 21 bp, synthetic construct
  misc_feature 1..21: note = Description of Artificial Sequence: Synthetic oligonucleotide
  source 1..21: mol_type = other DNA
gttacttcggataagtctctg

SEQ ID NO: 20380 - DNA, 21 bp, synthetic construct
  misc_feature 1..21: note = Description of Artificial Sequence: Synthetic oligonucleotide
  source 1..21: mol_type = other DNA
agtaatggtcagagtaatggt

SEQ ID NO: 20381 - DNA, 21 bp, synthetic construct
  misc_feature 1..21: note = Description of Artificial Sequence: Synthetic oligonucleotide
  source 1..21: mol_type = other DNA
aaagccagcaccgacaacaaa

SEQ ID NO: 20382 - DNA, 21 bp, synthetic construct
  misc_feature 1..21: note = Description of Artificial Sequence: Synthetic oligonucleotide
  source 1..21: mol_type = other DNA
aacaacagcagcagaaacctc

SEQ ID NO: 20383 - DNA, 21 bp, synthetic construct
  misc_feature 1..21: note = Description of Artificial Sequence: Synthetic oligonucleotide
  source 1..21: mol_type = other DNA
aattcgcagagtggtagtact

SEQ ID NO: 20384 - DNA, 21 bp, synthetic construct
  misc_feature 1..21: note = Description of Artificial Sequence: Synthetic oligonucleotide
  source 1..21: mol_type = other DNA
aattcggtttcgtctactacg

SEQ ID NO: 20385 - DNA, 21 bp, synthetic construct
  misc_feature 1..21: note = Description of Artificial Sequence: Synthetic oligonucleotide
  source 1..21: mol_type = other DNA
accagcgaacacagagccaac

SEQ ID NO: 20386 - DNA, 21 bp, synthetic construct
  misc_feature 1..21: note = Description of Artificial Sequence: Synthetic oligonucleotide
  source 1..21: mol_type = other DNA
accgacggcacccaccccctc

SEQ ID NO: 20387 - DNA, 21 bp, synthetic construct
  misc_feature 1..21: note = Description of Artificial Sequence: Synthetic oligonucleotide
  source 1..21: mol_type = other DNA
acgaataataatcagcctcgt

SEQ ID NO: 20388 - DNA, 21 bp, synthetic construct
  misc_feature 1..21: note = Description of Artificial Sequence: Synthetic oligonucleotide
  source 1..21: mol_type = other DNA
acgcaggagcctcagttgaag

SEQ ID NO: 20389 - DNA, 21 bp, synthetic construct
  misc_feature 1..21: note = Description of Artificial Sequence: Synthetic oligonucleotide
  source 1..21: mol_type = other DNA
actagttctacgggggttgtt

SEQ ID NO: 20390 - DNA, 21 bp, synthetic construct
  misc_feature 1..21: note = Description of Artificial Sequence: Synthetic oligonucleotide
  source 1..21: mol_type = other DNA
agccccaccggccacaaagcc

SEQ ID NO: 20391 - DNA, 21 bp, synthetic construct
  misc_feature 1..21: note = Description of Artificial Sequence: Synthetic oligonucleotide
  source 1..21: mol_type = other DNA
agccccagcaccgccaacctc

SEQ ID NO: 20392 - DNA, 21 bp, synthetic construct
  misc_feature 1..21: note = Description of Artificial Sequence: Synthetic oligonucleotide
  source 1..21: mol_type = other DNA
agccccggcgacagacccctc

SEQ ID NO: 20393 - DNA, 21 bp, synthetic construct
  misc_feature 1..21: note = Description of Artificial Sequence: Synthetic oligonucleotide
  source 1..21: mol_type = other DNA
agcggcgaagcccaaaaaacc

SEQ ID NO: 20394 - DNA, 21 bp, synthetic construct
  misc_feature 1..21: note = Description of Artificial Sequence: Synthetic oligonucleotide
  source 1..21: mol_type = other DNA
agcggcgacaaaagcaaaacc

SEQ ID NO: 20395 - DNA, 21 bp, synthetic construct
  misc_feature 1..21: note = Description of Artificial Sequence: Synthetic oligonucleotide
  source 1..21: mol_type = other DNA
agtcaggcttctaatcgtacg

SEQ ID NO: 20396 - DNA, 21 bp, synthetic construct
  misc_feature 1..21: note = Description of Artificial Sequence: Synthetic oligonucleotide
  source 1..21: mol_type = other DNA
atggaaggcgccggccaaatc

SEQ ID NO: 20397 - DNA, 21 bp, synthetic construct
  misc_feature 1..21: note = Description of Artificial Sequence: Synthetic oligonucleotide
  source 1..21: mol_type = other DNA
atggttgctactggtacgcag

SEQ ID NO: 20398 - DNA, 21 bp, synthetic construct
  misc_feature 1..21: note = Description of Artificial Sequence: Synthetic oligonucleotide
  source 1..21: mol_type = other DNA
caagccaacgccagcaccggc

SEQ ID NO: 20399 - DNA, 21 bp, synthetic construct
  misc_feature 1..21: note = Description of Artificial Sequence: Synthetic oligonucleotide
  source 1..21: mol_type = other DNA
caggttggggcgtcgtcgact

SEQ ID NO: 20400 - DNA, 21 bp, synthetic construct
  misc_feature 1..21: note = Description of Artificial Sequence: Synthetic oligonucleotide
  source 1..21: mol_type = other DNA
cgtgagggggcgccgtcggct

SEQ ID NO: 20401 - DNA, 21 bp, synthetic construct
  misc_feature 1..21: note = Description of Artificial Sequence: Synthetic oligonucleotide
  source 1..21: mol_type = other DNA
ctcaaaaccgaaagccaacac

SEQ ID NO: 20402 - DNA, 21 bp, synthetic construct
  misc_feature 1..21: note = Description of Artificial Sequence: Synthetic oligonucleotide
  source 1..21: mol_type = other DNA
ctcaccggccacagccccccc

SEQ ID NO: 20403 - DNA, 21 bp, synthetic construct
  misc_feature 1..21: note = Description of Artificial Sequence: Synthetic oligonucleotide
  source 1..21: mol_type = other DNA
ctcgccaccgccagccccagc

SEQ ID NO: 20404 - DNA, 21 bp, synthetic construct
  misc_feature 1..21: note = Description of Artificial Sequence: Synthetic oligonucleotide
  source 1..21: mol_type = other DNA
ctcggccaacccagcagacaa

SEQ ID NO: 20405 - DNA, 21 bp, synthetic construct
  misc_feature 1..21: note = Description of Artificial Sequence: Synthetic oligonucleotide
  source 1..21: mol_type = other DNA
ctgcttgagcctaaggggctg

SEQ ID NO: 20406 - DNA, 21 bp, synthetic construct
  misc_feature 1..21: note = Description of Artificial Sequence: Synthetic oligonucleotide
  source 1..21: mol_type = other DNA
gaaaaacccaacgccggcgcc

SEQ ID NO: 20407 - DNA, 21 bp, synthetic construct
  misc_feature 1..21: note = Description of Artificial Sequence: Synthetic oligonucleotide
  source 1..21: mol_type = other DNA
gaaagcgccacccacgccggc

SEQ ID NO: 20408 - DNA, 21 bp, synthetic construct
  misc_feature 1..21: note = Description of Artificial Sequence: Synthetic oligonucleotide
  source 1..21: mol_type = other DNA
gacaaaccccccaacaacatc

SEQ ID NO: 20409 - DNA, 21 bp, synthetic construct
  misc_feature 1..21: note = Description of Artificial Sequence: Synthetic oligonucleotide
  source 1..21: mol_type = other DNA
gacacccacagaacccccggc

SEQ ID NO: 20410 - DNA, 21 bp, synthetic construct
  misc_feature 1..21: note = Description of Artificial Sequence: Synthetic oligonucleotide
  source 1..21: mol_type = other DNA
gacggcaacagcaaaaccccc

SEQ ID NO: 20411 - DNA, 21 bp, synthetic construct
  misc_feature 1..21: note = Description of Artificial Sequence: Synthetic oligonucleotide
  source 1..21: mol_type = other DNA
gacggcagcaccaccaaactc

SEQ ID NO: 20412 - DNA, 21 bp, synthetic construct
  misc_feature 1..21: note = Description of Artificial Sequence: Synthetic oligonucleotide
  source 1..21: mol_type = other DNA
gaggcggggtcttctgctagg

SEQ ID NO: 20413 - DNA, 21 bp, synthetic construct
  misc_feature 1..21: note = Description of Artificial Sequence: Synthetic oligonucleotide
  source 1..21: mol_type = other DNA
gaggctcgtgataagactagg

SEQ ID NO: 20414 - DNA, 21 bp, synthetic construct
  misc_feature 1..21: note = Description of Artificial Sequence: Synthetic oligonucleotide
  source 1..21: mol_type = other DNA
gatcggaatgggtctaataag

SEQ ID NO: 20415 - DNA, 21 bp, synthetic construct
  misc_feature 1..21: note = Description of Artificial Sequence: Synthetic oligonucleotide
  source 1..21: mol_type = other DNA
gccgacagcagagaaaaaggc

SEQ ID NO: 20416 - DNA, 21 bp, synthetic construct
  misc_feature 1..21: note = Description of Artificial Sequence: Synthetic oligonucleotide
  source 1..21: mol_type = other DNA
gccgccggcagcaccaaagac

SEQ ID NO: 20417 - DNA, 21 bp, synthetic construct
  misc_feature 1..21: note = Description of Artificial Sequence: Synthetic oligonucleotide
  source 1..21: mol_type = other DNA
gccggccaagcccccctcaac

SEQ ID NO: 20418 - DNA, 21 bp, synthetic construct
  misc_feature 1..21: note = Description of Artificial Sequence: Synthetic oligonucleotide
  source 1..21: mol_type = other DNA
gcgcagagtcagaaggcttct

SEQ ID NO: 20419 - DNA, 21 bp, synthetic construct
  misc_feature 1..21: note = Description of Artificial Sequence: Synthetic oligonucleotide
  source 1..21: mol_type = other DNA
gctttgggtggggctcctact

SEQ ID NO: 20420 - DNA, 21 bp, synthetic construct
  misc_feature 1..21: note = Description of Artificial Sequence: Synthetic oligonucleotide
  source 1..21: mol_type = other DNA
ggcaaaggcgaaaccagaacc

SEQ ID NO: 20421 - DNA, 21 bp, synthetic construct
  misc_feature 1..21: note = Description of Artificial Sequence: Synthetic oligonucleotide
  source 1..21: mol_type = other DNA
ggcacccccggccacggccaa

SEQ ID NO: 20422 - DNA, 21 bp, synthetic construct
  misc_feature 1..21: note = Description of Artificial Sequence: Synthetic oligonucleotide
  source 1..21: mol_type = other DNA
ggcctcgccagcagcaaaggc

SEQ ID NO: 20423 - DNA, 21 bp, synthetic construct
  misc_feature 1..21: note = Description of Artificial Sequence: Synthetic oligonucleotide
  source 1..21: mol_type = other DNA
ggcgccgccagcagcaacaga

SEQ ID NO: 20424 - DNA, 21 bp, synthetic construct
  misc_feature 1..21: note = Description of Artificial Sequence: Synthetic oligonucleotide
  source 1..21: mol_type = other DNA
gggactggtgataataaggtg

SEQ ID NO: 20425 - DNA, 21 bp, synthetic construct
  misc_feature 1..21: note = Description of Artificial Sequence: Synthetic oligonucleotide
  source 1..21: mol_type = other DNA
ggtaaggcgcagacgtcgcag

SEQ ID NO: 20426 - DNA, 21 bp, synthetic construct
  misc_feature 1..21: note = Description of Artificial Sequence: Synthetic oligonucleotide
  source 1..21: mol_type = other DNA
ggtgcgggggcgtctgttcag

SEQ ID NO: 20427 - DNA, 21 bp, synthetic construct
  misc_feature 1..21: note = Description of Artificial Sequence: Synthetic oligonucleotide
  source 1..21: mol_type = other DNA
ggttctggtccgaatgctccg

SEQ ID NO: 20428 - DNA, 21 bp, synthetic construct
  misc_feature 1..21: note = Description of Artificial Sequence: Synthetic oligonucleotide
  source 1..21: mol_type = other DNA
gtggcggataggtctggtcag

SEQ ID NO: 20429 - DNA, 21 bp, synthetic construct
  misc_feature 1..21: note = Description of Artificial Sequence: Synthetic oligonucleotide
  source 1..21: mol_type = other DNA
tacagaaacgacagcagcgtc

SEQ ID NO: 20430 - DNA, 21 bp, synthetic construct
  misc_feature 1..21: note = Description of Artificial Sequence: Synthetic oligonucleotide
  source 1..21: mol_type = other DNA
tatggtaagggggggagtcag

SEQ ID NO: 20431 - DNA, 21 bp, synthetic construct
  misc_feature 1..21: note = Description of Artificial Sequence: Synthetic oligonucleotide
  source 1..21: mol_type = other DNA
tctatgttgcctcagaagggt

SEQ ID NO: 20432 - DNA, 21 bp, synthetic construct
  misc_feature 1..21: note = Description of Artificial Sequence: Synthetic oligonucleotide
  source 1..21: mol_type = other DNA
tgcgtccccaccagcgccggc

SEQ ID NO: 20433 - DNA, 21 bp, synthetic construct
  misc_feature 1..21: note = Description of Artificial Sequence: Synthetic oligonucleotide
  source 1..21: mol_type = other DNA
tggggcggccccaccgccagc

SEQ ID NO: 20434 - DNA, 21 bp, synthetic construct
  misc_feature 1..21: note = Description of Artificial Sequence: Synthetic oligonucleotide
  source 1..21: mol_type = other DNA
ttgaattctgagcgtgctgct

SEQ ID NO: 20435 - DNA, 21 bp, synthetic construct
  misc_feature 1..21: note = Description of Artificial Sequence: Synthetic oligonucleotide
  source 1..21: mol_type = other DNA
gatgataataagaagggtctt

SEQ ID NO: 20436 - DNA, 21 bp, synthetic construct
  misc_feature 1..21: note = Description of Artificial Sequence: Synthetic oligonucleotide
  source 1..21: mol_type = other DNA
gataagcctgctcctggtaag

SEQ ID NO: 20437 - DNA, 21 bp, synthetic construct
  misc_feature 1..21: note = Description of Artificial Sequence: Synthetic oligonucleotide
  source 1..21: mol_type = other DNA
ggcaacgccggcagcagcgtc

SEQ ID NO: 20438 - DNA, 21 bp, synthetic construct
  misc_feature 1..21: note = Description of Artificial Sequence: Synthetic oligonucleotide
  source 1..21: mol_type = other DNA
aacagcaccaaccccgccagc

SEQ ID NO: 20439 - DNA, 21 bp, synthetic construct
  misc_feature 1..21: note = Description of Artificial Sequence: Synthetic oligonucleotide
  source 1..21: mol_type = other DNA
actcctagtagtaagtctacg

SEQ ID NO: 20440 - DNA, 21 bp, synthetic construct
  misc_feature 1..21: note = Description of Artificial Sequence: Synthetic oligonucleotide
  source 1..21: mol_type = other DNA
agcaccaacaccgccccccac

SEQ ID NO: 20441 - DNA, 21 bp, synthetic construct
  misc_feature 1..21: note = Description of Artificial Sequence: Synthetic oligonucleotide
  source 1..21: mol_type = other DNA
ggtgctacgtcgccttctcat

SEQ ID NO: 20442 - DNA, 21 bp, synthetic construct
  misc_feature 1..21: note = Description of Artificial Sequence: Synthetic oligonucleotide
  source 1..21: mol_type = other DNA
ggcaacgacagcgccggcaga

SEQ ID NO: 20443 - DNA, 21 bp, synthetic construct
  misc_feature 1..21: note = Description of Artificial Sequence: Synthetic oligonucleotide
  source 1..21: mol_type = other DNA
ggcagcaacgtcagcaaccaa

SEQ ID NO: 20444 - DNA, 21 bp, synthetic construct
  misc_feature 1..21: note = Description of Artificial Sequence: Synthetic oligonucleotide
  source 1..21: mol_type = other DNA
gatggtaagggtacgtctggg

SEQ ID NO: 20445 - DNA, 21 bp, synthetic construct
  misc_feature 1..21: note = Description of Artificial Sequence: Synthetic oligonucleotide
  source 1..21: mol_type = other DNA
tctgctggtgcgactcctgtt

SEQ ID NO: 20446 - DNA, 21 bp, synthetic construct
  misc_feature 1..21: note = Description of Artificial Sequence: Synthetic oligonucleotide
  source 1..21: mol_type = other DNA
accggcagcaacaccgtcatg

SEQ ID NO: 20447 - DNA, 21 bp, synthetic construct
  misc_feature 1..21: note = Description of Artificial Sequence: Synthetic oligonucleotide
  source 1..21: mol_type = other DNA
actactgatgcgcggcctgcg

SEQ ID NO: 20448 - DNA, 21 bp, synthetic construct
  misc_feature 1..21: note = Description of Artificial Sequence: Synthetic oligonucleotide
  source 1..21: mol_type = other DNA
gagactcgtagttctgctgct

SEQ ID NO: 20449 - DNA, 21 bp, synthetic construct
  misc_feature 1..21: note = Description of Artificial Sequence: Synthetic oligonucleotide
  source 1..21: mol_type = other DNA
gataatggtaagtctaatagg

SEQ ID NO: 20450 - DNA, 21 bp, synthetic construct
  misc_feature 1..21: note = Description of Artificial Sequence: Synthetic oligonucleotide
  source 1..21: mol_type = other DNA
tcttctcaggagcgtcctgtg

SEQ ID NO: 20451 - DNA, 21 bp, synthetic construct
  misc_feature 1..21: note = Description of Artificial Sequence: Synthetic oligonucleotide
  source 1..21: mol_type = other DNA
agtcttgcttctactagtcag

SEQ ID NO: 20452 - DNA, 21 bp, synthetic construct
  misc_feature 1..21: note = Description of Artificial Sequence: Synthetic oligonucleotide
  source 1..21: mol_type = other DNA
aatcagagtcgtaatgagtcg

SEQ ID NO: 20453 - DNA, 21 bp, synthetic construct
  misc_feature 1..21: note = Description of Artificial Sequence: Synthetic oligonucleotide
  source 1..21: mol_type = other DNA
caggggtcttctccgactgct

SEQ ID NO: 20454 - DNA, 21 bp, synthetic construct
  misc_feature 1..21: note = Description of Artificial Sequence: Synthetic oligonucleotide
  source 1..21: mol_type = other DNA
gataagtctgggcctcattcg

SEQ ID NO: 20455 - DNA, 21 bp, synthetic construct
  misc_feature 1..21: note = Description of Artificial Sequence: Synthetic oligonucleotide
  source 1..21: mol_type = other DNA
gctaatgctcctgataagtct

SEQ ID NO: 20456 - DNA, 21 bp, synthetic construct
  misc_feature 1..21: note = Description of Artificial Sequence: Synthetic oligonucleotide
  source 1..21: mol_type = other DNA
agtaagcagacgaatggtggt

SEQ ID NO: 20457 - DNA, 21 bp, synthetic construct
  misc_feature 1..21: note = Description of Artificial Sequence: Synthetic oligonucleotide
  source 1..21: mol_type = other DNA
atcggcgaaggcaaaaccgcc

SEQ ID NO: 20458 - DNA, 21 bp, synthetic construct
  misc_feature 1..21: note = Description of Artificial Sequence: Synthetic oligonucleotide
  source 1..21: mol_type = other DNA
gaaaaagccaccagcggcgtc

SEQ ID NO: 20459 - DNA, 21 bp, synthetic construct
  misc_feature 1..21: note = Description of Artificial Sequence: Synthetic oligonucleotide
  source 1..21: mol_type = other DNA
gagacgacgggtactaggtct

SEQ ID NO: 20460 - DNA, 21 bp, synthetic construct
  misc_feature 1..21: note = Description of Artificial Sequence: Synthetic oligonucleotide
  source 1..21: mol_type = other DNA
gtgactgaggggtctatgagg

SEQ ID NO: 20461 - DNA, 21 bp, synthetic construct
  misc_feature 1..21: note = Description of Artificial Sequence: Synthetic oligonucleotide
  source 1..21: mol_type = other DNA
accgacagccaaagccccaga

SEQ ID NO: 20462 - DNA, 21 bp, synthetic construct
  misc_feature 1..21: note = Description of Artificial Sequence: Synthetic oligonucleotide
  source 1..21: mol_type = other DNA
cagacgcctacgacgaatggt

SEQ ID NO: 20463 - DNA, 21 bp, synthetic construct
  misc_feature 1..21: note = Description of Artificial Sequence: Synthetic oligonucleotide
  source 1..21: mol_type = other DNA
actcttggtgcgcagggtggt

SEQ ID NO: 20464 - DNA, 21 bp, synthetic construct
  misc_feature 1..21: note = Description of Artificial Sequence: Synthetic oligonucleotide
  source 1..21: mol_type = other DNA
agcaccacccacaaaaccctc

SEQ ID NO: 20465 - DNA, 21 bp, synthetic construct
  misc_feature 1..21: note = Description of Artificial Sequence: Synthetic oligonucleotide
  source 1..21: mol_type = other DNA
agcagaagcgacaaaacccac

SEQ ID NO: 20466 - DNA, 21 bp, synthetic construct
  misc_feature 1..21: note = Description of Artificial Sequence: Synthetic oligonucleotide
  source 1..21: mol_type = other DNA
ctggggggtgctcagggtagt

SEQ ID NO: 20467 - DNA, 21 bp, synthetic construct
  misc_feature 1..21: note = Description of Artificial Sequence: Synthetic oligonucleotide
  source 1..21: mol_type = other DNA
agcagaagcggcggcaccgcc

SEQ ID NO: 20468 - DNA, 21 bp, synthetic construct
  misc_feature 1..21: note = Description of Artificial Sequence: Synthetic oligonucleotide
  source 1..21: mol_type = other DNA
gacaccaacgccggcaaccac

SEQ ID NO: 20469 - DNA, 21 bp, synthetic construct
  misc_feature 1..21: note = Description of Artificial Sequence: Synthetic oligonucleotide
  source 1..21: mol_type = other DNA
gacagcaaagccaacaacctc

SEQ ID NO: 20470 - DNA, 21 bp, synthetic construct
  misc_feature 1..21: note = Description of Artificial Sequence: Synthetic oligonucleotide
  source 1..21: mol_type = other DNA
gccgaaggcagcaacagacaa

SEQ ID NO: 20471 - DNA, 21 bp, synthetic construct
  misc_feature 1..21: note = Description of Artificial Sequence: Synthetic oligonucleotide
  source 1..21: mol_type = other DNA
gggaagtcggctaatgtgggt

SEQ ID NO: 20472 - DNA, 21 bp, synthetic construct
  misc_feature 1..21: note = Description of Artificial Sequence: Synthetic oligonucleotide
  source 1..21: mol_type = other DNA
ggcaccaaacccaacacccaa

SEQ ID NO: 20473 - DNA, 21 bp, synthetic construct
  misc_feature 1..21: note = Description of Artificial Sequence: Synthetic oligonucleotide
  source 1..21: mol_type = other DNA
aagactacggagcggagtagt

SEQ ID NO: 20474 - DNA, 21 bp, synthetic construct
  misc_feature 1..21: note = Description of Artificial Sequence: Synthetic oligonucleotide
  source 1..21: mol_type = other DNA
actctttctgagaggggtgtg

SEQ ID NO: 20475 - DNA, 21 bp, synthetic construct
  misc_feature 1..21: note = Description of Artificial Sequence: Synthetic oligonucleotide
  source 1..21: mol_type = other DNA
ggtacggttgatcttaagcgg

SEQ ID NO: 20476 - DNA, 21 bp, synthetic construct
  misc_feature 1..21: note = Description of Artificial Sequence: Synthetic oligonucleotide
  source 1..21: mol_type = other DNA
ctcggcgcccccgccagccaa

SEQ ID NO: 20477 - DNA, 21 bp, synthetic construct
  misc_feature 1..21: note = Description of Artificial Sequence: Synthetic oligonucleotide
  source 1..21: mol_type = other DNA
caggggaagcctaatttgggg

SEQ ID NO: 20478 - DNA, 21 bp, synthetic construct
  misc_feature 1..21: note = Description of Artificial Sequence: Synthetic oligonucleotide
  source 1..21: mol_type = other DNA
gataggcctggtacgcctggg

SEQ ID NO: 20479 - DNA, 21 bp, synthetic construct
  misc_feature 1..21: note = Description of Artificial Sequence: Synthetic oligonucleotide
  source 1..21: mol_type = other DNA
gacgccgccagcagcagactc

SEQ ID NO: 20480 - DNA, 21 bp, synthetic construct
  misc_feature 1..21: note = Description of Artificial Sequence: Synthetic oligonucleotide
  source 1..21: mol_type = other DNA
ggccaaagcgccaccaccgtc

SEQ ID NO: 20481 - DNA, 21 bp, synthetic construct
  misc_feature 1..21: note = Description of Artificial Sequence: Synthetic oligonucleotide
  source 1..21: mol_type = other DNA
caagtcgacaccaaaagcagc

SEQ ID NO: 20482 - DNA, 21 bp, synthetic construct
  misc_feature 1..21: note = Description of Artificial Sequence: Synthetic oligonucleotide
  source 1..21: mol_type = other DNA
ggcggcggcaacgccaccagc

SEQ ID NO: 20483 - DNA, 21 bp, synthetic construct
  misc_feature 1..21: note = Description of Artificial Sequence: Synthetic oligonucleotide
  source 1..21: mol_type = other DNA
gtcagcaaaagccccgccaac

SEQ ID NO: 20484 - DNA, 21 bp, synthetic construct
  misc_feature 1..21: note = Description of Artificial Sequence: Synthetic oligonucleotide
  source 1..21: mol_type = other DNA
ctcggcgccggcaaagacctc

SEQ ID NO: 20485 - DNA, 21 bp, synthetic construct
  misc_feature 1..21: note = Description of Artificial Sequence: Synthetic oligonucleotide
  source 1..21: mol_type = other DNA
gctccggagtcgaaggttact

SEQ ID NO: 20486 - DNA, 21 bp, synthetic construct
  misc_feature 1..21: note = Description of Artificial Sequence: Synthetic oligonucleotide
  source 1..21: mol_type = other DNA
ggcacccaagcccaacccctc

SEQ ID NO: 20487 - DNA, 21 bp, synthetic construct
  misc_feature 1..21: note = Description of Artificial Sequence: Synthetic oligonucleotide
  source 1..21: mol_type = other DNA
gccctcaacgacagcagaagc

SEQ ID NO: 20488 - DNA, 21 bp, synthetic construct
  misc_feature 1..21: note = Description of Artificial Sequence: Synthetic oligonucleotide
  source 1..21: mol_type = other DNA
agcagcgaaaaagccagagcc

SEQ ID NO: 20489 - DNA, 21 bp, synthetic construct
  misc_feature 1..21: note = Description of Artificial Sequence: Synthetic oligonucleotide
  source 1..21: mol_type = other DNA
ggggatggggtgaagggtgtg

SEQ ID NO: 20490 - DNA, 21 bp, synthetic construct
  misc_feature 1..21: note = Description of Artificial Sequence: Synthetic oligonucleotide
  source 1..21: mol_type = other DNA
gttaataatagtcctgctact

SEQ ID NO: 20491 - DNA, 21 bp, synthetic construct
  misc_feature 1..21: note = Description of Artificial Sequence: Synthetic oligonucleotide
  source 1..21: mol_type = other DNA
accgcccaaagcaacccccac

SEQ ID NO: 20492 - DNA, 21 bp, synthetic construct
  misc_feature 1..21: note = Description of Artificial Sequence: Synthetic oligonucleotide
  source 1..21: mol_type = other DNA
accaacaccaccagcaaagtc

SEQ ID NO: 20493 - DNA, 21 bp, synthetic construct
  misc_feature 1..21: note = Description of Artificial Sequence: Synthetic oligonucleotide
  source 1..21: mol_type = other DNA
gattcgactgcgcgtcctggt

SEQ ID NO: 20494 - DNA, 21 bp, synthetic construct
  misc_feature 1..21: note = Description of Artificial Sequence: Synthetic oligonucleotide
  source 1..21: mol_type = other DNA
aacagcaaaggcccccaaggc

SEQ ID NO: 20495 - DNA, 21 bp, synthetic construct
  misc_feature 1..21: note = Description of Artificial Sequence: Synthetic oligonucleotide
  source 1..21: mol_type = other DNA
gagcattcgggtgcggctaag

SEQ ID NO: 20496 - DNA, 21 bp, synthetic construct
  misc_feature 1..21: note = Description of Artificial Sequence: Synthetic oligonucleotide
  source 1..21: mol_type = other DNA
caaaccgccagcagcgtcagc

SEQ ID NO: 20497 - DNA, 21 bp, synthetic construct
  misc_feature 1..21: note = Description of Artificial Sequence: Synthetic oligonucleotide
  source 1..21: mol_type = other DNA
gtcggcacccaaagccaagcc

SEQ ID NO: 20498 - DNA, 21 bp, synthetic construct
  misc_feature 1..21: note = Description of Artificial Sequence: Synthetic oligonucleotide
  source 1..21: mol_type = other DNA
agttcggcgcaggggagttct

SEQ ID NO: 20499 - DNA, 21 bp, synthetic construct
  misc_feature 1..21: note = Description of Artificial Sequence: Synthetic oligonucleotide
  source 1..21: mol_type = other DNA
tcttcggaggatcgtaagctg

SEQ ID NO: 20500 - DNA, 21 bp, synthetic construct
  misc_feature 1..21: note = Description of Artificial Sequence: Synthetic oligonucleotide
  source 1..21: mol_type = other DNA
aacggcagccaaaccatccaa

SEQ ID NO: 20501 - DNA, 21 bp, synthetic construct
  misc_feature 1..21: note = Description of Artificial Sequence: Synthetic oligonucleotide
  source 1..21: mol_type = other DNA
acttcgggtggggagccgcgt

SEQ ID NO: 20502 - DNA, 21 bp, synthetic construct
  misc_feature 1..21: note = Description of Artificial Sequence: Synthetic oligonucleotide
  source 1..21: mol_type = other DNA
agccaacacaaagacctcagc

SEQ ID NO: 20503 - DNA, 21 bp, synthetic construct
  misc_feature 1..21: note = Description of Artificial Sequence: Synthetic oligonucleotide
  source 1..21: mol_type = other DNA
cagcagactaagagttcggag

SEQ ID NO: 20504 - DNA, 21 bp, synthetic construct
  misc_feature 1..21: note = Description of Artificial Sequence: Synthetic oligonucleotide
  source 1..21: mol_type = other DNA
gcccccgacagcagaagcgcc

SEQ ID NO: 20505 - DNA, 21 bp, synthetic construct
  misc_feature 1..21: note = Description of Artificial Sequence: Synthetic oligonucleotide
  source 1..21: mol_type = other DNA
gcccaaagcggcggcaaaagc

SEQ ID NO: 20506 - DNA, 21 bp, synthetic construct
  misc_feature 1..21: note = Description of Artificial Sequence: Synthetic oligonucleotide
  source 1..21: mol_type = other DNA
aatggggcggggacttcttct

SEQ ID NO: 20507 - DNA, 21 bp, synthetic construct
  misc_feature 1..21: note = Description of Artificial Sequence: Synthetic oligonucleotide
  source 1..21: mol_type = other DNA
agtaagcagaatgcttcggct

SEQ ID NO: 20508 - DNA, 21 bp, synthetic construct
  misc_feature 1..21: note = Description of Artificial Sequence: Synthetic oligonucleotide
  source 1..21: mol_type = other DNA
caggggaatctgagttcgggg

SEQ ID NO: 20509 - DNA, 21 bp, synthetic construct
  misc_feature 1..21: note = Description of Artificial Sequence: Synthetic oligonucleotide
  source 1..21: mol_type = other DNA
cagggtgcgagtcagaatatt

SEQ ID NO: 20510 - DNA, 21 bp, synthetic construct
  misc_feature 1..21: note = Description of Artificial Sequence: Synthetic oligonucleotide
  source 1..21: mol_type = other DNA
gccgtcaccagcggcggcaaa

SEQ ID NO: 20511 - DNA, 21 bp, synthetic construct
  misc_feature 1..21: note = Description of Artificial Sequence: Synthetic oligonucleotide
  source 1..21: mol_type = other DNA
gggggggtggatacttctaag

SEQ ID NO: 20512 - DNA, 21 bp, synthetic construct
  misc_feature 1..21: note = Description of Artificial Sequence: Synthetic oligonucleotide
  source 1..21: mol_type = other DNA
aggtctaatggttcggctagt

SEQ ID NO: 20513 - DNA, 21 bp, synthetic construct
  misc_feature 1..21: note = Description of Artificial Sequence: Synthetic oligonucleotide
  source 1..21: mol_type = other DNA
gattctcttgggactaagaag

SEQ ID NO: 20514 - DNA, 21 bp, synthetic construct
  misc_feature 1..21: note = Description of Artificial Sequence: Synthetic oligonucleotide
  source 1..21: mol_type = other DNA
gggcctgggagtaatcggggg

SEQ ID NO: 20515 - DNA, 21 bp, synthetic construct
  misc_feature 1..21: note = Description of Artificial Sequence: Synthetic oligonucleotide
  source 1..21: mol_type = other DNA
aacaccagcagcagcggcctc

SEQ ID NO: 20516 - DNA, 21 bp, synthetic construct
  misc_feature 1..21: note = Description of Artificial Sequence: Synthetic oligonucleotide
  source 1..21: mol_type = other DNA
aatcagagttctggggtgtcg

SEQ ID NO: 20517 - DNA, 21 bp, synthetic construct
  misc_feature 1..21: note = Description of Artificial Sequence: Synthetic oligonucleotide
  source 1..21: mol_type = other DNA
actaatggtaatcctactacg

SEQ ID NO: 20518 - DNA, 21 bp, synthetic construct
  misc_feature 1..21: note = Description of Artificial Sequence: Synthetic oligonucleotide
  source 1..21: mol_type = other DNA
agcaacagccaaagaagcagc

SEQ ID NO: 20519 - DNA, 21 bp, synthetic construct
  misc_feature 1..21: note = Description of Artificial Sequence: Synthetic oligonucleotide
  source 1..21: mol_type = other DNA
gagtctgggggtagtgcgtcg

SEQ ID NO: 20520 - DNA, 21 bp, synthetic construct
  misc_feature 1..21: note = Description of Artificial Sequence: Synthetic oligonucleotide
  source 1..21: mol_type = other DNA
ggcgccgacagcatgcccaaa

SEQ ID NO: 20521 - DNA, 21 bp, synthetic construct
  misc_feature 1..21: note = Description of Artificial Sequence: Synthetic oligonucleotide
  source 1..21: mol_type = other DNA
ttgaatgctgatcatcagaag

SEQ ID NO: 20522 - DNA, 21 bp, synthetic construct
  misc_feature 1..21: note = Description of Artificial Sequence: Synthetic oligonucleotide
  source 1..21: mol_type = other DNA
accagcggcaccgtcgccaga

SEQ ID NO: 20523 - DNA, 21 bp, synthetic construct
  misc_feature 1..21: note = Description of Artificial Sequence: Synthetic oligonucleotide
  source 1..21: mol_type = other DNA
agccaaagcagagacgccctc

SEQ ID NO: 20524 - DNA, 21 bp, synthetic construct
  misc_feature 1..21: note = Description of Artificial Sequence: Synthetic oligonucleotide
  source 1..21: mol_type = other DNA
aacaccaaccccagcatggcc

SEQ ID NO: 20525 - DNA, 21 bp, synthetic construct
  misc_feature 1..21: note = Description of Artificial Sequence: Synthetic oligonucleotide
  source 1..21: mol_type = other DNA
actggtcagagtaatagtgcg

SEQ ID NO: 20526 - DNA, 21 bp, synthetic construct
  misc_feature 1..21: note = Description of Artificial Sequence: Synthetic oligonucleotide
  source 1..21: mol_type = other DNA
gacaccaccaccgccaaagcc

SEQ ID NO: 20527 - DNA, 21 bp, synthetic construct
  misc_feature 1..21: note = Description of Artificial Sequence: Synthetic oligonucleotide
  source 1..21: mol_type = other DNA
gagaatccgggtggggggcgt

SEQ ID NO: 20528 - DNA, 21 bp, synthetic construct
  misc_feature 1..21: note = Description of Artificial Sequence: Synthetic oligonucleotide
  source 1..21: mol_type = other DNA
gagcgtaattctaatccgggg

SEQ ID NO: 20529 - DNA, 21 bp, synthetic construct
  misc_feature 1..21: note = Description of Artificial Sequence: Synthetic oligonucleotide
  source 1..21: mol_type = other DNA
ggcgccggcaacgacagaacc

SEQ ID NO: 20530 - DNA, 21 bp, synthetic construct
  misc_feature 1..21: note = Description of Artificial Sequence: Synthetic oligonucleotide
  source 1..21: mol_type = other DNA
gggaatactgaggggaggagt

SEQ ID NO: 20531 - DNA, 21 bp, synthetic construct
  misc_feature 1..21: note = Description of Artificial Sequence: Synthetic oligonucleotide
  source 1..21: mol_type = other DNA
tcgcttgctacgtctaatcag

SEQ ID NO: 20532 - DNA, 21 bp, synthetic construct
  misc_feature 1..21: note = Description of Artificial Sequence: Synthetic oligonucleotide
  source 1..21: mol_type = other DNA
gttactaaggattcgcagagt

SEQ ID NO: 20533 - DNA, 21 bp, synthetic construct
  misc_feature 1..21: note = Description of Artificial Sequence: Synthetic oligonucleotide
  source 1..21: mol_type = other DNA
agcagcgccaacaacaaactc

SEQ ID NO: 20534 - DNA, 21 bp, synthetic construct
  misc_feature 1..21: note = Description of Artificial Sequence: Synthetic oligonucleotide
  source 1..21: mol_type = other DNA
aatgatcagggtaagtcttcg

SEQ ID NO: 20535 - DNA, 21 bp, synthetic construct
  misc_feature 1..21: note = Description of Artificial Sequence: Synthetic oligonucleotide
  source 1..21: mol_type = other DNA
aaaaacggcaacgacagagcc

SEQ ID NO: 20536 - DNA, 21 bp, synthetic construct
  misc_feature 1..21: note = Description of Artificial Sequence: Synthetic oligonucleotide
  source 1..21: mol_type = other DNA
aaaggcacccccgccagcgcc

SEQ ID NO: 20537 - DNA, 21 bp, synthetic construct
  misc_feature 1..21: note = Description of Artificial Sequence: Synthetic oligonucleotide
  source 1..21: mol_type = other DNA
aatactaagggtactaatact

SEQ ID NO: 20538 - DNA, 21 bp, synthetic construct
  misc_feature 1..21: note = Description of Artificial Sequence: Synthetic oligonucleotide
  source 1..21: mol_type = other DNA
gagacgagtaagtctttgccg

SEQ ID NO: 20539 - DNA, 21 bp, synthetic construct
  misc_feature 1..21: note = Description of Artificial Sequence: Synthetic oligonucleotide
  source 1..21: mol_type = other DNA
ggcctcagcaccgaagcccac

SEQ ID NO: 20540 - DNA, 21 bp, synthetic construct
  misc_feature 1..21: note = Description of Artificial Sequence: Synthetic oligonucleotide
  source 1..21: mol_type = other DNA
tcgaattcgaataaggtgagt

SEQ ID NO: 20541 - DNA, 21 bp, synthetic construct
  misc_feature 1..21: note = Description of Artificial Sequence: Synthetic oligonucleotide
  source 1..21: mol_type = other DNA
aatcaggcgccttctggttcg

SEQ ID NO: 20542 - DNA, 21 bp, synthetic construct
  misc_feature 1..21: note = Description of Artificial Sequence: Synthetic oligonucleotide
  source 1..21: mol_type = other DNA
agcagaaacgacaaagacgcc

SEQ ID NO: 20543 - DNA, 21 bp, synthetic construct
  misc_feature 1..21: note = Description of Artificial Sequence: Synthetic oligonucleotide
  source 1..21: mol_type = other DNA
tatagtggtcatgagccgaag

SEQ ID NO: 20544 - DNA, 21 bp, synthetic construct
  misc_feature 1..21: note = Description of Artificial Sequence: Synthetic oligonucleotide
  source 1..21: mol_type = other DNA
agtactggggtgactccggtg

SEQ ID NO: 20545 - DNA, 21 bp, synthetic construct
  misc_feature 1..21: note = Description of Artificial Sequence: Synthetic oligonucleotide
  source 1..21: mol_type = other DNA
gctactggtacggggcagggt

SEQ ID NO: 20546 - DNA, 21 bp, synthetic construct
  misc_feature 1..21: note = Description of Artificial Sequence: Synthetic oligonucleotide
  source 1..21: mol_type = other DNA
gggcatgcggataataagacg

SEQ ID NO: 20547 - DNA, 21 bp, synthetic construct
  misc_feature 1..21: note = Description of Artificial Sequence: Synthetic oligonucleotide
  source 1..21: mol_type = other DNA
gatggggttggtcataatcct

SEQ ID NO: 20548 - DNA, 21 bp, synthetic construct
  misc_feature 1..21: note = Description of Artificial Sequence: Synthetic oligonucleotide
  source 1..21: mol_type = other DNA
tctgggacttcttctattttg

SEQ ID NO: 20549 - DNA, 21 bp, synthetic construct
  misc_feature 1..21: note = Description of Artificial Sequence: Synthetic oligonucleotide
  source 1..21: mol_type = other DNA
acccaacacaccagcaaccaa

SEQ ID NO: 20550 - DNA, 21 bp, synthetic construct
  misc_feature 1..21: note = Description of Artificial Sequence: Synthetic oligonucleotide
  source 1..21: mol_type = other DNA
ggcagcagcaaaggcagcaac

SEQ ID NO: 20551 - DNA, 21 bp, synthetic construct
  misc_feature 1..21: note = Description of Artificial Sequence: Synthetic oligonucleotide
  source 1..21: mol_type = other DNA
gacagaaccagcggcgtcagc

SEQ ID NO: 20552 - DNA, 21 bp, synthetic construct
  misc_feature 1..21: note = Description of Artificial Sequence: Synthetic oligonucleotide
  source 1..21: mol_type = other DNA
aacatcagcgaacaaagaagc

SEQ ID NO: 20553 - DNA, 21 bp, synthetic construct
  misc_feature 1..21: note = Description of Artificial Sequence: Synthetic oligonucleotide
  source 1..21: mol_type = other DNA
aacgccaaaaccagcgtcggc

SEQ ID NO: 20554 - DNA, 21 bp, synthetic construct
  misc_feature 1..21: note = Description of Artificial Sequence: Synthetic oligonucleotide
  source 1..21: mol_type = other DNA
actggtggtaattcttctagt

SEQ ID NO: 20555 - DNA, 21 bp, synthetic construct
  misc_feature 1..21: note = Description of Artificial Sequence: Synthetic oligonucleotide
  source 1..21: mol_type = other DNA
gacagcggcgaaagaggcaga

SEQ ID NO: 20556 - DNA, 21 bp, synthetic construct
  misc_feature 1..21: note = Description of Artificial Sequence: Synthetic oligonucleotide
  source 1..21: mol_type = other DNA
ggcgccaacagcagccccagc

SEQ ID NO: 20557 - DNA, 21 bp, synthetic construct
  misc_feature 1..21: note = Description of Artificial Sequence: Synthetic oligonucleotide
  source 1..21: mol_type = other DNA
ggcggccacaaaagcagcacc

SEQ ID NO: 20558 - DNA, 21 bp, synthetic construct
  misc_feature 1..21: note = Description of Artificial Sequence: Synthetic oligonucleotide
  source 1..21: mol_type = other DNA
gggaagagtgggacgtcgagt

SEQ ID NO: 20559 - DNA, 21 bp, synthetic construct
  misc_feature 1..21: note = Description of Artificial Sequence: Synthetic oligonucleotide
  source 1..21: mol_type = other DNA
tctcgggcttctggggtgagt

SEQ ID NO: 20560 - DNA, 21 bp, synthetic construct
  misc_feature 1..21: note = Description of Artificial Sequence: Synthetic oligonucleotide
  source 1..21: mol_type = other DNA
tctctggcttcgactcatgct

SEQ ID NO: 20561 - DNA, 21 bp, synthetic construct
  misc_feature 1..21: note = Description of Artificial Sequence: Synthetic oligonucleotide
  source 1..21: mol_type = other DNA
tctcagacgtcgactcatact

SEQ ID NO: 20562 - DNA, 21 bp, synthetic construct
  misc_feature 1..21: note = Description of Artificial Sequence: Synthetic oligonucleotide
  source 1..21: mol_type = other DNA
gatgggcgttctgcggcttct

SEQ ID NO: 20563 - DNA, 21 bp, synthetic construct
  misc_feature 1..21: note = Description of Artificial Sequence: Synthetic oligonucleotide
  source 1..21: mol_type = other DNA
agtgtgggtacgtcttcttct

SEQ ID NO: 20564 - DNA, 21 bp, synthetic construct
  misc_feature 1..21: note = Description of Artificial Sequence: Synthetic oligonucleotide
  source 1..21: mol_type = other DNA
cacagcggcaacagcaacagc

SEQ ID NO: 20565 - DNA, 21 bp, synthetic construct
  misc_feature 1..21: note = Description of Artificial Sequence: Synthetic oligonucleotide
  source 1..21: mol_type = other DNA
ggcaccggcagcagcgtcagc

SEQ ID NO: 20566 - DNA, 21 bp, synthetic construct
  misc_feature 1..21: note = Description of Artificial Sequence: Synthetic oligonucleotide
  source 1..21: mol_type = other DNA
acgaatgagggtacgaatcgt

SEQ ID NO: 20567 - DNA, 21 bp, synthetic construct
  misc_feature 1..21: note = Description of Artificial Sequence: Synthetic oligonucleotide
  source 1..21: mol_type = other DNA
agcaaaagcaaagacatcgcc

SEQ ID NO: 20568 - DNA, 21 bp, synthetic construct
  misc_feature 1..21: note = Description of Artificial Sequence: Synthetic oligonucleotide
  source 1..21: mol_type = other DNA
gctagtcctgggtcttcgggt

SEQ ID NO: 20569 - DNA, 21 bp, synthetic construct
  misc_feature 1..21: note = Description of Artificial Sequence: Synthetic oligonucleotide
  source 1..21: mol_type = other DNA
aatctggagtctcggtctgct

SEQ ID NO: 20570 - DNA, 21 bp, synthetic construct
  misc_feature 1..21: note = Description of Artificial Sequence: Synthetic oligonucleotide
  source 1..21: mol_type = other DNA
cacggcatcgacagcatgaaa

SEQ ID NO: 20571 - DNA, 21 bp, synthetic construct
  misc_feature 1..21: note = Description of Artificial Sequence: Synthetic oligonucleotide
  source 1..21: mol_type = other DNA
aataatggtcagaattcgacg

SEQ ID NO: 20572 - DNA, 21 bp, synthetic construct
  misc_feature 1..21: note = Description of Artificial Sequence: Synthetic oligonucleotide
  source 1..21: mol_type = other DNA
aatagtgcggcgtcgagtgtg

SEQ ID NO: 20573 - DNA, 21 bp, synthetic construct
  misc_feature 1..21: note = Description of Artificial Sequence: Synthetic oligonucleotide
  source 1..21: mol_type = other DNA
accggcaaagaaagcatgatc

SEQ ID NO: 20574 - DNA, 21 bp, synthetic construct
  misc_feature 1..21: note = Description of Artificial Sequence: Synthetic oligonucleotide
  source 1..21: mol_type = other DNA
accgccggcaccggcaaaacc

SEQ ID NO: 20575 - DNA, 21 bp, synthetic construct
  misc_feature 1..21: note = Description of Artificial Sequence: Synthetic oligonucleotide
  source 1..21: mol_type = other DNA
agtacgactaaggatcgggtt

SEQ ID NO: 20576 - DNA, 21 bp, synthetic construct
  misc_feature 1..21: note = Description of Artificial Sequence: Synthetic oligonucleotide
  source 1..21: mol_type = other DNA
agtccttcgaaggataaggag

SEQ ID NO: 20577 - DNA, 21 bp, synthetic construct
  misc_feature 1..21: note = Description of Artificial Sequence: Synthetic oligonucleotide
  source 1..21: mol_type = other DNA
cacatgaacaccagcagcaaa

SEQ ID NO: 20578 - DNA, 21 bp, synthetic construct
  misc_feature 1..21: note = Description of Artificial Sequence: Synthetic oligonucleotide
  source 1..21: mol_type = other DNA
catactcatggtgagggtaag

SEQ ID NO: 20579 - DNA, 21 bp, synthetic construct
  misc_feature 1..21: note = Description of Artificial Sequence: Synthetic oligonucleotide
  source 1..21: mol_type = other DNA
ctcagcggccacagcccccaa

SEQ ID NO: 20580 - DNA, 21 bp, synthetic construct
  misc_feature 1..21: note = Description of Artificial Sequence: Synthetic oligonucleotide
  source 1..21: mol_type = other DNA
gaggggtctgtgcagagtaag

SEQ ID NO: 20581 - DNA, 21 bp, synthetic construct
  misc_feature 1..21: note = Description of Artificial Sequence: Synthetic oligonucleotide
  source 1..21: mol_type = other DNA
gccggcaacacccccaaaaga

SEQ ID NO: 20582 - DNA, 21 bp, synthetic construct
  misc_feature 1..21: note = Description of Artificial Sequence: Synthetic oligonucleotide
  source 1..21: mol_type = other DNA
ggtcctgagcatacgcctgct

SEQ ID NO: 20583 - DNA, 21 bp, synthetic construct
  misc_feature 1..21: note = Description of Artificial Sequence: Synthetic oligonucleotide
  source 1..21: mol_type = other DNA
tcttctgggaaggatctggcg

SEQ ID NO: 20584 - DNA, 21 bp, synthetic construct
  misc_feature 1..21: note = Description of Artificial Sequence: Synthetic oligonucleotide
  source 1..21: mol_type = other DNA
aggactgatactgggccggtg

SEQ ID NO: 20585 - DNA, 21 bp, synthetic construct
  misc_feature 1..21: note = Description of Artificial Sequence: Synthetic oligonucleotide
  source 1..21: mol_type = other DNA
gctcaggatcctacgcataag

SEQ ID NO: 20586 - DNA, 21 bp, synthetic construct
  misc_feature 1..21: note = Description of Artificial Sequence: Synthetic oligonucleotide
  source 1..21: mol_type = other DNA
accaacagcgaaagaaacctc

SEQ ID NO: 20587 - DNA, 21 bp, synthetic construct
  misc_feature 1..21: note = Description of Artificial Sequence: Synthetic oligonucleotide
  source 1..21: mol_type = other DNA
gcggctgatagtaagggtggt

SEQ ID NO: 20588 - DNA, 21 bp, synthetic construct
  misc_feature 1..21: note = Description of Artificial Sequence: Synthetic oligonucleotide
  source 1..21: mol_type = other DNA
ggtaatacgacttcgactcag

SEQ ID NO: 20589 - DNA, 21 bp, synthetic construct
  misc_feature 1..21: note = Description of Artificial Sequence: Synthetic oligonucleotide
  source 1..21: mol_type = other DNA
gtcggcgccgcccccgtcagc

SEQ ID NO: 20590 - DNA, 21 bp, synthetic construct
  misc_feature 1..21: note = Description of Artificial Sequence: Synthetic oligonucleotide
  source 1..21: mol_type = other DNA
gataagggtcctcaggtggtg

SEQ ID NO: 20591 - DNA, 21 bp, synthetic construct
  misc_feature 1..21: note = Description of Artificial Sequence: Synthetic oligonucleotide
  source 1..21: mol_type = other DNA
aatcctagttcttctcatatg

SEQ ID NO: 20592 - DNA, 21 bp, synthetic construct
  misc_feature 1..21: note = Description of Artificial Sequence: Synthetic oligonucleotide
  source 1..21: mol_type = other DNA
aaccacggcacccccgtcgaa

SEQ ID NO: 20593 - DNA, 21 bp, synthetic construct
  misc_feature 1..21: note = Description of Artificial Sequence: Synthetic oligonucleotide
  source 1..21: mol_type = other DNA
aatcctagtacgaatggtaat

SEQ ID NO: 20594 - DNA, 21 bp, synthetic construct
  misc_feature 1..21: note = Description of Artificial Sequence: Synthetic oligonucleotide
  source 1..21: mol_type = other DNA
aattctgaggttagttctaag

SEQ ID NO: 20595 - DNA, 21 bp, synthetic construct
  misc_feature 1..21: note = Description of Artificial Sequence: Synthetic oligonucleotide
  source 1..21: mol_type = other DNA
caggggccgaatcattcgtcc

SEQ ID NO: 20596 - DNA, 21 bp, synthetic construct
  misc_feature 1..21: note = Description of Artificial Sequence: Synthetic oligonucleotide
  source 1..21: mol_type = other DNA
gtcaaagccggcaaaaacgaa

SEQ ID NO: 20597 - DNA, 21 bp, synthetic construct
  misc_feature 1..21: note = Description of Artificial Sequence: Synthetic oligonucleotide
  source 1..21: mol_type = other DNA
ggggcttttggggagaagggt

SEQ ID NO: 20598 - DNA, 21 bp, synthetic construct
  misc_feature 1..21: note = Description of Artificial Sequence: Synthetic oligonucleotide
  source 1..21: mol_type = other DNA
acgagtcgttcggcgcaggct

SEQ ID NO: 20599 - DNA, 21 bp, synthetic construct
  misc_feature 1..21: note = Description of Artificial Sequence: Synthetic oligonucleotide
  source 1..21: mol_type = other DNA
agtccggggtcgtcgactttg

SEQ ID NO: 20600 - DNA, 21 bp, synthetic construct
  misc_feature 1..21: note = Description of Artificial Sequence: Synthetic oligonucleotide
  source 1..21: mol_type = other DNA
cgtcagggtactacttcgggt

SEQ ID NO: 20601 - DNA, 21 bp, synthetic construct
  misc_feature 1..21: note = Description of Artificial Sequence: Synthetic oligonucleotide
  source 1..21: mol_type = other DNA
gccgaacaaaacagaagcagc

SEQ ID NO: 20602 - DNA, 21 bp, synthetic construct
  misc_feature 1..21: note = Description of Artificial Sequence: Synthetic oligonucleotide
  source 1..21: mol_type = other DNA
ggggggacgaaggggaccact

SEQ ID NO: 20603 - DNA, 21 bp, synthetic construct
  misc_feature 1..21: note = Description of Artificial Sequence: Synthetic oligonucleotide
  source 1..21: mol_type = other DNA
tttggtgatagtaggtcgaat

SEQ ID NO: 20604 - DNA, 21 bp, synthetic construct
  misc_feature 1..21: note = Description of Artificial Sequence: Synthetic oligonucleotide
  source 1..21: mol_type = other DNA
cagactaatacggggaagggg

SEQ ID NO: 20605 - DNA, 21 bp, synthetic construct
  misc_feature 1..21: note = Description of Artificial Sequence: Synthetic oligonucleotide
  source 1..21: mol_type = other DNA
aaggggaatgctggtgttgag

SEQ ID NO: 20606 - DNA, 21 bp, synthetic construct
  misc_feature 1..21: note = Description of Artificial Sequence: Synthetic oligonucleotide
  source 1..21: mol_type = other DNA
cttactcaggataagccggtt

SEQ ID NO: 20607 - DNA, 21 bp, synthetic construct
  misc_feature 1..21: note = Description of Artificial Sequence: Synthetic oligonucleotide
  source 1..21: mol_type = other DNA
gggcagcataagtctgggacg

SEQ ID NO: 20608 - DNA, 21 bp, synthetic construct
  misc_feature 1..21: note = Description of Artificial Sequence: Synthetic oligonucleotide
  source 1..21: mol_type = other DNA
gtgaaggagagtaaggggact

SEQ ID NO: 20609 - DNA, 21 bp, synthetic construct
  misc_feature 1..21: note = Description of Artificial Sequence: Synthetic oligonucleotide
  source 1..21: mol_type = other DNA
gttgagtctcctagtaatagg

SEQ ID NO: 20610 - DNA, 21 bp, synthetic construct
  misc_feature 1..21: note = Description of Artificial Sequence: Synthetic oligonucleotide
  source 1..21: mol_type = other DNA
tacaaagaacaaaacgccaaa

SEQ ID NO: 20611 - DNA, 21 bp, synthetic construct
  misc_feature 1..21: note = Description of Artificial Sequence: Synthetic oligonucleotide
  source 1..21: mol_type = other DNA
gacctccccagcgccaaagcc

SEQ ID NO: 20612 - DNA, 21 bp, synthetic construct
  misc_feature 1..21: note = Description of Artificial Sequence: Synthetic oligonucleotide
  source 1..21: mol_type = other DNA
gcgacttcggagactaagggt

SEQ ID NO: 20613 - DNA, 21 bp, synthetic construct
  misc_feature 1..21: note = Description of Artificial Sequence: Synthetic oligonucleotide
  source 1..21: mol_type = other DNA
agtcggactactgctcctgct

SEQ ID NO: 20614 - DNA, 21 bp, synthetic construct
  misc_feature 1..21: note = Description of Artificial Sequence: Synthetic oligonucleotide
  source 1..21: mol_type = other DNA
agtatggggacgcctccttct

SEQ ID NO: 20615 - DNA, 21 bp, synthetic construct
  misc_feature 1..21: note = Description of Artificial Sequence: Synthetic oligonucleotide
  source 1..21: mol_type = other DNA
ctcggccccagccaaaacaac

SEQ ID NO: 20616 - DNA, 21 bp, synthetic construct
  misc_feature 1..21: note = Description of Artificial Sequence: Synthetic oligonucleotide
  source 1..21: mol_type = other DNA
aacaccgccatgaaaggcgcc

SEQ ID NO: 20617 - DNA, 21 bp, synthetic construct
  misc_feature 1..21: note = Description of Artificial Sequence: Synthetic oligonucleotide
  source 1..21: mol_type = other DNA
actcatggtaaggggtcggag

SEQ ID NO: 20618 - DNA, 21 bp, synthetic construct
  misc_feature 1..21: note = Description of Artificial Sequence: Synthetic oligonucleotide
  source 1..21: mol_type = other DNA
acttctgatccgaggggtgtg

SEQ ID NO: 20619 - DNA, 21 bp, synthetic construct
  misc_feature 1..21: note = Description of Artificial Sequence: Synthetic oligonucleotide
  source 1..21: mol_type = other DNA
agaaccagcaccgaaaaaaac

SEQ ID NO: 20620 - DNA, 21 bp, synthetic construct
  misc_feature 1..21: note = Description of Artificial Sequence: Synthetic oligonucleotide
  source 1..21: mol_type = other DNA
agcgtcatccaaggcggcagc

SEQ ID NO: 20621 - DNA, 21 bp, synthetic construct
  misc_feature 1..21: note = Description of Artificial Sequence: Synthetic oligonucleotide
  source 1..21: mol_type = other DNA
caggggcagacgactaaggct

SEQ ID NO: 20622 - DNA, 21 bp, synthetic construct
  misc_feature 1..21: note = Description of Artificial Sequence: Synthetic oligonucleotide
  source 1..21: mol_type = other DNA
gaaaaagaaaacagccaaaga

SEQ ID NO: 20623 - DNA, 21 bp, synthetic construct
  misc_feature 1..21: note = Description of Artificial Sequence: Synthetic oligonucleotide
  source 1..21: mol_type = other DNA
gccgacagcggccacaacacc

SEQ ID NO: 20624 - DNA, 21 bp, synthetic construct
  misc_feature 1..21: note = Description of Artificial Sequence: Synthetic oligonucleotide
  source 1..21: mol_type = other DNA
gggactattggggagaagttg

SEQ ID NO: 20625 - DNA, 21 bp, synthetic construct
  misc_feature 1..21: note = Description of Artificial Sequence: Synthetic oligonucleotide
  source 1..21: mol_type = other DNA
gtgccttctgctaagacggcg

SEQ ID NO: 20626 - DNA, 21 bp, synthetic construct
  misc_feature 1..21: note = Description of Artificial Sequence: Synthetic oligonucleotide
  source 1..21: mol_type = other DNA
ggcaccgtccccaccaacagc

SEQ ID NO: 20627 - DNA, 21 bp, synthetic construct
  misc_feature 1..21: note = Description of Artificial Sequence: Synthetic oligonucleotide
  source 1..21: mol_type = other DNA
accgccaacgccacccccgtc

SEQ ID NO: 20628 - DNA, 21 bp, synthetic construct
  misc_feature 1..21: note = Description of Artificial Sequence: Synthetic oligonucleotide
  source 1..21: mol_type = other DNA
accaccagcagagacgccagc

SEQ ID NO: 20629 - DNA, 21 bp, synthetic construct
  misc_feature 1..21: note = Description of Artificial Sequence: Synthetic oligonucleotide
  source 1..21: mol_type = other DNA
gacggcgtcgaaagcaacaga

SEQ ID NO: 20630 - DNA, 21 bp, synthetic construct
  misc_feature 1..21: note = Description of Artificial Sequence: Synthetic oligonucleotide
  source 1..21: mol_type = other DNA
accgccggcaaaagcaccgac

SEQ ID NO: 20631 - DNA, 21 bp, synthetic construct
  misc_feature 1..21: note = Description of Artificial Sequence: Synthetic oligonucleotide
  source 1..21: mol_type = other DNA
acgggggttggtaatgctgcc

SEQ ID NO: 20632 - DNA, 21 bp, synthetic construct
  misc_feature 1..21: note = Description of Artificial Sequence: Synthetic oligonucleotide
  source 1..21: mol_type = other DNA
gaccccggcaaaatggcctgc

SEQ ID NO: 20633 - DNA, 21 bp, synthetic construct
  misc_feature 1..21: note = Description of Artificial Sequence: Synthetic oligonucleotide
  source 1..21: mol_type = other DNA
gaggggagtgattcgcgttct

SEQ ID NO: 20634 - DNA, 21 bp, synthetic construct
  misc_feature 1..21: note = Description of Artificial Sequence: Synthetic oligonucleotide
  source 1..21: mol_type = other DNA
gccgccaacagccccagaagc

SEQ ID NO: 20635 - DNA, 21 bp, synthetic construct
  misc_feature 1..21: note = Description of Artificial Sequence: Synthetic oligonucleotide
  source 1..21: mol_type = other DNA
ggcaccagcgccaacatcaaa

SEQ ID NO: 20636 - DNA, 21 bp, synthetic construct
  misc_feature 1..21: note = Description of Artificial Sequence: Synthetic oligonucleotide
  source 1..21: mol_type = other DNA
aacagcagcagcaacaccaaa

SEQ ID NO: 20637 - DNA, 21 bp, synthetic construct
  misc_feature 1..21: note = Description of Artificial Sequence: Synthetic oligonucleotide
  source 1..21: mol_type = other DNA
ggtatgagtgatacggtgaag

SEQ ID NO: 20638 - DNA, 21 bp, synthetic construct
  misc_feature 1..21: note = Description of Artificial Sequence: Synthetic oligonucleotide
  source 1..21: mol_type = other DNA
tctgtgacttctaagaatgtt

SEQ ID NO: 20639 - DNA, 21 bp, synthetic construct
  misc_feature 1..21: note = Description of Artificial Sequence: Synthetic oligonucleotide
  source 1..21: mol_type = other DNA
ggcggcaacaacgccaaaaac

SEQ ID NO: 20640 - DNA, 21 bp, synthetic construct
  misc_feature 1..21: note = Description of Artificial Sequence: Synthetic oligonucleotide
  source 1..21: mol_type = other DNA
gacctcgacaaacccagcacc

SEQ ID NO: 20641 - DNA, 21 bp, synthetic construct
  misc_feature 1..21: note = Description of Artificial Sequence: Synthetic oligonucleotide
  source 1..21: mol_type = other DNA
ggcggcaccgaacacagagcc

SEQ ID NO: 20642 - DNA, 21 bp, synthetic construct
  misc_feature 1..21: note = Description of Artificial Sequence: Synthetic oligonucleotide
  source 1..21: mol_type = other DNA
gacagcagcagcagccacaac

SEQ ID NO: 20643 - DNA, 21 bp, synthetic construct
  misc_feature 1..21: note = Description of Artificial Sequence: Synthetic oligonucleotide
  source 1..21: mol_type = other DNA
agccacggcgaaaaccccaga

SEQ ID NO: 20644 - DNA, 21 bp, synthetic construct
  misc_feature 1..21: note = Description of Artificial Sequence: Synthetic oligonucleotide
  source 1..21: mol_type = other DNA
agcggcgacatcaccaaaagc

SEQ ID NO: 20645 - DNA, 21 bp, synthetic construct
  misc_feature 1..21: note = Description of Artificial Sequence: Synthetic oligonucleotide
  source 1..21: mol_type = other DNA
cggaatgatggttctactggg

SEQ ID NO: 20646 - DNA, 21 bp, synthetic construct
  misc_feature 1..21: note = Description of Artificial Sequence: Synthetic oligonucleotide
  source 1..21: mol_type = other DNA
ggcagccacagcgccagcaac

SEQ ID NO: 20647 - DNA, 21 bp, synthetic construct
  misc_feature 1..21: note = Description of Artificial Sequence: Synthetic oligonucleotide
  source 1..21: mol_type = other DNA
tcttcgaatactaagggtctt

SEQ ID NO: 20648 - DNA, 21 bp, synthetic construct
  misc_feature 1..21: note = Description of Artificial Sequence: Synthetic oligonucleotide
  source 1..21: mol_type = other DNA
aacaccagcaccagcctcaac

SEQ ID NO: 20649 - DNA, 21 bp, synthetic construct
  misc_feature 1..21: note = Description of Artificial Sequence: Synthetic oligonucleotide
  source 1..21: mol_type = other DNA
gtgcgtaatgagaagtcgagt

SEQ ID NO: 20650 - DNA, 21 bp, synthetic construct
  misc_feature 1..21: note = Description of Artificial Sequence: Synthetic oligonucleotide
  source 1..21: mol_type = other DNA
accaaacacggccaacccgtc

SEQ ID NO: 20651 - DNA, 21 bp, synthetic construct
  misc_feature 1..21: note = Description of Artificial Sequence: Synthetic oligonucleotide
  source 1..21: mol_type = other DNA
ggcagcagcgaccacgccaga

SEQ ID NO: 20652 - DNA, 21 bp, synthetic construct
  misc_feature 1..21: note = Description of Artificial Sequence: Synthetic oligonucleotide
  source 1..21: mol_type = other DNA
ggcggcagcgacagcagaaaa

SEQ ID NO: 20653 - DNA, 21 bp, synthetic construct
  misc_feature 1..21: note = Description of Artificial Sequence: Synthetic oligonucleotide
  source 1..21: mol_type = other DNA
aatagggcgggtgctgggact

SEQ ID NO: 20654 - DNA, 21 bp, synthetic construct
  misc_feature 1..21: note = Description of Artificial Sequence: Synthetic oligonucleotide
  source 1..21: mol_type = other DNA
cgtcagaattcgaatgctggg

SEQ ID NO: 20655 - DNA, 21 bp, synthetic construct
  misc_feature 1..21: note = Description of Artificial Sequence: Synthetic oligonucleotide
  source 1..21: mol_type = other DNA
ctgggtgctcaggtgaataag

SEQ ID NO: 20656 - DNA, 21 bp, synthetic construct
  misc_feature 1..21: note = Description of Artificial Sequence: Synthetic oligonucleotide
  source 1..21: mol_type = other DNA
gccaccgtcaaacccgaagtc

SEQ ID NO: 20657 - DNA, 21 bp, synthetic construct
  misc_feature 1..21: note = Description of Artificial Sequence: Synthetic oligonucleotide
  source 1..21: mol_type = other DNA
tcgaagtctcaggtgaatacg

SEQ ID NO: 20658 - DNA, 21 bp, synthetic construct
  misc_feature 1..21: note = Description of Artificial Sequence: Synthetic oligonucleotide
  source 1..21: mol_type = other DNA
accggcaacaaagacaaaccc

SEQ ID NO: 20659 - DNA, 21 bp, synthetic construct
  misc_feature 1..21: note = Description of Artificial Sequence: Synthetic oligonucleotide
  source 1..21: mol_type = other DNA
actagtaagaatgttaatacg

SEQ ID NO: 20660 - DNA, 21 bp, synthetic construct
  misc_feature 1..21: note = Description of Artificial Sequence: Synthetic oligonucleotide
  source 1..21: mol_type = other DNA
agcaccaacggcggccccagc

SEQ ID NO: 20661 - DNA, 21 bp, synthetic construct
  misc_feature 1..21: note = Description of Artificial Sequence: Synthetic oligonucleotide
  source 1..21: mol_type = other DNA
gatgttgggcttggtaataag

SEQ ID NO: 20662 - DNA, 21 bp, synthetic construct
  misc_feature 1..21: note = Description of Artificial Sequence: Synthetic oligonucleotide
  source 1..21: mol_type = other DNA
gcgccgtctaatgctaaggtt

SEQ ID NO: 20663 - DNA, 21 bp, synthetic construct
  misc_feature 1..21: note = Description of Artificial Sequence: Synthetic oligonucleotide
  source 1..21: mol_type = other DNA
atcagcggcaccgtcgccaaa

SEQ ID NO: 20664 - DNA, 21 bp, synthetic construct
  misc_feature 1..21: note = Description of Artificial Sequence: Synthetic oligonucleotide
  source 1..21: mol_type = other DNA
gggggtacggtgtcgcagggt

SEQ ID NO: 20665 - DNA, 21 bp, synthetic construct
  misc_feature 1..21: note = Description of Artificial Sequence: Synthetic oligonucleotide
  source 1..21: mol_type = other DNA
cgtactacgccgtctagtggt

SEQ ID NO: 20666 - DNA, 21 bp, synthetic construct
  misc_feature 1..21: note = Description of Artificial Sequence: Synthetic oligonucleotide
  source 1..21: mol_type = other DNA
tctagtggtgtgggtagtgtg

SEQ ID NO: 20667 - DNA, 21 bp, synthetic construct
  misc_feature 1..21: note = Description of Artificial Sequence: Synthetic oligonucleotide
  source 1..21: mol_type = other DNA
ggtaatcagaagagttcgcag

SEQ ID NO: 20668 - DNA, 21 bp, synthetic construct
  misc_feature 1..21: note = Description of Artificial Sequence: Synthetic oligonucleotide
  source 1..21: mol_type = other DNA
accaaagccagccaaaccgcc

SEQ ID NO: 20669 - DNA, 21 bp, synthetic construct
  misc_feature 1..21: note = Description of Artificial Sequence: Synthetic oligonucleotide
  source 1..21: mol_type = other DNA
aggcagtctactccgtctgtg

SEQ ID NO: 20670 - DNA, 21 bp, synthetic construct
  misc_feature 1..21: note = Description of Artificial Sequence: Synthetic oligonucleotide
  source 1..21: mol_type = other DNA
ctcgccgaaaccaaacccacc

SEQ ID NO: 20671 - DNA, 21 bp, synthetic construct
  misc_feature 1..21: note = Description of Artificial Sequence: Synthetic oligonucleotide
  source 1..21: mol_type = other DNA
gccagcagcggcaccctcgtc

SEQ ID NO: 20672 - DNA, 21 bp, synthetic construct
  misc_feature 1..21: note = Description of Artificial Sequence: Synthetic oligonucleotide
  source 1..21: mol_type = other DNA
gcgggtggttcgggtagtcct

SEQ ID NO: 20673 - DNA, 21 bp, synthetic construct
  misc_feature 1..21: note = Description of Artificial Sequence: Synthetic oligonucleotide
  source 1..21: mol_type = other DNA
gtggattcggggggttcgaag

SEQ ID NO: 20674 - DNA, 21 bp, synthetic construct
  misc_feature 1..21: note = Description of Artificial Sequence: Synthetic oligonucleotide
  source 1..21: mol_type = other DNA
tctcagaatgtttcgtctggg

SEQ ID NO: 20675 - DNA, 21 bp, synthetic construct
  misc_feature 1..21: note = Description of Artificial Sequence: Synthetic oligonucleotide
  source 1..21: mol_type = other DNA
gagtctcagagtgctcgtact

SEQ ID NO: 20676 - DNA, 21 bp, synthetic construct
  misc_feature 1..21: note = Description of Artificial Sequence: Synthetic oligonucleotide
  source 1..21: mol_type = other DNA
agccaagccgacgccaaacaa

SEQ ID NO: 20677 - DNA, 21 bp, synthetic construct
  misc_feature 1..21: note = Description of Artificial Sequence: Synthetic oligonucleotide
  source 1..21: mol_type = other DNA
caggatcctgctccgactaag

SEQ ID NO: 20678 - DNA, 21 bp, synthetic construct
  misc_feature 1..21: note = Description of Artificial Sequence: Synthetic oligonucleotide
  source 1..21: mol_type = other DNA
ttgtctggtactagttcgtct

SEQ ID NO: 20679 - DNA, 21 bp, synthetic construct
  misc_feature 1..21: note = Description of Artificial Sequence: Synthetic oligonucleotide
  source 1..21: mol_type = other DNA
gagaattcggatcggcttcgg

SEQ ID NO: 20680 - DNA, 21 bp, synthetic construct
  misc_feature 1..21: note = Description of Artificial Sequence: Synthetic oligonucleotide
  source 1..21: mol_type = other DNA
agccccaaaggccaaggcgac

SEQ ID NO: 20681 - DNA, 21 bp, synthetic construct
  misc_feature 1..21: note = Description of Artificial Sequence: Synthetic oligonucleotide
  source 1..21: mol_type = other DNA
cttggtaatggtcagggtaat

SEQ ID NO: 20682 - DNA, 21 bp, synthetic construct
  misc_feature 1..21: note = Description of Artificial Sequence: Synthetic oligonucleotide
  source 1..21: mol_type = other DNA
gttggtgctacgactggttct

SEQ ID NO: 20683 - DNA, 21 bp, synthetic construct
  misc_feature 1..21: note = Description of Artificial Sequence: Synthetic oligonucleotide
  source 1..21: mol_type = other DNA
aagctggctcagcagaatgcg

SEQ ID NO: 20684 - DNA, 21 bp, synthetic construct
  misc_feature 1..21: note = Description of Artificial Sequence: Synthetic oligonucleotide
  source 1..21: mol_type = other DNA
agtagtcaggctcagggtcag

SEQ ID NO: 20685 - DNA, 21 bp, synthetic construct
  misc_feature 1..21: note = Description of Artificial Sequence: Synthetic oligonucleotide
  source 1..21: mol_type = other DNA
caccaaaaaggcggcggccaa

SEQ ID NO: 20686 - DNA, 21 bp, synthetic construct
  misc_feature 1..21: note = Description of Artificial Sequence: Synthetic oligonucleotide
  source 1..21: mol_type = other DNA
gagggtaataatcgggcgcat

SEQ ID NO: 20687 - DNA, 21 bp, synthetic construct
  misc_feature 1..21: note = Description of Artificial Sequence: Synthetic oligonucleotide
  source 1..21: mol_type = other DNA
gctacgaatgctaatccgagg

SEQ ID NO: 20688 - DNA, 21 bp, synthetic construct
  misc_feature 1..21: note = Description of Artificial Sequence: Synthetic oligonucleotide
  source 1..21: mol_type = other DNA
tctactagtagtcagagtggt

SEQ ID NO: 20689 - DNA, 21 bp, synthetic construct
  misc_feature 1..21: note = Description of Artificial Sequence: Synthetic oligonucleotide
  source 1..21: mol_type = other DNA
actccttcgaagactgctact

SEQ ID NO: 20690 - DNA, 21 bp, synthetic construct
  misc_feature 1..21: note = Description of Artificial Sequence: Synthetic oligonucleotide
  source 1..21: mol_type = other DNA
caaaccggcaccaccagcgcc

SEQ ID NO: 20691 - DNA, 21 bp, synthetic construct
  misc_feature 1..21: note = Description of Artificial Sequence: Synthetic oligonucleotide
  source 1..21: mol_type = other DNA
caaggcagccacagcgtcatg

SEQ ID NO: 20692 - DNA, 21 bp, synthetic construct
  misc_feature 1..21: note = Description of Artificial Sequence: Synthetic oligonucleotide
  source 1..21: mol_type = other DNA
aaccaagtcagcaccctcggc

SEQ ID NO: 20693 - DNA, 21 bp, synthetic construct
  misc_feature 1..21: note = Description of Artificial Sequence: Synthetic oligonucleotide
  source 1..21: mol_type = other DNA
catgctgggaagggtccgact

SEQ ID NO: 20694 - DNA, 21 bp, synthetic construct
  misc_feature 1..21: note = Description of Artificial Sequence: Synthetic oligonucleotide
  source 1..21: mol_type = other DNA
tcgtcgactgggagtacgggt

SEQ ID NO: 20695 - DNA, 21 bp, synthetic construct
  misc_feature 1..21: note = Description of Artificial Sequence: Synthetic oligonucleotide
  source 1..21: mol_type = other DNA
ggcagaaccgacagcgccacc

SEQ ID NO: 20696 - DNA, 21 bp, synthetic construct
  misc_feature 1..21: note = Description of Artificial Sequence: Synthetic oligonucleotide
  source 1..21: mol_type = other DNA
agcaccagcggcagcagccac

SEQ ID NO: 20697 - DNA, 21 bp, synthetic construct
  misc_feature 1..21: note = Description of Artificial Sequence: Synthetic oligonucleotide
  source 1..21: mol_type = other DNA
agccaagtcggcaccaacacc

SEQ ID NO: 20698 - DNA, 21 bp, synthetic construct
  misc_feature 1..21: note = Description of Artificial Sequence: Synthetic oligonucleotide
  source 1..21: mol_type = other DNA
agccacaacagcaaagccagc

SEQ ID NO: 20699 - DNA, 21 bp, synthetic construct
  misc_feature 1..21: note = Description of Artificial Sequence: Synthetic oligonucleotide
  source 1..21: mol_type = other DNA
ctcaccagagaaagaaacgaa

SEQ ID NO: 20700 - DNA, 21 bp, synthetic construct
  misc_feature 1..21: note = Description of Artificial Sequence: Synthetic oligonucleotide
  source 1..21: mol_type = other DNA
agaaacgacggccccagcaaa

SEQ ID NO: 20701 - DNA, 21 bp, synthetic construct
  misc_feature 1..21: note = Description of Artificial Sequence: Synthetic oligonucleotide
  source 1..21: mol_type = other DNA
agaatggacggcaaaaacgcc

SEQ ID NO: 20702 - DNA, 21 bp, synthetic construct
  misc_feature 1..21: note = Description of Artificial Sequence: Synthetic oligonucleotide
  source 1..21: mol_type = other DNA
agcgccaccagcaccgccgcc

SEQ ID NO: 20703 - DNA, 21 bp, synthetic construct
  misc_feature 1..21: note = Description of Artificial Sequence: Synthetic oligonucleotide
  source 1..21: mol_type = other DNA
cagctggataagcataatgtg

SEQ ID NO: 20704 - DNA, 21 bp, synthetic construct
  misc_feature 1..21: note = Description of Artificial Sequence: Synthetic oligonucleotide
  source 1..21: mol_type = other DNA
gctcatagtcagggtaatact

SEQ ID NO: 20705 - DNA, 21 bp, synthetic construct
  misc_feature 1..21: note = Description of Artificial Sequence: Synthetic oligonucleotide
  source 1..21: mol_type = other DNA
agcaccacccccagcggcccc

SEQ ID NO: 20706 - DNA, 21 bp, synthetic construct
  misc_feature 1..21: note = Description of Artificial Sequence: Synthetic oligonucleotide
  source 1..21: mol_type = other DNA
agcgtcgcccccagaagcggc

SEQ ID NO: 20707 - DNA, 21 bp, synthetic construct
  misc_feature 1..21: note = Description of Artificial Sequence: Synthetic oligonucleotide
  source 1..21: mol_type = other DNA
cagggggagcatgcttcgtcg

SEQ ID NO: 20708 - DNA, 21 bp, synthetic construct
  misc_feature 1..21: note = Description of Artificial Sequence: Synthetic oligonucleotide
  source 1..21: mol_type = other DNA
gacaccaacagcggccccaga

SEQ ID NO: 20709 - DNA, 21 bp, synthetic construct
  misc_feature 1..21: note = Description of Artificial Sequence: Synthetic oligonucleotide
  source 1..21: mol_type = other DNA
gataaggcgattcctgggagt

SEQ ID NO: 20710 - DNA, 21 bp, synthetic construct
  misc_feature 1..21: note = Description of Artificial Sequence: Synthetic oligonucleotide
  source 1..21: mol_type = other DNA
gatgcgcctactagtcggagt

SEQ ID NO: 20711 - DNA, 21 bp, synthetic construct
  misc_feature 1..21: note = Description of Artificial Sequence: Synthetic oligonucleotide
  source 1..21: mol_type = other DNA
cagagtactggtattcatggg

SEQ ID NO: 20712 - DNA, 21 bp, synthetic construct
  misc_feature 1..21: note = Description of Artificial Sequence: Synthetic oligonucleotide
  source 1..21: mol_type = other DNA
ggggtgatgccgaaggagaat

SEQ ID NO: 20713 - DNA, 21 bp, synthetic construct
  misc_feature 1..21: note = Description of Artificial Sequence: Synthetic oligonucleotide
  source 1..21: mol_type = other DNA
acccccagcaccgaaaaaggc

SEQ ID NO: 20714 - DNA, 21 bp, synthetic construct
  misc_feature 1..21: note = Description of Artificial Sequence: Synthetic oligonucleotide
  source 1..21: mol_type = other DNA
atggctgatagtaaggctaat

SEQ ID NO: 20715 - DNA, 21 bp, synthetic construct
  misc_feature 1..21: note = Description of Artificial Sequence: Synthetic oligonucleotide
  source 1..21: mol_type = other DNA
ggtcttacgactgggaagctt

SEQ ID NO: 20716 - DNA, 21 bp, synthetic construct
  misc_feature 1..21: note = Description of Artificial Sequence: Synthetic oligonucleotide
  source 1..21: mol_type = other DNA
gtgagtgggccgaatccggct

SEQ ID NO: 20717 - DNA, 21 bp, synthetic construct
  misc_feature 1..21: note = Description of Artificial Sequence: Synthetic oligonucleotide
  source 1..21: mol_type = other DNA
gccctcaccaccaacaaagac

SEQ ID NO: 20718 - DNA, 21 bp, synthetic construct
  misc_feature 1..21: note = Description of Artificial Sequence: Synthetic oligonucleotide
  source 1..21: mol_type = other DNA
gtcagcggccaaagcagcccc

SEQ ID NO: 20719 - DNA, 21 bp, synthetic construct
  misc_feature 1..21: note = Description of Artificial Sequence: Synthetic oligonucleotide
  source 1..21: mol_type = other DNA
tcgtcgtcgccggctaaggtt

SEQ ID NO: 20720 - DNA, 21 bp, synthetic construct
  misc_feature 1..21: note = Description of Artificial Sequence: Synthetic oligonucleotide
  source 1..21: mol_type = other DNA
gattcggcttctaaggcttcg

SEQ ID NO: 20721 - DNA, 21 bp, synthetic construct
  misc_feature 1..21: note = Description of Artificial Sequence: Synthetic oligonucleotide
  source 1..21: mol_type = other DNA
ctcgccaccagcaaaaccacc

SEQ ID NO: 20722 - DNA, 21 bp, synthetic construct
  misc_feature 1..21: note = Description of Artificial Sequence: Synthetic oligonucleotide
  source 1..21: mol_type = other DNA
gcccacagcagcaaacccgcc

SEQ ID NO: 20723 - DNA, 21 bp, synthetic construct
  misc_feature 1..21: note = Description of Artificial Sequence: Synthetic oligonucleotide
  source 1..21: mol_type = other DNA
gggggtgtgccttcgactcat

SEQ ID NO: 20724 - DNA, 21 bp, synthetic construct
  misc_feature 1..21: note = Description of Artificial Sequence: Synthetic oligonucleotide
  source 1..21: mol_type = other DNA
gaaagcggcgaaagaagccac

SEQ ID NO: 20725 - DNA, 21 bp, synthetic construct
  misc_feature 1..21: note = Description of Artificial Sequence: Synthetic oligonucleotide
  source 1..21: mol_type = other DNA
ggtggggagccgaagttggct

SEQ ID NO: 20726 - DNA, 21 bp, synthetic construct
  misc_feature 1..21: note = Description of Artificial Sequence: Synthetic oligonucleotide
  source 1..21: mol_type = other DNA
aacagcggcgacagaggcggc

SEQ ID NO: 20727 - DNA, 21 bp, synthetic construct
  misc_feature 1..21: note = Description of Artificial Sequence: Synthetic oligonucleotide
  source 1..21: mol_type = other DNA
aacggcgtcaaaagcaccagc

SEQ ID NO: 20728 - DNA, 21 bp, synthetic construct
  misc_feature 1..21: note = Description of Artificial Sequence: Synthetic oligonucleotide
  source 1..21: mol_type = other DNA
accggcgccagagaaaccgcc

SEQ ID NO: 20729 - DNA, 21 bp, synthetic construct
  misc_feature 1..21: note = Description of Artificial Sequence: Synthetic oligonucleotide
  source 1..21: mol_type = other DNA
agcaacgccggccaacacagc

SEQ ID NO: 20730 - DNA, 21 bp, synthetic construct
  misc_feature 1..21: note = Description of Artificial Sequence: Synthetic oligonucleotide
  source 1..21: mol_type = other DNA
agcggcggcaccagcctcgtc

SEQ ID NO: 20731 - DNA, 21 bp, synthetic construct
  misc_feature 1..21: note = Description of Artificial Sequence: Synthetic oligonucleotide
  source 1..21: mol_type = other DNA
agttcgggtaatattcattcg

SEQ ID NO: 20732 - DNA, 21 bp, synthetic construct
  misc_feature 1..21: note = Description of Artificial Sequence: Synthetic oligonucleotide
  source 1..21: mol_type = other DNA
caaagcagcagcaaaaccagc

SEQ ID NO: 20733 - DNA, 21 bp, synthetic construct
  misc_feature 1..21: note = Description of Artificial Sequence: Synthetic oligonucleotide
  source 1..21: mol_type = other DNA
catgcgggtgggacggctgct

SEQ ID NO: 20734 - DNA, 21 bp, synthetic construct
  misc_feature 1..21: note = Description of Artificial Sequence: Synthetic oligonucleotide
  source 1..21: mol_type = other DNA
gatccgtcgcggaagaatagt

SEQ ID NO: 20735 - DNA, 21 bp, synthetic construct
  misc_feature 1..21: note = Description of Artificial Sequence: Synthetic oligonucleotide
  source 1..21: mol_type = other DNA
gctatggataagcagaatacg

SEQ ID NO: 20736 - DNA, 21 bp, synthetic construct
  misc_feature 1..21: note = Description of Artificial Sequence: Synthetic oligonucleotide
  source 1..21: mol_type = other DNA
ggccaagaaggcgccggcaga

SEQ ID NO: 20737 - DNA, 21 bp, synthetic construct
  misc_feature 1..21: note = Description of Artificial Sequence: Synthetic oligonucleotide
  source 1..21: mol_type = other DNA
ggtacttcgaatagtagggtt

SEQ ID NO: 20738 - DNA, 21 bp, synthetic construct
  misc_feature 1..21: note = Description of Artificial Sequence: Synthetic oligonucleotide
  source 1..21: mol_type = other DNA
tctacggggcctagttcgctt

SEQ ID NO: 20739 - DNA, 21 bp, synthetic construct
  misc_feature 1..21: note = Description of Artificial Sequence: Synthetic oligonucleotide
  source 1..21: mol_type = other DNA
tctggtacggagattcgtaag

SEQ ID NO: 20740 - DNA, 21 bp, synthetic construct
  misc_feature 1..21: note = Description of Artificial Sequence: Synthetic oligonucleotide
  source 1..21: mol_type = other DNA
agaagagaaaaagccaacgaa

SEQ ID NO: 20741 - DNA, 21 bp, synthetic construct
  misc_feature 1..21: note = Description of Artificial Sequence: Synthetic oligonucleotide
  source 1..21: mol_type = other DNA
cgtgatcttaagcctattgag

SEQ ID NO: 20742 - DNA, 21 bp, synthetic construct
  misc_feature 1..21: note = Description of Artificial Sequence: Synthetic oligonucleotide
  source 1..21: mol_type = other DNA
gagggtaagtcgccgcttact

SEQ ID NO: 20743 - DNA, 21 bp, synthetic construct
  misc_feature 1..21: note = Description of Artificial Sequence: Synthetic oligonucleotide
  source 1..21: mol_type = other DNA
gcggggtctaatgagcatcgt

SEQ ID NO: 20744 - DNA, 21 bp, synthetic construct
  misc_feature 1..21: note = Description of Artificial Sequence: Synthetic oligonucleotide
  source 1..21: mol_type = other DNA
ttggcgtctggtgataagggg

SEQ ID NO: 20745 - DNA, 21 bp, synthetic construct
  misc_feature 1..21: note = Description of Artificial Sequence: Synthetic oligonucleotide
  source 1..21: mol_type = other DNA
gctgagacgactaagtcgttg

SEQ ID NO: 20746 - DNA, 21 bp, synthetic construct
  misc_feature 1..21: note = Description of Artificial Sequence: Synthetic oligonucleotide
  source 1..21: mol_type = other DNA
gggatgcatacgtcggctggt

SEQ ID NO: 20747 - DNA, 21 bp, synthetic construct
  misc_feature 1..21: note = Description of Artificial Sequence: Synthetic oligonucleotide
  source 1..21: mol_type = other DNA
aatgcgattagttcgacgaag

SEQ ID NO: 20748 - DNA, 21 bp, synthetic construct
  misc_feature 1..21: note = Description of Artificial Sequence: Synthetic oligonucleotide
  source 1..21: mol_type = other DNA
acggatggtaatcggggttct

SEQ ID NO: 20749 - DNA, 21 bp, synthetic construct
  misc_feature 1..21: note = Description of Artificial Sequence: Synthetic oligonucleotide
  source 1..21: mol_type = other DNA
actcagaagactgtgacgggt

SEQ ID NO: 20750 - DNA, 21 bp, synthetic construct
  misc_feature 1..21: note = Description of Artificial Sequence: Synthetic oligonucleotide
  source 1..21: mol_type = other DNA
agagacaccaaagaaagcggc

SEQ ID NO: 20751 - DNA, 21 bp, synthetic construct
  misc_feature 1..21: note = Description of Artificial Sequence: Synthetic oligonucleotide
  source 1..21: mol_type = other DNA
gccacccaaagcagcaacaaa

SEQ ID NO: 20752 - DNA, 21 bp, synthetic construct
  misc_feature 1..21: note = Description of Artificial Sequence: Synthetic oligonucleotide
  source 1..21: mol_type = other DNA
gggatttctaaggcgacgtcg

SEQ ID NO: 20753 - DNA, 21 bp, synthetic construct
  misc_feature 1..21: note = Description of Artificial Sequence: Synthetic oligonucleotide
  source 1..21: mol_type = other DNA
actcaggagtcgtctagtcgt

SEQ ID NO: 20754 - DNA, 21 bp, synthetic construct
  misc_feature 1..21: note = Description of Artificial Sequence: Synthetic oligonucleotide
  source 1..21: mol_type = other DNA
agcagcggcagcggcgtcccc

SEQ ID NO: 20755 - DNA, 21 bp, synthetic construct
  misc_feature 1..21: note = Description of Artificial Sequence: Synthetic oligonucleotide
  source 1..21: mol_type = other DNA
aatcctacgaataattctagt

SEQ ID NO: 20756 - DNA, 21 bp, synthetic construct
  misc_feature 1..21: note = Description of Artificial Sequence: Synthetic oligonucleotide
  source 1..21: mol_type = other DNA
aatgcggggaaggatcttatt

SEQ ID NO: 20757 - DNA, 21 bp, synthetic construct
  misc_feature 1..21: note = Description of Artificial Sequence: Synthetic oligonucleotide
  source 1..21: mol_type = other DNA
agtgcggcgtctcctggtgct

SEQ ID NO: 20758 - DNA, 21 bp, synthetic construct
  misc_feature 1..21: note = Description of Artificial Sequence: Synthetic oligonucleotide
  source 1..21: mol_type = other DNA
gacaccaaccaccccggcaga

SEQ ID NO: 20759 - DNA, 21 bp, synthetic construct
  misc_feature 1..21: note = Description of Artificial Sequence: Synthetic oligonucleotide
  source 1..21: mol_type = other DNA
ggccaaaaaagccaaggcggc

SEQ ID NO: 20760 - DNA, 21 bp, synthetic construct
  misc_feature 1..21: note = Description of Artificial Sequence: Synthetic oligonucleotide
  source 1..21: mol_type = other DNA
ggtgatggtaaggggtttttg

SEQ ID NO: 20761 - DNA, 21 bp, synthetic construct
  misc_feature 1..21: note = Description of Artificial Sequence: Synthetic oligonucleotide
  source 1..21: mol_type = other DNA
cagtcgaattcgggtagtagg

SEQ ID NO: 20762 - DNA, 21 bp, synthetic construct
  misc_feature 1..21: note = Description of Artificial Sequence: Synthetic oligonucleotide
  source 1..21: mol_type = other DNA
gaaagcggcgccagcaccgcc

SEQ ID NO: 20763 - DNA, 21 bp, synthetic construct
  misc_feature 1..21: note = Description of Artificial Sequence: Synthetic oligonucleotide
  source 1..21: mol_type = other DNA
aacaacaccgaaagcaacaaa

SEQ ID NO: 20764 - DNA, 21 bp, synthetic construct
  misc_feature 1..21: note = Description of Artificial Sequence: Synthetic oligonucleotide
  source 1..21: mol_type = other DNA
accactcatgagcgggggtcg

SEQ ID NO: 20765 - DNA, 21 bp, synthetic construct
  misc_feature 1..21: note = Description of Artificial Sequence: Synthetic oligonucleotide
  source 1..21: mol_type = other DNA
agtgctcggagtcctaatgtg

SEQ ID NO: 20766 - DNA, 21 bp, synthetic construct
  misc_feature 1..21: note = Description of Artificial Sequence: Synthetic oligonucleotide
  source 1..21: mol_type = other DNA
ggcgtcagcaccggcgacaga

SEQ ID NO: 20767 - DNA, 21 bp, synthetic construct
  misc_feature 1..21: note = Description of Artificial Sequence: Synthetic oligonucleotide
  source 1..21: mol_type = other DNA
tatcagagtgcgaatgctcat

SEQ ID NO: 20768 - DNA, 21 bp, synthetic construct
  misc_feature 1..21: note = Description of Artificial Sequence: Synthetic oligonucleotide
  source 1..21: mol_type = other DNA
attagtgggaattctcaggcg

SEQ ID NO: 20769 - DNA, 21 bp, synthetic construct
  misc_feature 1..21: note = Description of Artificial Sequence: Synthetic oligonucleotide
  source 1..21: mol_type = other DNA
agaggcagcgacgccaaaagc

SEQ ID NO: 20770 - DNA, 21 bp, synthetic construct
  misc_feature 1..21: note = Description of Artificial Sequence: Synthetic oligonucleotide
  source 1..21: mol_type = other DNA
agcggcagcagccaaggcaac

SEQ ID NO: 20771 - DNA, 21 bp, synthetic construct
  misc_feature 1..21: note = Description of Artificial Sequence: Synthetic oligonucleotide
  source 1..21: mol_type = other DNA
gatcgtggttctggtacggct

SEQ ID NO: 20772 - DNA, 21 bp, synthetic construct
  misc_feature 1..21: note = Description of Artificial Sequence: Synthetic oligonucleotide
  source 1..21: mol_type = other DNA
ggccacgacagcgcccccgtc

SEQ ID NO: 20773 - DNA, 21 bp, synthetic construct
  misc_feature 1..21: note = Description of Artificial Sequence: Synthetic oligonucleotide
  source 1..21: mol_type = other DNA
ggtagtggtcagacgctgacg

SEQ ID NO: 20774 - DNA, 21 bp, synthetic construct
  misc_feature 1..21: note = Description of Artificial Sequence: Synthetic oligonucleotide
  source 1..21: mol_type = other DNA
gtgactagttcttcggtgagt

SEQ ID NO: 20775 - DNA, 21 bp, synthetic construct
  misc_feature 1..21: note = Description of Artificial Sequence: Synthetic oligonucleotide
  source 1..21: mol_type = other DNA
gaggggaagagttctctgaat

SEQ ID NO: 20776 - DNA, 21 bp, synthetic construct
  misc_feature 1..21: note = Description of Artificial Sequence: Synthetic oligonucleotide
  source 1..21: mol_type = other DNA
gctaagacgaatgagaataag

SEQ ID NO: 20777 - DNA, 21 bp, synthetic construct
  misc_feature 1..21: note = Description of Artificial Sequence: Synthetic oligonucleotide
  source 1..21: mol_type = other DNA
ggtgatcgtaagggtggtcag

SEQ ID NO: 20778 - DNA, 21 bp, synthetic construct
  misc_feature 1..21: note = Description of Artificial Sequence: Synthetic oligonucleotide
  source 1..21: mol_type = other DNA
caggctgggtctgctagtatg

SEQ ID NO: 20779 - DNA, 21 bp, synthetic construct
  misc_feature 1..21: note = Description of Artificial Sequence: Synthetic oligonucleotide
  source 1..21: mol_type = other DNA
gaaagcaccgaccccagaatc

SEQ ID NO: 20780 - DNA, 21 bp, synthetic construct
  misc_feature 1..21: note = Description of Artificial Sequence: Synthetic oligonucleotide
  source 1..21: mol_type = other DNA
ttggagtctaagcatgcgacg

SEQ ID NO: 20781 - DNA, 21 bp, synthetic construct
  misc_feature 1..21: note = Description of Artificial Sequence: Synthetic oligonucleotide
  source 1..21: mol_type = other DNA
ggcaaagcccaaaccaacgtc

SEQ ID NO: 20782 - DNA, 21 bp, synthetic construct
  misc_feature 1..21: note = Description of Artificial Sequence: Synthetic oligonucleotide
  source 1..21: mol_type = other DNA
gaaagagtcagcaccaaccaa

SEQ ID NO: 20783 - DNA, 21 bp, synthetic construct
  misc_feature 1..21: note = Description of Artificial Sequence: Synthetic oligonucleotide
  source 1..21: mol_type = other DNA
agtaatgtcagtggtagtggt

SEQ ID NO: 20784 - DNA, 21 bp, synthetic construct
  misc_feature 1..21: note = Description of Artificial Sequence: Synthetic oligonucleotide
  source 1..21: mol_type = other DNA
accctccaaaaccccaacggc

SEQ ID NO: 20785 - DNA, 21 bp, synthetic construct
  misc_feature 1..21: note = Description of Artificial Sequence: Synthetic oligonucleotide
  source 1..21: mol_type = other DNA
gctccgagtccgggtggttct

SEQ ID NO: 20786 - DNA, 21 bp, synthetic construct
  misc_feature 1..21: note = Description of Artificial Sequence: Synthetic oligonucleotide
  source 1..21: mol_type = other DNA
tcggctcaggcgcctactttg

SEQ ID NO: 20787 - DNA, 21 bp, synthetic construct
  misc_feature 1..21: note = Description of Artificial Sequence: Synthetic oligonucleotide
  source 1..21: mol_type = other DNA
accggcagcgacaaaagcgac

SEQ ID NO: 20788 - DNA, 21 bp, synthetic construct
  misc_feature 1..21: note = Description of Artificial Sequence: Synthetic oligonucleotide
  source 1..21: mol_type = other DNA
accagcaccgcccaaagcacc

SEQ ID NO: 20789 - DNA, 21 bp, synthetic construct
  misc_feature 1..21: note = Description of Artificial Sequence: Synthetic oligonucleotide
  source 1..21: mol_type = other DNA
agcaacggcgccgccagcgtc

SEQ ID NO: 20790 - DNA, 21 bp, synthetic construct
  misc_feature 1..21: note = Description of Artificial Sequence: Synthetic oligonucleotide
  source 1..21: mol_type = other DNA
gaaagcatcaaagccaacagc

SEQ ID NO: 20791 - DNA, 21 bp, synthetic construct
  misc_feature 1..21: note = Description of Artificial Sequence: Synthetic oligonucleotide
  source 1..21: mol_type = other DNA
accggcagcgcccccaccacc

SEQ ID NO: 20792 - DNA, 21 bp, synthetic construct
  misc_feature 1..21: note = Description of Artificial Sequence: Synthetic oligonucleotide
  source 1..21: mol_type = other DNA
cttagggcgcagaagatggag

SEQ ID NO: 20793 - DNA, 21 bp, synthetic construct
  misc_feature 1..21: note = Description of Artificial Sequence: Synthetic oligonucleotide
  source 1..21: mol_type = other DNA
aacaccgccgacagaatgggc

SEQ ID NO: 20794 - DNA, 21 bp, synthetic construct
  misc_feature 1..21: note = Description of Artificial Sequence: Synthetic oligonucleotide
  source 1..21: mol_type = other DNA
gccgacgaaggcagcaaaaaa

SEQ ID NO: 20795 - DNA, 21 bp, synthetic construct
  misc_feature 1..21: note = Description of Artificial Sequence: Synthetic oligonucleotide
  source 1..21: mol_type = other DNA
gtgaaggagtcttctaggggg

SEQ ID NO: 20796 - DNA, 21 bp, synthetic construct
  misc_feature 1..21: note = Description of Artificial Sequence: Synthetic oligonucleotide
  source 1..21: mol_type = other DNA
tcgagtaagcaggttaatggt

SEQ ID NO: 20797 - DNA, 21 bp, synthetic construct
  misc_feature 1..21: note = Description of Artificial Sequence: Synthetic oligonucleotide
  source 1..21: mol_type = other DNA
aacggcagcagcagccccagc

SEQ ID NO: 20798 - DNA, 21 bp, synthetic construct
  misc_feature 1..21: note = Description of Artificial Sequence: Synthetic oligonucleotide
  source 1..21: mol_type = other DNA
gattcgcatggtgctcggact

SEQ ID NO: 20799 - DNA, 21 bp, synthetic construct
  misc_feature 1..21: note = Description of Artificial Sequence: Synthetic oligonucleotide
  source 1..21: mol_type = other DNA
gccaacgccaaacaaggcgcc

SEQ ID NO: 20800 - DNA, 21 bp, synthetic construct
  misc_feature 1..21: note = Description of Artificial Sequence: Synthetic oligonucleotide
  source 1..21: mol_type = other DNA
ggttcttctaatagtcaggct

SEQ ID NO: 20801 - DNA, 21 bp, synthetic construct
  misc_feature 1..21: note = Description of Artificial Sequence: Synthetic oligonucleotide
  source 1..21: mol_type = other DNA
aacagcaccggcagccccatc

SEQ ID NO: 20802 - DNA, 21 bp, synthetic construct
  misc_feature 1..21: note = Description of Artificial Sequence: Synthetic oligonucleotide
  source 1..21: mol_type = other DNA
gggacgactggtactcttacg

SEQ ID NO: 20803 - DNA, 21 bp, synthetic construct
  misc_feature 1..21: note = Description of Artificial Sequence: Synthetic oligonucleotide
  source 1..21: mol_type = other DNA
ggtgttcaggatcctgctcgt

SEQ ID NO: 20804 - DNA, 21 bp, synthetic construct
  misc_feature 1..21: note = Description of Artificial Sequence: Synthetic oligonucleotide
  source 1..21: mol_type = other DNA
gggtcgcagagtgggtcgtct

SEQ ID NO: 20805 - DNA, 21 bp, synthetic construct
  misc_feature 1..21: note = Description of Artificial Sequence: Synthetic oligonucleotide
  source 1..21: mol_type = other DNA
gctacgagttcgagtcagtct

SEQ ID NO: 20806 - DNA, 21 bp, synthetic construct
  misc_feature 1..21: note = Description of Artificial Sequence: Synthetic oligonucleotide
  source 1..21: mol_type = other DNA
aaagaaagcagccccagcctc

SEQ ID NO: 20807 - DNA, 21 bp, synthetic construct
  misc_feature 1..21: note = Description of Artificial Sequence: Synthetic oligonucleotide
  source 1..21: mol_type = other DNA
gccctccccagcaaaaccacc

SEQ ID NO: 20808 - DNA, 21 bp, synthetic construct
  misc_feature 1..21: note = Description of Artificial Sequence: Synthetic oligonucleotide
  source 1..21: mol_type = other DNA
tcggggagtaatactttgtcg

SEQ ID NO: 20809 - DNA, 21 bp, synthetic construct
  misc_feature 1..21: note = Description of Artificial Sequence: Synthetic oligonucleotide
  source 1..21: mol_type = other DNA
agcaaccaaagcagcgtcatc

SEQ ID NO: 20810 - DNA, 21 bp, synthetic construct
  misc_feature 1..21: note = Description of Artificial Sequence: Synthetic oligonucleotide
  source 1..21: mol_type = other DNA
agccccctcaaacaaggcggc

SEQ ID NO: 20811 - DNA, 21 bp, synthetic construct
  misc_feature 1..21: note = Description of Artificial Sequence: Synthetic oligonucleotide
  source 1..21: mol_type = other DNA
agtaattctgggagtcggttg

SEQ ID NO: 20812 - DNA, 21 bp, synthetic construct
  misc_feature 1..21: note = Description of Artificial Sequence: Synthetic oligonucleotide
  source 1..21: mol_type = other DNA
gacgccggcaacggcagccac

SEQ ID NO: 20813 - DNA, 21 bp, synthetic construct
  misc_feature 1..21: note = Description of Artificial Sequence: Synthetic oligonucleotide
  source 1..21: mol_type = other DNA
gggcagaataagccggtgaat

SEQ ID NO: 20814 - DNA, 21 bp, synthetic construct
  misc_feature 1..21: note = Description of Artificial Sequence: Synthetic oligonucleotide
  source 1..21: mol_type = other DNA
gccagcaccaaacccctcctc

SEQ ID NO: 20815 - DNA, 21 bp, synthetic construct
  misc_feature 1..21: note = Description of Artificial Sequence: Synthetic oligonucleotide
  source 1..21: mol_type = other DNA
ggcgaaagacccagccccgcc

SEQ ID NO: 20816 - DNA, 21 bp, synthetic construct
  misc_feature 1..21: note = Description of Artificial Sequence: Synthetic oligonucleotide
  source 1..21: mol_type = other DNA
aatagtcagaatactcatgtc

SEQ ID NO: 20817 - DNA, 21 bp, synthetic construct
  misc_feature 1..21: note = Description of Artificial Sequence: Synthetic oligonucleotide
  source 1..21: mol_type = other DNA
agcagcggccaaagcggcaaa

SEQ ID NO: 20818 - DNA, 21 bp, synthetic construct
  misc_feature 1..21: note = Description of Artificial Sequence: Synthetic oligonucleotide
  source 1..21: mol_type = other DNA
agccccaccaaacccgtcgac

SEQ ID NO: 20819 - DNA, 21 bp, synthetic construct
  misc_feature 1..21: note = Description of Artificial Sequence: Synthetic oligonucleotide
  source 1..21: mol_type = other DNA
gatccgccgagtacttcgaag

SEQ ID NO: 20820 - DNA, 21 bp, synthetic construct
  misc_feature 1..21: note = Description of Artificial Sequence: Synthetic oligonucleotide
  source 1..21: mol_type = other DNA
gtgatttcgcctaagactaat

SEQ ID NO: 20821 - DNA, 21 bp, synthetic construct
  misc_feature 1..21: note = Description of Artificial Sequence: Synthetic oligonucleotide
  source 1..21: mol_type = other DNA
aatgtgtcggggcatccgaat

SEQ ID NO: 20822 - DNA, 21 bp, synthetic construct
  misc_feature 1..21: note = Description of Artificial Sequence: Synthetic oligonucleotide
  source 1..21: mol_type = other DNA
agcagcggcagcggccccatg

SEQ ID NO: 20823 - DNA, 21 bp, synthetic construct
  misc_feature 1..21: note = Description of Artificial Sequence: Synthetic oligonucleotide
  source 1..21: mol_type = other DNA
gaagccaccagcagcaccaac

SEQ ID NO: 20824 - DNA, 21 bp, synthetic construct
  misc_feature 1..21: note = Description of Artificial Sequence: Synthetic oligonucleotide
  source 1..21: mol_type = other DNA
ggccaaacccaaggcagaccc

SEQ ID NO: 20825 - DNA, 21 bp, synthetic construct
  misc_feature 1..21: note = Description of Artificial Sequence: Synthetic oligonucleotide
  source 1..21: mol_type = other DNA
ctcagcagcagccccatcaaa

SEQ ID NO: 20826 - DNA, 21 bp, synthetic construct
  misc_feature 1..21: note = Description of Artificial Sequence: Synthetic oligonucleotide
  source 1..21: mol_type = other DNA
agcaccaacagcaaactcatg

SEQ ID NO: 20827 - DNA, 21 bp, synthetic construct
  misc_feature 1..21: note = Description of Artificial Sequence: Synthetic oligonucleotide
  source 1..21: mol_type = other DNA
gaaaccgccagcaaagtccaa

SEQ ID NO: 20828 - DNA, 21 bp, synthetic construct
  misc_feature 1..21: note = Description of Artificial Sequence: Synthetic oligonucleotide
  source 1..21: mol_type = other DNA
gtgatgagtaaggctggtagt

SEQ ID NO: 20829 - DNA, 21 bp, synthetic construct
  misc_feature 1..21: note = Description of Artificial Sequence: Synthetic oligonucleotide
  source 1..21: mol_type = other DNA
tctggggggtctagtggtctt

SEQ ID NO: 20830 - DNA, 21 bp, synthetic construct
  misc_feature 1..21: note = Description of Artificial Sequence: Synthetic oligonucleotide
  source 1..21: mol_type = other DNA
gccaacagcggcagcaacctc

SEQ ID NO: 20831 - DNA, 21 bp, synthetic construct
  misc_feature 1..21: note = Description of Artificial Sequence: Synthetic oligonucleotide
  source 1..21: mol_type = other DNA
agcaccagacccagcagcgcc

SEQ ID NO: 20832 - DNA, 21 bp, synthetic construct
  misc_feature 1..21: note = Description of Artificial Sequence: Synthetic oligonucleotide
  source 1..21: mol_type = other DNA
gcgcaggagcagtcgggtaag

SEQ ID NO: 20833 - DNA, 21 bp, synthetic construct
  misc_feature 1..21: note = Description of Artificial Sequence: Synthetic oligonucleotide
  source 1..21: mol_type = other DNA
gttgctaattcgcacaataag

SEQ ID NO: 20834 - DNA, 21 bp, synthetic construct
  misc_feature 1..21: note = Description of Artificial Sequence: Synthetic oligonucleotide
  source 1..21: mol_type = other DNA
gcgacgatgaatgcgtctaag

SEQ ID NO: 20835 - DNA, 21 bp, synthetic construct
  misc_feature 1..21: note = Description of Artificial Sequence: Synthetic oligonucleotide
  source 1..21: mol_type = other DNA
aatcctgttaagtctactggt

SEQ ID NO: 20836 - DNA, 21 bp, synthetic construct
  misc_feature 1..21: note = Description of Artificial Sequence: Synthetic oligonucleotide
  source 1..21: mol_type = other DNA
aacgccaacaacagcgccagc

SEQ ID NO: 20837 - DNA, 21 bp, synthetic construct
  misc_feature 1..21: note = Description of Artificial Sequence: Synthetic oligonucleotide
  source 1..21: mol_type = other DNA
agcaacgccaccgccaccatg

SEQ ID NO: 20838 - DNA, 21 bp, synthetic construct
  misc_feature 1..21: note = Description of Artificial Sequence: Synthetic oligonucleotide
  source 1..21: mol_type = other DNA
gacagacaacccaccaacacc

SEQ ID NO: 20839 - DNA, 21 bp, synthetic construct
  misc_feature 1..21: note = Description of Artificial Sequence: Synthetic oligonucleotide
  source 1..21: mol_type = other DNA
ggcagcgaaaccaccgtcaga

SEQ ID NO: 20840 - DNA, 21 bp, synthetic construct
  misc_feature 1..21: note = Description of Artificial Sequence: Synthetic oligonucleotide
  source 1..21: mol_type = other DNA
caaagcgccagcgccaacagc

SEQ ID NO: 20841 - DNA, 21 bp, synthetic construct
  misc_feature 1..21: note = Description of Artificial Sequence: Synthetic oligonucleotide
  source 1..21: mol_type = other DNA
agcggcaccccccaaagaggc

SEQ ID NO: 20842 - DNA, 21 bp, synthetic construct
  misc_feature 1..21: note = Description of Artificial Sequence: Synthetic oligonucleotide
  source 1..21: mol_type = other DNA
caaagccacaaagaaaccacc

SEQ ID NO: 20843 - DNA, 21 bp, synthetic construct
  misc_feature 1..21: note = Description of Artificial Sequence: Synthetic oligonucleotide
  source 1..21: mol_type = other DNA
accgaaagcaacggccacagc

SEQ ID NO: 20844 - DNA, 21 bp, synthetic construct
  misc_feature 1..21: note = Description of Artificial Sequence: Synthetic oligonucleotide
  source 1..21: mol_type = other DNA
acgaagaatactggtaatctt

SEQ ID NO: 20845 - DNA, 21 bp, synthetic construct
  misc_feature 1..21: note = Description of Artificial Sequence: Synthetic oligonucleotide
  source 1..21: mol_type = other DNA
agcagcaacgaccaaagaaaa

SEQ ID NO: 20846 - DNA, 21 bp, synthetic construct
  misc_feature 1..21: note = Description of Artificial Sequence: Synthetic oligonucleotide
  source 1..21: mol_type = other DNA
cgtaatggggggtcttcgctt

SEQ ID NO: 20847 - DNA, 21 bp, synthetic construct
  misc_feature 1..21: note = Description of Artificial Sequence: Synthetic oligonucleotide
  source 1..21: mol_type = other DNA
gaaggcagagccagcagcggc

SEQ ID NO: 20848 - DNA, 21 bp, synthetic construct
  misc_feature 1..21: note = Description of Artificial Sequence: Synthetic oligonucleotide
  source 1..21: mol_type = other DNA
gacgaaacccaaagcagaaaa

SEQ ID NO: 20849 - DNA, 21 bp, synthetic construct
  misc_feature 1..21: note = Description of Artificial Sequence: Synthetic oligonucleotide
  source 1..21: mol_type = other DNA
gagacgcatactgctaagtct

SEQ ID NO: 20850 - DNA, 21 bp, synthetic construct
  misc_feature 1..21: note = Description of Artificial Sequence: Synthetic oligonucleotide
  source 1..21: mol_type = other DNA
gccagcaccagcaacgccggc

SEQ ID NO: 20851 - DNA, 21 bp, synthetic construct
  misc_feature 1..21: note = Description of Artificial Sequence: Synthetic oligonucleotide
  source 1..21: mol_type = other DNA
gccagcagcaacaaagaaggc

SEQ ID NO: 20852 - DNA, 21 bp, synthetic construct
  misc_feature 1..21: note = Description of Artificial Sequence: Synthetic oligonucleotide
  source 1..21: mol_type = other DNA
gcgggtgcgaatactagtaat

SEQ ID NO: 20853 - DNA, 21 bp, synthetic construct
  misc_feature 1..21: note = Description of Artificial Sequence: Synthetic oligonucleotide
  source 1..21: mol_type = other DNA
ggcaaagaaaccagcctcgtc

SEQ ID NO: 20854 - DNA, 21 bp, synthetic construct
  misc_feature 1..21: note = Description of Artificial Sequence: Synthetic oligonucleotide
  source 1..21: mol_type = other DNA
ggtggtgtgagtactaatggg

SEQ ID NO: 20855 - DNA, 21 bp, synthetic construct
  misc_feature 1..21: note = Description of Artificial Sequence: Synthetic oligonucleotide
  source 1..21: mol_type = other DNA
gtcgccaacagcaacgccaaa

SEQ ID NO: 20856 - DNA, 21 bp, synthetic construct
  misc_feature 1..21: note = Description of Artificial Sequence: Synthetic oligonucleotide
  source 1..21: mol_type = other DNA
gttaatacgaagagtcctacg

SEQ ID NO: 20857 - DNA, 21 bp, synthetic construct
  misc_feature 1..21: note = Description of Artificial Sequence: Synthetic oligonucleotide
  source 1..21: mol_type = other DNA
actactagtaaggcgtcgaat

SEQ ID NO: 20858 - DNA, 21 bp, synthetic construct
  misc_feature 1..21: note = Description of Artificial Sequence: Synthetic oligonucleotide
  source 1..21: mol_type = other DNA
caactcgccgaacacggcaaa

SEQ ID NO: 20859 - DNA, 21 bp, synthetic construct
  misc_feature 1..21: note = Description of Artificial Sequence: Synthetic oligonucleotide
  source 1..21: mol_type = other DNA
ggggcgaatgcgactgatcgt

SEQ ID NO: 20860 - DNA, 21 bp, synthetic construct
  misc_feature 1..21: note = Description of Artificial Sequence: Synthetic oligonucleotide
  source 1..21: mol_type = other DNA
actgctgatacgccgaagcag

SEQ ID NO: 20861 - DNA, 21 bp, synthetic construct
  misc_feature 1..21: note = Description of Artificial Sequence: Synthetic oligonucleotide
  source 1..21: mol_type = other DNA
accaacaccaccagcaccacc

SEQ ID NO: 20862 - DNA, 21 bp, synthetic construct
  misc_feature 1..21: note = Description of Artificial Sequence: Synthetic oligonucleotide
  source 1..21: mol_type = other DNA
gacaccggcagaagcagcccc

SEQ ID NO: 20863 - DNA, 21 bp, synthetic construct
  misc_feature 1..21: note = Description of Artificial Sequence: Synthetic oligonucleotide
  source 1..21: mol_type = other DNA
ggcaccgtccccaccagccaa

SEQ ID NO: 20864 - DNA, 21 bp, synthetic construct
  misc_feature 1..21: note = Description of Artificial Sequence: Synthetic oligonucleotide
  source 1..21: mol_type = other DNA
ggcggcacccaagacctcaga

SEQ ID NO: 20865 - DNA, 21 bp, synthetic construct
  misc_feature 1..21: note = Description of Artificial Sequence: Synthetic oligonucleotide
  source 1..21: mol_type = other DNA
ggtcatgataaggctctggcg

SEQ ID NO: 20866 - DNA, 21 bp, synthetic construct
  misc_feature 1..21: note = Description of Artificial Sequence: Synthetic oligonucleotide
  source 1..21: mol_type = other DNA
ttgcctactacgggttcgggt

SEQ ID NO: 20867 - DNA, 21 bp, synthetic construct
  misc_feature 1..21: note = Description of Artificial Sequence: Synthetic oligonucleotide
  source 1..21: mol_type = other DNA
caggggacgtcttcggtggtt

SEQ ID NO: 20868 - DNA, 21 bp, synthetic construct
  misc_feature 1..21: note = Description of Artificial Sequence: Synthetic oligonucleotide
  source 1..21: mol_type = other DNA
caaggcaacggcggccccagc

SEQ ID NO: 20869 - DNA, 21 bp, synthetic construct
  misc_feature 1..21: note = Description of Artificial Sequence: Synthetic oligonucleotide
  source 1..21: mol_type = other DNA
agacccaccgacaaaagcacc

SEQ ID NO: 20870 - DNA, 21 bp, synthetic construct
  misc_feature 1..21: note = Description of Artificial Sequence: Synthetic oligonucleotide
  source 1..21: mol_type = other DNA
agcatcgccacccccagcaaa

SEQ ID NO: 20871 - DNA, 21 bp, synthetic construct
  misc_feature 1..21: note = Description of Artificial Sequence: Synthetic oligonucleotide
  source 1..21: mol_type = other DNA
agacaagacaaactcggcagc

SEQ ID NO: 20872 - DNA, 21 bp, synthetic construct
  misc_feature 1..21: note = Description of Artificial Sequence: Synthetic oligonucleotide
  source 1..21: mol_type = other DNA
agtacgaagcagagttcgggt

SEQ ID NO: 20873 - DNA, 21 bp, synthetic construct
  misc_feature 1..21: note = Description of Artificial Sequence: Synthetic oligonucleotide
  source 1..21: mol_type = other DNA
atggctgataaggctgcggtt

SEQ ID NO: 20874 - DNA, 21 bp, synthetic construct
  misc_feature 1..21: note = Description of Artificial Sequence: Synthetic oligonucleotide
  source 1..21: mol_type = other DNA
gtcggcagcgacgccgtcaga

SEQ ID NO: 20875 - DNA, 21 bp, synthetic construct
  misc_feature 1..21: note = Description of Artificial Sequence: Synthetic oligonucleotide
  source 1..21: mol_type = other DNA
aacgtcaacagcaaagacaaa

SEQ ID NO: 20876 - DNA, 21 bp, synthetic construct
  misc_feature 1..21: note = Description of Artificial Sequence: Synthetic oligonucleotide
  source 1..21: mol_type = other DNA
aatctgtcgacgggtggtggt

SEQ ID NO: 20877 - DNA, 21 bp, synthetic construct
  misc_feature 1..21: note = Description of Artificial Sequence: Synthetic oligonucleotide
  source 1..21: mol_type = other DNA
ggcagaaacgtccccagcagc

SEQ ID NO: 20878 - DNA, 21 bp, synthetic construct
  misc_feature 1..21: note = Description of Artificial Sequence: Synthetic oligonucleotide
  source 1..21: mol_type = other DNA
gctaataaggagggtccgcgg

SEQ ID NO: 20879 - DNA, 21 bp, synthetic construct
  misc_feature 1..21: note = Description of Artificial Sequence: Synthetic oligonucleotide
  source 1..21: mol_type = other DNA
aacgccagccaaaccagcacc

SEQ ID NO: 20880 - DNA, 21 bp, synthetic construct
  misc_feature 1..21: note = Description of Artificial Sequence: Synthetic oligonucleotide
  source 1..21: mol_type = other DNA
cgtaatggggggaattctaat

SEQ ID NO: 20881 - DNA, 21 bp, synthetic construct
  misc_feature 1..21: note = Description of Artificial Sequence: Synthetic oligonucleotide
  source 1..21: mol_type = other DNA
gccagcgccaaaggcagctac

SEQ ID NO: 20882 - DNA, 21 bp, synthetic construct
  misc_feature 1..21: note = Description of Artificial Sequence: Synthetic oligonucleotide
  source 1..21: mol_type = other DNA
ggtgagactaatactaatagg

SEQ ID NO: 20883 - DNA, 21 bp, synthetic construct
  misc_feature 1..21: note = Description of Artificial Sequence: Synthetic oligonucleotide
  source 1..21: mol_type = other DNA
attggtacgcctgctacgtcg

SEQ ID NO: 20884 - DNA, 21 bp, synthetic construct
  misc_feature 1..21: note = Description of Artificial Sequence: Synthetic oligonucleotide
  source 1..21: mol_type = other DNA
gattcgaatgctactagtcgg

SEQ ID NO: 20885 - DNA, 21 bp, synthetic construct
  misc_feature 1..21: note = Description of Artificial Sequence: Synthetic oligonucleotide
  source 1..21: mol_type = other DNA
caaaaagtcaccaaccacgaa

SEQ ID NO: 20886 - DNA, 21 bp, synthetic construct
  misc_feature 1..21: note = Description of Artificial Sequence: Synthetic oligonucleotide
  source 1..21: mol_type = other DNA
gccgacggcagaagcagcacc

SEQ ID NO: 20887 - DNA, 21 bp, synthetic construct
  misc_feature 1..21: note = Description of Artificial Sequence: Synthetic oligonucleotide
  source 1..21: mol_type = other DNA
ggcgccaccggcagcatgaac

SEQ ID NO: 20888 - DNA, 21 bp, synthetic construct
  misc_feature 1..21: note = Description of Artificial Sequence: Synthetic oligonucleotide
  source 1..21: mol_type = other DNA
ggtcttagtcagtcgcctacg

SEQ ID NO: 20889 - DNA, 21 bp, synthetic construct
  misc_feature 1..21: note = Description of Artificial Sequence: Synthetic oligonucleotide
  source 1..21: mol_type = other DNA
actaagtcgaatgagcatgcg

SEQ ID NO: 20890 - DNA, 21 bp, synthetic construct
  misc_feature 1..21: note = Description of Artificial Sequence: Synthetic oligonucleotide
  source 1..21: mol_type = other DNA
agcagcgacaccagaggcctc

SEQ ID NO: 20891 - DNA, 21 bp, synthetic construct
  misc_feature 1..21: note = Description of Artificial Sequence: Synthetic oligonucleotide
  source 1..21: mol_type = other DNA
gtcgccaccaaagccaacacc

SEQ ID NO: 20892 - DNA, 21 bp, synthetic construct
  misc_feature 1..21: note = Description of Artificial Sequence: Synthetic oligonucleotide
  source 1..21: mol_type = other DNA
gacaccggcggcaaaatggtc

SEQ ID NO: 20893 - DNA, 21 bp, synthetic construct
  misc_feature 1..21: note = Description of Artificial Sequence: Synthetic oligonucleotide
  source 1..21: mol_type = other DNA
gctcagcatacgaagtctgct

SEQ ID NO: 20894 - DNA, 21 bp, synthetic construct
  misc_feature 1..21: note = Description of Artificial Sequence: Synthetic oligonucleotide
  source 1..21: mol_type = other DNA
gcgcctggtagtaagcattcg

SEQ ID NO: 20895 - DNA, 21 bp, synthetic construct
  misc_feature 1..21: note = Description of Artificial Sequence: Synthetic oligonucleotide
  source 1..21: mol_type = other DNA
ggcaccagcatcggcgacggc

SEQ ID NO: 20896 - DNA, 21 bp, synthetic construct
  misc_feature 1..21: note = Description of Artificial Sequence: Synthetic oligonucleotide
  source 1..21: mol_type = other DNA
ggcagccaagaccccagaaga

SEQ ID NO: 20897 - DNA, 21 bp, synthetic construct
  misc_feature 1..21: note = Description of Artificial Sequence: Synthetic oligonucleotide
  source 1..21: mol_type = other DNA
ggcctcatgaaagaaagcccc

SEQ ID NO: 20898 - DNA, 21 bp, synthetic construct
  misc_feature 1..21: note = Description of Artificial Sequence: Synthetic oligonucleotide
  source 1..21: mol_type = other DNA
gtcacccacggcaaaagcgaa

SEQ ID NO: 20899 - DNA, 21 bp, synthetic construct
  misc_feature 1..21: note = Description of Artificial Sequence: Synthetic oligonucleotide
  source 1..21: mol_type = other DNA
agcgccgccagcagcaacgcc

SEQ ID NO: 20900 - DNA, 21 bp, synthetic construct
  misc_feature 1..21: note = Description of Artificial Sequence: Synthetic oligonucleotide
  source 1..21: mol_type = other DNA
gctgctggggtttcgtcggtg

SEQ ID NO: 20901 - DNA, 21 bp, synthetic construct
  misc_feature 1..21: note = Description of Artificial Sequence: Synthetic oligonucleotide
  source 1..21: mol_type = other DNA
agccaaaacgaacaaagaagc

SEQ ID NO: 20902 - DNA, 21 bp, synthetic construct
  misc_feature 1..21: note = Description of Artificial Sequence: Synthetic oligonucleotide
  source 1..21: mol_type = other DNA
aacagcaccagccacagcgaa

SEQ ID NO: 20903 - DNA, 21 bp, synthetic construct
  misc_feature 1..21: note = Description of Artificial Sequence: Synthetic oligonucleotide
  source 1..21: mol_type = other DNA
aaccacgaagccggcaaactc

SEQ ID NO: 20904 - DNA, 21 bp, synthetic construct
  misc_feature 1..21: note = Description of Artificial Sequence: Synthetic oligonucleotide
  source 1..21: mol_type = other DNA
aacggcagccccagcgcccaa

SEQ ID NO: 20905 - DNA, 21 bp, synthetic construct
  misc_feature 1..21: note = Description of Artificial Sequence: Synthetic oligonucleotide
  source 1..21: mol_type = other DNA
acgaatacgaagactccttcg

SEQ ID NO: 20906 - DNA, 21 bp, synthetic construct
  misc_feature 1..21: note = Description of Artificial Sequence: Synthetic oligonucleotide
  source 1..21: mol_type = other DNA
gacaaaggccaaaccagcaga

SEQ ID NO: 20907 - DNA, 21 bp, synthetic construct
  misc_feature 1..21: note = Description of Artificial Sequence: Synthetic oligonucleotide
  source 1..21: mol_type = other DNA
agtggtacgtctacgggtcat

SEQ ID NO: 20908 - DNA, 21 bp, synthetic construct
  misc_feature 1..21: note = Description of Artificial Sequence: Synthetic oligonucleotide
  source 1..21: mol_type = other DNA
gtttcgtctaattctgtggct

SEQ ID NO: 20909 - DNA, 21 bp, synthetic construct
  misc_feature 1..21: note = Description of Artificial Sequence: Synthetic oligonucleotide
  source 1..21: mol_type = other DNA
caaagcaacgtccccagcagc

SEQ ID NO: 20910 - DNA, 21 bp, synthetic construct
  misc_feature 1..21: note = Description of Artificial Sequence: Synthetic oligonucleotide
  source 1..21: mol_type = other DNA
gatggtggtactcatcaggct

SEQ ID NO: 20911 - DNA, 21 bp, synthetic construct
  misc_feature 1..21: note = Description of Artificial Sequence: Synthetic oligonucleotide
  source 1..21: mol_type = other DNA
cacgacggcaaacaaagcctc

SEQ ID NO: 20912 - DNA, 21 bp, synthetic construct
  misc_feature 1..21: note = Description of Artificial Sequence: Synthetic oligonucleotide
  source 1..21: mol_type = other DNA
cacaacaccagcagcacccaa

SEQ ID NO: 20913 - DNA, 21 bp, synthetic construct
  misc_feature 1..21: note = Description of Artificial Sequence: Synthetic oligonucleotide
  source 1..21: mol_type = other DNA
tcgccggattctaatattaag

SEQ ID NO: 20914 - DNA, 21 bp, synthetic construct
  misc_feature 1..21: note = Description of Artificial Sequence: Synthetic oligonucleotide
  source 1..21: mol_type = other DNA
atggccagcagcaccaacgtc

SEQ ID NO: 20915 - DNA, 21 bp, synthetic construct
  misc_feature 1..21: note = Description of Artificial Sequence: Synthetic oligonucleotide
  source 1..21: mol_type = other DNA
ggccaaatccccgacgccaaa

SEQ ID NO: 20916 - DNA, 21 bp, synthetic construct
  misc_feature 1..21: note = Description of Artificial Sequence: Synthetic oligonucleotide
  source 1..21: mol_type = other DNA
ggccacagcggcagccccaac

SEQ ID NO: 20917 - DNA, 21 bp, synthetic construct
  misc_feature 1..21: note = Description of Artificial Sequence: Synthetic oligonucleotide
  source 1..21: mol_type = other DNA
gccggcgtcgccaacggcacc

SEQ ID NO: 20918 - DNA, 21 bp, synthetic construct
  misc_feature 1..21: note = Description of Artificial Sequence: Synthetic oligonucleotide
  source 1..21: mol_type = other DNA
agaagcaccagccccagcaac

SEQ ID NO: 20919 - DNA, 21 bp, synthetic construct
  misc_feature 1..21: note = Description of Artificial Sequence: Synthetic oligonucleotide
  source 1..21: mol_type = other DNA
catccgtcgaatacgcagaag

SEQ ID NO: 20920 - DNA, 21 bp, synthetic construct
  misc_feature 1..21: note = Description of Artificial Sequence: Synthetic oligonucleotide
  source 1..21: mol_type = other DNA
accagcggcagcaccctcgcc

SEQ ID NO: 20921 - DNA, 21 bp, synthetic construct
  misc_feature 1..21: note = Description of Artificial Sequence: Synthetic oligonucleotide
  source 1..21: mol_type = other DNA
agttctacttctaagggtgct

SEQ ID NO: 20922 - DNA, 21 bp, synthetic construct
  misc_feature 1..21: note = Description of Artificial Sequence: Synthetic oligonucleotide
  source 1..21: mol_type = other DNA
aacagcaaaaccagcagcggc

SEQ ID NO: 20923 - DNA, 21 bp, synthetic construct
  misc_feature 1..21: note = Description of Artificial Sequence: Synthetic oligonucleotide
  source 1..21: mol_type = other DNA
ggggatatgagtacgaagaat

SEQ ID NO: 20924 - DNA, 21 bp, synthetic construct
  misc_feature 1..21: note = Description of Artificial Sequence: Synthetic oligonucleotide
  source 1..21: mol_type = other DNA
ggggggactaagacggaggtt

SEQ ID NO: 20925 - DNA, 21 bp, synthetic construct
  misc_feature 1..21: note = Description of Artificial Sequence: Synthetic oligonucleotide
  source 1..21: mol_type = other DNA
acgactggtgagaagggtttg

SEQ ID NO: 20926 - DNA, 21 bp, synthetic construct
  misc_feature 1..21: note = Description of Artificial Sequence: Synthetic oligonucleotide
  source 1..21: mol_type = other DNA
gggcttgatacgaagagtgcg

SEQ ID NO: 20927 - DNA, 21 bp, synthetic construct
  misc_feature 1..21: note = Description of Artificial Sequence: Synthetic oligonucleotide
  source 1..21: mol_type = other DNA
tctaatggtgcttcgcctgtt

SEQ ID NO: 20928 - DNA, 21 bp, synthetic construct
  misc_feature 1..21: note = Description of Artificial Sequence: Synthetic oligonucleotide
  source 1..21: mol_type = other DNA
ctccaaaccgccagcagcggc

SEQ ID NO: 20929 - DNA, 21 bp, synthetic construct
  misc_feature 1..21: note = Description of Artificial Sequence: Synthetic oligonucleotide
  source 1..21: mol_type = other DNA
ggtagtgttggtggtgatcgt

SEQ ID NO: 20930 - DNA, 21 bp, synthetic construct
  misc_feature 1..21: note = Description of Artificial Sequence: Synthetic oligonucleotide
  source 1..21: mol_type = other DNA
tctactacgtcgtctaggtct

SEQ ID NO: 20931 - DNA, 21 bp, synthetic construct
  misc_feature 1..21: note = Description of Artificial Sequence: Synthetic oligonucleotide
  source 1..21: mol_type = other DNA
agtgagagtcataagcctgcg

SEQ ID NO: 20932 - DNA, 21 bp, synthetic construct
  misc_feature 1..21: note = Description of Artificial Sequence: Synthetic oligonucleotide
  source 1..21: mol_type = other DNA
aaccccagcagcgccccccaa

SEQ ID NO: 20933 - DNA, 21 bp, synthetic construct
  misc_feature 1..21: note = Description of Artificial Sequence: Synthetic oligonucleotide
  source 1..21: mol_type = other DNA
accagcagcaacaaagaacaa

SEQ ID NO: 20934 - DNA, 21 bp, synthetic construct
  misc_feature 1..21: note = Description of Artificial Sequence: Synthetic oligonucleotide
  source 1..21: mol_type = other DNA
agcggcgtcagcaccagcccc

SEQ ID NO: 20935 - DNA, 21 bp, synthetic construct
  misc_feature 1..21: note = Description of Artificial Sequence: Synthetic oligonucleotide
  source 1..21: mol_type = other DNA
caggagagtcagcagaattcg

SEQ ID NO: 20936 - DNA, 21 bp, synthetic construct
  misc_feature 1..21: note = Description of Artificial Sequence: Synthetic oligonucleotide
  source 1..21: mol_type = other DNA
ctcaacgaaggcaaacccctc

SEQ ID NO: 20937 - DNA, 21 bp, synthetic construct
  misc_feature 1..21: note = Description of Artificial Sequence: Synthetic oligonucleotide
  source 1..21: mol_type = other DNA
gaaaaccccaccaacaccagc

SEQ ID NO: 20938 - DNA, 21 bp, synthetic construct
  misc_feature 1..21: note = Description of Artificial Sequence: Synthetic oligonucleotide
  source 1..21: mol_type = other DNA
gacgccacccaacccagcaaa

SEQ ID NO: 20939 - DNA, 21 bp, synthetic construct
  misc_feature 1..21: note = Description of Artificial Sequence: Synthetic oligonucleotide
  source 1..21: mol_type = other DNA
gcccaagacaaagccagcagc

SEQ ID NO: 20940 - DNA, 21 bp, synthetic construct
  misc_feature 1..21: note = Description of Artificial Sequence: Synthetic oligonucleotide
  source 1..21: mol_type = other DNA
ggcagcaaaaacgccagcacc

SEQ ID NO: 20941 - DNA, 21 bp, synthetic construct
  misc_feature 1..21: note = Description of Artificial Sequence: Synthetic oligonucleotide
  source 1..21: mol_type = other DNA
aacaattctggacagaatcaa

SEQ ID NO: 20942 - DNA, 21 bp, synthetic construct
  misc_feature 1..21: note = Description of Artificial Sequence: Synthetic oligonucleotide
  source 1..21: mol_type = other DNA
gatggtcctgggtcgactaag

SEQ ID NO: 20943 - DNA, 21 bp, synthetic construct
  misc_feature 1..21: note = Description of Artificial Sequence: Synthetic oligonucleotide
  source 1..21: mol_type = other DNA
ctcaacggcagccaaacccac

SEQ ID NO: 20944 - DNA, 21 bp, synthetic construct
  misc_feature 1..21: note = Description of Artificial Sequence: Synthetic oligonucleotide
  source 1..21: mol_type = other DNA
aaggctactgcgcagagtggt

SEQ ID NO: 20945 - DNA, 21 bp, synthetic construct
  misc_feature 1..21: note = Description of Artificial Sequence: Synthetic oligonucleotide
  source 1..21: mol_type = other DNA
accctcagcggcagcgcccac

SEQ ID NO: 20946 - DNA, 21 bp, synthetic construct
  misc_feature 1..21: note = Description of Artificial Sequence: Synthetic oligonucleotide
  source 1..21: mol_type = other DNA
ggcagccccagcaccagcggc

SEQ ID NO: 20947 - DNA, 21 bp, synthetic construct
  misc_feature 1..21: note = Description of Artificial Sequence: Synthetic oligonucleotide
  source 1..21: mol_type = other DNA
ggtttgagtcgtcctaatgag

SEQ ID NO: 20948 - DNA, 21 bp, synthetic construct
  misc_feature 1..21: note = Description of Artificial Sequence: Synthetic oligonucleotide
  source 1..21: mol_type = other DNA
tctcggactgagaatcgtatt

SEQ ID NO: 20949 - DNA, 21 bp, synthetic construct
  misc_feature 1..21: note = Description of Artificial Sequence: Synthetic oligonucleotide
  source 1..21: mol_type = other DNA
gatgataagtctaatcgtgct

SEQ ID NO: 20950 - DNA, 21 bp, synthetic construct
  misc_feature 1..21: note = Description of Artificial Sequence: Synthetic oligonucleotide
  source 1..21: mol_type = other DNA
caaggcaacagcgccgtccaa

SEQ ID NO: 20951 - DNA, 21 bp, synthetic construct
  misc_feature 1..21: note = Description of Artificial Sequence: Synthetic oligonucleotide
  source 1..21: mol_type = other DNA
gccagcaccagccccgccgtc

SEQ ID NO: 20952 - DNA, 21 bp, synthetic construct
  misc_feature 1..21: note = Description of Artificial Sequence: Synthetic oligonucleotide
  source 1..21: mol_type = other DNA
actgggagtactaatactacg

SEQ ID NO: 20953 - DNA, 21 bp, synthetic construct
  misc_feature 1..21: note = Description of Artificial Sequence: Synthetic oligonucleotide
  source 1..21: mol_type = other DNA
gagcgggcggggccttcgcct

SEQ ID NO: 20954 - DNA, 21 bp, synthetic construct
  misc_feature 1..21: note = Description of Artificial Sequence: Synthetic oligonucleotide
  source 1..21: mol_type = other DNA
gtcgaccccagccccgccaga

SEQ ID NO: 20955 - DNA, 21 bp, synthetic construct
  misc_feature 1..21: note = Description of Artificial Sequence: Synthetic oligonucleotide
  source 1..21: mol_type = other DNA
gtggttaattcttctacggct

SEQ ID NO: 20956 - DNA, 21 bp, synthetic construct
  misc_feature 1..21: note = Description of Artificial Sequence: Synthetic oligonucleotide
  source 1..21: mol_type = other DNA
ttgcgtgagccgaaggggacg

SEQ ID NO: 20957 - DNA, 21 bp, synthetic construct
  misc_feature 1..21: note = Description of Artificial Sequence: Synthetic oligonucleotide
  source 1..21: mol_type = other DNA
ctcaacgccagcagcaccacc

SEQ ID NO: 20958 - DNA, 21 bp, synthetic construct
  misc_feature 1..21: note = Description of Artificial Sequence: Synthetic oligonucleotide
  source 1..21: mol_type = other DNA
agcaccatgagcagcagcagc

SEQ ID NO: 20959 - DNA, 21 bp, synthetic construct
  misc_feature 1..21: note = Description of Artificial Sequence: Synthetic oligonucleotide
  source 1..21: mol_type = other DNA
gaaatcaacaaccccaaaatc

SEQ ID NO: 20960 - DNA, 21 bp, synthetic construct
  misc_feature 1..21: note = Description of Artificial Sequence: Synthetic oligonucleotide
  source 1..21: mol_type = other DNA
aaaagcaaccaaaccagccaa

SEQ ID NO: 20961 - DNA, 21 bp, synthetic construct
  misc_feature 1..21: note = Description of Artificial Sequence: Synthetic oligonucleotide
  source 1..21: mol_type = other DNA
ggcagcaccagccaagaaaaa

SEQ ID NO: 20962 - DNA, 21 bp, synthetic construct
  misc_feature 1..21: note = Description of Artificial Sequence: Synthetic oligonucleotide
  source 1..21: mol_type = other DNA
ggtaattctggtgatttgagg

SEQ ID NO: 20963 - DNA, 21 bp, synthetic construct
  misc_feature 1..21: note = Description of Artificial Sequence: Synthetic oligonucleotide
  source 1..21: mol_type = other DNA
tctgggagtaatagtgttagt

SEQ ID NO: 20964 - DNA, 21 bp, synthetic construct
  misc_feature 1..21: note = Description of Artificial Sequence: Synthetic oligonucleotide
  source 1..21: mol_type = other DNA
aaaagcggcagcagcaccaac

SEQ ID NO: 20965 - DNA, 21 bp, synthetic construct
  misc_feature 1..21: note = Description of Artificial Sequence: Synthetic oligonucleotide
  source 1..21: mol_type = other DNA
agccaaggcagcgcccccacc

SEQ ID NO: 20966 - DNA, 21 bp, synthetic construct
  misc_feature 1..21: note = Description of Artificial Sequence: Synthetic oligonucleotide
  source 1..21: mol_type = other DNA
aacagaaccgcccaaagcacc

SEQ ID NO: 20967 - DNA, 21 bp, synthetic construct
  misc_feature 1..21: note = Description of Artificial Sequence: Synthetic oligonucleotide
  source 1..21: mol_type = other DNA
caaggcagcaccaaaaacctc

SEQ ID NO: 20968 - DNA, 21 bp, synthetic construct
  misc_feature 1..21: note = Description of Artificial Sequence: Synthetic oligonucleotide
  source 1..21: mol_type = other DNA
gaaagcaaacaacccagcctc

SEQ ID NO: 20969 - DNA, 21 bp, synthetic construct
  misc_feature 1..21: note = Description of Artificial Sequence: Synthetic oligonucleotide
  source 1..21: mol_type = other DNA
aaccacggccaaaaagacaac

SEQ ID NO: 20970 - DNA, 21 bp, synthetic construct
  misc_feature 1..21: note = Description of Artificial Sequence: Synthetic oligonucleotide
  source 1..21: mol_type = other DNA
aacgccgccacccaaaccaga

SEQ ID NO: 20971 - DNA, 21 bp, synthetic construct
  misc_feature 1..21: note = Description of Artificial Sequence: Synthetic oligonucleotide
  source 1..21: mol_type = other DNA
agacccgtcaacccccccgaa

SEQ ID NO: 20972 - DNA, 21 bp, synthetic construct
  misc_feature 1..21: note = Description of Artificial Sequence: Synthetic oligonucleotide
  source 1..21: mol_type = other DNA
agcggcagcagcagcctcggc

SEQ ID NO: 20973 - DNA, 21 bp, synthetic construct
  misc_feature 1..21: note = Description of Artificial Sequence: Synthetic oligonucleotide
  source 1..21: mol_type = other DNA
caacaaggccacaacagcgcc

SEQ ID NO: 20974 - DNA, 21 bp, synthetic construct
  misc_feature 1..21: note = Description of Artificial Sequence: Synthetic oligonucleotide
  source 1..21: mol_type = other DNA
cggaaggatgtgtctagtact

SEQ ID NO: 20975 - DNA, 21 bp, synthetic construct
  misc_feature 1..21: note = Description of Artificial Sequence: Synthetic oligonucleotide
  source 1..21: mol_type = other DNA
gatggtgtgtcttctaagggg

SEQ ID NO: 20976 - DNA, 21 bp, synthetic construct
  misc_feature 1..21: note = Description of Artificial Sequence: Synthetic oligonucleotide
  source 1..21: mol_type = other DNA
ggcgacagccccagcaaactc

SEQ ID NO: 20977 - DNA, 21 bp, synthetic construct
  misc_feature 1..21: note = Description of Artificial Sequence: Synthetic oligonucleotide
  source 1..21: mol_type = other DNA
tcccaggatactcatcataag

SEQ ID NO: 20978 - DNA, 21 bp, synthetic construct
  misc_feature 1..21: note = Description of Artificial Sequence: Synthetic oligonucleotide
  source 1..21: mol_type = other DNA
tctaatactggtggtgttgct

SEQ ID NO: 20979 - DNA, 21 bp, synthetic construct
  misc_feature 1..21: note = Description of Artificial Sequence: Synthetic oligonucleotide
  source 1..21: mol_type = other DNA
aacggcgccaccagcagaggc

SEQ ID NO: 20980 - DNA, 21 bp, synthetic construct
  misc_feature 1..21: note = Description of Artificial Sequence: Synthetic oligonucleotide
  source 1..21: mol_type = other DNA
catcggggtgagactagtgcg

SEQ ID NO: 20981 - DNA, 21 bp, synthetic construct
  misc_feature 1..21: note = Description of Artificial Sequence: Synthetic oligonucleotide
  source 1..21: mol_type = other DNA
gaaaacagacaaaccatcaaa

SEQ ID NO: 20982 - DNA, 21 bp, synthetic construct
  misc_feature 1..21: note = Description of Artificial Sequence: Synthetic oligonucleotide
  source 1..21: mol_type = other DNA
cacaacgtcgaaaaaaccaaa

SEQ ID NO: 20983 - DNA, 21 bp, synthetic construct
  misc_feature 1..21: note = Description of Artificial Sequence: Synthetic oligonucleotide
  source 1..21: mol_type = other DNA
ctccaaagcaacagcagccaa

SEQ ID NO: 20984 - DNA, 21 bp, synthetic construct
  misc_feature 1..21: note = Description of Artificial Sequence: Synthetic oligonucleotide
  source 1..21: mol_type = other DNA
aatggtaattcttcgacgtcg

SEQ ID NO: 20985 - DNA, 21 bp, synthetic construct
  misc_feature 1..21: note = Description of Artificial Sequence: Synthetic oligonucleotide
  source 1..21: mol_type = other DNA
accgtccaaagcaccagcaga

SEQ ID NO: 20986 - DNA, 21 bp, synthetic construct
  misc_feature 1..21: note = Description of Artificial Sequence: Synthetic oligonucleotide
  source 1..21: mol_type = other DNA
agcaccgacagcacccccaaa

SEQ ID NO: 20987 - DNA, 21 bp, synthetic construct
  misc_feature 1..21: note = Description of Artificial Sequence: Synthetic oligonucleotide
  source 1..21: mol_type = other DNA
accagcaaacccaccaacatg

SEQ ID NO: 20988 - DNA, 21 bp, synthetic construct
  misc_feature 1..21: note = Description of Artificial Sequence: Synthetic oligonucleotide
  source 1..21: mol_type = other DNA
gccaaaagcagcaccaccagc

SEQ ID NO: 20989 - DNA, 21 bp, synthetic construct
  misc_feature 1..21: note = Description of Artificial Sequence: Synthetic oligonucleotide
  source 1..21: mol_type = other DNA
aagactcagggtgttgggaat

SEQ ID NO: 20990 - DNA, 21 bp, synthetic construct
  misc_feature 1..21: note = Description of Artificial Sequence: Synthetic oligonucleotide
  source 1..21: mol_type = other DNA
atgggcaccggcaacaccagc

SEQ ID NO: 20991 - DNA, 21 bp, synthetic construct
  misc_feature 1..21: note = Description of Artificial Sequence: Synthetic oligonucleotide
  source 1..21: mol_type = other DNA
atgggtacggcgaataatcat

SEQ ID NO: 20992 - DNA, 21 bp, synthetic construct
  misc_feature 1..21: note = Description of Artificial Sequence: Synthetic oligonucleotide
  source 1..21: mol_type = other DNA
ggcaccgaaatgcccaaactc

SEQ ID NO: 20993 - DNA, 21 bp, synthetic construct
  misc_feature 1..21: note = Description of Artificial Sequence: Synthetic oligonucleotide
  source 1..21: mol_type = other DNA
gggtctacgtcgaagactcag

SEQ ID NO: 20994 - DNA, 21 bp, synthetic construct
  misc_feature 1..21: note = Description of Artificial Sequence: Synthetic oligonucleotide
  source 1..21: mol_type = other DNA
gtccaaagcaccggcagcggc

SEQ ID NO: 20995 - DNA, 21 bp, synthetic construct
  misc_feature 1..21: note = Description of Artificial Sequence: Synthetic oligonucleotide
  source 1..21: mol_type = other DNA
tcgcagccgggtacgacttcg

SEQ ID NO: 20996 - DNA, 21 bp, synthetic construct
  misc_feature 1..21: note = Description of Artificial Sequence: Synthetic oligonucleotide
  source 1..21: mol_type = other DNA
ggcaccctcacccccgccacc

SEQ ID NO: 20997 - DNA, 21 bp, synthetic construct
  misc_feature 1..21: note = Description of Artificial Sequence: Synthetic oligonucleotide
  source 1..21: mol_type = other DNA
agccccgccgcccacagccaa

SEQ ID NO: 20998 - DNA, 21 bp, synthetic construct
  misc_feature 1..21: note = Description of Artificial Sequence: Synthetic oligonucleotide
  source 1..21: mol_type = other DNA
accggcagcaaaacccaaagc

SEQ ID NO: 20999 - DNA, 21 bp, synthetic construct
  misc_feature 1..21: note = Description of Artificial Sequence: Synthetic oligonucleotide
  source 1..21: mol_type = other DNA
aatagggcggctcagggtggg

SEQ ID NO: 21000 - DNA, 21 bp, synthetic construct
  misc_feature 1..21: note = Description of Artificial Sequence: Synthetic oligonucleotide
  source 1..21: mol_type = other DNA
acggcggatcgtagtggggcg

SEQ ID NO: 21001 - DNA, 21 bp, synthetic construct
  misc_feature 1..21: note = Description of Artificial Sequence: Synthetic oligonucleotide
  source 1..21: mol_type = other DNA
agcaccaccagcgacagcaaa

SEQ ID NO: 21002 - DNA, 21 bp, synthetic construct
  misc_feature 1..21: note = Description of Artificial Sequence: Synthetic oligonucleotide
  source 1..21: mol_type = other DNA
atgagcgaaggcaccagaagc

SEQ ID NO: 21003 - DNA, 21 bp, synthetic construct
  misc_feature 1..21: note = Description of Artificial Sequence: Synthetic oligonucleotide
  source 1..21: mol_type = other DNA
catcaggggtctaagcttgcg

SEQ ID NO: 21004 - DNA, 21 bp, synthetic construct
  misc_feature 1..21: note = Description of Artificial Sequence: Synthetic oligonucleotide
  source 1..21: mol_type = other DNA
gtgcagcaggcttcgtctatt

SEQ ID NO: 21005 - DNA, 21 bp, synthetic construct
  misc_feature 1..21: note = Description of Artificial Sequence: Synthetic oligonucleotide
  source 1..21: mol_type = other DNA
gatcggaatggtaaggttgcg

SEQ ID NO: 21006 - DNA, 21 bp, synthetic construct
  misc_feature 1..21: note = Description of Artificial Sequence: Synthetic oligonucleotide
  source 1..21: mol_type = other DNA
gctggtcgggatgcggcggct

SEQ ID NO: 21007 - DNA, 21 bp, synthetic construct
  misc_feature 1..21: note = Description of Artificial Sequence: Synthetic oligonucleotide
  source 1..21: mol_type = other DNA
accagcagccaaacccccgtc

SEQ ID NO: 21008 - DNA, 21 bp, synthetic construct
  misc_feature 1..21: note = Description of Artificial Sequence: Synthetic oligonucleotide
  source 1..21: mol_type = other DNA
acgacgatgtctagtcatgct

SEQ ID NO: 21009 - DNA, 21 bp, synthetic construct
  misc_feature 1..21: note = Description of Artificial Sequence: Synthetic oligonucleotide
  source 1..21: mol_type = other DNA
actacggggcagggtatgacg

SEQ ID NO: 21010 - DNA, 21 bp, synthetic construct
  misc_feature 1..21: note = Description of Artificial Sequence: Synthetic oligonucleotide
  source 1..21: mol_type = other DNA
agcgaaaaaagcagcgccatg

SEQ ID NO: 21011 - DNA, 21 bp, synthetic construct
  misc_feature 1..21: note = Description of Artificial Sequence: Synthetic oligonucleotide
  source 1..21: mol_type = other DNA
agcggcgccagccaaaaaccc

SEQ ID NO: 21012 - DNA, 21 bp, synthetic construct
  misc_feature 1..21: note = Description of Artificial Sequence: Synthetic oligonucleotide
  source 1..21: mol_type = other DNA
agtgggaataggactgatggg

SEQ ID NO: 21013 - DNA, 21 bp, synthetic construct
  misc_feature 1..21: note = Description of Artificial Sequence: Synthetic oligonucleotide
  source 1..21: mol_type = other DNA
gatttgagtactaagtctggt

SEQ ID NO: 21014 - DNA, 21 bp, synthetic construct
  misc_feature 1..21: note = Description of Artificial Sequence: Synthetic oligonucleotide
  source 1..21: mol_type = other DNA
ggccccgacagagcccccacc

SEQ ID NO: 21015 - DNA, 21 bp, synthetic construct
  misc_feature 1..21: note = Description of Artificial Sequence: Synthetic oligonucleotide
  source 1..21: mol_type = other DNA
aatccggctagttcgtcgagg

SEQ ID NO: 21016 - DNA, 21 bp, synthetic construct
  misc_feature 1..21: note = Description of Artificial Sequence: Synthetic oligonucleotide
  source 1..21: mol_type = other DNA
accgacgaccacaaaggccaa

SEQ ID NO: 21017 - DNA, 21 bp, synthetic construct
  misc_feature 1..21: note = Description of Artificial Sequence: Synthetic oligonucleotide
  source 1..21: mol_type = other DNA
gacggcgtcaaaagcagcagc

SEQ ID NO: 21018 - DNA, 21 bp, synthetic construct
  misc_feature 1..21: note = Description of Artificial Sequence: Synthetic oligonucleotide
  source 1..21: mol_type = other DNA
gccgaaaacaaaagcatgagc

SEQ ID NO: 21019 - DNA, 21 bp, synthetic construct
  misc_feature 1..21: note = Description of Artificial Sequence: Synthetic oligonucleotide
  source 1..21: mol_type = other DNA
gctggttctagtagtattgct

SEQ ID NO: 21020 - DNA, 21 bp, synthetic construct
  misc_feature 1..21: note = Description of Artificial Sequence: Synthetic oligonucleotide
  source 1..21: mol_type = other DNA
tcgacgacggatcgtaatgtt

SEQ ID NO: 21021 - DNA, 21 bp, synthetic construct
  misc_feature 1..21: note = Description of Artificial Sequence: Synthetic oligonucleotide
  source 1..21: mol_type = other DNA
acccaaagcggcggcaccacc

SEQ ID NO: 21022 - DNA, 21 bp, synthetic construct
  misc_feature 1..21: note = Description of Artificial Sequence: Synthetic oligonucleotide
  source 1..21: mol_type = other DNA
agcggccccccccccagcacc

SEQ ID NO: 21023 - DNA, 21 bp, synthetic construct
  misc_feature 1..21: note = Description of Artificial Sequence: Synthetic oligonucleotide
  source 1..21: mol_type = other DNA
gctaggcagagtgaggtggct

SEQ ID NO: 21024 - DNA, 21 bp, synthetic construct
  misc_feature 1..21: note = Description of Artificial Sequence: Synthetic oligonucleotide
  source 1..21: mol_type = other DNA
agcagcggccacggcaacgtc

SEQ ID NO: 21025 - DNA, 21 bp, synthetic construct
  misc_feature 1..21: note = Description of Artificial Sequence: Synthetic oligonucleotide
  source 1..21: mol_type = other DNA
agcgacagcagcaacagagtc

SEQ ID NO: 21026 - DNA, 21 bp, synthetic construct
  misc_feature 1..21: note = Description of Artificial Sequence: Synthetic oligonucleotide
  source 1..21: mol_type = other DNA
cttggttcgccgactaatacg

SEQ ID NO: 21027 - DNA, 21 bp, synthetic construct
  misc_feature 1..21: note = Description of Artificial Sequence: Synthetic oligonucleotide
  source 1..21: mol_type = other DNA
ggcatggacagccccagcaga

SEQ ID NO: 21028 - DNA, 21 bp, synthetic construct
  misc_feature 1..21: note = Description of Artificial Sequence: Synthetic oligonucleotide
  source 1..21: mol_type = other DNA
agcggcaccagcagcagcacc

SEQ ID NO: 21029 - DNA, 21 bp, synthetic construct
  misc_feature 1..21: note = Description of Artificial Sequence: Synthetic oligonucleotide
  source 1..21: mol_type = other DNA
agcaaaggcgacgccgtcggc

SEQ ID NO: 21030 - DNA, 21 bp, synthetic construct
  misc_feature 1..21: note = Description of Artificial Sequence: Synthetic oligonucleotide
  source 1..21: mol_type = other DNA
agtactcctgcggggaatcag

SEQ ID NO: 21031 - DNA, 21 bp, synthetic construct
  misc_feature 1..21: note = Description of Artificial Sequence: Synthetic oligonucleotide
  source 1..21: mol_type = other DNA
caagcccaaagcaccaacctc

SEQ ID NO: 21032 - DNA, 21 bp, synthetic construct
  misc_feature 1..21: note = Description of Artificial Sequence: Synthetic oligonucleotide
  source 1..21: mol_type = other DNA
gaaggcagcaacaccgtcgtc

SEQ ID NO: 21033 - DNA, 21 bp, synthetic construct
  misc_feature 1..21: note = Description of Artificial Sequence: Synthetic oligonucleotide
  source 1..21: mol_type = other DNA
agcagcaaccccagcaacgaa

SEQ ID NO: 21034 - DNA, 21 bp, synthetic construct
  misc_feature 1..21: note = Description of Artificial Sequence: Synthetic oligonucleotide
  source 1..21: mol_type = other DNA
gatcaggggagtgtgcttaag

SEQ ID NO: 21035 - DNA, 21 bp, synthetic construct
  misc_feature 1..21: note = Description of Artificial Sequence: Synthetic oligonucleotide
  source 1..21: mol_type = other DNA
ggcgacagaggcaaaagcagc

SEQ ID NO: 21036 - DNA, 21 bp, synthetic construct
  misc_feature 1..21: note = Description of Artificial Sequence: Synthetic oligonucleotide
  source 1..21: mol_type = other DNA
agcaaagccagcagccacagc

SEQ ID NO: 21037 - DNA, 21 bp, synthetic construct
  misc_feature 1..21: note = Description of Artificial Sequence: Synthetic oligonucleotide
  source 1..21: mol_type = other DNA
gatgggagtggttcgacgcgt

SEQ ID NO: 21038 - DNA, 21 bp, synthetic construct
  misc_feature 1..21: note = Description of Artificial Sequence: Synthetic oligonucleotide
  source 1..21: mol_type = other DNA
cagggtggtggtggtcagggt

SEQ ID NO: 21039 - DNA, 21 bp, synthetic construct
  misc_feature 1..21: note = Description of Artificial Sequence: Synthetic oligonucleotide
  source 1..21: mol_type = other DNA
caaggcaacggcctcctcacc

SEQ ID NO: 21040 - DNA, 21 bp, synthetic construct
  misc_feature 1..21: note = Description of Artificial Sequence: Synthetic oligonucleotide
  source 1..21: mol_type = other DNA
tcgggtacgagtactctgatg

SEQ ID NO: 21041 - DNA, 21 bp, synthetic construct
  misc_feature 1..21: note = Description of Artificial Sequence: Synthetic oligonucleotide
  source 1..21: mol_type = other DNA
gggacgtctggtaaggggtct

SEQ ID NO: 21042 - DNA, 21 bp, synthetic construct
  misc_feature 1..21: note = Description of Artificial Sequence: Synthetic oligonucleotide
  source 1..21: mol_type = other DNA
ggtgttcgtgggaaggagagt

SEQ ID NO: 21043 - DNA, 21 bp, synthetic construct
  misc_feature 1..21: note = Description of Artificial Sequence: Synthetic oligonucleotide
  source 1..21: mol_type = other DNA
gccaaaagccaaggcagcctc

SEQ ID NO: 21044 - DNA, 21 bp, synthetic construct
  misc_feature 1..21: note = Description of Artificial Sequence: Synthetic oligonucleotide
  source 1..21: mol_type = other DNA
cacaccaccggcaccctcgcc

SEQ ID NO: 21045 - DNA, 21 bp, synthetic construct
  misc_feature 1..21: note = Description of Artificial Sequence: Synthetic oligonucleotide
  source 1..21: mol_type = other DNA
acccccgccgtcaacggccac

SEQ ID NO: 21046 - DNA, 21 bp, synthetic construct
  misc_feature 1..21: note = Description of Artificial Sequence: Synthetic oligonucleotide
  source 1..21: mol_type = other DNA
agcgccgtcaccaccagcgcc

SEQ ID NO: 21047 - DNA, 21 bp, synthetic construct
  misc_feature 1..21: note = Description of Artificial Sequence: Synthetic oligonucleotide
  source 1..21: mol_type = other DNA
tctaatgctagtgctgcggtt

SEQ ID NO: 21048 - DNA, 21 bp, synthetic construct
  misc_feature 1..21: note = Description of Artificial Sequence: Synthetic oligonucleotide
  source 1..21: mol_type = other DNA
gctcctcatgatggtaagacg

SEQ ID NO: 21049 - DNA, 21 bp, synthetic construct
  misc_feature 1..21: note = Description of Artificial Sequence: Synthetic oligonucleotide
  source 1..21: mol_type = other DNA
agcagcgccggcaccacccaa

SEQ ID NO: 21050 - DNA, 21 bp, synthetic construct
  misc_feature 1..21: note = Description of Artificial Sequence: Synthetic oligonucleotide
  source 1..21: mol_type = other DNA
aaccaagccagaaccggcgaa

SEQ ID NO: 21051 - DNA, 21 bp, synthetic construct
  misc_feature 1..21: note = Description of Artificial Sequence: Synthetic oligonucleotide
  source 1..21: mol_type = other DNA
actcctcaggcggtgccgacg

SEQ ID NO: 21052 - DNA, 21 bp, synthetic construct
  misc_feature 1..21: note = Description of Artificial Sequence: Synthetic oligonucleotide
  source 1..21: mol_type = other DNA
agcaccggcacccccaccggc

SEQ ID NO: 21053 - DNA, 21 bp, synthetic construct
  misc_feature 1..21: note = Description of Artificial Sequence: Synthetic oligonucleotide
  source 1..21: mol_type = other DNA
agcagcggcaaacccgccggc

SEQ ID NO: 21054 - DNA, 21 bp, synthetic construct
  misc_feature 1..21: note = Description of Artificial Sequence: Synthetic oligonucleotide
  source 1..21: mol_type = other DNA
agtactacgaatgctgctctt

SEQ ID NO: 21055 - DNA, 21 bp, synthetic construct
  misc_feature 1..21: note = Description of Artificial Sequence: Synthetic oligonucleotide
  source 1..21: mol_type = other DNA
atcgccgccaaaggcatgaac

SEQ ID NO: 21056 - DNA, 21 bp, synthetic construct
  misc_feature 1..21: note = Description of Artificial Sequence: Synthetic oligonucleotide
  source 1..21: mol_type = other DNA
atggtcagcgccgccggcagc

SEQ ID NO: 21057 - DNA, 21 bp, synthetic construct
  misc_feature 1..21: note = Description of Artificial Sequence: Synthetic oligonucleotide
  source 1..21: mol_type = other DNA
caaagagacaaaaccagcggc

SEQ ID NO: 21058 - DNA, 21 bp, synthetic construct
  misc_feature 1..21: note = Description of Artificial Sequence: Synthetic oligonucleotide
  source 1..21: mol_type = other DNA
cacggcgccggcagccccagc

SEQ ID NO: 21059 - DNA, 21 bp, synthetic construct
  misc_feature 1..21: note = Description of Artificial Sequence: Synthetic oligonucleotide
  source 1..21: mol_type = other DNA
cagaattcgcatgctacgact

SEQ ID NO: 21060 - DNA, 21 bp, synthetic construct
  misc_feature 1..21: note = Description of Artificial Sequence: Synthetic oligonucleotide
  source 1..21: mol_type = other DNA
cagactactggttctcggaat

SEQ ID NO: 21061 - DNA, 21 bp, synthetic construct
  misc_feature 1..21: note = Description of Artificial Sequence: Synthetic oligonucleotide
  source 1..21: mol_type = other DNA
ctcaccggccaacaccacagc

SEQ ID NO: 21062 - DNA, 21 bp, synthetic construct
  misc_feature 1..21: note = Description of Artificial Sequence: Synthetic oligonucleotide
  source 1..21: mol_type = other DNA
ctcagcggcaccagcaccgtc

SEQ ID NO: 21063 - DNA, 21 bp, synthetic construct
  misc_feature 1..21: note = Description of Artificial Sequence: Synthetic oligonucleotide
  source 1..21: mol_type = other DNA
ctccccaacagcagcagcgcc

SEQ ID NO: 21064 - DNA, 21 bp, synthetic construct
  misc_feature 1..21: note = Description of Artificial Sequence: Synthetic oligonucleotide
  source 1..21: mol_type = other DNA
gagaagggtgcgacgaatttg

SEQ ID NO: 21065 - DNA, 21 bp, synthetic construct
  misc_feature 1..21: note = Description of Artificial Sequence: Synthetic oligonucleotide
  source 1..21: mol_type = other DNA
gatagtggtcgttcgtcgggg

SEQ ID NO: 21066 - DNA, 21 bp, synthetic construct
  misc_feature 1..21: note = Description of Artificial Sequence: Synthetic oligonucleotide
  source 1..21: mol_type = other DNA
gatccgacgaaggagagtcat

SEQ ID NO: 21067 - DNA, 21 bp, synthetic construct
  misc_feature 1..21: note = Description of Artificial Sequence: Synthetic oligonucleotide
  source 1..21: mol_type = other DNA
gatgggattaaggagcatacg

SEQ ID NO: 21068 - DNA, 21 bp, synthetic construct
  misc_feature 1..21: note = Description of Artificial Sequence: Synthetic oligonucleotide
  source 1..21: mol_type = other DNA
gatttgacgtcgcataagact

SEQ ID NO: 21069 - DNA, 21 bp, synthetic construct
  misc_feature 1..21: note = Description of Artificial Sequence: Synthetic oligonucleotide
  source 1..21: mol_type = other DNA
ggcagccaagacagccacaga

SEQ ID NO: 21070 - DNA, 21 bp, synthetic construct
  misc_feature 1..21: note = Description of Artificial Sequence: Synthetic oligonucleotide
  source 1..21: mol_type = other DNA
ggcggcaacaaacacggcaac

SEQ ID NO: 21071 - DNA, 21 bp, synthetic construct
  misc_feature 1..21: note = Description of Artificial Sequence: Synthetic oligonucleotide
  source 1..21: mol_type = other DNA
gtcaccgtcagccccagcaaa

SEQ ID NO: 21072 - DNA, 21 bp, synthetic construct
  misc_feature 1..21: note = Description of Artificial Sequence: Synthetic oligonucleotide
  source 1..21: mol_type = other DNA
gtcggcggcaccgccgtcaaa

SEQ ID NO: 21073 - DNA, 21 bp, synthetic construct
  misc_feature 1..21: note = Description of Artificial Sequence: Synthetic oligonucleotide
  source 1..21: mol_type = other DNA
gtggcttctcagcgtaatgag

SEQ ID NO: 21074 - DNA, 21 bp, synthetic construct
  misc_feature 1..21: note = Description of Artificial Sequence: Synthetic oligonucleotide
  source 1..21: mol_type = other DNA
tgtcaggataagaatgctccg

SEQ ID NO: 21075 - DNA, 21 bp, synthetic construct
  misc_feature 1..21: note = Description of Artificial Sequence: Synthetic oligonucleotide
  source 1..21: mol_type = other DNA
ttggcgagtaagtcttctaat

SEQ ID NO: 21076 - DNA, 21 bp, synthetic construct
  misc_feature 1..21: note = Description of Artificial Sequence: Synthetic oligonucleotide
  source 1..21: mol_type = other DNA
caggtggctgcgaagtcgagt

SEQ ID NO: 21077 - DNA, 21 bp, synthetic construct
  misc_feature 1..21: note = Description of Artificial Sequence: Synthetic oligonucleotide
  source 1..21: mol_type = other DNA
tctgagacgaagggaacggcg

SEQ ID NO: 21078 - DNA, 21 bp, synthetic construct
  misc_feature 1..21: note = Description of Artificial Sequence: Synthetic oligonucleotide
  source 1..21: mol_type = other DNA
agcaccaaaagccccgtcgcc

SEQ ID NO: 21079 - DNA, 21 bp, synthetic construct
  misc_feature 1..21: note = Description of Artificial Sequence: Synthetic oligonucleotide
  source 1..21: mol_type = other DNA
gtcagcagcaacccccccgcc

SEQ ID NO: 21080 - DNA, 21 bp, synthetic construct
  misc_feature 1..21: note = Description of Artificial Sequence: Synthetic oligonucleotide
  source 1..21: mol_type = other DNA
catggtgcttcggcgggtagt

SEQ ID NO: 21081 - DNA, 21 bp, synthetic construct
  misc_feature 1..21: note = Description of Artificial Sequence: Synthetic oligonucleotide
  source 1..21: mol_type = other DNA
aacaccgtcagcagccaaaac

SEQ ID NO: 21082 - DNA, 21 bp, synthetic construct
  misc_feature 1..21: note = Description of Artificial Sequence: Synthetic oligonucleotide
  source 1..21: mol_type = other DNA
gcccacagccaaagcagccaa

SEQ ID NO: 21083 - DNA, 21 bp, synthetic construct
  misc_feature 1..21: note = Description of Artificial Sequence: Synthetic oligonucleotide
  source 1..21: mol_type = other DNA
aatcctaatggttcgagtacg

SEQ ID NO: 21084 - DNA, 21 bp, synthetic construct
  misc_feature 1..21: note = Description of Artificial Sequence: Synthetic oligonucleotide
  source 1..21: mol_type = other DNA
agcgtcgccagcagcaacatg

SEQ ID NO: 21085 - DNA, 21 bp, synthetic construct
  misc_feature 1..21: note = Description of Artificial Sequence: Synthetic oligonucleotide
  source 1..21: mol_type = other DNA
agcagcgacagacaaagcgcc

SEQ ID NO: 21086 - DNA, 21 bp, synthetic construct
  misc_feature 1..21: note = Description of Artificial Sequence: Synthetic oligonucleotide
  source 1..21: mol_type = other DNA
actgctgattcggcgcgttcg

SEQ ID NO: 21087 - DNA, 21 bp, synthetic construct
  misc_feature 1..21: note = Description of Artificial Sequence: Synthetic oligonucleotide
  source 1..21: mol_type = other DNA
ggccccagccacaaccaaagc

SEQ ID NO: 21088 - DNA, 21 bp, synthetic construct
  misc_feature 1..21: note = Description of Artificial Sequence: Synthetic oligonucleotide
  source 1..21: mol_type = other DNA
gtcgccggccccagccccaaa

SEQ ID NO: 21089 - DNA, 21 bp, synthetic construct
  misc_feature 1..21: note = Description of Artificial Sequence: Synthetic oligonucleotide
  source 1..21: mol_type = other DNA
tcgacttctgatagttcgcgg

SEQ ID NO: 21090 - DNA, 21 bp, synthetic construct
  misc_feature 1..21: note = Description of Artificial Sequence: Synthetic oligonucleotide
  source 1..21: mol_type = other DNA
caaaacaccggcagccccacc

SEQ ID NO: 21091 - DNA, 21 bp, synthetic construct
  misc_feature 1..21: note = Description of Artificial Sequence: Synthetic oligonucleotide
  source 1..21: mol_type = other DNA
atgaaggctcagagttcgggg

SEQ ID NO: 21092 - DNA, 21 bp, synthetic construct
  misc_feature 1..21: note = Description of Artificial Sequence: Synthetic oligonucleotide
  source 1..21: mol_type = other DNA
gaaagcggcaaaaccaacatg

SEQ ID NO: 21093 - DNA, 21 bp, synthetic construct
  misc_feature 1..21: note = Description of Artificial Sequence: Synthetic oligonucleotide
  source 1..21: mol_type = other DNA
ctcggcagcggcgaaagaacc

SEQ ID NO: 21094 - DNA, 21 bp, synthetic construct
  misc_feature 1..21: note = Description of Artificial Sequence: Synthetic oligonucleotide
  source 1..21: mol_type = other DNA
ggcctccaaaaaaccagcggc

SEQ ID NO: 21095 - DNA, 21 bp, synthetic construct
  misc_feature 1..21: note = Description of Artificial Sequence: Synthetic oligonucleotide
  source 1..21: mol_type = other DNA
tacaaaagcgacagccaagtc

SEQ ID NO: 21096 - DNA, 21 bp, synthetic construct
  misc_feature 1..21: note = Description of Artificial Sequence: Synthetic oligonucleotide
  source 1..21: mol_type = other DNA
accgccaccaccaaagtcgac

SEQ ID NO: 21097 - DNA, 21 bp, synthetic construct
  misc_feature 1..21: note = Description of Artificial Sequence: Synthetic oligonucleotide
  source 1..21: mol_type = other DNA
ctcaccagcagcaccagcaac

SEQ ID NO: 21098 - DNA, 21 bp, synthetic construct
  misc_feature 1..21: note = Description of Artificial Sequence: Synthetic oligonucleotide
  source 1..21: mol_type = other DNA
tctggggcgtcgcataatttg

SEQ ID NO: 21099 - DNA, 21 bp, synthetic construct
  misc_feature 1..21: note = Description of Artificial Sequence: Synthetic oligonucleotide
  source 1..21: mol_type = other DNA
agcgccgtcaacagcagcaaa

SEQ ID NO: 21100 - DNA, 21 bp, synthetic construct
  misc_feature 1..21: note = Description of Artificial Sequence: Synthetic oligonucleotide
  source 1..21: mol_type = other DNA
atgaccccccccaacaaagaa

SEQ ID NO: 21101 - DNA, 21 bp, synthetic construct
  misc_feature 1..21: note = Description of Artificial Sequence: Synthetic oligonucleotide
  source 1..21: mol_type = other DNA
ggcgacagcgccagcagcaaa

SEQ ID NO: 21102 - DNA, 21 bp, synthetic construct
  misc_feature 1..21: note = Description of Artificial Sequence: Synthetic oligonucleotide
  source 1..21: mol_type = other DNA
ggtaataggtctgaggggaag

SEQ ID NO: 21103 - DNA, 21 bp, synthetic construct
  misc_feature 1..21: note = Description of Artificial Sequence: Synthetic oligonucleotide
  source 1..21: mol_type = other DNA
gccaaacaaaccagcgtcgtc

SEQ ID NO: 21104 - DNA, 21 bp, synthetic construct
  misc_feature 1..21: note = Description of Artificial Sequence: Synthetic oligonucleotide
  source 1..21: mol_type = other DNA
ggcatcggcgccaacagcatc

SEQ ID NO: 21105 - DNA, 21 bp, synthetic construct
  misc_feature 1..21: note = Description of Artificial Sequence: Synthetic oligonucleotide
  source 1..21: mol_type = other DNA
aatgctgagaagcttggtagt

SEQ ID NO: 21106 - DNA, 21 bp, synthetic construct
  misc_feature 1..21: note = Description of Artificial Sequence: Synthetic oligonucleotide
  source 1..21: mol_type = other DNA
ctcgccggcgccggcagcagc

SEQ ID NO: 21107 - DNA, 21 bp, synthetic construct
  misc_feature 1..21: note = Description of Artificial Sequence: Synthetic oligonucleotide
  source 1..21: mol_type = other DNA
ggcgaaagcgccaaagacggc

SEQ ID NO: 21108 - DNA, 21 bp, synthetic construct
  misc_feature 1..21: note = Description of Artificial Sequence: Synthetic oligonucleotide
  source 1..21: mol_type = other DNA
gggactgcgaagcctacgcat

SEQ ID NO: 21109 - DNA, 21 bp, synthetic construct
  misc_feature 1..21: note = Description of Artificial Sequence: Synthetic oligonucleotide
  source 1..21: mol_type = other DNA
atgacgcagaagtcgactgcg

SEQ ID NO: 21110 - DNA, 21 bp, synthetic construct
  misc_feature 1..21: note = Description of Artificial Sequence: Synthetic oligonucleotide
  source 1..21: mol_type = other DNA
ggggttgcgaatactcagtct

SEQ ID NO: 21111 - DNA, 21 bp, synthetic construct
  misc_feature 1..21: note = Description of Artificial Sequence: Synthetic oligonucleotide
  source 1..21: mol_type = other DNA
tcttcgtctaatccttctacg

SEQ ID NO: 21112 - DNA, 21 bp, synthetic construct
  misc_feature 1..21: note = Description of Artificial Sequence: Synthetic oligonucleotide
  source 1..21: mol_type = other DNA
accgccaacgcccaaaacaga

SEQ ID NO: 21113 - DNA, 21 bp, synthetic construct
  misc_feature 1..21: note = Description of Artificial Sequence: Synthetic oligonucleotide
  source 1..21: mol_type = other DNA
agccaaaccagcagcagcgtc

SEQ ID NO: 21114 - DNA, 21 bp, synthetic construct
  misc_feature 1..21: note = Description of Artificial Sequence: Synthetic oligonucleotide
  source 1..21: mol_type = other DNA
agccccaacgaaagaagccac

SEQ ID NO: 21115 - DNA, 21 bp, synthetic construct
  misc_feature 1..21: note = Description of Artificial Sequence: Synthetic oligonucleotide
  source 1..21: mol_type = other DNA
cagggttcgcaggcgactttg

SEQ ID NO: 21116 - DNA, 21 bp, synthetic construct
  misc_feature 1..21: note = Description of Artificial Sequence: Synthetic oligonucleotide
  source 1..21: mol_type = other DNA
gcggagggtgctcgtggtttg

SEQ ID NO: 21117 - DNA, 21 bp, synthetic construct
  misc_feature 1..21: note = Description of Artificial Sequence: Synthetic oligonucleotide
  source 1..21: mol_type = other DNA
ggcgaagaaggcaaaaccaaa

SEQ ID NO: 21118 - DNA, 21 bp, synthetic construct
  misc_feature 1..21: note = Description of Artificial Sequence: Synthetic oligonucleotide
  source 1..21: mol_type = other DNA
gggaagactcagcatggggct

SEQ ID NO: 21119 - DNA, 21 bp, synthetic construct
  misc_feature 1..21: note = Description of Artificial Sequence: Synthetic oligonucleotide
  source 1..21: mol_type = other DNA
ggcgacagcaaacccaccacc

SEQ ID NO: 21120 - DNA, 21 bp, synthetic construct
  misc_feature 1..21: note = Description of Artificial Sequence: Synthetic oligonucleotide
  source 1..21: mol_type = other DNA
ctcaacggcagagaaagcggc

SEQ ID NO: 21121 - DNA, 21 bp, synthetic construct
  misc_feature 1..21: note = Description of Artificial Sequence: Synthetic oligonucleotide
  source 1..21: mol_type = other DNA
ctcgccgcccccagcaacgcc

SEQ ID NO: 21122 - DNA, 21 bp, synthetic construct
  misc_feature 1..21: note = Description of Artificial Sequence: Synthetic oligonucleotide
  source 1..21: mol_type = other DNA
gattcgagtaagtctgctggg

SEQ ID NO: 21123 - DNA, 21 bp, synthetic construct
  misc_feature 1..21: note = Description of Artificial Sequence: Synthetic oligonucleotide
  source 1..21: mol_type = other DNA
ggcggcaccagcgtccacacc

SEQ ID NO: 21124 - DNA, 21 bp, synthetic construct
  misc_feature 1..21: note = Description of Artificial Sequence: Synthetic oligonucleotide
  source 1..21: mol_type = other DNA
ggcgtcaacagcagcaaaagc

SEQ ID NO: 21125 - DNA, 21 bp, synthetic construct
  misc_feature 1..21: note = Description of Artificial Sequence: Synthetic oligonucleotide
  source 1..21: mol_type = other DNA
agccacaacggcagcaacacc

SEQ ID NO: 21126 - DNA, 21 bp, synthetic construct
  misc_feature 1..21: note = Description of Artificial Sequence: Synthetic oligonucleotide
  source 1..21: mol_type = other DNA
gtcggcgtccccgtcagcacc

SEQ ID NO: 21127 - DNA, 21 bp, synthetic construct
  misc_feature 1..21: note = Description of Artificial Sequence: Synthetic oligonucleotide
  source 1..21: mol_type = other DNA
gccagcaacaaagtcaccagc

SEQ ID NO: 21128 - DNA, 21 bp, synthetic construct
  misc_feature 1..21: note = Description of Artificial Sequence: Synthetic oligonucleotide
  source 1..21: mol_type = other DNA
ggcaaaagcggcggcagcagc

SEQ ID NO: 21129 - DNA, 21 bp, synthetic construct
  misc_feature 1..21: note = Description of Artificial Sequence: Synthetic oligonucleotide
  source 1..21: mol_type = other DNA
acgacgggtagtgggaatcgg

SEQ ID NO: 21130 - DNA, 21 bp, synthetic construct
  misc_feature 1..21: note = Description of Artificial Sequence: Synthetic oligonucleotide
  source 1..21: mol_type = other DNA
actactggtgatggtgctaag

SEQ ID NO: 21131 - DNA, 21 bp, synthetic construct
  misc_feature 1..21: note = Description of Artificial Sequence: Synthetic oligonucleotide
  source 1..21: mol_type = other DNA
ctcggcggcgccaccaacagc

SEQ ID NO: 21132 - DNA, 21 bp, synthetic construct
  misc_feature 1..21: note = Description of Artificial Sequence: Synthetic oligonucleotide
  source 1..21: mol_type = other DNA
gaaggcaacagcaaactcgtc

SEQ ID NO: 21133 - DNA, 21 bp, synthetic construct
  misc_feature 1..21: note = Description of Artificial Sequence: Synthetic oligonucleotide
  source 1..21: mol_type = other DNA
gacggcggcagcaaccaagcc

SEQ ID NO: 21134 - DNA, 21 bp, synthetic construct
  misc_feature 1..21: note = Description of Artificial Sequence: Synthetic oligonucleotide
  source 1..21: mol_type = other DNA
gagggtacggagagtcggagg

SEQ ID NO: 21135 - DNA, 21 bp, synthetic construct
  misc_feature 1..21: note = Description of Artificial Sequence: Synthetic oligonucleotide
  source 1..21: mol_type = other DNA
gttggttctacttcgtcgagt

SEQ ID NO: 21136 - DNA, 21 bp, synthetic construct
  misc_feature 1..21: note = Description of Artificial Sequence: Synthetic oligonucleotide
  source 1..21: mol_type = other DNA
accgacggcaaacaccaaccc

SEQ ID NO: 21137 - DNA, 21 bp, synthetic construct
  misc_feature 1..21: note = Description of Artificial Sequence: Synthetic oligonucleotide
  source 1..21: mol_type = other DNA
atcagcaccagcgccagcaaa

SEQ ID NO: 21138 - DNA, 21 bp, synthetic construct
  misc_feature 1..21: note = Description of Artificial Sequence: Synthetic oligonucleotide
  source 1..21: mol_type = other DNA
aacgccaacaaagacgtcgcc

SEQ ID NO: 21139 - DNA, 21 bp, synthetic construct
  misc_feature 1..21: note = Description of Artificial Sequence: Synthetic oligonucleotide
  source 1..21: mol_type = other DNA
caggaggcgcagaaggtgggg

SEQ ID NO: 21140 - DNA, 21 bp, synthetic construct
  misc_feature 1..21: note = Description of Artificial Sequence: Synthetic oligonucleotide
  source 1..21: mol_type = other DNA
gggctggattcgactcgtatt

SEQ ID NO: 21141 - DNA, 21 bp, synthetic construct
  misc_feature 1..21: note = Description of Artificial Sequence: Synthetic oligonucleotide
  source 1..21: mol_type = other DNA
tctgctaataatgctgcttct

SEQ ID NO: 21142 - DNA, 21 bp, synthetic construct
  misc_feature 1..21: note = Description of Artificial Sequence: Synthetic oligonucleotide
  source 1..21: mol_type = other DNA
ggtgcgactgtgaagaatttg

SEQ ID NO: 21143 - DNA, 21 bp, synthetic construct
  misc_feature 1..21: note = Description of Artificial Sequence: Synthetic oligonucleotide
  source 1..21: mol_type = other DNA
aacagccccagcaccaacagc

SEQ ID NO: 21144 - DNA, 21 bp, synthetic construct
  misc_feature 1..21: note = Description of Artificial Sequence: Synthetic oligonucleotide
  source 1..21: mol_type = other DNA
atgggccaaagccaaaccctc

SEQ ID NO: 21145 - DNA, 21 bp, synthetic construct
  misc_feature 1..21: note = Description of Artificial Sequence: Synthetic oligonucleotide
  source 1..21: mol_type = other DNA
caaggcagcaccaaaggcatc

SEQ ID NO: 21146 - DNA, 21 bp, synthetic construct
  misc_feature 1..21: note = Description of Artificial Sequence: Synthetic oligonucleotide
  source 1..21: mol_type = other DNA
agcaccggccccagcgccgcc

SEQ ID NO: 21147 - DNA, 21 bp, synthetic construct
  misc_feature 1..21: note = Description of Artificial Sequence: Synthetic oligonucleotide
  source 1..21: mol_type = other DNA
atgtctactaatggttctact

SEQ ID NO: 21148 - DNA, 21 bp, synthetic construct
  misc_feature 1..21: note = Description of Artificial Sequence: Synthetic oligonucleotide
  source 1..21: mol_type = other DNA
gaggtgacgcctcataggggt

SEQ ID NO: 21149 - DNA, 21 bp, synthetic construct
  misc_feature 1..21: note = Description of Artificial Sequence: Synthetic oligonucleotide
  source 1..21: mol_type = other DNA
gatactactgataagactcgg

SEQ ID NO: 21150 - DNA, 21 bp, synthetic construct
  misc_feature 1..21: note = Description of Artificial Sequence: Synthetic oligonucleotide
  source 1..21: mol_type = other DNA
cacaacagccccagcgccaaa

SEQ ID NO: 21151 - DNA, 21 bp, synthetic construct
  misc_feature 1..21: note = Description of Artificial Sequence: Synthetic oligonucleotide
  source 1..21: mol_type = other DNA
gacgccagaagcagcgccgcc

SEQ ID NO: 21152 - DNA, 21 bp, synthetic construct
  misc_feature 1..21: note = Description of Artificial Sequence: Synthetic oligonucleotide
  source 1..21: mol_type = other DNA
ggtaagaatggttctacgatg

SEQ ID NO: 21153 - DNA, 21 bp, synthetic construct
  misc_feature 1..21: note = Description of Artificial Sequence: Synthetic oligonucleotide
  source 1..21: mol_type = other DNA
accggcggcggcggccaacaa

SEQ ID NO: 21154 - DNA, 21 bp, synthetic construct
  misc_feature 1..21: note = Description of Artificial Sequence: Synthetic oligonucleotide
  source 1..21: mol_type = other DNA
agcagaagcaaagccagcgaa

SEQ ID NO: 21155 - DNA, 21 bp, synthetic construct
  misc_feature 1..21: note = Description of Artificial Sequence: Synthetic oligonucleotide
  source 1..21: mol_type = other DNA
agcggcgacagaaccgaaggc

SEQ ID NO: 21156 - DNA, 21 bp, synthetic construct
  misc_feature 1..21: note = Description of Artificial Sequence: Synthetic oligonucleotide
  source 1..21: mol_type = other DNA
atgtcgggtactagttctgtt

SEQ ID NO: 21157 - DNA, 21 bp, synthetic construct
  misc_feature 1..21: note = Description of Artificial Sequence: Synthetic oligonucleotide
  source 1..21: mol_type = other DNA
gatgctaggccgacgtctggt

SEQ ID NO: 21158 - DNA, 21 bp, synthetic construct
  misc_feature 1..21: note = Description of Artificial Sequence: Synthetic oligonucleotide
  source 1..21: mol_type = other DNA
gcttctgctagttcgaataag

SEQ ID NO: 21159 - DNA, 21 bp, synthetic construct
  misc_feature 1..21: note = Description of Artificial Sequence: Synthetic oligonucleotide
  source 1..21: mol_type = other DNA
gttggtcagaaggttggttcg

SEQ ID NO: 21160 - DNA, 21 bp, synthetic construct
  misc_feature 1..21: note = Description of Artificial Sequence: Synthetic oligonucleotide
  source 1..21: mol_type = other DNA
tattcgggtacggggaatcag

SEQ ID NO: 21161 - DNA, 21 bp, synthetic construct
  misc_feature 1..21: note = Description of Artificial Sequence: Synthetic oligonucleotide
  source 1..21: mol_type = other DNA
tcggatacgaagtctcagagt

SEQ ID NO: 21162 - DNA, 21 bp, synthetic construct
  misc_feature 1..21: note = Description of Artificial Sequence: Synthetic oligonucleotide
  source 1..21: mol_type = other DNA
ggtgctaataaggatacgtcg

SEQ ID NO: 21163 - DNA, 21 bp, synthetic construct
  misc_feature 1..21: note = Description of Artificial Sequence: Synthetic oligonucleotide
  source 1..21: mol_type = other DNA
agacaaggccaaagcgtcagc

SEQ ID NO: 21164 - DNA, 21 bp, synthetic construct
  misc_feature 1..21: note = Description of Artificial Sequence: Synthetic oligonucleotide
  source 1..21: mol_type = other DNA
gagaattctcaggctagtagg

SEQ ID NO: 21165 - DNA, 21 bp, synthetic construct
  misc_feature 1..21: note = Description of Artificial Sequence: Synthetic oligonucleotide
  source 1..21: mol_type = other DNA
gagcatgtgtctaagcttggg

SEQ ID NO: 21166 - DNA, 21 bp, synthetic construct
  misc_feature 1..21: note = Description of Artificial Sequence: Synthetic oligonucleotide
  source 1..21: mol_type = other DNA
gccaccggcaaccaagcccaa

SEQ ID NO: 21167 - DNA, 21 bp, synthetic construct
  misc_feature 1..21: note = Description of Artificial Sequence: Synthetic oligonucleotide
  source 1..21: mol_type = other DNA
acgagtgggactgctaataat

SEQ ID NO: 21168 - DNA, 21 bp, synthetic construct
  misc_feature 1..21: note = Description of Artificial Sequence: Synthetic oligonucleotide
  source 1..21: mol_type = other DNA
agcgtcgtcagcagcaaccaa

SEQ ID NO: 21169 - DNA, 21 bp, synthetic construct
  misc_feature 1..21: note = Description of Artificial Sequence: Synthetic oligonucleotide
  source 1..21: mol_type = other DNA
gacaaaagcacccaaagcagc

SEQ ID NO: 21170 - DNA, 21 bp, synthetic construct
  misc_feature 1..21: note = Description of Artificial Sequence: Synthetic oligonucleotide
  source 1..21: mol_type = other DNA
gtccaaagcagcaacatcggc

SEQ ID NO: 21171 - DNA, 21 bp, synthetic construct
  misc_feature 1..21: note = Description of Artificial Sequence: Synthetic oligonucleotide
  source 1..21: mol_type = other DNA
tcgccgtctaattcgacgtct

SEQ ID NO: 21172 - DNA, 21 bp, synthetic construct
  misc_feature 1..21: note = Description of Artificial Sequence: Synthetic oligonucleotide
  source 1..21: mol_type = other DNA
gacagcggcaaaagccaaagc

SEQ ID NO: 21173 - DNA, 21 bp, synthetic construct
  misc_feature 1..21: note = Description of Artificial Sequence: Synthetic oligonucleotide
  source 1..21: mol_type = other DNA
cagcctacggcttcgccttct

SEQ ID NO: 21174 - DNA, 21 bp, synthetic construct
  misc_feature 1..21: note = Description of Artificial Sequence: Synthetic oligonucleotide
  source 1..21: mol_type = other DNA
aacaccaacaaaaccgccagc

SEQ ID NO: 21175 - DNA, 21 bp, synthetic construct
  misc_feature 1..21: note = Description of Artificial Sequence: Synthetic oligonucleotide
  source 1..21: mol_type = other DNA
agcgcccccagcggcaaagaa

SEQ ID NO: 21176 - DNA, 21 bp, synthetic construct
  misc_feature 1..21: note = Description of Artificial Sequence: Synthetic oligonucleotide
  source 1..21: mol_type = other DNA
agcggcctcgaaaccaaaagc

SEQ ID NO: 21177 - DNA, 21 bp, synthetic construct
  misc_feature 1..21: note = Description of Artificial Sequence: Synthetic oligonucleotide
  source 1..21: mol_type = other DNA
tatactgggaaggtgtctagt

SEQ ID NO: 21178 - DNA, 21 bp, synthetic construct
  misc_feature 1..21: note = Description of Artificial Sequence: Synthetic oligonucleotide
  source 1..21: mol_type = other DNA
aacctcggcagcgtcagagac

SEQ ID NO: 21179 - DNA, 21 bp, synthetic construct
  misc_feature 1..21: note = Description of Artificial Sequence: Synthetic oligonucleotide
  source 1..21: mol_type = other DNA
gctccggattctaagaatggg

SEQ ID NO: 21180 - DNA, 21 bp, synthetic construct
  misc_feature 1..21: note = Description of Artificial Sequence: Synthetic oligonucleotide
  source 1..21: mol_type = other DNA
aattctgctaagggtattgct

SEQ ID NO: 21181 - DNA, 21 bp, synthetic construct
  misc_feature 1..21: note = Description of Artificial Sequence: Synthetic oligonucleotide
  source 1..21: mol_type = other DNA
tcgacgggtgctcctgctact

SEQ ID NO: 21182 - DNA, 21 bp, synthetic construct
  misc_feature 1..21: note = Description of Artificial Sequence: Synthetic oligonucleotide
  source 1..21: mol_type = other DNA
tctcagactggtggtaggggg

SEQ ID NO: 21183 - DNA, 21 bp, synthetic construct
  misc_feature 1..21: note = Description of Artificial Sequence: Synthetic oligonucleotide
  source 1..21: mol_type = other DNA
tgcagcggcgaccccagaaaa

SEQ ID NO: 21184 - DNA, 21 bp, synthetic construct
  misc_feature 1..21: note = Description of Artificial Sequence: Synthetic oligonucleotide
  source 1..21: mol_type = other DNA
aaaagcgccagccccgcccac

SEQ ID NO: 21185 - DNA, 21 bp, synthetic construct
  misc_feature 1..21: note = Description of Artificial Sequence: Synthetic oligonucleotide
  source 1..21: mol_type = other DNA
gaaggcgtccccagcaaactc

SEQ ID NO: 21186 - DNA, 21 bp, synthetic construct
  misc_feature 1..21: note = Description of Artificial Sequence: Synthetic oligonucleotide
  source 1..21: mol_type = other DNA
ggccccagcgccaaagtcaac

SEQ ID NO: 21187 - DNA, 21 bp, synthetic construct
  misc_feature 1..21: note = Description of Artificial Sequence: Synthetic oligonucleotide
  source 1..21: mol_type = other DNA
actactgggactacgtcgagg

SEQ ID NO: 21188 - DNA, 21 bp, synthetic construct
  misc_feature 1..21: note = Description of Artificial Sequence: Synthetic oligonucleotide
  source 1..21: mol_type = other DNA
accgccgaagtcagaggcagc

SEQ ID NO: 21189 - DNA, 21 bp, synthetic construct
  misc_feature 1..21: note = Description of Artificial Sequence: Synthetic oligonucleotide
  source 1..21: mol_type = other DNA
tcgacggctgtgagttcgtcg

SEQ ID NO: 21190 - DNA, 21 bp, synthetic construct
  misc_feature 1..21: note = Description of Artificial Sequence: Synthetic oligonucleotide
  source 1..21: mol_type = other DNA
aacggcaaccaacaaggcaga

SEQ ID NO: 21191 - DNA, 21 bp, synthetic construct
  misc_feature 1..21: note = Description of Artificial Sequence: Synthetic oligonucleotide
  source 1..21: mol_type = other DNA
aacagcaccgaacacagcaga

SEQ ID NO: 21192 - DNA, 21 bp, synthetic construct
  misc_feature 1..21: note = Description of Artificial Sequence: Synthetic oligonucleotide
  source 1..21: mol_type = other DNA
aaggatgatcggactacgggt

SEQ ID NO: 21193 - DNA, 21 bp, synthetic construct
  misc_feature 1..21: note = Description of Artificial Sequence: Synthetic oligonucleotide
  source 1..21: mol_type = other DNA
aatcaggattctagtaagggt

SEQ ID NO: 21194 - DNA, 21 bp, synthetic construct
  misc_feature 1..21: note = Description of Artificial Sequence: Synthetic oligonucleotide
  source 1..21: mol_type = other DNA
aatggtcctagtaatggttcg

SEQ ID NO: 21195 - DNA, 21 bp, synthetic construct
  misc_feature 1..21: note = Description of Artificial Sequence: Synthetic oligonucleotide
  source 1..21: mol_type = other DNA
atggaggggggtcagcgtgct

SEQ ID NO: 21196 - DNA, 21 bp, synthetic construct
  misc_feature 1..21: note = Description of Artificial Sequence: Synthetic oligonucleotide
  source 1..21: mol_type = other DNA
caagacggcagaaaccaaccc

SEQ ID NO: 21197 - DNA, 21 bp, synthetic construct
  misc_feature 1..21: note = Description of Artificial Sequence: Synthetic oligonucleotide
  source 1..21: mol_type = other DNA
caggttggttctgcgacggct

SEQ ID NO: 21198 - DNA, 21 bp, synthetic construct
  misc_feature 1..21: note = Description of Artificial Sequence: Synthetic oligonucleotide
  source 1..21: mol_type = other DNA
gaaggcagcagcagaagcggc

SEQ ID NO: 21199 - DNA, 21 bp, synthetic construct
  misc_feature 1..21: note = Description of Artificial Sequence: Synthetic oligonucleotide
  source 1..21: mol_type = other DNA
gacagcagcaacctcaaaagc

SEQ ID NO: 21200 - DNA, 21 bp, synthetic construct
  misc_feature 1..21: note = Description of Artificial Sequence: Synthetic oligonucleotide
  source 1..21: mol_type = other DNA
gccagaagcaaagacagcagc

SEQ ID NO: 21201 - DNA, 21 bp, synthetic construct
  misc_feature 1..21: note = Description of Artificial Sequence: Synthetic oligonucleotide
  source 1..21: mol_type = other DNA
gggggtactagttcttctatt

SEQ ID NO: 21202 - DNA, 21 bp, synthetic construct
  misc_feature 1..21: note = Description of Artificial Sequence: Synthetic oligonucleotide
  source 1..21: mol_type = other DNA
gtcaccaccagagaaagcgtc

SEQ ID NO: 21203 - DNA, 21 bp, synthetic construct
  misc_feature 1..21: note = Description of Artificial Sequence: Synthetic oligonucleotide
  source 1..21: mol_type = other DNA
tcttcgggtacgggtccgtcg

SEQ ID NO: 21204 - DNA, 21 bp, synthetic construct
  misc_feature 1..21: note = Description of Artificial Sequence: Synthetic oligonucleotide
  source 1..21: mol_type = other DNA
tcttctcagccgactttgggt

SEQ ID NO: 21205 - DNA, 21 bp, synthetic construct
  misc_feature 1..21: note = Description of Artificial Sequence: Synthetic oligonucleotide
  source 1..21: mol_type = other DNA
gccgtcggcaccgccaccagc

SEQ ID NO: 21206 - DNA, 21 bp, synthetic construct
  misc_feature 1..21: note = Description of Artificial Sequence: Synthetic oligonucleotide
  source 1..21: mol_type = other DNA
gccaccaccagcggcagcctc

SEQ ID NO: 21207 - DNA, 21 bp, synthetic construct
  misc_feature 1..21: note = Description of Artificial Sequence: Synthetic oligonucleotide
  source 1..21: mol_type = other DNA
accgaaaacagagacagcagc

SEQ ID NO: 21208 - DNA, 21 bp, synthetic construct
  misc_feature 1..21: note = Description of Artificial Sequence: Synthetic oligonucleotide
  source 1..21: mol_type = other DNA
gacaaaaacaacaccgccaga

SEQ ID NO: 21209 - DNA, 21 bp, synthetic construct
  misc_feature 1..21: note = Description of Artificial Sequence: Synthetic oligonucleotide
  source 1..21: mol_type = other DNA
atggccagcaacgacagcaaa

SEQ ID NO: 21210 - DNA, 21 bp, synthetic construct
  misc_feature 1..21: note = Description of Artificial Sequence: Synthetic oligonucleotide
  source 1..21: mol_type = other DNA
cacggcagcaccgccagccaa

SEQ ID NO: 21211 - DNA, 21 bp, synthetic construct
  misc_feature 1..21: note = Description of Artificial Sequence: Synthetic oligonucleotide
  source 1..21: mol_type = other DNA
gatcatagtcatgctattaag

SEQ ID NO: 21212 - DNA, 21 bp, synthetic construct
  misc_feature 1..21: note = Description of Artificial Sequence: Synthetic oligonucleotide
  source 1..21: mol_type = other DNA
aatagtggtcagcattcgaat

SEQ ID NO: 21213 - DNA, 21 bp, synthetic construct
  misc_feature 1..21: note = Description of Artificial Sequence: Synthetic oligonucleotide
  source 1..21: mol_type = other DNA
agttctaatggtgtgggtgcg

SEQ ID NO: 21214 - DNA, 21 bp, synthetic construct
  misc_feature 1..21: note = Description of Artificial Sequence: Synthetic oligonucleotide
  source 1..21: mol_type = other DNA
gaaggcaaaaaagccgacccc

SEQ ID NO: 21215 - DNA, 21 bp, synthetic construct
  misc_feature 1..21: note = Description of Artificial Sequence: Synthetic oligonucleotide
  source 1..21: mol_type = other DNA
gccccccaaagcagcaacggc

SEQ ID NO: 21216 - DNA, 21 bp, synthetic construct
  misc_feature 1..21: note = Description of Artificial Sequence: Synthetic oligonucleotide
  source 1..21: mol_type = other DNA
gctaggagtaaggagcagcag

SEQ ID NO: 21217 - DNA, 21 bp, synthetic construct
  misc_feature 1..21: note = Description of Artificial Sequence: Synthetic oligonucleotide
  source 1..21: mol_type = other DNA
gggcagaatggtactattaat

SEQ ID NO: 21218 - DNA, 21 bp, synthetic construct
  misc_feature 1..21: note = Description of Artificial Sequence: Synthetic oligonucleotide
  source 1..21: mol_type = other DNA
gtcaccaccgcccaacccgtc

SEQ ID NO: 21219 - DNA, 21 bp, synthetic construct
  misc_feature 1..21: note = Description of Artificial Sequence: Synthetic oligonucleotide
  source 1..21: mol_type = other DNA
tctgggactaaggagatgagt

SEQ ID NO: 21220 - DNA, 21 bp, synthetic construct
  misc_feature 1..21: note = Description of Artificial Sequence: Synthetic oligonucleotide
  source 1..21: mol_type = other DNA
accagccaagccaccacccaa

SEQ ID NO: 21221 - DNA, 21 bp, synthetic construct
  misc_feature 1..21: note = Description of Artificial Sequence: Synthetic oligonucleotide
  source 1..21: mol_type = other DNA
accaaagaaaccacctacctc

SEQ ID NO: 21222 - DNA, 21 bp, synthetic construct
  misc_feature 1..21: note = Description of Artificial Sequence: Synthetic oligonucleotide
  source 1..21: mol_type = other DNA
accggcgtcaacagcaccaga

SEQ ID NO: 21223 - DNA, 21 bp, synthetic construct
  misc_feature 1..21: note = Description of Artificial Sequence: Synthetic oligonucleotide
  source 1..21: mol_type = other DNA
agcgccagcaccagcaccgtc

SEQ ID NO: 21224 - DNA, 21 bp, synthetic construct
  misc_feature 1..21: note = Description of Artificial Sequence: Synthetic oligonucleotide
  source 1..21: mol_type = other DNA
cacaacgccgccgccaccgcc

SEQ ID NO: 21225 - DNA, 21 bp, synthetic construct
  misc_feature 1..21: note = Description of Artificial Sequence: Synthetic oligonucleotide
  source 1..21: mol_type = other DNA
accggccaaagcgccggcacc

SEQ ID NO: 21226 - DNA, 21 bp, synthetic construct
  misc_feature 1..21: note = Description of Artificial Sequence: Synthetic oligonucleotide
  source 1..21: mol_type = other DNA
ggcttcggcgacaaaagcgtc

SEQ ID NO: 21227 - DNA, 21 bp, synthetic construct
  misc_feature 1..21: note = Description of Artificial Sequence: Synthetic oligonucleotide
  source 1..21: mol_type = other DNA
aacagcagccaacccaaaacc

SEQ ID NO: 21228 - DNA, 21 bp, synthetic construct
  misc_feature 1..21: note = Description of Artificial Sequence: Synthetic oligonucleotide
  source 1..21: mol_type = other DNA
accaaacaaaacgcccccctc

SEQ ID NO: 21229 - DNA, 21 bp, synthetic construct
  misc_feature 1..21: note = Description of Artificial Sequence: Synthetic oligonucleotide
  source 1..21: mol_type = other DNA
agccaagaaaaaagcctcggc

SEQ ID NO: 21230 - DNA, 21 bp, synthetic construct
  misc_feature 1..21: note = Description of Artificial Sequence: Synthetic oligonucleotide
  source 1..21: mol_type = other DNA
agcgtcagccccagaaaaggc

SEQ ID NO: 21231 - DNA, 21 bp, synthetic construct
  misc_feature 1..21: note = Description of Artificial Sequence: Synthetic oligonucleotide
  source 1..21: mol_type = other DNA
caggagcatacgaagacttcg

SEQ ID NO: 21232 - DNA, 21 bp, synthetic construct
  misc_feature 1..21: note = Description of Artificial Sequence: Synthetic oligonucleotide
  source 1..21: mol_type = other DNA
gacagcagcaaccccccccaa

SEQ ID NO: 21233 - DNA, 21 bp, synthetic construct
  misc_feature 1..21: note = Description of Artificial Sequence: Synthetic oligonucleotide
  source 1..21: mol_type = other DNA
ggcagccaagaaagcagacac

SEQ ID NO: 21234 - DNA, 21 bp, synthetic construct
  misc_feature 1..21: note = Description of Artificial Sequence: Synthetic oligonucleotide
  source 1..21: mol_type = other DNA
ggcgaaggcaccagccccacc

SEQ ID NO: 21235 - DNA, 21 bp, synthetic construct
  misc_feature 1..21: note = Description of Artificial Sequence: Synthetic oligonucleotide
  source 1..21: mol_type = other DNA
ggcgacagcggcgccaaccac

SEQ ID NO: 21236 - DNA, 21 bp, synthetic construct
  misc_feature 1..21: note = Description of Artificial Sequence: Synthetic oligonucleotide
  source 1..21: mol_type = other DNA
tctggtgatcctagtcgtatt

SEQ ID NO: 21237 - DNA, 21 bp, synthetic construct
  misc_feature 1..21: note = Description of Artificial Sequence: Synthetic oligonucleotide
  source 1..21: mol_type = other DNA
agtgctagttctagtgagaag

SEQ ID NO: 21238 - DNA, 21 bp, synthetic construct
  misc_feature 1..21: note = Description of Artificial Sequence: Synthetic oligonucleotide
  source 1..21: mol_type = other DNA
agttcgaagacgtctaataat

SEQ ID NO: 21239 - DNA, 21 bp, synthetic construct
  misc_feature 1..21: note = Description of Artificial Sequence: Synthetic oligonucleotide
  source 1..21: mol_type = other DNA
gagggttcgagtagtgctgcg

SEQ ID NO: 21240 - DNA, 21 bp, synthetic construct
  misc_feature 1..21: note = Description of Artificial Sequence: Synthetic oligonucleotide
  source 1..21: mol_type = other DNA
ggccaaatcgacggccacaaa

SEQ ID NO: 21241 - DNA, 21 bp, synthetic construct
  misc_feature 1..21: note = Description of Artificial Sequence: Synthetic oligonucleotide
  source 1..21: mol_type = other DNA
ggcgacgccaaagccgcctac

SEQ ID NO: 21242 - DNA, 21 bp, synthetic construct
  misc_feature 1..21: note = Description of Artificial Sequence: Synthetic oligonucleotide
  source 1..21: mol_type = other DNA
gagcgtaatacggcgtcgcat

SEQ ID NO: 21243 - DNA, 21 bp, synthetic construct
  misc_feature 1..21: note = Description of Artificial Sequence: Synthetic oligonucleotide
  source 1..21: mol_type = other DNA
aatggtactgcgcagattagt

SEQ ID NO: 21244 - DNA, 21 bp, synthetic construct
  misc_feature 1..21: note = Description of Artificial Sequence: Synthetic oligonucleotide
  source 1..21: mol_type = other DNA
actacgagttctgggagtgct

SEQ ID NO: 21245 - DNA, 21 bp, synthetic construct
  misc_feature 1..21: note = Description of Artificial Sequence: Synthetic oligonucleotide
  source 1..21: mol_type = other DNA
agccaaggcggccccagcgcc

SEQ ID NO: 21246 - DNA, 21 bp, synthetic construct
  misc_feature 1..21: note = Description of Artificial Sequence: Synthetic oligonucleotide
  source 1..21: mol_type = other DNA
gctacgccgtcgaatacgggg

SEQ ID NO: 21247 - DNA, 21 bp, synthetic construct
  misc_feature 1..21: note = Description of Artificial Sequence: Synthetic oligonucleotide
  source 1..21: mol_type = other DNA
atgaattcgggttcgtcgtct

SEQ ID NO: 21248 - DNA, 21 bp, synthetic construct
  misc_feature 1..21: note = Description of Artificial Sequence: Synthetic oligonucleotide
  source 1..21: mol_type = other DNA
aattcgaatcccagtattagt

SEQ ID NO: 21249 - DNA, 21 bp, synthetic construct
  misc_feature 1..21: note = Description of Artificial Sequence: Synthetic oligonucleotide
  source 1..21: mol_type = other DNA
tctgctgtttcgacgccttcg

SEQ ID NO: 21250 - DNA, 21 bp, synthetic construct
  misc_feature 1..21: note = Description of Artificial Sequence: Synthetic oligonucleotide
  source 1..21: mol_type = other DNA
atcggcggccaaggcggcagc

SEQ ID NO: 21251 - DNA, 21 bp, synthetic construct
  misc_feature 1..21: note = Description of Artificial Sequence: Synthetic oligonucleotide
  source 1..21: mol_type = other DNA
aacagagaaggcagcatggtc

SEQ ID NO: 21252 - DNA, 21 bp, synthetic construct
  misc_feature 1..21: note = Description of Artificial Sequence: Synthetic oligonucleotide
  source 1..21: mol_type = other DNA
actcggagtgagcggagtcag

SEQ ID NO: 21253 - DNA, 21 bp, synthetic construct
  misc_feature 1..21: note = Description of Artificial Sequence: Synthetic oligonucleotide
  source 1..21: mol_type = other DNA
gccaaacccggcagcagcgcc

SEQ ID NO: 21254 - DNA, 21 bp, synthetic construct
  misc_feature 1..21: note = Description of Artificial Sequence: Synthetic oligonucleotide
  source 1..21: mol_type = other DNA
tcggataagactgggaatgtt

SEQ ID NO: 21255 - DNA, 21 bp, synthetic construct
  misc_feature 1..21: note = Description of Artificial Sequence: Synthetic oligonucleotide
  source 1..21: mol_type = other DNA
tcgactcatggtactaaggct

SEQ ID NO: 21256 - DNA, 21 bp, synthetic construct
  misc_feature 1..21: note = Description of Artificial Sequence: Synthetic oligonucleotide
  source 1..21: mol_type = other DNA
tctgctgagactagtaagggg

SEQ ID NO: 21257 - DNA, 21 bp, synthetic construct
  misc_feature 1..21: note = Description of Artificial Sequence: Synthetic oligonucleotide
  source 1..21: mol_type = other DNA
agcaccggcaccagcagcaga

SEQ ID NO: 21258 - DNA, 21 bp, synthetic construct
  misc_feature 1..21: note = Description of Artificial Sequence: Synthetic oligonucleotide
  source 1..21: mol_type = other DNA
acgggtggtacgccttcgccg

SEQ ID NO: 21259 - DNA, 21 bp, synthetic construct
  misc_feature 1..21: note = Description of Artificial Sequence: Synthetic oligonucleotide
  source 1..21: mol_type = other DNA
agcaaaaccaccggccccgcc

SEQ ID NO: 21260 - DNA, 21 bp, synthetic construct
  misc_feature 1..21: note = Description of Artificial Sequence: Synthetic oligonucleotide
  source 1..21: mol_type = other DNA
agcagcatcaccggcggcggc

SEQ ID NO: 21261 - DNA, 21 bp, synthetic construct
  misc_feature 1..21: note = Description of Artificial Sequence: Synthetic oligonucleotide
  source 1..21: mol_type = other DNA
attaaaagtgagtctacgggg

SEQ ID NO: 21262 - DNA, 21 bp, synthetic construct
  misc_feature 1..21: note = Description of Artificial Sequence: Synthetic oligonucleotide
  source 1..21: mol_type = other DNA
accagcagccccagcctcagc

SEQ ID NO: 21263 - DNA, 21 bp, synthetic construct
  misc_feature 1..21: note = Description of Artificial Sequence: Synthetic oligonucleotide
  source 1..21: mol_type = other DNA
ggcgccagagacaaagccaac

SEQ ID NO: 21264 - DNA, 21 bp, synthetic construct
  misc_feature 1..21: note = Description of Artificial Sequence: Synthetic oligonucleotide
  source 1..21: mol_type = other DNA
acccccgaaagcagaagcagc

SEQ ID NO: 21265 - DNA, 21 bp, synthetic construct
  misc_feature 1..21: note = Description of Artificial Sequence: Synthetic oligonucleotide
  source 1..21: mol_type = other DNA
atgggggataagacgtttgct

SEQ ID NO: 21266 - DNA, 21 bp, synthetic construct
  misc_feature 1..21: note = Description of Artificial Sequence: Synthetic oligonucleotide
  source 1..21: mol_type = other DNA
gcgcaggggagtcattcttct

SEQ ID NO: 21267 - DNA, 21 bp, synthetic construct
  misc_feature 1..21: note = Description of Artificial Sequence: Synthetic oligonucleotide
  source 1..21: mol_type = other DNA
ttgaatgatcggtctcctagt

SEQ ID NO: 21268 - DNA, 21 bp, synthetic construct
  misc_feature 1..21: note = Description of Artificial Sequence: Synthetic oligonucleotide
  source 1..21: mol_type = other DNA
ttgaatgctgggcctgggtct

SEQ ID NO: 21269 - DNA, 21 bp, synthetic construct
  misc_feature 1..21: note = Description of Artificial Sequence: Synthetic oligonucleotide
  source 1..21: mol_type = other DNA
aatcggacgggtactaatagt

SEQ ID NO: 21270 - DNA, 21 bp, synthetic construct
  misc_feature 1..21: note = Description of Artificial Sequence: Synthetic oligonucleotide
  source 1..21: mol_type = other DNA
accaacagccccgccagcagc

SEQ ID NO: 21271 - DNA, 21 bp, synthetic construct
  misc_feature 1..21: note = Description of Artificial Sequence: Synthetic oligonucleotide
  source 1..21: mol_type = other DNA
agcaacagcgccaaaatgagc

SEQ ID NO: 21272 - DNA, 21 bp, synthetic construct
  misc_feature 1..21: note = Description of Artificial Sequence: Synthetic oligonucleotide
  source 1..21: mol_type = other DNA
caggcttctggtggtacgagt

SEQ ID NO: 21273 - DNA, 21 bp, synthetic construct
  misc_feature 1..21: note = Description of Artificial Sequence: Synthetic oligonucleotide
  source 1..21: mol_type = other DNA
gaacaagacagcaccaacaga

SEQ ID NO: 21274 - DNA, 21 bp, synthetic construct
  misc_feature 1..21: note = Description of Artificial Sequence: Synthetic oligonucleotide
  source 1..21: mol_type = other DNA
acgcaggcgaaggctagtgcg

SEQ ID NO: 21275 - DNA, 21 bp, synthetic construct
  misc_feature 1..21: note = Description of Artificial Sequence: Synthetic oligonucleotide
  source 1..21: mol_type = other DNA
ctcgccagcggcagccccgcc

SEQ ID NO: 21276 - DNA, 21 bp, synthetic construct
  misc_feature 1..21: note = Description of Artificial Sequence: Synthetic oligonucleotide
  source 1..21: mol_type = other DNA
gacagcaccggcaaaggcagc

SEQ ID NO: 21277 - DNA, 21 bp, synthetic construct
  misc_feature 1..21: note = Description of Artificial Sequence: Synthetic oligonucleotide
  source 1..21: mol_type = other DNA
agcagcagcaccagcagcaga

SEQ ID NO: 21278 - DNA, 21 bp, synthetic construct
  misc_feature 1..21: note = Description of Artificial Sequence: Synthetic oligonucleotide
  source 1..21: mol_type = other DNA
aagaattcgggtactactggt

SEQ ID NO: 21279 - DNA, 21 bp, synthetic construct
  misc_feature 1..21: note = Description of Artificial Sequence: Synthetic oligonucleotide
  source 1..21: mol_type = other DNA
ctggcgaatggggctactcag

SEQ ID NO: 21280 - DNA, 21 bp, synthetic construct
  misc_feature 1..21: note = Description of Artificial Sequence: Synthetic oligonucleotide
  source 1..21: mol_type = other DNA
acttcgggtgggtcttctact

SEQ ID NO: 21281 - DNA, 21 bp, synthetic construct
  misc_feature 1..21: note = Description of Artificial Sequence: Synthetic oligonucleotide
  source 1..21: mol_type = other DNA
gcccaagccaccgccagcgcc

SEQ ID NO: 21282 - DNA, 21 bp, synthetic construct
  misc_feature 1..21: note = Description of Artificial Sequence: Synthetic oligonucleotide
  source 1..21: mol_type = other DNA
cagggtcagtcgagtcctggt

SEQ ID NO: 21283 - DNA, 21 bp, synthetic construct
  misc_feature 1..21: note = Description of Artificial Sequence: Synthetic oligonucleotide
  source 1..21: mol_type = other DNA
accagaaccgacgccaccgtc

SEQ ID NO: 21284 - DNA, 21 bp, synthetic construct
  misc_feature 1..21: note = Description of Artificial Sequence: Synthetic oligonucleotide
  source 1..21: mol_type = other DNA
actgagtctcagaggaatgag

SEQ ID NO: 21285 - DNA, 21 bp, synthetic construct
  misc_feature 1..21: note = Description of Artificial Sequence: Synthetic oligonucleotide
  source 1..21: mol_type = other DNA
agaaccaacgccggccaaggc

SEQ ID NO: 21286 - DNA, 21 bp, synthetic construct
  misc_feature 1..21: note = Description of Artificial Sequence: Synthetic oligonucleotide
  source 1..21: mol_type = other DNA
agtcctaatgggcagaagaat

SEQ ID NO: 21287 - DNA, 21 bp, synthetic construct
  misc_feature 1..21: note = Description of Artificial Sequence: Synthetic oligonucleotide
  source 1..21: mol_type = other DNA
cacatcggcggcaacgccggc

SEQ ID NO: 21288 - DNA, 21 bp, synthetic construct
  misc_feature 1..21: note = Description of Artificial Sequence: Synthetic oligonucleotide
  source 1..21: mol_type = other DNA
gacagcagacccaccatggtc

SEQ ID NO: 21289 - DNA, 21 bp, synthetic construct
  misc_feature 1..21: note = Description of Artificial Sequence: Synthetic oligonucleotide
  source 1..21: mol_type = other DNA
gacggcagacccaccaccggc

SEQ ID NO: 21290 - DNA, 21 bp, synthetic construct
  misc_feature 1..21: note = Description of Artificial Sequence: Synthetic oligonucleotide
  source 1..21: mol_type = other DNA
gataataagtcggggaatatg

SEQ ID NO: 21291 - DNA, 21 bp, synthetic construct
  misc_feature 1..21: note = Description of Artificial Sequence: Synthetic oligonucleotide
  source 1..21: mol_type = other DNA
gcggggacgtctaagaaggac

SEQ ID NO: 21292 - DNA, 21 bp, synthetic construct
  misc_feature 1..21: note = Description of Artificial Sequence: Synthetic oligonucleotide
  source 1..21: mol_type = other DNA
gtccaagacagcagcagaggc

SEQ ID NO: 21293 - DNA, 21 bp, synthetic construct
  misc_feature 1..21: note = Description of Artificial Sequence: Synthetic oligonucleotide
  source 1..21: mol_type = other DNA
gtcgccggcagcagccccgcc

SEQ ID NO: 21294 - DNA, 21 bp, synthetic construct
  misc_feature 1..21: note = Description of Artificial Sequence: Synthetic oligonucleotide
  source 1..21: mol_type = other DNA
caggggcatgggaatggtggg

SEQ ID NO: 21295 - DNA, 21 bp, synthetic construct
  misc_feature 1..21: note = Description of Artificial Sequence: Synthetic oligonucleotide
  source 1..21: mol_type = other DNA
gtcaaacaagacgcccaaagc

SEQ ID NO: 21296 - DNA, 21 bp, synthetic construct
  misc_feature 1..21: note = Description of Artificial Sequence: Synthetic oligonucleotide
  source 1..21: mol_type = other DNA
ggtcagtcgtctaagccgacg

SEQ ID NO: 21297 - DNA, 21 bp, synthetic construct
  misc_feature 1..21: note = Description of Artificial Sequence: Synthetic oligonucleotide
  source 1..21: mol_type = other DNA
gattcgtcgaaggatcgtact

SEQ ID NO: 21298 - DNA, 21 bp, synthetic construct
  misc_feature 1..21: note = Description of Artificial Sequence: Synthetic oligonucleotide
  source 1..21: mol_type = other DNA
ggtacggctgtgcctgcgcat

SEQ ID NO: 21299 - DNA, 21 bp, synthetic construct
  misc_feature 1..21: note = Description of Artificial Sequence: Synthetic oligonucleotide
  source 1..21: mol_type = other DNA
aacgacacccccagaatgagc

SEQ ID NO: 21300 - DNA, 21 bp, synthetic construct
  misc_feature 1..21: note = Description of Artificial Sequence: Synthetic oligonucleotide
  source 1..21: mol_type = other DNA
gagcatcagtctgggtcggct

SEQ ID NO: 21301 - DNA, 21 bp, synthetic construct
  misc_feature 1..21: note = Description of Artificial Sequence: Synthetic oligonucleotide
  source 1..21: mol_type = other DNA
gccagcagcggcagccccacc

SEQ ID NO: 21302 - DNA, 21 bp, synthetic construct
  misc_feature 1..21: note = Description of Artificial Sequence: Synthetic oligonucleotide
  source 1..21: mol_type = other DNA
ggtggtgcgcagccgagtaat

SEQ ID NO: 21303 - DNA, 21 bp, synthetic construct
  misc_feature 1..21: note = Description of Artificial Sequence: Synthetic oligonucleotide
  source 1..21: mol_type = other DNA
accaccgccggcgaaagagcc

SEQ ID NO: 21304 - DNA, 21 bp, synthetic construct
  misc_feature 1..21: note = Description of Artificial Sequence: Synthetic oligonucleotide
  source 1..21: mol_type = other DNA
caaggcaaagaaaaccccctc

SEQ ID NO: 21305 - DNA, 21 bp, synthetic construct
  misc_feature 1..21: note = Description of Artificial Sequence: Synthetic oligonucleotide
  source 1..21: mol_type = other DNA
ggcagcggccaaagcgtcagc

SEQ ID NO: 21306 - DNA, 21 bp, synthetic construct
  misc_feature 1..21: note = Description of Artificial Sequence: Synthetic oligonucleotide
  source 1..21: mol_type = other DNA
gtcgacggcaacacccccaga

SEQ ID NO: 21307 - DNA, 21 bp, synthetic construct
  misc_feature 1..21: note = Description of Artificial Sequence: Synthetic oligonucleotide
  source 1..21: mol_type = other DNA
aaccaaagagacagccccgcc

SEQ ID NO: 21308 - DNA, 21 bp, synthetic construct
  misc_feature 1..21: note = Description of Artificial Sequence: Synthetic oligonucleotide
  source 1..21: mol_type = other DNA
ggtattactaatggtgataag

SEQ ID NO: 21309 - DNA, 21 bp, synthetic construct
  misc_feature 1..21: note = Description of Artificial Sequence: Synthetic oligonucleotide
  source 1..21: mol_type = other DNA
ctccccatcaaagacggcaac

SEQ ID NO: 21310 - DNA, 21 bp, synthetic construct
  misc_feature 1..21: note = Description of Artificial Sequence: Synthetic oligonucleotide
  source 1..21: mol_type = other DNA
aacagcgacagcagaaaccac

SEQ ID NO: 21311 - DNA, 21 bp, synthetic construct
  misc_feature 1..21: note = Description of Artificial Sequence: Synthetic oligonucleotide
  source 1..21: mol_type = other DNA
aatcaggggagtagtcttacg

SEQ ID NO: 21312 - DNA, 21 bp, synthetic construct
  misc_feature 1..21: note = Description of Artificial Sequence: Synthetic oligonucleotide
  source 1..21: mol_type = other DNA
attaatcagagtccttctttg

SEQ ID NO: 21313 - DNA, 21 bp, synthetic construct
  misc_feature 1..21: note = Description of Artificial Sequence: Synthetic oligonucleotide
  source 1..21: mol_type = other DNA
ggcagcgtcgtcaaacccgtc

SEQ ID NO: 21314 - DNA, 21 bp, synthetic construct
  misc_feature 1..21: note = Description of Artificial Sequence: Synthetic oligonucleotide
  source 1..21: mol_type = other DNA
gggagtaatgtgagggttagt

SEQ ID NO: 21315 - DNA, 21 bp, synthetic construct
  misc_feature 1..21: note = Description of Artificial Sequence: Synthetic oligonucleotide
  source 1..21: mol_type = other DNA
agcctccacgcccccaccgcc

SEQ ID NO: 21316 - DNA, 21 bp, synthetic construct
  misc_feature 1..21: note = Description of Artificial Sequence: Synthetic oligonucleotide
  source 1..21: mol_type = other DNA
ctcggcagcagccccgtcacc

SEQ ID NO: 21317 - DNA, 21 bp, synthetic construct
  misc_feature 1..21: note = Description of Artificial Sequence: Synthetic oligonucleotide
  source 1..21: mol_type = other DNA
ggcggcagcagcagacccagc

SEQ ID NO: 21318 - DNA, 21 bp, synthetic construct
  misc_feature 1..21: note = Description of Artificial Sequence: Synthetic oligonucleotide
  source 1..21: mol_type = other DNA
ggtgtgaagggtaatgttggt

SEQ ID NO: 21319 - DNA, 21 bp, synthetic construct
  misc_feature 1..21: note = Description of Artificial Sequence: Synthetic oligonucleotide
  source 1..21: mol_type = other DNA
tcgctgtctaattctaaggct

SEQ ID NO: 21320 - DNA, 21 bp, synthetic construct
  misc_feature 1..21: note = Description of Artificial Sequence: Synthetic oligonucleotide
  source 1..21: mol_type = other DNA
aagctgaatgcttctggtggt

SEQ ID NO: 21321 - DNA, 21 bp, synthetic construct
  misc_feature 1..21: note = Description of Artificial Sequence: Synthetic oligonucleotide
  source 1..21: mol_type = other DNA
ggcaccgtcaccagccacgcc

SEQ ID NO: 21322 - DNA, 21 bp, synthetic construct
  misc_feature 1..21: note = Description of Artificial Sequence: Synthetic oligonucleotide
  source 1..21: mol_type = other DNA
gaccaaagcatccacggcaaa

SEQ ID NO: 21323 - DNA, 21 bp, synthetic construct
  misc_feature 1..21: note = Description of Artificial Sequence: Synthetic oligonucleotide
  source 1..21: mol_type = other DNA
agcggccaaagcaaaggcgtc

SEQ ID NO: 21324 - DNA, 21 bp, synthetic construct
  misc_feature 1..21: note = Description of Artificial Sequence: Synthetic oligonucleotide
  source 1..21: mol_type = other DNA
aaggatggtaagcagactatg

SEQ ID NO: 21325 - DNA, 21 bp, synthetic construct
  misc_feature 1..21: note = Description of Artificial Sequence: Synthetic oligonucleotide
  source 1..21: mol_type = other DNA
agcatcgccaaagaaagactc

SEQ ID NO: 21326 - DNA, 21 bp, synthetic construct
  misc_feature 1..21: note = Description of Artificial Sequence: Synthetic oligonucleotide
  source 1..21: mol_type = other DNA
tctactacgaaggggcctaat

SEQ ID NO: 21327 - DNA, 21 bp, synthetic construct
  misc_feature 1..21: note = Description of Artificial Sequence: Synthetic oligonucleotide
  source 1..21: mol_type = other DNA
gaaagacccggcggcgccaaa

SEQ ID NO: 21328 - DNA, 21 bp, synthetic construct
  misc_feature 1..21: note = Description of Artificial Sequence: Synthetic oligonucleotide
  source 1..21: mol_type = other DNA
ggcgtcgccgccgcccccagc

SEQ ID NO: 21329 - DNA, 21 bp, synthetic construct
  misc_feature 1..21: note = Description of Artificial Sequence: Synthetic oligonucleotide
  source 1..21: mol_type = other DNA
gtcgaaggcagcgtcaccaaa

SEQ ID NO: 21330 - DNA, 21 bp, synthetic construct
  misc_feature 1..21: note = Description of Artificial Sequence: Synthetic oligonucleotide
  source 1..21: mol_type = other DNA
gttggtaatgatactaatcgg

SEQ ID NO: 21331 - DNA, 21 bp, synthetic construct
  misc_feature 1..21: note = Description of Artificial Sequence: Synthetic oligonucleotide
  source 1..21: mol_type = other DNA
aacagcagcaaacccagcacc

SEQ ID NO: 21332 - DNA, 21 bp, synthetic construct
  misc_feature 1..21: note = Description of Artificial Sequence: Synthetic oligonucleotide
  source 1..21: mol_type = other DNA
gtgacttcgactcctattcag

SEQ ID NO: 21333 - DNA, 21 bp, synthetic construct
  misc_feature 1..21: note = Description of Artificial Sequence: Synthetic oligonucleotide
  source 1..21: mol_type = other DNA
atgtctgggggtaatcagccg

SEQ ID NO: 21334 - DNA, 21 bp, synthetic construct
  misc_feature 1..21: note = Description of Artificial Sequence: Synthetic oligonucleotide
  source 1..21: mol_type = other DNA
aagtctggtcagagtgcggtg

SEQ ID NO: 21335 - DNA, 21 bp, synthetic construct
  misc_feature 1..21: note = Description of Artificial Sequence: Synthetic oligonucleotide
  source 1..21: mol_type = other DNA
agcggcaaagaagccgtcaaa

SEQ ID NO: 21336 - DNA, 21 bp, synthetic construct
  misc_feature 1..21: note = Description of Artificial Sequence: Synthetic oligonucleotide
  source 1..21: mol_type = other DNA
cgtagtggtgagactcatact

SEQ ID NO: 21337 - DNA, 21 bp, synthetic construct
  misc_feature 1..21: note = Description of Artificial Sequence: Synthetic oligonucleotide
  source 1..21: mol_type = other DNA
gacagcgccagcaaaatgacc

SEQ ID NO: 21338 - DNA, 21 bp, synthetic construct
  misc_feature 1..21: note = Description of Artificial Sequence: Synthetic oligonucleotide
  source 1..21: mol_type = other DNA
gggtctgcgcaggagccaagg

SEQ ID NO: 21339 - DNA, 21 bp, synthetic construct
  misc_feature 1..21: note = Description of Artificial Sequence: Synthetic oligonucleotide
  source 1..21: mol_type = other DNA
agccaagccaaagaaagcatc

SEQ ID NO: 21340 - DNA, 21 bp, synthetic construct
  misc_feature 1..21: note = Description of Artificial Sequence: Synthetic oligonucleotide
  source 1..21: mol_type = other DNA
agcatcagcagcgacctcaaa

SEQ ID NO: 21341 - DNA, 21 bp, synthetic construct
  misc_feature 1..21: note = Description of Artificial Sequence: Synthetic oligonucleotide
  source 1..21: mol_type = other DNA
ctccccagcaaagccaacctc

SEQ ID NO: 21342 - DNA, 21 bp, synthetic construct
  misc_feature 1..21: note = Description of Artificial Sequence: Synthetic oligonucleotide
  source 1..21: mol_type = other DNA
catgggggtcagccgtcttcg

SEQ ID NO: 21343 - DNA, 21 bp, synthetic construct
  misc_feature 1..21: note = Description of Artificial Sequence: Synthetic oligonucleotide
  source 1..21: mol_type = other DNA
ggcggcagcgaaagcagaaaa

SEQ ID NO: 21344 - DNA, 21 bp, synthetic construct
  misc_feature 1..21: note = Description of Artificial Sequence: Synthetic oligonucleotide
  source 1..21: mol_type = other DNA
atgaatcagacgagggagtct

SEQ ID NO: 21345 - DNA, 21 bp, synthetic construct
  misc_feature 1..21: note = Description of Artificial Sequence: Synthetic oligonucleotide
  source 1..21: mol_type = other DNA
caaaaaaccaacgaagccaga

SEQ ID NO: 21346 - DNA, 21 bp, synthetic construct
  misc_feature 1..21: note = Description of Artificial Sequence: Synthetic oligonucleotide
  source 1..21: mol_type = other DNA
catggggataatagtcggcag

SEQ ID NO: 21347 - DNA, 21 bp, synthetic construct
  misc_feature 1..21: note = Description of Artificial Sequence: Synthetic oligonucleotide
  source 1..21: mol_type = other DNA
gtcagaaccaacgcccccgaa

SEQ ID NO: 21348 - DNA, 21 bp, synthetic construct
  misc_feature 1..21: note = Description of Artificial Sequence: Synthetic oligonucleotide
  source 1..21: mol_type = other DNA
tctgcggatacgaggtcggtt

SEQ ID NO: 21349 - DNA, 21 bp, synthetic construct
  misc_feature 1..21: note = Description of Artificial Sequence: Synthetic oligonucleotide
  source 1..21: mol_type = other DNA
tcgggtaatcataagtcgcag

SEQ ID NO: 21350 - DNA, 21 bp, synthetic construct
  misc_feature 1..21: note = Description of Artificial Sequence: Synthetic oligonucleotide
  source 1..21: mol_type = other DNA
caaaacggcggcaaagtcagc

SEQ ID NO: 21351 - DNA, 21 bp, synthetic construct
  misc_feature 1..21: note = Description of Artificial Sequence: Synthetic oligonucleotide
  source 1..21: mol_type = other DNA
gcgggtgttgcgaatccgtcg

SEQ ID NO: 21352 - DNA, 21 bp, synthetic construct
  misc_feature 1..21: note = Description of Artificial Sequence: Synthetic oligonucleotide
  source 1..21: mol_type = other DNA
aacgtcaacgtcggcaacacc

SEQ ID NO: 21353 - DNA, 21 bp, synthetic construct
  misc_feature 1..21: note = Description of Artificial Sequence: Synthetic oligonucleotide
  source 1..21: mol_type = other DNA
atgagagacaaccacagcatc

SEQ ID NO: 21354 - DNA, 21 bp, synthetic construct
  misc_feature 1..21: note = Description of Artificial Sequence: Synthetic oligonucleotide
  source 1..21: mol_type = other DNA
gtgcaggggggggcgtctcgg

SEQ ID NO: 21355 - DNA, 21 bp, synthetic construct
  misc_feature 1..21: note = Description of Artificial Sequence: Synthetic oligonucleotide
  source 1..21: mol_type = other DNA
tctacggttggtaagccgcat

SEQ ID NO: 21356 - DNA, 21 bp, synthetic construct
  misc_feature 1..21: note = Description of Artificial Sequence: Synthetic oligonucleotide
  source 1..21: mol_type = other DNA
gcgactgctgatactcctaag

SEQ ID NO: 21357 - DNA, 21 bp, synthetic construct
  misc_feature 1..21: note = Description of Artificial Sequence: Synthetic oligonucleotide
  source 1..21: mol_type = other DNA
actattaatgcggctactaag

SEQ ID NO: 21358 - DNA, 21 bp, synthetic construct
  misc_feature 1..21: note = Description of Artificial Sequence: Synthetic oligonucleotide
  source 1..21: mol_type = other DNA
gtcagcggcagcagccccaaa

SEQ ID NO: 21359 - DNA, 21 bp, synthetic construct
  misc_feature 1..21: note = Description of Artificial Sequence: Synthetic oligonucleotide
  source 1..21: mol_type = other DNA
tctgctagttctaagcaggag

SEQ ID NO: 21360 - DNA, 21 bp, synthetic construct
  misc_feature 1..21: note = Description of Artificial Sequence: Synthetic oligonucleotide
  source 1..21: mol_type = other DNA
aagaatgggaattcggttagt

SEQ ID NO: 21361 - DNA, 21 bp, synthetic construct
  misc_feature 1..21: note = Description of Artificial Sequence: Synthetic oligonucleotide
  source 1..21: mol_type = other DNA
agcgcccacaacaaaagcgtc

SEQ ID NO: 21362 - DNA, 21 bp, synthetic construct
  misc_feature 1..21: note = Description of Artificial Sequence: Synthetic oligonucleotide
  source 1..21: mol_type = other DNA
atgagcaacgaaaaaagccac

SEQ ID NO: 21363 - DNA, 21 bp, synthetic construct
  misc_feature 1..21: note = Description of Artificial Sequence: Synthetic oligonucleotide
  source 1..21: mol_type = other DNA
gttcaggcgcaggctagtttg

SEQ ID NO: 21364 - DNA, 21 bp, synthetic construct
  misc_feature 1..21: note = Description of Artificial Sequence: Synthetic oligonucleotide
  source 1..21: mol_type = other DNA
tcggtgactagggagcatgcg

SEQ ID NO: 21365 - DNA, 21 bp, synthetic construct
  misc_feature 1..21: note = Description of Artificial Sequence: Synthetic oligonucleotide
  source 1..21: mol_type = other DNA
attagtactaagaagagtgag

SEQ ID NO: 21366 - DNA, 21 bp, synthetic construct
  misc_feature 1..21: note = Description of Artificial Sequence: Synthetic oligonucleotide
  source 1..21: mol_type = other DNA
acgaatgttagtactactaag

SEQ ID NO: 21367 - DNA, 21 bp, synthetic construct
  misc_feature 1..21: note = Description of Artificial Sequence: Synthetic oligonucleotide
  source 1..21: mol_type = other DNA
atggcgagtggggcgaagcct

SEQ ID NO: 21368 - DNA, 21 bp, synthetic construct
  misc_feature 1..21: note = Description of Artificial Sequence: Synthetic oligonucleotide
  source 1..21: mol_type = other DNA
tcgagtgggtctaaggatcct

SEQ ID NO: 21369 - DNA, 21 bp, synthetic construct
  misc_feature 1..21: note = Description of Artificial Sequence: Synthetic oligonucleotide
  source 1..21: mol_type = other DNA
ggcgtcggcaaagaccaacaa

SEQ ID NO: 21370 - DNA, 21 bp, synthetic construct
  misc_feature 1..21: note = Description of Artificial Sequence: Synthetic oligonucleotide
  source 1..21: mol_type = other DNA
cggggtcagggttcgccgtct

SEQ ID NO: 21371 - DNA, 21 bp, synthetic construct
  misc_feature 1..21: note = Description of Artificial Sequence: Synthetic oligonucleotide
  source 1..21: mol_type = other DNA
gagcaggagaagccggcttcg

SEQ ID NO: 21372 - DNA, 21 bp, synthetic construct
  misc_feature 1..21: note = Description of Artificial Sequence: Synthetic oligonucleotide
  source 1..21: mol_type = other DNA
ggcagcaaccccagcaaaagc

SEQ ID NO: 21373 - DNA, 21 bp, synthetic construct
  misc_feature 1..21: note = Description of Artificial Sequence: Synthetic oligonucleotide
  source 1..21: mol_type = other DNA
gttacttcgcagaatgctgct

SEQ ID NO: 21374 - DNA, 21 bp, synthetic construct
  misc_feature 1..21: note = Description of Artificial Sequence: Synthetic oligonucleotide
  source 1..21: mol_type = other DNA
cacggcgccggcaacgccgtc

SEQ ID NO: 21375 - DNA, 21 bp, synthetic construct
  misc_feature 1..21: note = Description of Artificial Sequence: Synthetic oligonucleotide
  source 1..21: mol_type = other DNA
agttctgagctgtctgggaag

SEQ ID NO: 21376 - DNA, 21 bp, synthetic construct
  misc_feature 1..21: note = Description of Artificial Sequence: Synthetic oligonucleotide
  source 1..21: mol_type = other DNA
gaggttgcgaagggtaatatg

SEQ ID NO: 21377 - DNA, 21 bp, synthetic construct
  misc_feature 1..21: note = Description of Artificial Sequence: Synthetic oligonucleotide
  source 1..21: mol_type = other DNA
ggcagcctcagcgaaaaaggc

SEQ ID NO: 21378 - DNA, 21 bp, synthetic construct
  misc_feature 1..21: note = Description of Artificial Sequence: Synthetic oligonucleotide
  source 1..21: mol_type = other DNA
tacggcagcgaacccggcagc

SEQ ID NO: 21379 - DNA, 21 bp, synthetic construct
  misc_feature 1..21: note = Description of Artificial Sequence: Synthetic oligonucleotide
  source 1..21: mol_type = other DNA
tcgcggtctgaggtgaagact

SEQ ID NO: 21380 - DNA, 21 bp, synthetic construct
  misc_feature 1..21: note = Description of Artificial Sequence: Synthetic oligonucleotide
  source 1..21: mol_type = other DNA
gctaaggagcctaagcctgtg

SEQ ID NO: 21381 - DNA, 21 bp, synthetic construct
  misc_feature 1..21: note = Description of Artificial Sequence: Synthetic oligonucleotide
  source 1..21: mol_type = other DNA
tcggctgtggataaggcgacg

SEQ ID NO: 21382 - DNA, 21 bp, synthetic construct
  misc_feature 1..21: note = Description of Artificial Sequence: Synthetic oligonucleotide
  source 1..21: mol_type = other DNA
agtagtactgcgaagggtaat

SEQ ID NO: 21383 - DNA, 21 bp, synthetic construct
  misc_feature 1..21: note = Description of Artificial Sequence: Synthetic oligonucleotide
  source 1..21: mol_type = other DNA
aatgctgaggcgaggtcggag

SEQ ID NO: 21384 - DNA, 21 bp, synthetic construct
  misc_feature 1..21: note = Description of Artificial Sequence: Synthetic oligonucleotide
  source 1..21: mol_type = other DNA
gaccccagaagcccccccatc

SEQ ID NO: 21385 - DNA, 21 bp, synthetic construct
  misc_feature 1..21: note = Description of Artificial Sequence: Synthetic oligonucleotide
  source 1..21: mol_type = other DNA
gctactgggggtacgcggctt

SEQ ID NO: 21386 - DNA, 21 bp, synthetic construct
  misc_feature 1..21: note = Description of Artificial Sequence: Synthetic oligonucleotide
  source 1..21: mol_type = other DNA
agccaaatgagcagccccaaa

SEQ ID NO: 21387 - DNA, 21 bp, synthetic construct
  misc_feature 1..21: note = Description of Artificial Sequence: Synthetic oligonucleotide
  source 1..21: mol_type = other DNA
caaatgagcaacagcaacacc

SEQ ID NO: 21388 - DNA, 21 bp, synthetic construct
  misc_feature 1..21: note = Description of Artificial Sequence: Synthetic oligonucleotide
  source 1..21: mol_type = other DNA
ggcgtcaacaaacccagcatg

SEQ ID NO: 21389 - DNA, 21 bp, synthetic construct
  misc_feature 1..21: note = Description of Artificial Sequence: Synthetic oligonucleotide
  source 1..21: mol_type = other DNA
accaccaccaacaaactcagc

SEQ ID NO: 21390 - DNA, 21 bp, synthetic construct
  misc_feature 1..21: note = Description of Artificial Sequence: Synthetic oligonucleotide
  source 1..21: mol_type = other DNA
cacaaagtcggcgaccaaggc

SEQ ID NO: 21391 - DNA, 21 bp, synthetic construct
  misc_feature 1..21: note = Description of Artificial Sequence: Synthetic oligonucleotide
  source 1..21: mol_type = other DNA
caaagcagcgcccaaagcatc

SEQ ID NO: 21392 - DNA, 21 bp, synthetic construct
  misc_feature 1..21: note = Description of Artificial Sequence: Synthetic oligonucleotide
  source 1..21: mol_type = other DNA
gttggttctaattcggttagt

SEQ ID NO: 21393 - DNA, 21 bp, synthetic construct
  misc_feature 1..21: note = Description of Artificial Sequence: Synthetic oligonucleotide
  source 1..21: mol_type = other DNA
aaagacaccggcaaagtcggc

SEQ ID NO: 21394 - DNA, 21 bp, synthetic construct
  misc_feature 1..21: note = Description of Artificial Sequence: Synthetic oligonucleotide
  source 1..21: mol_type = other DNA
aagccggttaataataaggag

SEQ ID NO: 21395 - DNA, 21 bp, synthetic construct
  misc_feature 1..21: note = Description of Artificial Sequence: Synthetic oligonucleotide
  source 1..21: mol_type = other DNA
aatcataatagtgcgaattct

SEQ ID NO: 21396 - DNA, 21 bp, synthetic construct
  misc_feature 1..21: note = Description of Artificial Sequence: Synthetic oligonucleotide
  source 1..21: mol_type = other DNA
aatgggcggtcgaattcggcg

SEQ ID NO: 21397 - DNA, 21 bp, synthetic construct
  misc_feature 1..21: note = Description of Artificial Sequence: Synthetic oligonucleotide
  source 1..21: mol_type = other DNA
aattcgggggggtctacgcag

SEQ ID NO: 21398 - DNA, 21 bp, synthetic construct
  misc_feature 1..21: note = Description of Artificial Sequence: Synthetic oligonucleotide
  source 1..21: mol_type = other DNA
accaacaacaccgccagcggc

(The sequence listing continues in the following parts.)
